United States Patent Application Publication US 2007/0042381 A1 - sequence listing, part 79

SEQ ID NO: 3610617 - RNA, 11 nt, Human
ccuaccccacc

SEQ ID NO: 3610618 - RNA, 12 nt, Human
ccuaccccauag

SEQ ID NO: 3610619 - RNA, 19 nt, Human
ccuacccccuccucucugc

SEQ ID NO: 3610620 - RNA, 15 nt, Human
ccuaccccucccagc

SEQ ID NO: 3610621 - RNA, 16 nt, Human
ccuaccccucccagcu

SEQ ID NO: 3610622 - RNA, 18 nt, Human
ccuaccccucccagcuga

SEQ ID NO: 3610623 - RNA, 15 nt, Human
ccuaccccuggcugu

SEQ ID NO: 3610624 - RNA, 16 nt, Human
ccuaccgacccagggu

SEQ ID NO: 3610625 - RNA, 19 nt, Human
ccuaccgagucucuucucc

SEQ ID NO: 3610626 - RNA, 17 nt, Human
ccuaccucaaccuguaa

SEQ ID NO: 3610627 - RNA, 12 nt, Human
ccuaccucagcc

SEQ ID NO: 3610628 - RNA, 16 nt, Human
ccuaccucagccuaga

SEQ ID NO: 3610629 - RNA, 18 nt, Human
ccuaccucagccuagacc

SEQ ID NO: 3610630 - RNA, 19 nt, Human
ccuaccucagguugcuggu

SEQ ID NO: 3610631 - RNA, 23 nt, Human
ccuaccucagguugcugguugcu

SEQ ID NO: 3610632 - RNA, 21 nt, Human
ccuaccugauuggugcaaccc

SEQ ID NO: 3610633 - RNA, 13 nt, Human
ccuaccuguucag

SEQ ID NO: 3610634 - RNA, 17 nt, Human
ccuaccuguucaguguc

SEQ ID NO: 3610635 - RNA, 23 nt, Human
ccuaccuguucagugucccgggc

SEQ ID NO: 3610636 - RNA, 17 nt, Human
ccuaccuucuucaggcu

SEQ ID NO: 3610637 - RNA, 13 nt, Human
ccuacggaccagg

SEQ ID NO: 3610638 - RNA, 17 nt, Human
ccuacuacaucgcccuc

SEQ ID NO: 3610639 - RNA, 18 nt, Human
ccuacuacaucgcccucc

SEQ ID NO: 3610640 - RNA, 16 nt, Human
ccuacuccaaaauguu

SEQ ID NO: 3610641 - RNA, 20 nt, Human
ccuacucccugcagaugcca

SEQ ID NO: 3610642 - RNA, 15 nt, Human
ccuacuccugucuuc

SEQ ID NO: 3610643 - RNA, 18 nt, Human
ccuacuccugucuucugc

SEQ ID NO: 3610644 - RNA, 21 nt, Human
ccuacucuccuugaguguaug

SEQ ID NO: 3610645 - RNA, 14 nt, Human
ccuacugaggauau

SEQ ID NO: 3610646 - RNA, 13 nt, Human
ccuacugcccagg

SEQ ID NO: 3610647 - RNA, 19 nt, Human
ccuacuguaauuugugaua

SEQ ID NO: 3610648 - RNA, 16 nt, Human
ccuacuguucuaaagc

SEQ ID NO: 3610649 - RNA, 22 nt, Human
ccuacuuacccagguggguccc

SEQ ID NO: 3610650 - RNA, 12 nt, Human
ccuacuucucca

SEQ ID NO: 3610651 - RNA, 14 nt, Human
ccuacuuugacuuu

SEQ ID NO: 3610652 - RNA, 14 nt, Human
ccuacuuuuccuuc

SEQ ID NO: 3610653 - RNA, 15 nt, Human
ccuagaaacaacacu

SEQ ID NO: 3610654 - RNA, 16 nt, Human
ccuagaaacaacacug

SEQ ID NO: 3610655 - RNA, 21 nt, Human
ccuagaaauuccccacccuga

SEQ ID NO: 3610656 - RNA, 21 nt, Human
ccuagaagagugugaaaagga

SEQ ID NO: 3610657 - RNA, 19 nt, Human
ccuagaaguuacugaaugc

SEQ ID NO: 3610658 - RNA, 13 nt, Human
ccuagaccagcag

SEQ ID NO: 3610659 - RNA, 23 nt, Human
ccuagaccagcagacagagccag

SEQ ID NO: 3610660 - RNA, 21 nt, Human
ccuagacucggggugcuuccu

SEQ ID NO: 3610661 - RNA, 19 nt, Human
ccuagacuggugcuaaugu

SEQ ID NO: 3610662 - RNA, 17 nt, Human
ccuagagaacgcagccc

SEQ ID NO: 3610663 - RNA, 24 nt, Human
ccuagagaagacaggcuggaagau

SEQ ID NO: 3610664 - RNA, 21 nt, Human
ccuagagaagauaauuguuga

SEQ ID NO: 3610665 - RNA, 23 nt, Human
ccuagagaagcuaaaaccugagc

SEQ ID NO: 3610666 - RNA, 21 nt, Human
ccuagagacagaagcaggcug

SEQ ID NO: 3610667 - RNA, 15 nt, Human
ccuagagccagacca

SEQ ID NO: 3610668 - RNA, 14 nt, Human
ccuagagccugccu

SEQ ID NO: 3610669 - RNA, 17 nt, Human
ccuagagccugccugga

SEQ ID NO: 3610670 - RNA, 18 nt, Human
ccuagagccugccuggag

SEQ ID NO: 3610671 - RNA, 19 nt, Human
ccuagagccugccuggagc

SEQ ID NO: 3610672 - RNA, 13 nt, Human
ccuagaggcccca

SEQ ID NO: 3610673 - RNA, 20 nt, Human
ccuagaggcccuuugcuguc

SEQ ID NO: 3610674 - RNA, 23 nt, Human
ccuagagguacuuuccacuugau

SEQ ID NO: 3610675 - RNA, 12 nt, Human
ccuagaguccca

SEQ ID NO: 3610676 - RNA, 23 nt, Human
ccuagagugagggccugaggucu

SEQ ID NO: 3610677 - RNA, 15 nt, Human
ccuagauaugaauau

SEQ ID NO: 3610678 - RNA, 20 nt, Human
ccugaagucacacagugagu

SEQ ID NO: 3610679 - RNA, 20 nt, Human
ccugaaguuauguguaugug

SEQ ID NO: 3610680 - RNA, 21 nt, Human
ccugaauacccuuuucugacc

SEQ ID NO: 3610681 - RNA, 20 nt, Human
ccugaaucccccuugccacc

SEQ ID NO: 3610682 - RNA, 13 nt, Human
ccugaaugaaaua

SEQ ID NO: 3610683 - RNA, 15 nt, Human
ccugaaugcucugua

SEQ ID NO: 3610684 - RNA, 22 nt, Human
ccugaaugguuccaugccugag

SEQ ID NO: 3610685 - RNA, 23 nt, Human
ccugaaugguuccaugccugagg

SEQ ID NO: 3610686 - RNA, 23 nt, Human
ccugaauguauugaacuuggaaa

SEQ ID NO: 3610687 - RNA, 21 nt, Human
ccugaauucuauuugcugggc

SEQ ID NO: 3610688 - RNA, 12 nt, Human
ccugacaacacu

SEQ ID NO: 3610689 - RNA, 15 nt, Human
ccugacacaccaggc

SEQ ID NO: 3610690 - RNA, 17 nt, Human
ccugacacaccaggcgc

SEQ ID NO: 3610691 - RNA, 13 nt, Human
ccugacacccuuc

SEQ ID NO: 3610692 - RNA, 12 nt, Human
ccugacacugca

SEQ ID NO: 3610693 - RNA, 13 nt, Human
ccugacacuuuaa

SEQ ID NO: 3610694 - RNA, 15 nt, Human
ccugacagaaggugc

SEQ ID NO: 3610695 - RNA, 22 nt, Human
ccugacaggugaggucuguucc

SEQ ID NO: 3610696 - RNA, 19 nt, Human
ccugacaucaaaaaaggca

SEQ ID NO: 3610697 - RNA, 21 nt, Human
ccugacaucaaaaaaggcagu

SEQ ID NO: 3610698 - RNA, 18 nt, Human
ccugacaucacagcagcc

SEQ ID NO: 3610699 - RNA, 21 nt, Human
ccugacaucacagcagccucc

SEQ ID NO: 3610700 - RNA, 17 nt, Human
ccugacauuccuugcug

SEQ ID NO: 3610701 - RNA, 18 nt, Human
ccugacauuccuugcuga

SEQ ID NO: 3610702 - RNA, 16 nt, Human
ccugacauuggagccu

SEQ ID NO: 3610703 - RNA, 21 nt, Human
ccugaccacccuccccucucu

SEQ ID NO: 3610704 - RNA, 23 nt, Human
ccugaccacccuccccucucuug

SEQ ID NO: 3610705 - RNA, 15 nt, Human
ccugaccacucagag

SEQ ID NO: 3610706 - RNA, 22 nt, Human
ccugaccagcugcuccgaggac

SEQ ID NO: 3610707 - RNA, 20 nt, Human
ccugaccaguugcagucacu

SEQ ID NO: 3610708 - RNA, 21 nt, Human
ccugaccaguugcagucacuc

SEQ ID NO: 3610709 - RNA, 13 nt, Human
ccugacccaggcc

SEQ ID NO: 3610710 - RNA, 18 nt, Human
ccugacccaggccgcagc

SEQ ID NO: 3610711 - RNA, 19 nt, Human
ccugacccaggccgcagcu

SEQ ID NO: 3610712 - RNA, 21 nt, Human
ccugacccaggccgcagcucu

SEQ ID NO: 3610713 - RNA, 15 nt, Human
ccugacccagucccc

SEQ ID NO: 3610714 - RNA, 22 nt, Human
ccugacccgucuaauauauaaa

SEQ ID NO: 3610715 - RNA, 19 nt, Human
ccugacccucaucuuucuu

SEQ ID NO: 3610716 - RNA, 23 nt, Human
ccugacccuccaccgcagaagga

SEQ ID NO: 3610717 - RNA, 13 nt, Human
ccugacccugcag

SEQ ID NO: 3610718 - RNA, 14 nt, Human
ccugacccugcaga

SEQ ID NO: 3610719 - RNA, 22 nt, Human
ccugaccucaaaugaugugccu

SEQ ID NO: 3610720 - RNA, 13 nt, Human
ccugaccucccag

SEQ ID NO: 3610721 - RNA, 15 nt, Human
ccugaccucccagcc

SEQ ID NO: 3610722 - RNA, 17 nt, Human
ccugaccucccccuccu

SEQ ID NO: 3610723 - RNA, 15 nt, Human
ccugaccucuugcug

SEQ ID NO: 3610724 - RNA, 16 nt, Human
ccugaccucuugcugu

SEQ ID NO: 3610725 - RNA, 17 nt, Human
ccugaccucuugcuguc

SEQ ID NO: 3610726 - RNA, 13 nt, Human
ccugaccugaggc

SEQ ID NO: 3610727 - RNA, 14 nt, Human
ccugaccugucuca

SEQ ID NO: 3610728 - RNA, 18 nt, Human
ccugaccugugagcccag

SEQ ID NO: 3610729 - RNA, 20 nt, Human
ccugaccugugagcccagcu

SEQ ID NO: 3610730 - RNA, 22 nt, Human
ccugaccuugaggagucuugug

SEQ ID NO: 3610731 - RNA, 17 nt, Human
ccugacgaaacuggccc

SEQ ID NO: 3610732 - RNA, 19 nt, Human
ccugacggcgcccccagug

SEQ ID NO: 3610733 - RNA, 21 nt, Human
ccugacggcgcccccagugug

SEQ ID NO: 3610734 - RNA, 19 nt, Human
ccugacuagggagccaugu

SEQ ID NO: 3610735 - RNA, 14 nt, Human
ccugacucucagca

SEQ ID NO: 3610736 - RNA, 13 nt, Human
ccugacucucugu

SEQ ID NO: 3610737 - RNA, 15 nt, Human
ccugacucucuguga

SEQ ID NO: 3610738 - RNA, 14 nt, Human
ccugacucugcccc

SEQ ID NO: 3610739 - RNA, 16 nt, Human
ccugacugccaagcca

SEQ ID NO: 3610740 - RNA, 16 nt, Human
ccugacugggggcaga

SEQ ID NO: 3610741 - RNA, 17 nt, Human
ccugacugggggcagac

SEQ ID NO: 3610742 - RNA, 12 nt, Human
ccugacuggugc

SEQ ID NO: 3610743 - RNA, 21 nt, Human
ccugacuucaggggcugcccg

SEQ ID NO: 3610744 - RNA, 19 nt, Human
ccugacuuggggagaugga

SEQ ID NO: 3610745 - RNA, 23 nt, Human
ccugacuuggggagauggaguuc

SEQ ID NO: 3610746 - RNA, 17 nt, Human
ccugagaagcugcucca

SEQ ID NO: 3610747 - RNA, 19 nt, Human
ccugagaagcugcuccagg

SEQ ID NO: 3610748 - RNA, 22 nt, Human
ccugagaagcugcuccaggccu

SEQ ID NO: 3610749 - RNA, 23 nt, Human
ccugagaagcugcuccaggccug

SEQ ID NO: 3610750 - RNA, 22 nt, Human
ccugagaagugucuaaaaacac

SEQ ID NO: 3610751 - RNA, 22 nt, Human
ccugagaauaagaaaguuucac

SEQ ID NO: 3610752 - RNA, 18 nt, Human
ccugagaccccuggccuc

SEQ ID NO: 3610753 - RNA, 15 nt, Human
ccugagagaauuggc

SEQ ID NO: 3610754 - RNA, 18 nt, Human
ccugagagaauuggcuca

SEQ ID NO: 3610755 - RNA, 18 nt, Human
ccugagagacauggcuuu

SEQ ID NO: 3610756 - RNA, 18 nt, Human
ccugagagauuuaacauu

SEQ ID NO: 3610757 - RNA, 12 nt, Human
ccugagagcugc

SEQ ID NO: 3610758 - RNA, 15 nt, Human
ccugagaggcaggca

SEQ ID NO: 3610759 - RNA, 17 nt, Human
ccugagaggcaggcaua

SEQ ID NO: 3610760 - RNA, 17 nt, Human
ccugagaucagaguccu

SEQ ID NO: 3610761 - RNA, 17 nt, Human
ccugagauccccugagc

SEQ ID NO: 3610762 - RNA, 14 nt, Human
ccugagauggcccu

SEQ ID NO: 3610763 - RNA, 14 nt, Human
ccugagauuuacac

SEQ ID NO: 3610764 - RNA, 14 nt, Human
ccugagauuuauua

SEQ ID NO: 3610765 - RNA, 11 nt, Human
ccugagauuuc

SEQ ID NO: 3610766 - RNA, 18 nt, Human
ccugagauuucaucugcu

SEQ ID NO: 3610767 - RNA, 23 nt, Human
ccugagcaacagagugagacccu

SEQ ID NO: 3610768 - RNA, 13 nt, Human
ccugagcaacucu

SEQ ID NO: 3610769 - RNA, 16 nt, Human
ccugagcacugccagg

SEQ ID NO: 3610770 - RNA, 17 nt, Human
ccugagcacugccagga

SEQ ID NO: 3610771 - RNA, 19 nt, Human
ccugagcaguccuuggccu

SEQ ID NO: 3610772 - RNA, 22 nt, Human
ccugagcaguccuuggccugcu

SEQ ID NO: 3610773 - RNA, 23 nt, Human
ccugagccaagcuagaauucccu

SEQ ID NO: 3610774 - RNA, 12 nt, Human
ccugagccagau

SEQ ID NO: 3610775 - RNA, 13 nt, Human
ccugagccagggu

SEQ ID NO: 3610776 - RNA, 19 nt, Human
ccugagccagggucuccag

SEQ ID NO: 3610777 - RNA, 20 nt, Human
ccugagccagggucuccaga

SEQ ID NO: 3610778 - RNA, 21 nt, Human
ccugagccagggucuccagaa

SEQ ID NO: 3610779 - RNA, 16 nt, Human
ccugagcccacugugc

SEQ ID NO: 3610780 - RNA, 18 nt, Human
ccugagcccagggaggcc

SEQ ID NO: 3610781 - RNA, 15 nt, Human
ccugagccccaggga

SEQ ID NO: 3610782 - RNA, 16 nt, Human
ccugagccccagggag

SEQ ID NO: 3610783 - RNA, 21 nt, Human
ccugagccccagggugcccag

SEQ ID NO: 3610784 - RNA, 13 nt, Human
ccugagcccccag

SEQ ID NO: 3610785 - RNA, 14 nt, Human
ccugagccccgccc

SEQ ID NO: 3610786 - RNA, 16 nt, Human
ccugagccggccccag

SEQ ID NO: 3610787 - RNA, 13 nt, Human
ccugagccugccg

SEQ ID NO: 3610788 - RNA, 14 nt, Human
ccugagccugccga

SEQ ID NO: 3610789 - RNA, 21 nt, Human
ccugagccugccgagcaaccg

SEQ ID NO: 3610790 - RNA, 19 nt, Human
ccugagcgaguggagucug

SEQ ID NO: 3610791 - RNA, 20 nt, Human
ccugagcgaguggagucugc

SEQ ID NO: 3610792 - RNA, 21 nt, Human
ccugagcgccuggauuucugg

SEQ ID NO: 3610793 - RNA, 19 nt, Human
ccuccaugacugcacagua

SEQ ID NO: 3610794 - RNA, 21 nt, Human
ccuccauggugccucuggagg

SEQ ID NO: 3610795 - RNA, 16 nt, Human
ccuccauuugagaaaa

SEQ ID NO: 3610796 - RNA, 17 nt, Human
ccuccauuugagaaaau

SEQ ID NO: 3610797 - RNA, 15 nt, Human
ccucccaaagugcug

SEQ ID NO: 3610798 - RNA, 18 nt, Human
ccucccaaagugcugaga

SEQ ID NO: 3610799 - RNA, 13 nt, Human
ccucccaacccag

SEQ ID NO: 3610800 - RNA, 22 nt, Human
ccucccaaggggcccaaauucu

SEQ ID NO: 3610801 - RNA, 16 nt, Human
ccucccacccaccgcc

SEQ ID NO: 3610802 - RNA, 15 nt, Human
ccucccacccccagc

SEQ ID NO: 3610803 - RNA, 12 nt, Human
ccucccacccga

SEQ ID NO: 3610804 - RNA, 21 nt, Human
ccucccacccgaugcugcuuu

SEQ ID NO: 3610805 - RNA, 15 nt, Human
ccucccaccucagcc

SEQ ID NO: 3610806 - RNA, 15 nt, Human
ccucccaccucugug

SEQ ID NO: 3610807 - RNA, 19 nt, Human
ccucccaccucugugaccu

SEQ ID NO: 3610808 - RNA, 11 nt, Human
ccucccaccuu

SEQ ID NO: 3610809 - RNA, 14 nt, Human
ccucccacugccca

SEQ ID NO: 3610810 - RNA, 16 nt, Human
ccucccacuucacugc

SEQ ID NO: 3610811 - RNA, 19 nt, Human
ccucccacuuugcuguucc

SEQ ID NO: 3610812 - RNA, 11 nt, Human
ccucccagaaa

SEQ ID NO: 3610813 - RNA, 21 nt, Human
ccucccagaccugccucuucc

SEQ ID NO: 3610814 - RNA, 16 nt, Human
ccucccagagcaccug

SEQ ID NO: 3610815 - RNA, 11 nt, Human
ccucccagagg

SEQ ID NO: 3610816 - RNA, 21 nt, Human
ccucccagaggagccaccagu

SEQ ID NO: 3610817 - RNA, 12 nt, Human
ccucccagaggu

SEQ ID NO: 3610818 - RNA, 21 nt, Human
ccucccagaucggaucuguug

SEQ ID NO: 3610819 - RNA, 13 nt, Human
ccucccagcccua

SEQ ID NO: 3610820 - RNA, 18 nt, Human
ccucccagcccuauggau

SEQ ID NO: 3610821 - RNA, 19 nt, Human
ccucccagcccuauggaug

SEQ ID NO: 3610822 - RNA, 14 nt, Human
ccucccagcucuga

SEQ ID NO: 3610823 - RNA, 14 nt, Human
caguuuauguuuug

SEQ ID NO: 3610824 - RNA, 19 nt, Human
caguuuauguuuuggucca

SEQ ID NO: 3610825 - RNA, 14 nt, Human
caguuuauuccaga

SEQ ID NO: 3610826 - RNA, 18 nt, Human
caguuuauuugaaccaau

SEQ ID NO: 3610827 - RNA, 12 nt, Human
caguuucaauaa

SEQ ID NO: 3610828 - RNA, 13 nt, Human
caguuucaauaaa

SEQ ID NO: 3610829 - RNA, 17 nt, Human
caguuucaauaaaguuu

SEQ ID NO: 3610830 - RNA, 18 nt, Human
caguuucaauaaaguuug

SEQ ID NO: 3610831 - RNA, 15 nt, Human
caguuucagguguuu

SEQ ID NO: 3610832 - RNA, 17 nt, Human
caguuucuaaacuggag

SEQ ID NO: 3610833 - RNA, 19 nt, Human
caguuucuaaacuggagac

SEQ ID NO: 3610834 - RNA, 14 nt, Human
caguuucugccucu

SEQ ID NO: 3610835 - RNA, 22 nt, Human
caguuucuucugcgccucaggc

SEQ ID NO: 3610836 - RNA, 16 nt, Human
caguuucuuucaaaga

SEQ ID NO: 3610837 - RNA, 13 nt, Human
caguuugaaauaa

SEQ ID NO: 3610838 - RNA, 20 nt, Human
caguuugaaauaagcuauuu

SEQ ID NO: 3610839 - RNA, 13 nt, Human
caguuugaaauuc

SEQ ID NO: 3610840 - RNA, 20 nt, Human
caguuugaaauucugaauuu

SEQ ID NO: 3610841 - RNA, 13 nt, Human
caguuugaacaaa

SEQ ID NO: 3610842 - RNA, 24 nt, Human
caguuugaaugcagucuguccagg

SEQ ID NO: 3610843 - RNA, 23 nt, Human
caguuugaggauuaguuuagaac

SEQ ID NO: 3610844 - RNA, 15 nt, Human
caguuugauaacuag

SEQ ID NO: 3610845 - RNA, 21 nt, Human
caguuugaucacacuauuuua

SEQ ID NO: 3610846 - RNA, 22 nt, Human
caguuugcagaaaagcaccugc

SEQ ID NO: 3610847 - RNA, 19 nt, Human
caguuugcuguacuagaga

SEQ ID NO: 3610848 - RNA, 16 nt, Human
caguuugcuuugcccu

SEQ ID NO: 3610849 - RNA, 14 nt, Human
caguuugcuuugua

SEQ ID NO: 3610850 - RNA, 14 nt, Human
caguuuguaaaugu

SEQ ID NO: 3610851 - RNA, 22 nt, Human
caguuuguaaauguuauuucug

SEQ ID NO: 3610852 - RNA, 18 nt, Human
caguuuguagugccacug

SEQ ID NO: 3610853 - RNA, 13 nt, Human
caguuugucagac

SEQ ID NO: 3610854 - RNA, 15 nt, Human
caguuugugugucuu

SEQ ID NO: 3610855 - RNA, 21 nt, Human
caguuugugugucuuaauuau

SEQ ID NO: 3610856 - RNA, 23 nt, Human
caguuuguuaguaugaggcauuu

SEQ ID NO: 3610857 - RNA, 14 nt, Human
caguuuguuggaaa

SEQ ID NO: 3610858 - RNA, 14 nt, Human
caguuuguuuacac

SEQ ID NO: 3610859 - RNA, 12 nt, Human
caguuuuaaaga

SEQ ID NO: 3610860 - RNA, 13 nt, Human
caguuuucagaaa

SEQ ID NO: 3610861 - RNA, 17 nt, Human
caguuuuccaugaaaac

SEQ ID NO: 3610862 - RNA, 11 nt, Human
caguuuuccuu

SEQ ID NO: 3610863 - RNA, 19 nt, Human
caguuuucugagaaagacu

SEQ ID NO: 3610864 - RNA, 20 nt, Human
caguuuucugagaaagacua

SEQ ID NO: 3610865 - RNA, 17 nt, Human
caguuuugguugcuuua

SEQ ID NO: 3610866 - RNA, 12 nt, Human
caguuuuucauu

SEQ ID NO: 3610867 - RNA, 10 nt, Human
caguuuuucu

SEQ ID NO: 3610868 - RNA, 18 nt, Human
caguuuuucuguauuuua

SEQ ID NO: 3610869 - RNA, 13 nt, Human
caguuuuucuuaa

SEQ ID NO: 3610870 - RNA, 19 nt, Human
caguuuuuuuccuucaaga

SEQ ID NO: 3610871 - RNA, 15 nt, Human
cauaaaaacaacuuu

SEQ ID NO: 3610872 - RNA, 17 nt, Human
cauaaaaacaacuuuau

SEQ ID NO: 3610873 - RNA, 20 nt, Human
cauaaaaacaacuuuauacc

SEQ ID NO: 3610874 - RNA, 19 nt, Human
cauaaaaacauuuuaaaaa

SEQ ID NO: 3610875 - RNA, 19 nt, Human
cauaaaaaggacaucagca

SEQ ID NO: 3610876 - RNA, 21 nt, Human
cauaaaaaggacaucagcaaa

SEQ ID NO: 3610877 - RNA, 15 nt, Human
cauaaaaaugaucua

SEQ ID NO: 3610878 - RNA, 11 nt, Human
cauaaaacauu

SEQ ID NO: 3610879 - RNA, 19 nt, Human
cauaaaacauuaagaaaau

SEQ ID NO: 3610880 - RNA, 22 nt, Human
cauaaaaucaaaacaagugaaa

SEQ ID NO: 3610881 - RNA, 21 nt, Human
cauaaacaagaccacguuucu

SEQ ID NO: 3610882 - RNA, 18 nt, Human
cauaaacaaugaugcccu

SEQ ID NO: 3610883 - RNA, 20 nt, Human
cauaaacacaucacagauga

SEQ ID NO: 3610884 - RNA, 20 nt, Human
cauaaaccauuuuuguuacu

SEQ ID NO: 3610885 - RNA, 12 nt, Human
cauaaaccuuaa

SEQ ID NO: 3610886 - RNA, 20 nt, Human
cauaaaccuuaaguaagcaa

SEQ ID NO: 3610887 - RNA, 15 nt, Human
cauaaacugacuuua

SEQ ID NO: 3610888 - RNA, 12 nt, Human
cauaaacuucau

SEQ ID NO: 3610889 - RNA, 19 nt, Human
cauaaagaagauguuuaac

SEQ ID NO: 3610890 - RNA, 20 nt, Human
cauaaagcaaauagacacag

SEQ ID NO: 3610891 - RNA, 18 nt, Human
cauaaagcauaaguauac

SEQ ID NO: 3610892 - RNA, 17 nt, Human
cauaaagcucaaaugaa

SEQ ID NO: 3610893 - RNA, 13 nt, Human
cauaaaggaaaag

SEQ ID NO: 3610894 - RNA, 22 nt, Human
cauaaaggugguaugugugugu

SEQ ID NO: 3610895 - RNA, 22 nt, Human
cauaaagguuauuuucuccuga

SEQ ID NO: 3610896 - RNA, 22 nt, Human
cauaaaguuagaaucuauuuuc

SEQ ID NO: 3610897 - RNA, 11 nt, Human
cauaaaucaac

SEQ ID NO: 3610898 - RNA, 16 nt, Human
cauaaauccaguucua

SEQ ID NO: 3610899 - RNA, 16 nt, Human
cauaaaucuuccaaag

SEQ ID NO: 3610900 - RNA, 13 nt, Human
cauaaaugaauuu

SEQ ID NO: 3610901 - RNA, 16 nt, Human
cauaaaugcagcccau

SEQ ID NO: 3610902 - RNA, 18 nt, Human
cauaaauucaacuuugua

SEQ ID NO: 3610903 - RNA, 22 nt, Human
cauaaauuuuuugaagucuuua

SEQ ID NO: 3610904 - RNA, 15 nt, Human
cauaacaauuccucu

SEQ ID NO: 3610905 - RNA, 16 nt, Human
cauaacaauuccucua

SEQ ID NO: 3610906 - RNA, 17 nt, Human
cauaacagaaugcacca

SEQ ID NO: 3610907 - RNA, 20 nt, Human
cauaacagauuuuuuuugga

SEQ ID NO: 3610908 - RNA, 19 nt, Human
cauaacaggguaaauuauu

SEQ ID NO: 3610909 - RNA, 15 nt, Human
cauaacagugcaggg

SEQ ID NO: 3610910 - RNA, 13 nt, Human
cauaacagugcca

SEQ ID NO: 3610911 - RNA, 14 nt, Human
cauaacagugccau

SEQ ID NO: 3610912 - RNA, 19 nt, Human
cauaacauaaaucugugaa

SEQ ID NO: 3610913 - RNA, 14 nt, Human
cauaacauccagag

SEQ ID NO: 3610914 - RNA, 14 nt, Human
cauaaccacugcuu

SEQ ID NO: 3610915 - RNA, 22 nt, Human
cauaacccaagguaccauccua

SEQ ID NO: 3610916 - RNA, 12 nt, Human
cauaaccccacc

SEQ ID NO: 3610917 - RNA, 16 nt, Human
cauaaccuagccuuag

SEQ ID NO: 3610918 - RNA, 23 nt, Human
cauaaccugucucaccuggacuu

SEQ ID NO: 3610919 - RNA, 17 nt, Human
cauaacggaucagaaau

SEQ ID NO: 3610920 - RNA, 21 nt, Human
cauaacggaucagaaauacag

SEQ ID NO: 3610921 - RNA, 16 nt, Human
cauaacguuuuuccuu

SEQ ID NO: 3610922 - RNA, 17 nt, Human
cauaacguuuuuccuuu

SEQ ID NO: 3610923 - RNA, 21 nt, Human
cauaacguuuuuccuuuaaaa

SEQ ID NO: 3610924 - RNA, 14 nt, Human
cauaacuaaauuug

SEQ ID NO: 3610925 - RNA, 16 nt, Human
cauaacuaaauuugau

SEQ ID NO: 3610926 - RNA, 17 nt, Human
cauaacuaauacagcug

SEQ ID NO: 3610927 - RNA, 22 nt, Human
cauaacuaauacagcugagcua

SEQ ID NO: 3610928 - RNA, 13 nt, Human
cauaacuagaacu

SEQ ID NO: 3610929 - RNA, 18 nt, Human
cauaacucuguaaaaaca

SEQ ID NO: 3610930 - RNA, 23 nt, Human
cauaacuuccuguacuugaaguc

SEQ ID NO: 3610931 - RNA, 20 nt, Human
cauaagaccauaacagccaa

SEQ ID NO: 3610932 - RNA, 15 nt, Human
cauaagauauuuuau

SEQ ID NO: 3610933 - RNA, 20 nt, Human
cauaagccaauuuuucugca

SEQ ID NO: 3610934 - RNA, 23 nt, Human
cauaagccuccauuuaguucuuu

SEQ ID NO: 3610935 - RNA, 19 nt, Human
cauaagcggcguaaguuua

SEQ ID NO: 3610936 - RNA, 14 nt, Human
cauaagcuacugcc

SEQ ID NO: 3610937 - RNA, 17 nt, Human
cauaagcuacugccauc

SEQ ID NO: 3610938 - RNA, 16 nt, Human
cauaagcuuuuucucu

SEQ ID NO: 3610939 - RNA, 21 nt, Human
cauaaggccaguaugauuuau

SEQ ID NO: 3610940 - RNA, 23 nt, Human
cauaagggguuugccauuugaua

SEQ ID NO: 3610941 - RNA, 15 nt, Human
cauaagguuucguuu

SEQ ID NO: 3610942 - RNA, 11 nt, Human
cauaagguuuu

SEQ ID NO: 3610943 - RNA, 16 nt, Human
cauaagguuuuuaugc

SEQ ID NO: 3610944 - RNA, 17 nt, Human
cauaaguaauucaagaa

SEQ ID NO: 3610945 - RNA, 15 nt, Human
cauaaguauuucaaa

SEQ ID NO: 3610946 - RNA, 22 nt, Human
cauaaguccucuagugaaugua

SEQ ID NO: 3610947 - RNA, 21 nt, Human
cauaauaaaaaauuaugacaa

SEQ ID NO: 3610948 - RNA, 18 nt, Human
cauaauaauccugcaaag

SEQ ID NO: 3610949 - RNA, 15 nt, Human
ccuccggacuggugc

SEQ ID NO: 3610950 - RNA, 16 nt, Human
ccuccggacuggugcc

SEQ ID NO: 3610951 - RNA, 18 nt, Human
ccuccggcgucagccucc

SEQ ID NO: 3610952 - RNA, 22 nt, Human
ccuccggcgucagccuccagcc

SEQ ID NO: 3610953 - RNA, 14 nt, Human
ccuccggcuaagca

SEQ ID NO: 3610954 - RNA, 15 nt, Human
ccuccgggucuuccu

SEQ ID NO: 3610955 - RNA, 16 nt, Human
ccuccgggucuuccua

SEQ ID NO: 3610956 - RNA, 15 nt, Human
ccuccguauuucaga

SEQ ID NO: 3610957 - RNA, 16 nt, Human
ccuccgucacuaccug

SEQ ID NO: 3610958 - RNA, 18 nt, Human
ccuccguccaggagccug

SEQ ID NO: 3610959 - RNA, 14 nt, Human
ccuccgugcuuccu

SEQ ID NO: 3610960 - RNA, 13 nt, Human
ccuccguuuuucu

SEQ ID NO: 3610961 - RNA, 21 nt, Human
ccuccuaaaaggcccagagag

SEQ ID NO: 3610962 - RNA, 15 nt, Human
ccuccuaccccuccc

SEQ ID NO: 3610963 - RNA, 17 nt, Human
ccuccuaccccucccag

SEQ ID NO: 3610964 - RNA, 18 nt, Human
ccuccuaccccucccagc

SEQ ID NO: 3610965 - RNA, 22 nt, Human
ccuccuaccgaaaccuugccuu

SEQ ID NO: 3610966 - RNA, 18 nt, Human
ccuccuaucaccuccccu

SEQ ID NO: 3610967 - RNA, 22 nt, Human
ccuccuauucaguucccagaau

SEQ ID NO: 3610968 - RNA, 23 nt, Human
ccugaggaaggaggggaagcugc

SEQ ID NO: 3610969 - RNA, 15 nt, Human
ccugaggacagcugu

SEQ ID NO: 3610970 - RNA, 20 nt, Human
ccugaggacagcuguccucu

SEQ ID NO: 3610971 - RNA, 14 nt, Human
ccugaggagucuga

SEQ ID NO: 3610972 - RNA, 16 nt, Human
ccugaggagucugagg

SEQ ID NO: 3610973 - RNA, 19 nt, Human
ccugaggagucugaggucc

SEQ ID NO: 3610974 - RNA, 16 nt, Human
ccugaggaucagaaag

SEQ ID NO: 3610975 - RNA, 16 nt, Human
ccugaggaugagcugg

SEQ ID NO: 3610976 - RNA, 17 nt, Human
ccugaggaugagcugga

SEQ ID NO: 3610977 - RNA, 14 nt, Human
ccugaggcccagag

SEQ ID NO: 3610978 - RNA, 16 nt, Human
ccugaggcccagaggg

SEQ ID NO: 3610979 - RNA, 11 nt, Human
ccugaggcccu

SEQ ID NO: 3610980 - RNA, 17 nt, Human
ccugaggcccuucucuc

SEQ ID NO: 3610981 - RNA, 19 nt, Human
ccugaggcccuucucucca

SEQ ID NO: 3610982 - RNA, 20 nt, Human
ccugaggcccuucucuccag

SEQ ID NO: 3610983 - RNA, 21 nt, Human
ccugaggcccuucucuccagc

SEQ ID NO: 3610984 - RNA, 18 nt, Human
ccugaggccuagacucug

SEQ ID NO: 3610985 - RNA, 18 nt, Human
ccugaggcuggacuccag

SEQ ID NO: 3610986 - RNA, 19 nt, Human
ccugaggcuggacuccaga

SEQ ID NO: 3610987 - RNA, 15 nt, Human
ccugaggcugggcuc

SEQ ID NO: 3610988 - RNA, 14 nt, Human
ccugaggcuguggu

SEQ ID NO: 3610989 - RNA, 16 nt, Human
ccugaggcugugguca

SEQ ID NO: 3610990 - RNA, 18 nt, Human
ccugagggaaaggccagc

SEQ ID NO: 3610991 - RNA, 18 nt, Human
ccugagggaggaccuggg

SEQ ID NO: 3610992 - RNA, 22 nt, Human
ccugagggaggaccuggggcac

SEQ ID NO: 3610993 - RNA, 22 nt, Human
ccugagggcagaaagguucugc

SEQ ID NO: 3610994 - RNA, 13 nt, Human
ccugagggccccu

SEQ ID NO: 3610995 - RNA, 20 nt, Human
ccugagggccccucugccca

SEQ ID NO: 3610996 - RNA, 18 nt, Human
ccugagggcggggugucu

SEQ ID NO: 3610997 - RNA, 21 nt, Human
ccugaggggcagccugccuug

SEQ ID NO: 3610998 - RNA, 22 nt, Human
ccugaggggcaucugccccucc

SEQ ID NO: 3610999 - RNA, 22 nt, Human
ccugaggucagggagugcuggc

SEQ ID NO: 3611000 - RNA, 16 nt, Human
ccugaggucucgcuga

SEQ ID NO: 3611001 - RNA, 19 nt, Human
ccugaggucuggcugcuug

SEQ ID NO: 3611002 - RNA, 20 nt, Human
ccugaggugaaagggagcua

SEQ ID NO: 3611003 - RNA, 23 nt, Human
ccugaggugaugaagacagcccg

SEQ ID NO: 3611004 - RNA, 15 nt, Human
ccugaggugggccca

SEQ ID NO: 3611005 - RNA, 18 nt, Human
ccugaggugggcccagga

SEQ ID NO: 3611006 - RNA, 15 nt, Human
ccugagguguggggg

SEQ ID NO: 3611007 - RNA, 19 nt, Human
ccugaggugugggggcugc

SEQ ID NO: 3611008 - RNA, 23 nt, Human
ccugaggugugggggcugcagca

SEQ ID NO: 3611009 - RNA, 20 nt, Human
ccugaguaaucgcuuaaaga

SEQ ID NO: 3611010 - RNA, 23 nt, Human
ccugaguaaucgcuuaaagaugu

SEQ ID NO: 3611011 - RNA, 18 nt, Human
ccugaguacuccacacug

SEQ ID NO: 3611012 - RNA, 21 nt, Human
ccugaguagcugggauuacag

SEQ ID NO: 3611013 - RNA, 13 nt, Human
ccugagucaccag

SEQ ID NO: 3611014 - RNA, 15 nt, Human
ccugagucaccagga

SEQ ID NO: 3611015 - RNA, 16 nt, Human
ccugagucagggccca

SEQ ID NO: 3611016 - RNA, 17 nt, Human
ccugagucagggcccag

SEQ ID NO: 3611017 - RNA, 18 nt, Human
ccugagucagggcccaga

SEQ ID NO: 3611018 - RNA, 23 nt, Human
ccugagucagggcccagaggcug

SEQ ID NO: 3611019 - RNA, 22 nt, Human
ccugagucguacagaaagcugc

SEQ ID NO: 3611020 - RNA, 18 nt, Human
ccugagucgugaccugcu

SEQ ID NO: 3611021 - RNA, 14 nt, Human
ccugagucuccugu

SEQ ID NO: 3611022 - RNA, 15 nt, Human
ccugagucuccugug

SEQ ID NO: 3611023 - RNA, 16 nt, Human
ccugagucuccugugc

SEQ ID NO: 3611024 - RNA, 16 nt, Human
ccugagugagagggga

SEQ ID NO: 3611025 - RNA, 21 nt, Human
ccugagugagaggggaggcca

SEQ ID NO: 3611026 - RNA, 22 nt, Human
ccugagugagaggggaggccaa

SEQ ID NO: 3611027 - RNA, 23 nt, Human
ccugagugagaggggaggccaag

SEQ ID NO: 3611028 - RNA, 14 nt, Human
ccugagugccuggc

SEQ ID NO: 3611029 - RNA, 17 nt, Human
ccugagugcuugcuuuu

SEQ ID NO: 3611030 - RNA, 14 nt, Human
ccugaguggugcca

SEQ ID NO: 3611031 - RNA, 18 nt, Human
ccugaguuaggcuuucuc

SEQ ID NO: 3611032 - RNA, 22 nt, Human
ccugaguuaggcuuucucuuca

SEQ ID NO: 3611033 - RNA, 21 nt, Human
ccugaguuccuagccaccgcc

SEQ ID NO: 3611034 - RNA, 14 nt, Human
ccugaguuccugag

SEQ ID NO: 3611035 - RNA, 18 nt, Human
ccugaguugaagagggga

SEQ ID NO: 3611036 - RNA, 19 nt, Human
ccugaguuucaaguauccu

SEQ ID NO: 3611037 - RNA, 19 nt, Human
ccugauaaagaacaucugu

SEQ ID NO: 3611038 - RNA, 17 nt, Human
ccugauaaagcacagcu

SEQ ID NO: 3611039 - RNA, 20 nt, Human
ccugauaugauuuaaaacau

SEQ ID NO: 3611040 - RNA, 22 nt, Human
ccugauauugaaguaaaaaauu

SEQ ID NO: 3611041 - RNA, 20 nt, Human
ccugaucaagucaccggagc

SEQ ID NO: 3611042 - RNA, 17 nt, Human
ccugaucacuagccugu

SEQ ID NO: 3611043 - RNA, 18 nt, Human
ccugaucagaccacggcu

SEQ ID NO: 3611044 - RNA, 19 nt, Human
ccugaucagaccacggcuc

SEQ ID NO: 3611045 - RNA, 14 nt, Human
ccugaucccagaga

SEQ ID NO: 3611046 - RNA, 19 nt, Human
ccugaucccuuccaccugc

SEQ ID NO: 3611047 - RNA, 15 nt, Human
ccugauccuggaggc

SEQ ID NO: 3611048 - RNA, 18 nt, Human
ccugauccuggaggccca

SEQ ID NO: 3611049 - RNA, 15 nt, Human
ccugauccugugaag

SEQ ID NO: 3611050 - RNA, 23 nt, Human
ccugaucgccaaccuuuccccca

SEQ ID NO: 3611051 - RNA, 16 nt, Human
ccugaucucuuccugu

SEQ ID NO: 3611052 - RNA, 14 nt, Human
ccugaugaaaauaa

SEQ ID NO: 3611053 - RNA, 18 nt, Human
ccugaugaaaauaaagaa

SEQ ID NO: 3611054 - RNA, 14 nt, Human
ccugaugacccagg

SEQ ID NO: 3611055 - RNA, 17 nt, Human
ccugaugacccaggcug

SEQ ID NO: 3611056 - RNA, 17 nt, Human
ccugaugagauuuuuaa

SEQ ID NO: 3611057 - RNA, 13 nt, Human
ccugaugcugaca

SEQ ID NO: 3611058 - RNA, 21 nt, Human
ccugaugcuucuucagagacu

SEQ ID NO: 3611059 - RNA, 18 nt, Human
ccugaugcuuuugucuaa

SEQ ID NO: 3611060 - RNA, 17 nt, Human
ccugauggccaggccag

SEQ ID NO: 3611061 - RNA, 16 nt, Human
ccugauggucagcucc

SEQ ID NO: 3611062 - RNA, 22 nt, Human
ccugauggucagcucccuucuc

SEQ ID NO: 3611063 - RNA, 16 nt, Human
ccugauguuaaaauuc

SEQ ID NO: 3611064 - RNA, 13 nt, Human
ccugauuaaagaa

SEQ ID NO: 3611065 - RNA, 13 nt, Human
ccugauugaccug

SEQ ID NO: 3611066 - RNA, 17 nt, Human
ccugauugaccugcucc

SEQ ID NO: 3611067 - RNA, 18 nt, Human
ccugauugguuucucuuc

SEQ ID NO: 3611068 - RNA, 23 nt, Human
ccugauugugucucuugguccug

SEQ ID NO: 3611069 - RNA, 18 nt, Human
ccugauuuaggagaagcc

SEQ ID NO: 3611070 - RNA, 15 nt, Human
ccugauuucuucagg

SEQ ID NO: 3611071 - RNA, 22 nt, Human
ccugauuuuuuuuccuuuuaau

SEQ ID NO: 3611072 - RNA, 17 nt, Human
ccugcaaaaggacucuc

SEQ ID NO: 3611073 - RNA, 19 nt, Human
ccugcaaaaggacucucag

SEQ ID NO: 3611074 - RNA, 19 nt, Human
ccugcaaacagaacagggu

SEQ ID NO: 3611075 - RNA, 20 nt, Human
ccugcaaacagaacaggguc

SEQ ID NO: 3611076 - RNA, 17 nt, Human
ccugcaaacgcugccug

SEQ ID NO: 3611077 - RNA, 14 nt, Human
ccugcaaacucacu

SEQ ID NO: 3611078 - RNA, 22 nt, Human
ccugcaaacucacugcucaaga

SEQ ID NO: 3611079 - RNA, 12 nt, Human
ccugcaaacugg

SEQ ID NO: 3611080 - RNA, 13 nt, Human
ccugcaaacuggg

SEQ ID NO: 3611081 - RNA, 16 nt, Human
ccugcaaacugggaac

SEQ ID NO: 3611082 - RNA, 22 nt, Human
ccugcaaacugggaaccccuuu

SEQ ID NO: 3611083 - RNA, 19 nt, Human
ccugcaaagcccagcuuga

SEQ ID NO: 3611084 - RNA, 22 nt, Human
ccugcaaaguacagguacuuug

SEQ ID NO: 3611085 - RNA, 19 nt, Human
ccugcaacaccuuguuucc

SEQ ID NO: 3611086 - RNA, 20 nt, Human
ccugcaaccaaacucccauc

SEQ ID NO: 3611087 - RNA, 20 nt, Human
ccugcaacucaaggacuuug

SEQ ID NO: 3611088 - RNA, 21 nt, Human
ccugcaagccugucugagacu

SEQ ID NO: 3611089 - RNA, 13 nt, Human
ccugcaaggccca

SEQ ID NO: 3611090 - RNA, 15 nt, Human
ccugcaaggcccaca

SEQ ID NO: 3611091 - RNA, 19 nt, Human
ccugcaaggcccacaggag

SEQ ID NO: 3611092 - RNA, 17 nt, Human
ccugcaagucaguccag

SEQ ID NO: 3611093 - RNA, 19 nt, Human
ccugcaaugaagucucuga

SEQ ID NO: 3611094 - RNA, 21 nt, Human
ccugcaaugaagucucugaag

SEQ ID NO: 3611095 - RNA, 22 nt, Human
ccugcacacaagcccacagcac

SEQ ID NO: 3611096 - RNA, 19 nt, Human
ccugcacagcaggcugcca

SEQ ID NO: 3611097 - RNA, 21 nt, Human
ccugcacagcaggcugccagu

SEQ ID NO: 3611098 - RNA, 19 nt, Human
ccugcacagugucccccag

SEQ ID NO: 3611099 - RNA, 14 nt, Human
ccugcaccaggaga

SEQ ID NO: 3611100 - RNA, 17 nt, Human
ccugcaccaggagacag

SEQ ID NO: 3611101 - RNA, 11 nt, Human
ccugcacccuc

SEQ ID NO: 3611102 - RNA, 16 nt, Human
ccugcacccuccuagg

SEQ ID NO: 3611103 - RNA, 14 nt, Human
cauaauacaaaagg

SEQ ID NO: 3611104 - RNA, 22 nt, Human
cauaauagacuucccacucuag

SEQ ID NO: 3611105 - RNA, 18 nt, Human
cauaaucacaacccuuca

SEQ ID NO: 3611106 - RNA, 16 nt, Human
cauaaucacucuaauu

SEQ ID NO: 3611107 - RNA, 18 nt, Human
cauaauccaguaaaauaa

SEQ ID NO: 3611108 - RNA, 20 nt, Human
cauaaucuaccaacgaaaga

SEQ ID NO: 3611109 - RNA, 23 nt, Human
cauaaucuggacuccucugucca

SEQ ID NO: 3611110 - RNA, 18 nt, Human
cauaaucuguacaaugaa

SEQ ID NO: 3611111 - RNA, 18 nt, Human
aaaguucaacauguuauu

SEQ ID NO: 3611112 - RNA, 20 nt, Human
aaaguucagaguuuucuggg

SEQ ID NO: 3611113 - RNA, 19 nt, Human
aaaguucauaacagugcca

SEQ ID NO: 3611114 - RNA, 21 nt, Human
aaaguucccuacuuccuguga

SEQ ID NO: 3611115 - RNA, 23 nt, Human
aaaguucccuacuuccugugacu

SEQ ID NO: 3611116 - RNA, 12 nt, Human
aaaguucuaaga

SEQ ID NO: 3611117 - RNA, 17 nt, Human
aaaguucuaagauucug

SEQ ID NO: 3611118 - RNA, 21 nt, Human
aaaguucuguacucaaaugua

SEQ ID NO: 3611119 - RNA, 16 nt, Human
aaaguucuguguauuu

SEQ ID NO: 3611120 - RNA, 17 nt, Human
aaaguucuguguuuaau

SEQ ID NO: 3611121 - RNA, 12 nt, Human
aaaguugaauuu

SEQ ID NO: 3611122 - RNA, 19 nt, Human
aaaguugacaccugagaaa

SEQ ID NO: 3611123 - RNA, 20 nt, Human
aaaguugauaaagauuuuuu

SEQ ID NO: 3611124 - RNA, 23 nt, Human
aaaguugauaaagauuuuuuaau

SEQ ID NO: 3611125 - RNA, 14 nt, Human
aaaguugcaaggca

SEQ ID NO: 3611126 - RNA, 21 nt, Human
aaaguugcaaggcaaauguuu

SEQ ID NO: 3611127 - RNA, 18 nt, Human
aaaguugcacggcugcug

SEQ ID NO: 3611128 - RNA, 19 nt, Human
aaaguugcagcuguuuugu

SEQ ID NO: 3611129 - RNA, 20 nt, Human
aaaguugcagcuguuuuguu

SEQ ID NO: 3611130 - RNA, 23 nt, Human
aaaguugcagcuguuuuguugac

SEQ ID NO: 3611131 - RNA, 17 nt, Human
aaaguugccuaaaucca

SEQ ID NO: 3611132 - RNA, 17 nt, Human
aaaguugguaaaccuuu

SEQ ID NO: 3611133 - RNA, 18 nt, Human
aaaguugguauuaauaaa

SEQ ID NO: 3611134 - RNA, 16 nt, Human
aaaguuggugacagau

SEQ ID NO: 3611135 - RNA, 14 nt, Human
aaaguuguacuuua

SEQ ID NO: 3611136 - RNA, 19 nt, Human
aaaguuguacuuuaaaaau

SEQ ID NO: 3611137 - RNA, 17 nt, Human
aaaguuguaugaucugu

SEQ ID NO: 3611138 - RNA, 19 nt, Human
aaaguuguaugaucugugc

SEQ ID NO: 3611139 - RNA, 13 nt, Human
aaaguuguuguaa

SEQ ID NO: 3611140 - RNA, 13 nt, Human
aaaguuuaaaaug

SEQ ID NO: 3611141 - RNA, 16 nt, Human
aaaguuuaauauuaaa

SEQ ID NO: 3611142 - RNA, 12 nt, Human
aaaguuuacaac

SEQ ID NO: 3611143 - RNA, 16 nt, Human
aaaguuuacaacauaa

SEQ ID NO: 3611144 - RNA, 15 nt, Human
aaaguuuacaguaaa

SEQ ID NO: 3611145 - RNA, 14 nt, Human
aaaguuuccauaug

SEQ ID NO: 3611146 - RNA, 10 nt, Human
aaaguuuccg

SEQ ID NO: 3611147 - RNA, 12 nt, Human
aaaguuucucag

SEQ ID NO: 3611148 - RNA, 13 nt, Human
aaaguuugaucuu

SEQ ID NO: 3611149 - RNA, 13 nt, Human
aaaguuugccaga

SEQ ID NO: 3611150 - RNA, 16 nt, Human
aaaguuuuacaaaggg

SEQ ID NO: 3611151 - RNA, 13 nt, Human
aaaguuuuauaua

SEQ ID NO: 3611152 - RNA, 16 nt, Human
aaaguuuuauauauua

SEQ ID NO: 3611153 - RNA, 12 nt, Human
aaaguuuugaaa

SEQ ID NO: 3611154 - RNA, 13 nt, Human
aaaguuuuguaaa

SEQ ID NO: 3611155 - RNA, 11 nt, Human
aaaguuuuuua

SEQ ID NO: 3611156 - RNA, 18 nt, Human
aaauaaaaaagucucuau

SEQ ID NO: 3611157 - RNA, 13 nt, Human
aaauaaaaacaaa

SEQ ID NO: 3611158 - RNA, 23 nt, Human
aaauaaaaacuaaauuguaaacu

SEQ ID NO: 3611159 - RNA, 15 nt, Human
aaauaaaaacuaauu

SEQ ID NO: 3611160 - RNA, 13 nt, Human
aaauaaaaacuau

SEQ ID NO: 3611161 - RNA, 14 nt, Human
aaauaaaaagugac

SEQ ID NO: 3611162 - RNA, 12 nt, Human
aaauaaaaaguu

SEQ ID NO: 3611163 - RNA, 13 nt, Human
aaauaaaaaguua

SEQ ID NO: 3611164 - RNA, 15 nt, Human
aaauaaaaaguuaaa

SEQ ID NO: 3611165 - RNA, 16 nt, Human
aaauaaaaauaaauuc

SEQ ID NO: 3611166 - RNA, 15 nt, Human
aaauaaaaauggaua

SEQ ID NO: 3611167 - RNA, 16 nt, Human
aaauaaaaauucugaa

SEQ ID NO: 3611168 - RNA, 12 nt, Human
aaauaaaacauu

SEQ ID NO: 3611169 - RNA, 15 nt, Human
aaauaaaacauuuua

SEQ ID NO: 3611170 - RNA, 13 nt, Human
aaauaaaaccuuu

SEQ ID NO: 3611171 - RNA, 14 nt, Human
aaauaaaaccuuuc

SEQ ID NO: 3611172 - RNA, 17 nt, Human
aaauaaaaggaagccaa

SEQ ID NO: 3611173 - RNA, 19 nt, Human
aaauaaaaggacugugauu

SEQ ID NO: 3611174 - RNA, 13 nt, Human
aaauaaaauaacc

SEQ ID NO: 3611175 - RNA, 12 nt, Human
aaauaaaauaua

SEQ ID NO: 3611176 - RNA, 14 nt, Human
aaauaaaaugaaaa

SEQ ID NO: 3611177 - RNA, 15 nt, Human
aaauaaaaugaaaau

SEQ ID NO: 3611178 - RNA, 21 nt, Human
aaauaaaaugaaaauuguauu

SEQ ID NO: 3611179 - RNA, 15 nt, Human
aaauaaaauuaagaa

SEQ ID NO: 3611180 - RNA, 16 nt, Human
aaauaaaauuguacau

SEQ ID NO: 3611181 - RNA, 15 nt, Human
aaauaaaauuuguug

SEQ ID NO: 3611182 - RNA, 19 nt, Human
aaauaaaauuuguugcaua

SEQ ID NO: 3611183 - RNA, 19 nt, Human
aaauaaacacauagauuca

SEQ ID NO: 3611184 - RNA, 12 nt, Human
aaauaaacacug

SEQ ID NO: 3611185 - RNA, 14 nt, Human
aaauaaaccacugu

SEQ ID NO: 3611186 - RNA, 14 nt, Human
aaauaaaccuuaau

SEQ ID NO: 3611187 - RNA, 16 nt, Human
aaauaaacgucuuaaa

SEQ ID NO: 3611188 - RNA, 13 nt, Human
aaauaaacuuucu

SEQ ID NO: 3611189 - RNA, 21 nt, Human
aaauaaacuuucuuaauauuu

SEQ ID NO: 3611190 - RNA, 15 nt, Human
aaauaaagaaaagau

SEQ ID NO: 3611191 - RNA, 14 nt, Human
aaauaaagaaguau

SEQ ID NO: 3611192 - RNA, 13 nt, Human
aaauaaagaaugg

SEQ ID NO: 3611193 - RNA, 14 nt, Human
aaauaaagaaugga

SEQ ID NO: 3611194 - RNA, 16 nt, Human
aaauaaagaauggaaa

SEQ ID NO: 3611195 - RNA, 23 nt, Human
aaauaaaggaugugauuguggaa

SEQ ID NO: 3611196 - RNA, 16 nt, Human
aaauaaaguauauaua

SEQ ID NO: 3611197 - RNA, 18 nt, Human
aaauaaaguaucaugcau

SEQ ID NO: 3611198 - RNA, 20 nt, Human
aaauaaaguuugcuuagaaa

SEQ ID NO: 3611199 - RNA, 16 nt, Human
aaauaaauagcuauau

SEQ ID NO: 3611200 - RNA, 12 nt, Human
aaauaaauauca

SEQ ID NO: 3611201 - RNA, 22 nt, Human
aaauaaaugagcuauguauuaa

SEQ ID NO: 3611202 - RNA, 13 nt, Human
aaauaaaugcaau

SEQ ID NO: 3611203 - RNA, 21 nt, Human
aaauaaaugguuuggugcuuu

SEQ ID NO: 3611204 - RNA, 12 nt, Human
aaauaaauguac

SEQ ID NO: 3611205 - RNA, 18 nt, Human
aaauaaauuguauauuca

SEQ ID NO: 3611206 - RNA, 19 nt, Human
aaauaaauuguauauucac

SEQ ID NO: 3611207 - RNA, 21 nt, Human
aaauaaauuguauauucacuu

SEQ ID NO: 3611208 - RNA, 13 nt, Human
aaauaaauuguuu

SEQ ID NO: 3611209 - RNA, 15 nt, Human
aaauaacaaaaugga

SEQ ID NO: 3611210 - RNA, 20 nt, Human
aaauaacaacuuuuuuuucu

SEQ ID NO: 3611211 - RNA, 15 nt, Human
aaauaacaauguuaa

SEQ ID NO: 3611212 - RNA, 16 nt, Human
aaauaacaauguuaag

SEQ ID NO: 3611213 - RNA, 19 nt, Human
aaauaacaauguuaaggaa

SEQ ID NO: 3611214 - RNA, 21 nt, Human
aaauaacacacauauaaacau

SEQ ID NO: 3611215 - RNA, 15 nt, Human
aaauaacacagagag

SEQ ID NO: 3611216 - RNA, 23 nt, Human
aaauaacacagagagacagacuu

SEQ ID NO: 3611217 - RNA, 17 nt, Human
aaauaacagaagaaaau

SEQ ID NO: 3611218 - RNA, 17 nt, Human
aaauaacagauuucuca

SEQ ID NO: 3611219 - RNA, 18 nt, Human
aaauaaccaaucuacaau

SEQ ID NO: 3611220 - RNA, 18 nt, Human
aaauaacugaauuuggag

SEQ ID NO: 3611221 - RNA, 16 nt, Human
aaauaacuggaaaaca

SEQ ID NO: 3611222 - RNA, 15 nt, Human
aaauaacuguaauua

SEQ ID NO: 3611223 - RNA, 24 nt, Human
aaauaagaaacaacucuuugagaa

SEQ ID NO: 3611224 - RNA, 14 nt, Human
aaauaagaaacuuu

SEQ ID NO: 3611225 - RNA, 16 nt, Human
aaauaagaaauaaugc

SEQ ID NO: 3611226 - RNA, 15 nt, Human
aaauaagaagaaugc

SEQ ID NO: 3611227 - RNA, 20 nt, Human
aaauaagaagaaugcuuaau

SEQ ID NO: 3611228 - RNA, 12 nt, Human
aaauaagagaga

SEQ ID NO: 3611229 - RNA, 16 nt, Human
aaauaagauucuaacg

SEQ ID NO: 3611230 - RNA, 16 nt, Human
aaauaaggaaaagcuu

SEQ ID NO: 3611231 - RNA, 19 nt, Human
aaauaaggcacccaucugu

SEQ ID NO: 3611232 - RNA, 18 nt, Human
aaauaagggcagagucac

SEQ ID NO: 3611233 - RNA, 16 nt, Human
aaauaagguguauugc

SEQ ID NO: 3611234 - RNA, 15 nt, Human
aaauaaguauuuaua

SEQ ID NO: 3611235 - RNA, 15 nt, Human
aaauaagucaacagu

SEQ ID NO: 3611236 - RNA, 18 nt, Human
aaauaagucaacaguaaa

SEQ ID NO: 3611237 - RNA, 20 nt, Human
aaauaaguguauuuugaaau

SEQ ID NO: 3611238 - RNA, 12 nt, Human
aaauaauaaauu

SEQ ID NO: 3611239 - RNA, 17 nt, Human
aaauaauacugcugaga

SEQ ID NO: 3611240 - RNA, 12 nt, Human
aaauaauaugca

SEQ ID NO: 3611241 - RNA, 13 nt, Human
aaauaauaugcau

SEQ ID NO: 3611242 - RNA, 13 nt, Human
aaauaaucuauuu

SEQ ID NO: 3611243 - RNA, 22 nt, Human
aaauaaucuauuucuaugagaa

SEQ ID NO: 3611244 - RNA, 15 nt, Human
aaauaaucucugauu

SEQ ID NO: 3611245 - RNA, 19 nt, Human
aaauaaugaauacauuucc

SEQ ID NO: 3611246 - RNA, 12 nt, Human
aaauaaugcaaa

SEQ ID NO: 3611247 - RNA, 13 nt, Human
aaauaaugcuaca

SEQ ID NO: 3611248 - RNA, 12 nt, Human
aaauaaugcuuu

SEQ ID NO: 3611249 - RNA, 13 nt, Human
aaauaaugucucu

SEQ ID NO: 3611250 - RNA, 13 nt, Human
aaauaaugucuug

SEQ ID NO: 3611251 - RNA, 15 nt, Human
aaauaaugucuuguu

SEQ ID NO: 3611252 - RNA, 13 nt, Human
aaauaaugugaaa

SEQ ID NO: 3611253 - RNA, 17 nt, Human
aaauaauuagguauuuu

SEQ ID NO: 3611254 - RNA, 12 nt, Human
aaauaauuauuu

SEQ ID NO: 3611255 - RNA, 13 nt, Human
aaauaauucuaaa

SEQ ID NO: 3611256 - RNA, 18 nt, Human
aaauaauucuuuuuuauu

SEQ ID NO: 3611257 - RNA, 19 nt, Human
aaauaauucuuuuuuauua

SEQ ID NO: 3611258 - RNA, 22 nt, Human
aaauaauucuuuuuuauuaauc

SEQ ID NO: 3611259 - RNA, 19 nt, Human
ccugcuucagauguggagc

SEQ ID NO: 3611260 - RNA, 20 nt, Human
ccugcuucagccucccacag

SEQ ID NO: 3611261 - RNA, 16 nt, Human
ccugcuucaugcucag

SEQ ID NO: 3611262 - RNA, 19 nt, Human
ccugcuuccaccucacccc

SEQ ID NO: 3611263 - RNA, 20 nt, Human
ccugcuuccaccucacccca

SEQ ID NO: 3611264 - RNA, 22 nt, Human
ccugcuuccaggaaacuccaca

SEQ ID NO: 3611265 - RNA, 18 nt, Human
ccugcuucccaccucccu

SEQ ID NO: 3611266 - RNA, 23 nt, Human
ccugcuucccaccucccugccca

SEQ ID NO: 3611267 - RNA, 14 nt, Human
ccugcuuccugcuu

SEQ ID NO: 3611268 - RNA, 18 nt, Human
ccugcuuccugcuugcca

SEQ ID NO: 3611269 - RNA, 16 nt, Human
ccugcuucuccagccu

SEQ ID NO: 3611270 - RNA, 12 nt, Human
ccugcuucucug

SEQ ID NO: 3611271 - RNA, 21 nt, Human
ccugcuugaugggauucugga

SEQ ID NO: 3611272 - RNA, 23 nt, Human
ccugcuugccaaggcagaggccu

SEQ ID NO: 3611273 - RNA, 23 nt, Human
ccugcuuggggggugaugagggc

SEQ ID NO: 3611274 - RNA, 20 nt, Human
ccugcuuggguggagaagcc

SEQ ID NO: 3611275 - RNA, 18 nt, Human
ccugcuugucccugccca

SEQ ID NO: 3611276 - RNA, 19 nt, Human
ccugcuuuaaccaccccau

SEQ ID NO: 3611277 - RNA, 21 nt, Human
ccugcuuuagaauguuuuccu

SEQ ID NO: 3611278 - RNA, 22 nt, Human
ccugcuuucaagaccccugucu

SEQ ID NO: 3611279 - RNA, 16 nt, Human
ccugcuuucagauacu

SEQ ID NO: 3611280 - RNA, 18 nt, Human
ccugcuuugcgugcccgg

SEQ ID NO: 3611281 - RNA, 17 nt, Human
ccugcuuugggcugccc

SEQ ID NO: 3611282 - RNA, 18 nt, Human
ccugcuuugggcugcccu

SEQ ID NO: 3611283 - RNA, 21 nt, Human
ccugcuuugggcugcccuggu

SEQ ID NO: 3611284 - RNA, 15 nt, Human
ccugcuuuucacugc

SEQ ID NO: 3611285 - RNA, 19 nt, Human
ccugcuuuucacugcugca

SEQ ID NO: 3611286 - RNA, 15 nt, Human
ccugcuuuuuggaaa

SEQ ID NO: 3611287 - RNA, 16 nt, Human
ccugcuuuuuguguuu

SEQ ID NO: 3611288 - RNA, 17 nt, Human
ccuggaaaaauuccaga

SEQ ID NO: 3611289 - RNA, 16 nt, Human
ccuggaaaccacaguc

SEQ ID NO: 3611290 - RNA, 23 nt, Human
ccuggaaaggcucagucucagga

SEQ ID NO: 3611291 - RNA, 17 nt, Human
ccuggaaccuugcuguc

SEQ ID NO: 3611292 - RNA, 20 nt, Human
ccuggaacugucucucauga

SEQ ID NO: 3611293 - RNA, 12 nt, Human
ccuggaagacag

SEQ ID NO: 3611294 - RNA, 14 nt, Human
ccuggaagacagag

SEQ ID NO: 3611295 - RNA, 17 nt, Human
ccuggaagagcagcccu

SEQ ID NO: 3611296 - RNA, 18 nt, Human
ccuggaagcagugcccag

SEQ ID NO: 3611297 - RNA, 20 nt, Human
ccuggaagcagugcccaggu

SEQ ID NO: 3611298 - RNA, 23 nt, Human
ccuggaagcagugcccagguggc

SEQ ID NO: 3611299 - RNA, 23 nt, Human
ccuggaagcauuuguuucuacuu

SEQ ID NO: 3611300 - RNA, 15 nt, Human
ccuggaagccagcuu

SEQ ID NO: 3611301 - RNA, 20 nt, Human
ccuggaagcccucucuggcu

SEQ ID NO: 3611302 - RNA, 18 nt, Human
ccuggaagcuguguccuu

SEQ ID NO: 3611303 - RNA, 20 nt, Human
ccuggaagcuguguccuugc

SEQ ID NO: 3611304 - RNA, 15 nt, Human
ccuggaagcuuuguc

SEQ ID NO: 3611305 - RNA, 13 nt, Human
ccuggaagggcua

SEQ ID NO: 3611306 - RNA, 18 nt, Human
ccuggaauauauaaccag

SEQ ID NO: 3611307 - RNA, 23 nt, Human
ccuggaauuagcuuggggccagg

SEQ ID NO: 3611308 - RNA, 20 nt, Human
ccugaccucuugcugucucu

SEQ ID NO: 3611309 - RNA, 24 nt, Human
ccugaccucuugcugucucugcuc

SEQ ID NO: 3611310 - RNA, 14 nt, Human
ccugaccugaggcu

SEQ ID NO: 3611311 - RNA, 14 nt, Human
ccugaccuggcccc

SEQ ID NO: 3611312 - RNA, 23 nt, Human
ccugaccuugaggagucuugugu

SEQ ID NO: 3611313 - RNA, 18 nt, Human
ccugacgaaacuggcccc

SEQ ID NO: 3611314 - RNA, 19 nt, Human
ccugacgagauaagcaguu

SEQ ID NO: 3611315 - RNA, 20 nt, Human
ccugacggcgcccccagugu

SEQ ID NO: 3611316 - RNA, 20 nt, Human
ccugacgucugaagcuugac

SEQ ID NO: 3611317 - RNA, 10 nt, Human
ccugacucaa

SEQ ID NO: 3611318 - RNA, 16 nt, Human
ccugacucaucauuug

SEQ ID NO: 3611319 - RNA, 13 nt, Human
ccugacucauucu

SEQ ID NO: 3611320 - RNA, 13 nt, Human
ccugacuccccca

SEQ ID NO: 3611321 - RNA, 13 nt, Human
ccugacuccucua

SEQ ID NO: 3611322 - RNA, 15 nt, Human
ccugacuccucuaag

SEQ ID NO: 3611323 - RNA, 17 nt, Human
ccugacucugcccccug

SEQ ID NO: 3611324 - RNA, 22 nt, Human
ccugacucugcccccugcuggc

SEQ ID NO: 3611325 - RNA, 14 nt, Human
ccugacugccaagc

SEQ ID NO: 3611326 - RNA, 15 nt, Human
ccugacugccaagcc

SEQ ID NO: 3611327 - RNA, 16 nt, Human
ccugacugcccagcau

SEQ ID NO: 3611328 - RNA, 22 nt, Human
ccugacugcccagcauuugggu

SEQ ID NO: 3611329 - RNA, 13 nt, Human
ccugacugcucag

SEQ ID NO: 3611330 - RNA, 23 nt, Human
ccugacuggugcuauaggcugga

SEQ ID NO: 3611331 - RNA, 20 nt, Human
ccugacuucaggggcugccc

SEQ ID NO: 3611332 - RNA, 18 nt, Human
ccugacuuuucuguggau

SEQ ID NO: 3611333 - RNA, 14 nt, Human
ccugagaaauguua

SEQ ID NO: 3611334 - RNA, 15 nt, Human
ccugagaagcugcuc

SEQ ID NO: 3611335 - RNA, 20 nt, Human
ccugagacaaauggaggccu

SEQ ID NO: 3611336 - RNA, 18 nt, Human
ccugagacccaggacucc

SEQ ID NO: 3611337 - RNA, 12 nt, Human
ccugagaggcag

SEQ ID NO: 3611338 - RNA, 20 nt, Human
ccugagagucagcucucugc

SEQ ID NO: 3611339 - RNA, 15 nt, Human
ccugagauccccuga

SEQ ID NO: 3611340 - RNA, 18 nt, Human
ccugagauccccugagcc

SEQ ID NO: 3611341 - RNA, 18 nt, Human
ccugagaucucugcagga

SEQ ID NO: 3611342 - RNA, 18 nt, Human
ccugagaugggcuuccca

SEQ ID NO: 3611343 - RNA, 22 nt, Human
ccugagaugguaugcacaauuc

SEQ ID NO: 3611344 - RNA, 19 nt, Human
ccugagauuuauuaaagaa

SEQ ID NO: 3611345 - RNA, 17 nt, Human
ccugagauuucaucugc

SEQ ID NO: 3611346 - RNA, 22 nt, Human
ccugagauuucaucugcucucc

SEQ ID NO: 3611347 - RNA, 18 nt, Human
ccugagcaacucuugauu

SEQ ID NO: 3611348 - RNA, 19 nt, Human
ccugagcaaugucugugcu

SEQ ID NO: 3611349 - RNA, 16 nt, Human
ccugagcaccucccag

SEQ ID NO: 3611350 - RNA, 22 nt, Human
ccugagcaccucccagccccug

SEQ ID NO: 3611351 - RNA, 15 nt, Human
ccugagcacugccag

SEQ ID NO: 3611352 - RNA, 20 nt, Human
ccugagcacugccaggaggg

SEQ ID NO: 3611353 - RNA, 14 nt, Human
ccugagcaguccuu

SEQ ID NO: 3611354 - RNA, 13 nt, Human
ccugagccaagcu

SEQ ID NO: 3611355 - RNA, 20 nt, Human
ccugagccagauuucacucu

SEQ ID NO: 3611356 - RNA, 23 nt, Human
ccugagccagggucuccagaaag

SEQ ID NO: 3611357 - RNA, 12 nt, Human
ccugagcccacu

SEQ ID NO: 3611358 - RNA, 14 nt, Human
ccugagcccaggga

SEQ ID NO: 3611359 - RNA, 15 nt, Human
ccugagcccagggag

SEQ ID NO: 3611360 - RNA, 11 nt, Human
ccugagcccca

SEQ ID NO: 3611361 - RNA, 17 nt, Human
ccugagccccagggaga

SEQ ID NO: 3611362 - RNA, 21 nt, Human
ccugagccccgcccucuuccu

SEQ ID NO: 3611363 - RNA, 23 nt, Human
ccugagccccgcccucuuccuga

SEQ ID NO: 3611364 - RNA, 12 nt, Human
ccugagccccuu

SEQ ID NO: 3611365 - RNA, 16 nt, Human
ccugagccccuuccuu

SEQ ID NO: 3611366 - RNA, 22 nt, Human
ccugagcccuacucccugcaga

SEQ ID NO: 3611367 - RNA, 12 nt, Human
ccugagccugcc

SEQ ID NO: 3611368 - RNA, 20 nt, Human
ccugagccugccgagcaacc

SEQ ID NO: 3611369 - RNA, 12 nt, Human
ccugagcgcucc

SEQ ID NO: 3611370 - RNA, 11 nt, Human
ccugagcuaga

SEQ ID NO: 3611371 - RNA, 13 nt, Human
ccugagcucagcg

SEQ ID NO: 3611372 - RNA, 12 nt, Human
ccugagcucccc

SEQ ID NO: 3611373 - RNA, 15 nt, Human
ccugagcucggugga

SEQ ID NO: 3611374 - RNA, 19 nt, Human
ccugagcucgguggaccca

SEQ ID NO: 3611375 - RNA, 12 nt, Human
ccugagcuggga

SEQ ID NO: 3611376 - RNA, 16 nt, Human
ccugagcuuggccaga

SEQ ID NO: 3611377 - RNA, 18 nt, Human
ccugagcuuuggacacac

SEQ ID NO: 3611378 - RNA, 18 nt, Human
ccugagcuuuggacgcac

SEQ ID NO: 3611379 - RNA, 18 nt, Human
ccugaggaacccuuacag

SEQ ID NO: 3611380 - RNA, 19 nt, Human
ccugaggaagagggacugu

SEQ ID NO: 3611381 - RNA, 19 nt, Human
ccugaggacagaugccucc

SEQ ID NO: 3611382 - RNA, 16 nt, Human
ccugaggacagcuguc

SEQ ID NO: 3611383 - RNA, 17 nt, Human
ccugaggacagcugucc

SEQ ID NO: 3611384 - RNA, 13 nt, Human
ccugaggagucug

SEQ ID NO: 3611385 - RNA, 18 nt, Human
ccugaggagucugagguc

SEQ ID NO: 3611386 - RNA, 20 nt, Human
ccugaggagucugagguccu

SEQ ID NO: 3611387 - RNA, 18 nt, Human
ccugaggaucagaaagua

SEQ ID NO: 3611388 - RNA, 15 nt, Human
ccugaggaugagcug

SEQ ID NO: 3611389 - RNA, 20 nt, Human
ccugaggaugagcuggaagg

SEQ ID NO: 3611390 - RNA, 12 nt, Human
ccugaggcccag

SEQ ID NO: 3611391 - RNA, 13 nt, Human
ccugaggcccaga

SEQ ID NO: 3611392 - RNA, 18 nt, Human
ccugaggcccagagggcc

SEQ ID NO: 3611393 - RNA, 16 nt, Human
ccugaggcccuucucu

SEQ ID NO: 3611394 - RNA, 22 nt, Human
ccugaggcccuucucuccagcc

SEQ ID NO: 3611395 - RNA, 19 nt, Human
ccugaggccuagacucugu

SEQ ID NO: 3611396 - RNA, 17 nt, Human
ccugaggcucagggaaa

SEQ ID NO: 3611397 - RNA, 17 nt, Human
ccugaggcuccacuugg

SEQ ID NO: 3611398 - RNA, 18 nt, Human
ccugaggcuccacuuggu

SEQ ID NO: 3611399 - RNA, 21 nt, Human
ccugaggcugagacugcggga

SEQ ID NO: 3611400 - RNA, 14 nt, Human
ccugaggcugggcu

SEQ ID NO: 3611401 - RNA, 16 nt, Human
ccugaggcugggcucc

SEQ ID NO: 3611402 - RNA, 17 nt, Human
ccugaggcugggcuccc

SEQ ID NO: 3611403 - RNA, 19 nt, Human
ccuggcacccggccccugc

SEQ ID NO: 3611404 - RNA, 22 nt, Human
ccuggcacccggccccugcugg

SEQ ID NO: 3611405 - RNA, 18 nt, Human
ccuggcacgguggcucag

SEQ ID NO: 3611406 - RNA, 23 nt, Human
ccuggcacuaacguugagccccu

SEQ ID NO: 3611407 - RNA, 15 nt, Human
ccuggcacugcugug

SEQ ID NO: 3611408 - RNA, 15 nt, Human
ccuggcacuggaccc

SEQ ID NO: 3611409 - RNA, 23 nt, Human
ccuggcacuggcaaacagggccu

SEQ ID NO: 3611410 - RNA, 23 nt, Human
ccuggcagaacugagcuccucug

SEQ ID NO: 3611411 - RNA, 13 nt, Human
ccuggcagaaugc

SEQ ID NO: 3611412 - RNA, 12 nt, Human
ccuggcagagau

SEQ ID NO: 3611413 - RNA, 11 nt, Human
ccuggcagccc

SEQ ID NO: 3611414 - RNA, 18 nt, Human
ccuggcagcccagagacu

SEQ ID NO: 3611415 - RNA, 12 nt, Human
ccuggcagcccc

SEQ ID NO: 3611416 - RNA, 14 nt, Human
ccuggcagccccug

SEQ ID NO: 3611417 - RNA, 18 nt, Human
ccuggcagccgugccuuc

SEQ ID NO: 3611418 - RNA, 14 nt, Human
ccuggcagcucugg

SEQ ID NO: 3611419 - RNA, 15 nt, Human
ccuggcagcucugga

SEQ ID NO: 3611420 - RNA, 19 nt, Human
ccuggcagcucuggacagc

SEQ ID NO: 3611421 - RNA, 20 nt, Human
ccuggcagcucuggacagcc

SEQ ID NO: 3611422 - RNA, 17 nt, Human
ccuggcaggaugacccu

SEQ ID NO: 3611423 - RNA, 13 nt, Human
ccuggcaggcagg

SEQ ID NO: 3611424 - RNA, 21 nt, Human
ccuggcaggcaggggcccugc

SEQ ID NO: 3611425 - RNA, 23 nt, Human
ccuggcaggcaggggcccugcag

SEQ ID NO: 3611426 - RNA, 21 nt, Human
ccuggcagggaggucaggccc

SEQ ID NO: 3611427 - RNA, 21 nt, Human
ccuggcaguccgugggacggg

SEQ ID NO: 3611428 - RNA, 15 nt, Human
ccuggcauggcaccu

SEQ ID NO: 3611429 - RNA, 23 nt, Human
ccuggcaugggaaugaaugucag

SEQ ID NO: 3611430 - RNA, 13 nt, Human
ccuggcauuucac

SEQ ID NO: 3611431 - RNA, 13 nt, Human
ccuggccaccucu

SEQ ID NO: 3611432 - RNA, 15 nt, Human
ccuggccaccucucu

SEQ ID NO: 3611433 - RNA, 17 nt, Human
ccuggccaccugaggug

SEQ ID NO: 3611434 - RNA, 13 nt, Human
ccuggccagacac

SEQ ID NO: 3611435 - RNA, 15 nt, Human
ccuggccagacacag

SEQ ID NO: 3611436 - RNA, 15 nt, Human
ccuggccagaugcac

SEQ ID NO: 3611437 - RNA, 22 nt, Human
ccuggccaggagcucuucaggc

SEQ ID NO: 3611438 - RNA, 13 nt, Human
ccuggccaggcac

SEQ ID NO: 3611439 - RNA, 14 nt, Human
ccuggccaggcaga

SEQ ID NO: 3611440 - RNA, 15 nt, Human
ccuggccagggccug

SEQ ID NO: 3611441 - RNA, 19 nt, Human
ccuggccagggccuggaag

SEQ ID NO: 3611442 - RNA, 20 nt, Human
ccuggccagggccuggaaga

SEQ ID NO: 3611443 - RNA, 17 nt, Human
ccuggccaucccacaag

SEQ ID NO: 3611444 - RNA, 14 nt, Human
ccuggcccacccca

SEQ ID NO: 3611445 - RNA, 21 nt, Human
ccuggcccaccccacccacuu

SEQ ID NO: 3611446 - RNA, 14 nt, Human
ccuggcccacugca

SEQ ID NO: 3611447 - RNA, 20 nt, Human
ccuggcccagcggccccucc

SEQ ID NO: 3611448 - RNA, 12 nt, Human
ccuggcccaggg

SEQ ID NO: 3611449 - RNA, 18 nt, Human
ccuggcccauagaaacau

SEQ ID NO: 3611450 - RNA, 24 nt, Human
ccuggcccauagaaacaugacacu

SEQ ID NO: 3611451 - RNA, 12 nt, Human
ccuggccccagg

SEQ ID NO: 3611452 - RNA, 12 nt, Human
ccuggccccaug

SEQ ID NO: 3611453 - RNA, 18 nt, Human
ccuggccccaugucucuc

SEQ ID NO: 3611454 - RNA, 15 nt, Human
ccuggcccccacaug

SEQ ID NO: 3611455 - RNA, 12 nt, Human
ccuggcccccuc

SEQ ID NO: 3611456 - RNA, 18 nt, Human
ccuggccccucaaccucc

SEQ ID NO: 3611457 - RNA, 20 nt, Human
ccuggccccucagggucccu

SEQ ID NO: 3611458 - RNA, 15 nt, Human
ccuggccccucuccc

SEQ ID NO: 3611459 - RNA, 17 nt, Human
ccuggccccucucccuu

SEQ ID NO: 3611460 - RNA, 23 nt, Human
ccuggcccucaaggccucccaca

SEQ ID NO: 3611461 - RNA, 16 nt, Human
ccuggcccugaggugu

SEQ ID NO: 3611462 - RNA, 14 nt, Human
ccuggcccugcuuc

SEQ ID NO: 3611463 - RNA, 16 nt, Human
ccuggcccuggggccu

SEQ ID NO: 3611464 - RNA, 14 nt, Human
cauccgaggcaggg

SEQ ID NO: 3611465 - RNA, 14 nt, Human
cauccgccagggcc

SEQ ID NO: 3611466 - RNA, 16 nt, Human
cauccgccuuuuguau

SEQ ID NO: 3611467 - RNA, 19 nt, Human
cauccgccuuuuguauaca

SEQ ID NO: 3611468 - RNA, 16 nt, Human
cauccggcagccugga

SEQ ID NO: 3611469 - RNA, 16 nt, Human
cauccggcccccagag

SEQ ID NO: 3611470 - RNA, 18 nt, Human
cauccggggccagcuccg

SEQ ID NO: 3611471 - RNA, 16 nt, Human
cauccguaguucccug

SEQ ID NO: 3611472 - RNA, 21 nt, Human
cauccguaguucccugaaaac

SEQ ID NO: 3611473 - RNA, 20 nt, Human
cauccgugagcagugugucu

SEQ ID NO: 3611474 - RNA, 23 nt, Human
cauccgugagcagugugucuccu

SEQ ID NO: 3611475 - RNA, 19 nt, Human
cauccuaaaagccacccca

SEQ ID NO: 3611476 - RNA, 18 nt, Human
cauccuaaagaacaaagu

SEQ ID NO: 3611477 - RNA, 19 nt, Human
cauccuaaagaacaaagua

SEQ ID NO: 3611478 - RNA, 17 nt, Human
cauccuaagaaauaugu

SEQ ID NO: 3611479 - RNA, 20 nt, Human
cauccuaagaaauaugugag

SEQ ID NO: 3611480 - RNA, 22 nt, Human
cauccuaagaaauaugugagau

SEQ ID NO: 3611481 - RNA, 16 nt, Human
cauccuacaagacaca

SEQ ID NO: 3611482 - RNA, 21 nt, Human
cauccuaccacaaugcagugc

SEQ ID NO: 3611483 - RNA, 15 nt, Human
cauccuacccucggg

SEQ ID NO: 3611484 - RNA, 13 nt, Human
cauccuagucucu

SEQ ID NO: 3611485 - RNA, 17 nt, Human
cauccucaaacacugca

SEQ ID NO: 3611486 - RNA, 20 nt, Human
cauccucaaagaaaguguau

SEQ ID NO: 3611487 - RNA, 22 nt, Human
cauccucaaagaaaguguauug

SEQ ID NO: 3611488 - RNA, 18 nt, Human
cauccucauacccacccc

SEQ ID NO: 3611489 - RNA, 21 nt, Human
cauccucauacccacccccac

SEQ ID NO: 3611490 - RNA, 20 nt, Human
cauccuccacguucugcuca

SEQ ID NO: 3611491 - RNA, 21 nt, Human
cauccuccacguucugcucau

SEQ ID NO: 3611492 - RNA, 13 nt, Human
cauccuccagcag

SEQ ID NO: 3611493 - RNA, 14 nt, Human
cauccuccagcagg

SEQ ID NO: 3611494 - RNA, 15 nt, Human
cauccuccagccccu

SEQ ID NO: 3611495 - RNA, 12 nt, Human
cauccuccccuu

SEQ ID NO: 3611496 - RNA, 15 nt, Human
cauccuccccuuccc

SEQ ID NO: 3611497 - RNA, 16 nt, Human
cauccuccccuucccu

SEQ ID NO: 3611498 - RNA, 20 nt, Human
cauccuccccuucccugcaa

SEQ ID NO: 3611499 - RNA, 15 nt, Human
cauccuccucagauc

SEQ ID NO: 3611500 - RNA, 18 nt, Human
cauccuccucagaucuuc

SEQ ID NO: 3611501 - RNA, 19 nt, Human
cauccuccucagaucuucu

SEQ ID NO: 3611502 - RNA, 14 nt, Human
cauccuccuggaac

SEQ ID NO: 3611503 - RNA, 21 nt, Human
cauccuccuggaaccuugcug

SEQ ID NO: 3611504 - RNA, 19 nt, Human
cauccucuggagccagccg

SEQ ID NO: 3611505 - RNA, 23 nt, Human
cauccucuggcuuggccacagcc

SEQ ID NO: 3611506 - RNA, 22 nt, Human
cauccucuguacagagcccacg

SEQ ID NO: 3611507 - RNA, 14 nt, Human
cauccucuucugcu

SEQ ID NO: 3611508 - RNA, 13 nt, Human
cauccucuuucuc

SEQ ID NO: 3611509 - RNA, 12 nt, Human
cauccugaacag

SEQ ID NO: 3611510 - RNA, 14 nt, Human
cauccugaacagca

SEQ ID NO: 3611511 - RNA, 19 nt, Human
cauccugaccagcugcucc

SEQ ID NO: 3611512 - RNA, 16 nt, Human
cauccugagccccgcc

SEQ ID NO: 3611513 - RNA, 22 nt, Human
cauccugagccccgcccucuuc

SEQ ID NO: 3611514 - RNA, 18 nt, Human
cauccugaggcuccacuu

SEQ ID NO: 3611515 - RNA, 20 nt, Human
cauccugcagccuccuccug

SEQ ID NO: 3611516 - RNA, 19 nt, Human
cauccugccagccccacac

SEQ ID NO: 3611517 - RNA, 21 nt, Human
cauccugccagccccacacag

SEQ ID NO: 3611518 - RNA, 22 nt, Human
cauccugccagccccacacagc

SEQ ID NO: 3611519 - RNA, 22 nt, Human
cauccugccuuagagccaggca

SEQ ID NO: 3611520 - RNA, 23 nt, Human
cauccugccuuagagccaggcac

SEQ ID NO: 3611521 - RNA, 22 nt, Human
cauccugccuucauggaacuca

SEQ ID NO: 3611522 - RNA, 15 nt, Human
cauccuggcccaggg

SEQ ID NO: 3611523 - RNA, 18 nt, Human
cauccuggcccagggcau

SEQ ID NO: 3611524 - RNA, 13 nt, Human
cauccuggcugcg

SEQ ID NO: 3611525 - RNA, 17 nt, Human
cauccuggcuggagaau

SEQ ID NO: 3611526 - RNA, 15 nt, Human
cauccuguauaagca

SEQ ID NO: 3611527 - RNA, 16 nt, Human
cauccugucaucugag

SEQ ID NO: 3611528 - RNA, 18 nt, Human
cauccugucccaccaugc

SEQ ID NO: 3611529 - RNA, 23 nt, Human
cauccugugccacuaaacuacau

SEQ ID NO: 3611530 - RNA, 15 nt, Human
cauccuguguuucua

SEQ ID NO: 3611531 - RNA, 21 nt, Human
cauccuguguuucuagggaaa

SEQ ID NO: 3611532 - RNA, 22 nt, Human
cauccuguguuucuagggaaau

SEQ ID NO: 3611533 - RNA, 15 nt, Human
cauccuucccugucu

SEQ ID NO: 3611534 - RNA, 21 nt, Human
cauccuucccugucugccagg

SEQ ID NO: 3611535 - RNA, 23 nt, Human
cauccuugacuuugaacuaauga

SEQ ID NO: 3611536 - RNA, 14 nt, Human
cauccuugagucaa

SEQ ID NO: 3611537 - RNA, 20 nt, Human
cauccuuucacuucuuuccc

SEQ ID NO: 3611538 - RNA, 19 nt, Human
cauccuuucugccucucaa

SEQ ID NO: 3611539 - RNA, 17 nt, Human
cauccuuugcagggcag

SEQ ID NO: 3611540 - RNA, 18 nt, Human
cauccuuuucuccuaucu

SEQ ID NO: 3611541 - RNA, 20 nt, Human
caucgaaaauucauuucaca

SEQ ID NO: 3611542 - RNA, 21 nt, Human
caucgaaucuacuaauuccac

SEQ ID NO: 3611543 - RNA, 16 nt, Human
caucgccagcugauga

SEQ ID NO: 3611544 - RNA, 21 nt, Human
caucgccagcugaugacucaa

SEQ ID NO: 3611545 - RNA, 16 nt, Human
caucgcucguguguuc

SEQ ID NO: 3611546 - RNA, 15 nt, Human
caucggaaaaauaau

SEQ ID NO: 3611547 - RNA, 21 nt, Human
ccuggcuuugcccaaccucag

SEQ ID NO: 3611548 - RNA, 22 nt, Human
ccuggcuuugcccaaccucagc

SEQ ID NO: 3611549 - RNA, 23 nt, Human
ccugggaaaccccuucucuguga

SEQ ID NO: 3611550 - RNA, 18 nt, Human
ccugggaaagccccugcc

SEQ ID NO: 3611551 - RNA, 22 nt, Human
ccugggaaggcuacucaccuug

SEQ ID NO: 3611552 - RNA, 12 nt, Human
ccugggaagggg

SEQ ID NO: 3611553 - RNA, 15 nt, Human
ccugggacaacugcu

SEQ ID NO: 3611554 - RNA, 23 nt, Human
ccugggacaguuuaucaugaagc

SEQ ID NO: 3611555 - RNA, 17 nt, Human
ccugggacugcugcuuc

SEQ ID NO: 3611556 - RNA, 16 nt, Human
ccugggaggcggagag

SEQ ID NO: 3611557 - RNA, 22 nt, Human
ccugggagggacaugcuuagca

SEQ ID NO: 3611558 - RNA, 22 nt, Human
ccugggaggucaaggcugcagu

SEQ ID NO: 3611559 - RNA, 15 nt, Human
ccugggagguggagg

SEQ ID NO: 3611560 - RNA, 15 nt, Human
ccugggaucuggugg

SEQ ID NO: 3611561 - RNA, 23 nt, Human
ccugggauguggcugcagcagcg

SEQ ID NO: 3611562 - RNA, 18 nt, Human
ccugggauucaggaaaag

SEQ ID NO: 3611563 - RNA, 23 nt, Human
ccugggauucaggaaaaggccug

SEQ ID NO: 3611564 - RNA, 21 nt, Human
ccugggcaaaugaauggcuca

SEQ ID NO: 3611565 - RNA, 15 nt, Human
ccugggcacacgcug

SEQ ID NO: 3611566 - RNA, 20 nt, Human
ccugggcaccuggggagugg

SEQ ID NO: 3611567 - RNA, 15 nt, Human
ccugggcagcugccu

SEQ ID NO: 3611568 - RNA, 17 nt, Human
ccugggcauacuaauaa

SEQ ID NO: 3611569 - RNA, 23 nt, Human
ccugggcauauccaccaccuccc

SEQ ID NO: 3611570 - RNA, 16 nt, Human
ccugggcauugcuuuc

SEQ ID NO: 3611571 - RNA, 14 nt, Human
ccugggccaggguc

SEQ ID NO: 3611572 - RNA, 13 nt, Human
ccugggccccacc

SEQ ID NO: 3611573 - RNA, 15 nt, Human
ccugggccccucccu

SEQ ID NO: 3611574 - RNA, 11 nt, Human
ccugggcccuc

SEQ ID NO: 3611575 - RNA, 14 nt, Human
ccugggcccugggg

SEQ ID NO: 3611576 - RNA, 16 nt, Human
ccugggcccuggggcc

SEQ ID NO: 3611577 - RNA, 20 nt, Human
ccugggcccuggggccugua

SEQ ID NO: 3611578 - RNA, 20 nt, Human
ccugggccguaucuccggcu

SEQ ID NO: 3611579 - RNA, 19 nt, Human
ccugggccuauggagagcc

SEQ ID NO: 3611580 - RNA, 12 nt, Human
ccugggccugca

SEQ ID NO: 3611581 - RNA, 13 nt, Human
ccugggccugccu

SEQ ID NO: 3611582 - RNA, 14 nt, Human
ccugggccugcugc

SEQ ID NO: 3611583 - RNA, 16 nt, Human
ccugggccugcugcug

SEQ ID NO: 3611584 - RNA, 14 nt, Human
ccugggccuggcuc

SEQ ID NO: 3611585 - RNA, 13 nt, Human
ccugggccuuggg

SEQ ID NO: 3611586 - RNA, 13 nt, Human
ccugggcgcccug

SEQ ID NO: 3611587 - RNA, 18 nt, Human
ccugggcgcccuggaagc

SEQ ID NO: 3611588 - RNA, 15 nt, Human
ccugggcgcuggucc

SEQ ID NO: 3611589 - RNA, 15 nt, Human
ccugggcuccuggac

SEQ ID NO: 3611590 - RNA, 14 nt, Human
ccugggcucggagg

SEQ ID NO: 3611591 - RNA, 19 nt, Human
ccugggcucggaggcugcc

SEQ ID NO: 3611592 - RNA, 21 nt, Human
ccugggcucggaggcugcccc

SEQ ID NO: 3611593 - RNA, 19 nt, Human
ccugggcucucgcggccuc

SEQ ID NO: 3611594 - RNA, 16 nt, Human
ccugggcucugggagc

SEQ ID NO: 3611595 - RNA, 19 nt, Human
ccugggcucugggagcagc

SEQ ID NO: 3611596 - RNA, 22 nt, Human
ccugggcugagagaaccucacg

SEQ ID NO: 3611597 - RNA, 14 nt, Human
ccugggcugggaaa

SEQ ID NO: 3611598 - RNA, 14 nt, Human
ccugggcugugcua

SEQ ID NO: 3611599 - RNA, 14 nt, Human
ccugggcuguuggc

SEQ ID NO: 3611600 - RNA, 16 nt, Human
ccugggcuguuggcac

SEQ ID NO: 3611601 - RNA, 14 nt, Human
ccugggcuuggccu

SEQ ID NO: 3611602 - RNA, 12 nt, Human
ccuggggaagga

SEQ ID NO: 3611603 - RNA, 17 nt, Human
ccuggggacccacgugg

SEQ ID NO: 3611604 - RNA, 23 nt, Human
ccuggggagugggacagagucug

SEQ ID NO: 3611605 - RNA, 22 nt, Human
ccuggggcacaguccaggaaca

SEQ ID NO: 3611606 - RNA, 17 nt, Human
ccuggggcauccauggg

SEQ ID NO: 3611607 - RNA, 21 nt, Human
ccuggggcauccauggggucu

SEQ ID NO: 3611608 - RNA, 12 nt, Human
ccuggggccagg

SEQ ID NO: 3611609 - RNA, 14 nt, Human
ccuggggccaggcc

SEQ ID NO: 3611610 - RNA, 13 nt, Human
ccuggggccucuu

SEQ ID NO: 3611611 - RNA, 16 nt, Human
ccuggggccugacugc

SEQ ID NO: 3611612 - RNA, 13 nt, Human
ccuggggccugag

SEQ ID NO: 3611613 - RNA, 15 nt, Human
ccuggggccugagag

SEQ ID NO: 3611614 - RNA, 12 nt, Human
ccuggggccugg

SEQ ID NO: 3611615 - RNA, 18 nt, Human
ccuggggccuggaccugc

SEQ ID NO: 3611616 - RNA, 21 nt, Human
ccuggggccuggaccugccuc

SEQ ID NO: 3611617 - RNA, 18 nt, Human
ccuggggccuguacugcc

SEQ ID NO: 3611618 - RNA, 22 nt, Human
ccuggggccuguacugccugcu

SEQ ID NO: 3611619 - RNA, 17 nt, Human
ccuggggcgcgugaggc

SEQ ID NO: 3611620 - RNA, 22 nt, Human
ccuggggcgcgugaggcccgug

SEQ ID NO: 3611621 - RNA, 17 nt, Human
ccuggggcgggccccuc

SEQ ID NO: 3611622 - RNA, 19 nt, Human
caucucccuggugcuuaug

SEQ ID NO: 3611623 - RNA, 23 nt, Human
caucucccuggugcuuaugcucu

SEQ ID NO: 3611624 - RNA, 20 nt, Human
caucuccuccauacucagga

SEQ ID NO: 3611625 - RNA, 16 nt, Human
caucuccugccuuccu

SEQ ID NO: 3611626 - RNA, 19 nt, Human
caucuccugccuuccuccu

SEQ ID NO: 3611627 - RNA, 20 nt, Human
caucucgcucccucccagga

SEQ ID NO: 3611628 - RNA, 21 nt, Human
caucucgcucccucccaggac

SEQ ID NO: 3611629 - RNA, 19 nt, Human
caucucuaauuggaagaaa

SEQ ID NO: 3611630 - RNA, 13 nt, Human
caucucuaccuuc

SEQ ID NO: 3611631 - RNA, 18 nt, Human
caucucuaccuucucccc

SEQ ID NO: 3611632 - RNA, 15 nt, Human
caucucucagaaggg

SEQ ID NO: 3611633 - RNA, 20 nt, Human
caucucucccuccccugcca

SEQ ID NO: 3611634 - RNA, 15 nt, Human
caucucuccuccuuu

SEQ ID NO: 3611635 - RNA, 22 nt, Human
caucucucuacuccuaccucag

SEQ ID NO: 3611636 - RNA, 16 nt, Human
caucucucugcccaac

SEQ ID NO: 3611637 - RNA, 12 nt, Human
caucucugcucc

SEQ ID NO: 3611638 - RNA, 13 nt, Human
caucucugcuuga

SEQ ID NO: 3611639 - RNA, 19 nt, Human
caucucugggcuggaugag

SEQ ID NO: 3611640 - RNA, 23 nt, Human
caucucuuacgcccaacccuucc

SEQ ID NO: 3611641 - RNA, 16 nt, Human
caucucuuagcucccc

SEQ ID NO: 3611642 - RNA, 23 nt, Human
caucucuuagcuccccuccaacc

SEQ ID NO: 3611643 - RNA, 15 nt, Human
caucucuugaggcca

SEQ ID NO: 3611644 - RNA, 14 nt, Human
caucucuuuguaca

SEQ ID NO: 3611645 - RNA, 12 nt, Human
caucugaaagcc

SEQ ID NO: 3611646 - RNA, 13 nt, Human
caucugaaagcca

SEQ ID NO: 3611647 - RNA, 21 nt, Human
caucugaaggggcaaauucuu

SEQ ID NO: 3611648 - RNA, 20 nt, Human
caucugaauuugcccuggga

SEQ ID NO: 3611649 - RNA, 14 nt, Human
caucugacacaaaa

SEQ ID NO: 3611650 - RNA, 19 nt, Human
caucugaccagcagcgccu

SEQ ID NO: 3611651 - RNA, 16 nt, Human
caucugagaaugaaca

SEQ ID NO: 3611652 - RNA, 22 nt, Human
caucugagagaggcuaaaaugu

SEQ ID NO: 3611653 - RNA, 20 nt, Human
caucugagguccugugaucu

SEQ ID NO: 3611654 - RNA, 21 nt, Human
caucugagguuuuauuucauu

SEQ ID NO: 3611655 - RNA, 15 nt, Human
caucugaguccugga

SEQ ID NO: 3611656 - RNA, 14 nt, Human
caucugauuccagc

SEQ ID NO: 3611657 - RNA, 12 nt, Human
caucugcaaaag

SEQ ID NO: 3611658 - RNA, 22 nt, Human
caucugcaaaaggccucuugua

SEQ ID NO: 3611659 - RNA, 18 nt, Human
caucugcaccccccuggg

SEQ ID NO: 3611660 - RNA, 19 nt, Human
caucugcaccccccugggc

SEQ ID NO: 3611661 - RNA, 16 nt, Human
caucugcacccucgau

SEQ ID NO: 3611662 - RNA, 17 nt, Human
caucugcacccuucuuu

SEQ ID NO: 3611663 - RNA, 13 nt, Human
caucugcccagga

SEQ ID NO: 3611664 - RNA, 16 nt, Human
caucugcccaggggug

SEQ ID NO: 3611665 - RNA, 11 nt, Human
caucugccccu

SEQ ID NO: 3611666 - RNA, 13 nt, Human
caucugccccucc

SEQ ID NO: 3611667 - RNA, 14 nt, Human
caucugcccgccug

SEQ ID NO: 3611668 - RNA, 19 nt, Human
caucugcccgccugcccac

SEQ ID NO: 3611669 - RNA, 21 nt, Human
caucugcccgccugcccaccu

SEQ ID NO: 3611670 - RNA, 20 nt, Human
caucugccgugccuggaucc

SEQ ID NO: 3611671 - RNA, 18 nt, Human
caucugccuuaaaaccaa

SEQ ID NO: 3611672 - RNA, 21 nt, Human
caucugcgggggcagugcuca

SEQ ID NO: 3611673 - RNA, 19 nt, Human
caucugcgugacaauaaaa

SEQ ID NO: 3611674 - RNA, 10 nt, Human
caucugcucc

SEQ ID NO: 3611675 - RNA, 22 nt, Human
caucugcuccuggaucucccug

SEQ ID NO: 3611676 - RNA, 13 nt, Human
caucugcucuccu

SEQ ID NO: 3611677 - RNA, 14 nt, Human
caucugcucuccuu

SEQ ID NO: 3611678 - RNA, 20 nt, Human
caucugcucuccuuccugga

SEQ ID NO: 3611679 - RNA, 20 nt, Human
caucugcuuacaauucccug

SEQ ID NO: 3611680 - RNA, 16 nt, Human
caucugcuuuuauuaa

SEQ ID NO: 3611681 - RNA, 17 nt, Human
caucuggaaaauaaaag

SEQ ID NO: 3611682 - RNA, 22 nt, Human
caucuggaagagcuaggcaggg

SEQ ID NO: 3611683 - RNA, 17 nt, Human
caucuggagagaacagg

SEQ ID NO: 3611684 - RNA, 12 nt, Human
caucuggagagc

SEQ ID NO: 3611685 - RNA, 21 nt, Human
caucuggauaggagccugcug

SEQ ID NO: 3611686 - RNA, 14 nt, Human
caucuggccuggcc

SEQ ID NO: 3611687 - RNA, 14 nt, Human
caucuggccuuaca

SEQ ID NO: 3611688 - RNA, 15 nt, Human
caucuggccuuacac

SEQ ID NO: 3611689 - RNA, 18 nt, Human
caucuggcucuaauucac

SEQ ID NO: 3611690 - RNA, 17 nt, Human
caucuggcugccuuugc

SEQ ID NO: 3611691 - RNA, 19 nt, Human
caucuggcuuauuuuaaug

SEQ ID NO: 3611692 - RNA, 16 nt, Human
ccuggcaugggaauga

SEQ ID NO: 3611693 - RNA, 17 nt, Human
ccuggcaugggaaugaa

SEQ ID NO: 3611694 - RNA, 18 nt, Human
ccuggcaugggaaugaau

SEQ ID NO: 3611695 - RNA, 19 nt, Human
ccuggcaugucaacagcgu

SEQ ID NO: 3611696 - RNA, 17 nt, Human
ccuggcauucuuguaca

SEQ ID NO: 3611697 - RNA, 20 nt, Human
ccuggcauucuuguacagug

SEQ ID NO: 3611698 - RNA, 17 nt, Human
ccuggccaccacccccc

SEQ ID NO: 3611699 - RNA, 14 nt, Human
ccuggccaccucuc

SEQ ID NO: 3611700 - RNA, 18 nt, Human
ccuggccaccucucuccu

SEQ ID NO: 3611701 - RNA, 13 nt, Human
ccuggccaccuga

SEQ ID NO: 3611702 - RNA, 15 nt, Human
ccuggccacgcagcc

SEQ ID NO: 3611703 - RNA, 22 nt, Human
ccuggccacgcagccaggacac

SEQ ID NO: 3611704 - RNA, 13 nt, Human
ccuggccacugcu

SEQ ID NO: 3611705 - RNA, 14 nt, Human
ccuggccagacaca

SEQ ID NO: 3611706 - RNA, 13 nt, Human
ccuggccagaggc

SEQ ID NO: 3611707 - RNA, 21 nt, Human
ccuggccagaugcaccagccc

SEQ ID NO: 3611708 - RNA, 13 nt, Human
ccuggccaggagc

SEQ ID NO: 3611709 - RNA, 16 nt, Human
ccuggccaggagcagg

SEQ ID NO: 3611710 - RNA, 18 nt, Human
ccuggccaggagcucuuc

SEQ ID NO: 3611711 - RNA, 19 nt, Human
ccuggccaggagcucuuca

SEQ ID NO: 3611712 - RNA, 23 nt, Human
ccuggccagggccuggaagacag

SEQ ID NO: 3611713 - RNA, 16 nt, Human
ccuggccagugcccug

SEQ ID NO: 3611714 - RNA, 15 nt, Human
ccuggccaucccaca

SEQ ID NO: 3611715 - RNA, 19 nt, Human
ccuggccaucccacaagug

SEQ ID NO: 3611716 - RNA, 13 nt, Human
ccuggccaucucu

SEQ ID NO: 3611717 - RNA, 21 nt, Human
ccuggcccacagcaggugcug

SEQ ID NO: 3611718 - RNA, 13 nt, Human
ccuggcccacugc

SEQ ID NO: 3611719 - RNA, 16 nt, Human
ccuggcccagccuuug

SEQ ID NO: 3611720 - RNA, 12 nt, Human
ccuggcccagcu

SEQ ID NO: 3611721 - RNA, 20 nt, Human
ccuggcccagcucccccggg

SEQ ID NO: 3611722 - RNA, 14 nt, Human
ccuggcccagggca

SEQ ID NO: 3611723 - RNA, 16 nt, Human
ccuggcccagggcauc

SEQ ID NO: 3611724 - RNA, 21 nt, Human
ccuggcccagggcaucuggga

SEQ ID NO: 3611725 - RNA, 13 nt, Human
ccuggcccaugua

SEQ ID NO: 3611726 - RNA, 14 nt, Human
ccuggccccauguc

SEQ ID NO: 3611727 - RNA, 20 nt, Human
ccuggccccaugucucucag

SEQ ID NO: 3611728 - RNA, 16 nt, Human
ccuggcccccaaccuc

SEQ ID NO: 3611729 - RNA, 19 nt, Human
ccuggcccccaaccucagg

SEQ ID NO: 3611730 - RNA, 22 nt, Human
ccuggcccccaaccucagggcu

SEQ ID NO: 3611731 - RNA, 14 nt, Human
ccuggcccccagcu

SEQ ID NO: 3611732 - RNA, 20 nt, Human
ccuggcccccucccuggaug

SEQ ID NO: 3611733 - RNA, 15 nt, Human
ccuggcccccugagu

SEQ ID NO: 3611734 - RNA, 14 nt, Human
ccuggccccucagg

SEQ ID NO: 3611735 - RNA, 18 nt, Human
ccuggccccucagggucc

SEQ ID NO: 3611736 - RNA, 21 nt, Human
ccuggccccucagggucccug

SEQ ID NO: 3611737 - RNA, 14 nt, Human
ccuggccccucgcc

SEQ ID NO: 3611738 - RNA, 15 nt, Human
ccuggccccucgccu

SEQ ID NO: 3611739 - RNA, 12 nt, Human
ccuggccccucu

SEQ ID NO: 3611740 - RNA, 13 nt, Human
ccuggcccucugu

SEQ ID NO: 3611741 - RNA, 15 nt, Human
ccuggcccugaggug

SEQ ID NO: 3611742 - RNA, 12 nt, Human
ccuggcccugcc

SEQ ID NO: 3611743 - RNA, 20 nt, Human
ccuggcccuggggccuguac

SEQ ID NO: 3611744 - RNA, 18 nt, Human
ccuggccgaguccaagcu

SEQ ID NO: 3611745 - RNA, 19 nt, Human
ccuggccgaguccaagcug

SEQ ID NO: 3611746 - RNA, 18 nt, Human
ccuggccgccugggucca

SEQ ID NO: 3611747 - RNA, 21 nt, Human
ccuggccgcguuuagaccaag

SEQ ID NO: 3611748 - RNA, 12 nt, Human
ccuggccggcca

SEQ ID NO: 3611749 - RNA, 14 nt, Human
ccuggccggccagc

SEQ ID NO: 3611750 - RNA, 15 nt, Human
ccuggccggccagcc

SEQ ID NO: 3611751 - RNA, 16 nt, Human
ccuggccggccagcca

SEQ ID NO: 3611752 - RNA, 18 nt, Human
ccuggccggccagccagc

SEQ ID NO: 3611753 - RNA, 23 nt, Human
ccuggccggccagccagccacuc

SEQ ID NO: 3611754 - RNA, 18 nt, Human
ccuggccggugugggggc

SEQ ID NO: 3611755 - RNA, 21 nt, Human
ccuggccggugugggggcccc

SEQ ID NO: 3611756 - RNA, 22 nt, Human
ccuggccggugugggggccccg

SEQ ID NO: 3611757 - RNA, 16 nt, Human
ccuggccuagaccagc

SEQ ID NO: 3611758 - RNA, 22 nt, Human
ccuggccuagcauacguacaca

SEQ ID NO: 3611759 - RNA, 22 nt, Human
ccuggccucaagugauucuccu

SEQ ID NO: 3611760 - RNA, 15 nt, Human
ccuggccucagacug

SEQ ID NO: 3611761 - RNA, 16 nt, Human
ccuggccucagacugc

SEQ ID NO: 3611762 - RNA, 23 nt, Human
ccuggccucagacugcacccagg

SEQ ID NO: 3611763 - RNA, 15 nt, Human
ccuggccuccaggcc

SEQ ID NO: 3611764 - RNA, 16 nt, Human
ccuggccuccaggccc

SEQ ID NO: 3611765 - RNA, 17 nt, Human
ccuggccuccaggcccg

SEQ ID NO: 3611766 - RNA, 18 nt, Human
ccuggccucccccacuuu

SEQ ID NO: 3611767 - RNA, 20 nt, Human
ccuggccuccccugccacca

SEQ ID NO: 3611768 - RNA, 13 nt, Human
ccuggccuccggc

SEQ ID NO: 3611769 - RNA, 22 nt, Human
ccuggccuccggcgucagccuc

SEQ ID NO: 3611770 - RNA, 16 nt, Human
ccuggccuccugccuc

SEQ ID NO: 3611771 - RNA, 20 nt, Human
ccuggccucugcacuccccu

SEQ ID NO: 3611772 - RNA, 13 nt, Human
ccuggccucugug

SEQ ID NO: 3611773 - RNA, 13 nt, Human
ccuggccugagag

SEQ ID NO: 3611774 - RNA, 16 nt, Human
ccuggccugaggucuc

SEQ ID NO: 3611775 - RNA, 13 nt, Human
ccuggccuggcac

SEQ ID NO: 3611776 - RNA, 16 nt, Human
ccuggccuggcccugc

SEQ ID NO: 3611777 - RNA, 17 nt, Human
ccuggccuggcccugcc

SEQ ID NO: 3611778 - RNA, 22 nt, Human
ccuggccuggcccugcccugag

SEQ ID NO: 3611779 - RNA, 15 nt, Human
ccuggccuggcuucu

SEQ ID NO: 3611780 - RNA, 13 nt, Human
ccuggccugucug

SEQ ID NO: 3611781 - RNA, 14 nt, Human
ccuggccugugccu

SEQ ID NO: 3611782 - RNA, 15 nt, Human
ccuggccuuccuguc

SEQ ID NO: 3611783 - RNA, 22 nt, Human
ccuggccuugggauccaggccc

SEQ ID NO: 3611784 - RNA, 14 nt, Human
ccuggccuuucaua

SEQ ID NO: 3611785 - RNA, 15 nt, Human
ccuggccuuucauau

SEQ ID NO: 3611786 - RNA, 15 nt, Human
ccuggcgccuggcag

SEQ ID NO: 3611787 - RNA, 15 nt, Human
ccuggcggccccaac

SEQ ID NO: 3611788 - RNA, 18 nt, Human
ccuggcgggguggggugg

SEQ ID NO: 3611789 - RNA, 23 nt, Human
ccuggcguccccucccucugucu

SEQ ID NO: 3611790 - RNA, 16 nt, Human
ccuggcuauguccuaa

SEQ ID NO: 3611791 - RNA, 17 nt, Human
ccuggcucaccuugugc

SEQ ID NO: 3611792 - RNA, 13 nt, Human
ccuggcucagagc

SEQ ID NO: 3611793 - RNA, 12 nt, Human
ccuggcucagcc

SEQ ID NO: 3611794 - RNA, 16 nt, Human
ccuggcucccacaggc

SEQ ID NO: 3611795 - RNA, 23 nt, Human
ccuggcucccacaggcccuuccu

SEQ ID NO: 3611796 - RNA, 17 nt, Human
ccuggcucccaggacac

SEQ ID NO: 3611797 - RNA, 15 nt, Human
ccuggcucccaugac

SEQ ID NO: 3611798 - RNA, 13 nt, Human
ccuggcuccccug

SEQ ID NO: 3611799 - RNA, 15 nt, Human
ccuggcuccccuggg

SEQ ID NO: 3611800 - RNA, 16 nt, Human
ccuggcuccccugggg

SEQ ID NO: 3611801 - RNA, 20 nt, Human
ccuggcucccucacucucag

SEQ ID NO: 3611802 - RNA, 21 nt, Human
ccuggcucccucacucucagg

SEQ ID NO: 3611803 - RNA, 18 nt, Human
ccuggcuccuacccaccg

SEQ ID NO: 3611804 - RNA, 21 nt, Human
ccuggcuccuugugccagaga

SEQ ID NO: 3611805 - RNA, 16 nt, Human
ccuggcucucagaagg

SEQ ID NO: 3611806 - RNA, 18 nt, Human
ccuggcucuguggcgagc

SEQ ID NO: 3611807 - RNA, 22 nt, Human
ccuggcucuuucgucacccuug

SEQ ID NO: 3611808 - RNA, 13 nt, Human
ccuggcugaagga

SEQ ID NO: 3611809 - RNA, 19 nt, Human
ccuggcugaaggacuguga

SEQ ID NO: 3611810 - RNA, 20 nt, Human
ccuggcugaaggacugugac

SEQ ID NO: 3611811 - RNA, 22 nt, Human
ccuggcugagguuccucugccu

SEQ ID NO: 3611812 - RNA, 23 nt, Human
ccuggcugagguuccucugccug

SEQ ID NO: 3611813 - RNA, 24 nt, Human
ccuggcugagguuccucugccugc

SEQ ID NO: 3611814 - RNA, 18 nt, Human
ccuggcugcagccugcgc

SEQ ID NO: 3611815 - RNA, 12 nt, Human
ccuggcugccca

SEQ ID NO: 3611816 - RNA, 15 nt, Human
ccuggcugcccuggc

SEQ ID NO: 3611817 - RNA, 15 nt, Human
caugcgcucagggcc

SEQ ID NO: 3611818 - RNA, 15 nt, Human
caugcggcccagccc

SEQ ID NO: 3611819 - RNA, 21 nt, Human
caugcggcccagcccggcucc

SEQ ID NO: 3611820 - RNA, 18 nt, Human
caugcgggcugggcagcu

SEQ ID NO: 3611821 - RNA, 15 nt, Human
caugcgguagccagc

SEQ ID NO: 3611822 - RNA, 16 nt, Human
caugcgguagccagca

SEQ ID NO: 3611823 - RNA, 19 nt, Human
caugcgguagccagcacac

SEQ ID NO: 3611824 - RNA, 23 nt, Human
caugcggugccaugaagggaccc

SEQ ID NO: 3611825 - RNA, 23 nt, Human
caugcguggguggggagggaggu

SEQ ID NO: 3611826 - RNA, 16 nt, Human
caugcuaagagaagua

SEQ ID NO: 3611827 - RNA, 17 nt, Human
caugcuaagagaaguag

SEQ ID NO: 3611828 - RNA, 15 nt, Human
caugcuaagcaagcu

SEQ ID NO: 3611829 - RNA, 22 nt, Human
caugcuaagcaagcuaaccuua

SEQ ID NO: 3611830 - RNA, 14 nt, Human
caugcuacacacug

SEQ ID NO: 3611831 - RNA, 23 nt, Human
caugcuacacacugcauguuugu

SEQ ID NO: 3611832 - RNA, 22 nt, Human
caugcuaccugaucccacuccu

SEQ ID NO: 3611833 - RNA, 16 nt, Human
caugcuaucucugugu

SEQ ID NO: 3611834 - RNA, 23 nt, Human
caugcuaucucugugugcacaaa

SEQ ID NO: 3611835 - RNA, 22 nt, Human
caugcuauuuguucuucaagaa

SEQ ID NO: 3611836 - RNA, 23 nt, Human
caugcucagcccugacuggugcu

SEQ ID NO: 3611837 - RNA, 14 nt, Human
ccuggcuucaggca

SEQ ID NO: 3611838 - RNA, 22 nt, Human
ccuggcuucaggcaauucuccu

SEQ ID NO: 3611839 - RNA, 15 nt, Human
ccuggcuucccaucc

SEQ ID NO: 3611840 - RNA, 20 nt, Human
ccuggcuucccauccccagc

SEQ ID NO: 3611841 - RNA, 21 nt, Human
ccuggcuucccauccccagcg

SEQ ID NO: 3611842 - RNA, 16 nt, Human
ccuggcuucuggagcc

SEQ ID NO: 3611843 - RNA, 17 nt, Human
ccuggcuucuggagccc

SEQ ID NO: 3611844 - RNA, 13 nt, Human
ccuggcuucugug

SEQ ID NO: 3611845 - RNA, 22 nt, Human
ccuggcuucuuucucucagccu

SEQ ID NO: 3611846 - RNA, 22 nt, Human
ccuggcuuucauuuucucucag

SEQ ID NO: 3611847 - RNA, 23 nt, Human
ccuggcuuucauuuucucucagg

SEQ ID NO: 3611848 - RNA, 15 nt, Human
ccuggcuuugcccaa

SEQ ID NO: 3611849 - RNA, 18 nt, Human
ccuggcuuugcccaaccu

SEQ ID NO: 3611850 - RNA, 23 nt, Human
ccuggcuuugcccaaccucagca

SEQ ID NO: 3611851 - RNA, 18 nt, Human
ccuggcuuuucacugcug

SEQ ID NO: 3611852 - RNA, 23 nt, Human
ccuggcuuuucacugcuggcugc

SEQ ID NO: 3611853 - RNA, 17 nt, Human
ccugggaaauauucccu

SEQ ID NO: 3611854 - RNA, 21 nt, Human
ccugggaaggcuacucaccuu

SEQ ID NO: 3611855 - RNA, 22 nt, Human
ccugggacaacugcucccaccu

SEQ ID NO: 3611856 - RNA, 17 nt, Human
ccugggaccuccccuga

SEQ ID NO: 3611857 - RNA, 18 nt, Human
ccugggagaaccucaggc

SEQ ID NO: 3611858 - RNA, 19 nt, Human
ccugggagaaccucaggcu

SEQ ID NO: 3611859 - RNA, 19 nt, Human
ccugggaggaaauuugaau

SEQ ID NO: 3611860 - RNA, 17 nt, Human
ccugggaggagagacac

SEQ ID NO: 3611861 - RNA, 13 nt, Human
ccugggaggcaca

SEQ ID NO: 3611862 - RNA, 21 nt, Human
ccugggaggcucuggagccca

SEQ ID NO: 3611863 - RNA, 16 nt, Human
ccugggagugagcugg

SEQ ID NO: 3611864 - RNA, 20 nt, Human
ccugggaucccucauccuca

SEQ ID NO: 3611865 - RNA, 20 nt, Human
ccugggaucugguggucagc

SEQ ID NO: 3611866 - RNA, 21 nt, Human
ccugggaucugguggucagcc

SEQ ID NO: 3611867 - RNA, 21 nt, Human
ccugggaugagaguuuuggau

SEQ ID NO: 3611868 - RNA, 22 nt, Human
ccugggauguccacagaugccu

SEQ ID NO: 3611869 - RNA, 21 nt, Human
ccugggauguggcugcagcag

SEQ ID NO: 3611870 - RNA, 16 nt, Human
ccugggauucaggaaa

SEQ ID NO: 3611871 - RNA, 12 nt, Human
ccugggcagaag

SEQ ID NO: 3611872 - RNA, 15 nt, Human
ccugggcagaaggaa

SEQ ID NO: 3611873 - RNA, 16 nt, Human
ccugggcagaaggaag

SEQ ID NO: 3611874 - RNA, 14 nt, Human
ccugggcagcugcc

SEQ ID NO: 3611875 - RNA, 18 nt, Human
ccugggcagcugccuccc

SEQ ID NO: 3611876 - RNA, 12 nt, Human
ccugggcaggag

SEQ ID NO: 3611877 - RNA, 22 nt, Human
ccugggcauauccaccaccucc

SEQ ID NO: 3611878 - RNA, 17 nt, Human
ccugggcauugcuuucc

SEQ ID NO: 3611879 - RNA, 14 nt, Human
ccugggccccacca

SEQ ID NO: 3611880 - RNA, 21 nt, Human
ccugggccccaccaccuaggc

SEQ ID NO: 3611881 - RNA, 18 nt, Human
ccugggccccucccuacc

SEQ ID NO: 3611882 - RNA, 20 nt, Human
ccugggccccucccuaccuc

SEQ ID NO: 3611883 - RNA, 16 nt, Human
ccugggcccugggcug

SEQ ID NO: 3611884 - RNA, 17 nt, Human
ccugggcccuggggccu

SEQ ID NO: 3611885 - RNA, 21 nt, Human
ccugggcccuggggccuguac

SEQ ID NO: 3611886 - RNA, 13 nt, Human
ccugggccgcugc

SEQ ID NO: 3611887 - RNA, 17 nt, Human
ccugggccgcugccacg

SEQ ID NO: 3611888 - RNA, 21 nt, Human
ccugggccuauggagagcccu

SEQ ID NO: 3611889 - RNA, 15 nt, Human
ccugggccugcugcu

SEQ ID NO: 3611890 - RNA, 20 nt, Human
ccugggccugcugcugagaa

SEQ ID NO: 3611891 - RNA, 13 nt, Human
ccugggccuggcu

SEQ ID NO: 3611892 - RNA, 19 nt, Human
ccugggccuggcucccuca

SEQ ID NO: 3611893 - RNA, 19 nt, Human
ccugggcgcccuggaagcc

SEQ ID NO: 3611894 - RNA, 16 nt, Human
ccugggcgcugguccu

SEQ ID NO: 3611895 - RNA, 15 nt, Human
ccugggcuacaagga

SEQ ID NO: 3611896 - RNA, 22 nt, Human
ccugggcucaagcaauccuccu

SEQ ID NO: 3611897 - RNA, 14 nt, Human
ccugggcuccugga

SEQ ID NO: 3611898 - RNA, 15 nt, Human
ccugggcucggaggc

SEQ ID NO: 3611899 - RNA, 22 nt, Human
ccugggcucggaggcugccccc

SEQ ID NO: 3611900 - RNA, 12 nt, Human
ccugggcucugc

SEQ ID NO: 3611901 - RNA, 14 nt, Human
ccugggcucugccc

SEQ ID NO: 3611902 - RNA, 20 nt, Human
ccugggcucugccccagcuc

SEQ ID NO: 3611903 - RNA, 22 nt, Human
ccugggcucugccccagcucug

SEQ ID NO: 3611904 - RNA, 17 nt, Human
ccugggcucugggagca

SEQ ID NO: 3611905 - RNA, 13 nt, Human
ccugggcucugug

SEQ ID NO: 3611906 - RNA, 15 nt, Human
ccugggcucuguggg

SEQ ID NO: 3611907 - RNA, 19 nt, Human
ccugggcucugugggcugc

SEQ ID NO: 3611908 - RNA, 20 nt, Human
ccugggcuggaaucaggaau

SEQ ID NO: 3611909 - RNA, 21 nt, Human
ccugggcuguuggcacucaca

SEQ ID NO: 3611910 - RNA, 23 nt, Human
ccugggcuguuggcacucacaga

SEQ ID NO: 3611911 - RNA, 16 nt, Human
ccugggcuuggccugc

SEQ ID NO: 3611912 - RNA, 18 nt, Human
ccugggcuuggccugcug

SEQ ID NO: 3611913 - RNA, 20 nt, Human
ccugggcuuggccugcugug

SEQ ID NO: 3611914 - RNA, 18 nt, Human
ccuggggaaccugacccc

SEQ ID NO: 3611915 - RNA, 17 nt, Human
ccuggggaaggagccag

SEQ ID NO: 3611916 - RNA, 18 nt, Human
ccuggggaaggagccagu

SEQ ID NO: 3611917 - RNA, 15 nt, Human
ccuggggagaaagua

SEQ ID NO: 3611918 - RNA, 24 nt, Human
ccuggggagugggacagagucugg

SEQ ID NO: 3611919 - RNA, 19 nt, Human
ccuggggcagucaccugcc

SEQ ID NO: 3611920 - RNA, 12 nt, Human
ccuggggccucg

SEQ ID NO: 3611921 - RNA, 18 nt, Human
ccuggggccugacugcuc

SEQ ID NO: 3611922 - RNA, 17 nt, Human
ccuggggccuggaccug

SEQ ID NO: 3611923 - RNA, 19 nt, Human
ccuggggccuggaccugcc

SEQ ID NO: 3611924 - RNA, 13 nt, Human
ccuggggccuggc

SEQ ID NO: 3611925 - RNA, 14 nt, Human
ccuggggccuggca

SEQ ID NO: 3611926 - RNA, 15 nt, Human
ccuggggccuggcag

SEQ ID NO: 3611927 - RNA, 19 nt, Human
ccuggggccuguacugccu

SEQ ID NO: 3611928 - RNA, 18 nt, Human
ccuggggcgcgugaggcc

SEQ ID NO: 3611929 - RNA, 22 nt, Human
ccuggggcuaggcuggagccca

SEQ ID NO: 3611930 - RNA, 16 nt, Human
ccuggggcuccuuucu

SEQ ID NO: 3611931 - RNA, 21 nt, Human
ccuggggcuccuuucuccagc

SEQ ID NO: 3611932 - RNA, 22 nt, Human
ccuggggcuccuuucuccagcc

SEQ ID NO: 3611933 - RNA, 12 nt, Human
ccuggggcucua

SEQ ID NO: 3611934 - RNA, 23 nt, Human
ccuggggcucuaacgccugagcc

SEQ ID NO: 3611935 - RNA, 15 nt, Human
ccuggggcugaucuc

SEQ ID NO: 3611936 - RNA, 20 nt, Human
ccuggggcugaucucaggga

SEQ ID NO: 3611937 - RNA, 22 nt, Human
ccuggggcugaucucagggaag

SEQ ID NO: 3611938 - RNA, 17 nt, Human
ccuggggcugcuggccu

SEQ ID NO: 3611939 - RNA, 17 nt, Human
ccuggggcuggccuccc

SEQ ID NO: 3611940 - RNA, 14 nt, Human
ccuggggcuggcuu

SEQ ID NO: 3611941 - RNA, 16 nt, Human
ccugggggaagcccug

SEQ ID NO: 3611942 - RNA, 20 nt, Human
ccugggggaguuuuccucua

SEQ ID NO: 3611943 - RNA, 18 nt, Human
ccugggggcacaggaggc

SEQ ID NO: 3611944 - RNA, 23 nt, Human
ccugggggcacaggaggcaggca

SEQ ID NO: 3611945 - RNA, 17 nt, Human
ccugggggccuggcugg

SEQ ID NO: 3611946 - RNA, 16 nt, Human
ccugggggcucucaug

SEQ ID NO: 3611947 - RNA, 19 nt, Human
ccugggggcugggcagagg

SEQ ID NO: 3611948 - RNA, 12 nt, Human
ccuggggggcag

SEQ ID NO: 3611949 - RNA, 22 nt, Human
ccuggggguucuuucuuccucu

SEQ ID NO: 3611950 - RNA, 22 nt, Human
ccugggguaccaagagacuccu

SEQ ID NO: 3611951 - RNA, 18 nt, Human
ccugggguguuaguggca

SEQ ID NO: 3611952 - RNA, 20 nt, Human
ccugggguguuaguggcacc

SEQ ID NO: 3611953 - RNA, 15 nt, Human
ccuggguccaaauaa

SEQ ID NO: 3611954 - RNA, 22 nt, Human
ccugggucccaggacccuggac

SEQ ID NO: 3611955 - RNA, 18 nt, Human
ccugggucuaagggguug

SEQ ID NO: 3611956 - RNA, 15 nt, Human
ccugggucugugucu

SEQ ID NO: 3611957 - RNA, 16 nt, Human
ccugggucugugucuc

SEQ ID NO: 3611958 - RNA, 15 nt, Human
ccugggugacauuug

SEQ ID NO: 3611959 - RNA, 16 nt, Human
ccugggugcuggcugc

SEQ ID NO: 3611960 - RNA, 18 nt, Human
ccuggguggaucggccuc

SEQ ID NO: 3611961 - RNA, 15 nt, Human
ccugggugggcucug

SEQ ID NO: 3611962 - RNA, 17 nt, Human
ccugggugggcucugug

SEQ ID NO: 3611963 - RNA, 15 nt, Human
ccuggguggggcugc

SEQ ID NO: 3611964 - RNA, 16 nt, Human
ccuggguggggcugcu

SEQ ID NO: 3611965 - RNA, 20 nt, Human
ccuggguggggcugcuccuc

SEQ ID NO: 3611966 - RNA, 21 nt, Human
ccuggguggggcugcuccucc

SEQ ID NO: 3611967 - RNA, 23 nt, Human
ccuggguggggcugcuccuccag

SEQ ID NO: 3611968 - RNA, 17 nt, Human
ccugggugggugguggg

SEQ ID NO: 3611969 - RNA, 14 nt, Human
ccuggguggucugc

SEQ ID NO: 3611970 - RNA, 18 nt, Human
ccuggguggucugcaggc

SEQ ID NO: 3611971 - RNA, 19 nt, Human
ccuggguggucugcaggca

SEQ ID NO: 3611972 - RNA, 20 nt, Human
ccuggguggucugcaggcag

SEQ ID NO: 3611973 - RNA, 22 nt, Human
ccuggguggucugcaggcaggg

SEQ ID NO: 3611974 - RNA, 18 nt, Human
ccuucccaaucagcacug

SEQ ID NO: 3611975 - RNA, 17 nt, Human
ccuucccaauccagugg

SEQ ID NO: 3611976 - RNA, 22 nt, Human
ccuucccacccaucgcugugug

SEQ ID NO: 3611977 - RNA, 20 nt, Human
ccuucccagaggggccugcc

SEQ ID NO: 3611978 - RNA, 12 nt, Human
ccuucccagcuc

SEQ ID NO: 3611979 - RNA, 17 nt, Human
ccuucccagcucucccu

SEQ ID NO: 3611980 - RNA, 14 nt, Human
cauguauuugagca

SEQ ID NO: 3611981 - RNA, 14 nt, Human
caugucaaacguga

SEQ ID NO: 3611982 - RNA, 14 nt, Human
caugucaacagcgu

SEQ ID NO: 3611983 - RNA, 18 nt, Human
caugucaacuucuggcuc

SEQ ID NO: 3611984 - RNA, 21 nt, Human
caugucaagagucgcugugcc

SEQ ID NO: 3611985 - RNA, 16 nt, Human
ccuggguuaaguauua

SEQ ID NO: 3611986 - RNA, 21 nt, Human
ccuggguuagacugccagcuc

SEQ ID NO: 3611987 - RNA, 22 nt, Human
ccuggguucagaaaugcugccu

SEQ ID NO: 3611988 - RNA, 23 nt, Human
ccuggguucagaaaugcugccug

SEQ ID NO: 3611989 - RNA, 19 nt, Human
ccuggguuuuguauucucu

SEQ ID NO: 3611990 - RNA, 21 nt, Human
ccuggguuuuguauucucuga

SEQ ID NO: 3611991 - RNA, 14 nt, Human
ccugguaagaaaaa

SEQ ID NO: 3611992 - RNA, 17 nt, Human
ccugguacccagccauc

SEQ ID NO: 3611993 - RNA, 18 nt, Human
ccugguacccagccaucu

SEQ ID NO: 3611994 - RNA, 19 nt, Human
ccugguacccagccaucug

SEQ ID NO: 3611995 - RNA, 14 nt, Human
ccugguacccuccu

SEQ ID NO: 3611996 - RNA, 17 nt, Human
ccugguacccuccuggc

SEQ ID NO: 3611997 - RNA, 19 nt, Human
ccugguacucaagcccgcg

SEQ ID NO: 3611998 - RNA, 18 nt, Human
ccugguagaccacugcca

SEQ ID NO: 3611999 - RNA, 13 nt, Human
ccugguagggcag

SEQ ID NO: 3612000 - RNA, 16 nt, Human
ccugguauggcugcag

SEQ ID NO: 3612001 - RNA, 22 nt, Human
ccuggucacaggacucugccuc

SEQ ID NO: 3612002 - RNA, 21 nt, Human
ccugguccagggaagcuggcc

SEQ ID NO: 3612003 - RNA, 13 nt, Human
ccugguccaugca

SEQ ID NO: 3612004 - RNA, 19 nt, Human
ccugguccccuccuuccca

SEQ ID NO: 3612005 - RNA, 20 nt, Human
ccugguccucacacucaccc

SEQ ID NO: 3612006 - RNA, 13 nt, Human
ccuggucucaccc

SEQ ID NO: 3612007 - RNA, 17 nt, Human
ccuggucucacccugga

SEQ ID NO: 3612008 - RNA, 19 nt, Human
ccuggucucacccuggagg

SEQ ID NO: 3612009 - RNA, 23 nt, Human
ccuggucucagcagcgaccaccc

SEQ ID NO: 3612010 - RNA, 22 nt, Human
ccuggucuccugcccccacacc

SEQ ID NO: 3612011 - RNA, 13 nt, Human
ccuggucucuggu

SEQ ID NO: 3612012 - RNA, 20 nt, Human
ccuggucuuugagcucccac

SEQ ID NO: 3612013 - RNA, 14 nt, Human
ccuggugaccccuu

SEQ ID NO: 3612014 - RNA, 20 nt, Human
ccuggugaggaagcuccagu

SEQ ID NO: 3612015 - RNA, 15 nt, Human
ccuggugcugccucu

SEQ ID NO: 3612016 - RNA, 13 nt, Human
ccuggugcuggag

SEQ ID NO: 3612017 - RNA, 14 nt, Human
ccuggugcuggagg

SEQ ID NO: 3612018 - RNA, 15 nt, Human
ccuggugcuggaggu

SEQ ID NO: 3612019 - RNA, 16 nt, Human
ccuggugcuucuccuc

SEQ ID NO: 3612020 - RNA, 12 nt, Human
ccugguggacag

SEQ ID NO: 3612021 - RNA, 14 nt, Human
ccugguggacaguc

SEQ ID NO: 3612022 - RNA, 16 nt, Human
ccugguggcagcucac

SEQ ID NO: 3612023 - RNA, 14 nt, Human
ccugguggcagcug

SEQ ID NO: 3612024 - RNA, 15 nt, Human
ccugguggcaguggg

SEQ ID NO: 3612025 - RNA, 20 nt, Human
ccugguggcagugggagcug

SEQ ID NO: 3612026 - RNA, 14 nt, Human
ccugguggccaugc

SEQ ID NO: 3612027 - RNA, 16 nt, Human
ccugguggccaugcuc

SEQ ID NO: 3612028 - RNA, 13 nt, Human
ccugguggggcag

SEQ ID NO: 3612029 - RNA, 23 nt, Human
ccugguggggcagcuccucuguc

SEQ ID NO: 3612030 - RNA, 18 nt, Human
ccugguggguccaggggc

SEQ ID NO: 3612031 - RNA, 21 nt, Human
ccuggugguauuuucaauagc

SEQ ID NO: 3612032 - RNA, 12 nt, Human
ccuggugguuca

SEQ ID NO: 3612033 - RNA, 13 nt, Human
ccuggugucaccc

SEQ ID NO: 3612034 - RNA, 19 nt, Human
ccugguguuucuagcacug

SEQ ID NO: 3612035 - RNA, 18 nt, Human
ccugguuauugauguggc

SEQ ID NO: 3612036 - RNA, 22 nt, Human
ccugguucccguuucuccaccu

SEQ ID NO: 3612037 - RNA, 20 nt, Human
ccugguuccggaauccuguc

SEQ ID NO: 3612038 - RNA, 21 nt, Human
ccugguucugaugaugugccu

SEQ ID NO: 3612039 - RNA, 15 nt, Human
ccugguuuagccugg

SEQ ID NO: 3612040 - RNA, 13 nt, Human
ccugguuuccugc

SEQ ID NO: 3612041 - RNA, 15 nt, Human
ccugguuuccugccc

SEQ ID NO: 3612042 - RNA, 20 nt, Human
ccugguuuccugcccuggga

SEQ ID NO: 3612043 - RNA, 21 nt, Human
ccugguuuccugcccugggag

SEQ ID NO: 3612044 - RNA, 22 nt, Human
ccugguuuuuaaauagaguuug

SEQ ID NO: 3612045 - RNA, 22 nt, Human
ccugguuuuuguagccuuccuc

SEQ ID NO: 3612046 - RNA, 18 nt, Human
ccuguaaaacuuuauuuu

SEQ ID NO: 3612047 - RNA, 20 nt, Human
ccuguaaacacucagcuguu

SEQ ID NO: 3612048 - RNA, 12 nt, Human
ccuguaaacuuu

SEQ ID NO: 3612049 - RNA, 19 nt, Human
ccuguaaacuuuaucacuu

SEQ ID NO: 3612050 - RNA, 20 nt, Human
ccuguaaacuuuaucacuua

SEQ ID NO: 3612051 - RNA, 14 nt, Human
ccuguaaauuauuu

SEQ ID NO: 3612052 - RNA, 15 nt, Human
ccuguaaauuauuuu

SEQ ID NO: 3612053 - RNA, 16 nt, Human
ccuguaacaagccaga

SEQ ID NO: 3612054 - RNA, 18 nt, Human
ccuguaacacaagccaca

SEQ ID NO: 3612055 - RNA, 19 nt, Human
ccuguaacacaagccacag

SEQ ID NO: 3612056 - RNA, 19 nt, Human
ccuguaacauacuggccug

SEQ ID NO: 3612057 - RNA, 23 nt, Human
ccuguaacauacuggccuggacu

SEQ ID NO: 3612058 - RNA, 16 nt, Human
ccuguaaccucuucag

SEQ ID NO: 3612059 - RNA, 10 nt, Human
ccuguaacuu

SEQ ID NO: 3612060 - RNA, 16 nt, Human
ccuguaagaaacagag

SEQ ID NO: 3612061 - RNA, 23 nt, Human
ccuguaagccaaagaaaugaaca

SEQ ID NO: 3612062 - RNA, 12 nt, Human
ccuguaauaaau

SEQ ID NO: 3612063 - RNA, 13 nt, Human
ccuguaauaaaua

SEQ ID NO: 3612064 - RNA, 20 nt, Human
ccuguaaucauauaauaaau

SEQ ID NO: 3612065 - RNA, 16 nt, Human
ccuguaaucccagcac

SEQ ID NO: 3612066 - RNA, 18 nt, Human
ccuguaaucccagcacuu

SEQ ID NO: 3612067 - RNA, 20 nt, Human
ccuguaaucccagcacuugg

SEQ ID NO: 3612068 - RNA, 16 nt, Human
ccuguaaucccagcua

SEQ ID NO: 3612069 - RNA, 21 nt, Human
ccuguacacugaauauuuaua

SEQ ID NO: 3612070 - RNA, 20 nt, Human
ccuguacaguagauuuucca

SEQ ID NO: 3612071 - RNA, 21 nt, Human
ccuguacaguagauuuuccaa

SEQ ID NO: 3612072 - RNA, 22 nt, Human
ccuguacaguagauuuuccaaa

SEQ ID NO: 3612073 - RNA, 11 nt, Human
ccuguacaguc

SEQ ID NO: 3612074 - RNA, 22 nt, Human
ccuguacagucugucuucugua

SEQ ID NO: 3612075 - RNA, 17 nt, Human
ccuguacucgcuugugc

SEQ ID NO: 3612076 - RNA, 19 nt, Human
ccuguacucgcuugugcag

SEQ ID NO: 3612077 - RNA, 15 nt, Human
ccuguacucuuccga

SEQ ID NO: 3612078 - RNA, 15 nt, Human
ccuguacugccugcu

SEQ ID NO: 3612079 - RNA, 16 nt, Human
ccuguacugccugcuu

SEQ ID NO: 3612080 - RNA, 14 nt, Human
ccuguacuggagag

SEQ ID NO: 3612081 - RNA, 17 nt, Human
ccuguacuguucugugu

SEQ ID NO: 3612082 - RNA, 15 nt, Human
ccuguagcacuuacu

SEQ ID NO: 3612083 - RNA, 17 nt, Human
ccuguagcacuuacugg

SEQ ID NO: 3612084 - RNA, 12 nt, Human
ccuguagcccac

SEQ ID NO: 3612085 - RNA, 20 nt, Human
ccuguagccccagugacagc

SEQ ID NO: 3612086 - RNA, 16 nt, Human
ccuguagccuucugua

SEQ ID NO: 3612087 - RNA, 22 nt, Human
ccuguaggguccaaccagaccu

SEQ ID NO: 3612088 - RNA, 23 nt, Human
ccuguaggguccaaccagaccug

SEQ ID NO: 3612089 - RNA, 19 nt, Human
ccuguagucccagccacuc

SEQ ID NO: 3612090 - RNA, 17 nt, Human
ccuguaguuaggaaaua

SEQ ID NO: 3612091 - RNA, 18 nt, Human
ccuguaguuaggaaauaa

SEQ ID NO: 3612092 - RNA, 21 nt, Human
ccuguaguuaggaaauaaaac

SEQ ID NO: 3612093 - RNA, 19 nt, Human
ccuguaguugcguggacuc

SEQ ID NO: 3612094 - RNA, 21 nt, Human
ccuguaguugcguggacucug

SEQ ID NO: 3612095 - RNA, 23 nt, Human
ccuguaguugcguggacucugca

SEQ ID NO: 3612096 - RNA, 17 nt, Human
ccuguauaacccuguua

SEQ ID NO: 3612097 - RNA, 18 nt, Human
ccuguauaaguggaggca

SEQ ID NO: 3612098 - RNA, 16 nt, Human
ccuguauacagugcag

SEQ ID NO: 3612099 - RNA, 18 nt, Human
ccuguauacagugcagag

SEQ ID NO: 3612100 - RNA, 21 nt, Human
ccuguauacagugcagagccu

SEQ ID NO: 3612101 - RNA, 14 nt, Human
ccuguauacuuuag

SEQ ID NO: 3612102 - RNA, 13 nt, Human
ccuguauauagcc

SEQ ID NO: 3612103 - RNA, 17 nt, Human
ccuguaugucuccagua

SEQ ID NO: 3612104 - RNA, 14 nt, Human
ccuguaugucuguc

SEQ ID NO: 3612105 - RNA, 18 nt, Human
ccuguaugucugucauug

SEQ ID NO: 3612106 - RNA, 15 nt, Human
ccuguauucagacag

SEQ ID NO: 3612107 - RNA, 19 nt, Human
ccuguauuccugaccuccg

SEQ ID NO: 3612108 - RNA, 20 nt, Human
ccuguauuuaaaaauagaaa

SEQ ID NO: 3612109 - RNA, 18 nt, Human
ccuguauuuaagcaaaua

SEQ ID NO: 3612110 - RNA, 20 nt, Human
ccugucaaacaaagccagaa

SEQ ID NO: 3612111 - RNA, 14 nt, Human
ccugucaaacauua

SEQ ID NO: 3612112 - RNA, 14 nt, Human
ccugucacauugca

SEQ ID NO: 3612113 - RNA, 17 nt, Human
ccugucaccucuuccga

SEQ ID NO: 3612114 - RNA, 17 nt, Human
ccugucagauccaggag

SEQ ID NO: 3612115 - RNA, 23 nt, Human
ccugucagauccaggagcuccag

SEQ ID NO: 3612116 - RNA, 17 nt, Human
ccugucauacuuuguua

SEQ ID NO: 3612117 - RNA, 21 nt, Human
ccugucaucugagaaugaaca

SEQ ID NO: 3612118 - RNA, 12 nt, Human
ccugucaugccc

SEQ ID NO: 3612119 - RNA, 18 nt, Human
ccugucaugccccccuca

SEQ ID NO: 3612120 - RNA, 19 nt, Human
ccugucaugccccccucaa

SEQ ID NO: 3612121 - RNA, 21 nt, Human
ccugucaugccccccucaaac

SEQ ID NO: 3612122 - RNA, 20 nt, Human
ccugucaugguguccagaca

SEQ ID NO: 3612123 - RNA, 22 nt, Human
ccugucauucccaccacccuga

SEQ ID NO: 3612124 - RNA, 24 nt, Human
caaacccacgauuuucuccagcuc

SEQ ID NO: 3612125 - RNA, 24 nt, Human
caaacccagacggcuccacuagga

SEQ ID NO: 3612126 - RNA, 13 nt, Human
caaacccaugagg

SEQ ID NO: 3612127 - RNA, 17 nt, Human
caaacccccuuugugcu

SEQ ID NO: 3612128 - RNA, 13 nt, Human
caaaccccugacc

SEQ ID NO: 3612129 - RNA, 17 nt, Human
caaaccgccagcgaacu

SEQ ID NO: 3612130 - RNA, 21 nt, Human
caaaccgccagcgaacuugac

SEQ ID NO: 3612131 - RNA, 18 nt, Human
caaaccuccaaaagcccu

SEQ ID NO: 3612132 - RNA, 11 nt, Human
caaaccucugu

SEQ ID NO: 3612133 - RNA, 20 nt, Human
caaaccucuguucaguguaa

SEQ ID NO: 3612134 - RNA, 20 nt, Human
caaaccugaccccugcucag

SEQ ID NO: 3612135 - RNA, 12 nt, Human
caaaccugccug

SEQ ID NO: 3612136 - RNA, 13 nt, Human
caaaccugccugg

SEQ ID NO: 3612137 - RNA, 13 nt, Human
caaaccuggagau

SEQ ID NO: 3612138 - RNA, 13 nt, Human
caaaccugugaag

SEQ ID NO: 3612139 - RNA, 19 nt, Human
caaaccuguuuaaauauuu

SEQ ID NO: 3612140 - RNA, 22 nt, Human
caaaccuguuuaaauauuucaa

SEQ ID NO: 3612141 - RNA, 16 nt, Human
caaaccuugaugugcc

SEQ ID NO: 3612142 - RNA, 18 nt, Human
caaaccuuuauuuuagaa

SEQ ID NO: 3612143 - RNA, 12 nt, Human
caaaccuuuccc

SEQ ID NO: 3612144 - RNA, 13 nt, Human
caaaccuuucccc

SEQ ID NO: 3612145 - RNA, 22 nt, Human
caaaccuuucuauaauuuuaca

SEQ ID NO: 3612146 - RNA, 22 nt, Human
caaacgcccuuuccuccucagg

SEQ ID NO: 3612147 - RNA, 14 nt, Human
caaacgccuccccu

SEQ ID NO: 3612148 - RNA, 21 nt, Human
caaacgcuaaagagcccuugc

SEQ ID NO: 3612149 - RNA, 20 nt, Human
caaacgcugagccaccugcc

SEQ ID NO: 3612150 - RNA, 14 nt, Human
caaacgcugccugc

SEQ ID NO: 3612151 - RNA, 16 nt, Human
caaacgcugccugccc

SEQ ID NO: 3612152 - RNA, 20 nt, Human
caaacuaaaagacauuuguu

SEQ ID NO: 3612153 - RNA, 16 nt, Human
caaacuaacaggcuua

SEQ ID NO: 3612154 - RNA, 13 nt, Human
caaacuaagcccc

SEQ ID NO: 3612155 - RNA, 19 nt, Human
caaacuaagcccccgcugu

SEQ ID NO: 3612156 - RNA, 20 nt, Human
caaacuaagcccccgcugua

SEQ ID NO: 3612157 - RNA, 16 nt, Human
caaacuacauguaauc

SEQ ID NO: 3612158 - RNA, 22 nt, Human
caaacuacugaaugaagcagua

SEQ ID NO: 3612159 - RNA, 19 nt, Human
caaacuagggccaagccca

SEQ ID NO: 3612160 - RNA, 22 nt, Human
caaacuaggggacaaagcaaaa

SEQ ID NO: 3612161 - RNA, 19 nt, Human
caaacucacugcucaagaa

SEQ ID NO: 3612162 - RNA, 12 nt, Human
caaacucugcug

SEQ ID NO: 3612163 - RNA, 18 nt, Human
caaacucugcugucuaac

SEQ ID NO: 3612164 - RNA, 17 nt, Human
caaacucuugaccucag

SEQ ID NO: 3612165 - RNA, 19 nt, Human
caaacucuugaccucaggu

SEQ ID NO: 3612166 - RNA, 21 nt, Human
caaacucuugaccucagguga

SEQ ID NO: 3612167 - RNA, 14 nt, Human
caaacucuuugguc

SEQ ID NO: 3612168 - RNA, 14 nt, Human
caaacugaagccag

SEQ ID NO: 3612169 - RNA, 21 nt, Human
caaacugaaugaaacccccac

SEQ ID NO: 3612170 - RNA, 15 nt, Human
caaacugcacaugau

SEQ ID NO: 3612171 - RNA, 19 nt, Human
caaacugcacaugauuuca

SEQ ID NO: 3612172 - RNA, 18 nt, Human
caaacugccuaagcccuc

SEQ ID NO: 3612173 - RNA, 14 nt, Human
caaacugccuucuu

SEQ ID NO: 3612174 - RNA, 16 nt, Human
caaacuggagucugga

SEQ ID NO: 3612175 - RNA, 17 nt, Human
caaacuggcaaacuuca

SEQ ID NO: 3612176 - RNA, 20 nt, Human
caaacugggaaccccuuucc

SEQ ID NO: 3612177 - RNA, 23 nt, Human
caaacugggaaccccuuucccac

SEQ ID NO: 3612178 - RNA, 12 nt, Human
caaacuguaaau

SEQ ID NO: 3612179 - RNA, 14 nt, Human
caaacuguaaauaa

SEQ ID NO: 3612180 - RNA, 18 nt, Human
caaacuguguaacugccc

SEQ ID NO: 3612181 - RNA, 16 nt, Human
caaacuguucaagaaa

SEQ ID NO: 3612182 - RNA, 21 nt, Human
caaacuuaauguucuuaugca

SEQ ID NO: 3612183 - RNA, 14 nt, Human
caaacuuacuauuu

SEQ ID NO: 3612184 - RNA, 13 nt, Human
caaacuugcuuua

SEQ ID NO: 3612185 - RNA, 21 nt, Human
caaagaaaaugaaaugcauau

SEQ ID NO: 3612186 - RNA, 13 nt, Human
caaagaaaauucc

SEQ ID NO: 3612187 - RNA, 17 nt, Human
caaagaaaauuccuaua

SEQ ID NO: 3612188 - RNA, 19 nt, Human
caaagaaaauuccuauaag

SEQ ID NO: 3612189 - RNA, 17 nt, Human
caaagaaacaaagaugu

SEQ ID NO: 3612190 - RNA, 13 nt, Human
caaagaaagugua

SEQ ID NO: 3612191 - RNA, 14 nt, Human
caaagaaauauuaa

SEQ ID NO: 3612192 - RNA, 13 nt, Human
caaagaaaugaac

SEQ ID NO: 3612193 - RNA, 15 nt, Human
caaagaaaugaacau

SEQ ID NO: 3612194 - RNA, 14 nt, Human
caaagaaauguaag

SEQ ID NO: 3612195 - RNA, 13 nt, Human
caaagaaauuaug

SEQ ID NO: 3612196 - RNA, 18 nt, Human
caaagaaccuucucuaug

SEQ ID NO: 3612197 - RNA, 14 nt, Human
caaagaagacaaca

SEQ ID NO: 3612198 - RNA, 13 nt, Human
caaagaagacaug

SEQ ID NO: 3612199 - RNA, 20 nt, Human
caaagaauguuagagcacag

SEQ ID NO: 3612200 - RNA, 22 nt, Human
caaagaauuucaauuuguucag

SEQ ID NO: 3612201 - RNA, 19 nt, Human
caaagacaaaagucugucu

SEQ ID NO: 3612202 - RNA, 23 nt, Human
caaagacaaauaguaggcaagau

SEQ ID NO: 3612203 - RNA, 16 nt, Human
caaagacccuggcuuu

SEQ ID NO: 3612204 - RNA, 17 nt, Human
caaagacccuggcuuuc

SEQ ID NO: 3612205 - RNA, 16 nt, Human
caaagacuuaguauau

SEQ ID NO: 3612206 - RNA, 20 nt, Human
caaagagaaaaagaaaugca

SEQ ID NO: 3612207 - RNA, 14 nt, Human
caaagagaaaacau

SEQ ID NO: 3612208 - RNA, 18 nt, Human
caaagagacuggagcauc

SEQ ID NO: 3612209 - RNA, 19 nt, Human
caaagagaguuaaucaacu

SEQ ID NO: 3612210 - RNA, 19 nt, Human
caaagagcacaaacauuuu

SEQ ID NO: 3612211 - RNA, 20 nt, Human
caaagagcacaaacauuuuu

SEQ ID NO: 3612212 - RNA, 15 nt, Human
caaagagccuggaga

SEQ ID NO: 3612213 - RNA, 17 nt, Human
caaagagccuggagaag

SEQ ID NO: 3612214 - RNA, 20 nt, Human
caaagaggcaagaggcugga

SEQ ID NO: 3612215 - RNA, 19 nt, Human
caaagaggccuuuaaccau

SEQ ID NO: 3612216 - RNA, 15 nt, Human
caaagaggcugcccc

SEQ ID NO: 3612217 - RNA, 22 nt, Human
caaagaggcugccccucucacc

SEQ ID NO: 3612218 - RNA, 16 nt, Human
caaagagggcuuccuc

SEQ ID NO: 3612219 - RNA, 14 nt, Human
caaagaguagaauu

SEQ ID NO: 3612220 - RNA, 16 nt, Human
caaagaguuaauauau

SEQ ID NO: 3612221 - RNA, 16 nt, Human
caaagaguucaagaaa

SEQ ID NO: 3612222 - RNA, 17 nt, Human
caaagaguucaagaaau

SEQ ID NO: 3612223 - RNA, 24 nt, Human
caaagaguucuggaaaagaacugu

SEQ ID NO: 3612224 - RNA, 18 nt, Human
caaagauagacagguccu

SEQ ID NO: 3612225 - RNA, 17 nt, Human
caaagauaucucaucuc

SEQ ID NO: 3612226 - RNA, 22 nt, Human
caaagauauuuugcuuugugau

SEQ ID NO: 3612227 - RNA, 13 nt, Human
caaagaucaaaau

SEQ ID NO: 3612228 - RNA, 15 nt, Human
caaagaucacuuguu

SEQ ID NO: 3612229 - RNA, 13 nt, Human
caaagaugcagcc

SEQ ID NO: 3612230 - RNA, 16 nt, Human
caaagaugcugugagu

SEQ ID NO: 3612231 - RNA, 20 nt, Human
caaagaugggugaaggcugg

SEQ ID NO: 3612232 - RNA, 16 nt, Human
caaagauucaugauuu

SEQ ID NO: 3612233 - RNA, 13 nt, Human
caaagcaaggaaa

SEQ ID NO: 3612234 - RNA, 15 nt, Human
caaagcaaggaaacu

SEQ ID NO: 3612235 - RNA, 18 nt, Human
caaagcaauugaaaugca

SEQ ID NO: 3612236 - RNA, 22 nt, Human
caaagcacaguguuaaaugaaa

SEQ ID NO: 3612237 - RNA, 18 nt, Human
caaagcaccaaaauaaga

SEQ ID NO: 3612238 - RNA, 19 nt, Human
caaagcaccaaaauaagaa

SEQ ID NO: 3612239 - RNA, 21 nt, Human
caaagcacuuggacucuugcu

SEQ ID NO: 3612240 - RNA, 12 nt, Human
caaagcagacag

SEQ ID NO: 3612241 - RNA, 15 nt, Human
caaagcagacagcuc

SEQ ID NO: 3612242 - RNA, 17 nt, Human
caaagcagacagcucca

SEQ ID NO: 3612243 - RNA, 15 nt, Human
caaagcagagagcau

SEQ ID NO: 3612244 - RNA, 13 nt, Human
caaagcagccacg

SEQ ID NO: 3612245 - RNA, 22 nt, Human
caaagcaggggaguaugcaaaa

SEQ ID NO: 3612246 - RNA, 15 nt, Human
caaagcagugcaugc

SEQ ID NO: 3612247 - RNA, 17 nt, Human
caaagcagugcaugcug

SEQ ID NO: 3612248 - RNA, 18 nt, Human
caaagcagugcaugcugu

SEQ ID NO: 3612249 - RNA, 15 nt, Human
caaagcaguggagcc

SEQ ID NO: 3612250 - RNA, 17 nt, Human
caaagcauugagcaaag

SEQ ID NO: 3612251 - RNA, 20 nt, Human
caaagccaaagcuaggccug

SEQ ID NO: 3612252 - RNA, 21 nt, Human
caaagccaaagcuaggccugg

SEQ ID NO: 3612253 - RNA, 22 nt, Human
caaagccaacagucaaaacaga

SEQ ID NO: 3612254 - RNA, 16 nt, Human
caaagccaagaccuca

SEQ ID NO: 3612255 - RNA, 21 nt, Human
caaagccaccaacagccacuc

SEQ ID NO: 3612256 - RNA, 20 nt, Human
caaagccaccucugucauuu

SEQ ID NO: 3612257 - RNA, 12 nt, Human
caaagccagaac

SEQ ID NO: 3612258 - RNA, 14 nt, Human
caaagccagaagcu

SEQ ID NO: 3612259 - RNA, 16 nt, Human
caaagccagaagcuga

SEQ ID NO: 3612260 - RNA, 15 nt, Human
caaagccagacagca

SEQ ID NO: 3612261 - RNA, 23 nt, Human
caaagccagggucucucccucag

SEQ ID NO: 3612262 - RNA, 17 nt, Human
caaagccaggucccucu

SEQ ID NO: 3612263 - RNA, 19 nt, Human
caaagccaggucccucuca

SEQ ID NO: 3612264 - RNA, 14 nt, Human
caaagcccaaggga

SEQ ID NO: 3612265 - RNA, 22 nt, Human
caaagccccaugcuggagccug

SEQ ID NO: 3612266 - RNA, 15 nt, Human
caaagcccuuuuaua

SEQ ID NO: 3612267 - RNA, 19 nt, Human
caaagccuguucauggcag

SEQ ID NO: 3612268 - RNA, 20 nt, Human
caaagccuguucauggcaga

SEQ ID NO: 3612269 - RNA, 18 nt, Human
caggcuacucuccucggc

SEQ ID NO: 3612270 - RNA, 11 nt, Human
caggcuacugu

SEQ ID NO: 3612271 - RNA, 15 nt, Human
caggcuagaaccugg

SEQ ID NO: 3612272 - RNA, 13 nt, Human
caggcuagaugua

SEQ ID NO: 3612273 - RNA, 17 nt, Human
caggcuagcuggagccu

SEQ ID NO: 3612274 - RNA, 15 nt, Human
caggcucacucacag

SEQ ID NO: 3612275 - RNA, 13 nt, Human
caggcucacugcc

SEQ ID NO: 3612276 - RNA, 14 nt, Human
caggcucacugcca

SEQ ID NO: 3612277 - RNA, 18 nt, Human
caggcucacugccaggcc

SEQ ID NO: 3612278 - RNA, 20 nt, Human
caggcucacugccaggccag

SEQ ID NO: 3612279 - RNA, 23 nt, Human
caggcucacugccaggccagccu

SEQ ID NO: 3612280 - RNA, 22 nt, Human
caggcucccaggagccugccca

SEQ ID NO: 3612281 - RNA, 14 nt, Human
caggcucccaggga

SEQ ID NO: 3612282 - RNA, 14 nt, Human
caggcuccucccuc

SEQ ID NO: 3612283 - RNA, 14 nt, Human
caggcuccugccac

SEQ ID NO: 3612284 - RNA, 12 nt, Human
caggcuccuucc

SEQ ID NO: 3612285 - RNA, 14 nt, Human
caggcuccuuccug

SEQ ID NO: 3612286 - RNA, 14 nt, Human
caggcuccuuuagc

SEQ ID NO: 3612287 - RNA, 21 nt, Human
caggcuccuuuagcgcccagu

SEQ ID NO: 3612288 - RNA, 16 nt, Human
caggcucggccugccc

SEQ ID NO: 3612289 - RNA, 19 nt, Human
caggcucggccugccccca

SEQ ID NO: 3612290 - RNA, 13 nt, Human
caggcucucaaca

SEQ ID NO: 3612291 - RNA, 13 nt, Human
caggcucucaggc

SEQ ID NO: 3612292 - RNA, 15 nt, Human
caggcucucaggcca

SEQ ID NO: 3612293 - RNA, 18 nt, Human
caggcucucaggccagcu

SEQ ID NO: 3612294 - RNA, 20 nt, Human
caggcucucaggccagcugc

SEQ ID NO: 3612295 - RNA, 21 nt, Human
caggcucucaggccagcugcu

SEQ ID NO: 3612296 - RNA, 23 nt, Human
caggcucucaggccagcugcuug

SEQ ID NO: 3612297 - RNA, 15 nt, Human
caggcucugcccugc

SEQ ID NO: 3612298 - RNA, 22 nt, Human
caggcucuuagcagcuuccaga

SEQ ID NO: 3612299 - RNA, 14 nt, Human
caggcugacaucug

SEQ ID NO: 3612300 - RNA, 16 nt, Human
caggcugacaucugug

SEQ ID NO: 3612301 - RNA, 15 nt, Human
caggcugaccacagc

SEQ ID NO: 3612302 - RNA, 20 nt, Human
caggcugaccacagcacagc

SEQ ID NO: 3612303 - RNA, 21 nt, Human
caggcugaccacagcacagcc

SEQ ID NO: 3612304 - RNA, 14 nt, Human
caggcugagccuca

SEQ ID NO: 3612305 - RNA, 17 nt, Human
caggcugagccucaguc

SEQ ID NO: 3612306 - RNA, 21 nt, Human
caggcugagccucagucuccc

SEQ ID NO: 3612307 - RNA, 15 nt, Human
caggcugagugcagg

SEQ ID NO: 3612308 - RNA, 22 nt, Human
caggcugagugcaggcccaccc

SEQ ID NO: 3612309 - RNA, 18 nt, Human
caggcugcagcuggacag

SEQ ID NO: 3612310 - RNA, 17 nt, Human
caggcugcauagaagga

SEQ ID NO: 3612311 - RNA, 22 nt, Human
caggcugccaaggccagagugg

SEQ ID NO: 3612312 - RNA, 12 nt, Human
caggcugccagu

SEQ ID NO: 3612313 - RNA, 14 nt, Human
caggcugccagugc

SEQ ID NO: 3612314 - RNA, 21 nt, Human
caggcugccagugccugggug

SEQ ID NO: 3612315 - RNA, 16 nt, Human
caggcugccguggggc

SEQ ID NO: 3612316 - RNA, 13 nt, Human
caggcugccugag

SEQ ID NO: 3612317 - RNA, 20 nt, Human
caggcugccugagcaccucc

SEQ ID NO: 3612318 - RNA, 17 nt, Human
caggcugcucagggcug

SEQ ID NO: 3612319 - RNA, 22 nt, Human
caggcugcucucaaaccccuga

SEQ ID NO: 3612320 - RNA, 12 nt, Human
caggcugcucuu

SEQ ID NO: 3612321 - RNA, 11 nt, Human
caggcugcugg

SEQ ID NO: 3612322 - RNA, 15 nt, Human
caggcugcuggagga

SEQ ID NO: 3612323 - RNA, 12 nt, Human
caggcugcuggc

SEQ ID NO: 3612324 - RNA, 12 nt, Human
caggcugcuugg

SEQ ID NO: 3612325 - RNA, 19 nt, Human
caggcuggaagauagcugu

SEQ ID NO: 3612326 - RNA, 22 nt, Human
caggcuggacaugcugacuguc

SEQ ID NO: 3612327 - RNA, 21 nt, Human
caggcuggccagccccacagc

SEQ ID NO: 3612328 - RNA, 17 nt, Human
caggcuggccagccgcu

SEQ ID NO: 3612329 - RNA, 21 nt, Human
caggcuggccaguccaggcug

SEQ ID NO: 3612330 - RNA, 14 nt, Human
caggcuggcccugc

SEQ ID NO: 3612331 - RNA, 16 nt, Human
caggcuggcccugccc

SEQ ID NO: 3612332 - RNA, 13 nt, Human
caggcuggcgcag

SEQ ID NO: 3612333 - RNA, 17 nt, Human
caggcuggcgcagccaa

SEQ ID NO: 3612334 - RNA, 20 nt, Human
caggcuggcgcagccaaggc

SEQ ID NO: 3612335 - RNA, 21 nt, Human
caggcuggcgcagccaaggcc

SEQ ID NO: 3612336 - RNA, 15 nt, Human
caggcuggcgugcag

SEQ ID NO: 3612337 - RNA, 17 nt, Human
caggcuggcuccagaug

SEQ ID NO: 3612338 - RNA, 18 nt, Human
caggcuggcuccagaugc

SEQ ID NO: 3612339 - RNA, 20 nt, Human
caggcuggcuccagaugcag

SEQ ID NO: 3612340 - RNA, 12 nt, Human
caggcugggaac

SEQ ID NO: 3612341 - RNA, 16 nt, Human
caggcugggagagccu

SEQ ID NO: 3612342 - RNA, 18 nt, Human
caggcugggagagccuuc

SEQ ID NO: 3612343 - RNA, 19 nt, Human
caggcugggagagccuucc

SEQ ID NO: 3612344 - RNA, 18 nt, Human
caggcugggcaaggaggc

SEQ ID NO: 3612345 - RNA, 13 nt, Human
caggcugggccau

SEQ ID NO: 3612346 - RNA, 20 nt, Human
caggcugggccauguccaaa

SEQ ID NO: 3612347 - RNA, 12 nt, Human
caggcugggcug

SEQ ID NO: 3612348 - RNA, 13 nt, Human
caggcugggcugg

SEQ ID NO: 3612349 - RNA, 16 nt, Human
caggcugggcugggca

SEQ ID NO: 3612350 - RNA, 19 nt, Human
caggcugggcugggcacug

SEQ ID NO: 3612351 - RNA, 21 nt, Human
caggcugggcugggcacugcu

SEQ ID NO: 3612352 - RNA, 20 nt, Human
caggcugggcuucaguggca

SEQ ID NO: 3612353 - RNA, 21 nt, Human
caggcugggcuucaguggcag

SEQ ID NO: 3612354 - RNA, 22 nt, Human
caggcugggcuucaguggcagc

SEQ ID NO: 3612355 - RNA, 12 nt, Human
caggcuggggcc

SEQ ID NO: 3612356 - RNA, 17 nt, Human
caggcuggucuaaaacu

SEQ ID NO: 3612357 - RNA, 18 nt, Human
caggcuggucuaaaacuc

SEQ ID NO: 3612358 - RNA, 12 nt, Human
caggcuggucuc

SEQ ID NO: 3612359 - RNA, 13 nt, Human
caggcuggucuca

SEQ ID NO: 3612360 - RNA, 21 nt, Human
caggcuggucuugaaguccug

SEQ ID NO: 3612361 - RNA, 14 nt, Human
caggcuguauccca

SEQ ID NO: 3612362 - RNA, 17 nt, Human
caggcugucuggccagg

SEQ ID NO: 3612363 - RNA, 22 nt, Human
caggcugugcgcugacaaccac

SEQ ID NO: 3612364 - RNA, 17 nt, Human
caggcuguucugcacug

SEQ ID NO: 3612365 - RNA, 18 nt, Human
caggcuguuuuugggugc

SEQ ID NO: 3612366 - RNA, 20 nt, Human
caggcuuaauaaaaaugaca

SEQ ID NO: 3612367 - RNA, 17 nt, Human
caggcuuagucacugag

SEQ ID NO: 3612368 - RNA, 20 nt, Human
caggcuuagucacugagaca

SEQ ID NO: 3612369 - RNA, 22 nt, Human
caggcuuagucacugagacagc

SEQ ID NO: 3612370 - RNA, 16 nt, Human
caggcuucugagcagc

SEQ ID NO: 3612371 - RNA, 23 nt, Human
caggcuucugagcagcgagccug

SEQ ID NO: 3612372 - RNA, 18 nt, Human
caggcuuucuagaaagaa

SEQ ID NO: 3612373 - RNA, 14 nt, Human
caggcuuuuguuuc

SEQ ID NO: 3612374 - RNA, 15 nt, Human
cagggaaaagcagcu

SEQ ID NO: 3612375 - RNA, 21 nt, Human
cagggaaaagcagcucucccc

SEQ ID NO: 3612376 - RNA, 18 nt, Human
cagggaaaauaggcagga

SEQ ID NO: 3612377 - RNA, 20 nt, Human
cagggaaaaugcagcaggga

SEQ ID NO: 3612378 - RNA, 20 nt, Human
cagggaaaauuauuugcaua

SEQ ID NO: 3612379 - RNA, 16 nt, Human
cagggaaacagcuaau

SEQ ID NO: 3612380 - RNA, 22 nt, Human
cagggaaccguuauuauaauug

SEQ ID NO: 3612381 - RNA, 19 nt, Human
cagggaacgugauuaguga

SEQ ID NO: 3612382 - RNA, 19 nt, Human
cagggaagauaaguuggaa

SEQ ID NO: 3612383 - RNA, 14 nt, Human
cagggaagcccagc

SEQ ID NO: 3612384 - RNA, 15 nt, Human
cagggaagcccagcu

SEQ ID NO: 3612385 - RNA, 16 nt, Human
cagggaagcccagcuc

SEQ ID NO: 3612386 - RNA, 19 nt, Human
cagggaagcccagcuccag

SEQ ID NO: 3612387 - RNA, 12 nt, Human
caguguguaaac

SEQ ID NO: 3612388 - RNA, 14 nt, Human
caguguguaaacaa

SEQ ID NO: 3612389 - RNA, 14 nt, Human
cagugugucuccug

SEQ ID NO: 3612390 - RNA, 22 nt, Human
caguguguggcuuucagagccu

SEQ ID NO: 3612391 - RNA, 17 nt, Human
caguguguggucaacau

SEQ ID NO: 3612392 - RNA, 16 nt, Human
caguguuaaaugaaau

SEQ ID NO: 3612393 - RNA, 19 nt, Human
caguguuaaaugugaugaa

SEQ ID NO: 3612394 - RNA, 17 nt, Human
caguguuaccugugugc

SEQ ID NO: 3612395 - RNA, 13 nt, Human
caguguuagcuua

SEQ ID NO: 3612396 - RNA, 23 nt, Human
caguguuaggccuggcacagugu

SEQ ID NO: 3612397 - RNA, 14 nt, Human
caguguuauuuucu

SEQ ID NO: 3612398 - RNA, 14 nt, Human
caguguuccccauc

SEQ ID NO: 3612399 - RNA, 15 nt, Human
caguguucgcuuggc

SEQ ID NO: 3612400 - RNA, 19 nt, Human
caguguuguggauuuaaca

SEQ ID NO: 3612401 - RNA, 14 nt, Human
caguguuguuugua

SEQ ID NO: 3612402 - RNA, 17 nt, Human
caguguuguuuguaaau

SEQ ID NO: 3612403 - RNA, 23 nt, Human
caguguuguuuguaaauaagaga

SEQ ID NO: 3612404 - RNA, 14 nt, Human
caguguuuaaaacu

SEQ ID NO: 3612405 - RNA, 14 nt, Human
caguguuuccuuuu

SEQ ID NO: 3612406 - RNA, 13 nt, Human
caguguuugugug

SEQ ID NO: 3612407 - RNA, 21 nt, Human
caguguuuugaccuuugauac

SEQ ID NO: 3612408 - RNA, 22 nt, Human
caguguuuuggacuccaucucu

SEQ ID NO: 3612409 - RNA, 20 nt, Human
caguguuuuuguaaagugug

SEQ ID NO: 3612410 - RNA, 19 nt, Human
caguuaaaaaaaauuuuaa

SEQ ID NO: 3612411 - RNA, 14 nt, Human
caguuaaaauguga

SEQ ID NO: 3612412 - RNA, 22 nt, Human
caguuaacuuucagaagagaug

SEQ ID NO: 3612413 - RNA, 14 nt, Human
caguuaagaaaaaa

SEQ ID NO: 3612414 - RNA, 20 nt, Human
aaaccgaguagaaaauguga

SEQ ID NO: 3612415 - RNA, 19 nt, Human
aaaccgccagcucuguucu

SEQ ID NO: 3612416 - RNA, 16 nt, Human
aaaccgccuaguuuac

SEQ ID NO: 3612417 - RNA, 19 nt, Human
aaaccguccuguguacaca

SEQ ID NO: 3612418 - RNA, 18 nt, Human
aaaccuauccucacugcc

SEQ ID NO: 3612419 - RNA, 14 nt, Human
aaaccucaccaacu

SEQ ID NO: 3612420 - RNA, 19 nt, Human
aaaccucuaauuuauuuug

SEQ ID NO: 3612421 - RNA, 16 nt, Human
aaaccucuacuaaaaa

SEQ ID NO: 3612422 - RNA, 14 nt, Human
aaaccucuguucag

SEQ ID NO: 3612423 - RNA, 17 nt, Human
aaaccucuguucagugu

SEQ ID NO: 3612424 - RNA, 12 nt, Human
aaaccugaagac

SEQ ID NO: 3612425 - RNA, 19 nt, Human
aaaccugauguuaaaauuc

SEQ ID NO: 3612426 - RNA, 17 nt, Human
aaaccugcccugccuga

SEQ ID NO: 3612427 - RNA, 12 nt, Human
aaaccugccugg

SEQ ID NO: 3612428 - RNA, 20 nt, Human
aaaccugcuuuucaaugugu

SEQ ID NO: 3612429 - RNA, 18 nt, Human
aaaccugggauuauauau

SEQ ID NO: 3612430 - RNA, 16 nt, Human
aaaccuguagaaucaa

SEQ ID NO: 3612431 - RNA, 12 nt, Human
aaaccuguaucu

SEQ ID NO: 3612432 - RNA, 13 nt, Human
aaaccuguaucuu

SEQ ID NO: 3612433 - RNA, 18 nt, Human
aaaccugugaagcugaaa

SEQ ID NO: 3612434 - RNA, 22 nt, Human
aaaccuuaucuccacaaccucu

SEQ ID NO: 3612435 - RNA, 18 nt, Human
aaaccuuauuguaccucu

SEQ ID NO: 3612436 - RNA, 20 nt, Human
aaaccuucacacacagacug

SEQ ID NO: 3612437 - RNA, 16 nt, Human
aaaccuuccacccagu

SEQ ID NO: 3612438 - RNA, 14 nt, Human
aaaccuucugccuu

SEQ ID NO: 3612439 - RNA, 20 nt, Human
aaaccuugcuaauuuucuca

SEQ ID NO: 3612440 - RNA, 15 nt, Human
aaaccuuuaagaaaa

SEQ ID NO: 3612441 - RNA, 16 nt, Human
aaaccuuuagggcagc

SEQ ID NO: 3612442 - RNA, 11 nt, Human
aaaccuuucaa

SEQ ID NO: 3612443 - RNA, 12 nt, Human
aaaccuuucccc

SEQ ID NO: 3612444 - RNA, 18 nt, Human
aaaccuuucuauaauuuu

SEQ ID NO: 3612445 - RNA, 21 nt, Human
aaaccuuucuauaauuuuaca

SEQ ID NO: 3612446 - RNA, 18 nt, Human
aaaccuuuguuugcaucu

SEQ ID NO: 3612447 - RNA, 12 nt, Human
aaaccuuuuauu

SEQ ID NO: 3612448 - RNA, 20 nt, Human
aaaccuuuuggaaaaucugc

SEQ ID NO: 3612449 - RNA, 18 nt, Human
aaaccuuuuuuaagauuu

SEQ ID NO: 3612450 - RNA, 19 nt, Human
aaaccuuuuuuaagauuuu

SEQ ID NO: 3612451 - RNA, 23 nt, Human
aaaccuuuuuuaagauuuuucuc

SEQ ID NO: 3612452 - RNA, 14 nt, Human
aaacgaaggccucu

SEQ ID NO: 3612453 - RNA, 18 nt, Human
aaacgacaaaucugucug

SEQ ID NO: 3612454 - RNA, 19 nt, Human
aaacgacaaaucugucugc

SEQ ID NO: 3612455 - RNA, 17 nt, Human
aaacgagacuuuccauu

SEQ ID NO: 3612456 - RNA, 15 nt, Human
aaacgauuuaauucu

SEQ ID NO: 3612457 - RNA, 17 nt, Human
aaacgauuuaauucucu

SEQ ID NO: 3612458 - RNA, 19 nt, Human
aaacgauuuaauucucuug

SEQ ID NO: 3612459 - RNA, 19 nt, Human
aaacgcaaagggcugaaag

SEQ ID NO: 3612460 - RNA, 13 nt, Human
aaacgcagacacu

SEQ ID NO: 3612461 - RNA, 14 nt, Human
aaacgcgcagaugu

SEQ ID NO: 3612462 - RNA, 16 nt, Human
aaacgcuaccucucug

SEQ ID NO: 3612463 - RNA, 14 nt, Human
aaacgcuccuuugu

SEQ ID NO: 3612464 - RNA, 14 nt, Human
aaacgcugccugcc

SEQ ID NO: 3612465 - RNA, 16 nt, Human
aaacggauuauuuuuu

SEQ ID NO: 3612466 - RNA, 18 nt, Human
aaacggauuauuuuuuca

SEQ ID NO: 3612467 - RNA, 22 nt, Human
aaacggauuauuuuuucagacc

SEQ ID NO: 3612468 - RNA, 19 nt, Human
aaacgggaacaugcccccu

SEQ ID NO: 3612469 - RNA, 15 nt, Human
aaacgguuaaaacug

SEQ ID NO: 3612470 - RNA, 14 nt, Human
aaacgguucaguuu

SEQ ID NO: 3612471 - RNA, 13 nt, Human
aaacgucuuaaau

SEQ ID NO: 3612472 - RNA, 18 nt, Human
aaacgucuuauuguggua

SEQ ID NO: 3612473 - RNA, 16 nt, Human
aaacguggcugcuuca

SEQ ID NO: 3612474 - RNA, 20 nt, Human
aaacguggcuuuuagacaga

SEQ ID NO: 3612475 - RNA, 22 nt, Human
aaacguuucaguaauaaaacau

SEQ ID NO: 3612476 - RNA, 19 nt, Human
aaacuaaagaaauuucuca

SEQ ID NO: 3612477 - RNA, 20 nt, Human
aaacuaaagcaauagaaaca

SEQ ID NO: 3612478 - RNA, 16 nt, Human
aaacuaaauagcaugu

SEQ ID NO: 3612479 - RNA, 13 nt, Human
aaacuaaauugua

SEQ ID NO: 3612480 - RNA, 13 nt, Human
aaacuaaggugcu

SEQ ID NO: 3612481 - RNA, 15 nt, Human
aaacuaaggugcuaa

SEQ ID NO: 3612482 - RNA, 14 nt, Human
aaacuaauaaaaua

SEQ ID NO: 3612483 - RNA, 19 nt, Human
aaacuaauaaaauauuuuc

SEQ ID NO: 3612484 - RNA, 21 nt, Human
aaacuaauaaaauauuuucug

SEQ ID NO: 3612485 - RNA, 22 nt, Human
aaacuacauuagguugugaaug

SEQ ID NO: 3612486 - RNA, 21 nt, Human
aaacuaccuguauuuaaaaau

SEQ ID NO: 3612487 - RNA, 16 nt, Human
aaacuacugaaugaag

SEQ ID NO: 3612488 - RNA, 21 nt, Human
aaacuacugaaugaagcagua

SEQ ID NO: 3612489 - RNA, 20 nt, Human
aaacuacuugauuuuauugu

SEQ ID NO: 3612490 - RNA, 23 nt, Human
aaacuagaaagcagagauuuuca

SEQ ID NO: 3612491 - RNA, 16 nt, Human
aaacuagaauuucauu

SEQ ID NO: 3612492 - RNA, 15 nt, Human
aaacuagaugaccuc

SEQ ID NO: 3612493 - RNA, 22 nt, Human
aaacuagaugaccucauuaacc

SEQ ID NO: 3612494 - RNA, 14 nt, Human
aaacuagcauaucu

SEQ ID NO: 3612495 - RNA, 15 nt, Human
aaacuagcucgugau

SEQ ID NO: 3612496 - RNA, 19 nt, Human
aaacuaggcauuuguaaau

SEQ ID NO: 3612497 - RNA, 20 nt, Human
aaacuaggcauuuguaaaua

SEQ ID NO: 3612498 - RNA, 18 nt, Human
aaacuagggccaagccca

SEQ ID NO: 3612499 - RNA, 13 nt, Human
aaacuauaaaaca

SEQ ID NO: 3612500 - RNA, 17 nt, Human
aaacuauaaaacaaaaa

SEQ ID NO: 3612501 - RNA, 18 nt, Human
aaacuauacuugaacaaa

SEQ ID NO: 3612502 - RNA, 20 nt, Human
aaacuauacuugaacaaaag

SEQ ID NO: 3612503 - RNA, 18 nt, Human
aaacuauauuuugucaua

SEQ ID NO: 3612504 - RNA, 16 nt, Human
aaacuaucaguuuguc

SEQ ID NO: 3612505 - RNA, 14 nt, Human
aaacuaugaaaccu

SEQ ID NO: 3612506 - RNA, 16 nt, Human
aaacuauguguuuuuc

SEQ ID NO: 3612507 - RNA, 19 nt, Human
aaacuauguguuuuucuca

SEQ ID NO: 3612508 - RNA, 21 nt, Human
aaacuauguguuuuucucaua

SEQ ID NO: 3612509 - RNA, 14 nt, Human
aaacuauuaaggau

SEQ ID NO: 3612510 - RNA, 22 nt, Human
aaacuauuaaggauguagcuuu

SEQ ID NO: 3612511 - RNA, 22 nt, Human
aaacucaaaacuuaacauauuu

SEQ ID NO: 3612512 - RNA, 17 nt, Human
aaacucaaccaaauggu

SEQ ID NO: 3612513 - RNA, 14 nt, Human
aaacucaagacaau

SEQ ID NO: 3612514 - RNA, 23 nt, Human
aaacucaaugcuuuauuuguaaa

SEQ ID NO: 3612515 - RNA, 13 nt, Human
aaacucacaaaug

SEQ ID NO: 3612516 - RNA, 16 nt, Human
aaacucaccauguaaa

SEQ ID NO: 3612517 - RNA, 19 nt, Human
aaacucaccugcuggcccc

SEQ ID NO: 3612518 - RNA, 20 nt, Human
aaacucaccugcuggccccu

SEQ ID NO: 3612519 - RNA, 22 nt, Human
aaacucaccugcuggccccuca

SEQ ID NO: 3612520 - RNA, 13 nt, Human
aaacucagggaca

SEQ ID NO: 3612521 - RNA, 19 nt, Human
aaacucagggacagagcca

SEQ ID NO: 3612522 - RNA, 16 nt, Human
aaacucagggcuucua

SEQ ID NO: 3612523 - RNA, 22 nt, Human
aaacucauauuacaaaaacaaa

SEQ ID NO: 3612524 - RNA, 17 nt, Human
aaacucaucugaaaugu

SEQ ID NO: 3612525 - RNA, 15 nt, Human
aaacucauuuugcuu

SEQ ID NO: 3612526 - RNA, 17 nt, Human
aaacuccacaucugccu

SEQ ID NO: 3612527 - RNA, 15 nt, Human
aaacuccagaugcca

SEQ ID NO: 3612528 - RNA, 22 nt, Human
aaacuccagaugccacaaugga

SEQ ID NO: 3612529 - RNA, 23 nt, Human
aaacucccacuugucaugugaca

SEQ ID NO: 3612530 - RNA, 23 nt, Human
aaacucccauuuacgugucugaa

SEQ ID NO: 3612531 - RNA, 16 nt, Human
aaacuccgcccccagc

SEQ ID NO: 3612532 - RNA, 19 nt, Human
aaacuccgucuuagaagug

SEQ ID NO: 3612533 - RNA, 14 nt, Human
aaacuccuuccugg

SEQ ID NO: 3612534 - RNA, 23 nt, Human
aaacucgaggacuguauuuguga

SEQ ID NO: 3612535 - RNA, 24 nt, Human
aaacucgaggacuguauuugugac

SEQ ID NO: 3612536 - RNA, 13 nt, Human
aaacucuaugguc

SEQ ID NO: 3612537 - RNA, 18 nt, Human
aaacucuauuuagaugca

SEQ ID NO: 3612538 - RNA, 13 nt, Human
aaacucuccucug

SEQ ID NO: 3612539 - RNA, 12 nt, Human
aaacucucugaa

SEQ ID NO: 3612540 - RNA, 13 nt, Human
aaacucucugaac

SEQ ID NO: 3612541 - RNA, 17 nt, Human
aaacucucuuugggaau

SEQ ID NO: 3612542 - RNA, 21 nt, Human
caguuuaaugaagaucuaaau

SEQ ID NO: 3612543 - RNA, 18 nt, Human
caguuuauacccuaguua

SEQ ID NO: 3612544 - RNA, 14 nt, Human
caguuuauauggaa

SEQ ID NO: 3612545 - RNA, 17 nt, Human
caguuuauauuuaacuc

SEQ ID NO: 3612546 - RNA, 16 nt, Human
caguuuaucaugaagc

SEQ ID NO: 3612547 - RNA, 20 nt, Human
caguuuaucaugaagccugu

SEQ ID NO: 3612548 - RNA, 14 nt, Human
caguuuaucauuca

SEQ ID NO: 3612549 - RNA, 22 nt, Human
caguuuauuccagagcugccag

SEQ ID NO: 3612550 - RNA, 20 nt, Human
caguuucaauaaaguuugau

SEQ ID NO: 3612551 - RNA, 21 nt, Human
caguuucacagaaaauaaggc

SEQ ID NO: 3612552 - RNA, 17 nt, Human
caguuuccucaucuguc

SEQ ID NO: 3612553 - RNA, 14 nt, Human
caguuuccuuggga

SEQ ID NO: 3612554 - RNA, 18 nt, Human
caguuucuaaacuggaga

SEQ ID NO: 3612555 - RNA, 17 nt, Human
caguuugaaauucugaa

SEQ ID NO: 3612556 - RNA, 21 nt, Human
caguuugaaauucugaauuug

SEQ ID NO: 3612557 - RNA, 22 nt, Human
caguuugaaauucugaauuugc

SEQ ID NO: 3612558 - RNA, 15 nt, Human
caguuugagacagga

SEQ ID NO: 3612559 - RNA, 18 nt, Human
caaauaaaaauauugugu

SEQ ID NO: 3612560 - RNA, 10 nt, Human
caaauaaaau

SEQ ID NO: 3612561 - RNA, 21 nt, Human
caaauaaaauucccuaaagcc

SEQ ID NO: 3612562 - RNA, 12 nt, Human
caaauaaacacu

SEQ ID NO: 3612563 - RNA, 15 nt, Human
caaauaaacacugug

SEQ ID NO: 3612564 - RNA, 23 nt, Human
caaauaaagagagaacaggacua

SEQ ID NO: 3612565 - RNA, 18 nt, Human
caaauaaaguuaaaagua

SEQ ID NO: 3612566 - RNA, 19 nt, Human
caaauaaaguuaaaaguaa

SEQ ID NO: 3612567 - RNA, 17 nt, Human
caaauaaauaauuuuca

SEQ ID NO: 3612568 - RNA, 16 nt, Human
caaauaacaacuuuuu

SEQ ID NO: 3612569 - RNA, 18 nt, Human
caaauaaguauuuauaau

SEQ ID NO: 3612570 - RNA, 13 nt, Human
caaauaaguguau

SEQ ID NO: 3612571 - RNA, 16 nt, Human
caaauaaguguauuuu

SEQ ID NO: 3612572 - RNA, 14 nt, Human
caaauaauaagcaa

SEQ ID NO: 3612573 - RNA, 23 nt, Human
caaauaaugaucgaaaaaauaau

SEQ ID NO: 3612574 - RNA, 21 nt, Human
caaauacuaaaaagaagugcu

SEQ ID NO: 3612575 - RNA, 14 nt, Human
caaauacucaugug

SEQ ID NO: 3612576 - RNA, 16 nt, Human
caaauacucaugugua

SEQ ID NO: 3612577 - RNA, 15 nt, Human
caaauacuuagcaaa

SEQ ID NO: 3612578 - RNA, 19 nt, Human
caaauacuuuaaaggaaaa

SEQ ID NO: 3612579 - RNA, 16 nt, Human
caaauagaaaaugguc

SEQ ID NO: 3612580 - RNA, 13 nt, Human
caaauagcaaaga

SEQ ID NO: 3612581 - RNA, 13 nt, Human
caaauaguugcau

SEQ ID NO: 3612582 - RNA, 20 nt, Human
caaauaguuuauaaauguga

SEQ ID NO: 3612583 - RNA, 16 nt, Human
caaauauaaaucuuaa

SEQ ID NO: 3612584 - RNA, 14 nt, Human
caaauauaagaaua

SEQ ID NO: 3612585 - RNA, 23 nt, Human
caaauauauucagccuggcuuca

SEQ ID NO: 3612586 - RNA, 17 nt, Human
caaauaucucuauuuaa

SEQ ID NO: 3612587 - RNA, 15 nt, Human
caaauaucuuguguu

SEQ ID NO: 3612588 - RNA, 21 nt, Human
caaauaucuuguguuguccuu

SEQ ID NO: 3612589 - RNA, 22 nt, Human
caaauaugaguacaaaugccuu

SEQ ID NO: 3612590 - RNA, 23 nt, Human
caaauaugaguacaaaugccuua

SEQ ID NO: 3612591 - RNA, 13 nt, Human
caaauaugcaaag

SEQ ID NO: 3612592 - RNA, 19 nt, Human
caaauaugcaaagcacuga

SEQ ID NO: 3612593 - RNA, 15 nt, Human
caaauauguccuggg

SEQ ID NO: 3612594 - RNA, 17 nt, Human
caaauauguccuggggu

SEQ ID NO: 3612595 - RNA, 22 nt, Human
caaauauuaaaaagucuuuuaa

SEQ ID NO: 3612596 - RNA, 15 nt, Human
caaauauuagaugug

SEQ ID NO: 3612597 - RNA, 19 nt, Human
caaauauuagaugugauuu

SEQ ID NO: 3612598 - RNA, 15 nt, Human
caaauauucagaaua

SEQ ID NO: 3612599 - RNA, 17 nt, Human
caaauauuccagagacu

SEQ ID NO: 3612600 - RNA, 22 nt, Human
caaauauuuagauguaauuuug

SEQ ID NO: 3612601 - RNA, 12 nt, Human
caaauauuuauu

SEQ ID NO: 3612602 - RNA, 14 nt, Human
caaauauuuauuuu

SEQ ID NO: 3612603 - RNA, 19 nt, Human
caaauauuucuagacacuu

SEQ ID NO: 3612604 - RNA, 15 nt, Human
caaaucaaagcagau

SEQ ID NO: 3612605 - RNA, 13 nt, Human
caaaucaacagaa

SEQ ID NO: 3612606 - RNA, 14 nt, Human
caaaucaacagaag

SEQ ID NO: 3612607 - RNA, 15 nt, Human
caaaucaacagaagc

SEQ ID NO: 3612608 - RNA, 22 nt, Human
caaaucaaguuuccaagcaaau

SEQ ID NO: 3612609 - RNA, 14 nt, Human
caaaucaauacacu

SEQ ID NO: 3612610 - RNA, 15 nt, Human
caaaucaauacacua

SEQ ID NO: 3612611 - RNA, 14 nt, Human
caaaucacugaacu

SEQ ID NO: 3612612 - RNA, 15 nt, Human
caaaucacugaacuu

SEQ ID NO: 3612613 - RNA, 22 nt, Human
caaaucagaagucaucuugcua

SEQ ID NO: 3612614 - RNA, 16 nt, Human
caaaucagcugcuacu

SEQ ID NO: 3612615 - RNA, 17 nt, Human
caaaucagcugcuacua

SEQ ID NO: 3612616 - RNA, 23 nt, Human
caaaucagucagugcaaauguca

SEQ ID NO: 3612617 - RNA, 21 nt, Human
caaaucaguuacuaagaagaa

SEQ ID NO: 3612618 - RNA, 14 nt, Human
caaaucauuuguuu

SEQ ID NO: 3612619 - RNA, 18 nt, Human
caaaucauuuguuuaaaa

SEQ ID NO: 3612620 - RNA, 22 nt, Human
caaauccagccugcugccugcu

SEQ ID NO: 3612621 - RNA, 18 nt, Human
caaauccgcucucuuccu

SEQ ID NO: 3612622 - RNA, 19 nt, Human
caaauccgcucucuuccug

SEQ ID NO: 3612623 - RNA, 20 nt, Human
caaauccgcucucuuccugc

SEQ ID NO: 3612624 - RNA, 17 nt, Human
caaauccuaugugauuu

SEQ ID NO: 3612625 - RNA, 15 nt, Human
caaauccuugaagau

SEQ ID NO: 3612626 - RNA, 20 nt, Human
caaaucuaggaaaauauuuu

SEQ ID NO: 3612627 - RNA, 23 nt, Human
caaaucuaggaaaauauuuugau

SEQ ID NO: 3612628 - RNA, 23 nt, Human
caaaucuauuuaauuaggaaaaa

SEQ ID NO: 3612629 - RNA, 14 nt, Human
caaaucugaagauu

SEQ ID NO: 3612630 - RNA, 18 nt, Human
caaaucugcaaagcaugu

SEQ ID NO: 3612631 - RNA, 20 nt, Human
caaaucugcaaagcauguuu

SEQ ID NO: 3612632 - RNA, 21 nt, Human
caaaucugcuuuuuaaagaau

SEQ ID NO: 3612633 - RNA, 13 nt, Human
caaaucuggaagc

SEQ ID NO: 3612634 - RNA, 18 nt, Human
caaaucuguguauauuau

SEQ ID NO: 3612635 - RNA, 13 nt, Human
caaaucuuaagaa

SEQ ID NO: 3612636 - RNA, 23 nt, Human
caaaugaauaaugccuuuguaac

SEQ ID NO: 3612637 - RNA, 22 nt, Human
caaaugaauguugucuguuugu

SEQ ID NO: 3612638 - RNA, 14 nt, Human
caaaugacuuuauu

SEQ ID NO: 3612639 - RNA, 18 nt, Human
caaaugacuuuauuauuu

SEQ ID NO: 3612640 - RNA, 21 nt, Human
caaaugacuuuauuauuuauu

SEQ ID NO: 3612641 - RNA, 22 nt, Human
caaaugagaaaaugucuuuauu

SEQ ID NO: 3612642 - RNA, 20 nt, Human
caaaugagaucuaagccuuu

SEQ ID NO: 3612643 - RNA, 14 nt, Human
caaaugaguaacau

SEQ ID NO: 3612644 - RNA, 21 nt, Human
caaaugaguaacauuugcugu

SEQ ID NO: 3612645 - RNA, 21 nt, Human
caaaugaugugcaaaaccuuu

SEQ ID NO: 3612646 - RNA, 17 nt, Human
caaaugauugcuuuuaa

SEQ ID NO: 3612647 - RNA, 18 nt, Human
caaaugauugcuuuuaaa

SEQ ID NO: 3612648 - RNA, 20 nt, Human
caaaugauugcuuuuaaaau

SEQ ID NO: 3612649 - RNA, 21 nt, Human
caaaugauugcuuuuaaaauu

SEQ ID NO: 3612650 - RNA, 22 nt, Human
caaaugauugcuuuuaaaauuu

SEQ ID NO: 3612651 - RNA, 15 nt, Human
caaaugcaauuugau

SEQ ID NO: 3612652 - RNA, 13 nt, Human
caaaugcagcuuu

SEQ ID NO: 3612653 - RNA, 22 nt, Human
caaaugcagggauugcugccac

SEQ ID NO: 3612654 - RNA, 18 nt, Human
caaaugccuuaaaaugga

SEQ ID NO: 3612655 - RNA, 16 nt, Human
caaaugcucaaagaaa

SEQ ID NO: 3612656 - RNA, 18 nt, Human
caaaugcuuggcuucuca

SEQ ID NO: 3612657 - RNA, 23 nt, Human
caaauggaaaugggcagagcaga

SEQ ID NO: 3612658 - RNA, 18 nt, Human
caaauggagaagcugcag

SEQ ID NO: 3612659 - RNA, 18 nt, Human
caaaugggugauauccug

SEQ ID NO: 3612660 - RNA, 18 nt, Human
caaauggguuuuccacgc

SEQ ID NO: 3612661 - RNA, 24 nt, Human
caaaugguacaaaaccacagugua

SEQ ID NO: 3612662 - RNA, 21 nt, Human
caaauggugguuguuucuucc

SEQ ID NO: 3612663 - RNA, 18 nt, Human
caaauguaauugaauaaa

SEQ ID NO: 3612664 - RNA, 23 nt, Human
caaauguaguauggccuguguca

SEQ ID NO: 3612665 - RNA, 16 nt, Human
caaaugucagauacaa

SEQ ID NO: 3612666 - RNA, 18 nt, Human
caaaugucaugcugccuu

SEQ ID NO: 3612667 - RNA, 15 nt, Human
caaaugugaagaugc

SEQ ID NO: 3612668 - RNA, 14 nt, Human
caaaugugaccugu

SEQ ID NO: 3612669 - RNA, 17 nt, Human
caaaugugaccuguguc

SEQ ID NO: 3612670 - RNA, 17 nt, Human
caaauguggcauuugug

SEQ ID NO: 3612671 - RNA, 20 nt, Human
caaauguguacauggcagag

SEQ ID NO: 3612672 - RNA, 15 nt, Human
caaaugugugcccag

SEQ ID NO: 3612673 - RNA, 18 nt, Human
caaaugugugcccagcuu

SEQ ID NO: 3612674 - RNA, 19 nt, Human
caaauguuaaaauguguug

SEQ ID NO: 3612675 - RNA, 15 nt, Human
caaauguuacauagu

SEQ ID NO: 3612676 - RNA, 21 nt, Human
caaauguuaugcauaaaguca

SEQ ID NO: 3612677 - RNA, 20 nt, Human
caaauguucaucaaugaaug

SEQ ID NO: 3612678 - RNA, 12 nt, Human
caaauguucuaa

SEQ ID NO: 3612679 - RNA, 15 nt, Human
caaauguucuaaguu

SEQ ID NO: 3612680 - RNA, 22 nt, Human
caaauguucuaaguuucuaaga

SEQ ID NO: 3612681 - RNA, 15 nt, Human
caaauguuuaaucau

SEQ ID NO: 3612682 - RNA, 17 nt, Human
caaauguuuaaucauau

SEQ ID NO: 3612683 - RNA, 20 nt, Human
caaauguuuaaucauauaaa

SEQ ID NO: 3612684 - RNA, 22 nt, Human
caaauguuuaaucauauaaaua

SEQ ID NO: 3612685 - RNA, 18 nt, Human
caaauguuuacagggagc

SEQ ID NO: 3612686 - RNA, 20 nt, Human
caaauguuuacagggagccu

SEQ ID NO: 3612687 - RNA, 17 nt, Human
caaauguuuauuuaaaa

SEQ ID NO: 3612688 - RNA, 18 nt, Human
caaauguuuauuuaaaag

SEQ ID NO: 3612689 - RNA, 11 nt, Human
caaauguuucu

SEQ ID NO: 3612690 - RNA, 12 nt, Human
caaauguuucua

SEQ ID NO: 3612691 - RNA, 15 nt, Human
caaauuaaaaaagau

SEQ ID NO: 3612692 - RNA, 14 nt, Human
caaauuaaaaagau

SEQ ID NO: 3612693 - RNA, 22 nt, Human
caaauuaaaaagauucuuuuuc

SEQ ID NO: 3612694 - RNA, 20 nt, Human
caaauuaauuggcagcagau

SEQ ID NO: 3612695 - RNA, 16 nt, Human
caaauuaauuguguga

SEQ ID NO: 3612696 - RNA, 21 nt, Human
cagggaagcccagcuccaggg

SEQ ID NO: 3612697 - RNA, 17 nt, Human
cagggaagcuacagguu

SEQ ID NO: 3612698 - RNA, 18 nt, Human
cagggaagcuacagguua

SEQ ID NO: 3612699 - RNA, 19 nt, Human
cagggaagcuacagguuac

SEQ ID NO: 3612700 - RNA, 24 nt, Human
cagggaagcuacagguuacaacag

SEQ ID NO: 3612701 - RNA, 14 nt, Human
cagggaagcuggcc

SEQ ID NO: 3612702 - RNA, 21 nt, Human
cagggaaggaggagccugucc

SEQ ID NO: 3612703 - RNA, 22 nt, Human
caaccuuggcuuggcccuggca

SEQ ID NO: 3612704 - RNA, 18 nt, Human
caaccuuucccucacccc

SEQ ID NO: 3612705 - RNA, 19 nt, Human
caaccuuucccucaccccc

SEQ ID NO: 3612706 - RNA, 13 nt, Human
caacgacaaagcc

SEQ ID NO: 3612707 - RNA, 20 nt, Human
caacggaggccugcgacccu

SEQ ID NO: 3612708 - RNA, 13 nt, Human
caacggagucaaa

SEQ ID NO: 3612709 - RNA, 14 nt, Human
caacggcagugaag

SEQ ID NO: 3612710 - RNA, 20 nt, Human
caacggcccugcagccagcu

SEQ ID NO: 3612711 - RNA, 17 nt, Human
caacgggaagcaaccuc

SEQ ID NO: 3612712 - RNA, 15 nt, Human
caacguagcuucuac

SEQ ID NO: 3612713 - RNA, 13 nt, Human
caacgucugugcc

SEQ ID NO: 3612714 - RNA, 17 nt, Human
caacgugcauugugcuu

SEQ ID NO: 3612715 - RNA, 18 nt, Human
caacgugcauugugcuuc

SEQ ID NO: 3612716 - RNA, 18 nt, Human
caacgugcucuuuguuuu

SEQ ID NO: 3612717 - RNA, 17 nt, Human
caacguggcccagagaa

SEQ ID NO: 3612718 - RNA, 12 nt, Human
caacguggggca

SEQ ID NO: 3612719 - RNA, 15 nt, Human
caacguggggcagca

SEQ ID NO: 3612720 - RNA, 17 nt, Human
caacguggggcagcaca

SEQ ID NO: 3612721 - RNA, 18 nt, Human
caacguggggcagcacag

SEQ ID NO: 3612722 - RNA, 15 nt, Human
caacguuacucaggg

SEQ ID NO: 3612723 - RNA, 18 nt, Human
caacguuacucagggcuc

SEQ ID NO: 3612724 - RNA, 18 nt, Human
caacguuucuucacuuuu

SEQ ID NO: 3612725 - RNA, 16 nt, Human
caacuaagcagucccu

SEQ ID NO: 3612726 - RNA, 17 nt, Human
caacuacagaaaaacca

SEQ ID NO: 3612727 - RNA, 16 nt, Human
caacuacccaaaacaa

SEQ ID NO: 3612728 - RNA, 17 nt, Human
caacuacccaaaacaag

SEQ ID NO: 3612729 - RNA, 17 nt, Human
caacuacccccagcugu

SEQ ID NO: 3612730 - RNA, 11 nt, Human
caacuaccuga

SEQ ID NO: 3612731 - RNA, 13 nt, Human
caacuacuaauag

SEQ ID NO: 3612732 - RNA, 21 nt, Human
caacuacuaauagaauaaagg

SEQ ID NO: 3612733 - RNA, 20 nt, Human
caacuacuaucucagagaua

SEQ ID NO: 3612734 - RNA, 17 nt, Human
caacuacuguguuaugc

SEQ ID NO: 3612735 - RNA, 15 nt, Human
caacuagacauucug

SEQ ID NO: 3612736 - RNA, 18 nt, Human
caacuagccccuggggug

SEQ ID NO: 3612737 - RNA, 19 nt, Human
caacuauauuguuugcuaa

SEQ ID NO: 3612738 - RNA, 21 nt, Human
caacuaucagacuaagccagc

SEQ ID NO: 3612739 - RNA, 19 nt, Human
caacuaucucauuuccaag

SEQ ID NO: 3612740 - RNA, 22 nt, Human
caacuaugauaugguaaaaguu

SEQ ID NO: 3612741 - RNA, 23 nt, Human
caggugaucugcugcagagcagu

SEQ ID NO: 3612742 - RNA, 18 nt, Human
caggugcaaccagggagc

SEQ ID NO: 3612743 - RNA, 24 nt, Human
caggugcaaccagggagcugcagg

SEQ ID NO: 3612744 - RNA, 17 nt, Human
caggugcacaagcucca

SEQ ID NO: 3612745 - RNA, 19 nt, Human
caggugcacaagcuccaag

SEQ ID NO: 3612746 - RNA, 22 nt, Human
caggugcacaagcuccaagcuc

SEQ ID NO: 3612747 - RNA, 14 nt, Human
caggugcagaggaa

SEQ ID NO: 3612748 - RNA, 19 nt, Human
caggugcagaggaaguaca

SEQ ID NO: 3612749 - RNA, 16 nt, Human
caggugcagagguacc

SEQ ID NO: 3612750 - RNA, 23 nt, Human
caggugcccagcuauaccugugc

SEQ ID NO: 3612751 - RNA, 17 nt, Human
caggugcccaucccugg

SEQ ID NO: 3612752 - RNA, 16 nt, Human
caggugccccucucuc

SEQ ID NO: 3612753 - RNA, 22 nt, Human
caggugccccucucuccaucag

SEQ ID NO: 3612754 - RNA, 13 nt, Human
caggugccuccag

SEQ ID NO: 3612755 - RNA, 15 nt, Human
caggugccuccaggu

SEQ ID NO: 3612756 - RNA, 16 nt, Human
caggugccuccaggug

SEQ ID NO: 3612757 - RNA, 15 nt, Human
caggugccuccugac

SEQ ID NO: 3612758 - RNA, 15 nt, Human
caggugccuggacau

SEQ ID NO: 3612759 - RNA, 13 nt, Human
caggugccuugga

SEQ ID NO: 3612760 - RNA, 14 nt, Human
caggugccuuggag

SEQ ID NO: 3612761 - RNA, 14 nt, Human
caggugccuuucaa

SEQ ID NO: 3612762 - RNA, 14 nt, Human
caggugcugccauc

SEQ ID NO: 3612763 - RNA, 21 nt, Human
caggugcugcuacccucccug

SEQ ID NO: 3612764 - RNA, 18 nt, Human
caggugcuggagcacugg

SEQ ID NO: 3612765 - RNA, 23 nt, Human
caggugcuggagcacugggcucc

SEQ ID NO: 3612766 - RNA, 14 nt, Human
caggugcugguccc

SEQ ID NO: 3612767 - RNA, 17 nt, Human
cagguggagguggcauc

SEQ ID NO: 3612768 - RNA, 18 nt, Human
cagguggcaggaccagga

SEQ ID NO: 3612769 - RNA, 18 nt, Human
cagguggccaaguuccuc

SEQ ID NO: 3612770 - RNA, 19 nt, Human
cagguggccacuccagacc

SEQ ID NO: 3612771 - RNA, 21 nt, Human
cagguggccacuccagacccc

SEQ ID NO: 3612772 - RNA, 16 nt, Human
cagguggcugacccag

SEQ ID NO: 3612773 - RNA, 23 nt, Human
cagguggcugacccagucccugg

SEQ ID NO: 3612774 - RNA, 12 nt, Human
caggugggcugg

SEQ ID NO: 3612775 - RNA, 22 nt, Human
caggugggcuggacuucuaccu

SEQ ID NO: 3612776 - RNA, 23 nt, Human
caggugggcuggacuucuaccug

SEQ ID NO: 3612777 - RNA, 20 nt, Human
cagguggggagacugggcug

SEQ ID NO: 3612778 - RNA, 15 nt, Human
cagguggggaggggg

SEQ ID NO: 3612779 - RNA, 15 nt, Human
cagguggggcagcuu

SEQ ID NO: 3612780 - RNA, 17 nt, Human
cagguggggcagcuuga

SEQ ID NO: 3612781 - RNA, 17 nt, Human
cagguggggguugcugu

SEQ ID NO: 3612782 - RNA, 21 nt, Human
cagguggggguugcuguauaa

SEQ ID NO: 3612783 - RNA, 18 nt, Human
cagguggggucacucugg

SEQ ID NO: 3612784 - RNA, 17 nt, Human
cagguggggugaggcag

SEQ ID NO: 3612785 - RNA, 21 nt, Human
cagguggugagaaauuucugu

SEQ ID NO: 3612786 - RNA, 15 nt, Human
caggugguggcacug

SEQ ID NO: 3612787 - RNA, 16 nt, Human
cagguggugucacugu

SEQ ID NO: 3612788 - RNA, 17 nt, Human
caggugucagccauugc

SEQ ID NO: 3612789 - RNA, 15 nt, Human
cagguguccccagcc

SEQ ID NO: 3612790 - RNA, 17 nt, Human
cagguguccccagccca

SEQ ID NO: 3612791 - RNA, 21 nt, Human
cagguguccccagcccacugg

SEQ ID NO: 3612792 - RNA, 15 nt, Human
caggugucccugcac

SEQ ID NO: 3612793 - RNA, 16 nt, Human
caggugugaaccacca

SEQ ID NO: 3612794 - RNA, 23 nt, Human
caggugugaaccaccacacccag

SEQ ID NO: 3612795 - RNA, 23 nt, Human
caggugugagccaccacaccugg

SEQ ID NO: 3612796 - RNA, 22 nt, Human
caggugugagucaccaagccca

SEQ ID NO: 3612797 - RNA, 15 nt, Human
caggugugcacgugg

SEQ ID NO: 3612798 - RNA, 19 nt, Human
caggugugccgacagaagg

SEQ ID NO: 3612799 - RNA, 17 nt, Human
cagguguuaacauucca

SEQ ID NO: 3612800 - RNA, 19 nt, Human
cagguguuaacauuccaag

SEQ ID NO: 3612801 - RNA, 20 nt, Human
cagguguuaacauuccaaga

SEQ ID NO: 3612802 - RNA, 12 nt, Human
cagguguucuuc

SEQ ID NO: 3612803 - RNA, 16 nt, Human
cagguguuuaguugca

SEQ ID NO: 3612804 - RNA, 12 nt, Human
cagguguuuaua

SEQ ID NO: 3612805 - RNA, 20 nt, Human
cagguguuuauaucuccuuu

SEQ ID NO: 3612806 - RNA, 13 nt, Human
cagguuaaauguu

SEQ ID NO: 3612807 - RNA, 14 nt, Human
cagguuacaacaga

SEQ ID NO: 3612808 - RNA, 17 nt, Human
cagguuacaacagauuu

SEQ ID NO: 3612809 - RNA, 21 nt, Human
cagguuacaacagauuuguga

SEQ ID NO: 3612810 - RNA, 22 nt, Human
cagguuacaacagauuugugaa

SEQ ID NO: 3612811 - RNA, 23 nt, Human
cagguuacaacagauuugugaac

SEQ ID NO: 3612812 - RNA, 23 nt, Human
cagguuagaaccuagaagggcua

SEQ ID NO: 3612813 - RNA, 12 nt, Human
cagguuagagaa

SEQ ID NO: 3612814 - RNA, 22 nt, Human
cagguuaggcaguauaaagaau

SEQ ID NO: 3612815 - RNA, 17 nt, Human
cagguuauacuccuccu

SEQ ID NO: 3612816 - RNA, 19 nt, Human
cagguuaucgaaauaacaa

SEQ ID NO: 3612817 - RNA, 19 nt, Human
cagguucaacccacagcua

SEQ ID NO: 3612818 - RNA, 13 nt, Human
cagguucauggau

SEQ ID NO: 3612819 - RNA, 14 nt, Human
cagguucccaagcu

SEQ ID NO: 3612820 - RNA, 15 nt, Human
cagguucccucccag

SEQ ID NO: 3612821 - RNA, 18 nt, Human
cagguucccucccagagg

SEQ ID NO: 3612822 - RNA, 16 nt, Human
cagguucuauuuggaa

SEQ ID NO: 3612823 - RNA, 19 nt, Human
cagguucuauuuggaauuu

SEQ ID NO: 3612824 - RNA, 20 nt, Human
cagguucuccguuagcuccu

SEQ ID NO: 3612825 - RNA, 21 nt, Human
cagguucuccguuagcuccug

SEQ ID NO: 3612826 - RNA, 22 nt, Human
cagguucuccguuagcuccugu

SEQ ID NO: 3612827 - RNA, 23 nt, Human
cagguucuccguuagcuccugug

SEQ ID NO: 3612828 - RNA, 18 nt, Human
cagguucugaaagagucu

SEQ ID NO: 3612829 - RNA, 20 nt, Human
cagguucugguuagcucagc

SEQ ID NO: 3612830 - RNA, 22 nt, Human
cagguucugguuagcucagccc

SEQ ID NO: 3612831 - RNA, 18 nt, Human
cagguucuucuuccugaa

SEQ ID NO: 3612832 - RNA, 12 nt, Human
cagguucuuguu

SEQ ID NO: 3612833 - RNA, 18 nt, Human
cagguucuuguuggugca

SEQ ID NO: 3612834 - RNA, 23 nt, Human
cagguugaagaccuaaccagggc

SEQ ID NO: 3612835 - RNA, 16 nt, Human
cagguugacaggaggu

SEQ ID NO: 3612836 - RNA, 18 nt, Human
cagguugauaaaucauuu

SEQ ID NO: 3612837 - RNA, 19 nt, Human
cagguugcugguugcugug

SEQ ID NO: 3612838 - RNA, 17 nt, Human
cagguugcuuugcccug

SEQ ID NO: 3612839 - RNA, 18 nt, Human
cagguugcuuugcccugg

SEQ ID NO: 3612840 - RNA, 19 nt, Human
cagguugcuuugcccuggu

SEQ ID NO: 3612841 - RNA, 14 nt, Human
cagguuggacccca

SEQ ID NO: 3612842 - RNA, 17 nt, Human
cagguuggaccccagag

SEQ ID NO: 3612843 - RNA, 16 nt, Human
cagguuggcucugcca

SEQ ID NO: 3612844 - RNA, 22 nt, Human
cagguuggcucugccaguccug

SEQ ID NO: 3612845 - RNA, 17 nt, Human
cagguugggccauacug

SEQ ID NO: 3612846 - RNA, 21 nt, Human
cagguuggugggggccucggu

SEQ ID NO: 3612847 - RNA, 22 nt, Human
caagaaaaauaaagaaaagaug

SEQ ID NO: 3612848 - RNA, 18 nt, Human
caagaaaacaacuucaau

SEQ ID NO: 3612849 - RNA, 20 nt, Human
caagaaaacaggcacugccc

SEQ ID NO: 3612850 - RNA, 22 nt, Human
caagaaaacaggcacugcccug

SEQ ID NO: 3612851 - RNA, 20 nt, Human
caagaaaauaagagcucagg

SEQ ID NO: 3612852 - RNA, 20 nt, Human
caagaaacaaacaaaagcug

SEQ ID NO: 3612853 - RNA, 13 nt, Human
caagaaacagcca

SEQ ID NO: 3612854 - RNA, 14 nt, Human
caagaaacagccag

SEQ ID NO: 3612855 - RNA, 15 nt, Human
caagaaacucacccc

SEQ ID NO: 3612856 - RNA, 17 nt, Human
caagaaacucaccccca

SEQ ID NO: 3612857 - RNA, 18 nt, Human
caagaaacugaggaauuu

SEQ ID NO: 3612858 - RNA, 22 nt, Human
caagaaagaaacccgacagagg

SEQ ID NO: 3612859 - RNA, 19 nt, Human
caagaaagccagucuuaac

SEQ ID NO: 3612860 - RNA, 16 nt, Human
caagaaagcugguaaa

SEQ ID NO: 3612861 - RNA, 14 nt, Human
caagaaaggagagu

SEQ ID NO: 3612862 - RNA, 21 nt, Human
caagaaaggagagucuugcag

SEQ ID NO: 3612863 - RNA, 12 nt, Human
caagaaagucca

SEQ ID NO: 3612864 - RNA, 13 nt, Human
caagaaaguuucc

SEQ ID NO: 3612865 - RNA, 14 nt, Human
caagaaaguuuccc

SEQ ID NO: 3612866 - RNA, 19 nt, Human
caagaaauaaaaggaagcc

SEQ ID NO: 3612867 - RNA, 20 nt, Human
caagaaauaaaaggaagcca

SEQ ID NO: 3612868 - RNA, 13 nt, Human
caagaaaugaaga

SEQ ID NO: 3612869 - RNA, 16 nt, Human
caagaaauuugauuuc

SEQ ID NO: 3612870 - RNA, 14 nt, Human
caagaacagcaggc

SEQ ID NO: 3612871 - RNA, 16 nt, Human
caagaacucaucacug

SEQ ID NO: 3612872 - RNA, 21 nt, Human
caagaacugaaaacauaaaaa

SEQ ID NO: 3612873 - RNA, 12 nt, Human
caagaacugcau

SEQ ID NO: 3612874 - RNA, 16 nt, Human
caagaacugcauggac

SEQ ID NO: 3612875 - RNA, 23 nt, Human
caagaacugcauggaccuaacau

SEQ ID NO: 3612876 - RNA, 17 nt, Human
caagaagaauuugaaga

SEQ ID NO: 3612877 - RNA, 12 nt, Human
caagaagacaug

SEQ ID NO: 3612878 - RNA, 18 nt, Human
caagaagacauggagacu

SEQ ID NO: 3612879 - RNA, 13 nt, Human
caagaagcaggcu

SEQ ID NO: 3612880 - RNA, 20 nt, Human
caagaagcaggcuacacuga

SEQ ID NO: 3612881 - RNA, 17 nt, Human
caagaagcauuuuguaa

SEQ ID NO: 3612882 - RNA, 22 nt, Human
caagaagcuuuaauauuuaaau

SEQ ID NO: 3612883 - RNA, 12 nt, Human
caagaaggcugg

SEQ ID NO: 3612884 - RNA, 16 nt, Human
caagaagggacugaga

SEQ ID NO: 3612885 - RNA, 23 nt, Human
caagaagggcuagaaccuggagg

SEQ ID NO: 3612886 - RNA, 17 nt, Human
caagaagggcugcauga

SEQ ID NO: 3612887 - RNA, 19 nt, Human
caagaagucaaaguaaaac

SEQ ID NO: 3612888 - RNA, 14 nt, Human
caagaaguuuauuc

SEQ ID NO: 3612889 - RNA, 17 nt, Human
caagaaguuuauucuca

SEQ ID NO: 3612890 - RNA, 19 nt, Human
caagaauaaaggcagcugu

SEQ ID NO: 3612891 - RNA, 23 nt, Human
caagaauaauucaauuuuaaaga

SEQ ID NO: 3612892 - RNA, 18 nt, Human
caagaauagaugcugacu

SEQ ID NO: 3612893 - RNA, 19 nt, Human
caagaauagcaucuguaca

SEQ ID NO: 3612894 - RNA, 14 nt, Human
caagaauccacauu

SEQ ID NO: 3612895 - RNA, 22 nt, Human
caagaauccacauuucuaaaau

SEQ ID NO: 3612896 - RNA, 14 nt, Human
caagaaugcauuga

SEQ ID NO: 3612897 - RNA, 14 nt, Human
caagaaugcugaaa

SEQ ID NO: 3612898 - RNA, 16 nt, Human
caagaaugcugaaacc

SEQ ID NO: 3612899 - RNA, 21 nt, Human
caagaauggaucacaagaugg

SEQ ID NO: 3612900 - RNA, 21 nt, Human
caagaauggggaucacagaga

SEQ ID NO: 3612901 - RNA, 20 nt, Human
caagaaugguggcuucuuuu

SEQ ID NO: 3612902 - RNA, 21 nt, Human
caagaauuuccuguuggauuu

SEQ ID NO: 3612903 - RNA, 22 nt, Human
caagaauuucuugguaagaagc

SEQ ID NO: 3612904 - RNA, 23 nt, Human
caagaauuucuugguaagaagcc

SEQ ID NO: 3612905 - RNA, 18 nt, Human
caucuggauaggagccug

SEQ ID NO: 3612906 - RNA, 22 nt, Human
caucuggauaggagccugcugg

SEQ ID NO: 3612907 - RNA, 20 nt, Human
caucuggcaacaucuuuauc

SEQ ID NO: 3612908 - RNA, 17 nt, Human
caucuggccuggccagu

SEQ ID NO: 3612909 - RNA, 16 nt, Human
caucuggccuggccug

SEQ ID NO: 3612910 - RNA, 18 nt, Human
caucuggccuggccuggc

SEQ ID NO: 3612911 - RNA, 11 nt, Human
caucuggccuu

SEQ ID NO: 3612912 - RNA, 14 nt, Human
caucugggaaagac

SEQ ID NO: 3612913 - RNA, 19 nt, Human
caucugggaguccccuuuu

SEQ ID NO: 3612914 - RNA, 16 nt, Human
caucugggauucccac

SEQ ID NO: 3612915 - RNA, 13 nt, Human
caucugggcuccu

SEQ ID NO: 3612916 - RNA, 16 nt, Human
caucuggguagcugua

SEQ ID NO: 3612917 - RNA, 23 nt, Human
caucugguagaagggaaagccca

SEQ ID NO: 3612918 - RNA, 22 nt, Human
caucugguugaacucugguggc

SEQ ID NO: 3612919 - RNA, 12 nt, Human
caucuguacaaa

SEQ ID NO: 3612920 - RNA, 20 nt, Human
caucugucccuccgggaccu

SEQ ID NO: 3612921 - RNA, 12 nt, Human
caucuguccuca

SEQ ID NO: 3612922 - RNA, 16 nt, Human
caucugucuggagggg

SEQ ID NO: 3612923 - RNA, 15 nt, Human
caucugugcacgcag

SEQ ID NO: 3612924 - RNA, 17 nt, Human
caucuguggacugaccu

SEQ ID NO: 3612925 - RNA, 14 nt, Human
caucuguguccugg

SEQ ID NO: 3612926 - RNA, 11 nt, Human
caucugugucu

SEQ ID NO: 3612927 - RNA, 13 nt, Human
caucugugucuug

SEQ ID NO: 3612928 - RNA, 15 nt, Human
caucuguuagggccu

SEQ ID NO: 3612929 - RNA, 12 nt, Human
caucuguuguuu

SEQ ID NO: 3612930 - RNA, 20 nt, Human
caucuuaaaagcuaucuuca

SEQ ID NO: 3612931 - RNA, 13 nt, Human
caucuuaacucuu

SEQ ID NO: 3612932 - RNA, 15 nt, Human
caucuuaagagaugc

SEQ ID NO: 3612933 - RNA, 13 nt, Human
caucuuacugaag

SEQ ID NO: 3612934 - RNA, 15 nt, Human
caucuuacugaaggu

SEQ ID NO: 3612935 - RNA, 15 nt, Human
caucuuauagcacuu

SEQ ID NO: 3612936 - RNA, 18 nt, Human
caucuuaucaaggacucu

SEQ ID NO: 3612937 - RNA, 20 nt, Human
caucuuaugcuaacuguaga

SEQ ID NO: 3612938 - RNA, 14 nt, Human
caucuucacuucua

SEQ ID NO: 3612939 - RNA, 22 nt, Human
caucuuccaaggguacuaagga

SEQ ID NO: 3612940 - RNA, 19 nt, Human
caucuuccagaagugugau

SEQ ID NO: 3612941 - RNA, 21 nt, Human
caucuuccagguggggugagg

SEQ ID NO: 3612942 - RNA, 23 nt, Human
caucuuccccaacgaaaagcaca

SEQ ID NO: 3612943 - RNA, 22 nt, Human
caucuucccuagaggguuccug

SEQ ID NO: 3612944 - RNA, 12 nt, Human
caucuuccugug

SEQ ID NO: 3612945 - RNA, 19 nt, Human
caucuucgucuucacucuu

SEQ ID NO: 3612946 - RNA, 18 nt, Human
caucuucucagcucccau

SEQ ID NO: 3612947 - RNA, 16 nt, Human
caucuucuccaucugg

SEQ ID NO: 3612948 - RNA, 19 nt, Human
caucuucuggagucuccag

SEQ ID NO: 3612949 - RNA, 22 nt, Human
caucuucuggagucuccagugg

SEQ ID NO: 3612950 - RNA, 14 nt, Human
caucuucuucacca

SEQ ID NO: 3612951 - RNA, 19 nt, Human
caucuucuucaccauuugg

SEQ ID NO: 3612952 - RNA, 21 nt, Human
caucuucuuugcagccugggu

SEQ ID NO: 3612953 - RNA, 22 nt, Human
caucuucuuuuugaaaucagca

SEQ ID NO: 3612954 - RNA, 13 nt, Human
caucuugaauccu

SEQ ID NO: 3612955 - RNA, 18 nt, Human
caucuugaauccuuccau

SEQ ID NO: 3612956 - RNA, 23 nt, Human
caucuugaauccuuccauuccac

SEQ ID NO: 3612957 - RNA, 22 nt, Human
caucuugacagagccugcccca

SEQ ID NO: 3612958 - RNA, 16 nt, Human
caucuugaccaagcag

SEQ ID NO: 3612959 - RNA, 17 nt, Human
caucuugaccaagcagg

SEQ ID NO: 3612960 - RNA, 18 nt, Human
caucuugaccaagcagga

SEQ ID NO: 3612961 - RNA, 20 nt, Human
caucuugaccaagcaggaag

SEQ ID NO: 3612962 - RNA, 23 nt, Human
caucuugaucugcucagcccugg

SEQ ID NO: 3612963 - RNA, 20 nt, Human
caucuugcccgcucaggcug

SEQ ID NO: 3612964 - RNA, 12 nt, Human
caucuugcuacc

SEQ ID NO: 3612965 - RNA, 18 nt, Human
caucuugcuaccaguauu

SEQ ID NO: 3612966 - RNA, 20 nt, Human
caucuugcuaccaguauuua

SEQ ID NO: 3612967 - RNA, 14 nt, Human
caucuugcucugcu

SEQ ID NO: 3612968 - RNA, 19 nt, Human
caucuugcucugcugacag

SEQ ID NO: 3612969 - RNA, 14 nt, Human
caucuugcuggcua

SEQ ID NO: 3612970 - RNA, 15 nt, Human
caucuugcuucccua

SEQ ID NO: 3612971 - RNA, 16 nt, Human
caucuuggagggacca

SEQ ID NO: 3612972 - RNA, 18 nt, Human
caucuuggggacaucucu

SEQ ID NO: 3612973 - RNA, 12 nt, Human
caucuugugaaa

SEQ ID NO: 3612974 - RNA, 17 nt, Human
caucuuuaaacaguauu

SEQ ID NO: 3612975 - RNA, 22 nt, Human
caucuuuacaaaacuacaugag

SEQ ID NO: 3612976 - RNA, 17 nt, Human
caucuuuaucuguucuu

SEQ ID NO: 3612977 - RNA, 14 nt, Human
caucuuucacacuu

SEQ ID NO: 3612978 - RNA, 18 nt, Human
caucuuucccuccuuggu

SEQ ID NO: 3612979 - RNA, 21 nt, Human
caucuuuccugauggcaggau

SEQ ID NO: 3612980 - RNA, 11 nt, Human
caucuuucucu

SEQ ID NO: 3612981 - RNA, 21 nt, Human
caucuuucuucuauuuuauuc

SEQ ID NO: 3612982 - RNA, 16 nt, Human
caucuuugauguguug

SEQ ID NO: 3612983 - RNA, 18 nt, Human
caucuuuggggagguguu

SEQ ID NO: 3612984 - RNA, 21 nt, Human
caucuuuggggagguguucac

SEQ ID NO: 3612985 - RNA, 22 nt, Human
caucuuugugaaggccucgcag

SEQ ID NO: 3612986 - RNA, 13 nt, Human
caucuuuuaaaga

SEQ ID NO: 3612987 - RNA, 17 nt, Human
caucuuuuauucuuuuu

SEQ ID NO: 3612988 - RNA, 13 nt, Human
caucuuuuguauu

SEQ ID NO: 3612989 - RNA, 19 nt, Human
caucuuuuguauuaagaaa

SEQ ID NO: 3612990 - RNA, 14 nt, Human
caucuuuugugaga

SEQ ID NO: 3612991 - RNA, 11 nt, Human
caucuuuuuaa

SEQ ID NO: 3612992 - RNA, 18 nt, Human
caguugcccagccucuuu

SEQ ID NO: 3612993 - RNA, 19 nt, Human
caguugcccagccucuuuc

SEQ ID NO: 3612994 - RNA, 21 nt, Human
caguugcccagccucuuuccc

SEQ ID NO: 3612995 - RNA, 16 nt, Human
caguugcuaaacacug

SEQ ID NO: 3612996 - RNA, 18 nt, Human
caguugcugcuucaauuu

SEQ ID NO: 3612997 - RNA, 14 nt, Human
caguugcugguaaa

SEQ ID NO: 3612998 - RNA, 17 nt, Human
caguugcugguaaaaug

SEQ ID NO: 3612999 - RNA, 18 nt, Human
caguugcugguaaaauga

SEQ ID NO: 3613000 - RNA, 21 nt, Human
caguugcugguaaaaugaaga

SEQ ID NO: 3613001 - RNA, 13 nt, Human
caguugcuugucu

SEQ ID NO: 3613002 - RNA, 21 nt, Human
caguuggagcuccagccugac

SEQ ID NO: 3613003 - RNA, 15 nt, Human
caguugggagcacug

SEQ ID NO: 3613004 - RNA, 20 nt, Human
caguugggagcacuggagug

SEQ ID NO: 3613005 - RNA, 16 nt, Human
caguugguaacuuuug

SEQ ID NO: 3613006 - RNA, 18 nt, Human
caguuggucccccuucca

SEQ ID NO: 3613007 - RNA, 21 nt, Human
caguuggucccccuuccaugg

SEQ ID NO: 3613008 - RNA, 14 nt, Human
caguuguagaaugu

SEQ ID NO: 3613009 - RNA, 15 nt, Human
caguuguagaaugua

SEQ ID NO: 3613010 - RNA, 17 nt, Human
caguuguagaauguauu

SEQ ID NO: 3613011 - RNA, 18 nt, Human
caguuguagaauguauug

SEQ ID NO: 3613012 - RNA, 21 nt, Human
caguuguagaauguauuguac

SEQ ID NO: 3613013 - RNA, 18 nt, Human
caguuguauuuaacagaa

SEQ ID NO: 3613014 - RNA, 21 nt, Human
caguuguauuuaacagaaauu

SEQ ID NO: 3613015 - RNA, 23 nt, Human
caguuguguuuguugcuggcuug

SEQ ID NO: 3613016 - RNA, 18 nt, Human
caguuguuagugugucuu

SEQ ID NO: 3613017 - RNA, 19 nt, Human
caguuguuauuuauugaaa

SEQ ID NO: 3613018 - RNA, 13 nt, Human
caguuguucuuuu

SEQ ID NO: 3613019 - RNA, 15 nt, Human
caguuguucuuuuua

SEQ ID NO: 3613020 - RNA, 14 nt, Human
caguuguuggccuc

SEQ ID NO: 3613021 - RNA, 20 nt, Human
caguuguuggccuccggccu

SEQ ID NO: 3613022 - RNA, 13 nt, Human
caguuguuugaug

SEQ ID NO: 3613023 - RNA, 18 nt, Human
caguuguuuguuuuugcu

SEQ ID NO: 3613024 - RNA, 13 nt, Human
caguuguuuuccc

SEQ ID NO: 3613025 - RNA, 14 nt, Human
caguuguuuucccg

SEQ ID NO: 3613026 - RNA, 18 nt, Human
caguuuaaugaagaucua

SEQ ID NO: 3613027 - RNA, 19 nt, Human
caguuuaaugaagaucuaa

SEQ ID NO: 3613028 - RNA, 23 nt, Human
caguuuaccaguugccuuuuauc

SEQ ID NO: 3613029 - RNA, 19 nt, Human
caguuuagauuucaagaaa

SEQ ID NO: 3613030 - RNA, 19 nt, Human
caguuuauauuuaacucuc

SEQ ID NO: 3613031 - RNA, 19 nt, Human
caguuuaucaugaagccug

SEQ ID NO: 3613032 - RNA, 22 nt, Human
caguuuaucaugaagccugugg

SEQ ID NO: 3613033 - RNA, 13 nt, Human
caguuuaucauuc

SEQ ID NO: 3613034 - RNA, 18 nt, Human
caguuuaucauucaagug

SEQ ID NO: 3613035 - RNA, 13 nt, Human
caguuuauguuuu

SEQ ID NO: 3613036 - RNA, 18 nt, Human
caguuuauuccagagcug

SEQ ID NO: 3613037 - RNA, 19 nt, Human
caguuuauuugaaccaaua

SEQ ID NO: 3613038 - RNA, 14 nt, Human
caguuuauuuguug

SEQ ID NO: 3613039 - RNA, 18 nt, Human
caguuuauuuuuaaagau

SEQ ID NO: 3613040 - RNA, 21 nt, Human
caguuuauuuuuaaagauaga

SEQ ID NO: 3613041 - RNA, 16 nt, Human
caguuucaauaaaguu

SEQ ID NO: 3613042 - RNA, 18 nt, Human
caguuucaauucagugcu

SEQ ID NO: 3613043 - RNA, 14 nt, Human
caguuucacagaaa

SEQ ID NO: 3613044 - RNA, 23 nt, Human
caguuucacuuucacauagaugu

SEQ ID NO: 3613045 - RNA, 22 nt, Human
caguuucagguguuuaguugca

SEQ ID NO: 3613046 - RNA, 23 nt, Human
caguuucauaaaaggagaaccag

SEQ ID NO: 3613047 - RNA, 20 nt, Human
caguuucuaaacuggagacu

SEQ ID NO: 3613048 - RNA, 15 nt, Human
caguuucuguccugc

SEQ ID NO: 3613049 - RNA, 19 nt, Human
caguuucuguccugcuggu

SEQ ID NO: 3613050 - RNA, 15 nt, Human
caguuucuuagcuuu

SEQ ID NO: 3613051 - RNA, 18 nt, Human
caguuucuuagcuuuuua

SEQ ID NO: 3613052 - RNA, 16 nt, Human
caguuugaaauucuga

SEQ ID NO: 3613053 - RNA, 19 nt, Human
caguuugaaauucugaauu

SEQ ID NO: 3613054 - RNA, 23 nt, Human
caguuugcagaaaagcaccugcc

SEQ ID NO: 3613055 - RNA, 21 nt, Human
caguuugcuuuguaugcacuu

SEQ ID NO: 3613056 - RNA, 22 nt, Human
caguuuggagagucagaucuuu

SEQ ID NO: 3613057 - RNA, 20 nt, Human
caguuuggguaaaauacuuu

SEQ ID NO: 3613058 - RNA, 21 nt, Human
caguuuguaaauguuauuucu

SEQ ID NO: 3613059 - RNA, 21 nt, Human
caguuuguacagacguaugcu

SEQ ID NO: 3613060 - RNA, 16 nt, Human
caguuuuaacuagaau

SEQ ID NO: 3613061 - RNA, 17 nt, Human
caguuuuaacuguggau

SEQ ID NO: 3613062 - RNA, 20 nt, Human
caguuuuaacuguggauauu

SEQ ID NO: 3613063 - RNA, 15 nt, Human
caguuuuacucugcu

SEQ ID NO: 3613064 - RNA, 18 nt, Human
caguuuuauagcuuuauu

SEQ ID NO: 3613065 - RNA, 15 nt, Human
caguuuuaucauuuu

SEQ ID NO: 3613066 - RNA, 18 nt, Human
caguuuuauccacagaaa

SEQ ID NO: 3613067 - RNA, 15 nt, Human
caguuuuaugcucuu

SEQ ID NO: 3613068 - RNA, 23 nt, Human
caguuuucaagucaaauuaauaa

SEQ ID NO: 3613069 - RNA, 12 nt, Human
caguuuucauaa

SEQ ID NO: 3613070 - RNA, 13 nt, Human
caguuuuccauga

SEQ ID NO: 3613071 - RNA, 13 nt, Human
caguuuuccauug

SEQ ID NO: 3613072 - RNA, 22 nt, Human
caguuuuccuucucaucuguga

SEQ ID NO: 3613073 - RNA, 19 nt, Human
caguuuugacaucagccag

SEQ ID NO: 3613074 - RNA, 19 nt, Human
caguuuugguugcuuuaau

SEQ ID NO: 3613075 - RNA, 21 nt, Human
caguuuuguuuggaccaaaaa

SEQ ID NO: 3613076 - RNA, 19 nt, Human
caguuuuuaacucuacugu

SEQ ID NO: 3613077 - RNA, 13 nt, Human
caguuuuuauuaa

SEQ ID NO: 3613078 - RNA, 15 nt, Human
caguuuuuauugcuu

SEQ ID NO: 3613079 - RNA, 15 nt, Human
caguuuuucaggagc

SEQ ID NO: 3613080 - RNA, 16 nt, Human
caguuuuucuguauuu

SEQ ID NO: 3613081 - RNA, 17 nt, Human
caguuuuucuguauuuu

SEQ ID NO: 3613082 - RNA, 16 nt, Human
caguuuuucuuaauau

SEQ ID NO: 3613083 - RNA, 19 nt, Human
caguuuuucuuaauauaua

SEQ ID NO: 3613084 - RNA, 17 nt, Human
caguuuuuggaguguua

SEQ ID NO: 3613085 - RNA, 19 nt, Human
caguuuuuucaccuggaag

SEQ ID NO: 3613086 - RNA, 18 nt, Human
caguuuuuuuuuucuugu

SEQ ID NO: 3613087 - RNA, 21 nt, Human
caguuuuuuuuuucuugucua

SEQ ID NO: 3613088 - RNA, 14 nt, Human
cauaaaaaguuaaa

SEQ ID NO: 3613089 - RNA, 21 nt, Human
cauaaaaauuagccaagugug

SEQ ID NO: 3613090 - RNA, 22 nt, Human
cauaaaacauuaagaaaaucau

SEQ ID NO: 3613091 - RNA, 23 nt, Human
cauaaaacauuaagaaaaucaua

SEQ ID NO: 3613092 - RNA, 13 nt, Human
cauaaaauuggau

SEQ ID NO: 3613093 - RNA, 22 nt, Human
cauaaaauuuucuacucuuuuu

SEQ ID NO: 3613094 - RNA, 21 nt, Human
cauaaaccauuuuuguuacuc

SEQ ID NO: 3613095 - RNA, 14 nt, Human
cauaaaccuuaagu

SEQ ID NO: 3613096 - RNA, 21 nt, Human
cauaaagaagauguuuaacuu

SEQ ID NO: 3613097 - RNA, 13 nt, Human
cauaaagaauuug

SEQ ID NO: 3613098 - RNA, 14 nt, Human
cauaaagcaggcag

SEQ ID NO: 3613099 - RNA, 15 nt, Human
cauaaaggaaaagac

SEQ ID NO: 3613100 - RNA, 21 nt, Human
cauaaaggaaaagacacauuu

SEQ ID NO: 3613101 - RNA, 23 nt, Human
cauaaaggauaaacuuuuagaaa

SEQ ID NO: 3613102 - RNA, 20 nt, Human
cauaaaggugguaugugugu

SEQ ID NO: 3613103 - RNA, 21 nt, Human
cauaaagguuauuuucuccug

SEQ ID NO: 3613104 - RNA, 15 nt, Human
cauaaagucagugcc

SEQ ID NO: 3613105 - RNA, 14 nt, Human
cauaaagucuugcc

SEQ ID NO: 3613106 - RNA, 21 nt, Human
cauaaaguugauaaagauuuu

SEQ ID NO: 3613107 - RNA, 14 nt, Human
cauaaauaaaauga

SEQ ID NO: 3613108 - RNA, 22 nt, Human
cauaaauaaauuaaauaaaaua

SEQ ID NO: 3613109 - RNA, 13 nt, Human
cauaaauaugcag

SEQ ID NO: 3613110 - RNA, 18 nt, Human
cauaaauaugcagugaua

SEQ ID NO: 3613111 - RNA, 16 nt, Human
cauggugcccuggcuu

SEQ ID NO: 3613112 - RNA, 14 nt, Human
cauggugccucugg

SEQ ID NO: 3613113 - RNA, 14 nt, Human
cauggugccugaga

SEQ ID NO: 3613114 - RNA, 15 nt, Human
cauggugccugagag

SEQ ID NO: 3613115 - RNA, 16 nt, Human
cauggugccugagagg

SEQ ID NO: 3613116 - RNA, 17 nt, Human
cauggugccugagaggc

SEQ ID NO: 3613117 - RNA, 18 nt, Human
cauggugccugagaggca

SEQ ID NO: 3613118 - RNA, 19 nt, Human
cauggugccugagaggcag

SEQ ID NO: 3613119 - RNA, 21 nt, Human
cauggugccugagaggcaggc

SEQ ID NO: 3613120 - RNA, 13 nt, Human
cauggugcuagga

SEQ ID NO: 3613121 - RNA, 22 nt, Human
cauggugcuaggaagaggagug

SEQ ID NO: 3613122 - RNA, 15 nt, Human
caugguggggucucc

SEQ ID NO: 3613123 - RNA, 21 nt, Human
caugguggggucuccucagga

SEQ ID NO: 3613124 - RNA, 21 nt, Human
caugguggguccaugggcaga

SEQ ID NO: 3613125 - RNA, 22 nt, Human
caugguggguccaugggcagag

SEQ ID NO: 3613126 - RNA, 13 nt, Human
caugguguaauaa

SEQ ID NO: 3613127 - RNA, 14 nt, Human
caugguguaauaag

SEQ ID NO: 3613128 - RNA, 21 nt, Human
caugguguaauaagacauaac

SEQ ID NO: 3613129 - RNA, 14 nt, Human
caugguguucuccu

SEQ ID NO: 3613130 - RNA, 15 nt, Human
caugguguucuccug

SEQ ID NO: 3613131 - RNA, 17 nt, Human
caugguguucuccugcu

SEQ ID NO: 3613132 - RNA, 16 nt, Human
caugguuaagagucca

SEQ ID NO: 3613133 - RNA, 13 nt, Human
caugguuucagca

SEQ ID NO: 3613134 - RNA, 14 nt, Human
caugguuugacuca

SEQ ID NO: 3613135 - RNA, 14 nt, Human
caugguuuggagcu

SEQ ID NO: 3613136 - RNA, 19 nt, Human
caaugugaacuuuauuaaa

SEQ ID NO: 3613137 - RNA, 14 nt, Human
cauacuuucauccu

SEQ ID NO: 3613138 - RNA, 21 nt, Human
cauacuuucauccugacucug

SEQ ID NO: 3613139 - RNA, 22 nt, Human
cauacuuuguaaauaggauuuu

SEQ ID NO: 3613140 - RNA, 18 nt, Human
cauacuuuguauuuugau

SEQ ID NO: 3613141 - RNA, 13 nt, Human
cauacuuugucug

SEQ ID NO: 3613142 - RNA, 19 nt, Human
cauacuuuguuaggaaggg

SEQ ID NO: 3613143 - RNA, 22 nt, Human
cauacuuuuuaaauguaaagau

SEQ ID NO: 3613144 - RNA, 12 nt, Human
cauacuuuuugg

SEQ ID NO: 3613145 - RNA, 19 nt, Human
cauagaaaacacuacagug

SEQ ID NO: 3613146 - RNA, 16 nt, Human
cauagaaacaugacac

SEQ ID NO: 3613147 - RNA, 20 nt, Human
cauagaaacaugacacugac

SEQ ID NO: 3613148 - RNA, 23 nt, Human
cauagaaauggaaauuuugcuau

SEQ ID NO: 3613149 - RNA, 23 nt, Human
cauagaaauguagguccucagaa

SEQ ID NO: 3613150 - RNA, 21 nt, Human
cauagaaggaggagagggaaa

SEQ ID NO: 3613151 - RNA, 14 nt, Human
cauagaaggcaggu

SEQ ID NO: 3613152 - RNA, 16 nt, Human
cauagaaggcagguga

SEQ ID NO: 3613153 - RNA, 16 nt, Human
cauagaauagcauguu

SEQ ID NO: 3613154 - RNA, 18 nt, Human
cauagaauagcauguugu

SEQ ID NO: 3613155 - RNA, 22 nt, Human
cauagaauugcaaucuauaaua

SEQ ID NO: 3613156 - RNA, 16 nt, Human
cauagacaugaaaggu

SEQ ID NO: 3613157 - RNA, 17 nt, Human
cauagacuagagaaacc

SEQ ID NO: 3613158 - RNA, 23 nt, Human
cauagagagcaagacgcugugcu

SEQ ID NO: 3613159 - RNA, 18 nt, Human
cauagagagggagaagaa

SEQ ID NO: 3613160 - RNA, 17 nt, Human
cauagagauuugucuaa

SEQ ID NO: 3613161 - RNA, 20 nt, Human
cauagagccgggugucccca

SEQ ID NO: 3613162 - RNA, 19 nt, Human
cauagaggcuucuccgcca

SEQ ID NO: 3613163 - RNA, 20 nt, Human
cauagaggcuucuccgccag

SEQ ID NO: 3613164 - RNA, 18 nt, Human
cauagaguacacugccug

SEQ ID NO: 3613165 - RNA, 23 nt, Human
cauagagugacuccaagaacaau

SEQ ID NO: 3613166 - RNA, 19 nt, Human
cauagauaauauuguuugg

SEQ ID NO: 3613167 - RNA, 16 nt, Human
cauagauuaauggcac

SEQ ID NO: 3613168 - RNA, 17 nt, Human
cauagauucaccuguaa

SEQ ID NO: 3613169 - RNA, 20 nt, Human
cauagauuuauuuuucaguu

SEQ ID NO: 3613170 - RNA, 19 nt, Human
cauagauuucugauuuuau

SEQ ID NO: 3613171 - RNA, 14 nt, Human
cauagcaagacaca

SEQ ID NO: 3613172 - RNA, 23 nt, Human
cauagcaagauugcuuaaaauag

SEQ ID NO: 3613173 - RNA, 22 nt, Human
cauagcagagaaugaaagggcc

SEQ ID NO: 3613174 - RNA, 17 nt, Human
cauagcagaucuguuuu

SEQ ID NO: 3613175 - RNA, 16 nt, Human
cauagcagauuuuaau

SEQ ID NO: 3613176 - RNA, 17 nt, Human
cauagcagauuuuaauu

SEQ ID NO: 3613177 - RNA, 17 nt, Human
cauagcaugacauuucu

SEQ ID NO: 3613178 - RNA, 11 nt, Human
cauagcauuaa

SEQ ID NO: 3613179 - RNA, 14 nt, Human
cauagccaaaaugu

SEQ ID NO: 3613180 - RNA, 15 nt, Human
cauagccaggaaacu

SEQ ID NO: 3613181 - RNA, 13 nt, Human
cauagccauaaau

SEQ ID NO: 3613182 - RNA, 15 nt, Human
cauagcccaguagac

SEQ ID NO: 3613183 - RNA, 18 nt, Human
cauagccuaaucccuggg

SEQ ID NO: 3613184 - RNA, 21 nt, Human
cauagcuacccaaaagagaaa

SEQ ID NO: 3613185 - RNA, 20 nt, Human
cauagcuaucaagugugcuu

SEQ ID NO: 3613186 - RNA, 17 nt, Human
cauagcuccuucucucu

SEQ ID NO: 3613187 - RNA, 13 nt, Human
cauagcucugggg

SEQ ID NO: 3613188 - RNA, 20 nt, Human
cauagcucuggggugggcag

SEQ ID NO: 3613189 - RNA, 16 nt, Human
cauagcuguacuucuu

SEQ ID NO: 3613190 - RNA, 21 nt, Human
cauagcuguacuucuugaaua

SEQ ID NO: 3613191 - RNA, 15 nt, Human
cauagcugugauuuu

SEQ ID NO: 3613192 - RNA, 22 nt, Human
cauagcuuacaagccagcugga

SEQ ID NO: 3613193 - RNA, 20 nt, Human
cauagcuugauaaagggcca

SEQ ID NO: 3613194 - RNA, 12 nt, Human
cauaggaaaagu

SEQ ID NO: 3613195 - RNA, 18 nt, Human
cauaggaaaaguacauuu

SEQ ID NO: 3613196 - RNA, 19 nt, Human
cauaggaaaaguacauuua

SEQ ID NO: 3613197 - RNA, 22 nt, Human
cauaggaaaaguacauuuaaua

SEQ ID NO: 3613198 - RNA, 20 nt, Human
cauaggaguuuggaggaagu

SEQ ID NO: 3613199 - RNA, 20 nt, Human
cauaggcaccuuuuacugug

SEQ ID NO: 3613200 - RNA, 16 nt, Human
cauaggcccacacaca

SEQ ID NO: 3613201 - RNA, 18 nt, Human
cauaggcccacacacagg

SEQ ID NO: 3613202 - RNA, 21 nt, Human
cauaggcccacacacaggugg

SEQ ID NO: 3613203 - RNA, 13 nt, Human
cauaggcccagug

SEQ ID NO: 3613204 - RNA, 17 nt, Human
cauagguagaauguaaa

SEQ ID NO: 3613205 - RNA, 18 nt, Human
cauaggugauccauguaa

SEQ ID NO: 3613206 - RNA, 21 nt, Human
cauaggugauccauguaacug

SEQ ID NO: 3613207 - RNA, 16 nt, Human
cauagguuagauauag

SEQ ID NO: 3613208 - RNA, 16 nt, Human
cauagguuuaauaauu

SEQ ID NO: 3613209 - RNA, 13 nt, Human
cauaguaaaagaa

SEQ ID NO: 3613210 - RNA, 19 nt, Human
cauaguaaauguaguucau

SEQ ID NO: 3613211 - RNA, 20 nt, Human
cauaguaaauguaguucaua

SEQ ID NO: 3613212 - RNA, 24 nt, Human
cauaguaacuucuuauggaauuga

SEQ ID NO: 3613213 - RNA, 14 nt, Human
cauaguaagauuga

SEQ ID NO: 3613214 - RNA, 16 nt, Human
cauaguaccaaucauu

SEQ ID NO: 3613215 - RNA, 18 nt, Human
cauaguaccaaucauuuu

SEQ ID NO: 3613216 - RNA, 22 nt, Human
cauaguaccaaucauuuuaauu

SEQ ID NO: 3613217 - RNA, 20 nt, Human
cauaguagaacuuuauaaaa

SEQ ID NO: 3613218 - RNA, 13 nt, Human
cauaguaguuuuu

SEQ ID NO: 3613219 - RNA, 20 nt, Human
cauaguaguuuuuacagcug

SEQ ID NO: 3613220 - RNA, 15 nt, Human
cauaguaugguggcu

SEQ ID NO: 3613221 - RNA, 18 nt, Human
cauaguaugguggcuggg

SEQ ID NO: 3613222 - RNA, 21 nt, Human
cauaguauuccauugugugag

SEQ ID NO: 3613223 - RNA, 22 nt, Human
cauagucaccugacuaagaaau

SEQ ID NO: 3613224 - RNA, 23 nt, Human
cauagucauguaagcugaaaaua

SEQ ID NO: 3613225 - RNA, 12 nt, Human
cauagucccugc

SEQ ID NO: 3613226 - RNA, 20 nt, Human
cauagugagaccccugucuc

SEQ ID NO: 3613227 - RNA, 18 nt, Human
cauagugcuaacaugaag

SEQ ID NO: 3613228 - RNA, 13 nt, Human
cauagugcuggga

SEQ ID NO: 3613229 - RNA, 23 nt, Human
cauaguggacauuguuggcagca

SEQ ID NO: 3613230 - RNA, 19 nt, Human
cauaguuacuguaaaaugc

SEQ ID NO: 3613231 - RNA, 19 nt, Human
cauaguucguuuaccuuca

SEQ ID NO: 3613232 - RNA, 22 nt, Human
cauaguuggggucauagauguu

SEQ ID NO: 3613233 - RNA, 12 nt, Human
cauaguuucuuu

SEQ ID NO: 3613234 - RNA, 22 nt, Human
cauaguuucuuuauuuugugua

SEQ ID NO: 3613235 - RNA, 23 nt, Human
cauaguuucuuuauuuuguguaa

SEQ ID NO: 3613236 - RNA, 13 nt, Human
cauaguuuggcau

SEQ ID NO: 3613237 - RNA, 19 nt, Human
cauaguuuuaaacucauuu

SEQ ID NO: 3613238 - RNA, 19 nt, Human
cauaguuuuauuuauauuu

SEQ ID NO: 3613239 - RNA, 23 nt, Human
cauauaaaauaaugcaaagaauc

SEQ ID NO: 3613240 - RNA, 17 nt, Human
cauauaaaauggcaaca

SEQ ID NO: 3613241 - RNA, 20 nt, Human
cauauaaacaucacacacac

SEQ ID NO: 3613242 - RNA, 15 nt, Human
cauauaaauagaaug

SEQ ID NO: 3613243 - RNA, 16 nt, Human
cauauaaauagaaugu

SEQ ID NO: 3613244 - RNA, 21 nt, Human
cauauaaauagaauguaaaug

SEQ ID NO: 3613245 - RNA, 21 nt, Human
cauauaaauugucuuaaugga

SEQ ID NO: 3613246 - RNA, 23 nt, Human
cauauaagggaaguaguuaucau

SEQ ID NO: 3613247 - RNA, 15 nt, Human
cauauaauguuguua

SEQ ID NO: 3613248 - RNA, 18 nt, Human
cauauaauguuguuauuu

SEQ ID NO: 3613249 - RNA, 15 nt, Human
cauauaauuauaugu

SEQ ID NO: 3613250 - RNA, 16 nt, Human
cauauaauuauauguu

SEQ ID NO: 3613251 - RNA, 22 nt, Human
cauauaauuauauguuguaagc

SEQ ID NO: 3613252 - RNA, 13 nt, Human
cauauacacuugg

SEQ ID NO: 3613253 - RNA, 20 nt, Human
cauauaccuauaaugugugu

SEQ ID NO: 3613254 - RNA, 15 nt, Human
cauauagaaagcuuu

SEQ ID NO: 3613255 - RNA, 14 nt, Human
cauauagagaugaa

SEQ ID NO: 3613256 - RNA, 18 nt, Human
cauauagcaaaacuuuua

SEQ ID NO: 3613257 - RNA, 21 nt, Human
cauauagcaaaacuuuuaaac

SEQ ID NO: 3613258 - RNA, 20 nt, Human
cauauauaacaaugcuguau

SEQ ID NO: 3613259 - RNA, 17 nt, Human
cauauauauaugugugu

SEQ ID NO: 3613260 - RNA, 16 nt, Human
cauauauauuacaagg

SEQ ID NO: 3613261 - RNA, 22 nt, Human
cauauauccuuuucuucuaugu

SEQ ID NO: 3613262 - RNA, 21 nt, Human
cauauauggggggccaacacc

SEQ ID NO: 3613263 - RNA, 18 nt, Human
cauauauuggguuccauu

SEQ ID NO: 3613264 - RNA, 22 nt, Human
cauauauuuuuauauuuacuaa

SEQ ID NO: 3613265 - RNA, 16 nt, Human
cauauauuuuuuaaaa

SEQ ID NO: 3613266 - RNA, 20 nt, Human
cauauauuuuuuaaaauaag

SEQ ID NO: 3613267 - RNA, 20 nt, Human
cauaucaacuuagucaauaa

SEQ ID NO: 3613268 - RNA, 16 nt, Human
cauaucacacacauug

SEQ ID NO: 3613269 - RNA, 18 nt, Human
cauaucacacacauugcu

SEQ ID NO: 3613270 - RNA, 19 nt, Human
cauaucaccucauggccua

SEQ ID NO: 3613271 - RNA, 14 nt, Human
cauaucauccacac

SEQ ID NO: 3613272 - RNA, 14 nt, Human
cauaucaugcuuug

SEQ ID NO: 3613273 - RNA, 15 nt, Human
cauaucauguacagu

SEQ ID NO: 3613274 - RNA, 14 nt, Human
cauaucauuucuua

SEQ ID NO: 3613275 - RNA, 18 nt, Human
cauauccaguauuguucc

SEQ ID NO: 3613276 - RNA, 19 nt, Human
cauauccauagugacuuuu

SEQ ID NO: 3613277 - RNA, 14 nt, Human
cauaucccuuccag

SEQ ID NO: 3613278 - RNA, 15 nt, Human
cauaucccuuccaga

SEQ ID NO: 3613279 - RNA, 16 nt, Human
caucuggaguucucaa

SEQ ID NO: 3613280 - RNA, 16 nt, Human
caucuggauaggagcc

SEQ ID NO: 3613281 - RNA, 20 nt, Human
caucuggauaggagccugcu

SEQ ID NO: 3613282 - RNA, 16 nt, Human
caucuggauuccagag

SEQ ID NO: 3613283 - RNA, 11 nt, Human
caucuggccug

SEQ ID NO: 3613284 - RNA, 13 nt, Human
caucuggccuggc

SEQ ID NO: 3613285 - RNA, 18 nt, Human
caucuggccuggccagug

SEQ ID NO: 3613286 - RNA, 15 nt, Human
caucuggccuggccu

SEQ ID NO: 3613287 - RNA, 20 nt, Human
caucuggccuggccuggccc

SEQ ID NO: 3613288 - RNA, 21 nt, Human
caucuggccuggccuggcccu

SEQ ID NO: 3613289 - RNA, 23 nt, Human
caucuggccuggccuggcccugc

SEQ ID NO: 3613290 - RNA, 17 nt, Human
caucuggcuuauuuuaa

SEQ ID NO: 3613291 - RNA, 18 nt, Human
caucuggcuuauuuuaau

SEQ ID NO: 3613292 - RNA, 22 nt, Human
caucuggcuuauuuuaauguga

SEQ ID NO: 3613293 - RNA, 20 nt, Human
caucugggaacuugucacag

SEQ ID NO: 3613294 - RNA, 21 nt, Human
caucugggaagauuucuaccu

SEQ ID NO: 3613295 - RNA, 15 nt, Human
caucugggauuccca

SEQ ID NO: 3613296 - RNA, 15 nt, Human
caucugggccuuggc

SEQ ID NO: 3613297 - RNA, 11 nt, Human
caucugggcuc

SEQ ID NO: 3613298 - RNA, 20 nt, Human
caucugggcuccuccagggu

SEQ ID NO: 3613299 - RNA, 18 nt, Human
caucuggggagcaggcag

SEQ ID NO: 3613300 - RNA, 17 nt, Human
caucugggggaguggaa

SEQ ID NO: 3613301 - RNA, 19 nt, Human
caucugguuuucucuccag

SEQ ID NO: 3613302 - RNA, 15 nt, Human
caucuguaagcuguu

SEQ ID NO: 3613303 - RNA, 17 nt, Human
caucuguacuuggucca

SEQ ID NO: 3613304 - RNA, 12 nt, Human
caucuguagaua

SEQ ID NO: 3613305 - RNA, 14 nt, Human
caucuguagucagc

SEQ ID NO: 3613306 - RNA, 17 nt, Human
caucuguagucagccga

SEQ ID NO: 3613307 - RNA, 22 nt, Human
caucuguauaaguaagaaaaua

SEQ ID NO: 3613308 - RNA, 20 nt, Human
caucugucaccaauugguua

SEQ ID NO: 3613309 - RNA, 18 nt, Human
caucugucccuccgggac

SEQ ID NO: 3613310 - RNA, 17 nt, Human
caucugucccugccuca

SEQ ID NO: 3613311 - RNA, 18 nt, Human
caucugucuaaagauaga

SEQ ID NO: 3613312 - RNA, 18 nt, Human
caucugucuauauuuuau

SEQ ID NO: 3613313 - RNA, 15 nt, Human
caucugucuggaggg

SEQ ID NO: 3613314 - RNA, 14 nt, Human
caucugugaauaag

SEQ ID NO: 3613315 - RNA, 18 nt, Human
caucugugcacugcccau

SEQ ID NO: 3613316 - RNA, 14 nt, Human
caucugugucuugu

SEQ ID NO: 3613317 - RNA, 15 nt, Human
caucugugugaaaau

SEQ ID NO: 3613318 - RNA, 12 nt, Human
caucuguucugg

SEQ ID NO: 3613319 - RNA, 20 nt, Human
caucuguuguuuuguuuuaa

SEQ ID NO: 3613320 - RNA, 15 nt, Human
caucuuaaaaacaac

SEQ ID NO: 3613321 - RNA, 19 nt, Human
caucuuaacucuuugccuu

SEQ ID NO: 3613322 - RNA, 19 nt, Human
caucuuacuugagccuuua

SEQ ID NO: 3613323 - RNA, 17 nt, Human
caucuuagaccuccaca

SEQ ID NO: 3613324 - RNA, 18 nt, Human
caucuuauagcacuuuga

SEQ ID NO: 3613325 - RNA, 21 nt, Human
caucuuauagcacuuugaaau

SEQ ID NO: 3613326 - RNA, 14 nt, Human
caucuucaaagcuu

SEQ ID NO: 3613327 - RNA, 13 nt, Human
caucuucacccag

SEQ ID NO: 3613328 - RNA, 21 nt, Human
caucuucacuucuaaaugcau

SEQ ID NO: 3613329 - RNA, 13 nt, Human
caucuucagcuuc

SEQ ID NO: 3613330 - RNA, 14 nt, Human
caucuucagcuucu

SEQ ID NO: 3613331 - RNA, 14 nt, Human
caucuucaguuguc

SEQ ID NO: 3613332 - RNA, 15 nt, Human
caucuucaguugucu

SEQ ID NO: 3613333 - RNA, 22 nt, Human
caucuucaguugucucugaugc

SEQ ID NO: 3613334 - RNA, 19 nt, Human
caucuuccaacucaaacuc

SEQ ID NO: 3613335 - RNA, 21 nt, Human
caucuuccacaggucucagaa

SEQ ID NO: 3613336 - RNA, 12 nt, Human
caucuuccagaa

SEQ ID NO: 3613337 - RNA, 13 nt, Human
caucuuccagaag

SEQ ID NO: 3613338 - RNA, 18 nt, Human
caucuuccagaaguguga

SEQ ID NO: 3613339 - RNA, 21 nt, Human
caucuuccagaagugugauug

SEQ ID NO: 3613340 - RNA, 15 nt, Human
caucuuccugugucc

SEQ ID NO: 3613341 - RNA, 16 nt, Human
caucuuccuguguccu

SEQ ID NO: 3613342 - RNA, 15 nt, Human
caucuucgucuucac

SEQ ID NO: 3613343 - RNA, 21 nt, Human
cauuuacuuuguguucaccuu

SEQ ID NO: 3613344 - RNA, 15 nt, Human
cauuuagaaaauaga

SEQ ID NO: 3613345 - RNA, 13 nt, Human
cauuuagaagaaa

SEQ ID NO: 3613346 - RNA, 17 nt, Human
cauuuagaagaaagaug

SEQ ID NO: 3613347 - RNA, 21 nt, Human
cauuuagaauggugauuuuaa

SEQ ID NO: 3613348 - RNA, 20 nt, Human
cauuuagagaggaaaaguaa

SEQ ID NO: 3613349 - RNA, 21 nt, Human
cauuuagagaggaaaaguaac

SEQ ID NO: 3613350 - RNA, 20 nt, Human
cauuuagauugaaaacuuuu

SEQ ID NO: 3613351 - RNA, 22 nt, Human
cauuuagccaccaucuuugcag

SEQ ID NO: 3613352 - RNA, 22 nt, Human
cauuuagcuaaacggauuccaa

SEQ ID NO: 3613353 - RNA, 20 nt, Human
cauuuaggccaugggacagg

SEQ ID NO: 3613354 - RNA, 15 nt, Human
cauuuaguaagaaua

SEQ ID NO: 3613355 - RNA, 13 nt, Human
cauuuagucucuu

SEQ ID NO: 3613356 - RNA, 21 nt, Human
cauuuagucucuuuauuccua

SEQ ID NO: 3613357 - RNA, 23 nt, Human
cauuuagucucuuuauuccuagu

SEQ ID NO: 3613358 - RNA, 20 nt, Human
cauuuaguucuuuguuauuu

SEQ ID NO: 3613359 - RNA, 17 nt, Human
cauuuaguuugauuauu

SEQ ID NO: 3613360 - RNA, 21 nt, Human
cauuuauaaagcuaaaauaac

SEQ ID NO: 3613361 - RNA, 12 nt, Human
cauuuauauauu

SEQ ID NO: 3613362 - RNA, 15 nt, Human
cauuuauauuuuuau

SEQ ID NO: 3613363 - RNA, 12 nt, Human
cauuuaucauuc

SEQ ID NO: 3613364 - RNA, 21 nt, Human
cauuuaucuauaauuuaccua

SEQ ID NO: 3613365 - RNA, 23 nt, Human
cauuuaucuugaaggaaaaauuc

SEQ ID NO: 3613366 - RNA, 18 nt, Human
cauuuaugauuuaauaaa

SEQ ID NO: 3613367 - RNA, 20 nt, Human
cauuuaugguaaucauauua

SEQ ID NO: 3613368 - RNA, 18 nt, Human
cauuuaugugucaguuca

SEQ ID NO: 3613369 - RNA, 14 nt, Human
cauuuauguuuauu

SEQ ID NO: 3613370 - RNA, 19 nt, Human
cauuuauuuuuuacauuau

SEQ ID NO: 3613371 - RNA, 19 nt, Human
cauuuauuuuuuuuaaaga

SEQ ID NO: 3613372 - RNA, 18 nt, Human
cauuucaaaugugcuguc

SEQ ID NO: 3613373 - RNA, 14 nt, Human
cauuucaaugugua

SEQ ID NO: 3613374 - RNA, 18 nt, Human
cauuucaauguguauaaa

SEQ ID NO: 3613375 - RNA, 16 nt, Human
cauuucacaggcuaau

SEQ ID NO: 3613376 - RNA, 13 nt, Human
cauuucacauuaa

SEQ ID NO: 3613377 - RNA, 15 nt, Human
cauuucacauuaaug

SEQ ID NO: 3613378 - RNA, 15 nt, Human
cauuucaccccuccc

SEQ ID NO: 3613379 - RNA, 16 nt, Human
cauuucaccccucccu

SEQ ID NO: 3613380 - RNA, 17 nt, Human
cauuucaccccucccuu

SEQ ID NO: 3613381 - RNA, 18 nt, Human
cauuucaccccucccuuu

SEQ ID NO: 3613382 - RNA, 13 nt, Human
cauuucagaaguu

SEQ ID NO: 3613383 - RNA, 15 nt, Human
cauuucauaaacuaa

SEQ ID NO: 3613384 - RNA, 14 nt, Human
cauuucauccuuuc

SEQ ID NO: 3613385 - RNA, 16 nt, Human
cauuucaucucauuua

SEQ ID NO: 3613386 - RNA, 14 nt, Human
cauuucaugcucug

SEQ ID NO: 3613387 - RNA, 16 nt, Human
cauuucauguauaguu

SEQ ID NO: 3613388 - RNA, 21 nt, Human
cauuucauuccauugccuagc

SEQ ID NO: 3613389 - RNA, 23 nt, Human
cauuucauuguaugauguguugu

SEQ ID NO: 3613390 - RNA, 17 nt, Human
cauuuccaaauucacaa

SEQ ID NO: 3613391 - RNA, 13 nt, Human
cauuuccaacacc

SEQ ID NO: 3613392 - RNA, 18 nt, Human
cauuuccaacaccacaga

SEQ ID NO: 3613393 - RNA, 21 nt, Human
cauuuccaacaccacagacac

SEQ ID NO: 3613394 - RNA, 19 nt, Human
cauuuccacaccaagcagc

SEQ ID NO: 3613395 - RNA, 14 nt, Human
cauuuccauguaug

SEQ ID NO: 3613396 - RNA, 20 nt, Human
cauuucccaucugcaccccu

SEQ ID NO: 3613397 - RNA, 20 nt, Human
cauuucccccaccccauuuc

SEQ ID NO: 3613398 - RNA, 15 nt, Human
cauuuccccuccuuc

SEQ ID NO: 3613399 - RNA, 22 nt, Human
cauuuccucagacucuaagaaa

SEQ ID NO: 3613400 - RNA, 20 nt, Human
cauuuccugacagaaggacu

SEQ ID NO: 3613401 - RNA, 17 nt, Human
cauuuccugcccuuccu

SEQ ID NO: 3613402 - RNA, 21 nt, Human
cauuuccugcccuuccucagu

SEQ ID NO: 3613403 - RNA, 20 nt, Human
cauuuccuggguggcuacuc

SEQ ID NO: 3613404 - RNA, 12 nt, Human
cauuuccugugu

SEQ ID NO: 3613405 - RNA, 19 nt, Human
cauuucgugagccccaucu

SEQ ID NO: 3613406 - RNA, 14 nt, Human
cauuucuaaaagaa

SEQ ID NO: 3613407 - RNA, 22 nt, Human
cauuucuaaaagaauauucaga

SEQ ID NO: 3613408 - RNA, 23 nt, Human
cauuucuaacucugauguaaaug

SEQ ID NO: 3613409 - RNA, 11 nt, Human
cauuucuaauu

SEQ ID NO: 3613410 - RNA, 13 nt, Human
cauuucuaauuaa

SEQ ID NO: 3613411 - RNA, 22 nt, Human
cauuucuaccaaggcauaucau

SEQ ID NO: 3613412 - RNA, 21 nt, Human
cauuucuacucucccauggcu

SEQ ID NO: 3613413 - RNA, 23 nt, Human
cauuucuagaacaucccugccag

SEQ ID NO: 3613414 - RNA, 21 nt, Human
cauuucucauguuuuccauug

SEQ ID NO: 3613415 - RNA, 12 nt, Human
cauuucuccaga

SEQ ID NO: 3613416 - RNA, 12 nt, Human
cauuucuccguu

SEQ ID NO: 3613417 - RNA, 15 nt, Human
cauuucucuaagaga

SEQ ID NO: 3613418 - RNA, 10 nt, Human
cauuucucuc

SEQ ID NO: 3613419 - RNA, 15 nt, Human
cauuucucuccucac

SEQ ID NO: 3613420 - RNA, 11 nt, Human
cauuucucucu

SEQ ID NO: 3613421 - RNA, 17 nt, Human
cauuucucucuccaguc

SEQ ID NO: 3613422 - RNA, 18 nt, Human
cauuucugaggugcacug

SEQ ID NO: 3613423 - RNA, 21 nt, Human
cauuucugauauagaauugca

SEQ ID NO: 3613424 - RNA, 18 nt, Human
cacaggguugggcccaga

SEQ ID NO: 3613425 - RNA, 14 nt, Human
cacaggucaggcua

SEQ ID NO: 3613426 - RNA, 20 nt, Human
cacaggucaggggugacaca

SEQ ID NO: 3613427 - RNA, 21 nt, Human
cacaggucaggggugacacag

SEQ ID NO: 3613428 - RNA, 22 nt, Human
cacaggucaggggugacacaga

SEQ ID NO: 3613429 - RNA, 12 nt, Human
cacaggucccac

SEQ ID NO: 3613430 - RNA, 14 nt, Human
cacaggucccaccu

SEQ ID NO: 3613431 - RNA, 14 nt, Human
cacaggucuuuccu

SEQ ID NO: 3613432 - RNA, 20 nt, Human
cacaggucuuuccuaaggcu

SEQ ID NO: 3613433 - RNA, 16 nt, Human
cacagguggugucacu

SEQ ID NO: 3613434 - RNA, 14 nt, Human
cacaggugucagcc

SEQ ID NO: 3613435 - RNA, 17 nt, Human
cacaggugucagccauu

SEQ ID NO: 3613436 - RNA, 15 nt, Human
cacagguguuuauac

SEQ ID NO: 3613437 - RNA, 15 nt, Human
cacaguaaaaauaaa

SEQ ID NO: 3613438 - RNA, 17 nt, Human
cacaguaaaaauaaaau

SEQ ID NO: 3613439 - RNA, 13 nt, Human
cacaguaaauauc

SEQ ID NO: 3613440 - RNA, 17 nt, Human
cacaguacagcaugugc

SEQ ID NO: 3613441 - RNA, 18 nt, Human
cacaguacagcaugugcc

SEQ ID NO: 3613442 - RNA, 19 nt, Human
cacaguacgaaccuacagu

SEQ ID NO: 3613443 - RNA, 20 nt, Human
cacaguagaacugucuguga

SEQ ID NO: 3613444 - RNA, 16 nt, Human
cacaguauauuuuauu

SEQ ID NO: 3613445 - RNA, 18 nt, Human
cacaguauuacuucugcu

SEQ ID NO: 3613446 - RNA, 19 nt, Human
cacaguauuacuucugcua

SEQ ID NO: 3613447 - RNA, 21 nt, Human
cacaguauuacuucugcuaca

SEQ ID NO: 3613448 - RNA, 15 nt, Human
cacaguauuuguaau

SEQ ID NO: 3613449 - RNA, 14 nt, Human
cacagucaaaauaa

SEQ ID NO: 3613450 - RNA, 22 nt, Human
cacagucaccuucucggcaacu

SEQ ID NO: 3613451 - RNA, 19 nt, Human
cacagucacugauguacaa

SEQ ID NO: 3613452 - RNA, 14 nt, Human
cacagucagguuga

SEQ ID NO: 3613453 - RNA, 16 nt, Human
cacaguccaggaacaa

SEQ ID NO: 3613454 - RNA, 23 nt, Human
cacaguccuuaccagcagagcac

SEQ ID NO: 3613455 - RNA, 17 nt, Human
cacagucuaauuuuuau

SEQ ID NO: 3613456 - RNA, 14 nt, Human
cacagucucucucu

SEQ ID NO: 3613457 - RNA, 22 nt, Human
cacagucucuuuaaucuucagu

SEQ ID NO: 3613458 - RNA, 22 nt, Human
cacagugacucgggcuccugug

SEQ ID NO: 3613459 - RNA, 16 nt, Human
cacagugacuucugag

SEQ ID NO: 3613460 - RNA, 17 nt, Human
cacagugacuucugaga

SEQ ID NO: 3613461 - RNA, 19 nt, Human
cacagugagggagauccca

SEQ ID NO: 3613462 - RNA, 18 nt, Human
cacagugccuucaauaaa

SEQ ID NO: 3613463 - RNA, 16 nt, Human
cacagugcucuuuucu

SEQ ID NO: 3613464 - RNA, 14 nt, Human
cacagugggagcca

SEQ ID NO: 3613465 - RNA, 18 nt, Human
cacagugggagccagggc

SEQ ID NO: 3613466 - RNA, 20 nt, Human
cacagugggaugaaccagcc

SEQ ID NO: 3613467 - RNA, 17 nt, Human
cacagugucaggcacug

SEQ ID NO: 3613468 - RNA, 13 nt, Human
cacagugucuggg

SEQ ID NO: 3613469 - RNA, 14 nt, Human
cacagugucugggc

SEQ ID NO: 3613470 - RNA, 18 nt, Human
cacagugucuguaucgga

SEQ ID NO: 3613471 - RNA, 23 nt, Human
cacaguguguggucaacauuucu

SEQ ID NO: 3613472 - RNA, 13 nt, Human
cacaguguguuug

SEQ ID NO: 3613473 - RNA, 23 nt, Human
cacaguguuaaaugaaauuguaa

SEQ ID NO: 3613474 - RNA, 19 nt, Human
cacaguguugcccaggcug

SEQ ID NO: 3613475 - RNA, 16 nt, Human
cacaguguuggagguu

SEQ ID NO: 3613476 - RNA, 17 nt, Human
cacaguucaauucucau

SEQ ID NO: 3613477 - RNA, 19 nt, Human
cacaguucgaccugcggcu

SEQ ID NO: 3613478 - RNA, 15 nt, Human
cacaguucucuccuu

SEQ ID NO: 3613479 - RNA, 20 nt, Human
cacaguucuuugggccagac

SEQ ID NO: 3613480 - RNA, 18 nt, Human
cacaguugaagggagggg

SEQ ID NO: 3613481 - RNA, 23 nt, Human
cacaguugccaccaccucugugg

SEQ ID NO: 3613482 - RNA, 23 nt, Human
cacaguuggccuucagaaccauc

SEQ ID NO: 3613483 - RNA, 14 nt, Human
cacaguuuucugag

SEQ ID NO: 3613484 - RNA, 17 nt, Human
cacaguuuucugagaaa

SEQ ID NO: 3613485 - RNA, 21 nt, Human
cacaguuuucugagaaagacu

SEQ ID NO: 3613486 - RNA, 22 nt, Human
cacaguuuucugagaaagacua

SEQ ID NO: 3613487 - RNA, 21 nt, Human
cacaguuuucuggcuggagcc

SEQ ID NO: 3613488 - RNA, 19 nt, Human
cacaguuuugguugcuuua

SEQ ID NO: 3613489 - RNA, 12 nt, Human
cacauaaaacuu

SEQ ID NO: 3613490 - RNA, 19 nt, Human
cacauaagccaaaacugag

SEQ ID NO: 3613491 - RNA, 21 nt, Human
cacauaagccaaaacugagca

SEQ ID NO: 3613492 - RNA, 15 nt, Human
cacauaauuaacacu

SEQ ID NO: 3613493 - RNA, 22 nt, Human
cacauacaacacaaagagaaaa

SEQ ID NO: 3613494 - RNA, 15 nt, Human
cacauacacgaaaga

SEQ ID NO: 3613495 - RNA, 16 nt, Human
cacauacaguuuuaug

SEQ ID NO: 3613496 - RNA, 16 nt, Human
cacauacccugaccug

SEQ ID NO: 3613497 - RNA, 20 nt, Human
cacauagauuaauggcacug

SEQ ID NO: 3613498 - RNA, 22 nt, Human
cacauagauuaauggcacugau

SEQ ID NO: 3613499 - RNA, 17 nt, Human
cacauagauucaccugu

SEQ ID NO: 3613500 - RNA, 18 nt, Human
cacauagcauguaauggu

SEQ ID NO: 3613501 - RNA, 21 nt, Human
cacauagcccacuuacauuua

SEQ ID NO: 3613502 - RNA, 22 nt, Human
cacauagcuacccaaaagagaa

SEQ ID NO: 3613503 - RNA, 20 nt, Human
cacauaguucuccaguugua

SEQ ID NO: 3613504 - RNA, 22 nt, Human
cacauaguuuuuaagguuauuu

SEQ ID NO: 3613505 - RNA, 20 nt, Human
cacauaguuuuucagucuau

SEQ ID NO: 3613506 - RNA, 22 nt, Human
cacauauaaauguacuuuuucu

SEQ ID NO: 3613507 - RNA, 22 nt, Human
caugagcauuggauacagcagu

SEQ ID NO: 3613508 - RNA, 23 nt, Human
caugagcauuggauacagcagua

SEQ ID NO: 3613509 - RNA, 15 nt, Human
caugagccucagcau

SEQ ID NO: 3613510 - RNA, 19 nt, Human
caugagccucagcauccug

SEQ ID NO: 3613511 - RNA, 23 nt, Human
caugagccucagcauccuggcac

SEQ ID NO: 3613512 - RNA, 19 nt, Human
caugagccugcuggaagcc

SEQ ID NO: 3613513 - RNA, 23 nt, Human
caugagccugcuggaagcccagc

SEQ ID NO: 3613514 - RNA, 21 nt, Human
caugagcuccagacccccagc

SEQ ID NO: 3613515 - RNA, 23 nt, Human
caugagcuccagacccccagcaa

SEQ ID NO: 3613516 - RNA, 14 nt, Human
caugagcuuuuaua

SEQ ID NO: 3613517 - RNA, 20 nt, Human
caugaggaacaaggcaaggc

SEQ ID NO: 3613518 - RNA, 12 nt, Human
caugaggaacua

SEQ ID NO: 3613519 - RNA, 21 nt, Human
caugaggacaugauggagcgc

SEQ ID NO: 3613520 - RNA, 21 nt, Human
caugaggacucuauucuuuaa

SEQ ID NO: 3613521 - RNA, 23 nt, Human
caugaggagauucugccuuugcc

SEQ ID NO: 3613522 - RNA, 22 nt, Human
caugaggcaaugucaggaacag

SEQ ID NO: 3613523 - RNA, 21 nt, Human
caugagggguuccuccccucc

SEQ ID NO: 3613524 - RNA, 19 nt, Human
caugagguacugagaguga

SEQ ID NO: 3613525 - RNA, 21 nt, Human
caugaguagauaauuucaggg

SEQ ID NO: 3613526 - RNA, 14 nt, Human
caugagucccagug

SEQ ID NO: 3613527 - RNA, 16 nt, Human
caugagucccaguggg

SEQ ID NO: 3613528 - RNA, 13 nt, Human
caugaguccccug

SEQ ID NO: 3613529 - RNA, 17 nt, Human
caugaguccuugaaaau

SEQ ID NO: 3613530 - RNA, 19 nt, Human
caugaguccuugaaaauau

SEQ ID NO: 3613531 - RNA, 18 nt, Human
caugaguuaucaugaauu

SEQ ID NO: 3613532 - RNA, 19 nt, Human
caugaguuccagaaaguaa

SEQ ID NO: 3613533 - RNA, 16 nt, Human
caugaguuuaaaucaa

SEQ ID NO: 3613534 - RNA, 15 nt, Human
caugaguuugcccug

SEQ ID NO: 3613535 - RNA, 19 nt, Human
caugaguuuuuucucuugg

SEQ ID NO: 3613536 - RNA, 18 nt, Human
caugauaaugaacagaac

SEQ ID NO: 3613537 - RNA, 15 nt, Human
caugauauaacuuua

SEQ ID NO: 3613538 - RNA, 18 nt, Human
caugauauaacuuuagaa

SEQ ID NO: 3613539 - RNA, 13 nt, Human
caugauauuuugu

SEQ ID NO: 3613540 - RNA, 21 nt, Human
caugaucccuguguugucucu

SEQ ID NO: 3613541 - RNA, 18 nt, Human
caugaucucccugccgcc

SEQ ID NO: 3613542 - RNA, 15 nt, Human
caugaucuugagcaa

SEQ ID NO: 3613543 - RNA, 20 nt, Human
caugaugacuuaguacaaag

SEQ ID NO: 3613544 - RNA, 15 nt, Human
caugaugagcuccuc

SEQ ID NO: 3613545 - RNA, 19 nt, Human
caugaugagcuccucuucc

SEQ ID NO: 3613546 - RNA, 11 nt, Human
caugaugcagu

SEQ ID NO: 3613547 - RNA, 12 nt, Human
caugaugcaguc

SEQ ID NO: 3613548 - RNA, 15 nt, Human
caugaugcagucucc

SEQ ID NO: 3613549 - RNA, 22 nt, Human
caugaugccucugucuucugga

SEQ ID NO: 3613550 - RNA, 23 nt, Human
caugaugccucugucuucuggac

SEQ ID NO: 3613551 - RNA, 20 nt, Human
caugaugcgggccagugcuc

SEQ ID NO: 3613552 - RNA, 17 nt, Human
caugaugcuuuuacuga

SEQ ID NO: 3613553 - RNA, 18 nt, Human
caugaugcuuuuacugaa

SEQ ID NO: 3613554 - RNA, 14 nt, Human
caugauggaauuuc

SEQ ID NO: 3613555 - RNA, 23 nt, Human
caugauggagucagguuuggggu

SEQ ID NO: 3613556 - RNA, 13 nt, Human
caugauggccagg

SEQ ID NO: 3613557 - RNA, 21 nt, Human
caugauggccaggcugaucuc

SEQ ID NO: 3613558 - RNA, 20 nt, Human
caugauguagugccucuuuc

SEQ ID NO: 3613559 - RNA, 20 nt, Human
caugauguggaguggggcag

SEQ ID NO: 3613560 - RNA, 19 nt, Human
caugauguuaaccagaaua

SEQ ID NO: 3613561 - RNA, 22 nt, Human
caugauguuaaccagaauaaag

SEQ ID NO: 3613562 - RNA, 14 nt, Human
caugauguuuagaa

SEQ ID NO: 3613563 - RNA, 13 nt, Human
caugauguuuucc

SEQ ID NO: 3613564 - RNA, 17 nt, Human
caugauguuuuuaaaau

SEQ ID NO: 3613565 - RNA, 18 nt, Human
caugauguuuuuaaaauc

SEQ ID NO: 3613566 - RNA, 19 nt, Human
caugauguuuuuaaaaucu

SEQ ID NO: 3613567 - RNA, 13 nt, Human
cacccuccuuccc

SEQ ID NO: 3613568 - RNA, 12 nt, Human
cacccuccuuuc

SEQ ID NO: 3613569 - RNA, 21 nt, Human
cacccucggggauguguccug

SEQ ID NO: 3613570 - RNA, 19 nt, Human
cacccucguggacaccugc

SEQ ID NO: 3613571 - RNA, 17 nt, Human
ccacacuauuaccauga

SEQ ID NO: 3613572 - RNA, 24 nt, Human
ccacacucacuccugagaccccug

SEQ ID NO: 3613573 - RNA, 11 nt, Human
ccacacucaga

SEQ ID NO: 3613574 - RNA, 19 nt, Human
ccacacucagauccuccuc

SEQ ID NO: 3613575 - RNA, 13 nt, Human
ccacacuccagcu

SEQ ID NO: 3613576 - RNA, 13 nt, Human
ccacacucuccau

SEQ ID NO: 3613577 - RNA, 16 nt, Human
ccacacucuuucuccu

SEQ ID NO: 3613578 - RNA, 19 nt, Human
ccacacucuuucuccugcu

SEQ ID NO: 3613579 - RNA, 12 nt, Human
ccacacugcaca

SEQ ID NO: 3613580 - RNA, 21 nt, Human
ccacacuggacuccggcccuc

SEQ ID NO: 3613581 - RNA, 13 nt, Human
ccacacuggugac

SEQ ID NO: 3613582 - RNA, 17 nt, Human
ccacacugugacacacu

SEQ ID NO: 3613583 - RNA, 17 nt, Human
ccacacuucaaacuacu

SEQ ID NO: 3613584 - RNA, 16 nt, Human
ccacacuucaggcucu

SEQ ID NO: 3613585 - RNA, 22 nt, Human
ccacacuucaggcucuucuccu

SEQ ID NO: 3613586 - RNA, 11 nt, Human
ccacacuuccc

SEQ ID NO: 3613587 - RNA, 12 nt, Human
ccacacuuccug

SEQ ID NO: 3613588 - RNA, 14 nt, Human
ccacacuucucagg

SEQ ID NO: 3613589 - RNA, 17 nt, Human
ccacacuugagaggaug

SEQ ID NO: 3613590 - RNA, 21 nt, Human
ccacacuuguuccagcucuuu

SEQ ID NO: 3613591 - RNA, 18 nt, Human
ccacagaagcuccaggua

SEQ ID NO: 3613592 - RNA, 14 nt, Human
ccacagacacacac

SEQ ID NO: 3613593 - RNA, 21 nt, Human
ccacagacggaaggguaaaca

SEQ ID NO: 3613594 - RNA, 23 nt, Human
ccacagacggaaggguaaacaau

SEQ ID NO: 3613595 - RNA, 16 nt, Human
ccacagacugguuuug

SEQ ID NO: 3613596 - RNA, 21 nt, Human
ccacagagagggagagcagag

SEQ ID NO: 3613597 - RNA, 13 nt, Human
ccacagagagucc

SEQ ID NO: 3613598 - RNA, 18 nt, Human
ccacagaguaagacauug

SEQ ID NO: 3613599 - RNA, 22 nt, Human
ccacagaguguagccagguccc

SEQ ID NO: 3613600 - RNA, 23 nt, Human
ccacagaguguagccaggucccc

SEQ ID NO: 3613601 - RNA, 16 nt, Human
ccacagauaacugaaa

SEQ ID NO: 3613602 - RNA, 18 nt, Human
ccacagauaacugaaaau

SEQ ID NO: 3613603 - RNA, 19 nt, Human
ccacagauuguuucuauac

SEQ ID NO: 3613604 - RNA, 20 nt, Human
ccacagcaaccccaggcuga

SEQ ID NO: 3613605 - RNA, 22 nt, Human
ccacagcaacgaucacaaauga

SEQ ID NO: 3613606 - RNA, 17 nt, Human
ccacagcaaggcaccug

SEQ ID NO: 3613607 - RNA, 15 nt, Human
ccacagcagcauuuu

SEQ ID NO: 3613608 - RNA, 17 nt, Human
ccacagcagccucugaa

SEQ ID NO: 3613609 - RNA, 12 nt, Human
ccacagcaggcc

SEQ ID NO: 3613610 - RNA, 12 nt, Human
ccacagcaguug

SEQ ID NO: 3613611 - RNA, 23 nt, Human
ccacagcaguugaaaagacucca

SEQ ID NO: 3613612 - RNA, 20 nt, Human
ccacagcaucauuuugcauu

SEQ ID NO: 3613613 - RNA, 23 nt, Human
ccacagccagaaccccgagcccu

SEQ ID NO: 3613614 - RNA, 17 nt, Human
ccacagccagcaccugg

SEQ ID NO: 3613615 - RNA, 11 nt, Human
ccacagccagg

SEQ ID NO: 3613616 - RNA, 19 nt, Human
ccacagcccacguccuguc

SEQ ID NO: 3613617 - RNA, 21 nt, Human
ccacagcccacguccugucag

SEQ ID NO: 3613618 - RNA, 20 nt, Human
ccacagcccagccacggacg

SEQ ID NO: 3613619 - RNA, 15 nt, Human
ccacagcccaggccu

SEQ ID NO: 3613620 - RNA, 14 nt, Human
ccacagcccuguca

SEQ ID NO: 3613621 - RNA, 15 nt, Human
ccacagcccugucag

SEQ ID NO: 3613622 - RNA, 21 nt, Human
ccacagcccugucagugcagc

SEQ ID NO: 3613623 - RNA, 23 nt, Human
ccacagcccugucagugcagccc

SEQ ID NO: 3613624 - RNA, 18 nt, Human
ccacagcccuuuugucuc

SEQ ID NO: 3613625 - RNA, 12 nt, Human
ccacagccgcag

SEQ ID NO: 3613626 - RNA, 15 nt, Human
ccacagccgcagccu

SEQ ID NO: 3613627 - RNA, 17 nt, Human
ccacagccucugccugu

SEQ ID NO: 3613628 - RNA, 23 nt, Human
ccacagcgccagccucagacugg

SEQ ID NO: 3613629 - RNA, 15 nt, Human
ccacagcgucccugg

SEQ ID NO: 3613630 - RNA, 14 nt, Human
ccacagcuccuuuu

SEQ ID NO: 3613631 - RNA, 14 nt, Human
ccacagcugcucaa

SEQ ID NO: 3613632 - RNA, 12 nt, Human
ccacagcuuccu

SEQ ID NO: 3613633 - RNA, 19 nt, Human
ccacagcuuggggccaucg

SEQ ID NO: 3613634 - RNA, 13 nt, Human
ccacagcuuuugc

SEQ ID NO: 3613635 - RNA, 15 nt, Human
ccacagcuuuugcaa

SEQ ID NO: 3613636 - RNA, 19 nt, Human
ccacaggaagccugcaguc

SEQ ID NO: 3613637 - RNA, 17 nt, Human
ccacaggaagugaagaa

SEQ ID NO: 3613638 - RNA, 17 nt, Human
ccacaggacccucgccg

SEQ ID NO: 3613639 - RNA, 16 nt, Human
ccacaggaucagucug

SEQ ID NO: 3613640 - RNA, 13 nt, Human
ccacaggcagcuu

SEQ ID NO: 3613641 - RNA, 14 nt, Human
ccacaggcagcuuu

SEQ ID NO: 3613642 - RNA, 16 nt, Human
ccacaggcccacagua

SEQ ID NO: 3613643 - RNA, 18 nt, Human
ccacaggcccuuccucuc

SEQ ID NO: 3613644 - RNA, 19 nt, Human
ccacaggcccuuuccucag

SEQ ID NO: 3613645 - RNA, 13 nt, Human
ccacaggccuccc

SEQ ID NO: 3613646 - RNA, 18 nt, Human
ccacaggccucccuguuu

SEQ ID NO: 3613647 - RNA, 11 nt, Human
ccacaggccug

SEQ ID NO: 3613648 - RNA, 12 nt, Human
ccacaggccuga

SEQ ID NO: 3613649 - RNA, 16 nt, Human
ccacaggcucaggcag

SEQ ID NO: 3613650 - RNA, 11 nt, Human
ccacagggcac

SEQ ID NO: 3613651 - RNA, 14 nt, Human
ccacagggcuaaga

SEQ ID NO: 3613652 - RNA, 17 nt, Human
ccacagggcuaagagcu

SEQ ID NO: 3613653 - RNA, 11 nt, Human
ccacagggucu

SEQ ID NO: 3613654 - RNA, 18 nt, Human
ccacaggguucaaaaugu

SEQ ID NO: 3613655 - RNA, 22 nt, Human
ccacaggguucaaaaugucugu

SEQ ID NO: 3613656 - RNA, 18 nt, Human
ccacagguaauuucuccu

SEQ ID NO: 3613657 - RNA, 21 nt, Human
ccacagguguccccagcccac

SEQ ID NO: 3613658 - RNA, 17 nt, Human
ccacaggugugagccac

SEQ ID NO: 3613659 - RNA, 17 nt, Human
ccacaguagucuugaug

SEQ ID NO: 3613660 - RNA, 23 nt, Human
ccacaguauauuuuauuucaaug

SEQ ID NO: 3613661 - RNA, 22 nt, Human
ccacagugacucgggcuccugu

SEQ ID NO: 3613662 - RNA, 14 nt, Human
ccacagugcugucu

SEQ ID NO: 3613663 - RNA, 21 nt, Human
ccacaguguaccauuaaaaua

SEQ ID NO: 3613664 - RNA, 14 nt, Human
ccacagugucaggc

SEQ ID NO: 3613665 - RNA, 22 nt, Human
ccacaguguuggcgagaggagg

SEQ ID NO: 3613666 - RNA, 22 nt, Human
ccacaguugccaccaccucugu

SEQ ID NO: 3613667 - RNA, 22 nt, Human
ccacaguuuccucaucugucca

SEQ ID NO: 3613668 - RNA, 19 nt, Human
ccacauagugaugguuccc

SEQ ID NO: 3613669 - RNA, 21 nt, Human
ccacauagugaugguuccccu

SEQ ID NO: 3613670 - RNA, 15 nt, Human
ccacauccacacacg

SEQ ID NO: 3613671 - RNA, 13 nt, Human
ccacaucccaggc

SEQ ID NO: 3613672 - RNA, 18 nt, Human
ccacaucccaggcuucac

SEQ ID NO: 3613673 - RNA, 21 nt, Human
ccacauccccgcuggcugggg

SEQ ID NO: 3613674 - RNA, 20 nt, Human
ccacaucccgggacgcagca

SEQ ID NO: 3613675 - RNA, 14 nt, Human
ccacaucccucucu

SEQ ID NO: 3613676 - RNA, 14 nt, Human
ccacaucccugggc

SEQ ID NO: 3613677 - RNA, 17 nt, Human
ccacaucccugggccug

SEQ ID NO: 3613678 - RNA, 13 nt, Human
ccacauccuccac

SEQ ID NO: 3613679 - RNA, 19 nt, Human
ccacauccuccguccagcc

SEQ ID NO: 3613680 - RNA, 12 nt, Human
ccacaucugccu

SEQ ID NO: 3613681 - RNA, 22 nt, Human
ccacaucugccuuaaaaccaaa

SEQ ID NO: 3613682 - RNA, 18 nt, Human
ccacaucuuccauuucca

SEQ ID NO: 3613683 - RNA, 14 nt, Human
ccacaucuugcucu

SEQ ID NO: 3613684 - RNA, 18 nt, Human
ccacaucuugcucugcug

SEQ ID NO: 3613685 - RNA, 23 nt, Human
ccacaucuugcucugcugacaga

SEQ ID NO: 3613686 - RNA, 13 nt, Human
ccacaugaguccc

SEQ ID NO: 3613687 - RNA, 17 nt, Human
ccacaugagucccagug

SEQ ID NO: 3613688 - RNA, 22 nt, Human
ccacaugagucccagugggagg

SEQ ID NO: 3613689 - RNA, 16 nt, Human
ccacaugccaggggcc

SEQ ID NO: 3613690 - RNA, 20 nt, Human
ccacaugccauuuguacuga

SEQ ID NO: 3613691 - RNA, 22 nt, Human
ccacaugccauuuguacugacc

SEQ ID NO: 3613692 - RNA, 12 nt, Human
ccacaugcccca

SEQ ID NO: 3613693 - RNA, 17 nt, Human
ccacauggcuuccuccu

SEQ ID NO: 3613694 - RNA, 21 nt, Human
ccacauggcuuccuccugcgc

SEQ ID NO: 3613695 - RNA, 21 nt, Human
ccacauggggcugggcagcua

SEQ ID NO: 3613696 - RNA, 19 nt, Human
ccacaugugacacauaugc

SEQ ID NO: 3613697 - RNA, 16 nt, Human
ccacaugugcacaugc

SEQ ID NO: 3613698 - RNA, 14 nt, Human
ccacauuaaagaag

SEQ ID NO: 3613699 - RNA, 16 nt, Human
ccacauuaaagaagac

SEQ ID NO: 3613700 - RNA, 20 nt, Human
ccacauuaaagaagaccuga

SEQ ID NO: 3613701 - RNA, 15 nt, Human
ccacauuucuaaaau

SEQ ID NO: 3613702 - RNA, 14 nt, Human
ccaccaaaaacaaa

SEQ ID NO: 3613703 - RNA, 15 nt, Human
ccaccaaaacugcuc

SEQ ID NO: 3613704 - RNA, 16 nt, Human
ccaccaaaacugcucc

SEQ ID NO: 3613705 - RNA, 18 nt, Human
ccaccaaagcugcccacu

SEQ ID NO: 3613706 - RNA, 20 nt, Human
ccaccaacauacucccaucu

SEQ ID NO: 3613707 - RNA, 13 nt, Human
ccaccaacccuca

SEQ ID NO: 3613708 - RNA, 14 nt, Human
ccaccaacccucag

SEQ ID NO: 3613709 - RNA, 16 nt, Human
ccaccaacccucaggg

SEQ ID NO: 3613710 - RNA, 18 nt, Human
ccaccaacccucagggca

SEQ ID NO: 3613711 - RNA, 19 nt, Human
ccaccaacuggcccucuuc

SEQ ID NO: 3613712 - RNA, 19 nt, Human
cacuaacgacuucagggca

SEQ ID NO: 3613713 - RNA, 21 nt, Human
cacuaacgguugaguuuugac

SEQ ID NO: 3613714 - RNA, 20 nt, Human
cacuaacguugagccccugg

SEQ ID NO: 3613715 - RNA, 13 nt, Human
cacuaagcagagg

SEQ ID NO: 3613716 - RNA, 18 nt, Human
cacuaaggugugcucuga

SEQ ID NO: 3613717 - RNA, 16 nt, Human
cacuaagucucuuuuu

SEQ ID NO: 3613718 - RNA, 21 nt, Human
cacuaagucucuuuuuuacaa

SEQ ID NO: 3613719 - RNA, 22 nt, Human
cacuaaguuauaguauaucugg

SEQ ID NO: 3613720 - RNA, 17 nt, Human
cacuaauauauuuaaaa

SEQ ID NO: 3613721 - RNA, 19 nt, Human
cacuaauauauuuaaaaau

SEQ ID NO: 3613722 - RNA, 23 nt, Human
cacuaauuuuuguauuauuuuug

SEQ ID NO: 3613723 - RNA, 13 nt, Human
cacuacaccacac

SEQ ID NO: 3613724 - RNA, 20 nt, Human
cacuacaccacacacaacag

SEQ ID NO: 3613725 - RNA, 18 nt, Human
cacuacacccagcaauag

SEQ ID NO: 3613726 - RNA, 15 nt, Human
cacuacaccuggcug

SEQ ID NO: 3613727 - RNA, 14 nt, Human
cacuacaccuugcc

SEQ ID NO: 3613728 - RNA, 23 nt, Human
cacuacaugcagcccaugcccac

SEQ ID NO: 3613729 - RNA, 21 nt, Human
cacuacauuauaaaugucucu

SEQ ID NO: 3613730 - RNA, 15 nt, Human
cacuacauucauuua

SEQ ID NO: 3613731 - RNA, 14 nt, Human
cacuacauucuguu

SEQ ID NO: 3613732 - RNA, 22 nt, Human
cacuaccaaaggacacuuaucc

SEQ ID NO: 3613733 - RNA, 15 nt, Human
cacuaccccuugauu

SEQ ID NO: 3613734 - RNA, 23 nt, Human
cacuaccgaaugugucuuuagau

SEQ ID NO: 3613735 - RNA, 20 nt, Human
cacuaccuccucagggaugg

SEQ ID NO: 3613736 - RNA, 23 nt, Human
cacuacgccuggcugauuuuugu

SEQ ID NO: 3613737 - RNA, 23 nt, Human
cacuacggaauaguuggcuagga

SEQ ID NO: 3613738 - RNA, 13 nt, Human
cacuacucagcau

SEQ ID NO: 3613739 - RNA, 14 nt, Human
cacuacucagcaug

SEQ ID NO: 3613740 - RNA, 19 nt, Human
cacuacuccucugcagugc

SEQ ID NO: 3613741 - RNA, 20 nt, Human
cacuacuccucugcagugcc

SEQ ID NO: 3613742 - RNA, 17 nt, Human
cacuacugcagcaccuc

SEQ ID NO: 3613743 - RNA, 19 nt, Human
cacuacugcagcaccucca

SEQ ID NO: 3613744 - RNA, 12 nt, Human
cacuacugggug

SEQ ID NO: 3613745 - RNA, 21 nt, Human
cacuacugggugucauuucau

SEQ ID NO: 3613746 - RNA, 16 nt, Human
cacuagacaagccaga

SEQ ID NO: 3613747 - RNA, 17 nt, Human
cacuagacaagccagaa

SEQ ID NO: 3613748 - RNA, 12 nt, Human
cacuagccaaac

SEQ ID NO: 3613749 - RNA, 20 nt, Human
cacuagccagacacucugcu

SEQ ID NO: 3613750 - RNA, 15 nt, Human
cacuagccucagggg

SEQ ID NO: 3613751 - RNA, 17 nt, Human
cacuagccuuuggcucu

SEQ ID NO: 3613752 - RNA, 22 nt, Human
cacuagccuuuggcucuggaga

SEQ ID NO: 3613753 - RNA, 19 nt, Human
cacuaggcacccagcugcc

SEQ ID NO: 3613754 - RNA, 22 nt, Human
cacuaggcccccacuugccucu

SEQ ID NO: 3613755 - RNA, 13 nt, Human
cacuaggcugggu

SEQ ID NO: 3613756 - RNA, 14 nt, Human
cacuaggcugggug

SEQ ID NO: 3613757 - RNA, 20 nt, Human
cacuaggggauauaggagag

SEQ ID NO: 3613758 - RNA, 15 nt, Human
cacuagugcaaauca

SEQ ID NO: 3613759 - RNA, 16 nt, Human
cacuagugcaaaucau

SEQ ID NO: 3613760 - RNA, 12 nt, Human
cacuaguuuugu

SEQ ID NO: 3613761 - RNA, 14 nt, Human
cacuauagccuagg

SEQ ID NO: 3613762 - RNA, 14 nt, Human
cacuauaucuguau

SEQ ID NO: 3613763 - RNA, 19 nt, Human
cacuauccaugcaccaaac

SEQ ID NO: 3613764 - RNA, 18 nt, Human
cacuaucccggcugcccu

SEQ ID NO: 3613765 - RNA, 15 nt, Human
cacuauguugcccag

SEQ ID NO: 3613766 - RNA, 19 nt, Human
cacuauguugcccaggcag

SEQ ID NO: 3613767 - RNA, 12 nt, Human
cacuauuuuaga

SEQ ID NO: 3613768 - RNA, 12 nt, Human
cacuauuuucag

SEQ ID NO: 3613769 - RNA, 23 nt, Human
cacuauuuuuauuuauauuuuug

SEQ ID NO: 3613770 - RNA, 15 nt, Human
cacucaaaagcuggg

SEQ ID NO: 3613771 - RNA, 20 nt, Human
cacucaaaggccagaccugc

SEQ ID NO: 3613772 - RNA, 18 nt, Human
cacucaaaucuuaagaaa

SEQ ID NO: 3613773 - RNA, 16 nt, Human
cacucaaauuaaucuu

SEQ ID NO: 3613774 - RNA, 20 nt, Human
cacucaaauuaaucuuucuu

SEQ ID NO: 3613775 - RNA, 17 nt, Human
cacucaagaagcaggcu

SEQ ID NO: 3613776 - RNA, 15 nt, Human
cacucaagccaagca

SEQ ID NO: 3613777 - RNA, 11 nt, Human
ccaaagaaugu

SEQ ID NO: 3613778 - RNA, 19 nt, Human
ccaaagaauguuagagcac

SEQ ID NO: 3613779 - RNA, 14 nt, Human
ccaaagaauucuua

SEQ ID NO: 3613780 - RNA, 13 nt, Human
ccaaagacaaaua

SEQ ID NO: 3613781 - RNA, 20 nt, Human
ccaaagagcacaaacauuuu

SEQ ID NO: 3613782 - RNA, 22 nt, Human
ccaaagagcacaaacauuuuuc

SEQ ID NO: 3613783 - RNA, 12 nt, Human
ccaaagagccug

SEQ ID NO: 3613784 - RNA, 16 nt, Human
ccaaagagccuggaga

SEQ ID NO: 3613785 - RNA, 17 nt, Human
ccaaagagccuggagaa

SEQ ID NO: 3613786 - RNA, 14 nt, Human
ccaaagagcugccu

SEQ ID NO: 3613787 - RNA, 15 nt, Human
ccaaagagcugccua

SEQ ID NO: 3613788 - RNA, 16 nt, Human
ccaaagaggcugcccc

SEQ ID NO: 3613789 - RNA, 16 nt, Human
ccaaagagggcuuccu

SEQ ID NO: 3613790 - RNA, 17 nt, Human
ccaaagagggcuuccuc

SEQ ID NO: 3613791 - RNA, 13 nt, Human
ccaaagaugcagc

SEQ ID NO: 3613792 - RNA, 23 nt, Human
ccaaagaugcagccgccuuccuu

SEQ ID NO: 3613793 - RNA, 19 nt, Human
ccaaagcagugcaugcugu

SEQ ID NO: 3613794 - RNA, 19 nt, Human
ccaaagcaguggagcccag

SEQ ID NO: 3613795 - RNA, 23 nt, Human
ccaaagcaguggagcccaggagu

SEQ ID NO: 3613796 - RNA, 19 nt, Human
ccaaagccaaagcuaggcc

SEQ ID NO: 3613797 - RNA, 21 nt, Human
ccaaagccaauaacacacagc

SEQ ID NO: 3613798 - RNA, 15 nt, Human
ccaaagccagacagc

SEQ ID NO: 3613799 - RNA, 23 nt, Human
ccaaagccccuugcucuccccug

SEQ ID NO: 3613800 - RNA, 17 nt, Human
ccaaagccuccuccagc

SEQ ID NO: 3613801 - RNA, 17 nt, Human
ccaaagcgaauuuuaaa

SEQ ID NO: 3613802 - RNA, 16 nt, Human
ccaaagcuaggccugg

SEQ ID NO: 3613803 - RNA, 17 nt, Human
ccaaagcuaggccuggc

SEQ ID NO: 3613804 - RNA, 21 nt, Human
ccaaagcuaggccuggccaga

SEQ ID NO: 3613805 - RNA, 18 nt, Human
ccaaagcuaggguggccc

SEQ ID NO: 3613806 - RNA, 19 nt, Human
ccaaagcuaggguggcccu

SEQ ID NO: 3613807 - RNA, 21 nt, Human
ccaaagcugacgaggcugggc

SEQ ID NO: 3613808 - RNA, 18 nt, Human
ccaaagcugcccacuguu

SEQ ID NO: 3613809 - RNA, 21 nt, Human
ccaaagcugcccacuguuucu

SEQ ID NO: 3613810 - RNA, 17 nt, Human
ccaaagcuucccacggc

SEQ ID NO: 3613811 - RNA, 12 nt, Human
ccaaagcuuuau

SEQ ID NO: 3613812 - RNA, 16 nt, Human
ccaaagcuuucaugua

SEQ ID NO: 3613813 - RNA, 17 nt, Human
ccaaagcuuuccugccc

SEQ ID NO: 3613814 - RNA, 20 nt, Human
ccaaagcuuuccugccccag

SEQ ID NO: 3613815 - RNA, 14 nt, Human
ccaaaggaaaaugu

SEQ ID NO: 3613816 - RNA, 15 nt, Human
ccaaaggaagcacau

SEQ ID NO: 3613817 - RNA, 20 nt, Human
ccaaaggacauuaugugugc

SEQ ID NO: 3613818 - RNA, 17 nt, Human
ccaaaggacuccaccca

SEQ ID NO: 3613819 - RNA, 14 nt, Human
ccaaaggaggaugg

SEQ ID NO: 3613820 - RNA, 20 nt, Human
ccaaaggccauggagagcug

SEQ ID NO: 3613821 - RNA, 21 nt, Human
ccaaaggccauggagagcugg

SEQ ID NO: 3613822 - RNA, 15 nt, Human
ccaaaggcugguggc

SEQ ID NO: 3613823 - RNA, 21 nt, Human
ccaaagggagaguuccagagg

SEQ ID NO: 3613824 - RNA, 13 nt, Human
ccaaagggagucu

SEQ ID NO: 3613825 - RNA, 17 nt, Human
ccaaaggggacaggccu

SEQ ID NO: 3613826 - RNA, 23 nt, Human
ccaaaggggacaggccucaccuc

SEQ ID NO: 3613827 - RNA, 23 nt, Human
ccaaagggugaagcuauuuaucu

SEQ ID NO: 3613828 - RNA, 15 nt, Human
ccaaaggugaaggaa

SEQ ID NO: 3613829 - RNA, 20 nt, Human
ccaaaggugaaggaauauau

SEQ ID NO: 3613830 - RNA, 14 nt, Human
ccaaaguaaaagaa

SEQ ID NO: 3613831 - RNA, 22 nt, Human
ccaaaguacagaauuugaauua

SEQ ID NO: 3613832 - RNA, 13 nt, Human
ccaaagucauaau

SEQ ID NO: 3613833 - RNA, 16 nt, Human
ccaaagucucuaauuc

SEQ ID NO: 3613834 - RNA, 22 nt, Human
ccaaagugcugggauuacaggc

SEQ ID NO: 3613835 - RNA, 11 nt, Human
ccaaaguucua

SEQ ID NO: 3613836 - RNA, 20 nt, Human
ccaaaguucuaauaauuucu

SEQ ID NO: 3613837 - RNA, 11 nt, Human
ccaaauaaaaa

SEQ ID NO: 3613838 - RNA, 13 nt, Human
ccaaauauguccu

SEQ ID NO: 3613839 - RNA, 15 nt, Human
ccaaaucaaaauaug

SEQ ID NO: 3613840 - RNA, 20 nt, Human
ccaaaucaauaagaagguag

SEQ ID NO: 3613841 - RNA, 15 nt, Human
ccaaaucagcugcua

SEQ ID NO: 3613842 - RNA, 18 nt, Human
ccaaaucauacuuuuucu

SEQ ID NO: 3613843 - RNA, 16 nt, Human
ccaaaucauaguggcu

SEQ ID NO: 3613844 - RNA, 17 nt, Human
ccaaauccgaaccuccu

SEQ ID NO: 3613845 - RNA, 18 nt, Human
ccaaauccgcucucuucc

SEQ ID NO: 3613846 - RNA, 22 nt, Human
ccaaaucucaaugaagccagcu

SEQ ID NO: 3613847 - RNA, 19 nt, Human
ccaaaucucucaaaucugu

SEQ ID NO: 3613848 - RNA, 18 nt, Human
ccaaaugaaauauauuua

SEQ ID NO: 3613849 - RNA, 15 nt, Human
ccaaaugcaauuuga

SEQ ID NO: 3613850 - RNA, 17 nt, Human
ccaaaugcauggugcag

SEQ ID NO: 3613851 - RNA, 23 nt, Human
ccaaauggaaaugggcagagcag

SEQ ID NO: 3613852 - RNA, 18 nt, Human
ccaaauggagaagcugca

SEQ ID NO: 3613853 - RNA, 20 nt, Human
ccaaauggagaagcugcagg

SEQ ID NO: 3613854 - RNA, 19 nt, Human
ccaaauggauuccuguuuc

SEQ ID NO: 3613855 - RNA, 18 nt, Human
ccaaauguaauugaauaa

SEQ ID NO: 3613856 - RNA, 17 nt, Human
ccaacuuucuguaaacu

SEQ ID NO: 3613857 - RNA, 14 nt, Human
ccaagaacugcaug

SEQ ID NO: 3613858 - RNA, 14 nt, Human
ccaagaagcagugg

SEQ ID NO: 3613859 - RNA, 18 nt, Human
ccaagaagcaguggccuu

SEQ ID NO: 3613860 - RNA, 15 nt, Human
ccaagaagcccagga

SEQ ID NO: 3613861 - RNA, 13 nt, Human
ccaagaaguugga

SEQ ID NO: 3613862 - RNA, 17 nt, Human
ccaagaaguuuaaggaa

SEQ ID NO: 3613863 - RNA, 20 nt, Human
ccaagaauagcaucuguaca

SEQ ID NO: 3613864 - RNA, 18 nt, Human
ccaagaauccacauuucu

SEQ ID NO: 3613865 - RNA, 21 nt, Human
ccaagaauccacauuucuaaa

SEQ ID NO: 3613866 - RNA, 12 nt, Human
ccaagaauguac

SEQ ID NO: 3613867 - RNA, 14 nt, Human
ccaagacaaaucaa

SEQ ID NO: 3613868 - RNA, 11 nt, Human
ccaagacauug

SEQ ID NO: 3613869 - RNA, 12 nt, Human
ccaagacuccca

SEQ ID NO: 3613870 - RNA, 14 nt, Human
ccaagacucccaug

SEQ ID NO: 3613871 - RNA, 22 nt, Human
ccaagacugcuguggccaggag

SEQ ID NO: 3613872 - RNA, 18 nt, Human
ccaagacuuggcaacaga

SEQ ID NO: 3613873 - RNA, 20 nt, Human
ccaagacuugguguccuuuc

SEQ ID NO: 3613874 - RNA, 21 nt, Human
ccaagagaaaggccugcacac

SEQ ID NO: 3613875 - RNA, 22 nt, Human
ccaagagaaaggccugcacaca

SEQ ID NO: 3613876 - RNA, 23 nt, Human
ccaagagaacucgcgcucaguaa

SEQ ID NO: 3613877 - RNA, 14 nt, Human
ccaagagaugaaga

SEQ ID NO: 3613878 - RNA, 16 nt, Human
ccaagagauugcuaau

SEQ ID NO: 3613879 - RNA, 17 nt, Human
ccaagagauugcuaauu

SEQ ID NO: 3613880 - RNA, 18 nt, Human
ccaagagcaucaugccuc

SEQ ID NO: 3613881 - RNA, 19 nt, Human
ccaagagcaucaugccucu

SEQ ID NO: 3613882 - RNA, 22 nt, Human
ccaagagcaucaugccucugag

SEQ ID NO: 3613883 - RNA, 10 nt, Human
ccaagaggcu

SEQ ID NO: 3613884 - RNA, 23 nt, Human
ccaagagguuuggcuccugccca

SEQ ID NO: 3613885 - RNA, 11 nt, Human
ccaagagucua

SEQ ID NO: 3613886 - RNA, 16 nt, Human
ccaagagucugaugau

SEQ ID NO: 3613887 - RNA, 13 nt, Human
ccaagaguggccc

SEQ ID NO: 3613888 - RNA, 15 nt, Human
ccaagaguggcccca

SEQ ID NO: 3613889 - RNA, 18 nt, Human
ccaagaguggccccaccu

SEQ ID NO: 3613890 - RNA, 18 nt, Human
ccaagauacuuaagugcu

SEQ ID NO: 3613891 - RNA, 16 nt, Human
ccaagaucgcgccacu

SEQ ID NO: 3613892 - RNA, 17 nt, Human
ccaagaugacuggggug

SEQ ID NO: 3613893 - RNA, 18 nt, Human
ccaagaugggcaucuuuu

SEQ ID NO: 3613894 - RNA, 15 nt, Human
ccaagauucuagaug

SEQ ID NO: 3613895 - RNA, 17 nt, Human
ccaagauucuagaugau

SEQ ID NO: 3613896 - RNA, 18 nt, Human
ccaagauugagcucucug

SEQ ID NO: 3613897 - RNA, 21 nt, Human
ccaagauuggccugaggcugc

SEQ ID NO: 3613898 - RNA, 17 nt, Human
ccaagauuuaaaugcca

SEQ ID NO: 3613899 - RNA, 19 nt, Human
ccaagauuuuccucuugug

SEQ ID NO: 3613900 - RNA, 17 nt, Human
ccaagcaaaaucaugga

SEQ ID NO: 3613901 - RNA, 17 nt, Human
ccaagcaaccugggucc

SEQ ID NO: 3613902 - RNA, 18 nt, Human
ccaagcaaccugggucca

SEQ ID NO: 3613903 - RNA, 14 nt, Human
ccaagcacagcagc

SEQ ID NO: 3613904 - RNA, 15 nt, Human
ccaagcacagcagcc

SEQ ID NO: 3613905 - RNA, 21 nt, Human
ccaagcacagugguggcaggg

SEQ ID NO: 3613906 - RNA, 22 nt, Human
ccaagcacagugguggcagggc

SEQ ID NO: 3613907 - RNA, 14 nt, Human
ccaagcacugugcu

SEQ ID NO: 3613908 - RNA, 22 nt, Human
ccaagcacugugcucagggcua

SEQ ID NO: 3613909 - RNA, 21 nt, Human
ccaagcagagcaaucaguuag

SEQ ID NO: 3613910 - RNA, 16 nt, Human
ccaagcagccaagcuc

SEQ ID NO: 3613911 - RNA, 12 nt, Human
ccaagcaggaag

SEQ ID NO: 3613912 - RNA, 20 nt, Human
ccaagcaggaagcucagacu

SEQ ID NO: 3613913 - RNA, 14 nt, Human
ccaagcaggacaug

SEQ ID NO: 3613914 - RNA, 14 nt, Human
ccaagcaggagacg

SEQ ID NO: 3613915 - RNA, 13 nt, Human
ccaagcaggaggc

SEQ ID NO: 3613916 - RNA, 14 nt, Human
ccaagcaggaggcu

SEQ ID NO: 3613917 - RNA, 21 nt, Human
ccaagcaguugggacuacagg

SEQ ID NO: 3613918 - RNA, 16 nt, Human
ccaagcauauaaaauu

SEQ ID NO: 3613919 - RNA, 18 nt, Human
ccaagcauauaaaauuuu

SEQ ID NO: 3613920 - RNA, 23 nt, Human
ccaagcaucuuggggggguggcc

SEQ ID NO: 3613921 - RNA, 15 nt, Human
ccaagccaaaaaccu

SEQ ID NO: 3613922 - RNA, 21 nt, Human
ccaagccaaaaaccuuagcuc

SEQ ID NO: 3613923 - RNA, 20 nt, Human
ccaagccaagggaaccugug

SEQ ID NO: 3613924 - RNA, 16 nt, Human
ccaagccagaggcugg

SEQ ID NO: 3613925 - RNA, 19 nt, Human
ccaagccagaggcuggguu

SEQ ID NO: 3613926 - RNA, 17 nt, Human
ccaagccguggcuuccc

SEQ ID NO: 3613927 - RNA, 13 nt, Human
ccaagccuccaca

SEQ ID NO: 3613928 - RNA, 14 nt, Human
ccaagccuccacag

SEQ ID NO: 3613929 - RNA, 14 nt, Human
ccaagccugcaacu

SEQ ID NO: 3613930 - RNA, 15 nt, Human
ccaagccuggcaagg

SEQ ID NO: 3613931 - RNA, 22 nt, Human
ccaagccuugauugguguugcc

SEQ ID NO: 3613932 - RNA, 21 nt, Human
ccaagcgaggucaacagagaa

SEQ ID NO: 3613933 - RNA, 16 nt, Human
ccaagcgcccuggccc

SEQ ID NO: 3613934 - RNA, 20 nt, Human
ccaagcuaagcacugccacu

SEQ ID NO: 3613935 - RNA, 16 nt, Human
ccaagcuauccuggcu

SEQ ID NO: 3613936 - RNA, 19 nt, Human
ccaagcuauuccuuucccu

SEQ ID NO: 3613937 - RNA, 23 nt, Human
ccaagcuauuccuuucccuuccu

SEQ ID NO: 3613938 - RNA, 13 nt, Human
ccaagcucacagu

SEQ ID NO: 3613939 - RNA, 17 nt, Human
ccaagcucacaguuccu

SEQ ID NO: 3613940 - RNA, 12 nt, Human
ccaagcucagaa

SEQ ID NO: 3613941 - RNA, 13 nt, Human
ccaagcuccaagc

SEQ ID NO: 3613942 - RNA, 22 nt, Human
ccagaggagagaggacccccug

SEQ ID NO: 3613943 - RNA, 16 nt, Human
ccagaggagccuuuuu

SEQ ID NO: 3613944 - RNA, 14 nt, Human
ccagaggcacagcc

SEQ ID NO: 3613945 - RNA, 21 nt, Human
ccagaggcacagccggggccu

SEQ ID NO: 3613946 - RNA, 18 nt, Human
ccagaggcagaacccugg

SEQ ID NO: 3613947 - RNA, 15 nt, Human
ccagaggccaaggag

SEQ ID NO: 3613948 - RNA, 19 nt, Human
ccagaggccaaggaggccu

SEQ ID NO: 3613949 - RNA, 19 nt, Human
ccagaggcuauuauuuuca

SEQ ID NO: 3613950 - RNA, 14 nt, Human
ccagaggcugcaga

SEQ ID NO: 3613951 - RNA, 12 nt, Human
ccagaggcuggg

SEQ ID NO: 3613952 - RNA, 23 nt, Human
ccagagggagugacagaggcagc

SEQ ID NO: 3613953 - RNA, 17 nt, Human
ccagagggcccaggcag

SEQ ID NO: 3613954 - RNA, 18 nt, Human
ccagagggcccaggcagg

SEQ ID NO: 3613955 - RNA, 13 nt, Human
ccagagggccugc

SEQ ID NO: 3613956 - RNA, 13 nt, Human
ccagaggggaagg

SEQ ID NO: 3613957 - RNA, 13 nt, Human
ccagaggggccug

SEQ ID NO: 3613958 - RNA, 15 nt, Human
ccagaggggccugcc

SEQ ID NO: 3613959 - RNA, 20 nt, Human
ccagaggggccugccaccug

SEQ ID NO: 3613960 - RNA, 14 nt, Human
ccagagggucuggg

SEQ ID NO: 3613961 - RNA, 22 nt, Human
ccagagguaacagaacagcuuc

SEQ ID NO: 3613962 - RNA, 14 nt, Human
ccagagguccagcc

SEQ ID NO: 3613963 - RNA, 19 nt, Human
ccagaggucuagauuaaua

SEQ ID NO: 3613964 - RNA, 15 nt, Human
ccagaggugggcagg

SEQ ID NO: 3613965 - RNA, 16 nt, Human
ccagaggugggcaggu

SEQ ID NO: 3613966 - RNA, 17 nt, Human
ccagaggugggcaggug

SEQ ID NO: 3613967 - RNA, 19 nt, Human
ccagaggugggcagguggu

SEQ ID NO: 3613968 - RNA, 22 nt, Human
ccagagucuagcguagugcagc

SEQ ID NO: 3613969 - RNA, 23 nt, Human
ccagagucuagcguagugcagca

SEQ ID NO: 3613970 - RNA, 16 nt, Human
ccagaguggccuggcc

SEQ ID NO: 3613971 - RNA, 20 nt, Human
ccagaguuuuuauguagcag

SEQ ID NO: 3613972 - RNA, 19 nt, Human
ccagauaaaauuauagaug

SEQ ID NO: 3613973 - RNA, 16 nt, Human
ccagauaacugaggag

SEQ ID NO: 3613974 - RNA, 21 nt, Human
ccagauacacccaaaguauca

SEQ ID NO: 3613975 - RNA, 13 nt, Human
ccagauccagccu

SEQ ID NO: 3613976 - RNA, 13 nt, Human
ccagaucccagaa

SEQ ID NO: 3613977 - RNA, 17 nt, Human
ccagaucccagaaggac

SEQ ID NO: 3613978 - RNA, 18 nt, Human
ccagaucccagaaggacc

SEQ ID NO: 3613979 - RNA, 13 nt, Human
ccagaucccaggc

SEQ ID NO: 3613980 - RNA, 19 nt, Human
ccagaucccaggccccugg

SEQ ID NO: 3613981 - RNA, 14 nt, Human
ccagauccucacaa

SEQ ID NO: 3613982 - RNA, 15 nt, Human
ccagauccucuuggu

SEQ ID NO: 3613983 - RNA, 13 nt, Human
ccagauccugggu

SEQ ID NO: 3613984 - RNA, 21 nt, Human
ccagaucuuucagaaauauaa

SEQ ID NO: 3613985 - RNA, 19 nt, Human
ccagaugaggcuggccaag

SEQ ID NO: 3613986 - RNA, 17 nt, Human
ccagaugcaccagcccu

SEQ ID NO: 3613987 - RNA, 18 nt, Human
ccagaugcaccagcccuu

SEQ ID NO: 3613988 - RNA, 21 nt, Human
ccagaugcgucccaagauguu

SEQ ID NO: 3613989 - RNA, 15 nt, Human
ccagaugcugauguu

SEQ ID NO: 3613990 - RNA, 22 nt, Human
ccagauggcuggaaggggucca

SEQ ID NO: 3613991 - RNA, 16 nt, Human
ccagaugggggaaagc

SEQ ID NO: 3613992 - RNA, 18 nt, Human
ccagauggucauccagac

SEQ ID NO: 3613993 - RNA, 17 nt, Human
ccagauguuuccagacu

SEQ ID NO: 3613994 - RNA, 17 nt, Human
ccagauuagagccugua

SEQ ID NO: 3613995 - RNA, 23 nt, Human
ccagauuaucuauuugugugugu

SEQ ID NO: 3613996 - RNA, 17 nt, Human
ccagauuccccuguguc

SEQ ID NO: 3613997 - RNA, 13 nt, Human
ccagauugacgac

SEQ ID NO: 3613998 - RNA, 16 nt, Human
ccagauugcaacaggc

SEQ ID NO: 3613999 - RNA, 16 nt, Human
ccagauuggcucacac

SEQ ID NO: 3614000 - RNA, 21 nt, Human
ccagauuggcucacacugaga

SEQ ID NO: 3614001 - RNA, 16 nt, Human
ccaggccagccuccga

SEQ ID NO: 3614002 - RNA, 18 nt, Human
ccaggccaggacucugca

SEQ ID NO: 3614003 - RNA, 18 nt, Human
ccaggccaggccaccagg

SEQ ID NO: 3614004 - RNA, 19 nt, Human
ccaggccagggggccaguc

SEQ ID NO: 3614005 - RNA, 21 nt, Human
ccaggccauccggcccccaga

SEQ ID NO: 3614006 - RNA, 18 nt, Human
ccaggccaucuuccaggu

SEQ ID NO: 3614007 - RNA, 15 nt, Human
ccaggcccaaggcuc

SEQ ID NO: 3614008 - RNA, 17 nt, Human
ccaggcccaaggcuccc

SEQ ID NO: 3614009 - RNA, 18 nt, Human
ccaggcccaaggcucccg

SEQ ID NO: 3614010 - RNA, 20 nt, Human
ccaggccccaaaaccacagc

SEQ ID NO: 3614011 - RNA, 16 nt, Human
ccaggccccaggaagc

SEQ ID NO: 3614012 - RNA, 17 nt, Human
ccaggccccaugaccuc

SEQ ID NO: 3614013 - RNA, 20 nt, Human
ccaggccccaugaccuccag

SEQ ID NO: 3614014 - RNA, 19 nt, Human
ccaggcccccaagccugca

SEQ ID NO: 3614015 - RNA, 15 nt, Human
ccaggcccccaccac

SEQ ID NO: 3614016 - RNA, 15 nt, Human
ccaggccccccuguc

SEQ ID NO: 3614017 - RNA, 16 nt, Human
ccaggccccccuguca

SEQ ID NO: 3614018 - RNA, 22 nt, Human
ccaggccccgaggacccagacc

SEQ ID NO: 3614019 - RNA, 13 nt, Human
ccaggccccugcc

SEQ ID NO: 3614020 - RNA, 15 nt, Human
ccaggccccugccac

SEQ ID NO: 3614021 - RNA, 16 nt, Human
ccaggccccugccacc

SEQ ID NO: 3614022 - RNA, 21 nt, Human
ccaggccccugccacccuggg

SEQ ID NO: 3614023 - RNA, 15 nt, Human
ccaggcccggggcug

SEQ ID NO: 3614024 - RNA, 21 nt, Human
ccaggcccggggcuggcggcu

SEQ ID NO: 3614025 - RNA, 20 nt, Human
ccaggcccgucuguccaucu

SEQ ID NO: 3614026 - RNA, 18 nt, Human
ccaggcccuccucuccca

SEQ ID NO: 3614027 - RNA, 18 nt, Human
ccaggcccucugcccacu

SEQ ID NO: 3614028 - RNA, 21 nt, Human
ccaggcccucugcccacuccc

SEQ ID NO: 3614029 - RNA, 18 nt, Human
ccaggccgagaagccagu

SEQ ID NO: 3614030 - RNA, 15 nt, Human
ccaggccgccccagc

SEQ ID NO: 3614031 - RNA, 21 nt, Human
ccaggccgccccagccucuga

SEQ ID NO: 3614032 - RNA, 14 nt, Human
ccaggccggccagc

SEQ ID NO: 3614033 - RNA, 21 nt, Human
ccaggccgggaaaaagcccac

SEQ ID NO: 3614034 - RNA, 17 nt, Human
ccaggccgggccuguac

SEQ ID NO: 3614035 - RNA, 23 nt, Human
ccaggccgggccuguacagucug

SEQ ID NO: 3614036 - RNA, 21 nt, Human
ccaggccgggguggagcaugg

SEQ ID NO: 3614037 - RNA, 16 nt, Human
ccaggccguggcugcc

SEQ ID NO: 3614038 - RNA, 16 nt, Human
ccaggccuacuccugu

SEQ ID NO: 3614039 - RNA, 17 nt, Human
ccaggccuacuccuguc

SEQ ID NO: 3614040 - RNA, 18 nt, Human
ccaggccuacuccugucu

SEQ ID NO: 3614041 - RNA, 13 nt, Human
ccaggccuccuac

SEQ ID NO: 3614042 - RNA, 13 nt, Human
ccaggccucugug

SEQ ID NO: 3614043 - RNA, 16 nt, Human
ccaggccucugugucc

SEQ ID NO: 3614044 - RNA, 13 nt, Human
ccaggccugccuc

SEQ ID NO: 3614045 - RNA, 17 nt, Human
ccaggccugggucugug

SEQ ID NO: 3614046 - RNA, 13 nt, Human
ccaggccuguugc

SEQ ID NO: 3614047 - RNA, 18 nt, Human
ccaggccuuaucuccaag

SEQ ID NO: 3614048 - RNA, 18 nt, Human
ccaggcgccccuuccccc

SEQ ID NO: 3614049 - RNA, 19 nt, Human
ccaggcgccccuucccccu

SEQ ID NO: 3614050 - RNA, 23 nt, Human
ccaggcgcuagcacagcucccuu

SEQ ID NO: 3614051 - RNA, 21 nt, Human
ccaggcgggagcgguggcccu

SEQ ID NO: 3614052 - RNA, 18 nt, Human
ccaggcgggcucaaggaa

SEQ ID NO: 3614053 - RNA, 19 nt, Human
ccaggcuagcuggagccug

SEQ ID NO: 3614054 - RNA, 15 nt, Human
ccaggcuccuuccug

SEQ ID NO: 3614055 - RNA, 21 nt, Human
ccaggcuccuuuagcgcccag

SEQ ID NO: 3614056 - RNA, 17 nt, Human
ccaggcucggccugccc

SEQ ID NO: 3614057 - RNA, 18 nt, Human
ccaggcucguggacugag

SEQ ID NO: 3614058 - RNA, 13 nt, Human
ccaggcucugugc

SEQ ID NO: 3614059 - RNA, 19 nt, Human
ccaggcucugugcugaccc

SEQ ID NO: 3614060 - RNA, 22 nt, Human
ccaggcucuuuggggucagcca

SEQ ID NO: 3614061 - RNA, 13 nt, Human
ccaggcugaagca

SEQ ID NO: 3614062 - RNA, 18 nt, Human
ccaggcugaccacagcac

SEQ ID NO: 3614063 - RNA, 22 nt, Human
ccaggcugagccucagucuccc

SEQ ID NO: 3614064 - RNA, 18 nt, Human
ccaggcugcauagaagga

SEQ ID NO: 3614065 - RNA, 21 nt, Human
ccaggcugcauagaaggagga

SEQ ID NO: 3614066 - RNA, 13 nt, Human
ccaggcugccaag

SEQ ID NO: 3614067 - RNA, 19 nt, Human
ccaggcugccaaggccaga

SEQ ID NO: 3614068 - RNA, 15 nt, Human
ccaggcugccugagc

SEQ ID NO: 3614069 - RNA, 17 nt, Human
ccaggcugccugagcac

SEQ ID NO: 3614070 - RNA, 13 nt, Human
ccaggcugcucag

SEQ ID NO: 3614071 - RNA, 14 nt, Human
ccaggcugcucuca

SEQ ID NO: 3614072 - RNA, 21 nt, Human
ccaggcugcucuugaacuccu

SEQ ID NO: 3614073 - RNA, 14 nt, Human
ccaggcugcuggac

SEQ ID NO: 3614074 - RNA, 13 nt, Human
ccaggcuggacau

SEQ ID NO: 3614075 - RNA, 17 nt, Human
ccaggcuggagugcagu

SEQ ID NO: 3614076 - RNA, 18 nt, Human
ccaggcuggagugcagug

SEQ ID NO: 3614077 - RNA, 14 nt, Human
ccaggcuggccagc

SEQ ID NO: 3614078 - RNA, 15 nt, Human
ccaggcuggccagcc

SEQ ID NO: 3614079 - RNA, 18 nt, Human
ccaggcuggccagcccca

SEQ ID NO: 3614080 - RNA, 13 nt, Human
ccaggcuggcgca

SEQ ID NO: 3614081 - RNA, 15 nt, Human
ccaggcuggcgcagc

SEQ ID NO: 3614082 - RNA, 18 nt, Human
ccaggcuggcgcagccaa

SEQ ID NO: 3614083 - RNA, 23 nt, Human
ccaggcuggcgcagccaaggccg

SEQ ID NO: 3614084 - RNA, 14 nt, Human
ccaggcugggagag

SEQ ID NO: 3614085 - RNA, 20 nt, Human
ccaggcugggagagccuucc

SEQ ID NO: 3614086 - RNA, 21 nt, Human
ccaggcugggagagccuucca

SEQ ID NO: 3614087 - RNA, 18 nt, Human
ccaggcugggcaaggagg

SEQ ID NO: 3614088 - RNA, 12 nt, Human
ccaggcuggguc

SEQ ID NO: 3614089 - RNA, 17 nt, Human
ccaggcuggucuaaaac

SEQ ID NO: 3614090 - RNA, 20 nt, Human
ccaggcuggucuaaaacucc

SEQ ID NO: 3614091 - RNA, 13 nt, Human
ccaggcuggucuu

SEQ ID NO: 3614092 - RNA, 22 nt, Human
ccaggcugugggccucaaggac

SEQ ID NO: 3614093 - RNA, 17 nt, Human
ccaggcuuagucacuga

SEQ ID NO: 3614094 - RNA, 20 nt, Human
ccaggcuuagucacugagac

SEQ ID NO: 3614095 - RNA, 22 nt, Human
ccaggcuuagucacugagacag

SEQ ID NO: 3614096 - RNA, 15 nt, Human
ccaggcuucugcugg

SEQ ID NO: 3614097 - RNA, 16 nt, Human
ccaggcuucugcuggg

SEQ ID NO: 3614098 - RNA, 12 nt, Human
ccaggcuuggaa

SEQ ID NO: 3614099 - RNA, 19 nt, Human
ccaggcuuucuagaaagaa

SEQ ID NO: 3614100 - RNA, 18 nt, Human
ccaggcuuuguacagagu

SEQ ID NO: 3614101 - RNA, 17 nt, Human
ccagggaagcuggccga

SEQ ID NO: 3614102 - RNA, 17 nt, Human
ccagggaagcugucccu

SEQ ID NO: 3614103 - RNA, 16 nt, Human
ccagggaaguccccga

SEQ ID NO: 3614104 - RNA, 14 nt, Human
ccagggacaccagc

SEQ ID NO: 3614105 - RNA, 15 nt, Human
ccagggacaccagcc

SEQ ID NO: 3614106 - RNA, 16 nt, Human
ccagggacaccagcca

SEQ ID NO: 3614107 - RNA, 18 nt, Human
ccagggacaccagccagg

SEQ ID NO: 3614108 - RNA, 21 nt, Human
ccagggacagaggccccagcc

SEQ ID NO: 3614109 - RNA, 15 nt, Human
ccagggacagagggg

SEQ ID NO: 3614110 - RNA, 18 nt, Human
ccagggacgaagaagagc

SEQ ID NO: 3614111 - RNA, 17 nt, Human
ccagggagagcccagga

SEQ ID NO: 3614112 - RNA, 14 nt, Human
ccagggagaggcca

SEQ ID NO: 3614113 - RNA, 13 nt, Human
ccagggagagggg

SEQ ID NO: 3614114 - RNA, 18 nt, Human
ccagggagagggggcugg

SEQ ID NO: 3614115 - RNA, 19 nt, Human
ccagggagcaugagaggag

SEQ ID NO: 3614116 - RNA, 21 nt, Human
ccagggagcauuuuccuccau

SEQ ID NO: 3614117 - RNA, 14 nt, Human
ccagggagccuaga

SEQ ID NO: 3614118 - RNA, 16 nt, Human
ccagggagccuagaag

SEQ ID NO: 3614119 - RNA, 15 nt, Human
ccagggagcugcagg

SEQ ID NO: 3614120 - RNA, 19 nt, Human
ccagggagcugcaggggca

SEQ ID NO: 3614121 - RNA, 22 nt, Human
ccagggagcuugaaaguuuuca

SEQ ID NO: 3614122 - RNA, 23 nt, Human
ccagggaggggccggcccugugu

SEQ ID NO: 3614123 - RNA, 17 nt, Human
ccagggaguccccuccc

SEQ ID NO: 3614124 - RNA, 20 nt, Human
ccagggaugauucaagccau

SEQ ID NO: 3614125 - RNA, 23 nt, Human
ccagggaugccaucugugggcac

SEQ ID NO: 3614126 - RNA, 20 nt, Human
ccagggauggggccacagcc

SEQ ID NO: 3614127 - RNA, 20 nt, Human
ccagggcaagcuccgcagga

SEQ ID NO: 3614128 - RNA, 10 nt, Human
ccagggcaca

SEQ ID NO: 3614129 - RNA, 13 nt, Human
ccagggcacagga

SEQ ID NO: 3614130 - RNA, 14 nt, Human
ccagggcacaggag

SEQ ID NO: 3614131 - RNA, 20 nt, Human
ccagggcacaggagcuaccu

SEQ ID NO: 3614132 - RNA, 22 nt, Human
ccagggcaccaagcccacaggu

SEQ ID NO: 3614133 - RNA, 19 nt, Human
ccagggcacuucacagagu

SEQ ID NO: 3614134 - RNA, 15 nt, Human
ccagggcagccaggg

SEQ ID NO: 3614135 - RNA, 12 nt, Human
ccagggcagugc

SEQ ID NO: 3614136 - RNA, 14 nt, Human
ccagggcagugcua

SEQ ID NO: 3614137 - RNA, 14 nt, Human
ccagggcaucucug

SEQ ID NO: 3614138 - RNA, 17 nt, Human
ccagggcaucucugggc

SEQ ID NO: 3614139 - RNA, 18 nt, Human
ccagggcaucucugggcu

SEQ ID NO: 3614140 - RNA, 19 nt, Human
ccagggcaucucugggcug

SEQ ID NO: 3614141 - RNA, 20 nt, Human
ccagggcaucucugggcugg

SEQ ID NO: 3614142 - RNA, 15 nt, Human
ccagggcaucuggga

SEQ ID NO: 3614143 - RNA, 19 nt, Human
ccagggccacgcuccagcu

SEQ ID NO: 3614144 - RNA, 19 nt, Human
ccagggccacgugccaggc

SEQ ID NO: 3614145 - RNA, 17 nt, Human
ccagggccacucugccu

SEQ ID NO: 3614146 - RNA, 14 nt, Human
ccagucaaccuggg

SEQ ID NO: 3614147 - RNA, 13 nt, Human
ccagucaccccgg

SEQ ID NO: 3614148 - RNA, 19 nt, Human
ccagucaccccggccaccu

SEQ ID NO: 3614149 - RNA, 21 nt, Human
ccagucaccccggccaccugc

SEQ ID NO: 3614150 - RNA, 15 nt, Human
ccagucagccucucu

SEQ ID NO: 3614151 - RNA, 18 nt, Human
ccagucagccucucuccc

SEQ ID NO: 3614152 - RNA, 22 nt, Human
ccagucagccucucucccaguc

SEQ ID NO: 3614153 - RNA, 22 nt, Human
ccagucauuauguuaauauuuc

SEQ ID NO: 3614154 - RNA, 21 nt, Human
ccaguccaaauguccuccaga

SEQ ID NO: 3614155 - RNA, 21 nt, Human
ccaguccaaucucauggagaa

SEQ ID NO: 3614156 - RNA, 22 nt, Human
ccaguccaaucucauggagaag

SEQ ID NO: 3614157 - RNA, 17 nt, Human
ccaguccacccugccug

SEQ ID NO: 3614158 - RNA, 16 nt, Human
ccaguccaggcugccg

SEQ ID NO: 3614159 - RNA, 13 nt, Human
ccagucccagagc

SEQ ID NO: 3614160 - RNA, 20 nt, Human
ccagucccagcagccagcca

SEQ ID NO: 3614161 - RNA, 17 nt, Human
ccaguccccaccccugc

SEQ ID NO: 3614162 - RNA, 16 nt, Human
ccaguccccagaacuc

SEQ ID NO: 3614163 - RNA, 21 nt, Human
ccaguccccagaacucugccu

SEQ ID NO: 3614164 - RNA, 16 nt, Human
ccagucccccaacccc

SEQ ID NO: 3614165 - RNA, 20 nt, Human
cacuuggggguucaggcccg

SEQ ID NO: 3614166 - RNA, 20 nt, Human
cacuuggucugugagaugcu

SEQ ID NO: 3614167 - RNA, 17 nt, Human
cacuuggugcugggaac

SEQ ID NO: 3614168 - RNA, 17 nt, Human
cacuuguacaaaauaaa

SEQ ID NO: 3614169 - RNA, 16 nt, Human
cacuuguagauuugau

SEQ ID NO: 3614170 - RNA, 15 nt, Human
cacuuguauaaaugu

SEQ ID NO: 3614171 - RNA, 22 nt, Human
cacuugucacugacacaaagga

SEQ ID NO: 3614172 - RNA, 19 nt, Human
cacuugucccacuaucugg

SEQ ID NO: 3614173 - RNA, 22 nt, Human
cacuugucccacuaucugggug

SEQ ID NO: 3614174 - RNA, 12 nt, Human
cacuugucccca

SEQ ID NO: 3614175 - RNA, 21 nt, Human
cacuuguccuuagccuggacc

SEQ ID NO: 3614176 - RNA, 12 nt, Human
cacuugugaaua

SEQ ID NO: 3614177 - RNA, 17 nt, Human
cacuugugacuuuugcu

SEQ ID NO: 3614178 - RNA, 21 nt, Human
cacuugugacuuuugcuuuaa

SEQ ID NO: 3614179 - RNA, 18 nt, Human
cacuugugccaacacuca

SEQ ID NO: 3614180 - RNA, 22 nt, Human
cacuugugccaacacucaagaa

SEQ ID NO: 3614181 - RNA, 24 nt, Human
cacuugugccaacacucaagaagc

SEQ ID NO: 3614182 - RNA, 15 nt, Human
cacuugugcuuugcu

SEQ ID NO: 3614183 - RNA, 13 nt, Human
cacuugugugugg

SEQ ID NO: 3614184 - RNA, 15 nt, Human
cacuugugugugggc

SEQ ID NO: 3614185 - RNA, 22 nt, Human
cacuugugugugggcugugagu

SEQ ID NO: 3614186 - RNA, 15 nt, Human
cacuuguuccagcuc

SEQ ID NO: 3614187 - RNA, 16 nt, Human
cacuuguuccagcucu

SEQ ID NO: 3614188 - RNA, 19 nt, Human
cacuuguugauuaauggaa

SEQ ID NO: 3614189 - RNA, 13 nt, Human
cacuuuaaaccug

SEQ ID NO: 3614190 - RNA, 22 nt, Human
cacuuuaauucucaugugaucc

SEQ ID NO: 3614191 - RNA, 22 nt, Human
cacuuuacaauguucaucccau

SEQ ID NO: 3614192 - RNA, 19 nt, Human
cacuuuacccaccuagaac

SEQ ID NO: 3614193 - RNA, 20 nt, Human
cacuuuacccaccuagaaca

SEQ ID NO: 3614194 - RNA, 22 nt, Human
cacuuuacccaccuagaacacu

SEQ ID NO: 3614195 - RNA, 14 nt, Human
cacuuuagaugcug

SEQ ID NO: 3614196 - RNA, 17 nt, Human
cacuuuagggcuguaaa

SEQ ID NO: 3614197 - RNA, 18 nt, Human
cacuuuagggcuguaaaa

SEQ ID NO: 3614198 - RNA, 23 nt, Human
cacuuuagggcuguaaaaugcau

SEQ ID NO: 3614199 - RNA, 22 nt, Human
cacuuuauaagucauuguaugu

SEQ ID NO: 3614200 - RNA, 13 nt, Human
cacuuuauugcca

SEQ ID NO: 3614201 - RNA, 23 nt, Human
cacuuuauugccuuuuaauuuuu

SEQ ID NO: 3614202 - RNA, 14 nt, Human
cacuuuauuuacuu

SEQ ID NO: 3614203 - RNA, 17 nt, Human
cacuuucaggaacacuc

SEQ ID NO: 3614204 - RNA, 17 nt, Human
cacuuucagugaaagca

SEQ ID NO: 3614205 - RNA, 18 nt, Human
cacuuucagugaaagcau

SEQ ID NO: 3614206 - RNA, 19 nt, Human
cacuuucagugaaagcauc

SEQ ID NO: 3614207 - RNA, 15 nt, Human
cacuuucauaaucuu

SEQ ID NO: 3614208 - RNA, 21 nt, Human
cacuuucauugccagugucuu

SEQ ID NO: 3614209 - RNA, 23 nt, Human
cacuuucauugccagugucuuuc

SEQ ID NO: 3614210 - RNA, 18 nt, Human
cacuuuccacuucuuccu

SEQ ID NO: 3614211 - RNA, 17 nt, Human
cacuuucuaauguuucu

SEQ ID NO: 3614212 - RNA, 18 nt, Human
cacuuucuaauguuucug

SEQ ID NO: 3614213 - RNA, 19 nt, Human
cacuuucuacaaugugaac

SEQ ID NO: 3614214 - RNA, 16 nt, Human
cacuuucuagccagag

SEQ ID NO: 3614215 - RNA, 19 nt, Human
cacuuucuagccagaggag

SEQ ID NO: 3614216 - RNA, 16 nt, Human
cacuuucuauagcaga

SEQ ID NO: 3614217 - RNA, 20 nt, Human
cacuuucuauccucuguaaa

SEQ ID NO: 3614218 - RNA, 19 nt, Human
cacuuucucaguuuucaua

SEQ ID NO: 3614219 - RNA, 22 nt, Human
cacuuucucaugauuuacagag

SEQ ID NO: 3614220 - RNA, 15 nt, Human
cacuuugaaauaccu

SEQ ID NO: 3614221 - RNA, 21 nt, Human
cacuuugaaauaccucauguu

SEQ ID NO: 3614222 - RNA, 23 nt, Human
cacuuugaugucauguguucccu

SEQ ID NO: 3614223 - RNA, 18 nt, Human
cacuuugcacauuuugau

SEQ ID NO: 3614224 - RNA, 23 nt, Human
cacuuugcacgacgcccucuccc

SEQ ID NO: 3614225 - RNA, 22 nt, Human
cacuuugcacugauauaucaug

SEQ ID NO: 3614226 - RNA, 12 nt, Human
cacuuugcauaa

SEQ ID NO: 3614227 - RNA, 23 nt, Human
cacuuugcauaugagccgugaac

SEQ ID NO: 3614228 - RNA, 13 nt, Human
cacuuugcucuga

SEQ ID NO: 3614229 - RNA, 13 nt, Human
cacuuugggaggc

SEQ ID NO: 3614230 - RNA, 12 nt, Human
cacuuuguaaau

SEQ ID NO: 3614231 - RNA, 20 nt, Human
cacuuugucgcccaggcugg

SEQ ID NO: 3614232 - RNA, 14 nt, Human
cacuuuguucuuua

SEQ ID NO: 3614233 - RNA, 23 nt, Human
cacuuuguugcaagaugugaauu

SEQ ID NO: 3614234 - RNA, 21 nt, Human
cacuuuguuucguggggaggu

SEQ ID NO: 3614235 - RNA, 16 nt, Human
cacuuuuaugagcuuc

SEQ ID NO: 3614236 - RNA, 17 nt, Human
cacuuuucauaucauuu

SEQ ID NO: 3614237 - RNA, 18 nt, Human
cacuuuucauaucauuuc

SEQ ID NO: 3614238 - RNA, 13 nt, Human
cacuuuucccacu

SEQ ID NO: 3614239 - RNA, 14 nt, Human
cacuuuucccacuc

SEQ ID NO: 3614240 - RNA, 17 nt, Human
cacuuuugacaaaggca

SEQ ID NO: 3614241 - RNA, 15 nt, Human
cacuuuugagacuuu

SEQ ID NO: 3614242 - RNA, 21 nt, Human
cacuuuugcaagguuccacag

SEQ ID NO: 3614243 - RNA, 13 nt, Human
cacuuuuugaacu

SEQ ID NO: 3614244 - RNA, 16 nt, Human
cacuuuuugaggcaaa

SEQ ID NO: 3614245 - RNA, 15 nt, Human
cacuuuuugcagcuu

SEQ ID NO: 3614246 - RNA, 14 nt, Human
cacuuuuuuccaca

SEQ ID NO: 3614247 - RNA, 14 nt, Human
cacuuuuuuuuucc

SEQ ID NO: 3614248 - RNA, 16 nt, Human
cacuuuuuuuuuccaa

SEQ ID NO: 3614249 - RNA, 23 nt, Human
cacuuuuuuuuuuaaucuccacc

SEQ ID NO: 3614250 - RNA, 19 nt, Human
cagaaaaaaugucuguaaa

SEQ ID NO: 3614251 - RNA, 14 nt, Human
cagaaaaacaauaa

SEQ ID NO: 3614252 - RNA, 13 nt, Human
cagaaaaaccaga

SEQ ID NO: 3614253 - RNA, 21 nt, Human
cagaaaaauaacuucaagcaa

SEQ ID NO: 3614254 - RNA, 18 nt, Human
cagaaaaauauguaccaa

SEQ ID NO: 3614255 - RNA, 22 nt, Human
cagaaaaauauguaccaagaau

SEQ ID NO: 3614256 - RNA, 13 nt, Human
cagaaaaauggag

SEQ ID NO: 3614257 - RNA, 20 nt, Human
cagaaaaauggagcaaagug

SEQ ID NO: 3614258 - RNA, 17 nt, Human
cagaaaacaacaaaaaa

SEQ ID NO: 3614259 - RNA, 20 nt, Human
cagaaaacaacaaaaaauaa

SEQ ID NO: 3614260 - RNA, 11 nt, Human
cagaaaacaga

SEQ ID NO: 3614261 - RNA, 12 nt, Human
cagaaaacagaa

SEQ ID NO: 3614262 - RNA, 14 nt, Human
cagaaaacagaaaa

SEQ ID NO: 3614263 - RNA, 20 nt, Human
cagaaaacagaaaaaaaaca

SEQ ID NO: 3614264 - RNA, 16 nt, Human
cagaaaacauguuucc

SEQ ID NO: 3614265 - RNA, 13 nt, Human
cagaaaacauugu

SEQ ID NO: 3614266 - RNA, 15 nt, Human
cagaaaagcaccugc

SEQ ID NO: 3614267 - RNA, 17 nt, Human
cagaaaagcaccugccg

SEQ ID NO: 3614268 - RNA, 18 nt, Human
cagaaaagggaaguugug

SEQ ID NO: 3614269 - RNA, 21 nt, Human
cagaaaauaaggcacccaucu

SEQ ID NO: 3614270 - RNA, 12 nt, Human
cagaaaauauac

SEQ ID NO: 3614271 - RNA, 13 nt, Human
cagaaaauauacu

SEQ ID NO: 3614272 - RNA, 14 nt, Human
cagaaaauauacug

SEQ ID NO: 3614273 - RNA, 15 nt, Human
cagaaaauauacugu

SEQ ID NO: 3614274 - RNA, 18 nt, Human
cagaaaauauacuguaaa

SEQ ID NO: 3614275 - RNA, 19 nt, Human
cagaaaauauacuguaaag

SEQ ID NO: 3614276 - RNA, 19 nt, Human
cagaaaauaucccuccugu

SEQ ID NO: 3614277 - RNA, 22 nt, Human
cagaaaauauguauuaacacua

SEQ ID NO: 3614278 - RNA, 16 nt, Human
cagaaaauggaagaca

SEQ ID NO: 3614279 - RNA, 22 nt, Human
cagaaaauggaagacagcucuu

SEQ ID NO: 3614280 - RNA, 14 nt, Human
cagaaaauguugag

SEQ ID NO: 3614281 - RNA, 23 nt, Human
cagaaaauguugagaaucccaaa

SEQ ID NO: 3614282 - RNA, 13 nt, Human
cagaaaauucugu

SEQ ID NO: 3614283 - RNA, 15 nt, Human
cagaaaauucugugc

SEQ ID NO: 3614284 - RNA, 17 nt, Human
cagaaaauucugugccu

SEQ ID NO: 3614285 - RNA, 19 nt, Human
cagaaaauuguacaaccug

SEQ ID NO: 3614286 - RNA, 20 nt, Human
cagaaacaaaaacacuaaaa

SEQ ID NO: 3614287 - RNA, 18 nt, Human
cagaaacacccacaggca

SEQ ID NO: 3614288 - RNA, 18 nt, Human
cagaaacacccucacacu

SEQ ID NO: 3614289 - RNA, 22 nt, Human
cagaaacacccucacacuggga

SEQ ID NO: 3614290 - RNA, 20 nt, Human
cagaauuucccaaagcagug

SEQ ID NO: 3614291 - RNA, 13 nt, Human
cagaauuugaauu

SEQ ID NO: 3614292 - RNA, 15 nt, Human
cagaauuugaauuau

SEQ ID NO: 3614293 - RNA, 22 nt, Human
cagaauuuggaaauccuaguuu

SEQ ID NO: 3614294 - RNA, 19 nt, Human
cagaauuuggguucugccu

SEQ ID NO: 3614295 - RNA, 23 nt, Human
cagaauuuuaggaacuucagaga

SEQ ID NO: 3614296 - RNA, 20 nt, Human
cagacaaaaacagccucaca

SEQ ID NO: 3614297 - RNA, 17 nt, Human
cagacaaaccagaagca

SEQ ID NO: 3614298 - RNA, 22 nt, Human
cagacaaaugugguuacacacu

SEQ ID NO: 3614299 - RNA, 16 nt, Human
cagacaacaaaccugu

SEQ ID NO: 3614300 - RNA, 19 nt, Human
cagacaagcaacagguuuu

SEQ ID NO: 3614301 - RNA, 19 nt, Human
cagacaagcuguugaccag

SEQ ID NO: 3614302 - RNA, 17 nt, Human
cagacaaggaaauaccc

SEQ ID NO: 3614303 - RNA, 23 nt, Human
cagacaauaaacccucagagccu

SEQ ID NO: 3614304 - RNA, 21 nt, Human
cagacacaaagagacaaagcu

SEQ ID NO: 3614305 - RNA, 11 nt, Human
cagacacacac

SEQ ID NO: 3614306 - RNA, 14 nt, Human
cagacacacacacg

SEQ ID NO: 3614307 - RNA, 21 nt, Human
cagacacacacacgcacgcac

SEQ ID NO: 3614308 - RNA, 22 nt, Human
cagacacacacacgcacgcaca

SEQ ID NO: 3614309 - RNA, 18 nt, Human
cagacacacgcacacaca

SEQ ID NO: 3614310 - RNA, 14 nt, Human
cagacacagaagag

SEQ ID NO: 3614311 - RNA, 13 nt, Human
cagacacaggccc

SEQ ID NO: 3614312 - RNA, 17 nt, Human
cagacacaggcccggcu

SEQ ID NO: 3614313 - RNA, 21 nt, Human
cagacacaggcccggcuccag

SEQ ID NO: 3614314 - RNA, 23 nt, Human
cagacacaggcccggcuccaggc

SEQ ID NO: 3614315 - RNA, 14 nt, Human
cagacacaggcccu

SEQ ID NO: 3614316 - RNA, 18 nt, Human
cagacacaggcccucccu

SEQ ID NO: 3614317 - RNA, 14 nt, Human
cagacacaugucca

SEQ ID NO: 3614318 - RNA, 17 nt, Human
cagacacccaggacuua

SEQ ID NO: 3614319 - RNA, 20 nt, Human
cagacaccuugacagggcac

SEQ ID NO: 3614320 - RNA, 19 nt, Human
cagacacgccuuccccuca

SEQ ID NO: 3614321 - RNA, 22 nt, Human
cagacacggaucugagaaucuu

SEQ ID NO: 3614322 - RNA, 14 nt, Human
cagacacucugcuc

SEQ ID NO: 3614323 - RNA, 19 nt, Human
cagacacucugcucugccc

SEQ ID NO: 3614324 - RNA, 20 nt, Human
cagacacucugcucugcccu

SEQ ID NO: 3614325 - RNA, 14 nt, Human
cagacacucuggcu

SEQ ID NO: 3614326 - RNA, 22 nt, Human
cagacagaacuugaauguguca

SEQ ID NO: 3614327 - RNA, 23 nt, Human
cagacagaacuugaaugugucag

SEQ ID NO: 3614328 - RNA, 13 nt, Human
cagacagaagucu

SEQ ID NO: 3614329 - RNA, 19 nt, Human
cagacagacaucucugcac

SEQ ID NO: 3614330 - RNA, 22 nt, Human
cagacagagaauaugucugcuc

SEQ ID NO: 3614331 - RNA, 18 nt, Human
cagacagagccaggagaa

SEQ ID NO: 3614332 - RNA, 20 nt, Human
cagacagagccaggagaagc

SEQ ID NO: 3614333 - RNA, 12 nt, Human
cagacagaggau

SEQ ID NO: 3614334 - RNA, 19 nt, Human
cagacagaggaugagcucu

SEQ ID NO: 3614335 - RNA, 17 nt, Human
cagacagaugaggcuuu

SEQ ID NO: 3614336 - RNA, 18 nt, Human
cagacagaugaggcuuuc

SEQ ID NO: 3614337 - RNA, 21 nt, Human
cagacagcaacggggaggcca

SEQ ID NO: 3614338 - RNA, 13 nt, Human
cagacagcagcuc

SEQ ID NO: 3614339 - RNA, 15 nt, Human
cagacagcagcucag

SEQ ID NO: 3614340 - RNA, 17 nt, Human
cagacagcaggcagcgc

SEQ ID NO: 3614341 - RNA, 14 nt, Human
cagacagccuguau

SEQ ID NO: 3614342 - RNA, 18 nt, Human
cagacaggaccccugcag

SEQ ID NO: 3614343 - RNA, 11 nt, Human
cagacaggcaa

SEQ ID NO: 3614344 - RNA, 18 nt, Human
cagacaggcaagcaccuc

SEQ ID NO: 3614345 - RNA, 21 nt, Human
cagacaggcaagcaccuccug

SEQ ID NO: 3614346 - RNA, 23 nt, Human
cagacaggcaagcaccuccugcc

SEQ ID NO: 3614347 - RNA, 15 nt, Human
cagacaggccccgug

SEQ ID NO: 3614348 - RNA, 22 nt, Human
cagacagggaauuaggccccca

SEQ ID NO: 3614349 - RNA, 18 nt, Human
cagacagggggccagaac

SEQ ID NO: 3614350 - RNA, 21 nt, Human
cagacagguuuucacauaaau

SEQ ID NO: 3614351 - RNA, 23 nt, Human
cagacagguuuucacauaaaugc

SEQ ID NO: 3614352 - RNA, 18 nt, Human
cagacaguggaugagaca

SEQ ID NO: 3614353 - RNA, 19 nt, Human
cagacaguguuuucuggga

SEQ ID NO: 3614354 - RNA, 13 nt, Human
cagacauaaagcc

SEQ ID NO: 3614355 - RNA, 14 nt, Human
cagacauaaagcca

SEQ ID NO: 3614356 - RNA, 15 nt, Human
cagacauaaagccau

SEQ ID NO: 3614357 - RNA, 14 nt, Human
cagacauaaaggaa

SEQ ID NO: 3614358 - RNA, 20 nt, Human
cagacauaaaggaaaagaca

SEQ ID NO: 3614359 - RNA, 18 nt, Human
cagacauacgaaacacaa

SEQ ID NO: 3614360 - RNA, 17 nt, Human
cagacauagaauuaaca

SEQ ID NO: 3614361 - RNA, 15 nt, Human
cagacaucucugcac

SEQ ID NO: 3614362 - RNA, 14 nt, Human
cagacauugucagc

SEQ ID NO: 3614363 - RNA, 17 nt, Human
cagacauugucagcaaa

SEQ ID NO: 3614364 - RNA, 13 nt, Human
cagacauuguuuu

SEQ ID NO: 3614365 - RNA, 14 nt, Human
cagaccacaaaacu

SEQ ID NO: 3614366 - RNA, 19 nt, Human
cagaccagcaggcuggccu

SEQ ID NO: 3614367 - RNA, 12 nt, Human
cagacccagugg

SEQ ID NO: 3614368 - RNA, 16 nt, Human
cagaccccagcggcug

SEQ ID NO: 3614369 - RNA, 13 nt, Human
cagaccccaggcu

SEQ ID NO: 3614370 - RNA, 13 nt, Human
cagacccccaccc

SEQ ID NO: 3614371 - RNA, 21 nt, Human
ccauucucacaggucccaaau

SEQ ID NO: 3614372 - RNA, 16 nt, Human
ccauucucaucugcac

SEQ ID NO: 3614373 - RNA, 22 nt, Human
ccauucucaucugcacccuucu

SEQ ID NO: 3614374 - RNA, 16 nt, Human
ccauucuccacagcaa

SEQ ID NO: 3614375 - RNA, 18 nt, Human
ccauucuccacagcaacc

SEQ ID NO: 3614376 - RNA, 17 nt, Human
ccauucuccaccugcca

SEQ ID NO: 3614377 - RNA, 17 nt, Human
ccauucuccauuuguua

SEQ ID NO: 3614378 - RNA, 14 nt, Human
ccauucucccaggu

SEQ ID NO: 3614379 - RNA, 13 nt, Human
ccauucuccugag

SEQ ID NO: 3614380 - RNA, 16 nt, Human
ccauucucucuccugu

SEQ ID NO: 3614381 - RNA, 19 nt, Human
ccauucucucuccugucca

SEQ ID NO: 3614382 - RNA, 16 nt, Human
ccauucugaccauuuc

SEQ ID NO: 3614383 - RNA, 12 nt, Human
ccauucugacuc

SEQ ID NO: 3614384 - RNA, 21 nt, Human
ccauucugccugcccaggccc

SEQ ID NO: 3614385 - RNA, 13 nt, Human
ccauucugcuccu

SEQ ID NO: 3614386 - RNA, 23 nt, Human
ccauucuuacuuacuaaaauaua

SEQ ID NO: 3614387 - RNA, 14 nt, Human
ccauucuuccuagu

SEQ ID NO: 3614388 - RNA, 19 nt, Human
ccauucuuccuaguuuucu

SEQ ID NO: 3614389 - RNA, 12 nt, Human
ccauucuuucug

SEQ ID NO: 3614390 - RNA, 17 nt, Human
ccauucuuucugauaac

SEQ ID NO: 3614391 - RNA, 15 nt, Human
ccauucuuugcuuga

SEQ ID NO: 3614392 - RNA, 16 nt, Human
ccauucuuuuguaauu

SEQ ID NO: 3614393 - RNA, 22 nt, Human
ccauucuuuuguaauuuaaaug

SEQ ID NO: 3614394 - RNA, 14 nt, Human
ccauugaaaaugua

SEQ ID NO: 3614395 - RNA, 15 nt, Human
ccauugaacucugag

SEQ ID NO: 3614396 - RNA, 20 nt, Human
ccauugaagccgacucuggc

SEQ ID NO: 3614397 - RNA, 11 nt, Human
ccauugaaggc

SEQ ID NO: 3614398 - RNA, 22 nt, Human
ccauugaauucuugguugagga

SEQ ID NO: 3614399 - RNA, 16 nt, Human
ccauugcacccagccc

SEQ ID NO: 3614400 - RNA, 19 nt, Human
ccauugcacuccagccugg

SEQ ID NO: 3614401 - RNA, 21 nt, Human
ccauugccaccaggagaacca

SEQ ID NO: 3614402 - RNA, 15 nt, Human
ccauugcugcuccuu

SEQ ID NO: 3614403 - RNA, 20 nt, Human
ccauugcuguucuacuuuuu

SEQ ID NO: 3614404 - RNA, 18 nt, Human
ccauugcuuauuauguag

SEQ ID NO: 3614405 - RNA, 10 nt, Human
ccauugcuuc

SEQ ID NO: 3614406 - RNA, 14 nt, Human
ccauugcuucacua

SEQ ID NO: 3614407 - RNA, 19 nt, Human
ccauuggggcucccagcca

SEQ ID NO: 3614408 - RNA, 20 nt, Human
ccauuggggcucccagccag

SEQ ID NO: 3614409 - RNA, 23 nt, Human
ccauuguaacuuggauguagcca

SEQ ID NO: 3614410 - RNA, 20 nt, Human
ccauuguagcgucuuucuuu

SEQ ID NO: 3614411 - RNA, 19 nt, Human
ccauugucccucugcccca

SEQ ID NO: 3614412 - RNA, 10 nt, Human
ccauugucuu

SEQ ID NO: 3614413 - RNA, 17 nt, Human
ccauugugcauucuaga

SEQ ID NO: 3614414 - RNA, 20 nt, Human
ccauuguggccuaagaggcu

SEQ ID NO: 3614415 - RNA, 15 nt, Human
ccauuguuuaaaaau

SEQ ID NO: 3614416 - RNA, 14 nt, Human
ccauuuaaaaaguu

SEQ ID NO: 3614417 - RNA, 20 nt, Human
ccauuuaaacagauguccau

SEQ ID NO: 3614418 - RNA, 13 nt, Human
ccauuuacacuuu

SEQ ID NO: 3614419 - RNA, 22 nt, Human
ccauuuacauguuuuaaagaaa

SEQ ID NO: 3614420 - RNA, 16 nt, Human
ccauuuagguuucuga

SEQ ID NO: 3614421 - RNA, 23 nt, Human
ccauuuauaugugaucuuuguuu

SEQ ID NO: 3614422 - RNA, 16 nt, Human
ccauuuauccaccucc

SEQ ID NO: 3614423 - RNA, 15 nt, Human
ccauuuaucuugaag

SEQ ID NO: 3614424 - RNA, 17 nt, Human
ccauuucaauucucaaa

SEQ ID NO: 3614425 - RNA, 17 nt, Human
ccauuucacaccugaaa

SEQ ID NO: 3614426 - RNA, 21 nt, Human
ccauuucaguaaaccugucug

SEQ ID NO: 3614427 - RNA, 16 nt, Human
ccauuucaucuauuuc

SEQ ID NO: 3614428 - RNA, 15 nt, Human
ccauuuccauugcuu

SEQ ID NO: 3614429 - RNA, 14 nt, Human
ccauuucccaucug

SEQ ID NO: 3614430 - RNA, 15 nt, Human
ccauuucccaucugc

SEQ ID NO: 3614431 - RNA, 16 nt, Human
ccauuucccaucugca

SEQ ID NO: 3614432 - RNA, 18 nt, Human
ccauuucccaucugcacc

SEQ ID NO: 3614433 - RNA, 15 nt, Human
ccauuuccccagggc

SEQ ID NO: 3614434 - RNA, 16 nt, Human
ccauuuccccagggca

SEQ ID NO: 3614435 - RNA, 21 nt, Human
ccagccuuucucccaggccag

SEQ ID NO: 3614436 - RNA, 16 nt, Human
ccagccuuuguucccc

SEQ ID NO: 3614437 - RNA, 21 nt, Human
ccagccuuuguuccccacugg

SEQ ID NO: 3614438 - RNA, 13 nt, Human
ccagcgagcccug

SEQ ID NO: 3614439 - RNA, 21 nt, Human
ccagcgaucucuccacugugc

SEQ ID NO: 3614440 - RNA, 14 nt, Human
ccagcgcccgcugg

SEQ ID NO: 3614441 - RNA, 22 nt, Human
ccagcgccuaguggggucuccc

SEQ ID NO: 3614442 - RNA, 13 nt, Human
ccagcgccucccu

SEQ ID NO: 3614443 - RNA, 15 nt, Human
ccagcgccucccucc

SEQ ID NO: 3614444 - RNA, 16 nt, Human
ccagcgccucccucca

SEQ ID NO: 3614445 - RNA, 17 nt, Human
ccagcgccucccuccac

SEQ ID NO: 3614446 - RNA, 22 nt, Human
ccagcgccucccuccaccccag

SEQ ID NO: 3614447 - RNA, 14 nt, Human
ccagcgcucugccu

SEQ ID NO: 3614448 - RNA, 15 nt, Human
ccagcgcugacgugu

SEQ ID NO: 3614449 - RNA, 16 nt, Human
ccagcggacaguggca

SEQ ID NO: 3614450 - RNA, 22 nt, Human
ccagcggcuggugcagggccuc

SEQ ID NO: 3614451 - RNA, 22 nt, Human
ccagcgggaauggcagcugcca

SEQ ID NO: 3614452 - RNA, 15 nt, Human
ccagcggugggaccu

SEQ ID NO: 3614453 - RNA, 17 nt, Human
ccagcguccuccucugu

SEQ ID NO: 3614454 - RNA, 17 nt, Human
ccagcgucggucugugc

SEQ ID NO: 3614455 - RNA, 19 nt, Human
ccagcgucggucugugccc

SEQ ID NO: 3614456 - RNA, 17 nt, Human
ccagcguuugaggggcu

SEQ ID NO: 3614457 - RNA, 22 nt, Human
ccagcguuugaggggcuggccu

SEQ ID NO: 3614458 - RNA, 15 nt, Human
ccagcuaagaaccug

SEQ ID NO: 3614459 - RNA, 18 nt, Human
ccagcuaauaacugaucu

SEQ ID NO: 3614460 - RNA, 20 nt, Human
ccagcuaaucuguagggcug

SEQ ID NO: 3614461 - RNA, 21 nt, Human
ccagcuaaucuguagggcugg

SEQ ID NO: 3614462 - RNA, 17 nt, Human
ccagcuacaccuuucuc

SEQ ID NO: 3614463 - RNA, 19 nt, Human
ccagcuacaccuuucuccu

SEQ ID NO: 3614464 - RNA, 20 nt, Human
ccagcuacucagaagccuga

SEQ ID NO: 3614465 - RNA, 23 nt, Human
ccagcuacucagaagccugaggc

SEQ ID NO: 3614466 - RNA, 13 nt, Human
ccagcuacucagg

SEQ ID NO: 3614467 - RNA, 15 nt, Human
ccagcuacucaggag

SEQ ID NO: 3614468 - RNA, 21 nt, Human
ccagcuacucgggaggcugag

SEQ ID NO: 3614469 - RNA, 23 nt, Human
ccagcuacucgggaggcugaggc

SEQ ID NO: 3614470 - RNA, 15 nt, Human
ccagcuacuuccucc

SEQ ID NO: 3614471 - RNA, 14 nt, Human
ccagcuacuuggga

SEQ ID NO: 3614472 - RNA, 15 nt, Human
ccagcuauaccugug

SEQ ID NO: 3614473 - RNA, 15 nt, Human
ccagcuauacuguau

SEQ ID NO: 3614474 - RNA, 17 nt, Human
ccagcucaauggacugg

SEQ ID NO: 3614475 - RNA, 22 nt, Human
ccagcucaauggacuggaaggg

SEQ ID NO: 3614476 - RNA, 16 nt, Human
ccagcucaccagcccc

SEQ ID NO: 3614477 - RNA, 22 nt, Human
ccagcucaccagccccagugcc

SEQ ID NO: 3614478 - RNA, 14 nt, Human
ccagcucacgucac

SEQ ID NO: 3614479 - RNA, 14 nt, Human
ccagcucagaaccc

SEQ ID NO: 3614480 - RNA, 15 nt, Human
ccagcucagaaccca

SEQ ID NO: 3614481 - RNA, 16 nt, Human
ccagcucagaacccag

SEQ ID NO: 3614482 - RNA, 17 nt, Human
ccagcucagaacccagg

SEQ ID NO: 3614483 - RNA, 19 nt, Human
ccagcucagaacccagggc

SEQ ID NO: 3614484 - RNA, 13 nt, Human
ccagcucagaggg

SEQ ID NO: 3614485 - RNA, 15 nt, Human
ccagcucagcacugc

SEQ ID NO: 3614486 - RNA, 13 nt, Human
ccagcucaggaca

SEQ ID NO: 3614487 - RNA, 20 nt, Human
ccagcucaggacagaugcca

SEQ ID NO: 3614488 - RNA, 14 nt, Human
ccagcucaggggca

SEQ ID NO: 3614489 - RNA, 18 nt, Human
ccagcucaggggcagcuc

SEQ ID NO: 3614490 - RNA, 19 nt, Human
ccagcucaggggcagcuca

SEQ ID NO: 3614491 - RNA, 22 nt, Human
ccagcucagucccaucagagag

SEQ ID NO: 3614492 - RNA, 17 nt, Human
ccagcucagucuucccu

SEQ ID NO: 3614493 - RNA, 14 nt, Human
ccagcuccaaccug

SEQ ID NO: 3614494 - RNA, 21 nt, Human
ccagcuccaagaccuguuggu

SEQ ID NO: 3614495 - RNA, 12 nt, Human
ccagcuccaccc

SEQ ID NO: 3614496 - RNA, 15 nt, Human
ccagcuccaccccgc

SEQ ID NO: 3614497 - RNA, 18 nt, Human
ccagcuccagggccagau

SEQ ID NO: 3614498 - RNA, 19 nt, Human
ccagcucccaccuccccuu

SEQ ID NO: 3614499 - RNA, 20 nt, Human
ccagcucccaggaccacagg

SEQ ID NO: 3614500 - RNA, 21 nt, Human
ccagcucccaggaccacaggc

SEQ ID NO: 3614501 - RNA, 23 nt, Human
ccagcuccccaagaaagccucag

SEQ ID NO: 3614502 - RNA, 18 nt, Human
ccagcucccugugccccc

SEQ ID NO: 3614503 - RNA, 19 nt, Human
ccagcuccggccuguccuc

SEQ ID NO: 3614504 - RNA, 12 nt, Human
ccagcuccucau

SEQ ID NO: 3614505 - RNA, 20 nt, Human
ccagcuccucccuuguucuc

SEQ ID NO: 3614506 - RNA, 20 nt, Human
ccagcuccugacacugcugg

SEQ ID NO: 3614507 - RNA, 14 nt, Human
ccagcuccuuuggg

SEQ ID NO: 3614508 - RNA, 20 nt, Human
ccagcucuacccugcauggc

SEQ ID NO: 3614509 - RNA, 18 nt, Human
ccagcucuagacaacccu

SEQ ID NO: 3614510 - RNA, 19 nt, Human
ccagcucuagacaacccug

SEQ ID NO: 3614511 - RNA, 21 nt, Human
ccagcucuagacaacccugca

SEQ ID NO: 3614512 - RNA, 13 nt, Human
ccagcucucagcc

SEQ ID NO: 3614513 - RNA, 15 nt, Human
ccagcucucagccaa

SEQ ID NO: 3614514 - RNA, 16 nt, Human
ccagcucucccucugg

SEQ ID NO: 3614515 - RNA, 15 nt, Human
ccagcucugaaacca

SEQ ID NO: 3614516 - RNA, 21 nt, Human
ccagcucugaaaccaguguua

SEQ ID NO: 3614517 - RNA, 21 nt, Human
ccagcucugaggacugcacca

SEQ ID NO: 3614518 - RNA, 22 nt, Human
ccagcucugccgucucuggagc

SEQ ID NO: 3614519 - RNA, 22 nt, Human
ccagcucugcgucgguccuggu

SEQ ID NO: 3614520 - RNA, 12 nt, Human
ccagcucuggcu

SEQ ID NO: 3614521 - RNA, 14 nt, Human
ccagcucuggcuuc

SEQ ID NO: 3614522 - RNA, 17 nt, Human
ccagcucugguccauag

SEQ ID NO: 3614523 - RNA, 23 nt, Human
ccagcucuguucuuccucagcca

SEQ ID NO: 3614524 - RNA, 20 nt, Human
ccagcucuuccuagcuggag

SEQ ID NO: 3614525 - RNA, 19 nt, Human
ccagcucuucuccccaggu

SEQ ID NO: 3614526 - RNA, 22 nt, Human
ccagcugacaguccucuccacc

SEQ ID NO: 3614527 - RNA, 22 nt, Human
ccagcugacccugguucucucu

SEQ ID NO: 3614528 - RNA, 15 nt, Human
ccagcugagcgccag

SEQ ID NO: 3614529 - RNA, 15 nt, Human
ccagcugaugacuca

SEQ ID NO: 3614530 - RNA, 12 nt, Human
cccaaccagugc

SEQ ID NO: 3614531 - RNA, 18 nt, Human
cccaaccccaagccagcc

SEQ ID NO: 3614532 - RNA, 12 nt, Human
cccaaccccagc

SEQ ID NO: 3614533 - RNA, 22 nt, Human
cccaaccccagccgcucggagg

SEQ ID NO: 3614534 - RNA, 12 nt, Human
cccaacccccac

SEQ ID NO: 3614535 - RNA, 13 nt, Human
cccaacccccacc

SEQ ID NO: 3614536 - RNA, 14 nt, Human
cccaacccccagca

SEQ ID NO: 3614537 - RNA, 15 nt, Human
cccaaccccugagga

SEQ ID NO: 3614538 - RNA, 20 nt, Human
cccaacccguggaggcugcu

SEQ ID NO: 3614539 - RNA, 13 nt, Human
cccaacccugccc

SEQ ID NO: 3614540 - RNA, 16 nt, Human
cccaacccugccccug

SEQ ID NO: 3614541 - RNA, 15 nt, Human
cccaacccuggcacc

SEQ ID NO: 3614542 - RNA, 20 nt, Human
cccaacccuggcuugggguc

SEQ ID NO: 3614543 - RNA, 20 nt, Human
cccaacccuucuucauguuc

SEQ ID NO: 3614544 - RNA, 12 nt, Human
cccaaccucagc

SEQ ID NO: 3614545 - RNA, 13 nt, Human
cccaaccucaggg

SEQ ID NO: 3614546 - RNA, 15 nt, Human
cccaaccucagggcu

SEQ ID NO: 3614547 - RNA, 22 nt, Human
cccaaccucagggcucccaggg

SEQ ID NO: 3614548 - RNA, 18 nt, Human
cccaaccucuuccuccug

SEQ ID NO: 3614549 - RNA, 19 nt, Human
cccaaccucuuccuccuga

SEQ ID NO: 3614550 - RNA, 15 nt, Human
cccaacgaaaagcac

SEQ ID NO: 3614551 - RNA, 16 nt, Human
cccaacgaaaagcaca

SEQ ID NO: 3614552 - RNA, 19 nt, Human
cccaacgaaaagcacaucc

SEQ ID NO: 3614553 - RNA, 20 nt, Human
cccaacggcccugcagccag

SEQ ID NO: 3614554 - RNA, 20 nt, Human
cccaacuccaccagauagca

SEQ ID NO: 3614555 - RNA, 23 nt, Human
cccaacuccuggaagcugugucc

SEQ ID NO: 3614556 - RNA, 16 nt, Human
cccaacucgggcuccc

SEQ ID NO: 3614557 - RNA, 15 nt, Human
cccaacucuagcugg

SEQ ID NO: 3614558 - RNA, 21 nt, Human
cccaacucuagcugggggugg

SEQ ID NO: 3614559 - RNA, 20 nt, Human
cccaacucuccccugaccug

SEQ ID NO: 3614560 - RNA, 12 nt, Human
cccaacucuccu

SEQ ID NO: 3614561 - RNA, 18 nt, Human
cccaacucugagcccaug

SEQ ID NO: 3614562 - RNA, 19 nt, Human
cccaacucugagcccaugu

SEQ ID NO: 3614563 - RNA, 12 nt, Human
cccaacuguuau

SEQ ID NO: 3614564 - RNA, 14 nt, Human
cccaagaacagcag

SEQ ID NO: 3614565 - RNA, 14 nt, Human
cccaagaaggcugg

SEQ ID NO: 3614566 - RNA, 15 nt, Human
cccaagaaggcuggg

SEQ ID NO: 3614567 - RNA, 15 nt, Human
cccaagaaugggagg

SEQ ID NO: 3614568 - RNA, 20 nt, Human
cccaagacuucauugucccu

SEQ ID NO: 3614569 - RNA, 20 nt, Human
cccaagauucacaccugacu

SEQ ID NO: 3614570 - RNA, 19 nt, Human
cccaagcaaaaucauggaa

SEQ ID NO: 3614571 - RNA, 14 nt, Human
cccaagcagagaag

SEQ ID NO: 3614572 - RNA, 14 nt, Human
cccaagcaggaggc

SEQ ID NO: 3614573 - RNA, 14 nt, Human
cccaagccagaggc

SEQ ID NO: 3614574 - RNA, 15 nt, Human
cccaagccagaggcu

SEQ ID NO: 3614575 - RNA, 16 nt, Human
cccaagccagaggcug

SEQ ID NO: 3614576 - RNA, 17 nt, Human
cccaagcgcccuggccc

SEQ ID NO: 3614577 - RNA, 15 nt, Human
cccaagcucugcucc

SEQ ID NO: 3614578 - RNA, 17 nt, Human
cccaagcucuuguggua

SEQ ID NO: 3614579 - RNA, 19 nt, Human
cccaagcuggagugcagug

SEQ ID NO: 3614580 - RNA, 14 nt, Human
ccaugggcagagga

SEQ ID NO: 3614581 - RNA, 14 nt, Human
ccaugggcaggaga

SEQ ID NO: 3614582 - RNA, 14 nt, Human
ccaugggccuccug

SEQ ID NO: 3614583 - RNA, 13 nt, Human
ccaugggcuucac

SEQ ID NO: 3614584 - RNA, 19 nt, Human
ccaugggcuucacuguaua

SEQ ID NO: 3614585 - RNA, 20 nt, Human
ccaugggcuucacuguauaa

SEQ ID NO: 3614586 - RNA, 21 nt, Human
ccaugggcuucacuguauaaa

SEQ ID NO: 3614587 - RNA, 15 nt, Human
ccaugguacccccuu

SEQ ID NO: 3614588 - RNA, 16 nt, Human
ccaugguacccccuuc

SEQ ID NO: 3614589 - RNA, 19 nt, Human
ccaugguacccccuucugg

SEQ ID NO: 3614590 - RNA, 14 nt, Human
ccauggucacagag

SEQ ID NO: 3614591 - RNA, 22 nt, Human
ccauggugaauuaaucacuuuu

SEQ ID NO: 3614592 - RNA, 16 nt, Human
ccauguaaaacaaaaa

SEQ ID NO: 3614593 - RNA, 17 nt, Human
ccauguaaaacaaaaaa

SEQ ID NO: 3614594 - RNA, 17 nt, Human
ccauguaacugccuaga

SEQ ID NO: 3614595 - RNA, 20 nt, Human
ccauguaacugccuagaaac

SEQ ID NO: 3614596 - RNA, 17 nt, Human
ccauguacuaguuuuag

SEQ ID NO: 3614597 - RNA, 13 nt, Human
ccauguacuguag

SEQ ID NO: 3614598 - RNA, 14 nt, Human
ccauguacuguagu

SEQ ID NO: 3614599 - RNA, 22 nt, Human
ccauguacuguaguuuuucuuc

SEQ ID NO: 3614600 - RNA, 23 nt, Human
ccauguagcccccuggccucugu

SEQ ID NO: 3614601 - RNA, 14 nt, Human
ccauguauggccag

SEQ ID NO: 3614602 - RNA, 22 nt, Human
ccauguauuuaucucuauuuaa

SEQ ID NO: 3614603 - RNA, 23 nt, Human
ccaugucaccggauccugggugg

SEQ ID NO: 3614604 - RNA, 13 nt, Human
ccaugucacugug

SEQ ID NO: 3614605 - RNA, 21 nt, Human
ccaugucagacacagauuggc

SEQ ID NO: 3614606 - RNA, 17 nt, Human
ccaugucagcaaaaagc

SEQ ID NO: 3614607 - RNA, 13 nt, Human
ccauguccaaaga

SEQ ID NO: 3614608 - RNA, 18 nt, Human
ccauguccaaagaggcug

SEQ ID NO: 3614609 - RNA, 15 nt, Human
ccauguccuuagcac

SEQ ID NO: 3614610 - RNA, 15 nt, Human
ccaugucgccucugc

SEQ ID NO: 3614611 - RNA, 15 nt, Human
ccaugucggccucua

SEQ ID NO: 3614612 - RNA, 10 nt, Human
ccaugucgua

SEQ ID NO: 3614613 - RNA, 14 nt, Human
ccaugucucgacuc

SEQ ID NO: 3614614 - RNA, 20 nt, Human
ccaugucugcagugugcccc

SEQ ID NO: 3614615 - RNA, 13 nt, Human
ccaugucuucucc

SEQ ID NO: 3614616 - RNA, 13 nt, Human
ccaugucuuucuc

SEQ ID NO: 3614617 - RNA, 21 nt, Human
ccaugugaggguuuucagcau

SEQ ID NO: 3614618 - RNA, 22 nt, Human
ccaugugauggacacuccaggg

SEQ ID NO: 3614619 - RNA, 21 nt, Human
ccaugugccugauccagccuc

SEQ ID NO: 3614620 - RNA, 15 nt, Human
ccaugugccugcacc

SEQ ID NO: 3614621 - RNA, 13 nt, Human
cccauauuucauc

SEQ ID NO: 3614622 - RNA, 20 nt, Human
cccauauuuguacaccaaua

SEQ ID NO: 3614623 - RNA, 21 nt, Human
cccaucaaaacuccugucuuu

SEQ ID NO: 3614624 - RNA, 21 nt, Human
cccaucacaggguugggccca

SEQ ID NO: 3614625 - RNA, 12 nt, Human
cccaucagccca

SEQ ID NO: 3614626 - RNA, 18 nt, Human
cccaucagcccaaucccu

SEQ ID NO: 3614627 - RNA, 18 nt, Human
cccaucagcuccagcugc

SEQ ID NO: 3614628 - RNA, 23 nt, Human
cccaucaguguacccccgcccag

SEQ ID NO: 3614629 - RNA, 17 nt, Human
cccaucauacacuuccu

SEQ ID NO: 3614630 - RNA, 12 nt, Human
cccaucauccca

SEQ ID NO: 3614631 - RNA, 14 nt, Human
cccaucauccucug

SEQ ID NO: 3614632 - RNA, 19 nt, Human
cccaucauccucuggcuug

SEQ ID NO: 3614633 - RNA, 19 nt, Human
cccaucauguggccccacc

SEQ ID NO: 3614634 - RNA, 21 nt, Human
cccauccaccguccccuccca

SEQ ID NO: 3614635 - RNA, 20 nt, Human
cccauccagucucccaacuu

SEQ ID NO: 3614636 - RNA, 14 nt, Human
cccauccauuaggc

SEQ ID NO: 3614637 - RNA, 13 nt, Human
cccaucccauccc

SEQ ID NO: 3614638 - RNA, 14 nt, Human
cccaucccauccca

SEQ ID NO: 3614639 - RNA, 18 nt, Human
cccaucccaucccauccc

SEQ ID NO: 3614640 - RNA, 14 nt, Human
cccauccccagcga

SEQ ID NO: 3614641 - RNA, 15 nt, Human
cccauccccccucac

SEQ ID NO: 3614642 - RNA, 22 nt, Human
cccauccccccucaccaggggc

SEQ ID NO: 3614643 - RNA, 12 nt, Human
cccaucccccug

SEQ ID NO: 3614644 - RNA, 14 nt, Human
cccaucccccugcc

SEQ ID NO: 3614645 - RNA, 16 nt, Human
cccaucccccugcccu

SEQ ID NO: 3614646 - RNA, 16 nt, Human
cccauccccuguggga

SEQ ID NO: 3614647 - RNA, 15 nt, Human
cccaucccuccccag

SEQ ID NO: 3614648 - RNA, 16 nt, Human
cccaucccugucuuua

SEQ ID NO: 3614649 - RNA, 19 nt, Human
cccauccuaccaaugcaug

SEQ ID NO: 3614650 - RNA, 13 nt, Human
cccauccuacccu

SEQ ID NO: 3614651 - RNA, 18 nt, Human
cccauccuacccucgggc

SEQ ID NO: 3614652 - RNA, 22 nt, Human
cccauccuaucagccugucucu

SEQ ID NO: 3614653 - RNA, 13 nt, Human
cccauccucugua

SEQ ID NO: 3614654 - RNA, 20 nt, Human
cccauccucuguacagagcc

SEQ ID NO: 3614655 - RNA, 21 nt, Human
cccauccucuguacagagccc

SEQ ID NO: 3614656 - RNA, 19 nt, Human
cccauccucuucuuuuagc

SEQ ID NO: 3614657 - RNA, 20 nt, Human
cccauccucuucuuuuagca

SEQ ID NO: 3614658 - RNA, 15 nt, Human
cccauccugaccagc

SEQ ID NO: 3614659 - RNA, 14 nt, Human
cccauccuggccca

SEQ ID NO: 3614660 - RNA, 16 nt, Human
cccauccuggcccauc

SEQ ID NO: 3614661 - RNA, 22 nt, Human
cccauccuguguguuaagcucu

SEQ ID NO: 3614662 - RNA, 22 nt, Human
cccaucgccagcugaugacuca

SEQ ID NO: 3614663 - RNA, 20 nt, Human
cccaucguugcccccauuuc

SEQ ID NO: 3614664 - RNA, 18 nt, Human
cccaucucacacaugagc

SEQ ID NO: 3614665 - RNA, 14 nt, Human
cccaucucaugccc

SEQ ID NO: 3614666 - RNA, 15 nt, Human
cccaucucccacccu

SEQ ID NO: 3614667 - RNA, 13 nt, Human
cccaucucccugc

SEQ ID NO: 3614668 - RNA, 18 nt, Human
cccaucucccugccuggc

SEQ ID NO: 3614669 - RNA, 20 nt, Human
cccaucucccugccuggccc

SEQ ID NO: 3614670 - RNA, 22 nt, Human
cccaucucgcucccucccagga

SEQ ID NO: 3614671 - RNA, 18 nt, Human
cccaucucucccuccccu

SEQ ID NO: 3614672 - RNA, 23 nt, Human
cccaucucucccuccccugccau

SEQ ID NO: 3614673 - RNA, 21 nt, Human
cccaucugcaccccccugggc

SEQ ID NO: 3614674 - RNA, 17 nt, Human
cccaucugcagggcccc

SEQ ID NO: 3614675 - RNA, 16 nt, Human
cccaucugggaguccc

SEQ ID NO: 3614676 - RNA, 22 nt, Human
cccaucuggguccuugcacccc

SEQ ID NO: 3614677 - RNA, 12 nt, Human
cccaucugugaa

SEQ ID NO: 3614678 - RNA, 16 nt, Human
cccaucugugcauucu

SEQ ID NO: 3614679 - RNA, 15 nt, Human
cccaucuugccucca

SEQ ID NO: 3614680 - RNA, 12 nt, Human
cccaucuugcuu

SEQ ID NO: 3614681 - RNA, 22 nt, Human
cccaugaacuuaaaaugaaagu

SEQ ID NO: 3614682 - RNA, 18 nt, Human
cccaugaagacaggacag

SEQ ID NO: 3614683 - RNA, 22 nt, Human
cccaugaagacaggacagugcu

SEQ ID NO: 3614684 - RNA, 13 nt, Human
cccaugaagccuu

SEQ ID NO: 3614685 - RNA, 18 nt, Human
cccaugacaauguuguag

SEQ ID NO: 3614686 - RNA, 19 nt, Human
cccaugaccauacugaggg

SEQ ID NO: 3614687 - RNA, 13 nt, Human
cccaugacccacc

SEQ ID NO: 3614688 - RNA, 15 nt, Human
cccaugacccacccc

SEQ ID NO: 3614689 - RNA, 17 nt, Human
cccaugacccaccccug

SEQ ID NO: 3614690 - RNA, 18 nt, Human
cccaugacccaggcuggg

SEQ ID NO: 3614691 - RNA, 18 nt, Human
cccaugaccccaaagcca

SEQ ID NO: 3614692 - RNA, 16 nt, Human
cccaugaccuccagcu

SEQ ID NO: 3614693 - RNA, 22 nt, Human
cccaugacuuuauauggaugau

SEQ ID NO: 3614694 - RNA, 20 nt, Human
cccaugagagcgcagcccgc

SEQ ID NO: 3614695 - RNA, 16 nt, Human
cccaugagccucagca

SEQ ID NO: 3614696 - RNA, 20 nt, Human
cccaugagccucagcauccu

SEQ ID NO: 3614697 - RNA, 14 nt, Human
cccaugagcuccuu

SEQ ID NO: 3614698 - RNA, 15 nt, Human
cccaugagcuccuua

SEQ ID NO: 3614699 - RNA, 22 nt, Human
cccaugagcuccuuaaggcucu

SEQ ID NO: 3614700 - RNA, 15 nt, Human
cccaugaucccugug

SEQ ID NO: 3614701 - RNA, 21 nt, Human
cccaugcaagcagaggaccag

SEQ ID NO: 3614702 - RNA, 14 nt, Human
cccaugcacuguga

SEQ ID NO: 3614703 - RNA, 18 nt, Human
cccaugcacugugaagga

SEQ ID NO: 3614704 - RNA, 22 nt, Human
cccaugcacugugaaggacccu

SEQ ID NO: 3614705 - RNA, 17 nt, Human
cccaugcaggugguguc

SEQ ID NO: 3614706 - RNA, 13 nt, Human
cccaugccugucc

SEQ ID NO: 3614707 - RNA, 19 nt, Human
cccaugcugaccuguguuu

SEQ ID NO: 3614708 - RNA, 13 nt, Human
cccaugcugcccu

SEQ ID NO: 3614709 - RNA, 14 nt, Human
cccaugcugcccug

SEQ ID NO: 3614710 - RNA, 17 nt, Human
cccaugcugcccuguga

SEQ ID NO: 3614711 - RNA, 17 nt, Human
cccaugcuggagccugu

SEQ ID NO: 3614712 - RNA, 21 nt, Human
cccaugcuggagccuguguaa

SEQ ID NO: 3614713 - RNA, 14 nt, Human
cccaugcuguugau

SEQ ID NO: 3614714 - RNA, 19 nt, Human
cccaugcuguugauugcua

SEQ ID NO: 3614715 - RNA, 21 nt, Human
cccaugcuguugauugcuaaa

SEQ ID NO: 3614716 - RNA, 22 nt, Human
cccaugcuguugauugcuaaau

SEQ ID NO: 3614717 - RNA, 15 nt, Human
cccauggacacucca

SEQ ID NO: 3614718 - RNA, 16 nt, Human
cccauggacacuccag

SEQ ID NO: 3614719 - RNA, 20 nt, Human
cccauggagauugaccugga

SEQ ID NO: 3614720 - RNA, 21 nt, Human
cccauggagauugaccuggau

SEQ ID NO: 3614721 - RNA, 17 nt, Human
cccauggcccucccagu

SEQ ID NO: 3614722 - RNA, 21 nt, Human
cccauggcccugugcuaaucc

SEQ ID NO: 3614723 - RNA, 24 nt, Human
cccaugggacaaauugcacagaag

SEQ ID NO: 3614724 - RNA, 18 nt, Human
cccaugggcacugcuggg

SEQ ID NO: 3614725 - RNA, 14 nt, Human
cccacuccugcucu

SEQ ID NO: 3614726 - RNA, 17 nt, Human
cccacucucagaggccc

SEQ ID NO: 3614727 - RNA, 14 nt, Human
cccacucugcucug

SEQ ID NO: 3614728 - RNA, 19 nt, Human
cccacucugcucugaugca

SEQ ID NO: 3614729 - RNA, 15 nt, Human
cccacugagaggaca

SEQ ID NO: 3614730 - RNA, 22 nt, Human
cccacugaugcuguucucuucu

SEQ ID NO: 3614731 - RNA, 15 nt, Human
cccacugcacccccu

SEQ ID NO: 3614732 - RNA, 17 nt, Human
cccacugcacccccucc

SEQ ID NO: 3614733 - RNA, 20 nt, Human
cccacugcacccccuccugc

SEQ ID NO: 3614734 - RNA, 21 nt, Human
cccacugcacccccuccugcu

SEQ ID NO: 3614735 - RNA, 22 nt, Human
cccacugcacccccuccugcug

SEQ ID NO: 3614736 - RNA, 16 nt, Human
cccacugccagcagca

SEQ ID NO: 3614737 - RNA, 16 nt, Human
cccacugcccaccccc

SEQ ID NO: 3614738 - RNA, 18 nt, Human
cccacugccuacugcauc

SEQ ID NO: 3614739 - RNA, 15 nt, Human
cccacugccucaggu

SEQ ID NO: 3614740 - RNA, 13 nt, Human
cccacugcucccc

SEQ ID NO: 3614741 - RNA, 13 nt, Human
cccacugcugacu

SEQ ID NO: 3614742 - RNA, 16 nt, Human
cccacuggacucaccu

SEQ ID NO: 3614743 - RNA, 13 nt, Human
cccacuggccggc

SEQ ID NO: 3614744 - RNA, 12 nt, Human
cccacuggcugu

SEQ ID NO: 3614745 - RNA, 16 nt, Human
cccacuggcugugggc

SEQ ID NO: 3614746 - RNA, 21 nt, Human
cccacuggcugugggcucccu

SEQ ID NO: 3614747 - RNA, 19 nt, Human
cccacugggaccaacccug

SEQ ID NO: 3614748 - RNA, 21 nt, Human
cccacugggguccagggagca

SEQ ID NO: 3614749 - RNA, 16 nt, Human
cccacugguuagaugu

SEQ ID NO: 3614750 - RNA, 13 nt, Human
cccacuguccugg

SEQ ID NO: 3614751 - RNA, 16 nt, Human
cccacuguccugggcg

SEQ ID NO: 3614752 - RNA, 18 nt, Human
cccacuguccugggcgcc

SEQ ID NO: 3614753 - RNA, 22 nt, Human
cccacuguccugggcgcccugg

SEQ ID NO: 3614754 - RNA, 22 nt, Human
cccacugugccucagagaccag

SEQ ID NO: 3614755 - RNA, 20 nt, Human
cccacugugcguggggcucc

SEQ ID NO: 3614756 - RNA, 21 nt, Human
cccacuguuucucuugagcug

SEQ ID NO: 3614757 - RNA, 14 nt, Human
cccacuuacauuua

SEQ ID NO: 3614758 - RNA, 15 nt, Human
cccacuucagccucc

SEQ ID NO: 3614759 - RNA, 17 nt, Human
cccacuucccacccugc

SEQ ID NO: 3614760 - RNA, 14 nt, Human
cccacuuccccucc

SEQ ID NO: 3614761 - RNA, 17 nt, Human
cccacuuccccuccuac

SEQ ID NO: 3614762 - RNA, 19 nt, Human
cccacuucccugacacugc

SEQ ID NO: 3614763 - RNA, 24 nt, Human
cccacuucccugacacugcggggc

SEQ ID NO: 3614764 - RNA, 12 nt, Human
cccacuuccugu

SEQ ID NO: 3614765 - RNA, 18 nt, Human
cccacuucucucuaagga

SEQ ID NO: 3614766 - RNA, 16 nt, Human
cccacuucugcacuug

SEQ ID NO: 3614767 - RNA, 17 nt, Human
cccacuugguuagauga

SEQ ID NO: 3614768 - RNA, 15 nt, Human
cccagaaaggagacu

SEQ ID NO: 3614769 - RNA, 22 nt, Human
cccagaacacacuccaucagcu

SEQ ID NO: 3614770 - RNA, 20 nt, Human
cccagaacuggacucaggau

SEQ ID NO: 3614771 - RNA, 16 nt, Human
cccagaacuucccuga

SEQ ID NO: 3614772 - RNA, 13 nt, Human
cccagaaggcagg

SEQ ID NO: 3614773 - RNA, 22 nt, Human
cccagaaggcauaucagucucu

SEQ ID NO: 3614774 - RNA, 14 nt, Human
cccagaagugcaga

SEQ ID NO: 3614775 - RNA, 24 nt, Human
cccagaauaaacuggcagcucagc

SEQ ID NO: 3614776 - RNA, 12 nt, Human
cccagaauccca

SEQ ID NO: 3614777 - RNA, 14 nt, Human
cccagaaucccagc

SEQ ID NO: 3614778 - RNA, 20 nt, Human
cccagaaucccagccggcca

SEQ ID NO: 3614779 - RNA, 15 nt, Human
cccagacacagaaga

SEQ ID NO: 3614780 - RNA, 20 nt, Human
cccagacagacaucucugca

SEQ ID NO: 3614781 - RNA, 12 nt, Human
cccagacagcuc

SEQ ID NO: 3614782 - RNA, 13 nt, Human
cccagacagcucc

SEQ ID NO: 3614783 - RNA, 16 nt, Human
cccagacagcucccuc

SEQ ID NO: 3614784 - RNA, 20 nt, Human
cccagacagcucccucugcc

SEQ ID NO: 3614785 - RNA, 16 nt, Human
cccagacauaaaggaa

SEQ ID NO: 3614786 - RNA, 19 nt, Human
cccagacauaaaggaaaag

SEQ ID NO: 3614787 - RNA, 14 nt, Human
cccagacccagugg

SEQ ID NO: 3614788 - RNA, 18 nt, Human
cccagaccccucuggcca

SEQ ID NO: 3614789 - RNA, 20 nt, Human
cccagaccccucuggccagg

SEQ ID NO: 3614790 - RNA, 21 nt, Human
cccagaccccucuggccagga

SEQ ID NO: 3614791 - RNA, 23 nt, Human
cccagacuagauguaguauuuuu

SEQ ID NO: 3614792 - RNA, 12 nt, Human
cccagacucaga

SEQ ID NO: 3614793 - RNA, 13 nt, Human
cccagacucagac

SEQ ID NO: 3614794 - RNA, 16 nt, Human
cccagacucagacauu

SEQ ID NO: 3614795 - RNA, 23 nt, Human
cccagacuugcugaaucggaauc

SEQ ID NO: 3614796 - RNA, 17 nt, Human
cccagagaacagcgaag

SEQ ID NO: 3614797 - RNA, 12 nt, Human
cccagagaagcc

SEQ ID NO: 3614798 - RNA, 21 nt, Human
cccagagaagccccuucccca

SEQ ID NO: 3614799 - RNA, 21 nt, Human
cccagagacuuuguagauccu

SEQ ID NO: 3614800 - RNA, 18 nt, Human
cccagagagaagagcccc

SEQ ID NO: 3614801 - RNA, 21 nt, Human
cccagagagaagagccccacu

SEQ ID NO: 3614802 - RNA, 14 nt, Human
cccagagaugccuc

SEQ ID NO: 3614803 - RNA, 20 nt, Human
cccagagaugccuccaccgc

SEQ ID NO: 3614804 - RNA, 20 nt, Human
cccagagaugggacugggag

SEQ ID NO: 3614805 - RNA, 14 nt, Human
cccagagcaggaag

SEQ ID NO: 3614806 - RNA, 15 nt, Human
cccagagcagggugu

SEQ ID NO: 3614807 - RNA, 21 nt, Human
cccagagcauuacgugagcca

SEQ ID NO: 3614808 - RNA, 17 nt, Human
cccagagccacacaugg

SEQ ID NO: 3614809 - RNA, 21 nt, Human
cccagagccacacaugggcau

SEQ ID NO: 3614810 - RNA, 12 nt, Human
cccagagcccag

SEQ ID NO: 3614811 - RNA, 20 nt, Human
cccagagccuggcugcccau

SEQ ID NO: 3614812 - RNA, 23 nt, Human
cccagagcugguggacccaggga

SEQ ID NO: 3614813 - RNA, 20 nt, Human
cccagagcuguuuauggccu

SEQ ID NO: 3614814 - RNA, 21 nt, Human
cccagaggaaggggccagagg

SEQ ID NO: 3614815 - RNA, 10 nt, Human
cccagaggca

SEQ ID NO: 3614816 - RNA, 15 nt, Human
cccagaggcacagcc

SEQ ID NO: 3614817 - RNA, 22 nt, Human
cccagaggcgucccgcaccugu

SEQ ID NO: 3614818 - RNA, 12 nt, Human
cccagaggcuga

SEQ ID NO: 3614819 - RNA, 13 nt, Human
cccagagggccca

SEQ ID NO: 3614820 - RNA, 15 nt, Human
ccccuguccucacug

SEQ ID NO: 3614821 - RNA, 14 nt, Human
ccccugucuagaga

SEQ ID NO: 3614822 - RNA, 18 nt, Human
ccccugucuagagaggga

SEQ ID NO: 3614823 - RNA, 22 nt, Human
ccccugucucucagggccaggc

SEQ ID NO: 3614824 - RNA, 11 nt, Human
ccccugugcag

SEQ ID NO: 3614825 - RNA, 20 nt, Human
ccccugugcagccgcugagc

SEQ ID NO: 3614826 - RNA, 14 nt, Human
ccccugugccuugu

SEQ ID NO: 3614827 - RNA, 19 nt, Human
ccccugugcuccgugccuc

SEQ ID NO: 3614828 - RNA, 20 nt, Human
ccccuguggggaucucaggg

SEQ ID NO: 3614829 - RNA, 15 nt, Human
ccccuguucacucua

SEQ ID NO: 3614830 - RNA, 14 nt, Human
ccccuguucaugcc

SEQ ID NO: 3614831 - RNA, 16 nt, Human
ccccuguuccccucuc

SEQ ID NO: 3614832 - RNA, 19 nt, Human
ccccuguuccccucucccu

SEQ ID NO: 3614833 - RNA, 13 nt, Human
ccccuguucuaag

SEQ ID NO: 3614834 - RNA, 15 nt, Human
ccccuuauccaggac

SEQ ID NO: 3614835 - RNA, 14 nt, Human
ccccuuauccuccc

SEQ ID NO: 3614836 - RNA, 18 nt, Human
ccccuuauccucccugua

SEQ ID NO: 3614837 - RNA, 18 nt, Human
ccccuucacaccauaacu

SEQ ID NO: 3614838 - RNA, 23 nt, Human
ccccuucacuucugaccacacuu

SEQ ID NO: 3614839 - RNA, 13 nt, Human
ccccuucagugcc

SEQ ID NO: 3614840 - RNA, 20 nt, Human
ccccuuccauggacuuuguu

SEQ ID NO: 3614841 - RNA, 13 nt, Human
ccccuuccaugug

SEQ ID NO: 3614842 - RNA, 11 nt, Human
ccccuucccau

SEQ ID NO: 3614843 - RNA, 19 nt, Human
ccccuuccccacugccugc

SEQ ID NO: 3614844 - RNA, 16 nt, Human
ccccuuccccauggga

SEQ ID NO: 3614845 - RNA, 12 nt, Human
ccccuucccccu

SEQ ID NO: 3614846 - RNA, 13 nt, Human
ccccuucccugca

SEQ ID NO: 3614847 - RNA, 14 nt, Human
ccccuuccgccacu

SEQ ID NO: 3614848 - RNA, 16 nt, Human
ccccuuccgccacugg

SEQ ID NO: 3614849 - RNA, 17 nt, Human
ccccuuccgccacuggg

SEQ ID NO: 3614850 - RNA, 14 nt, Human
ccccuuccuaccac

SEQ ID NO: 3614851 - RNA, 15 nt, Human
ccccuucgcuccugu

SEQ ID NO: 3614852 - RNA, 19 nt, Human
ccccuucgcuccugugucu

SEQ ID NO: 3614853 - RNA, 20 nt, Human
ccccuucuacacucuccugg

SEQ ID NO: 3614854 - RNA, 23 nt, Human
ccccuucuacacucuccugggcc

SEQ ID NO: 3614855 - RNA, 18 nt, Human
ccccuucuauuuggggcu

SEQ ID NO: 3614856 - RNA, 12 nt, Human
ccccuucucccc

SEQ ID NO: 3614857 - RNA, 18 nt, Human
ccccuucuccccugcacu

SEQ ID NO: 3614858 - RNA, 16 nt, Human
ccccuucucucaucuc

SEQ ID NO: 3614859 - RNA, 18 nt, Human
ccccuucucugcccauuc

SEQ ID NO: 3614860 - RNA, 13 nt, Human
ccccuucugaccc

SEQ ID NO: 3614861 - RNA, 14 nt, Human
ccccuucugaccca

SEQ ID NO: 3614862 - RNA, 20 nt, Human
ccccuucugcucagcucugg

SEQ ID NO: 3614863 - RNA, 14 nt, Human
ccccuucugggcau

SEQ ID NO: 3614864 - RNA, 19 nt, Human
ccccuugaggucucagccc

SEQ ID NO: 3614865 - RNA, 22 nt, Human
ccccuugaggucucagccccuu

SEQ ID NO: 3614866 - RNA, 20 nt, Human
ccccuugccaccccacccuc

SEQ ID NO: 3614867 - RNA, 17 nt, Human
ccccuugcccagggcuc

SEQ ID NO: 3614868 - RNA, 23 nt, Human
ccccuugcccagggcucagccug

SEQ ID NO: 3614869 - RNA, 15 nt, Human
ccccuuguccuuucc

SEQ ID NO: 3614870 - RNA, 20 nt, Human
ccccuuuagaucucugaagc

SEQ ID NO: 3614871 - RNA, 20 nt, Human
cccgggaaccuccccagccu

SEQ ID NO: 3614872 - RNA, 15 nt, Human
cccgggaagcaaaug

SEQ ID NO: 3614873 - RNA, 16 nt, Human
cccgggagccuaggac

SEQ ID NO: 3614874 - RNA, 18 nt, Human
cccgggagccuaggacca

SEQ ID NO: 3614875 - RNA, 19 nt, Human
cccgggagccuaggaccac

SEQ ID NO: 3614876 - RNA, 18 nt, Human
cccgggaggggcccgcuu

SEQ ID NO: 3614877 - RNA, 14 nt, Human
cccgggcccagagg

SEQ ID NO: 3614878 - RNA, 21 nt, Human
cccgggcgcggccagccccgg

SEQ ID NO: 3614879 - RNA, 17 nt, Human
cccgggcucucugcugu

SEQ ID NO: 3614880 - RNA, 16 nt, Human
cccgggcucugccucc

SEQ ID NO: 3614881 - RNA, 17 nt, Human
cccgggcucugccuccc

SEQ ID NO: 3614882 - RNA, 17 nt, Human
cccgggcugccugggcu

SEQ ID NO: 3614883 - RNA, 18 nt, Human
cccggggacccugugaca

SEQ ID NO: 3614884 - RNA, 20 nt, Human
cccggggcagcagcagcccu

SEQ ID NO: 3614885 - RNA, 19 nt, Human
cccggggcagcugccagag

SEQ ID NO: 3614886 - RNA, 20 nt, Human
cccggguuuggcgggccaag

SEQ ID NO: 3614887 - RNA, 18 nt, Human
cccggugcccaagaauag

SEQ ID NO: 3614888 - RNA, 19 nt, Human
cccgguggcggccccagca

SEQ ID NO: 3614889 - RNA, 14 nt, Human
cccguaaugcuuag

SEQ ID NO: 3614890 - RNA, 15 nt, Human
cccgucacagccuca

SEQ ID NO: 3614891 - RNA, 17 nt, Human
cccgucaccaucucagg

SEQ ID NO: 3614892 - RNA, 17 nt, Human
cccgucagggcccaagu

SEQ ID NO: 3614893 - RNA, 19 nt, Human
cccgucccauauccugccu

SEQ ID NO: 3614894 - RNA, 15 nt, Human
cccguccugccugug

SEQ ID NO: 3614895 - RNA, 17 nt, Human
cccguccugccuguggc

SEQ ID NO: 3614896 - RNA, 20 nt, Human
cccgucgaggggcucucagc

SEQ ID NO: 3614897 - RNA, 12 nt, Human
cccgucucaggu

SEQ ID NO: 3614898 - RNA, 13 nt, Human
cccgucuccagcu

SEQ ID NO: 3614899 - RNA, 12 nt, Human
cccgucucucuc

SEQ ID NO: 3614900 - RNA, 21 nt, Human
cccgucugggguucagccccu

SEQ ID NO: 3614901 - RNA, 23 nt, Human
cccgucugggguucagccccucc

SEQ ID NO: 3614902 - RNA, 11 nt, Human
cccgucugucc

SEQ ID NO: 3614903 - RNA, 18 nt, Human
cccgucuguccaucugcc

SEQ ID NO: 3614904 - RNA, 19 nt, Human
cccgucuguccaucugccc

SEQ ID NO: 3614905 - RNA, 13 nt, Human
cccgucuucagcc

SEQ ID NO: 3614906 - RNA, 14 nt, Human
cccgucuucagccu

SEQ ID NO: 3614907 - RNA, 16 nt, Human
cccgucuucagccuag

SEQ ID NO: 3614908 - RNA, 18 nt, Human
cccgugacagacuccuga

SEQ ID NO: 3614909 - RNA, 22 nt, Human
cccgugacagacuccugaggac

SEQ ID NO: 3614910 - RNA, 21 nt, Human
cccgugaggaugucacucaga

SEQ ID NO: 3614911 - RNA, 18 nt, Human
cccgugcagacuggaggg

SEQ ID NO: 3614912 - RNA, 21 nt, Human
cccgugccaaguccagguccu

SEQ ID NO: 3614913 - RNA, 11 nt, Human
cccguggcccc

SEQ ID NO: 3614914 - RNA, 15 nt, Human
cccguggccccagcc

SEQ ID NO: 3614915 - RNA, 17 nt, Human
cccguggccccagccug

SEQ ID NO: 3614916 - RNA, 21 nt, Human
cccguggccccagccuggccc

SEQ ID NO: 3614917 - RNA, 22 nt, Human
cccguggggcagggagcugggc

SEQ ID NO: 3614918 - RNA, 14 nt, Human
cccguggggccggg

SEQ ID NO: 3614919 - RNA, 12 nt, Human
cccguggucucu

SEQ ID NO: 3614920 - RNA, 17 nt, Human
cccguguggccccuuca

SEQ ID NO: 3614921 - RNA, 18 nt, Human
cccguguggccccuucac

SEQ ID NO: 3614922 - RNA, 22 nt, Human
cccguguggccccuucacuucu

SEQ ID NO: 3614923 - RNA, 18 nt, Human
cccguuccaccccaagag

SEQ ID NO: 3614924 - RNA, 17 nt, Human
cccguugucucccuggc

SEQ ID NO: 3614925 - RNA, 12 nt, Human
cccguuuucccc

SEQ ID NO: 3614926 - RNA, 20 nt, Human
cccuaaaagaaacccugcac

SEQ ID NO: 3614927 - RNA, 20 nt, Human
cccuaaaagcacuccugcuu

SEQ ID NO: 3614928 - RNA, 18 nt, Human
cccuaaaccccuguccca

SEQ ID NO: 3614929 - RNA, 14 nt, Human
cccuaagagagcac

SEQ ID NO: 3614930 - RNA, 16 nt, Human
cccuaagcagaaagug

SEQ ID NO: 3614931 - RNA, 17 nt, Human
cccuaagccaagggccu

SEQ ID NO: 3614932 - RNA, 19 nt, Human
cccuaaggaucucucagga

SEQ ID NO: 3614933 - RNA, 13 nt, Human
cccuaagguccua

SEQ ID NO: 3614934 - RNA, 12 nt, Human
cccuaauaaagc

SEQ ID NO: 3614935 - RNA, 13 nt, Human
cccuaauaaagcu

SEQ ID NO: 3614936 - RNA, 18 nt, Human
cccuaauaaagcugugug

SEQ ID NO: 3614937 - RNA, 22 nt, Human
cccuaaucuauggucgggagac

SEQ ID NO: 3614938 - RNA, 12 nt, Human
cccuaaucuucc

SEQ ID NO: 3614939 - RNA, 21 nt, Human
cccuaaugcgcaggcuggccc

SEQ ID NO: 3614940 - RNA, 22 nt, Human
cccuaauucagccauguacaga

SEQ ID NO: 3614941 - RNA, 13 nt, Human
cccuacagcauug

SEQ ID NO: 3614942 - RNA, 21 nt, Human
cccuaccagcgcccgcugggc

SEQ ID NO: 3614943 - RNA, 19 nt, Human
cccuaccccacaccaggcc

SEQ ID NO: 3614944 - RNA, 10 nt, Human
cccuaccuca

SEQ ID NO: 3614945 - RNA, 15 nt, Human
cccuaccucaaccug

SEQ ID NO: 3614946 - RNA, 18 nt, Human
cccuaccucaaccuguaa

SEQ ID NO: 3614947 - RNA, 13 nt, Human
cccuaccucaggc

SEQ ID NO: 3614948 - RNA, 19 nt, Human
cccuaccuguucagugucc

SEQ ID NO: 3614949 - RNA, 22 nt, Human
cccuacucauugggguuccgca

SEQ ID NO: 3614950 - RNA, 17 nt, Human
cccuacugcugugaacc

SEQ ID NO: 3614951 - RNA, 17 nt, Human
cccuagaaacccaagcu

SEQ ID NO: 3614952 - RNA, 19 nt, Human
cccuagaaacccaagcucc

SEQ ID NO: 3614953 - RNA, 13 nt, Human
cccuagacuuuag

SEQ ID NO: 3614954 - RNA, 15 nt, Human
cccuagagccugccu

SEQ ID NO: 3614955 - RNA, 21 nt, Human
cccuagagccugccuggagcg

SEQ ID NO: 3614956 - RNA, 16 nt, Human
cccuagaguguuguug

SEQ ID NO: 3614957 - RNA, 15 nt, Human
cccuagccauuccug

SEQ ID NO: 3614958 - RNA, 16 nt, Human
cccuagcccaggagag

SEQ ID NO: 3614959 - RNA, 14 nt, Human
cccuagccuugcuu

SEQ ID NO: 3614960 - RNA, 20 nt, Human
cccuagcuccuccccuuccu

SEQ ID NO: 3614961 - RNA, 21 nt, Human
cccuagcuuuagacccugggu

SEQ ID NO: 3614962 - RNA, 22 nt, Human
cccuagcuuuauauauggacau

SEQ ID NO: 3614963 - RNA, 22 nt, Human
cccuaggauaaaaagccagggc

SEQ ID NO: 3614964 - RNA, 14 nt, Human
cccuaggggacacu

SEQ ID NO: 3614965 - RNA, 17 nt, Human
cccuaggggacacuucc

SEQ ID NO: 3614966 - RNA, 19 nt, Human
cccuaggggacacuucccu

SEQ ID NO: 3614967 - RNA, 15 nt, Human
cccuaguaaaaauac

SEQ ID NO: 3614968 - RNA, 23 nt, Human
cccuaguaagugccuuccauguc

SEQ ID NO: 3614969 - RNA, 17 nt, Human
cccuagucccuuccccu

SEQ ID NO: 3614970 - RNA, 22 nt, Human
cccuagucccuuccccucccug

SEQ ID NO: 3614971 - RNA, 18 nt, Human
cccuaguucccucugcuc

SEQ ID NO: 3614972 - RNA, 21 nt, Human
cccuaguucccucugcucagc

SEQ ID NO: 3614973 - RNA, 23 nt, Human
cccuaguuuucuuuccuccuuuc

SEQ ID NO: 3614974 - RNA, 16 nt, Human
cccuauccaaucaauc

SEQ ID NO: 3614975 - RNA, 18 nt, Human
cccuauccacccagccca

SEQ ID NO: 3614976 - RNA, 14 nt, Human
cccuauccuuggca

SEQ ID NO: 3614977 - RNA, 19 nt, Human
cccuauccuuggcaccaaa

SEQ ID NO: 3614978 - RNA, 15 nt, Human
cccuaucuccugaca

SEQ ID NO: 3614979 - RNA, 19 nt, Human
cccuaucuuugccacccuc

SEQ ID NO: 3614980 - RNA, 21 nt, Human
cccuaucuuugccacccucau

SEQ ID NO: 3614981 - RNA, 13 nt, Human
cccuaugcugccu

SEQ ID NO: 3614982 - RNA, 17 nt, Human
cccuauggaagcauauu

SEQ ID NO: 3614983 - RNA, 16 nt, Human
cccuauggggaugguc

SEQ ID NO: 3614984 - RNA, 18 nt, Human
cccuauggggauggucca

SEQ ID NO: 3614985 - RNA, 17 nt, Human
cccuauugguaaagaau

SEQ ID NO: 3614986 - RNA, 21 nt, Human
cccuauuuaacagggucucua

SEQ ID NO: 3614987 - RNA, 20 nt, Human
cccucaaaccuccucuucug

SEQ ID NO: 3614988 - RNA, 20 nt, Human
cccucaaaugacccaaagac

SEQ ID NO: 3614989 - RNA, 19 nt, Human
cccucaacaagggagagac

SEQ ID NO: 3614990 - RNA, 21 nt, Human
cccucaacaagggagagaccu

SEQ ID NO: 3614991 - RNA, 16 nt, Human
cccucaacucuccucc

SEQ ID NO: 3614992 - RNA, 20 nt, Human
cccucaacucuccuccagag

SEQ ID NO: 3614993 - RNA, 17 nt, Human
cccucaagaggaaguga

SEQ ID NO: 3614994 - RNA, 22 nt, Human
cccucaaggccucccacaguga

SEQ ID NO: 3614995 - RNA, 14 nt, Human
cccucacacacccu

SEQ ID NO: 3614996 - RNA, 13 nt, Human
cccucacacuggg

SEQ ID NO: 3614997 - RNA, 14 nt, Human
cccucacagccucu

SEQ ID NO: 3614998 - RNA, 15 nt, Human
cccucacagccucug

SEQ ID NO: 3614999 - RNA, 18 nt, Human
cccucacaguauugcuca

SEQ ID NO: 3615000 - RNA, 13 nt, Human
cccucacccaucc

SEQ ID NO: 3615001 - RNA, 13 nt, Human
cccucaccccugg

SEQ ID NO: 3615002 - RNA, 20 nt, Human
cccucaccccugguucucau

SEQ ID NO: 3615003 - RNA, 22 nt, Human
cccucaccccugguucucaucu

SEQ ID NO: 3615004 - RNA, 20 nt, Human
cccucacccugagccccuuc

SEQ ID NO: 3615005 - RNA, 16 nt, Human
cccucacccugccuua

SEQ ID NO: 3615006 - RNA, 21 nt, Human
cccucaccuacuuacccaggu

SEQ ID NO: 3615007 - RNA, 15 nt, Human
cccucaccugggcac

SEQ ID NO: 3615008 - RNA, 17 nt, Human
cccucaccugggcaccu

SEQ ID NO: 3615009 - RNA, 23 nt, Human
cccucaccugggcaccuggggag

SEQ ID NO: 3615010 - RNA, 16 nt, Human
cccucaccuucugagu

SEQ ID NO: 3615011 - RNA, 21 nt, Human
cccucaccuugcaacacacag

SEQ ID NO: 3615012 - RNA, 20 nt, Human
cccucaccuuggcaccagac

SEQ ID NO: 3615013 - RNA, 17 nt, Human
cccucacucgucucccc

SEQ ID NO: 3615014 - RNA, 13 nt, Human
cccucacucucag

SEQ ID NO: 3615015 - RNA, 14 nt, Human
cccucacucucagg

SEQ ID NO: 3615016 - RNA, 20 nt, Human
cagcuguaagaagagacugg

SEQ ID NO: 3615017 - RNA, 21 nt, Human
cagcuguaagaagagacuggg

SEQ ID NO: 3615018 - RNA, 17 nt, Human
cagcuguacuucgucuu

SEQ ID NO: 3615019 - RNA, 20 nt, Human
cagcuguaugauucccagcc

SEQ ID NO: 3615020 - RNA, 14 nt, Human
cagcugucccccca

SEQ ID NO: 3615021 - RNA, 21 nt, Human
cagcugucccugcccuucuuc

SEQ ID NO: 3615022 - RNA, 13 nt, Human
cagcugucccugu

SEQ ID NO: 3615023 - RNA, 16 nt, Human
cagcuguccucuucug

SEQ ID NO: 3615024 - RNA, 12 nt, Human
cagcugucucua

SEQ ID NO: 3615025 - RNA, 14 nt, Human
cagcugucuguggc

SEQ ID NO: 3615026 - RNA, 16 nt, Human
cagcugucuguggcuu

SEQ ID NO: 3615027 - RNA, 20 nt, Human
cagcugucugugucagccug

SEQ ID NO: 3615028 - RNA, 18 nt, Human
cagcugugaacauggacu

SEQ ID NO: 3615029 - RNA, 15 nt, Human
cagcugugagccuug

SEQ ID NO: 3615030 - RNA, 13 nt, Human
cagcugugccucg

SEQ ID NO: 3615031 - RNA, 19 nt, Human
cagcugugcucuggacagg

SEQ ID NO: 3615032 - RNA, 20 nt, Human
cagcugugcucuggacaggc

SEQ ID NO: 3615033 - RNA, 17 nt, Human
cagcuguggcagaguua

SEQ ID NO: 3615034 - RNA, 23 nt, Human
cagcuguggugagguugggcagc

SEQ ID NO: 3615035 - RNA, 16 nt, Human
cagcuguucagcuggu

SEQ ID NO: 3615036 - RNA, 14 nt, Human
cagcuguugacucu

SEQ ID NO: 3615037 - RNA, 21 nt, Human
cagcuguuuaaauguuuuucu

SEQ ID NO: 3615038 - RNA, 23 nt, Human
cagcuguuucuagaguuccuacc

SEQ ID NO: 3615039 - RNA, 14 nt, Human
cagcuguuugucau

SEQ ID NO: 3615040 - RNA, 12 nt, Human
cccccugucccc

SEQ ID NO: 3615041 - RNA, 21 nt, Human
cccccugugcagccgcugagc

SEQ ID NO: 3615042 - RNA, 17 nt, Human
cccccuguggaugcugc

SEQ ID NO: 3615043 - RNA, 16 nt, Human
cccccuucaagccugu

SEQ ID NO: 3615044 - RNA, 12 nt, Human
cccccuucuggg

SEQ ID NO: 3615045 - RNA, 20 nt, Human
cccccuuuagaucucugaag

SEQ ID NO: 3615046 - RNA, 13 nt, Human
cccccuuucccgg

SEQ ID NO: 3615047 - RNA, 14 nt, Human
cccccuuucccggg

SEQ ID NO: 3615048 - RNA, 20 nt, Human
cccccuuuccuggacacuca

SEQ ID NO: 3615049 - RNA, 15 nt, Human
cccccuuucuuccuc

SEQ ID NO: 3615050 - RNA, 16 nt, Human
cccccuuucuuccuca

SEQ ID NO: 3615051 - RNA, 17 nt, Human
cccccuuugggcccagg

SEQ ID NO: 3615052 - RNA, 14 nt, Human
cccccuuugugcug

SEQ ID NO: 3615053 - RNA, 16 nt, Human
cccccuuugugcugug

SEQ ID NO: 3615054 - RNA, 16 nt, Human
ccccgaagggccccca

SEQ ID NO: 3615055 - RNA, 21 nt, Human
ccccgacgccacagcccagcc

SEQ ID NO: 3615056 - RNA, 13 nt, Human
ccccgagcugggg

SEQ ID NO: 3615057 - RNA, 15 nt, Human
ccccgaggcccugca

SEQ ID NO: 3615058 - RNA, 16 nt, Human
ccccgaggcccugcau

SEQ ID NO: 3615059 - RNA, 17 nt, Human
ccccgaggcccugcaug

SEQ ID NO: 3615060 - RNA, 18 nt, Human
ccccgagggaugaugcca

SEQ ID NO: 3615061 - RNA, 14 nt, Human
ccccgagggcugag

SEQ ID NO: 3615062 - RNA, 23 nt, Human
ccccgcaccuguacaguggaacc

SEQ ID NO: 3615063 - RNA, 14 nt, Human
ccccgcacugggcu

SEQ ID NO: 3615064 - RNA, 12 nt, Human
ccccgcagaccu

SEQ ID NO: 3615065 - RNA, 14 nt, Human
ccccgcagaccucc

SEQ ID NO: 3615066 - RNA, 20 nt, Human
ccccgcagaccuccccagcc

SEQ ID NO: 3615067 - RNA, 13 nt, Human
ccccgcagcccug

SEQ ID NO: 3615068 - RNA, 18 nt, Human
ccccgcaguguuugugug

SEQ ID NO: 3615069 - RNA, 19 nt, Human
ccccgcauccccugccucc

SEQ ID NO: 3615070 - RNA, 17 nt, Human
ccccgcauuccaggcuc

SEQ ID NO: 3615071 - RNA, 15 nt, Human
ccccgcccaggcugg

SEQ ID NO: 3615072 - RNA, 17 nt, Human
ccccgccccacauuccg

SEQ ID NO: 3615073 - RNA, 16 nt, Human
ccccgcccccaguccc

SEQ ID NO: 3615074 - RNA, 21 nt, Human
ccccgcccccugcccuccccu

SEQ ID NO: 3615075 - RNA, 14 nt, Human
ccccgccuggccag

SEQ ID NO: 3615076 - RNA, 16 nt, Human
ccccgccuggccagga

SEQ ID NO: 3615077 - RNA, 22 nt, Human
ccccgcucugcaugcggcccag

SEQ ID NO: 3615078 - RNA, 13 nt, Human
ccccgcugcugug

SEQ ID NO: 3615079 - RNA, 20 nt, Human
ccccgcuguaagcuccuuug

SEQ ID NO: 3615080 - RNA, 15 nt, Human
ccccgcuuguccagc

SEQ ID NO: 3615081 - RNA, 17 nt, Human
ccccgcuuguccagcgc

SEQ ID NO: 3615082 - RNA, 18 nt, Human
ccccgcuuguccagcgcc

SEQ ID NO: 3615083 - RNA, 14 nt, Human
ccccggcacccucu

SEQ ID NO: 3615084 - RNA, 14 nt, Human
ccccggcaggcccu

SEQ ID NO: 3615085 - RNA, 12 nt, Human
ccccggccaccu

SEQ ID NO: 3615086 - RNA, 17 nt, Human
ccccggccaccucugcg

SEQ ID NO: 3615087 - RNA, 16 nt, Human
ccccggccccagccag

SEQ ID NO: 3615088 - RNA, 12 nt, Human
ccccggcccccu

SEQ ID NO: 3615089 - RNA, 13 nt, Human
ccccggcccccug

SEQ ID NO: 3615090 - RNA, 18 nt, Human
ccccggccccggccccag

SEQ ID NO: 3615091 - RNA, 16 nt, Human
ccccgggaggggcccg

SEQ ID NO: 3615092 - RNA, 16 nt, Human
ccccggggacccugug

SEQ ID NO: 3615093 - RNA, 14 nt, Human
ccccggggcccagg

SEQ ID NO: 3615094 - RNA, 20 nt, Human
ccccggucaccuagcaagcu

SEQ ID NO: 3615095 - RNA, 20 nt, Human
ccccgguggcggccccagca

SEQ ID NO: 3615096 - RNA, 18 nt, Human
ccccggugugcggugcau

SEQ ID NO: 3615097 - RNA, 14 nt, Human
ccccgucacagccu

SEQ ID NO: 3615098 - RNA, 21 nt, Human
ccccgucaccaucucaggcca

SEQ ID NO: 3615099 - RNA, 16 nt, Human
ccccgucccccucugg

SEQ ID NO: 3615100 - RNA, 20 nt, Human
ccccgucccccucuggcucc

SEQ ID NO: 3615101 - RNA, 21 nt, Human
ccccgucucugguuccucccc

SEQ ID NO: 3615102 - RNA, 15 nt, Human
ccccgugcagacugg

SEQ ID NO: 3615103 - RNA, 16 nt, Human
ccccguuacagcuccc

SEQ ID NO: 3615104 - RNA, 19 nt, Human
ccccuaaagccucaaaaca

SEQ ID NO: 3615105 - RNA, 22 nt, Human
ccccuaacccuuugugugcucu

SEQ ID NO: 3615106 - RNA, 23 nt, Human
ccccuaacccuuugugugcucuc

SEQ ID NO: 3615107 - RNA, 17 nt, Human
ccccuaagagagcaccu

SEQ ID NO: 3615108 - RNA, 18 nt, Human
ccccuaaugccugcggag

SEQ ID NO: 3615109 - RNA, 17 nt, Human
ccccuaccaauauuagg

SEQ ID NO: 3615110 - RNA, 13 nt, Human
ccccuacugcugu

SEQ ID NO: 3615111 - RNA, 13 nt, Human
ccccuagaaaccc

SEQ ID NO: 3615112 - RNA, 14 nt, Human
ccccuagccauuuu

SEQ ID NO: 3615113 - RNA, 17 nt, Human
ccccuagcccaggagag

SEQ ID NO: 3615114 - RNA, 21 nt, Human
ccccuagccgguuccuguccc

SEQ ID NO: 3615115 - RNA, 16 nt, Human
ccccuauccacccagc

SEQ ID NO: 3615116 - RNA, 19 nt, Human
ccccuauccacccagccca

SEQ ID NO: 3615117 - RNA, 20 nt, Human
ccccuauccacccagcccau

SEQ ID NO: 3615118 - RNA, 21 nt, Human
ccccuauccacccagcccauu

SEQ ID NO: 3615119 - RNA, 16 nt, Human
ccccucaacaccucug

SEQ ID NO: 3615120 - RNA, 21 nt, Human
ccccucaaccuccuguggaac

SEQ ID NO: 3615121 - RNA, 14 nt, Human
ccccucacagccuc

SEQ ID NO: 3615122 - RNA, 18 nt, Human
ccccucacagccucugac

SEQ ID NO: 3615123 - RNA, 16 nt, Human
ccccucacccugccuu

SEQ ID NO: 3615124 - RNA, 12 nt, Human
ccccucacucug

SEQ ID NO: 3615125 - RNA, 14 nt, Human
ccccucaggacccu

SEQ ID NO: 3615126 - RNA, 18 nt, Human
ccccucaggacccucgcu

SEQ ID NO: 3615127 - RNA, 22 nt, Human
ccccucaggacccucgcuggcc

SEQ ID NO: 3615128 - RNA, 15 nt, Human
ccccucaggacugca

SEQ ID NO: 3615129 - RNA, 17 nt, Human
ccccucagggucccugg

SEQ ID NO: 3615130 - RNA, 20 nt, Human
ccccucagggucccuggugg

SEQ ID NO: 3615131 - RNA, 16 nt, Human
ccccuccaaaaugugc

SEQ ID NO: 3615132 - RNA, 21 nt, Human
ccccuccaaaaugugccuauu

SEQ ID NO: 3615133 - RNA, 12 nt, Human
ccccuccacucu

SEQ ID NO: 3615134 - RNA, 12 nt, Human
ccccuccacugu

SEQ ID NO: 3615135 - RNA, 13 nt, Human
ccccuccagcuug

SEQ ID NO: 3615136 - RNA, 11 nt, Human
ccccuccagga

SEQ ID NO: 3615137 - RNA, 11 nt, Human
ccccucccacc

SEQ ID NO: 3615138 - RNA, 12 nt, Human
ccccucccagaa

SEQ ID NO: 3615139 - RNA, 13 nt, Human
ccccucccagaac

SEQ ID NO: 3615140 - RNA, 11 nt, Human
ccccucccauc

SEQ ID NO: 3615141 - RNA, 20 nt, Human
ccccuccccauuagcuuuca

SEQ ID NO: 3615142 - RNA, 17 nt, Human
ccccucccccagccacu

SEQ ID NO: 3615143 - RNA, 14 nt, Human
ccccucccuaccuc

SEQ ID NO: 3615144 - RNA, 15 nt, Human
ccccucccuaccuca

SEQ ID NO: 3615145 - RNA, 17 nt, Human
ccccucccuaccucaac

SEQ ID NO: 3615146 - RNA, 16 nt, Human
ccccucccuggccugu

SEQ ID NO: 3615147 - RNA, 14 nt, Human
ccccucccuggcuc

SEQ ID NO: 3615148 - RNA, 15 nt, Human
ccccucccuggcucc

SEQ ID NO: 3615149 - RNA, 12 nt, Human
ccccucccuggg

SEQ ID NO: 3615150 - RNA, 14 nt, Human
ccccucccuggguu

SEQ ID NO: 3615151 - RNA, 15 nt, Human
ccccucccuucaacc

SEQ ID NO: 3615152 - RNA, 17 nt, Human
ccccuccgcccugccac

SEQ ID NO: 3615153 - RNA, 13 nt, Human
ccccuccucacug

SEQ ID NO: 3615154 - RNA, 18 nt, Human
ccccuccuccacucuccc

SEQ ID NO: 3615155 - RNA, 13 nt, Human
ccccuccucccuu

SEQ ID NO: 3615156 - RNA, 22 nt, Human
ccccuccucccuuuuuccuugu

SEQ ID NO: 3615157 - RNA, 17 nt, Human
ccccuccucuagcugug

SEQ ID NO: 3615158 - RNA, 23 nt, Human
ccccuccucuccccuaccacugu

SEQ ID NO: 3615159 - RNA, 18 nt, Human
ccccuccucugaaacagc

SEQ ID NO: 3615160 - RNA, 22 nt, Human
ccccuccucugaaacagcugcc

SEQ ID NO: 3615161 - RNA, 13 nt, Human
ccccuccucugcc

SEQ ID NO: 3615162 - RNA, 14 nt, Human
ccccuccucugcca

SEQ ID NO: 3615163 - RNA, 18 nt, Human
cccuguacacaacucacu

SEQ ID NO: 3615164 - RNA, 16 nt, Human
cccuguaccucauccc

SEQ ID NO: 3615165 - RNA, 15 nt, Human
cccuguauauagccc

SEQ ID NO: 3615166 - RNA, 13 nt, Human
cccugucaccucu

SEQ ID NO: 3615167 - RNA, 14 nt, Human
cccugucaccucuu

SEQ ID NO: 3615168 - RNA, 18 nt, Human
cccugucagcaugaauuu

SEQ ID NO: 3615169 - RNA, 14 nt, Human
cccugucagugcag

SEQ ID NO: 3615170 - RNA, 17 nt, Human
cccugucagugcagccc

SEQ ID NO: 3615171 - RNA, 22 nt, Human
cccugucagugcagcccgugug

SEQ ID NO: 3615172 - RNA, 20 nt, Human
cccugucauccagcucacuc

SEQ ID NO: 3615173 - RNA, 13 nt, Human
cccugucccaugc

SEQ ID NO: 3615174 - RNA, 15 nt, Human
cccugucccaugcag

SEQ ID NO: 3615175 - RNA, 20 nt, Human
cccugucccaugcaggcccu

SEQ ID NO: 3615176 - RNA, 19 nt, Human
cccugucccccagcucugg

SEQ ID NO: 3615177 - RNA, 14 nt, Human
cccugucccuccca

SEQ ID NO: 3615178 - RNA, 17 nt, Human
cccugucccucccaccu

SEQ ID NO: 3615179 - RNA, 18 nt, Human
cccugucccucccaccuc

SEQ ID NO: 3615180 - RNA, 23 nt, Human
cccugucccucccaccucuguga

SEQ ID NO: 3615181 - RNA, 14 nt, Human
cccuguccucacug

SEQ ID NO: 3615182 - RNA, 16 nt, Human
cccuguccucacugcu

SEQ ID NO: 3615183 - RNA, 17 nt, Human
cccuguccucacugcuc

SEQ ID NO: 3615184 - RNA, 18 nt, Human
cccuguccucacugcucc

SEQ ID NO: 3615185 - RNA, 16 nt, Human
cccuguccuccucgga

SEQ ID NO: 3615186 - RNA, 14 nt, Human
cccugucuaaaaaa

SEQ ID NO: 3615187 - RNA, 12 nt, Human
cccugucuagag

SEQ ID NO: 3615188 - RNA, 23 nt, Human
cccugucuaggucaguacccacc

SEQ ID NO: 3615189 - RNA, 23 nt, Human
cccugucucaaaaaaagaaaaag

SEQ ID NO: 3615190 - RNA, 21 nt, Human
cccugucucucagggccaggc

SEQ ID NO: 3615191 - RNA, 22 nt, Human
cccugucucucagggccaggcc

SEQ ID NO: 3615192 - RNA, 16 nt, Human
cccugucugccagggc

SEQ ID NO: 3615193 - RNA, 22 nt, Human
cccugucuguagagggcccugg

SEQ ID NO: 3615194 - RNA, 13 nt, Human
cccugucuugucc

SEQ ID NO: 3615195 - RNA, 19 nt, Human
cccugucuuuacuccucac

SEQ ID NO: 3615196 - RNA, 20 nt, Human
cccugucuuuacuccucaca

SEQ ID NO: 3615197 - RNA, 22 nt, Human
cccugugacauggugccugaga

SEQ ID NO: 3615198 - RNA, 24 nt, Human
cccugugacauggugccugagagg

SEQ ID NO: 3615199 - RNA, 23 nt, Human
cccugugaguacuacaguccucc

SEQ ID NO: 3615200 - RNA, 24 nt, Human
cccugugaguacuacaguccuccc

SEQ ID NO: 3615201 - RNA, 23 nt, Human
cccugugaguuuguacagucuug

SEQ ID NO: 3615202 - RNA, 22 nt, Human
ccccucuuccucuugacccugc

SEQ ID NO: 3615203 - RNA, 12 nt, Human
ccccucuugccc

SEQ ID NO: 3615204 - RNA, 14 nt, Human
ccccucuugcccca

SEQ ID NO: 3615205 - RNA, 12 nt, Human
ccccucuuucuc

SEQ ID NO: 3615206 - RNA, 16 nt, Human
ccccucuuucucuuuc

SEQ ID NO: 3615207 - RNA, 22 nt, Human
ccccucuuucucuuucuuccuu

SEQ ID NO: 3615208 - RNA, 13 nt, Human
ccccugaauuuaa

SEQ ID NO: 3615209 - RNA, 17 nt, Human
ccccugaccacucagag

SEQ ID NO: 3615210 - RNA, 18 nt, Human
ccccugaccacucagaga

SEQ ID NO: 3615211 - RNA, 20 nt, Human
ccccugaccacucagagaca

SEQ ID NO: 3615212 - RNA, 20 nt, Human
ccccugagauccccugagcc

SEQ ID NO: 3615213 - RNA, 15 nt, Human
ccccugcacagcagg

SEQ ID NO: 3615214 - RNA, 21 nt, Human
ccccugcacagcaggcugcca

SEQ ID NO: 3615215 - RNA, 17 nt, Human
ccccugcacuguaaaau

SEQ ID NO: 3615216 - RNA, 19 nt, Human
ccccugcaggaaggagcug

SEQ ID NO: 3615217 - RNA, 20 nt, Human
ccccugcaggaaggagcugc

SEQ ID NO: 3615218 - RNA, 22 nt, Human
ccccugcaggaaggagcugccu

SEQ ID NO: 3615219 - RNA, 21 nt, Human
ccccugcauuggaacuggagg

SEQ ID NO: 3615220 - RNA, 18 nt, Human
ccccugccaccucccuga

SEQ ID NO: 3615221 - RNA, 17 nt, Human
ccccugccaccuccugc

SEQ ID NO: 3615222 - RNA, 10 nt, Human
ccccugccag

SEQ ID NO: 3615223 - RNA, 19 nt, Human
ccccugccagggcagggcc

SEQ ID NO: 3615224 - RNA, 23 nt, Human
ccccugccagggcagggccccag

SEQ ID NO: 3615225 - RNA, 14 nt, Human
ccccugccagugcc

SEQ ID NO: 3615226 - RNA, 15 nt, Human
ccccugccagugccu

SEQ ID NO: 3615227 - RNA, 18 nt, Human
ccccugcccaucugggaa

SEQ ID NO: 3615228 - RNA, 19 nt, Human
ccccugcccccaggacugg

SEQ ID NO: 3615229 - RNA, 23 nt, Human
ccccugcccccaggacugggcca

SEQ ID NO: 3615230 - RNA, 17 nt, Human
ccccugccccccagccu

SEQ ID NO: 3615231 - RNA, 18 nt, Human
ccccugcccccugcagga

SEQ ID NO: 3615232 - RNA, 19 nt, Human
ccccugcccucguggccag

SEQ ID NO: 3615233 - RNA, 12 nt, Human
ccccugcccugc

SEQ ID NO: 3615234 - RNA, 14 nt, Human
ccccugcccugugg

SEQ ID NO: 3615235 - RNA, 15 nt, Human
ccccugcccuguggg

SEQ ID NO: 3615236 - RNA, 21 nt, Human
ccccugccuccacccucugag

SEQ ID NO: 3615237 - RNA, 16 nt, Human
ccccugccuccauccu

SEQ ID NO: 3615238 - RNA, 14 nt, Human
ccccugccucucug

SEQ ID NO: 3615239 - RNA, 19 nt, Human
ccccugccucucugcaggu

SEQ ID NO: 3615240 - RNA, 16 nt, Human
ccccugccugccaugu

SEQ ID NO: 3615241 - RNA, 19 nt, Human
ccccugccugcccugguga

SEQ ID NO: 3615242 - RNA, 12 nt, Human
ccccugccuugc

SEQ ID NO: 3615243 - RNA, 22 nt, Human
ccccugcugcaggggcucugga

SEQ ID NO: 3615244 - RNA, 23 nt, Human
ccccugcugcaggggcucuggag

SEQ ID NO: 3615245 - RNA, 18 nt, Human
ccccugcugccuccccaa

SEQ ID NO: 3615246 - RNA, 21 nt, Human
ccccugcuggcucuucugccc

SEQ ID NO: 3615247 - RNA, 17 nt, Human
ccccugcuggguguggc

SEQ ID NO: 3615248 - RNA, 13 nt, Human
ccccugcugguuc

SEQ ID NO: 3615249 - RNA, 16 nt, Human
ccccugcuucaguccc

SEQ ID NO: 3615250 - RNA, 19 nt, Human
ccccugcuuccaccucacc

SEQ ID NO: 3615251 - RNA, 11 nt, Human
ccccugcuucu

SEQ ID NO: 3615252 - RNA, 19 nt, Human
ccccugcuucuccagccug

SEQ ID NO: 3615253 - RNA, 18 nt, Human
ccccuggaagagcccagu

SEQ ID NO: 3615254 - RNA, 18 nt, Human
ccccuggaagcagugccc

SEQ ID NO: 3615255 - RNA, 21 nt, Human
ccccuggaagcagugcccagg

SEQ ID NO: 3615256 - RNA, 21 nt, Human
ccccuggaggcugccucccaa

SEQ ID NO: 3615257 - RNA, 14 nt, Human
ccccuggcacuggc

SEQ ID NO: 3615258 - RNA, 21 nt, Human
ccccuggcagagaugccuccc

SEQ ID NO: 3615259 - RNA, 15 nt, Human
ccccuggcagccccu

SEQ ID NO: 3615260 - RNA, 12 nt, Human
ccccuggccucu

SEQ ID NO: 3615261 - RNA, 23 nt, Human
ccccuggcuguacugcucaggcu

SEQ ID NO: 3615262 - RNA, 18 nt, Human
ccccuggcuuuucacugc

SEQ ID NO: 3615263 - RNA, 11 nt, Human
ccccugggcuc

SEQ ID NO: 3615264 - RNA, 15 nt, Human
ccccugggcucugcc

SEQ ID NO: 3615265 - RNA, 21 nt, Human
ccccugggcucugccccagcu

SEQ ID NO: 3615266 - RNA, 16 nt, Human
ccccugggcuuggccu

SEQ ID NO: 3615267 - RNA, 14 nt, Human
ccccuggggaccca

SEQ ID NO: 3615268 - RNA, 20 nt, Human
ccccuggggcuucuccugac

SEQ ID NO: 3615269 - RNA, 20 nt, Human
ccccuggguggguggugggg

SEQ ID NO: 3615270 - RNA, 17 nt, Human
ccccuggucccucugca

SEQ ID NO: 3615271 - RNA, 15 nt, Human
ccccugguggacagu

SEQ ID NO: 3615272 - RNA, 19 nt, Human
ccccugguggacaguccug

SEQ ID NO: 3615273 - RNA, 20 nt, Human
ccccugguggacaguccugg

SEQ ID NO: 3615274 - RNA, 21 nt, Human
ccccugguggacaguccuggg

SEQ ID NO: 3615275 - RNA, 18 nt, Human
ccccugguucucaucuuu

SEQ ID NO: 3615276 - RNA, 16 nt, Human
ccccuguacacaacuc

SEQ ID NO: 3615277 - RNA, 15 nt, Human
ccccuguaggccuca

SEQ ID NO: 3615278 - RNA, 23 nt, Human
ccccugucuccuuauucggcagc

SEQ ID NO: 3615279 - RNA, 19 nt, Human
ccccugugcagccgcugag

SEQ ID NO: 3615280 - RNA, 18 nt, Human
ccccuguggggaucucag

SEQ ID NO: 3615281 - RNA, 21 nt, Human
ccccuguggggaucucagggg

SEQ ID NO: 3615282 - RNA, 24 nt, Human
ccccuguggggaucucaggggcug

SEQ ID NO: 3615283 - RNA, 20 nt, Human
ccccuguucuggcagaguug

SEQ ID NO: 3615284 - RNA, 19 nt, Human
ccccuguuuauucauaugc

SEQ ID NO: 3615285 - RNA, 16 nt, Human
ccccuuaagcccuggc

SEQ ID NO: 3615286 - RNA, 24 nt, Human
ccccuuagacagaggcccucaagu

SEQ ID NO: 3615287 - RNA, 16 nt, Human
ccccuuauccaggacu

SEQ ID NO: 3615288 - RNA, 19 nt, Human
ccccuucacuucugaccac

SEQ ID NO: 3615289 - RNA, 22 nt, Human
ccccuucacuucugaccacacu

SEQ ID NO: 3615290 - RNA, 14 nt, Human
ccccuucagugccc

SEQ ID NO: 3615291 - RNA, 16 nt, Human
ccccuucauccucuga

SEQ ID NO: 3615292 - RNA, 22 nt, Human
ccccuuccagaucacugccaca

SEQ ID NO: 3615293 - RNA, 13 nt, Human
ccccuuccccacu

SEQ ID NO: 3615294 - RNA, 21 nt, Human
ccccuuccccacugccugccc

SEQ ID NO: 3615295 - RNA, 23 nt, Human
ccccuuccccacugccugcccac

SEQ ID NO: 3615296 - RNA, 14 nt, Human
ccccuucccugcaa

SEQ ID NO: 3615297 - RNA, 13 nt, Human
ccccuucccuguc

SEQ ID NO: 3615298 - RNA, 21 nt, Human
ccccuuccuaauuccacagcu

SEQ ID NO: 3615299 - RNA, 19 nt, Human
ccccuuccucuugucugau

SEQ ID NO: 3615300 - RNA, 22 nt, Human
ccccuuccugucccaccucuuc

SEQ ID NO: 3615301 - RNA, 19 nt, Human
ccccuuccuugcucugcac

SEQ ID NO: 3615302 - RNA, 21 nt, Human
ccccuucuacacucuccuggg

SEQ ID NO: 3615303 - RNA, 22 nt, Human
ccccuucuagguggcaaggcug

SEQ ID NO: 3615304 - RNA, 14 nt, Human
ccccuucucagaau

SEQ ID NO: 3615305 - RNA, 15 nt, Human
ccccuucucaucacu

SEQ ID NO: 3615306 - RNA, 14 nt, Human
cccugcuccugcag

SEQ ID NO: 3615307 - RNA, 18 nt, Human
cccugcugagucaucugu

SEQ ID NO: 3615308 - RNA, 21 nt, Human
cccugcugagucccaggcuga

SEQ ID NO: 3615309 - RNA, 15 nt, Human
cccugcugcaggggc

SEQ ID NO: 3615310 - RNA, 16 nt, Human
cccugcugcaggggcu

SEQ ID NO: 3615311 - RNA, 13 nt, Human
cccugcugcccaa

SEQ ID NO: 3615312 - RNA, 19 nt, Human
cccugcugccgccucccag

SEQ ID NO: 3615313 - RNA, 22 nt, Human
cccugcugccgccucccagccu

SEQ ID NO: 3615314 - RNA, 23 nt, Human
cccugcugccgccucccagccug

SEQ ID NO: 3615315 - RNA, 11 nt, Human
cccugcugccu

SEQ ID NO: 3615316 - RNA, 17 nt, Human
cccugcugcugccugcc

SEQ ID NO: 3615317 - RNA, 13 nt, Human
cccugcugcuggu

SEQ ID NO: 3615318 - RNA, 16 nt, Human
cccugcugcuggugca

SEQ ID NO: 3615319 - RNA, 19 nt, Human
cccugcugcuggugcacag

SEQ ID NO: 3615320 - RNA, 19 nt, Human
cccugcugcugucaccucu

SEQ ID NO: 3615321 - RNA, 13 nt, Human
cccugcuggccgc

SEQ ID NO: 3615322 - RNA, 15 nt, Human
cccugcuggccgccu

SEQ ID NO: 3615323 - RNA, 19 nt, Human
cccugcugguucaggguug

SEQ ID NO: 3615324 - RNA, 13 nt, Human
cccugcugucccc

SEQ ID NO: 3615325 - RNA, 23 nt, Human
cccugcuguccccucuugcccca

SEQ ID NO: 3615326 - RNA, 22 nt, Human
cccugcuucagauguggagcca

SEQ ID NO: 3615327 - RNA, 14 nt, Human
cccugcuuccaccu

SEQ ID NO: 3615328 - RNA, 17 nt, Human
cccugcuuccaccucac

SEQ ID NO: 3615329 - RNA, 15 nt, Human
cccugcuuccaggaa

SEQ ID NO: 3615330 - RNA, 12 nt, Human
cccugcuucucc

SEQ ID NO: 3615331 - RNA, 14 nt, Human
cccugcuuggccca

SEQ ID NO: 3615332 - RNA, 17 nt, Human
cccugcuuugggcugcc

SEQ ID NO: 3615333 - RNA, 19 nt, Human
cccugcuuugggcugcccu

SEQ ID NO: 3615334 - RNA, 20 nt, Human
cccugcuuugggcugcccug

SEQ ID NO: 3615335 - RNA, 22 nt, Human
cccugcuuugggcugcccuggu

SEQ ID NO: 3615336 - RNA, 21 nt, Human
cccuggaaaccuuccacccag

SEQ ID NO: 3615337 - RNA, 19 nt, Human
cccuggaacauccuuugca

SEQ ID NO: 3615338 - RNA, 15 nt, Human
cccuggaacugucuc

SEQ ID NO: 3615339 - RNA, 18 nt, Human
cccuggaacugucucuca

SEQ ID NO: 3615340 - RNA, 15 nt, Human
cccuggaagagccca

SEQ ID NO: 3615341 - RNA, 16 nt, Human
cccuggaagagcccag

SEQ ID NO: 3615342 - RNA, 16 nt, Human
cccuggaagcagugcc

SEQ ID NO: 3615343 - RNA, 17 nt, Human
cccuggaagcagugccc

SEQ ID NO: 3615344 - RNA, 12 nt, Human
cccuggaagccg

SEQ ID NO: 3615345 - RNA, 18 nt, Human
cccuggaagccggcggcc

SEQ ID NO: 3615346 - RNA, 23 nt, Human
cccuggaccaguggucucacaug

SEQ ID NO: 3615347 - RNA, 16 nt, Human
cccuggacccagccag

SEQ ID NO: 3615348 - RNA, 14 nt, Human
cccuggaccccagc

SEQ ID NO: 3615349 - RNA, 18 nt, Human
cccuggaccccagccuca

SEQ ID NO: 3615350 - RNA, 13 nt, Human
cccuggagagaag

SEQ ID NO: 3615351 - RNA, 20 nt, Human
cccuggagccaacugcugcu

SEQ ID NO: 3615352 - RNA, 14 nt, Human
cccuggagccagac

SEQ ID NO: 3615353 - RNA, 18 nt, Human
cccuggagccuccacugc

SEQ ID NO: 3615354 - RNA, 15 nt, Human
cccuggaggcaccug

SEQ ID NO: 3615355 - RNA, 12 nt, Human
cccuggaggcgg

SEQ ID NO: 3615356 - RNA, 15 nt, Human
cccuggaggcugccu

SEQ ID NO: 3615357 - RNA, 16 nt, Human
cccuggaggcugccuc

SEQ ID NO: 3615358 - RNA, 17 nt, Human
cccuggaggcugccucc

SEQ ID NO: 3615359 - RNA, 19 nt, Human
cccuggaggcugccuccca

SEQ ID NO: 3615360 - RNA, 13 nt, Human
cccuggaggugcc

SEQ ID NO: 3615361 - RNA, 14 nt, Human
cccuggaggugcca

SEQ ID NO: 3615362 - RNA, 16 nt, Human
cccuggaggugccagc

SEQ ID NO: 3615363 - RNA, 17 nt, Human
cccuggaggugccagca

SEQ ID NO: 3615364 - RNA, 23 nt, Human
cccuggaggugccagcaaagccc

SEQ ID NO: 3615365 - RNA, 21 nt, Human
cccuggaguguggcugaggag

SEQ ID NO: 3615366 - RNA, 16 nt, Human
cccuggaucagcgugg

SEQ ID NO: 3615367 - RNA, 21 nt, Human
cccuggaucagcguggccuug

SEQ ID NO: 3615368 - RNA, 19 nt, Human
cccuggaucuaccuggagg

SEQ ID NO: 3615369 - RNA, 20 nt, Human
cccuggaucuaccuggaggg

SEQ ID NO: 3615370 - RNA, 13 nt, Human
cccuggaugcagc

SEQ ID NO: 3615371 - RNA, 17 nt, Human
cccuggaugcagccuca

SEQ ID NO: 3615372 - RNA, 21 nt, Human
cccuggaugcagccucacagu

SEQ ID NO: 3615373 - RNA, 16 nt, Human
cccuggaugcccagga

SEQ ID NO: 3615374 - RNA, 13 nt, Human
cccuggcacuggc

SEQ ID NO: 3615375 - RNA, 12 nt, Human
cccuggcagaga

SEQ ID NO: 3615376 - RNA, 22 nt, Human
cccuggcagagaugccucccug

SEQ ID NO: 3615377 - RNA, 12 nt, Human
cccuggcagccc

SEQ ID NO: 3615378 - RNA, 20 nt, Human
cccuggcaggaugacccugc

SEQ ID NO: 3615379 - RNA, 14 nt, Human
cccuggccagaggc

SEQ ID NO: 3615380 - RNA, 15 nt, Human
cccuggccagaggcu

SEQ ID NO: 3615381 - RNA, 21 nt, Human
cccuggcccccucccuggaug

SEQ ID NO: 3615382 - RNA, 16 nt, Human
cccuggcccccugagu

SEQ ID NO: 3615383 - RNA, 18 nt, Human
cccuggccccucucccuu

SEQ ID NO: 3615384 - RNA, 20 nt, Human
cccuggcccucaaggccucc

SEQ ID NO: 3615385 - RNA, 14 nt, Human
cccuggcccugagg

SEQ ID NO: 3615386 - RNA, 20 nt, Human
cccuggccgcgcuccgggcu

SEQ ID NO: 3615387 - RNA, 16 nt, Human
cccuggccuagaccag

SEQ ID NO: 3615388 - RNA, 11 nt, Human
cccuggccucc

SEQ ID NO: 3615389 - RNA, 13 nt, Human
cccuggccucccc

SEQ ID NO: 3615390 - RNA, 21 nt, Human
cccuggccucugugccuucuu

SEQ ID NO: 3615391 - RNA, 11 nt, Human
cccuggccuga

SEQ ID NO: 3615392 - RNA, 22 nt, Human
cccuggccugcugggcucucca

SEQ ID NO: 3615393 - RNA, 15 nt, Human
cccuggcucccauga

SEQ ID NO: 3615394 - RNA, 18 nt, Human
cccuggcucccuccucca

SEQ ID NO: 3615395 - RNA, 20 nt, Human
cccuggcuccuugugccaga

SEQ ID NO: 3615396 - RNA, 22 nt, Human
cccuggcuccuugugccagaga

SEQ ID NO: 3615397 - RNA, 15 nt, Human
cccuggcugaaggac

SEQ ID NO: 3615398 - RNA, 19 nt, Human
cccuggcugaccccaaaga

SEQ ID NO: 3615399 - RNA, 17 nt, Human
cccuggcugagggcagc

SEQ ID NO: 3615400 - RNA, 16 nt, Human
cccuggcugcccuggc

SEQ ID NO: 3615401 - RNA, 22 nt, Human
cccuggcugcugcccccacccc

SEQ ID NO: 3615402 - RNA, 15 nt, Human
cccuggcuguacugc

SEQ ID NO: 3615403 - RNA, 17 nt, Human
cccuggcuguacugcuc

SEQ ID NO: 3615404 - RNA, 21 nt, Human
cccuggcuguacugcucaggc

SEQ ID NO: 3615405 - RNA, 22 nt, Human
cccuggcuguucugugguuccu

SEQ ID NO: 3615406 - RNA, 14 nt, Human
cccuggcuuccuua

SEQ ID NO: 3615407 - RNA, 15 nt, Human
cccuggcuucugugg

SEQ ID NO: 3615408 - RNA, 17 nt, Human
cccuggcuucugugggg

SEQ ID NO: 3615409 - RNA, 22 nt, Human
cccuggcuucuguggggccccu

SEQ ID NO: 3615410 - RNA, 20 nt, Human
cccuggcuuguaacuccacc

SEQ ID NO: 3615411 - RNA, 24 nt, Human
cccuggcuuucauuuucucucagg

SEQ ID NO: 3615412 - RNA, 17 nt, Human
cccuggcuuuucacugc

SEQ ID NO: 3615413 - RNA, 17 nt, Human
ccgggcccucccuugga

SEQ ID NO: 3615414 - RNA, 15 nt, Human
ccgggcccugaguaa

SEQ ID NO: 3615415 - RNA, 15 nt, Human
ccgggcgcggccagc

SEQ ID NO: 3615416 - RNA, 21 nt, Human
ccgggcgcgguggcgggcacc

SEQ ID NO: 3615417 - RNA, 16 nt, Human
ccgggcguggugguga

SEQ ID NO: 3615418 - RNA, 22 nt, Human
ccgggcucagggaccacagcaa

SEQ ID NO: 3615419 - RNA, 22 nt, Human
ccgggcuccccuuucgcccaca

SEQ ID NO: 3615420 - RNA, 15 nt, Human
ccgggcugagggccu

SEQ ID NO: 3615421 - RNA, 18 nt, Human
ccgggcugagggccugcu

SEQ ID NO: 3615422 - RNA, 21 nt, Human
ccgggcugagggccugcugga

SEQ ID NO: 3615423 - RNA, 17 nt, Human
ccgggcugccugggcug

SEQ ID NO: 3615424 - RNA, 13 nt, Human
ccgggcugggagc

SEQ ID NO: 3615425 - RNA, 18 nt, Human
ccgggcugggagcucugc

SEQ ID NO: 3615426 - RNA, 16 nt, Human
ccggggaacuggccaa

SEQ ID NO: 3615427 - RNA, 17 nt, Human
ccggggaacuggccaag

SEQ ID NO: 3615428 - RNA, 21 nt, Human
ccggggaagagauccaaagac

SEQ ID NO: 3615429 - RNA, 23 nt, Human
ccggggcagcagcagcccugccc

SEQ ID NO: 3615430 - RNA, 20 nt, Human
ccggggcagcugccagagaa

SEQ ID NO: 3615431 - RNA, 14 nt, Human
ccggggcagggcag

SEQ ID NO: 3615432 - RNA, 16 nt, Human
ccggggcagggcagcc

SEQ ID NO: 3615433 - RNA, 17 nt, Human
ccggggccugccuagca

SEQ ID NO: 3615434 - RNA, 15 nt, Human
ccggggccugggcag

SEQ ID NO: 3615435 - RNA, 12 nt, Human
ccgggguccugu

SEQ ID NO: 3615436 - RNA, 21 nt, Human
ccgggguggagcaugggccug

SEQ ID NO: 3615437 - RNA, 18 nt, Human
ccggggugggguggcugc

SEQ ID NO: 3615438 - RNA, 22 nt, Human
ccgggucaucuguaccucugcc

SEQ ID NO: 3615439 - RNA, 13 nt, Human
ccgggucuuccua

SEQ ID NO: 3615440 - RNA, 20 nt, Human
ccgggugggcggcacagccu

SEQ ID NO: 3615441 - RNA, 20 nt, Human
ccggguuuggcgggccaagg

SEQ ID NO: 3615442 - RNA, 21 nt, Human
ccggguuuggcgggccaagga

SEQ ID NO: 3615443 - RNA, 19 nt, Human
ccgguaacuguccuguccu

SEQ ID NO: 3615444 - RNA, 18 nt, Human
ccgguagggaggcagccu

SEQ ID NO: 3615445 - RNA, 15 nt, Human
ccgguccagcuggcc

SEQ ID NO: 3615446 - RNA, 22 nt, Human
ccggucccuugagaccucagcc

SEQ ID NO: 3615447 - RNA, 16 nt, Human
ccgguggcugggcaga

SEQ ID NO: 3615448 - RNA, 21 nt, Human
ccggugugccugacugcccag

SEQ ID NO: 3615449 - RNA, 16 nt, Human
ccggugugccugcagc

SEQ ID NO: 3615450 - RNA, 14 nt, Human
ccgguguucuaaga

SEQ ID NO: 3615451 - RNA, 21 nt, Human
cccuggggcugaucucaggga

SEQ ID NO: 3615452 - RNA, 18 nt, Human
cccuggggcuucuccuga

SEQ ID NO: 3615453 - RNA, 19 nt, Human
cccugggggaagcccugga

SEQ ID NO: 3615454 - RNA, 21 nt, Human
cccuggggugcaggcgccuca

SEQ ID NO: 3615455 - RNA, 17 nt, Human
cccugggguggccacca

SEQ ID NO: 3615456 - RNA, 16 nt, Human
cccuggguggguggug

SEQ ID NO: 3615457 - RNA, 18 nt, Human
cccuggguuagacugcca

SEQ ID NO: 3615458 - RNA, 19 nt, Human
cccuggguuagacugccag

SEQ ID NO: 3615459 - RNA, 21 nt, Human
cccuggguuagacugccagcu

SEQ ID NO: 3615460 - RNA, 20 nt, Human
cccugguaagaaaaagcaaa

SEQ ID NO: 3615461 - RNA, 15 nt, Human
cccugguagggcagu

SEQ ID NO: 3615462 - RNA, 22 nt, Human
cccuggucccucugcagucucu

SEQ ID NO: 3615463 - RNA, 15 nt, Human
cccugguccugaggg

SEQ ID NO: 3615464 - RNA, 13 nt, Human
cccuggucucugg

SEQ ID NO: 3615465 - RNA, 14 nt, Human
cccuggucucuggu

SEQ ID NO: 3615466 - RNA, 14 nt, Human
cccuggugaggaag

SEQ ID NO: 3615467 - RNA, 21 nt, Human
cccuggugcacuggccccacc

SEQ ID NO: 3615468 - RNA, 16 nt, Human
cccuggugcugccaca

SEQ ID NO: 3615469 - RNA, 17 nt, Human
cccuggugcugccacac

SEQ ID NO: 3615470 - RNA, 20 nt, Human
cccugguggacaguccuggg

SEQ ID NO: 3615471 - RNA, 20 nt, Human
cccugguggagaaagcacug

SEQ ID NO: 3615472 - RNA, 23 nt, Human
cccugguggagaaagcacugacc

SEQ ID NO: 3615473 - RNA, 21 nt, Human
cccugguggcagcucaccucu

SEQ ID NO: 3615474 - RNA, 13 nt, Human
cccugguggcagu

SEQ ID NO: 3615475 - RNA, 14 nt, Human
cccugguggcagug

SEQ ID NO: 3615476 - RNA, 16 nt, Human
cccugguggcaguggg

SEQ ID NO: 3615477 - RNA, 19 nt, Human
cccugguggcagugggagc

SEQ ID NO: 3615478 - RNA, 21 nt, Human
cccugguggcagugggagcug

SEQ ID NO: 3615479 - RNA, 20 nt, Human
cccugguggcccucuccccu

SEQ ID NO: 3615480 - RNA, 21 nt, Human
cccugguggcccucuccccug

SEQ ID NO: 3615481 - RNA, 12 nt, Human
cccugguguuuc

SEQ ID NO: 3615482 - RNA, 19 nt, Human
cccugguuauauucucacg

SEQ ID NO: 3615483 - RNA, 15 nt, Human
cccugguucucaucu

SEQ ID NO: 3615484 - RNA, 20 nt, Human
cccugguuggguggcaauuc

SEQ ID NO: 3615485 - RNA, 16 nt, Human
cccugguuuccugccc

SEQ ID NO: 3615486 - RNA, 18 nt, Human
cccugguuuccugcccug

SEQ ID NO: 3615487 - RNA, 21 nt, Human
cccugguuuccugcccuggga

SEQ ID NO: 3615488 - RNA, 22 nt, Human
cccugguuuccugcccugggag

SEQ ID NO: 3615489 - RNA, 17 nt, Human
cccuguacaauauuuaa

SEQ ID NO: 3615490 - RNA, 13 nt, Human
cccuguacagugu

SEQ ID NO: 3615491 - RNA, 15 nt, Human
cccuguacaguguua

SEQ ID NO: 3615492 - RNA, 20 nt, Human
cccuguacaguguuaccauc

SEQ ID NO: 3615493 - RNA, 17 nt, Human
cccuguaccucauccca

SEQ ID NO: 3615494 - RNA, 19 nt, Human
cccuguaccuuuugaggag

SEQ ID NO: 3615495 - RNA, 18 nt, Human
cccuguacuguucugugu

SEQ ID NO: 3615496 - RNA, 21 nt, Human
cccuguagagugggagcugag

SEQ ID NO: 3615497 - RNA, 17 nt, Human
cccuguauauagcccag

SEQ ID NO: 3615498 - RNA, 14 nt, Human
cccuguauggcacu

SEQ ID NO: 3615499 - RNA, 15 nt, Human
cccugucccaccccc

SEQ ID NO: 3615500 - RNA, 22 nt, Human
cccugucccacccccuuccccc

SEQ ID NO: 3615501 - RNA, 21 nt, Human
cccugucccaugcaggcccuu

SEQ ID NO: 3615502 - RNA, 16 nt, Human
cccugucccccagcuc

SEQ ID NO: 3615503 - RNA, 18 nt, Human
cccuguccccucagcucc

SEQ ID NO: 3615504 - RNA, 19 nt, Human
cccuguccccucagcucca

SEQ ID NO: 3615505 - RNA, 20 nt, Human
cccuguccccucccccuucc

SEQ ID NO: 3615506 - RNA, 21 nt, Human
cccugucccucccaccucugu

SEQ ID NO: 3615507 - RNA, 21 nt, Human
cccuguccggaaugccaccca

SEQ ID NO: 3615508 - RNA, 22 nt, Human
cccuguccugauggucagcucc

SEQ ID NO: 3615509 - RNA, 14 nt, Human
cccuguccuggugg

SEQ ID NO: 3615510 - RNA, 23 nt, Human
cccuguccuggugguauuuucaa

SEQ ID NO: 3615511 - RNA, 23 nt, Human
cccugucgaguucggcucugggu

SEQ ID NO: 3615512 - RNA, 13 nt, Human
cccugucuaauga

SEQ ID NO: 3615513 - RNA, 16 nt, Human
cccugucuagagaggg

SEQ ID NO: 3615514 - RNA, 19 nt, Human
cccugucuccucucucugu

SEQ ID NO: 3615515 - RNA, 23 nt, Human
cccugucugaaggacacuuccug

SEQ ID NO: 3615516 - RNA, 23 nt, Human
cccugucuguagagggcccuggu

SEQ ID NO: 3615517 - RNA, 18 nt, Human
cccugugacauggugccu

SEQ ID NO: 3615518 - RNA, 20 nt, Human
cccugugacauggugccuga

SEQ ID NO: 3615519 - RNA, 21 nt, Human
cccugugacauggugccugag

SEQ ID NO: 3615520 - RNA, 22 nt, Human
cccugugauggggcccugccuc

SEQ ID NO: 3615521 - RNA, 23 nt, Human
cccugugauggggcccugccucc

SEQ ID NO: 3615522 - RNA, 22 nt, Human
cccugugcagccgcugagcgag

SEQ ID NO: 3615523 - RNA, 15 nt, Human
cccugugccuuguca

SEQ ID NO: 3615524 - RNA, 17 nt, Human
cccugugcuccgugccu

SEQ ID NO: 3615525 - RNA, 18 nt, Human
cccuguggaagggacuag

SEQ ID NO: 3615526 - RNA, 21 nt, Human
cccuguggaagggacuaggag

SEQ ID NO: 3615527 - RNA, 20 nt, Human
cccuguggaugagcccucag

SEQ ID NO: 3615528 - RNA, 21 nt, Human
cccuguggaugagcccucaga

SEQ ID NO: 3615529 - RNA, 22 nt, Human
cccuguggaugagcccucagaa

SEQ ID NO: 3615530 - RNA, 23 nt, Human
cccuguggaugagcccucagaac

SEQ ID NO: 3615531 - RNA, 18 nt, Human
cccugugggaccccaggc

SEQ ID NO: 3615532 - RNA, 20 nt, Human
cccuguggggaucucagggg

SEQ ID NO: 3615533 - RNA, 23 nt, Human
cccuguggggaucucaggggcug

SEQ ID NO: 3615534 - RNA, 22 nt, Human
cccugugguuuccaaggagcug

SEQ ID NO: 3615535 - RNA, 11 nt, Human
cccugugugca

SEQ ID NO: 3615536 - RNA, 13 nt, Human
cccugugugcagg

SEQ ID NO: 3615537 - RNA, 13 nt, Human
cccuguguuaauu

SEQ ID NO: 3615538 - RNA, 12 nt, Human
cccuguucauug

SEQ ID NO: 3615539 - RNA, 13 nt, Human
cccuguucauugu

SEQ ID NO: 3615540 - RNA, 17 nt, Human
cccuguuccugcugcug

SEQ ID NO: 3615541 - RNA, 22 nt, Human
cccuguugaauuuuguucucug

SEQ ID NO: 3615542 - RNA, 13 nt, Human
cccuguugugcca

SEQ ID NO: 3615543 - RNA, 11 nt, Human
cccuguuuaau

SEQ ID NO: 3615544 - RNA, 14 nt, Human
cccuguuuaauauu

SEQ ID NO: 3615545 - RNA, 21 nt, Human
cccuguuuaauauuuaaacag

SEQ ID NO: 3615546 - RNA, 16 nt, Human
cccuguuucagaggcu

SEQ ID NO: 3615547 - RNA, 20 nt, Human
cccuguuuuccccccaaggg

SEQ ID NO: 3615548 - RNA, 15 nt, Human
cccuguuuucugagc

SEQ ID NO: 3615549 - RNA, 14 nt, Human
cccuuaaaauagaa

SEQ ID NO: 3615550 - RNA, 14 nt, Human
cccuuaacccaagg

SEQ ID NO: 3615551 - RNA, 16 nt, Human
cccuuaacccaaggag

SEQ ID NO: 3615552 - RNA, 15 nt, Human
cccuuaagcccuggc

SEQ ID NO: 3615553 - RNA, 17 nt, Human
cccuuaagcccuggccc

SEQ ID NO: 3615554 - RNA, 20 nt, Human
cccuuaagucacccuagccc

SEQ ID NO: 3615555 - RNA, 19 nt, Human
cccuuaauuacuuaaaaaa

SEQ ID NO: 3615556 - RNA, 17 nt, Human
cccuuacagccucugac

SEQ ID NO: 3615557 - RNA, 14 nt, Human
cccuuacaguagga

SEQ ID NO: 3615558 - RNA, 21 nt, Human
cccuuaccacugcucugauga

SEQ ID NO: 3615559 - RNA, 20 nt, Human
cccuuaccaugugccugauc

SEQ ID NO: 3615560 - RNA, 23 nt, Human
cccuuaccugccaggaagccagc

SEQ ID NO: 3615561 - RNA, 17 nt, Human
cccuuacgugaguccug

SEQ ID NO: 3615562 - RNA, 20 nt, Human
cccuuagaaguuuguuguga

SEQ ID NO: 3615563 - RNA, 19 nt, Human
cccuuagcccccacccacu

SEQ ID NO: 3615564 - RNA, 21 nt, Human
cccuuagcccccacccacuuc

SEQ ID NO: 3615565 - RNA, 12 nt, Human
cccuuagucccc

SEQ ID NO: 3615566 - RNA, 18 nt, Human
cccuuagucccccaacuc

SEQ ID NO: 3615567 - RNA, 12 nt, Human
cccuuauccagg

SEQ ID NO: 3615568 - RNA, 16 nt, Human
cccuuauccaggacuc

SEQ ID NO: 3615569 - RNA, 16 nt, Human
cccuuaucugugcuca

SEQ ID NO: 3615570 - RNA, 20 nt, Human
cccuuaucugugcucaggac

SEQ ID NO: 3615571 - RNA, 12 nt, Human
cccuuauuuuca

SEQ ID NO: 3615572 - RNA, 14 nt, Human
cccuucaaccauuc

SEQ ID NO: 3615573 - RNA, 20 nt, Human
cccuucacaaagcccaaggg

SEQ ID NO: 3615574 - RNA, 18 nt, Human
cccuucacugccuuugcu

SEQ ID NO: 3615575 - RNA, 17 nt, Human
cccuucacuucugacca

SEQ ID NO: 3615576 - RNA, 17 nt, Human
cagggaagagcagaacg

SEQ ID NO: 3615577 - RNA, 14 nt, Human
cagggaagaggggu

SEQ ID NO: 3615578 - RNA, 15 nt, Human
cagggaagcuacagg

SEQ ID NO: 3615579 - RNA, 22 nt, Human
cagggaagcuacagguuacaac

SEQ ID NO: 3615580 - RNA, 13 nt, Human
cagggaagcuggc

SEQ ID NO: 3615581 - RNA, 17 nt, Human
cagggaagcuggccgag

SEQ ID NO: 3615582 - RNA, 18 nt, Human
cagggaaggaggagccug

SEQ ID NO: 3615583 - RNA, 20 nt, Human
cagggaaggaggagccuguc

SEQ ID NO: 3615584 - RNA, 19 nt, Human
cagggaaggggaggcagcc

SEQ ID NO: 3615585 - RNA, 18 nt, Human
cagggaagggggagcugg

SEQ ID NO: 3615586 - RNA, 17 nt, Human
cagggaaguccccaggc

SEQ ID NO: 3615587 - RNA, 18 nt, Human
cagggaaguccccaggcc

SEQ ID NO: 3615588 - RNA, 17 nt, Human
cagggaagugcucugau

SEQ ID NO: 3615589 - RNA, 23 nt, Human
cagggaauccaagccuccacagc

SEQ ID NO: 3615590 - RNA, 18 nt, Human
cagggaauuaggccccca

SEQ ID NO: 3615591 - RNA, 13 nt, Human
cagggacaaagag

SEQ ID NO: 3615592 - RNA, 23 nt, Human
cagggacaaagaggccuuuaacc

SEQ ID NO: 3615593 - RNA, 15 nt, Human
cagggacaccagcca

SEQ ID NO: 3615594 - RNA, 19 nt, Human
ccucuguaccccaugaccu

SEQ ID NO: 3615595 - RNA, 23 nt, Human
ccucuguauuugaaucagccuac

SEQ ID NO: 3615596 - RNA, 19 nt, Human
ccucugucacugcaggcac

SEQ ID NO: 3615597 - RNA, 16 nt, Human
ccucugucagucacag

SEQ ID NO: 3615598 - RNA, 21 nt, Human
ccucugucagucacagccacc

SEQ ID NO: 3615599 - RNA, 16 nt, Human
ccucugucauuuguug

SEQ ID NO: 3615600 - RNA, 15 nt, Human
ccucuguccaggcac

SEQ ID NO: 3615601 - RNA, 18 nt, Human
ccucuguccagggcccug

SEQ ID NO: 3615602 - RNA, 21 nt, Human
ccucuguccagggcccugagc

SEQ ID NO: 3615603 - RNA, 17 nt, Human
ccucuguccccuucucu

SEQ ID NO: 3615604 - RNA, 13 nt, Human
ccucuguccugac

SEQ ID NO: 3615605 - RNA, 14 nt, Human
ccucuguccugacu

SEQ ID NO: 3615606 - RNA, 16 nt, Human
ccucuguccugacuuc

SEQ ID NO: 3615607 - RNA, 18 nt, Human
ccucuguccugcuucuga

SEQ ID NO: 3615608 - RNA, 16 nt, Human
ccucugucuagcaugc

SEQ ID NO: 3615609 - RNA, 18 nt, Human
ccucugucucauccuccu

SEQ ID NO: 3615610 - RNA, 22 nt, Human
ccucugucucauccuccuggaa

SEQ ID NO: 3615611 - RNA, 16 nt, Human
ccucugucugcccuuc

SEQ ID NO: 3615612 - RNA, 14 nt, Human
ccucugucuggcaa

SEQ ID NO: 3615613 - RNA, 22 nt, Human
ccucugucuuggcuuucauguu

SEQ ID NO: 3615614 - RNA, 22 nt, Human
ccucugucuugugaaggcaggg

SEQ ID NO: 3615615 - RNA, 15 nt, Human
ccucugugaccucag

SEQ ID NO: 3615616 - RNA, 23 nt, Human
ccucuguggcauugaaaugagca

SEQ ID NO: 3615617 - RNA, 16 nt, Human
ccucugugucacuggc

SEQ ID NO: 3615618 - RNA, 23 nt, Human
ccucugugucacuggcugccucc

SEQ ID NO: 3615619 - RNA, 19 nt, Human
ccucugugugcuccuccuu

SEQ ID NO: 3615620 - RNA, 16 nt, Human
ccucuguucaaagcug

SEQ ID NO: 3615621 - RNA, 18 nt, Human
ccucuguucaaagcugcc

SEQ ID NO: 3615622 - RNA, 21 nt, Human
ccucuguucugcacacagcac

SEQ ID NO: 3615623 - RNA, 23 nt, Human
ccucuguuguccuccccuugggc

SEQ ID NO: 3615624 - RNA, 19 nt, Human
ccucuuaaaaaauaaaaac

SEQ ID NO: 3615625 - RNA, 19 nt, Human
ccucuuaaagaaaacccac

SEQ ID NO: 3615626 - RNA, 21 nt, Human
ccucuuaaagaaaacccaccc

SEQ ID NO: 3615627 - RNA, 19 nt, Human
ccucuuacgguaguuagga

SEQ ID NO: 3615628 - RNA, 22 nt, Human
ccucuucaccccggcaggcccu

SEQ ID NO: 3615629 - RNA, 23 nt, Human
ccucuucaccccggcaggcccug

SEQ ID NO: 3615630 - RNA, 13 nt, Human
ccucuucacuccc

SEQ ID NO: 3615631 - RNA, 14 nt, Human
ccucuucagaggcc

SEQ ID NO: 3615632 - RNA, 16 nt, Human
ccucuuccaugcugug

SEQ ID NO: 3615633 - RNA, 11 nt, Human
ccucuucccca

SEQ ID NO: 3615634 - RNA, 12 nt, Human
ccucuuccccag

SEQ ID NO: 3615635 - RNA, 13 nt, Human
ccucuuccccaga

SEQ ID NO: 3615636 - RNA, 21 nt, Human
ccucuuccccagacgccuggc

SEQ ID NO: 3615637 - RNA, 15 nt, Human
ccucuucccccaaga

SEQ ID NO: 3615638 - RNA, 15 nt, Human
ccucuuccccuugcc

SEQ ID NO: 3615639 - RNA, 17 nt, Human
ccucuuccgacucuuuc

SEQ ID NO: 3615640 - RNA, 19 nt, Human
ccucuuccggagauguagc

SEQ ID NO: 3615641 - RNA, 19 nt, Human
ccucuuccuacuggucucu

SEQ ID NO: 3615642 - RNA, 19 nt, Human
ccucuuccucccucauucc

SEQ ID NO: 3615643 - RNA, 22 nt, Human
ccucuuccucugaggcuggauc

SEQ ID NO: 3615644 - RNA, 21 nt, Human
ccucuuccugugauccaccca

SEQ ID NO: 3615645 - RNA, 15 nt, Human
ccucuuccuuuagga

SEQ ID NO: 3615646 - RNA, 15 nt, Human
ccucuucggcccuca

SEQ ID NO: 3615647 - RNA, 16 nt, Human
ccucuucucaagugcc

SEQ ID NO: 3615648 - RNA, 18 nt, Human
ccucuucucaagugccuu

SEQ ID NO: 3615649 - RNA, 15 nt, Human
ccucuucucucagac

SEQ ID NO: 3615650 - RNA, 18 nt, Human
ccucuucugacgugccuu

SEQ ID NO: 3615651 - RNA, 20 nt, Human
ccucuucugacgugccuuuu

SEQ ID NO: 3615652 - RNA, 18 nt, Human
ccucuucugggagggcag

SEQ ID NO: 3615653 - RNA, 15 nt, Human
ccucuucuucuucag

SEQ ID NO: 3615654 - RNA, 17 nt, Human
ccucuucuucuucagaa

SEQ ID NO: 3615655 - RNA, 21 nt, Human
ccucuucuuucagacuugcca

SEQ ID NO: 3615656 - RNA, 23 nt, Human
ccucuucuuucagacuugccaug

SEQ ID NO: 3615657 - RNA, 13 nt, Human
ccucuugaccagg

SEQ ID NO: 3615658 - RNA, 20 nt, Human
ccucuugaccaggcugccuc

SEQ ID NO: 3615659 - RNA, 15 nt, Human
ccucuugacccugca

SEQ ID NO: 3615660 - RNA, 16 nt, Human
ccucuugagcaguggc

SEQ ID NO: 3615661 - RNA, 24 nt, Human
ccucuugagcaguggcugguccag

SEQ ID NO: 3615662 - RNA, 14 nt, Human
ccucuugcauuuca

SEQ ID NO: 3615663 - RNA, 22 nt, Human
ccucuugccacugccucuuccu

SEQ ID NO: 3615664 - RNA, 23 nt, Human
ccucuugccccaacccccagcac

SEQ ID NO: 3615665 - RNA, 21 nt, Human
ccucuugccccccaccccagc

SEQ ID NO: 3615666 - RNA, 16 nt, Human
ccucuugccuccugga

SEQ ID NO: 3615667 - RNA, 17 nt, Human
ccucuugcggucccuuc

SEQ ID NO: 3615668 - RNA, 12 nt, Human
ccucuugcuguc

SEQ ID NO: 3615669 - RNA, 13 nt, Human
ccucuugcugucu

SEQ ID NO: 3615670 - RNA, 15 nt, Human
ccucuugcugucucu

SEQ ID NO: 3615671 - RNA, 18 nt, Human
ccucuugcugucucugcu

SEQ ID NO: 3615672 - RNA, 19 nt, Human
ccucuugcugucucugcuc

SEQ ID NO: 3615673 - RNA, 20 nt, Human
ccucuugcugucucugcucg

SEQ ID NO: 3615674 - RNA, 23 nt, Human
ccucuugcugucucugcucgccc

SEQ ID NO: 3615675 - RNA, 21 nt, Human
ccucuuggaccucugcucuga

SEQ ID NO: 3615676 - RNA, 19 nt, Human
ccucuuggagaagucucag

SEQ ID NO: 3615677 - RNA, 21 nt, Human
ccucuuggucuucccaggcug

SEQ ID NO: 3615678 - RNA, 17 nt, Human
ccucuuguaaagacugg

SEQ ID NO: 3615679 - RNA, 13 nt, Human
ccucuugucuccc

SEQ ID NO: 3615680 - RNA, 14 nt, Human
ccucuugucugauu

SEQ ID NO: 3615681 - RNA, 12 nt, Human
ccucuuguuuug

SEQ ID NO: 3615682 - RNA, 18 nt, Human
ccucuuuaaaacaaaaca

SEQ ID NO: 3615683 - RNA, 23 nt, Human
ccucuuucaagcagucgugccug

SEQ ID NO: 3615684 - RNA, 21 nt, Human
ccucuuucagaaaacagaaaa

SEQ ID NO: 3615685 - RNA, 18 nt, Human
ccucuuucagcuccugac

SEQ ID NO: 3615686 - RNA, 11 nt, Human
ccucuuucagu

SEQ ID NO: 3615687 - RNA, 21 nt, Human
ccucuuucucuuucuuccuuu

SEQ ID NO: 3615688 - RNA, 15 nt, Human
ccucuuucuuauaau

SEQ ID NO: 3615689 - RNA, 17 nt, Human
ccucuuucuucccauga

SEQ ID NO: 3615690 - RNA, 16 nt, Human
ccucuuugagugaagc

SEQ ID NO: 3615691 - RNA, 14 nt, Human
ccucuuugcugcag

SEQ ID NO: 3615692 - RNA, 13 nt, Human
ccucuuugcuuug

SEQ ID NO: 3615693 - RNA, 15 nt, Human
ccucuuugcuuugcu

SEQ ID NO: 3615694 - RNA, 20 nt, Human
ccucuuuggcuccccuguac

SEQ ID NO: 3615695 - RNA, 15 nt, Human
ccucuuuguuuuguu

SEQ ID NO: 3615696 - RNA, 19 nt, Human
ccucuuuguuuuguuuuaa

SEQ ID NO: 3615697 - RNA, 17 nt, Human
ccucuuuuccuucccaa

SEQ ID NO: 3615698 - RNA, 20 nt, Human
ccucuuuucuuacuccuccu

SEQ ID NO: 3615699 - RNA, 18 nt, Human
ccucuuuuguuguuucuu

SEQ ID NO: 3615700 - RNA, 18 nt, Human
ccugaaaacacugugcac

SEQ ID NO: 3615701 - RNA, 16 nt, Human
ccugaaaacccagaga

SEQ ID NO: 3615702 - RNA, 22 nt, Human
ccugaaaaguaacuuggcuuuc

SEQ ID NO: 3615703 - RNA, 23 nt, Human
ccugaaaauguuuuucugccagg

SEQ ID NO: 3615704 - RNA, 20 nt, Human
ccugaaaccuaguacugccc

SEQ ID NO: 3615705 - RNA, 17 nt, Human
ccugaaacgcuccuuug

SEQ ID NO: 3615706 - RNA, 21 nt, Human
ccugaaacgcuccuuugugug

SEQ ID NO: 3615707 - RNA, 22 nt, Human
ccugaaacuuauuuuuuucuga

SEQ ID NO: 3615708 - RNA, 14 nt, Human
ccugaaagcccuga

SEQ ID NO: 3615709 - RNA, 17 nt, Human
ccugaaauccugguucc

SEQ ID NO: 3615710 - RNA, 19 nt, Human
ccugaaaugugugugaugu

SEQ ID NO: 3615711 - RNA, 13 nt, Human
ccugaaauuccaa

SEQ ID NO: 3615712 - RNA, 14 nt, Human
ccugaaauuccaaa

SEQ ID NO: 3615713 - RNA, 14 nt, Human
ccugaaauuucaga

SEQ ID NO: 3615714 - RNA, 17 nt, Human
ccugaacaacgagccuu

SEQ ID NO: 3615715 - RNA, 15 nt, Human
ccugaacaagaauug

SEQ ID NO: 3615716 - RNA, 17 nt, Human
ccugaacaagaauugga

SEQ ID NO: 3615717 - RNA, 21 nt, Human
ccugaacaagaauuggaagcu

SEQ ID NO: 3615718 - RNA, 18 nt, Human
ccugaacacuuauugcuu

SEQ ID NO: 3615719 - RNA, 16 nt, Human
ccugaaccccagggcu

SEQ ID NO: 3615720 - RNA, 21 nt, Human
ccugaaccgcacagcucagga

SEQ ID NO: 3615721 - RNA, 13 nt, Human
ccugaagaaccag

SEQ ID NO: 3615722 - RNA, 21 nt, Human
ccugaagacucauucuucugu

SEQ ID NO: 3615723 - RNA, 19 nt, Human
ccugaagagaagggcaggg

SEQ ID NO: 3615724 - RNA, 17 nt, Human
ccugaagaggcgggcca

SEQ ID NO: 3615725 - RNA, 19 nt, Human
ccugaagaggcgggccagc

SEQ ID NO: 3615726 - RNA, 16 nt, Human
ccugaagccagccuuc

SEQ ID NO: 3615727 - RNA, 18 nt, Human
ccugaagccagccuucuu

SEQ ID NO: 3615728 - RNA, 14 nt, Human
ccugaagccagcug

SEQ ID NO: 3615729 - RNA, 21 nt, Human
ccugaagccaggccauggcua

SEQ ID NO: 3615730 - RNA, 19 nt, Human
cuggggacgcuccgcugcc

SEQ ID NO: 3615731 - RNA, 21 nt, Human
cuggggacgcuccgcugccgu

SEQ ID NO: 3615732 - RNA, 19 nt, Human
cuggggacggggggcccca

SEQ ID NO: 3615733 - RNA, 22 nt, Human
cuggggacggggggccccaguc

SEQ ID NO: 3615734 - RNA, 14 nt, Human
cuggggacuuggcc

SEQ ID NO: 3615735 - RNA, 15 nt, Human
cuggggacuuggccu

SEQ ID NO: 3615736 - RNA, 23 nt, Human
cuggggagaauggggcugggccc

SEQ ID NO: 3615737 - RNA, 22 nt, Human
cuguaagaagagacugggaaga

SEQ ID NO: 3615738 - RNA, 21 nt, Human
cuguaagaauaauuuauagua

SEQ ID NO: 3615739 - RNA, 16 nt, Human
cuguaagacauuagua

SEQ ID NO: 3615740 - RNA, 16 nt, Human
cuguaagacugauaau

SEQ ID NO: 3615741 - RNA, 16 nt, Human
cuguaagaugucuguu

SEQ ID NO: 3615742 - RNA, 13 nt, Human
cuguaagccugca

SEQ ID NO: 3615743 - RNA, 18 nt, Human
cuguaagccugcaagccu

SEQ ID NO: 3615744 - RNA, 13 nt, Human
cuguaagcuccuu

SEQ ID NO: 3615745 - RNA, 20 nt, Human
cuguaagcucuuugaaacaa

SEQ ID NO: 3615746 - RNA, 17 nt, Human
cuguaaggcucuagauc

SEQ ID NO: 3615747 - RNA, 22 nt, Human
cuguaaggcucuagaucauaag

SEQ ID NO: 3615748 - RNA, 21 nt, Human
cuguaaguugggcuugcuauu

SEQ ID NO: 3615749 - RNA, 24 nt, Human
cuguaaguugggcuugcuauucug

SEQ ID NO: 3615750 - RNA, 20 nt, Human
cuguaauaaagaugauugug

SEQ ID NO: 3615751 - RNA, 14 nt, Human
cuguaauaaauaug

SEQ ID NO: 3615752 - RNA, 16 nt, Human
cuguaauaaauaugag

SEQ ID NO: 3615753 - RNA, 14 nt, Human
cuguaauaauaccu

SEQ ID NO: 3615754 - RNA, 17 nt, Human
cuguaauaauaccucaa

SEQ ID NO: 3615755 - RNA, 12 nt, Human
cuguaauaauag

SEQ ID NO: 3615756 - RNA, 13 nt, Human
cuguaauauuuac

SEQ ID NO: 3615757 - RNA, 18 nt, Human
cuguaauauuuacaaugu

SEQ ID NO: 3615758 - RNA, 23 nt, Human
cuguaaucacagcuacuugggag

SEQ ID NO: 3615759 - RNA, 18 nt, Human
cuguaaucauuuguuuac

SEQ ID NO: 3615760 - RNA, 13 nt, Human
cuguaaucccagc

SEQ ID NO: 3615761 - RNA, 15 nt, Human
cuguaaucccagcac

SEQ ID NO: 3615762 - RNA, 17 nt, Human
cuguaaucccagcacuu

SEQ ID NO: 3615763 - RNA, 20 nt, Human
cuguaaucccagcaugcuga

SEQ ID NO: 3615764 - RNA, 14 nt, Human
cuguaaucccagcu

SEQ ID NO: 3615765 - RNA, 19 nt, Human
cuguaaucccagcuacucg

SEQ ID NO: 3615766 - RNA, 20 nt, Human
cuguaaucgcccuacuauuc

SEQ ID NO: 3615767 - RNA, 21 nt, Human
cuguaaugaaacaccuucucu

SEQ ID NO: 3615768 - RNA, 14 nt, Human
cuguaauguuaaua

SEQ ID NO: 3615769 - RNA, 16 nt, Human
cuguaauguuaauaau

SEQ ID NO: 3615770 - RNA, 15 nt, Human
cuguaauguuaauau

SEQ ID NO: 3615771 - RNA, 18 nt, Human
cuguaauuauaucuaaaa

SEQ ID NO: 3615772 - RNA, 13 nt, Human
cuguaauuuaguu

SEQ ID NO: 3615773 - RNA, 13 nt, Human
cuguaauuuuaua

SEQ ID NO: 3615774 - RNA, 20 nt, Human
cuguaauuuuuuucuuauau

SEQ ID NO: 3615775 - RNA, 15 nt, Human
cuguacaaaagcaau

SEQ ID NO: 3615776 - RNA, 12 nt, Human
cuguacaaaggg

SEQ ID NO: 3615777 - RNA, 16 nt, Human
cuguacaauauuuaaa

SEQ ID NO: 3615778 - RNA, 18 nt, Human
cuguacaauauuuaaaau

SEQ ID NO: 3615779 - RNA, 21 nt, Human
cuguacaauauuuaaaauuua

SEQ ID NO: 3615780 - RNA, 22 nt, Human
cuguacacaacucacuccuuuu

SEQ ID NO: 3615781 - RNA, 16 nt, Human
cuguacacacuuuauu

SEQ ID NO: 3615782 - RNA, 20 nt, Human
cuguacacacuuuauuuacu

SEQ ID NO: 3615783 - RNA, 13 nt, Human
cuguacagagccc

SEQ ID NO: 3615784 - RNA, 14 nt, Human
cuguacagagccca

SEQ ID NO: 3615785 - RNA, 15 nt, Human
cuguacagagcccac

SEQ ID NO: 3615786 - RNA, 22 nt, Human
cuguacagagcccacgccccca

SEQ ID NO: 3615787 - RNA, 20 nt, Human
cuguacagauugcugcuucu

SEQ ID NO: 3615788 - RNA, 16 nt, Human
cuguacagcuggcucu

SEQ ID NO: 3615789 - RNA, 22 nt, Human
cuguacagucugucuucuguau

SEQ ID NO: 3615790 - RNA, 15 nt, Human
cuguacagugucuuu

SEQ ID NO: 3615791 - RNA, 15 nt, Human
cuguacaguguuacc

SEQ ID NO: 3615792 - RNA, 17 nt, Human
cuguacauaaacaauga

SEQ ID NO: 3615793 - RNA, 15 nt, Human
cuguacauacuuuuu

SEQ ID NO: 3615794 - RNA, 17 nt, Human
cuguacauagccuauau

SEQ ID NO: 3615795 - RNA, 22 nt, Human
cuguacaugaaaacacauuuuu

SEQ ID NO: 3615796 - RNA, 23 nt, Human
cuguacaugaaaacacauuuuuc

SEQ ID NO: 3615797 - RNA, 15 nt, Human
cuguacaugggacua

SEQ ID NO: 3615798 - RNA, 15 nt, Human
cuguacauuguggga

SEQ ID NO: 3615799 - RNA, 19 nt, Human
cuguacauuuaaaauugcu

SEQ ID NO: 3615800 - RNA, 16 nt, Human
cuguacauuuuguugu

SEQ ID NO: 3615801 - RNA, 23 nt, Human
cuguacauuuuguuguaaaaaga

SEQ ID NO: 3615802 - RNA, 19 nt, Human
cuguaccagcccagauguu

SEQ ID NO: 3615803 - RNA, 12 nt, Human
cuguaccaguua

SEQ ID NO: 3615804 - RNA, 18 nt, Human
cuguaccaguuaauuuuu

SEQ ID NO: 3615805 - RNA, 23 nt, Human
cuguaccauauagcaaaacuuuu

SEQ ID NO: 3615806 - RNA, 13 nt, Human
cuguacccaguuu

SEQ ID NO: 3615807 - RNA, 21 nt, Human
cuguaccucuugagccuugaa

SEQ ID NO: 3615808 - RNA, 21 nt, Human
cuguaccuguuccuuagaccu

SEQ ID NO: 3615809 - RNA, 17 nt, Human
cuguacgucugacaggc

SEQ ID NO: 3615810 - RNA, 22 nt, Human
cuguacuaaaguaacgcaauaa

SEQ ID NO: 3615811 - RNA, 20 nt, Human
cuguacucaggaggcugagg

SEQ ID NO: 3615812 - RNA, 14 nt, Human
cuguacuccuccca

SEQ ID NO: 3615813 - RNA, 16 nt, Human
cuguacuccucccagg

SEQ ID NO: 3615814 - RNA, 16 nt, Human
ccuggagguuccccag

SEQ ID NO: 3615815 - RNA, 14 nt, Human
ccuggagugcaguu

SEQ ID NO: 3615816 - RNA, 19 nt, Human
ccuggaguguggcugagga

SEQ ID NO: 3615817 - RNA, 20 nt, Human
ccuggaguguggcugaggag

SEQ ID NO: 3615818 - RNA, 16 nt, Human
ccuggaguugcauuga

SEQ ID NO: 3615819 - RNA, 16 nt, Human
ccuggauagacgaguu

SEQ ID NO: 3615820 - RNA, 22 nt, Human
ccuggauauuauucuuguaguu

SEQ ID NO: 3615821 - RNA, 17 nt, Human
ccuggaucagaacagga

SEQ ID NO: 3615822 - RNA, 18 nt, Human
ccuggaucagcguggccu

SEQ ID NO: 3615823 - RNA, 19 nt, Human
ccuggaucagcguggccuu

SEQ ID NO: 3615824 - RNA, 18 nt, Human
ccuggaucuaccuggagg

SEQ ID NO: 3615825 - RNA, 22 nt, Human
ccuggaugaaguuaucuggcuu

SEQ ID NO: 3615826 - RNA, 16 nt, Human
ccuggaugacauuaaa

SEQ ID NO: 3615827 - RNA, 14 nt, Human
ccuggaugauacua

SEQ ID NO: 3615828 - RNA, 13 nt, Human
ccuggaugcagcc

SEQ ID NO: 3615829 - RNA, 17 nt, Human
ccuggaugcagccucac

SEQ ID NO: 3615830 - RNA, 13 nt, Human
ccuggaugccauc

SEQ ID NO: 3615831 - RNA, 18 nt, Human
ccuggaugccauccaagu

SEQ ID NO: 3615832 - RNA, 15 nt, Human
ccuggauggggcugc

SEQ ID NO: 3615833 - RNA, 17 nt, Human
ccuggauggggcugcac

SEQ ID NO: 3615834 - RNA, 18 nt, Human
ccuggauggggcugcacc

SEQ ID NO: 3615835 - RNA, 17 nt, Human
ccuggaugucugaacuu

SEQ ID NO: 3615836 - RNA, 20 nt, Human
ccuggauucauuuccugccc

SEQ ID NO: 3615837 - RNA, 21 nt, Human
ccuggauucauuuccugcccu

SEQ ID NO: 3615838 - RNA, 23 nt, Human
ccuggauucauuuccugcccuuc

SEQ ID NO: 3615839 - RNA, 21 nt, Human
ccuggauuucugguucugaug

SEQ ID NO: 3615840 - RNA, 16 nt, Human
ccuggauuuuuaccag

SEQ ID NO: 3615841 - RNA, 19 nt, Human
ccuggcaaagggagcagaa

SEQ ID NO: 3615842 - RNA, 21 nt, Human
ccuggcaagcuagaaccugga

SEQ ID NO: 3615843 - RNA, 12 nt, Human
ccuggcaauagu

SEQ ID NO: 3615844 - RNA, 19 nt, Human
ccuggcaauaguguguucu

SEQ ID NO: 3615845 - RNA, 21 nt, Human
ccuggcaauaguguguucuga

SEQ ID NO: 3615846 - RNA, 14 nt, Human
ccuggcacaggacu

SEQ ID NO: 3615847 - RNA, 18 nt, Human
ccuggcacaggacugauu

SEQ ID NO: 3615848 - RNA, 20 nt, Human
ccuggcacagugucugggcu

SEQ ID NO: 3615849 - RNA, 17 nt, Human
ccuggcacugcuuccag

SEQ ID NO: 3615850 - RNA, 13 nt, Human
ccuggcacuggca

SEQ ID NO: 3615851 - RNA, 22 nt, Human
ccuggcacuggcaaacagggcc

SEQ ID NO: 3615852 - RNA, 13 nt, Human
ccuggcagaacug

SEQ ID NO: 3615853 - RNA, 17 nt, Human
ccuggcagaacugagcu

SEQ ID NO: 3615854 - RNA, 18 nt, Human
ccuggcagaacugagcuc

SEQ ID NO: 3615855 - RNA, 20 nt, Human
ccuggcagaacugagcuccu

SEQ ID NO: 3615856 - RNA, 13 nt, Human
ccuggcagcccag

SEQ ID NO: 3615857 - RNA, 17 nt, Human
ccuggcagcccagagac

SEQ ID NO: 3615858 - RNA, 16 nt, Human
ccuggcagccccuguu

SEQ ID NO: 3615859 - RNA, 22 nt, Human
ccuggcagcccgcaucagcugc

SEQ ID NO: 3615860 - RNA, 12 nt, Human
ccuggcagcucu

SEQ ID NO: 3615861 - RNA, 13 nt, Human
ccuggcagcucug

SEQ ID NO: 3615862 - RNA, 15 nt, Human
ccuggcaggcagggg

SEQ ID NO: 3615863 - RNA, 23 nt, Human
ccuggcagggaggucaggcccug

SEQ ID NO: 3615864 - RNA, 22 nt, Human
ccuggcagggucauccugugcu

SEQ ID NO: 3615865 - RNA, 19 nt, Human
ccuggcagguuagaaccua

SEQ ID NO: 3615866 - RNA, 21 nt, Human
ccuggcaucgcaccauucuga

SEQ ID NO: 3615867 - RNA, 17 nt, Human
ccuggcauggcaccugu

SEQ ID NO: 3615868 - RNA, 18 nt, Human
ccuggcauggcaccuguc

SEQ ID NO: 3615869 - RNA, 13 nt, Human
ccuggcaugggaa

SEQ ID NO: 3615870 - RNA, 19 nt, Human
ccuggcauuauguccacug

SEQ ID NO: 3615871 - RNA, 18 nt, Human
ccuggcauucuuguacag

SEQ ID NO: 3615872 - RNA, 14 nt, Human
ccuggccaacaugg

SEQ ID NO: 3615873 - RNA, 15 nt, Human
ccuggccaccacccc

SEQ ID NO: 3615874 - RNA, 21 nt, Human
ccuggccaccaccccccacuc

SEQ ID NO: 3615875 - RNA, 12 nt, Human
ccuggccaccug

SEQ ID NO: 3615876 - RNA, 16 nt, Human
ccuggccaccugaggu

SEQ ID NO: 3615877 - RNA, 18 nt, Human
ccuggccaccugaggugg

SEQ ID NO: 3615878 - RNA, 19 nt, Human
ccuggccacgcagccagga

SEQ ID NO: 3615879 - RNA, 19 nt, Human
ccuggccagacacaggccc

SEQ ID NO: 3615880 - RNA, 23 nt, Human
ccuggccagacacaggcccuccc

SEQ ID NO: 3615881 - RNA, 15 nt, Human
ccugggaucugcucg

SEQ ID NO: 3615882 - RNA, 23 nt, Human
ccugggaucugguggucagcccu

SEQ ID NO: 3615883 - RNA, 20 nt, Human
ccugggauguccacagaugc

SEQ ID NO: 3615884 - RNA, 13 nt, Human
ccugggauuacag

SEQ ID NO: 3615885 - RNA, 23 nt, Human
ccugggcaaaugaauggcucacu

SEQ ID NO: 3615886 - RNA, 17 nt, Human
ccugggcaacagagcaa

SEQ ID NO: 3615887 - RNA, 17 nt, Human
ccugggcacacgcugcu

SEQ ID NO: 3615888 - RNA, 23 nt, Human
ccugggcacacgcugcucugccc

SEQ ID NO: 3615889 - RNA, 15 nt, Human
ccugggcaccugggg

SEQ ID NO: 3615890 - RNA, 20 nt, Human
ccugggcacgcacuggguug

SEQ ID NO: 3615891 - RNA, 18 nt, Human
ccugggcagccaggcugc

SEQ ID NO: 3615892 - RNA, 19 nt, Human
ccugggcagccaggcugcc

SEQ ID NO: 3615893 - RNA, 16 nt, Human
ccugggcauccuucuu

SEQ ID NO: 3615894 - RNA, 15 nt, Human
ccugggcauugcuuu

SEQ ID NO: 3615895 - RNA, 15 nt, Human
ccugggccagggucu

SEQ ID NO: 3615896 - RNA, 16 nt, Human
ccugggccagggucug

SEQ ID NO: 3615897 - RNA, 14 nt, Human
ccugggccccagcu

SEQ ID NO: 3615898 - RNA, 20 nt, Human
ccugggccccaguuguauuu

SEQ ID NO: 3615899 - RNA, 13 nt, Human
ccugggccccucc

SEQ ID NO: 3615900 - RNA, 18 nt, Human
ccugggcccucucugcuc

SEQ ID NO: 3615901 - RNA, 19 nt, Human
ccugggcccugggcuggaa

SEQ ID NO: 3615902 - RNA, 18 nt, Human
ccugggcccuggggccug

SEQ ID NO: 3615903 - RNA, 22 nt, Human
ccugggccguaucuccggcucc

SEQ ID NO: 3615904 - RNA, 17 nt, Human
ccugggccuauggagag

SEQ ID NO: 3615905 - RNA, 20 nt, Human
ccugggccuauggagagccc

SEQ ID NO: 3615906 - RNA, 15 nt, Human
ccugggccugccuca

SEQ ID NO: 3615907 - RNA, 13 nt, Human
ccugggccugcug

SEQ ID NO: 3615908 - RNA, 18 nt, Human
ccugggccugcugcugag

SEQ ID NO: 3615909 - RNA, 19 nt, Human
ccugggccugcugcugaga

SEQ ID NO: 3615910 - RNA, 15 nt, Human
ccugggccuggcucc

SEQ ID NO: 3615911 - RNA, 16 nt, Human
ccugggccuggcuccc

SEQ ID NO: 3615912 - RNA, 12 nt, Human
ccugggcgcccu

SEQ ID NO: 3615913 - RNA, 15 nt, Human
ccugggcgcccugga

SEQ ID NO: 3615914 - RNA, 16 nt, Human
ccugggcgcccuggaa

SEQ ID NO: 3615915 - RNA, 23 nt, Human
ccugggcucaagcaauccuccug

SEQ ID NO: 3615916 - RNA, 16 nt, Human
ccugggcuccuggacc

SEQ ID NO: 3615917 - RNA, 16 nt, Human
ccugggcucggaggcu

SEQ ID NO: 3615918 - RNA, 18 nt, Human
ccugggcucggaggcugc

SEQ ID NO: 3615919 - RNA, 13 nt, Human
ccugggcucuggg

SEQ ID NO: 3615920 - RNA, 14 nt, Human
ccugggcucugugg

SEQ ID NO: 3615921 - RNA, 14 nt, Human
ccugggcuggaauc

SEQ ID NO: 3615922 - RNA, 18 nt, Human
ccugggcuguuggcacuc

SEQ ID NO: 3615923 - RNA, 13 nt, Human
ccugggcuuggcc

SEQ ID NO: 3615924 - RNA, 15 nt, Human
ccugggcuuggccug

SEQ ID NO: 3615925 - RNA, 17 nt, Human
ccugggcuuggccugcu

SEQ ID NO: 3615926 - RNA, 21 nt, Human
ccugggcuuggccugcuguga

SEQ ID NO: 3615927 - RNA, 12 nt, Human
ccuggggaccca

SEQ ID NO: 3615928 - RNA, 13 nt, Human
ccuggggacccac

SEQ ID NO: 3615929 - RNA, 18 nt, Human
ccuggggagugggacaga

SEQ ID NO: 3615930 - RNA, 13 nt, Human
ccuggggcacagu

SEQ ID NO: 3615931 - RNA, 12 nt, Human
ccuggggcaucc

SEQ ID NO: 3615932 - RNA, 16 nt, Human
ccuggggccaggccgg

SEQ ID NO: 3615933 - RNA, 16 nt, Human
ccuggggcccaaaugc

SEQ ID NO: 3615934 - RNA, 14 nt, Human
ccuggggccugaga

SEQ ID NO: 3615935 - RNA, 17 nt, Human
ccuggggccugagagaa

SEQ ID NO: 3615936 - RNA, 16 nt, Human
ccuggggccuggcagg

SEQ ID NO: 3615937 - RNA, 16 nt, Human
ccuggggccuguacug

SEQ ID NO: 3615938 - RNA, 19 nt, Human
ccuggggcgcgugaggccc

SEQ ID NO: 3615939 - RNA, 19 nt, Human
ccuggggcgggccccucau

SEQ ID NO: 3615940 - RNA, 14 nt, Human
ccuggggcucccuu

SEQ ID NO: 3615941 - RNA, 15 nt, Human
ccuggggcuccuuuc

SEQ ID NO: 3615942 - RNA, 20 nt, Human
ccuggggcucuaacgccuga

SEQ ID NO: 3615943 - RNA, 22 nt, Human
ccuggggcucuaacgccugagc

SEQ ID NO: 3615944 - RNA, 18 nt, Human
ccuggggcucugugcagg

SEQ ID NO: 3615945 - RNA, 12 nt, Human
ccuggggcuggg

SEQ ID NO: 3615946 - RNA, 17 nt, Human
ccuggggcugggccccc

SEQ ID NO: 3615947 - RNA, 18 nt, Human
ccuggggcuucuccugac

SEQ ID NO: 3615948 - RNA, 18 nt, Human
ccugggggaagcccugga

SEQ ID NO: 3615949 - RNA, 15 nt, Human
ccugggggcacagga

SEQ ID NO: 3615950 - RNA, 19 nt, Human
ccugggggcagggagagga

SEQ ID NO: 3615951 - RNA, 15 nt, Human
ccugggggccugacc

SEQ ID NO: 3615952 - RNA, 19 nt, Human
ccugggggccugaccuccc

SEQ ID NO: 3615953 - RNA, 19 nt, Human
ccugggggccuggcuggcu

SEQ ID NO: 3615954 - RNA, 12 nt, Human
ccugggggcucu

SEQ ID NO: 3615955 - RNA, 13 nt, Human
ccugggggcucuc

SEQ ID NO: 3615956 - RNA, 15 nt, Human
ccugggggcuggagc

SEQ ID NO: 3615957 - RNA, 20 nt, Human
ccugggggcugggcagagga

SEQ ID NO: 3615958 - RNA, 15 nt, Human
ccugggggugccagg

SEQ ID NO: 3615959 - RNA, 18 nt, Human
ccuggggguucuuucuuc

SEQ ID NO: 3615960 - RNA, 18 nt, Human
ccuggggucucugcugca

SEQ ID NO: 3615961 - RNA, 18 nt, Human
ccuggggugacccggcac

SEQ ID NO: 3615962 - RNA, 22 nt, Human
ccuggggugcccuccacugccc

SEQ ID NO: 3615963 - RNA, 13 nt, Human
ccugggguuguca

SEQ ID NO: 3615964 - RNA, 20 nt, Human
ccuggguaaaugcagcguga

SEQ ID NO: 3615965 - RNA, 18 nt, Human
ccuggguacugaaagccu

SEQ ID NO: 3615966 - RNA, 19 nt, Human
ccugggucagucugguggg

SEQ ID NO: 3615967 - RNA, 20 nt, Human
ccuggguccaaauaaaaacu

SEQ ID NO: 3615968 - RNA, 14 nt, Human
ccugggugacauuu

SEQ ID NO: 3615969 - RNA, 14 nt, Human
ccuggguggcuacu

SEQ ID NO: 3615970 - RNA, 15 nt, Human
ccuggguggcuacuc

SEQ ID NO: 3615971 - RNA, 20 nt, Human
ccuggguggcuacucugugc

SEQ ID NO: 3615972 - RNA, 16 nt, Human
ccugggugggcucugu

SEQ ID NO: 3615973 - RNA, 22 nt, Human
ccuggguggggcugcuccucca

SEQ ID NO: 3615974 - RNA, 21 nt, Human
ccuggguggucugcaggcagg

SEQ ID NO: 3615975 - RNA, 14 nt, Human
ccuggguguccccg

SEQ ID NO: 3615976 - RNA, 20 nt, Human
ccuggguguccccgcugcug

SEQ ID NO: 3615977 - RNA, 21 nt, Human
ccuggguguccccgcugcugu

SEQ ID NO: 3615978 - RNA, 17 nt, Human
ccuggguuagacugcca

SEQ ID NO: 3615979 - RNA, 19 nt, Human
ccuggguuagacugccagc

SEQ ID NO: 3615980 - RNA, 23 nt, Human
cugucaggauugcgagagaugug

SEQ ID NO: 3615981 - RNA, 24 nt, Human
cugucaggauugcgagagaugugu

SEQ ID NO: 3615982 - RNA, 16 nt, Human
cugucaggcugaaaac

SEQ ID NO: 3615983 - RNA, 20 nt, Human
cugucagggcaguacaaugu

SEQ ID NO: 3615984 - RNA, 13 nt, Human
cugucagucacag

SEQ ID NO: 3615985 - RNA, 17 nt, Human
cugucagucacagccac

SEQ ID NO: 3615986 - RNA, 15 nt, Human
cugucagugcagccc

SEQ ID NO: 3615987 - RNA, 19 nt, Human
cugucagugcagcccgugu

SEQ ID NO: 3615988 - RNA, 18 nt, Human
cugucagugccgccgccu

SEQ ID NO: 3615989 - RNA, 14 nt, Human
cugucauagaaagu

SEQ ID NO: 3615990 - RNA, 16 nt, Human
cugucauagaaauuac

SEQ ID NO: 3615991 - RNA, 16 nt, Human
cugucauaucuucaca

SEQ ID NO: 3615992 - RNA, 18 nt, Human
cugucauaucuucacaau

SEQ ID NO: 3615993 - RNA, 16 nt, Human
cugucaucaauuaaag

SEQ ID NO: 3615994 - RNA, 20 nt, Human
cugucaucaucauggccagc

SEQ ID NO: 3615995 - RNA, 23 nt, Human
cugucauccucaaagaaagugua

SEQ ID NO: 3615996 - RNA, 15 nt, Human
cugucaucugagaau

SEQ ID NO: 3615997 - RNA, 21 nt, Human
cugucaucugugcacugccca

SEQ ID NO: 3615998 - RNA, 21 nt, Human
cugucaugaaaucagcaagag

SEQ ID NO: 3615999 - RNA, 16 nt, Human
cugucauugcuucuuc

SEQ ID NO: 3616000 - RNA, 18 nt, Human
cugucauugcuucuucug

SEQ ID NO: 3616001 - RNA, 16 nt, Human
cugucauuugagcagg

SEQ ID NO: 3616002 - RNA, 18 nt, Human
cugucauuuguugugaug

SEQ ID NO: 3616003 - RNA, 15 nt, Human
cuguccaaacugccu

SEQ ID NO: 3616004 - RNA, 19 nt, Human
cuguccaaaggaggcuggc

SEQ ID NO: 3616005 - RNA, 16 nt, Human
cuguccaaccuaaccc

SEQ ID NO: 3616006 - RNA, 14 nt, Human
cuguccacgcgugc

SEQ ID NO: 3616007 - RNA, 19 nt, Human
cuguccacgcgugccgugg

SEQ ID NO: 3616008 - RNA, 12 nt, Human
cuguccagaaag

SEQ ID NO: 3616009 - RNA, 21 nt, Human
cuguccagacagccuguaucu

SEQ ID NO: 3616010 - RNA, 18 nt, Human
cuguccagagagagaagu

SEQ ID NO: 3616011 - RNA, 19 nt, Human
cuguccagcagucacuucg

SEQ ID NO: 3616012 - RNA, 17 nt, Human
cuguccagccugggcag

SEQ ID NO: 3616013 - RNA, 12 nt, Human
cuguccagcucc

SEQ ID NO: 3616014 - RNA, 13 nt, Human
cuguccagcucca

SEQ ID NO: 3616015 - RNA, 21 nt, Human
cuguccagcuccaaccugcaa

SEQ ID NO: 3616016 - RNA, 16 nt, Human
cuguccaggcacugag

SEQ ID NO: 3616017 - RNA, 19 nt, Human
cuguccaggcacugagaua

SEQ ID NO: 3616018 - RNA, 19 nt, Human
cuguccaggcacugcugcc

SEQ ID NO: 3616019 - RNA, 21 nt, Human
cuguccaggcacugcugccca

SEQ ID NO: 3616020 - RNA, 13 nt, Human
cuguccagugccc

SEQ ID NO: 3616021 - RNA, 14 nt, Human
cuguccagugccca

SEQ ID NO: 3616022 - RNA, 18 nt, Human
cuguccagugcccauucc

SEQ ID NO: 3616023 - RNA, 14 nt, Human
cuguccagugggua

SEQ ID NO: 3616024 - RNA, 15 nt, Human
cuguccaguucccag

SEQ ID NO: 3616025 - RNA, 16 nt, Human
cuguccaucagccagg

SEQ ID NO: 3616026 - RNA, 22 nt, Human
cuguugcacguguguuuuucua

SEQ ID NO: 3616027 - RNA, 23 nt, Human
cuguugcacguguguuuuucuau

SEQ ID NO: 3616028 - RNA, 13 nt, Human
cuguugccagaga

SEQ ID NO: 3616029 - RNA, 17 nt, Human
cuguugccagagaugga

SEQ ID NO: 3616030 - RNA, 12 nt, Human
cuguugcccagg

SEQ ID NO: 3616031 - RNA, 18 nt, Human
cuguugcccaggcuggcg

SEQ ID NO: 3616032 - RNA, 12 nt, Human
cuguugcuaagc

SEQ ID NO: 3616033 - RNA, 21 nt, Human
cuguugcuaagccccagcaag

SEQ ID NO: 3616034 - RNA, 21 nt, Human
cuguugcucaaaucuauucag

SEQ ID NO: 3616035 - RNA, 22 nt, Human
cuguugcucaaaucuauucaga

SEQ ID NO: 3616036 - RNA, 14 nt, Human
cuguugcugauuuu

SEQ ID NO: 3616037 - RNA, 16 nt, Human
cuguugcugauuuuau

SEQ ID NO: 3616038 - RNA, 21 nt, Human
cuguugcugauuuuauucuug

SEQ ID NO: 3616039 - RNA, 15 nt, Human
cuguugcugccucau

SEQ ID NO: 3616040 - RNA, 20 nt, Human
cuguugcuguguuuaauuug

SEQ ID NO: 3616041 - RNA, 23 nt, Human
cuguuggaauggauuuuucuuua

SEQ ID NO: 3616042 - RNA, 15 nt, Human
cuuacccaauuuccc

SEQ ID NO: 3616043 - RNA, 23 nt, Human
cuuacccaucugcaccccccugg

SEQ ID NO: 3616044 - RNA, 17 nt, Human
cuuacccucaccuguca

SEQ ID NO: 3616045 - RNA, 19 nt, Human
cuuacccucauguucuuaa

SEQ ID NO: 3616046 - RNA, 21 nt, Human
cuuacccuuagaauccacgua

SEQ ID NO: 3616047 - RNA, 21 nt, Human
cuuacccuucugugcccagcu

SEQ ID NO: 3616048 - RNA, 22 nt, Human
cuuacccuuuccuccuuuauca

SEQ ID NO: 3616049 - RNA, 19 nt, Human
cuuaccuaagugacauuug

SEQ ID NO: 3616050 - RNA, 16 nt, Human
cuuaccuacuuucuuc

SEQ ID NO: 3616051 - RNA, 16 nt, Human
cuuaccuagugaaacu

SEQ ID NO: 3616052 - RNA, 22 nt, Human
cuuaccuagugaaacuuuucua

SEQ ID NO: 3616053 - RNA, 14 nt, Human
cuuaccucccaccu

SEQ ID NO: 3616054 - RNA, 18 nt, Human
cuuaccucccaccuuugg

SEQ ID NO: 3616055 - RNA, 15 nt, Human
cuuaccuccugccca

SEQ ID NO: 3616056 - RNA, 13 nt, Human
cuuaccucggugc

SEQ ID NO: 3616057 - RNA, 19 nt, Human
cuuaccucggugccuuccu

SEQ ID NO: 3616058 - RNA, 13 nt, Human
cuuaccucuuccg

SEQ ID NO: 3616059 - RNA, 12 nt, Human
cuuaccugacac

SEQ ID NO: 3616060 - RNA, 16 nt, Human
cuuaccugacacaaga

SEQ ID NO: 3616061 - RNA, 18 nt, Human
cuuaccugaccucuugcu

SEQ ID NO: 3616062 - RNA, 21 nt, Human
cuuaccugaccucuugcuguc

SEQ ID NO: 3616063 - RNA, 20 nt, Human
cuuaccugccaggaagccag

SEQ ID NO: 3616064 - RNA, 20 nt, Human
cuuaccuguaugucuccagu

SEQ ID NO: 3616065 - RNA, 17 nt, Human
cuuaccuucaauaaagu

SEQ ID NO: 3616066 - RNA, 18 nt, Human
cuuaccuucaauaaagua

SEQ ID NO: 3616067 - RNA, 22 nt, Human
cuuaccuucaauaaaguaucua

SEQ ID NO: 3616068 - RNA, 18 nt, Human
cuuaccuugguuggaagg

SEQ ID NO: 3616069 - RNA, 20 nt, Human
cuuaccuuuuuauuugcaug

SEQ ID NO: 3616070 - RNA, 23 nt, Human
cuuacgaauacuuuugcccuuug

SEQ ID NO: 3616071 - RNA, 16 nt, Human
cuuacgaauauuuuca

SEQ ID NO: 3616072 - RNA, 16 nt, Human
cuuacgaucaggcaca

SEQ ID NO: 3616073 - RNA, 19 nt, Human
cuuacgcccaacccuuccc

SEQ ID NO: 3616074 - RNA, 18 nt, Human
cuuacggccaucucuuug

SEQ ID NO: 3616075 - RNA, 15 nt, Human
cuuacuaaaaaguau

SEQ ID NO: 3616076 - RNA, 21 nt, Human
cuuacuaaaaaguauaaaaua

SEQ ID NO: 3616077 - RNA, 15 nt, Human
cuuacuaaaauauau

SEQ ID NO: 3616078 - RNA, 22 nt, Human
cuuacuaaacauuuuguuauug

SEQ ID NO: 3616079 - RNA, 16 nt, Human
cuuacuacacugagga

SEQ ID NO: 3616080 - RNA, 11 nt, Human
cuuacuauuuc

SEQ ID NO: 3616081 - RNA, 13 nt, Human
cuuacuauuucug

SEQ ID NO: 3616082 - RNA, 22 nt, Human
cuuacuauuucugggucuuuug

SEQ ID NO: 3616083 - RNA, 12 nt, Human
cuuacuauuuug

SEQ ID NO: 3616084 - RNA, 15 nt, Human
cuuacucccaggcac

SEQ ID NO: 3616085 - RNA, 12 nt, Human
cuuacuccuccu

SEQ ID NO: 3616086 - RNA, 13 nt, Human
cuuacuccuccuc

SEQ ID NO: 3616087 - RNA, 14 nt, Human
cuuacuccuccucu

SEQ ID NO: 3616088 - RNA, 18 nt, Human
cuuacuccuccucuuucu

SEQ ID NO: 3616089 - RNA, 23 nt, Human
cuuacuccuccucuuucucuccc

SEQ ID NO: 3616090 - RNA, 13 nt, Human
cuuacuccugugg

SEQ ID NO: 3616091 - RNA, 14 nt, Human
cuuacuccuguggg

SEQ ID NO: 3616092 - RNA, 15 nt, Human
cuuacuccuguggga

SEQ ID NO: 3616093 - RNA, 16 nt, Human
cuuacuccugugggag

SEQ ID NO: 3616094 - RNA, 13 nt, Human
cuuacucuaagau

SEQ ID NO: 3616095 - RNA, 15 nt, Human
cuuacucuucuugaa

SEQ ID NO: 3616096 - RNA, 19 nt, Human
cuuacucuucuugaaauuu

SEQ ID NO: 3616097 - RNA, 12 nt, Human
cuuacucuuucc

SEQ ID NO: 3616098 - RNA, 15 nt, Human
cuuacucuuuccuau

SEQ ID NO: 3616099 - RNA, 12 nt, Human
cuuacugauaua

SEQ ID NO: 3616100 - RNA, 22 nt, Human
cuuacugcgacuaaacuuaauu

SEQ ID NO: 3616101 - RNA, 11 nt, Human
cuuacugcuug

SEQ ID NO: 3616102 - RNA, 16 nt, Human
cuuacuguaagacauu

SEQ ID NO: 3616103 - RNA, 16 nt, Human
cuuacuguacaugaaa

SEQ ID NO: 3616104 - RNA, 15 nt, Human
cuuacuguaccuguu

SEQ ID NO: 3616105 - RNA, 18 nt, Human
cuuacuguaccuguuccu

SEQ ID NO: 3616106 - RNA, 23 nt, Human
cuuacuguaccuguuccuuagac

SEQ ID NO: 3616107 - RNA, 13 nt, Human
cuuacuguuucug

SEQ ID NO: 3616108 - RNA, 14 nt, Human
cuuacuguuucugu

SEQ ID NO: 3616109 - RNA, 16 nt, Human
cuuacuguuucuguca

SEQ ID NO: 3616110 - RNA, 18 nt, Human
cuuacuuagcaugcacaa

SEQ ID NO: 3616111 - RNA, 14 nt, Human
cuuacuucucacua

SEQ ID NO: 3616112 - RNA, 19 nt, Human
cuuacuuuaccucucuguc

SEQ ID NO: 3616113 - RNA, 22 nt, Human
cuuacuuuccuuuccccagccc

SEQ ID NO: 3616114 - RNA, 13 nt, Human
cuuacuuugcuga

SEQ ID NO: 3616115 - RNA, 21 nt, Human
cuuacuuuguaaauucugauu

SEQ ID NO: 3616116 - RNA, 14 nt, Human
cuuacuuuguauga

SEQ ID NO: 3616117 - RNA, 18 nt, Human
cuuagaaaaccagcucag

SEQ ID NO: 3616118 - RNA, 20 nt, Human
cuuagaaaaccagcucagca

SEQ ID NO: 3616119 - RNA, 19 nt, Human
cuuagaaaauucacuauug

SEQ ID NO: 3616120 - RNA, 18 nt, Human
cuuagaaauguaaacugc

SEQ ID NO: 3616121 - RNA, 15 nt, Human
cuuagaaauuuauuu

SEQ ID NO: 3616122 - RNA, 12 nt, Human
cuuagaacauuu

SEQ ID NO: 3616123 - RNA, 15 nt, Human
cuuagaaccuuucuu

SEQ ID NO: 3616124 - RNA, 17 nt, Human
cuuagaagaauauugua

SEQ ID NO: 3616125 - RNA, 20 nt, Human
cuuagaagucacacaguauu

SEQ ID NO: 3616126 - RNA, 16 nt, Human
cuuagaaguggaagua

SEQ ID NO: 3616127 - RNA, 18 nt, Human
cuuagaaguggaccagga

SEQ ID NO: 3616128 - RNA, 23 nt, Human
cuuagaaguggaccaggacagga

SEQ ID NO: 3616129 - RNA, 17 nt, Human
cuuagaauaaaauugua

SEQ ID NO: 3616130 - RNA, 12 nt, Human
cuuagaauccaa

SEQ ID NO: 3616131 - RNA, 16 nt, Human
cuuagaauccaaacuu

SEQ ID NO: 3616132 - RNA, 17 nt, Human
cuuagaauccaaacuug

SEQ ID NO: 3616133 - RNA, 18 nt, Human
cuuagaaucccuguguua

SEQ ID NO: 3616134 - RNA, 19 nt, Human
cuuagaaucccuguguuaa

SEQ ID NO: 3616135 - RNA, 20 nt, Human
cuuagaaucccuguguuaau

SEQ ID NO: 3616136 - RNA, 20 nt, Human
cuuagacagaggcccucaag

SEQ ID NO: 3616137 - RNA, 21 nt, Human
cuuagacagaggcccucaagu

SEQ ID NO: 3616138 - RNA, 15 nt, Human
cuuagacagucccug

SEQ ID NO: 3616139 - RNA, 17 nt, Human
cuuagacagucccugcc

SEQ ID NO: 3616140 - RNA, 19 nt, Human
cuuagacagucccugccaa

SEQ ID NO: 3616141 - RNA, 16 nt, Human
cuuagacauaacaaaa

SEQ ID NO: 3616142 - RNA, 18 nt, Human
cuuagacccucaugcugc

SEQ ID NO: 3616143 - RNA, 21 nt, Human
cuuagacccucaugcugccaa

SEQ ID NO: 3616144 - RNA, 22 nt, Human
cuuagacccucaugcugccaau

SEQ ID NO: 3616145 - RNA, 12 nt, Human
cuuagaccucag

SEQ ID NO: 3616146 - RNA, 17 nt, Human
cuuagaccucagccugu

SEQ ID NO: 3616147 - RNA, 18 nt, Human
cuuagaccucagccugug

SEQ ID NO: 3616148 - RNA, 18 nt, Human
cuuagacucuaguauuua

SEQ ID NO: 3616149 - RNA, 21 nt, Human
cuuagacucuaguauuuaugg

SEQ ID NO: 3616150 - RNA, 15 nt, Human
cuuagacucuuuucc

SEQ ID NO: 3616151 - RNA, 22 nt, Human
cuuagagacaguugggugagaa

SEQ ID NO: 3616152 - RNA, 22 nt, Human
cuuagagcaguuucuguccugc

SEQ ID NO: 3616153 - RNA, 19 nt, Human
cuuagagggauuucuuugc

SEQ ID NO: 3616154 - RNA, 20 nt, Human
cuuagagggauuucuuugcu

SEQ ID NO: 3616155 - RNA, 17 nt, Human
cuuagaguuucuguuug

SEQ ID NO: 3616156 - RNA, 18 nt, Human
cuuagaguuucuguuuga

SEQ ID NO: 3616157 - RNA, 20 nt, Human
cuuagauaucuuuuuauuga

SEQ ID NO: 3616158 - RNA, 13 nt, Human
cuuagaucauagu

SEQ ID NO: 3616159 - RNA, 22 nt, Human
cuuagaucauaguuuuauuuau

SEQ ID NO: 3616160 - RNA, 16 nt, Human
cuuagaucuggcaugu

SEQ ID NO: 3616161 - RNA, 13 nt, Human
cuuagauguauau

SEQ ID NO: 3616162 - RNA, 20 nt, Human
cuuagauucucugugucuaa

SEQ ID NO: 3616163 - RNA, 16 nt, Human
cuuagauucuuaauuc

SEQ ID NO: 3616164 - RNA, 19 nt, Human
cuuagauuuuacaugaagu

SEQ ID NO: 3616165 - RNA, 20 nt, Human
cuuagauuuuacaugaagua

SEQ ID NO: 3616166 - RNA, 15 nt, Human
cuuagcaaaaagugg

SEQ ID NO: 3616167 - RNA, 16 nt, Human
cuuagcagcuaucucu

SEQ ID NO: 3616168 - RNA, 16 nt, Human
cuuagcagcuuccaga

SEQ ID NO: 3616169 - RNA, 18 nt, Human
cuuagcagcuuccagauu

SEQ ID NO: 3616170 - RNA, 13 nt, Human
cuuagcaggagag

SEQ ID NO: 3616171 - RNA, 17 nt, Human
ccuugugggccugggcu

SEQ ID NO: 3616172 - RNA, 20 nt, Human
ccuugugggccugggcuccu

SEQ ID NO: 3616173 - RNA, 13 nt, Human
ccuugugguccaa

SEQ ID NO: 3616174 - RNA, 16 nt, Human
ccuuguggucccaccc

SEQ ID NO: 3616175 - RNA, 16 nt, Human
ccuuguguauauuugu

SEQ ID NO: 3616176 - RNA, 19 nt, Human
ccuuguuacuucugaggua

SEQ ID NO: 3616177 - RNA, 21 nt, Human
ccuuguuauuucucagacuuu

SEQ ID NO: 3616178 - RNA, 16 nt, Human
ccuuguuggagccugc

SEQ ID NO: 3616179 - RNA, 17 nt, Human
ccuuguuggagccugca

SEQ ID NO: 3616180 - RNA, 20 nt, Human
ccuuguuuaucagauacauc

SEQ ID NO: 3616181 - RNA, 14 nt, Human
ccuuguuucaaaca

SEQ ID NO: 3616182 - RNA, 19 nt, Human
ccuuguuuggggcaggagu

SEQ ID NO: 3616183 - RNA, 16 nt, Human
ccuuguuuuggacagu

SEQ ID NO: 3616184 - RNA, 14 nt, Human
ccuuguuuuuuucu

SEQ ID NO: 3616185 - RNA, 20 nt, Human
ccuuuaaaaaaauuuaagug

SEQ ID NO: 3616186 - RNA, 22 nt, Human
ccuuuaaaguaugaaucuaugc

SEQ ID NO: 3616187 - RNA, 23 nt, Human
ccuuuaaaguaugaaucuaugcc

SEQ ID NO: 3616188 - RNA, 17 nt, Human
ccuuuaacaacauguuu

SEQ ID NO: 3616189 - RNA, 21 nt, Human
ccuuuaacaacauguuuccag

SEQ ID NO: 3616190 - RNA, 19 nt, Human
ccuuuaaucagguccugcu

SEQ ID NO: 3616191 - RNA, 21 nt, Human
ccuuuaaucagguccugcuca

SEQ ID NO: 3616192 - RNA, 22 nt, Human
ccuuuacaaaagaaauaccuug

SEQ ID NO: 3616193 - RNA, 18 nt, Human
ccuuuacauggacagaau

SEQ ID NO: 3616194 - RNA, 19 nt, Human
ccuuuacauggacagaauu

SEQ ID NO: 3616195 - RNA, 19 nt, Human
ccuuuacccucuuugcugc

SEQ ID NO: 3616196 - RNA, 20 nt, Human
ccuuuacugacccuggggcu

SEQ ID NO: 3616197 - RNA, 17 nt, Human
ccuuuacuugucuuucu

SEQ ID NO: 3616198 - RNA, 13 nt, Human
ccuuuacuuuccc

SEQ ID NO: 3616199 - RNA, 14 nt, Human
ccuuuagaaaauau

SEQ ID NO: 3616200 - RNA, 16 nt, Human
ccuuuagaaaauauaa

SEQ ID NO: 3616201 - RNA, 18 nt, Human
ccuuuagauagcagccug

SEQ ID NO: 3616202 - RNA, 23 nt, Human
ccuuuagcacguuuaaaguucug

SEQ ID NO: 3616203 - RNA, 20 nt, Human
ccuuuagcgcccaguugggu

SEQ ID NO: 3616204 - RNA, 13 nt, Human
ccuuuagggcagc

SEQ ID NO: 3616205 - RNA, 14 nt, Human
ccuuuagggcagcu

SEQ ID NO: 3616206 - RNA, 22 nt, Human
ccuuuagggcagcuugccccgg

SEQ ID NO: 3616207 - RNA, 21 nt, Human
ccuuuaguaucaguguuuuaa

SEQ ID NO: 3616208 - RNA, 23 nt, Human
ccuuuaugugaauuuuuaagcug

SEQ ID NO: 3616209 - RNA, 13 nt, Human
ccuuuauugugau

SEQ ID NO: 3616210 - RNA, 21 nt, Human
ccuuuauuguguuugucauua

SEQ ID NO: 3616211 - RNA, 13 nt, Human
ccuuuauuuuaga

SEQ ID NO: 3616212 - RNA, 12 nt, Human
ccuuucaaagcu

SEQ ID NO: 3616213 - RNA, 16 nt, Human
ccuuucaaauuucaca

SEQ ID NO: 3616214 - RNA, 18 nt, Human
ccuuucacuucuuucccu

SEQ ID NO: 3616215 - RNA, 13 nt, Human
ccuuucagauguc

SEQ ID NO: 3616216 - RNA, 12 nt, Human
ccuuucagccca

SEQ ID NO: 3616217 - RNA, 15 nt, Human
ccuuucagcugugaa

SEQ ID NO: 3616218 - RNA, 12 nt, Human
ccuuucagggaa

SEQ ID NO: 3616219 - RNA, 22 nt, Human
ccuuucauuuacuguggcuucu

SEQ ID NO: 3616220 - RNA, 19 nt, Human
ccuuucauuugcuaucucu

SEQ ID NO: 3616221 - RNA, 19 nt, Human
ccuuuccaccacagccagc

SEQ ID NO: 3616222 - RNA, 23 nt, Human
ccuuuccaccacagccagcaccu

SEQ ID NO: 3616223 - RNA, 13 nt, Human
ccuuuccaccuuc

SEQ ID NO: 3616224 - RNA, 16 nt, Human
ccuuuccaccuucuca

SEQ ID NO: 3616225 - RNA, 17 nt, Human
ccuuuccaccuucucac

SEQ ID NO: 3616226 - RNA, 18 nt, Human
ccuuuccaccuucucaca

SEQ ID NO: 3616227 - RNA, 13 nt, Human
ccuuuccagcaug

SEQ ID NO: 3616228 - RNA, 22 nt, Human
ccuuuccauaaauccuugauga

SEQ ID NO: 3616229 - RNA, 22 nt, Human
ccuuucccaacacuucagacug

SEQ ID NO: 3616230 - RNA, 11 nt, Human
ccuuucccacc

SEQ ID NO: 3616231 - RNA, 12 nt, Human
ccuuucccaccc

SEQ ID NO: 3616232 - RNA, 11 nt, Human
ccuuucccacu

SEQ ID NO: 3616233 - RNA, 13 nt, Human
ccuuuccccagca

SEQ ID NO: 3616234 - RNA, 21 nt, Human
ccuuuccccagcaucacuccc

SEQ ID NO: 3616235 - RNA, 18 nt, Human
ccuuuccccagcccaggg

SEQ ID NO: 3616236 - RNA, 12 nt, Human
ccuuucccuaag

SEQ ID NO: 3616237 - RNA, 15 nt, Human
ccuuucccuaagcca

SEQ ID NO: 3616238 - RNA, 16 nt, Human
ccuuucccucaccccc

SEQ ID NO: 3616239 - RNA, 17 nt, Human
ccuuucccucacccccu

SEQ ID NO: 3616240 - RNA, 20 nt, Human
ccuuucccucacccccuccc

SEQ ID NO: 3616241 - RNA, 13 nt, Human
ccuuucccuuccu

SEQ ID NO: 3616242 - RNA, 15 nt, Human
ccuuucccuucuugg

SEQ ID NO: 3616243 - RNA, 19 nt, Human
ccuuuccuauaugaugauu

SEQ ID NO: 3616244 - RNA, 16 nt, Human
ccuuuccucaggcaag

SEQ ID NO: 3616245 - RNA, 17 nt, Human
ccuuuccuccuuuauca

SEQ ID NO: 3616246 - RNA, 21 nt, Human
cuuccauaaucuggacuccuc

SEQ ID NO: 3616247 - RNA, 22 nt, Human
cuuccauaaugcuacugucuca

SEQ ID NO: 3616248 - RNA, 14 nt, Human
cuuccauaauuaug

SEQ ID NO: 3616249 - RNA, 14 nt, Human
cuuccauagccuaa

SEQ ID NO: 3616250 - RNA, 15 nt, Human
cuuccauagcugcug

SEQ ID NO: 3616251 - RNA, 21 nt, Human
cuuccauagcugcugcccuag

SEQ ID NO: 3616252 - RNA, 14 nt, Human
cuuccauaugaccu

SEQ ID NO: 3616253 - RNA, 15 nt, Human
cuuccauauuuggaa

SEQ ID NO: 3616254 - RNA, 16 nt, Human
cuuccauauuuggaag

SEQ ID NO: 3616255 - RNA, 19 nt, Human
cuuccaucccaaccagugc

SEQ ID NO: 3616256 - RNA, 14 nt, Human
cuuccaucccagag

SEQ ID NO: 3616257 - RNA, 16 nt, Human
cuuccaucccuacccc

SEQ ID NO: 3616258 - RNA, 14 nt, Human
cuuccaugcugugc

SEQ ID NO: 3616259 - RNA, 15 nt, Human
cuuccaugucgccuc

SEQ ID NO: 3616260 - RNA, 16 nt, Human
cuuccaugucgccucu

SEQ ID NO: 3616261 - RNA, 17 nt, Human
cuuccaugucgccucug

SEQ ID NO: 3616262 - RNA, 18 nt, Human
cuuccaugucggccucua

SEQ ID NO: 3616263 - RNA, 12 nt, Human
cuuccaugugga

SEQ ID NO: 3616264 - RNA, 15 nt, Human
cuuccauguggagaa

SEQ ID NO: 3616265 - RNA, 22 nt, Human
cuuccauuccacacagaaugca

SEQ ID NO: 3616266 - RNA, 16 nt, Human
cuuccauuucugccuu

SEQ ID NO: 3616267 - RNA, 13 nt, Human
cuuccauuugcaa

SEQ ID NO: 3616268 - RNA, 14 nt, Human
cuuccauuuucccc

SEQ ID NO: 3616269 - RNA, 22 nt, Human
cuuccauuuucccccacuacug

SEQ ID NO: 3616270 - RNA, 17 nt, Human
cuuccauuuuccuacag

SEQ ID NO: 3616271 - RNA, 16 nt, Human
cuucccaaagcaagca

SEQ ID NO: 3616272 - RNA, 14 nt, Human
cuucccaaaggacu

SEQ ID NO: 3616273 - RNA, 19 nt, Human
cuucccaaaggacuccacc

SEQ ID NO: 3616274 - RNA, 23 nt, Human
cuucccaaaugugugcccagcuu

SEQ ID NO: 3616275 - RNA, 14 nt, Human
cuucccaacugcaa

SEQ ID NO: 3616276 - RNA, 18 nt, Human
cuucccaaggccuuaagc

SEQ ID NO: 3616277 - RNA, 21 nt, Human
cuucccaaguaagaggcugga

SEQ ID NO: 3616278 - RNA, 21 nt, Human
cuucccaaucagcacugaaaa

SEQ ID NO: 3616279 - RNA, 22 nt, Human
cuucccaaucagcacugaaaau

SEQ ID NO: 3616280 - RNA, 19 nt, Human
cuucccacccugccccuca

SEQ ID NO: 3616281 - RNA, 15 nt, Human
cuucccaccucccug

SEQ ID NO: 3616282 - RNA, 21 nt, Human
cuucccaccucucucacuccu

SEQ ID NO: 3616283 - RNA, 15 nt, Human
cuucccacucacccc

SEQ ID NO: 3616284 - RNA, 18 nt, Human
cuucccacucuagggcag

SEQ ID NO: 3616285 - RNA, 20 nt, Human
cuucccacucuagggcagug

SEQ ID NO: 3616286 - RNA, 15 nt, Human
cuucccacucuucuc

SEQ ID NO: 3616287 - RNA, 15 nt, Human
cuucccacuggaggc

SEQ ID NO: 3616288 - RNA, 15 nt, Human
cuucccacuggaggu

SEQ ID NO: 3616289 - RNA, 14 nt, Human
cuucccagcucucc

SEQ ID NO: 3616290 - RNA, 20 nt, Human
cuucccagcucucccucugg

SEQ ID NO: 3616291 - RNA, 19 nt, Human
cuucccaggaguggaggag

SEQ ID NO: 3616292 - RNA, 18 nt, Human
cuucccaggcuggggcug

SEQ ID NO: 3616293 - RNA, 14 nt, Human
cuucccaguggcug

SEQ ID NO: 3616294 - RNA, 15 nt, Human
cuucccaguggcugc

SEQ ID NO: 3616295 - RNA, 20 nt, Human
cuucccaguggcugcugccc

SEQ ID NO: 3616296 - RNA, 23 nt, Human
cuucccaguucaggagucccaag

SEQ ID NO: 3616297 - RNA, 17 nt, Human
cuucccauccccagcga

SEQ ID NO: 3616298 - RNA, 11 nt, Human
cuucccauccu

SEQ ID NO: 3616299 - RNA, 16 nt, Human
cuucccauccuacccu

SEQ ID NO: 3616300 - RNA, 20 nt, Human
cuucccaugacccaggcugg

SEQ ID NO: 3616301 - RNA, 18 nt, Human
cuucccaugcauucuggu

SEQ ID NO: 3616302 - RNA, 16 nt, Human
cuucccauuccauggc

SEQ ID NO: 3616303 - RNA, 13 nt, Human
cuucccauucucc

SEQ ID NO: 3616304 - RNA, 22 nt, Human
cuuccccaccccaguuuuuguu

SEQ ID NO: 3616305 - RNA, 15 nt, Human
cuuccccacccucag

SEQ ID NO: 3616306 - RNA, 14 nt, Human
cuuccccacugccu

SEQ ID NO: 3616307 - RNA, 13 nt, Human
cuuccccagccuc

SEQ ID NO: 3616308 - RNA, 14 nt, Human
cuuccccagccucu

SEQ ID NO: 3616309 - RNA, 14 nt, Human
cuuccccagcgucc

SEQ ID NO: 3616310 - RNA, 16 nt, Human
cuucccccaccaccaa

SEQ ID NO: 3616311 - RNA, 14 nt, Human
cuucccccagccca

SEQ ID NO: 3616312 - RNA, 15 nt, Human
cuucccccuccaauc

SEQ ID NO: 3616313 - RNA, 16 nt, Human
cuucccccuuuuuugu

SEQ ID NO: 3616314 - RNA, 18 nt, Human
cuuccccucccuggcucc

SEQ ID NO: 3616315 - RNA, 13 nt, Human
cuuccccuccuac

SEQ ID NO: 3616316 - RNA, 20 nt, Human
cuuccccucucuccuccugc

SEQ ID NO: 3616317 - RNA, 22 nt, Human
cuuccugucccaccucuucucu

SEQ ID NO: 3616318 - RNA, 14 nt, Human
cuuccuguccccau

SEQ ID NO: 3616319 - RNA, 19 nt, Human
cuuccuguccccaucuguc

SEQ ID NO: 3616320 - RNA, 15 nt, Human
cuuccuguccgcccu

SEQ ID NO: 3616321 - RNA, 14 nt, Human
cuuccuguguccug

SEQ ID NO: 3616322 - RNA, 15 nt, Human
cuuccugugugucca

SEQ ID NO: 3616323 - RNA, 22 nt, Human
cuuccuguuuaaaaaaccacau

SEQ ID NO: 3616324 - RNA, 17 nt, Human
cuuccuguuuuucacau

SEQ ID NO: 3616325 - RNA, 23 nt, Human
cuuccuguuuuucacauuuuccu

SEQ ID NO: 3616326 - RNA, 16 nt, Human
cuuccuuacccaaacu

SEQ ID NO: 3616327 - RNA, 17 nt, Human
cuuccuuaugcuucuuu

SEQ ID NO: 3616328 - RNA, 23 nt, Human
cuuccuucagagagcagugcuuu

SEQ ID NO: 3616329 - RNA, 15 nt, Human
cuuccuucugugaaa

SEQ ID NO: 3616330 - RNA, 15 nt, Human
cuuccuucuuugccc

SEQ ID NO: 3616331 - RNA, 16 nt, Human
cuuccuucuuugcccu

SEQ ID NO: 3616332 - RNA, 22 nt, Human
cuuccuugaagaacugcaggcc

SEQ ID NO: 3616333 - RNA, 22 nt, Human
cuuccuugaccagcagauccca

SEQ ID NO: 3616334 - RNA, 22 nt, Human
cuuccuugaccugcauuguaaa

SEQ ID NO: 3616335 - RNA, 23 nt, Human
cuuccuugaccugcauuguaaau

SEQ ID NO: 3616336 - RNA, 17 nt, Human
cuuccuugaccuuccuc

SEQ ID NO: 3616337 - RNA, 18 nt, Human
cuuccuugagacacggag

SEQ ID NO: 3616338 - RNA, 17 nt, Human
cuuccuugccagucuuu

SEQ ID NO: 3616339 - RNA, 17 nt, Human
cuuccuugcucugcacc

SEQ ID NO: 3616340 - RNA, 17 nt, Human
cuuccuugcuguccuag

SEQ ID NO: 3616341 - RNA, 19 nt, Human
cuuccuuggacucauuuua

SEQ ID NO: 3616342 - RNA, 20 nt, Human
cuuccuuggacucauuuuaa

SEQ ID NO: 3616343 - RNA, 17 nt, Human
cuuccuuguagccuuuu

SEQ ID NO: 3616344 - RNA, 16 nt, Human
cuuccuuuacuuuccc

SEQ ID NO: 3616345 - RNA, 20 nt, Human
cuuccuuuacuuucccuugc

SEQ ID NO: 3616346 - RNA, 19 nt, Human
cuuccuuucccaagccuuc

SEQ ID NO: 3616347 - RNA, 15 nt, Human
cuuccuuucuccagg

SEQ ID NO: 3616348 - RNA, 16 nt, Human
cuuccuuucuccagga

SEQ ID NO: 3616349 - RNA, 19 nt, Human
cuuccuuucuccaggacca

SEQ ID NO: 3616350 - RNA, 13 nt, Human
cuuccuuucuuga

SEQ ID NO: 3616351 - RNA, 14 nt, Human
cuuccuuuuaacug

SEQ ID NO: 3616352 - RNA, 12 nt, Human
cuuccuuuucac

SEQ ID NO: 3616353 - RNA, 13 nt, Human
cuuccuuuucacu

SEQ ID NO: 3616354 - RNA, 17 nt, Human
cuuccuuuucccugcuu

SEQ ID NO: 3616355 - RNA, 19 nt, Human
cuuccuuuucccugcuucc

SEQ ID NO: 3616356 - RNA, 14 nt, Human
cuucgaaaaucuag

SEQ ID NO: 3616357 - RNA, 16 nt, Human
cuucgcaggcaugucc

SEQ ID NO: 3616358 - RNA, 14 nt, Human
cuucgccaccuggg

SEQ ID NO: 3616359 - RNA, 22 nt, Human
cuucgcgcccgccccugcagca

SEQ ID NO: 3616360 - RNA, 17 nt, Human
cuucgcuucuugccucu

SEQ ID NO: 3616361 - RNA, 20 nt, Human
cuucgcuucuugccucugug

SEQ ID NO: 3616362 - RNA, 14 nt, Human
cuucggaccgcuug

SEQ ID NO: 3616363 - RNA, 16 nt, Human
cuucggccaggucaca

SEQ ID NO: 3616364 - RNA, 18 nt, Human
cuucggccuccauccuga

SEQ ID NO: 3616365 - RNA, 15 nt, Human
cuucgggaagagagg

SEQ ID NO: 3616366 - RNA, 18 nt, Human
cuucgggaagagaggagu

SEQ ID NO: 3616367 - RNA, 21 nt, Human
cuucgggaagagaggaguuca

SEQ ID NO: 3616368 - RNA, 12 nt, Human
cuucgggaccag

SEQ ID NO: 3616369 - RNA, 14 nt, Human
cuucgggaccagga

SEQ ID NO: 3616370 - RNA, 20 nt, Human
cuucgggaggucgaggcagg

SEQ ID NO: 3616371 - RNA, 16 nt, Human
cuucgggcugugcccg

SEQ ID NO: 3616372 - RNA, 18 nt, Human
cuucggggaacuccugga

SEQ ID NO: 3616373 - RNA, 16 nt, Human
cuucgguggaagagcu

SEQ ID NO: 3616374 - RNA, 23 nt, Human
cuucguaucccgagucugggaca

SEQ ID NO: 3616375 - RNA, 23 nt, Human
cuucgugaacauccccucccauc

SEQ ID NO: 3616376 - RNA, 21 nt, Human
cuucgugggaucugccccucc

SEQ ID NO: 3616377 - RNA, 17 nt, Human
cuucguucgcagagcuu

SEQ ID NO: 3616378 - RNA, 13 nt, Human
cuucguucuuuuu

SEQ ID NO: 3616379 - RNA, 15 nt, Human
cuucguucuuuuuaa

SEQ ID NO: 3616380 - RNA, 15 nt, Human
cuucguuuaaugaau

SEQ ID NO: 3616381 - RNA, 18 nt, Human
cuucguuuacuaugccug

SEQ ID NO: 3616382 - RNA, 19 nt, Human
cuucuaaaaaaaaacaaaa

SEQ ID NO: 3616383 - RNA, 19 nt, Human
cuucuaaaacuguacuuug

SEQ ID NO: 3616384 - RNA, 20 nt, Human
cuucuaaaacuguacuuuga

SEQ ID NO: 3616385 - RNA, 21 nt, Human
cuucuaaagguguugucccuu

SEQ ID NO: 3616386 - RNA, 22 nt, Human
cuucuaaagguguugucccuuc

SEQ ID NO: 3616387 - RNA, 23 nt, Human
cuucuaaagguguugucccuucu

SEQ ID NO: 3616388 - RNA, 15 nt, Human
cuucuaaaugcauau

SEQ ID NO: 3616389 - RNA, 13 nt, Human
cuucuaagacuuu

SEQ ID NO: 3616390 - RNA, 17 nt, Human
cuucuaaguaaaaccac

SEQ ID NO: 3616391 - RNA, 17 nt, Human
cuucuaaguaaauacaa

SEQ ID NO: 3616392 - RNA, 21 nt, Human
cuucuaaguaaauacaauuuu

SEQ ID NO: 3616393 - RNA, 17 nt, Human
cuucuaagucauucaua

SEQ ID NO: 3616394 - RNA, 13 nt, Human
cuucuaauaaauu

SEQ ID NO: 3616395 - RNA, 15 nt, Human
cuucuaauaaauuau

SEQ ID NO: 3616396 - RNA, 11 nt, Human
cuucuaauaua

SEQ ID NO: 3616397 - RNA, 13 nt, Human
cuucuacacucuc

SEQ ID NO: 3616398 - RNA, 18 nt, Human
cuucuaccaacuggaagc

SEQ ID NO: 3616399 - RNA, 13 nt, Human
cuucuaccugcca

SEQ ID NO: 3616400 - RNA, 14 nt, Human
cuucuaccugccac

SEQ ID NO: 3616401 - RNA, 17 nt, Human
cuucuaccugccacuca

SEQ ID NO: 3616402 - RNA, 15 nt, Human
cuucuaccugcccuc

SEQ ID NO: 3616403 - RNA, 19 nt, Human
cuucuaccugcccucaagg

SEQ ID NO: 3616404 - RNA, 17 nt, Human
cuucuaccuuaaaaugu

SEQ ID NO: 3616405 - RNA, 18 nt, Human
cuucuacucacuuuuccc

SEQ ID NO: 3616406 - RNA, 23 nt, Human
cuucuacucacuuuucccacucc

SEQ ID NO: 3616407 - RNA, 18 nt, Human
ccuuuccuccuuuaucac

SEQ ID NO: 3616408 - RNA, 15 nt, Human
ccuuuccuuccuaau

SEQ ID NO: 3616409 - RNA, 13 nt, Human
ccuuucgaggccu

SEQ ID NO: 3616410 - RNA, 15 nt, Human
ccuuucuaaacaaga

SEQ ID NO: 3616411 - RNA, 23 nt, Human
ccuuucuaaacaagauuuuaaag

SEQ ID NO: 3616412 - RNA, 19 nt, Human
ccuuucuagagcacugcca

SEQ ID NO: 3616413 - RNA, 18 nt, Human
ccuuucuaucauuuuugu

SEQ ID NO: 3616414 - RNA, 13 nt, Human
ccuuucuccagcc

SEQ ID NO: 3616415 - RNA, 17 nt, Human
ccuuucuccagccagca

SEQ ID NO: 3616416 - RNA, 15 nt, Human
ccuuucugaucuuca

SEQ ID NO: 3616417 - RNA, 12 nt, Human
ccuuucugugcc

SEQ ID NO: 3616418 - RNA, 13 nt, Human
ccuuucugugccc

SEQ ID NO: 3616419 - RNA, 20 nt, Human
ccuuucugugcccuacucau

SEQ ID NO: 3616420 - RNA, 19 nt, Human
ccuuucuuccggccccucc

SEQ ID NO: 3616421 - RNA, 23 nt, Human
ccuuucuugacaaaaccuaacuu

SEQ ID NO: 3616422 - RNA, 15 nt, Human
ccuuucuuggccagu

SEQ ID NO: 3616423 - RNA, 18 nt, Human
ccuuucuugguucauaaa

SEQ ID NO: 3616424 - RNA, 15 nt, Human
ccuuucuuuuucuuc

SEQ ID NO: 3616425 - RNA, 13 nt, Human
ccuuugaagagga

SEQ ID NO: 3616426 - RNA, 23 nt, Human
ccuuugaagaggaaaaugaauaa

SEQ ID NO: 3616427 - RNA, 14 nt, Human
ccuuugaagccuca

SEQ ID NO: 3616428 - RNA, 14 nt, Human
ccuuugaauccucu

SEQ ID NO: 3616429 - RNA, 14 nt, Human
ccuuugacauuuaa

SEQ ID NO: 3616430 - RNA, 22 nt, Human
ccuuugaccugccucccuucau

SEQ ID NO: 3616431 - RNA, 16 nt, Human
ccuuugacgccauccc

SEQ ID NO: 3616432 - RNA, 22 nt, Human
ccuuugacgccaucccagcccc

SEQ ID NO: 3616433 - RNA, 17 nt, Human
ccuuugauaaaauaaau

SEQ ID NO: 3616434 - RNA, 18 nt, Human
ccuuugcaaaucaguguu

SEQ ID NO: 3616435 - RNA, 17 nt, Human
ccuuugcacugagggcc

SEQ ID NO: 3616436 - RNA, 13 nt, Human
ccuuugcagggca

SEQ ID NO: 3616437 - RNA, 20 nt, Human
ccuuugcaucguccccuccc

SEQ ID NO: 3616438 - RNA, 15 nt, Human
ccuuugcauggagug

SEQ ID NO: 3616439 - RNA, 13 nt, Human
ccuuugccuccag

SEQ ID NO: 3616440 - RNA, 23 nt, Human
ccuuugccuccagaagcacuggg

SEQ ID NO: 3616441 - RNA, 20 nt, Human
ccuuugcuccaccccacuca

SEQ ID NO: 3616442 - RNA, 11 nt, Human
ccuuugcuguc

SEQ ID NO: 3616443 - RNA, 13 nt, Human
ccuuugcugugag

SEQ ID NO: 3616444 - RNA, 22 nt, Human
ccuuugcugugaggcuguccug

SEQ ID NO: 3616445 - RNA, 23 nt, Human
ccuuugcugugaggcuguccugu

SEQ ID NO: 3616446 - RNA, 19 nt, Human
ccuuugcuuaugaauauuu

SEQ ID NO: 3616447 - RNA, 21 nt, Human
ccuuugcuucccuuuuuuccu

SEQ ID NO: 3616448 - RNA, 16 nt, Human
ccuuuggaugaccaga

SEQ ID NO: 3616449 - RNA, 20 nt, Human
ccuuuggcaggugcagcccc

SEQ ID NO: 3616450 - RNA, 11 nt, Human
ccuuuggcuuc

SEQ ID NO: 3616451 - RNA, 14 nt, Human
ccuuugggaagggg

SEQ ID NO: 3616452 - RNA, 14 nt, Human
ccuuugggcccugc

SEQ ID NO: 3616453 - RNA, 23 nt, Human
ccuuugggccucugcuucucuca

SEQ ID NO: 3616454 - RNA, 16 nt, Human
ccuuugggugcuguuu

SEQ ID NO: 3616455 - RNA, 19 nt, Human
ccuuugggugcuguuuugc

SEQ ID NO: 3616456 - RNA, 14 nt, Human
ccuuugguucuggc

SEQ ID NO: 3616457 - RNA, 12 nt, Human
ccuuuguaacca

SEQ ID NO: 3616458 - RNA, 16 nt, Human
ccuuuguagcacucag

SEQ ID NO: 3616459 - RNA, 12 nt, Human
ccuuuguauauu

SEQ ID NO: 3616460 - RNA, 19 nt, Human
ccuuuguauauuauuucua

SEQ ID NO: 3616461 - RNA, 23 nt, Human
ccuuugucaucuuucuucuauuu

SEQ ID NO: 3616462 - RNA, 21 nt, Human
cuucuccacccugcucuccga

SEQ ID NO: 3616463 - RNA, 17 nt, Human
cuucuccacuggaugga

SEQ ID NO: 3616464 - RNA, 23 nt, Human
cuucuccagacaaaccagaagca

SEQ ID NO: 3616465 - RNA, 12 nt, Human
cuucuccagccu

SEQ ID NO: 3616466 - RNA, 15 nt, Human
cuucuccagccuaga

SEQ ID NO: 3616467 - RNA, 17 nt, Human
cuucuccaggcuguauc

SEQ ID NO: 3616468 - RNA, 20 nt, Human
cuucuccauccuuucugccu

SEQ ID NO: 3616469 - RNA, 22 nt, Human
cuucuccauccuuucugccucu

SEQ ID NO: 3616470 - RNA, 11 nt, Human
cuucuccaucu

SEQ ID NO: 3616471 - RNA, 13 nt, Human
cuucuccaucucu

SEQ ID NO: 3616472 - RNA, 19 nt, Human
cuucuccaucucucuggcc

SEQ ID NO: 3616473 - RNA, 21 nt, Human
cuucuccaucucucuggcccu

SEQ ID NO: 3616474 - RNA, 19 nt, Human
cuucuccauggcccugcca

SEQ ID NO: 3616475 - RNA, 13 nt, Human
cuucucccacacu

SEQ ID NO: 3616476 - RNA, 13 nt, Human
cuucucccagaau

SEQ ID NO: 3616477 - RNA, 15 nt, Human
cuucucccaggcaag

SEQ ID NO: 3616478 - RNA, 17 nt, Human
cuucucccaggcaaggc

SEQ ID NO: 3616479 - RNA, 18 nt, Human
cuucucccaggcaaggcu

SEQ ID NO: 3616480 - RNA, 19 nt, Human
cuucucccaggcaaggcug

SEQ ID NO: 3616481 - RNA, 14 nt, Human
cuucuccccagaau

SEQ ID NO: 3616482 - RNA, 16 nt, Human
cuucuccccagaguuc

SEQ ID NO: 3616483 - RNA, 17 nt, Human
cuucuccccagcuccca

SEQ ID NO: 3616484 - RNA, 18 nt, Human
cuucuccccagcucccag

SEQ ID NO: 3616485 - RNA, 13 nt, Human
cuucuccccugca

SEQ ID NO: 3616486 - RNA, 17 nt, Human
cuucuccccugcacugu

SEQ ID NO: 3616487 - RNA, 18 nt, Human
cuucuccccugcacugua

SEQ ID NO: 3616488 - RNA, 22 nt, Human
cuucuccccugcacuguaaaau

SEQ ID NO: 3616489 - RNA, 16 nt, Human
cuucucccuagcuccu

SEQ ID NO: 3616490 - RNA, 22 nt, Human
cuucucccugcacaagccaggg

SEQ ID NO: 3616491 - RNA, 12 nt, Human
cuucuccgccag

SEQ ID NO: 3616492 - RNA, 13 nt, Human
cuucuccgccagc

SEQ ID NO: 3616493 - RNA, 18 nt, Human
cuucuccgccagccuccu

SEQ ID NO: 3616494 - RNA, 19 nt, Human
cuucuccgccagccuccuc

SEQ ID NO: 3616495 - RNA, 21 nt, Human
cuucuccgccagccuccucug

SEQ ID NO: 3616496 - RNA, 23 nt, Human
cuucuccuacauaucccuuccag

SEQ ID NO: 3616497 - RNA, 19 nt, Human
cuucuccugacccaguccc

SEQ ID NO: 3616498 - RNA, 21 nt, Human
cuucuccuggaguugcauuga

SEQ ID NO: 3616499 - RNA, 16 nt, Human
cuucuccuugauaaca

SEQ ID NO: 3616500 - RNA, 14 nt, Human
cuucuccuuucaca

SEQ ID NO: 3616501 - RNA, 21 nt, Human
cuucucgaccacgggaagcau

SEQ ID NO: 3616502 - RNA, 16 nt, Human
cuucucgcuuuugcca

SEQ ID NO: 3616503 - RNA, 20 nt, Human
cuucucuaauucuuccuuug

SEQ ID NO: 3616504 - RNA, 11 nt, Human
cuucucuacag

SEQ ID NO: 3616505 - RNA, 20 nt, Human
cuucucuacccaucuuaaaa

SEQ ID NO: 3616506 - RNA, 17 nt, Human
cuucucuagcugguggu

SEQ ID NO: 3616507 - RNA, 13 nt, Human
cuucucuauaaaa

SEQ ID NO: 3616508 - RNA, 17 nt, Human
cuucucuauaaaaaaua

SEQ ID NO: 3616509 - RNA, 18 nt, Human
cuucucucaccuccuaaa

SEQ ID NO: 3616510 - RNA, 22 nt, Human
cuucucucagaccgucuuccuc

SEQ ID NO: 3616511 - RNA, 16 nt, Human
cuucucucaucucuua

SEQ ID NO: 3616512 - RNA, 12 nt, Human
cuucucuccagc

SEQ ID NO: 3616513 - RNA, 13 nt, Human
cuucucuccagcc

SEQ ID NO: 3616514 - RNA, 15 nt, Human
cuucucuccagcuga

SEQ ID NO: 3616515 - RNA, 17 nt, Human
cuucucuccagcugacu

SEQ ID NO: 3616516 - RNA, 15 nt, Human
cuucucucccugcca

SEQ ID NO: 3616517 - RNA, 13 nt, Human
cuucucucucccu

SEQ ID NO: 3616518 - RNA, 16 nt, Human
cuucucugaacacagg

SEQ ID NO: 3616519 - RNA, 17 nt, Human
cuucucugaacacaggc

SEQ ID NO: 3616520 - RNA, 19 nt, Human
cuucucugaacacaggcag

SEQ ID NO: 3616521 - RNA, 20 nt, Human
cuucucugaacacaggcagc

SEQ ID NO: 3616522 - RNA, 23 nt, Human
cuucucugaacacaggcagcuuu

SEQ ID NO: 3616523 - RNA, 13 nt, Human
cuucucugaaggg

SEQ ID NO: 3616524 - RNA, 14 nt, Human
cuucucugacuucu

SEQ ID NO: 3616525 - RNA, 19 nt, Human
cuucucugcccagcuuuuc

SEQ ID NO: 3616526 - RNA, 21 nt, Human
cuucucugcccauuccccagc

SEQ ID NO: 3616527 - RNA, 22 nt, Human
cuucucugcccauuccccagcc

SEQ ID NO: 3616528 - RNA, 23 nt, Human
cuucucugccuuugacauuuaau

SEQ ID NO: 3616529 - RNA, 11 nt, Human
cuucucugcuc

SEQ ID NO: 3616530 - RNA, 16 nt, Human
cuucucugcuccacca

SEQ ID NO: 3616531 - RNA, 22 nt, Human
cuucucuggagccaaguccaga

SEQ ID NO: 3616532 - RNA, 22 nt, Human
cuucucuguauuccuagaaacu

SEQ ID NO: 3616533 - RNA, 13 nt, Human
cuucucugucuca

SEQ ID NO: 3616534 - RNA, 14 nt, Human
cuucucugucucag

SEQ ID NO: 3616535 - RNA, 11 nt, Human
cuucucuguga

SEQ ID NO: 3616536 - RNA, 21 nt, Human
cuucucugugaacgauuuaga

SEQ ID NO: 3616537 - RNA, 14 nt, Human
cuucucugugagaa

SEQ ID NO: 3616538 - RNA, 18 nt, Human
cuucucugugagaagguu

SEQ ID NO: 3616539 - RNA, 21 nt, Human
cuucucuguuccauugaaucu

SEQ ID NO: 3616540 - RNA, 16 nt, Human
cuucucuuaaacuugu

SEQ ID NO: 3616541 - RNA, 19 nt, Human
cuucucuuaaacuugugaa

SEQ ID NO: 3616542 - RNA, 20 nt, Human
cuucucuuaaacuugugaau

SEQ ID NO: 3616543 - RNA, 15 nt, Human
cuucucuuaauuuaa

SEQ ID NO: 3616544 - RNA, 16 nt, Human
cuucucuuaauuuaau

SEQ ID NO: 3616545 - RNA, 14 nt, Human
cuucucuuccugua

SEQ ID NO: 3616546 - RNA, 16 nt, Human
cuucucuugcuuucua

SEQ ID NO: 3616547 - RNA, 17 nt, Human
cuucucuugcuuucuau

SEQ ID NO: 3616548 - RNA, 21 nt, Human
cuucucuuuaacucaggacuc

SEQ ID NO: 3616549 - RNA, 15 nt, Human
cuucugaaaugaaac

SEQ ID NO: 3616550 - RNA, 16 nt, Human
cuucugaauaaagcaa

SEQ ID NO: 3616551 - RNA, 15 nt, Human
cuucugaccacacuu

SEQ ID NO: 3616552 - RNA, 18 nt, Human
cuucugacccaugcugcc

SEQ ID NO: 3616553 - RNA, 20 nt, Human
cuucugacccaugcugcccu

SEQ ID NO: 3616554 - RNA, 22 nt, Human
cuucugaccuuuuggugaaagc

SEQ ID NO: 3616555 - RNA, 14 nt, Human
cuucugacggcccu

SEQ ID NO: 3616556 - RNA, 19 nt, Human
cuucugacggcccugcaau

SEQ ID NO: 3616557 - RNA, 20 nt, Human
cuucugacgugccuuuugca

SEQ ID NO: 3616558 - RNA, 13 nt, Human
cuucugacugcug

SEQ ID NO: 3616559 - RNA, 11 nt, Human
cuucugagacg

SEQ ID NO: 3616560 - RNA, 15 nt, Human
cuucugagcacuguu

SEQ ID NO: 3616561 - RNA, 22 nt, Human
cuucugagcagcgagccugcua

SEQ ID NO: 3616562 - RNA, 18 nt, Human
cuucugagcuauuucauc

SEQ ID NO: 3616563 - RNA, 12 nt, Human
cuucugagcucc

SEQ ID NO: 3616564 - RNA, 16 nt, Human
cuucugagcuccuguc

SEQ ID NO: 3616565 - RNA, 20 nt, Human
cuucugaucacugaaauaaa

SEQ ID NO: 3616566 - RNA, 20 nt, Human
cuucugaugaaauguuaaca

SEQ ID NO: 3616567 - RNA, 17 nt, Human
cuucugaugaaucuugc

SEQ ID NO: 3616568 - RNA, 18 nt, Human
cgaaagcucuagaaucug

SEQ ID NO: 3616569 - RNA, 19 nt, Human
cgaaagggacuuggaagcu

SEQ ID NO: 3616570 - RNA, 23 nt, Human
cgaaagggacuuggaagcuccgc

SEQ ID NO: 3616571 - RNA, 23 nt, Human
cgaaaggucaccucacucagcac

SEQ ID NO: 3616572 - RNA, 16 nt, Human
cgaaauaauuguuguu

SEQ ID NO: 3616573 - RNA, 17 nt, Human
cgaaauaucaaagucau

SEQ ID NO: 3616574 - RNA, 15 nt, Human
cgaaaucccugcuca

SEQ ID NO: 3616575 - RNA, 18 nt, Human
cgaaaugcugucuuucuu

SEQ ID NO: 3616576 - RNA, 14 nt, Human
cgaaauguuauuuu

SEQ ID NO: 3616577 - RNA, 11 nt, Human
cgaacaaaaca

SEQ ID NO: 3616578 - RNA, 19 nt, Human
cgaacauccaaccuuccca

SEQ ID NO: 3616579 - RNA, 14 nt, Human
cgaaccaauauuug

SEQ ID NO: 3616580 - RNA, 16 nt, Human
cgaacccaccugcuga

SEQ ID NO: 3616581 - RNA, 17 nt, Human
cgaaccuuggccugggc

SEQ ID NO: 3616582 - RNA, 18 nt, Human
cgaaccuuggccugggcc

SEQ ID NO: 3616583 - RNA, 19 nt, Human
cgaaccuuggccugggccg

SEQ ID NO: 3616584 - RNA, 12 nt, Human
cgaacuccuggg

SEQ ID NO: 3616585 - RNA, 16 nt, Human
cgaacuccugggcuca

SEQ ID NO: 3616586 - RNA, 12 nt, Human
cgaacuggcugc

SEQ ID NO: 3616587 - RNA, 19 nt, Human
cgaagaaaaaaaauaacac

SEQ ID NO: 3616588 - RNA, 18 nt, Human
cgaagacccucuugccca

SEQ ID NO: 3616589 - RNA, 21 nt, Human
cgaagaguauuuuugacagaa

SEQ ID NO: 3616590 - RNA, 16 nt, Human
cgaagcccaggggccg

SEQ ID NO: 3616591 - RNA, 11 nt, Human
cgaagcgcgcc

SEQ ID NO: 3616592 - RNA, 15 nt, Human
cgaagcguuguccuc

SEQ ID NO: 3616593 - RNA, 17 nt, Human
cgaagcguuguccucag

SEQ ID NO: 3616594 - RNA, 21 nt, Human
cgaagcguuguccucagcccc

SEQ ID NO: 3616595 - RNA, 13 nt, Human
cgaagcucagccc

SEQ ID NO: 3616596 - RNA, 14 nt, Human
cgaagcucuggcug

SEQ ID NO: 3616597 - RNA, 15 nt, Human
cgaagcucuggcuga

SEQ ID NO: 3616598 - RNA, 18 nt, Human
cgaagcuuugaaggccga

SEQ ID NO: 3616599 - RNA, 14 nt, Human
cgaagggcccccac

SEQ ID NO: 3616600 - RNA, 15 nt, Human
cgaaguagcuugcuc

SEQ ID NO: 3616601 - RNA, 18 nt, Human
cgaagucaagcucaacag

SEQ ID NO: 3616602 - RNA, 16 nt, Human
cgaagucauuaaacug

SEQ ID NO: 3616603 - RNA, 16 nt, Human
cgaaguccuauggaaa

SEQ ID NO: 3616604 - RNA, 17 nt, Human
cgaaguucaagaucaaa

SEQ ID NO: 3616605 - RNA, 18 nt, Human
cgaaguucaagaucaaaa

SEQ ID NO: 3616606 - RNA, 14 nt, Human
cgaauacaaaauug

SEQ ID NO: 3616607 - RNA, 21 nt, Human
cgaauauuaugcccaguuucu

SEQ ID NO: 3616608 - RNA, 12 nt, Human
aaaaaaaaaguu

SEQ ID NO: 3616609 - RNA, 13 nt, Human
aaaaaaaaaguuc

SEQ ID NO: 3616610 - RNA, 14 nt, Human
aaaaaaaaauguuc

SEQ ID NO: 3616611 - RNA, 11 nt, Human
aaaaaaaagag

SEQ ID NO: 3616612 - RNA, 12 nt, Human
aaaaaaaagcuu

SEQ ID NO: 3616613 - RNA, 14 nt, Human
aaaaaaaaguugca

SEQ ID NO: 3616614 - RNA, 13 nt, Human
aaaaaaacacaaa

SEQ ID NO: 3616615 - RNA, 11 nt, Human
aaaaaaaccaa

SEQ ID NO: 3616616 - RNA, 19 nt, Human
aaaaaaaccugagauuuau

SEQ ID NO: 3616617 - RNA, 10 nt, Human
aaaaaaacug

SEQ ID NO: 3616618 - RNA, 13 nt, Human
aaaaaaacuuuua

SEQ ID NO: 3616619 - RNA, 13 nt, Human
aaaaaaagaauaa

SEQ ID NO: 3616620 - RNA, 13 nt, Human
aaaaaaagacaag

SEQ ID NO: 3616621 - RNA, 10 nt, Human
aaaaaaagag

SEQ ID NO: 3616622 - RNA, 14 nt, Human
aaaaaaaguauuau

SEQ ID NO: 3616623 - RNA, 12 nt, Human
aaaaaaaguugu

SEQ ID NO: 3616624 - RNA, 12 nt, Human
aaaaaaauacaa

SEQ ID NO: 3616625 - RNA, 12 nt, Human
aaaaaaaucaca

SEQ ID NO: 3616626 - RNA, 14 nt, Human
aaaaaaaucugcag

SEQ ID NO: 3616627 - RNA, 13 nt, Human
aaaaaaaugaaug

SEQ ID NO: 3616628 - RNA, 12 nt, Human
aaaaaaaugacu

SEQ ID NO: 3616629 - RNA, 13 nt, Human
aaaaaaaugacua

SEQ ID NO: 3616630 - RNA, 13 nt, Human
aaaaaaauguugu

SEQ ID NO: 3616631 - RNA, 19 nt, Human
aaaaaaauugaaauguaag

SEQ ID NO: 3616632 - RNA, 11 nt, Human
aaaaaaauuua

SEQ ID NO: 3616633 - RNA, 10 nt, Human
aaaaaacuac

SEQ ID NO: 3616634 - RNA, 22 nt, Human
aaaaaacugcugacuguuuucu

SEQ ID NO: 3616635 - RNA, 11 nt, Human
aaaaaacuuuu

SEQ ID NO: 3616636 - RNA, 9 nt, Human
aaaaaagaa

SEQ ID NO: 3616637 - RNA, 12 nt, Human
aaaaaagagaca

SEQ ID NO: 3616638 - RNA, 21 nt, Human
aaaaaagaggaaagaaugaaa

SEQ ID NO: 3616639 - RNA, 13 nt, Human
aaaaaagauauau

SEQ ID NO: 3616640 - RNA, 19 nt, Human
aaaaaagauuguauugcug

SEQ ID NO: 3616641 - RNA, 11 nt, Human
aaaaaagcaug

SEQ ID NO: 3616642 - RNA, 21 nt, Human
aaaaaagcuggugggugaaag

SEQ ID NO: 3616643 - RNA, 18 nt, Human
aaaaaaggaugcaacaau

SEQ ID NO: 3616644 - RNA, 16 nt, Human
aaaaaaggcauuguuu

SEQ ID NO: 3616645 - RNA, 17 nt, Human
aaaaaagucucuauuua

SEQ ID NO: 3616646 - RNA, 16 nt, Human
aaaaaauaaaacauuu

SEQ ID NO: 3616647 - RNA, 16 nt, Human
aaaaaauacugccaga

SEQ ID NO: 3616648 - RNA, 13 nt, Human
aaaaaauacuugu

SEQ ID NO: 3616649 - RNA, 20 nt, Human
aaaaaauagaugucuuuuau

SEQ ID NO: 3616650 - RNA, 11 nt, Human
aaaaaauaugu

SEQ ID NO: 3616651 - RNA, 15 nt, Human
aaaaaaucugcagaa

SEQ ID NO: 3616652 - RNA, 12 nt, Human
aaaaaaugguuc

SEQ ID NO: 3616653 - RNA, 13 nt, Human
aaaaaauguuguu

SEQ ID NO: 3616654 - RNA, 18 nt, Human
aaaaaauuggggauucuu

SEQ ID NO: 3616655 - RNA, 23 nt, Human
aaaaaauuggggauucuuaaagu

SEQ ID NO: 3616656 - RNA, 22 nt, Human
aaaaaauuugagaaagccuuca

SEQ ID NO: 3616657 - RNA, 11 nt, Human
aaaaacaaaaa

SEQ ID NO: 3616658 - RNA, 12 nt, Human
aaaaacacagca

SEQ ID NO: 3616659 - RNA, 17 nt, Human
aaaaacaccuagcuuua

SEQ ID NO: 3616660 - RNA, 12 nt, Human
aaaaacacuagu

SEQ ID NO: 3616661 - RNA, 19 nt, Human
aaaaacagcauugcuuucu

SEQ ID NO: 3616662 - RNA, 19 nt, Human
aaaaacagccucacagaag

SEQ ID NO: 3616663 - RNA, 21 nt, Human
aaaaacagguauauacuuuga

SEQ ID NO: 3616664 - RNA, 18 nt, Human
aaaaacauaacauaaauu

SEQ ID NO: 3616665 - RNA, 14 nt, Human
aaaaacauauucuu

SEQ ID NO: 3616666 - RNA, 14 nt, Human
aaaaacauggccuu

SEQ ID NO: 3616667 - RNA, 16 nt, Human
aaaaaccacacaaaga

SEQ ID NO: 3616668 - RNA, 19 nt, Human
aaaaaccaccaaaaacaaa

SEQ ID NO: 3616669 - RNA, 16 nt, Human
aaaaaccaguauugua

SEQ ID NO: 3616670 - RNA, 16 nt, Human
aaaaaccgaauaaaug

SEQ ID NO: 3616671 - RNA, 17 nt, Human
aaaaaccgaauaaaugu

SEQ ID NO: 3616672 - RNA, 18 nt, Human
aaaaaccugagauuuauu

SEQ ID NO: 3616673 - RNA, 22 nt, Human
aaaaaccuuguauaucuuguuu

SEQ ID NO: 3616674 - RNA, 15 nt, Human
aaaaacgaaaacagu

SEQ ID NO: 3616675 - RNA, 14 nt, Human
aaaaacuaaauugu

SEQ ID NO: 3616676 - RNA, 12 nt, Human
aaaaacuauuaa

SEQ ID NO: 3616677 - RNA, 21 nt, Human
aaaaacuauucgaaugaaaag

SEQ ID NO: 3616678 - RNA, 11 nt, Human
aaaaacuauuu

SEQ ID NO: 3616679 - RNA, 23 nt, Human
aaaaacucaauuaaaauuuuguu

SEQ ID NO: 3616680 - RNA, 20 nt, Human
aaaaacucugggaaauaaga

SEQ ID NO: 3616681 - RNA, 13 nt, Human
aaaaacugaaaaa

SEQ ID NO: 3616682 - RNA, 13 nt, Human
aaaaacugaaguu

SEQ ID NO: 3616683 - RNA, 22 nt, Human
aaaaacuggaacggugaaggug

SEQ ID NO: 3616684 - RNA, 23 nt, Human
aaaaacuucauguaauuuuauuu

SEQ ID NO: 3616685 - RNA, 18 nt, Human
aaaaacuuucuacucauu

SEQ ID NO: 3616686 - RNA, 19 nt, Human
aaaaacuuucuacucauuu

SEQ ID NO: 3616687 - RNA, 21 nt, Human
aaaaacuuuggaaccagacuc

SEQ ID NO: 3616688 - RNA, 17 nt, Human
aaaaacuuuuauaaauu

SEQ ID NO: 3616689 - RNA, 18 nt, Human
aaaaacuuuuauaaauua

SEQ ID NO: 3616690 - RNA, 14 nt, Human
aaaaagaaacaaga

SEQ ID NO: 3616691 - RNA, 16 nt, Human
aaaaagaaacauuugg

SEQ ID NO: 3616692 - RNA, 15 nt, Human
aaaaagaaaggaggg

SEQ ID NO: 3616693 - RNA, 19 nt, Human
aaaaagaaaggcuguuaaa

SEQ ID NO: 3616694 - RNA, 23 nt, Human
ucaucccuucucuuccaggcagc

SEQ ID NO: 3616695 - RNA, 12 nt, Human
ucaucccuuucc

SEQ ID NO: 3616696 - RNA, 14 nt, Human
ucauccgaggcagg

SEQ ID NO: 3616697 - RNA, 15 nt, Human
ucauccggcagccug

SEQ ID NO: 3616698 - RNA, 19 nt, Human
ucauccggcagccuggaug

SEQ ID NO: 3616699 - RNA, 17 nt, Human
ucauccuaaagaacaaa

SEQ ID NO: 3616700 - RNA, 18 nt, Human
ucauccuauucuuucgaa

SEQ ID NO: 3616701 - RNA, 13 nt, Human
ucauccuccagua

SEQ ID NO: 3616702 - RNA, 21 nt, Human
ucauccuccaguaccuugcuu

SEQ ID NO: 3616703 - RNA, 13 nt, Human
ucauccuccugga

SEQ ID NO: 3616704 - RNA, 15 nt, Human
ucauccuccuggaac

SEQ ID NO: 3616705 - RNA, 12 nt, Human
ucauccucuggc

SEQ ID NO: 3616706 - RNA, 19 nt, Human
ucauccugacucugccccc

SEQ ID NO: 3616707 - RNA, 18 nt, Human
ucauccuuagcaacagcc

SEQ ID NO: 3616708 - RNA, 19 nt, Human
ucaucgaaaauucauuuca

SEQ ID NO: 3616709 - RNA, 21 nt, Human
ucaucgaaaauucauuucaca

SEQ ID NO: 3616710 - RNA, 18 nt, Human
ucaucgcguccuccuacc

SEQ ID NO: 3616711 - RNA, 14 nt, Human
ucaucuaccuagau

SEQ ID NO: 3616712 - RNA, 18 nt, Human
ucaucuaccuuuucucuu

SEQ ID NO: 3616713 - RNA, 18 nt, Human
ucaucuagcgcaauugaa

SEQ ID NO: 3616714 - RNA, 15 nt, Human
ucaucuauucaagca

SEQ ID NO: 3616715 - RNA, 15 nt, Human
ucaucuauuucugag

SEQ ID NO: 3616716 - RNA, 17 nt, Human
ucaucuauuucugagaa

SEQ ID NO: 3616717 - RNA, 12 nt, Human
ucaucuauuuug

SEQ ID NO: 3616718 - RNA, 14 nt, Human
ucaucuauuuugau

SEQ ID NO: 3616719 - RNA, 19 nt, Human
ucaucuauuuugaugcagc

SEQ ID NO: 3616720 - RNA, 20 nt, Human
ucaucuauuuugaugcagca

SEQ ID NO: 3616721 - RNA, 16 nt, Human
ucaucucaguccucaa

SEQ ID NO: 3616722 - RNA, 14 nt, Human
ucaucucauuuaag

SEQ ID NO: 3616723 - RNA, 16 nt, Human
ucaucucauuuaaggg

SEQ ID NO: 3616724 - RNA, 21 nt, Human
ucaucucauuuaagggaaaaa

SEQ ID NO: 3616725 - RNA, 21 nt, Human
ucaucucauuuaauccucccu

SEQ ID NO: 3616726 - RNA, 16 nt, Human
ucaucuccaucagcug

SEQ ID NO: 3616727 - RNA, 12 nt, Human
ucaucucccacc

SEQ ID NO: 3616728 - RNA, 11 nt, Human
ucaucucuccu

SEQ ID NO: 3616729 - RNA, 20 nt, Human
ucaucucuuagcuccccucc

SEQ ID NO: 3616730 - RNA, 21 nt, Human
ucaucucuuagcuccccucca

SEQ ID NO: 3616731 - RNA, 15 nt, Human
ucaucugaaauguua

SEQ ID NO: 3616732 - RNA, 23 nt, Human
ucaucugaaggggcaaauucuuu

SEQ ID NO: 3616733 - RNA, 20 nt, Human
ucaucugaauuugcccuggg

SEQ ID NO: 3616734 - RNA, 21 nt, Human
ucaucugaauuugcccuggga

SEQ ID NO: 3616735 - RNA, 13 nt, Human
ucaucugagaaug

SEQ ID NO: 3616736 - RNA, 21 nt, Human
ucaucugauuggacaggcaug

SEQ ID NO: 3616737 - RNA, 16 nt, Human
ucaucugcacccuucu

SEQ ID NO: 3616738 - RNA, 23 nt, Human
ucaucugcacccuucuuuucuca

SEQ ID NO: 3616739 - RNA, 13 nt, Human
ucaucugcugguc

SEQ ID NO: 3616740 - RNA, 23 nt, Human
ucaucuggauaggagccugcugg

SEQ ID NO: 3616741 - RNA, 13 nt, Human
ucaucugggaaag

SEQ ID NO: 3616742 - RNA, 12 nt, Human
ucaucugucccu

SEQ ID NO: 3616743 - RNA, 17 nt, Human
ucaucuguuuuucuuuu

SEQ ID NO: 3616744 - RNA, 23 nt, Human
ucaucuuagguuggcaaaaaggc

SEQ ID NO: 3616745 - RNA, 15 nt, Human
ucaucuuauucagca

SEQ ID NO: 3616746 - RNA, 13 nt, Human
ucaucuucacugc

SEQ ID NO: 3616747 - RNA, 12 nt, Human
ucaucuuccugu

SEQ ID NO: 3616748 - RNA, 15 nt, Human
ucaucuucucagcuc

SEQ ID NO: 3616749 - RNA, 18 nt, Human
ucaucuucucagcuccca

SEQ ID NO: 3616750 - RNA, 16 nt, Human
ucaucuucuucuuuaa

SEQ ID NO: 3616751 - RNA, 18 nt, Human
ucaucuugaagggcccag

SEQ ID NO: 3616752 - RNA, 19 nt, Human
ucaucuugacagagccugc

SEQ ID NO: 3616753 - RNA, 21 nt, Human
ucaucuugacagagccugccc

SEQ ID NO: 3616754 - RNA, 19 nt, Human
ucaucuugaccaagcagga

SEQ ID NO: 3616755 - RNA, 23 nt, Human
ucaucuugaccaagcaggaagcu

SEQ ID NO: 3616756 - RNA, 17 nt, Human
ucaucuugcuaccagua

SEQ ID NO: 3616757 - RNA, 18 nt, Human
ucaucuugcuaccaguau

SEQ ID NO: 3616758 - RNA, 21 nt, Human
ucaucuugcuaccaguauuua

SEQ ID NO: 3616759 - RNA, 14 nt, Human
ucaucuuucccucc

SEQ ID NO: 3616760 - RNA, 15 nt, Human
ucauguuuuggugaa

SEQ ID NO: 3616761 - RNA, 16 nt, Human
ucauguuuugugacua

SEQ ID NO: 3616762 - RNA, 17 nt, Human
ucauguuuugugacuau

SEQ ID NO: 3616763 - RNA, 21 nt, Human
ucauuaaaauaaauaaaugca

SEQ ID NO: 3616764 - RNA, 16 nt, Human
ucauuaaacuuuuuua

SEQ ID NO: 3616765 - RNA, 18 nt, Human
ucauuaaaggcuucucuc

SEQ ID NO: 3616766 - RNA, 12 nt, Human
ucauuaaaguuc

SEQ ID NO: 3616767 - RNA, 14 nt, Human
ucauuaaaguucua

SEQ ID NO: 3616768 - RNA, 12 nt, Human
ucauuaaauaaa

SEQ ID NO: 3616769 - RNA, 14 nt, Human
ucauuaaauaaauu

SEQ ID NO: 3616770 - RNA, 19 nt, Human
ucauuaaauaaauuugacu

SEQ ID NO: 3616771 - RNA, 14 nt, Human
ucauuaaauguuug

SEQ ID NO: 3616772 - RNA, 15 nt, Human
ucauuaaauguuuga

SEQ ID NO: 3616773 - RNA, 16 nt, Human
ucauuaaauguuugac

SEQ ID NO: 3616774 - RNA, 15 nt, Human
ucauuaaauuacuau

SEQ ID NO: 3616775 - RNA, 22 nt, Human
ucauuaaccuuaucauaaauuc

SEQ ID NO: 3616776 - RNA, 19 nt, Human
ucauuaagcccucuuccau

SEQ ID NO: 3616777 - RNA, 18 nt, Human
ucauuaaucugccucccu

SEQ ID NO: 3616778 - RNA, 14 nt, Human
ucauuacaaauggu

SEQ ID NO: 3616779 - RNA, 19 nt, Human
ucauuacccuucccugcac

SEQ ID NO: 3616780 - RNA, 21 nt, Human
ucauuacccuucccugcacua

SEQ ID NO: 3616781 - RNA, 17 nt, Human
ucauuacucuuaaggaa

SEQ ID NO: 3616782 - RNA, 14 nt, Human
ucauuacugggccu

SEQ ID NO: 3616783 - RNA, 21 nt, Human
ucauuacuugauuaagauuuu

SEQ ID NO: 3616784 - RNA, 18 nt, Human
ucauuacuuuaccacccc

SEQ ID NO: 3616785 - RNA, 20 nt, Human
ucauuagacuggaacuugaa

SEQ ID NO: 3616786 - RNA, 18 nt, Human
ucauuagccugaguagaa

SEQ ID NO: 3616787 - RNA, 13 nt, Human
ucauuagcuguga

SEQ ID NO: 3616788 - RNA, 18 nt, Human
ucauuaggugugacugaa

SEQ ID NO: 3616789 - RNA, 19 nt, Human
ucauuagucauguuuaucu

SEQ ID NO: 3616790 - RNA, 23 nt, Human
ucauuauaaacgugaugaucagc

SEQ ID NO: 3616791 - RNA, 22 nt, Human
ucauuauaaugucauuaaacau

SEQ ID NO: 3616792 - RNA, 13 nt, Human
ucauuaucucaaa

SEQ ID NO: 3616793 - RNA, 13 nt, Human
ucauuaugucaac

SEQ ID NO: 3616794 - RNA, 14 nt, Human
ucauuauuggaauu

SEQ ID NO: 3616795 - RNA, 14 nt, Human
ucauuauuggaggg

SEQ ID NO: 3616796 - RNA, 14 nt, Human
ucauuauuuaugua

SEQ ID NO: 3616797 - RNA, 16 nt, Human
ucauuauuuauguauu

SEQ ID NO: 3616798 - RNA, 15 nt, Human
ucauuauuuuauuau

SEQ ID NO: 3616799 - RNA, 16 nt, Human
ucauuauuuuauuaug

SEQ ID NO: 3616800 - RNA, 19 nt, Human
ucauuauuuuauuaugaaa

SEQ ID NO: 3616801 - RNA, 22 nt, Human
ucauuauuuuauuaugaaacuu

SEQ ID NO: 3616802 - RNA, 23 nt, Human
ucauuauuuuauuaugaaacuug

SEQ ID NO: 3616803 - RNA, 16 nt, Human
ucauucaaaaguugaa

SEQ ID NO: 3616804 - RNA, 13 nt, Human
ucauucaauaaau

SEQ ID NO: 3616805 - RNA, 22 nt, Human
ucauucacaucgcagauucucc

SEQ ID NO: 3616806 - RNA, 17 nt, Human
ucauucaccaguacauu

SEQ ID NO: 3616807 - RNA, 23 nt, Human
ucauucaccaguacauucucagu

SEQ ID NO: 3616808 - RNA, 24 nt, Human
ucauucaccaguacauucucaguu

SEQ ID NO: 3616809 - RNA, 17 nt, Human
ucauucacuucacugug

SEQ ID NO: 3616810 - RNA, 13 nt, Human
ucauucagaaaaa

SEQ ID NO: 3616811 - RNA, 23 nt, Human
ucauucagcagcaaauuuucagc

SEQ ID NO: 3616812 - RNA, 14 nt, Human
ucauucagcaucug

SEQ ID NO: 3616813 - RNA, 19 nt, Human
ucauucauggaccacuguu

SEQ ID NO: 3616814 - RNA, 18 nt, Human
ucauucauuagucauguu

SEQ ID NO: 3616815 - RNA, 17 nt, Human
ucauuccaacagugagu

SEQ ID NO: 3616816 - RNA, 16 nt, Human
ucauuccaugugccca

SEQ ID NO: 3616817 - RNA, 17 nt, Human
ucauuccaugugcccag

SEQ ID NO: 3616818 - RNA, 14 nt, Human
ucauuccauucugg

SEQ ID NO: 3616819 - RNA, 14 nt, Human
ucauuccauugccu

SEQ ID NO: 3616820 - RNA, 15 nt, Human
ucauuccauugccua

SEQ ID NO: 3616821 - RNA, 14 nt, Human
ucauuccccaggug

SEQ ID NO: 3616822 - RNA, 20 nt, Human
ucauucccucgucuuuccca

SEQ ID NO: 3616823 - RNA, 17 nt, Human
ucauucccucucaucuc

SEQ ID NO: 3616824 - RNA, 16 nt, Human
ucauuccguugucugu

SEQ ID NO: 3616825 - RNA, 13 nt, Human
ucauuccuccagg

SEQ ID NO: 3616826 - RNA, 21 nt, Human
ucauuccugaaagaaacaguu

SEQ ID NO: 3616827 - RNA, 18 nt, Human
ucauuccuuuuuauuuau

SEQ ID NO: 3616828 - RNA, 21 nt, Human
ucauucgcucccacauucuga

SEQ ID NO: 3616829 - RNA, 12 nt, Human
ucauucuccugc

SEQ ID NO: 3616830 - RNA, 16 nt, Human
ucauucuccugccugu

SEQ ID NO: 3616831 - RNA, 21 nt, Human
ucauucuccuuguguuacuaa

SEQ ID NO: 3616832 - RNA, 16 nt, Human
ucauucucugucucau

SEQ ID NO: 3616833 - RNA, 16 nt, Human
ucauucugcauugcua

SEQ ID NO: 3616834 - RNA, 15 nt, Human
ucauucuuacuaaaa

SEQ ID NO: 3616835 - RNA, 16 nt, Human
ucauucuuagcucuua

SEQ ID NO: 3616836 - RNA, 21 nt, Human
ucauucuuccaagcugagagu

SEQ ID NO: 3616837 - RNA, 17 nt, Human
ucauucuucucuagcug

SEQ ID NO: 3616838 - RNA, 17 nt, Human
ucauucuugaaagcugu

SEQ ID NO: 3616839 - RNA, 13 nt, Human
ucauugaaaucuu

SEQ ID NO: 3616840 - RNA, 11 nt, Human
ucauugaaaug

SEQ ID NO: 3616841 - RNA, 14 nt, Human
ucauugaaguauuu

SEQ ID NO: 3616842 - RNA, 20 nt, Human
ucauugacuaucaaacugaa

SEQ ID NO: 3616843 - RNA, 11 nt, Human
ucauugacuuu

SEQ ID NO: 3616844 - RNA, 14 nt, Human
ucauugacuuuuau

SEQ ID NO: 3616845 - RNA, 14 nt, Human
ucauugagaguuuu

SEQ ID NO: 3616846 - RNA, 13 nt, Human
ucauugauaugaa

SEQ ID NO: 3616847 - RNA, 15 nt, Human
ucauugauaugaaaa

SEQ ID NO: 3616848 - RNA, 17 nt, Human
ucauugauaugaaaaau

SEQ ID NO: 3616849 - RNA, 18 nt, Human
ucauugauaugaaaaaua

SEQ ID NO: 3616850 - RNA, 15 nt, Human
ucauugauuuccugu

SEQ ID NO: 3616851 - RNA, 18 nt, Human
ucauugauuuccuguguc

SEQ ID NO: 3616852 - RNA, 23 nt, Human
ucauugcacauaagcuuccauuu

SEQ ID NO: 3616853 - RNA, 23 nt, Human
ucauugccagugucuuucuuugg

SEQ ID NO: 3616854 - RNA, 14 nt, Human
ucauugccugugua

SEQ ID NO: 3616855 - RNA, 20 nt, Human
ucauugccuuaacuggagcc

SEQ ID NO: 3616856 - RNA, 18 nt, Human
ucauugcugaaaauggua

SEQ ID NO: 3616857 - RNA, 16 nt, Human
ucauugcugagccucu

SEQ ID NO: 3616858 - RNA, 22 nt, Human
ucauugcugagccucugcuccc

SEQ ID NO: 3616859 - RNA, 23 nt, Human
ucauugcugagccucugcucccc

SEQ ID NO: 3616860 - RNA, 22 nt, Human
uuuaguguaaaaaugagaacau

SEQ ID NO: 3616861 - RNA, 16 nt, Human
uuuaguguaauaagac

SEQ ID NO: 3616862 - RNA, 17 nt, Human
uuuaguuaaauuucugg

SEQ ID NO: 3616863 - RNA, 13 nt, Human
uuuaguuauaguu

SEQ ID NO: 3616864 - RNA, 15 nt, Human
uuuaguuauaguuuc

SEQ ID NO: 3616865 - RNA, 11 nt, Human
uuuaguugaau

SEQ ID NO: 3616866 - RNA, 19 nt, Human
uuuaguugcagaaacauuu

SEQ ID NO: 3616867 - RNA, 20 nt, Human
uuuaguuguaucucuuuuga

SEQ ID NO: 3616868 - RNA, 13 nt, Human
uuuaguuuuauuu

SEQ ID NO: 3616869 - RNA, 13 nt, Human
uuuaguuuucucu

SEQ ID NO: 3616870 - RNA, 12 nt, Human
uuuaguuuuuca

SEQ ID NO: 3616871 - RNA, 11 nt, Human
uuuaguuuuug

SEQ ID NO: 3616872 - RNA, 16 nt, Human
uuuauaaaaaaaauga

SEQ ID NO: 3616873 - RNA, 17 nt, Human
uuuauaaaaaauggugc

SEQ ID NO: 3616874 - RNA, 23 nt, Human
uuuauaaaaauaaaaaacacugg

SEQ ID NO: 3616875 - RNA, 19 nt, Human
uuuauaaaaauaaauagaa

SEQ ID NO: 3616876 - RNA, 14 nt, Human
uuuauaaaacuucu

SEQ ID NO: 3616877 - RNA, 22 nt, Human
uuuauaaaaguguucauuguuu

SEQ ID NO: 3616878 - RNA, 17 nt, Human
uuuauaaaauauaaaca

SEQ ID NO: 3616879 - RNA, 16 nt, Human
uuuauaaaauggcugu

SEQ ID NO: 3616880 - RNA, 20 nt, Human
uuuauaaaauuaaagaaaau

SEQ ID NO: 3616881 - RNA, 14 nt, Human
uuuauaaaauuaga

SEQ ID NO: 3616882 - RNA, 21 nt, Human
uuuauaaaauuggcaaaauua

SEQ ID NO: 3616883 - RNA, 17 nt, Human
uuuauaaaccucuaauu

SEQ ID NO: 3616884 - RNA, 18 nt, Human
uuuauaaacuuuaccuuu

SEQ ID NO: 3616885 - RNA, 17 nt, Human
uuuauaaauacugcaaa

SEQ ID NO: 3616886 - RNA, 20 nt, Human
uuuauaaauacugcaaauca

SEQ ID NO: 3616887 - RNA, 13 nt, Human
uuuauaaauccaa

SEQ ID NO: 3616888 - RNA, 14 nt, Human
uuuauaaauccagu

SEQ ID NO: 3616889 - RNA, 15 nt, Human
uuuauaaaugagcaa

SEQ ID NO: 3616890 - RNA, 15 nt, Human
uuuauaaaugcuauu

SEQ ID NO: 3616891 - RNA, 16 nt, Human
uuuauaaaugcuauuu

SEQ ID NO: 3616892 - RNA, 20 nt, Human
uuuauaacuauucaguugug

SEQ ID NO: 3616893 - RNA, 22 nt, Human
uuuauaacucaucauaaaauaa

SEQ ID NO: 3616894 - RNA, 16 nt, Human
uuuauaacuuuuuaua

SEQ ID NO: 3616895 - RNA, 12 nt, Human
uuuauaagaaaa

SEQ ID NO: 3616896 - RNA, 14 nt, Human
uuuauaagaaaaac

SEQ ID NO: 3616897 - RNA, 18 nt, Human
uuuauaagaaaaacuuuu

SEQ ID NO: 3616898 - RNA, 17 nt, Human
uuuauaagcaucauuau

SEQ ID NO: 3616899 - RNA, 14 nt, Human
uuuauaauucagua

SEQ ID NO: 3616900 - RNA, 21 nt, Human
uuuauaauuuuaagauuccuu

SEQ ID NO: 3616901 - RNA, 12 nt, Human
uuuauacaaaau

SEQ ID NO: 3616902 - RNA, 17 nt, Human
uuuauacaaaugucuua

SEQ ID NO: 3616903 - RNA, 13 nt, Human
ucagaauuaugau

SEQ ID NO: 3616904 - RNA, 20 nt, Human
ucagaauuauuuuuaaaaag

SEQ ID NO: 3616905 - RNA, 12 nt, Human
ucagaauucuca

SEQ ID NO: 3616906 - RNA, 18 nt, Human
ucagaauugaaacacuuu

SEQ ID NO: 3616907 - RNA, 23 nt, Human
ucagaauuuuauacuuucccuac

SEQ ID NO: 3616908 - RNA, 22 nt, Human
ucagacaaaauggauacauaaa

SEQ ID NO: 3616909 - RNA, 11 nt, Human
ucagacaagca

SEQ ID NO: 3616910 - RNA, 19 nt, Human
ucagacacaaacaaacaag

SEQ ID NO: 3616911 - RNA, 15 nt, Human
ucagacacccucaac

SEQ ID NO: 3616912 - RNA, 23 nt, Human
ucagacacccucaaccucuucug

SEQ ID NO: 3616913 - RNA, 14 nt, Human
ucagacacucuggc

SEQ ID NO: 3616914 - RNA, 18 nt, Human
ucagacacucuggcuggu

SEQ ID NO: 3616915 - RNA, 15 nt, Human
ucagacagaacuuga

SEQ ID NO: 3616916 - RNA, 23 nt, Human
ucagacagaacuugaauguguca

SEQ ID NO: 3616917 - RNA, 22 nt, Human
ucagacagagaggacuguaggg

SEQ ID NO: 3616918 - RNA, 16 nt, Human
ucagacagcugccugg

SEQ ID NO: 3616919 - RNA, 19 nt, Human
ucagacagcugccugggau

SEQ ID NO: 3616920 - RNA, 13 nt, Human
ucagacauaaagc

SEQ ID NO: 3616921 - RNA, 15 nt, Human
ucagacauaaagcca

SEQ ID NO: 3616922 - RNA, 19 nt, Human
ucagacaucugagguuuua

SEQ ID NO: 3616923 - RNA, 15 nt, Human
ucagacauguuuucc

SEQ ID NO: 3616924 - RNA, 14 nt, Human
ucagaccacaugcc

SEQ ID NO: 3616925 - RNA, 15 nt, Human
ucagaccauaauguu

SEQ ID NO: 3616926 - RNA, 12 nt, Human
ucagaccccagc

SEQ ID NO: 3616927 - RNA, 14 nt, Human
ucagacccccacuc

SEQ ID NO: 3616928 - RNA, 16 nt, Human
ucagacccuaccccac

SEQ ID NO: 3616929 - RNA, 18 nt, Human
ucagacccuaccccacca

SEQ ID NO: 3616930 - RNA, 14 nt, Human
ucagacccuggagg

SEQ ID NO: 3616931 - RNA, 14 nt, Human
ucagaccgucuucc

SEQ ID NO: 3616932 - RNA, 16 nt, Human
ucagaccgucuuccuc

SEQ ID NO: 3616933 - RNA, 20 nt, Human
uuuuuaaaguguuucuguua

SEQ ID NO: 3616934 - RNA, 16 nt, Human
uuuuuaaauaaaagca

SEQ ID NO: 3616935 - RNA, 15 nt, Human
uuuuuaaauaaacuu

SEQ ID NO: 3616936 - RNA, 16 nt, Human
uuuuuaaauaaacuuu

SEQ ID NO: 3616937 - RNA, 17 nt, Human
uuuuuaaauaaacuuuu

SEQ ID NO: 3616938 - RNA, 23 nt, Human
uuuuuaaauaaacuuuuuuucaa

SEQ ID NO: 3616939 - RNA, 20 nt, Human
uuuuuaaaugauguugaaua

SEQ ID NO: 3616940 - RNA, 20 nt, Human
uuuuuaaauguaaagauauu

SEQ ID NO: 3616941 - RNA, 15 nt, Human
uuuuuaaauguauac

SEQ ID NO: 3616942 - RNA, 16 nt, Human
uuuuuaaauuuuguaa

SEQ ID NO: 3616943 - RNA, 15 nt, Human
uccacaugggagccg

SEQ ID NO: 3616944 - RNA, 21 nt, Human
uccaggcacccuucuuuccuc

SEQ ID NO: 3616945 - RNA, 18 nt, Human
uccaggcagcacccaggu

SEQ ID NO: 3616946 - RNA, 17 nt, Human
uccaggcagcagacaca

SEQ ID NO: 3616947 - RNA, 13 nt, Human
uccaggcagccgc

SEQ ID NO: 3616948 - RNA, 14 nt, Human
uccaggcaggcuaa

SEQ ID NO: 3616949 - RNA, 19 nt, Human
uccaggcccaaggcucccg

SEQ ID NO: 3616950 - RNA, 21 nt, Human
uccaggccccaaaaccacagc

SEQ ID NO: 3616951 - RNA, 23 nt, Human
uccaggcccgucuguccaucugc

SEQ ID NO: 3616952 - RNA, 15 nt, Human
uccaggccugccucc

SEQ ID NO: 3616953 - RNA, 19 nt, Human
uccaggcuaguccggaccc

SEQ ID NO: 3616954 - RNA, 10 nt, Human
uccaggcucc

SEQ ID NO: 3616955 - RNA, 22 nt, Human
uccaggcucuuuggggucagcc

SEQ ID NO: 3616956 - RNA, 23 nt, Human
uccaggcucuuuggggucagcca

SEQ ID NO: 3616957 - RNA, 19 nt, Human
uccaggcugcauagaagga

SEQ ID NO: 3616958 - RNA, 23 nt, Human
uccaggcugggagagccuuccag

SEQ ID NO: 3616959 - RNA, 18 nt, Human
uccaggcugggugacaga

SEQ ID NO: 3616960 - RNA, 20 nt, Human
uccaggcugucuuucacuga

SEQ ID NO: 3616961 - RNA, 17 nt, Human
uccaggcuuggauguaa

SEQ ID NO: 3616962 - RNA, 20 nt, Human
uccaggcuuuguacagagug

SEQ ID NO: 3616963 - RNA, 12 nt, Human
uccagggaagcu

SEQ ID NO: 3616964 - RNA, 14 nt, Human
uccagggaagcugg

SEQ ID NO: 3616965 - RNA, 20 nt, Human
uccagggaauccaagccucc

SEQ ID NO: 3616966 - RNA, 17 nt, Human
uccagggacacacagcc

SEQ ID NO: 3616967 - RNA, 14 nt, Human
uccagggacagagg

SEQ ID NO: 3616968 - RNA, 19 nt, Human
uccagggacagaggcccca

SEQ ID NO: 3616969 - RNA, 19 nt, Human
uccagggagcauuuuccuc

SEQ ID NO: 3616970 - RNA, 22 nt, Human
uccagggaggggccggcccugu

SEQ ID NO: 3616971 - RNA, 17 nt, Human
uccagggccacgugcca

SEQ ID NO: 3616972 - RNA, 23 nt, Human
uccagggccacgugccaggcccg

SEQ ID NO: 3616973 - RNA, 16 nt, Human
uccagggcccugagcu

SEQ ID NO: 3616974 - RNA, 17 nt, Human
uccauaauuaugacagu

SEQ ID NO: 3616975 - RNA, 14 nt, Human
uccauacacacgcu

SEQ ID NO: 3616976 - RNA, 22 nt, Human
uccauacacuuuguugcaagau

SEQ ID NO: 3616977 - RNA, 12 nt, Human
uccauacauuug

SEQ ID NO: 3616978 - RNA, 15 nt, Human
uccauacauuugugu

SEQ ID NO: 3616979 - RNA, 15 nt, Human
uccauaccagcucgc

SEQ ID NO: 3616980 - RNA, 22 nt, Human
uccauaccagcucgcacccccc

SEQ ID NO: 3616981 - RNA, 16 nt, Human
uccauaguauauuaaa

SEQ ID NO: 3616982 - RNA, 15 nt, Human
uccauagugacuuuu

SEQ ID NO: 3616983 - RNA, 15 nt, Human
uccauaguuuugaug

SEQ ID NO: 3616984 - RNA, 20 nt, Human
uccauauauuagcauuuagu

SEQ ID NO: 3616985 - RNA, 15 nt, Human
uccauaucacacaca

SEQ ID NO: 3616986 - RNA, 19 nt, Human
uccauauccauagugacuu

SEQ ID NO: 3616987 - RNA, 23 nt, Human
uccauaucuuaaagaaacagcuu

SEQ ID NO: 3616988 - RNA, 21 nt, Human
uccauaucuugcgaauccaag

SEQ ID NO: 3616989 - RNA, 22 nt, Human
uccauaucuugcgaauccaagc

SEQ ID NO: 3616990 - RNA, 19 nt, Human
uccauaugaccucaugcau

SEQ ID NO: 3616991 - RNA, 16 nt, Human
uccauauggauccacu

SEQ ID NO: 3616992 - RNA, 19 nt, Human
uccauauuuauagguaccc

SEQ ID NO: 3616993 - RNA, 14 nt, Human
uccauauuuauuca

SEQ ID NO: 3616994 - RNA, 17 nt, Human
uccauauuuuauuacug

SEQ ID NO: 3616995 - RNA, 22 nt, Human
uccauauuuuuuuccuuacaua

SEQ ID NO: 3616996 - RNA, 17 nt, Human
uccaucacccucuuccu

SEQ ID NO: 3616997 - RNA, 19 nt, Human
uccaucacguuagcugucc

SEQ ID NO: 3616998 - RNA, 17 nt, Human
uccaucaguuagagcug

SEQ ID NO: 3616999 - RNA, 18 nt, Human
uccaucaguuagagcuga

SEQ ID NO: 3617000 - RNA, 14 nt, Human
uccaucaugucccc

SEQ ID NO: 3617001 - RNA, 21 nt, Human
uccauccaaggccagguucuc

SEQ ID NO: 3617002 - RNA, 15 nt, Human
uccauccacauggga

SEQ ID NO: 3617003 - RNA, 17 nt, Human
uccauccauggccagca

SEQ ID NO: 3617004 - RNA, 22 nt, Human
uccaucccaaccagugccaagg

SEQ ID NO: 3617005 - RNA, 12 nt, Human
uccaucccagag

SEQ ID NO: 3617006 - RNA, 12 nt, Human
uccaucccucua

SEQ ID NO: 3617007 - RNA, 20 nt, Human
uccaucccuggcccccuccc

SEQ ID NO: 3617008 - RNA, 16 nt, Human
uccauccuccuccuuc

SEQ ID NO: 3617009 - RNA, 17 nt, Human
uccauccuccuccuucc

SEQ ID NO: 3617010 - RNA, 20 nt, Human
uccauccuugagucaaaaaa

SEQ ID NO: 3617011 - RNA, 21 nt, Human
uccaucuccuauaaucuguca

SEQ ID NO: 3617012 - RNA, 14 nt, Human
uccaucucgccacc

SEQ ID NO: 3617013 - RNA, 23 nt, Human
uccaucucgccaccccuccuucc

SEQ ID NO: 3617014 - RNA, 14 nt, Human
uccaucucucaucc

SEQ ID NO: 3617015 - RNA, 17 nt, Human
uccaucucucuggcccu

SEQ ID NO: 3617016 - RNA, 20 nt, Human
uccaucucuugcuuguuccu

SEQ ID NO: 3617017 - RNA, 17 nt, Human
uccaucugauuccagca

SEQ ID NO: 3617018 - RNA, 18 nt, Human
uccaucugcccgccugcc

SEQ ID NO: 3617019 - RNA, 20 nt, Human
uccaucugcccgccugccca

SEQ ID NO: 3617020 - RNA, 17 nt, Human
uccaucugguuuucucu

SEQ ID NO: 3617021 - RNA, 17 nt, Human
uccaucuguacuugguc

SEQ ID NO: 3617022 - RNA, 14 nt, Human
uccaucuucagcuu

SEQ ID NO: 3617023 - RNA, 23 nt, Human
uccaucuucagcuucuucaucuu

SEQ ID NO: 3617024 - RNA, 15 nt, Human
uccaucuucuuugca

SEQ ID NO: 3617025 - RNA, 18 nt, Human
uccaucuuuccugauggc

SEQ ID NO: 3617026 - RNA, 16 nt, Human
ucccagggccugucuc

SEQ ID NO: 3617027 - RNA, 19 nt, Human
ucccagggcuacucacuca

SEQ ID NO: 3617028 - RNA, 21 nt, Human
ucccagggcuacucacucaag

SEQ ID NO: 3617029 - RNA, 14 nt, Human
ucccagggcuuacg

SEQ ID NO: 3617030 - RNA, 18 nt, Human
ucccaggggaccacaccu

SEQ ID NO: 3617031 - RNA, 21 nt, Human
ucccaggggcccaaggcggcc

SEQ ID NO: 3617032 - RNA, 22 nt, Human
ucccaggggcccaaggcggccc

SEQ ID NO: 3617033 - RNA, 18 nt, Human
ucccaggggcuggcuuca

SEQ ID NO: 3617034 - RNA, 20 nt, Human
ucccaggggucucccuggcu

SEQ ID NO: 3617035 - RNA, 22 nt, Human
ucccaggggucucccuggcucc

SEQ ID NO: 3617036 - RNA, 14 nt, Human
ucccaggguuuuaa

SEQ ID NO: 3617037 - RNA, 18 nt, Human
ucccaggguuuuaacuuu

SEQ ID NO: 3617038 - RNA, 20 nt, Human
ucccaggguuuuaacuuugu

SEQ ID NO: 3617039 - RNA, 18 nt, Human
ucccagguaagcaggagg

SEQ ID NO: 3617040 - RNA, 16 nt, Human
ucccagguuggcucug

SEQ ID NO: 3617041 - RNA, 17 nt, Human
ucccaguaccuccuguc

SEQ ID NO: 3617042 - RNA, 15 nt, Human
ucccaguagaaaaua

SEQ ID NO: 3617043 - RNA, 14 nt, Human
ucccagucauuuaa

SEQ ID NO: 3617044 - RNA, 22 nt, Human
ucccagucauuuaauaaaugug

SEQ ID NO: 3617045 - RNA, 15 nt, Human
ucccagucuacccag

SEQ ID NO: 3617046 - RNA, 16 nt, Human
ucccagucucuggcag

SEQ ID NO: 3617047 - RNA, 20 nt, Human
ucccaguggccucaacccuc

SEQ ID NO: 3617048 - RNA, 17 nt, Human
ucccaguggcugcugcc

SEQ ID NO: 3617049 - RNA, 23 nt, Human
ucccaguggcugcugcccaggcc

SEQ ID NO: 3617050 - RNA, 21 nt, Human
ucccagugggaggggcaggcu

SEQ ID NO: 3617051 - RNA, 23 nt, Human
ucccaguucaggagucccaagga

SEQ ID NO: 3617052 - RNA, 15 nt, Human
ucccauaugccuggg

SEQ ID NO: 3617053 - RNA, 21 nt, Human
ucccauauuggcauggauuuc

SEQ ID NO: 3617054 - RNA, 22 nt, Human
ucccaucauuacccuucccugc

SEQ ID NO: 3617055 - RNA, 12 nt, Human
ucccauccaggc

SEQ ID NO: 3617056 - RNA, 18 nt, Human
ucccauccagugucucac

SEQ ID NO: 3617057 - RNA, 22 nt, Human
ucccaucccagcugaaauacug

SEQ ID NO: 3617058 - RNA, 15 nt, Human
ucccauccccagcga

SEQ ID NO: 3617059 - RNA, 14 nt, Human
ucccaucccccugc

SEQ ID NO: 3617060 - RNA, 15 nt, Human
ucccaucccccugcc

SEQ ID NO: 3617061 - RNA, 15 nt, Human
ucccaucccgcucuu

SEQ ID NO: 3617062 - RNA, 12 nt, Human
ucccaucccugc

SEQ ID NO: 3617063 - RNA, 14 nt, Human
ucccaucccugcgu

SEQ ID NO: 3617064 - RNA, 16 nt, Human
ucccauccuguguguu

SEQ ID NO: 3617065 - RNA, 20 nt, Human
ucccaucgucucggccuuca

SEQ ID NO: 3617066 - RNA, 13 nt, Human
ucccaucuaggga

SEQ ID NO: 3617067 - RNA, 19 nt, Human
ucccaucugggaguccccu

SEQ ID NO: 3617068 - RNA, 23 nt, Human
ucccaucugggaguccccuuuuc

SEQ ID NO: 3617069 - RNA, 15 nt, Human
ucccaucuggucauu

SEQ ID NO: 3617070 - RNA, 20 nt, Human
ucccaucuggucauuugguu

SEQ ID NO: 3617071 - RNA, 19 nt, Human
ucccaucuuaacucuuugc

SEQ ID NO: 3617072 - RNA, 16 nt, Human
ucccaugaacacacug

SEQ ID NO: 3617073 - RNA, 19 nt, Human
ucccaugaacacacugugu

SEQ ID NO: 3617074 - RNA, 14 nt, Human
ucccaugaagccuu

SEQ ID NO: 3617075 - RNA, 15 nt, Human
ucccaugaagccuuu

SEQ ID NO: 3617076 - RNA, 17 nt, Human
ucccaugaagccuuuug

SEQ ID NO: 3617077 - RNA, 21 nt, Human
ucccaugaagccuuuugaaag

SEQ ID NO: 3617078 - RNA, 20 nt, Human
ucccaugacccaccccugug

SEQ ID NO: 3617079 - RNA, 19 nt, Human
ucccaugacccaggcuggg

SEQ ID NO: 3617080 - RNA, 20 nt, Human
ucccaugacccaggcugggc

SEQ ID NO: 3617081 - RNA, 21 nt, Human
ucccaugagacccuggugccu

SEQ ID NO: 3617082 - RNA, 22 nt, Human
ucccaugagacccuggugccug

SEQ ID NO: 3617083 - RNA, 19 nt, Human
ucccaugagccucagcauc

SEQ ID NO: 3617084 - RNA, 23 nt, Human
ucccaugagggagaugccaugag

SEQ ID NO: 3617085 - RNA, 15 nt, Human
ucccaugaucccugu

SEQ ID NO: 3617086 - RNA, 11 nt, Human
uccccagcccc

SEQ ID NO: 3617087 - RNA, 21 nt, Human
uccccagccccuagcccagga

SEQ ID NO: 3617088 - RNA, 21 nt, Human
uccccagcccuuccucugcuc

SEQ ID NO: 3617089 - RNA, 13 nt, Human
uccccagccugcg

SEQ ID NO: 3617090 - RNA, 14 nt, Human
uccccagccugcgc

SEQ ID NO: 3617091 - RNA, 15 nt, Human
uccccagccugggcc

SEQ ID NO: 3617092 - RNA, 17 nt, Human
uccccagccugggccca

SEQ ID NO: 3617093 - RNA, 23 nt, Human
uccccagcgauucccucucccag

SEQ ID NO: 3617094 - RNA, 17 nt, Human
uccccagcucaccccug

SEQ ID NO: 3617095 - RNA, 17 nt, Human
uccccagcucccaggac

SEQ ID NO: 3617096 - RNA, 15 nt, Human
uccccagcuguuuau

SEQ ID NO: 3617097 - RNA, 14 nt, Human
uccccaggaggcca

SEQ ID NO: 3617098 - RNA, 15 nt, Human
uccccaggaggccag

SEQ ID NO: 3617099 - RNA, 16 nt, Human
uccccaggaggccagc

SEQ ID NO: 3617100 - RNA, 17 nt, Human
uccccaggaggccagcc

SEQ ID NO: 3617101 - RNA, 12 nt, Human
uccccaggccag

SEQ ID NO: 3617102 - RNA, 14 nt, Human
uccccaggccaggc

SEQ ID NO: 3617103 - RNA, 13 nt, Human
uccccaggcccca

SEQ ID NO: 3617104 - RNA, 19 nt, Human
uccccagggaagcagcagc

SEQ ID NO: 3617105 - RNA, 20 nt, Human
uccccagggaagcagcagcc

SEQ ID NO: 3617106 - RNA, 18 nt, Human
uccccaggggaaaaugaa

SEQ ID NO: 3617107 - RNA, 14 nt, Human
uccccaggggagag

SEQ ID NO: 3617108 - RNA, 18 nt, Human
uccccaggggucccagcc

SEQ ID NO: 3617109 - RNA, 20 nt, Human
uccccaggggucccagccac

SEQ ID NO: 3617110 - RNA, 22 nt, Human
uccccaggggucccagccaccc

SEQ ID NO: 3617111 - RNA, 22 nt, Human
uccccagguggcugacccaguc

SEQ ID NO: 3617112 - RNA, 14 nt, Human
uccccaguaaaauu

SEQ ID NO: 3617113 - RNA, 22 nt, Human
uccccagucucucuuaaaguug

SEQ ID NO: 3617114 - RNA, 15 nt, Human
uccccagugaaaacu

SEQ ID NO: 3617115 - RNA, 17 nt, Human
uccccauaacucaaugg

SEQ ID NO: 3617116 - RNA, 19 nt, Human
uccccauacucugucuccc

SEQ ID NO: 3617117 - RNA, 17 nt, Human
uccccauccuccagcuu

SEQ ID NO: 3617118 - RNA, 19 nt, Human
uccccaucgccagcugaug

SEQ ID NO: 3617119 - RNA, 20 nt, Human
uccccaucgccagcugauga

SEQ ID NO: 3617120 - RNA, 15 nt, Human
uccccaucucccugc

SEQ ID NO: 3617121 - RNA, 16 nt, Human
uccccaucucccugcc

SEQ ID NO: 3617122 - RNA, 20 nt, Human
uccccaucucccugccuggc

SEQ ID NO: 3617123 - RNA, 11 nt, Human
uccccaugaca

SEQ ID NO: 3617124 - RNA, 16 nt, Human
uccccaugccuguggc

SEQ ID NO: 3617125 - RNA, 18 nt, Human
uccccaugcuuccuugcc

SEQ ID NO: 3617126 - RNA, 15 nt, Human
uccccauggagccag

SEQ ID NO: 3617127 - RNA, 16 nt, Human
uccccauggagccagc

SEQ ID NO: 3617128 - RNA, 17 nt, Human
uccccauggcccugagc

SEQ ID NO: 3617129 - RNA, 20 nt, Human
uccccaugugccugcaccag

SEQ ID NO: 3617130 - RNA, 18 nt, Human
uccccauuucccaucugc

SEQ ID NO: 3617131 - RNA, 20 nt, Human
uccccauuucccaucugcac

SEQ ID NO: 3617132 - RNA, 12 nt, Human
ucccccaaaguu

SEQ ID NO: 3617133 - RNA, 17 nt, Human
ucccccaaaguucacaa

SEQ ID NO: 3617134 - RNA, 19 nt, Human
uccgacucuuucugagugc

SEQ ID NO: 3617135 - RNA, 22 nt, Human
uccgacuugaauuuucccacug

SEQ ID NO: 3617136 - RNA, 19 nt, Human
uccgagccggggaguuucu

SEQ ID NO: 3617137 - RNA, 23 nt, Human
uccgaggggcgggacccaggcac

SEQ ID NO: 3617138 - RNA, 13 nt, Human
uccgaguguguuu

SEQ ID NO: 3617139 - RNA, 23 nt, Human
uccgaguguguuucauccuuccc

SEQ ID NO: 3617140 - RNA, 14 nt, Human
uccgauccuuccuc

SEQ ID NO: 3617141 - RNA, 15 nt, Human
uccgcagaagcccug

SEQ ID NO: 3617142 - RNA, 15 nt, Human
uccgcaggugcuggu

SEQ ID NO: 3617143 - RNA, 16 nt, Human
uccgcaggugcugguc

SEQ ID NO: 3617144 - RNA, 14 nt, Human
uccgcagugagaga

SEQ ID NO: 3617145 - RNA, 19 nt, Human
uccgcaguguggccaggcu

SEQ ID NO: 3617146 - RNA, 21 nt, Human
uccgcaucccuaccgacccag

SEQ ID NO: 3617147 - RNA, 18 nt, Human
uccgccaaugcacggccu

SEQ ID NO: 3617148 - RNA, 12 nt, Human
uccgccagccuc

SEQ ID NO: 3617149 - RNA, 18 nt, Human
uccgccagggcccacacc

SEQ ID NO: 3617150 - RNA, 19 nt, Human
uccgccagggcccacaccc

SEQ ID NO: 3617151 - RNA, 14 nt, Human
uccgcccccagccu

SEQ ID NO: 3617152 - RNA, 14 nt, Human
uccgcccccaggua

SEQ ID NO: 3617153 - RNA, 15 nt, Human
uccgcccccagguag

SEQ ID NO: 3617154 - RNA, 16 nt, Human
uccgccccugagccca

SEQ ID NO: 3617155 - RNA, 17 nt, Human
uccgccccugagcccac

SEQ ID NO: 3617156 - RNA, 19 nt, Human
uccgccccugagcccacug

SEQ ID NO: 3617157 - RNA, 17 nt, Human
uccgccccuucccuucc

SEQ ID NO: 3617158 - RNA, 15 nt, Human
uccgcccugccacuc

SEQ ID NO: 3617159 - RNA, 16 nt, Human
uccgcccugccacuca

SEQ ID NO: 3617160 - RNA, 12 nt, Human
uccgcccugcuc

SEQ ID NO: 3617161 - RNA, 20 nt, Human
uccgcucauacaggaaugaa

SEQ ID NO: 3617162 - RNA, 18 nt, Human
uccgcucucuuccugccc

SEQ ID NO: 3617163 - RNA, 14 nt, Human
uccgcugccagccu

SEQ ID NO: 3617164 - RNA, 14 nt, Human
uccgcugccgugcc

SEQ ID NO: 3617165 - RNA, 14 nt, Human
uccgcuggaggugg

SEQ ID NO: 3617166 - RNA, 22 nt, Human
uccgcuuggagcuauuuuccag

SEQ ID NO: 3617167 - RNA, 15 nt, Human
uccggaauccugucc

SEQ ID NO: 3617168 - RNA, 16 nt, Human
uccggauccuaagcau

SEQ ID NO: 3617169 - RNA, 16 nt, Human
uccggcaccaguagca

SEQ ID NO: 3617170 - RNA, 18 nt, Human
uccggcaccaguagcagg

SEQ ID NO: 3617171 - RNA, 18 nt, Human
uccggcaguucugggugc

SEQ ID NO: 3617172 - RNA, 11 nt, Human
uccggccaggu

SEQ ID NO: 3617173 - RNA, 20 nt, Human
uccggccaggugccuccuga

SEQ ID NO: 3617174 - RNA, 14 nt, Human
uccggcccccagag

SEQ ID NO: 3617175 - RNA, 18 nt, Human
uccggcccccagagcgcc

SEQ ID NO: 3617176 - RNA, 15 nt, Human
uccggccucuccagc

SEQ ID NO: 3617177 - RNA, 19 nt, Human
uccggccucuccagccuca

SEQ ID NO: 3617178 - RNA, 14 nt, Human
uccggccucugccu

SEQ ID NO: 3617179 - RNA, 19 nt, Human
uccggccucugccuuugca

SEQ ID NO: 3617180 - RNA, 21 nt, Human
uccggccugaugacagagcga

SEQ ID NO: 3617181 - RNA, 15 nt, Human
uccggcgucagccuc

SEQ ID NO: 3617182 - RNA, 16 nt, Human
uccggcgucagccucc

SEQ ID NO: 3617183 - RNA, 19 nt, Human
uccggcgucagccuccagc

SEQ ID NO: 3617184 - RNA, 22 nt, Human
uccggcgucagccuccagccuc

SEQ ID NO: 3617185 - RNA, 15 nt, Human
uccggcucccagccu

SEQ ID NO: 3617186 - RNA, 16 nt, Human
uccggcucccagccuc

SEQ ID NO: 3617187 - RNA, 17 nt, Human
uccggcucccagccuca

SEQ ID NO: 3617188 - RNA, 15 nt, Human
uccggcugugcuggg

SEQ ID NO: 3617189 - RNA, 16 nt, Human
uccggcugugcuggga

SEQ ID NO: 3617190 - RNA, 16 nt, Human
uccgggacccccagga

SEQ ID NO: 3617191 - RNA, 18 nt, Human
uccgggacccccaggaca

SEQ ID NO: 3617192 - RNA, 23 nt, Human
uccgggagggugcggcugugcag

SEQ ID NO: 3617193 - RNA, 18 nt, Human
uccgggcaaaugccaggg

SEQ ID NO: 3617194 - RNA, 16 nt, Human
uccggggccagcuccg

SEQ ID NO: 3617195 - RNA, 20 nt, Human
uccgggggggcccaucucuu

SEQ ID NO: 3617196 - RNA, 17 nt, Human
uccgguagggaggcagc

SEQ ID NO: 3617197 - RNA, 18 nt, Human
uccgguagggaggcagcc

SEQ ID NO: 3617198 - RNA, 18 nt, Human
uccggucgugucucuggu

SEQ ID NO: 3617199 - RNA, 15 nt, Human
uccggugugccugca

SEQ ID NO: 3617200 - RNA, 14 nt, Human
uccgguguucuaag

SEQ ID NO: 3617201 - RNA, 16 nt, Human
uccgguguucuaagau

SEQ ID NO: 3617202 - RNA, 18 nt, Human
uccgguguuuaagacauu

SEQ ID NO: 3617203 - RNA, 14 nt, Human
uccgguugcauacu

SEQ ID NO: 3617204 - RNA, 18 nt, Human
uccgguugcauacuggac

SEQ ID NO: 3617205 - RNA, 16 nt, Human
uccguaacccaacucu

SEQ ID NO: 3617206 - RNA, 16 nt, Human
uccgucacuaccuggc

SEQ ID NO: 3617207 - RNA, 14 nt, Human
uccguccccugccc

SEQ ID NO: 3617208 - RNA, 16 nt, Human
uccguccucgauggga

SEQ ID NO: 3617209 - RNA, 20 nt, Human
uccgucuaagucaugagcug

SEQ ID NO: 3617210 - RNA, 20 nt, Human
uccgugagugaaccaucauu

SEQ ID NO: 3617211 - RNA, 16 nt, Human
uccgugccuccaccac

SEQ ID NO: 3617212 - RNA, 17 nt, Human
uccgugccuccaccacc

SEQ ID NO: 3617213 - RNA, 17 nt, Human
uccgugcugacagcugc

SEQ ID NO: 3617214 - RNA, 16 nt, Human
uccgugcuuccucagu

SEQ ID NO: 3617215 - RNA, 12 nt, Human
uccguggaggag

SEQ ID NO: 3617216 - RNA, 16 nt, Human
uccgugggacggugcc

SEQ ID NO: 3617217 - RNA, 16 nt, Human
uccguggguugcuaac

SEQ ID NO: 3617218 - RNA, 16 nt, Human
uccguuagcuccugug

SEQ ID NO: 3617219 - RNA, 13 nt, Human
uccuaaaacaaca

SEQ ID NO: 3617220 - RNA, 20 nt, Human
uccuaaaacaacagauguac

SEQ ID NO: 3617221 - RNA, 22 nt, Human
uccuaaaagcaaaauaaaaacu

SEQ ID NO: 3617222 - RNA, 18 nt, Human
uccuaaaaggcccagaga

SEQ ID NO: 3617223 - RNA, 21 nt, Human
uccuaaaaggcccagagagaa

SEQ ID NO: 3617224 - RNA, 22 nt, Human
uccuaaaauaagggcagaguca

SEQ ID NO: 3617225 - RNA, 21 nt, Human
uccuaaacaucauucauuuuu

SEQ ID NO: 3617226 - RNA, 23 nt, Human
uccuaaagaaaaauaucuuggcc

SEQ ID NO: 3617227 - RNA, 12 nt, Human
uccuaaauguau

SEQ ID NO: 3617228 - RNA, 20 nt, Human
uccuaaauuuuccuguccuc

SEQ ID NO: 3617229 - RNA, 20 nt, Human
uccuaacaaaagaugaaagc

SEQ ID NO: 3617230 - RNA, 16 nt, Human
uccuaacacagcaugu

SEQ ID NO: 3617231 - RNA, 13 nt, Human
uccuaacccuggc

SEQ ID NO: 3617232 - RNA, 23 nt, Human
uccuaagaaauaugugagauuuu

SEQ ID NO: 3617233 - RNA, 22 nt, Human
uccuaagaagcuucuaauaaau

SEQ ID NO: 3617234 - RNA, 13 nt, Human
uccuaagacacaa

SEQ ID NO: 3617235 - RNA, 15 nt, Human
uccuaagaccugggg

SEQ ID NO: 3617236 - RNA, 19 nt, Human
uccuaagagugcugggcau

SEQ ID NO: 3617237 - RNA, 23 nt, Human
uccuaagauguguucuuauuuuu

SEQ ID NO: 3617238 - RNA, 16 nt, Human
uccuaagcaucuaagu

SEQ ID NO: 3617239 - RNA, 17 nt, Human
uccuaagcaucuaaguu

SEQ ID NO: 3617240 - RNA, 13 nt, Human
uccuaagccugug

SEQ ID NO: 3617241 - RNA, 21 nt, Human
uccuaagcuauucaguaauaa

SEQ ID NO: 3617242 - RNA, 12 nt, Human
uccuaaggacac

SEQ ID NO: 3617243 - RNA, 16 nt, Human
uccuaaggacacacua

SEQ ID NO: 3617244 - RNA, 17 nt, Human
uccuaaggacacacuaa

SEQ ID NO: 3617245 - RNA, 21 nt, Human
uccuaagggucgaaagcucua

SEQ ID NO: 3617246 - RNA, 12 nt, Human
uccuaauaaaaa

SEQ ID NO: 3617247 - RNA, 13 nt, Human
uccuaauaaaaag

SEQ ID NO: 3617248 - RNA, 19 nt, Human
uccuaauaauaucccacug

SEQ ID NO: 3617249 - RNA, 14 nt, Human
uccuaauacuguca

SEQ ID NO: 3617250 - RNA, 15 nt, Human
uccuaauacugucau

SEQ ID NO: 3617251 - RNA, 16 nt, Human
uccuaaucuucugaac

SEQ ID NO: 3617252 - RNA, 24 nt, Human
uccuaauggugaugcagucuuaga

SEQ ID NO: 3617253 - RNA, 18 nt, Human
uccuaauucuucuguccu

SEQ ID NO: 3617254 - RNA, 19 nt, Human
uccuaauuucuccucccuu

SEQ ID NO: 3617255 - RNA, 14 nt, Human
uccuacaaagaugu

SEQ ID NO: 3617256 - RNA, 12 nt, Human
uccuacacagga

SEQ ID NO: 3617257 - RNA, 17 nt, Human
uccuacacccuuggacu

SEQ ID NO: 3617258 - RNA, 16 nt, Human
uccuacaccuaacuca

SEQ ID NO: 3617259 - RNA, 20 nt, Human
uccuacagcacuacugggug

SEQ ID NO: 3617260 - RNA, 17 nt, Human
uccuacagccccuuuuu

SEQ ID NO: 3617261 - RNA, 19 nt, Human
uccuacaggcagucucucu

SEQ ID NO: 3617262 - RNA, 18 nt, Human
uccuacauaucccuucca

SEQ ID NO: 3617263 - RNA, 13 nt, Human
uccuaccaaugca

SEQ ID NO: 3617264 - RNA, 21 nt, Human
uccuaccaaugcaugcagcca

SEQ ID NO: 3617265 - RNA, 15 nt, Human
uccuacccaaccacu

SEQ ID NO: 3617266 - RNA, 14 nt, Human
uccuacccaucccc

SEQ ID NO: 3617267 - RNA, 15 nt, Human
uccuacccauccccg

SEQ ID NO: 3617268 - RNA, 16 nt, Human
uccuaccccaauuccu

SEQ ID NO: 3617269 - RNA, 16 nt, Human
uccuacccccugugcc

SEQ ID NO: 3617270 - RNA, 17 nt, Human
uccuacccccugugccu

SEQ ID NO: 3617271 - RNA, 13 nt, Human
uccuaccccuccc

SEQ ID NO: 3617272 - RNA, 15 nt, Human
uccuaccccucccag

SEQ ID NO: 3617273 - RNA, 21 nt, Human
uccuacccucgggcccaccug

SEQ ID NO: 3617274 - RNA, 13 nt, Human
uccuacccuuuuc

SEQ ID NO: 3617275 - RNA, 13 nt, Human
uccuaccucagcc

SEQ ID NO: 3617276 - RNA, 17 nt, Human
uccuaccucagccuaga

SEQ ID NO: 3617277 - RNA, 13 nt, Human
uccuaccucccug

SEQ ID NO: 3617278 - RNA, 15 nt, Human
uccuaccugcccugg

SEQ ID NO: 3617279 - RNA, 15 nt, Human
ucucugcagccagcc

SEQ ID NO: 3617280 - RNA, 17 nt, Human
ucucugcagccagccca

SEQ ID NO: 3617281 - RNA, 13 nt, Human
ucucugcagcugc

SEQ ID NO: 3617282 - RNA, 16 nt, Human
ucucugcaggucccua

SEQ ID NO: 3617283 - RNA, 19 nt, Human
ucucugcaggucccuaaua

SEQ ID NO: 3617284 - RNA, 22 nt, Human
ucucugcaggucccuaauaaag

SEQ ID NO: 3617285 - RNA, 13 nt, Human
ucucugcaucuga

SEQ ID NO: 3617286 - RNA, 10 nt, Human
ucucugccau

SEQ ID NO: 3617287 - RNA, 22 nt, Human
ucucugcccuaaugcgcaggcu

SEQ ID NO: 3617288 - RNA, 11 nt, Human
ucucugcccuc

SEQ ID NO: 3617289 - RNA, 15 nt, Human
ucucugccggcucuu

SEQ ID NO: 3617290 - RNA, 19 nt, Human
ucucugccggcucuuuccu

SEQ ID NO: 3617291 - RNA, 21 nt, Human
ucucugccucccucacccuga

SEQ ID NO: 3617292 - RNA, 16 nt, Human
ucucugccuugccuuu

SEQ ID NO: 3617293 - RNA, 21 nt, Human
ucucugcgugcagggacaaag

SEQ ID NO: 3617294 - RNA, 17 nt, Human
ucucugcuccaccacau

SEQ ID NO: 3617295 - RNA, 17 nt, Human
ucucugcucgcccuccu

SEQ ID NO: 3617296 - RNA, 22 nt, Human
ucucugcucugcgugucaccug

SEQ ID NO: 3617297 - RNA, 11 nt, Human
ucucugcugcc

SEQ ID NO: 3617298 - RNA, 16 nt, Human
ucucugcuggcccagc

SEQ ID NO: 3617299 - RNA, 11 nt, Human
ucucugcuuca

SEQ ID NO: 3617300 - RNA, 19 nt, Human
ucucugcuugagucagguu

SEQ ID NO: 3617301 - RNA, 14 nt, Human
ucucugcuuuaaag

SEQ ID NO: 3617302 - RNA, 19 nt, Human
ucucuggaagccccugggc

SEQ ID NO: 3617303 - RNA, 19 nt, Human
ucucuggcccuucuugccu

SEQ ID NO: 3617304 - RNA, 19 nt, Human
ucucuggccucccacccga

SEQ ID NO: 3617305 - RNA, 12 nt, Human
ucucuggccuuc

SEQ ID NO: 3617306 - RNA, 16 nt, Human
ucucuggccuucggcc

SEQ ID NO: 3617307 - RNA, 17 nt, Human
ucucuggccuucggccu

SEQ ID NO: 3617308 - RNA, 17 nt, Human
ucucuggcgacaguuuu

SEQ ID NO: 3617309 - RNA, 22 nt, Human
ucucuggcgacaguuuuccuuc

SEQ ID NO: 3617310 - RNA, 13 nt, Human
ucucuggcugggg

SEQ ID NO: 3617311 - RNA, 14 nt, Human
ucucuggcugggga

SEQ ID NO: 3617312 - RNA, 22 nt, Human
ucucuggcuguaaggcucuaga

SEQ ID NO: 3617313 - RNA, 23 nt, Human
ucucuggcuguaaggcucuagau

SEQ ID NO: 3617314 - RNA, 19 nt, Human
ucucugggagaaaaucauc

SEQ ID NO: 3617315 - RNA, 12 nt, Human
ucucugggcugg

SEQ ID NO: 3617316 - RNA, 20 nt, Human
ucucugggcuggaugagcuc

SEQ ID NO: 3617317 - RNA, 22 nt, Human
ucucugggcuggaugagcuccc

SEQ ID NO: 3617318 - RNA, 12 nt, Human
ucucuguaaagc

SEQ ID NO: 3617319 - RNA, 14 nt, Human
ucucuguaaagcua

SEQ ID NO: 3617320 - RNA, 16 nt, Human
ucucuguacuuuucau

SEQ ID NO: 3617321 - RNA, 19 nt, Human
ucucugucacccuuguccu

SEQ ID NO: 3617322 - RNA, 16 nt, Human
ucucugucccuugcug

SEQ ID NO: 3617323 - RNA, 19 nt, Human
ucucugucccuugcuguau

SEQ ID NO: 3617324 - RNA, 12 nt, Human
ucucugucucau

SEQ ID NO: 3617325 - RNA, 21 nt, Human
ucucugucucauccaucauca

SEQ ID NO: 3617326 - RNA, 13 nt, Human
ucucugugaccca

SEQ ID NO: 3617327 - RNA, 22 nt, Human
ucucugugagacucgagaacuu

SEQ ID NO: 3617328 - RNA, 15 nt, Human
ucucugugcugugga

SEQ ID NO: 3617329 - RNA, 11 nt, Human
ucucugugcuu

SEQ ID NO: 3617330 - RNA, 20 nt, Human
ucucugugucuaagauucua

SEQ ID NO: 3617331 - RNA, 10 nt, Human
ucucuguguu

SEQ ID NO: 3617332 - RNA, 16 nt, Human
ucucuguucauuuccu

SEQ ID NO: 3617333 - RNA, 22 nt, Human
ucucuguuccaugucuccuuua

SEQ ID NO: 3617334 - RNA, 18 nt, Human
ucucuguugacuggcugu

SEQ ID NO: 3617335 - RNA, 18 nt, Human
ucucuuaaacuugugaau

SEQ ID NO: 3617336 - RNA, 22 nt, Human
ucucuuaagacagcauguguua

SEQ ID NO: 3617337 - RNA, 22 nt, Human
ucucuuacgcccaacccuuccc

SEQ ID NO: 3617338 - RNA, 18 nt, Human
ucucuuagcuccccucca

SEQ ID NO: 3617339 - RNA, 21 nt, Human
ucucuuauagaauauuuauua

SEQ ID NO: 3617340 - RNA, 16 nt, Human
ucucuuauggaugucc

SEQ ID NO: 3617341 - RNA, 19 nt, Human
ucucuucagacucucagcc

SEQ ID NO: 3617342 - RNA, 14 nt, Human
ucucuucagguucu

SEQ ID NO: 3617343 - RNA, 23 nt, Human
ucucuucagguucuuagugucac

SEQ ID NO: 3617344 - RNA, 23 nt, Human
ucucuuccaaccauuuaucuuga

SEQ ID NO: 3617345 - RNA, 16 nt, Human
ucucuuccacauguua

SEQ ID NO: 3617346 - RNA, 16 nt, Human
ucucuuccaggcagcc

SEQ ID NO: 3617347 - RNA, 23 nt, Human
ucucuucccuuuccccagcauca

SEQ ID NO: 3617348 - RNA, 13 nt, Human
ucucuuccugccc

SEQ ID NO: 3617349 - RNA, 18 nt, Human
ucucuuccugccccucuu

SEQ ID NO: 3617350 - RNA, 22 nt, Human
ucucuuccugccccucuuucuc

SEQ ID NO: 3617351 - RNA, 21 nt, Human
ucucuuccuugaccugcauug

SEQ ID NO: 3617352 - RNA, 14 nt, Human
ucucuucuccacug

SEQ ID NO: 3617353 - RNA, 15 nt, Human
ucucuucuccacugg

SEQ ID NO: 3617354 - RNA, 14 nt, Human
ucucuucucccaga

SEQ ID NO: 3617355 - RNA, 21 nt, Human
ucucuucuccccuuccauuuc

SEQ ID NO: 3617356 - RNA, 11 nt, Human
ucucuucuccu

SEQ ID NO: 3617357 - RNA, 12 nt, Human
ucucuucuccuu

SEQ ID NO: 3617358 - RNA, 14 nt, Human
ucucuucucuccag

SEQ ID NO: 3617359 - RNA, 13 nt, Human
ucucuucucuguu

SEQ ID NO: 3617360 - RNA, 19 nt, Human
ucucuucugaauaaagcaa

SEQ ID NO: 3617361 - RNA, 22 nt, Human
ucucuucugagcuauuucaucu

SEQ ID NO: 3617362 - RNA, 14 nt, Human
ucucuucugcucca

SEQ ID NO: 3617363 - RNA, 19 nt, Human
ucucuucugcuccacccuu

SEQ ID NO: 3617364 - RNA, 19 nt, Human
ucucuucuggguuccuucc

SEQ ID NO: 3617365 - RNA, 20 nt, Human
ucucuucuggguuccuuccu

SEQ ID NO: 3617366 - RNA, 13 nt, Human
ucucuucuugaac

SEQ ID NO: 3617367 - RNA, 14 nt, Human
ucucuugagagggu

SEQ ID NO: 3617368 - RNA, 14 nt, Human
ucucuugagccugg

SEQ ID NO: 3617369 - RNA, 17 nt, Human
ucucuugagccugggag

SEQ ID NO: 3617370 - RNA, 18 nt, Human
ucucuugagccugggagg

SEQ ID NO: 3617371 - RNA, 16 nt, Human
ucucuugagcuggccu

SEQ ID NO: 3617372 - RNA, 16 nt, Human
ucucuugauucauaau

SEQ ID NO: 3617373 - RNA, 15 nt, Human
ucucuugcacccgcc

SEQ ID NO: 3617374 - RNA, 22 nt, Human
ucucuugccgaggagccaggca

SEQ ID NO: 3617375 - RNA, 22 nt, Human
ucucuugccuaaguauuccuuu

SEQ ID NO: 3617376 - RNA, 21 nt, Human
ucucuugccucaaccucccaa

SEQ ID NO: 3617377 - RNA, 13 nt, Human
ucucuugccucag

SEQ ID NO: 3617378 - RNA, 16 nt, Human
ucucuugccucagccu

SEQ ID NO: 3617379 - RNA, 22 nt, Human
ucucuugccucagcuuccccag

SEQ ID NO: 3617380 - RNA, 18 nt, Human
ucucuugguccugcugca

SEQ ID NO: 3617381 - RNA, 20 nt, Human
ucucuugguguuaaaacacu

SEQ ID NO: 3617382 - RNA, 20 nt, Human
ucuuagcuaucauugcuucc

SEQ ID NO: 3617383 - RNA, 15 nt, Human
ucuuagcucaaugag

SEQ ID NO: 3617384 - RNA, 16 nt, Human
ucuuagcucaaugagc

SEQ ID NO: 3617385 - RNA, 22 nt, Human
ucuuagcucaaugagcauguuu

SEQ ID NO: 3617386 - RNA, 17 nt, Human
ucuuagcuccccuccaa

SEQ ID NO: 3617387 - RNA, 15 nt, Human
ucuuagcugucugcu

SEQ ID NO: 3617388 - RNA, 14 nt, Human
ucuuagcuuuuuaa

SEQ ID NO: 3617389 - RNA, 21 nt, Human
ucuuagcuuuuuaauuguugu

SEQ ID NO: 3617390 - RNA, 19 nt, Human
ucuuaggaagagaaaccag

SEQ ID NO: 3617391 - RNA, 14 nt, Human
ucuuaggagcagag

SEQ ID NO: 3617392 - RNA, 17 nt, Human
ucuuaggccaggcgugg

SEQ ID NO: 3617393 - RNA, 22 nt, Human
ucuuaggguuaugauuaaguaa

SEQ ID NO: 3617394 - RNA, 20 nt, Human
ucuuagguuggcaaaaaggc

SEQ ID NO: 3617395 - RNA, 15 nt, Human
ucuuaguucucacug

SEQ ID NO: 3617396 - RNA, 21 nt, Human
ucuuaguuuggauucuuaugu

SEQ ID NO: 3617397 - RNA, 12 nt, Human
ucuuauaaauau

SEQ ID NO: 3617398 - RNA, 17 nt, Human
ucuuauaauacucuguu

SEQ ID NO: 3617399 - RNA, 14 nt, Human
ucuuauacuguaca

SEQ ID NO: 3617400 - RNA, 21 nt, Human
ucuuauacuguacaauaaaaa

SEQ ID NO: 3617401 - RNA, 16 nt, Human
ucuuauagcacuuuga

SEQ ID NO: 3617402 - RNA, 19 nt, Human
ucuuauagcacuuugaaau

SEQ ID NO: 3617403 - RNA, 16 nt, Human
ucuuauaguucuaggc

SEQ ID NO: 3617404 - RNA, 12 nt, Human
ucuuauauagca

SEQ ID NO: 3617405 - RNA, 18 nt, Human
ucuuauauaugugaacau

SEQ ID NO: 3617406 - RNA, 21 nt, Human
ucuuauauuuacaacacuuua

SEQ ID NO: 3617407 - RNA, 16 nt, Human
ucuuauccuccaccgu

SEQ ID NO: 3617408 - RNA, 16 nt, Human
ucuuaucucagauauu

SEQ ID NO: 3617409 - RNA, 12 nt, Human
ucuuaucucagu

SEQ ID NO: 3617410 - RNA, 14 nt, Human
ucuuaucuuacgaa

SEQ ID NO: 3617411 - RNA, 15 nt, Human
ucuuaucuucugcaa

SEQ ID NO: 3617412 - RNA, 17 nt, Human
ucuuaugcaaaauggaa

SEQ ID NO: 3617413 - RNA, 14 nt, Human
ucuuaugccauuug

SEQ ID NO: 3617414 - RNA, 20 nt, Human
ucuuaugccauuuguuuauu

SEQ ID NO: 3617415 - RNA, 18 nt, Human
ucuuaugcuguacccagu

SEQ ID NO: 3617416 - RNA, 13 nt, Human
ucuuaugcuucca

SEQ ID NO: 3617417 - RNA, 19 nt, Human
ucuuauggauguccccagc

SEQ ID NO: 3617418 - RNA, 15 nt, Human
ucuuauggauucauu

SEQ ID NO: 3617419 - RNA, 17 nt, Human
ucuuauggauucauuua

SEQ ID NO: 3617420 - RNA, 13 nt, Human
ucuuaugggcugg

SEQ ID NO: 3617421 - RNA, 16 nt, Human
ucuuaugggcuggguu

SEQ ID NO: 3617422 - RNA, 17 nt, Human
ucuuauguaccucuuuu

SEQ ID NO: 3617423 - RNA, 21 nt, Human
ucuuaugugacauuaacaaau

SEQ ID NO: 3617424 - RNA, 12 nt, Human
ucuuauuaaagu

SEQ ID NO: 3617425 - RNA, 22 nt, Human
ucuuauuaaaguuucaaaaauc

SEQ ID NO: 3617426 - RNA, 22 nt, Human
ucuuauuagaacaggcaaguga

SEQ ID NO: 3617427 - RNA, 12 nt, Human
ucuuauucauca

SEQ ID NO: 3617428 - RNA, 16 nt, Human
ucuuauucauuuucuc

SEQ ID NO: 3617429 - RNA, 19 nt, Human
ucuuauuccauauuagaaa

SEQ ID NO: 3617430 - RNA, 15 nt, Human
ucuuauucucacucc

SEQ ID NO: 3617431 - RNA, 22 nt, Human
ucuuauugcaaaauagcauuug

SEQ ID NO: 3617432 - RNA, 18 nt, Human
ucuuauugcccacgcugg

SEQ ID NO: 3617433 - RNA, 13 nt, Human
ucuuauuuauuau

SEQ ID NO: 3617434 - RNA, 18 nt, Human
ucuuauuucaugaaaauu

SEQ ID NO: 3617435 - RNA, 11 nt, Human
ucuuauuugcu

SEQ ID NO: 3617436 - RNA, 12 nt, Human
ucuuauuuuucu

SEQ ID NO: 3617437 - RNA, 18 nt, Human
ucuuauuuuucuaaacgu

SEQ ID NO: 3617438 - RNA, 16 nt, Human
ucuucaaaaacuguuu

SEQ ID NO: 3617439 - RNA, 21 nt, Human
ucuucaaaaguaaugccucug

SEQ ID NO: 3617440 - RNA, 22 nt, Human
ucuucaaaauauaaaaugccaa

SEQ ID NO: 3617441 - RNA, 19 nt, Human
ucuucaaaauguauauauu

SEQ ID NO: 3617442 - RNA, 13 nt, Human
ucuucaaauccuu

SEQ ID NO: 3617443 - RNA, 22 nt, Human
ucuucaaauccuuccaaaaauu

SEQ ID NO: 3617444 - RNA, 19 nt, Human
ucuucaaauuagaagacau

SEQ ID NO: 3617445 - RNA, 12 nt, Human
ucuucaacaaau

SEQ ID NO: 3617446 - RNA, 19 nt, Human
ucuucaacaucaauguuca

SEQ ID NO: 3617447 - RNA, 23 nt, Human
ucuucaacaucaauguucauugu

SEQ ID NO: 3617448 - RNA, 20 nt, Human
ucuucaacaugucacacugg

SEQ ID NO: 3617449 - RNA, 16 nt, Human
ucuucaacugaccagc

SEQ ID NO: 3617450 - RNA, 15 nt, Human
ucuucaaggcuucag

SEQ ID NO: 3617451 - RNA, 17 nt, Human
ucuucaaggcuucaguc

SEQ ID NO: 3617452 - RNA, 13 nt, Human
ucuucaagggcug

SEQ ID NO: 3617453 - RNA, 22 nt, Human
ucuucacaauggugcucauuuc

SEQ ID NO: 3617454 - RNA, 19 nt, Human
ucuucacccagcuaaucug

SEQ ID NO: 3617455 - RNA, 11 nt, Human
ucuucaccccg

SEQ ID NO: 3617456 - RNA, 21 nt, Human
ucuucaccccggcaggcccug

SEQ ID NO: 3617457 - RNA, 23 nt, Human
ucuucaccccggcaggcccugca

SEQ ID NO: 3617458 - RNA, 23 nt, Human
ucuucaccuaagucucugugaau

SEQ ID NO: 3617459 - RNA, 14 nt, Human
ucuucacggcagga

SEQ ID NO: 3617460 - RNA, 13 nt, Human
ucuucacucacag

SEQ ID NO: 3617461 - RNA, 14 nt, Human
ucuucacucgcccc

SEQ ID NO: 3617462 - RNA, 18 nt, Human
ucuucacucucugaagau

SEQ ID NO: 3617463 - RNA, 14 nt, Human
ucuucacucuuagg

SEQ ID NO: 3617464 - RNA, 15 nt, Human
ucuucacuuuugcaa

SEQ ID NO: 3617465 - RNA, 13 nt, Human
ucuucagaagaca

SEQ ID NO: 3617466 - RNA, 20 nt, Human
ucuucagacucucagcccag

SEQ ID NO: 3617467 - RNA, 14 nt, Human
ucuucagagaaauc

SEQ ID NO: 3617468 - RNA, 12 nt, Human
ucuucagagacu

SEQ ID NO: 3617469 - RNA, 19 nt, Human
ucuucagagacuccugcag

SEQ ID NO: 3617470 - RNA, 20 nt, Human
ucuucagagacuccugcagg

SEQ ID NO: 3617471 - RNA, 15 nt, Human
ucuucagaggcccuc

SEQ ID NO: 3617472 - RNA, 19 nt, Human
ucuucagauacaaacugca

SEQ ID NO: 3617473 - RNA, 23 nt, Human
ucuucagaucucuaacuucacca

SEQ ID NO: 3617474 - RNA, 14 nt, Human
ucuucagaugccac

SEQ ID NO: 3617475 - RNA, 13 nt, Human
ucuucagccauca

SEQ ID NO: 3617476 - RNA, 11 nt, Human
ucuucagccua

SEQ ID NO: 3617477 - RNA, 21 nt, Human
ucuucagccuagccgaccuca

SEQ ID NO: 3617478 - RNA, 23 nt, Human
ucuucagccuagccgaccucagc

SEQ ID NO: 3617479 - RNA, 19 nt, Human
ucuucagcguaaaauggug

SEQ ID NO: 3617480 - RNA, 16 nt, Human
ucuucagcuucuucau

SEQ ID NO: 3617481 - RNA, 17 nt, Human
ucuucaggcuuccugca

SEQ ID NO: 3617482 - RNA, 15 nt, Human
ucuucagggccuggu

SEQ ID NO: 3617483 - RNA, 23 nt, Human
ucuucagggccugguugaagaag

SEQ ID NO: 3617484 - RNA, 16 nt, Human
ucuuccccaccaaccc

SEQ ID NO: 3617485 - RNA, 14 nt, Human
ucuuccccacuccc

SEQ ID NO: 3617486 - RNA, 19 nt, Human
ucuuccccacuccccaccu

SEQ ID NO: 3617487 - RNA, 20 nt, Human
ucuuccccagaaaggagacu

SEQ ID NO: 3617488 - RNA, 19 nt, Human
ucuuccccagacgccuggc

SEQ ID NO: 3617489 - RNA, 18 nt, Human
ucuucccccacuccucuu

SEQ ID NO: 3617490 - RNA, 14 nt, Human
ucuucccccucucc

SEQ ID NO: 3617491 - RNA, 16 nt, Human
ucuucccccucuccca

SEQ ID NO: 3617492 - RNA, 24 nt, Human
ucuuccccucuaaugcucacgcuc

SEQ ID NO: 3617493 - RNA, 22 nt, Human
ucuuccccuugcccuugcccug

SEQ ID NO: 3617494 - RNA, 18 nt, Human
ucuucccgaaccccaagg

SEQ ID NO: 3617495 - RNA, 21 nt, Human
ucuucccuaccucaggcagga

SEQ ID NO: 3617496 - RNA, 15 nt, Human
ucuuccgacucuuuc

SEQ ID NO: 3617497 - RNA, 21 nt, Human
ucuuccgccccugccugccau

SEQ ID NO: 3617498 - RNA, 18 nt, Human
ucuuccggagauguagca

SEQ ID NO: 3617499 - RNA, 21 nt, Human
ucuuccggagauguagcaaaa

SEQ ID NO: 3617500 - RNA, 20 nt, Human
ucuuccggccccuccccucc

SEQ ID NO: 3617501 - RNA, 23 nt, Human
ucuuccggccccuccccuccaaa

SEQ ID NO: 3617502 - RNA, 14 nt, Human
ucuuccgucucccc

SEQ ID NO: 3617503 - RNA, 20 nt, Human
ucuuccgucucccccguguu

SEQ ID NO: 3617504 - RNA, 21 nt, Human
ucuuccuacccugccucccuu

SEQ ID NO: 3617505 - RNA, 16 nt, Human
ucuuccuaucccaucc

SEQ ID NO: 3617506 - RNA, 22 nt, Human
ucuuccuaucccucuccuaacu

SEQ ID NO: 3617507 - RNA, 16 nt, Human
ucuuccuauuucagaa

SEQ ID NO: 3617508 - RNA, 17 nt, Human
ucuuccuauuucagaag

SEQ ID NO: 3617509 - RNA, 23 nt, Human
ucuuccucaaaauaaagaaguau

SEQ ID NO: 3617510 - RNA, 21 nt, Human
ucuuccucacagucccacugu

SEQ ID NO: 3617511 - RNA, 15 nt, Human
ucuuccucccucccu

SEQ ID NO: 3617512 - RNA, 18 nt, Human
ucuuccuccgaggccagu

SEQ ID NO: 3617513 - RNA, 14 nt, Human
ucuuccucugaggc

SEQ ID NO: 3617514 - RNA, 16 nt, Human
ucuuccucugaggcug

SEQ ID NO: 3617515 - RNA, 11 nt, Human
ucuuccucugc

SEQ ID NO: 3617516 - RNA, 21 nt, Human
ucuuccucugcuaaauugaug

SEQ ID NO: 3617517 - RNA, 16 nt, Human
ucuuccugacacuuua

SEQ ID NO: 3617518 - RNA, 14 nt, Human
ucuuccugccccuc

SEQ ID NO: 3617519 - RNA, 15 nt, Human
ucuuccugccccucu

SEQ ID NO: 3617520 - RNA, 19 nt, Human
ucuuccugccccucuuucu

SEQ ID NO: 3617521 - RNA, 13 nt, Human
ucuuccuggcuuu

SEQ ID NO: 3617522 - RNA, 21 nt, Human
ucuuccuggucgaaaguuagu

SEQ ID NO: 3617523 - RNA, 22 nt, Human
ucuuccuguaacacaagccaca

SEQ ID NO: 3617524 - RNA, 17 nt, Human
ucuuccuguuaauguau

SEQ ID NO: 3617525 - RNA, 23 nt, Human
ucuuccuuacuuuuuauauauau

SEQ ID NO: 3617526 - RNA, 13 nt, Human
ucuuccuucugcc

SEQ ID NO: 3617527 - RNA, 21 nt, Human
ucuuccuugaagaacugcagg

SEQ ID NO: 3617528 - RNA, 18 nt, Human
ucuuccuuggagggggga

SEQ ID NO: 3617529 - RNA, 17 nt, Human
ucuuccuuuacuuuccc

SEQ ID NO: 3617530 - RNA, 20 nt, Human
ucuuccuuuacuuucccuug

SEQ ID NO: 3617531 - RNA, 13 nt, Human
ucuuccuuuguaa

SEQ ID NO: 3617532 - RNA, 16 nt, Human
ucuuccuuuguaaaaa

SEQ ID NO: 3617533 - RNA, 10 nt, Human
ucuuccuuuu

SEQ ID NO: 3617534 - RNA, 15 nt, Human
ucuucgacuguuguu

SEQ ID NO: 3617535 - RNA, 17 nt, Human
ucuucgacuguuguuau

SEQ ID NO: 3617536 - RNA, 13 nt, Human
ucuucgaggugga

SEQ ID NO: 3617537 - RNA, 14 nt, Human
ucuucggaaaccuu

SEQ ID NO: 3617538 - RNA, 13 nt, Human
ucuucgggaagag

SEQ ID NO: 3617539 - RNA, 19 nt, Human
ucuucggggaacuccugga

SEQ ID NO: 3617540 - RNA, 12 nt, Human
ucuucuaaaugg

SEQ ID NO: 3617541 - RNA, 20 nt, Human
ucuucuaauuucaaaaauau

SEQ ID NO: 3617542 - RNA, 14 nt, Human
ucuucuaccaccca

SEQ ID NO: 3617543 - RNA, 22 nt, Human
ucuucuacucacuuuucccacu

SEQ ID NO: 3617544 - RNA, 13 nt, Human
ucuucuauauaau

SEQ ID NO: 3617545 - RNA, 11 nt, Human
ucuucucaagu

SEQ ID NO: 3617546 - RNA, 15 nt, Human
ucuucucaagugccu

SEQ ID NO: 3617547 - RNA, 15 nt, Human
ucuucucaaguucua

SEQ ID NO: 3617548 - RNA, 18 nt, Human
ucuucucaaguucuaaga

SEQ ID NO: 3617549 - RNA, 17 nt, Human
ucuucucacucccuucu

SEQ ID NO: 3617550 - RNA, 21 nt, Human
ucuucucaggcucugcccugc

SEQ ID NO: 3617551 - RNA, 16 nt, Human
ucuucucauagcauua

SEQ ID NO: 3617552 - RNA, 18 nt, Human
ucuucucauagcauuaac

SEQ ID NO: 3617553 - RNA, 18 nt, Human
ucuucucauuucaccccu

SEQ ID NO: 3617554 - RNA, 19 nt, Human
ucuucucauuucaccccuc

SEQ ID NO: 3617555 - RNA, 15 nt, Human
ucuucuccagauuuu

SEQ ID NO: 3617556 - RNA, 13 nt, Human
ucuucuccaggcu

SEQ ID NO: 3617557 - RNA, 19 nt, Human
ucuucuccauccuaccaca

SEQ ID NO: 3617558 - RNA, 12 nt, Human
ucuucuccaucu

SEQ ID NO: 3617559 - RNA, 13 nt, Human
ucuucucccagaa

SEQ ID NO: 3617560 - RNA, 12 nt, Human
ucuucuccccag

SEQ ID NO: 3617561 - RNA, 12 nt, Human
ucuucuccccca

SEQ ID NO: 3617562 - RNA, 21 nt, Human
ucuucuccccuuccauuucug

SEQ ID NO: 3617563 - RNA, 16 nt, Human
ucuucuccuaugugua

SEQ ID NO: 3617564 - RNA, 21 nt, Human
ucuucuccuggaguugcauug

SEQ ID NO: 3617565 - RNA, 13 nt, Human
ucuucuccuuuca

SEQ ID NO: 3617566 - RNA, 23 nt, Human
ucuucucguccucguuuguguuc

SEQ ID NO: 3617567 - RNA, 13 nt, Human
ucuucucuagcug

SEQ ID NO: 3617568 - RNA, 15 nt, Human
ucuucucuagcuggu

SEQ ID NO: 3617569 - RNA, 17 nt, Human
ucuucucucugcucuga

SEQ ID NO: 3617570 - RNA, 21 nt, Human
ucuucucuggcgacaguuuuc

SEQ ID NO: 3617571 - RNA, 12 nt, Human
ucuucucugucu

SEQ ID NO: 3617572 - RNA, 13 nt, Human
ucuucucuuccug

SEQ ID NO: 3617573 - RNA, 19 nt, Human
ucuucucuuccuuuuauca

SEQ ID NO: 3617574 - RNA, 16 nt, Human
ucuucugacaaacugu

SEQ ID NO: 3617575 - RNA, 17 nt, Human
ucuucugacaaacugug

SEQ ID NO: 3617576 - RNA, 14 nt, Human
ucuucugacgugcc

SEQ ID NO: 3617577 - RNA, 15 nt, Human
ucuucugacgugccu

SEQ ID NO: 3617578 - RNA, 16 nt, Human
ucuucugagcacuguu

SEQ ID NO: 3617579 - RNA, 22 nt, Human
ucuucugagcuuacguaguucu

SEQ ID NO: 3617580 - RNA, 20 nt, Human
ucuucugaguggcuaaaacu

SEQ ID NO: 3617581 - RNA, 19 nt, Human
ucuucugccggcccugggg

SEQ ID NO: 3617582 - RNA, 16 nt, Human
ucuucugccuguuaua

SEQ ID NO: 3617583 - RNA, 22 nt, Human
ucuucugcuaugugacuugcau

SEQ ID NO: 3617584 - RNA, 15 nt, Human
ucuucugcuccaccc

SEQ ID NO: 3617585 - RNA, 18 nt, Human
ucuucugcucuuucuucu

SEQ ID NO: 3617586 - RNA, 22 nt, Human
ucuucugcucuuucuucuucca

SEQ ID NO: 3617587 - RNA, 22 nt, Human
ucuucugcuucagccucccgag

SEQ ID NO: 3617588 - RNA, 12 nt, Human
ucuucuggaaug

SEQ ID NO: 3617589 - RNA, 18 nt, Human
ucuucuggacugguuuuc

SEQ ID NO: 3617590 - RNA, 13 nt, Human
ucuucuggcucaa

SEQ ID NO: 3617591 - RNA, 17 nt, Human
ucuucugggagggcagc

SEQ ID NO: 3617592 - RNA, 22 nt, Human
ucuucugggagggcagcagggc

SEQ ID NO: 3617593 - RNA, 23 nt, Human
ucuucugggagggcagcagggcu

SEQ ID NO: 3617594 - RNA, 18 nt, Human
ucuucuggguuccuuccu

SEQ ID NO: 3617595 - RNA, 16 nt, Human
ugaaguuaguggaaau

SEQ ID NO: 3617596 - RNA, 19 nt, Human
ugaaguuauguguauguga

SEQ ID NO: 3617597 - RNA, 14 nt, Human
ugaaguucuccuga

SEQ ID NO: 3617598 - RNA, 21 nt, Human
ugaaguucugccucugaugua

SEQ ID NO: 3617599 - RNA, 22 nt, Human
ugaaguucugccucugauguau

SEQ ID NO: 3617600 - RNA, 14 nt, Human
ugaaguuggacagc

SEQ ID NO: 3617601 - RNA, 16 nt, Human
ugaaguuguagguaau

SEQ ID NO: 3617602 - RNA, 22 nt, Human
ugaaguuguuacuaacuaaacu

SEQ ID NO: 3617603 - RNA, 14 nt, Human
ugaaguuuaaaaca

SEQ ID NO: 3617604 - RNA, 14 nt, Human
ugaaguuuacauuu

SEQ ID NO: 3617605 - RNA, 16 nt, Human
ugaaguuuacauuuuu

SEQ ID NO: 3617606 - RNA, 17 nt, Human
ugaaguuuacauuuuua

SEQ ID NO: 3617607 - RNA, 14 nt, Human
ugaaguuuauacag

SEQ ID NO: 3617608 - RNA, 16 nt, Human
ugaaguuuauacagua

SEQ ID NO: 3617609 - RNA, 14 nt, Human
ugaaguuucacucc

SEQ ID NO: 3617610 - RNA, 14 nt, Human
ugaaguuugaaugu

SEQ ID NO: 3617611 - RNA, 15 nt, Human
ugaaguuugaauguu

SEQ ID NO: 3617612 - RNA, 15 nt, Human
ugaaguuuuacauug

SEQ ID NO: 3617613 - RNA, 16 nt, Human
ugaaguuuuacauugu

SEQ ID NO: 3617614 - RNA, 19 nt, Human
ugaauaaaaauauguacaa

SEQ ID NO: 3617615 - RNA, 14 nt, Human
ugaauaaaaaugca

SEQ ID NO: 3617616 - RNA, 15 nt, Human
ugaauaaaaaugcac

SEQ ID NO: 3617617 - RNA, 16 nt, Human
ugaauaaaagugcaca

SEQ ID NO: 3617618 - RNA, 15 nt, Human
ugaauaaagacaccu

SEQ ID NO: 3617619 - RNA, 13 nt, Human
ugaauaaagagcc

SEQ ID NO: 3617620 - RNA, 13 nt, Human
ugaauaaauaccu

SEQ ID NO: 3617621 - RNA, 23 nt, Human
ugaauaaauaccucuuagcugag

SEQ ID NO: 3617622 - RNA, 12 nt, Human
ugaauaaauguc

SEQ ID NO: 3617623 - RNA, 15 nt, Human
ugaauaaaugucacu

SEQ ID NO: 3617624 - RNA, 19 nt, Human
ugaauaaaugucacuuuuu

SEQ ID NO: 3617625 - RNA, 20 nt, Human
ugaauaaaugucacuuuuug

SEQ ID NO: 3617626 - RNA, 23 nt, Human
ugaauaaccacuuaaaaaauguc

SEQ ID NO: 3617627 - RNA, 13 nt, Human
ugaauaagcacuu

SEQ ID NO: 3617628 - RNA, 16 nt, Human
ugaauaauaagcagga

SEQ ID NO: 3617629 - RNA, 17 nt, Human
ugaauaaugccuuugua

SEQ ID NO: 3617630 - RNA, 16 nt, Human
ugaauaauggaaaaug

SEQ ID NO: 3617631 - RNA, 15 nt, Human
ugaauaauuucccaa

SEQ ID NO: 3617632 - RNA, 19 nt, Human
ugaauacagggcaugcauu

SEQ ID NO: 3617633 - RNA, 18 nt, Human
ugaauaccacucuguaau

SEQ ID NO: 3617634 - RNA, 20 nt, Human
ugaauaccacucuguaauug

SEQ ID NO: 3617635 - RNA, 22 nt, Human
ugaauaccccaagacucccaug

SEQ ID NO: 3617636 - RNA, 14 nt, Human
ugaauaccugcuca

SEQ ID NO: 3617637 - RNA, 21 nt, Human
ugaauaccuuagugcaguuau

SEQ ID NO: 3617638 - RNA, 20 nt, Human
ugaauacucugcccucuaga

SEQ ID NO: 3617639 - RNA, 13 nt, Human
ugaauacugcuug

SEQ ID NO: 3617640 - RNA, 16 nt, Human
ugaauacugcuugaau

SEQ ID NO: 3617641 - RNA, 15 nt, Human
ugaauacuuugaaug

SEQ ID NO: 3617642 - RNA, 17 nt, Human
ugaauacuuugaaugug

SEQ ID NO: 3617643 - RNA, 20 nt, Human
ugaauacuuugaauguguuu

SEQ ID NO: 3617644 - RNA, 21 nt, Human
ugaauagauaugaaagcugau

SEQ ID NO: 3617645 - RNA, 16 nt, Human
ugaauagccauauuug

SEQ ID NO: 3617646 - RNA, 18 nt, Human
ugaauagccauauuugua

SEQ ID NO: 3617647 - RNA, 17 nt, Human
ugaauaggcgaucacaa

SEQ ID NO: 3617648 - RNA, 18 nt, Human
ugaauaggcgaucacaac

SEQ ID NO: 3617649 - RNA, 14 nt, Human
ugaauauaaaugug

SEQ ID NO: 3617650 - RNA, 18 nt, Human
ugaauauaaaugugugua

SEQ ID NO: 3617651 - RNA, 12 nt, Human
ugaauauaugau

SEQ ID NO: 3617652 - RNA, 14 nt, Human
ugaauauauggcau

SEQ ID NO: 3617653 - RNA, 14 nt, Human
ugaauauccccucc

SEQ ID NO: 3617654 - RNA, 16 nt, Human
ugaauauccccuccca

SEQ ID NO: 3617655 - RNA, 18 nt, Human
ugaauaucuauuaauaua

SEQ ID NO: 3617656 - RNA, 21 nt, Human
ugaauaucuauuaauauaugu

SEQ ID NO: 3617657 - RNA, 15 nt, Human
ugaauaugauuaaaa

SEQ ID NO: 3617658 - RNA, 14 nt, Human
ugaauaugccugua

SEQ ID NO: 3617659 - RNA, 16 nt, Human
ugaauaugccuguaau

SEQ ID NO: 3617660 - RNA, 23 nt, Human
ugaauaugccuguaauucagugu

SEQ ID NO: 3617661 - RNA, 22 nt, Human
ugaauauggacaagagguacag

SEQ ID NO: 3617662 - RNA, 23 nt, Human
ugaauauguaguaucuauaugac

SEQ ID NO: 3617663 - RNA, 22 nt, Human
ugaauaugucaucacucuaggu

SEQ ID NO: 3617664 - RNA, 21 nt, Human
ugacauugaaaucuaggaaaa

SEQ ID NO: 3617665 - RNA, 18 nt, Human
ugacauugccaaaaagga

SEQ ID NO: 3617666 - RNA, 16 nt, Human
ugacauugcuaagaug

SEQ ID NO: 3617667 - RNA, 22 nt, Human
ugacauuguagagcuucuggca

SEQ ID NO: 3617668 - RNA, 12 nt, Human
ugacauugucuc

SEQ ID NO: 3617669 - RNA, 21 nt, Human
ugacauuguuggccaaagcca

SEQ ID NO: 3617670 - RNA, 18 nt, Human
ugacauuuaauuuaguga

SEQ ID NO: 3617671 - RNA, 19 nt, Human
ugacauuuagucccucaag

SEQ ID NO: 3617672 - RNA, 19 nt, Human
ugacauuuauauauugaau

SEQ ID NO: 3617673 - RNA, 18 nt, Human
ugacauuuauuuuucauu

SEQ ID NO: 3617674 - RNA, 22 nt, Human
ugacauuuauuuuucucaugaa

SEQ ID NO: 3617675 - RNA, 12 nt, Human
ugacauuucuuu

SEQ ID NO: 3617676 - RNA, 14 nt, Human
ugacauuucuuugu

SEQ ID NO: 3617677 - RNA, 15 nt, Human
ugacauuuggagagg

SEQ ID NO: 3617678 - RNA, 22 nt, Human
ugacauuugggagacaugugac

SEQ ID NO: 3617679 - RNA, 24 nt, Human
ugacauuugggagacaugugacau

SEQ ID NO: 3617680 - RNA, 17 nt, Human
ugacauuuguaguugag

SEQ ID NO: 3617681 - RNA, 13 nt, Human
ugacauuugucau

SEQ ID NO: 3617682 - RNA, 15 nt, Human
ugacauuugucauuu

SEQ ID NO: 3617683 - RNA, 15 nt, Human
ugacauuuguuuggu

SEQ ID NO: 3617684 - RNA, 16 nt, Human
ugaccaaaauccccuu

SEQ ID NO: 3617685 - RNA, 22 nt, Human
ugaccaaauaucaccaggacug

SEQ ID NO: 3617686 - RNA, 20 nt, Human
ugaccaacauggagaaaccc

SEQ ID NO: 3617687 - RNA, 15 nt, Human
ugaccaacuagacau

SEQ ID NO: 3617688 - RNA, 16 nt, Human
ugaccaacuagacauu

SEQ ID NO: 3617689 - RNA, 17 nt, Human
ugauaauuuuccuuuaa

SEQ ID NO: 3617690 - RNA, 19 nt, Human
ugauaauuuuccuuuaaua

SEQ ID NO: 3617691 - RNA, 17 nt, Human
ugauacaagauuagaag

SEQ ID NO: 3617692 - RNA, 18 nt, Human
ugauacaaugcugugccc

SEQ ID NO: 3617693 - RNA, 20 nt, Human
ugauacaaugcugugcccua

SEQ ID NO: 3617694 - RNA, 21 nt, Human
ugauacaaugcugugcccuaa

SEQ ID NO: 3617695 - RNA, 23 nt, Human
ugauacacuaugaagauguuuca

SEQ ID NO: 3617696 - RNA, 12 nt, Human
ugauacagaaaa

SEQ ID NO: 3617697 - RNA, 14 nt, Human
ugauacagaacucu

SEQ ID NO: 3617698 - RNA, 15 nt, Human
ugauacagaacucuu

SEQ ID NO: 3617699 - RNA, 15 nt, Human
ugauacauaacuaaa

SEQ ID NO: 3617700 - RNA, 22 nt, Human
ugauacauccaaagcagacagc

SEQ ID NO: 3617701 - RNA, 20 nt, Human
ugauacauucaaauuugucu

SEQ ID NO: 3617702 - RNA, 14 nt, Human
ugauacauuuuugu

SEQ ID NO: 3617703 - RNA, 18 nt, Human
ugauacccauagcuucca

SEQ ID NO: 3617704 - RNA, 21 nt, Human
ugauacccauagcuuccauga

SEQ ID NO: 3617705 - RNA, 22 nt, Human
ugauaccccuggggaacauuuc

SEQ ID NO: 3617706 - RNA, 15 nt, Human
ugauacgaugcuuca

SEQ ID NO: 3617707 - RNA, 14 nt, Human
ugauacuaagcauu

SEQ ID NO: 3617708 - RNA, 16 nt, Human
ugauacuaagcauuga

SEQ ID NO: 3617709 - RNA, 18 nt, Human
ugauacuauccaguuacu

SEQ ID NO: 3617710 - RNA, 20 nt, Human
ugauacucuuucuaaugcug

SEQ ID NO: 3617711 - RNA, 18 nt, Human
ugauacuggaggaacacu

SEQ ID NO: 3617712 - RNA, 19 nt, Human
ugauacuguugcacgugug

SEQ ID NO: 3617713 - RNA, 20 nt, Human
ugauacuguugcacgugugu

SEQ ID NO: 3617714 - RNA, 22 nt, Human
ugauacuuauauuuucguauga

SEQ ID NO: 3617715 - RNA, 18 nt, Human
ugauacuucgacacuguu

SEQ ID NO: 3617716 - RNA, 20 nt, Human
ugauacuucgacacuguucu

SEQ ID NO: 3617717 - RNA, 16 nt, Human
ugauacuuuuuugaaa

SEQ ID NO: 3617718 - RNA, 17 nt, Human
ugauagacaauugaggu

SEQ ID NO: 3617719 - RNA, 19 nt, Human
ugauagacacauaugaggg

SEQ ID NO: 3617720 - RNA, 14 nt, Human
ugauagauuuucug

SEQ ID NO: 3617721 - RNA, 16 nt, Human
ugauagcaaaaucaag

SEQ ID NO: 3617722 - RNA, 18 nt, Human
ugauagcaaauggccuca

SEQ ID NO: 3617723 - RNA, 13 nt, Human
ugauagcacuuuc

SEQ ID NO: 3617724 - RNA, 21 nt, Human
ugauagcacuuucuacaaugu

SEQ ID NO: 3617725 - RNA, 13 nt, Human
ugauagcauugcu

SEQ ID NO: 3617726 - RNA, 11 nt, Human
ugauagcuuua

SEQ ID NO: 3617727 - RNA, 23 nt, Human
ugauagcuuuauuuuuuaaguau

SEQ ID NO: 3617728 - RNA, 16 nt, Human
ugauaggaauucaucu

SEQ ID NO: 3617729 - RNA, 15 nt, Human
ugauagggaacuggg

SEQ ID NO: 3617730 - RNA, 20 nt, Human
ugauagggauacaugcucuu

SEQ ID NO: 3617731 - RNA, 17 nt, Human
ugauagucuuuugcuuu

SEQ ID NO: 3617732 - RNA, 14 nt, Human
ugauaguuacuguu

SEQ ID NO: 3617733 - RNA, 16 nt, Human
ugauaguuacuguugu

SEQ ID NO: 3617734 - RNA, 20 nt, Human
ugauaguuacuguugugacc

SEQ ID NO: 3617735 - RNA, 18 nt, Human
ugauaguugauuuucaaa

SEQ ID NO: 3617736 - RNA, 16 nt, Human
ugauauaaaugcaaua

SEQ ID NO: 3617737 - RNA, 13 nt, Human
ugauauaaauucu

SEQ ID NO: 3617738 - RNA, 14 nt, Human
ugauauaaauucug

SEQ ID NO: 3617739 - RNA, 16 nt, Human
ugauauaaauucugug

SEQ ID NO: 3617740 - RNA, 17 nt, Human
ugauauaaguguguguu

SEQ ID NO: 3617741 - RNA, 20 nt, Human
ugauauaccaaauuaaaaaa

SEQ ID NO: 3617742 - RNA, 21 nt, Human
ugauauagaaguauaaagaau

SEQ ID NO: 3617743 - RNA, 18 nt, Human
ugauauagaauuagcuuu

SEQ ID NO: 3617744 - RNA, 19 nt, Human
ugauauauaaguguacaua

SEQ ID NO: 3617745 - RNA, 16 nt, Human
ugauauauauuauaaa

SEQ ID NO: 3617746 - RNA, 15 nt, Human
ugauauaucucaaau

SEQ ID NO: 3617747 - RNA, 16 nt, Human
ugauauauggauaaug

SEQ ID NO: 3617748 - RNA, 13 nt, Human
ugauauauguguu

SEQ ID NO: 3617749 - RNA, 21 nt, Human
ugauauauguguuuuucacau

SEQ ID NO: 3617750 - RNA, 17 nt, Human
ugauauauuuaaaaaca

SEQ ID NO: 3617751 - RNA, 17 nt, Human
ugauaucacagucuaau

SEQ ID NO: 3617752 - RNA, 19 nt, Human
ugauauccauucuuucuga

SEQ ID NO: 3617753 - RNA, 16 nt, Human
ugauaucccccagccu

SEQ ID NO: 3617754 - RNA, 12 nt, Human
ugauaucccuga

SEQ ID NO: 3617755 - RNA, 18 nt, Human
ugauaucuauaguagaca

SEQ ID NO: 3617756 - RNA, 12 nt, Human
ugauaugaaaaa

SEQ ID NO: 3617757 - RNA, 19 nt, Human
ugauaugaaaaauaugaua

SEQ ID NO: 3617758 - RNA, 19 nt, Human
ugauaugaguauacaauau

SEQ ID NO: 3617759 - RNA, 23 nt, Human
ugauaugcacaauguagauaagu

SEQ ID NO: 3617760 - RNA, 19 nt, Human
ugauaugcaguuuuccuua

SEQ ID NO: 3617761 - RNA, 17 nt, Human
ugauauggagcccugua

SEQ ID NO: 3617762 - RNA, 18 nt, Human
ugauauggcagaagacac

SEQ ID NO: 3617763 - RNA, 22 nt, Human
ugauauggguuuauaauuuucu

SEQ ID NO: 3617764 - RNA, 17 nt, Human
ugauauguuuuauuuca

SEQ ID NO: 3617765 - RNA, 23 nt, Human
ugauauguuuuauuucauugguu

SEQ ID NO: 3617766 - RNA, 22 nt, Human
ugauauuacauuuauuuaucca

SEQ ID NO: 3617767 - RNA, 14 nt, Human
ugauauucagaauu

SEQ ID NO: 3617768 - RNA, 15 nt, Human
ugauauuccauagua

SEQ ID NO: 3617769 - RNA, 12 nt, Human
ugauauucuaag

SEQ ID NO: 3617770 - RNA, 22 nt, Human
ugauauucuaagaaauaucugu

SEQ ID NO: 3617771 - RNA, 15 nt, Human
ugauauucuuuguua

SEQ ID NO: 3617772 - RNA, 18 nt, Human
ugauauucuuuguuaauu

SEQ ID NO: 3617773 - RNA, 16 nt, Human
ugauauugcugaagaa

SEQ ID NO: 3617774 - RNA, 17 nt, Human
ugauauuguuauauaca

SEQ ID NO: 3617775 - RNA, 19 nt, Human
ugauauuuccccaugguuu

SEQ ID NO: 3617776 - RNA, 23 nt, Human
ugauauuucccuccccuggggac

SEQ ID NO: 3617777 - RNA, 18 nt, Human
ugauauuucucuaguagu

SEQ ID NO: 3617778 - RNA, 18 nt, Human
ugauauuuguauuuauuc

SEQ ID NO: 3617779 - RNA, 19 nt, Human
ugauauuuguauuuauucu

SEQ ID NO: 3617780 - RNA, 19 nt, Human
ugauauuuucaacgcagcc

SEQ ID NO: 3617781 - RNA, 22 nt, Human
ugauauuuucaacgcagcccug

SEQ ID NO: 3617782 - RNA, 17 nt, Human
ugauauuuucugugccu

SEQ ID NO: 3617783 - RNA, 20 nt, Human
ugauauuuucugugccugaa

SEQ ID NO: 3617784 - RNA, 16 nt, Human
ugauauuuuguacuuu

SEQ ID NO: 3617785 - RNA, 18 nt, Human
ugauauuuuguuuuuccc

SEQ ID NO: 3617786 - RNA, 16 nt, Human
ugauauuuuuucucuc

SEQ ID NO: 3617787 - RNA, 16 nt, Human
ugauauuuuuuuaagu

SEQ ID NO: 3617788 - RNA, 16 nt, Human
ugaucaaaaauaaugc

SEQ ID NO: 3617789 - RNA, 17 nt, Human
ugaucaaacaugucucu

SEQ ID NO: 3617790 - RNA, 14 nt, Human
ugaucaaauguuua

SEQ ID NO: 3617791 - RNA, 17 nt, Human
ugaucaaauucauuuuu

SEQ ID NO: 3617792 - RNA, 17 nt, Human
ugaucaacaucuuuucu

SEQ ID NO: 3617793 - RNA, 21 nt, Human
ugaucaacaucuuuucuugcc

SEQ ID NO: 3617794 - RNA, 17 nt, Human
ugaucaagggaauguaa

SEQ ID NO: 3617795 - RNA, 19 nt, Human
ugaucaauaaaaugugauu

SEQ ID NO: 3617796 - RNA, 14 nt, Human
ugcacucaaccuua

SEQ ID NO: 3617797 - RNA, 14 nt, Human
ugcacucagacugu

SEQ ID NO: 3617798 - RNA, 15 nt, Human
ugcacucagacugua

SEQ ID NO: 3617799 - RNA, 16 nt, Human
ugcacucagacuguau

SEQ ID NO: 3617800 - RNA, 12 nt, Human
ugcacuccagcc

SEQ ID NO: 3617801 - RNA, 15 nt, Human
ugcacuccagccuga

SEQ ID NO: 3617802 - RNA, 17 nt, Human
ugcacuccagccugagc

SEQ ID NO: 3617803 - RNA, 17 nt, Human
ugcacuccagccugggc

SEQ ID NO: 3617804 - RNA, 18 nt, Human
ugcacuccagccugggca

SEQ ID NO: 3617805 - RNA, 19 nt, Human
ugcacucccaccugacaca

SEQ ID NO: 3617806 - RNA, 21 nt, Human
ugcacucuaaaagguucaggg

SEQ ID NO: 3617807 - RNA, 12 nt, Human
ugcacucugugc

SEQ ID NO: 3617808 - RNA, 16 nt, Human
ugcacucugugcccau

SEQ ID NO: 3617809 - RNA, 21 nt, Human
ugcacucugugcccaugggca

SEQ ID NO: 3617810 - RNA, 17 nt, Human
ugcacucuuuaagggag

SEQ ID NO: 3617811 - RNA, 16 nt, Human
ugcacugaaguuugau

SEQ ID NO: 3617812 - RNA, 18 nt, Human
ugcacugacauuguuggc

SEQ ID NO: 3617813 - RNA, 21 nt, Human
ugcacugacauuguuggccaa

SEQ ID NO: 3617814 - RNA, 16 nt, Human
ugcacugacccuucca

SEQ ID NO: 3617815 - RNA, 14 nt, Human
ugcacugaugcugc

SEQ ID NO: 3617816 - RNA, 16 nt, Human
ugcacugaugcugccc

SEQ ID NO: 3617817 - RNA, 21 nt, Human
ugcacugcccauggacaggcu

SEQ ID NO: 3617818 - RNA, 16 nt, Human
ugcacuggccuucuga

SEQ ID NO: 3617819 - RNA, 21 nt, Human
ugcacuggccuucugaugaaa

SEQ ID NO: 3617820 - RNA, 16 nt, Human
ugcacugucaagauga

SEQ ID NO: 3617821 - RNA, 21 nt, Human
ugcacugucacuuugcucugg

SEQ ID NO: 3617822 - RNA, 12 nt, Human
ugcacuguccug

SEQ ID NO: 3617823 - RNA, 17 nt, Human
ugcacuguccugcucca

SEQ ID NO: 3617824 - RNA, 22 nt, Human
ugcacuguccugcuccacagug

SEQ ID NO: 3617825 - RNA, 20 nt, Human
ugcacuguucccccugugca

SEQ ID NO: 3617826 - RNA, 23 nt, Human
ugcacuguucccccugugcagcc

SEQ ID NO: 3617827 - RNA, 14 nt, Human
ugcacuuaaagaag

SEQ ID NO: 3617828 - RNA, 16 nt, Human
ugcacuuaaauaucaa

SEQ ID NO: 3617829 - RNA, 19 nt, Human
ugcacuuaugauuucaugu

SEQ ID NO: 3617830 - RNA, 19 nt, Human
ugcacuuauugaccauuuu

SEQ ID NO: 3617831 - RNA, 14 nt, Human
ugcacuucuuacaa

SEQ ID NO: 3617832 - RNA, 21 nt, Human
ugcacuugcagacucuacaga

SEQ ID NO: 3617833 - RNA, 17 nt, Human
ugcacuuggccucugga

SEQ ID NO: 3617834 - RNA, 17 nt, Human
ugcacuuggggcacagg

SEQ ID NO: 3617835 - RNA, 21 nt, Human
ugcacuuggggcacagggaga

SEQ ID NO: 3617836 - RNA, 21 nt, Human
ugcacuuucagacucucucug

SEQ ID NO: 3617837 - RNA, 20 nt, Human
ugcacuuucuauccucugua

SEQ ID NO: 3617838 - RNA, 12 nt, Human
ugcacuuugcuu

SEQ ID NO: 3617839 - RNA, 17 nt, Human
ugcacuuugcuuuaaua

SEQ ID NO: 3617840 - RNA, 20 nt, Human
ugcacuuugcuuuaauauaa

SEQ ID NO: 3617841 - RNA, 21 nt, Human
ugcacuuugcuuuaauauaaa

SEQ ID NO: 3617842 - RNA, 22 nt, Human
ugcacuuugcuuuaauauaaau

SEQ ID NO: 3617843 - RNA, 13 nt, Human
ugcacuuuguaaa

SEQ ID NO: 3617844 - RNA, 14 nt, Human
ugcacuuuguaaau

SEQ ID NO: 3617845 - RNA, 16 nt, Human
ugcacuuuguaaauuc

SEQ ID NO: 3617846 - RNA, 13 nt, Human
ugcacuuuguagu

SEQ ID NO: 3617847 - RNA, 18 nt, Human
ugcacuuuguaguguuug

SEQ ID NO: 3617848 - RNA, 19 nt, Human
ugcacuuuguucuggcucu

SEQ ID NO: 3617849 - RNA, 13 nt, Human
ugcagaaaacauu

SEQ ID NO: 3617850 - RNA, 18 nt, Human
ugcagaaaagcaccugcc

SEQ ID NO: 3617851 - RNA, 21 nt, Human
ugcagaaaagcaccugccgac

SEQ ID NO: 3617852 - RNA, 17 nt, Human
ugcagaaaauucugugc

SEQ ID NO: 3617853 - RNA, 15 nt, Human
ugcagaaacuacuga

SEQ ID NO: 3617854 - RNA, 17 nt, Human
ugcagaaauagacaaaa

SEQ ID NO: 3617855 - RNA, 22 nt, Human
ugcagaacuugaagccugcucc

SEQ ID NO: 3617856 - RNA, 23 nt, Human
ugcagaacuugaagccugcuccu

SEQ ID NO: 3617857 - RNA, 17 nt, Human
ugcagaagaaggcaucg

SEQ ID NO: 3617858 - RNA, 15 nt, Human
ugcagaagacaguau

SEQ ID NO: 3617859 - RNA, 22 nt, Human
ugcagaagacaguauggcagcu

SEQ ID NO: 3617860 - RNA, 20 nt, Human
ugcagaaggaaaaaugugua

SEQ ID NO: 3617861 - RNA, 21 nt, Human
ugcagaaggaaaaauguguaa

SEQ ID NO: 3617862 - RNA, 22 nt, Human
ugcagaaggaaaaauguguaau

SEQ ID NO: 3617863 - RNA, 23 nt, Human
ugcagaaggaagggcauccuucu

SEQ ID NO: 3617864 - RNA, 13 nt, Human
ugcagaaggccaa

SEQ ID NO: 3617865 - RNA, 15 nt, Human
ugcagaaggccaaga

SEQ ID NO: 3617866 - RNA, 21 nt, Human
ugcagaauacaguaagcugcu

SEQ ID NO: 3617867 - RNA, 17 nt, Human
ugcagaauggcauuugc

SEQ ID NO: 3617868 - RNA, 12 nt, Human
ugcagaauguaa

SEQ ID NO: 3617869 - RNA, 19 nt, Human
ugcagaauguaagugggcc

SEQ ID NO: 3617870 - RNA, 17 nt, Human
ugcagacaaucuucugu

SEQ ID NO: 3617871 - RNA, 19 nt, Human
ugcagacagaagucuccuc

SEQ ID NO: 3617872 - RNA, 22 nt, Human
ugcagacaggcaagcaccuccu

SEQ ID NO: 3617873 - RNA, 14 nt, Human
ugcagacccucaga

SEQ ID NO: 3617874 - RNA, 15 nt, Human
ugcagacccugcccu

SEQ ID NO: 3617875 - RNA, 18 nt, Human
ugcagaccuguccuccug

SEQ ID NO: 3617876 - RNA, 21 nt, Human
ugcagaccuguccuccuggug

SEQ ID NO: 3617877 - RNA, 22 nt, Human
ugcagacuagaauucuagugcu

SEQ ID NO: 3617878 - RNA, 23 nt, Human
ugcagacuagaauucuagugcug

SEQ ID NO: 3617879 - RNA, 20 nt, Human
ugcagacucaguuugucaga

SEQ ID NO: 3617880 - RNA, 16 nt, Human
ugcagacucuacagag

SEQ ID NO: 3617881 - RNA, 22 nt, Human
ugcagacugcuaguguucuguc

SEQ ID NO: 3617882 - RNA, 14 nt, Human
ugcagacuggaggg

SEQ ID NO: 3617883 - RNA, 16 nt, Human
ugcagacuggagggga

SEQ ID NO: 3617884 - RNA, 15 nt, Human
ugcagacuucccagc

SEQ ID NO: 3617885 - RNA, 19 nt, Human
ugcagagaaacuuaagcaa

SEQ ID NO: 3617886 - RNA, 20 nt, Human
ugcagagaaacuuaagcaaa

SEQ ID NO: 3617887 - RNA, 17 nt, Human
ugcagagacaggaccug

SEQ ID NO: 3617888 - RNA, 13 nt, Human
ugcagagagaagc

SEQ ID NO: 3617889 - RNA, 16 nt, Human
ugcagagagccauuuu

SEQ ID NO: 3617890 - RNA, 18 nt, Human
ugcagagcaguaagggaa

SEQ ID NO: 3617891 - RNA, 13 nt, Human
ugcagaggcugug

SEQ ID NO: 3617892 - RNA, 13 nt, Human
ugcagaggggcag

SEQ ID NO: 3617893 - RNA, 15 nt, Human
ugcagaggggcaggc

SEQ ID NO: 3617894 - RNA, 20 nt, Human
ugcagaggggcaggcccugc

SEQ ID NO: 3617895 - RNA, 21 nt, Human
ugcagaggggcaggcccugca

SEQ ID NO: 3617896 - RNA, 20 nt, Human
ugcagaggggcuuucuggag

SEQ ID NO: 3617897 - RNA, 22 nt, Human
ugcagaggggcuuucuggagag

SEQ ID NO: 3617898 - RNA, 15 nt, Human
ugcagagguacccug

SEQ ID NO: 3617899 - RNA, 17 nt, Human
ugcagagguacccuggg

SEQ ID NO: 3617900 - RNA, 15 nt, Human
ugcagaggucagacu

SEQ ID NO: 3617901 - RNA, 15 nt, Human
ugcagaggucugugc

SEQ ID NO: 3617902 - RNA, 17 nt, Human
ugcagaggucugugcug

SEQ ID NO: 3617903 - RNA, 14 nt, Human
ugcagaguauuucu

SEQ ID NO: 3617904 - RNA, 19 nt, Human
ugcagaguucagggaagau

SEQ ID NO: 3617905 - RNA, 19 nt, Human
ugcagauaaacaguaguga

SEQ ID NO: 3617906 - RNA, 17 nt, Human
ugcagauaacuuugacu

SEQ ID NO: 3617907 - RNA, 19 nt, Human
ugcagauacuacugaccag

SEQ ID NO: 3617908 - RNA, 14 nt, Human
ugcagaugacaaaa

SEQ ID NO: 3617909 - RNA, 17 nt, Human
ugcagaugcaauuguuu

SEQ ID NO: 3617910 - RNA, 20 nt, Human
ugcagaugccacccuagcca

SEQ ID NO: 3617911 - RNA, 22 nt, Human
ugcagauggggcucccgcccgu

SEQ ID NO: 3617912 - RNA, 17 nt, Human
ugcagauguuagauauu

SEQ ID NO: 3617913 - RNA, 23 nt, Human
ugcagauugagaccuacaggcug

SEQ ID NO: 3617914 - RNA, 17 nt, Human
ugcagcaaccagagcac

SEQ ID NO: 3617915 - RNA, 18 nt, Human
ugcagcaaccagagcacu

SEQ ID NO: 3617916 - RNA, 20 nt, Human
ugcagcaaccagagcacugu

SEQ ID NO: 3617917 - RNA, 18 nt, Human
ugcagcaaggcccugcug

SEQ ID NO: 3617918 - RNA, 20 nt, Human
ugcagcaaggcccugcugcc

SEQ ID NO: 3617919 - RNA, 20 nt, Human
ugcagcaauaaagcagcguu

SEQ ID NO: 3617920 - RNA, 12 nt, Human
ugcagcaccucc

SEQ ID NO: 3617921 - RNA, 14 nt, Human
ugcagcaccuccag

SEQ ID NO: 3617922 - RNA, 20 nt, Human
ugcagcaccuccaggccugu

SEQ ID NO: 3617923 - RNA, 20 nt, Human
ugcagcacucacacaggacc

SEQ ID NO: 3617924 - RNA, 13 nt, Human
ugcagcagaggca

SEQ ID NO: 3617925 - RNA, 14 nt, Human
ugcagcagaggcac

SEQ ID NO: 3617926 - RNA, 16 nt, Human
ugcagcagaggcacug

SEQ ID NO: 3617927 - RNA, 20 nt, Human
ugcagcagcgguggccucuu

SEQ ID NO: 3617928 - RNA, 20 nt, Human
ugcagcagcuugcugcaccc

SEQ ID NO: 3617929 - RNA, 13 nt, Human
ugcagcaggagug

SEQ ID NO: 3617930 - RNA, 14 nt, Human
ugcagcaggagugg

SEQ ID NO: 3617931 - RNA, 20 nt, Human
ugcagcaggaguggugcaga

SEQ ID NO: 3617932 - RNA, 17 nt, Human
ugcagcauaugaggaug

SEQ ID NO: 3617933 - RNA, 17 nt, Human
ugcagcaugaccuguga

SEQ ID NO: 3617934 - RNA, 18 nt, Human
ugcagcauggucccugcc

SEQ ID NO: 3617935 - RNA, 19 nt, Human
ugcagcauggucccugccu

SEQ ID NO: 3617936 - RNA, 17 nt, Human
ugcagcauguugcugag

SEQ ID NO: 3617937 - RNA, 21 nt, Human
ugcagcauguugcugaggagu

SEQ ID NO: 3617938 - RNA, 17 nt, Human
ugcagccacuuaggaca

SEQ ID NO: 3617939 - RNA, 21 nt, Human
ugcagccagaccuauuccucc

SEQ ID NO: 3617940 - RNA, 19 nt, Human
ugcagccagcccagcccag

SEQ ID NO: 3617941 - RNA, 14 nt, Human
ugcagcccauuucu

SEQ ID NO: 3617942 - RNA, 15 nt, Human
ugcagcccauuucuc

SEQ ID NO: 3617943 - RNA, 18 nt, Human
ugcagcccauuucuccag

SEQ ID NO: 3617944 - RNA, 22 nt, Human
ugcagcccauuucuccagaacc

SEQ ID NO: 3617945 - RNA, 16 nt, Human
ugcauuaaaagaaaau

SEQ ID NO: 3617946 - RNA, 13 nt, Human
ugcauuaaaccug

SEQ ID NO: 3617947 - RNA, 14 nt, Human
ugcauuaaaccugu

SEQ ID NO: 3617948 - RNA, 16 nt, Human
ugcauuaaaccugucu

SEQ ID NO: 3617949 - RNA, 13 nt, Human
ugcauuaaauuca

SEQ ID NO: 3617950 - RNA, 11 nt, Human
ugcauuacaga

SEQ ID NO: 3617951 - RNA, 14 nt, Human
ugcauuacauuccu

SEQ ID NO: 3617952 - RNA, 15 nt, Human
ugcauuacugcaugc

SEQ ID NO: 3617953 - RNA, 17 nt, Human
ugcauuacugcaugcac

SEQ ID NO: 3617954 - RNA, 13 nt, Human
ugcauuagaaauu

SEQ ID NO: 3617955 - RNA, 14 nt, Human
ugcauuagcacaga

SEQ ID NO: 3617956 - RNA, 19 nt, Human
ugcauuagcacagauuuua

SEQ ID NO: 3617957 - RNA, 17 nt, Human
ugcauuaucuagauacu

SEQ ID NO: 3617958 - RNA, 18 nt, Human
ugcauuaucuagauacug

SEQ ID NO: 3617959 - RNA, 18 nt, Human
ugcauuaugcaauuuuua

SEQ ID NO: 3617960 - RNA, 15 nt, Human
ugcauuauuaaauug

SEQ ID NO: 3617961 - RNA, 18 nt, Human
ugcauuauuaaauuguaa

SEQ ID NO: 3617962 - RNA, 23 nt, Human
ugcauuauuugagaagcugcuca

SEQ ID NO: 3617963 - RNA, 23 nt, Human
ugcauucacauuuagaaaaguga

SEQ ID NO: 3617964 - RNA, 14 nt, Human
ugcauucauuuuua

SEQ ID NO: 3617965 - RNA, 15 nt, Human
ugcauucauuuuuau

SEQ ID NO: 3617966 - RNA, 18 nt, Human
ugcauucguuguguuuuu

SEQ ID NO: 3617967 - RNA, 15 nt, Human
ugcauucuauugccu

SEQ ID NO: 3617968 - RNA, 16 nt, Human
ugcauucuucugagca

SEQ ID NO: 3617969 - RNA, 21 nt, Human
ugcauucuuuuaaaagacaag

SEQ ID NO: 3617970 - RNA, 17 nt, Human
ugcauugaaaagagcug

SEQ ID NO: 3617971 - RNA, 20 nt, Human
ugcauugaaaagagcugaag

SEQ ID NO: 3617972 - RNA, 21 nt, Human
ugcauugaacacaaacuguaa

SEQ ID NO: 3617973 - RNA, 22 nt, Human
ugcauugaacacaaacuguaaa

SEQ ID NO: 3617974 - RNA, 17 nt, Human
ugcauugacuuucccca

SEQ ID NO: 3617975 - RNA, 22 nt, Human
ugcauugacuuuccccaccaga

SEQ ID NO: 3617976 - RNA, 15 nt, Human
ugcauugagaacugc

SEQ ID NO: 3617977 - RNA, 17 nt, Human
ugcauugauauugugaa

SEQ ID NO: 3617978 - RNA, 22 nt, Human
ugcauugauauugugaacauuu

SEQ ID NO: 3617979 - RNA, 17 nt, Human
ugcauugauucaguauu

SEQ ID NO: 3617980 - RNA, 23 nt, Human
ugcauugccugcggucaaggcca

SEQ ID NO: 3617981 - RNA, 16 nt, Human
ugcauugcuagauaaa

SEQ ID NO: 3617982 - RNA, 17 nt, Human
ugcauugcuagauaaaa

SEQ ID NO: 3617983 - RNA, 18 nt, Human
ugcauuggauaacaccac

SEQ ID NO: 3617984 - RNA, 22 nt, Human
ugcauuggauaacaccaccauu

SEQ ID NO: 3617985 - RNA, 17 nt, Human
ugcauugggugaucauu

SEQ ID NO: 3617986 - RNA, 18 nt, Human
ugcauuguaucgauguua

SEQ ID NO: 3617987 - RNA, 12 nt, Human
ugcauugucugu

SEQ ID NO: 3617988 - RNA, 13 nt, Human
ugcauugugcuuc

SEQ ID NO: 3617989 - RNA, 14 nt, Human
ugcauuguuucugu

SEQ ID NO: 3617990 - RNA, 15 nt, Human
ugcauuuaaaacaga

SEQ ID NO: 3617991 - RNA, 18 nt, Human
ugcauuuaccggcagugc

SEQ ID NO: 3617992 - RNA, 14 nt, Human
ugcauuuagcacaa

SEQ ID NO: 3617993 - RNA, 14 nt, Human
ugcauuuauaugua

SEQ ID NO: 3617994 - RNA, 16 nt, Human
ugcauuuauauguacc

SEQ ID NO: 3617995 - RNA, 19 nt, Human
ugcauuuaugagcucuuca

SEQ ID NO: 3617996 - RNA, 14 nt, Human
ugcauuuccugaca

SEQ ID NO: 3617997 - RNA, 13 nt, Human
ugcauuuggaaca

SEQ ID NO: 3617998 - RNA, 17 nt, Human
ugcauuuggguccagga

SEQ ID NO: 3617999 - RNA, 20 nt, Human
ugcauuuggguccaggagga

SEQ ID NO: 3618000 - RNA, 18 nt, Human
ugcauuuguaaaugcugu

SEQ ID NO: 3618001 - RNA, 16 nt, Human
ugcauuugucuauucu

SEQ ID NO: 3618002 - RNA, 20 nt, Human
ugcauuugucuauucuccag

SEQ ID NO: 3618003 - RNA, 20 nt, Human
ugcauuuguuuauguaauuu

SEQ ID NO: 3618004 - RNA, 21 nt, Human
ugcauuuguuuauguaauuuc

SEQ ID NO: 3618005 - RNA, 22 nt, Human
ugcauuuguuuauguaauuuca

SEQ ID NO: 3618006 - RNA, 22 nt, Human
ugcauuuucugaaacuaaugaa

SEQ ID NO: 3618007 - RNA, 23 nt, Human
ugcauuuuggagaguuuccugaa

SEQ ID NO: 3618008 - RNA, 22 nt, Human
ugcauuuuguuugguauuguau

SEQ ID NO: 3618009 - RNA, 23 nt, Human
ugcauuuuguuugguauuguauu

SEQ ID NO: 3618010 - RNA, 15 nt, Human
ugcauuuuucugcag

SEQ ID NO: 3618011 - RNA, 11 nt, Human
ugcauuuuugu

SEQ ID NO: 3618012 - RNA, 15 nt, Human
ugcauuuuuguaaau

SEQ ID NO: 3618013 - RNA, 22 nt, Human
ugcauuuuuguaaauguguaca

SEQ ID NO: 3618014 - RNA, 19 nt, Human
ugcauuuuuuaaaacaaga

SEQ ID NO: 3618015 - RNA, 16 nt, Human
ugccaaaaaaaaauac

SEQ ID NO: 3618016 - RNA, 16 nt, Human
ugccaaaaagugaaau

SEQ ID NO: 3618017 - RNA, 17 nt, Human
ugccaaaaagugaaaua

SEQ ID NO: 3618018 - RNA, 18 nt, Human
ugccaaaaagugaaauaa

SEQ ID NO: 3618019 - RNA, 19 nt, Human
ugccaaaaagugaaauaau

SEQ ID NO: 3618020 - RNA, 13 nt, Human
ugccaaaauaaug

SEQ ID NO: 3618021 - RNA, 14 nt, Human
ugccaaaauaaugu

SEQ ID NO: 3618022 - RNA, 22 nt, Human
ugccaaaauaaugucuuguuaa

SEQ ID NO: 3618023 - RNA, 17 nt, Human
ugccaaaaugcucuagu

SEQ ID NO: 3618024 - RNA, 18 nt, Human
ugccaaaaugcucuagug

SEQ ID NO: 3618025 - RNA, 17 nt, Human
ugccaaacaaaaagguu

SEQ ID NO: 3618026 - RNA, 23 nt, Human
ugccaaacaaaaagguucucagg

SEQ ID NO: 3618027 - RNA, 12 nt, Human
ugccaaacauua

SEQ ID NO: 3618028 - RNA, 19 nt, Human
ugccaaacauuaauguuga

SEQ ID NO: 3618029 - RNA, 21 nt, Human
ugccaaagaucacuuguuguu

SEQ ID NO: 3618030 - RNA, 20 nt, Human
ugccaaagcuaggguggccc

SEQ ID NO: 3618031 - RNA, 16 nt, Human
ugccaaauauguccug

SEQ ID NO: 3618032 - RNA, 14 nt, Human
ugccaaaucuggcu

SEQ ID NO: 3618033 - RNA, 18 nt, Human
ugccaaauuguaguucuu

SEQ ID NO: 3618034 - RNA, 21 nt, Human
ugccaacaauccuagugcuuu

SEQ ID NO: 3618035 - RNA, 18 nt, Human
ugccaacaccacagaaau

SEQ ID NO: 3618036 - RNA, 21 nt, Human
ugccaacacucaagaagcagg

SEQ ID NO: 3618037 - RNA, 22 nt, Human
ugccaacacucaagaagcaggc

SEQ ID NO: 3618038 - RNA, 21 nt, Human
ugccaacaguguuaggccugg

SEQ ID NO: 3618039 - RNA, 22 nt, Human
ugccaacauugccuauuucagu

SEQ ID NO: 3618040 - RNA, 22 nt, Human
ugccaaccauaccuuccuuccc

SEQ ID NO: 3618041 - RNA, 12 nt, Human
ugccaaccuaaa

SEQ ID NO: 3618042 - RNA, 18 nt, Human
ugccaaccuaaaacucuu

SEQ ID NO: 3618043 - RNA, 21 nt, Human
ugccaaccuguaauaaauaug

SEQ ID NO: 3618044 - RNA, 23 nt, Human
ugccaaccuguaauaaauaugag

SEQ ID NO: 3618045 - RNA, 15 nt, Human
ugccaacuguggcug

SEQ ID NO: 3618046 - RNA, 22 nt, Human
ugccaacuguucagcuguccuc

SEQ ID NO: 3618047 - RNA, 21 nt, Human
ugccaacuucuucagagcuga

SEQ ID NO: 3618048 - RNA, 13 nt, Human
ugccaagacaaau

SEQ ID NO: 3618049 - RNA, 16 nt, Human
ugccaagacaaaucaa

SEQ ID NO: 3618050 - RNA, 22 nt, Human
ugccaagacaaaucaacagaag

SEQ ID NO: 3618051 - RNA, 23 nt, Human
ugccaagacugcuguggccagga

SEQ ID NO: 3618052 - RNA, 23 nt, Human
ugccaagagcccgucugcuccug

SEQ ID NO: 3618053 - RNA, 17 nt, Human
ugccaagagugaaggga

SEQ ID NO: 3618054 - RNA, 15 nt, Human
ugccaagcacagugc

SEQ ID NO: 3618055 - RNA, 17 nt, Human
ugccaagcacugugcuc

SEQ ID NO: 3618056 - RNA, 22 nt, Human
ugccaagcauuuaauguagcca

SEQ ID NO: 3618057 - RNA, 15 nt, Human
ugccaagcucaggac

SEQ ID NO: 3618058 - RNA, 18 nt, Human
ugccaagcucaggaccag

SEQ ID NO: 3618059 - RNA, 23 nt, Human
ugccaagcuccaagccccaucuu

SEQ ID NO: 3618060 - RNA, 16 nt, Human
ugccaaggcagaggcc

SEQ ID NO: 3618061 - RNA, 20 nt, Human
ugccaaggccagaguggccu

SEQ ID NO: 3618062 - RNA, 21 nt, Human
ugccaagggcauaaauuauug

SEQ ID NO: 3618063 - RNA, 15 nt, Human
ugccaaguuguuuga

SEQ ID NO: 3618064 - RNA, 13 nt, Human
ugccaaguuuguu

SEQ ID NO: 3618065 - RNA, 21 nt, Human
ugccaauaauaauaccucccu

SEQ ID NO: 3618066 - RNA, 18 nt, Human
ugccaauacuagucaccc

SEQ ID NO: 3618067 - RNA, 16 nt, Human
ugccaauauccuaaua

SEQ ID NO: 3618068 - RNA, 18 nt, Human
ugccaauauccuaauaaa

SEQ ID NO: 3618069 - RNA, 19 nt, Human
ugccaauauguauuguaaa

SEQ ID NO: 3618070 - RNA, 19 nt, Human
ugccaauauuaaaucugcu

SEQ ID NO: 3618071 - RNA, 14 nt, Human
ugccaaucaauagc

SEQ ID NO: 3618072 - RNA, 13 nt, Human
ugccaauuucaag

SEQ ID NO: 3618073 - RNA, 17 nt, Human
ugccaauuugcacauua

SEQ ID NO: 3618074 - RNA, 17 nt, Human
ugccaauuuuugccuuc

SEQ ID NO: 3618075 - RNA, 19 nt, Human
ugccacaacgccuggcuaa

SEQ ID NO: 3618076 - RNA, 18 nt, Human
ugccacaaggaagaaauu

SEQ ID NO: 3618077 - RNA, 22 nt, Human
ugccacacaaggauagaugcug

SEQ ID NO: 3618078 - RNA, 20 nt, Human
ugccacacagaguggucuuu

SEQ ID NO: 3618079 - RNA, 21 nt, Human
ugccacaccaagcugugccac

SEQ ID NO: 3618080 - RNA, 23 nt, Human
ugccacaccaagcugugccaccc

SEQ ID NO: 3618081 - RNA, 19 nt, Human
ugccacacgagaaccugaa

SEQ ID NO: 3618082 - RNA, 12 nt, Human
ugccacagcccu

SEQ ID NO: 3618083 - RNA, 14 nt, Human
ugccacagcccugu

SEQ ID NO: 3618084 - RNA, 16 nt, Human
ugccacagcccuguca

SEQ ID NO: 3618085 - RNA, 21 nt, Human
ugccacagcccugucagcaug

SEQ ID NO: 3618086 - RNA, 11 nt, Human
ugccacagcuu

SEQ ID NO: 3618087 - RNA, 16 nt, Human
ugccacagcuuuugca

SEQ ID NO: 3618088 - RNA, 14 nt, Human
ugccacaggacaca

SEQ ID NO: 3618089 - RNA, 18 nt, Human
ugccacaggacacaguca

SEQ ID NO: 3618090 - RNA, 20 nt, Human
ugccacaggacacagucaga

SEQ ID NO: 3618091 - RNA, 11 nt, Human
ugccacaggcc

SEQ ID NO: 3618092 - RNA, 15 nt, Human
ugccacaggccuccc

SEQ ID NO: 3618093 - RNA, 18 nt, Human
ugccacaggccucccugu

SEQ ID NO: 3618094 - RNA, 13 nt, Human
ugcugcugucccu

SEQ ID NO: 3618095 - RNA, 14 nt, Human
ugcugcuucaauuu

SEQ ID NO: 3618096 - RNA, 15 nt, Human
ugcugcuucauguuu

SEQ ID NO: 3618097 - RNA, 18 nt, Human
ugcugcuucucccaggca

SEQ ID NO: 3618098 - RNA, 12 nt, Human
ugcugcuugagg

SEQ ID NO: 3618099 - RNA, 19 nt, Human
ugcugcuugaggcaacuca

SEQ ID NO: 3618100 - RNA, 15 nt, Human
ugcugcuuuccccug

SEQ ID NO: 3618101 - RNA, 20 nt, Human
ugcugcuuuuugagguggca

SEQ ID NO: 3618102 - RNA, 18 nt, Human
ugcuggaaaauaauacug

SEQ ID NO: 3618103 - RNA, 22 nt, Human
ugcuggaagacgcaagggccug

SEQ ID NO: 3618104 - RNA, 17 nt, Human
ugcuggaauaaguucaa

SEQ ID NO: 3618105 - RNA, 16 nt, Human
ugcuggacaggucugg

SEQ ID NO: 3618106 - RNA, 16 nt, Human
ugcuggacaguaucac

SEQ ID NO: 3618107 - RNA, 21 nt, Human
ugcuggacuggaggccccugg

SEQ ID NO: 3618108 - RNA, 15 nt, Human
ugcuggacugucaua

SEQ ID NO: 3618109 - RNA, 13 nt, Human
ugcuggagacucc

SEQ ID NO: 3618110 - RNA, 13 nt, Human
ugcuggagagguu

SEQ ID NO: 3618111 - RNA, 14 nt, Human
ugcuggagauguuu

SEQ ID NO: 3618112 - RNA, 18 nt, Human
ugcuggagcacugggcuc

SEQ ID NO: 3618113 - RNA, 10 nt, Human
ugcuggagcc

SEQ ID NO: 3618114 - RNA, 18 nt, Human
ugcuggagccacuaacua

SEQ ID NO: 3618115 - RNA, 15 nt, Human
ugcuggagccugugu

SEQ ID NO: 3618116 - RNA, 16 nt, Human
ugcuggagccugugua

SEQ ID NO: 3618117 - RNA, 17 nt, Human
ugcuggagccuguguaa

SEQ ID NO: 3618118 - RNA, 22 nt, Human
ugcuggagccuguguaacagcu

SEQ ID NO: 3618119 - RNA, 13 nt, Human
ugcuggagcggcu

SEQ ID NO: 3618120 - RNA, 14 nt, Human
ugcuggagcucugc

SEQ ID NO: 3618121 - RNA, 21 nt, Human
ugcuggaggugacaucucuua

SEQ ID NO: 3618122 - RNA, 17 nt, Human
ugcuggauaaaaugagg

SEQ ID NO: 3618123 - RNA, 22 nt, Human
ugcuggaucacagcugcuuucu

SEQ ID NO: 3618124 - RNA, 23 nt, Human
ugcuggaucacagcugcuuucug

SEQ ID NO: 3618125 - RNA, 17 nt, Human
ugcuggauggagcccag

SEQ ID NO: 3618126 - RNA, 22 nt, Human
ugcuggaugucugccaauuuuu

SEQ ID NO: 3618127 - RNA, 18 nt, Human
ugcuggcaucaagaggug

SEQ ID NO: 3618128 - RNA, 16 nt, Human
ugcuggccagccuggg

SEQ ID NO: 3618129 - RNA, 17 nt, Human
ugcuggccagccugggg

SEQ ID NO: 3618130 - RNA, 21 nt, Human
ugcuggccagccuggggccug

SEQ ID NO: 3618131 - RNA, 12 nt, Human
ugcuggcccagg

SEQ ID NO: 3618132 - RNA, 13 nt, Human
ugcuggcccaggg

SEQ ID NO: 3618133 - RNA, 16 nt, Human
ugcuggcccagggccc

SEQ ID NO: 3618134 - RNA, 23 nt, Human
ugcuggcccagggcccagagccc

SEQ ID NO: 3618135 - RNA, 18 nt, Human
ugcuggccccagcccugc

SEQ ID NO: 3618136 - RNA, 22 nt, Human
ugcuggccccagcccugcuggg

SEQ ID NO: 3618137 - RNA, 24 nt, Human
ugcuggccccucaccugggcaccu

SEQ ID NO: 3618138 - RNA, 16 nt, Human
ugcuggccggacaccc

SEQ ID NO: 3618139 - RNA, 17 nt, Human
ugcuggccgggcacagc

SEQ ID NO: 3618140 - RNA, 15 nt, Human
ugcuggccuggaucu

SEQ ID NO: 3618141 - RNA, 13 nt, Human
ugcuggccuggcc

SEQ ID NO: 3618142 - RNA, 23 nt, Human
ugcuggcgagugaaugccagugu

SEQ ID NO: 3618143 - RNA, 13 nt, Human
ugcuggcugccuu

SEQ ID NO: 3618144 - RNA, 21 nt, Human
ugcuggcugccuuagaaccuu

SEQ ID NO: 3618145 - RNA, 16 nt, Human
ugcuggcuggaaggga

SEQ ID NO: 3618146 - RNA, 16 nt, Human
ugcuggcugguuagag

SEQ ID NO: 3618147 - RNA, 16 nt, Human
ugcugggacucagccu

SEQ ID NO: 3618148 - RNA, 17 nt, Human
ugcugggacugagccag

SEQ ID NO: 3618149 - RNA, 16 nt, Human
ugcugggagaggcagc

SEQ ID NO: 3618150 - RNA, 15 nt, Human
ugcugggagcuccac

SEQ ID NO: 3618151 - RNA, 22 nt, Human
ugcugggagcuccacucugcuu

SEQ ID NO: 3618152 - RNA, 14 nt, Human
ugcugggagcugaa

SEQ ID NO: 3618153 - RNA, 23 nt, Human
ugcugggauggugggcuucaggg

SEQ ID NO: 3618154 - RNA, 21 nt, Human
ugcugggauuacaagcgugag

SEQ ID NO: 3618155 - RNA, 16 nt, Human
ugcugggauuacagac

SEQ ID NO: 3618156 - RNA, 17 nt, Human
ugcugggauuacaggug

SEQ ID NO: 3618157 - RNA, 14 nt, Human
ugcugggauuucca

SEQ ID NO: 3618158 - RNA, 12 nt, Human
ugcugggcagcc

SEQ ID NO: 3618159 - RNA, 15 nt, Human
ugcugggcagcccgc

SEQ ID NO: 3618160 - RNA, 19 nt, Human
ugcugggccccugccucuc

SEQ ID NO: 3618161 - RNA, 18 nt, Human
ugcugggcggcugugcuu

SEQ ID NO: 3618162 - RNA, 12 nt, Human
ugcugggcucag

SEQ ID NO: 3618163 - RNA, 14 nt, Human
ugcugggcucucca

SEQ ID NO: 3618164 - RNA, 15 nt, Human
ugcugggcucuccac

SEQ ID NO: 3618165 - RNA, 20 nt, Human
ugcugggcucuccaccucag

SEQ ID NO: 3618166 - RNA, 19 nt, Human
ugcugggcugacggugcag

SEQ ID NO: 3618167 - RNA, 13 nt, Human
ugcugggcugggg

SEQ ID NO: 3618168 - RNA, 14 nt, Human
ugcugggcugggug

SEQ ID NO: 3618169 - RNA, 15 nt, Human
ugcugggcugggugc

SEQ ID NO: 3618170 - RNA, 17 nt, Human
ugcugggcuugucugua

SEQ ID NO: 3618171 - RNA, 23 nt, Human
ugcuggggacggggggccccagu

SEQ ID NO: 3618172 - RNA, 18 nt, Human
ugcuggggcaagucccug

SEQ ID NO: 3618173 - RNA, 18 nt, Human
ugcuggggccucagacga

SEQ ID NO: 3618174 - RNA, 17 nt, Human
ugcuggggccugggaca

SEQ ID NO: 3618175 - RNA, 23 nt, Human
ugcuggggccugggacaacugcu

SEQ ID NO: 3618176 - RNA, 15 nt, Human
ugcugggggaaugag

SEQ ID NO: 3618177 - RNA, 23 nt, Human
ugcugggggaaugagcccagaga

SEQ ID NO: 3618178 - RNA, 15 nt, Human
ugcugggggcaacug

SEQ ID NO: 3618179 - RNA, 16 nt, Human
ugcuggguuggugcac

SEQ ID NO: 3618180 - RNA, 18 nt, Human
ugcuggguuggugcacag

SEQ ID NO: 3618181 - RNA, 14 nt, Human
ugcugguaaaauga

SEQ ID NO: 3618182 - RNA, 19 nt, Human
ugcugguaaaaugaagaau

SEQ ID NO: 3618183 - RNA, 19 nt, Human
ugcuggucacagccuccuc

SEQ ID NO: 3618184 - RNA, 22 nt, Human
ugcuggugggcuugucauagcc

SEQ ID NO: 3618185 - RNA, 22 nt, Human
ugcugguguaugugugaaguga

SEQ ID NO: 3618186 - RNA, 17 nt, Human
ugcugguguccugacca

SEQ ID NO: 3618187 - RNA, 16 nt, Human
ugcugguuuuaacaac

SEQ ID NO: 3618188 - RNA, 20 nt, Human
ugcugguuuuaucugaguga

SEQ ID NO: 3618189 - RNA, 15 nt, Human
ugcugguuuuccuaa

SEQ ID NO: 3618190 - RNA, 20 nt, Human
ugcuguaaauaaaugcuuua

SEQ ID NO: 3618191 - RNA, 22 nt, Human
ugcuguaagaugucuguuugcu

SEQ ID NO: 3618192 - RNA, 22 nt, Human
ugcuguacauacuuuuuggguu

SEQ ID NO: 3618193 - RNA, 16 nt, Human
ugcuguacaucuauuu

SEQ ID NO: 3618194 - RNA, 16 nt, Human
ugcuguagaugacaac

SEQ ID NO: 3618195 - RNA, 14 nt, Human
ugcuguauaaaauc

SEQ ID NO: 3618196 - RNA, 16 nt, Human
ugcuguauaaaaucag

SEQ ID NO: 3618197 - RNA, 22 nt, Human
ugcuguauauggaauucuuuua

SEQ ID NO: 3618198 - RNA, 23 nt, Human
ugcuguauccauccauggggcug

SEQ ID NO: 3618199 - RNA, 13 nt, Human
ugcuguauuuuaa

SEQ ID NO: 3618200 - RNA, 22 nt, Human
ugcuguauuuuaaaagaaugau

SEQ ID NO: 3618201 - RNA, 20 nt, Human
ugcugucaaguuccuuuggg

SEQ ID NO: 3618202 - RNA, 18 nt, Human
ugcugucagucuugaccu

SEQ ID NO: 3618203 - RNA, 14 nt, Human
ugcugucauugcuu

SEQ ID NO: 3618204 - RNA, 20 nt, Human
ugcugucauugcuucuucug

SEQ ID NO: 3618205 - RNA, 21 nt, Human
ugcugucauugcuucuucuga

SEQ ID NO: 3618206 - RNA, 13 nt, Human
ugcuguccccucu

SEQ ID NO: 3618207 - RNA, 15 nt, Human
ugcuguccccucuug

SEQ ID NO: 3618208 - RNA, 17 nt, Human
ugcugucccuuacguga

SEQ ID NO: 3618209 - RNA, 17 nt, Human
ugcugucccuuuuccuu

SEQ ID NO: 3618210 - RNA, 14 nt, Human
ugcuguccucaggu

SEQ ID NO: 3618211 - RNA, 14 nt, Human
ugcuguccugaucu

SEQ ID NO: 3618212 - RNA, 14 nt, Human
ugcuguccuugaau

SEQ ID NO: 3618213 - RNA, 18 nt, Human
ugcugucuaaccugugac

SEQ ID NO: 3618214 - RNA, 19 nt, Human
ugcugucucugcucgcccu

SEQ ID NO: 3618215 - RNA, 19 nt, Human
ugcugucugaucugugcuu

SEQ ID NO: 3618216 - RNA, 13 nt, Human
ugcugucugcagc

SEQ ID NO: 3618217 - RNA, 15 nt, Human
ugcugucuggcacag

SEQ ID NO: 3618218 - RNA, 19 nt, Human
ugcugucuggcacagccug

SEQ ID NO: 3618219 - RNA, 18 nt, Human
ugcugucuggguggcuca

SEQ ID NO: 3618220 - RNA, 14 nt, Human
ugcugucuuuucuu

SEQ ID NO: 3618221 - RNA, 22 nt, Human
ugcugucuuuucuuugccaucu

SEQ ID NO: 3618222 - RNA, 13 nt, Human
ugcugugaaaaaa

SEQ ID NO: 3618223 - RNA, 18 nt, Human
ugcugugaacaagugaac

SEQ ID NO: 3618224 - RNA, 18 nt, Human
ugcugugaauuagcucac

SEQ ID NO: 3618225 - RNA, 19 nt, Human
ugcugugaauuagcucacu

SEQ ID NO: 3618226 - RNA, 16 nt, Human
ugcugugaggcugucc

SEQ ID NO: 3618227 - RNA, 20 nt, Human
ugcugugauacgaugcuuca

SEQ ID NO: 3618228 - RNA, 22 nt, Human
ugcugugauacgaugcuucaag

SEQ ID NO: 3618229 - RNA, 13 nt, Human
ugcugugcaaaug

SEQ ID NO: 3618230 - RNA, 15 nt, Human
ugcugugccccuggc

SEQ ID NO: 3618231 - RNA, 17 nt, Human
ugcugugcgcccagggc

SEQ ID NO: 3618232 - RNA, 15 nt, Human
ugcugugcugugcua

SEQ ID NO: 3618233 - RNA, 18 nt, Human
ugcugugcugugcuaugg

SEQ ID NO: 3618234 - RNA, 13 nt, Human
ugcuguggaagca

SEQ ID NO: 3618235 - RNA, 14 nt, Human
ugcuguggccagga

SEQ ID NO: 3618236 - RNA, 16 nt, Human
ugcuguggccaggagg

SEQ ID NO: 3618237 - RNA, 12 nt, Human
ugcuguggccug

SEQ ID NO: 3618238 - RNA, 14 nt, Human
ugcuguggccuggg

SEQ ID NO: 3618239 - RNA, 14 nt, Human
ugcugugggaacga

SEQ ID NO: 3618240 - RNA, 16 nt, Human
ugcuguggggcuggua

SEQ ID NO: 3618241 - RNA, 18 nt, Human
ugcuguggggcugguagc

SEQ ID NO: 3618242 - RNA, 23 nt, Human
ugcuguggggcugguagcucagg

SEQ ID NO: 3618243 - RNA, 21 nt, Human
ugcugugggugauauggacag

SEQ ID NO: 3618244 - RNA, 16 nt, Human
ugcugugguguguccc

SEQ ID NO: 3618245 - RNA, 23 nt, Human
ugcuguggugugucccccucugu

SEQ ID NO: 3618246 - RNA, 17 nt, Human
ugcugugguuccugggg

SEQ ID NO: 3618247 - RNA, 12 nt, Human
ugcuguguaaaa

SEQ ID NO: 3618248 - RNA, 17 nt, Human
ugcuguguaaaguuagu

SEQ ID NO: 3618249 - RNA, 16 nt, Human
ugcuguguaacacugu

SEQ ID NO: 3618250 - RNA, 18 nt, Human
ugcuguguccaacuccag

SEQ ID NO: 3618251 - RNA, 13 nt, Human
ugcugugugccuu

SEQ ID NO: 3618252 - RNA, 21 nt, Human
ugcugugugcuuuuuuugugu

SEQ ID NO: 3618253 - RNA, 11 nt, Human
ugcuguguggu

SEQ ID NO: 3618254 - RNA, 21 nt, Human
ugcugugugucccaggcaggg

SEQ ID NO: 3618255 - RNA, 21 nt, Human
ugcuguguguugccugggaca

SEQ ID NO: 3618256 - RNA, 16 nt, Human
ugcuguguuuaauuug

SEQ ID NO: 3618257 - RNA, 17 nt, Human
ugcuguuacaguuuucu

SEQ ID NO: 3618258 - RNA, 14 nt, Human
ugcuguuacuguua

SEQ ID NO: 3618259 - RNA, 20 nt, Human
ugcuguuacuguuaaccauu

SEQ ID NO: 3618260 - RNA, 20 nt, Human
ugcuguuaugucuguuuaag

SEQ ID NO: 3618261 - RNA, 15 nt, Human
ugcuguuccuuacuu

SEQ ID NO: 3618262 - RNA, 18 nt, Human
ugcuguugacauauuuaa

SEQ ID NO: 3618263 - RNA, 21 nt, Human
ugcuguugacauauuuaaugu

SEQ ID NO: 3618264 - RNA, 17 nt, Human
ugcuguugauguuuugu

SEQ ID NO: 3618265 - RNA, 16 nt, Human
ugcuguugauugcuaa

SEQ ID NO: 3618266 - RNA, 22 nt, Human
ugcuguugauugcuaaauguaa

SEQ ID NO: 3618267 - RNA, 13 nt, Human
ugcuguugcuuga

SEQ ID NO: 3618268 - RNA, 18 nt, Human
ugcuguugcuugaauagc

SEQ ID NO: 3618269 - RNA, 14 nt, Human
ugcuguuggucaug

SEQ ID NO: 3618270 - RNA, 18 nt, Human
ugcuguuguccaacuauu

SEQ ID NO: 3618271 - RNA, 19 nt, Human
ugcuguuguuaugaugugc

SEQ ID NO: 3618272 - RNA, 22 nt, Human
ugcuguuguuaugaugugcuua

SEQ ID NO: 3618273 - RNA, 13 nt, Human
ugcuguuguuucu

SEQ ID NO: 3618274 - RNA, 14 nt, Human
ugcuguuuauuaau

SEQ ID NO: 3618275 - RNA, 17 nt, Human
ugcuguuuauuaaucuu

SEQ ID NO: 3618276 - RNA, 16 nt, Human
ugcuguuucaaaguuc

SEQ ID NO: 3618277 - RNA, 13 nt, Human
ugcuguuucacaa

SEQ ID NO: 3618278 - RNA, 23 nt, Human
ugcuguuucccggggaggaaaca

SEQ ID NO: 3618279 - RNA, 17 nt, Human
ugcuguuugacaccucu

SEQ ID NO: 3618280 - RNA, 15 nt, Human
ugcuguuuuccuccc

SEQ ID NO: 3618281 - RNA, 21 nt, Human
ugcuguuuuccucccuucugc

SEQ ID NO: 3618282 - RNA, 22 nt, Human
ugcuguuuugccagcccauuug

SEQ ID NO: 3618283 - RNA, 16 nt, Human
ugcuguuuuguuauau

SEQ ID NO: 3618284 - RNA, 16 nt, Human
ugcuguuuuguucugu

SEQ ID NO: 3618285 - RNA, 20 nt, Human
ugcuuaaagaauucaaauuu

SEQ ID NO: 3618286 - RNA, 12 nt, Human
ugcuuaaaugug

SEQ ID NO: 3618287 - RNA, 13 nt, Human
ugcuuaaauguga

SEQ ID NO: 3618288 - RNA, 17 nt, Human
ugcuuaaaugugaauua

SEQ ID NO: 3618289 - RNA, 15 nt, Human
ugcuuaaauuucuua

SEQ ID NO: 3618290 - RNA, 13 nt, Human
ugcuuaaauuuua

SEQ ID NO: 3618291 - RNA, 20 nt, Human
ugcuuaaccuuuuuauuuca

SEQ ID NO: 3618292 - RNA, 18 nt, Human
ugcuuaacuucacauauu

SEQ ID NO: 3618293 - RNA, 16 nt, Human
ugcuuaagcagaagca

SEQ ID NO: 3618294 - RNA, 18 nt, Human
ugcuuaagggaguuuaau

SEQ ID NO: 3618295 - RNA, 16 nt, Human
ugcuuaaguuccagca

SEQ ID NO: 3618296 - RNA, 14 nt, Human
ugcuuaaucuucaa

SEQ ID NO: 3618297 - RNA, 15 nt, Human
ugcuuaaucuucaaa

SEQ ID NO: 3618298 - RNA, 20 nt, Human
ugcuuaaucuucaaagccuu

SEQ ID NO: 3618299 - RNA, 20 nt, Human
ugcuuaauuacaauauuucu

SEQ ID NO: 3618300 - RNA, 17 nt, Human
ugcuuaauucaaauaau

SEQ ID NO: 3618301 - RNA, 15 nt, Human
ugcuuaauuucuaaa

SEQ ID NO: 3618302 - RNA, 19 nt, Human
ugcuuaauuucuaaagaua

SEQ ID NO: 3618303 - RNA, 18 nt, Human
ugcuuacaauucccugcu

SEQ ID NO: 3618304 - RNA, 21 nt, Human
ugcuuacaauucccugcuguc

SEQ ID NO: 3618305 - RNA, 13 nt, Human
ugcuuacaauuuu

SEQ ID NO: 3618306 - RNA, 17 nt, Human
ugcuuacacaucucaga

SEQ ID NO: 3618307 - RNA, 14 nt, Human
ugcuuacauuuuua

SEQ ID NO: 3618308 - RNA, 19 nt, Human
ugcuuaccuugacuguuga

SEQ ID NO: 3618309 - RNA, 14 nt, Human
ugcuuacuuuggaa

SEQ ID NO: 3618310 - RNA, 22 nt, Human
ugcuuagagggauuucuuugcu

SEQ ID NO: 3618311 - RNA, 23 nt, Human
ugcuuagagggauuucuuugcug

SEQ ID NO: 3618312 - RNA, 19 nt, Human
ugcuuagccuccugaccug

SEQ ID NO: 3618313 - RNA, 23 nt, Human
ugcuuaggauguuuuucaugaaa

SEQ ID NO: 3618314 - RNA, 13 nt, Human
ugcuuaguaaaau

SEQ ID NO: 3618315 - RNA, 14 nt, Human
ugcuuaguaaaauu

SEQ ID NO: 3618316 - RNA, 16 nt, Human
ugcuuaguaaaauuua

SEQ ID NO: 3618317 - RNA, 13 nt, Human
ugcuuaguaaugc

SEQ ID NO: 3618318 - RNA, 18 nt, Human
ugcuuaguaaugcuacgu

SEQ ID NO: 3618319 - RNA, 14 nt, Human
ugcuuagucacugc

SEQ ID NO: 3618320 - RNA, 19 nt, Human
ugcuuagucacugccugca

SEQ ID NO: 3618321 - RNA, 21 nt, Human
ugcuuagucacuuauuucaua

SEQ ID NO: 3618322 - RNA, 23 nt, Human
ugcuuauaaccuaguuaaagaaa

SEQ ID NO: 3618323 - RNA, 13 nt, Human
ugcuuauacacuu

SEQ ID NO: 3618324 - RNA, 17 nt, Human
ugcuuauagguggccuc

SEQ ID NO: 3618325 - RNA, 21 nt, Human
ugcuuauuccaugacugcuug

SEQ ID NO: 3618326 - RNA, 17 nt, Human
ugcuuauugcuuaguaa

SEQ ID NO: 3618327 - RNA, 21 nt, Human
ugcuuauugcuuaguaaaauu

SEQ ID NO: 3618328 - RNA, 15 nt, Human
ugcuuauuguuccaa

SEQ ID NO: 3618329 - RNA, 18 nt, Human
ugcuuauuuauuguauuc

SEQ ID NO: 3618330 - RNA, 21 nt, Human
ugcuuauuuauuguauucugg

SEQ ID NO: 3618331 - RNA, 23 nt, Human
ugcuuauuugacaacguuucagc

SEQ ID NO: 3618332 - RNA, 17 nt, Human
ugcuuauuuuaaaauuu

SEQ ID NO: 3618333 - RNA, 21 nt, Human
ugcuucaaaaacauucuuaca

SEQ ID NO: 3618334 - RNA, 21 nt, Human
ugcuucaaacucaaacacaga

SEQ ID NO: 3618335 - RNA, 17 nt, Human
ugcuucaaauccaucca

SEQ ID NO: 3618336 - RNA, 23 nt, Human
ugcuucaagagaaaaugcgguua

SEQ ID NO: 3618337 - RNA, 21 nt, Human
ugcuucaaggauccugagcca

SEQ ID NO: 3618338 - RNA, 21 nt, Human
ugcuucaauaguucaaggaac

SEQ ID NO: 3618339 - RNA, 16 nt, Human
ugcuucacaguagagc

SEQ ID NO: 3618340 - RNA, 13 nt, Human
ugcuucagccucc

SEQ ID NO: 3618341 - RNA, 14 nt, Human
ugcuucauacaggg

SEQ ID NO: 3618342 - RNA, 16 nt, Human
ugcuucauacagggau

SEQ ID NO: 3618343 - RNA, 17 nt, Human
ugcuucaugcucagccc

SEQ ID NO: 3618344 - RNA, 17 nt, Human
ugcuucaugugucccag

SEQ ID NO: 3618345 - RNA, 21 nt, Human
ugcuucaugugucccagaaga

SEQ ID NO: 3618346 - RNA, 19 nt, Human
ugcuucauucaauauugac

SEQ ID NO: 3618347 - RNA, 18 nt, Human
ugcuucauucuuugcagg

SEQ ID NO: 3618348 - RNA, 20 nt, Human
ugcuucauuuguaugucaaa

SEQ ID NO: 3618349 - RNA, 17 nt, Human
ugcuuccaccucacccc

SEQ ID NO: 3618350 - RNA, 16 nt, Human
ugcuuccagugaggcu

SEQ ID NO: 3618351 - RNA, 18 nt, Human
ugcuuccagugaggcucu

SEQ ID NO: 3618352 - RNA, 20 nt, Human
ugcuuccagugaggcucugc

SEQ ID NO: 3618353 - RNA, 21 nt, Human
ugcuuccagugaggcucugcc

SEQ ID NO: 3618354 - RNA, 23 nt, Human
ugcuuccauggccguguagaagc

SEQ ID NO: 3618355 - RNA, 14 nt, Human
ugcuucccaccucc

SEQ ID NO: 3618356 - RNA, 19 nt, Human
ugcuucccaccucccugcc

SEQ ID NO: 3618357 - RNA, 16 nt, Human
ugcuucccauccuacc

SEQ ID NO: 3618358 - RNA, 18 nt, Human
ugcuucccauccuacccu

SEQ ID NO: 3618359 - RNA, 17 nt, Human
ugcuucccauuguggcu

SEQ ID NO: 3618360 - RNA, 21 nt, Human
ugcuucccucugccugucccu

SEQ ID NO: 3618361 - RNA, 20 nt, Human
ugcuucccuuuuuuccuuuc

SEQ ID NO: 3618362 - RNA, 23 nt, Human
ugcuucccuuuuuuccuuuccac

SEQ ID NO: 3618363 - RNA, 22 nt, Human
ugcuuccgguagggaggcagcc

SEQ ID NO: 3618364 - RNA, 12 nt, Human
ugcuuccuagaa

SEQ ID NO: 3618365 - RNA, 20 nt, Human
ugcuuccuagaaguuacuga

SEQ ID NO: 3618366 - RNA, 18 nt, Human
ugcuuccuauaauuuuga

SEQ ID NO: 3618367 - RNA, 23 nt, Human
ugcuuccucccaacaagcagcug

SEQ ID NO: 3618368 - RNA, 12 nt, Human
ugcuuccuccug

SEQ ID NO: 3618369 - RNA, 15 nt, Human
ugcuucgggcccuuc

SEQ ID NO: 3618370 - RNA, 18 nt, Human
ugcuucuaaguaaauaca

SEQ ID NO: 3618371 - RNA, 20 nt, Human
ugcuucuaaguaaauacaau

SEQ ID NO: 3618372 - RNA, 18 nt, Human
ugcuucuaccaacuggaa

SEQ ID NO: 3618373 - RNA, 23 nt, Human
ugcuucuaccaacuggaagcaca

SEQ ID NO: 3618374 - RNA, 19 nt, Human
ugcuucuaguucugccagg

SEQ ID NO: 3618375 - RNA, 20 nt, Human
ugcuucuaguucugccagga

SEQ ID NO: 3618376 - RNA, 22 nt, Human
ugcuucucagauuucugaggaa

SEQ ID NO: 3618377 - RNA, 15 nt, Human
ugcuucuccagccug

SEQ ID NO: 3618378 - RNA, 17 nt, Human
ugcuucuccaugagaca

SEQ ID NO: 3618379 - RNA, 21 nt, Human
ugcuucucccaggcaaggcug

SEQ ID NO: 3618380 - RNA, 16 nt, Human
ugcuucucuacagacu

SEQ ID NO: 3618381 - RNA, 12 nt, Human
ugcuucucugac

SEQ ID NO: 3618382 - RNA, 13 nt, Human
ugcuucucugacu

SEQ ID NO: 3618383 - RNA, 18 nt, Human
ugcuucucugcccagcuu

SEQ ID NO: 3618384 - RNA, 14 nt, Human
ugcuucugggaagg

SEQ ID NO: 3618385 - RNA, 20 nt, Human
ugcuucuguaguacuccuua

SEQ ID NO: 3618386 - RNA, 14 nt, Human
ugcuucuguuuuau

SEQ ID NO: 3618387 - RNA, 17 nt, Human
ugcuucuuaaccccagu

SEQ ID NO: 3618388 - RNA, 13 nt, Human
ugcuucuucagag

SEQ ID NO: 3618389 - RNA, 16 nt, Human
ugcuucuucucaggca

SEQ ID NO: 3618390 - RNA, 14 nt, Human
ugcuucuuggaguc

SEQ ID NO: 3618391 - RNA, 12 nt, Human
ugcuucuuguga

SEQ ID NO: 3618392 - RNA, 20 nt, Human
ugcuucuugugaaggccaug

SEQ ID NO: 3618393 - RNA, 19 nt, Human
ucccuggcucucagaaggu

SEQ ID NO: 3618394 - RNA, 17 nt, Human
ucccuggcuucuguggg

SEQ ID NO: 3618395 - RNA, 14 nt, Human
ucccugggaggccc

SEQ ID NO: 3618396 - RNA, 23 nt, Human
ucccugggagggacaugcuuagc

SEQ ID NO: 3618397 - RNA, 17 nt, Human
ucccugggcauugcuuu

SEQ ID NO: 3618398 - RNA, 17 nt, Human
ucccugggccagggucu

SEQ ID NO: 3618399 - RNA, 18 nt, Human
ucccugggccagggucug

SEQ ID NO: 3618400 - RNA, 14 nt, Human
uggggcgaggcagg

SEQ ID NO: 3618401 - RNA, 17 nt, Human
uggggcgcgugaggccc

SEQ ID NO: 3618402 - RNA, 17 nt, Human
uggggcgggaaagccag

SEQ ID NO: 3618403 - RNA, 14 nt, Human
uggggcguggggag

SEQ ID NO: 3618404 - RNA, 20 nt, Human
uggggcuaaagacugaucuc

SEQ ID NO: 3618405 - RNA, 17 nt, Human
aagcuuauuaaugcuaa

SEQ ID NO: 3618406 - RNA, 16 nt, Human
aagcuucaguugcuug

SEQ ID NO: 3618407 - RNA, 20 nt, Human
aagcuucaugcacuuaaaga

SEQ ID NO: 3618408 - RNA, 21 nt, Human
aagcuucaugcacuuaaagaa

SEQ ID NO: 3618409 - RNA, 21 nt, Human
aagcuuccaggaaaaaggaca

SEQ ID NO: 3618410 - RNA, 20 nt, Human
aagcuuccauagcugcugcc

SEQ ID NO: 3618411 - RNA, 15 nt, Human
aagcuuccaugauuc

SEQ ID NO: 3618412 - RNA, 16 nt, Human
aagcuuccaugauucu

SEQ ID NO: 3618413 - RNA, 17 nt, Human
aagcuucccucccugcu

SEQ ID NO: 3618414 - RNA, 11 nt, Human
aagcuucuaau

SEQ ID NO: 3618415 - RNA, 19 nt, Human
aagcuucuaauaaauuaua

SEQ ID NO: 3618416 - RNA, 19 nt, Human
aagcuucuuaauuaauuug

SEQ ID NO: 3618417 - RNA, 21 nt, Human
aagcuucuuaauuaauuugau

SEQ ID NO: 3618418 - RNA, 17 nt, Human
aagcuugacucccaagu

SEQ ID NO: 3618419 - RNA, 18 nt, Human
aagcuugacucccaaguu

SEQ ID NO: 3618420 - RNA, 18 nt, Human
aagcuuggauuaaauaca

SEQ ID NO: 3618421 - RNA, 14 nt, Human
aagcuuggcagccg

SEQ ID NO: 3618422 - RNA, 21 nt, Human
aagcuuggcuguagaaggaga

SEQ ID NO: 3618423 - RNA, 17 nt, Human
aagcuugguucugugaa

SEQ ID NO: 3618424 - RNA, 23 nt, Human
aagcuuguauuccuuuuucucuc

SEQ ID NO: 3618425 - RNA, 21 nt, Human
aagcuuucagaauaugucagu

SEQ ID NO: 3618426 - RNA, 21 nt, Human
aagcuuucaguauuagugaug

SEQ ID NO: 3618427 - RNA, 12 nt, Human
aagcuuuccugc

SEQ ID NO: 3618428 - RNA, 16 nt, Human
aagcuuuccugcccca

SEQ ID NO: 3618429 - RNA, 17 nt, Human
aagcuuuccuguugaau

SEQ ID NO: 3618430 - RNA, 19 nt, Human
aagcuuugaauacuaaauu

SEQ ID NO: 3618431 - RNA, 14 nt, Human
aagcuuugacacug

SEQ ID NO: 3618432 - RNA, 16 nt, Human
aagcuuugauuuagau

SEQ ID NO: 3618433 - RNA, 17 nt, Human
aagcuuugccagcugcu

SEQ ID NO: 3618434 - RNA, 15 nt, Human
aagcuuuguccccug

SEQ ID NO: 3618435 - RNA, 18 nt, Human
aagcuuuguccccugcuu

SEQ ID NO: 3618436 - RNA, 16 nt, Human
aagcuuuguuuguucu

SEQ ID NO: 3618437 - RNA, 13 nt, Human
aagcuuuucuauu

SEQ ID NO: 3618438 - RNA, 17 nt, Human
aagcuuuucuauuuuaa

SEQ ID NO: 3618439 - RNA, 15 nt, Human
aagcuuuugcauauu

SEQ ID NO: 3618440 - RNA, 22 nt, Human
aagcuuuugcauauugcauacu

SEQ ID NO: 3618441 - RNA, 19 nt, Human
aagcuuuugucuacacacc

SEQ ID NO: 3618442 - RNA, 16 nt, Human
aagcuuuuuccuccug

SEQ ID NO: 3618443 - RNA, 17 nt, Human
aagcuuuuuuauuuuuu

SEQ ID NO: 3618444 - RNA, 22 nt, Human
aagcuuuuuuauuuuuuauaca

SEQ ID NO: 3618445 - RNA, 19 nt, Human
aaggaaaaaauaacaauga

SEQ ID NO: 3618446 - RNA, 15 nt, Human
aaggaaaaaauguug

SEQ ID NO: 3618447 - RNA, 20 nt, Human
aaggaaaaacacaagcaaaa

SEQ ID NO: 3618448 - RNA, 10 nt, Human
aaggaaaaag

SEQ ID NO: 3618449 - RNA, 15 nt, Human
aaggaaaaagcucca

SEQ ID NO: 3618450 - RNA, 23 nt, Human
aaggaaaaagcuccaugugccuc

SEQ ID NO: 3618451 - RNA, 17 nt, Human
aaggaaaaauaaauauu

SEQ ID NO: 3618452 - RNA, 21 nt, Human
aaggaaaaauguguaauuuug

SEQ ID NO: 3618453 - RNA, 16 nt, Human
aaggaaaacuaccugu

SEQ ID NO: 3618454 - RNA, 16 nt, Human
aaggaaaacugcaugg

SEQ ID NO: 3618455 - RNA, 15 nt, Human
aaggaaaagaaaaaa

SEQ ID NO: 3618456 - RNA, 17 nt, Human
aaggaaaauaguaaugu

SEQ ID NO: 3618457 - RNA, 15 nt, Human
aaggaaacccagcuc

SEQ ID NO: 3618458 - RNA, 16 nt, Human
aaggaaacucuuaucu

SEQ ID NO: 3618459 - RNA, 15 nt, Human
aaggaaagagggagg

SEQ ID NO: 3618460 - RNA, 20 nt, Human
aaggaaagcaauaaaugaau

SEQ ID NO: 3618461 - RNA, 18 nt, Human
aaggaaagcuguguuuau

SEQ ID NO: 3618462 - RNA, 22 nt, Human
aaggaaauaaaaaagucucuau

SEQ ID NO: 3618463 - RNA, 16 nt, Human
aaggaaaucucacccc

SEQ ID NO: 3618464 - RNA, 22 nt, Human
aaggaaccaaagcgaauuuuaa

SEQ ID NO: 3618465 - RNA, 13 nt, Human
aaggaaccaacaa

SEQ ID NO: 3618466 - RNA, 17 nt, Human
aaggaaccaacaaucuu

SEQ ID NO: 3618467 - RNA, 13 nt, Human
aaggaaccuuccu

SEQ ID NO: 3618468 - RNA, 17 nt, Human
aaggaacuugaaaaaua

SEQ ID NO: 3618469 - RNA, 13 nt, Human
aaggaagaaaaau

SEQ ID NO: 3618470 - RNA, 15 nt, Human
aaggaagaaaaauca

SEQ ID NO: 3618471 - RNA, 13 nt, Human
aaggaagacuaga

SEQ ID NO: 3618472 - RNA, 22 nt, Human
aaggaagcauuguaaaauaauu

SEQ ID NO: 3618473 - RNA, 16 nt, Human
aaggaagccaaauuua

SEQ ID NO: 3618474 - RNA, 16 nt, Human
aaggaagcuccacugu

SEQ ID NO: 3618475 - RNA, 19 nt, Human
aaggaagcuuucucugcuu

SEQ ID NO: 3618476 - RNA, 12 nt, Human
aaggaaggaaag

SEQ ID NO: 3618477 - RNA, 20 nt, Human
aaggaaggagacucaccucu

SEQ ID NO: 3618478 - RNA, 22 nt, Human
aaggaaggagacucaccucugc

SEQ ID NO: 3618479 - RNA, 16 nt, Human
aaggaagguaaaaagu

SEQ ID NO: 3618480 - RNA, 12 nt, Human
aaggaaggugga

SEQ ID NO: 3618481 - RNA, 16 nt, Human
aaggaagguucuggug

SEQ ID NO: 3618482 - RNA, 17 nt, Human
aaggaagguuuucucca

SEQ ID NO: 3618483 - RNA, 21 nt, Human
aaggaagucaaagcaaggaaa

SEQ ID NO: 3618484 - RNA, 21 nt, Human
aaggaauaaauugcuccuuga

SEQ ID NO: 3618485 - RNA, 17 nt, Human
aaggaauagaagcaaau

SEQ ID NO: 3618486 - RNA, 16 nt, Human
aaggaauauauggcag

SEQ ID NO: 3618487 - RNA, 21 nt, Human
aaggaauccacucccaggcag

SEQ ID NO: 3618488 - RNA, 16 nt, Human
aaggaauuaucaauua

SEQ ID NO: 3618489 - RNA, 15 nt, Human
aaggaauucuaggca

SEQ ID NO: 3618490 - RNA, 20 nt, Human
aaggaauucuaggcauccca

SEQ ID NO: 3618491 - RNA, 19 nt, Human
aaggaauuuugcuaaguaa

SEQ ID NO: 3618492 - RNA, 17 nt, Human
aaggacaaagucuccag

SEQ ID NO: 3618493 - RNA, 16 nt, Human
aaggacaaagugccaa

SEQ ID NO: 3618494 - RNA, 20 nt, Human
aaggacaaagugccaaagaa

SEQ ID NO: 3618495 - RNA, 18 nt, Human
aaggacacagaugaaaca

SEQ ID NO: 3618496 - RNA, 22 nt, Human
aaggacacagaugaaacacaaa

SEQ ID NO: 3618497 - RNA, 13 nt, Human
aaggacacuagaa

SEQ ID NO: 3618498 - RNA, 17 nt, Human
aaggacacuuccugccu

SEQ ID NO: 3618499 - RNA, 19 nt, Human
aaggacagccccuccucca

SEQ ID NO: 3618500 - RNA, 15 nt, Human
aaggacaggcagaaa

SEQ ID NO: 3618501 - RNA, 21 nt, Human
aaggacaguccuauuuagaca

SEQ ID NO: 3618502 - RNA, 15 nt, Human
aaggacaucagcaaa

SEQ ID NO: 3618503 - RNA, 17 nt, Human
aaggacaucagcaaaca

SEQ ID NO: 3618504 - RNA, 15 nt, Human
aaggacauucuugua

SEQ ID NO: 3618505 - RNA, 18 nt, Human
aaggacauugcggacagc

SEQ ID NO: 3618506 - RNA, 12 nt, Human
aaggaccaggac

SEQ ID NO: 3618507 - RNA, 13 nt, Human
aaggaccaggacu

SEQ ID NO: 3618508 - RNA, 18 nt, Human
aaggacccggaggggccu

SEQ ID NO: 3618509 - RNA, 20 nt, Human
aaggacccuucagagguggc

SEQ ID NO: 3618510 - RNA, 19 nt, Human
aaggaccguggcccugccc

SEQ ID NO: 3618511 - RNA, 12 nt, Human
aaggaccuaaaa

SEQ ID NO: 3618512 - RNA, 15 nt, Human
aaggaccuaaaaauu

SEQ ID NO: 3618513 - RNA, 12 nt, Human
aaggaccuuaag

SEQ ID NO: 3618514 - RNA, 22 nt, Human
aaggaccuucacucuaagaugu

SEQ ID NO: 3618515 - RNA, 21 nt, Human
aaggacugugacaggcagcag

SEQ ID NO: 3618516 - RNA, 23 nt, Human
aaggacuguuuuuuccugagcuu

SEQ ID NO: 3618517 - RNA, 21 nt, Human
aaggacuuguuagaucuaguu

SEQ ID NO: 3618518 - RNA, 19 nt, Human
aaggagaaacagagacagg

SEQ ID NO: 3618519 - RNA, 18 nt, Human
aaggagaaucauguuucu

SEQ ID NO: 3618520 - RNA, 14 nt, Human
aaggagaaugaauc

SEQ ID NO: 3618521 - RNA, 14 nt, Human
aaggagacacagau

SEQ ID NO: 3618522 - RNA, 15 nt, Human
aaggagacacagaug

SEQ ID NO: 3618523 - RNA, 17 nt, Human
aaggagacucaccucug

SEQ ID NO: 3618524 - RNA, 14 nt, Human
aaggagacuguguu

SEQ ID NO: 3618525 - RNA, 11 nt, Human
aaggagagaaa

SEQ ID NO: 3618526 - RNA, 16 nt, Human
aaggagagaaaguggg

SEQ ID NO: 3618527 - RNA, 20 nt, Human
aaggagagacucccaugaag

SEQ ID NO: 3618528 - RNA, 21 nt, Human
aaggagagacucccaugaagc

SEQ ID NO: 3618529 - RNA, 13 nt, Human
aaggagagccugc

SEQ ID NO: 3618530 - RNA, 17 nt, Human
aaggagauagggaaaag

SEQ ID NO: 3618531 - RNA, 18 nt, Human
aaggagauguaagagcuu

SEQ ID NO: 3618532 - RNA, 18 nt, Human
aaggagauuuuccuuccu

SEQ ID NO: 3618533 - RNA, 23 nt, Human
aaggagcagagcugauggagaag

SEQ ID NO: 3618534 - RNA, 15 nt, Human
aaggagccaguuugc

SEQ ID NO: 3618535 - RNA, 17 nt, Human
aaggagccccauuccug

SEQ ID NO: 3618536 - RNA, 16 nt, Human
aaggagcugagaauag

SEQ ID NO: 3618537 - RNA, 13 nt, Human
aaggagcugccug

SEQ ID NO: 3618538 - RNA, 14 nt, Human
aaggagcugcuaua

SEQ ID NO: 3618539 - RNA, 18 nt, Human
aaggagcugcuauagccu

SEQ ID NO: 3618540 - RNA, 14 nt, Human
ugggagagcccagc

SEQ ID NO: 3618541 - RNA, 16 nt, Human
ugggagagccuuccag

SEQ ID NO: 3618542 - RNA, 16 nt, Human
ugggagaggcagagug

SEQ ID NO: 3618543 - RNA, 22 nt, Human
ugggagaggcagcccaggaagu

SEQ ID NO: 3618544 - RNA, 13 nt, Human
ugggagagggcgc

SEQ ID NO: 3618545 - RNA, 20 nt, Human
ugggagagggcgcaggccgu

SEQ ID NO: 3618546 - RNA, 21 nt, Human
ugggagagugucaaccagaca

SEQ ID NO: 3618547 - RNA, 20 nt, Human
ugggagcaaacugcaugccc

SEQ ID NO: 3618548 - RNA, 22 nt, Human
ugggagcaaacugcaugcccag

SEQ ID NO: 3618549 - RNA, 13 nt, Human
ugggagcacugga

SEQ ID NO: 3618550 - RNA, 23 nt, Human
ugggagcagcccgcugaguggac

SEQ ID NO: 3618551 - RNA, 11 nt, Human
ugggagcagga

SEQ ID NO: 3618552 - RNA, 22 nt, Human
ugggagcaggagauugagaagg

SEQ ID NO: 3618553 - RNA, 15 nt, Human
ugggagcaggauuuu

SEQ ID NO: 3618554 - RNA, 13 nt, Human
ugggagccccagg

SEQ ID NO: 3618555 - RNA, 22 nt, Human
ugggagccccagggucuucccu

SEQ ID NO: 3618556 - RNA, 23 nt, Human
ugggagccccagggucuucccua

SEQ ID NO: 3618557 - RNA, 15 nt, Human
ugggagcccccagcc

SEQ ID NO: 3618558 - RNA, 17 nt, Human
ugggagcccccagccug

SEQ ID NO: 3618559 - RNA, 18 nt, Human
ugggagcccccagccugu

SEQ ID NO: 3618560 - RNA, 13 nt, Human
ugggagccgggca

SEQ ID NO: 3618561 - RNA, 23 nt, Human
ugggagccgggucugccucuucu

SEQ ID NO: 3618562 - RNA, 22 nt, Human
ugggagccugcaaacucacugc

SEQ ID NO: 3618563 - RNA, 20 nt, Human
ugggagcgugggaggcggga

SEQ ID NO: 3618564 - RNA, 15 nt, Human
ugggagcuccucucc

SEQ ID NO: 3618565 - RNA, 19 nt, Human
ugggagcuccucuccugga

SEQ ID NO: 3618566 - RNA, 22 nt, Human
ugggagcuccucuccuggagga

SEQ ID NO: 3618567 - RNA, 22 nt, Human
ugggagcugccuguucagcucc

SEQ ID NO: 3618568 - RNA, 24 nt, Human
ugggagcugccuguucagcuccag

SEQ ID NO: 3618569 - RNA, 18 nt, Human
ugggagcuggaguccacu

SEQ ID NO: 3618570 - RNA, 18 nt, Human
ugggaggaaagagagcag

SEQ ID NO: 3618571 - RNA, 12 nt, Human
ugggaggaagca

SEQ ID NO: 3618572 - RNA, 13 nt, Human
ugggaggaagcag

SEQ ID NO: 3618573 - RNA, 14 nt, Human
ugggaggaagcaga

SEQ ID NO: 3618574 - RNA, 16 nt, Human
ugggaggaagcagaau

SEQ ID NO: 3618575 - RNA, 13 nt, Human
ugggaggaaggac

SEQ ID NO: 3618576 - RNA, 19 nt, Human
ugggaggacggugcaaccc

SEQ ID NO: 3618577 - RNA, 13 nt, Human
ugggaggagcaga

SEQ ID NO: 3618578 - RNA, 20 nt, Human
ugggaggauucuaugaggca

SEQ ID NO: 3618579 - RNA, 22 nt, Human
ugggaggauugcuugagcucag

SEQ ID NO: 3618580 - RNA, 18 nt, Human
ugggaggcaagaggggug

SEQ ID NO: 3618581 - RNA, 14 nt, Human
ugggaggcacagca

SEQ ID NO: 3618582 - RNA, 20 nt, Human
ugggaggccccacuggggaa

SEQ ID NO: 3618583 - RNA, 20 nt, Human
ugggaggccuuucccuaagc

SEQ ID NO: 3618584 - RNA, 22 nt, Human
ugggaggcggagaguacaguga

SEQ ID NO: 3618585 - RNA, 22 nt, Human
ugggaggcucacccccuucucc

SEQ ID NO: 3618586 - RNA, 22 nt, Human
ugggaggcuccuguuagcuccu

SEQ ID NO: 3618587 - RNA, 14 nt, Human
ugggaggcucugga

SEQ ID NO: 3618588 - RNA, 11 nt, Human
ugggaggcuga

SEQ ID NO: 3618589 - RNA, 13 nt, Human
ugggaggcugagg

SEQ ID NO: 3618590 - RNA, 14 nt, Human
ugggaggcugaggc

SEQ ID NO: 3618591 - RNA, 15 nt, Human
ugggaggcugaggca

SEQ ID NO: 3618592 - RNA, 14 nt, Human
ugggaggcugaggu

SEQ ID NO: 3618593 - RNA, 12 nt, Human
ugggagggagcu

SEQ ID NO: 3618594 - RNA, 21 nt, Human
ugggagggauggcccuuccuc

SEQ ID NO: 3618595 - RNA, 19 nt, Human
ugggagggcagcagggcua

SEQ ID NO: 3618596 - RNA, 14 nt, Human
ugggaggggcaggc

SEQ ID NO: 3618597 - RNA, 17 nt, Human
ugggaggggcaggcuga

SEQ ID NO: 3618598 - RNA, 23 nt, Human
ugggagggggcuugaagccaaag

SEQ ID NO: 3618599 - RNA, 23 nt, Human
ugggaggucaaggcugcagugag

SEQ ID NO: 3618600 - RNA, 14 nt, Human
ugggaggucuugcu

SEQ ID NO: 3618601 - RNA, 20 nt, Human
ugggagguguuggcugcacg

SEQ ID NO: 3618602 - RNA, 20 nt, Human
ugggaguacucucaucacua

SEQ ID NO: 3618603 - RNA, 12 nt, Human
ugggaguccagg

SEQ ID NO: 3618604 - RNA, 21 nt, Human
ugggagugaggaugucugggc

SEQ ID NO: 3618605 - RNA, 22 nt, Human
ugggagugaggaugucugggcc

SEQ ID NO: 3618606 - RNA, 14 nt, Human
ugggagugggccca

SEQ ID NO: 3618607 - RNA, 17 nt, Human
ugggaguucagcugcuu

SEQ ID NO: 3618608 - RNA, 16 nt, Human
ugggaguugucauuaa

SEQ ID NO: 3618609 - RNA, 20 nt, Human
ugggaguuuuuaugagaaac

SEQ ID NO: 3618610 - RNA, 13 nt, Human
ugggauaggaaaa

SEQ ID NO: 3618611 - RNA, 21 nt, Human
ugggauaggaaaaaugaguaa

SEQ ID NO: 3618612 - RNA, 19 nt, Human
ugggaucagggguaggaau

SEQ ID NO: 3618613 - RNA, 18 nt, Human
ugggaucaugaaaguaga

SEQ ID NO: 3618614 - RNA, 15 nt, Human
ugggauccaggcccc

SEQ ID NO: 3618615 - RNA, 20 nt, Human
ugggauccaggccccucccu

SEQ ID NO: 3618616 - RNA, 19 nt, Human
ugggaucccugucuuuccu

SEQ ID NO: 3618617 - RNA, 13 nt, Human
ugggauccuccag

SEQ ID NO: 3618618 - RNA, 18 nt, Human
ugggauccuccaggugca

SEQ ID NO: 3618619 - RNA, 14 nt, Human
ugggaucugacugc

SEQ ID NO: 3618620 - RNA, 13 nt, Human
ugggaucugcccc

SEQ ID NO: 3618621 - RNA, 17 nt, Human
ugggaugauugaagaaa

SEQ ID NO: 3618622 - RNA, 17 nt, Human
ugggaugguggagggcc

SEQ ID NO: 3618623 - RNA, 23 nt, Human
ugggauguaugaauacagcagca

SEQ ID NO: 3618624 - RNA, 20 nt, Human
ugggauguucagcacugucc

SEQ ID NO: 3618625 - RNA, 22 nt, Human
ugggauguucagcacugucccu

SEQ ID NO: 3618626 - RNA, 21 nt, Human
ugggauuacaggcaugugcca

SEQ ID NO: 3618627 - RNA, 21 nt, Human
ugggauuacaggcgugagcca

SEQ ID NO: 3618628 - RNA, 24 nt, Human
ugggauuacaggcuccugccacca

SEQ ID NO: 3618629 - RNA, 16 nt, Human
ugggauuacaggugug

SEQ ID NO: 3618630 - RNA, 17 nt, Human
ugggauuacagguguga

SEQ ID NO: 3618631 - RNA, 15 nt, Human
ugggauuauggguca

SEQ ID NO: 3618632 - RNA, 17 nt, Human
ugggauucaggaaugug

SEQ ID NO: 3618633 - RNA, 15 nt, Human
aagcgcccuggcccc

SEQ ID NO: 3618634 - RNA, 14 nt, Human
aagcgccuccaacc

SEQ ID NO: 3618635 - RNA, 22 nt, Human
aagcgcuagaggaagcagccaa

SEQ ID NO: 3618636 - RNA, 23 nt, Human
aagcgcuuuuccuuggcauuccg

SEQ ID NO: 3618637 - RNA, 21 nt, Human
aagcggagguugcagggagcc

SEQ ID NO: 3618638 - RNA, 17 nt, Human
aagcgugagccacugca

SEQ ID NO: 3618639 - RNA, 20 nt, Human
aagcgugagccacugcaccg

SEQ ID NO: 3618640 - RNA, 22 nt, Human
aagcgugagcuuaaaauacaag

SEQ ID NO: 3618641 - RNA, 21 nt, Human
aagcgugcacaaggauugaaa

SEQ ID NO: 3618642 - RNA, 23 nt, Human
aagcgugcacaaggauugaaaau

SEQ ID NO: 3618643 - RNA, 21 nt, Human
aagcuaaauccuuuacuguua

SEQ ID NO: 3618644 - RNA, 21 nt, Human
aagcuaacagggaaggcaggc

SEQ ID NO: 3618645 - RNA, 23 nt, Human
aagcuaacagggaaggcaggcag

SEQ ID NO: 3618646 - RNA, 21 nt, Human
aagcuaauaaaauaucauuca

SEQ ID NO: 3618647 - RNA, 23 nt, Human
aagcuaaugacgaggaaccgaaa

SEQ ID NO: 3618648 - RNA, 20 nt, Human
aagcuaauugggaguccagg

SEQ ID NO: 3618649 - RNA, 22 nt, Human
aagcuaauuugcauuaaauuca

SEQ ID NO: 3618650 - RNA, 20 nt, Human
aagcuacagguuacaacaga

SEQ ID NO: 3618651 - RNA, 22 nt, Human
aagcuacuagcaaaauaaaaca

SEQ ID NO: 3618652 - RNA, 17 nt, Human
aagcuacugccauccug

SEQ ID NO: 3618653 - RNA, 19 nt, Human
aagcuacugugugugugaa

SEQ ID NO: 3618654 - RNA, 23 nt, Human
aagcuacugugugugugaaugaa

SEQ ID NO: 3618655 - RNA, 13 nt, Human
aagcuagaaauga

SEQ ID NO: 3618656 - RNA, 17 nt, Human
aagcuagaaccuggagg

SEQ ID NO: 3618657 - RNA, 15 nt, Human
aagcuagacagaucc

SEQ ID NO: 3618658 - RNA, 16 nt, Human
aagcuagcaaauagua

SEQ ID NO: 3618659 - RNA, 12 nt, Human
aagcuagcuccc

SEQ ID NO: 3618660 - RNA, 13 nt, Human
aagcuagcucccc

SEQ ID NO: 3618661 - RNA, 19 nt, Human
aagcuagcuccccuccucu

SEQ ID NO: 3618662 - RNA, 19 nt, Human
aagcuaggaaaagaaaucu

SEQ ID NO: 3618663 - RNA, 20 nt, Human
aagcuaggaaaagaaaucua

SEQ ID NO: 3618664 - RNA, 14 nt, Human
aagcuaggaaugaa

SEQ ID NO: 3618665 - RNA, 12 nt, Human
aagcuaggccug

SEQ ID NO: 3618666 - RNA, 16 nt, Human
aagcuaggccuggcca

SEQ ID NO: 3618667 - RNA, 17 nt, Human
aagcuaggccuggccag

SEQ ID NO: 3618668 - RNA, 19 nt, Human
aagcuaggccuggccagau

SEQ ID NO: 3618669 - RNA, 15 nt, Human
aagcuaggguggccc

SEQ ID NO: 3618670 - RNA, 19 nt, Human
aagcuaggguggcccuugc

SEQ ID NO: 3618671 - RNA, 23 nt, Human
aagcuaggugcuauuugucaucu

SEQ ID NO: 3618672 - RNA, 15 nt, Human
aagcuagucaacagu

SEQ ID NO: 3618673 - RNA, 16 nt, Human
aagcuagucuuuugcu

SEQ ID NO: 3618674 - RNA, 17 nt, Human
aagcuagucuuuugcuu

SEQ ID NO: 3618675 - RNA, 21 nt, Human
aagcuagucuuuugcuuuugc

SEQ ID NO: 3618676 - RNA, 18 nt, Human
aagcuaguggcuucaaaa

SEQ ID NO: 3618677 - RNA, 13 nt, Human
aagcuauaaagca

SEQ ID NO: 3618678 - RNA, 22 nt, Human
aagcuauaucaaucucucuuag

SEQ ID NO: 3618679 - RNA, 18 nt, Human
aagcuauggugagaugca

SEQ ID NO: 3618680 - RNA, 22 nt, Human
aagcuauggugagaugcagcug

SEQ ID NO: 3618681 - RNA, 21 nt, Human
aagcuauuagccaggaucaug

SEQ ID NO: 3618682 - RNA, 22 nt, Human
aagcuauucaguaauaacucua

SEQ ID NO: 3618683 - RNA, 17 nt, Human
ugcuaaagccuuccuau

SEQ ID NO: 3618684 - RNA, 23 nt, Human
ugcuaaauaaaauuuguugcaua

SEQ ID NO: 3618685 - RNA, 21 nt, Human
ugcuaaauggucgcccaggag

SEQ ID NO: 3618686 - RNA, 22 nt, Human
ugcuaaauggucgcccaggaga

SEQ ID NO: 3618687 - RNA, 17 nt, Human
ugcuaaauguaacaguc

SEQ ID NO: 3618688 - RNA, 15 nt, Human
ugcuaaauugauguu

SEQ ID NO: 3618689 - RNA, 15 nt, Human
ugcuaaauuuucagu

SEQ ID NO: 3618690 - RNA, 13 nt, Human
ugcuaacaaagac

SEQ ID NO: 3618691 - RNA, 13 nt, Human
ugcuaacaucuaa

SEQ ID NO: 3618692 - RNA, 19 nt, Human
ugcuaacaugaagaccuuu

SEQ ID NO: 3618693 - RNA, 20 nt, Human
ugcuaacuagcuuggaaacu

SEQ ID NO: 3618694 - RNA, 15 nt, Human
ugcuaacugaacuuu

SEQ ID NO: 3618695 - RNA, 14 nt, Human
ugcuaagaaaccag

SEQ ID NO: 3618696 - RNA, 22 nt, Human
ugcuaagaauauuugaauguau

SEQ ID NO: 3618697 - RNA, 16 nt, Human
ugcuaagaauuuuuua

SEQ ID NO: 3618698 - RNA, 19 nt, Human
ugcuaagagaaaaaaaaga

SEQ ID NO: 3618699 - RNA, 15 nt, Human
ugcuaagccccagca

SEQ ID NO: 3618700 - RNA, 12 nt, Human
ugcuaaggacuu

SEQ ID NO: 3618701 - RNA, 13 nt, Human
ugcuaaggacuug

SEQ ID NO: 3618702 - RNA, 22 nt, Human
ugcuaaggacuuguuagaucua

SEQ ID NO: 3618703 - RNA, 23 nt, Human
ugcuaaggucuuggaacuugccu

SEQ ID NO: 3618704 - RNA, 15 nt, Human
ugcuaagguucuaag

SEQ ID NO: 3618705 - RNA, 16 nt, Human
ugcuaagguucuaagg

SEQ ID NO: 3618706 - RNA, 18 nt, Human
ugcuaagguucuaaggcc

SEQ ID NO: 3618707 - RNA, 21 nt, Human
ugcuaaguaaaucucuucugu

SEQ ID NO: 3618708 - RNA, 17 nt, Human
ugcuaaguauuucccag

SEQ ID NO: 3618709 - RNA, 18 nt, Human
ugcuaaguauuucccagc

SEQ ID NO: 3618710 - RNA, 23 nt, Human
ugcuaagugcuuauuacauuuua

SEQ ID NO: 3618711 - RNA, 15 nt, Human
ugcuaaguguaggau

SEQ ID NO: 3618712 - RNA, 16 nt, Human
ugcuaagugugaacug

SEQ ID NO: 3618713 - RNA, 16 nt, Human
ugcuaauauuaaaagu

SEQ ID NO: 3618714 - RNA, 18 nt, Human
ugcuaauauuuuccuccu

SEQ ID NO: 3618715 - RNA, 17 nt, Human
ugcuaaucaaagccagg

SEQ ID NO: 3618716 - RNA, 21 nt, Human
ugcuaaucaaagccagggucu

SEQ ID NO: 3618717 - RNA, 13 nt, Human
ugcuaaucuucuu

SEQ ID NO: 3618718 - RNA, 16 nt, Human
ugcugcaugcccucuc

SEQ ID NO: 3618719 - RNA, 16 nt, Human
ugcugcauggcagggg

SEQ ID NO: 3618720 - RNA, 23 nt, Human
ugcugcauggcagggggcugcug

SEQ ID NO: 3618721 - RNA, 14 nt, Human
ugcugcauuuaaaa

SEQ ID NO: 3618722 - RNA, 19 nt, Human
ugcugcauuugugucaucu

SEQ ID NO: 3618723 - RNA, 23 nt, Human
ugcugcauuuuaauuuuaaccaa

SEQ ID NO: 3618724 - RNA, 23 nt, Human
ugcugccaauauccuaauaaaaa

SEQ ID NO: 3618725 - RNA, 15 nt, Human
ugcugccacacuuca

SEQ ID NO: 3618726 - RNA, 16 nt, Human
ugcugccacacuucag

SEQ ID NO: 3618727 - RNA, 11 nt, Human
ugcugccaucc

SEQ ID NO: 3618728 - RNA, 22 nt, Human
ugcugccauccagguucagcuu

SEQ ID NO: 3618729 - RNA, 21 nt, Human
ugcugccauuugauuuuucua

SEQ ID NO: 3618730 - RNA, 16 nt, Human
ugcugcccaggcccag

SEQ ID NO: 3618731 - RNA, 14 nt, Human
ugcugcccaugcca

SEQ ID NO: 3618732 - RNA, 21 nt, Human
ugcugcccaugccaccgcuuc

SEQ ID NO: 3618733 - RNA, 16 nt, Human
ugcugcccauguuuca

SEQ ID NO: 3618734 - RNA, 21 nt, Human
ugcugccccaucagugcuccc

SEQ ID NO: 3618735 - RNA, 24 nt, Human
ugcugccccaugaagccacagccc

SEQ ID NO: 3618736 - RNA, 15 nt, Human
ugcugcccccacccc

SEQ ID NO: 3618737 - RNA, 22 nt, Human
ugcugcccccaccccggggacc

SEQ ID NO: 3618738 - RNA, 21 nt, Human
ugcugccccugcacagcaggc

SEQ ID NO: 3618739 - RNA, 22 nt, Human
ugcugccccugcacagcaggcu

SEQ ID NO: 3618740 - RNA, 20 nt, Human
ugcugcccgucuucagccua

SEQ ID NO: 3618741 - RNA, 23 nt, Human
ugcugcccucccccuccucucca

SEQ ID NO: 3618742 - RNA, 10 nt, Human
ugcugcccug

SEQ ID NO: 3618743 - RNA, 15 nt, Human
ugcugcccugaagaa

SEQ ID NO: 3618744 - RNA, 21 nt, Human
ugcugcccugcccaccuggcc

SEQ ID NO: 3618745 - RNA, 14 nt, Human
ugcugcccugcccc

SEQ ID NO: 3618746 - RNA, 11 nt, Human
ugcugcccugu

SEQ ID NO: 3618747 - RNA, 13 nt, Human
ugcugcccuguga

SEQ ID NO: 3618748 - RNA, 21 nt, Human
ugcugccgccccacccagaug

SEQ ID NO: 3618749 - RNA, 19 nt, Human
ugcugccgccucccagccu

SEQ ID NO: 3618750 - RNA, 15 nt, Human
ugcugccucaggaau

SEQ ID NO: 3618751 - RNA, 13 nt, Human
ugcugccucaugc

SEQ ID NO: 3618752 - RNA, 13 nt, Human
ugcugccucccca

SEQ ID NO: 3618753 - RNA, 17 nt, Human
ugcugccuccccaaccc

SEQ ID NO: 3618754 - RNA, 20 nt, Human
ugcugccucggauccccuuc

SEQ ID NO: 3618755 - RNA, 19 nt, Human
ugcugccucuuucccuagg

SEQ ID NO: 3618756 - RNA, 14 nt, Human
ugcugccugaguca

SEQ ID NO: 3618757 - RNA, 15 nt, Human
ugcugccugccuguc

SEQ ID NO: 3618758 - RNA, 14 nt, Human
ugcugccuggccac

SEQ ID NO: 3618759 - RNA, 13 nt, Human
ugcugccuguccc

SEQ ID NO: 3618760 - RNA, 19 nt, Human
ugcugccuuauucagggaa

SEQ ID NO: 3618761 - RNA, 20 nt, Human
ugcugccuuauucagggaag

SEQ ID NO: 3618762 - RNA, 22 nt, Human
ugcugccuucugacggcccugc

SEQ ID NO: 3618763 - RNA, 17 nt, Human
ugcugccuucuggauuc

SEQ ID NO: 3618764 - RNA, 21 nt, Human
ugcugccuuuucuuuaacuuu

SEQ ID NO: 3618765 - RNA, 15 nt, Human
ugcugcgcccuuccc

SEQ ID NO: 3618766 - RNA, 15 nt, Human
ugcugcggagcaaga

SEQ ID NO: 3618767 - RNA, 17 nt, Human
ugcugcuaaucuucagg

SEQ ID NO: 3618768 - RNA, 14 nt, Human
ugcugcuacccucc

SEQ ID NO: 3618769 - RNA, 18 nt, Human
ugcugcuacccucccugc

SEQ ID NO: 3618770 - RNA, 14 nt, Human
ugcugcuagaacuu

SEQ ID NO: 3618771 - RNA, 15 nt, Human
ugcugcucccucaga

SEQ ID NO: 3618772 - RNA, 18 nt, Human
ugcugcuccuuagcugcc

SEQ ID NO: 3618773 - RNA, 17 nt, Human
ugcugcucuuggcugga

SEQ ID NO: 3618774 - RNA, 13 nt, Human
ugcugcugagaac

SEQ ID NO: 3618775 - RNA, 18 nt, Human
ugcugcugagaaccuggc

SEQ ID NO: 3618776 - RNA, 19 nt, Human
ugcugcugagaaccuggcc

SEQ ID NO: 3618777 - RNA, 22 nt, Human
ugcugcugagaaccuggccuuc

SEQ ID NO: 3618778 - RNA, 19 nt, Human
ugcugcugccccugcacag

SEQ ID NO: 3618779 - RNA, 17 nt, Human
ugcugcugccucuuucc

SEQ ID NO: 3618780 - RNA, 13 nt, Human
ugcugcugccugg

SEQ ID NO: 3618781 - RNA, 12 nt, Human
ugcugcugcugc

SEQ ID NO: 3618782 - RNA, 13 nt, Human
ugcugcugggcuc

SEQ ID NO: 3618783 - RNA, 19 nt, Human
ugcugcuggggaagacagu

SEQ ID NO: 3618784 - RNA, 20 nt, Human
ugcugcuggggaagacagug

SEQ ID NO: 3618785 - RNA, 22 nt, Human
ugcugcuggggaagacaguggc

SEQ ID NO: 3618786 - RNA, 24 nt, Human
ugcugcuggggaagacaguggccc

SEQ ID NO: 3618787 - RNA, 18 nt, Human
uggcgcgaucucagcuca

SEQ ID NO: 3618788 - RNA, 16 nt, Human
uggcgcugccccuggc

SEQ ID NO: 3618789 - RNA, 23 nt, Human
uggcggcagcagccaucauagga

SEQ ID NO: 3618790 - RNA, 15 nt, Human
uggcggcuacucagc

SEQ ID NO: 3618791 - RNA, 17 nt, Human
uggcggcuacucagcag

SEQ ID NO: 3618792 - RNA, 21 nt, Human
uggcggcuacucagcagcccu

SEQ ID NO: 3618793 - RNA, 23 nt, Human
uggcggcuacucagcagcccucc

SEQ ID NO: 3618794 - RNA, 16 nt, Human
uggcgggaugggccac

SEQ ID NO: 3618795 - RNA, 13 nt, Human
uggcgggccaagg

SEQ ID NO: 3618796 - RNA, 15 nt, Human
uggcgggguggggug

SEQ ID NO: 3618797 - RNA, 21 nt, Human
uggcguaaguacagagaagcc

SEQ ID NO: 3618798 - RNA, 22 nt, Human
uggcguaaguacagagaagcca

SEQ ID NO: 3618799 - RNA, 23 nt, Human
uggcguaaguacagagaagccau

SEQ ID NO: 3618800 - RNA, 22 nt, Human
uggcguagcagaguuaaaucuc

SEQ ID NO: 3618801 - RNA, 16 nt, Human
uggcguaggcuacaga

SEQ ID NO: 3618802 - RNA, 17 nt, Human
uggcguaggcuacagag

SEQ ID NO: 3618803 - RNA, 21 nt, Human
uggcguaggcuacagagaagc

SEQ ID NO: 3618804 - RNA, 15 nt, Human
uggcgucugucuuca

SEQ ID NO: 3618805 - RNA, 17 nt, Human
uggcgucugucuucaag

SEQ ID NO: 3618806 - RNA, 13 nt, Human
uggcguggauuaa

SEQ ID NO: 3618807 - RNA, 18 nt, Human
uggcuaaagauaauugcu

SEQ ID NO: 3618808 - RNA, 22 nt, Human
uggcuaaagauaauugcuauuu

SEQ ID NO: 3618809 - RNA, 14 nt, Human
uggcuaaccaagag

SEQ ID NO: 3618810 - RNA, 20 nt, Human
uggcuaacuuacaaagauuc

SEQ ID NO: 3618811 - RNA, 16 nt, Human
uggcuaacuuggguua

SEQ ID NO: 3618812 - RNA, 18 nt, Human
uggcuaagcaaaauguga

SEQ ID NO: 3618813 - RNA, 17 nt, Human
uggcuaagcuuaaaaaa

SEQ ID NO: 3618814 - RNA, 17 nt, Human
uggcuaauguacugcau

SEQ ID NO: 3618815 - RNA, 15 nt, Human
uggcuaauucccaga

SEQ ID NO: 3618816 - RNA, 18 nt, Human
uggcuacgccucuucugu

SEQ ID NO: 3618817 - RNA, 15 nt, Human
uggcuacucugugcc

SEQ ID NO: 3618818 - RNA, 16 nt, Human
uggcuacucugugcca

SEQ ID NO: 3618819 - RNA, 17 nt, Human
uggcuacucugugccag

SEQ ID NO: 3618820 - RNA, 18 nt, Human
uggcuacucugugccaga

SEQ ID NO: 3618821 - RNA, 21 nt, Human
uggcuacucugugccagagcc

SEQ ID NO: 3618822 - RNA, 21 nt, Human
uggcuagaggccagccccacc

SEQ ID NO: 3618823 - RNA, 23 nt, Human
uggcuagaggccagccccaccca

SEQ ID NO: 3618824 - RNA, 22 nt, Human
uggcuagagguucaaagauauu

SEQ ID NO: 3618825 - RNA, 16 nt, Human
uggcuagaguccucac

SEQ ID NO: 3618826 - RNA, 17 nt, Human
uggcuaggggagcaggg

SEQ ID NO: 3618827 - RNA, 22 nt, Human
uggcuagucaagcuccuccucc

SEQ ID NO: 3618828 - RNA, 16 nt, Human
uggcuagucagagaga

SEQ ID NO: 3618829 - RNA, 13 nt, Human
uggcuauaaauau

SEQ ID NO: 3618830 - RNA, 15 nt, Human
uggcuauaggugcua

SEQ ID NO: 3618831 - RNA, 19 nt, Human
uggcuauaggugcuacaaa

SEQ ID NO: 3618832 - RNA, 21 nt, Human
uggcuauauggcaagaaagcu

SEQ ID NO: 3618833 - RNA, 13 nt, Human
uggcuauccugau

SEQ ID NO: 3618834 - RNA, 14 nt, Human
uggcuauccugauu

SEQ ID NO: 3618835 - RNA, 15 nt, Human
uggcuaugcauuuga

SEQ ID NO: 3618836 - RNA, 17 nt, Human
uggcuauguuuuuaaug

SEQ ID NO: 3618837 - RNA, 22 nt, Human
uggcuauuagagaucaaccccu

SEQ ID NO: 3618838 - RNA, 19 nt, Human
uggcucacaccuguaaucc

SEQ ID NO: 3618839 - RNA, 22 nt, Human
uggcucacaccuguaaucccag

SEQ ID NO: 3618840 - RNA, 21 nt, Human
uggcucacacucgacaugaaa

SEQ ID NO: 3618841 - RNA, 12 nt, Human
uggcucacacug

SEQ ID NO: 3618842 - RNA, 17 nt, Human
uggcucacagacuggag

SEQ ID NO: 3618843 - RNA, 22 nt, Human
uggcucacaguacagcaugugc

SEQ ID NO: 3618844 - RNA, 24 nt, Human
uggcucacaguacagcaugugccu

SEQ ID NO: 3618845 - RNA, 16 nt, Human
uggcucacccaguccu

SEQ ID NO: 3618846 - RNA, 13 nt, Human
uggcucacgccug

SEQ ID NO: 3618847 - RNA, 20 nt, Human
uggcucacuaugaaucuauu

SEQ ID NO: 3618848 - RNA, 21 nt, Human
uggcucacuauggugccaaug

SEQ ID NO: 3618849 - RNA, 17 nt, Human
uggcucacucagcacuu

SEQ ID NO: 3618850 - RNA, 22 nt, Human
uggcucacucagcacuuggccc

SEQ ID NO: 3618851 - RNA, 21 nt, Human
uggcucacugcaacuucugcc

SEQ ID NO: 3618852 - RNA, 16 nt, Human
uggcucacugcagccu

SEQ ID NO: 3618853 - RNA, 18 nt, Human
uggcucacugcagccucg

SEQ ID NO: 3618854 - RNA, 22 nt, Human
uggcucagagggggacugcugc

SEQ ID NO: 3618855 - RNA, 13 nt, Human
uggcucagccagc

SEQ ID NO: 3618856 - RNA, 24 nt, Human
uggcucagcucggggagccuuagc

SEQ ID NO: 3618857 - RNA, 14 nt, Human
uggcucaggguggu

SEQ ID NO: 3618858 - RNA, 19 nt, Human
uggcucauauuccugcagc

SEQ ID NO: 3618859 - RNA, 21 nt, Human
uggcucauauuccugcagccu

SEQ ID NO: 3618860 - RNA, 20 nt, Human
uggcuccagaaaugucuaaa

SEQ ID NO: 3618861 - RNA, 15 nt, Human
uggcuccagucugcu

SEQ ID NO: 3618862 - RNA, 20 nt, Human
uggcuccagucugcugcccu

SEQ ID NO: 3618863 - RNA, 20 nt, Human
uggcuccauugguguugaca

SEQ ID NO: 3618864 - RNA, 19 nt, Human
uggcucccacaggcagcuu

SEQ ID NO: 3618865 - RNA, 14 nt, Human
uggcucccaggggc

SEQ ID NO: 3618866 - RNA, 14 nt, Human
uggcucccaugacc

SEQ ID NO: 3618867 - RNA, 20 nt, Human
uggcucccaugaccauacug

SEQ ID NO: 3618868 - RNA, 18 nt, Human
uggcucccauucacucuu

SEQ ID NO: 3618869 - RNA, 14 nt, Human
uggcuccccaaagg

SEQ ID NO: 3618870 - RNA, 24 nt, Human
uggcuccccugcagcccuggccca

SEQ ID NO: 3618871 - RNA, 15 nt, Human
uggcuccccuggggu

SEQ ID NO: 3618872 - RNA, 17 nt, Human
uggugacugugggcucc

SEQ ID NO: 3618873 - RNA, 22 nt, Human
uggugagaaauuucugugaaac

SEQ ID NO: 3618874 - RNA, 12 nt, Human
uggugagcauua

SEQ ID NO: 3618875 - RNA, 18 nt, Human
uggugagcauuacaggca

SEQ ID NO: 3618876 - RNA, 16 nt, Human
uggugaggaagcucca

SEQ ID NO: 3618877 - RNA, 13 nt, Human
uggugaggagcac

SEQ ID NO: 3618878 - RNA, 17 nt, Human
uggugagguugggcagc

SEQ ID NO: 3618879 - RNA, 20 nt, Human
uggugagucuuggcggcagc

SEQ ID NO: 3618880 - RNA, 15 nt, Human
uggugaguuaggaac

SEQ ID NO: 3618881 - RNA, 19 nt, Human
uggugaucaauuaaaugua

SEQ ID NO: 3618882 - RNA, 20 nt, Human
uggugauuugaaaaauauaa

SEQ ID NO: 3618883 - RNA, 21 nt, Human
uggugauuugaaaaauauaaa

SEQ ID NO: 3618884 - RNA, 18 nt, Human
uggugauuuuaaaugugu

SEQ ID NO: 3618885 - RNA, 23 nt, Human
uggugcaaguugaggacuucuug

SEQ ID NO: 3618886 - RNA, 14 nt, Human
uggugcaaugaccu

SEQ ID NO: 3618887 - RNA, 22 nt, Human
uggugcaauguguguauaugga

SEQ ID NO: 3618888 - RNA, 17 nt, Human
uggugcacuuuguaaau

SEQ ID NO: 3618889 - RNA, 21 nt, Human
uggugcagguagaccugucuc

SEQ ID NO: 3618890 - RNA, 15 nt, Human
uggugcagugugaaa

SEQ ID NO: 3618891 - RNA, 17 nt, Human
uggugccaauggaaccu

SEQ ID NO: 3618892 - RNA, 22 nt, Human
uggugccaauggaaccuccuuu

SEQ ID NO: 3618893 - RNA, 15 nt, Human
uggugccaauuucaa

SEQ ID NO: 3618894 - RNA, 20 nt, Human
uggugccacaaauaaaaugg

SEQ ID NO: 3618895 - RNA, 14 nt, Human
uggugccagccuuc

SEQ ID NO: 3618896 - RNA, 21 nt, Human
uggugccagccuuccucugca

SEQ ID NO: 3618897 - RNA, 21 nt, Human
uggugccauccccagggggca

SEQ ID NO: 3618898 - RNA, 13 nt, Human
uguagauuugauu

SEQ ID NO: 3618899 - RNA, 16 nt, Human
uguagauuugauuuuu

SEQ ID NO: 3618900 - RNA, 18 nt, Human
uguagcaaacccugucaa

SEQ ID NO: 3618901 - RNA, 20 nt, Human
uguagcaacuacagucuaaa

SEQ ID NO: 3618902 - RNA, 22 nt, Human
uguagcacugacagauuuccau

SEQ ID NO: 3618903 - RNA, 12 nt, Human
uguagcagaaag

SEQ ID NO: 3618904 - RNA, 16 nt, Human
uguagcauccuggaau

SEQ ID NO: 3618905 - RNA, 18 nt, Human
uguagcauccuggaauau

SEQ ID NO: 3618906 - RNA, 13 nt, Human
uguagccacacca

SEQ ID NO: 3618907 - RNA, 12 nt, Human
uguagccagccg

SEQ ID NO: 3618908 - RNA, 20 nt, Human
uguagccaggucccccugca

SEQ ID NO: 3618909 - RNA, 16 nt, Human
uguagcccacacuuga

SEQ ID NO: 3618910 - RNA, 16 nt, Human
uguagcccaggcugga

SEQ ID NO: 3618911 - RNA, 21 nt, Human
uguagccccagugacagcuag

SEQ ID NO: 3618912 - RNA, 18 nt, Human
uguagccccucuccugga

SEQ ID NO: 3618913 - RNA, 21 nt, Human
uguagcccucccacuuugcug

SEQ ID NO: 3618914 - RNA, 23 nt, Human
uguagccucaaucgagugagaca

SEQ ID NO: 3618915 - RNA, 22 nt, Human
uguagccucgccgucugugaau

SEQ ID NO: 3618916 - RNA, 16 nt, Human
uguagccugugcaugu

SEQ ID NO: 3618917 - RNA, 15 nt, Human
uguagccuucacaca

SEQ ID NO: 3618918 - RNA, 16 nt, Human
uguagccuugcccgga

SEQ ID NO: 3618919 - RNA, 18 nt, Human
uguagccuuuugacuuuc

SEQ ID NO: 3618920 - RNA, 13 nt, Human
uguagccuuuuug

SEQ ID NO: 3618921 - RNA, 15 nt, Human
uguagcgucuuucuu

SEQ ID NO: 3618922 - RNA, 17 nt, Human
uguagcguguuuacaug

SEQ ID NO: 3618923 - RNA, 21 nt, Human
uguagcguguuuacaugugua

SEQ ID NO: 3618924 - RNA, 21 nt, Human
uguagcuacagagaaaccagc

SEQ ID NO: 3618925 - RNA, 20 nt, Human
uguagcuauaaugagcaugu

SEQ ID NO: 3618926 - RNA, 17 nt, Human
uguagcuccuccccugg

SEQ ID NO: 3618927 - RNA, 16 nt, Human
uguagcugugaccugc

SEQ ID NO: 3618928 - RNA, 20 nt, Human
uguagcugugaccugcugag

SEQ ID NO: 3618929 - RNA, 16 nt, Human
uguagcuucagucauu

SEQ ID NO: 3618930 - RNA, 12 nt, Human
uguagcuuugcu

SEQ ID NO: 3618931 - RNA, 15 nt, Human
uguagcuuuucaccu

SEQ ID NO: 3618932 - RNA, 21 nt, Human
uguaggaagaguagcauuuca

SEQ ID NO: 3618933 - RNA, 23 nt, Human
uguaggaagaguagcauuucauu

SEQ ID NO: 3618934 - RNA, 16 nt, Human
uguaggaagguacugu

SEQ ID NO: 3618935 - RNA, 20 nt, Human
uguaggaauucuuuugggga

SEQ ID NO: 3618936 - RNA, 11 nt, Human
uguaggagaau

SEQ ID NO: 3618937 - RNA, 13 nt, Human
uguaggagacuug

SEQ ID NO: 3618938 - RNA, 22 nt, Human
uguaggagacuugccagagccg

SEQ ID NO: 3618939 - RNA, 12 nt, Human
uguaggcagaca

SEQ ID NO: 3618940 - RNA, 15 nt, Human
uguaggcagacacag

SEQ ID NO: 3618941 - RNA, 17 nt, Human
uguaggcauaaagucag

SEQ ID NO: 3618942 - RNA, 17 nt, Human
uguaggcaucaugcaug

SEQ ID NO: 3618943 - RNA, 17 nt, Human
uguaggcuuaguuugug

SEQ ID NO: 3618944 - RNA, 17 nt, Human
uguaggcuuuacuuagc

SEQ ID NO: 3618945 - RNA, 20 nt, Human
uguaggcuuuacuuagcuua

SEQ ID NO: 3618946 - RNA, 12 nt, Human
uguagggaacuc

SEQ ID NO: 3618947 - RNA, 12 nt, Human
uguagggcugga

SEQ ID NO: 3618948 - RNA, 18 nt, Human
uguaggguaaggugccuu

SEQ ID NO: 3618949 - RNA, 20 nt, Human
uguaggguccaaccagaccu

SEQ ID NO: 3618950 - RNA, 16 nt, Human
uguaggguuacagaga

SEQ ID NO: 3618951 - RNA, 13 nt, Human
uguaggguuucua

SEQ ID NO: 3618952 - RNA, 13 nt, Human
uguagguaaaaug

SEQ ID NO: 3618953 - RNA, 14 nt, Human
uguagguaagacug

SEQ ID NO: 3618954 - RNA, 20 nt, Human
uguaggugcaagauggaaag

SEQ ID NO: 3618955 - RNA, 14 nt, Human
uguagguugcacac

SEQ ID NO: 3618956 - RNA, 18 nt, Human
uguagguugcacacuuug

SEQ ID NO: 3618957 - RNA, 19 nt, Human
uguaguaaagccguuguuu

SEQ ID NO: 3618958 - RNA, 22 nt, Human
uguaguaaagccguuguuuacu

SEQ ID NO: 3618959 - RNA, 14 nt, Human
uguaguaacacuaa

SEQ ID NO: 3618960 - RNA, 15 nt, Human
uguaguaacacuaau

SEQ ID NO: 3618961 - RNA, 20 nt, Human
uguaguaacacuaauauauu

SEQ ID NO: 3618962 - RNA, 19 nt, Human
uguaguaauugacaugugc

SEQ ID NO: 3618963 - RNA, 14 nt, Human
uguaguagucucau

SEQ ID NO: 3618964 - RNA, 15 nt, Human
uguagucauuuacua

SEQ ID NO: 3618965 - RNA, 19 nt, Human
uguagucauuuacuaaaca

SEQ ID NO: 3618966 - RNA, 17 nt, Human
uguagucccagcuacuc

SEQ ID NO: 3618967 - RNA, 23 nt, Human
uguagucccagcuacuugggagg

SEQ ID NO: 3618968 - RNA, 14 nt, Human
uguagucucaggac

SEQ ID NO: 3618969 - RNA, 17 nt, Human
uguagugagauagcauu

SEQ ID NO: 3618970 - RNA, 20 nt, Human
uguagugauuuuuaugccac

SEQ ID NO: 3618971 - RNA, 21 nt, Human
uguagugccucuuucauccac

SEQ ID NO: 3618972 - RNA, 15 nt, Human
uguagugcuacaggg

SEQ ID NO: 3618973 - RNA, 15 nt, Human
uguagugcuuugaga

SEQ ID NO: 3618974 - RNA, 22 nt, Human
uguagugcuuugagagagaaag

SEQ ID NO: 3618975 - RNA, 20 nt, Human
uguaguguccauuuugugaa

SEQ ID NO: 3618976 - RNA, 18 nt, Human
uguaguguucagaaaaaa

SEQ ID NO: 3618977 - RNA, 14 nt, Human
uguaguguuggaga

SEQ ID NO: 3618978 - RNA, 17 nt, Human
uguccaagaagcccagg

SEQ ID NO: 3618979 - RNA, 18 nt, Human
uguccaagaagcccagga

SEQ ID NO: 3618980 - RNA, 22 nt, Human
uguccaagaagcccaggaaagg

SEQ ID NO: 3618981 - RNA, 23 nt, Human
uguccaagaagcccaggaaaggc

SEQ ID NO: 3618982 - RNA, 14 nt, Human
uguccaaggaaacu

SEQ ID NO: 3618983 - RNA, 15 nt, Human
uguccacacccagcu

SEQ ID NO: 3618984 - RNA, 19 nt, Human
uguccacagaugccuccac

SEQ ID NO: 3618985 - RNA, 20 nt, Human
uguccacagaugccuccacc

SEQ ID NO: 3618986 - RNA, 16 nt, Human
uguccacaggcuucug

SEQ ID NO: 3618987 - RNA, 12 nt, Human
uguccaccccca

SEQ ID NO: 3618988 - RNA, 15 nt, Human
uguccaccuggcccc

SEQ ID NO: 3618989 - RNA, 16 nt, Human
uguccacgacugucuc

SEQ ID NO: 3618990 - RNA, 19 nt, Human
uguccacgacugucuccau

SEQ ID NO: 3618991 - RNA, 23 nt, Human
uguccacgcgugccguggcacca

SEQ ID NO: 3618992 - RNA, 16 nt, Human
uguccagaagaauauu

SEQ ID NO: 3618993 - RNA, 21 nt, Human
uguccagaagaauauucagga

SEQ ID NO: 3618994 - RNA, 22 nt, Human
uguccagacagagcccugugag

SEQ ID NO: 3618995 - RNA, 13 nt, Human
uguccagacagcc

SEQ ID NO: 3618996 - RNA, 15 nt, Human
uguccagacagccug

SEQ ID NO: 3618997 - RNA, 11 nt, Human
uguccagagag

SEQ ID NO: 3618998 - RNA, 23 nt, Human
uguccagagagagaagugccccu

SEQ ID NO: 3618999 - RNA, 12 nt, Human
uguccagcaccu

SEQ ID NO: 3619000 - RNA, 17 nt, Human
uguccagcauugcugga

SEQ ID NO: 3619001 - RNA, 19 nt, Human
uguccagcauugcuggacu

SEQ ID NO: 3619002 - RNA, 20 nt, Human
uguccagccccguagacgug

SEQ ID NO: 3619003 - RNA, 12 nt, Human
uguccagccugg

SEQ ID NO: 3619004 - RNA, 12 nt, Human
uguccagcucca

SEQ ID NO: 3619005 - RNA, 23 nt, Human
uguccagcuccaaccugcaaaga

SEQ ID NO: 3619006 - RNA, 17 nt, Human
uguccagcugagcgcca

SEQ ID NO: 3619007 - RNA, 17 nt, Human
uguccagggcccugagc

SEQ ID NO: 3619008 - RNA, 19 nt, Human
uguccaguaagaucacugu

SEQ ID NO: 3619009 - RNA, 21 nt, Human
uguccaguaagaucacuguuu

SEQ ID NO: 3619010 - RNA, 23 nt, Human
uguccaguggguagguuggacug

SEQ ID NO: 3619011 - RNA, 19 nt, Human
uguccugagccccagggag

SEQ ID NO: 3619012 - RNA, 12 nt, Human
uguccugagcuc

SEQ ID NO: 3619013 - RNA, 21 nt, Human
uguccugauggucagcucccu

SEQ ID NO: 3619014 - RNA, 22 nt, Human
uguccugccuaaggcugaacuu

SEQ ID NO: 3619015 - RNA, 15 nt, Human
uguccugccugucug

SEQ ID NO: 3619016 - RNA, 21 nt, Human
uguccugccugucugccccag

SEQ ID NO: 3619017 - RNA, 15 nt, Human
uguccugcuccacag

SEQ ID NO: 3619018 - RNA, 12 nt, Human
uguccugggagu

SEQ ID NO: 3619019 - RNA, 20 nt, Human
uguccugggagugagcuggu

SEQ ID NO: 3619020 - RNA, 11 nt, Human
uguccugggcg

SEQ ID NO: 3619021 - RNA, 20 nt, Human
uguccuggugcucucugcca

SEQ ID NO: 3619022 - RNA, 16 nt, Human
uguccuggugucacuu

SEQ ID NO: 3619023 - RNA, 17 nt, Human
uguccugguuagcagag

SEQ ID NO: 3619024 - RNA, 22 nt, Human
uguccuguaaacacucagcugu

SEQ ID NO: 3619025 - RNA, 16 nt, Human
uguccuguaacuguua

SEQ ID NO: 3619026 - RNA, 18 nt, Human
uguccuguaacuguuaca

SEQ ID NO: 3619027 - RNA, 19 nt, Human
uguccugucaucaucaugg

SEQ ID NO: 3619028 - RNA, 14 nt, Human
uguccuguccugcu

SEQ ID NO: 3619029 - RNA, 18 nt, Human
uguccugugagaugugua

SEQ ID NO: 3619030 - RNA, 20 nt, Human
uguccugugagauguguauc

SEQ ID NO: 3619031 - RNA, 13 nt, Human
uguccugugaggu

SEQ ID NO: 3619032 - RNA, 20 nt, Human
uguccugugagguuucccaa

SEQ ID NO: 3619033 - RNA, 13 nt, Human
ugugcugcccugc

SEQ ID NO: 3619034 - RNA, 20 nt, Human
ugugcugcccugcccaccug

SEQ ID NO: 3619035 - RNA, 21 nt, Human
ugugcugcccugcccaccugg

SEQ ID NO: 3619036 - RNA, 17 nt, Human
ugugcugcuguaagaaa

SEQ ID NO: 3619037 - RNA, 13 nt, Human
ugugcuggagaug

SEQ ID NO: 3619038 - RNA, 18 nt, Human
ugugcuggagauguuuua

SEQ ID NO: 3619039 - RNA, 13 nt, Human
ugugcuggagcca

SEQ ID NO: 3619040 - RNA, 19 nt, Human
ugugcuggagccacuaacu

SEQ ID NO: 3619041 - RNA, 11 nt, Human
ugugcuggggg

SEQ ID NO: 3619042 - RNA, 19 nt, Human
ugugcugggguuaucugaa

SEQ ID NO: 3619043 - RNA, 19 nt, Human
ugugcugugcuauggugcu

SEQ ID NO: 3619044 - RNA, 16 nt, Human
ugugcuguggaagcaa

SEQ ID NO: 3619045 - RNA, 13 nt, Human
ugugcuguguaaa

SEQ ID NO: 3619046 - RNA, 15 nt, Human
ugugcuguguaaagu

SEQ ID NO: 3619047 - RNA, 23 nt, Human
ugugcuguguaaaguuagucuac

SEQ ID NO: 3619048 - RNA, 20 nt, Human
ugugcuguguuugcuccccu

SEQ ID NO: 3619049 - RNA, 14 nt, Human
ugugcuguuguuau

SEQ ID NO: 3619050 - RNA, 16 nt, Human
ugugcuguuguuauga

SEQ ID NO: 3619051 - RNA, 20 nt, Human
ugugcuguuguuaugaugug

SEQ ID NO: 3619052 - RNA, 23 nt, Human
ugugcuguuguuaugaugugcuu

SEQ ID NO: 3619053 - RNA, 15 nt, Human
ugugcuguuucaaag

SEQ ID NO: 3619054 - RNA, 18 nt, Human
ugugcuguuucaaaguuc

SEQ ID NO: 3619055 - RNA, 12 nt, Human
ugugcuucuccc

SEQ ID NO: 3619056 - RNA, 16 nt, Human
ugugcuucuccccaga

SEQ ID NO: 3619057 - RNA, 18 nt, Human
ugugcuucuccccagaau

SEQ ID NO: 3619058 - RNA, 15 nt, Human
ugugcuucugccacc

SEQ ID NO: 3619059 - RNA, 14 nt, Human
ugugcuucuuucuu

SEQ ID NO: 3619060 - RNA, 21 nt, Human
ugugcuucuuucuuugggaau

SEQ ID NO: 3619061 - RNA, 14 nt, Human
ugugcuuguuaacu

SEQ ID NO: 3619062 - RNA, 14 nt, Human
ugugcuuguuuaca

SEQ ID NO: 3619063 - RNA, 18 nt, Human
ugugcuuuccagcucacc

SEQ ID NO: 3619064 - RNA, 22 nt, Human
ugugcuuucccugaacugggac

SEQ ID NO: 3619065 - RNA, 17 nt, Human
ugugcuuucuauuguac

SEQ ID NO: 3619066 - RNA, 20 nt, Human
ugugcuuugacucaccuguu

SEQ ID NO: 3619067 - RNA, 17 nt, Human
ugugcuuugcucuuguc

SEQ ID NO: 3619068 - RNA, 14 nt, Human
ugugcuuuuccuau

SEQ ID NO: 3619069 - RNA, 21 nt, Human
ugugcuuuuccugauaaagca

SEQ ID NO: 3619070 - RNA, 17 nt, Human
ugugcuuuuuuugugug

SEQ ID NO: 3619071 - RNA, 13 nt, Human
uguggaaaacaga

SEQ ID NO: 3619072 - RNA, 16 nt, Human
uguggaaaagauggca

SEQ ID NO: 3619073 - RNA, 21 nt, Human
uguggaaagucacaggucaca

SEQ ID NO: 3619074 - RNA, 14 nt, Human
uguggaaaguguaa

SEQ ID NO: 3619075 - RNA, 17 nt, Human
uguggaaaguguaaagc

SEQ ID NO: 3619076 - RNA, 19 nt, Human
uguggaacauaaaaaggac

SEQ ID NO: 3619077 - RNA, 15 nt, Human
uguggaacccagcag

SEQ ID NO: 3619078 - RNA, 15 nt, Human
uguggaacugcugcc

SEQ ID NO: 3619079 - RNA, 22 nt, Human
uguggaacugcugccacugagg

SEQ ID NO: 3619080 - RNA, 22 nt, Human
uguggaagaaaaugguuuauuu

SEQ ID NO: 3619081 - RNA, 22 nt, Human
uguggaaggcaagccaggcuca

SEQ ID NO: 3619082 - RNA, 18 nt, Human
uguggaaugagugugcau

SEQ ID NO: 3619083 - RNA, 15 nt, Human
uguggacacagcucu

SEQ ID NO: 3619084 - RNA, 16 nt, Human
uguggacacagcucuu

SEQ ID NO: 3619085 - RNA, 14 nt, Human
uguggacaggacua

SEQ ID NO: 3619086 - RNA, 22 nt, Human
uguggaccauggaguggcagcc

SEQ ID NO: 3619087 - RNA, 16 nt, Human
uguggacuaaaagaua

SEQ ID NO: 3619088 - RNA, 19 nt, Human
uguggacuaaaagauauaa

SEQ ID NO: 3619089 - RNA, 21 nt, Human
uguggacuaaaagauauaagu

SEQ ID NO: 3619090 - RNA, 22 nt, Human
uguggacucuggugccuccaga

SEQ ID NO: 3619091 - RNA, 23 nt, Human
uguggacucuggugccuccagag

SEQ ID NO: 3619092 - RNA, 23 nt, Human
uguggacuguggcacuugccugg

SEQ ID NO: 3619093 - RNA, 13 nt, Human
uguggagaaagga

SEQ ID NO: 3619094 - RNA, 15 nt, Human
uguggagacugcucc

SEQ ID NO: 3619095 - RNA, 23 nt, Human
uguggagacugcuccugagcccc

SEQ ID NO: 3619096 - RNA, 13 nt, Human
uguggagacuggg

SEQ ID NO: 3619097 - RNA, 20 nt, Human
uguggagcacaaaagccucu

SEQ ID NO: 3619098 - RNA, 11 nt, Human
uguggagccag

SEQ ID NO: 3619099 - RNA, 16 nt, Human
uguggagcucagcccc

SEQ ID NO: 3619100 - RNA, 14 nt, Human
uguggaggaaggau

SEQ ID NO: 3619101 - RNA, 15 nt, Human
uguggaggaaggauu

SEQ ID NO: 3619102 - RNA, 17 nt, Human
uguggaggaaggauugu

SEQ ID NO: 3619103 - RNA, 16 nt, Human
uguggagucauucuca

SEQ ID NO: 3619104 - RNA, 17 nt, Human
uguggagucauuucuga

SEQ ID NO: 3619105 - RNA, 18 nt, Human
uguggaguggggcaguag

SEQ ID NO: 3619106 - RNA, 21 nt, Human
uguggaguucaucuugaauug

SEQ ID NO: 3619107 - RNA, 19 nt, Human
uguggauaacaaagauauc

SEQ ID NO: 3619108 - RNA, 21 nt, Human
uguggaucaaauccagccugc

SEQ ID NO: 3619109 - RNA, 20 nt, Human
uguggaucaaccaucgcuuu

SEQ ID NO: 3619110 - RNA, 17 nt, Human
uguggaucagagaugca

SEQ ID NO: 3619111 - RNA, 17 nt, Human
uguggauccaauguuag

SEQ ID NO: 3619112 - RNA, 19 nt, Human
uguggaucuuuucauucuc

SEQ ID NO: 3619113 - RNA, 19 nt, Human
uguggaugagcccucagaa

SEQ ID NO: 3619114 - RNA, 14 nt, Human
uguggaugauaaaa

SEQ ID NO: 3619115 - RNA, 15 nt, Human
uguggaugucuuccu

SEQ ID NO: 3619116 - RNA, 22 nt, Human
uguggauguuuuaauuccauga

SEQ ID NO: 3619117 - RNA, 17 nt, Human
uguggauucugaggccc

SEQ ID NO: 3619118 - RNA, 14 nt, Human
uguggauucuuuaa

SEQ ID NO: 3619119 - RNA, 22 nt, Human
uguggauuuaacagaaauguac

SEQ ID NO: 3619120 - RNA, 15 nt, Human
uguggauuucaguuu

SEQ ID NO: 3619121 - RNA, 21 nt, Human
uguggauuuuugugguaguga

SEQ ID NO: 3619122 - RNA, 18 nt, Human
uguggcaagccccugccc

SEQ ID NO: 3619123 - RNA, 17 nt, Human
uguggcaaggaaaaaca

SEQ ID NO: 3619124 - RNA, 14 nt, Human
uguggcaagugaau

SEQ ID NO: 3619125 - RNA, 14 nt, Human
uguggcacauuuuu

SEQ ID NO: 3619126 - RNA, 15 nt, Human
uguggcacuugccug

SEQ ID NO: 3619127 - RNA, 15 nt, Human
uguggcagaguuaca

SEQ ID NO: 3619128 - RNA, 21 nt, Human
uguggcagaguuacaguucug

SEQ ID NO: 3619129 - RNA, 16 nt, Human
uguggcagcugucuca

SEQ ID NO: 3619130 - RNA, 19 nt, Human
uguggcaguaaagagaaac

SEQ ID NO: 3619131 - RNA, 17 nt, Human
uguggcaucuuugccuu

SEQ ID NO: 3619132 - RNA, 19 nt, Human
uguggccaaggagcugcua

SEQ ID NO: 3619133 - RNA, 18 nt, Human
uguggccaaguucuuagu

SEQ ID NO: 3619134 - RNA, 12 nt, Human
uguggccaggag

SEQ ID NO: 3619135 - RNA, 14 nt, Human
uguggccaggaggu

SEQ ID NO: 3619136 - RNA, 19 nt, Human
uguggccagggugagagcu

SEQ ID NO: 3619137 - RNA, 20 nt, Human
uguggccagggugagagcug

SEQ ID NO: 3619138 - RNA, 23 nt, Human
uguggccccacccugggcccugg

SEQ ID NO: 3619139 - RNA, 17 nt, Human
uguggccccugaacaag

SEQ ID NO: 3619140 - RNA, 13 nt, Human
uguggcccugcca

SEQ ID NO: 3619141 - RNA, 20 nt, Human
uguggcccuggccugcuggg

SEQ ID NO: 3619142 - RNA, 18 nt, Human
uguggccguuaucuggaa

SEQ ID NO: 3619143 - RNA, 23 nt, Human
uguggccucagcucccacaagcc

SEQ ID NO: 3619144 - RNA, 11 nt, Human
uguggccugca

SEQ ID NO: 3619145 - RNA, 14 nt, Human
uguggccugccagu

SEQ ID NO: 3619146 - RNA, 20 nt, Human
uguggccuuccauuuauaug

SEQ ID NO: 3619147 - RNA, 23 nt, Human
uguggcgcagcauauucaggaag

SEQ ID NO: 3619148 - RNA, 13 nt, Human
uguggcggugccu

SEQ ID NO: 3619149 - RNA, 10 nt, Human
uguggcucac

SEQ ID NO: 3619150 - RNA, 22 nt, Human
uguggcucacgugagagugucu

SEQ ID NO: 3619151 - RNA, 17 nt, Human
uguggcuccaggccaaa

SEQ ID NO: 3619152 - RNA, 23 nt, Human
uguggcuccccucuauuuagcau

SEQ ID NO: 3619153 - RNA, 20 nt, Human
uguggcuccuaucuguguuu

SEQ ID NO: 3619154 - RNA, 21 nt, Human
uguggcuccuggggguucuuu

SEQ ID NO: 3619155 - RNA, 22 nt, Human
uguggcugaggaggccuccauc

SEQ ID NO: 3619156 - RNA, 14 nt, Human
uguggcugcuagca

SEQ ID NO: 3619157 - RNA, 19 nt, Human
uguggcuuucagccucugg

SEQ ID NO: 3619158 - RNA, 15 nt, Human
ugugggaaggccagc

SEQ ID NO: 3619159 - RNA, 14 nt, Human
uguuauguacugua

SEQ ID NO: 3619160 - RNA, 20 nt, Human
uguuauguagugugcuuuuu

SEQ ID NO: 3619161 - RNA, 12 nt, Human
uguuauguauuu

SEQ ID NO: 3619162 - RNA, 17 nt, Human
uguuauguuuaauaagc

SEQ ID NO: 3619163 - RNA, 21 nt, Human
uguuauguuuucgaaaaucaa

SEQ ID NO: 3619164 - RNA, 13 nt, Human
uguuauuaaaugu

SEQ ID NO: 3619165 - RNA, 17 nt, Human
uguuauuacauccuugu

SEQ ID NO: 3619166 - RNA, 23 nt, Human
uguuauuagagauuaccuccuga

SEQ ID NO: 3619167 - RNA, 14 nt, Human
uguuauuagauguu

SEQ ID NO: 3619168 - RNA, 21 nt, Human
uguuauuauagagcagaaauu

SEQ ID NO: 3619169 - RNA, 22 nt, Human
uguuauuauagagcagaaauuc

SEQ ID NO: 3619170 - RNA, 12 nt, Human
uguuauuauaua

SEQ ID NO: 3619171 - RNA, 23 nt, Human
uguuauuaucugggcuuauaucu

SEQ ID NO: 3619172 - RNA, 16 nt, Human
uguuauucuuugcacu

SEQ ID NO: 3619173 - RNA, 16 nt, Human
uguuauugaaaaaaau

SEQ ID NO: 3619174 - RNA, 21 nt, Human
uguuauugggcaagugauuga

SEQ ID NO: 3619175 - RNA, 13 nt, Human
uguuauugugaau

SEQ ID NO: 3619176 - RNA, 14 nt, Human
uguuauuuaaagaa

SEQ ID NO: 3619177 - RNA, 18 nt, Human
uguuauuuaacagcugaa

SEQ ID NO: 3619178 - RNA, 15 nt, Human
uguuauuuauugaaa

SEQ ID NO: 3619179 - RNA, 17 nt, Human
uguuauuuauugaaaug

SEQ ID NO: 3619180 - RNA, 20 nt, Human
uguuauuucccuacauuaaa

SEQ ID NO: 3619181 - RNA, 23 nt, Human
uguuauuucccuacauuaaacau

SEQ ID NO: 3619182 - RNA, 22 nt, Human
uguuauuucuauuuuuguagaa

SEQ ID NO: 3619183 - RNA, 17 nt, Human
uguuauuucucagacuu

SEQ ID NO: 3619184 - RNA, 13 nt, Human
uguuauuucugca

SEQ ID NO: 3619185 - RNA, 22 nt, Human
uguuauuuucagcaugaaaaug

SEQ ID NO: 3619186 - RNA, 18 nt, Human
uguuauuuucaguauuuu

SEQ ID NO: 3619187 - RNA, 22 nt, Human
uguuauuuuuauaucagccuga

SEQ ID NO: 3619188 - RNA, 18 nt, Human
uguuauuuuucaaggaag

SEQ ID NO: 3619189 - RNA, 16 nt, Human
uguuauuuuuguuucu

SEQ ID NO: 3619190 - RNA, 13 nt, Human
uguucaaacaaua

SEQ ID NO: 3619191 - RNA, 21 nt, Human
uguucaaaggagcaagaacuu

SEQ ID NO: 3619192 - RNA, 21 nt, Human
uguucaagcgauucuccugcc

SEQ ID NO: 3619193 - RNA, 14 nt, Human
uguucacaaccugg

SEQ ID NO: 3619194 - RNA, 16 nt, Human
uguucacaccagagaa

SEQ ID NO: 3619195 - RNA, 15 nt, Human
uguucacacucucac

SEQ ID NO: 3619196 - RNA, 19 nt, Human
uguucacacucucacaugu

SEQ ID NO: 3619197 - RNA, 15 nt, Human
uguucaccauuauaa

SEQ ID NO: 3619198 - RNA, 17 nt, Human
uguucacgcaacuugaa

SEQ ID NO: 3619199 - RNA, 15 nt, Human
uguucacuaaacucu

SEQ ID NO: 3619200 - RNA, 17 nt, Human
uguucacuuuugacaaa

SEQ ID NO: 3619201 - RNA, 15 nt, Human
uguucagaaaaaagg

SEQ ID NO: 3619202 - RNA, 18 nt, Human
uguucagauugcuuugau

SEQ ID NO: 3619203 - RNA, 14 nt, Human
uguucagcauucuu

SEQ ID NO: 3619204 - RNA, 21 nt, Human
uguucuggcccucaccccugc

SEQ ID NO: 3619205 - RNA, 12 nt, Human
uguucuggcucu

SEQ ID NO: 3619206 - RNA, 16 nt, Human
uguucuggcucuucca

SEQ ID NO: 3619207 - RNA, 16 nt, Human
uguucugggacacagu

SEQ ID NO: 3619208 - RNA, 21 nt, Human
uguucuggggggacccagugc

SEQ ID NO: 3619209 - RNA, 15 nt, Human
uguucuguuacaaaa

SEQ ID NO: 3619210 - RNA, 16 nt, Human
uguucuguuacaaaau

SEQ ID NO: 3619211 - RNA, 19 nt, Human
uguucuguuuaauacucau

SEQ ID NO: 3619212 - RNA, 14 nt, Human
uguucuguuucaag

SEQ ID NO: 3619213 - RNA, 15 nt, Human
uguucuguuuguuaa

SEQ ID NO: 3619214 - RNA, 20 nt, Human
uguucuguuuguuaaaacug

SEQ ID NO: 3619215 - RNA, 13 nt, Human
uguucuguuuugu

SEQ ID NO: 3619216 - RNA, 14 nt, Human
uguucuuaauucuu

SEQ ID NO: 3619217 - RNA, 16 nt, Human
uguucuuaauugcacu

SEQ ID NO: 3619218 - RNA, 17 nt, Human
uguucuuaauugcacuc

SEQ ID NO: 3619219 - RNA, 13 nt, Human
uguucuuacacau

SEQ ID NO: 3619220 - RNA, 22 nt, Human
uguucuuagcucaaugagcaug

SEQ ID NO: 3619221 - RNA, 18 nt, Human
uguucuuaguuugcaguu

SEQ ID NO: 3619222 - RNA, 11 nt, Human
uguucuuccaa

SEQ ID NO: 3619223 - RNA, 17 nt, Human
uguucuuccaaagcaga

SEQ ID NO: 3619224 - RNA, 16 nt, Human
uguucuuccucagcca

SEQ ID NO: 3619225 - RNA, 20 nt, Human
uguucuuccucagccagccu

SEQ ID NO: 3619226 - RNA, 13 nt, Human
uguucuuccuggc

SEQ ID NO: 3619227 - RNA, 20 nt, Human
uguucuugaagcaguagccu

SEQ ID NO: 3619228 - RNA, 19 nt, Human
uguucuugccacugcacuc

SEQ ID NO: 3619229 - RNA, 15 nt, Human
uguucuugcugcuag

SEQ ID NO: 3619230 - RNA, 18 nt, Human
uguucuugcugcuagaac

SEQ ID NO: 3619231 - RNA, 19 nt, Human
uguucuugcugcuagaacu

SEQ ID NO: 3619232 - RNA, 20 nt, Human
uguucuugcugcuagaacuu

SEQ ID NO: 3619233 - RNA, 23 nt, Human
uguucuugcugcuagaacuuuuu

SEQ ID NO: 3619234 - RNA, 22 nt, Human
uguucuuggcaauaaauuuuga

SEQ ID NO: 3619235 - RNA, 18 nt, Human
uguucuugguuuguaaau

SEQ ID NO: 3619236 - RNA, 13 nt, Human
uguucuuguauuu

SEQ ID NO: 3619237 - RNA, 14 nt, Human
uguucuuguuuuua

SEQ ID NO: 3619238 - RNA, 16 nt, Human
uguucuuucuggaguc

SEQ ID NO: 3619239 - RNA, 22 nt, Human
uguucuuucuggcuaugcauuu

SEQ ID NO: 3619240 - RNA, 18 nt, Human
uguucuuuggaaaguaca

SEQ ID NO: 3619241 - RNA, 17 nt, Human
uguucuuuuuauugaau

SEQ ID NO: 3619242 - RNA, 21 nt, Human
uguugaaaaaauuuaaaagua

SEQ ID NO: 3619243 - RNA, 19 nt, Human
uguugaaaagccauguuua

SEQ ID NO: 3619244 - RNA, 20 nt, Human
uguugaaaagccauguuuaa

SEQ ID NO: 3619245 - RNA, 23 nt, Human
uguugaaaagccauguuuaagau

SEQ ID NO: 3619246 - RNA, 21 nt, Human
uguugaaaauuauuuuaaaca

SEQ ID NO: 3619247 - RNA, 22 nt, Human
uguugaaacggaugauuucuau

SEQ ID NO: 3619248 - RNA, 18 nt, Human
uguugaaagcaaaaaugc

SEQ ID NO: 3619249 - RNA, 19 nt, Human
uguugaaagcaaaaaugcu

SEQ ID NO: 3619250 - RNA, 23 nt, Human
uguugaaagguuuuuuuucaguu

SEQ ID NO: 3619251 - RNA, 14 nt, Human
uguugaaauuaugu

SEQ ID NO: 3619252 - RNA, 15 nt, Human
uguugaaauuaugua

SEQ ID NO: 3619253 - RNA, 21 nt, Human
uguugaaauuauguauguuua

SEQ ID NO: 3619254 - RNA, 16 nt, Human
uguugaaauuuugcaa

SEQ ID NO: 3619255 - RNA, 23 nt, Human
uguugaaauuuugcaaauauaaa

SEQ ID NO: 3619256 - RNA, 15 nt, Human
uuaacuucuguuuua

SEQ ID NO: 3619257 - RNA, 17 nt, Human
uuaacuucuugcuucuu

SEQ ID NO: 3619258 - RNA, 11 nt, Human
uuaacuuuguu

SEQ ID NO: 3619259 - RNA, 15 nt, Human
uuaacuuuuauaaac

SEQ ID NO: 3619260 - RNA, 22 nt, Human
uuaacuuuuauaaacuuuaccu

SEQ ID NO: 3619261 - RNA, 15 nt, Human
uuaagaaaaaaauaa

SEQ ID NO: 3619262 - RNA, 16 nt, Human
uuaagaaaaaaauaau

SEQ ID NO: 3619263 - RNA, 16 nt, Human
uuaagaaaaguauuuu

SEQ ID NO: 3619264 - RNA, 17 nt, Human
uuaagaaaaguauuuug

SEQ ID NO: 3619265 - RNA, 18 nt, Human
uuaagaaaaguauuuuga

SEQ ID NO: 3619266 - RNA, 22 nt, Human
uuaagaaaaucauauugcuucu

SEQ ID NO: 3619267 - RNA, 14 nt, Human
uuaagaaauguagu

SEQ ID NO: 3619268 - RNA, 18 nt, Human
uuaagaaauuuugccuuu

SEQ ID NO: 3619269 - RNA, 16 nt, Human
uuaagaacacaaagcg

SEQ ID NO: 3619270 - RNA, 16 nt, Human
uuaagaacuaaaaugu

SEQ ID NO: 3619271 - RNA, 13 nt, Human
uuaagaagaaaau

SEQ ID NO: 3619272 - RNA, 20 nt, Human
uuaagaagacugcauuauau

SEQ ID NO: 3619273 - RNA, 20 nt, Human
uuaagaagcuguuguacauu

SEQ ID NO: 3619274 - RNA, 20 nt, Human
uuaagaauauguuuccuugu

SEQ ID NO: 3619275 - RNA, 22 nt, Human
uuaagaaugaaauacuguuuga

SEQ ID NO: 3619276 - RNA, 21 nt, Human
uuaagaauugaccaucugcuu

SEQ ID NO: 3619277 - RNA, 19 nt, Human
uuaagaauugaguaauggu

SEQ ID NO: 3619278 - RNA, 16 nt, Human
uuaagacaugauuucc

SEQ ID NO: 3619279 - RNA, 18 nt, Human
uuaagacauuuuuggaag

SEQ ID NO: 3619280 - RNA, 19 nt, Human
uuaagaccaccucaaauuu

SEQ ID NO: 3619281 - RNA, 21 nt, Human
uuaagaccuacuguucuaaag

SEQ ID NO: 3619282 - RNA, 14 nt, Human
uuaagaccuggcag

SEQ ID NO: 3619283 - RNA, 23 nt, Human
uuaagacuuaaugagacuuuaaa

SEQ ID NO: 3619284 - RNA, 14 nt, Human
uuaagagaaacuuu

SEQ ID NO: 3619285 - RNA, 15 nt, Human
uuaagagaaacuuua

SEQ ID NO: 3619286 - RNA, 16 nt, Human
uuaagagaaacuuuau

SEQ ID NO: 3619287 - RNA, 20 nt, Human
uuaagagaaacuuuauacau

SEQ ID NO: 3619288 - RNA, 12 nt, Human
uuaagagaaaug

SEQ ID NO: 3619289 - RNA, 13 nt, Human
uuaagagagaaau

SEQ ID NO: 3619290 - RNA, 23 nt, Human
uuaagagccauauaaguuugaag

SEQ ID NO: 3619291 - RNA, 20 nt, Human
uuaagaggcagaaaauugca

SEQ ID NO: 3619292 - RNA, 12 nt, Human
uuacauguuuuc

SEQ ID NO: 3619293 - RNA, 18 nt, Human
uguuuugcuuuuucugac

SEQ ID NO: 3619294 - RNA, 19 nt, Human
uguuuuggacaguuuacca

SEQ ID NO: 3619295 - RNA, 19 nt, Human
uguuuuggacuuuguuaca

SEQ ID NO: 3619296 - RNA, 16 nt, Human
uguuuugguagauuaa

SEQ ID NO: 3619297 - RNA, 13 nt, Human
uguuuuguaaaca

SEQ ID NO: 3619298 - RNA, 16 nt, Human
uguuuuguaaacauuu

SEQ ID NO: 3619299 - RNA, 13 nt, Human
uguuuuguaaacu

SEQ ID NO: 3619300 - RNA, 16 nt, Human
uguuuuguacagaugu

SEQ ID NO: 3619301 - RNA, 22 nt, Human
uguuuuguauacaaauauauug

SEQ ID NO: 3619302 - RNA, 16 nt, Human
uguuuuguucuguggu

SEQ ID NO: 3619303 - RNA, 17 nt, Human
uguuuuguucuuuaaag

SEQ ID NO: 3619304 - RNA, 18 nt, Human
uguuuuguugcacugaag

SEQ ID NO: 3619305 - RNA, 20 nt, Human
uguuuuguugcacugaaguu

SEQ ID NO: 3619306 - RNA, 13 nt, Human
uguuuuguuuuaa

SEQ ID NO: 3619307 - RNA, 15 nt, Human
uguuuuguuuuuaca

SEQ ID NO: 3619308 - RNA, 10 nt, Human
uguuuuuaaa

SEQ ID NO: 3619309 - RNA, 17 nt, Human
uguuuuuaaaaaucaua

SEQ ID NO: 3619310 - RNA, 16 nt, Human
uguuuuuaaaaucuua

SEQ ID NO: 3619311 - RNA, 17 nt, Human
uguuuuuaaaaucuuau

SEQ ID NO: 3619312 - RNA, 16 nt, Human
uguuuuuaaacuguac

SEQ ID NO: 3619313 - RNA, 22 nt, Human
uguuuuuaagcuguuuccauag

SEQ ID NO: 3619314 - RNA, 19 nt, Human
uguuuuuaaugcuauuuga

SEQ ID NO: 3619315 - RNA, 22 nt, Human
uguuuuuacccauauccccucu

SEQ ID NO: 3619316 - RNA, 21 nt, Human
uguuuuuauacaaaauaagaa

SEQ ID NO: 3619317 - RNA, 20 nt, Human
uguuuuuaugaagaaaaaau

SEQ ID NO: 3619318 - RNA, 18 nt, Human
uguuuuuauuaauuuaua

SEQ ID NO: 3619319 - RNA, 13 nt, Human
uguuuuucacauu

SEQ ID NO: 3619320 - RNA, 12 nt, Human
uguuuuucaguu

SEQ ID NO: 3619321 - RNA, 14 nt, Human
uguuuuucuauuaa

SEQ ID NO: 3619322 - RNA, 14 nt, Human
uguuuuucuccagu

SEQ ID NO: 3619323 - RNA, 15 nt, Human
uguuuuucugcuuua

SEQ ID NO: 3619324 - RNA, 19 nt, Human
uguuuuucugcuuuagacu

SEQ ID NO: 3619325 - RNA, 16 nt, Human
uguuuuucuuucuaca

SEQ ID NO: 3619326 - RNA, 20 nt, Human
uguuuuugaaggcagaaagc

SEQ ID NO: 3619327 - RNA, 14 nt, Human
uguuuuugggaugu

SEQ ID NO: 3619328 - RNA, 16 nt, Human
uguuuuuggucuuuua

SEQ ID NO: 3619329 - RNA, 12 nt, Human
uguuuuuguaaa

SEQ ID NO: 3619330 - RNA, 21 nt, Human
uguuuuuguauauugguuuua

SEQ ID NO: 3619331 - RNA, 12 nt, Human
uguuuuugugaa

SEQ ID NO: 3619332 - RNA, 14 nt, Human
uguuuuuguugugu

SEQ ID NO: 3619333 - RNA, 14 nt, Human
uguuuuuuaagaua

SEQ ID NO: 3619334 - RNA, 21 nt, Human
uguuuuuuaagauaguguaac

SEQ ID NO: 3619335 - RNA, 19 nt, Human
uguuuuuuaagauggcaau

SEQ ID NO: 3619336 - RNA, 13 nt, Human
uguuuuuucaaaa

SEQ ID NO: 3619337 - RNA, 13 nt, Human
uguuuuuucaugu

SEQ ID NO: 3619338 - RNA, 22 nt, Human
uguuuuuucuuuuuuuuuaagu

SEQ ID NO: 3619339 - RNA, 16 nt, Human
uguuuuuugaaaacau

SEQ ID NO: 3619340 - RNA, 19 nt, Human
uguuuuuugccacagcuuu

SEQ ID NO: 3619341 - RNA, 15 nt, Human
uguuuuuuucuaaua

SEQ ID NO: 3619342 - RNA, 18 nt, Human
uguuuuuuuguuauuaaa

SEQ ID NO: 3619343 - RNA, 18 nt, Human
uguuuuuuuuuaaagacu

SEQ ID NO: 3619344 - RNA, 18 nt, Human
uguuuuuuuuuuccacuu

SEQ ID NO: 3619345 - RNA, 22 nt, Human
uuaaaaaaaaaaaaaagcuuua

SEQ ID NO: 3619346 - RNA, 23 nt, Human
uuaaaaaaaaaaaaaagcuuuau

SEQ ID NO: 3619347 - RNA, 16 nt, Human
uuaaaaaaaaaaguca

SEQ ID NO: 3619348 - RNA, 21 nt, Human
uuaaaaaaaaaagucaccaaa

SEQ ID NO: 3619349 - RNA, 15 nt, Human
uuaaaaaaaaaauug

SEQ ID NO: 3619350 - RNA, 13 nt, Human
uuaaaaaaaaaga

SEQ ID NO: 3619351 - RNA, 20 nt, Human
uuaaaaaaaaagucagagac

SEQ ID NO: 3619352 - RNA, 12 nt, Human
uuaaaaaaaaga

SEQ ID NO: 3619353 - RNA, 13 nt, Human
uuaaaaaaaagaa

SEQ ID NO: 3619354 - RNA, 18 nt, Human
uuaaaaaaaauaauaaau

SEQ ID NO: 3619355 - RNA, 13 nt, Human
uuaaaaaaaaucc

SEQ ID NO: 3619356 - RNA, 18 nt, Human
uuacuaugccugugucuu

SEQ ID NO: 3619357 - RNA, 14 nt, Human
uuacuauuaagcag

SEQ ID NO: 3619358 - RNA, 18 nt, Human
uuacuauucgguguguuu

SEQ ID NO: 3619359 - RNA, 15 nt, Human
uuacucacagccagc

SEQ ID NO: 3619360 - RNA, 12 nt, Human
uuacucagcccu

SEQ ID NO: 3619361 - RNA, 14 nt, Human
uuacucagcccugg

SEQ ID NO: 3619362 - RNA, 13 nt, Human
uuacucagggcuc

SEQ ID NO: 3619363 - RNA, 18 nt, Human
uuacucagggcuccuccc

SEQ ID NO: 3619364 - RNA, 15 nt, Human
uuacucaguuuaugu

SEQ ID NO: 3619365 - RNA, 20 nt, Human
uuacucauuaaaaauaauag

SEQ ID NO: 3619366 - RNA, 13 nt, Human
uuacucauugaaa

SEQ ID NO: 3619367 - RNA, 18 nt, Human
uuacucauugaaauguca

SEQ ID NO: 3619368 - RNA, 19 nt, Human
uuacucauugaaaugucac

SEQ ID NO: 3619369 - RNA, 24 nt, Human
uuacuccaaaacuucguuuaauga

SEQ ID NO: 3619370 - RNA, 11 nt, Human
uuacuccccuu

SEQ ID NO: 3619371 - RNA, 20 nt, Human
uuagaggaaauaagaaaaau

SEQ ID NO: 3619372 - RNA, 15 nt, Human
uuagaguaagaaauu

SEQ ID NO: 3619373 - RNA, 16 nt, Human
uuagagugucuuucca

SEQ ID NO: 3619374 - RNA, 17 nt, Human
uuagagugucuuuccac

SEQ ID NO: 3619375 - RNA, 24 nt, Human
uuagauaacgcuuaaaggaaguca

SEQ ID NO: 3619376 - RNA, 16 nt, Human
uuagauagcccugucc

SEQ ID NO: 3619377 - RNA, 18 nt, Human
uuagauagcccuguccug

SEQ ID NO: 3619378 - RNA, 13 nt, Human
uuagaucaaauac

SEQ ID NO: 3619379 - RNA, 16 nt, Human
uuagaucauaguuuua

SEQ ID NO: 3619380 - RNA, 15 nt, Human
uuagauccauuaauu

SEQ ID NO: 3619381 - RNA, 23 nt, Human
uuagauccauuaauuuaaaugau

SEQ ID NO: 3619382 - RNA, 15 nt, Human
uuagaucuggcaugu

SEQ ID NO: 3619383 - RNA, 20 nt, Human
uuagaugcaguucugaagaa

SEQ ID NO: 3619384 - RNA, 23 nt, Human
uuagaugcaguucugaagaagau

SEQ ID NO: 3619385 - RNA, 16 nt, Human
uuagaugguuacacug

SEQ ID NO: 3619386 - RNA, 15 nt, Human
uuagauguucucuau

SEQ ID NO: 3619387 - RNA, 23 nt, Human
uuagauguucucuaucauuuaau

SEQ ID NO: 3619388 - RNA, 16 nt, Human
uuagauguugccaugu

SEQ ID NO: 3619389 - RNA, 17 nt, Human
uuagauuagcucuggac

SEQ ID NO: 3619390 - RNA, 22 nt, Human
uuagauuauauugagacaaaaa

SEQ ID NO: 3619391 - RNA, 19 nt, Human
uuagauucucugugucuaa

SEQ ID NO: 3619392 - RNA, 23 nt, Human
uuagauugaaaacuuuucucaga

SEQ ID NO: 3619393 - RNA, 18 nt, Human
uuagauuucauaguucag

SEQ ID NO: 3619394 - RNA, 20 nt, Human
uuagauuucauaguucagaa

SEQ ID NO: 3619395 - RNA, 12 nt, Human
uuagauuuuaca

SEQ ID NO: 3619396 - RNA, 15 nt, Human
uuagauuuuacauga

SEQ ID NO: 3619397 - RNA, 19 nt, Human
uuagauuuuacaugaagua

SEQ ID NO: 3619398 - RNA, 21 nt, Human
uuagauuuuacaugaaguauu

SEQ ID NO: 3619399 - RNA, 18 nt, Human
uuagauuuucugguucua

SEQ ID NO: 3619400 - RNA, 19 nt, Human
uuagauuuucugguucuaa

SEQ ID NO: 3619401 - RNA, 21 nt, Human
uuagauuuucugguucuaaca

SEQ ID NO: 3619402 - RNA, 22 nt, Human
uuagauuuuguguuuauucuug

SEQ ID NO: 3619403 - RNA, 23 nt, Human
uuagauuuuguguuuauucuuga

SEQ ID NO: 3619404 - RNA, 22 nt, Human
uuagcaaagauaucucaucucu

SEQ ID NO: 3619405 - RNA, 21 nt, Human
uuagcaaggucauuucuucag

SEQ ID NO: 3619406 - RNA, 19 nt, Human
uuagcacagauuuuaauug

SEQ ID NO: 3619407 - RNA, 21 nt, Human
uuagcacagauuuuaauuguc

SEQ ID NO: 3619408 - RNA, 12 nt, Human
uuagcacuguug

SEQ ID NO: 3619409 - RNA, 14 nt, Human
uuagcacuguugau

SEQ ID NO: 3619410 - RNA, 15 nt, Human
uuagcagcuuccaga

SEQ ID NO: 3619411 - RNA, 18 nt, Human
uuagcaggaagcugugag

SEQ ID NO: 3619412 - RNA, 22 nt, Human
uuagcaggagaggagagccaga

SEQ ID NO: 3619413 - RNA, 14 nt, Human
uuagcaguaaaaua

SEQ ID NO: 3619414 - RNA, 19 nt, Human
uuagcaguaaaauagcuga

SEQ ID NO: 3619415 - RNA, 18 nt, Human
uuagcaguucugcaaaua

SEQ ID NO: 3619416 - RNA, 15 nt, Human
uuagcaguuugcuuu

SEQ ID NO: 3619417 - RNA, 15 nt, Human
uuagcauccuaagaa

SEQ ID NO: 3619418 - RNA, 19 nt, Human
uuagcauccuaagaaauau

SEQ ID NO: 3619419 - RNA, 22 nt, Human
uuagcaugacaagccccaggca

SEQ ID NO: 3619420 - RNA, 17 nt, Human
uuagcauguguugaaaa

SEQ ID NO: 3619421 - RNA, 22 nt, Human
uuagcauuguagugcuuugaga

SEQ ID NO: 3619422 - RNA, 22 nt, Human
uuagcauuuaguccaaugucuu

SEQ ID NO: 3619423 - RNA, 21 nt, Human
uuagccaguaauccuguagga

SEQ ID NO: 3619424 - RNA, 18 nt, Human
uuagccauuuuucaaagc

SEQ ID NO: 3619425 - RNA, 12 nt, Human
uuagcccccacc

SEQ ID NO: 3619426 - RNA, 15 nt, Human
uuagccccugaaagc

SEQ ID NO: 3619427 - RNA, 16 nt, Human
uuagcccugaacauuu

SEQ ID NO: 3619428 - RNA, 17 nt, Human
uuagccgcccaugcacu

SEQ ID NO: 3619429 - RNA, 19 nt, Human
uuagccuaagauauacuug

SEQ ID NO: 3619430 - RNA, 10 nt, Human
uuagccugga

SEQ ID NO: 3619431 - RNA, 17 nt, Human
uuagccuggaccucuga

SEQ ID NO: 3619432 - RNA, 18 nt, Human
uuagccuggaccucugac

SEQ ID NO: 3619433 - RNA, 12 nt, Human
uuagccuguccu

SEQ ID NO: 3619434 - RNA, 20 nt, Human
uuagccuguggcaguaaaga

SEQ ID NO: 3619435 - RNA, 16 nt, Human
uuagccuuugucccag

SEQ ID NO: 3619436 - RNA, 20 nt, Human
uuagccuuuuuuccccagac

SEQ ID NO: 3619437 - RNA, 15 nt, Human
uuagcgacaacagau

SEQ ID NO: 3619438 - RNA, 23 nt, Human
uuagcgacaacagauuggauuuu

SEQ ID NO: 3619439 - RNA, 16 nt, Human
uuagcuacuauauaug

SEQ ID NO: 3619440 - RNA, 13 nt, Human
uuagcucaaugag

SEQ ID NO: 3619441 - RNA, 14 nt, Human
uuagcucaaugagc

SEQ ID NO: 3619442 - RNA, 17 nt, Human
uuagcucaaugagcaug

SEQ ID NO: 3619443 - RNA, 19 nt, Human
uuagcucagccccagccca

SEQ ID NO: 3619444 - RNA, 18 nt, Human
uuagcuccccuccaaccu

SEQ ID NO: 3619445 - RNA, 14 nt, Human
uuagcuccuguggc

SEQ ID NO: 3619446 - RNA, 15 nt, Human
uuagcucuauugaua

SEQ ID NO: 3619447 - RNA, 11 nt, Human
uuagcucugag

SEQ ID NO: 3619448 - RNA, 12 nt, Human
uuagcugacaaa

SEQ ID NO: 3619449 - RNA, 18 nt, Human
uuagcugccugaaaauca

SEQ ID NO: 3619450 - RNA, 12 nt, Human
uuagcugggaga

SEQ ID NO: 3619451 - RNA, 15 nt, Human
uuagcugugugaaau

SEQ ID NO: 3619452 - RNA, 18 nt, Human
uuagcuguguuauuauag

SEQ ID NO: 3619453 - RNA, 17 nt, Human
uuagcuguuauuucuau

SEQ ID NO: 3619454 - RNA, 17 nt, Human
uuagcuuauguuaacug

SEQ ID NO: 3619455 - RNA, 12 nt, Human
uuagcuucagga

SEQ ID NO: 3619456 - RNA, 12 nt, Human
uuagcuuccuua

SEQ ID NO: 3619457 - RNA, 13 nt, Human
uuagcuuccuuaa

SEQ ID NO: 3619458 - RNA, 17 nt, Human
uuagcuugcaccuuguc

SEQ ID NO: 3619459 - RNA, 15 nt, Human
uuagcuuuacuguuu

SEQ ID NO: 3619460 - RNA, 16 nt, Human
uuagcuuuacuguuug

SEQ ID NO: 3619461 - RNA, 17 nt, Human
uuagcuuuacuguuugu

SEQ ID NO: 3619462 - RNA, 20 nt, Human
uuagcuuucugagcaagagg

SEQ ID NO: 3619463 - RNA, 15 nt, Human
uuagcuuugcucugc

SEQ ID NO: 3619464 - RNA, 12 nt, Human
uuagcuuuguca

SEQ ID NO: 3619465 - RNA, 13 nt, Human
uuagcuuuguguu

SEQ ID NO: 3619466 - RNA, 20 nt, Human
uuagcuuuguguuugguuua

SEQ ID NO: 3619467 - RNA, 22 nt, Human
uuagcuuuguguuugguuuaca

SEQ ID NO: 3619468 - RNA, 18 nt, Human
uuagcuuuuuaaaacauu

SEQ ID NO: 3619469 - RNA, 21 nt, Human
uuaggaaaaucacuuugucua

SEQ ID NO: 3619470 - RNA, 11 nt, Human
uuaggaaauaa

SEQ ID NO: 3619471 - RNA, 18 nt, Human
uuaggaaauaaaaccuuu

SEQ ID NO: 3619472 - RNA, 20 nt, Human
uuaggaaauaaaaccuuuca

SEQ ID NO: 3619473 - RNA, 17 nt, Human
uuaggaaaugaaugugu

SEQ ID NO: 3619474 - RNA, 19 nt, Human
uuaggaaaugaaugugugu

SEQ ID NO: 3619475 - RNA, 23 nt, Human
uuaggaaauguuuuuaauaaaag

SEQ ID NO: 3619476 - RNA, 23 nt, Human
uuaggaaguugacuuauaguaca

SEQ ID NO: 3619477 - RNA, 19 nt, Human
uuaggaauuaaguuaucuu

SEQ ID NO: 3619478 - RNA, 23 nt, Human
uuaggagauuuuagguguugauu

SEQ ID NO: 3619479 - RNA, 22 nt, Human
uuauguuaagggaagaauucca

SEQ ID NO: 3619480 - RNA, 13 nt, Human
uuauguuaauauu

SEQ ID NO: 3619481 - RNA, 15 nt, Human
uuauguugaaaaaau

SEQ ID NO: 3619482 - RNA, 18 nt, Human
uuauguugaaaaaauuua

SEQ ID NO: 3619483 - RNA, 16 nt, Human
uuauguugacauuugu

SEQ ID NO: 3619484 - RNA, 17 nt, Human
uuauguugacauuuguu

SEQ ID NO: 3619485 - RNA, 17 nt, Human
uuauguuguauagauua

SEQ ID NO: 3619486 - RNA, 23 nt, Human
uuauguuguuguuguuuuuggau

SEQ ID NO: 3619487 - RNA, 18 nt, Human
uuauguuguuuuguacag

SEQ ID NO: 3619488 - RNA, 14 nt, Human
uuauguuuaauaag

SEQ ID NO: 3619489 - RNA, 19 nt, Human
uuauguuuauauaaaugcu

SEQ ID NO: 3619490 - RNA, 14 nt, Human
uuauguuugaauau

SEQ ID NO: 3619491 - RNA, 15 nt, Human
uuauguuugaauaug

SEQ ID NO: 3619492 - RNA, 16 nt, Human
uuauuaaaaucuuaaa

SEQ ID NO: 3619493 - RNA, 20 nt, Human
uuauuaaaaugauuguaaaa

SEQ ID NO: 3619494 - RNA, 21 nt, Human
uuauuaaacagauuuuuacaa

SEQ ID NO: 3619495 - RNA, 14 nt, Human
uuauuaaaccccuu

SEQ ID NO: 3619496 - RNA, 20 nt, Human
uuauuaaacguaugcaugug

SEQ ID NO: 3619497 - RNA, 22 nt, Human
uuauuaaacguaugcaugugaa

SEQ ID NO: 3619498 - RNA, 13 nt, Human
uuauuaaagaaaa

SEQ ID NO: 3619499 - RNA, 20 nt, Human
uuauuaaagaaaaaaaugua

SEQ ID NO: 3619500 - RNA, 22 nt, Human
uuauuaaagaaaaaaauguauu

SEQ ID NO: 3619501 - RNA, 14 nt, Human
uuauuaaaguuuca

SEQ ID NO: 3619502 - RNA, 15 nt, Human
uuauuaaaguuucaa

SEQ ID NO: 3619503 - RNA, 17 nt, Human
uuauuaaaguuucaaaa

SEQ ID NO: 3619504 - RNA, 11 nt, Human
uuauuaaauag

SEQ ID NO: 3619505 - RNA, 17 nt, Human
uuauuaaaugcuucauu

SEQ ID NO: 3619506 - RNA, 24 nt, Human
uuauuaaauguagcuucagucauu

SEQ ID NO: 3619507 - RNA, 21 nt, Human
uuauuaaauuuuuuuguauga

SEQ ID NO: 3619508 - RNA, 19 nt, Human
uuauuaacaauuaggcaga

SEQ ID NO: 3619509 - RNA, 21 nt, Human
uuauuaacgauguccaacccg

SEQ ID NO: 3619510 - RNA, 16 nt, Human
uuauuaacuacauuua

SEQ ID NO: 3619511 - RNA, 17 nt, Human
uuauuaagauggauucu

SEQ ID NO: 3619512 - RNA, 20 nt, Human
uuauuaagauggauucucag

SEQ ID NO: 3619513 - RNA, 18 nt, Human
uuauuaagguuacagauu

SEQ ID NO: 3619514 - RNA, 14 nt, Human
uuauuaauaaacau

SEQ ID NO: 3619515 - RNA, 13 nt, Human
uuauuaaucacua

SEQ ID NO: 3619516 - RNA, 16 nt, Human
uuauuaaucacugugu

SEQ ID NO: 3619517 - RNA, 17 nt, Human
uuauuaaucuuagugua

SEQ ID NO: 3619518 - RNA, 17 nt, Human
uuauuaaugcacuuucu

SEQ ID NO: 3619519 - RNA, 13 nt, Human
uuauuaaugcuaa

SEQ ID NO: 3619520 - RNA, 14 nt, Human
uuauuaaugcuaag

SEQ ID NO: 3619521 - RNA, 14 nt, Human
uuauuaaugcuuug

SEQ ID NO: 3619522 - RNA, 12 nt, Human
uuauuaauguuu

SEQ ID NO: 3619523 - RNA, 12 nt, Human
uuauuacagugu

SEQ ID NO: 3619524 - RNA, 19 nt, Human
uuauuacaguguuuauccu

SEQ ID NO: 3619525 - RNA, 15 nt, Human
uuauuacauguaauu

SEQ ID NO: 3619526 - RNA, 20 nt, Human
uuauuacccccuccuucaga

SEQ ID NO: 3619527 - RNA, 22 nt, Human
uuauuacccccuccuucagaca

SEQ ID NO: 3619528 - RNA, 18 nt, Human
uuauuacccuucuuucca

SEQ ID NO: 3619529 - RNA, 12 nt, Human
uuauuaccucug

SEQ ID NO: 3619530 - RNA, 19 nt, Human
uuauuacugcuaaguauuu

SEQ ID NO: 3619531 - RNA, 16 nt, Human
uuauuacuguaagaaa

SEQ ID NO: 3619532 - RNA, 14 nt, Human
uuauuacuuauuug

SEQ ID NO: 3619533 - RNA, 15 nt, Human
uuauuacuuccauga

SEQ ID NO: 3619534 - RNA, 15 nt, Human
uuauuacuuguaaau

SEQ ID NO: 3619535 - RNA, 20 nt, Human
uuauuagaaucaaacauuuu

SEQ ID NO: 3619536 - RNA, 21 nt, Human
uuauuagagauuaccuccuga

SEQ ID NO: 3619537 - RNA, 17 nt, Human
uuauuagagugucuuuc

SEQ ID NO: 3619538 - RNA, 23 nt, Human
uuauaaauguaccagagagaguu

SEQ ID NO: 3619539 - RNA, 11 nt, Human
uuauaaauuaa

SEQ ID NO: 3619540 - RNA, 13 nt, Human
uuauaaauuaaau

SEQ ID NO: 3619541 - RNA, 13 nt, Human
uuauaaauuaugu

SEQ ID NO: 3619542 - RNA, 17 nt, Human
uuauaaauuucuauuuu

SEQ ID NO: 3619543 - RNA, 21 nt, Human
uuauaaccuuaauuuauuauu

SEQ ID NO: 3619544 - RNA, 16 nt, Human
uuauaacucaucauaa

SEQ ID NO: 3619545 - RNA, 19 nt, Human
uuauaacucaucauaaaau

SEQ ID NO: 3619546 - RNA, 19 nt, Human
uuauaacucugcacuacuc

SEQ ID NO: 3619547 - RNA, 18 nt, Human
uuauaacuguaaagaugu

SEQ ID NO: 3619548 - RNA, 13 nt, Human
uuauaacuuaaaa

SEQ ID NO: 3619549 - RNA, 15 nt, Human
uuauaacuuaaaaaa

SEQ ID NO: 3619550 - RNA, 12 nt, Human
uuauaagacucu

SEQ ID NO: 3619551 - RNA, 14 nt, Human
uuauaagcagauuu

SEQ ID NO: 3619552 - RNA, 22 nt, Human
uuauaagcaucauuauuuaugu

SEQ ID NO: 3619553 - RNA, 15 nt, Human
uuauaagcauugaaa

SEQ ID NO: 3619554 - RNA, 18 nt, Human
uuauaagcauugaaauua

SEQ ID NO: 3619555 - RNA, 17 nt, Human
uuauaaggaaauuuuac

SEQ ID NO: 3619556 - RNA, 11 nt, Human
uuauaaggacu

SEQ ID NO: 3619557 - RNA, 17 nt, Human
uuauaaggacugcaugg

SEQ ID NO: 3619558 - RNA, 22 nt, Human
uuauaaggacugcaugguaauu

SEQ ID NO: 3619559 - RNA, 14 nt, Human
uuauaagguguuuu

SEQ ID NO: 3619560 - RNA, 20 nt, Human
uuauaagguguuuucugugu

SEQ ID NO: 3619561 - RNA, 21 nt, Human
uuauaagguguuuucugugua

SEQ ID NO: 3619562 - RNA, 21 nt, Human
uuauaauaaaaggaaaagcaa

SEQ ID NO: 3619563 - RNA, 20 nt, Human
uuauaauaaauauauacauu

SEQ ID NO: 3619564 - RNA, 18 nt, Human
uuauaauaauguuaacau

SEQ ID NO: 3619565 - RNA, 24 nt, Human
uuauaauccuuaaaucuuaauguu

SEQ ID NO: 3619566 - RNA, 15 nt, Human
uuauaaugaaugaaa

SEQ ID NO: 3619567 - RNA, 14 nt, Human
uuauaaugaaugac

SEQ ID NO: 3619568 - RNA, 22 nt, Human
uuauaauucaguauguuuuaca

SEQ ID NO: 3619569 - RNA, 23 nt, Human
uuauaauucuuucaauacagaua

SEQ ID NO: 3619570 - RNA, 21 nt, Human
uuauaauuuuaaauguuuuuu

SEQ ID NO: 3619571 - RNA, 15 nt, Human
uuauaauuuuaagau

SEQ ID NO: 3619572 - RNA, 21 nt, Human
uuauaauuuuaagauuccuuu

SEQ ID NO: 3619573 - RNA, 15 nt, Human
uuauaauuuugugaa

SEQ ID NO: 3619574 - RNA, 17 nt, Human
uuauacaacagugcuaa

SEQ ID NO: 3619575 - RNA, 21 nt, Human
uuauacaacagugcuaaaaau

SEQ ID NO: 3619576 - RNA, 14 nt, Human
uuauacacauaauu

SEQ ID NO: 3619577 - RNA, 21 nt, Human
uuauacacauaauuaaagugu

SEQ ID NO: 3619578 - RNA, 23 nt, Human
uuauacagaauugugucugcagg

SEQ ID NO: 3619579 - RNA, 15 nt, Human
uuauacagcuguauu

SEQ ID NO: 3619580 - RNA, 21 nt, Human
uuauacaguagugagaagaau

SEQ ID NO: 3619581 - RNA, 21 nt, Human
uuauacaguuauaaaauuaaa

SEQ ID NO: 3619582 - RNA, 18 nt, Human
uuauacaguuuuaaagaa

SEQ ID NO: 3619583 - RNA, 19 nt, Human
uuauacaguuuuaaagaau

SEQ ID NO: 3619584 - RNA, 11 nt, Human
uuauacauaaa

SEQ ID NO: 3619585 - RNA, 16 nt, Human
uuauacaugacacuga

SEQ ID NO: 3619586 - RNA, 22 nt, Human
uuauacaugacacugaaaugcc

SEQ ID NO: 3619587 - RNA, 21 nt, Human
uuauaccuguguauuuuuuaa

SEQ ID NO: 3619588 - RNA, 21 nt, Human
uuauacgcuggcaacacagag

SEQ ID NO: 3619589 - RNA, 19 nt, Human
uuauacucuuccuauuuuu

SEQ ID NO: 3619590 - RNA, 13 nt, Human
uuauacuguacaa

SEQ ID NO: 3619591 - RNA, 17 nt, Human
uuauacuguacaauaaa

SEQ ID NO: 3619592 - RNA, 22 nt, Human
uuauacuguacuuaauaaauuc

SEQ ID NO: 3619593 - RNA, 18 nt, Human
uuauacuuucccuacccu

SEQ ID NO: 3619594 - RNA, 18 nt, Human
uuauagaacuucauggau

SEQ ID NO: 3619595 - RNA, 19 nt, Human
uuauagaagaaugcaugcu

SEQ ID NO: 3619596 - RNA, 16 nt, Human
uucuauaauuuuacaa

SEQ ID NO: 3619597 - RNA, 19 nt, Human
uucuauagcaucacuuaaa

SEQ ID NO: 3619598 - RNA, 22 nt, Human
uucuauagcaucacuuaaaaca

SEQ ID NO: 3619599 - RNA, 21 nt, Human
uucuauagccaaaaauagcua

SEQ ID NO: 3619600 - RNA, 14 nt, Human
uucuauagcuuuuc

SEQ ID NO: 3619601 - RNA, 20 nt, Human
uucuauaugaauuuaaauau

SEQ ID NO: 3619602 - RNA, 23 nt, Human
uucuauaugaauuuaaauauaau

SEQ ID NO: 3619603 - RNA, 11 nt, Human
uucuauauuuu

SEQ ID NO: 3619604 - RNA, 16 nt, Human
uucuauauuuucauuc

SEQ ID NO: 3619605 - RNA, 13 nt, Human
uucuaucauuuuu

SEQ ID NO: 3619606 - RNA, 19 nt, Human
uucuaucauuuuuguacag

SEQ ID NO: 3619607 - RNA, 17 nt, Human
uucuaucuacugauuug

SEQ ID NO: 3619608 - RNA, 20 nt, Human
uucuaucuuguuccaaggcc

SEQ ID NO: 3619609 - RNA, 13 nt, Human
uucuaucuuuugu

SEQ ID NO: 3619610 - RNA, 16 nt, Human
uucuaugaaagacuca

SEQ ID NO: 3619611 - RNA, 19 nt, Human
uucuaugaguggaaaaagc

SEQ ID NO: 3619612 - RNA, 21 nt, Human
uucuauguacuaguacugugu

SEQ ID NO: 3619613 - RNA, 24 nt, Human
uucuauguacuaguacuguguacu

SEQ ID NO: 3619614 - RNA, 15 nt, Human
uucuauguaguuuau

SEQ ID NO: 3619615 - RNA, 22 nt, Human
uucuaugugacaauuuuguaca

SEQ ID NO: 3619616 - RNA, 13 nt, Human
uucuauguuuacu

SEQ ID NO: 3619617 - RNA, 16 nt, Human
uucuauuaaaagacuc

SEQ ID NO: 3619618 - RNA, 15 nt, Human
uucuauuaaagugcu

SEQ ID NO: 3619619 - RNA, 17 nt, Human
uucuauuaacuuuaauu

SEQ ID NO: 3619620 - RNA, 15 nt, Human
uucuauuauggaaaa

SEQ ID NO: 3619621 - RNA, 19 nt, Human
uucuauuauggaaaacugu

SEQ ID NO: 3619622 - RNA, 14 nt, Human
uucuauuccuucug

SEQ ID NO: 3619623 - RNA, 17 nt, Human
uucuauucucuccucag

SEQ ID NO: 3619624 - RNA, 20 nt, Human
uucuauucucuccucagacu

SEQ ID NO: 3619625 - RNA, 17 nt, Human
uucuauugacuucaaug

SEQ ID NO: 3619626 - RNA, 14 nt, Human
uucuauugccucug

SEQ ID NO: 3619627 - RNA, 17 nt, Human
uucuauugccucugaga

SEQ ID NO: 3619628 - RNA, 21 nt, Human
uucuauugccuucuuugaaga

SEQ ID NO: 3619629 - RNA, 23 nt, Human
uucuauugccuucuuugaagaag

SEQ ID NO: 3619630 - RNA, 14 nt, Human
uucuauuguacaga

SEQ ID NO: 3619631 - RNA, 19 nt, Human
uucuauuguuacucugguu

SEQ ID NO: 3619632 - RNA, 22 nt, Human
uucuauuguuacucugguucuu

SEQ ID NO: 3619633 - RNA, 17 nt, Human
uucuauuguuuauucuu

SEQ ID NO: 3619634 - RNA, 13 nt, Human
uucuauuuaagug

SEQ ID NO: 3619635 - RNA, 19 nt, Human
uucuauuuauauguacaug

SEQ ID NO: 3619636 - RNA, 17 nt, Human
uucuauuuauuaugcuu

SEQ ID NO: 3619637 - RNA, 15 nt, Human
uucuauuuauuuacu

SEQ ID NO: 3619638 - RNA, 16 nt, Human
uucuauuugcugggcu

SEQ ID NO: 3619639 - RNA, 14 nt, Human
uucuauuuggggcu

SEQ ID NO: 3619640 - RNA, 22 nt, Human
uucuauuuuaagacugauuuua

SEQ ID NO: 3619641 - RNA, 21 nt, Human
uucuauuuucauuuucugcaa

SEQ ID NO: 3619642 - RNA, 13 nt, Human
uucuauuuuguaa

SEQ ID NO: 3619643 - RNA, 13 nt, Human
uucucaaagaaau

SEQ ID NO: 3619644 - RNA, 15 nt, Human
uucucaaagaaauuu

SEQ ID NO: 3619645 - RNA, 12 nt, Human
uucucaaagcag

SEQ ID NO: 3619646 - RNA, 19 nt, Human
uucucaaaggguacuucca

SEQ ID NO: 3619647 - RNA, 18 nt, Human
uucucaaaguuuugaaaa

SEQ ID NO: 3619648 - RNA, 14 nt, Human
uucucaacuccaaa

SEQ ID NO: 3619649 - RNA, 18 nt, Human
uucucaacuccaaacuga

SEQ ID NO: 3619650 - RNA, 14 nt, Human
uucucaagcccugc

SEQ ID NO: 3619651 - RNA, 20 nt, Human
uucucaaguucuaagauucu

SEQ ID NO: 3619652 - RNA, 23 nt, Human
uucucaaguucuaagauucuaau

SEQ ID NO: 3619653 - RNA, 13 nt, Human
uucucaaugaaaa

SEQ ID NO: 3619654 - RNA, 13 nt, Human
uucucaauuccaa

SEQ ID NO: 3619655 - RNA, 18 nt, Human
uucucaauuccaacaguu

SEQ ID NO: 3619656 - RNA, 20 nt, Human
uucucacacucuaacuguau

SEQ ID NO: 3619657 - RNA, 22 nt, Human
uucucacacucuaacuguauau

SEQ ID NO: 3619658 - RNA, 12 nt, Human
uucucacagcac

SEQ ID NO: 3619659 - RNA, 21 nt, Human
uucucacagcacaugcuggcc

SEQ ID NO: 3619660 - RNA, 22 nt, Human
uucucacagcacaugcuggcca

SEQ ID NO: 3619661 - RNA, 20 nt, Human
uucucacagcuccaagaauu

SEQ ID NO: 3619662 - RNA, 18 nt, Human
uucucacaggucccaaau

SEQ ID NO: 3619663 - RNA, 19 nt, Human
uucucacagugggagccag

SEQ ID NO: 3619664 - RNA, 13 nt, Human
uucucaccagcug

SEQ ID NO: 3619665 - RNA, 22 nt, Human
uucucaccagcugcaaaguguu

SEQ ID NO: 3619666 - RNA, 23 nt, Human
uucucaccagcugcaaaguguuu

SEQ ID NO: 3619667 - RNA, 13 nt, Human
uucucaccaggaa

SEQ ID NO: 3619668 - RNA, 16 nt, Human
uucucacuccuaccug

SEQ ID NO: 3619669 - RNA, 18 nt, Human
uucucagaaggcaaauga

SEQ ID NO: 3619670 - RNA, 22 nt, Human
uucucagaaggcaaaugacuuu

SEQ ID NO: 3619671 - RNA, 19 nt, Human
uucucagaaucucaaauaa

SEQ ID NO: 3619672 - RNA, 23 nt, Human
uucucagaaucucaaauaacuaa

SEQ ID NO: 3619673 - RNA, 16 nt, Human
uucucagauuucugag

SEQ ID NO: 3619674 - RNA, 14 nt, Human
uucucagcucccau

SEQ ID NO: 3619675 - RNA, 16 nt, Human
uucucagcucccccug

SEQ ID NO: 3619676 - RNA, 14 nt, Human
uucucagcucuucu

SEQ ID NO: 3619677 - RNA, 18 nt, Human
uucucaggacacaggccu

SEQ ID NO: 3619678 - RNA, 19 nt, Human
uucucaggacacaggccug

SEQ ID NO: 3619679 - RNA, 20 nt, Human
uucucaggacacaggccugu

SEQ ID NO: 3619680 - RNA, 22 nt, Human
uucucaggacacaggccugugu

SEQ ID NO: 3619681 - RNA, 23 nt, Human
uucucaggacacaggccugugua

SEQ ID NO: 3619682 - RNA, 17 nt, Human
uucucaggcaugaacau

SEQ ID NO: 3619683 - RNA, 20 nt, Human
uucucaggcucugcccugcc

SEQ ID NO: 3619684 - RNA, 13 nt, Human
uucucagggucuc

SEQ ID NO: 3619685 - RNA, 18 nt, Human
uucucagggucucugcug

SEQ ID NO: 3619686 - RNA, 19 nt, Human
uucucagguguugccaaau

SEQ ID NO: 3619687 - RNA, 22 nt, Human
uucucagugccaacuguggcug

SEQ ID NO: 3619688 - RNA, 15 nt, Human
uucucaguuuguaua

SEQ ID NO: 3619689 - RNA, 15 nt, Human
uucucaguuuucaua

SEQ ID NO: 3619690 - RNA, 17 nt, Human
uucucauaauuccuaca

SEQ ID NO: 3619691 - RNA, 19 nt, Human
uucucauaauuccuacagc

SEQ ID NO: 3619692 - RNA, 24 nt, Human
uucucauaggaaaaguacauuuaa

SEQ ID NO: 3619693 - RNA, 13 nt, Human
uucucaucaguag

SEQ ID NO: 3619694 - RNA, 15 nt, Human
uucucauccugcagg

SEQ ID NO: 3619695 - RNA, 19 nt, Human
uucucaucugcacccuucu

SEQ ID NO: 3619696 - RNA, 23 nt, Human
uucucaucuugacagagccugcc

SEQ ID NO: 3619697 - RNA, 15 nt, Human
uucucaucuugugaa

SEQ ID NO: 3619698 - RNA, 18 nt, Human
uucucaucuuucuugauc

SEQ ID NO: 3619699 - RNA, 14 nt, Human
uucucaugauccaa

SEQ ID NO: 3619700 - RNA, 20 nt, Human
uucucaugauuuacagagaa

SEQ ID NO: 3619701 - RNA, 14 nt, Human
uucucaugccucag

SEQ ID NO: 3619702 - RNA, 15 nt, Human
uucucauuacuuguu

SEQ ID NO: 3619703 - RNA, 13 nt, Human
uucucauuuucuu

SEQ ID NO: 3619704 - RNA, 18 nt, Human
uucuccaaaaaucugccu

SEQ ID NO: 3619705 - RNA, 21 nt, Human
uucuccaaaaaucugccuggg

SEQ ID NO: 3619706 - RNA, 14 nt, Human
uucuccaaaugaga

SEQ ID NO: 3619707 - RNA, 15 nt, Human
uucuccaaggaaacc

SEQ ID NO: 3619708 - RNA, 21 nt, Human
uucuccaccucccacaaagga

SEQ ID NO: 3619709 - RNA, 12 nt, Human
uucuccaccugc

SEQ ID NO: 3619710 - RNA, 14 nt, Human
uucuccaccugcca

SEQ ID NO: 3619711 - RNA, 18 nt, Human
uucuccaccugccaggga

SEQ ID NO: 3619712 - RNA, 12 nt, Human
uucuccacugga

SEQ ID NO: 3619713 - RNA, 14 nt, Human
uucuccacugugca

SEQ ID NO: 3619714 - RNA, 22 nt, Human
uucuccagccuggacccccagc

SEQ ID NO: 3619715 - RNA, 23 nt, Human
uucuccagccuggacccccagcu

SEQ ID NO: 3619716 - RNA, 13 nt, Human
uucuccagcucag

SEQ ID NO: 3619717 - RNA, 14 nt, Human
uucuccagcugggc

SEQ ID NO: 3619718 - RNA, 15 nt, Human
uucuccagcugggcu

SEQ ID NO: 3619719 - RNA, 20 nt, Human
uucuccaggucucacgggca

SEQ ID NO: 3619720 - RNA, 12 nt, Human
uucuccaucccu

SEQ ID NO: 3619721 - RNA, 18 nt, Human
uucuccaucuggcagggu

SEQ ID NO: 3619722 - RNA, 23 nt, Human
uucuccaugagacacaucuccuc

SEQ ID NO: 3619723 - RNA, 23 nt, Human
uucucccaauucauccucacuca

SEQ ID NO: 3619724 - RNA, 13 nt, Human
uucucccacacug

SEQ ID NO: 3619725 - RNA, 11 nt, Human
uucucccacuc

SEQ ID NO: 3619726 - RNA, 17 nt, Human
uucucccagaaucccag

SEQ ID NO: 3619727 - RNA, 20 nt, Human
uucucccagaaucccagccg

SEQ ID NO: 3619728 - RNA, 19 nt, Human
uucucccaggcaaggcugu

SEQ ID NO: 3619729 - RNA, 15 nt, Human
uucuuaucuucugca

SEQ ID NO: 3619730 - RNA, 14 nt, Human
uucuuaugaggagg

SEQ ID NO: 3619731 - RNA, 17 nt, Human
uucuuaugcaaaaugga

SEQ ID NO: 3619732 - RNA, 18 nt, Human
uucuuaugcaaaauggaa

SEQ ID NO: 3619733 - RNA, 18 nt, Human
uucuuaugccauauaauu

SEQ ID NO: 3619734 - RNA, 18 nt, Human
uucuuauggaauugauuu

SEQ ID NO: 3619735 - RNA, 21 nt, Human
uucuuaugugacauuaacaaa

SEQ ID NO: 3619736 - RNA, 19 nt, Human
uucuuauuuaaugaaagac

SEQ ID NO: 3619737 - RNA, 14 nt, Human
uucuuauuucauga

SEQ ID NO: 3619738 - RNA, 15 nt, Human
uucuuauuucauuuc

SEQ ID NO: 3619739 - RNA, 16 nt, Human
uucuucaaaccuuugu

SEQ ID NO: 3619740 - RNA, 17 nt, Human
uucuucaacaucaaugu

SEQ ID NO: 3619741 - RNA, 21 nt, Human
uucuucaacaucaauguucau

SEQ ID NO: 3619742 - RNA, 12 nt, Human
uucuucaagauc

SEQ ID NO: 3619743 - RNA, 17 nt, Human
uucuucaagaucccauu

SEQ ID NO: 3619744 - RNA, 13 nt, Human
uucuucacugcaa

SEQ ID NO: 3619745 - RNA, 14 nt, Human
uucuucacuuuugc

SEQ ID NO: 3619746 - RNA, 18 nt, Human
uucuucacuuuugcaagg

SEQ ID NO: 3619747 - RNA, 18 nt, Human
uucuucagauauacugga

SEQ ID NO: 3619748 - RNA, 20 nt, Human
uucuucagcguaaaauggug

SEQ ID NO: 3619749 - RNA, 18 nt, Human
uucuucauaacaauuuua

SEQ ID NO: 3619750 - RNA, 21 nt, Human
uucuucauaacaauuuuagga

SEQ ID NO: 3619751 - RNA, 15 nt, Human
uucuucauauucuaa

SEQ ID NO: 3619752 - RNA, 20 nt, Human
uucuucauauucuaaaacca

SEQ ID NO: 3619753 - RNA, 18 nt, Human
uucuucaucugugacucc

SEQ ID NO: 3619754 - RNA, 15 nt, Human
uucuucaugcaauga

SEQ ID NO: 3619755 - RNA, 17 nt, Human
uucuuccaaaaagauuu

SEQ ID NO: 3619756 - RNA, 14 nt, Human
uucuuccaaagcag

SEQ ID NO: 3619757 - RNA, 13 nt, Human
uucuuccauccca

SEQ ID NO: 3619758 - RNA, 20 nt, Human
uucuucccuuuuacauacug

SEQ ID NO: 3619759 - RNA, 15 nt, Human
uucuuccggccccuc

SEQ ID NO: 3619760 - RNA, 18 nt, Human
uucuuccuaccaagucaa

SEQ ID NO: 3619761 - RNA, 20 nt, Human
uucuuccucagccagccucg

SEQ ID NO: 3619762 - RNA, 15 nt, Human
uucuuccucauuccc

SEQ ID NO: 3619763 - RNA, 16 nt, Human
uucuuccuccagcugc

SEQ ID NO: 3619764 - RNA, 11 nt, Human
uucuuccucug

SEQ ID NO: 3619765 - RNA, 12 nt, Human
uucuuccucugc

SEQ ID NO: 3619766 - RNA, 13 nt, Human
uucuuccuggccg

SEQ ID NO: 3619767 - RNA, 18 nt, Human
uucuuccuguuaauguau

SEQ ID NO: 3619768 - RNA, 9 nt, Human
uucuuccuu

SEQ ID NO: 3619769 - RNA, 22 nt, Human
uucuuccuuaauucacucccac

SEQ ID NO: 3619770 - RNA, 14 nt, Human
uucuucgaaaaucu

SEQ ID NO: 3619771 - RNA, 17 nt, Human
uucuucgaaaaucuaga

SEQ ID NO: 3619772 - RNA, 19 nt, Human
uucuucgacuguuguuauc

SEQ ID NO: 3619773 - RNA, 23 nt, Human
uucuucgagguggaucacagagg

SEQ ID NO: 3619774 - RNA, 11 nt, Human
uucuucuagag

SEQ ID NO: 3619775 - RNA, 14 nt, Human
uucuucuagaguuc

SEQ ID NO: 3619776 - RNA, 18 nt, Human
uucuucuagguucuaaaa

SEQ ID NO: 3619777 - RNA, 21 nt, Human
uucuucuagguucuaaaaauu

SEQ ID NO: 3619778 - RNA, 17 nt, Human
uucuucucccccauccu

SEQ ID NO: 3619779 - RNA, 11 nt, Human
uucuucucccu

SEQ ID NO: 3619780 - RNA, 14 nt, Human
uucuucucccucag

SEQ ID NO: 3619781 - RNA, 14 nt, Human
uucuucucuagcug

SEQ ID NO: 3619782 - RNA, 14 nt, Human
uucuucucugcugc

SEQ ID NO: 3619783 - RNA, 15 nt, Human
uucuucucugugaga

SEQ ID NO: 3619784 - RNA, 19 nt, Human
uucuucucuuagauucuua

SEQ ID NO: 3619785 - RNA, 19 nt, Human
uucuucugaucacugaaau

SEQ ID NO: 3619786 - RNA, 20 nt, Human
uucuucugaucacugaaaua

SEQ ID NO: 3619787 - RNA, 23 nt, Human
uucuucuguaauauuuacaaugu

SEQ ID NO: 3619788 - RNA, 22 nt, Human
uucuucuuccaacguggcccag

SEQ ID NO: 3619789 - RNA, 14 nt, Human
uucuucuuccugaa

SEQ ID NO: 3619790 - RNA, 14 nt, Human
uucuucuucucguc

SEQ ID NO: 3619791 - RNA, 20 nt, Human
uucuugaacacucaugcuga

SEQ ID NO: 3619792 - RNA, 21 nt, Human
uucuugaacacucaugcugaa

SEQ ID NO: 3619793 - RNA, 17 nt, Human
uucuugaauauaaaaaa

SEQ ID NO: 3619794 - RNA, 23 nt, Human
uucuugaauggcaauguuuugcu

SEQ ID NO: 3619795 - RNA, 23 nt, Human
uucuugaggggaagcuagucuuu

SEQ ID NO: 3619796 - RNA, 20 nt, Human
uucuugauaauuuuccuuua

SEQ ID NO: 3619797 - RNA, 15 nt, Human
uucuugauguaaaau

SEQ ID NO: 3619798 - RNA, 16 nt, Human
uucuugcauugacauu

SEQ ID NO: 3619799 - RNA, 18 nt, Human
uucuugccucuguccccu

SEQ ID NO: 3619800 - RNA, 20 nt, Human
uucuugccucuguccccuuc

SEQ ID NO: 3619801 - RNA, 22 nt, Human
uucuugccucugugcugugugu

SEQ ID NO: 3619802 - RNA, 22 nt, Human
uucuugcucccuucagccccca

SEQ ID NO: 3619803 - RNA, 20 nt, Human
uucuugcucuaucucucaaa

SEQ ID NO: 3619804 - RNA, 19 nt, Human
uucuugcugcuagaacuuu

SEQ ID NO: 3619805 - RNA, 21 nt, Human
uucuugcugcuagaacuuuuu

SEQ ID NO: 3619806 - RNA, 17 nt, Human
uucuugcuucuuucuag

SEQ ID NO: 3619807 - RNA, 19 nt, Human
uucuugcuucuuucuagaa

SEQ ID NO: 3619808 - RNA, 19 nt, Human
uucuuggacacuuaauucu

SEQ ID NO: 3619809 - RNA, 22 nt, Human
uucuuggacacuuaauucuguu

SEQ ID NO: 3619810 - RNA, 18 nt, Human
uucuuggagucuuccaaa

SEQ ID NO: 3619811 - RNA, 23 nt, Human
uucuuggcaaaagccuuguguau

SEQ ID NO: 3619812 - RNA, 17 nt, Human
uucuuggccaugggagg

SEQ ID NO: 3619813 - RNA, 15 nt, Human
uucuuggcccaggau

SEQ ID NO: 3619814 - RNA, 14 nt, Human
uucuugggcccucc

SEQ ID NO: 3619815 - RNA, 18 nt, Human
uucuuggggcccuacacc

SEQ ID NO: 3619816 - RNA, 14 nt, Human
uucuugguaaaguc

SEQ ID NO: 3619817 - RNA, 22 nt, Human
uucuugguauuuggauaucugu

SEQ ID NO: 3619818 - RNA, 17 nt, Human
uucuugguucauaaaug

SEQ ID NO: 3619819 - RNA, 18 nt, Human
uucuugguucauaaauga

SEQ ID NO: 3619820 - RNA, 19 nt, Human
uucuugguucauaaaugaa

SEQ ID NO: 3619821 - RNA, 22 nt, Human
uucuugguugaggaaacaaaca

SEQ ID NO: 3619822 - RNA, 13 nt, Human
uucuugguuugua

SEQ ID NO: 3619823 - RNA, 17 nt, Human
uucuugguuuguaaauu

SEQ ID NO: 3619824 - RNA, 15 nt, Human
uucuuguaaaugugu

SEQ ID NO: 3619825 - RNA, 21 nt, Human
uucuuguaauuuaaacaggcc

SEQ ID NO: 3619826 - RNA, 13 nt, Human
uucuuguaguagu

SEQ ID NO: 3619827 - RNA, 22 nt, Human
uucuuguaucuggauucaaauu

SEQ ID NO: 3619828 - RNA, 13 nt, Human
uucuuguauuaag

SEQ ID NO: 3619829 - RNA, 19 nt, Human
uucuuguauuaagaaugaa

SEQ ID NO: 3619830 - RNA, 12 nt, Human
uucuuguauuua

SEQ ID NO: 3619831 - RNA, 17 nt, Human
uucuugucagacauaaa

SEQ ID NO: 3619832 - RNA, 14 nt, Human
uucuugucuauaaa

SEQ ID NO: 3619833 - RNA, 16 nt, Human
uucuugucuauaaagc

SEQ ID NO: 3619834 - RNA, 22 nt, Human
uucuugucuauaaagcauuuaa

SEQ ID NO: 3619835 - RNA, 15 nt, Human
uucuugucuauaguu

SEQ ID NO: 3619836 - RNA, 17 nt, Human
uucuugugaaggccaug

SEQ ID NO: 3619837 - RNA, 22 nt, Human
uucuuguguguaugcacaugaa

SEQ ID NO: 3619838 - RNA, 16 nt, Human
uucuuguucuguuuug

SEQ ID NO: 3619839 - RNA, 12 nt, Human
uucuuguugcuu

SEQ ID NO: 3619840 - RNA, 13 nt, Human
uucuuguuuauca

SEQ ID NO: 3619841 - RNA, 15 nt, Human
uucuuguuuccuugu

SEQ ID NO: 3619842 - RNA, 13 nt, Human
uucuuguuucucc

SEQ ID NO: 3619843 - RNA, 13 nt, Human
uucuuguuuugcu

SEQ ID NO: 3619844 - RNA, 23 nt, Human
uucuuuaaaaaacaacuauggau

SEQ ID NO: 3619845 - RNA, 14 nt, Human
uucuuuaaauguuu

SEQ ID NO: 3619846 - RNA, 12 nt, Human
uucuuuaacugc

SEQ ID NO: 3619847 - RNA, 22 nt, Human
uucuuuacaaaacaaacucauu

SEQ ID NO: 3619848 - RNA, 17 nt, Human
uucuuuagagaacugaa

SEQ ID NO: 3619849 - RNA, 18 nt, Human
uucuuuagagaacugaaa

SEQ ID NO: 3619850 - RNA, 20 nt, Human
uucuuuagagaacugaaaag

SEQ ID NO: 3619851 - RNA, 21 nt, Human
uucuuuagagaacugaaaaga

SEQ ID NO: 3619852 - RNA, 18 nt, Human
uucuuuagagcauugcca

SEQ ID NO: 3619853 - RNA, 14 nt, Human
uucuuuaggagauu

SEQ ID NO: 3619854 - RNA, 22 nt, Human
uucuuuaggagauuuuaggugu

SEQ ID NO: 3619855 - RNA, 20 nt, Human
uucuuuaguagcaacuaaaa

SEQ ID NO: 3619856 - RNA, 14 nt, Human
uucuuuauaagaaa

SEQ ID NO: 3619857 - RNA, 22 nt, Human
uucuuuauaagaaagccugagu

SEQ ID NO: 3619858 - RNA, 16 nt, Human
uucuuuauacaacagu

SEQ ID NO: 3619859 - RNA, 20 nt, Human
uucuuuauauuuauccacua

SEQ ID NO: 3619860 - RNA, 10 nt, Human
uucuuucaag

SEQ ID NO: 3619861 - RNA, 15 nt, Human
uucuuucaauacaga

SEQ ID NO: 3619862 - RNA, 19 nt, Human
uucuuucacaaaaaagaag

SEQ ID NO: 3619863 - RNA, 12 nt, Human
uucuuucagcca

SEQ ID NO: 3619864 - RNA, 18 nt, Human
uucuuucagcuaucagua

SEQ ID NO: 3619865 - RNA, 19 nt, Human
uucuuucaguucuuuggau

SEQ ID NO: 3619866 - RNA, 21 nt, Human
uucuuucuaguggucuuugua

SEQ ID NO: 3619867 - RNA, 20 nt, Human
uucuuucuuagaaauuuauu

SEQ ID NO: 3619868 - RNA, 19 nt, Human
uucuuugaaaaaaaauaaa

SEQ ID NO: 3619869 - RNA, 23 nt, Human
uucuuugaaaauaguuauucagu

SEQ ID NO: 3619870 - RNA, 12 nt, Human
uucuuugaagaa

SEQ ID NO: 3619871 - RNA, 20 nt, Human
uugauauuugugcauuuucu

SEQ ID NO: 3619872 - RNA, 22 nt, Human
uugauauuuucaacgcagcccu

SEQ ID NO: 3619873 - RNA, 18 nt, Human
uugaucaacaucuuuucu

SEQ ID NO: 3619874 - RNA, 22 nt, Human
uugaucaacaucuuuucuugcc

SEQ ID NO: 3619875 - RNA, 18 nt, Human
uugaucaguuaagaaauu

SEQ ID NO: 3619876 - RNA, 17 nt, Human
uugaucauguacuuuuu

SEQ ID NO: 3619877 - RNA, 14 nt, Human
uugaucauuucuug

SEQ ID NO: 3619878 - RNA, 17 nt, Human
uugaucauuucuuguga

SEQ ID NO: 3619879 - RNA, 19 nt, Human
uugaucauuuuccccccac

SEQ ID NO: 3619880 - RNA, 22 nt, Human
uugaucauuuuccccccacucu

SEQ ID NO: 3619881 - RNA, 16 nt, Human
uugauccauuucuaau

SEQ ID NO: 3619882 - RNA, 12 nt, Human
uugaucucccca

SEQ ID NO: 3619883 - RNA, 16 nt, Human
uugaucuccguggcuu

SEQ ID NO: 3619884 - RNA, 19 nt, Human
uugaucugcucagcccugg

SEQ ID NO: 3619885 - RNA, 16 nt, Human
uugaucuggaacccag

SEQ ID NO: 3619886 - RNA, 17 nt, Human
uugaucuggaacccaga

SEQ ID NO: 3619887 - RNA, 19 nt, Human
uugaucuggaacccagacu

SEQ ID NO: 3619888 - RNA, 11 nt, Human
uugaucuucaa

SEQ ID NO: 3619889 - RNA, 15 nt, Human
uugaucuucaacaaa

SEQ ID NO: 3619890 - RNA, 11 nt, Human
uugaugaaaag

SEQ ID NO: 3619891 - RNA, 19 nt, Human
uugaugaaaagauuuaagc

SEQ ID NO: 3619892 - RNA, 14 nt, Human
uugaugaaaagcuu

SEQ ID NO: 3619893 - RNA, 15 nt, Human
uugaugaaagcugau

SEQ ID NO: 3619894 - RNA, 16 nt, Human
uugaugaaagcugauu

SEQ ID NO: 3619895 - RNA, 12 nt, Human
uugaugaagaag

SEQ ID NO: 3619896 - RNA, 13 nt, Human
uugaugaagaagu

SEQ ID NO: 3619897 - RNA, 14 nt, Human
uugaugaagaaguu

SEQ ID NO: 3619898 - RNA, 16 nt, Human
uugaugaagcaaggaa

SEQ ID NO: 3619899 - RNA, 21 nt, Human
uugaugaagcaaggaagauau

SEQ ID NO: 3619900 - RNA, 13 nt, Human
uugaugacuggaa

SEQ ID NO: 3619901 - RNA, 20 nt, Human
uugaugacuggaauuuuuau

SEQ ID NO: 3619902 - RNA, 14 nt, Human
uugaugaggccucu

SEQ ID NO: 3619903 - RNA, 19 nt, Human
uugaugaguguaacaagaa

SEQ ID NO: 3619904 - RNA, 12 nt, Human
uugaugcacaga

SEQ ID NO: 3619905 - RNA, 18 nt, Human
uugaugcacagagaagcu

SEQ ID NO: 3619906 - RNA, 21 nt, Human
uugaugcacagagaagcuggg

SEQ ID NO: 3619907 - RNA, 14 nt, Human
uugaugcagcauuu

SEQ ID NO: 3619908 - RNA, 18 nt, Human
uugaugcagcauuugaua

SEQ ID NO: 3619909 - RNA, 18 nt, Human
uugaugcaggcacuuauu

SEQ ID NO: 3619910 - RNA, 11 nt, Human
uugaugcaugu

SEQ ID NO: 3619911 - RNA, 19 nt, Human
uugaugcauuaaaagaaaa

SEQ ID NO: 3619912 - RNA, 14 nt, Human
uugaugccaaaaaa

SEQ ID NO: 3619913 - RNA, 22 nt, Human
uugaugccaaaaaaaaauacau

SEQ ID NO: 3619914 - RNA, 17 nt, Human
uugaugcugacagucau

SEQ ID NO: 3619915 - RNA, 20 nt, Human
uugauggcuaacuuacaaag

SEQ ID NO: 3619916 - RNA, 15 nt, Human
uugaugggauuuggu

SEQ ID NO: 3619917 - RNA, 18 nt, Human
uugauggugguauguuuu

SEQ ID NO: 3619918 - RNA, 12 nt, Human
uugaugguuuau

SEQ ID NO: 3619919 - RNA, 15 nt, Human
uugauguaaaaucuu

SEQ ID NO: 3619920 - RNA, 16 nt, Human
uugauguaaaaucuug

SEQ ID NO: 3619921 - RNA, 21 nt, Human
uugauguaaaaucuugucaug

SEQ ID NO: 3619922 - RNA, 22 nt, Human
uugauguacugauugagaaguu

SEQ ID NO: 3619923 - RNA, 14 nt, Human
uugaugugacaaua

SEQ ID NO: 3619924 - RNA, 13 nt, Human
uugauguggcccu

SEQ ID NO: 3619925 - RNA, 14 nt, Human
uugauguguuaucu

SEQ ID NO: 3619926 - RNA, 13 nt, Human
uugauguguuguu

SEQ ID NO: 3619927 - RNA, 23 nt, Human
uugauguucuuucacccuuuucu

SEQ ID NO: 3619928 - RNA, 13 nt, Human
uugauguuggcug

SEQ ID NO: 3619929 - RNA, 13 nt, Human
uugauuaaauucu

SEQ ID NO: 3619930 - RNA, 14 nt, Human
uugauuaaauucuu

SEQ ID NO: 3619931 - RNA, 16 nt, Human
uugauuaaauucuugc

SEQ ID NO: 3619932 - RNA, 22 nt, Human
uugauuaagaucucagugguua

SEQ ID NO: 3619933 - RNA, 16 nt, Human
uugauuaagauuuuac

SEQ ID NO: 3619934 - RNA, 13 nt, Human
uugauuaugcaua

SEQ ID NO: 3619935 - RNA, 16 nt, Human
uugauuauuagccagg

SEQ ID NO: 3619936 - RNA, 15 nt, Human
uugauuauucagugu

SEQ ID NO: 3619937 - RNA, 12 nt, Human
uugauuauucug

SEQ ID NO: 3619938 - RNA, 20 nt, Human
uugauuauucugauuccacu

SEQ ID NO: 3619939 - RNA, 12 nt, Human
uugauuauuugc

SEQ ID NO: 3619940 - RNA, 23 nt, Human
uugauuauuugcauguuauguuu

SEQ ID NO: 3619941 - RNA, 23 nt, Human
uugauuauuuuuuuuuucuucuu

SEQ ID NO: 3619942 - RNA, 12 nt, Human
uugauucaaaau

SEQ ID NO: 3619943 - RNA, 15 nt, Human
uugauucaaaauauu

SEQ ID NO: 3619944 - RNA, 18 nt, Human
uugauucaaaauauuuaa

SEQ ID NO: 3619945 - RNA, 13 nt, Human
uugauucacaugu

SEQ ID NO: 3619946 - RNA, 14 nt, Human
uugccuuugaagag

SEQ ID NO: 3619947 - RNA, 17 nt, Human
uugccuuugaagaguga

SEQ ID NO: 3619948 - RNA, 17 nt, Human
uugccuuuguuuugaug

SEQ ID NO: 3619949 - RNA, 13 nt, Human
uugccuuuugcaa

SEQ ID NO: 3619950 - RNA, 14 nt, Human
uugccuuuuucauu

SEQ ID NO: 3619951 - RNA, 17 nt, Human
uugcgaaugguuccauu

SEQ ID NO: 3619952 - RNA, 19 nt, Human
uugcgacggagagaaaaaa

SEQ ID NO: 3619953 - RNA, 20 nt, Human
uugcgacggagagaaaaaag

SEQ ID NO: 3619954 - RNA, 12 nt, Human
uugcgagagaug

SEQ ID NO: 3619955 - RNA, 14 nt, Human
uugcgagagaugug

SEQ ID NO: 3619956 - RNA, 16 nt, Human
uugcgagagaugugug

SEQ ID NO: 3619957 - RNA, 17 nt, Human
uugcgagagaugugugu

SEQ ID NO: 3619958 - RNA, 15 nt, Human
uugcgcuccuggccc

SEQ ID NO: 3619959 - RNA, 20 nt, Human
uugcgcuccuggcccagccu

SEQ ID NO: 3619960 - RNA, 17 nt, Human
uugcggcaaaaggaaag

SEQ ID NO: 3619961 - RNA, 23 nt, Human
uugcggcgucagucuuuuucugu

SEQ ID NO: 3619962 - RNA, 14 nt, Human
uugcggcuccucag

SEQ ID NO: 3619963 - RNA, 14 nt, Human
uugcgggacagagu

SEQ ID NO: 3619964 - RNA, 17 nt, Human
uugcguaacuggcugug

SEQ ID NO: 3619965 - RNA, 14 nt, Human
uugcgugacacucu

SEQ ID NO: 3619966 - RNA, 20 nt, Human
uugcgugacacucuccuugc

SEQ ID NO: 3619967 - RNA, 18 nt, Human
uugcgugcccggggcagc

SEQ ID NO: 3619968 - RNA, 13 nt, Human
uugcuaaacacug

SEQ ID NO: 3619969 - RNA, 14 nt, Human
uugcuaaacacugc

SEQ ID NO: 3619970 - RNA, 22 nt, Human
uugcuaaaggaaaaaaccaucc

SEQ ID NO: 3619971 - RNA, 20 nt, Human
uugcuaacagcaacacaaag

SEQ ID NO: 3619972 - RNA, 16 nt, Human
uugcuaagcauuccaa

SEQ ID NO: 3619973 - RNA, 21 nt, Human
uugcuaagccccagcaagcaa

SEQ ID NO: 3619974 - RNA, 22 nt, Human
uugcuaaguaaaucucuucugu

SEQ ID NO: 3619975 - RNA, 20 nt, Human
uugcuaagugaggaugaaaa

SEQ ID NO: 3619976 - RNA, 15 nt, Human
uugcuaaucaguguc

SEQ ID NO: 3619977 - RNA, 23 nt, Human
uugcuaauuuucucaaaagcauu

SEQ ID NO: 3619978 - RNA, 17 nt, Human
uugcuaauuuuuauuaa

SEQ ID NO: 3619979 - RNA, 13 nt, Human
uugcuacauaauu

SEQ ID NO: 3619980 - RNA, 12 nt, Human
uugcuaccagua

SEQ ID NO: 3619981 - RNA, 16 nt, Human
uugcuaccaguauuua

SEQ ID NO: 3619982 - RNA, 20 nt, Human
uugcuaccaguauuuagaag

SEQ ID NO: 3619983 - RNA, 19 nt, Human
uugcuacuguuguaagaau

SEQ ID NO: 3619984 - RNA, 19 nt, Human
uugcuagaaugggaagggu

SEQ ID NO: 3619985 - RNA, 16 nt, Human
uugcuagagcuccucc

SEQ ID NO: 3619986 - RNA, 16 nt, Human
uugcuagcuaugugac

SEQ ID NO: 3619987 - RNA, 19 nt, Human
uugcuagcuaugugaccuu

SEQ ID NO: 3619988 - RNA, 21 nt, Human
uugcuaucaaaauaaauugaa

SEQ ID NO: 3619989 - RNA, 15 nt, Human
uugcuaucuuaauuu

SEQ ID NO: 3619990 - RNA, 18 nt, Human
uugcuaucuuaauuuugg

SEQ ID NO: 3619991 - RNA, 18 nt, Human
uugcuauguuacuauuuu

SEQ ID NO: 3619992 - RNA, 21 nt, Human
uugcuauguuacuauuuucua

SEQ ID NO: 3619993 - RNA, 17 nt, Human
uugcuauuagagcauug

SEQ ID NO: 3619994 - RNA, 12 nt, Human
uugcuauucugu

SEQ ID NO: 3619995 - RNA, 15 nt, Human
uugcuauucuguccc

SEQ ID NO: 3619996 - RNA, 18 nt, Human
uugcuauugaauugagau

SEQ ID NO: 3619997 - RNA, 19 nt, Human
uugcucaaaucuauucaga

SEQ ID NO: 3619998 - RNA, 21 nt, Human
uugcucaaguucauugaugac

SEQ ID NO: 3619999 - RNA, 22 nt, Human
uugcucaaguucauugaugacc

SEQ ID NO: 3620000 - RNA, 15 nt, Human
uugcucacagcugua

SEQ ID NO: 3620001 - RNA, 19 nt, Human
uugcucacccagugcccuc

SEQ ID NO: 3620002 - RNA, 13 nt, Human
uugcucagucucc

SEQ ID NO: 3620003 - RNA, 23 nt, Human
uugcucauuuuuuaaaaaaugga

SEQ ID NO: 3620004 - RNA, 16 nt, Human
uugcuccccuuccccu

SEQ ID NO: 3620005 - RNA, 17 nt, Human
uugcuccccuuccccuu

SEQ ID NO: 3620006 - RNA, 20 nt, Human
uugcuccccuuccccuuccu

SEQ ID NO: 3620007 - RNA, 19 nt, Human
uugcucccuucagccccca

SEQ ID NO: 3620008 - RNA, 12 nt, Human
uugcuccuugac

SEQ ID NO: 3620009 - RNA, 18 nt, Human
uugcucuaaaauauuuau

SEQ ID NO: 3620010 - RNA, 14 nt, Human
uugcucuacaauga

SEQ ID NO: 3620011 - RNA, 14 nt, Human
uugcucuaggaaga

SEQ ID NO: 3620012 - RNA, 20 nt, Human
uugcucucccgguucuucca

SEQ ID NO: 3620013 - RNA, 23 nt, Human
uugcucucccgguucuuccagug

SEQ ID NO: 3620014 - RNA, 18 nt, Human
uugcucucccucuucuca

SEQ ID NO: 3620015 - RNA, 23 nt, Human
uugcucuguaaucucguuucaaa

SEQ ID NO: 3620016 - RNA, 20 nt, Human
uugcucuguuugugggguga

SEQ ID NO: 3620017 - RNA, 17 nt, Human
uugcucuucagaugcca

SEQ ID NO: 3620018 - RNA, 17 nt, Human
uugcucuugaugccugg

SEQ ID NO: 3620019 - RNA, 15 nt, Human
uugcucuuguagccc

SEQ ID NO: 3620020 - RNA, 19 nt, Human
uugcucuugucccacgugu

SEQ ID NO: 3620021 - RNA, 16 nt, Human
uugcucuuucuacucu

SEQ ID NO: 3620022 - RNA, 13 nt, Human
uugcugaaaaaug

SEQ ID NO: 3620023 - RNA, 17 nt, Human
uugcugaacauuggaga

SEQ ID NO: 3620024 - RNA, 23 nt, Human
uugcugaauacagaggcaacugc

SEQ ID NO: 3620025 - RNA, 11 nt, Human
uugcugaauag

SEQ ID NO: 3620026 - RNA, 21 nt, Human
uugcugacuguagcuuuggaa

SEQ ID NO: 3620027 - RNA, 14 nt, Human
uugcugacuuagaa

SEQ ID NO: 3620028 - RNA, 11 nt, Human
uugcugagacu

SEQ ID NO: 3620029 - RNA, 14 nt, Human
uugcugagccucug

SEQ ID NO: 3620030 - RNA, 17 nt, Human
uugcugauggugcaaug

SEQ ID NO: 3620031 - RNA, 19 nt, Human
uugcugauggugcaaugac

SEQ ID NO: 3620032 - RNA, 19 nt, Human
uugcugauuuuaauggauu

SEQ ID NO: 3620033 - RNA, 20 nt, Human
uugcugauuuuauucuugau

SEQ ID NO: 3620034 - RNA, 20 nt, Human
uugcugcaagcacagcccuu

SEQ ID NO: 3620035 - RNA, 12 nt, Human
uugcugcagaga

SEQ ID NO: 3620036 - RNA, 18 nt, Human
uugcugcaguaugaaaau

SEQ ID NO: 3620037 - RNA, 20 nt, Human
uugcugccacuuuuuaacua

SEQ ID NO: 3620038 - RNA, 19 nt, Human
uugcugccccaucagugcu

SEQ ID NO: 3620039 - RNA, 12 nt, Human
uugcugccucau

SEQ ID NO: 3620040 - RNA, 23 nt, Human
uugcugccucggauccccuuccu

SEQ ID NO: 3620041 - RNA, 21 nt, Human
uugcugccugaagaacaguaa

SEQ ID NO: 3620042 - RNA, 13 nt, Human
uugggauuaauau

SEQ ID NO: 3620043 - RNA, 21 nt, Human
uugggauugggggcuggugcc

SEQ ID NO: 3620044 - RNA, 22 nt, Human
uugggauugggggcuggugcca

SEQ ID NO: 3620045 - RNA, 21 nt, Human
uugggcaauauucucuguaca

SEQ ID NO: 3620046 - RNA, 22 nt, Human
uugggcaauauucucuguacau

SEQ ID NO: 3620047 - RNA, 19 nt, Human
uugggcacccccagccugg

SEQ ID NO: 3620048 - RNA, 19 nt, Human
uugggcagaagggagaagg

SEQ ID NO: 3620049 - RNA, 22 nt, Human
uugggcagagcuggcucugagc

SEQ ID NO: 3620050 - RNA, 19 nt, Human
uugggcagcaauuuaaaug

SEQ ID NO: 3620051 - RNA, 19 nt, Human
uugggcagcgcccuuccuc

SEQ ID NO: 3620052 - RNA, 22 nt, Human
uugggccaaauccgcucucuuc

SEQ ID NO: 3620053 - RNA, 16 nt, Human
uugggccauacuggcc

SEQ ID NO: 3620054 - RNA, 23 nt, Human
uugggccauacuggccucgccug

SEQ ID NO: 3620055 - RNA, 20 nt, Human
uugggcccacaccuccuucc

SEQ ID NO: 3620056 - RNA, 22 nt, Human
uugggcccacaccuccuucccu

SEQ ID NO: 3620057 - RNA, 18 nt, Human
uugggcccagcugggcuc

SEQ ID NO: 3620058 - RNA, 11 nt, Human
uugggcccagg

SEQ ID NO: 3620059 - RNA, 12 nt, Human
uugggcccuccu

SEQ ID NO: 3620060 - RNA, 19 nt, Human
uugggccugcuccagaccu

SEQ ID NO: 3620061 - RNA, 20 nt, Human
uugggccugcuccagaccug

SEQ ID NO: 3620062 - RNA, 16 nt, Human
uugggcggcugagagc

SEQ ID NO: 3620063 - RNA, 21 nt, Human
uugggcggcugagagccccag

SEQ ID NO: 3620064 - RNA, 15 nt, Human
uugggcuccuuuuuc

SEQ ID NO: 3620065 - RNA, 16 nt, Human
uugggcuccuuuuucu

SEQ ID NO: 3620066 - RNA, 13 nt, Human
uugggcugagacu

SEQ ID NO: 3620067 - RNA, 15 nt, Human
uugggcugagacugg

SEQ ID NO: 3620068 - RNA, 19 nt, Human
uugggcuggaacagauuca

SEQ ID NO: 3620069 - RNA, 17 nt, Human
uugggcuugcuauucug

SEQ ID NO: 3620070 - RNA, 20 nt, Human
uuggggaaaccuagagaaga

SEQ ID NO: 3620071 - RNA, 19 nt, Human
uuggggaagaacgaagcca

SEQ ID NO: 3620072 - RNA, 22 nt, Human
uuggggaagagagccugcagga

SEQ ID NO: 3620073 - RNA, 18 nt, Human
uuggggaagggccugccc

SEQ ID NO: 3620074 - RNA, 15 nt, Human
uuggggaauuuccuc

SEQ ID NO: 3620075 - RNA, 23 nt, Human
uuggggacaggggcaggaggaag

SEQ ID NO: 3620076 - RNA, 16 nt, Human
uuggggagauuugcca

SEQ ID NO: 3620077 - RNA, 13 nt, Human
uuggggaggggcg

SEQ ID NO: 3620078 - RNA, 17 nt, Human
uuggggaguuaagaccu

SEQ ID NO: 3620079 - RNA, 13 nt, Human
uuggggauucuua

SEQ ID NO: 3620080 - RNA, 20 nt, Human
uuggggcaggaguagcugag

SEQ ID NO: 3620081 - RNA, 17 nt, Human
uuggggcgaggcagagg

SEQ ID NO: 3620082 - RNA, 15 nt, Human
uuggggcucccagcc

SEQ ID NO: 3620083 - RNA, 15 nt, Human
uuggggcuuauuuuu

SEQ ID NO: 3620084 - RNA, 14 nt, Human
uuggggcuucuugg

SEQ ID NO: 3620085 - RNA, 16 nt, Human
uuggggcuugacuuuu

SEQ ID NO: 3620086 - RNA, 23 nt, Human
uugggggacagggcuggcccagc

SEQ ID NO: 3620087 - RNA, 12 nt, Human
uugggggcuggu

SEQ ID NO: 3620088 - RNA, 19 nt, Human
uuggggggaaggggacccu

SEQ ID NO: 3620089 - RNA, 21 nt, Human
uugggggggccaaaaggaaaa

SEQ ID NO: 3620090 - RNA, 13 nt, Human
uuggggggguggc

SEQ ID NO: 3620091 - RNA, 19 nt, Human
uugggggucagugcugccu

SEQ ID NO: 3620092 - RNA, 13 nt, Human
uuggggucagcca

SEQ ID NO: 3620093 - RNA, 16 nt, Human
uuggggucagccaggg

SEQ ID NO: 3620094 - RNA, 13 nt, Human
uuggggucucuuu

SEQ ID NO: 3620095 - RNA, 22 nt, Human
uuggggucucuuuuguaaauua

SEQ ID NO: 3620096 - RNA, 21 nt, Human
uuggggugucuuuuuuuggug

SEQ ID NO: 3620097 - RNA, 16 nt, Human
uugggguuuuuuaaua

SEQ ID NO: 3620098 - RNA, 14 nt, Human
uuggguccaggagg

SEQ ID NO: 3620099 - RNA, 14 nt, Human
uuggguccuggguc

SEQ ID NO: 3620100 - RNA, 17 nt, Human
uugggucuauuccagcu

SEQ ID NO: 3620101 - RNA, 19 nt, Human
uugggugcugcuaauucuu

SEQ ID NO: 3620102 - RNA, 17 nt, Human
uuggguggagaagccau

SEQ ID NO: 3620103 - RNA, 19 nt, Human
uuggguggagaagccauug

SEQ ID NO: 3620104 - RNA, 20 nt, Human
uuggguguaacaggucuccu

SEQ ID NO: 3620105 - RNA, 21 nt, Human
uuggguguaacaggucuccuc

SEQ ID NO: 3620106 - RNA, 13 nt, Human
uuggguguauugu

SEQ ID NO: 3620107 - RNA, 21 nt, Human
uuggguuaaaaaaaaaaaaag

SEQ ID NO: 3620108 - RNA, 15 nt, Human
uuggguuagaccuac

SEQ ID NO: 3620109 - RNA, 17 nt, Human
uuggguuuauuuggaaa

SEQ ID NO: 3620110 - RNA, 12 nt, Human
uugguaaaccuu

SEQ ID NO: 3620111 - RNA, 15 nt, Human
uugguaaaguccuuu

SEQ ID NO: 3620112 - RNA, 16 nt, Human
uugguaacauccuuuc

SEQ ID NO: 3620113 - RNA, 14 nt, Human
uugguaagagacag

SEQ ID NO: 3620114 - RNA, 20 nt, Human
uugguaauccccuaaaauaa

SEQ ID NO: 3620115 - RNA, 14 nt, Human
uugguacacaacua

SEQ ID NO: 3620116 - RNA, 14 nt, Human
uugguaccuugcac

SEQ ID NO: 3620117 - RNA, 13 nt, Human
uugguagagauuc

SEQ ID NO: 3620118 - RNA, 15 nt, Human
uugguagagauucau

SEQ ID NO: 3620119 - RNA, 18 nt, Human
uugguagauuaaauauag

SEQ ID NO: 3620120 - RNA, 16 nt, Human
uugguaucaagaaagu

SEQ ID NO: 3620121 - RNA, 16 nt, Human
uugguauuaauaaaaa

SEQ ID NO: 3620122 - RNA, 19 nt, Human
uuggucaugugggucuucc

SEQ ID NO: 3620123 - RNA, 13 nt, Human
uuggucccugggg

SEQ ID NO: 3620124 - RNA, 21 nt, Human
uugguccuaagucccugcccc

SEQ ID NO: 3620125 - RNA, 14 nt, Human
uugguccugucccc

SEQ ID NO: 3620126 - RNA, 18 nt, Human
uuggucucuauuucauuu

SEQ ID NO: 3620127 - RNA, 20 nt, Human
uuggucugacccacugcuuu

SEQ ID NO: 3620128 - RNA, 13 nt, Human
uuggucuggacug

SEQ ID NO: 3620129 - RNA, 17 nt, Human
uuggucuggacugacag

SEQ ID NO: 3620130 - RNA, 13 nt, Human
uuggucuguguga

SEQ ID NO: 3620131 - RNA, 16 nt, Human
uuggugagaaaccugu

SEQ ID NO: 3620132 - RNA, 18 nt, Human
uuggugagaaaccuguau

SEQ ID NO: 3620133 - RNA, 21 nt, Human
uuggugagaaaccuguaucuu

SEQ ID NO: 3620134 - RNA, 15 nt, Human
uuggugauucaaaug

SEQ ID NO: 3620135 - RNA, 18 nt, Human
uuggugcacagugauuuu

SEQ ID NO: 3620136 - RNA, 12 nt, Human
uuggugccuggc

SEQ ID NO: 3620137 - RNA, 13 nt, Human
uuggugccuggcc

SEQ ID NO: 3620138 - RNA, 17 nt, Human
uuggugccuuuccuguu

SEQ ID NO: 3620139 - RNA, 16 nt, Human
uugguggagauaaaga

SEQ ID NO: 3620140 - RNA, 18 nt, Human
uuggugguuucagaaaug

SEQ ID NO: 3620141 - RNA, 17 nt, Human
uugguguaauuugaaga

SEQ ID NO: 3620142 - RNA, 14 nt, Human
uugguguacagacu

SEQ ID NO: 3620143 - RNA, 17 nt, Human
uuggugucgggcaugac

SEQ ID NO: 3620144 - RNA, 18 nt, Human
uuggugucgggcaugaca

SEQ ID NO: 3620145 - RNA, 19 nt, Human
uugguguguuggacagaga

SEQ ID NO: 3620146 - RNA, 23 nt, Human
uugguguguuuuugggaugucuu

SEQ ID NO: 3620147 - RNA, 15 nt, Human
uugguguugucauug

SEQ ID NO: 3620148 - RNA, 16 nt, Human
uugguuauacaugaca

SEQ ID NO: 3620149 - RNA, 20 nt, Human
uugguuauagugcaauauau

SEQ ID NO: 3620150 - RNA, 13 nt, Human
uugguucaaaugu

SEQ ID NO: 3620151 - RNA, 18 nt, Human
uugguucauuuucagauu

SEQ ID NO: 3620152 - RNA, 22 nt, Human
uugguuccaagucuuugcuauu

SEQ ID NO: 3620153 - RNA, 14 nt, Human
uugguucccuugug

SEQ ID NO: 3620154 - RNA, 14 nt, Human
uugguuccucucug

SEQ ID NO: 3620155 - RNA, 13 nt, Human
uugguuccugggg

SEQ ID NO: 3620156 - RNA, 18 nt, Human
uugguucuaaggaccuga

SEQ ID NO: 3620157 - RNA, 18 nt, Human
uugguucuagcgcaguuu

SEQ ID NO: 3620158 - RNA, 19 nt, Human
uugguucugcuucaauaaa

SEQ ID NO: 3620159 - RNA, 14 nt, Human
uugguucuggggcc

SEQ ID NO: 3620160 - RNA, 14 nt, Human
uugguucugugaac

SEQ ID NO: 3620161 - RNA, 22 nt, Human
uugguucuugaggggaccagga

SEQ ID NO: 3620162 - RNA, 22 nt, Human
uugguucuugguagagauucau

SEQ ID NO: 3620163 - RNA, 16 nt, Human
uugguugcuuuaauau

SEQ ID NO: 3620164 - RNA, 15 nt, Human
uugguuggcuggccu

SEQ ID NO: 3620165 - RNA, 17 nt, Human
uugguugggaugacuug

SEQ ID NO: 3620166 - RNA, 13 nt, Human
uugguuguauucu

SEQ ID NO: 3620167 - RNA, 18 nt, Human
uugguuguuuuuuccuuu

SEQ ID NO: 3620168 - RNA, 18 nt, Human
uugguuuaaagaaagugu

SEQ ID NO: 3620169 - RNA, 16 nt, Human
uugguuuacuuucaaa

SEQ ID NO: 3620170 - RNA, 22 nt, Human
uugguuuagcccaaguggagcc

SEQ ID NO: 3620171 - RNA, 13 nt, Human
uugguuuccccaa

SEQ ID NO: 3620172 - RNA, 20 nt, Human
uugguuuggccaucucugga

SEQ ID NO: 3620173 - RNA, 14 nt, Human
uugguuuguaaauu

SEQ ID NO: 3620174 - RNA, 20 nt, Human
uugguuuuaauugaaggaaa

SEQ ID NO: 3620175 - RNA, 13 nt, Human
uugguuuuauggu

SEQ ID NO: 3620176 - RNA, 20 nt, Human
uugguuuucacauuggaaac

SEQ ID NO: 3620177 - RNA, 13 nt, Human
uugguuuucuucu

SEQ ID NO: 3620178 - RNA, 13 nt, Human
uugguuuugacug

SEQ ID NO: 3620179 - RNA, 15 nt, Human
uugguuuugacugga

SEQ ID NO: 3620180 - RNA, 17 nt, Human
uugguuuuguuccccuc

SEQ ID NO: 3620181 - RNA, 19 nt, Human
uugguuuuuauuucuccuu

SEQ ID NO: 3620182 - RNA, 17 nt, Human
uuguaaaaaaaaaugcc

SEQ ID NO: 3620183 - RNA, 19 nt, Human
uuguaaaaaaaaaugccuu

SEQ ID NO: 3620184 - RNA, 23 nt, Human
uuguaaaaaaaaaugccuuugag

SEQ ID NO: 3620185 - RNA, 13 nt, Human
uuguaaaaagaaa

SEQ ID NO: 3620186 - RNA, 18 nt, Human
uuguaaaaagaaaaacca

SEQ ID NO: 3620187 - RNA, 22 nt, Human
uuguaaaaaucuuuugaagcau

SEQ ID NO: 3620188 - RNA, 13 nt, Human
uuguaaaaaugua

SEQ ID NO: 3620189 - RNA, 22 nt, Human
uuguaaaaauuaaaaguuaugg

SEQ ID NO: 3620190 - RNA, 21 nt, Human
uuguaaaaccugucaaugaua

SEQ ID NO: 3620191 - RNA, 14 nt, Human
uuguaaaacuacac

SEQ ID NO: 3620192 - RNA, 20 nt, Human
uuguaaaagaacaguaaaca

SEQ ID NO: 3620193 - RNA, 23 nt, Human
uuguaaaagaacaguaaacauug

SEQ ID NO: 3620194 - RNA, 15 nt, Human
uuguaaaauagcuug

SEQ ID NO: 3620195 - RNA, 13 nt, Human
uuguaaaauauag

SEQ ID NO: 3620196 - RNA, 14 nt, Human
uuguaaaauauagc

SEQ ID NO: 3620197 - RNA, 13 nt, Human
uuguaaaaugaca

SEQ ID NO: 3620198 - RNA, 12 nt, Human
uuguaaaauggu

SEQ ID NO: 3620199 - RNA, 20 nt, Human
uuguaaaauggugugaccac

SEQ ID NO: 3620200 - RNA, 19 nt, Human
uuguaaaauguucucuuau

SEQ ID NO: 3620201 - RNA, 23 nt, Human
uuguaaacaaacuguguaacugc

SEQ ID NO: 3620202 - RNA, 14 nt, Human
uuguaaacaugugu

SEQ ID NO: 3620203 - RNA, 14 nt, Human
uuguaaacauuuau

SEQ ID NO: 3620204 - RNA, 22 nt, Human
uuguaaacucaaaauauuugua

SEQ ID NO: 3620205 - RNA, 15 nt, Human
uuguaaacuguacua

SEQ ID NO: 3620206 - RNA, 12 nt, Human
uuguaaacuuug

SEQ ID NO: 3620207 - RNA, 13 nt, Human
uuguaaacuuuga

SEQ ID NO: 3620208 - RNA, 18 nt, Human
uuguaaacuuugaaauau

SEQ ID NO: 3620209 - RNA, 12 nt, Human
uuguaaagacug

SEQ ID NO: 3620210 - RNA, 13 nt, Human
uuguaaagaguug

SEQ ID NO: 3620211 - RNA, 17 nt, Human
uuguaaagauuucuguu

SEQ ID NO: 3620212 - RNA, 18 nt, Human
uuguaaagauuucuguuc

SEQ ID NO: 3620213 - RNA, 23 nt, Human
uuguaaaguguggucccaacagg

SEQ ID NO: 3620214 - RNA, 14 nt, Human
uuguaaauaagaga

SEQ ID NO: 3620215 - RNA, 11 nt, Human
uuguaaauaca

SEQ ID NO: 3620216 - RNA, 12 nt, Human
uuguaaauacac

SEQ ID NO: 3620217 - RNA, 12 nt, Human
uuguaaauauau

SEQ ID NO: 3620218 - RNA, 23 nt, Human
uuguaaauauuaaaccauaagau

SEQ ID NO: 3620219 - RNA, 12 nt, Human
uuguaaauauuu

SEQ ID NO: 3620220 - RNA, 16 nt, Human
uuguaaauauuuaugu

SEQ ID NO: 3620221 - RNA, 18 nt, Human
uuguaaaugugcuuuuaa

SEQ ID NO: 3620222 - RNA, 13 nt, Human
uuguaaauguuau

SEQ ID NO: 3620223 - RNA, 18 nt, Human
uuguaaauguuauuucug

SEQ ID NO: 3620224 - RNA, 12 nt, Human
uuguaaauuaua

SEQ ID NO: 3620225 - RNA, 15 nt, Human
uuguaaauuauauuu

SEQ ID NO: 3620226 - RNA, 16 nt, Human
uuguaaauuauuaauu

SEQ ID NO: 3620227 - RNA, 23 nt, Human
uuguaaauuauuaauuuaugcag

SEQ ID NO: 3620228 - RNA, 12 nt, Human
uuguaaauucug

SEQ ID NO: 3620229 - RNA, 13 nt, Human
uuguaaauucuga

SEQ ID NO: 3620230 - RNA, 14 nt, Human
uuguaaauucugau

SEQ ID NO: 3620231 - RNA, 14 nt, Human
uuguaaauuggcau

SEQ ID NO: 3620232 - RNA, 14 nt, Human
uuguaaccucagcu

SEQ ID NO: 3620233 - RNA, 16 nt, Human
uuguaaccucagcucu

SEQ ID NO: 3620234 - RNA, 19 nt, Human
uuguaacguugcuguggga

SEQ ID NO: 3620235 - RNA, 22 nt, Human
uuguaacuguuuagaugaaugu

SEQ ID NO: 3620236 - RNA, 18 nt, Human
uuguaacuuauauugaag

SEQ ID NO: 3620237 - RNA, 17 nt, Human
uuguaacuuauguagau

SEQ ID NO: 3620238 - RNA, 18 nt, Human
uuguaacuuauguagaua

SEQ ID NO: 3620239 - RNA, 20 nt, Human
uuguaagaaaccaaucaaga

SEQ ID NO: 3620240 - RNA, 23 nt, Human
uuguaagaaaccaaucaagauaa

SEQ ID NO: 3620241 - RNA, 19 nt, Human
uuguaagaaggcaauauua

SEQ ID NO: 3620242 - RNA, 20 nt, Human
uuguaagaaggcaauauuaa

SEQ ID NO: 3620243 - RNA, 18 nt, Human
uuguaagagcuauacagu

SEQ ID NO: 3620244 - RNA, 15 nt, Human
uuguaagaguguaga

SEQ ID NO: 3620245 - RNA, 18 nt, Human
uuguaagcguauggcuuu

SEQ ID NO: 3620246 - RNA, 14 nt, Human
uuguaaggaaugau

SEQ ID NO: 3620247 - RNA, 14 nt, Human
uuguaaggcuuuga

SEQ ID NO: 3620248 - RNA, 15 nt, Human
uuguaagucaguguu

SEQ ID NO: 3620249 - RNA, 19 nt, Human
uuguaagucaguguugaga

SEQ ID NO: 3620250 - RNA, 18 nt, Human
uuguaagugagugugcug

SEQ ID NO: 3620251 - RNA, 12 nt, Human
uuguaaguuuau

SEQ ID NO: 3620252 - RNA, 16 nt, Human
uuguaaguuucaggug

SEQ ID NO: 3620253 - RNA, 14 nt, Human
uuguaauaaaaugu

SEQ ID NO: 3620254 - RNA, 20 nt, Human
uuguaauaaaguauauaauu

SEQ ID NO: 3620255 - RNA, 13 nt, Human
uuguaauauuuug

SEQ ID NO: 3620256 - RNA, 15 nt, Human
uuguaauauuuugua

SEQ ID NO: 3620257 - RNA, 14 nt, Human
uuguaaucacuguu

SEQ ID NO: 3620258 - RNA, 12 nt, Human
uuguaaugaaaa

SEQ ID NO: 3620259 - RNA, 16 nt, Human
uuguaaugcugcacuu

SEQ ID NO: 3620260 - RNA, 21 nt, Human
uuguaaugcugcacuuccugu

SEQ ID NO: 3620261 - RNA, 13 nt, Human
uuguaauguaacu

SEQ ID NO: 3620262 - RNA, 20 nt, Human
uuguaaugucuugagcucua

SEQ ID NO: 3620263 - RNA, 17 nt, Human
uuguaaugugugaaaaa

SEQ ID NO: 3620264 - RNA, 12 nt, Human
uuguaauguugu

SEQ ID NO: 3620265 - RNA, 19 nt, Human
uuguaauguugugaauaau

SEQ ID NO: 3620266 - RNA, 17 nt, Human
uuguaauuaaaagcaaa

SEQ ID NO: 3620267 - RNA, 11 nt, Human
uuguaauuaug

SEQ ID NO: 3620268 - RNA, 12 nt, Human
uuguaauuauug

SEQ ID NO: 3620269 - RNA, 14 nt, Human
uuguaauucuaaau

SEQ ID NO: 3620270 - RNA, 23 nt, Human
uuguaauucuaaaugaauguuua

SEQ ID NO: 3620271 - RNA, 16 nt, Human
uuguaauucuucaguu

SEQ ID NO: 3620272 - RNA, 23 nt, Human
uuguaauuuaaacaggcccagca

SEQ ID NO: 3620273 - RNA, 20 nt, Human
uuguaauuuaaggucuguuu

SEQ ID NO: 3620274 - RNA, 15 nt, Human
uuguaauuuuacacg

SEQ ID NO: 3620275 - RNA, 13 nt, Human
uuguaauuuucuu

SEQ ID NO: 3620276 - RNA, 16 nt, Human
uuguaauuuucuugau

SEQ ID NO: 3620277 - RNA, 12 nt, Human
uuguacaaaaua

SEQ ID NO: 3620278 - RNA, 14 nt, Human
uuguacaaaauaaa

SEQ ID NO: 3620279 - RNA, 23 nt, Human
uuguacaaaauaaacaaauaaca

SEQ ID NO: 3620280 - RNA, 17 nt, Human
uuguacaaaguauuaag

SEQ ID NO: 3620281 - RNA, 19 nt, Human
uuguacacaccuuauauuu

SEQ ID NO: 3620282 - RNA, 20 nt, Human
uuguacacucauucauuacu

SEQ ID NO: 3620283 - RNA, 22 nt, Human
uuguacagaauauuucuauuga

SEQ ID NO: 3620284 - RNA, 12 nt, Human
uuguacagacaa

SEQ ID NO: 3620285 - RNA, 19 nt, Human
uuguacagacguaugcuua

SEQ ID NO: 3620286 - RNA, 21 nt, Human
uuguacagacguaugcuuauu

SEQ ID NO: 3620287 - RNA, 18 nt, Human
uuguacagauucuuuauu

SEQ ID NO: 3620288 - RNA, 20 nt, Human
uuguacaguuuguuuacaca

SEQ ID NO: 3620289 - RNA, 16 nt, Human
uuguacaguuuuuauu

SEQ ID NO: 3620290 - RNA, 14 nt, Human
uuguacauaaugcg

SEQ ID NO: 3620291 - RNA, 15 nt, Human
uuguacauauuugug

SEQ ID NO: 3620292 - RNA, 12 nt, Human
uuguacaugaaa

SEQ ID NO: 3620293 - RNA, 22 nt, Human
uuguacaugaaauuuuuguaaa

SEQ ID NO: 3620294 - RNA, 20 nt, Human
uuguacauguaacauuaaag

SEQ ID NO: 3620295 - RNA, 18 nt, Human
uuguaccaaaauuuuaaa

SEQ ID NO: 3620296 - RNA, 23 nt, Human
uuguaccagugaauuuuugcaau

SEQ ID NO: 3620297 - RNA, 11 nt, Human
uuguaccucuc

SEQ ID NO: 3620298 - RNA, 14 nt, Human
uuguaccucuggcu

SEQ ID NO: 3620299 - RNA, 19 nt, Human
uuguacgaagaguauuuuu

SEQ ID NO: 3620300 - RNA, 21 nt, Human
uuguacgaagaguauuuuuga

SEQ ID NO: 3620301 - RNA, 18 nt, Human
uuguacgacgucagaugu

SEQ ID NO: 3620302 - RNA, 15 nt, Human
uuguacguuuaaagu

SEQ ID NO: 3620303 - RNA, 16 nt, Human
uuguacguuuaaagug

SEQ ID NO: 3620304 - RNA, 18 nt, Human
uuguacuacaguucuuuu

SEQ ID NO: 3620305 - RNA, 15 nt, Human
uuguacucaauuuua

SEQ ID NO: 3620306 - RNA, 21 nt, Human
uuguacugaauuuuuuuguaa

SEQ ID NO: 3620307 - RNA, 14 nt, Human
uuguacuguaaaga

SEQ ID NO: 3620308 - RNA, 15 nt, Human
uuguacuguaaagag

SEQ ID NO: 3620309 - RNA, 18 nt, Human
uuguacuuuagggaagua

SEQ ID NO: 3620310 - RNA, 15 nt, Human
uuguacuuuaucaug

SEQ ID NO: 3620311 - RNA, 13 nt, Human
uuguacuuucugu

SEQ ID NO: 3620312 - RNA, 15 nt, Human
uuguacuuucuguua

SEQ ID NO: 3620313 - RNA, 22 nt, Human
uuguacuuucuguuaaaaugca

SEQ ID NO: 3620314 - RNA, 19 nt, Human
uuguagaacucacucuggg

SEQ ID NO: 3620315 - RNA, 22 nt, Human
uuguagaaguaggaagugaaaa

SEQ ID NO: 3620316 - RNA, 19 nt, Human
uuguagaauguauuguacc

SEQ ID NO: 3620317 - RNA, 22 nt, Human
uuguagaauguauuguaccuuu

SEQ ID NO: 3620318 - RNA, 18 nt, Human
uuguagaguguagacugu

SEQ ID NO: 3620319 - RNA, 22 nt, Human
uuguagauacaaucagcugcuu

SEQ ID NO: 3620320 - RNA, 12 nt, Human
uuguagaugaaa

SEQ ID NO: 3620321 - RNA, 14 nt, Human
uuguagauuugauu

SEQ ID NO: 3620322 - RNA, 15 nt, Human
uuguagauuugauuu

SEQ ID NO: 3620323 - RNA, 14 nt, Human
uuguagcacugaca

SEQ ID NO: 3620324 - RNA, 18 nt, Human
uuguagcauccuggaaua

SEQ ID NO: 3620325 - RNA, 16 nt, Human
uuguagccuuccucca

SEQ ID NO: 3620326 - RNA, 22 nt, Human
uuguagccuuccuccacauccu

SEQ ID NO: 3620327 - RNA, 17 nt, Human
uuuaaagaaucauuauu

SEQ ID NO: 3620328 - RNA, 13 nt, Human
uuuaaagaauugu

SEQ ID NO: 3620329 - RNA, 16 nt, Human
uuuaaagagucuagau

SEQ ID NO: 3620330 - RNA, 21 nt, Human
uuuaaagagucuagauucaaa

SEQ ID NO: 3620331 - RNA, 20 nt, Human
uuuaaagcaacugucuauuu

SEQ ID NO: 3620332 - RNA, 23 nt, Human
uuuaaagcaacugucuauuucug

SEQ ID NO: 3620333 - RNA, 16 nt, Human
uuuaaagcagguucuu

SEQ ID NO: 3620334 - RNA, 15 nt, Human
uuuaaagcauugcug

SEQ ID NO: 3620335 - RNA, 16 nt, Human
uuuaaagcuuacucug

SEQ ID NO: 3620336 - RNA, 18 nt, Human
uuuaaaggcuuuuuggug

SEQ ID NO: 3620337 - RNA, 16 nt, Human
uuuaaaggggcagaaa

SEQ ID NO: 3620338 - RNA, 23 nt, Human
uuuaaagguggauuuuguuuaaa

SEQ ID NO: 3620339 - RNA, 21 nt, Human
uuuaaagguuucuauuuucuc

SEQ ID NO: 3620340 - RNA, 15 nt, Human
uuuaaaguaugcauu

SEQ ID NO: 3620341 - RNA, 21 nt, Human
uuuaaaguaugcauuauuaaa

SEQ ID NO: 3620342 - RNA, 18 nt, Human
uuuaaaguguaauaauau

SEQ ID NO: 3620343 - RNA, 20 nt, Human
uuuaaaguguuucuguuauu

SEQ ID NO: 3620344 - RNA, 15 nt, Human
uuuaaaguucaaacu

SEQ ID NO: 3620345 - RNA, 15 nt, Human
uuuaaaguucugugu

SEQ ID NO: 3620346 - RNA, 17 nt, Human
uuuaaaguuguuugugc

SEQ ID NO: 3620347 - RNA, 15 nt, Human
uuuaaauaaacuuuu

SEQ ID NO: 3620348 - RNA, 21 nt, Human
uuuaaauaaaguaucaugcau

SEQ ID NO: 3620349 - RNA, 23 nt, Human
uuuaaauaaaguaucaugcauuc

SEQ ID NO: 3620350 - RNA, 16 nt, Human
uuuaaauaauuuaacu

SEQ ID NO: 3620351 - RNA, 15 nt, Human
uuuaaauagaugaca

SEQ ID NO: 3620352 - RNA, 16 nt, Human
uuuaaauauaauucug

SEQ ID NO: 3620353 - RNA, 21 nt, Human
uuuaaauauaauucuguaaau

SEQ ID NO: 3620354 - RNA, 21 nt, Human
uuuaaauauaugcuaagucuu

SEQ ID NO: 3620355 - RNA, 16 nt, Human
uuuaaauauauuuuca

SEQ ID NO: 3620356 - RNA, 13 nt, Human
uuuaaauauuuuc

SEQ ID NO: 3620357 - RNA, 19 nt, Human
uuuaaaucaaguauuuugu

SEQ ID NO: 3620358 - RNA, 13 nt, Human
uuuaaaugaaagu

SEQ ID NO: 3620359 - RNA, 21 nt, Human
uuuaaaugaacaagagaagca

SEQ ID NO: 3620360 - RNA, 14 nt, Human
uuuaaauggacaga

SEQ ID NO: 3620361 - RNA, 16 nt, Human
uuuaaauguaaaacau

SEQ ID NO: 3620362 - RNA, 18 nt, Human
uuuaaauguaaagauauu

SEQ ID NO: 3620363 - RNA, 13 nt, Human
uuuaaauguauac

SEQ ID NO: 3620364 - RNA, 13 nt, Human
uuuaaaugucaaa

SEQ ID NO: 3620365 - RNA, 15 nt, Human
uuuaaaugucuaaug

SEQ ID NO: 3620366 - RNA, 16 nt, Human
uuuaaaugucuaaugu

SEQ ID NO: 3620367 - RNA, 17 nt, Human
uuuaaauguguacaaug

SEQ ID NO: 3620368 - RNA, 18 nt, Human
uuuaaauguguacaaugu

SEQ ID NO: 3620369 - RNA, 19 nt, Human
uuuaaauguguacaaugua

SEQ ID NO: 3620370 - RNA, 18 nt, Human
uuuacuguuauccuauuu

SEQ ID NO: 3620371 - RNA, 22 nt, Human
uuuacuguuuugaaaucaaugc

SEQ ID NO: 3620372 - RNA, 14 nt, Human
uuuacuuaaagauu

SEQ ID NO: 3620373 - RNA, 22 nt, Human
uuuacuuaaagauuuaucaaau

SEQ ID NO: 3620374 - RNA, 23 nt, Human
uuuacuuaaagauuuaucaaauc

SEQ ID NO: 3620375 - RNA, 12 nt, Human
uuuacuuaagac

SEQ ID NO: 3620376 - RNA, 17 nt, Human
uuuacuuaucuuaugcc

SEQ ID NO: 3620377 - RNA, 14 nt, Human
uuuacuuuaaacua

SEQ ID NO: 3620378 - RNA, 11 nt, Human
uuuacuuucaa

SEQ ID NO: 3620379 - RNA, 15 nt, Human
uuuacuuuguguuca

SEQ ID NO: 3620380 - RNA, 16 nt, Human
uuuacuuuuaaacugu

SEQ ID NO: 3620381 - RNA, 21 nt, Human
uuuacuuuuuuuuuauuuuau

SEQ ID NO: 3620382 - RNA, 22 nt, Human
uuuacuuuuuuuuuauuuuauu

SEQ ID NO: 3620383 - RNA, 23 nt, Human
uuuagaaaaaauggaugcccaga

SEQ ID NO: 3620384 - RNA, 19 nt, Human
uuuagaaaaagaacaugca

SEQ ID NO: 3620385 - RNA, 12 nt, Human
uuuagaaaacuu

SEQ ID NO: 3620386 - RNA, 14 nt, Human
uuuagaaaacuuua

SEQ ID NO: 3620387 - RNA, 22 nt, Human
uuuagaaaagggaguuuaaaaa

SEQ ID NO: 3620388 - RNA, 20 nt, Human
uuuagaaacacaacuauauu

SEQ ID NO: 3620389 - RNA, 22 nt, Human
uuuagaaacuuaucuuacaaag

SEQ ID NO: 3620390 - RNA, 13 nt, Human
uuuagaaagcauu

SEQ ID NO: 3620391 - RNA, 16 nt, Human
uuuagaaagcugacau

SEQ ID NO: 3620392 - RNA, 17 nt, Human
uuuagaaauaaaccuua

SEQ ID NO: 3620393 - RNA, 19 nt, Human
uuuagaaauacugcaagaa

SEQ ID NO: 3620394 - RNA, 22 nt, Human
uuuagaacagaaaacaacaaaa

SEQ ID NO: 3620395 - RNA, 16 nt, Human
uuuagaacagcauugu

SEQ ID NO: 3620396 - RNA, 15 nt, Human
uuuagaacagguuuu

SEQ ID NO: 3620397 - RNA, 22 nt, Human
uuuagaagccaacuaugauuau

SEQ ID NO: 3620398 - RNA, 14 nt, Human
uuuagaaguagaau

SEQ ID NO: 3620399 - RNA, 15 nt, Human
uuuagaagugucaug

SEQ ID NO: 3620400 - RNA, 20 nt, Human
uuuagaauaagaauuugcau

SEQ ID NO: 3620401 - RNA, 17 nt, Human
uuuagaauaugccuugu

SEQ ID NO: 3620402 - RNA, 19 nt, Human
uuuagaaucccagcccccu

SEQ ID NO: 3620403 - RNA, 22 nt, Human
uuuagaaugaugcacauuucau

SEQ ID NO: 3620404 - RNA, 20 nt, Human
uuuagaauggugauuuuaaa

SEQ ID NO: 3620405 - RNA, 21 nt, Human
uuuagaauggugauuuuaaau

SEQ ID NO: 3620406 - RNA, 13 nt, Human
uuuagaauugaag

SEQ ID NO: 3620407 - RNA, 15 nt, Human
uuuagaauugaaggu

SEQ ID NO: 3620408 - RNA, 18 nt, Human
uuuagaauugaagguuuu

SEQ ID NO: 3620409 - RNA, 21 nt, Human
uuuagaauugaagguuuuuga

SEQ ID NO: 3620410 - RNA, 22 nt, Human
uuuagacaaauacucaugugua

SEQ ID NO: 3620411 - RNA, 16 nt, Human
uuuagacaaaucuaag

SEQ ID NO: 3620412 - RNA, 21 nt, Human
uuuagacaaaucuaagggaaa

SEQ ID NO: 3620413 - RNA, 22 nt, Human
uuuagacaagagaugggaauga

SEQ ID NO: 3620414 - RNA, 12 nt, Human
uuuagacagagu

SEQ ID NO: 3620415 - RNA, 21 nt, Human
uuuagacauguaauuugugua

SEQ ID NO: 3620416 - RNA, 11 nt, Human
uuuagaccaag

SEQ ID NO: 3620417 - RNA, 15 nt, Human
uuuagaccaaggaac

SEQ ID NO: 3620418 - RNA, 15 nt, Human
uuuagaccauuuauc

SEQ ID NO: 3620419 - RNA, 22 nt, Human
uuuagacucaucaaucaaauaa

SEQ ID NO: 3620420 - RNA, 15 nt, Human
uuuagacuguagccu

SEQ ID NO: 3620421 - RNA, 20 nt, Human
uuuagacuuaauagaaacau

SEQ ID NO: 3620422 - RNA, 13 nt, Human
uuuagacuugaaa

SEQ ID NO: 3620423 - RNA, 20 nt, Human
uuuagacuugaaaagagaca

SEQ ID NO: 3620424 - RNA, 21 nt, Human
uuuagacuugaaaagagacag

SEQ ID NO: 3620425 - RNA, 18 nt, Human
uuuagagaacugaaaaga

SEQ ID NO: 3620426 - RNA, 20 nt, Human
uuuagagaacugaaaagaga

SEQ ID NO: 3620427 - RNA, 22 nt, Human
uuuagagauaagaguuggcugg

SEQ ID NO: 3620428 - RNA, 22 nt, Human
uuuagaguaagaaauuucaggu

SEQ ID NO: 3620429 - RNA, 15 nt, Human
uuuagauaauacacc

SEQ ID NO: 3620430 - RNA, 23 nt, Human
uuuagauagcccuguccuggugg

SEQ ID NO: 3620431 - RNA, 17 nt, Human
uuuagaugaaugucagu

SEQ ID NO: 3620432 - RNA, 17 nt, Human
uuuagaugaggaaauga

SEQ ID NO: 3620433 - RNA, 21 nt, Human
uuuagaugauaaagagacagu

SEQ ID NO: 3620434 - RNA, 11 nt, Human
uuuagaugcug

SEQ ID NO: 3620435 - RNA, 17 nt, Human
uuuagauguaauuuugu

SEQ ID NO: 3620436 - RNA, 19 nt, Human
uuuagaugugcugcuuuga

SEQ ID NO: 3620437 - RNA, 14 nt, Human
uuuagauugaguaa

SEQ ID NO: 3620438 - RNA, 20 nt, Human
uuuagauuucaagaaaaaau

SEQ ID NO: 3620439 - RNA, 19 nt, Human
uuuagauuuucugguucua

SEQ ID NO: 3620440 - RNA, 21 nt, Human
uuuagcacguuuaaaguucug

SEQ ID NO: 3620441 - RNA, 12 nt, Human
uuuagcaugugu

SEQ ID NO: 3620442 - RNA, 15 nt, Human
uuucaauucucaaaa

SEQ ID NO: 3620443 - RNA, 16 nt, Human
uuucaauucuguaggu

SEQ ID NO: 3620444 - RNA, 13 nt, Human
uuucacaaaauuu

SEQ ID NO: 3620445 - RNA, 22 nt, Human
uuucacaaacagaaaacaugua

SEQ ID NO: 3620446 - RNA, 14 nt, Human
uuucacaaauuugu

SEQ ID NO: 3620447 - RNA, 23 nt, Human
uuucacaacagccugacaacauu

SEQ ID NO: 3620448 - RNA, 14 nt, Human
uuucacagaaaaua

SEQ ID NO: 3620449 - RNA, 17 nt, Human
uuucacagcuaugaaga

SEQ ID NO: 3620450 - RNA, 16 nt, Human
uuucacagugugauuu

SEQ ID NO: 3620451 - RNA, 22 nt, Human
uuucacaguguguggucaacau

SEQ ID NO: 3620452 - RNA, 16 nt, Human
uuucacaguuugaaau

SEQ ID NO: 3620453 - RNA, 17 nt, Human
uuucacaguuugaaaua

SEQ ID NO: 3620454 - RNA, 13 nt, Human
uuucacaguuuuu

SEQ ID NO: 3620455 - RNA, 13 nt, Human
uuucacauaaaug

SEQ ID NO: 3620456 - RNA, 22 nt, Human
uuucacauaucuaguaugaaau

SEQ ID NO: 3620457 - RNA, 15 nt, Human
uuucacauuaauauu

SEQ ID NO: 3620458 - RNA, 16 nt, Human
uuucacauuaauauuu

SEQ ID NO: 3620459 - RNA, 17 nt, Human
uuucacauuagaagaca

SEQ ID NO: 3620460 - RNA, 19 nt, Human
uuucacauuagaagacaau

SEQ ID NO: 3620461 - RNA, 22 nt, Human
uuucaccauuugauuauguagc

SEQ ID NO: 3620462 - RNA, 18 nt, Human
uuucacccacagaaagag

SEQ ID NO: 3620463 - RNA, 20 nt, Human
uuucacccacagaaagagag

SEQ ID NO: 3620464 - RNA, 22 nt, Human
uuucaccccacccuuccccucc

SEQ ID NO: 3620465 - RNA, 21 nt, Human
uuucaccccaucccuccuuaa

SEQ ID NO: 3620466 - RNA, 13 nt, Human
uuucaccccuccc

SEQ ID NO: 3620467 - RNA, 20 nt, Human
uuucaccccucccuuucucc

SEQ ID NO: 3620468 - RNA, 15 nt, Human
uuucacccuucuacu

SEQ ID NO: 3620469 - RNA, 17 nt, Human
uuucaccuacuuuguaa

SEQ ID NO: 3620470 - RNA, 16 nt, Human
uuucaccuagauuuuu

SEQ ID NO: 3620471 - RNA, 13 nt, Human
uuucaccuguaaa

SEQ ID NO: 3620472 - RNA, 18 nt, Human
uuucacggaaacucccga

SEQ ID NO: 3620473 - RNA, 19 nt, Human
uuucacggaaguuuucaau

SEQ ID NO: 3620474 - RNA, 15 nt, Human
uuucacgggagauuu

SEQ ID NO: 3620475 - RNA, 15 nt, Human
uuucacuauuuccuu

SEQ ID NO: 3620476 - RNA, 17 nt, Human
uuucacucccuccauca

SEQ ID NO: 3620477 - RNA, 15 nt, Human
uuucacucuaaguca

SEQ ID NO: 3620478 - RNA, 22 nt, Human
uuucacucuaagucauguaugu

SEQ ID NO: 3620479 - RNA, 20 nt, Human
uuucacucuccuaugccuuu

SEQ ID NO: 3620480 - RNA, 14 nt, Human
uuucacucuccuug

SEQ ID NO: 3620481 - RNA, 20 nt, Human
uuucacugcuggcugccuua

SEQ ID NO: 3620482 - RNA, 22 nt, Human
uuucacugcuggcugccuuaga

SEQ ID NO: 3620483 - RNA, 17 nt, Human
uuucacuggaguuacau

SEQ ID NO: 3620484 - RNA, 23 nt, Human
uuucacuggccacaguuguuuga

SEQ ID NO: 3620485 - RNA, 17 nt, Human
uuucacuguagcucuaa

SEQ ID NO: 3620486 - RNA, 16 nt, Human
uuucacuucuuucccu

SEQ ID NO: 3620487 - RNA, 23 nt, Human
uuucacuucuuucccuuccucca

SEQ ID NO: 3620488 - RNA, 17 nt, Human
uuucacuuugugauuau

SEQ ID NO: 3620489 - RNA, 16 nt, Human
uuucagaaaaagaaau

SEQ ID NO: 3620490 - RNA, 12 nt, Human
uuucagaaaaca

SEQ ID NO: 3620491 - RNA, 22 nt, Human
uuucagaaagcuagaaagugua

SEQ ID NO: 3620492 - RNA, 13 nt, Human
uuucagaaauaca

SEQ ID NO: 3620493 - RNA, 16 nt, Human
uuucagaaauaugugg

SEQ ID NO: 3620494 - RNA, 20 nt, Human
uuucagaaauaugugguuuc

SEQ ID NO: 3620495 - RNA, 18 nt, Human
uuucagaaccucuucccc

SEQ ID NO: 3620496 - RNA, 19 nt, Human
uuucagaaccucuucccca

SEQ ID NO: 3620497 - RNA, 23 nt, Human
uuucagaaccucuuccccagaaa

SEQ ID NO: 3620498 - RNA, 16 nt, Human
uuucagaagaaauaaa

SEQ ID NO: 3620499 - RNA, 21 nt, Human
uuucagaagaaauaaauauac

SEQ ID NO: 3620500 - RNA, 22 nt, Human
uuucagaagugagcuuugcugc

SEQ ID NO: 3620501 - RNA, 16 nt, Human
uuucagaaguuaguuu

SEQ ID NO: 3620502 - RNA, 14 nt, Human
uuucagaaucugaa

SEQ ID NO: 3620503 - RNA, 19 nt, Human
uuucagaaucugaauguaa

SEQ ID NO: 3620504 - RNA, 23 nt, Human
uuucagaaucugaauguaauuug

SEQ ID NO: 3620505 - RNA, 14 nt, Human
uuucagaccccagc

SEQ ID NO: 3620506 - RNA, 23 nt, Human
uuucagagacagcugauacuuca

SEQ ID NO: 3620507 - RNA, 22 nt, Human
uuucagagugacuacacacagu

SEQ ID NO: 3620508 - RNA, 21 nt, Human
uuucagauaaucacaauacau

SEQ ID NO: 3620509 - RNA, 16 nt, Human
uuucagaugcuucugg

SEQ ID NO: 3620510 - RNA, 20 nt, Human
uuucagaugcuucugggaga

SEQ ID NO: 3620511 - RNA, 15 nt, Human
uuucagaugcuuuag

SEQ ID NO: 3620512 - RNA, 19 nt, Human
uuucagaugucuucugccu

SEQ ID NO: 3620513 - RNA, 21 nt, Human
uuucagaugucuucugccugu

SEQ ID NO: 3620514 - RNA, 20 nt, Human
uuucagauucccagagcaaa

SEQ ID NO: 3620515 - RNA, 16 nt, Human
uuucagauuguggaau

SEQ ID NO: 3620516 - RNA, 21 nt, Human
uuucagauuguggaauguugg

SEQ ID NO: 3620517 - RNA, 18 nt, Human
uuucagcaagauaaacau

SEQ ID NO: 3620518 - RNA, 23 nt, Human
uuucagcaccuacaguguacagu

SEQ ID NO: 3620519 - RNA, 20 nt, Human
uuucagcacuagccaaaccu

SEQ ID NO: 3620520 - RNA, 14 nt, Human
uuucagcagacuga

SEQ ID NO: 3620521 - RNA, 14 nt, Human
uuucagcaggcagc

SEQ ID NO: 3620522 - RNA, 15 nt, Human
uuucagcauugauau

SEQ ID NO: 3620523 - RNA, 20 nt, Human
uuucagcauugauauuugug

SEQ ID NO: 3620524 - RNA, 22 nt, Human
uuucagcuaagggaagacauuu

SEQ ID NO: 3620525 - RNA, 19 nt, Human
uuucagcuaggaacaaauc

SEQ ID NO: 3620526 - RNA, 21 nt, Human
uuucagcuaggaacaaaucuu

SEQ ID NO: 3620527 - RNA, 12 nt, Human
uuucagcuccug

SEQ ID NO: 3620528 - RNA, 20 nt, Human
uuucagcuccugaccaguug

SEQ ID NO: 3620529 - RNA, 21 nt, Human
uuucagcuccugaccaguugc

SEQ ID NO: 3620530 - RNA, 12 nt, Human
uuucagcucucu

SEQ ID NO: 3620531 - RNA, 16 nt, Human
uuucaggaccuuuuga

SEQ ID NO: 3620532 - RNA, 22 nt, Human
uuucaggagagaguugaaccua

SEQ ID NO: 3620533 - RNA, 19 nt, Human
uuucaggaggaauacugaa

SEQ ID NO: 3620534 - RNA, 22 nt, Human
uuucaggaggcuggaggaaggg

SEQ ID NO: 3620535 - RNA, 13 nt, Human
uuucaggauacuc

SEQ ID NO: 3620536 - RNA, 20 nt, Human
uuucaggauacucugucaga

SEQ ID NO: 3620537 - RNA, 21 nt, Human
uuucaggauacucugucagau

SEQ ID NO: 3620538 - RNA, 14 nt, Human
uuucaggaucuauu

SEQ ID NO: 3620539 - RNA, 19 nt, Human
uuucagggagguggcuggg

SEQ ID NO: 3620540 - RNA, 22 nt, Human
uuucagggagguggcuggguuu

SEQ ID NO: 3620541 - RNA, 22 nt, Human
uuucagggcuaacgaccacagg

SEQ ID NO: 3620542 - RNA, 22 nt, Human
uuucagguagaggugcaugccu

SEQ ID NO: 3620543 - RNA, 13 nt, Human
uuucaggugacau

SEQ ID NO: 3620544 - RNA, 15 nt, Human
uuucaggugacaugu

SEQ ID NO: 3620545 - RNA, 22 nt, Human
uuucaggugacaugugaaaccu

SEQ ID NO: 3620546 - RNA, 19 nt, Human
uuucagguuuuguaaagau

SEQ ID NO: 3620547 - RNA, 16 nt, Human
uuucaguacuuuuuua

SEQ ID NO: 3620548 - RNA, 16 nt, Human
uuucaguauuauaugu

SEQ ID NO: 3620549 - RNA, 13 nt, Human
uuucaguguacau

SEQ ID NO: 3620550 - RNA, 19 nt, Human
uuucaguguaguuaauuua

SEQ ID NO: 3620551 - RNA, 17 nt, Human
uuucaguguuaccugug

SEQ ID NO: 3620552 - RNA, 14 nt, Human
uuucaguucaaagu

SEQ ID NO: 3620553 - RNA, 22 nt, Human
uuucaguucuuuggauucuaaa

SEQ ID NO: 3620554 - RNA, 14 nt, Human
uuucauaaacaagu

SEQ ID NO: 3620555 - RNA, 19 nt, Human
uuucauaaauuauuugauu

SEQ ID NO: 3620556 - RNA, 21 nt, Human
uuucaucaaucauuguacagu

SEQ ID NO: 3620557 - RNA, 24 nt, Human
uuucaucagaacagcuguugacuc

SEQ ID NO: 3620558 - RNA, 16 nt, Human
uuucaucauauuauac

SEQ ID NO: 3620559 - RNA, 14 nt, Human
uuucaucaugagga

SEQ ID NO: 3620560 - RNA, 21 nt, Human
uuucaucauucacuucacugu

SEQ ID NO: 3620561 - RNA, 24 nt, Human
uuucaucauucacuucacugugcu

SEQ ID NO: 3620562 - RNA, 21 nt, Human
uuucauccacuagugcaaauc

SEQ ID NO: 3620563 - RNA, 16 nt, Human
uuucauccauaacuga

SEQ ID NO: 3620564 - RNA, 19 nt, Human
uuucauccauaacugaaca

SEQ ID NO: 3620565 - RNA, 14 nt, Human
uuucauccaugucc

SEQ ID NO: 3620566 - RNA, 19 nt, Human
uuucauccccuuacccuua

SEQ ID NO: 3620567 - RNA, 12 nt, Human
uuucaucucauu

SEQ ID NO: 3620568 - RNA, 16 nt, Human
uuucaucucuuguaua

SEQ ID NO: 3620569 - RNA, 20 nt, Human
uuucaucugcucuccuuccu

SEQ ID NO: 3620570 - RNA, 14 nt, Human
uuucaucugggaaa

SEQ ID NO: 3620571 - RNA, 17 nt, Human
uuucaucuucaguuguc

SEQ ID NO: 3620572 - RNA, 19 nt, Human
uuucaugaaaauaccauuu

SEQ ID NO: 3620573 - RNA, 16 nt, Human
uuucaugauuagaaau

SEQ ID NO: 3620574 - RNA, 13 nt, Human
uuucaugcaaacu

SEQ ID NO: 3620575 - RNA, 18 nt, Human
uuucaugcaaacucuuug

SEQ ID NO: 3620576 - RNA, 16 nt, Human
uuucaugcuaucucug

SEQ ID NO: 3620577 - RNA, 19 nt, Human
uuucaugcuaucucugugu

SEQ ID NO: 3620578 - RNA, 22 nt, Human
uuucauggugaaaauguacuga

SEQ ID NO: 3620579 - RNA, 12 nt, Human
uuucauguacug

SEQ ID NO: 3620580 - RNA, 20 nt, Human
uuucauguacugcauuauuu

SEQ ID NO: 3620581 - RNA, 15 nt, Human
uuucauguccauaaa

SEQ ID NO: 3620582 - RNA, 21 nt, Human
uuucauguccugugucaguuu

SEQ ID NO: 3620583 - RNA, 23 nt, Human
uuucaugugcggggaucaucugc

SEQ ID NO: 3620584 - RNA, 17 nt, Human
uuucauguggcuguaga

SEQ ID NO: 3620585 - RNA, 19 nt, Human
uuucauguuaguuaccuua

SEQ ID NO: 3620586 - RNA, 16 nt, Human
uuucauuaaaggcuuc

SEQ ID NO: 3620587 - RNA, 15 nt, Human
uuucauuaaauaaau

SEQ ID NO: 3620588 - RNA, 18 nt, Human
uuucauuaaauaaauuug

SEQ ID NO: 3620589 - RNA, 19 nt, Human
uuucauuaaauaaauuuga

SEQ ID NO: 3620590 - RNA, 22 nt, Human
uuucauuaaauaaauuugacuu

SEQ ID NO: 3620591 - RNA, 16 nt, Human
uuucauuagcaaaaaa

SEQ ID NO: 3620592 - RNA, 21 nt, Human
uuucauuagcaaaaaaaguug

SEQ ID NO: 3620593 - RNA, 13 nt, Human
uuucauuauuagu

SEQ ID NO: 3620594 - RNA, 15 nt, Human
uuucauucaucccau

SEQ ID NO: 3620595 - RNA, 13 nt, Human
uuucauucucauu

SEQ ID NO: 3620596 - RNA, 15 nt, Human
uuucauucuccugcc

SEQ ID NO: 3620597 - RNA, 13 nt, Human
uuucauugccagu

SEQ ID NO: 3620598 - RNA, 18 nt, Human
uuucauugccagugucuu

SEQ ID NO: 3620599 - RNA, 23 nt, Human
uuucauugccuguguauggaaaa

SEQ ID NO: 3620600 - RNA, 18 nt, Human
uuucauugcugugacagu

SEQ ID NO: 3620601 - RNA, 17 nt, Human
uuucauugguuaauuuu

SEQ ID NO: 3620602 - RNA, 17 nt, Human
uuucauuguaugaugug

SEQ ID NO: 3620603 - RNA, 23 nt, Human
uuucauuguaugauguguuguga

SEQ ID NO: 3620604 - RNA, 14 nt, Human
uuucauuuacugug

SEQ ID NO: 3620605 - RNA, 14 nt, Human
uuucauuuagguga

SEQ ID NO: 3620606 - RNA, 18 nt, Human
uuucauuuaggugaggaa

SEQ ID NO: 3620607 - RNA, 23 nt, Human
uuucauuucuucuacaacucaua

SEQ ID NO: 3620608 - RNA, 22 nt, Human
uuucauuugccuauucccacac

SEQ ID NO: 3620609 - RNA, 21 nt, Human
uuucauuuguuuguuuuccuu

SEQ ID NO: 3620610 - RNA, 17 nt, Human
uuucauuuucucucagg

SEQ ID NO: 3620611 - RNA, 20 nt, Human
uuucauuuugcuuuaauuuu

SEQ ID NO: 3620612 - RNA, 17 nt, Human
uuucauuuuuaaaugug

SEQ ID NO: 3620613 - RNA, 17 nt, Human
uuuccaaaaaaauacug

SEQ ID NO: 3620614 - RNA, 24 nt, Human
uuuccaaaaguggccucuuugucu

SEQ ID NO: 3620615 - RNA, 14 nt, Human
uuuccaaaauaauu

SEQ ID NO: 3620616 - RNA, 18 nt, Human
uuuccaaaauaauuuuaa

SEQ ID NO: 3620617 - RNA, 18 nt, Human
uuuccaaaauuuuucaac

SEQ ID NO: 3620618 - RNA, 15 nt, Human
uuuccaacaccacag

SEQ ID NO: 3620619 - RNA, 20 nt, Human
uuuccaacaccacagacaca

SEQ ID NO: 3620620 - RNA, 23 nt, Human
uuuccaacaccacagacacacac

SEQ ID NO: 3620621 - RNA, 18 nt, Human
uuuccaacuacuaauaga

SEQ ID NO: 3620622 - RNA, 19 nt, Human
uuuccaacuacuaauagaa

SEQ ID NO: 3620623 - RNA, 20 nt, Human
uuuccaagcaaauguuacau

SEQ ID NO: 3620624 - RNA, 22 nt, Human
uuuccaagcaaauguuacauag

SEQ ID NO: 3620625 - RNA, 19 nt, Human
uuuccaaggagcugagaau

SEQ ID NO: 3620626 - RNA, 15 nt, Human
uuuccaauucuccuu

SEQ ID NO: 3620627 - RNA, 22 nt, Human
uuuccacaagauucccagagac

SEQ ID NO: 3620628 - RNA, 22 nt, Human
uuuccacccccucccuggccug

SEQ ID NO: 3620629 - RNA, 16 nt, Human
uuuccacuaaaaauau

SEQ ID NO: 3620630 - RNA, 16 nt, Human
uuuccacuccauuguc

SEQ ID NO: 3620631 - RNA, 15 nt, Human
uuuccacuucuucau

SEQ ID NO: 3620632 - RNA, 15 nt, Human
uuuccacuucuuccu

SEQ ID NO: 3620633 - RNA, 18 nt, Human
uuuccagacuuccuugag

SEQ ID NO: 3620634 - RNA, 19 nt, Human
uuuccagagcauuccaguc

SEQ ID NO: 3620635 - RNA, 20 nt, Human
uuuccagcauucccagguag

SEQ ID NO: 3620636 - RNA, 19 nt, Human
uuuccaggaaaaagaacuu

SEQ ID NO: 3620637 - RNA, 23 nt, Human
uuuccaggcuauguauaaaauac

SEQ ID NO: 3620638 - RNA, 16 nt, Human
uuuccaggcuucugcu

SEQ ID NO: 3620639 - RNA, 11 nt, Human
uuuccagggag

SEQ ID NO: 3620640 - RNA, 17 nt, Human
uuuccaguauuuuagug

SEQ ID NO: 3620641 - RNA, 21 nt, Human
uuuccagucuccaccaggaac

SEQ ID NO: 3620642 - RNA, 18 nt, Human
uuuccagucucuuguaca

SEQ ID NO: 3620643 - RNA, 19 nt, Human
uuuccauaaagaagauguu

SEQ ID NO: 3620644 - RNA, 19 nt, Human
uuuccauagcaacaggaaa

SEQ ID NO: 3620645 - RNA, 12 nt, Human
uuuccauauguu

SEQ ID NO: 3620646 - RNA, 17 nt, Human
uuuccaugaaaaugcaa

SEQ ID NO: 3620647 - RNA, 19 nt, Human
uuuccaugacugcauuuua

SEQ ID NO: 3620648 - RNA, 17 nt, Human
uuuccaugaguccccug

SEQ ID NO: 3620649 - RNA, 23 nt, Human
uuuccaugcacccucauacacag

SEQ ID NO: 3620650 - RNA, 19 nt, Human
uuuccaugcguguuucuga

SEQ ID NO: 3620651 - RNA, 20 nt, Human
uuuccauggcaggaaggcuu

SEQ ID NO: 3620652 - RNA, 19 nt, Human
uuuccaugggaccacaacu

SEQ ID NO: 3620653 - RNA, 14 nt, Human
uuuccauguaugca

SEQ ID NO: 3620654 - RNA, 15 nt, Human
uuuccauuacaagua

SEQ ID NO: 3620655 - RNA, 14 nt, Human
uuuccauuccagaa

SEQ ID NO: 3620656 - RNA, 22 nt, Human
uuuccauucgugaaaacacauu

SEQ ID NO: 3620657 - RNA, 12 nt, Human
uuucccaauuca

SEQ ID NO: 3620658 - RNA, 15 nt, Human
uuucccaauucacau

SEQ ID NO: 3620659 - RNA, 23 nt, Human
uuucccacaccguguaaaccaaa

SEQ ID NO: 3620660 - RNA, 23 nt, Human
uuucccacucauucugaauuaau

SEQ ID NO: 3620661 - RNA, 18 nt, Human
uuucccacugcacccccu

SEQ ID NO: 3620662 - RNA, 18 nt, Human
uuucccaggacccugaag

SEQ ID NO: 3620663 - RNA, 17 nt, Human
uuucccaggcaaauaaa

SEQ ID NO: 3620664 - RNA, 13 nt, Human
uuucccaucugca

SEQ ID NO: 3620665 - RNA, 21 nt, Human
uuucccaugauuucauguacu

SEQ ID NO: 3620666 - RNA, 16 nt, Human
uuucccauggggaggg

SEQ ID NO: 3620667 - RNA, 14 nt, Human
uuucccauuuagaa

SEQ ID NO: 3620668 - RNA, 14 nt, Human
uuuccccaaagucu

SEQ ID NO: 3620669 - RNA, 13 nt, Human
uuuccccagccca

SEQ ID NO: 3620670 - RNA, 14 nt, Human
uuuccccagggcac

SEQ ID NO: 3620671 - RNA, 23 nt, Human
uuuccccccacucuccccacacu

SEQ ID NO: 3620672 - RNA, 19 nt, Human
uuuccccccuuuuuuuccu

SEQ ID NO: 3620673 - RNA, 16 nt, Human
uuucccccuucuacau

SEQ ID NO: 3620674 - RNA, 17 nt, Human
uuucccccuuucuuccu

SEQ ID NO: 3620675 - RNA, 21 nt, Human
uuucccccuuucuuccucauu

SEQ ID NO: 3620676 - RNA, 21 nt, Human
uuuccccuguggggaucucag

SEQ ID NO: 3620677 - RNA, 22 nt, Human
uuucccgagcaaagucuaaagu

SEQ ID NO: 3620678 - RNA, 13 nt, Human
uuucccgccaagc

SEQ ID NO: 3620679 - RNA, 15 nt, Human
uuucccguggcccca

SEQ ID NO: 3620680 - RNA, 21 nt, Human
uuucccguggccccagccugg

SEQ ID NO: 3620681 - RNA, 11 nt, Human
uuucccuaagc

SEQ ID NO: 3620682 - RNA, 20 nt, Human
uuucccuaagccagcugccc

SEQ ID NO: 3620683 - RNA, 22 nt, Human
uuucccuaagccagcugccccc

SEQ ID NO: 3620684 - RNA, 17 nt, Human
uuuguuuuuccuuccaa

SEQ ID NO: 3620685 - RNA, 13 nt, Human
uuuguuuuugcuu

SEQ ID NO: 3620686 - RNA, 16 nt, Human
uuuguuuuugcuuguu

SEQ ID NO: 3620687 - RNA, 23 nt, Human
uuuguuuuuuaaagucuugcugu

SEQ ID NO: 3620688 - RNA, 16 nt, Human
uuuguuuuuugaagug

SEQ ID NO: 3620689 - RNA, 18 nt, Human
uuuguuuuuuguuuuucu

SEQ ID NO: 3620690 - RNA, 16 nt, Human
uuuguuuuuuuccaac

SEQ ID NO: 3620691 - RNA, 22 nt, Human
uuuguuuuuuuccaacuguguu

SEQ ID NO: 3620692 - RNA, 15 nt, Human
uuuuaaaaaaagaaa

SEQ ID NO: 3620693 - RNA, 19 nt, Human
uuuuaaaaaaauaaaacau

SEQ ID NO: 3620694 - RNA, 14 nt, Human
uuuuaaaaaagcuu

SEQ ID NO: 3620695 - RNA, 15 nt, Human
uuuuaaaaaagcuua

SEQ ID NO: 3620696 - RNA, 22 nt, Human
uuuuaaaaaagcuuaaaacuuu

SEQ ID NO: 3620697 - RNA, 13 nt, Human
uuuuaaaaaauga

SEQ ID NO: 3620698 - RNA, 14 nt, Human
uuuuaaaaaaugaa

SEQ ID NO: 3620699 - RNA, 22 nt, Human
uuuuaaaaaaugaaaauaagug

SEQ ID NO: 3620700 - RNA, 16 nt, Human
uuuuaaaaacaacuua

SEQ ID NO: 3620701 - RNA, 21 nt, Human
uuuuaaaaaggaacugcagca

SEQ ID NO: 3620702 - RNA, 14 nt, Human
uuuuaaaaaguauu

SEQ ID NO: 3620703 - RNA, 21 nt, Human
uuuuaaaaaguauugccaaac

SEQ ID NO: 3620704 - RNA, 17 nt, Human
uuuuaaaaauagacacu

SEQ ID NO: 3620705 - RNA, 22 nt, Human
uuuuaaaaaucuaccuucugua

SEQ ID NO: 3620706 - RNA, 14 nt, Human
uuuuaaaaaugcaa

SEQ ID NO: 3620707 - RNA, 12 nt, Human
uuuuaaaaaugg

SEQ ID NO: 3620708 - RNA, 13 nt, Human
uuuuaaaaauggu

SEQ ID NO: 3620709 - RNA, 11 nt, Human
uuuuaaaacac

SEQ ID NO: 3620710 - RNA, 13 nt, Human
uuuuaaaacacau

SEQ ID NO: 3620711 - RNA, 16 nt, Human
uuuuaaaacacuucca

SEQ ID NO: 3620712 - RNA, 17 nt, Human
uuuuaaaacuggaccug

SEQ ID NO: 3620713 - RNA, 13 nt, Human
uuuuaaaagaaau

SEQ ID NO: 3620714 - RNA, 15 nt, Human
uuuuaaaagaaugau

SEQ ID NO: 3620715 - RNA, 14 nt, Human
uuuuaaaagacaag

SEQ ID NO: 3620716 - RNA, 13 nt, Human
uuuuaaaagccuu

SEQ ID NO: 3620717 - RNA, 18 nt, Human
uuuuaaaagccuuggccu

SEQ ID NO: 3620718 - RNA, 22 nt, Human
uuuuaaaaguuacuccuuuuag

SEQ ID NO: 3620719 - RNA, 14 nt, Human
uuuuaaaauagaaa

SEQ ID NO: 3620720 - RNA, 16 nt, Human
uuuuaaaauagaaauu

SEQ ID NO: 3620721 - RNA, 18 nt, Human
uuuuaaaauagaaauuuu

SEQ ID NO: 3620722 - RNA, 14 nt, Human
uuuuaaaauaucuu

SEQ ID NO: 3620723 - RNA, 20 nt, Human
uuuuaaaauaucuuuugacc

SEQ ID NO: 3620724 - RNA, 16 nt, Human
uuuuaaaaucaacuua

SEQ ID NO: 3620725 - RNA, 19 nt, Human
uuuuaaaaucacuaacauu

SEQ ID NO: 3620726 - RNA, 14 nt, Human
uuuuaaaaucagcu

SEQ ID NO: 3620727 - RNA, 23 nt, Human
uuuuaaaauccacuuuaucuuga

SEQ ID NO: 3620728 - RNA, 14 nt, Human
uuuuaaaaucuuau

SEQ ID NO: 3620729 - RNA, 15 nt, Human
uuuuaaaaugagaaa

SEQ ID NO: 3620730 - RNA, 19 nt, Human
uuuuaaaaugagagucacu

SEQ ID NO: 3620731 - RNA, 16 nt, Human
uuuuaaaaugcaaugu

SEQ ID NO: 3620732 - RNA, 13 nt, Human
uuuuaaaauguac

SEQ ID NO: 3620733 - RNA, 15 nt, Human
uuuuaaaauuucaua

SEQ ID NO: 3620734 - RNA, 20 nt, Human
uuuuaaaauuuguucuugua

SEQ ID NO: 3620735 - RNA, 13 nt, Human
uuuuaaaauuuua

SEQ ID NO: 3620736 - RNA, 16 nt, Human
uuuuaaacaaaauaga

SEQ ID NO: 3620737 - RNA, 20 nt, Human
uuuuaaacaaaauagaagcu

SEQ ID NO: 3620738 - RNA, 23 nt, Human
uuuuaaacaaaauagaagcugua

SEQ ID NO: 3620739 - RNA, 13 nt, Human
uuuuaaacacauu

SEQ ID NO: 3620740 - RNA, 19 nt, Human
uuuuaaacagugagccuga

SEQ ID NO: 3620741 - RNA, 23 nt, Human
uuuuaaacauuaauagcagccuu

SEQ ID NO: 3620742 - RNA, 18 nt, Human
uuuuaaagaaaagaugaa

SEQ ID NO: 3620743 - RNA, 15 nt, Human
uuuuaaagaaaaguu

SEQ ID NO: 3620744 - RNA, 11 nt, Human
uuuuaaagaau

SEQ ID NO: 3620745 - RNA, 23 nt, Human
uuuuaaagacccuccuauucuau

SEQ ID NO: 3620746 - RNA, 15 nt, Human
uuuuaaagacuugca

SEQ ID NO: 3620747 - RNA, 15 nt, Human
uuuuaaagaucugua

SEQ ID NO: 3620748 - RNA, 16 nt, Human
uuuuaaaggcuuuuug

SEQ ID NO: 3620749 - RNA, 18 nt, Human
uuuuaaagguggauuuug

SEQ ID NO: 3620750 - RNA, 21 nt, Human
uuuuaaagucuugcugugguc

SEQ ID NO: 3620751 - RNA, 17 nt, Human
uuuuaaauaaaagugau

SEQ ID NO: 3620752 - RNA, 15 nt, Human
uuuuaaauaaacuuu

SEQ ID NO: 3620753 - RNA, 13 nt, Human
uuuuaaauauauu

SEQ ID NO: 3620754 - RNA, 15 nt, Human
uuuuaaauauuuucu

SEQ ID NO: 3620755 - RNA, 16 nt, Human
uuuuaaauuauaagga

SEQ ID NO: 3620756 - RNA, 19 nt, Human
uuuuaaauuauguuuuacu

SEQ ID NO: 3620757 - RNA, 17 nt, Human
uuuuaaauuuucuucag

SEQ ID NO: 3620758 - RNA, 16 nt, Human
uuuuaaauuuuguaau

SEQ ID NO: 3620759 - RNA, 17 nt, Human
uuuuaaauuuuguaaug

SEQ ID NO: 3620760 - RNA, 13 nt, Human
uuuuaacaagaag

SEQ ID NO: 3620761 - RNA, 16 nt, Human
uuuuaacaagaagaug

SEQ ID NO: 3620762 - RNA, 17 nt, Human
uuuuaacaagaagauga

SEQ ID NO: 3620763 - RNA, 16 nt, Human
uuuuaacaagaagcaa

SEQ ID NO: 3620764 - RNA, 21 nt, Human
uuuuaacaauaacuacugugu

SEQ ID NO: 3620765 - RNA, 13 nt, Human
uuuuaacauuccu

SEQ ID NO: 3620766 - RNA, 14 nt, Human
uuuuaacauuccuc

SEQ ID NO: 3620767 - RNA, 14 nt, Human
uuuuaaccaaaggu

SEQ ID NO: 3620768 - RNA, 16 nt, Human
uuuuaaccaaagguga

SEQ ID NO: 3620769 - RNA, 16 nt, Human
uuuuaaccccgucaac

SEQ ID NO: 3620770 - RNA, 22 nt, Human
uuuuaaccgguaagaguuucag

SEQ ID NO: 3620771 - RNA, 18 nt, Human
uuuuaaccucuuuaagua

SEQ ID NO: 3620772 - RNA, 14 nt, Human
uuuuaacucugucu

SEQ ID NO: 3620773 - RNA, 14 nt, Human
uuuuaacugugcaa

SEQ ID NO: 3620774 - RNA, 14 nt, Human
uuuuaacuguggau

SEQ ID NO: 3620775 - RNA, 15 nt, Human
uuuuaacuucuuucu

SEQ ID NO: 3620776 - RNA, 13 nt, Human
uuuuaacuuuguu

SEQ ID NO: 3620777 - RNA, 14 nt, Human
uuuuaagaaagaaa

SEQ ID NO: 3620778 - RNA, 14 nt, Human
uuuuaagaaaugua

SEQ ID NO: 3620779 - RNA, 20 nt, Human
uuuuaagaaauuuugccuuu

SEQ ID NO: 3620780 - RNA, 15 nt, Human
uuuuaagaggcaggg

SEQ ID NO: 3620781 - RNA, 22 nt, Human
uuuuaagauaaauuauaaguua

SEQ ID NO: 3620782 - RNA, 21 nt, Human
uuuuaagauaauaauauaugu

SEQ ID NO: 3620783 - RNA, 14 nt, Human
uuuuaagauagugu

SEQ ID NO: 3620784 - RNA, 23 nt, Human
uuuuaagauaguguaacuugcuu

SEQ ID NO: 3620785 - RNA, 12 nt, Human
uuuuaagcauua

SEQ ID NO: 3620786 - RNA, 23 nt, Human
uuuuaagcauuacucuuguaaga

SEQ ID NO: 3620787 - RNA, 18 nt, Human
uuuuaagcauugugagua

SEQ ID NO: 3620788 - RNA, 23 nt, Human
uuuuaagcccaucaauuauagaa

SEQ ID NO: 3620789 - RNA, 15 nt, Human
uuuuaaggaaaacua

SEQ ID NO: 3620790 - RNA, 12 nt, Human
uuuuaaggaaac

SEQ ID NO: 3620791 - RNA, 19 nt, Human
uuuuaaggacugacugagg

SEQ ID NO: 3620792 - RNA, 14 nt, Human
uuuuaaggcuucaa

SEQ ID NO: 3620793 - RNA, 20 nt, Human
uuuuaaggguuuguggaaaa

SEQ ID NO: 3620794 - RNA, 13 nt, Human
uuuuaaggucuuu

SEQ ID NO: 3620795 - RNA, 18 nt, Human
uuuuaaggucuuucagua

SEQ ID NO: 3620796 - RNA, 16 nt, Human
uuuuaagugcugcauu

SEQ ID NO: 3620797 - RNA, 17 nt, Human
uuuuaagugcugcauuu

SEQ ID NO: 3620798 - RNA, 12 nt, Human
uuuuaaguucuu

SEQ ID NO: 3620799 - RNA, 13 nt, Human
uuuuaaguucuua

SEQ ID NO: 3620800 - RNA, 18 nt, Human
uuuuaaguuguuugcaug

SEQ ID NO: 3620801 - RNA, 19 nt, Human
uuuuaauaaaaauaauuuu

SEQ ID NO: 3620802 - RNA, 13 nt, Human
uuuuaauaaacua

SEQ ID NO: 3620803 - RNA, 14 nt, Human
uuuuaauaaacuuu

SEQ ID NO: 3620804 - RNA, 15 nt, Human
uuuuaauaaacuuuu

SEQ ID NO: 3620805 - RNA, 14 nt, Human
uuuuaauaaauuuc

SEQ ID NO: 3620806 - RNA, 12 nt, Human
uuuuaauaaugu

SEQ ID NO: 3620807 - RNA, 14 nt, Human
uuuuaauaauguuu

SEQ ID NO: 3620808 - RNA, 16 nt, Human
uuuuaauaauguuuca

SEQ ID NO: 3620809 - RNA, 22 nt, Human
uuuuaauaugcuuaaaauaagc

SEQ ID NO: 3620810 - RNA, 19 nt, Human
uuuuaauauggaucuguau

SEQ ID NO: 3620811 - RNA, 16 nt, Human
uuuuaaucaugaaauu

SEQ ID NO: 3620812 - RNA, 18 nt, Human
uuuuaaucuacugcauuu

SEQ ID NO: 3620813 - RNA, 21 nt, Human
uuuuaaucucuaacaguggac

SEQ ID NO: 3620814 - RNA, 17 nt, Human
uuuuaaugaugacaaaa

SEQ ID NO: 3620815 - RNA, 17 nt, Human
uuuuaauggauuguuaa

SEQ ID NO: 3620816 - RNA, 17 nt, Human
uuuuaauggcagcagaa

SEQ ID NO: 3620817 - RNA, 22 nt, Human
uuuuaauggcagcagaaaacuu

SEQ ID NO: 3620818 - RNA, 21 nt, Human
uuuuaaugugcuguguaaagu

SEQ ID NO: 3620819 - RNA, 11 nt, Human
uuuuaauuauu

SEQ ID NO: 3620820 - RNA, 13 nt, Human
uuuuaauuauugu

SEQ ID NO: 3620821 - RNA, 14 nt, Human
uuuuaauuauuguu

SEQ ID NO: 3620822 - RNA, 20 nt, Human
uuuuaauucaccaaaguauu

SEQ ID NO: 3620823 - RNA, 12 nt, Human
uuuuaauucauu

SEQ ID NO: 3620824 - RNA, 11 nt, Human
uuuuaauucca

SEQ ID NO: 3620825 - RNA, 18 nt, Human
uuuuaauuccaauaugau

SEQ ID NO: 3620826 - RNA, 18 nt, Human
uuuuaauuccaugaaucg

SEQ ID NO: 3620827 - RNA, 15 nt, Human
uuuuaauugauuauu

SEQ ID NO: 3620828 - RNA, 14 nt, Human
uuuuaauuguauuu

SEQ ID NO: 3620829 - RNA, 23 nt, Human
uuuuaauugucaugguuacaaac

SEQ ID NO: 3620830 - RNA, 12 nt, Human
uuuuaauuuaac

SEQ ID NO: 3620831 - RNA, 12 nt, Human
uuuuaauuuagu

SEQ ID NO: 3620832 - RNA, 20 nt, Human
uuuuaauuuaguaaauguua

SEQ ID NO: 3620833 - RNA, 19 nt, Human
uuuuaauuucaagcuuauu

SEQ ID NO: 3620834 - RNA, 19 nt, Human
uuuuaauuugaugaaagcu

SEQ ID NO: 3620835 - RNA, 13 nt, Human
uuuuaauuuuguc

SEQ ID NO: 3620836 - RNA, 18 nt, Human
uuuuacaaguaacaaaaa

SEQ ID NO: 3620837 - RNA, 16 nt, Human
uuuuacaauguaauua

SEQ ID NO: 3620838 - RNA, 16 nt, Human
uuuuacaauugaaaug

SEQ ID NO: 3620839 - RNA, 15 nt, Human
uuuuacacagaaaca

SEQ ID NO: 3620840 - RNA, 21 nt, Human
uuuuacacagaaacacugccu

SEQ ID NO: 3620841 - RNA, 22 nt, Human
uuuuacacagaaacacugccuu

SEQ ID NO: 3620842 - RNA, 16 nt, Human
uuuuacagcugccugc

SEQ ID NO: 3620843 - RNA, 22 nt, Human
uuuuacauaaauuuaguauuuu

SEQ ID NO: 3620844 - RNA, 15 nt, Human
uuuuacaucuaaacu

SEQ ID NO: 3620845 - RNA, 16 nt, Human
uuuuacaucuaaacua

SEQ ID NO: 3620846 - RNA, 18 nt, Human
uuuuacauguuuauaaau

SEQ ID NO: 3620847 - RNA, 15 nt, Human
uuuuacauucugaau

SEQ ID NO: 3620848 - RNA, 13 nt, Human
uuuuaccaaguuu

SEQ ID NO: 3620849 - RNA, 15 nt, Human
uuuuaccagcuuuua

SEQ ID NO: 3620850 - RNA, 23 nt, Human
uuuuaccaucacacauguucaga

SEQ ID NO: 3620851 - RNA, 20 nt, Human
uuuuacccauuuguucauau

SEQ ID NO: 3620852 - RNA, 19 nt, Human
uuuuaccuaccacaguguc

SEQ ID NO: 3620853 - RNA, 14 nt, Human
uuuuaccuuucaua

SEQ ID NO: 3620854 - RNA, 22 nt, Human
uuuuacuccagguuauugcaau

SEQ ID NO: 3620855 - RNA, 14 nt, Human
uuuuacucugccua

SEQ ID NO: 3620856 - RNA, 22 nt, Human
uuuuacucugccuacagaacuu

SEQ ID NO: 3620857 - RNA, 11 nt, Human
uuuuacugaac

SEQ ID NO: 3620858 - RNA, 13 nt, Human
uuuuacugaacaa

SEQ ID NO: 3620859 - RNA, 16 nt, Human
uuuuacugcucugaga

SEQ ID NO: 3620860 - RNA, 15 nt, Human
uuuuacugcuuuuaa

SEQ ID NO: 3620861 - RNA, 17 nt, Human
uuuuacugguugcaugg

SEQ ID NO: 3620862 - RNA, 13 nt, Human
uuuuacuuggaaa

SEQ ID NO: 3620863 - RNA, 18 nt, Human
uuuuacuuuuaaacugug

SEQ ID NO: 3620864 - RNA, 15 nt, Human
uuuuacuuuuaaaug

SEQ ID NO: 3620865 - RNA, 22 nt, Human
uuuuacuuuuuuuuuauuuuau

SEQ ID NO: 3620866 - RNA, 12 nt, Human
uuuuagaaacuu

SEQ ID NO: 3620867 - RNA, 14 nt, Human
uuuuagaaagcauu

SEQ ID NO: 3620868 - RNA, 18 nt, Human
uuuuagaaagcauuugaa

SEQ ID NO: 3620869 - RNA, 16 nt, Human
uuuuagaauaagaauu

SEQ ID NO: 3620870 - RNA, 17 nt, Human
uuuuagaucaaauacuu

SEQ ID NO: 3620871 - RNA, 19 nt, Human
uuuuagaucaaauacuuua

SEQ ID NO: 3620872 - RNA, 20 nt, Human
uuuuagaugagauuguuuua

SEQ ID NO: 3620873 - RNA, 17 nt, Human
uuuuagaugguuucuug

SEQ ID NO: 3620874 - RNA, 23 nt, Human
uuuuagcaaagcggguuauaaug

SEQ ID NO: 3620875 - RNA, 16 nt, Human
uuuuagccuucucugu

SEQ ID NO: 3620876 - RNA, 23 nt, Human
uuuuagccuucucuguucauuuc

SEQ ID NO: 3620877 - RNA, 20 nt, Human
uuuuagcugaugaacuuauu

SEQ ID NO: 3620878 - RNA, 20 nt, Human
uuuuaggaaaaucacuuugu

SEQ ID NO: 3620879 - RNA, 15 nt, Human
uuuuaggaaaugaau

SEQ ID NO: 3620880 - RNA, 17 nt, Human
uuuuaggcacucuuaaa

SEQ ID NO: 3620881 - RNA, 17 nt, Human
uuuuagggagcuggucu

SEQ ID NO: 3620882 - RNA, 19 nt, Human
uuuuagguguugauuuucu

SEQ ID NO: 3620883 - RNA, 13 nt, Human
uuuuagguucuaa

SEQ ID NO: 3620884 - RNA, 23 nt, Human
uuuuagguucuaaaguucuaaga

SEQ ID NO: 3620885 - RNA, 18 nt, Human
uuuuaguaaguuaaugua

SEQ ID NO: 3620886 - RNA, 15 nt, Human
uuuuaguaaucugua

SEQ ID NO: 3620887 - RNA, 19 nt, Human
uuuuaguauuuauuuaugu

SEQ ID NO: 3620888 - RNA, 14 nt, Human
uuuuagucacuuuu

SEQ ID NO: 3620889 - RNA, 20 nt, Human
uuuuaguggacccugaaaug

SEQ ID NO: 3620890 - RNA, 20 nt, Human
uuuuaguuccugugcacagc

SEQ ID NO: 3620891 - RNA, 19 nt, Human
uuuuaguuucuguucugug

SEQ ID NO: 3620892 - RNA, 20 nt, Human
uuuuaguuucuguucugugg

SEQ ID NO: 3620893 - RNA, 21 nt, Human
uuuuaguuucuguucugugga

SEQ ID NO: 3620894 - RNA, 13 nt, Human
uuuuaguuuugcu

SEQ ID NO: 3620895 - RNA, 16 nt, Human
uuuuaguuuuucauua

SEQ ID NO: 3620896 - RNA, 20 nt, Human
uuuuauaaaaaaaaugaaau

SEQ ID NO: 3620897 - RNA, 16 nt, Human
uuuuauaaaaaauggu

SEQ ID NO: 3620898 - RNA, 16 nt, Human
uuuuauaaaaauaaau

SEQ ID NO: 3620899 - RNA, 20 nt, Human
uuuuauaaaauuaaagaaaa

SEQ ID NO: 3620900 - RNA, 21 nt, Human
uuuuauaaaauuaaagaaaau

SEQ ID NO: 3620901 - RNA, 13 nt, Human
aaaaaaaaagaaa

SEQ ID NO: 3620902 - RNA, 12 nt, Human
aaaaaaaacaaa

SEQ ID NO: 3620903 - RNA, 12 nt, Human
aaaaaaaacagu

SEQ ID NO: 3620904 - RNA, 13 nt, Human
aaaaaaaagcuuc

SEQ ID NO: 3620905 - RNA, 12 nt, Human
aaaaaaaaguca

SEQ ID NO: 3620906 - RNA, 13 nt, Human
aaaaaaaagucag

SEQ ID NO: 3620907 - RNA, 11 nt, Human
aaaaaaaaguu

SEQ ID NO: 3620908 - RNA, 12 nt, Human
aaaaaaaaguua

SEQ ID NO: 3620909 - RNA, 13 nt, Human
aaaaaaaaugcca

SEQ ID NO: 3620910 - RNA, 11 nt, Human
aaaaaaaaugg

SEQ ID NO: 3620911 - RNA, 13 nt, Human
aaaaaaaauugua

SEQ ID NO: 3620912 - RNA, 18 nt, Human
aaaaaaacaguggaucac

SEQ ID NO: 3620913 - RNA, 11 nt, Human
aaaaaaagaaa

SEQ ID NO: 3620914 - RNA, 10 nt, Human
aaaaaaagac

SEQ ID NO: 3620915 - RNA, 14 nt, Human
aaaaaaagaucugu

SEQ ID NO: 3620916 - RNA, 12 nt, Human
aaaaaaagcaua

SEQ ID NO: 3620917 - RNA, 12 nt, Human
aaaaaaagcuuu

SEQ ID NO: 3620918 - RNA, 11 nt, Human
aaaaaaaguua

SEQ ID NO: 3620919 - RNA, 11 nt, Human
aaaaaaauaag

SEQ ID NO: 3620920 - RNA, 12 nt, Human
aaaaaaauaaua

SEQ ID NO: 3620921 - RNA, 14 nt, Human
aaaaaaaugccaua

SEQ ID NO: 3620922 - RNA, 12 nt, Human
aaaaaaauuggc

SEQ ID NO: 3620923 - RNA, 11 nt, Human
aaaaaaauuug

SEQ ID NO: 3620924 - RNA, 19 nt, Human
aaaaaacucgaggacugua

SEQ ID NO: 3620925 - RNA, 11 nt, Human
aaaaaacucuu

SEQ ID NO: 3620926 - RNA, 12 nt, Human
aaaaaagaaaau

SEQ ID NO: 3620927 - RNA, 12 nt, Human
aaaaaagaaaga

SEQ ID NO: 3620928 - RNA, 10 nt, Human
aaaaaagcuc

SEQ ID NO: 3620929 - RNA, 11 nt, Human
aaaaaagcuca

SEQ ID NO: 3620930 - RNA, 12 nt, Human
aaaaaagcucau

SEQ ID NO: 3620931 - RNA, 11 nt, Human
aaaaaagcuuu

SEQ ID NO: 3620932 - RNA, 12 nt, Human
aaaaaagucaga

SEQ ID NO: 3620933 - RNA, 12 nt, Human
aaaaaaguuaua

SEQ ID NO: 3620934 - RNA, 13 nt, Human
aaaaaaguugaag

SEQ ID NO: 3620935 - RNA, 12 nt, Human
aaaaaaguuuua

SEQ ID NO: 3620936 - RNA, 12 nt, Human
aaaaaauaacac

SEQ ID NO: 3620937 - RNA, 20 nt, Human
aaaaaauaaucuauuucuau

SEQ ID NO: 3620938 - RNA, 12 nt, Human
aaaaaauaauua

SEQ ID NO: 3620939 - RNA, 11 nt, Human
aaaaaauacug

SEQ ID NO: 3620940 - RNA, 14 nt, Human
aaaaaauacugcca

SEQ ID NO: 3620941 - RNA, 19 nt, Human
aaaaaauauagccuuuaca

SEQ ID NO: 3620942 - RNA, 17 nt, Human
aaaaaaucaucuauuuu

SEQ ID NO: 3620943 - RNA, 13 nt, Human
aaaaaaucugcag

SEQ ID NO: 3620944 - RNA, 12 nt, Human
aaaauauacugu

SEQ ID NO: 3620945 - RNA, 13 nt, Human
aaaauauacugua

SEQ ID NO: 3620946 - RNA, 14 nt, Human
aaaauugaaaugua

SEQ ID NO: 3620947 - RNA, 16 nt, Human
aaaauugaaauguaag

SEQ ID NO: 3620948 - RNA, 18 nt, Human
aaaauugaaauguaaggc

SEQ ID NO: 3620949 - RNA, 14 nt, Human
aaaauugaaugcaa

SEQ ID NO: 3620950 - RNA, 21 nt, Human
aaaauugaaugcaaaccauag

SEQ ID NO: 3620951 - RNA, 12 nt, Human
aaaauugaauuu

SEQ ID NO: 3620952 - RNA, 14 nt, Human
aaaauugaauuuaa

SEQ ID NO: 3620953 - RNA, 17 nt, Human
aaaauugaauuuaacaa

SEQ ID NO: 3620954 - RNA, 22 nt, Human
aaaauugaguucuuccuguaau

SEQ ID NO: 3620955 - RNA, 20 nt, Human
aaaauugaguugcacuuauu

SEQ ID NO: 3620956 - RNA, 23 nt, Human
aaaauugauauacuuuuuucuua

SEQ ID NO: 3620957 - RNA, 21 nt, Human
aaaauugccauauugcacaug

SEQ ID NO: 3620958 - RNA, 15 nt, Human
aaaauugcugugccu

SEQ ID NO: 3620959 - RNA, 21 nt, Human
aaaauugcugugccucccaaa

SEQ ID NO: 3620960 - RNA, 20 nt, Human
aaaauuggcuaguugaaucu

SEQ ID NO: 3620961 - RNA, 18 nt, Human
aaaauuggggauucuuaa

SEQ ID NO: 3620962 - RNA, 20 nt, Human
aaaauuggggauucuuaaag

SEQ ID NO: 3620963 - RNA, 16 nt, Human
aaaauugguuggagaa

SEQ ID NO: 3620964 - RNA, 13 nt, Human
aaaauuguauaga

SEQ ID NO: 3620965 - RNA, 16 nt, Human
aaaauuguauagagau

SEQ ID NO: 3620966 - RNA, 21 nt, Human
aaaauuguauagagauaugca

SEQ ID NO: 3620967 - RNA, 16 nt, Human
aaaauuguuuagugau

SEQ ID NO: 3620968 - RNA, 18 nt, Human
aaaauuuaaaaagcccaa

SEQ ID NO: 3620969 - RNA, 19 nt, Human
aaaauuuaaaaagcccaac

SEQ ID NO: 3620970 - RNA, 21 nt, Human
aaaauuuaagcauuguuugcu

SEQ ID NO: 3620971 - RNA, 18 nt, Human
aaaauuuaagugcgugug

SEQ ID NO: 3620972 - RNA, 14 nt, Human
aaaauuuauuucau

SEQ ID NO: 3620973 - RNA, 20 nt, Human
aaaauuucacauuaauauuu

SEQ ID NO: 3620974 - RNA, 12 nt, Human
aaaauuugaaac

SEQ ID NO: 3620975 - RNA, 13 nt, Human
aaaauuugaaaca

SEQ ID NO: 3620976 - RNA, 14 nt, Human
aaaauuugaaacau

SEQ ID NO: 3620977 - RNA, 16 nt, Human
aaaauuugaaacauug

SEQ ID NO: 3620978 - RNA, 17 nt, Human
aaaauuugaaacauugc

SEQ ID NO: 3620979 - RNA, 16 nt, Human
aaaauuugaacacugg

SEQ ID NO: 3620980 - RNA, 19 nt, Human
aaaauuugaaccaaaacau

SEQ ID NO: 3620981 - RNA, 19 nt, Human
aaaauuugacuaauuuuac

SEQ ID NO: 3620982 - RNA, 19 nt, Human
aaaauuuguuugaaaucuu

SEQ ID NO: 3620983 - RNA, 13 nt, Human
aaaauuuuauucc

SEQ ID NO: 3620984 - RNA, 20 nt, Human
aaaauuuugauguuuuaagg

SEQ ID NO: 3620985 - RNA, 17 nt, Human
aaaauuuugcuuuuaau

SEQ ID NO: 3620986 - RNA, 14 nt, Human
aaaauuuuuggauu

SEQ ID NO: 3620987 - RNA, 22 nt, Human
aaaauuuuuucucuaggaaaua

SEQ ID NO: 3620988 - RNA, 21 nt, Human
aaacaaaaauuagguauuuug

SEQ ID NO: 3620989 - RNA, 13 nt, Human
aaacaaaacaaaa

SEQ ID NO: 3620990 - RNA, 17 nt, Human
aaacaaaacaaaacuau

SEQ ID NO: 3620991 - RNA, 13 nt, Human
aaacaaaaccaaa

SEQ ID NO: 3620992 - RNA, 18 nt, Human
aaacaaaauggcuucagu

SEQ ID NO: 3620993 - RNA, 20 nt, Human
aaacaaaauuuguuugaaau

SEQ ID NO: 3620994 - RNA, 15 nt, Human
aaacaaacaagcuag

SEQ ID NO: 3620995 - RNA, 18 nt, Human
aaacaaacaccuucuuau

SEQ ID NO: 3620996 - RNA, 16 nt, Human
aaacaaagcaauucuu

SEQ ID NO: 3620997 - RNA, 12 nt, Human
aaacaaagccag

SEQ ID NO: 3620998 - RNA, 13 nt, Human
aaacaaagccaga

SEQ ID NO: 3620999 - RNA, 17 nt, Human
aaacaaagcuuagcagg

SEQ ID NO: 3621000 - RNA, 22 nt, Human
aaacaaagcuuagcaggagagg

SEQ ID NO: 3621001 - RNA, 13 nt, Human
aaacaaagucuuu

SEQ ID NO: 3621002 - RNA, 17 nt, Human
aaacaaaguggaaggaa

SEQ ID NO: 3621003 - RNA, 17 nt, Human
aaacaaaguuacuaggu

SEQ ID NO: 3621004 - RNA, 23 nt, Human
aaacaaaguuucagaguauauug

SEQ ID NO: 3621005 - RNA, 13 nt, Human
aaacaaauaaaaa

SEQ ID NO: 3621006 - RNA, 21 nt, Human
aaacaaauucauauucugucu

SEQ ID NO: 3621007 - RNA, 12 nt, Human
aaacaacaaaaa

SEQ ID NO: 3621008 - RNA, 16 nt, Human
aaacaacaacacaaua

SEQ ID NO: 3621009 - RNA, 19 nt, Human
aaacaacagucuucauuuu

SEQ ID NO: 3621010 - RNA, 19 nt, Human
aaacaacauuuugagaaca

SEQ ID NO: 3621011 - RNA, 15 nt, Human
aaacaaccaugucau

SEQ ID NO: 3621012 - RNA, 17 nt, Human
aaacaaccaugucauuu

SEQ ID NO: 3621013 - RNA, 13 nt, Human
aaacaagaaaaau

SEQ ID NO: 3621014 - RNA, 17 nt, Human
aaacaagaaaaauaaag

SEQ ID NO: 3621015 - RNA, 23 nt, Human
aaacaagaaugaagguuuuugua

SEQ ID NO: 3621016 - RNA, 12 nt, Human
aaacaagaaugu

SEQ ID NO: 3621017 - RNA, 20 nt, Human
aaacaagaccacguuucuaa

SEQ ID NO: 3621018 - RNA, 20 nt, Human
aaacaagcacuaaacaaaga

SEQ ID NO: 3621019 - RNA, 12 nt, Human
aaacaagcauau

SEQ ID NO: 3621020 - RNA, 20 nt, Human
aaacaagcauauaaaauggc

SEQ ID NO: 3621021 - RNA, 23 nt, Human
aaacaagccaagaaagauguaua

SEQ ID NO: 3621022 - RNA, 19 nt, Human
aaacaaggggcuguuacau

SEQ ID NO: 3621023 - RNA, 22 nt, Human
aaacaaguauuuguuaauuuag

SEQ ID NO: 3621024 - RNA, 14 nt, Human
aaacaauaaagaga

SEQ ID NO: 3621025 - RNA, 15 nt, Human
aaacaauaaagagau

SEQ ID NO: 3621026 - RNA, 15 nt, Human
aaacaauaaagcaau

SEQ ID NO: 3621027 - RNA, 15 nt, Human
aaacaauaaaugugc

SEQ ID NO: 3621028 - RNA, 14 nt, Human
aaacaauauagucu

SEQ ID NO: 3621029 - RNA, 18 nt, Human
aaacaauauuuauuguau

SEQ ID NO: 3621030 - RNA, 22 nt, Human
aaacaauauuuauuguauuuua

SEQ ID NO: 3621031 - RNA, 15 nt, Human
aaacaaucucuuaaa

SEQ ID NO: 3621032 - RNA, 17 nt, Human
aaacaaugcaaaaccuu

SEQ ID NO: 3621033 - RNA, 22 nt, Human
aaacaauguuaacauuuuuggu

SEQ ID NO: 3621034 - RNA, 14 nt, Human
aaacaauguuuaaa

SEQ ID NO: 3621035 - RNA, 17 nt, Human
aaacaauuuauuuuauu

SEQ ID NO: 3621036 - RNA, 18 nt, Human
aaacacaaaacaaauccu

SEQ ID NO: 3621037 - RNA, 19 nt, Human
aaacacaaaugcagggauu

SEQ ID NO: 3621038 - RNA, 18 nt, Human
aaacacaccaggcugugg

SEQ ID NO: 3621039 - RNA, 12 nt, Human
aaacacagagag

SEQ ID NO: 3621040 - RNA, 19 nt, Human
aaacacagucaaaauaauu

SEQ ID NO: 3621041 - RNA, 13 nt, Human
aaacacaguuaca

SEQ ID NO: 3621042 - RNA, 16 nt, Human
aaacacaguuacacuu

SEQ ID NO: 3621043 - RNA, 18 nt, Human
aaacacaucuuuccuguc

SEQ ID NO: 3621044 - RNA, 15 nt, Human
aaacacauuaaaggu

SEQ ID NO: 3621045 - RNA, 11 nt, Human
aaacacauuuu

SEQ ID NO: 3621046 - RNA, 12 nt, Human
aaacaccccuca

SEQ ID NO: 3621047 - RNA, 14 nt, Human
aaacaccuagcuuu

SEQ ID NO: 3621048 - RNA, 21 nt, Human
aaacaccucacaccucacucu

SEQ ID NO: 3621049 - RNA, 23 nt, Human
aaacaccugacagccccucccuc

SEQ ID NO: 3621050 - RNA, 14 nt, Human
aaacaccuucuaua

SEQ ID NO: 3621051 - RNA, 22 nt, Human
aaacacguuuuaaggacugacu

SEQ ID NO: 3621052 - RNA, 20 nt, Human
aaacacuaaauguuaaagau

SEQ ID NO: 3621053 - RNA, 15 nt, Human
aaacacuccuugcau

SEQ ID NO: 3621054 - RNA, 17 nt, Human
aaacacucuugaaaaau

SEQ ID NO: 3621055 - RNA, 23 nt, Human
aaacacugccaucuuaguuugga

SEQ ID NO: 3621056 - RNA, 17 nt, Human
aaacacugccuuuuuau

SEQ ID NO: 3621057 - RNA, 21 nt, Human
aaacacugcgcuuuauuuucu

SEQ ID NO: 3621058 - RNA, 19 nt, Human
aaacacuggggcuggcaca

SEQ ID NO: 3621059 - RNA, 23 nt, Human
aaacacuguggaacuaauaaaua

SEQ ID NO: 3621060 - RNA, 22 nt, Human
aaacacuguucucugcccucca

SEQ ID NO: 3621061 - RNA, 15 nt, Human
aaacacuucaauaau

SEQ ID NO: 3621062 - RNA, 18 nt, Human
aaacacuucguucgcaga

SEQ ID NO: 3621063 - RNA, 21 nt, Human
aaacacuucguucgcagagcu

SEQ ID NO: 3621064 - RNA, 15 nt, Human
aaacacuugcaaccu

SEQ ID NO: 3621065 - RNA, 12 nt, Human
aaacacuuguaa

SEQ ID NO: 3621066 - RNA, 13 nt, Human
aaacacuuucaaa

SEQ ID NO: 3621067 - RNA, 17 nt, Human
aaacacuuugccuccug

SEQ ID NO: 3621068 - RNA, 17 nt, Human
aaacagaaaaaaaacac

SEQ ID NO: 3621069 - RNA, 14 nt, Human
aaacagaaaaaaag

SEQ ID NO: 3621070 - RNA, 14 nt, Human
aaacagaacacuua

SEQ ID NO: 3621071 - RNA, 12 nt, Human
aaacagaacagg

SEQ ID NO: 3621072 - RNA, 15 nt, Human
aaacagaacaggguc

SEQ ID NO: 3621073 - RNA, 12 nt, Human
aaacagaagccu

SEQ ID NO: 3621074 - RNA, 14 nt, Human
aaacagacaauaug

SEQ ID NO: 3621075 - RNA, 16 nt, Human
aaacagacaauaugug

SEQ ID NO: 3621076 - RNA, 20 nt, Human
aaacagacucgauucauauu

SEQ ID NO: 3621077 - RNA, 18 nt, Human
aaacagaguaaucuuguu

SEQ ID NO: 3621078 - RNA, 14 nt, Human
aaacagauaccaua

SEQ ID NO: 3621079 - RNA, 17 nt, Human
aaacagaugaaaagccu

SEQ ID NO: 3621080 - RNA, 16 nt, Human
aaacagauuguuugca

SEQ ID NO: 3621081 - RNA, 22 nt, Human
aaacagauuuggugaauuugaa

SEQ ID NO: 3621082 - RNA, 23 nt, Human
aaacagauuuggugaauuugaau

SEQ ID NO: 3621083 - RNA, 13 nt, Human
aaacagcaaacca

SEQ ID NO: 3621084 - RNA, 24 nt, Human
aaacagcaaaccaagagauugcua

SEQ ID NO: 3621085 - RNA, 22 nt, Human
aaacagccgucagccaaaugua

SEQ ID NO: 3621086 - RNA, 21 nt, Human
aaacagcgcuggguccacccc

SEQ ID NO: 3621087 - RNA, 15 nt, Human
aaacagcguuuaaga

SEQ ID NO: 3621088 - RNA, 14 nt, Human
aaacagcucaggcu

SEQ ID NO: 3621089 - RNA, 23 nt, Human
aaagauauggagaauugcugaag

SEQ ID NO: 3621090 - RNA, 22 nt, Human
aaagauauuauucaccauguaa

SEQ ID NO: 3621091 - RNA, 20 nt, Human
aaagauauuuugcuuuguga

SEQ ID NO: 3621092 - RNA, 15 nt, Human
aaagaucaaaauaaa

SEQ ID NO: 3621093 - RNA, 17 nt, Human
aaagaucaaaauaaaaa

SEQ ID NO: 3621094 - RNA, 15 nt, Human
aaagaucuacaugaa

SEQ ID NO: 3621095 - RNA, 19 nt, Human
aaagaucuguccucagccu

SEQ ID NO: 3621096 - RNA, 13 nt, Human
aaagaucuguuuu

SEQ ID NO: 3621097 - RNA, 17 nt, Human
aaagaugaaaauauuug

SEQ ID NO: 3621098 - RNA, 18 nt, Human
aaagaugaaggucuguuu

SEQ ID NO: 3621099 - RNA, 15 nt, Human
aaagaugagugagca

SEQ ID NO: 3621100 - RNA, 12 nt, Human
aaagaugcacuu

SEQ ID NO: 3621101 - RNA, 21 nt, Human
aaagaugcacuuugcuuuaau

SEQ ID NO: 3621102 - RNA, 23 nt, Human
aaagaugcucagguacagagaag

SEQ ID NO: 3621103 - RNA, 24 nt, Human
aaagaugcucagguacagagaagg

SEQ ID NO: 3621104 - RNA, 14 nt, Human
aaagaugcuucuca

SEQ ID NO: 3621105 - RNA, 13 nt, Human
aaagaugcuuuua

SEQ ID NO: 3621106 - RNA, 16 nt, Human
aaagauggaguuucua

SEQ ID NO: 3621107 - RNA, 22 nt, Human
aaagauggcugugccucugccu

SEQ ID NO: 3621108 - RNA, 21 nt, Human
aaagauggggucuguaaaauc

SEQ ID NO: 3621109 - RNA, 17 nt, Human
aaagaugguuaaacauu

SEQ ID NO: 3621110 - RNA, 20 nt, Human
aaagaugguuaaacauuuuc

SEQ ID NO: 3621111 - RNA, 14 nt, Human
aaagauguagcaaa

SEQ ID NO: 3621112 - RNA, 23 nt, Human
aaagaugucucugcaaaccaaca

SEQ ID NO: 3621113 - RNA, 13 nt, Human
aaagaugugggga

SEQ ID NO: 3621114 - RNA, 16 nt, Human
aaagauguucuggaua

SEQ ID NO: 3621115 - RNA, 21 nt, Human
aaagauguuugucagauauga

SEQ ID NO: 3621116 - RNA, 22 nt, Human
aaagauuacuuuuucuuuaugu

SEQ ID NO: 3621117 - RNA, 22 nt, Human
aaagauuagcaaggucauuucu

SEQ ID NO: 3621118 - RNA, 22 nt, Human
aaagauucaccuaagagauucu

SEQ ID NO: 3621119 - RNA, 14 nt, Human
aaagauucaccuga

SEQ ID NO: 3621120 - RNA, 21 nt, Human
aaagauuuaagcacaaacuuu

SEQ ID NO: 3621121 - RNA, 14 nt, Human
aaagauuucuguuc

SEQ ID NO: 3621122 - RNA, 13 nt, Human
aaagauuuucaga

SEQ ID NO: 3621123 - RNA, 14 nt, Human
aaagauuuuuuaau

SEQ ID NO: 3621124 - RNA, 20 nt, Human
aaagauuuuuuaauaauuua

SEQ ID NO: 3621125 - RNA, 14 nt, Human
aaagcaaaaaagaa

SEQ ID NO: 3621126 - RNA, 15 nt, Human
aaagcaaaaaugcua

SEQ ID NO: 3621127 - RNA, 22 nt, Human
aaagcaaaagaucccuuuuucu

SEQ ID NO: 3621128 - RNA, 17 nt, Human
aaagcaaaauaaaaacu

SEQ ID NO: 3621129 - RNA, 15 nt, Human
aaagcaaaccuguaa

SEQ ID NO: 3621130 - RNA, 13 nt, Human
aaagcaaaugucu

SEQ ID NO: 3621131 - RNA, 16 nt, Human
aaagcaaaugugaccu

SEQ ID NO: 3621132 - RNA, 13 nt, Human
aaagcaacaucag

SEQ ID NO: 3621133 - RNA, 21 nt, Human
aaagcaacugucuauuucugc

SEQ ID NO: 3621134 - RNA, 18 nt, Human
aaagcaagaaucagagaa

SEQ ID NO: 3621135 - RNA, 14 nt, Human
aaagcaaggaaacu

SEQ ID NO: 3621136 - RNA, 22 nt, Human
aaagcaagugauugggacagag

SEQ ID NO: 3621137 - RNA, 15 nt, Human
aaagcaauaaaugaa

SEQ ID NO: 3621138 - RNA, 17 nt, Human
aaagcaauaaaugaaug

SEQ ID NO: 3621139 - RNA, 12 nt, Human
aaagcaauagaa

SEQ ID NO: 3621140 - RNA, 15 nt, Human
aaagcaauagaaaca

SEQ ID NO: 3621141 - RNA, 14 nt, Human
aaagcaauaugcau

SEQ ID NO: 3621142 - RNA, 18 nt, Human
aaagcaauauuuuggagu

SEQ ID NO: 3621143 - RNA, 14 nt, Human
aaagcaauuuuccu

SEQ ID NO: 3621144 - RNA, 16 nt, Human
aaagcaauuuuccuug

SEQ ID NO: 3621145 - RNA, 18 nt, Human
aaagcaauuuuccuugaa

SEQ ID NO: 3621146 - RNA, 19 nt, Human
aaagcaauuuuccuugaag

SEQ ID NO: 3621147 - RNA, 21 nt, Human
aaagcaauuuuccuugaagcc

SEQ ID NO: 3621148 - RNA, 13 nt, Human
aaagcacaaagga

SEQ ID NO: 3621149 - RNA, 17 nt, Human
aaagauaccuuaaaauu

SEQ ID NO: 3621150 - RNA, 18 nt, Human
aaagauaccuuaaaauuu

SEQ ID NO: 3621151 - RNA, 20 nt, Human
aaagauaccuuaaaauuuga

SEQ ID NO: 3621152 - RNA, 16 nt, Human
aaagauacgacuuuau

SEQ ID NO: 3621153 - RNA, 20 nt, Human
aaagauacgacuuuauuuuc

SEQ ID NO: 3621154 - RNA, 22 nt, Human
aaagauacgacuuuauuuucug

SEQ ID NO: 3621155 - RNA, 16 nt, Human
aaagauauaagugcug

SEQ ID NO: 3621156 - RNA, 18 nt, Human
aaagauauaagugcugua

SEQ ID NO: 3621157 - RNA, 20 nt, Human
aaagauauaugaauaugaca

SEQ ID NO: 3621158 - RNA, 20 nt, Human
aaagauaucucaucucuucu

SEQ ID NO: 3621159 - RNA, 15 nt, Human
aaagauaucuuuucu

SEQ ID NO: 3621160 - RNA, 14 nt, Human
aaagauauggagaa

SEQ ID NO: 3621161 - RNA, 15 nt, Human
aaagauauuguucaa

SEQ ID NO: 3621162 - RNA, 12 nt, Human
aaagauauuuug

SEQ ID NO: 3621163 - RNA, 20 nt, Human
aaagaucaaaauaaaaagug

SEQ ID NO: 3621164 - RNA, 22 nt, Human
aaagaucacuuguuguuuuacu

SEQ ID NO: 3621165 - RNA, 20 nt, Human
aaagaucuguccucagccuu

SEQ ID NO: 3621166 - RNA, 16 nt, Human
aaagaucuguuuugaa

SEQ ID NO: 3621167 - RNA, 15 nt, Human
aaagaugaaaggcag

SEQ ID NO: 3621168 - RNA, 23 nt, Human
aaagaugaacucugaacuuugga

SEQ ID NO: 3621169 - RNA, 19 nt, Human
aaagaugaaggucuguuuu

SEQ ID NO: 3621170 - RNA, 20 nt, Human
aaagaugagcuuugucuacu

SEQ ID NO: 3621171 - RNA, 14 nt, Human
aaagaugcaaugua

SEQ ID NO: 3621172 - RNA, 17 nt, Human
aaagaugcacuuugcuu

SEQ ID NO: 3621173 - RNA, 22 nt, Human
aaagaugcacuuugcuuuaaua

SEQ ID NO: 3621174 - RNA, 14 nt, Human
aaagaugccacauu

SEQ ID NO: 3621175 - RNA, 12 nt, Human
aaagaugcuuuu

SEQ ID NO: 3621176 - RNA, 13 nt, Human
aaagauggaaaaa

SEQ ID NO: 3621177 - RNA, 15 nt, Human
aaagauggaguuucu

SEQ ID NO: 3621178 - RNA, 18 nt, Human
aaagauggcucagagggg

SEQ ID NO: 3621179 - RNA, 23 nt, Human
aaagauggcugugccucugccug

SEQ ID NO: 3621180 - RNA, 19 nt, Human
aaagauggggucuguaaaa

SEQ ID NO: 3621181 - RNA, 19 nt, Human
aaagaugggugaaggcugg

SEQ ID NO: 3621182 - RNA, 22 nt, Human
aaagauguaaugucccuuucag

SEQ ID NO: 3621183 - RNA, 15 nt, Human
aaagauguagcaaac

SEQ ID NO: 3621184 - RNA, 13 nt, Human
aaagauguauaua

SEQ ID NO: 3621185 - RNA, 13 nt, Human
aaagauuaaacag

SEQ ID NO: 3621186 - RNA, 19 nt, Human
aaagauuacuuagaggaaa

SEQ ID NO: 3621187 - RNA, 13 nt, Human
aaagauuagcaag

SEQ ID NO: 3621188 - RNA, 18 nt, Human
aaagauuagcaaggucau

SEQ ID NO: 3621189 - RNA, 19 nt, Human
aaagauucagguauguugc

SEQ ID NO: 3621190 - RNA, 15 nt, Human
aaagauucaugauuu

SEQ ID NO: 3621191 - RNA, 13 nt, Human
aaagauucauuuu

SEQ ID NO: 3621192 - RNA, 19 nt, Human
aaagauucauuuuuaauca

SEQ ID NO: 3621193 - RNA, 19 nt, Human
aaagauucuauaguucuag

SEQ ID NO: 3621194 - RNA, 21 nt, Human
aaagauucuauaguucuagac

SEQ ID NO: 3621195 - RNA, 15 nt, Human
aaagauugagagaau

SEQ ID NO: 3621196 - RNA, 21 nt, Human
aaagauugcugaaauuuuaua

SEQ ID NO: 3621197 - RNA, 20 nt, Human
aaagauuuaagcacaaacuu

SEQ ID NO: 3621198 - RNA, 13 nt, Human
aaagauuuaucaa

SEQ ID NO: 3621199 - RNA, 13 nt, Human
aaagauuucuguu

SEQ ID NO: 3621200 - RNA, 14 nt, Human
aaagauuucuugag

SEQ ID NO: 3621201 - RNA, 14 nt, Human
aaagauuuuaauca

SEQ ID NO: 3621202 - RNA, 14 nt, Human
aaagauuuucagaa

SEQ ID NO: 3621203 - RNA, 12 nt, Human
aaagcaaaaaug

SEQ ID NO: 3621204 - RNA, 16 nt, Human
aaagcaaaaaugcuaa

SEQ ID NO: 3621205 - RNA, 17 nt, Human
aaagcaaaaaugcuaau

SEQ ID NO: 3621206 - RNA, 14 nt, Human
aaagcaaaagugcu

SEQ ID NO: 3621207 - RNA, 21 nt, Human
aaagcaaacuuaagaaacacu

SEQ ID NO: 3621208 - RNA, 11 nt, Human
aaagcaaagca

SEQ ID NO: 3621209 - RNA, 14 nt, Human
aaagcaaaucauuu

SEQ ID NO: 3621210 - RNA, 14 nt, Human
aaagcaacacuuuu

SEQ ID NO: 3621211 - RNA, 14 nt, Human
aaagcaagacuguu

SEQ ID NO: 3621212 - RNA, 19 nt, Human
aaagcaagcugauuaaaug

SEQ ID NO: 3621213 - RNA, 13 nt, Human
aaagcaauaaaau

SEQ ID NO: 3621214 - RNA, 14 nt, Human
aaagcaauaauggu

SEQ ID NO: 3621215 - RNA, 14 nt, Human
aaagcaauauugua

SEQ ID NO: 3621216 - RNA, 14 nt, Human
aaagcaaugcauuu

SEQ ID NO: 3621217 - RNA, 20 nt, Human
aaagcaauuuuccuugaagc

SEQ ID NO: 3621218 - RNA, 22 nt, Human
aaagcaauuuuccuugaagccg

SEQ ID NO: 3621219 - RNA, 23 nt, Human
aaagcaauuuuccuugaagccga

SEQ ID NO: 3621220 - RNA, 13 nt, Human
aaagcacaagaag

SEQ ID NO: 3621221 - RNA, 20 nt, Human
aaagcacaguguuaaaugaa

SEQ ID NO: 3621222 - RNA, 12 nt, Human
aaagcacaucca

SEQ ID NO: 3621223 - RNA, 20 nt, Human
aaagcaccaaaauaagaaaa

SEQ ID NO: 3621224 - RNA, 21 nt, Human
aaagcaccaaaauaagaaaag

SEQ ID NO: 3621225 - RNA, 22 nt, Human
aaagcaccagcuucuccaggcu

SEQ ID NO: 3621226 - RNA, 13 nt, Human
aaagcaccugccg

SEQ ID NO: 3621227 - RNA, 18 nt, Human
aaagcacuagagaaugca

SEQ ID NO: 3621228 - RNA, 21 nt, Human
aaagcacuccucccugaugua

SEQ ID NO: 3621229 - RNA, 22 nt, Human
aaagcacugaccugucaugccc

SEQ ID NO: 3621230 - RNA, 17 nt, Human
aaagcacugacuucuaa

SEQ ID NO: 3621231 - RNA, 21 nt, Human
aaagcacugacuucuaaguaa

SEQ ID NO: 3621232 - RNA, 12 nt, Human
aaagcagaaaau

SEQ ID NO: 3621233 - RNA, 16 nt, Human
aaagcagaacagugau

SEQ ID NO: 3621234 - RNA, 20 nt, Human
aaaccgccuaguuuacuguu

SEQ ID NO: 3621235 - RNA, 21 nt, Human
aaaccgcuaaaagaaacuuuc

SEQ ID NO: 3621236 - RNA, 18 nt, Human
aaaccgcuuuggccugag

SEQ ID NO: 3621237 - RNA, 15 nt, Human
aaaccguccucuuuu

SEQ ID NO: 3621238 - RNA, 15 nt, Human
aaaccuaaaaaagau

SEQ ID NO: 3621239 - RNA, 19 nt, Human
aaaccuaaguccuuuaugu

SEQ ID NO: 3621240 - RNA, 16 nt, Human
aaaccuacauauucca

SEQ ID NO: 3621241 - RNA, 11 nt, Human
aaaccuagguc

SEQ ID NO: 3621242 - RNA, 17 nt, Human
aaaccuauccucacugc

SEQ ID NO: 3621243 - RNA, 22 nt, Human
aaaccucacccgaggcugccca

SEQ ID NO: 3621244 - RNA, 19 nt, Human
aaaccucuaacccaggucu

SEQ ID NO: 3621245 - RNA, 20 nt, Human
aaaccucuaauuuauuuugu

SEQ ID NO: 3621246 - RNA, 24 nt, Human
aaaccucuaauuuauuuugucgaa

SEQ ID NO: 3621247 - RNA, 17 nt, Human
aaaccucuacauauuua

SEQ ID NO: 3621248 - RNA, 22 nt, Human
aaaccucuccucauguucugcu

SEQ ID NO: 3621249 - RNA, 16 nt, Human
aaaccucuguucagug

SEQ ID NO: 3621250 - RNA, 16 nt, Human
aaaccugaaaaaaagu

SEQ ID NO: 3621251 - RNA, 18 nt, Human
aaaccugaccccugcuca

SEQ ID NO: 3621252 - RNA, 14 nt, Human
aaaccugcccugcc

SEQ ID NO: 3621253 - RNA, 11 nt, Human
aaaccuggaga

SEQ ID NO: 3621254 - RNA, 19 nt, Human
aaaccuggagaugguggau

SEQ ID NO: 3621255 - RNA, 15 nt, Human
aaaccuggaugucac

SEQ ID NO: 3621256 - RNA, 18 nt, Human
aaaccugggauucaggaa

SEQ ID NO: 3621257 - RNA, 18 nt, Human
aaaccugggcucugguuu

SEQ ID NO: 3621258 - RNA, 18 nt, Human
aaaccugucaaugauaca

SEQ ID NO: 3621259 - RNA, 18 nt, Human
aaaccugucuccacugug

SEQ ID NO: 3621260 - RNA, 12 nt, Human
aaaccugucuga

SEQ ID NO: 3621261 - RNA, 12 nt, Human
aaaccugugaag

SEQ ID NO: 3621262 - RNA, 21 nt, Human
aaaccuguuuaaauauuucaa

SEQ ID NO: 3621263 - RNA, 13 nt, Human
aaaccuuaauauu

SEQ ID NO: 3621264 - RNA, 15 nt, Human
aaaccuuaauauuuc

SEQ ID NO: 3621265 - RNA, 20 nt, Human
aaaccuuauuuuuucccaaa

SEQ ID NO: 3621266 - RNA, 11 nt, Human
aaaccuucaca

SEQ ID NO: 3621267 - RNA, 19 nt, Human
aaaccuuucaaauuucaca

SEQ ID NO: 3621268 - RNA, 13 nt, Human
aaaccuuugcccc

SEQ ID NO: 3621269 - RNA, 22 nt, Human
aaaccuuuuacugguugcaugg

SEQ ID NO: 3621270 - RNA, 18 nt, Human
aaaccuuuuauauuuagu

SEQ ID NO: 3621271 - RNA, 16 nt, Human
aaacgaaacugcucua

SEQ ID NO: 3621272 - RNA, 13 nt, Human
aaacgaaagcugg

SEQ ID NO: 3621273 - RNA, 21 nt, Human
aaacgacacucucuggaagcc

SEQ ID NO: 3621274 - RNA, 16 nt, Human
aaacgauuuaauucuc

SEQ ID NO: 3621275 - RNA, 18 nt, Human
aaacgauuuaauucucuu

SEQ ID NO: 3621276 - RNA, 18 nt, Human
aaacgcgcagaugugcag

SEQ ID NO: 3621277 - RNA, 21 nt, Human
aaacgcgcagaugugcagcag

SEQ ID NO: 3621278 - RNA, 24 nt, Human
aaacgcgcagaugugcagcagauu

SEQ ID NO: 3621279 - RNA, 12 nt, Human
aaacgcuaccuc

SEQ ID NO: 3621280 - RNA, 16 nt, Human
aaacgcuccuuugugu

SEQ ID NO: 3621281 - RNA, 16 nt, Human
aaacgcugccugccca

SEQ ID NO: 3621282 - RNA, 16 nt, Human
aaacgcuucaguuguu

SEQ ID NO: 3621283 - RNA, 14 nt, Human
aaacggauuauuuu

SEQ ID NO: 3621284 - RNA, 21 nt, Human
aaacggauuauuuuuucagac

SEQ ID NO: 3621285 - RNA, 13 nt, Human
aaacggcccucuu

SEQ ID NO: 3621286 - RNA, 23 nt, Human
aaacggccucacuaggcuucugg

SEQ ID NO: 3621287 - RNA, 17 nt, Human
aaacgguuaaaacuguc

SEQ ID NO: 3621288 - RNA, 19 nt, Human
aaacgguucaguuucuucu

SEQ ID NO: 3621289 - RNA, 18 nt, Human
aaacguauaauauguaca

SEQ ID NO: 3621290 - RNA, 17 nt, Human
aaacguaugcaugugaa

SEQ ID NO: 3621291 - RNA, 23 nt, Human
aaacguccucuuuaguuuuuggu

SEQ ID NO: 3621292 - RNA, 14 nt, Human
aaacgucuuaaaua

SEQ ID NO: 3621293 - RNA, 17 nt, Human
aaacguggcugcuucaa

SEQ ID NO: 3621294 - RNA, 20 nt, Human
aaacguggcugcuucaagga

SEQ ID NO: 3621295 - RNA, 16 nt, Human
aaacgugguuacauua

SEQ ID NO: 3621296 - RNA, 16 nt, Human
aaacguguauguuuuu

SEQ ID NO: 3621297 - RNA, 18 nt, Human
aaacguguauguuuuuca

SEQ ID NO: 3621298 - RNA, 20 nt, Human
aaacguguauguuuuucagu

SEQ ID NO: 3621299 - RNA, 17 nt, Human
aaacguguugccuugaa

SEQ ID NO: 3621300 - RNA, 17 nt, Human
aaacuaaagcaauagaa

SEQ ID NO: 3621301 - RNA, 18 nt, Human
aaacuaaaucucuaauau

SEQ ID NO: 3621302 - RNA, 15 nt, Human
aaacuaauaauugca

SEQ ID NO: 3621303 - RNA, 16 nt, Human
aaacuaauauuuuaug

SEQ ID NO: 3621304 - RNA, 11 nt, Human
aaacuaaucca

SEQ ID NO: 3621305 - RNA, 20 nt, Human
aaacuaaugguccacaccca

SEQ ID NO: 3621306 - RNA, 21 nt, Human
aaacuacaaccaauggaaugu

SEQ ID NO: 3621307 - RNA, 13 nt, Human
aaacuacauuuua

SEQ ID NO: 3621308 - RNA, 15 nt, Human
aaacuacauuuuaac

SEQ ID NO: 3621309 - RNA, 16 nt, Human
aaacuacauuuuaaca

SEQ ID NO: 3621310 - RNA, 22 nt, Human
aaaggauaaagaaggaugaugu

SEQ ID NO: 3621311 - RNA, 17 nt, Human
aaaggauacuuauuuaa

SEQ ID NO: 3621312 - RNA, 21 nt, Human
aaaggauaguauuuuuaucca

SEQ ID NO: 3621313 - RNA, 13 nt, Human
aaaggauauuuaa

SEQ ID NO: 3621314 - RNA, 21 nt, Human
aaaggauauuuaagaaaauac

SEQ ID NO: 3621315 - RNA, 15 nt, Human
aaaggauauuuucuu

SEQ ID NO: 3621316 - RNA, 21 nt, Human
aaaggauguaaacagugccug

SEQ ID NO: 3621317 - RNA, 12 nt, Human
aaaggaugugau

SEQ ID NO: 3621318 - RNA, 17 nt, Human
aaaggaugugauauaua

SEQ ID NO: 3621319 - RNA, 19 nt, Human
aaaggaugugauauauaag

SEQ ID NO: 3621320 - RNA, 14 nt, Human
aaaggauuucuaga

SEQ ID NO: 3621321 - RNA, 13 nt, Human
aaaggcaaggucc

SEQ ID NO: 3621322 - RNA, 20 nt, Human
aaaggcacauggaauauauu

SEQ ID NO: 3621323 - RNA, 21 nt, Human
aaaggcacauggaauauauuu

SEQ ID NO: 3621324 - RNA, 17 nt, Human
aaaggcagcuguugucu

SEQ ID NO: 3621325 - RNA, 16 nt, Human
aaaggcaguuuucuaa

SEQ ID NO: 3621326 - RNA, 21 nt, Human
aaaggcauaagacccuaagcc

SEQ ID NO: 3621327 - RNA, 15 nt, Human
aaaggcauauugcuu

SEQ ID NO: 3621328 - RNA, 15 nt, Human
aaaggcauuagaguc

SEQ ID NO: 3621329 - RNA, 13 nt, Human
aaaggccaaacug

SEQ ID NO: 3621330 - RNA, 20 nt, Human
aaaggccagaccugcagacg

SEQ ID NO: 3621331 - RNA, 14 nt, Human
aaaggccagcuggc

SEQ ID NO: 3621332 - RNA, 12 nt, Human
aaaggcccagag

SEQ ID NO: 3621333 - RNA, 14 nt, Human
aaaggcccagcccc

SEQ ID NO: 3621334 - RNA, 17 nt, Human
aaaggcccagccccuag

SEQ ID NO: 3621335 - RNA, 13 nt, Human
aaaggccucuugu

SEQ ID NO: 3621336 - RNA, 15 nt, Human
aaaggcuccaggagc

SEQ ID NO: 3621337 - RNA, 21 nt, Human
aaaggcuccaggagcagccac

SEQ ID NO: 3621338 - RNA, 19 nt, Human
aaaggcucgauuuuguauc

SEQ ID NO: 3621339 - RNA, 13 nt, Human
aaaggcuguauuc

SEQ ID NO: 3621340 - RNA, 14 nt, Human
aaaggcuguauuca

SEQ ID NO: 3621341 - RNA, 17 nt, Human
aaaggcuuauaaaacag

SEQ ID NO: 3621342 - RNA, 13 nt, Human
aaagggaaauuga

SEQ ID NO: 3621343 - RNA, 16 nt, Human
aaagggaacugaacau

SEQ ID NO: 3621344 - RNA, 14 nt, Human
aaagggaagaaacu

SEQ ID NO: 3621345 - RNA, 20 nt, Human
aaagggacugagaaauuuau

SEQ ID NO: 3621346 - RNA, 15 nt, Human
aaagggaguuuaaaa

SEQ ID NO: 3621347 - RNA, 14 nt, Human
aaagggaguuuuug

SEQ ID NO: 3621348 - RNA, 13 nt, Human
aaagggccaggag

SEQ ID NO: 3621349 - RNA, 20 nt, Human
aaagggcccagagagggugg

SEQ ID NO: 3621350 - RNA, 16 nt, Human
aaagggcucuuuagcc

SEQ ID NO: 3621351 - RNA, 22 nt, Human
aaagggcuguuauaaucuuuca

SEQ ID NO: 3621352 - RNA, 16 nt, Human
aaaggggagagccugc

SEQ ID NO: 3621353 - RNA, 13 nt, Human
aaaggggggaggg

SEQ ID NO: 3621354 - RNA, 14 nt, Human
aaaggggggagggg

SEQ ID NO: 3621355 - RNA, 20 nt, Human
aaagggggucccagugggag

SEQ ID NO: 3621356 - RNA, 21 nt, Human
aaagggggucccagugggagg

SEQ ID NO: 3621357 - RNA, 17 nt, Human
aaaggggguccguggaa

SEQ ID NO: 3621358 - RNA, 22 nt, Human
aaagggguuggggugacaguca

SEQ ID NO: 3621359 - RNA, 18 nt, Human
aaagggugcugcuucccu

SEQ ID NO: 3621360 - RNA, 14 nt, Human
aaaggguguacuua

SEQ ID NO: 3621361 - RNA, 21 nt, Human
aaagguagcuuaccugacaca

SEQ ID NO: 3621362 - RNA, 14 nt, Human
aaagguauaauuuu

SEQ ID NO: 3621363 - RNA, 12 nt, Human
aaagguauuugg

SEQ ID NO: 3621364 - RNA, 21 nt, Human
aaagguauuuuaaucaccaag

SEQ ID NO: 3621365 - RNA, 19 nt, Human
aaaggucaccucacucagc

SEQ ID NO: 3621366 - RNA, 20 nt, Human
aaagguccacaggucuagac

SEQ ID NO: 3621367 - RNA, 18 nt, Human
aaaggucccaaggcaagg

SEQ ID NO: 3621368 - RNA, 21 nt, Human
aaaggugaguuugagcugccu

SEQ ID NO: 3621369 - RNA, 13 nt, Human
aaaggugauaaaa

SEQ ID NO: 3621370 - RNA, 14 nt, Human
aaaggugauaaaau

SEQ ID NO: 3621371 - RNA, 13 nt, Human
aaagguggccaca

SEQ ID NO: 3621372 - RNA, 21 nt, Human
aaaggugguauguguguguau

SEQ ID NO: 3621373 - RNA, 13 nt, Human
aaaggugugcugu

SEQ ID NO: 3621374 - RNA, 18 nt, Human
aaagguguugucccuucu

SEQ ID NO: 3621375 - RNA, 17 nt, Human
aaagguucacuaaagca

SEQ ID NO: 3621376 - RNA, 13 nt, Human
aaagguucuaggu

SEQ ID NO: 3621377 - RNA, 21 nt, Human
aaagguucuagguuucaaaga

SEQ ID NO: 3621378 - RNA, 19 nt, Human
aaagguugcuguuucacaa

SEQ ID NO: 3621379 - RNA, 18 nt, Human
aaagguuuaaaugaacaa

SEQ ID NO: 3621380 - RNA, 13 nt, Human
aaauaugccucuc

SEQ ID NO: 3621381 - RNA, 23 nt, Human
aaauaugccucuccuuuguauau

SEQ ID NO: 3621382 - RNA, 16 nt, Human
aaauaugccuuuuuga

SEQ ID NO: 3621383 - RNA, 19 nt, Human
aaauaugcuaauuugggga

SEQ ID NO: 3621384 - RNA, 18 nt, Human
aaauauggaacuuacauu

SEQ ID NO: 3621385 - RNA, 17 nt, Human
aaauauggaacuucuaa

SEQ ID NO: 3621386 - RNA, 18 nt, Human
aaauauggaacuucuaau

SEQ ID NO: 3621387 - RNA, 20 nt, Human
aaauauggaacuucuaauau

SEQ ID NO: 3621388 - RNA, 21 nt, Human
aaauaugguacucauuaaaaa

SEQ ID NO: 3621389 - RNA, 18 nt, Human
aaauaugucccagaaaug

SEQ ID NO: 3621390 - RNA, 12 nt, Human
aaauaugugaag

SEQ ID NO: 3621391 - RNA, 15 nt, Human
aaauaugugaaggac

SEQ ID NO: 3621392 - RNA, 20 nt, Human
aaauaugugaaggaccuuca

SEQ ID NO: 3621393 - RNA, 19 nt, Human
aaauauguugaugaaaaau

SEQ ID NO: 3621394 - RNA, 20 nt, Human
aaauauguugaugaaaaaua

SEQ ID NO: 3621395 - RNA, 21 nt, Human
aaauauguuuuuuagaucaaa

SEQ ID NO: 3621396 - RNA, 23 nt, Human
aaauauguuuuuuagaucaaaua

SEQ ID NO: 3621397 - RNA, 13 nt, Human
aaauauuaaaaga

SEQ ID NO: 3621398 - RNA, 18 nt, Human
aaauauuaaaagaaaggg

SEQ ID NO: 3621399 - RNA, 13 nt, Human
aaauauuagaugu

SEQ ID NO: 3621400 - RNA, 21 nt, Human
aaauauuagaugugauuuaau

SEQ ID NO: 3621401 - RNA, 14 nt, Human
aaauauuagcaaag

SEQ ID NO: 3621402 - RNA, 18 nt, Human
aaauauuaucuuuguaau

SEQ ID NO: 3621403 - RNA, 19 nt, Human
aaauauuaugcaaauuccc

SEQ ID NO: 3621404 - RNA, 22 nt, Human
aaauauuaugcaaauucccaga

SEQ ID NO: 3621405 - RNA, 14 nt, Human
aaauauuauguguu

SEQ ID NO: 3621406 - RNA, 13 nt, Human
aaauauuauugaa

SEQ ID NO: 3621407 - RNA, 23 nt, Human
aaauauuauuguggaaaugaaua

SEQ ID NO: 3621408 - RNA, 12 nt, Human
aaauauucagaa

SEQ ID NO: 3621409 - RNA, 13 nt, Human
aaauauucagaau

SEQ ID NO: 3621410 - RNA, 16 nt, Human
aaauauucaugcuucu

SEQ ID NO: 3621411 - RNA, 18 nt, Human
aaauauucccuagaaacu

SEQ ID NO: 3621412 - RNA, 19 nt, Human
aaauauucccuagaaacuu

SEQ ID NO: 3621413 - RNA, 16 nt, Human
aaauauuccuuugcau

SEQ ID NO: 3621414 - RNA, 20 nt, Human
aaauauucuauaugaauuua

SEQ ID NO: 3621415 - RNA, 22 nt, Human
aaauauucuauuuucauuuucu

SEQ ID NO: 3621416 - RNA, 21 nt, Human
aaauauugaggcuuuguguug

SEQ ID NO: 3621417 - RNA, 20 nt, Human
aaauauugguguugucagua

SEQ ID NO: 3621418 - RNA, 17 nt, Human
aaauauuguugacaacu

SEQ ID NO: 3621419 - RNA, 21 nt, Human
aaauauuguugacaacuguga

SEQ ID NO: 3621420 - RNA, 16 nt, Human
aaauauuguuucugca

SEQ ID NO: 3621421 - RNA, 21 nt, Human
aaauauuguuucugcauucau

SEQ ID NO: 3621422 - RNA, 22 nt, Human
aaauauuuaugaagaaaauacu

SEQ ID NO: 3621423 - RNA, 15 nt, Human
aaauauuuauucauu

SEQ ID NO: 3621424 - RNA, 23 nt, Human
aaauauuuauucauuauuuguca

SEQ ID NO: 3621425 - RNA, 15 nt, Human
aaauauuuauuuauu

SEQ ID NO: 3621426 - RNA, 13 nt, Human
aaauauuuauuuu

SEQ ID NO: 3621427 - RNA, 20 nt, Human
aaauauuuauuuuaauaaug

SEQ ID NO: 3621428 - RNA, 14 nt, Human
aaauauuucaagac

SEQ ID NO: 3621429 - RNA, 14 nt, Human
aaauauuuccuuaa

SEQ ID NO: 3621430 - RNA, 20 nt, Human
aaauauuugacuugcaugaa

SEQ ID NO: 3621431 - RNA, 16 nt, Human
aaauauuuggaaaaua

SEQ ID NO: 3621432 - RNA, 12 nt, Human
aaauauuuggag

SEQ ID NO: 3621433 - RNA, 17 nt, Human
aaauauuuggucucuau

SEQ ID NO: 3621434 - RNA, 14 nt, Human
aaauauuuguacau

SEQ ID NO: 3621435 - RNA, 15 nt, Human
aaauauuuucuauuu

SEQ ID NO: 3621436 - RNA, 16 nt, Human
aaauauuuucuggguu

SEQ ID NO: 3621437 - RNA, 21 nt, Human
aaauauuuugauaauaaauug

SEQ ID NO: 3621438 - RNA, 16 nt, Human
aaauauuuugcuaguu

SEQ ID NO: 3621439 - RNA, 12 nt, Human
aaauauuuuugg

SEQ ID NO: 3621440 - RNA, 15 nt, Human
aaauauuuuuuacag

SEQ ID NO: 3621441 - RNA, 22 nt, Human
aaauauuuuuuauauauacagu

SEQ ID NO: 3621442 - RNA, 21 nt, Human
aaauauuuuuucuuuucuauu

SEQ ID NO: 3621443 - RNA, 17 nt, Human
aaauauuuuuuuguaga

SEQ ID NO: 3621444 - RNA, 15 nt, Human
aaaucaaaaucucuc

SEQ ID NO: 3621445 - RNA, 22 nt, Human
aaaucaaauaauaccuuagaag

SEQ ID NO: 3621446 - RNA, 18 nt, Human
aaaucaaauaugcaaagc

SEQ ID NO: 3621447 - RNA, 13 nt, Human
aaaucaaaugaau

SEQ ID NO: 3621448 - RNA, 22 nt, Human
aaaucaacuuuuuauugccuuc

SEQ ID NO: 3621449 - RNA, 13 nt, Human
aaaucaauaagaa

SEQ ID NO: 3621450 - RNA, 22 nt, Human
aaaucaauacacuaguuguuuc

SEQ ID NO: 3621451 - RNA, 16 nt, Human
aaaucaauaugcagaa

SEQ ID NO: 3621452 - RNA, 20 nt, Human
aaaucaaucuguaaaacuaa

SEQ ID NO: 3621453 - RNA, 23 nt, Human
aaaucaauuacugguccaaaaga

SEQ ID NO: 3621454 - RNA, 16 nt, Human
aaaucacuuccauagu

SEQ ID NO: 3621455 - RNA, 12 nt, Human
aaaucagaaguc

SEQ ID NO: 3621456 - RNA, 18 nt, Human
aaaucagaagucaucuug

SEQ ID NO: 3621457 - RNA, 14 nt, Human
aaaucagacuauga

SEQ ID NO: 3621458 - RNA, 16 nt, Human
aaaucagagacaaaau

SEQ ID NO: 3621459 - RNA, 20 nt, Human
aaaucagccaauuauguuaa

SEQ ID NO: 3621460 - RNA, 12 nt, Human
aaaucagccugc

SEQ ID NO: 3621461 - RNA, 17 nt, Human
aaaucagguauuaaucu

SEQ ID NO: 3621462 - RNA, 19 nt, Human
aaaucagguuuucuuuuaa

SEQ ID NO: 3621463 - RNA, 19 nt, Human
aaaucaguaagagguguua

SEQ ID NO: 3621464 - RNA, 14 nt, Human
aaaucagucaagcu

SEQ ID NO: 3621465 - RNA, 21 nt, Human
aaaucaguuacuaagaagaaa

SEQ ID NO: 3621466 - RNA, 23 nt, Human
aaaucauaaacugugugcagacu

SEQ ID NO: 3621467 - RNA, 11 nt, Human
aaaucaucaag

SEQ ID NO: 3621468 - RNA, 14 nt, Human
aaaucaucaagaag

SEQ ID NO: 3621469 - RNA, 19 nt, Human
aaaucaucaagaagggcug

SEQ ID NO: 3621470 - RNA, 16 nt, Human
aaaucaucuauuuuga

SEQ ID NO: 3621471 - RNA, 16 nt, Human
aaaucauguacauuuc

SEQ ID NO: 3621472 - RNA, 23 nt, Human
aaaucauguugaucauguacuuu

SEQ ID NO: 3621473 - RNA, 12 nt, Human
aaaucauguuug

SEQ ID NO: 3621474 - RNA, 21 nt, Human
aaaucauugcuuugaagcagu

SEQ ID NO: 3621475 - RNA, 12 nt, Human
aaaucauuucug

SEQ ID NO: 3621476 - RNA, 23 nt, Human
aaaucauuucugcaucagcugcu

SEQ ID NO: 3621477 - RNA, 16 nt, Human
aaaucauuuuaggaaa

SEQ ID NO: 3621478 - RNA, 20 nt, Human
aaaucauuuuauaugucaaa

SEQ ID NO: 3621479 - RNA, 17 nt, Human
aaauccacccauauguu

SEQ ID NO: 3621480 - RNA, 19 nt, Human
aaauccacccauauguuaa

SEQ ID NO: 3621481 - RNA, 23 nt, Human
aaauccagaaacuuguucuucca

SEQ ID NO: 3621482 - RNA, 15 nt, Human
aaauccagaaagaaa

SEQ ID NO: 3621483 - RNA, 21 nt, Human
aaauccaggacccugccaggc

SEQ ID NO: 3621484 - RNA, 23 nt, Human
aaauccauaucuuaaagaaacag

SEQ ID NO: 3621485 - RNA, 23 nt, Human
aaauccauuuggaaaucuuuaaa

SEQ ID NO: 3621486 - RNA, 17 nt, Human
aaaucccauuauucaaa

SEQ ID NO: 3621487 - RNA, 21 nt, Human
aaaucccauuauucaaaguug

SEQ ID NO: 3621488 - RNA, 21 nt, Human
aaaucccauucauaacuuuca

SEQ ID NO: 3621489 - RNA, 13 nt, Human
aaauccccuucuc

SEQ ID NO: 3621490 - RNA, 15 nt, Human
aaauccgaaccuccu

SEQ ID NO: 3621491 - RNA, 19 nt, Human
aaauccgaaccuccucugu

SEQ ID NO: 3621492 - RNA, 19 nt, Human
aaauccgcucucuuccugc

SEQ ID NO: 3621493 - RNA, 17 nt, Human
aaauccuaccaaccucu

SEQ ID NO: 3621494 - RNA, 21 nt, Human
aaauccuaguuuccucuccuu

SEQ ID NO: 3621495 - RNA, 14 nt, Human
aaauccucuuccuc

SEQ ID NO: 3621496 - RNA, 21 nt, Human
aaauccucuuccucugaggcu

SEQ ID NO: 3621497 - RNA, 22 nt, Human
aaauccugcaaugaaagguacu

SEQ ID NO: 3621498 - RNA, 20 nt, Human
aaauccuguugaaaagccau

SEQ ID NO: 3621499 - RNA, 19 nt, Human
aaauccuuagaucuggcau

SEQ ID NO: 3621500 - RNA, 13 nt, Human
aaauccuuccaaa

SEQ ID NO: 3621501 - RNA, 19 nt, Human
aaauccuuuuucuuuauaa

SEQ ID NO: 3621502 - RNA, 13 nt, Human
aaaucgaugcagu

SEQ ID NO: 3621503 - RNA, 23 nt, Human
aaaucggaucuggggcucuggga

SEQ ID NO: 3621504 - RNA, 15 nt, Human
aaaucuaaaucuauu

SEQ ID NO: 3621505 - RNA, 16 nt, Human
aaaucuaaaucuauuu

SEQ ID NO: 3621506 - RNA, 14 nt, Human
aaaucuaagggaaa

SEQ ID NO: 3621507 - RNA, 17 nt, Human
aaaucuaauauuaaaaa

SEQ ID NO: 3621508 - RNA, 18 nt, Human
aaaucuaauauuaaaaau

SEQ ID NO: 3621509 - RNA, 19 nt, Human
aaaucuacacuccagugag

SEQ ID NO: 3621510 - RNA, 13 nt, Human
aaaucuaccacug

SEQ ID NO: 3621511 - RNA, 16 nt, Human
aaaucuaccuucugua

SEQ ID NO: 3621512 - RNA, 18 nt, Human
aaaucuaggaaaauauuu

SEQ ID NO: 3621513 - RNA, 17 nt, Human
aaaucuaggaaaauuau

SEQ ID NO: 3621514 - RNA, 13 nt, Human
aaaucuauagaaa

SEQ ID NO: 3621515 - RNA, 21 nt, Human
aaauauuuuuuuuucuuucag

SEQ ID NO: 3621516 - RNA, 16 nt, Human
aaaucaaaacaaguga

SEQ ID NO: 3621517 - RNA, 22 nt, Human
aaaucaaaagggccaaagaacc

SEQ ID NO: 3621518 - RNA, 13 nt, Human
aaaucaaaaucuc

SEQ ID NO: 3621519 - RNA, 17 nt, Human
aaaucaaaaucucucca

SEQ ID NO: 3621520 - RNA, 15 nt, Human
aaaucaaauaugcaa

SEQ ID NO: 3621521 - RNA, 20 nt, Human
aaaucaaaugguaucuuuug

SEQ ID NO: 3621522 - RNA, 22 nt, Human
aaaucaaauguaaaguuuaauu

SEQ ID NO: 3621523 - RNA, 18 nt, Human
aaaucaacagaagcauuu

SEQ ID NO: 3621524 - RNA, 19 nt, Human
aaaugcuaaugucaaacuu

SEQ ID NO: 3621525 - RNA, 21 nt, Human
aaaugcuaaugucaaacuuga

SEQ ID NO: 3621526 - RNA, 15 nt, Human
aaaugcuagaaaaau

SEQ ID NO: 3621527 - RNA, 15 nt, Human
aaaugcuagguucua

SEQ ID NO: 3621528 - RNA, 16 nt, Human
aaaugcuaugucauuu

SEQ ID NO: 3621529 - RNA, 19 nt, Human
aaaugcuaugucauuucau

SEQ ID NO: 3621530 - RNA, 13 nt, Human
aaaugcuccccac

SEQ ID NO: 3621531 - RNA, 13 nt, Human
aaaugaaauuuaa

SEQ ID NO: 3621532 - RNA, 17 nt, Human
aaaugaaauuuaaacau

SEQ ID NO: 3621533 - RNA, 18 nt, Human
aaaugaaauuuuaccaag

SEQ ID NO: 3621534 - RNA, 18 nt, Human
aaaugaacacaaauuaug

SEQ ID NO: 3621535 - RNA, 14 nt, Human
aaaugaacaucuau

SEQ ID NO: 3621536 - RNA, 16 nt, Human
aaaugaagaauuuaaa

SEQ ID NO: 3621537 - RNA, 19 nt, Human
aaaugaagagcuguugaug

SEQ ID NO: 3621538 - RNA, 23 nt, Human
aaaugaagauuauuuuuuaugag

SEQ ID NO: 3621539 - RNA, 14 nt, Human
aaaugaaggucuuu

SEQ ID NO: 3621540 - RNA, 22 nt, Human
aaaugaagguuaggauuuaaca

SEQ ID NO: 3621541 - RNA, 21 nt, Human
aaaugaaguaacuugucuuaa

SEQ ID NO: 3621542 - RNA, 11 nt, Human
aaaugaagugc

SEQ ID NO: 3621543 - RNA, 15 nt, Human
aaaugaauaauuucc

SEQ ID NO: 3621544 - RNA, 17 nt, Human
aaaugaauaauuuccca

SEQ ID NO: 3621545 - RNA, 16 nt, Human
aaaugaauaucuauua

SEQ ID NO: 3621546 - RNA, 19 nt, Human
aaaugaauaucuauuaaua

SEQ ID NO: 3621547 - RNA, 18 nt, Human
aaaugaauauuuugauaa

SEQ ID NO: 3621548 - RNA, 19 nt, Human
aaaugaauauuuugauaau

SEQ ID NO: 3621549 - RNA, 14 nt, Human
aaaugaaugucacu

SEQ ID NO: 3621550 - RNA, 19 nt, Human
aaaugaaugucuaaaauug

SEQ ID NO: 3621551 - RNA, 15 nt, Human
aaaugaaugugugug

SEQ ID NO: 3621552 - RNA, 17 nt, Human
aaaugaauguguguggu

SEQ ID NO: 3621553 - RNA, 22 nt, Human
aaaugaaugugugugguuuuuu

SEQ ID NO: 3621554 - RNA, 11 nt, Human
aaaugaauuuu

SEQ ID NO: 3621555 - RNA, 19 nt, Human
aaaugacaaucaugugugu

SEQ ID NO: 3621556 - RNA, 23 nt, Human
aaaugacacucauauaauuauau

SEQ ID NO: 3621557 - RNA, 15 nt, Human
aaaugacagacugaa

SEQ ID NO: 3621558 - RNA, 14 nt, Human
aaaugacaucuuuu

SEQ ID NO: 3621559 - RNA, 17 nt, Human
aaaugacaugcacugac

SEQ ID NO: 3621560 - RNA, 19 nt, Human
aaaugacaugcacugaccc

SEQ ID NO: 3621561 - RNA, 19 nt, Human
aaaugacuaaaaaacaaag

SEQ ID NO: 3621562 - RNA, 20 nt, Human
aaaugacuaaaaauauuaua

SEQ ID NO: 3621563 - RNA, 21 nt, Human
aaaugacuacuuagcauccua

SEQ ID NO: 3621564 - RNA, 16 nt, Human
aaaugagaaaucuaaa

SEQ ID NO: 3621565 - RNA, 15 nt, Human
aaaugagaacauguu

SEQ ID NO: 3621566 - RNA, 18 nt, Human
aaaugagaacauguuggu

SEQ ID NO: 3621567 - RNA, 23 nt, Human
aaaugagaacauguugguauuua

SEQ ID NO: 3621568 - RNA, 21 nt, Human
aaaugagaaggcagccaccag

SEQ ID NO: 3621569 - RNA, 20 nt, Human
aaaugagacccucguggccu

SEQ ID NO: 3621570 - RNA, 20 nt, Human
aaaugagagggcaguguuuc

SEQ ID NO: 3621571 - RNA, 13 nt, Human
aaaugagccauga

SEQ ID NO: 3621572 - RNA, 17 nt, Human
aaaugaggaauguauau

SEQ ID NO: 3621573 - RNA, 16 nt, Human
aaaugaggacauguuu

SEQ ID NO: 3621574 - RNA, 20 nt, Human
aaaugaggccauggacucug

SEQ ID NO: 3621575 - RNA, 9 nt, Human
aaaugaggg

SEQ ID NO: 3621576 - RNA, 17 nt, Human
aaaugaggucagagccu

SEQ ID NO: 3621577 - RNA, 15 nt, Human
aaaugaggucuguuu

SEQ ID NO: 3621578 - RNA, 15 nt, Human
aaaugaguaacauuu

SEQ ID NO: 3621579 - RNA, 12 nt, Human
aaaugagugugu

SEQ ID NO: 3621580 - RNA, 15 nt, Human
aaaugauagauuuga

SEQ ID NO: 3621581 - RNA, 21 nt, Human
aaaugauagauuugaccuccu

SEQ ID NO: 3621582 - RNA, 21 nt, Human
aaaugauaguugauuuucaaa

SEQ ID NO: 3621583 - RNA, 18 nt, Human
aaaugauauuaaaaauug

SEQ ID NO: 3621584 - RNA, 19 nt, Human
aaaugaucugagucccagg

SEQ ID NO: 3621585 - RNA, 16 nt, Human
aaaugaucuuuucaag

SEQ ID NO: 3621586 - RNA, 19 nt, Human
aaaugaugauguggaagaa

SEQ ID NO: 3621587 - RNA, 17 nt, Human
aaaugauuacuaaggaa

SEQ ID NO: 3621588 - RNA, 15 nt, Human
aaaugauucuuagug

SEQ ID NO: 3621589 - RNA, 16 nt, Human
aaaugauugcuuuuaa

SEQ ID NO: 3621590 - RNA, 20 nt, Human
aaaugauugcuuuuaaaauu

SEQ ID NO: 3621591 - RNA, 23 nt, Human
aaaugauugcuuuuaaaauuuua

SEQ ID NO: 3621592 - RNA, 22 nt, Human
aaaugauuguaaaauagcuugu

SEQ ID NO: 3621593 - RNA, 15 nt, Human
aaaugauuucacagu

SEQ ID NO: 3621594 - RNA, 21 nt, Human
aaaugauuuuaucugugaauu

SEQ ID NO: 3621595 - RNA, 17 nt, Human
aaaugcaaaguucugug

SEQ ID NO: 3621596 - RNA, 13 nt, Human
aaaugcaaauccu

SEQ ID NO: 3621597 - RNA, 11 nt, Human
aaaugcaauau

SEQ ID NO: 3621598 - RNA, 15 nt, Human
aaaugcaauauguau

SEQ ID NO: 3621599 - RNA, 17 nt, Human
aaaugcaauauuaaugc

SEQ ID NO: 3621600 - RNA, 15 nt, Human
aaaugcaauauuugu

SEQ ID NO: 3621601 - RNA, 15 nt, Human
aaaugcacaaugucu

SEQ ID NO: 3621602 - RNA, 16 nt, Human
aaaugcacaaugucuu

SEQ ID NO: 3621603 - RNA, 17 nt, Human
aaaugcacaaugucuug

SEQ ID NO: 3621604 - RNA, 22 nt, Human
aaaugcagggauugcugccacu

SEQ ID NO: 3621605 - RNA, 19 nt, Human
aaaugcaucuuugaugugu

SEQ ID NO: 3621606 - RNA, 21 nt, Human
aaaugcaucuuugauguguug

SEQ ID NO: 3621607 - RNA, 20 nt, Human
aaaugcauuauaggaucauu

SEQ ID NO: 3621608 - RNA, 20 nt, Human
aaaugcauuguaucgauguu

SEQ ID NO: 3621609 - RNA, 14 nt, Human
aaaugcauuucuaa

SEQ ID NO: 3621610 - RNA, 17 nt, Human
aaaugccaaauuaaaaa

SEQ ID NO: 3621611 - RNA, 18 nt, Human
aaaugccaaauuaaaaaa

SEQ ID NO: 3621612 - RNA, 18 nt, Human
aaaugcccagccccuucu

SEQ ID NO: 3621613 - RNA, 13 nt, Human
aaaugcccagcuu

SEQ ID NO: 3621614 - RNA, 22 nt, Human
aaaugcccucuucucgugccuc

SEQ ID NO: 3621615 - RNA, 16 nt, Human
aaaugccucaguguau

SEQ ID NO: 3621616 - RNA, 17 nt, Human
aaaugccucaguguauu

SEQ ID NO: 3621617 - RNA, 19 nt, Human
aaaugccucaguguauuug

SEQ ID NO: 3621618 - RNA, 21 nt, Human
aaaugccucaguguauuugua

SEQ ID NO: 3621619 - RNA, 18 nt, Human
aaaugccuuacuuuguau

SEQ ID NO: 3621620 - RNA, 22 nt, Human
aaaugccuuacuuuguaugaua

SEQ ID NO: 3621621 - RNA, 17 nt, Human
aaaugccuuugagacag

SEQ ID NO: 3621622 - RNA, 18 nt, Human
aaaugccuuugagacagu

SEQ ID NO: 3621623 - RNA, 21 nt, Human
aaaugccuuuucccaaaaugu

SEQ ID NO: 3621624 - RNA, 15 nt, Human
aaaugcgguuauaaa

SEQ ID NO: 3621625 - RNA, 22 nt, Human
aaaugcgguuauaaaaaauggu

SEQ ID NO: 3621626 - RNA, 15 nt, Human
aaaugcuaauauuaa

SEQ ID NO: 3621627 - RNA, 21 nt, Human
aaaugcuaauauuaaaaguca

SEQ ID NO: 3621628 - RNA, 18 nt, Human
aaaugcuagguucuaccu

SEQ ID NO: 3621629 - RNA, 17 nt, Human
aaaugcuaugucauuuc

SEQ ID NO: 3621630 - RNA, 20 nt, Human
aaaugcuaugucauuucaug

SEQ ID NO: 3621631 - RNA, 22 nt, Human
aaaugcucucucaaauugucag

SEQ ID NO: 3621632 - RNA, 16 nt, Human
aaaugcugaaaauugc

SEQ ID NO: 3621633 - RNA, 15 nt, Human
aaaugcugaacauug

SEQ ID NO: 3621634 - RNA, 14 nt, Human
aaaugcugauuuaa

SEQ ID NO: 3621635 - RNA, 14 nt, Human
aaaugcugccugcc

SEQ ID NO: 3621636 - RNA, 17 nt, Human
aaaugcugcgcccuucc

SEQ ID NO: 3621637 - RNA, 23 nt, Human
aaaugcugcuuuuucucaaaaug

SEQ ID NO: 3621638 - RNA, 23 nt, Human
aaaugcuggcuauagaugucuuu

SEQ ID NO: 3621639 - RNA, 19 nt, Human
aaaugcuuagaaauucagc

SEQ ID NO: 3621640 - RNA, 18 nt, Human
aaaugcuucacuguacgu

SEQ ID NO: 3621641 - RNA, 14 nt, Human
aaauggaaacagag

SEQ ID NO: 3621642 - RNA, 17 nt, Human
aaauggacguguuauga

SEQ ID NO: 3621643 - RNA, 22 nt, Human
aaauggacguguuaugacucca

SEQ ID NO: 3621644 - RNA, 21 nt, Human
aaauggacuguggugacuuug

SEQ ID NO: 3621645 - RNA, 23 nt, Human
aaauggacuguggugacuuugga

SEQ ID NO: 3621646 - RNA, 17 nt, Human
aaauggagaagcugcag

SEQ ID NO: 3621647 - RNA, 23 nt, Human
aaauggaguuggaguucauucau

SEQ ID NO: 3621648 - RNA, 19 nt, Human
aaauggauauuauuagaaa

SEQ ID NO: 3621649 - RNA, 17 nt, Human
aaauggaugcaaaguac

SEQ ID NO: 3621650 - RNA, 18 nt, Human
aaauggcaacaaacugca

SEQ ID NO: 3621651 - RNA, 20 nt, Human
aaauggcaacaaacugcaca

SEQ ID NO: 3621652 - RNA, 17 nt, Human
aaauggcaaguuuucca

SEQ ID NO: 3621653 - RNA, 16 nt, Human
aaauggcagugaugaa

SEQ ID NO: 3621654 - RNA, 16 nt, Human
aaauggccauuugcuu

SEQ ID NO: 3621655 - RNA, 23 nt, Human
aaauggccauuugcuuuuucacc

SEQ ID NO: 3621656 - RNA, 15 nt, Human
aaauggccucaugug

SEQ ID NO: 3621657 - RNA, 21 nt, Human
aaauggccucauguggcugga

SEQ ID NO: 3621658 - RNA, 23 nt, Human
aaauggcuggagugauucugaau

SEQ ID NO: 3621659 - RNA, 19 nt, Human
aaauggcuuccuggcaaua

SEQ ID NO: 3621660 - RNA, 13 nt, Human
aaaugggaacauu

SEQ ID NO: 3621661 - RNA, 16 nt, Human
aaaugggacuuaacuc

SEQ ID NO: 3621662 - RNA, 13 nt, Human
aaauggggccaga

SEQ ID NO: 3621663 - RNA, 22 nt, Human
aaauggggccagauccagccug

SEQ ID NO: 3621664 - RNA, 15 nt, Human
aaaugggggugcauu

SEQ ID NO: 3621665 - RNA, 16 nt, Human
aaaugggggugcauuu

SEQ ID NO: 3621666 - RNA, 15 nt, Human
aaauggguuuuacug

SEQ ID NO: 3621667 - RNA, 18 nt, Human
aaaugguagcauuuuaaa

SEQ ID NO: 3621668 - RNA, 16 nt, Human
aacaaacaccuucuua

SEQ ID NO: 3621669 - RNA, 15 nt, Human
aacaaacauuguguu

SEQ ID NO: 3621670 - RNA, 16 nt, Human
aacaaaccagaauccc

SEQ ID NO: 3621671 - RNA, 11 nt, Human
aacaaaccauc

SEQ ID NO: 3621672 - RNA, 21 nt, Human
aacaaacccucguuucugauu

SEQ ID NO: 3621673 - RNA, 15 nt, Human
aacaaacuauuucuu

SEQ ID NO: 3621674 - RNA, 16 nt, Human
aacaaacucguuuuuu

SEQ ID NO: 3621675 - RNA, 20 nt, Human
aacaaacucguuuuuuacaa

SEQ ID NO: 3621676 - RNA, 21 nt, Human
aacaaacugcacaugauuuca

SEQ ID NO: 3621677 - RNA, 17 nt, Human
aacaaacuguguaacug

SEQ ID NO: 3621678 - RNA, 11 nt, Human
aacaaagaaac

SEQ ID NO: 3621679 - RNA, 13 nt, Human
aacaaagaaauau

SEQ ID NO: 3621680 - RNA, 13 nt, Human
aacaaagaagguu

SEQ ID NO: 3621681 - RNA, 12 nt, Human
aacaaagacaau

SEQ ID NO: 3621682 - RNA, 14 nt, Human
aacaaagaccaauu

SEQ ID NO: 3621683 - RNA, 16 nt, Human
aacaaagaccaauuuu

SEQ ID NO: 3621684 - RNA, 19 nt, Human
aacaaagaguucaagaaau

SEQ ID NO: 3621685 - RNA, 17 nt, Human
aacaaagcacaguguua

SEQ ID NO: 3621686 - RNA, 15 nt, Human
aacaaagcagccacg

SEQ ID NO: 3621687 - RNA, 22 nt, Human
aacaaagcauuugacuuucugu

SEQ ID NO: 3621688 - RNA, 18 nt, Human
aacaaagcuguuaaacug

SEQ ID NO: 3621689 - RNA, 15 nt, Human
aacaaagcuguugau

SEQ ID NO: 3621690 - RNA, 16 nt, Human
aacaaagcuuagcagg

SEQ ID NO: 3621691 - RNA, 17 nt, Human
aacaaagcuuagcagga

SEQ ID NO: 3621692 - RNA, 19 nt, Human
aacaaaggauacuuauuua

SEQ ID NO: 3621693 - RNA, 12 nt, Human
aacaaagucuuu

SEQ ID NO: 3621694 - RNA, 18 nt, Human
aacaaagugcuaaaggaa

SEQ ID NO: 3621695 - RNA, 18 nt, Human
aacaaauaauuuuuuagu

SEQ ID NO: 3621696 - RNA, 16 nt, Human
aacaaauagucuauca

SEQ ID NO: 3621697 - RNA, 13 nt, Human
aacaaauaugcaa

SEQ ID NO: 3621698 - RNA, 18 nt, Human
aacaaauccugcauuuag

SEQ ID NO: 3621699 - RNA, 14 nt, Human
aacaaaugaagaca

SEQ ID NO: 3621700 - RNA, 17 nt, Human
aacaaaugccaaauuaa

SEQ ID NO: 3621701 - RNA, 23 nt, Human
aacaaaugccaaauuaaaaaaga

SEQ ID NO: 3621702 - RNA, 19 nt, Human
aacaaauuagguuuuguac

SEQ ID NO: 3621703 - RNA, 20 nt, Human
aacaaauuauguuacaucug

SEQ ID NO: 3621704 - RNA, 18 nt, Human
aacaaauuuacagagaca

SEQ ID NO: 3621705 - RNA, 14 nt, Human
aacaacaauuggua

SEQ ID NO: 3621706 - RNA, 20 nt, Human
aacaacagucuucauuuuuu

SEQ ID NO: 3621707 - RNA, 13 nt, Human
aacaacauguaua

SEQ ID NO: 3621708 - RNA, 20 nt, Human
aacaacauguuuccagcauu

SEQ ID NO: 3621709 - RNA, 12 nt, Human
aacaacauuuug

SEQ ID NO: 3621710 - RNA, 15 nt, Human
aacaaccacaggaau

SEQ ID NO: 3621711 - RNA, 14 nt, Human
aacaaccucaacug

SEQ ID NO: 3621712 - RNA, 18 nt, Human
aacaaccucaacugccua

SEQ ID NO: 3621713 - RNA, 14 nt, Human
aacaacuacuacuu

SEQ ID NO: 3621714 - RNA, 16 nt, Human
aacaacuaggcuucag

SEQ ID NO: 3621715 - RNA, 11 nt, Human
aacaagaaaaa

SEQ ID NO: 3621716 - RNA, 18 nt, Human
aacaagaaaaauaaagaa

SEQ ID NO: 3621717 - RNA, 19 nt, Human
aacaagaaaaauaaagaaa

SEQ ID NO: 3621718 - RNA, 13 nt, Human
aacaagaagauga

SEQ ID NO: 3621719 - RNA, 19 nt, Human
aacaagaagggacugagag

SEQ ID NO: 3621720 - RNA, 15 nt, Human
aacaagaaugcauug

SEQ ID NO: 3621721 - RNA, 17 nt, Human
aacaagaaugcauugau

SEQ ID NO: 3621722 - RNA, 12 nt, Human
aacaagaauugg

SEQ ID NO: 3621723 - RNA, 19 nt, Human
aacaagagcgaaacuccgu

SEQ ID NO: 3621724 - RNA, 19 nt, Human
aacaagaucuuucaggaaa

SEQ ID NO: 3621725 - RNA, 18 nt, Human
aacaagccaagaaagaug

SEQ ID NO: 3621726 - RNA, 14 nt, Human
aacaagcccaaagc

SEQ ID NO: 3621727 - RNA, 14 nt, Human
aacaagcuaggugc

SEQ ID NO: 3621728 - RNA, 14 nt, Human
aacaaggaagucaa

SEQ ID NO: 3621729 - RNA, 20 nt, Human
aacaagggagagaccucauc

SEQ ID NO: 3621730 - RNA, 14 nt, Human
aacaagggcagugg

SEQ ID NO: 3621731 - RNA, 19 nt, Human
aacaaggggcuguuacaua

SEQ ID NO: 3621732 - RNA, 13 nt, Human
aacaccagccccu

SEQ ID NO: 3621733 - RNA, 22 nt, Human
aacaccagccccugccccagcc

SEQ ID NO: 3621734 - RNA, 19 nt, Human
aacaccauugaaggcuuaa

SEQ ID NO: 3621735 - RNA, 21 nt, Human
aacacccauuuuuccuuuugc

SEQ ID NO: 3621736 - RNA, 14 nt, Human
aacacccuuccuuc

SEQ ID NO: 3621737 - RNA, 17 nt, Human
aacaccugauguguaca

SEQ ID NO: 3621738 - RNA, 15 nt, Human
aacaccuuaauaugc

SEQ ID NO: 3621739 - RNA, 15 nt, Human
aacacgaaacuuguu

SEQ ID NO: 3621740 - RNA, 19 nt, Human
aacacgaaacuuguuauug

SEQ ID NO: 3621741 - RNA, 13 nt, Human
aacacggccacau

SEQ ID NO: 3621742 - RNA, 14 nt, Human
aacacuaaaaauaa

SEQ ID NO: 3621743 - RNA, 13 nt, Human
aacacuaaaauuu

SEQ ID NO: 3621744 - RNA, 18 nt, Human
aacacuaaauguuaaaga

SEQ ID NO: 3621745 - RNA, 19 nt, Human
aacacuaaauguuaaagau

SEQ ID NO: 3621746 - RNA, 21 nt, Human
aacacuaaauguuaaagaugu

SEQ ID NO: 3621747 - RNA, 14 nt, Human
aacacuauauggca

SEQ ID NO: 3621748 - RNA, 18 nt, Human
aacacuauauggcagugu

SEQ ID NO: 3621749 - RNA, 20 nt, Human
aacacuauauggcagugucu

SEQ ID NO: 3621750 - RNA, 16 nt, Human
aacacuauguuuauuu

SEQ ID NO: 3621751 - RNA, 16 nt, Human
aacacuauuuuaugca

SEQ ID NO: 3621752 - RNA, 19 nt, Human
aacacuauuuucagaaucu

SEQ ID NO: 3621753 - RNA, 12 nt, Human
aacacucaccau

SEQ ID NO: 3621754 - RNA, 16 nt, Human
aacacucagaagccug

SEQ ID NO: 3621755 - RNA, 12 nt, Human
aacacucagcug

SEQ ID NO: 3621756 - RNA, 11 nt, Human
aacacucugag

SEQ ID NO: 3621757 - RNA, 12 nt, Human
aacacucugaga

SEQ ID NO: 3621758 - RNA, 22 nt, Human
aacacugauuuccccuuuugca

SEQ ID NO: 3621759 - RNA, 23 nt, Human
aacacugauuuccccuuuugcau

SEQ ID NO: 3621760 - RNA, 22 nt, Human
aacacugccagcauuucccuuc

SEQ ID NO: 3621761 - RNA, 21 nt, Human
aacacugcccucgcacggccc

SEQ ID NO: 3621762 - RNA, 12 nt, Human
aacacuggcccc

SEQ ID NO: 3621763 - RNA, 15 nt, Human
aacacuggccccuag

SEQ ID NO: 3621764 - RNA, 14 nt, Human
aacacuggggcugg

SEQ ID NO: 3621765 - RNA, 17 nt, Human
aacacuggugugaccug

SEQ ID NO: 3621766 - RNA, 20 nt, Human
aacacuggugugaccugagg

SEQ ID NO: 3621767 - RNA, 16 nt, Human
aacacugguuuuaaau

SEQ ID NO: 3621768 - RNA, 22 nt, Human
aacacugugcacaucugugucu

SEQ ID NO: 3621769 - RNA, 13 nt, Human
aacacugugcccu

SEQ ID NO: 3621770 - RNA, 18 nt, Human
aacacugugcccuggugg

SEQ ID NO: 3621771 - RNA, 21 nt, Human
aacacuguguauuguuguaaa

SEQ ID NO: 3621772 - RNA, 17 nt, Human
aacacuguucucugccc

SEQ ID NO: 3621773 - RNA, 19 nt, Human
aacacuguucucugcccuc

SEQ ID NO: 3621774 - RNA, 20 nt, Human
aacacuguucucugcccucc

SEQ ID NO: 3621775 - RNA, 22 nt, Human
aacacuuaaggguuuuagaaaa

SEQ ID NO: 3621776 - RNA, 15 nt, Human
aacacuucaauaauu

SEQ ID NO: 3621777 - RNA, 11 nt, Human
aacacuuccag

SEQ ID NO: 3621778 - RNA, 17 nt, Human
aacacuucuguccugug

SEQ ID NO: 3621779 - RNA, 13 nt, Human
aacacuugaaccu

SEQ ID NO: 3621780 - RNA, 22 nt, Human
aacacuugcccaugcuauuugu

SEQ ID NO: 3621781 - RNA, 12 nt, Human
aacacuuguaau

SEQ ID NO: 3621782 - RNA, 13 nt, Human
aacacuuuuuugg

SEQ ID NO: 3621783 - RNA, 17 nt, Human
aacagaaaaaaaacaca

SEQ ID NO: 3621784 - RNA, 10 nt, Human
aacagaaaug

SEQ ID NO: 3621785 - RNA, 12 nt, Human
aacagaaaugua

SEQ ID NO: 3621786 - RNA, 15 nt, Human
aacagaaauguacag

SEQ ID NO: 3621787 - RNA, 13 nt, Human
aacagaaauuggu

SEQ ID NO: 3621788 - RNA, 18 nt, Human
aacagaaauuguauauug

SEQ ID NO: 3621789 - RNA, 12 nt, Human
aacagaacacuu

SEQ ID NO: 3621790 - RNA, 13 nt, Human
aacagaacuaaau

SEQ ID NO: 3621791 - RNA, 15 nt, Human
aacagaacuaaaugu

SEQ ID NO: 3621792 - RNA, 16 nt, Human
aacagaacuaaauguu

SEQ ID NO: 3621793 - RNA, 18 nt, Human
aacagaacuaaauguucu

SEQ ID NO: 3621794 - RNA, 13 nt, Human
aacagaagaaaau

SEQ ID NO: 3621795 - RNA, 17 nt, Human
aacagaagcauuuguau

SEQ ID NO: 3621796 - RNA, 11 nt, Human
aacagacagga

SEQ ID NO: 3621797 - RNA, 14 nt, Human
aacagacaggagaa

SEQ ID NO: 3621798 - RNA, 11 nt, Human
aacagacauug

SEQ ID NO: 3621799 - RNA, 12 nt, Human
aacagacauugu

SEQ ID NO: 3621800 - RNA, 22 nt, Human
aacagacauuguuuugccaaca

SEQ ID NO: 3621801 - RNA, 18 nt, Human
aacagaccuaaugcuccu

SEQ ID NO: 3621802 - RNA, 18 nt, Human
aacagacuggccugagga

SEQ ID NO: 3621803 - RNA, 16 nt, Human
aacagagaaggcagga

SEQ ID NO: 3621804 - RNA, 20 nt, Human
aacagaggaagaauuuguua

SEQ ID NO: 3621805 - RNA, 12 nt, Human
aacagaggauau

SEQ ID NO: 3621806 - RNA, 16 nt, Human
aacagaguaaucuugu

SEQ ID NO: 3621807 - RNA, 20 nt, Human
aacagauaguuguguuuuua

SEQ ID NO: 3621808 - RNA, 16 nt, Human
aacagaucaauuugua

SEQ ID NO: 3621809 - RNA, 20 nt, Human
aacagaugaaaagccucugu

SEQ ID NO: 3621810 - RNA, 16 nt, Human
aacagaugaauaaacu

SEQ ID NO: 3621811 - RNA, 19 nt, Human
aacagaugaccccugccca

SEQ ID NO: 3621812 - RNA, 14 nt, Human
aacagaugcucuga

SEQ ID NO: 3621813 - RNA, 16 nt, Human
aacagauucacacugu

SEQ ID NO: 3621814 - RNA, 17 nt, Human
aacagauucuuuuaugu

SEQ ID NO: 3621815 - RNA, 17 nt, Human
aacagauuggauuuuau

SEQ ID NO: 3621816 - RNA, 14 nt, Human
aacauaacaaauaa

SEQ ID NO: 3621817 - RNA, 20 nt, Human
aacauaacccacuugucacu

SEQ ID NO: 3621818 - RNA, 13 nt, Human
aacauaagcuauu

SEQ ID NO: 3621819 - RNA, 15 nt, Human
aacauaagcuauuuu

SEQ ID NO: 3621820 - RNA, 12 nt, Human
aacauaaugaaa

SEQ ID NO: 3621821 - RNA, 12 nt, Human
aacauaauuaaa

SEQ ID NO: 3621822 - RNA, 15 nt, Human
aacauaauucuuauu

SEQ ID NO: 3621823 - RNA, 18 nt, Human
aacauaauucuuguauau

SEQ ID NO: 3621824 - RNA, 15 nt, Human
aacauacaaaugcau

SEQ ID NO: 3621825 - RNA, 21 nt, Human
aacauacaaaugcaucuuuga

SEQ ID NO: 3621826 - RNA, 16 nt, Human
aacauacauuuuguac

SEQ ID NO: 3621827 - RNA, 21 nt, Human
aacauaccccuuacaaaugaa

SEQ ID NO: 3621828 - RNA, 14 nt, Human
aacauacucccauc

SEQ ID NO: 3621829 - RNA, 23 nt, Human
aacauagaaauggaaauuuugcu

SEQ ID NO: 3621830 - RNA, 22 nt, Human
aacauagaauugcaaucuauaa

SEQ ID NO: 3621831 - RNA, 15 nt, Human
aacauagacagaaga

SEQ ID NO: 3621832 - RNA, 16 nt, Human
aacauagacagaagaa

SEQ ID NO: 3621833 - RNA, 21 nt, Human
aacauagacagaagaaacaag

SEQ ID NO: 3621834 - RNA, 17 nt, Human
aacauagccaaaaugug

SEQ ID NO: 3621835 - RNA, 17 nt, Human
aacauauaaaauaaugc

SEQ ID NO: 3621836 - RNA, 13 nt, Human
aacauauaauguu

SEQ ID NO: 3621837 - RNA, 21 nt, Human
aacauauaauguuguuauuua

SEQ ID NO: 3621838 - RNA, 12 nt, Human
aacauauauaac

SEQ ID NO: 3621839 - RNA, 12 nt, Human
aacauauaugga

SEQ ID NO: 3621840 - RNA, 17 nt, Human
aacauaugaaaauacaa

SEQ ID NO: 3621841 - RNA, 14 nt, Human
aacauaugauuuca

SEQ ID NO: 3621842 - RNA, 21 nt, Human
aacauaugauuucacuagaaa

SEQ ID NO: 3621843 - RNA, 21 nt, Human
aacauauguacauaaauugca

SEQ ID NO: 3621844 - RNA, 22 nt, Human
aacauauuuguuaaauauuuac

SEQ ID NO: 3621845 - RNA, 13 nt, Human
aacaucaauguuc

SEQ ID NO: 3621846 - RNA, 14 nt, Human
aacaucaauguuca

SEQ ID NO: 3621847 - RNA, 18 nt, Human
aacaucacaccugcccua

SEQ ID NO: 3621848 - RNA, 21 nt, Human
aacaucagguuaggcaguaua

SEQ ID NO: 3621849 - RNA, 18 nt, Human
aacaucaguuacucugaa

SEQ ID NO: 3621850 - RNA, 21 nt, Human
aacaucaucaaggcacugccu

SEQ ID NO: 3621851 - RNA, 14 nt, Human
aacaucauuccuuu

SEQ ID NO: 3621852 - RNA, 21 nt, Human
aacaucauuccuuuuuauuua

SEQ ID NO: 3621853 - RNA, 17 nt, Human
aacaucauuuuguuuuc

SEQ ID NO: 3621854 - RNA, 17 nt, Human
aacauccaaccuuccca

SEQ ID NO: 3621855 - RNA, 15 nt, Human
aacauccaauaggaa

SEQ ID NO: 3621856 - RNA, 15 nt, Human
aacauccaauauuuu

SEQ ID NO: 3621857 - RNA, 18 nt, Human
aacaucccauugcccugg

SEQ ID NO: 3621858 - RNA, 17 nt, Human
aacaucccuuuuucaau

SEQ ID NO: 3621859 - RNA, 15 nt, Human
aacauccuuccuucc

SEQ ID NO: 3621860 - RNA, 18 nt, Human
aacaucuacaaaacauua

SEQ ID NO: 3621861 - RNA, 14 nt, Human
aacaucuauucucu

SEQ ID NO: 3621862 - RNA, 21 nt, Human
aacaucugagaaaagcuuuga

SEQ ID NO: 3621863 - RNA, 15 nt, Human
aacaucuucaacaug

SEQ ID NO: 3621864 - RNA, 21 nt, Human
aacaucuugaauacucugccc

SEQ ID NO: 3621865 - RNA, 18 nt, Human
aacaucuuuccaguccuu

SEQ ID NO: 3621866 - RNA, 22 nt, Human
aacaucuuugaaauuauguaaa

SEQ ID NO: 3621867 - RNA, 12 nt, Human
aacaugaaauga

SEQ ID NO: 3621868 - RNA, 14 nt, Human
aacaugaagaccuu

SEQ ID NO: 3621869 - RNA, 18 nt, Human
aacaugaagaccuuuuuc

SEQ ID NO: 3621870 - RNA, 21 nt, Human
aacaugaagucguugugaggg

SEQ ID NO: 3621871 - RNA, 23 nt, Human
aacaugaaguguguuuccuucag

SEQ ID NO: 3621872 - RNA, 20 nt, Human
aacaugacccuaaaucuuga

SEQ ID NO: 3621873 - RNA, 20 nt, Human
aacaugacuccauagaccuu

SEQ ID NO: 3621874 - RNA, 17 nt, Human
aacaugagguucucucu

SEQ ID NO: 3621875 - RNA, 13 nt, Human
aacaugauuuggg

SEQ ID NO: 3621876 - RNA, 14 nt, Human
aacaugcacugaug

SEQ ID NO: 3621877 - RNA, 20 nt, Human
aacaugcagaacaaaugaag

SEQ ID NO: 3621878 - RNA, 15 nt, Human
aacaugcaguuugaa

SEQ ID NO: 3621879 - RNA, 22 nt, Human
aacaugcaguuugaaauucuga

SEQ ID NO: 3621880 - RNA, 22 nt, Human
aacaugcccccugcagacacgu

SEQ ID NO: 3621881 - RNA, 22 nt, Human
aacaugcuacacacugcauguu

SEQ ID NO: 3621882 - RNA, 19 nt, Human
aacaugcuguacauacuuu

SEQ ID NO: 3621883 - RNA, 20 nt, Human
aacaugcuguacauacuuuu

SEQ ID NO: 3621884 - RNA, 19 nt, Human
aacaugcuguuauuuaggu

SEQ ID NO: 3621885 - RNA, 19 nt, Human
aacauggacuuguauauuu

SEQ ID NO: 3621886 - RNA, 23 nt, Human
aacauggacuuguauauuuguac

SEQ ID NO: 3621887 - RNA, 20 nt, Human
aacauggagaaacccugucu

SEQ ID NO: 3621888 - RNA, 22 nt, Human
aacauggccuuugcuugaaaga

SEQ ID NO: 3621889 - RNA, 21 nt, Human
aacaugggcucuucacuagug

SEQ ID NO: 3621890 - RNA, 23 nt, Human
aacaugggguuggcugggcccag

SEQ ID NO: 3621891 - RNA, 22 nt, Human
aacaugguaaacgcugucccua

SEQ ID NO: 3621892 - RNA, 23 nt, Human
aacaugguuaccaugucuuucuc

SEQ ID NO: 3621893 - RNA, 20 nt, Human
aacaugguuuugaaaugcuu

SEQ ID NO: 3621894 - RNA, 19 nt, Human
aacauguaauauaaagaug

SEQ ID NO: 3621895 - RNA, 12 nt, Human
aacauguauuua

SEQ ID NO: 3621896 - RNA, 20 nt, Human
aacauguccugccuauuauc

SEQ ID NO: 3621897 - RNA, 13 nt, Human
aacaugucuccua

SEQ ID NO: 3621898 - RNA, 16 nt, Human
aacauguggcuccucc

SEQ ID NO: 3621899 - RNA, 19 nt, Human
aacagaaauuguauauugu

SEQ ID NO: 3621900 - RNA, 21 nt, Human
aacagaaauuguauauuguaa

SEQ ID NO: 3621901 - RNA, 13 nt, Human
aacagaacacuua

SEQ ID NO: 3621902 - RNA, 14 nt, Human
aacagaacagcuuc

SEQ ID NO: 3621903 - RNA, 14 nt, Human
aacagaacuaaaug

SEQ ID NO: 3621904 - RNA, 17 nt, Human
aacagaacuaaauguuc

SEQ ID NO: 3621905 - RNA, 23 nt, Human
aacagaacucgguguccccacca

SEQ ID NO: 3621906 - RNA, 15 nt, Human
aacagaacuuuuccu

SEQ ID NO: 3621907 - RNA, 20 nt, Human
aacagaagaaaauagaauug

SEQ ID NO: 3621908 - RNA, 21 nt, Human
aacagaagcauuuguauuuug

SEQ ID NO: 3621909 - RNA, 16 nt, Human
aacagaagcuuccauu

SEQ ID NO: 3621910 - RNA, 17 nt, Human
aacagaaugaaaaauga

SEQ ID NO: 3621911 - RNA, 14 nt, Human
aacagaauguuuua

SEQ ID NO: 3621912 - RNA, 18 nt, Human
aacagacaaaaacagccu

SEQ ID NO: 3621913 - RNA, 17 nt, Human
aacagacaagugacugu

SEQ ID NO: 3621914 - RNA, 19 nt, Human
aacagacaccaucuuuugu

SEQ ID NO: 3621915 - RNA, 15 nt, Human
aacagacaggagaaa

SEQ ID NO: 3621916 - RNA, 13 nt, Human
aacagacucaggu

SEQ ID NO: 3621917 - RNA, 19 nt, Human
aacagacucgauucauauu

SEQ ID NO: 3621918 - RNA, 23 nt, Human
aacagacuggccugaggagcagc

SEQ ID NO: 3621919 - RNA, 15 nt, Human
aacagagaaggcagg

SEQ ID NO: 3621920 - RNA, 19 nt, Human
aacagagacugaauagaua

SEQ ID NO: 3621921 - RNA, 13 nt, Human
aacagaggaccag

SEQ ID NO: 3621922 - RNA, 21 nt, Human
aacagaggccauggcagaaua

SEQ ID NO: 3621923 - RNA, 13 nt, Human
aacagauaaucag

SEQ ID NO: 3621924 - RNA, 21 nt, Human
aacagaucuggaaccucagcc

SEQ ID NO: 3621925 - RNA, 14 nt, Human
aacagaucuuuuac

SEQ ID NO: 3621926 - RNA, 17 nt, Human
aacagaugcucugagag

SEQ ID NO: 3621927 - RNA, 14 nt, Human
aacagaugcuuuuc

SEQ ID NO: 3621928 - RNA, 24 nt, Human
aacagauguuucuuuuguauguaa

SEQ ID NO: 3621929 - RNA, 17 nt, Human
aacagauuauuuuggaa

SEQ ID NO: 3621930 - RNA, 20 nt, Human
aacagauuauuuuggaaagu

SEQ ID NO: 3621931 - RNA, 15 nt, Human
aacagauucacacug

SEQ ID NO: 3621932 - RNA, 18 nt, Human
aacagauucacacugucu

SEQ ID NO: 3621933 - RNA, 16 nt, Human
aacagauuguuugcaa

SEQ ID NO: 3621934 - RNA, 13 nt, Human
aacagauuuggaa

SEQ ID NO: 3621935 - RNA, 18 nt, Human
aacagauuuggugaauuu

SEQ ID NO: 3621936 - RNA, 22 nt, Human
aacagauuuggugaauuugaau

SEQ ID NO: 3621937 - RNA, 15 nt, Human
aacagcaaaccaaga

SEQ ID NO: 3621938 - RNA, 20 nt, Human
aacagcaaaugcaaaaacuc

SEQ ID NO: 3621939 - RNA, 17 nt, Human
aacagcaacacaaagcu

SEQ ID NO: 3621940 - RNA, 22 nt, Human
aacagcaacacaaagcuuuugc

SEQ ID NO: 3621941 - RNA, 20 nt, Human
aacagcaccaaaucaaaauc

SEQ ID NO: 3621942 - RNA, 21 nt, Human
aacagcacuggcucucuccag

SEQ ID NO: 3621943 - RNA, 19 nt, Human
aacagcagacucagcucug

SEQ ID NO: 3621944 - RNA, 17 nt, Human
aacagcaggcccaccua

SEQ ID NO: 3621945 - RNA, 21 nt, Human
aacagcaggguagucugguuu

SEQ ID NO: 3621946 - RNA, 11 nt, Human
aacagcagugu

SEQ ID NO: 3621947 - RNA, 18 nt, Human
aacagcaguuucagguag

SEQ ID NO: 3621948 - RNA, 22 nt, Human
aacagcauguacggauuuucag

SEQ ID NO: 3621949 - RNA, 16 nt, Human
aacagccaacaggugg

SEQ ID NO: 3621950 - RNA, 15 nt, Human
aacagccacuccccu

SEQ ID NO: 3621951 - RNA, 18 nt, Human
aacagccacuccccucca

SEQ ID NO: 3621952 - RNA, 12 nt, Human
aacagccagcaa

SEQ ID NO: 3621953 - RNA, 17 nt, Human
aacagcccuccucugca

SEQ ID NO: 3621954 - RNA, 20 nt, Human
aacagccgcuccugucugcc

SEQ ID NO: 3621955 - RNA, 13 nt, Human
aacagccucacuu

SEQ ID NO: 3621956 - RNA, 20 nt, Human
aacagcggcuggacuuggag

SEQ ID NO: 3621957 - RNA, 23 nt, Human
aacagcguuccuagagaagacag

SEQ ID NO: 3621958 - RNA, 13 nt, Human
aacagcuacaaca

SEQ ID NO: 3621959 - RNA, 19 nt, Human
aacagcuacaacagccuca

SEQ ID NO: 3621960 - RNA, 22 nt, Human
aacauuuauuugaguggaguua

SEQ ID NO: 3621961 - RNA, 23 nt, Human
aacauuuauuuuuuuuaaagaaa

SEQ ID NO: 3621962 - RNA, 22 nt, Human
aacauuucuaacucugauguaa

SEQ ID NO: 3621963 - RNA, 15 nt, Human
aacauuucuguaaau

SEQ ID NO: 3621964 - RNA, 13 nt, Human
aacauuugccuug

SEQ ID NO: 3621965 - RNA, 17 nt, Human
aacauuugccuugcaga

SEQ ID NO: 3621966 - RNA, 18 nt, Human
aacauuugccuugcagaa

SEQ ID NO: 3621967 - RNA, 20 nt, Human
aacauuugccuugcagaacu

SEQ ID NO: 3621968 - RNA, 16 nt, Human
aacauuugcugucagc

SEQ ID NO: 3621969 - RNA, 19 nt, Human
aacauuuggguuacuauuu

SEQ ID NO: 3621970 - RNA, 12 nt, Human
aacauuugugau

SEQ ID NO: 3621971 - RNA, 22 nt, Human
aacauuuguucuauagcuuuuc

SEQ ID NO: 3621972 - RNA, 20 nt, Human
aacauuuuaaauaaaagaaa

SEQ ID NO: 3621973 - RNA, 18 nt, Human
aacauuuuaaauggacag

SEQ ID NO: 3621974 - RNA, 23 nt, Human
aacauuuuagcucuauugauacu

SEQ ID NO: 3621975 - RNA, 12 nt, Human
aacauuuucugg

SEQ ID NO: 3621976 - RNA, 18 nt, Human
aacauuuuguucuuacac

SEQ ID NO: 3621977 - RNA, 20 nt, Human
aacauuuuguucuuacacau

SEQ ID NO: 3621978 - RNA, 15 nt, Human
aacauuuuucaacaa

SEQ ID NO: 3621979 - RNA, 22 nt, Human
aacauuuuucaacaaauaucuu

SEQ ID NO: 3621980 - RNA, 19 nt, Human
aacauuuuuuuuuuaaauc

SEQ ID NO: 3621981 - RNA, 22 nt, Human
aaccaaaaguuauuaaaauugu

SEQ ID NO: 3621982 - RNA, 11 nt, Human
aaccaaaauga

SEQ ID NO: 3621983 - RNA, 17 nt, Human
aaccaaaaugacaucuu

SEQ ID NO: 3621984 - RNA, 22 nt, Human
aaccaaaaugacaucuuuuuaa

SEQ ID NO: 3621985 - RNA, 13 nt, Human
aaccaaagaagaa

SEQ ID NO: 3621986 - RNA, 16 nt, Human
aaccaaagaagaaagu

SEQ ID NO: 3621987 - RNA, 23 nt, Human
aaccaaagagacuggagcaucug

SEQ ID NO: 3621988 - RNA, 19 nt, Human
aaccaaagcgaauuuuaaa

SEQ ID NO: 3621989 - RNA, 16 nt, Human
aaccaaaggaaaaugu

SEQ ID NO: 3621990 - RNA, 23 nt, Human
aaccaaaguaaccuuuugcaccu

SEQ ID NO: 3621991 - RNA, 18 nt, Human
aaccaaaugcaaugugaa

SEQ ID NO: 3621992 - RNA, 15 nt, Human
aaccaaaugcaucaa

SEQ ID NO: 3621993 - RNA, 17 nt, Human
aaccaaaugcaucaauc

SEQ ID NO: 3621994 - RNA, 18 nt, Human
aaccaaaugcaucaaucc

SEQ ID NO: 3621995 - RNA, 23 nt, Human
aaccaaaugcaucaauccugugu

SEQ ID NO: 3621996 - RNA, 15 nt, Human
aaccaaauguuuauu

SEQ ID NO: 3621997 - RNA, 21 nt, Human
aaccaaauguuuauuuucuac

SEQ ID NO: 3621998 - RNA, 17 nt, Human
aaccaacaccaucacag

SEQ ID NO: 3621999 - RNA, 22 nt, Human
aaccaacaccaucacagcuugu

SEQ ID NO: 3622000 - RNA, 21 nt, Human
aaccaacuugguucugcuuca

SEQ ID NO: 3622001 - RNA, 16 nt, Human
aaccaagagauugcua

SEQ ID NO: 3622002 - RNA, 22 nt, Human
aaccaagagauugcuaauugcu

SEQ ID NO: 3622003 - RNA, 17 nt, Human
aaccaagaggcugguuu

SEQ ID NO: 3622004 - RNA, 21 nt, Human
aaccaagucggaacagcagau

SEQ ID NO: 3622005 - RNA, 15 nt, Human
aaccaaucaagauaa

SEQ ID NO: 3622006 - RNA, 19 nt, Human
aaccaaucaagauaaagga

SEQ ID NO: 3622007 - RNA, 19 nt, Human
aaccaauccuaugcauggu

SEQ ID NO: 3622008 - RNA, 20 nt, Human
aaccaauccuaugcaugguu

SEQ ID NO: 3622009 - RNA, 15 nt, Human
aaccaaugaacgaag

SEQ ID NO: 3622010 - RNA, 14 nt, Human
aaccaauuauuuuc

SEQ ID NO: 3622011 - RNA, 16 nt, Human
aaccaauuccucaucc

SEQ ID NO: 3622012 - RNA, 17 nt, Human
aaccaauuccucauccu

SEQ ID NO: 3622013 - RNA, 22 nt, Human
aaccaauuccucauccucagau

SEQ ID NO: 3622014 - RNA, 18 nt, Human
aaccaauuuucaaaguuc

SEQ ID NO: 3622015 - RNA, 20 nt, Human
aaccaauuuuuuguucuuca

SEQ ID NO: 3622016 - RNA, 11 nt, Human
aaccacaaagg

SEQ ID NO: 3622017 - RNA, 16 nt, Human
aaccacaacugacaca

SEQ ID NO: 3622018 - RNA, 15 nt, Human
aaccacacaaagaca

SEQ ID NO: 3622019 - RNA, 15 nt, Human
aaccacacaccucac

SEQ ID NO: 3622020 - RNA, 18 nt, Human
aaccacagcuccuuuucc

SEQ ID NO: 3622021 - RNA, 18 nt, Human
aaccacaguguaccauua

SEQ ID NO: 3622022 - RNA, 23 nt, Human
aaccacaguguaccauuaaaaua

SEQ ID NO: 3622023 - RNA, 18 nt, Human
aaccacaucuugcucugc

SEQ ID NO: 3622024 - RNA, 14 nt, Human
aaccacauugaaga

SEQ ID NO: 3622025 - RNA, 16 nt, Human
aaccacauugaagaau

SEQ ID NO: 3622026 - RNA, 22 nt, Human
aaccacauugaagaauguuaga

SEQ ID NO: 3622027 - RNA, 17 nt, Human
aaccaccagaagcccag

SEQ ID NO: 3622028 - RNA, 19 nt, Human
aaccaccagaagcccagaa

SEQ ID NO: 3622029 - RNA, 16 nt, Human
aaccaccccaucugca

SEQ ID NO: 3622030 - RNA, 15 nt, Human
aaccaccgcucccca

SEQ ID NO: 3622031 - RNA, 16 nt, Human
aaccaccgcuccccag

SEQ ID NO: 3622032 - RNA, 18 nt, Human
aaccaccgcuccccagcc

SEQ ID NO: 3622033 - RNA, 15 nt, Human
aaccacugaaaaaau

SEQ ID NO: 3622034 - RNA, 20 nt, Human
aaccacugaaaaaauauaug

SEQ ID NO: 3622035 - RNA, 14 nt, Human
aaccacugcaacgg

SEQ ID NO: 3622036 - RNA, 16 nt, Human
aaccacugcaaguccu

SEQ ID NO: 3622037 - RNA, 23 nt, Human
aaccacugcaaguccuuuuguaa

SEQ ID NO: 3622038 - RNA, 19 nt, Human
aaccacugcaauaucuucg

SEQ ID NO: 3622039 - RNA, 13 nt, Human
aaccacugcuucc

SEQ ID NO: 3622040 - RNA, 20 nt, Human
aaccacugcuuccauuuaau

SEQ ID NO: 3622041 - RNA, 22 nt, Human
aaccacuggaaaguuuaugguu

SEQ ID NO: 3622042 - RNA, 15 nt, Human
aaccacuguaaaaug

SEQ ID NO: 3622043 - RNA, 15 nt, Human
aaccacuucagcuga

SEQ ID NO: 3622044 - RNA, 14 nt, Human
aaccacuucauucu

SEQ ID NO: 3622045 - RNA, 21 nt, Human
aaccacuucccucaucucucc

SEQ ID NO: 3622046 - RNA, 20 nt, Human
aaccacuuguagauuugauu

SEQ ID NO: 3622047 - RNA, 13 nt, Human
aaccacuuuccuu

SEQ ID NO: 3622048 - RNA, 21 nt, Human
aaccacuuucuuauuuuuuuc

SEQ ID NO: 3622049 - RNA, 22 nt, Human
aaccacuuucuuauuuuuuucu

SEQ ID NO: 3622050 - RNA, 16 nt, Human
aaccagaaucccucua

SEQ ID NO: 3622051 - RNA, 12 nt, Human
aaccagacacaa

SEQ ID NO: 3622052 - RNA, 19 nt, Human
aaccagagcaagcuuuuuu

SEQ ID NO: 3622053 - RNA, 18 nt, Human
aaccagagcacuguauac

SEQ ID NO: 3622054 - RNA, 15 nt, Human
aaccagagugcugaa

SEQ ID NO: 3622055 - RNA, 12 nt, Human
aaccagaucauu

SEQ ID NO: 3622056 - RNA, 20 nt, Human
aaccagcuggucugggugua

SEQ ID NO: 3622057 - RNA, 16 nt, Human
aaccagcuuccuucag

SEQ ID NO: 3622058 - RNA, 19 nt, Human
aaccagcuuccuucagaga

SEQ ID NO: 3622059 - RNA, 18 nt, Human
aacauaaauaaaaugacc

SEQ ID NO: 3622060 - RNA, 21 nt, Human
aacauaaccauuacagggagc

SEQ ID NO: 3622061 - RNA, 17 nt, Human
aacauaacccacuuguc

SEQ ID NO: 3622062 - RNA, 22 nt, Human
aacauaagcuauuuuucuaacu

SEQ ID NO: 3622063 - RNA, 20 nt, Human
aacauaaucuucugccuucu

SEQ ID NO: 3622064 - RNA, 22 nt, Human
aacauaaucuucugccuucuca

SEQ ID NO: 3622065 - RNA, 20 nt, Human
aacauacaaaugcaucuuug

SEQ ID NO: 3622066 - RNA, 15 nt, Human
aacauaccaacaugu

SEQ ID NO: 3622067 - RNA, 17 nt, Human
aacauaccuaagaagua

SEQ ID NO: 3622068 - RNA, 16 nt, Human
aacauacucccaucug

SEQ ID NO: 3622069 - RNA, 18 nt, Human
aacauacucccaucugug

SEQ ID NO: 3622070 - RNA, 17 nt, Human
aacauacuggcugguga

SEQ ID NO: 3622071 - RNA, 15 nt, Human
aacauacuuauaugu

SEQ ID NO: 3622072 - RNA, 13 nt, Human
aacauagaaaaau

SEQ ID NO: 3622073 - RNA, 22 nt, Human
aacauagaaauugccugacgaa

SEQ ID NO: 3622074 - RNA, 21 nt, Human
aacauagaauugcaaucuaua

SEQ ID NO: 3622075 - RNA, 15 nt, Human
aacauagcugugauu

SEQ ID NO: 3622076 - RNA, 15 nt, Human
aacauauaaagcacu

SEQ ID NO: 3622077 - RNA, 14 nt, Human
aacauauaauauau

SEQ ID NO: 3622078 - RNA, 21 nt, Human
aacauauaauauauguuuuaa

SEQ ID NO: 3622079 - RNA, 15 nt, Human
aacauauauauacua

SEQ ID NO: 3622080 - RNA, 23 nt, Human
aacauauucuguaugaacuuuau

SEQ ID NO: 3622081 - RNA, 13 nt, Human
aacauauuuguua

SEQ ID NO: 3622082 - RNA, 18 nt, Human
aacaucaauguucauugu

SEQ ID NO: 3622083 - RNA, 19 nt, Human
aacaucaauguucauugua

SEQ ID NO: 3622084 - RNA, 18 nt, Human
aacaucacuauccaugca

SEQ ID NO: 3622085 - RNA, 22 nt, Human
aacaucagguuaggcaguauaa

SEQ ID NO: 3622086 - RNA, 19 nt, Human
aacaucaguuacucugaag

SEQ ID NO: 3622087 - RNA, 14 nt, Human
aacaucaucaaggc

SEQ ID NO: 3622088 - RNA, 22 nt, Human
aacaucaucaaggcacugccug

SEQ ID NO: 3622089 - RNA, 22 nt, Human
aacaucaugaauuuauugcaca

SEQ ID NO: 3622090 - RNA, 18 nt, Human
aacaucauuuuguuuucc

SEQ ID NO: 3622091 - RNA, 19 nt, Human
aacauccaaggagaaacag

SEQ ID NO: 3622092 - RNA, 13 nt, Human
aacauccacucuc

SEQ ID NO: 3622093 - RNA, 16 nt, Human
aacauccacucucucu

SEQ ID NO: 3622094 - RNA, 22 nt, Human
aacaucccaagauuuuuucauu

SEQ ID NO: 3622095 - RNA, 19 nt, Human
aacaucccauugcccuggu

SEQ ID NO: 3622096 - RNA, 15 nt, Human
aacauccuacaagac

SEQ ID NO: 3622097 - RNA, 22 nt, Human
aacauccuaucaacaacaaggu

SEQ ID NO: 3622098 - RNA, 22 nt, Human
aacauccuuugcagggcagccc

SEQ ID NO: 3622099 - RNA, 23 nt, Human
aacaucucaauaaagugcuuuaa

SEQ ID NO: 3622100 - RNA, 18 nt, Human
aacaucucaucaugucua

SEQ ID NO: 3622101 - RNA, 18 nt, Human
aacaucuuuaaggggagg

SEQ ID NO: 3622102 - RNA, 18 nt, Human
aacaucuuuauugaaauu

SEQ ID NO: 3622103 - RNA, 18 nt, Human
aacugagcuccucugggc

SEQ ID NO: 3622104 - RNA, 18 nt, Human
aacugaggaauuucaccu

SEQ ID NO: 3622105 - RNA, 16 nt, Human
aacugauaguuacugu

SEQ ID NO: 3622106 - RNA, 14 nt, Human
aacugaucauguuu

SEQ ID NO: 3622107 - RNA, 23 nt, Human
aacugaucauguuuaugagaaac

SEQ ID NO: 3622108 - RNA, 15 nt, Human
aacugaugugaaacu

SEQ ID NO: 3622109 - RNA, 17 nt, Human
aacugauucacaucuca

SEQ ID NO: 3622110 - RNA, 13 nt, Human
aacugauucauaa

SEQ ID NO: 3622111 - RNA, 19 nt, Human
aacugauuuuuuuuuccuu

SEQ ID NO: 3622112 - RNA, 21 nt, Human
aacugauuuuuuuuuccuuca

SEQ ID NO: 3622113 - RNA, 13 nt, Human
aacuaucuugugu

SEQ ID NO: 3622114 - RNA, 15 nt, Human
aacuaugaaaccuuu

SEQ ID NO: 3622115 - RNA, 21 nt, Human
aacuaugauuuggaaaauaaa

SEQ ID NO: 3622116 - RNA, 23 nt, Human
aacuaugcauggugccccaggac

SEQ ID NO: 3622117 - RNA, 18 nt, Human
aacuauggaucagaauag

SEQ ID NO: 3622118 - RNA, 12 nt, Human
aacuauguacaa

SEQ ID NO: 3622119 - RNA, 15 nt, Human
aacuauguacaauau

SEQ ID NO: 3622120 - RNA, 22 nt, Human
aacuauguacaauauuuuaagc

SEQ ID NO: 3622121 - RNA, 19 nt, Human
aacuauguguuuuucucau

SEQ ID NO: 3622122 - RNA, 21 nt, Human
aacuauuaaggauguagcuuu

SEQ ID NO: 3622123 - RNA, 23 nt, Human
aacuauucaggagaguagaacag

SEQ ID NO: 3622124 - RNA, 12 nt, Human
aacuauucaguu

SEQ ID NO: 3622125 - RNA, 17 nt, Human
aacuauucaguuguguu

SEQ ID NO: 3622126 - RNA, 17 nt, Human
aacuauuuaaagaaaua

SEQ ID NO: 3622127 - RNA, 13 nt, Human
aacuauuuaucug

SEQ ID NO: 3622128 - RNA, 20 nt, Human
aacuauuuaucuguguuuuu

SEQ ID NO: 3622129 - RNA, 18 nt, Human
aacuauuucuuauauaug

SEQ ID NO: 3622130 - RNA, 19 nt, Human
aacuauuugucuuucagga

SEQ ID NO: 3622131 - RNA, 17 nt, Human
aacuauuuucaaagacu

SEQ ID NO: 3622132 - RNA, 16 nt, Human
aacucaaacacagaga

SEQ ID NO: 3622133 - RNA, 23 nt, Human
aacucaaacuucuggcucccucu

SEQ ID NO: 3622134 - RNA, 23 nt, Human
aacucaaccaaaugguacaaaac

SEQ ID NO: 3622135 - RNA, 16 nt, Human
aacucaagacaaugca

SEQ ID NO: 3622136 - RNA, 22 nt, Human
aacucaaggauaccuucuuauu

SEQ ID NO: 3622137 - RNA, 20 nt, Human
aacucaauauuuuccaugaa

SEQ ID NO: 3622138 - RNA, 13 nt, Human
aacucaaugcuuu

SEQ ID NO: 3622139 - RNA, 21 nt, Human
aacucaaugcuuuauuuguaa

SEQ ID NO: 3622140 - RNA, 20 nt, Human
aacucaccagccccacugcc

SEQ ID NO: 3622141 - RNA, 16 nt, Human
aacucaccauguaaaa

SEQ ID NO: 3622142 - RNA, 17 nt, Human
aacucaccccagcccca

SEQ ID NO: 3622143 - RNA, 22 nt, Human
aacucacccccaaggggcaguc

SEQ ID NO: 3622144 - RNA, 21 nt, Human
aacucaccuaauguuuaugag

SEQ ID NO: 3622145 - RNA, 20 nt, Human
aacucaccugcuggccccuc

SEQ ID NO: 3622146 - RNA, 20 nt, Human
aacucaccuggcaucuuaca

SEQ ID NO: 3622147 - RNA, 17 nt, Human
aacucacuccuuuuaaa

SEQ ID NO: 3622148 - RNA, 16 nt, Human
aacucacucugggcug

SEQ ID NO: 3622149 - RNA, 17 nt, Human
aacucacucugggcugu

SEQ ID NO: 3622150 - RNA, 14 nt, Human
aacucacugcucaa

SEQ ID NO: 3622151 - RNA, 22 nt, Human
aacucacugcucaagaagacau

SEQ ID NO: 3622152 - RNA, 15 nt, Human
aacucacugugauca

SEQ ID NO: 3622153 - RNA, 21 nt, Human
aacucagaaacaucaguuacu

SEQ ID NO: 3622154 - RNA, 21 nt, Human
aacucagaauuauuuuuaaaa

SEQ ID NO: 3622155 - RNA, 23 nt, Human
aacucagagaaaaaugcucccca

SEQ ID NO: 3622156 - RNA, 20 nt, Human
aacucagaucacuacugcag

SEQ ID NO: 3622157 - RNA, 17 nt, Human
aacucagaucugucuga

SEQ ID NO: 3622158 - RNA, 22 nt, Human
aacucagccucaauaagccuug

SEQ ID NO: 3622159 - RNA, 17 nt, Human
aacucaggcaaagaaaa

SEQ ID NO: 3622160 - RNA, 18 nt, Human
aacucaggcaaagaaaau

SEQ ID NO: 3622161 - RNA, 16 nt, Human
aacucagggacagagc

SEQ ID NO: 3622162 - RNA, 18 nt, Human
aacucauauuuucaugcu

SEQ ID NO: 3622163 - RNA, 22 nt, Human
aacucaucuagguaaauuacag

SEQ ID NO: 3622164 - RNA, 17 nt, Human
aacucaucugaaauguu

SEQ ID NO: 3622165 - RNA, 18 nt, Human
aacucaucugaaauguua

SEQ ID NO: 3622166 - RNA, 19 nt, Human
aacucaucugaaauguuac

SEQ ID NO: 3622167 - RNA, 20 nt, Human
aacucaucugaaauguuaca

SEQ ID NO: 3622168 - RNA, 15 nt, Human
aacucauuagacugg

SEQ ID NO: 3622169 - RNA, 24 nt, Human
aacucauuuuuguuuucauuaucu

SEQ ID NO: 3622170 - RNA, 18 nt, Human
aacuccaagguucccuug

SEQ ID NO: 3622171 - RNA, 17 nt, Human
aacuccacaucugccuu

SEQ ID NO: 3622172 - RNA, 15 nt, Human
aacuccaccaaccca

SEQ ID NO: 3622173 - RNA, 16 nt, Human
aacuccaggcccuccu

SEQ ID NO: 3622174 - RNA, 19 nt, Human
aacuccaguacuggagcuu

SEQ ID NO: 3622175 - RNA, 13 nt, Human
aacucccaagaac

SEQ ID NO: 3622176 - RNA, 22 nt, Human
aacucccagcaacacaagcugg

SEQ ID NO: 3622177 - RNA, 21 nt, Human
aacucccauuaccauguaaug

SEQ ID NO: 3622178 - RNA, 16 nt, Human
aacuccccuguuucaa

SEQ ID NO: 3622179 - RNA, 19 nt, Human
aacuccccuguuucaauca

SEQ ID NO: 3622180 - RNA, 22 nt, Human
aacuccccuguuucaaucacug

SEQ ID NO: 3622181 - RNA, 19 nt, Human
aacuccccuuccucacugc

SEQ ID NO: 3622182 - RNA, 23 nt, Human
aacuccccuuccucacugcccaa

SEQ ID NO: 3622183 - RNA, 13 nt, Human
aacucccuuucaa

SEQ ID NO: 3622184 - RNA, 14 nt, Human
aacuccgcccccag

SEQ ID NO: 3622185 - RNA, 19 nt, Human
aacuccgcccccagccuau

SEQ ID NO: 3622186 - RNA, 16 nt, Human
aacuccucauuguaaa

SEQ ID NO: 3622187 - RNA, 11 nt, Human
aacuccuccca

SEQ ID NO: 3622188 - RNA, 23 nt, Human
aacuccucgacaucacuguucau

SEQ ID NO: 3622189 - RNA, 12 nt, Human
aacuccugaccu

SEQ ID NO: 3622190 - RNA, 18 nt, Human
aacuccugaccucaggca

SEQ ID NO: 3622191 - RNA, 15 nt, Human
aacuccugggcucaa

SEQ ID NO: 3622192 - RNA, 21 nt, Human
aacuccuuuagcagguggucc

SEQ ID NO: 3622193 - RNA, 14 nt, Human
aacucgaggacugu

SEQ ID NO: 3622194 - RNA, 20 nt, Human
aacucgaggacuguauuugu

SEQ ID NO: 3622195 - RNA, 16 nt, Human
aacucgcgcucaguaa

SEQ ID NO: 3622196 - RNA, 17 nt, Human
aacucgggcucccgggu

SEQ ID NO: 3622197 - RNA, 19 nt, Human
aacucgguguccccaccau

SEQ ID NO: 3622198 - RNA, 24 nt, Human
aacucgguguccccaccaucugcu

SEQ ID NO: 3622199 - RNA, 19 nt, Human
aacucgugucuggcacagc

SEQ ID NO: 3622200 - RNA, 20 nt, Human
aacucuaaguguuugcugca

SEQ ID NO: 3622201 - RNA, 15 nt, Human
aacucuacuguguaa

SEQ ID NO: 3622202 - RNA, 12 nt, Human
aacucuagcugg

SEQ ID NO: 3622203 - RNA, 23 nt, Human
aacucuagcugggggugggccag

SEQ ID NO: 3622204 - RNA, 18 nt, Human
aacucuaucugggccugg

SEQ ID NO: 3622205 - RNA, 19 nt, Human
aacucuaucugggccuggg

SEQ ID NO: 3622206 - RNA, 24 nt, Human
aacucuauggucuuauauuuacaa

SEQ ID NO: 3622207 - RNA, 19 nt, Human
aacucuccucugcugcugg

SEQ ID NO: 3622208 - RNA, 21 nt, Human
aacucuccucugcugcuggcu

SEQ ID NO: 3622209 - RNA, 19 nt, Human
aacucucuuauugccucac

SEQ ID NO: 3622210 - RNA, 21 nt, Human
aacucucuuauugccucacuu

SEQ ID NO: 3622211 - RNA, 17 nt, Human
aacucugaacuuuggag

SEQ ID NO: 3622212 - RNA, 19 nt, Human
aacucugaauuuaucuuug

SEQ ID NO: 3622213 - RNA, 21 nt, Human
aacucugaauuuaucuuugau

SEQ ID NO: 3622214 - RNA, 22 nt, Human
aacucugaauuuaucuuugaua

SEQ ID NO: 3622215 - RNA, 13 nt, Human
aacucugagccca

SEQ ID NO: 3622216 - RNA, 16 nt, Human
aacucugcauucuagu

SEQ ID NO: 3622217 - RNA, 17 nt, Human
aacucuggcuuccaggu

SEQ ID NO: 3622218 - RNA, 18 nt, Human
aacucuggcuuccaggua

SEQ ID NO: 3622219 - RNA, 12 nt, Human
aacucugggcuc

SEQ ID NO: 3622220 - RNA, 21 nt, Human
aacucugggcugcuacccaga

SEQ ID NO: 3622221 - RNA, 12 nt, Human
aacucugguggc

SEQ ID NO: 3622222 - RNA, 18 nt, Human
aacucugguggcacagga

SEQ ID NO: 3622223 - RNA, 17 nt, Human
aacucugucuucaccug

SEQ ID NO: 3622224 - RNA, 23 nt, Human
aacucuguuacacuuuuuggaag

SEQ ID NO: 3622225 - RNA, 22 nt, Human
aacucuguugcaagugcaauaa

SEQ ID NO: 3622226 - RNA, 13 nt, Human
aacucuuaaaaau

SEQ ID NO: 3622227 - RNA, 13 nt, Human
aacucuuaucuca

SEQ ID NO: 3622228 - RNA, 19 nt, Human
aacucuucaaggucugcuu

SEQ ID NO: 3622229 - RNA, 15 nt, Human
aacucuucacucuuc

SEQ ID NO: 3622230 - RNA, 12 nt, Human
aacucuuccucc

SEQ ID NO: 3622231 - RNA, 13 nt, Human
aacucuucucauu

SEQ ID NO: 3622232 - RNA, 11 nt, Human
aacucuugauu

SEQ ID NO: 3622233 - RNA, 13 nt, Human
aacucuuucaaaa

SEQ ID NO: 3622234 - RNA, 19 nt, Human
aacucuuugaaugacaaag

SEQ ID NO: 3622235 - RNA, 11 nt, Human
aacucuuugcc

SEQ ID NO: 3622236 - RNA, 13 nt, Human
aacucuuuuaaca

SEQ ID NO: 3622237 - RNA, 11 nt, Human
aacugaaaaca

SEQ ID NO: 3622238 - RNA, 20 nt, Human
aacugaaaagacucaguguu

SEQ ID NO: 3622239 - RNA, 12 nt, Human
aacugaaaauua

SEQ ID NO: 3622240 - RNA, 17 nt, Human
aacugaaaauuauuuaa

SEQ ID NO: 3622241 - RNA, 18 nt, Human
aacugaaauuaaaacuau

SEQ ID NO: 3622242 - RNA, 21 nt, Human
aacugaacaccauugaaggcu

SEQ ID NO: 3622243 - RNA, 19 nt, Human
aacugaacucugacaacag

SEQ ID NO: 3622244 - RNA, 16 nt, Human
aacugaacuuugaaga

SEQ ID NO: 3622245 - RNA, 14 nt, Human
aacugaagagacag

SEQ ID NO: 3622246 - RNA, 18 nt, Human
aacugaagaguaaucaau

SEQ ID NO: 3622247 - RNA, 17 nt, Human
aacuguguucauuagaa

SEQ ID NO: 3622248 - RNA, 12 nt, Human
aacuguguugua

SEQ ID NO: 3622249 - RNA, 15 nt, Human
aacuguuaacuuauu

SEQ ID NO: 3622250 - RNA, 15 nt, Human
aacuguuacaguaau

SEQ ID NO: 3622251 - RNA, 15 nt, Human
aacuguuaccuaaag

SEQ ID NO: 3622252 - RNA, 16 nt, Human
aacuguuagaauguaa

SEQ ID NO: 3622253 - RNA, 20 nt, Human
aacuguuagcacuguugaug

SEQ ID NO: 3622254 - RNA, 20 nt, Human
aacuguuauuuauaaucacu

SEQ ID NO: 3622255 - RNA, 22 nt, Human
aacuguuauuuauaaucacuuu

SEQ ID NO: 3622256 - RNA, 18 nt, Human
aacuguucccaccugcug

SEQ ID NO: 3622257 - RNA, 21 nt, Human
aacuguucucuauuagacuuu

SEQ ID NO: 3622258 - RNA, 14 nt, Human
aacuguugauugca

SEQ ID NO: 3622259 - RNA, 15 nt, Human
aacuguugccagaga

SEQ ID NO: 3622260 - RNA, 17 nt, Human
aacuguugccagagaug

SEQ ID NO: 3622261 - RNA, 19 nt, Human
aacuguuggaauggauuuu

SEQ ID NO: 3622262 - RNA, 13 nt, Human
aacuguuguauaa

SEQ ID NO: 3622263 - RNA, 22 nt, Human
aacuguuugaaaacuucagaag

SEQ ID NO: 3622264 - RNA, 15 nt, Human
aacuguuuuuuaagu

SEQ ID NO: 3622265 - RNA, 17 nt, Human
aacuuaaaaauguaaau

SEQ ID NO: 3622266 - RNA, 21 nt, Human
aacuuaaaaauguaaauauuc

SEQ ID NO: 3622267 - RNA, 13 nt, Human
aacuuaaaauauu

SEQ ID NO: 3622268 - RNA, 14 nt, Human
aacuuaacauauuu

SEQ ID NO: 3622269 - RNA, 13 nt, Human
aacuuaacaugaa

SEQ ID NO: 3622270 - RNA, 18 nt, Human
aacuuaaccgcaucagaa

SEQ ID NO: 3622271 - RNA, 22 nt, Human
aacuuaaccgcaucagaagccu

SEQ ID NO: 3622272 - RNA, 21 nt, Human
aacuuaagcaaaggggacagc

SEQ ID NO: 3622273 - RNA, 22 nt, Human
aacuuaagccaauuucaaucuu

SEQ ID NO: 3622274 - RNA, 13 nt, Human
aacuuaauaauca

SEQ ID NO: 3622275 - RNA, 20 nt, Human
aacuuaauguucugaauaau

SEQ ID NO: 3622276 - RNA, 12 nt, Human
aacuuacaaaaa

SEQ ID NO: 3622277 - RNA, 17 nt, Human
aacuuauugcugauuuu

SEQ ID NO: 3622278 - RNA, 21 nt, Human
aacuuauugcugauuuuaaug

SEQ ID NO: 3622279 - RNA, 22 nt, Human
aacuuauugcugauuuuaaugg

SEQ ID NO: 3622280 - RNA, 19 nt, Human
aacuuauuugagugauuau

SEQ ID NO: 3622281 - RNA, 17 nt, Human
aacuuauuuuuuucuga

SEQ ID NO: 3622282 - RNA, 19 nt, Human
aacuuauuuuuuucugauu

SEQ ID NO: 3622283 - RNA, 20 nt, Human
aacuuauuuuuuucugauug

SEQ ID NO: 3622284 - RNA, 13 nt, Human
aacuucacucugg

SEQ ID NO: 3622285 - RNA, 14 nt, Human
aacuucagaaagac

SEQ ID NO: 3622286 - RNA, 15 nt, Human
aacuucagacacaaa

SEQ ID NO: 3622287 - RNA, 13 nt, Human
aacuucagacaua

SEQ ID NO: 3622288 - RNA, 14 nt, Human
aacuucagaguucu

SEQ ID NO: 3622289 - RNA, 13 nt, Human
aacuucagcacca

SEQ ID NO: 3622290 - RNA, 11 nt, Human
aacuucagcag

SEQ ID NO: 3622291 - RNA, 21 nt, Human
aacuucagcgguuuauauaag

SEQ ID NO: 3622292 - RNA, 13 nt, Human
aacuucaguccug

SEQ ID NO: 3622293 - RNA, 14 nt, Human
aacuucauguaauu

SEQ ID NO: 3622294 - RNA, 15 nt, Human
aacuuccaaagaaag

SEQ ID NO: 3622295 - RNA, 16 nt, Human
aacuuccaaagaaagu

SEQ ID NO: 3622296 - RNA, 18 nt, Human
aacuuccccaucuucuaa

SEQ ID NO: 3622297 - RNA, 11 nt, Human
aacuucccuga

SEQ ID NO: 3622298 - RNA, 17 nt, Human
aacuucgcaucaaaaga

SEQ ID NO: 3622299 - RNA, 16 nt, Human
aacuucuaaaacugua

SEQ ID NO: 3622300 - RNA, 14 nt, Human
aacuucuaauauau

SEQ ID NO: 3622301 - RNA, 16 nt, Human
aacuucuaauauauuu

SEQ ID NO: 3622302 - RNA, 20 nt, Human
aacuucugcaacaagcaugc

SEQ ID NO: 3622303 - RNA, 13 nt, Human
aacuucuguuuua

SEQ ID NO: 3622304 - RNA, 13 nt, Human
aacuucuuaaaua

SEQ ID NO: 3622305 - RNA, 15 nt, Human
aacuucuuaaauauc

SEQ ID NO: 3622306 - RNA, 20 nt, Human
aacuucuugcuucuuucuag

SEQ ID NO: 3622307 - RNA, 17 nt, Human
aacuucuugucagacau

SEQ ID NO: 3622308 - RNA, 15 nt, Human
aacuucuuugaauuu

SEQ ID NO: 3622309 - RNA, 15 nt, Human
aacuugaaaaauacu

SEQ ID NO: 3622310 - RNA, 21 nt, Human
aacuugaaauauccugcuuga

SEQ ID NO: 3622311 - RNA, 18 nt, Human
aacuugaaauuugaauuu

SEQ ID NO: 3622312 - RNA, 19 nt, Human
aacuugaaauuugaauuuu

SEQ ID NO: 3622313 - RNA, 14 nt, Human
aacuugaacugauu

SEQ ID NO: 3622314 - RNA, 13 nt, Human
aacuugaauaaua

SEQ ID NO: 3622315 - RNA, 15 nt, Human
aacuugacccugagc

SEQ ID NO: 3622316 - RNA, 18 nt, Human
aacuugacccugagcuga

SEQ ID NO: 3622317 - RNA, 19 nt, Human
aacuugacccugagcugac

SEQ ID NO: 3622318 - RNA, 16 nt, Human
aacuugacuccauuuc

SEQ ID NO: 3622319 - RNA, 15 nt, Human
aacuugagauguaug

SEQ ID NO: 3622320 - RNA, 22 nt, Human
aacuugagauguaugaaggcuu

SEQ ID NO: 3622321 - RNA, 15 nt, Human
aacuugagcgugaau

SEQ ID NO: 3622322 - RNA, 19 nt, Human
aacuugagcgugaaucugu

SEQ ID NO: 3622323 - RNA, 22 nt, Human
aacuugagcuuuaaaaaucauu

SEQ ID NO: 3622324 - RNA, 20 nt, Human
aacuugagggcccagagcag

SEQ ID NO: 3622325 - RNA, 22 nt, Human
aacuugagggcccagagcagga

SEQ ID NO: 3622326 - RNA, 22 nt, Human
aacuugaggguaauaaacuuag

SEQ ID NO: 3622327 - RNA, 19 nt, Human
aacuugagguggccuccuu

SEQ ID NO: 3622328 - RNA, 11 nt, Human
aacuugaugca

SEQ ID NO: 3622329 - RNA, 12 nt, Human
aacuugaugcau

SEQ ID NO: 3622330 - RNA, 21 nt, Human
aacuugcauccaacuccagga

SEQ ID NO: 3622331 - RNA, 13 nt, Human
aacuugccucuuu

SEQ ID NO: 3622332 - RNA, 22 nt, Human
aacuugccucuuuuaccugcug

SEQ ID NO: 3622333 - RNA, 23 nt, Human
aacuugccucuuuuaccugcugc

SEQ ID NO: 3622334 - RNA, 13 nt, Human
aacuugccugccu

SEQ ID NO: 3622335 - RNA, 19 nt, Human
aacuugcuuaaaugugaau

SEQ ID NO: 3622336 - RNA, 23 nt, Human
aacuuggaaaaauccagaaagaa

SEQ ID NO: 3622337 - RNA, 23 nt, Human
aacuuggaauuuguaaccucagc

SEQ ID NO: 3622338 - RNA, 17 nt, Human
aacuuggauacuuggau

SEQ ID NO: 3622339 - RNA, 13 nt, Human
aacuuggauucuc

SEQ ID NO: 3622340 - RNA, 15 nt, Human
aacuuggauuuuuga

SEQ ID NO: 3622341 - RNA, 23 nt, Human
aacuuggcucgaaucucugugcc

SEQ ID NO: 3622342 - RNA, 19 nt, Human
aacuuggcugcaggaaucu

SEQ ID NO: 3622343 - RNA, 12 nt, Human
aacuugggaacu

SEQ ID NO: 3622344 - RNA, 19 nt, Human
aacuuggggaacaagggug

SEQ ID NO: 3622345 - RNA, 20 nt, Human
aacuuggugcuuauugauau

SEQ ID NO: 3622346 - RNA, 18 nt, Human
aacuuguaaaugcuguca

SEQ ID NO: 3622347 - RNA, 16 nt, Human
aacuuguagcuguaaa

SEQ ID NO: 3622348 - RNA, 17 nt, Human
aacuuguauuaaagaca

SEQ ID NO: 3622349 - RNA, 11 nt, Human
aacuugucacu

SEQ ID NO: 3622350 - RNA, 12 nt, Human
aacuugucuuaa

SEQ ID NO: 3622351 - RNA, 22 nt, Human
aacuugucuuuggacccugagg

SEQ ID NO: 3622352 - RNA, 20 nt, Human
aacuugucuuuuucuggacu

SEQ ID NO: 3622353 - RNA, 15 nt, Human
aacuuguguaaauac

SEQ ID NO: 3622354 - RNA, 20 nt, Human
aacuuguguaaauacaauuu

SEQ ID NO: 3622355 - RNA, 13 nt, Human
aacuuuaaaccug

SEQ ID NO: 3622356 - RNA, 13 nt, Human
aacuuuaacuucu

SEQ ID NO: 3622357 - RNA, 21 nt, Human
aacuuuaaguuucaggauaca

SEQ ID NO: 3622358 - RNA, 12 nt, Human
aacuuuaauaug

SEQ ID NO: 3622359 - RNA, 14 nt, Human
aacuuuaauaugua

SEQ ID NO: 3622360 - RNA, 19 nt, Human
aacuuuaauguuuuuugcc

SEQ ID NO: 3622361 - RNA, 21 nt, Human
aacuuuaauucucuuucaaag

SEQ ID NO: 3622362 - RNA, 21 nt, Human
aacuuuaccuuuuuuauacau

SEQ ID NO: 3622363 - RNA, 23 nt, Human
aacuuuaccuuuuuuauacauaa

SEQ ID NO: 3622364 - RNA, 20 nt, Human
aacuuuacuaagaugacauu

SEQ ID NO: 3622365 - RNA, 21 nt, Human
aacuuuagcagaaucaaaaug

SEQ ID NO: 3622366 - RNA, 20 nt, Human
aacuuuaugcuaagugaaau

SEQ ID NO: 3622367 - RNA, 23 nt, Human
aacuuuauuaaauacaaaacuuc

SEQ ID NO: 3622368 - RNA, 21 nt, Human
aacuuucaagaacuuguuuaa

SEQ ID NO: 3622369 - RNA, 15 nt, Human
aacuuucaauuguca

SEQ ID NO: 3622370 - RNA, 15 nt, Human
aacuuuccuggaugu

SEQ ID NO: 3622371 - RNA, 18 nt, Human
aacuuuccuggaugucug

SEQ ID NO: 3622372 - RNA, 14 nt, Human
aacuuucucuugua

SEQ ID NO: 3622373 - RNA, 23 nt, Human
aacuuucugaguuuuucagaugu

SEQ ID NO: 3622374 - RNA, 15 nt, Human
aacuuucuguaaacu

SEQ ID NO: 3622375 - RNA, 11 nt, Human
aacuuugaaau

SEQ ID NO: 3622376 - RNA, 13 nt, Human
aacuuugaaauau

SEQ ID NO: 3622377 - RNA, 16 nt, Human
aacuuugaaauauaug

SEQ ID NO: 3622378 - RNA, 15 nt, Human
aacuuugaaguuagc

SEQ ID NO: 3622379 - RNA, 15 nt, Human
aacuuugaauaaaga

SEQ ID NO: 3622380 - RNA, 16 nt, Human
aacuuugagaucuaaa

SEQ ID NO: 3622381 - RNA, 12 nt, Human
aacuuugcuugc

SEQ ID NO: 3622382 - RNA, 21 nt, Human
aacuuugcuugcaguagauuu

SEQ ID NO: 3622383 - RNA, 19 nt, Human
aacuuuggaaccagacucu

SEQ ID NO: 3622384 - RNA, 22 nt, Human
aacuuuggagagugagcuacag

SEQ ID NO: 3622385 - RNA, 16 nt, Human
aacuuugggaaaacau

SEQ ID NO: 3622386 - RNA, 14 nt, Human
aacuuuguaaaaau

SEQ ID NO: 3622387 - RNA, 15 nt, Human
aacuuuguauaguua

SEQ ID NO: 3622388 - RNA, 22 nt, Human
aacuuuguauaguuauguaaau

SEQ ID NO: 3622389 - RNA, 20 nt, Human
aacuuuguggaugucuuccu

SEQ ID NO: 3622390 - RNA, 12 nt, Human
aacuuuguuuua

SEQ ID NO: 3622391 - RNA, 17 nt, Human
aacuuuuaguaaaguca

SEQ ID NO: 3622392 - RNA, 16 nt, Human
aagagacucuggccuc

SEQ ID NO: 3622393 - RNA, 12 nt, Human
aagagagaaaaa

SEQ ID NO: 3622394 - RNA, 18 nt, Human
aagagagaaaacuuauuu

SEQ ID NO: 3622395 - RNA, 14 nt, Human
aagagagaaaauaa

SEQ ID NO: 3622396 - RNA, 21 nt, Human
aagagagaaaauaaaaaguua

SEQ ID NO: 3622397 - RNA, 23 nt, Human
aagagagaaccuaacuguaucuu

SEQ ID NO: 3622398 - RNA, 13 nt, Human
aagagagaaugua

SEQ ID NO: 3622399 - RNA, 21 nt, Human
aagagagagaaacaaacuuuu

SEQ ID NO: 3622400 - RNA, 14 nt, Human
aagagagagcugag

SEQ ID NO: 3622401 - RNA, 22 nt, Human
aagagagcuuaaugauaauauu

SEQ ID NO: 3622402 - RNA, 14 nt, Human
aagagaggaguuca

SEQ ID NO: 3622403 - RNA, 15 nt, Human
aagagaggaguucaa

SEQ ID NO: 3622404 - RNA, 17 nt, Human
aagagaggaguucaaug

SEQ ID NO: 3622405 - RNA, 18 nt, Human
aagagaggaguucaauga

SEQ ID NO: 3622406 - RNA, 20 nt, Human
aagagaggaugugcaagcga

SEQ ID NO: 3622407 - RNA, 22 nt, Human
aagagaguauuuuuauacaaac

SEQ ID NO: 3622408 - RNA, 19 nt, Human
aagagaguuaaucaacuga

SEQ ID NO: 3622409 - RNA, 22 nt, Human
aagagaguuaaucaacugaaag

SEQ ID NO: 3622410 - RNA, 15 nt, Human
aagagauaagucuuu

SEQ ID NO: 3622411 - RNA, 12 nt, Human
aagagauauuuu

SEQ ID NO: 3622412 - RNA, 20 nt, Human
aagagauauuuuaaaaugag

SEQ ID NO: 3622413 - RNA, 22 nt, Human
aagagaucaggaagagaaggag

SEQ ID NO: 3622414 - RNA, 14 nt, Human
aagagauccaaaga

SEQ ID NO: 3622415 - RNA, 15 nt, Human
aagagauccaaagac

SEQ ID NO: 3622416 - RNA, 13 nt, Human
aagagaugaagag

SEQ ID NO: 3622417 - RNA, 14 nt, Human
aagagauugcuaau

SEQ ID NO: 3622418 - RNA, 14 nt, Human
aagagauuuaauua

SEQ ID NO: 3622419 - RNA, 15 nt, Human
aagagauuucaagag

SEQ ID NO: 3622420 - RNA, 14 nt, Human
aagagauuuuucau

SEQ ID NO: 3622421 - RNA, 13 nt, Human
aagagcaaaaaua

SEQ ID NO: 3622422 - RNA, 14 nt, Human
aagagcaaaaauau

SEQ ID NO: 3622423 - RNA, 15 nt, Human
aagagcaagucugga

SEQ ID NO: 3622424 - RNA, 16 nt, Human
aagagcacaaacauuu

SEQ ID NO: 3622425 - RNA, 13 nt, Human
aagagcacacuug

SEQ ID NO: 3622426 - RNA, 15 nt, Human
aagagcacagcccuc

SEQ ID NO: 3622427 - RNA, 19 nt, Human
aagagcacagcccucccgc

SEQ ID NO: 3622428 - RNA, 16 nt, Human
aagagcacuuaagaga

SEQ ID NO: 3622429 - RNA, 19 nt, Human
aagagcagccuguggcauc

SEQ ID NO: 3622430 - RNA, 22 nt, Human
aagagcaggacuccaggcccaa

SEQ ID NO: 3622431 - RNA, 23 nt, Human
aagagcaggcacauggaggagcu

SEQ ID NO: 3622432 - RNA, 18 nt, Human
aagagcagugguaagaau

SEQ ID NO: 3622433 - RNA, 17 nt, Human
aagagcaucaugccucu

SEQ ID NO: 3622434 - RNA, 23 nt, Human
aagagcaucaugccucugaggcc

SEQ ID NO: 3622435 - RNA, 24 nt, Human
aagagcaucaugccucugaggcca

SEQ ID NO: 3622436 - RNA, 15 nt, Human
aagagccacaggucu

SEQ ID NO: 3622437 - RNA, 22 nt, Human
aagagccacaggucuuuauguu

SEQ ID NO: 3622438 - RNA, 16 nt, Human
aagagcccaggccucc

SEQ ID NO: 3622439 - RNA, 18 nt, Human
aagagcccagucuguuga

SEQ ID NO: 3622440 - RNA, 17 nt, Human
aagagccccacucucag

SEQ ID NO: 3622441 - RNA, 18 nt, Human
aagagcccuaaguuugua

SEQ ID NO: 3622442 - RNA, 16 nt, Human
aagagcccuugccucc

SEQ ID NO: 3622443 - RNA, 14 nt, Human
aagagccggagccu

SEQ ID NO: 3622444 - RNA, 20 nt, Human
aagagccugcaggugcugcu

SEQ ID NO: 3622445 - RNA, 22 nt, Human
aagagccugcaggugcugcugc

SEQ ID NO: 3622446 - RNA, 13 nt, Human
aagagccuuaaaa

SEQ ID NO: 3622447 - RNA, 16 nt, Human
aagagccuuccaccca

SEQ ID NO: 3622448 - RNA, 21 nt, Human
aagagcgagagaucaaagaug

SEQ ID NO: 3622449 - RNA, 18 nt, Human
aagagcuacguauuuaau

SEQ ID NO: 3622450 - RNA, 15 nt, Human
aagagcuagagaaau

SEQ ID NO: 3622451 - RNA, 19 nt, Human
aagagcuagcgcugccgca

SEQ ID NO: 3622452 - RNA, 14 nt, Human
aagagcuauacagu

SEQ ID NO: 3622453 - RNA, 13 nt, Human
aagagcucuggug

SEQ ID NO: 3622454 - RNA, 19 nt, Human
aagagcuguucacagccag

SEQ ID NO: 3622455 - RNA, 14 nt, Human
aagagcuuaagaac

SEQ ID NO: 3622456 - RNA, 19 nt, Human
aagagcuuagaaacuggaa

SEQ ID NO: 3622457 - RNA, 14 nt, Human
aagagcuugcuuug

SEQ ID NO: 3622458 - RNA, 17 nt, Human
aagagcuuuacaaaaag

SEQ ID NO: 3622459 - RNA, 10 nt, Human
aagaggaaaa

SEQ ID NO: 3622460 - RNA, 19 nt, Human
aagaggaaaauauugacaa

SEQ ID NO: 3622461 - RNA, 22 nt, Human
aagaggaacagcacuggggagu

SEQ ID NO: 3622462 - RNA, 16 nt, Human
aagaggaaguucagau

SEQ ID NO: 3622463 - RNA, 17 nt, Human
aagaggaaguucagauc

SEQ ID NO: 3622464 - RNA, 20 nt, Human
aagaggaaugaaaaaagcuu

SEQ ID NO: 3622465 - RNA, 19 nt, Human
aagaggaauuacgugcucu

SEQ ID NO: 3622466 - RNA, 19 nt, Human
aagaggacucgcuuguaaa

SEQ ID NO: 3622467 - RNA, 23 nt, Human
aagaggacucgcuuguaaauacc

SEQ ID NO: 3622468 - RNA, 21 nt, Human
aagaggagcacuuccaaaauu

SEQ ID NO: 3622469 - RNA, 13 nt, Human
aagaggaggagga

SEQ ID NO: 3622470 - RNA, 17 nt, Human
aagaggaggggaagagg

SEQ ID NO: 3622471 - RNA, 21 nt, Human
aagaggaggggaagaggccug

SEQ ID NO: 3622472 - RNA, 22 nt, Human
aagaggaggggaagaggccugu

SEQ ID NO: 3622473 - RNA, 16 nt, Human
aagaggaucggaggcu

SEQ ID NO: 3622474 - RNA, 17 nt, Human
aagaggaugcugugaaa

SEQ ID NO: 3622475 - RNA, 19 nt, Human
aagaggcaagcugaaauuu

SEQ ID NO: 3622476 - RNA, 15 nt, Human
aagaggcaccugucc

SEQ ID NO: 3622477 - RNA, 16 nt, Human
aagaggcagaaaauug

SEQ ID NO: 3622478 - RNA, 11 nt, Human
aagaggcaggg

SEQ ID NO: 3622479 - RNA, 23 nt, Human
aagaggcccugucuguaccuaac

SEQ ID NO: 3622480 - RNA, 19 nt, Human
aagagguagaaaagauugg

SEQ ID NO: 3622481 - RNA, 21 nt, Human
aagagguauuuaucuuuacuu

SEQ ID NO: 3622482 - RNA, 16 nt, Human
aagaggugaccccagg

SEQ ID NO: 3622483 - RNA, 16 nt, Human
aagaggugacugggcc

SEQ ID NO: 3622484 - RNA, 17 nt, Human
aagaggugggagggccc

SEQ ID NO: 3622485 - RNA, 19 nt, Human
aagagguucucgacuggag

SEQ ID NO: 3622486 - RNA, 13 nt, Human
aagaguagaaacu

SEQ ID NO: 3622487 - RNA, 14 nt, Human
aagaguagcauuuc

SEQ ID NO: 3622488 - RNA, 14 nt, Human
aagaguaggaagac

SEQ ID NO: 3622489 - RNA, 19 nt, Human
aagaguaggaagacuuugg

SEQ ID NO: 3622490 - RNA, 16 nt, Human
aagaguaguaauagag

SEQ ID NO: 3622491 - RNA, 23 nt, Human
aagaguaguugauguugcauuuu

SEQ ID NO: 3622492 - RNA, 21 nt, Human
aagaguccauuguuuaaaaau

SEQ ID NO: 3622493 - RNA, 15 nt, Human
aagaguccucugaau

SEQ ID NO: 3622494 - RNA, 22 nt, Human
aagagucgcugugccacaggcu

SEQ ID NO: 3622495 - RNA, 14 nt, Human
aagagucuaaagau

SEQ ID NO: 3622496 - RNA, 21 nt, Human
aagagucuacccgacauaagu

SEQ ID NO: 3622497 - RNA, 20 nt, Human
aagagucuagauucaaaggu

SEQ ID NO: 3622498 - RNA, 14 nt, Human
aagagucuucaaca

SEQ ID NO: 3622499 - RNA, 22 nt, Human
aagagugaaauaccauuauuau

SEQ ID NO: 3622500 - RNA, 18 nt, Human
aagagugaauucccucac

SEQ ID NO: 3622501 - RNA, 18 nt, Human
aagagugacuaguacaaa

SEQ ID NO: 3622502 - RNA, 17 nt, Human
aagagugauugcagcuu

SEQ ID NO: 3622503 - RNA, 18 nt, Human
aagagugcaaaacauuga

SEQ ID NO: 3622504 - RNA, 22 nt, Human
aagaguggcagcuauaggaaau

SEQ ID NO: 3622505 - RNA, 15 nt, Human
aagaguggccccacc

SEQ ID NO: 3622506 - RNA, 14 nt, Human
aagaguguacuggg

SEQ ID NO: 3622507 - RNA, 15 nt, Human
aagaguguacugggg

SEQ ID NO: 3622508 - RNA, 13 nt, Human
aagaguguagaag

SEQ ID NO: 3622509 - RNA, 12 nt, Human
aagagugugugu

SEQ ID NO: 3622510 - RNA, 16 nt, Human
aagaguucccuugaaa

SEQ ID NO: 3622511 - RNA, 20 nt, Human
aagaguucccuugaaacuuu

SEQ ID NO: 3622512 - RNA, 23 nt, Human
aagaguucuuaaggauugugaua

SEQ ID NO: 3622513 - RNA, 19 nt, Human
aagaguuguguuguucuuu

SEQ ID NO: 3622514 - RNA, 15 nt, Human
aagaguuuaaaauca

SEQ ID NO: 3622515 - RNA, 18 nt, Human
aagaguuucaguuuguug

SEQ ID NO: 3622516 - RNA, 21 nt, Human
aagaguuucaguuuguuggaa

SEQ ID NO: 3622517 - RNA, 18 nt, Human
aagauaaaaaaacagcuu

SEQ ID NO: 3622518 - RNA, 17 nt, Human
aagauaaacacaagauu

SEQ ID NO: 3622519 - RNA, 13 nt, Human
aagauaaacauua

SEQ ID NO: 3622520 - RNA, 17 nt, Human
aagauaaagccagaagc

SEQ ID NO: 3622521 - RNA, 13 nt, Human
aagauaaaugugc

SEQ ID NO: 3622522 - RNA, 21 nt, Human
aagauaacaagaucuuucagg

SEQ ID NO: 3622523 - RNA, 15 nt, Human
aagauaacuugagca

SEQ ID NO: 3622524 - RNA, 19 nt, Human
aagauaaguuggaaacacu

SEQ ID NO: 3622525 - RNA, 15 nt, Human
aagauaauaauauau

SEQ ID NO: 3622526 - RNA, 22 nt, Human
aagauaaucucagugcuuuccu

SEQ ID NO: 3622527 - RNA, 13 nt, Human
aagauaauugcua

SEQ ID NO: 3622528 - RNA, 14 nt, Human
aagauacauuugua

SEQ ID NO: 3622529 - RNA, 18 nt, Human
aagauaccaucagcaaag

SEQ ID NO: 3622530 - RNA, 15 nt, Human
aagauaccuuaaaau

SEQ ID NO: 3622531 - RNA, 18 nt, Human
aagauaccuuaaaauuug

SEQ ID NO: 3622532 - RNA, 18 nt, Human
aagauaccuuuuuuuuuc

SEQ ID NO: 3622533 - RNA, 20 nt, Human
aagauaccuuuuuuuuucuu

SEQ ID NO: 3622534 - RNA, 14 nt, Human
aagauacgacuuua

SEQ ID NO: 3622535 - RNA, 14 nt, Human
aagauacugaaaua

SEQ ID NO: 3622536 - RNA, 20 nt, Human
aagauacugaaauaaacguc

SEQ ID NO: 3622537 - RNA, 23 nt, Human
aagagugauagucuuuugcuuuu

SEQ ID NO: 3622538 - RNA, 14 nt, Human
aagagugauugcag

SEQ ID NO: 3622539 - RNA, 20 nt, Human
aagagugauugcagcuuuau

SEQ ID NO: 3622540 - RNA, 17 nt, Human
aagagugcaaaacauug

SEQ ID NO: 3622541 - RNA, 14 nt, Human
aagagugcauuuuc

SEQ ID NO: 3622542 - RNA, 20 nt, Human
aagagugcgccgagucuguc

SEQ ID NO: 3622543 - RNA, 19 nt, Human
aagaguggccccaccuggc

SEQ ID NO: 3622544 - RNA, 20 nt, Human
aagagugggggagagcaggc

SEQ ID NO: 3622545 - RNA, 17 nt, Human
aagaguguaaaauauuu

SEQ ID NO: 3622546 - RNA, 12 nt, Human
aagaguguagaa

SEQ ID NO: 3622547 - RNA, 16 nt, Human
aagaguguagaagcau

SEQ ID NO: 3622548 - RNA, 18 nt, Human
aagaguguagaagcauuc

SEQ ID NO: 3622549 - RNA, 23 nt, Human
aagaguguccuaggaguauccuc

SEQ ID NO: 3622550 - RNA, 22 nt, Human
aagaguguggagucauucucau

SEQ ID NO: 3622551 - RNA, 13 nt, Human
aagagugugugug

SEQ ID NO: 3622552 - RNA, 15 nt, Human
aagaguuaagaaugu

SEQ ID NO: 3622553 - RNA, 19 nt, Human
aagaguugagugauagagc

SEQ ID NO: 3622554 - RNA, 14 nt, Human
aagaguuggcuggu

SEQ ID NO: 3622555 - RNA, 19 nt, Human
aagaguuggggacagaacu

SEQ ID NO: 3622556 - RNA, 18 nt, Human
aagaguuguguuguucuu

SEQ ID NO: 3622557 - RNA, 22 nt, Human
aagaguuguguuguucuuuucc

SEQ ID NO: 3622558 - RNA, 20 nt, Human
aagaguuugaugaggcccuc

SEQ ID NO: 3622559 - RNA, 22 nt, Human
aagaguuugaugaggcccucca

SEQ ID NO: 3622560 - RNA, 23 nt, Human
aagaguuuugggaguuguaguua

SEQ ID NO: 3622561 - RNA, 22 nt, Human
aagauaaacacaagauuggugu

SEQ ID NO: 3622562 - RNA, 18 nt, Human
aagauaaagaccagaaau

SEQ ID NO: 3622563 - RNA, 14 nt, Human
aagauaaagaugau

SEQ ID NO: 3622564 - RNA, 11 nt, Human
aagauaaagga

SEQ ID NO: 3622565 - RNA, 14 nt, Human
aagauaaaggacag

SEQ ID NO: 3622566 - RNA, 12 nt, Human
aagauaaaugug

SEQ ID NO: 3622567 - RNA, 14 nt, Human
aagauaaaugugcu

SEQ ID NO: 3622568 - RNA, 22 nt, Human
aagauaacaagaucuuucagga

SEQ ID NO: 3622569 - RNA, 13 nt, Human
aagauaaguugga

SEQ ID NO: 3622570 - RNA, 15 nt, Human
aagauaaguuggaaa

SEQ ID NO: 3622571 - RNA, 17 nt, Human
aagauaaguuggaaaca

SEQ ID NO: 3622572 - RNA, 18 nt, Human
aagauaauauuuuacaua

SEQ ID NO: 3622573 - RNA, 23 nt, Human
aagauaaucucagugcuuuccuc

SEQ ID NO: 3622574 - RNA, 21 nt, Human
aagauaaucuuagcugccaag

SEQ ID NO: 3622575 - RNA, 23 nt, Human
aagauacaguuacucagaauucu

SEQ ID NO: 3622576 - RNA, 19 nt, Human
aagauacauaaaagugcuu

SEQ ID NO: 3622577 - RNA, 15 nt, Human
aagauacaucacagu

SEQ ID NO: 3622578 - RNA, 17 nt, Human
aagauaccaucagcaaa

SEQ ID NO: 3622579 - RNA, 19 nt, Human
aagauaccuuaaaauuuga

SEQ ID NO: 3622580 - RNA, 21 nt, Human
aagauacgacuuuauuuucug

SEQ ID NO: 3622581 - RNA, 12 nt, Human
aagauacuguuu

SEQ ID NO: 3622582 - RNA, 17 nt, Human
aagauacuuaagugcug

SEQ ID NO: 3622583 - RNA, 12 nt, Human
aagauagaagaa

SEQ ID NO: 3622584 - RNA, 19 nt, Human
aagauagaguaaaaagaaa

SEQ ID NO: 3622585 - RNA, 14 nt, Human
aagauagcugugac

SEQ ID NO: 3622586 - RNA, 16 nt, Human
aagauaggcucugcac

SEQ ID NO: 3622587 - RNA, 17 nt, Human
aagauaggcucugcaca

SEQ ID NO: 3622588 - RNA, 20 nt, Human
aagauagucuuggaagcugu

SEQ ID NO: 3622589 - RNA, 14 nt, Human
aagauaguguaacu

SEQ ID NO: 3622590 - RNA, 15 nt, Human
aagauaguguaacuu

SEQ ID NO: 3622591 - RNA, 15 nt, Human
aagauauaagugcug

SEQ ID NO: 3622592 - RNA, 16 nt, Human
aagauauaagugcugu

SEQ ID NO: 3622593 - RNA, 21 nt, Human
aagauauauacacaggauccu

SEQ ID NO: 3622594 - RNA, 11 nt, Human
aagauauauua

SEQ ID NO: 3622595 - RNA, 14 nt, Human
aagauauauuaaaa

SEQ ID NO: 3622596 - RNA, 20 nt, Human
aagauauauuaaaaauauaa

SEQ ID NO: 3622597 - RNA, 19 nt, Human
aagauaugggacauuuuug

SEQ ID NO: 3622598 - RNA, 13 nt, Human
aagauauuguaca

SEQ ID NO: 3622599 - RNA, 14 nt, Human
aagauauuguucaa

SEQ ID NO: 3622600 - RNA, 13 nt, Human
aagauauuuauau

SEQ ID NO: 3622601 - RNA, 15 nt, Human
aagauauuuauauau

SEQ ID NO: 3622602 - RNA, 20 nt, Human
aagauauuugcaguuuuuca

SEQ ID NO: 3622603 - RNA, 19 nt, Human
aagauauuuuaaaaucugu

SEQ ID NO: 3622604 - RNA, 15 nt, Human
aagauauuuugcuuu

SEQ ID NO: 3622605 - RNA, 17 nt, Human
aagauauuuuuaucuuu

SEQ ID NO: 3622606 - RNA, 20 nt, Human
aagaucacugccagagauaa

SEQ ID NO: 3622607 - RNA, 23 nt, Human
aagaucacuuucucaguuuucau

SEQ ID NO: 3622608 - RNA, 15 nt, Human
aagaucacuuugcuc

SEQ ID NO: 3622609 - RNA, 18 nt, Human
aagaucacuuugcucuga

SEQ ID NO: 3622610 - RNA, 15 nt, Human
aagauccccucagga

SEQ ID NO: 3622611 - RNA, 16 nt, Human
aagauccccucaggac

SEQ ID NO: 3622612 - RNA, 22 nt, Human
aagauccuagauccuaaggguc

SEQ ID NO: 3622613 - RNA, 16 nt, Human
aagaucgcccccaccu

SEQ ID NO: 3622614 - RNA, 20 nt, Human
aagaucgcgccacugcacuc

SEQ ID NO: 3622615 - RNA, 18 nt, Human
aagaucgguuaacaaaua

SEQ ID NO: 3622616 - RNA, 19 nt, Human
aagaucgguuaacaaauaa

SEQ ID NO: 3622617 - RNA, 19 nt, Human
aagaucguucucugccuca

SEQ ID NO: 3622618 - RNA, 13 nt, Human
aagaucuacauga

SEQ ID NO: 3622619 - RNA, 23 nt, Human
aagaucugcagggggugugucug

SEQ ID NO: 3622620 - RNA, 19 nt, Human
aagaucugugcagccccgc

SEQ ID NO: 3622621 - RNA, 22 nt, Human
aagaucuguuuugaaggcaaaa

SEQ ID NO: 3622622 - RNA, 17 nt, Human
aagaucuuaaauuuugu

SEQ ID NO: 3622623 - RNA, 17 nt, Human
aagaucuuuuauuuugc

SEQ ID NO: 3622624 - RNA, 17 nt, Human
aagaugaaaauggaagu

SEQ ID NO: 3622625 - RNA, 16 nt, Human
aagaugaaagagcagu

SEQ ID NO: 3622626 - RNA, 17 nt, Human
aagaugacauugcuaag

SEQ ID NO: 3622627 - RNA, 15 nt, Human
aagaugacugagggu

SEQ ID NO: 3622628 - RNA, 20 nt, Human
aagaugagaacagauaaaga

SEQ ID NO: 3622629 - RNA, 18 nt, Human
aagaugagagaacuggag

SEQ ID NO: 3622630 - RNA, 22 nt, Human
aagaugagauuggcauggcuuu

SEQ ID NO: 3622631 - RNA, 18 nt, Human
aagaugaucuacucagaa

SEQ ID NO: 3622632 - RNA, 15 nt, Human
aagaugauuugcaau

SEQ ID NO: 3622633 - RNA, 16 nt, Human
aagaugauuugcaaug

SEQ ID NO: 3622634 - RNA, 17 nt, Human
aagaugcauuguaguuu

SEQ ID NO: 3622635 - RNA, 22 nt, Human
aagaugcauuguaguuuaacca

SEQ ID NO: 3622636 - RNA, 16 nt, Human
aagaugccacauucaa

SEQ ID NO: 3622637 - RNA, 24 nt, Human
aagaugcccacugaggaaugauga

SEQ ID NO: 3622638 - RNA, 22 nt, Human
aagaugcucagguacagagaag

SEQ ID NO: 3622639 - RNA, 22 nt, Human
aagaugcucuaucuugcucugu

SEQ ID NO: 3622640 - RNA, 17 nt, Human
aagauguguucuuauuu

SEQ ID NO: 3622641 - RNA, 14 nt, Human
aagauguuauauuu

SEQ ID NO: 3622642 - RNA, 15 nt, Human
aagauguucuggaua

SEQ ID NO: 3622643 - RNA, 20 nt, Human
aagauguucuggauaccauu

SEQ ID NO: 3622644 - RNA, 15 nt, Human
aagauguugaagaau

SEQ ID NO: 3622645 - RNA, 11 nt, Human
aagauguuugc

SEQ ID NO: 3622646 - RNA, 16 nt, Human
aagauguuugucagau

SEQ ID NO: 3622647 - RNA, 20 nt, Human
aagauuacuuagaggaaaua

SEQ ID NO: 3622648 - RNA, 11 nt, Human
aagauuagaag

SEQ ID NO: 3622649 - RNA, 13 nt, Human
aagauuagaagcu

SEQ ID NO: 3622650 - RNA, 18 nt, Human
aagauuagaagcugaaaa

SEQ ID NO: 3622651 - RNA, 21 nt, Human
aagauuagcaaggucauuucu

SEQ ID NO: 3622652 - RNA, 19 nt, Human
aagauuauaauuguugcau

SEQ ID NO: 3622653 - RNA, 20 nt, Human
aagauuauaauuguugcaua

SEQ ID NO: 3622654 - RNA, 15 nt, Human
aagauuauagauucu

SEQ ID NO: 3622655 - RNA, 17 nt, Human
aagauuauagauucuaa

SEQ ID NO: 3622656 - RNA, 17 nt, Human
aagauuauuuuauuaug

SEQ ID NO: 3622657 - RNA, 17 nt, Human
aagauucaaucccagga

SEQ ID NO: 3622658 - RNA, 23 nt, Human
aagauucacaccugacucugaaa

SEQ ID NO: 3622659 - RNA, 21 nt, Human
aagauucaccuaagagauucu

SEQ ID NO: 3622660 - RNA, 14 nt, Human
aagauucagcuagu

SEQ ID NO: 3622661 - RNA, 15 nt, Human
aagauucagguaugu

SEQ ID NO: 3622662 - RNA, 19 nt, Human
aagauucauuuuuaaucau

SEQ ID NO: 3622663 - RNA, 12 nt, Human
aagauuccaaaa

SEQ ID NO: 3622664 - RNA, 17 nt, Human
aagauuccaaaaagcac

SEQ ID NO: 3622665 - RNA, 12 nt, Human
aagauucccaga

SEQ ID NO: 3622666 - RNA, 13 nt, Human
aagauucccagag

SEQ ID NO: 3622667 - RNA, 14 nt, Human
aagauucccagaga

SEQ ID NO: 3622668 - RNA, 16 nt, Human
aagauucccaggaguu

SEQ ID NO: 3622669 - RNA, 17 nt, Human
aagauucccaggaguuc

SEQ ID NO: 3622670 - RNA, 19 nt, Human
aagauucccaggaguucug

SEQ ID NO: 3622671 - RNA, 21 nt, Human
aagauucccaggaguucugcu

SEQ ID NO: 3622672 - RNA, 21 nt, Human
aagauuccggauccuaagcau

SEQ ID NO: 3622673 - RNA, 11 nt, Human
aagauucuaaa

SEQ ID NO: 3622674 - RNA, 14 nt, Human
aagauucuaaugau

SEQ ID NO: 3622675 - RNA, 11 nt, Human
aagauucuaga

SEQ ID NO: 3622676 - RNA, 20 nt, Human
aagauucuagaucagaugcu

SEQ ID NO: 3622677 - RNA, 14 nt, Human
aagauucuagauga

SEQ ID NO: 3622678 - RNA, 11 nt, Human
aagauucuaug

SEQ ID NO: 3622679 - RNA, 17 nt, Human
aagauucuccugugcua

SEQ ID NO: 3622680 - RNA, 17 nt, Human
aagauucuugguauuug

SEQ ID NO: 3622681 - RNA, 19 nt, Human
aagauugagaaguuacuuu

SEQ ID NO: 3622682 - RNA, 21 nt, Human
aagcuaacagcaguuucaggu

SEQ ID NO: 3622683 - RNA, 20 nt, Human
aagcuaacagggaaggcagg

SEQ ID NO: 3622684 - RNA, 15 nt, Human
aagcuaauaaaauau

SEQ ID NO: 3622685 - RNA, 20 nt, Human
aagcuaauaaaauaucauuc

SEQ ID NO: 3622686 - RNA, 18 nt, Human
aagcuaauaauucuucac

SEQ ID NO: 3622687 - RNA, 23 nt, Human
aagcuaauuugcauuaaauucac

SEQ ID NO: 3622688 - RNA, 20 nt, Human
aagcuacagaagaaacuggg

SEQ ID NO: 3622689 - RNA, 14 nt, Human
aagcuacagguuac

SEQ ID NO: 3622690 - RNA, 15 nt, Human
aagcuacagguuaca

SEQ ID NO: 3622691 - RNA, 19 nt, Human
aagcuacagguuacaacag

SEQ ID NO: 3622692 - RNA, 18 nt, Human
aagcuuauuaaugcuaag

SEQ ID NO: 3622693 - RNA, 20 nt, Human
aagcuuauuaaugcuaaggg

SEQ ID NO: 3622694 - RNA, 16 nt, Human
aagcuuauuuuggaga

SEQ ID NO: 3622695 - RNA, 14 nt, Human
aagcuucaaauuaa

SEQ ID NO: 3622696 - RNA, 18 nt, Human
aagcuucaaauuaaaaca

SEQ ID NO: 3622697 - RNA, 22 nt, Human
aagcuucaugcacuuaaagaag

SEQ ID NO: 3622698 - RNA, 21 nt, Human
aagcuucauucuccuuguugu

SEQ ID NO: 3622699 - RNA, 16 nt, Human
aagcuuccaggaaaaa

SEQ ID NO: 3622700 - RNA, 18 nt, Human
aagcuuccauagcugcug

SEQ ID NO: 3622701 - RNA, 20 nt, Human
aagcuuccaugauucuauuu

SEQ ID NO: 3622702 - RNA, 21 nt, Human
aagcuuccaugauucuauuua

SEQ ID NO: 3622703 - RNA, 16 nt, Human
aagcuuccauuccaca

SEQ ID NO: 3622704 - RNA, 23 nt, Human
aagcuucccacggccuuucuagc

SEQ ID NO: 3622705 - RNA, 13 nt, Human
aagcuuccuuggc

SEQ ID NO: 3622706 - RNA, 14 nt, Human
aagcuucuaauaaa

SEQ ID NO: 3622707 - RNA, 16 nt, Human
aagcuucuaauaaauu

SEQ ID NO: 3622708 - RNA, 22 nt, Human
aagcuucuuaaaugagaaggaa

SEQ ID NO: 3622709 - RNA, 21 nt, Human
aagcuuggcagccgagcucgu

SEQ ID NO: 3622710 - RNA, 12 nt, Human
aagcuuguguau

SEQ ID NO: 3622711 - RNA, 13 nt, Human
aagcuuguguauc

SEQ ID NO: 3622712 - RNA, 22 nt, Human
aagcuuguguauccauuaucau

SEQ ID NO: 3622713 - RNA, 14 nt, Human
aagcuuuaaauuau

SEQ ID NO: 3622714 - RNA, 15 nt, Human
aagcuuuaccagcug

SEQ ID NO: 3622715 - RNA, 22 nt, Human
aagcuuuauacguguagcuaua

SEQ ID NO: 3622716 - RNA, 14 nt, Human
aagcuuuaucuauu

SEQ ID NO: 3622717 - RNA, 21 nt, Human
aagcuuuauuaccaguggcgu

SEQ ID NO: 3622718 - RNA, 20 nt, Human
aagcuuuauuucuagcuuuu

SEQ ID NO: 3622719 - RNA, 16 nt, Human
aagcuuucagaauaug

SEQ ID NO: 3622720 - RNA, 18 nt, Human
aagcuuuccugccccagg

SEQ ID NO: 3622721 - RNA, 21 nt, Human
aagcuuuccugccccaggccu

SEQ ID NO: 3622722 - RNA, 23 nt, Human
aagcuuucucugcuucagcuugc

SEQ ID NO: 3622723 - RNA, 19 nt, Human
aagcuuuggugagaaccug

SEQ ID NO: 3622724 - RNA, 22 nt, Human
aagcuuuggugagaaccugggu

SEQ ID NO: 3622725 - RNA, 18 nt, Human
aagcuuuuagaaauacug

SEQ ID NO: 3622726 - RNA, 12 nt, Human
aagcuuuuauga

SEQ ID NO: 3622727 - RNA, 13 nt, Human
aagcuuuuaugag

SEQ ID NO: 3622728 - RNA, 13 nt, Human
aagcuuuugcaua

SEQ ID NO: 3622729 - RNA, 19 nt, Human
aagcuuuugcauauugcau

SEQ ID NO: 3622730 - RNA, 13 nt, Human
aagcuuuuuggaa

SEQ ID NO: 3622731 - RNA, 15 nt, Human
aaggaaaaaaagacu

SEQ ID NO: 3622732 - RNA, 21 nt, Human
aaggaaaaaaagacucuuuuu

SEQ ID NO: 3622733 - RNA, 19 nt, Human
aaggaaaaaagagaaguau

SEQ ID NO: 3622734 - RNA, 18 nt, Human
aaggaaaaagaaaauaaa

SEQ ID NO: 3622735 - RNA, 21 nt, Human
aaggaaaaagcacaagaagcg

SEQ ID NO: 3622736 - RNA, 13 nt, Human
aaggaaaaagcuc

SEQ ID NO: 3622737 - RNA, 14 nt, Human
aaggaaaaagcucc

SEQ ID NO: 3622738 - RNA, 17 nt, Human
aaggaaaaauguguaau

SEQ ID NO: 3622739 - RNA, 13 nt, Human
aaggaaaaauuca

SEQ ID NO: 3622740 - RNA, 18 nt, Human
aaggaaaaccugaagacu

SEQ ID NO: 3622741 - RNA, 14 nt, Human
aaggaaaacugcau

SEQ ID NO: 3622742 - RNA, 17 nt, Human
aaggaaaacugcaugga

SEQ ID NO: 3622743 - RNA, 16 nt, Human
aaggaaaagaaaaaaa

SEQ ID NO: 3622744 - RNA, 20 nt, Human
aaggaaaagaaaacaaaaaa

SEQ ID NO: 3622745 - RNA, 14 nt, Human
aaggaaaaugaucu

SEQ ID NO: 3622746 - RNA, 16 nt, Human
aaggaaaccacagcug

SEQ ID NO: 3622747 - RNA, 20 nt, Human
aaggaaaccacagcugcugg

SEQ ID NO: 3622748 - RNA, 12 nt, Human
aaggaaaccuuu

SEQ ID NO: 3622749 - RNA, 18 nt, Human
aaggaaaccuuuucuugu

SEQ ID NO: 3622750 - RNA, 15 nt, Human
aaggaaagaaaacau

SEQ ID NO: 3622751 - RNA, 13 nt, Human
aaggaaagcaaua

SEQ ID NO: 3622752 - RNA, 12 nt, Human
aaggaaagcugu

SEQ ID NO: 3622753 - RNA, 14 nt, Human
aaggaaaggccuga

SEQ ID NO: 3622754 - RNA, 20 nt, Human
aaggaaauaaaaaagucucu

SEQ ID NO: 3622755 - RNA, 23 nt, Human
aaggaacaaaaaaaccacaaagg

SEQ ID NO: 3622756 - RNA, 17 nt, Human
aaggaacagcaauggug

SEQ ID NO: 3622757 - RNA, 13 nt, Human
aaggaacuugucu

SEQ ID NO: 3622758 - RNA, 17 nt, Human
aaggaagaaauuaacuu

SEQ ID NO: 3622759 - RNA, 16 nt, Human
aaggaagacaguucua

SEQ ID NO: 3622760 - RNA, 15 nt, Human
aaggaagacuucauc

SEQ ID NO: 3622761 - RNA, 22 nt, Human
aaggaagaucacuuugcucuga

SEQ ID NO: 3622762 - RNA, 13 nt, Human
aaggaagcacaug

SEQ ID NO: 3622763 - RNA, 18 nt, Human
aaggaagcauuguaaaau

SEQ ID NO: 3622764 - RNA, 23 nt, Human
aaggaagcauuguaaaauaauuc

SEQ ID NO: 3622765 - RNA, 22 nt, Human
aaggaagccacagcugguggua

SEQ ID NO: 3622766 - RNA, 15 nt, Human
aaggaagcugugcgu

SEQ ID NO: 3622767 - RNA, 22 nt, Human
aaggaagcuuucucugcuucag

SEQ ID NO: 3622768 - RNA, 11 nt, Human
aaggaaggaaa

SEQ ID NO: 3622769 - RNA, 13 nt, Human
aaggaaggaaaga

SEQ ID NO: 3622770 - RNA, 16 nt, Human
aaggaaggaaagaaag

SEQ ID NO: 3622771 - RNA, 21 nt, Human
aaggaaggcucuucuccccag

SEQ ID NO: 3622772 - RNA, 22 nt, Human
aaggaagggcauccuucugccu

SEQ ID NO: 3622773 - RNA, 18 nt, Human
aaggaagguaaaaaguua

SEQ ID NO: 3622774 - RNA, 17 nt, Human
aaggaagguggauggcc

SEQ ID NO: 3622775 - RNA, 18 nt, Human
aaggaagguggauggccc

SEQ ID NO: 3622776 - RNA, 15 nt, Human
aaggaagguucaugu

SEQ ID NO: 3622777 - RNA, 16 nt, Human
aaggaagugcccccuc

SEQ ID NO: 3622778 - RNA, 22 nt, Human
aaggaaguuacuguuauagagg

SEQ ID NO: 3622779 - RNA, 20 nt, Human
aaggaauagaucuaugauug

SEQ ID NO: 3622780 - RNA, 13 nt, Human
aaggaauauaaug

SEQ ID NO: 3622781 - RNA, 15 nt, Human
aaggaauauauggca

SEQ ID NO: 3622782 - RNA, 17 nt, Human
aaggaauauauggcaga

SEQ ID NO: 3622783 - RNA, 22 nt, Human
aaggaauauauggcagaguugu

SEQ ID NO: 3622784 - RNA, 23 nt, Human
aaggaauauauggcagaguugua

SEQ ID NO: 3622785 - RNA, 19 nt, Human
aaggaaucacguuagagga

SEQ ID NO: 3622786 - RNA, 23 nt, Human
aaggaauccacucccaggcagcc

SEQ ID NO: 3622787 - RNA, 21 nt, Human
aaggaaucuccaguuuucagu

SEQ ID NO: 3622788 - RNA, 16 nt, Human
aaggaaugcaaagaug

SEQ ID NO: 3622789 - RNA, 17 nt, Human
aaggaaugcuuggaaua

SEQ ID NO: 3622790 - RNA, 16 nt, Human
aaggaauggaggcucu

SEQ ID NO: 3622791 - RNA, 21 nt, Human
aaggaauguagcugguuuccu

SEQ ID NO: 3622792 - RNA, 18 nt, Human
aaggaauuauucccauga

SEQ ID NO: 3622793 - RNA, 23 nt, Human
aaggaauuucuuaacuucuugcu

SEQ ID NO: 3622794 - RNA, 16 nt, Human
aaggacaaagucucca

SEQ ID NO: 3622795 - RNA, 14 nt, Human
aaggacaaagugcc

SEQ ID NO: 3622796 - RNA, 19 nt, Human
aaggacaaagugccaaaga

SEQ ID NO: 3622797 - RNA, 14 nt, Human
aaggacacacuaau

SEQ ID NO: 3622798 - RNA, 14 nt, Human
aaggacacuuccug

SEQ ID NO: 3622799 - RNA, 13 nt, Human
aaggacagccccu

SEQ ID NO: 3622800 - RNA, 18 nt, Human
aaggacaggcagaaagag

SEQ ID NO: 3622801 - RNA, 20 nt, Human
aaggacaggcagaaagaguu

SEQ ID NO: 3622802 - RNA, 14 nt, Human
aaggacaucagcaa

SEQ ID NO: 3622803 - RNA, 16 nt, Human
aaggacauuaugugug

SEQ ID NO: 3622804 - RNA, 16 nt, Human
aaggaccacauuuuau

SEQ ID NO: 3622805 - RNA, 19 nt, Human
aaggaccacauuuuauauu

SEQ ID NO: 3622806 - RNA, 20 nt, Human
aaggaccacauuuuauauuu

SEQ ID NO: 3622807 - RNA, 20 nt, Human
aaggaccagcccuugaggga

SEQ ID NO: 3622808 - RNA, 17 nt, Human
aaggaccuauguuugcu

SEQ ID NO: 3622809 - RNA, 19 nt, Human
aaggaccugaaauuccaaa

SEQ ID NO: 3622810 - RNA, 18 nt, Human
aaggaccuuaagacagag

SEQ ID NO: 3622811 - RNA, 21 nt, Human
aaggaccuucacucuaagaug

SEQ ID NO: 3622812 - RNA, 15 nt, Human
aaggacuaggguccu

SEQ ID NO: 3622813 - RNA, 18 nt, Human
aaggacuaggguccuggg

SEQ ID NO: 3622814 - RNA, 16 nt, Human
aaggacuauaagaaua

SEQ ID NO: 3622815 - RNA, 13 nt, Human
aaggacuccaccc

SEQ ID NO: 3622816 - RNA, 19 nt, Human
aaggacugacugaggcagu

SEQ ID NO: 3622817 - RNA, 20 nt, Human
aaggacugagcacccucugg

SEQ ID NO: 3622818 - RNA, 15 nt, Human
aaggacugcauggua

SEQ ID NO: 3622819 - RNA, 21 nt, Human
aaggacugcaugguaauuuau

SEQ ID NO: 3622820 - RNA, 20 nt, Human
aaggacugugacaggcagca

SEQ ID NO: 3622821 - RNA, 14 nt, Human
aaggacugugcuuu

SEQ ID NO: 3622822 - RNA, 17 nt, Human
aaggacuuccuguccag

SEQ ID NO: 3622823 - RNA, 21 nt, Human
aaggacuucuuuaauuuugga

SEQ ID NO: 3622824 - RNA, 17 nt, Human
aaggacuugacuugcaa

SEQ ID NO: 3622825 - RNA, 17 nt, Human
aaggacuuuguacauuu

SEQ ID NO: 3622826 - RNA, 22 nt, Human
aagcuuagcaggagaggagagc

SEQ ID NO: 3622827 - RNA, 15 nt, Human
aagcuuauuaaugcu

SEQ ID NO: 3622828 - RNA, 14 nt, Human
aagcuuauuuaauu

SEQ ID NO: 3622829 - RNA, 19 nt, Human
aagcuucagugcugccgau

SEQ ID NO: 3622830 - RNA, 15 nt, Human
aagcuucaguuuccu

SEQ ID NO: 3622831 - RNA, 11 nt, Human
aagcuucccuc

SEQ ID NO: 3622832 - RNA, 20 nt, Human
aagcuucuuaaaugagaagg

SEQ ID NO: 3622833 - RNA, 12 nt, Human
aagcuugacucc

SEQ ID NO: 3622834 - RNA, 16 nt, Human
aagcuugguucuguga

SEQ ID NO: 3622835 - RNA, 21 nt, Human
aagcuugguucugugaacaag

SEQ ID NO: 3622836 - RNA, 16 nt, Human
aagcuuguguauccau

SEQ ID NO: 3622837 - RNA, 21 nt, Human
aagcuuguguauccauuauca

SEQ ID NO: 3622838 - RNA, 15 nt, Human
aagcuuguuuuccag

SEQ ID NO: 3622839 - RNA, 20 nt, Human
aagcuuuauacguguagcua

SEQ ID NO: 3622840 - RNA, 21 nt, Human
aagcuuuaugauuuucauaac

SEQ ID NO: 3622841 - RNA, 16 nt, Human
aagcuuuauuaccagu

SEQ ID NO: 3622842 - RNA, 13 nt, Human
aagcuuuauuucu

SEQ ID NO: 3622843 - RNA, 13 nt, Human
aagcuuuccugga

SEQ ID NO: 3622844 - RNA, 19 nt, Human
aagcuuucucugcuucagc

SEQ ID NO: 3622845 - RNA, 19 nt, Human
aagcuuuguccccugcuuc

SEQ ID NO: 3622846 - RNA, 22 nt, Human
aagcuuuguccccugcuucaga

SEQ ID NO: 3622847 - RNA, 16 nt, Human
aagcuuuuaugugaaa

SEQ ID NO: 3622848 - RNA, 19 nt, Human
aagcuuuuaugugaaacau

SEQ ID NO: 3622849 - RNA, 21 nt, Human
aagcuuuuaugugaaacaugu

SEQ ID NO: 3622850 - RNA, 13 nt, Human
aagcuuuuugaaa

SEQ ID NO: 3622851 - RNA, 17 nt, Human
aacucuugauuauccau

SEQ ID NO: 3622852 - RNA, 17 nt, Human
aacucuugguuucuuca

SEQ ID NO: 3622853 - RNA, 13 nt, Human
aacucuuucggua

SEQ ID NO: 3622854 - RNA, 19 nt, Human
aacucuuuguuauuugaaa

SEQ ID NO: 3622855 - RNA, 14 nt, Human
aacucuuuuaacag

SEQ ID NO: 3622856 - RNA, 23 nt, Human
aacucuuuuaucuccugaaaaaa

SEQ ID NO: 3622857 - RNA, 17 nt, Human
aacucuuuuugggcucc

SEQ ID NO: 3622858 - RNA, 23 nt, Human
aacucuuuuugggcuccuuuuuc

SEQ ID NO: 3622859 - RNA, 15 nt, Human
aacugaaaacauaaa

SEQ ID NO: 3622860 - RNA, 21 nt, Human
aacugaaaacucccauuuacg

SEQ ID NO: 3622861 - RNA, 15 nt, Human
aacugaaaagagagc

SEQ ID NO: 3622862 - RNA, 21 nt, Human
aacugaaaagagagcagagaa

SEQ ID NO: 3622863 - RNA, 12 nt, Human
aacugaaaaugu

SEQ ID NO: 3622864 - RNA, 13 nt, Human
aacugaaagugaa

SEQ ID NO: 3622865 - RNA, 14 nt, Human
aacugaaaguguuu

SEQ ID NO: 3622866 - RNA, 12 nt, Human
aacugaaaucau

SEQ ID NO: 3622867 - RNA, 14 nt, Human
aacugaacucugac

SEQ ID NO: 3622868 - RNA, 16 nt, Human
aacugaacucugacaa

SEQ ID NO: 3622869 - RNA, 23 nt, Human
aacugaacucugacaacagacuu

SEQ ID NO: 3622870 - RNA, 13 nt, Human
aacugaaggagaa

SEQ ID NO: 3622871 - RNA, 15 nt, Human
aacugaaggagaagg

SEQ ID NO: 3622872 - RNA, 20 nt, Human
aacugaauagcaaguggcau

SEQ ID NO: 3622873 - RNA, 18 nt, Human
aacugaaugaaaccccca

SEQ ID NO: 3622874 - RNA, 23 nt, Human
aacugaaugaaacccccacacac

SEQ ID NO: 3622875 - RNA, 20 nt, Human
aacugaauguuuauuccuug

SEQ ID NO: 3622876 - RNA, 19 nt, Human
aacugacaaaucaaguuuc

SEQ ID NO: 3622877 - RNA, 17 nt, Human
aacugacaagccaucuu

SEQ ID NO: 3622878 - RNA, 11 nt, Human
aacugacacag

SEQ ID NO: 3622879 - RNA, 21 nt, Human
aacugacaggcagccuggaca

SEQ ID NO: 3622880 - RNA, 12 nt, Human
aacugacaugau

SEQ ID NO: 3622881 - RNA, 18 nt, Human
aacugacaugcccucccu

SEQ ID NO: 3622882 - RNA, 22 nt, Human
aacugacuauucuugauguaaa

SEQ ID NO: 3622883 - RNA, 23 nt, Human
aacugacuauucuugauguaaaa

SEQ ID NO: 3622884 - RNA, 18 nt, Human
aacugacucuuaagaaga

SEQ ID NO: 3622885 - RNA, 18 nt, Human
aacugacuuuauccucag

SEQ ID NO: 3622886 - RNA, 23 nt, Human
aacugagaugugaacacaucagc

SEQ ID NO: 3622887 - RNA, 13 nt, Human
aacugaggaauuu

SEQ ID NO: 3622888 - RNA, 18 nt, Human
aacugaggaauuuucuuu

SEQ ID NO: 3622889 - RNA, 12 nt, Human
aacugaggcaga

SEQ ID NO: 3622890 - RNA, 19 nt, Human
aacugaggcuuagagauag

SEQ ID NO: 3622891 - RNA, 17 nt, Human
aacugauaguuacuguu

SEQ ID NO: 3622892 - RNA, 19 nt, Human
aacugauaguuacuguugu

SEQ ID NO: 3622893 - RNA, 18 nt, Human
aacugaucauguuuauga

SEQ ID NO: 3622894 - RNA, 13 nt, Human
aacugaucuguua

SEQ ID NO: 3622895 - RNA, 18 nt, Human
aacugauuaguaagucuu

SEQ ID NO: 3622896 - RNA, 17 nt, Human
aacugauuuuuuuuucc

SEQ ID NO: 3622897 - RNA, 20 nt, Human
aacugauuuuuuuuuccuuc

SEQ ID NO: 3622898 - RNA, 14 nt, Human
aacugcaaagaaag

SEQ ID NO: 3622899 - RNA, 15 nt, Human
aacugcaaagugaag

SEQ ID NO: 3622900 - RNA, 16 nt, Human
aacugcaagucacaaa

SEQ ID NO: 3622901 - RNA, 19 nt, Human
aacugcaagucacaaagga

SEQ ID NO: 3622902 - RNA, 19 nt, Human
aacugcaauaacuucugac

SEQ ID NO: 3622903 - RNA, 20 nt, Human
aacugcaauacaaguuucau

SEQ ID NO: 3622904 - RNA, 13 nt, Human
aacugcaauagag

SEQ ID NO: 3622905 - RNA, 16 nt, Human
aacugcaauagagacu

SEQ ID NO: 3622906 - RNA, 19 nt, Human
aacugcacaugaagaaaua

SEQ ID NO: 3622907 - RNA, 18 nt, Human
aacugcacaugauuucac

SEQ ID NO: 3622908 - RNA, 23 nt, Human
aacugcacaugauuucacaaaua

SEQ ID NO: 3622909 - RNA, 20 nt, Human
aacugcaccaguugcugcuu

SEQ ID NO: 3622910 - RNA, 20 nt, Human
aacugcagcaaucuuugaaa

SEQ ID NO: 3622911 - RNA, 22 nt, Human
aacugcagcaaucuuugaaaga

SEQ ID NO: 3622912 - RNA, 14 nt, Human
aacugcaggcccug

SEQ ID NO: 3622913 - RNA, 17 nt, Human
aacugcaggcccuggcc

SEQ ID NO: 3622914 - RNA, 21 nt, Human
aacugcauggaccuaacauuc

SEQ ID NO: 3622915 - RNA, 18 nt, Human
aacugcauguauaaauga

SEQ ID NO: 3622916 - RNA, 14 nt, Human
aacugcauuagaaa

SEQ ID NO: 3622917 - RNA, 22 nt, Human
aacugcauugacuuucaguaaa

SEQ ID NO: 3622918 - RNA, 16 nt, Human
aacugcauuggcuuug

SEQ ID NO: 3622919 - RNA, 14 nt, Human
aacugccaggcucu

SEQ ID NO: 3622920 - RNA, 19 nt, Human
aacugccaguuuuguuucc

SEQ ID NO: 3622921 - RNA, 11 nt, Human
aacugccauua

SEQ ID NO: 3622922 - RNA, 22 nt, Human
aacugccauuauuuucugucag

SEQ ID NO: 3622923 - RNA, 23 nt, Human
aacugccauuauuuucugucaga

SEQ ID NO: 3622924 - RNA, 16 nt, Human
aacugcccccucugcc

SEQ ID NO: 3622925 - RNA, 17 nt, Human
aacugcccccucugccc

SEQ ID NO: 3622926 - RNA, 19 nt, Human
aacugcccccucugcccug

SEQ ID NO: 3622927 - RNA, 20 nt, Human
aacugcccccucugcccugc

SEQ ID NO: 3622928 - RNA, 17 nt, Human
aacugccguaauuuaac

SEQ ID NO: 3622929 - RNA, 18 nt, Human
aacugccguaauuuaacu

SEQ ID NO: 3622930 - RNA, 16 nt, Human
aacugccuacuccaaa

SEQ ID NO: 3622931 - RNA, 20 nt, Human
aacugccuacuccaaaaugu

SEQ ID NO: 3622932 - RNA, 14 nt, Human
aacugccuagaaac

SEQ ID NO: 3622933 - RNA, 17 nt, Human
aacugccuuggcuucag

SEQ ID NO: 3622934 - RNA, 20 nt, Human
aacugcugacuguuuucucu

SEQ ID NO: 3622935 - RNA, 20 nt, Human
aacugcugaugcucaugguc

SEQ ID NO: 3622936 - RNA, 14 nt, Human
aacugcugcuuuuu

SEQ ID NO: 3622937 - RNA, 23 nt, Human
aacugcuuccuauaauuuugaua

SEQ ID NO: 3622938 - RNA, 17 nt, Human
aacugcuuguuuccuag

SEQ ID NO: 3622939 - RNA, 20 nt, Human
aacugcuuuuuuuuuuccag

SEQ ID NO: 3622940 - RNA, 13 nt, Human
aacuggaaagaag

SEQ ID NO: 3622941 - RNA, 19 nt, Human
aacuggaaauacuagauuu

SEQ ID NO: 3622942 - RNA, 19 nt, Human
aacuggaaucagcucagga

SEQ ID NO: 3622943 - RNA, 14 nt, Human
aacuggaauuaaaa

SEQ ID NO: 3622944 - RNA, 14 nt, Human
aacuggacccuguu

SEQ ID NO: 3622945 - RNA, 17 nt, Human
aacuggaccuguauauu

SEQ ID NO: 3622946 - RNA, 13 nt, Human
aacuggacucagg

SEQ ID NO: 3622947 - RNA, 21 nt, Human
aacuggacucaggaugcccag

SEQ ID NO: 3622948 - RNA, 12 nt, Human
aacuggagcccc

SEQ ID NO: 3622949 - RNA, 15 nt, Human
aacuggauuaaacuu

SEQ ID NO: 3622950 - RNA, 22 nt, Human
aacuggcaaagcagaaugugau

SEQ ID NO: 3622951 - RNA, 14 nt, Human
aacuggcaggcagg

SEQ ID NO: 3622952 - RNA, 19 nt, Human
aacuggccaagcugaggug

SEQ ID NO: 3622953 - RNA, 20 nt, Human
aacuggccccggaucagagc

SEQ ID NO: 3622954 - RNA, 17 nt, Human
aacuggccggucugcaa

SEQ ID NO: 3622955 - RNA, 23 nt, Human
aacuggccggucugcaagucaga

SEQ ID NO: 3622956 - RNA, 12 nt, Human
aacuggcugugu

SEQ ID NO: 3622957 - RNA, 17 nt, Human
aacugggacaggggaga

SEQ ID NO: 3622958 - RNA, 23 nt, Human
aacugggaugaaacuaaagcaau

SEQ ID NO: 3622959 - RNA, 19 nt, Human
aacugggcauauuucuaau

SEQ ID NO: 3622960 - RNA, 21 nt, Human
aacugggggagggugaaguga

SEQ ID NO: 3622961 - RNA, 18 nt, Human
aacugggguugagggcca

SEQ ID NO: 3622962 - RNA, 19 nt, Human
aacuggucaccaugaaacu

SEQ ID NO: 3622963 - RNA, 20 nt, Human
aacuggugcacuuuguaaau

SEQ ID NO: 3622964 - RNA, 15 nt, Human
aacuguaaaauacuu

SEQ ID NO: 3622965 - RNA, 12 nt, Human
aacuguaaauca

SEQ ID NO: 3622966 - RNA, 13 nt, Human
aacuguaauacaa

SEQ ID NO: 3622967 - RNA, 11 nt, Human
aacuguacagu

SEQ ID NO: 3622968 - RNA, 18 nt, Human
aacuguacauuuaaaauu

SEQ ID NO: 3622969 - RNA, 13 nt, Human
aacuguacuucac

SEQ ID NO: 3622970 - RNA, 15 nt, Human
aacuguacuucacug

SEQ ID NO: 3622971 - RNA, 15 nt, Human
aacuugguuauacau

SEQ ID NO: 3622972 - RNA, 21 nt, Human
aacuugguuauacaugacacu

SEQ ID NO: 3622973 - RNA, 23 nt, Human
aacuugguucccauuugcuccuu

SEQ ID NO: 3622974 - RNA, 21 nt, Human
aacuugguuuugcuacauaau

SEQ ID NO: 3622975 - RNA, 22 nt, Human
aacuugguuuugcuacauaauu

SEQ ID NO: 3622976 - RNA, 14 nt, Human
aacuuguaaauaca

SEQ ID NO: 3622977 - RNA, 15 nt, Human
aacuuguaaauacac

SEQ ID NO: 3622978 - RNA, 18 nt, Human
aacuuguaauaaacccuu

SEQ ID NO: 3622979 - RNA, 13 nt, Human
aacuuguagcugu

SEQ ID NO: 3622980 - RNA, 16 nt, Human
aacuuguauuaugugu

SEQ ID NO: 3622981 - RNA, 12 nt, Human
aacuugucacuu

SEQ ID NO: 3622982 - RNA, 13 nt, Human
aacuugucacuug

SEQ ID NO: 3622983 - RNA, 19 nt, Human
aacuuguucuuccaaagca

SEQ ID NO: 3622984 - RNA, 16 nt, Human
aacuuguuugcuguga

SEQ ID NO: 3622985 - RNA, 20 nt, Human
aacuuguuugcugugaacaa

SEQ ID NO: 3622986 - RNA, 13 nt, Human
aacuuguuuucug

SEQ ID NO: 3622987 - RNA, 19 nt, Human
aacuuuaaaaaauauuuau

SEQ ID NO: 3622988 - RNA, 21 nt, Human
aacuuuaagaacuaaaauguu

SEQ ID NO: 3622989 - RNA, 16 nt, Human
aacuuuaagcagcucu

SEQ ID NO: 3622990 - RNA, 15 nt, Human
aacuuuaauauguau

SEQ ID NO: 3622991 - RNA, 16 nt, Human
aacuuuaauauguauu

SEQ ID NO: 3622992 - RNA, 13 nt, Human
aacuuuaccuuuu

SEQ ID NO: 3622993 - RNA, 22 nt, Human
aacuuuaccuuuuuuauacaua

SEQ ID NO: 3622994 - RNA, 19 nt, Human
aacuuuacuaagaugacau

SEQ ID NO: 3622995 - RNA, 20 nt, Human
aacuuuagaaauaaaccuua

SEQ ID NO: 3622996 - RNA, 22 nt, Human
aacuuuagaagugcauuucuga

SEQ ID NO: 3622997 - RNA, 22 nt, Human
aacuuuagaguagcaugagaga

SEQ ID NO: 3622998 - RNA, 15 nt, Human
aacuuuauaaaucca

SEQ ID NO: 3622999 - RNA, 13 nt, Human
aacuuuauacauu

SEQ ID NO: 3623000 - RNA, 16 nt, Human
aacuuuauacauuagu

SEQ ID NO: 3623001 - RNA, 18 nt, Human
aacuuuauacauuaguaa

SEQ ID NO: 3623002 - RNA, 21 nt, Human
aacuuuaucacauuauuugca

SEQ ID NO: 3623003 - RNA, 22 nt, Human
aacuuuaucagggaaacuaaga

SEQ ID NO: 3623004 - RNA, 14 nt, Human
aacuuuauguguaa

SEQ ID NO: 3623005 - RNA, 19 nt, Human
aacuuuauuaaauacaaaa

SEQ ID NO: 3623006 - RNA, 12 nt, Human
aacuuuauucuu

SEQ ID NO: 3623007 - RNA, 23 nt, Human
aacuuuauucuugaaagaagaau

SEQ ID NO: 3623008 - RNA, 13 nt, Human
aacuuuauuucca

SEQ ID NO: 3623009 - RNA, 16 nt, Human
aacuuucaagaacuug

SEQ ID NO: 3623010 - RNA, 19 nt, Human
aacuuucauuccuucagau

SEQ ID NO: 3623011 - RNA, 12 nt, Human
aagcuuuuugga

SEQ ID NO: 3623012 - RNA, 14 nt, Human
aagcuuuuuggaau

SEQ ID NO: 3623013 - RNA, 16 nt, Human
aaggaaaaaauaacaa

SEQ ID NO: 3623014 - RNA, 17 nt, Human
aaggaaaaaauguugga

SEQ ID NO: 3623015 - RNA, 15 nt, Human
aaggaaaaacaaacu

SEQ ID NO: 3623016 - RNA, 16 nt, Human
aaggaaaaacacaagc

SEQ ID NO: 3623017 - RNA, 19 nt, Human
aaggaaaaagcacaagaag

SEQ ID NO: 3623018 - RNA, 14 nt, Human
aaggaaaaaugugu

SEQ ID NO: 3623019 - RNA, 15 nt, Human
aaggaaaaaugugua

SEQ ID NO: 3623020 - RNA, 16 nt, Human
aaggaaaaauguguaa

SEQ ID NO: 3623021 - RNA, 23 nt, Human
aaggaaaacuaccuguauuuaaa

SEQ ID NO: 3623022 - RNA, 13 nt, Human
aaggaaaagaaaa

SEQ ID NO: 3623023 - RNA, 14 nt, Human
aaggaaaagaaaaa

SEQ ID NO: 3623024 - RNA, 22 nt, Human
aaggaaaaguuuaauauuaaag

SEQ ID NO: 3623025 - RNA, 20 nt, Human
aaggaaacaaccaugucauu

SEQ ID NO: 3623026 - RNA, 22 nt, Human
aaggaaacccagcucuggucca

SEQ ID NO: 3623027 - RNA, 16 nt, Human
aaggaaacgcuaccuc

SEQ ID NO: 3623028 - RNA, 12 nt, Human
aaggaaacucuu

SEQ ID NO: 3623029 - RNA, 13 nt, Human
aaggaaacucuua

SEQ ID NO: 3623030 - RNA, 19 nt, Human
aaggaaacucuuaucucag

SEQ ID NO: 3623031 - RNA, 20 nt, Human
aaggaaacuggguuccugca

SEQ ID NO: 3623032 - RNA, 12 nt, Human
aaggaaagaaaa

SEQ ID NO: 3623033 - RNA, 16 nt, Human
aaggaaagcaauaaau

SEQ ID NO: 3623034 - RNA, 22 nt, Human
aaggaaagggggucccaguggg

SEQ ID NO: 3623035 - RNA, 22 nt, Human
aaggaaauaccaguucugggca

SEQ ID NO: 3623036 - RNA, 20 nt, Human
aaggaaauacccuucuuuua

SEQ ID NO: 3623037 - RNA, 22 nt, Human
aaggaaaucucaccccauccca

SEQ ID NO: 3623038 - RNA, 21 nt, Human
aaggaaaugauugaggaguga

SEQ ID NO: 3623039 - RNA, 23 nt, Human
aaggaaccaaagcgaauuuuaaa

SEQ ID NO: 3623040 - RNA, 21 nt, Human
aaggaaccuuccuuccugcuu

SEQ ID NO: 3623041 - RNA, 23 nt, Human
aaggaaccuuccuuccugcuuga

SEQ ID NO: 3623042 - RNA, 14 nt, Human
aaggaacugcagca

SEQ ID NO: 3623043 - RNA, 14 nt, Human
aaggaagacuucau

SEQ ID NO: 3623044 - RNA, 21 nt, Human
aaggaagagccaauguuuucc

SEQ ID NO: 3623045 - RNA, 20 nt, Human
aaggaagcacucuguauauu

SEQ ID NO: 3623046 - RNA, 17 nt, Human
aaggaaggcagggagga

SEQ ID NO: 3623047 - RNA, 17 nt, Human
aaggaagguaguucaag

SEQ ID NO: 3623048 - RNA, 16 nt, Human
aaggaagguuuucucc

SEQ ID NO: 3623049 - RNA, 17 nt, Human
aaggaauaccugucccc

SEQ ID NO: 3623050 - RNA, 21 nt, Human
aaggaaucuuuaagcagagaa

SEQ ID NO: 3623051 - RNA, 23 nt, Human
aaggaaugauuaauuaaaacaca

SEQ ID NO: 3623052 - RNA, 15 nt, Human
aaggaaugcaaagau

SEQ ID NO: 3623053 - RNA, 14 nt, Human
aaggaauuucuuaa

SEQ ID NO: 3623054 - RNA, 16 nt, Human
aaggaauuucuuaacu

SEQ ID NO: 3623055 - RNA, 19 nt, Human
aaggaauuucuuaacuucu

SEQ ID NO: 3623056 - RNA, 23 nt, Human
aaggacaaaaaugaacugaaguu

SEQ ID NO: 3623057 - RNA, 14 nt, Human
aaggacaauuucaa

SEQ ID NO: 3623058 - RNA, 17 nt, Human
aaggacagaguaugaac

SEQ ID NO: 3623059 - RNA, 16 nt, Human
aaggacaugaugcuuu

SEQ ID NO: 3623060 - RNA, 19 nt, Human
aaggaccaacaagggcagu

SEQ ID NO: 3623061 - RNA, 23 nt, Human
aaggaccacauuuuauauuuauu

SEQ ID NO: 3623062 - RNA, 20 nt, Human
aaggaccccucaccuugcaa

SEQ ID NO: 3623063 - RNA, 22 nt, Human
aaggacccggaggggccuggca

SEQ ID NO: 3623064 - RNA, 22 nt, Human
aaggaccuauguuugcucagaa

SEQ ID NO: 3623065 - RNA, 23 nt, Human
aaggaccuccucuucccccuucc

SEQ ID NO: 3623066 - RNA, 13 nt, Human
aaggaccuccuga

SEQ ID NO: 3623067 - RNA, 19 nt, Human
aaggaccuuaagacagagu

SEQ ID NO: 3623068 - RNA, 14 nt, Human
aaggacgcacugag

SEQ ID NO: 3623069 - RNA, 19 nt, Human
aaggacuaauagaaaagua

SEQ ID NO: 3623070 - RNA, 21 nt, Human
aaggacuacguuaagggaagg

SEQ ID NO: 3623071 - RNA, 13 nt, Human
aaggacuaggguc

SEQ ID NO: 3623072 - RNA, 20 nt, Human
aaggacuaggguccugggga

SEQ ID NO: 3623073 - RNA, 22 nt, Human
aaggacuccuccuuuuuccaug

SEQ ID NO: 3623074 - RNA, 12 nt, Human
aaggacucuggg

SEQ ID NO: 3623075 - RNA, 16 nt, Human
aaggacucuuccagag

SEQ ID NO: 3623076 - RNA, 12 nt, Human
aaggacugacug

SEQ ID NO: 3623077 - RNA, 13 nt, Human
aaggacugaggga

SEQ ID NO: 3623078 - RNA, 14 nt, Human
aaggacuguaaucu

SEQ ID NO: 3623079 - RNA, 13 nt, Human
aaggacuuccuga

SEQ ID NO: 3623080 - RNA, 22 nt, Human
aaggacuuccugauugguuucu

SEQ ID NO: 3623081 - RNA, 14 nt, Human
aaggacuucuuuaa

SEQ ID NO: 3623082 - RNA, 15 nt, Human
aaggacuucuuuaau

SEQ ID NO: 3623083 - RNA, 23 nt, Human
aaggacuucuuuaauuuuggaau

SEQ ID NO: 3623084 - RNA, 12 nt, Human
aaggacuugaaa

SEQ ID NO: 3623085 - RNA, 17 nt, Human
aaggacuugaaagcauc

SEQ ID NO: 3623086 - RNA, 19 nt, Human
aaggacuugaaagcaucca

SEQ ID NO: 3623087 - RNA, 22 nt, Human
aaggacuugaaagcauccaugu

SEQ ID NO: 3623088 - RNA, 23 nt, Human
aaggacuuguuagaucuaguuca

SEQ ID NO: 3623089 - RNA, 14 nt, Human
aaggacuuuguaca

SEQ ID NO: 3623090 - RNA, 15 nt, Human
aaggacuuuguacau

SEQ ID NO: 3623091 - RNA, 12 nt, Human
aaggagaacaaa

SEQ ID NO: 3623092 - RNA, 17 nt, Human
aaggagaaucaucagga

SEQ ID NO: 3623093 - RNA, 18 nt, Human
aaggagaaucaucaggac

SEQ ID NO: 3623094 - RNA, 19 nt, Human
aaggagaaucaucaggacc

SEQ ID NO: 3623095 - RNA, 13 nt, Human
aaggagacacaga

SEQ ID NO: 3623096 - RNA, 16 nt, Human
aaggagacacagaugu

SEQ ID NO: 3623097 - RNA, 20 nt, Human
aaggagacucaccucugccu

SEQ ID NO: 3623098 - RNA, 23 nt, Human
aaggagagacucccaugaagccu

SEQ ID NO: 3623099 - RNA, 19 nt, Human
aaggagagagcaaagggug

SEQ ID NO: 3623100 - RNA, 11 nt, Human
aaggagagcua

SEQ ID NO: 3623101 - RNA, 22 nt, Human
aaggagagucuugcagugauua

SEQ ID NO: 3623102 - RNA, 15 nt, Human
aaggagaguggccau

SEQ ID NO: 3623103 - RNA, 15 nt, Human
aaggagaugaagcaa

SEQ ID NO: 3623104 - RNA, 22 nt, Human
aaggagcaagucagaauagaaa

SEQ ID NO: 3623105 - RNA, 12 nt, Human
aaggagcacagg

SEQ ID NO: 3623106 - RNA, 21 nt, Human
aaggagcacaggucccaccuc

SEQ ID NO: 3623107 - RNA, 23 nt, Human
aaggagccaauugauuucaacag

SEQ ID NO: 3623108 - RNA, 20 nt, Human
aaggagcccuuaucugugcu

SEQ ID NO: 3623109 - RNA, 16 nt, Human
aaggagccuaggccag

SEQ ID NO: 3623110 - RNA, 18 nt, Human
aaggagccuaggccaggu

SEQ ID NO: 3623111 - RNA, 19 nt, Human
aaggagccuaggccaggug

SEQ ID NO: 3623112 - RNA, 21 nt, Human
aaggagccuaggccaggugca

SEQ ID NO: 3623113 - RNA, 10 nt, Human
aaggagccug

SEQ ID NO: 3623114 - RNA, 13 nt, Human
aaggagccuguga

SEQ ID NO: 3623115 - RNA, 16 nt, Human
aaguaauuuggaaauu

SEQ ID NO: 3623116 - RNA, 19 nt, Human
aaguacaaacuaaggugcu

SEQ ID NO: 3623117 - RNA, 21 nt, Human
aaguacaauaauucauauucu

SEQ ID NO: 3623118 - RNA, 19 nt, Human
aaguacaauguguuuuucu

SEQ ID NO: 3623119 - RNA, 17 nt, Human
aaguacacaauaagcaa

SEQ ID NO: 3623120 - RNA, 18 nt, Human
aaguacacaauaagcaaa

SEQ ID NO: 3623121 - RNA, 19 nt, Human
aaguacacaauaagcaaaa

SEQ ID NO: 3623122 - RNA, 15 nt, Human
aaguacacucugcug

SEQ ID NO: 3623123 - RNA, 19 nt, Human
aaguacacucugcuguuug

SEQ ID NO: 3623124 - RNA, 13 nt, Human
aaguacagaauuu

SEQ ID NO: 3623125 - RNA, 16 nt, Human
aaguacagaauuugaa

SEQ ID NO: 3623126 - RNA, 12 nt, Human
aaguacagagaa

SEQ ID NO: 3623127 - RNA, 18 nt, Human
aaguacagguacuuuguc

SEQ ID NO: 3623128 - RNA, 20 nt, Human
aaguacauauuaggaaaaua

SEQ ID NO: 3623129 - RNA, 17 nt, Human
aaguacaugaauacaaa

SEQ ID NO: 3623130 - RNA, 13 nt, Human
aaguacauuuaau

SEQ ID NO: 3623131 - RNA, 16 nt, Human
aaguacauuuuuugaa

SEQ ID NO: 3623132 - RNA, 13 nt, Human
aaguaccagacua

SEQ ID NO: 3623133 - RNA, 18 nt, Human
aaguacccguucacauuu

SEQ ID NO: 3623134 - RNA, 17 nt, Human
aaguacuauaauuuacc

SEQ ID NO: 3623135 - RNA, 17 nt, Human
aaguacugcuguaaaua

SEQ ID NO: 3623136 - RNA, 19 nt, Human
aaguacuguuuaccauuuu

SEQ ID NO: 3623137 - RNA, 11 nt, Human
aaguagaaaug

SEQ ID NO: 3623138 - RNA, 15 nt, Human
aaguagaacuuugua

SEQ ID NO: 3623139 - RNA, 16 nt, Human
aaguagaacuuuguau

SEQ ID NO: 3623140 - RNA, 12 nt, Human
aaguagaagagg

SEQ ID NO: 3623141 - RNA, 19 nt, Human
aaguagaagucuuagaugu

SEQ ID NO: 3623142 - RNA, 19 nt, Human
aaguagacaaucauuguuu

SEQ ID NO: 3623143 - RNA, 19 nt, Human
aaguagacaguuuugagaa

SEQ ID NO: 3623144 - RNA, 16 nt, Human
aaguagcacaggcuga

SEQ ID NO: 3623145 - RNA, 19 nt, Human
aaguaggggaagaauaauu

SEQ ID NO: 3623146 - RNA, 20 nt, Human
aaguaggggaagaauaauuu

SEQ ID NO: 3623147 - RNA, 15 nt, Human
aaguagggggucuaa

SEQ ID NO: 3623148 - RNA, 19 nt, Human
aaguagggguuguggguga

SEQ ID NO: 3623149 - RNA, 22 nt, Human
aaguaguacuucuucuguaaua

SEQ ID NO: 3623150 - RNA, 17 nt, Human
aaguaguccuuggcaua

SEQ ID NO: 3623151 - RNA, 22 nt, Human
aaguagugucuggaucaguaaa

SEQ ID NO: 3623152 - RNA, 23 nt, Human
aaguagugucuggaucaguaaaa

SEQ ID NO: 3623153 - RNA, 13 nt, Human
aaguaguuaucau

SEQ ID NO: 3623154 - RNA, 17 nt, Human
aaguaguuaucauguua

SEQ ID NO: 3623155 - RNA, 14 nt, Human
aaguaguucuguau

SEQ ID NO: 3623156 - RNA, 20 nt, Human
aaguaguucuguauuugaaa

SEQ ID NO: 3623157 - RNA, 21 nt, Human
aaguaguucuguauuugaaag

SEQ ID NO: 3623158 - RNA, 20 nt, Human
aaguaguuuguauaacuucu

SEQ ID NO: 3623159 - RNA, 22 nt, Human
aaguauaaaauaguaugaaaau

SEQ ID NO: 3623160 - RNA, 15 nt, Human
aaguauaaacuuuua

SEQ ID NO: 3623161 - RNA, 21 nt, Human
aaguauaaauuuguguaauau

SEQ ID NO: 3623162 - RNA, 13 nt, Human
aaguauaauguuu

SEQ ID NO: 3623163 - RNA, 21 nt, Human
aaguauacaguucaauaaacu

SEQ ID NO: 3623164 - RNA, 18 nt, Human
aaguauacuguauuuuua

SEQ ID NO: 3623165 - RNA, 15 nt, Human
aaguauacuuauauu

SEQ ID NO: 3623166 - RNA, 12 nt, Human
aaguauagaaaa

SEQ ID NO: 3623167 - RNA, 22 nt, Human
aaguauagccuauggcagaaaa

SEQ ID NO: 3623168 - RNA, 18 nt, Human
aaguauauaaauuggcuu

SEQ ID NO: 3623169 - RNA, 11 nt, Human
aaguauauaua

SEQ ID NO: 3623170 - RNA, 18 nt, Human
aaguauauauauauauua

SEQ ID NO: 3623171 - RNA, 18 nt, Human
aaguaucaaguauagaaa

SEQ ID NO: 3623172 - RNA, 21 nt, Human
aaguaucauggaaauauuaug

SEQ ID NO: 3623173 - RNA, 16 nt, Human
aaguaucccuacugua

SEQ ID NO: 3623174 - RNA, 17 nt, Human
aaguaucccuacuguaa

SEQ ID NO: 3623175 - RNA, 21 nt, Human
aaguaucgggggcuggggcag

SEQ ID NO: 3623176 - RNA, 18 nt, Human
aaguaucuaaaaguguca

SEQ ID NO: 3623177 - RNA, 22 nt, Human
aaguaucugacaucucugcaau

SEQ ID NO: 3623178 - RNA, 14 nt, Human
aaguaugaaucuau

SEQ ID NO: 3623179 - RNA, 23 nt, Human
aaguaugaaucuaugccaaagau

SEQ ID NO: 3623180 - RNA, 15 nt, Human
aaguaugggaaauga

SEQ ID NO: 3623181 - RNA, 13 nt, Human
aaguauguaaaca

SEQ ID NO: 3623182 - RNA, 20 nt, Human
aaguauguauauuaaaaaag

SEQ ID NO: 3623183 - RNA, 21 nt, Human
aaguauguauuauuuacauuu

SEQ ID NO: 3623184 - RNA, 21 nt, Human
aaguauguuagugcaaauugu

SEQ ID NO: 3623185 - RNA, 23 nt, Human
aaguauguuagugcaaauuguca

SEQ ID NO: 3623186 - RNA, 16 nt, Human
aaguauuaagcauaua

SEQ ID NO: 3623187 - RNA, 18 nt, Human
aaguauuaagcauauauu

SEQ ID NO: 3623188 - RNA, 17 nt, Human
aaguauuaauucucuuu

SEQ ID NO: 3623189 - RNA, 16 nt, Human
aaguauuacuaaauug

SEQ ID NO: 3623190 - RNA, 20 nt, Human
aaguauuagggguaauauau

SEQ ID NO: 3623191 - RNA, 22 nt, Human
aaguauuagggguaauauauug

SEQ ID NO: 3623192 - RNA, 17 nt, Human
aaguauuauaaauuaug

SEQ ID NO: 3623193 - RNA, 15 nt, Human
aaguauuauuuucca

SEQ ID NO: 3623194 - RNA, 15 nt, Human
aaguauuccaccuua

SEQ ID NO: 3623195 - RNA, 19 nt, Human
aaguauuccaccuuaaauu

SEQ ID NO: 3623196 - RNA, 21 nt, Human
aaguauuccaccuuaaauuaa

SEQ ID NO: 3623197 - RNA, 22 nt, Human
aaguauuccuuuccugaucacu

SEQ ID NO: 3623198 - RNA, 13 nt, Human
aaguauucuaaau

SEQ ID NO: 3623199 - RNA, 21 nt, Human
aaguauucuguacucuuagau

SEQ ID NO: 3623200 - RNA, 19 nt, Human
aaguauugcaucuguauaa

SEQ ID NO: 3623201 - RNA, 19 nt, Human
aaguauuuaagccuaaaga

SEQ ID NO: 3623202 - RNA, 17 nt, Human
aaguauuuaauuagugc

SEQ ID NO: 3623203 - RNA, 11 nt, Human
aaguauuuagg

SEQ ID NO: 3623204 - RNA, 13 nt, Human
aaguauuuauaau

SEQ ID NO: 3623205 - RNA, 14 nt, Human
aaguauuuauauau

SEQ ID NO: 3623206 - RNA, 15 nt, Human
aaguauuuauauauu

SEQ ID NO: 3623207 - RNA, 17 nt, Human
aaguauuuauauauuua

SEQ ID NO: 3623208 - RNA, 20 nt, Human
aaguauuuauauauuuauaa

SEQ ID NO: 3623209 - RNA, 21 nt, Human
aaguauuuauauauuuauaac

SEQ ID NO: 3623210 - RNA, 13 nt, Human
aaguauuucaaau

SEQ ID NO: 3623211 - RNA, 22 nt, Human
aaguauuucaaauuggagcuuc

SEQ ID NO: 3623212 - RNA, 13 nt, Human
aaguauuugggaa

SEQ ID NO: 3623213 - RNA, 19 nt, Human
aaguauuuguuaauuuaga

SEQ ID NO: 3623214 - RNA, 21 nt, Human
aaguauuuguuaauuuagaaa

SEQ ID NO: 3623215 - RNA, 22 nt, Human
aaguauuuucauaaguauuuca

SEQ ID NO: 3623216 - RNA, 14 nt, Human
aauaaaguaucuac

SEQ ID NO: 3623217 - RNA, 15 nt, Human
aauaaaguaucuaca

SEQ ID NO: 3623218 - RNA, 15 nt, Human
aauaaaguauuuaau

SEQ ID NO: 3623219 - RNA, 18 nt, Human
aauaaaguguaacaauug

SEQ ID NO: 3623220 - RNA, 13 nt, Human
aauaaaguguuuu

SEQ ID NO: 3623221 - RNA, 15 nt, Human
aauaaaguuugaucu

SEQ ID NO: 3623222 - RNA, 19 nt, Human
aauaaaguuugcuuagaaa

SEQ ID NO: 3623223 - RNA, 21 nt, Human
aauaaauagcuagacugguga

SEQ ID NO: 3623224 - RNA, 12 nt, Human
aauaaauauacc

SEQ ID NO: 3623225 - RNA, 11 nt, Human
aauaaauauau

SEQ ID NO: 3623226 - RNA, 16 nt, Human
aauaaauauauauauc

SEQ ID NO: 3623227 - RNA, 15 nt, Human
aauaaauauaucuac

SEQ ID NO: 3623228 - RNA, 20 nt, Human
aauaaauauccuuuaauuga

SEQ ID NO: 3623229 - RNA, 15 nt, Human
aauaaauaucuguac

SEQ ID NO: 3623230 - RNA, 11 nt, Human
aauaaauauga

SEQ ID NO: 3623231 - RNA, 20 nt, Human
aauaaauaugccucuccuuu

SEQ ID NO: 3623232 - RNA, 21 nt, Human
aauaaauauugucuuuuugua

SEQ ID NO: 3623233 - RNA, 22 nt, Human
aauaaaugagcuauguauuaac

SEQ ID NO: 3623234 - RNA, 17 nt, Human
aauaaaugcaauaugua

SEQ ID NO: 3623235 - RNA, 15 nt, Human
aauaaaugcccucuu

SEQ ID NO: 3623236 - RNA, 15 nt, Human
aauaaauggaaauca

SEQ ID NO: 3623237 - RNA, 22 nt, Human
aauaaaugguuuggugcuuuuu

SEQ ID NO: 3623238 - RNA, 14 nt, Human
aauaaauguaccug

SEQ ID NO: 3623239 - RNA, 20 nt, Human
aauaaauguaucuuauucac

SEQ ID NO: 3623240 - RNA, 21 nt, Human
aauaaauguaucuuauucaca

SEQ ID NO: 3623241 - RNA, 11 nt, Human
aauaaauguca

SEQ ID NO: 3623242 - RNA, 12 nt, Human
aauaaaugucuu

SEQ ID NO: 3623243 - RNA, 18 nt, Human
aauaaauguuuuauuucu

SEQ ID NO: 3623244 - RNA, 14 nt, Human
aauaaauucagaua

SEQ ID NO: 3623245 - RNA, 21 nt, Human
aauaaauucccaacuucucuu

SEQ ID NO: 3623246 - RNA, 20 nt, Human
aauaaauuguaauuguaaag

SEQ ID NO: 3623247 - RNA, 12 nt, Human
aauaaauuguau

SEQ ID NO: 3623248 - RNA, 18 nt, Human
aauaaauuguauauucac

SEQ ID NO: 3623249 - RNA, 22 nt, Human
aauaaauuguuuggcuuccucc

SEQ ID NO: 3623250 - RNA, 21 nt, Human
aauaaauuugacuuuucugua

SEQ ID NO: 3623251 - RNA, 18 nt, Human
aauaaauuugguucuaau

SEQ ID NO: 3623252 - RNA, 21 nt, Human
aauaaauuugguucuaauaga

SEQ ID NO: 3623253 - RNA, 13 nt, Human
aauaaauuuugaa

SEQ ID NO: 3623254 - RNA, 20 nt, Human
aauaaauuuugaaaaguaau

SEQ ID NO: 3623255 - RNA, 15 nt, Human
aauaacaauaaaaga

SEQ ID NO: 3623256 - RNA, 12 nt, Human
aauaacacacau

SEQ ID NO: 3623257 - RNA, 16 nt, Human
aauaacacagagagac

SEQ ID NO: 3623258 - RNA, 15 nt, Human
aauaacagauuucuc

SEQ ID NO: 3623259 - RNA, 15 nt, Human
aauaacagugcauau

SEQ ID NO: 3623260 - RNA, 22 nt, Human
aagucagaucugccuaaggacu

SEQ ID NO: 3623261 - RNA, 21 nt, Human
aagucagaugugguaacuguu

SEQ ID NO: 3623262 - RNA, 14 nt, Human
aagucagauguuug

SEQ ID NO: 3623263 - RNA, 22 nt, Human
aagucagcuccagcuuucugcc

SEQ ID NO: 3623264 - RNA, 16 nt, Human
aagucaggaaucauca

SEQ ID NO: 3623265 - RNA, 21 nt, Human
aagucaggcccuuauuuucaa

SEQ ID NO: 3623266 - RNA, 17 nt, Human
aagucaguguugagaug

SEQ ID NO: 3623267 - RNA, 15 nt, Human
aagucaguuucuaca

SEQ ID NO: 3623268 - RNA, 15 nt, Human
aagucauaauugcau

SEQ ID NO: 3623269 - RNA, 17 nt, Human
aagucauagccauaaau

SEQ ID NO: 3623270 - RNA, 20 nt, Human
aagucaucuugcuaccagua

SEQ ID NO: 3623271 - RNA, 23 nt, Human
aagucaucuugcuaccaguauuu

SEQ ID NO: 3623272 - RNA, 14 nt, Human
aagucaugaacaca

SEQ ID NO: 3623273 - RNA, 17 nt, Human
aagucaugaagcccaag

SEQ ID NO: 3623274 - RNA, 17 nt, Human
aagucaugauguuuuua

SEQ ID NO: 3623275 - RNA, 21 nt, Human
aagucaugauguuuuuaaaau

SEQ ID NO: 3623276 - RNA, 17 nt, Human
aagucaugcaaaggcug

SEQ ID NO: 3623277 - RNA, 21 nt, Human
aagucaugcguuuaaucacau

SEQ ID NO: 3623278 - RNA, 15 nt, Human
aagucaugcuccccu

SEQ ID NO: 3623279 - RNA, 15 nt, Human
aagucauggcugugc

SEQ ID NO: 3623280 - RNA, 19 nt, Human
aagucauguaaauacuguu

SEQ ID NO: 3623281 - RNA, 15 nt, Human
aagucauuaaagaca

SEQ ID NO: 3623282 - RNA, 19 nt, Human
aagucauuccuucuuuuua

SEQ ID NO: 3623283 - RNA, 20 nt, Human
aagucauuuuaacuuuauca

SEQ ID NO: 3623284 - RNA, 21 nt, Human
aaguccaaauguuuacaggga

SEQ ID NO: 3623285 - RNA, 15 nt, Human
aaguccaauaagaca

SEQ ID NO: 3623286 - RNA, 23 nt, Human
aaguccaggcuuuuuuaucaugu

SEQ ID NO: 3623287 - RNA, 17 nt, Human
aaguccagguccuggug

SEQ ID NO: 3623288 - RNA, 18 nt, Human
aaguccagguccuggugg

SEQ ID NO: 3623289 - RNA, 20 nt, Human
aaguccaguccaguccuauc

SEQ ID NO: 3623290 - RNA, 20 nt, Human
aagucccaccgguugcuucu

SEQ ID NO: 3623291 - RNA, 21 nt, Human
aaguccccaggccccaggaag

SEQ ID NO: 3623292 - RNA, 23 nt, Human
aaguccccaggccccaggaagcc

SEQ ID NO: 3623293 - RNA, 20 nt, Human
aaguccccucuccuccacau

SEQ ID NO: 3623294 - RNA, 21 nt, Human
aaguccccucuccuccacauu

SEQ ID NO: 3623295 - RNA, 11 nt, Human
aagucccugcc

SEQ ID NO: 3623296 - RNA, 22 nt, Human
aagucccuguaauuguuguuug

SEQ ID NO: 3623297 - RNA, 21 nt, Human
aagucccuguuuucugagccc

SEQ ID NO: 3623298 - RNA, 18 nt, Human
aaguccggccccaguaca

SEQ ID NO: 3623299 - RNA, 17 nt, Human
aaguccuacaagcuaaa

SEQ ID NO: 3623300 - RNA, 15 nt, Human
aaguccuggcuucag

SEQ ID NO: 3623301 - RNA, 19 nt, Human
aaguccuguaugucuguca

SEQ ID NO: 3623302 - RNA, 20 nt, Human
aaguccuguaugucugucau

SEQ ID NO: 3623303 - RNA, 16 nt, Human
aagucgguuaaaaugg

SEQ ID NO: 3623304 - RNA, 21 nt, Human
aagucguccuuacuccugugg

SEQ ID NO: 3623305 - RNA, 19 nt, Human
aagucguuuuccaaacuga

SEQ ID NO: 3623306 - RNA, 15 nt, Human
aagucuaaaguuuac

SEQ ID NO: 3623307 - RNA, 17 nt, Human
aagucuaaaguuuacag

SEQ ID NO: 3623308 - RNA, 20 nt, Human
aagucuaaaguuuacaguaa

SEQ ID NO: 3623309 - RNA, 16 nt, Human
aagucuaaauauuucc

SEQ ID NO: 3623310 - RNA, 19 nt, Human
aagucuaggagcugggagg

SEQ ID NO: 3623311 - RNA, 20 nt, Human
aagucuagguugguagaguu

SEQ ID NO: 3623312 - RNA, 13 nt, Human
aagucucaaggua

SEQ ID NO: 3623313 - RNA, 11 nt, Human
aagucucagcu

SEQ ID NO: 3623314 - RNA, 20 nt, Human
aagucucauagguuaaaaaa

SEQ ID NO: 3623315 - RNA, 21 nt, Human
aagucucauagguuaaaaaaa

SEQ ID NO: 3623316 - RNA, 17 nt, Human
aagucucaucuggggag

SEQ ID NO: 3623317 - RNA, 15 nt, Human
aagucuccaaagucu

SEQ ID NO: 3623318 - RNA, 12 nt, Human
aagucuccagcc

SEQ ID NO: 3623319 - RNA, 16 nt, Human
aagucuccagcccacg

SEQ ID NO: 3623320 - RNA, 19 nt, Human
aagucucccuucuguuucu

SEQ ID NO: 3623321 - RNA, 17 nt, Human
aagucucuaacaaugua

SEQ ID NO: 3623322 - RNA, 12 nt, Human
aagucucuguga

SEQ ID NO: 3623323 - RNA, 14 nt, Human
aagucucuuuuuua

SEQ ID NO: 3623324 - RNA, 15 nt, Human
aagucucuuuuuuac

SEQ ID NO: 3623325 - RNA, 22 nt, Human
aagucugccuauccuggccagg

SEQ ID NO: 3623326 - RNA, 13 nt, Human
aagucuguccuug

SEQ ID NO: 3623327 - RNA, 16 nt, Human
aagucuguccuugaag

SEQ ID NO: 3623328 - RNA, 15 nt, Human
aagucugugccugga

SEQ ID NO: 3623329 - RNA, 23 nt, Human
aagucugugugaugaacuuucuc

SEQ ID NO: 3623330 - RNA, 12 nt, Human
aagucuguuuua

SEQ ID NO: 3623331 - RNA, 22 nt, Human
aagucuuaaggacaaagugcca

SEQ ID NO: 3623332 - RNA, 18 nt, Human
aagucuuagauguauaua

SEQ ID NO: 3623333 - RNA, 17 nt, Human
aagucuugcuguggucu

SEQ ID NO: 3623334 - RNA, 16 nt, Human
aagucuuguauaacua

SEQ ID NO: 3623335 - RNA, 20 nt, Human
aagucuugugacuagugcug

SEQ ID NO: 3623336 - RNA, 14 nt, Human
aagucuuuaauaaa

SEQ ID NO: 3623337 - RNA, 16 nt, Human
aagucuuuaauaaaua

SEQ ID NO: 3623338 - RNA, 18 nt, Human
aagucuuuaggucuuugu

SEQ ID NO: 3623339 - RNA, 15 nt, Human
aagucuuucauggcu

SEQ ID NO: 3623340 - RNA, 12 nt, Human
aagucuuuuaaa

SEQ ID NO: 3623341 - RNA, 17 nt, Human
aagucuuuuaaaaagua

SEQ ID NO: 3623342 - RNA, 12 nt, Human
aagugaaaauau

SEQ ID NO: 3623343 - RNA, 13 nt, Human
aagugaaaaucuu

SEQ ID NO: 3623344 - RNA, 11 nt, Human
aagugaaauaa

SEQ ID NO: 3623345 - RNA, 10 nt, Human
aagugaaauu

SEQ ID NO: 3623346 - RNA, 15 nt, Human
aagugaaauuuauug

SEQ ID NO: 3623347 - RNA, 20 nt, Human
aagugaaauuuauugaggaa

SEQ ID NO: 3623348 - RNA, 13 nt, Human
aagugaaauuucu

SEQ ID NO: 3623349 - RNA, 18 nt, Human
aagugaaauuucuagccu

SEQ ID NO: 3623350 - RNA, 19 nt, Human
aagugaacacauuguguca

SEQ ID NO: 3623351 - RNA, 16 nt, Human
aagugaacacuagcca

SEQ ID NO: 3623352 - RNA, 16 nt, Human
aagugaagaaaaguga

SEQ ID NO: 3623353 - RNA, 23 nt, Human
aagugaagaauccuuuuguagaa

SEQ ID NO: 3623354 - RNA, 19 nt, Human
aagugaagacaaugacuua

SEQ ID NO: 3623355 - RNA, 16 nt, Human
aagugaagacuggaag

SEQ ID NO: 3623356 - RNA, 14 nt, Human
aagugaauaaacuu

SEQ ID NO: 3623357 - RNA, 18 nt, Human
aagugaauaaacuucagc

SEQ ID NO: 3623358 - RNA, 18 nt, Human
aagugaaugcucaaguuu

SEQ ID NO: 3623359 - RNA, 20 nt, Human
aagugaauuugaaugaaaaa

SEQ ID NO: 3623360 - RNA, 16 nt, Human
aagugaauuugccugu

SEQ ID NO: 3623361 - RNA, 20 nt, Human
aagugaauuugccuguaaca

SEQ ID NO: 3623362 - RNA, 18 nt, Human
aagugacaaggccccaga

SEQ ID NO: 3623363 - RNA, 15 nt, Human
aagugacagggaagc

SEQ ID NO: 3623364 - RNA, 19 nt, Human
aagugacagggaagcuaca

SEQ ID NO: 3623365 - RNA, 15 nt, Human
aagugacgguuccua

SEQ ID NO: 3623366 - RNA, 17 nt, Human
aagugacgguuccuaca

SEQ ID NO: 3623367 - RNA, 17 nt, Human
aagugacgguuuaaugg

SEQ ID NO: 3623368 - RNA, 19 nt, Human
aagugacuaauggcaugag

SEQ ID NO: 3623369 - RNA, 21 nt, Human
aagugacuuagcagaugcugg

SEQ ID NO: 3623370 - RNA, 15 nt, Human
aagugagacagucca

SEQ ID NO: 3623371 - RNA, 20 nt, Human
aagugagacaguccagccug

SEQ ID NO: 3623372 - RNA, 16 nt, Human
aagugagaccuuccuu

SEQ ID NO: 3623373 - RNA, 18 nt, Human
aagugagacuuugagggu

SEQ ID NO: 3623374 - RNA, 15 nt, Human
aagugagagcugggu

SEQ ID NO: 3623375 - RNA, 18 nt, Human
aagugagcaaaccugccc

SEQ ID NO: 3623376 - RNA, 16 nt, Human
aagugaggaugaaaaa

SEQ ID NO: 3623377 - RNA, 20 nt, Human
aagagcaucaugccucugag

SEQ ID NO: 3623378 - RNA, 22 nt, Human
aagagcaucaugccucugaggc

SEQ ID NO: 3623379 - RNA, 18 nt, Human
aagagcaugaaauuuuua

SEQ ID NO: 3623380 - RNA, 14 nt, Human
aagagccacugcca

SEQ ID NO: 3623381 - RNA, 20 nt, Human
aagagccauauaaguuugaa

SEQ ID NO: 3623382 - RNA, 14 nt, Human
aagagcccagucug

SEQ ID NO: 3623383 - RNA, 18 nt, Human
aagagccccacucucaga

SEQ ID NO: 3623384 - RNA, 21 nt, Human
aagagccugaucucuuccugu

SEQ ID NO: 3623385 - RNA, 16 nt, Human
aagagccugcaggugc

SEQ ID NO: 3623386 - RNA, 13 nt, Human
aagagccuggaga

SEQ ID NO: 3623387 - RNA, 14 nt, Human
aagagccuggagaa

SEQ ID NO: 3623388 - RNA, 20 nt, Human
aagagccuugguguccaccu

SEQ ID NO: 3623389 - RNA, 21 nt, Human
aagagccuugguguccaccug

SEQ ID NO: 3623390 - RNA, 14 nt, Human
aagagcuacauaau

SEQ ID NO: 3623391 - RNA, 20 nt, Human
aagagcuacguauuuaauag

SEQ ID NO: 3623392 - RNA, 13 nt, Human
aagagcuaggcag

SEQ ID NO: 3623393 - RNA, 15 nt, Human
aagagcuauacaguu

SEQ ID NO: 3623394 - RNA, 13 nt, Human
aagagcugcccuc

SEQ ID NO: 3623395 - RNA, 16 nt, Human
aagagcuuaacagugu

SEQ ID NO: 3623396 - RNA, 13 nt, Human
aagaggaaaagaa

SEQ ID NO: 3623397 - RNA, 16 nt, Human
aagaggaaaagaaauc

SEQ ID NO: 3623398 - RNA, 13 nt, Human
aagaggaagcaaa

SEQ ID NO: 3623399 - RNA, 22 nt, Human
aagaggagagaggaagcucucu

SEQ ID NO: 3623400 - RNA, 13 nt, Human
aagaggagcacuu

SEQ ID NO: 3623401 - RNA, 23 nt, Human
aagaggagcccccacccuguucc

SEQ ID NO: 3623402 - RNA, 14 nt, Human
aagaggcaagaggc

SEQ ID NO: 3623403 - RNA, 18 nt, Human
aagaggcaccaggaagcc

SEQ ID NO: 3623404 - RNA, 18 nt, Human
aagaggcaccugucccag

SEQ ID NO: 3623405 - RNA, 12 nt, Human
aaucuacuuaac

SEQ ID NO: 3623406 - RNA, 21 nt, Human
aaucuacuuaacccugacaaa

SEQ ID NO: 3623407 - RNA, 16 nt, Human
aaucuagaagaaauga

SEQ ID NO: 3623408 - RNA, 21 nt, Human
aaucuagaagaaaugaaauuu

SEQ ID NO: 3623409 - RNA, 16 nt, Human
aaucuagcuuauuuug

SEQ ID NO: 3623410 - RNA, 18 nt, Human
aaucuaggaaaauauuuu

SEQ ID NO: 3623411 - RNA, 19 nt, Human
aaucuaguauuucaugcug

SEQ ID NO: 3623412 - RNA, 17 nt, Human
aaucuaguuuacagaaa

SEQ ID NO: 3623413 - RNA, 17 nt, Human
aaucuauaaacaaugaa

SEQ ID NO: 3623414 - RNA, 18 nt, Human
aaucuauagaaaguguuc

SEQ ID NO: 3623415 - RNA, 20 nt, Human
aaucuaucugcuuaugcagu

SEQ ID NO: 3623416 - RNA, 14 nt, Human
aaucuaugaaguau

SEQ ID NO: 3623417 - RNA, 15 nt, Human
aaucuaugauuccag

SEQ ID NO: 3623418 - RNA, 17 nt, Human
aaucuaugccaaagauc

SEQ ID NO: 3623419 - RNA, 18 nt, Human
aaucuaugccaaagauca

SEQ ID NO: 3623420 - RNA, 22 nt, Human
aaucuauuaauagcugccuuaa

SEQ ID NO: 3623421 - RNA, 12 nt, Human
aaucuauuauac

SEQ ID NO: 3623422 - RNA, 13 nt, Human
aaucuauucagac

SEQ ID NO: 3623423 - RNA, 21 nt, Human
aaucuauucuguguugcauua

SEQ ID NO: 3623424 - RNA, 19 nt, Human
aaucuauugggauuuucua

SEQ ID NO: 3623425 - RNA, 11 nt, Human
aaucuauuuaa

SEQ ID NO: 3623426 - RNA, 21 nt, Human
aaucuauuuucuauguacuag

SEQ ID NO: 3623427 - RNA, 13 nt, Human
aaucucaaauaac

SEQ ID NO: 3623428 - RNA, 18 nt, Human
aaucucaaauuucuaaau

SEQ ID NO: 3623429 - RNA, 15 nt, Human
aaucucaaggaaucu

SEQ ID NO: 3623430 - RNA, 21 nt, Human
aagcauuuuauaaaucgcuuu

SEQ ID NO: 3623431 - RNA, 12 nt, Human
aagcauuuugua

SEQ ID NO: 3623432 - RNA, 14 nt, Human
aagcauuuuguaau

SEQ ID NO: 3623433 - RNA, 17 nt, Human
aagcauuuuguaauaau

SEQ ID NO: 3623434 - RNA, 12 nt, Human
aagccaaaacaa

SEQ ID NO: 3623435 - RNA, 19 nt, Human
aagccaaaacugagcauaa

SEQ ID NO: 3623436 - RNA, 19 nt, Human
aagccaaagaaaugaacau

SEQ ID NO: 3623437 - RNA, 22 nt, Human
aagccaaagcuaggccuggcca

SEQ ID NO: 3623438 - RNA, 16 nt, Human
aagccaacacccuguc

SEQ ID NO: 3623439 - RNA, 17 nt, Human
aagccaacuuguaaaua

SEQ ID NO: 3623440 - RNA, 18 nt, Human
aagccaagaggcugcagc

SEQ ID NO: 3623441 - RNA, 20 nt, Human
aagccaagggaaccuguguc

SEQ ID NO: 3623442 - RNA, 18 nt, Human
aagccaauaacacacagc

SEQ ID NO: 3623443 - RNA, 16 nt, Human
aagccaauccccuccu

SEQ ID NO: 3623444 - RNA, 21 nt, Human
aagccaauuucaaucuuauuu

SEQ ID NO: 3623445 - RNA, 13 nt, Human
aagccaauuuuuc

SEQ ID NO: 3623446 - RNA, 16 nt, Human
aagccaauuuuucugc

SEQ ID NO: 3623447 - RNA, 18 nt, Human
aagccaauuuuucugcac

SEQ ID NO: 3623448 - RNA, 21 nt, Human
aagccaauuuuucugcacuga

SEQ ID NO: 3623449 - RNA, 18 nt, Human
aagccacaagucuuccag

SEQ ID NO: 3623450 - RNA, 16 nt, Human
aagccacagacaauau

SEQ ID NO: 3623451 - RNA, 14 nt, Human
aagccacagcccag

SEQ ID NO: 3623452 - RNA, 14 nt, Human
aagccacagcuggu

SEQ ID NO: 3623453 - RNA, 14 nt, Human
aagccacaggccug

SEQ ID NO: 3623454 - RNA, 19 nt, Human
aagccacauuauuucuagu

SEQ ID NO: 3623455 - RNA, 14 nt, Human
aagccaccaacagc

SEQ ID NO: 3623456 - RNA, 16 nt, Human
aagccacccaaagcag

SEQ ID NO: 3623457 - RNA, 13 nt, Human
aagccaccucucc

SEQ ID NO: 3623458 - RNA, 15 nt, Human
aagccagaaccagau

SEQ ID NO: 3623459 - RNA, 14 nt, Human
aagccagaagcuga

SEQ ID NO: 3623460 - RNA, 16 nt, Human
aagccagaggcugggu

SEQ ID NO: 3623461 - RNA, 17 nt, Human
aagccagcaccggacca

SEQ ID NO: 3623462 - RNA, 15 nt, Human
aagccagcaggcucu

SEQ ID NO: 3623463 - RNA, 22 nt, Human
aagccagccaagcuuuaaauua

SEQ ID NO: 3623464 - RNA, 13 nt, Human
aagccagccuggu

SEQ ID NO: 3623465 - RNA, 14 nt, Human
aagccagcguccuc

SEQ ID NO: 3623466 - RNA, 17 nt, Human
aagccagcguccuccuc

SEQ ID NO: 3623467 - RNA, 20 nt, Human
aagccagcguccuccucugu

SEQ ID NO: 3623468 - RNA, 22 nt, Human
aagccagcugcccuaugggccu

SEQ ID NO: 3623469 - RNA, 21 nt, Human
aagccagcugccgaccagagc

SEQ ID NO: 3623470 - RNA, 14 nt, Human
aagccagcuuguuu

SEQ ID NO: 3623471 - RNA, 14 nt, Human
aagccagcuuuccc

SEQ ID NO: 3623472 - RNA, 15 nt, Human
aagccagcuuucccu

SEQ ID NO: 3623473 - RNA, 20 nt, Human
aagccaggaauuucccagga

SEQ ID NO: 3623474 - RNA, 24 nt, Human
aagccaggaauuucccaggacccu

SEQ ID NO: 3623475 - RNA, 16 nt, Human
aagccaggcucacuca

SEQ ID NO: 3623476 - RNA, 19 nt, Human
aagccagggucucucccuc

SEQ ID NO: 3623477 - RNA, 21 nt, Human
aagccagggucucucccucag

SEQ ID NO: 3623478 - RNA, 16 nt, Human
aagccagggugugucu

SEQ ID NO: 3623479 - RNA, 12 nt, Human
aagccagucuua

SEQ ID NO: 3623480 - RNA, 14 nt, Human
aagccagucuuaac

SEQ ID NO: 3623481 - RNA, 16 nt, Human
aagccaucaccucaga

SEQ ID NO: 3623482 - RNA, 18 nt, Human
aagccaucauguaaauua

SEQ ID NO: 3623483 - RNA, 14 nt, Human
aagccaucuuggua

SEQ ID NO: 3623484 - RNA, 15 nt, Human
aagccaucuuucuuu

SEQ ID NO: 3623485 - RNA, 15 nt, Human
aagccaugcuggaaa

SEQ ID NO: 3623486 - RNA, 20 nt, Human
aagccauggagauucucaua

SEQ ID NO: 3623487 - RNA, 21 nt, Human
aagccauguauaaaugugaua

SEQ ID NO: 3623488 - RNA, 18 nt, Human
aagccauguuuaagauuu

SEQ ID NO: 3623489 - RNA, 15 nt, Human
aagccauguuuauua

SEQ ID NO: 3623490 - RNA, 22 nt, Human
aagccauuaaaugaauauuuug

SEQ ID NO: 3623491 - RNA, 15 nt, Human
aagccauuccaaagu

SEQ ID NO: 3623492 - RNA, 12 nt, Human
aagcccaaccuc

SEQ ID NO: 3623493 - RNA, 17 nt, Human
aagcccaaccuccugac

SEQ ID NO: 3623494 - RNA, 23 nt, Human
aagcccacagcacagcucccugc

SEQ ID NO: 3623495 - RNA, 18 nt, Human
aagcccagagggucuggg

SEQ ID NO: 3623496 - RNA, 20 nt, Human
aagcccagcacugcuugagg

SEQ ID NO: 3623497 - RNA, 23 nt, Human
aagcccagcacugcuugaggaaa

SEQ ID NO: 3623498 - RNA, 22 nt, Human
aagcccagccccuacugcugug

SEQ ID NO: 3623499 - RNA, 13 nt, Human
aagcccagcuuga

SEQ ID NO: 3623500 - RNA, 14 nt, Human
aagcccaggaaagg

SEQ ID NO: 3623501 - RNA, 17 nt, Human
aagcccaggaaaggcuc

SEQ ID NO: 3623502 - RNA, 19 nt, Human
aagcccaggaaaggcucca

SEQ ID NO: 3623503 - RNA, 13 nt, Human
aagcccaggaggg

SEQ ID NO: 3623504 - RNA, 21 nt, Human
aagcccaggugccagccugag

SEQ ID NO: 3623505 - RNA, 20 nt, Human
aagcccauccugaccagcug

SEQ ID NO: 3623506 - RNA, 21 nt, Human
aagcccauucauuccauucug

SEQ ID NO: 3623507 - RNA, 13 nt, Human
aagccccacaugu

SEQ ID NO: 3623508 - RNA, 14 nt, Human
aagccccagcaagc

SEQ ID NO: 3623509 - RNA, 16 nt, Human
aagccccaugcuggag

SEQ ID NO: 3623510 - RNA, 17 nt, Human
aagccccaugcuggagc

SEQ ID NO: 3623511 - RNA, 18 nt, Human
aagccccaugcuggagcc

SEQ ID NO: 3623512 - RNA, 23 nt, Human
aagccccaugcuggagccugugu

SEQ ID NO: 3623513 - RNA, 15 nt, Human
aagccccauuaacug

SEQ ID NO: 3623514 - RNA, 16 nt, Human
aagcccccagcuaaga

SEQ ID NO: 3623515 - RNA, 23 nt, Human
aagcccccagcuaagaaccugga

SEQ ID NO: 3623516 - RNA, 14 nt, Human
aagccccucuuucu

SEQ ID NO: 3623517 - RNA, 12 nt, Human
aagcccuccuuc

SEQ ID NO: 3623518 - RNA, 12 nt, Human
aagcccuggccc

SEQ ID NO: 3623519 - RNA, 21 nt, Human
aagcccugugcuccauggcug

SEQ ID NO: 3623520 - RNA, 22 nt, Human
aagcccuguugacacaggucuu

SEQ ID NO: 3623521 - RNA, 15 nt, Human
aagcccuuccauguc

SEQ ID NO: 3623522 - RNA, 13 nt, Human
aagccggcggccc

SEQ ID NO: 3623523 - RNA, 19 nt, Human
aagccggcggcccaagccc

SEQ ID NO: 3623524 - RNA, 21 nt, Human
aagccggggaagagauccaaa

SEQ ID NO: 3623525 - RNA, 22 nt, Human
aagccggggaagagauccaaag

SEQ ID NO: 3623526 - RNA, 13 nt, Human
aagccguccuggc

SEQ ID NO: 3623527 - RNA, 21 nt, Human
aagccgugauuuucauugcug

SEQ ID NO: 3623528 - RNA, 22 nt, Human
aagccgugcucgccccagcagg

SEQ ID NO: 3623529 - RNA, 15 nt, Human
aagccguggcuuccc

SEQ ID NO: 3623530 - RNA, 23 nt, Human
aagccuaaaagugggcuugauuc

SEQ ID NO: 3623531 - RNA, 22 nt, Human
aagccuaagggauccugccugc

SEQ ID NO: 3623532 - RNA, 14 nt, Human
aagccuaccugcuc

SEQ ID NO: 3623533 - RNA, 20 nt, Human
aagccuagaagagcuucuga

SEQ ID NO: 3623534 - RNA, 22 nt, Human
aagccuagugaaggcuucucuc

SEQ ID NO: 3623535 - RNA, 15 nt, Human
aagccucaaaacaaa

SEQ ID NO: 3623536 - RNA, 17 nt, Human
aagccucaaauuugaac

SEQ ID NO: 3623537 - RNA, 21 nt, Human
aagccucaaauuugaacaugu

SEQ ID NO: 3623538 - RNA, 23 nt, Human
aagccucaagguuuuagguucua

SEQ ID NO: 3623539 - RNA, 20 nt, Human
aagccucauauuuaaagaca

SEQ ID NO: 3623540 - RNA, 12 nt, Human
aagccuccacag

SEQ ID NO: 3623541 - RNA, 23 nt, Human
aagccuccacagcgagggcagcu

SEQ ID NO: 3623542 - RNA, 16 nt, Human
aagccucccacgacug

SEQ ID NO: 3623543 - RNA, 14 nt, Human
aagccucuggcuag

SEQ ID NO: 3623544 - RNA, 13 nt, Human
aagccucuguguc

SEQ ID NO: 3623545 - RNA, 17 nt, Human
aagccucugugucacug

SEQ ID NO: 3623546 - RNA, 24 nt, Human
aagccugagggaaaggccagcacu

SEQ ID NO: 3623547 - RNA, 17 nt, Human
aagccugcaauuucaua

SEQ ID NO: 3623548 - RNA, 22 nt, Human
aagccugcaauuucauaugcug

SEQ ID NO: 3623549 - RNA, 19 nt, Human
aagccugcuuuuuaagugu

SEQ ID NO: 3623550 - RNA, 14 nt, Human
aaucuuuauugaga

SEQ ID NO: 3623551 - RNA, 18 nt, Human
aaucuuuauugagaaaga

SEQ ID NO: 3623552 - RNA, 17 nt, Human
aaucuuuccauauccau

SEQ ID NO: 3623553 - RNA, 17 nt, Human
aaucuuucuuuaccuga

SEQ ID NO: 3623554 - RNA, 16 nt, Human
aaucuuucuuucuuag

SEQ ID NO: 3623555 - RNA, 22 nt, Human
aaucuuucuuuugauucuuccu

SEQ ID NO: 3623556 - RNA, 19 nt, Human
aaucuuugaaagacuucca

SEQ ID NO: 3623557 - RNA, 19 nt, Human
aaucuuuuaugauugccuu

SEQ ID NO: 3623558 - RNA, 15 nt, Human
aaucuuuucacaaau

SEQ ID NO: 3623559 - RNA, 23 nt, Human
aaucuuuuccaggaaaaagaacu

SEQ ID NO: 3623560 - RNA, 22 nt, Human
aaucuuuucugaaucuucugaa

SEQ ID NO: 3623561 - RNA, 13 nt, Human
aaucuuuucuuau

SEQ ID NO: 3623562 - RNA, 15 nt, Human
aaugaaaaacaacca

SEQ ID NO: 3623563 - RNA, 16 nt, Human
aaugaaaaacaaccaa

SEQ ID NO: 3623564 - RNA, 14 nt, Human
aaugaaaaaugaaa

SEQ ID NO: 3623565 - RNA, 17 nt, Human
aaugaaaaauuuaagca

SEQ ID NO: 3623566 - RNA, 19 nt, Human
aaugaaaaauuuaagcauu

SEQ ID NO: 3623567 - RNA, 16 nt, Human
aaugaaaacaaugcag

SEQ ID NO: 3623568 - RNA, 18 nt, Human
aaugaaaacagaaugucu

SEQ ID NO: 3623569 - RNA, 11 nt, Human
aaugaaaauaa

SEQ ID NO: 3623570 - RNA, 13 nt, Human
aaugaaaauguca

SEQ ID NO: 3623571 - RNA, 14 nt, Human
aaugaaaaugucag

SEQ ID NO: 3623572 - RNA, 15 nt, Human
aaugaaaauguccau

SEQ ID NO: 3623573 - RNA, 16 nt, Human
aaugaaacaaagaguu

SEQ ID NO: 3623574 - RNA, 19 nt, Human
aaugaaacaaauaaucaca

SEQ ID NO: 3623575 - RNA, 17 nt, Human
aaugaaacauuuuguca

SEQ ID NO: 3623576 - RNA, 14 nt, Human
aaugaaacuuggau

SEQ ID NO: 3623577 - RNA, 16 nt, Human
aaugaaagacuguaca

SEQ ID NO: 3623578 - RNA, 13 nt, Human
aaugaaagaugau

SEQ ID NO: 3623579 - RNA, 16 nt, Human
aaugaaagcuguuccu

SEQ ID NO: 3623580 - RNA, 17 nt, Human
aaugaaagguacuauau

SEQ ID NO: 3623581 - RNA, 20 nt, Human
aaugaaagguacuauauuug

SEQ ID NO: 3623582 - RNA, 23 nt, Human
aaugaaagguacuauauuugcua

SEQ ID NO: 3623583 - RNA, 19 nt, Human
aaugaaagucuugugacua

SEQ ID NO: 3623584 - RNA, 21 nt, Human
aaugaaagucuugugacuagu

SEQ ID NO: 3623585 - RNA, 15 nt, Human
aaugaaaguuugcac

SEQ ID NO: 3623586 - RNA, 17 nt, Human
aaugaaaugcucuccuu

SEQ ID NO: 3623587 - RNA, 19 nt, Human
aaugaaaugcucuccuuuc

SEQ ID NO: 3623588 - RNA, 16 nt, Human
aaugaaauguaugugc

SEQ ID NO: 3623589 - RNA, 13 nt, Human
aaugaaauguuuu

SEQ ID NO: 3623590 - RNA, 14 nt, Human
aaugaaauguuuua

SEQ ID NO: 3623591 - RNA, 17 nt, Human
aauacugccagaugcug

SEQ ID NO: 3623592 - RNA, 20 nt, Human
aauacugccagaugcugaug

SEQ ID NO: 3623593 - RNA, 22 nt, Human
aauacugccagaugcugauguu

SEQ ID NO: 3623594 - RNA, 23 nt, Human
aauacugcuacagcaauuucuaa

SEQ ID NO: 3623595 - RNA, 13 nt, Human
aauacugcugaga

SEQ ID NO: 3623596 - RNA, 18 nt, Human
aauacugcugagauacau

SEQ ID NO: 3623597 - RNA, 16 nt, Human
aauacuguauuuugua

SEQ ID NO: 3623598 - RNA, 15 nt, Human
aauacuguguggaac

SEQ ID NO: 3623599 - RNA, 15 nt, Human
aauacuguuauucuu

SEQ ID NO: 3623600 - RNA, 18 nt, Human
aauacuguuauucuuugc

SEQ ID NO: 3623601 - RNA, 21 nt, Human
aauacuguuauucuuugcacu

SEQ ID NO: 3623602 - RNA, 16 nt, Human
aauacuguucuuucca

SEQ ID NO: 3623603 - RNA, 14 nt, Human
aauacuuaaauguu

SEQ ID NO: 3623604 - RNA, 22 nt, Human
aauacuuauauuuuuaauaaaa

SEQ ID NO: 3623605 - RNA, 21 nt, Human
aauacuucucaaaccuguuua

SEQ ID NO: 3623606 - RNA, 23 nt, Human
aauacuucucaaaccuguuuaaa

SEQ ID NO: 3623607 - RNA, 13 nt, Human
aauacuucuugug

SEQ ID NO: 3623608 - RNA, 21 nt, Human
aauacuucuuguguguaugca

SEQ ID NO: 3623609 - RNA, 22 nt, Human
aauacuugaaccauaaaauguc

SEQ ID NO: 3623610 - RNA, 14 nt, Human
aauacuuuaaagga

SEQ ID NO: 3623611 - RNA, 16 nt, Human
aauacuuuaaaggaaa

SEQ ID NO: 3623612 - RNA, 12 nt, Human
aauacuuuguau

SEQ ID NO: 3623613 - RNA, 14 nt, Human
aauacuuuuccuua

SEQ ID NO: 3623614 - RNA, 15 nt, Human
aauacuuuuccuuac

SEQ ID NO: 3623615 - RNA, 16 nt, Human
aauacuuuuucuaaug

SEQ ID NO: 3623616 - RNA, 17 nt, Human
aauagaaaacaggaaaa

SEQ ID NO: 3623617 - RNA, 12 nt, Human
aauagaaaagua

SEQ ID NO: 3623618 - RNA, 13 nt, Human
aauagaaaaguag

SEQ ID NO: 3623619 - RNA, 18 nt, Human
aauagaaaaguagacaau

SEQ ID NO: 3623620 - RNA, 12 nt, Human
aauagaaacaag

SEQ ID NO: 3623621 - RNA, 14 nt, Human
aauagaaagaaagu

SEQ ID NO: 3623622 - RNA, 19 nt, Human
aauagaaaguugcaaggca

SEQ ID NO: 3623623 - RNA, 16 nt, Human
aauagaaauuuccaga

SEQ ID NO: 3623624 - RNA, 16 nt, Human
aauagaaauuuuguaa

SEQ ID NO: 3623625 - RNA, 19 nt, Human
aauagaacaacauauacaa

SEQ ID NO: 3623626 - RNA, 17 nt, Human
aauagaacaaggcugag

SEQ ID NO: 3623627 - RNA, 20 nt, Human
aauagaaccauguugguugc

SEQ ID NO: 3623628 - RNA, 13 nt, Human
aauagaaggaaac

SEQ ID NO: 3623629 - RNA, 14 nt, Human
aauagaaggaaacu

SEQ ID NO: 3623630 - RNA, 15 nt, Human
aauagaauugacauu

SEQ ID NO: 3623631 - RNA, 21 nt, Human
aauagaauugacauugaaauc

SEQ ID NO: 3623632 - RNA, 17 nt, Human
aauagacaaaaaguaua

SEQ ID NO: 3623633 - RNA, 14 nt, Human
aauagacaaauaga

SEQ ID NO: 3623634 - RNA, 15 nt, Human
aauagacacauacau

SEQ ID NO: 3623635 - RNA, 22 nt, Human
aauagacacuccccgaagucuu

SEQ ID NO: 3623636 - RNA, 18 nt, Human
aauagacccacaagaggc

SEQ ID NO: 3623637 - RNA, 21 nt, Human
aauagacuguaacuuccaaau

SEQ ID NO: 3623638 - RNA, 15 nt, Human
aauagagacuguaga

SEQ ID NO: 3623639 - RNA, 16 nt, Human
aauagagccugaggga

SEQ ID NO: 3623640 - RNA, 16 nt, Human
aauagaguauaugcac

SEQ ID NO: 3623641 - RNA, 20 nt, Human
aauagauaagaguagaaacu

SEQ ID NO: 3623642 - RNA, 22 nt, Human
aauagauauaaauuuuuaagag

SEQ ID NO: 3623643 - RNA, 21 nt, Human
aauagauauccacuugagaca

SEQ ID NO: 3623644 - RNA, 15 nt, Human
aauagaucuuagggu

SEQ ID NO: 3623645 - RNA, 16 nt, Human
aauagaugucuuuuau

SEQ ID NO: 3623646 - RNA, 13 nt, Human
aauagcaaaagaa

SEQ ID NO: 3623647 - RNA, 19 nt, Human
aauagcaaaagaagaaguu

SEQ ID NO: 3623648 - RNA, 20 nt, Human
aauagcaaaagaagaaguuu

SEQ ID NO: 3623649 - RNA, 17 nt, Human
aauagcaacuuuugugu

SEQ ID NO: 3623650 - RNA, 19 nt, Human
aauagcaacuuuuguguaa

SEQ ID NO: 3623651 - RNA, 14 nt, Human
aauagcagccuuuc

SEQ ID NO: 3623652 - RNA, 13 nt, Human
aauagcauguugu

SEQ ID NO: 3623653 - RNA, 20 nt, Human
aauagccugccucuucucua

SEQ ID NO: 3623654 - RNA, 14 nt, Human
aauagccuguggcc

SEQ ID NO: 3623655 - RNA, 15 nt, Human
aauagcguucuugua

SEQ ID NO: 3623656 - RNA, 16 nt, Human
aauagcuaauaauguu

SEQ ID NO: 3623657 - RNA, 14 nt, Human
aauagcuagacugg

SEQ ID NO: 3623658 - RNA, 17 nt, Human
aauagcuauauccaugu

SEQ ID NO: 3623659 - RNA, 23 nt, Human
aauagcuauauccauguacugua

SEQ ID NO: 3623660 - RNA, 13 nt, Human
aauagcugggacu

SEQ ID NO: 3623661 - RNA, 16 nt, Human
aauagcuuaugaaaag

SEQ ID NO: 3623662 - RNA, 18 nt, Human
aauagcuuaugaaaagaa

SEQ ID NO: 3623663 - RNA, 19 nt, Human
aauagcuuaugaaaagaau

SEQ ID NO: 3623664 - RNA, 17 nt, Human
aauagcuuuuauuguau

SEQ ID NO: 3623665 - RNA, 24 nt, Human
aauagcuuuuuucucugauacaga

SEQ ID NO: 3623666 - RNA, 15 nt, Human
aauaggaaaaacuga

SEQ ID NO: 3623667 - RNA, 16 nt, Human
aauaggaaaaacugau

SEQ ID NO: 3623668 - RNA, 23 nt, Human
aauaggaaucauucagaaauguu

SEQ ID NO: 3623669 - RNA, 13 nt, Human
aauaggagaggau

SEQ ID NO: 3623670 - RNA, 15 nt, Human
aauaggagaggauga

SEQ ID NO: 3623671 - RNA, 20 nt, Human
aauaggagaggaugagagcc

SEQ ID NO: 3623672 - RNA, 17 nt, Human
aauaggagggaaaccuu

SEQ ID NO: 3623673 - RNA, 19 nt, Human
aauaggagggaaaccuuug

SEQ ID NO: 3623674 - RNA, 14 nt, Human
aauaggaugggcuu

SEQ ID NO: 3623675 - RNA, 14 nt, Human
aauaggcacuuuaa

SEQ ID NO: 3623676 - RNA, 17 nt, Human
aauaggcacuuuaaaac

SEQ ID NO: 3623677 - RNA, 22 nt, Human
aauaggcauuaacacaaaggag

SEQ ID NO: 3623678 - RNA, 22 nt, Human
aauaggcgaucacaacgugcau

SEQ ID NO: 3623679 - RNA, 18 nt, Human
aauaggcguaacuaauuu

SEQ ID NO: 3623680 - RNA, 13 nt, Human
aauaguaauauaa

SEQ ID NO: 3623681 - RNA, 14 nt, Human
aauaguaauauaau

SEQ ID NO: 3623682 - RNA, 16 nt, Human
aauaguaauauaauac

SEQ ID NO: 3623683 - RNA, 16 nt, Human
aauaguaauuuguaaa

SEQ ID NO: 3623684 - RNA, 21 nt, Human
aauaguaggcaagauggcaca

SEQ ID NO: 3623685 - RNA, 14 nt, Human
aauaguaugaaaau

SEQ ID NO: 3623686 - RNA, 18 nt, Human
aauaguaugaaaauggaa

SEQ ID NO: 3623687 - RNA, 13 nt, Human
aauaguauuuaug

SEQ ID NO: 3623688 - RNA, 16 nt, Human
aauaguauuucccauu

SEQ ID NO: 3623689 - RNA, 19 nt, Human
aauagucaaauugugugaa

SEQ ID NO: 3623690 - RNA, 16 nt, Human
aauagucauuccaaau

SEQ ID NO: 3623691 - RNA, 18 nt, Human
aauagucauuugugaauu

SEQ ID NO: 3623692 - RNA, 17 nt, Human
aauagucggugaagaaa

SEQ ID NO: 3623693 - RNA, 20 nt, Human
aauagugcuuaaaaaucauu

SEQ ID NO: 3623694 - RNA, 16 nt, Human
aauaguggccagacca

SEQ ID NO: 3623695 - RNA, 19 nt, Human
aauaguguccuaugcaaua

SEQ ID NO: 3623696 - RNA, 17 nt, Human
aaugauauauggauaau

SEQ ID NO: 3623697 - RNA, 16 nt, Human
aaugaucauaagucua

SEQ ID NO: 3623698 - RNA, 21 nt, Human
aaugauccccagcuguuuaug

SEQ ID NO: 3623699 - RNA, 22 nt, Human
aaugauccccagcuguuuaugc

SEQ ID NO: 3623700 - RNA, 23 nt, Human
aaugaucgaaaaaauaauuauuu

SEQ ID NO: 3623701 - RNA, 22 nt, Human
aaugaucucucugaauccuaag

SEQ ID NO: 3623702 - RNA, 12 nt, Human
aaugaucuuuuc

SEQ ID NO: 3623703 - RNA, 21 nt, Human
aaugaugaucaauuauaguuu

SEQ ID NO: 3623704 - RNA, 18 nt, Human
aaugaugaugauaaugau

SEQ ID NO: 3623705 - RNA, 20 nt, Human
aaugaugaugggaauugugu

SEQ ID NO: 3623706 - RNA, 18 nt, Human
aaugaugcccugcuccag

SEQ ID NO: 3623707 - RNA, 19 nt, Human
aaugauggcaauuuuguaa

SEQ ID NO: 3623708 - RNA, 13 nt, Human
aaugauggcccau

SEQ ID NO: 3623709 - RNA, 14 nt, Human
aaugauggcccauu

SEQ ID NO: 3623710 - RNA, 22 nt, Human
aaugauggcccauucuacuugc

SEQ ID NO: 3623711 - RNA, 23 nt, Human
aaugauguauguugaagccuuug

SEQ ID NO: 3623712 - RNA, 18 nt, Human
aaugauguccagaagaau

SEQ ID NO: 3623713 - RNA, 15 nt, Human
aaugaugugauacaa

SEQ ID NO: 3623714 - RNA, 15 nt, Human
aaugaugugcaaaac

SEQ ID NO: 3623715 - RNA, 21 nt, Human
aaugauguguacccaaacgug

SEQ ID NO: 3623716 - RNA, 13 nt, Human
aaugauuaauuaa

SEQ ID NO: 3623717 - RNA, 12 nt, Human
aaugauuauuuu

SEQ ID NO: 3623718 - RNA, 14 nt, Human
aaugauuauuuuca

SEQ ID NO: 3623719 - RNA, 23 nt, Human
aaugauuauuuucauuacaaugg

SEQ ID NO: 3623720 - RNA, 12 nt, Human
aaugauucaaaa

SEQ ID NO: 3623721 - RNA, 17 nt, Human
aaugauucaaaaaguca

SEQ ID NO: 3623722 - RNA, 15 nt, Human
aaugauucauguuau

SEQ ID NO: 3623723 - RNA, 12 nt, Human
aaugauugcuuu

SEQ ID NO: 3623724 - RNA, 16 nt, Human
aaugauugcuuuuaaa

SEQ ID NO: 3623725 - RNA, 22 nt, Human
aaugauugcuuuuaaaauuuua

SEQ ID NO: 3623726 - RNA, 13 nt, Human
aaugauuguaaaa

SEQ ID NO: 3623727 - RNA, 14 nt, Human
aaugauuuaaauuu

SEQ ID NO: 3623728 - RNA, 16 nt, Human
aaugauuucauucaau

SEQ ID NO: 3623729 - RNA, 20 nt, Human
aaugauuuccaaagagaaaa

SEQ ID NO: 3623730 - RNA, 21 nt, Human
aaugauuuuacuuagcaaugu

SEQ ID NO: 3623731 - RNA, 17 nt, Human
aaugauuuuucuuuaca

SEQ ID NO: 3623732 - RNA, 14 nt, Human
aaugcaaaaccuuu

SEQ ID NO: 3623733 - RNA, 20 nt, Human
aaugcaaaauuuuuuuaauc

SEQ ID NO: 3623734 - RNA, 21 nt, Human
aaugcaaagaugaaggucugu

SEQ ID NO: 3623735 - RNA, 16 nt, Human
aaugcaaauaacaaau

SEQ ID NO: 3623736 - RNA, 14 nt, Human
aaugcaacaugugu

SEQ ID NO: 3623737 - RNA, 21 nt, Human
aaugcaagagugauugcagcu

SEQ ID NO: 3623738 - RNA, 15 nt, Human
aaugcaauaugugaa

SEQ ID NO: 3623739 - RNA, 16 nt, Human
aaugcaauuugauuga

SEQ ID NO: 3623740 - RNA, 12 nt, Human
aaugcacaaaca

SEQ ID NO: 3623741 - RNA, 17 nt, Human
aaugcacaagaauggau

SEQ ID NO: 3623742 - RNA, 19 nt, Human
aaugcacaaugucuuggua

SEQ ID NO: 3623743 - RNA, 17 nt, Human
aaugcacagauauacuu

SEQ ID NO: 3623744 - RNA, 18 nt, Human
aaugcacagauauacuuu

SEQ ID NO: 3623745 - RNA, 19 nt, Human
aaugcacauauagacacau

SEQ ID NO: 3623746 - RNA, 17 nt, Human
aaugcacauccauuccc

SEQ ID NO: 3623747 - RNA, 15 nt, Human
aaugcacuuucuauc

SEQ ID NO: 3623748 - RNA, 22 nt, Human
aaugcacuuucuauccucugua

SEQ ID NO: 3623749 - RNA, 20 nt, Human
aaugcacuuuguucuggcuc

SEQ ID NO: 3623750 - RNA, 22 nt, Human
aaugcacuuuguucuggcucuu

SEQ ID NO: 3623751 - RNA, 12 nt, Human
aaugcagaacuc

SEQ ID NO: 3623752 - RNA, 18 nt, Human
aauauacuuuuacaagua

SEQ ID NO: 3623753 - RNA, 19 nt, Human
aauauacuuuuacaaguaa

SEQ ID NO: 3623754 - RNA, 14 nt, Human
aauauagaaacacg

SEQ ID NO: 3623755 - RNA, 15 nt, Human
aauauagauuaaauc

SEQ ID NO: 3623756 - RNA, 17 nt, Human
aauauagauuagaaaaa

SEQ ID NO: 3623757 - RNA, 15 nt, Human
aauauagcuauuuuu

SEQ ID NO: 3623758 - RNA, 18 nt, Human
aauauagcuguacaaaua

SEQ ID NO: 3623759 - RNA, 22 nt, Human
aauauagcuguacaaauauaag

SEQ ID NO: 3623760 - RNA, 23 nt, Human
aauauaggucucuucucccagaa

SEQ ID NO: 3623761 - RNA, 21 nt, Human
aauauauaaaaagaaaagaua

SEQ ID NO: 3623762 - RNA, 20 nt, Human
aauauauagcuggcaagaau

SEQ ID NO: 3623763 - RNA, 12 nt, Human
aauauauauaaa

SEQ ID NO: 3623764 - RNA, 16 nt, Human
aauauauauaaagaau

SEQ ID NO: 3623765 - RNA, 14 nt, Human
aauauauauacaua

SEQ ID NO: 3623766 - RNA, 17 nt, Human
aauauauauacauaugu

SEQ ID NO: 3623767 - RNA, 11 nt, Human
aauauauauau

SEQ ID NO: 3623768 - RNA, 22 nt, Human
aauauauauauauauaaaauaa

SEQ ID NO: 3623769 - RNA, 21 nt, Human
aauauauauauauaucaguuu

SEQ ID NO: 3623770 - RNA, 23 nt, Human
aauauauauauauaucaguuuga

SEQ ID NO: 3623771 - RNA, 20 nt, Human
aauauauaucuaucuauuug

SEQ ID NO: 3623772 - RNA, 22 nt, Human
aauauauaucuaucuauuugag

SEQ ID NO: 3623773 - RNA, 21 nt, Human
aauauauauuauacuuguaau

SEQ ID NO: 3623774 - RNA, 15 nt, Human
aauauauauuaucuu

SEQ ID NO: 3623775 - RNA, 18 nt, Human
aauauauauuaucuuuuc

SEQ ID NO: 3623776 - RNA, 13 nt, Human
aauauauauucug

SEQ ID NO: 3623777 - RNA, 22 nt, Human
aauauaucccagaaauuagaaa

SEQ ID NO: 3623778 - RNA, 21 nt, Human
aauauaucuaaauugaauaau

SEQ ID NO: 3623779 - RNA, 16 nt, Human
aauauaugaacauuag

SEQ ID NO: 3623780 - RNA, 22 nt, Human
aauauauggcauuugcagauuu

SEQ ID NO: 3623781 - RNA, 17 nt, Human
aauauauggucuaaugu

SEQ ID NO: 3623782 - RNA, 13 nt, Human
aauauauguauuu

SEQ ID NO: 3623783 - RNA, 22 nt, Human
aauauauguauuuuuauauaau

SEQ ID NO: 3623784 - RNA, 13 nt, Human
aauauaugugaaa

SEQ ID NO: 3623785 - RNA, 20 nt, Human
aauauauguuuaccuuuuaa

SEQ ID NO: 3623786 - RNA, 23 nt, Human
aauauauguuuaccuuuuaauua

SEQ ID NO: 3623787 - RNA, 15 nt, Human
aauauauuaccagca

SEQ ID NO: 3623788 - RNA, 20 nt, Human
aauauauuaccagcaagaau

SEQ ID NO: 3623789 - RNA, 18 nt, Human
aauauauuacuuaacugu

SEQ ID NO: 3623790 - RNA, 15 nt, Human
aauauauuauuacuu

SEQ ID NO: 3623791 - RNA, 18 nt, Human
aauauauuauuacuugua

SEQ ID NO: 3623792 - RNA, 20 nt, Human
aauauauuauuacuuguaaa

SEQ ID NO: 3623793 - RNA, 22 nt, Human
aauauauuauuacuuguaaaua

SEQ ID NO: 3623794 - RNA, 21 nt, Human
aauauauucagccuggcuuca

SEQ ID NO: 3623795 - RNA, 14 nt, Human
aauauauucucuuu

SEQ ID NO: 3623796 - RNA, 16 nt, Human
aauauauucucuuugg

SEQ ID NO: 3623797 - RNA, 17 nt, Human
aauauauucucuuuggu

SEQ ID NO: 3623798 - RNA, 19 nt, Human
aauauauugaacuuuugua

SEQ ID NO: 3623799 - RNA, 14 nt, Human
aauauauuuaaaaa

SEQ ID NO: 3623800 - RNA, 14 nt, Human
aauauauuuaaagg

SEQ ID NO: 3623801 - RNA, 19 nt, Human
aauauauuuaaagggaaau

SEQ ID NO: 3623802 - RNA, 19 nt, Human
aauauauuuaagauaauua

SEQ ID NO: 3623803 - RNA, 21 nt, Human
aauauauuuauaaggaaauuu

SEQ ID NO: 3623804 - RNA, 20 nt, Human
aauauauuuauuuaaagcau

SEQ ID NO: 3623805 - RNA, 15 nt, Human
aauauauuucagaua

SEQ ID NO: 3623806 - RNA, 19 nt, Human
aauauauuucuaaauguuu

SEQ ID NO: 3623807 - RNA, 14 nt, Human
aauauauuuuaaga

SEQ ID NO: 3623808 - RNA, 18 nt, Human
aauauauuuuaagacgaa

SEQ ID NO: 3623809 - RNA, 21 nt, Human
aauauauuuuaagacgaaaca

SEQ ID NO: 3623810 - RNA, 15 nt, Human
aauauauuuucuguu

SEQ ID NO: 3623811 - RNA, 13 nt, Human
aauauauuuugua

SEQ ID NO: 3623812 - RNA, 16 nt, Human
aauauauuuuguaugc

SEQ ID NO: 3623813 - RNA, 14 nt, Human
aauaucaaagucau

SEQ ID NO: 3623814 - RNA, 14 nt, Human
aauaucaaaugcag

SEQ ID NO: 3623815 - RNA, 22 nt, Human
aauaucaaaugcaguauauuuc

SEQ ID NO: 3623816 - RNA, 13 nt, Human
aauaucaaauuaa

SEQ ID NO: 3623817 - RNA, 14 nt, Human
aauaucaaauuaau

SEQ ID NO: 3623818 - RNA, 15 nt, Human
aauaucaauauaaug

SEQ ID NO: 3623819 - RNA, 14 nt, Human
aauaucaaucauuu

SEQ ID NO: 3623820 - RNA, 23 nt, Human
aauaucaccaaaaaccuauucca

SEQ ID NO: 3623821 - RNA, 17 nt, Human
aauaucacucauuaauu

SEQ ID NO: 3623822 - RNA, 22 nt, Human
aauaucacuugucaauaaaauc

SEQ ID NO: 3623823 - RNA, 21 nt, Human
aauaucaguuacucagcccug

SEQ ID NO: 3623824 - RNA, 14 nt, Human
aauaucauucagca

SEQ ID NO: 3623825 - RNA, 16 nt, Human
aauaucauucagcaac

SEQ ID NO: 3623826 - RNA, 23 nt, Human
aauaucauuuauuuuuuacauua

SEQ ID NO: 3623827 - RNA, 17 nt, Human
aauauccaggucaacag

SEQ ID NO: 3623828 - RNA, 20 nt, Human
aauauccaggucaacagaau

SEQ ID NO: 3623829 - RNA, 21 nt, Human
aauaucccagaaaaaguaacu

SEQ ID NO: 3623830 - RNA, 16 nt, Human
aauauccccucccagu

SEQ ID NO: 3623831 - RNA, 17 nt, Human
aauaucccuacauguau

SEQ ID NO: 3623832 - RNA, 19 nt, Human
aauaucccuacauguauug

SEQ ID NO: 3623833 - RNA, 19 nt, Human
aauaucccuccuguuggga

SEQ ID NO: 3623834 - RNA, 22 nt, Human
aauaucccuccuguugggagag

SEQ ID NO: 3623835 - RNA, 22 nt, Human
aauaucccuuggacauuuuaug

SEQ ID NO: 3623836 - RNA, 15 nt, Human
aauauccuaaacauc

SEQ ID NO: 3623837 - RNA, 17 nt, Human
aauauccuaaacaucau

SEQ ID NO: 3623838 - RNA, 13 nt, Human
aauauccucaauu

SEQ ID NO: 3623839 - RNA, 20 nt, Human
aauaucuaauauauaugaau

SEQ ID NO: 3623840 - RNA, 13 nt, Human
aauccucuuccuc

SEQ ID NO: 3623841 - RNA, 14 nt, Human
aauccucuuccucu

SEQ ID NO: 3623842 - RNA, 15 nt, Human
aauccucuuccucug

SEQ ID NO: 3623843 - RNA, 20 nt, Human
aauccucuuccucugaggcu

SEQ ID NO: 3623844 - RNA, 11 nt, Human
aauccuggcug

SEQ ID NO: 3623845 - RNA, 14 nt, Human
aauccuggggaaca

SEQ ID NO: 3623846 - RNA, 12 nt, Human
aauccugguucc

SEQ ID NO: 3623847 - RNA, 14 nt, Human
aauccugugugguu

SEQ ID NO: 3623848 - RNA, 22 nt, Human
aauccugugugguuuaguguaa

SEQ ID NO: 3623849 - RNA, 14 nt, Human
aauccuguugaaaa

SEQ ID NO: 3623850 - RNA, 20 nt, Human
aauccuugaagguauaucua

SEQ ID NO: 3623851 - RNA, 17 nt, Human
aauccuugauaauauau

SEQ ID NO: 3623852 - RNA, 17 nt, Human
aauccuugaugauugac

SEQ ID NO: 3623853 - RNA, 13 nt, Human
aaucgauggggga

SEQ ID NO: 3623854 - RNA, 20 nt, Human
aaucgaugggggaugcuuca

SEQ ID NO: 3623855 - RNA, 21 nt, Human
aaucgaugggggaugcuucau

SEQ ID NO: 3623856 - RNA, 23 nt, Human
aaucgcuccaccuugcagcucuc

SEQ ID NO: 3623857 - RNA, 18 nt, Human
aaucggcccacagcuccc

SEQ ID NO: 3623858 - RNA, 15 nt, Human
aaucgggguauaaua

SEQ ID NO: 3623859 - RNA, 19 nt, Human
aaucgggguauaauaggcu

SEQ ID NO: 3623860 - RNA, 16 nt, Human
aaucuaaaucuauuua

SEQ ID NO: 3623861 - RNA, 19 nt, Human
aaucuaaaucuauuuauua

SEQ ID NO: 3623862 - RNA, 13 nt, Human
aaucuaaauggaa

SEQ ID NO: 3623863 - RNA, 15 nt, Human
aaucuaacauuauua

SEQ ID NO: 3623864 - RNA, 20 nt, Human
aaucuaagcagcuuauuguu

SEQ ID NO: 3623865 - RNA, 12 nt, Human
aaucuaagggaa

SEQ ID NO: 3623866 - RNA, 18 nt, Human
aaucuaauauccccaaau

SEQ ID NO: 3623867 - RNA, 19 nt, Human
aaucuaauauuaaaaauau

SEQ ID NO: 3623868 - RNA, 19 nt, Human
aaucuacacuccagugaga

SEQ ID NO: 3623869 - RNA, 22 nt, Human
aaucuaccuucuguaguuuuau

SEQ ID NO: 3623870 - RNA, 15 nt, Human
aaucuacuaauucca

SEQ ID NO: 3623871 - RNA, 16 nt, Human
aaucuacucaaagcau

SEQ ID NO: 3623872 - RNA, 14 nt, Human
aaucuacugcauuu

SEQ ID NO: 3623873 - RNA, 15 nt, Human
aaucuacugcauuua

SEQ ID NO: 3623874 - RNA, 20 nt, Human
aaucuacugugguguuuugu

SEQ ID NO: 3623875 - RNA, 22 nt, Human
aaucuagaagaaaugaaauuuu

SEQ ID NO: 3623876 - RNA, 13 nt, Human
aaucuagacaaua

SEQ ID NO: 3623877 - RNA, 16 nt, Human
aaucuagacaauauac

SEQ ID NO: 3623878 - RNA, 21 nt, Human
aaucuagaggaaaagaaagaa

SEQ ID NO: 3623879 - RNA, 22 nt, Human
aaucuagccagugaacauaauu

SEQ ID NO: 3623880 - RNA, 16 nt, Human
aaucuaggaaaauauu

SEQ ID NO: 3623881 - RNA, 15 nt, Human
aaucuaguuuacaga

SEQ ID NO: 3623882 - RNA, 14 nt, Human
aaucuauagaaagu

SEQ ID NO: 3623883 - RNA, 21 nt, Human
aaucuauccaaaucugaagau

SEQ ID NO: 3623884 - RNA, 16 nt, Human
aaucuaugccaaagau

SEQ ID NO: 3623885 - RNA, 20 nt, Human
aaucuaugccaaagaucacu

SEQ ID NO: 3623886 - RNA, 17 nt, Human
aaucuauuauacuguau

SEQ ID NO: 3623887 - RNA, 18 nt, Human
aaucuauuggguucauua

SEQ ID NO: 3623888 - RNA, 19 nt, Human
aaucuauuggguucauuau

SEQ ID NO: 3623889 - RNA, 12 nt, Human
aaucuauuuaag

SEQ ID NO: 3623890 - RNA, 17 nt, Human
aaucuauuuaucuucau

SEQ ID NO: 3623891 - RNA, 16 nt, Human
aaucuauuuauuaaua

SEQ ID NO: 3623892 - RNA, 17 nt, Human
aaucuauuuauuaauau

SEQ ID NO: 3623893 - RNA, 22 nt, Human
aaucuauuuauuggacaugucc

SEQ ID NO: 3623894 - RNA, 17 nt, Human
aaucuauuuucuaugua

SEQ ID NO: 3623895 - RNA, 19 nt, Human
aaucuauuuucucauugcu

SEQ ID NO: 3623896 - RNA, 14 nt, Human
aaucuauuuuguaa

SEQ ID NO: 3623897 - RNA, 22 nt, Human
aaucucaaauaggcuauuaaaa

SEQ ID NO: 3623898 - RNA, 20 nt, Human
aaucucaaauucucaaccua

SEQ ID NO: 3623899 - RNA, 12 nt, Human
aaucucaaauuu

SEQ ID NO: 3623900 - RNA, 14 nt, Human
aaucucaaauuucu

SEQ ID NO: 3623901 - RNA, 16 nt, Human
aaucucaaauuucuaa

SEQ ID NO: 3623902 - RNA, 17 nt, Human
aaucucaaauuucuaaa

SEQ ID NO: 3623903 - RNA, 23 nt, Human
aaucucagagguagggcugccac

SEQ ID NO: 3623904 - RNA, 16 nt, Human
aaucucagugcuuucc

SEQ ID NO: 3623905 - RNA, 21 nt, Human
aaucucaguugauuuucugga

SEQ ID NO: 3623906 - RNA, 22 nt, Human
aaucucaguugauuuucuggau

SEQ ID NO: 3623907 - RNA, 17 nt, Human
aaucucauugcuuacaa

SEQ ID NO: 3623908 - RNA, 14 nt, Human
aaucuccaaaauaa

SEQ ID NO: 3623909 - RNA, 21 nt, Human
aaucuccaccagucauuuuuc

SEQ ID NO: 3623910 - RNA, 22 nt, Human
aaucuccaccagucauuuuuca

SEQ ID NO: 3623911 - RNA, 14 nt, Human
aaucuccuauuuuu

SEQ ID NO: 3623912 - RNA, 23 nt, Human
aaucucgcucugucgcccaggcu

SEQ ID NO: 3623913 - RNA, 15 nt, Human
aaucucguuucaaaa

SEQ ID NO: 3623914 - RNA, 19 nt, Human
aaucucucaaaucuguuau

SEQ ID NO: 3623915 - RNA, 20 nt, Human
aaucucuccacuuucagcug

SEQ ID NO: 3623916 - RNA, 14 nt, Human
aaucucucucuguu

SEQ ID NO: 3623917 - RNA, 18 nt, Human
aaucucucucuguugugu

SEQ ID NO: 3623918 - RNA, 15 nt, Human
aaucucucugcagcu

SEQ ID NO: 3623919 - RNA, 14 nt, Human
aaucucuguaggaa

SEQ ID NO: 3623920 - RNA, 14 nt, Human
aaucucuguuaugu

SEQ ID NO: 3623921 - RNA, 20 nt, Human
aaucucuguuauguacugua

SEQ ID NO: 3623922 - RNA, 21 nt, Human
aaucucuucauuauucucugc

SEQ ID NO: 3623923 - RNA, 21 nt, Human
aaucucuucuaaaaaaaaaca

SEQ ID NO: 3623924 - RNA, 11 nt, Human
aaucucuucug

SEQ ID NO: 3623925 - RNA, 17 nt, Human
aaucugaagauuguuua

SEQ ID NO: 3623926 - RNA, 18 nt, Human
aaucugaagauuguuuau

SEQ ID NO: 3623927 - RNA, 18 nt, Human
aaucugaagcuucacuca

SEQ ID NO: 3623928 - RNA, 23 nt, Human
aaucugaggaauggacauuucua

SEQ ID NO: 3623929 - RNA, 15 nt, Human
aaucugagggaaaug

SEQ ID NO: 3623930 - RNA, 20 nt, Human
aaucugagggaaauguuuug

SEQ ID NO: 3623931 - RNA, 16 nt, Human
aaucugaucguucuuu

SEQ ID NO: 3623932 - RNA, 17 nt, Human
aaucugauggccuuaau

SEQ ID NO: 3623933 - RNA, 18 nt, Human
aaucugauggccuuaauu

SEQ ID NO: 3623934 - RNA, 20 nt, Human
aaucugauggccuuaauuuc

SEQ ID NO: 3623935 - RNA, 18 nt, Human
aaucugauuggacauuuu

SEQ ID NO: 3623936 - RNA, 19 nt, Human
aaucugauuggacauuuuc

SEQ ID NO: 3623937 - RNA, 19 nt, Human
aaucugcaaagcauguuuu

SEQ ID NO: 3623938 - RNA, 19 nt, Human
aaucugcaauuucuacuac

SEQ ID NO: 3623939 - RNA, 18 nt, Human
aaucugcauuauuggaau

SEQ ID NO: 3623940 - RNA, 10 nt, Human
aaucugccug

SEQ ID NO: 3623941 - RNA, 14 nt, Human
aaucugcucacuuu

SEQ ID NO: 3623942 - RNA, 21 nt, Human
aaucuggaccccaucugugaa

SEQ ID NO: 3623943 - RNA, 22 nt, Human
aaucuggaccccaucugugaau

SEQ ID NO: 3623944 - RNA, 23 nt, Human
aaucuggaccccaucugugaaua

SEQ ID NO: 3623945 - RNA, 18 nt, Human
aaucuggacuccucuguc

SEQ ID NO: 3623946 - RNA, 20 nt, Human
aaucuggacuccucugucca

SEQ ID NO: 3623947 - RNA, 15 nt, Human
aaucuggagaccagg

SEQ ID NO: 3623948 - RNA, 18 nt, Human
aaucuggauucauauuua

SEQ ID NO: 3623949 - RNA, 21 nt, Human
aaucuggcuucuggccaggaa

SEQ ID NO: 3623950 - RNA, 16 nt, Human
aaucugggccagaauu

SEQ ID NO: 3623951 - RNA, 12 nt, Human
aaucuguaaacu

SEQ ID NO: 3623952 - RNA, 14 nt, Human
aaucuguaaacugu

SEQ ID NO: 3623953 - RNA, 16 nt, Human
aaucuguaaacugugu

SEQ ID NO: 3623954 - RNA, 13 nt, Human
aaucuguacaaug

SEQ ID NO: 3623955 - RNA, 13 nt, Human
aaucuguacauuu

SEQ ID NO: 3623956 - RNA, 14 nt, Human
aaucuguacauuuu

SEQ ID NO: 3623957 - RNA, 19 nt, Human
aaucuguacauuuuguugu

SEQ ID NO: 3623958 - RNA, 22 nt, Human
aagguagaaugaccuuguaaug

SEQ ID NO: 3623959 - RNA, 13 nt, Human
aagguagaauguu

SEQ ID NO: 3623960 - RNA, 14 nt, Human
aagguagaauguuu

SEQ ID NO: 3623961 - RNA, 20 nt, Human
aagguagcccuggccagagg

SEQ ID NO: 3623962 - RNA, 15 nt, Human
aagguaguucaagaa

SEQ ID NO: 3623963 - RNA, 16 nt, Human
aagguauaauaaaauu

SEQ ID NO: 3623964 - RNA, 20 nt, Human
aagguaucaguugcaauaau

SEQ ID NO: 3623965 - RNA, 21 nt, Human
aagguauuaagauuauaauug

SEQ ID NO: 3623966 - RNA, 22 nt, Human
aagguauuaagauuauaauugu

SEQ ID NO: 3623967 - RNA, 19 nt, Human
aagguauuugggaaacuug

SEQ ID NO: 3623968 - RNA, 15 nt, Human
aagguauuuugaaua

SEQ ID NO: 3623969 - RNA, 23 nt, Human
aaggucauggccacacugugaca

SEQ ID NO: 3623970 - RNA, 14 nt, Human
aaggucauuuccau

SEQ ID NO: 3623971 - RNA, 20 nt, Human
aaggucauuuccauguaugc

SEQ ID NO: 3623972 - RNA, 14 nt, Human
aaggucauuucuuc

SEQ ID NO: 3623973 - RNA, 17 nt, Human
aaggucauuucuucagu

SEQ ID NO: 3623974 - RNA, 20 nt, Human
aagguccucugucagucaca

SEQ ID NO: 3623975 - RNA, 18 nt, Human
aagguccugaaaguaacu

SEQ ID NO: 3623976 - RNA, 14 nt, Human
aaggucggaccagc

SEQ ID NO: 3623977 - RNA, 18 nt, Human
aaggucggaggcuuggga

SEQ ID NO: 3623978 - RNA, 20 nt, Human
aaggucggaggcuugggacc

SEQ ID NO: 3623979 - RNA, 13 nt, Human
aaggucuaugcag

SEQ ID NO: 3623980 - RNA, 12 nt, Human
aaggucucucuu

SEQ ID NO: 3623981 - RNA, 16 nt, Human
aaggucucucuuugga

SEQ ID NO: 3623982 - RNA, 20 nt, Human
aaggucucucuuuggacucu

SEQ ID NO: 3623983 - RNA, 14 nt, Human
aaggucugagccac

SEQ ID NO: 3623984 - RNA, 19 nt, Human
aaggucugagccacagcag

SEQ ID NO: 3623985 - RNA, 15 nt, Human
aaucuguuuuucuaa

SEQ ID NO: 3623986 - RNA, 23 nt, Human
aaucuguuuuuguuuauuucauu

SEQ ID NO: 3623987 - RNA, 21 nt, Human
aaucuuaaaaaguuguucaac

SEQ ID NO: 3623988 - RNA, 12 nt, Human
aaucuuaauacu

SEQ ID NO: 3623989 - RNA, 14 nt, Human
aaucuuaauacugu

SEQ ID NO: 3623990 - RNA, 15 nt, Human
aaucuuaauguuccu

SEQ ID NO: 3623991 - RNA, 14 nt, Human
aaucuuacagcugg

SEQ ID NO: 3623992 - RNA, 13 nt, Human
aaucuuacuuugu

SEQ ID NO: 3623993 - RNA, 14 nt, Human
aaucuuacuuugua

SEQ ID NO: 3623994 - RNA, 15 nt, Human
aaucuuacuuuguaa

SEQ ID NO: 3623995 - RNA, 18 nt, Human
aaucuuaguguaugauua

SEQ ID NO: 3623996 - RNA, 15 nt, Human
aaucuuauaguucua

SEQ ID NO: 3623997 - RNA, 18 nt, Human
aaucuuauaguucuaggc

SEQ ID NO: 3623998 - RNA, 22 nt, Human
aaucuuaucaagaguugugaca

SEQ ID NO: 3623999 - RNA, 13 nt, Human
aaucuuauuaaag

SEQ ID NO: 3624000 - RNA, 15 nt, Human
aaucuuauuaaaguu

SEQ ID NO: 3624001 - RNA, 16 nt, Human
aaucuuauuaaaguuu

SEQ ID NO: 3624002 - RNA, 19 nt, Human
aaucuuauuaaaguuucaa

SEQ ID NO: 3624003 - RNA, 20 nt, Human
aaucuuauuagggagaaaau

SEQ ID NO: 3624004 - RNA, 14 nt, Human
aaucuucaguauuu

SEQ ID NO: 3624005 - RNA, 22 nt, Human
aaucuucaguuuuaucuuuaau

SEQ ID NO: 3624006 - RNA, 21 nt, Human
aaucuuccuggucgaaaguua

SEQ ID NO: 3624007 - RNA, 23 nt, Human
aaucuuccuggucgaaaguuagu

SEQ ID NO: 3624008 - RNA, 14 nt, Human
aaucuuccuuuuau

SEQ ID NO: 3624009 - RNA, 20 nt, Human
aaucuucugaacuuggcgcu

SEQ ID NO: 3624010 - RNA, 23 nt, Human
aaucuucugaacuuggcgcugcc

SEQ ID NO: 3624011 - RNA, 17 nt, Human
aaucuugaaauuaagaa

SEQ ID NO: 3624012 - RNA, 22 nt, Human
aaucuugacuacagucaggaaa

SEQ ID NO: 3624013 - RNA, 13 nt, Human
aaucuugcaugua

SEQ ID NO: 3624014 - RNA, 12 nt, Human
aaucuuggaagu

SEQ ID NO: 3624015 - RNA, 13 nt, Human
aaucuugguuugc

SEQ ID NO: 3624016 - RNA, 15 nt, Human
aaucuugucaugugu

SEQ ID NO: 3624017 - RNA, 15 nt, Human
aaucuugucucaaug

SEQ ID NO: 3624018 - RNA, 18 nt, Human
aaucuugucucaaugcuc

SEQ ID NO: 3624019 - RNA, 14 nt, Human
aaucuugugaaaau

SEQ ID NO: 3624020 - RNA, 19 nt, Human
aaucuugugaaaauaauug

SEQ ID NO: 3624021 - RNA, 18 nt, Human
aaucuugugcuagaauac

SEQ ID NO: 3624022 - RNA, 19 nt, Human
aaucuugugcuagaauacu

SEQ ID NO: 3624023 - RNA, 16 nt, Human
aaucuuguuucugaaa

SEQ ID NO: 3624024 - RNA, 23 nt, Human
aaucuuguuuugaaaauaaccua

SEQ ID NO: 3624025 - RNA, 20 nt, Human
aaucuuuaaaaaaaaaauug

SEQ ID NO: 3624026 - RNA, 13 nt, Human
aaucuuuaauuaa

SEQ ID NO: 3624027 - RNA, 16 nt, Human
aaucuuuaauuuuaca

SEQ ID NO: 3624028 - RNA, 18 nt, Human
aaucuuuaccuguauaca

SEQ ID NO: 3624029 - RNA, 20 nt, Human
aaucuuuaccuguauacagu

SEQ ID NO: 3624030 - RNA, 17 nt, Human
aaucuuuagaaaaggca

SEQ ID NO: 3624031 - RNA, 15 nt, Human
aaucuuucuuuaccu

SEQ ID NO: 3624032 - RNA, 17 nt, Human
aaucuuucuuucuuaga

SEQ ID NO: 3624033 - RNA, 19 nt, Human
aaucuuucuuucuuagaaa

SEQ ID NO: 3624034 - RNA, 14 nt, Human
aaucuuugaaagac

SEQ ID NO: 3624035 - RNA, 16 nt, Human
aaucuuugaaagacuu

SEQ ID NO: 3624036 - RNA, 21 nt, Human
aaucuuugaaagguuagagaa

SEQ ID NO: 3624037 - RNA, 18 nt, Human
aaucuuuguaccaaaauu

SEQ ID NO: 3624038 - RNA, 13 nt, Human
aaucuuuguuaag

SEQ ID NO: 3624039 - RNA, 21 nt, Human
aaucuuuuaaaaauucaaaug

SEQ ID NO: 3624040 - RNA, 12 nt, Human
aaucuuuuacaa

SEQ ID NO: 3624041 - RNA, 14 nt, Human
aaucuuuucacaaa

SEQ ID NO: 3624042 - RNA, 15 nt, Human
aaucuuuucuuauuu

SEQ ID NO: 3624043 - RNA, 13 nt, Human
aaucuuuugaagc

SEQ ID NO: 3624044 - RNA, 21 nt, Human
aaucuuuuuuagcauaaaauu

SEQ ID NO: 3624045 - RNA, 14 nt, Human
aaucuuuuuuaugu

SEQ ID NO: 3624046 - RNA, 21 nt, Human
aaugaaaaauagugucuuugu

SEQ ID NO: 3624047 - RNA, 13 nt, Human
aaugaaaaaugaa

SEQ ID NO: 3624048 - RNA, 14 nt, Human
aaugaaaaauucca

SEQ ID NO: 3624049 - RNA, 17 nt, Human
aaugaaaaauucucagu

SEQ ID NO: 3624050 - RNA, 12 nt, Human
aaugaaaacaau

SEQ ID NO: 3624051 - RNA, 22 nt, Human
aaugaaaacaguguguaaacaa

SEQ ID NO: 3624052 - RNA, 13 nt, Human
aaugaaaagagaa

SEQ ID NO: 3624053 - RNA, 16 nt, Human
aaugaaaaugaauauc

SEQ ID NO: 3624054 - RNA, 20 nt, Human
aaugaaaauuguauguuaag

SEQ ID NO: 3624055 - RNA, 17 nt, Human
aaugaaaauuguauuau

SEQ ID NO: 3624056 - RNA, 23 nt, Human
aaugaaacaaagaguucaagaaa

SEQ ID NO: 3624057 - RNA, 16 nt, Human
aaugaaacaccuucuc

SEQ ID NO: 3624058 - RNA, 20 nt, Human
aaugaaacaccuucucugga

SEQ ID NO: 3624059 - RNA, 13 nt, Human
aaugaaagaaaau

SEQ ID NO: 3624060 - RNA, 21 nt, Human
aaugaaagacuguacaaagua

SEQ ID NO: 3624061 - RNA, 13 nt, Human
aaugaaagauuaa

SEQ ID NO: 3624062 - RNA, 15 nt, Human
aaugaaagauuaaac

SEQ ID NO: 3624063 - RNA, 19 nt, Human
aaugaaaguauaacugagu

SEQ ID NO: 3624064 - RNA, 20 nt, Human
aaugaaagucuugugacuag

SEQ ID NO: 3624065 - RNA, 13 nt, Human
aaugaaauacugu

SEQ ID NO: 3624066 - RNA, 12 nt, Human
aaugaaauaucu

SEQ ID NO: 3624067 - RNA, 14 nt, Human
aaugaaauauugcu

SEQ ID NO: 3624068 - RNA, 19 nt, Human
aaugaaauauuguuuccaa

SEQ ID NO: 3624069 - RNA, 18 nt, Human
aaugaaaugcucuccuuu

SEQ ID NO: 3624070 - RNA, 17 nt, Human
aaugaaauguaugugcu

SEQ ID NO: 3624071 - RNA, 14 nt, Human
aaugaaauuaacug

SEQ ID NO: 3624072 - RNA, 17 nt, Human
aaugaaauuacuacaaa

SEQ ID NO: 3624073 - RNA, 16 nt, Human
aaugaacaaaauuauu

SEQ ID NO: 3624074 - RNA, 13 nt, Human
aaugaacaagaga

SEQ ID NO: 3624075 - RNA, 14 nt, Human
aaugaacaagagaa

SEQ ID NO: 3624076 - RNA, 16 nt, Human
aaugaacaagagaagc

SEQ ID NO: 3624077 - RNA, 22 nt, Human
aaugaacaagagaagcauucuc

SEQ ID NO: 3624078 - RNA, 17 nt, Human
aaugaacacaaauuaug

SEQ ID NO: 3624079 - RNA, 21 nt, Human
aaugaacacucuuuugcuuua

SEQ ID NO: 3624080 - RNA, 17 nt, Human
aaugaaccccacugggu

SEQ ID NO: 3624081 - RNA, 15 nt, Human
aaugaagaauucaga

SEQ ID NO: 3624082 - RNA, 14 nt, Human
aaugaagaauuuaa

SEQ ID NO: 3624083 - RNA, 18 nt, Human
aaugaagaauuuaaagaa

SEQ ID NO: 3624084 - RNA, 19 nt, Human
aaugaagacaaaacauaca

SEQ ID NO: 3624085 - RNA, 20 nt, Human
aaugaagauacugaaauaaa

SEQ ID NO: 3624086 - RNA, 22 nt, Human
aaugaagauuauuuuuuaugag

SEQ ID NO: 3624087 - RNA, 14 nt, Human
aaugaagcaaugcu

SEQ ID NO: 3624088 - RNA, 15 nt, Human
aaugaagcagcuuua

SEQ ID NO: 3624089 - RNA, 17 nt, Human
aaugaagcagcuuuaaa

SEQ ID NO: 3624090 - RNA, 19 nt, Human
aaugaagcagcuuuaaaca

SEQ ID NO: 3624091 - RNA, 16 nt, Human
aaugaagcaguauuuu

SEQ ID NO: 3624092 - RNA, 15 nt, Human
aaugaagcuugugua

SEQ ID NO: 3624093 - RNA, 22 nt, Human
aaugaagcuuguguauccauua

SEQ ID NO: 3624094 - RNA, 19 nt, Human
aaugaagcuuuauacgugu

SEQ ID NO: 3624095 - RNA, 22 nt, Human
aaugaagguuaggauuuaacag

SEQ ID NO: 3624096 - RNA, 14 nt, Human
aaugaaguuggggu

SEQ ID NO: 3624097 - RNA, 20 nt, Human
aaugaaguuugaauguuaaa

SEQ ID NO: 3624098 - RNA, 15 nt, Human
aaugaauaauaauua

SEQ ID NO: 3624099 - RNA, 21 nt, Human
aaugaauaauaauuauccaga

SEQ ID NO: 3624100 - RNA, 13 nt, Human
aaugaauaccuua

SEQ ID NO: 3624101 - RNA, 18 nt, Human
aaugaauaucuauuaaua

SEQ ID NO: 3624102 - RNA, 20 nt, Human
aaugaauaucuauuaauaua

SEQ ID NO: 3624103 - RNA, 13 nt, Human
aaugaauauugaa

SEQ ID NO: 3624104 - RNA, 17 nt, Human
aaugaauauuuugauaa

SEQ ID NO: 3624105 - RNA, 12 nt, Human
aaugaaugaccu

SEQ ID NO: 3624106 - RNA, 16 nt, Human
aaugaaugaggucugg

SEQ ID NO: 3624107 - RNA, 20 nt, Human
aaugaaugucagugugacug

SEQ ID NO: 3624108 - RNA, 21 nt, Human
aaugaaugucagugugacuga

SEQ ID NO: 3624109 - RNA, 16 nt, Human
aaugaauguguguggu

SEQ ID NO: 3624110 - RNA, 16 nt, Human
aaugaauuccuagaau

SEQ ID NO: 3624111 - RNA, 17 nt, Human
aaugaauuuuuaugaua

SEQ ID NO: 3624112 - RNA, 15 nt, Human
aaugacaaucaugug

SEQ ID NO: 3624113 - RNA, 16 nt, Human
aaugacaaucaugugu

SEQ ID NO: 3624114 - RNA, 13 nt, Human
aaugacacagucu

SEQ ID NO: 3624115 - RNA, 14 nt, Human
aaugacacucauau

SEQ ID NO: 3624116 - RNA, 11 nt, Human
aaugacacugu

SEQ ID NO: 3624117 - RNA, 17 nt, Human
aaugacacuugucccca

SEQ ID NO: 3624118 - RNA, 11 nt, Human
aaugacagagc

SEQ ID NO: 3624119 - RNA, 16 nt, Human
aauuguaaggaaugau

SEQ ID NO: 3624120 - RNA, 13 nt, Human
aauuguaaucuga

SEQ ID NO: 3624121 - RNA, 16 nt, Human
aauuguaauuauaucu

SEQ ID NO: 3624122 - RNA, 19 nt, Human
aauuguacaaaauuaagca

SEQ ID NO: 3624123 - RNA, 20 nt, Human
aauuguacaaaauuaagcaa

SEQ ID NO: 3624124 - RNA, 15 nt, Human
aauuguacauauuug

SEQ ID NO: 3624125 - RNA, 14 nt, Human
aauuguauaacagg

SEQ ID NO: 3624126 - RNA, 15 nt, Human
aauuguauaacaggu

SEQ ID NO: 3624127 - RNA, 18 nt, Human
aauuguauaacagguuau

SEQ ID NO: 3624128 - RNA, 24 nt, Human
aauuguaucauuugaacaacuagg

SEQ ID NO: 3624129 - RNA, 22 nt, Human
aauuguaucguauagcuguauu

SEQ ID NO: 3624130 - RNA, 12 nt, Human
aauuguauguua

SEQ ID NO: 3624131 - RNA, 20 nt, Human
acaaauguuaaaauguguug

SEQ ID NO: 3624132 - RNA, 13 nt, Human
acaaauguuucua

SEQ ID NO: 3624133 - RNA, 14 nt, Human
acaaauguuuugcu

SEQ ID NO: 3624134 - RNA, 15 nt, Human
acaaauuaguuauau

SEQ ID NO: 3624135 - RNA, 16 nt, Human
acaaauuauaauguau

SEQ ID NO: 3624136 - RNA, 17 nt, Human
acaaauuauaauguauu

SEQ ID NO: 3624137 - RNA, 21 nt, Human
acaaauuaugcuaagaauuuu

SEQ ID NO: 3624138 - RNA, 22 nt, Human
acaaauugaacucuuugaauga

SEQ ID NO: 3624139 - RNA, 14 nt, Human
acaaauugcacaga

SEQ ID NO: 3624140 - RNA, 16 nt, Human
acaaauuggagcaggg

SEQ ID NO: 3624141 - RNA, 18 nt, Human
acaaauuuacagagacag

SEQ ID NO: 3624142 - RNA, 20 nt, Human
acaaauuucucuguuccaua

SEQ ID NO: 3624143 - RNA, 18 nt, Human
acaaauuuuucugcuuua

SEQ ID NO: 3624144 - RNA, 14 nt, Human
acaacaaaaauuug

SEQ ID NO: 3624145 - RNA, 18 nt, Human
acaacaaaggcaaguuaa

SEQ ID NO: 3624146 - RNA, 23 nt, Human
acaacaaaggcaaguuaagagaa

SEQ ID NO: 3624147 - RNA, 14 nt, Human
acaacaauccuucu

SEQ ID NO: 3624148 - RNA, 14 nt, Human
acaacacaaagaga

SEQ ID NO: 3624149 - RNA, 14 nt, Human
acaacacacacacu

SEQ ID NO: 3624150 - RNA, 19 nt, Human
acaacaccaaaaaauaucu

SEQ ID NO: 3624151 - RNA, 13 nt, Human
acaacacccauuu

SEQ ID NO: 3624152 - RNA, 21 nt, Human
acaacacucauugaccugagg

SEQ ID NO: 3624153 - RNA, 23 nt, Human
acaacacucauugaccugaggcc

SEQ ID NO: 3624154 - RNA, 13 nt, Human
acaacagaagcuu

SEQ ID NO: 3624155 - RNA, 13 nt, Human
acaacagaaguca

SEQ ID NO: 3624156 - RNA, 20 nt, Human
acaacagauuggauuuuaug

SEQ ID NO: 3624157 - RNA, 24 nt, Human
acaacagccaacagcuacaacagc

SEQ ID NO: 3624158 - RNA, 18 nt, Human
acaacagcucgauccaaa

SEQ ID NO: 3624159 - RNA, 16 nt, Human
acaacagguaaaacag

SEQ ID NO: 3624160 - RNA, 23 nt, Human
acaacagugcuaaaaaugggacu

SEQ ID NO: 3624161 - RNA, 22 nt, Human
acaacauccauguccuaugugu

SEQ ID NO: 3624162 - RNA, 17 nt, Human
acaacaucuuuuucuac

SEQ ID NO: 3624163 - RNA, 16 nt, Human
acaacauuaaaacaau

SEQ ID NO: 3624164 - RNA, 17 nt, Human
acaacauuuauauguag

SEQ ID NO: 3624165 - RNA, 20 nt, Human
acaacauuucuauagccaaa

SEQ ID NO: 3624166 - RNA, 15 nt, Human
acaaccaccgcuccc

SEQ ID NO: 3624167 - RNA, 15 nt, Human
acaaccacuggucug

SEQ ID NO: 3624168 - RNA, 22 nt, Human
acaaccaugucauuucagaagu

SEQ ID NO: 3624169 - RNA, 16 nt, Human
acaacccccagcuccc

SEQ ID NO: 3624170 - RNA, 19 nt, Human
acaacccugcaaaggacug

SEQ ID NO: 3624171 - RNA, 22 nt, Human
acaaccgaugcuccagccaacc

SEQ ID NO: 3624172 - RNA, 21 nt, Human
acaaccucccucuuguuuugu

SEQ ID NO: 3624173 - RNA, 14 nt, Human
acaaccugaaccua

SEQ ID NO: 3624174 - RNA, 18 nt, Human
acaaccugaaccuaggag

SEQ ID NO: 3624175 - RNA, 22 nt, Human
acaaccugcuuggguggagaag

SEQ ID NO: 3624176 - RNA, 23 nt, Human
acaaccuuggcuuggcccuggca

SEQ ID NO: 3624177 - RNA, 14 nt, Human
acaacgaggaagcc

SEQ ID NO: 3624178 - RNA, 14 nt, Human
acaacggagucaaa

SEQ ID NO: 3624179 - RNA, 22 nt, Human
acaacggagucaaaaauuaaac

SEQ ID NO: 3624180 - RNA, 15 nt, Human
acaacgugcauugug

SEQ ID NO: 3624181 - RNA, 10 nt, Human
acaacuaagu

SEQ ID NO: 3624182 - RNA, 22 nt, Human
acaacuaagugauuuguauguc

SEQ ID NO: 3624183 - RNA, 18 nt, Human
acaacuaugauuuggaaa

SEQ ID NO: 3624184 - RNA, 17 nt, Human
acaacuauuucggccuu

SEQ ID NO: 3624185 - RNA, 19 nt, Human
acaacuauuucggccuuuu

SEQ ID NO: 3624186 - RNA, 16 nt, Human
acaacuauuuucagau

SEQ ID NO: 3624187 - RNA, 16 nt, Human
acaacucacuccuuuu

SEQ ID NO: 3624188 - RNA, 21 nt, Human
acaacucacuccuuuuaaaga

SEQ ID NO: 3624189 - RNA, 12 nt, Human
acaacugacaca

SEQ ID NO: 3624190 - RNA, 14 nt, Human
acaacugacacagg

SEQ ID NO: 3624191 - RNA, 12 nt, Human
acaacugagucc

SEQ ID NO: 3624192 - RNA, 19 nt, Human
acaacuggaauaguuuuuu

SEQ ID NO: 3624193 - RNA, 20 nt, Human
acaacuggaauaguuuuuuu

SEQ ID NO: 3624194 - RNA, 11 nt, Human
acaacugugac

SEQ ID NO: 3624195 - RNA, 14 nt, Human
acaacuuaaaaagu

SEQ ID NO: 3624196 - RNA, 15 nt, Human
acaacuuaaauaaua

SEQ ID NO: 3624197 - RNA, 13 nt, Human
acaacuuagugua

SEQ ID NO: 3624198 - RNA, 18 nt, Human
acaacuucccagugaauu

SEQ ID NO: 3624199 - RNA, 17 nt, Human
acaacuuuaagaggaca

SEQ ID NO: 3624200 - RNA, 13 nt, Human
acaacuuuauacc

SEQ ID NO: 3624201 - RNA, 14 nt, Human
acaacuuuauaccc

SEQ ID NO: 3624202 - RNA, 16 nt, Human
acaacuuucucuugua

SEQ ID NO: 3624203 - RNA, 18 nt, Human
acaacuuucucuuguaaa

SEQ ID NO: 3624204 - RNA, 20 nt, Human
acaacuuuuuuuucuuuuuu

SEQ ID NO: 3624205 - RNA, 17 nt, Human
acaagaaaggagagucu

SEQ ID NO: 3624206 - RNA, 18 nt, Human
acaagaaaggagagucuu

SEQ ID NO: 3624207 - RNA, 21 nt, Human
acaagaaaggagagucuugca

SEQ ID NO: 3624208 - RNA, 21 nt, Human
acaagaaaggcugcuguacug

SEQ ID NO: 3624209 - RNA, 16 nt, Human
acaagaaaucccuguu

SEQ ID NO: 3624210 - RNA, 18 nt, Human
acaagaaauuugauuucu

SEQ ID NO: 3624211 - RNA, 12 nt, Human
acaagaagauga

SEQ ID NO: 3624212 - RNA, 15 nt, Human
acaagaagcauuuug

SEQ ID NO: 3624213 - RNA, 17 nt, Human
acaagaagcauuuugua

SEQ ID NO: 3624214 - RNA, 23 nt, Human
acaagaaggguuuuccacccugg

SEQ ID NO: 3624215 - RNA, 21 nt, Human
acaagaaguuuauucucauuu

SEQ ID NO: 3624216 - RNA, 12 nt, Human
acaagaaugcau

SEQ ID NO: 3624217 - RNA, 15 nt, Human
acaagaaugcauuga

SEQ ID NO: 3624218 - RNA, 15 nt, Human
acaagacaacauugu

SEQ ID NO: 3624219 - RNA, 17 nt, Human
acaagacaacauuguaa

SEQ ID NO: 3624220 - RNA, 17 nt, Human
acaagaccacguuucua

SEQ ID NO: 3624221 - RNA, 18 nt, Human
acaagaccacguuucuaa

SEQ ID NO: 3624222 - RNA, 19 nt, Human
acaagaccacguuucuaaa

SEQ ID NO: 3624223 - RNA, 20 nt, Human
acaagacccaaaaggcagaa

SEQ ID NO: 3624224 - RNA, 22 nt, Human
acaagacugacgccaggguaug

SEQ ID NO: 3624225 - RNA, 14 nt, Human
acaagacugcacau

SEQ ID NO: 3624226 - RNA, 16 nt, Human
acaagacuucaguaug

SEQ ID NO: 3624227 - RNA, 14 nt, Human
acaagagaaaaagc

SEQ ID NO: 3624228 - RNA, 14 nt, Human
acaagagaagcauu

SEQ ID NO: 3624229 - RNA, 21 nt, Human
acaagagcacuacauucauuu

SEQ ID NO: 3624230 - RNA, 18 nt, Human
acaagagcagccuguggc

SEQ ID NO: 3624231 - RNA, 20 nt, Human
acaagagcccagcagggccu

SEQ ID NO: 3624232 - RNA, 22 nt, Human
acaagagcccaggccuccuaca

SEQ ID NO: 3624233 - RNA, 18 nt, Human
acaagagcuuaacagugu

SEQ ID NO: 3624234 - RNA, 19 nt, Human
acaagagcuuaacagugug

SEQ ID NO: 3624235 - RNA, 16 nt, Human
acaagagguacagggu

SEQ ID NO: 3624236 - RNA, 22 nt, Human
acaagagugauucuugcugcua

SEQ ID NO: 3624237 - RNA, 17 nt, Human
acaagauaagcuuccag

SEQ ID NO: 3624238 - RNA, 18 nt, Human
acaagauagagagcuauu

SEQ ID NO: 3624239 - RNA, 16 nt, Human
acaagauauuguacau

SEQ ID NO: 3624240 - RNA, 19 nt, Human
acaagauauuguacauaaa

SEQ ID NO: 3624241 - RNA, 16 nt, Human
acaagaucuuucagga

SEQ ID NO: 3624242 - RNA, 15 nt, Human
acaagauucccagag

SEQ ID NO: 3624243 - RNA, 24 nt, Human
acaagauugguguuuuuuucuaug

SEQ ID NO: 3624244 - RNA, 16 nt, Human
acaagauuuagaaaaa

SEQ ID NO: 3624245 - RNA, 20 nt, Human
acaagauuuuaaagacaugu

SEQ ID NO: 3624246 - RNA, 21 nt, Human
acaagcagagugcacagcugu

SEQ ID NO: 3624247 - RNA, 22 nt, Human
acaagcagagugcacagcuguc

SEQ ID NO: 3624248 - RNA, 21 nt, Human
acaagcauucugucuugaagg

SEQ ID NO: 3624249 - RNA, 21 nt, Human
acaagccaacuuguaaauaca

SEQ ID NO: 3624250 - RNA, 12 nt, Human
acaagccaagaa

SEQ ID NO: 3624251 - RNA, 18 nt, Human
acaagccacaagucuucc

SEQ ID NO: 3624252 - RNA, 18 nt, Human
acaagccacgaaugaaug

SEQ ID NO: 3624253 - RNA, 14 nt, Human
acaagccagaacuu

SEQ ID NO: 3624254 - RNA, 16 nt, Human
acaagccccaggcagg

SEQ ID NO: 3624255 - RNA, 11 nt, Human
acaagccucug

SEQ ID NO: 3624256 - RNA, 23 nt, Human
acaagccucugcccaggcacugc

SEQ ID NO: 3624257 - RNA, 12 nt, Human
acaagccugagg

SEQ ID NO: 3624258 - RNA, 22 nt, Human
acaagccuggaaaaaaacauca

SEQ ID NO: 3624259 - RNA, 18 nt, Human
acaagccuggcaacacac

SEQ ID NO: 3624260 - RNA, 20 nt, Human
acaagcgugagccacugcac

SEQ ID NO: 3624261 - RNA, 21 nt, Human
acaagcgugagccacugcacc

SEQ ID NO: 3624262 - RNA, 22 nt, Human
acaagcuaauugggaguccagg

SEQ ID NO: 3624263 - RNA, 23 nt, Human
acaagcuaauugggaguccaggc

SEQ ID NO: 3624264 - RNA, 22 nt, Human
acaagcuaggugcuaauuaaua

SEQ ID NO: 3624265 - RNA, 15 nt, Human
acaagcuccaagcuc

SEQ ID NO: 3624266 - RNA, 17 nt, Human
acaagcuccaagcuccc

SEQ ID NO: 3624267 - RNA, 15 nt, Human
acaagcucccaggcc

SEQ ID NO: 3624268 - RNA, 16 nt, Human
acaagcuccuggucuu

SEQ ID NO: 3624269 - RNA, 19 nt, Human
acaagcugcacccucaggc

SEQ ID NO: 3624270 - RNA, 21 nt, Human
acaagcugcacccucaggcag

SEQ ID NO: 3624271 - RNA, 16 nt, Human
acaagcugccucccug

SEQ ID NO: 3624272 - RNA, 20 nt, Human
acaagcuguugaccaggcac

SEQ ID NO: 3624273 - RNA, 16 nt, Human
acaagcuucaguaagu

SEQ ID NO: 3624274 - RNA, 19 nt, Human
acaaggaagaaauuaacuu

SEQ ID NO: 3624275 - RNA, 14 nt, Human
aauguuaaagucag

SEQ ID NO: 3624276 - RNA, 20 nt, Human
aauguuaaauaaauuguaua

SEQ ID NO: 3624277 - RNA, 23 nt, Human
aauguuaaauaaauuguauauuc

SEQ ID NO: 3624278 - RNA, 17 nt, Human
aauguuaaauuuguaag

SEQ ID NO: 3624279 - RNA, 21 nt, Human
aauguuaaauuuguaaguuuc

SEQ ID NO: 3624280 - RNA, 22 nt, Human
aauguuaaauuuguaaguuuca

SEQ ID NO: 3624281 - RNA, 16 nt, Human
aauguuaacauuuuug

SEQ ID NO: 3624282 - RNA, 22 nt, Human
aauguuaaggaaacucuuaucu

SEQ ID NO: 3624283 - RNA, 21 nt, Human
aauguuaauggauuucagaag

SEQ ID NO: 3624284 - RNA, 20 nt, Human
aauguuacauaguguaggcu

SEQ ID NO: 3624285 - RNA, 16 nt, Human
aauguuacauuauuau

SEQ ID NO: 3624286 - RNA, 22 nt, Human
aauguuacugaucaugcauugu

SEQ ID NO: 3624287 - RNA, 17 nt, Human
aauguuacugccuuaau

SEQ ID NO: 3624288 - RNA, 17 nt, Human
aauguuagagguuuuaa

SEQ ID NO: 3624289 - RNA, 12 nt, Human
aauguuagagua

SEQ ID NO: 3624290 - RNA, 16 nt, Human
aauguuauagugaauu

SEQ ID NO: 3624291 - RNA, 22 nt, Human
aauguuauagugaauuaucccu

SEQ ID NO: 3624292 - RNA, 17 nt, Human
aauguuauaucauaugu

SEQ ID NO: 3624293 - RNA, 17 nt, Human
aauguuauuucugcaaa

SEQ ID NO: 3624294 - RNA, 23 nt, Human
aauguuauuuguuauuuucagua

SEQ ID NO: 3624295 - RNA, 12 nt, Human
aauguucaucau

SEQ ID NO: 3624296 - RNA, 11 nt, Human
aauguucauug

SEQ ID NO: 3624297 - RNA, 17 nt, Human
aauguucauuguaaugu

SEQ ID NO: 3624298 - RNA, 21 nt, Human
aauguuccucaaagcuuggau

SEQ ID NO: 3624299 - RNA, 22 nt, Human
aauguuccucaaagcuuggauu

SEQ ID NO: 3624300 - RNA, 23 nt, Human
aauguucuaaguuucuaagauuc

SEQ ID NO: 3624301 - RNA, 20 nt, Human
aauguucuaugguuaugaaa

SEQ ID NO: 3624302 - RNA, 21 nt, Human
aauguucuaugguuaugaaag

SEQ ID NO: 3624303 - RNA, 17 nt, Human
aauguucucagauuucu

SEQ ID NO: 3624304 - RNA, 21 nt, Human
aauguucugaauaauuucuua

SEQ ID NO: 3624305 - RNA, 15 nt, Human
aauguucugacauua

SEQ ID NO: 3624306 - RNA, 12 nt, Human
aauguucuguga

SEQ ID NO: 3624307 - RNA, 21 nt, Human
aauguucuuaugcaaaaugga

SEQ ID NO: 3624308 - RNA, 14 nt, Human
aauguucuuccagu

SEQ ID NO: 3624309 - RNA, 23 nt, Human
aauguucuuuauauacaauaaug

SEQ ID NO: 3624310 - RNA, 17 nt, Human
aauguucuuuggaaagu

SEQ ID NO: 3624311 - RNA, 16 nt, Human
aauguugaaaagucaa

SEQ ID NO: 3624312 - RNA, 19 nt, Human
aauguugaaaagucaaacu

SEQ ID NO: 3624313 - RNA, 15 nt, Human
aauguugaaauauga

SEQ ID NO: 3624314 - RNA, 16 nt, Human
aauguugaacaaaaua

SEQ ID NO: 3624315 - RNA, 17 nt, Human
aauguugaacaaaauaa

SEQ ID NO: 3624316 - RNA, 16 nt, Human
aauguugaagaacuca

SEQ ID NO: 3624317 - RNA, 23 nt, Human
aauguugaagaacucaugugauu

SEQ ID NO: 3624318 - RNA, 14 nt, Human
aauguugaauuuug

SEQ ID NO: 3624319 - RNA, 12 nt, Human
aauguugauuuc

SEQ ID NO: 3624320 - RNA, 17 nt, Human
aauguugauuucuaguu

SEQ ID NO: 3624321 - RNA, 20 nt, Human
aauguugauuucuaguuauu

SEQ ID NO: 3624322 - RNA, 14 nt, Human
aauguugcugaaaa

SEQ ID NO: 3624323 - RNA, 13 nt, Human
aauguuggauaag

SEQ ID NO: 3624324 - RNA, 18 nt, Human
aauguuggauaaggaauu

SEQ ID NO: 3624325 - RNA, 23 nt, Human
aauguuggcagaugcagcucuuc

SEQ ID NO: 3624326 - RNA, 22 nt, Human
aauguugggacugcuaaauaaa

SEQ ID NO: 3624327 - RNA, 17 nt, Human
aauguuguauucaguga

SEQ ID NO: 3624328 - RNA, 20 nt, Human
aauguugugaauaauuacag

SEQ ID NO: 3624329 - RNA, 21 nt, Human
aauguugugaauaauuacagu

SEQ ID NO: 3624330 - RNA, 17 nt, Human
aauguugugguuuguug

SEQ ID NO: 3624331 - RNA, 20 nt, Human
aauguuuaagcagaauugga

SEQ ID NO: 3624332 - RNA, 22 nt, Human
aauguuuaagcagaauuggaaa

SEQ ID NO: 3624333 - RNA, 14 nt, Human
aauguuuaaucaua

SEQ ID NO: 3624334 - RNA, 16 nt, Human
aauguuuaaucauaua

SEQ ID NO: 3624335 - RNA, 17 nt, Human
aauguuuaaucauauaa

SEQ ID NO: 3624336 - RNA, 23 nt, Human
aauguuuacacucuuuguaagag

SEQ ID NO: 3624337 - RNA, 15 nt, Human
aauguuuaugagcca

SEQ ID NO: 3624338 - RNA, 18 nt, Human
aauguuuaugagccagac

SEQ ID NO: 3624339 - RNA, 23 nt, Human
aauguuuaugcaaggaaggaaag

SEQ ID NO: 3624340 - RNA, 20 nt, Human
aauguuuauuccugauaaua

SEQ ID NO: 3624341 - RNA, 15 nt, Human
aauguuucugcagua

SEQ ID NO: 3624342 - RNA, 23 nt, Human
aauguuucuucuagguucuaaaa

SEQ ID NO: 3624343 - RNA, 21 nt, Human
aauguuucuuuuguuugguaa

SEQ ID NO: 3624344 - RNA, 20 nt, Human
aauguuugaggagcauguuu

SEQ ID NO: 3624345 - RNA, 21 nt, Human
aauguuugaggagcauguuuu

SEQ ID NO: 3624346 - RNA, 23 nt, Human
aauguuugaggagcauguuuugu

SEQ ID NO: 3624347 - RNA, 13 nt, Human
aauguuugcauau

SEQ ID NO: 3624348 - RNA, 16 nt, Human
aauguuugccucugcc

SEQ ID NO: 3624349 - RNA, 19 nt, Human
aauguuugccucugccucu

SEQ ID NO: 3624350 - RNA, 12 nt, Human
aauguuugcuau

SEQ ID NO: 3624351 - RNA, 21 nt, Human
aauguuuggcauguaaaugua

SEQ ID NO: 3624352 - RNA, 19 nt, Human
aauguuugucucaguugga

SEQ ID NO: 3624353 - RNA, 20 nt, Human
aauguuugucucaguuggaa

SEQ ID NO: 3624354 - RNA, 16 nt, Human
aauguuuuaaauguac

SEQ ID NO: 3624355 - RNA, 14 nt, Human
aauguuuuaaauuc

SEQ ID NO: 3624356 - RNA, 22 nt, Human
aauguuuuacugugaaacuggc

SEQ ID NO: 3624357 - RNA, 17 nt, Human
aauguuuuauacuguuu

SEQ ID NO: 3624358 - RNA, 14 nt, Human
aauguuuucagcua

SEQ ID NO: 3624359 - RNA, 16 nt, Human
aauguuuuguaaacau

SEQ ID NO: 3624360 - RNA, 20 nt, Human
aauguuuuguaaacauuuau

SEQ ID NO: 3624361 - RNA, 20 nt, Human
aauguuuuguaaacuuugaa

SEQ ID NO: 3624362 - RNA, 22 nt, Human
aauguuuuuaagaugaucaucu

SEQ ID NO: 3624363 - RNA, 13 nt, Human
aauguuuuuugcc

SEQ ID NO: 3624364 - RNA, 23 nt, Human
aauguuuuuugccacagcuuuug

SEQ ID NO: 3624365 - RNA, 20 nt, Human
aauguuuuuuuuuaaagacu

SEQ ID NO: 3624366 - RNA, 21 nt, Human
aauuaaaaaaaaagaucuguu

SEQ ID NO: 3624367 - RNA, 17 nt, Human
aauuaaaaaagauaaac

SEQ ID NO: 3624368 - RNA, 24 nt, Human
aauuaaaaaagauaaacacaagau

SEQ ID NO: 3624369 - RNA, 23 nt, Human
aauuaaaaagauucuuuuucuga

SEQ ID NO: 3624370 - RNA, 20 nt, Human
aauuaaaacaaugucaaggu

SEQ ID NO: 3624371 - RNA, 14 nt, Human
aauuaaaacacuuu

SEQ ID NO: 3624372 - RNA, 13 nt, Human
aauuaaaacugaa

SEQ ID NO: 3624373 - RNA, 16 nt, Human
aauuaaaacuucuuaa

SEQ ID NO: 3624374 - RNA, 20 nt, Human
aauuaaaacuucuuaaauau

SEQ ID NO: 3624375 - RNA, 18 nt, Human
aauuaaaagcaaaucauu

SEQ ID NO: 3624376 - RNA, 18 nt, Human
aauuaaaaguugaauuuu

SEQ ID NO: 3624377 - RNA, 15 nt, Human
aauuaaacggauuau

SEQ ID NO: 3624378 - RNA, 16 nt, Human
aauuaaacggauuauu

SEQ ID NO: 3624379 - RNA, 22 nt, Human
aauuaaacggauuauuuuuuca

SEQ ID NO: 3624380 - RNA, 21 nt, Human
aauuaaacuuccaaagaaagu

SEQ ID NO: 3624381 - RNA, 19 nt, Human
aauuaaacuuuuaauucau

SEQ ID NO: 3624382 - RNA, 12 nt, Human
aauuaaagaaaa

SEQ ID NO: 3624383 - RNA, 18 nt, Human
aauuaaagaaaauaaaau

SEQ ID NO: 3624384 - RNA, 15 nt, Human
aauuaaagcuguuau

SEQ ID NO: 3624385 - RNA, 14 nt, Human
aauuaaaguacuuu

SEQ ID NO: 3624386 - RNA, 16 nt, Human
aauuaaaguacuuuaa

SEQ ID NO: 3624387 - RNA, 14 nt, Human
aauuaaauauaugu

SEQ ID NO: 3624388 - RNA, 12 nt, Human
aauuaaauguag

SEQ ID NO: 3624389 - RNA, 12 nt, Human
aauuaacacugc

SEQ ID NO: 3624390 - RNA, 16 nt, Human
aauuaacauauaauau

SEQ ID NO: 3624391 - RNA, 21 nt, Human
aauuaacauauaauauauguu

SEQ ID NO: 3624392 - RNA, 13 nt, Human
aauuaacauguua

SEQ ID NO: 3624393 - RNA, 20 nt, Human
aauuaaccccauaauuagau

SEQ ID NO: 3624394 - RNA, 22 nt, Human
aauuaacuggguaaugaaacaa

SEQ ID NO: 3624395 - RNA, 15 nt, Human
aauuaacuugaguuu

SEQ ID NO: 3624396 - RNA, 12 nt, Human
aauuaacuuuua

SEQ ID NO: 3624397 - RNA, 18 nt, Human
aauuaacuuuuauaaacu

SEQ ID NO: 3624398 - RNA, 22 nt, Human
aauuaacuuuuauaaacuuuac

SEQ ID NO: 3624399 - RNA, 14 nt, Human
aauuaagaaggcaa

SEQ ID NO: 3624400 - RNA, 19 nt, Human
aauuaagaaggcaaaaaug

SEQ ID NO: 3624401 - RNA, 15 nt, Human
aauuaagacugaaaa

SEQ ID NO: 3624402 - RNA, 15 nt, Human
aauuaagagagucua

SEQ ID NO: 3624403 - RNA, 13 nt, Human
aauuaagcaaaug

SEQ ID NO: 3624404 - RNA, 15 nt, Human
aauuaagcaaauguu

SEQ ID NO: 3624405 - RNA, 19 nt, Human
aauuaagcccuaagguccu

SEQ ID NO: 3624406 - RNA, 16 nt, Human
aauuaaggauuuuaug

SEQ ID NO: 3624407 - RNA, 20 nt, Human
aauuaaggauuuuaugcuuu

SEQ ID NO: 3624408 - RNA, 21 nt, Human
aauuaaggcaacugaacaaaa

SEQ ID NO: 3624409 - RNA, 13 nt, Human
aauuaagguguuu

SEQ ID NO: 3624410 - RNA, 13 nt, Human
aauuaaguacuau

SEQ ID NO: 3624411 - RNA, 22 nt, Human
aauuaaguuagggaauggcaca

SEQ ID NO: 3624412 - RNA, 15 nt, Human
aauuaauaaucuuau

SEQ ID NO: 3624413 - RNA, 20 nt, Human
aauuaauaguuugucuauuu

SEQ ID NO: 3624414 - RNA, 17 nt, Human
aauuaauauauuaaaau

SEQ ID NO: 3624415 - RNA, 17 nt, Human
aauuaauaucuuucugc

SEQ ID NO: 3624416 - RNA, 16 nt, Human
aauuaaugaaauaucu

SEQ ID NO: 3624417 - RNA, 16 nt, Human
aauuaauggaaucuuc

SEQ ID NO: 3624418 - RNA, 14 nt, Human
aauaacuacugugu

SEQ ID NO: 3624419 - RNA, 17 nt, Human
aauaacuccucccaggg

SEQ ID NO: 3624420 - RNA, 21 nt, Human
aauaacuccuucuuguaguag

SEQ ID NO: 3624421 - RNA, 20 nt, Human
aauaacuggaaaacagaaca

SEQ ID NO: 3624422 - RNA, 17 nt, Human
aauaacuggaacacucu

SEQ ID NO: 3624423 - RNA, 20 nt, Human
aauaacugugaaguuuacau

SEQ ID NO: 3624424 - RNA, 14 nt, Human
aauaacuucagucc

SEQ ID NO: 3624425 - RNA, 24 nt, Human
aauaacuucaguccugcuccagaa

SEQ ID NO: 3624426 - RNA, 12 nt, Human
aauaagaaggua

SEQ ID NO: 3624427 - RNA, 13 nt, Human
aauaagaauagaa

SEQ ID NO: 3624428 - RNA, 15 nt, Human
aauaagaauuugcau

SEQ ID NO: 3624429 - RNA, 15 nt, Human
aauaagagaaagaaa

SEQ ID NO: 3624430 - RNA, 21 nt, Human
aauaagagaagcuacuuuguu

SEQ ID NO: 3624431 - RNA, 13 nt, Human
aauaagagauuug

SEQ ID NO: 3624432 - RNA, 12 nt, Human
aauaagauucua

SEQ ID NO: 3624433 - RNA, 15 nt, Human
aauaagcaaaauccu

SEQ ID NO: 3624434 - RNA, 19 nt, Human
aauaagcacuguaaacuuc

SEQ ID NO: 3624435 - RNA, 14 nt, Human
aauaagcaggugga

SEQ ID NO: 3624436 - RNA, 23 nt, Human
aauaagcagguggaucuauuuca

SEQ ID NO: 3624437 - RNA, 17 nt, Human
aauaagcaucaaacucu

SEQ ID NO: 3624438 - RNA, 16 nt, Human
aauaagcuaguugaau

SEQ ID NO: 3624439 - RNA, 22 nt, Human
aauaagcuaguugaauacuuga

SEQ ID NO: 3624440 - RNA, 22 nt, Human
aauaagcucuaguucuuaacaa

SEQ ID NO: 3624441 - RNA, 16 nt, Human
aauaaggcacccaucu

SEQ ID NO: 3624442 - RNA, 18 nt, Human
aauaaggcacccaucugu

SEQ ID NO: 3624443 - RNA, 16 nt, Human
aauaaggucaaugcca

SEQ ID NO: 3624444 - RNA, 15 nt, Human
aauaagucaacagua

SEQ ID NO: 3624445 - RNA, 22 nt, Human
aauaagucaacaguaaaccacu

SEQ ID NO: 3624446 - RNA, 12 nt, Human
aauaagucugau

SEQ ID NO: 3624447 - RNA, 17 nt, Human
aauaagugcccucuccc

SEQ ID NO: 3624448 - RNA, 21 nt, Human
aauaaguucaaauucuucuga

SEQ ID NO: 3624449 - RNA, 20 nt, Human
aauaauaaagaauagcuuua

SEQ ID NO: 3624450 - RNA, 13 nt, Human
aauaauaaagauc

SEQ ID NO: 3624451 - RNA, 19 nt, Human
aauaauaaagaugcucuuu

SEQ ID NO: 3624452 - RNA, 14 nt, Human
aauaauaaauaguu

SEQ ID NO: 3624453 - RNA, 16 nt, Human
aauaauaaaugcccuc

SEQ ID NO: 3624454 - RNA, 21 nt, Human
aauaauaauuagguuaacauu

SEQ ID NO: 3624455 - RNA, 20 nt, Human
aauaauaauuuuuauauuua

SEQ ID NO: 3624456 - RNA, 20 nt, Human
aauaauacauugaauuagaa

SEQ ID NO: 3624457 - RNA, 13 nt, Human
aauaauaccucaa

SEQ ID NO: 3624458 - RNA, 21 nt, Human
aauaauaccucaauguuugag

SEQ ID NO: 3624459 - RNA, 15 nt, Human
aauaauaccuuagaa

SEQ ID NO: 3624460 - RNA, 14 nt, Human
aauaauauauguuu

SEQ ID NO: 3624461 - RNA, 15 nt, Human
aauaauauauuuucu

SEQ ID NO: 3624462 - RNA, 13 nt, Human
aauaauaugauuu

SEQ ID NO: 3624463 - RNA, 13 nt, Human
aauaauaugcauu

SEQ ID NO: 3624464 - RNA, 17 nt, Human
aauaauaugcauuguca

SEQ ID NO: 3624465 - RNA, 12 nt, Human
aauaauauuguu

SEQ ID NO: 3624466 - RNA, 20 nt, Human
aauaauauuguuguauaauu

SEQ ID NO: 3624467 - RNA, 16 nt, Human
aauaauauuguuuuuc

SEQ ID NO: 3624468 - RNA, 15 nt, Human
aauaaucacauugac

SEQ ID NO: 3624469 - RNA, 17 nt, Human
aauaaucacauugacuu

SEQ ID NO: 3624470 - RNA, 21 nt, Human
aauaauccuaaacauaugaau

SEQ ID NO: 3624471 - RNA, 16 nt, Human
aauaaucggcccacag

SEQ ID NO: 3624472 - RNA, 15 nt, Human
aauaaucuuguuucu

SEQ ID NO: 3624473 - RNA, 20 nt, Human
aauaaugagcuauuaaaacu

SEQ ID NO: 3624474 - RNA, 21 nt, Human
aauaaugagcuauuaaaacuc

SEQ ID NO: 3624475 - RNA, 15 nt, Human
aauaaugcaguaugg

SEQ ID NO: 3624476 - RNA, 17 nt, Human
aauaaugcaguauggua

SEQ ID NO: 3624477 - RNA, 22 nt, Human
aauaaugcaguaugguacauuu

SEQ ID NO: 3624478 - RNA, 23 nt, Human
aauaaugcauccagcaguacaau

SEQ ID NO: 3624479 - RNA, 16 nt, Human
aauaaugccuuuguaa

SEQ ID NO: 3624480 - RNA, 21 nt, Human
aauaaugcuacaauuuuaaga

SEQ ID NO: 3624481 - RNA, 15 nt, Human
aauaaugcuuugaaa

SEQ ID NO: 3624482 - RNA, 15 nt, Human
aauaauggaaaaaaa

SEQ ID NO: 3624483 - RNA, 22 nt, Human
aauaauggaaaaaaaaaaaaga

SEQ ID NO: 3624484 - RNA, 20 nt, Human
aauaauggucccauccaggc

SEQ ID NO: 3624485 - RNA, 22 nt, Human
aauaauguaagacaaauauguu

SEQ ID NO: 3624486 - RNA, 12 nt, Human
aauaaugucucu

SEQ ID NO: 3624487 - RNA, 21 nt, Human
aauaauguguaguucauguaa

SEQ ID NO: 3624488 - RNA, 21 nt, Human
aauaauguuaaccaaggaaau

SEQ ID NO: 3624489 - RNA, 16 nt, Human
aauaauguucuauugu

SEQ ID NO: 3624490 - RNA, 17 nt, Human
aauuaguauuuauuuaa

SEQ ID NO: 3624491 - RNA, 17 nt, Human
aauuagugccacuuaau

SEQ ID NO: 3624492 - RNA, 18 nt, Human
aauuagugcuaaguguga

SEQ ID NO: 3624493 - RNA, 21 nt, Human
aauuagugcuaagugugaacu

SEQ ID NO: 3624494 - RNA, 18 nt, Human
aauuaguggcacuugcuu

SEQ ID NO: 3624495 - RNA, 14 nt, Human
aauuaguuuccuuu

SEQ ID NO: 3624496 - RNA, 15 nt, Human
aauuaguuuccuuuu

SEQ ID NO: 3624497 - RNA, 14 nt, Human
aauuaguuuuauau

SEQ ID NO: 3624498 - RNA, 20 nt, Human
aauuauaaacucauuuugcu

SEQ ID NO: 3624499 - RNA, 13 nt, Human
aauuauaaaugac

SEQ ID NO: 3624500 - RNA, 20 nt, Human
aauuauaacuguaaagaugu

SEQ ID NO: 3624501 - RNA, 14 nt, Human
aauuauaaggacug

SEQ ID NO: 3624502 - RNA, 16 nt, Human
aauuauaaggacugca

SEQ ID NO: 3624503 - RNA, 16 nt, Human
aauuauaauauacuau

SEQ ID NO: 3624504 - RNA, 14 nt, Human
aauuauaauguauu

SEQ ID NO: 3624505 - RNA, 22 nt, Human
aauuauaauguauucauauuug

SEQ ID NO: 3624506 - RNA, 19 nt, Human
aauuauacccccugcaaag

SEQ ID NO: 3624507 - RNA, 18 nt, Human
aauuauagaccucuagua

SEQ ID NO: 3624508 - RNA, 15 nt, Human
aauuauagaugggaa

SEQ ID NO: 3624509 - RNA, 22 nt, Human
aauuauagcucuaauguuugca

SEQ ID NO: 3624510 - RNA, 21 nt, Human
aauuauaggaauaucaauaua

SEQ ID NO: 3624511 - RNA, 18 nt, Human
aauuauaggagacuugua

SEQ ID NO: 3624512 - RNA, 22 nt, Human
aauuauagugauguaaucuuga

SEQ ID NO: 3624513 - RNA, 19 nt, Human
aauuauaguguagaaaaga

SEQ ID NO: 3624514 - RNA, 13 nt, Human
aauuauaguuuca

SEQ ID NO: 3624515 - RNA, 21 nt, Human
aauuauaguuucugaggcuuu

SEQ ID NO: 3624516 - RNA, 19 nt, Human
aauuauauaacuguauuug

SEQ ID NO: 3624517 - RNA, 21 nt, Human
aauuauauaacuguauuugaa

SEQ ID NO: 3624518 - RNA, 21 nt, Human
aauuauauagguugugcaaau

SEQ ID NO: 3624519 - RNA, 20 nt, Human
aauuauauaguuacccaaau

SEQ ID NO: 3624520 - RNA, 20 nt, Human
aauuauaucugaggaauucu

SEQ ID NO: 3624521 - RNA, 22 nt, Human
aauuauaucugaggaauucugu

SEQ ID NO: 3624522 - RNA, 23 nt, Human
aauuauaucugaggaauucugua

SEQ ID NO: 3624523 - RNA, 12 nt, Human
aauuauaucugu

SEQ ID NO: 3624524 - RNA, 20 nt, Human
aauuaucaauaucuaauaua

SEQ ID NO: 3624525 - RNA, 20 nt, Human
aauuaucagcaaagaaaaaa

SEQ ID NO: 3624526 - RNA, 17 nt, Human
aauuaucgggaacagug

SEQ ID NO: 3624527 - RNA, 19 nt, Human
aauuaucgggaacaguguu

SEQ ID NO: 3624528 - RNA, 14 nt, Human
aauuaucuaauuua

SEQ ID NO: 3624529 - RNA, 23 nt, Human
aauuaucuauuuguauauauaca

SEQ ID NO: 3624530 - RNA, 17 nt, Human
aauuaucuugauacauu

SEQ ID NO: 3624531 - RNA, 20 nt, Human
aauuaucuugauacauucaa

SEQ ID NO: 3624532 - RNA, 13 nt, Human
aauuaugaaacuu

SEQ ID NO: 3624533 - RNA, 15 nt, Human
aauuaugaaacuuuu

SEQ ID NO: 3624534 - RNA, 12 nt, Human
aauuaugacaau

SEQ ID NO: 3624535 - RNA, 17 nt, Human
aauuaugagauugguuu

SEQ ID NO: 3624536 - RNA, 22 nt, Human
aauuaugauggaagacaggaaa

SEQ ID NO: 3624537 - RNA, 13 nt, Human
aauuaugauuugg

SEQ ID NO: 3624538 - RNA, 15 nt, Human
aauuaugauuugggu

SEQ ID NO: 3624539 - RNA, 17 nt, Human
aauuaugccuuuuuuga

SEQ ID NO: 3624540 - RNA, 19 nt, Human
aauuaugccuuuuuugauc

SEQ ID NO: 3624541 - RNA, 21 nt, Human
aauuaugggaauaauugcuuu

SEQ ID NO: 3624542 - RNA, 15 nt, Human
aauuauguaaugcaa

SEQ ID NO: 3624543 - RNA, 18 nt, Human
aauuauguaaugcaaaau

SEQ ID NO: 3624544 - RNA, 16 nt, Human
aauuauguauguuuac

SEQ ID NO: 3624545 - RNA, 11 nt, Human
aauuaugugac

SEQ ID NO: 3624546 - RNA, 20 nt, Human
aauuaugugacauuuuacau

SEQ ID NO: 3624547 - RNA, 22 nt, Human
aauuaugugccagauuuaugca

SEQ ID NO: 3624548 - RNA, 23 nt, Human
aauuauguuaaacuagcauaucu

SEQ ID NO: 3624549 - RNA, 14 nt, Human
aauuauguuauuga

SEQ ID NO: 3624550 - RNA, 14 nt, Human
aauuauguuuauau

SEQ ID NO: 3624551 - RNA, 22 nt, Human
aauuauguuugccacuuugcaa

SEQ ID NO: 3624552 - RNA, 22 nt, Human
aauuauguuuuuauuaagauua

SEQ ID NO: 3624553 - RNA, 18 nt, Human
aauuauuaacuacauuua

SEQ ID NO: 3624554 - RNA, 22 nt, Human
aauuauuaaugaaaauaagaau

SEQ ID NO: 3624555 - RNA, 18 nt, Human
aauuauuacaguguuuau

SEQ ID NO: 3624556 - RNA, 23 nt, Human
aauuauuacaguguuuauccuuu

SEQ ID NO: 3624557 - RNA, 15 nt, Human
aauuauuauaaaaau

SEQ ID NO: 3624558 - RNA, 22 nt, Human
aauuauuauaaaaauauuaaga

SEQ ID NO: 3624559 - RNA, 13 nt, Human
aauuauuauucuu

SEQ ID NO: 3624560 - RNA, 18 nt, Human
aauuauuauuuauauaug

SEQ ID NO: 3624561 - RNA, 15 nt, Human
aauuauuauuugugu

SEQ ID NO: 3624562 - RNA, 14 nt, Human
acacuaaccugacc

SEQ ID NO: 3624563 - RNA, 17 nt, Human
acacuaacgaaauauca

SEQ ID NO: 3624564 - RNA, 20 nt, Human
acacuaacucaccagcccca

SEQ ID NO: 3624565 - RNA, 14 nt, Human
acacuaagagagaa

SEQ ID NO: 3624566 - RNA, 19 nt, Human
acacuaagagagaaugaga

SEQ ID NO: 3624567 - RNA, 14 nt, Human
acacuaauauauuu

SEQ ID NO: 3624568 - RNA, 12 nt, Human
acacuaauucau

SEQ ID NO: 3624569 - RNA, 12 nt, Human
acacuaauuccu

SEQ ID NO: 3624570 - RNA, 21 nt, Human
acacuacaccacacacaacag

SEQ ID NO: 3624571 - RNA, 20 nt, Human
acacuaccgaaugugucuuu

SEQ ID NO: 3624572 - RNA, 21 nt, Human
acacuaccgaaugugucuuua

SEQ ID NO: 3624573 - RNA, 23 nt, Human
acacuaccgaaugugucuuuaga

SEQ ID NO: 3624574 - RNA, 15 nt, Human
acacuagccucucca

SEQ ID NO: 3624575 - RNA, 23 nt, Human
acacuagccuuggccucuuuccu

SEQ ID NO: 3624576 - RNA, 22 nt, Human
acacuaguaccuucagauccua

SEQ ID NO: 3624577 - RNA, 18 nt, Human
acacuaguuuugugccag

SEQ ID NO: 3624578 - RNA, 23 nt, Human
acacuaguuuugugccagccgug

SEQ ID NO: 3624579 - RNA, 15 nt, Human
acacuauaucuguau

SEQ ID NO: 3624580 - RNA, 21 nt, Human
acacuauaucuguauauaaaa

SEQ ID NO: 3624581 - RNA, 18 nt, Human
acacuaucauaguuaaca

SEQ ID NO: 3624582 - RNA, 17 nt, Human
acacuaugguauuugag

SEQ ID NO: 3624583 - RNA, 18 nt, Human
acacuaugguauuugagu

SEQ ID NO: 3624584 - RNA, 13 nt, Human
acacuauuuuaug

SEQ ID NO: 3624585 - RNA, 15 nt, Human
acacucaaaagcugg

SEQ ID NO: 3624586 - RNA, 18 nt, Human
acacucaaaucaagaaac

SEQ ID NO: 3624587 - RNA, 16 nt, Human
acacucacccaacaau

SEQ ID NO: 3624588 - RNA, 19 nt, Human
acacucaccucuaaaacag

SEQ ID NO: 3624589 - RNA, 20 nt, Human
acacucagaagccugggggc

SEQ ID NO: 3624590 - RNA, 19 nt, Human
acacucagauccuccucau

SEQ ID NO: 3624591 - RNA, 16 nt, Human
acacucagcacaaggc

SEQ ID NO: 3624592 - RNA, 22 nt, Human
acacucagcacccccuucucug

SEQ ID NO: 3624593 - RNA, 13 nt, Human
acacucagcuguu

SEQ ID NO: 3624594 - RNA, 14 nt, Human
acacucagcuguuc

SEQ ID NO: 3624595 - RNA, 22 nt, Human
acacucaguggcccauggcauu

SEQ ID NO: 3624596 - RNA, 23 nt, Human
acacucaguggcccauggcauuu

SEQ ID NO: 3624597 - RNA, 16 nt, Human
acacucaguuguucaa

SEQ ID NO: 3624598 - RNA, 12 nt, Human
acacucaugcug

SEQ ID NO: 3624599 - RNA, 13 nt, Human
acacucaugcuga

SEQ ID NO: 3624600 - RNA, 19 nt, Human
acacucauugaccugaggc

SEQ ID NO: 3624601 - RNA, 11 nt, Human
acacuccaacg

SEQ ID NO: 3624602 - RNA, 17 nt, Human
acacuccaauuaaggau

SEQ ID NO: 3624603 - RNA, 15 nt, Human
acacuccacccucca

SEQ ID NO: 3624604 - RNA, 22 nt, Human
acacuccacccuccaccuucca

SEQ ID NO: 3624605 - RNA, 14 nt, Human
acacuccagggaca

SEQ ID NO: 3624606 - RNA, 20 nt, Human
acacuccagggacacacagc

SEQ ID NO: 3624607 - RNA, 14 nt, Human
acacuccagugcca

SEQ ID NO: 3624608 - RNA, 19 nt, Human
acacuccagugccagcaau

SEQ ID NO: 3624609 - RNA, 16 nt, Human
acacuccaucagcuua

SEQ ID NO: 3624610 - RNA, 21 nt, Human
acacucccaagguuggagccc

SEQ ID NO: 3624611 - RNA, 22 nt, Human
acacucccacccagucucugcu

SEQ ID NO: 3624612 - RNA, 14 nt, Human
acacuccuagagaa

SEQ ID NO: 3624613 - RNA, 17 nt, Human
acacuccucugcgucua

SEQ ID NO: 3624614 - RNA, 16 nt, Human
acacucgcccgcccac

SEQ ID NO: 3624615 - RNA, 17 nt, Human
acacucuaacuguauau

SEQ ID NO: 3624616 - RNA, 15 nt, Human
acacucuauaacaaa

SEQ ID NO: 3624617 - RNA, 11 nt, Human
acacucuccug

SEQ ID NO: 3624618 - RNA, 20 nt, Human
acacucuccugggccccucc

SEQ ID NO: 3624619 - RNA, 17 nt, Human
acacucuccuugcaguu

SEQ ID NO: 3624620 - RNA, 23 nt, Human
acacucuccuugcaguucuugag

SEQ ID NO: 3624621 - RNA, 11 nt, Human
acacucugaga

SEQ ID NO: 3624622 - RNA, 19 nt, Human
acacucugccagcaaagag

SEQ ID NO: 3624623 - RNA, 16 nt, Human
acacucugcuguuuga

SEQ ID NO: 3624624 - RNA, 17 nt, Human
acacucugcuguuugac

SEQ ID NO: 3624625 - RNA, 17 nt, Human
acacucuuucuccugcu

SEQ ID NO: 3624626 - RNA, 12 nt, Human
acacucuuugua

SEQ ID NO: 3624627 - RNA, 13 nt, Human
acacugaaaaauu

SEQ ID NO: 3624628 - RNA, 14 nt, Human
acacugaaaaauua

SEQ ID NO: 3624629 - RNA, 14 nt, Human
acacugaaaguuuu

SEQ ID NO: 3624630 - RNA, 20 nt, Human
acacugaaaguuuuguaaaa

SEQ ID NO: 3624631 - RNA, 23 nt, Human
acacugaaaguuuuguaaaagaa

SEQ ID NO: 3624632 - RNA, 12 nt, Human
acacugaacuua

SEQ ID NO: 3624633 - RNA, 21 nt, Human
acacugaagcucuugaagaca

SEQ ID NO: 3624634 - RNA, 17 nt, Human
acacugaagucaguucu

SEQ ID NO: 3624635 - RNA, 18 nt, Human
acacugaauauuuauauu

SEQ ID NO: 3624636 - RNA, 16 nt, Human
acacugaauuuuuaug

SEQ ID NO: 3624637 - RNA, 22 nt, Human
acacugaauuuuuaugugugau

SEQ ID NO: 3624638 - RNA, 19 nt, Human
acacugagaauguaagaac

SEQ ID NO: 3624639 - RNA, 20 nt, Human
acacugagaauguaagaacu

SEQ ID NO: 3624640 - RNA, 22 nt, Human
acacugaugggcaacccccagc

SEQ ID NO: 3624641 - RNA, 15 nt, Human
acacugcaaucauau

SEQ ID NO: 3624642 - RNA, 16 nt, Human
acacugcacaauaacu

SEQ ID NO: 3624643 - RNA, 18 nt, Human
acacugcagccccaccca

SEQ ID NO: 3624644 - RNA, 20 nt, Human
acacugcaggcaucacagcu

SEQ ID NO: 3624645 - RNA, 11 nt, Human
acacugccagc

SEQ ID NO: 3624646 - RNA, 22 nt, Human
acacugccaucuuaguuuggau

SEQ ID NO: 3624647 - RNA, 14 nt, Human
acacugccugggcu

SEQ ID NO: 3624648 - RNA, 16 nt, Human
acacugccugggcuga

SEQ ID NO: 3624649 - RNA, 20 nt, Human
acacugccuguauacuuuag

SEQ ID NO: 3624650 - RNA, 20 nt, Human
acacugccuuuuuauuuaua

SEQ ID NO: 3624651 - RNA, 22 nt, Human
acacugccuuuuuauuuauaug

SEQ ID NO: 3624652 - RNA, 18 nt, Human
acacugcggggcuuggcu

SEQ ID NO: 3624653 - RNA, 19 nt, Human
acacugcuuguguuuuuaa

SEQ ID NO: 3624654 - RNA, 23 nt, Human
acacugcuuguguuuuuaacuca

SEQ ID NO: 3624655 - RNA, 18 nt, Human
acacuggaggagagaaga

SEQ ID NO: 3624656 - RNA, 15 nt, Human
acacuggcagacugu

SEQ ID NO: 3624657 - RNA, 18 nt, Human
acacuggcagacugugua

SEQ ID NO: 3624658 - RNA, 13 nt, Human
acacuggccccuc

SEQ ID NO: 3624659 - RNA, 22 nt, Human
acacuggcguagaaguuuuugu

SEQ ID NO: 3624660 - RNA, 22 nt, Human
acacuggcuaaagauaauugcu

SEQ ID NO: 3624661 - RNA, 20 nt, Human
acacuggcucacccaguccu

SEQ ID NO: 3624662 - RNA, 21 nt, Human
acacuggcugccagcuauuuu

SEQ ID NO: 3624663 - RNA, 13 nt, Human
acacugggacuug

SEQ ID NO: 3624664 - RNA, 23 nt, Human
acacugggagaggugccagcaac

SEQ ID NO: 3624665 - RNA, 14 nt, Human
acacugggaggcca

SEQ ID NO: 3624666 - RNA, 22 nt, Human
acacuggggacuuggccucucu

SEQ ID NO: 3624667 - RNA, 21 nt, Human
acacuggggugccgccugccc

SEQ ID NO: 3624668 - RNA, 13 nt, Human
acacuggguggug

SEQ ID NO: 3624669 - RNA, 16 nt, Human
acacuggucugcuguc

SEQ ID NO: 3624670 - RNA, 20 nt, Human
acacuggucugcuguuccag

SEQ ID NO: 3624671 - RNA, 20 nt, Human
acacuggugugaccugaggg

SEQ ID NO: 3624672 - RNA, 13 nt, Human
acacugguucuca

SEQ ID NO: 3624673 - RNA, 14 nt, Human
acacugguucucaa

SEQ ID NO: 3624674 - RNA, 21 nt, Human
acacugguucucaaugaaaaa

SEQ ID NO: 3624675 - RNA, 15 nt, Human
acacuguacugcaau

SEQ ID NO: 3624676 - RNA, 19 nt, Human
acacuguaguaaauaaugc

SEQ ID NO: 3624677 - RNA, 21 nt, Human
acacugucaugcuucaucauu

SEQ ID NO: 3624678 - RNA, 18 nt, Human
acacuguccuauuauauu

SEQ ID NO: 3624679 - RNA, 22 nt, Human
acacugucugguuucaccgagg

SEQ ID NO: 3624680 - RNA, 13 nt, Human
acacugucuugaa

SEQ ID NO: 3624681 - RNA, 22 nt, Human
acacugugaagagcuggacucc

SEQ ID NO: 3624682 - RNA, 13 nt, Human
acacugugacaca

SEQ ID NO: 3624683 - RNA, 18 nt, Human
acacugugcacaucugug

SEQ ID NO: 3624684 - RNA, 20 nt, Human
acacugugcacaucuguguc

SEQ ID NO: 3624685 - RNA, 21 nt, Human
acacugugcacaucugugucu

SEQ ID NO: 3624686 - RNA, 23 nt, Human
acacugugcccagcccggaccuu

SEQ ID NO: 3624687 - RNA, 15 nt, Human
acacugugcuauaaa

SEQ ID NO: 3624688 - RNA, 22 nt, Human
acacugugcuuucuauuguaca

SEQ ID NO: 3624689 - RNA, 21 nt, Human
acacuguuagaacacuauuuu

SEQ ID NO: 3624690 - RNA, 21 nt, Human
acacuguuauuuucagcauga

SEQ ID NO: 3624691 - RNA, 15 nt, Human
acacuguucuuagcu

SEQ ID NO: 3624692 - RNA, 18 nt, Human
aauauugauaugcuuaua

SEQ ID NO: 3624693 - RNA, 16 nt, Human
aauauugauugggaaa

SEQ ID NO: 3624694 - RNA, 13 nt, Human
aauauugcaaaau

SEQ ID NO: 3624695 - RNA, 18 nt, Human
aauauugcaaaauacaug

SEQ ID NO: 3624696 - RNA, 19 nt, Human
aauauugcaaaauacauga

SEQ ID NO: 3624697 - RNA, 20 nt, Human
aauauugcaaaauacaugaa

SEQ ID NO: 3624698 - RNA, 23 nt, Human
aauauugcaaaauacaugaagcu

SEQ ID NO: 3624699 - RNA, 12 nt, Human
aauauugcugau

SEQ ID NO: 3624700 - RNA, 15 nt, Human
aauauugcugauggu

SEQ ID NO: 3624701 - RNA, 21 nt, Human
aauauugcugauggugcaaug

SEQ ID NO: 3624702 - RNA, 21 nt, Human
aauauugguugggaugacuug

SEQ ID NO: 3624703 - RNA, 15 nt, Human
aauauuguacaguuu

SEQ ID NO: 3624704 - RNA, 17 nt, Human
aauauuguacaguuuuu

SEQ ID NO: 3624705 - RNA, 20 nt, Human
aauauuguauauuuuuaucu

SEQ ID NO: 3624706 - RNA, 16 nt, Human
acacuuaauucuguuc

SEQ ID NO: 3624707 - RNA, 19 nt, Human
acacuuacuguaagacauu

SEQ ID NO: 3624708 - RNA, 17 nt, Human
acacuuacuuuuucugg

SEQ ID NO: 3624709 - RNA, 19 nt, Human
acacuuaggguuuggagcu

SEQ ID NO: 3624710 - RNA, 13 nt, Human
acacuucagacug

SEQ ID NO: 3624711 - RNA, 19 nt, Human
acacuucagagagcuggua

SEQ ID NO: 3624712 - RNA, 16 nt, Human
acacuuccaccagccu

SEQ ID NO: 3624713 - RNA, 12 nt, Human
acacuucccugg

SEQ ID NO: 3624714 - RNA, 13 nt, Human
acacuucccuggc

SEQ ID NO: 3624715 - RNA, 13 nt, Human
acacuuccugccu

SEQ ID NO: 3624716 - RNA, 14 nt, Human
acacuuccugucca

SEQ ID NO: 3624717 - RNA, 16 nt, Human
acacuuccuguccaga

SEQ ID NO: 3624718 - RNA, 19 nt, Human
acacuuccuguccagagag

SEQ ID NO: 3624719 - RNA, 17 nt, Human
acacuucuguccuguga

SEQ ID NO: 3624720 - RNA, 19 nt, Human
acacuucuuacgcaaugcu

SEQ ID NO: 3624721 - RNA, 13 nt, Human
acacuugaaaccu

SEQ ID NO: 3624722 - RNA, 14 nt, Human
acacuugagaggau

SEQ ID NO: 3624723 - RNA, 16 nt, Human
acacuugagaggauga

SEQ ID NO: 3624724 - RNA, 19 nt, Human
acacuugagaugauuucca

SEQ ID NO: 3624725 - RNA, 14 nt, Human
acacuugcccugcu

SEQ ID NO: 3624726 - RNA, 20 nt, Human
acacuugccuucuucaccca

SEQ ID NO: 3624727 - RNA, 14 nt, Human
acacuugguaauug

SEQ ID NO: 3624728 - RNA, 16 nt, Human
acacuuggugcuggga

SEQ ID NO: 3624729 - RNA, 17 nt, Human
acacuuggugcugggaa

SEQ ID NO: 3624730 - RNA, 22 nt, Human
acacuugguuggguccucacau

SEQ ID NO: 3624731 - RNA, 16 nt, Human
acacuuguauaaaugu

SEQ ID NO: 3624732 - RNA, 20 nt, Human
acacuuguauaaauguauau

SEQ ID NO: 3624733 - RNA, 18 nt, Human
acacuugugaauaaagag

SEQ ID NO: 3624734 - RNA, 15 nt, Human
acacuugugacuuuu

SEQ ID NO: 3624735 - RNA, 18 nt, Human
acacuugugacuuuugcu

SEQ ID NO: 3624736 - RNA, 21 nt, Human
acacuugugacuuuugcuuua

SEQ ID NO: 3624737 - RNA, 19 nt, Human
acacuugugauuauaaaau

SEQ ID NO: 3624738 - RNA, 14 nt, Human
acacuuguguuaug

SEQ ID NO: 3624739 - RNA, 13 nt, Human
acacuuuauuuac

SEQ ID NO: 3624740 - RNA, 18 nt, Human
acacuuugaaauguguuu

SEQ ID NO: 3624741 - RNA, 20 nt, Human
acacuuugaaauguguuucu

SEQ ID NO: 3624742 - RNA, 16 nt, Human
acacuuugccuccugu

SEQ ID NO: 3624743 - RNA, 20 nt, Human
acacuuugccuccuguguac

SEQ ID NO: 3624744 - RNA, 23 nt, Human
acacuuugccuccuguguacugu

SEQ ID NO: 3624745 - RNA, 16 nt, Human
acacuuugguaccaga

SEQ ID NO: 3624746 - RNA, 23 nt, Human
acacuuuguugcaagaugugaau

SEQ ID NO: 3624747 - RNA, 11 nt, Human
acacuuuuaug

SEQ ID NO: 3624748 - RNA, 18 nt, Human
acacuuuugagacuuuuu

SEQ ID NO: 3624749 - RNA, 22 nt, Human
acacuuuugguuaagucuguuu

SEQ ID NO: 3624750 - RNA, 16 nt, Human
acagaaaaaaaacaca

SEQ ID NO: 3624751 - RNA, 18 nt, Human
acagaaaaaaaacacaca

SEQ ID NO: 3624752 - RNA, 22 nt, Human
acagaaaaaucuugugcuagaa

SEQ ID NO: 3624753 - RNA, 10 nt, Human
acagaaaaca

SEQ ID NO: 3624754 - RNA, 14 nt, Human
acagaaaacaacaa

SEQ ID NO: 3624755 - RNA, 17 nt, Human
acagaaaacaacaaaaa

SEQ ID NO: 3624756 - RNA, 22 nt, Human
acagaaaacauucugauuugga

SEQ ID NO: 3624757 - RNA, 13 nt, Human
acagaaaauauac

SEQ ID NO: 3624758 - RNA, 15 nt, Human
acagaaaauauacug

SEQ ID NO: 3624759 - RNA, 16 nt, Human
acagaaaauauacugu

SEQ ID NO: 3624760 - RNA, 17 nt, Human
acagaaaauauacugua

SEQ ID NO: 3624761 - RNA, 20 nt, Human
acagaaaauggaagacagcu

SEQ ID NO: 3624762 - RNA, 18 nt, Human
acagaaaauucuucucca

SEQ ID NO: 3624763 - RNA, 12 nt, Human
acagaaacaaaa

SEQ ID NO: 3624764 - RNA, 17 nt, Human
acagaaacaaaaacacu

SEQ ID NO: 3624765 - RNA, 13 nt, Human
acagaaacacugc

SEQ ID NO: 3624766 - RNA, 22 nt, Human
acagaaaccuauccucacugcc

SEQ ID NO: 3624767 - RNA, 20 nt, Human
acagaaaccuuuuuaaaaau

SEQ ID NO: 3624768 - RNA, 18 nt, Human
acagaaacgcauccagca

SEQ ID NO: 3624769 - RNA, 23 nt, Human
acagaaacuaaacucuuaccaua

SEQ ID NO: 3624770 - RNA, 19 nt, Human
acagaaagcagaacaguga

SEQ ID NO: 3624771 - RNA, 19 nt, Human
acagaaagucauuccuucu

SEQ ID NO: 3624772 - RNA, 14 nt, Human
acagaaaguggugc

SEQ ID NO: 3624773 - RNA, 19 nt, Human
acagaaaguggugcucagu

SEQ ID NO: 3624774 - RNA, 22 nt, Human
acagaaaguggugcucaguugu

SEQ ID NO: 3624775 - RNA, 18 nt, Human
acagaaauauauauacau

SEQ ID NO: 3624776 - RNA, 22 nt, Human
acagaaauauauauacauaugu

SEQ ID NO: 3624777 - RNA, 20 nt, Human
acagaaaugcugcuggccaa

SEQ ID NO: 3624778 - RNA, 12 nt, Human
acagaaauuggu

SEQ ID NO: 3624779 - RNA, 15 nt, Human
acagaaauuguauau

SEQ ID NO: 3624780 - RNA, 16 nt, Human
acagaacagcuucagg

SEQ ID NO: 3624781 - RNA, 17 nt, Human
acagaacagcuucaggu

SEQ ID NO: 3624782 - RNA, 17 nt, Human
acagaaccccuacauga

SEQ ID NO: 3624783 - RNA, 13 nt, Human
acagaacuaaaug

SEQ ID NO: 3624784 - RNA, 17 nt, Human
acagaacuaaauguucu

SEQ ID NO: 3624785 - RNA, 22 nt, Human
acagaacucgguguccccacca

SEQ ID NO: 3624786 - RNA, 18 nt, Human
acagaacuucagaaagac

SEQ ID NO: 3624787 - RNA, 19 nt, Human
acagaacuucagaaagacu

SEQ ID NO: 3624788 - RNA, 21 nt, Human
acagaacuucagaaagacuug

SEQ ID NO: 3624789 - RNA, 19 nt, Human
acagaacuugaauguguca

SEQ ID NO: 3624790 - RNA, 12 nt, Human
acagaagcagcu

SEQ ID NO: 3624791 - RNA, 18 nt, Human
acagaagcaggcuggagg

SEQ ID NO: 3624792 - RNA, 22 nt, Human
acagaagcaguugagucgucau

SEQ ID NO: 3624793 - RNA, 16 nt, Human
acagaagcauuuguau

SEQ ID NO: 3624794 - RNA, 13 nt, Human
acagaagccagga

SEQ ID NO: 3624795 - RNA, 16 nt, Human
acagaagcuccaggua

SEQ ID NO: 3624796 - RNA, 21 nt, Human
acagaagcugaagugcaucca

SEQ ID NO: 3624797 - RNA, 13 nt, Human
acagaagcuucag

SEQ ID NO: 3624798 - RNA, 19 nt, Human
acagaagggagggcagagc

SEQ ID NO: 3624799 - RNA, 23 nt, Human
acagaagggagggcagagcuggu

SEQ ID NO: 3624800 - RNA, 22 nt, Human
acagaaggggacugccaccucc

SEQ ID NO: 3624801 - RNA, 14 nt, Human
acagaaguccugua

SEQ ID NO: 3624802 - RNA, 21 nt, Human
acagaaguccuguaugucugu

SEQ ID NO: 3624803 - RNA, 16 nt, Human
acagaagugacugaug

SEQ ID NO: 3624804 - RNA, 15 nt, Human
acagaaguuugcacu

SEQ ID NO: 3624805 - RNA, 18 nt, Human
acagaauacuagccagag

SEQ ID NO: 3624806 - RNA, 16 nt, Human
acagaauauuuuuaua

SEQ ID NO: 3624807 - RNA, 16 nt, Human
acagaaucauugcuua

SEQ ID NO: 3624808 - RNA, 18 nt, Human
acagaaucuuguuuugaa

SEQ ID NO: 3624809 - RNA, 17 nt, Human
acagaaugaaaaaugaa

SEQ ID NO: 3624810 - RNA, 18 nt, Human
acagaaugaaaaaugaaa

SEQ ID NO: 3624811 - RNA, 21 nt, Human
acagaaugaaaaaugaaagau

SEQ ID NO: 3624812 - RNA, 20 nt, Human
acagaaugcaaccaagucac

SEQ ID NO: 3624813 - RNA, 22 nt, Human
acagaaugcaaccaagucacac

SEQ ID NO: 3624814 - RNA, 17 nt, Human
acagaauguaucuguga

SEQ ID NO: 3624815 - RNA, 21 nt, Human
acagaauguuuuacugugaaa

SEQ ID NO: 3624816 - RNA, 22 nt, Human
acagaauuacuguaacugauua

SEQ ID NO: 3624817 - RNA, 13 nt, Human
acagaauuugaau

SEQ ID NO: 3624818 - RNA, 23 nt, Human
acagaauuugaauuaucagcaaa

SEQ ID NO: 3624819 - RNA, 18 nt, Human
acagaauuuuauggugca

SEQ ID NO: 3624820 - RNA, 18 nt, Human
acagacaaaaacagccuc

SEQ ID NO: 3624821 - RNA, 22 nt, Human
acagacaagguagcccuggcca

SEQ ID NO: 3624822 - RNA, 11 nt, Human
acagacacaca

SEQ ID NO: 3624823 - RNA, 12 nt, Human
acagacacacac

SEQ ID NO: 3624824 - RNA, 14 nt, Human
acagacacacacac

SEQ ID NO: 3624825 - RNA, 22 nt, Human
acagacacacacacgcacgcac

SEQ ID NO: 3624826 - RNA, 23 nt, Human
acagacacaggcccggcuccagg

SEQ ID NO: 3624827 - RNA, 14 nt, Human
acagacaggagaaa

SEQ ID NO: 3624828 - RNA, 19 nt, Human
acagacauacuaaccagca

SEQ ID NO: 3624829 - RNA, 22 nt, Human
acagaccacaucuuuaucuguu

SEQ ID NO: 3624830 - RNA, 18 nt, Human
acagaccccucgcaacug

SEQ ID NO: 3624831 - RNA, 15 nt, Human
acagacccugcccug

SEQ ID NO: 3624832 - RNA, 21 nt, Human
acagaccugcuuuuugaaaug

SEQ ID NO: 3624833 - RNA, 17 nt, Human
acagaccuggagccccu

SEQ ID NO: 3624834 - RNA, 19 nt, Human
acagaccuggagccccugg

SEQ ID NO: 3624835 - RNA, 18 nt, Human
acagacgcugcugucaca

SEQ ID NO: 3624836 - RNA, 23 nt, Human
acagacggaaggguaaacaauau

SEQ ID NO: 3624837 - RNA, 19 nt, Human
acagacuauugacaucagc

SEQ ID NO: 3624838 - RNA, 22 nt, Human
acagacucacaaccugaaccua

SEQ ID NO: 3624839 - RNA, 23 nt, Human
acagacucauccugaacagcaug

SEQ ID NO: 3624840 - RNA, 22 nt, Human
acagacucgauucauauugaau

SEQ ID NO: 3624841 - RNA, 17 nt, Human
acagacuggaagcacag

SEQ ID NO: 3624842 - RNA, 19 nt, Human
acagacuguugucccugca

SEQ ID NO: 3624843 - RNA, 15 nt, Human
acagacuucuccaga

SEQ ID NO: 3624844 - RNA, 14 nt, Human
acagacuucugaaa

SEQ ID NO: 3624845 - RNA, 14 nt, Human
acagacuugagaac

SEQ ID NO: 3624846 - RNA, 16 nt, Human
acagacuugagaacuu

SEQ ID NO: 3624847 - RNA, 16 nt, Human
acagacuuuagcuuuc

SEQ ID NO: 3624848 - RNA, 19 nt, Human
acagacuuuagcuuucuga

SEQ ID NO: 3624849 - RNA, 22 nt, Human
acagagaaaccagcuuccuuca

SEQ ID NO: 3624850 - RNA, 12 nt, Human
aaugcaaagaug

SEQ ID NO: 3624851 - RNA, 16 nt, Human
aaugcaaaguucugug

SEQ ID NO: 3624852 - RNA, 20 nt, Human
aaugcaaaguucuguguuua

SEQ ID NO: 3624853 - RNA, 13 nt, Human
aaugcaaauaaca

SEQ ID NO: 3624854 - RNA, 16 nt, Human
aaugcaaauccuaugu

SEQ ID NO: 3624855 - RNA, 14 nt, Human
aaugcaaauucuca

SEQ ID NO: 3624856 - RNA, 16 nt, Human
aaugcaaauucucaag

SEQ ID NO: 3624857 - RNA, 18 nt, Human
aaugcaacaacauguaua

SEQ ID NO: 3624858 - RNA, 13 nt, Human
aaugcaaccauuu

SEQ ID NO: 3624859 - RNA, 18 nt, Human
aaugcaaccauuugaaac

SEQ ID NO: 3624860 - RNA, 22 nt, Human
aaugcaauagaagugcuccccu

SEQ ID NO: 3624861 - RNA, 23 nt, Human
aaugcaauagaagugcuccccuc

SEQ ID NO: 3624862 - RNA, 24 nt, Human
aaugcaaucuccccuugauuuaaa

SEQ ID NO: 3624863 - RNA, 19 nt, Human
aaugcacaaacagaggccg

SEQ ID NO: 3624864 - RNA, 20 nt, Human
aaugcacaaacagaggccgc

SEQ ID NO: 3624865 - RNA, 15 nt, Human
aaugcacaaugucuu

SEQ ID NO: 3624866 - RNA, 17 nt, Human
aaugcacaaugucuugg

SEQ ID NO: 3624867 - RNA, 17 nt, Human
aaugcacacaaaacaac

SEQ ID NO: 3624868 - RNA, 17 nt, Human
aaugcacacuagccucu

SEQ ID NO: 3624869 - RNA, 16 nt, Human
aaugcaccuaaagaaa

SEQ ID NO: 3624870 - RNA, 19 nt, Human
aaugcaccuagcugugcaa

SEQ ID NO: 3624871 - RNA, 11 nt, Human
aaugcacggcc

SEQ ID NO: 3624872 - RNA, 11 nt, Human
aaugcacuuuc

SEQ ID NO: 3624873 - RNA, 16 nt, Human
aaugcacuuuguucug

SEQ ID NO: 3624874 - RNA, 21 nt, Human
aaugcacuuuguucuggcucu

SEQ ID NO: 3624875 - RNA, 22 nt, Human
aaugcagcgaaccaauauuugu

SEQ ID NO: 3624876 - RNA, 22 nt, Human
aaugcagcuugugugcaaaagc

SEQ ID NO: 3624877 - RNA, 22 nt, Human
aaugcagggauugcugccacuu

SEQ ID NO: 3624878 - RNA, 20 nt, Human
aaugcaguacaggacauaua

SEQ ID NO: 3624879 - RNA, 17 nt, Human
aaugcagugaauuguga

SEQ ID NO: 3624880 - RNA, 16 nt, Human
aaugcaguugucucug

SEQ ID NO: 3624881 - RNA, 16 nt, Human
aaugcauaaaauguua

SEQ ID NO: 3624882 - RNA, 14 nt, Human
aaugcauaaaugca

SEQ ID NO: 3624883 - RNA, 14 nt, Human
aaugcauacaaguu

SEQ ID NO: 3624884 - RNA, 13 nt, Human
aaugcauauugua

SEQ ID NO: 3624885 - RNA, 23 nt, Human
aaugcauauuugcaaaguguauu

SEQ ID NO: 3624886 - RNA, 20 nt, Human
aaugcaucaauccugugugg

SEQ ID NO: 3624887 - RNA, 21 nt, Human
aaugcaucaauccuguguggu

SEQ ID NO: 3624888 - RNA, 15 nt, Human
aaugcaucuguccuc

SEQ ID NO: 3624889 - RNA, 14 nt, Human
aaugcaucuuugau

SEQ ID NO: 3624890 - RNA, 18 nt, Human
aaugcaucuuugaugugu

SEQ ID NO: 3624891 - RNA, 19 nt, Human
aaugcaugcagccacugug

SEQ ID NO: 3624892 - RNA, 18 nt, Human
aaugcaugcuuuccauau

SEQ ID NO: 3624893 - RNA, 14 nt, Human
aaugcauugauauu

SEQ ID NO: 3624894 - RNA, 20 nt, Human
aaugcauugauauugugaac

SEQ ID NO: 3624895 - RNA, 18 nt, Human
aaugcauuguaucgaugu

SEQ ID NO: 3624896 - RNA, 22 nt, Human
aaugcauuguaucgauguuaug

SEQ ID NO: 3624897 - RNA, 12 nt, Human
aaugcauuuugu

SEQ ID NO: 3624898 - RNA, 23 nt, Human
aaugcauuuuguuugguauugua

SEQ ID NO: 3624899 - RNA, 15 nt, Human
aaugccaaauuaaaa

SEQ ID NO: 3624900 - RNA, 23 nt, Human
aaugccaacuuguccuuuuguac

SEQ ID NO: 3624901 - RNA, 17 nt, Human
aaugccaagauaauuca

SEQ ID NO: 3624902 - RNA, 19 nt, Human
aaugccaagcacuucuuuu

SEQ ID NO: 3624903 - RNA, 14 nt, Human
aaugccacagcccu

SEQ ID NO: 3624904 - RNA, 19 nt, Human
aaugccacagcccugucag

SEQ ID NO: 3624905 - RNA, 11 nt, Human
aaugccagggc

SEQ ID NO: 3624906 - RNA, 23 nt, Human
aaugccaguaacgcgucuuccug

SEQ ID NO: 3624907 - RNA, 18 nt, Human
acacuccacccuccaccu

SEQ ID NO: 3624908 - RNA, 15 nt, Human
acacuccagccugag

SEQ ID NO: 3624909 - RNA, 16 nt, Human
acacuccagccugagc

SEQ ID NO: 3624910 - RNA, 16 nt, Human
acacuccagugccagc

SEQ ID NO: 3624911 - RNA, 20 nt, Human
acacucccaagguuggagcc

SEQ ID NO: 3624912 - RNA, 16 nt, Human
acacucccacccaguc

SEQ ID NO: 3624913 - RNA, 16 nt, Human
acacuccuacaccuaa

SEQ ID NO: 3624914 - RNA, 23 nt, Human
acacuccuagagaacgcagcccu

SEQ ID NO: 3624915 - RNA, 16 nt, Human
acacucuaacuguaua

SEQ ID NO: 3624916 - RNA, 14 nt, Human
acacucuccugggc

SEQ ID NO: 3624917 - RNA, 17 nt, Human
acacucuccugggcccc

SEQ ID NO: 3624918 - RNA, 22 nt, Human
acacucuccugggccccucccu

SEQ ID NO: 3624919 - RNA, 18 nt, Human
acacucuccuugcaguuc

SEQ ID NO: 3624920 - RNA, 22 nt, Human
acacucuccuugcaguucuuga

SEQ ID NO: 3624921 - RNA, 23 nt, Human
acacucucuggaagcccuggaga

SEQ ID NO: 3624922 - RNA, 16 nt, Human
acacucugcagacugc

SEQ ID NO: 3624923 - RNA, 14 nt, Human
acacucugcucugc

SEQ ID NO: 3624924 - RNA, 16 nt, Human
acacucugcucugccc

SEQ ID NO: 3624925 - RNA, 14 nt, Human
acacucuggcuggu

SEQ ID NO: 3624926 - RNA, 20 nt, Human
acacucugggcuccagagug

SEQ ID NO: 3624927 - RNA, 22 nt, Human
acacucuucuaugacccagcau

SEQ ID NO: 3624928 - RNA, 23 nt, Human
acacugaaaaaucuaagugauau

SEQ ID NO: 3624929 - RNA, 22 nt, Human
acacugaaaagaaggaaagaug

SEQ ID NO: 3624930 - RNA, 18 nt, Human
acacugaaaguuuuguaa

SEQ ID NO: 3624931 - RNA, 20 nt, Human
acacugaaauauacacacag

SEQ ID NO: 3624932 - RNA, 14 nt, Human
acacugaagaagca

SEQ ID NO: 3624933 - RNA, 23 nt, Human
acacugaauauuuauauuucacu

SEQ ID NO: 3624934 - RNA, 23 nt, Human
acacugaccuuggagagacacag

SEQ ID NO: 3624935 - RNA, 19 nt, Human
acacugagagccuuuuuga

SEQ ID NO: 3624936 - RNA, 22 nt, Human
acacugaugcuuagauguucca

SEQ ID NO: 3624937 - RNA, 22 nt, Human
acacugauuuccccuuuugcau

SEQ ID NO: 3624938 - RNA, 18 nt, Human
acacugcaagagccuugg

SEQ ID NO: 3624939 - RNA, 19 nt, Human
acacugcaaucauauguga

SEQ ID NO: 3624940 - RNA, 23 nt, Human
acacugcacaauaacuccuccca

SEQ ID NO: 3624941 - RNA, 22 nt, Human
acacugcacucuuaagcuuccg

SEQ ID NO: 3624942 - RNA, 15 nt, Human
acacugccugccuua

SEQ ID NO: 3624943 - RNA, 12 nt, Human
acacugccuggg

SEQ ID NO: 3624944 - RNA, 13 nt, Human
acacugccugggc

SEQ ID NO: 3624945 - RNA, 15 nt, Human
acacugccugggcug

SEQ ID NO: 3624946 - RNA, 18 nt, Human
acacugccuguauacuuu

SEQ ID NO: 3624947 - RNA, 19 nt, Human
acacugcggggcuuggcug

SEQ ID NO: 3624948 - RNA, 23 nt, Human
acacugcuaggugggccagcccc

SEQ ID NO: 3624949 - RNA, 20 nt, Human
acacugcucuaacagcccuc

SEQ ID NO: 3624950 - RNA, 20 nt, Human
acacuggaggagagaagaau

SEQ ID NO: 3624951 - RNA, 20 nt, Human
acacuggcaaugguaguuuc

SEQ ID NO: 3624952 - RNA, 21 nt, Human
acacuggcaaugguaguuucu

SEQ ID NO: 3624953 - RNA, 12 nt, Human
acacuggccccu

SEQ ID NO: 3624954 - RNA, 21 nt, Human
acacuggcucauauuccugca

SEQ ID NO: 3624955 - RNA, 22 nt, Human
acacugggagaggugccagcaa

SEQ ID NO: 3624956 - RNA, 16 nt, Human
acacugggggagggga

SEQ ID NO: 3624957 - RNA, 23 nt, Human
acacugggugguggccugguccc

SEQ ID NO: 3624958 - RNA, 21 nt, Human
acacugguauuccugccucca

SEQ ID NO: 3624959 - RNA, 14 nt, Human
acacuggugacugc

SEQ ID NO: 3624960 - RNA, 16 nt, Human
acacuggugugaccug

SEQ ID NO: 3624961 - RNA, 21 nt, Human
acacuguauguuauagaacuu

SEQ ID NO: 3624962 - RNA, 21 nt, Human
acacuguauuuguaucucuga

SEQ ID NO: 3624963 - RNA, 20 nt, Human
acacugucaaacaucuggaa

SEQ ID NO: 3624964 - RNA, 15 nt, Human
acacugugacacacu

SEQ ID NO: 3624965 - RNA, 18 nt, Human
acacugugacacacuaca

SEQ ID NO: 3624966 - RNA, 16 nt, Human
acacugugacaucucu

SEQ ID NO: 3624967 - RNA, 13 nt, Human
acacugugcccug

SEQ ID NO: 3624968 - RNA, 14 nt, Human
acacugugcccugg

SEQ ID NO: 3624969 - RNA, 16 nt, Human
acacugugcccuggug

SEQ ID NO: 3624970 - RNA, 17 nt, Human
acacugugcugagucug

SEQ ID NO: 3624971 - RNA, 22 nt, Human
acacugugcugagucugaaggc

SEQ ID NO: 3624972 - RNA, 23 nt, Human
acacugugcuuucuauuguacag

SEQ ID NO: 3624973 - RNA, 19 nt, Human
acacuguggaacuaauaaa

SEQ ID NO: 3624974 - RNA, 20 nt, Human
acacuguggaacuaauaaau

SEQ ID NO: 3624975 - RNA, 23 nt, Human
acacuguggaacuaauaaauaca

SEQ ID NO: 3624976 - RNA, 20 nt, Human
acacugugguagguguuuga

SEQ ID NO: 3624977 - RNA, 13 nt, Human
acacuguguccug

SEQ ID NO: 3624978 - RNA, 19 nt, Human
acacuguguccuggugcuc

SEQ ID NO: 3624979 - RNA, 20 nt, Human
acacuguguccuggugcucu

SEQ ID NO: 3624980 - RNA, 21 nt, Human
acacuguguccuggugcucuc

SEQ ID NO: 3624981 - RNA, 22 nt, Human
acacuguguccuggugcucucu

SEQ ID NO: 3624982 - RNA, 17 nt, Human
acacuguuagaacacua

SEQ ID NO: 3624983 - RNA, 18 nt, Human
acacuguuagaacacuau

SEQ ID NO: 3624984 - RNA, 10 nt, Human
acacuguuau

SEQ ID NO: 3624985 - RNA, 18 nt, Human
acacuguucucugcccuc

SEQ ID NO: 3624986 - RNA, 20 nt, Human
acacuguucucugcccucca

SEQ ID NO: 3624987 - RNA, 22 nt, Human
acacuguucucugcccuccaag

SEQ ID NO: 3624988 - RNA, 23 nt, Human
acacuguucucugcccuccaaga

SEQ ID NO: 3624989 - RNA, 22 nt, Human
acacuguucuuagcucaaugag

SEQ ID NO: 3624990 - RNA, 16 nt, Human
acacuguuucaaacuu

SEQ ID NO: 3624991 - RNA, 17 nt, Human
acacuguuucaaacuuu

SEQ ID NO: 3624992 - RNA, 19 nt, Human
acacuguuuguuccagaau

SEQ ID NO: 3624993 - RNA, 21 nt, Human
aaugcuuuuagugugugcaua

SEQ ID NO: 3624994 - RNA, 19 nt, Human
aaugcuuuuuauuucugca

SEQ ID NO: 3624995 - RNA, 19 nt, Human
aauggaaaccacaacuuuu

SEQ ID NO: 3624996 - RNA, 14 nt, Human
aauggaaaccucac

SEQ ID NO: 3624997 - RNA, 12 nt, Human
aauggaaacuga

SEQ ID NO: 3624998 - RNA, 14 nt, Human
aauggaaacugaaa

SEQ ID NO: 3624999 - RNA, 20 nt, Human
aauggaaaugggcagagcag

SEQ ID NO: 3625000 - RNA, 16 nt, Human
aauggaaccaggcuug

SEQ ID NO: 3625001 - RNA, 17 nt, Human
aauggaaccaggcuugg

SEQ ID NO: 3625002 - RNA, 22 nt, Human
aauggaaccuccuuucucuucu

SEQ ID NO: 3625003 - RNA, 13 nt, Human
aauggaagacagc

SEQ ID NO: 3625004 - RNA, 14 nt, Human
aauggaagagaaau

SEQ ID NO: 3625005 - RNA, 15 nt, Human
aauggaagauuugcc

SEQ ID NO: 3625006 - RNA, 18 nt, Human
aauggaauaaaaggcuug

SEQ ID NO: 3625007 - RNA, 13 nt, Human
aauggaaugagaa

SEQ ID NO: 3625008 - RNA, 12 nt, Human
aauggacacuuu

SEQ ID NO: 3625009 - RNA, 14 nt, Human
aauggacauggugg

SEQ ID NO: 3625010 - RNA, 13 nt, Human
aauggacauuucu

SEQ ID NO: 3625011 - RNA, 16 nt, Human
aauggacuauccauua

SEQ ID NO: 3625012 - RNA, 21 nt, Human
aauggacuuauuucuucaaau

SEQ ID NO: 3625013 - RNA, 15 nt, Human
aauggagaagcugca

SEQ ID NO: 3625014 - RNA, 15 nt, Human
aauggaggaauauga

SEQ ID NO: 3625015 - RNA, 20 nt, Human
aauggaggggcagagccagg

SEQ ID NO: 3625016 - RNA, 21 nt, Human
aauggaggggcagagccagga

SEQ ID NO: 3625017 - RNA, 20 nt, Human
aauggaguuaaacuuuagug

SEQ ID NO: 3625018 - RNA, 19 nt, Human
aauggaguuggaguucauu

SEQ ID NO: 3625019 - RNA, 18 nt, Human
aauggauaaaaucugaua

SEQ ID NO: 3625020 - RNA, 16 nt, Human
aauggauacauaaaga

SEQ ID NO: 3625021 - RNA, 18 nt, Human
aauggauacauaaagacu

SEQ ID NO: 3625022 - RNA, 14 nt, Human
aauggauauuauua

SEQ ID NO: 3625023 - RNA, 17 nt, Human
aauggauauuauuagaa

SEQ ID NO: 3625024 - RNA, 22 nt, Human
aauggauauuuguacuguuuaa

SEQ ID NO: 3625025 - RNA, 17 nt, Human
aauggaucacaagaugg

SEQ ID NO: 3625026 - RNA, 13 nt, Human
aauggaugaaauc

SEQ ID NO: 3625027 - RNA, 17 nt, Human
aauggaugccuugaaua

SEQ ID NO: 3625028 - RNA, 14 nt, Human
aauggauucuauuu

SEQ ID NO: 3625029 - RNA, 22 nt, Human
aauggauuggauuauuuaauaa

SEQ ID NO: 3625030 - RNA, 14 nt, Human
aauggauuguuaau

SEQ ID NO: 3625031 - RNA, 19 nt, Human
aauggauuguuaauuucag

SEQ ID NO: 3625032 - RNA, 15 nt, Human
aauggauuucagaag

SEQ ID NO: 3625033 - RNA, 17 nt, Human
aauggauuuuucuuuaa

SEQ ID NO: 3625034 - RNA, 18 nt, Human
aauggauuuuucuuuaac

SEQ ID NO: 3625035 - RNA, 17 nt, Human
aauggcaacaaacugca

SEQ ID NO: 3625036 - RNA, 23 nt, Human
aauggcaaggcagcccugucuga

SEQ ID NO: 3625037 - RNA, 16 nt, Human
aauggcaaguuuugau

SEQ ID NO: 3625038 - RNA, 20 nt, Human
aauggcaauguuuugcuuuu

SEQ ID NO: 3625039 - RNA, 23 nt, Human
aauggcacaaucucggcucacug

SEQ ID NO: 3625040 - RNA, 19 nt, Human
aauggcacagcccaaagaa

SEQ ID NO: 3625041 - RNA, 16 nt, Human
aauggcagcagaaaac

SEQ ID NO: 3625042 - RNA, 23 nt, Human
aauggcaugagaaauacaaaaau

SEQ ID NO: 3625043 - RNA, 17 nt, Human
aauggccauuugcuuuu

SEQ ID NO: 3625044 - RNA, 20 nt, Human
aauggccucauguggcugga

SEQ ID NO: 3625045 - RNA, 22 nt, Human
aauggccucauguggcuggaag

SEQ ID NO: 3625046 - RNA, 17 nt, Human
aauggccuccucccuua

SEQ ID NO: 3625047 - RNA, 20 nt, Human
aauggccugccuugaagcca

SEQ ID NO: 3625048 - RNA, 18 nt, Human
aauggcgcagugccucug

SEQ ID NO: 3625049 - RNA, 19 nt, Human
aauggcgcagugccucugg

SEQ ID NO: 3625050 - RNA, 19 nt, Human
aauggcgugaacccgggag

SEQ ID NO: 3625051 - RNA, 14 nt, Human
aauggcuauuaaca

SEQ ID NO: 3625052 - RNA, 21 nt, Human
aauggcucacuauggugccaa

SEQ ID NO: 3625053 - RNA, 13 nt, Human
aauggcuucagug

SEQ ID NO: 3625054 - RNA, 13 nt, Human
aauggcuuuguau

SEQ ID NO: 3625055 - RNA, 18 nt, Human
aauggcuuuguauagaac

SEQ ID NO: 3625056 - RNA, 14 nt, Human
aaugggaccugugg

SEQ ID NO: 3625057 - RNA, 17 nt, Human
aaugggacuucuuuuca

SEQ ID NO: 3625058 - RNA, 13 nt, Human
aaugggcagagca

SEQ ID NO: 3625059 - RNA, 20 nt, Human
aaugggccacugaaaucugu

SEQ ID NO: 3625060 - RNA, 16 nt, Human
aaugggcucaaccaga

SEQ ID NO: 3625061 - RNA, 17 nt, Human
aauggggaucacagaga

SEQ ID NO: 3625062 - RNA, 17 nt, Human
aauggggccagauccag

SEQ ID NO: 3625063 - RNA, 17 nt, Human
aaugggguccuggccau

SEQ ID NO: 3625064 - RNA, 18 nt, Human
aaugggguccuggccauc

SEQ ID NO: 3625065 - RNA, 13 nt, Human
acagaaaugagga

SEQ ID NO: 3625066 - RNA, 14 nt, Human
acagaaaugcugcu

SEQ ID NO: 3625067 - RNA, 16 nt, Human
acagaaaugcugcugg

SEQ ID NO: 3625068 - RNA, 15 nt, Human
acagaaauggacugg

SEQ ID NO: 3625069 - RNA, 14 nt, Human
acagaaauguacag

SEQ ID NO: 3625070 - RNA, 16 nt, Human
acagaaauguacagca

SEQ ID NO: 3625071 - RNA, 17 nt, Human
acagaaauguacagcaa

SEQ ID NO: 3625072 - RNA, 19 nt, Human
acagaaauuguauauugua

SEQ ID NO: 3625073 - RNA, 14 nt, Human
acagaacacugucu

SEQ ID NO: 3625074 - RNA, 13 nt, Human
acagaacacuuau

SEQ ID NO: 3625075 - RNA, 12 nt, Human
acagaacagcuu

SEQ ID NO: 3625076 - RNA, 13 nt, Human
acagaacagcuuc

SEQ ID NO: 3625077 - RNA, 20 nt, Human
acagaacagcuucagguuau

SEQ ID NO: 3625078 - RNA, 15 nt, Human
acagaacagggucau

SEQ ID NO: 3625079 - RNA, 17 nt, Human
acagaaccuuguuauuu

SEQ ID NO: 3625080 - RNA, 22 nt, Human
acagaaccuuguuauuucucag

SEQ ID NO: 3625081 - RNA, 14 nt, Human
acagaacuaaaugu

SEQ ID NO: 3625082 - RNA, 18 nt, Human
acagaacuaaauguucua

SEQ ID NO: 3625083 - RNA, 22 nt, Human
acagaacuaucucagcaucaga

SEQ ID NO: 3625084 - RNA, 19 nt, Human
acagaacucggugucccca

SEQ ID NO: 3625085 - RNA, 20 nt, Human
acagaacucuuucaaaaccu

SEQ ID NO: 3625086 - RNA, 14 nt, Human
acagaagaaacaag

SEQ ID NO: 3625087 - RNA, 14 nt, Human
acagaagcacaugc

SEQ ID NO: 3625088 - RNA, 19 nt, Human
acagaagcaggcuggaggu

SEQ ID NO: 3625089 - RNA, 12 nt, Human
acagaagcauuu

SEQ ID NO: 3625090 - RNA, 15 nt, Human
acagaagcauuugua

SEQ ID NO: 3625091 - RNA, 17 nt, Human
acagaagcauuuguauu

SEQ ID NO: 3625092 - RNA, 16 nt, Human
acagaagccaggagca

SEQ ID NO: 3625093 - RNA, 14 nt, Human
acagaagcuucaga

SEQ ID NO: 3625094 - RNA, 18 nt, Human
acagaagcuucagaaguu

SEQ ID NO: 3625095 - RNA, 16 nt, Human
acagaagggagggcag

SEQ ID NO: 3625096 - RNA, 21 nt, Human
acagaagggagggcagagcug

SEQ ID NO: 3625097 - RNA, 23 nt, Human
acagaaggggacugccaccuccc

SEQ ID NO: 3625098 - RNA, 17 nt, Human
acagaagucaugaagcc

SEQ ID NO: 3625099 - RNA, 18 nt, Human
acagaagucaugaagccc

SEQ ID NO: 3625100 - RNA, 16 nt, Human
acagaauauguuucaa

SEQ ID NO: 3625101 - RNA, 21 nt, Human
acagaauauguuucaaacuuu

SEQ ID NO: 3625102 - RNA, 19 nt, Human
acagaauauuucuauugaa

SEQ ID NO: 3625103 - RNA, 19 nt, Human
acagaaucuuccuuuuauu

SEQ ID NO: 3625104 - RNA, 14 nt, Human
acagaaugaaaaau

SEQ ID NO: 3625105 - RNA, 24 nt, Human
acagaaugaaaaaugaaagaugau

SEQ ID NO: 3625106 - RNA, 15 nt, Human
acagaauguaucugu

SEQ ID NO: 3625107 - RNA, 15 nt, Human
acagaauucugcuac

SEQ ID NO: 3625108 - RNA, 17 nt, Human
acagaauucugcuaccu

SEQ ID NO: 3625109 - RNA, 16 nt, Human
acagaauugcuuguuu

SEQ ID NO: 3625110 - RNA, 14 nt, Human
acagaauuuuggaa

SEQ ID NO: 3625111 - RNA, 15 nt, Human
acagaauuuuuuuug

SEQ ID NO: 3625112 - RNA, 13 nt, Human
acagacaaagcgu

SEQ ID NO: 3625113 - RNA, 14 nt, Human
acagacaaagcgug

SEQ ID NO: 3625114 - RNA, 13 nt, Human
acagacacacaca

SEQ ID NO: 3625115 - RNA, 15 nt, Human
acagacacacacacg

SEQ ID NO: 3625116 - RNA, 16 nt, Human
acagacacacacacgc

SEQ ID NO: 3625117 - RNA, 17 nt, Human
acagacacacacacgca

SEQ ID NO: 3625118 - RNA, 23 nt, Human
acagacacacacacgcacgcaca

SEQ ID NO: 3625119 - RNA, 17 nt, Human
acagacacaggcccggc

SEQ ID NO: 3625120 - RNA, 18 nt, Human
acagacacuaaguuauag

SEQ ID NO: 3625121 - RNA, 16 nt, Human
acagacagacacacac

SEQ ID NO: 3625122 - RNA, 15 nt, Human
acagacagcccucca

SEQ ID NO: 3625123 - RNA, 11 nt, Human
acagacaggag

SEQ ID NO: 3625124 - RNA, 15 nt, Human
acagacaggcucuua

SEQ ID NO: 3625125 - RNA, 15 nt, Human
acagacaucucugca

SEQ ID NO: 3625126 - RNA, 11 nt, Human
acagacauugu

SEQ ID NO: 3625127 - RNA, 20 nt, Human
acagaccacaucuuuaucug

SEQ ID NO: 3625128 - RNA, 13 nt, Human
acagacccugccc

SEQ ID NO: 3625129 - RNA, 16 nt, Human
acagacccugcccugu

SEQ ID NO: 3625130 - RNA, 20 nt, Human
acagacccugcccugugggc

SEQ ID NO: 3625131 - RNA, 15 nt, Human
acagaccugcuuuuu

SEQ ID NO: 3625132 - RNA, 16 nt, Human
acagaccugcuuuuug

SEQ ID NO: 3625133 - RNA, 17 nt, Human
acagaccugcuuuuuga

SEQ ID NO: 3625134 - RNA, 20 nt, Human
acagaccuggagccccuggg

SEQ ID NO: 3625135 - RNA, 21 nt, Human
acagaccuggagccccugggu

SEQ ID NO: 3625136 - RNA, 17 nt, Human
acagacggaaggguaaa

SEQ ID NO: 3625137 - RNA, 15 nt, Human
acagacgucccucca

SEQ ID NO: 3625138 - RNA, 16 nt, Human
acagacgucccuccac

SEQ ID NO: 3625139 - RNA, 19 nt, Human
acauccuuucuaaacaaga

SEQ ID NO: 3625140 - RNA, 15 nt, Human
acaucgcacugugga

SEQ ID NO: 3625141 - RNA, 16 nt, Human
acaucuaaccucaucu

SEQ ID NO: 3625142 - RNA, 17 nt, Human
acaucuaaccucaucuu

SEQ ID NO: 3625143 - RNA, 13 nt, Human
acaucuaagccug

SEQ ID NO: 3625144 - RNA, 16 nt, Human
acaucuacaaaacauu

SEQ ID NO: 3625145 - RNA, 16 nt, Human
acaucuaguaguuguu

SEQ ID NO: 3625146 - RNA, 14 nt, Human
acaucuauucucuc

SEQ ID NO: 3625147 - RNA, 19 nt, Human
acaucuauuuuggauugua

SEQ ID NO: 3625148 - RNA, 23 nt, Human
acaucuauuuuggauuguauauu

SEQ ID NO: 3625149 - RNA, 22 nt, Human
acaucucaacaggccucagggc

SEQ ID NO: 3625150 - RNA, 20 nt, Human
acaucucaauaaagugcuuu

SEQ ID NO: 3625151 - RNA, 12 nt, Human
acaucucagacc

SEQ ID NO: 3625152 - RNA, 19 nt, Human
acaucucaggggccagagg

SEQ ID NO: 3625153 - RNA, 20 nt, Human
acaucucaggggccagagga

SEQ ID NO: 3625154 - RNA, 12 nt, Human
acaucucauuuu

SEQ ID NO: 3625155 - RNA, 21 nt, Human
acaucuccuccauacucagga

SEQ ID NO: 3625156 - RNA, 15 nt, Human
acaucucuauucccc

SEQ ID NO: 3625157 - RNA, 12 nt, Human
acaucucugcuu

SEQ ID NO: 3625158 - RNA, 13 nt, Human
acaucucuuccuc

SEQ ID NO: 3625159 - RNA, 12 nt, Human
acaucugauaac

SEQ ID NO: 3625160 - RNA, 22 nt, Human
acaucuggaaaauaaaaggucu

SEQ ID NO: 3625161 - RNA, 17 nt, Human
acaucuggcuuauuuua

SEQ ID NO: 3625162 - RNA, 15 nt, Human
acaucugugucuugu

SEQ ID NO: 3625163 - RNA, 16 nt, Human
acaucugugucuuguu

SEQ ID NO: 3625164 - RNA, 13 nt, Human
acaucuguuuugu

SEQ ID NO: 3625165 - RNA, 16 nt, Human
acaucuucagcaaaua

SEQ ID NO: 3625166 - RNA, 15 nt, Human
acaucuuccacaggu

SEQ ID NO: 3625167 - RNA, 23 nt, Human
acaucuuccacaggucucagaau

SEQ ID NO: 3625168 - RNA, 24 nt, Human
acaucuuccauuuccauguccccu

SEQ ID NO: 3625169 - RNA, 23 nt, Human
acaucuucccuagaggguuccug

SEQ ID NO: 3625170 - RNA, 13 nt, Human
acaucuugcucug

SEQ ID NO: 3625171 - RNA, 14 nt, Human
acaucuugcucugc

SEQ ID NO: 3625172 - RNA, 16 nt, Human
acaucuugcucugcug

SEQ ID NO: 3625173 - RNA, 13 nt, Human
acaucuuggcagg

SEQ ID NO: 3625174 - RNA, 23 nt, Human
acaucuugucauuuuuuuucuuu

SEQ ID NO: 3625175 - RNA, 11 nt, Human
acaucuuuaag

SEQ ID NO: 3625176 - RNA, 15 nt, Human
acaucuuucacacuu

SEQ ID NO: 3625177 - RNA, 14 nt, Human
acaucuuuccuguc

SEQ ID NO: 3625178 - RNA, 18 nt, Human
acaucuuucucuuuucua

SEQ ID NO: 3625179 - RNA, 14 nt, Human
acaucuuugaaauu

SEQ ID NO: 3625180 - RNA, 17 nt, Human
acaucuuugaaauuaug

SEQ ID NO: 3625181 - RNA, 22 nt, Human
acaucuuugaaauuauguaaau

SEQ ID NO: 3625182 - RNA, 24 nt, Human
acaucuuuucuugccucugucccc

SEQ ID NO: 3625183 - RNA, 19 nt, Human
acaucuuuuuaaagcuuau

SEQ ID NO: 3625184 - RNA, 15 nt, Human
acaucuuuuucacug

SEQ ID NO: 3625185 - RNA, 15 nt, Human
acaugaaaacacauu

SEQ ID NO: 3625186 - RNA, 15 nt, Human
acaugaaaauuuuaa

SEQ ID NO: 3625187 - RNA, 15 nt, Human
acaugaaacagaaac

SEQ ID NO: 3625188 - RNA, 23 nt, Human
acaugaaaccuacacacugucau

SEQ ID NO: 3625189 - RNA, 21 nt, Human
acaugaaaguagcagugugaa

SEQ ID NO: 3625190 - RNA, 14 nt, Human
acaugaacauacug

SEQ ID NO: 3625191 - RNA, 20 nt, Human
acaugaacuuagauuuuaca

SEQ ID NO: 3625192 - RNA, 13 nt, Human
acaugaagaaaua

SEQ ID NO: 3625193 - RNA, 13 nt, Human
acaugaagaccuu

SEQ ID NO: 3625194 - RNA, 15 nt, Human
acaugaagauucuuu

SEQ ID NO: 3625195 - RNA, 17 nt, Human
acaugaagauucuuucc

SEQ ID NO: 3625196 - RNA, 19 nt, Human
acaugaagcuguuguguga

SEQ ID NO: 3625197 - RNA, 12 nt, Human
acaugaaguauu

SEQ ID NO: 3625198 - RNA, 13 nt, Human
acaugaaguauuu

SEQ ID NO: 3625199 - RNA, 18 nt, Human
acaugaaucaaaagugcc

SEQ ID NO: 3625200 - RNA, 20 nt, Human
acaugaaucccacccacaug

SEQ ID NO: 3625201 - RNA, 23 nt, Human
acaugaaucccacccacauguga

SEQ ID NO: 3625202 - RNA, 17 nt, Human
acaugaauuauuacagu

SEQ ID NO: 3625203 - RNA, 21 nt, Human
acaugaauuauuacaguguuu

SEQ ID NO: 3625204 - RNA, 19 nt, Human
acaugaauuuuagcuuuug

SEQ ID NO: 3625205 - RNA, 15 nt, Human
acaugacacccguga

SEQ ID NO: 3625206 - RNA, 19 nt, Human
acaugacccuaaaucuuga

SEQ ID NO: 3625207 - RNA, 18 nt, Human
acaugacgacaaagcugc

SEQ ID NO: 3625208 - RNA, 17 nt, Human
acaugacucuuuauugu

SEQ ID NO: 3625209 - RNA, 19 nt, Human
acaugacucuuuauugucu

SEQ ID NO: 3625210 - RNA, 20 nt, Human
acaugacucuuuauugucug

SEQ ID NO: 3625211 - RNA, 22 nt, Human
acaugacucuuuauugucugua

SEQ ID NO: 3625212 - RNA, 14 nt, Human
acaugagauuuaua

SEQ ID NO: 3625213 - RNA, 18 nt, Human
acaugagcaucaggccag

SEQ ID NO: 3625214 - RNA, 20 nt, Human
acaugagcaucaggccaggc

SEQ ID NO: 3625215 - RNA, 23 nt, Human
acaugagcaucaggccaggcccu

SEQ ID NO: 3625216 - RNA, 14 nt, Human
acaugaggaacugu

SEQ ID NO: 3625217 - RNA, 22 nt, Human
acaugaggaacuguagaugaug

SEQ ID NO: 3625218 - RNA, 13 nt, Human
acaugaggacucu

SEQ ID NO: 3625219 - RNA, 20 nt, Human
acaugaggacucuauucuuu

SEQ ID NO: 3625220 - RNA, 15 nt, Human
acaugaggccacugg

SEQ ID NO: 3625221 - RNA, 22 nt, Human
acaugaguagauaauuucaggg

SEQ ID NO: 3625222 - RNA, 16 nt, Human
acaugaugauuucaga

SEQ ID NO: 3625223 - RNA, 12 nt, Human
acaugaugcuuu

SEQ ID NO: 3625224 - RNA, 14 nt, Human
acaugauguuaugu

SEQ ID NO: 3625225 - RNA, 13 nt, Human
acaugauuucaca

SEQ ID NO: 3625226 - RNA, 21 nt, Human
acaugauuucacaaauauuaa

SEQ ID NO: 3625227 - RNA, 16 nt, Human
acaugauuuccuugaa

SEQ ID NO: 3625228 - RNA, 14 nt, Human
acaugcaaaaagaa

SEQ ID NO: 3625229 - RNA, 16 nt, Human
aauggguaucuauauu

SEQ ID NO: 3625230 - RNA, 13 nt, Human
aaugguaaaauug

SEQ ID NO: 3625231 - RNA, 17 nt, Human
aaugguaaaauugcaug

SEQ ID NO: 3625232 - RNA, 14 nt, Human
aaugguaauaagca

SEQ ID NO: 3625233 - RNA, 14 nt, Human
aaugguagcauuuu

SEQ ID NO: 3625234 - RNA, 19 nt, Human
aaugguagcauuuuaaaca

SEQ ID NO: 3625235 - RNA, 19 nt, Human
aaugguagucuaaccaaau

SEQ ID NO: 3625236 - RNA, 14 nt, Human
aaugguaguuucug

SEQ ID NO: 3625237 - RNA, 22 nt, Human
aaugguauuugaauuaaauguu

SEQ ID NO: 3625238 - RNA, 16 nt, Human
aaugguccaggguuga

SEQ ID NO: 3625239 - RNA, 19 nt, Human
aauggucccauccaggcag

SEQ ID NO: 3625240 - RNA, 15 nt, Human
aauggucgcccagga

SEQ ID NO: 3625241 - RNA, 16 nt, Human
aauggucgcccaggag

SEQ ID NO: 3625242 - RNA, 18 nt, Human
aauggucuaaaaauaaac

SEQ ID NO: 3625243 - RNA, 22 nt, Human
aauggugaaaauaaaauaaagc

SEQ ID NO: 3625244 - RNA, 18 nt, Human
aauggugacuuaauccgu

SEQ ID NO: 3625245 - RNA, 10 nt, Human
aauggugccu

SEQ ID NO: 3625246 - RNA, 17 nt, Human
aaugguggcuucagcuc

SEQ ID NO: 3625247 - RNA, 20 nt, Human
aaugguggcuucagcuccag

SEQ ID NO: 3625248 - RNA, 16 nt, Human
aaugguguacauaaug

SEQ ID NO: 3625249 - RNA, 15 nt, Human
aaugguguagaacac

SEQ ID NO: 3625250 - RNA, 17 nt, Human
aaugguuauaaaaguga

SEQ ID NO: 3625251 - RNA, 15 nt, Human
aaugguucagaauua

SEQ ID NO: 3625252 - RNA, 17 nt, Human
aaugguugacuggguuu

SEQ ID NO: 3625253 - RNA, 15 nt, Human
aaugguugccuuaaa

SEQ ID NO: 3625254 - RNA, 15 nt, Human
aaugguuguauuaga

SEQ ID NO: 3625255 - RNA, 24 nt, Human
aaugguuguauuagauguucucua

SEQ ID NO: 3625256 - RNA, 17 nt, Human
aaugguuuaacuucugc

SEQ ID NO: 3625257 - RNA, 13 nt, Human
aaugguuucaaag

SEQ ID NO: 3625258 - RNA, 23 nt, Human
aaugguuugaauauaaacacuau

SEQ ID NO: 3625259 - RNA, 17 nt, Human
aaugguuugcaaggaag

SEQ ID NO: 3625260 - RNA, 23 nt, Human
aaugguuuggugcuuuuuauaaa

SEQ ID NO: 3625261 - RNA, 16 nt, Human
aaugguuuucaaaaua

SEQ ID NO: 3625262 - RNA, 18 nt, Human
aaugguuuucuugugugu

SEQ ID NO: 3625263 - RNA, 16 nt, Human
aaugguuuuuaaauuu

SEQ ID NO: 3625264 - RNA, 17 nt, Human
aauguaaaaaagaaaaa

SEQ ID NO: 3625265 - RNA, 14 nt, Human
aauguaaacugcca

SEQ ID NO: 3625266 - RNA, 21 nt, Human
aauguaaacuguuucuuuaaa

SEQ ID NO: 3625267 - RNA, 15 nt, Human
aauguaaagccaugc

SEQ ID NO: 3625268 - RNA, 20 nt, Human
aauguaaaggagucaaaacu

SEQ ID NO: 3625269 - RNA, 19 nt, Human
aauguaaaggucacuuuuc

SEQ ID NO: 3625270 - RNA, 12 nt, Human
aauguaaauaaa

SEQ ID NO: 3625271 - RNA, 20 nt, Human
aauguaaauauuuuaaagaa

SEQ ID NO: 3625272 - RNA, 15 nt, Human
aauguaaaugucuca

SEQ ID NO: 3625273 - RNA, 24 nt, Human
aauguaaaugucucacugagcacu

SEQ ID NO: 3625274 - RNA, 13 nt, Human
aauguaaauuugu

SEQ ID NO: 3625275 - RNA, 16 nt, Human
aauguaacugcucuug

SEQ ID NO: 3625276 - RNA, 13 nt, Human
aauguaacuguua

SEQ ID NO: 3625277 - RNA, 13 nt, Human
aauguaacuuacu

SEQ ID NO: 3625278 - RNA, 14 nt, Human
aauguaagcuguuu

SEQ ID NO: 3625279 - RNA, 16 nt, Human
aauguaagcuguuuau

SEQ ID NO: 3625280 - RNA, 17 nt, Human
aauguaaguaaaugucu

SEQ ID NO: 3625281 - RNA, 13 nt, Human
aauguaaugcgau

SEQ ID NO: 3625282 - RNA, 21 nt, Human
aauguaauugauuguauauag

SEQ ID NO: 3625283 - RNA, 13 nt, Human
aauguaauuguaa

SEQ ID NO: 3625284 - RNA, 15 nt, Human
aauguaauuguaauu

SEQ ID NO: 3625285 - RNA, 18 nt, Human
accacaaaaaaauaccuc

SEQ ID NO: 3625286 - RNA, 22 nt, Human
accacaaacuguaauacaauga

SEQ ID NO: 3625287 - RNA, 19 nt, Human
accacaacugacacaggaa

SEQ ID NO: 3625288 - RNA, 21 nt, Human
accacaaggcuguugcauggg

SEQ ID NO: 3625289 - RNA, 17 nt, Human
accacaaugcagugccu

SEQ ID NO: 3625290 - RNA, 14 nt, Human
accacacacaacag

SEQ ID NO: 3625291 - RNA, 15 nt, Human
accacacacaacagc

SEQ ID NO: 3625292 - RNA, 17 nt, Human
accacacaucccagccc

SEQ ID NO: 3625293 - RNA, 18 nt, Human
accacacaucccagccca

SEQ ID NO: 3625294 - RNA, 19 nt, Human
accacacaucccagcccaa

SEQ ID NO: 3625295 - RNA, 15 nt, Human
accacacaucuauga

SEQ ID NO: 3625296 - RNA, 15 nt, Human
accacaccaaaccuc

SEQ ID NO: 3625297 - RNA, 16 nt, Human
accacacccagcccac

SEQ ID NO: 3625298 - RNA, 20 nt, Human
accacacccagcccacuucu

SEQ ID NO: 3625299 - RNA, 14 nt, Human
accacacccagccu

SEQ ID NO: 3625300 - RNA, 15 nt, Human
accacacccagccuc

SEQ ID NO: 3625301 - RNA, 22 nt, Human
accacacccagccucaguccuc

SEQ ID NO: 3625302 - RNA, 22 nt, Human
accacacuuccuguccagagag

SEQ ID NO: 3625303 - RNA, 16 nt, Human
accacagacacacaca

SEQ ID NO: 3625304 - RNA, 21 nt, Human
accacagacauacuaaccagc

SEQ ID NO: 3625305 - RNA, 22 nt, Human
accacagacauacuaaccagca

SEQ ID NO: 3625306 - RNA, 12 nt, Human
accacagacuuu

SEQ ID NO: 3625307 - RNA, 23 nt, Human
accacagacuuuagcuuucugag

SEQ ID NO: 3625308 - RNA, 10 nt, Human
accacagcaa

SEQ ID NO: 3625309 - RNA, 18 nt, Human
accacagcaaggcaccug

SEQ ID NO: 3625310 - RNA, 15 nt, Human
accacagcacagcca

SEQ ID NO: 3625311 - RNA, 17 nt, Human
accacagcaggugucau

SEQ ID NO: 3625312 - RNA, 11 nt, Human
accacagcagu

SEQ ID NO: 3625313 - RNA, 16 nt, Human
accacagcaucauuuu

SEQ ID NO: 3625314 - RNA, 19 nt, Human
accacagccagcaccuggc

SEQ ID NO: 3625315 - RNA, 17 nt, Human
accacagcuccuuuucc

SEQ ID NO: 3625316 - RNA, 21 nt, Human
accacagcuccuuuuccagag

SEQ ID NO: 3625317 - RNA, 13 nt, Human
accacagcugcug

SEQ ID NO: 3625318 - RNA, 14 nt, Human
accacagcugcugg

SEQ ID NO: 3625319 - RNA, 15 nt, Human
accacagcugcugga

SEQ ID NO: 3625320 - RNA, 21 nt, Human
accacaggcccuuuccucagg

SEQ ID NO: 3625321 - RNA, 16 nt, Human
accacaggcucaggca

SEQ ID NO: 3625322 - RNA, 17 nt, Human
accacaggguucaaaau

SEQ ID NO: 3625323 - RNA, 16 nt, Human
accacaggugugagcc

SEQ ID NO: 3625324 - RNA, 22 nt, Human
accacaguguaccauuaaaaua

SEQ ID NO: 3625325 - RNA, 13 nt, Human
accacagugucug

SEQ ID NO: 3625326 - RNA, 18 nt, Human
accacaucuugcucugcu

SEQ ID NO: 3625327 - RNA, 24 nt, Human
accacaucuugcucugcugacaga

SEQ ID NO: 3625328 - RNA, 22 nt, Human
accacaugccccaucccaugcu

SEQ ID NO: 3625329 - RNA, 23 nt, Human
accacaugccccaucccaugcug

SEQ ID NO: 3625330 - RNA, 13 nt, Human
accacauugcuuu

SEQ ID NO: 3625331 - RNA, 15 nt, Human
accacauugcuuuuc

SEQ ID NO: 3625332 - RNA, 19 nt, Human
accacauuuuauauuuauu

SEQ ID NO: 3625333 - RNA, 19 nt, Human
accaccaagccuugauugg

SEQ ID NO: 3625334 - RNA, 15 nt, Human
accaccacacccagc

SEQ ID NO: 3625335 - RNA, 16 nt, Human
accaccaccccuacca

SEQ ID NO: 3625336 - RNA, 16 nt, Human
accaccacgccuggcu

SEQ ID NO: 3625337 - RNA, 16 nt, Human
accaccacuggccacc

SEQ ID NO: 3625338 - RNA, 17 nt, Human
accaccagcugugucca

SEQ ID NO: 3625339 - RNA, 17 nt, Human
accaccaggucucccgg

SEQ ID NO: 3625340 - RNA, 15 nt, Human
accacccauaucaug

SEQ ID NO: 3625341 - RNA, 13 nt, Human
accaccccugccu

SEQ ID NO: 3625342 - RNA, 14 nt, Human
accaccccugccuc

SEQ ID NO: 3625343 - RNA, 15 nt, Human
accaccccuuccugu

SEQ ID NO: 3625344 - RNA, 16 nt, Human
accacccgguccccac

SEQ ID NO: 3625345 - RNA, 17 nt, Human
accacccgguccccacu

SEQ ID NO: 3625346 - RNA, 21 nt, Human
accacccuagucccuuccccu

SEQ ID NO: 3625347 - RNA, 18 nt, Human
accacccuccccucucuu

SEQ ID NO: 3625348 - RNA, 12 nt, Human
accacccuccuu

SEQ ID NO: 3625349 - RNA, 13 nt, Human
accacccugagcc

SEQ ID NO: 3625350 - RNA, 21 nt, Human
accacccugagccggccccag

SEQ ID NO: 3625351 - RNA, 16 nt, Human
accaccgcccgucugu

SEQ ID NO: 3625352 - RNA, 13 nt, Human
accaccgcucccc

SEQ ID NO: 3625353 - RNA, 17 nt, Human
accaccgcuccccagcc

SEQ ID NO: 3625354 - RNA, 19 nt, Human
accaccuaccuuacaguga

SEQ ID NO: 3625355 - RNA, 16 nt, Human
accaccuaggccacuc

SEQ ID NO: 3625356 - RNA, 12 nt, Human
accaccucugug

SEQ ID NO: 3625357 - RNA, 13 nt, Human
accaccucugugg

SEQ ID NO: 3625358 - RNA, 14 nt, Human
accaccucuguggc

SEQ ID NO: 3625359 - RNA, 15 nt, Human
accaccucuguggca

SEQ ID NO: 3625360 - RNA, 17 nt, Human
accaccuucccagcucu

SEQ ID NO: 3625361 - RNA, 22 nt, Human
accaccuuuguuucucccccau

SEQ ID NO: 3625362 - RNA, 17 nt, Human
accaccuuuuauuacau

SEQ ID NO: 3625363 - RNA, 19 nt, Human
accacgacuggccagggcc

SEQ ID NO: 3625364 - RNA, 18 nt, Human
accacgauguggcccugg

SEQ ID NO: 3625365 - RNA, 21 nt, Human
accacgcccguccugccugug

SEQ ID NO: 3625366 - RNA, 16 nt, Human
accacgcuggaccuug

SEQ ID NO: 3625367 - RNA, 16 nt, Human
accacgcuggggucug

SEQ ID NO: 3625368 - RNA, 19 nt, Human
accacgggcccggguuggg

SEQ ID NO: 3625369 - RNA, 14 nt, Human
accacguuucuaaa

SEQ ID NO: 3625370 - RNA, 15 nt, Human
accacguuucuaaag

SEQ ID NO: 3625371 - RNA, 23 nt, Human
accacuaaaagaucgcaguuugc

SEQ ID NO: 3625372 - RNA, 16 nt, Human
accacuaacuccugag

SEQ ID NO: 3625373 - RNA, 17 nt, Human
accacuacauucuguua

SEQ ID NO: 3625374 - RNA, 12 nt, Human
accacucagaga

SEQ ID NO: 3625375 - RNA, 13 nt, Human
accacucagagac

SEQ ID NO: 3625376 - RNA, 20 nt, Human
accacucagagacaugcaga

SEQ ID NO: 3625377 - RNA, 18 nt, Human
accacucagccccuagga

SEQ ID NO: 3625378 - RNA, 14 nt, Human
accacucgugcauc

SEQ ID NO: 3625379 - RNA, 20 nt, Human
accacucuaucaaguauuau

SEQ ID NO: 3625380 - RNA, 12 nt, Human
accacucuggca

SEQ ID NO: 3625381 - RNA, 14 nt, Human
accacucuggcagc

SEQ ID NO: 3625382 - RNA, 16 nt, Human
accacucuggcagcca

SEQ ID NO: 3625383 - RNA, 17 nt, Human
accacucuggcagccac

SEQ ID NO: 3625384 - RNA, 14 nt, Human
accacucuguaauu

SEQ ID NO: 3625385 - RNA, 21 nt, Human
accacugaagauagaagaaaa

SEQ ID NO: 3625386 - RNA, 14 nt, Human
accacugaaucugu

SEQ ID NO: 3625387 - RNA, 17 nt, Human
accacugcacuccagcc

SEQ ID NO: 3625388 - RNA, 20 nt, Human
accacugcacuccagccugg

SEQ ID NO: 3625389 - RNA, 13 nt, Human
accacugcagaag

SEQ ID NO: 3625390 - RNA, 14 nt, Human
accacugcagaaga

SEQ ID NO: 3625391 - RNA, 17 nt, Human
accacugcucugaugaa

SEQ ID NO: 3625392 - RNA, 23 nt, Human
accacugcucugaugaagaggag

SEQ ID NO: 3625393 - RNA, 18 nt, Human
accacuggccaccaggcu

SEQ ID NO: 3625394 - RNA, 20 nt, Human
accacuguaaaaugaaauua

SEQ ID NO: 3625395 - RNA, 19 nt, Human
accacuguuucuugcuugu

SEQ ID NO: 3625396 - RNA, 23 nt, Human
accacuguuucuugcuuguaccu

SEQ ID NO: 3625397 - RNA, 17 nt, Human
accacuucacugaaaga

SEQ ID NO: 3625398 - RNA, 13 nt, Human
accacuucagcug

SEQ ID NO: 3625399 - RNA, 15 nt, Human
accacuucagggcuu

SEQ ID NO: 3625400 - RNA, 17 nt, Human
accacuucauucuugaa

SEQ ID NO: 3625401 - RNA, 23 nt, Human
accacuuccaggggaaccugcca

SEQ ID NO: 3625402 - RNA, 16 nt, Human
accacuucuuuuauaa

SEQ ID NO: 3625403 - RNA, 13 nt, Human
accacuugcugca

SEQ ID NO: 3625404 - RNA, 18 nt, Human
accacuuguguuuugcaa

SEQ ID NO: 3625405 - RNA, 19 nt, Human
accacuuguguuuugcaag

SEQ ID NO: 3625406 - RNA, 15 nt, Human
accacuuucuuauuu

SEQ ID NO: 3625407 - RNA, 15 nt, Human
accacuuuuguucuu

SEQ ID NO: 3625408 - RNA, 13 nt, Human
accacuuuuugca

SEQ ID NO: 3625409 - RNA, 20 nt, Human
accacuuuuugcagcuuucu

SEQ ID NO: 3625410 - RNA, 16 nt, Human
accagaaaucaaaaag

SEQ ID NO: 3625411 - RNA, 13 nt, Human
accagaagcccag

SEQ ID NO: 3625412 - RNA, 14 nt, Human
accagaagcccaga

SEQ ID NO: 3625413 - RNA, 17 nt, Human
accagaagcucccccag

SEQ ID NO: 3625414 - RNA, 20 nt, Human
accagaagcucccccagcaa

SEQ ID NO: 3625415 - RNA, 17 nt, Human
accagaauugugcaaau

SEQ ID NO: 3625416 - RNA, 16 nt, Human
accagacaaggaaaua

SEQ ID NO: 3625417 - RNA, 14 nt, Human
accagacacccagg

SEQ ID NO: 3625418 - RNA, 15 nt, Human
accagacacccagga

SEQ ID NO: 3625419 - RNA, 22 nt, Human
accagaccuggaagaacaggcc

SEQ ID NO: 3625420 - RNA, 23 nt, Human
accagaccuggaagaacaggccu

SEQ ID NO: 3625421 - RNA, 16 nt, Human
accagacggggcugga

SEQ ID NO: 3625422 - RNA, 21 nt, Human
accagacggggcuggagugug

SEQ ID NO: 3625423 - RNA, 19 nt, Human
accagacgguucaccagcc

SEQ ID NO: 3625424 - RNA, 23 nt, Human
accagacuacuugggagcaccgc

SEQ ID NO: 3625425 - RNA, 16 nt, Human
accagacucgccaaca

SEQ ID NO: 3625426 - RNA, 17 nt, Human
accagacucgccaacau

SEQ ID NO: 3625427 - RNA, 20 nt, Human
accagacucgccaacauggu

SEQ ID NO: 3625428 - RNA, 13 nt, Human
accagacugcagg

SEQ ID NO: 3625429 - RNA, 13 nt, Human
accagacugugga

SEQ ID NO: 3625430 - RNA, 21 nt, Human
accagacuguggagaaauaaa

SEQ ID NO: 3625431 - RNA, 16 nt, Human
aauucugcuaccucac

SEQ ID NO: 3625432 - RNA, 12 nt, Human
aauucuguacau

SEQ ID NO: 3625433 - RNA, 17 nt, Human
aauucuguacauagccu

SEQ ID NO: 3625434 - RNA, 21 nt, Human
aauucuguacauagccuauau

SEQ ID NO: 3625435 - RNA, 22 nt, Human
aauucuguacugauuuuuguaa

SEQ ID NO: 3625436 - RNA, 16 nt, Human
aauucugugccuuguu

SEQ ID NO: 3625437 - RNA, 16 nt, Human
aauucuguucauuugu

SEQ ID NO: 3625438 - RNA, 16 nt, Human
acaguuuucugagaaa

SEQ ID NO: 3625439 - RNA, 20 nt, Human
acaguuuucugagaaagacu

SEQ ID NO: 3625440 - RNA, 21 nt, Human
acaguuuucuggcuggagccu

SEQ ID NO: 3625441 - RNA, 18 nt, Human
acaguuuugguugcuuua

SEQ ID NO: 3625442 - RNA, 24 nt, Human
acaguuuugguugcuuuaauauca

SEQ ID NO: 3625443 - RNA, 12 nt, Human
acaguuuuuaaa

SEQ ID NO: 3625444 - RNA, 15 nt, Human
acaguuuuuauugcu

SEQ ID NO: 3625445 - RNA, 16 nt, Human
acauaaaaacaacuuu

SEQ ID NO: 3625446 - RNA, 22 nt, Human
acauaaaaaggacaucagcaaa

SEQ ID NO: 3625447 - RNA, 17 nt, Human
acauaaaaaguuaaaaa

SEQ ID NO: 3625448 - RNA, 11 nt, Human
acauaaaacaa

SEQ ID NO: 3625449 - RNA, 14 nt, Human
acauaaaagaauuu

SEQ ID NO: 3625450 - RNA, 13 nt, Human
acauaaacaauga

SEQ ID NO: 3625451 - RNA, 16 nt, Human
acauaaaccauuuuug

SEQ ID NO: 3625452 - RNA, 17 nt, Human
acauaaaggaaaagaca

SEQ ID NO: 3625453 - RNA, 18 nt, Human
acauaaaggaaaagacac

SEQ ID NO: 3625454 - RNA, 19 nt, Human
acauaaauaaaaugaccag

SEQ ID NO: 3625455 - RNA, 11 nt, Human
acauaaaugca

SEQ ID NO: 3625456 - RNA, 13 nt, Human
acauaacagaaug

SEQ ID NO: 3625457 - RNA, 18 nt, Human
acauaacagaaugcacca

SEQ ID NO: 3625458 - RNA, 20 nt, Human
acauaacaggguaaauuauu

SEQ ID NO: 3625459 - RNA, 22 nt, Human
acauaacaggguaaauuauuca

SEQ ID NO: 3625460 - RNA, 15 nt, Human
acauaacguuuuucc

SEQ ID NO: 3625461 - RNA, 16 nt, Human
acauaacguuuuuccu

SEQ ID NO: 3625462 - RNA, 18 nt, Human
acauaacuaaauuugaua

SEQ ID NO: 3625463 - RNA, 15 nt, Human
acauaacugccuuga

SEQ ID NO: 3625464 - RNA, 14 nt, Human
acauaagaccauaa

SEQ ID NO: 3625465 - RNA, 16 nt, Human
acauaagauaaaugug

SEQ ID NO: 3625466 - RNA, 23 nt, Human
acauaagaucacugccagagaua

SEQ ID NO: 3625467 - RNA, 19 nt, Human
acauaagggguuugccauu

SEQ ID NO: 3625468 - RNA, 17 nt, Human
acauaauaaaaaauuau

SEQ ID NO: 3625469 - RNA, 23 nt, Human
acauaauaaaaaauuaugacaau

SEQ ID NO: 3625470 - RNA, 21 nt, Human
acauaauacacuugcccugcu

SEQ ID NO: 3625471 - RNA, 22 nt, Human
acauaaucuaguuuacagaaaa

SEQ ID NO: 3625472 - RNA, 19 nt, Human
acauaaugaaaauauuuuu

SEQ ID NO: 3625473 - RNA, 21 nt, Human
acauaaugcgugcauaccacu

SEQ ID NO: 3625474 - RNA, 22 nt, Human
acauaaugcgugcauaccacuu

SEQ ID NO: 3625475 - RNA, 19 nt, Human
acauaaugcuuaauuucua

SEQ ID NO: 3625476 - RNA, 20 nt, Human
acauaaugggccacugaaau

SEQ ID NO: 3625477 - RNA, 19 nt, Human
acauaauuaaauuuugagu

SEQ ID NO: 3625478 - RNA, 21 nt, Human
acauaauuaacacuuaagguu

SEQ ID NO: 3625479 - RNA, 23 nt, Human
acauaauuauccaggaagggaau

SEQ ID NO: 3625480 - RNA, 20 nt, Human
acauaauucaggaagcagcu

SEQ ID NO: 3625481 - RNA, 21 nt, Human
acauaauuuaguuucauauaa

SEQ ID NO: 3625482 - RNA, 12 nt, Human
acauaauuuuuu

SEQ ID NO: 3625483 - RNA, 21 nt, Human
acauaauuuuuuuuuuuuaac

SEQ ID NO: 3625484 - RNA, 17 nt, Human
acauacaacacaaagag

SEQ ID NO: 3625485 - RNA, 16 nt, Human
acauacaauuauuuuu

SEQ ID NO: 3625486 - RNA, 21 nt, Human
acauacaccuaugucauuuca

SEQ ID NO: 3625487 - RNA, 16 nt, Human
acauacacuuguauaa

SEQ ID NO: 3625488 - RNA, 19 nt, Human
acauacacuuguauaaaug

SEQ ID NO: 3625489 - RNA, 23 nt, Human
acauacaggaagguagaaauauc

SEQ ID NO: 3625490 - RNA, 20 nt, Human
acauacaguuuuaugcucuu

SEQ ID NO: 3625491 - RNA, 15 nt, Human
acauacaugucacau

SEQ ID NO: 3625492 - RNA, 20 nt, Human
acauacccccucccccaccg

SEQ ID NO: 3625493 - RNA, 20 nt, Human
acauacccuggccgcccccu

SEQ ID NO: 3625494 - RNA, 16 nt, Human
acauaccuuuuauuuu

SEQ ID NO: 3625495 - RNA, 15 nt, Human
acauacgcuuuuaau

SEQ ID NO: 3625496 - RNA, 21 nt, Human
acauacgugugcaugugucuu

SEQ ID NO: 3625497 - RNA, 13 nt, Human
acauacucauuuu

SEQ ID NO: 3625498 - RNA, 14 nt, Human
acauacucugcuua

SEQ ID NO: 3625499 - RNA, 19 nt, Human
acauacuggccuggacugu

SEQ ID NO: 3625500 - RNA, 16 nt, Human
acauacuugaagggcc

SEQ ID NO: 3625501 - RNA, 17 nt, Human
acauacuugaagggcca

SEQ ID NO: 3625502 - RNA, 18 nt, Human
acauacuugaagggccag

SEQ ID NO: 3625503 - RNA, 19 nt, Human
acauacuugaagggccaga

SEQ ID NO: 3625504 - RNA, 21 nt, Human
acauacuugaagggccagagc

SEQ ID NO: 3625505 - RNA, 22 nt, Human
acauacuugaagggccagagcc

SEQ ID NO: 3625506 - RNA, 11 nt, Human
acauacuuuuu

SEQ ID NO: 3625507 - RNA, 16 nt, Human
acauagaaauugccug

SEQ ID NO: 3625508 - RNA, 22 nt, Human
acauagagaucauccuuuccag

SEQ ID NO: 3625509 - RNA, 14 nt, Human
acauagagguauau

SEQ ID NO: 3625510 - RNA, 16 nt, Human
acauagagguauauug

SEQ ID NO: 3625511 - RNA, 18 nt, Human
acauagagguauauugga

SEQ ID NO: 3625512 - RNA, 20 nt, Human
acauagagguauauuggaag

SEQ ID NO: 3625513 - RNA, 18 nt, Human
acauagauauuuucacaa

SEQ ID NO: 3625514 - RNA, 20 nt, Human
acauagauucaccuguaaaa

SEQ ID NO: 3625515 - RNA, 22 nt, Human
acauagauucaccuguaaaacu

SEQ ID NO: 3625516 - RNA, 22 nt, Human
acauagauuuauuuuucaguuc

SEQ ID NO: 3625517 - RNA, 20 nt, Human
acauagcauccaaguggcau

SEQ ID NO: 3625518 - RNA, 16 nt, Human
acauagcaugacauuu

SEQ ID NO: 3625519 - RNA, 21 nt, Human
acauagcaugacauuucuuug

SEQ ID NO: 3625520 - RNA, 16 nt, Human
acauagccaaaaugug

SEQ ID NO: 3625521 - RNA, 22 nt, Human
acauagcccaucccugccuggu

SEQ ID NO: 3625522 - RNA, 13 nt, Human
acauagccuauau

SEQ ID NO: 3625523 - RNA, 20 nt, Human
acauagccuauauuuacagu

SEQ ID NO: 3625524 - RNA, 19 nt, Human
acauagcuaucaagugugc

SEQ ID NO: 3625525 - RNA, 14 nt, Human
acauagcugugauu

SEQ ID NO: 3625526 - RNA, 16 nt, Human
acauaggacucaaagu

SEQ ID NO: 3625527 - RNA, 13 nt, Human
acauagugaaaau

SEQ ID NO: 3625528 - RNA, 22 nt, Human
acauagugcauuguuucugugg

SEQ ID NO: 3625529 - RNA, 12 nt, Human
acauaguguaau

SEQ ID NO: 3625530 - RNA, 17 nt, Human
acauaguucguuuaccu

SEQ ID NO: 3625531 - RNA, 17 nt, Human
acauaguuuuaaacuca

SEQ ID NO: 3625532 - RNA, 20 nt, Human
acauaguuuuaaacucauuu

SEQ ID NO: 3625533 - RNA, 21 nt, Human
acauaguuuuaaacucauuuu

SEQ ID NO: 3625534 - RNA, 22 nt, Human
acauauaaaauaaugcaaagaa

SEQ ID NO: 3625535 - RNA, 21 nt, Human
acauauaaagcacuauacaga

SEQ ID NO: 3625536 - RNA, 22 nt, Human
acauauaaauugucuuaaugga

SEQ ID NO: 3625537 - RNA, 16 nt, Human
acauauaauauauguu

SEQ ID NO: 3625538 - RNA, 23 nt, Human
acauauaauguuguuauuuaaag

SEQ ID NO: 3625539 - RNA, 14 nt, Human
acauauacacacac

SEQ ID NO: 3625540 - RNA, 13 nt, Human
acauauacauacu

SEQ ID NO: 3625541 - RNA, 19 nt, Human
acauauaccuauaaugugu

SEQ ID NO: 3625542 - RNA, 21 nt, Human
acauauaccuauaaugugugu

SEQ ID NO: 3625543 - RNA, 22 nt, Human
acauauaccuauaaugugugua

SEQ ID NO: 3625544 - RNA, 19 nt, Human
acauauauaacaaugcugu

SEQ ID NO: 3625545 - RNA, 15 nt, Human
acauauauacacaca

SEQ ID NO: 3625546 - RNA, 17 nt, Human
acauauauauauauaac

SEQ ID NO: 3625547 - RNA, 14 nt, Human
acauauauauuaca

SEQ ID NO: 3625548 - RNA, 16 nt, Human
acauaucaucugugga

SEQ ID NO: 3625549 - RNA, 23 nt, Human
acauaucuaguaugaaauuauau

SEQ ID NO: 3625550 - RNA, 19 nt, Human
acauaucucuuaucuuacg

SEQ ID NO: 3625551 - RNA, 16 nt, Human
acauaucuuuauuaau

SEQ ID NO: 3625552 - RNA, 15 nt, Human
acauaugaaaauaca

SEQ ID NO: 3625553 - RNA, 14 nt, Human
acauaugaggggga

SEQ ID NO: 3625554 - RNA, 15 nt, Human
acauaugauuucacu

SEQ ID NO: 3625555 - RNA, 22 nt, Human
acauaugauuucacuagaaaag

SEQ ID NO: 3625556 - RNA, 23 nt, Human
acauauggacucugcacaugaau

SEQ ID NO: 3625557 - RNA, 23 nt, Human
acauauggucuccauuuuacagu

SEQ ID NO: 3625558 - RNA, 17 nt, Human
acauauguagacuauau

SEQ ID NO: 3625559 - RNA, 20 nt, Human
acauauguagacuauauaca

SEQ ID NO: 3625560 - RNA, 21 nt, Human
acauauuagugcagccaagua

SEQ ID NO: 3625561 - RNA, 14 nt, Human
acauauuaugucuu

SEQ ID NO: 3625562 - RNA, 22 nt, Human
acauauugauuuccguuaaaau

SEQ ID NO: 3625563 - RNA, 14 nt, Human
acauauuuaacugg

SEQ ID NO: 3625564 - RNA, 15 nt, Human
acauauuuaacuggu

SEQ ID NO: 3625565 - RNA, 16 nt, Human
acauauuuaauguuuu

SEQ ID NO: 3625566 - RNA, 20 nt, Human
acauauuuaauguuuuaaau

SEQ ID NO: 3625567 - RNA, 21 nt, Human
acauauuuaauguuuuaaaug

SEQ ID NO: 3625568 - RNA, 19 nt, Human
acauauuuguggaauaaug

SEQ ID NO: 3625569 - RNA, 14 nt, Human
acauauuuuaaaau

SEQ ID NO: 3625570 - RNA, 18 nt, Human
acaucaacccgagucauu

SEQ ID NO: 3625571 - RNA, 14 nt, Human
acaucaagcacaga

SEQ ID NO: 3625572 - RNA, 18 nt, Human
acaucaagcacagaagga

SEQ ID NO: 3625573 - RNA, 23 nt, Human
acaucaauauugucauuccugua

SEQ ID NO: 3625574 - RNA, 16 nt, Human
accagugaaccaaaga

SEQ ID NO: 3625575 - RNA, 13 nt, Human
accagugaauuuu

SEQ ID NO: 3625576 - RNA, 17 nt, Human
accagugaauuuuugca

SEQ ID NO: 3625577 - RNA, 21 nt, Human
accagugaauuuuugcaauaa

SEQ ID NO: 3625578 - RNA, 12 nt, Human
accagugacuuu

SEQ ID NO: 3625579 - RNA, 14 nt, Human
accagugagcgcuu

SEQ ID NO: 3625580 - RNA, 18 nt, Human
accagugcaacagcacug

SEQ ID NO: 3625581 - RNA, 16 nt, Human
accagugcaggcuggc

SEQ ID NO: 3625582 - RNA, 19 nt, Human
accagugcaggcuggccag

SEQ ID NO: 3625583 - RNA, 13 nt, Human
accagugccaagg

SEQ ID NO: 3625584 - RNA, 15 nt, Human
accagugccaaggac

SEQ ID NO: 3625585 - RNA, 10 nt, Human
accagugccu

SEQ ID NO: 3625586 - RNA, 18 nt, Human
accagugccucucccugc

SEQ ID NO: 3625587 - RNA, 22 nt, Human
accagugccucucccugcugcu

SEQ ID NO: 3625588 - RNA, 18 nt, Human
accagugcgauucuggau

SEQ ID NO: 3625589 - RNA, 21 nt, Human
accaguggcguuguugcaugu

SEQ ID NO: 3625590 - RNA, 16 nt, Human
accaguguagccuugc

SEQ ID NO: 3625591 - RNA, 18 nt, Human
accaguguccccuccacu

SEQ ID NO: 3625592 - RNA, 21 nt, Human
accagugugguuuguguuuga

SEQ ID NO: 3625593 - RNA, 23 nt, Human
accaguguguggcuuucagagcc

SEQ ID NO: 3625594 - RNA, 17 nt, Human
accaguguuguggauuu

SEQ ID NO: 3625595 - RNA, 21 nt, Human
accaguguuguggauuuaaca

SEQ ID NO: 3625596 - RNA, 16 nt, Human
accaguucucaugggu

SEQ ID NO: 3625597 - RNA, 12 nt, Human
acaugcauuuga

SEQ ID NO: 3625598 - RNA, 17 nt, Human
acaugcauuugagguca

SEQ ID NO: 3625599 - RNA, 14 nt, Human
acaugccaagcacu

SEQ ID NO: 3625600 - RNA, 15 nt, Human
acaugccaggggccu

SEQ ID NO: 3625601 - RNA, 14 nt, Human
acaugcccucccuu

SEQ ID NO: 3625602 - RNA, 19 nt, Human
acaugcccucccuucuccc

SEQ ID NO: 3625603 - RNA, 22 nt, Human
acaugcccucccuucucccugg

SEQ ID NO: 3625604 - RNA, 18 nt, Human
acaugccuaccaauauuu

SEQ ID NO: 3625605 - RNA, 22 nt, Human
acaugccuauaugagaagaaua

SEQ ID NO: 3625606 - RNA, 13 nt, Human
acaugccucucuc

SEQ ID NO: 3625607 - RNA, 15 nt, Human
acaugccucucucag

SEQ ID NO: 3625608 - RNA, 18 nt, Human
acaugccucucucaggcc

SEQ ID NO: 3625609 - RNA, 15 nt, Human
acaugccugccccaa

SEQ ID NO: 3625610 - RNA, 14 nt, Human
acaugcgggcuggg

SEQ ID NO: 3625611 - RNA, 24 nt, Human
acaugcuaagagaaguagaaauca

SEQ ID NO: 3625612 - RNA, 19 nt, Human
acaugcucuuagaaaauuc

SEQ ID NO: 3625613 - RNA, 14 nt, Human
acaugcugaagcca

SEQ ID NO: 3625614 - RNA, 21 nt, Human
acaugcugagucucccaaggc

SEQ ID NO: 3625615 - RNA, 19 nt, Human
acaugcuuagcaguccccu

SEQ ID NO: 3625616 - RNA, 23 nt, Human
acaugcuuagcaguccccuuccc

SEQ ID NO: 3625617 - RNA, 22 nt, Human
acaugcuuauuccaugacugcu

SEQ ID NO: 3625618 - RNA, 15 nt, Human
acaugcuucaauagu

SEQ ID NO: 3625619 - RNA, 23 nt, Human
acaugcuucaauaguucaaggaa

SEQ ID NO: 3625620 - RNA, 20 nt, Human
acaugcuucaugaaaauccu

SEQ ID NO: 3625621 - RNA, 16 nt, Human
acaugcuucccuuucc

SEQ ID NO: 3625622 - RNA, 22 nt, Human
acaugcuuguugacagagagag

SEQ ID NO: 3625623 - RNA, 15 nt, Human
acauggaaacccaua

SEQ ID NO: 3625624 - RNA, 12 nt, Human
acauggaacagu

SEQ ID NO: 3625625 - RNA, 17 nt, Human
acauggaacucauuccu

SEQ ID NO: 3625626 - RNA, 20 nt, Human
acauggaauaacauguaauu

SEQ ID NO: 3625627 - RNA, 15 nt, Human
acauggacagaauuu

SEQ ID NO: 3625628 - RNA, 12 nt, Human
acauggacccgg

SEQ ID NO: 3625629 - RNA, 13 nt, Human
acauggacuugua

SEQ ID NO: 3625630 - RNA, 21 nt, Human
acauggagacuccugcccugu

SEQ ID NO: 3625631 - RNA, 14 nt, Human
acauggagguucua

SEQ ID NO: 3625632 - RNA, 17 nt, Human
acauggagguucuaagg

SEQ ID NO: 3625633 - RNA, 15 nt, Human
acauggccaguguga

SEQ ID NO: 3625634 - RNA, 22 nt, Human
acauggccccucccccugccag

SEQ ID NO: 3625635 - RNA, 23 nt, Human
acauggcucuggacucuaaagac

SEQ ID NO: 3625636 - RNA, 14 nt, Human
acauggcuuaguuu

SEQ ID NO: 3625637 - RNA, 19 nt, Human
acauggcuuaguuuucaua

SEQ ID NO: 3625638 - RNA, 20 nt, Human
acauggcuugccacagcucu

SEQ ID NO: 3625639 - RNA, 18 nt, Human
acauggcuuucagaaaac

SEQ ID NO: 3625640 - RNA, 20 nt, Human
acaugggacauuugcucaug

SEQ ID NO: 3625641 - RNA, 20 nt, Human
acaugggacuaugcuuuucu

SEQ ID NO: 3625642 - RNA, 13 nt, Human
acaugggaguuua

SEQ ID NO: 3625643 - RNA, 16 nt, Human
acauggggaggaagga

SEQ ID NO: 3625644 - RNA, 13 nt, Human
acauggggaggag

SEQ ID NO: 3625645 - RNA, 21 nt, Human
acaugggguuggcugggccca

SEQ ID NO: 3625646 - RNA, 18 nt, Human
acaugggguuuucaauuu

SEQ ID NO: 3625647 - RNA, 21 nt, Human
acaugguaaacgcugucccua

SEQ ID NO: 3625648 - RNA, 14 nt, Human
acaugguacucuug

SEQ ID NO: 3625649 - RNA, 17 nt, Human
acauggucugucaauga

SEQ ID NO: 3625650 - RNA, 13 nt, Human
acauggugccuga

SEQ ID NO: 3625651 - RNA, 16 nt, Human
acauggugccugagag

SEQ ID NO: 3625652 - RNA, 20 nt, Human
acauggugccugagaggcag

SEQ ID NO: 3625653 - RNA, 23 nt, Human
acauggugccugagaggcaggca

SEQ ID NO: 3625654 - RNA, 23 nt, Human
acauggugucuggauucccagga

SEQ ID NO: 3625655 - RNA, 18 nt, Human
acaugguuacaaucauug

SEQ ID NO: 3625656 - RNA, 22 nt, Human
acaugguuacaaucauugcuga

SEQ ID NO: 3625657 - RNA, 18 nt, Human
acaugguugugaccugag

SEQ ID NO: 3625658 - RNA, 17 nt, Human
acauguaauaaaaagua

SEQ ID NO: 3625659 - RNA, 17 nt, Human
acauguaauuaaguacu

SEQ ID NO: 3625660 - RNA, 13 nt, Human
acauguaauuuga

SEQ ID NO: 3625661 - RNA, 15 nt, Human
acauguagguguuug

SEQ ID NO: 3625662 - RNA, 20 nt, Human
acauguaguaguacuugaaa

SEQ ID NO: 3625663 - RNA, 11 nt, Human
acauguaugug

SEQ ID NO: 3625664 - RNA, 15 nt, Human
acauguauguuuugg

SEQ ID NO: 3625665 - RNA, 22 nt, Human
acauguauguuuugguaucugu

SEQ ID NO: 3625666 - RNA, 23 nt, Human
acauguauguuuugguaucuguu

SEQ ID NO: 3625667 - RNA, 20 nt, Human
acauguauuaaauuacauuu

SEQ ID NO: 3625668 - RNA, 22 nt, Human
acauguauuaaauuacauuugu

SEQ ID NO: 3625669 - RNA, 14 nt, Human
acauguauuuaugu

SEQ ID NO: 3625670 - RNA, 18 nt, Human
acauguauuuauguaaug

SEQ ID NO: 3625671 - RNA, 12 nt, Human
acauguauuugu

SEQ ID NO: 3625672 - RNA, 17 nt, Human
acauguauuuguuugca

SEQ ID NO: 3625673 - RNA, 12 nt, Human
acaugucaaucu

SEQ ID NO: 3625674 - RNA, 17 nt, Human
acauguccagcaccuug

SEQ ID NO: 3625675 - RNA, 23 nt, Human
acauguccagcaccuugugccug

SEQ ID NO: 3625676 - RNA, 19 nt, Human
acauguccuaauucuucug

SEQ ID NO: 3625677 - RNA, 20 nt, Human
acauguccuaauucuucugu

SEQ ID NO: 3625678 - RNA, 23 nt, Human
acauguccugccuauuaucuguc

SEQ ID NO: 3625679 - RNA, 23 nt, Human
acaugucuuaaugaaguuugaau

SEQ ID NO: 3625680 - RNA, 13 nt, Human
acaugucuuguac

SEQ ID NO: 3625681 - RNA, 14 nt, Human
acaugucuuguaca

SEQ ID NO: 3625682 - RNA, 22 nt, Human
acaugucuuguacauguguagc

SEQ ID NO: 3625683 - RNA, 21 nt, Human
acaugucuuuucuugcaugag

SEQ ID NO: 3625684 - RNA, 21 nt, Human
acaugugacacauaugcaccu

SEQ ID NO: 3625685 - RNA, 14 nt, Human
acaugugacauuua

SEQ ID NO: 3625686 - RNA, 16 nt, Human
acaugugacauuuaua

SEQ ID NO: 3625687 - RNA, 23 nt, Human
acaugugauacauuuuuuaagcu

SEQ ID NO: 3625688 - RNA, 20 nt, Human
acaugugccgaaugugcagg

SEQ ID NO: 3625689 - RNA, 17 nt, Human
acauguguagccugugc

SEQ ID NO: 3625690 - RNA, 16 nt, Human
acaugugugcgugugc

SEQ ID NO: 3625691 - RNA, 14 nt, Human
acauguguguauau

SEQ ID NO: 3625692 - RNA, 22 nt, Human
acauguguguauauauguguau

SEQ ID NO: 3625693 - RNA, 20 nt, Human
acauguguuaaguauuuuca

SEQ ID NO: 3625694 - RNA, 21 nt, Human
acauguuaaaccaugggauaa

SEQ ID NO: 3625695 - RNA, 23 nt, Human
acauguuaaaccaugggauaaau

SEQ ID NO: 3625696 - RNA, 16 nt, Human
acauguuaaugacaau

SEQ ID NO: 3625697 - RNA, 20 nt, Human
acauguuaaugacaauauuc

SEQ ID NO: 3625698 - RNA, 11 nt, Human
acauguuacug

SEQ ID NO: 3625699 - RNA, 19 nt, Human
acauguuacugaccagcaa

SEQ ID NO: 3625700 - RNA, 21 nt, Human
acauguuuaauaaauaaaaau

SEQ ID NO: 3625701 - RNA, 21 nt, Human
acauguuuacuuuucagggca

SEQ ID NO: 3625702 - RNA, 14 nt, Human
acauguuuccagca

SEQ ID NO: 3625703 - RNA, 21 nt, Human
acauguuuccagcauucccag

SEQ ID NO: 3625704 - RNA, 22 nt, Human
acauguuuccagcauucccagg

SEQ ID NO: 3625705 - RNA, 19 nt, Human
acauguuucuuuguaauga

SEQ ID NO: 3625706 - RNA, 17 nt, Human
acauguuuuagacaaau

SEQ ID NO: 3625707 - RNA, 20 nt, Human
acauguuuuagacaaauacu

SEQ ID NO: 3625708 - RNA, 13 nt, Human
acauguuuucaaa

SEQ ID NO: 3625709 - RNA, 15 nt, Human
acauguuuucaaaug

SEQ ID NO: 3625710 - RNA, 18 nt, Human
acauguuuugauaaagua

SEQ ID NO: 3625711 - RNA, 21 nt, Human
acauguuuugauaaaguagua

SEQ ID NO: 3625712 - RNA, 23 nt, Human
acauguuuuuguuuucuuugaau

SEQ ID NO: 3625713 - RNA, 15 nt, Human
acauuaaaaauggaa

SEQ ID NO: 3625714 - RNA, 22 nt, Human
acauuaaagaaggguugagcug

SEQ ID NO: 3625715 - RNA, 13 nt, Human
acauuaaagcagu

SEQ ID NO: 3625716 - RNA, 11 nt, Human
acauuaaauga

SEQ ID NO: 3625717 - RNA, 19 nt, Human
acauuaaaugacucuuccc

SEQ ID NO: 3625718 - RNA, 19 nt, Human
acaaaaaaaccacaaaggc

SEQ ID NO: 3625719 - RNA, 23 nt, Human
acaaaaaaaccucuuaauauucu

SEQ ID NO: 3625720 - RNA, 21 nt, Human
acaaaaaaauaccucaggaaa

SEQ ID NO: 3625721 - RNA, 13 nt, Human
acaaaaaaauaua

SEQ ID NO: 3625722 - RNA, 17 nt, Human
acaaaaaaauauauuua

SEQ ID NO: 3625723 - RNA, 13 nt, Human
acaaaaaaaucug

SEQ ID NO: 3625724 - RNA, 14 nt, Human
acaaaaaaaucuuc

SEQ ID NO: 3625725 - RNA, 14 nt, Human
acaaaaaacaauau

SEQ ID NO: 3625726 - RNA, 18 nt, Human
acaaaaaacaauauuuau

SEQ ID NO: 3625727 - RNA, 17 nt, Human
acaaaaaacgaaugaaa

SEQ ID NO: 3625728 - RNA, 15 nt, Human
acaaaaaacuccccu

SEQ ID NO: 3625729 - RNA, 12 nt, Human
acaaaaaagaag

SEQ ID NO: 3625730 - RNA, 15 nt, Human
acaaaaacagccuca

SEQ ID NO: 3625731 - RNA, 13 nt, Human
acaaaaacauggc

SEQ ID NO: 3625732 - RNA, 20 nt, Human
acaaaaaccaaauguuuauu

SEQ ID NO: 3625733 - RNA, 14 nt, Human
acaaaaagaaaaga

SEQ ID NO: 3625734 - RNA, 15 nt, Human
acaaaaagacaaaca

SEQ ID NO: 3625735 - RNA, 12 nt, Human
acaaaaagacac

SEQ ID NO: 3625736 - RNA, 19 nt, Human
acaaaaagcuaauaccagu

SEQ ID NO: 3625737 - RNA, 10 nt, Human
acaaaaauaa

SEQ ID NO: 3625738 - RNA, 14 nt, Human
acaaaaauaaauuu

SEQ ID NO: 3625739 - RNA, 16 nt, Human
acaaaaauacucagau

SEQ ID NO: 3625740 - RNA, 18 nt, Human
acaaaaauacucuaauuc

SEQ ID NO: 3625741 - RNA, 19 nt, Human
acaaaaauacucuaauucu

SEQ ID NO: 3625742 - RNA, 17 nt, Human
acaaaaaucagccagac

SEQ ID NO: 3625743 - RNA, 20 nt, Human
acaaaaauuaucuauuugua

SEQ ID NO: 3625744 - RNA, 13 nt, Human
acaaaaauuugaa

SEQ ID NO: 3625745 - RNA, 12 nt, Human
acaaaacaaaaa

SEQ ID NO: 3625746 - RNA, 17 nt, Human
acaaaacaaaacaacau

SEQ ID NO: 3625747 - RNA, 12 nt, Human
acaaaacaaaug

SEQ ID NO: 3625748 - RNA, 19 nt, Human
acaaaaccaaaaguuauua

SEQ ID NO: 3625749 - RNA, 17 nt, Human
acaaaacccaugcauuu

SEQ ID NO: 3625750 - RNA, 19 nt, Human
acaaaaccccccagauauc

SEQ ID NO: 3625751 - RNA, 16 nt, Human
acaaaacgcgcagaug

SEQ ID NO: 3625752 - RNA, 10 nt, Human
acaaaacuau

SEQ ID NO: 3625753 - RNA, 16 nt, Human
acaaaacuauacuuga

SEQ ID NO: 3625754 - RNA, 11 nt, Human
acaaaacuucc

SEQ ID NO: 3625755 - RNA, 11 nt, Human
acaaaacuucu

SEQ ID NO: 3625756 - RNA, 14 nt, Human
acaaaacuuuucua

SEQ ID NO: 3625757 - RNA, 15 nt, Human
acaaaagaaaagacu

SEQ ID NO: 3625758 - RNA, 20 nt, Human
acaaaagaaaagacuuguaa

SEQ ID NO: 3625759 - RNA, 16 nt, Human
acaaaagaaauaccuu

SEQ ID NO: 3625760 - RNA, 13 nt, Human
acaaaagagcagu

SEQ ID NO: 3625761 - RNA, 11 nt, Human
acaaaagcaug

SEQ ID NO: 3625762 - RNA, 22 nt, Human
acaaaagcaugugagacugguu

SEQ ID NO: 3625763 - RNA, 10 nt, Human
acaaaaggca

SEQ ID NO: 3625764 - RNA, 16 nt, Human
acaaaagugcuuugga

SEQ ID NO: 3625765 - RNA, 13 nt, Human
acaaaauaaauug

SEQ ID NO: 3625766 - RNA, 22 nt, Human
acaaaauaaccaauccuggaca

SEQ ID NO: 3625767 - RNA, 15 nt, Human
acaaaauagaagcug

SEQ ID NO: 3625768 - RNA, 18 nt, Human
acaaaauagaagcuguag

SEQ ID NO: 3625769 - RNA, 20 nt, Human
acaaaaucagguaacuaacu

SEQ ID NO: 3625770 - RNA, 15 nt, Human
acaaaauggaauuca

SEQ ID NO: 3625771 - RNA, 13 nt, Human
acaaaauguaacu

SEQ ID NO: 3625772 - RNA, 23 nt, Human
acaaaauguaacuguuaccauug

SEQ ID NO: 3625773 - RNA, 22 nt, Human
acaaaauguagaauauucagac

SEQ ID NO: 3625774 - RNA, 16 nt, Human
acaaaauguaugucug

SEQ ID NO: 3625775 - RNA, 16 nt, Human
acaaaauuuucucauu

SEQ ID NO: 3625776 - RNA, 22 nt, Human
acaaaauuuucucauuuucuuu

SEQ ID NO: 3625777 - RNA, 14 nt, Human
acaaacaaaagcau

SEQ ID NO: 3625778 - RNA, 18 nt, Human
acaaacaaaauuucuauu

SEQ ID NO: 3625779 - RNA, 12 nt, Human
acaaacaaauuu

SEQ ID NO: 3625780 - RNA, 21 nt, Human
acaaacaaccccccaucacaa

SEQ ID NO: 3625781 - RNA, 18 nt, Human
acaaacaagcuaggugcu

SEQ ID NO: 3625782 - RNA, 21 nt, Human
acaaacaaggccugucagcua

SEQ ID NO: 3625783 - RNA, 14 nt, Human
acaaacaaucucuu

SEQ ID NO: 3625784 - RNA, 18 nt, Human
acaaacaauuaacugagc

SEQ ID NO: 3625785 - RNA, 17 nt, Human
acaaacacacacaaaag

SEQ ID NO: 3625786 - RNA, 23 nt, Human
acaaacacuacagacaauaaaua

SEQ ID NO: 3625787 - RNA, 13 nt, Human
acaaacagcucag

SEQ ID NO: 3625788 - RNA, 19 nt, Human
acaaacaugugguuaaugc

SEQ ID NO: 3625789 - RNA, 19 nt, Human
acaaacauuguguugacau

SEQ ID NO: 3625790 - RNA, 11 nt, Human
acaaacauuuu

SEQ ID NO: 3625791 - RNA, 16 nt, Human
acaaacauuuuucaac

SEQ ID NO: 3625792 - RNA, 16 nt, Human
acaaaccacaacugac

SEQ ID NO: 3625793 - RNA, 12 nt, Human
acaaaccugccu

SEQ ID NO: 3625794 - RNA, 18 nt, Human
acaaaccugccuggguuu

SEQ ID NO: 3625795 - RNA, 18 nt, Human
acaaacguauguaaaugu

SEQ ID NO: 3625796 - RNA, 15 nt, Human
acaaacucucugaac

SEQ ID NO: 3625797 - RNA, 19 nt, Human
acaaacugcaauagagacu

SEQ ID NO: 3625798 - RNA, 23 nt, Human
acaaacugcacaugauuucacaa

SEQ ID NO: 3625799 - RNA, 14 nt, Human
acaaacuggagucu

SEQ ID NO: 3625800 - RNA, 17 nt, Human
acaaacuguaauacaau

SEQ ID NO: 3625801 - RNA, 15 nt, Human
acaaacuguguaacu

SEQ ID NO: 3625802 - RNA, 21 nt, Human
acaaacuucuuucacucacau

SEQ ID NO: 3625803 - RNA, 15 nt, Human
accccuguaggccuc

SEQ ID NO: 3625804 - RNA, 11 nt, Human
accccuguccc

SEQ ID NO: 3625805 - RNA, 17 nt, Human
accccugucucuagcca

SEQ ID NO: 3625806 - RNA, 21 nt, Human
accccugugcuccgugccucc

SEQ ID NO: 3625807 - RNA, 13 nt, Human
accccuguuucug

SEQ ID NO: 3625808 - RNA, 20 nt, Human
accccuuaagcccuggcccc

SEQ ID NO: 3625809 - RNA, 14 nt, Human
accccuuagccucc

SEQ ID NO: 3625810 - RNA, 15 nt, Human
accccuuauccagga

SEQ ID NO: 3625811 - RNA, 17 nt, Human
accccuuauccaggacu

SEQ ID NO: 3625812 - RNA, 18 nt, Human
accccuuauccaggacuc

SEQ ID NO: 3625813 - RNA, 15 nt, Human
accccuuccagauca

SEQ ID NO: 3625814 - RNA, 16 nt, Human
accccuuccccacugc

SEQ ID NO: 3625815 - RNA, 12 nt, Human
accccuuccugu

SEQ ID NO: 3625816 - RNA, 14 nt, Human
accccuuccugucc

SEQ ID NO: 3625817 - RNA, 15 nt, Human
accccuucgcuccug

SEQ ID NO: 3625818 - RNA, 13 nt, Human
accccuucucugu

SEQ ID NO: 3625819 - RNA, 21 nt, Human
accccuugucgccccucccuc

SEQ ID NO: 3625820 - RNA, 13 nt, Human
accccuuucccac

SEQ ID NO: 3625821 - RNA, 16 nt, Human
accccuuuucagcuuc

SEQ ID NO: 3625822 - RNA, 21 nt, Human
acccgacagagggaagaaaag

SEQ ID NO: 3625823 - RNA, 17 nt, Human
acccgacauaagucgag

SEQ ID NO: 3625824 - RNA, 15 nt, Human
acccgacuccagucc

SEQ ID NO: 3625825 - RNA, 14 nt, Human
acccgaggcccgca

SEQ ID NO: 3625826 - RNA, 14 nt, Human
acccgaggcugccc

SEQ ID NO: 3625827 - RNA, 17 nt, Human
acccgaggguugauuaa

SEQ ID NO: 3625828 - RNA, 21 nt, Human
acccgagucauucguucugug

SEQ ID NO: 3625829 - RNA, 14 nt, Human
acccgaugcugcuu

SEQ ID NO: 3625830 - RNA, 23 nt, Human
acccgauuccaccaaaugugcuu

SEQ ID NO: 3625831 - RNA, 14 nt, Human
acccgccccugccc

SEQ ID NO: 3625832 - RNA, 23 nt, Human
acccgccucucccgucagggccc

SEQ ID NO: 3625833 - RNA, 24 nt, Human
acccgccucucccgucagggccca

SEQ ID NO: 3625834 - RNA, 18 nt, Human
acccgcucaucacuggau

SEQ ID NO: 3625835 - RNA, 12 nt, Human
acccgcucugga

SEQ ID NO: 3625836 - RNA, 13 nt, Human
acccgcucuggac

SEQ ID NO: 3625837 - RNA, 15 nt, Human
acccggaggccacau

SEQ ID NO: 3625838 - RNA, 19 nt, Human
acccggcacccccugcagc

SEQ ID NO: 3625839 - RNA, 14 nt, Human
acccggccccugcu

SEQ ID NO: 3625840 - RNA, 16 nt, Human
acccggccccugcugg

SEQ ID NO: 3625841 - RNA, 20 nt, Human
acccggccccugcugguuca

SEQ ID NO: 3625842 - RNA, 22 nt, Human
acccggccccugcugguucagg

SEQ ID NO: 3625843 - RNA, 12 nt, Human
acccgggaaggg

SEQ ID NO: 3625844 - RNA, 20 nt, Human
acccgggcagggcucccaca

SEQ ID NO: 3625845 - RNA, 14 nt, Human
acccgguccccacu

SEQ ID NO: 3625846 - RNA, 22 nt, Human
acccgguucaguguuucugggg

SEQ ID NO: 3625847 - RNA, 18 nt, Human
acccgguuucuuuuuaag

SEQ ID NO: 3625848 - RNA, 14 nt, Human
acccguccagaccu

SEQ ID NO: 3625849 - RNA, 16 nt, Human
acccgucuccagcugc

SEQ ID NO: 3625850 - RNA, 17 nt, Human
acccgucuccagcugcu

SEQ ID NO: 3625851 - RNA, 17 nt, Human
acccguggaggcugcuc

SEQ ID NO: 3625852 - RNA, 23 nt, Human
acccguucaugggggagggggca

SEQ ID NO: 3625853 - RNA, 18 nt, Human
acccguucugcuggccug

SEQ ID NO: 3625854 - RNA, 20 nt, Human
acccguucugcuggccugga

SEQ ID NO: 3625855 - RNA, 22 nt, Human
acccguucugcuggccuggauc

SEQ ID NO: 3625856 - RNA, 20 nt, Human
acccuaaauaauaaaaauaa

SEQ ID NO: 3625857 - RNA, 16 nt, Human
acccuaaaucuugacu

SEQ ID NO: 3625858 - RNA, 16 nt, Human
acccuaaccaaguucc

SEQ ID NO: 3625859 - RNA, 16 nt, Human
acccuaagacuccucg

SEQ ID NO: 3625860 - RNA, 23 nt, Human
acccuaaugucuucauaaaguac

SEQ ID NO: 3625861 - RNA, 14 nt, Human
acccuaccccacca

SEQ ID NO: 3625862 - RNA, 17 nt, Human
acccuaccugugccuga

SEQ ID NO: 3625863 - RNA, 18 nt, Human
acccuacuucuuuugcuc

SEQ ID NO: 3625864 - RNA, 19 nt, Human
acccuagccaaugucuccu

SEQ ID NO: 3625865 - RNA, 17 nt, Human
accauuggggcucccag

SEQ ID NO: 3625866 - RNA, 18 nt, Human
accauugucucagagcag

SEQ ID NO: 3625867 - RNA, 14 nt, Human
accauugucuuguu

SEQ ID NO: 3625868 - RNA, 17 nt, Human
accauugucuuguucug

SEQ ID NO: 3625869 - RNA, 14 nt, Human
accauuuaacaugc

SEQ ID NO: 3625870 - RNA, 12 nt, Human
accauuuauaau

SEQ ID NO: 3625871 - RNA, 22 nt, Human
accauuuauacaaauuagaaaa

SEQ ID NO: 3625872 - RNA, 11 nt, Human
accauuucaga

SEQ ID NO: 3625873 - RNA, 23 nt, Human
accauuucaguaaaccugucuga

SEQ ID NO: 3625874 - RNA, 19 nt, Human
accauuuccguaauucuua

SEQ ID NO: 3625875 - RNA, 15 nt, Human
accauuuccucagac

SEQ ID NO: 3625876 - RNA, 19 nt, Human
accauuuccucagacucua

SEQ ID NO: 3625877 - RNA, 22 nt, Human
accauuugcauggcuccagaaa

SEQ ID NO: 3625878 - RNA, 18 nt, Human
accauuugcuacuguaca

SEQ ID NO: 3625879 - RNA, 19 nt, Human
accauuuggcaucccuggg

SEQ ID NO: 3625880 - RNA, 15 nt, Human
accauuuguaauaaa

SEQ ID NO: 3625881 - RNA, 16 nt, Human
accauuuguaauaaag

SEQ ID NO: 3625882 - RNA, 15 nt, Human
accauuuuauaaagu

SEQ ID NO: 3625883 - RNA, 15 nt, Human
accauuuuccugcau

SEQ ID NO: 3625884 - RNA, 13 nt, Human
accauuuucuggu

SEQ ID NO: 3625885 - RNA, 23 nt, Human
accauuuugcugucccuuuuccu

SEQ ID NO: 3625886 - RNA, 21 nt, Human
accauuuugggguacccacug

SEQ ID NO: 3625887 - RNA, 22 nt, Human
accauuuuuaaaguagaagagg

SEQ ID NO: 3625888 - RNA, 11 nt, Human
accauuuuuca

SEQ ID NO: 3625889 - RNA, 17 nt, Human
accauuuuucauucacu

SEQ ID NO: 3625890 - RNA, 16 nt, Human
accauuuuuguuacuc

SEQ ID NO: 3625891 - RNA, 20 nt, Human
accauuuuuuaaggaaacaa

SEQ ID NO: 3625892 - RNA, 22 nt, Human
acccaaaagcucagccagcccc

SEQ ID NO: 3625893 - RNA, 14 nt, Human
acccaaacccuagg

SEQ ID NO: 3625894 - RNA, 15 nt, Human
acccaaacccuaggu

SEQ ID NO: 3625895 - RNA, 16 nt, Human
acccaaaccuggagau

SEQ ID NO: 3625896 - RNA, 17 nt, Human
acccaaagcauggacua

SEQ ID NO: 3625897 - RNA, 17 nt, Human
acccaaauccucuccag

SEQ ID NO: 3625898 - RNA, 18 nt, Human
acccaacccuaucuccug

SEQ ID NO: 3625899 - RNA, 20 nt, Human
acccaacccuaucuccugac

SEQ ID NO: 3625900 - RNA, 15 nt, Human
acccaacggcccugc

SEQ ID NO: 3625901 - RNA, 18 nt, Human
acccaagaccucagggca

SEQ ID NO: 3625902 - RNA, 15 nt, Human
acccaagcaaggcca

SEQ ID NO: 3625903 - RNA, 15 nt, Human
acccaagcuccaacc

SEQ ID NO: 3625904 - RNA, 13 nt, Human
acccaagcuuggc

SEQ ID NO: 3625905 - RNA, 18 nt, Human
acccaagcuuggcagccg

SEQ ID NO: 3625906 - RNA, 22 nt, Human
acccaagcuuggcagccgagcu

SEQ ID NO: 3625907 - RNA, 17 nt, Human
acccaaggaaaacugca

SEQ ID NO: 3625908 - RNA, 15 nt, Human
acccaaggaggaaaa

SEQ ID NO: 3625909 - RNA, 13 nt, Human
acccaagggccug

SEQ ID NO: 3625910 - RNA, 18 nt, Human
acccaagggccuggccug

SEQ ID NO: 3625911 - RNA, 19 nt, Human
acccaagggccuggccuga

SEQ ID NO: 3625912 - RNA, 22 nt, Human
acccaagggccuggccugagcu

SEQ ID NO: 3625913 - RNA, 14 nt, Human
acccaauccaaaug

SEQ ID NO: 3625914 - RNA, 13 nt, Human
acccaaugauuca

SEQ ID NO: 3625915 - RNA, 12 nt, Human
acccaauuuccc

SEQ ID NO: 3625916 - RNA, 21 nt, Human
acccacaagaaaugaaagcag

SEQ ID NO: 3625917 - RNA, 15 nt, Human
acccacacugcaaca

SEQ ID NO: 3625918 - RNA, 16 nt, Human
acccacagaaagagag

SEQ ID NO: 3625919 - RNA, 12 nt, Human
acccacagccuc

SEQ ID NO: 3625920 - RNA, 18 nt, Human
acccacauguaaaugaua

SEQ ID NO: 3625921 - RNA, 15 nt, Human
acccacaugugacac

SEQ ID NO: 3625922 - RNA, 16 nt, Human
acccacaugugacaca

SEQ ID NO: 3625923 - RNA, 12 nt, Human
acccacccagaa

SEQ ID NO: 3625924 - RNA, 15 nt, Human
acccacccagaauga

SEQ ID NO: 3625925 - RNA, 17 nt, Human
acccacccccacccaag

SEQ ID NO: 3625926 - RNA, 15 nt, Human
acccaccccugcaca

SEQ ID NO: 3625927 - RNA, 12 nt, Human
acccaccccugu

SEQ ID NO: 3625928 - RNA, 16 nt, Human
acccaccccugugcuc

SEQ ID NO: 3625929 - RNA, 16 nt, Human
acccaccgggccacuc

SEQ ID NO: 3625930 - RNA, 23 nt, Human
acccaccgggccacuccuuccug

SEQ ID NO: 3625931 - RNA, 14 nt, Human
acccaccugagcuu

SEQ ID NO: 3625932 - RNA, 18 nt, Human
acccaccugagcuuugga

SEQ ID NO: 3625933 - RNA, 10 nt, Human
acccaccugc

SEQ ID NO: 3625934 - RNA, 14 nt, Human
acccaccugcgucu

SEQ ID NO: 3625935 - RNA, 13 nt, Human
acccaccugcuga

SEQ ID NO: 3625936 - RNA, 17 nt, Human
acccaccugcugagaga

SEQ ID NO: 3625937 - RNA, 22 nt, Human
acccaccugcugagagacccaa

SEQ ID NO: 3625938 - RNA, 19 nt, Human
acccaccuuguuggagccu

SEQ ID NO: 3625939 - RNA, 20 nt, Human
acccaccuuguuggagccug

SEQ ID NO: 3625940 - RNA, 22 nt, Human
acccaccuuguuggagccugca

SEQ ID NO: 3625941 - RNA, 20 nt, Human
acccacguguaacugucagc

SEQ ID NO: 3625942 - RNA, 21 nt, Human
acccacguucucacacccacc

SEQ ID NO: 3625943 - RNA, 10 nt, Human
acccacugcu

SEQ ID NO: 3625944 - RNA, 13 nt, Human
acccacugcucug

SEQ ID NO: 3625945 - RNA, 15 nt, Human
acccacugcucuggu

SEQ ID NO: 3625946 - RNA, 11 nt, Human
acccacugcuu

SEQ ID NO: 3625947 - RNA, 20 nt, Human
acccacugcuuuuggucugu

SEQ ID NO: 3625948 - RNA, 17 nt, Human
acccacuggacucaccu

SEQ ID NO: 3625949 - RNA, 16 nt, Human
acccacuucccugggc

SEQ ID NO: 3625950 - RNA, 18 nt, Human
acccacuucucaucacac

SEQ ID NO: 3625951 - RNA, 19 nt, Human
acccacuucucaucacaca

SEQ ID NO: 3625952 - RNA, 21 nt, Human
acccacuucucaucacacaca

SEQ ID NO: 3625953 - RNA, 23 nt, Human
acccacuucucaucacacacaug

SEQ ID NO: 3625954 - RNA, 15 nt, Human
acccacuucugcacu

SEQ ID NO: 3625955 - RNA, 17 nt, Human
acccacuucugcacuug

SEQ ID NO: 3625956 - RNA, 19 nt, Human
acccacuugcuuuuaaaau

SEQ ID NO: 3625957 - RNA, 19 nt, Human
acccacuugucacugacac

SEQ ID NO: 3625958 - RNA, 22 nt, Human
acccacuuuaaaauaucuacau

SEQ ID NO: 3625959 - RNA, 21 nt, Human
acccagaaaaucugaauugga

SEQ ID NO: 3625960 - RNA, 20 nt, Human
acccagaaacgccacauccc

SEQ ID NO: 3625961 - RNA, 16 nt, Human
acccagaagaaaauag

SEQ ID NO: 3625962 - RNA, 13 nt, Human
acccagacccagu

SEQ ID NO: 3625963 - RNA, 15 nt, Human
acccagacccagugg

SEQ ID NO: 3625964 - RNA, 17 nt, Human
acccagacggcuccacu

SEQ ID NO: 3625965 - RNA, 22 nt, Human
acccugaggucagggagugcug

SEQ ID NO: 3625966 - RNA, 23 nt, Human
acccugaggucagggagugcugg

SEQ ID NO: 3625967 - RNA, 16 nt, Human
acccugaguucaucca

SEQ ID NO: 3625968 - RNA, 19 nt, Human
acccugauaggaagagggg

SEQ ID NO: 3625969 - RNA, 14 nt, Human
acccugaugaaaac

SEQ ID NO: 3625970 - RNA, 22 nt, Human
acccugauuauauccaguaaca

SEQ ID NO: 3625971 - RNA, 18 nt, Human
acccugcaaggcccacag

SEQ ID NO: 3625972 - RNA, 12 nt, Human
acccugcacccu

SEQ ID NO: 3625973 - RNA, 14 nt, Human
acccugcacccucc

SEQ ID NO: 3625974 - RNA, 16 nt, Human
acccugcacccuccua

SEQ ID NO: 3625975 - RNA, 17 nt, Human
acccugccaggcacagg

SEQ ID NO: 3625976 - RNA, 13 nt, Human
acccugccaugga

SEQ ID NO: 3625977 - RNA, 12 nt, Human
acccugccccug

SEQ ID NO: 3625978 - RNA, 13 nt, Human
acccugccccugc

SEQ ID NO: 3625979 - RNA, 14 nt, Human
acccugcccugugg

SEQ ID NO: 3625980 - RNA, 18 nt, Human
acccugccgucaccacca

SEQ ID NO: 3625981 - RNA, 13 nt, Human
acccugccucucc

SEQ ID NO: 3625982 - RNA, 17 nt, Human
acccugcguggggacag

SEQ ID NO: 3625983 - RNA, 18 nt, Human
acccugcucauccacucu

SEQ ID NO: 3625984 - RNA, 15 nt, Human
acccugcuuggccca

SEQ ID NO: 3625985 - RNA, 17 nt, Human
acccuggaaaaugaauc

SEQ ID NO: 3625986 - RNA, 14 nt, Human
acccuggaaaugga

SEQ ID NO: 3625987 - RNA, 20 nt, Human
acccuggaccaguggucuca

SEQ ID NO: 3625988 - RNA, 17 nt, Human
acccuggaggcaccugg

SEQ ID NO: 3625989 - RNA, 14 nt, Human
acccuggccccucu

SEQ ID NO: 3625990 - RNA, 17 nt, Human
acccuggccccucuccc

SEQ ID NO: 3625991 - RNA, 18 nt, Human
acccuggccccucucccu

SEQ ID NO: 3625992 - RNA, 19 nt, Human
acccuggccccucucccuu

SEQ ID NO: 3625993 - RNA, 17 nt, Human
acccuggccgcccccug

SEQ ID NO: 3625994 - RNA, 19 nt, Human
acccuggccgcccccugcc

SEQ ID NO: 3625995 - RNA, 22 nt, Human
acccuggccgcccccugccccc

SEQ ID NO: 3625996 - RNA, 12 nt, Human
acccugggaccu

SEQ ID NO: 3625997 - RNA, 17 nt, Human
acccugggagacagacc

SEQ ID NO: 3625998 - RNA, 14 nt, Human
acccugggcccugg

SEQ ID NO: 3625999 - RNA, 18 nt, Human
acccugggcccugggcug

SEQ ID NO: 3626000 - RNA, 18 nt, Human
acccugggcucugugggc

SEQ ID NO: 3626001 - RNA, 20 nt, Human
acccugggcucugugggcug

SEQ ID NO: 3626002 - RNA, 19 nt, Human
acccuggggaaggagccag

SEQ ID NO: 3626003 - RNA, 13 nt, Human
acccuggggccug

SEQ ID NO: 3626004 - RNA, 17 nt, Human
acccuggggccuggacc

SEQ ID NO: 3626005 - RNA, 19 nt, Human
acccuggggccuggaccug

SEQ ID NO: 3626006 - RNA, 14 nt, Human
acccugggggcaca

SEQ ID NO: 3626007 - RNA, 18 nt, Human
acccuggugguugcuguu

SEQ ID NO: 3626008 - RNA, 15 nt, Human
acccuguaccucauc

SEQ ID NO: 3626009 - RNA, 17 nt, Human
acccuguaccucauccc

SEQ ID NO: 3626010 - RNA, 20 nt, Human
acccuguacuguucuguguc

SEQ ID NO: 3626011 - RNA, 13 nt, Human
accugcucucuug

SEQ ID NO: 3626012 - RNA, 14 nt, Human
accugcucugcuga

SEQ ID NO: 3626013 - RNA, 19 nt, Human
accugcugaagggcagagg

SEQ ID NO: 3626014 - RNA, 16 nt, Human
accugcugagagaccc

SEQ ID NO: 3626015 - RNA, 11 nt, Human
accugcugagc

SEQ ID NO: 3626016 - RNA, 12 nt, Human
accugcugagcu

SEQ ID NO: 3626017 - RNA, 16 nt, Human
acaccacacccagccu

SEQ ID NO: 3626018 - RNA, 17 nt, Human
acaccacacccagccuc

SEQ ID NO: 3626019 - RNA, 18 nt, Human
acaccacacccagccuca

SEQ ID NO: 3626020 - RNA, 18 nt, Human
acaccacagacacacaca

SEQ ID NO: 3626021 - RNA, 21 nt, Human
acaccacagacacacacacgc

SEQ ID NO: 3626022 - RNA, 17 nt, Human
acaccacucuggcagcc

SEQ ID NO: 3626023 - RNA, 18 nt, Human
acaccacucuggcagcca

SEQ ID NO: 3626024 - RNA, 20 nt, Human
acaccacucuggcagccaca

SEQ ID NO: 3626025 - RNA, 20 nt, Human
acaccagagcagaugcagag

SEQ ID NO: 3626026 - RNA, 12 nt, Human
acaccagagccc

SEQ ID NO: 3626027 - RNA, 23 nt, Human
acaccagagcccaccuuggcuca

SEQ ID NO: 3626028 - RNA, 14 nt, Human
acaccagcauuccu

SEQ ID NO: 3626029 - RNA, 19 nt, Human
acaccagcauuccuuuuga

SEQ ID NO: 3626030 - RNA, 22 nt, Human
acaccagccaggcucugugcug

SEQ ID NO: 3626031 - RNA, 13 nt, Human
acaccagccccug

SEQ ID NO: 3626032 - RNA, 15 nt, Human
acaccagccccugcc

SEQ ID NO: 3626033 - RNA, 21 nt, Human
acaccagccccugccccagcc

SEQ ID NO: 3626034 - RNA, 17 nt, Human
acaccaggagucccugg

SEQ ID NO: 3626035 - RNA, 19 nt, Human
acaccaggagucccuggua

SEQ ID NO: 3626036 - RNA, 22 nt, Human
acaccaggauagagacuggaac

SEQ ID NO: 3626037 - RNA, 12 nt, Human
acaccaggccgu

SEQ ID NO: 3626038 - RNA, 22 nt, Human
acaccaggccguccucccgggc

SEQ ID NO: 3626039 - RNA, 17 nt, Human
acaccagggccagccuc

SEQ ID NO: 3626040 - RNA, 17 nt, Human
acaccagucacaugacc

SEQ ID NO: 3626041 - RNA, 20 nt, Human
acaccauaagcuacugccau

SEQ ID NO: 3626042 - RNA, 21 nt, Human
acaccauaagcuacugccauc

SEQ ID NO: 3626043 - RNA, 19 nt, Human
acaccaucacagcuuguuu

SEQ ID NO: 3626044 - RNA, 20 nt, Human
acaccaucgaucaugaugua

SEQ ID NO: 3626045 - RNA, 18 nt, Human
acaccaucgcuggccccu

SEQ ID NO: 3626046 - RNA, 15 nt, Human
acaccaucuuuuauu

SEQ ID NO: 3626047 - RNA, 18 nt, Human
acaccaucuuuuauucuu

SEQ ID NO: 3626048 - RNA, 21 nt, Human
acaccaucuuuuauucuuuuu

SEQ ID NO: 3626049 - RNA, 16 nt, Human
acaccauuaccaaaau

SEQ ID NO: 3626050 - RNA, 20 nt, Human
acacccaaagagguauuuau

SEQ ID NO: 3626051 - RNA, 19 nt, Human
acacccaaagcugagccug

SEQ ID NO: 3626052 - RNA, 23 nt, Human
acacccagcaauagagacgggac

SEQ ID NO: 3626053 - RNA, 19 nt, Human
acacccagcccacuucugc

SEQ ID NO: 3626054 - RNA, 20 nt, Human
acacccagcccacuucugcc

SEQ ID NO: 3626055 - RNA, 13 nt, Human
acacccagccuca

SEQ ID NO: 3626056 - RNA, 12 nt, Human
acacccagggaa

SEQ ID NO: 3626057 - RNA, 15 nt, Human
acacccaucuguuuu

SEQ ID NO: 3626058 - RNA, 16 nt, Human
acaccccaccugcgcu

SEQ ID NO: 3626059 - RNA, 14 nt, Human
acacccccaccccu

SEQ ID NO: 3626060 - RNA, 18 nt, Human
acacccccaccuccugca

SEQ ID NO: 3626061 - RNA, 16 nt, Human
acacccucccccgcca

SEQ ID NO: 3626062 - RNA, 16 nt, Human
acacccucucccagga

SEQ ID NO: 3626063 - RNA, 17 nt, Human
acacccugcccucaugc

SEQ ID NO: 3626064 - RNA, 13 nt, Human
acacccuuagaaa

SEQ ID NO: 3626065 - RNA, 20 nt, Human
acacccuucacauacccucc

SEQ ID NO: 3626066 - RNA, 21 nt, Human
acacccuucucccacucuccu

SEQ ID NO: 3626067 - RNA, 18 nt, Human
acacccuuggacuugagg

SEQ ID NO: 3626068 - RNA, 16 nt, Human
acaccgacuagccagg

SEQ ID NO: 3626069 - RNA, 22 nt, Human
acaccuaaagguguauuuaaac

SEQ ID NO: 3626070 - RNA, 14 nt, Human
acaccuaagggaca

SEQ ID NO: 3626071 - RNA, 18 nt, Human
acaccuaccaaaaaauaa

SEQ ID NO: 3626072 - RNA, 14 nt, Human
acaccuagaucaga

SEQ ID NO: 3626073 - RNA, 15 nt, Human
acaccuagcaucuca

SEQ ID NO: 3626074 - RNA, 13 nt, Human
acaccuagccagc

SEQ ID NO: 3626075 - RNA, 23 nt, Human
acaccuagccagcugucaagggc

SEQ ID NO: 3626076 - RNA, 17 nt, Human
acaccuaugucauuuca

SEQ ID NO: 3626077 - RNA, 19 nt, Human
acaccuauuaucccagcug

SEQ ID NO: 3626078 - RNA, 22 nt, Human
acaccuauuuuagacaaaucua

SEQ ID NO: 3626079 - RNA, 17 nt, Human
acaccucacaccucacu

SEQ ID NO: 3626080 - RNA, 20 nt, Human
acaccucagaggcuguucuu

SEQ ID NO: 3626081 - RNA, 21 nt, Human
acaccucagaggcuguucuug

SEQ ID NO: 3626082 - RNA, 23 nt, Human
acaccucaguucccuuggccuca

SEQ ID NO: 3626083 - RNA, 13 nt, Human
acaccucccagga

SEQ ID NO: 3626084 - RNA, 11 nt, Human
acaccuccugg

SEQ ID NO: 3626085 - RNA, 12 nt, Human
acaccucugcca

SEQ ID NO: 3626086 - RNA, 16 nt, Human
acaccucuuggggagu

SEQ ID NO: 3626087 - RNA, 17 nt, Human
acaccugagccagccug

SEQ ID NO: 3626088 - RNA, 12 nt, Human
acaccugaugug

SEQ ID NO: 3626089 - RNA, 17 nt, Human
acaccugauguguacau

SEQ ID NO: 3626090 - RNA, 12 nt, Human
acaccugcccug

SEQ ID NO: 3626091 - RNA, 14 nt, Human
acaccugcccugcc

SEQ ID NO: 3626092 - RNA, 18 nt, Human
acaccugcccugcccugc

SEQ ID NO: 3626093 - RNA, 23 nt, Human
acaccugcccugcccugccaccu

SEQ ID NO: 3626094 - RNA, 12 nt, Human
acaccuggcccu

SEQ ID NO: 3626095 - RNA, 19 nt, Human
acaccuggcugagguuccu

SEQ ID NO: 3626096 - RNA, 16 nt, Human
acaccuguacuggaga

SEQ ID NO: 3626097 - RNA, 16 nt, Human
acaccuguagucccag

SEQ ID NO: 3626098 - RNA, 17 nt, Human
acaccuguagucccagc

SEQ ID NO: 3626099 - RNA, 19 nt, Human
acaccuguagucccagcua

SEQ ID NO: 3626100 - RNA, 21 nt, Human
acaccuguagucccagcuacu

SEQ ID NO: 3626101 - RNA, 13 nt, Human
acaccuucucugg

SEQ ID NO: 3626102 - RNA, 14 nt, Human
acaccuucucugga

SEQ ID NO: 3626103 - RNA, 20 nt, Human
acaccuuggacauccuccuc

SEQ ID NO: 3626104 - RNA, 22 nt, Human
acaccuuggacauccuccuccc

SEQ ID NO: 3626105 - RNA, 23 nt, Human
acaccuuggacauccuccuccca

SEQ ID NO: 3626106 - RNA, 22 nt, Human
acaccuugugaccuucucuaua

SEQ ID NO: 3626107 - RNA, 14 nt, Human
acacgaaagaaaug

SEQ ID NO: 3626108 - RNA, 13 nt, Human
acacgaaagagag

SEQ ID NO: 3626109 - RNA, 15 nt, Human
acacgaauauugcug

SEQ ID NO: 3626110 - RNA, 14 nt, Human
acacgagcaggcua

SEQ ID NO: 3626111 - RNA, 19 nt, Human
acacgagcaggcuacuguc

SEQ ID NO: 3626112 - RNA, 13 nt, Human
acacgcaccugcc

SEQ ID NO: 3626113 - RNA, 17 nt, Human
acacgcacgcacacaca

SEQ ID NO: 3626114 - RNA, 19 nt, Human
acacgcaggaacucccagc

SEQ ID NO: 3626115 - RNA, 13 nt, Human
acacgcaggagca

SEQ ID NO: 3626116 - RNA, 19 nt, Human
acacgccuuguucuuggcc

SEQ ID NO: 3626117 - RNA, 20 nt, Human
acacgcgccccccucccaga

SEQ ID NO: 3626118 - RNA, 22 nt, Human
acacgcgccccccucccagagg

SEQ ID NO: 3626119 - RNA, 13 nt, Human
acacgcgcgcaca

SEQ ID NO: 3626120 - RNA, 17 nt, Human
acacgcgcgcacacaca

SEQ ID NO: 3626121 - RNA, 15 nt, Human
acacgcgugcacaca

SEQ ID NO: 3626122 - RNA, 17 nt, Human
acacgcgugcacacacc

SEQ ID NO: 3626123 - RNA, 14 nt, Human
acacgcuccuuccu

SEQ ID NO: 3626124 - RNA, 15 nt, Human
acacgcuguucuaau

SEQ ID NO: 3626125 - RNA, 14 nt, Human
acacgcuuuuguga

SEQ ID NO: 3626126 - RNA, 17 nt, Human
acacgcuuuugugaugg

SEQ ID NO: 3626127 - RNA, 15 nt, Human
acacggacacucaaa

SEQ ID NO: 3626128 - RNA, 23 nt, Human
acacggagcggauugcaaagcaa

SEQ ID NO: 3626129 - RNA, 20 nt, Human
acacggccacaucaaagagg

SEQ ID NO: 3626130 - RNA, 23 nt, Human
acacggucggggcaucuggccug

SEQ ID NO: 3626131 - RNA, 19 nt, Human
acacguaccucucaucagu

SEQ ID NO: 3626132 - RNA, 16 nt, Human
acacguacuuaaauga

SEQ ID NO: 3626133 - RNA, 23 nt, Human
acacguacuuaaaugaaagcaug

SEQ ID NO: 3626134 - RNA, 19 nt, Human
acacguaucccaccugaca

SEQ ID NO: 3626135 - RNA, 17 nt, Human
acacgugacacaaacac

SEQ ID NO: 3626136 - RNA, 17 nt, Human
acacguggaggaaugcu

SEQ ID NO: 3626137 - RNA, 24 nt, Human
acacguggaggaaugcucccccau

SEQ ID NO: 3626138 - RNA, 20 nt, Human
acacgugggcuccccucuuc

SEQ ID NO: 3626139 - RNA, 12 nt, Human
acacguguccug

SEQ ID NO: 3626140 - RNA, 23 nt, Human
acacguucacccaucuuaucaag

SEQ ID NO: 3626141 - RNA, 18 nt, Human
acacuaaauguuaaagau

SEQ ID NO: 3626142 - RNA, 18 nt, Human
acacuaaccaaaucucuc

SEQ ID NO: 3626143 - RNA, 16 nt, Human
acacuaaccaagcuga

SEQ ID NO: 3626144 - RNA, 15 nt, Human
acacuaaccacgcug

SEQ ID NO: 3626145 - RNA, 17 nt, Human
acacuaaccacgcugga

SEQ ID NO: 3626146 - RNA, 20 nt, Human
acacuaaccacgcuggaccu

SEQ ID NO: 3626147 - RNA, 15 nt, Human
acacuaaccuggguu

SEQ ID NO: 3626148 - RNA, 17 nt, Human
acacuaacucaccagcc

SEQ ID NO: 3626149 - RNA, 17 nt, Human
acacuaagagagaauga

SEQ ID NO: 3626150 - RNA, 18 nt, Human
acacuaagagagaaugag

SEQ ID NO: 3626151 - RNA, 23 nt, Human
acacuaaguuauaguauaucugg

SEQ ID NO: 3626152 - RNA, 13 nt, Human
acacuaauauauu

SEQ ID NO: 3626153 - RNA, 19 nt, Human
acacuaauauauuuaaaaa

SEQ ID NO: 3626154 - RNA, 21 nt, Human
acacuaauauauuuaaaaaua

SEQ ID NO: 3626155 - RNA, 14 nt, Human
acacuacaccacac

SEQ ID NO: 3626156 - RNA, 12 nt, Human
accuuaaaacua

SEQ ID NO: 3626157 - RNA, 21 nt, Human
accuuaaaauuugaaacauug

SEQ ID NO: 3626158 - RNA, 17 nt, Human
accuuaaauuaaacaau

SEQ ID NO: 3626159 - RNA, 16 nt, Human
accuuaccaacuuucu

SEQ ID NO: 3626160 - RNA, 17 nt, Human
accuuaccaacuuucug

SEQ ID NO: 3626161 - RNA, 18 nt, Human
accuuaccaacuuucugu

SEQ ID NO: 3626162 - RNA, 20 nt, Human
accuuaccaacuuucuguaa

SEQ ID NO: 3626163 - RNA, 22 nt, Human
accuuaccccuggcuguuugga

SEQ ID NO: 3626164 - RNA, 17 nt, Human
accuuagacagucccug

SEQ ID NO: 3626165 - RNA, 21 nt, Human
accuuagaccaccaagccuug

SEQ ID NO: 3626166 - RNA, 22 nt, Human
accuuagaccaccaagccuuga

SEQ ID NO: 3626167 - RNA, 17 nt, Human
accuuagauuagcucug

SEQ ID NO: 3626168 - RNA, 18 nt, Human
accuuagauuagcucugg

SEQ ID NO: 3626169 - RNA, 19 nt, Human
accuuagauuagcucugga

SEQ ID NO: 3626170 - RNA, 15 nt, Human
accuuaggccuuccu

SEQ ID NO: 3626171 - RNA, 16 nt, Human
accuuaggccuuccuc

SEQ ID NO: 3626172 - RNA, 15 nt, Human
accuuaguguuucug

SEQ ID NO: 3626173 - RNA, 14 nt, Human
accuuauaguuacu

SEQ ID NO: 3626174 - RNA, 20 nt, Human
accuuauaguuacuguguaa

SEQ ID NO: 3626175 - RNA, 22 nt, Human
accuuauaguuacuguguaauu

SEQ ID NO: 3626176 - RNA, 23 nt, Human
accuuauaguuacuguguaauua

SEQ ID NO: 3626177 - RNA, 16 nt, Human
accuuauccugcauug

SEQ ID NO: 3626178 - RNA, 13 nt, Human
accuuaucugugc

SEQ ID NO: 3626179 - RNA, 18 nt, Human
accuuauuguacguuuaa

SEQ ID NO: 3626180 - RNA, 22 nt, Human
accuuauuugcuaaucaaagcc

SEQ ID NO: 3626181 - RNA, 20 nt, Human
accucaggugauccacccac

SEQ ID NO: 3626182 - RNA, 21 nt, Human
accucaguaauuuagaaauca

SEQ ID NO: 3626183 - RNA, 16 nt, Human
accucagugucauuua

SEQ ID NO: 3626184 - RNA, 21 nt, Human
accucagugucauuuaugaaa

SEQ ID NO: 3626185 - RNA, 18 nt, Human
accucaguucccuuggcc

SEQ ID NO: 3626186 - RNA, 19 nt, Human
accucaguucccuuggccu

SEQ ID NO: 3626187 - RNA, 21 nt, Human
accucaguucccuuggccuca

SEQ ID NO: 3626188 - RNA, 22 nt, Human
accucaguucccuuggccucag

SEQ ID NO: 3626189 - RNA, 23 nt, Human
accucaguucccuuggccucaga

SEQ ID NO: 3626190 - RNA, 18 nt, Human
accucaguuuuaucauuu

SEQ ID NO: 3626191 - RNA, 15 nt, Human
accucaucaggauga

SEQ ID NO: 3626192 - RNA, 18 nt, Human
accucaucaggaugaacc

SEQ ID NO: 3626193 - RNA, 20 nt, Human
accucaucaggaugaaccca

SEQ ID NO: 3626194 - RNA, 15 nt, Human
accucaucuucuuca

SEQ ID NO: 3626195 - RNA, 20 nt, Human
accucauguuuaugaaaaua

SEQ ID NO: 3626196 - RNA, 21 nt, Human
accuccaaagcuucccacggc

SEQ ID NO: 3626197 - RNA, 14 nt, Human
accuccaacccugc

SEQ ID NO: 3626198 - RNA, 15 nt, Human
accuccaacccugcc

SEQ ID NO: 3626199 - RNA, 16 nt, Human
accuccaacccugccg

SEQ ID NO: 3626200 - RNA, 12 nt, Human
accuccacagcu

SEQ ID NO: 3626201 - RNA, 20 nt, Human
accuccacaguucaguggca

SEQ ID NO: 3626202 - RNA, 21 nt, Human
accuccagaaacggccauuca

SEQ ID NO: 3626203 - RNA, 19 nt, Human
accuccagcccgggagccu

SEQ ID NO: 3626204 - RNA, 13 nt, Human
accuccagcuguu

SEQ ID NO: 3626205 - RNA, 16 nt, Human
accuccagcuuuccug

SEQ ID NO: 3626206 - RNA, 18 nt, Human
accuccagcuuuccugua

SEQ ID NO: 3626207 - RNA, 10 nt, Human
accuccaucu

SEQ ID NO: 3626208 - RNA, 19 nt, Human
accuccauuaaagucugaa

SEQ ID NO: 3626209 - RNA, 20 nt, Human
accucccacaaaggagagcu

SEQ ID NO: 3626210 - RNA, 16 nt, Human
accucccacacuccca

SEQ ID NO: 3626211 - RNA, 16 nt, Human
accucccagaggucca

SEQ ID NO: 3626212 - RNA, 12 nt, Human
accucccagccc

SEQ ID NO: 3626213 - RNA, 13 nt, Human
accucccagcccu

SEQ ID NO: 3626214 - RNA, 14 nt, Human
accucccagcccua

SEQ ID NO: 3626215 - RNA, 14 nt, Human
accuccccacgccc

SEQ ID NO: 3626216 - RNA, 23 nt, Human
accuccccagcauuccagccccu

SEQ ID NO: 3626217 - RNA, 13 nt, Human
accuccccagccu

SEQ ID NO: 3626218 - RNA, 15 nt, Human
accuccccagccugc

SEQ ID NO: 3626219 - RNA, 18 nt, Human
accuccccccacugcagg

SEQ ID NO: 3626220 - RNA, 22 nt, Human
accuccccccacugcaggcccc

SEQ ID NO: 3626221 - RNA, 12 nt, Human
accucccccucc

SEQ ID NO: 3626222 - RNA, 15 nt, Human
accucccccuccuuc

SEQ ID NO: 3626223 - RNA, 16 nt, Human
accucccccuccuucc

SEQ ID NO: 3626224 - RNA, 15 nt, Human
accucccccugcccc

SEQ ID NO: 3626225 - RNA, 21 nt, Human
accuccccuauccacccagcc

SEQ ID NO: 3626226 - RNA, 23 nt, Human
accuccccuauccacccagccca

SEQ ID NO: 3626227 - RNA, 22 nt, Human
accuccccuccuugccuccugu

SEQ ID NO: 3626228 - RNA, 15 nt, Human
accuccccugaggcu

SEQ ID NO: 3626229 - RNA, 14 nt, Human
accuccccugccuu

SEQ ID NO: 3626230 - RNA, 16 nt, Human
accuccccugccuugc

SEQ ID NO: 3626231 - RNA, 15 nt, Human
accuccccuugccag

SEQ ID NO: 3626232 - RNA, 14 nt, Human
accuccccuugggc

SEQ ID NO: 3626233 - RNA, 22 nt, Human
accuccccuugggcccacaccu

SEQ ID NO: 3626234 - RNA, 17 nt, Human
accucccucaaccucau

SEQ ID NO: 3626235 - RNA, 19 nt, Human
accucccucaaccucaucc

SEQ ID NO: 3626236 - RNA, 10 nt, Human
accucccucc

SEQ ID NO: 3626237 - RNA, 11 nt, Human
accucccuccc

SEQ ID NO: 3626238 - RNA, 14 nt, Human
accucccucuuguu

SEQ ID NO: 3626239 - RNA, 14 nt, Human
accucccugaacca

SEQ ID NO: 3626240 - RNA, 17 nt, Human
accucccugacccgucu

SEQ ID NO: 3626241 - RNA, 13 nt, Human
accucccugccca

SEQ ID NO: 3626242 - RNA, 19 nt, Human
accuccuaaaaggcccaga

SEQ ID NO: 3626243 - RNA, 21 nt, Human
accuccuaaaaggcccagaga

SEQ ID NO: 3626244 - RNA, 23 nt, Human
accuccuacgucaaacaugaagu

SEQ ID NO: 3626245 - RNA, 14 nt, Human
accuccucagccug

SEQ ID NO: 3626246 - RNA, 23 nt, Human
accuccucagccugaaccccagg

SEQ ID NO: 3626247 - RNA, 16 nt, Human
accuccuccacaccag

SEQ ID NO: 3626248 - RNA, 14 nt, Human
accuccucccacug

SEQ ID NO: 3626249 - RNA, 19 nt, Human
accuccucccacugcccac

SEQ ID NO: 3626250 - RNA, 14 nt, Human
accuccucccuguu

SEQ ID NO: 3626251 - RNA, 22 nt, Human
accuccucggcuggcuguccac

SEQ ID NO: 3626252 - RNA, 12 nt, Human
accuccucucag

SEQ ID NO: 3626253 - RNA, 17 nt, Human
accuccucucaguguuu

SEQ ID NO: 3626254 - RNA, 11 nt, Human
accuccucugu

SEQ ID NO: 3626255 - RNA, 21 nt, Human
accuccugacacccuucuccc

SEQ ID NO: 3626256 - RNA, 16 nt, Human
accuccugcaauaaaa

SEQ ID NO: 3626257 - RNA, 14 nt, Human
accuccugcccagg

SEQ ID NO: 3626258 - RNA, 18 nt, Human
accuccugcccaggagag

SEQ ID NO: 3626259 - RNA, 11 nt, Human
accuccugccu

SEQ ID NO: 3626260 - RNA, 16 nt, Human
accuccugcugggcag

SEQ ID NO: 3626261 - RNA, 16 nt, Human
accuccugucucuggc

SEQ ID NO: 3626262 - RNA, 17 nt, Human
accuccugucucuggcc

SEQ ID NO: 3626263 - RNA, 20 nt, Human
accuccuguggaacccagca

SEQ ID NO: 3626264 - RNA, 16 nt, Human
accuccuucccucucu

SEQ ID NO: 3626265 - RNA, 22 nt, Human
accuccuucccucucuggagaa

SEQ ID NO: 3626266 - RNA, 21 nt, Human
accuccuuguaacaucaggga

SEQ ID NO: 3626267 - RNA, 18 nt, Human
accuccuugucacuuuau

SEQ ID NO: 3626268 - RNA, 18 nt, Human
accuccuuuacccucauc

SEQ ID NO: 3626269 - RNA, 19 nt, Human
accuccuuuacccucaucu

SEQ ID NO: 3626270 - RNA, 22 nt, Human
accuccuuucaagguaacugua

SEQ ID NO: 3626271 - RNA, 17 nt, Human
accuccuuucucuucuc

SEQ ID NO: 3626272 - RNA, 11 nt, Human
accucgagcca

SEQ ID NO: 3626273 - RNA, 14 nt, Human
accucgcccucucc

SEQ ID NO: 3626274 - RNA, 14 nt, Human
accucgcugagggc

SEQ ID NO: 3626275 - RNA, 14 nt, Human
accucggcuccugg

SEQ ID NO: 3626276 - RNA, 15 nt, Human
accucggcuccugga

SEQ ID NO: 3626277 - RNA, 15 nt, Human
accucgggccugcug

SEQ ID NO: 3626278 - RNA, 18 nt, Human
accucggucacuccaacu

SEQ ID NO: 3626279 - RNA, 14 nt, Human
accucgugcuuuaa

SEQ ID NO: 3626280 - RNA, 17 nt, Human
accucgugcuuuaagug

SEQ ID NO: 3626281 - RNA, 15 nt, Human
accucuaacagcacc

SEQ ID NO: 3626282 - RNA, 12 nt, Human
accucuaauagu

SEQ ID NO: 3626283 - RNA, 17 nt, Human
accucuaauaguauaaa

SEQ ID NO: 3626284 - RNA, 19 nt, Human
accucuaauaguauaaacc

SEQ ID NO: 3626285 - RNA, 23 nt, Human
accucuacuaaaaagaaggaaaa

SEQ ID NO: 3626286 - RNA, 14 nt, Human
accucuacuuucca

SEQ ID NO: 3626287 - RNA, 15 nt, Human
accucuagcccugcc

SEQ ID NO: 3626288 - RNA, 21 nt, Human
accucucaauauucaauaaag

SEQ ID NO: 3626289 - RNA, 16 nt, Human
accucucacuccccau

SEQ ID NO: 3626290 - RNA, 11 nt, Human
accucuccaag

SEQ ID NO: 3626291 - RNA, 20 nt, Human
accucuccaagggcuucugc

SEQ ID NO: 3626292 - RNA, 16 nt, Human
accucuccagccucag

SEQ ID NO: 3626293 - RNA, 23 nt, Human
accucuccaucuucagcuucuuc

SEQ ID NO: 3626294 - RNA, 17 nt, Human
accucuccccuggaacu

SEQ ID NO: 3626295 - RNA, 14 nt, Human
accucucccugacc

SEQ ID NO: 3626296 - RNA, 14 nt, Human
accucuccucaugu

SEQ ID NO: 3626297 - RNA, 12 nt, Human
accucucugucc

SEQ ID NO: 3626298 - RNA, 19 nt, Human
accucucugucccuugcug

SEQ ID NO: 3626299 - RNA, 23 nt, Human
accucucuuauagaauauuuauu

SEQ ID NO: 3626300 - RNA, 14 nt, Human
accucucuuuuuca

SEQ ID NO: 3626301 - RNA, 15 nt, Human
accuuuguauucucu

SEQ ID NO: 3626302 - RNA, 11 nt, Human
accuuugucac

SEQ ID NO: 3626303 - RNA, 15 nt, Human
accuuuguccccacc

SEQ ID NO: 3626304 - RNA, 18 nt, Human
accuuuguccccaccgca

SEQ ID NO: 3626305 - RNA, 16 nt, Human
accuuuguuuuuuguu

SEQ ID NO: 3626306 - RNA, 13 nt, Human
accuuuuaaagug

SEQ ID NO: 3626307 - RNA, 14 nt, Human
accuuuuaaagugu

SEQ ID NO: 3626308 - RNA, 19 nt, Human
accuuuuaaauccuguuga

SEQ ID NO: 3626309 - RNA, 21 nt, Human
accuuuuaaauccuguugaaa

SEQ ID NO: 3626310 - RNA, 23 nt, Human
accuuuuaaauccuguugaaaag

SEQ ID NO: 3626311 - RNA, 20 nt, Human
accuuuuaacaccugaugug

SEQ ID NO: 3626312 - RNA, 20 nt, Human
accuuuuaccagcuuuuaac

SEQ ID NO: 3626313 - RNA, 21 nt, Human
accuuuuacugguugcaugga

SEQ ID NO: 3626314 - RNA, 24 nt, Human
accuuuuacugguugcauggaaau

SEQ ID NO: 3626315 - RNA, 20 nt, Human
accuuuuauugacacagaaa

SEQ ID NO: 3626316 - RNA, 22 nt, Human
accuuuucaggaaaauaacuua

SEQ ID NO: 3626317 - RNA, 15 nt, Human
accuuuucagggcug

SEQ ID NO: 3626318 - RNA, 21 nt, Human
accuuuugaggagccccagcu

SEQ ID NO: 3626319 - RNA, 17 nt, Human
accuuuugagugccuua

SEQ ID NO: 3626320 - RNA, 21 nt, Human
accuuuugcaccugcucucuu

SEQ ID NO: 3626321 - RNA, 22 nt, Human
accuuuugggaauguuuuaaau

SEQ ID NO: 3626322 - RNA, 14 nt, Human
accuuuuuccuucc

SEQ ID NO: 3626323 - RNA, 13 nt, Human
accuuuuuuauac

SEQ ID NO: 3626324 - RNA, 18 nt, Human
accuuuuuuauacauaaa

SEQ ID NO: 3626325 - RNA, 24 nt, Human
accuuuuuuuaucguuuuuguauu

SEQ ID NO: 3626326 - RNA, 18 nt, Human
accuuuuuuuuuuuucca

SEQ ID NO: 3626327 - RNA, 12 nt, Human
acgaaagagaga

SEQ ID NO: 3626328 - RNA, 17 nt, Human
acgaaauaauuguuguu

SEQ ID NO: 3626329 - RNA, 13 nt, Human
acgaaauguuauu

SEQ ID NO: 3626330 - RNA, 13 nt, Human
acgaacaaaacac

SEQ ID NO: 3626331 - RNA, 19 nt, Human
acgaaccuacaguuuuaac

SEQ ID NO: 3626332 - RNA, 12 nt, Human
acgaagaaaaaa

SEQ ID NO: 3626333 - RNA, 15 nt, Human
acgaagaagagccac

SEQ ID NO: 3626334 - RNA, 18 nt, Human
acgaagaagagccacagu

SEQ ID NO: 3626335 - RNA, 22 nt, Human
acgaagaguauuuuugacagaa

SEQ ID NO: 3626336 - RNA, 16 nt, Human
acgaagggggcaucug

SEQ ID NO: 3626337 - RNA, 21 nt, Human
acgaagguaaaaaguauuuuu

SEQ ID NO: 3626338 - RNA, 14 nt, Human
acgaauacuuuugc

SEQ ID NO: 3626339 - RNA, 22 nt, Human
acgaauacuuuugcccuuugau

SEQ ID NO: 3626340 - RNA, 16 nt, Human
acgaauagacaucaaa

SEQ ID NO: 3626341 - RNA, 21 nt, Human
acgacaaagcugcuaaaucuc

SEQ ID NO: 3626342 - RNA, 20 nt, Human
acgacaacgaugaugcuugu

SEQ ID NO: 3626343 - RNA, 15 nt, Human
accucuuagcugagu

SEQ ID NO: 3626344 - RNA, 13 nt, Human
accucuuccccag

SEQ ID NO: 3626345 - RNA, 14 nt, Human
accucuuccccaga

SEQ ID NO: 3626346 - RNA, 22 nt, Human
accucuuccccagaaaggagac

SEQ ID NO: 3626347 - RNA, 23 nt, Human
accucuuccccagaaaggagacu

SEQ ID NO: 3626348 - RNA, 19 nt, Human
accucuuccggagauguag

SEQ ID NO: 3626349 - RNA, 21 nt, Human
accucuucucuuccuguaaca

SEQ ID NO: 3626350 - RNA, 17 nt, Human
accucuugagccuugaa

SEQ ID NO: 3626351 - RNA, 20 nt, Human
accucuugagccuugaacuu

SEQ ID NO: 3626352 - RNA, 14 nt, Human
accucuugcugucu

SEQ ID NO: 3626353 - RNA, 24 nt, Human
accucuugcugucucugcucgccc

SEQ ID NO: 3626354 - RNA, 14 nt, Human
accucuuggggagu

SEQ ID NO: 3626355 - RNA, 22 nt, Human
accucuuugaaagaaggaagac

SEQ ID NO: 3626356 - RNA, 17 nt, Human
accucuuuuagucauuu

SEQ ID NO: 3626357 - RNA, 15 nt, Human
accugaaaaaaaguu

SEQ ID NO: 3626358 - RNA, 19 nt, Human
accugaaaaaaaguuuaca

SEQ ID NO: 3626359 - RNA, 15 nt, Human
accugaaaauguuag

SEQ ID NO: 3626360 - RNA, 16 nt, Human
accugaaauuccaaag

SEQ ID NO: 3626361 - RNA, 16 nt, Human
accugaacugaacacc

SEQ ID NO: 3626362 - RNA, 11 nt, Human
accugaagaau

SEQ ID NO: 3626363 - RNA, 16 nt, Human
accugaagaaucacaa

SEQ ID NO: 3626364 - RNA, 18 nt, Human
accugaagacucauucuu

SEQ ID NO: 3626365 - RNA, 13 nt, Human
accugaagacuga

SEQ ID NO: 3626366 - RNA, 19 nt, Human
accugaagacugaggacaa

SEQ ID NO: 3626367 - RNA, 23 nt, Human
accugaagaguggucagaacaga

SEQ ID NO: 3626368 - RNA, 15 nt, Human
accugaagcuagacg

SEQ ID NO: 3626369 - RNA, 21 nt, Human
accugaagggguuuucuugau

SEQ ID NO: 3626370 - RNA, 23 nt, Human
accugaauagcucccagauuuca

SEQ ID NO: 3626371 - RNA, 19 nt, Human
accugaccaacauggagaa

SEQ ID NO: 3626372 - RNA, 18 nt, Human
accugaccgugggcgggg

SEQ ID NO: 3626373 - RNA, 20 nt, Human
accugaccgugggcggggcc

SEQ ID NO: 3626374 - RNA, 14 nt, Human
accugaccucuugc

SEQ ID NO: 3626375 - RNA, 15 nt, Human
accugaccucuugcu

SEQ ID NO: 3626376 - RNA, 17 nt, Human
accugaccucuugcugu

SEQ ID NO: 3626377 - RNA, 19 nt, Human
accugaccucuugcugucu

SEQ ID NO: 3626378 - RNA, 20 nt, Human
accugaccucuugcugucuc

SEQ ID NO: 3626379 - RNA, 22 nt, Human
accugacucgucugacugugug

SEQ ID NO: 3626380 - RNA, 18 nt, Human
accugacucugaaaucug

SEQ ID NO: 3626381 - RNA, 19 nt, Human
accugacucugaaaucuga

SEQ ID NO: 3626382 - RNA, 23 nt, Human
accugacucugaaaucugaagac

SEQ ID NO: 3626383 - RNA, 15 nt, Human
accugagauuuauua

SEQ ID NO: 3626384 - RNA, 18 nt, Human
accugagcaggaccucug

SEQ ID NO: 3626385 - RNA, 16 nt, Human
accugagccagccugc

SEQ ID NO: 3626386 - RNA, 17 nt, Human
accugagccccaaaagg

SEQ ID NO: 3626387 - RNA, 21 nt, Human
accugagccugccgagcaacc

SEQ ID NO: 3626388 - RNA, 14 nt, Human
accugagcucccca

SEQ ID NO: 3626389 - RNA, 13 nt, Human
accugaggaagcg

SEQ ID NO: 3626390 - RNA, 20 nt, Human
accugaggcccuucucucca

SEQ ID NO: 3626391 - RNA, 19 nt, Human
accugaggcuccugugcua

SEQ ID NO: 3626392 - RNA, 16 nt, Human
accugaggggccucuu

SEQ ID NO: 3626393 - RNA, 14 nt, Human
accugaggugggcc

SEQ ID NO: 3626394 - RNA, 21 nt, Human
accugaggugggcccaggacc

SEQ ID NO: 3626395 - RNA, 14 nt, Human
accugaguuccuga

SEQ ID NO: 3626396 - RNA, 17 nt, Human
accugaguugaagaggg

SEQ ID NO: 3626397 - RNA, 16 nt, Human
accugaucaaugacag

SEQ ID NO: 3626398 - RNA, 20 nt, Human
accugaucaaugacagagcc

SEQ ID NO: 3626399 - RNA, 22 nt, Human
accugaucacuagccugucauc

SEQ ID NO: 3626400 - RNA, 15 nt, Human
accugauuuacaguu

SEQ ID NO: 3626401 - RNA, 21 nt, Human
accugauuuacaguuucaaaa

SEQ ID NO: 3626402 - RNA, 15 nt, Human
accugauuucuccug

SEQ ID NO: 3626403 - RNA, 20 nt, Human
accugauuuuuuuuccuuuu

SEQ ID NO: 3626404 - RNA, 18 nt, Human
accugcaagggcucccca

SEQ ID NO: 3626405 - RNA, 18 nt, Human
accugcaaucccagcuac

SEQ ID NO: 3626406 - RNA, 14 nt, Human
accugcaccucccc

SEQ ID NO: 3626407 - RNA, 20 nt, Human
accugcaccuccccccacug

SEQ ID NO: 3626408 - RNA, 22 nt, Human
accugcaccuccccccacugca

SEQ ID NO: 3626409 - RNA, 15 nt, Human
accugcaggccaaga

SEQ ID NO: 3626410 - RNA, 22 nt, Human
accugcauccguaguucccuga

SEQ ID NO: 3626411 - RNA, 17 nt, Human
accugcaucuggggccc

SEQ ID NO: 3626412 - RNA, 15 nt, Human
accugcauuguaaau

SEQ ID NO: 3626413 - RNA, 19 nt, Human
accugccacuaggcugggu

SEQ ID NO: 3626414 - RNA, 13 nt, Human
accugccacucac

SEQ ID NO: 3626415 - RNA, 15 nt, Human
accugccagccuggc

SEQ ID NO: 3626416 - RNA, 18 nt, Human
accugccagccuggcuuc

SEQ ID NO: 3626417 - RNA, 15 nt, Human
accugccaggaagcc

SEQ ID NO: 3626418 - RNA, 16 nt, Human
accugccaggaagcca

SEQ ID NO: 3626419 - RNA, 18 nt, Human
accugccaggaagccagc

SEQ ID NO: 3626420 - RNA, 23 nt, Human
accugccaggaagccagcaggcu

SEQ ID NO: 3626421 - RNA, 20 nt, Human
accugccaggcagggguggg

SEQ ID NO: 3626422 - RNA, 18 nt, Human
accugccagggacagagg

SEQ ID NO: 3626423 - RNA, 19 nt, Human
accugcccaaccugcucuc

SEQ ID NO: 3626424 - RNA, 21 nt, Human
accugcccaaccugcucuccu

SEQ ID NO: 3626425 - RNA, 20 nt, Human
accugcccagaucccagaag

SEQ ID NO: 3626426 - RNA, 17 nt, Human
accugccccacuugucc

SEQ ID NO: 3626427 - RNA, 16 nt, Human
accugcccccaaucca

SEQ ID NO: 3626428 - RNA, 18 nt, Human
accugcccccgcaucccc

SEQ ID NO: 3626429 - RNA, 20 nt, Human
accugcccccgcauccccug

SEQ ID NO: 3626430 - RNA, 23 nt, Human
accugcccccgcauccccugccu

SEQ ID NO: 3626431 - RNA, 13 nt, Human
accugcccccugg

SEQ ID NO: 3626432 - RNA, 15 nt, Human
accugcccccuggug

SEQ ID NO: 3626433 - RNA, 12 nt, Human
accugcccccuu

SEQ ID NO: 3626434 - RNA, 15 nt, Human
accugcccccuucuc

SEQ ID NO: 3626435 - RNA, 19 nt, Human
accugcccccuucucccac

SEQ ID NO: 3626436 - RNA, 20 nt, Human
accugcccccuucucccaca

SEQ ID NO: 3626437 - RNA, 17 nt, Human
accugccccgcccagcu

SEQ ID NO: 3626438 - RNA, 14 nt, Human
accugccccuccuc

SEQ ID NO: 3626439 - RNA, 13 nt, Human
accugcccugccc

SEQ ID NO: 3626440 - RNA, 15 nt, Human
accugcccugccuga

SEQ ID NO: 3626441 - RNA, 17 nt, Human
accugcccugccugagg

SEQ ID NO: 3626442 - RNA, 18 nt, Human
accugcccugccugaggg

SEQ ID NO: 3626443 - RNA, 20 nt, Human
accugcccugccugagggcc

SEQ ID NO: 3626444 - RNA, 13 nt, Human
accugcccuggaa

SEQ ID NO: 3626445 - RNA, 14 nt, Human
acaggcgagagagg

SEQ ID NO: 3626446 - RNA, 19 nt, Human
acaggcgagagaggagcca

SEQ ID NO: 3626447 - RNA, 22 nt, Human
acaggcgugagccaccgugccu

SEQ ID NO: 3626448 - RNA, 20 nt, Human
acaggcgugagccaccucgc

SEQ ID NO: 3626449 - RNA, 20 nt, Human
acaggcucaaacaaugacaa

SEQ ID NO: 3626450 - RNA, 15 nt, Human
acaggcucaggcagg

SEQ ID NO: 3626451 - RNA, 12 nt, Human
acaggcuccugc

SEQ ID NO: 3626452 - RNA, 21 nt, Human
acaggcuccugccaccacgcc

SEQ ID NO: 3626453 - RNA, 22 nt, Human
acaggcuccugccaccacgccc

SEQ ID NO: 3626454 - RNA, 19 nt, Human
acaggcucuuagcagcuuc

SEQ ID NO: 3626455 - RNA, 20 nt, Human
acaggcucuuagcagcuucc

SEQ ID NO: 3626456 - RNA, 16 nt, Human
acaggcugagugcagg

SEQ ID NO: 3626457 - RNA, 21 nt, Human
acaggcugagugcaggcccac

SEQ ID NO: 3626458 - RNA, 14 nt, Human
acaggcugggcuuc

SEQ ID NO: 3626459 - RNA, 21 nt, Human
acaggcugggcuucaguggca

SEQ ID NO: 3626460 - RNA, 22 nt, Human
acaggcugggcuucaguggcag

SEQ ID NO: 3626461 - RNA, 20 nt, Human
acaggcuguucugcacugaa

SEQ ID NO: 3626462 - RNA, 16 nt, Human
acaggcuuagggacag

SEQ ID NO: 3626463 - RNA, 20 nt, Human
acaggcuuagugauguaauu

SEQ ID NO: 3626464 - RNA, 16 nt, Human
acaggcuucugagcag

SEQ ID NO: 3626465 - RNA, 15 nt, Human
acagggaaggcaggc

SEQ ID NO: 3626466 - RNA, 21 nt, Human
acagggaaggcaggcagggcu

SEQ ID NO: 3626467 - RNA, 22 nt, Human
acagggacugaaaaccucuccu

SEQ ID NO: 3626468 - RNA, 13 nt, Human
acagggagccucc

SEQ ID NO: 3626469 - RNA, 16 nt, Human
acagggagcugggaca

SEQ ID NO: 3626470 - RNA, 22 nt, Human
acagggauaaggccuguggggg

SEQ ID NO: 3626471 - RNA, 13 nt, Human
acagggaugagca

SEQ ID NO: 3626472 - RNA, 22 nt, Human
acagggauugauuuuaaaaugu

SEQ ID NO: 3626473 - RNA, 12 nt, Human
acagggcacacc

SEQ ID NO: 3626474 - RNA, 16 nt, Human
acagggcacaggccau

SEQ ID NO: 3626475 - RNA, 16 nt, Human
acagggcagagccggg

SEQ ID NO: 3626476 - RNA, 16 nt, Human
acagggcagcugggcc

SEQ ID NO: 3626477 - RNA, 21 nt, Human
acagggcagcugggcccaacc

SEQ ID NO: 3626478 - RNA, 20 nt, Human
acagggcaguaccugagggu

SEQ ID NO: 3626479 - RNA, 18 nt, Human
acagggccaguggggccu

SEQ ID NO: 3626480 - RNA, 19 nt, Human
acagggccaguggggccug

SEQ ID NO: 3626481 - RNA, 21 nt, Human
acagggccaguggggccugug

SEQ ID NO: 3626482 - RNA, 22 nt, Human
acagggcuaagagcuagcgcug

SEQ ID NO: 3626483 - RNA, 16 nt, Human
acagggcugccuucug

SEQ ID NO: 3626484 - RNA, 13 nt, Human
acagggcuggccc

SEQ ID NO: 3626485 - RNA, 14 nt, Human
acagggcuggccca

SEQ ID NO: 3626486 - RNA, 22 nt, Human
acagggcuggcccagcccugcu

SEQ ID NO: 3626487 - RNA, 23 nt, Human
acagggcuggcccagcccugcug

SEQ ID NO: 3626488 - RNA, 23 nt, Human
acaggggaggugauagcauugcu

SEQ ID NO: 3626489 - RNA, 14 nt, Human
acaggggccagaag

SEQ ID NO: 3626490 - RNA, 23 nt, Human
acaggggccagaagaugaacaga

SEQ ID NO: 3626491 - RNA, 19 nt, Human
acaggggcuggugggcacc

SEQ ID NO: 3626492 - RNA, 15 nt, Human
acagggggucuggcu

SEQ ID NO: 3626493 - RNA, 17 nt, Human
acagggggucuggcugg

SEQ ID NO: 3626494 - RNA, 21 nt, Human
acagggggucuggcugguguu

SEQ ID NO: 3626495 - RNA, 16 nt, Human
acagggguuccuucug

SEQ ID NO: 3626496 - RNA, 21 nt, Human
acagggguuccuucugggcau

SEQ ID NO: 3626497 - RNA, 22 nt, Human
acaggguaacuaacuaaaacaa

SEQ ID NO: 3626498 - RNA, 23 nt, Human
acaggguaacugugcugaaugcu

SEQ ID NO: 3626499 - RNA, 17 nt, Human
acaggguagcagguacc

SEQ ID NO: 3626500 - RNA, 18 nt, Human
acagggucccacagccac

SEQ ID NO: 3626501 - RNA, 22 nt, Human
acagggucugcucuuucucugc

SEQ ID NO: 3626502 - RNA, 15 nt, Human
acagggugggccucg

SEQ ID NO: 3626503 - RNA, 16 nt, Human
acaggguguugucagc

SEQ ID NO: 3626504 - RNA, 16 nt, Human
acaggguucaaaaugu

SEQ ID NO: 3626505 - RNA, 15 nt, Human
acaggguuucaccau

SEQ ID NO: 3626506 - RNA, 23 nt, Human
acaggguuuuuaccugucacauu

SEQ ID NO: 3626507 - RNA, 22 nt, Human
acagguaaaacagggccacaua

SEQ ID NO: 3626508 - RNA, 18 nt, Human
acagguaaacuaucuugg

SEQ ID NO: 3626509 - RNA, 19 nt, Human
acagguaacgucuguaagc

SEQ ID NO: 3626510 - RNA, 15 nt, Human
acagguaauauaaaa

SEQ ID NO: 3626511 - RNA, 19 nt, Human
acagguauauacuuugaaa

SEQ ID NO: 3626512 - RNA, 21 nt, Human
acagguauuuuguuucuuuua

SEQ ID NO: 3626513 - RNA, 22 nt, Human
acaggucaauacaguacaggca

SEQ ID NO: 3626514 - RNA, 18 nt, Human
acaggucccaccuccagc

SEQ ID NO: 3626515 - RNA, 13 nt, Human
acaggucccuccc

SEQ ID NO: 3626516 - RNA, 14 nt, Human
acaggucuccucuu

SEQ ID NO: 3626517 - RNA, 18 nt, Human
acaggucuccucuuaaaa

SEQ ID NO: 3626518 - RNA, 21 nt, Human
acaggucuuuccuaaggcugc

SEQ ID NO: 3626519 - RNA, 19 nt, Human
acagguggcaggaccagga

SEQ ID NO: 3626520 - RNA, 21 nt, Human
acagguggcaggaccaggacu

SEQ ID NO: 3626521 - RNA, 20 nt, Human
acaggugggcuucccagugg

SEQ ID NO: 3626522 - RNA, 17 nt, Human
acagguggugucacugu

SEQ ID NO: 3626523 - RNA, 19 nt, Human
acagguggugucacugucc

SEQ ID NO: 3626524 - RNA, 22 nt, Human
acagguggugucacugucccuc

SEQ ID NO: 3626525 - RNA, 19 nt, Human
acaggugugaaccaccaca

SEQ ID NO: 3626526 - RNA, 20 nt, Human
acaggugugaaccaccacac

SEQ ID NO: 3626527 - RNA, 23 nt, Human
acaggugugaaccaccacaccca

SEQ ID NO: 3626528 - RNA, 22 nt, Human
acaggugugagccaccacgccc

SEQ ID NO: 3626529 - RNA, 22 nt, Human
acaggugugagucaccaagccc

SEQ ID NO: 3626530 - RNA, 13 nt, Human
acagguuacaaca

SEQ ID NO: 3626531 - RNA, 16 nt, Human
acagguuacaacagau

SEQ ID NO: 3626532 - RNA, 23 nt, Human
acagguuacaacagauuugugaa

SEQ ID NO: 3626533 - RNA, 18 nt, Human
acagguuuuaaaagccuu

SEQ ID NO: 3626534 - RNA, 22 nt, Human
acagguuuuccugaagaauuga

SEQ ID NO: 3626535 - RNA, 20 nt, Human
acaguaaaccacugaaaaaa

SEQ ID NO: 3626536 - RNA, 12 nt, Human
acaguaaauaaa

SEQ ID NO: 3626537 - RNA, 18 nt, Human
acaguaaauaaauuguuu

SEQ ID NO: 3626538 - RNA, 21 nt, Human
acaguaacauagcugugauuu

SEQ ID NO: 3626539 - RNA, 19 nt, Human
acaguaacccaaaccucaa

SEQ ID NO: 3626540 - RNA, 10 nt, Human
acaguaacuu

SEQ ID NO: 3626541 - RNA, 14 nt, Human
acaguaacuugguu

SEQ ID NO: 3626542 - RNA, 17 nt, Human
acaguaacuugguuaua

SEQ ID NO: 3626543 - RNA, 16 nt, Human
acaguaacuuuaugug

SEQ ID NO: 3626544 - RNA, 19 nt, Human
acaguaacuuuauguguaa

SEQ ID NO: 3626545 - RNA, 16 nt, Human
aggaaaauaguaaugu

SEQ ID NO: 3626546 - RNA, 13 nt, Human
aggaaaauauuuu

SEQ ID NO: 3626547 - RNA, 14 nt, Human
aggaaaauccucug

SEQ ID NO: 3626548 - RNA, 23 nt, Human
aggaaaaugucuguaauaauaga

SEQ ID NO: 3626549 - RNA, 13 nt, Human
aggaaaauuucac

SEQ ID NO: 3626550 - RNA, 21 nt, Human
aggaaacaaagcuuagcagga

SEQ ID NO: 3626551 - RNA, 15 nt, Human
aggaaacaacagcuu

SEQ ID NO: 3626552 - RNA, 19 nt, Human
aggaaacaguugcauguag

SEQ ID NO: 3626553 - RNA, 20 nt, Human
aggaaacaguugcauguagu

SEQ ID NO: 3626554 - RNA, 21 nt, Human
aggaaacaguugcauguagua

SEQ ID NO: 3626555 - RNA, 21 nt, Human
aggaaacccagcucuggucca

SEQ ID NO: 3626556 - RNA, 16 nt, Human
aggaaaccgccuaguu

SEQ ID NO: 3626557 - RNA, 21 nt, Human
aggaaacuacugccuuuagaa

SEQ ID NO: 3626558 - RNA, 17 nt, Human
aggaaacucaccugcug

SEQ ID NO: 3626559 - RNA, 16 nt, Human
aggaaacuccacaucu

SEQ ID NO: 3626560 - RNA, 21 nt, Human
aggaaacuccacaucugccuu

SEQ ID NO: 3626561 - RNA, 21 nt, Human
aggaaacucugcauucuagua

SEQ ID NO: 3626562 - RNA, 17 nt, Human
aggaaacucuuaucuca

SEQ ID NO: 3626563 - RNA, 22 nt, Human
aggaaacucuuaucucagucau

SEQ ID NO: 3626564 - RNA, 13 nt, Human
aggaaagaaaaca

SEQ ID NO: 3626565 - RNA, 16 nt, Human
aggaaagaagcauuuc

SEQ ID NO: 3626566 - RNA, 13 nt, Human
aggaaagagaacu

SEQ ID NO: 3626567 - RNA, 15 nt, Human
aggaaagauuuguac

SEQ ID NO: 3626568 - RNA, 22 nt, Human
aggaaagauuuuuguuguuauu

SEQ ID NO: 3626569 - RNA, 16 nt, Human
aggaaagcaauaaaug

SEQ ID NO: 3626570 - RNA, 13 nt, Human
aggaaagcacaga

SEQ ID NO: 3626571 - RNA, 20 nt, Human
aggaaagccccagcacuaac

SEQ ID NO: 3626572 - RNA, 22 nt, Human
aggaaagcuuuggcaguguuuu

SEQ ID NO: 3626573 - RNA, 15 nt, Human
aggaaaggccagcug

SEQ ID NO: 3626574 - RNA, 16 nt, Human
aggaaaggccagcugg

SEQ ID NO: 3626575 - RNA, 13 nt, Human
aggaaaggcucca

SEQ ID NO: 3626576 - RNA, 14 nt, Human
aggaaaggcuccag

SEQ ID NO: 3626577 - RNA, 18 nt, Human
aggaaaggcuccaggagc

SEQ ID NO: 3626578 - RNA, 14 nt, Human
aggaaagggaggag

SEQ ID NO: 3626579 - RNA, 21 nt, Human
aggaaagggggucccaguggg

SEQ ID NO: 3626580 - RNA, 17 nt, Human
aggaaaguacauuuuuu

SEQ ID NO: 3626581 - RNA, 23 nt, Human
aggaaagucauuggcuuuauccu

SEQ ID NO: 3626582 - RNA, 17 nt, Human
aggaaaguguuauuuuu

SEQ ID NO: 3626583 - RNA, 17 nt, Human
aggaaaguucagaguuu

SEQ ID NO: 3626584 - RNA, 21 nt, Human
aggaaaguuuacccaugaaga

SEQ ID NO: 3626585 - RNA, 17 nt, Human
aggaaauaaaaaagucu

SEQ ID NO: 3626586 - RNA, 21 nt, Human
aggaaauaaaaaagucucuau

SEQ ID NO: 3626587 - RNA, 14 nt, Human
aggaaauaaaaccu

SEQ ID NO: 3626588 - RNA, 18 nt, Human
aggaaauaagaaaaauca

SEQ ID NO: 3626589 - RNA, 15 nt, Human
aggaaauagaauuga

SEQ ID NO: 3626590 - RNA, 12 nt, Human
aggaaauauuua

SEQ ID NO: 3626591 - RNA, 13 nt, Human
aggaaauauuuau

SEQ ID NO: 3626592 - RNA, 14 nt, Human
aggaaauauuuauu

SEQ ID NO: 3626593 - RNA, 23 nt, Human
aggaaaucaaauaugcaaagcac

SEQ ID NO: 3626594 - RNA, 15 nt, Human
aggaaauccagggug

SEQ ID NO: 3626595 - RNA, 17 nt, Human
aggaaauccaggguggu

SEQ ID NO: 3626596 - RNA, 13 nt, Human
aggaaaucccuuc

SEQ ID NO: 3626597 - RNA, 16 nt, Human
aggaaaucccuucaua

SEQ ID NO: 3626598 - RNA, 22 nt, Human
aggaaaucuuguccagagacaa

SEQ ID NO: 3626599 - RNA, 19 nt, Human
aggaaaugaaaaugucuug

SEQ ID NO: 3626600 - RNA, 16 nt, Human
aggaaaugaauuucuc

SEQ ID NO: 3626601 - RNA, 20 nt, Human
aggaaauggcuguggagugu

SEQ ID NO: 3626602 - RNA, 23 nt, Human
aggaaaugucacagaagcagcua

SEQ ID NO: 3626603 - RNA, 13 nt, Human
aggaacaaggcaa

SEQ ID NO: 3626604 - RNA, 16 nt, Human
aggaacaaggcaaggc

SEQ ID NO: 3626605 - RNA, 23 nt, Human
aggaacaaggcaaggcugucaau

SEQ ID NO: 3626606 - RNA, 21 nt, Human
aggaacagaaggaugaaugag

SEQ ID NO: 3626607 - RNA, 21 nt, Human
aggaacagcuaugggagcccc

SEQ ID NO: 3626608 - RNA, 19 nt, Human
aggaacauaugaaaauaca

SEQ ID NO: 3626609 - RNA, 16 nt, Human
aggaacauugugucua

SEQ ID NO: 3626610 - RNA, 23 nt, Human
aggaaccauaguugacaguucca

SEQ ID NO: 3626611 - RNA, 22 nt, Human
aggaaccgugguaugucugcca

SEQ ID NO: 3626612 - RNA, 17 nt, Human
aggaaccucgaguacug

SEQ ID NO: 3626613 - RNA, 18 nt, Human
aggaaccucgaguacugu

SEQ ID NO: 3626614 - RNA, 20 nt, Human
aggaaccucgaguacugugg

SEQ ID NO: 3626615 - RNA, 14 nt, Human
aggaaccucugauu

SEQ ID NO: 3626616 - RNA, 17 nt, Human
aggaaccucugauuuau

SEQ ID NO: 3626617 - RNA, 14 nt, Human
aggaaccuuccuuc

SEQ ID NO: 3626618 - RNA, 22 nt, Human
aggaaccuuccuuccugcuuga

SEQ ID NO: 3626619 - RNA, 16 nt, Human
aggaacgguaaauuuc

SEQ ID NO: 3626620 - RNA, 22 nt, Human
aggaacguuuagcugacaaaau

SEQ ID NO: 3626621 - RNA, 23 nt, Human
aggaacucccagcaacacaagcu

SEQ ID NO: 3626622 - RNA, 13 nt, Human
aggaacucuggcu

SEQ ID NO: 3626623 - RNA, 16 nt, Human
aggaacucuggcuucc

SEQ ID NO: 3626624 - RNA, 21 nt, Human
aggaacucuggcuuccaggua

SEQ ID NO: 3626625 - RNA, 21 nt, Human
aggaacugcagcaaucuuuga

SEQ ID NO: 3626626 - RNA, 15 nt, Human
aggaacuguccagag

SEQ ID NO: 3626627 - RNA, 16 nt, Human
aggaacuguccagaga

SEQ ID NO: 3626628 - RNA, 21 nt, Human
aggaacuuaaauaaugugaaa

SEQ ID NO: 3626629 - RNA, 13 nt, Human
aggaacuucagag

SEQ ID NO: 3626630 - RNA, 15 nt, Human
aggaagaaagaaugu

SEQ ID NO: 3626631 - RNA, 13 nt, Human
aggaagaaaucac

SEQ ID NO: 3626632 - RNA, 15 nt, Human
aggaagaaaucacag

SEQ ID NO: 3626633 - RNA, 16 nt, Human
aggaagaaauuaacuu

SEQ ID NO: 3626634 - RNA, 19 nt, Human
aggaagaacugaaaggcuu

SEQ ID NO: 3626635 - RNA, 16 nt, Human
aggaagaagcuuaggc

SEQ ID NO: 3626636 - RNA, 13 nt, Human
aggaagacuucau

SEQ ID NO: 3626637 - RNA, 12 nt, Human
aggaagagaagg

SEQ ID NO: 3626638 - RNA, 14 nt, Human
aggaagagaaggag

SEQ ID NO: 3626639 - RNA, 12 nt, Human
aggaagagcagg

SEQ ID NO: 3626640 - RNA, 20 nt, Human
aggaagagcaggcacaugga

SEQ ID NO: 3626641 - RNA, 15 nt, Human
aggaagagccuucca

SEQ ID NO: 3626642 - RNA, 21 nt, Human
aggaagaucucugcagggccg

SEQ ID NO: 3626643 - RNA, 18 nt, Human
aggaagaucuuaaauuuu

SEQ ID NO: 3626644 - RNA, 17 nt, Human
aggaagcaagcuuaaug

SEQ ID NO: 3626645 - RNA, 23 nt, Human
aggaagcacaugccucucucagg

SEQ ID NO: 3626646 - RNA, 12 nt, Human
aggaagcagaau

SEQ ID NO: 3626647 - RNA, 16 nt, Human
aggaagcagaauaaag

SEQ ID NO: 3626648 - RNA, 18 nt, Human
aggaagcagaauaaagca

SEQ ID NO: 3626649 - RNA, 20 nt, Human
aggaagcagaauaaagcaau

SEQ ID NO: 3626650 - RNA, 23 nt, Human
aggaagcagaauaaagcaauuuu

SEQ ID NO: 3626651 - RNA, 18 nt, Human
aggaagcagcuuucccca

SEQ ID NO: 3626652 - RNA, 16 nt, Human
aggaagccaaauuuau

SEQ ID NO: 3626653 - RNA, 18 nt, Human
aggaagccacagcuggug

SEQ ID NO: 3626654 - RNA, 15 nt, Human
aggaagccagcaggc

SEQ ID NO: 3626655 - RNA, 18 nt, Human
aggaagccagcaggcucu

SEQ ID NO: 3626656 - RNA, 18 nt, Human
aggaagccgccaguacuu

SEQ ID NO: 3626657 - RNA, 22 nt, Human
aggaagccgccaguacuuguca

SEQ ID NO: 3626658 - RNA, 20 nt, Human
aggaagccgugcccugcccc

SEQ ID NO: 3626659 - RNA, 21 nt, Human
aggaagccugauuaaagaaug

SEQ ID NO: 3626660 - RNA, 19 nt, Human
aggaagccugcaguccugg

SEQ ID NO: 3626661 - RNA, 13 nt, Human
aggaagcucaggg

SEQ ID NO: 3626662 - RNA, 22 nt, Human
aggaagcucagggccuggcuca

SEQ ID NO: 3626663 - RNA, 16 nt, Human
aggaagcucucuuucc

SEQ ID NO: 3626664 - RNA, 17 nt, Human
aggaagcuuacaugccu

SEQ ID NO: 3626665 - RNA, 22 nt, Human
aggaagcuuucucugcuucagc

SEQ ID NO: 3626666 - RNA, 20 nt, Human
aggaaggaaacccagcucug

SEQ ID NO: 3626667 - RNA, 21 nt, Human
aggaaggagacucaccucugc

SEQ ID NO: 3626668 - RNA, 23 nt, Human
aggaaggagacucaccucugccu

SEQ ID NO: 3626669 - RNA, 21 nt, Human
aggaaggagagaaggggagga

SEQ ID NO: 3626670 - RNA, 17 nt, Human
aggaaggagagccugcu

SEQ ID NO: 3626671 - RNA, 15 nt, Human
aggaaggagaggaga

SEQ ID NO: 3626672 - RNA, 14 nt, Human
aggaaggagcugcc

SEQ ID NO: 3626673 - RNA, 22 nt, Human
aggaaggagcugccuggacccg

SEQ ID NO: 3626674 - RNA, 21 nt, Human
aggaaggaggacccaggacag

SEQ ID NO: 3626675 - RNA, 15 nt, Human
aggaaggauuguaaa

SEQ ID NO: 3626676 - RNA, 22 nt, Human
aggaaggcagggaggaggcaga

SEQ ID NO: 3626677 - RNA, 20 nt, Human
aggaaggcugucucagauaa

SEQ ID NO: 3626678 - RNA, 15 nt, Human
aggaaggcuuugaaa

SEQ ID NO: 3626679 - RNA, 16 nt, Human
aggaagggaccaaggc

SEQ ID NO: 3626680 - RNA, 20 nt, Human
aggaagggcauccuucugcc

SEQ ID NO: 3626681 - RNA, 20 nt, Human
aggaaggggccagaggcucg

SEQ ID NO: 3626682 - RNA, 17 nt, Human
aggaaggggcuggacug

SEQ ID NO: 3626683 - RNA, 23 nt, Human
aggaaggggcuggacuggcuguc

SEQ ID NO: 3626684 - RNA, 14 nt, Human
aggaagguaaaaag

SEQ ID NO: 3626685 - RNA, 15 nt, Human
aggaagguacuguau

SEQ ID NO: 3626686 - RNA, 14 nt, Human
aggaagguagaaau

SEQ ID NO: 3626687 - RNA, 16 nt, Human
aggaagguggauggcc

SEQ ID NO: 3626688 - RNA, 16 nt, Human
aggaagguucuggugu

SEQ ID NO: 3626689 - RNA, 22 nt, Human
aggaccuggggcacaguccagg

SEQ ID NO: 3626690 - RNA, 18 nt, Human
aggaccuguauuuaagca

SEQ ID NO: 3626691 - RNA, 16 nt, Human
aggaccuguggccaag

SEQ ID NO: 3626692 - RNA, 21 nt, Human
aggaccuguggccaaguucuu

SEQ ID NO: 3626693 - RNA, 17 nt, Human
aggaccuuaagacagag

SEQ ID NO: 3626694 - RNA, 16 nt, Human
aggaccuuaucugugc

SEQ ID NO: 3626695 - RNA, 18 nt, Human
aggaccuucgggcugugc

SEQ ID NO: 3626696 - RNA, 20 nt, Human
aggaccuucgggcugugccc

SEQ ID NO: 3626697 - RNA, 15 nt, Human
aggacgccacccagc

SEQ ID NO: 3626698 - RNA, 14 nt, Human
aggacgcucucugg

SEQ ID NO: 3626699 - RNA, 17 nt, Human
aggacgcucucuggccu

SEQ ID NO: 3626700 - RNA, 20 nt, Human
aggacgcuucacaggacagg

SEQ ID NO: 3626701 - RNA, 15 nt, Human
aggacgcuucugaau

SEQ ID NO: 3626702 - RNA, 20 nt, Human
aggacgugggcggcagagag

SEQ ID NO: 3626703 - RNA, 15 nt, Human
aggacgugggcuggg

SEQ ID NO: 3626704 - RNA, 17 nt, Human
aggacuaacacucagaa

SEQ ID NO: 3626705 - RNA, 17 nt, Human
aggacuaauagaaaagu

SEQ ID NO: 3626706 - RNA, 13 nt, Human
aggacucagcucc

SEQ ID NO: 3626707 - RNA, 17 nt, Human
aggacuccacccauccu

SEQ ID NO: 3626708 - RNA, 14 nt, Human
aggacuccaggcag

SEQ ID NO: 3626709 - RNA, 18 nt, Human
aggacuccccaggccagg

SEQ ID NO: 3626710 - RNA, 20 nt, Human
aggacuccccaggccaggcc

SEQ ID NO: 3626711 - RNA, 17 nt, Human
aggacucccuccucacc

SEQ ID NO: 3626712 - RNA, 17 nt, Human
aggacuccuuaaauuug

SEQ ID NO: 3626713 - RNA, 14 nt, Human
aggacucgcuugua

SEQ ID NO: 3626714 - RNA, 12 nt, Human
aggacucucagg

SEQ ID NO: 3626715 - RNA, 13 nt, Human
aggacucugcagc

SEQ ID NO: 3626716 - RNA, 19 nt, Human
aggacucugcagccucaga

SEQ ID NO: 3626717 - RNA, 18 nt, Human
aggacucugcccagacca

SEQ ID NO: 3626718 - RNA, 17 nt, Human
aggacucugccuccucu

SEQ ID NO: 3626719 - RNA, 18 nt, Human
aggacucugccuccucuu

SEQ ID NO: 3626720 - RNA, 17 nt, Human
aggacugaauugucccc

SEQ ID NO: 3626721 - RNA, 19 nt, Human
aggacugaauuguccccag

SEQ ID NO: 3626722 - RNA, 15 nt, Human
aggacugacugaggc

SEQ ID NO: 3626723 - RNA, 16 nt, Human
aggacugacugaggca

SEQ ID NO: 3626724 - RNA, 18 nt, Human
aggacugacugaggcagu

SEQ ID NO: 3626725 - RNA, 19 nt, Human
aggacugagcacccucugg

SEQ ID NO: 3626726 - RNA, 16 nt, Human
aggacugagccccgca

SEQ ID NO: 3626727 - RNA, 12 nt, Human
aggacugaggga

SEQ ID NO: 3626728 - RNA, 18 nt, Human
aggacugagggacucuga

SEQ ID NO: 3626729 - RNA, 16 nt, Human
aggacugaugucuccu

SEQ ID NO: 3626730 - RNA, 20 nt, Human
aggacugaugucuccuaagc

SEQ ID NO: 3626731 - RNA, 23 nt, Human
aggacugcacagcguccugucca

SEQ ID NO: 3626732 - RNA, 12 nt, Human
aggacugcacca

SEQ ID NO: 3626733 - RNA, 21 nt, Human
aggacugcaugguaauuuaua

SEQ ID NO: 3626734 - RNA, 13 nt, Human
aggacugccgacc

SEQ ID NO: 3626735 - RNA, 17 nt, Human
aggacugccgaccgagg

SEQ ID NO: 3626736 - RNA, 20 nt, Human
aggacugcugguuuguaguu

SEQ ID NO: 3626737 - RNA, 16 nt, Human
aggacugggagccccc

SEQ ID NO: 3626738 - RNA, 20 nt, Human
aggacugggagcccccagcc

SEQ ID NO: 3626739 - RNA, 23 nt, Human
aggacuguccccuugaaggagaa

SEQ ID NO: 3626740 - RNA, 20 nt, Human
aggacugugacaggcagcag

SEQ ID NO: 3626741 - RNA, 15 nt, Human
aggacuguuucaaac

SEQ ID NO: 3626742 - RNA, 18 nt, Human
aggacuguuuuuuccuga

SEQ ID NO: 3626743 - RNA, 19 nt, Human
aggacuuauuuaaacucug

SEQ ID NO: 3626744 - RNA, 16 nt, Human
aggacuugaaagaaau

SEQ ID NO: 3626745 - RNA, 17 nt, Human
aggacuuguuagaucua

SEQ ID NO: 3626746 - RNA, 22 nt, Human
aggacuuugauugcacauuguu

SEQ ID NO: 3626747 - RNA, 15 nt, Human
aggacuuuguacauu

SEQ ID NO: 3626748 - RNA, 17 nt, Human
aggacuuuucuuugugg

SEQ ID NO: 3626749 - RNA, 13 nt, Human
aggagaaaaacaa

SEQ ID NO: 3626750 - RNA, 13 nt, Human
aggagaaacacau

SEQ ID NO: 3626751 - RNA, 12 nt, Human
aggagaaaugca

SEQ ID NO: 3626752 - RNA, 16 nt, Human
aggagaaaugcaucca

SEQ ID NO: 3626753 - RNA, 16 nt, Human
aggagaaccaaaucug

SEQ ID NO: 3626754 - RNA, 22 nt, Human
aggagaaccaaaucuggaagcc

SEQ ID NO: 3626755 - RNA, 17 nt, Human
aggagaacuugcugccu

SEQ ID NO: 3626756 - RNA, 15 nt, Human
aggagaagcucagcu

SEQ ID NO: 3626757 - RNA, 14 nt, Human
aggagaagcugcau

SEQ ID NO: 3626758 - RNA, 16 nt, Human
aggagaaggaaggaga

SEQ ID NO: 3626759 - RNA, 22 nt, Human
aggagaagucuucuauuuauuu

SEQ ID NO: 3626760 - RNA, 23 nt, Human
aggagaagucuucuauuuauuua

SEQ ID NO: 3626761 - RNA, 20 nt, Human
aggagaauagccugaaccug

SEQ ID NO: 3626762 - RNA, 17 nt, Human
aggagaaucauguuucu

SEQ ID NO: 3626763 - RNA, 19 nt, Human
aggagaaucauguuucuuu

SEQ ID NO: 3626764 - RNA, 23 nt, Human
aggagaauuaaguccuacuuuua

SEQ ID NO: 3626765 - RNA, 13 nt, Human
aggagaauugcuu

SEQ ID NO: 3626766 - RNA, 13 nt, Human
aggagacaaaaga

SEQ ID NO: 3626767 - RNA, 12 nt, Human
aggagacacaga

SEQ ID NO: 3626768 - RNA, 13 nt, Human
aggagacacagau

SEQ ID NO: 3626769 - RNA, 21 nt, Human
aggagaccuggcacuggaugc

SEQ ID NO: 3626770 - RNA, 11 nt, Human
aggagacucac

SEQ ID NO: 3626771 - RNA, 16 nt, Human
aggagacucaccucug

SEQ ID NO: 3626772 - RNA, 17 nt, Human
aggagacucaccucugc

SEQ ID NO: 3626773 - RNA, 18 nt, Human
aggagacucaccucugcc

SEQ ID NO: 3626774 - RNA, 20 nt, Human
aggagacuguggagacugcu

SEQ ID NO: 3626775 - RNA, 15 nt, Human
aggagagaaaauaua

SEQ ID NO: 3626776 - RNA, 13 nt, Human
aggagagaagaau

SEQ ID NO: 3626777 - RNA, 20 nt, Human
aggagagacucccaugaagc

SEQ ID NO: 3626778 - RNA, 19 nt, Human
aggagagagaaagccaggc

SEQ ID NO: 3626779 - RNA, 22 nt, Human
aggagagagaaagccaggcagg

SEQ ID NO: 3626780 - RNA, 18 nt, Human
aggagagagaucaugaga

SEQ ID NO: 3626781 - RNA, 17 nt, Human
aggagagagcagcuucu

SEQ ID NO: 3626782 - RNA, 18 nt, Human
aggagagaggcagagagc

SEQ ID NO: 3626783 - RNA, 17 nt, Human
aggagagauagccugug

SEQ ID NO: 3626784 - RNA, 20 nt, Human
aggagagauagccuguggcc

SEQ ID NO: 3626785 - RNA, 17 nt, Human
aggagagauuauuuaca

SEQ ID NO: 3626786 - RNA, 21 nt, Human
aggagagccagagaagugaca

SEQ ID NO: 3626787 - RNA, 12 nt, Human
aggagagccugg

SEQ ID NO: 3626788 - RNA, 15 nt, Human
aggagagcuagcagc

SEQ ID NO: 3626789 - RNA, 15 nt, Human
aggagaggaaaagua

SEQ ID NO: 3626790 - RNA, 20 nt, Human
aggagaggaaaaguaaggug

SEQ ID NO: 3626791 - RNA, 18 nt, Human
aggagaggagagaggcag

SEQ ID NO: 3626792 - RNA, 19 nt, Human
aggagaggagagccagaga

SEQ ID NO: 3626793 - RNA, 17 nt, Human
aggagaggaugagagcc

SEQ ID NO: 3626794 - RNA, 20 nt, Human
aggagaggcaacauccaaaa

SEQ ID NO: 3626795 - RNA, 22 nt, Human
aggagaggggaagggccagucu

SEQ ID NO: 3626796 - RNA, 18 nt, Human
aggagaggggcagaacag

SEQ ID NO: 3626797 - RNA, 17 nt, Human
aggagagucacagaaca

SEQ ID NO: 3626798 - RNA, 17 nt, Human
aggagagucuugcagug

SEQ ID NO: 3626799 - RNA, 21 nt, Human
aggagauaaaucuaguauaca

SEQ ID NO: 3626800 - RNA, 14 nt, Human
aggagauaucugag

SEQ ID NO: 3626801 - RNA, 23 nt, Human
aggagauaucugagggaggaggc

SEQ ID NO: 3626802 - RNA, 15 nt, Human
aggagaucagaaaaa

SEQ ID NO: 3626803 - RNA, 20 nt, Human
aggagauggaaguugcagug

SEQ ID NO: 3626804 - RNA, 17 nt, Human
aggagauggggacaggg

SEQ ID NO: 3626805 - RNA, 16 nt, Human
aggagauugagaagga

SEQ ID NO: 3626806 - RNA, 17 nt, Human
aggagauugagaaggag

SEQ ID NO: 3626807 - RNA, 13 nt, Human
aggagcaaagccu

SEQ ID NO: 3626808 - RNA, 15 nt, Human
aggagcaaagccugu

SEQ ID NO: 3626809 - RNA, 15 nt, Human
aggagcacggcucug

SEQ ID NO: 3626810 - RNA, 17 nt, Human
aggagcacuuccaaaau

SEQ ID NO: 3626811 - RNA, 13 nt, Human
aggagcagcauug

SEQ ID NO: 3626812 - RNA, 14 nt, Human
aggagcagccacau

SEQ ID NO: 3626813 - RNA, 19 nt, Human
aggagcagccucagaacaa

SEQ ID NO: 3626814 - RNA, 19 nt, Human
aggagcaggagccugagcc

SEQ ID NO: 3626815 - RNA, 20 nt, Human
aggagcaggggcguggaggg

SEQ ID NO: 3626816 - RNA, 14 nt, Human
aggagcagugcagg

SEQ ID NO: 3626817 - RNA, 16 nt, Human
aggagcauccaccucc

SEQ ID NO: 3626818 - RNA, 21 nt, Human
aggagcauuuggagagaaggc

SEQ ID NO: 3626819 - RNA, 18 nt, Human
aggagcauuuuuuaaaaa

SEQ ID NO: 3626820 - RNA, 23 nt, Human
aggagccaguuugccggauacaa

SEQ ID NO: 3626821 - RNA, 20 nt, Human
aggagcccacgacacugcag

SEQ ID NO: 3626822 - RNA, 14 nt, Human
aggagcccaggcca

SEQ ID NO: 3626823 - RNA, 19 nt, Human
aggagcccaggccaggacu

SEQ ID NO: 3626824 - RNA, 19 nt, Human
aggagccccauuccuggga

SEQ ID NO: 3626825 - RNA, 21 nt, Human
aggagccccauuccugggaaa

SEQ ID NO: 3626826 - RNA, 22 nt, Human
aggagcccccacccuguuccug

SEQ ID NO: 3626827 - RNA, 23 nt, Human
aggagcccugggaggcucuggag

SEQ ID NO: 3626828 - RNA, 23 nt, Human
aggagcccuuaucugugcucagg

SEQ ID NO: 3626829 - RNA, 15 nt, Human
aggagccuaggccag

SEQ ID NO: 3626830 - RNA, 17 nt, Human
aggagccuauggcaucu

SEQ ID NO: 3626831 - RNA, 17 nt, Human
aggagccuccugcccuu

SEQ ID NO: 3626832 - RNA, 11 nt, Human
aggagccuggc

SEQ ID NO: 3626833 - RNA, 17 nt, Human
aggagccuguccugccu

SEQ ID NO: 3626834 - RNA, 21 nt, Human
aggcacugcccugguggcccu

SEQ ID NO: 3626835 - RNA, 13 nt, Human
aggcacugccuga

SEQ ID NO: 3626836 - RNA, 22 nt, Human
aggcacugcugcccagccucca

SEQ ID NO: 3626837 - RNA, 16 nt, Human
aggcacugggcaugag

SEQ ID NO: 3626838 - RNA, 16 nt, Human
aggcacuguaguucua

SEQ ID NO: 3626839 - RNA, 16 nt, Human
aggcacuuaagcacaa

SEQ ID NO: 3626840 - RNA, 17 nt, Human
aggcacuucauguaaag

SEQ ID NO: 3626841 - RNA, 20 nt, Human
aggcacuuuagggcuguaaa

SEQ ID NO: 3626842 - RNA, 14 nt, Human
aggcacuuuggggg

SEQ ID NO: 3626843 - RNA, 16 nt, Human
aggcagaaagcaaaau

SEQ ID NO: 3626844 - RNA, 16 nt, Human
aggcagaaagcagagg

SEQ ID NO: 3626845 - RNA, 17 nt, Human
aggcagaaagcagaggc

SEQ ID NO: 3626846 - RNA, 18 nt, Human
aggcagaaagcagaggcu

SEQ ID NO: 3626847 - RNA, 21 nt, Human
aggcagaaagcagaggcuggc

SEQ ID NO: 3626848 - RNA, 21 nt, Human
aggcagaagaauugaacccag

SEQ ID NO: 3626849 - RNA, 23 nt, Human
aggcagaagaauugaacccagga

SEQ ID NO: 3626850 - RNA, 17 nt, Human
aggcagaaggaagcagg

SEQ ID NO: 3626851 - RNA, 18 nt, Human
aggcagacacggaucuga

SEQ ID NO: 3626852 - RNA, 20 nt, Human
aggcagacagcagcucaggc

SEQ ID NO: 3626853 - RNA, 21 nt, Human
aggcagacagcagcucaggca

SEQ ID NO: 3626854 - RNA, 9 nt, Human
aggcagaga

SEQ ID NO: 3626855 - RNA, 17 nt, Human
aggcagagaaagaagag

SEQ ID NO: 3626856 - RNA, 18 nt, Human
aggcagagaaagaagaga

SEQ ID NO: 3626857 - RNA, 21 nt, Human
aggcagagaaagaagagacag

SEQ ID NO: 3626858 - RNA, 13 nt, Human
aggcagagaagaa

SEQ ID NO: 3626859 - RNA, 15 nt, Human
aggcagagaagaaag

SEQ ID NO: 3626860 - RNA, 13 nt, Human
aggcagagagcgg

SEQ ID NO: 3626861 - RNA, 17 nt, Human
aggcagaggcccaggcu

SEQ ID NO: 3626862 - RNA, 20 nt, Human
aggcagaggcccaggcugcc

SEQ ID NO: 3626863 - RNA, 14 nt, Human
aggcagaggccugg

SEQ ID NO: 3626864 - RNA, 17 nt, Human
aggcagaggccugggcu

SEQ ID NO: 3626865 - RNA, 18 nt, Human
aggcagaggccugggcug

SEQ ID NO: 3626866 - RNA, 22 nt, Human
aggcagaggccugggcugggaa

SEQ ID NO: 3626867 - RNA, 17 nt, Human
aggcagagugccccacc

SEQ ID NO: 3626868 - RNA, 19 nt, Human
aggcagagugccccaccug

SEQ ID NO: 3626869 - RNA, 11 nt, Human
aggcagaucca

SEQ ID NO: 3626870 - RNA, 17 nt, Human
aggcagauccaggacua

SEQ ID NO: 3626871 - RNA, 21 nt, Human
aggcagaucugugccccaugc

SEQ ID NO: 3626872 - RNA, 22 nt, Human
aggcagaucugugccccaugcc

SEQ ID NO: 3626873 - RNA, 15 nt, Human
aggcagauugaaaag

SEQ ID NO: 3626874 - RNA, 15 nt, Human
aggcagcaaggcccg

SEQ ID NO: 3626875 - RNA, 17 nt, Human
aggcagcaaggcccgag

SEQ ID NO: 3626876 - RNA, 15 nt, Human
aggcagcagacacau

SEQ ID NO: 3626877 - RNA, 19 nt, Human
aggcagccaaccuaagcaa

SEQ ID NO: 3626878 - RNA, 15 nt, Human
aggcagccagcaucu

SEQ ID NO: 3626879 - RNA, 20 nt, Human
aggcagccagcaucugggcc

SEQ ID NO: 3626880 - RNA, 15 nt, Human
aggcagccaggccac

SEQ ID NO: 3626881 - RNA, 18 nt, Human
aggcagccaggccacaag

SEQ ID NO: 3626882 - RNA, 15 nt, Human
aggcagccagugaga

SEQ ID NO: 3626883 - RNA, 15 nt, Human
aggcagcccaggaag

SEQ ID NO: 3626884 - RNA, 17 nt, Human
aggcagcccaggaaguc

SEQ ID NO: 3626885 - RNA, 21 nt, Human
aggcagcccaggaagucucau

SEQ ID NO: 3626886 - RNA, 14 nt, Human
aggcagccucuggg

SEQ ID NO: 3626887 - RNA, 19 nt, Human
aggcagcgccaagugcgug

SEQ ID NO: 3626888 - RNA, 21 nt, Human
aggcagcgccaagugcgugcc

SEQ ID NO: 3626889 - RNA, 20 nt, Human
aggcagcucuaaaugucaau

SEQ ID NO: 3626890 - RNA, 22 nt, Human
aggcagcuggaugagacuucca

SEQ ID NO: 3626891 - RNA, 13 nt, Human
aggcagcuguugu

SEQ ID NO: 3626892 - RNA, 20 nt, Human
aggcagcuguugucucuucu

SEQ ID NO: 3626893 - RNA, 15 nt, Human
aggcagcuugaaacu

SEQ ID NO: 3626894 - RNA, 22 nt, Human
aggcagcuuuaaccauuaaaac

SEQ ID NO: 3626895 - RNA, 23 nt, Human
aggcaggacaugcugaagccaaa

SEQ ID NO: 3626896 - RNA, 21 nt, Human
aggcaggaccuucgggcugug

SEQ ID NO: 3626897 - RNA, 22 nt, Human
aggcaggaccuucgggcugugc

SEQ ID NO: 3626898 - RNA, 17 nt, Human
aggcaggagaaucacuu

SEQ ID NO: 3626899 - RNA, 18 nt, Human
aggcaggagaauggugug

SEQ ID NO: 3626900 - RNA, 18 nt, Human
aggcaggagacuggcgug

SEQ ID NO: 3626901 - RNA, 15 nt, Human
aggcaggagagacag

SEQ ID NO: 3626902 - RNA, 12 nt, Human
aggcaggauggc

SEQ ID NO: 3626903 - RNA, 14 nt, Human
aggcaggauugaaa

SEQ ID NO: 3626904 - RNA, 22 nt, Human
aggcaggauugaaaauguccag

SEQ ID NO: 3626905 - RNA, 16 nt, Human
aggcaggauuggggaa

SEQ ID NO: 3626906 - RNA, 20 nt, Human
aggcaggauuggggaagaga

SEQ ID NO: 3626907 - RNA, 13 nt, Human
aggcaggcagggc

SEQ ID NO: 3626908 - RNA, 18 nt, Human
aggcaggcagggcucucc

SEQ ID NO: 3626909 - RNA, 15 nt, Human
aggcaggcauggccc

SEQ ID NO: 3626910 - RNA, 21 nt, Human
aggcaggccaaggccuucucc

SEQ ID NO: 3626911 - RNA, 22 nt, Human
aggcaggccaaggccuucuccu

SEQ ID NO: 3626912 - RNA, 15 nt, Human
aggcaggcucccagg

SEQ ID NO: 3626913 - RNA, 12 nt, Human
aggcagggaagu

SEQ ID NO: 3626914 - RNA, 21 nt, Human
aggcagggaaguguaagaaac

SEQ ID NO: 3626915 - RNA, 22 nt, Human
aggcagggaggaggcagagaag

SEQ ID NO: 3626916 - RNA, 16 nt, Human
aggcagggaggggacu

SEQ ID NO: 3626917 - RNA, 16 nt, Human
aggcagggauuugagg

SEQ ID NO: 3626918 - RNA, 18 nt, Human
aggcagggcaaaugacau

SEQ ID NO: 3626919 - RNA, 17 nt, Human
aggcagggcucuccugg

SEQ ID NO: 3626920 - RNA, 18 nt, Human
aggcagggcucuccuggc

SEQ ID NO: 3626921 - RNA, 23 nt, Human
aggcagggcucuccuggcuuccc

SEQ ID NO: 3626922 - RNA, 16 nt, Human
aggcaggggaauguau

SEQ ID NO: 3626923 - RNA, 17 nt, Human
aggcaggggcccugcag

SEQ ID NO: 3626924 - RNA, 16 nt, Human
aggcaggggcuuccug

SEQ ID NO: 3626925 - RNA, 15 nt, Human
aggcagggguggggg

SEQ ID NO: 3626926 - RNA, 19 nt, Human
aggcaggggugggggugga

SEQ ID NO: 3626927 - RNA, 20 nt, Human
aggcagggguggggguggag

SEQ ID NO: 3626928 - RNA, 23 nt, Human
aggcagggucaggagaggggcag

SEQ ID NO: 3626929 - RNA, 21 nt, Human
aggcagggucucacucugucg

SEQ ID NO: 3626930 - RNA, 15 nt, Human
aggcagggugucugc

SEQ ID NO: 3626931 - RNA, 19 nt, Human
aggcagggugucugccccc

SEQ ID NO: 3626932 - RNA, 22 nt, Human
aggcaggucuugaacuccuggc

SEQ ID NO: 3626933 - RNA, 18 nt, Human
aggcaggugaauuguuug

SEQ ID NO: 3626934 - RNA, 20 nt, Human
aggcaggugaucugcugcag

SEQ ID NO: 3626935 - RNA, 21 nt, Human
aggcaggugccuccaggugug

SEQ ID NO: 3626936 - RNA, 19 nt, Human
aggcaguaauaaaaagauu

SEQ ID NO: 3626937 - RNA, 19 nt, Human
aggcaguauuuuguguccu

SEQ ID NO: 3626938 - RNA, 21 nt, Human
aggcaguauuuuguguccucc

SEQ ID NO: 3626939 - RNA, 18 nt, Human
aggcagucgggggcuggc

SEQ ID NO: 3626940 - RNA, 21 nt, Human
aggcagucgggggcuggccua

SEQ ID NO: 3626941 - RNA, 22 nt, Human
aggcagugcaagagacucuggc

SEQ ID NO: 3626942 - RNA, 13 nt, Human
aggcagugucauu

SEQ ID NO: 3626943 - RNA, 19 nt, Human
aggcagugucauuugcucu

SEQ ID NO: 3626944 - RNA, 21 nt, Human
aggcaguuaccauuaaaccau

SEQ ID NO: 3626945 - RNA, 22 nt, Human
aggcaguuaccauuaaaccauc

SEQ ID NO: 3626946 - RNA, 23 nt, Human
aggcaguuaccauuaaaccaucu

SEQ ID NO: 3626947 - RNA, 17 nt, Human
aggcaguugcccagccu

SEQ ID NO: 3626948 - RNA, 20 nt, Human
aggcaguuugaggauuaguu

SEQ ID NO: 3626949 - RNA, 12 nt, Human
aggcaguuuucu

SEQ ID NO: 3626950 - RNA, 13 nt, Human
aggcaguuuucua

SEQ ID NO: 3626951 - RNA, 15 nt, Human
aggcauaaagucagg

SEQ ID NO: 3626952 - RNA, 15 nt, Human
aggcauagaggcuuc

SEQ ID NO: 3626953 - RNA, 13 nt, Human
aggcauaggccug

SEQ ID NO: 3626954 - RNA, 15 nt, Human
aggcauaggccuggg

SEQ ID NO: 3626955 - RNA, 20 nt, Human
aggcauaucagucucugagg

SEQ ID NO: 3626956 - RNA, 18 nt, Human
aggcauaucaugcuuuga

SEQ ID NO: 3626957 - RNA, 20 nt, Human
aggcaucagucccuauguau

SEQ ID NO: 3626958 - RNA, 17 nt, Human
aggcaucccaggggacc

SEQ ID NO: 3626959 - RNA, 18 nt, Human
aggcaucccaggggacca

SEQ ID NO: 3626960 - RNA, 18 nt, Human
aggcauccuuccucacac

SEQ ID NO: 3626961 - RNA, 23 nt, Human
aggcaucgucaugcacaguauuu

SEQ ID NO: 3626962 - RNA, 14 nt, Human
aggcaucugagggg

SEQ ID NO: 3626963 - RNA, 16 nt, Human
aggcaucugauuugca

SEQ ID NO: 3626964 - RNA, 14 nt, Human
aggcaucugcaccc

SEQ ID NO: 3626965 - RNA, 19 nt, Human
aggcaucugugggcauggu

SEQ ID NO: 3626966 - RNA, 23 nt, Human
aggcaugagggaucacagggccc

SEQ ID NO: 3626967 - RNA, 13 nt, Human
aggcaugccugug

SEQ ID NO: 3626968 - RNA, 19 nt, Human
aggcauggaugaauaaaug

SEQ ID NO: 3626969 - RNA, 15 nt, Human
aggcauggcccuggg

SEQ ID NO: 3626970 - RNA, 16 nt, Human
aggcaugggcuugcug

SEQ ID NO: 3626971 - RNA, 21 nt, Human
aggcaugggggguggggggag

SEQ ID NO: 3626972 - RNA, 12 nt, Human
aggcauggugga

SEQ ID NO: 3626973 - RNA, 17 nt, Human
aggcauguaggacccug

SEQ ID NO: 3626974 - RNA, 24 nt, Human
aggcaugugaugagaggaaaucac

SEQ ID NO: 3626975 - RNA, 12 nt, Human
aggcauguucuc

SEQ ID NO: 3626976 - RNA, 19 nt, Human
aggcauguucucugaggac

SEQ ID NO: 3626977 - RNA, 22 nt, Human
aggcauuaaauuuuagcaaaga

SEQ ID NO: 3626978 - RNA, 14 nt, Human
aggucaacagagaa

SEQ ID NO: 3626979 - RNA, 21 nt, Human
aggucaacagagaaggcagga

SEQ ID NO: 3626980 - RNA, 19 nt, Human
aggucaagaagaagaugga

SEQ ID NO: 3626981 - RNA, 16 nt, Human
aggucaagcccaggag

SEQ ID NO: 3626982 - RNA, 18 nt, Human
aggucaaguaagaagaca

SEQ ID NO: 3626983 - RNA, 19 nt, Human
aggucaaguaagaagacau

SEQ ID NO: 3626984 - RNA, 16 nt, Human
aggucaaguugucagg

SEQ ID NO: 3626985 - RNA, 18 nt, Human
aggucaauacaguacagg

SEQ ID NO: 3626986 - RNA, 22 nt, Human
aggucaauacaguacaggcagc

SEQ ID NO: 3626987 - RNA, 15 nt, Human
aggucacauucagga

SEQ ID NO: 3626988 - RNA, 18 nt, Human
aggucacauucaggaaga

SEQ ID NO: 3626989 - RNA, 18 nt, Human
aggucaccucacucagca

SEQ ID NO: 3626990 - RNA, 19 nt, Human
aggucaccucacucagcac

SEQ ID NO: 3626991 - RNA, 21 nt, Human
aggucaccucacucagcacca

SEQ ID NO: 3626992 - RNA, 18 nt, Human
aggucaccuuuauucugg

SEQ ID NO: 3626993 - RNA, 19 nt, Human
aggucacuagauggcgagc

SEQ ID NO: 3626994 - RNA, 18 nt, Human
aggucacuccuggggccu

SEQ ID NO: 3626995 - RNA, 21 nt, Human
aggucacuggaaaggggagag

SEQ ID NO: 3626996 - RNA, 15 nt, Human
aggucacuggcucuc

SEQ ID NO: 3626997 - RNA, 14 nt, Human
aggucacuguuucc

SEQ ID NO: 3626998 - RNA, 16 nt, Human
aggucagcaugucuau

SEQ ID NO: 3626999 - RNA, 15 nt, Human
aggucagccacuguu

SEQ ID NO: 3627000 - RNA, 18 nt, Human
aggucagcuugcugcccu

SEQ ID NO: 3627001 - RNA, 19 nt, Human
aggucaggaguuagaggcc

SEQ ID NO: 3627002 - RNA, 20 nt, Human
aggucaggaguuccuaacca

SEQ ID NO: 3627003 - RNA, 16 nt, Human
aggucaggcccuggaa

SEQ ID NO: 3627004 - RNA, 20 nt, Human
aggucagggagugcuggcuc

SEQ ID NO: 3627005 - RNA, 17 nt, Human
aggucaguacccaccug

SEQ ID NO: 3627006 - RNA, 18 nt, Human
aggucaguacccaccuga

SEQ ID NO: 3627007 - RNA, 19 nt, Human
aggucaguacccaccugag

SEQ ID NO: 3627008 - RNA, 19 nt, Human
aggucaguuguguuuuuua

SEQ ID NO: 3627009 - RNA, 20 nt, Human
aggucauacaauccauucuu

SEQ ID NO: 3627010 - RNA, 19 nt, Human
aggucauauuaauauauuu

SEQ ID NO: 3627011 - RNA, 18 nt, Human
aggucauggaauggaaac

SEQ ID NO: 3627012 - RNA, 21 nt, Human
aggucauuuccauguaugcau

SEQ ID NO: 3627013 - RNA, 14 nt, Human
aggucauuucuuca

SEQ ID NO: 3627014 - RNA, 15 nt, Human
agguccaaugagcuu

SEQ ID NO: 3627015 - RNA, 20 nt, Human
agguccaaugagcuuucuga

SEQ ID NO: 3627016 - RNA, 24 nt, Human
agguccaauucucgagcuuggggc

SEQ ID NO: 3627017 - RNA, 19 nt, Human
agguccagagagaccgagg

SEQ ID NO: 3627018 - RNA, 18 nt, Human
agguccagcccuggcuga

SEQ ID NO: 3627019 - RNA, 22 nt, Human
agguccagcccuggcugaagga

SEQ ID NO: 3627020 - RNA, 15 nt, Human
agguccagcucugga

SEQ ID NO: 3627021 - RNA, 18 nt, Human
agguccagcucuggaggg

SEQ ID NO: 3627022 - RNA, 23 nt, Human
agguccagcucuggaggggaggg

SEQ ID NO: 3627023 - RNA, 16 nt, Human
aggucccaccuccagc

SEQ ID NO: 3627024 - RNA, 13 nt, Human
aggucccaggcag

SEQ ID NO: 3627025 - RNA, 16 nt, Human
aggucccuaauaaagc

SEQ ID NO: 3627026 - RNA, 18 nt, Human
aggucccuaauaaagcug

SEQ ID NO: 3627027 - RNA, 19 nt, Human
aggucccuaauaaagcugu

SEQ ID NO: 3627028 - RNA, 20 nt, Human
aggucccuaauaaagcugug

SEQ ID NO: 3627029 - RNA, 14 nt, Human
aggucccuuguuuc

SEQ ID NO: 3627030 - RNA, 19 nt, Human
aggucccuuucauuugcua

SEQ ID NO: 3627031 - RNA, 15 nt, Human
agguccucagagaau

SEQ ID NO: 3627032 - RNA, 20 nt, Human
agguccucugauacccagag

SEQ ID NO: 3627033 - RNA, 14 nt, Human
agguccucugucag

SEQ ID NO: 3627034 - RNA, 22 nt, Human
agguccugagcacugccaggag

SEQ ID NO: 3627035 - RNA, 17 nt, Human
agguccugguggggcag

SEQ ID NO: 3627036 - RNA, 19 nt, Human
agguccugugaucuuauuu

SEQ ID NO: 3627037 - RNA, 20 nt, Human
agguccuuaggccucugaga

SEQ ID NO: 3627038 - RNA, 16 nt, Human
agguccuucugcugga

SEQ ID NO: 3627039 - RNA, 17 nt, Human
agguccuugcccuuugu

SEQ ID NO: 3627040 - RNA, 21 nt, Human
aggucgaccccaaagccccuu

SEQ ID NO: 3627041 - RNA, 14 nt, Human
aggucgaggcagga

SEQ ID NO: 3627042 - RNA, 22 nt, Human
aggucgguagguucagccaagg

SEQ ID NO: 3627043 - RNA, 21 nt, Human
aggucguuuuaaaaacaaaaa

SEQ ID NO: 3627044 - RNA, 11 nt, Human
aggucuagccu

SEQ ID NO: 3627045 - RNA, 14 nt, Human
aggucuauuuggau

SEQ ID NO: 3627046 - RNA, 13 nt, Human
aggucucagcccc

SEQ ID NO: 3627047 - RNA, 21 nt, Human
aggucuccaguuggcuuuacu

SEQ ID NO: 3627048 - RNA, 17 nt, Human
aggucucccacguggga

SEQ ID NO: 3627049 - RNA, 21 nt, Human
aggucuccccaugugccugca

SEQ ID NO: 3627050 - RNA, 14 nt, Human
aggucuccucuuaa

SEQ ID NO: 3627051 - RNA, 15 nt, Human
aggucuccucuuaaa

SEQ ID NO: 3627052 - RNA, 17 nt, Human
aggucucgcugaugcug

SEQ ID NO: 3627053 - RNA, 21 nt, Human
aggucucggacuaagccuacc

SEQ ID NO: 3627054 - RNA, 15 nt, Human
aggucucucuuugga

SEQ ID NO: 3627055 - RNA, 15 nt, Human
aggucucugccggcu

SEQ ID NO: 3627056 - RNA, 19 nt, Human
aggucucugccggcucuuu

SEQ ID NO: 3627057 - RNA, 15 nt, Human
aggucucuuccccuc

SEQ ID NO: 3627058 - RNA, 22 nt, Human
aggucucuucucccagaauccc

SEQ ID NO: 3627059 - RNA, 13 nt, Human
aggucugaaaugg

SEQ ID NO: 3627060 - RNA, 15 nt, Human
aggucugaaauggag

SEQ ID NO: 3627061 - RNA, 21 nt, Human
aggucugaaauggagguccuu

SEQ ID NO: 3627062 - RNA, 13 nt, Human
aggucugaaauuu

SEQ ID NO: 3627063 - RNA, 23 nt, Human
aggucuggagaagcucccaggaa

SEQ ID NO: 3627064 - RNA, 16 nt, Human
aggucugggagaggca

SEQ ID NO: 3627065 - RNA, 18 nt, Human
aggucugggagaggcaga

SEQ ID NO: 3627066 - RNA, 21 nt, Human
aggucugggagaggcagagug

SEQ ID NO: 3627067 - RNA, 11 nt, Human
aggucugugcu

SEQ ID NO: 3627068 - RNA, 18 nt, Human
aggucuguucuuuccaaa

SEQ ID NO: 3627069 - RNA, 18 nt, Human
aggucuugaacuccuggc

SEQ ID NO: 3627070 - RNA, 23 nt, Human
aggucuugaacuccuggccucaa

SEQ ID NO: 3627071 - RNA, 21 nt, Human
aggucuuggaacuugccugcc

SEQ ID NO: 3627072 - RNA, 18 nt, Human
aggucuuugguucagcua

SEQ ID NO: 3627073 - RNA, 16 nt, Human
aggucuuuugacaugu

SEQ ID NO: 3627074 - RNA, 19 nt, Human
aggugaaacuccagaugcc

SEQ ID NO: 3627075 - RNA, 15 nt, Human
aggugaaaggaaauu

SEQ ID NO: 3627076 - RNA, 16 nt, Human
aggugaacaaucaacu

SEQ ID NO: 3627077 - RNA, 23 nt, Human
aggugaauuaauuaaacauugug

SEQ ID NO: 3627078 - RNA, 15 nt, Human
aggugacagagugag

SEQ ID NO: 3627079 - RNA, 15 nt, Human
aggugacagcagucg

SEQ ID NO: 3627080 - RNA, 19 nt, Human
aggugacaucggaaaaaua

SEQ ID NO: 3627081 - RNA, 19 nt, Human
aggugaccaaaucagugug

SEQ ID NO: 3627082 - RNA, 19 nt, Human
aggugacccaaugauucag

SEQ ID NO: 3627083 - RNA, 17 nt, Human
aggugaccccagggcac

SEQ ID NO: 3627084 - RNA, 19 nt, Human
aggugaccccagggcacag

SEQ ID NO: 3627085 - RNA, 20 nt, Human
aggugacugggcccugccuc

SEQ ID NO: 3627086 - RNA, 21 nt, Human
aggugacugucuggggagcgg

SEQ ID NO: 3627087 - RNA, 22 nt, Human
aggugagcaagcccaggagaau

SEQ ID NO: 3627088 - RNA, 20 nt, Human
aggugauaaaugucaguagu

SEQ ID NO: 3627089 - RNA, 18 nt, Human
aggugauauauuuaaaaa

SEQ ID NO: 3627090 - RNA, 18 nt, Human
aggugauauccauucuuu

SEQ ID NO: 3627091 - RNA, 19 nt, Human
aggugauauccauucuuuc

SEQ ID NO: 3627092 - RNA, 22 nt, Human
aggugauauccauucuuucuga

SEQ ID NO: 3627093 - RNA, 19 nt, Human
aggugauccauguaacugc

SEQ ID NO: 3627094 - RNA, 15 nt, Human
aggugaucccguuuu

SEQ ID NO: 3627095 - RNA, 23 nt, Human
aggugaucccguuuuccccauga

SEQ ID NO: 3627096 - RNA, 17 nt, Human
aggugauuccagugaag

SEQ ID NO: 3627097 - RNA, 15 nt, Human
aggugcaaccaggga

SEQ ID NO: 3627098 - RNA, 16 nt, Human
aggugcaauuucaagg

SEQ ID NO: 3627099 - RNA, 20 nt, Human
aggugcaauuucaagguucu

SEQ ID NO: 3627100 - RNA, 21 nt, Human
aggugcacaagcuccaagcuc

SEQ ID NO: 3627101 - RNA, 22 nt, Human
aggugcacugggaggcuccccu

SEQ ID NO: 3627102 - RNA, 20 nt, Human
aggugcacuuggggcacagg

SEQ ID NO: 3627103 - RNA, 23 nt, Human
aggugcacuuggggcacagggag

SEQ ID NO: 3627104 - RNA, 11 nt, Human
aggugcagagg

SEQ ID NO: 3627105 - RNA, 21 nt, Human
aggugcagagguacccugggu

SEQ ID NO: 3627106 - RNA, 13 nt, Human
aggugcagccaga

SEQ ID NO: 3627107 - RNA, 18 nt, Human
aggugcagccagaggcac

SEQ ID NO: 3627108 - RNA, 21 nt, Human
aggugcaucuggggaacuaga

SEQ ID NO: 3627109 - RNA, 18 nt, Human
aggugccacuggagugug

SEQ ID NO: 3627110 - RNA, 19 nt, Human
aggugccagcaaagcccca

SEQ ID NO: 3627111 - RNA, 16 nt, Human
aggugccauggaagag

SEQ ID NO: 3627112 - RNA, 17 nt, Human
aggugccauggaagagg

SEQ ID NO: 3627113 - RNA, 21 nt, Human
aggugccauggaagaggcuac

SEQ ID NO: 3627114 - RNA, 20 nt, Human
aggugcccacauguguccau

SEQ ID NO: 3627115 - RNA, 13 nt, Human
aggugcccaggag

SEQ ID NO: 3627116 - RNA, 14 nt, Human
aggugcccaggaga

SEQ ID NO: 3627117 - RNA, 19 nt, Human
aggugcccuuggaggccag

SEQ ID NO: 3627118 - RNA, 21 nt, Human
aggugcccuuggaggccagcc

SEQ ID NO: 3627119 - RNA, 14 nt, Human
aggugccuccaggu

SEQ ID NO: 3627120 - RNA, 16 nt, Human
aggugccuccaggugu

SEQ ID NO: 3627121 - RNA, 14 nt, Human
aguaaccauuugca

SEQ ID NO: 3627122 - RNA, 19 nt, Human
aguaacccccuuaaauuua

SEQ ID NO: 3627123 - RNA, 12 nt, Human
aguaaccugggu

SEQ ID NO: 3627124 - RNA, 17 nt, Human
aguaacgcgucuuccug

SEQ ID NO: 3627125 - RNA, 21 nt, Human
aguaacgggucguaaugacuu

SEQ ID NO: 3627126 - RNA, 15 nt, Human
aguaacuauuauuau

SEQ ID NO: 3627127 - RNA, 14 nt, Human
aguaacugacauga

SEQ ID NO: 3627128 - RNA, 17 nt, Human
aguaacuucuuauggaa

SEQ ID NO: 3627129 - RNA, 15 nt, Human
aguaacuugguuaua

SEQ ID NO: 3627130 - RNA, 20 nt, Human
aguaacuugguuauacauga

SEQ ID NO: 3627131 - RNA, 20 nt, Human
aguaacuugucuuaaauaaa

SEQ ID NO: 3627132 - RNA, 15 nt, Human
aguaacuuuauucuu

SEQ ID NO: 3627133 - RNA, 13 nt, Human
aguaagaaaagug

SEQ ID NO: 3627134 - RNA, 12 nt, Human
aguaagaaaaua

SEQ ID NO: 3627135 - RNA, 13 nt, Human
aguaagaaaauau

SEQ ID NO: 3627136 - RNA, 23 nt, Human
aguaagaaaauauuuugucuaaa

SEQ ID NO: 3627137 - RNA, 18 nt, Human
aguaagaaauuucagguu

SEQ ID NO: 3627138 - RNA, 23 nt, Human
aguaagaauaccacaucaaauaa

SEQ ID NO: 3627139 - RNA, 24 nt, Human
aguaagacauugggucuauuccag

SEQ ID NO: 3627140 - RNA, 21 nt, Human
aguaagaccggaagcuccugg

SEQ ID NO: 3627141 - RNA, 12 nt, Human
aguaagagcugg

SEQ ID NO: 3627142 - RNA, 14 nt, Human
aguaagauaucuca

SEQ ID NO: 3627143 - RNA, 14 nt, Human
aguaagaucacugu

SEQ ID NO: 3627144 - RNA, 14 nt, Human
aguaagcugcuuuu

SEQ ID NO: 3627145 - RNA, 18 nt, Human
aguaaggaguucauuuua

SEQ ID NO: 3627146 - RNA, 16 nt, Human
aguaagggaaauagaa

SEQ ID NO: 3627147 - RNA, 17 nt, Human
aguaagggaaauagaaa

SEQ ID NO: 3627148 - RNA, 21 nt, Human
aguaagggaacaaguugagcu

SEQ ID NO: 3627149 - RNA, 20 nt, Human
aguaaguaccacucaggcca

SEQ ID NO: 3627150 - RNA, 15 nt, Human
aguaaguaucuucgu

SEQ ID NO: 3627151 - RNA, 15 nt, Human
aguaagugccuucca

SEQ ID NO: 3627152 - RNA, 16 nt, Human
aguaaguuaucuuuga

SEQ ID NO: 3627153 - RNA, 20 nt, Human
aguaaguuaucuuugaauau

SEQ ID NO: 3627154 - RNA, 14 nt, Human
aguaaguucagcac

SEQ ID NO: 3627155 - RNA, 15 nt, Human
aguaauaaaacaucu

SEQ ID NO: 3627156 - RNA, 17 nt, Human
aguaauaaaacaucuuu

SEQ ID NO: 3627157 - RNA, 20 nt, Human
aguaauaccucuaauaguau

SEQ ID NO: 3627158 - RNA, 14 nt, Human
aguaauagagcaaa

SEQ ID NO: 3627159 - RNA, 14 nt, Human
aguaauauaauaca

SEQ ID NO: 3627160 - RNA, 13 nt, Human
aguaauauauucu

SEQ ID NO: 3627161 - RNA, 15 nt, Human
aguaauaugcacaca

SEQ ID NO: 3627162 - RNA, 17 nt, Human
aguaauaugcacacauu

SEQ ID NO: 3627163 - RNA, 19 nt, Human
aguaauaugcacacauuuu

SEQ ID NO: 3627164 - RNA, 12 nt, Human
aguaaucaucua

SEQ ID NO: 3627165 - RNA, 22 nt, Human
aguaaucaucuaagucaguacc

SEQ ID NO: 3627166 - RNA, 21 nt, Human
aguaauccaagcaaaugugaa

SEQ ID NO: 3627167 - RNA, 17 nt, Human
aguaaucccgccaccua

SEQ ID NO: 3627168 - RNA, 17 nt, Human
aguaaucgcuuaaagau

SEQ ID NO: 3627169 - RNA, 20 nt, Human
aguaaucugagaaacaauga

SEQ ID NO: 3627170 - RNA, 19 nt, Human
aguaaucuguacauuuugu

SEQ ID NO: 3627171 - RNA, 23 nt, Human
aguaaucuguacauuuuguugua

SEQ ID NO: 3627172 - RNA, 19 nt, Human
aguaaucuguauaauacuu

SEQ ID NO: 3627173 - RNA, 22 nt, Human
aguaaucuguauaauacuuugu

SEQ ID NO: 3627174 - RNA, 17 nt, Human
aguaaugaguuuaaaaa

SEQ ID NO: 3627175 - RNA, 13 nt, Human
aguaaugauaacu

SEQ ID NO: 3627176 - RNA, 18 nt, Human
aguaaugcauacagaaau

SEQ ID NO: 3627177 - RNA, 17 nt, Human
aguaaugcuacguguga

SEQ ID NO: 3627178 - RNA, 18 nt, Human
aguaaugcuacgugugau

SEQ ID NO: 3627179 - RNA, 15 nt, Human
aguaauggguuucau

SEQ ID NO: 3627180 - RNA, 23 nt, Human
aguaauggguuucauauuucuua

SEQ ID NO: 3627181 - RNA, 23 nt, Human
aguaaugguguagaacacuaauu

SEQ ID NO: 3627182 - RNA, 17 nt, Human
aguaauguuauuuucuu

SEQ ID NO: 3627183 - RNA, 21 nt, Human
aguaauguuauuuucuucuaa

SEQ ID NO: 3627184 - RNA, 17 nt, Human
aguaauucugcugucuc

SEQ ID NO: 3627185 - RNA, 18 nt, Human
aguaauugacaugugcca

SEQ ID NO: 3627186 - RNA, 13 nt, Human
aguaauuggaaag

SEQ ID NO: 3627187 - RNA, 15 nt, Human
aguaauugugaaaaa

SEQ ID NO: 3627188 - RNA, 16 nt, Human
aguaauuguguuuaca

SEQ ID NO: 3627189 - RNA, 18 nt, Human
aguaauuguguuuacauu

SEQ ID NO: 3627190 - RNA, 19 nt, Human
aguaauuguugguuaucuu

SEQ ID NO: 3627191 - RNA, 14 nt, Human
aguaauuuagaaau

SEQ ID NO: 3627192 - RNA, 17 nt, Human
aguaauuuagaaaucau

SEQ ID NO: 3627193 - RNA, 15 nt, Human
aguaauuugaggaca

SEQ ID NO: 3627194 - RNA, 22 nt, Human
aguaauuuggaaauuagguuga

SEQ ID NO: 3627195 - RNA, 23 nt, Human
aguacaaaugccuuaaaauggaa

SEQ ID NO: 3627196 - RNA, 22 nt, Human
aguacaaugugacuuugaaaau

SEQ ID NO: 3627197 - RNA, 15 nt, Human
aguacaauucuuacu

SEQ ID NO: 3627198 - RNA, 21 nt, Human
aguacacaauaagcaaaaaca

SEQ ID NO: 3627199 - RNA, 22 nt, Human
aguacacaauaagcaaaaacaa

SEQ ID NO: 3627200 - RNA, 21 nt, Human
aguacacugaauuuuuaugug

SEQ ID NO: 3627201 - RNA, 17 nt, Human
aguacacugccugccuu

SEQ ID NO: 3627202 - RNA, 19 nt, Human
aguacacugccugccuuaa

SEQ ID NO: 3627203 - RNA, 14 nt, Human
aguacacuguuuca

SEQ ID NO: 3627204 - RNA, 21 nt, Human
aguacacuguuucaaacuuua

SEQ ID NO: 3627205 - RNA, 12 nt, Human
aguacagaauuu

SEQ ID NO: 3627206 - RNA, 17 nt, Human
aguacagaauuugaauu

SEQ ID NO: 3627207 - RNA, 15 nt, Human
aguacagagaagcca

SEQ ID NO: 3627208 - RNA, 15 nt, Human
aguacagcaugugcc

SEQ ID NO: 3627209 - RNA, 20 nt, Human
aguacagguacuuugucuaa

SEQ ID NO: 3627210 - RNA, 18 nt, Human
aguacauauuaggaaaau

SEQ ID NO: 3627211 - RNA, 21 nt, Human
aguacauauuuauuuucuuuu

SEQ ID NO: 3627212 - RNA, 16 nt, Human
aguacauucucaguuu

SEQ ID NO: 3627213 - RNA, 13 nt, Human
aguacauuuaaau

SEQ ID NO: 3627214 - RNA, 16 nt, Human
aguacauuuaaauuuu

SEQ ID NO: 3627215 - RNA, 15 nt, Human
aguacauuuuuugaa

SEQ ID NO: 3627216 - RNA, 18 nt, Human
aguacauuuuuugaaaug

SEQ ID NO: 3627217 - RNA, 21 nt, Human
aguaccagcgcucuaaaagca

SEQ ID NO: 3627218 - RNA, 22 nt, Human
aguaccagcgcucuaaaagcac

SEQ ID NO: 3627219 - RNA, 14 nt, Human
aguaccauuuauac

SEQ ID NO: 3627220 - RNA, 22 nt, Human
aguacccaccaccuucuucucc

SEQ ID NO: 3627221 - RNA, 12 nt, Human
aguacccaccug

SEQ ID NO: 3627222 - RNA, 17 nt, Human
aguacccaccugagcuu

SEQ ID NO: 3627223 - RNA, 22 nt, Human
aguacccaccugagcuuuggac

SEQ ID NO: 3627224 - RNA, 23 nt, Human
aguacccacucuggagcauuucu

SEQ ID NO: 3627225 - RNA, 19 nt, Human
aguacccguucacauuuuu

SEQ ID NO: 3627226 - RNA, 16 nt, Human
aguacccucucagcuc

SEQ ID NO: 3627227 - RNA, 19 nt, Human
aguacccucucagcuccag

SEQ ID NO: 3627228 - RNA, 21 nt, Human
aguaccuauaaaguaaagcua

SEQ ID NO: 3627229 - RNA, 15 nt, Human
aguaccuccugcccc

SEQ ID NO: 3627230 - RNA, 22 nt, Human
aguaccuccugucucuggccug

SEQ ID NO: 3627231 - RNA, 13 nt, Human
aguaccugagggu

SEQ ID NO: 3627232 - RNA, 21 nt, Human
aguaccugagggucuguaggu

SEQ ID NO: 3627233 - RNA, 19 nt, Human
aguaccuggguccccagcc

SEQ ID NO: 3627234 - RNA, 22 nt, Human
aguaccuggguccccagcccuu

SEQ ID NO: 3627235 - RNA, 16 nt, Human
aguaccuucagauccu

SEQ ID NO: 3627236 - RNA, 13 nt, Human
aguaccuugcuuc

SEQ ID NO: 3627237 - RNA, 18 nt, Human
aguaccuuugcucuugca

SEQ ID NO: 3627238 - RNA, 18 nt, Human
aguacgaaccuacaguuu

SEQ ID NO: 3627239 - RNA, 15 nt, Human
aguacguugugcauu

SEQ ID NO: 3627240 - RNA, 16 nt, Human
aguacuaacauuuauu

SEQ ID NO: 3627241 - RNA, 23 nt, Human
aguacuaacuccuaggaaaauac

SEQ ID NO: 3627242 - RNA, 14 nt, Human
aguacuaagcauuu

SEQ ID NO: 3627243 - RNA, 16 nt, Human
aguacuacacauuuuu

SEQ ID NO: 3627244 - RNA, 22 nt, Human
aguacuacacauuuuuaaauug

SEQ ID NO: 3627245 - RNA, 16 nt, Human
aguacuauaucuguuu

SEQ ID NO: 3627246 - RNA, 13 nt, Human
aguacuccacacu

SEQ ID NO: 3627247 - RNA, 20 nt, Human
aguacuccacacugcacaau

SEQ ID NO: 3627248 - RNA, 20 nt, Human
aguacuccugcaaaauuuua

SEQ ID NO: 3627249 - RNA, 17 nt, Human
aguacuccuuaagaaca

SEQ ID NO: 3627250 - RNA, 18 nt, Human
aguacuccuuaagaacac

SEQ ID NO: 3627251 - RNA, 17 nt, Human
aguacugcucuuguuuc

SEQ ID NO: 3627252 - RNA, 15 nt, Human
aguacuggagaaaau

SEQ ID NO: 3627253 - RNA, 15 nt, Human
aguacuggcauggua

SEQ ID NO: 3627254 - RNA, 20 nt, Human
aguacugggauuacaggcgu

SEQ ID NO: 3627255 - RNA, 19 nt, Human
aguacugguaagauuguua

SEQ ID NO: 3627256 - RNA, 20 nt, Human
aguacugguaagauuguuau

SEQ ID NO: 3627257 - RNA, 18 nt, Human
aguacuguaauaauaccu

SEQ ID NO: 3627258 - RNA, 20 nt, Human
aguacuguaauaauaccuca

SEQ ID NO: 3627259 - RNA, 13 nt, Human
aguacugugaauc

SEQ ID NO: 3627260 - RNA, 15 nt, Human
aguacuucagcaaga

SEQ ID NO: 3627261 - RNA, 20 nt, Human
aguacuucuccacccugcuc

SEQ ID NO: 3627262 - RNA, 16 nt, Human
aguacuucuucuguaa

SEQ ID NO: 3627263 - RNA, 17 nt, Human
aguacuucuucuguaau

SEQ ID NO: 3627264 - RNA, 20 nt, Human
aguacuugaguguaauguuu

SEQ ID NO: 3627265 - RNA, 17 nt, Human
agucaccucauggaauu

SEQ ID NO: 3627266 - RNA, 14 nt, Human
agucaccuuccagg

SEQ ID NO: 3627267 - RNA, 13 nt, Human
agucaccuucccu

SEQ ID NO: 3627268 - RNA, 23 nt, Human
agucaccuucccuugccacuuug

SEQ ID NO: 3627269 - RNA, 13 nt, Human
agucaccuuuuaa

SEQ ID NO: 3627270 - RNA, 14 nt, Human
agucaccuuuuaaa

SEQ ID NO: 3627271 - RNA, 21 nt, Human
agucaccuuuuaaauccuguu

SEQ ID NO: 3627272 - RNA, 20 nt, Human
agucacggcugcgcacugug

SEQ ID NO: 3627273 - RNA, 21 nt, Human
agucacguggaggagcagugc

SEQ ID NO: 3627274 - RNA, 16 nt, Human
agucacuaaaaggaag

SEQ ID NO: 3627275 - RNA, 21 nt, Human
agucacuaugggaugagaaaa

SEQ ID NO: 3627276 - RNA, 22 nt, Human
agucacuaugggaugagaaaau

SEQ ID NO: 3627277 - RNA, 22 nt, Human
agucacucuagucaaugacaug

SEQ ID NO: 3627278 - RNA, 18 nt, Human
agucacugagacagcccg

SEQ ID NO: 3627279 - RNA, 20 nt, Human
agucacugcacguuuucauc

SEQ ID NO: 3627280 - RNA, 17 nt, Human
agucacugccacuuugc

SEQ ID NO: 3627281 - RNA, 19 nt, Human
agucacugccacuuugcac

SEQ ID NO: 3627282 - RNA, 11 nt, Human
agucacugccu

SEQ ID NO: 3627283 - RNA, 21 nt, Human
agucacugccucucccuggcc

SEQ ID NO: 3627284 - RNA, 10 nt, Human
agucacuguc

SEQ ID NO: 3627285 - RNA, 24 nt, Human
agucacugugagcucccaggugca

SEQ ID NO: 3627286 - RNA, 20 nt, Human
agucacuucggccagagcug

SEQ ID NO: 3627287 - RNA, 14 nt, Human
agucagaacagcag

SEQ ID NO: 3627288 - RNA, 13 nt, Human
agucagagacaga

SEQ ID NO: 3627289 - RNA, 14 nt, Human
agucagagagaauc

SEQ ID NO: 3627290 - RNA, 17 nt, Human
agucagagagaguguuu

SEQ ID NO: 3627291 - RNA, 20 nt, Human
agucagaggauggccagugu

SEQ ID NO: 3627292 - RNA, 22 nt, Human
agucagaggauggccagugucu

SEQ ID NO: 3627293 - RNA, 17 nt, Human
agucagaucugccuaag

SEQ ID NO: 3627294 - RNA, 14 nt, Human
agucagaugcccag

SEQ ID NO: 3627295 - RNA, 23 nt, Human
agucagaugcccagagggcccag

SEQ ID NO: 3627296 - RNA, 21 nt, Human
agucagauguuugagcagugg

SEQ ID NO: 3627297 - RNA, 18 nt, Human
agucagccaggagcuguc

SEQ ID NO: 3627298 - RNA, 23 nt, Human
agucagccucgcaggccucccug

SEQ ID NO: 3627299 - RNA, 15 nt, Human
agucagccucucucc

SEQ ID NO: 3627300 - RNA, 17 nt, Human
agucagccucucuccca

SEQ ID NO: 3627301 - RNA, 18 nt, Human
agucagccucucucccag

SEQ ID NO: 3627302 - RNA, 21 nt, Human
agucagccucucucccagucu

SEQ ID NO: 3627303 - RNA, 22 nt, Human
agucagccuucccccucccagg

SEQ ID NO: 3627304 - RNA, 13 nt, Human
agucagcucucug

SEQ ID NO: 3627305 - RNA, 17 nt, Human
agucagcucucugcccu

SEQ ID NO: 3627306 - RNA, 22 nt, Human
agucagcuuugccuuccacgcu

SEQ ID NO: 3627307 - RNA, 14 nt, Human
agucaggaaagaga

SEQ ID NO: 3627308 - RNA, 16 nt, Human
agucaggaaagagaac

SEQ ID NO: 3627309 - RNA, 15 nt, Human
agucagggcccagag

SEQ ID NO: 3627310 - RNA, 15 nt, Human
agucaguauuguuuu

SEQ ID NO: 3627311 - RNA, 21 nt, Human
agucagucauucagauaugau

SEQ ID NO: 3627312 - RNA, 16 nt, Human
agucagugccaggucc

SEQ ID NO: 3627313 - RNA, 15 nt, Human
agucaguguugagau

SEQ ID NO: 3627314 - RNA, 16 nt, Human
agucaguguugagaug

SEQ ID NO: 3627315 - RNA, 16 nt, Human
agucaguugaaauucu

SEQ ID NO: 3627316 - RNA, 23 nt, Human
agucaguugcucaaaaagaaauc

SEQ ID NO: 3627317 - RNA, 14 nt, Human
agucaguuucuaca

SEQ ID NO: 3627318 - RNA, 14 nt, Human
agucauaaaccuua

SEQ ID NO: 3627319 - RNA, 20 nt, Human
agucauaaaccuuaaguaag

SEQ ID NO: 3627320 - RNA, 21 nt, Human
agucauaaucauuagggggaa

SEQ ID NO: 3627321 - RNA, 17 nt, Human
agucauaauugcauuga

SEQ ID NO: 3627322 - RNA, 14 nt, Human
agucauaccaauga

SEQ ID NO: 3627323 - RNA, 23 nt, Human
agucauaccaaugaaaaaaugua

SEQ ID NO: 3627324 - RNA, 23 nt, Human
agucauaucuuaauauauuucua

SEQ ID NO: 3627325 - RNA, 20 nt, Human
agucauauuuugauuauugu

SEQ ID NO: 3627326 - RNA, 15 nt, Human
agucaucaucagggc

SEQ ID NO: 3627327 - RNA, 16 nt, Human
agucaucaucagggcc

SEQ ID NO: 3627328 - RNA, 18 nt, Human
agucaucguaggugauuu

SEQ ID NO: 3627329 - RNA, 14 nt, Human
agucaucucaacca

SEQ ID NO: 3627330 - RNA, 19 nt, Human
agucaucuccaucagcugu

SEQ ID NO: 3627331 - RNA, 19 nt, Human
agucaucuguuagggccuu

SEQ ID NO: 3627332 - RNA, 20 nt, Human
agucaucuugaccaagcagg

SEQ ID NO: 3627333 - RNA, 13 nt, Human
agucaugaagccc

SEQ ID NO: 3627334 - RNA, 19 nt, Human
agucaugaucucccugccg

SEQ ID NO: 3627335 - RNA, 23 nt, Human
agucaugaucucccugccgccuc

SEQ ID NO: 3627336 - RNA, 13 nt, Human
agucaugauguuu

SEQ ID NO: 3627337 - RNA, 14 nt, Human
agucaugauguuuu

SEQ ID NO: 3627338 - RNA, 18 nt, Human
agucaugauguuuuuaaa

SEQ ID NO: 3627339 - RNA, 19 nt, Human
agucaugcaaaggcuggga

SEQ ID NO: 3627340 - RNA, 19 nt, Human
agucaugcauaaauaugca

SEQ ID NO: 3627341 - RNA, 20 nt, Human
agucaugcauaaauaugcag

SEQ ID NO: 3627342 - RNA, 22 nt, Human
agucaugcauaaauaugcagug

SEQ ID NO: 3627343 - RNA, 18 nt, Human
agucaugcuccccugugc

SEQ ID NO: 3627344 - RNA, 15 nt, Human
agucauguaaauacu

SEQ ID NO: 3627345 - RNA, 15 nt, Human
agucauguauguuuc

SEQ ID NO: 3627346 - RNA, 22 nt, Human
agucauguauguuucucuuuga

SEQ ID NO: 3627347 - RNA, 13 nt, Human
agucauguuccuu

SEQ ID NO: 3627348 - RNA, 19 nt, Human
agucauguuuaucugcuua

SEQ ID NO: 3627349 - RNA, 14 nt, Human
agucauuaaagaca

SEQ ID NO: 3627350 - RNA, 17 nt, Human
agucauuaaauuacuau

SEQ ID NO: 3627351 - RNA, 23 nt, Human
agucauuaaauuacuauagcaaa

SEQ ID NO: 3627352 - RNA, 20 nt, Human
agucauuagacuccuccucc

SEQ ID NO: 3627353 - RNA, 19 nt, Human
agucauuauagauccccca

SEQ ID NO: 3627354 - RNA, 23 nt, Human
agucauuauagaucccccagacu

SEQ ID NO: 3627355 - RNA, 20 nt, Human
agucauuauccuugcuauga

SEQ ID NO: 3627356 - RNA, 12 nt, Human
agucauuauguu

SEQ ID NO: 3627357 - RNA, 20 nt, Human
agucauucagauaugauuca

SEQ ID NO: 3627358 - RNA, 22 nt, Human
agucauucagcagcaaauuuuc

SEQ ID NO: 3627359 - RNA, 23 nt, Human
agucauucagcagcaaauuuuca

SEQ ID NO: 3627360 - RNA, 16 nt, Human
agucauugcuguagga

SEQ ID NO: 3627361 - RNA, 15 nt, Human
agucauuggcuuuau

SEQ ID NO: 3627362 - RNA, 15 nt, Human
agucauuguaauguu

SEQ ID NO: 3627363 - RNA, 17 nt, Human
agucauuuaacugaaga

SEQ ID NO: 3627364 - RNA, 18 nt, Human
agucauuuacuaaacaua

SEQ ID NO: 3627365 - RNA, 19 nt, Human
agucauuuacuaaacauau

SEQ ID NO: 3627366 - RNA, 13 nt, Human
agucauuucugau

SEQ ID NO: 3627367 - RNA, 18 nt, Human
agucauuugagucucuua

SEQ ID NO: 3627368 - RNA, 22 nt, Human
agucauuugcugagcauguacu

SEQ ID NO: 3627369 - RNA, 16 nt, Human
agucauuuuguguuga

SEQ ID NO: 3627370 - RNA, 14 nt, Human
agucauuuuuguuu

SEQ ID NO: 3627371 - RNA, 19 nt, Human
aguccaaauguuuacaggg

SEQ ID NO: 3627372 - RNA, 19 nt, Human
aguccaacguggggcagca

SEQ ID NO: 3627373 - RNA, 11 nt, Human
aguccaagcau

SEQ ID NO: 3627374 - RNA, 16 nt, Human
aguccaagcauuuaga

SEQ ID NO: 3627375 - RNA, 11 nt, Human
aguccaagcug

SEQ ID NO: 3627376 - RNA, 21 nt, Human
aguccaagggguccccuccag

SEQ ID NO: 3627377 - RNA, 18 nt, Human
aguccaaugucuuuuuaa

SEQ ID NO: 3627378 - RNA, 19 nt, Human
aguccaauuuuaauuuagu

SEQ ID NO: 3627379 - RNA, 16 nt, Human
aguccacaguggaacc

SEQ ID NO: 3627380 - RNA, 17 nt, Human
aguccacccugccugcc

SEQ ID NO: 3627381 - RNA, 19 nt, Human
aguccacccugccugccgu

SEQ ID NO: 3627382 - RNA, 20 nt, Human
aguccacuucugacagccuc

SEQ ID NO: 3627383 - RNA, 13 nt, Human
aguccaggcacag

SEQ ID NO: 3627384 - RNA, 19 nt, Human
aguccaggccauggaggca

SEQ ID NO: 3627385 - RNA, 13 nt, Human
aguccaggcccca

SEQ ID NO: 3627386 - RNA, 18 nt, Human
aguccaggcugccguggg

SEQ ID NO: 3627387 - RNA, 15 nt, Human
aguccagguccuggu

SEQ ID NO: 3627388 - RNA, 16 nt, Human
aguccagguccuggug

SEQ ID NO: 3627389 - RNA, 17 nt, Human
aguccaggucgggcuca

SEQ ID NO: 3627390 - RNA, 18 nt, Human
aguccaggucgggcucag

SEQ ID NO: 3627391 - RNA, 22 nt, Human
aguccaggucgggcucagcucu

SEQ ID NO: 3627392 - RNA, 17 nt, Human
aguccaguccuaucugg

SEQ ID NO: 3627393 - RNA, 14 nt, Human
aguccaucagccuc

SEQ ID NO: 3627394 - RNA, 22 nt, Human
aguccaugcaugacagccucua

SEQ ID NO: 3627395 - RNA, 14 nt, Human
aguccauucuccca

SEQ ID NO: 3627396 - RNA, 16 nt, Human
aguccauucucccagg

SEQ ID NO: 3627397 - RNA, 17 nt, Human
aguccauucucccaggu

SEQ ID NO: 3627398 - RNA, 19 nt, Human
aguccauucucccagguac

SEQ ID NO: 3627399 - RNA, 19 nt, Human
agucccaagcggugucucu

SEQ ID NO: 3627400 - RNA, 20 nt, Human
agucccaaggaaagccccag

SEQ ID NO: 3627401 - RNA, 20 nt, Human
agucccaccuuggcugcagg

SEQ ID NO: 3627402 - RNA, 23 nt, Human
agucccaccuuggcugcagggag

SEQ ID NO: 3627403 - RNA, 14 nt, Human
agucccacuccaag

SEQ ID NO: 3627404 - RNA, 17 nt, Human
agucccacugccucagg

SEQ ID NO: 3627405 - RNA, 13 nt, Human
agucccacugugc

SEQ ID NO: 3627406 - RNA, 23 nt, Human
agucccagagcaggaggccccug

SEQ ID NO: 3627407 - RNA, 19 nt, Human
agucccagcuacucaggag

SEQ ID NO: 3627408 - RNA, 19 nt, Human
agucccagcuacucgggag

SEQ ID NO: 3627409 - RNA, 14 nt, Human
auaaaacuaggaau

SEQ ID NO: 3627410 - RNA, 16 nt, Human
auaaaacugaugugaa

SEQ ID NO: 3627411 - RNA, 19 nt, Human
auaaaacugaugugaaacu

SEQ ID NO: 3627412 - RNA, 17 nt, Human
auaaaacuuugcugcca

SEQ ID NO: 3627413 - RNA, 14 nt, Human
auaaaagaaaauua

SEQ ID NO: 3627414 - RNA, 18 nt, Human
auaaaagaaaugcacaau

SEQ ID NO: 3627415 - RNA, 15 nt, Human
auaaaagauucaccu

SEQ ID NO: 3627416 - RNA, 17 nt, Human
auaaaagcaauuccaac

SEQ ID NO: 3627417 - RNA, 20 nt, Human
auaaaagcaauuccaaccuu

SEQ ID NO: 3627418 - RNA, 20 nt, Human
auaaaagcauaaaugcaaac

SEQ ID NO: 3627419 - RNA, 13 nt, Human
auaaaagcccagg

SEQ ID NO: 3627420 - RNA, 15 nt, Human
auaaaagcccaggag

SEQ ID NO: 3627421 - RNA, 18 nt, Human
auaaaagccuguuuaaga

SEQ ID NO: 3627422 - RNA, 20 nt, Human
auaaaagccuguuuaagaga

SEQ ID NO: 3627423 - RNA, 15 nt, Human
auaaaaggaagccaa

SEQ ID NO: 3627424 - RNA, 17 nt, Human
auaaaaggaagccaaag

SEQ ID NO: 3627425 - RNA, 20 nt, Human
auaaaaggcuugaagcugug

SEQ ID NO: 3627426 - RNA, 22 nt, Human
auaaaagggacugagaaauuua

SEQ ID NO: 3627427 - RNA, 20 nt, Human
auaaaaggggguccguggaa

SEQ ID NO: 3627428 - RNA, 18 nt, Human
auaaaagugaucaauaaa

SEQ ID NO: 3627429 - RNA, 16 nt, Human
auaaaaguugcaaagg

SEQ ID NO: 3627430 - RNA, 15 nt, Human
auaaaauaaauauau

SEQ ID NO: 3627431 - RNA, 21 nt, Human
auaaaauaaauauauauaaac

SEQ ID NO: 3627432 - RNA, 13 nt, Human
auaaaauaacuaa

SEQ ID NO: 3627433 - RNA, 18 nt, Human
auaaaauaacuaaaaugu

SEQ ID NO: 3627434 - RNA, 13 nt, Human
auaaaauaaugca

SEQ ID NO: 3627435 - RNA, 23 nt, Human
auaaaauaaugggauuuucuuuu

SEQ ID NO: 3627436 - RNA, 12 nt, Human
auaaaauaauuu

SEQ ID NO: 3627437 - RNA, 16 nt, Human
auaaaauacuauuuuu

SEQ ID NO: 3627438 - RNA, 19 nt, Human
auaaaauacuauuuuuacu

SEQ ID NO: 3627439 - RNA, 17 nt, Human
auaaaauauaucuuaua

SEQ ID NO: 3627440 - RNA, 16 nt, Human
auaaaauauuauugaa

SEQ ID NO: 3627441 - RNA, 18 nt, Human
auaaaauauuuucugugu

SEQ ID NO: 3627442 - RNA, 21 nt, Human
auaaaauauuuucuguguguu

SEQ ID NO: 3627443 - RNA, 22 nt, Human
auaaaauauuuucuguguguuc

SEQ ID NO: 3627444 - RNA, 11 nt, Human
auaaaaucagc

SEQ ID NO: 3627445 - RNA, 15 nt, Human
auaaaaucagccaau

SEQ ID NO: 3627446 - RNA, 22 nt, Human
auaaaaucagccaauuauguua

SEQ ID NO: 3627447 - RNA, 19 nt, Human
auaaaaucauaaguauuug

SEQ ID NO: 3627448 - RNA, 20 nt, Human
auaaaaucauguacauuucu

SEQ ID NO: 3627449 - RNA, 19 nt, Human
auaaaauccauacauuugu

SEQ ID NO: 3627450 - RNA, 17 nt, Human
auaaaaugaaaauugua

SEQ ID NO: 3627451 - RNA, 13 nt, Human
auaaaaugaccag

SEQ ID NO: 3627452 - RNA, 15 nt, Human
auaaaaugaccagua

SEQ ID NO: 3627453 - RNA, 12 nt, Human
auaaaaugacua

SEQ ID NO: 3627454 - RNA, 15 nt, Human
auaaaaugacuacuu

SEQ ID NO: 3627455 - RNA, 16 nt, Human
auaaaaugacuacuua

SEQ ID NO: 3627456 - RNA, 18 nt, Human
auaaaaugaggacauguu

SEQ ID NO: 3627457 - RNA, 21 nt, Human
auaaaaugguguuuucaugua

SEQ ID NO: 3627458 - RNA, 21 nt, Human
auaaaauguccaguaagauca

SEQ ID NO: 3627459 - RNA, 23 nt, Human
auaaaauguccaguaagaucacu

SEQ ID NO: 3627460 - RNA, 20 nt, Human
auaaaaugucuucaaggcuu

SEQ ID NO: 3627461 - RNA, 20 nt, Human
auaaaaugugauuuuucuga

SEQ ID NO: 3627462 - RNA, 13 nt, Human
auaaaauguugaa

SEQ ID NO: 3627463 - RNA, 21 nt, Human
auaaaauuauagaugggaaug

SEQ ID NO: 3627464 - RNA, 21 nt, Human
auaaaauuauagcucuaaugu

SEQ ID NO: 3627465 - RNA, 18 nt, Human
auaaaauucccuaaagcc

SEQ ID NO: 3627466 - RNA, 21 nt, Human
auaaaauuguaaaauuguaua

SEQ ID NO: 3627467 - RNA, 13 nt, Human
auaaaauuuguug

SEQ ID NO: 3627468 - RNA, 17 nt, Human
auaaaauuuuuuuucau

SEQ ID NO: 3627469 - RNA, 19 nt, Human
auaaaauuuuuuuucaugu

SEQ ID NO: 3627470 - RNA, 23 nt, Human
auaaaauuuuuuuucauguuuua

SEQ ID NO: 3627471 - RNA, 19 nt, Human
auaaacaacuuaauguucu

SEQ ID NO: 3627472 - RNA, 13 nt, Human
auaaacaagaaaa

SEQ ID NO: 3627473 - RNA, 20 nt, Human
auaaacaagaaaaauaaaga

SEQ ID NO: 3627474 - RNA, 23 nt, Human
auaaacaagaccacguuucuaaa

SEQ ID NO: 3627475 - RNA, 13 nt, Human
auaaacaaugaaa

SEQ ID NO: 3627476 - RNA, 14 nt, Human
auaaacaaugaugc

SEQ ID NO: 3627477 - RNA, 18 nt, Human
auaaacaaugaugcccug

SEQ ID NO: 3627478 - RNA, 23 nt, Human
auaaacacagcugcuuucuucuu

SEQ ID NO: 3627479 - RNA, 23 nt, Human
auaaacacauagauucaccugua

SEQ ID NO: 3627480 - RNA, 18 nt, Human
auaaacaccacuggauua

SEQ ID NO: 3627481 - RNA, 20 nt, Human
auaaacaccacuggauuaau

SEQ ID NO: 3627482 - RNA, 23 nt, Human
auaaacacucuugaaaaaugcau

SEQ ID NO: 3627483 - RNA, 22 nt, Human
auaaacaguggaauauaaggaa

SEQ ID NO: 3627484 - RNA, 22 nt, Human
auaaacauacgugugcaugugu

SEQ ID NO: 3627485 - RNA, 15 nt, Human
auaaacauuaaaugu

SEQ ID NO: 3627486 - RNA, 22 nt, Human
auaaacauuuguagcauccucu

SEQ ID NO: 3627487 - RNA, 16 nt, Human
auaaaccaaaggacau

SEQ ID NO: 3627488 - RNA, 21 nt, Human
auaaaccaaaggacauuaugu

SEQ ID NO: 3627489 - RNA, 15 nt, Human
auaaaccacugugcg

SEQ ID NO: 3627490 - RNA, 23 nt, Human
auaaaccccaccccaaaauuagc

SEQ ID NO: 3627491 - RNA, 16 nt, Human
auaaaccgaacugaug

SEQ ID NO: 3627492 - RNA, 17 nt, Human
auaaaccuaaaaaagau

SEQ ID NO: 3627493 - RNA, 22 nt, Human
auaaaccucuaauuuauuuugu

SEQ ID NO: 3627494 - RNA, 16 nt, Human
auaaaccuuaaguaag

SEQ ID NO: 3627495 - RNA, 19 nt, Human
auaaacgauuuaauucucu

SEQ ID NO: 3627496 - RNA, 22 nt, Human
auaaacguggagaaucacaggc

SEQ ID NO: 3627497 - RNA, 18 nt, Human
auaaacguggauguuacu

SEQ ID NO: 3627498 - RNA, 12 nt, Human
auaaacuaaaga

SEQ ID NO: 3627499 - RNA, 15 nt, Human
auaaacuaauaauug

SEQ ID NO: 3627500 - RNA, 19 nt, Human
auaaacuagauuacauuca

SEQ ID NO: 3627501 - RNA, 16 nt, Human
auaaacuauaaaacaa

SEQ ID NO: 3627502 - RNA, 18 nt, Human
auaaacuauuggaaagua

SEQ ID NO: 3627503 - RNA, 15 nt, Human
auaaacucauuucua

SEQ ID NO: 3627504 - RNA, 22 nt, Human
auaaacugacuaucauaaaauc

SEQ ID NO: 3627505 - RNA, 16 nt, Human
auaaacuguguuuacu

SEQ ID NO: 3627506 - RNA, 13 nt, Human
auaaacuucagca

SEQ ID NO: 3627507 - RNA, 17 nt, Human
auaaacuuggauucucu

SEQ ID NO: 3627508 - RNA, 15 nt, Human
auaaacuuuaccuuu

SEQ ID NO: 3627509 - RNA, 18 nt, Human
auaaacuuuuagaaacuu

SEQ ID NO: 3627510 - RNA, 15 nt, Human
auaaacuuuuuuuca

SEQ ID NO: 3627511 - RNA, 20 nt, Human
auaaacuuuuuuucaaugug

SEQ ID NO: 3627512 - RNA, 15 nt, Human
auaaagaaaagaugc

SEQ ID NO: 3627513 - RNA, 21 nt, Human
auaaagaacaagguaguuuuu

SEQ ID NO: 3627514 - RNA, 14 nt, Human
auaaagaagauguu

SEQ ID NO: 3627515 - RNA, 13 nt, Human
auaaagaauacuu

SEQ ID NO: 3627516 - RNA, 15 nt, Human
auaaagaauauauau

SEQ ID NO: 3627517 - RNA, 12 nt, Human
auaaagacaccu

SEQ ID NO: 3627518 - RNA, 16 nt, Human
auaaagacccaggggg

SEQ ID NO: 3627519 - RNA, 20 nt, Human
auaaagacguuuuauaagca

SEQ ID NO: 3627520 - RNA, 21 nt, Human
auaaagacguuuuauaagcau

SEQ ID NO: 3627521 - RNA, 13 nt, Human
auaaagagaaaau

SEQ ID NO: 3627522 - RNA, 17 nt, Human
auaaagagaaaauugaa

SEQ ID NO: 3627523 - RNA, 16 nt, Human
auaaagauauuguuca

SEQ ID NO: 3627524 - RNA, 14 nt, Human
auaaagaugaucua

SEQ ID NO: 3627525 - RNA, 14 nt, Human
auaaagaugcucuu

SEQ ID NO: 3627526 - RNA, 18 nt, Human
auaaagauggcugacuuu

SEQ ID NO: 3627527 - RNA, 13 nt, Human
auaaagauuuuuu

SEQ ID NO: 3627528 - RNA, 16 nt, Human
auaaagauuuuuuaau

SEQ ID NO: 3627529 - RNA, 19 nt, Human
auaaagcaauaagaacaaa

SEQ ID NO: 3627530 - RNA, 11 nt, Human
auaaagcaauu

SEQ ID NO: 3627531 - RNA, 15 nt, Human
auaaagcaauuuucc

SEQ ID NO: 3627532 - RNA, 20 nt, Human
auaaagcaauuuuccuugaa

SEQ ID NO: 3627533 - RNA, 23 nt, Human
auaaagcaauuuuccuugaagcc

SEQ ID NO: 3627534 - RNA, 17 nt, Human
auaaagcagacaggugu

SEQ ID NO: 3627535 - RNA, 14 nt, Human
auaaagcauaagua

SEQ ID NO: 3627536 - RNA, 20 nt, Human
auaaagcauaaguauacagu

SEQ ID NO: 3627537 - RNA, 15 nt, Human
auaaagcaucuaaac

SEQ ID NO: 3627538 - RNA, 14 nt, Human
auaaagcccuggga

SEQ ID NO: 3627539 - RNA, 14 nt, Human
auaaagccugcuuu

SEQ ID NO: 3627540 - RNA, 22 nt, Human
auaaagcucaaaugaaauguau

SEQ ID NO: 3627541 - RNA, 15 nt, Human
auaaaggaaaagaca

SEQ ID NO: 3627542 - RNA, 16 nt, Human
auaaaggaaaagacac

SEQ ID NO: 3627543 - RNA, 14 nt, Human
auaaaggauaaaga

SEQ ID NO: 3627544 - RNA, 14 nt, Human
auaaaggaugugau

SEQ ID NO: 3627545 - RNA, 22 nt, Human
auaaaggaugugauuguggaau

SEQ ID NO: 3627546 - RNA, 15 nt, Human
auaaagguaaaacaa

SEQ ID NO: 3627547 - RNA, 19 nt, Human
auaaaggugguaugugugu

SEQ ID NO: 3627548 - RNA, 21 nt, Human
auaaaggugguaugugugugu

SEQ ID NO: 3627549 - RNA, 19 nt, Human
auaaaggugugcugugucc

SEQ ID NO: 3627550 - RNA, 19 nt, Human
auaaagguuauuuucuccu

SEQ ID NO: 3627551 - RNA, 17 nt, Human
auaaagguucaugcaaa

SEQ ID NO: 3627552 - RNA, 14 nt, Human
auaaaguaaagcua

SEQ ID NO: 3627553 - RNA, 22 nt, Human
auaaguuaacuauuuuauuuuc

SEQ ID NO: 3627554 - RNA, 17 nt, Human
auaaguuaacuuccaau

SEQ ID NO: 3627555 - RNA, 13 nt, Human
auaaguuauugca

SEQ ID NO: 3627556 - RNA, 20 nt, Human
auaaguuauugcaguuuauc

SEQ ID NO: 3627557 - RNA, 18 nt, Human
auaaguuauuuuuguaca

SEQ ID NO: 3627558 - RNA, 20 nt, Human
auaaguucaaauucuucuga

SEQ ID NO: 3627559 - RNA, 21 nt, Human
auaaguucaaauucuucugaa

SEQ ID NO: 3627560 - RNA, 15 nt, Human
auaaguucacaaaau

SEQ ID NO: 3627561 - RNA, 11 nt, Human
auaaguucaua

SEQ ID NO: 3627562 - RNA, 23 nt, Human
auaaguucuaguugcuuguaaaa

SEQ ID NO: 3627563 - RNA, 16 nt, Human
auaaguuggaaacacu

SEQ ID NO: 3627564 - RNA, 21 nt, Human
auaaguuggaaacacuaaaug

SEQ ID NO: 3627565 - RNA, 22 nt, Human
auaaguuggaaacacuaaaugu

SEQ ID NO: 3627566 - RNA, 18 nt, Human
auaaguuuauuucuuaaa

SEQ ID NO: 3627567 - RNA, 18 nt, Human
auaaguuucuuugcuuca

SEQ ID NO: 3627568 - RNA, 21 nt, Human
auaaguuugaaggaaacaguu

SEQ ID NO: 3627569 - RNA, 18 nt, Human
auaaguuugcaauuuggg

SEQ ID NO: 3627570 - RNA, 13 nt, Human
auaauaaaaauau

SEQ ID NO: 3627571 - RNA, 12 nt, Human
auaauaaaauca

SEQ ID NO: 3627572 - RNA, 13 nt, Human
auaauaaaauuau

SEQ ID NO: 3627573 - RNA, 20 nt, Human
auaauaaacaguggaauaua

SEQ ID NO: 3627574 - RNA, 19 nt, Human
auaauaaacuuuuuugaaa

SEQ ID NO: 3627575 - RNA, 14 nt, Human
auaauaaagaauag

SEQ ID NO: 3627576 - RNA, 18 nt, Human
auaauaaaggacuguaau

SEQ ID NO: 3627577 - RNA, 13 nt, Human
auaauaaaguauu

SEQ ID NO: 3627578 - RNA, 11 nt, Human
auaauaaauag

SEQ ID NO: 3627579 - RNA, 12 nt, Human
auaauaaauuga

SEQ ID NO: 3627580 - RNA, 15 nt, Human
auaauaaauugaaau

SEQ ID NO: 3627581 - RNA, 23 nt, Human
auaauaaauuguuuggcuuccuc

SEQ ID NO: 3627582 - RNA, 16 nt, Human
auaauaaggaaaaguu

SEQ ID NO: 3627583 - RNA, 19 nt, Human
auaauaaggaaaaguuuaa

SEQ ID NO: 3627584 - RNA, 19 nt, Human
auaauaaucuaggcaugaa

SEQ ID NO: 3627585 - RNA, 22 nt, Human
auaauaauuagguuaacauugu

SEQ ID NO: 3627586 - RNA, 14 nt, Human
auaauaauuuuuau

SEQ ID NO: 3627587 - RNA, 12 nt, Human
auaauacaaaag

SEQ ID NO: 3627588 - RNA, 17 nt, Human
auaauacacaaaaucaa

SEQ ID NO: 3627589 - RNA, 21 nt, Human
auaauacagaaucuuguuuug

SEQ ID NO: 3627590 - RNA, 21 nt, Human
auaauacagccaaagauaauc

SEQ ID NO: 3627591 - RNA, 16 nt, Human
auaauaccucaauguu

SEQ ID NO: 3627592 - RNA, 19 nt, Human
auaauaccucaauguuuga

SEQ ID NO: 3627593 - RNA, 17 nt, Human
auaauacucuguuguac

SEQ ID NO: 3627594 - RNA, 13 nt, Human
auaauacugaacc

SEQ ID NO: 3627595 - RNA, 14 nt, Human
auaauacugaacca

SEQ ID NO: 3627596 - RNA, 16 nt, Human
auaauacugaaccacu

SEQ ID NO: 3627597 - RNA, 12 nt, Human
auaauagaaaug

SEQ ID NO: 3627598 - RNA, 13 nt, Human
auaauagaaaugu

SEQ ID NO: 3627599 - RNA, 15 nt, Human
auaauagaaaugucu

SEQ ID NO: 3627600 - RNA, 12 nt, Human
auaauagaagaa

SEQ ID NO: 3627601 - RNA, 13 nt, Human
auaauagaagaac

SEQ ID NO: 3627602 - RNA, 20 nt, Human
auaauaguuuacauguagua

SEQ ID NO: 3627603 - RNA, 14 nt, Human
auaauauacuugug

SEQ ID NO: 3627604 - RNA, 21 nt, Human
auaauauauauauauaucagu

SEQ ID NO: 3627605 - RNA, 22 nt, Human
auaauauauguuuaccuuuuaa

SEQ ID NO: 3627606 - RNA, 17 nt, Human
auaauauauuguguuga

SEQ ID NO: 3627607 - RNA, 14 nt, Human
auaauauauuugug

SEQ ID NO: 3627608 - RNA, 19 nt, Human
auaauauauuuuaaauauu

SEQ ID NO: 3627609 - RNA, 21 nt, Human
auaauauccaggucaacagaa

SEQ ID NO: 3627610 - RNA, 14 nt, Human
auaauaucuaaagu

SEQ ID NO: 3627611 - RNA, 17 nt, Human
auaauaucuaaaguuau

SEQ ID NO: 3627612 - RNA, 18 nt, Human
auaauaucuaaaguuaua

SEQ ID NO: 3627613 - RNA, 16 nt, Human
auaauaucucuaauau

SEQ ID NO: 3627614 - RNA, 22 nt, Human
auaauauggcuaugcuuaaaag

SEQ ID NO: 3627615 - RNA, 23 nt, Human
auaauauggcuaugcuuaaaagg

SEQ ID NO: 3627616 - RNA, 18 nt, Human
auaauauguuuccuuccc

SEQ ID NO: 3627617 - RNA, 14 nt, Human
auaauauuacuguu

SEQ ID NO: 3627618 - RNA, 18 nt, Human
auaauauugaaaauugaa

SEQ ID NO: 3627619 - RNA, 19 nt, Human
auaauauugaaaauugaaa

SEQ ID NO: 3627620 - RNA, 22 nt, Human
auaauauuguuguauaauuucg

SEQ ID NO: 3627621 - RNA, 16 nt, Human
auaauauuguuuggua

SEQ ID NO: 3627622 - RNA, 16 nt, Human
auaauauuguuuuucu

SEQ ID NO: 3627623 - RNA, 20 nt, Human
auaauauuuuuaauuaaaua

SEQ ID NO: 3627624 - RNA, 17 nt, Human
auaaucaagagccuuaa

SEQ ID NO: 3627625 - RNA, 19 nt, Human
auaaucacuuuuuuccaca

SEQ ID NO: 3627626 - RNA, 19 nt, Human
auaaucagaauggaagaga

SEQ ID NO: 3627627 - RNA, 20 nt, Human
auaaucagugugucuaaauu

SEQ ID NO: 3627628 - RNA, 17 nt, Human
auaaucccagcacuuug

SEQ ID NO: 3627629 - RNA, 15 nt, Human
auaauccugcaaagu

SEQ ID NO: 3627630 - RNA, 14 nt, Human
auaaucuaguuuac

SEQ ID NO: 3627631 - RNA, 15 nt, Human
auaaucuauaugcug

SEQ ID NO: 3627632 - RNA, 21 nt, Human
auaaucuauuucuaugagaaa

SEQ ID NO: 3627633 - RNA, 18 nt, Human
auaaucucuccauucccg

SEQ ID NO: 3627634 - RNA, 14 nt, Human
auaaucucugauuc

SEQ ID NO: 3627635 - RNA, 17 nt, Human
auaaucugucaaaacac

SEQ ID NO: 3627636 - RNA, 15 nt, Human
auaaucuuauuaggg

SEQ ID NO: 3627637 - RNA, 23 nt, Human
auaaucuuauuagggagaaaauu

SEQ ID NO: 3627638 - RNA, 14 nt, Human
auaaucuucugccu

SEQ ID NO: 3627639 - RNA, 15 nt, Human
auaaucuucugccuu

SEQ ID NO: 3627640 - RNA, 17 nt, Human
auaaucuucugccuucu

SEQ ID NO: 3627641 - RNA, 14 nt, Human
auaaucuuucacag

SEQ ID NO: 3627642 - RNA, 13 nt, Human
auaaucuuugggu

SEQ ID NO: 3627643 - RNA, 13 nt, Human
auaaugaacccau

SEQ ID NO: 3627644 - RNA, 13 nt, Human
auaaugaauaaau

SEQ ID NO: 3627645 - RNA, 18 nt, Human
auaaugaggaguuuauga

SEQ ID NO: 3627646 - RNA, 18 nt, Human
auaaugcauccagcagua

SEQ ID NO: 3627647 - RNA, 17 nt, Human
auaaugccggugagaau

SEQ ID NO: 3627648 - RNA, 21 nt, Human
auaauggaaaaaaaaaaaaga

SEQ ID NO: 3627649 - RNA, 16 nt, Human
auaauggaagagaaau

SEQ ID NO: 3627650 - RNA, 20 nt, Human
auaauggaagagaaaucuca

SEQ ID NO: 3627651 - RNA, 20 nt, Human
auaauggacagauuaauauu

SEQ ID NO: 3627652 - RNA, 19 nt, Human
auaaugggguccuggccau

SEQ ID NO: 3627653 - RNA, 15 nt, Human
auaaugguaccagau

SEQ ID NO: 3627654 - RNA, 18 nt, Human
auaaugguaccagauaaa

SEQ ID NO: 3627655 - RNA, 13 nt, Human
auaauggucagag

SEQ ID NO: 3627656 - RNA, 19 nt, Human
auaauguaaacaauaucag

SEQ ID NO: 3627657 - RNA, 15 nt, Human
auaauguaaauaaag

SEQ ID NO: 3627658 - RNA, 14 nt, Human
auaauguaauugua

SEQ ID NO: 3627659 - RNA, 15 nt, Human
auaauguauucauau

SEQ ID NO: 3627660 - RNA, 23 nt, Human
auaauguauucauauuuguacuu

SEQ ID NO: 3627661 - RNA, 14 nt, Human
auaauguauuguug

SEQ ID NO: 3627662 - RNA, 12 nt, Human
auaaugugaagu

SEQ ID NO: 3627663 - RNA, 16 nt, Human
auaaugugaaguguua

SEQ ID NO: 3627664 - RNA, 17 nt, Human
auaaugugggaagaaac

SEQ ID NO: 3627665 - RNA, 12 nt, Human
auaaugugugua

SEQ ID NO: 3627666 - RNA, 16 nt, Human
auaauguguguaugug

SEQ ID NO: 3627667 - RNA, 16 nt, Human
auaauguuaaauuugu

SEQ ID NO: 3627668 - RNA, 19 nt, Human
auaauguuaaauuuguaag

SEQ ID NO: 3627669 - RNA, 22 nt, Human
auaauguuaaauuuguaaguuu

SEQ ID NO: 3627670 - RNA, 19 nt, Human
auaauguuaaccaaggaaa

SEQ ID NO: 3627671 - RNA, 13 nt, Human
auaauguuucaaa

SEQ ID NO: 3627672 - RNA, 13 nt, Human
auaauguuugcua

SEQ ID NO: 3627673 - RNA, 16 nt, Human
auaauuaaagugucca

SEQ ID NO: 3627674 - RNA, 18 nt, Human
auaauuaacacuuaaggu

SEQ ID NO: 3627675 - RNA, 15 nt, Human
auaauuaacauguua

SEQ ID NO: 3627676 - RNA, 17 nt, Human
auaauuagguuaacauu

SEQ ID NO: 3627677 - RNA, 19 nt, Human
auaauuauaugcuauuucu

SEQ ID NO: 3627678 - RNA, 13 nt, Human
auaauuauauguu

SEQ ID NO: 3627679 - RNA, 14 nt, Human
auaauuauauguug

SEQ ID NO: 3627680 - RNA, 20 nt, Human
auaauuaucggaagcagugc

SEQ ID NO: 3627681 - RNA, 19 nt, Human
auaauuaugacaguuauac

SEQ ID NO: 3627682 - RNA, 20 nt, Human
auaauuaugacaguuauacu

SEQ ID NO: 3627683 - RNA, 18 nt, Human
auaauuauguuauugaaa

SEQ ID NO: 3627684 - RNA, 20 nt, Human
auaauuauguuauugaaaaa

SEQ ID NO: 3627685 - RNA, 16 nt, Human
auaauucacucaagca

SEQ ID NO: 3627686 - RNA, 20 nt, Human
auaauucacucaagcacuga

SEQ ID NO: 3627687 - RNA, 22 nt, Human
auaauucacucaagcacugaua

SEQ ID NO: 3627688 - RNA, 17 nt, Human
auaauucagaaggaucu

SEQ ID NO: 3627689 - RNA, 20 nt, Human
auaauucaggaagcagcuuu

SEQ ID NO: 3627690 - RNA, 21 nt, Human
auaauucaguauguuuuacac

SEQ ID NO: 3627691 - RNA, 20 nt, Human
auaauucccuaucuuuuagu

SEQ ID NO: 3627692 - RNA, 13 nt, Human
auaauuccuacag

SEQ ID NO: 3627693 - RNA, 16 nt, Human
auaauuccuacagcac

SEQ ID NO: 3627694 - RNA, 18 nt, Human
auaauuccuacagcacua

SEQ ID NO: 3627695 - RNA, 22 nt, Human
auaauuccuauauccugugacu

SEQ ID NO: 3627696 - RNA, 12 nt, Human
auaauucuaaau

SEQ ID NO: 3627697 - RNA, 14 nt, Human
auaauucuacuuug

SEQ ID NO: 3627698 - RNA, 14 nt, Human
auaauucucauuaa

SEQ ID NO: 3627699 - RNA, 15 nt, Human
aucaauaaaauguga

SEQ ID NO: 3627700 - RNA, 18 nt, Human
aucaauaacagccgcucc

SEQ ID NO: 3627701 - RNA, 13 nt, Human
aucaauaagaagg

SEQ ID NO: 3627702 - RNA, 17 nt, Human
aucaauacacuaguugu

SEQ ID NO: 3627703 - RNA, 19 nt, Human
aucaauacacuaguuguuu

SEQ ID NO: 3627704 - RNA, 13 nt, Human
aucaauaguugaa

SEQ ID NO: 3627705 - RNA, 17 nt, Human
aucaauaguugaauuag

SEQ ID NO: 3627706 - RNA, 15 nt, Human
aucaauaucuaauau

SEQ ID NO: 3627707 - RNA, 13 nt, Human
aucaaucaaauaa

SEQ ID NO: 3627708 - RNA, 13 nt, Human
aucaaucaacuua

SEQ ID NO: 3627709 - RNA, 20 nt, Human
aucaaucacagcuuguauuu

SEQ ID NO: 3627710 - RNA, 20 nt, Human
aucaaucaucugugugaaaa

SEQ ID NO: 3627711 - RNA, 20 nt, Human
aucaauccagcgguucucaa

SEQ ID NO: 3627712 - RNA, 19 nt, Human
aucaauccugauuccucuc

SEQ ID NO: 3627713 - RNA, 20 nt, Human
aucaauccugauuccucucu

SEQ ID NO: 3627714 - RNA, 12 nt, Human
aucaaugacaga

SEQ ID NO: 3627715 - RNA, 20 nt, Human
aucaaugagguaucuucuuu

SEQ ID NO: 3627716 - RNA, 22 nt, Human
aucaaugcaagagugauugcag

SEQ ID NO: 3627717 - RNA, 14 nt, Human
aucaaugggaaaua

SEQ ID NO: 3627718 - RNA, 23 nt, Human
aucaauguaccuuuuuugguagu

SEQ ID NO: 3627719 - RNA, 14 nt, Human
aucaaugugucuuu

SEQ ID NO: 3627720 - RNA, 15 nt, Human
aucaauguucauugu

SEQ ID NO: 3627721 - RNA, 14 nt, Human
aucaauuaaaugua

SEQ ID NO: 3627722 - RNA, 16 nt, Human
aucaauuauaguuucu

SEQ ID NO: 3627723 - RNA, 19 nt, Human
aucaauucuguauuccaga

SEQ ID NO: 3627724 - RNA, 13 nt, Human
aucaauuuaaaaa

SEQ ID NO: 3627725 - RNA, 21 nt, Human
aucaauuuaaacccauuuuag

SEQ ID NO: 3627726 - RNA, 12 nt, Human
aucaauuuaagu

SEQ ID NO: 3627727 - RNA, 20 nt, Human
aucaauuugucauuuugaag

SEQ ID NO: 3627728 - RNA, 22 nt, Human
aucaauuugucauuuugaagcu

SEQ ID NO: 3627729 - RNA, 15 nt, Human
aucaauuuuuaggaa

SEQ ID NO: 3627730 - RNA, 13 nt, Human
aucacaaaugacu

SEQ ID NO: 3627731 - RNA, 16 nt, Human
aucacaaaugacuuua

SEQ ID NO: 3627732 - RNA, 15 nt, Human
aucacaacgugcauu

SEQ ID NO: 3627733 - RNA, 18 nt, Human
aucacaacgugcauugug

SEQ ID NO: 3627734 - RNA, 21 nt, Human
aucacaacgugcauugugcuu

SEQ ID NO: 3627735 - RNA, 13 nt, Human
aucacaauacaga

SEQ ID NO: 3627736 - RNA, 16 nt, Human
aucacaauacagauaa

SEQ ID NO: 3627737 - RNA, 17 nt, Human
aucacaauuuuuaaugg

SEQ ID NO: 3627738 - RNA, 13 nt, Human
aucacacacaugg

SEQ ID NO: 3627739 - RNA, 21 nt, Human
aucacaccaucgcuggccccu

SEQ ID NO: 3627740 - RNA, 18 nt, Human
aucacacuucugugagac

SEQ ID NO: 3627741 - RNA, 14 nt, Human
aucacagagacauu

SEQ ID NO: 3627742 - RNA, 15 nt, Human
aucacagagacauuc

SEQ ID NO: 3627743 - RNA, 17 nt, Human
aucacagagacauuccu

SEQ ID NO: 3627744 - RNA, 18 nt, Human
aucacagagacauuccuc

SEQ ID NO: 3627745 - RNA, 14 nt, Human
aucacagaggcuuc

SEQ ID NO: 3627746 - RNA, 15 nt, Human
aucacagaggcuucu

SEQ ID NO: 3627747 - RNA, 14 nt, Human
aucacagcagccuc

SEQ ID NO: 3627748 - RNA, 13 nt, Human
aucacagcccagc

SEQ ID NO: 3627749 - RNA, 16 nt, Human
aucacagcccagcccg

SEQ ID NO: 3627750 - RNA, 13 nt, Human
aucacagccucug

SEQ ID NO: 3627751 - RNA, 18 nt, Human
aucacagcuucagccagg

SEQ ID NO: 3627752 - RNA, 20 nt, Human
aucacaggcugggcugggca

SEQ ID NO: 3627753 - RNA, 20 nt, Human
aucacagggcagagccggga

SEQ ID NO: 3627754 - RNA, 18 nt, Human
aucacaggguugggccca

SEQ ID NO: 3627755 - RNA, 20 nt, Human
aucacaggguugggcccaga

SEQ ID NO: 3627756 - RNA, 15 nt, Human
aucacagucuaauuu

SEQ ID NO: 3627757 - RNA, 19 nt, Human
aucacagucuaauuuuuau

SEQ ID NO: 3627758 - RNA, 22 nt, Human
aucacagucuaauuuuuauuca

SEQ ID NO: 3627759 - RNA, 15 nt, Human
aucacauaacagaau

SEQ ID NO: 3627760 - RNA, 12 nt, Human
aucacauccugg

SEQ ID NO: 3627761 - RNA, 20 nt, Human
aucacaugaauuauuacagu

SEQ ID NO: 3627762 - RNA, 17 nt, Human
aucacauguauguuuug

SEQ ID NO: 3627763 - RNA, 12 nt, Human
aucaccagagag

SEQ ID NO: 3627764 - RNA, 15 nt, Human
aucaccauguaagca

SEQ ID NO: 3627765 - RNA, 16 nt, Human
aucacccaacgcucca

SEQ ID NO: 3627766 - RNA, 15 nt, Human
aucacccucuuccug

SEQ ID NO: 3627767 - RNA, 14 nt, Human
aucaccgaaaacgu

SEQ ID NO: 3627768 - RNA, 19 nt, Human
aucaccgaaaacguggcug

SEQ ID NO: 3627769 - RNA, 22 nt, Human
aucaccgacgcgucuccuguuu

SEQ ID NO: 3627770 - RNA, 20 nt, Human
aucaccgagaguagccgaga

SEQ ID NO: 3627771 - RNA, 17 nt, Human
aucaccuaauuaauuuc

SEQ ID NO: 3627772 - RNA, 20 nt, Human
aucaccuaauuaauuucagu

SEQ ID NO: 3627773 - RNA, 19 nt, Human
aucaccuacucacacaggc

SEQ ID NO: 3627774 - RNA, 16 nt, Human
aucaccuagcugaaug

SEQ ID NO: 3627775 - RNA, 23 nt, Human
aucaccuagcugaauguuuuucu

SEQ ID NO: 3627776 - RNA, 16 nt, Human
aucaccucagauggca

SEQ ID NO: 3627777 - RNA, 23 nt, Human
aucaccucagauggcagcuuuua

SEQ ID NO: 3627778 - RNA, 12 nt, Human
aucaccucaggc

SEQ ID NO: 3627779 - RNA, 15 nt, Human
aucaccuccccuccu

SEQ ID NO: 3627780 - RNA, 12 nt, Human
aucaccugaggu

SEQ ID NO: 3627781 - RNA, 12 nt, Human
aucaccugcccu

SEQ ID NO: 3627782 - RNA, 13 nt, Human
aucaccugcccug

SEQ ID NO: 3627783 - RNA, 14 nt, Human
aucaccugccuguu

SEQ ID NO: 3627784 - RNA, 15 nt, Human
aucaccugccuguua

SEQ ID NO: 3627785 - RNA, 21 nt, Human
aucaccuggcuuguuuauuuu

SEQ ID NO: 3627786 - RNA, 22 nt, Human
aucaccugucuugccuuuuuca

SEQ ID NO: 3627787 - RNA, 20 nt, Human
aucaccuuagaccaccaagc

SEQ ID NO: 3627788 - RNA, 15 nt, Human
aucaccuuaggcagg

SEQ ID NO: 3627789 - RNA, 20 nt, Human
aucaccuuaggcagggaagu

SEQ ID NO: 3627790 - RNA, 17 nt, Human
aucacgacgcugcagag

SEQ ID NO: 3627791 - RNA, 17 nt, Human
aucacgccacugcacua

SEQ ID NO: 3627792 - RNA, 17 nt, Human
aucacgccacugcacuc

SEQ ID NO: 3627793 - RNA, 23 nt, Human
aucacgcuccccgccuguucccc

SEQ ID NO: 3627794 - RNA, 18 nt, Human
aucacgcuuuccugaauc

SEQ ID NO: 3627795 - RNA, 18 nt, Human
aucacgcuuuuugaaaaa

SEQ ID NO: 3627796 - RNA, 19 nt, Human
aucacggcucacugcagcc

SEQ ID NO: 3627797 - RNA, 22 nt, Human
aucacggcucacugcagccuca

SEQ ID NO: 3627798 - RNA, 16 nt, Human
aucacguguacuggcu

SEQ ID NO: 3627799 - RNA, 22 nt, Human
aucacguuagaggaaaaauauu

SEQ ID NO: 3627800 - RNA, 16 nt, Human
aucacuaacauuauau

SEQ ID NO: 3627801 - RNA, 18 nt, Human
aucacuaacauuauauug

SEQ ID NO: 3627802 - RNA, 17 nt, Human
aucacuagcccuccuuu

SEQ ID NO: 3627803 - RNA, 15 nt, Human
aucacuauccaugca

SEQ ID NO: 3627804 - RNA, 18 nt, Human
aucacuccccaaggaaga

SEQ ID NO: 3627805 - RNA, 20 nt, Human
aucacuccccaaggaagagc

SEQ ID NO: 3627806 - RNA, 12 nt, Human
aucacuccccuc

SEQ ID NO: 3627807 - RNA, 13 nt, Human
aucacuccccucc

SEQ ID NO: 3627808 - RNA, 20 nt, Human
aucacucuaauuaauuguaa

SEQ ID NO: 3627809 - RNA, 18 nt, Human
aucacucuagguuuuaca

SEQ ID NO: 3627810 - RNA, 21 nt, Human
aucacucugcugcuuagacau

SEQ ID NO: 3627811 - RNA, 16 nt, Human
aucacucuuguggaug

SEQ ID NO: 3627812 - RNA, 12 nt, Human
aucacugaaaua

SEQ ID NO: 3627813 - RNA, 16 nt, Human
aucacugaguuuucca

SEQ ID NO: 3627814 - RNA, 18 nt, Human
aucacugaguuuuccaug

SEQ ID NO: 3627815 - RNA, 22 nt, Human
aucacugcauuauucucuuuua

SEQ ID NO: 3627816 - RNA, 18 nt, Human
aucacugccacacucucc

SEQ ID NO: 3627817 - RNA, 19 nt, Human
aucacugccacacucucca

SEQ ID NO: 3627818 - RNA, 20 nt, Human
aucacugccacacucuccau

SEQ ID NO: 3627819 - RNA, 22 nt, Human
aucacugccacacucuccauca

SEQ ID NO: 3627820 - RNA, 19 nt, Human
aucacugcuugaugaagca

SEQ ID NO: 3627821 - RNA, 21 nt, Human
aucacugcuugaugaagcaag

SEQ ID NO: 3627822 - RNA, 17 nt, Human
aucacuggagcaccagg

SEQ ID NO: 3627823 - RNA, 23 nt, Human
aucacuggagcaccaggcacgaa

SEQ ID NO: 3627824 - RNA, 12 nt, Human
aucacuggagcc

SEQ ID NO: 3627825 - RNA, 14 nt, Human
aucacuggagccca

SEQ ID NO: 3627826 - RNA, 18 nt, Human
aucacuggcaaugaaaaa

SEQ ID NO: 3627827 - RNA, 16 nt, Human
aucacuggcauggugg

SEQ ID NO: 3627828 - RNA, 17 nt, Human
aucacuggcaugguggu

SEQ ID NO: 3627829 - RNA, 22 nt, Human
aucacugguugcacuuaugauu

SEQ ID NO: 3627830 - RNA, 19 nt, Human
aucacugucuuuccuagau

SEQ ID NO: 3627831 - RNA, 16 nt, Human
aucacuguggcugucu

SEQ ID NO: 3627832 - RNA, 15 nt, Human
aucacuguguauauu

SEQ ID NO: 3627833 - RNA, 20 nt, Human
aucacuguuuagaacacaca

SEQ ID NO: 3627834 - RNA, 14 nt, Human
aucacuguuuuuag

SEQ ID NO: 3627835 - RNA, 12 nt, Human
aucacuuaaaac

SEQ ID NO: 3627836 - RNA, 19 nt, Human
aucacuuagcgaacccuuu

SEQ ID NO: 3627837 - RNA, 19 nt, Human
aucacuugagacaaaucua

SEQ ID NO: 3627838 - RNA, 15 nt, Human
aucacuugauucaua

SEQ ID NO: 3627839 - RNA, 18 nt, Human
aucacuugauucauaaag

SEQ ID NO: 3627840 - RNA, 18 nt, Human
aucacuuguacaaaauaa

SEQ ID NO: 3627841 - RNA, 21 nt, Human
aucacuuguacaaaauaaaca

SEQ ID NO: 3627842 - RNA, 18 nt, Human
aucacuuucucaguuuuc

SEQ ID NO: 3627843 - RNA, 20 nt, Human
aucacuuugagccugggaaa

SEQ ID NO: 3627844 - RNA, 14 nt, Human
auccaacuccagca

SEQ ID NO: 3627845 - RNA, 15 nt, Human
auccaacuccagcaa

SEQ ID NO: 3627846 - RNA, 14 nt, Human
auccaacuccagga

SEQ ID NO: 3627847 - RNA, 21 nt, Human
auccaagcaccaccaaacaca

SEQ ID NO: 3627848 - RNA, 19 nt, Human
auccaagccuccacagcga

SEQ ID NO: 3627849 - RNA, 18 nt, Human
auccaagcuggucccacu

SEQ ID NO: 3627850 - RNA, 21 nt, Human
auccaaggaagggauguauuu

SEQ ID NO: 3627851 - RNA, 13 nt, Human
auccaaggagaaa

SEQ ID NO: 3627852 - RNA, 13 nt, Human
auccaaguggccu

SEQ ID NO: 3627853 - RNA, 19 nt, Human
auccaauauuuucuuuaau

SEQ ID NO: 3627854 - RNA, 17 nt, Human
auccaaucagagaccag

SEQ ID NO: 3627855 - RNA, 22 nt, Human
auccaaucagagaccaggcccu

SEQ ID NO: 3627856 - RNA, 19 nt, Human
auccaauccucacugggug

SEQ ID NO: 3627857 - RNA, 20 nt, Human
auccaauccucacugggugg

SEQ ID NO: 3627858 - RNA, 22 nt, Human
auccaauggacugcauaaauaa

SEQ ID NO: 3627859 - RNA, 16 nt, Human
auccaauugcugcuug

SEQ ID NO: 3627860 - RNA, 13 nt, Human
auccaauuggaua

SEQ ID NO: 3627861 - RNA, 20 nt, Human
auccacacacagaggaagag

SEQ ID NO: 3627862 - RNA, 19 nt, Human
auccacacacgcaggaacu

SEQ ID NO: 3627863 - RNA, 14 nt, Human
auccacacaugaau

SEQ ID NO: 3627864 - RNA, 20 nt, Human
auccacagagagucccacug

SEQ ID NO: 3627865 - RNA, 20 nt, Human
auccacaggaaaguguuauu

SEQ ID NO: 3627866 - RNA, 20 nt, Human
auccacagucucccccaccc

SEQ ID NO: 3627867 - RNA, 15 nt, Human
auccacauuguuuua

SEQ ID NO: 3627868 - RNA, 18 nt, Human
auccacauuguuuuaaaa

SEQ ID NO: 3627869 - RNA, 19 nt, Human
auccacauuguuuuaaaaa

SEQ ID NO: 3627870 - RNA, 16 nt, Human
auccacauuucuaaaa

SEQ ID NO: 3627871 - RNA, 15 nt, Human
auccacccaccucag

SEQ ID NO: 3627872 - RNA, 20 nt, Human
auccacccaccucagccucc

SEQ ID NO: 3627873 - RNA, 14 nt, Human
auccacccagccca

SEQ ID NO: 3627874 - RNA, 15 nt, Human
auccacccagcccau

SEQ ID NO: 3627875 - RNA, 16 nt, Human
auccacccauguuauc

SEQ ID NO: 3627876 - RNA, 14 nt, Human
auccaccuccaucu

SEQ ID NO: 3627877 - RNA, 22 nt, Human
auccacguauuccccuucccac

SEQ ID NO: 3627878 - RNA, 19 nt, Human
auccacuagugcaaaucau

SEQ ID NO: 3627879 - RNA, 20 nt, Human
auccacuggguguaaacaca

SEQ ID NO: 3627880 - RNA, 14 nt, Human
auccagaaaaacug

SEQ ID NO: 3627881 - RNA, 12 nt, Human
auccagaaaacu

SEQ ID NO: 3627882 - RNA, 15 nt, Human
auccagaaaacugug

SEQ ID NO: 3627883 - RNA, 14 nt, Human
auccagaaagaaaa

SEQ ID NO: 3627884 - RNA, 22 nt, Human
auccagacaucaugaauuuuac

SEQ ID NO: 3627885 - RNA, 20 nt, Human
auccagaggguugugauuuu

SEQ ID NO: 3627886 - RNA, 20 nt, Human
auccagagucccugccugga

SEQ ID NO: 3627887 - RNA, 20 nt, Human
auccagaucauuccucagaa

SEQ ID NO: 3627888 - RNA, 18 nt, Human
auccagcaguacaauaaa

SEQ ID NO: 3627889 - RNA, 18 nt, Human
auccagcagucucugccu

SEQ ID NO: 3627890 - RNA, 19 nt, Human
auccagcagucucugccuu

SEQ ID NO: 3627891 - RNA, 21 nt, Human
auccagcccugaguuccuagc

SEQ ID NO: 3627892 - RNA, 19 nt, Human
auccagcuugccagaugcu

SEQ ID NO: 3627893 - RNA, 20 nt, Human
auccagcuugccagaugcug

SEQ ID NO: 3627894 - RNA, 23 nt, Human
auccaggacccugccaggcacag

SEQ ID NO: 3627895 - RNA, 22 nt, Human
auccaggacuauauuugggccu

SEQ ID NO: 3627896 - RNA, 13 nt, Human
auccaggacucug

SEQ ID NO: 3627897 - RNA, 15 nt, Human
auccaggagcuccag

SEQ ID NO: 3627898 - RNA, 15 nt, Human
auccaggcaauggcc

SEQ ID NO: 3627899 - RNA, 15 nt, Human
auccaggcacagcug

SEQ ID NO: 3627900 - RNA, 16 nt, Human
auccaggcacagcuga

SEQ ID NO: 3627901 - RNA, 17 nt, Human
auccaggcacagcugag

SEQ ID NO: 3627902 - RNA, 15 nt, Human
auccaggcaccagga

SEQ ID NO: 3627903 - RNA, 15 nt, Human
auccaggcagaucca

SEQ ID NO: 3627904 - RNA, 19 nt, Human
auccaggcagauccaggac

SEQ ID NO: 3627905 - RNA, 22 nt, Human
auccaggcagauccaggacuau

SEQ ID NO: 3627906 - RNA, 21 nt, Human
auccaggccccucccucucca

SEQ ID NO: 3627907 - RNA, 23 nt, Human
auccaggccggcuugccacaccc

SEQ ID NO: 3627908 - RNA, 19 nt, Human
auccagggacagaggcccc

SEQ ID NO: 3627909 - RNA, 19 nt, Human
auccagggcucugaccagu

SEQ ID NO: 3627910 - RNA, 17 nt, Human
auccaggguggugguga

SEQ ID NO: 3627911 - RNA, 15 nt, Human
auccagguacgcaca

SEQ ID NO: 3627912 - RNA, 16 nt, Human
auccagguacgcacag

SEQ ID NO: 3627913 - RNA, 17 nt, Human
auccagguacgcacaga

SEQ ID NO: 3627914 - RNA, 22 nt, Human
auccagguacgcacagacaggu

SEQ ID NO: 3627915 - RNA, 16 nt, Human
auccaggucaacagaa

SEQ ID NO: 3627916 - RNA, 17 nt, Human
auccaggucaacagaau

SEQ ID NO: 3627917 - RNA, 13 nt, Human
auccaguauaaga

SEQ ID NO: 3627918 - RNA, 14 nt, Human
auccaguaucuuga

SEQ ID NO: 3627919 - RNA, 15 nt, Human
auccaguaucuugaa

SEQ ID NO: 3627920 - RNA, 11 nt, Human
auccagugacc

SEQ ID NO: 3627921 - RNA, 21 nt, Human
auccagugaccucucucucug

SEQ ID NO: 3627922 - RNA, 22 nt, Human
auccagugaccucucucucugg

SEQ ID NO: 3627923 - RNA, 16 nt, Human
auccagugauccuuac

SEQ ID NO: 3627924 - RNA, 17 nt, Human
auccagugucucacagc

SEQ ID NO: 3627925 - RNA, 14 nt, Human
auccaguuuuucau

SEQ ID NO: 3627926 - RNA, 13 nt, Human
auccauaaaaaaa

SEQ ID NO: 3627927 - RNA, 14 nt, Human
auccauaaagaagc

SEQ ID NO: 3627928 - RNA, 18 nt, Human
auccauaguaacugacau

SEQ ID NO: 3627929 - RNA, 15 nt, Human
auccauagugacuuu

SEQ ID NO: 3627930 - RNA, 19 nt, Human
auccauaguggacauuguu

SEQ ID NO: 3627931 - RNA, 13 nt, Human
auccauauuuuau

SEQ ID NO: 3627932 - RNA, 23 nt, Human
auccauauuuuauuacuguuuau

SEQ ID NO: 3627933 - RNA, 13 nt, Human
auccaucagugcc

SEQ ID NO: 3627934 - RNA, 15 nt, Human
auccaucagugccaa

SEQ ID NO: 3627935 - RNA, 14 nt, Human
auccauccagaggc

SEQ ID NO: 3627936 - RNA, 22 nt, Human
auccaugaccuaguuuuccaug

SEQ ID NO: 3627937 - RNA, 12 nt, Human
auccaugccuca

SEQ ID NO: 3627938 - RNA, 12 nt, Human
auccauggccag

SEQ ID NO: 3627939 - RNA, 14 nt, Human
auccauggccagca

SEQ ID NO: 3627940 - RNA, 16 nt, Human
auccaugggggcaggg

SEQ ID NO: 3627941 - RNA, 22 nt, Human
auccauggggucucucacagac

SEQ ID NO: 3627942 - RNA, 18 nt, Human
auccauguacuguaguuu

SEQ ID NO: 3627943 - RNA, 16 nt, Human
auccauguuuguaaaa

SEQ ID NO: 3627944 - RNA, 15 nt, Human
auccauuaauuuaaa

SEQ ID NO: 3627945 - RNA, 18 nt, Human
auccauuaggccagcaac

SEQ ID NO: 3627946 - RNA, 16 nt, Human
auccauuaucaugugu

SEQ ID NO: 3627947 - RNA, 19 nt, Human
auccauucccaagaaaugc

SEQ ID NO: 3627948 - RNA, 22 nt, Human
auccauuccucagggacagaga

SEQ ID NO: 3627949 - RNA, 15 nt, Human
auccauucuccugag

SEQ ID NO: 3627950 - RNA, 18 nt, Human
auccauuucaucuauuuc

SEQ ID NO: 3627951 - RNA, 18 nt, Human
auccauuuccccuccuuc

SEQ ID NO: 3627952 - RNA, 15 nt, Human
auccauuucuaauua

SEQ ID NO: 3627953 - RNA, 20 nt, Human
auccauuuggaaaucuuuaa

SEQ ID NO: 3627954 - RNA, 13 nt, Human
auccauuuguaau

SEQ ID NO: 3627955 - RNA, 22 nt, Human
auccauuuuuuauauuucaagu

SEQ ID NO: 3627956 - RNA, 14 nt, Human
aucccaaacuguga

SEQ ID NO: 3627957 - RNA, 20 nt, Human
aucccaaaggacagccgccu

SEQ ID NO: 3627958 - RNA, 11 nt, Human
aucccaacacu

SEQ ID NO: 3627959 - RNA, 16 nt, Human
aucccaaccagugcca

SEQ ID NO: 3627960 - RNA, 17 nt, Human
aucccaaccagugccaa

SEQ ID NO: 3627961 - RNA, 15 nt, Human
aucccaacugucuuu

SEQ ID NO: 3627962 - RNA, 21 nt, Human
aucccaagaucugugcagccc

SEQ ID NO: 3627963 - RNA, 14 nt, Human
aucccaagccuccu

SEQ ID NO: 3627964 - RNA, 17 nt, Human
aucccaaguagaaucuc

SEQ ID NO: 3627965 - RNA, 12 nt, Human
aucccacacagg

SEQ ID NO: 3627966 - RNA, 13 nt, Human
aucccacauccaa

SEQ ID NO: 3627967 - RNA, 18 nt, Human
aucccacccacaugugac

SEQ ID NO: 3627968 - RNA, 20 nt, Human
aucccacccacaugugacac

SEQ ID NO: 3627969 - RNA, 20 nt, Human
aucccaccucuggauaauuu

SEQ ID NO: 3627970 - RNA, 17 nt, Human
aucccacgcacuccaug

SEQ ID NO: 3627971 - RNA, 16 nt, Human
aucccacgcuucucuu

SEQ ID NO: 3627972 - RNA, 19 nt, Human
aucccacuaaugcaaacug

SEQ ID NO: 3627973 - RNA, 12 nt, Human
aucccacuccua

SEQ ID NO: 3627974 - RNA, 16 nt, Human
aucccacuuuugccag

SEQ ID NO: 3627975 - RNA, 14 nt, Human
aucccagcacuuug

SEQ ID NO: 3627976 - RNA, 20 nt, Human
aucccagcacuuugggaggc

SEQ ID NO: 3627977 - RNA, 19 nt, Human
aucccagccccaauuuucu

SEQ ID NO: 3627978 - RNA, 24 nt, Human
aucccagcccccugaccacucaga

SEQ ID NO: 3627979 - RNA, 20 nt, Human
aucccagcuacuugggaagc

SEQ ID NO: 3627980 - RNA, 13 nt, Human
aucccagcucacg

SEQ ID NO: 3627981 - RNA, 14 nt, Human
aucccagcugccua

SEQ ID NO: 3627982 - RNA, 17 nt, Human
aucccaggacaccacac

SEQ ID NO: 3627983 - RNA, 21 nt, Human
aucccaggacaccacacccag

SEQ ID NO: 3627984 - RNA, 19 nt, Human
aucccaggaugcugggugg

SEQ ID NO: 3627985 - RNA, 18 nt, Human
aucccaggccccuggagg

SEQ ID NO: 3627986 - RNA, 12 nt, Human
aucccaggggac

SEQ ID NO: 3627987 - RNA, 20 nt, Human
aucccaggggaccacaccuc

SEQ ID NO: 3627988 - RNA, 23 nt, Human
aucccaggggaccacaccucccu

SEQ ID NO: 3627989 - RNA, 15 nt, Human
augaucuugugacau

SEQ ID NO: 3627990 - RNA, 20 nt, Human
augaucuuucuuuccuuucu

SEQ ID NO: 3627991 - RNA, 18 nt, Human
augaucuuugcagacagg

SEQ ID NO: 3627992 - RNA, 21 nt, Human
augaucuuugcagacaggcaa

SEQ ID NO: 3627993 - RNA, 15 nt, Human
augaucuuuucaagu

SEQ ID NO: 3627994 - RNA, 20 nt, Human
augaugaaaaccuacauauu

SEQ ID NO: 3627995 - RNA, 12 nt, Human
augaugaaaauu

SEQ ID NO: 3627996 - RNA, 18 nt, Human
augaugaaaugaggucag

SEQ ID NO: 3627997 - RNA, 15 nt, Human
augaugaaugagaau

SEQ ID NO: 3627998 - RNA, 17 nt, Human
augaugacaaaaaaugu

SEQ ID NO: 3627999 - RNA, 20 nt, Human
augaugacaacuacagaaaa

SEQ ID NO: 3628000 - RNA, 19 nt, Human
augaugacuuaguacaaag

SEQ ID NO: 3628001 - RNA, 19 nt, Human
augaugagaauuucuaaaa

SEQ ID NO: 3628002 - RNA, 20 nt, Human
augaugagccuucgugcccc

SEQ ID NO: 3628003 - RNA, 22 nt, Human
augaugauccggauuuaauuug

SEQ ID NO: 3628004 - RNA, 20 nt, Human
augaugauguggaagaacuu

SEQ ID NO: 3628005 - RNA, 11 nt, Human
augaugcacau

SEQ ID NO: 3628006 - RNA, 16 nt, Human
augaugcacauuucau

SEQ ID NO: 3628007 - RNA, 14 nt, Human
augaugcagucucc

SEQ ID NO: 3628008 - RNA, 18 nt, Human
augaugccacaccaagcu

SEQ ID NO: 3628009 - RNA, 16 nt, Human
augaugccaugaggaa

SEQ ID NO: 3628010 - RNA, 16 nt, Human
augaugcccugcucca

SEQ ID NO: 3628011 - RNA, 16 nt, Human
augaugcucuuuccca

SEQ ID NO: 3628012 - RNA, 16 nt, Human
augaugcuuuuacuga

SEQ ID NO: 3628013 - RNA, 15 nt, Human
augauggaauuucau

SEQ ID NO: 3628014 - RNA, 17 nt, Human
augauggagcgcaccug

SEQ ID NO: 3628015 - RNA, 15 nt, Human
augauggagucaggu

SEQ ID NO: 3628016 - RNA, 12 nt, Human
augauggcccau

SEQ ID NO: 3628017 - RNA, 15 nt, Human
augauggcccauucu

SEQ ID NO: 3628018 - RNA, 19 nt, Human
augauggcccauucuacuu

SEQ ID NO: 3628019 - RNA, 21 nt, Human
augauggcccauucuacuugc

SEQ ID NO: 3628020 - RNA, 20 nt, Human
augaugguuuccaauuucau

SEQ ID NO: 3628021 - RNA, 21 nt, Human
augauguaaucucucugcagc

SEQ ID NO: 3628022 - RNA, 21 nt, Human
augauguacagauucuuucag

SEQ ID NO: 3628023 - RNA, 21 nt, Human
augauguagugccucuuucau

SEQ ID NO: 3628024 - RNA, 18 nt, Human
augauguauacugccacu

SEQ ID NO: 3628025 - RNA, 12 nt, Human
augauguauauu

SEQ ID NO: 3628026 - RNA, 14 nt, Human
augauguccagaag

SEQ ID NO: 3628027 - RNA, 18 nt, Human
augauguccagaagaaua

SEQ ID NO: 3628028 - RNA, 19 nt, Human
augauguccagaagaauau

SEQ ID NO: 3628029 - RNA, 20 nt, Human
augaugugaaacacuuugcc

SEQ ID NO: 3628030 - RNA, 14 nt, Human
augaugugccuggg

SEQ ID NO: 3628031 - RNA, 13 nt, Human
augaugugcuuaa

SEQ ID NO: 3628032 - RNA, 23 nt, Human
augauguggaguggggcaguaga

SEQ ID NO: 3628033 - RNA, 19 nt, Human
augaugugggucaaggaau

SEQ ID NO: 3628034 - RNA, 14 nt, Human
augauguguauaua

SEQ ID NO: 3628035 - RNA, 16 nt, Human
augaugugugaaaacu

SEQ ID NO: 3628036 - RNA, 15 nt, Human
augauguguugugau

SEQ ID NO: 3628037 - RNA, 21 nt, Human
augauguuaaaaaaauaagaa

SEQ ID NO: 3628038 - RNA, 15 nt, Human
augauguuucacaua

SEQ ID NO: 3628039 - RNA, 16 nt, Human
augauguuugcccaaa

SEQ ID NO: 3628040 - RNA, 19 nt, Human
augauguuugcccaaaauu

SEQ ID NO: 3628041 - RNA, 21 nt, Human
augauguuugcccaaaauuua

SEQ ID NO: 3628042 - RNA, 22 nt, Human
augauguuuuuaaaaucuuauu

SEQ ID NO: 3628043 - RNA, 17 nt, Human
augauuaaauaagauuc

SEQ ID NO: 3628044 - RNA, 20 nt, Human
augauuaaauaagauucuaa

SEQ ID NO: 3628045 - RNA, 19 nt, Human
augauuaaccacuucagcu

SEQ ID NO: 3628046 - RNA, 19 nt, Human
augauuacucuuugagaua

SEQ ID NO: 3628047 - RNA, 22 nt, Human
augauuacuggccuuuuucauu

SEQ ID NO: 3628048 - RNA, 15 nt, Human
augauuaguaaagaa

SEQ ID NO: 3628049 - RNA, 22 nt, Human
augauuaugaauuacauuugua

SEQ ID NO: 3628050 - RNA, 14 nt, Human
augauuauuuucaa

SEQ ID NO: 3628051 - RNA, 20 nt, Human
augauuauuuuuuucuguaa

SEQ ID NO: 3628052 - RNA, 17 nt, Human
augauucauauauuuua

SEQ ID NO: 3628053 - RNA, 15 nt, Human
augauuccagguggc

SEQ ID NO: 3628054 - RNA, 16 nt, Human
augauuccagguggca

SEQ ID NO: 3628055 - RNA, 15 nt, Human
augauuccuuccugu

SEQ ID NO: 3628056 - RNA, 18 nt, Human
augauucguguaauuacu

SEQ ID NO: 3628057 - RNA, 22 nt, Human
augauucuauuuauauguacau

SEQ ID NO: 3628058 - RNA, 23 nt, Human
augauucuauuuauauguacaug

SEQ ID NO: 3628059 - RNA, 23 nt, Human
augauucugcuuuuaccaugccc

SEQ ID NO: 3628060 - RNA, 19 nt, Human
augauugaauuauauguuc

SEQ ID NO: 3628061 - RNA, 13 nt, Human
augauugcuuuua

SEQ ID NO: 3628062 - RNA, 22 nt, Human
augauuggauuauucauuuaaa

SEQ ID NO: 3628063 - RNA, 18 nt, Human
augauuguaaaauagcuu

SEQ ID NO: 3628064 - RNA, 12 nt, Human
augauuguuucu

SEQ ID NO: 3628065 - RNA, 14 nt, Human
augauuuaauaaaa

SEQ ID NO: 3628066 - RNA, 19 nt, Human
augauuuaauaaaauaauu

SEQ ID NO: 3628067 - RNA, 22 nt, Human
augauuuaauaaaauaauucua

SEQ ID NO: 3628068 - RNA, 14 nt, Human
augauuuacucauu

SEQ ID NO: 3628069 - RNA, 13 nt, Human
augauuuauaguu

SEQ ID NO: 3628070 - RNA, 14 nt, Human
augauuuauaguuu

SEQ ID NO: 3628071 - RNA, 22 nt, Human
augauuucacaaauauuaaaaa

SEQ ID NO: 3628072 - RNA, 18 nt, Human
augauuucacuagaaaag

SEQ ID NO: 3628073 - RNA, 13 nt, Human
augauuucagaaa

SEQ ID NO: 3628074 - RNA, 14 nt, Human
augauuucagaaac

SEQ ID NO: 3628075 - RNA, 13 nt, Human
augauuucaugua

SEQ ID NO: 3628076 - RNA, 14 nt, Human
augauuucauguac

SEQ ID NO: 3628077 - RNA, 19 nt, Human
augauuuccccccuccgcc

SEQ ID NO: 3628078 - RNA, 12 nt, Human
augauuugcaau

SEQ ID NO: 3628079 - RNA, 21 nt, Human
augauuuuacuuagcaauguu

SEQ ID NO: 3628080 - RNA, 16 nt, Human
augauuuuauuugaca

SEQ ID NO: 3628081 - RNA, 15 nt, Human
augauuuucauaacu

SEQ ID NO: 3628082 - RNA, 22 nt, Human
augauuuucauaacuuauugcu

SEQ ID NO: 3628083 - RNA, 13 nt, Human
augauuuuuagau

SEQ ID NO: 3628084 - RNA, 15 nt, Human
augauuuuucuuuac

SEQ ID NO: 3628085 - RNA, 19 nt, Human
augauuuuucuuuacaaaa

SEQ ID NO: 3628086 - RNA, 21 nt, Human
augauuuuuuuuucauacacu

SEQ ID NO: 3628087 - RNA, 19 nt, Human
augcaaaaauuagccgggc

SEQ ID NO: 3628088 - RNA, 14 nt, Human
augcaaaagguuua

SEQ ID NO: 3628089 - RNA, 21 nt, Human
augcaaaaguucugacuugac

SEQ ID NO: 3628090 - RNA, 17 nt, Human
augcaaaauauguuuaa

SEQ ID NO: 3628091 - RNA, 12 nt, Human
augcaaaaugga

SEQ ID NO: 3628092 - RNA, 16 nt, Human
augcaaaccaucauug

SEQ ID NO: 3628093 - RNA, 19 nt, Human
augcaaaccaucauugaaa

SEQ ID NO: 3628094 - RNA, 22 nt, Human
augcaaaccaucauugaaaucu

SEQ ID NO: 3628095 - RNA, 14 nt, Human
augcaaagcacuga

SEQ ID NO: 3628096 - RNA, 15 nt, Human
augcaaaggcuggga

SEQ ID NO: 3628097 - RNA, 16 nt, Human
augcaaaguacaaugu

SEQ ID NO: 3628098 - RNA, 13 nt, Human
augcaaaguauaa

SEQ ID NO: 3628099 - RNA, 18 nt, Human
augcaaauauuuuuuugu

SEQ ID NO: 3628100 - RNA, 21 nt, Human
augcaaaugagcucugaaauc

SEQ ID NO: 3628101 - RNA, 21 nt, Human
augcaacaacauguauaauau

SEQ ID NO: 3628102 - RNA, 20 nt, Human
augcaacacgcauggucaac

SEQ ID NO: 3628103 - RNA, 19 nt, Human
augcaacauguguacuuaa

SEQ ID NO: 3628104 - RNA, 13 nt, Human
augcaagaaggag

SEQ ID NO: 3628105 - RNA, 17 nt, Human
augcaagacgcccucua

SEQ ID NO: 3628106 - RNA, 23 nt, Human
augcaagcagaggaccagggccu

SEQ ID NO: 3628107 - RNA, 22 nt, Human
augcaagcaguuucaauaaagu

SEQ ID NO: 3628108 - RNA, 23 nt, Human
augcaagcaguuucaauaaaguu

SEQ ID NO: 3628109 - RNA, 15 nt, Human
augcaaggaaggaaa

SEQ ID NO: 3628110 - RNA, 18 nt, Human
augcaaggaaggaaagaa

SEQ ID NO: 3628111 - RNA, 14 nt, Human
augcaaggaccagg

SEQ ID NO: 3628112 - RNA, 13 nt, Human
augcaagggacug

SEQ ID NO: 3628113 - RNA, 22 nt, Human
augcaaggucauuuuuuuuaag

SEQ ID NO: 3628114 - RNA, 18 nt, Human
augcaauaaaauuauuug

SEQ ID NO: 3628115 - RNA, 19 nt, Human
augcaauauaucuaaauug

SEQ ID NO: 3628116 - RNA, 17 nt, Human
augcaauccuuacaaau

SEQ ID NO: 3628117 - RNA, 19 nt, Human
augcaaugacaucuucaaa

SEQ ID NO: 3628118 - RNA, 23 nt, Human
augcaaugagauagaagauguuu

SEQ ID NO: 3628119 - RNA, 24 nt, Human
augcaauguaagcauacuuuguaa

SEQ ID NO: 3628120 - RNA, 18 nt, Human
augcaaugugcuacugau

SEQ ID NO: 3628121 - RNA, 16 nt, Human
augcacaaacagaggc

SEQ ID NO: 3628122 - RNA, 18 nt, Human
augcacaaacagaggccg

SEQ ID NO: 3628123 - RNA, 14 nt, Human
augcacacaaaaca

SEQ ID NO: 3628124 - RNA, 10 nt, Human
augcacacac

SEQ ID NO: 3628125 - RNA, 15 nt, Human
augcacacacauaua

SEQ ID NO: 3628126 - RNA, 13 nt, Human
augcacacauuuu

SEQ ID NO: 3628127 - RNA, 14 nt, Human
augcacacauuuuu

SEQ ID NO: 3628128 - RNA, 22 nt, Human
augcacacauuuuuuaaaugca

SEQ ID NO: 3628129 - RNA, 16 nt, Human
augcacaccucccccu

SEQ ID NO: 3628130 - RNA, 20 nt, Human
augcacacuagccucuccag

SEQ ID NO: 3628131 - RNA, 11 nt, Human
augcacagaga

SEQ ID NO: 3628132 - RNA, 19 nt, Human
augcacagaguuguuacau

SEQ ID NO: 3628133 - RNA, 22 nt, Human
augcacagaguuguuacauuuu

SEQ ID NO: 3628134 - RNA, 18 nt, Human
augccacagcccugucag

SEQ ID NO: 3628135 - RNA, 15 nt, Human
augccacccacaucu

SEQ ID NO: 3628136 - RNA, 19 nt, Human
augccacccccgcuggagg

SEQ ID NO: 3628137 - RNA, 21 nt, Human
augccacccccgcuggaggau

SEQ ID NO: 3628138 - RNA, 22 nt, Human
augccacgcgguacaaaggaaa

SEQ ID NO: 3628139 - RNA, 15 nt, Human
augccacugccuucg

SEQ ID NO: 3628140 - RNA, 22 nt, Human
augccagagacggaagccuuuu

SEQ ID NO: 3628141 - RNA, 22 nt, Human
augccagccaagcucugcaguc

SEQ ID NO: 3628142 - RNA, 18 nt, Human
augccagcucagucccau

SEQ ID NO: 3628143 - RNA, 12 nt, Human
augccagcuggc

SEQ ID NO: 3628144 - RNA, 23 nt, Human
augccagggccaugucagacaca

SEQ ID NO: 3628145 - RNA, 21 nt, Human
augccagggccgaccagagga

SEQ ID NO: 3628146 - RNA, 13 nt, Human
augccaggggccu

SEQ ID NO: 3628147 - RNA, 18 nt, Human
augccagguucuauuugg

SEQ ID NO: 3628148 - RNA, 17 nt, Human
augccaguaacaggcuc

SEQ ID NO: 3628149 - RNA, 13 nt, Human
augccaguauuuu

SEQ ID NO: 3628150 - RNA, 14 nt, Human
augccaguauuuuu

SEQ ID NO: 3628151 - RNA, 22 nt, Human
augccaguauuuuuaaaggcau

SEQ ID NO: 3628152 - RNA, 20 nt, Human
augccaguccagaugugccu

SEQ ID NO: 3628153 - RNA, 14 nt, Human
augccaucaauaaa

SEQ ID NO: 3628154 - RNA, 14 nt, Human
augccaucaucucc

SEQ ID NO: 3628155 - RNA, 13 nt, Human
augccauccucuu

SEQ ID NO: 3628156 - RNA, 15 nt, Human
augccauccucuuuc

SEQ ID NO: 3628157 - RNA, 17 nt, Human
augccaucugugggcac

SEQ ID NO: 3628158 - RNA, 15 nt, Human
augccauuuguuuau

SEQ ID NO: 3628159 - RNA, 17 nt, Human
augcccaagcccugaga

SEQ ID NO: 3628160 - RNA, 12 nt, Human
augcccaaggga

SEQ ID NO: 3628161 - RNA, 17 nt, Human
augcccacccccugccc

SEQ ID NO: 3628162 - RNA, 19 nt, Human
augcccaccugcccaucac

SEQ ID NO: 3628163 - RNA, 20 nt, Human
augcccaccugcccaucaca

SEQ ID NO: 3628164 - RNA, 14 nt, Human
augcccagagaccc

SEQ ID NO: 3628165 - RNA, 17 nt, Human
augcccagagacccagc

SEQ ID NO: 3628166 - RNA, 22 nt, Human
augcccagagggcccaggcagg

SEQ ID NO: 3628167 - RNA, 23 nt, Human
augcccagagggcccaggcaggc

SEQ ID NO: 3628168 - RNA, 14 nt, Human
augcccagccccuu

SEQ ID NO: 3628169 - RNA, 16 nt, Human
augcccagccccuucu

SEQ ID NO: 3628170 - RNA, 16 nt, Human
augcccagcucagagg

SEQ ID NO: 3628171 - RNA, 15 nt, Human
augccccagagcugu

SEQ ID NO: 3628172 - RNA, 18 nt, Human
augccccaucccaugcug

SEQ ID NO: 3628173 - RNA, 13 nt, Human
augcccccagcug

SEQ ID NO: 3628174 - RNA, 14 nt, Human
augcccccagcugg

SEQ ID NO: 3628175 - RNA, 15 nt, Human
augcccccucgugcc

SEQ ID NO: 3628176 - RNA, 17 nt, Human
augcccccucgugccag

SEQ ID NO: 3628177 - RNA, 21 nt, Human
augcccccuuucagaugucuu

SEQ ID NO: 3628178 - RNA, 18 nt, Human
augccccggccaccucug

SEQ ID NO: 3628179 - RNA, 19 nt, Human
augccccggccaccucugc

SEQ ID NO: 3628180 - RNA, 15 nt, Human
augccccugaauuua

SEQ ID NO: 3628181 - RNA, 14 nt, Human
augccccuuucugg

SEQ ID NO: 3628182 - RNA, 17 nt, Human
augcccggcuaauuuuu

SEQ ID NO: 3628183 - RNA, 16 nt, Human
augcccucccuucucc

SEQ ID NO: 3628184 - RNA, 17 nt, Human
augcccucccuucuccc

SEQ ID NO: 3628185 - RNA, 20 nt, Human
augcccucccuucucccugg

SEQ ID NO: 3628186 - RNA, 14 nt, Human
augcccuccucucc

SEQ ID NO: 3628187 - RNA, 22 nt, Human
augcccugcuagaugagaauuc

SEQ ID NO: 3628188 - RNA, 23 nt, Human
augcccugcucugaacacgaagc

SEQ ID NO: 3628189 - RNA, 15 nt, Human
augcccuuaaaucau

SEQ ID NO: 3628190 - RNA, 12 nt, Human
augcccuucacu

SEQ ID NO: 3628191 - RNA, 21 nt, Human
augccgaaugcccucagggga

SEQ ID NO: 3628192 - RNA, 19 nt, Human
augccgauuucuguaaacu

SEQ ID NO: 3628193 - RNA, 16 nt, Human
augccggaugugcuuu

SEQ ID NO: 3628194 - RNA, 14 nt, Human
augccguuacuuuu

SEQ ID NO: 3628195 - RNA, 16 nt, Human
augccuaccaauauuu

SEQ ID NO: 3628196 - RNA, 16 nt, Human
augccuaugguggauc

SEQ ID NO: 3628197 - RNA, 19 nt, Human
augccuaugguggauccaa

SEQ ID NO: 3628198 - RNA, 21 nt, Human
augccuaugguggauccaaac

SEQ ID NO: 3628199 - RNA, 12 nt, Human
augccuauugua

SEQ ID NO: 3628200 - RNA, 15 nt, Human
augccucaaugugac

SEQ ID NO: 3628201 - RNA, 21 nt, Human
augccucacuaauuuuuguau

SEQ ID NO: 3628202 - RNA, 23 nt, Human
augccucagaagugcaucuggag

SEQ ID NO: 3628203 - RNA, 23 nt, Human
augccucagccacuugccugugc

SEQ ID NO: 3628204 - RNA, 13 nt, Human
augccucagcccu

SEQ ID NO: 3628205 - RNA, 16 nt, Human
augccucaguguauuu

SEQ ID NO: 3628206 - RNA, 22 nt, Human
augccucccuaucccucacaca

SEQ ID NO: 3628207 - RNA, 14 nt, Human
augccucccugagc

SEQ ID NO: 3628208 - RNA, 20 nt, Human
augccucuccuuuguauauu

SEQ ID NO: 3628209 - RNA, 13 nt, Human
augccucucucag

SEQ ID NO: 3628210 - RNA, 14 nt, Human
augccucucucagg

SEQ ID NO: 3628211 - RNA, 17 nt, Human
augccucucucaggcca

SEQ ID NO: 3628212 - RNA, 18 nt, Human
augccucugaggccagcc

SEQ ID NO: 3628213 - RNA, 22 nt, Human
augccucugauaugggacugag

SEQ ID NO: 3628214 - RNA, 23 nt, Human
augccugcuuuuuggaaagucag

SEQ ID NO: 3628215 - RNA, 19 nt, Human
augccuggauggggcugca

SEQ ID NO: 3628216 - RNA, 21 nt, Human
augccuggauggggcugcacc

SEQ ID NO: 3628217 - RNA, 18 nt, Human
augccuggucuuuccucu

SEQ ID NO: 3628218 - RNA, 17 nt, Human
augccuggugagcauua

SEQ ID NO: 3628219 - RNA, 11 nt, Human
augccuggugg

SEQ ID NO: 3628220 - RNA, 13 nt, Human
augccugguggca

SEQ ID NO: 3628221 - RNA, 21 nt, Human
augccuguacucgcuugugca

SEQ ID NO: 3628222 - RNA, 23 nt, Human
augccuguacucgcuugugcaga

SEQ ID NO: 3628223 - RNA, 18 nt, Human
augccuguccagccuggg

SEQ ID NO: 3628224 - RNA, 14 nt, Human
augccuguggcugc

SEQ ID NO: 3628225 - RNA, 16 nt, Human
augccuuaaaauggaa

SEQ ID NO: 3628226 - RNA, 19 nt, Human
augccuuccagcacccugc

SEQ ID NO: 3628227 - RNA, 20 nt, Human
augccuucuuauugcuuuua

SEQ ID NO: 3628228 - RNA, 22 nt, Human
augccuuggggaggacaaaacu

SEQ ID NO: 3628229 - RNA, 18 nt, Human
augccuuguuucauauuu

SEQ ID NO: 3628230 - RNA, 22 nt, Human
augccuuuaaaguaugaaucua

SEQ ID NO: 3628231 - RNA, 21 nt, Human
augccuuuaaaucugugauga

SEQ ID NO: 3628232 - RNA, 13 nt, Human
augccuuugagac

SEQ ID NO: 3628233 - RNA, 22 nt, Human
augccuuugagacaguuucuua

SEQ ID NO: 3628234 - RNA, 12 nt, Human
augccuuuguaa

SEQ ID NO: 3628235 - RNA, 21 nt, Human
augccuuuguacuuuagggaa

SEQ ID NO: 3628236 - RNA, 16 nt, Human
augccuuuuuuguagu

SEQ ID NO: 3628237 - RNA, 19 nt, Human
augcgauuuuauuacuggc

SEQ ID NO: 3628238 - RNA, 14 nt, Human
augcgcaggcuggc

SEQ ID NO: 3628239 - RNA, 14 nt, Human
augcgcagugccuu

SEQ ID NO: 3628240 - RNA, 16 nt, Human
augcgcauucuaaccu

SEQ ID NO: 3628241 - RNA, 22 nt, Human
augcgcauucuaaccuggaggu

SEQ ID NO: 3628242 - RNA, 18 nt, Human
augcgccaauaaaccaau

SEQ ID NO: 3628243 - RNA, 18 nt, Human
augcgcccccuccgcccu

SEQ ID NO: 3628244 - RNA, 15 nt, Human
augcgcucagggcca

SEQ ID NO: 3628245 - RNA, 14 nt, Human
augcgcuguggcca

SEQ ID NO: 3628246 - RNA, 18 nt, Human
augcggcccagcccggcu

SEQ ID NO: 3628247 - RNA, 20 nt, Human
augcggcccaggauggcuuu

SEQ ID NO: 3628248 - RNA, 14 nt, Human
augcgguagccagc

SEQ ID NO: 3628249 - RNA, 21 nt, Human
augcguacguuuccugagaag

SEQ ID NO: 3628250 - RNA, 19 nt, Human
augcgucccaagauguuga

SEQ ID NO: 3628251 - RNA, 20 nt, Human
augcgugcauaccacuuuug

SEQ ID NO: 3628252 - RNA, 12 nt, Human
augcgugugugu

SEQ ID NO: 3628253 - RNA, 16 nt, Human
augcgugugugugugu

SEQ ID NO: 3628254 - RNA, 12 nt, Human
augcuaaaccuu

SEQ ID NO: 3628255 - RNA, 14 nt, Human
augcuaaagaaaaa

SEQ ID NO: 3628256 - RNA, 23 nt, Human
augcuaaagaaaaagucauccaa

SEQ ID NO: 3628257 - RNA, 21 nt, Human
augcuaaauguaagaaucauu

SEQ ID NO: 3628258 - RNA, 23 nt, Human
augcuaacaguucacuugcagug

SEQ ID NO: 3628259 - RNA, 16 nt, Human
augcuaagaauuuuuu

SEQ ID NO: 3628260 - RNA, 16 nt, Human
augcuaagagaaguag

SEQ ID NO: 3628261 - RNA, 13 nt, Human
augcuaagugaaa

SEQ ID NO: 3628262 - RNA, 19 nt, Human
augcuaauauuaaaaguca

SEQ ID NO: 3628263 - RNA, 17 nt, Human
augcuacaauuuuaaga

SEQ ID NO: 3628264 - RNA, 15 nt, Human
augcuacaguaauaa

SEQ ID NO: 3628265 - RNA, 14 nt, Human
augcuaccaccagc

SEQ ID NO: 3628266 - RNA, 15 nt, Human
augcuaccaccagcu

SEQ ID NO: 3628267 - RNA, 22 nt, Human
augcuaccaccagcugugucca

SEQ ID NO: 3628268 - RNA, 19 nt, Human
augcuaccaugccucucca

SEQ ID NO: 3628269 - RNA, 19 nt, Human
augcuaccccacuaugaca

SEQ ID NO: 3628270 - RNA, 17 nt, Human
augcuacgugugauuuu

SEQ ID NO: 3628271 - RNA, 20 nt, Human
augcuacgugugauuuuucu

SEQ ID NO: 3628272 - RNA, 15 nt, Human
augcuagaacucccu

SEQ ID NO: 3628273 - RNA, 19 nt, Human
augcuagaacucccuuuca

SEQ ID NO: 3628274 - RNA, 22 nt, Human
augcuagaacucccuuucaaca

SEQ ID NO: 3628275 - RNA, 18 nt, Human
augcuagcgcguugccug

SEQ ID NO: 3628276 - RNA, 13 nt, Human
augcuagguucua

SEQ ID NO: 3628277 - RNA, 17 nt, Human
augcuauggucagguua

SEQ ID NO: 3628278 - RNA, 16 nt, Human
auggaguguacaagua

SEQ ID NO: 3628279 - RNA, 23 nt, Human
auggaguuggaguucauucauau

SEQ ID NO: 3628280 - RNA, 15 nt, Human
auggaguuucuaagg

SEQ ID NO: 3628281 - RNA, 21 nt, Human
auggauaaaauaaugcugcaa

SEQ ID NO: 3628282 - RNA, 18 nt, Human
auggauaaccuauaugau

SEQ ID NO: 3628283 - RNA, 19 nt, Human
auggauaaccuauaugauu

SEQ ID NO: 3628284 - RNA, 18 nt, Human
auggauaggcacaggaaa

SEQ ID NO: 3628285 - RNA, 21 nt, Human
auggauauuuguacuguuuaa

SEQ ID NO: 3628286 - RNA, 15 nt, Human
auggaucacaagaug

SEQ ID NO: 3628287 - RNA, 17 nt, Human
auggauccccagugaaa

SEQ ID NO: 3628288 - RNA, 20 nt, Human
auggaucgauauuaauguau

SEQ ID NO: 3628289 - RNA, 13 nt, Human
auggaugauucag

SEQ ID NO: 3628290 - RNA, 18 nt, Human
auggaugauucagaaauu

SEQ ID NO: 3628291 - RNA, 22 nt, Human
auggaugccaauauuaaaucug

SEQ ID NO: 3628292 - RNA, 19 nt, Human
auggaugcccagaggacuc

SEQ ID NO: 3628293 - RNA, 12 nt, Human
auggauggaaaa

SEQ ID NO: 3628294 - RNA, 17 nt, Human
auggauguggggucccc

SEQ ID NO: 3628295 - RNA, 22 nt, Human
auggauguuuuagccauuguug

SEQ ID NO: 3628296 - RNA, 18 nt, Human
auggauuauaaucagaau

SEQ ID NO: 3628297 - RNA, 16 nt, Human
auggauucaguuucua

SEQ ID NO: 3628298 - RNA, 18 nt, Human
auggauucauuacagcuu

SEQ ID NO: 3628299 - RNA, 14 nt, Human
auggauucuaaaau

SEQ ID NO: 3628300 - RNA, 15 nt, Human
auggauucuaaaaug

SEQ ID NO: 3628301 - RNA, 16 nt, Human
auggauucucagauau

SEQ ID NO: 3628302 - RNA, 22 nt, Human
auggauuggauuauuuaauaac

SEQ ID NO: 3628303 - RNA, 23 nt, Human
auggauuggguaucaaaaugaau

SEQ ID NO: 3628304 - RNA, 14 nt, Human
auggauuugaagca

SEQ ID NO: 3628305 - RNA, 21 nt, Human
auggauuugccugugccaccc

SEQ ID NO: 3628306 - RNA, 22 nt, Human
auggauuuggcacuagccaaag

SEQ ID NO: 3628307 - RNA, 21 nt, Human
auggauuuugggagugacuca

SEQ ID NO: 3628308 - RNA, 18 nt, Human
auggcaaccauuauaacc

SEQ ID NO: 3628309 - RNA, 19 nt, Human
auggcaaggacugcaggga

SEQ ID NO: 3628310 - RNA, 21 nt, Human
auggcaaggcagcccugucug

SEQ ID NO: 3628311 - RNA, 16 nt, Human
auggcaauguuuugcu

SEQ ID NO: 3628312 - RNA, 20 nt, Human
auggcaauguuuugcuuuug

SEQ ID NO: 3628313 - RNA, 21 nt, Human
auggcacagggcaugaaauga

SEQ ID NO: 3628314 - RNA, 17 nt, Human
auggcacaucagcacga

SEQ ID NO: 3628315 - RNA, 17 nt, Human
auggcaccuucagacuu

SEQ ID NO: 3628316 - RNA, 18 nt, Human
auggcacucccuccagca

SEQ ID NO: 3628317 - RNA, 21 nt, Human
auggcacucccuccagcacaa

SEQ ID NO: 3628318 - RNA, 22 nt, Human
auggcacuuagcuaucagaaga

SEQ ID NO: 3628319 - RNA, 17 nt, Human
auggcacuugcaucugu

SEQ ID NO: 3628320 - RNA, 21 nt, Human
auggcagaaaaaaugucugua

SEQ ID NO: 3628321 - RNA, 19 nt, Human
auggcagaagacaccagag

SEQ ID NO: 3628322 - RNA, 19 nt, Human
auggcagaggaauaucaau

SEQ ID NO: 3628323 - RNA, 15 nt, Human
auggcagaguuguaa

SEQ ID NO: 3628324 - RNA, 17 nt, Human
auggcagaguuguaaau

SEQ ID NO: 3628325 - RNA, 18 nt, Human
auggcagaguuguaaaua

SEQ ID NO: 3628326 - RNA, 19 nt, Human
auggcagaguuuguguguu

SEQ ID NO: 3628327 - RNA, 20 nt, Human
auggcagaguuuguguguug

SEQ ID NO: 3628328 - RNA, 23 nt, Human
auggcagaguuuguguguugucu

SEQ ID NO: 3628329 - RNA, 14 nt, Human
auggcagauguagg

SEQ ID NO: 3628330 - RNA, 20 nt, Human
auggcagauguaggagggac

SEQ ID NO: 3628331 - RNA, 16 nt, Human
auggcagcaggccugu

SEQ ID NO: 3628332 - RNA, 19 nt, Human
auggcagcaggccuguugc

SEQ ID NO: 3628333 - RNA, 19 nt, Human
auggcagccuacucuccuu

SEQ ID NO: 3628334 - RNA, 20 nt, Human
auggcagcuguuuaaauguu

SEQ ID NO: 3628335 - RNA, 15 nt, Human
auggcagggggcugc

SEQ ID NO: 3628336 - RNA, 22 nt, Human
auggcagggggcugcugcuggg

SEQ ID NO: 3628337 - RNA, 17 nt, Human
auggcaggggguggaau

SEQ ID NO: 3628338 - RNA, 24 nt, Human
auggcaggggguggaauuauuacu

SEQ ID NO: 3628339 - RNA, 19 nt, Human
auggcaggugauguccugu

SEQ ID NO: 3628340 - RNA, 22 nt, Human
auggcaucccuuuuucauaaau

SEQ ID NO: 3628341 - RNA, 17 nt, Human
auggcauccugugaagu

SEQ ID NO: 3628342 - RNA, 16 nt, Human
auggccaccuuuucag

SEQ ID NO: 3628343 - RNA, 17 nt, Human
auggccaccuuuucagc

SEQ ID NO: 3628344 - RNA, 21 nt, Human
auggccagccccuuagacaga

SEQ ID NO: 3628345 - RNA, 22 nt, Human
auggccagccccuuagacagag

SEQ ID NO: 3628346 - RNA, 22 nt, Human
auggccagguggccacuccaga

SEQ ID NO: 3628347 - RNA, 15 nt, Human
auggccagugucugu

SEQ ID NO: 3628348 - RNA, 17 nt, Human
auggccagugucugucc

SEQ ID NO: 3628349 - RNA, 22 nt, Human
auggccagugucugucccgggg

SEQ ID NO: 3628350 - RNA, 14 nt, Human
auggccccagcaca

SEQ ID NO: 3628351 - RNA, 20 nt, Human
auggccccagcacagcuuga

SEQ ID NO: 3628352 - RNA, 17 nt, Human
auggcccggaugcugcu

SEQ ID NO: 3628353 - RNA, 19 nt, Human
auggcccggaugcugcuuc

SEQ ID NO: 3628354 - RNA, 21 nt, Human
auggcccuguagccagcaccu

SEQ ID NO: 3628355 - RNA, 14 nt, Human
auggccgggcaggg

SEQ ID NO: 3628356 - RNA, 21 nt, Human
auggccgggcgcgguggcuca

SEQ ID NO: 3628357 - RNA, 18 nt, Human
auggccgugaaugggugc

SEQ ID NO: 3628358 - RNA, 16 nt, Human
auggccguggauggcc

SEQ ID NO: 3628359 - RNA, 20 nt, Human
auggccguggauggccgugg

SEQ ID NO: 3628360 - RNA, 16 nt, Human
auggccucagcugccu

SEQ ID NO: 3628361 - RNA, 17 nt, Human
auggccucagcugccuc

SEQ ID NO: 3628362 - RNA, 21 nt, Human
auggccucagcugccucacuu

SEQ ID NO: 3628363 - RNA, 17 nt, Human
auggccucauguggcug

SEQ ID NO: 3628364 - RNA, 17 nt, Human
auggccugagaagagag

SEQ ID NO: 3628365 - RNA, 17 nt, Human
auggccugcaaacuggg

SEQ ID NO: 3628366 - RNA, 20 nt, Human
auggccugccuugaagccac

SEQ ID NO: 3628367 - RNA, 12 nt, Human
auggccuggcca

SEQ ID NO: 3628368 - RNA, 18 nt, Human
auggccuuaauuuccuuu

SEQ ID NO: 3628369 - RNA, 14 nt, Human
auggccuucauauc

SEQ ID NO: 3628370 - RNA, 23 nt, Human
auggccuucauaucauccacaca

SEQ ID NO: 3628371 - RNA, 21 nt, Human
auggcgauucccauugaaaau

SEQ ID NO: 3628372 - RNA, 22 nt, Human
auggcgauucccauugaaaaug

SEQ ID NO: 3628373 - RNA, 13 nt, Human
auggcgcaggaac

SEQ ID NO: 3628374 - RNA, 14 nt, Human
auggcgcagugccu

SEQ ID NO: 3628375 - RNA, 19 nt, Human
auggcgcagugccucuggu

SEQ ID NO: 3628376 - RNA, 18 nt, Human
auggcguaaguacagaga

SEQ ID NO: 3628377 - RNA, 19 nt, Human
auggcguaaguacagagaa

SEQ ID NO: 3628378 - RNA, 21 nt, Human
auggcguaaguacagagaagc

SEQ ID NO: 3628379 - RNA, 23 nt, Human
auggcguaaguacagagaagcca

SEQ ID NO: 3628380 - RNA, 20 nt, Human
auggcguagagggugcugcc

SEQ ID NO: 3628381 - RNA, 17 nt, Human
auggcgugaucucggcu

SEQ ID NO: 3628382 - RNA, 19 nt, Human
auggcuaagcaaaauguga

SEQ ID NO: 3628383 - RNA, 21 nt, Human
auggcuaagcuuaaaaaaaac

SEQ ID NO: 3628384 - RNA, 17 nt, Human
auggcuaauucccagag

SEQ ID NO: 3628385 - RNA, 17 nt, Human
auggcuacuugcuuuga

SEQ ID NO: 3628386 - RNA, 22 nt, Human
auggcuagaauauccuacuucu

SEQ ID NO: 3628387 - RNA, 13 nt, Human
auggcuauaaaua

SEQ ID NO: 3628388 - RNA, 21 nt, Human
auggcuauaaauauauaaaaa

SEQ ID NO: 3628389 - RNA, 14 nt, Human
auggcuauauggca

SEQ ID NO: 3628390 - RNA, 19 nt, Human
auggcuauauggcaagaaa

SEQ ID NO: 3628391 - RNA, 14 nt, Human
auggcuauuaacaa

SEQ ID NO: 3628392 - RNA, 16 nt, Human
auggcucacuaugaau

SEQ ID NO: 3628393 - RNA, 18 nt, Human
auggcucacuauggugcc

SEQ ID NO: 3628394 - RNA, 12 nt, Human
auggcucagagg

SEQ ID NO: 3628395 - RNA, 22 nt, Human
auggcucagagggggacugcug

SEQ ID NO: 3628396 - RNA, 14 nt, Human
auggcucagggugg

SEQ ID NO: 3628397 - RNA, 17 nt, Human
auggcuccagaaauguc

SEQ ID NO: 3628398 - RNA, 23 nt, Human
auggcuccagucugcugcccucc

SEQ ID NO: 3628399 - RNA, 23 nt, Human
auggcucugcaccccucugcccu

SEQ ID NO: 3628400 - RNA, 23 nt, Human
auggcugccaaugggagcucaug

SEQ ID NO: 3628401 - RNA, 23 nt, Human
auggcugcugaagcugccugcuu

SEQ ID NO: 3628402 - RNA, 22 nt, Human
auggcuggccacugcacagagc

SEQ ID NO: 3628403 - RNA, 23 nt, Human
auggcuggccacugcacagagcu

SEQ ID NO: 3628404 - RNA, 13 nt, Human
auggcugugagga

SEQ ID NO: 3628405 - RNA, 20 nt, Human
auggcugugccucugccugu

SEQ ID NO: 3628406 - RNA, 20 nt, Human
auggcuguguuugcagccug

SEQ ID NO: 3628407 - RNA, 14 nt, Human
auggcuuaauguuu

SEQ ID NO: 3628408 - RNA, 16 nt, Human
auggcuuaauguuuau

SEQ ID NO: 3628409 - RNA, 17 nt, Human
auggcuuccuccucccu

SEQ ID NO: 3628410 - RNA, 20 nt, Human
auggcuucggacaaaauauc

SEQ ID NO: 3628411 - RNA, 14 nt, Human
auggcuucuaacaa

SEQ ID NO: 3628412 - RNA, 18 nt, Human
auggcuugccacagcucu

SEQ ID NO: 3628413 - RNA, 13 nt, Human
auggcuugucuau

SEQ ID NO: 3628414 - RNA, 20 nt, Human
auggcuugucuauacuccuu

SEQ ID NO: 3628415 - RNA, 23 nt, Human
auggcuuguucaucauccagaug

SEQ ID NO: 3628416 - RNA, 20 nt, Human
auggcuuuauuuguuuuuuu

SEQ ID NO: 3628417 - RNA, 15 nt, Human
auggcuuucagaaaa

SEQ ID NO: 3628418 - RNA, 18 nt, Human
auggcuuuguauagaacc

SEQ ID NO: 3628419 - RNA, 17 nt, Human
augggaaagccaccucu

SEQ ID NO: 3628420 - RNA, 12 nt, Human
auuauauuugga

SEQ ID NO: 3628421 - RNA, 20 nt, Human
auuaucaaagggauaaagaa

SEQ ID NO: 3628422 - RNA, 16 nt, Human
auuaucaagcuaauaa

SEQ ID NO: 3628423 - RNA, 12 nt, Human
auuaucagaugc

SEQ ID NO: 3628424 - RNA, 12 nt, Human
auuaucaugugu

SEQ ID NO: 3628425 - RNA, 17 nt, Human
auuauccuauuucagua

SEQ ID NO: 3628426 - RNA, 18 nt, Human
auuaucgccuuuugacag

SEQ ID NO: 3628427 - RNA, 19 nt, Human
auuaucggaagcagugccu

SEQ ID NO: 3628428 - RNA, 18 nt, Human
auuaucgggaacaguguu

SEQ ID NO: 3628429 - RNA, 20 nt, Human
auuaucgggagcagugucuu

SEQ ID NO: 3628430 - RNA, 18 nt, Human
auuaucuaaaaucugcua

SEQ ID NO: 3628431 - RNA, 19 nt, Human
auuaucuaaaaucugcuag

SEQ ID NO: 3628432 - RNA, 17 nt, Human
auuaucuaaaguguguu

SEQ ID NO: 3628433 - RNA, 23 nt, Human
auuaucuaaaguguguuguugcu

SEQ ID NO: 3628434 - RNA, 14 nt, Human
auuaucuaauuuau

SEQ ID NO: 3628435 - RNA, 22 nt, Human
auuaucuauacauaucuuuauu

SEQ ID NO: 3628436 - RNA, 22 nt, Human
auuaucuauagcuaaguacaca

SEQ ID NO: 3628437 - RNA, 15 nt, Human
auuaucuugauacau

SEQ ID NO: 3628438 - RNA, 22 nt, Human
auuaucuugggauaguucccaa

SEQ ID NO: 3628439 - RNA, 22 nt, Human
auuaucuuuucauacauuuucu

SEQ ID NO: 3628440 - RNA, 18 nt, Human
auuaugaaacuuguguaa

SEQ ID NO: 3628441 - RNA, 21 nt, Human
auuaugaaagcaacaaagaaa

SEQ ID NO: 3628442 - RNA, 20 nt, Human
auuaugaaugugaagccuuc

SEQ ID NO: 3628443 - RNA, 15 nt, Human
auuaugacaguuaua

SEQ ID NO: 3628444 - RNA, 17 nt, Human
auuaugacaguuauacu

SEQ ID NO: 3628445 - RNA, 23 nt, Human
auuaugaugaaaaccuacauauu

SEQ ID NO: 3628446 - RNA, 21 nt, Human
auuaugaugugggucaaggaa

SEQ ID NO: 3628447 - RNA, 12 nt, Human
auuaugauucuu

SEQ ID NO: 3628448 - RNA, 21 nt, Human
auuaugcaggggcaaacaccu

SEQ ID NO: 3628449 - RNA, 15 nt, Human
auuaugcauaacuga

SEQ ID NO: 3628450 - RNA, 17 nt, Human
auuaugcauaacugaca

SEQ ID NO: 3628451 - RNA, 22 nt, Human
auuaugccacuuccuuuuaacu

SEQ ID NO: 3628452 - RNA, 16 nt, Human
auuaugcuaagaauuu

SEQ ID NO: 3628453 - RNA, 22 nt, Human
auuauggagucauuuuuacaau

SEQ ID NO: 3628454 - RNA, 22 nt, Human
auuauggcauauauuaaaagca

SEQ ID NO: 3628455 - RNA, 17 nt, Human
auuaugggaaucaagau

SEQ ID NO: 3628456 - RNA, 15 nt, Human
auuauguagcucuuu

SEQ ID NO: 3628457 - RNA, 16 nt, Human
auuauguagcucuuug

SEQ ID NO: 3628458 - RNA, 19 nt, Human
auuauguagcucuuuguca

SEQ ID NO: 3628459 - RNA, 15 nt, Human
auuauguauguuuac

SEQ ID NO: 3628460 - RNA, 17 nt, Human
auuauguauguuuacau

SEQ ID NO: 3628461 - RNA, 15 nt, Human
auuaugucaaccagg

SEQ ID NO: 3628462 - RNA, 19 nt, Human
auuauguccacuguguaua

SEQ ID NO: 3628463 - RNA, 23 nt, Human
auuaugucuuuuauauuuguauc

SEQ ID NO: 3628464 - RNA, 20 nt, Human
auuaugugaccauaauguac

SEQ ID NO: 3628465 - RNA, 17 nt, Human
auuaugugguuuuagau

SEQ ID NO: 3628466 - RNA, 19 nt, Human
auuaugugugcaugugugu

SEQ ID NO: 3628467 - RNA, 20 nt, Human
auuauguguguuuuaaaaug

SEQ ID NO: 3628468 - RNA, 21 nt, Human
auuauguguguuuuaaaauga

SEQ ID NO: 3628469 - RNA, 15 nt, Human
auuauguguguuuug

SEQ ID NO: 3628470 - RNA, 21 nt, Human
auuauguuaaaacugggacag

SEQ ID NO: 3628471 - RNA, 13 nt, Human
auuauguuaaacu

SEQ ID NO: 3628472 - RNA, 14 nt, Human
auuauguuaaacua

SEQ ID NO: 3628473 - RNA, 23 nt, Human
auuauguuaaacuagcauaucug

SEQ ID NO: 3628474 - RNA, 20 nt, Human
auuauguuguuagagaaaaa

SEQ ID NO: 3628475 - RNA, 18 nt, Human
auuauguuuuuauuaaga

SEQ ID NO: 3628476 - RNA, 23 nt, Human
auuauguuuuuauuaagauuauu

SEQ ID NO: 3628477 - RNA, 20 nt, Human
auuauguuuuuuaaaauauu

SEQ ID NO: 3628478 - RNA, 23 nt, Human
auuauuaaauuguaaaacuccaa

SEQ ID NO: 3628479 - RNA, 15 nt, Human
auuauuaaugcuuug

SEQ ID NO: 3628480 - RNA, 13 nt, Human
auuauuaauugca

SEQ ID NO: 3628481 - RNA, 20 nt, Human
auuauuacuuauuuuugaca

SEQ ID NO: 3628482 - RNA, 13 nt, Human
auuauuacuugua

SEQ ID NO: 3628483 - RNA, 14 nt, Human
auuauuacuuguaa

SEQ ID NO: 3628484 - RNA, 16 nt, Human
auuauuacuuguaaau

SEQ ID NO: 3628485 - RNA, 17 nt, Human
auuauuacuuguaaaua

SEQ ID NO: 3628486 - RNA, 20 nt, Human
auuauuacuuguaaauauaa

SEQ ID NO: 3628487 - RNA, 23 nt, Human
auuauuacuuguaaauauaaaga

SEQ ID NO: 3628488 - RNA, 22 nt, Human
auuauuacuuuuccucuuagaa

SEQ ID NO: 3628489 - RNA, 12 nt, Human
auuauuagaaau

SEQ ID NO: 3628490 - RNA, 22 nt, Human
auuauuagccagguaaugugaa

SEQ ID NO: 3628491 - RNA, 14 nt, Human
auuauuauaaaaau

SEQ ID NO: 3628492 - RNA, 19 nt, Human
auuauuauaaaaggggguc

SEQ ID NO: 3628493 - RNA, 15 nt, Human
auuauuauagguaau

SEQ ID NO: 3628494 - RNA, 17 nt, Human
auuauucaaaguugccu

SEQ ID NO: 3628495 - RNA, 18 nt, Human
auuauucaaaguugccua

SEQ ID NO: 3628496 - RNA, 19 nt, Human
auuauucaaaguugccuaa

SEQ ID NO: 3628497 - RNA, 14 nt, Human
auuauucaguguca

SEQ ID NO: 3628498 - RNA, 15 nt, Human
auuauucagugucac

SEQ ID NO: 3628499 - RNA, 12 nt, Human
auuauucauuua

SEQ ID NO: 3628500 - RNA, 13 nt, Human
auuauucauuuaa

SEQ ID NO: 3628501 - RNA, 15 nt, Human
auuauucauuuaaaa

SEQ ID NO: 3628502 - RNA, 18 nt, Human
auuauucauuuaaaauga

SEQ ID NO: 3628503 - RNA, 19 nt, Human
auuauucauuuaaaaugau

SEQ ID NO: 3628504 - RNA, 15 nt, Human
auuauucauuuagug

SEQ ID NO: 3628505 - RNA, 14 nt, Human
auuauucucuuuua

SEQ ID NO: 3628506 - RNA, 18 nt, Human
auuauucucuuuuaucug

SEQ ID NO: 3628507 - RNA, 15 nt, Human
auuauugaaauauua

SEQ ID NO: 3628508 - RNA, 12 nt, Human
auuauugacacu

SEQ ID NO: 3628509 - RNA, 13 nt, Human
auuauugacacug

SEQ ID NO: 3628510 - RNA, 15 nt, Human
auuauugacacugaa

SEQ ID NO: 3628511 - RNA, 19 nt, Human
auuauugagagcccuagaa

SEQ ID NO: 3628512 - RNA, 13 nt, Human
auuauugauauau

SEQ ID NO: 3628513 - RNA, 18 nt, Human
auuauugcuguugcuuga

SEQ ID NO: 3628514 - RNA, 21 nt, Human
auuauuggaaaggaccuaaaa

SEQ ID NO: 3628515 - RNA, 14 nt, Human
auuauuggaauuaa

SEQ ID NO: 3628516 - RNA, 18 nt, Human
auuauuggaauuaaccug

SEQ ID NO: 3628517 - RNA, 16 nt, Human
auuauuguauuuauuc

SEQ ID NO: 3628518 - RNA, 22 nt, Human
auuauuguccuuugauuccaaa

SEQ ID NO: 3628519 - RNA, 18 nt, Human
auuauugugguaggccuu

SEQ ID NO: 3628520 - RNA, 12 nt, Human
auuauuguuuau

SEQ ID NO: 3628521 - RNA, 12 nt, Human
auuauuuaauaa

SEQ ID NO: 3628522 - RNA, 21 nt, Human
auuauuuaauaaaaaaacaau

SEQ ID NO: 3628523 - RNA, 18 nt, Human
auuauuuaauaacauuac

SEQ ID NO: 3628524 - RNA, 22 nt, Human
auuauuuaauaacauuaccuua

SEQ ID NO: 3628525 - RNA, 16 nt, Human
auuauuuauauaugua

SEQ ID NO: 3628526 - RNA, 14 nt, Human
auuauuuauuuaau

SEQ ID NO: 3628527 - RNA, 20 nt, Human
auuauuuauuucugguaacu

SEQ ID NO: 3628528 - RNA, 18 nt, Human
auuauuucacaaauaaua

SEQ ID NO: 3628529 - RNA, 20 nt, Human
auuauuucuaggaagaauuu

SEQ ID NO: 3628530 - RNA, 21 nt, Human
auuauuugagaagcugcucaa

SEQ ID NO: 3628531 - RNA, 15 nt, Human
auuauuugauuauuu

SEQ ID NO: 3628532 - RNA, 12 nt, Human
auuauuugcaug

SEQ ID NO: 3628533 - RNA, 15 nt, Human
auuauuugcauguua

SEQ ID NO: 3628534 - RNA, 11 nt, Human
auuauuuggca

SEQ ID NO: 3628535 - RNA, 20 nt, Human
auuauuugggagggaaaagg

SEQ ID NO: 3628536 - RNA, 20 nt, Human
auuauuuguguaauagaaaa

SEQ ID NO: 3628537 - RNA, 23 nt, Human
auuauuuguguaauagaaaacug

SEQ ID NO: 3628538 - RNA, 22 nt, Human
auuauuuguguuuuaauuuaaa

SEQ ID NO: 3628539 - RNA, 14 nt, Human
auuauuuuaaacaa

SEQ ID NO: 3628540 - RNA, 21 nt, Human
auuauuuuaaacaaaauagaa

SEQ ID NO: 3628541 - RNA, 14 nt, Human
auuauuuuaaauua

SEQ ID NO: 3628542 - RNA, 18 nt, Human
auuauuuuaauuagguua

SEQ ID NO: 3628543 - RNA, 18 nt, Human
auuauuuuauguugcaua

SEQ ID NO: 3628544 - RNA, 21 nt, Human
auuauuuuauuaugaaacuug

SEQ ID NO: 3628545 - RNA, 14 nt, Human
auuauuuucauuac

SEQ ID NO: 3628546 - RNA, 21 nt, Human
auuauuuucauuacaauggaa

SEQ ID NO: 3628547 - RNA, 13 nt, Human
auuauuuuccaaa

SEQ ID NO: 3628548 - RNA, 14 nt, Human
auuauuuuccaaaa

SEQ ID NO: 3628549 - RNA, 14 nt, Human
auuauuuucuguca

SEQ ID NO: 3628550 - RNA, 21 nt, Human
auuauuuucuucauccaacuu

SEQ ID NO: 3628551 - RNA, 12 nt, Human
auuauuuugggg

SEQ ID NO: 3628552 - RNA, 19 nt, Human
auuauuuugguacuuuuau

SEQ ID NO: 3628553 - RNA, 20 nt, Human
auuauuuugguacuuuuaug

SEQ ID NO: 3628554 - RNA, 19 nt, Human
auuauuuuguucauacaua

SEQ ID NO: 3628555 - RNA, 12 nt, Human
auuauuuuuaau

SEQ ID NO: 3628556 - RNA, 17 nt, Human
auuauuuuuaauaugua

SEQ ID NO: 3628557 - RNA, 15 nt, Human
auuauuuuuucagac

SEQ ID NO: 3628558 - RNA, 20 nt, Human
auuauuuuuuuaaaauuuug

SEQ ID NO: 3628559 - RNA, 16 nt, Human
auucaaaaaguguuua

SEQ ID NO: 3628560 - RNA, 23 nt, Human
auucaaaaauuaucuauagcuaa

SEQ ID NO: 3628561 - RNA, 14 nt, Human
auucaaaaguucca

SEQ ID NO: 3628562 - RNA, 17 nt, Human
auucaaaaguuccaaga

SEQ ID NO: 3628563 - RNA, 16 nt, Human
auucaaaaguugaaau

SEQ ID NO: 3628564 - RNA, 14 nt, Human
auucugccaggccc

SEQ ID NO: 3628565 - RNA, 23 nt, Human
auucugccaggcccccaagccug

SEQ ID NO: 3628566 - RNA, 19 nt, Human
auucugcccuccuuaauuu

SEQ ID NO: 3628567 - RNA, 21 nt, Human
auucugccgcccccuccugaa

SEQ ID NO: 3628568 - RNA, 22 nt, Human
auucugccgugugcccucgggc

SEQ ID NO: 3628569 - RNA, 18 nt, Human
auucugccugcccaggcc

SEQ ID NO: 3628570 - RNA, 15 nt, Human
auucugcuaccucac

SEQ ID NO: 3628571 - RNA, 19 nt, Human
auucugcuaccucacuggg

SEQ ID NO: 3628572 - RNA, 18 nt, Human
auucugcucacauaucug

SEQ ID NO: 3628573 - RNA, 21 nt, Human
auucugcucacauaucuguca

SEQ ID NO: 3628574 - RNA, 22 nt, Human
auucugcucacauaucugucau

SEQ ID NO: 3628575 - RNA, 16 nt, Human
auucugcuggccucug

SEQ ID NO: 3628576 - RNA, 20 nt, Human
auucuggacagucagcucuu

SEQ ID NO: 3628577 - RNA, 12 nt, Human
auucuggaccuc

SEQ ID NO: 3628578 - RNA, 15 nt, Human
auucuggagauacug

SEQ ID NO: 3628579 - RNA, 21 nt, Human
auucuggauuuugucaagcag

SEQ ID NO: 3628580 - RNA, 19 nt, Human
auucuggccagacucgaug

SEQ ID NO: 3628581 - RNA, 17 nt, Human
auucuggccuagucccu

SEQ ID NO: 3628582 - RNA, 14 nt, Human
auucuggcugaaaa

SEQ ID NO: 3628583 - RNA, 14 nt, Human
auucuggcuuuaag

SEQ ID NO: 3628584 - RNA, 19 nt, Human
auucuggcuuuaagccuuc

SEQ ID NO: 3628585 - RNA, 19 nt, Human
auucugggaauguauagua

SEQ ID NO: 3628586 - RNA, 22 nt, Human
auucuggggaaacaacauuuau

SEQ ID NO: 3628587 - RNA, 17 nt, Human
auucugggggcugcagu

SEQ ID NO: 3628588 - RNA, 23 nt, Human
auucugguuccagggucccucug

SEQ ID NO: 3628589 - RNA, 14 nt, Human
auucuguaaaaugu

SEQ ID NO: 3628590 - RNA, 15 nt, Human
auucuguacauagcc

SEQ ID NO: 3628591 - RNA, 18 nt, Human
auucuguacauagccuau

SEQ ID NO: 3628592 - RNA, 11 nt, Human
auucuguauag

SEQ ID NO: 3628593 - RNA, 13 nt, Human
auucuguauagau

SEQ ID NO: 3628594 - RNA, 19 nt, Human
auucugucgccuuagcaug

SEQ ID NO: 3628595 - RNA, 21 nt, Human
auucugucgccuuagcauguu

SEQ ID NO: 3628596 - RNA, 20 nt, Human
auucugugccuuguuuuuug

SEQ ID NO: 3628597 - RNA, 17 nt, Human
auucuguguguuuucau

SEQ ID NO: 3628598 - RNA, 22 nt, Human
auucuguguguuuucauaauaa

SEQ ID NO: 3628599 - RNA, 23 nt, Human
auucuguguguuuucauaauaaa

SEQ ID NO: 3628600 - RNA, 14 nt, Human
auucuguguugcau

SEQ ID NO: 3628601 - RNA, 21 nt, Human
auucuguuggccagugugaca

SEQ ID NO: 3628602 - RNA, 18 nt, Human
auucuuaaaaugcaauau

SEQ ID NO: 3628603 - RNA, 22 nt, Human
auucuuaaaaugcaauauuugu

SEQ ID NO: 3628604 - RNA, 19 nt, Human
auucuuaaaguacuuguua

SEQ ID NO: 3628605 - RNA, 14 nt, Human
auucuuaaaguuga

SEQ ID NO: 3628606 - RNA, 16 nt, Human
auucuuaaaguugaau

SEQ ID NO: 3628607 - RNA, 20 nt, Human
auucuuaaaguugaauuuau

SEQ ID NO: 3628608 - RNA, 21 nt, Human
auucuuaagacuugcauuuaa

SEQ ID NO: 3628609 - RNA, 16 nt, Human
auucuuacaaacaugu

SEQ ID NO: 3628610 - RNA, 20 nt, Human
auucuuacacugccuguaua

SEQ ID NO: 3628611 - RNA, 22 nt, Human
auucuuacacugccuguauacu

SEQ ID NO: 3628612 - RNA, 23 nt, Human
auucuuacccuguacauauguaa

SEQ ID NO: 3628613 - RNA, 16 nt, Human
auucuuauaaauauga

SEQ ID NO: 3628614 - RNA, 18 nt, Human
auucuuauaaauaugaag

SEQ ID NO: 3628615 - RNA, 15 nt, Human
auucuuauacacauu

SEQ ID NO: 3628616 - RNA, 22 nt, Human
auucuuauguagcaggaaauaa

SEQ ID NO: 3628617 - RNA, 18 nt, Human
auucuuauucaaagaaau

SEQ ID NO: 3628618 - RNA, 13 nt, Human
auucuuauuccau

SEQ ID NO: 3628619 - RNA, 23 nt, Human
auucuuauuccauauuagaaaac

SEQ ID NO: 3628620 - RNA, 13 nt, Human
auucuuauuuaau

SEQ ID NO: 3628621 - RNA, 17 nt, Human
auucuuauuucaugaaa

SEQ ID NO: 3628622 - RNA, 15 nt, Human
auucuuauuuugugg

SEQ ID NO: 3628623 - RNA, 17 nt, Human
auucuucagauauacug

SEQ ID NO: 3628624 - RNA, 15 nt, Human
auucuucagcaaaaa

SEQ ID NO: 3628625 - RNA, 22 nt, Human
auucuuccaagcugagagucua

SEQ ID NO: 3628626 - RNA, 18 nt, Human
auucuuccagaugugaug

SEQ ID NO: 3628627 - RNA, 21 nt, Human
auucuucccaacuugccuuug

SEQ ID NO: 3628628 - RNA, 18 nt, Human
auucuucccauucuccau

SEQ ID NO: 3628629 - RNA, 20 nt, Human
auucuucccuuuuaaacaca

SEQ ID NO: 3628630 - RNA, 10 nt, Human
auucuuccuu

SEQ ID NO: 3628631 - RNA, 12 nt, Human
auucuuccuuug

SEQ ID NO: 3628632 - RNA, 13 nt, Human
auucuuccuuugu

SEQ ID NO: 3628633 - RNA, 12 nt, Human
auucuucuagag

SEQ ID NO: 3628634 - RNA, 13 nt, Human
auucuucuagagu

SEQ ID NO: 3628635 - RNA, 13 nt, Human
auucuucuccacu

SEQ ID NO: 3628636 - RNA, 15 nt, Human
auucuucucuuccuu

SEQ ID NO: 3628637 - RNA, 11 nt, Human
auucuucugcu

SEQ ID NO: 3628638 - RNA, 15 nt, Human
auucuucuguguuua

SEQ ID NO: 3628639 - RNA, 19 nt, Human
auucuucuguguuuauaaa

SEQ ID NO: 3628640 - RNA, 18 nt, Human
auucuugaaggaaaauga

SEQ ID NO: 3628641 - RNA, 13 nt, Human
auucuugaguuua

SEQ ID NO: 3628642 - RNA, 14 nt, Human
auucuugaugaaaa

SEQ ID NO: 3628643 - RNA, 18 nt, Human
auucuugaugaaaagcuu

SEQ ID NO: 3628644 - RNA, 22 nt, Human
auucuugaugaaaagcuuuguu

SEQ ID NO: 3628645 - RNA, 19 nt, Human
auucuugauuuauuugcuu

SEQ ID NO: 3628646 - RNA, 21 nt, Human
auucuugauuuauuugcuucu

SEQ ID NO: 3628647 - RNA, 21 nt, Human
auucuuggcccgcacagagcu

SEQ ID NO: 3628648 - RNA, 18 nt, Human
auucuuggcuuaaucauu

SEQ ID NO: 3628649 - RNA, 17 nt, Human
auucuugguuggcuggc

SEQ ID NO: 3628650 - RNA, 13 nt, Human
auucuuguacagu

SEQ ID NO: 3628651 - RNA, 17 nt, Human
auucuugugaauaugua

SEQ ID NO: 3628652 - RNA, 19 nt, Human
auucuuguugcuguacaaa

SEQ ID NO: 3628653 - RNA, 21 nt, Human
auucuuguuuucuuucuuuaa

SEQ ID NO: 3628654 - RNA, 13 nt, Human
auucuuuauacaa

SEQ ID NO: 3628655 - RNA, 17 nt, Human
auucuuuaucuugacau

SEQ ID NO: 3628656 - RNA, 17 nt, Human
auucuuuauuucuguca

SEQ ID NO: 3628657 - RNA, 21 nt, Human
auucuuuauuucugucauuca

SEQ ID NO: 3628658 - RNA, 18 nt, Human
auucuuucaauacagaua

SEQ ID NO: 3628659 - RNA, 22 nt, Human
auucuuucaauacagauauauu

SEQ ID NO: 3628660 - RNA, 15 nt, Human
auucuuuccauuugc

SEQ ID NO: 3628661 - RNA, 17 nt, Human
auucuuuccauuugcau

SEQ ID NO: 3628662 - RNA, 20 nt, Human
auucuuuccauuugcauuug

SEQ ID NO: 3628663 - RNA, 16 nt, Human
auucuuucccaacacc

SEQ ID NO: 3628664 - RNA, 11 nt, Human
auucuuuccug

SEQ ID NO: 3628665 - RNA, 17 nt, Human
auucuuuccugaggcug

SEQ ID NO: 3628666 - RNA, 17 nt, Human
auucuuucgaaagaaga

SEQ ID NO: 3628667 - RNA, 14 nt, Human
auucuuucuccuuu

SEQ ID NO: 3628668 - RNA, 19 nt, Human
auucuuugaccuguuggga

SEQ ID NO: 3628669 - RNA, 18 nt, Human
auucuuugauguuaacac

SEQ ID NO: 3628670 - RNA, 21 nt, Human
auucuuugauguuaacacauu

SEQ ID NO: 3628671 - RNA, 22 nt, Human
auucuuugauguuaacacauuu

SEQ ID NO: 3628672 - RNA, 15 nt, Human
auucuuugcaaaaau

SEQ ID NO: 3628673 - RNA, 21 nt, Human
auucuuugcacuuuuucuuaa

SEQ ID NO: 3628674 - RNA, 19 nt, Human
auucuuugcuugaacacag

SEQ ID NO: 3628675 - RNA, 21 nt, Human
auucuuuggaguuaaaaugca

SEQ ID NO: 3628676 - RNA, 22 nt, Human
auucuuuggaguugucacauca

SEQ ID NO: 3628677 - RNA, 17 nt, Human
auucuuuguuaauuugg

SEQ ID NO: 3628678 - RNA, 18 nt, Human
auucuuuuaaaagacaag

SEQ ID NO: 3628679 - RNA, 14 nt, Human
auucuuuuaaauua

SEQ ID NO: 3628680 - RNA, 18 nt, Human
auucuuuuaaauuagaaa

SEQ ID NO: 3628681 - RNA, 19 nt, Human
auucuuuuaaauuagaaaa

SEQ ID NO: 3628682 - RNA, 23 nt, Human
auucuuuuaaauuagaaaauauu

SEQ ID NO: 3628683 - RNA, 16 nt, Human
auucuuuugaauuguu

SEQ ID NO: 3628684 - RNA, 14 nt, Human
auucuuuuuaaagu

SEQ ID NO: 3628685 - RNA, 13 nt, Human
auucuuuuugcuc

SEQ ID NO: 3628686 - RNA, 19 nt, Human
auucuuuuuuaaauuuucu

SEQ ID NO: 3628687 - RNA, 14 nt, Human
auucuuuuuuauua

SEQ ID NO: 3628688 - RNA, 17 nt, Human
auucuuuuuuauuaauc

SEQ ID NO: 3628689 - RNA, 22 nt, Human
auugaaaaaaauuggcauuaaa

SEQ ID NO: 3628690 - RNA, 18 nt, Human
auugaaaaaauagagccu

SEQ ID NO: 3628691 - RNA, 19 nt, Human
auugaaaaaauagagccug

SEQ ID NO: 3628692 - RNA, 15 nt, Human
auugaaaaaccauuu

SEQ ID NO: 3628693 - RNA, 16 nt, Human
auugaaaaacucuuua

SEQ ID NO: 3628694 - RNA, 21 nt, Human
auugaaaaguuauuucccuuu

SEQ ID NO: 3628695 - RNA, 23 nt, Human
auugaaaaguuuuuguuuggaga

SEQ ID NO: 3628696 - RNA, 16 nt, Human
auugaaaauugaaaag

SEQ ID NO: 3628697 - RNA, 14 nt, Human
auugaaagaaugua

SEQ ID NO: 3628698 - RNA, 17 nt, Human
auugaaagaauguaaag

SEQ ID NO: 3628699 - RNA, 20 nt, Human
auugaaagaauguaaagcaa

SEQ ID NO: 3628700 - RNA, 16 nt, Human
auugaaauauuauaga

SEQ ID NO: 3628701 - RNA, 18 nt, Human
auugaaaucuuuuugcuu

SEQ ID NO: 3628702 - RNA, 20 nt, Human
auugaaaucuuuuugcuuug

SEQ ID NO: 3628703 - RNA, 16 nt, Human
auugaaaugacuaaaa

SEQ ID NO: 3628704 - RNA, 19 nt, Human
auugaaauuauaguuucaa

SEQ ID NO: 3628705 - RNA, 17 nt, Human
auugaaauucugagaaa

SEQ ID NO: 3628706 - RNA, 21 nt, Human
auugaaauuguacauauuugu

SEQ ID NO: 3628707 - RNA, 15 nt, Human
auugaacacaaacug

SEQ ID NO: 3628708 - RNA, 23 nt, Human
auuggauuuccuaauacugucau

SEQ ID NO: 3628709 - RNA, 13 nt, Human
auuggauuuuaug

SEQ ID NO: 3628710 - RNA, 19 nt, Human
auuggcaaagaugugggga

SEQ ID NO: 3628711 - RNA, 18 nt, Human
auuggcaccgaagcccag

SEQ ID NO: 3628712 - RNA, 11 nt, Human
auuggcagcag

SEQ ID NO: 3628713 - RNA, 22 nt, Human
auuggcagcaggugcugcuacc

SEQ ID NO: 3628714 - RNA, 16 nt, Human
auuggcauuaaaacuu

SEQ ID NO: 3628715 - RNA, 23 nt, Human
auuggccuguagaguugcugaga

SEQ ID NO: 3628716 - RNA, 18 nt, Human
auuggcuauuuaaaacuu

SEQ ID NO: 3628717 - RNA, 21 nt, Human
auuggcucuugaacugagcuu

SEQ ID NO: 3628718 - RNA, 17 nt, Human
auuggcugggaguggug

SEQ ID NO: 3628719 - RNA, 21 nt, Human
auuggcuuuauccucuuuaga

SEQ ID NO: 3628720 - RNA, 15 nt, Human
auuggcuuuucugau

SEQ ID NO: 3628721 - RNA, 19 nt, Human
auuggcuuuucugauccag

SEQ ID NO: 3628722 - RNA, 13 nt, Human
auugggaaaucuu

SEQ ID NO: 3628723 - RNA, 15 nt, Human
auugggaauaaauau

SEQ ID NO: 3628724 - RNA, 17 nt, Human
auugggauauucugaaa

SEQ ID NO: 3628725 - RNA, 18 nt, Human
auugggcaagugauugaa

SEQ ID NO: 3628726 - RNA, 18 nt, Human
auugggcacaucauuuca

SEQ ID NO: 3628727 - RNA, 19 nt, Human
auugggcacaucauuucaa

SEQ ID NO: 3628728 - RNA, 23 nt, Human
auugggcacaucauuucaagaag

SEQ ID NO: 3628729 - RNA, 21 nt, Human
auugggcacuauuuauuuaca

SEQ ID NO: 3628730 - RNA, 16 nt, Human
auugggccagcuuuuc

SEQ ID NO: 3628731 - RNA, 16 nt, Human
auugggccccugccag

SEQ ID NO: 3628732 - RNA, 19 nt, Human
auuggggaagacuguggcu

SEQ ID NO: 3628733 - RNA, 19 nt, Human
auuggggaauuaaaaguca

SEQ ID NO: 3628734 - RNA, 12 nt, Human
auuggggaggag

SEQ ID NO: 3628735 - RNA, 16 nt, Human
auuggggauucuuaaa

SEQ ID NO: 3628736 - RNA, 22 nt, Human
auuggggcucccagccaggccc

SEQ ID NO: 3628737 - RNA, 21 nt, Human
auugggggucaccggccgaug

SEQ ID NO: 3628738 - RNA, 15 nt, Human
auuggguaucaccac

SEQ ID NO: 3628739 - RNA, 19 nt, Human
auuggguccugggucuuuc

SEQ ID NO: 3628740 - RNA, 16 nt, Human
auugggucuauuccag

SEQ ID NO: 3628741 - RNA, 21 nt, Human
auugggucuauuccagcucau

SEQ ID NO: 3628742 - RNA, 20 nt, Human
auuggguggggggcuucaua

SEQ ID NO: 3628743 - RNA, 22 nt, Human
auuggguggggggcuucauaca

SEQ ID NO: 3628744 - RNA, 18 nt, Human
auuggguggguaaauuca

SEQ ID NO: 3628745 - RNA, 18 nt, Human
auuggguucaugaugcag

SEQ ID NO: 3628746 - RNA, 19 nt, Human
auuggguucaugaugcagu

SEQ ID NO: 3628747 - RNA, 19 nt, Human
auuggguuuuuggacuucu

SEQ ID NO: 3628748 - RNA, 21 nt, Human
auugguaaaacucacugugau

SEQ ID NO: 3628749 - RNA, 15 nt, Human
auugguaccuugcac

SEQ ID NO: 3628750 - RNA, 19 nt, Human
auugguaccuugcacacau

SEQ ID NO: 3628751 - RNA, 14 nt, Human
auugguagaggaag

SEQ ID NO: 3628752 - RNA, 16 nt, Human
auugguguugccaguu

SEQ ID NO: 3628753 - RNA, 21 nt, Human
auugguguugccaguuguccu

SEQ ID NO: 3628754 - RNA, 22 nt, Human
auugguguugccaguuguccuc

SEQ ID NO: 3628755 - RNA, 23 nt, Human
auugguguuguacucaauuuuaa

SEQ ID NO: 3628756 - RNA, 18 nt, Human
auugguguuuuuuucuau

SEQ ID NO: 3628757 - RNA, 13 nt, Human
auugguuaauuuu

SEQ ID NO: 3628758 - RNA, 18 nt, Human
auugguucccuuugcucc

SEQ ID NO: 3628759 - RNA, 15 nt, Human
auugguucuuguauu

SEQ ID NO: 3628760 - RNA, 16 nt, Human
auugguucuuguauua

SEQ ID NO: 3628761 - RNA, 18 nt, Human
auugguuucucuucuccc

SEQ ID NO: 3628762 - RNA, 19 nt, Human
auugguuucucuucucccc

SEQ ID NO: 3628763 - RNA, 17 nt, Human
auugguuuuaugaugac

SEQ ID NO: 3628764 - RNA, 22 nt, Human
auugguuuuccaaucauuugac

SEQ ID NO: 3628765 - RNA, 21 nt, Human
auuguaaaaaaaaaugccuuu

SEQ ID NO: 3628766 - RNA, 23 nt, Human
auuguaaaaaaaaaugccuuuga

SEQ ID NO: 3628767 - RNA, 21 nt, Human
auuguaaaaccugucaaugau

SEQ ID NO: 3628768 - RNA, 20 nt, Human
auuguaaaagcauuuuguaa

SEQ ID NO: 3628769 - RNA, 13 nt, Human
auuguaaaauggu

SEQ ID NO: 3628770 - RNA, 14 nt, Human
auuguaaaauggug

SEQ ID NO: 3628771 - RNA, 23 nt, Human
auuguaaacaaacuguguaacug

SEQ ID NO: 3628772 - RNA, 16 nt, Human
auuguaaacauguguu

SEQ ID NO: 3628773 - RNA, 13 nt, Human
auuguaaacugua

SEQ ID NO: 3628774 - RNA, 14 nt, Human
auuguaaacuguac

SEQ ID NO: 3628775 - RNA, 14 nt, Human
auuguaaauauugu

SEQ ID NO: 3628776 - RNA, 17 nt, Human
auuguaaaugugcuuuu

SEQ ID NO: 3628777 - RNA, 23 nt, Human
auuguaaauugaaucaguauaaa

SEQ ID NO: 3628778 - RNA, 15 nt, Human
auuguaacagacauu

SEQ ID NO: 3628779 - RNA, 20 nt, Human
auuguaacguugcuguggga

SEQ ID NO: 3628780 - RNA, 10 nt, Human
auuguaacuc

SEQ ID NO: 3628781 - RNA, 12 nt, Human
auuguaagaaau

SEQ ID NO: 3628782 - RNA, 16 nt, Human
auuguaagauaaaaaa

SEQ ID NO: 3628783 - RNA, 15 nt, Human
auuguaaggaaugau

SEQ ID NO: 3628784 - RNA, 16 nt, Human
auuguaaggaaugauu

SEQ ID NO: 3628785 - RNA, 21 nt, Human
auuguaauaaugcuaaagaaa

SEQ ID NO: 3628786 - RNA, 15 nt, Human
auuguaauauagaaa

SEQ ID NO: 3628787 - RNA, 12 nt, Human
auuguaaucacu

SEQ ID NO: 3628788 - RNA, 13 nt, Human
auuguaauguuac

SEQ ID NO: 3628789 - RNA, 12 nt, Human
auuguaauguug

SEQ ID NO: 3628790 - RNA, 14 nt, Human
auuguaauguugug

SEQ ID NO: 3628791 - RNA, 17 nt, Human
auuguaauguugugaau

SEQ ID NO: 3628792 - RNA, 22 nt, Human
auuguaauguugugaauaauua

SEQ ID NO: 3628793 - RNA, 13 nt, Human
auuguaauuauau

SEQ ID NO: 3628794 - RNA, 12 nt, Human
auuguaauuuug

SEQ ID NO: 3628795 - RNA, 21 nt, Human
auuguacaaaauuaagcaaau

SEQ ID NO: 3628796 - RNA, 20 nt, Human
auuguacaaaguauuaagca

SEQ ID NO: 3628797 - RNA, 23 nt, Human
auuguacaaaguauuaagcauau

SEQ ID NO: 3628798 - RNA, 13 nt, Human
auuguacaaccug

SEQ ID NO: 3628799 - RNA, 12 nt, Human
auuguacacuuu

SEQ ID NO: 3628800 - RNA, 14 nt, Human
auuguacacuuuuu

SEQ ID NO: 3628801 - RNA, 20 nt, Human
auuguacagaaucauugcuu

SEQ ID NO: 3628802 - RNA, 21 nt, Human
auuguacagaaucauugcuua

SEQ ID NO: 3628803 - RNA, 13 nt, Human
auuguacaguuuu

SEQ ID NO: 3628804 - RNA, 21 nt, Human
auuguacaguuuuuauugcuu

SEQ ID NO: 3628805 - RNA, 12 nt, Human
auuguacauaaa

SEQ ID NO: 3628806 - RNA, 15 nt, Human
auuguacauauuugu

SEQ ID NO: 3628807 - RNA, 16 nt, Human
auuguacgaagaguau

SEQ ID NO: 3628808 - RNA, 21 nt, Human
auuguacuaaagccaaacaua

SEQ ID NO: 3628809 - RNA, 17 nt, Human
auuguagcauccuggaa

SEQ ID NO: 3628810 - RNA, 16 nt, Human
auuguaguccuguaau

SEQ ID NO: 3628811 - RNA, 14 nt, Human
auuguagugcuuug

SEQ ID NO: 3628812 - RNA, 23 nt, Human
auuguagugcuuugagagagaaa

SEQ ID NO: 3628813 - RNA, 15 nt, Human
auuguauaaaaauag

SEQ ID NO: 3628814 - RNA, 13 nt, Human
auuguauaacagg

SEQ ID NO: 3628815 - RNA, 21 nt, Human
auuguauaagauuagaaugaa

SEQ ID NO: 3628816 - RNA, 18 nt, Human
auuguauagauauaauga

SEQ ID NO: 3628817 - RNA, 13 nt, Human
auuguauauaugu

SEQ ID NO: 3628818 - RNA, 22 nt, Human
auuguauauauguguguuuaaa

SEQ ID NO: 3628819 - RNA, 15 nt, Human
auuguauauuguaau

SEQ ID NO: 3628820 - RNA, 17 nt, Human
auuguauauuguguuug

SEQ ID NO: 3628821 - RNA, 20 nt, Human
auuguaucagaggccuauaa

SEQ ID NO: 3628822 - RNA, 15 nt, Human
auuguaucgauguua

SEQ ID NO: 3628823 - RNA, 24 nt, Human
auuguaucguauagcuguauugaa

SEQ ID NO: 3628824 - RNA, 15 nt, Human
auuguaucuagugca

SEQ ID NO: 3628825 - RNA, 19 nt, Human
auuguaucuagugcagcug

SEQ ID NO: 3628826 - RNA, 18 nt, Human
auuguaucucauuacuua

SEQ ID NO: 3628827 - RNA, 14 nt, Human
auuguaugaugugu

SEQ ID NO: 3628828 - RNA, 15 nt, Human
auuguaugauguguu

SEQ ID NO: 3628829 - RNA, 16 nt, Human
auuguauggaaauaua

SEQ ID NO: 3628830 - RNA, 12 nt, Human
auuguauucugg

SEQ ID NO: 3628831 - RNA, 14 nt, Human
auuguauuuauuca

SEQ ID NO: 3628832 - RNA, 20 nt, Human
auuguauuuauucaauaaag

SEQ ID NO: 3628833 - RNA, 23 nt, Human
auuguauuuauucaauaaaguau

SEQ ID NO: 3628834 - RNA, 18 nt, Human
auuguauuuauuccauau

SEQ ID NO: 3628835 - RNA, 15 nt, Human
auuguauuuguuucu

SEQ ID NO: 3628836 - RNA, 19 nt, Human
auugucaaugcuggagaaa

SEQ ID NO: 3628837 - RNA, 19 nt, Human
auugucagaguucugcucu

SEQ ID NO: 3628838 - RNA, 23 nt, Human
auugucagauauuuuuucagaaa

SEQ ID NO: 3628839 - RNA, 13 nt, Human
auugucauuuaua

SEQ ID NO: 3628840 - RNA, 19 nt, Human
auuguccagagcugcuucc

SEQ ID NO: 3628841 - RNA, 14 nt, Human
auuguccaguuugu

SEQ ID NO: 3628842 - RNA, 23 nt, Human
auuguccaguuugucuuggauau

SEQ ID NO: 3628843 - RNA, 17 nt, Human
auuguccccgacccuug

SEQ ID NO: 3628844 - RNA, 17 nt, Human
auugucccucugcccca

SEQ ID NO: 3628845 - RNA, 23 nt, Human
auuguccuauuaguguuauauga

SEQ ID NO: 3628846 - RNA, 18 nt, Human
auuguccucauuucucca

SEQ ID NO: 3628847 - RNA, 13 nt, Human
auugucuagugaa

SEQ ID NO: 3628848 - RNA, 14 nt, Human
auugucucagagca

SEQ ID NO: 3628849 - RNA, 18 nt, Human
auugucucccgcccccca

SEQ ID NO: 3628850 - RNA, 15 nt, Human
auugucucccuucca

SEQ ID NO: 3628851 - RNA, 18 nt, Human
auugucuccuauauauuu

SEQ ID NO: 3628852 - RNA, 16 nt, Human
auuuuuuuuaaagaaa

SEQ ID NO: 3628853 - RNA, 22 nt, Human
auuuuuuuuaauuguauuuuug

SEQ ID NO: 3628854 - RNA, 20 nt, Human
auuuuuuuuauuaguauugu

SEQ ID NO: 3628855 - RNA, 15 nt, Human
auuuuuuuucauguu

SEQ ID NO: 3628856 - RNA, 16 nt, Human
auuuuuuuucauguuu

SEQ ID NO: 3628857 - RNA, 17 nt, Human
auuuuuuuucuguuaua

SEQ ID NO: 3628858 - RNA, 18 nt, Human
auuuuuuuucuguuauau

SEQ ID NO: 3628859 - RNA, 19 nt, Human
auuuuuuuucuguuauaua

SEQ ID NO: 3628860 - RNA, 20 nt, Human
auuuuuuuucuguuauauaa

SEQ ID NO: 3628861 - RNA, 20 nt, Human
auuuuuuuucuuugaauaaa

SEQ ID NO: 3628862 - RNA, 21 nt, Human
auuuuuuuucuuugaauaaau

SEQ ID NO: 3628863 - RNA, 22 nt, Human
auuuuuuuuguuguuucaguga

SEQ ID NO: 3628864 - RNA, 23 nt, Human
auuuuuuuuuagaacagaaaaca

SEQ ID NO: 3628865 - RNA, 14 nt, Human
auuuuuuuuucaua

SEQ ID NO: 3628866 - RNA, 16 nt, Human
auuuuuuuuucauaca

SEQ ID NO: 3628867 - RNA, 23 nt, Human
auuuuuuuuucauagagauuugu

SEQ ID NO: 3628868 - RNA, 17 nt, Human
auuuuuuuuuccuagcc

SEQ ID NO: 3628869 - RNA, 20 nt, Human
auuuuuuuuuccuucagugc

SEQ ID NO: 3628870 - RNA, 19 nt, Human
auuuuuuuuuuuucucuca

SEQ ID NO: 3628871 - RNA, 21 nt, Human
auuuuuuuuuuuugaaaaaag

SEQ ID NO: 3628872 - RNA, 19 nt, Human
caaaaaaaaaguuuuauuu

SEQ ID NO: 3628873 - RNA, 13 nt, Human
caaaaaaaccaca

SEQ ID NO: 3628874 - RNA, 18 nt, Human
caaaaaaaccacaaaggc

SEQ ID NO: 3628875 - RNA, 22 nt, Human
caaaaaaaccacaaaggccaaa

SEQ ID NO: 3628876 - RNA, 23 nt, Human
caaaaaaaccucuuaauauucug

SEQ ID NO: 3628877 - RNA, 12 nt, Human
caaaaaaaguug

SEQ ID NO: 3628878 - RNA, 18 nt, Human
caaaaaaaguuguaugau

SEQ ID NO: 3628879 - RNA, 13 nt, Human
caaaaaaauacug

SEQ ID NO: 3628880 - RNA, 12 nt, Human
caaaaaacaaua

SEQ ID NO: 3628881 - RNA, 14 nt, Human
caaaaaagaaaacc

SEQ ID NO: 3628882 - RNA, 17 nt, Human
caaaaaaguccaauuuu

SEQ ID NO: 3628883 - RNA, 18 nt, Human
caaaaaaguccaauuuua

SEQ ID NO: 3628884 - RNA, 22 nt, Human
caaaaaaguccaauuuuaauuu

SEQ ID NO: 3628885 - RNA, 19 nt, Human
caaaaaauaucuaguaaua

SEQ ID NO: 3628886 - RNA, 15 nt, Human
caaaaacacagcaag

SEQ ID NO: 3628887 - RNA, 13 nt, Human
caaaaacagccuc

SEQ ID NO: 3628888 - RNA, 16 nt, Human
caaaaacagccucaca

SEQ ID NO: 3628889 - RNA, 15 nt, Human
caaaaacauguaugu

SEQ ID NO: 3628890 - RNA, 16 nt, Human
caaaaacuauuuggga

SEQ ID NO: 3628891 - RNA, 22 nt, Human
caaaaacugucuuuaaaagaga

SEQ ID NO: 3628892 - RNA, 15 nt, Human
caaaaagaaaugaug

SEQ ID NO: 3628893 - RNA, 14 nt, Human
caaaaagaacaaaa

SEQ ID NO: 3628894 - RNA, 17 nt, Human
caaaaagaaccacuugu

SEQ ID NO: 3628895 - RNA, 18 nt, Human
caaaaagauaccuuaaaa

SEQ ID NO: 3628896 - RNA, 19 nt, Human
caaaaagauaccuuaaaau

SEQ ID NO: 3628897 - RNA, 16 nt, Human
caaaaagcaaaaucau

SEQ ID NO: 3628898 - RNA, 22 nt, Human
caaaaagcucuuacacuacauu

SEQ ID NO: 3628899 - RNA, 17 nt, Human
caaaaaggauacauaau

SEQ ID NO: 3628900 - RNA, 13 nt, Human
caaaaagguugcu

SEQ ID NO: 3628901 - RNA, 15 nt, Human
caaaaaguuuccaua

SEQ ID NO: 3628902 - RNA, 10 nt, Human
caaaaauaaa

SEQ ID NO: 3628903 - RNA, 12 nt, Human
caaaaauaaauu

SEQ ID NO: 3628904 - RNA, 16 nt, Human
caaaaauaaucaugaa

SEQ ID NO: 3628905 - RNA, 13 nt, Human
caaaaauacaaaa

SEQ ID NO: 3628906 - RNA, 19 nt, Human
caaaaauacucuaauucua

SEQ ID NO: 3628907 - RNA, 11 nt, Human
caaaaauauaa

SEQ ID NO: 3628908 - RNA, 12 nt, Human
caaaaauauaaa

SEQ ID NO: 3628909 - RNA, 14 nt, Human
caaaaauauuuuau

SEQ ID NO: 3628910 - RNA, 15 nt, Human
caaaaaucagccaga

SEQ ID NO: 3628911 - RNA, 20 nt, Human
caaaaauccaaauauuguua

SEQ ID NO: 3628912 - RNA, 18 nt, Human
caaaaaucugaagauugu

SEQ ID NO: 3628913 - RNA, 14 nt, Human
caaaaaucugccug

SEQ ID NO: 3628914 - RNA, 19 nt, Human
caaaaauguuaagcaucua

SEQ ID NO: 3628915 - RNA, 13 nt, Human
caaaaauguugaa

SEQ ID NO: 3628916 - RNA, 15 nt, Human
caaaaauuagccggg

SEQ ID NO: 3628917 - RNA, 17 nt, Human
caaaaauuagccgggcg

SEQ ID NO: 3628918 - RNA, 11 nt, Human
caaaaauuagg

SEQ ID NO: 3628919 - RNA, 16 nt, Human
caaaaauuagguauuu

SEQ ID NO: 3628920 - RNA, 18 nt, Human
caaaaauuagguauuuug

SEQ ID NO: 3628921 - RNA, 20 nt, Human
caaaaauuaucuauuuguau

SEQ ID NO: 3628922 - RNA, 12 nt, Human
caaaaauuauua

SEQ ID NO: 3628923 - RNA, 17 nt, Human
caaaaauucacaagcug

SEQ ID NO: 3628924 - RNA, 13 nt, Human
caaaaauuugaac

SEQ ID NO: 3628925 - RNA, 19 nt, Human
caaaaauuugcuucacuca

SEQ ID NO: 3628926 - RNA, 13 nt, Human
caaaaauuuuugg

SEQ ID NO: 3628927 - RNA, 16 nt, Human
caaaacaaaaagaugu

SEQ ID NO: 3628928 - RNA, 17 nt, Human
caaaacaaaaauuaggu

SEQ ID NO: 3628929 - RNA, 23 nt, Human
caaaacaaaaauuagguauuuug

SEQ ID NO: 3628930 - RNA, 11 nt, Human
caaaacaaaac

SEQ ID NO: 3628931 - RNA, 15 nt, Human
caaaacaaagucuuu

SEQ ID NO: 3628932 - RNA, 21 nt, Human
caaaacaaaugccacacauca

SEQ ID NO: 3628933 - RNA, 20 nt, Human
caaaacaaguuuuucuguca

SEQ ID NO: 3628934 - RNA, 20 nt, Human
caaaacaccugacagccccu

SEQ ID NO: 3628935 - RNA, 13 nt, Human
caaaacacugugg

SEQ ID NO: 3628936 - RNA, 14 nt, Human
caaaacacugugga

SEQ ID NO: 3628937 - RNA, 15 nt, Human
caaaacacuguggaa

SEQ ID NO: 3628938 - RNA, 16 nt, Human
caaaacacuuguaauu

SEQ ID NO: 3628939 - RNA, 18 nt, Human
caaaacacuuguaauuuu

SEQ ID NO: 3628940 - RNA, 18 nt, Human
caaaacagaggcacuuaa

SEQ ID NO: 3628941 - RNA, 16 nt, Human
caaaaccacagcccug

SEQ ID NO: 3628942 - RNA, 19 nt, Human
caaaaccacagcccuguca

SEQ ID NO: 3628943 - RNA, 16 nt, Human
caaaaccagguccaau

SEQ ID NO: 3628944 - RNA, 13 nt, Human
caaaacccaccuu

SEQ ID NO: 3628945 - RNA, 13 nt, Human
caaaacccagcug

SEQ ID NO: 3628946 - RNA, 21 nt, Human
caaaacccagcugcaccccuu

SEQ ID NO: 3628947 - RNA, 15 nt, Human
caaaaccccccagau

SEQ ID NO: 3628948 - RNA, 21 nt, Human
caaaaccccccagauaucauc

SEQ ID NO: 3628949 - RNA, 23 nt, Human
caaaaccccuaagagacugcguu

SEQ ID NO: 3628950 - RNA, 14 nt, Human
caaaaccuaacuug

SEQ ID NO: 3628951 - RNA, 21 nt, Human
caaaaccugauguuaaaauuc

SEQ ID NO: 3628952 - RNA, 15 nt, Human
caaaaccuguccuau

SEQ ID NO: 3628953 - RNA, 23 nt, Human
caaaaccuugcuaauuuucucaa

SEQ ID NO: 3628954 - RNA, 17 nt, Human
caaaacgcgcagaugug

SEQ ID NO: 3628955 - RNA, 18 nt, Human
caaaacgcgcagaugugc

SEQ ID NO: 3628956 - RNA, 15 nt, Human
caaaacgguuuuacu

SEQ ID NO: 3628957 - RNA, 15 nt, Human
caaaacgucuuauug

SEQ ID NO: 3628958 - RNA, 19 nt, Human
caaaacuauacuugaacaa

SEQ ID NO: 3628959 - RNA, 21 nt, Human
caaaacuauacuugaacaaaa

SEQ ID NO: 3628960 - RNA, 17 nt, Human
caaaacuccgcccccag

SEQ ID NO: 3628961 - RNA, 20 nt, Human
caaaacuccgcccccagccu

SEQ ID NO: 3628962 - RNA, 21 nt, Human
caaaacuccgcccccagccua

SEQ ID NO: 3628963 - RNA, 11 nt, Human
caaaacucuac

SEQ ID NO: 3628964 - RNA, 16 nt, Human
caaaacucuccucugc

SEQ ID NO: 3628965 - RNA, 19 nt, Human
caaaacucuccucugcugc

SEQ ID NO: 3628966 - RNA, 17 nt, Human
caaaacugcacugucaa

SEQ ID NO: 3628967 - RNA, 18 nt, Human
caaaacugcacugucaag

SEQ ID NO: 3628968 - RNA, 14 nt, Human
caaaacugugcaga

SEQ ID NO: 3628969 - RNA, 13 nt, Human
caaaacuuaacau

SEQ ID NO: 3628970 - RNA, 21 nt, Human
caaaacuucuugucagacaua

SEQ ID NO: 3628971 - RNA, 23 nt, Human
caaaacuuuaucagggaaacuaa

SEQ ID NO: 3628972 - RNA, 14 nt, Human
caaaacuuuuaaac

SEQ ID NO: 3628973 - RNA, 21 nt, Human
caaaagaaaaaaaaaagcacc

SEQ ID NO: 3628974 - RNA, 15 nt, Human
caaaagaaauaccuu

SEQ ID NO: 3628975 - RNA, 12 nt, Human
caaaagaacuua

SEQ ID NO: 3628976 - RNA, 14 nt, Human
caaaagaagaaguu

SEQ ID NO: 3628977 - RNA, 17 nt, Human
caaaagaagcccccagc

SEQ ID NO: 3628978 - RNA, 14 nt, Human
caaaagaaguaaca

SEQ ID NO: 3628979 - RNA, 17 nt, Human
caaaagaaguaacaaga

SEQ ID NO: 3628980 - RNA, 19 nt, Human
caaaagaaucagaaacagg

SEQ ID NO: 3628981 - RNA, 20 nt, Human
caaaagaauggcagaaaagu

SEQ ID NO: 3628982 - RNA, 21 nt, Human
caaaagacauguuguaaauua

SEQ ID NO: 3628983 - RNA, 16 nt, Human
caaaagaguguaaaau

SEQ ID NO: 3628984 - RNA, 18 nt, Human
caaaagaguguaaaauau

SEQ ID NO: 3628985 - RNA, 20 nt, Human
caaaagaguguaaaauauuu

SEQ ID NO: 3628986 - RNA, 20 nt, Human
caaaagauaauauuuuacau

SEQ ID NO: 3628987 - RNA, 12 nt, Human
caaaagaugaaa

SEQ ID NO: 3628988 - RNA, 16 nt, Human
caaaagaugcuucuca

SEQ ID NO: 3628989 - RNA, 16 nt, Human
caaaagauugcugaaa

SEQ ID NO: 3628990 - RNA, 20 nt, Human
caaaagauugcugaaauuuu

SEQ ID NO: 3628991 - RNA, 22 nt, Human
caaaagauugcugaaauuuuau

SEQ ID NO: 3628992 - RNA, 14 nt, Human
caaaagcaagacug

SEQ ID NO: 3628993 - RNA, 16 nt, Human
caaaagcaagacuguu

SEQ ID NO: 3628994 - RNA, 20 nt, Human
caaaagcaguaaauuugcua

SEQ ID NO: 3628995 - RNA, 21 nt, Human
caaaagcagugggcuccuggc

SEQ ID NO: 3628996 - RNA, 13 nt, Human
caaaagcauguga

SEQ ID NO: 3628997 - RNA, 21 nt, Human
caaaagcauuuaucauucuug

SEQ ID NO: 3628998 - RNA, 21 nt, Human
caaagaugggugaaggcuggc

SEQ ID NO: 3628999 - RNA, 13 nt, Human
caaagauucauga

SEQ ID NO: 3629000 - RNA, 19 nt, Human
caaagauucaugauuuaua

SEQ ID NO: 3629001 - RNA, 17 nt, Human
caaagauucucuaugua

SEQ ID NO: 3629002 - RNA, 15 nt, Human
caaagcaaaaccaga

SEQ ID NO: 3629003 - RNA, 14 nt, Human
caaagcaagacccu

SEQ ID NO: 3629004 - RNA, 22 nt, Human
caaagcaagcauucagaagaaa

SEQ ID NO: 3629005 - RNA, 14 nt, Human
caaagcaauaauag

SEQ ID NO: 3629006 - RNA, 15 nt, Human
caaagcaaugcauuu

SEQ ID NO: 3629007 - RNA, 13 nt, Human
caaagcacagaga

SEQ ID NO: 3629008 - RNA, 19 nt, Human
caaagcacaguguuaaaug

SEQ ID NO: 3629009 - RNA, 17 nt, Human
caaagcaccaaaauaag

SEQ ID NO: 3629010 - RNA, 12 nt, Human
caaagcaccagc

SEQ ID NO: 3629011 - RNA, 21 nt, Human
caaagcaccagcuucuccagg

SEQ ID NO: 3629012 - RNA, 22 nt, Human
caaagcacgaaauguuauuuuu

SEQ ID NO: 3629013 - RNA, 20 nt, Human
caaagcacugacuucuaagu

SEQ ID NO: 3629014 - RNA, 19 nt, Human
caaagcagauucagaaaug

SEQ ID NO: 3629015 - RNA, 21 nt, Human
caaagcaggggaguaugcaaa

SEQ ID NO: 3629016 - RNA, 21 nt, Human
caaagcagugcaugcuguccc

SEQ ID NO: 3629017 - RNA, 21 nt, Human
caaagcaguggagcccaggag

SEQ ID NO: 3629018 - RNA, 13 nt, Human
caaagcauagaug

SEQ ID NO: 3629019 - RNA, 17 nt, Human
caaagcauggacauuua

SEQ ID NO: 3629020 - RNA, 22 nt, Human
caaagccaaagcuaggccuggc

SEQ ID NO: 3629021 - RNA, 20 nt, Human
caaagccaccaacagccacu

SEQ ID NO: 3629022 - RNA, 13 nt, Human
caaagccagaagc

SEQ ID NO: 3629023 - RNA, 18 nt, Human
caaagccagaagcugagc

SEQ ID NO: 3629024 - RNA, 14 nt, Human
caaagccagacagc

SEQ ID NO: 3629025 - RNA, 21 nt, Human
caaagccagcguccuccucug

SEQ ID NO: 3629026 - RNA, 23 nt, Human
caaagccagcguccuccucugug

SEQ ID NO: 3629027 - RNA, 17 nt, Human
caaagcccaaaguggua

SEQ ID NO: 3629028 - RNA, 15 nt, Human
caaagccccaugcug

SEQ ID NO: 3629029 - RNA, 20 nt, Human
caaagccccaugcuggagcc

SEQ ID NO: 3629030 - RNA, 21 nt, Human
caaagccccaugcuggagccu

SEQ ID NO: 3629031 - RNA, 17 nt, Human
caaagccccauuaacug

SEQ ID NO: 3629032 - RNA, 16 nt, Human
caaagcccccagagcc

SEQ ID NO: 3629033 - RNA, 17 nt, Human
caaagcccccagagccc

SEQ ID NO: 3629034 - RNA, 23 nt, Human
caaagccccuugcucuccccugc

SEQ ID NO: 3629035 - RNA, 15 nt, Human
caaagcccuaaaauu

SEQ ID NO: 3629036 - RNA, 18 nt, Human
caaagcccuuccaugucg

SEQ ID NO: 3629037 - RNA, 17 nt, Human
caaagccuccuccagcc

SEQ ID NO: 3629038 - RNA, 18 nt, Human
caaagccuccuccagccg

SEQ ID NO: 3629039 - RNA, 11 nt, Human
caaagccuuau

SEQ ID NO: 3629040 - RNA, 13 nt, Human
caaagcgggggga

SEQ ID NO: 3629041 - RNA, 21 nt, Human
caaagcguucacucccaaccu

SEQ ID NO: 3629042 - RNA, 22 nt, Human
caaagcugaagccgccaggacc

SEQ ID NO: 3629043 - RNA, 18 nt, Human
caaagcugacgaggcugg

SEQ ID NO: 3629044 - RNA, 13 nt, Human
caaagcugagccu

SEQ ID NO: 3629045 - RNA, 23 nt, Human
caaagcugagccugcagggaagc

SEQ ID NO: 3629046 - RNA, 19 nt, Human
caaagcugaugacaacuuc

SEQ ID NO: 3629047 - RNA, 21 nt, Human
caaagcugccugucccuaccc

SEQ ID NO: 3629048 - RNA, 16 nt, Human
caaagcugcuaaaucu

SEQ ID NO: 3629049 - RNA, 16 nt, Human
caaagcuggcucaccu

SEQ ID NO: 3629050 - RNA, 18 nt, Human
caaagcuguucuuccugg

SEQ ID NO: 3629051 - RNA, 14 nt, Human
caaagcuuagcagg

SEQ ID NO: 3629052 - RNA, 15 nt, Human
caaagcuuagcagga

SEQ ID NO: 3629053 - RNA, 17 nt, Human
caaagcuuagcaggaga

SEQ ID NO: 3629054 - RNA, 18 nt, Human
caaagcuuagcaggagag

SEQ ID NO: 3629055 - RNA, 20 nt, Human
caaagcuucccgauuaacug

SEQ ID NO: 3629056 - RNA, 20 nt, Human
caaagcuucuaucccaggag

SEQ ID NO: 3629057 - RNA, 19 nt, Human
caaagcuuggagggaagcc

SEQ ID NO: 3629058 - RNA, 21 nt, Human
caaagcuuggauuaaauacau

SEQ ID NO: 3629059 - RNA, 14 nt, Human
caaagcuuuccugc

SEQ ID NO: 3629060 - RNA, 18 nt, Human
caaagcuuuccugcccca

SEQ ID NO: 3629061 - RNA, 16 nt, Human
caaagcuuuuuccaga

SEQ ID NO: 3629062 - RNA, 21 nt, Human
caaaggaaaaagcacaagaag

SEQ ID NO: 3629063 - RNA, 19 nt, Human
caaaggaaaaaguaucaug

SEQ ID NO: 3629064 - RNA, 22 nt, Human
caaaggaaaauaguaauguuuu

SEQ ID NO: 3629065 - RNA, 17 nt, Human
caaaggaaaaugucugu

SEQ ID NO: 3629066 - RNA, 18 nt, Human
caaaggaaacuuugcaga

SEQ ID NO: 3629067 - RNA, 13 nt, Human
caaaggaagcaca

SEQ ID NO: 3629068 - RNA, 16 nt, Human
caaaggaagucuagga

SEQ ID NO: 3629069 - RNA, 21 nt, Human
caaaggaauggaggcucuaau

SEQ ID NO: 3629070 - RNA, 24 nt, Human
caaaggaauggaggcucuaauuga

SEQ ID NO: 3629071 - RNA, 19 nt, Human
caaaggacauuaugugugc

SEQ ID NO: 3629072 - RNA, 20 nt, Human
caaaggacauuaugugugca

SEQ ID NO: 3629073 - RNA, 13 nt, Human
caaaggacgcacu

SEQ ID NO: 3629074 - RNA, 18 nt, Human
caaaggacgcacugagca

SEQ ID NO: 3629075 - RNA, 20 nt, Human
caaaggagagucacagaaca

SEQ ID NO: 3629076 - RNA, 20 nt, Human
caaaggagauaaaucuagua

SEQ ID NO: 3629077 - RNA, 20 nt, Human
caaaggagauuggaaggaac

SEQ ID NO: 3629078 - RNA, 12 nt, Human
caaaggagccug

SEQ ID NO: 3629079 - RNA, 13 nt, Human
caaaggagccugu

SEQ ID NO: 3629080 - RNA, 14 nt, Human
caaaggagccugug

SEQ ID NO: 3629081 - RNA, 16 nt, Human
caaaggauacuuauuu

SEQ ID NO: 3629082 - RNA, 21 nt, Human
caaaggauacuuauuuaaaua

SEQ ID NO: 3629083 - RNA, 22 nt, Human
caaaggauagugcgauguuuca

SEQ ID NO: 3629084 - RNA, 21 nt, Human
caaaggaugcccaaagaugca

SEQ ID NO: 3629085 - RNA, 15 nt, Human
caaaggcaagcacuu

SEQ ID NO: 3629086 - RNA, 14 nt, Human
caaaggcaaguuaa

SEQ ID NO: 3629087 - RNA, 23 nt, Human
caaaggcaaguuaagagaaacuu

SEQ ID NO: 3629088 - RNA, 20 nt, Human
caaaggcacagugaaggcug

SEQ ID NO: 3629089 - RNA, 20 nt, Human
caaaggccagaccugcagac

SEQ ID NO: 3629090 - RNA, 21 nt, Human
caaaggccagaccugcagacg

SEQ ID NO: 3629091 - RNA, 13 nt, Human
caaaggccaugga

SEQ ID NO: 3629092 - RNA, 13 nt, Human
caaaggcccccua

SEQ ID NO: 3629093 - RNA, 11 nt, Human
caaaggcuggg

SEQ ID NO: 3629094 - RNA, 12 nt, Human
caaaggcuggga

SEQ ID NO: 3629095 - RNA, 15 nt, Human
caaagggaaauauca

SEQ ID NO: 3629096 - RNA, 22 nt, Human
caaagggagcacuggguugacu

SEQ ID NO: 3629097 - RNA, 22 nt, Human
caaagggcuccucuccagucug

SEQ ID NO: 3629098 - RNA, 18 nt, Human
caaagggcugaaagccau

SEQ ID NO: 3629099 - RNA, 21 nt, Human
caaagggcugaaagccauuug

SEQ ID NO: 3629100 - RNA, 21 nt, Human
caaaggggacaggccucaccu

SEQ ID NO: 3629101 - RNA, 17 nt, Human
caaaggggaccuggaag

SEQ ID NO: 3629102 - RNA, 18 nt, Human
caaaggggaccuggaagg

SEQ ID NO: 3629103 - RNA, 22 nt, Human
caaaggggaggcaucagugucc

SEQ ID NO: 3629104 - RNA, 21 nt, Human
caaaggguccagaaggagaca

SEQ ID NO: 3629105 - RNA, 19 nt, Human
caaagggugaagcuauuua

SEQ ID NO: 3629106 - RNA, 21 nt, Human
caaagggugaagcuauuuauc

SEQ ID NO: 3629107 - RNA, 18 nt, Human
caaaggucuuuuuaaacc

SEQ ID NO: 3629108 - RNA, 16 nt, Human
caaaggugaaggaaua

SEQ ID NO: 3629109 - RNA, 19 nt, Human
caaagguucuagguuucaa

SEQ ID NO: 3629110 - RNA, 13 nt, Human
caaagguuuaaau

SEQ ID NO: 3629111 - RNA, 19 nt, Human
caaagguuuggaaggagca

SEQ ID NO: 3629112 - RNA, 19 nt, Human
caaagguuuuccucuucua

SEQ ID NO: 3629113 - RNA, 16 nt, Human
caaaguaaaacuugcu

SEQ ID NO: 3629114 - RNA, 13 nt, Human
caaaguaaaagaa

SEQ ID NO: 3629115 - RNA, 16 nt, Human
caaaguacagaauuug

SEQ ID NO: 3629116 - RNA, 14 nt, Human
caaaguacuguaag

SEQ ID NO: 3629117 - RNA, 22 nt, Human
caaaguagaagucuuagaugua

SEQ ID NO: 3629118 - RNA, 22 nt, Human
caaaguaguacuucuucuguaa

SEQ ID NO: 3629119 - RNA, 21 nt, Human
caaaguauaaauuuguguaau

SEQ ID NO: 3629120 - RNA, 17 nt, Human
caaaguauuaagcauau

SEQ ID NO: 3629121 - RNA, 17 nt, Human
caaaguauuguaaauua

SEQ ID NO: 3629122 - RNA, 20 nt, Human
caaaguauuguaaauuauau

SEQ ID NO: 3629123 - RNA, 18 nt, Human
caaagucaggaaucauca

SEQ ID NO: 3629124 - RNA, 18 nt, Human
caaagucauaauugcauu

SEQ ID NO: 3629125 - RNA, 15 nt, Human
caaagucaugauguu

SEQ ID NO: 3629126 - RNA, 19 nt, Human
caaagucaugauguuuuua

SEQ ID NO: 3629127 - RNA, 22 nt, Human
caaagucaugcaaaggcuggga

SEQ ID NO: 3629128 - RNA, 16 nt, Human
caaagucauuaaagac

SEQ ID NO: 3629129 - RNA, 23 nt, Human
caaaguccuuuuuuuccaucuuu

SEQ ID NO: 3629130 - RNA, 13 nt, Human
caaagucuaaagu

SEQ ID NO: 3629131 - RNA, 19 nt, Human
caaagucucaaugaaauag

SEQ ID NO: 3629132 - RNA, 13 nt, Human
caaagucuccagc

SEQ ID NO: 3629133 - RNA, 13 nt, Human
caaagucucuaau

SEQ ID NO: 3629134 - RNA, 21 nt, Human
caaagucucuggaauuugaaa

SEQ ID NO: 3629135 - RNA, 23 nt, Human
caaagucugcucucauauaagac

SEQ ID NO: 3629136 - RNA, 16 nt, Human
caaagucuuugggguc

SEQ ID NO: 3629137 - RNA, 16 nt, Human
caaagugcaaggaccu

SEQ ID NO: 3629138 - RNA, 22 nt, Human
caaagugccacucauuccugua

SEQ ID NO: 3629139 - RNA, 18 nt, Human
caaagugcugggauuaca

SEQ ID NO: 3629140 - RNA, 19 nt, Human
caaagugcugggauuacag

SEQ ID NO: 3629141 - RNA, 12 nt, Human
caaucuguaaac

SEQ ID NO: 3629142 - RNA, 17 nt, Human
caaucuguaaacugugu

SEQ ID NO: 3629143 - RNA, 15 nt, Human
caaucuuacuuugua

SEQ ID NO: 3629144 - RNA, 17 nt, Human
caaucuuacuuuguaaa

SEQ ID NO: 3629145 - RNA, 17 nt, Human
caaucuugcauguaacg

SEQ ID NO: 3629146 - RNA, 20 nt, Human
caaucuuugaaagacuucca

SEQ ID NO: 3629147 - RNA, 23 nt, Human
caaucuuugaaagacuuccaaag

SEQ ID NO: 3629148 - RNA, 21 nt, Human
caaugaaaaauagugucuuug

SEQ ID NO: 3629149 - RNA, 16 nt, Human
caaugaaaacucuuug

SEQ ID NO: 3629150 - RNA, 19 nt, Human
caaugaaaaggugauuguc

SEQ ID NO: 3629151 - RNA, 17 nt, Human
caaugaaaguuugcacu

SEQ ID NO: 3629152 - RNA, 22 nt, Human
caaugaaauacacaaguaaaca

SEQ ID NO: 3629153 - RNA, 11 nt, Human
caaugaaauga

SEQ ID NO: 3629154 - RNA, 19 nt, Human
caaugaaaugcucuccuuu

SEQ ID NO: 3629155 - RNA, 18 nt, Human
caaugaacacuuauaagu

SEQ ID NO: 3629156 - RNA, 19 nt, Human
caaugaaccauaaauucaa

SEQ ID NO: 3629157 - RNA, 21 nt, Human
caaugaaguugaaaaucauag

SEQ ID NO: 3629158 - RNA, 22 nt, Human
caaugaauaaaaacucaaggag

SEQ ID NO: 3629159 - RNA, 17 nt, Human
caaugaauauacucauu

SEQ ID NO: 3629160 - RNA, 18 nt, Human
caaugaauauacucauua

SEQ ID NO: 3629161 - RNA, 13 nt, Human
caaugaauuauua

SEQ ID NO: 3629162 - RNA, 16 nt, Human
caaugacaucucaggg

SEQ ID NO: 3629163 - RNA, 22 nt, Human
caaugacaucucaggggccaga

SEQ ID NO: 3629164 - RNA, 15 nt, Human
caaugacaugaauuu

SEQ ID NO: 3629165 - RNA, 23 nt, Human
caaugaccuuucaauaggaaaaa

SEQ ID NO: 3629166 - RNA, 15 nt, Human
caaugacucaaaguc

SEQ ID NO: 3629167 - RNA, 14 nt, Human
caaugacucucugg

SEQ ID NO: 3629168 - RNA, 17 nt, Human
caaugagacuugccuuc

SEQ ID NO: 3629169 - RNA, 22 nt, Human
caaugagauagaagauguuugc

SEQ ID NO: 3629170 - RNA, 12 nt, Human
caaugagcaugu

SEQ ID NO: 3629171 - RNA, 20 nt, Human
caaugagcauguuuagacuu

SEQ ID NO: 3629172 - RNA, 12 nt, Human
caaugagcuuuc

SEQ ID NO: 3629173 - RNA, 13 nt, Human
caaugagcuuucu

SEQ ID NO: 3629174 - RNA, 15 nt, Human
caaugagcuuucuga

SEQ ID NO: 3629175 - RNA, 21 nt, Human
caaugagcuuucugaacagcu

SEQ ID NO: 3629176 - RNA, 20 nt, Human
caaugagguguccaacuggc

SEQ ID NO: 3629177 - RNA, 18 nt, Human
caaugauaguaagaaaag

SEQ ID NO: 3629178 - RNA, 20 nt, Human
caaugaucaccgacugaaaa

SEQ ID NO: 3629179 - RNA, 18 nt, Human
caaugaucuagguuuaac

SEQ ID NO: 3629180 - RNA, 23 nt, Human
caaugaucuagguuuaacucaga

SEQ ID NO: 3629181 - RNA, 19 nt, Human
caaugaugaugauaaugau

SEQ ID NO: 3629182 - RNA, 13 nt, Human
caaugaugcuauu

SEQ ID NO: 3629183 - RNA, 17 nt, Human
caaugaugcuauuugca

SEQ ID NO: 3629184 - RNA, 19 nt, Human
caaugaugcuauuugcaau

SEQ ID NO: 3629185 - RNA, 13 nt, Human
caaugauggcaau

SEQ ID NO: 3629186 - RNA, 17 nt, Human
caaugcaaaccaucauu

SEQ ID NO: 3629187 - RNA, 20 nt, Human
caaugcaaaccaucauugaa

SEQ ID NO: 3629188 - RNA, 22 nt, Human
caaugcaagagugauugcagcu

SEQ ID NO: 3629189 - RNA, 23 nt, Human
caaugcaagagugauugcagcuu

SEQ ID NO: 3629190 - RNA, 22 nt, Human
caaugcacacaaaacaacccua

SEQ ID NO: 3629191 - RNA, 14 nt, Human
caaugcacauccau

SEQ ID NO: 3629192 - RNA, 16 nt, Human
caaugcacauggugca

SEQ ID NO: 3629193 - RNA, 17 nt, Human
caaugcaccuaaagaaa

SEQ ID NO: 3629194 - RNA, 14 nt, Human
caaugcacugacau

SEQ ID NO: 3629195 - RNA, 14 nt, Human
caaugcacuuuguu

SEQ ID NO: 3629196 - RNA, 20 nt, Human
caaugcacuuuguucuggcu

SEQ ID NO: 3629197 - RNA, 21 nt, Human
caaugcacuuuguucuggcuc

SEQ ID NO: 3629198 - RNA, 17 nt, Human
caaugcagaugccagag

SEQ ID NO: 3629199 - RNA, 18 nt, Human
caaugcagaugccagagc

SEQ ID NO: 3629200 - RNA, 18 nt, Human
caaugcagcaaggcccug

SEQ ID NO: 3629201 - RNA, 20 nt, Human
caaugcagcaaggcccugcu

SEQ ID NO: 3629202 - RNA, 16 nt, Human
caaugcagugccuuuc

SEQ ID NO: 3629203 - RNA, 17 nt, Human
caaugcaguugucucug

SEQ ID NO: 3629204 - RNA, 12 nt, Human
caaugcauuuug

SEQ ID NO: 3629205 - RNA, 16 nt, Human
caaugccacagcccug

SEQ ID NO: 3629206 - RNA, 20 nt, Human
caaugccacauacuugcagc

SEQ ID NO: 3629207 - RNA, 16 nt, Human
caaugccauccucaaa

SEQ ID NO: 3629208 - RNA, 20 nt, Human
caaugccuauuguaauauag

SEQ ID NO: 3629209 - RNA, 23 nt, Human
caaugccuauuguaauauagaaa

SEQ ID NO: 3629210 - RNA, 20 nt, Human
caaugccucuugucuuccua

SEQ ID NO: 3629211 - RNA, 20 nt, Human
caaugcugaugaaucacugu

SEQ ID NO: 3629212 - RNA, 16 nt, Human
caaugcuggagaaaaa

SEQ ID NO: 3629213 - RNA, 15 nt, Human
caaugcuguauuuua

SEQ ID NO: 3629214 - RNA, 22 nt, Human
caaugcugugcccuaaagugua

SEQ ID NO: 3629215 - RNA, 21 nt, Human
caaugcuuugccccugagaca

SEQ ID NO: 3629216 - RNA, 15 nt, Human
caauggaaaccucac

SEQ ID NO: 3629217 - RNA, 13 nt, Human
caauggaaacuga

SEQ ID NO: 3629218 - RNA, 15 nt, Human
caauggaaacugaau

SEQ ID NO: 3629219 - RNA, 17 nt, Human
caauggaaacugaaugc

SEQ ID NO: 3629220 - RNA, 17 nt, Human
caauggaaccuccuuuc

SEQ ID NO: 3629221 - RNA, 15 nt, Human
caauggaguauucuc

SEQ ID NO: 3629222 - RNA, 13 nt, Human
caauggauauuug

SEQ ID NO: 3629223 - RNA, 14 nt, Human
caauggcagaugua

SEQ ID NO: 3629224 - RNA, 13 nt, Human
caauggcagccuu

SEQ ID NO: 3629225 - RNA, 16 nt, Human
caauggcagccuuggc

SEQ ID NO: 3629226 - RNA, 15 nt, Human
caauggccuaaacuu

SEQ ID NO: 3629227 - RNA, 21 nt, Human
caauggcgcagugccucuggu

SEQ ID NO: 3629228 - RNA, 14 nt, Human
caauggcugcugaa

SEQ ID NO: 3629229 - RNA, 15 nt, Human
caauggcuuuuuaaa

SEQ ID NO: 3629230 - RNA, 21 nt, Human
caaugggaaauacuacuccug

SEQ ID NO: 3629231 - RNA, 15 nt, Human
caaugggagcucaug

SEQ ID NO: 3629232 - RNA, 23 nt, Human
caaugggauguaugaauacagca

SEQ ID NO: 3629233 - RNA, 16 nt, Human
caaugggcucuuccaa

SEQ ID NO: 3629234 - RNA, 22 nt, Human
caauggggauguuguguuucug

SEQ ID NO: 3629235 - RNA, 14 nt, Human
caaugguaguuucu

SEQ ID NO: 3629236 - RNA, 20 nt, Human
caaugguaguuucugugguu

SEQ ID NO: 3629237 - RNA, 16 nt, Human
caaugguccugacuuu

SEQ ID NO: 3629238 - RNA, 21 nt, Human
caauggugucaguauccaggc

SEQ ID NO: 3629239 - RNA, 20 nt, Human
caaugguguuauuugaaacu

SEQ ID NO: 3629240 - RNA, 22 nt, Human
caaugguguuuuucuuguaaau

SEQ ID NO: 3629241 - RNA, 16 nt, Human
caaugguuugcaagga

SEQ ID NO: 3629242 - RNA, 18 nt, Human
caaugguuuucuugugug

SEQ ID NO: 3629243 - RNA, 17 nt, Human
caauguaaauauuuuaa

SEQ ID NO: 3629244 - RNA, 23 nt, Human
caauguaauuauuuauguauggu

SEQ ID NO: 3629245 - RNA, 19 nt, Human
caauguacccaccgggcca

SEQ ID NO: 3629246 - RNA, 22 nt, Human
caauguacccaccgggccacuc

SEQ ID NO: 3629247 - RNA, 21 nt, Human
caauguacuaggauacugcug

SEQ ID NO: 3629248 - RNA, 20 nt, Human
caauguagauaaguguucug

SEQ ID NO: 3629249 - RNA, 18 nt, Human
caauguauuuauuuaaaa

SEQ ID NO: 3629250 - RNA, 22 nt, Human
caauguauuuauuuaaaagauu

SEQ ID NO: 3629251 - RNA, 21 nt, Human
caaugucauauacugccaugu

SEQ ID NO: 3629252 - RNA, 22 nt, Human
caaugucugcagcccugagaaa

SEQ ID NO: 3629253 - RNA, 14 nt, Human
caaugucuggagac

SEQ ID NO: 3629254 - RNA, 23 nt, Human
caaugucuugguacuugcugcua

SEQ ID NO: 3629255 - RNA, 14 nt, Human
caaugugaaaaauc

SEQ ID NO: 3629256 - RNA, 21 nt, Human
caaugugaacuuuauuaaaua

SEQ ID NO: 3629257 - RNA, 19 nt, Human
caaugugaaucagacccua

SEQ ID NO: 3629258 - RNA, 13 nt, Human
caaugugaccagg

SEQ ID NO: 3629259 - RNA, 15 nt, Human
caaugugauaaaacc

SEQ ID NO: 3629260 - RNA, 20 nt, Human
caaugugauauaaacagcuu

SEQ ID NO: 3629261 - RNA, 22 nt, Human
caaugugauauaaacagcuucu

SEQ ID NO: 3629262 - RNA, 16 nt, Human
caaugugaucuauguu

SEQ ID NO: 3629263 - RNA, 15 nt, Human
caaugugauucuaau

SEQ ID NO: 3629264 - RNA, 17 nt, Human
caauguguauaaacaag

SEQ ID NO: 3629265 - RNA, 18 nt, Human
caauguguauaaacaaga

SEQ ID NO: 3629266 - RNA, 15 nt, Human
caaugugucuuucua

SEQ ID NO: 3629267 - RNA, 23 nt, Human
caaugugugccgagcccuugccc

SEQ ID NO: 3629268 - RNA, 17 nt, Human
caauguguguauaugga

SEQ ID NO: 3629269 - RNA, 17 nt, Human
caauguguuuuucucca

SEQ ID NO: 3629270 - RNA, 21 nt, Human
caauguuaaacuuauaaccca

SEQ ID NO: 3629271 - RNA, 14 nt, Human
caauguuaacauuu

SEQ ID NO: 3629272 - RNA, 18 nt, Human
caauguuaaggaaacucu

SEQ ID NO: 3629273 - RNA, 16 nt, Human
caauguuagagacuuu

SEQ ID NO: 3629274 - RNA, 13 nt, Human
caauguucauugu

SEQ ID NO: 3629275 - RNA, 15 nt, Human
caauguucauuguaa

SEQ ID NO: 3629276 - RNA, 15 nt, Human
caauguucuuuauau

SEQ ID NO: 3629277 - RNA, 18 nt, Human
caauguucuuuauauaca

SEQ ID NO: 3629278 - RNA, 22 nt, Human
caauguucuuuauauacaauaa

SEQ ID NO: 3629279 - RNA, 18 nt, Human
caauguuuaaaaaaguuu

SEQ ID NO: 3629280 - RNA, 11 nt, Human
caauguuuaca

SEQ ID NO: 3629281 - RNA, 21 nt, Human
caauguuuauuucauaaagaa

SEQ ID NO: 3629282 - RNA, 17 nt, Human
caauguuucuucuaggu

SEQ ID NO: 3629283 - RNA, 16 nt, Human
caauguuucuuuuauc

SEQ ID NO: 3629284 - RNA, 13 nt, Human
caauguuuuccuu

SEQ ID NO: 3629285 - RNA, 19 nt, Human
cacagaaucauaugauucu

SEQ ID NO: 3629286 - RNA, 12 nt, Human
cacagaaugcaa

SEQ ID NO: 3629287 - RNA, 12 nt, Human
cacagacacaca

SEQ ID NO: 3629288 - RNA, 20 nt, Human
cacagacacacacacgcacg

SEQ ID NO: 3629289 - RNA, 10 nt, Human
cacagacagg

SEQ ID NO: 3629290 - RNA, 14 nt, Human
cacagacaggaccc

SEQ ID NO: 3629291 - RNA, 18 nt, Human
cacagacaggaccccugc

SEQ ID NO: 3629292 - RNA, 19 nt, Human
cacagacagggucaaagug

SEQ ID NO: 3629293 - RNA, 21 nt, Human
cacagacauacuaaccagcag

SEQ ID NO: 3629294 - RNA, 18 nt, Human
cacagacauucugccagg

SEQ ID NO: 3629295 - RNA, 13 nt, Human
cacagacccugcc

SEQ ID NO: 3629296 - RNA, 14 nt, Human
cacagaccuggagc

SEQ ID NO: 3629297 - RNA, 15 nt, Human
cacagaccuggagcc

SEQ ID NO: 3629298 - RNA, 18 nt, Human
cacagaccuggagccccu

SEQ ID NO: 3629299 - RNA, 19 nt, Human
cacagaccuggagccccug

SEQ ID NO: 3629300 - RNA, 14 nt, Human
cacagacucauauu

SEQ ID NO: 3629301 - RNA, 21 nt, Human
cacagacucauccugaacagc

SEQ ID NO: 3629302 - RNA, 23 nt, Human
cacagacucauccugaacagcau

SEQ ID NO: 3629303 - RNA, 12 nt, Human
cacagagaaagu

SEQ ID NO: 3629304 - RNA, 19 nt, Human
cacagagaaaguacuucuc

SEQ ID NO: 3629305 - RNA, 20 nt, Human
cacagagaaaguacuucucc

SEQ ID NO: 3629306 - RNA, 14 nt, Human
cacagagaagacaa

SEQ ID NO: 3629307 - RNA, 17 nt, Human
cacagagaagacaaaau

SEQ ID NO: 3629308 - RNA, 20 nt, Human
cacagagaagcuggggagga

SEQ ID NO: 3629309 - RNA, 14 nt, Human
cacagagacacagg

SEQ ID NO: 3629310 - RNA, 18 nt, Human
cacagagacacagggcau

SEQ ID NO: 3629311 - RNA, 23 nt, Human
cacagagacccccggaacaagcc

SEQ ID NO: 3629312 - RNA, 10 nt, Human
cacagagaga

SEQ ID NO: 3629313 - RNA, 14 nt, Human
cacagagagaguca

SEQ ID NO: 3629314 - RNA, 22 nt, Human
cacagagagggagagcagagaa

SEQ ID NO: 3629315 - RNA, 18 nt, Human
cacagagagucccacugc

SEQ ID NO: 3629316 - RNA, 19 nt, Human
cacagagagucccacugcc

SEQ ID NO: 3629317 - RNA, 23 nt, Human
cacagagcaagagauaagucuuu

SEQ ID NO: 3629318 - RNA, 14 nt, Human
cacagagcaggacu

SEQ ID NO: 3629319 - RNA, 21 nt, Human
cacagagcaggacugcacagc

SEQ ID NO: 3629320 - RNA, 16 nt, Human
cacagagcucuccagc

SEQ ID NO: 3629321 - RNA, 15 nt, Human
cacagaggaagagca

SEQ ID NO: 3629322 - RNA, 17 nt, Human
cacagaggaagagcagg

SEQ ID NO: 3629323 - RNA, 15 nt, Human
cacagaggacacaga

SEQ ID NO: 3629324 - RNA, 23 nt, Human
cacagagguagucucacugcuug

SEQ ID NO: 3629325 - RNA, 15 nt, Human
cacagaguaagacau

SEQ ID NO: 3629326 - RNA, 17 nt, Human
cacagaguaagacauug

SEQ ID NO: 3629327 - RNA, 19 nt, Human
cacagagucaaggccugcu

SEQ ID NO: 3629328 - RNA, 22 nt, Human
cacagaguggucuuucuggaga

SEQ ID NO: 3629329 - RNA, 15 nt, Human
cacagaguguagcca

SEQ ID NO: 3629330 - RNA, 16 nt, Human
cacagaguuguuacau

SEQ ID NO: 3629331 - RNA, 17 nt, Human
cacagaguuguuacauu

SEQ ID NO: 3629332 - RNA, 20 nt, Human
cacagaguuguuacauuuuu

SEQ ID NO: 3629333 - RNA, 14 nt, Human
cacagauaaaaagu

SEQ ID NO: 3629334 - RNA, 15 nt, Human
cacagauaaaaagug

SEQ ID NO: 3629335 - RNA, 16 nt, Human
cacagauacacacaca

SEQ ID NO: 3629336 - RNA, 19 nt, Human
cacagauauacuuugugga

SEQ ID NO: 3629337 - RNA, 22 nt, Human
cacagaucacagcuucagccag

SEQ ID NO: 3629338 - RNA, 11 nt, Human
cacagaucaug

SEQ ID NO: 3629339 - RNA, 20 nt, Human
cacagaugaguuaucuaaga

SEQ ID NO: 3629340 - RNA, 11 nt, Human
cacagaugccu

SEQ ID NO: 3629341 - RNA, 15 nt, Human
cacagaugcuccagg

SEQ ID NO: 3629342 - RNA, 19 nt, Human
cacagauggauuugccugu

SEQ ID NO: 3629343 - RNA, 13 nt, Human
cacagauggccag

SEQ ID NO: 3629344 - RNA, 18 nt, Human
cacagaugggugcuugga

SEQ ID NO: 3629345 - RNA, 19 nt, Human
cacagauguucccccaucu

SEQ ID NO: 3629346 - RNA, 20 nt, Human
cacagauuguuucuauacaa

SEQ ID NO: 3629347 - RNA, 22 nt, Human
cacagauuugagcucagcccug

SEQ ID NO: 3629348 - RNA, 18 nt, Human
cacagauuuuaauuguca

SEQ ID NO: 3629349 - RNA, 19 nt, Human
cacagauuuuaauugucau

SEQ ID NO: 3629350 - RNA, 17 nt, Human
cacagcaaggcaccugc

SEQ ID NO: 3629351 - RNA, 19 nt, Human
cacagcaaggcaccugcag

SEQ ID NO: 3629352 - RNA, 16 nt, Human
cacagcaauuccucag

SEQ ID NO: 3629353 - RNA, 18 nt, Human
cacagcaauuccucaggc

SEQ ID NO: 3629354 - RNA, 15 nt, Human
cacagcacagccaac

SEQ ID NO: 3629355 - RNA, 13 nt, Human
cacagcacagcuc

SEQ ID NO: 3629356 - RNA, 17 nt, Human
cacagcacagcucccug

SEQ ID NO: 3629357 - RNA, 19 nt, Human
cacagcacaugcuggccag

SEQ ID NO: 3629358 - RNA, 15 nt, Human
cacagcacccuauau

SEQ ID NO: 3629359 - RNA, 13 nt, Human
cacagcagcauuu

SEQ ID NO: 3629360 - RNA, 16 nt, Human
cacagcagccccugca

SEQ ID NO: 3629361 - RNA, 18 nt, Human
cacagcagccucugaagu

SEQ ID NO: 3629362 - RNA, 13 nt, Human
cacagcagcuuca

SEQ ID NO: 3629363 - RNA, 15 nt, Human
cacagcagcuucacc

SEQ ID NO: 3629364 - RNA, 18 nt, Human
cacagcagcuucaccaga

SEQ ID NO: 3629365 - RNA, 20 nt, Human
cacagcaggcugccagugcc

SEQ ID NO: 3629366 - RNA, 13 nt, Human
cacagcagguccu

SEQ ID NO: 3629367 - RNA, 21 nt, Human
cacagcaguucugcagaggac

SEQ ID NO: 3629368 - RNA, 19 nt, Human
cacagcaguugaaaagacu

SEQ ID NO: 3629369 - RNA, 21 nt, Human
cacagcaguugaaaagacucc

SEQ ID NO: 3629370 - RNA, 23 nt, Human
cacagcaucauuuugcauucaaa

SEQ ID NO: 3629371 - RNA, 12 nt, Human
cacagcaucuca

SEQ ID NO: 3629372 - RNA, 13 nt, Human
cacagcaucucag

SEQ ID NO: 3629373 - RNA, 22 nt, Human
cacagccaacacgcaccugccu

SEQ ID NO: 3629374 - RNA, 11 nt, Human
cacagccacac

SEQ ID NO: 3629375 - RNA, 15 nt, Human
cacagccacacacac

SEQ ID NO: 3629376 - RNA, 19 nt, Human
cacagccacacacacagaa

SEQ ID NO: 3629377 - RNA, 21 nt, Human
cacagccacacacacagaaaa

SEQ ID NO: 3629378 - RNA, 16 nt, Human
cacagccaggugccuu

SEQ ID NO: 3629379 - RNA, 22 nt, Human
cacagccaucccagccuuggca

SEQ ID NO: 3629380 - RNA, 19 nt, Human
cacagcccaaagaaggaaa

SEQ ID NO: 3629381 - RNA, 16 nt, Human
cacagcccacguccug

SEQ ID NO: 3629382 - RNA, 18 nt, Human
cacagcccacguccuguc

SEQ ID NO: 3629383 - RNA, 16 nt, Human
cacagcccagccacgg

SEQ ID NO: 3629384 - RNA, 15 nt, Human
cacagcccucccgcc

SEQ ID NO: 3629385 - RNA, 20 nt, Human
cacagcccucccgccccuuc

SEQ ID NO: 3629386 - RNA, 11 nt, Human
cacagcccugu

SEQ ID NO: 3629387 - RNA, 12 nt, Human
cacagcccuguc

SEQ ID NO: 3629388 - RNA, 14 nt, Human
cacagcccugucag

SEQ ID NO: 3629389 - RNA, 23 nt, Human
cacagccgcagccucccucugac

SEQ ID NO: 3629390 - RNA, 20 nt, Human
cacagccggggccugccuag

SEQ ID NO: 3629391 - RNA, 22 nt, Human
cacagccggggccugccuagca

SEQ ID NO: 3629392 - RNA, 14 nt, Human
cacagccuccccug

SEQ ID NO: 3629393 - RNA, 23 nt, Human
cacagccuccucugucugcccuu

SEQ ID NO: 3629394 - RNA, 13 nt, Human
cacagccucugac

SEQ ID NO: 3629395 - RNA, 15 nt, Human
cacagccucugaccc

SEQ ID NO: 3629396 - RNA, 20 nt, Human
cacagccucugaccccuccu

SEQ ID NO: 3629397 - RNA, 22 nt, Human
cacagccucugaccccuccuca

SEQ ID NO: 3629398 - RNA, 14 nt, Human
cacagccucugccu

SEQ ID NO: 3629399 - RNA, 17 nt, Human
cacagccucuuagaugc

SEQ ID NO: 3629400 - RNA, 14 nt, Human
cacagccugcacuu

SEQ ID NO: 3629401 - RNA, 14 nt, Human
cacagcgagggcag

SEQ ID NO: 3629402 - RNA, 15 nt, Human
cacagcgagggcagc

SEQ ID NO: 3629403 - RNA, 19 nt, Human
cacagcgagggcagcugcu

SEQ ID NO: 3629404 - RNA, 14 nt, Human
cacagcgcuggccg

SEQ ID NO: 3629405 - RNA, 19 nt, Human
cacagcgcuggccgggacc

SEQ ID NO: 3629406 - RNA, 16 nt, Human
cacagcggccccugca

SEQ ID NO: 3629407 - RNA, 15 nt, Human
cacagcgucccuagc

SEQ ID NO: 3629408 - RNA, 15 nt, Human
cacagcgucccuggc

SEQ ID NO: 3629409 - RNA, 18 nt, Human
cacagcgucccuggcgca

SEQ ID NO: 3629410 - RNA, 19 nt, Human
cacagcgucccuggcgcag

SEQ ID NO: 3629411 - RNA, 19 nt, Human
cacagcguccuguccacac

SEQ ID NO: 3629412 - RNA, 20 nt, Human
cacagcuaacacacagcucc

SEQ ID NO: 3629413 - RNA, 16 nt, Human
cacagcuaacauggaa

SEQ ID NO: 3629414 - RNA, 12 nt, Human
cacagcuaugaa

SEQ ID NO: 3629415 - RNA, 16 nt, Human
cacagcucccacccca

SEQ ID NO: 3629416 - RNA, 17 nt, Human
cacagcucccaccccac

SEQ ID NO: 3629417 - RNA, 15 nt, Human
cacagcucccugcca

SEQ ID NO: 3629418 - RNA, 16 nt, Human
cacagcucccugccaa

SEQ ID NO: 3629419 - RNA, 16 nt, Human
cacagcucccuucugu

SEQ ID NO: 3629420 - RNA, 15 nt, Human
cacagcuccucccac

SEQ ID NO: 3629421 - RNA, 12 nt, Human
cacagcuccuuu

SEQ ID NO: 3629422 - RNA, 21 nt, Human
cacagcucuccggucucucuc

SEQ ID NO: 3629423 - RNA, 14 nt, Human
cacagcucuguccu

SEQ ID NO: 3629424 - RNA, 19 nt, Human
cacagcucuguccugggag

SEQ ID NO: 3629425 - RNA, 20 nt, Human
cacagcucuguccugggagu

SEQ ID NO: 3629426 - RNA, 23 nt, Human
cacagcucuguccugggagugag

SEQ ID NO: 3629427 - RNA, 10 nt, Human
cacagcucuu

SEQ ID NO: 3629428 - RNA, 20 nt, Human
cacagcugaaaguucuugcu

SEQ ID NO: 3629429 - RNA, 18 nt, Human
cacagcugcagagacaga

SEQ ID NO: 3629430 - RNA, 20 nt, Human
cacagcugcuggagacuccu

SEQ ID NO: 3629431 - RNA, 14 nt, Human
caccaagccaaggg

SEQ ID NO: 3629432 - RNA, 13 nt, Human
caccaagcccaca

SEQ ID NO: 3629433 - RNA, 12 nt, Human
caccaagcccag

SEQ ID NO: 3629434 - RNA, 15 nt, Human
caccaagcccaguua

SEQ ID NO: 3629435 - RNA, 16 nt, Human
caccaagcucaaagcg

SEQ ID NO: 3629436 - RNA, 20 nt, Human
caccaagcucacaguuccuc

SEQ ID NO: 3629437 - RNA, 22 nt, Human
caccaagcugugccacccuggg

SEQ ID NO: 3629438 - RNA, 21 nt, Human
caccaaggaaacgcuaccucu

SEQ ID NO: 3629439 - RNA, 23 nt, Human
caccaagggcgcaagaguagcgg

SEQ ID NO: 3629440 - RNA, 14 nt, Human
caccaaggucuuca

SEQ ID NO: 3629441 - RNA, 15 nt, Human
caccaaggucuucag

SEQ ID NO: 3629442 - RNA, 21 nt, Human
caccaagugcggguccggcag

SEQ ID NO: 3629443 - RNA, 18 nt, Human
caccaaucuuacuuugua

SEQ ID NO: 3629444 - RNA, 19 nt, Human
caccaaucuuacuuuguaa

SEQ ID NO: 3629445 - RNA, 17 nt, Human
caccaauguacccaccg

SEQ ID NO: 3629446 - RNA, 24 nt, Human
caccaauugguuaaucuuuccuga

SEQ ID NO: 3629447 - RNA, 14 nt, Human
caccacacccagcc

SEQ ID NO: 3629448 - RNA, 15 nt, Human
caccacacccagccu

SEQ ID NO: 3629449 - RNA, 14 nt, Human
caccacacucagcc

SEQ ID NO: 3629450 - RNA, 12 nt, Human
caccacagacac

SEQ ID NO: 3629451 - RNA, 20 nt, Human
caccacagacacacacacgc

SEQ ID NO: 3629452 - RNA, 13 nt, Human
caccacagccagc

SEQ ID NO: 3629453 - RNA, 23 nt, Human
caccacaggcccuuuccucaggc

SEQ ID NO: 3629454 - RNA, 21 nt, Human
caccacauccuccguccagcc

SEQ ID NO: 3629455 - RNA, 15 nt, Human
caccacaugugcaca

SEQ ID NO: 3629456 - RNA, 19 nt, Human
caccacaugugcacaugca

SEQ ID NO: 3629457 - RNA, 16 nt, Human
caccaccacuggccac

SEQ ID NO: 3629458 - RNA, 23 nt, Human
caccaccacuggccaccaggcug

SEQ ID NO: 3629459 - RNA, 13 nt, Human
caccaccaggucu

SEQ ID NO: 3629460 - RNA, 14 nt, Human
caccaccccagcug

SEQ ID NO: 3629461 - RNA, 16 nt, Human
caccaccccagcugcu

SEQ ID NO: 3629462 - RNA, 21 nt, Human
caccaccccagcugcuccccu

SEQ ID NO: 3629463 - RNA, 15 nt, Human
caccaccccccacuc

SEQ ID NO: 3629464 - RNA, 23 nt, Human
caccaccuaggccacuccuccaa

SEQ ID NO: 3629465 - RNA, 16 nt, Human
caccaccucacuccug

SEQ ID NO: 3629466 - RNA, 17 nt, Human
caccaccucacuccugu

SEQ ID NO: 3629467 - RNA, 14 nt, Human
caccaccucagagu

SEQ ID NO: 3629468 - RNA, 14 nt, Human
caccaccucccuca

SEQ ID NO: 3629469 - RNA, 18 nt, Human
caccaccuucccagcucu

SEQ ID NO: 3629470 - RNA, 21 nt, Human
caccaccuucccagcucuccc

SEQ ID NO: 3629471 - RNA, 14 nt, Human
caccacgcccggcu

SEQ ID NO: 3629472 - RNA, 15 nt, Human
caccacgcccggcua

SEQ ID NO: 3629473 - RNA, 16 nt, Human
caccacggccacuggc

SEQ ID NO: 3629474 - RNA, 22 nt, Human
caccacggcguuguaccuguag

SEQ ID NO: 3629475 - RNA, 15 nt, Human
caccacguccagcug

SEQ ID NO: 3629476 - RNA, 18 nt, Human
caccacuagccucagggg

SEQ ID NO: 3629477 - RNA, 14 nt, Human
caccacuauaaaau

SEQ ID NO: 3629478 - RNA, 22 nt, Human
caccacucaaaggccagaccug

SEQ ID NO: 3629479 - RNA, 13 nt, Human
caccacuccauuc

SEQ ID NO: 3629480 - RNA, 15 nt, Human
caccacuccauuccc

SEQ ID NO: 3629481 - RNA, 17 nt, Human
caccacucuggcagcca

SEQ ID NO: 3629482 - RNA, 13 nt, Human
caccacugcacuc

SEQ ID NO: 3629483 - RNA, 16 nt, Human
caccacuggccaccag

SEQ ID NO: 3629484 - RNA, 16 nt, Human
caccacuucuuuuaua

SEQ ID NO: 3629485 - RNA, 16 nt, Human
caccagaagcccagaa

SEQ ID NO: 3629486 - RNA, 17 nt, Human
caccagaagcccagaau

SEQ ID NO: 3629487 - RNA, 19 nt, Human
caccagacacccaggacuu

SEQ ID NO: 3629488 - RNA, 20 nt, Human
caccagacacccaggacuua

SEQ ID NO: 3629489 - RNA, 14 nt, Human
caccagagagggac

SEQ ID NO: 3629490 - RNA, 22 nt, Human
caccagagcaaccucucacucc

SEQ ID NO: 3629491 - RNA, 17 nt, Human
caccagagcccaccuug

SEQ ID NO: 3629492 - RNA, 22 nt, Human
caccagagcccaccuuggcuca

SEQ ID NO: 3629493 - RNA, 11 nt, Human
caccagagcug

SEQ ID NO: 3629494 - RNA, 14 nt, Human
caccagcagccugg

SEQ ID NO: 3629495 - RNA, 19 nt, Human
caccagcaucaccugccug

SEQ ID NO: 3629496 - RNA, 14 nt, Human
caccagccaggcuc

SEQ ID NO: 3629497 - RNA, 15 nt, Human
caccagccaggcucu

SEQ ID NO: 3629498 - RNA, 18 nt, Human
caccagccaggcucugug

SEQ ID NO: 3629499 - RNA, 15 nt, Human
caccagcccagaagu

SEQ ID NO: 3629500 - RNA, 22 nt, Human
caccagcccaucgccacaaacu

SEQ ID NO: 3629501 - RNA, 19 nt, Human
caccagcccauggcccugu

SEQ ID NO: 3629502 - RNA, 12 nt, Human
caccagccccac

SEQ ID NO: 3629503 - RNA, 14 nt, Human
caccagccccacug

SEQ ID NO: 3629504 - RNA, 21 nt, Human
caccagccccacugccagcag

SEQ ID NO: 3629505 - RNA, 23 nt, Human
caccagccccacugccagcagca

SEQ ID NO: 3629506 - RNA, 16 nt, Human
caccagccccagugcc

SEQ ID NO: 3629507 - RNA, 21 nt, Human
caccagccccagugcccacag

SEQ ID NO: 3629508 - RNA, 22 nt, Human
caccagccccagugcccacagg

SEQ ID NO: 3629509 - RNA, 19 nt, Human
caccagccccugccccagc

SEQ ID NO: 3629510 - RNA, 18 nt, Human
caccagcccggccugcuc

SEQ ID NO: 3629511 - RNA, 13 nt, Human
caccagccugcac

SEQ ID NO: 3629512 - RNA, 22 nt, Human
caccagccuuucucccaggcca

SEQ ID NO: 3629513 - RNA, 19 nt, Human
caccagcguuugaggggcu

SEQ ID NO: 3629514 - RNA, 15 nt, Human
caccagcuccucccu

SEQ ID NO: 3629515 - RNA, 12 nt, Human
caccagcugcaa

SEQ ID NO: 3629516 - RNA, 13 nt, Human
caccagcugcaaa

SEQ ID NO: 3629517 - RNA, 15 nt, Human
caccagcugccucuu

SEQ ID NO: 3629518 - RNA, 16 nt, Human
caccagcugccucuuc

SEQ ID NO: 3629519 - RNA, 15 nt, Human
caccagcugugucca

SEQ ID NO: 3629520 - RNA, 16 nt, Human
caccagcuucuccagg

SEQ ID NO: 3629521 - RNA, 17 nt, Human
caccaggaaccucuuca

SEQ ID NO: 3629522 - RNA, 21 nt, Human
caccaggaauguuaaagucag

SEQ ID NO: 3629523 - RNA, 23 nt, Human
caccaggaauguuaaagucagug

SEQ ID NO: 3629524 - RNA, 16 nt, Human
caccaggacuagggcu

SEQ ID NO: 3629525 - RNA, 13 nt, Human
caccaggauggcc

SEQ ID NO: 3629526 - RNA, 21 nt, Human
caccaggauggcccuucccac

SEQ ID NO: 3629527 - RNA, 20 nt, Human
caccaggcaccucacagaaa

SEQ ID NO: 3629528 - RNA, 23 nt, Human
caccaggcaccucacagaaauga

SEQ ID NO: 3629529 - RNA, 21 nt, Human
caccaggcacgaacccaccug

SEQ ID NO: 3629530 - RNA, 22 nt, Human
caccaggcacgaacccaccugc

SEQ ID NO: 3629531 - RNA, 17 nt, Human
caccaggccccccuguc

SEQ ID NO: 3629532 - RNA, 21 nt, Human
caccaggccguccucccgggc

SEQ ID NO: 3629533 - RNA, 17 nt, Human
caccaggcgcuaauuca

SEQ ID NO: 3629534 - RNA, 23 nt, Human
caccaggcgcuaauucaaggaau

SEQ ID NO: 3629535 - RNA, 15 nt, Human
caccaggcgcugccc

SEQ ID NO: 3629536 - RNA, 13 nt, Human
caccaggcuggcg

SEQ ID NO: 3629537 - RNA, 16 nt, Human
caccaggcuggcgcag

SEQ ID NO: 3629538 - RNA, 18 nt, Human
caccaggcuggcgcagcc

SEQ ID NO: 3629539 - RNA, 19 nt, Human
caccaggcuggcgcagcca

SEQ ID NO: 3629540 - RNA, 15 nt, Human
caccaggcugugggc

SEQ ID NO: 3629541 - RNA, 15 nt, Human
caccagggaagaaga

SEQ ID NO: 3629542 - RNA, 13 nt, Human
caccagggaaggg

SEQ ID NO: 3629543 - RNA, 18 nt, Human
caccagggaaggggacaa

SEQ ID NO: 3629544 - RNA, 21 nt, Human
caccagggcaucucugggcug

SEQ ID NO: 3629545 - RNA, 13 nt, Human
caccaggggcagg

SEQ ID NO: 3629546 - RNA, 15 nt, Human
caccagggguuucuc

SEQ ID NO: 3629547 - RNA, 14 nt, Human
caccaggucucccg

SEQ ID NO: 3629548 - RNA, 22 nt, Human
caccaggugccuuucaaauuua

SEQ ID NO: 3629549 - RNA, 13 nt, Human
caccaguacauuc

SEQ ID NO: 3629550 - RNA, 21 nt, Human
caccaguacauucucaguuuu

SEQ ID NO: 3629551 - RNA, 16 nt, Human
caccagucacaugacc

SEQ ID NO: 3629552 - RNA, 15 nt, Human
caccagugaccugga

SEQ ID NO: 3629553 - RNA, 11 nt, Human
caccagugccu

SEQ ID NO: 3629554 - RNA, 15 nt, Human
caccaguguccuccc

SEQ ID NO: 3629555 - RNA, 19 nt, Human
caccaguguccuccccuca

SEQ ID NO: 3629556 - RNA, 11 nt, Human
caccaguucuc

SEQ ID NO: 3629557 - RNA, 20 nt, Human
caccaguucucauggguggc

SEQ ID NO: 3629558 - RNA, 15 nt, Human
caccaguugcugcuu

SEQ ID NO: 3629559 - RNA, 18 nt, Human
caccauaagcuacugcca

SEQ ID NO: 3629560 - RNA, 19 nt, Human
caccauaagcuacugccau

SEQ ID NO: 3629561 - RNA, 18 nt, Human
caccauaugaauuguaca

SEQ ID NO: 3629562 - RNA, 20 nt, Human
caccauaugaauuguacaga

SEQ ID NO: 3629563 - RNA, 16 nt, Human
caccauauucagugcu

SEQ ID NO: 3629564 - RNA, 13 nt, Human
caccaucaagcca

SEQ ID NO: 3629565 - RNA, 19 nt, Human
caccaucaagccaccaaca

SEQ ID NO: 3629566 - RNA, 15 nt, Human
caccaucaauccuga

SEQ ID NO: 3629567 - RNA, 19 nt, Human
caccaucccuuuuugaagu

SEQ ID NO: 3629568 - RNA, 20 nt, Human
caccaucccuuuuugaagug

SEQ ID NO: 3629569 - RNA, 13 nt, Human
caccauccugcug

SEQ ID NO: 3629570 - RNA, 14 nt, Human
caccaucgcuggcc

SEQ ID NO: 3629571 - RNA, 21 nt, Human
caccaucucaggccaccugcc

SEQ ID NO: 3629572 - RNA, 22 nt, Human
caccaucucaggccaccugccc

SEQ ID NO: 3629573 - RNA, 15 nt, Human
caccaucugcugucu

SEQ ID NO: 3629574 - RNA, 14 nt, Human
caccaucuuugcag

SEQ ID NO: 3629575 - RNA, 15 nt, Human
caccaugauggccag

SEQ ID NO: 3629576 - RNA, 18 nt, Human
cacuuuuauuuagcacca

SEQ ID NO: 3629577 - RNA, 15 nt, Human
cacuuuucauaucau

SEQ ID NO: 3629578 - RNA, 12 nt, Human
cacuuuucccac

SEQ ID NO: 3629579 - RNA, 15 nt, Human
cacuuuucccacucc

SEQ ID NO: 3629580 - RNA, 19 nt, Human
cacuuuucccacuccaagc

SEQ ID NO: 3629581 - RNA, 18 nt, Human
cacuuuugacaaaggcaa

SEQ ID NO: 3629582 - RNA, 14 nt, Human
cacuuuuguucuug

SEQ ID NO: 3629583 - RNA, 19 nt, Human
cacuuuuucauuugccuau

SEQ ID NO: 3629584 - RNA, 14 nt, Human
cacuuuuugaggca

SEQ ID NO: 3629585 - RNA, 20 nt, Human
cacuuuuugaggcaaaagaa

SEQ ID NO: 3629586 - RNA, 12 nt, Human
cacuuuuuucca

SEQ ID NO: 3629587 - RNA, 21 nt, Human
cacuuuuuugaguggaugaug

SEQ ID NO: 3629588 - RNA, 23 nt, Human
cacuuuuuuuuuccaaaaaaaua

SEQ ID NO: 3629589 - RNA, 21 nt, Human
cagaaaaagaaaugaacauaa

SEQ ID NO: 3629590 - RNA, 18 nt, Human
cagaaaaauggagcaaag

SEQ ID NO: 3629591 - RNA, 14 nt, Human
cagaaaacaaaacu

SEQ ID NO: 3629592 - RNA, 18 nt, Human
cagaaaacaacaaaaaau

SEQ ID NO: 3629593 - RNA, 14 nt, Human
cagaaaacauuguu

SEQ ID NO: 3629594 - RNA, 18 nt, Human
cagaaaacauuguuccag

SEQ ID NO: 3629595 - RNA, 17 nt, Human
cagaaaacccuugggcc

SEQ ID NO: 3629596 - RNA, 22 nt, Human
cagaaaacccuugggccagaag

SEQ ID NO: 3629597 - RNA, 20 nt, Human
cagaaaacgguuaaaacugu

SEQ ID NO: 3629598 - RNA, 13 nt, Human
cagaaaacuagaa

SEQ ID NO: 3629599 - RNA, 20 nt, Human
cagaaaacuuuaaaaaauau

SEQ ID NO: 3629600 - RNA, 21 nt, Human
cagaaaagaaaguucaugcuu

SEQ ID NO: 3629601 - RNA, 12 nt, Human
cagaaaagcaua

SEQ ID NO: 3629602 - RNA, 13 nt, Human
cagaaaaggacag

SEQ ID NO: 3629603 - RNA, 17 nt, Human
cagaaaauauacuguaa

SEQ ID NO: 3629604 - RNA, 21 nt, Human
cagaaaauauacuguaaagaa

SEQ ID NO: 3629605 - RNA, 16 nt, Human
cagaaaauauguauua

SEQ ID NO: 3629606 - RNA, 21 nt, Human
cagaaaauauguauuaacacu

SEQ ID NO: 3629607 - RNA, 19 nt, Human
cagaaaauauuauguguuu

SEQ ID NO: 3629608 - RNA, 21 nt, Human
cagaaaauggaagacagcucu

SEQ ID NO: 3629609 - RNA, 23 nt, Human
cagaaaauggaagacagcucuua

SEQ ID NO: 3629610 - RNA, 18 nt, Human
cagaaacaaaaacacuaa

SEQ ID NO: 3629611 - RNA, 19 nt, Human
cagaaacacccacaggcau

SEQ ID NO: 3629612 - RNA, 17 nt, Human
cagaaacacugccuuuu

SEQ ID NO: 3629613 - RNA, 23 nt, Human
cagaaacagauuuggugaauuug

SEQ ID NO: 3629614 - RNA, 13 nt, Human
cagaaacaggacc

SEQ ID NO: 3629615 - RNA, 22 nt, Human
cagaaacaggugcaucugggga

SEQ ID NO: 3629616 - RNA, 13 nt, Human
cagaaaccaguua

SEQ ID NO: 3629617 - RNA, 15 nt, Human
cagaaaccaguuaug

SEQ ID NO: 3629618 - RNA, 22 nt, Human
cagaaacccucauuguguuucu

SEQ ID NO: 3629619 - RNA, 20 nt, Human
cagaaacuugugaaguggaa

SEQ ID NO: 3629620 - RNA, 16 nt, Human
cagaaagcagaggcug

SEQ ID NO: 3629621 - RNA, 20 nt, Human
cagaaagcagaggcuggccu

SEQ ID NO: 3629622 - RNA, 22 nt, Human
cagaaagcagaggcuggccuca

SEQ ID NO: 3629623 - RNA, 18 nt, Human
cagaaagcauaaaauucu

SEQ ID NO: 3629624 - RNA, 13 nt, Human
cagaaagccaaca

SEQ ID NO: 3629625 - RNA, 19 nt, Human
cagaaagccccaagcaauu

SEQ ID NO: 3629626 - RNA, 19 nt, Human
cagaaagccugggugacau

SEQ ID NO: 3629627 - RNA, 15 nt, Human
cagaaagcugccugg

SEQ ID NO: 3629628 - RNA, 17 nt, Human
cagaaaggaaaaacaaa

SEQ ID NO: 3629629 - RNA, 15 nt, Human
cagaaaggaaaaccu

SEQ ID NO: 3629630 - RNA, 20 nt, Human
cagaaaggaaaaccugaaga

SEQ ID NO: 3629631 - RNA, 18 nt, Human
cagaaaguaauuucuucu

SEQ ID NO: 3629632 - RNA, 16 nt, Human
cagaaagugccugaca

SEQ ID NO: 3629633 - RNA, 23 nt, Human
cagaaagugccugacacacuaac

SEQ ID NO: 3629634 - RNA, 15 nt, Human
cagaaagugccuuuc

SEQ ID NO: 3629635 - RNA, 18 nt, Human
cagaaagugccuuucagg

SEQ ID NO: 3629636 - RNA, 22 nt, Human
cagaaagugccuuucaggaucu

SEQ ID NO: 3629637 - RNA, 23 nt, Human
cagaaaguggugcucaguuguag

SEQ ID NO: 3629638 - RNA, 17 nt, Human
cagaaagugugcuuuau

SEQ ID NO: 3629639 - RNA, 15 nt, Human
cagaaauaauaaaaa

SEQ ID NO: 3629640 - RNA, 20 nt, Human
cagaaauacagauuuugaua

SEQ ID NO: 3629641 - RNA, 14 nt, Human
cagaaauacuacug

SEQ ID NO: 3629642 - RNA, 22 nt, Human
cagaaauacuauaacauaugua

SEQ ID NO: 3629643 - RNA, 16 nt, Human
cagaaauagacaaaaa

SEQ ID NO: 3629644 - RNA, 20 nt, Human
cagaaauagacaaaaaguau

SEQ ID NO: 3629645 - RNA, 21 nt, Human
cagaaauauaauaaaaugugu

SEQ ID NO: 3629646 - RNA, 17 nt, Human
cagaaauauauauacau

SEQ ID NO: 3629647 - RNA, 19 nt, Human
cagaaauauauauacauau

SEQ ID NO: 3629648 - RNA, 22 nt, Human
cagaaauauuugugacaaaaaa

SEQ ID NO: 3629649 - RNA, 23 nt, Human
cagaaaugacuuuuugaaaguaa

SEQ ID NO: 3629650 - RNA, 21 nt, Human
cagaaaugaggagacacaccu

SEQ ID NO: 3629651 - RNA, 14 nt, Human
cagaaaugcugccu

SEQ ID NO: 3629652 - RNA, 16 nt, Human
cagaaaugcugccugc

SEQ ID NO: 3629653 - RNA, 17 nt, Human
cagaaaugcugccugcc

SEQ ID NO: 3629654 - RNA, 19 nt, Human
cagaaaugcugccugccug

SEQ ID NO: 3629655 - RNA, 23 nt, Human
cagaaaugcugccugccugucug

SEQ ID NO: 3629656 - RNA, 16 nt, Human
cagaaaugcugcuggc

SEQ ID NO: 3629657 - RNA, 18 nt, Human
cagaaaugcugcuggcca

SEQ ID NO: 3629658 - RNA, 23 nt, Human
cagaaauguacaacuuuuuaccu

SEQ ID NO: 3629659 - RNA, 11 nt, Human
cagaaaugucu

SEQ ID NO: 3629660 - RNA, 14 nt, Human
cagaaaugucuaaa

SEQ ID NO: 3629661 - RNA, 23 nt, Human
cagaaauuagaaaccuuaauaug

SEQ ID NO: 3629662 - RNA, 14 nt, Human
cagaaauucuguuu

SEQ ID NO: 3629663 - RNA, 18 nt, Human
cagaaauucuguuuuuaa

SEQ ID NO: 3629664 - RNA, 11 nt, Human
cagaaauugga

SEQ ID NO: 3629665 - RNA, 21 nt, Human
cagaaauugguaccuugcaca

SEQ ID NO: 3629666 - RNA, 12 nt, Human
cagaaauuguau

SEQ ID NO: 3629667 - RNA, 14 nt, Human
cagaaauuguauau

SEQ ID NO: 3629668 - RNA, 16 nt, Human
cagaaauuguauauug

SEQ ID NO: 3629669 - RNA, 14 nt, Human
cagaaauuuuuauu

SEQ ID NO: 3629670 - RNA, 19 nt, Human
cagaaauuuuuauuuuucu

SEQ ID NO: 3629671 - RNA, 15 nt, Human
cagaacaacaacuau

SEQ ID NO: 3629672 - RNA, 15 nt, Human
cagaacacuaaccug

SEQ ID NO: 3629673 - RNA, 12 nt, Human
cagaacagcugu

SEQ ID NO: 3629674 - RNA, 13 nt, Human
cagaacagcuguu

SEQ ID NO: 3629675 - RNA, 12 nt, Human
cagaacagcuuc

SEQ ID NO: 3629676 - RNA, 13 nt, Human
cagaacagcuuca

SEQ ID NO: 3629677 - RNA, 19 nt, Human
cagaacagcuucagguuau

SEQ ID NO: 3629678 - RNA, 14 nt, Human
cagaacagcuucau

SEQ ID NO: 3629679 - RNA, 24 nt, Human
cagaacagguguuggugacaauug

SEQ ID NO: 3629680 - RNA, 15 nt, Human
cagaacaguaucuuu

SEQ ID NO: 3629681 - RNA, 18 nt, Human
cagaacaguaugaauuug

SEQ ID NO: 3629682 - RNA, 17 nt, Human
cagaacagugauuacca

SEQ ID NO: 3629683 - RNA, 23 nt, Human
cagaacagugauuaccagggacu

SEQ ID NO: 3629684 - RNA, 15 nt, Human
cagaacaucauuaga

SEQ ID NO: 3629685 - RNA, 17 nt, Human
cagaacaucauuagaac

SEQ ID NO: 3629686 - RNA, 20 nt, Human
cagaaccaccccggcccccu

SEQ ID NO: 3629687 - RNA, 18 nt, Human
cagaaccagaugaguaaa

SEQ ID NO: 3629688 - RNA, 16 nt, Human
cagaaccagucuuuca

SEQ ID NO: 3629689 - RNA, 15 nt, Human
cagaaccauccauag

SEQ ID NO: 3629690 - RNA, 15 nt, Human
cagaacccagggcuc

SEQ ID NO: 3629691 - RNA, 18 nt, Human
cagaacccagggcucugc

SEQ ID NO: 3629692 - RNA, 21 nt, Human
cagaacccagggcucugcccc

SEQ ID NO: 3629693 - RNA, 22 nt, Human
cagaacccagggcucugcccca

SEQ ID NO: 3629694 - RNA, 15 nt, Human
cagaacccugccaug

SEQ ID NO: 3629695 - RNA, 19 nt, Human
cagaaccggagagccagcu

SEQ ID NO: 3629696 - RNA, 12 nt, Human
cagaaccuggag

SEQ ID NO: 3629697 - RNA, 16 nt, Human
cagaaccuuguuauuu

SEQ ID NO: 3629698 - RNA, 21 nt, Human
cagaacggagccccaggccuc

SEQ ID NO: 3629699 - RNA, 15 nt, Human
cagaacguggcucug

SEQ ID NO: 3629700 - RNA, 19 nt, Human
cagaacguggcucugcugg

SEQ ID NO: 3629701 - RNA, 18 nt, Human
cagaacuaaacucauuua

SEQ ID NO: 3629702 - RNA, 20 nt, Human
cagaacuaaacucauuuaua

SEQ ID NO: 3629703 - RNA, 18 nt, Human
cagaacuaaauguucuau

SEQ ID NO: 3629704 - RNA, 20 nt, Human
cagaacucaaauggggccag

SEQ ID NO: 3629705 - RNA, 15 nt, Human
cagaacucacugggg

SEQ ID NO: 3629706 - RNA, 18 nt, Human
cagaacucggugucccca

SEQ ID NO: 3629707 - RNA, 19 nt, Human
cagaacucgguguccccac

SEQ ID NO: 3629708 - RNA, 14 nt, Human
cagaacucuguguc

SEQ ID NO: 3629709 - RNA, 20 nt, Human
cagaacucuuaaaaauguuu

SEQ ID NO: 3629710 - RNA, 14 nt, Human
cagaacucuuccuc

SEQ ID NO: 3629711 - RNA, 16 nt, Human
cagaacucuuucaaaa

SEQ ID NO: 3629712 - RNA, 21 nt, Human
cagaacugaaccggcuuuacc

SEQ ID NO: 3629713 - RNA, 19 nt, Human
cagaacugccauuauuuuc

SEQ ID NO: 3629714 - RNA, 18 nt, Human
cagaacuuagcaauuucc

SEQ ID NO: 3629715 - RNA, 13 nt, Human
cagaacuucagaa

SEQ ID NO: 3629716 - RNA, 19 nt, Human
cagaacuucagaaagacuu

SEQ ID NO: 3629717 - RNA, 18 nt, Human
cagaacuugaagccugcu

SEQ ID NO: 3629718 - RNA, 19 nt, Human
cagaacuugaagccugcuc

SEQ ID NO: 3629719 - RNA, 22 nt, Human
cagaacuugaagccugcuccuu

SEQ ID NO: 3629720 - RNA, 15 nt, Human
cagagcaggaggccc

SEQ ID NO: 3629721 - RNA, 23 nt, Human
cagagcaggaggccccuggccca

SEQ ID NO: 3629722 - RNA, 23 nt, Human
cagagcagggguccuugguguga

SEQ ID NO: 3629723 - RNA, 17 nt, Human
cagagcagugggccugg

SEQ ID NO: 3629724 - RNA, 22 nt, Human
cagagcagugggccuggccagc

SEQ ID NO: 3629725 - RNA, 22 nt, Human
cagagcauuacgugagccaggu

SEQ ID NO: 3629726 - RNA, 23 nt, Human
cagagcauuacgugagccaggua

SEQ ID NO: 3629727 - RNA, 19 nt, Human
cagagcauuccagucaggc

SEQ ID NO: 3629728 - RNA, 18 nt, Human
cagagccaaauugguaga

SEQ ID NO: 3629729 - RNA, 20 nt, Human
cagagccaaggggcuucagg

SEQ ID NO: 3629730 - RNA, 14 nt, Human
cagagccacacaug

SEQ ID NO: 3629731 - RNA, 13 nt, Human
cagagccacaguu

SEQ ID NO: 3629732 - RNA, 22 nt, Human
cagagccaccccuaaagagaua

SEQ ID NO: 3629733 - RNA, 12 nt, Human
cagagccaggag

SEQ ID NO: 3629734 - RNA, 16 nt, Human
cagagccaggagaagc

SEQ ID NO: 3629735 - RNA, 20 nt, Human
cagagccaggagaagcucag

SEQ ID NO: 3629736 - RNA, 20 nt, Human
cagagcccaccuuggcucaa

SEQ ID NO: 3629737 - RNA, 23 nt, Human
cagagcccacgcccccacuggug

SEQ ID NO: 3629738 - RNA, 18 nt, Human
cagagcccacuccaucug

SEQ ID NO: 3629739 - RNA, 14 nt, Human
cagagcccagaccc

SEQ ID NO: 3629740 - RNA, 14 nt, Human
cagagcccagcucc

SEQ ID NO: 3629741 - RNA, 13 nt, Human
cagagcccaggcu

SEQ ID NO: 3629742 - RNA, 16 nt, Human
cagagccccacacgga

SEQ ID NO: 3629743 - RNA, 13 nt, Human
cagagccccacag

SEQ ID NO: 3629744 - RNA, 20 nt, Human
cagagccccacccucagaug

SEQ ID NO: 3629745 - RNA, 18 nt, Human
cagagcccccaggaagcc

SEQ ID NO: 3629746 - RNA, 16 nt, Human
cagagccccuacagca

SEQ ID NO: 3629747 - RNA, 18 nt, Human
cagagccccuccuccagc

SEQ ID NO: 3629748 - RNA, 21 nt, Human
cagagccccuccuccagcccc

SEQ ID NO: 3629749 - RNA, 14 nt, Human
cagagcccugcucc

SEQ ID NO: 3629750 - RNA, 20 nt, Human
cagagccggcccgccucucc

SEQ ID NO: 3629751 - RNA, 21 nt, Human
cagagccguaaaaacugaagu

SEQ ID NO: 3629752 - RNA, 19 nt, Human
cagagccgugguccuuugg

SEQ ID NO: 3629753 - RNA, 23 nt, Human
cagagccucccaaggagaacaaa

SEQ ID NO: 3629754 - RNA, 20 nt, Human
cagagccuccuuucuggcuu

SEQ ID NO: 3629755 - RNA, 13 nt, Human
cagagccugcagu

SEQ ID NO: 3629756 - RNA, 11 nt, Human
cagagccuggg

SEQ ID NO: 3629757 - RNA, 15 nt, Human
cagagccuucucaga

SEQ ID NO: 3629758 - RNA, 16 nt, Human
cagagccuucucagaa

SEQ ID NO: 3629759 - RNA, 18 nt, Human
cagagccuucucagaagc

SEQ ID NO: 3629760 - RNA, 23 nt, Human
cagagccuucugaggacauucca

SEQ ID NO: 3629761 - RNA, 16 nt, Human
cagagccuuuggauga

SEQ ID NO: 3629762 - RNA, 18 nt, Human
cagagccuuuggaugacc

SEQ ID NO: 3629763 - RNA, 20 nt, Human
cagagcgagagucugucuca

SEQ ID NO: 3629764 - RNA, 21 nt, Human
cagagcgccgugaguucucag

SEQ ID NO: 3629765 - RNA, 17 nt, Human
cagagcgcgccccuagc

SEQ ID NO: 3629766 - RNA, 21 nt, Human
cagagcuaaacuccuuccugg

SEQ ID NO: 3629767 - RNA, 22 nt, Human
cagagcuaaacuccuuccuggc

SEQ ID NO: 3629768 - RNA, 20 nt, Human
cagagcuacccgcagaguuc

SEQ ID NO: 3629769 - RNA, 17 nt, Human
cagagcuacuugggcca

SEQ ID NO: 3629770 - RNA, 17 nt, Human
cagagcucuccagcucc

SEQ ID NO: 3629771 - RNA, 18 nt, Human
cagagcucucucuacaga

SEQ ID NO: 3629772 - RNA, 15 nt, Human
cagagcucuggagcc

SEQ ID NO: 3629773 - RNA, 15 nt, Human
cagagcugacacagg

SEQ ID NO: 3629774 - RNA, 21 nt, Human
cagagcugauggagaaggaag

SEQ ID NO: 3629775 - RNA, 12 nt, Human
cagagcugccag

SEQ ID NO: 3629776 - RNA, 20 nt, Human
cagagcugcccucuccuggg

SEQ ID NO: 3629777 - RNA, 10 nt, Human
cagagcuggg

SEQ ID NO: 3629778 - RNA, 13 nt, Human
cagagcugggagg

SEQ ID NO: 3629779 - RNA, 14 nt, Human
cagagcugggaggc

SEQ ID NO: 3629780 - RNA, 20 nt, Human
cagagcugggauguuucugu

SEQ ID NO: 3629781 - RNA, 13 nt, Human
cagagcuggggcu

SEQ ID NO: 3629782 - RNA, 11 nt, Human
cagagcuggug

SEQ ID NO: 3629783 - RNA, 13 nt, Human
cagagcuggugcg

SEQ ID NO: 3629784 - RNA, 15 nt, Human
cagagcuguggagga

SEQ ID NO: 3629785 - RNA, 23 nt, Human
cagagcuucccugacucauucug

SEQ ID NO: 3629786 - RNA, 20 nt, Human
cagagcuuuggucugugugu

SEQ ID NO: 3629787 - RNA, 13 nt, Human
cagagcuuuucag

SEQ ID NO: 3629788 - RNA, 15 nt, Human
cagagcuuuucagau

SEQ ID NO: 3629789 - RNA, 17 nt, Human
cagaggaacuguccaga

SEQ ID NO: 3629790 - RNA, 14 nt, Human
cagaggaagagcag

SEQ ID NO: 3629791 - RNA, 15 nt, Human
cagaggaagagcagg

SEQ ID NO: 3629792 - RNA, 16 nt, Human
cagaggaagagcaggc

SEQ ID NO: 3629793 - RNA, 16 nt, Human
cagaggaaggggccag

SEQ ID NO: 3629794 - RNA, 19 nt, Human
cagaggaauccuggcagcc

SEQ ID NO: 3629795 - RNA, 22 nt, Human
cagaggaauccuggcagcccag

SEQ ID NO: 3629796 - RNA, 18 nt, Human
cagaggaauuuauaccuc

SEQ ID NO: 3629797 - RNA, 20 nt, Human
cagaggaccagcacacuccc

SEQ ID NO: 3629798 - RNA, 14 nt, Human
cagaggaccuguau

SEQ ID NO: 3629799 - RNA, 17 nt, Human
cagaggaccuguauuua

SEQ ID NO: 3629800 - RNA, 22 nt, Human
cagaggacucccaacccuggcu

SEQ ID NO: 3629801 - RNA, 20 nt, Human
cagaggagaacuugcugccu

SEQ ID NO: 3629802 - RNA, 15 nt, Human
cagaggagagaggac

SEQ ID NO: 3629803 - RNA, 19 nt, Human
cagaggagagaggaccccc

SEQ ID NO: 3629804 - RNA, 22 nt, Human
cagaggagagucccagagcagg

SEQ ID NO: 3629805 - RNA, 19 nt, Human
cagaggagccaccaguucu

SEQ ID NO: 3629806 - RNA, 14 nt, Human
cagaggagccuuuu

SEQ ID NO: 3629807 - RNA, 22 nt, Human
cagaggagccuuuuuaaaacac

SEQ ID NO: 3629808 - RNA, 20 nt, Human
cagaggagcugggagccggg

SEQ ID NO: 3629809 - RNA, 21 nt, Human
cagaggagcugggagccgggc

SEQ ID NO: 3629810 - RNA, 18 nt, Human
cagaggaggcgaggaggc

SEQ ID NO: 3629811 - RNA, 14 nt, Human
cagaggaggggccg

SEQ ID NO: 3629812 - RNA, 19 nt, Human
cagaggaugagcucuaccc

SEQ ID NO: 3629813 - RNA, 17 nt, Human
cagaggauggccagugu

SEQ ID NO: 3629814 - RNA, 22 nt, Human
cagaggauggccagugucuguc

SEQ ID NO: 3629815 - RNA, 13 nt, Human
cagaggcagaacc

SEQ ID NO: 3629816 - RNA, 15 nt, Human
cagaggcagccccau

SEQ ID NO: 3629817 - RNA, 22 nt, Human
cagaggcagccccauucugccu

SEQ ID NO: 3629818 - RNA, 14 nt, Human
cagaggccaaggag

SEQ ID NO: 3629819 - RNA, 20 nt, Human
cagaggccaugggccuccug

SEQ ID NO: 3629820 - RNA, 20 nt, Human
cagaggcccacauuggaaga

SEQ ID NO: 3629821 - RNA, 14 nt, Human
cagaggcccaggcu

SEQ ID NO: 3629822 - RNA, 15 nt, Human
cagaggcccaggcug

SEQ ID NO: 3629823 - RNA, 13 nt, Human
cagaggccccagc

SEQ ID NO: 3629824 - RNA, 23 nt, Human
cagaggcccccagcccagggcuc

SEQ ID NO: 3629825 - RNA, 21 nt, Human
cagaggcccucaagucuuucu

SEQ ID NO: 3629826 - RNA, 19 nt, Human
cagaggcccucgcugccag

SEQ ID NO: 3629827 - RNA, 20 nt, Human
cagaggccuagucagccaca

SEQ ID NO: 3629828 - RNA, 23 nt, Human
cagaggccuagucagccacaugg

SEQ ID NO: 3629829 - RNA, 13 nt, Human
cagaggccuccug

SEQ ID NO: 3629830 - RNA, 13 nt, Human
cagaggccugccc

SEQ ID NO: 3629831 - RNA, 14 nt, Human
cagaggccugggcu

SEQ ID NO: 3629832 - RNA, 19 nt, Human
cagaggccugggcugggaa

SEQ ID NO: 3629833 - RNA, 17 nt, Human
cagaggcgcacugugac

SEQ ID NO: 3629834 - RNA, 18 nt, Human
cagaggcgcacugugacc

SEQ ID NO: 3629835 - RNA, 17 nt, Human
cagaggcuaauucugca

SEQ ID NO: 3629836 - RNA, 21 nt, Human
cagaggcuggaggcagggccu

SEQ ID NO: 3629837 - RNA, 15 nt, Human
cagaggcuggccuca

SEQ ID NO: 3629838 - RNA, 16 nt, Human
cagaggcuucuucaga

SEQ ID NO: 3629839 - RNA, 18 nt, Human
cagagggagugacagagg

SEQ ID NO: 3629840 - RNA, 19 nt, Human
cagagggagugacagaggc

SEQ ID NO: 3629841 - RNA, 20 nt, Human
cagagggagugacagaggca

SEQ ID NO: 3629842 - RNA, 22 nt, Human
cagagggagugacagaggcagc

SEQ ID NO: 3629843 - RNA, 23 nt, Human
cagagggccauugaacucugaga

SEQ ID NO: 3629844 - RNA, 13 nt, Human
cagagggcccagg

SEQ ID NO: 3629845 - RNA, 16 nt, Human
cagagggcccaggcag

SEQ ID NO: 3629846 - RNA, 18 nt, Human
cagagggcccaggcaggc

SEQ ID NO: 3629847 - RNA, 22 nt, Human
cagagggcccaggcaggccacc

SEQ ID NO: 3629848 - RNA, 15 nt, Human
cagagggccugcaag

SEQ ID NO: 3629849 - RNA, 18 nt, Human
cagagggcuggaggccca

SEQ ID NO: 3629850 - RNA, 23 nt, Human
cagaggggaaaccaguguagccu

SEQ ID NO: 3629851 - RNA, 14 nt, Human
cagaggggacucug

SEQ ID NO: 3629852 - RNA, 16 nt, Human
cagaggggacucuggg

SEQ ID NO: 3629853 - RNA, 14 nt, Human
cagaggggccugcc

SEQ ID NO: 3629854 - RNA, 18 nt, Human
cagaggggcuuucuggag

SEQ ID NO: 3629855 - RNA, 21 nt, Human
cagagggggacugcugcugcc

SEQ ID NO: 3629856 - RNA, 13 nt, Human
cagaggggguggc

SEQ ID NO: 3629857 - RNA, 16 nt, Human
cagaggggguggccuc

SEQ ID NO: 3629858 - RNA, 18 nt, Human
cagaggggguggccuccc

SEQ ID NO: 3629859 - RNA, 22 nt, Human
cagaggggguggccucccaacu

SEQ ID NO: 3629860 - RNA, 20 nt, Human
cagagggucacaguguuuac

SEQ ID NO: 3629861 - RNA, 17 nt, Human
cagagguaacagaacag

SEQ ID NO: 3629862 - RNA, 18 nt, Human
cagagguaacagaacagc

SEQ ID NO: 3629863 - RNA, 20 nt, Human
cagagguaacagaacagcuu

SEQ ID NO: 3629864 - RNA, 18 nt, Human
cagcuuugccuuccacgc

SEQ ID NO: 3629865 - RNA, 11 nt, Human
cagcuuugcua

SEQ ID NO: 3629866 - RNA, 12 nt, Human
cagcuuugcugc

SEQ ID NO: 3629867 - RNA, 18 nt, Human
cagcuuugugacuguaua

SEQ ID NO: 3629868 - RNA, 18 nt, Human
cagcuuuuaaaagauuuu

SEQ ID NO: 3629869 - RNA, 21 nt, Human
cagcuuuuaaccaucugauau

SEQ ID NO: 3629870 - RNA, 20 nt, Human
cagcuuuucauugcugugac

SEQ ID NO: 3629871 - RNA, 20 nt, Human
cagcuuuucccaaaagccca

SEQ ID NO: 3629872 - RNA, 16 nt, Human
cagcuuuuccucccuu

SEQ ID NO: 3629873 - RNA, 15 nt, Human
cagcuuuugcuucau

SEQ ID NO: 3629874 - RNA, 18 nt, Human
caggaaaaaaacuuuuau

SEQ ID NO: 3629875 - RNA, 16 nt, Human
caggaaaaaggacagg

SEQ ID NO: 3629876 - RNA, 19 nt, Human
caggaaaacacccagggaa

SEQ ID NO: 3629877 - RNA, 23 nt, Human
caggaaaacgggaccggccaggc

SEQ ID NO: 3629878 - RNA, 16 nt, Human
caggaaaaggccuggg

SEQ ID NO: 3629879 - RNA, 21 nt, Human
caggaaaaggccuggggugac

SEQ ID NO: 3629880 - RNA, 22 nt, Human
caggaaaagguagcuuaccuga

SEQ ID NO: 3629881 - RNA, 23 nt, Human
caggaaaauuguuugaacccagg

SEQ ID NO: 3629882 - RNA, 13 nt, Human
caggaaaccgagu

SEQ ID NO: 3629883 - RNA, 19 nt, Human
caggaaacuccacaucugc

SEQ ID NO: 3629884 - RNA, 19 nt, Human
caggaaagcucagcuacug

SEQ ID NO: 3629885 - RNA, 18 nt, Human
caggaaaggcccagccac

SEQ ID NO: 3629886 - RNA, 17 nt, Human
caggaaaggcuccagga

SEQ ID NO: 3629887 - RNA, 20 nt, Human
caggaaaggcuccaggagca

SEQ ID NO: 3629888 - RNA, 22 nt, Human
caggaaaggcuccaggagcagc

SEQ ID NO: 3629889 - RNA, 23 nt, Human
caggaaaguggcaccugucugcu

SEQ ID NO: 3629890 - RNA, 13 nt, Human
caggaaauaaagu

SEQ ID NO: 3629891 - RNA, 17 nt, Human
caggaaauauauaugug

SEQ ID NO: 3629892 - RNA, 23 nt, Human
caggaaauauauaugugugugua

SEQ ID NO: 3629893 - RNA, 23 nt, Human
caggaaaucaaauaugcaaagca

SEQ ID NO: 3629894 - RNA, 16 nt, Human
caggaaaugcugaccc

SEQ ID NO: 3629895 - RNA, 14 nt, Human
caggaacaaacagg

SEQ ID NO: 3629896 - RNA, 15 nt, Human
caggaacaaacaggg

SEQ ID NO: 3629897 - RNA, 22 nt, Human
caggaacaaacagggcugccuu

SEQ ID NO: 3629898 - RNA, 22 nt, Human
caggaacaacauuuacaacuca

SEQ ID NO: 3629899 - RNA, 14 nt, Human
caggaacagcuaug

SEQ ID NO: 3629900 - RNA, 20 nt, Human
caggaacagcuaugggagcc

SEQ ID NO: 3629901 - RNA, 19 nt, Human
caggaaccacaccacaucu

SEQ ID NO: 3629902 - RNA, 15 nt, Human
caggaaccuggacca

SEQ ID NO: 3629903 - RNA, 19 nt, Human
caggaaccuggaccaaagc

SEQ ID NO: 3629904 - RNA, 21 nt, Human
caggaaccuguccuaaggaac

SEQ ID NO: 3629905 - RNA, 15 nt, Human
caggaacguuuagcu

SEQ ID NO: 3629906 - RNA, 17 nt, Human
caggaacuauaaaaaca

SEQ ID NO: 3629907 - RNA, 22 nt, Human
caggaagaaaggagucugcaca

SEQ ID NO: 3629908 - RNA, 22 nt, Human
caggaagaaaucacagaaucau

SEQ ID NO: 3629909 - RNA, 19 nt, Human
caggaagacccaacacaug

SEQ ID NO: 3629910 - RNA, 14 nt, Human
caggaagagaagga

SEQ ID NO: 3629911 - RNA, 18 nt, Human
caggaagaucccccagaa

SEQ ID NO: 3629912 - RNA, 19 nt, Human
caggaagcauucagagagc

SEQ ID NO: 3629913 - RNA, 22 nt, Human
caggaagccagcaggcucucag

SEQ ID NO: 3629914 - RNA, 18 nt, Human
caggaagcccaauugcug

SEQ ID NO: 3629915 - RNA, 16 nt, Human
caggaagcccaggagc

SEQ ID NO: 3629916 - RNA, 15 nt, Human
caggaagccguccug

SEQ ID NO: 3629917 - RNA, 18 nt, Human
caggaagccguccuggcg

SEQ ID NO: 3629918 - RNA, 21 nt, Human
caggaagccgugcccugcccc

SEQ ID NO: 3629919 - RNA, 14 nt, Human
caggaagcucaggg

SEQ ID NO: 3629920 - RNA, 15 nt, Human
caggaagcucagggc

SEQ ID NO: 3629921 - RNA, 17 nt, Human
caggaagcucagggccu

SEQ ID NO: 3629922 - RNA, 18 nt, Human
caggaagcucagggccug

SEQ ID NO: 3629923 - RNA, 19 nt, Human
caggaagcucagggccugg

SEQ ID NO: 3629924 - RNA, 17 nt, Human
caggaagcugcuccgug

SEQ ID NO: 3629925 - RNA, 18 nt, Human
caggaagcugcuccgugc

SEQ ID NO: 3629926 - RNA, 22 nt, Human
caggaagcugugagagcaguuu

SEQ ID NO: 3629927 - RNA, 12 nt, Human
caggaaggagag

SEQ ID NO: 3629928 - RNA, 14 nt, Human
caggaaggagagcc

SEQ ID NO: 3629929 - RNA, 16 nt, Human
caggaaggagagccug

SEQ ID NO: 3629930 - RNA, 12 nt, Human
caggaaggagcu

SEQ ID NO: 3629931 - RNA, 14 nt, Human
caggaaggccuggg

SEQ ID NO: 3629932 - RNA, 18 nt, Human
caggaaggccugggugga

SEQ ID NO: 3629933 - RNA, 13 nt, Human
caggaaggcuugu

SEQ ID NO: 3629934 - RNA, 23 nt, Human
caggaaggggcuggacuggcugu

SEQ ID NO: 3629935 - RNA, 14 nt, Human
caggaaguacugga

SEQ ID NO: 3629936 - RNA, 16 nt, Human
caggaaguagcacagg

SEQ ID NO: 3629937 - RNA, 21 nt, Human
caggaaguagcacaggcugag

SEQ ID NO: 3629938 - RNA, 21 nt, Human
caggaagucccuugccauccu

SEQ ID NO: 3629939 - RNA, 10 nt, Human
caggaaguga

SEQ ID NO: 3629940 - RNA, 18 nt, Human
caggaaucaaaaauugaa

SEQ ID NO: 3629941 - RNA, 17 nt, Human
caggaaucaagagcugc

SEQ ID NO: 3629942 - RNA, 21 nt, Human
caggaaucaguuuaaaagcac

SEQ ID NO: 3629943 - RNA, 14 nt, Human
caggaaucuuaagg

SEQ ID NO: 3629944 - RNA, 16 nt, Human
caggaauguguggccu

SEQ ID NO: 3629945 - RNA, 19 nt, Human
caggaauguguggccugca

SEQ ID NO: 3629946 - RNA, 21 nt, Human
caggaauguguggccugcaca

SEQ ID NO: 3629947 - RNA, 16 nt, Human
caggaauuucccagga

SEQ ID NO: 3629948 - RNA, 19 nt, Human
caggaauuucccaggaccc

SEQ ID NO: 3629949 - RNA, 20 nt, Human
caggaauuucccaggacccu

SEQ ID NO: 3629950 - RNA, 21 nt, Human
caggaauuucccaggacccug

SEQ ID NO: 3629951 - RNA, 20 nt, Human
caggaauuugaagcugcagu

SEQ ID NO: 3629952 - RNA, 22 nt, Human
caggaauuugggacccugcuuu

SEQ ID NO: 3629953 - RNA, 15 nt, Human
caggacaacgaggaa

SEQ ID NO: 3629954 - RNA, 19 nt, Human
caggacaacgaggaagccc

SEQ ID NO: 3629955 - RNA, 14 nt, Human
caggacacaggccu

SEQ ID NO: 3629956 - RNA, 15 nt, Human
caggacacaggccug

SEQ ID NO: 3629957 - RNA, 17 nt, Human
caggacaccacacccag

SEQ ID NO: 3629958 - RNA, 20 nt, Human
caggacaccacacccagccu

SEQ ID NO: 3629959 - RNA, 15 nt, Human
caggacaccgggcag

SEQ ID NO: 3629960 - RNA, 16 nt, Human
caggacagagaaauug

SEQ ID NO: 3629961 - RNA, 14 nt, Human
caggacaggaaaaa

SEQ ID NO: 3629962 - RNA, 23 nt, Human
caggacaggcugcggccccuccc

SEQ ID NO: 3629963 - RNA, 17 nt, Human
caggacagggguuccuu

SEQ ID NO: 3629964 - RNA, 21 nt, Human
caggacagggguuccuucugg

SEQ ID NO: 3629965 - RNA, 22 nt, Human
caggacagugcuucagccugag

SEQ ID NO: 3629966 - RNA, 18 nt, Human
caggacaugcgguagcca

SEQ ID NO: 3629967 - RNA, 17 nt, Human
caggacaugcugaagcc

SEQ ID NO: 3629968 - RNA, 18 nt, Human
caggaccacaggcucagg

SEQ ID NO: 3629969 - RNA, 13 nt, Human
caggaccagaagc

SEQ ID NO: 3629970 - RNA, 13 nt, Human
caggaccagccca

SEQ ID NO: 3629971 - RNA, 14 nt, Human
caggaccagcccac

SEQ ID NO: 3629972 - RNA, 16 nt, Human
caggaccagcccacgc

SEQ ID NO: 3629973 - RNA, 12 nt, Human
caggaccagcuc

SEQ ID NO: 3629974 - RNA, 16 nt, Human
caggaccagcucagga

SEQ ID NO: 3629975 - RNA, 16 nt, Human
caggaccagcuggggc

SEQ ID NO: 3629976 - RNA, 14 nt, Human
caggaccaggacua

SEQ ID NO: 3629977 - RNA, 23 nt, Human
caggaccaggguuggcaccuucc

SEQ ID NO: 3629978 - RNA, 22 nt, Human
caggaccaugggaccaggucuu

SEQ ID NO: 3629979 - RNA, 15 nt, Human
caggacccagaggaa

SEQ ID NO: 3629980 - RNA, 16 nt, Human
caggacccagaggaag

SEQ ID NO: 3629981 - RNA, 13 nt, Human
caggaccccagcu

SEQ ID NO: 3629982 - RNA, 16 nt, Human
caggaccccagcucug

SEQ ID NO: 3629983 - RNA, 17 nt, Human
caggaccccagcucugc

SEQ ID NO: 3629984 - RNA, 18 nt, Human
caggaccccagcucugcg

SEQ ID NO: 3629985 - RNA, 17 nt, Human
caggacccccuuccccu

SEQ ID NO: 3629986 - RNA, 12 nt, Human
caggaccccuga

SEQ ID NO: 3629987 - RNA, 14 nt, Human
caggaccccugagu

SEQ ID NO: 3629988 - RNA, 15 nt, Human
caggacccucgcugg

SEQ ID NO: 3629989 - RNA, 14 nt, Human
caggacccugaagg

SEQ ID NO: 3629990 - RNA, 16 nt, Human
caggacccugaagggg

SEQ ID NO: 3629991 - RNA, 14 nt, Human
caggacccugccag

SEQ ID NO: 3629992 - RNA, 18 nt, Human
caggacccugccaggcac

SEQ ID NO: 3629993 - RNA, 20 nt, Human
caggacccugccaggcacag

SEQ ID NO: 3629994 - RNA, 21 nt, Human
caggacccugccaggcacagg

SEQ ID NO: 3629995 - RNA, 22 nt, Human
caggacccugccaggcacaggc

SEQ ID NO: 3629996 - RNA, 14 nt, Human
caggacccuggacc

SEQ ID NO: 3629997 - RNA, 15 nt, Human
caggacccuggaccu

SEQ ID NO: 3629998 - RNA, 23 nt, Human
caggaccuaggauaucuucucca

SEQ ID NO: 3629999 - RNA, 20 nt, Human
caggaccucagaguccaggc

SEQ ID NO: 3630000 - RNA, 21 nt, Human
caggaccucagaguccaggcc

SEQ ID NO: 3630001 - RNA, 13 nt, Human
caggaccucaggu

SEQ ID NO: 3630002 - RNA, 23 nt, Human
caggaccuccaagccacugagca

SEQ ID NO: 3630003 - RNA, 21 nt, Human
caggaccucugaaacccugga

SEQ ID NO: 3630004 - RNA, 13 nt, Human
caggaccugccug

SEQ ID NO: 3630005 - RNA, 19 nt, Human
caggaccugccuguagccc

SEQ ID NO: 3630006 - RNA, 21 nt, Human
caggaccuucgggcugugccc

SEQ ID NO: 3630007 - RNA, 12 nt, Human
caggacgccacu

SEQ ID NO: 3630008 - RNA, 16 nt, Human
caggcagucgggggcu

SEQ ID NO: 3630009 - RNA, 21 nt, Human
caggcagucgggggcuggccu

SEQ ID NO: 3630010 - RNA, 24 nt, Human
caggcagucgggggcuggccuagg

SEQ ID NO: 3630011 - RNA, 20 nt, Human
caggcagugaugcuggaugc

SEQ ID NO: 3630012 - RNA, 22 nt, Human
caggcagugaugcuggaugcuc

SEQ ID NO: 3630013 - RNA, 20 nt, Human
caggcauaaaauagaguaaa

SEQ ID NO: 3630014 - RNA, 21 nt, Human
caggcauagaggcuucuccgc

SEQ ID NO: 3630015 - RNA, 23 nt, Human
caggcauagaggcuucuccgcca

SEQ ID NO: 3630016 - RNA, 15 nt, Human
caggcauaggccugg

SEQ ID NO: 3630017 - RNA, 12 nt, Human
caggcauccucc

SEQ ID NO: 3630018 - RNA, 20 nt, Human
caggcaucggggagccggga

SEQ ID NO: 3630019 - RNA, 21 nt, Human
caggcaucggggagccgggag

SEQ ID NO: 3630020 - RNA, 22 nt, Human
caggcaugaggaaucugggagg

SEQ ID NO: 3630021 - RNA, 17 nt, Human
caggcaugcaugugcuu

SEQ ID NO: 3630022 - RNA, 16 nt, Human
caggcauggcccuggg

SEQ ID NO: 3630023 - RNA, 18 nt, Human
caggcauggcccugggcg

SEQ ID NO: 3630024 - RNA, 14 nt, Human
caggcauggggggu

SEQ ID NO: 3630025 - RNA, 23 nt, Human
caggcaugggugcaaggaaaauu

SEQ ID NO: 3630026 - RNA, 13 nt, Human
caggcaugugcca

SEQ ID NO: 3630027 - RNA, 13 nt, Human
caggcauucccca

SEQ ID NO: 3630028 - RNA, 17 nt, Human
caggcauuccccaggag

SEQ ID NO: 3630029 - RNA, 22 nt, Human
caggcauuccccaggaggccag

SEQ ID NO: 3630030 - RNA, 17 nt, Human
caggcauuuagcccuca

SEQ ID NO: 3630031 - RNA, 19 nt, Human
caggcauuuccuggguggc

SEQ ID NO: 3630032 - RNA, 22 nt, Human
caggccaaagagucuccaguuu

SEQ ID NO: 3630033 - RNA, 19 nt, Human
caggccaaaggggaccugg

SEQ ID NO: 3630034 - RNA, 21 nt, Human
caggccaaaggggaccuggaa

SEQ ID NO: 3630035 - RNA, 13 nt, Human
caggccaacccca

SEQ ID NO: 3630036 - RNA, 19 nt, Human
caggccaaggccuucuccu

SEQ ID NO: 3630037 - RNA, 18 nt, Human
caggccaaguuaaaggcu

SEQ ID NO: 3630038 - RNA, 16 nt, Human
caggccacacuucaaa

SEQ ID NO: 3630039 - RNA, 21 nt, Human
caggccacacuucaaacuacu

SEQ ID NO: 3630040 - RNA, 13 nt, Human
caggccaccagga

SEQ ID NO: 3630041 - RNA, 16 nt, Human
caggccaccaggaugg

SEQ ID NO: 3630042 - RNA, 16 nt, Human
caggccacccugugca

SEQ ID NO: 3630043 - RNA, 16 nt, Human
caggccaccuccagaa

SEQ ID NO: 3630044 - RNA, 19 nt, Human
caggccaccuccccagcau

SEQ ID NO: 3630045 - RNA, 20 nt, Human
caggccaccuccccagcauu

SEQ ID NO: 3630046 - RNA, 13 nt, Human
caggccaccugcc

SEQ ID NO: 3630047 - RNA, 15 nt, Human
caggccaccugcccc

SEQ ID NO: 3630048 - RNA, 15 nt, Human
caggccacuugauga

SEQ ID NO: 3630049 - RNA, 15 nt, Human
caggccagagggagu

SEQ ID NO: 3630050 - RNA, 16 nt, Human
caggccagagggagug

SEQ ID NO: 3630051 - RNA, 23 nt, Human
caggccagagggagugacagagg

SEQ ID NO: 3630052 - RNA, 12 nt, Human
caggccagccuc

SEQ ID NO: 3630053 - RNA, 19 nt, Human
caggccagccuccgagagg

SEQ ID NO: 3630054 - RNA, 15 nt, Human
caggccagcugcuug

SEQ ID NO: 3630055 - RNA, 23 nt, Human
caggccagcugcuugggcuucau

SEQ ID NO: 3630056 - RNA, 14 nt, Human
caggccaggacucu

SEQ ID NO: 3630057 - RNA, 18 nt, Human
caggccaggcccucugcc

SEQ ID NO: 3630058 - RNA, 22 nt, Human
caggccaggcccucugcccacu

SEQ ID NO: 3630059 - RNA, 21 nt, Human
caggccaggcuccuuccuguc

SEQ ID NO: 3630060 - RNA, 21 nt, Human
caggccaguaagggaaauaga

SEQ ID NO: 3630061 - RNA, 13 nt, Human
caggccaucuucc

SEQ ID NO: 3630062 - RNA, 15 nt, Human
caggccauggaggca

SEQ ID NO: 3630063 - RNA, 18 nt, Human
caggccauggaggcagaa

SEQ ID NO: 3630064 - RNA, 16 nt, Human
caggccauucugccgc

SEQ ID NO: 3630065 - RNA, 15 nt, Human
caggccauuuuuggu

SEQ ID NO: 3630066 - RNA, 15 nt, Human
caggcccaacuguga

SEQ ID NO: 3630067 - RNA, 18 nt, Human
caggcccaagagaugaag

SEQ ID NO: 3630068 - RNA, 15 nt, Human
caggcccacccugcu

SEQ ID NO: 3630069 - RNA, 15 nt, Human
caggcccacugugcc

SEQ ID NO: 3630070 - RNA, 17 nt, Human
caggcccacugugccuc

SEQ ID NO: 3630071 - RNA, 11 nt, Human
caggcccagca

SEQ ID NO: 3630072 - RNA, 19 nt, Human
caggcccagcauugcuggu

SEQ ID NO: 3630073 - RNA, 21 nt, Human
caggcccagcauugcugguuc

SEQ ID NO: 3630074 - RNA, 22 nt, Human
caggcccaugggaggcuggagu

SEQ ID NO: 3630075 - RNA, 17 nt, Human
caggccccaaaaccaca

SEQ ID NO: 3630076 - RNA, 19 nt, Human
caggccccaaaaccacagc

SEQ ID NO: 3630077 - RNA, 22 nt, Human
caggccccaaaaccacagcccu

SEQ ID NO: 3630078 - RNA, 13 nt, Human
caggccccagcaa

SEQ ID NO: 3630079 - RNA, 16 nt, Human
caggccccaugaccuc

SEQ ID NO: 3630080 - RNA, 22 nt, Human
caggccccaugaccuccagcuu

SEQ ID NO: 3630081 - RNA, 19 nt, Human
caggcccccaccacacauc

SEQ ID NO: 3630082 - RNA, 21 nt, Human
caggcccccaccacacauccc

SEQ ID NO: 3630083 - RNA, 14 nt, Human
caggcccccaggug

SEQ ID NO: 3630084 - RNA, 16 nt, Human
caggcccccgccuugg

SEQ ID NO: 3630085 - RNA, 21 nt, Human
caggcccccgccuuggccugu

SEQ ID NO: 3630086 - RNA, 18 nt, Human
caggccccgcuuguccag

SEQ ID NO: 3630087 - RNA, 23 nt, Human
caggccccucccucuccagcagg

SEQ ID NO: 3630088 - RNA, 13 nt, Human
caggccccugcca

SEQ ID NO: 3630089 - RNA, 19 nt, Human
caggccccugccacccugg

SEQ ID NO: 3630090 - RNA, 20 nt, Human
caggccccugccacccuggg

SEQ ID NO: 3630091 - RNA, 20 nt, Human
caggccccuggaggcugccu

SEQ ID NO: 3630092 - RNA, 18 nt, Human
caggcccgaaagaggcac

SEQ ID NO: 3630093 - RNA, 16 nt, Human
caggcccggcagggcg

SEQ ID NO: 3630094 - RNA, 18 nt, Human
caggcccggcgcgguggc

SEQ ID NO: 3630095 - RNA, 19 nt, Human
caggcccggcgcgguggcu

SEQ ID NO: 3630096 - RNA, 16 nt, Human
caggcccggcuccagg

SEQ ID NO: 3630097 - RNA, 17 nt, Human
caggcccggcuccaggc

SEQ ID NO: 3630098 - RNA, 20 nt, Human
caggcccggcuccaggcucc

SEQ ID NO: 3630099 - RNA, 22 nt, Human
caggcccggcuccaggcuccuu

SEQ ID NO: 3630100 - RNA, 14 nt, Human
caggcccggggcug

SEQ ID NO: 3630101 - RNA, 16 nt, Human
caggcccgucugucca

SEQ ID NO: 3630102 - RNA, 19 nt, Human
caggcccgucuguccaucu

SEQ ID NO: 3630103 - RNA, 20 nt, Human
caggcccgucuguccaucug

SEQ ID NO: 3630104 - RNA, 23 nt, Human
caggcccucccuguuccccagag

SEQ ID NO: 3630105 - RNA, 20 nt, Human
caggcccuccucccucccag

SEQ ID NO: 3630106 - RNA, 23 nt, Human
caggcccuccucccucccagcuc

SEQ ID NO: 3630107 - RNA, 14 nt, Human
caggcccucugccc

SEQ ID NO: 3630108 - RNA, 16 nt, Human
caggcccucugcccac

SEQ ID NO: 3630109 - RNA, 20 nt, Human
caggcccucugcccacuccc

SEQ ID NO: 3630110 - RNA, 21 nt, Human
caggcccucugcccacucccu

SEQ ID NO: 3630111 - RNA, 22 nt, Human
caggcccucugcccacucccug

SEQ ID NO: 3630112 - RNA, 13 nt, Human
caggcccugcacu

SEQ ID NO: 3630113 - RNA, 17 nt, Human
caggcccugcacugucc

SEQ ID NO: 3630114 - RNA, 18 nt, Human
caggcccugcacuguccu

SEQ ID NO: 3630115 - RNA, 23 nt, Human
caggcccugcacuguccugcucc

SEQ ID NO: 3630116 - RNA, 12 nt, Human
caggcccugcag

SEQ ID NO: 3630117 - RNA, 13 nt, Human
caggcccugcagu

SEQ ID NO: 3630118 - RNA, 15 nt, Human
caggcccugcagugu

SEQ ID NO: 3630119 - RNA, 20 nt, Human
caggcccugcuccugcagca

SEQ ID NO: 3630120 - RNA, 14 nt, Human
caggcccuggccuc

SEQ ID NO: 3630121 - RNA, 18 nt, Human
caggcccuggccuccccu

SEQ ID NO: 3630122 - RNA, 15 nt, Human
caggcccuuccucuc

SEQ ID NO: 3630123 - RNA, 16 nt, Human
caggcccuuccucucc

SEQ ID NO: 3630124 - RNA, 20 nt, Human
caggcccuugucggccccac

SEQ ID NO: 3630125 - RNA, 17 nt, Human
caggcccuuuccucagg

SEQ ID NO: 3630126 - RNA, 18 nt, Human
caggccgagaagccagug

SEQ ID NO: 3630127 - RNA, 18 nt, Human
caggccgcagcucuugcc

SEQ ID NO: 3630128 - RNA, 14 nt, Human
caggccgccccagc

SEQ ID NO: 3630129 - RNA, 18 nt, Human
caggccgccccagccucu

SEQ ID NO: 3630130 - RNA, 20 nt, Human
caggccggcagccccagccu

SEQ ID NO: 3630131 - RNA, 15 nt, Human
caggccggccagccu

SEQ ID NO: 3630132 - RNA, 21 nt, Human
caggccggccagccucacccu

SEQ ID NO: 3630133 - RNA, 19 nt, Human
caggccggcgagcccugug

SEQ ID NO: 3630134 - RNA, 17 nt, Human
caggccgggcagagcac

SEQ ID NO: 3630135 - RNA, 16 nt, Human
caggccgggccuguac

SEQ ID NO: 3630136 - RNA, 18 nt, Human
caggccgggccuguacag

SEQ ID NO: 3630137 - RNA, 21 nt, Human
caggccgggccuguacagucu

SEQ ID NO: 3630138 - RNA, 19 nt, Human
caggccggugugggcugug

SEQ ID NO: 3630139 - RNA, 17 nt, Human
caggccgugacgucugg

SEQ ID NO: 3630140 - RNA, 19 nt, Human
caggccguggcugcccaca

SEQ ID NO: 3630141 - RNA, 19 nt, Human
caggccuaaucucauaccu

SEQ ID NO: 3630142 - RNA, 18 nt, Human
caggccuacuccugucuu

SEQ ID NO: 3630143 - RNA, 22 nt, Human
caggccuauguugauccaucca

SEQ ID NO: 3630144 - RNA, 13 nt, Human
caggccucaccuc

SEQ ID NO: 3630145 - RNA, 13 nt, Human
caggccuccagcu

SEQ ID NO: 3630146 - RNA, 19 nt, Human
caggccuccagcucagcag

SEQ ID NO: 3630147 - RNA, 15 nt, Human
caggccucccucucu

SEQ ID NO: 3630148 - RNA, 23 nt, Human
caggccucccucucucuucugcu

SEQ ID NO: 3630149 - RNA, 13 nt, Human
caggccucccugc

SEQ ID NO: 3630150 - RNA, 17 nt, Human
caggccucccugccagu

SEQ ID NO: 3630151 - RNA, 14 nt, Human
cagggcccugcaga

SEQ ID NO: 3630152 - RNA, 15 nt, Human
cagggcccugcagag

SEQ ID NO: 3630153 - RNA, 22 nt, Human
cagggccgaggaggugccugga

SEQ ID NO: 3630154 - RNA, 23 nt, Human
cagggccgcccgggcccagagga

SEQ ID NO: 3630155 - RNA, 24 nt, Human
cagggccggggaacuggccaagcu

SEQ ID NO: 3630156 - RNA, 20 nt, Human
cagggccuagcugcuacaaa

SEQ ID NO: 3630157 - RNA, 23 nt, Human
cagggccucccgcaucaagguca

SEQ ID NO: 3630158 - RNA, 16 nt, Human
cagggccugagccugg

SEQ ID NO: 3630159 - RNA, 18 nt, Human
cagggccuggaagacaga

SEQ ID NO: 3630160 - RNA, 19 nt, Human
cagggccuggaagacagag

SEQ ID NO: 3630161 - RNA, 16 nt, Human
cagggccuggcccaug

SEQ ID NO: 3630162 - RNA, 18 nt, Human
cagggccuggcccaugua

SEQ ID NO: 3630163 - RNA, 15 nt, Human
cagggccuggcucag

SEQ ID NO: 3630164 - RNA, 16 nt, Human
cagggccuggcucagg

SEQ ID NO: 3630165 - RNA, 18 nt, Human
cagggccuggggccugag

SEQ ID NO: 3630166 - RNA, 11 nt, Human
cagggccuggu

SEQ ID NO: 3630167 - RNA, 13 nt, Human
cagggccugguug

SEQ ID NO: 3630168 - RNA, 13 nt, Human
cagggccuugccc

SEQ ID NO: 3630169 - RNA, 14 nt, Human
cagggccuugccca

SEQ ID NO: 3630170 - RNA, 24 nt, Human
cagggccuugcccagagaugccuc

SEQ ID NO: 3630171 - RNA, 11 nt, Human
cagggccuuuu

SEQ ID NO: 3630172 - RNA, 20 nt, Human
cagggccuuuucuggcaccg

SEQ ID NO: 3630173 - RNA, 19 nt, Human
cagggcgggcagagggcug

SEQ ID NO: 3630174 - RNA, 20 nt, Human
cagggcgggcagagggcugg

SEQ ID NO: 3630175 - RNA, 17 nt, Human
cagggcuaagagcuagc

SEQ ID NO: 3630176 - RNA, 15 nt, Human
cagggcuacccuccc

SEQ ID NO: 3630177 - RNA, 24 nt, Human
cagggcuacccugagcugaggcag

SEQ ID NO: 3630178 - RNA, 16 nt, Human
cagggcuccagccccu

SEQ ID NO: 3630179 - RNA, 14 nt, Human
cagggcucccaggg

SEQ ID NO: 3630180 - RNA, 15 nt, Human
cagggcuccucccag

SEQ ID NO: 3630181 - RNA, 17 nt, Human
cagggcuccucccagcu

SEQ ID NO: 3630182 - RNA, 20 nt, Human
cagggcuccucccagcuugu

SEQ ID NO: 3630183 - RNA, 22 nt, Human
cagggcuccugccuucuguccu

SEQ ID NO: 3630184 - RNA, 14 nt, Human
cagggcucuccugg

SEQ ID NO: 3630185 - RNA, 17 nt, Human
cagggcucuccuggcuu

SEQ ID NO: 3630186 - RNA, 18 nt, Human
cagggcucuccuggcuuc

SEQ ID NO: 3630187 - RNA, 24 nt, Human
cagggcucucuuuccuucuugccu

SEQ ID NO: 3630188 - RNA, 12 nt, Human
cagggcucugac

SEQ ID NO: 3630189 - RNA, 15 nt, Human
cagggcucugaccag

SEQ ID NO: 3630190 - RNA, 21 nt, Human
cagggcucugccccagaggcc

SEQ ID NO: 3630191 - RNA, 19 nt, Human
cagggcucugccccagucg

SEQ ID NO: 3630192 - RNA, 23 nt, Human
cagggcucugugaccaggaagga

SEQ ID NO: 3630193 - RNA, 21 nt, Human
cagggcugacacguccacccc

SEQ ID NO: 3630194 - RNA, 16 nt, Human
cagggcugaggccucu

SEQ ID NO: 3630195 - RNA, 22 nt, Human
cagggcugcccugagaagcugc

SEQ ID NO: 3630196 - RNA, 14 nt, Human
cagggcugcuagac

SEQ ID NO: 3630197 - RNA, 21 nt, Human
cagggcugcugggggcaacug

SEQ ID NO: 3630198 - RNA, 14 nt, Human
cagggcuggacuga

SEQ ID NO: 3630199 - RNA, 16 nt, Human
cagggcuggacugagg

SEQ ID NO: 3630200 - RNA, 17 nt, Human
cagggcuggacugaggc

SEQ ID NO: 3630201 - RNA, 16 nt, Human
cagggcuggcccagcc

SEQ ID NO: 3630202 - RNA, 18 nt, Human
cagggcuggcccagcccu

SEQ ID NO: 3630203 - RNA, 21 nt, Human
cagggcuggcccagcccugcu

SEQ ID NO: 3630204 - RNA, 22 nt, Human
cagggcuggcccagcccugcug

SEQ ID NO: 3630205 - RNA, 20 nt, Human
cagggcuggccccagggcac

SEQ ID NO: 3630206 - RNA, 23 nt, Human
cagggcuggccccagggcacccu

SEQ ID NO: 3630207 - RNA, 14 nt, Human
cagggcugggagga

SEQ ID NO: 3630208 - RNA, 16 nt, Human
cagggcugggaggaag

SEQ ID NO: 3630209 - RNA, 20 nt, Human
cagggcuggggcagccucug

SEQ ID NO: 3630210 - RNA, 18 nt, Human
cagggcuguaacugccag

SEQ ID NO: 3630211 - RNA, 13 nt, Human
cagggcugugcuu

SEQ ID NO: 3630212 - RNA, 14 nt, Human
cagggcugugcuug

SEQ ID NO: 3630213 - RNA, 20 nt, Human
cagggcuuacggcccuggcc

SEQ ID NO: 3630214 - RNA, 15 nt, Human
cagggcuucuaguuu

SEQ ID NO: 3630215 - RNA, 16 nt, Human
caggggaaaagaggag

SEQ ID NO: 3630216 - RNA, 17 nt, Human
caggggaaaaucagccu

SEQ ID NO: 3630217 - RNA, 14 nt, Human
caggggaaaaugaa

SEQ ID NO: 3630218 - RNA, 16 nt, Human
caggggaaaaugaagg

SEQ ID NO: 3630219 - RNA, 14 nt, Human
caggggaaccugcc

SEQ ID NO: 3630220 - RNA, 18 nt, Human
caggggaauauuuuauuc

SEQ ID NO: 3630221 - RNA, 16 nt, Human
caggggacacccagaa

SEQ ID NO: 3630222 - RNA, 11 nt, Human
caggggacagg

SEQ ID NO: 3630223 - RNA, 15 nt, Human
caggggacucagccc

SEQ ID NO: 3630224 - RNA, 21 nt, Human
caggggacucagcccugaggu

SEQ ID NO: 3630225 - RNA, 20 nt, Human
caggggagagggucuggaga

SEQ ID NO: 3630226 - RNA, 16 nt, Human
caggggagcagagggg

SEQ ID NO: 3630227 - RNA, 22 nt, Human
caggggagcagaggggcagagg

SEQ ID NO: 3630228 - RNA, 15 nt, Human
caggggagcccucca

SEQ ID NO: 3630229 - RNA, 16 nt, Human
caggggaggccaucug

SEQ ID NO: 3630230 - RNA, 17 nt, Human
caggggagggggcaaag

SEQ ID NO: 3630231 - RNA, 19 nt, Human
caggggaggguagagcgga

SEQ ID NO: 3630232 - RNA, 19 nt, Human
caggggagggucagccagg

SEQ ID NO: 3630233 - RNA, 16 nt, Human
caggggaggugauagc

SEQ ID NO: 3630234 - RNA, 22 nt, Human
caggggauggcguggucaagca

SEQ ID NO: 3630235 - RNA, 13 nt, Human
caggggcaggcac

SEQ ID NO: 3630236 - RNA, 15 nt, Human
caggggcaggcacag

SEQ ID NO: 3630237 - RNA, 22 nt, Human
caggggcauguauuggccugga

SEQ ID NO: 3630238 - RNA, 23 nt, Human
caggggcauguauuggccuggag

SEQ ID NO: 3630239 - RNA, 14 nt, Human
caggggccagaaga

SEQ ID NO: 3630240 - RNA, 15 nt, Human
caggggccagaggaa

SEQ ID NO: 3630241 - RNA, 13 nt, Human
caggggccccucc

SEQ ID NO: 3630242 - RNA, 18 nt, Human
caggggcccugcagcucu

SEQ ID NO: 3630243 - RNA, 17 nt, Human
caggggccggccagugg

SEQ ID NO: 3630244 - RNA, 12 nt, Human
caggggccugga

SEQ ID NO: 3630245 - RNA, 22 nt, Human
caggggccuuugggugcuguuu

SEQ ID NO: 3630246 - RNA, 18 nt, Human
caggggcucccuccgccc

SEQ ID NO: 3630247 - RNA, 13 nt, Human
caggggcucugga

SEQ ID NO: 3630248 - RNA, 15 nt, Human
caggggcucuggaga

SEQ ID NO: 3630249 - RNA, 13 nt, Human
caggggcugcccg

SEQ ID NO: 3630250 - RNA, 14 nt, Human
caggggcugcccgc

SEQ ID NO: 3630251 - RNA, 19 nt, Human
caggggcugcuuccuccug

SEQ ID NO: 3630252 - RNA, 12 nt, Human
caggggcuggcu

SEQ ID NO: 3630253 - RNA, 12 nt, Human
caggggcuguuu

SEQ ID NO: 3630254 - RNA, 20 nt, Human
cagggggaagaagcagagag

SEQ ID NO: 3630255 - RNA, 21 nt, Human
cagggggaagaagcagagaga

SEQ ID NO: 3630256 - RNA, 23 nt, Human
cagggggaaggccaaggggaguc

SEQ ID NO: 3630257 - RNA, 22 nt, Human
cagggggagcugggccuggucu

SEQ ID NO: 3630258 - RNA, 15 nt, Human
cagggggcaagagga

SEQ ID NO: 3630259 - RNA, 13 nt, Human
cagggggccaggu

SEQ ID NO: 3630260 - RNA, 19 nt, Human
cagggggccaggugcacag

SEQ ID NO: 3630261 - RNA, 23 nt, Human
cagggggccccuuugcugacccu

SEQ ID NO: 3630262 - RNA, 15 nt, Human
cagggggcugcugcu

SEQ ID NO: 3630263 - RNA, 22 nt, Human
cagggggcuuccugaggggaga

SEQ ID NO: 3630264 - RNA, 13 nt, Human
cagggggucuggc

SEQ ID NO: 3630265 - RNA, 14 nt, Human
cagggggucuggcu

SEQ ID NO: 3630266 - RNA, 19 nt, Human
cagggggucuggcuggugu

SEQ ID NO: 3630267 - RNA, 20 nt, Human
cagggggucuggcugguguu

SEQ ID NO: 3630268 - RNA, 18 nt, Human
caggggucccagccaccc

SEQ ID NO: 3630269 - RNA, 15 nt, Human
caggggucucccugg

SEQ ID NO: 3630270 - RNA, 19 nt, Human
caggggucugagcuccagc

SEQ ID NO: 3630271 - RNA, 23 nt, Human
caggggucugagcuccagcuccu

SEQ ID NO: 3630272 - RNA, 13 nt, Human
caggggugacaca

SEQ ID NO: 3630273 - RNA, 18 nt, Human
caggggugacacagacuc

SEQ ID NO: 3630274 - RNA, 16 nt, Human
caggggugcccccucc

SEQ ID NO: 3630275 - RNA, 20 nt, Human
caggggugggacacccugug

SEQ ID NO: 3630276 - RNA, 21 nt, Human
caggggugggacacccuguga

SEQ ID NO: 3630277 - RNA, 20 nt, Human
cagggguggggguggaggcu

SEQ ID NO: 3630278 - RNA, 22 nt, Human
cagggguggggguggaggcuuc

SEQ ID NO: 3630279 - RNA, 15 nt, Human
cagggguuagagcag

SEQ ID NO: 3630280 - RNA, 20 nt, Human
cagggguuauguggaagugu

SEQ ID NO: 3630281 - RNA, 12 nt, Human
cagggguuccuu

SEQ ID NO: 3630282 - RNA, 20 nt, Human
cagggguuccuucugggcau

SEQ ID NO: 3630283 - RNA, 21 nt, Human
cagggguuccuucugggcauu

SEQ ID NO: 3630284 - RNA, 13 nt, Human
cagggguucgaga

SEQ ID NO: 3630285 - RNA, 15 nt, Human
cagggguugcaguga

SEQ ID NO: 3630286 - RNA, 13 nt, Human
cagggguuucucg

SEQ ID NO: 3630287 - RNA, 14 nt, Human
caggguaaauuauu

SEQ ID NO: 3630288 - RNA, 15 nt, Human
caggguacaaaaaau

SEQ ID NO: 3630289 - RNA, 23 nt, Human
caggguagauaaccuguacuuca

SEQ ID NO: 3630290 - RNA, 13 nt, Human
caggguagcaggu

SEQ ID NO: 3630291 - RNA, 21 nt, Human
cagggucacugaaggccuggc

SEQ ID NO: 3630292 - RNA, 18 nt, Human
cagggucagaaacaggac

SEQ ID NO: 3630293 - RNA, 17 nt, Human
cagggucccacagccac

SEQ ID NO: 3630294 - RNA, 17 nt, Human
cagggucccauuucuca

SEQ ID NO: 3630295 - RNA, 13 nt, Human
cagggucccugcu

SEQ ID NO: 3630296 - RNA, 19 nt, Human
cauccacucuacccuccca

SEQ ID NO: 3630297 - RNA, 22 nt, Human
cauccacucuacccucccaccc

SEQ ID NO: 3630298 - RNA, 21 nt, Human
cauccacuuacauauauuuuu

SEQ ID NO: 3630299 - RNA, 13 nt, Human
cauccagaguccc

SEQ ID NO: 3630300 - RNA, 17 nt, Human
cauccagagucccugcc

SEQ ID NO: 3630301 - RNA, 18 nt, Human
cauccagagucccugccu

SEQ ID NO: 3630302 - RNA, 21 nt, Human
cauccagagucccugccugga

SEQ ID NO: 3630303 - RNA, 13 nt, Human
cauccagcaagaa

SEQ ID NO: 3630304 - RNA, 17 nt, Human
cauccagcagucucugc

SEQ ID NO: 3630305 - RNA, 21 nt, Human
cauccagcagucucugccuug

SEQ ID NO: 3630306 - RNA, 15 nt, Human
cauccagcucacuca

SEQ ID NO: 3630307 - RNA, 14 nt, Human
cauccagcuugcca

SEQ ID NO: 3630308 - RNA, 19 nt, Human
cauccagggcucugaccag

SEQ ID NO: 3630309 - RNA, 13 nt, Human
cauccagggggca

SEQ ID NO: 3630310 - RNA, 17 nt, Human
cauccagguucagcuug

SEQ ID NO: 3630311 - RNA, 23 nt, Human
cauccagucucccaacuuguauu

SEQ ID NO: 3630312 - RNA, 14 nt, Human
cauccauaaagaag

SEQ ID NO: 3630313 - RNA, 17 nt, Human
cauccauaccagcucgc

SEQ ID NO: 3630314 - RNA, 18 nt, Human
cauccauaguaguaugau

SEQ ID NO: 3630315 - RNA, 21 nt, Human
cauccauggccagcagcaccu

SEQ ID NO: 3630316 - RNA, 22 nt, Human
cauccauggggucucucacaga

SEQ ID NO: 3630317 - RNA, 18 nt, Human
cauccauguccaaccccc

SEQ ID NO: 3630318 - RNA, 16 nt, Human
cauccauguccuaugu

SEQ ID NO: 3630319 - RNA, 17 nt, Human
cauccauguguggacuc

SEQ ID NO: 3630320 - RNA, 19 nt, Human
cauccauguuccgagaaga

SEQ ID NO: 3630321 - RNA, 18 nt, Human
cauccauguuuguaaaac

SEQ ID NO: 3630322 - RNA, 13 nt, Human
cauccauuaggcc

SEQ ID NO: 3630323 - RNA, 17 nt, Human
cauccauuaggccagca

SEQ ID NO: 3630324 - RNA, 20 nt, Human
cauccauuaggccagcaacg

SEQ ID NO: 3630325 - RNA, 15 nt, Human
cauccauuccucagg

SEQ ID NO: 3630326 - RNA, 17 nt, Human
cauccauuccucaggga

SEQ ID NO: 3630327 - RNA, 20 nt, Human
cauccauuucaucuauuucu

SEQ ID NO: 3630328 - RNA, 23 nt, Human
caucccaaaaucauaagauauuu

SEQ ID NO: 3630329 - RNA, 19 nt, Human
caucccaaacccuucagug

SEQ ID NO: 3630330 - RNA, 18 nt, Human
caucccaaccagugccaa

SEQ ID NO: 3630331 - RNA, 22 nt, Human
caucccaaccagugccaaggac

SEQ ID NO: 3630332 - RNA, 16 nt, Human
caucccaccccauccu

SEQ ID NO: 3630333 - RNA, 19 nt, Human
caucccaccccauccucca

SEQ ID NO: 3630334 - RNA, 13 nt, Human
caucccacugcuc

SEQ ID NO: 3630335 - RNA, 16 nt, Human
caucccacugcugacu

SEQ ID NO: 3630336 - RNA, 17 nt, Human
caucccagacagguccc

SEQ ID NO: 3630337 - RNA, 21 nt, Human
caucccagacaggucccuccc

SEQ ID NO: 3630338 - RNA, 11 nt, Human
caucccagccc

SEQ ID NO: 3630339 - RNA, 19 nt, Human
caucccagcccaauccagg

SEQ ID NO: 3630340 - RNA, 21 nt, Human
caucccagcccaauccaggua

SEQ ID NO: 3630341 - RNA, 13 nt, Human
caucccagcccca

SEQ ID NO: 3630342 - RNA, 14 nt, Human
caucccagccuugg

SEQ ID NO: 3630343 - RNA, 13 nt, Human
caucccagcggcu

SEQ ID NO: 3630344 - RNA, 13 nt, Human
caucccaggacac

SEQ ID NO: 3630345 - RNA, 19 nt, Human
caucccaggacaccacacc

SEQ ID NO: 3630346 - RNA, 21 nt, Human
caucccaggacaccacaccca

SEQ ID NO: 3630347 - RNA, 23 nt, Human
caucccaggacaccacacccagc

SEQ ID NO: 3630348 - RNA, 19 nt, Human
caucccaggcuucacccug

SEQ ID NO: 3630349 - RNA, 13 nt, Human
caucccaucccau

SEQ ID NO: 3630350 - RNA, 14 nt, Human
caucccaucccauc

SEQ ID NO: 3630351 - RNA, 16 nt, Human
caucccaucccauccc

SEQ ID NO: 3630352 - RNA, 17 nt, Human
caucccaucccauccca

SEQ ID NO: 3630353 - RNA, 12 nt, Human
caucccaucccg

SEQ ID NO: 3630354 - RNA, 18 nt, Human
caucccaugauguagugc

SEQ ID NO: 3630355 - RNA, 20 nt, Human
caucccaugauguagugccu

SEQ ID NO: 3630356 - RNA, 16 nt, Human
caucccauguaacaga

SEQ ID NO: 3630357 - RNA, 19 nt, Human
caucccauguaacagaaag

SEQ ID NO: 3630358 - RNA, 12 nt, Human
caucccauugcc

SEQ ID NO: 3630359 - RNA, 16 nt, Human
caucccauugcccugg

SEQ ID NO: 3630360 - RNA, 12 nt, Human
cauccccaccuu

SEQ ID NO: 3630361 - RNA, 11 nt, Human
cauccccaggg

SEQ ID NO: 3630362 - RNA, 16 nt, Human
cauccccauccuccag

SEQ ID NO: 3630363 - RNA, 17 nt, Human
cauccccauccuccagc

SEQ ID NO: 3630364 - RNA, 12 nt, Human
caucccccaaag

SEQ ID NO: 3630365 - RNA, 11 nt, Human
caucccccugc

SEQ ID NO: 3630366 - RNA, 14 nt, Human
caucccccugcccu

SEQ ID NO: 3630367 - RNA, 19 nt, Human
cauccccgcagugugcacu

SEQ ID NO: 3630368 - RNA, 13 nt, Human
cauccccugccuc

SEQ ID NO: 3630369 - RNA, 15 nt, Human
cauccccugccucca

SEQ ID NO: 3630370 - RNA, 16 nt, Human
cauccccugccuccau

SEQ ID NO: 3630371 - RNA, 22 nt, Human
cauccccugccuccauccuagu

SEQ ID NO: 3630372 - RNA, 14 nt, Human
cauccccuguagag

SEQ ID NO: 3630373 - RNA, 21 nt, Human
cauccccuguagagugggagc

SEQ ID NO: 3630374 - RNA, 15 nt, Human
cauccccugugggaa

SEQ ID NO: 3630375 - RNA, 20 nt, Human
cauccccuuacccuuagaau

SEQ ID NO: 3630376 - RNA, 16 nt, Human
caucccgcucuuuucc

SEQ ID NO: 3630377 - RNA, 15 nt, Human
caucccggaggaaau

SEQ ID NO: 3630378 - RNA, 16 nt, Human
caucccgucuucucca

SEQ ID NO: 3630379 - RNA, 18 nt, Human
caucccgucuucuccaac

SEQ ID NO: 3630380 - RNA, 14 nt, Human
caucccguguucuc

SEQ ID NO: 3630381 - RNA, 16 nt, Human
caucccguguucuccu

SEQ ID NO: 3630382 - RNA, 14 nt, Human
caucccuacccccu

SEQ ID NO: 3630383 - RNA, 14 nt, Human
caucccucacccau

SEQ ID NO: 3630384 - RNA, 12 nt, Human
caucccucccuc

SEQ ID NO: 3630385 - RNA, 14 nt, Human
caucccucccucca

SEQ ID NO: 3630386 - RNA, 13 nt, Human
caucccuccuggg

SEQ ID NO: 3630387 - RNA, 18 nt, Human
caucccugaaggccccgc

SEQ ID NO: 3630388 - RNA, 22 nt, Human
caucccugaaggccccgcccag

SEQ ID NO: 3630389 - RNA, 24 nt, Human
caucccugagcaggaaaguuuacc

SEQ ID NO: 3630390 - RNA, 17 nt, Human
caucccugaggagccag

SEQ ID NO: 3630391 - RNA, 19 nt, Human
caucccugaggcuggacuc

SEQ ID NO: 3630392 - RNA, 19 nt, Human
caucccugauuccuguugu

SEQ ID NO: 3630393 - RNA, 15 nt, Human
caucccugccugguc

SEQ ID NO: 3630394 - RNA, 14 nt, Human
caucccuggaaggu

SEQ ID NO: 3630395 - RNA, 15 nt, Human
caucccuggaaggug

SEQ ID NO: 3630396 - RNA, 23 nt, Human
caucccuggcccccucccuggau

SEQ ID NO: 3630397 - RNA, 11 nt, Human
caucccugggc

SEQ ID NO: 3630398 - RNA, 13 nt, Human
caucccugggccu

SEQ ID NO: 3630399 - RNA, 16 nt, Human
caucccugggccugcu

SEQ ID NO: 3630400 - RNA, 18 nt, Human
caucccugggccugcugc

SEQ ID NO: 3630401 - RNA, 21 nt, Human
caucccugggccugcugcuga

SEQ ID NO: 3630402 - RNA, 22 nt, Human
caucccugggccugcugcugag

SEQ ID NO: 3630403 - RNA, 23 nt, Human
caucccugggccugcugcugaga

SEQ ID NO: 3630404 - RNA, 12 nt, Human
caucccugugag

SEQ ID NO: 3630405 - RNA, 15 nt, Human
caucccuucucuucc

SEQ ID NO: 3630406 - RNA, 22 nt, Human
caucccuucucuuccaggcagc

SEQ ID NO: 3630407 - RNA, 13 nt, Human
caucccuuuccag

SEQ ID NO: 3630408 - RNA, 16 nt, Human
caucccuuuuugaagu

SEQ ID NO: 3630409 - RNA, 17 nt, Human
caucccuuuuugaagug

SEQ ID NO: 3630410 - RNA, 20 nt, Human
cauccgaccagguugucacu

SEQ ID NO: 3630411 - RNA, 15 nt, Human
cauccgaggcagggu

SEQ ID NO: 3630412 - RNA, 23 nt, Human
cauccgaggcagggucaggagag

SEQ ID NO: 3630413 - RNA, 17 nt, Human
cauccgcgugugccugu

SEQ ID NO: 3630414 - RNA, 23 nt, Human
cauccggaggagaagaaggaaau

SEQ ID NO: 3630415 - RNA, 17 nt, Human
cauccguaguucccuga

SEQ ID NO: 3630416 - RNA, 18 nt, Human
cauccguaguucccugaa

SEQ ID NO: 3630417 - RNA, 14 nt, Human
cauccuaagaaaua

SEQ ID NO: 3630418 - RNA, 20 nt, Human
cauccuaaucauccaaugcu

SEQ ID NO: 3630419 - RNA, 17 nt, Human
cauccuacaagacacag

SEQ ID NO: 3630420 - RNA, 18 nt, Human
cauccuacaagacacagu

SEQ ID NO: 3630421 - RNA, 14 nt, Human
cauccuaccaaugc

SEQ ID NO: 3630422 - RNA, 18 nt, Human
cauccuaccaaugcaugc

SEQ ID NO: 3630423 - RNA, 23 nt, Human
cauccuaccacaaugcagugccu

SEQ ID NO: 3630424 - RNA, 13 nt, Human
cauccuacccucg

SEQ ID NO: 3630425 - RNA, 21 nt, Human
cauccuacccucgggcccacc

SEQ ID NO: 3630426 - RNA, 17 nt, Human
cauccuaggcugacacc

SEQ ID NO: 3630427 - RNA, 24 nt, Human
cauccuaucagccugucucuucca

SEQ ID NO: 3630428 - RNA, 15 nt, Human
cauccuaugcaauau

SEQ ID NO: 3630429 - RNA, 22 nt, Human
cauccucaaacacugcaggcau

SEQ ID NO: 3630430 - RNA, 14 nt, Human
cauccucaaagaaa

SEQ ID NO: 3630431 - RNA, 19 nt, Human
cauccucaagaucauucag

SEQ ID NO: 3630432 - RNA, 15 nt, Human
cauccucagaugcuc

SEQ ID NO: 3630433 - RNA, 16 nt, Human
cauccucauacccacc

SEQ ID NO: 3630434 - RNA, 17 nt, Human
cauccucauacccaccc

SEQ ID NO: 3630435 - RNA, 22 nt, Human
cauccucauacccacccccacc

SEQ ID NO: 3630436 - RNA, 17 nt, Human
cauccuccagauagugu

SEQ ID NO: 3630437 - RNA, 16 nt, Human
cauccuccagcaggga

SEQ ID NO: 3630438 - RNA, 13 nt, Human
cauccuccagccc

SEQ ID NO: 3630439 - RNA, 14 nt, Human
cauccuccagcccc

SEQ ID NO: 3630440 - RNA, 15 nt, Human
cauccuccagcuucu

SEQ ID NO: 3630441 - RNA, 17 nt, Human
cauccuccagcuucugg

SEQ ID NO: 3630442 - RNA, 19 nt, Human
caugagggaucacagggcc

SEQ ID NO: 3630443 - RNA, 16 nt, Human
caugaggggcccgagc

SEQ ID NO: 3630444 - RNA, 15 nt, Human
caugagucccagugg

SEQ ID NO: 3630445 - RNA, 14 nt, Human
caugaguccccugu

SEQ ID NO: 3630446 - RNA, 15 nt, Human
caugaguccccuguu

SEQ ID NO: 3630447 - RNA, 23 nt, Human
caugaguccccuguuuguuucug

SEQ ID NO: 3630448 - RNA, 19 nt, Human
caugaguuaucaugaauuu

SEQ ID NO: 3630449 - RNA, 23 nt, Human
caugaguuaucaugaauuuuaaa

SEQ ID NO: 3630450 - RNA, 16 nt, Human
caugaguucugcugaa

SEQ ID NO: 3630451 - RNA, 16 nt, Human
caugaguuugcccugg

SEQ ID NO: 3630452 - RNA, 13 nt, Human
caugauaaaugau

SEQ ID NO: 3630453 - RNA, 14 nt, Human
caugauauaacuuu

SEQ ID NO: 3630454 - RNA, 19 nt, Human
caugauauaacuuuagaaa

SEQ ID NO: 3630455 - RNA, 23 nt, Human
caugaugacuuaguacaaaguuu

SEQ ID NO: 3630456 - RNA, 14 nt, Human
caugaugcgggcca

SEQ ID NO: 3630457 - RNA, 16 nt, Human
caugaugcucuuuccc

SEQ ID NO: 3630458 - RNA, 15 nt, Human
caugaugcugggauu

SEQ ID NO: 3630459 - RNA, 18 nt, Human
caugauggagcgcaccug

SEQ ID NO: 3630460 - RNA, 12 nt, Human
caugauggaguc

SEQ ID NO: 3630461 - RNA, 15 nt, Human
caugauggcaacaga

SEQ ID NO: 3630462 - RNA, 20 nt, Human
caugauggugcugaccucug

SEQ ID NO: 3630463 - RNA, 22 nt, Human
caugaugguuauuuucuuuucu

SEQ ID NO: 3630464 - RNA, 12 nt, Human
caugauguggag

SEQ ID NO: 3630465 - RNA, 12 nt, Human
caugauguuugc

SEQ ID NO: 3630466 - RNA, 21 nt, Human
caugauguuugcccaaaauuu

SEQ ID NO: 3630467 - RNA, 24 nt, Human
caugauuaaccacuucagcugacu

SEQ ID NO: 3630468 - RNA, 15 nt, Human
caugauuccagccau

SEQ ID NO: 3630469 - RNA, 16 nt, Human
caugauuccuuccugu

SEQ ID NO: 3630470 - RNA, 13 nt, Human
caugauuccuuua

SEQ ID NO: 3630471 - RNA, 17 nt, Human
caugauuccuuuaacaa

SEQ ID NO: 3630472 - RNA, 22 nt, Human
caugauugcagaauuguuuaga

SEQ ID NO: 3630473 - RNA, 20 nt, Human
caugauuuacagagaaguga

SEQ ID NO: 3630474 - RNA, 17 nt, Human
caugauuucacaaauau

SEQ ID NO: 3630475 - RNA, 19 nt, Human
caugauuucacaaauauua

SEQ ID NO: 3630476 - RNA, 17 nt, Human
caugauuucauguacug

SEQ ID NO: 3630477 - RNA, 19 nt, Human
caugauuucauguacugca

SEQ ID NO: 3630478 - RNA, 16 nt, Human
caugauuuccuugaau

SEQ ID NO: 3630479 - RNA, 17 nt, Human
caugauuuccuugaaug

SEQ ID NO: 3630480 - RNA, 16 nt, Human
caugcaaaaagaaaug

SEQ ID NO: 3630481 - RNA, 12 nt, Human
caugcaaacucu

SEQ ID NO: 3630482 - RNA, 15 nt, Human
caugcaaaggcuggg

SEQ ID NO: 3630483 - RNA, 22 nt, Human
caugcaagaacucaucacugug

SEQ ID NO: 3630484 - RNA, 15 nt, Human
caugcaagcagagga

SEQ ID NO: 3630485 - RNA, 19 nt, Human
caugcaaggggaaaaucuc

SEQ ID NO: 3630486 - RNA, 17 nt, Human
caugcaaggucauuuuu

SEQ ID NO: 3630487 - RNA, 18 nt, Human
caugcaaggucauuuuuu

SEQ ID NO: 3630488 - RNA, 22 nt, Human
caugcaaggucauuuuuuuuaa

SEQ ID NO: 3630489 - RNA, 14 nt, Human
caugcaauaaaauu

SEQ ID NO: 3630490 - RNA, 18 nt, Human
caugcacaguauuuguaa

SEQ ID NO: 3630491 - RNA, 14 nt, Human
caugcaccacgggc

SEQ ID NO: 3630492 - RNA, 14 nt, Human
caugcacugacccu

SEQ ID NO: 3630493 - RNA, 18 nt, Human
caugcacugacccuucca

SEQ ID NO: 3630494 - RNA, 15 nt, Human
caugcacugauguug

SEQ ID NO: 3630495 - RNA, 20 nt, Human
caugcacugauguuguguuu

SEQ ID NO: 3630496 - RNA, 17 nt, Human
caugcacugugaaggac

SEQ ID NO: 3630497 - RNA, 23 nt, Human
caugcacuguucccccugugcag

SEQ ID NO: 3630498 - RNA, 14 nt, Human
caugcacuuaaaga

SEQ ID NO: 3630499 - RNA, 19 nt, Human
caugcagccacuuaggaca

SEQ ID NO: 3630500 - RNA, 22 nt, Human
caugcagcccaugcccaccugc

SEQ ID NO: 3630501 - RNA, 20 nt, Human
caugcagcucaacuuucugu

SEQ ID NO: 3630502 - RNA, 21 nt, Human
caugcagcugcacccucccuc

SEQ ID NO: 3630503 - RNA, 12 nt, Human
caugcaggcccu

SEQ ID NO: 3630504 - RNA, 10 nt, Human
caugcaguuu

SEQ ID NO: 3630505 - RNA, 16 nt, Human
caugcaguuugaaauu

SEQ ID NO: 3630506 - RNA, 22 nt, Human
caugcaguuugaaauucugaau

SEQ ID NO: 3630507 - RNA, 13 nt, Human
caugcauaaauau

SEQ ID NO: 3630508 - RNA, 19 nt, Human
caugcauaaauaugcagug

SEQ ID NO: 3630509 - RNA, 22 nt, Human
caugcauaaauaugcagugaua

SEQ ID NO: 3630510 - RNA, 11 nt, Human
caugcauacac

SEQ ID NO: 3630511 - RNA, 23 nt, Human
caugcauacacacacacacacag

SEQ ID NO: 3630512 - RNA, 17 nt, Human
caugcauacuucaaaag

SEQ ID NO: 3630513 - RNA, 17 nt, Human
caugcauagucccagcu

SEQ ID NO: 3630514 - RNA, 12 nt, Human
caugcauauaau

SEQ ID NO: 3630515 - RNA, 15 nt, Human
caugcaucuccaccu

SEQ ID NO: 3630516 - RNA, 18 nt, Human
caugcaucuccaccugcu

SEQ ID NO: 3630517 - RNA, 14 nt, Human
caugcaugcaaaug

SEQ ID NO: 3630518 - RNA, 18 nt, Human
caugcauguccuguaaag

SEQ ID NO: 3630519 - RNA, 21 nt, Human
caugcauguccuguaaagguu

SEQ ID NO: 3630520 - RNA, 15 nt, Human
caugcauuguccucu

SEQ ID NO: 3630521 - RNA, 20 nt, Human
caugcauuguugaggugguc

SEQ ID NO: 3630522 - RNA, 19 nt, Human
caugcauuuugcagcagug

SEQ ID NO: 3630523 - RNA, 17 nt, Human
caugccaacaagaaugc

SEQ ID NO: 3630524 - RNA, 20 nt, Human
caugccaacaagaaugcauu

SEQ ID NO: 3630525 - RNA, 17 nt, Human
caugccacguuccacag

SEQ ID NO: 3630526 - RNA, 19 nt, Human
caugccacuacacuccagc

SEQ ID NO: 3630527 - RNA, 14 nt, Human
caugccagcuggcc

SEQ ID NO: 3630528 - RNA, 22 nt, Human
caugccagcuggccuuuguaag

SEQ ID NO: 3630529 - RNA, 19 nt, Human
caugccagcuuaucucagg

SEQ ID NO: 3630530 - RNA, 20 nt, Human
caugccagcuuaucucaggg

SEQ ID NO: 3630531 - RNA, 13 nt, Human
caugccaggggcc

SEQ ID NO: 3630532 - RNA, 17 nt, Human
caugccaguaacaggcu

SEQ ID NO: 3630533 - RNA, 19 nt, Human
caugccauuuguacugacc

SEQ ID NO: 3630534 - RNA, 15 nt, Human
caugcccacccccug

SEQ ID NO: 3630535 - RNA, 22 nt, Human
caugcccacccccugcccugca

SEQ ID NO: 3630536 - RNA, 14 nt, Human
caugcccaccugcc

SEQ ID NO: 3630537 - RNA, 21 nt, Human
caugcccaccugcccaucaca

SEQ ID NO: 3630538 - RNA, 19 nt, Human
caugcccacguucuuuccc

SEQ ID NO: 3630539 - RNA, 14 nt, Human
caugcccagagacc

SEQ ID NO: 3630540 - RNA, 18 nt, Human
caugcccagagacccagc

SEQ ID NO: 3630541 - RNA, 18 nt, Human
caugccccaucccaugcu

SEQ ID NO: 3630542 - RNA, 16 nt, Human
caugcccccucgugcc

SEQ ID NO: 3630543 - RNA, 19 nt, Human
caugcccccucgugccagu

SEQ ID NO: 3630544 - RNA, 13 nt, Human
caugccccugaac

SEQ ID NO: 3630545 - RNA, 14 nt, Human
caugccccuggcug

SEQ ID NO: 3630546 - RNA, 15 nt, Human
caugcccucccuucu

SEQ ID NO: 3630547 - RNA, 21 nt, Human
caugcccucccuucucccugg

SEQ ID NO: 3630548 - RNA, 14 nt, Human
caugcccucucagg

SEQ ID NO: 3630549 - RNA, 20 nt, Human
caugcccuguucagcuacuc

SEQ ID NO: 3630550 - RNA, 21 nt, Human
caugccgcugcauccgugagc

SEQ ID NO: 3630551 - RNA, 19 nt, Human
caugccucagcccugaccc

SEQ ID NO: 3630552 - RNA, 14 nt, Human
caugccucucucag

SEQ ID NO: 3630553 - RNA, 16 nt, Human
caugccucucucaggc

SEQ ID NO: 3630554 - RNA, 14 nt, Human
caugccucugaggc

SEQ ID NO: 3630555 - RNA, 16 nt, Human
caugccucugaggcca

SEQ ID NO: 3630556 - RNA, 18 nt, Human
caugccucugaggccagc

SEQ ID NO: 3630557 - RNA, 20 nt, Human
caugccucugaggccagccu

SEQ ID NO: 3630558 - RNA, 21 nt, Human
caugccucugaggccagccug

SEQ ID NO: 3630559 - RNA, 22 nt, Human
caugccucugaggccagccugg

SEQ ID NO: 3630560 - RNA, 23 nt, Human
caugccucugaggccagccuggc

SEQ ID NO: 3630561 - RNA, 12 nt, Human
caugccucugau

SEQ ID NO: 3630562 - RNA, 21 nt, Human
caugccucugauaugggacug

SEQ ID NO: 3630563 - RNA, 16 nt, Human
caugccugcuuuagaa

SEQ ID NO: 3630564 - RNA, 19 nt, Human
caugccuggacaaacccuu

SEQ ID NO: 3630565 - RNA, 21 nt, Human
caugccuguccagccugggca

SEQ ID NO: 3630566 - RNA, 23 nt, Human
caugccuguccagccugggcagc

SEQ ID NO: 3630567 - RNA, 17 nt, Human
caugccuguggcugcgc

SEQ ID NO: 3630568 - RNA, 20 nt, Human
caugccuuaaaccuaccucc

SEQ ID NO: 3630569 - RNA, 21 nt, Human
caugccuuccagcacccugca

SEQ ID NO: 3630570 - RNA, 12 nt, Human
caugccuugugc

SEQ ID NO: 3630571 - RNA, 15 nt, Human
caugccuuuguaagu

SEQ ID NO: 3630572 - RNA, 23 nt, Human
caugcggagaacaaaugugaagg

SEQ ID NO: 3630573 - RNA, 14 nt, Human
caugcggcccagcc

SEQ ID NO: 3630574 - RNA, 22 nt, Human
caugcggcccagcccggcuccc

SEQ ID NO: 3630575 - RNA, 15 nt, Human
caugcgggcugggca

SEQ ID NO: 3630576 - RNA, 19 nt, Human
caugcgggcugggcagcug

SEQ ID NO: 3630577 - RNA, 20 nt, Human
caugcgggcugggcagcugu

SEQ ID NO: 3630578 - RNA, 17 nt, Human
caugcgggcuuccuccu

SEQ ID NO: 3630579 - RNA, 13 nt, Human
caugcgguagcca

SEQ ID NO: 3630580 - RNA, 22 nt, Human
caugcguggguggggagggagg

SEQ ID NO: 3630581 - RNA, 13 nt, Human
caugcuaagagaa

SEQ ID NO: 3630582 - RNA, 19 nt, Human
caugcuaagagaaguagaa

SEQ ID NO: 3630583 - RNA, 21 nt, Human
caugcuaagagaaguagaaau

SEQ ID NO: 3630584 - RNA, 16 nt, Human
caugcuaagcaagcua

SEQ ID NO: 3630585 - RNA, 14 nt, Human
caugcuaauuauau

SEQ ID NO: 3630586 - RNA, 18 nt, Human
ccaacccuguuuccugag

SEQ ID NO: 3630587 - RNA, 14 nt, Human
ccaacccuucccca

SEQ ID NO: 3630588 - RNA, 16 nt, Human
ccaacccuucuucaug

SEQ ID NO: 3630589 - RNA, 18 nt, Human
ccaaccgacaggcccugg

SEQ ID NO: 3630590 - RNA, 20 nt, Human
ccaaccucagggcucccagg

SEQ ID NO: 3630591 - RNA, 14 nt, Human
ccaaccuccugacc

SEQ ID NO: 3630592 - RNA, 14 nt, Human
ccaaccucgcucca

SEQ ID NO: 3630593 - RNA, 13 nt, Human
ccaaccugaccaa

SEQ ID NO: 3630594 - RNA, 12 nt, Human
ccaaccugcucu

SEQ ID NO: 3630595 - RNA, 13 nt, Human
ccaaccuggacaa

SEQ ID NO: 3630596 - RNA, 21 nt, Human
ccaaccuguaauaaauaugag

SEQ ID NO: 3630597 - RNA, 15 nt, Human
ccaaccuguuaccua

SEQ ID NO: 3630598 - RNA, 18 nt, Human
ccaaccuguucaagucua

SEQ ID NO: 3630599 - RNA, 17 nt, Human
ccaaccuuucccucacc

SEQ ID NO: 3630600 - RNA, 23 nt, Human
ccaaccuuucccucacccccucc

SEQ ID NO: 3630601 - RNA, 15 nt, Human
ccaacgaaaagcaca

SEQ ID NO: 3630602 - RNA, 22 nt, Human
ccaacgagcagugccgcguggc

SEQ ID NO: 3630603 - RNA, 13 nt, Human
ccaacgcacagga

SEQ ID NO: 3630604 - RNA, 18 nt, Human
ccaacguuacucagggcu

SEQ ID NO: 3630605 - RNA, 19 nt, Human
ccaacguuacucagggcuc

SEQ ID NO: 3630606 - RNA, 13 nt, Human
ccaacguuuggaa

SEQ ID NO: 3630607 - RNA, 20 nt, Human
ccaacguuuggaagauccug

SEQ ID NO: 3630608 - RNA, 19 nt, Human
ccaacuaacaagaaacuca

SEQ ID NO: 3630609 - RNA, 14 nt, Human
ccaacuacuaauag

SEQ ID NO: 3630610 - RNA, 22 nt, Human
ccaacuacuaauagaauaaagg

SEQ ID NO: 3630611 - RNA, 18 nt, Human
ccaacuagacauucuguc

SEQ ID NO: 3630612 - RNA, 17 nt, Human
ccaacuagccccugggg

SEQ ID NO: 3630613 - RNA, 13 nt, Human
ccaacucacccca

SEQ ID NO: 3630614 - RNA, 14 nt, Human
ccaacucaccugag

SEQ ID NO: 3630615 - RNA, 17 nt, Human
ccaacuccaacauccac

SEQ ID NO: 3630616 - RNA, 21 nt, Human
ccaacuccagcaacuucuucu

SEQ ID NO: 3630617 - RNA, 19 nt, Human
ccaacuccuggaagcugug

SEQ ID NO: 3630618 - RNA, 15 nt, Human
ccaacucugagccca

SEQ ID NO: 3630619 - RNA, 15 nt, Human
ccaacugaucuguua

SEQ ID NO: 3630620 - RNA, 16 nt, Human
ccaacuggcccucuuc

SEQ ID NO: 3630621 - RNA, 18 nt, Human
ccaacuggcccucuucuu

SEQ ID NO: 3630622 - RNA, 13 nt, Human
ccaacuguauaua

SEQ ID NO: 3630623 - RNA, 10 nt, Human
ccaacugugu

SEQ ID NO: 3630624 - RNA, 13 nt, Human
ccaacuguguugu

SEQ ID NO: 3630625 - RNA, 13 nt, Human
ccaacuucccagu

SEQ ID NO: 3630626 - RNA, 20 nt, Human
ccaacuugagggcccagagc

SEQ ID NO: 3630627 - RNA, 11 nt, Human
ccaacuuguaa

SEQ ID NO: 3630628 - RNA, 16 nt, Human
ccaacuuucaagaacu

SEQ ID NO: 3630629 - RNA, 14 nt, Human
ccaacuuucuguaa

SEQ ID NO: 3630630 - RNA, 11 nt, Human
ccaacuuuucu

SEQ ID NO: 3630631 - RNA, 14 nt, Human
ccaagaaacgucuu

SEQ ID NO: 3630632 - RNA, 15 nt, Human
ccaagaaagauguau

SEQ ID NO: 3630633 - RNA, 16 nt, Human
ccaagaacugaaaaca

SEQ ID NO: 3630634 - RNA, 13 nt, Human
ccaagaagcccag

SEQ ID NO: 3630635 - RNA, 19 nt, Human
ccaagaagcccaggaaagg

SEQ ID NO: 3630636 - RNA, 13 nt, Human
ccaagaaggcugg

SEQ ID NO: 3630637 - RNA, 20 nt, Human
ccaagaauagaugcugacug

SEQ ID NO: 3630638 - RNA, 16 nt, Human
ccaagaauauugcaaa

SEQ ID NO: 3630639 - RNA, 20 nt, Human
ccaagaaugcaagauuucag

SEQ ID NO: 3630640 - RNA, 18 nt, Human
ccaagaauguacguccag

SEQ ID NO: 3630641 - RNA, 16 nt, Human
ccaagacaaaucaaca

SEQ ID NO: 3630642 - RNA, 22 nt, Human
ccaagacaaaucaacagaagca

SEQ ID NO: 3630643 - RNA, 22 nt, Human
ccaagacagaugccccagagcu

SEQ ID NO: 3630644 - RNA, 24 nt, Human
ccaagacagaugccccagagcugu

SEQ ID NO: 3630645 - RNA, 21 nt, Human
ccaagacaugucuguucuaca

SEQ ID NO: 3630646 - RNA, 12 nt, Human
ccaagacauugu

SEQ ID NO: 3630647 - RNA, 17 nt, Human
ccaagacauugucaaua

SEQ ID NO: 3630648 - RNA, 17 nt, Human
ccaagaccucagggcac

SEQ ID NO: 3630649 - RNA, 15 nt, Human
ccaagaccugacuca

SEQ ID NO: 3630650 - RNA, 19 nt, Human
ccaagaccuguugguucca

SEQ ID NO: 3630651 - RNA, 23 nt, Human
ccaagacucccucgucgagcugg

SEQ ID NO: 3630652 - RNA, 13 nt, Human
ccaagacucuaga

SEQ ID NO: 3630653 - RNA, 21 nt, Human
ccaagacuuauuuucacaugu

SEQ ID NO: 3630654 - RNA, 19 nt, Human
ccaagacuugguguccuuu

SEQ ID NO: 3630655 - RNA, 22 nt, Human
ccaagacuugguguccuuuccc

SEQ ID NO: 3630656 - RNA, 15 nt, Human
ccaagagaaacuucc

SEQ ID NO: 3630657 - RNA, 12 nt, Human
ccaagagagaaa

SEQ ID NO: 3630658 - RNA, 12 nt, Human
ccaagagaugaa

SEQ ID NO: 3630659 - RNA, 22 nt, Human
ccaagagcaaggaagguaaaaa

SEQ ID NO: 3630660 - RNA, 16 nt, Human
ccaagagccugagagu

SEQ ID NO: 3630661 - RNA, 22 nt, Human
ccaagagcuacguauuuaauag

SEQ ID NO: 3630662 - RNA, 13 nt, Human
ccaagaggcuggu

SEQ ID NO: 3630663 - RNA, 14 nt, Human
ccaagaggcugguu

SEQ ID NO: 3630664 - RNA, 19 nt, Human
ccaagaggguccuuuagua

SEQ ID NO: 3630665 - RNA, 22 nt, Human
ccaagagguuuggcuccugccc

SEQ ID NO: 3630666 - RNA, 20 nt, Human
ccaagaguggccccaccugg

SEQ ID NO: 3630667 - RNA, 15 nt, Human
ccaagauaggaccuu

SEQ ID NO: 3630668 - RNA, 13 nt, Human
ccaagauuccgga

SEQ ID NO: 3630669 - RNA, 20 nt, Human
ccaagauuccggauccuaag

SEQ ID NO: 3630670 - RNA, 13 nt, Human
ccaagauucuaga

SEQ ID NO: 3630671 - RNA, 21 nt, Human
ccaagauugcgccauugcacu

SEQ ID NO: 3630672 - RNA, 16 nt, Human
ccaagauuuuccucuu

SEQ ID NO: 3630673 - RNA, 20 nt, Human
ccaagauuuuccucuuguga

SEQ ID NO: 3630674 - RNA, 15 nt, Human
ccaagcaagacugag

SEQ ID NO: 3630675 - RNA, 14 nt, Human
ccaagcaaguauua

SEQ ID NO: 3630676 - RNA, 12 nt, Human
ccaagcacagca

SEQ ID NO: 3630677 - RNA, 20 nt, Human
ccaagcacagugguggcagg

SEQ ID NO: 3630678 - RNA, 23 nt, Human
ccaagcagagaagcucucgggcu

SEQ ID NO: 3630679 - RNA, 23 nt, Human
ccaagcagagguugggaggccau

SEQ ID NO: 3630680 - RNA, 18 nt, Human
ccaagcaggaaaugaaaa

SEQ ID NO: 3630681 - RNA, 18 nt, Human
ccaagcaggacagugcuu

SEQ ID NO: 3630682 - RNA, 16 nt, Human
ccaagcaggacaugga

SEQ ID NO: 3630683 - RNA, 22 nt, Human
ccaagcaggagacgacaggcga

SEQ ID NO: 3630684 - RNA, 21 nt, Human
ccaagcauagagaagagucug

SEQ ID NO: 3630685 - RNA, 22 nt, Human
ccaagcaucuuggggggguggc

SEQ ID NO: 3630686 - RNA, 23 nt, Human
ccaagcauuuaauguagccaugg

SEQ ID NO: 3630687 - RNA, 17 nt, Human
ccaagcauuuagaugua

SEQ ID NO: 3630688 - RNA, 22 nt, Human
ccaagccaagggaaccuguguc

SEQ ID NO: 3630689 - RNA, 22 nt, Human
ccaagcccacagguguccccag

SEQ ID NO: 3630690 - RNA, 15 nt, Human
ccaagcccagcccau

SEQ ID NO: 3630691 - RNA, 17 nt, Human
ccaagcccgacuugcug

SEQ ID NO: 3630692 - RNA, 22 nt, Human
ccaagcccgacuugcuguuuug

SEQ ID NO: 3630693 - RNA, 14 nt, Human
ccaagccguggcuu

SEQ ID NO: 3630694 - RNA, 22 nt, Human
ccaagccuacuuuugccauuga

SEQ ID NO: 3630695 - RNA, 20 nt, Human
ccaagccuccacagcgaggg

SEQ ID NO: 3630696 - RNA, 20 nt, Human
ccaagcgaggucaacagaga

SEQ ID NO: 3630697 - RNA, 17 nt, Human
ccaagcggugucucucc

SEQ ID NO: 3630698 - RNA, 18 nt, Human
ccaagcuaucuaaaguuu

SEQ ID NO: 3630699 - RNA, 17 nt, Human
ccaagcucaaagcgugg

SEQ ID NO: 3630700 - RNA, 19 nt, Human
ccaagcucaggaccaggca

SEQ ID NO: 3630701 - RNA, 20 nt, Human
ccaagcucaggaccaggcaa

SEQ ID NO: 3630702 - RNA, 11 nt, Human
ccaagcucccu

SEQ ID NO: 3630703 - RNA, 19 nt, Human
ccaagcucccugccccaaa

SEQ ID NO: 3630704 - RNA, 21 nt, Human
ccaagcucccugccccaaaua

SEQ ID NO: 3630705 - RNA, 15 nt, Human
ccaagcuccuuggga

SEQ ID NO: 3630706 - RNA, 19 nt, Human
ccaagcuccuugggaggcc

SEQ ID NO: 3630707 - RNA, 14 nt, Human
ccaagcucucugca

SEQ ID NO: 3630708 - RNA, 15 nt, Human
ccaagcucucugcau

SEQ ID NO: 3630709 - RNA, 15 nt, Human
ccaagcucugcaguc

SEQ ID NO: 3630710 - RNA, 15 nt, Human
ccaagcucugcuccu

SEQ ID NO: 3630711 - RNA, 12 nt, Human
ccaagcugaggu

SEQ ID NO: 3630712 - RNA, 13 nt, Human
ccaagcugaggug

SEQ ID NO: 3630713 - RNA, 20 nt, Human
ccaagcugaggugcccagga

SEQ ID NO: 3630714 - RNA, 22 nt, Human
ccaagcugaggugcccaggaga

SEQ ID NO: 3630715 - RNA, 17 nt, Human
ccaagcugaguuuccua

SEQ ID NO: 3630716 - RNA, 18 nt, Human
ccaagcugaguuuccuau

SEQ ID NO: 3630717 - RNA, 13 nt, Human
ccaagcuggcugg

SEQ ID NO: 3630718 - RNA, 12 nt, Human
ccaagcugggcc

SEQ ID NO: 3630719 - RNA, 15 nt, Human
ccaagcugggcccca

SEQ ID NO: 3630720 - RNA, 19 nt, Human
ccaagcugggccccagccc

SEQ ID NO: 3630721 - RNA, 22 nt, Human
ccaagcugggccccagcccacc

SEQ ID NO: 3630722 - RNA, 20 nt, Human
ccaagcuggucccacucagu

SEQ ID NO: 3630723 - RNA, 17 nt, Human
ccaagcugugccacccu

SEQ ID NO: 3630724 - RNA, 22 nt, Human
ccaagcuuaggguauuuuuccu

SEQ ID NO: 3630725 - RNA, 21 nt, Human
ccaagcuuccauagcugcugc

SEQ ID NO: 3630726 - RNA, 12 nt, Human
ccaagcuucccu

SEQ ID NO: 3630727 - RNA, 13 nt, Human
ccaagcuucccuc

SEQ ID NO: 3630728 - RNA, 15 nt, Human
ccaagcuuggcagcc

SEQ ID NO: 3630729 - RNA, 17 nt, Human
ccaagcuuguuaucagc

SEQ ID NO: 3630730 - RNA, 16 nt, Human
ccaaggaaaacugcau

SEQ ID NO: 3630731 - RNA, 14 nt, Human
ccacccccucaagc

SEQ ID NO: 3630732 - RNA, 15 nt, Human
ccacccccucaagcc

SEQ ID NO: 3630733 - RNA, 22 nt, Human
ccacccccucccuggccuguuc

SEQ ID NO: 3630734 - RNA, 13 nt, Human
ccacccccugccc

SEQ ID NO: 3630735 - RNA, 14 nt, Human
ccacccccugcccu

SEQ ID NO: 3630736 - RNA, 17 nt, Human
ccacccccugcccugca

SEQ ID NO: 3630737 - RNA, 19 nt, Human
ccacccccuucucugcucc

SEQ ID NO: 3630738 - RNA, 20 nt, Human
ccacccccuucucugcucca

SEQ ID NO: 3630739 - RNA, 23 nt, Human
ccacccccuucucugcuccacca

SEQ ID NO: 3630740 - RNA, 22 nt, Human
ccaccccgcaccccgcgugucc

SEQ ID NO: 3630741 - RNA, 17 nt, Human
ccaccccgggcucucug

SEQ ID NO: 3630742 - RNA, 20 nt, Human
ccaccccggggacccuguga

SEQ ID NO: 3630743 - RNA, 14 nt, Human
ccaccccuccccau

SEQ ID NO: 3630744 - RNA, 15 nt, Human
ccaccccugccucca

SEQ ID NO: 3630745 - RNA, 16 nt, Human
ccaccccugccuccac

SEQ ID NO: 3630746 - RNA, 11 nt, Human
ccaccccugcu

SEQ ID NO: 3630747 - RNA, 14 nt, Human
ccaccccuggaaga

SEQ ID NO: 3630748 - RNA, 23 nt, Human
ccaccccuuagauugaaguaaac

SEQ ID NO: 3630749 - RNA, 13 nt, Human
ccaccccuucccc

SEQ ID NO: 3630750 - RNA, 15 nt, Human
ccaccccuuccccac

SEQ ID NO: 3630751 - RNA, 16 nt, Human
ccaccccuuccccacu

SEQ ID NO: 3630752 - RNA, 15 nt, Human
ccaccccuuccuguc

SEQ ID NO: 3630753 - RNA, 20 nt, Human
ccaccccuugcucucaaccc

SEQ ID NO: 3630754 - RNA, 17 nt, Human
ccacccgaugcugcuuu

SEQ ID NO: 3630755 - RNA, 19 nt, Human
ccacccguucugcuggccu

SEQ ID NO: 3630756 - RNA, 12 nt, Human
ccacccuaccug

SEQ ID NO: 3630757 - RNA, 21 nt, Human
ccacccuagccaaugucuccu

SEQ ID NO: 3630758 - RNA, 21 nt, Human
ccacccucacuggcucuccug

SEQ ID NO: 3630759 - RNA, 17 nt, Human
ccacccucagcaccccu

SEQ ID NO: 3630760 - RNA, 19 nt, Human
ccacccuccaccuuccauu

SEQ ID NO: 3630761 - RNA, 15 nt, Human
ccacccuccacucuc

SEQ ID NO: 3630762 - RNA, 22 nt, Human
ccacccucccagaccugccucu

SEQ ID NO: 3630763 - RNA, 15 nt, Human
ccacccuccccucuc

SEQ ID NO: 3630764 - RNA, 13 nt, Human
ccacccucccugg

SEQ ID NO: 3630765 - RNA, 15 nt, Human
ccacccucccuggag

SEQ ID NO: 3630766 - RNA, 13 nt, Human
ccacccuccuguc

SEQ ID NO: 3630767 - RNA, 14 nt, Human
ccacccuccugucu

SEQ ID NO: 3630768 - RNA, 15 nt, Human
ccacccuccugucuu

SEQ ID NO: 3630769 - RNA, 14 nt, Human
ccacccuccuuccc

SEQ ID NO: 3630770 - RNA, 18 nt, Human
ccacccugaaagcccuga

SEQ ID NO: 3630771 - RNA, 13 nt, Human
ccacccugagccg

SEQ ID NO: 3630772 - RNA, 23 nt, Human
ccacccugaggagucugaggucc

SEQ ID NO: 3630773 - RNA, 14 nt, Human
ccacccugcugcug

SEQ ID NO: 3630774 - RNA, 16 nt, Human
ccacccugcugcuggu

SEQ ID NO: 3630775 - RNA, 17 nt, Human
ccacccugcuuggccca

SEQ ID NO: 3630776 - RNA, 18 nt, Human
ccacccugcuuggcccag

SEQ ID NO: 3630777 - RNA, 20 nt, Human
ccacccuggccgaguccaag

SEQ ID NO: 3630778 - RNA, 21 nt, Human
ccacccuggccgaguccaagc

SEQ ID NO: 3630779 - RNA, 22 nt, Human
ccacccuggccgaguccaagcu

SEQ ID NO: 3630780 - RNA, 12 nt, Human
ccacccugggac

SEQ ID NO: 3630781 - RNA, 17 nt, Human
ccacccugggcccuggg

SEQ ID NO: 3630782 - RNA, 20 nt, Human
ccacccugggcccugggcug

SEQ ID NO: 3630783 - RNA, 18 nt, Human
ccacccugggcucugugg

SEQ ID NO: 3630784 - RNA, 19 nt, Human
ccacccugucccccagcuc

SEQ ID NO: 3630785 - RNA, 12 nt, Human
ccacccuguguu

SEQ ID NO: 3630786 - RNA, 16 nt, Human
ccacccuguuccugcu

SEQ ID NO: 3630787 - RNA, 16 nt, Human
ccacccuuggccuguc

SEQ ID NO: 3630788 - RNA, 12 nt, Human
ccacccuuucua

SEQ ID NO: 3630789 - RNA, 18 nt, Human
ccaccgaagccgccugug

SEQ ID NO: 3630790 - RNA, 22 nt, Human
ccaccgaaguggacuggccccu

SEQ ID NO: 3630791 - RNA, 23 nt, Human
ccaccgaaguggacuggccccug

SEQ ID NO: 3630792 - RNA, 15 nt, Human
ccaccgcagaaggaa

SEQ ID NO: 3630793 - RNA, 17 nt, Human
ccaccgcagacaggacc

SEQ ID NO: 3630794 - RNA, 18 nt, Human
ccaccgcagacaggacca

SEQ ID NO: 3630795 - RNA, 19 nt, Human
ccaccgcagacaggaccag

SEQ ID NO: 3630796 - RNA, 13 nt, Human
ccaccgcaugccc

SEQ ID NO: 3630797 - RNA, 16 nt, Human
ccaccgcaugcccccu

SEQ ID NO: 3630798 - RNA, 18 nt, Human
ccaccgcaugcccccucg

SEQ ID NO: 3630799 - RNA, 14 nt, Human
ccaccgccauggcu

SEQ ID NO: 3630800 - RNA, 17 nt, Human
ccaccgccuccuacagc

SEQ ID NO: 3630801 - RNA, 17 nt, Human
ccaccgccuugcccagc

SEQ ID NO: 3630802 - RNA, 19 nt, Human
ccaccgcugcuccacgcgc

SEQ ID NO: 3630803 - RNA, 19 nt, Human
ccaccgggccacuccuucc

SEQ ID NO: 3630804 - RNA, 19 nt, Human
ccaccgggcugggagcucu

SEQ ID NO: 3630805 - RNA, 22 nt, Human
ccaccgggcugggagcucugca

SEQ ID NO: 3630806 - RNA, 17 nt, Human
ccaccgguccagcuggc

SEQ ID NO: 3630807 - RNA, 17 nt, Human
ccaccgguugcuucugg

SEQ ID NO: 3630808 - RNA, 18 nt, Human
ccaccgguugcuucuggg

SEQ ID NO: 3630809 - RNA, 20 nt, Human
ccaccgguugcuucugggaa

SEQ ID NO: 3630810 - RNA, 14 nt, Human
ccaccguccgcccu

SEQ ID NO: 3630811 - RNA, 19 nt, Human
ccaccuaccuucaaagcug

SEQ ID NO: 3630812 - RNA, 23 nt, Human
ccaccuacuuuucuuuccucaga

SEQ ID NO: 3630813 - RNA, 13 nt, Human
ccaccuagcagca

SEQ ID NO: 3630814 - RNA, 14 nt, Human
ccaccuagcagcac

SEQ ID NO: 3630815 - RNA, 16 nt, Human
ccaccuaggccacucc

SEQ ID NO: 3630816 - RNA, 20 nt, Human
ccaccuaggccacuccucca

SEQ ID NO: 3630817 - RNA, 19 nt, Human
ccaccuaguggcuguccag

SEQ ID NO: 3630818 - RNA, 22 nt, Human
ccaccuaguggcuguccagugc

SEQ ID NO: 3630819 - RNA, 23 nt, Human
ccaccuaguggcuguccagugcc

SEQ ID NO: 3630820 - RNA, 14 nt, Human
ccaccucaaauuua

SEQ ID NO: 3630821 - RNA, 12 nt, Human
ccaccucacccc

SEQ ID NO: 3630822 - RNA, 15 nt, Human
ccaccucacuccugu

SEQ ID NO: 3630823 - RNA, 18 nt, Human
ccaccuccagcccgggag

SEQ ID NO: 3630824 - RNA, 20 nt, Human
ccaccuccaucuucuuugca

SEQ ID NO: 3630825 - RNA, 12 nt, Human
ccaccuccccac

SEQ ID NO: 3630826 - RNA, 16 nt, Human
ccaccuccccaggccg

SEQ ID NO: 3630827 - RNA, 14 nt, Human
ccaccuccccuugc

SEQ ID NO: 3630828 - RNA, 17 nt, Human
ccaccuccccuugccag

SEQ ID NO: 3630829 - RNA, 20 nt, Human
ccaccuccccuugccagcug

SEQ ID NO: 3630830 - RNA, 18 nt, Human
ccaccucccucaaccuca

SEQ ID NO: 3630831 - RNA, 15 nt, Human
ccaccucccugcaau

SEQ ID NO: 3630832 - RNA, 19 nt, Human
ccaccucccugcaauaaaa

SEQ ID NO: 3630833 - RNA, 21 nt, Human
ccaccucccugcaauaaaaug

SEQ ID NO: 3630834 - RNA, 13 nt, Human
ccaccucccugcc

SEQ ID NO: 3630835 - RNA, 19 nt, Human
ccaccuccuaaaaggccca

SEQ ID NO: 3630836 - RNA, 21 nt, Human
ccaccuccuaaaaggcccaga

SEQ ID NO: 3630837 - RNA, 14 nt, Human
ccaccuccugacac

SEQ ID NO: 3630838 - RNA, 21 nt, Human
ccaccuccugacacccuucuc

SEQ ID NO: 3630839 - RNA, 12 nt, Human
ccaccuccuucu

SEQ ID NO: 3630840 - RNA, 13 nt, Human
ccaccuccuucuc

SEQ ID NO: 3630841 - RNA, 18 nt, Human
ccaccuccuucucugucu

SEQ ID NO: 3630842 - RNA, 14 nt, Human
ccaccucuaacagc

SEQ ID NO: 3630843 - RNA, 18 nt, Human
ccaccucuaacagcacca

SEQ ID NO: 3630844 - RNA, 20 nt, Human
ccaccucuaacagcaccaaa

SEQ ID NO: 3630845 - RNA, 13 nt, Human
ccaccucucaaua

SEQ ID NO: 3630846 - RNA, 13 nt, Human
ccaccucuccaag

SEQ ID NO: 3630847 - RNA, 16 nt, Human
ccaccucucucacucc

SEQ ID NO: 3630848 - RNA, 19 nt, Human
ccaccucucucacuccuug

SEQ ID NO: 3630849 - RNA, 17 nt, Human
ccaccucucuccuuugc

SEQ ID NO: 3630850 - RNA, 18 nt, Human
ccaccucugucauuuguu

SEQ ID NO: 3630851 - RNA, 22 nt, Human
ccaccucugugaccucaggcac

SEQ ID NO: 3630852 - RNA, 13 nt, Human
ccaccucuuccug

SEQ ID NO: 3630853 - RNA, 19 nt, Human
ccaccucuucucuuccugu

SEQ ID NO: 3630854 - RNA, 17 nt, Human
ccaccugacacaccagg

SEQ ID NO: 3630855 - RNA, 20 nt, Human
ccaccugacacaccaggcgc

SEQ ID NO: 3630856 - RNA, 22 nt, Human
ccaccugaggugggcccaggac

SEQ ID NO: 3630857 - RNA, 15 nt, Human
ccaccugaguuccug

SEQ ID NO: 3630858 - RNA, 16 nt, Human
ccaccugaguuccuga

SEQ ID NO: 3630859 - RNA, 19 nt, Human
ccaccugcagggcugcccu

SEQ ID NO: 3630860 - RNA, 12 nt, Human
ccaccugccagg

SEQ ID NO: 3630861 - RNA, 13 nt, Human
ccaccugccaggg

SEQ ID NO: 3630862 - RNA, 14 nt, Human
ccaccugccaggga

SEQ ID NO: 3630863 - RNA, 15 nt, Human
ccaccugccagggac

SEQ ID NO: 3630864 - RNA, 14 nt, Human
ccaccugcccaacc

SEQ ID NO: 3630865 - RNA, 21 nt, Human
ccaccugcccccuucucccac

SEQ ID NO: 3630866 - RNA, 11 nt, Human
ccaccugccug

SEQ ID NO: 3630867 - RNA, 12 nt, Human
ccaccugccugc

SEQ ID NO: 3630868 - RNA, 15 nt, Human
ccaccugccuggccg

SEQ ID NO: 3630869 - RNA, 20 nt, Human
ccaccugccuggccggccag

SEQ ID NO: 3630870 - RNA, 22 nt, Human
ccaccugcuagugugaauuaaa

SEQ ID NO: 3630871 - RNA, 14 nt, Human
ccaccugcucccag

SEQ ID NO: 3630872 - RNA, 15 nt, Human
ccaccugcugagaga

SEQ ID NO: 3630873 - RNA, 23 nt, Human
ccaccugcugagagacccaagga

SEQ ID NO: 3630874 - RNA, 11 nt, Human
ccaccuggacc

SEQ ID NO: 3630875 - RNA, 18 nt, Human
ccaccuggaccccugcau

SEQ ID NO: 3630876 - RNA, 12 nt, Human
ccaccuggccac

SEQ ID NO: 3630877 - RNA, 22 nt, Human
ccauccacucuacccucccacc

SEQ ID NO: 3630878 - RNA, 18 nt, Human
ccauccacuuacauauau

SEQ ID NO: 3630879 - RNA, 15 nt, Human
ccauccauggccagc

SEQ ID NO: 3630880 - RNA, 18 nt, Human
ccauccauuaggccagca

SEQ ID NO: 3630881 - RNA, 22 nt, Human
ccaucccaaccagugccaagga

SEQ ID NO: 3630882 - RNA, 23 nt, Human
ccaucccaaccagugccaaggac

SEQ ID NO: 3630883 - RNA, 12 nt, Human
ccaucccacacc

SEQ ID NO: 3630884 - RNA, 14 nt, Human
ccaucccacacccu

SEQ ID NO: 3630885 - RNA, 14 nt, Human
ccaucccagccuug

SEQ ID NO: 3630886 - RNA, 23 nt, Human
ccaucccagccuuggcaucuaga

SEQ ID NO: 3630887 - RNA, 14 nt, Human
ccaucccaggacac

SEQ ID NO: 3630888 - RNA, 21 nt, Human
ccaucccaggacaccacaccc

SEQ ID NO: 3630889 - RNA, 24 nt, Human
ccaucccaggacaccacacccagc

SEQ ID NO: 3630890 - RNA, 19 nt, Human
ccaucccauaugccugggc

SEQ ID NO: 3630891 - RNA, 13 nt, Human
ccaucccauccca

SEQ ID NO: 3630892 - RNA, 15 nt, Human
ccaucccaucccauc

SEQ ID NO: 3630893 - RNA, 18 nt, Human
ccaucccaucccauccca

SEQ ID NO: 3630894 - RNA, 11 nt, Human
ccaucccauga

SEQ ID NO: 3630895 - RNA, 13 nt, Human
ccaucccaugcug

SEQ ID NO: 3630896 - RNA, 22 nt, Human
ccauccccauccuccagcuucu

SEQ ID NO: 3630897 - RNA, 15 nt, Human
ccaucccccugcccu

SEQ ID NO: 3630898 - RNA, 16 nt, Human
ccaucccgaaaaucuc

SEQ ID NO: 3630899 - RNA, 19 nt, Human
ccaucccgcucuuuuccua

SEQ ID NO: 3630900 - RNA, 14 nt, Human
ccaucccguuuaga

SEQ ID NO: 3630901 - RNA, 16 nt, Human
ccaucccuccccaguu

SEQ ID NO: 3630902 - RNA, 13 nt, Human
ccaucccucccuc

SEQ ID NO: 3630903 - RNA, 20 nt, Human
ccaucccugaaggccccgcc

SEQ ID NO: 3630904 - RNA, 12 nt, Human
ccaucccugccu

SEQ ID NO: 3630905 - RNA, 16 nt, Human
ccaucccugccugguc

SEQ ID NO: 3630906 - RNA, 17 nt, Human
ccaucccugccugguca

SEQ ID NO: 3630907 - RNA, 19 nt, Human
ccaucccuggcccccuccc

SEQ ID NO: 3630908 - RNA, 13 nt, Human
ccaucccugugag

SEQ ID NO: 3630909 - RNA, 19 nt, Human
ccaucccuuuuugaagugu

SEQ ID NO: 3630910 - RNA, 15 nt, Human
ccauccgccagggcc

SEQ ID NO: 3630911 - RNA, 20 nt, Human
ccauccgguuugccauguug

SEQ ID NO: 3630912 - RNA, 23 nt, Human
ccauccuaaucauccaaugcuca

SEQ ID NO: 3630913 - RNA, 18 nt, Human
ccauccuacccccugugc

SEQ ID NO: 3630914 - RNA, 22 nt, Human
ccauccuacccucgggcccacc

SEQ ID NO: 3630915 - RNA, 23 nt, Human
ccauccuacccucgggcccaccu

SEQ ID NO: 3630916 - RNA, 17 nt, Human
ccauccuaggcugacac

SEQ ID NO: 3630917 - RNA, 19 nt, Human
ccauccuauccacugggca

SEQ ID NO: 3630918 - RNA, 13 nt, Human
ccauccucaaaca

SEQ ID NO: 3630919 - RNA, 18 nt, Human
ccauccucaaacacugca

SEQ ID NO: 3630920 - RNA, 19 nt, Human
ccauccucaagaucauuca

SEQ ID NO: 3630921 - RNA, 14 nt, Human
ccauccuccagcag

SEQ ID NO: 3630922 - RNA, 15 nt, Human
ccauccuccagcuuc

SEQ ID NO: 3630923 - RNA, 13 nt, Human
ccauccuccccuu

SEQ ID NO: 3630924 - RNA, 15 nt, Human
ccauccuccccuucc

SEQ ID NO: 3630925 - RNA, 16 nt, Human
ccauccuccuccuucc

SEQ ID NO: 3630926 - RNA, 20 nt, Human
ccauccucuguacagagccc

SEQ ID NO: 3630927 - RNA, 16 nt, Human
ccauccugaggcucca

SEQ ID NO: 3630928 - RNA, 16 nt, Human
ccauccugcagccucc

SEQ ID NO: 3630929 - RNA, 13 nt, Human
ccauccuggccca

SEQ ID NO: 3630930 - RNA, 19 nt, Human
ccauccuggcccagggcau

SEQ ID NO: 3630931 - RNA, 14 nt, Human
ccauccuggcccau

SEQ ID NO: 3630932 - RNA, 16 nt, Human
ccauccuggcccauca

SEQ ID NO: 3630933 - RNA, 12 nt, Human
ccauccuggcua

SEQ ID NO: 3630934 - RNA, 13 nt, Human
ccauccuggcugc

SEQ ID NO: 3630935 - RNA, 17 nt, Human
ccauccugucccaccau

SEQ ID NO: 3630936 - RNA, 14 nt, Human
ccauccuguguguu

SEQ ID NO: 3630937 - RNA, 22 nt, Human
ccaucgccagcugaugacucaa

SEQ ID NO: 3630938 - RNA, 14 nt, Human
ccaucgcugugugu

SEQ ID NO: 3630939 - RNA, 23 nt, Human
ccaucgcuguguguuaguuccca

SEQ ID NO: 3630940 - RNA, 14 nt, Human
ccaucgucuucuug

SEQ ID NO: 3630941 - RNA, 16 nt, Human
ccaucuaaacugcccc

SEQ ID NO: 3630942 - RNA, 20 nt, Human
ccaucuaaauaccugcccug

SEQ ID NO: 3630943 - RNA, 14 nt, Human
ccaucuaccccugg

SEQ ID NO: 3630944 - RNA, 18 nt, Human
ccaucuaccccuggauga

SEQ ID NO: 3630945 - RNA, 13 nt, Human
ccaucuaccuucc

SEQ ID NO: 3630946 - RNA, 14 nt, Human
ccaucuaccuucca

SEQ ID NO: 3630947 - RNA, 14 nt, Human
ccaucuagccagcc

SEQ ID NO: 3630948 - RNA, 21 nt, Human
ccaucuaggggagccuugauu

SEQ ID NO: 3630949 - RNA, 18 nt, Human
ccaucucacacaugagca

SEQ ID NO: 3630950 - RNA, 17 nt, Human
ccaucucaccuccugcu

SEQ ID NO: 3630951 - RNA, 18 nt, Human
ccaucucaccuccugcug

SEQ ID NO: 3630952 - RNA, 19 nt, Human
ccaucucaccuccugcugg

SEQ ID NO: 3630953 - RNA, 21 nt, Human
ccaucucaggacacuuccgua

SEQ ID NO: 3630954 - RNA, 16 nt, Human
ccaucucaggccaccu

SEQ ID NO: 3630955 - RNA, 18 nt, Human
ccaucucaggccaccugc

SEQ ID NO: 3630956 - RNA, 20 nt, Human
ccaucucaugccccuggcug

SEQ ID NO: 3630957 - RNA, 16 nt, Human
ccaucuccaagaaugc

SEQ ID NO: 3630958 - RNA, 19 nt, Human
ccaucuccaagaaugcuga

SEQ ID NO: 3630959 - RNA, 21 nt, Human
ccaucuccaagaaugcugaaa

SEQ ID NO: 3630960 - RNA, 18 nt, Human
ccaucuccccucagcucg

SEQ ID NO: 3630961 - RNA, 23 nt, Human
ccaucuccccucagcucggcuca

SEQ ID NO: 3630962 - RNA, 24 nt, Human
ccaucucccucgaacccacacugc

SEQ ID NO: 3630963 - RNA, 13 nt, Human
ccaucucccugcc

SEQ ID NO: 3630964 - RNA, 16 nt, Human
ccaucucccugccugg

SEQ ID NO: 3630965 - RNA, 17 nt, Human
ccaucucccugccuggc

SEQ ID NO: 3630966 - RNA, 16 nt, Human
ccaucucccugcuuug

SEQ ID NO: 3630967 - RNA, 15 nt, Human
ccaucucccuggugc

SEQ ID NO: 3630968 - RNA, 20 nt, Human
ccaucuccuauaaucuguca

SEQ ID NO: 3630969 - RNA, 21 nt, Human
ccaucuccuauaaucugucaa

SEQ ID NO: 3630970 - RNA, 17 nt, Human
ccaucuccuuucaggga

SEQ ID NO: 3630971 - RNA, 18 nt, Human
ccaucuccuuucagggaa

SEQ ID NO: 3630972 - RNA, 19 nt, Human
ccaucuccuuucucuggua

SEQ ID NO: 3630973 - RNA, 14 nt, Human
ccaucucgccaccc

SEQ ID NO: 3630974 - RNA, 20 nt, Human
ccaucucgccaccccuccuu

SEQ ID NO: 3630975 - RNA, 22 nt, Human
ccaucucgccaccccuccuucc

SEQ ID NO: 3630976 - RNA, 23 nt, Human
ccaucucgccaccccuccuuccu

SEQ ID NO: 3630977 - RNA, 18 nt, Human
ccaucucgcucccuccca

SEQ ID NO: 3630978 - RNA, 13 nt, Human
ccaucucggagca

SEQ ID NO: 3630979 - RNA, 20 nt, Human
ccaucucggagcaucccgga

SEQ ID NO: 3630980 - RNA, 22 nt, Human
ccaucucggagcaucccggagg

SEQ ID NO: 3630981 - RNA, 20 nt, Human
ccaucucgggcacaggccca

SEQ ID NO: 3630982 - RNA, 18 nt, Human
ccaucucucauccuccag

SEQ ID NO: 3630983 - RNA, 14 nt, Human
ccaucucucccucc

SEQ ID NO: 3630984 - RNA, 16 nt, Human
ccaucucucuggcccu

SEQ ID NO: 3630985 - RNA, 14 nt, Human
ccaucucuuccuug

SEQ ID NO: 3630986 - RNA, 20 nt, Human
ccaucugcaccccuucucuc

SEQ ID NO: 3630987 - RNA, 15 nt, Human
ccaucugcauuccca

SEQ ID NO: 3630988 - RNA, 20 nt, Human
ccaucugcccaggggugccc

SEQ ID NO: 3630989 - RNA, 22 nt, Human
ccaucugcccaggggugccccc

SEQ ID NO: 3630990 - RNA, 17 nt, Human
ccaucugcccgccugcc

SEQ ID NO: 3630991 - RNA, 22 nt, Human
ccaucugcccgccugcccaccu

SEQ ID NO: 3630992 - RNA, 22 nt, Human
ccaucugcgugacaauaaaaca

SEQ ID NO: 3630993 - RNA, 22 nt, Human
ccaucugcugucuuuucuuugc

SEQ ID NO: 3630994 - RNA, 12 nt, Human
ccaucuggccug

SEQ ID NO: 3630995 - RNA, 16 nt, Human
ccaucugggagucccc

SEQ ID NO: 3630996 - RNA, 17 nt, Human
ccaucugggaguccccu

SEQ ID NO: 3630997 - RNA, 12 nt, Human
ccaucugggcuc

SEQ ID NO: 3630998 - RNA, 16 nt, Human
ccaucugggcuccucc

SEQ ID NO: 3630999 - RNA, 19 nt, Human
ccaucugucuaaagauaga

SEQ ID NO: 3631000 - RNA, 23 nt, Human
ccaucugugaaaggaaagaggga

SEQ ID NO: 3631001 - RNA, 12 nt, Human
ccaucugugaau

SEQ ID NO: 3631002 - RNA, 15 nt, Human
ccaucugugaauaag

SEQ ID NO: 3631003 - RNA, 12 nt, Human
ccaucugugcau

SEQ ID NO: 3631004 - RNA, 15 nt, Human
ccaucuucagcuucu

SEQ ID NO: 3631005 - RNA, 19 nt, Human
ccaucuugcccgcucaggc

SEQ ID NO: 3631006 - RNA, 21 nt, Human
ccaucuugcuucccuaaucua

SEQ ID NO: 3631007 - RNA, 14 nt, Human
ccaucuugguaaau

SEQ ID NO: 3631008 - RNA, 23 nt, Human
ccaugaaaacguuuuauuguguu

SEQ ID NO: 3631009 - RNA, 22 nt, Human
ccaugaaaaugcaacaacaugu

SEQ ID NO: 3631010 - RNA, 13 nt, Human
ccaugaaacaaag

SEQ ID NO: 3631011 - RNA, 16 nt, Human
ccaugaacacacugug

SEQ ID NO: 3631012 - RNA, 22 nt, Human
ccaugaacugucaagugugugu

SEQ ID NO: 3631013 - RNA, 14 nt, Human
ccaugaacuuuguc

SEQ ID NO: 3631014 - RNA, 17 nt, Human
ccaugaagacaggacag

SEQ ID NO: 3631015 - RNA, 19 nt, Human
ccaugaagacaggacagug

SEQ ID NO: 3631016 - RNA, 18 nt, Human
ccaugaagagauuuuuca

SEQ ID NO: 3631017 - RNA, 22 nt, Human
ccaugaagagauuuuucaugau

SEQ ID NO: 3631018 - RNA, 18 nt, Human
ccaugaagccacagccca

SEQ ID NO: 3631019 - RNA, 13 nt, Human
ccaugaagccuuu

SEQ ID NO: 3631020 - RNA, 20 nt, Human
ccaugacaauguuguagugu

SEQ ID NO: 3631021 - RNA, 12 nt, Human
ccaugacccacc

SEQ ID NO: 3631022 - RNA, 12 nt, Human
ccauuuugugaa

SEQ ID NO: 3631023 - RNA, 13 nt, Human
ccauuuugugaag

SEQ ID NO: 3631024 - RNA, 18 nt, Human
ccauuuugugaagcccug

SEQ ID NO: 3631025 - RNA, 15 nt, Human
ccauuuuucaaagca

SEQ ID NO: 3631026 - RNA, 23 nt, Human
ccauuuuucccaggcaaauaaaa

SEQ ID NO: 3631027 - RNA, 22 nt, Human
ccauuuuucuuccaggauggug

SEQ ID NO: 3631028 - RNA, 17 nt, Human
ccauuuuuuaaggaaac

SEQ ID NO: 3631029 - RNA, 14 nt, Human
ccauuuuuuauauu

SEQ ID NO: 3631030 - RNA, 16 nt, Human
ccauuuuuuauauuuc

SEQ ID NO: 3631031 - RNA, 17 nt, Human
ccauuuuuuauauuuca

SEQ ID NO: 3631032 - RNA, 20 nt, Human
cccaaaaacaaaucgcagcc

SEQ ID NO: 3631033 - RNA, 19 nt, Human
cccaaaacaccggguucca

SEQ ID NO: 3631034 - RNA, 21 nt, Human
cccaaaacaccggguuccagc

SEQ ID NO: 3631035 - RNA, 11 nt, Human
cccaaaaccaa

SEQ ID NO: 3631036 - RNA, 14 nt, Human
cccaaaagauugcu

SEQ ID NO: 3631037 - RNA, 22 nt, Human
cccaaaagucaaaaggugccug

SEQ ID NO: 3631038 - RNA, 23 nt, Human
cccaaaagucaaaaggugccugu

SEQ ID NO: 3631039 - RNA, 15 nt, Human
cccaaaaugaagauu

SEQ ID NO: 3631040 - RNA, 19 nt, Human
cccaaacaccuuccagcuc

SEQ ID NO: 3631041 - RNA, 19 nt, Human
cccaaacccaagugccuuc

SEQ ID NO: 3631042 - RNA, 15 nt, Human
cccaaaccuggagau

SEQ ID NO: 3631043 - RNA, 15 nt, Human
cccaaaccuuucccc

SEQ ID NO: 3631044 - RNA, 22 nt, Human
cccaaacgcccuuuccuccuca

SEQ ID NO: 3631045 - RNA, 21 nt, Human
cccaaagagcacaaacauuuu

SEQ ID NO: 3631046 - RNA, 15 nt, Human
cccaaagagcugccu

SEQ ID NO: 3631047 - RNA, 12 nt, Human
cccaaagaugca

SEQ ID NO: 3631048 - RNA, 15 nt, Human
cccaaagaugcagcc

SEQ ID NO: 3631049 - RNA, 13 nt, Human
cccaaagcaagca

SEQ ID NO: 3631050 - RNA, 16 nt, Human
cccaaagcagugcaug

SEQ ID NO: 3631051 - RNA, 14 nt, Human
cccaaagcuuuccu

SEQ ID NO: 3631052 - RNA, 23 nt, Human
cccaaaggaagcuuucucugcuu

SEQ ID NO: 3631053 - RNA, 18 nt, Human
cccaaaggacgcacugag

SEQ ID NO: 3631054 - RNA, 16 nt, Human
cccaaagucuguguga

SEQ ID NO: 3631055 - RNA, 20 nt, Human
cccaaagugcugagauuaca

SEQ ID NO: 3631056 - RNA, 15 nt, Human
cccaaagugcuggga

SEQ ID NO: 3631057 - RNA, 21 nt, Human
cccaaagugcuuccaaggcag

SEQ ID NO: 3631058 - RNA, 21 nt, Human
cccaaagugguauagaaaugc

SEQ ID NO: 3631059 - RNA, 17 nt, Human
cccaaaugugugcccag

SEQ ID NO: 3631060 - RNA, 16 nt, Human
cccaaauuugauugau

SEQ ID NO: 3631061 - RNA, 19 nt, Human
cccaaauuugauugauuug

SEQ ID NO: 3631062 - RNA, 15 nt, Human
cccaacaacauccau

SEQ ID NO: 3631063 - RNA, 13 nt, Human
cccaacacaaaga

SEQ ID NO: 3631064 - RNA, 17 nt, Human
cccaacaccagccccug

SEQ ID NO: 3631065 - RNA, 20 nt, Human
cccaacaccagccccugccc

SEQ ID NO: 3631066 - RNA, 15 nt, Human
cccaacacugccagc

SEQ ID NO: 3631067 - RNA, 16 nt, Human
cccaacacugccagca

SEQ ID NO: 3631068 - RNA, 15 nt, Human
cccaacacugugccc

SEQ ID NO: 3631069 - RNA, 16 nt, Human
cccaacacugugcccu

SEQ ID NO: 3631070 - RNA, 16 nt, Human
cccaacaggaggacaa

SEQ ID NO: 3631071 - RNA, 20 nt, Human
cccaacaggaggacaauuca

SEQ ID NO: 3631072 - RNA, 14 nt, Human
cccaacauauaaaa

SEQ ID NO: 3631073 - RNA, 18 nt, Human
cccaaccagugccaagga

SEQ ID NO: 3631074 - RNA, 12 nt, Human
cccaacccccag

SEQ ID NO: 3631075 - RNA, 16 nt, Human
cccaaccccugaggaa

SEQ ID NO: 3631076 - RNA, 19 nt, Human
cccaacccguggaggcugc

SEQ ID NO: 3631077 - RNA, 21 nt, Human
cccaacccguggaggcugcuc

SEQ ID NO: 3631078 - RNA, 15 nt, Human
cccaacccugccccu

SEQ ID NO: 3631079 - RNA, 14 nt, Human
cccaacccugucug

SEQ ID NO: 3631080 - RNA, 22 nt, Human
cccaaccggggagcccccgccc

SEQ ID NO: 3631081 - RNA, 19 nt, Human
cccaaccucagggcuccca

SEQ ID NO: 3631082 - RNA, 20 nt, Human
cccaaccucagggcucccag

SEQ ID NO: 3631083 - RNA, 16 nt, Human
cccaaccuccugaccu

SEQ ID NO: 3631084 - RNA, 23 nt, Human
cccaaccucuuccuccugacacc

SEQ ID NO: 3631085 - RNA, 13 nt, Human
cccaaccugcucu

SEQ ID NO: 3631086 - RNA, 21 nt, Human
cccaaccugcucuccucuucu

SEQ ID NO: 3631087 - RNA, 14 nt, Human
cccaaccugcugaa

SEQ ID NO: 3631088 - RNA, 17 nt, Human
cccaaccuuucccucac

SEQ ID NO: 3631089 - RNA, 16 nt, Human
cccaacgcacaggaaa

SEQ ID NO: 3631090 - RNA, 16 nt, Human
cccaacggcccugcag

SEQ ID NO: 3631091 - RNA, 22 nt, Human
cccaacggcccugcagccagcu

SEQ ID NO: 3631092 - RNA, 20 nt, Human
cccaacuaauuuuuguauuu

SEQ ID NO: 3631093 - RNA, 23 nt, Human
cccaacuacccccagcugugcuu

SEQ ID NO: 3631094 - RNA, 15 nt, Human
cccaacucaccccag

SEQ ID NO: 3631095 - RNA, 16 nt, Human
cccaacucuagcuggg

SEQ ID NO: 3631096 - RNA, 14 nt, Human
cccaacucugagcc

SEQ ID NO: 3631097 - RNA, 15 nt, Human
cccaacucugagccc

SEQ ID NO: 3631098 - RNA, 16 nt, Human
cccaacucugagccca

SEQ ID NO: 3631099 - RNA, 17 nt, Human
cccaacucugagcccau

SEQ ID NO: 3631100 - RNA, 23 nt, Human
cccaacucuugcacagucacugc

SEQ ID NO: 3631101 - RNA, 13 nt, Human
cccaacugucuuu

SEQ ID NO: 3631102 - RNA, 20 nt, Human
cccaacuuuguggaugucuu

SEQ ID NO: 3631103 - RNA, 19 nt, Human
cccaagaaaggaaaccuuu

SEQ ID NO: 3631104 - RNA, 21 nt, Human
cccaagaauagaugcugacug

SEQ ID NO: 3631105 - RNA, 20 nt, Human
cccaagaaugcaagauuuca

SEQ ID NO: 3631106 - RNA, 18 nt, Human
cccaagacagaugcccca

SEQ ID NO: 3631107 - RNA, 21 nt, Human
cccaagagaaggggaagcacu

SEQ ID NO: 3631108 - RNA, 15 nt, Human
cccaagagaugaaga

SEQ ID NO: 3631109 - RNA, 20 nt, Human
cccaagagcaucaugccucu

SEQ ID NO: 3631110 - RNA, 21 nt, Human
cccaagagcaucaugccucug

SEQ ID NO: 3631111 - RNA, 22 nt, Human
cccaagagcaucaugccucuga

SEQ ID NO: 3631112 - RNA, 23 nt, Human
cccaagauucacaccugacucug

SEQ ID NO: 3631113 - RNA, 17 nt, Human
cccaagauugagcucuc

SEQ ID NO: 3631114 - RNA, 16 nt, Human
cccaagcccaggccac

SEQ ID NO: 3631115 - RNA, 20 nt, Human
cccaagcccccuccuugucu

SEQ ID NO: 3631116 - RNA, 12 nt, Human
cccaagcucaga

SEQ ID NO: 3631117 - RNA, 12 nt, Human
cccaagcuccuc

SEQ ID NO: 3631118 - RNA, 14 nt, Human
cccaagcuccuccu

SEQ ID NO: 3631119 - RNA, 13 nt, Human
cccaagcugggcc

SEQ ID NO: 3631120 - RNA, 14 nt, Human
cccaagcugggccc

SEQ ID NO: 3631121 - RNA, 18 nt, Human
cccaagcugggccccagc

SEQ ID NO: 3631122 - RNA, 22 nt, Human
cccaagcuuggcagccgagcuc

SEQ ID NO: 3631123 - RNA, 14 nt, Human
cccaaggaaagccc

SEQ ID NO: 3631124 - RNA, 16 nt, Human
cccaaggacugaggga

SEQ ID NO: 3631125 - RNA, 15 nt, Human
cccaaggcggccccu

SEQ ID NO: 3631126 - RNA, 22 nt, Human
cccaaggcguccgcgcgccagc

SEQ ID NO: 3631127 - RNA, 19 nt, Human
cccaaggcugcgucuggag

SEQ ID NO: 3631128 - RNA, 16 nt, Human
cccaaggcuggcaggu

SEQ ID NO: 3631129 - RNA, 16 nt, Human
cccaagggaggcugcu

SEQ ID NO: 3631130 - RNA, 13 nt, Human
cccaagggaucug

SEQ ID NO: 3631131 - RNA, 22 nt, Human
cccaagggcaaaauucccaggg

SEQ ID NO: 3631132 - RNA, 16 nt, Human
cccaagggccuggccu

SEQ ID NO: 3631133 - RNA, 23 nt, Human
cccaagggccuggccugagcugg

SEQ ID NO: 3631134 - RNA, 18 nt, Human
cccaaggggccugagcag

SEQ ID NO: 3631135 - RNA, 17 nt, Human
cccaagggguuucuguu

SEQ ID NO: 3631136 - RNA, 22 nt, Human
cccaagguuacuuaauucaacu

SEQ ID NO: 3631137 - RNA, 19 nt, Human
cccaagguuggagcccagg

SEQ ID NO: 3631138 - RNA, 20 nt, Human
cccaaguagucugcucacag

SEQ ID NO: 3631139 - RNA, 13 nt, Human
cccaagugccaaa

SEQ ID NO: 3631140 - RNA, 15 nt, Human
cccaagugccagucu

SEQ ID NO: 3631141 - RNA, 14 nt, Human
cccaagugggggca

SEQ ID NO: 3631142 - RNA, 19 nt, Human
cccaagugggggcagaggg

SEQ ID NO: 3631143 - RNA, 18 nt, Human
cccaaguggugaaugaca

SEQ ID NO: 3631144 - RNA, 15 nt, Human
cccaaguggugccua

SEQ ID NO: 3631145 - RNA, 20 nt, Human
cccaagugguuuccacaugc

SEQ ID NO: 3631146 - RNA, 21 nt, Human
cccaagugguuuccacaugcu

SEQ ID NO: 3631147 - RNA, 15 nt, Human
cccaagugugaacaa

SEQ ID NO: 3631148 - RNA, 19 nt, Human
cccaaguucaugcagcugu

SEQ ID NO: 3631149 - RNA, 17 nt, Human
cccaaguuuugugaaau

SEQ ID NO: 3631150 - RNA, 19 nt, Human
cccaauaagauacaucaca

SEQ ID NO: 3631151 - RNA, 22 nt, Human
cccaauauccucgcucccggga

SEQ ID NO: 3631152 - RNA, 18 nt, Human
cccaauaucuugcuugaa

SEQ ID NO: 3631153 - RNA, 17 nt, Human
cccaauauuauaauuuu

SEQ ID NO: 3631154 - RNA, 15 nt, Human
cccaaucagcacuga

SEQ ID NO: 3631155 - RNA, 22 nt, Human
cccaauccagguacgcacagac

SEQ ID NO: 3631156 - RNA, 23 nt, Human
cccaauccagguacgcacagaca

SEQ ID NO: 3631157 - RNA, 24 nt, Human
cccaauccagguacgcacagacag

SEQ ID NO: 3631158 - RNA, 16 nt, Human
cccaauccaucagugc

SEQ ID NO: 3631159 - RNA, 19 nt, Human
cccaaucccagcuaccuca

SEQ ID NO: 3631160 - RNA, 12 nt, Human
cccaaucccuga

SEQ ID NO: 3631161 - RNA, 19 nt, Human
cccaaugagacuugccuuc

SEQ ID NO: 3631162 - RNA, 20 nt, Human
cccaaugcacuuuguucugg

SEQ ID NO: 3631163 - RNA, 15 nt, Human
cccaaugcugauguc

SEQ ID NO: 3631164 - RNA, 17 nt, Human
cccaaugguguuuuucu

SEQ ID NO: 3631165 - RNA, 11 nt, Human
cccaauuuccc

SEQ ID NO: 3631166 - RNA, 18 nt, Human
cccguggccaucccugug

SEQ ID NO: 3631167 - RNA, 19 nt, Human
cccguggccaucccuguga

SEQ ID NO: 3631168 - RNA, 13 nt, Human
cccguggccccag

SEQ ID NO: 3631169 - RNA, 18 nt, Human
cccguggccccagccugg

SEQ ID NO: 3631170 - RNA, 20 nt, Human
cccguggccccagccuggcc

SEQ ID NO: 3631171 - RNA, 23 nt, Human
cccguggccccagccuggcccag

SEQ ID NO: 3631172 - RNA, 14 nt, Human
cccguggggcaggg

SEQ ID NO: 3631173 - RNA, 15 nt, Human
cccgugggguuccuc

SEQ ID NO: 3631174 - RNA, 19 nt, Human
cccguguccccggccucag

SEQ ID NO: 3631175 - RNA, 17 nt, Human
cccguucugcuggccug

SEQ ID NO: 3631176 - RNA, 19 nt, Human
cccguucugcuggccugga

SEQ ID NO: 3631177 - RNA, 22 nt, Human
cccguugucucccuggcccuca

SEQ ID NO: 3631178 - RNA, 16 nt, Human
cccguuuuccccauga

SEQ ID NO: 3631179 - RNA, 18 nt, Human
cccguuuuccccaugaca

SEQ ID NO: 3631180 - RNA, 13 nt, Human
cccguuuugucac

SEQ ID NO: 3631181 - RNA, 14 nt, Human
cccuaaaagcacac

SEQ ID NO: 3631182 - RNA, 13 nt, Human
cccuaaagccuca

SEQ ID NO: 3631183 - RNA, 19 nt, Human
cccuaaauaauaaaaauaa

SEQ ID NO: 3631184 - RNA, 15 nt, Human
cccuaaaucugagga

SEQ ID NO: 3631185 - RNA, 19 nt, Human
cccuaagacuccucggccu

SEQ ID NO: 3631186 - RNA, 18 nt, Human
cccuaagagagcaccugg

SEQ ID NO: 3631187 - RNA, 15 nt, Human
cccuaagccagccug

SEQ ID NO: 3631188 - RNA, 16 nt, Human
cccuaagccagccugg

SEQ ID NO: 3631189 - RNA, 15 nt, Human
cccuaaucuaugguc

SEQ ID NO: 3631190 - RNA, 16 nt, Human
cccuaauucagccaug

SEQ ID NO: 3631191 - RNA, 19 nt, Human
cccuaauuuaacccagcuc

SEQ ID NO: 3631192 - RNA, 13 nt, Human
cccuacagagcug

SEQ ID NO: 3631193 - RNA, 19 nt, Human
cccuaccaccuccccagcc

SEQ ID NO: 3631194 - RNA, 23 nt, Human
cccuaccagcgcccgcugggcug

SEQ ID NO: 3631195 - RNA, 21 nt, Human
cccuaccccacaccaggccgu

SEQ ID NO: 3631196 - RNA, 23 nt, Human
cccuaccccuggcuguacugcuc

SEQ ID NO: 3631197 - RNA, 14 nt, Human
cccuacccucuaga

SEQ ID NO: 3631198 - RNA, 14 nt, Human
cccuacccuggacu

SEQ ID NO: 3631199 - RNA, 18 nt, Human
cccuaccgagucucuucu

SEQ ID NO: 3631200 - RNA, 14 nt, Human
cccuaccugcccca

SEQ ID NO: 3631201 - RNA, 14 nt, Human
cccuaccugugccu

SEQ ID NO: 3631202 - RNA, 18 nt, Human
cccuacucccugcagaug

SEQ ID NO: 3631203 - RNA, 19 nt, Human
cccuacucccugcagaugc

SEQ ID NO: 3631204 - RNA, 21 nt, Human
cccuacucccugcagaugcca

SEQ ID NO: 3631205 - RNA, 14 nt, Human
cccuacugcuguga

SEQ ID NO: 3631206 - RNA, 18 nt, Human
cccuacuucuuuugcucu

SEQ ID NO: 3631207 - RNA, 19 nt, Human
cccuacuucuuuugcucuu

SEQ ID NO: 3631208 - RNA, 18 nt, Human
cccuagaaacccaagcuc

SEQ ID NO: 3631209 - RNA, 17 nt, Human
cccuagaaacuuccaaa

SEQ ID NO: 3631210 - RNA, 19 nt, Human
cccuagaaucagccuaggg

SEQ ID NO: 3631211 - RNA, 20 nt, Human
cccuagagccugccuggagc

SEQ ID NO: 3631212 - RNA, 19 nt, Human
cccuagaggguuccuguag

SEQ ID NO: 3631213 - RNA, 14 nt, Human
cccuagagucccag

SEQ ID NO: 3631214 - RNA, 18 nt, Human
cccuagauaguuuauuau

SEQ ID NO: 3631215 - RNA, 20 nt, Human
cccuagcagcccacccugcu

SEQ ID NO: 3631216 - RNA, 20 nt, Human
cccuagccaaugucuccucc

SEQ ID NO: 3631217 - RNA, 17 nt, Human
cccuagccagcacuugu

SEQ ID NO: 3631218 - RNA, 20 nt, Human
cccuagcggcagaaaggaaa

SEQ ID NO: 3631219 - RNA, 21 nt, Human
cccuagcuuuauauauggaca

SEQ ID NO: 3631220 - RNA, 14 nt, Human
cccuaggagaccaa

SEQ ID NO: 3631221 - RNA, 20 nt, Human
cccuaggaguauauuuccgc

SEQ ID NO: 3631222 - RNA, 21 nt, Human
cccuaggaguauauuuccgca

SEQ ID NO: 3631223 - RNA, 13 nt, Human
cccuagggcuggg

SEQ ID NO: 3631224 - RNA, 17 nt, Human
cccuagggcugggugua

SEQ ID NO: 3631225 - RNA, 22 nt, Human
cccuaggucagcuugcugcccu

SEQ ID NO: 3631226 - RNA, 22 nt, Human
cccuagguguuuuguucaccau

SEQ ID NO: 3631227 - RNA, 15 nt, Human
cccuagguucccugu

SEQ ID NO: 3631228 - RNA, 18 nt, Human
cccuagguucccuguucu

SEQ ID NO: 3631229 - RNA, 19 nt, Human
cccuagguucccuguucuu

SEQ ID NO: 3631230 - RNA, 23 nt, Human
cccuagguucccuguucuuccuc

SEQ ID NO: 3631231 - RNA, 17 nt, Human
cccuaguaagugccuuc

SEQ ID NO: 3631232 - RNA, 19 nt, Human
cccuaguucuaccucaggc

SEQ ID NO: 3631233 - RNA, 14 nt, Human
cccuauccacccag

SEQ ID NO: 3631234 - RNA, 19 nt, Human
cccuauccacccagcccau

SEQ ID NO: 3631235 - RNA, 22 nt, Human
cccuauccuacuuccccuuccu

SEQ ID NO: 3631236 - RNA, 17 nt, Human
cccuaucuaacccuccc

SEQ ID NO: 3631237 - RNA, 14 nt, Human
cccuaucuccugac

SEQ ID NO: 3631238 - RNA, 22 nt, Human
cccuaucuccugacagaaggug

SEQ ID NO: 3631239 - RNA, 14 nt, Human
cccuaucuguauuc

SEQ ID NO: 3631240 - RNA, 22 nt, Human
cccuaugaaguaaagaacugca

SEQ ID NO: 3631241 - RNA, 16 nt, Human
cccuauggaugugggg

SEQ ID NO: 3631242 - RNA, 13 nt, Human
cccuauuaaccua

SEQ ID NO: 3631243 - RNA, 14 nt, Human
cccuauuuugccau

SEQ ID NO: 3631244 - RNA, 20 nt, Human
cccuauuuuucucuccuguc

SEQ ID NO: 3631245 - RNA, 18 nt, Human
cccucaaaugacccaaag

SEQ ID NO: 3631246 - RNA, 18 nt, Human
cccucaacaagggagaga

SEQ ID NO: 3631247 - RNA, 18 nt, Human
cccucaaccucauccucu

SEQ ID NO: 3631248 - RNA, 20 nt, Human
cccucaagccaauccccucc

SEQ ID NO: 3631249 - RNA, 21 nt, Human
cccucaagccaauccccuccu

SEQ ID NO: 3631250 - RNA, 22 nt, Human
cccucaaggacaaagucuccag

SEQ ID NO: 3631251 - RNA, 19 nt, Human
cccucaaggccucccacag

SEQ ID NO: 3631252 - RNA, 19 nt, Human
cccucaauucccccuggcc

SEQ ID NO: 3631253 - RNA, 15 nt, Human
cccucacacacccug

SEQ ID NO: 3631254 - RNA, 17 nt, Human
cccucacacauccagac

SEQ ID NO: 3631255 - RNA, 12 nt, Human
cccucacacugg

SEQ ID NO: 3631256 - RNA, 14 nt, Human
cccucacacuggga

SEQ ID NO: 3631257 - RNA, 13 nt, Human
cccucacauuccu

SEQ ID NO: 3631258 - RNA, 14 nt, Human
cccucaccaggggc

SEQ ID NO: 3631259 - RNA, 11 nt, Human
cccucacccau

SEQ ID NO: 3631260 - RNA, 18 nt, Human
cccucacccccucccacc

SEQ ID NO: 3631261 - RNA, 17 nt, Human
cccucacccccuccuuc

SEQ ID NO: 3631262 - RNA, 13 nt, Human
cccucaccccugc

SEQ ID NO: 3631263 - RNA, 16 nt, Human
cccucacccuggggcu

SEQ ID NO: 3631264 - RNA, 14 nt, Human
cccucaccuccucu

SEQ ID NO: 3631265 - RNA, 14 nt, Human
cccucaccugggca

SEQ ID NO: 3631266 - RNA, 21 nt, Human
cccucaccuuggcaccagaca

SEQ ID NO: 3631267 - RNA, 15 nt, Human
cccucacucucuaca

SEQ ID NO: 3631268 - RNA, 16 nt, Human
cccucacucugccagg

SEQ ID NO: 3631269 - RNA, 17 nt, Human
cccucacucugccaggg

SEQ ID NO: 3631270 - RNA, 18 nt, Human
cccucacucugccagggc

SEQ ID NO: 3631271 - RNA, 20 nt, Human
cccucacucugccagggcag

SEQ ID NO: 3631272 - RNA, 16 nt, Human
cccucacucuggccuc

SEQ ID NO: 3631273 - RNA, 17 nt, Human
cccucagaaacacuggg

SEQ ID NO: 3631274 - RNA, 22 nt, Human
cccucagaacccuuggcuugcc

SEQ ID NO: 3631275 - RNA, 21 nt, Human
cccucagaaggucuguuuuga

SEQ ID NO: 3631276 - RNA, 13 nt, Human
cccucagagccac

SEQ ID NO: 3631277 - RNA, 15 nt, Human
cccucagagugcaag

SEQ ID NO: 3631278 - RNA, 16 nt, Human
cccucagcaccccuuc

SEQ ID NO: 3631279 - RNA, 18 nt, Human
cccucagcaccccuucca

SEQ ID NO: 3631280 - RNA, 20 nt, Human
cccucagccccaccccaggu

SEQ ID NO: 3631281 - RNA, 17 nt, Human
cccucaggacugcaaca

SEQ ID NO: 3631282 - RNA, 20 nt, Human
cccucaggcauaggccuggg

SEQ ID NO: 3631283 - RNA, 23 nt, Human
cccucaggcauaggccugggugc

SEQ ID NO: 3631284 - RNA, 12 nt, Human
cccucagggauc

SEQ ID NO: 3631285 - RNA, 16 nt, Human
cccucagggcaaagcc

SEQ ID NO: 3631286 - RNA, 15 nt, Human
cccucaggggaaaac

SEQ ID NO: 3631287 - RNA, 15 nt, Human
cccucagggucccug

SEQ ID NO: 3631288 - RNA, 17 nt, Human
cccucagggucccuggu

SEQ ID NO: 3631289 - RNA, 19 nt, Human
cccucaggucccuugguca

SEQ ID NO: 3631290 - RNA, 19 nt, Human
cccucaguagucccugcac

SEQ ID NO: 3631291 - RNA, 18 nt, Human
cccucaguugugcagcuu

SEQ ID NO: 3631292 - RNA, 17 nt, Human
cccucaucuaugaggaa

SEQ ID NO: 3631293 - RNA, 13 nt, Human
cccucaucucucc

SEQ ID NO: 3631294 - RNA, 17 nt, Human
cccucaucucucugccc

SEQ ID NO: 3631295 - RNA, 21 nt, Human
cccucaucuugaagggcccag

SEQ ID NO: 3631296 - RNA, 21 nt, Human
cccucaucuuucaucaaucau

SEQ ID NO: 3631297 - RNA, 14 nt, Human
cccucaugcugcca

SEQ ID NO: 3631298 - RNA, 12 nt, Human
cccucaugcugu

SEQ ID NO: 3631299 - RNA, 17 nt, Human
cccucauucaggaaaac

SEQ ID NO: 3631300 - RNA, 22 nt, Human
cccucauuccaccuucccaugc

SEQ ID NO: 3631301 - RNA, 19 nt, Human
cccucauuggcucuugaac

SEQ ID NO: 3631302 - RNA, 11 nt, Human
cccucauuuuu

SEQ ID NO: 3631303 - RNA, 18 nt, Human
cccuccaaaagcacuuac

SEQ ID NO: 3631304 - RNA, 16 nt, Human
cccuccaaggccaggc

SEQ ID NO: 3631305 - RNA, 15 nt, Human
cccuccaauccugcc

SEQ ID NO: 3631306 - RNA, 13 nt, Human
cccuccacaccug

SEQ ID NO: 3631307 - RNA, 16 nt, Human
cccuccacagccgcag

SEQ ID NO: 3631308 - RNA, 15 nt, Human
cccuccaccccagga

SEQ ID NO: 3631309 - RNA, 16 nt, Human
cccuccacccuguccc

SEQ ID NO: 3631310 - RNA, 17 nt, Human
cccuccaccucccugca

SEQ ID NO: 3631311 - RNA, 16 nt, Human
cccugccaccugucug

SEQ ID NO: 3631312 - RNA, 17 nt, Human
cccugccaccugucugu

SEQ ID NO: 3631313 - RNA, 18 nt, Human
cccugccacucacuaggc

SEQ ID NO: 3631314 - RNA, 12 nt, Human
cccugccagcuc

SEQ ID NO: 3631315 - RNA, 19 nt, Human
cccugccaggcacaggcag

SEQ ID NO: 3631316 - RNA, 22 nt, Human
cccugccaggcacaggcagggc

SEQ ID NO: 3631317 - RNA, 14 nt, Human
cccugccagugccu

SEQ ID NO: 3631318 - RNA, 14 nt, Human
cccugccaucuucc

SEQ ID NO: 3631319 - RNA, 16 nt, Human
cccugccaucuuccca

SEQ ID NO: 3631320 - RNA, 19 nt, Human
cccugccaucuucccagca

SEQ ID NO: 3631321 - RNA, 18 nt, Human
cccugcccacaccuccug

SEQ ID NO: 3631322 - RNA, 19 nt, Human
cccugcccacaccuccugg

SEQ ID NO: 3631323 - RNA, 17 nt, Human
cccugcccaccuggccu

SEQ ID NO: 3631324 - RNA, 21 nt, Human
cccugcccagaucagccagaa

SEQ ID NO: 3631325 - RNA, 10 nt, Human
cccugcccau

SEQ ID NO: 3631326 - RNA, 12 nt, Human
cccugccccaaa

SEQ ID NO: 3631327 - RNA, 18 nt, Human
cccugccccacaccuccu

SEQ ID NO: 3631328 - RNA, 13 nt, Human
cccugccccagcc

SEQ ID NO: 3631329 - RNA, 15 nt, Human
cccugccccagccca

SEQ ID NO: 3631330 - RNA, 13 nt, Human
cccugcccccagg

SEQ ID NO: 3631331 - RNA, 18 nt, Human
cccugcccccaggacugg

SEQ ID NO: 3631332 - RNA, 20 nt, Human
cccugcccccaggacugggc

SEQ ID NO: 3631333 - RNA, 23 nt, Human
cccugcccccaggacugggccac

SEQ ID NO: 3631334 - RNA, 16 nt, Human
cccugccccccagccu

SEQ ID NO: 3631335 - RNA, 23 nt, Human
cccugcccccuccccuucacacc

SEQ ID NO: 3631336 - RNA, 14 nt, Human
cccugcccccugca

SEQ ID NO: 3631337 - RNA, 16 nt, Human
cccugcccccugcagg

SEQ ID NO: 3631338 - RNA, 19 nt, Human
cccugcccccugcaggaag

SEQ ID NO: 3631339 - RNA, 21 nt, Human
cccugccccgucaccaucuca

SEQ ID NO: 3631340 - RNA, 17 nt, Human
cccugccccugccccgu

SEQ ID NO: 3631341 - RNA, 14 nt, Human
cccugcccggcugc

SEQ ID NO: 3631342 - RNA, 17 nt, Human
cccugcccuagcuccac

SEQ ID NO: 3631343 - RNA, 10 nt, Human
cccugcccuc

SEQ ID NO: 3631344 - RNA, 18 nt, Human
cccugcccucaucucucu

SEQ ID NO: 3631345 - RNA, 20 nt, Human
cccugcccucguggccagcc

SEQ ID NO: 3631346 - RNA, 17 nt, Human
cccugcccugaggaagg

SEQ ID NO: 3631347 - RNA, 11 nt, Human
cccugcccugc

SEQ ID NO: 3631348 - RNA, 12 nt, Human
cccugcccugca

SEQ ID NO: 3631349 - RNA, 18 nt, Human
cccugcccugccaccugu

SEQ ID NO: 3631350 - RNA, 15 nt, Human
cccugcccugugggc

SEQ ID NO: 3631351 - RNA, 19 nt, Human
cccugcccuucagcauccu

SEQ ID NO: 3631352 - RNA, 15 nt, Human
cccugccgucaccac

SEQ ID NO: 3631353 - RNA, 17 nt, Human
cccugccgucaccacca

SEQ ID NO: 3631354 - RNA, 22 nt, Human
cccugccgucaccaccaccccu

SEQ ID NO: 3631355 - RNA, 15 nt, Human
cccugccucaccucu

SEQ ID NO: 3631356 - RNA, 19 nt, Human
cccugccuccacccucuga

SEQ ID NO: 3631357 - RNA, 20 nt, Human
cccugccuccacccucugag

SEQ ID NO: 3631358 - RNA, 12 nt, Human
cccugccuccau

SEQ ID NO: 3631359 - RNA, 11 nt, Human
cccugccuccu

SEQ ID NO: 3631360 - RNA, 14 nt, Human
cccugccuccuuug

SEQ ID NO: 3631361 - RNA, 11 nt, Human
cccugccucuc

SEQ ID NO: 3631362 - RNA, 12 nt, Human
cccugccucuca

SEQ ID NO: 3631363 - RNA, 22 nt, Human
cccugccucucaucaacugaau

SEQ ID NO: 3631364 - RNA, 19 nt, Human
cccugccucucccaggcag

SEQ ID NO: 3631365 - RNA, 14 nt, Human
cccugccucuccgc

SEQ ID NO: 3631366 - RNA, 16 nt, Human
cccugccucuccgccc

SEQ ID NO: 3631367 - RNA, 20 nt, Human
cccugccugagggccccucu

SEQ ID NO: 3631368 - RNA, 13 nt, Human
cccugccugcccu

SEQ ID NO: 3631369 - RNA, 23 nt, Human
cccugccugcccugucaggaggc

SEQ ID NO: 3631370 - RNA, 10 nt, Human
cccugccugg

SEQ ID NO: 3631371 - RNA, 12 nt, Human
cccugccuggac

SEQ ID NO: 3631372 - RNA, 13 nt, Human
cccugccuggacc

SEQ ID NO: 3631373 - RNA, 13 nt, Human
cccugccuggagg

SEQ ID NO: 3631374 - RNA, 23 nt, Human
cccugccuggaggaccugagccu

SEQ ID NO: 3631375 - RNA, 22 nt, Human
cccugccuuaucuugcacccca

SEQ ID NO: 3631376 - RNA, 19 nt, Human
cccugccuuugggagcagg

SEQ ID NO: 3631377 - RNA, 15 nt, Human
cccugcgccugugau

SEQ ID NO: 3631378 - RNA, 21 nt, Human
cccugcgggucacaggaggga

SEQ ID NO: 3631379 - RNA, 17 nt, Human
cccugcgguagauggga

SEQ ID NO: 3631380 - RNA, 15 nt, Human
cccugcguggggaca

SEQ ID NO: 3631381 - RNA, 13 nt, Human
cccugcuacaccu

SEQ ID NO: 3631382 - RNA, 16 nt, Human
cccugcuacaccuauu

SEQ ID NO: 3631383 - RNA, 10 nt, Human
cccugcuccc

SEQ ID NO: 3631384 - RNA, 13 nt, Human
cccugcuccuccc

SEQ ID NO: 3631385 - RNA, 20 nt, Human
cccugcuccucccuggcugc

SEQ ID NO: 3631386 - RNA, 12 nt, Human
cccugcuccugc

SEQ ID NO: 3631387 - RNA, 16 nt, Human
cccugcuccugcagca

SEQ ID NO: 3631388 - RNA, 23 nt, Human
cccugcugagucccaggcugagc

SEQ ID NO: 3631389 - RNA, 13 nt, Human
cccugcugcaggg

SEQ ID NO: 3631390 - RNA, 11 nt, Human
cccugcugccc

SEQ ID NO: 3631391 - RNA, 13 nt, Human
cccugcugcccuc

SEQ ID NO: 3631392 - RNA, 14 nt, Human
cccugcugccuccc

SEQ ID NO: 3631393 - RNA, 16 nt, Human
cccugcugccucccca

SEQ ID NO: 3631394 - RNA, 13 nt, Human
cccugcugccuuc

SEQ ID NO: 3631395 - RNA, 19 nt, Human
cccugcugccuucugacgg

SEQ ID NO: 3631396 - RNA, 17 nt, Human
cccugcugcugacccag

SEQ ID NO: 3631397 - RNA, 17 nt, Human
cccugcuggccgccuca

SEQ ID NO: 3631398 - RNA, 22 nt, Human
cccugcuggguguggcgcagca

SEQ ID NO: 3631399 - RNA, 10 nt, Human
cccugcuguc

SEQ ID NO: 3631400 - RNA, 19 nt, Human
cccugcugucauugcuucu

SEQ ID NO: 3631401 - RNA, 12 nt, Human
cccugcuguccc

SEQ ID NO: 3631402 - RNA, 16 nt, Human
cccugcuguccccucu

SEQ ID NO: 3631403 - RNA, 17 nt, Human
cccugcuguccccucuu

SEQ ID NO: 3631404 - RNA, 18 nt, Human
cccugcuguccccucuug

SEQ ID NO: 3631405 - RNA, 19 nt, Human
cccugcuguccccucuugc

SEQ ID NO: 3631406 - RNA, 14 nt, Human
cccugcuguuuauc

SEQ ID NO: 3631407 - RNA, 21 nt, Human
cccugcuucaauacccaaauc

SEQ ID NO: 3631408 - RNA, 23 nt, Human
cccugcuucagauguggagccag

SEQ ID NO: 3631409 - RNA, 18 nt, Human
cccugcuuccaccucacc

SEQ ID NO: 3631410 - RNA, 21 nt, Human
cccugcuuccaccucacccca

SEQ ID NO: 3631411 - RNA, 14 nt, Human
cccugcuuccagga

SEQ ID NO: 3631412 - RNA, 11 nt, Human
cccugcuucuc

SEQ ID NO: 3631413 - RNA, 14 nt, Human
cccugcuuucagau

SEQ ID NO: 3631414 - RNA, 17 nt, Human
cccugcuuucagauacu

SEQ ID NO: 3631415 - RNA, 16 nt, Human
cccuggaaaccuucca

SEQ ID NO: 3631416 - RNA, 20 nt, Human
cccuggaacucuaucugggc

SEQ ID NO: 3631417 - RNA, 15 nt, Human
cccuggaagcagugc

SEQ ID NO: 3631418 - RNA, 21 nt, Human
cccuggaaggacauccauguu

SEQ ID NO: 3631419 - RNA, 17 nt, Human
cccuggacaagcagagg

SEQ ID NO: 3631420 - RNA, 18 nt, Human
cccuggacccagccagaa

SEQ ID NO: 3631421 - RNA, 17 nt, Human
cccuggaccccagccuc

SEQ ID NO: 3631422 - RNA, 13 nt, Human
cccuggacuggga

SEQ ID NO: 3631423 - RNA, 15 nt, Human
cccuggacugugugc

SEQ ID NO: 3631424 - RNA, 21 nt, Human
cccuggagaggcccucuggag

SEQ ID NO: 3631425 - RNA, 22 nt, Human
cccuggagaguucaauggcugc

SEQ ID NO: 3631426 - RNA, 20 nt, Human
cccuggagcagccaccccau

SEQ ID NO: 3631427 - RNA, 12 nt, Human
cccuggagccag

SEQ ID NO: 3631428 - RNA, 19 nt, Human
cccuggaggcacugaagug

SEQ ID NO: 3631429 - RNA, 23 nt, Human
cccuggaggcggugcggcaggga

SEQ ID NO: 3631430 - RNA, 18 nt, Human
cccuggaggcugccuccc

SEQ ID NO: 3631431 - RNA, 15 nt, Human
cccuggaggugccag

SEQ ID NO: 3631432 - RNA, 18 nt, Human
cccuggaggugccagcaa

SEQ ID NO: 3631433 - RNA, 22 nt, Human
cccuggaggugccagcaaagcc

SEQ ID NO: 3631434 - RNA, 15 nt, Human
cccuggagugcaguu

SEQ ID NO: 3631435 - RNA, 23 nt, Human
cccuggaguguggcugaggaggc

SEQ ID NO: 3631436 - RNA, 23 nt, Human
cccuggaucacgacgcugcagag

SEQ ID NO: 3631437 - RNA, 20 nt, Human
cccuggaucagcguggccuu

SEQ ID NO: 3631438 - RNA, 21 nt, Human
cccuggaucuaccuggaggga

SEQ ID NO: 3631439 - RNA, 20 nt, Human
cccuggcaugucaacagcgu

SEQ ID NO: 3631440 - RNA, 20 nt, Human
cccuggccaccaccccccac

SEQ ID NO: 3631441 - RNA, 13 nt, Human
cccuggccagagg

SEQ ID NO: 3631442 - RNA, 13 nt, Human
cccuggccaucuc

SEQ ID NO: 3631443 - RNA, 21 nt, Human
cccuggcccagcggccccucc

SEQ ID NO: 3631444 - RNA, 12 nt, Human
cccuggccccca

SEQ ID NO: 3631445 - RNA, 11 nt, Human
cccuggccccu

SEQ ID NO: 3631446 - RNA, 17 nt, Human
cccuggcccugaggugu

SEQ ID NO: 3631447 - RNA, 20 nt, Human
cccuggccgaguccaagcug

SEQ ID NO: 3631448 - RNA, 15 nt, Human
cccuggccgcccccu

SEQ ID NO: 3631449 - RNA, 14 nt, Human
cccuggccuccccu

SEQ ID NO: 3631450 - RNA, 20 nt, Human
cccuggccuccccugccacc

SEQ ID NO: 3631451 - RNA, 19 nt, Human
cccuggccucugugccuuc

SEQ ID NO: 3631452 - RNA, 13 nt, Human
cccuggccugcug

SEQ ID NO: 3631453 - RNA, 21 nt, Human
cccuggccugcugggcucucc

SEQ ID NO: 3631454 - RNA, 22 nt, Human
cccuggccuugggcccucuggu

SEQ ID NO: 3631455 - RNA, 17 nt, Human
cccuggccuuucauauu

SEQ ID NO: 3631456 - RNA, 22 nt, Human
cccuggcggccccaacucgggc

SEQ ID NO: 3631457 - RNA, 19 nt, Human
ccuccggcgucagccucca

SEQ ID NO: 3631458 - RNA, 20 nt, Human
ccuccggcgucagccuccag

SEQ ID NO: 3631459 - RNA, 18 nt, Human
ccuccgggaccuggugcu

SEQ ID NO: 3631460 - RNA, 14 nt, Human
ccuccgucacuacc

SEQ ID NO: 3631461 - RNA, 14 nt, Human
ccuccuaaaacaac

SEQ ID NO: 3631462 - RNA, 16 nt, Human
ccuccuaccccuccca

SEQ ID NO: 3631463 - RNA, 19 nt, Human
ccuccuaccccucccagcu

SEQ ID NO: 3631464 - RNA, 20 nt, Human
ccuccuaccccucccagcug

SEQ ID NO: 3631465 - RNA, 19 nt, Human
ccuccuaucaccuccccuc

SEQ ID NO: 3631466 - RNA, 13 nt, Human
ccuccucaccccg

SEQ ID NO: 3631467 - RNA, 15 nt, Human
ccuccucaccucaug

SEQ ID NO: 3631468 - RNA, 14 nt, Human
ccuccucaccucug

SEQ ID NO: 3631469 - RNA, 15 nt, Human
ccuccucaccucugg

SEQ ID NO: 3631470 - RNA, 14 nt, Human
ccuccucacuggcc

SEQ ID NO: 3631471 - RNA, 19 nt, Human
ccuccucacuggccauccc

SEQ ID NO: 3631472 - RNA, 21 nt, Human
ccuccucaggcacacagcuac

SEQ ID NO: 3631473 - RNA, 13 nt, Human
ccuccucagggau

SEQ ID NO: 3631474 - RNA, 12 nt, Human
ccuccucaugua

SEQ ID NO: 3631475 - RNA, 21 nt, Human
ccuccucauguacauacccug

SEQ ID NO: 3631476 - RNA, 15 nt, Human
ccuccuccacaccag

SEQ ID NO: 3631477 - RNA, 12 nt, Human
ccuccuccagcc

SEQ ID NO: 3631478 - RNA, 20 nt, Human
ccuccuccagccccuguccc

SEQ ID NO: 3631479 - RNA, 20 nt, Human
ccuccuccagggugauuuua

SEQ ID NO: 3631480 - RNA, 16 nt, Human
ccuccucccacccggc

SEQ ID NO: 3631481 - RNA, 19 nt, Human
ccuccucccacccggcugc

SEQ ID NO: 3631482 - RNA, 14 nt, Human
ccuccucccacugc

SEQ ID NO: 3631483 - RNA, 14 nt, Human
ccuccucccauguc

SEQ ID NO: 3631484 - RNA, 19 nt, Human
ccuccucccucccagcucc

SEQ ID NO: 3631485 - RNA, 14 nt, Human
ccuccucccugcau

SEQ ID NO: 3631486 - RNA, 16 nt, Human
ccuccucccugcaucu

SEQ ID NO: 3631487 - RNA, 14 nt, Human
ccuccucccuuuuu

SEQ ID NO: 3631488 - RNA, 17 nt, Human
ccuccucccuuuuuccu

SEQ ID NO: 3631489 - RNA, 24 nt, Human
ccuccucggaaccgcucaccuaga

SEQ ID NO: 3631490 - RNA, 18 nt, Human
ccuccucguuccuuucuc

SEQ ID NO: 3631491 - RNA, 19 nt, Human
ccuccucuaagguugggca

SEQ ID NO: 3631492 - RNA, 13 nt, Human
ccuccucucacuc

SEQ ID NO: 3631493 - RNA, 14 nt, Human
ccuccucuccacca

SEQ ID NO: 3631494 - RNA, 19 nt, Human
ccuccucucccauccuuga

SEQ ID NO: 3631495 - RNA, 10 nt, Human
ccuccucuga

SEQ ID NO: 3631496 - RNA, 17 nt, Human
ccuccucugaaacagcu

SEQ ID NO: 3631497 - RNA, 15 nt, Human
ccuccucugccaccu

SEQ ID NO: 3631498 - RNA, 18 nt, Human
ccuccucugccaccuccc

SEQ ID NO: 3631499 - RNA, 13 nt, Human
ccuccucugcuug

SEQ ID NO: 3631500 - RNA, 20 nt, Human
ccuccucuggacggcaggcu

SEQ ID NO: 3631501 - RNA, 18 nt, Human
ccuccucuguccagggcc

SEQ ID NO: 3631502 - RNA, 14 nt, Human
ccuccucugucccu

SEQ ID NO: 3631503 - RNA, 14 nt, Human
ccuccucugucugc

SEQ ID NO: 3631504 - RNA, 16 nt, Human
ccuccucugucugccc

SEQ ID NO: 3631505 - RNA, 22 nt, Human
ccuccucugugaccaaugucuu

SEQ ID NO: 3631506 - RNA, 17 nt, Human
ccuccucuucugacgug

SEQ ID NO: 3631507 - RNA, 14 nt, Human
ccuccucuuucucu

SEQ ID NO: 3631508 - RNA, 15 nt, Human
ccuccucuuucucuc

SEQ ID NO: 3631509 - RNA, 20 nt, Human
ccuccugaaccgcacagcuc

SEQ ID NO: 3631510 - RNA, 20 nt, Human
ccuccugacacaccugcagc

SEQ ID NO: 3631511 - RNA, 18 nt, Human
ccuccugacacccuucuc

SEQ ID NO: 3631512 - RNA, 22 nt, Human
ccuccugacacccuucucccac

SEQ ID NO: 3631513 - RNA, 20 nt, Human
ccuccugacccauugcuguu

SEQ ID NO: 3631514 - RNA, 12 nt, Human
ccuccugcccag

SEQ ID NO: 3631515 - RNA, 15 nt, Human
ccuccugcccagucc

SEQ ID NO: 3631516 - RNA, 18 nt, Human
ccuccugccgacuccugg

SEQ ID NO: 3631517 - RNA, 19 nt, Human
ccuccugccgacuccuggg

SEQ ID NO: 3631518 - RNA, 23 nt, Human
ccuccugccucgaacuggcugca

SEQ ID NO: 3631519 - RNA, 23 nt, Human
ccuccugcgcgcaugugcgcaca

SEQ ID NO: 3631520 - RNA, 20 nt, Human
ccuccugcugcagaggggca

SEQ ID NO: 3631521 - RNA, 23 nt, Human
ccuccugcuugcgggggccgccu

SEQ ID NO: 3631522 - RNA, 17 nt, Human
ccuccuggaaccuugcu

SEQ ID NO: 3631523 - RNA, 19 nt, Human
ccuccuggaaccuugcugu

SEQ ID NO: 3631524 - RNA, 14 nt, Human
ccuccugggcuaag

SEQ ID NO: 3631525 - RNA, 16 nt, Human
ccuccuggggccaggc

SEQ ID NO: 3631526 - RNA, 17 nt, Human
ccuccuggggccaggcc

SEQ ID NO: 3631527 - RNA, 21 nt, Human
ccuccuggggcgcgugaggcc

SEQ ID NO: 3631528 - RNA, 19 nt, Human
ccuccugguggguccaggg

SEQ ID NO: 3631529 - RNA, 21 nt, Human
ccuccuggugucaccccagag

SEQ ID NO: 3631530 - RNA, 11 nt, Human
ccuccugugga

SEQ ID NO: 3631531 - RNA, 17 nt, Human
ccuccuguguacugugu

SEQ ID NO: 3631532 - RNA, 15 nt, Human
ccuccugugugugcg

SEQ ID NO: 3631533 - RNA, 18 nt, Human
ccuccuguugcacccagc

SEQ ID NO: 3631534 - RNA, 23 nt, Human
ccuccuguugcacccagcccugg

SEQ ID NO: 3631535 - RNA, 13 nt, Human
ccuccuucccucu

SEQ ID NO: 3631536 - RNA, 15 nt, Human
ccuccuucccucucu

SEQ ID NO: 3631537 - RNA, 13 nt, Human
ccuccuuccuaaa

SEQ ID NO: 3631538 - RNA, 13 nt, Human
ccuccuuccucuu

SEQ ID NO: 3631539 - RNA, 20 nt, Human
ccuccuuccuugcuguccua

SEQ ID NO: 3631540 - RNA, 14 nt, Human
ccuccuucucuguc

SEQ ID NO: 3631541 - RNA, 15 nt, Human
ccuccuucucugucu

SEQ ID NO: 3631542 - RNA, 21 nt, Human
ccuccuucugagcuccugucc

SEQ ID NO: 3631543 - RNA, 18 nt, Human
ccuccuucuucagggacu

SEQ ID NO: 3631544 - RNA, 18 nt, Human
ccuccuugccuccugugu

SEQ ID NO: 3631545 - RNA, 19 nt, Human
ccuccuugccuccugugua

SEQ ID NO: 3631546 - RNA, 22 nt, Human
ccuccuugcucugcaggcaccu

SEQ ID NO: 3631547 - RNA, 20 nt, Human
ccuccuugggcacuuuuuaa

SEQ ID NO: 3631548 - RNA, 13 nt, Human
ccuccuuuaucac

SEQ ID NO: 3631549 - RNA, 12 nt, Human
ccuccuuuccca

SEQ ID NO: 3631550 - RNA, 18 nt, Human
ccuccuuuccuccucuga

SEQ ID NO: 3631551 - RNA, 21 nt, Human
ccuccuuuccuccucugacuu

SEQ ID NO: 3631552 - RNA, 16 nt, Human
ccuccuuucucuucuc

SEQ ID NO: 3631553 - RNA, 14 nt, Human
ccuccuuucugugc

SEQ ID NO: 3631554 - RNA, 18 nt, Human
ccuccuuugugaggaagc

SEQ ID NO: 3631555 - RNA, 19 nt, Human
ccuccuuugugaggaagcc

SEQ ID NO: 3631556 - RNA, 13 nt, Human
ccuccuuuuucca

SEQ ID NO: 3631557 - RNA, 21 nt, Human
ccuccuuuuuccaugcccuaa

SEQ ID NO: 3631558 - RNA, 23 nt, Human
ccucgaacccacacugcaacagg

SEQ ID NO: 3631559 - RNA, 19 nt, Human
ccucgaagcgcgccacucg

SEQ ID NO: 3631560 - RNA, 21 nt, Human
ccucgagguuucucaaagaaa

SEQ ID NO: 3631561 - RNA, 18 nt, Human
ccucgcacggccccgaag

SEQ ID NO: 3631562 - RNA, 15 nt, Human
ccucgcaggaagacc

SEQ ID NO: 3631563 - RNA, 19 nt, Human
ccucgcaggccucccugcc

SEQ ID NO: 3631564 - RNA, 20 nt, Human
ccucgcccagcggcaucagg

SEQ ID NO: 3631565 - RNA, 12 nt, Human
ccucgcccaguc

SEQ ID NO: 3631566 - RNA, 17 nt, Human
ccucgcccagucccagc

SEQ ID NO: 3631567 - RNA, 18 nt, Human
ccucgcccagucccagca

SEQ ID NO: 3631568 - RNA, 23 nt, Human
ccucgcccagucccagcagccag

SEQ ID NO: 3631569 - RNA, 16 nt, Human
ccucgccccuggcaga

SEQ ID NO: 3631570 - RNA, 22 nt, Human
ccucgccggacccucuaaccuc

SEQ ID NO: 3631571 - RNA, 12 nt, Human
ccucgccuggcc

SEQ ID NO: 3631572 - RNA, 14 nt, Human
ccucgccuggccug

SEQ ID NO: 3631573 - RNA, 15 nt, Human
ccucgccuggccuga

SEQ ID NO: 3631574 - RNA, 15 nt, Human
ccucgccuguggagc

SEQ ID NO: 3631575 - RNA, 21 nt, Human
ccucgccuguggagcucagcc

SEQ ID NO: 3631576 - RNA, 21 nt, Human
ccucgcuccccacucugcucu

SEQ ID NO: 3631577 - RNA, 20 nt, Human
ccucgcugccagcucuguau

SEQ ID NO: 3631578 - RNA, 18 nt, Human
ccucgcuggacucucagu

SEQ ID NO: 3631579 - RNA, 17 nt, Human
ccucgcuggcccccacu

SEQ ID NO: 3631580 - RNA, 20 nt, Human
ccucggaccccacuccggcc

SEQ ID NO: 3631581 - RNA, 12 nt, Human
ccucggagaaga

SEQ ID NO: 3631582 - RNA, 23 nt, Human
ccucggagccucauccgaggcag

SEQ ID NO: 3631583 - RNA, 15 nt, Human
ccucggaucaccgag

SEQ ID NO: 3631584 - RNA, 15 nt, Human
ccucggaucagcuga

SEQ ID NO: 3631585 - RNA, 17 nt, Human
ccucggaucagcugagc

SEQ ID NO: 3631586 - RNA, 17 nt, Human
ccucggauccccuuccu

SEQ ID NO: 3631587 - RNA, 12 nt, Human
ccucggcuccug

SEQ ID NO: 3631588 - RNA, 18 nt, Human
ccucggcuccugcugcac

SEQ ID NO: 3631589 - RNA, 19 nt, Human
ccucggcuccuggacucau

SEQ ID NO: 3631590 - RNA, 18 nt, Human
ccucggcuggcuccccug

SEQ ID NO: 3631591 - RNA, 19 nt, Human
ccucggcuuuucucagcug

SEQ ID NO: 3631592 - RNA, 14 nt, Human
ccucgggcccaccu

SEQ ID NO: 3631593 - RNA, 16 nt, Human
ccucgggcccaccugg

SEQ ID NO: 3631594 - RNA, 19 nt, Human
ccucgggcccaccuggcca

SEQ ID NO: 3631595 - RNA, 22 nt, Human
ccucgggcccaccuggccaccu

SEQ ID NO: 3631596 - RNA, 15 nt, Human
ccucgggucuccuca

SEQ ID NO: 3631597 - RNA, 14 nt, Human
ccucgguguggaga

SEQ ID NO: 3631598 - RNA, 15 nt, Human
ccucguccucccccu

SEQ ID NO: 3631599 - RNA, 17 nt, Human
ccucguggacaccugcc

SEQ ID NO: 3631600 - RNA, 21 nt, Human
ccucguggacaccugcccugc

SEQ ID NO: 3631601 - RNA, 16 nt, Human
ccucguggccagcccg

SEQ ID NO: 3631602 - RNA, 13 nt, Human
ccugacuggugcu

SEQ ID NO: 3631603 - RNA, 19 nt, Human
ccugacuucaggggcugcc

SEQ ID NO: 3631604 - RNA, 14 nt, Human
ccugagaaagcuca

SEQ ID NO: 3631605 - RNA, 17 nt, Human
ccugagaaagcucaaag

SEQ ID NO: 3631606 - RNA, 12 nt, Human
ccugagaagaga

SEQ ID NO: 3631607 - RNA, 13 nt, Human
ccugagaagagag

SEQ ID NO: 3631608 - RNA, 16 nt, Human
ccugagaagcugcucc

SEQ ID NO: 3631609 - RNA, 19 nt, Human
ccugagacaaauggaggcc

SEQ ID NO: 3631610 - RNA, 21 nt, Human
ccugagacaaauggaggccug

SEQ ID NO: 3631611 - RNA, 21 nt, Human
ccugagaccaguugggagcac

SEQ ID NO: 3631612 - RNA, 22 nt, Human
ccugagaccaguugggagcacu

SEQ ID NO: 3631613 - RNA, 18 nt, Human
ccugagaccauuuaacau

SEQ ID NO: 3631614 - RNA, 14 nt, Human
ccugagacccagga

SEQ ID NO: 3631615 - RNA, 15 nt, Human
ccugagacccaggac

SEQ ID NO: 3631616 - RNA, 15 nt, Human
ccugagaccccuggc

SEQ ID NO: 3631617 - RNA, 16 nt, Human
ccugagaccccuggcc

SEQ ID NO: 3631618 - RNA, 17 nt, Human
ccugagaccccuggccu

SEQ ID NO: 3631619 - RNA, 20 nt, Human
ccugagaccccuggccuccg

SEQ ID NO: 3631620 - RNA, 18 nt, Human
ccugagagcugcaugugu

SEQ ID NO: 3631621 - RNA, 20 nt, Human
ccugagaggggaagcggccc

SEQ ID NO: 3631622 - RNA, 15 nt, Human
ccugagagucagcuc

SEQ ID NO: 3631623 - RNA, 15 nt, Human
ccugagaucagaguc

SEQ ID NO: 3631624 - RNA, 15 nt, Human
ccugagauuuauuaa

SEQ ID NO: 3631625 - RNA, 22 nt, Human
ccugagauuuauuaaagaaaaa

SEQ ID NO: 3631626 - RNA, 15 nt, Human
ccugagauuucaucu

SEQ ID NO: 3631627 - RNA, 16 nt, Human
ccugagauuucaucug

SEQ ID NO: 3631628 - RNA, 15 nt, Human
ccugagcaacucuug

SEQ ID NO: 3631629 - RNA, 18 nt, Human
ccugagcaccucccagcc

SEQ ID NO: 3631630 - RNA, 19 nt, Human
ccugagcaccucccagccc

SEQ ID NO: 3631631 - RNA, 23 nt, Human
ccugagcaccucccagccccugc

SEQ ID NO: 3631632 - RNA, 12 nt, Human
ccugagcacugc

SEQ ID NO: 3631633 - RNA, 14 nt, Human
ccugagcacugcca

SEQ ID NO: 3631634 - RNA, 18 nt, Human
ccugagcacugccaggag

SEQ ID NO: 3631635 - RNA, 19 nt, Human
ccugagcacugccaggagg

SEQ ID NO: 3631636 - RNA, 16 nt, Human
ccugagccagauuuca

SEQ ID NO: 3631637 - RNA, 18 nt, Human
ccugagccagggucucca

SEQ ID NO: 3631638 - RNA, 11 nt, Human
ccugagcccac

SEQ ID NO: 3631639 - RNA, 13 nt, Human
ccugagcccacug

SEQ ID NO: 3631640 - RNA, 13 nt, Human
ccugagcccaggg

SEQ ID NO: 3631641 - RNA, 16 nt, Human
ccugagcccagggagg

SEQ ID NO: 3631642 - RNA, 17 nt, Human
ccugagcccagggaggc

SEQ ID NO: 3631643 - RNA, 14 nt, Human
ccugagcccccagc

SEQ ID NO: 3631644 - RNA, 18 nt, Human
ccugagcccccagcuucc

SEQ ID NO: 3631645 - RNA, 20 nt, Human
ccugagccccgcccucuucc

SEQ ID NO: 3631646 - RNA, 15 nt, Human
ccugagccccuuccu

SEQ ID NO: 3631647 - RNA, 19 nt, Human
ccugagcccuacucccugc

SEQ ID NO: 3631648 - RNA, 17 nt, Human
ccugagccggccccagg

SEQ ID NO: 3631649 - RNA, 23 nt, Human
ccugagccugccgagcaaccgug

SEQ ID NO: 3631650 - RNA, 15 nt, Human
ccugagccuggccag

SEQ ID NO: 3631651 - RNA, 16 nt, Human
ccugagccuggccagc

SEQ ID NO: 3631652 - RNA, 21 nt, Human
ccugagcgaguggagucugcc

SEQ ID NO: 3631653 - RNA, 16 nt, Human
ccugagcgcuccugcc

SEQ ID NO: 3631654 - RNA, 12 nt, Human
ccugagcucagc

SEQ ID NO: 3631655 - RNA, 16 nt, Human
ccugagcucgguggac

SEQ ID NO: 3631656 - RNA, 18 nt, Human
ccugagcucgguggaccc

SEQ ID NO: 3631657 - RNA, 20 nt, Human
ccugagcucgguggacccag

SEQ ID NO: 3631658 - RNA, 21 nt, Human
ccugagcucgguggacccagg

SEQ ID NO: 3631659 - RNA, 17 nt, Human
ccugagcugaccagccg

SEQ ID NO: 3631660 - RNA, 18 nt, Human
ccugagcugaggcagcag

SEQ ID NO: 3631661 - RNA, 18 nt, Human
ccugagcuuggccagaag

SEQ ID NO: 3631662 - RNA, 21 nt, Human
ccugagcuuggccagaagggg

SEQ ID NO: 3631663 - RNA, 14 nt, Human
ccugagcuuucugc

SEQ ID NO: 3631664 - RNA, 15 nt, Human
ccugagcuuuggaca

SEQ ID NO: 3631665 - RNA, 22 nt, Human
ccugagcuuuggacacacacag

SEQ ID NO: 3631666 - RNA, 12 nt, Human
ccugaggaagcg

SEQ ID NO: 3631667 - RNA, 21 nt, Human
ccugaggaaggaggggaagcu

SEQ ID NO: 3631668 - RNA, 20 nt, Human
ccugaggacauggcuucuga

SEQ ID NO: 3631669 - RNA, 19 nt, Human
ccugaggacugauuucaga

SEQ ID NO: 3631670 - RNA, 23 nt, Human
ccugaggacugauuucagaguga

SEQ ID NO: 3631671 - RNA, 17 nt, Human
ccugaggagucugaggu

SEQ ID NO: 3631672 - RNA, 21 nt, Human
ccugaggagucugagguccug

SEQ ID NO: 3631673 - RNA, 15 nt, Human
ccugaggaucagaaa

SEQ ID NO: 3631674 - RNA, 17 nt, Human
ccugaggaucagaaagu

SEQ ID NO: 3631675 - RNA, 13 nt, Human
ccugaggaugagc

SEQ ID NO: 3631676 - RNA, 12 nt, Human
ccugaggcccuu

SEQ ID NO: 3631677 - RNA, 14 nt, Human
ccugaggcccuucu

SEQ ID NO: 3631678 - RNA, 21 nt, Human
ccugaggccucuggaaagcaa

SEQ ID NO: 3631679 - RNA, 13 nt, Human
ccugaggcuccac

SEQ ID NO: 3631680 - RNA, 17 nt, Human
ccugaggcuccugugcu

SEQ ID NO: 3631681 - RNA, 19 nt, Human
ccugaggcugggcucccuu

SEQ ID NO: 3631682 - RNA, 17 nt, Human
ccugaggcuguggucac

SEQ ID NO: 3631683 - RNA, 20 nt, Human
ccugagggaaaggccagcac

SEQ ID NO: 3631684 - RNA, 22 nt, Human
ccugagggaaaggccagcacuc

SEQ ID NO: 3631685 - RNA, 15 nt, Human
ccugagggagcucca

SEQ ID NO: 3631686 - RNA, 17 nt, Human
ccugagggaggaccugg

SEQ ID NO: 3631687 - RNA, 14 nt, Human
ccugagggccccuc

SEQ ID NO: 3631688 - RNA, 16 nt, Human
ccugagggccccucug

SEQ ID NO: 3631689 - RNA, 21 nt, Human
ccugagggccccucugcccag

SEQ ID NO: 3631690 - RNA, 15 nt, Human
ccugaggggcagccu

SEQ ID NO: 3631691 - RNA, 17 nt, Human
ccugaggggcagccugc

SEQ ID NO: 3631692 - RNA, 18 nt, Human
ccugaggggcaucugccc

SEQ ID NO: 3631693 - RNA, 19 nt, Human
ccugaggguccccaccugg

SEQ ID NO: 3631694 - RNA, 13 nt, Human
ccugaggguggag

SEQ ID NO: 3631695 - RNA, 14 nt, Human
ccugaggucaggga

SEQ ID NO: 3631696 - RNA, 16 nt, Human
ccugaggugggcccag

SEQ ID NO: 3631697 - RNA, 17 nt, Human
ccugaggugggcccagg

SEQ ID NO: 3631698 - RNA, 19 nt, Human
ccugaggugggcccaggac

SEQ ID NO: 3631699 - RNA, 14 nt, Human
ccugaguagaaagg

SEQ ID NO: 3631700 - RNA, 20 nt, Human
ccugagucagggcccagagg

SEQ ID NO: 3631701 - RNA, 23 nt, Human
ccugaguccaagaggguccuuua

SEQ ID NO: 3631702 - RNA, 19 nt, Human
ccugagugaucccauuucu

SEQ ID NO: 3631703 - RNA, 15 nt, Human
ccugagugcuugcuu

SEQ ID NO: 3631704 - RNA, 13 nt, Human
ccugaguggaucu

SEQ ID NO: 3631705 - RNA, 20 nt, Human
ccugaguggaucuccaagga

SEQ ID NO: 3631706 - RNA, 21 nt, Human
ccugaguggccagggaaucua

SEQ ID NO: 3631707 - RNA, 14 nt, Human
ccugaguucaucca

SEQ ID NO: 3631708 - RNA, 22 nt, Human
ccugaguuccugaggugaugaa

SEQ ID NO: 3631709 - RNA, 15 nt, Human
ccugaguugaagagg

SEQ ID NO: 3631710 - RNA, 23 nt, Human
ccugaguuuccuuuucugucucu

SEQ ID NO: 3631711 - RNA, 19 nt, Human
ccugauaagcuucaaagcu

SEQ ID NO: 3631712 - RNA, 17 nt, Human
ccugauaauaauugauc

SEQ ID NO: 3631713 - RNA, 19 nt, Human
ccugauaugauuuaaaaca

SEQ ID NO: 3631714 - RNA, 15 nt, Human
ccugaucaaugacag

SEQ ID NO: 3631715 - RNA, 13 nt, Human
ccugaucagagcc

SEQ ID NO: 3631716 - RNA, 18 nt, Human
ccugaucccacuccuagg

SEQ ID NO: 3631717 - RNA, 19 nt, Human
ccugaucccacuccuagga

SEQ ID NO: 3631718 - RNA, 19 nt, Human
ccugaucccagagagcccg

SEQ ID NO: 3631719 - RNA, 21 nt, Human
ccugaucccugaucccuucca

SEQ ID NO: 3631720 - RNA, 20 nt, Human
ccugauccuggaggcccagu

SEQ ID NO: 3631721 - RNA, 20 nt, Human
ccugaucucuuccuguuuug

SEQ ID NO: 3631722 - RNA, 14 nt, Human
ccugaucugugaua

SEQ ID NO: 3631723 - RNA, 17 nt, Human
ccugaugaaaauaaaga

SEQ ID NO: 3631724 - RNA, 21 nt, Human
ccugaugacccaggcugccug

SEQ ID NO: 3631725 - RNA, 16 nt, Human
ccugaugcagucacgu

SEQ ID NO: 3631726 - RNA, 13 nt, Human
ccugaugcucccu

SEQ ID NO: 3631727 - RNA, 23 nt, Human
ccugaugcucccuccccugcccu

SEQ ID NO: 3631728 - RNA, 18 nt, Human
ccugaugcuucuucagag

SEQ ID NO: 3631729 - RNA, 20 nt, Human
ccugaugcuucuucagagac

SEQ ID NO: 3631730 - RNA, 22 nt, Human
ccugaugcuucuucagagacuc

SEQ ID NO: 3631731 - RNA, 17 nt, Human
ccugauggaccugucac

SEQ ID NO: 3631732 - RNA, 21 nt, Human
ccugauggcacuuagcuauca

SEQ ID NO: 3631733 - RNA, 18 nt, Human
ccugaugguacaggaaag

SEQ ID NO: 3631734 - RNA, 17 nt, Human
ccugauggucagcuccc

SEQ ID NO: 3631735 - RNA, 20 nt, Human
ccugauggucagcucccuuc

SEQ ID NO: 3631736 - RNA, 17 nt, Human
ccugauguuaaaauucc

SEQ ID NO: 3631737 - RNA, 12 nt, Human
ccugauuaaaga

SEQ ID NO: 3631738 - RNA, 16 nt, Human
ccugauucaacuaaaa

SEQ ID NO: 3631739 - RNA, 16 nt, Human
ccugauugaccugcuc

SEQ ID NO: 3631740 - RNA, 20 nt, Human
ccugauugguuucucuucuc

SEQ ID NO: 3631741 - RNA, 20 nt, Human
ccugauuguguauauucaua

SEQ ID NO: 3631742 - RNA, 23 nt, Human
ccugauuuaauaugcaaagucua

SEQ ID NO: 3631743 - RNA, 20 nt, Human
ccugauuuacaguuucaaaa

SEQ ID NO: 3631744 - RNA, 18 nt, Human
ccugauuuuaauugugaa

SEQ ID NO: 3631745 - RNA, 14 nt, Human
ccugcaaaaaauac

SEQ ID NO: 3631746 - RNA, 19 nt, Human
ccugcaaaaucuguucuaa

SEQ ID NO: 3631747 - RNA, 15 nt, Human
ccugcgaaaaccccc

SEQ ID NO: 3631748 - RNA, 17 nt, Human
ccugcgacccugggggc

SEQ ID NO: 3631749 - RNA, 13 nt, Human
ccugcgaggcuau

SEQ ID NO: 3631750 - RNA, 17 nt, Human
ccugcgaggcuaugagu

SEQ ID NO: 3631751 - RNA, 17 nt, Human
ccugcgccaguccugcu

SEQ ID NO: 3631752 - RNA, 14 nt, Human
ccugcgccugcugc

SEQ ID NO: 3631753 - RNA, 19 nt, Human
ccugcggagugaagagggg

SEQ ID NO: 3631754 - RNA, 20 nt, Human
ccugcggcccaauccaaggu

SEQ ID NO: 3631755 - RNA, 18 nt, Human
ccugcgggucacaggagg

SEQ ID NO: 3631756 - RNA, 21 nt, Human
ccugcggguggggcuuggggc

SEQ ID NO: 3631757 - RNA, 16 nt, Human
ccugcggugcuaucuc

SEQ ID NO: 3631758 - RNA, 17 nt, Human
ccugcggugcuaucucc

SEQ ID NO: 3631759 - RNA, 22 nt, Human
ccugcggugcuaucucccccag

SEQ ID NO: 3631760 - RNA, 19 nt, Human
ccugcguccuccucaccuc

SEQ ID NO: 3631761 - RNA, 22 nt, Human
ccugcguccuccucaccucaug

SEQ ID NO: 3631762 - RNA, 23 nt, Human
ccugcgucgaagcuuugaaggcc

SEQ ID NO: 3631763 - RNA, 13 nt, Human
ccugcguggcuga

SEQ ID NO: 3631764 - RNA, 16 nt, Human
ccugcguggggacagg

SEQ ID NO: 3631765 - RNA, 17 nt, Human
ccugcguggggacaggg

SEQ ID NO: 3631766 - RNA, 22 nt, Human
ccugcguuuuggaagcucugaa

SEQ ID NO: 3631767 - RNA, 17 nt, Human
ccugcuaaggucuugga

SEQ ID NO: 3631768 - RNA, 21 nt, Human
ccugcuacaccuauuauccca

SEQ ID NO: 3631769 - RNA, 13 nt, Human
ccugcuacucugu

SEQ ID NO: 3631770 - RNA, 16 nt, Human
ccugcuacucuguucc

SEQ ID NO: 3631771 - RNA, 21 nt, Human
ccugcuacugccaaccucgcu

SEQ ID NO: 3631772 - RNA, 15 nt, Human
ccugcuagcuagcuc

SEQ ID NO: 3631773 - RNA, 23 nt, Human
ccugcuagcuagcucaacuagug

SEQ ID NO: 3631774 - RNA, 21 nt, Human
ccugcuaggccagagcccacu

SEQ ID NO: 3631775 - RNA, 22 nt, Human
ccugcuauuacuaaggaguaau

SEQ ID NO: 3631776 - RNA, 14 nt, Human
ccugcuauuuccca

SEQ ID NO: 3631777 - RNA, 15 nt, Human
ccugcuauuugaagu

SEQ ID NO: 3631778 - RNA, 17 nt, Human
ccugcucauccacucua

SEQ ID NO: 3631779 - RNA, 11 nt, Human
ccugcuccaga

SEQ ID NO: 3631780 - RNA, 22 nt, Human
ccugcuccagaauuuggaaauc

SEQ ID NO: 3631781 - RNA, 14 nt, Human
ccugcuccagcugu

SEQ ID NO: 3631782 - RNA, 22 nt, Human
ccugcuccagcuguucagcugg

SEQ ID NO: 3631783 - RNA, 15 nt, Human
ccugcucccagcagc

SEQ ID NO: 3631784 - RNA, 23 nt, Human
ccugcucccagcagcccuaagga

SEQ ID NO: 3631785 - RNA, 16 nt, Human
ccugcucccaggccag

SEQ ID NO: 3631786 - RNA, 16 nt, Human
ccugcucccccacccc

SEQ ID NO: 3631787 - RNA, 18 nt, Human
ccugcucccccacccccu

SEQ ID NO: 3631788 - RNA, 15 nt, Human
ccugcuccgcugcuc

SEQ ID NO: 3631789 - RNA, 20 nt, Human
ccugcuccgcugcuccuugg

SEQ ID NO: 3631790 - RNA, 15 nt, Human
ccugcuccugcagca

SEQ ID NO: 3631791 - RNA, 13 nt, Human
ccugcuccuuccc

SEQ ID NO: 3631792 - RNA, 21 nt, Human
ccugcucgaugcucacagggc

SEQ ID NO: 3631793 - RNA, 16 nt, Human
ccugcucuccucuucu

SEQ ID NO: 3631794 - RNA, 15 nt, Human
ccugcucuuuggccu

SEQ ID NO: 3631795 - RNA, 15 nt, Human
ccugcugaccugugc

SEQ ID NO: 3631796 - RNA, 17 nt, Human
ccugcugagagacccaa

SEQ ID NO: 3631797 - RNA, 21 nt, Human
ccugcugagagacccaaggag

SEQ ID NO: 3631798 - RNA, 14 nt, Human
ccugcugagcucug

SEQ ID NO: 3631799 - RNA, 17 nt, Human
ccugcugagcucugaga

SEQ ID NO: 3631800 - RNA, 19 nt, Human
ccugcugagcucugagagg

SEQ ID NO: 3631801 - RNA, 21 nt, Human
ccugcugagcucugagaggcc

SEQ ID NO: 3631802 - RNA, 18 nt, Human
ccugcugcagaggggcag

SEQ ID NO: 3631803 - RNA, 13 nt, Human
ccugcugcagggg

SEQ ID NO: 3631804 - RNA, 22 nt, Human
ccugcugcaggggcucuggaga

SEQ ID NO: 3631805 - RNA, 23 nt, Human
ccugcugcaggggcucuggagag

SEQ ID NO: 3631806 - RNA, 13 nt, Human
ccugcugcaugcc

SEQ ID NO: 3631807 - RNA, 19 nt, Human
ccugcugccaguaccagcc

SEQ ID NO: 3631808 - RNA, 17 nt, Human
ccugcugcccaggcugu

SEQ ID NO: 3631809 - RNA, 11 nt, Human
ccugcugcccu

SEQ ID NO: 3631810 - RNA, 14 nt, Human
ccugcugccgccuc

SEQ ID NO: 3631811 - RNA, 15 nt, Human
ccugcugccgccucc

SEQ ID NO: 3631812 - RNA, 21 nt, Human
ccugcugccgccucccagccu

SEQ ID NO: 3631813 - RNA, 15 nt, Human
ccugcugccucccca

SEQ ID NO: 3631814 - RNA, 17 nt, Human
ccugcugccuccccaac

SEQ ID NO: 3631815 - RNA, 19 nt, Human
ccugcugccuccccaaccc

SEQ ID NO: 3631816 - RNA, 14 nt, Human
ccugcugcgcaguu

SEQ ID NO: 3631817 - RNA, 13 nt, Human
ccugcugcucccu

SEQ ID NO: 3631818 - RNA, 15 nt, Human
ccugcugcucccuca

SEQ ID NO: 3631819 - RNA, 19 nt, Human
ccugcugcugagaaccugg

SEQ ID NO: 3631820 - RNA, 20 nt, Human
ccugcugcugagaaccuggc

SEQ ID NO: 3631821 - RNA, 21 nt, Human
ccugcugcugagaaccuggcc

SEQ ID NO: 3631822 - RNA, 17 nt, Human
ccugcugcugccugccu

SEQ ID NO: 3631823 - RNA, 14 nt, Human
ccugcugcuggugc

SEQ ID NO: 3631824 - RNA, 16 nt, Human
ccugcugcugucaccu

SEQ ID NO: 3631825 - RNA, 18 nt, Human
ccugcugcugucaccucu

SEQ ID NO: 3631826 - RNA, 19 nt, Human
ccugcugcugucaccucuc

SEQ ID NO: 3631827 - RNA, 23 nt, Human
ccugcugcugucaccucucccac

SEQ ID NO: 3631828 - RNA, 20 nt, Human
ccugcugcugucugggugcu

SEQ ID NO: 3631829 - RNA, 20 nt, Human
ccugcugcuguguuuuugcu

SEQ ID NO: 3631830 - RNA, 16 nt, Human
ccugcuggaggccuca

SEQ ID NO: 3631831 - RNA, 17 nt, Human
ccugcuggaucucccag

SEQ ID NO: 3631832 - RNA, 11 nt, Human
ccugcuggccc

SEQ ID NO: 3631833 - RNA, 12 nt, Human
ccugcuggcccc

SEQ ID NO: 3631834 - RNA, 13 nt, Human
ccugcuggccccu

SEQ ID NO: 3631835 - RNA, 18 nt, Human
ccugcuggccccucaccu

SEQ ID NO: 3631836 - RNA, 21 nt, Human
ccugcuggccccucaccuggg

SEQ ID NO: 3631837 - RNA, 17 nt, Human
ccugcuggccgccucac

SEQ ID NO: 3631838 - RNA, 12 nt, Human
ccugcuggcucu

SEQ ID NO: 3631839 - RNA, 19 nt, Human
ccugcugggcucuccaccu

SEQ ID NO: 3631840 - RNA, 22 nt, Human
ccugcugggcucuccaccucag

SEQ ID NO: 3631841 - RNA, 23 nt, Human
ccugcuggggauccccgccuggc

SEQ ID NO: 3631842 - RNA, 15 nt, Human
ccugcuggguaaacu

SEQ ID NO: 3631843 - RNA, 19 nt, Human
ccugcugguucaggguugg

SEQ ID NO: 3631844 - RNA, 13 nt, Human
ccugcugguuuua

SEQ ID NO: 3631845 - RNA, 15 nt, Human
ccugcugucauugcu

SEQ ID NO: 3631846 - RNA, 15 nt, Human
ccugcuguccccucu

SEQ ID NO: 3631847 - RNA, 19 nt, Human
ccugcuguccccucuugcc

SEQ ID NO: 3631848 - RNA, 22 nt, Human
ccugcuguccccucuugcccca

SEQ ID NO: 3631849 - RNA, 20 nt, Human
ccugcugugauuccacuaca

SEQ ID NO: 3631850 - RNA, 18 nt, Human
ccugcuuccaccucaccc

SEQ ID NO: 3631851 - RNA, 21 nt, Human
ccugcuuccaggaaacuccac

SEQ ID NO: 3631852 - RNA, 24 nt, Human
ccugcuucccaccucccugcccag

SEQ ID NO: 3631853 - RNA, 15 nt, Human
ccugcuuccugucuu

SEQ ID NO: 3631854 - RNA, 14 nt, Human
ccugcuucuccagc

SEQ ID NO: 3631855 - RNA, 20 nt, Human
ccugcuucuccagccuggac

SEQ ID NO: 3631856 - RNA, 22 nt, Human
ccugcuucuccagccuggaccc

SEQ ID NO: 3631857 - RNA, 14 nt, Human
ccugcuucucugcc

SEQ ID NO: 3631858 - RNA, 18 nt, Human
ccugcuugaguucccaga

SEQ ID NO: 3631859 - RNA, 21 nt, Human
ccugcuugccaaggcagaggc

SEQ ID NO: 3631860 - RNA, 22 nt, Human
ccugcuugccaaggcagaggcc

SEQ ID NO: 3631861 - RNA, 21 nt, Human
ccugcuuggguggagaagcca

SEQ ID NO: 3631862 - RNA, 17 nt, Human
ccugcuuuaaccacccc

SEQ ID NO: 3631863 - RNA, 21 nt, Human
ccugcuuuaaccaccccaucu

SEQ ID NO: 3631864 - RNA, 17 nt, Human
ccugcuuuagagcuagg

SEQ ID NO: 3631865 - RNA, 20 nt, Human
ccugcuuugcgugcccgggg

SEQ ID NO: 3631866 - RNA, 19 nt, Human
ccugcuuugggcugcccug

SEQ ID NO: 3631867 - RNA, 18 nt, Human
ccugcuuugggcuugggc

SEQ ID NO: 3631868 - RNA, 12 nt, Human
ccugcuuuucaa

SEQ ID NO: 3631869 - RNA, 20 nt, Human
ccugcuuuuuggaaagucag

SEQ ID NO: 3631870 - RNA, 21 nt, Human
ccuggaaaaaaacaucagaaa

SEQ ID NO: 3631871 - RNA, 17 nt, Human
ccuggaaaccacagucc

SEQ ID NO: 3631872 - RNA, 17 nt, Human
ccuggaaaggcucaguc

SEQ ID NO: 3631873 - RNA, 21 nt, Human
ccuggaaaggcucagucucag

SEQ ID NO: 3631874 - RNA, 22 nt, Human
ccuggaaaggcucagucucagg

SEQ ID NO: 3631875 - RNA, 16 nt, Human
ccuggaaccuugcugu

SEQ ID NO: 3631876 - RNA, 13 nt, Human
ccuggaacuuggg

SEQ ID NO: 3631877 - RNA, 16 nt, Human
ccuggaacuuggggag

SEQ ID NO: 3631878 - RNA, 17 nt, Human
ccuggaacuuggggagu

SEQ ID NO: 3631879 - RNA, 18 nt, Human
ccuggaagaacaggccuc

SEQ ID NO: 3631880 - RNA, 20 nt, Human
ccuggaagaacaggccucuc

SEQ ID NO: 3631881 - RNA, 13 nt, Human
ccuggaagacaga

SEQ ID NO: 3631882 - RNA, 16 nt, Human
ccuggaagagcccagu

SEQ ID NO: 3631883 - RNA, 16 nt, Human
ccuggaagcagugccc

SEQ ID NO: 3631884 - RNA, 13 nt, Human
ccuggacacaggc

SEQ ID NO: 3631885 - RNA, 17 nt, Human
ccuggacacucagaccu

SEQ ID NO: 3631886 - RNA, 20 nt, Human
ccuggacagcugugccucgc

SEQ ID NO: 3631887 - RNA, 14 nt, Human
ccuggacaggccag

SEQ ID NO: 3631888 - RNA, 24 nt, Human
ccuggacaugaagauucuuuccca

SEQ ID NO: 3631889 - RNA, 20 nt, Human
ccuggacauuuuuucaguca

SEQ ID NO: 3631890 - RNA, 14 nt, Human
ccuggaccaaagcu

SEQ ID NO: 3631891 - RNA, 18 nt, Human
cgagaucacgccacugca

SEQ ID NO: 3631892 - RNA, 17 nt, Human
cgagaucaguauuuaac

SEQ ID NO: 3631893 - RNA, 15 nt, Human
cgagaucccaacacu

SEQ ID NO: 3631894 - RNA, 20 nt, Human
cgagauugcaccacugcacu

SEQ ID NO: 3631895 - RNA, 22 nt, Human
cgagcaaccguggcccuuccug

SEQ ID NO: 3631896 - RNA, 13 nt, Human
cgagcaccuccac

SEQ ID NO: 3631897 - RNA, 14 nt, Human
cgagcagcugagca

SEQ ID NO: 3631898 - RNA, 13 nt, Human
cgagcaggaggcc

SEQ ID NO: 3631899 - RNA, 15 nt, Human
cgagcaguccugccu

SEQ ID NO: 3631900 - RNA, 23 nt, Human
cgagcaguccugccucagccucc

SEQ ID NO: 3631901 - RNA, 14 nt, Human
cgagcaugccugga

SEQ ID NO: 3631902 - RNA, 18 nt, Human
cgagcaugccuggauggg

SEQ ID NO: 3631903 - RNA, 21 nt, Human
cgagccauuugucccaagugc

SEQ ID NO: 3631904 - RNA, 23 nt, Human
cgagccauuugucccaagugcca

SEQ ID NO: 3631905 - RNA, 15 nt, Human
cgagcccugguggca

SEQ ID NO: 3631906 - RNA, 18 nt, Human
cgagcccugguggcagug

SEQ ID NO: 3631907 - RNA, 19 nt, Human
cgagcccugguggcagugg

SEQ ID NO: 3631908 - RNA, 24 nt, Human
cgagcccugguggcagugggagcu

SEQ ID NO: 3631909 - RNA, 17 nt, Human
cgagccgggccuggggc

SEQ ID NO: 3631910 - RNA, 20 nt, Human
cgagccucugucacugcagg

SEQ ID NO: 3631911 - RNA, 13 nt, Human
cgagccuggcucc

SEQ ID NO: 3631912 - RNA, 21 nt, Human
cgagcgcccugcagacccugc

SEQ ID NO: 3631913 - RNA, 10 nt, Human
cgagcuccuc

SEQ ID NO: 3631914 - RNA, 19 nt, Human
cgagcucguguauccuggg

SEQ ID NO: 3631915 - RNA, 22 nt, Human
cgagcucguguauccuggggcu

SEQ ID NO: 3631916 - RNA, 15 nt, Human
cgagcuggauguccc

SEQ ID NO: 3631917 - RNA, 14 nt, Human
cgagcuggugcauu

SEQ ID NO: 3631918 - RNA, 22 nt, Human
cgagcuggugcauuacagagag

SEQ ID NO: 3631919 - RNA, 14 nt, Human
cgagcuuuucuaaa

SEQ ID NO: 3631920 - RNA, 20 nt, Human
cgaggaaacgaaacccacuc

SEQ ID NO: 3631921 - RNA, 15 nt, Human
cgaggaaccagagcc

SEQ ID NO: 3631922 - RNA, 22 nt, Human
cgaggaaucugugggucuggga

SEQ ID NO: 3631923 - RNA, 14 nt, Human
cgaggacagggagg

SEQ ID NO: 3631924 - RNA, 17 nt, Human
cgaggacccagacccag

SEQ ID NO: 3631925 - RNA, 21 nt, Human
cgaggacuguauuugugacua

SEQ ID NO: 3631926 - RNA, 19 nt, Human
cgaggaggcuccagagggc

SEQ ID NO: 3631927 - RNA, 20 nt, Human
cgaggaggcuccagagggca

SEQ ID NO: 3631928 - RNA, 14 nt, Human
cgaggaggggagaa

SEQ ID NO: 3631929 - RNA, 13 nt, Human
cgaggaguaacaa

SEQ ID NO: 3631930 - RNA, 23 nt, Human
cgaggauuuuaauuuuuuuuagu

SEQ ID NO: 3631931 - RNA, 13 nt, Human
cgaggcaggcaga

SEQ ID NO: 3631932 - RNA, 14 nt, Human
cgaggcagggucag

SEQ ID NO: 3631933 - RNA, 11 nt, Human
cgaggcccugc

SEQ ID NO: 3631934 - RNA, 12 nt, Human
cgaggcccugca

SEQ ID NO: 3631935 - RNA, 14 nt, Human
cgaggcccugcaug

SEQ ID NO: 3631936 - RNA, 19 nt, Human
cgaggccuucucugaagga

SEQ ID NO: 3631937 - RNA, 12 nt, Human
cgaggcugagaa

SEQ ID NO: 3631938 - RNA, 13 nt, Human
cgaggcugagaau

SEQ ID NO: 3631939 - RNA, 13 nt, Human
cgaggcugggcca

SEQ ID NO: 3631940 - RNA, 19 nt, Human
cgaggggaggguggcaggu

SEQ ID NO: 3631941 - RNA, 16 nt, Human
cgaggggcucaggaaa

SEQ ID NO: 3631942 - RNA, 23 nt, Human
cgaggguccuggcuccugagggg

SEQ ID NO: 3631943 - RNA, 16 nt, Human
cgagguaugaggucua

SEQ ID NO: 3631944 - RNA, 17 nt, Human
cgaggucaacagagaag

SEQ ID NO: 3631945 - RNA, 23 nt, Human
cgaggucaacagagaaggcagga

SEQ ID NO: 3631946 - RNA, 14 nt, Human
cgaggucaggagau

SEQ ID NO: 3631947 - RNA, 20 nt, Human
cgaguaauugcauuugcuuu

SEQ ID NO: 3631948 - RNA, 20 nt, Human
cgaguagaaaaugugacccu

SEQ ID NO: 3631949 - RNA, 15 nt, Human
cgagucaccuuccag

SEQ ID NO: 3631950 - RNA, 12 nt, Human
cgagucacugcc

SEQ ID NO: 3631951 - RNA, 14 nt, Human
cgagucacugccuc

SEQ ID NO: 3631952 - RNA, 19 nt, Human
cgagucauucguucugugg

SEQ ID NO: 3631953 - RNA, 20 nt, Human
cgagucauucguucugugga

SEQ ID NO: 3631954 - RNA, 18 nt, Human
cgagucucuucuccacug

SEQ ID NO: 3631955 - RNA, 20 nt, Human
cgagucucuucuccacugga

SEQ ID NO: 3631956 - RNA, 13 nt, Human
cgagucugaggcc

SEQ ID NO: 3631957 - RNA, 17 nt, Human
cgagugagacaaaauuu

SEQ ID NO: 3631958 - RNA, 16 nt, Human
cgagugcuaaguguag

SEQ ID NO: 3631959 - RNA, 15 nt, Human
cgagugcucauuuca

SEQ ID NO: 3631960 - RNA, 21 nt, Human
cgaguggauagaugcccugcu

SEQ ID NO: 3631961 - RNA, 13 nt, Human
cgagugggaagga

SEQ ID NO: 3631962 - RNA, 20 nt, Human
cgaguggugacaggacgcug

SEQ ID NO: 3631963 - RNA, 11 nt, Human
cgagugugugc

SEQ ID NO: 3631964 - RNA, 18 nt, Human
cgagugugugcaugugug

SEQ ID NO: 3631965 - RNA, 17 nt, Human
cgaguguguuucauccu

SEQ ID NO: 3631966 - RNA, 17 nt, Human
cgaguuuggucccuggg

SEQ ID NO: 3631967 - RNA, 13 nt, Human
cgauaaggaagaa

SEQ ID NO: 3631968 - RNA, 20 nt, Human
cgauacaccgggccuggaga

SEQ ID NO: 3631969 - RNA, 19 nt, Human
cgauacugcgacuuucugc

SEQ ID NO: 3631970 - RNA, 15 nt, Human
cgauaguggugguga

SEQ ID NO: 3631971 - RNA, 22 nt, Human
cgauccaccugucucagccucc

SEQ ID NO: 3631972 - RNA, 17 nt, Human
cgauccugccacccugu

SEQ ID NO: 3631973 - RNA, 13 nt, Human
cgauccuuccucc

SEQ ID NO: 3631974 - RNA, 13 nt, Human
cgaucucagcuca

SEQ ID NO: 3631975 - RNA, 13 nt, Human
cgaucucuccugg

SEQ ID NO: 3631976 - RNA, 17 nt, Human
cgaucucuuauuuuaca

SEQ ID NO: 3631977 - RNA, 20 nt, Human
cgaugauucaggugcagagg

SEQ ID NO: 3631978 - RNA, 21 nt, Human
cgaugauucaggugcagagga

SEQ ID NO: 3631979 - RNA, 13 nt, Human
cgaugccagccaa

SEQ ID NO: 3631980 - RNA, 18 nt, Human
cgaugcuccagccaaccc

SEQ ID NO: 3631981 - RNA, 23 nt, Human
cgaugcuccagccaaccccugug

SEQ ID NO: 3631982 - RNA, 20 nt, Human
cgaugcugcuuuccccugug

SEQ ID NO: 3631983 - RNA, 21 nt, Human
cgaugcugcuuuccccugugg

SEQ ID NO: 3631984 - RNA, 22 nt, Human
cgaugcugcuuuccccuguggg

SEQ ID NO: 3631985 - RNA, 23 nt, Human
cgauggaggacuccaggcagcag

SEQ ID NO: 3631986 - RNA, 18 nt, Human
cgauggcuuugccagcuu

SEQ ID NO: 3631987 - RNA, 12 nt, Human
cgaugggucagg

SEQ ID NO: 3631988 - RNA, 18 nt, Human
cgaugguacgugacccuc

SEQ ID NO: 3631989 - RNA, 11 nt, Human
cgauguggccc

SEQ ID NO: 3631990 - RNA, 18 nt, Human
cgauguggcccuggccug

SEQ ID NO: 3631991 - RNA, 17 nt, Human
cgauuauuaucuaaagu

SEQ ID NO: 3631992 - RNA, 16 nt, Human
cgauucacccugucca

SEQ ID NO: 3631993 - RNA, 18 nt, Human
cgauucccucucccaggc

SEQ ID NO: 3631994 - RNA, 13 nt, Human
cgauuccuucucu

SEQ ID NO: 3631995 - RNA, 16 nt, Human
cgauucucuugccuca

SEQ ID NO: 3631996 - RNA, 13 nt, Human
cgauucuucugcu

SEQ ID NO: 3631997 - RNA, 19 nt, Human
cgauucuucugcuucagcc

SEQ ID NO: 3631998 - RNA, 14 nt, Human
cgauuuaauucucu

SEQ ID NO: 3631999 - RNA, 21 nt, Human
cgauuucccugguuuuagucu

SEQ ID NO: 3632000 - RNA, 20 nt, Human
cgauuucuguuuagauaaua

SEQ ID NO: 3632001 - RNA, 14 nt, Human
cgauuugucccagg

SEQ ID NO: 3632002 - RNA, 17 nt, Human
cgauuuuguaucugcag

SEQ ID NO: 3632003 - RNA, 15 nt, Human
cgcaaagagagauuu

SEQ ID NO: 3632004 - RNA, 14 nt, Human
cgcaacccgugcca

SEQ ID NO: 3632005 - RNA, 19 nt, Human
cgcaacccgugccaagucc

SEQ ID NO: 3632006 - RNA, 22 nt, Human
cgcaagagccauguagaagcug

SEQ ID NO: 3632007 - RNA, 19 nt, Human
cgcaagcaccauccccucc

SEQ ID NO: 3632008 - RNA, 22 nt, Human
cgcaaugaaaagucguuuucca

SEQ ID NO: 3632009 - RNA, 11 nt, Human
cgcaaugugac

SEQ ID NO: 3632010 - RNA, 15 nt, Human
cgcacacacacacac

SEQ ID NO: 3632011 - RNA, 12 nt, Human
cgcacagagcug

SEQ ID NO: 3632012 - RNA, 17 nt, Human
cgcacagagcuggggcu

SEQ ID NO: 3632013 - RNA, 15 nt, Human
cgcacagcagccugc

SEQ ID NO: 3632014 - RNA, 13 nt, Human
cgcacagcugcuc

SEQ ID NO: 3632015 - RNA, 12 nt, Human
cgcacauauaca

SEQ ID NO: 3632016 - RNA, 16 nt, Human
cgcacauauacacaca

SEQ ID NO: 3632017 - RNA, 17 nt, Human
cgcaccccccaagcugu

SEQ ID NO: 3632018 - RNA, 23 nt, Human
cgcaccgaaaaacuaaaaauaau

SEQ ID NO: 3632019 - RNA, 18 nt, Human
cgcaccucccauccuaau

SEQ ID NO: 3632020 - RNA, 13 nt, Human
cgcacgcacacac

SEQ ID NO: 3632021 - RNA, 15 nt, Human
cgcacgcacacacac

SEQ ID NO: 3632022 - RNA, 20 nt, Human
cgcacggccccgaagggccc

SEQ ID NO: 3632023 - RNA, 12 nt, Human
cgcacugccucu

SEQ ID NO: 3632024 - RNA, 17 nt, Human
cgcacugugacccccag

SEQ ID NO: 3632025 - RNA, 22 nt, Human
cgcacugugacccccagcuccg

SEQ ID NO: 3632026 - RNA, 23 nt, Human
cgcacuucgggaggucgaggcag

SEQ ID NO: 3632027 - RNA, 14 nt, Human
cgcacuuuccacuu

SEQ ID NO: 3632028 - RNA, 19 nt, Human
cgcacuuuccacuucuucc

SEQ ID NO: 3632029 - RNA, 20 nt, Human
cgcagaacgaaccuuggccu

SEQ ID NO: 3632030 - RNA, 13 nt, Human
cgcagaagcagac

SEQ ID NO: 3632031 - RNA, 17 nt, Human
cgcagacaccuuggaca

SEQ ID NO: 3632032 - RNA, 13 nt, Human
cgcagacaggacc

SEQ ID NO: 3632033 - RNA, 12 nt, Human
cgcagaccuccc

SEQ ID NO: 3632034 - RNA, 17 nt, Human
cgcagaccuccccagcc

SEQ ID NO: 3632035 - RNA, 20 nt, Human
cgcagaccuccccagccccu

SEQ ID NO: 3632036 - RNA, 15 nt, Human
cgcagaccucuggau

SEQ ID NO: 3632037 - RNA, 19 nt, Human
cgcugauaagcguucaugg

SEQ ID NO: 3632038 - RNA, 13 nt, Human
cgcugauauaugu

SEQ ID NO: 3632039 - RNA, 21 nt, Human
cgcugaugcugggcugggugc

SEQ ID NO: 3632040 - RNA, 23 nt, Human
cgcugccagccuugagcccuggc

SEQ ID NO: 3632041 - RNA, 19 nt, Human
cgcugccagcucuguauca

SEQ ID NO: 3632042 - RNA, 18 nt, Human
cgcugcccaccugccggc

SEQ ID NO: 3632043 - RNA, 19 nt, Human
cgcugcccaccugccggcc

SEQ ID NO: 3632044 - RNA, 24 nt, Human
cgcugccccaucuccccucagcuc

SEQ ID NO: 3632045 - RNA, 19 nt, Human
cgcugccccuggcagcccc

SEQ ID NO: 3632046 - RNA, 22 nt, Human
cgcugcccggcgcccucugucc

SEQ ID NO: 3632047 - RNA, 13 nt, Human
cgcugccgcaccc

SEQ ID NO: 3632048 - RNA, 20 nt, Human
cgcugccgcaccccagagug

SEQ ID NO: 3632049 - RNA, 17 nt, Human
cgcugccuaaguggcug

SEQ ID NO: 3632050 - RNA, 20 nt, Human
cgcugccuaaguggcugcug

SEQ ID NO: 3632051 - RNA, 15 nt, Human
cgcugcuccuuggcu

SEQ ID NO: 3632052 - RNA, 19 nt, Human
cgcugcugcgcccugggcu

SEQ ID NO: 3632053 - RNA, 15 nt, Human
cgcugcugcugcugc

SEQ ID NO: 3632054 - RNA, 23 nt, Human
cgcuggaccuugaacuggguacu

SEQ ID NO: 3632055 - RNA, 20 nt, Human
cgcuggacucucagucucug

SEQ ID NO: 3632056 - RNA, 10 nt, Human
cgcuggccca

SEQ ID NO: 3632057 - RNA, 13 nt, Human
cgcuggcccagcc

SEQ ID NO: 3632058 - RNA, 15 nt, Human
cgcuggcccagccgg

SEQ ID NO: 3632059 - RNA, 24 nt, Human
cgcuggcccagccggccucucugg

SEQ ID NO: 3632060 - RNA, 10 nt, Human
cgcuggcccc

SEQ ID NO: 3632061 - RNA, 17 nt, Human
cgcuggcccccacuggc

SEQ ID NO: 3632062 - RNA, 20 nt, Human
cgcuggcccccacuggcugu

SEQ ID NO: 3632063 - RNA, 23 nt, Human
cgcuggccccuuugggcccugca

SEQ ID NO: 3632064 - RNA, 16 nt, Human
cgcuggcuccccaaag

SEQ ID NO: 3632065 - RNA, 16 nt, Human
cgcugggcacuucccu

SEQ ID NO: 3632066 - RNA, 15 nt, Human
cgcugguagagaugg

SEQ ID NO: 3632067 - RNA, 18 nt, Human
cgcugguccuuucuuccg

SEQ ID NO: 3632068 - RNA, 13 nt, Human
cgcugucacaggc

SEQ ID NO: 3632069 - RNA, 18 nt, Human
cgcugucaggauugcgag

SEQ ID NO: 3632070 - RNA, 22 nt, Human
cgcugucuccagacccccaccc

SEQ ID NO: 3632071 - RNA, 15 nt, Human
cgcugugccacaggc

SEQ ID NO: 3632072 - RNA, 16 nt, Human
cgcugugcugcccugc

SEQ ID NO: 3632073 - RNA, 23 nt, Human
cgcugugcugcccugcccaccug

SEQ ID NO: 3632074 - RNA, 20 nt, Human
cgcuguguguuaguucccaa

SEQ ID NO: 3632075 - RNA, 14 nt, Human
cgcuguucacccac

SEQ ID NO: 3632076 - RNA, 17 nt, Human
cgcuguugcugaauagg

SEQ ID NO: 3632077 - RNA, 11 nt, Human
cgcuucacagg

SEQ ID NO: 3632078 - RNA, 16 nt, Human
cgcuucccccauagcc

SEQ ID NO: 3632079 - RNA, 20 nt, Human
cgcuucccccauagccaccc

SEQ ID NO: 3632080 - RNA, 20 nt, Human
cgcuucccugguucaagcga

SEQ ID NO: 3632081 - RNA, 16 nt, Human
cgcuucgacuuuucuu

SEQ ID NO: 3632082 - RNA, 16 nt, Human
cgcuugaagccugaac

SEQ ID NO: 3632083 - RNA, 13 nt, Human
cgcuugagaaaaa

SEQ ID NO: 3632084 - RNA, 17 nt, Human
cgcuugccacuagggcu

SEQ ID NO: 3632085 - RNA, 16 nt, Human
cgcuugccucggcucc

SEQ ID NO: 3632086 - RNA, 20 nt, Human
cgcuugccucggcuccugcu

SEQ ID NO: 3632087 - RNA, 23 nt, Human
cgcuugccucggcuccugcugca

SEQ ID NO: 3632088 - RNA, 20 nt, Human
cgcuuggcgaugccagccaa

SEQ ID NO: 3632089 - RNA, 22 nt, Human
cgcuuggcgaugccagccaagc

SEQ ID NO: 3632090 - RNA, 18 nt, Human
cgcuuguaaauaccagga

SEQ ID NO: 3632091 - RNA, 12 nt, Human
cgcuuguagaac

SEQ ID NO: 3632092 - RNA, 21 nt, Human
cgcuuguagaacucacucugg

SEQ ID NO: 3632093 - RNA, 22 nt, Human
cgcuuguagaacucacucuggg

SEQ ID NO: 3632094 - RNA, 23 nt, Human
cgcuuguagaacucacucugggc

SEQ ID NO: 3632095 - RNA, 18 nt, Human
cgcuuguggggacccagg

SEQ ID NO: 3632096 - RNA, 19 nt, Human
cgcuuguggggacccaggc

SEQ ID NO: 3632097 - RNA, 20 nt, Human
cgcuuguggggacccaggcu

SEQ ID NO: 3632098 - RNA, 14 nt, Human
cgcuuucuacccag

SEQ ID NO: 3632099 - RNA, 15 nt, Human
cgcuuuggccugagu

SEQ ID NO: 3632100 - RNA, 12 nt, Human
cgcuuugucaca

SEQ ID NO: 3632101 - RNA, 17 nt, Human
cgcuuuuccuuggcauu

SEQ ID NO: 3632102 - RNA, 23 nt, Human
cgcuuuugccauuagccaaggau

SEQ ID NO: 3632103 - RNA, 19 nt, Human
cgcuuuugcuggucacugc

SEQ ID NO: 3632104 - RNA, 20 nt, Human
cggaaaacaugcuacacacu

SEQ ID NO: 3632105 - RNA, 18 nt, Human
cggaaaaugccaaucucu

SEQ ID NO: 3632106 - RNA, 16 nt, Human
cggaaagaagaaggug

SEQ ID NO: 3632107 - RNA, 12 nt, Human
cggaaagaagag

SEQ ID NO: 3632108 - RNA, 12 nt, Human
cggaaagcagcu

SEQ ID NO: 3632109 - RNA, 12 nt, Human
cggaaagguauu

SEQ ID NO: 3632110 - RNA, 13 nt, Human
cggaaauuaaagu

SEQ ID NO: 3632111 - RNA, 13 nt, Human
cggaacagcagau

SEQ ID NO: 3632112 - RNA, 16 nt, Human
cggaacugcaugcugc

SEQ ID NO: 3632113 - RNA, 21 nt, Human
cggaagaagagaucaggaaga

SEQ ID NO: 3632114 - RNA, 12 nt, Human
cggaaguuuuca

SEQ ID NO: 3632115 - RNA, 13 nt, Human
cggaauauauuuu

SEQ ID NO: 3632116 - RNA, 21 nt, Human
cggaauccugucgauuagacu

SEQ ID NO: 3632117 - RNA, 20 nt, Human
cggaaugaaccacaucuugc

SEQ ID NO: 3632118 - RNA, 22 nt, Human
cggacaaaaccccccagauauc

SEQ ID NO: 3632119 - RNA, 22 nt, Human
cggacaauaaaccuccgccaau

SEQ ID NO: 3632120 - RNA, 16 nt, Human
cggacacuccuagaga

SEQ ID NO: 3632121 - RNA, 13 nt, Human
cggacaguggcag

SEQ ID NO: 3632122 - RNA, 21 nt, Human
cggaccacccucacuggcucu

SEQ ID NO: 3632123 - RNA, 12 nt, Human
cggaccagccug

SEQ ID NO: 3632124 - RNA, 14 nt, Human
cggaccagccuggc

SEQ ID NO: 3632125 - RNA, 21 nt, Human
cggaccccacuccggcccucc

SEQ ID NO: 3632126 - RNA, 12 nt, Human
cggaccccagcu

SEQ ID NO: 3632127 - RNA, 13 nt, Human
cggaccccagcug

SEQ ID NO: 3632128 - RNA, 20 nt, Human
cggaccccagcugugagccu

SEQ ID NO: 3632129 - RNA, 22 nt, Human
cggaccccagcugugagccuug

SEQ ID NO: 3632130 - RNA, 14 nt, Human
cggaccuuucagcu

SEQ ID NO: 3632131 - RNA, 16 nt, Human
cggacgcccaggaccc

SEQ ID NO: 3632132 - RNA, 23 nt, Human
cggacuuagaaaaccagcucagc

SEQ ID NO: 3632133 - RNA, 15 nt, Human
cggacuuuucugcaa

SEQ ID NO: 3632134 - RNA, 16 nt, Human
cggacuuuucugcaaa

SEQ ID NO: 3632135 - RNA, 17 nt, Human
cggagaagagcgcagug

SEQ ID NO: 3632136 - RNA, 23 nt, Human
cggagaagagcuguucacagcca

SEQ ID NO: 3632137 - RNA, 23 nt, Human
cggagaagugugccuucucucuc

SEQ ID NO: 3632138 - RNA, 15 nt, Human
cggagacgggaccgg

SEQ ID NO: 3632139 - RNA, 18 nt, Human
cggagaguacagugagcc

SEQ ID NO: 3632140 - RNA, 14 nt, Human
cggagagugggggu

SEQ ID NO: 3632141 - RNA, 18 nt, Human
cggagauaugaagagcaa

SEQ ID NO: 3632142 - RNA, 16 nt, Human
cggagcaaacucugcu

SEQ ID NO: 3632143 - RNA, 14 nt, Human
cggagcaagaggag

SEQ ID NO: 3632144 - RNA, 11 nt, Human
cggagccacuc

SEQ ID NO: 3632145 - RNA, 14 nt, Human
cggagccccaggcc

SEQ ID NO: 3632146 - RNA, 20 nt, Human
cggagcggauugcaaagcaa

SEQ ID NO: 3632147 - RNA, 20 nt, Human
cggagcuaacacuggccccu

SEQ ID NO: 3632148 - RNA, 19 nt, Human
cggagcugccccucucugg

SEQ ID NO: 3632149 - RNA, 23 nt, Human
cggagcugccccucucugggccu

SEQ ID NO: 3632150 - RNA, 16 nt, Human
cggagcuggccccgcc

SEQ ID NO: 3632151 - RNA, 21 nt, Human
cggagcuggccccgccgccug

SEQ ID NO: 3632152 - RNA, 20 nt, Human
cggaggaaggaggacccagg

SEQ ID NO: 3632153 - RNA, 23 nt, Human
cggaggaaggaggacccaggaca

SEQ ID NO: 3632154 - RNA, 11 nt, Human
cggaggagaag

SEQ ID NO: 3632155 - RNA, 12 nt, Human
cggaggcaaaag

SEQ ID NO: 3632156 - RNA, 22 nt, Human
cggaggcauccuacccuuuucu

SEQ ID NO: 3632157 - RNA, 19 nt, Human
cggaggccacaugaguccc

SEQ ID NO: 3632158 - RNA, 21 nt, Human
cggaggccacaugagucccag

SEQ ID NO: 3632159 - RNA, 14 nt, Human
cggaggcggugggc

SEQ ID NO: 3632160 - RNA, 16 nt, Human
cggaggcugcccccgg

SEQ ID NO: 3632161 - RNA, 15 nt, Human
cggaggcuugggacc

SEQ ID NO: 3632162 - RNA, 16 nt, Human
cggaggcuugggaccg

SEQ ID NO: 3632163 - RNA, 18 nt, Human
cggaggcuugucagagcu

SEQ ID NO: 3632164 - RNA, 19 nt, Human
cggaggcuugucagagcug

SEQ ID NO: 3632165 - RNA, 14 nt, Human
cggaggggaguaga

SEQ ID NO: 3632166 - RNA, 15 nt, Human
cggaggggccuggca

SEQ ID NO: 3632167 - RNA, 16 nt, Human
cggaggggccuggcag

SEQ ID NO: 3632168 - RNA, 21 nt, Human
cggagggugggggccaccugc

SEQ ID NO: 3632169 - RNA, 22 nt, Human
cggagggugggggccaccugcc

SEQ ID NO: 3632170 - RNA, 16 nt, Human
cggagguguggagccg

SEQ ID NO: 3632171 - RNA, 22 nt, Human
cggagguugggugggccggcuu

SEQ ID NO: 3632172 - RNA, 17 nt, Human
cggagucaaaaauuaaa

SEQ ID NO: 3632173 - RNA, 15 nt, Human
cggagucagugccag

SEQ ID NO: 3632174 - RNA, 16 nt, Human
cggaguccacucccag

SEQ ID NO: 3632175 - RNA, 23 nt, Human
cggaguccuguguuugugagucg

SEQ ID NO: 3632176 - RNA, 23 nt, Human
cggagucguggggugugcuggga

SEQ ID NO: 3632177 - RNA, 14 nt, Human
cggagugaagaggg

SEQ ID NO: 3632178 - RNA, 18 nt, Human
cggagugaagaggggcag

SEQ ID NO: 3632179 - RNA, 14 nt, Human
cggagugcggacca

SEQ ID NO: 3632180 - RNA, 23 nt, Human
cggaguucggaaaccguccugug

SEQ ID NO: 3632181 - RNA, 17 nt, Human
cuagauggugcugagaa

SEQ ID NO: 3632182 - RNA, 19 nt, Human
cuagauggugcugagaagc

SEQ ID NO: 3632183 - RNA, 21 nt, Human
cuagauguauaacuaggagcu

SEQ ID NO: 3632184 - RNA, 21 nt, Human
cuagauguuuauucuucuaga

SEQ ID NO: 3632185 - RNA, 21 nt, Human
cuagauuacccccucauuguu

SEQ ID NO: 3632186 - RNA, 16 nt, Human
cuagauuauaucaaag

SEQ ID NO: 3632187 - RNA, 20 nt, Human
cuagauucaaagguucuagg

SEQ ID NO: 3632188 - RNA, 24 nt, Human
cuagauugagagaagagacaaaca

SEQ ID NO: 3632189 - RNA, 12 nt, Human
cuagauuuaaua

SEQ ID NO: 3632190 - RNA, 18 nt, Human
cuagauuuaauauaaagu

SEQ ID NO: 3632191 - RNA, 19 nt, Human
cuagauuuucacuuaugaa

SEQ ID NO: 3632192 - RNA, 20 nt, Human
cuagauuuuguuuugcuuuu

SEQ ID NO: 3632193 - RNA, 15 nt, Human
cuagcaaaagaagua

SEQ ID NO: 3632194 - RNA, 15 nt, Human
cuagcaaaauaaaac

SEQ ID NO: 3632195 - RNA, 21 nt, Human
cuagcaaccgccucaaaaugu

SEQ ID NO: 3632196 - RNA, 21 nt, Human
cuagcaagcugccgaaccaaa

SEQ ID NO: 3632197 - RNA, 19 nt, Human
cuagcaagugagagagaug

SEQ ID NO: 3632198 - RNA, 17 nt, Human
cuagcacagcucccuuc

SEQ ID NO: 3632199 - RNA, 20 nt, Human
cuagcacaugcuucaauagu

SEQ ID NO: 3632200 - RNA, 15 nt, Human
cuagcaccagggacu

SEQ ID NO: 3632201 - RNA, 19 nt, Human
cuagcacucauuuucuaua

SEQ ID NO: 3632202 - RNA, 14 nt, Human
cuagcacuggccug

SEQ ID NO: 3632203 - RNA, 16 nt, Human
cuagcacuuggagcca

SEQ ID NO: 3632204 - RNA, 11 nt, Human
cuagcagagag

SEQ ID NO: 3632205 - RNA, 23 nt, Human
cuagcagagcaggggcaggguga

SEQ ID NO: 3632206 - RNA, 19 nt, Human
cuagcagcaccguucugug

SEQ ID NO: 3632207 - RNA, 19 nt, Human
cuagcagcccacccugcug

SEQ ID NO: 3632208 - RNA, 16 nt, Human
cuagcauacguacaca

SEQ ID NO: 3632209 - RNA, 20 nt, Human
cuagcauacguacacauuuu

SEQ ID NO: 3632210 - RNA, 15 nt, Human
cuagcauaucugccu

SEQ ID NO: 3632211 - RNA, 21 nt, Human
cuagcauaugaguuucauagc

SEQ ID NO: 3632212 - RNA, 20 nt, Human
cuagccaaaccaggacccug

SEQ ID NO: 3632213 - RNA, 13 nt, Human
cuagccaaaccuc

SEQ ID NO: 3632214 - RNA, 22 nt, Human
cuagccaccaacucuugcaggu

SEQ ID NO: 3632215 - RNA, 19 nt, Human
cuagccaccgccuccuaca

SEQ ID NO: 3632216 - RNA, 15 nt, Human
cuagccagaggagag

SEQ ID NO: 3632217 - RNA, 23 nt, Human
cuagccaggaaguacuuccaccu

SEQ ID NO: 3632218 - RNA, 14 nt, Human
cuagccauuccugg

SEQ ID NO: 3632219 - RNA, 17 nt, Human
cuagccauuccugguac

SEQ ID NO: 3632220 - RNA, 18 nt, Human
cuagcccaaugaaaugaa

SEQ ID NO: 3632221 - RNA, 14 nt, Human
cuagcccacccugc

SEQ ID NO: 3632222 - RNA, 15 nt, Human
cuagcccaggagaga

SEQ ID NO: 3632223 - RNA, 16 nt, Human
cuagcccaggagagag

SEQ ID NO: 3632224 - RNA, 20 nt, Human
cuagcccaggagagagaaag

SEQ ID NO: 3632225 - RNA, 22 nt, Human
cuagcccaggagagagaaagcc

SEQ ID NO: 3632226 - RNA, 13 nt, Human
cuagccccugugg

SEQ ID NO: 3632227 - RNA, 20 nt, Human
cuagccccuguggagacugg

SEQ ID NO: 3632228 - RNA, 21 nt, Human
cuagccccuguggagacuggg

SEQ ID NO: 3632229 - RNA, 18 nt, Human
cuagcccuccuuuuucca

SEQ ID NO: 3632230 - RNA, 13 nt, Human
cuagcccucucac

SEQ ID NO: 3632231 - RNA, 19 nt, Human
cuagcccucucacauuuau

SEQ ID NO: 3632232 - RNA, 21 nt, Human
cuagcccucucccucuaggcu

SEQ ID NO: 3632233 - RNA, 20 nt, Human
cuagccuaggucauaaagag

SEQ ID NO: 3632234 - RNA, 21 nt, Human
cuagccuauuuaccugcaggc

SEQ ID NO: 3632235 - RNA, 13 nt, Human
cuagccucuccag

SEQ ID NO: 3632236 - RNA, 19 nt, Human
cuagccugugccucuggga

SEQ ID NO: 3632237 - RNA, 16 nt, Human
cuagccuguuucuucc

SEQ ID NO: 3632238 - RNA, 21 nt, Human
cuagccuuagaagucacacag

SEQ ID NO: 3632239 - RNA, 22 nt, Human
cuagccuuauccucugaucucc

SEQ ID NO: 3632240 - RNA, 11 nt, Human
cuagccuugcu

SEQ ID NO: 3632241 - RNA, 14 nt, Human
cuagccuugcuugu

SEQ ID NO: 3632242 - RNA, 15 nt, Human
cuagccuugcuuguu

SEQ ID NO: 3632243 - RNA, 19 nt, Human
cuagccuuuggcucuggag

SEQ ID NO: 3632244 - RNA, 17 nt, Human
cuagcgaucucuccugg

SEQ ID NO: 3632245 - RNA, 22 nt, Human
cuagcggaguuccagcaaacaa

SEQ ID NO: 3632246 - RNA, 19 nt, Human
cuagcgggauggggcuccc

SEQ ID NO: 3632247 - RNA, 22 nt, Human
cuagcguagugcagcagggcag

SEQ ID NO: 3632248 - RNA, 14 nt, Human
cuagcuagaaauau

SEQ ID NO: 3632249 - RNA, 16 nt, Human
cuagcuagaaauauga

SEQ ID NO: 3632250 - RNA, 21 nt, Human
cuagcuagaaauaugauuuua

SEQ ID NO: 3632251 - RNA, 23 nt, Human
cuagcuagaagugggccaggaca

SEQ ID NO: 3632252 - RNA, 16 nt, Human
cuagcuagcucaacua

SEQ ID NO: 3632253 - RNA, 19 nt, Human
cuagcuaugcuguaucugu

SEQ ID NO: 3632254 - RNA, 19 nt, Human
cuagcuccccuccucuccc

SEQ ID NO: 3632255 - RNA, 21 nt, Human
cuagcuccccuccucuccccu

SEQ ID NO: 3632256 - RNA, 23 nt, Human
cuagcuccccuccucuccccuac

SEQ ID NO: 3632257 - RNA, 20 nt, Human
cuagcucuauguuuacaaau

SEQ ID NO: 3632258 - RNA, 15 nt, Human
cuagcucucuaggcc

SEQ ID NO: 3632259 - RNA, 22 nt, Human
cuagcucucuaggccucuccag

SEQ ID NO: 3632260 - RNA, 10 nt, Human
cuagcugaau

SEQ ID NO: 3632261 - RNA, 19 nt, Human
cuagcugaauguuuuucua

SEQ ID NO: 3632262 - RNA, 20 nt, Human
cuagcugaauguuuuucuaa

SEQ ID NO: 3632263 - RNA, 17 nt, Human
cuagcugcacagggcag

SEQ ID NO: 3632264 - RNA, 21 nt, Human
cuagcugcacagggcagcugg

SEQ ID NO: 3632265 - RNA, 22 nt, Human
cuagcugccuagcaagcuggcc

SEQ ID NO: 3632266 - RNA, 15 nt, Human
cuagcugcuacaaag

SEQ ID NO: 3632267 - RNA, 23 nt, Human
cuagcuguccuuuuuccucucca

SEQ ID NO: 3632268 - RNA, 13 nt, Human
cuagcuucugcuu

SEQ ID NO: 3632269 - RNA, 15 nt, Human
cuagcuucugcuuuu

SEQ ID NO: 3632270 - RNA, 16 nt, Human
cuagcuucugcuuuuc

SEQ ID NO: 3632271 - RNA, 20 nt, Human
cuagcuuuauauauggacau

SEQ ID NO: 3632272 - RNA, 14 nt, Human
cuagcuuuuaggaa

SEQ ID NO: 3632273 - RNA, 19 nt, Human
cuaggaaaagaaaucuaua

SEQ ID NO: 3632274 - RNA, 12 nt, Human
cuaggaaaauac

SEQ ID NO: 3632275 - RNA, 17 nt, Human
cuaggaaauccagggug

SEQ ID NO: 3632276 - RNA, 15 nt, Human
cuaggaacacuccuu

SEQ ID NO: 3632277 - RNA, 11 nt, Human
cuaggaagaau

SEQ ID NO: 3632278 - RNA, 17 nt, Human
cuaggaagacuuuggaa

SEQ ID NO: 3632279 - RNA, 23 nt, Human
cuaggaagaucucugcagggccg

SEQ ID NO: 3632280 - RNA, 20 nt, Human
cuaggacacaguuccuggga

SEQ ID NO: 3632281 - RNA, 17 nt, Human
cuaggaccacucagccc

SEQ ID NO: 3632282 - RNA, 22 nt, Human
cuaggaccccuccaugugggcu

SEQ ID NO: 3632283 - RNA, 18 nt, Human
cuaggacgccacccagca

SEQ ID NO: 3632284 - RNA, 14 nt, Human
cuaggacucugagg

SEQ ID NO: 3632285 - RNA, 15 nt, Human
cuaggacucugaggc

SEQ ID NO: 3632286 - RNA, 17 nt, Human
cuaggacuucaaauugg

SEQ ID NO: 3632287 - RNA, 16 nt, Human
cuaggagaccaaggcg

SEQ ID NO: 3632288 - RNA, 19 nt, Human
cuaggagauaucugaggga

SEQ ID NO: 3632289 - RNA, 15 nt, Human
cuaggagcaaagccu

SEQ ID NO: 3632290 - RNA, 18 nt, Human
cuaggagcaaagccuguu

SEQ ID NO: 3632291 - RNA, 22 nt, Human
cuaggagcuuugacucaggagc

SEQ ID NO: 3632292 - RNA, 16 nt, Human
cuaggaggguccucug

SEQ ID NO: 3632293 - RNA, 14 nt, Human
cuaggagguaauga

SEQ ID NO: 3632294 - RNA, 17 nt, Human
cuaggaggucucuaaga

SEQ ID NO: 3632295 - RNA, 14 nt, Human
cuaggauacugcug

SEQ ID NO: 3632296 - RNA, 15 nt, Human
cuaggauacugcugc

SEQ ID NO: 3632297 - RNA, 22 nt, Human
cuaggauagcuaacuguaaauc

SEQ ID NO: 3632298 - RNA, 15 nt, Human
cuaggauaucuucuc

SEQ ID NO: 3632299 - RNA, 23 nt, Human
cuaggauguauauuuuauauaaa

SEQ ID NO: 3632300 - RNA, 20 nt, Human
cuaggauguugcucagaagu

SEQ ID NO: 3632301 - RNA, 19 nt, Human
cuaggauucacaccccacc

SEQ ID NO: 3632302 - RNA, 23 nt, Human
cuaggauucacaccccaccugcg

SEQ ID NO: 3632303 - RNA, 20 nt, Human
cuaggcacuguaguucuaag

SEQ ID NO: 3632304 - RNA, 13 nt, Human
cuaggcaggacau

SEQ ID NO: 3632305 - RNA, 22 nt, Human
cuaggcaggacaugcugaagcc

SEQ ID NO: 3632306 - RNA, 18 nt, Human
cuaggcagggugucugcc

SEQ ID NO: 3632307 - RNA, 22 nt, Human
cuaggcaguuagagaugccucc

SEQ ID NO: 3632308 - RNA, 17 nt, Human
cuaggcauucuggaccu

SEQ ID NO: 3632309 - RNA, 20 nt, Human
cuaggcauucuggaccucug

SEQ ID NO: 3632310 - RNA, 21 nt, Human
cuaggcauuuguaaauauuaa

SEQ ID NO: 3632311 - RNA, 22 nt, Human
cuaggcauuuguaaauauuaaa

SEQ ID NO: 3632312 - RNA, 17 nt, Human
cuaggccacuccuccaa

SEQ ID NO: 3632313 - RNA, 20 nt, Human
cuaggccaggugcaaccagg

SEQ ID NO: 3632314 - RNA, 20 nt, Human
cuaggcccccacuugccucu

SEQ ID NO: 3632315 - RNA, 13 nt, Human
cuaggccucagcc

SEQ ID NO: 3632316 - RNA, 16 nt, Human
cuaggccucagccaga

SEQ ID NO: 3632317 - RNA, 19 nt, Human
cuaggccuccuggcccagg

SEQ ID NO: 3632318 - RNA, 16 nt, Human
cuaggccucuccaguu

SEQ ID NO: 3632319 - RNA, 18 nt, Human
cuaggccuggccagaugc

SEQ ID NO: 3632320 - RNA, 18 nt, Human
cuaggcgagugccaggac

SEQ ID NO: 3632321 - RNA, 19 nt, Human
cuaggcgagugccaggacu

SEQ ID NO: 3632322 - RNA, 20 nt, Human
cuaggcuacaauuuucuccc

SEQ ID NO: 3632323 - RNA, 15 nt, Human
cuaggcuaggguggg

SEQ ID NO: 3632324 - RNA, 15 nt, Human
cuauccugcuguucu

SEQ ID NO: 3632325 - RNA, 19 nt, Human
cuauccuggcucuuuggag

SEQ ID NO: 3632326 - RNA, 12 nt, Human
cuauccuggcuu

SEQ ID NO: 3632327 - RNA, 13 nt, Human
cuauccuggcuuu

SEQ ID NO: 3632328 - RNA, 18 nt, Human
cuauccuggcuuugccca

SEQ ID NO: 3632329 - RNA, 12 nt, Human
cuauccuucgug

SEQ ID NO: 3632330 - RNA, 12 nt, Human
cuauccuuggca

SEQ ID NO: 3632331 - RNA, 20 nt, Human
cuauccuuggcaccaaagau

SEQ ID NO: 3632332 - RNA, 15 nt, Human
cuaucguaaaauuaa

SEQ ID NO: 3632333 - RNA, 18 nt, Human
cuaucguaaaauuaagaa

SEQ ID NO: 3632334 - RNA, 20 nt, Human
cuaucguucucucuuugcau

SEQ ID NO: 3632335 - RNA, 13 nt, Human
cuaucuaaaguuu

SEQ ID NO: 3632336 - RNA, 14 nt, Human
cuaucuaaaguuug

SEQ ID NO: 3632337 - RNA, 15 nt, Human
cuaucuacucuccuc

SEQ ID NO: 3632338 - RNA, 16 nt, Human
cuaucuacucuccuca

SEQ ID NO: 3632339 - RNA, 15 nt, Human
cuaucuaucuuccaa

SEQ ID NO: 3632340 - RNA, 14 nt, Human
cuaucucacagcac

SEQ ID NO: 3632341 - RNA, 19 nt, Human
cuaucuccagcggcccugu

SEQ ID NO: 3632342 - RNA, 15 nt, Human
cuaucuccugacaga

SEQ ID NO: 3632343 - RNA, 19 nt, Human
cuaucuccugacagaaggu

SEQ ID NO: 3632344 - RNA, 17 nt, Human
cuaucucucaaaacuug

SEQ ID NO: 3632345 - RNA, 17 nt, Human
cuaucugauuuugugca

SEQ ID NO: 3632346 - RNA, 18 nt, Human
cuaucugauuuugugcaa

SEQ ID NO: 3632347 - RNA, 18 nt, Human
cuaucugcuuaugcaguu

SEQ ID NO: 3632348 - RNA, 16 nt, Human
cuaucugggaagcuau

SEQ ID NO: 3632349 - RNA, 12 nt, Human
cuaucugggccu

SEQ ID NO: 3632350 - RNA, 15 nt, Human
cuaucugggccuggg

SEQ ID NO: 3632351 - RNA, 16 nt, Human
cuaucugggccugggc

SEQ ID NO: 3632352 - RNA, 14 nt, Human
cuaucugggcuucc

SEQ ID NO: 3632353 - RNA, 15 nt, Human
cuaucugggcuuccu

SEQ ID NO: 3632354 - RNA, 17 nt, Human
cuaucugggcuuccugg

SEQ ID NO: 3632355 - RNA, 21 nt, Human
cuaucugggcuuccuggagca

SEQ ID NO: 3632356 - RNA, 16 nt, Human
cuaucugguauuaaau

SEQ ID NO: 3632357 - RNA, 17 nt, Human
cuaucugucugguggcc

SEQ ID NO: 3632358 - RNA, 14 nt, Human
cuaucuguguuuug

SEQ ID NO: 3632359 - RNA, 21 nt, Human
cuaucuguuuacaguguuccg

SEQ ID NO: 3632360 - RNA, 15 nt, Human
cuaucuuaauuuugg

SEQ ID NO: 3632361 - RNA, 13 nt, Human
cuaucuuggagag

SEQ ID NO: 3632362 - RNA, 21 nt, Human
cuaugaaaagcuagaauugag

SEQ ID NO: 3632363 - RNA, 19 nt, Human
cuaugaaauauuauguuaa

SEQ ID NO: 3632364 - RNA, 19 nt, Human
cuaugaacucuguuuucuu

SEQ ID NO: 3632365 - RNA, 23 nt, Human
cuaugaaguauauaaugguuuca

SEQ ID NO: 3632366 - RNA, 20 nt, Human
cuaugaaucuauuauacugu

SEQ ID NO: 3632367 - RNA, 14 nt, Human
cuaugaaugggcaa

SEQ ID NO: 3632368 - RNA, 14 nt, Human
cuaugacacaugca

SEQ ID NO: 3632369 - RNA, 16 nt, Human
cuaugacugcucccca

SEQ ID NO: 3632370 - RNA, 20 nt, Human
cuaugacuugggcaccccca

SEQ ID NO: 3632371 - RNA, 12 nt, Human
cuaugaggaaag

SEQ ID NO: 3632372 - RNA, 13 nt, Human
cuaugaggaaagg

SEQ ID NO: 3632373 - RNA, 14 nt, Human
cuaugaggaaaggu

SEQ ID NO: 3632374 - RNA, 23 nt, Human
cuaugaggaauaauuauuuauuu

SEQ ID NO: 3632375 - RNA, 15 nt, Human
cuaugagggccuuga

SEQ ID NO: 3632376 - RNA, 14 nt, Human
cuaugagucuagau

SEQ ID NO: 3632377 - RNA, 20 nt, Human
cuaugaguggaaaaagccaa

SEQ ID NO: 3632378 - RNA, 22 nt, Human
cuaugaucccagcacuuuggga

SEQ ID NO: 3632379 - RNA, 16 nt, Human
cuaugauuuggaaaau

SEQ ID NO: 3632380 - RNA, 19 nt, Human
cuaugauuuggaaaauaaa

SEQ ID NO: 3632381 - RNA, 22 nt, Human
cuaugcaauauaucuaaauuga

SEQ ID NO: 3632382 - RNA, 20 nt, Human
cuaugcauaucaguugagcu

SEQ ID NO: 3632383 - RNA, 13 nt, Human
cuaugcauggugc

SEQ ID NO: 3632384 - RNA, 20 nt, Human
cuaugcauggugccccagga

SEQ ID NO: 3632385 - RNA, 20 nt, Human
cuaugcaugguuucagcacu

SEQ ID NO: 3632386 - RNA, 20 nt, Human
cuaugccagcucagucccau

SEQ ID NO: 3632387 - RNA, 13 nt, Human
cuaugcugcuuuu

SEQ ID NO: 3632388 - RNA, 21 nt, Human
cuaugcugguaggcuccugcc

SEQ ID NO: 3632389 - RNA, 18 nt, Human
cuaugcuguuuguaguga

SEQ ID NO: 3632390 - RNA, 15 nt, Human
cuaugcuuugaaaca

SEQ ID NO: 3632391 - RNA, 14 nt, Human
cuauggaauuuaua

SEQ ID NO: 3632392 - RNA, 12 nt, Human
cuauggacacag

SEQ ID NO: 3632393 - RNA, 14 nt, Human
cuauggagagcccu

SEQ ID NO: 3632394 - RNA, 17 nt, Human
cuauggagagcccuggg

SEQ ID NO: 3632395 - RNA, 16 nt, Human
cuauggauggcuucua

SEQ ID NO: 3632396 - RNA, 24 nt, Human
cuauggaugugggguccccaucau

SEQ ID NO: 3632397 - RNA, 22 nt, Human
cuauggcagaaaaaaugucugu

SEQ ID NO: 3632398 - RNA, 14 nt, Human
cuauggccugugcg

SEQ ID NO: 3632399 - RNA, 17 nt, Human
cuauggcuggccacugc

SEQ ID NO: 3632400 - RNA, 23 nt, Human
cuauggcuggccacugcacagag

SEQ ID NO: 3632401 - RNA, 19 nt, Human
cuaugggagagugucaacc

SEQ ID NO: 3632402 - RNA, 15 nt, Human
cuaugggagccccag

SEQ ID NO: 3632403 - RNA, 16 nt, Human
cuaugggagccccagg

SEQ ID NO: 3632404 - RNA, 16 nt, Human
cuauggggacauucca

SEQ ID NO: 3632405 - RNA, 21 nt, Human
cuauggggagaaaagacauga

SEQ ID NO: 3632406 - RNA, 19 nt, Human
cuaugggggcacugaggac

SEQ ID NO: 3632407 - RNA, 23 nt, Human
cuauggguaucaaacagcucagg

SEQ ID NO: 3632408 - RNA, 20 nt, Human
cuauggguguuaucaccuag

SEQ ID NO: 3632409 - RNA, 12 nt, Human
cuaugguaaaga

SEQ ID NO: 3632410 - RNA, 21 nt, Human
cuaugguaaagauauuauuca

SEQ ID NO: 3632411 - RNA, 22 nt, Human
cuaugguaaagauauuauucac

SEQ ID NO: 3632412 - RNA, 17 nt, Human
cuauggucuuauauuua

SEQ ID NO: 3632413 - RNA, 21 nt, Human
cuauggugccaauggaaccuc

SEQ ID NO: 3632414 - RNA, 16 nt, Human
cuauggugcucugucu

SEQ ID NO: 3632415 - RNA, 23 nt, Human
cuauggugcucugucuacuugcu

SEQ ID NO: 3632416 - RNA, 13 nt, Human
cuauguaaacuac

SEQ ID NO: 3632417 - RNA, 18 nt, Human
cuauguaacaaaccugca

SEQ ID NO: 3632418 - RNA, 15 nt, Human
cuauguaacugcauu

SEQ ID NO: 3632419 - RNA, 21 nt, Human
cuauguaacugcauugagaac

SEQ ID NO: 3632420 - RNA, 15 nt, Human
cuauguacaauauuu

SEQ ID NO: 3632421 - RNA, 14 nt, Human
cuauguaggaaaaa

SEQ ID NO: 3632422 - RNA, 19 nt, Human
cuauguaggaaaaaaauag

SEQ ID NO: 3632423 - RNA, 15 nt, Human
cuauguauaaaauac

SEQ ID NO: 3632424 - RNA, 18 nt, Human
cuauguauaaaauacaua

SEQ ID NO: 3632425 - RNA, 24 nt, Human
cuauguauaaaauacauagugaaa

SEQ ID NO: 3632426 - RNA, 13 nt, Human
cuauguauuugca

SEQ ID NO: 3632427 - RNA, 15 nt, Human
cuaugucccaggaau

SEQ ID NO: 3632428 - RNA, 16 nt, Human
cuaugucccuugcugu

SEQ ID NO: 3632429 - RNA, 15 nt, Human
cuauguccuaaggac

SEQ ID NO: 3632430 - RNA, 20 nt, Human
cuaugugacuugcaucgugg

SEQ ID NO: 3632431 - RNA, 18 nt, Human
cuaugugauuuuaacucu

SEQ ID NO: 3632432 - RNA, 23 nt, Human
cuauguggaaguggggcgggcuu

SEQ ID NO: 3632433 - RNA, 17 nt, Human
cuauguggcuguaucuu

SEQ ID NO: 3632434 - RNA, 15 nt, Human
cuauguuaauauuuu

SEQ ID NO: 3632435 - RNA, 15 nt, Human
cuauguuacuauuuu

SEQ ID NO: 3632436 - RNA, 14 nt, Human
cuauguugcccagg

SEQ ID NO: 3632437 - RNA, 14 nt, Human
cuauguuugcacuu

SEQ ID NO: 3632438 - RNA, 11 nt, Human
cuauguuugcu

SEQ ID NO: 3632439 - RNA, 19 nt, Human
cuauguuuugacauuuuua

SEQ ID NO: 3632440 - RNA, 14 nt, Human
cuauguuuuuaaug

SEQ ID NO: 3632441 - RNA, 15 nt, Human
cuauguuuuuaaugu

SEQ ID NO: 3632442 - RNA, 16 nt, Human
cuauguuuuuaaugua

SEQ ID NO: 3632443 - RNA, 11 nt, Human
cuauuaaaaga

SEQ ID NO: 3632444 - RNA, 12 nt, Human
cuauuaaaagac

SEQ ID NO: 3632445 - RNA, 20 nt, Human
cuauuaaagugcuaagguuc

SEQ ID NO: 3632446 - RNA, 22 nt, Human
cuauuaaaguggagaagcacac

SEQ ID NO: 3632447 - RNA, 16 nt, Human
cuauuaagauuuccaa

SEQ ID NO: 3632448 - RNA, 19 nt, Human
cuauuaaggauguagcuuu

SEQ ID NO: 3632449 - RNA, 22 nt, Human
cuauuaaggauguagcuuuuca

SEQ ID NO: 3632450 - RNA, 19 nt, Human
cuauuaaggugauauauuu

SEQ ID NO: 3632451 - RNA, 20 nt, Human
cuauuaccacugaagauaga

SEQ ID NO: 3632452 - RNA, 21 nt, Human
cuauuaccacugaagauagaa

SEQ ID NO: 3632453 - RNA, 14 nt, Human
cuauuagacuguag

SEQ ID NO: 3632454 - RNA, 12 nt, Human
cuauuagacuuu

SEQ ID NO: 3632455 - RNA, 18 nt, Human
cuauuagacuuuagaaau

SEQ ID NO: 3632456 - RNA, 21 nt, Human
cuauuagacuuuagaaauaaa

SEQ ID NO: 3632457 - RNA, 16 nt, Human
cuauuagccacaaaau

SEQ ID NO: 3632458 - RNA, 13 nt, Human
cuauuagccaguc

SEQ ID NO: 3632459 - RNA, 21 nt, Human
cuauuaggugcaauuucaagg

SEQ ID NO: 3632460 - RNA, 19 nt, Human
cuauuaguguuauaugaac

SEQ ID NO: 3632461 - RNA, 14 nt, Human
cuauuauagccaca

SEQ ID NO: 3632462 - RNA, 14 nt, Human
cuauuauauuaaaa

SEQ ID NO: 3632463 - RNA, 19 nt, Human
cuauuaucccagcugccua

SEQ ID NO: 3632464 - RNA, 23 nt, Human
cuauuaugaaugugaagccuucc

SEQ ID NO: 3632465 - RNA, 16 nt, Human
cuauuauggaaaacug

SEQ ID NO: 3632466 - RNA, 17 nt, Human
cuauuauggaaaacugu

SEQ ID NO: 3632467 - RNA, 18 nt, Human
cuauuauguuguuagaga

SEQ ID NO: 3632468 - RNA, 20 nt, Human
cuauuauuuucacuguagaa

SEQ ID NO: 3632469 - RNA, 18 nt, Human
cuccgccagccuccucug

SEQ ID NO: 3632470 - RNA, 23 nt, Human
cuccgccaggcgagauggggugg

SEQ ID NO: 3632471 - RNA, 23 nt, Human
cuccgccauucucaagcccugca

SEQ ID NO: 3632472 - RNA, 16 nt, Human
cuccgcccccagccua

SEQ ID NO: 3632473 - RNA, 17 nt, Human
cuccgcccccagccuau

SEQ ID NO: 3632474 - RNA, 20 nt, Human
cuccgcccccagccuaugag

SEQ ID NO: 3632475 - RNA, 21 nt, Human
cuccgcccccagccuaugagc

SEQ ID NO: 3632476 - RNA, 15 nt, Human
cuccgcccccaggua

SEQ ID NO: 3632477 - RNA, 16 nt, Human
cuccgccccugagccc

SEQ ID NO: 3632478 - RNA, 18 nt, Human
cuccgccccugagcccac

SEQ ID NO: 3632479 - RNA, 20 nt, Human
cuccgccccugagcccacug

SEQ ID NO: 3632480 - RNA, 14 nt, Human
cuccgcccuuaguc

SEQ ID NO: 3632481 - RNA, 15 nt, Human
cuccgccucccgggu

SEQ ID NO: 3632482 - RNA, 16 nt, Human
cuccgccuggccuggc

SEQ ID NO: 3632483 - RNA, 12 nt, Human
cuccgccuucac

SEQ ID NO: 3632484 - RNA, 19 nt, Human
cuccgccuucacuccggug

SEQ ID NO: 3632485 - RNA, 23 nt, Human
cuccgcggcgggcccugcccaca

SEQ ID NO: 3632486 - RNA, 12 nt, Human
cuccgcugugug

SEQ ID NO: 3632487 - RNA, 18 nt, Human
cuccgcuguguggauggg

SEQ ID NO: 3632488 - RNA, 19 nt, Human
cuccgcuuucuacccagcg

SEQ ID NO: 3632489 - RNA, 23 nt, Human
cuccgcuuucuacccagcgagcc

SEQ ID NO: 3632490 - RNA, 14 nt, Human
cuccggacuggugc

SEQ ID NO: 3632491 - RNA, 22 nt, Human
cuccggaggcugaggcaggaga

SEQ ID NO: 3632492 - RNA, 23 nt, Human
cuccggaggcugaggcaggagaa

SEQ ID NO: 3632493 - RNA, 21 nt, Human
cuccggcccuccuacccugcg

SEQ ID NO: 3632494 - RNA, 14 nt, Human
cuccggccuccccu

SEQ ID NO: 3632495 - RNA, 14 nt, Human
cuccggccucucca

SEQ ID NO: 3632496 - RNA, 22 nt, Human
cuccggccugaugacagagcga

SEQ ID NO: 3632497 - RNA, 20 nt, Human
cuccggcgucagccuccagc

SEQ ID NO: 3632498 - RNA, 15 nt, Human
cuccggcucccagcc

SEQ ID NO: 3632499 - RNA, 17 nt, Human
cuccggcucccagccuc

SEQ ID NO: 3632500 - RNA, 19 nt, Human
cuccggcucccagccucag

SEQ ID NO: 3632501 - RNA, 14 nt, Human
cuccggcugugcug

SEQ ID NO: 3632502 - RNA, 14 nt, Human
cuccgggaccccca

SEQ ID NO: 3632503 - RNA, 17 nt, Human
cuccgucacuaccuggc

SEQ ID NO: 3632504 - RNA, 19 nt, Human
cuccgucacuaccuggcug

SEQ ID NO: 3632505 - RNA, 22 nt, Human
cuccguccaggagccugugccu

SEQ ID NO: 3632506 - RNA, 15 nt, Human
cuccgugccuccacc

SEQ ID NO: 3632507 - RNA, 16 nt, Human
cuccgugccuccacca

SEQ ID NO: 3632508 - RNA, 21 nt, Human
cuccgugccuccaccaccacu

SEQ ID NO: 3632509 - RNA, 16 nt, Human
cuccgugcuuccucag

SEQ ID NO: 3632510 - RNA, 19 nt, Human
cuccgugcuuccucaguua

SEQ ID NO: 3632511 - RNA, 22 nt, Human
cuccguuagcuccuguggcccc

SEQ ID NO: 3632512 - RNA, 20 nt, Human
cuccuaaaacaacagaugua

SEQ ID NO: 3632513 - RNA, 12 nt, Human
cuccuaagagag

SEQ ID NO: 3632514 - RNA, 14 nt, Human
cuccuaagcaccug

SEQ ID NO: 3632515 - RNA, 23 nt, Human
cuccuaccccucccagcugacag

SEQ ID NO: 3632516 - RNA, 12 nt, Human
cuccuaccucag

SEQ ID NO: 3632517 - RNA, 13 nt, Human
cuccuaccucagc

SEQ ID NO: 3632518 - RNA, 15 nt, Human
cuccuaccucagccu

SEQ ID NO: 3632519 - RNA, 18 nt, Human
cuccuaccucagccuaga

SEQ ID NO: 3632520 - RNA, 18 nt, Human
cuccuaccugcccuggaa

SEQ ID NO: 3632521 - RNA, 13 nt, Human
cuccuacuccuga

SEQ ID NO: 3632522 - RNA, 15 nt, Human
cuccuagagaacgca

SEQ ID NO: 3632523 - RNA, 18 nt, Human
cuccuagagaacgcagcc

SEQ ID NO: 3632524 - RNA, 21 nt, Human
cuccuagagaacgcagcccua

SEQ ID NO: 3632525 - RNA, 17 nt, Human
cuccuagagacagaagc

SEQ ID NO: 3632526 - RNA, 23 nt, Human
cuccuagagacagaagcaggcug

SEQ ID NO: 3632527 - RNA, 13 nt, Human
cuccuagagggag

SEQ ID NO: 3632528 - RNA, 16 nt, Human
cuccuagccacccacc

SEQ ID NO: 3632529 - RNA, 14 nt, Human
cuccuagcuguccu

SEQ ID NO: 3632530 - RNA, 15 nt, Human
cuccuaggaaaauac

SEQ ID NO: 3632531 - RNA, 19 nt, Human
cuccuaggcauucuggacc

SEQ ID NO: 3632532 - RNA, 17 nt, Human
cuccuauaaucugucaa

SEQ ID NO: 3632533 - RNA, 18 nt, Human
cuccuauaaucugucaaa

SEQ ID NO: 3632534 - RNA, 22 nt, Human
cuccuauaaucugucaaaacac

SEQ ID NO: 3632535 - RNA, 14 nt, Human
cuccuauauauuuc

SEQ ID NO: 3632536 - RNA, 18 nt, Human
cuccuauauauuucuauu

SEQ ID NO: 3632537 - RNA, 19 nt, Human
cuccuaucaccuccccucc

SEQ ID NO: 3632538 - RNA, 22 nt, Human
cuccuaucagaaguuucucagc

SEQ ID NO: 3632539 - RNA, 13 nt, Human
cuccuaucugugu

SEQ ID NO: 3632540 - RNA, 14 nt, Human
cuccuaucuguguu

SEQ ID NO: 3632541 - RNA, 15 nt, Human
cuccuaucuguguuu

SEQ ID NO: 3632542 - RNA, 17 nt, Human
cuccuaugaucucaggu

SEQ ID NO: 3632543 - RNA, 12 nt, Human
cuccuaugugua

SEQ ID NO: 3632544 - RNA, 13 nt, Human
cuccuauguguaa

SEQ ID NO: 3632545 - RNA, 16 nt, Human
cuccuauucuauaaaa

SEQ ID NO: 3632546 - RNA, 16 nt, Human
cuccuauuuuuguaaa

SEQ ID NO: 3632547 - RNA, 18 nt, Human
cuccuauuuuuuuaaaau

SEQ ID NO: 3632548 - RNA, 15 nt, Human
cuccucaaccccucc

SEQ ID NO: 3632549 - RNA, 20 nt, Human
cuccucaauuuuugucucag

SEQ ID NO: 3632550 - RNA, 17 nt, Human
cuccucaccucaugccc

SEQ ID NO: 3632551 - RNA, 13 nt, Human
cuccucaccucug

SEQ ID NO: 3632552 - RNA, 22 nt, Human
cuccucaccucuggacuggcua

SEQ ID NO: 3632553 - RNA, 21 nt, Human
cuccucacucccuucccauaa

SEQ ID NO: 3632554 - RNA, 18 nt, Human
cuccucacugcccgcaca

SEQ ID NO: 3632555 - RNA, 18 nt, Human
cuccucacuggccauccc

SEQ ID NO: 3632556 - RNA, 20 nt, Human
cuccucacuggccaucccuc

SEQ ID NO: 3632557 - RNA, 14 nt, Human
cuccucacuguauc

SEQ ID NO: 3632558 - RNA, 19 nt, Human
cuccucacuguauccaggu

SEQ ID NO: 3632559 - RNA, 12 nt, Human
cuccucagaucu

SEQ ID NO: 3632560 - RNA, 18 nt, Human
cuccucagaucuucugug

SEQ ID NO: 3632561 - RNA, 11 nt, Human
cuccucagccu

SEQ ID NO: 3632562 - RNA, 12 nt, Human
cuccucaggacc

SEQ ID NO: 3632563 - RNA, 12 nt, Human
cuccucaggagc

SEQ ID NO: 3632564 - RNA, 13 nt, Human
cuccucaggagcc

SEQ ID NO: 3632565 - RNA, 19 nt, Human
cuccucaggcacacagcua

SEQ ID NO: 3632566 - RNA, 21 nt, Human
cuccucaggcacacagcuacu

SEQ ID NO: 3632567 - RNA, 22 nt, Human
cuccucagggauggccguuggc

SEQ ID NO: 3632568 - RNA, 18 nt, Human
cuccucaggguugagguc

SEQ ID NO: 3632569 - RNA, 16 nt, Human
cuccucauccagggcu

SEQ ID NO: 3632570 - RNA, 20 nt, Human
cuccucauguacauacccug

SEQ ID NO: 3632571 - RNA, 23 nt, Human
cuccuccaaaggaagucuaggag

SEQ ID NO: 3632572 - RNA, 21 nt, Human
cuccuccaagacacuguggac

SEQ ID NO: 3632573 - RNA, 21 nt, Human
cuccuccaccaccgcccgucu

SEQ ID NO: 3632574 - RNA, 18 nt, Human
cuccuccaccgccauggc

SEQ ID NO: 3632575 - RNA, 19 nt, Human
cuccuccaccgccauggcu

SEQ ID NO: 3632576 - RNA, 15 nt, Human
cuccuccagccccug

SEQ ID NO: 3632577 - RNA, 16 nt, Human
cuccuccagccccugu

SEQ ID NO: 3632578 - RNA, 21 nt, Human
cuccuccaggccugccuccca

SEQ ID NO: 3632579 - RNA, 19 nt, Human
cuccuccagggccacgugc

SEQ ID NO: 3632580 - RNA, 20 nt, Human
cuccuccagggccacgugcc

SEQ ID NO: 3632581 - RNA, 21 nt, Human
cuccuccagggugauuuuaug

SEQ ID NO: 3632582 - RNA, 23 nt, Human
cuccuccagugugggcuugacca

SEQ ID NO: 3632583 - RNA, 15 nt, Human
cuccucccacccggc

SEQ ID NO: 3632584 - RNA, 12 nt, Human
cuccucccacug

SEQ ID NO: 3632585 - RNA, 17 nt, Human
cuccucccacugcccac

SEQ ID NO: 3632586 - RNA, 14 nt, Human
cuccucccagccca

SEQ ID NO: 3632587 - RNA, 14 nt, Human
cuccucccagcuug

SEQ ID NO: 3632588 - RNA, 11 nt, Human
cuccucccagg

SEQ ID NO: 3632589 - RNA, 12 nt, Human
cuccucccagga

SEQ ID NO: 3632590 - RNA, 22 nt, Human
cuccucccaggcgccccuuccc

SEQ ID NO: 3632591 - RNA, 23 nt, Human
cuccucccaggcgccccuucccc

SEQ ID NO: 3632592 - RNA, 14 nt, Human
cuccucccaggguu

SEQ ID NO: 3632593 - RNA, 22 nt, Human
cuccucccaggguuuuaacuuu

SEQ ID NO: 3632594 - RNA, 14 nt, Human
cuccucccauguca

SEQ ID NO: 3632595 - RNA, 19 nt, Human
cuccuccccacccuccugg

SEQ ID NO: 3632596 - RNA, 21 nt, Human
cuccuccccccuccucugaaa

SEQ ID NO: 3632597 - RNA, 10 nt, Human
cuccucccuc

SEQ ID NO: 3632598 - RNA, 19 nt, Human
cuccucccugauguacagu

SEQ ID NO: 3632599 - RNA, 15 nt, Human
cuccucccugcaucu

SEQ ID NO: 3632600 - RNA, 18 nt, Human
cuccucccugcaucugac

SEQ ID NO: 3632601 - RNA, 17 nt, Human
cuccucccuggcugccc

SEQ ID NO: 3632602 - RNA, 19 nt, Human
cuccucccuggcugcccug

SEQ ID NO: 3632603 - RNA, 22 nt, Human
cuccucccuggcugcccuggcc

SEQ ID NO: 3632604 - RNA, 13 nt, Human
cuccucccuguua

SEQ ID NO: 3632605 - RNA, 20 nt, Human
cuccucccuguuauuuucaa

SEQ ID NO: 3632606 - RNA, 20 nt, Human
cuccucccuuagcucccugu

SEQ ID NO: 3632607 - RNA, 19 nt, Human
cuccucccuuuuuccuugu

SEQ ID NO: 3632608 - RNA, 15 nt, Human
cuccuccucccugca

SEQ ID NO: 3632609 - RNA, 17 nt, Human
cuccuccucuuucucuc

SEQ ID NO: 3632610 - RNA, 16 nt, Human
cuccuccuucccaaag

SEQ ID NO: 3632611 - RNA, 14 nt, Human
cuccuccuuccuag

SEQ ID NO: 3632612 - RNA, 24 nt, Human
cuccucgagaucccaacacugcca

SEQ ID NO: 3632613 - RNA, 15 nt, Human
cuccucgagggcagg

SEQ ID NO: 3632614 - RNA, 12 nt, Human
cucgcaacccgu

SEQ ID NO: 3632615 - RNA, 21 nt, Human
cucgcaacccgugccaagucc

SEQ ID NO: 3632616 - RNA, 22 nt, Human
cucgcaacccgugccaagucca

SEQ ID NO: 3632617 - RNA, 23 nt, Human
cucgcaacccgugccaaguccag

SEQ ID NO: 3632618 - RNA, 17 nt, Human
cucgcaccccccuguuc

SEQ ID NO: 3632619 - RNA, 23 nt, Human
cucgcaccccccuguucuaaggg

SEQ ID NO: 3632620 - RNA, 20 nt, Human
cucgcagagaggccaggugc

SEQ ID NO: 3632621 - RNA, 18 nt, Human
cucgcagccucucagugc

SEQ ID NO: 3632622 - RNA, 22 nt, Human
cucgcauaggaccuuuccacca

SEQ ID NO: 3632623 - RNA, 15 nt, Human
cucgcaucuucccaa

SEQ ID NO: 3632624 - RNA, 12 nt, Human
cucgccaugccg

SEQ ID NO: 3632625 - RNA, 14 nt, Human
cucgcccaguccca

SEQ ID NO: 3632626 - RNA, 19 nt, Human
cucgcccagucccagcagc

SEQ ID NO: 3632627 - RNA, 17 nt, Human
cucgccccaccggcgcg

SEQ ID NO: 3632628 - RNA, 14 nt, Human
cucgccccagcagg

SEQ ID NO: 3632629 - RNA, 15 nt, Human
cucgccccuggcaga

SEQ ID NO: 3632630 - RNA, 21 nt, Human
cucgcccgcccacuguccugg

SEQ ID NO: 3632631 - RNA, 18 nt, Human
cucgccggaucugaggga

SEQ ID NO: 3632632 - RNA, 14 nt, Human
cucgccucucccac

SEQ ID NO: 3632633 - RNA, 17 nt, Human
cucgccuggccugaggu

SEQ ID NO: 3632634 - RNA, 15 nt, Human
cucgccuucccuccu

SEQ ID NO: 3632635 - RNA, 16 nt, Human
cucgcgcucaguaaac

SEQ ID NO: 3632636 - RNA, 15 nt, Human
cucgcggcccucagu

SEQ ID NO: 3632637 - RNA, 19 nt, Human
cucgcuacauuuccgccac

SEQ ID NO: 3632638 - RNA, 22 nt, Human
cucgcuauugucaccagggcug

SEQ ID NO: 3632639 - RNA, 16 nt, Human
cucgcuccaacuccaa

SEQ ID NO: 3632640 - RNA, 23 nt, Human
cucgcuccccacucugcucugau

SEQ ID NO: 3632641 - RNA, 18 nt, Human
cucgcucccucccaggac

SEQ ID NO: 3632642 - RNA, 13 nt, Human
cucgcucugucac

SEQ ID NO: 3632643 - RNA, 23 nt, Human
cucgcucugucgcccaggcugga

SEQ ID NO: 3632644 - RNA, 16 nt, Human
cucgcucuguugccca

SEQ ID NO: 3632645 - RNA, 16 nt, Human
cucgcugaugcugggc

SEQ ID NO: 3632646 - RNA, 22 nt, Human
cucgcugaugcugggcugggug

SEQ ID NO: 3632647 - RNA, 18 nt, Human
cucgcugcacaaauacuc

SEQ ID NO: 3632648 - RNA, 15 nt, Human
cucgcugcuucugug

SEQ ID NO: 3632649 - RNA, 16 nt, Human
cucgcuggacucucag

SEQ ID NO: 3632650 - RNA, 14 nt, Human
cucgcuucccccau

SEQ ID NO: 3632651 - RNA, 18 nt, Human
cucgcuucccccauagcc

SEQ ID NO: 3632652 - RNA, 22 nt, Human
cucgcuuggacggcugggcaca

SEQ ID NO: 3632653 - RNA, 21 nt, Human
cucgcuuguaaauaccaggau

SEQ ID NO: 3632654 - RNA, 18 nt, Human
cucggaaccgcucaccua

SEQ ID NO: 3632655 - RNA, 14 nt, Human
cucggaaucuauuu

SEQ ID NO: 3632656 - RNA, 20 nt, Human
cucggaaucuauuuucucau

SEQ ID NO: 3632657 - RNA, 18 nt, Human
cucggacuaagccuaccu

SEQ ID NO: 3632658 - RNA, 22 nt, Human
cucggacuaagccuaccugcuc

SEQ ID NO: 3632659 - RNA, 13 nt, Human
cucggacucugcu

SEQ ID NO: 3632660 - RNA, 12 nt, Human
cucggagaagag

SEQ ID NO: 3632661 - RNA, 13 nt, Human
cucggagaagagc

SEQ ID NO: 3632662 - RNA, 22 nt, Human
cucggagccucauccgaggcag

SEQ ID NO: 3632663 - RNA, 23 nt, Human
cucggagccucauccgaggcagg

SEQ ID NO: 3632664 - RNA, 20 nt, Human
cucggaguaucugggaacug

SEQ ID NO: 3632665 - RNA, 21 nt, Human
cucggaguaucugggaacugu

SEQ ID NO: 3632666 - RNA, 21 nt, Human
cucggaguguguaugccaaga

SEQ ID NO: 3632667 - RNA, 23 nt, Human
cucggauccccuuccuaccaccc

SEQ ID NO: 3632668 - RNA, 23 nt, Human
cucggccucccaaagugcuggga

SEQ ID NO: 3632669 - RNA, 22 nt, Human
cucggccuccuaaagugcuggg

SEQ ID NO: 3632670 - RNA, 18 nt, Human
cucggcucacugcauccu

SEQ ID NO: 3632671 - RNA, 19 nt, Human
cucggcuccccaugugucc

SEQ ID NO: 3632672 - RNA, 22 nt, Human
cucggcuccccauguguccugg

SEQ ID NO: 3632673 - RNA, 13 nt, Human
cucggcucugcag

SEQ ID NO: 3632674 - RNA, 19 nt, Human
cucggcuuuucucagcugg

SEQ ID NO: 3632675 - RNA, 19 nt, Human
cucgggaggcugagacagg

SEQ ID NO: 3632676 - RNA, 20 nt, Human
cucgggaggcugaggcacaa

SEQ ID NO: 3632677 - RNA, 20 nt, Human
cucgggcccaccuggccacc

SEQ ID NO: 3632678 - RNA, 19 nt, Human
cucggggauguguccugac

SEQ ID NO: 3632679 - RNA, 15 nt, Human
cucggggugcacagg

SEQ ID NO: 3632680 - RNA, 18 nt, Human
cucggggugcacaggagg

SEQ ID NO: 3632681 - RNA, 21 nt, Human
cucggguggcuagucagagag

SEQ ID NO: 3632682 - RNA, 18 nt, Human
cucgguacccggggccca

SEQ ID NO: 3632683 - RNA, 22 nt, Human
cucgguacccggggcccagggc

SEQ ID NO: 3632684 - RNA, 11 nt, Human
cucggugccuu

SEQ ID NO: 3632685 - RNA, 11 nt, Human
cucggugguac

SEQ ID NO: 3632686 - RNA, 21 nt, Human
cucgguguccccaccaucugc

SEQ ID NO: 3632687 - RNA, 22 nt, Human
cucgguguccccaccaucugcu

SEQ ID NO: 3632688 - RNA, 17 nt, Human
cucgguguggagaagcg

SEQ ID NO: 3632689 - RNA, 14 nt, Human
cucgguugaaaccu

SEQ ID NO: 3632690 - RNA, 13 nt, Human
cucgguuucucca

SEQ ID NO: 3632691 - RNA, 22 nt, Human
cucgguuugccaaaauucauuu

SEQ ID NO: 3632692 - RNA, 14 nt, Human
cucguaacugguuu

SEQ ID NO: 3632693 - RNA, 18 nt, Human
cucguauaugucucaggu

SEQ ID NO: 3632694 - RNA, 22 nt, Human
cucgucaucauuuuuccuuccc

SEQ ID NO: 3632695 - RNA, 22 nt, Human
cucguccucccccugccagugc

SEQ ID NO: 3632696 - RNA, 23 nt, Human
cucgucucuuuuacccuggcccc

SEQ ID NO: 3632697 - RNA, 13 nt, Human
cucgucuuuccca

SEQ ID NO: 3632698 - RNA, 19 nt, Human
cucgugcaucccugagaca

SEQ ID NO: 3632699 - RNA, 21 nt, Human
cucgugccagucgcgcugccu

SEQ ID NO: 3632700 - RNA, 22 nt, Human
cucgugccagucgcgcugccug

SEQ ID NO: 3632701 - RNA, 20 nt, Human
cucguggacaccugcccugc

SEQ ID NO: 3632702 - RNA, 21 nt, Human
cucguggacaccugcccugcc

SEQ ID NO: 3632703 - RNA, 18 nt, Human
cucguggccagcccggcu

SEQ ID NO: 3632704 - RNA, 20 nt, Human
cucguggccuuccccagccu

SEQ ID NO: 3632705 - RNA, 21 nt, Human
cucguggccuuccccagccuc

SEQ ID NO: 3632706 - RNA, 14 nt, Human
cucguggcugucaa

SEQ ID NO: 3632707 - RNA, 16 nt, Human
cucgugguccccaaca

SEQ ID NO: 3632708 - RNA, 23 nt, Human
cucguguuauuuuaaucucagaa

SEQ ID NO: 3632709 - RNA, 17 nt, Human
cucguuccuuucuccug

SEQ ID NO: 3632710 - RNA, 23 nt, Human
cucguugacuggcuguguguugg

SEQ ID NO: 3632711 - RNA, 18 nt, Human
cucguuggaagaggaaca

SEQ ID NO: 3632712 - RNA, 13 nt, Human
cucguuugugauu

SEQ ID NO: 3632713 - RNA, 21 nt, Human
cucguuuuucuucuuaagacu

SEQ ID NO: 3632714 - RNA, 13 nt, Human
cucuaaaagaucc

SEQ ID NO: 3632715 - RNA, 22 nt, Human
cucuaaaagguaauguguggau

SEQ ID NO: 3632716 - RNA, 17 nt, Human
cucuaaaagguucaggg

SEQ ID NO: 3632717 - RNA, 21 nt, Human
cucuaaagaguuuauuuuaag

SEQ ID NO: 3632718 - RNA, 12 nt, Human
cucuaaagcaaa

SEQ ID NO: 3632719 - RNA, 16 nt, Human
cucuaaagcaaauuua

SEQ ID NO: 3632720 - RNA, 11 nt, Human
cucuaaagcac

SEQ ID NO: 3632721 - RNA, 23 nt, Human
cucuaaauacugagaaaaccugu

SEQ ID NO: 3632722 - RNA, 22 nt, Human
cucuaaaugaggggccucaggu

SEQ ID NO: 3632723 - RNA, 14 nt, Human
cucuaacagcucag

SEQ ID NO: 3632724 - RNA, 16 nt, Human
cucuaacagcucagga

SEQ ID NO: 3632725 - RNA, 18 nt, Human
cucuaacagcucaggauc

SEQ ID NO: 3632726 - RNA, 13 nt, Human
cucuaacauuucc

SEQ ID NO: 3632727 - RNA, 18 nt, Human
cucuaaccccaggccccg

SEQ ID NO: 3632728 - RNA, 17 nt, Human
cucuaaccucgcccucu

SEQ ID NO: 3632729 - RNA, 20 nt, Human
cucuaaccucgcccucuccu

SEQ ID NO: 3632730 - RNA, 21 nt, Human
cucuaacgccugagcccaggg

SEQ ID NO: 3632731 - RNA, 22 nt, Human
cucuaacgccugagcccaggga

SEQ ID NO: 3632732 - RNA, 20 nt, Human
cucuaacuuggcucacacuc

SEQ ID NO: 3632733 - RNA, 22 nt, Human
cucuaagaucuuagauucucug

SEQ ID NO: 3632734 - RNA, 19 nt, Human
cucuaagauguuauauuuu

SEQ ID NO: 3632735 - RNA, 16 nt, Human
cucuaaggcaggaugu

SEQ ID NO: 3632736 - RNA, 23 nt, Human
cucuaaggccgaagaaggguccu

SEQ ID NO: 3632737 - RNA, 14 nt, Human
cucuaagguugggc

SEQ ID NO: 3632738 - RNA, 22 nt, Human
cucuaagucauguauguuucuc

SEQ ID NO: 3632739 - RNA, 18 nt, Human
cucuaagugggcauugcc

SEQ ID NO: 3632740 - RNA, 19 nt, Human
cucuaagugggcauugcca

SEQ ID NO: 3632741 - RNA, 20 nt, Human
cucuaagugggcauugccau

SEQ ID NO: 3632742 - RNA, 18 nt, Human
cucuaaguguuugcugca

SEQ ID NO: 3632743 - RNA, 21 nt, Human
cucuaaguuccacugagcucc

SEQ ID NO: 3632744 - RNA, 13 nt, Human
cucuaauaaaaca

SEQ ID NO: 3632745 - RNA, 12 nt, Human
cucuaauaagaa

SEQ ID NO: 3632746 - RNA, 12 nt, Human
cucuaauaauaa

SEQ ID NO: 3632747 - RNA, 15 nt, Human
cucuaauaucagcaa

SEQ ID NO: 3632748 - RNA, 18 nt, Human
cucuaaugcucacgcucc

SEQ ID NO: 3632749 - RNA, 15 nt, Human
cucuaauucacagug

SEQ ID NO: 3632750 - RNA, 20 nt, Human
cucuaauucacagugcucuu

SEQ ID NO: 3632751 - RNA, 20 nt, Human
cucuaauucccauuuugcaa

SEQ ID NO: 3632752 - RNA, 13 nt, Human
cucuaauucuaac

SEQ ID NO: 3632753 - RNA, 17 nt, Human
cucuacaaacucccacu

SEQ ID NO: 3632754 - RNA, 17 nt, Human
cucuacaacugaguccu

SEQ ID NO: 3632755 - RNA, 17 nt, Human
cucuacaauuggaagau

SEQ ID NO: 3632756 - RNA, 14 nt, Human
cucuacacugugaa

SEQ ID NO: 3632757 - RNA, 20 nt, Human
cugagcagugaaugauucag

SEQ ID NO: 3632758 - RNA, 18 nt, Human
cugagccacagcagcauu

SEQ ID NO: 3632759 - RNA, 20 nt, Human
cugagccacagcagcauuuu

SEQ ID NO: 3632760 - RNA, 13 nt, Human
cugagccacagug

SEQ ID NO: 3632761 - RNA, 12 nt, Human
cugagccaccug

SEQ ID NO: 3632762 - RNA, 15 nt, Human
cugagccacucucuu

SEQ ID NO: 3632763 - RNA, 13 nt, Human
cugagccagauuu

SEQ ID NO: 3632764 - RNA, 15 nt, Human
cugagccagauuuca

SEQ ID NO: 3632765 - RNA, 19 nt, Human
cugagccagauuucacucu

SEQ ID NO: 3632766 - RNA, 20 nt, Human
cugagccagauuucacucuc

SEQ ID NO: 3632767 - RNA, 21 nt, Human
cugagccagauuucacucucc

SEQ ID NO: 3632768 - RNA, 19 nt, Human
cugagccagggucuccaga

SEQ ID NO: 3632769 - RNA, 22 nt, Human
cugagccagggucuccagaaag

SEQ ID NO: 3632770 - RNA, 18 nt, Human
cugagccagucccagggg

SEQ ID NO: 3632771 - RNA, 11 nt, Human
cugagcccacu

SEQ ID NO: 3632772 - RNA, 15 nt, Human
cugagcccagggagg

SEQ ID NO: 3632773 - RNA, 19 nt, Human
cugagcccagggaggccga

SEQ ID NO: 3632774 - RNA, 22 nt, Human
cugagcccagggaggccgaagc

SEQ ID NO: 3632775 - RNA, 19 nt, Human
cugagcccauguucugccc

SEQ ID NO: 3632776 - RNA, 19 nt, Human
cugagccccagggugccca

SEQ ID NO: 3632777 - RNA, 14 nt, Human
cugagcccccagcu

SEQ ID NO: 3632778 - RNA, 22 nt, Human
cugagcccccccaacacugugc

SEQ ID NO: 3632779 - RNA, 18 nt, Human
cugagccccgcagaccuc

SEQ ID NO: 3632780 - RNA, 21 nt, Human
cugagccccgcccucuuccug

SEQ ID NO: 3632781 - RNA, 13 nt, Human
cugagccccuacc

SEQ ID NO: 3632782 - RNA, 14 nt, Human
cugagccccuaccc

SEQ ID NO: 3632783 - RNA, 19 nt, Human
cugagccccugggacugcu

SEQ ID NO: 3632784 - RNA, 15 nt, Human
cugagccccugucua

SEQ ID NO: 3632785 - RNA, 20 nt, Human
cugagcccgggcugccuggg

SEQ ID NO: 3632786 - RNA, 16 nt, Human
cugagcccucaaagug

SEQ ID NO: 3632787 - RNA, 17 nt, Human
cugagcccucaaaguga

SEQ ID NO: 3632788 - RNA, 13 nt, Human
cugagcccuggca

SEQ ID NO: 3632789 - RNA, 15 nt, Human
cugagccgcagagaa

SEQ ID NO: 3632790 - RNA, 14 nt, Human
cugagccugcaggg

SEQ ID NO: 3632791 - RNA, 14 nt, Human
cugagccugccgag

SEQ ID NO: 3632792 - RNA, 17 nt, Human
cugagccuggccagccu

SEQ ID NO: 3632793 - RNA, 19 nt, Human
cugagccuggcccauagaa

SEQ ID NO: 3632794 - RNA, 17 nt, Human
cugagccuucagucuug

SEQ ID NO: 3632795 - RNA, 17 nt, Human
cugagccuucugagcug

SEQ ID NO: 3632796 - RNA, 21 nt, Human
cugagccuuguaauucuaaau

SEQ ID NO: 3632797 - RNA, 20 nt, Human
cugagcgacagugagacucu

SEQ ID NO: 3632798 - RNA, 18 nt, Human
cugagcgaguggagucug

SEQ ID NO: 3632799 - RNA, 21 nt, Human
cugagcgaguggagucugcca

SEQ ID NO: 3632800 - RNA, 17 nt, Human
cugagcgauuauuaucu

SEQ ID NO: 3632801 - RNA, 19 nt, Human
cugagcgccuggauuucug

SEQ ID NO: 3632802 - RNA, 16 nt, Human
cugagcgggaggcaga

SEQ ID NO: 3632803 - RNA, 19 nt, Human
cugagcuagaagcuggagg

SEQ ID NO: 3632804 - RNA, 13 nt, Human
cugagcucacucg

SEQ ID NO: 3632805 - RNA, 15 nt, Human
cugagcucagcgugg

SEQ ID NO: 3632806 - RNA, 20 nt, Human
cugagcuccccaccacccca

SEQ ID NO: 3632807 - RNA, 15 nt, Human
cugagcuccucuggg

SEQ ID NO: 3632808 - RNA, 23 nt, Human
cugagcuccucugggcaggaccu

SEQ ID NO: 3632809 - RNA, 22 nt, Human
cugagcuccuguccccugcuac

SEQ ID NO: 3632810 - RNA, 20 nt, Human
cugagcucgguggacccagg

SEQ ID NO: 3632811 - RNA, 22 nt, Human
cugagcucgguggacccaggga

SEQ ID NO: 3632812 - RNA, 16 nt, Human
cugagcucugagaggc

SEQ ID NO: 3632813 - RNA, 19 nt, Human
cugagcucugagaggcccu

SEQ ID NO: 3632814 - RNA, 20 nt, Human
cugagcucugagaggcccug

SEQ ID NO: 3632815 - RNA, 21 nt, Human
cugagcucugagaggcccugg

SEQ ID NO: 3632816 - RNA, 22 nt, Human
cugagcucugagaggcccugga

SEQ ID NO: 3632817 - RNA, 23 nt, Human
cugagcucugagaggcccuggau

SEQ ID NO: 3632818 - RNA, 19 nt, Human
cugagcucugcauuugucu

SEQ ID NO: 3632819 - RNA, 12 nt, Human
cugagcugaggc

SEQ ID NO: 3632820 - RNA, 15 nt, Human
cugagcugaggcagc

SEQ ID NO: 3632821 - RNA, 16 nt, Human
cugagcugccauccag

SEQ ID NO: 3632822 - RNA, 22 nt, Human
cugagcugggaugauuggaggg

SEQ ID NO: 3632823 - RNA, 15 nt, Human
cugagcugugcaggu

SEQ ID NO: 3632824 - RNA, 22 nt, Human
cugagcuucccccccaccacag

SEQ ID NO: 3632825 - RNA, 22 nt, Human
cugagcuugcagagaugaggcc

SEQ ID NO: 3632826 - RNA, 12 nt, Human
cugagcuuggaa

SEQ ID NO: 3632827 - RNA, 17 nt, Human
cugagcuuggccagaag

SEQ ID NO: 3632828 - RNA, 12 nt, Human
cugagcuuugca

SEQ ID NO: 3632829 - RNA, 23 nt, Human
cugagcuuuggacacacacagcu

SEQ ID NO: 3632830 - RNA, 22 nt, Human
cugaggaaaggccagcuggcag

SEQ ID NO: 3632831 - RNA, 16 nt, Human
cugaggaacugucucg

SEQ ID NO: 3632832 - RNA, 18 nt, Human
cugaggaagaacggggcu

SEQ ID NO: 3632833 - RNA, 18 nt, Human
cugaggaagagggacugu

SEQ ID NO: 3632834 - RNA, 17 nt, Human
cugaggaauccagaccc

SEQ ID NO: 3632835 - RNA, 15 nt, Human
cugaggaauucugua

SEQ ID NO: 3632836 - RNA, 16 nt, Human
cugaggaauucuguau

SEQ ID NO: 3632837 - RNA, 18 nt, Human
cugaggaauucuguauag

SEQ ID NO: 3632838 - RNA, 15 nt, Human
cugaggacaaagugg

SEQ ID NO: 3632839 - RNA, 23 nt, Human
cugaggacacuaaccacgcugga

SEQ ID NO: 3632840 - RNA, 14 nt, Human
cugaggacagaugc

SEQ ID NO: 3632841 - RNA, 14 nt, Human
cugaggacagcugu

SEQ ID NO: 3632842 - RNA, 11 nt, Human
cugaggagaaa

SEQ ID NO: 3632843 - RNA, 19 nt, Human
cugaggaggccuccaucuc

SEQ ID NO: 3632844 - RNA, 15 nt, Human
cugaggagucugagg

SEQ ID NO: 3632845 - RNA, 19 nt, Human
cugaggagucugagguccu

SEQ ID NO: 3632846 - RNA, 22 nt, Human
cugaggauauucagauguaugu

SEQ ID NO: 3632847 - RNA, 19 nt, Human
cugaggaucagaaaguaau

SEQ ID NO: 3632848 - RNA, 16 nt, Human
cugaggcaagagaauu

SEQ ID NO: 3632849 - RNA, 20 nt, Human
cugaggcacaagaaucacuu

SEQ ID NO: 3632850 - RNA, 14 nt, Human
cugaggcagacagc

SEQ ID NO: 3632851 - RNA, 17 nt, Human
cugaggcagacagcagc

SEQ ID NO: 3632852 - RNA, 23 nt, Human
cugaggcagcagugugaggccag

SEQ ID NO: 3632853 - RNA, 14 nt, Human
cugaggcaggagaa

SEQ ID NO: 3632854 - RNA, 16 nt, Human
cugaggcaggagaauc

SEQ ID NO: 3632855 - RNA, 17 nt, Human
cugaggcaggagacugg

SEQ ID NO: 3632856 - RNA, 18 nt, Human
cugaggcaggagacuggc

SEQ ID NO: 3632857 - RNA, 16 nt, Human
cugaggcagggaaguc

SEQ ID NO: 3632858 - RNA, 20 nt, Human
cugaggcagggaagucccca

SEQ ID NO: 3632859 - RNA, 22 nt, Human
cugaggcagggaaguccccagg

SEQ ID NO: 3632860 - RNA, 20 nt, Human
cugaggcauccagcagucuc

SEQ ID NO: 3632861 - RNA, 21 nt, Human
cugaggccacacucagcacaa

SEQ ID NO: 3632862 - RNA, 16 nt, Human
cugaggccagccuggc

SEQ ID NO: 3632863 - RNA, 19 nt, Human
cugaggccagccuggccuc

SEQ ID NO: 3632864 - RNA, 22 nt, Human
cugaggccagccuggccuccug

SEQ ID NO: 3632865 - RNA, 12 nt, Human
cugaggcccaga

SEQ ID NO: 3632866 - RNA, 16 nt, Human
cugaggcccugcccaa

SEQ ID NO: 3632867 - RNA, 19 nt, Human
cugaggcccuucucuccag

SEQ ID NO: 3632868 - RNA, 23 nt, Human
cugaggcccuucucuccagcccc

SEQ ID NO: 3632869 - RNA, 15 nt, Human
cugaggccuccagcu

SEQ ID NO: 3632870 - RNA, 14 nt, Human
cugaggccugagac

SEQ ID NO: 3632871 - RNA, 18 nt, Human
cugaggccugagacccag

SEQ ID NO: 3632872 - RNA, 20 nt, Human
cugaggccugagacccagga

SEQ ID NO: 3632873 - RNA, 12 nt, Human
cugaggccugga

SEQ ID NO: 3632874 - RNA, 15 nt, Human
cugaggccuggacuu

SEQ ID NO: 3632875 - RNA, 22 nt, Human
cugaggccuggacuuuccugca

SEQ ID NO: 3632876 - RNA, 16 nt, Human
cugaggcucagggaaa

SEQ ID NO: 3632877 - RNA, 23 nt, Human
cugaggcucugacccagugagau

SEQ ID NO: 3632878 - RNA, 20 nt, Human
cugaggcucuuucugggcca

SEQ ID NO: 3632879 - RNA, 12 nt, Human
cugaggcugagg

SEQ ID NO: 3632880 - RNA, 14 nt, Human
cugaggcuggacuc

SEQ ID NO: 3632881 - RNA, 17 nt, Human
cugaggcuggacuccag

SEQ ID NO: 3632882 - RNA, 18 nt, Human
cugaggcuggacuccaga

SEQ ID NO: 3632883 - RNA, 15 nt, Human
cugaggcuggauccu

SEQ ID NO: 3632884 - RNA, 17 nt, Human
cugaggcuggcacagga

SEQ ID NO: 3632885 - RNA, 16 nt, Human
cugaggcugggcuccc

SEQ ID NO: 3632886 - RNA, 11 nt, Human
cugaggcugua

SEQ ID NO: 3632887 - RNA, 14 nt, Human
cugaggcugugguc

SEQ ID NO: 3632888 - RNA, 20 nt, Human
cugaggcuguggucacagcg

SEQ ID NO: 3632889 - RNA, 14 nt, Human
cugaggcuuccaga

SEQ ID NO: 3632890 - RNA, 14 nt, Human
cugaggcuuuggau

SEQ ID NO: 3632891 - RNA, 17 nt, Human
cugagggaaaggccagc

SEQ ID NO: 3632892 - RNA, 16 nt, Human
cugagggaaauguuuu

SEQ ID NO: 3632893 - RNA, 17 nt, Human
cugagggaaauguuuug

SEQ ID NO: 3632894 - RNA, 19 nt, Human
cugagggaccaacugggcc

SEQ ID NO: 3632895 - RNA, 18 nt, Human
cugagggaccagccaaga

SEQ ID NO: 3632896 - RNA, 20 nt, Human
cugagggacucugaagccuc

SEQ ID NO: 3632897 - RNA, 12 nt, Human
cugagggagccu

SEQ ID NO: 3632898 - RNA, 16 nt, Human
cugagggauggacuga

SEQ ID NO: 3632899 - RNA, 19 nt, Human
cugagggcaaauccagucc

SEQ ID NO: 3632900 - RNA, 19 nt, Human
cugagggcagacuggggca

SEQ ID NO: 3632901 - RNA, 22 nt, Human
cugcaagguuuaggcugguggc

SEQ ID NO: 3632902 - RNA, 16 nt, Human
cugcaagucagaggau

SEQ ID NO: 3632903 - RNA, 21 nt, Human
cugcaagucagaggauggcca

SEQ ID NO: 3632904 - RNA, 19 nt, Human
cugcaagucaguccaggau

SEQ ID NO: 3632905 - RNA, 21 nt, Human
cugcaaguccuuuuguaaagu

SEQ ID NO: 3632906 - RNA, 19 nt, Human
cugcaagugagcaaaccug

SEQ ID NO: 3632907 - RNA, 22 nt, Human
cugcaauaaaauggguuuuacu

SEQ ID NO: 3632908 - RNA, 18 nt, Human
cugcaauacaaguuucau

SEQ ID NO: 3632909 - RNA, 12 nt, Human
cugcaauagaga

SEQ ID NO: 3632910 - RNA, 16 nt, Human
cugcaauagagacugu

SEQ ID NO: 3632911 - RNA, 18 nt, Human
cugcaauagagacuguag

SEQ ID NO: 3632912 - RNA, 19 nt, Human
cugcaauauuugaauuuua

SEQ ID NO: 3632913 - RNA, 18 nt, Human
cugcaaucauaugugauc

SEQ ID NO: 3632914 - RNA, 22 nt, Human
cugcaaucuucucagaaggcaa

SEQ ID NO: 3632915 - RNA, 21 nt, Human
cugcaaugaagucucugaagu

SEQ ID NO: 3632916 - RNA, 18 nt, Human
cugcaaugugggcagaga

SEQ ID NO: 3632917 - RNA, 15 nt, Human
cugcaauguuuuccu

SEQ ID NO: 3632918 - RNA, 14 nt, Human
cugcaauucaaaag

SEQ ID NO: 3632919 - RNA, 21 nt, Human
cugcaauucaaaaguuccaag

SEQ ID NO: 3632920 - RNA, 17 nt, Human
cugcaauuccccucugc

SEQ ID NO: 3632921 - RNA, 14 nt, Human
cugcaauuuucuaa

SEQ ID NO: 3632922 - RNA, 16 nt, Human
cugcacaaacucacca

SEQ ID NO: 3632923 - RNA, 16 nt, Human
cugcacaagcugcacc

SEQ ID NO: 3632924 - RNA, 18 nt, Human
cugcacaauaaaaauguu

SEQ ID NO: 3632925 - RNA, 17 nt, Human
cugcacacaagcccaca

SEQ ID NO: 3632926 - RNA, 23 nt, Human
cugcacacaagcccacagcacag

SEQ ID NO: 3632927 - RNA, 20 nt, Human
cugcacagagcucuccagcu

SEQ ID NO: 3632928 - RNA, 12 nt, Human
cugcacagaugg

SEQ ID NO: 3632929 - RNA, 23 nt, Human
cugcacagauggauuugccugug

SEQ ID NO: 3632930 - RNA, 18 nt, Human
cugcacagcaggcugcca

SEQ ID NO: 3632931 - RNA, 19 nt, Human
cugcacagcggccccugca

SEQ ID NO: 3632932 - RNA, 16 nt, Human
cugcacagggcagcug

SEQ ID NO: 3632933 - RNA, 21 nt, Human
cugcacagugcaucucagccc

SEQ ID NO: 3632934 - RNA, 22 nt, Human
cugcacagugcaucucagccca

SEQ ID NO: 3632935 - RNA, 18 nt, Human
cugcacaucuguaaaucu

SEQ ID NO: 3632936 - RNA, 23 nt, Human
cugcacaugacucgggggugggg

SEQ ID NO: 3632937 - RNA, 16 nt, Human
cugcacaugauuucac

SEQ ID NO: 3632938 - RNA, 22 nt, Human
cugcacaugauuucacaaauau

SEQ ID NO: 3632939 - RNA, 21 nt, Human
cugcacaugcagcugcacccu

SEQ ID NO: 3632940 - RNA, 23 nt, Human
cugcacaugucuuguacaugugu

SEQ ID NO: 3632941 - RNA, 21 nt, Human
cugcaccaacccagccgcugc

SEQ ID NO: 3632942 - RNA, 20 nt, Human
cugcaccagagcaaccucuc

SEQ ID NO: 3632943 - RNA, 11 nt, Human
cugcaccagga

SEQ ID NO: 3632944 - RNA, 14 nt, Human
cugcaccaggagac

SEQ ID NO: 3632945 - RNA, 17 nt, Human
cugcaccaggagacaga

SEQ ID NO: 3632946 - RNA, 20 nt, Human
cugcaccaugcugcugggga

SEQ ID NO: 3632947 - RNA, 23 nt, Human
cugcaccaugcugcuggggaaga

SEQ ID NO: 3632948 - RNA, 14 nt, Human
cugcacccaggagg

SEQ ID NO: 3632949 - RNA, 16 nt, Human
cugcacccccuccugc

SEQ ID NO: 3632950 - RNA, 19 nt, Human
cugcacccccuccugcugc

SEQ ID NO: 3632951 - RNA, 16 nt, Human
cugcaccccuuccugg

SEQ ID NO: 3632952 - RNA, 17 nt, Human
cugcaccccuuccuggg

SEQ ID NO: 3632953 - RNA, 18 nt, Human
cugcacccucaggcaggu

SEQ ID NO: 3632954 - RNA, 16 nt, Human
cugcacccuccacccu

SEQ ID NO: 3632955 - RNA, 17 nt, Human
cugcacccuccacccug

SEQ ID NO: 3632956 - RNA, 21 nt, Human
cugcacccuccacccuguccc

SEQ ID NO: 3632957 - RNA, 17 nt, Human
cugcacccucccuccga

SEQ ID NO: 3632958 - RNA, 22 nt, Human
cugcacccuggggccuggaccu

SEQ ID NO: 3632959 - RNA, 23 nt, Human
cugcacccuggggccuggaccug

SEQ ID NO: 3632960 - RNA, 14 nt, Human
cugcacccuucuuu

SEQ ID NO: 3632961 - RNA, 18 nt, Human
cugcaccggcuggccugg

SEQ ID NO: 3632962 - RNA, 19 nt, Human
cugcaccggcuggccuggc

SEQ ID NO: 3632963 - RNA, 11 nt, Human
cugcaccuccc

SEQ ID NO: 3632964 - RNA, 17 nt, Human
cugcaccuccccccacu

SEQ ID NO: 3632965 - RNA, 18 nt, Human
cugcaccuccccccacug

SEQ ID NO: 3632966 - RNA, 19 nt, Human
cugcaccuccccccacugc

SEQ ID NO: 3632967 - RNA, 22 nt, Human
cugcaccuccccccacugcagg

SEQ ID NO: 3632968 - RNA, 13 nt, Human
cugcaccugccag

SEQ ID NO: 3632969 - RNA, 17 nt, Human
cugcaccugccagccug

SEQ ID NO: 3632970 - RNA, 20 nt, Human
cugcaccugccagccuggcu

SEQ ID NO: 3632971 - RNA, 14 nt, Human
cugcaccugugcag

SEQ ID NO: 3632972 - RNA, 14 nt, Human
cugcacggugaaug

SEQ ID NO: 3632973 - RNA, 20 nt, Human
cugcacggugggccuugcug

SEQ ID NO: 3632974 - RNA, 12 nt, Human
cugcacgucaug

SEQ ID NO: 3632975 - RNA, 19 nt, Human
cugcacguggcuucugaug

SEQ ID NO: 3632976 - RNA, 20 nt, Human
cugcacuaaagccagccuga

SEQ ID NO: 3632977 - RNA, 16 nt, Human
cugcacuaauuugaug

SEQ ID NO: 3632978 - RNA, 16 nt, Human
cugcacuacugacaug

SEQ ID NO: 3632979 - RNA, 15 nt, Human
cugcacuccagccug

SEQ ID NO: 3632980 - RNA, 16 nt, Human
cugcacuccagccugg

SEQ ID NO: 3632981 - RNA, 17 nt, Human
cugcacuccagccuggg

SEQ ID NO: 3632982 - RNA, 18 nt, Human
cugcacuccagccugggc

SEQ ID NO: 3632983 - RNA, 20 nt, Human
cugcacuccagccuggggga

SEQ ID NO: 3632984 - RNA, 22 nt, Human
cugcacucccaccugacacacc

SEQ ID NO: 3632985 - RNA, 20 nt, Human
cugcacuccccugcugggug

SEQ ID NO: 3632986 - RNA, 15 nt, Human
cugcacucugugccc

SEQ ID NO: 3632987 - RNA, 21 nt, Human
cugcacucugugcccaugggc

SEQ ID NO: 3632988 - RNA, 19 nt, Human
cugcacucuuaagcuuccg

SEQ ID NO: 3632989 - RNA, 12 nt, Human
cugcacugaaaa

SEQ ID NO: 3632990 - RNA, 18 nt, Human
cugcacugaaaagguucu

SEQ ID NO: 3632991 - RNA, 18 nt, Human
cugcacugacucuggaaa

SEQ ID NO: 3632992 - RNA, 14 nt, Human
cugcacugagcaga

SEQ ID NO: 3632993 - RNA, 19 nt, Human
cugcacugaugcugccccu

SEQ ID NO: 3632994 - RNA, 16 nt, Human
cugcacuggaguccag

SEQ ID NO: 3632995 - RNA, 21 nt, Human
cugcacuggaguccagucucu

SEQ ID NO: 3632996 - RNA, 11 nt, Human
cugcacugucc

SEQ ID NO: 3632997 - RNA, 15 nt, Human
cugcacuguccugcu

SEQ ID NO: 3632998 - RNA, 19 nt, Human
cugcacuguccugcuccac

SEQ ID NO: 3632999 - RNA, 15 nt, Human
cugcacuuacuugcu

SEQ ID NO: 3633000 - RNA, 14 nt, Human
cugcacuuccuguu

SEQ ID NO: 3633001 - RNA, 17 nt, Human
cugcacuugcagacucu

SEQ ID NO: 3633002 - RNA, 18 nt, Human
cugcacuuugaugucaug

SEQ ID NO: 3633003 - RNA, 19 nt, Human
cugcacuuugaugucaugu

SEQ ID NO: 3633004 - RNA, 17 nt, Human
cugcagaacagcuucau

SEQ ID NO: 3633005 - RNA, 20 nt, Human
cugcagaacagcuucauguu

SEQ ID NO: 3633006 - RNA, 20 nt, Human
cugcagaacguauuggucca

SEQ ID NO: 3633007 - RNA, 13 nt, Human
cugcagaagacag

SEQ ID NO: 3633008 - RNA, 23 nt, Human
cugcagaagacaguauggcagcu

SEQ ID NO: 3633009 - RNA, 20 nt, Human
cugcagaaggaaaaaugugu

SEQ ID NO: 3633010 - RNA, 22 nt, Human
cugcagaaggaaaaauguguaa

SEQ ID NO: 3633011 - RNA, 14 nt, Human
cugcagaaggccaa

SEQ ID NO: 3633012 - RNA, 15 nt, Human
cugcagaaggccaag

SEQ ID NO: 3633013 - RNA, 22 nt, Human
cugcagaauuuggguucugccu

SEQ ID NO: 3633014 - RNA, 14 nt, Human
cugcagacacgccu

SEQ ID NO: 3633015 - RNA, 17 nt, Human
cugcagacccugcccuu

SEQ ID NO: 3633016 - RNA, 11 nt, Human
cugcagaccug

SEQ ID NO: 3633017 - RNA, 16 nt, Human
cugcagaccuguccuc

SEQ ID NO: 3633018 - RNA, 18 nt, Human
cugcagaccuguccuccu

SEQ ID NO: 3633019 - RNA, 18 nt, Human
cugcagacuucccagcua

SEQ ID NO: 3633020 - RNA, 21 nt, Human
cugcagagaaacuuaagcaaa

SEQ ID NO: 3633021 - RNA, 22 nt, Human
cugcagagaaacuuaagcaaag

SEQ ID NO: 3633022 - RNA, 23 nt, Human
cugcagagaaacuuaagcaaagg

SEQ ID NO: 3633023 - RNA, 17 nt, Human
cugcagagacagagagg

SEQ ID NO: 3633024 - RNA, 23 nt, Human
cugcagagauuucucauugacuu

SEQ ID NO: 3633025 - RNA, 14 nt, Human
cugcagaggggcag

SEQ ID NO: 3633026 - RNA, 15 nt, Human
cugcagaggggcagg

SEQ ID NO: 3633027 - RNA, 17 nt, Human
cugcagaggggcaggcc

SEQ ID NO: 3633028 - RNA, 19 nt, Human
cugcagaggggcaggcccu

SEQ ID NO: 3633029 - RNA, 22 nt, Human
cugcagaggggcaggcccugca

SEQ ID NO: 3633030 - RNA, 19 nt, Human
cugcagaggggcuuucugg

SEQ ID NO: 3633031 - RNA, 18 nt, Human
cugcagaggucugugcug

SEQ ID NO: 3633032 - RNA, 21 nt, Human
cugcagaggucugugcugagg

SEQ ID NO: 3633033 - RNA, 21 nt, Human
cugcagauacuacugaccaga

SEQ ID NO: 3633034 - RNA, 19 nt, Human
cugcagaugccacccuagc

SEQ ID NO: 3633035 - RNA, 22 nt, Human
cugcagaugccacccuagccaa

SEQ ID NO: 3633036 - RNA, 17 nt, Human
cugcagauuugggcugg

SEQ ID NO: 3633037 - RNA, 19 nt, Human
cugcagcaccuccaggccu

SEQ ID NO: 3633038 - RNA, 13 nt, Human
cugcagcagagcc

SEQ ID NO: 3633039 - RNA, 20 nt, Human
cugcagcaggaguggugcag

SEQ ID NO: 3633040 - RNA, 11 nt, Human
cugcagcauga

SEQ ID NO: 3633041 - RNA, 20 nt, Human
cugcagcauggucccugccu

SEQ ID NO: 3633042 - RNA, 23 nt, Human
cugcagccagcccagcccagcug

SEQ ID NO: 3633043 - RNA, 12 nt, Human
cugcagccagcu

SEQ ID NO: 3633044 - RNA, 19 nt, Human
cugcccugguuuccugccc

SEQ ID NO: 3633045 - RNA, 23 nt, Human
cugcccugguuuccugcccuggg

SEQ ID NO: 3633046 - RNA, 20 nt, Human
cugcccugucaggaggcaga

SEQ ID NO: 3633047 - RNA, 22 nt, Human
cugcccugugggaccccaggcc

SEQ ID NO: 3633048 - RNA, 19 nt, Human
cugcccugugggcccccaa

SEQ ID NO: 3633049 - RNA, 21 nt, Human
cugcccuguuguguauagaug

SEQ ID NO: 3633050 - RNA, 22 nt, Human
cugcccuuaccugccaggaagc

SEQ ID NO: 3633051 - RNA, 17 nt, Human
cugcccuucaccccagu

SEQ ID NO: 3633052 - RNA, 16 nt, Human
cugcccuucagcaucc

SEQ ID NO: 3633053 - RNA, 21 nt, Human
cugcccuucagcauccucagu

SEQ ID NO: 3633054 - RNA, 15 nt, Human
cugcccuuccgcagu

SEQ ID NO: 3633055 - RNA, 18 nt, Human
cugcccuuccgcagugug

SEQ ID NO: 3633056 - RNA, 12 nt, Human
cugcccuuccuc

SEQ ID NO: 3633057 - RNA, 21 nt, Human
cugcccuuguuuggggcagga

SEQ ID NO: 3633058 - RNA, 23 nt, Human
cugcccuuguuuggggcaggagu

SEQ ID NO: 3633059 - RNA, 21 nt, Human
cugccgaccgaggcuggagcu

SEQ ID NO: 3633060 - RNA, 22 nt, Human
cugccgaccgaggcuggagcug

SEQ ID NO: 3633061 - RNA, 23 nt, Human
cugccgaccgaggcuggagcugg

SEQ ID NO: 3633062 - RNA, 17 nt, Human
cugccgcaauacaggaa

SEQ ID NO: 3633063 - RNA, 16 nt, Human
cugccgcaccccagag

SEQ ID NO: 3633064 - RNA, 13 nt, Human
cugccgcagagcu

SEQ ID NO: 3633065 - RNA, 12 nt, Human
cugccgcagccc

SEQ ID NO: 3633066 - RNA, 15 nt, Human
cugccgcagcccugc

SEQ ID NO: 3633067 - RNA, 21 nt, Human
cugccgcagcccugcagaggg

SEQ ID NO: 3633068 - RNA, 18 nt, Human
cugccgcccccuccugaa

SEQ ID NO: 3633069 - RNA, 19 nt, Human
cugccgcccccuccugaac

SEQ ID NO: 3633070 - RNA, 13 nt, Human
cugccgcuaccuc

SEQ ID NO: 3633071 - RNA, 16 nt, Human
cugccggcccuggggc

SEQ ID NO: 3633072 - RNA, 21 nt, Human
cugccggcccuggggcuaggc

SEQ ID NO: 3633073 - RNA, 22 nt, Human
cugccggcucuuuccuugcuca

SEQ ID NO: 3633074 - RNA, 19 nt, Human
cugccgggcugagggccug

SEQ ID NO: 3633075 - RNA, 13 nt, Human
cugccggggcagc

SEQ ID NO: 3633076 - RNA, 19 nt, Human
cugccggguucuagucucc

SEQ ID NO: 3633077 - RNA, 15 nt, Human
cugccguaauuuaac

SEQ ID NO: 3633078 - RNA, 19 nt, Human
cugccgucaccaccacccc

SEQ ID NO: 3633079 - RNA, 20 nt, Human
cugccgucaccaccaccccu

SEQ ID NO: 3633080 - RNA, 13 nt, Human
cugccuaagcccu

SEQ ID NO: 3633081 - RNA, 12 nt, Human
cugccuaaggac

SEQ ID NO: 3633082 - RNA, 13 nt, Human
cugccuaaggacu

SEQ ID NO: 3633083 - RNA, 15 nt, Human
cugccuaaggacuuc

SEQ ID NO: 3633084 - RNA, 19 nt, Human
cugccuaaggacuucuuua

SEQ ID NO: 3633085 - RNA, 18 nt, Human
cugccuaaguggcugcug

SEQ ID NO: 3633086 - RNA, 13 nt, Human
cugccuacucacg

SEQ ID NO: 3633087 - RNA, 19 nt, Human
cugccuagauucagggaaa

SEQ ID NO: 3633088 - RNA, 17 nt, Human
cugccuagcaagcuggc

SEQ ID NO: 3633089 - RNA, 18 nt, Human
cugccuagcaagcuggcc

SEQ ID NO: 3633090 - RNA, 22 nt, Human
cugccuagcacucacaugcugg

SEQ ID NO: 3633091 - RNA, 18 nt, Human
cugccuagcugccuagca

SEQ ID NO: 3633092 - RNA, 21 nt, Human
cugccucaaugugaaucagac

SEQ ID NO: 3633093 - RNA, 16 nt, Human
cugccucaccgcuucc

SEQ ID NO: 3633094 - RNA, 23 nt, Human
cugccucacuuccuacaagagca

SEQ ID NO: 3633095 - RNA, 14 nt, Human
cugccucagcccgc

SEQ ID NO: 3633096 - RNA, 12 nt, Human
cugccucagccu

SEQ ID NO: 3633097 - RNA, 13 nt, Human
cugccucagccuc

SEQ ID NO: 3633098 - RNA, 13 nt, Human
cugccucaggacu

SEQ ID NO: 3633099 - RNA, 16 nt, Human
cugccucaggccucug

SEQ ID NO: 3633100 - RNA, 13 nt, Human
cugccucagguuc

SEQ ID NO: 3633101 - RNA, 18 nt, Human
cugccucagguuccuaug

SEQ ID NO: 3633102 - RNA, 13 nt, Human
cugccucauuuag

SEQ ID NO: 3633103 - RNA, 18 nt, Human
cugccuccacccucugag

SEQ ID NO: 3633104 - RNA, 21 nt, Human
cugccuccacccucugagcuu

SEQ ID NO: 3633105 - RNA, 14 nt, Human
cugccuccagaaug

SEQ ID NO: 3633106 - RNA, 14 nt, Human
cugccuccagggcu

SEQ ID NO: 3633107 - RNA, 16 nt, Human
cugccuccagggcugg

SEQ ID NO: 3633108 - RNA, 17 nt, Human
cugccuccagggcugga

SEQ ID NO: 3633109 - RNA, 18 nt, Human
cugccuccagggcuggac

SEQ ID NO: 3633110 - RNA, 18 nt, Human
cugccuccauucugacca

SEQ ID NO: 3633111 - RNA, 11 nt, Human
cugccucccaa

SEQ ID NO: 3633112 - RNA, 12 nt, Human
cugccucccacu

SEQ ID NO: 3633113 - RNA, 15 nt, Human
cugccucccacuuca

SEQ ID NO: 3633114 - RNA, 16 nt, Human
cugccucccaucaccc

SEQ ID NO: 3633115 - RNA, 13 nt, Human
cugccucccaugc

SEQ ID NO: 3633116 - RNA, 12 nt, Human
cugccuccccaa

SEQ ID NO: 3633117 - RNA, 14 nt, Human
cugccuccccaacc

SEQ ID NO: 3633118 - RNA, 18 nt, Human
cugccuccccuccucugc

SEQ ID NO: 3633119 - RNA, 19 nt, Human
cugccuccccuccucugcu

SEQ ID NO: 3633120 - RNA, 22 nt, Human
cugccuccccuuaaaggggaga

SEQ ID NO: 3633121 - RNA, 21 nt, Human
cugccucccucacccugagcc

SEQ ID NO: 3633122 - RNA, 15 nt, Human
cugccucccugucca

SEQ ID NO: 3633123 - RNA, 16 nt, Human
cugccucccuuguggc

SEQ ID NO: 3633124 - RNA, 19 nt, Human
cugccuccucguuccuuuc

SEQ ID NO: 3633125 - RNA, 24 nt, Human
cugccuccucuucaacugaccagc

SEQ ID NO: 3633126 - RNA, 15 nt, Human
cugccuccugccggc

SEQ ID NO: 3633127 - RNA, 22 nt, Human
cugccuccugccggcuccuugg

SEQ ID NO: 3633128 - RNA, 15 nt, Human
cugccuccugccugc

SEQ ID NO: 3633129 - RNA, 19 nt, Human
cugccuccuugauauuugu

SEQ ID NO: 3633130 - RNA, 12 nt, Human
cugccuccuuua

SEQ ID NO: 3633131 - RNA, 15 nt, Human
cugccucgaaacaca

SEQ ID NO: 3633132 - RNA, 20 nt, Human
cugccucgaacuggcugcaa

SEQ ID NO: 3633133 - RNA, 18 nt, Human
cugccucuacugggaagg

SEQ ID NO: 3633134 - RNA, 14 nt, Human
cugccucucacagc

SEQ ID NO: 3633135 - RNA, 21 nt, Human
cugccucucacagcugaguug

SEQ ID NO: 3633136 - RNA, 11 nt, Human
cugccucuccc

SEQ ID NO: 3633137 - RNA, 13 nt, Human
cugccucucccag

SEQ ID NO: 3633138 - RNA, 18 nt, Human
cugccucucccaggcagg

SEQ ID NO: 3633139 - RNA, 22 nt, Human
cugccucucccaucacuucccu

SEQ ID NO: 3633140 - RNA, 23 nt, Human
cugccucucccaucacuucccua

SEQ ID NO: 3633141 - RNA, 16 nt, Human
cugccucucccucugg

SEQ ID NO: 3633142 - RNA, 21 nt, Human
cugccucuccgccccugagcc

SEQ ID NO: 3633143 - RNA, 23 nt, Human
cugccucuccgccccugagccca

SEQ ID NO: 3633144 - RNA, 12 nt, Human
cugccucucugc

SEQ ID NO: 3633145 - RNA, 14 nt, Human
cugccucucugcag

SEQ ID NO: 3633146 - RNA, 17 nt, Human
cugccucucugcagguc

SEQ ID NO: 3633147 - RNA, 18 nt, Human
cugccucugacacacagc

SEQ ID NO: 3633148 - RNA, 21 nt, Human
cugccucugacacacagcucu

SEQ ID NO: 3633149 - RNA, 23 nt, Human
cugccucugacacacagcucugu

SEQ ID NO: 3633150 - RNA, 14 nt, Human
cugccucugaggga

SEQ ID NO: 3633151 - RNA, 14 nt, Human
cugccucugccaca

SEQ ID NO: 3633152 - RNA, 17 nt, Human
cugccucugccugcauu

SEQ ID NO: 3633153 - RNA, 15 nt, Human
cugccucugccuuag

SEQ ID NO: 3633154 - RNA, 19 nt, Human
cugccucuuaaauaaaccu

SEQ ID NO: 3633155 - RNA, 15 nt, Human
cugccucuucccccu

SEQ ID NO: 3633156 - RNA, 22 nt, Human
cugccucuucccccugcuucca

SEQ ID NO: 3633157 - RNA, 19 nt, Human
cugccucuuucccuaggaa

SEQ ID NO: 3633158 - RNA, 17 nt, Human
cugccugaaccuuccau

SEQ ID NO: 3633159 - RNA, 18 nt, Human
cugccugaagucacacag

SEQ ID NO: 3633160 - RNA, 23 nt, Human
cugccugaagucacacagugagu

SEQ ID NO: 3633161 - RNA, 18 nt, Human
cugccugaauaaagagcc

SEQ ID NO: 3633162 - RNA, 23 nt, Human
cugccugacauuuggaguguucc

SEQ ID NO: 3633163 - RNA, 21 nt, Human
cugccugagcaccucccagcc

SEQ ID NO: 3633164 - RNA, 15 nt, Human
cugccugagggcccc

SEQ ID NO: 3633165 - RNA, 17 nt, Human
cugccugagggccccuc

SEQ ID NO: 3633166 - RNA, 21 nt, Human
cugccugagggccccucugcc

SEQ ID NO: 3633167 - RNA, 20 nt, Human
cugccugaggggcagccugc

SEQ ID NO: 3633168 - RNA, 22 nt, Human
cugccugaggggcagccugccu

SEQ ID NO: 3633169 - RNA, 23 nt, Human
cugccugaggggcagccugccuu

SEQ ID NO: 3633170 - RNA, 21 nt, Human
cugccugagucgugaccugcu

SEQ ID NO: 3633171 - RNA, 19 nt, Human
cugccugcagaggucugug

SEQ ID NO: 3633172 - RNA, 22 nt, Human
cugccugcagaggucugugcug

SEQ ID NO: 3633173 - RNA, 21 nt, Human
cugccugcaguacuuuaccuc

SEQ ID NO: 3633174 - RNA, 16 nt, Human
cugccugccagcugca

SEQ ID NO: 3633175 - RNA, 20 nt, Human
cugccugccagcugcacuga

SEQ ID NO: 3633176 - RNA, 12 nt, Human
cugccugcccac

SEQ ID NO: 3633177 - RNA, 16 nt, Human
cugccugcccacccgu

SEQ ID NO: 3633178 - RNA, 17 nt, Human
cugccugcccaggcccc

SEQ ID NO: 3633179 - RNA, 18 nt, Human
cugccugccccgccccca

SEQ ID NO: 3633180 - RNA, 19 nt, Human
cugccugccccgcccccag

SEQ ID NO: 3633181 - RNA, 19 nt, Human
cugccugcccgcacagcag

SEQ ID NO: 3633182 - RNA, 23 nt, Human
cugccugcccgcacagcagccug

SEQ ID NO: 3633183 - RNA, 18 nt, Human
cugccugcgcccaccccg

SEQ ID NO: 3633184 - RNA, 13 nt, Human
cugccugcuccca

SEQ ID NO: 3633185 - RNA, 13 nt, Human
cugccugcuuugg

SEQ ID NO: 3633186 - RNA, 19 nt, Human
cugccuggaagagcagccc

SEQ ID NO: 3633187 - RNA, 22 nt, Human
cugccuggacuuggccccugcc

SEQ ID NO: 3633188 - RNA, 12 nt, Human
cuggggcucccu

SEQ ID NO: 3633189 - RNA, 14 nt, Human
cuggggcucccuuc

SEQ ID NO: 3633190 - RNA, 19 nt, Human
cuggggcucuaacgccuga

SEQ ID NO: 3633191 - RNA, 20 nt, Human
cuggggcucuaacgccugag

SEQ ID NO: 3633192 - RNA, 22 nt, Human
cuggggcucuaacgccugagcc

SEQ ID NO: 3633193 - RNA, 23 nt, Human
cuggggcucuaacgccugagccc

SEQ ID NO: 3633194 - RNA, 19 nt, Human
cuggggcucugugcaggga

SEQ ID NO: 3633195 - RNA, 18 nt, Human
cuggggcugaccuuccuc

SEQ ID NO: 3633196 - RNA, 21 nt, Human
cuggggcugaucucagggaag

SEQ ID NO: 3633197 - RNA, 22 nt, Human
cuggggcugaucucagggaagc

SEQ ID NO: 3633198 - RNA, 15 nt, Human
cuggggcuggcacaa

SEQ ID NO: 3633199 - RNA, 15 nt, Human
cuggggcuggccucc

SEQ ID NO: 3633200 - RNA, 13 nt, Human
cuggggcugggcc

SEQ ID NO: 3633201 - RNA, 14 nt, Human
cugggggaagcccu

SEQ ID NO: 3633202 - RNA, 17 nt, Human
cugggggaagcccugga

SEQ ID NO: 3633203 - RNA, 21 nt, Human
cugggggaaugagcccagaga

SEQ ID NO: 3633204 - RNA, 18 nt, Human
cugggggaguuuuccucu

SEQ ID NO: 3633205 - RNA, 18 nt, Human
cugggggaugggccugag

SEQ ID NO: 3633206 - RNA, 16 nt, Human
cugggggccaugagcu

SEQ ID NO: 3633207 - RNA, 12 nt, Human
cugggggccuca

SEQ ID NO: 3633208 - RNA, 16 nt, Human
cugggggccucuucug

SEQ ID NO: 3633209 - RNA, 15 nt, Human
cugggggccugaccu

SEQ ID NO: 3633210 - RNA, 15 nt, Human
cugggggccuggcug

SEQ ID NO: 3633211 - RNA, 18 nt, Human
cugggggccuggcuggcu

SEQ ID NO: 3633212 - RNA, 14 nt, Human
cugggggcugggca

SEQ ID NO: 3633213 - RNA, 18 nt, Human
cugggggcugggcagagg

SEQ ID NO: 3633214 - RNA, 16 nt, Human
cuggggggcaguggug

SEQ ID NO: 3633215 - RNA, 16 nt, Human
cugggggguggccagg

SEQ ID NO: 3633216 - RNA, 15 nt, Human
cugggggugccagga

SEQ ID NO: 3633217 - RNA, 14 nt, Human
cugggggugggcca

SEQ ID NO: 3633218 - RNA, 21 nt, Human
cuggggucaggccgggcagag

SEQ ID NO: 3633219 - RNA, 24 nt, Human
cuggggucaggccgggcagagcac

SEQ ID NO: 3633220 - RNA, 16 nt, Human
cugggguccagggagc

SEQ ID NO: 3633221 - RNA, 15 nt, Human
cuggggucccagcag

SEQ ID NO: 3633222 - RNA, 18 nt, Human
cuggggucccagcagcug

SEQ ID NO: 3633223 - RNA, 16 nt, Human
cugggguccccagggc

SEQ ID NO: 3633224 - RNA, 13 nt, Human
cugggguccccca

SEQ ID NO: 3633225 - RNA, 13 nt, Human
cuggggucuggag

SEQ ID NO: 3633226 - RNA, 22 nt, Human
cuggggucuggaguugaucugg

SEQ ID NO: 3633227 - RNA, 12 nt, Human
cuggggugcagg

SEQ ID NO: 3633228 - RNA, 21 nt, Human
cuggggugcagggaugugggu

SEQ ID NO: 3633229 - RNA, 18 nt, Human
cuggggugccgccugccc

SEQ ID NO: 3633230 - RNA, 20 nt, Human
cuggggugcugccugaaucc

SEQ ID NO: 3633231 - RNA, 15 nt, Human
cugggguggccacca

SEQ ID NO: 3633232 - RNA, 17 nt, Human
cugggguggccugugug

SEQ ID NO: 3633233 - RNA, 21 nt, Human
cugggguggccuguguggcca

SEQ ID NO: 3633234 - RNA, 14 nt, Human
cuggggugggaggu

SEQ ID NO: 3633235 - RNA, 17 nt, Human
cugggguggggaccuca

SEQ ID NO: 3633236 - RNA, 18 nt, Human
cugggguggggaccucag

SEQ ID NO: 3633237 - RNA, 21 nt, Human
cugggguggggaccucaggcc

SEQ ID NO: 3633238 - RNA, 20 nt, Human
cugggguggggauagggagc

SEQ ID NO: 3633239 - RNA, 14 nt, Human
cugggguuaucuga

SEQ ID NO: 3633240 - RNA, 20 nt, Human
cugggguucagccccuccuc

SEQ ID NO: 3633241 - RNA, 22 nt, Human
cugggguucagccccuccucug

SEQ ID NO: 3633242 - RNA, 18 nt, Human
cugggguugucagcucuc

SEQ ID NO: 3633243 - RNA, 22 nt, Human
cuggguaacuagggaagauaau

SEQ ID NO: 3633244 - RNA, 17 nt, Human
cuggguacuucuugaag

SEQ ID NO: 3633245 - RNA, 23 nt, Human
cuggguacuucuugaaggugcug

SEQ ID NO: 3633246 - RNA, 21 nt, Human
cuggguacuuguggacacagc

SEQ ID NO: 3633247 - RNA, 14 nt, Human
cuggguagcuguaa

SEQ ID NO: 3633248 - RNA, 15 nt, Human
cuggguagcuguaag

SEQ ID NO: 3633249 - RNA, 15 nt, Human
cuggguaggaaagag

SEQ ID NO: 3633250 - RNA, 15 nt, Human
cuggguccaaauaaa

SEQ ID NO: 3633251 - RNA, 20 nt, Human
cuggguccaaauaaaaacua

SEQ ID NO: 3633252 - RNA, 23 nt, Human
cuggguccaauuguggcacuugg

SEQ ID NO: 3633253 - RNA, 22 nt, Human
cuggguccaggggaugggaggu

SEQ ID NO: 3633254 - RNA, 13 nt, Human
cuggguccauauc

SEQ ID NO: 3633255 - RNA, 15 nt, Human
cuggguccauaucac

SEQ ID NO: 3633256 - RNA, 17 nt, Human
cuggguccauaucacac

SEQ ID NO: 3633257 - RNA, 14 nt, Human
cuggguccuuccug

SEQ ID NO: 3633258 - RNA, 13 nt, Human
cugggucucuaau

SEQ ID NO: 3633259 - RNA, 17 nt, Human
cugggucugugucucuu

SEQ ID NO: 3633260 - RNA, 17 nt, Human
cugggucuuuugcuacu

SEQ ID NO: 3633261 - RNA, 17 nt, Human
cugggugacagagugag

SEQ ID NO: 3633262 - RNA, 14 nt, Human
cugggugagugggg

SEQ ID NO: 3633263 - RNA, 18 nt, Human
cugggugaguggggagac

SEQ ID NO: 3633264 - RNA, 22 nt, Human
cugggugcaggagcgcucccuu

SEQ ID NO: 3633265 - RNA, 13 nt, Human
cugggugcccaca

SEQ ID NO: 3633266 - RNA, 23 nt, Human
cugggugcgaccccaucugccca

SEQ ID NO: 3633267 - RNA, 14 nt, Human
cugggugcuacugg

SEQ ID NO: 3633268 - RNA, 16 nt, Human
cugggugcugauccuu

SEQ ID NO: 3633269 - RNA, 20 nt, Human
cuggguggaucggccuccuc

SEQ ID NO: 3633270 - RNA, 20 nt, Human
cuggguggcaccagcagccu

SEQ ID NO: 3633271 - RNA, 14 nt, Human
cuggguggcccauc

SEQ ID NO: 3633272 - RNA, 15 nt, Human
cuggguggcccaucc

SEQ ID NO: 3633273 - RNA, 17 nt, Human
cuggguggcucacucag

SEQ ID NO: 3633274 - RNA, 17 nt, Human
cuggguggggcugcucc

SEQ ID NO: 3633275 - RNA, 21 nt, Human
cuggguggggcugcuccucca

SEQ ID NO: 3633276 - RNA, 22 nt, Human
cuggguggggcugcuccuccag

SEQ ID NO: 3633277 - RNA, 21 nt, Human
cuggguggggugaggaccacu

SEQ ID NO: 3633278 - RNA, 18 nt, Human
cuggguggguggugggga

SEQ ID NO: 3633279 - RNA, 19 nt, Human
cuggguggucugcaggcag

SEQ ID NO: 3633280 - RNA, 14 nt, Human
cugggugguggccu

SEQ ID NO: 3633281 - RNA, 17 nt, Human
cugggugguggccuggu

SEQ ID NO: 3633282 - RNA, 16 nt, Human
cugggugguugcccuu

SEQ ID NO: 3633283 - RNA, 18 nt, Human
cugggugguugcccuuca

SEQ ID NO: 3633284 - RNA, 20 nt, Human
cugggugucauuucauucca

SEQ ID NO: 3633285 - RNA, 16 nt, Human
cuggguuagacugcca

SEQ ID NO: 3633286 - RNA, 18 nt, Human
cuggguuagacugccagc

SEQ ID NO: 3633287 - RNA, 22 nt, Human
cuggguucagaaaugcugccug

SEQ ID NO: 3633288 - RNA, 23 nt, Human
cuggguucagaaaugcugccugc

SEQ ID NO: 3633289 - RNA, 20 nt, Human
cuggguucccuuuccuucca

SEQ ID NO: 3633290 - RNA, 18 nt, Human
cuggguuccuuccucuga

SEQ ID NO: 3633291 - RNA, 22 nt, Human
cuggguuccuuccucugagccu

SEQ ID NO: 3633292 - RNA, 23 nt, Human
cuggguuccuuccucugagccuu

SEQ ID NO: 3633293 - RNA, 14 nt, Human
cuggguucuaccca

SEQ ID NO: 3633294 - RNA, 13 nt, Human
cuggguuggaggg

SEQ ID NO: 3633295 - RNA, 23 nt, Human
cuggguugggaucagggguagga

SEQ ID NO: 3633296 - RNA, 23 nt, Human
cuggguugggggcuagggagacg

SEQ ID NO: 3633297 - RNA, 16 nt, Human
cuggguuggugcacag

SEQ ID NO: 3633298 - RNA, 16 nt, Human
cuggguuuggacccca

SEQ ID NO: 3633299 - RNA, 20 nt, Human
cuggguuuucuuaaccaucu

SEQ ID NO: 3633300 - RNA, 19 nt, Human
cugguaaaaugaagaauuu

SEQ ID NO: 3633301 - RNA, 23 nt, Human
cugguaagaaaaagcaaaaggca

SEQ ID NO: 3633302 - RNA, 17 nt, Human
cugguaagauuguuauu

SEQ ID NO: 3633303 - RNA, 15 nt, Human
cugguaagggccaag

SEQ ID NO: 3633304 - RNA, 14 nt, Human
cugguaauagcugu

SEQ ID NO: 3633305 - RNA, 19 nt, Human
cugguacaacggaggccug

SEQ ID NO: 3633306 - RNA, 20 nt, Human
cugguacaauuucuuuuggu

SEQ ID NO: 3633307 - RNA, 13 nt, Human
cugguacccagcc

SEQ ID NO: 3633308 - RNA, 16 nt, Human
cugguacccagccauc

SEQ ID NO: 3633309 - RNA, 18 nt, Human
cugguacccagccaucug

SEQ ID NO: 3633310 - RNA, 21 nt, Human
cugguacccagccaucugccc

SEQ ID NO: 3633311 - RNA, 14 nt, Human
cugguacccuccug

SEQ ID NO: 3633312 - RNA, 15 nt, Human
cugguacccuccugg

SEQ ID NO: 3633313 - RNA, 16 nt, Human
cugguacccuccuggc

SEQ ID NO: 3633314 - RNA, 20 nt, Human
cugguacucccucucaggau

SEQ ID NO: 3633315 - RNA, 21 nt, Human
cugguacucugccacuuuauu

SEQ ID NO: 3633316 - RNA, 20 nt, Human
cugguagacacaggauagau

SEQ ID NO: 3633317 - RNA, 14 nt, Human
cugguagagaugga

SEQ ID NO: 3633318 - RNA, 14 nt, Human
cugguagauagaaa

SEQ ID NO: 3633319 - RNA, 13 nt, Human
cugguagcucagg

SEQ ID NO: 3633320 - RNA, 22 nt, Human
cugguaggaauagcaugucacu

SEQ ID NO: 3633321 - RNA, 12 nt, Human
cugguagggcag

SEQ ID NO: 3633322 - RNA, 16 nt, Human
cugguagguugggaca

SEQ ID NO: 3633323 - RNA, 20 nt, Human
cugguagguugggacaccag

SEQ ID NO: 3633324 - RNA, 21 nt, Human
cugguaguuaguagcauguug

SEQ ID NO: 3633325 - RNA, 17 nt, Human
cugguaucucagaaagu

SEQ ID NO: 3633326 - RNA, 23 nt, Human
cugguaucucagaaagugccuga

SEQ ID NO: 3633327 - RNA, 18 nt, Human
cugguaugaacuugagga

SEQ ID NO: 3633328 - RNA, 20 nt, Human
cugguaugaacuugaggaca

SEQ ID NO: 3633329 - RNA, 21 nt, Human
cugguaugaacuugaggacac

SEQ ID NO: 3633330 - RNA, 19 nt, Human
cugguauggguuucuccca

SEQ ID NO: 3633331 - RNA, 23 nt, Human
cugguauggguuucucccaguuc

SEQ ID NO: 3633332 - RNA, 14 nt, Human
cuguagacaucugu

SEQ ID NO: 3633333 - RNA, 22 nt, Human
cuguagagcagggcaaguaaca

SEQ ID NO: 3633334 - RNA, 21 nt, Human
cuguagagcuagaacauggag

SEQ ID NO: 3633335 - RNA, 17 nt, Human
cuguagagggcccuggu

SEQ ID NO: 3633336 - RNA, 17 nt, Human
cuguagaguugcugaga

SEQ ID NO: 3633337 - RNA, 23 nt, Human
cuguagaguugcugagagggcuc

SEQ ID NO: 3633338 - RNA, 14 nt, Human
cuguagauauguau

SEQ ID NO: 3633339 - RNA, 13 nt, Human
cuguagaugaugu

SEQ ID NO: 3633340 - RNA, 13 nt, Human
cuguagauucugu

SEQ ID NO: 3633341 - RNA, 18 nt, Human
cuguagauugcuucugua

SEQ ID NO: 3633342 - RNA, 16 nt, Human
cuguagcacuuacugg

SEQ ID NO: 3633343 - RNA, 20 nt, Human
cuguagcagugagaaaaagc

SEQ ID NO: 3633344 - RNA, 21 nt, Human
cuguagcagugagaaaaagcu

SEQ ID NO: 3633345 - RNA, 16 nt, Human
cuguagcuuuuaggaa

SEQ ID NO: 3633346 - RNA, 14 nt, Human
cuguaggaaaccca

SEQ ID NO: 3633347 - RNA, 17 nt, Human
cuguaggaagguacugu

SEQ ID NO: 3633348 - RNA, 21 nt, Human
cuguaggaagguacuguauga

SEQ ID NO: 3633349 - RNA, 13 nt, Human
cuguaggccucag

SEQ ID NO: 3633350 - RNA, 21 nt, Human
cuguagggagggcggcagggg

SEQ ID NO: 3633351 - RNA, 14 nt, Human
cuguagggcuggac

SEQ ID NO: 3633352 - RNA, 17 nt, Human
cuguagggcuggaccua

SEQ ID NO: 3633353 - RNA, 18 nt, Human
cuguagggcuggaccuau

SEQ ID NO: 3633354 - RNA, 17 nt, Human
cuguaggguccaaccag

SEQ ID NO: 3633355 - RNA, 23 nt, Human
cuguaggguccaaccagaccugg

SEQ ID NO: 3633356 - RNA, 20 nt, Human
cuguagguucaugcccaagc

SEQ ID NO: 3633357 - RNA, 17 nt, Human
cuguagguugcacacuu

SEQ ID NO: 3633358 - RNA, 19 nt, Human
cuguagguugcacacuuug

SEQ ID NO: 3633359 - RNA, 22 nt, Human
cuguagguugcacacuuuggua

SEQ ID NO: 3633360 - RNA, 18 nt, Human
cuguaguaaacuauuuau

SEQ ID NO: 3633361 - RNA, 21 nt, Human
cuguaguacuccuuaagaaca

SEQ ID NO: 3633362 - RNA, 21 nt, Human
cuguaguagcccuuucugugu

SEQ ID NO: 3633363 - RNA, 22 nt, Human
cuguagucauuuacuaaacaua

SEQ ID NO: 3633364 - RNA, 17 nt, Human
cuguagucccagccacu

SEQ ID NO: 3633365 - RNA, 18 nt, Human
cuguagucccagcuacuc

SEQ ID NO: 3633366 - RNA, 22 nt, Human
cuguagucccagcuacucagga

SEQ ID NO: 3633367 - RNA, 23 nt, Human
cuguagucccagcuacucaggag

SEQ ID NO: 3633368 - RNA, 23 nt, Human
cuguaguccuagccacucaggag

SEQ ID NO: 3633369 - RNA, 20 nt, Human
cuguagucucaggaccuagg

SEQ ID NO: 3633370 - RNA, 18 nt, Human
cuguagugagauagcauu

SEQ ID NO: 3633371 - RNA, 20 nt, Human
cuguagugagauagcauugu

SEQ ID NO: 3633372 - RNA, 13 nt, Human
cuguaguuaggaa

SEQ ID NO: 3633373 - RNA, 18 nt, Human
cuguaguuaggaaauaaa

SEQ ID NO: 3633374 - RNA, 21 nt, Human
cuguaguuaggaaauaaaacc

SEQ ID NO: 3633375 - RNA, 13 nt, Human
cuguaguucuaag

SEQ ID NO: 3633376 - RNA, 20 nt, Human
cuguaguuuuauuuuauguu

SEQ ID NO: 3633377 - RNA, 22 nt, Human
cuguaguuuuauuuuauguuua

SEQ ID NO: 3633378 - RNA, 24 nt, Human
cuguaguuuuauuuuauguuuaga

SEQ ID NO: 3633379 - RNA, 17 nt, Human
cuguauaaaaucagcca

SEQ ID NO: 3633380 - RNA, 20 nt, Human
cuguauaaacauuaaauguc

SEQ ID NO: 3633381 - RNA, 20 nt, Human
cuguauaaaggugugcugug

SEQ ID NO: 3633382 - RNA, 13 nt, Human
cuguauaaauagg

SEQ ID NO: 3633383 - RNA, 15 nt, Human
cuguauaaauaggag

SEQ ID NO: 3633384 - RNA, 20 nt, Human
cuguauaaauaggagaggau

SEQ ID NO: 3633385 - RNA, 21 nt, Human
cuguauaaauaggagaggaug

SEQ ID NO: 3633386 - RNA, 15 nt, Human
cuguauaagcacuga

SEQ ID NO: 3633387 - RNA, 18 nt, Human
cuguauaaguaagaaaau

SEQ ID NO: 3633388 - RNA, 19 nt, Human
cuguauaaguaagaaaaua

SEQ ID NO: 3633389 - RNA, 21 nt, Human
cuguauaaguaagaaaauauu

SEQ ID NO: 3633390 - RNA, 21 nt, Human
cuguauaauacuuuguauaca

SEQ ID NO: 3633391 - RNA, 19 nt, Human
cuguauacaacccuggcau

SEQ ID NO: 3633392 - RNA, 21 nt, Human
cuguauaccccgugaagcauc

SEQ ID NO: 3633393 - RNA, 16 nt, Human
cuguauacuuuaguau

SEQ ID NO: 3633394 - RNA, 21 nt, Human
cuguauagacaggagaagaaa

SEQ ID NO: 3633395 - RNA, 22 nt, Human
cuguauagacaguuuguaaaug

SEQ ID NO: 3633396 - RNA, 23 nt, Human
cuguauagacaguuuguaaaugu

SEQ ID NO: 3633397 - RNA, 20 nt, Human
cuguauagauuagaauucug

SEQ ID NO: 3633398 - RNA, 14 nt, Human
cuguauagcuccuu

SEQ ID NO: 3633399 - RNA, 19 nt, Human
cuguauagcucuuuuccua

SEQ ID NO: 3633400 - RNA, 15 nt, Human
cuguauaguacuggc

SEQ ID NO: 3633401 - RNA, 21 nt, Human
cuguauaguuaggauagcauu

SEQ ID NO: 3633402 - RNA, 15 nt, Human
cuguauauaaaggug

SEQ ID NO: 3633403 - RNA, 13 nt, Human
cuguauauaaaug

SEQ ID NO: 3633404 - RNA, 22 nt, Human
cuguauauaaaugggaacauuu

SEQ ID NO: 3633405 - RNA, 18 nt, Human
cuguauauacaauaacau

SEQ ID NO: 3633406 - RNA, 16 nt, Human
cuguauauagcccagc

SEQ ID NO: 3633407 - RNA, 21 nt, Human
cuguauaucaggguacaaaaa

SEQ ID NO: 3633408 - RNA, 22 nt, Human
cuguauauuacagauauuuguc

SEQ ID NO: 3633409 - RNA, 12 nt, Human
cuguauauuugu

SEQ ID NO: 3633410 - RNA, 19 nt, Human
cuguauauuuguaugauau

SEQ ID NO: 3633411 - RNA, 23 nt, Human
cuguaucaggacccagaggaagg

SEQ ID NO: 3633412 - RNA, 23 nt, Human
cuguauccagguucccucccaga

SEQ ID NO: 3633413 - RNA, 19 nt, Human
cuguaucccaugagccuca

SEQ ID NO: 3633414 - RNA, 23 nt, Human
cuguaucccaugagccucagcau

SEQ ID NO: 3633415 - RNA, 23 nt, Human
cuguaucuguagugagauagcau

SEQ ID NO: 3633416 - RNA, 13 nt, Human
cuguaucugugcu

SEQ ID NO: 3633417 - RNA, 13 nt, Human
cuguaucugugua

SEQ ID NO: 3633418 - RNA, 20 nt, Human
cuguaugaaaaauuggggag

SEQ ID NO: 3633419 - RNA, 19 nt, Human
cuguaugaucaaauguuua

SEQ ID NO: 3633420 - RNA, 15 nt, Human
cuguaugcugaucau

SEQ ID NO: 3633421 - RNA, 16 nt, Human
cuguaugucuuaaaac

SEQ ID NO: 3633422 - RNA, 13 nt, Human
cuguauguugucc

SEQ ID NO: 3633423 - RNA, 19 nt, Human
cuguauuaagagugaaaau

SEQ ID NO: 3633424 - RNA, 12 nt, Human
cuguauugaauc

SEQ ID NO: 3633425 - RNA, 13 nt, Human
cuguauugucuga

SEQ ID NO: 3633426 - RNA, 17 nt, Human
cuguauugucugaacuu

SEQ ID NO: 3633427 - RNA, 21 nt, Human
cuguauugugcugauugugga

SEQ ID NO: 3633428 - RNA, 16 nt, Human
cuguauuuaagcaaau

SEQ ID NO: 3633429 - RNA, 14 nt, Human
cuguauuugaaagu

SEQ ID NO: 3633430 - RNA, 20 nt, Human
cuguauuugaaagugccuuu

SEQ ID NO: 3633431 - RNA, 16 nt, Human
cuguauuugagaauau

SEQ ID NO: 3633432 - RNA, 14 nt, Human
cuguauuuguaucu

SEQ ID NO: 3633433 - RNA, 12 nt, Human
cuguauuuguga

SEQ ID NO: 3633434 - RNA, 19 nt, Human
cuguauuugugacuaauug

SEQ ID NO: 3633435 - RNA, 16 nt, Human
cuguauuuguucccaa

SEQ ID NO: 3633436 - RNA, 16 nt, Human
cuguauuuuaaaagaa

SEQ ID NO: 3633437 - RNA, 19 nt, Human
cuguauuuuaaaagaauga

SEQ ID NO: 3633438 - RNA, 22 nt, Human
cuguauuuuaaaagaaugauua

SEQ ID NO: 3633439 - RNA, 23 nt, Human
cuguauuuuauuuagacaagaga

SEQ ID NO: 3633440 - RNA, 16 nt, Human
cuguauuuucuuuuua

SEQ ID NO: 3633441 - RNA, 20 nt, Human
cuguauuuugaaaaugcuuu

SEQ ID NO: 3633442 - RNA, 20 nt, Human
cuguauuuuuucuugcauug

SEQ ID NO: 3633443 - RNA, 22 nt, Human
cuguauuuuuucuugcauugac

SEQ ID NO: 3633444 - RNA, 23 nt, Human
cuguauuuuuucuugcauugaca

SEQ ID NO: 3633445 - RNA, 19 nt, Human
cugucaaaacaaguuuuuc

SEQ ID NO: 3633446 - RNA, 14 nt, Human
cugucaaaacacug

SEQ ID NO: 3633447 - RNA, 18 nt, Human
cugucaaaacacugugga

SEQ ID NO: 3633448 - RNA, 19 nt, Human
cugucaaaacacuguggaa

SEQ ID NO: 3633449 - RNA, 16 nt, Human
cugucaaaauaauuuu

SEQ ID NO: 3633450 - RNA, 14 nt, Human
cugucaaacaaagc

SEQ ID NO: 3633451 - RNA, 19 nt, Human
cugucaagaguaguuauau

SEQ ID NO: 3633452 - RNA, 19 nt, Human
cugucaaggcugcuuagaa

SEQ ID NO: 3633453 - RNA, 16 nt, Human
cugucaaugagagcau

SEQ ID NO: 3633454 - RNA, 19 nt, Human
cugucaaugauuauuuuca

SEQ ID NO: 3633455 - RNA, 16 nt, Human
cugucaauuacaggaa

SEQ ID NO: 3633456 - RNA, 23 nt, Human
cugucaauuacaggaaguacugg

SEQ ID NO: 3633457 - RNA, 16 nt, Human
cugucacaaccaagaa

SEQ ID NO: 3633458 - RNA, 13 nt, Human
cugucacaccagc

SEQ ID NO: 3633459 - RNA, 22 nt, Human
cugucacaguaaaaauaaaaua

SEQ ID NO: 3633460 - RNA, 15 nt, Human
cugucacauugcauu

SEQ ID NO: 3633461 - RNA, 18 nt, Human
cugucaccacccugcuca

SEQ ID NO: 3633462 - RNA, 23 nt, Human
cugucaccacccugcucauccac

SEQ ID NO: 3633463 - RNA, 20 nt, Human
cugucacccaggcuggagua

SEQ ID NO: 3633464 - RNA, 19 nt, Human
cugucacccgaucgccagc

SEQ ID NO: 3633465 - RNA, 18 nt, Human
cugucacccuccaccucu

SEQ ID NO: 3633466 - RNA, 21 nt, Human
cugucacucauugcugagccu

SEQ ID NO: 3633467 - RNA, 22 nt, Human
cugucacucauugcugagccuc

SEQ ID NO: 3633468 - RNA, 15 nt, Human
cugucacugcugcuu

SEQ ID NO: 3633469 - RNA, 11 nt, Human
cugucacuguu

SEQ ID NO: 3633470 - RNA, 21 nt, Human
cugucacuguuggacgucagc

SEQ ID NO: 3633471 - RNA, 14 nt, Human
cugucacuguuucu

SEQ ID NO: 3633472 - RNA, 19 nt, Human
cugucacuguuucucugcu

SEQ ID NO: 3633473 - RNA, 14 nt, Human
cugucacuuugcuc

SEQ ID NO: 3633474 - RNA, 17 nt, Human
cuucaucccacaaucuu

SEQ ID NO: 3633475 - RNA, 17 nt, Human
cuucaucccauuccagg

SEQ ID NO: 3633476 - RNA, 13 nt, Human
cuucaucccucug

SEQ ID NO: 3633477 - RNA, 16 nt, Human
cuucauccuccucaga

SEQ ID NO: 3633478 - RNA, 11 nt, Human
cuucauccucu

SEQ ID NO: 3633479 - RNA, 15 nt, Human
cuucaucgaaucuac

SEQ ID NO: 3633480 - RNA, 17 nt, Human
cuucaucgaaucuacua

SEQ ID NO: 3633481 - RNA, 17 nt, Human
cuucaucuccagggagu

SEQ ID NO: 3633482 - RNA, 13 nt, Human
cuucaucucccac

SEQ ID NO: 3633483 - RNA, 13 nt, Human
cuucaucuggaac

SEQ ID NO: 3633484 - RNA, 15 nt, Human
cuucaucuggaacca

SEQ ID NO: 3633485 - RNA, 13 nt, Human
cuucaucuggcaa

SEQ ID NO: 3633486 - RNA, 13 nt, Human
cuucaucuuccug

SEQ ID NO: 3633487 - RNA, 16 nt, Human
cuucaucuuccugugu

SEQ ID NO: 3633488 - RNA, 12 nt, Human
cuucaucuuuua

SEQ ID NO: 3633489 - RNA, 12 nt, Human
cuucaugaaaug

SEQ ID NO: 3633490 - RNA, 14 nt, Human
cuucaugaaaugcu

SEQ ID NO: 3633491 - RNA, 23 nt, Human
cuucaugaaaugcuaugucauuu

SEQ ID NO: 3633492 - RNA, 12 nt, Human
cuucaugacauu

SEQ ID NO: 3633493 - RNA, 22 nt, Human
cuucaugcaaugacaucuucaa

SEQ ID NO: 3633494 - RNA, 13 nt, Human
cuucaugcacuua

SEQ ID NO: 3633495 - RNA, 22 nt, Human
cuucaugcaggugaaacccagu

SEQ ID NO: 3633496 - RNA, 15 nt, Human
cuucaugcauggaaa

SEQ ID NO: 3633497 - RNA, 15 nt, Human
cuucaugccagcuac

SEQ ID NO: 3633498 - RNA, 15 nt, Human
cuucaugccuuugua

SEQ ID NO: 3633499 - RNA, 16 nt, Human
cuucaugccuuuguaa

SEQ ID NO: 3633500 - RNA, 15 nt, Human
cuucaugcucagccc

SEQ ID NO: 3633501 - RNA, 17 nt, Human
cuucaugcucagcccug

SEQ ID NO: 3633502 - RNA, 13 nt, Human
cuucauggaucag

SEQ ID NO: 3633503 - RNA, 15 nt, Human
cuucauggcagaagg

SEQ ID NO: 3633504 - RNA, 19 nt, Human
cuucauggccauagcuuuu

SEQ ID NO: 3633505 - RNA, 13 nt, Human
cuucauguaaauu

SEQ ID NO: 3633506 - RNA, 22 nt, Human
cuucauguaaauugacuguacu

SEQ ID NO: 3633507 - RNA, 21 nt, Human
cuucauguaauuuuauuuuaa

SEQ ID NO: 3633508 - RNA, 20 nt, Human
cuucaugucaacuucuggcu

SEQ ID NO: 3633509 - RNA, 16 nt, Human
cuucauguggcuuccc

SEQ ID NO: 3633510 - RNA, 13 nt, Human
cuucauguguccc

SEQ ID NO: 3633511 - RNA, 14 nt, Human
cuucauguguccca

SEQ ID NO: 3633512 - RNA, 20 nt, Human
cuucaugugucccagaagau

SEQ ID NO: 3633513 - RNA, 20 nt, Human
cuucauuaagcccucuucca

SEQ ID NO: 3633514 - RNA, 17 nt, Human
cuucauuaauaauaaau

SEQ ID NO: 3633515 - RNA, 21 nt, Human
cuucauucaagucagcucuuc

SEQ ID NO: 3633516 - RNA, 15 nt, Human
cuucauucugcaggg

SEQ ID NO: 3633517 - RNA, 18 nt, Human
cuucauugauuuccugug

SEQ ID NO: 3633518 - RNA, 21 nt, Human
cuucauugauuuccuguguca

SEQ ID NO: 3633519 - RNA, 17 nt, Human
cuucauugucccucuuc

SEQ ID NO: 3633520 - RNA, 20 nt, Human
cuucauugucccucuucacu

SEQ ID NO: 3633521 - RNA, 19 nt, Human
cuucauuuaaaaaaaucac

SEQ ID NO: 3633522 - RNA, 12 nt, Human
cuucauuucaga

SEQ ID NO: 3633523 - RNA, 17 nt, Human
cuucauuucauuguaug

SEQ ID NO: 3633524 - RNA, 14 nt, Human
cuucauuuccuccg

SEQ ID NO: 3633525 - RNA, 21 nt, Human
cuucauuucugauauagaauu

SEQ ID NO: 3633526 - RNA, 14 nt, Human
cuucauuuggagau

SEQ ID NO: 3633527 - RNA, 24 nt, Human
cuucauuugggaugcuacucuagu

SEQ ID NO: 3633528 - RNA, 14 nt, Human
cuucauuuguguca

SEQ ID NO: 3633529 - RNA, 16 nt, Human
cuucauuuuuccuaac

SEQ ID NO: 3633530 - RNA, 17 nt, Human
cuucauuuuuccuaaca

SEQ ID NO: 3633531 - RNA, 15 nt, Human
cuuccaaaauucuua

SEQ ID NO: 3633532 - RNA, 17 nt, Human
cuuccaaaauucuuauu

SEQ ID NO: 3633533 - RNA, 16 nt, Human
cuuccaaacuaauuuu

SEQ ID NO: 3633534 - RNA, 13 nt, Human
cuuccaaagcaca

SEQ ID NO: 3633535 - RNA, 14 nt, Human
cuuccaaauaaaua

SEQ ID NO: 3633536 - RNA, 20 nt, Human
cuuccaaauccccuaagcag

SEQ ID NO: 3633537 - RNA, 15 nt, Human
cuuccaacugcugcc

SEQ ID NO: 3633538 - RNA, 18 nt, Human
cuuccaacugcugcccca

SEQ ID NO: 3633539 - RNA, 19 nt, Human
cuuccaagacuccagcccu

SEQ ID NO: 3633540 - RNA, 21 nt, Human
cuuccaagguggucugcucgg

SEQ ID NO: 3633541 - RNA, 15 nt, Human
cuuccaaugucugga

SEQ ID NO: 3633542 - RNA, 17 nt, Human
cuuccaaugucuggaga

SEQ ID NO: 3633543 - RNA, 19 nt, Human
cuuccaaugucuggagacc

SEQ ID NO: 3633544 - RNA, 16 nt, Human
cuuccacaaagaaaau

SEQ ID NO: 3633545 - RNA, 17 nt, Human
cuuccacaaagaaaauu

SEQ ID NO: 3633546 - RNA, 23 nt, Human
cuuccacaaagaaaauuccuaua

SEQ ID NO: 3633547 - RNA, 16 nt, Human
cuuccacaagagccca

SEQ ID NO: 3633548 - RNA, 22 nt, Human
cuuccacagggucccacagcca

SEQ ID NO: 3633549 - RNA, 23 nt, Human
cuuccacagggucccacagccac

SEQ ID NO: 3633550 - RNA, 17 nt, Human
cuuccacaggucucaga

SEQ ID NO: 3633551 - RNA, 15 nt, Human
cuuccacauuuuccc

SEQ ID NO: 3633552 - RNA, 12 nt, Human
cuuccaccagcc

SEQ ID NO: 3633553 - RNA, 17 nt, Human
cuuccaccagccugcac

SEQ ID NO: 3633554 - RNA, 14 nt, Human
cuuccacccagugc

SEQ ID NO: 3633555 - RNA, 14 nt, Human
cuuccaccucaccc

SEQ ID NO: 3633556 - RNA, 18 nt, Human
cuuccaccucaccccacu

SEQ ID NO: 3633557 - RNA, 20 nt, Human
cuuccaccucaccccacuua

SEQ ID NO: 3633558 - RNA, 16 nt, Human
cuuccaccugcucugc

SEQ ID NO: 3633559 - RNA, 17 nt, Human
cuuccaccugcucugcu

SEQ ID NO: 3633560 - RNA, 13 nt, Human
cuuccaccuggaa

SEQ ID NO: 3633561 - RNA, 17 nt, Human
cuuccacgcugucucca

SEQ ID NO: 3633562 - RNA, 19 nt, Human
cuuccacggacucaaguuu

SEQ ID NO: 3633563 - RNA, 19 nt, Human
cuuccacguacugcagccu

SEQ ID NO: 3633564 - RNA, 15 nt, Human
cuuccacugagggca

SEQ ID NO: 3633565 - RNA, 17 nt, Human
cuuccacugauggaaac

SEQ ID NO: 3633566 - RNA, 16 nt, Human
cuuccacugccucugc

SEQ ID NO: 3633567 - RNA, 18 nt, Human
cuuccacugccucugccu

SEQ ID NO: 3633568 - RNA, 20 nt, Human
cuuccacuuuuuuuuguaug

SEQ ID NO: 3633569 - RNA, 15 nt, Human
cuuccagaaguguga

SEQ ID NO: 3633570 - RNA, 17 nt, Human
cuuccagaagugugauu

SEQ ID NO: 3633571 - RNA, 13 nt, Human
cuuccagaucacu

SEQ ID NO: 3633572 - RNA, 21 nt, Human
cuuccagauccucucuggggc

SEQ ID NO: 3633573 - RNA, 20 nt, Human
cuuccagauggucauccaga

SEQ ID NO: 3633574 - RNA, 14 nt, Human
cuuccagcacccug

SEQ ID NO: 3633575 - RNA, 21 nt, Human
cuuccagcauuuagcuggcca

SEQ ID NO: 3633576 - RNA, 22 nt, Human
cuuccagcuagugacccacaug

SEQ ID NO: 3633577 - RNA, 13 nt, Human
cuuccagcugcug

SEQ ID NO: 3633578 - RNA, 16 nt, Human
cuuccagcugcugucu

SEQ ID NO: 3633579 - RNA, 15 nt, Human
cuuccaggaccccug

SEQ ID NO: 3633580 - RNA, 17 nt, Human
cuuccaggaccccuggg

SEQ ID NO: 3633581 - RNA, 12 nt, Human
cuuccaggcagc

SEQ ID NO: 3633582 - RNA, 13 nt, Human
cuuccaggcagcc

SEQ ID NO: 3633583 - RNA, 20 nt, Human
cuuccaggccaucagaggcc

SEQ ID NO: 3633584 - RNA, 19 nt, Human
cuuccaggcccccaccacu

SEQ ID NO: 3633585 - RNA, 14 nt, Human
cuuccaggcuggga

SEQ ID NO: 3633586 - RNA, 19 nt, Human
cuuccagggacgaagaaga

SEQ ID NO: 3633587 - RNA, 15 nt, Human
cuuccaggggaaccu

SEQ ID NO: 3633588 - RNA, 19 nt, Human
cuuccaggggaaccugcca

SEQ ID NO: 3633589 - RNA, 14 nt, Human
cuuccagggguggg

SEQ ID NO: 3633590 - RNA, 19 nt, Human
cuuccagguaucuccagga

SEQ ID NO: 3633591 - RNA, 17 nt, Human
cuuccagugaggcucug

SEQ ID NO: 3633592 - RNA, 19 nt, Human
cuuccagugaggcucugcc

SEQ ID NO: 3633593 - RNA, 22 nt, Human
cuuccagugaggcucugcccuu

SEQ ID NO: 3633594 - RNA, 18 nt, Human
cuuccaguguccuuagaa

SEQ ID NO: 3633595 - RNA, 19 nt, Human
cuuccaguguccuuagaac

SEQ ID NO: 3633596 - RNA, 19 nt, Human
cuuccaguuacuuuccaau

SEQ ID NO: 3633597 - RNA, 19 nt, Human
cuuccaguuuauuccagag

SEQ ID NO: 3633598 - RNA, 20 nt, Human
cuuccaguuuauuccagagc

SEQ ID NO: 3633599 - RNA, 21 nt, Human
cuuccaguuuauuccagagcu

SEQ ID NO: 3633600 - RNA, 23 nt, Human
cuuccaguuuauuccagagcugc

SEQ ID NO: 3633601 - RNA, 21 nt, Human
cuuccaguuugcuuugcccuu

SEQ ID NO: 3633602 - RNA, 11 nt, Human
cuuccauaaug

SEQ ID NO: 3633603 - RNA, 18 nt, Human
cuuccauaaugcuacugu

SEQ ID NO: 3633604 - RNA, 23 nt, Human
cuuccauaauguauaaagaacaa

SEQ ID NO: 3633605 - RNA, 11 nt, Human
cuuccauaauu

SEQ ID NO: 3633606 - RNA, 14 nt, Human
cuuccauacagcuc

SEQ ID NO: 3633607 - RNA, 22 nt, Human
cuuccauagccuaaucccuggg

SEQ ID NO: 3633608 - RNA, 19 nt, Human
cuuccauauuuggaagaaa

SEQ ID NO: 3633609 - RNA, 13 nt, Human
cuuccaucauguc

SEQ ID NO: 3633610 - RNA, 14 nt, Human
cuuccaucaugucc

SEQ ID NO: 3633611 - RNA, 17 nt, Human
cuuccaucaugucccca

SEQ ID NO: 3633612 - RNA, 12 nt, Human
cuuccaucccua

SEQ ID NO: 3633613 - RNA, 19 nt, Human
cuuccaucccuacccccua

SEQ ID NO: 3633614 - RNA, 15 nt, Human
cuuccaucucgccac

SEQ ID NO: 3633615 - RNA, 21 nt, Human
cuuccaucugauuccagcaca

SEQ ID NO: 3633616 - RNA, 17 nt, Human
cuuccaugagaacagca

SEQ ID NO: 3633617 - RNA, 14 nt, Human
cuuccaugauuuua

SEQ ID NO: 3633618 - RNA, 15 nt, Human
cuuccaugcugugcg

SEQ ID NO: 3633619 - RNA, 17 nt, Human
cuuccauggacuuuguu

SEQ ID NO: 3633620 - RNA, 16 nt, Human
cuucuauauauuguau

SEQ ID NO: 3633621 - RNA, 20 nt, Human
cuucuaugacccagcauggg

SEQ ID NO: 3633622 - RNA, 22 nt, Human
cuucuauguaggaaaaaaauag

SEQ ID NO: 3633623 - RNA, 21 nt, Human
cuucuauucuagccugcauug

SEQ ID NO: 3633624 - RNA, 14 nt, Human
cuucuauugccucu

SEQ ID NO: 3633625 - RNA, 14 nt, Human
cuucuauuggucuc

SEQ ID NO: 3633626 - RNA, 22 nt, Human
cuucuauuuauuuauuuauuca

SEQ ID NO: 3633627 - RNA, 15 nt, Human
cuucucaaguucuaa

SEQ ID NO: 3633628 - RNA, 18 nt, Human
cuucucaaguucuaagau

SEQ ID NO: 3633629 - RNA, 21 nt, Human
cuucucaaguucuaagauucu

SEQ ID NO: 3633630 - RNA, 15 nt, Human
cuucucacagcacau

SEQ ID NO: 3633631 - RNA, 20 nt, Human
cuucucacauuuauauuuuu

SEQ ID NO: 3633632 - RNA, 20 nt, Human
cuucucacucccuucuccuu

SEQ ID NO: 3633633 - RNA, 16 nt, Human
cuucucacugccaugc

SEQ ID NO: 3633634 - RNA, 17 nt, Human
cuucucagaagcacaga

SEQ ID NO: 3633635 - RNA, 18 nt, Human
cuucucagaaucuaccca

SEQ ID NO: 3633636 - RNA, 22 nt, Human
cuucucagauuucugaggaaau

SEQ ID NO: 3633637 - RNA, 21 nt, Human
cuucucaggacacaggccugu

SEQ ID NO: 3633638 - RNA, 13 nt, Human
cuucucaggcucu

SEQ ID NO: 3633639 - RNA, 16 nt, Human
cuucucauacguccac

SEQ ID NO: 3633640 - RNA, 20 nt, Human
cuucucaucuugacagagcc

SEQ ID NO: 3633641 - RNA, 23 nt, Human
cuucucaucuugacagagccugc

SEQ ID NO: 3633642 - RNA, 14 nt, Human
cuucucauuacuug

SEQ ID NO: 3633643 - RNA, 14 nt, Human
cuucucauuucacc

SEQ ID NO: 3633644 - RNA, 15 nt, Human
cuucucauuucaccc

SEQ ID NO: 3633645 - RNA, 19 nt, Human
cuucuccaaaaaucugccu

SEQ ID NO: 3633646 - RNA, 20 nt, Human
cuucuccaaaaaucugccug

SEQ ID NO: 3633647 - RNA, 15 nt, Human
cuucuccacccugcu

SEQ ID NO: 3633648 - RNA, 16 nt, Human
cuucuccacccugcuc

SEQ ID NO: 3633649 - RNA, 15 nt, Human
cuucuccacuggaug

SEQ ID NO: 3633650 - RNA, 20 nt, Human
cuucuccacuuucuagccag

SEQ ID NO: 3633651 - RNA, 17 nt, Human
cuucuccagacaaacca

SEQ ID NO: 3633652 - RNA, 13 nt, Human
cuucuccagauuu

SEQ ID NO: 3633653 - RNA, 12 nt, Human
cuucuccaggcu

SEQ ID NO: 3633654 - RNA, 13 nt, Human
cuucuccaggguc

SEQ ID NO: 3633655 - RNA, 18 nt, Human
cuucuccaucucucuggc

SEQ ID NO: 3633656 - RNA, 17 nt, Human
cuucuccaucuggcagg

SEQ ID NO: 3633657 - RNA, 15 nt, Human
cuucucccaauucau

SEQ ID NO: 3633658 - RNA, 14 nt, Human
cuucucccacacug

SEQ ID NO: 3633659 - RNA, 16 nt, Human
cuucucccacacugcu

SEQ ID NO: 3633660 - RNA, 19 nt, Human
cuucucccacucuccuagg

SEQ ID NO: 3633661 - RNA, 12 nt, Human
cuucucccagaa

SEQ ID NO: 3633662 - RNA, 16 nt, Human
cuucucccagaauccc

SEQ ID NO: 3633663 - RNA, 18 nt, Human
cuucucccaucucuuccu

SEQ ID NO: 3633664 - RNA, 18 nt, Human
cuucucccccccggggcu

SEQ ID NO: 3633665 - RNA, 19 nt, Human
cuucuccccugcacuguaa

SEQ ID NO: 3633666 - RNA, 20 nt, Human
cuucuccccugcacuguaaa

SEQ ID NO: 3633667 - RNA, 23 nt, Human
cuucuccccugcacuguaaaaug

SEQ ID NO: 3633668 - RNA, 15 nt, Human
cuucuccccuuccau

SEQ ID NO: 3633669 - RNA, 16 nt, Human
cuucuccgccagccuc

SEQ ID NO: 3633670 - RNA, 22 nt, Human
cuucuccuauguguaaggugaa

SEQ ID NO: 3633671 - RNA, 18 nt, Human
cuucuccuccccacccgc

SEQ ID NO: 3633672 - RNA, 14 nt, Human
cuucuccucuugua

SEQ ID NO: 3633673 - RNA, 17 nt, Human
cuucuccucuuguaaau

SEQ ID NO: 3633674 - RNA, 20 nt, Human
cuucuccuuccaacugcugc

SEQ ID NO: 3633675 - RNA, 20 nt, Human
cuucuccuuucacaaccuuc

SEQ ID NO: 3633676 - RNA, 15 nt, Human
cuucucuacagacuu

SEQ ID NO: 3633677 - RNA, 15 nt, Human
cuucucuagcuggug

SEQ ID NO: 3633678 - RNA, 12 nt, Human
cuucucuauaaa

SEQ ID NO: 3633679 - RNA, 16 nt, Human
cuucucuccagcugac

SEQ ID NO: 3633680 - RNA, 19 nt, Human
cuucucuccagcugacuaa

SEQ ID NO: 3633681 - RNA, 14 nt, Human
cuucucuccagugc

SEQ ID NO: 3633682 - RNA, 13 nt, Human
cuucucuccuccc

SEQ ID NO: 3633683 - RNA, 15 nt, Human
cuucucuccucccca

SEQ ID NO: 3633684 - RNA, 13 nt, Human
cuucucucugugg

SEQ ID NO: 3633685 - RNA, 16 nt, Human
cuucucucugugggau

SEQ ID NO: 3633686 - RNA, 12 nt, Human
cuucucugaaca

SEQ ID NO: 3633687 - RNA, 13 nt, Human
cuucucugaacac

SEQ ID NO: 3633688 - RNA, 15 nt, Human
cuucucugaacacag

SEQ ID NO: 3633689 - RNA, 21 nt, Human
cuucucugaacacaggcagcu

SEQ ID NO: 3633690 - RNA, 11 nt, Human
cuucucugaag

SEQ ID NO: 3633691 - RNA, 16 nt, Human
cuucucugaagggagg

SEQ ID NO: 3633692 - RNA, 12 nt, Human
cuucucugacuu

SEQ ID NO: 3633693 - RNA, 16 nt, Human
cuucucugacuucugc

SEQ ID NO: 3633694 - RNA, 12 nt, Human
cuucucugccca

SEQ ID NO: 3633695 - RNA, 15 nt, Human
cuucucugcccauuc

SEQ ID NO: 3633696 - RNA, 16 nt, Human
cuucucugcccauucc

SEQ ID NO: 3633697 - RNA, 23 nt, Human
cuucucugcccauuccccagccu

SEQ ID NO: 3633698 - RNA, 19 nt, Human
cuucucugccuuugacauu

SEQ ID NO: 3633699 - RNA, 13 nt, Human
cuucucugcucca

SEQ ID NO: 3633700 - RNA, 14 nt, Human
cuucucugcuccac

SEQ ID NO: 3633701 - RNA, 19 nt, Human
cuucucuggaaagggggga

SEQ ID NO: 3633702 - RNA, 15 nt, Human
cuucucugugagaag

SEQ ID NO: 3633703 - RNA, 17 nt, Human
cuucucuguucauuucc

SEQ ID NO: 3633704 - RNA, 13 nt, Human
cuucucuuagauu

SEQ ID NO: 3633705 - RNA, 13 nt, Human
cuucucuuccugu

SEQ ID NO: 3633706 - RNA, 22 nt, Human
cuucucuuccuuuuaucaguag

SEQ ID NO: 3633707 - RNA, 13 nt, Human
cuucucuugcuuu

SEQ ID NO: 3633708 - RNA, 20 nt, Human
cuucucuuuaacucaggacu

SEQ ID NO: 3633709 - RNA, 22 nt, Human
cuucucuuuaacucaggacucc

SEQ ID NO: 3633710 - RNA, 13 nt, Human
cuucucuuugccu

SEQ ID NO: 3633711 - RNA, 16 nt, Human
cuucucuuugccucaa

SEQ ID NO: 3633712 - RNA, 23 nt, Human
cuucugaaaugaaacaaauaauc

SEQ ID NO: 3633713 - RNA, 22 nt, Human
cuucugaacucaaacugaggaa

SEQ ID NO: 3633714 - RNA, 19 nt, Human
cuucugaacuuggcgcugc

SEQ ID NO: 3633715 - RNA, 23 nt, Human
cuucugaacuuggcgcugccccu

SEQ ID NO: 3633716 - RNA, 15 nt, Human
cuucugaauaaagca

SEQ ID NO: 3633717 - RNA, 18 nt, Human
cuucugaauaaagcaauu

SEQ ID NO: 3633718 - RNA, 15 nt, Human
cuucugaauauuuua

SEQ ID NO: 3633719 - RNA, 16 nt, Human
cuucugaaugcugcua

SEQ ID NO: 3633720 - RNA, 19 nt, Human
cuucugaaugcugcuacuu

SEQ ID NO: 3633721 - RNA, 20 nt, Human
cuucugaaugugcugaucau

SEQ ID NO: 3633722 - RNA, 21 nt, Human
cuucugaaugugcugaucauu

SEQ ID NO: 3633723 - RNA, 16 nt, Human
cuucugacaaacugug

SEQ ID NO: 3633724 - RNA, 17 nt, Human
cuucugaccacacuucc

SEQ ID NO: 3633725 - RNA, 19 nt, Human
cuucugaccacacuuccug

SEQ ID NO: 3633726 - RNA, 21 nt, Human
cuucugaccacagcaucauuu

SEQ ID NO: 3633727 - RNA, 15 nt, Human
cuucugacccaugcu

SEQ ID NO: 3633728 - RNA, 16 nt, Human
cuucugacccaugcug

SEQ ID NO: 3633729 - RNA, 17 nt, Human
cuucugacccaugcugc

SEQ ID NO: 3633730 - RNA, 22 nt, Human
cuucugacgugccuuuugcacc

SEQ ID NO: 3633731 - RNA, 16 nt, Human
cuucugacucuucccc

SEQ ID NO: 3633732 - RNA, 23 nt, Human
cuucugagcacuguuuauacacu

SEQ ID NO: 3633733 - RNA, 20 nt, Human
cuucugagcagcgagccugc

SEQ ID NO: 3633734 - RNA, 21 nt, Human
cuucugagcagcgagccugcu

SEQ ID NO: 3633735 - RNA, 16 nt, Human
cuucugagcuauuuca

SEQ ID NO: 3633736 - RNA, 17 nt, Human
cuucugagcuauuucau

SEQ ID NO: 3633737 - RNA, 14 nt, Human
cuucugagcuccug

SEQ ID NO: 3633738 - RNA, 15 nt, Human
cuucugagcuccugu

SEQ ID NO: 3633739 - RNA, 19 nt, Human
cuucugagcuccugucccc

SEQ ID NO: 3633740 - RNA, 22 nt, Human
cuucugagcuccuguccccugc

SEQ ID NO: 3633741 - RNA, 17 nt, Human
cuucugagcuggccucu

SEQ ID NO: 3633742 - RNA, 18 nt, Human
cuucugaugaaucuugcg

SEQ ID NO: 3633743 - RNA, 19 nt, Human
cuucugcaauugcuuagga

SEQ ID NO: 3633744 - RNA, 13 nt, Human
cuucugcacccuc

SEQ ID NO: 3633745 - RNA, 15 nt, Human
cuucugcacccucca

SEQ ID NO: 3633746 - RNA, 18 nt, Human
cuucugcacccuccaccc

SEQ ID NO: 3633747 - RNA, 16 nt, Human
cuucugcaccuuaucu

SEQ ID NO: 3633748 - RNA, 18 nt, Human
cuucugcaccuuaucuua

SEQ ID NO: 3633749 - RNA, 11 nt, Human
cuucugccacu

SEQ ID NO: 3633750 - RNA, 17 nt, Human
cuucugcccccugcaga

SEQ ID NO: 3633751 - RNA, 18 nt, Human
cuucugcccucccuggag

SEQ ID NO: 3633752 - RNA, 15 nt, Human
cuucugcccuugcca

SEQ ID NO: 3633753 - RNA, 17 nt, Human
cuucugccggcccuggg

SEQ ID NO: 3633754 - RNA, 18 nt, Human
cuucugccggcccugggg

SEQ ID NO: 3633755 - RNA, 15 nt, Human
cuucugccugagcuu

SEQ ID NO: 3633756 - RNA, 14 nt, Human
cuucugccuggaga

SEQ ID NO: 3633757 - RNA, 16 nt, Human
cuucugccuggagacu

SEQ ID NO: 3633758 - RNA, 13 nt, Human
cuucugccuuuuc

SEQ ID NO: 3633759 - RNA, 15 nt, Human
cuucugcucagcucu

SEQ ID NO: 3633760 - RNA, 21 nt, Human
cuucugcuccacccuuggccu

SEQ ID NO: 3633761 - RNA, 17 nt, Human
cuucugcuggauaaaau

SEQ ID NO: 3633762 - RNA, 13 nt, Human
cuucugcuggggc

SEQ ID NO: 3633763 - RNA, 16 nt, Human
cuucugcuucagccuc

SEQ ID NO: 3633764 - RNA, 22 nt, Human
cuucugcuuuguugugugccuc

SEQ ID NO: 3633765 - RNA, 18 nt, Human
cuucugcuuuucugcccu

SEQ ID NO: 3633766 - RNA, 16 nt, Human
cuugaugguuuauguu

SEQ ID NO: 3633767 - RNA, 13 nt, Human
cuugauguaaaau

SEQ ID NO: 3633768 - RNA, 21 nt, Human
cuugauguaaaaucuugucau

SEQ ID NO: 3633769 - RNA, 22 nt, Human
cuugauguaaaaucuugucaug

SEQ ID NO: 3633770 - RNA, 23 nt, Human
cuugauguaaaaucuugucaugu

SEQ ID NO: 3633771 - RNA, 20 nt, Human
cuugaugucuuuguuaagac

SEQ ID NO: 3633772 - RNA, 15 nt, Human
cuugaugugccauuu

SEQ ID NO: 3633773 - RNA, 12 nt, Human
cuugauguguua

SEQ ID NO: 3633774 - RNA, 20 nt, Human
cuugauuaagaucucagugg

SEQ ID NO: 3633775 - RNA, 15 nt, Human
cuugauuaagauuuu

SEQ ID NO: 3633776 - RNA, 20 nt, Human
cuugauuaagauuuuacaaa

SEQ ID NO: 3633777 - RNA, 21 nt, Human
cuugauuaagauuuuacaaaa

SEQ ID NO: 3633778 - RNA, 16 nt, Human
cuugauuauccauauu

SEQ ID NO: 3633779 - RNA, 22 nt, Human
cuugauucguagauuuaauaac

SEQ ID NO: 3633780 - RNA, 21 nt, Human
cuugauucugcaguaaaucuu

SEQ ID NO: 3633781 - RNA, 18 nt, Human
cuugauuuaaacacacag

SEQ ID NO: 3633782 - RNA, 22 nt, Human
cuugauuuaucacacaaagcag

SEQ ID NO: 3633783 - RNA, 18 nt, Human
cuugauuuauuugcuucu

SEQ ID NO: 3633784 - RNA, 19 nt, Human
cuugauuucaaaguuuugu

SEQ ID NO: 3633785 - RNA, 21 nt, Human
cuugauuuguuuuagaaugau

SEQ ID NO: 3633786 - RNA, 19 nt, Human
cuugauuuuagccuucucu

SEQ ID NO: 3633787 - RNA, 20 nt, Human
cuugauuuuagccuucucug

SEQ ID NO: 3633788 - RNA, 14 nt, Human
cuugauuuuccauc

SEQ ID NO: 3633789 - RNA, 22 nt, Human
cuugauuuuccaucuaaaaaua

SEQ ID NO: 3633790 - RNA, 14 nt, Human
cuugauuuugcaaa

SEQ ID NO: 3633791 - RNA, 16 nt, Human
cuugcaaaaucaguuu

SEQ ID NO: 3633792 - RNA, 17 nt, Human
cuugcaaaaucaguuuu

SEQ ID NO: 3633793 - RNA, 14 nt, Human
cuugcaagaaucag

SEQ ID NO: 3633794 - RNA, 16 nt, Human
cuugcaagcaugcuug

SEQ ID NO: 3633795 - RNA, 18 nt, Human
cuugcaagcaugcuugug

SEQ ID NO: 3633796 - RNA, 14 nt, Human
cuugcaauggcagc

SEQ ID NO: 3633797 - RNA, 16 nt, Human
cuugcaauggcagccu

SEQ ID NO: 3633798 - RNA, 17 nt, Human
cuugcaauuucuaccua

SEQ ID NO: 3633799 - RNA, 18 nt, Human
cuugcacacaucaucugu

SEQ ID NO: 3633800 - RNA, 23 nt, Human
cuugcacagucacugcucuucag

SEQ ID NO: 3633801 - RNA, 12 nt, Human
cuugcacauuug

SEQ ID NO: 3633802 - RNA, 15 nt, Human
cuugcaccaaauuau

SEQ ID NO: 3633803 - RNA, 14 nt, Human
cuugcaccccucac

SEQ ID NO: 3633804 - RNA, 16 nt, Human
cuugcaccucugaccu

SEQ ID NO: 3633805 - RNA, 20 nt, Human
cuugcacgaccgccccaguu

SEQ ID NO: 3633806 - RNA, 22 nt, Human
cuugcacgcgcccuuucuacca

SEQ ID NO: 3633807 - RNA, 17 nt, Human
cuugcacucucuuggcu

SEQ ID NO: 3633808 - RNA, 18 nt, Human
cuugcacucucuuggcug

SEQ ID NO: 3633809 - RNA, 13 nt, Human
cuugcagaacugc

SEQ ID NO: 3633810 - RNA, 12 nt, Human
cuugcagaagcu

SEQ ID NO: 3633811 - RNA, 20 nt, Human
cuugcagacucuacagaggc

SEQ ID NO: 3633812 - RNA, 13 nt, Human
cuugcagagaagc

SEQ ID NO: 3633813 - RNA, 23 nt, Human
cuugcagcacucacacaggaccc

SEQ ID NO: 3633814 - RNA, 12 nt, Human
cuugcagcagga

SEQ ID NO: 3633815 - RNA, 14 nt, Human
cuugcaguucuuga

SEQ ID NO: 3633816 - RNA, 20 nt, Human
cuugcauccuuccuauaacu

SEQ ID NO: 3633817 - RNA, 20 nt, Human
cuugcaucguggagacaggg

SEQ ID NO: 3633818 - RNA, 13 nt, Human
cuugcaugaggcu

SEQ ID NO: 3633819 - RNA, 21 nt, Human
cuugcaugaggcuaguguggu

SEQ ID NO: 3633820 - RNA, 19 nt, Human
cuugcaugguuuggagcug

SEQ ID NO: 3633821 - RNA, 13 nt, Human
cuugcauguaacg

SEQ ID NO: 3633822 - RNA, 12 nt, Human
cuugcauguggu

SEQ ID NO: 3633823 - RNA, 16 nt, Human
cuugcauucccagugg

SEQ ID NO: 3633824 - RNA, 11 nt, Human
cuugcauugac

SEQ ID NO: 3633825 - RNA, 22 nt, Human
cuugcauuucacuugaguggag

SEQ ID NO: 3633826 - RNA, 21 nt, Human
cuugcauuuuugcaggagcag

SEQ ID NO: 3633827 - RNA, 17 nt, Human
cuugccaaauauaaaua

SEQ ID NO: 3633828 - RNA, 20 nt, Human
cuugccaaccuguaauaaau

SEQ ID NO: 3633829 - RNA, 23 nt, Human
cuugccaaccuguaauaaauaug

SEQ ID NO: 3633830 - RNA, 19 nt, Human
cuugccaaggcagaggccu

SEQ ID NO: 3633831 - RNA, 22 nt, Human
cuugccaaugaggucugaaaug

SEQ ID NO: 3633832 - RNA, 13 nt, Human
cuugccacacucu

SEQ ID NO: 3633833 - RNA, 15 nt, Human
cuugccacugcacuc

SEQ ID NO: 3633834 - RNA, 13 nt, Human
cuugccacugccu

SEQ ID NO: 3633835 - RNA, 15 nt, Human
cuugccacugccucu

SEQ ID NO: 3633836 - RNA, 17 nt, Human
cuugccacuuugcacga

SEQ ID NO: 3633837 - RNA, 21 nt, Human
cuugccagaaccaaauuaacu

SEQ ID NO: 3633838 - RNA, 20 nt, Human
cuugccagaaguuguggauu

SEQ ID NO: 3633839 - RNA, 16 nt, Human
cuugccagacaugugg

SEQ ID NO: 3633840 - RNA, 11 nt, Human
cuugccagaga

SEQ ID NO: 3633841 - RNA, 20 nt, Human
cuugccagagccgggcacau

SEQ ID NO: 3633842 - RNA, 21 nt, Human
cuugccagcugcugagccgca

SEQ ID NO: 3633843 - RNA, 19 nt, Human
cuugccaucccucccucca

SEQ ID NO: 3633844 - RNA, 21 nt, Human
cuugccaugugacucuggcuu

SEQ ID NO: 3633845 - RNA, 14 nt, Human
cuugcccacaccga

SEQ ID NO: 3633846 - RNA, 15 nt, Human
cuugcccacuccugc

SEQ ID NO: 3633847 - RNA, 22 nt, Human
cuugcccacuccugcucugcuc

SEQ ID NO: 3633848 - RNA, 13 nt, Human
cuugcccagagau

SEQ ID NO: 3633849 - RNA, 21 nt, Human
cuugcccagagaugccuccac

SEQ ID NO: 3633850 - RNA, 13 nt, Human
cuugcccagccug

SEQ ID NO: 3633851 - RNA, 13 nt, Human
cuugcccagggcu

SEQ ID NO: 3633852 - RNA, 14 nt, Human
cuugcccagggcuc

SEQ ID NO: 3633853 - RNA, 20 nt, Human
cuugcccagggcucagccug

SEQ ID NO: 3633854 - RNA, 23 nt, Human
cuugcccagggcucagccuggug

SEQ ID NO: 3633855 - RNA, 14 nt, Human
cuugcccaguuuca

SEQ ID NO: 3633856 - RNA, 18 nt, Human
cuugcccauccugacuga

SEQ ID NO: 3633857 - RNA, 21 nt, Human
cuugcccaugcugggcucccg

SEQ ID NO: 3633858 - RNA, 13 nt, Human
cuugccccaaccc

SEQ ID NO: 3633859 - RNA, 20 nt, Human
cuugccccaacccccagcac

SEQ ID NO: 3633860 - RNA, 16 nt, Human
cuugccccaacccuuc

SEQ ID NO: 3633861 - RNA, 18 nt, Human
cuugccccaacccuucuu

SEQ ID NO: 3633862 - RNA, 13 nt, Human
cuugccccccacc

SEQ ID NO: 3633863 - RNA, 16 nt, Human
cuugccccccacccca

SEQ ID NO: 3633864 - RNA, 21 nt, Human
cuugccccccuggccuccccc

SEQ ID NO: 3633865 - RNA, 17 nt, Human
cuugcccgcucaggcug

SEQ ID NO: 3633866 - RNA, 18 nt, Human
cuugcccggauucuggga

SEQ ID NO: 3633867 - RNA, 16 nt, Human
cuugcccuaagcagaa

SEQ ID NO: 3633868 - RNA, 17 nt, Human
cuugcccugaccuccca

SEQ ID NO: 3633869 - RNA, 12 nt, Human
cuugcccugcuc

SEQ ID NO: 3633870 - RNA, 15 nt, Human
cuugcccugcucccu

SEQ ID NO: 3633871 - RNA, 18 nt, Human
cuugcccuggugccucac

SEQ ID NO: 3633872 - RNA, 22 nt, Human
cuugcccuguuaaaagaugaaa

SEQ ID NO: 3633873 - RNA, 14 nt, Human
cuugcccuucccug

SEQ ID NO: 3633874 - RNA, 16 nt, Human
cuugcccuucccuguc

SEQ ID NO: 3633875 - RNA, 17 nt, Human
cuugcccuugcccugac

SEQ ID NO: 3633876 - RNA, 20 nt, Human
cuugccgaaacuggaaguua

SEQ ID NO: 3633877 - RNA, 23 nt, Human
cuugccgaaccaggagcugcuca

SEQ ID NO: 3633878 - RNA, 15 nt, Human
cuugccgaggagcca

SEQ ID NO: 3633879 - RNA, 20 nt, Human
cuugccgaggagccaggcaa

SEQ ID NO: 3633880 - RNA, 21 nt, Human
cuugccuaaauuuaaugcugc

SEQ ID NO: 3633881 - RNA, 22 nt, Human
cuugccuaaauuuaaugcugcc

SEQ ID NO: 3633882 - RNA, 23 nt, Human
cuugccuaaauuuaaugcugccu

SEQ ID NO: 3633883 - RNA, 15 nt, Human
cuugccucaaugcca

SEQ ID NO: 3633884 - RNA, 23 nt, Human
cuugccucauuuuuuuccuugca

SEQ ID NO: 3633885 - RNA, 20 nt, Human
cuugccuccccauuucccau

SEQ ID NO: 3633886 - RNA, 17 nt, Human
cuugccucggcuccugc

SEQ ID NO: 3633887 - RNA, 19 nt, Human
cuugccucuguccccuucu

SEQ ID NO: 3633888 - RNA, 13 nt, Human
cuugccucuuccu

SEQ ID NO: 3633889 - RNA, 18 nt, Human
cuugccucuuccuugaag

SEQ ID NO: 3633890 - RNA, 21 nt, Human
cuugccucuuuuaccugcugc

SEQ ID NO: 3633891 - RNA, 17 nt, Human
cuugccugaacauccuu

SEQ ID NO: 3633892 - RNA, 14 nt, Human
cuugccugcagggc

SEQ ID NO: 3633893 - RNA, 16 nt, Human
cuugccugcagggcca

SEQ ID NO: 3633894 - RNA, 20 nt, Human
cuugccugcagggccauggc

SEQ ID NO: 3633895 - RNA, 13 nt, Human
cuugccugccuuu

SEQ ID NO: 3633896 - RNA, 10 nt, Human
cuugccuggg

SEQ ID NO: 3633897 - RNA, 16 nt, Human
cuugccugggucacac

SEQ ID NO: 3633898 - RNA, 15 nt, Human
cuugccugugccagg

SEQ ID NO: 3633899 - RNA, 16 nt, Human
cuugccugugccaggu

SEQ ID NO: 3633900 - RNA, 22 nt, Human
cuugccuguuucccaggcccac

SEQ ID NO: 3633901 - RNA, 23 nt, Human
cuugccuuaaacacucaccuucu

SEQ ID NO: 3633902 - RNA, 23 nt, Human
cuugccuuccuaagccuguggcu

SEQ ID NO: 3633903 - RNA, 20 nt, Human
cuugccuucuucacccagcu

SEQ ID NO: 3633904 - RNA, 20 nt, Human
cuugccuuucgaggccugaa

SEQ ID NO: 3633905 - RNA, 20 nt, Human
cuugccuuuuucauuauuuu

SEQ ID NO: 3633906 - RNA, 23 nt, Human
cuugccuuuuucauuauuuuauu

SEQ ID NO: 3633907 - RNA, 19 nt, Human
cuugcgaacuagagaugug

SEQ ID NO: 3633908 - RNA, 22 nt, Human
cuugcgguauccgcccccaaua

SEQ ID NO: 3633909 - RNA, 17 nt, Human
cuugcuaaucagugucu

SEQ ID NO: 3633910 - RNA, 19 nt, Human
gaaaacguggcugcuucaa

SEQ ID NO: 3633911 - RNA, 17 nt, Human
gaaaacguuuuguuuga

SEQ ID NO: 3633912 - RNA, 20 nt, Human
gaaaacuacauuuuaacaug

SEQ ID NO: 3633913 - RNA, 13 nt, Human
gaaaacuauacaa

SEQ ID NO: 3633914 - RNA, 17 nt, Human
gaaaacucauuacuuuu

SEQ ID NO: 3633915 - RNA, 20 nt, Human
gaaaacuccuuuagcaggug

SEQ ID NO: 3633916 - RNA, 18 nt, Human
gaaaacugaaaaucuaau

SEQ ID NO: 3633917 - RNA, 15 nt, Human
gaaaacugugauuuc

SEQ ID NO: 3633918 - RNA, 12 nt, Human
gaaaacuguguu

SEQ ID NO: 3633919 - RNA, 13 nt, Human
gaaaacuguguug

SEQ ID NO: 3633920 - RNA, 19 nt, Human
gaaaacuguguugccacag

SEQ ID NO: 3633921 - RNA, 23 nt, Human
gaaaacuguuaccuaaaguauuu

SEQ ID NO: 3633922 - RNA, 16 nt, Human
gaaaacuuauuugagu

SEQ ID NO: 3633923 - RNA, 16 nt, Human
gaaaacuucuuuuaaa

SEQ ID NO: 3633924 - RNA, 20 nt, Human
gaaaacuuuaaaaaauauuu

SEQ ID NO: 3633925 - RNA, 22 nt, Human
gaaaacuuuaaaaaauauuuau

SEQ ID NO: 3633926 - RNA, 21 nt, Human
gaaaacuuuaugcuaagugaa

SEQ ID NO: 3633927 - RNA, 11 nt, Human
gaaaacuuugu

SEQ ID NO: 3633928 - RNA, 16 nt, Human
gaaaacuuuguuaggc

SEQ ID NO: 3633929 - RNA, 23 nt, Human
gaaaagaaaaaaaaaagaagaag

SEQ ID NO: 3633930 - RNA, 15 nt, Human
gaaaagaaaacaaaa

SEQ ID NO: 3633931 - RNA, 16 nt, Human
gaaaagaaaacaaaaa

SEQ ID NO: 3633932 - RNA, 15 nt, Human
gaaaagaaagaaguu

SEQ ID NO: 3633933 - RNA, 15 nt, Human
gaaaagaaauaauaa

SEQ ID NO: 3633934 - RNA, 13 nt, Human
gaaaagaaaucua

SEQ ID NO: 3633935 - RNA, 23 nt, Human
gaaaagaaaucuauagaaagugu

SEQ ID NO: 3633936 - RNA, 24 nt, Human
gaaaagaaaucuauagaaaguguu

SEQ ID NO: 3633937 - RNA, 19 nt, Human
gaaaagaacguauuuuaaa

SEQ ID NO: 3633938 - RNA, 19 nt, Human
gaaaagaacuguuuacugc

SEQ ID NO: 3633939 - RNA, 15 nt, Human
gaaaagaaggaaaga

SEQ ID NO: 3633940 - RNA, 14 nt, Human
gaaaagaauuuuuu

SEQ ID NO: 3633941 - RNA, 21 nt, Human
gaaaagacacauuuuuuagga

SEQ ID NO: 3633942 - RNA, 17 nt, Human
gaaaagacuaagaucgg

SEQ ID NO: 3633943 - RNA, 18 nt, Human
gaaaagacuuguaauauu

SEQ ID NO: 3633944 - RNA, 21 nt, Human
gaaaagagauauuuuaaaaug

SEQ ID NO: 3633945 - RNA, 14 nt, Human
gaaaagauguagau

SEQ ID NO: 3633946 - RNA, 17 nt, Human
gaaaagauguagauuua

SEQ ID NO: 3633947 - RNA, 18 nt, Human
gaaaagauguagauuuau

SEQ ID NO: 3633948 - RNA, 15 nt, Human
gaaaagauucuucug

SEQ ID NO: 3633949 - RNA, 20 nt, Human
gaaaagcaacauucauaguc

SEQ ID NO: 3633950 - RNA, 14 nt, Human
gaaaagcaccugcc

SEQ ID NO: 3633951 - RNA, 19 nt, Human
gaaaagcauacaugcaaaa

SEQ ID NO: 3633952 - RNA, 17 nt, Human
gaaaagccauguuuaag

SEQ ID NO: 3633953 - RNA, 20 nt, Human
gaaaagccauguuuaagauu

SEQ ID NO: 3633954 - RNA, 15 nt, Human
gaaaagccucugugu

SEQ ID NO: 3633955 - RNA, 24 nt, Human
gaaaagcuaguguaccuccucuca

SEQ ID NO: 3633956 - RNA, 20 nt, Human
gaaaagcuauuagccaggau

SEQ ID NO: 3633957 - RNA, 22 nt, Human
gaaaagcuauuagccaggauca

SEQ ID NO: 3633958 - RNA, 17 nt, Human
gaaaagcugcugacagu

SEQ ID NO: 3633959 - RNA, 15 nt, Human
gaaaaggaagacuag

SEQ ID NO: 3633960 - RNA, 20 nt, Human
gaaaaggaagacuagaggcu

SEQ ID NO: 3633961 - RNA, 19 nt, Human
gaaaaggaagguaguucaa

SEQ ID NO: 3633962 - RNA, 12 nt, Human
gaaaaggaauca

SEQ ID NO: 3633963 - RNA, 12 nt, Human
gaaaaggcaaaa

SEQ ID NO: 3633964 - RNA, 16 nt, Human
gaaaaggccuggggug

SEQ ID NO: 3633965 - RNA, 22 nt, Human
gaaaagggaguuuaaaaauggu

SEQ ID NO: 3633966 - RNA, 18 nt, Human
gaaaaggugauaaaauca

SEQ ID NO: 3633967 - RNA, 19 nt, Human
gaaaaggugauaaaaucau

SEQ ID NO: 3633968 - RNA, 16 nt, Human
gaaaagguugaauaau

SEQ ID NO: 3633969 - RNA, 16 nt, Human
gaaaaguacauuuaau

SEQ ID NO: 3633970 - RNA, 14 nt, Human
gaaaaguauguuag

SEQ ID NO: 3633971 - RNA, 19 nt, Human
gaaaaguauguucuaaccu

SEQ ID NO: 3633972 - RNA, 12 nt, Human
gaaaaguauuuu

SEQ ID NO: 3633973 - RNA, 18 nt, Human
gaaaaguauuuugaaguu

SEQ ID NO: 3633974 - RNA, 23 nt, Human
gaaaaguauuuugaaguuuacau

SEQ ID NO: 3633975 - RNA, 18 nt, Human
gaaaagucacuuacuauu

SEQ ID NO: 3633976 - RNA, 16 nt, Human
gaaaagugaaugcuca

SEQ ID NO: 3633977 - RNA, 23 nt, Human
gaaaaguggcgugggagccagcc

SEQ ID NO: 3633978 - RNA, 10 nt, Human
gaaaaguuau

SEQ ID NO: 3633979 - RNA, 15 nt, Human
gaaaaguugaauuuu

SEQ ID NO: 3633980 - RNA, 15 nt, Human
gaaaaguuuaauauu

SEQ ID NO: 3633981 - RNA, 21 nt, Human
gaaaaguuuaauauuaaagcc

SEQ ID NO: 3633982 - RNA, 13 nt, Human
gaaaaguuuauaa

SEQ ID NO: 3633983 - RNA, 19 nt, Human
gaaaaguuuuguaaauuuc

SEQ ID NO: 3633984 - RNA, 11 nt, Human
gaaaauaaaaa

SEQ ID NO: 3633985 - RNA, 16 nt, Human
gaaaauaaaaaaaaga

SEQ ID NO: 3633986 - RNA, 21 nt, Human
gaaaauaaaaaaaagaaaaaa

SEQ ID NO: 3633987 - RNA, 22 nt, Human
gaaaauaaaaaaaagaaaaaag

SEQ ID NO: 3633988 - RNA, 12 nt, Human
gaaaauaaaaag

SEQ ID NO: 3633989 - RNA, 13 nt, Human
gaaaauaaaauua

SEQ ID NO: 3633990 - RNA, 13 nt, Human
gaaaauaaagaau

SEQ ID NO: 3633991 - RNA, 15 nt, Human
gaaaauaaagaaugg

SEQ ID NO: 3633992 - RNA, 16 nt, Human
gaaaauaaagaaugga

SEQ ID NO: 3633993 - RNA, 20 nt, Human
gaaaauaaagacaaccauau

SEQ ID NO: 3633994 - RNA, 22 nt, Human
gaaaauaaagacaaccauauuu

SEQ ID NO: 3633995 - RNA, 23 nt, Human
gaaaauaaagacaaccauauuua

SEQ ID NO: 3633996 - RNA, 23 nt, Human
gaaaauaaaucaaugcuauaacu

SEQ ID NO: 3633997 - RNA, 19 nt, Human
gaaaauaacaauaaaagac

SEQ ID NO: 3633998 - RNA, 13 nt, Human
gaaaauaacugaa

SEQ ID NO: 3633999 - RNA, 21 nt, Human
gaaaauaaggcacccaucugu

SEQ ID NO: 3634000 - RNA, 19 nt, Human
gaaaauaauguaauuguaa

SEQ ID NO: 3634001 - RNA, 13 nt, Human
gaaaauaauuguu

SEQ ID NO: 3634002 - RNA, 17 nt, Human
gaaaauaauuguuccaa

SEQ ID NO: 3634003 - RNA, 13 nt, Human
gaaaauacaauaa

SEQ ID NO: 3634004 - RNA, 15 nt, Human
gaaaauacaauaaac

SEQ ID NO: 3634005 - RNA, 16 nt, Human
gaaaauacaauaaacu

SEQ ID NO: 3634006 - RNA, 19 nt, Human
gaaaauaggcaggaagccc

SEQ ID NO: 3634007 - RNA, 13 nt, Human
gaaaauaguuuau

SEQ ID NO: 3634008 - RNA, 20 nt, Human
gaaaauaguuuauuuuaaaa

SEQ ID NO: 3634009 - RNA, 12 nt, Human
gaaaauauacug

SEQ ID NO: 3634010 - RNA, 14 nt, Human
gaaaauauacugua

SEQ ID NO: 3634011 - RNA, 15 nt, Human
gaaaauauacuguaa

SEQ ID NO: 3634012 - RNA, 18 nt, Human
gaaaauauacuguaaaga

SEQ ID NO: 3634013 - RNA, 20 nt, Human
gaaaauauacuguaaagaaa

SEQ ID NO: 3634014 - RNA, 21 nt, Human
gaaaauauacuguaaagaaag

SEQ ID NO: 3634015 - RNA, 23 nt, Human
gaaaauauacuguaaagaaagag

SEQ ID NO: 3634016 - RNA, 15 nt, Human
gaaaauauauguauu

SEQ ID NO: 3634017 - RNA, 17 nt, Human
gaaaauauauguauuuu

SEQ ID NO: 3634018 - RNA, 20 nt, Human
gaaaauauauguauuuuuau

SEQ ID NO: 3634019 - RNA, 12 nt, Human
gaaaauaucacu

SEQ ID NO: 3634020 - RNA, 15 nt, Human
gaaaauaugcaucua

SEQ ID NO: 3634021 - RNA, 19 nt, Human
gaaaauauguauuaacacu

SEQ ID NO: 3634022 - RNA, 23 nt, Human
gaaaauauguccauaucuaacca

SEQ ID NO: 3634023 - RNA, 21 nt, Human
gaaaauauuaucuuuguaauu

SEQ ID NO: 3634024 - RNA, 19 nt, Human
gaaaauauucucuauuuga

SEQ ID NO: 3634025 - RNA, 15 nt, Human
gaaaauauuguuuua

SEQ ID NO: 3634026 - RNA, 18 nt, Human
gaaaauauuuugucuaaa

SEQ ID NO: 3634027 - RNA, 20 nt, Human
gaaaauauuuugucuaaaau

SEQ ID NO: 3634028 - RNA, 19 nt, Human
gaaaaucaaauacauacuu

SEQ ID NO: 3634029 - RNA, 22 nt, Human
gaaaaucagccugcuccagcug

SEQ ID NO: 3634030 - RNA, 13 nt, Human
gaaaauccuacca

SEQ ID NO: 3634031 - RNA, 15 nt, Human
gaaaauccucuggcu

SEQ ID NO: 3634032 - RNA, 14 nt, Human
gaaaaucuaauauu

SEQ ID NO: 3634033 - RNA, 23 nt, Human
gaaaaucuaauauuaaaaauaug

SEQ ID NO: 3634034 - RNA, 21 nt, Human
gaaaaucuagaggaaaagaaa

SEQ ID NO: 3634035 - RNA, 22 nt, Human
gaaaaucuagaggaaaagaaag

SEQ ID NO: 3634036 - RNA, 17 nt, Human
gaaaaucugaauuggaa

SEQ ID NO: 3634037 - RNA, 19 nt, Human
gaaaaucuuauaauuuaaa

SEQ ID NO: 3634038 - RNA, 14 nt, Human
gaaaaugaaaugca

SEQ ID NO: 3634039 - RNA, 17 nt, Human
gaaaaugaaaugcauau

SEQ ID NO: 3634040 - RNA, 18 nt, Human
gaaaaugaaaugcauauu

SEQ ID NO: 3634041 - RNA, 22 nt, Human
gaaaaugcagcagggaugcccu

SEQ ID NO: 3634042 - RNA, 21 nt, Human
gaaaaugcauuguaucgaugu

SEQ ID NO: 3634043 - RNA, 11 nt, Human
gaaaaugcuga

SEQ ID NO: 3634044 - RNA, 19 nt, Human
gaaaauggaaguggcaaua

SEQ ID NO: 3634045 - RNA, 23 nt, Human
gaaaaugguccaauuaguuuccu

SEQ ID NO: 3634046 - RNA, 18 nt, Human
gaaaauguaagcuguuua

SEQ ID NO: 3634047 - RNA, 19 nt, Human
gaaaauguacugagauuuu

SEQ ID NO: 3634048 - RNA, 15 nt, Human
gaaaauguccaggaa

SEQ ID NO: 3634049 - RNA, 17 nt, Human
gaaaauguccuugugau

SEQ ID NO: 3634050 - RNA, 19 nt, Human
gaaaauguguccuaucuau

SEQ ID NO: 3634051 - RNA, 12 nt, Human
gaaaaugugugu

SEQ ID NO: 3634052 - RNA, 15 nt, Human
gaaaauguuauuuaa

SEQ ID NO: 3634053 - RNA, 16 nt, Human
gaaaauguuauuuaac

SEQ ID NO: 3634054 - RNA, 16 nt, Human
gaaagugccuuucagg

SEQ ID NO: 3634055 - RNA, 16 nt, Human
gaaaguggugcucagu

SEQ ID NO: 3634056 - RNA, 11 nt, Human
gaaaguguauu

SEQ ID NO: 3634057 - RNA, 23 nt, Human
gaaaguguuauuuuucaaggaag

SEQ ID NO: 3634058 - RNA, 14 nt, Human
gaaaguguucuguu

SEQ ID NO: 3634059 - RNA, 16 nt, Human
gaaaguguucuguuac

SEQ ID NO: 3634060 - RNA, 17 nt, Human
gaaaguuacaaauugcu

SEQ ID NO: 3634061 - RNA, 17 nt, Human
gaaaguuccuuauguau

SEQ ID NO: 3634062 - RNA, 18 nt, Human
gaaaguuguacaugaaau

SEQ ID NO: 3634063 - RNA, 20 nt, Human
gaaaguuuacccaugaagau

SEQ ID NO: 3634064 - RNA, 11 nt, Human
gaaaguuuccc

SEQ ID NO: 3634065 - RNA, 20 nt, Human
gaaaguuuccccaccaguga

SEQ ID NO: 3634066 - RNA, 18 nt, Human
gaaaguuuuguaaaagaa

SEQ ID NO: 3634067 - RNA, 20 nt, Human
gaaaguuuuguaaaagaaau

SEQ ID NO: 3634068 - RNA, 18 nt, Human
gaaaguuuuuuuuuauua

SEQ ID NO: 3634069 - RNA, 15 nt, Human
gaaauaaaaccuuuc

SEQ ID NO: 3634070 - RNA, 16 nt, Human
gaaauaaaaggaagcc

SEQ ID NO: 3634071 - RNA, 17 nt, Human
gaaauaaaaggaagcca

SEQ ID NO: 3634072 - RNA, 19 nt, Human
gaaauaaaccaaaggaaaa

SEQ ID NO: 3634073 - RNA, 16 nt, Human
gaaauaaacgucuuaa

SEQ ID NO: 3634074 - RNA, 17 nt, Human
gaaauaaacuucacuga

SEQ ID NO: 3634075 - RNA, 17 nt, Human
gaaauaaauagcuauau

SEQ ID NO: 3634076 - RNA, 12 nt, Human
gaaauaaaugua

SEQ ID NO: 3634077 - RNA, 15 nt, Human
gaaauaacaaaaugg

SEQ ID NO: 3634078 - RNA, 18 nt, Human
gaaauaacaaaauggaca

SEQ ID NO: 3634079 - RNA, 19 nt, Human
gaaauaacaaaauggacau

SEQ ID NO: 3634080 - RNA, 18 nt, Human
gaaauaacaagucgauga

SEQ ID NO: 3634081 - RNA, 15 nt, Human
gaaauaacaauguua

SEQ ID NO: 3634082 - RNA, 20 nt, Human
gaaauaacagaagaaaauag

SEQ ID NO: 3634083 - RNA, 14 nt, Human
gaaauaagaaaaau

SEQ ID NO: 3634084 - RNA, 21 nt, Human
gaaauaaguuuuuguuucaca

SEQ ID NO: 3634085 - RNA, 15 nt, Human
gaaauaauaaaaaau

SEQ ID NO: 3634086 - RNA, 16 nt, Human
gaaauaauaauaucca

SEQ ID NO: 3634087 - RNA, 13 nt, Human
gaaauaauaugca

SEQ ID NO: 3634088 - RNA, 15 nt, Human
gaaauaauaugcauu

SEQ ID NO: 3634089 - RNA, 19 nt, Human
gaaauaauguacaucuggc

SEQ ID NO: 3634090 - RNA, 22 nt, Human
gaaauaauguguaguucaugua

SEQ ID NO: 3634091 - RNA, 13 nt, Human
gaaauaauuguug

SEQ ID NO: 3634092 - RNA, 21 nt, Human
gaaauaauuguuguucuguua

SEQ ID NO: 3634093 - RNA, 22 nt, Human
gaaauaauuguuguucuguuaa

SEQ ID NO: 3634094 - RNA, 13 nt, Human
gaaauacaaaaau

SEQ ID NO: 3634095 - RNA, 18 nt, Human
gaaauacacaaguaaaca

SEQ ID NO: 3634096 - RNA, 17 nt, Human
gaaauacagauuuugau

SEQ ID NO: 3634097 - RNA, 19 nt, Human
gaaauacaguucugcucug

SEQ ID NO: 3634098 - RNA, 22 nt, Human
gaaauacccuucuuuuaugagc

SEQ ID NO: 3634099 - RNA, 12 nt, Human
gaaauaccucau

SEQ ID NO: 3634100 - RNA, 19 nt, Human
gaaauacgccagaacugcu

SEQ ID NO: 3634101 - RNA, 16 nt, Human
gaaauacuacuuacca

SEQ ID NO: 3634102 - RNA, 15 nt, Human
gaaauacuauuuaaa

SEQ ID NO: 3634103 - RNA, 21 nt, Human
gaaauacuguaugguuuuguu

SEQ ID NO: 3634104 - RNA, 16 nt, Human
gaaauagaauuauaac

SEQ ID NO: 3634105 - RNA, 21 nt, Human
gaaauagacaaaaaguauauu

SEQ ID NO: 3634106 - RNA, 18 nt, Human
gaaauagacaguauauuu

SEQ ID NO: 3634107 - RNA, 15 nt, Human
gaaauagucugugug

SEQ ID NO: 3634108 - RNA, 17 nt, Human
gaaauauaacacauuuu

SEQ ID NO: 3634109 - RNA, 18 nt, Human
gaaauauaacacauuuuu

SEQ ID NO: 3634110 - RNA, 15 nt, Human
gaaauauacacacag

SEQ ID NO: 3634111 - RNA, 17 nt, Human
gaaauauaggaacuuaa

SEQ ID NO: 3634112 - RNA, 16 nt, Human
gaaauauauacgaaca

SEQ ID NO: 3634113 - RNA, 18 nt, Human
gaaauauauacgaacaaa

SEQ ID NO: 3634114 - RNA, 19 nt, Human
gaaauauauacgaacaaaa

SEQ ID NO: 3634115 - RNA, 16 nt, Human
gaaauauauauacaua

SEQ ID NO: 3634116 - RNA, 14 nt, Human
gaaauauauaugug

SEQ ID NO: 3634117 - RNA, 22 nt, Human
gaaauauauauuauacuuguaa

SEQ ID NO: 3634118 - RNA, 22 nt, Human
gaaauaucaguuacucagcccu

SEQ ID NO: 3634119 - RNA, 19 nt, Human
gaaauaucugaaaauguau

SEQ ID NO: 3634120 - RNA, 15 nt, Human
gaaauaucugugaaa

SEQ ID NO: 3634121 - RNA, 19 nt, Human
gaaauaucuucacuuguca

SEQ ID NO: 3634122 - RNA, 14 nt, Human
gaaauaugauuuua

SEQ ID NO: 3634123 - RNA, 15 nt, Human
gaaauaugauuuuau

SEQ ID NO: 3634124 - RNA, 22 nt, Human
gaaauaugauuuuauuugacaa

SEQ ID NO: 3634125 - RNA, 18 nt, Human
gaaauaugcacaauagca

SEQ ID NO: 3634126 - RNA, 13 nt, Human
gaaauaugcaucu

SEQ ID NO: 3634127 - RNA, 16 nt, Human
gaaauauguauucugu

SEQ ID NO: 3634128 - RNA, 20 nt, Human
gaaauauguauucuguaaaa

SEQ ID NO: 3634129 - RNA, 14 nt, Human
gaaauaugugagau

SEQ ID NO: 3634130 - RNA, 15 nt, Human
gaaauauuaaaagaa

SEQ ID NO: 3634131 - RNA, 16 nt, Human
gaaauauuaugcaaau

SEQ ID NO: 3634132 - RNA, 17 nt, Human
gaaauauuaugcaaauu

SEQ ID NO: 3634133 - RNA, 21 nt, Human
gaaauauuaugcaaauuccca

SEQ ID NO: 3634134 - RNA, 16 nt, Human
gaaauauugcuggggu

SEQ ID NO: 3634135 - RNA, 14 nt, Human
gaaauauugcugua

SEQ ID NO: 3634136 - RNA, 18 nt, Human
gaaauauugcuguauagc

SEQ ID NO: 3634137 - RNA, 13 nt, Human
gaaauauuuuaaa

SEQ ID NO: 3634138 - RNA, 13 nt, Human
gaaauauuuuaau

SEQ ID NO: 3634139 - RNA, 23 nt, Human
gaaauauuuuaauuuuuaaaugc

SEQ ID NO: 3634140 - RNA, 21 nt, Human
gaaauauuuuuuaauuuaaag

SEQ ID NO: 3634141 - RNA, 21 nt, Human
gaaaucaaauaugcaaagcac

SEQ ID NO: 3634142 - RNA, 15 nt, Human
gaaaucaacuugcuu

SEQ ID NO: 3634143 - RNA, 16 nt, Human
gaaaucaaugcaagag

SEQ ID NO: 3634144 - RNA, 15 nt, Human
gaaaucacagaauca

SEQ ID NO: 3634145 - RNA, 19 nt, Human
gaaaucaccgaaaacgugg

SEQ ID NO: 3634146 - RNA, 15 nt, Human
gaaaucagccaaguu

SEQ ID NO: 3634147 - RNA, 18 nt, Human
gaaaucaguaauauuuau

SEQ ID NO: 3634148 - RNA, 16 nt, Human
gaaaucauauuuggaa

SEQ ID NO: 3634149 - RNA, 18 nt, Human
gaaaucaucgaaaauuca

SEQ ID NO: 3634150 - RNA, 14 nt, Human
gaaauccaaucaga

SEQ ID NO: 3634151 - RNA, 13 nt, Human
gaaauccagggug

SEQ ID NO: 3634152 - RNA, 17 nt, Human
gaaauccauccagaggc

SEQ ID NO: 3634153 - RNA, 18 nt, Human
gaaaucccccuuucucua

SEQ ID NO: 3634154 - RNA, 19 nt, Human
gaaaucccugcucacugca

SEQ ID NO: 3634155 - RNA, 15 nt, Human
gaaaucccuucauac

SEQ ID NO: 3634156 - RNA, 20 nt, Human
gaaaucccuucauacuugaa

SEQ ID NO: 3634157 - RNA, 20 nt, Human
gaaauccuaguuuccucucc

SEQ ID NO: 3634158 - RNA, 21 nt, Human
gaaaucuaguuauuuacagga

SEQ ID NO: 3634159 - RNA, 18 nt, Human
gaaaucuaugauuccagg

SEQ ID NO: 3634160 - RNA, 18 nt, Human
gaaaucucccaugugcau

SEQ ID NO: 3634161 - RNA, 14 nt, Human
gaaaucugaacauu

SEQ ID NO: 3634162 - RNA, 23 nt, Human
gaaaucugaggaauggacauuuc

SEQ ID NO: 3634163 - RNA, 20 nt, Human
gaaaucuggcuucuggccag

SEQ ID NO: 3634164 - RNA, 22 nt, Human
gaaaucuggcuucuggccagga

SEQ ID NO: 3634165 - RNA, 20 nt, Human
gaaaucugugccugagaaca

SEQ ID NO: 3634166 - RNA, 23 nt, Human
gaaaugaaaacaguguguaaaca

SEQ ID NO: 3634167 - RNA, 13 nt, Human
gaaaugaaagaaa

SEQ ID NO: 3634168 - RNA, 18 nt, Human
gaaaugaaagcagggacu

SEQ ID NO: 3634169 - RNA, 17 nt, Human
gaaaugaaauuuaaaca

SEQ ID NO: 3634170 - RNA, 19 nt, Human
gaaaugaaauuuaaacauu

SEQ ID NO: 3634171 - RNA, 15 nt, Human
gaaaugaacacaaau

SEQ ID NO: 3634172 - RNA, 17 nt, Human
gaaaugaacacaaauua

SEQ ID NO: 3634173 - RNA, 13 nt, Human
gaaaugaagagcu

SEQ ID NO: 3634174 - RNA, 13 nt, Human
gaaaugaauaauu

SEQ ID NO: 3634175 - RNA, 19 nt, Human
gaaaugaauaauuucccaa

SEQ ID NO: 3634176 - RNA, 20 nt, Human
gaaaugaaugugugugguuu

SEQ ID NO: 3634177 - RNA, 14 nt, Human
gaaaugaccaauau

SEQ ID NO: 3634178 - RNA, 13 nt, Human
gaaaugacuaauu

SEQ ID NO: 3634179 - RNA, 20 nt, Human
gaaaugagaggcauuucccc

SEQ ID NO: 3634180 - RNA, 11 nt, Human
gaaaugagcug

SEQ ID NO: 3634181 - RNA, 16 nt, Human
gaaaugaggucuguuu

SEQ ID NO: 3634182 - RNA, 21 nt, Human
gaaaugaggucuguuuaaagu

SEQ ID NO: 3634183 - RNA, 17 nt, Human
gaaaugauagauuugac

SEQ ID NO: 3634184 - RNA, 21 nt, Human
gaaaugauagauuugaccucc

SEQ ID NO: 3634185 - RNA, 11 nt, Human
gaaaugauguu

SEQ ID NO: 3634186 - RNA, 14 nt, Human
gaaaugcaaaaauc

SEQ ID NO: 3634187 - RNA, 17 nt, Human
gaaaugcaaaaaucucu

SEQ ID NO: 3634188 - RNA, 17 nt, Human
gaaaugcacaaugucuu

SEQ ID NO: 3634189 - RNA, 22 nt, Human
gaaaugcauugcucuggaucug

SEQ ID NO: 3634190 - RNA, 17 nt, Human
gaaaugccuaagaagau

SEQ ID NO: 3634191 - RNA, 21 nt, Human
gaaaugccuuacuuuguauga

SEQ ID NO: 3634192 - RNA, 22 nt, Human
gaaaugcuaugucauuucaugu

SEQ ID NO: 3634193 - RNA, 14 nt, Human
gaaaugcugaaaau

SEQ ID NO: 3634194 - RNA, 22 nt, Human
gaaaugcugauuuaaacuucuu

SEQ ID NO: 3634195 - RNA, 14 nt, Human
gaaaugcugccugc

SEQ ID NO: 3634196 - RNA, 13 nt, Human
gaaaugcugcugg

SEQ ID NO: 3634197 - RNA, 23 nt, Human
gaaaugcugguuuuucaguuuuc

SEQ ID NO: 3634198 - RNA, 22 nt, Human
gaaaugcuuguggauugagggu

SEQ ID NO: 3634199 - RNA, 15 nt, Human
gaauugauaauaaac

SEQ ID NO: 3634200 - RNA, 23 nt, Human
gaauugauaauaaacuguccucu

SEQ ID NO: 3634201 - RNA, 14 nt, Human
gaauugauuugcau

SEQ ID NO: 3634202 - RNA, 17 nt, Human
gaauugauuugcauuga

SEQ ID NO: 3634203 - RNA, 16 nt, Human
gaauugcaauuuuaac

SEQ ID NO: 3634204 - RNA, 20 nt, Human
gaauugcccauuguuuuucu

SEQ ID NO: 3634205 - RNA, 21 nt, Human
gaauugcccauuguuuuucug

SEQ ID NO: 3634206 - RNA, 21 nt, Human
gaauugccugcagagagaagc

SEQ ID NO: 3634207 - RNA, 15 nt, Human
gaauugcguuggucu

SEQ ID NO: 3634208 - RNA, 17 nt, Human
gaauugcuugaaccugg

SEQ ID NO: 3634209 - RNA, 16 nt, Human
gaauugggagcuuggg

SEQ ID NO: 3634210 - RNA, 22 nt, Human
gaauuggguggggggcuucaua

SEQ ID NO: 3634211 - RNA, 16 nt, Human
gaauuguaacuguucu

SEQ ID NO: 3634212 - RNA, 15 nt, Human
gaauuguaaggaaug

SEQ ID NO: 3634213 - RNA, 18 nt, Human
gaauugugaccaaguuau

SEQ ID NO: 3634214 - RNA, 12 nt, Human
gaauuguggcua

SEQ ID NO: 3634215 - RNA, 16 nt, Human
gaauugugugauguuu

SEQ ID NO: 3634216 - RNA, 12 nt, Human
gaauuguuacau

SEQ ID NO: 3634217 - RNA, 14 nt, Human
gaauuuaaauauaa

SEQ ID NO: 3634218 - RNA, 16 nt, Human
gaauuuacuuccuugc

SEQ ID NO: 3634219 - RNA, 21 nt, Human
gaauuuagggagaaauguugu

SEQ ID NO: 3634220 - RNA, 19 nt, Human
gaauuuagguuuuuauuag

SEQ ID NO: 3634221 - RNA, 16 nt, Human
gaauuuauaauucagu

SEQ ID NO: 3634222 - RNA, 23 nt, Human
gaauuuauaccuaccuguguggu

SEQ ID NO: 3634223 - RNA, 22 nt, Human
gaauuuaucacacuucugugag

SEQ ID NO: 3634224 - RNA, 19 nt, Human
gaauuuauugcacauuguu

SEQ ID NO: 3634225 - RNA, 14 nt, Human
gaauuuauuggcuu

SEQ ID NO: 3634226 - RNA, 21 nt, Human
gaauuuauuuuuaagaaagaa

SEQ ID NO: 3634227 - RNA, 12 nt, Human
gaauuucacaag

SEQ ID NO: 3634228 - RNA, 16 nt, Human
gaauuucccaaagcag

SEQ ID NO: 3634229 - RNA, 12 nt, Human
gaauuucuaaaa

SEQ ID NO: 3634230 - RNA, 19 nt, Human
gaauuucuaggacugaauu

SEQ ID NO: 3634231 - RNA, 19 nt, Human
gaauuucuaucuaaaugau

SEQ ID NO: 3634232 - RNA, 19 nt, Human
gaauuucugugcccuccug

SEQ ID NO: 3634233 - RNA, 14 nt, Human
gaauuucuuaacuu

SEQ ID NO: 3634234 - RNA, 16 nt, Human
gaauuucuuaacuucu

SEQ ID NO: 3634235 - RNA, 19 nt, Human
gaauuugaaugaaaaauuu

SEQ ID NO: 3634236 - RNA, 23 nt, Human
gaauuugaucguuccaguuccca

SEQ ID NO: 3634237 - RNA, 11 nt, Human
gaauuugcaaa

SEQ ID NO: 3634238 - RNA, 19 nt, Human
gaauuugcaagucauggcu

SEQ ID NO: 3634239 - RNA, 20 nt, Human
gaauuugccugcugggauuc

SEQ ID NO: 3634240 - RNA, 13 nt, Human
gaauuugcugggg

SEQ ID NO: 3634241 - RNA, 19 nt, Human
gaauuugggacccugcuuu

SEQ ID NO: 3634242 - RNA, 18 nt, Human
gaauuuguaaccucagcu

SEQ ID NO: 3634243 - RNA, 14 nt, Human
gaauuuguaaguuu

SEQ ID NO: 3634244 - RNA, 15 nt, Human
gaauuuuaaaaauga

SEQ ID NO: 3634245 - RNA, 16 nt, Human
gaauuuuagcuuuugu

SEQ ID NO: 3634246 - RNA, 18 nt, Human
gaauuuuauacuuucccu

SEQ ID NO: 3634247 - RNA, 20 nt, Human
gaauuuuauacuuucccuac

SEQ ID NO: 3634248 - RNA, 21 nt, Human
gaauuuuauacuuucccuacc

SEQ ID NO: 3634249 - RNA, 18 nt, Human
gaauuuuauugacacagu

SEQ ID NO: 3634250 - RNA, 21 nt, Human
gaauuuuauuuuuugggaaaa

SEQ ID NO: 3634251 - RNA, 17 nt, Human
gaauuuucaagcaucuc

SEQ ID NO: 3634252 - RNA, 23 nt, Human
gaauuuucuuuguguagcuuugc

SEQ ID NO: 3634253 - RNA, 22 nt, Human
gaauuuucuuuuuaauaaaaag

SEQ ID NO: 3634254 - RNA, 23 nt, Human
gaauuuuggcugugucucccuuc

SEQ ID NO: 3634255 - RNA, 20 nt, Human
gaauuuuggggauuuucaaa

SEQ ID NO: 3634256 - RNA, 20 nt, Human
gaauuuugugcccccaugua

SEQ ID NO: 3634257 - RNA, 17 nt, Human
gaauuuuuaaacaagua

SEQ ID NO: 3634258 - RNA, 12 nt, Human
gaauuuuuaagc

SEQ ID NO: 3634259 - RNA, 14 nt, Human
gaauuuuuauuauu

SEQ ID NO: 3634260 - RNA, 14 nt, Human
gaauuuuuccuaug

SEQ ID NO: 3634261 - RNA, 17 nt, Human
gaauuuuugcaauaaug

SEQ ID NO: 3634262 - RNA, 19 nt, Human
gaauuuuugcaauaaugca

SEQ ID NO: 3634263 - RNA, 21 nt, Human
gaauuuuugcaauaaugcagu

SEQ ID NO: 3634264 - RNA, 15 nt, Human
gaauuuuuuuuaaca

SEQ ID NO: 3634265 - RNA, 21 nt, Human
gaauuuuuuuuaacauuccuc

SEQ ID NO: 3634266 - RNA, 17 nt, Human
gacaaaaacagccucac

SEQ ID NO: 3634267 - RNA, 22 nt, Human
gacaaaaaguauauuaaacaaa

SEQ ID NO: 3634268 - RNA, 18 nt, Human
gacaaaaaguuuccauau

SEQ ID NO: 3634269 - RNA, 17 nt, Human
gacaaaaauacucuaau

SEQ ID NO: 3634270 - RNA, 23 nt, Human
gacaaaaccccccagauaucauc

SEQ ID NO: 3634271 - RNA, 14 nt, Human
gacaaaacuucuug

SEQ ID NO: 3634272 - RNA, 16 nt, Human
gacaaaauauuuccca

SEQ ID NO: 3634273 - RNA, 22 nt, Human
gacaaaauuuuaguccaaauaa

SEQ ID NO: 3634274 - RNA, 18 nt, Human
gacaaaauuuuauaagca

SEQ ID NO: 3634275 - RNA, 17 nt, Human
gacaaacuggagucugg

SEQ ID NO: 3634276 - RNA, 16 nt, Human
gacaaagaauuccaaa

SEQ ID NO: 3634277 - RNA, 17 nt, Human
gacaaaggacauuuguu

SEQ ID NO: 3634278 - RNA, 16 nt, Human
gacaaaggagccugug

SEQ ID NO: 3634279 - RNA, 14 nt, Human
gacaaagucuccag

SEQ ID NO: 3634280 - RNA, 16 nt, Human
gacaaagugccaaaga

SEQ ID NO: 3634281 - RNA, 18 nt, Human
gacaaagugccaaagaaa

SEQ ID NO: 3634282 - RNA, 19 nt, Human
gacaaagugccaaagaaag

SEQ ID NO: 3634283 - RNA, 19 nt, Human
gacaaaguggaggagggcc

SEQ ID NO: 3634284 - RNA, 18 nt, Human
gacaaaguuccaaaaugc

SEQ ID NO: 3634285 - RNA, 20 nt, Human
gacaaaguuccaaaaugcca

SEQ ID NO: 3634286 - RNA, 15 nt, Human
gacaaaucaaagcag

SEQ ID NO: 3634287 - RNA, 12 nt, Human
gacaaaucuaag

SEQ ID NO: 3634288 - RNA, 14 nt, Human
gacaaaucugucug

SEQ ID NO: 3634289 - RNA, 22 nt, Human
gacaaaugcugcgcccuucccc

SEQ ID NO: 3634290 - RNA, 18 nt, Human
gacaaaugugaagaugca

SEQ ID NO: 3634291 - RNA, 22 nt, Human
gacaaauguguaucggaugcuu

SEQ ID NO: 3634292 - RNA, 12 nt, Human
gacaaauucugu

SEQ ID NO: 3634293 - RNA, 14 nt, Human
gacaaauucuguuu

SEQ ID NO: 3634294 - RNA, 15 nt, Human
gacaaauucuguuuc

SEQ ID NO: 3634295 - RNA, 20 nt, Human
gacaaauucuguuucuugag

SEQ ID NO: 3634296 - RNA, 15 nt, Human
gacaaauugcacaga

SEQ ID NO: 3634297 - RNA, 20 nt, Human
gacaaauuuaaaacaaacaa

SEQ ID NO: 3634298 - RNA, 14 nt, Human
gacaaauuuuaauu

SEQ ID NO: 3634299 - RNA, 22 nt, Human
gacaacacucauugaccugagg

SEQ ID NO: 3634300 - RNA, 23 nt, Human
gacaacacucauugaccugaggc

SEQ ID NO: 3634301 - RNA, 12 nt, Human
gacaacagaagc

SEQ ID NO: 3634302 - RNA, 20 nt, Human
gacaacauguuuaauaaaua

SEQ ID NO: 3634303 - RNA, 19 nt, Human
gacaaccaccgcuccccag

SEQ ID NO: 3634304 - RNA, 15 nt, Human
gacaaccauuaaagu

SEQ ID NO: 3634305 - RNA, 19 nt, Human
gacaaccauuaaagucaga

SEQ ID NO: 3634306 - RNA, 19 nt, Human
gacaaccgaugcuccagcc

SEQ ID NO: 3634307 - RNA, 21 nt, Human
gacaaccgaugcuccagccaa

SEQ ID NO: 3634308 - RNA, 20 nt, Human
gacaaccuuggcuuggcccu

SEQ ID NO: 3634309 - RNA, 15 nt, Human
gacaacgugcucuuu

SEQ ID NO: 3634310 - RNA, 17 nt, Human
gacaacguuucagcgac

SEQ ID NO: 3634311 - RNA, 12 nt, Human
gacaacuggcag

SEQ ID NO: 3634312 - RNA, 16 nt, Human
gacaacuggcaggcag

SEQ ID NO: 3634313 - RNA, 13 nt, Human
gacaacugugacu

SEQ ID NO: 3634314 - RNA, 15 nt, Human
gacaagaaaucccug

SEQ ID NO: 3634315 - RNA, 16 nt, Human
gacaagaaaucccugu

SEQ ID NO: 3634316 - RNA, 13 nt, Human
gacaagaagcaaa

SEQ ID NO: 3634317 - RNA, 19 nt, Human
gacaagaagcaaauuuuuu

SEQ ID NO: 3634318 - RNA, 21 nt, Human
gacaagacaaaccaagucgga

SEQ ID NO: 3634319 - RNA, 15 nt, Human
gacaagacuucagua

SEQ ID NO: 3634320 - RNA, 23 nt, Human
gacaagagccugaucucuuccug

SEQ ID NO: 3634321 - RNA, 19 nt, Human
gacaagagguacaggguuu

SEQ ID NO: 3634322 - RNA, 19 nt, Human
gacaagauauuguacauaa

SEQ ID NO: 3634323 - RNA, 19 nt, Human
gacaagcaauuagacaaga

SEQ ID NO: 3634324 - RNA, 12 nt, Human
gacaagcacagu

SEQ ID NO: 3634325 - RNA, 16 nt, Human
gacaagcacugcuagg

SEQ ID NO: 3634326 - RNA, 12 nt, Human
gacaagcagagg

SEQ ID NO: 3634327 - RNA, 21 nt, Human
gacaagcagauacugcugugu

SEQ ID NO: 3634328 - RNA, 15 nt, Human
gacaagccccaggca

SEQ ID NO: 3634329 - RNA, 21 nt, Human
gacaagcuguugaccaggcac

SEQ ID NO: 3634330 - RNA, 12 nt, Human
gacaagcuucug

SEQ ID NO: 3634331 - RNA, 16 nt, Human
gacaaggaaaaaauaa

SEQ ID NO: 3634332 - RNA, 22 nt, Human
gacaaggauugcuacuguccua

SEQ ID NO: 3634333 - RNA, 13 nt, Human
gacaaggccccag

SEQ ID NO: 3634334 - RNA, 17 nt, Human
gacaaggccccagagac

SEQ ID NO: 3634335 - RNA, 22 nt, Human
gacaagggaaaauaaaaaaaga

SEQ ID NO: 3634336 - RNA, 15 nt, Human
gacaagggcugaccu

SEQ ID NO: 3634337 - RNA, 22 nt, Human
gacaagggcugaccugccucuc

SEQ ID NO: 3634338 - RNA, 17 nt, Human
gacaaggugcaggcagg

SEQ ID NO: 3634339 - RNA, 20 nt, Human
gacaagugacuguaucugug

SEQ ID NO: 3634340 - RNA, 22 nt, Human
gacaagugaugcuaaaaccuga

SEQ ID NO: 3634341 - RNA, 16 nt, Human
gacaauaaacccucag

SEQ ID NO: 3634342 - RNA, 21 nt, Human
gacaauaaaccuccgccaaug

SEQ ID NO: 3634343 - RNA, 13 nt, Human
gaccaauuuuaac

SEQ ID NO: 3634344 - RNA, 21 nt, Human
gaccacacauuuguguaaaca

SEQ ID NO: 3634345 - RNA, 12 nt, Human
gaccacaccugc

SEQ ID NO: 3634346 - RNA, 22 nt, Human
gaccacacuccagcugggauca

SEQ ID NO: 3634347 - RNA, 20 nt, Human
gaccacacuuccuguccaga

SEQ ID NO: 3634348 - RNA, 20 nt, Human
gaccacagcaaggcaccugc

SEQ ID NO: 3634349 - RNA, 14 nt, Human
gaccacagcacagc

SEQ ID NO: 3634350 - RNA, 16 nt, Human
gaccacagcacagcca

SEQ ID NO: 3634351 - RNA, 23 nt, Human
gaccacagcaucauuuugcauuc

SEQ ID NO: 3634352 - RNA, 16 nt, Human
gaccacaggcucaggc

SEQ ID NO: 3634353 - RNA, 18 nt, Human
gaccacaggcucaggcag

SEQ ID NO: 3634354 - RNA, 23 nt, Human
gaccacaggguucaaaaugucug

SEQ ID NO: 3634355 - RNA, 23 nt, Human
gaccacaggugcccgccaccaca

SEQ ID NO: 3634356 - RNA, 23 nt, Human
gaccacaucuuuaucuguucuug

SEQ ID NO: 3634357 - RNA, 13 nt, Human
gaccacaugcccc

SEQ ID NO: 3634358 - RNA, 22 nt, Human
gaccaccaccccaacaaaccau

SEQ ID NO: 3634359 - RNA, 20 nt, Human
gaccaccagggcaucucugg

SEQ ID NO: 3634360 - RNA, 21 nt, Human
gaccaccagggcaucucuggg

SEQ ID NO: 3634361 - RNA, 16 nt, Human
gaccacccauaucaug

SEQ ID NO: 3634362 - RNA, 17 nt, Human
gaccaccccugccucca

SEQ ID NO: 3634363 - RNA, 18 nt, Human
gaccacccuccccucucu

SEQ ID NO: 3634364 - RNA, 18 nt, Human
gaccaccucaaauuuaaa

SEQ ID NO: 3634365 - RNA, 13 nt, Human
gaccaccugccca

SEQ ID NO: 3634366 - RNA, 22 nt, Human
gaccaccuuuguuucuccccca

SEQ ID NO: 3634367 - RNA, 19 nt, Human
gaccacgcccguccugccu

SEQ ID NO: 3634368 - RNA, 22 nt, Human
gaccacgcccguccugccugug

SEQ ID NO: 3634369 - RNA, 14 nt, Human
gaccacgcuuucua

SEQ ID NO: 3634370 - RNA, 17 nt, Human
gaccacgggaagcaucu

SEQ ID NO: 3634371 - RNA, 16 nt, Human
gaccacguuucuaaag

SEQ ID NO: 3634372 - RNA, 17 nt, Human
gaccacucagccccuag

SEQ ID NO: 3634373 - RNA, 16 nt, Human
gaccacugcagaagac

SEQ ID NO: 3634374 - RNA, 21 nt, Human
gaccacugcagaagacaguau

SEQ ID NO: 3634375 - RNA, 16 nt, Human
gaccacuguuucuugc

SEQ ID NO: 3634376 - RNA, 15 nt, Human
gaccacuuccagggg

SEQ ID NO: 3634377 - RNA, 15 nt, Human
gaccacuugaggccu

SEQ ID NO: 3634378 - RNA, 17 nt, Human
gaccagaagcuccccca

SEQ ID NO: 3634379 - RNA, 21 nt, Human
gaccagacaccuugacagggc

SEQ ID NO: 3634380 - RNA, 24 nt, Human
gaccagacaccuugacagggcaca

SEQ ID NO: 3634381 - RNA, 11 nt, Human
gaccagacuaa

SEQ ID NO: 3634382 - RNA, 11 nt, Human
gaccagagcuc

SEQ ID NO: 3634383 - RNA, 13 nt, Human
gaccagagcugcc

SEQ ID NO: 3634384 - RNA, 16 nt, Human
gaccagagcugccacc

SEQ ID NO: 3634385 - RNA, 18 nt, Human
gaccagagcugccaccug

SEQ ID NO: 3634386 - RNA, 15 nt, Human
gaccagaggagccuu

SEQ ID NO: 3634387 - RNA, 20 nt, Human
gaccagcaacuugucuuuuu

SEQ ID NO: 3634388 - RNA, 13 nt, Human
gaccagcacacuc

SEQ ID NO: 3634389 - RNA, 14 nt, Human
gaccagcacacucc

SEQ ID NO: 3634390 - RNA, 18 nt, Human
gaccagcacacucccgag

SEQ ID NO: 3634391 - RNA, 19 nt, Human
gaccagcagacagagccag

SEQ ID NO: 3634392 - RNA, 22 nt, Human
gaccagcagacagagccaggag

SEQ ID NO: 3634393 - RNA, 17 nt, Human
gaccagcagaucccagc

SEQ ID NO: 3634394 - RNA, 20 nt, Human
gaccagcagaucccagcuca

SEQ ID NO: 3634395 - RNA, 20 nt, Human
gaccagcagcgccuuuccca

SEQ ID NO: 3634396 - RNA, 17 nt, Human
gaccagcagucugccug

SEQ ID NO: 3634397 - RNA, 16 nt, Human
gaccagccagcagcag

SEQ ID NO: 3634398 - RNA, 20 nt, Human
gaccagccuccaugcugccu

SEQ ID NO: 3634399 - RNA, 21 nt, Human
gaccagccuccaugcugccuc

SEQ ID NO: 3634400 - RNA, 14 nt, Human
gaccagccucucca

SEQ ID NO: 3634401 - RNA, 15 nt, Human
gaccagccuggccca

SEQ ID NO: 3634402 - RNA, 12 nt, Human
gaccagccuggg

SEQ ID NO: 3634403 - RNA, 13 nt, Human
gaccagcucagga

SEQ ID NO: 3634404 - RNA, 22 nt, Human
gaccagcucaggacagaugcca

SEQ ID NO: 3634405 - RNA, 19 nt, Human
gaccagcucccccucccuc

SEQ ID NO: 3634406 - RNA, 20 nt, Human
gaccagcucccccucccucc

SEQ ID NO: 3634407 - RNA, 21 nt, Human
gaccagcugcuccgaggaccc

SEQ ID NO: 3634408 - RNA, 11 nt, Human
gaccagcuggg

SEQ ID NO: 3634409 - RNA, 13 nt, Human
gaccagcuggggc

SEQ ID NO: 3634410 - RNA, 17 nt, Human
gaccagcuuggcucagg

SEQ ID NO: 3634411 - RNA, 14 nt, Human
gaccaggacuauag

SEQ ID NO: 3634412 - RNA, 23 nt, Human
gaccaggacucccuccucaccuc

SEQ ID NO: 3634413 - RNA, 23 nt, Human
gaccaggagggcacuggagcugu

SEQ ID NO: 3634414 - RNA, 11 nt, Human
gaccaggagug

SEQ ID NO: 3634415 - RNA, 15 nt, Human
gaccaggauccagcc

SEQ ID NO: 3634416 - RNA, 21 nt, Human
gaccaggaucccaagccuccu

SEQ ID NO: 3634417 - RNA, 15 nt, Human
gaccaggauuucuaa

SEQ ID NO: 3634418 - RNA, 13 nt, Human
gaccaggccuggg

SEQ ID NO: 3634419 - RNA, 14 nt, Human
gaccaggcuguguc

SEQ ID NO: 3634420 - RNA, 15 nt, Human
gaccagggagccuuu

SEQ ID NO: 3634421 - RNA, 20 nt, Human
gaccagggauuuccaugaug

SEQ ID NO: 3634422 - RNA, 14 nt, Human
gaccagggcagggc

SEQ ID NO: 3634423 - RNA, 15 nt, Human
gaccagggccgagga

SEQ ID NO: 3634424 - RNA, 19 nt, Human
gaccagggccgaggaggug

SEQ ID NO: 3634425 - RNA, 11 nt, Human
gaccagggccu

SEQ ID NO: 3634426 - RNA, 14 nt, Human
gaccagggccuuuu

SEQ ID NO: 3634427 - RNA, 23 nt, Human
gaccaggucuuggagcugagccu

SEQ ID NO: 3634428 - RNA, 17 nt, Human
gaccagucaaccugggc

SEQ ID NO: 3634429 - RNA, 17 nt, Human
gaccagucccagagcag

SEQ ID NO: 3634430 - RNA, 15 nt, Human
gaccaguggugccuu

SEQ ID NO: 3634431 - RNA, 22 nt, Human
gaccaguugaauaaaagugcac

SEQ ID NO: 3634432 - RNA, 14 nt, Human
gaccaguugggagc

SEQ ID NO: 3634433 - RNA, 16 nt, Human
gaccauaacagccaac

SEQ ID NO: 3634434 - RNA, 20 nt, Human
gaccauaauguuacauuauu

SEQ ID NO: 3634435 - RNA, 14 nt, Human
gaccauagugacca

SEQ ID NO: 3634436 - RNA, 21 nt, Human
gaccauccacucuacccuccc

SEQ ID NO: 3634437 - RNA, 13 nt, Human
gaccaucccugaa

SEQ ID NO: 3634438 - RNA, 15 nt, Human
gaccaucccugaagg

SEQ ID NO: 3634439 - RNA, 13 nt, Human
gaccauccuauuu

SEQ ID NO: 3634440 - RNA, 12 nt, Human
gaccauccuggc

SEQ ID NO: 3634441 - RNA, 15 nt, Human
gaccaucugcuuuua

SEQ ID NO: 3634442 - RNA, 17 nt, Human
gaccaucugcuuuuauu

SEQ ID NO: 3634443 - RNA, 24 nt, Human
gaccaugcgacacugggaggccag

SEQ ID NO: 3634444 - RNA, 23 nt, Human
gaccauggacacuacacccagca

SEQ ID NO: 3634445 - RNA, 21 nt, Human
gaccauggaguggcagcccag

SEQ ID NO: 3634446 - RNA, 14 nt, Human
gaccauguggccac

SEQ ID NO: 3634447 - RNA, 20 nt, Human
gaccaugugucacuugugcu

SEQ ID NO: 3634448 - RNA, 21 nt, Human
gaccaugugucacuugugcuu

SEQ ID NO: 3634449 - RNA, 17 nt, Human
gaccauucuccaccugc

SEQ ID NO: 3634450 - RNA, 13 nt, Human
gaccauuuaacau

SEQ ID NO: 3634451 - RNA, 15 nt, Human
gaccauuucaggggu

SEQ ID NO: 3634452 - RNA, 13 nt, Human
gacccaaggagga

SEQ ID NO: 3634453 - RNA, 14 nt, Human
gacccaaggaggaa

SEQ ID NO: 3634454 - RNA, 18 nt, Human
gacccaauguaggagcug

SEQ ID NO: 3634455 - RNA, 12 nt, Human
gacccacaugcu

SEQ ID NO: 3634456 - RNA, 13 nt, Human
gacccacauguaa

SEQ ID NO: 3634457 - RNA, 15 nt, Human
gacccaccccaccug

SEQ ID NO: 3634458 - RNA, 15 nt, Human
gacccaccccugugc

SEQ ID NO: 3634459 - RNA, 16 nt, Human
gacccaccucaccccg

SEQ ID NO: 3634460 - RNA, 11 nt, Human
gacccacugcu

SEQ ID NO: 3634461 - RNA, 22 nt, Human
gacccacuucucaucacacaca

SEQ ID NO: 3634462 - RNA, 17 nt, Human
gacccagacacaucgca

SEQ ID NO: 3634463 - RNA, 14 nt, Human
gacccagccaggcc

SEQ ID NO: 3634464 - RNA, 19 nt, Human
gacccagccaggcccagcc

SEQ ID NO: 3634465 - RNA, 16 nt, Human
gacccagcggacacac

SEQ ID NO: 3634466 - RNA, 13 nt, Human
gacccaggacagg

SEQ ID NO: 3634467 - RNA, 13 nt, Human
gacccaggacucc

SEQ ID NO: 3634468 - RNA, 13 nt, Human
gacccaggccgca

SEQ ID NO: 3634469 - RNA, 15 nt, Human
gacccaggccgcagc

SEQ ID NO: 3634470 - RNA, 17 nt, Human
gacccaggccgcagcuc

SEQ ID NO: 3634471 - RNA, 16 nt, Human
gacccaggcuccgccc

SEQ ID NO: 3634472 - RNA, 18 nt, Human
gacccaggcuccgcccuu

SEQ ID NO: 3634473 - RNA, 18 nt, Human
gacccaggcugccugagc

SEQ ID NO: 3634474 - RNA, 14 nt, Human
gacccaggcugggc

SEQ ID NO: 3634475 - RNA, 15 nt, Human
gacccaggcugggca

SEQ ID NO: 3634476 - RNA, 15 nt, Human
gacccagggaacagc

SEQ ID NO: 3634477 - RNA, 13 nt, Human
gacccagggggag

SEQ ID NO: 3634478 - RNA, 14 nt, Human
gacccagucccugg

SEQ ID NO: 3634479 - RNA, 13 nt, Human
gacccagugcaga

SEQ ID NO: 3634480 - RNA, 15 nt, Human
gacccagugccccca

SEQ ID NO: 3634481 - RNA, 12 nt, Human
gacccaguggca

SEQ ID NO: 3634482 - RNA, 14 nt, Human
gacccaguggcagg

SEQ ID NO: 3634483 - RNA, 15 nt, Human
gacccaguggcaggg

SEQ ID NO: 3634484 - RNA, 16 nt, Human
gacccaguggcagggc

SEQ ID NO: 3634485 - RNA, 23 nt, Human
gacccaugaguuggggucuggca

SEQ ID NO: 3634486 - RNA, 13 nt, Human
gacccaugcugcc

SEQ ID NO: 3634487 - RNA, 15 nt, Human
gacccaugcugcccu

SEQ ID NO: 3634488 - RNA, 15 nt, Human
gacccaugggcagga

SEQ ID NO: 3634489 - RNA, 14 nt, Human
gagccgugaugccu

SEQ ID NO: 3634490 - RNA, 20 nt, Human
gagccguggucccugaggau

SEQ ID NO: 3634491 - RNA, 17 nt, Human
gagccuaaaaauaaagc

SEQ ID NO: 3634492 - RNA, 19 nt, Human
gagccuaaaaauaaagcac

SEQ ID NO: 3634493 - RNA, 20 nt, Human
gagccuaccuguaugucaau

SEQ ID NO: 3634494 - RNA, 21 nt, Human
gagccuaggaccacucagccc

SEQ ID NO: 3634495 - RNA, 14 nt, Human
gagccuaggccagg

SEQ ID NO: 3634496 - RNA, 15 nt, Human
gagccuaggccaggu

SEQ ID NO: 3634497 - RNA, 16 nt, Human
gagccuaggccaggug

SEQ ID NO: 3634498 - RNA, 13 nt, Human
gagccucacagca

SEQ ID NO: 3634499 - RNA, 14 nt, Human
gagccucacagcag

SEQ ID NO: 3634500 - RNA, 18 nt, Human
gagccucacagcagugag

SEQ ID NO: 3634501 - RNA, 14 nt, Human
gagccucacugggg

SEQ ID NO: 3634502 - RNA, 15 nt, Human
gagccucagcauccu

SEQ ID NO: 3634503 - RNA, 20 nt, Human
gagccucccaaggagaacaa

SEQ ID NO: 3634504 - RNA, 22 nt, Human
gagccucccaaggagaacaaau

SEQ ID NO: 3634505 - RNA, 14 nt, Human
gagccucccugccu

SEQ ID NO: 3634506 - RNA, 19 nt, Human
gagccucccugccucaggc

SEQ ID NO: 3634507 - RNA, 19 nt, Human
gagccuccugcccaguccc

SEQ ID NO: 3634508 - RNA, 14 nt, Human
gagccuccugcccu

SEQ ID NO: 3634509 - RNA, 20 nt, Human
gagccuccugcccuuaccug

SEQ ID NO: 3634510 - RNA, 14 nt, Human
gagccucgcucugu

SEQ ID NO: 3634511 - RNA, 12 nt, Human
gagccucugggg

SEQ ID NO: 3634512 - RNA, 12 nt, Human
gagccucuguca

SEQ ID NO: 3634513 - RNA, 18 nt, Human
gagccucugucacugcag

SEQ ID NO: 3634514 - RNA, 20 nt, Human
gagccucugucacugcaggc

SEQ ID NO: 3634515 - RNA, 21 nt, Human
gagccucugucacugcaggca

SEQ ID NO: 3634516 - RNA, 22 nt, Human
gagccucugucacugcaggcac

SEQ ID NO: 3634517 - RNA, 24 nt, Human
gagccucugucacugcaggcacuc

SEQ ID NO: 3634518 - RNA, 20 nt, Human
gagccucuucugccaagaga

SEQ ID NO: 3634519 - RNA, 18 nt, Human
gagccugaaauagugguu

SEQ ID NO: 3634520 - RNA, 15 nt, Human
gagccugacagccag

SEQ ID NO: 3634521 - RNA, 17 nt, Human
gagccugagucagggcc

SEQ ID NO: 3634522 - RNA, 17 nt, Human
gagccugaucucuuccu

SEQ ID NO: 3634523 - RNA, 19 nt, Human
gagccugaucucuuccugu

SEQ ID NO: 3634524 - RNA, 15 nt, Human
gagccugcaacaugc

SEQ ID NO: 3634525 - RNA, 13 nt, Human
gagccugcaggau

SEQ ID NO: 3634526 - RNA, 13 nt, Human
gagccugcccagc

SEQ ID NO: 3634527 - RNA, 14 nt, Human
gagccugccgagca

SEQ ID NO: 3634528 - RNA, 15 nt, Human
gagccugccuggagc

SEQ ID NO: 3634529 - RNA, 13 nt, Human
gagccugcucccc

SEQ ID NO: 3634530 - RNA, 17 nt, Human
gagccugcucccccacc

SEQ ID NO: 3634531 - RNA, 15 nt, Human
gagccugcuggcacc

SEQ ID NO: 3634532 - RNA, 10 nt, Human
gagccuggca

SEQ ID NO: 3634533 - RNA, 15 nt, Human
gagccuggcaagaau

SEQ ID NO: 3634534 - RNA, 21 nt, Human
gagccuggcucuugugcugga

SEQ ID NO: 3634535 - RNA, 23 nt, Human
gagccuggcucuugugcuggaug

SEQ ID NO: 3634536 - RNA, 21 nt, Human
gagccugggaggucaaggcug

SEQ ID NO: 3634537 - RNA, 15 nt, Human
gagccuggggcucua

SEQ ID NO: 3634538 - RNA, 19 nt, Human
gagccuggucccacgaggg

SEQ ID NO: 3634539 - RNA, 18 nt, Human
gagccuguccugccugug

SEQ ID NO: 3634540 - RNA, 19 nt, Human
gagccuguccugccugugg

SEQ ID NO: 3634541 - RNA, 18 nt, Human
gagccugugaacccagga

SEQ ID NO: 3634542 - RNA, 23 nt, Human
gagccugugacauacccccuccc

SEQ ID NO: 3634543 - RNA, 15 nt, Human
gagccuguguaacag

SEQ ID NO: 3634544 - RNA, 20 nt, Human
gagccuguguaacagcuccu

SEQ ID NO: 3634545 - RNA, 22 nt, Human
gagccuguguaacagcuccuug

SEQ ID NO: 3634546 - RNA, 14 nt, Human
gagccuuaaaacau

SEQ ID NO: 3634547 - RNA, 13 nt, Human
gagccuucagccu

SEQ ID NO: 3634548 - RNA, 14 nt, Human
gagccuuccaccca

SEQ ID NO: 3634549 - RNA, 17 nt, Human
gagccuuccaggggugg

SEQ ID NO: 3634550 - RNA, 17 nt, Human
gagccuucucagaagca

SEQ ID NO: 3634551 - RNA, 16 nt, Human
gagccuugggaccccu

SEQ ID NO: 3634552 - RNA, 19 nt, Human
gagccuugguguccaccug

SEQ ID NO: 3634553 - RNA, 23 nt, Human
gagccuuuucccucuuuggcucc

SEQ ID NO: 3634554 - RNA, 13 nt, Human
gagcgaaacuccg

SEQ ID NO: 3634555 - RNA, 13 nt, Human
gagcgacagugag

SEQ ID NO: 3634556 - RNA, 16 nt, Human
gagcgagcauccccca

SEQ ID NO: 3634557 - RNA, 16 nt, Human
gagcgagcgcuaccca

SEQ ID NO: 3634558 - RNA, 14 nt, Human
gagcgcagccgccu

SEQ ID NO: 3634559 - RNA, 19 nt, Human
gagcgcaguguuuugcaag

SEQ ID NO: 3634560 - RNA, 21 nt, Human
gagcgcccacuagacccacug

SEQ ID NO: 3634561 - RNA, 13 nt, Human
gagcgcccugcag

SEQ ID NO: 3634562 - RNA, 19 nt, Human
gagcgcccugcagacccug

SEQ ID NO: 3634563 - RNA, 21 nt, Human
gagcgcccugcagacccugcc

SEQ ID NO: 3634564 - RNA, 19 nt, Human
gagcgccuccauccaaggc

SEQ ID NO: 3634565 - RNA, 17 nt, Human
gagcgcgccccuagccg

SEQ ID NO: 3634566 - RNA, 15 nt, Human
gagcgcuugggcgcc

SEQ ID NO: 3634567 - RNA, 13 nt, Human
gagcggagguugc

SEQ ID NO: 3634568 - RNA, 14 nt, Human
gagcggucucaggc

SEQ ID NO: 3634569 - RNA, 16 nt, Human
gagcggucucaggcug

SEQ ID NO: 3634570 - RNA, 19 nt, Human
gagcggugcuguccucagg

SEQ ID NO: 3634571 - RNA, 16 nt, Human
gagcgugagcugagca

SEQ ID NO: 3634572 - RNA, 20 nt, Human
gagcgugcuccagccuggcu

SEQ ID NO: 3634573 - RNA, 21 nt, Human
gagcgugcuccagccuggcuc

SEQ ID NO: 3634574 - RNA, 19 nt, Human
gagcuaaacuccuuccugg

SEQ ID NO: 3634575 - RNA, 19 nt, Human
gagcuaaauuacaauuguc

SEQ ID NO: 3634576 - RNA, 11 nt, Human
gagcuaaggcu

SEQ ID NO: 3634577 - RNA, 18 nt, Human
gagcuaagggugggugcu

SEQ ID NO: 3634578 - RNA, 23 nt, Human
gagcuaagggugggugcucagaa

SEQ ID NO: 3634579 - RNA, 12 nt, Human
gagcuacaaaug

SEQ ID NO: 3634580 - RNA, 14 nt, Human
gagcuacaaaugca

SEQ ID NO: 3634581 - RNA, 23 nt, Human
gagcuacacaggggaaaagagga

SEQ ID NO: 3634582 - RNA, 14 nt, Human
gagcuaccugugug

SEQ ID NO: 3634583 - RNA, 19 nt, Human
gagcuaccuguguggacag

SEQ ID NO: 3634584 - RNA, 20 nt, Human
gagcuaccuguguggacagg

SEQ ID NO: 3634585 - RNA, 17 nt, Human
gagcuacgccugccucc

SEQ ID NO: 3634586 - RNA, 23 nt, Human
gagcuacgccugccuccccugug

SEQ ID NO: 3634587 - RNA, 20 nt, Human
gagcuacguauuuaauagca

SEQ ID NO: 3634588 - RNA, 22 nt, Human
gagcuagaaccuagaagggcua

SEQ ID NO: 3634589 - RNA, 17 nt, Human
gagcuagaaccuggaga

SEQ ID NO: 3634590 - RNA, 21 nt, Human
gagcuagaaccuggagggcua

SEQ ID NO: 3634591 - RNA, 17 nt, Human
gagcuagcagcagggag

SEQ ID NO: 3634592 - RNA, 12 nt, Human
gagcuagccaga

SEQ ID NO: 3634593 - RNA, 18 nt, Human
gagcuagccagaggacug

SEQ ID NO: 3634594 - RNA, 19 nt, Human
gagcuagcgcugccgcacc

SEQ ID NO: 3634595 - RNA, 23 nt, Human
gagcuagcgcugccgcaccccag

SEQ ID NO: 3634596 - RNA, 12 nt, Human
gagcuaggagca

SEQ ID NO: 3634597 - RNA, 21 nt, Human
gagcuaggagcaaagccuguu

SEQ ID NO: 3634598 - RNA, 13 nt, Human
gagcuaggcaggg

SEQ ID NO: 3634599 - RNA, 22 nt, Human
gagcuauuaaaacucagccugg

SEQ ID NO: 3634600 - RNA, 18 nt, Human
gagcuauuuccauuccag

SEQ ID NO: 3634601 - RNA, 19 nt, Human
gagcuauuuccauuccaga

SEQ ID NO: 3634602 - RNA, 14 nt, Human
gagcucacaaggca

SEQ ID NO: 3634603 - RNA, 21 nt, Human
gagcucacaaggcagcaaggc

SEQ ID NO: 3634604 - RNA, 23 nt, Human
gagcucacaaggcagcaaggccc

SEQ ID NO: 3634605 - RNA, 20 nt, Human
gagcucagaaaauaucccuc

SEQ ID NO: 3634606 - RNA, 18 nt, Human
gagcucagacccccacuc

SEQ ID NO: 3634607 - RNA, 20 nt, Human
gagcucagacccccacucuc

SEQ ID NO: 3634608 - RNA, 20 nt, Human
gagcucagagagggcaggca

SEQ ID NO: 3634609 - RNA, 22 nt, Human
gagcucaggaaccgaggcaggg

SEQ ID NO: 3634610 - RNA, 14 nt, Human
gagcucaggacacu

SEQ ID NO: 3634611 - RNA, 13 nt, Human
gagcuccacucug

SEQ ID NO: 3634612 - RNA, 13 nt, Human
gagcuccagaccc

SEQ ID NO: 3634613 - RNA, 15 nt, Human
gagcuccagaccccc

SEQ ID NO: 3634614 - RNA, 19 nt, Human
gagcuccagacccccagca

SEQ ID NO: 3634615 - RNA, 22 nt, Human
gagcuccagagcaacgaccagg

SEQ ID NO: 3634616 - RNA, 14 nt, Human
gagcuccagccuga

SEQ ID NO: 3634617 - RNA, 14 nt, Human
gagcuccaguggaa

SEQ ID NO: 3634618 - RNA, 14 nt, Human
gagcuccagugucc

SEQ ID NO: 3634619 - RNA, 18 nt, Human
gagcuccaguguccugag

SEQ ID NO: 3634620 - RNA, 17 nt, Human
gagcucccacaagccug

SEQ ID NO: 3634621 - RNA, 19 nt, Human
gagcucccacuucugccag

SEQ ID NO: 3634622 - RNA, 18 nt, Human
gagcuccucuccuggagg

SEQ ID NO: 3634623 - RNA, 19 nt, Human
gagcuccucuccuggagga

SEQ ID NO: 3634624 - RNA, 15 nt, Human
gagcuccucugggca

SEQ ID NO: 3634625 - RNA, 21 nt, Human
gagcuccucuguccugcuucu

SEQ ID NO: 3634626 - RNA, 14 nt, Human
gagcuccucuucca

SEQ ID NO: 3634627 - RNA, 13 nt, Human
gagcuccugggaa

SEQ ID NO: 3634628 - RNA, 19 nt, Human
gagcucguguauccugggg

SEQ ID NO: 3634629 - RNA, 20 nt, Human
gagcucguguauccuggggc

SEQ ID NO: 3634630 - RNA, 15 nt, Human
gagcucuacccaggg

SEQ ID NO: 3634631 - RNA, 23 nt, Human
gagcucuacccagggccugcagg

SEQ ID NO: 3634632 - RNA, 16 nt, Human
gagcucugaaaucuuc

SEQ ID NO: 3634633 - RNA, 11 nt, Human
gagcucugaga

SEQ ID NO: 3634634 - RNA, 16 nt, Human
gagggaaaagggaagu

SEQ ID NO: 3634635 - RNA, 13 nt, Human
gagggaaaccuuu

SEQ ID NO: 3634636 - RNA, 22 nt, Human
gagggaaagccuuaagcugcag

SEQ ID NO: 3634637 - RNA, 15 nt, Human
gagggaagggagcca

SEQ ID NO: 3634638 - RNA, 16 nt, Human
gagggaagggagccaa

SEQ ID NO: 3634639 - RNA, 20 nt, Human
gagggaagggagccaaggga

SEQ ID NO: 3634640 - RNA, 19 nt, Human
gagggaaggguuucucuau

SEQ ID NO: 3634641 - RNA, 17 nt, Human
gagggacaaaggagccu

SEQ ID NO: 3634642 - RNA, 20 nt, Human
gagggacaaaggagccugug

SEQ ID NO: 3634643 - RNA, 18 nt, Human
gagggaccaacugggccc

SEQ ID NO: 3634644 - RNA, 15 nt, Human
gagggaccauguguc

SEQ ID NO: 3634645 - RNA, 21 nt, Human
gagggaccaugugucacuugu

SEQ ID NO: 3634646 - RNA, 19 nt, Human
gagggacccuccaccaccu

SEQ ID NO: 3634647 - RNA, 17 nt, Human
gagggaccucucccagg

SEQ ID NO: 3634648 - RNA, 18 nt, Human
gagggaccucucccaggg

SEQ ID NO: 3634649 - RNA, 18 nt, Human
gagggacucugaagccuc

SEQ ID NO: 3634650 - RNA, 22 nt, Human
gagggacucugaagccucuggg

SEQ ID NO: 3634651 - RNA, 23 nt, Human
gagggacucugaagccucuggga

SEQ ID NO: 3634652 - RNA, 16 nt, Human
gagggacugccucugc

SEQ ID NO: 3634653 - RNA, 21 nt, Human
gagggacuuugcugauuuccc

SEQ ID NO: 3634654 - RNA, 13 nt, Human
gagggagaagaag

SEQ ID NO: 3634655 - RNA, 16 nt, Human
gagggagagagagaga

SEQ ID NO: 3634656 - RNA, 22 nt, Human
gagggagagagagagagagagg

SEQ ID NO: 3634657 - RNA, 13 nt, Human
gagggagagggag

SEQ ID NO: 3634658 - RNA, 22 nt, Human
gagggagcaaguccuucccuuu

SEQ ID NO: 3634659 - RNA, 20 nt, Human
gagggagcagacaggaggaa

SEQ ID NO: 3634660 - RNA, 20 nt, Human
gagggagcauagaaggcagg

SEQ ID NO: 3634661 - RNA, 24 nt, Human
gagggagcauagaaggcaggugag

SEQ ID NO: 3634662 - RNA, 12 nt, Human
gagggagcugag

SEQ ID NO: 3634663 - RNA, 15 nt, Human
gagggagcuuagcca

SEQ ID NO: 3634664 - RNA, 13 nt, Human
gagggaggaaucg

SEQ ID NO: 3634665 - RNA, 12 nt, Human
gagggaggaggc

SEQ ID NO: 3634666 - RNA, 17 nt, Human
gagggaggcaagcccug

SEQ ID NO: 3634667 - RNA, 12 nt, Human
gagggaggcccc

SEQ ID NO: 3634668 - RNA, 14 nt, Human
gagggagggagggc

SEQ ID NO: 3634669 - RNA, 15 nt, Human
gagggagggagggcu

SEQ ID NO: 3634670 - RNA, 19 nt, Human
gagggagggcuccagacac

SEQ ID NO: 3634671 - RNA, 21 nt, Human
gagggaggggaagcuucuguc

SEQ ID NO: 3634672 - RNA, 20 nt, Human
gagggagggggaaggcaggg

SEQ ID NO: 3634673 - RNA, 23 nt, Human
gagggagguguuuaaagagaggu

SEQ ID NO: 3634674 - RNA, 21 nt, Human
gagggagugacagaggcagcc

SEQ ID NO: 3634675 - RNA, 16 nt, Human
gagggauaagcaaaag

SEQ ID NO: 3634676 - RNA, 14 nt, Human
gagggaucacaggg

SEQ ID NO: 3634677 - RNA, 22 nt, Human
gagggaugaggugcugggaggg

SEQ ID NO: 3634678 - RNA, 15 nt, Human
gagggaugcugccug

SEQ ID NO: 3634679 - RNA, 17 nt, Human
gagggaugcugccugag

SEQ ID NO: 3634680 - RNA, 20 nt, Human
gagggaugcugccugaguca

SEQ ID NO: 3634681 - RNA, 18 nt, Human
gagggauggcgggugggg

SEQ ID NO: 3634682 - RNA, 14 nt, Human
gagggaugggccug

SEQ ID NO: 3634683 - RNA, 19 nt, Human
gagggauuucuuugcugua

SEQ ID NO: 3634684 - RNA, 16 nt, Human
gagggcacugguggcc

SEQ ID NO: 3634685 - RNA, 21 nt, Human
gagggcagaaagguucugccc

SEQ ID NO: 3634686 - RNA, 22 nt, Human
gagggcagaaagguucugcccg

SEQ ID NO: 3634687 - RNA, 18 nt, Human
gagggcagacuggggcau

SEQ ID NO: 3634688 - RNA, 14 nt, Human
gagggcagaggcug

SEQ ID NO: 3634689 - RNA, 17 nt, Human
gagggcagcagccagcc

SEQ ID NO: 3634690 - RNA, 12 nt, Human
gagggcagcagg

SEQ ID NO: 3634691 - RNA, 13 nt, Human
gagggcagcugcu

SEQ ID NO: 3634692 - RNA, 14 nt, Human
gagggcagcugcua

SEQ ID NO: 3634693 - RNA, 11 nt, Human
gagggcaggga

SEQ ID NO: 3634694 - RNA, 16 nt, Human
gagggcaguguuuccu

SEQ ID NO: 3634695 - RNA, 19 nt, Human
gagggcaguucgcagccac

SEQ ID NO: 3634696 - RNA, 20 nt, Human
gagggcaguucgcagccacc

SEQ ID NO: 3634697 - RNA, 23 nt, Human
gagggcaguucgcagccacccug

SEQ ID NO: 3634698 - RNA, 18 nt, Human
gagggcauccauaccagc

SEQ ID NO: 3634699 - RNA, 16 nt, Human
gagggccacgggucug

SEQ ID NO: 3634700 - RNA, 14 nt, Human
gagggcccagagca

SEQ ID NO: 3634701 - RNA, 18 nt, Human
gagggcccagagcaggaa

SEQ ID NO: 3634702 - RNA, 13 nt, Human
gagggcccaggca

SEQ ID NO: 3634703 - RNA, 16 nt, Human
gagggccccucugccc

SEQ ID NO: 3634704 - RNA, 22 nt, Human
gagggccccucugcccagcuug

SEQ ID NO: 3634705 - RNA, 18 nt, Human
gagggccguaccccaccc

SEQ ID NO: 3634706 - RNA, 22 nt, Human
gagggccucaaaggcccgcucu

SEQ ID NO: 3634707 - RNA, 15 nt, Human
gagggccugaggucu

SEQ ID NO: 3634708 - RNA, 21 nt, Human
gagggccugcaagggagugag

SEQ ID NO: 3634709 - RNA, 20 nt, Human
gagggccugcuggaggccuc

SEQ ID NO: 3634710 - RNA, 13 nt, Human
gagggccugggcc

SEQ ID NO: 3634711 - RNA, 15 nt, Human
gagggccugggccug

SEQ ID NO: 3634712 - RNA, 13 nt, Human
gagggcggcaggg

SEQ ID NO: 3634713 - RNA, 23 nt, Human
gagggcggcaggggccuggagau

SEQ ID NO: 3634714 - RNA, 20 nt, Human
gagggcgugacucacccaag

SEQ ID NO: 3634715 - RNA, 20 nt, Human
gagggcuagaaccuggaagg

SEQ ID NO: 3634716 - RNA, 19 nt, Human
gagggcuagaaucuggaga

SEQ ID NO: 3634717 - RNA, 17 nt, Human
gagggcucacucagcca

SEQ ID NO: 3634718 - RNA, 13 nt, Human
gagggcuccagac

SEQ ID NO: 3634719 - RNA, 14 nt, Human
gagggcuccagaca

SEQ ID NO: 3634720 - RNA, 19 nt, Human
gagggcucgaggggugggc

SEQ ID NO: 3634721 - RNA, 14 nt, Human
gagggcucugaggc

SEQ ID NO: 3634722 - RNA, 16 nt, Human
gagggcugccuuugga

SEQ ID NO: 3634723 - RNA, 10 nt, Human
gagggcugga

SEQ ID NO: 3634724 - RNA, 13 nt, Human
gagggcuggaauc

SEQ ID NO: 3634725 - RNA, 19 nt, Human
gagggcuggaaucuggaga

SEQ ID NO: 3634726 - RNA, 20 nt, Human
gagggcuggaaucuggagag

SEQ ID NO: 3634727 - RNA, 21 nt, Human
gagggcuggaaucuggagagc

SEQ ID NO: 3634728 - RNA, 19 nt, Human
gagggcuggaggcccaggc

SEQ ID NO: 3634729 - RNA, 23 nt, Human
gagggcuggaggcccaggcuggg

SEQ ID NO: 3634730 - RNA, 14 nt, Human
gagggcuggcuggc

SEQ ID NO: 3634731 - RNA, 18 nt, Human
gaggggaaaggggagagg

SEQ ID NO: 3634732 - RNA, 16 nt, Human
gaggggaacacugccc

SEQ ID NO: 3634733 - RNA, 17 nt, Human
gaggggaacacugcccu

SEQ ID NO: 3634734 - RNA, 12 nt, Human
gaggggaacaga

SEQ ID NO: 3634735 - RNA, 23 nt, Human
gaggggaagaaacacuuucucuu

SEQ ID NO: 3634736 - RNA, 15 nt, Human
gaggggaagaggccu

SEQ ID NO: 3634737 - RNA, 16 nt, Human
gaggggaagcugcagc

SEQ ID NO: 3634738 - RNA, 19 nt, Human
gaggggaagcugcagcuug

SEQ ID NO: 3634739 - RNA, 15 nt, Human
gaggggaagggccag

SEQ ID NO: 3634740 - RNA, 16 nt, Human
gaggggaaggggcggu

SEQ ID NO: 3634741 - RNA, 18 nt, Human
gaggggaauaauagaaga

SEQ ID NO: 3634742 - RNA, 19 nt, Human
gaggggaauaauagaagaa

SEQ ID NO: 3634743 - RNA, 15 nt, Human
gaggggaccaggagu

SEQ ID NO: 3634744 - RNA, 17 nt, Human
gaggggaccaggagugg

SEQ ID NO: 3634745 - RNA, 12 nt, Human
gaggggacucug

SEQ ID NO: 3634746 - RNA, 12 nt, Human
gaggggagaagc

SEQ ID NO: 3634747 - RNA, 11 nt, Human
gaggggagagg

SEQ ID NO: 3634748 - RNA, 18 nt, Human
gaggggcaacgaagaaaa

SEQ ID NO: 3634749 - RNA, 16 nt, Human
gaggggcagagccagg

SEQ ID NO: 3634750 - RNA, 20 nt, Human
gaggggcagagccaggaaga

SEQ ID NO: 3634751 - RNA, 23 nt, Human
gaggggcagauggaaaggagccu

SEQ ID NO: 3634752 - RNA, 17 nt, Human
gaggggcaggcccugca

SEQ ID NO: 3634753 - RNA, 23 nt, Human
gaggggcaggcccugcacugucc

SEQ ID NO: 3634754 - RNA, 15 nt, Human
gaggggcagguaaac

SEQ ID NO: 3634755 - RNA, 19 nt, Human
gaggggcauggccagcagc

SEQ ID NO: 3634756 - RNA, 23 nt, Human
gaggggccuaggccucagccaga

SEQ ID NO: 3634757 - RNA, 22 nt, Human
gaggggccugccaccuggaccc

SEQ ID NO: 3634758 - RNA, 14 nt, Human
gaggggccuggcag

SEQ ID NO: 3634759 - RNA, 18 nt, Human
gaggggccuggcagccgu

SEQ ID NO: 3634760 - RNA, 20 nt, Human
gaggggccuggcagccgugc

SEQ ID NO: 3634761 - RNA, 17 nt, Human
gaggggcgcuggcccag

SEQ ID NO: 3634762 - RNA, 21 nt, Human
gaggggcggcaggagggaggu

SEQ ID NO: 3634763 - RNA, 15 nt, Human
gaggggcucaggaaa

SEQ ID NO: 3634764 - RNA, 15 nt, Human
gaggggcuccuggaa

SEQ ID NO: 3634765 - RNA, 12 nt, Human
gaggggcucuca

SEQ ID NO: 3634766 - RNA, 19 nt, Human
gaggggcucucagcucagc

SEQ ID NO: 3634767 - RNA, 20 nt, Human
gagggggacugcugcugccu

SEQ ID NO: 3634768 - RNA, 13 nt, Human
gagggggcaaagg

SEQ ID NO: 3634769 - RNA, 14 nt, Human
gagggggccgggcg

SEQ ID NO: 3634770 - RNA, 21 nt, Human
gagggggcuugaagccaaaga

SEQ ID NO: 3634771 - RNA, 22 nt, Human
gaggggggaggugggauccucc

SEQ ID NO: 3634772 - RNA, 19 nt, Human
gaggggggauuuccagcca

SEQ ID NO: 3634773 - RNA, 18 nt, Human
gagggggucguggagagc

SEQ ID NO: 3634774 - RNA, 21 nt, Human
gagggggugaccuccggccag

SEQ ID NO: 3634775 - RNA, 14 nt, Human
gaggggguggaggg

SEQ ID NO: 3634776 - RNA, 15 nt, Human
gaggggguggccucc

SEQ ID NO: 3634777 - RNA, 17 nt, Human
gaggggguggccuccca

SEQ ID NO: 3634778 - RNA, 20 nt, Human
gaggggguuacaaacugcaa

SEQ ID NO: 3634779 - RNA, 20 nt, Human
gaguggaggugggcugggcc

SEQ ID NO: 3634780 - RNA, 19 nt, Human
gaguggagucugccaccca

SEQ ID NO: 3634781 - RNA, 21 nt, Human
gaguggagucugccacccagg

SEQ ID NO: 3634782 - RNA, 17 nt, Human
gaguggaguuacugaac

SEQ ID NO: 3634783 - RNA, 17 nt, Human
gaguggaucuccaagga

SEQ ID NO: 3634784 - RNA, 22 nt, Human
gaguggcagcccagccagcguc

SEQ ID NO: 3634785 - RNA, 19 nt, Human
gaguggcaggggacaggag

SEQ ID NO: 3634786 - RNA, 23 nt, Human
gaguggcaggggacaggagucca

SEQ ID NO: 3634787 - RNA, 20 nt, Human
gaguggcauggccaccacca

SEQ ID NO: 3634788 - RNA, 18 nt, Human
gaguggcauuggcagcag

SEQ ID NO: 3634789 - RNA, 11 nt, Human
gaguggccacu

SEQ ID NO: 3634790 - RNA, 20 nt, Human
gaguggccccaccuggcccu

SEQ ID NO: 3634791 - RNA, 10 nt, Human
gaguggccug

SEQ ID NO: 3634792 - RNA, 15 nt, Human
gaguggccuggccag

SEQ ID NO: 3634793 - RNA, 20 nt, Human
gaguggccuggccaggagcu

SEQ ID NO: 3634794 - RNA, 13 nt, Human
gaguggcuggggc

SEQ ID NO: 3634795 - RNA, 14 nt, Human
gaguggcuggggca

SEQ ID NO: 3634796 - RNA, 17 nt, Human
gagugggaaggacuugg

SEQ ID NO: 3634797 - RNA, 17 nt, Human
gagugggacagagucug

SEQ ID NO: 3634798 - RNA, 18 nt, Human
gagugggacagagucugg

SEQ ID NO: 3634799 - RNA, 19 nt, Human
gagugggagaaggcaguga

SEQ ID NO: 3634800 - RNA, 13 nt, Human
gagugggcagagc

SEQ ID NO: 3634801 - RNA, 12 nt, Human
gagugggcccaa

SEQ ID NO: 3634802 - RNA, 14 nt, Human
gaguggggcaguag

SEQ ID NO: 3634803 - RNA, 22 nt, Human
gagugggggagagcaggcuggc

SEQ ID NO: 3634804 - RNA, 21 nt, Human
gagugggugacaagagccuga

SEQ ID NO: 3634805 - RNA, 15 nt, Human
gaguggguggaggca

SEQ ID NO: 3634806 - RNA, 14 nt, Human
gaguggguggggag

SEQ ID NO: 3634807 - RNA, 15 nt, Human
gaguggguugauuuc

SEQ ID NO: 3634808 - RNA, 15 nt, Human
gaguggugcagacag

SEQ ID NO: 3634809 - RNA, 21 nt, Human
gagugguuuuucuuuucuugg

SEQ ID NO: 3634810 - RNA, 14 nt, Human
gaguguaaguguga

SEQ ID NO: 3634811 - RNA, 11 nt, Human
gaguguagaag

SEQ ID NO: 3634812 - RNA, 14 nt, Human
gaguguagaagcau

SEQ ID NO: 3634813 - RNA, 16 nt, Human
gaguguagaagcauuc

SEQ ID NO: 3634814 - RNA, 23 nt, Human
gaguguccuaggaguauccucau

SEQ ID NO: 3634815 - RNA, 15 nt, Human
gagugucuuuccacg

SEQ ID NO: 3634816 - RNA, 17 nt, Human
gagugugacagggccag

SEQ ID NO: 3634817 - RNA, 12 nt, Human
gagugugaccaa

SEQ ID NO: 3634818 - RNA, 20 nt, Human
gagugugcauggaggcccuc

SEQ ID NO: 3634819 - RNA, 23 nt, Human
gagugugcgugguggucccuggg

SEQ ID NO: 3634820 - RNA, 12 nt, Human
gagugugcugcu

SEQ ID NO: 3634821 - RNA, 14 nt, Human
gagugugcuggagg

SEQ ID NO: 3634822 - RNA, 18 nt, Human
gagugugcuggaggacug

SEQ ID NO: 3634823 - RNA, 17 nt, Human
gaguguggcuccccucu

SEQ ID NO: 3634824 - RNA, 12 nt, Human
gagugugggaag

SEQ ID NO: 3634825 - RNA, 15 nt, Human
gagugugguuucuuu

SEQ ID NO: 3634826 - RNA, 16 nt, Human
gaguguguauuguucc

SEQ ID NO: 3634827 - RNA, 11 nt, Human
gagugugugca

SEQ ID NO: 3634828 - RNA, 10 nt, Human
gagugugugu

SEQ ID NO: 3634829 - RNA, 17 nt, Human
gaguguguuugucaccg

SEQ ID NO: 3634830 - RNA, 12 nt, Human
gaguguugaaac

SEQ ID NO: 3634831 - RNA, 22 nt, Human
gaguguugggcaugugaucacg

SEQ ID NO: 3634832 - RNA, 22 nt, Human
gaguguuucuaauaaacuugga

SEQ ID NO: 3634833 - RNA, 14 nt, Human
gaguuaagaagcug

SEQ ID NO: 3634834 - RNA, 13 nt, Human
gaguuaagaccug

SEQ ID NO: 3634835 - RNA, 13 nt, Human
gaguuaagguggg

SEQ ID NO: 3634836 - RNA, 13 nt, Human
gaguuaagucuau

SEQ ID NO: 3634837 - RNA, 15 nt, Human
gaguuacagccuggg

SEQ ID NO: 3634838 - RNA, 20 nt, Human
gaguuacagcgagaggcaga

SEQ ID NO: 3634839 - RNA, 14 nt, Human
gaguuacaguucug

SEQ ID NO: 3634840 - RNA, 16 nt, Human
gaguuagaauaauaaa

SEQ ID NO: 3634841 - RNA, 22 nt, Human
gaguuagaauaauaaauauuua

SEQ ID NO: 3634842 - RNA, 14 nt, Human
gaguuagacuguug

SEQ ID NO: 3634843 - RNA, 18 nt, Human
gaguuagaggccagccug

SEQ ID NO: 3634844 - RNA, 18 nt, Human
gaguuaggcuauucacaa

SEQ ID NO: 3634845 - RNA, 19 nt, Human
gaguuagggacugaccagc

SEQ ID NO: 3634846 - RNA, 19 nt, Human
gaguuagguuuaacauaaa

SEQ ID NO: 3634847 - RNA, 18 nt, Human
gaguuaguuucuuuggga

SEQ ID NO: 3634848 - RNA, 18 nt, Human
gaguuauauguucacugu

SEQ ID NO: 3634849 - RNA, 18 nt, Human
gaguuaucaugaauuuua

SEQ ID NO: 3634850 - RNA, 18 nt, Human
gaguuaucuaaaagaaau

SEQ ID NO: 3634851 - RNA, 22 nt, Human
gaguuaucuaagaauacagcuu

SEQ ID NO: 3634852 - RNA, 17 nt, Human
gaguuauugaagcagag

SEQ ID NO: 3634853 - RNA, 14 nt, Human
gaguuauugagauu

SEQ ID NO: 3634854 - RNA, 19 nt, Human
gaguucaaugaucuagguu

SEQ ID NO: 3634855 - RNA, 21 nt, Human
gaguucaaugaucuagguuua

SEQ ID NO: 3634856 - RNA, 16 nt, Human
gaguucaauggcugcu

SEQ ID NO: 3634857 - RNA, 22 nt, Human
gaguucacuucaucuucucagc

SEQ ID NO: 3634858 - RNA, 13 nt, Human
gaguucaucccag

SEQ ID NO: 3634859 - RNA, 23 nt, Human
gaguucaucuugaauuguaagga

SEQ ID NO: 3634860 - RNA, 16 nt, Human
gaguucauucauauua

SEQ ID NO: 3634861 - RNA, 16 nt, Human
gaguuccacagauugu

SEQ ID NO: 3634862 - RNA, 22 nt, Human
gaguucccuugaaacuuuggga

SEQ ID NO: 3634863 - RNA, 17 nt, Human
gaguucgagaccagccu

SEQ ID NO: 3634864 - RNA, 18 nt, Human
gaguucggcucugggugg

SEQ ID NO: 3634865 - RNA, 14 nt, Human
gaguucucagggcu

SEQ ID NO: 3634866 - RNA, 15 nt, Human
gaguucucagggcuc

SEQ ID NO: 3634867 - RNA, 21 nt, Human
gaguucugcucauucuaauga

SEQ ID NO: 3634868 - RNA, 12 nt, Human
gaguucugcuga

SEQ ID NO: 3634869 - RNA, 13 nt, Human
gaguucugguucc

SEQ ID NO: 3634870 - RNA, 21 nt, Human
gaguucuuaaggauugugaua

SEQ ID NO: 3634871 - RNA, 21 nt, Human
gaguucuuccuguaaucuugu

SEQ ID NO: 3634872 - RNA, 14 nt, Human
gaguugaagacaga

SEQ ID NO: 3634873 - RNA, 23 nt, Human
gaguugacuugacagaacacugu

SEQ ID NO: 3634874 - RNA, 12 nt, Human
gaguugaggcca

SEQ ID NO: 3634875 - RNA, 21 nt, Human
gaguugauagcacagacccug

SEQ ID NO: 3634876 - RNA, 22 nt, Human
gaguugauagcacagacccugc

SEQ ID NO: 3634877 - RNA, 14 nt, Human
gaguugaucuggaa

SEQ ID NO: 3634878 - RNA, 17 nt, Human
gaguugaucuggaaccc

SEQ ID NO: 3634879 - RNA, 17 nt, Human
gaguugauucagcucug

SEQ ID NO: 3634880 - RNA, 17 nt, Human
gaguuggaguagaaugu

SEQ ID NO: 3634881 - RNA, 13 nt, Human
gaguuggcuggga

SEQ ID NO: 3634882 - RNA, 16 nt, Human
gaguuguuacauuuuu

SEQ ID NO: 3634883 - RNA, 20 nt, Human
gaguuguuacauuuuuaagu

SEQ ID NO: 3634884 - RNA, 15 nt, Human
gaguuguugcccugg

SEQ ID NO: 3634885 - RNA, 22 nt, Human
gaguuguuuucagacucagacu

SEQ ID NO: 3634886 - RNA, 21 nt, Human
gaguuuaaaaaugguaucaaa

SEQ ID NO: 3634887 - RNA, 17 nt, Human
gaguuuaagaccagccu

SEQ ID NO: 3634888 - RNA, 16 nt, Human
gaguuuagcuggaaaa

SEQ ID NO: 3634889 - RNA, 15 nt, Human
gaguuuagggugggg

SEQ ID NO: 3634890 - RNA, 18 nt, Human
gaguuucauguacaagau

SEQ ID NO: 3634891 - RNA, 15 nt, Human
gaguuuccucaggcu

SEQ ID NO: 3634892 - RNA, 16 nt, Human
gaguuuccucaggcug

SEQ ID NO: 3634893 - RNA, 14 nt, Human
gaguuuccuuuucu

SEQ ID NO: 3634894 - RNA, 12 nt, Human
gaguuucuguuu

SEQ ID NO: 3634895 - RNA, 14 nt, Human
gaguuugccuuccu

SEQ ID NO: 3634896 - RNA, 13 nt, Human
gaguuuggccaga

SEQ ID NO: 3634897 - RNA, 23 nt, Human
gaguuuguagguaaaauguauuu

SEQ ID NO: 3634898 - RNA, 14 nt, Human
gaguuuguuucuuu

SEQ ID NO: 3634899 - RNA, 18 nt, Human
gaguuuguuucuuugaau

SEQ ID NO: 3634900 - RNA, 16 nt, Human
gaguuuucauuaaauc

SEQ ID NO: 3634901 - RNA, 13 nt, Human
gaguuuuccccac

SEQ ID NO: 3634902 - RNA, 14 nt, Human
gaguuuucuuccuu

SEQ ID NO: 3634903 - RNA, 22 nt, Human
gaguuuuguguuuguuguagau

SEQ ID NO: 3634904 - RNA, 13 nt, Human
gaguuuuguuuua

SEQ ID NO: 3634905 - RNA, 19 nt, Human
gaguuuuguuuuaaaauua

SEQ ID NO: 3634906 - RNA, 16 nt, Human
gaguuuuuaauagaac

SEQ ID NO: 3634907 - RNA, 22 nt, Human
gaguuuuucccagcuacaccuu

SEQ ID NO: 3634908 - RNA, 19 nt, Human
gaguuuuuguuuggagagc

SEQ ID NO: 3634909 - RNA, 16 nt, Human
gaguuuuuuguaccaa

SEQ ID NO: 3634910 - RNA, 14 nt, Human
gauaaaaaauuuug

SEQ ID NO: 3634911 - RNA, 19 nt, Human
gauaaaaaauuuuguaauu

SEQ ID NO: 3634912 - RNA, 14 nt, Human
gauaaaaagauggc

SEQ ID NO: 3634913 - RNA, 21 nt, Human
gauaaaacaucuuugaaauua

SEQ ID NO: 3634914 - RNA, 13 nt, Human
gauaaaagauggc

SEQ ID NO: 3634915 - RNA, 21 nt, Human
gauaaaauaaugcugcaaacu

SEQ ID NO: 3634916 - RNA, 19 nt, Human
gauaaaaucauaaguauuu

SEQ ID NO: 3634917 - RNA, 13 nt, Human
gauaaagauugug

SEQ ID NO: 3634918 - RNA, 17 nt, Human
gauaaagauuuuuuaau

SEQ ID NO: 3634919 - RNA, 21 nt, Human
gauaaagcugccccaucuggg

SEQ ID NO: 3634920 - RNA, 15 nt, Human
gauaaaguuucucag

SEQ ID NO: 3634921 - RNA, 16 nt, Human
gauaaauaacuuuuuu

SEQ ID NO: 3634922 - RNA, 21 nt, Human
gauaaauaacuuuuuuuuaag

SEQ ID NO: 3634923 - RNA, 16 nt, Human
gauaaauacaaggccc

SEQ ID NO: 3634924 - RNA, 12 nt, Human
gauaaauauuca

SEQ ID NO: 3634925 - RNA, 23 nt, Human
gcaauuuaauauuuugcacaguu

SEQ ID NO: 3634926 - RNA, 16 nt, Human
gcaauuuauacaauau

SEQ ID NO: 3634927 - RNA, 23 nt, Human
gcaauuucaaauuacucuuucuc

SEQ ID NO: 3634928 - RNA, 16 nt, Human
gcaauuucccccuaaa

SEQ ID NO: 3634929 - RNA, 17 nt, Human
gcaauuucuaauuuuua

SEQ ID NO: 3634930 - RNA, 19 nt, Human
gcaauuucuaauuuuuaag

SEQ ID NO: 3634931 - RNA, 22 nt, Human
gcaauuucuaauuuuuaagaau

SEQ ID NO: 3634932 - RNA, 23 nt, Human
gcaauuuuaacacacauaaagga

SEQ ID NO: 3634933 - RNA, 19 nt, Human
gcaauuuuaauugauuauu

SEQ ID NO: 3634934 - RNA, 11 nt, Human
gcaauuuuccu

SEQ ID NO: 3634935 - RNA, 14 nt, Human
gcaauuuuccuuga

SEQ ID NO: 3634936 - RNA, 20 nt, Human
gcaauuuuccuugaagccga

SEQ ID NO: 3634937 - RNA, 12 nt, Human
gcaauuuugugg

SEQ ID NO: 3634938 - RNA, 13 nt, Human
gcacaaaacccag

SEQ ID NO: 3634939 - RNA, 23 nt, Human
gcacaaaacccagaccuguuagc

SEQ ID NO: 3634940 - RNA, 21 nt, Human
gcacaaaauauaaagcaucua

SEQ ID NO: 3634941 - RNA, 11 nt, Human
gcacaaaauga

SEQ ID NO: 3634942 - RNA, 23 nt, Human
gcacaaaaugauggacccaaugc

SEQ ID NO: 3634943 - RNA, 14 nt, Human
gcacaaacacaagg

SEQ ID NO: 3634944 - RNA, 16 nt, Human
gcacaaacacaagguc

SEQ ID NO: 3634945 - RNA, 14 nt, Human
gcacaaacauuuuu

SEQ ID NO: 3634946 - RNA, 16 nt, Human
gcacaaacauuuuuca

SEQ ID NO: 3634947 - RNA, 15 nt, Human
gcacaaauauuuauu

SEQ ID NO: 3634948 - RNA, 23 nt, Human
gcacaaauucugucucuggauua

SEQ ID NO: 3634949 - RNA, 19 nt, Human
gcacaaccuucaagcugcu

SEQ ID NO: 3634950 - RNA, 22 nt, Human
gcacaacugcaauaacuucuga

SEQ ID NO: 3634951 - RNA, 17 nt, Human
gcacaagaaucacuuga

SEQ ID NO: 3634952 - RNA, 19 nt, Human
gcacaagaaucacuugaac

SEQ ID NO: 3634953 - RNA, 15 nt, Human
gcacaagaauggauc

SEQ ID NO: 3634954 - RNA, 14 nt, Human
gcacaagcagagug

SEQ ID NO: 3634955 - RNA, 22 nt, Human
gcacaagcagagugcacagcug

SEQ ID NO: 3634956 - RNA, 23 nt, Human
gcacaagcagagugcacagcugu

SEQ ID NO: 3634957 - RNA, 17 nt, Human
gcacaagcuccaagcuc

SEQ ID NO: 3634958 - RNA, 21 nt, Human
gcacaagcuccaagcucccag

SEQ ID NO: 3634959 - RNA, 14 nt, Human
gcacaagcugcacc

SEQ ID NO: 3634960 - RNA, 18 nt, Human
gcacaaggauugaaaauu

SEQ ID NO: 3634961 - RNA, 19 nt, Human
gcacaaggcugaccaagag

SEQ ID NO: 3634962 - RNA, 14 nt, Human
gcacaaguguaaug

SEQ ID NO: 3634963 - RNA, 19 nt, Human
gcacaauaaauggcuguaa

SEQ ID NO: 3634964 - RNA, 20 nt, Human
gcacaauaacuccucccagg

SEQ ID NO: 3634965 - RNA, 22 nt, Human
gcacaauaacuccucccagggu

SEQ ID NO: 3634966 - RNA, 19 nt, Human
gcacaauguagauaagugu

SEQ ID NO: 3634967 - RNA, 14 nt, Human
gcacaauucuguuu

SEQ ID NO: 3634968 - RNA, 12 nt, Human
gcacaauuugca

SEQ ID NO: 3634969 - RNA, 14 nt, Human
gcacacaaauauua

SEQ ID NO: 3634970 - RNA, 21 nt, Human
gcacacaaggggcccuuggag

SEQ ID NO: 3634971 - RNA, 18 nt, Human
gcacacaauuagauuucu

SEQ ID NO: 3634972 - RNA, 14 nt, Human
gcacacacacacau

SEQ ID NO: 3634973 - RNA, 22 nt, Human
gcacacaccaccacgccuggcu

SEQ ID NO: 3634974 - RNA, 14 nt, Human
gcacacaccagagc

SEQ ID NO: 3634975 - RNA, 16 nt, Human
gcacacaccagagccc

SEQ ID NO: 3634976 - RNA, 18 nt, Human
gcacacaccagagcccac

SEQ ID NO: 3634977 - RNA, 19 nt, Human
gcacacaccagagcccacc

SEQ ID NO: 3634978 - RNA, 20 nt, Human
gcacacaccagagcccaccu

SEQ ID NO: 3634979 - RNA, 12 nt, Human
gcacacacugug

SEQ ID NO: 3634980 - RNA, 18 nt, Human
gcacacagaaauauauau

SEQ ID NO: 3634981 - RNA, 20 nt, Human
gcacacagaaauauauauac

SEQ ID NO: 3634982 - RNA, 11 nt, Human
gcacacagcac

SEQ ID NO: 3634983 - RNA, 23 nt, Human
gcacacagcacgggggccaagga

SEQ ID NO: 3634984 - RNA, 13 nt, Human
gcacacagggcag

SEQ ID NO: 3634985 - RNA, 15 nt, Human
gcacacaucaucugu

SEQ ID NO: 3634986 - RNA, 17 nt, Human
gcacacaucaucuguaa

SEQ ID NO: 3634987 - RNA, 20 nt, Human
gcacacaucaucuguaagcu

SEQ ID NO: 3634988 - RNA, 17 nt, Human
gcacaccaaucuuacuu

SEQ ID NO: 3634989 - RNA, 17 nt, Human
gcacacccacucagcuc

SEQ ID NO: 3634990 - RNA, 18 nt, Human
gcacacccacucagcucc

SEQ ID NO: 3634991 - RNA, 17 nt, Human
gcacacccucacucugc

SEQ ID NO: 3634992 - RNA, 23 nt, Human
gcacacccucacucugccagggc

SEQ ID NO: 3634993 - RNA, 20 nt, Human
gcacaccgggcacucagaag

SEQ ID NO: 3634994 - RNA, 12 nt, Human
gcacacgcugcu

SEQ ID NO: 3634995 - RNA, 13 nt, Human
gcacacgcugcuc

SEQ ID NO: 3634996 - RNA, 17 nt, Human
gcacacgcugcucugcc

SEQ ID NO: 3634997 - RNA, 15 nt, Human
gcacacuccccugca

SEQ ID NO: 3634998 - RNA, 19 nt, Human
gcacacucugccagcaaag

SEQ ID NO: 3634999 - RNA, 20 nt, Human
gcacacucugccagcaaaga

SEQ ID NO: 3635000 - RNA, 13 nt, Human
gcacacuggcuca

SEQ ID NO: 3635001 - RNA, 22 nt, Human
gcacacuggcucacccaguccu

SEQ ID NO: 3635002 - RNA, 14 nt, Human
gcacacuuggccca

SEQ ID NO: 3635003 - RNA, 20 nt, Human
gcacacuuugcacugauaua

SEQ ID NO: 3635004 - RNA, 13 nt, Human
gcacacuuugcca

SEQ ID NO: 3635005 - RNA, 22 nt, Human
gcacacuuugccauauuuucac

SEQ ID NO: 3635006 - RNA, 16 nt, Human
gcacacuuuggcccag

SEQ ID NO: 3635007 - RNA, 21 nt, Human
gcacacuuugguaccagauaa

SEQ ID NO: 3635008 - RNA, 13 nt, Human
gcacagaaaacua

SEQ ID NO: 3635009 - RNA, 21 nt, Human
gcacagaaaauggaagacagc

SEQ ID NO: 3635010 - RNA, 16 nt, Human
gcacagaaguccugua

SEQ ID NO: 3635011 - RNA, 14 nt, Human
gcacagaauauuuu

SEQ ID NO: 3635012 - RNA, 22 nt, Human
gcacagacagguuuucacauaa

SEQ ID NO: 3635013 - RNA, 14 nt, Human
gcacagacccugcc

SEQ ID NO: 3635014 - RNA, 17 nt, Human
gcacagacccugcccug

SEQ ID NO: 3635015 - RNA, 22 nt, Human
gcacagacccugcccugugggc

SEQ ID NO: 3635016 - RNA, 23 nt, Human
gcacagagagggggccaccuccc

SEQ ID NO: 3635017 - RNA, 17 nt, Human
gcacagagcucuccagc

SEQ ID NO: 3635018 - RNA, 15 nt, Human
gcacagaguuguuac

SEQ ID NO: 3635019 - RNA, 19 nt, Human
gcacagaguuguuacauuu

SEQ ID NO: 3635020 - RNA, 19 nt, Human
gcacagauaaaaaguggaa

SEQ ID NO: 3635021 - RNA, 19 nt, Human
gcacagauauacuuugugg

SEQ ID NO: 3635022 - RNA, 17 nt, Human
gcacagaugcuccaggg

SEQ ID NO: 3635023 - RNA, 22 nt, Human
gcacagauggauuugccugugc

SEQ ID NO: 3635024 - RNA, 23 nt, Human
gcacagauggauuuguuuggacc

SEQ ID NO: 3635025 - RNA, 19 nt, Human
gcacagauggccagccccu

SEQ ID NO: 3635026 - RNA, 23 nt, Human
gcacagauggccagccccuuaga

SEQ ID NO: 3635027 - RNA, 23 nt, Human
gcacagcaaggaggcuggcuggg

SEQ ID NO: 3635028 - RNA, 22 nt, Human
gcacagcacaaauuaguuauau

SEQ ID NO: 3635029 - RNA, 12 nt, Human
gcacagcagccu

SEQ ID NO: 3635030 - RNA, 13 nt, Human
gcacagcaguucc

SEQ ID NO: 3635031 - RNA, 16 nt, Human
gcacagcaguuccgga

SEQ ID NO: 3635032 - RNA, 18 nt, Human
gcacagcaucucagcuca

SEQ ID NO: 3635033 - RNA, 22 nt, Human
gcacagcaugagaggcucugug

SEQ ID NO: 3635034 - RNA, 13 nt, Human
gcacagcccuccc

SEQ ID NO: 3635035 - RNA, 19 nt, Human
gcacagcccucccgccccu

SEQ ID NO: 3635036 - RNA, 23 nt, Human
gcacagccggggccugccuagca

SEQ ID NO: 3635037 - RNA, 15 nt, Human
gcacagccucuuaga

SEQ ID NO: 3635038 - RNA, 20 nt, Human
gcacagccucuuagaugcag

SEQ ID NO: 3635039 - RNA, 12 nt, Human
gcacagccuggc

SEQ ID NO: 3635040 - RNA, 19 nt, Human
gcacagccuggcuguggcc

SEQ ID NO: 3635041 - RNA, 13 nt, Human
gcacagcuaugaa

SEQ ID NO: 3635042 - RNA, 16 nt, Human
gcacagcuaugaaggc

SEQ ID NO: 3635043 - RNA, 15 nt, Human
gcacagcucaggagg

SEQ ID NO: 3635044 - RNA, 23 nt, Human
gcacagcucccugccaaacugaa

SEQ ID NO: 3635045 - RNA, 20 nt, Human
gcacagcucccuucuguuga

SEQ ID NO: 3635046 - RNA, 14 nt, Human
gcacagcugcucug

SEQ ID NO: 3635047 - RNA, 14 nt, Human
gcacagcuguggug

SEQ ID NO: 3635048 - RNA, 16 nt, Human
gcacagcuucauuucc

SEQ ID NO: 3635049 - RNA, 18 nt, Human
gcacagcuugaccugagg

SEQ ID NO: 3635050 - RNA, 22 nt, Human
gcacagcuugaccugaggcugu

SEQ ID NO: 3635051 - RNA, 15 nt, Human
gcacaggaaaaggua

SEQ ID NO: 3635052 - RNA, 18 nt, Human
gcacaggaaaagguagcu

SEQ ID NO: 3635053 - RNA, 21 nt, Human
gcacaggacugauucugggau

SEQ ID NO: 3635054 - RNA, 15 nt, Human
gcacaggagcuaccu

SEQ ID NO: 3635055 - RNA, 20 nt, Human
gcacaggagcuaccugugug

SEQ ID NO: 3635056 - RNA, 20 nt, Human
gcacaggaguguccucuucc

SEQ ID NO: 3635057 - RNA, 17 nt, Human
gcacaggaugcuggccu

SEQ ID NO: 3635058 - RNA, 14 nt, Human
gcacaggcagcugg

SEQ ID NO: 3635059 - RNA, 13 nt, Human
gcacaggcagggc

SEQ ID NO: 3635060 - RNA, 21 nt, Human
gcacaggcagggcaggaccag

SEQ ID NO: 3635061 - RNA, 13 nt, Human
gcacaggcugagu

SEQ ID NO: 3635062 - RNA, 21 nt, Human
gcacaggcugagugcaggccc

SEQ ID NO: 3635063 - RNA, 22 nt, Human
gcacaggcugagugcaggccca

SEQ ID NO: 3635064 - RNA, 23 nt, Human
gcacaggcugagugcaggcccac

SEQ ID NO: 3635065 - RNA, 22 nt, Human
gcacagggagugcacauaucca

SEQ ID NO: 3635066 - RNA, 16 nt, Human
gcacagggcagcuggg

SEQ ID NO: 3635067 - RNA, 16 nt, Human
gcacagggcaugaaau

SEQ ID NO: 3635068 - RNA, 21 nt, Human
gcacaggucaggggugacaca

SEQ ID NO: 3635069 - RNA, 21 nt, Human
gcacugccugcucccauccug

SEQ ID NO: 3635070 - RNA, 22 nt, Human
gcacugcuaggcgagugccagg

SEQ ID NO: 3635071 - RNA, 15 nt, Human
gcacugcucucaccu

SEQ ID NO: 3635072 - RNA, 15 nt, Human
gcacugcugcccagc

SEQ ID NO: 3635073 - RNA, 13 nt, Human
gcacugcugggug

SEQ ID NO: 3635074 - RNA, 14 nt, Human
gcacugcugggugg

SEQ ID NO: 3635075 - RNA, 22 nt, Human
gcacugcuggguggcccauccc

SEQ ID NO: 3635076 - RNA, 22 nt, Human
gcacugcugugcugugcccaag

SEQ ID NO: 3635077 - RNA, 14 nt, Human
gcacugcuuccagu

SEQ ID NO: 3635078 - RNA, 15 nt, Human
gcacugcuuccagug

SEQ ID NO: 3635079 - RNA, 17 nt, Human
gcacugcuugaggaaaa

SEQ ID NO: 3635080 - RNA, 15 nt, Human
gcacuggagugcagg

SEQ ID NO: 3635081 - RNA, 19 nt, Human
gcacuggcauugucccugu

SEQ ID NO: 3635082 - RNA, 15 nt, Human
gcacuggcgaggaga

SEQ ID NO: 3635083 - RNA, 15 nt, Human
gcacugggaucacag

SEQ ID NO: 3635084 - RNA, 22 nt, Human
gcacugggcuuggggaccagag

SEQ ID NO: 3635085 - RNA, 23 nt, Human
gcacugggcuuggggaccagagc

SEQ ID NO: 3635086 - RNA, 18 nt, Human
gcacuggggagcccgucu

SEQ ID NO: 3635087 - RNA, 22 nt, Human
gcacuggggagcccgucucagu

SEQ ID NO: 3635088 - RNA, 23 nt, Human
gcacuggggagcccgucucagug

SEQ ID NO: 3635089 - RNA, 23 nt, Human
gcacugguagguugggacaccag

SEQ ID NO: 3635090 - RNA, 17 nt, Human
gcacugguuuguucccu

SEQ ID NO: 3635091 - RNA, 9 nt, Human
gcacuguaa

SEQ ID NO: 3635092 - RNA, 13 nt, Human
gcacuguaaaaug

SEQ ID NO: 3635093 - RNA, 16 nt, Human
gcacuguaaaaugugg

SEQ ID NO: 3635094 - RNA, 23 nt, Human
gcacuguaaaaugugggauuaug

SEQ ID NO: 3635095 - RNA, 21 nt, Human
gcacuguacaaaaaaaucuuc

SEQ ID NO: 3635096 - RNA, 18 nt, Human
gcacuguaguucuaagac

SEQ ID NO: 3635097 - RNA, 19 nt, Human
gcacuguaguucuaagacu

SEQ ID NO: 3635098 - RNA, 15 nt, Human
gcacugucaagauga

SEQ ID NO: 3635099 - RNA, 21 nt, Human
gcacugucacuuugcucuggg

SEQ ID NO: 3635100 - RNA, 15 nt, Human
gcacuguccugcucc

SEQ ID NO: 3635101 - RNA, 19 nt, Human
gcacuguccugcuccacag

SEQ ID NO: 3635102 - RNA, 19 nt, Human
gcacugucucaguuucacu

SEQ ID NO: 3635103 - RNA, 16 nt, Human
gcacugucuuaaggca

SEQ ID NO: 3635104 - RNA, 16 nt, Human
gcacugugaaggaccc

SEQ ID NO: 3635105 - RNA, 14 nt, Human
gcacugugcuaaua

SEQ ID NO: 3635106 - RNA, 18 nt, Human
gcacugugcucagggcua

SEQ ID NO: 3635107 - RNA, 18 nt, Human
gcacuguggauuauuuca

SEQ ID NO: 3635108 - RNA, 13 nt, Human
gcacuguggccuu

SEQ ID NO: 3635109 - RNA, 19 nt, Human
gcacuguggguagacacac

SEQ ID NO: 3635110 - RNA, 21 nt, Human
gcacuguuccagccugcccuc

SEQ ID NO: 3635111 - RNA, 23 nt, Human
gcacuguuuucuaguguaucaaa

SEQ ID NO: 3635112 - RNA, 14 nt, Human
gcacuguuuuucca

SEQ ID NO: 3635113 - RNA, 22 nt, Human
gcacuuaaauaucaaucauuuu

SEQ ID NO: 3635114 - RNA, 22 nt, Human
gcacuuaagcacaagcagagug

SEQ ID NO: 3635115 - RNA, 18 nt, Human
gcacuuauuuaaugccga

SEQ ID NO: 3635116 - RNA, 13 nt, Human
gcacuucacagag

SEQ ID NO: 3635117 - RNA, 17 nt, Human
gcacuucaucuggcugc

SEQ ID NO: 3635118 - RNA, 12 nt, Human
gcacuucccugc

SEQ ID NO: 3635119 - RNA, 22 nt, Human
gcacuuccucucgcggcccuca

SEQ ID NO: 3635120 - RNA, 22 nt, Human
gcacuucgggaggucgaggcag

SEQ ID NO: 3635121 - RNA, 14 nt, Human
gcacuucugccuga

SEQ ID NO: 3635122 - RNA, 23 nt, Human
gcacuucuuuuucucgcuguccu

SEQ ID NO: 3635123 - RNA, 22 nt, Human
gcacuugcacgcccauguguga

SEQ ID NO: 3635124 - RNA, 15 nt, Human
gcacuugccuggguc

SEQ ID NO: 3635125 - RNA, 15 nt, Human
gcacuugcuggaaga

SEQ ID NO: 3635126 - RNA, 18 nt, Human
gcacuuggagacuuguau

SEQ ID NO: 3635127 - RNA, 13 nt, Human
gcacuuggagcca

SEQ ID NO: 3635128 - RNA, 13 nt, Human
gcacuuggcagcc

SEQ ID NO: 3635129 - RNA, 15 nt, Human
gcacuuggcugcaua

SEQ ID NO: 3635130 - RNA, 21 nt, Human
gcacuuggggcaccuugcucc

SEQ ID NO: 3635131 - RNA, 19 nt, Human
gcacuugggggcucagcaa

SEQ ID NO: 3635132 - RNA, 22 nt, Human
gcacuuggggguucaggcccgg

SEQ ID NO: 3635133 - RNA, 21 nt, Human
gcacuugucucauuuuaaugu

SEQ ID NO: 3635134 - RNA, 13 nt, Human
gcacuuuaaaaca

SEQ ID NO: 3635135 - RNA, 20 nt, Human
gcacuuuagggcuguaaaau

SEQ ID NO: 3635136 - RNA, 12 nt, Human
gcacuuuauccu

SEQ ID NO: 3635137 - RNA, 22 nt, Human
gcacuuucauugccagugucuu

SEQ ID NO: 3635138 - RNA, 23 nt, Human
gcacuuuccacuucuuccuuucu

SEQ ID NO: 3635139 - RNA, 23 nt, Human
gcacuuuccgucaacguuguacu

SEQ ID NO: 3635140 - RNA, 16 nt, Human
gcacuuucuaauguuu

SEQ ID NO: 3635141 - RNA, 17 nt, Human
gcacuuucuaauguuuc

SEQ ID NO: 3635142 - RNA, 18 nt, Human
gcacuuugaaauaccuca

SEQ ID NO: 3635143 - RNA, 23 nt, Human
gcacuuugacagcgcacagcugc

SEQ ID NO: 3635144 - RNA, 21 nt, Human
gcacuuugcuuuaauauaaau

SEQ ID NO: 3635145 - RNA, 17 nt, Human
gcacuuuggcuuauaau

SEQ ID NO: 3635146 - RNA, 22 nt, Human
gcacuuugggaggccgaggcgg

SEQ ID NO: 3635147 - RNA, 16 nt, Human
gcacuuugggaggcug

SEQ ID NO: 3635148 - RNA, 21 nt, Human
gcacuuugggaggcugaggcg

SEQ ID NO: 3635149 - RNA, 21 nt, Human
gcacuuugggaggcugaggug

SEQ ID NO: 3635150 - RNA, 11 nt, Human
gcacuuugggg

SEQ ID NO: 3635151 - RNA, 14 nt, Human
gcacuuuguaaauu

SEQ ID NO: 3635152 - RNA, 15 nt, Human
gcacuuuguaaauuc

SEQ ID NO: 3635153 - RNA, 18 nt, Human
gcacuuuguucuggcucu

SEQ ID NO: 3635154 - RNA, 19 nt, Human
gcacuuuguucuggcucuu

SEQ ID NO: 3635155 - RNA, 22 nt, Human
gcacuuuguucuggcucuucca

SEQ ID NO: 3635156 - RNA, 23 nt, Human
gcacuuuucuaaacuaggcuccu

SEQ ID NO: 3635157 - RNA, 16 nt, Human
gcacuuuuuaaaaaac

SEQ ID NO: 3635158 - RNA, 20 nt, Human
gcacuuuuucauuugccuau

SEQ ID NO: 3635159 - RNA, 12 nt, Human
gcagaaaacauu

SEQ ID NO: 3635160 - RNA, 21 nt, Human
gcagaaaacccuugggccaga

SEQ ID NO: 3635161 - RNA, 22 nt, Human
gcagaaaacccuugggccagaa

SEQ ID NO: 3635162 - RNA, 15 nt, Human
gcagaaaagcaccug

SEQ ID NO: 3635163 - RNA, 20 nt, Human
gcagaaaagcaccugccgac

SEQ ID NO: 3635164 - RNA, 14 nt, Human
gcagaaaauugcac

SEQ ID NO: 3635165 - RNA, 16 nt, Human
gcagaaagcagaggcu

SEQ ID NO: 3635166 - RNA, 21 nt, Human
gcagaaagcugugaacaggcu

SEQ ID NO: 3635167 - RNA, 17 nt, Human
gcagaaagggagcagag

SEQ ID NO: 3635168 - RNA, 18 nt, Human
gcagaaagguucugcccg

SEQ ID NO: 3635169 - RNA, 19 nt, Human
gcagaaagugccuuucagg

SEQ ID NO: 3635170 - RNA, 20 nt, Human
gcagaaagugccuuucagga

SEQ ID NO: 3635171 - RNA, 18 nt, Human
gcagaaauagguuagagu

SEQ ID NO: 3635172 - RNA, 15 nt, Human
gcagaaauucuguuu

SEQ ID NO: 3635173 - RNA, 13 nt, Human
gcagaacacuaac

SEQ ID NO: 3635174 - RNA, 15 nt, Human
gcagaacacuaaccu

SEQ ID NO: 3635175 - RNA, 22 nt, Human
gcagaacagugauuaccaggga

SEQ ID NO: 3635176 - RNA, 22 nt, Human
gcagaacgaaccuuggccuggg

SEQ ID NO: 3635177 - RNA, 13 nt, Human
gcagaacggagcc

SEQ ID NO: 3635178 - RNA, 24 nt, Human
gcagaacggagccccaggccucug

SEQ ID NO: 3635179 - RNA, 19 nt, Human
gcagaacuaaacucauuua

SEQ ID NO: 3635180 - RNA, 21 nt, Human
gcagaacugccauuauuuucu

SEQ ID NO: 3635181 - RNA, 23 nt, Human
gcagaacugccauuauuuucugu

SEQ ID NO: 3635182 - RNA, 16 nt, Human
gcagaagaaaggaaca

SEQ ID NO: 3635183 - RNA, 21 nt, Human
gcagaagaauugaacccagga

SEQ ID NO: 3635184 - RNA, 16 nt, Human
gcagaagacaaaaaga

SEQ ID NO: 3635185 - RNA, 15 nt, Human
gcagaagacaccaga

SEQ ID NO: 3635186 - RNA, 18 nt, Human
gcagaagacaccagagca

SEQ ID NO: 3635187 - RNA, 23 nt, Human
gcagaagacaguauggcagcuuu

SEQ ID NO: 3635188 - RNA, 14 nt, Human
gcagaagagggugu

SEQ ID NO: 3635189 - RNA, 13 nt, Human
gcagaagcauuaa

SEQ ID NO: 3635190 - RNA, 15 nt, Human
gcagaagcccugaug

SEQ ID NO: 3635191 - RNA, 13 nt, Human
gcagaagcucucg

SEQ ID NO: 3635192 - RNA, 15 nt, Human
gcagaaggaaaaaug

SEQ ID NO: 3635193 - RNA, 12 nt, Human
gcagaaggaaac

SEQ ID NO: 3635194 - RNA, 13 nt, Human
gcagaaggaagac

SEQ ID NO: 3635195 - RNA, 12 nt, Human
gcagaaggaagg

SEQ ID NO: 3635196 - RNA, 13 nt, Human
gcagaaggaaggc

SEQ ID NO: 3635197 - RNA, 15 nt, Human
gcagaaggaaggcag

SEQ ID NO: 3635198 - RNA, 22 nt, Human
gcagaaggaaggcagggaggag

SEQ ID NO: 3635199 - RNA, 20 nt, Human
gcagaagggagcuggcucca

SEQ ID NO: 3635200 - RNA, 14 nt, Human
gcagaagggggugg

SEQ ID NO: 3635201 - RNA, 15 nt, Human
gcagaaggggguggu

SEQ ID NO: 3635202 - RNA, 13 nt, Human
gcagaauaaagca

SEQ ID NO: 3635203 - RNA, 20 nt, Human
gcagaauaaagcaauuuucc

SEQ ID NO: 3635204 - RNA, 17 nt, Human
gcagaauccuggcccuc

SEQ ID NO: 3635205 - RNA, 19 nt, Human
gcagaauguaagugggccc

SEQ ID NO: 3635206 - RNA, 13 nt, Human
gcagaauucauuc

SEQ ID NO: 3635207 - RNA, 14 nt, Human
gcagaauucauuca

SEQ ID NO: 3635208 - RNA, 20 nt, Human
gcagaauuggaaaagacuaa

SEQ ID NO: 3635209 - RNA, 20 nt, Human
gcagacaauaaacccucaga

SEQ ID NO: 3635210 - RNA, 23 nt, Human
gcagacacagggacuugaaguug

SEQ ID NO: 3635211 - RNA, 19 nt, Human
gcagacacccuuggagcuc

SEQ ID NO: 3635212 - RNA, 15 nt, Human
gcagacaccuuggac

SEQ ID NO: 3635213 - RNA, 17 nt, Human
gccagauucuuuccuga

SEQ ID NO: 3635214 - RNA, 19 nt, Human
gccagauucuuuccugagg

SEQ ID NO: 3635215 - RNA, 14 nt, Human
gccagauuugucuu

SEQ ID NO: 3635216 - RNA, 22 nt, Human
gccagcaaagccccaugcugga

SEQ ID NO: 3635217 - RNA, 16 nt, Human
gccagcaacacagagc

SEQ ID NO: 3635218 - RNA, 12 nt, Human
gccagcaacgcu

SEQ ID NO: 3635219 - RNA, 15 nt, Human
gccagcaagguggag

SEQ ID NO: 3635220 - RNA, 18 nt, Human
gccagcaagguggagugg

SEQ ID NO: 3635221 - RNA, 23 nt, Human
gccagcaaugacaucucaggggc

SEQ ID NO: 3635222 - RNA, 17 nt, Human
gccagcacacagggcag

SEQ ID NO: 3635223 - RNA, 18 nt, Human
gccagcacacagggcagu

SEQ ID NO: 3635224 - RNA, 22 nt, Human
gccagcacacagggcagugagg

SEQ ID NO: 3635225 - RNA, 18 nt, Human
gccagcaccacuuccuuu

SEQ ID NO: 3635226 - RNA, 21 nt, Human
gccagcacccccacgcccuca

SEQ ID NO: 3635227 - RNA, 18 nt, Human
gccagcaccggaccagcc

SEQ ID NO: 3635228 - RNA, 20 nt, Human
gccagcaccggaccagccug

SEQ ID NO: 3635229 - RNA, 15 nt, Human
gccagcacuuguaua

SEQ ID NO: 3635230 - RNA, 16 nt, Human
gccagcacuuguauau

SEQ ID NO: 3635231 - RNA, 19 nt, Human
gccagcacuuguccagcug

SEQ ID NO: 3635232 - RNA, 16 nt, Human
gccagcagcaccugcc

SEQ ID NO: 3635233 - RNA, 15 nt, Human
gccagcagccagcuc

SEQ ID NO: 3635234 - RNA, 20 nt, Human
gccagcagccagcucucagc

SEQ ID NO: 3635235 - RNA, 22 nt, Human
gccagcagccagcucucagcca

SEQ ID NO: 3635236 - RNA, 23 nt, Human
gccagcagccagcucucagccaa

SEQ ID NO: 3635237 - RNA, 16 nt, Human
gccagcaggcucucag

SEQ ID NO: 3635238 - RNA, 15 nt, Human
gccagcaucugggcc

SEQ ID NO: 3635239 - RNA, 12 nt, Human
gccagccagcag

SEQ ID NO: 3635240 - RNA, 16 nt, Human
gccagccagcagccag

SEQ ID NO: 3635241 - RNA, 22 nt, Human
gccagccagugaccugaggaag

SEQ ID NO: 3635242 - RNA, 18 nt, Human
gccagccccacacagcua

SEQ ID NO: 3635243 - RNA, 14 nt, Human
gccagccccacagc

SEQ ID NO: 3635244 - RNA, 15 nt, Human
gccagccccacagcc

SEQ ID NO: 3635245 - RNA, 16 nt, Human
gccagccccacagccc

SEQ ID NO: 3635246 - RNA, 19 nt, Human
gccagccccacagcccacg

SEQ ID NO: 3635247 - RNA, 14 nt, Human
gccagccccaccca

SEQ ID NO: 3635248 - RNA, 15 nt, Human
gccagccccacccag

SEQ ID NO: 3635249 - RNA, 11 nt, Human
gccagccccuc

SEQ ID NO: 3635250 - RNA, 22 nt, Human
gccagccccuuagacagaggcc

SEQ ID NO: 3635251 - RNA, 15 nt, Human
gccagcccggcuggu

SEQ ID NO: 3635252 - RNA, 13 nt, Human
gccagcccucccu

SEQ ID NO: 3635253 - RNA, 23 nt, Human
gccagcccucccuguccuccucg

SEQ ID NO: 3635254 - RNA, 19 nt, Human
gccagcccugccuggagga

SEQ ID NO: 3635255 - RNA, 23 nt, Human
gccagcccugccuggaggaccug

SEQ ID NO: 3635256 - RNA, 21 nt, Human
gccagccgagcaggaggccua

SEQ ID NO: 3635257 - RNA, 20 nt, Human
gccagccgcgcaucagacug

SEQ ID NO: 3635258 - RNA, 20 nt, Human
gccagccgcucuccugccac

SEQ ID NO: 3635259 - RNA, 23 nt, Human
gccagccggggcgaguggcacgu

SEQ ID NO: 3635260 - RNA, 15 nt, Human
gccagccucagacug

SEQ ID NO: 3635261 - RNA, 21 nt, Human
gccagccuccgagagggagag

SEQ ID NO: 3635262 - RNA, 14 nt, Human
gccagccuccucug

SEQ ID NO: 3635263 - RNA, 15 nt, Human
gccagccuccucugg

SEQ ID NO: 3635264 - RNA, 17 nt, Human
gccagccuccucuggac

SEQ ID NO: 3635265 - RNA, 14 nt, Human
gccagccucgccca

SEQ ID NO: 3635266 - RNA, 13 nt, Human
gccagccugaccu

SEQ ID NO: 3635267 - RNA, 22 nt, Human
gccagccuggccuccugccucu

SEQ ID NO: 3635268 - RNA, 23 nt, Human
gccagccuggccuccugccucua

SEQ ID NO: 3635269 - RNA, 19 nt, Human
gccagccuggcuucuggag

SEQ ID NO: 3635270 - RNA, 14 nt, Human
gccagccuggggcc

SEQ ID NO: 3635271 - RNA, 18 nt, Human
gccagccuggggccuggc

SEQ ID NO: 3635272 - RNA, 19 nt, Human
gccagccuggggccuggca

SEQ ID NO: 3635273 - RNA, 21 nt, Human
gccagccugguccaugcaggg

SEQ ID NO: 3635274 - RNA, 16 nt, Human
gccagccuuccucugc

SEQ ID NO: 3635275 - RNA, 22 nt, Human
gccagccuuccucugcagcuga

SEQ ID NO: 3635276 - RNA, 22 nt, Human
gccagcgagcgcccagcuccug

SEQ ID NO: 3635277 - RNA, 15 nt, Human
gccagcgccucccuc

SEQ ID NO: 3635278 - RNA, 20 nt, Human
gccagcgccucccuccaccc

SEQ ID NO: 3635279 - RNA, 23 nt, Human
gccagcuacuuccuccuccccac

SEQ ID NO: 3635280 - RNA, 16 nt, Human
gccagcucagucccau

SEQ ID NO: 3635281 - RNA, 13 nt, Human
gccagcucccucu

SEQ ID NO: 3635282 - RNA, 14 nt, Human
gccagcucucagcc

SEQ ID NO: 3635283 - RNA, 23 nt, Human
gccagcucuguaucaggacccag

SEQ ID NO: 3635284 - RNA, 18 nt, Human
gccagcucuguucuuccu

SEQ ID NO: 3635285 - RNA, 13 nt, Human
gccagcucuuccu

SEQ ID NO: 3635286 - RNA, 18 nt, Human
gccagcugacaucuugaa

SEQ ID NO: 3635287 - RNA, 14 nt, Human
gccagcugcacuga

SEQ ID NO: 3635288 - RNA, 19 nt, Human
gccagcugcagcugggcug

SEQ ID NO: 3635289 - RNA, 19 nt, Human
gccagcugcccccagagcc

SEQ ID NO: 3635290 - RNA, 20 nt, Human
gccagcugccgaccagagcc

SEQ ID NO: 3635291 - RNA, 16 nt, Human
gccagcugcuccccag

SEQ ID NO: 3635292 - RNA, 16 nt, Human
gccagcugcugagccg

SEQ ID NO: 3635293 - RNA, 22 nt, Human
gccagcugcugagccgcagaga

SEQ ID NO: 3635294 - RNA, 14 nt, Human
gccagcugcuuggg

SEQ ID NO: 3635295 - RNA, 16 nt, Human
gccagcugcuugggcu

SEQ ID NO: 3635296 - RNA, 16 nt, Human
gccagcuggccuuugu

SEQ ID NO: 3635297 - RNA, 16 nt, Human
gccagcugggaucuga

SEQ ID NO: 3635298 - RNA, 21 nt, Human
gccagcugggaucugacugca

SEQ ID NO: 3635299 - RNA, 20 nt, Human
gccagcugugguuuucuuuu

SEQ ID NO: 3635300 - RNA, 18 nt, Human
gccagcuuggggccacca

SEQ ID NO: 3635301 - RNA, 18 nt, Human
gccagcuuguuauuuaua

SEQ ID NO: 3635302 - RNA, 16 nt, Human
gccagcuuguuuacau

SEQ ID NO: 3635303 - RNA, 15 nt, Human
gccagcuuucccugc

SEQ ID NO: 3635304 - RNA, 14 nt, Human
gccagcuuuucaaa

SEQ ID NO: 3635305 - RNA, 13 nt, Human
gccaggaagccag

SEQ ID NO: 3635306 - RNA, 17 nt, Human
gccaggaagccagcagg

SEQ ID NO: 3635307 - RNA, 19 nt, Human
gccaggaagccagcaggcu

SEQ ID NO: 3635308 - RNA, 20 nt, Human
gccaggaagccagcaggcuc

SEQ ID NO: 3635309 - RNA, 17 nt, Human
gccaggaaguagcacag

SEQ ID NO: 3635310 - RNA, 20 nt, Human
gccaggaaguagcacaggcu

SEQ ID NO: 3635311 - RNA, 15 nt, Human
gccaggacaccgggc

SEQ ID NO: 3635312 - RNA, 20 nt, Human
gccaggacaccgggcagggc

SEQ ID NO: 3635313 - RNA, 23 nt, Human
gccaggaccagucccagagcagg

SEQ ID NO: 3635314 - RNA, 17 nt, Human
gccaggaccgccaaaga

SEQ ID NO: 3635315 - RNA, 18 nt, Human
gccaggacucugcagccu

SEQ ID NO: 3635316 - RNA, 19 nt, Human
gccaggacucugcagccuc

SEQ ID NO: 3635317 - RNA, 20 nt, Human
gccaggacucugcagccuca

SEQ ID NO: 3635318 - RNA, 21 nt, Human
gccaggacucugcagccucag

SEQ ID NO: 3635319 - RNA, 19 nt, Human
gccaggacugagccccgca

SEQ ID NO: 3635320 - RNA, 14 nt, Human
gccaggagaagcuc

SEQ ID NO: 3635321 - RNA, 20 nt, Human
gccaggagcaaauguuucug

SEQ ID NO: 3635322 - RNA, 16 nt, Human
gccaggagccuccugc

SEQ ID NO: 3635323 - RNA, 20 nt, Human
gccaggagccuccugcccuu

SEQ ID NO: 3635324 - RNA, 22 nt, Human
gccaggagcugggcagaaggcc

SEQ ID NO: 3635325 - RNA, 19 nt, Human
gccaggaggacccagggcu

SEQ ID NO: 3635326 - RNA, 22 nt, Human
gccaggaggacccagggcucug

SEQ ID NO: 3635327 - RNA, 23 nt, Human
gccaggagggacaaaggagccug

SEQ ID NO: 3635328 - RNA, 17 nt, Human
gccaggaucauggugua

SEQ ID NO: 3635329 - RNA, 20 nt, Human
gccaggauggaacacggcca

SEQ ID NO: 3635330 - RNA, 16 nt, Human
gccaggauggcgcagg

SEQ ID NO: 3635331 - RNA, 17 nt, Human
gccaggcacacacugug

SEQ ID NO: 3635332 - RNA, 17 nt, Human
gccaggcacaggcaggg

SEQ ID NO: 3635333 - RNA, 19 nt, Human
gccaggcacaggcagggca

SEQ ID NO: 3635334 - RNA, 19 nt, Human
gccaggcacccccuggaga

SEQ ID NO: 3635335 - RNA, 19 nt, Human
gccaggcaggcgggcgcca

SEQ ID NO: 3635336 - RNA, 16 nt, Human
gccaggcagggguggg

SEQ ID NO: 3635337 - RNA, 14 nt, Human
gccaggcauguggc

SEQ ID NO: 3635338 - RNA, 13 nt, Human
gccaggccacaag

SEQ ID NO: 3635339 - RNA, 23 nt, Human
gccaggccacaagacccuugugg

SEQ ID NO: 3635340 - RNA, 16 nt, Human
gccaggccaccaggau

SEQ ID NO: 3635341 - RNA, 15 nt, Human
gccaggccagaggga

SEQ ID NO: 3635342 - RNA, 22 nt, Human
gccaggccagagggagugacag

SEQ ID NO: 3635343 - RNA, 12 nt, Human
gccaggccagcu

SEQ ID NO: 3635344 - RNA, 20 nt, Human
gccaggcccccaccacacau

SEQ ID NO: 3635345 - RNA, 22 nt, Human
gccaggcccccaccacacaucc

SEQ ID NO: 3635346 - RNA, 16 nt, Human
gccaggcccggggcug

SEQ ID NO: 3635347 - RNA, 17 nt, Human
gccaggcccggggcugg

SEQ ID NO: 3635348 - RNA, 14 nt, Human
gccaggcccucugc

SEQ ID NO: 3635349 - RNA, 20 nt, Human
gccaggcccucugcccacuc

SEQ ID NO: 3635350 - RNA, 21 nt, Human
gccaggcccucugcccacucc

SEQ ID NO: 3635351 - RNA, 21 nt, Human
gccaggcccuugucggcccca

SEQ ID NO: 3635352 - RNA, 23 nt, Human
gccaggccggcgagcccugugga

SEQ ID NO: 3635353 - RNA, 13 nt, Human
gccaggccgggaa

SEQ ID NO: 3635354 - RNA, 13 nt, Human
gccaggccgggcc

SEQ ID NO: 3635355 - RNA, 21 nt, Human
gccaggccgggccuguacagu

SEQ ID NO: 3635356 - RNA, 15 nt, Human
gcccaggccaggacu

SEQ ID NO: 3635357 - RNA, 20 nt, Human
gcccaggccaggacucugca

SEQ ID NO: 3635358 - RNA, 21 nt, Human
gcccaggccaggacucugcag

SEQ ID NO: 3635359 - RNA, 24 nt, Human
gcccaggccaggacucugcagccu

SEQ ID NO: 3635360 - RNA, 12 nt, Human
gcccaggccccu

SEQ ID NO: 3635361 - RNA, 18 nt, Human
gcccaggccccugccacc

SEQ ID NO: 3635362 - RNA, 23 nt, Human
gcccaggccccugccacccuggg

SEQ ID NO: 3635363 - RNA, 14 nt, Human
gcccaggccucacc

SEQ ID NO: 3635364 - RNA, 15 nt, Human
gcccaggccuccagc

SEQ ID NO: 3635365 - RNA, 17 nt, Human
gcccaggccuccuacag

SEQ ID NO: 3635366 - RNA, 12 nt, Human
gcccaggcucca

SEQ ID NO: 3635367 - RNA, 19 nt, Human
gcccaggcucggccugccc

SEQ ID NO: 3635368 - RNA, 13 nt, Human
gcccaggcugccg

SEQ ID NO: 3635369 - RNA, 16 nt, Human
gcccaggcugccgucc

SEQ ID NO: 3635370 - RNA, 14 nt, Human
gcccaggcuggcca

SEQ ID NO: 3635371 - RNA, 15 nt, Human
gcccaggcuggccag

SEQ ID NO: 3635372 - RNA, 17 nt, Human
gcccaggcuggccagcc

SEQ ID NO: 3635373 - RNA, 18 nt, Human
gcccaggcuggccagccc

SEQ ID NO: 3635374 - RNA, 13 nt, Human
gcccaggcuggga

SEQ ID NO: 3635375 - RNA, 19 nt, Human
gcccaggcuuagucacuga

SEQ ID NO: 3635376 - RNA, 21 nt, Human
gcccaggcuuagucacugaga

SEQ ID NO: 3635377 - RNA, 23 nt, Human
gcccaggcuuagucacugagaca

SEQ ID NO: 3635378 - RNA, 18 nt, Human
gcccagggacaccagcca

SEQ ID NO: 3635379 - RNA, 19 nt, Human
gcccagggacaccagccag

SEQ ID NO: 3635380 - RNA, 22 nt, Human
gcccagggacaccagccaggcu

SEQ ID NO: 3635381 - RNA, 23 nt, Human
gcccagggacaccagccaggcuc

SEQ ID NO: 3635382 - RNA, 16 nt, Human
gcccagggagcggaaa

SEQ ID NO: 3635383 - RNA, 23 nt, Human
gcccagggagcggaaagcagcuc

SEQ ID NO: 3635384 - RNA, 13 nt, Human
gcccagggaggcc

SEQ ID NO: 3635385 - RNA, 18 nt, Human
gcccagggcaagcuccgc

SEQ ID NO: 3635386 - RNA, 19 nt, Human
gcccagggcaagcuccgca

SEQ ID NO: 3635387 - RNA, 14 nt, Human
gcccagggcaucug

SEQ ID NO: 3635388 - RNA, 18 nt, Human
gcccagggccacucugcc

SEQ ID NO: 3635389 - RNA, 19 nt, Human
gcccagggccacucugccu

SEQ ID NO: 3635390 - RNA, 22 nt, Human
gcccagggccacucugccucug

SEQ ID NO: 3635391 - RNA, 21 nt, Human
gcccagggcccagagcccagc

SEQ ID NO: 3635392 - RNA, 23 nt, Human
gcccagggcccagagcccagcuc

SEQ ID NO: 3635393 - RNA, 14 nt, Human
gcccagggcucagc

SEQ ID NO: 3635394 - RNA, 18 nt, Human
gcccagggcucagccugg

SEQ ID NO: 3635395 - RNA, 12 nt, Human
gcccagggcucc

SEQ ID NO: 3635396 - RNA, 14 nt, Human
gcccagggcuccug

SEQ ID NO: 3635397 - RNA, 16 nt, Human
gcccagggcuccugca

SEQ ID NO: 3635398 - RNA, 16 nt, Human
gcccaggggagcccuc

SEQ ID NO: 3635399 - RNA, 20 nt, Human
gcccagggggcuuccugagg

SEQ ID NO: 3635400 - RNA, 14 nt, Human
gcccaggggugccc

SEQ ID NO: 3635401 - RNA, 20 nt, Human
gcccaggggugcccccuccu

SEQ ID NO: 3635402 - RNA, 17 nt, Human
gcccaggguucccccag

SEQ ID NO: 3635403 - RNA, 15 nt, Human
gcccagguccucuga

SEQ ID NO: 3635404 - RNA, 14 nt, Human
gcccaguacauuua

SEQ ID NO: 3635405 - RNA, 17 nt, Human
gcccaguagaccuuguu

SEQ ID NO: 3635406 - RNA, 17 nt, Human
gcccagucccccaaccc

SEQ ID NO: 3635407 - RNA, 18 nt, Human
gcccaguccuggccuggc

SEQ ID NO: 3635408 - RNA, 18 nt, Human
gcccagucuuucaugugu

SEQ ID NO: 3635409 - RNA, 22 nt, Human
gcccagugcacuugcuggaaga

SEQ ID NO: 3635410 - RNA, 18 nt, Human
gcccaguguuguuuguaa

SEQ ID NO: 3635411 - RNA, 15 nt, Human
gcccaguuaaucuug

SEQ ID NO: 3635412 - RNA, 21 nt, Human
gcccaguuucugccucugagg

SEQ ID NO: 3635413 - RNA, 15 nt, Human
gcccauacucagccu

SEQ ID NO: 3635414 - RNA, 22 nt, Human
gcccauagaaacaugacacuga

SEQ ID NO: 3635415 - RNA, 23 nt, Human
gcccauagaaacaugacacugac

SEQ ID NO: 3635416 - RNA, 22 nt, Human
gcccauaugcuaccaccagcug

SEQ ID NO: 3635417 - RNA, 23 nt, Human
gcccauaugcuaccaccagcugu

SEQ ID NO: 3635418 - RNA, 15 nt, Human
gcccauauuuuacuu

SEQ ID NO: 3635419 - RNA, 22 nt, Human
gcccauauuuuacuuggaaaua

SEQ ID NO: 3635420 - RNA, 21 nt, Human
gcccaucaggguaggcuggag

SEQ ID NO: 3635421 - RNA, 21 nt, Human
gcccaucaguguacccccgcc

SEQ ID NO: 3635422 - RNA, 12 nt, Human
gcccaucccccc

SEQ ID NO: 3635423 - RNA, 14 nt, Human
gcccauccccuuga

SEQ ID NO: 3635424 - RNA, 14 nt, Human
gcccaucccugccu

SEQ ID NO: 3635425 - RNA, 18 nt, Human
gcccaucccugccugguc

SEQ ID NO: 3635426 - RNA, 19 nt, Human
gcccauccuguggucacug

SEQ ID NO: 3635427 - RNA, 12 nt, Human
gcccauccuucc

SEQ ID NO: 3635428 - RNA, 13 nt, Human
gcccauccuuccc

SEQ ID NO: 3635429 - RNA, 17 nt, Human
gcccaucgugaagaagc

SEQ ID NO: 3635430 - RNA, 19 nt, Human
gcccaucgugaagaagccu

SEQ ID NO: 3635431 - RNA, 17 nt, Human
gcccaucucccugcuuu

SEQ ID NO: 3635432 - RNA, 18 nt, Human
gcccaucucccugcuuug

SEQ ID NO: 3635433 - RNA, 16 nt, Human
gcccaucuugccucca

SEQ ID NO: 3635434 - RNA, 19 nt, Human
gcccaugagagcgcagccc

SEQ ID NO: 3635435 - RNA, 17 nt, Human
gcccaugaguccuugaa

SEQ ID NO: 3635436 - RNA, 16 nt, Human
gcccaugccaccgcuu

SEQ ID NO: 3635437 - RNA, 13 nt, Human
gcccaugcccacc

SEQ ID NO: 3635438 - RNA, 14 nt, Human
gcccaugcccaccu

SEQ ID NO: 3635439 - RNA, 19 nt, Human
gcccaugcccaccugccca

SEQ ID NO: 3635440 - RNA, 19 nt, Human
gcccauggacaggcuggcu

SEQ ID NO: 3635441 - RNA, 13 nt, Human
gcccauggagauu

SEQ ID NO: 3635442 - RNA, 21 nt, Human
gcccauggagauugaccugga

SEQ ID NO: 3635443 - RNA, 22 nt, Human
gcccauggcccucccaguaccu

SEQ ID NO: 3635444 - RNA, 20 nt, Human
gcccaugggagcugguuaga

SEQ ID NO: 3635445 - RNA, 22 nt, Human
gcccaugggcacugcugggugg

SEQ ID NO: 3635446 - RNA, 21 nt, Human
gcccaugguugagaaaugaau

SEQ ID NO: 3635447 - RNA, 20 nt, Human
gcccaugucgcgcucagcau

SEQ ID NO: 3635448 - RNA, 23 nt, Human
gcccauguuaaguccucccugac

SEQ ID NO: 3635449 - RNA, 19 nt, Human
gcccauguucugcccccag

SEQ ID NO: 3635450 - RNA, 23 nt, Human
gcccauguucugcccccagccca

SEQ ID NO: 3635451 - RNA, 19 nt, Human
gcccauucauuccauucug

SEQ ID NO: 3635452 - RNA, 17 nt, Human
gcccauucuacuugcuc

SEQ ID NO: 3635453 - RNA, 19 nt, Human
gcccauucuacuugcucug

SEQ ID NO: 3635454 - RNA, 20 nt, Human
gcccauucuacuugcucugg

SEQ ID NO: 3635455 - RNA, 21 nt, Human
gcccauucuacuugcucugga

SEQ ID NO: 3635456 - RNA, 22 nt, Human
gcccauucuacuugcucuggac

SEQ ID NO: 3635457 - RNA, 19 nt, Human
gcccauucucucuccuguc

SEQ ID NO: 3635458 - RNA, 20 nt, Human
gcccauucucucuccugucc

SEQ ID NO: 3635459 - RNA, 21 nt, Human
gcccauucucucuccugucca

SEQ ID NO: 3635460 - RNA, 20 nt, Human
gcccauuucaauucucaaaa

SEQ ID NO: 3635461 - RNA, 11 nt, Human
gcccauuucau

SEQ ID NO: 3635462 - RNA, 18 nt, Human
gcccauuucuccagaacc

SEQ ID NO: 3635463 - RNA, 18 nt, Human
gcccauuuggagggccug

SEQ ID NO: 3635464 - RNA, 19 nt, Human
gcccauuugggcagagagg

SEQ ID NO: 3635465 - RNA, 21 nt, Human
gccccaaaaccacagcccugu

SEQ ID NO: 3635466 - RNA, 22 nt, Human
gccccaaaaccacagcccuguc

SEQ ID NO: 3635467 - RNA, 17 nt, Human
gccccaaacaaauaugc

SEQ ID NO: 3635468 - RNA, 20 nt, Human
gccccaaauaacuucagucc

SEQ ID NO: 3635469 - RNA, 12 nt, Human
gccccaaauaua

SEQ ID NO: 3635470 - RNA, 16 nt, Human
gccccaacccccagca

SEQ ID NO: 3635471 - RNA, 17 nt, Human
gccccaacccccagcac

SEQ ID NO: 3635472 - RNA, 17 nt, Human
gccccaacccguggagg

SEQ ID NO: 3635473 - RNA, 17 nt, Human
gccccaacccuucuuca

SEQ ID NO: 3635474 - RNA, 14 nt, Human
gccccaacuccugg

SEQ ID NO: 3635475 - RNA, 16 nt, Human
gccccaacuccuggaa

SEQ ID NO: 3635476 - RNA, 18 nt, Human
gccccaacuccuggaagc

SEQ ID NO: 3635477 - RNA, 22 nt, Human
gccccaacuccuggaagcugug

SEQ ID NO: 3635478 - RNA, 14 nt, Human
gccccaacuccuuc

SEQ ID NO: 3635479 - RNA, 21 nt, Human
gccccaacucuccccugaccu

SEQ ID NO: 3635480 - RNA, 19 nt, Human
gccccaagggguuucuguu

SEQ ID NO: 3635481 - RNA, 19 nt, Human
gccccaagguuuacauagu

SEQ ID NO: 3635482 - RNA, 13 nt, Human
gccccaaguccug

SEQ ID NO: 3635483 - RNA, 15 nt, Human
gccccaaguccugaa

SEQ ID NO: 3635484 - RNA, 13 nt, Human
gccccaauuuucu

SEQ ID NO: 3635485 - RNA, 20 nt, Human
gccccacacggaggcaucug

SEQ ID NO: 3635486 - RNA, 18 nt, Human
gccccacagcccacgucc

SEQ ID NO: 3635487 - RNA, 18 nt, Human
gccccacagccccaucug

SEQ ID NO: 3635488 - RNA, 23 nt, Human
gccccacagucuccggccucucc

SEQ ID NO: 3635489 - RNA, 13 nt, Human
gccccaccaccua

SEQ ID NO: 3635490 - RNA, 15 nt, Human
gccccaccaccuagg

SEQ ID NO: 3635491 - RNA, 15 nt, Human
gccccaccagugccu

SEQ ID NO: 3635492 - RNA, 22 nt, Human
gccccaccagugccucucccug

SEQ ID NO: 3635493 - RNA, 22 nt, Human
gccccacccagaugggggaaag

SEQ ID NO: 3635494 - RNA, 21 nt, Human
gccccaccccagggcagccag

SEQ ID NO: 3635495 - RNA, 17 nt, Human
gccccaccccagguccu

SEQ ID NO: 3635496 - RNA, 20 nt, Human
gccccacccucguggacacc

SEQ ID NO: 3635497 - RNA, 22 nt, Human
gccccacccucguggacaccug

SEQ ID NO: 3635498 - RNA, 15 nt, Human
gccccacccugggcc

SEQ ID NO: 3635499 - RNA, 19 nt, Human
gccuuggauaaugcuguug

SEQ ID NO: 3635500 - RNA, 11 nt, Human
gccuuggccug

SEQ ID NO: 3635501 - RNA, 15 nt, Human
gccuuggccuggagc

SEQ ID NO: 3635502 - RNA, 16 nt, Human
gccuuggccuggagca

SEQ ID NO: 3635503 - RNA, 22 nt, Human
gccuugggauccaggccccucc

SEQ ID NO: 3635504 - RNA, 17 nt, Human
gccuugggcccucuggu

SEQ ID NO: 3635505 - RNA, 22 nt, Human
gccuugggcuccgugugggaga

SEQ ID NO: 3635506 - RNA, 16 nt, Human
gccuugggcucugcug

SEQ ID NO: 3635507 - RNA, 18 nt, Human
gccuugguguccaccugg

SEQ ID NO: 3635508 - RNA, 21 nt, Human
gccuugguguccaccuggccc

SEQ ID NO: 3635509 - RNA, 18 nt, Human
gccuugguucccuugugu

SEQ ID NO: 3635510 - RNA, 17 nt, Human
gccuugguuuuuacugc

SEQ ID NO: 3635511 - RNA, 23 nt, Human
gccuugguuuuuacugcucugag

SEQ ID NO: 3635512 - RNA, 19 nt, Human
gccuuguauaauauugaaa

SEQ ID NO: 3635513 - RNA, 16 nt, Human
gccuugucacgccaga

SEQ ID NO: 3635514 - RNA, 18 nt, Human
gccuuguccccugccugu

SEQ ID NO: 3635515 - RNA, 19 nt, Human
gccuugucuccuacuccug

SEQ ID NO: 3635516 - RNA, 12 nt, Human
gccuuguguaca

SEQ ID NO: 3635517 - RNA, 15 nt, Human
gccuugugucuacag

SEQ ID NO: 3635518 - RNA, 12 nt, Human
gccuuguucugu

SEQ ID NO: 3635519 - RNA, 15 nt, Human
gccuuguugaugugg

SEQ ID NO: 3635520 - RNA, 17 nt, Human
gccuuuaaaucugugau

SEQ ID NO: 3635521 - RNA, 16 nt, Human
gccuuuacugacccug

SEQ ID NO: 3635522 - RNA, 14 nt, Human
gccuuuagaaaaua

SEQ ID NO: 3635523 - RNA, 21 nt, Human
gccuuuagugaucacagcagc

SEQ ID NO: 3635524 - RNA, 23 nt, Human
gccuuuauuuuuggcguggcuga

SEQ ID NO: 3635525 - RNA, 15 nt, Human
gccuuucaaauuuag

SEQ ID NO: 3635526 - RNA, 18 nt, Human
gccuuucagcaggcagcc

SEQ ID NO: 3635527 - RNA, 22 nt, Human
gccuuucauuuugcuuuaauuu

SEQ ID NO: 3635528 - RNA, 21 nt, Human
gccuuuccauccauggccagc

SEQ ID NO: 3635529 - RNA, 21 nt, Human
gccuuucccaccgcccucccu

SEQ ID NO: 3635530 - RNA, 17 nt, Human
gccuuuccuguagccuu

SEQ ID NO: 3635531 - RNA, 15 nt, Human
gccuuucgaggccug

SEQ ID NO: 3635532 - RNA, 16 nt, Human
gccuuucgaggccuga

SEQ ID NO: 3635533 - RNA, 19 nt, Human
gccuuucgaggccugaagc

SEQ ID NO: 3635534 - RNA, 18 nt, Human
gccuuucucccaggccag

SEQ ID NO: 3635535 - RNA, 23 nt, Human
gccuuucucccaggccaggcucc

SEQ ID NO: 3635536 - RNA, 19 nt, Human
gccuuucucgauuuuaucu

SEQ ID NO: 3635537 - RNA, 14 nt, Human
gccuuucugcaguu

SEQ ID NO: 3635538 - RNA, 15 nt, Human
gccuuugaauguuaa

SEQ ID NO: 3635539 - RNA, 20 nt, Human
gccuuugaauguuaauuuuu

SEQ ID NO: 3635540 - RNA, 12 nt, Human
gccuuugacauu

SEQ ID NO: 3635541 - RNA, 13 nt, Human
gccuuugacauuu

SEQ ID NO: 3635542 - RNA, 16 nt, Human
gccuuugaccugccuc

SEQ ID NO: 3635543 - RNA, 14 nt, Human
gccuuugagacagu

SEQ ID NO: 3635544 - RNA, 23 nt, Human
gccuuugagcccacaaagccuua

SEQ ID NO: 3635545 - RNA, 22 nt, Human
gccuuugaguuuccucaggcug

SEQ ID NO: 3635546 - RNA, 23 nt, Human
gccuuugccaccaacuggcccuc

SEQ ID NO: 3635547 - RNA, 18 nt, Human
gccuuugcgcuccuggcc

SEQ ID NO: 3635548 - RNA, 23 nt, Human
gccuuugcgcuccuggcccagcc

SEQ ID NO: 3635549 - RNA, 22 nt, Human
gccuuuggaaacagcucgacuu

SEQ ID NO: 3635550 - RNA, 20 nt, Human
gccuuuggaugaccagaaca

SEQ ID NO: 3635551 - RNA, 15 nt, Human
gccuuuggcaggugc

SEQ ID NO: 3635552 - RNA, 15 nt, Human
gccuuuggcucugga

SEQ ID NO: 3635553 - RNA, 13 nt, Human
gccuuuggcuuca

SEQ ID NO: 3635554 - RNA, 13 nt, Human
gccuuugggaaau

SEQ ID NO: 3635555 - RNA, 15 nt, Human
gccuuugggagcagg

SEQ ID NO: 3635556 - RNA, 17 nt, Human
gccuuugggugcuguuu

SEQ ID NO: 3635557 - RNA, 11 nt, Human
gccuuuguaac

SEQ ID NO: 3635558 - RNA, 17 nt, Human
gccuuuguaagugcagg

SEQ ID NO: 3635559 - RNA, 19 nt, Human
gccuuuguuccccacugga

SEQ ID NO: 3635560 - RNA, 20 nt, Human
gccuuuguuccccacuggag

SEQ ID NO: 3635561 - RNA, 18 nt, Human
gccuuuuauaaaccucua

SEQ ID NO: 3635562 - RNA, 13 nt, Human
gccuuuucccucu

SEQ ID NO: 3635563 - RNA, 16 nt, Human
gccuuuugacuuucau

SEQ ID NO: 3635564 - RNA, 17 nt, Human
gccuuuugcaccccucc

SEQ ID NO: 3635565 - RNA, 14 nt, Human
gccuuuuucauuua

SEQ ID NO: 3635566 - RNA, 17 nt, Human
gccuuuuuguuucaaug

SEQ ID NO: 3635567 - RNA, 19 nt, Human
gccuuuuuucacggaaguu

SEQ ID NO: 3635568 - RNA, 13 nt, Human
gccuuuuuucccc

SEQ ID NO: 3635569 - RNA, 17 nt, Human
gcgaaaucccugcucac

SEQ ID NO: 3635570 - RNA, 18 nt, Human
gcgaaaucccugcucacu

SEQ ID NO: 3635571 - RNA, 16 nt, Human
gcgaaggggcccuggu

SEQ ID NO: 3635572 - RNA, 14 nt, Human
gcgaaucauuuguu

SEQ ID NO: 3635573 - RNA, 13 nt, Human
gcgaauccaagcu

SEQ ID NO: 3635574 - RNA, 18 nt, Human
gcgaauccaagcucccug

SEQ ID NO: 3635575 - RNA, 15 nt, Human
gcgaauuuuaaaaga

SEQ ID NO: 3635576 - RNA, 20 nt, Human
gcgacaaugcaaaccaucau

SEQ ID NO: 3635577 - RNA, 22 nt, Human
gcgacagugagacucugucuca

SEQ ID NO: 3635578 - RNA, 18 nt, Human
gcgacaucucugacuuuc

SEQ ID NO: 3635579 - RNA, 18 nt, Human
gcgacauuagcauaaaca

SEQ ID NO: 3635580 - RNA, 15 nt, Human
gcgaccaccccugcc

SEQ ID NO: 3635581 - RNA, 20 nt, Human
gcgaccccaucugcccagga

SEQ ID NO: 3635582 - RNA, 23 nt, Human
gcgaccucuccaucuucagcuuc

SEQ ID NO: 3635583 - RNA, 15 nt, Human
gcgaccuuccucauc

SEQ ID NO: 3635584 - RNA, 13 nt, Human
gcgacuaauuuca

SEQ ID NO: 3635585 - RNA, 21 nt, Human
gcgacuaauuucaaaaugcuu

SEQ ID NO: 3635586 - RNA, 17 nt, Human
gcgacuuucugccugga

SEQ ID NO: 3635587 - RNA, 16 nt, Human
gcgagacucugucuca

SEQ ID NO: 3635588 - RNA, 16 nt, Human
gcgagaggaggggccc

SEQ ID NO: 3635589 - RNA, 19 nt, Human
gcgagauaccccaccuccc

SEQ ID NO: 3635590 - RNA, 16 nt, Human
gcgagcauccuggcca

SEQ ID NO: 3635591 - RNA, 18 nt, Human
gcgagcaugucguggaca

SEQ ID NO: 3635592 - RNA, 15 nt, Human
gcgagcccugguggc

SEQ ID NO: 3635593 - RNA, 17 nt, Human
gcgaggaggcuccagag

SEQ ID NO: 3635594 - RNA, 12 nt, Human
gcgaggcagagg

SEQ ID NO: 3635595 - RNA, 14 nt, Human
gcgaggcagaggac

SEQ ID NO: 3635596 - RNA, 13 nt, Human
gcgagggcagcug

SEQ ID NO: 3635597 - RNA, 14 nt, Human
gcgagggcagcugc

SEQ ID NO: 3635598 - RNA, 18 nt, Human
gcgaggucaacagagaag

SEQ ID NO: 3635599 - RNA, 22 nt, Human
gcgaguauguguuugugugugu

SEQ ID NO: 3635600 - RNA, 15 nt, Human
gcgagucacugccuc

SEQ ID NO: 3635601 - RNA, 21 nt, Human
gcgagugccaggacuccccag

SEQ ID NO: 3635602 - RNA, 13 nt, Human
gcgauagagucuc

SEQ ID NO: 3635603 - RNA, 18 nt, Human
gcgaucauggcucacugc

SEQ ID NO: 3635604 - RNA, 16 nt, Human
gcgauccaccugucuc

SEQ ID NO: 3635605 - RNA, 17 nt, Human
gcgauccaccugucuca

SEQ ID NO: 3635606 - RNA, 21 nt, Human
gcgauccaccugucucagccu

SEQ ID NO: 3635607 - RNA, 20 nt, Human
gcgaucccacacaggcuggc

SEQ ID NO: 3635608 - RNA, 17 nt, Human
gcgaucucggcucacug

SEQ ID NO: 3635609 - RNA, 12 nt, Human
gcgaugggucag

SEQ ID NO: 3635610 - RNA, 15 nt, Human
gcgauggucucagaa

SEQ ID NO: 3635611 - RNA, 13 nt, Human
gcgauguggaacu

SEQ ID NO: 3635612 - RNA, 19 nt, Human
gcgauguggaacugcugcc

SEQ ID NO: 3635613 - RNA, 14 nt, Human
gcgauucccucucc

SEQ ID NO: 3635614 - RNA, 13 nt, Human
gcgauucuccugc

SEQ ID NO: 3635615 - RNA, 23 nt, Human
gcgauucuccugccucagccucc

SEQ ID NO: 3635616 - RNA, 14 nt, Human
gcgauucuucugcu

SEQ ID NO: 3635617 - RNA, 18 nt, Human
gcgcaagggaggcccagc

SEQ ID NO: 3635618 - RNA, 20 nt, Human
gcgcacaauaguaaccuggg

SEQ ID NO: 3635619 - RNA, 19 nt, Human
gcgcacacacacacauaca

SEQ ID NO: 3635620 - RNA, 21 nt, Human
gcgcacccuccccucccgucu

SEQ ID NO: 3635621 - RNA, 18 nt, Human
gcgcaccugcccccuggu

SEQ ID NO: 3635622 - RNA, 14 nt, Human
gcgcagccccaucu

SEQ ID NO: 3635623 - RNA, 15 nt, Human
gcgcagccccaucug

SEQ ID NO: 3635624 - RNA, 19 nt, Human
gcgcagccccaucugugca

SEQ ID NO: 3635625 - RNA, 16 nt, Human
gcgcaggcuggcccug

SEQ ID NO: 3635626 - RNA, 22 nt, Human
gcgcaggcuggcccugcccugg

SEQ ID NO: 3635627 - RNA, 18 nt, Human
gcgcaggugggcuggacu

SEQ ID NO: 3635628 - RNA, 22 nt, Human
gcgcagugcuucucuacagacu

SEQ ID NO: 3635629 - RNA, 15 nt, Human
gcgcaguggcccuga

SEQ ID NO: 3635630 - RNA, 18 nt, Human
gcgcaguggcccugagca

SEQ ID NO: 3635631 - RNA, 18 nt, Human
gcgcaguguggaggccac

SEQ ID NO: 3635632 - RNA, 20 nt, Human
gcgcauccaaucucaaggaa

SEQ ID NO: 3635633 - RNA, 21 nt, Human
gcgcauccaaucucaaggaau

SEQ ID NO: 3635634 - RNA, 22 nt, Human
gcgcaugucacggagggugacg

SEQ ID NO: 3635635 - RNA, 19 nt, Human
gcgcauucuaaccuggagg

SEQ ID NO: 3635636 - RNA, 14 nt, Human
gcgccaagcaaccu

SEQ ID NO: 3635637 - RNA, 15 nt, Human
gcgccaccagcucug

SEQ ID NO: 3635638 - RNA, 14 nt, Human
gcgccaccauccug

SEQ ID NO: 3635639 - RNA, 21 nt, Human
gcgccacuacacuccagccug

SEQ ID NO: 3635640 - RNA, 16 nt, Human
gcgccacucgcuuccc

SEQ ID NO: 3635641 - RNA, 18 nt, Human
gcgccacucgcuuccccc

SEQ ID NO: 3635642 - RNA, 18 nt, Human
gcgccacugcuccgugga

SEQ ID NO: 3635643 - RNA, 21 nt, Human
gcgccaggauggaacacggcc

SEQ ID NO: 3635644 - RNA, 22 nt, Human
gcuaagggugggugcucagaau

SEQ ID NO: 3635645 - RNA, 14 nt, Human
gcuaagguucuaag

SEQ ID NO: 3635646 - RNA, 17 nt, Human
gcuaagguucuaaggcc

SEQ ID NO: 3635647 - RNA, 19 nt, Human
gcuaaguaaaucucuucug

SEQ ID NO: 3635648 - RNA, 14 nt, Human
gcuaagugcuuauu

SEQ ID NO: 3635649 - RNA, 14 nt, Human
gcuaauaaaauauc

SEQ ID NO: 3635650 - RNA, 19 nt, Human
gcuaauaaaauaucauuca

SEQ ID NO: 3635651 - RNA, 20 nt, Human
gcuaauaaugagcuauuaaa

SEQ ID NO: 3635652 - RNA, 23 nt, Human
gcuaauauuuuccuccugagugc

SEQ ID NO: 3635653 - RNA, 19 nt, Human
gcuaaucaaagccaggguc

SEQ ID NO: 3635654 - RNA, 20 nt, Human
gcuaaucaaagccagggucu

SEQ ID NO: 3635655 - RNA, 17 nt, Human
gcuaaucagugucucac

SEQ ID NO: 3635656 - RNA, 17 nt, Human
gcuaauucaaggaauuu

SEQ ID NO: 3635657 - RNA, 20 nt, Human
gcuaauucccagagugugaa

SEQ ID NO: 3635658 - RNA, 22 nt, Human
gcuaauucuuugaccuguuggg

SEQ ID NO: 3635659 - RNA, 18 nt, Human
gcuaauugcuguugaaag

SEQ ID NO: 3635660 - RNA, 20 nt, Human
gcuaauugggaguccaggca

SEQ ID NO: 3635661 - RNA, 12 nt, Human
gcuaauuguacc

SEQ ID NO: 3635662 - RNA, 15 nt, Human
gcuaauuuaaagaga

SEQ ID NO: 3635663 - RNA, 20 nt, Human
gcuaauuuauccugaaauuu

SEQ ID NO: 3635664 - RNA, 13 nt, Human
gcuaauuuucuca

SEQ ID NO: 3635665 - RNA, 18 nt, Human
gcuaauuuugaaaaacug

SEQ ID NO: 3635666 - RNA, 16 nt, Human
gcuaauuuuucauuuu

SEQ ID NO: 3635667 - RNA, 15 nt, Human
gcuaauuuuuguaau

SEQ ID NO: 3635668 - RNA, 17 nt, Human
gcuaauuuuuguaauuu

SEQ ID NO: 3635669 - RNA, 20 nt, Human
gcuaauuuuuguauuuuuag

SEQ ID NO: 3635670 - RNA, 20 nt, Human
gcuaauuuuuuguuguuucu

SEQ ID NO: 3635671 - RNA, 19 nt, Human
gcuaauuuuuuuguauuuu

SEQ ID NO: 3635672 - RNA, 14 nt, Human
gcuacaaagaagac

SEQ ID NO: 3635673 - RNA, 20 nt, Human
gcuacaaagaagacauguuu

SEQ ID NO: 3635674 - RNA, 12 nt, Human
gcuacaacagcc

SEQ ID NO: 3635675 - RNA, 13 nt, Human
gcuacaauuuuaa

SEQ ID NO: 3635676 - RNA, 13 nt, Human
gcuacacacugca

SEQ ID NO: 3635677 - RNA, 14 nt, Human
gcuacacagggaug

SEQ ID NO: 3635678 - RNA, 18 nt, Human
gcuacaccacucuggcag

SEQ ID NO: 3635679 - RNA, 17 nt, Human
gcuacacccuuuuccag

SEQ ID NO: 3635680 - RNA, 23 nt, Human
gcuacaccuauuaucccagcugc

SEQ ID NO: 3635681 - RNA, 13 nt, Human
gcuacaccuuucu

SEQ ID NO: 3635682 - RNA, 15 nt, Human
gcuacaccuuucucc

SEQ ID NO: 3635683 - RNA, 12 nt, Human
gcuacagagaaa

SEQ ID NO: 3635684 - RNA, 13 nt, Human
gcuacagagaaac

SEQ ID NO: 3635685 - RNA, 15 nt, Human
gcuacagagaagccu

SEQ ID NO: 3635686 - RNA, 23 nt, Human
gcuacagagaagccuucaagcuc

SEQ ID NO: 3635687 - RNA, 23 nt, Human
gcuacagggcgagacucugucuc

SEQ ID NO: 3635688 - RNA, 23 nt, Human
gcuacaggggaagguggccucug

SEQ ID NO: 3635689 - RNA, 14 nt, Human
gcuacagguuacaa

SEQ ID NO: 3635690 - RNA, 13 nt, Human
gcuacaguaauaa

SEQ ID NO: 3635691 - RNA, 23 nt, Human
gcuacauaaauuggccugguaug

SEQ ID NO: 3635692 - RNA, 15 nt, Human
gcuacauuuccgcca

SEQ ID NO: 3635693 - RNA, 16 nt, Human
gcuaccaccagcugug

SEQ ID NO: 3635694 - RNA, 21 nt, Human
gcuaccaccagcuguguccaa

SEQ ID NO: 3635695 - RNA, 13 nt, Human
gcuaccaggaaag

SEQ ID NO: 3635696 - RNA, 22 nt, Human
gcuaccaguauuuagaagccaa

SEQ ID NO: 3635697 - RNA, 19 nt, Human
gcuacccaaaagagaaaaa

SEQ ID NO: 3635698 - RNA, 21 nt, Human
gcuacccaggaggcugaggug

SEQ ID NO: 3635699 - RNA, 16 nt, Human
gcuacccgcagaguuc

SEQ ID NO: 3635700 - RNA, 13 nt, Human
gcuacccucccug

SEQ ID NO: 3635701 - RNA, 14 nt, Human
gcuacccucccugc

SEQ ID NO: 3635702 - RNA, 17 nt, Human
gcuacccucccugcugu

SEQ ID NO: 3635703 - RNA, 19 nt, Human
gcuacccugagcugaggca

SEQ ID NO: 3635704 - RNA, 19 nt, Human
gcuacccuuuuccuuugug

SEQ ID NO: 3635705 - RNA, 18 nt, Human
gcuacccuuuuucuccag

SEQ ID NO: 3635706 - RNA, 20 nt, Human
gcuacccuuuuucuccagcu

SEQ ID NO: 3635707 - RNA, 14 nt, Human
gcuaccguugacuu

SEQ ID NO: 3635708 - RNA, 13 nt, Human
gcuaccucccucc

SEQ ID NO: 3635709 - RNA, 23 nt, Human
gcuaccugaacacuuauugcuuu

SEQ ID NO: 3635710 - RNA, 19 nt, Human
gcuaccuguguggacagga

SEQ ID NO: 3635711 - RNA, 22 nt, Human
gcuaccuguguggacaggacua

SEQ ID NO: 3635712 - RNA, 15 nt, Human
gcuaccuuauuguac

SEQ ID NO: 3635713 - RNA, 17 nt, Human
gcuaccuuauuguacgu

SEQ ID NO: 3635714 - RNA, 15 nt, Human
gcuaccuugccccaa

SEQ ID NO: 3635715 - RNA, 20 nt, Human
gcuaccuugugacccagcac

SEQ ID NO: 3635716 - RNA, 14 nt, Human
gcuacgaaucuucc

SEQ ID NO: 3635717 - RNA, 12 nt, Human
gcuacgccucuu

SEQ ID NO: 3635718 - RNA, 18 nt, Human
gcuacguacaugugaggc

SEQ ID NO: 3635719 - RNA, 15 nt, Human
gcuacgugugauuuu

SEQ ID NO: 3635720 - RNA, 19 nt, Human
gcuacgugugauuuuucug

SEQ ID NO: 3635721 - RNA, 16 nt, Human
gcuacguuuacucaca

SEQ ID NO: 3635722 - RNA, 22 nt, Human
gcuacuaaguucacauuagaau

SEQ ID NO: 3635723 - RNA, 15 nt, Human
gcuacuauaaagaga

SEQ ID NO: 3635724 - RNA, 19 nt, Human
gcuacucagaagccugagg

SEQ ID NO: 3635725 - RNA, 21 nt, Human
gcuacucagaagccugaggcu

SEQ ID NO: 3635726 - RNA, 21 nt, Human
gcuacucagcagcccuccuca

SEQ ID NO: 3635727 - RNA, 22 nt, Human
gcuacucagcagcccuccucac

SEQ ID NO: 3635728 - RNA, 14 nt, Human
gcuacuccggaggc

SEQ ID NO: 3635729 - RNA, 21 nt, Human
gcuacucuaguauuccagacc

SEQ ID NO: 3635730 - RNA, 23 nt, Human
gcuacucugugccagagccuggg

SEQ ID NO: 3635731 - RNA, 18 nt, Human
gcuacucuguuccuucac

SEQ ID NO: 3635732 - RNA, 19 nt, Human
gcuacugaaaggcaguagu

SEQ ID NO: 3635733 - RNA, 17 nt, Human
gcuacugauuuuuguga

SEQ ID NO: 3635734 - RNA, 21 nt, Human
gcuacugcacuccagccuggg

SEQ ID NO: 3635735 - RNA, 20 nt, Human
gcuacugccaaccucgcucc

SEQ ID NO: 3635736 - RNA, 12 nt, Human
gcuacugcuuca

SEQ ID NO: 3635737 - RNA, 20 nt, Human
gcuacuggcauaguuucaua

SEQ ID NO: 3635738 - RNA, 16 nt, Human
gcuacuggggaaacug

SEQ ID NO: 3635739 - RNA, 21 nt, Human
gcuacuggggaaacuggccau

SEQ ID NO: 3635740 - RNA, 23 nt, Human
gcuacuggggaaacuggccaugg

SEQ ID NO: 3635741 - RNA, 18 nt, Human
gcuacuguaaggcaauca

SEQ ID NO: 3635742 - RNA, 12 nt, Human
gcuacugucuca

SEQ ID NO: 3635743 - RNA, 16 nt, Human
gcuacugucucacuga

SEQ ID NO: 3635744 - RNA, 18 nt, Human
gcuacugugugugugaau

SEQ ID NO: 3635745 - RNA, 21 nt, Human
gcuacugugugugugaaugaa

SEQ ID NO: 3635746 - RNA, 18 nt, Human
gcuacuucggggcuggga

SEQ ID NO: 3635747 - RNA, 16 nt, Human
gcuacuugggaggcug

SEQ ID NO: 3635748 - RNA, 16 nt, Human
gcuacuuugccuuuug

SEQ ID NO: 3635749 - RNA, 18 nt, Human
gcuacuuugguuucuguc

SEQ ID NO: 3635750 - RNA, 12 nt, Human
gcuacuuuguuu

SEQ ID NO: 3635751 - RNA, 18 nt, Human
gcuagaaauaugauuuua

SEQ ID NO: 3635752 - RNA, 19 nt, Human
gcuagaaccaagaagggcu

SEQ ID NO: 3635753 - RNA, 19 nt, Human
gcuagaaccuagaagggcu

SEQ ID NO: 3635754 - RNA, 18 nt, Human
gcuagaaccuggaagggc

SEQ ID NO: 3635755 - RNA, 19 nt, Human
gcuagaaccuggagagcua

SEQ ID NO: 3635756 - RNA, 15 nt, Human
gcuagaaccuggagg

SEQ ID NO: 3635757 - RNA, 13 nt, Human
gcuagaacuuuuu

SEQ ID NO: 3635758 - RNA, 21 nt, Human
gcuagaacuuuuuuaaauaaa

SEQ ID NO: 3635759 - RNA, 23 nt, Human
gcuagaacuuuuuuaaauaaacu

SEQ ID NO: 3635760 - RNA, 19 nt, Human
gcuagaaucuggagagcua

SEQ ID NO: 3635761 - RNA, 18 nt, Human
gcuagagaaauucuuguu

SEQ ID NO: 3635762 - RNA, 19 nt, Human
gcuagagcuccucccucuc

SEQ ID NO: 3635763 - RNA, 20 nt, Human
gcuagaggaaccaaccccca

SEQ ID NO: 3635764 - RNA, 17 nt, Human
gcuagaggauuaguaag

SEQ ID NO: 3635765 - RNA, 16 nt, Human
gcuagaggccugagga

SEQ ID NO: 3635766 - RNA, 16 nt, Human
gcuagaguccucacuc

SEQ ID NO: 3635767 - RNA, 14 nt, Human
gcuagauguaugua

SEQ ID NO: 3635768 - RNA, 23 nt, Human
gcuagcagaaaucuagaagacug

SEQ ID NO: 3635769 - RNA, 22 nt, Human
gcuagcagcagggagggcuucu

SEQ ID NO: 3635770 - RNA, 12 nt, Human
gcuagccagagg

SEQ ID NO: 3635771 - RNA, 15 nt, Human
gcuagccagaggacu

SEQ ID NO: 3635772 - RNA, 18 nt, Human
gcuagccagaggacugug

SEQ ID NO: 3635773 - RNA, 14 nt, Human
gcuagcgcugccgc

SEQ ID NO: 3635774 - RNA, 20 nt, Human
gcuagcgcugccgcacccca

SEQ ID NO: 3635775 - RNA, 22 nt, Human
gcuagcgcugccgcaccccaga

SEQ ID NO: 3635776 - RNA, 23 nt, Human
gcuagcgcugccgcaccccagag

SEQ ID NO: 3635777 - RNA, 21 nt, Human
gcuagcuccccuccucucccc

SEQ ID NO: 3635778 - RNA, 14 nt, Human
gcuagcuggagccu

SEQ ID NO: 3635779 - RNA, 12 nt, Human
gcuagcuucugc

SEQ ID NO: 3635780 - RNA, 22 nt, Human
gcuagcuucugcuuuucugccc

SEQ ID NO: 3635781 - RNA, 19 nt, Human
gcuaggaaauccagggugg

SEQ ID NO: 3635782 - RNA, 16 nt, Human
gcuaggaacacuccuu

SEQ ID NO: 3635783 - RNA, 16 nt, Human
gcuaggaaugaaaucu

SEQ ID NO: 3635784 - RNA, 15 nt, Human
gcuaggagcaaagcc

SEQ ID NO: 3635785 - RNA, 19 nt, Human
gcuaggccagagcccacuc

SEQ ID NO: 3635786 - RNA, 15 nt, Human
gcuaggccuggccag

SEQ ID NO: 3635787 - RNA, 18 nt, Human
gcuaggcgagugccagga

SEQ ID NO: 3635788 - RNA, 16 nt, Human
gcuuagagaggacaau

SEQ ID NO: 3635789 - RNA, 12 nt, Human
gcuuagaggcau

SEQ ID NO: 3635790 - RNA, 13 nt, Human
gcuuagauuucau

SEQ ID NO: 3635791 - RNA, 15 nt, Human
gcuuagauuucauag

SEQ ID NO: 3635792 - RNA, 23 nt, Human
gcuuagggacaggaccccagcuc

SEQ ID NO: 3635793 - RNA, 17 nt, Human
gcuuagggcccuggagg

SEQ ID NO: 3635794 - RNA, 16 nt, Human
gcuuagggucucaggg

SEQ ID NO: 3635795 - RNA, 15 nt, Human
gcuuagucacugaga

SEQ ID NO: 3635796 - RNA, 19 nt, Human
gcuuagucacugagacagc

SEQ ID NO: 3635797 - RNA, 21 nt, Human
gcuuagucacugagacagccc

SEQ ID NO: 3635798 - RNA, 19 nt, Human
gcuuauaaaacagaguaau

SEQ ID NO: 3635799 - RNA, 22 nt, Human
gcuuauacgaaauaauuguugu

SEQ ID NO: 3635800 - RNA, 17 nt, Human
gcuuauagguggccucu

SEQ ID NO: 3635801 - RNA, 15 nt, Human
gcuuauaucuggccu

SEQ ID NO: 3635802 - RNA, 22 nt, Human
gcuuauauucaaccauggacuu

SEQ ID NO: 3635803 - RNA, 18 nt, Human
gcuuaucaacuaaugauu

SEQ ID NO: 3635804 - RNA, 23 nt, Human
gcuuaucaauuugucauuuugaa

SEQ ID NO: 3635805 - RNA, 23 nt, Human
gcuuaugacaucacuuguacaaa

SEQ ID NO: 3635806 - RNA, 20 nt, Human
gcuuaugguaccagaugcag

SEQ ID NO: 3635807 - RNA, 20 nt, Human
gcuuauuaaugcuaagggca

SEQ ID NO: 3635808 - RNA, 15 nt, Human
gcuuauuccaugacu

SEQ ID NO: 3635809 - RNA, 18 nt, Human
gcuuauugcuuaguaaaa

SEQ ID NO: 3635810 - RNA, 13 nt, Human
gcuuauuguucca

SEQ ID NO: 3635811 - RNA, 21 nt, Human
gcuuauuguuccaagacauug

SEQ ID NO: 3635812 - RNA, 16 nt, Human
gcuuauuuaauaaaga

SEQ ID NO: 3635813 - RNA, 17 nt, Human
gcuuauuuaauaugcuu

SEQ ID NO: 3635814 - RNA, 19 nt, Human
gcuuauuuauuaacaggau

SEQ ID NO: 3635815 - RNA, 17 nt, Human
gcuuauuuccucauuuu

SEQ ID NO: 3635816 - RNA, 13 nt, Human
gcuuauuuuaaug

SEQ ID NO: 3635817 - RNA, 16 nt, Human
gcuucaaauuguaagc

SEQ ID NO: 3635818 - RNA, 19 nt, Human
gcuucaaggauccugagcc

SEQ ID NO: 3635819 - RNA, 20 nt, Human
gcuucaaggauccugagcca

SEQ ID NO: 3635820 - RNA, 22 nt, Human
gcuucaaggauccugagccaga

SEQ ID NO: 3635821 - RNA, 14 nt, Human
gcuucacaggacag

SEQ ID NO: 3635822 - RNA, 22 nt, Human
gcuucacaggacaggaaagugg

SEQ ID NO: 3635823 - RNA, 13 nt, Human
gcuucacagugau

SEQ ID NO: 3635824 - RNA, 17 nt, Human
gcuucacggaagagccu

SEQ ID NO: 3635825 - RNA, 15 nt, Human
gcuucacuccugcug

SEQ ID NO: 3635826 - RNA, 18 nt, Human
gcuucacuccugcuguaa

SEQ ID NO: 3635827 - RNA, 16 nt, Human
gcuucacuguauaaau

SEQ ID NO: 3635828 - RNA, 20 nt, Human
gcuucagauguggagccagg

SEQ ID NO: 3635829 - RNA, 19 nt, Human
gcuucagcauauuuauagc

SEQ ID NO: 3635830 - RNA, 22 nt, Human
gcuucagccacaguuuccucau

SEQ ID NO: 3635831 - RNA, 18 nt, Human
gcuucagccucccacagu

SEQ ID NO: 3635832 - RNA, 17 nt, Human
gcuucagccuccccacc

SEQ ID NO: 3635833 - RNA, 23 nt, Human
gcuucagccugaggcugagacug

SEQ ID NO: 3635834 - RNA, 16 nt, Human
gcuucagcuccagccc

SEQ ID NO: 3635835 - RNA, 18 nt, Human
gcuucagcuccagccccu

SEQ ID NO: 3635836 - RNA, 22 nt, Human
gcuucaggaaccucgaguacug

SEQ ID NO: 3635837 - RNA, 13 nt, Human
gcuucaggaggga

SEQ ID NO: 3635838 - RNA, 21 nt, Human
gcuucagguccaggcuguguu

SEQ ID NO: 3635839 - RNA, 22 nt, Human
gcuucagguuaucgaaauaaca

SEQ ID NO: 3635840 - RNA, 23 nt, Human
gcuucaguacuugugaaacacag

SEQ ID NO: 3635841 - RNA, 17 nt, Human
gcuucaguggcagcugc

SEQ ID NO: 3635842 - RNA, 18 nt, Human
gcuucaguggcagcugcu

SEQ ID NO: 3635843 - RNA, 22 nt, Human
gcuucauacagggaugguguuc

SEQ ID NO: 3635844 - RNA, 19 nt, Human
gcuucaucauucccucuca

SEQ ID NO: 3635845 - RNA, 21 nt, Human
gcuucauccuccucagaucuu

SEQ ID NO: 3635846 - RNA, 18 nt, Human
gcuucaucugucaagugg

SEQ ID NO: 3635847 - RNA, 18 nt, Human
gcuucaugaaaauccuac

SEQ ID NO: 3635848 - RNA, 19 nt, Human
gcuucaugcacuuaaagaa

SEQ ID NO: 3635849 - RNA, 20 nt, Human
gcuucaugcacuuaaagaag

SEQ ID NO: 3635850 - RNA, 17 nt, Human
gcuucaugccuuuguaa

SEQ ID NO: 3635851 - RNA, 14 nt, Human
gcuucaugcucagc

SEQ ID NO: 3635852 - RNA, 17 nt, Human
gcuucauguggcuuccc

SEQ ID NO: 3635853 - RNA, 18 nt, Human
gcuucaugugucccagaa

SEQ ID NO: 3635854 - RNA, 18 nt, Human
gcuucauuagagcaggcg

SEQ ID NO: 3635855 - RNA, 17 nt, Human
gcuucauucaauauuga

SEQ ID NO: 3635856 - RNA, 17 nt, Human
gcuucauuuccuguguc

SEQ ID NO: 3635857 - RNA, 18 nt, Human
gcuucauuuccugugucu

SEQ ID NO: 3635858 - RNA, 18 nt, Human
gcuuccaagguggucugc

SEQ ID NO: 3635859 - RNA, 16 nt, Human
gcuuccaauuuuccuu

SEQ ID NO: 3635860 - RNA, 15 nt, Human
gcuuccaccucaccc

SEQ ID NO: 3635861 - RNA, 19 nt, Human
gcuuccagaaaaccccagc

SEQ ID NO: 3635862 - RNA, 12 nt, Human
gcuuccagcagg

SEQ ID NO: 3635863 - RNA, 13 nt, Human
gcuuccagcagga

SEQ ID NO: 3635864 - RNA, 17 nt, Human
gcuuccagcaggaggga

SEQ ID NO: 3635865 - RNA, 20 nt, Human
gcuuccagcaggagggacag

SEQ ID NO: 3635866 - RNA, 21 nt, Human
gcuuccaggaaacuccacauc

SEQ ID NO: 3635867 - RNA, 19 nt, Human
gcuuccagguaucuccagg

SEQ ID NO: 3635868 - RNA, 22 nt, Human
gcuuccagguaucuccaggauu

SEQ ID NO: 3635869 - RNA, 15 nt, Human
gcuuccagugaggcu

SEQ ID NO: 3635870 - RNA, 18 nt, Human
gcuuccagugaggcucug

SEQ ID NO: 3635871 - RNA, 20 nt, Human
gcuuccagugaggcucugcc

SEQ ID NO: 3635872 - RNA, 21 nt, Human
gcuuccagugaggcucugccc

SEQ ID NO: 3635873 - RNA, 22 nt, Human
gcuuccagugaggcucugcccu

SEQ ID NO: 3635874 - RNA, 18 nt, Human
gcuuccauagcugcugcc

SEQ ID NO: 3635875 - RNA, 22 nt, Human
gcuuccaucccaaccagugcca

SEQ ID NO: 3635876 - RNA, 14 nt, Human
gcuuccaugauucu

SEQ ID NO: 3635877 - RNA, 19 nt, Human
gcuuccauuuuaauuuuaa

SEQ ID NO: 3635878 - RNA, 14 nt, Human
gcuucccaccuccc

SEQ ID NO: 3635879 - RNA, 15 nt, Human
gcuucccaccucccu

SEQ ID NO: 3635880 - RNA, 18 nt, Human
gcuucccaccucccugcc

SEQ ID NO: 3635881 - RNA, 13 nt, Human
gcuucccaucccc

SEQ ID NO: 3635882 - RNA, 17 nt, Human
gcuucccauccccagcg

SEQ ID NO: 3635883 - RNA, 17 nt, Human
gcuucccauccuacccu

SEQ ID NO: 3635884 - RNA, 15 nt, Human
gcuucccccauagcc

SEQ ID NO: 3635885 - RNA, 18 nt, Human
gcuucccccauagccacc

SEQ ID NO: 3635886 - RNA, 18 nt, Human
gcuuccccuuuugccaau

SEQ ID NO: 3635887 - RNA, 15 nt, Human
gcuucccgcucagcc

SEQ ID NO: 3635888 - RNA, 16 nt, Human
gcuucccgcucagccc

SEQ ID NO: 3635889 - RNA, 20 nt, Human
gcuucccuccccucuaguuu

SEQ ID NO: 3635890 - RNA, 16 nt, Human
gcuucccuccugcccg

SEQ ID NO: 3635891 - RNA, 15 nt, Human
gcuucccucugccug

SEQ ID NO: 3635892 - RNA, 14 nt, Human
gcuucccuuuccug

SEQ ID NO: 3635893 - RNA, 16 nt, Human
gcuucccuuuuuuccu

SEQ ID NO: 3635894 - RNA, 17 nt, Human
gcuuccgguagggaggc

SEQ ID NO: 3635895 - RNA, 21 nt, Human
gcuuccuagaaguuacugaau

SEQ ID NO: 3635896 - RNA, 17 nt, Human
gcuuccuauaauuuuga

SEQ ID NO: 3635897 - RNA, 18 nt, Human
gcuuccuauaauuuugau

SEQ ID NO: 3635898 - RNA, 23 nt, Human
gcuuccuauaauuuugauagugg

SEQ ID NO: 3635899 - RNA, 23 nt, Human
gcuuccuauuucuagggcuggga

SEQ ID NO: 3635900 - RNA, 22 nt, Human
gcuuccucauaguaugguggcu

SEQ ID NO: 3635901 - RNA, 18 nt, Human
gcuuccugacaaucaacu

SEQ ID NO: 3635902 - RNA, 13 nt, Human
gcuuccugcuugc

SEQ ID NO: 3635903 - RNA, 15 nt, Human
gcuuccuggagcaga

SEQ ID NO: 3635904 - RNA, 19 nt, Human
gcuuccuggcaauagucaa

SEQ ID NO: 3635905 - RNA, 14 nt, Human
gcuuccuggugcug

SEQ ID NO: 3635906 - RNA, 21 nt, Human
gcuuccuguccucccagcucc

SEQ ID NO: 3635907 - RNA, 22 nt, Human
gcuuccuucagagagcagugcu

SEQ ID NO: 3635908 - RNA, 14 nt, Human
gcuuccuucauuuc

SEQ ID NO: 3635909 - RNA, 21 nt, Human
gcuucgaggcccagcgaccuc

SEQ ID NO: 3635910 - RNA, 18 nt, Human
gcuucuaaguaaauacaa

SEQ ID NO: 3635911 - RNA, 16 nt, Human
gcuucuaauaaauuau

SEQ ID NO: 3635912 - RNA, 15 nt, Human
gcuucuaauauuuau

SEQ ID NO: 3635913 - RNA, 18 nt, Human
gcuucuaccaacuggaag

SEQ ID NO: 3635914 - RNA, 16 nt, Human
gcuucuaguucugcca

SEQ ID NO: 3635915 - RNA, 21 nt, Human
gcuucuaguucugccaggaga

SEQ ID NO: 3635916 - RNA, 12 nt, Human
gcuucuauccca

SEQ ID NO: 3635917 - RNA, 16 nt, Human
gcuucuaugaaagacu

SEQ ID NO: 3635918 - RNA, 21 nt, Human
gcuucucagauuucugaggaa

SEQ ID NO: 3635919 - RNA, 22 nt, Human
gcuucucauccugcaggcagcu

SEQ ID NO: 3635920 - RNA, 22 nt, Human
gcuucuccaaaaaucugccugg

SEQ ID NO: 3635921 - RNA, 23 nt, Human
gcuucuccaaaaaucugccuggg

SEQ ID NO: 3635922 - RNA, 17 nt, Human
gcuucuccagccuggac

SEQ ID NO: 3635923 - RNA, 19 nt, Human
gcuucucccacuuggccaa

SEQ ID NO: 3635924 - RNA, 20 nt, Human
gcuucucccaggcaaggcug

SEQ ID NO: 3635925 - RNA, 22 nt, Human
gcuucucccaggcaaggcugug

SEQ ID NO: 3635926 - RNA, 14 nt, Human
gcuucuccgccagc

SEQ ID NO: 3635927 - RNA, 24 nt, Human
gcuucuccgccagccuccucugga

SEQ ID NO: 3635928 - RNA, 12 nt, Human
gcuucuccugac

SEQ ID NO: 3635929 - RNA, 14 nt, Human
gcuucucucucacc

SEQ ID NO: 3635930 - RNA, 19 nt, Human
gcuucucugugaacgauuu

SEQ ID NO: 3635931 - RNA, 17 nt, Human
gcuuuuuauuucugcau

SEQ ID NO: 3635932 - RNA, 12 nt, Human
gcuuuuugaaau

SEQ ID NO: 3635933 - RNA, 21 nt, Human
gcuuuuugagguggcacuuuu

SEQ ID NO: 3635934 - RNA, 23 nt, Human
gcuuuuugugauaugcacaaugu

SEQ ID NO: 3635935 - RNA, 20 nt, Human
gcuuuuuuaucaugugaaau

SEQ ID NO: 3635936 - RNA, 17 nt, Human
gcuuuuuuguuuuggcu

SEQ ID NO: 3635937 - RNA, 15 nt, Human
gcuuuuuuuuucucu

SEQ ID NO: 3635938 - RNA, 24 nt, Human
gcuuuuuuuuucucuuucucuccu

SEQ ID NO: 3635939 - RNA, 15 nt, Human
gcuuuuuuuuuucca

SEQ ID NO: 3635940 - RNA, 18 nt, Human
ggaaaaaaaaaaaagagg

SEQ ID NO: 3635941 - RNA, 13 nt, Human
ggaaaaaaacuuu

SEQ ID NO: 3635942 - RNA, 14 nt, Human
ggaaaaaaacuuuu

SEQ ID NO: 3635943 - RNA, 17 nt, Human
ggaaaaaaagacucuuu

SEQ ID NO: 3635944 - RNA, 13 nt, Human
ggaaaaaaauguu

SEQ ID NO: 3635945 - RNA, 15 nt, Human
ggaaaaaagagaagu

SEQ ID NO: 3635946 - RNA, 20 nt, Human
ggaaaaaauaacaaugaaag

SEQ ID NO: 3635947 - RNA, 13 nt, Human
ggaaaaacacaag

SEQ ID NO: 3635948 - RNA, 14 nt, Human
ggaaaaagaaaaua

SEQ ID NO: 3635949 - RNA, 22 nt, Human
ggaaaaaggacaggcagaaaga

SEQ ID NO: 3635950 - RNA, 22 nt, Human
ggaaaaaguauuaauucucuuu

SEQ ID NO: 3635951 - RNA, 19 nt, Human
ggaaaaaguggguuuuuua

SEQ ID NO: 3635952 - RNA, 13 nt, Human
ggaaaaauaugug

SEQ ID NO: 3635953 - RNA, 13 nt, Human
ggaaaaauauuua

SEQ ID NO: 3635954 - RNA, 15 nt, Human
ggaaaaaugaguaau

SEQ ID NO: 3635955 - RNA, 12 nt, Human
ggaaaaaugugu

SEQ ID NO: 3635956 - RNA, 11 nt, Human
ggaaaaauuca

SEQ ID NO: 3635957 - RNA, 22 nt, Human
ggaaaacagaacaucauuagaa

SEQ ID NO: 3635958 - RNA, 13 nt, Human
ggaaaacauuugc

SEQ ID NO: 3635959 - RNA, 14 nt, Human
ggaaaacauuugcu

SEQ ID NO: 3635960 - RNA, 22 nt, Human
ggaaaaccaagccguggcuucc

SEQ ID NO: 3635961 - RNA, 22 nt, Human
ggaaaaccagacuacuugggag

SEQ ID NO: 3635962 - RNA, 20 nt, Human
ggaaaacuccaccuucccac

SEQ ID NO: 3635963 - RNA, 21 nt, Human
ggaaaacugagacucagacag

SEQ ID NO: 3635964 - RNA, 13 nt, Human
ggaaaacuuauuu

SEQ ID NO: 3635965 - RNA, 9 nt, Human
ggaaaagaa

SEQ ID NO: 3635966 - RNA, 12 nt, Human
ggaaaagaaaaa

SEQ ID NO: 3635967 - RNA, 13 nt, Human
ggaaaagaaaaaa

SEQ ID NO: 3635968 - RNA, 14 nt, Human
ggaaaagaaaaaaa

SEQ ID NO: 3635969 - RNA, 14 nt, Human
ggaaaagaaaucua

SEQ ID NO: 3635970 - RNA, 21 nt, Human
ggaaaagagauggccugagaa

SEQ ID NO: 3635971 - RNA, 18 nt, Human
ggaaaagauaaagaccag

SEQ ID NO: 3635972 - RNA, 14 nt, Human
ggaaaagcagcucu

SEQ ID NO: 3635973 - RNA, 14 nt, Human
ggaaaagccucugu

SEQ ID NO: 3635974 - RNA, 11 nt, Human
ggaaaagcuga

SEQ ID NO: 3635975 - RNA, 18 nt, Human
ggaaaagcugcugacagu

SEQ ID NO: 3635976 - RNA, 16 nt, Human
ggaaaaggccuggggu

SEQ ID NO: 3635977 - RNA, 20 nt, Human
ggaaaagggucuugggaaau

SEQ ID NO: 3635978 - RNA, 19 nt, Human
ggaaaaguuuaauauuaaa

SEQ ID NO: 3635979 - RNA, 19 nt, Human
ggaaaauaaaaaaagaaaa

SEQ ID NO: 3635980 - RNA, 20 nt, Human
ggaaaauaaaaaaagaaaaa

SEQ ID NO: 3635981 - RNA, 16 nt, Human
ggaaaauaauacugcu

SEQ ID NO: 3635982 - RNA, 19 nt, Human
ggaaaauaggcuuuuuaau

SEQ ID NO: 3635983 - RNA, 14 nt, Human
ggaaaauauuuuga

SEQ ID NO: 3635984 - RNA, 23 nt, Human
ggaaaaucagccugcuccagcug

SEQ ID NO: 3635985 - RNA, 19 nt, Human
ggaaaaucucuuuuugacu

SEQ ID NO: 3635986 - RNA, 14 nt, Human
ggaaaaugcauugu

SEQ ID NO: 3635987 - RNA, 16 nt, Human
ggaaaaugcauuguau

SEQ ID NO: 3635988 - RNA, 17 nt, Human
ggaaaaugccaaucucu

SEQ ID NO: 3635989 - RNA, 21 nt, Human
ggaaaauguuuuguaagaaac

SEQ ID NO: 3635990 - RNA, 22 nt, Human
ggaaaauuaguucccauucuuu

SEQ ID NO: 3635991 - RNA, 15 nt, Human
ggaaaauucauuuuu

SEQ ID NO: 3635992 - RNA, 23 nt, Human
ggaaacaaagcuuagcaggagag

SEQ ID NO: 3635993 - RNA, 13 nt, Human
ggaaacaaagugg

SEQ ID NO: 3635994 - RNA, 22 nt, Human
ggaaacaaaguggaaggaaaga

SEQ ID NO: 3635995 - RNA, 13 nt, Human
ggaaacaacagcu

SEQ ID NO: 3635996 - RNA, 12 nt, Human
ggaaacaauaua

SEQ ID NO: 3635997 - RNA, 16 nt, Human
ggaaacacuaaauguu

SEQ ID NO: 3635998 - RNA, 15 nt, Human
ggaaacagaggacca

SEQ ID NO: 3635999 - RNA, 13 nt, Human
ggaaacagaggcu

SEQ ID NO: 3636000 - RNA, 15 nt, Human
ggaaacaggaccaca

SEQ ID NO: 3636001 - RNA, 16 nt, Human
ggaaacccagcucugg

SEQ ID NO: 3636002 - RNA, 19 nt, Human
ggaaacccauaggcccaca

SEQ ID NO: 3636003 - RNA, 22 nt, Human
ggaaaccgaguagaaaauguga

SEQ ID NO: 3636004 - RNA, 19 nt, Human
ggaaaccugcccugccuga

SEQ ID NO: 3636005 - RNA, 14 nt, Human
ggaaaccugucuga

SEQ ID NO: 3636006 - RNA, 18 nt, Human
ggaaacgaaacccacucu

SEQ ID NO: 3636007 - RNA, 15 nt, Human
ggaaacgagacuuuc

SEQ ID NO: 3636008 - RNA, 14 nt, Human
ggaaacuaaaacuu

SEQ ID NO: 3636009 - RNA, 19 nt, Human
ggaaacuaagauucuuuua

SEQ ID NO: 3636010 - RNA, 13 nt, Human
ggaaacuaauaaa

SEQ ID NO: 3636011 - RNA, 18 nt, Human
ggaaacuaauaaaauauu

SEQ ID NO: 3636012 - RNA, 21 nt, Human
ggaaacuaauaaaauauuuuc

SEQ ID NO: 3636013 - RNA, 16 nt, Human
ggaaacuacugccuuu

SEQ ID NO: 3636014 - RNA, 19 nt, Human
ggaaacuauguguuuuucu

SEQ ID NO: 3636015 - RNA, 23 nt, Human
ggaaacuauguguuuuucucaua

SEQ ID NO: 3636016 - RNA, 18 nt, Human
ggaaacuccacaucugcc

SEQ ID NO: 3636017 - RNA, 17 nt, Human
ggaaacucuuaucucag

SEQ ID NO: 3636018 - RNA, 17 nt, Human
ggaaacuguugccagag

SEQ ID NO: 3636019 - RNA, 21 nt, Human
ggaaacuugauuugagauuuu

SEQ ID NO: 3636020 - RNA, 20 nt, Human
ggaaacuugucacuugcaug

SEQ ID NO: 3636021 - RNA, 16 nt, Human
ggaaagaaagaaggaa

SEQ ID NO: 3636022 - RNA, 14 nt, Human
ggaaagacacugcc

SEQ ID NO: 3636023 - RNA, 16 nt, Human
ggaaagacacugccug

SEQ ID NO: 3636024 - RNA, 22 nt, Human
ggaaagacauccauaaagaagc

SEQ ID NO: 3636025 - RNA, 14 nt, Human
ggaaagaggcucug

SEQ ID NO: 3636026 - RNA, 16 nt, Human
ggaaagcaaagcacag

SEQ ID NO: 3636027 - RNA, 21 nt, Human
ggaaagcacagaggccuccug

SEQ ID NO: 3636028 - RNA, 16 nt, Human
ggaaagcacagguggg

SEQ ID NO: 3636029 - RNA, 11 nt, Human
ggaaagcaggu

SEQ ID NO: 3636030 - RNA, 19 nt, Human
ggaaagcagguggcaucuc

SEQ ID NO: 3636031 - RNA, 18 nt, Human
ggaaagcaucaccucagg

SEQ ID NO: 3636032 - RNA, 19 nt, Human
ggaaagcaucaccucaggc

SEQ ID NO: 3636033 - RNA, 14 nt, Human
ggaaagcauuuaaa

SEQ ID NO: 3636034 - RNA, 20 nt, Human
ggaaagccaccucucccuca

SEQ ID NO: 3636035 - RNA, 16 nt, Human
ggaaagccccugcccc

SEQ ID NO: 3636036 - RNA, 18 nt, Human
ggaaagcuccuagcagag

SEQ ID NO: 3636037 - RNA, 12 nt, Human
ggaaaggaauug

SEQ ID NO: 3636038 - RNA, 16 nt, Human
ggaaaggauauuuucu

SEQ ID NO: 3636039 - RNA, 12 nt, Human
ggaaaggccagc

SEQ ID NO: 3636040 - RNA, 16 nt, Human
ggaaaggccagcacuc

SEQ ID NO: 3636041 - RNA, 22 nt, Human
ggaaaggccagcuggcagcaga

SEQ ID NO: 3636042 - RNA, 12 nt, Human
ggaaaggcucag

SEQ ID NO: 3636043 - RNA, 21 nt, Human
ggaaaggcuccaggagcagcc

SEQ ID NO: 3636044 - RNA, 22 nt, Human
ggaaaggcuccaggagcagcca

SEQ ID NO: 3636045 - RNA, 20 nt, Human
ggaaaggcucugaaagccag

SEQ ID NO: 3636046 - RNA, 19 nt, Human
ggaaaggggagagccugcu

SEQ ID NO: 3636047 - RNA, 22 nt, Human
ggaaagggguuggggugacagu

SEQ ID NO: 3636048 - RNA, 16 nt, Human
ggaaaggugguguuuc

SEQ ID NO: 3636049 - RNA, 22 nt, Human
ggaaaguacauuuuuugaaaug

SEQ ID NO: 3636050 - RNA, 21 nt, Human
ggaaagucauuggcuuuaucc

SEQ ID NO: 3636051 - RNA, 13 nt, Human
ggaaagugaauuu

SEQ ID NO: 3636052 - RNA, 13 nt, Human
ggaaaguguaaag

SEQ ID NO: 3636053 - RNA, 15 nt, Human
ggaaaguguaaagca

SEQ ID NO: 3636054 - RNA, 19 nt, Human
ggaaaguucagaguuuucu

SEQ ID NO: 3636055 - RNA, 17 nt, Human
ggaaaguuucuuugaaa

SEQ ID NO: 3636056 - RNA, 14 nt, Human
ggaaauaaaaaagu

SEQ ID NO: 3636057 - RNA, 19 nt, Human
ggaaauaaaaaagucucua

SEQ ID NO: 3636058 - RNA, 22 nt, Human
ggaaauaaaaccuuucaaauuu

SEQ ID NO: 3636059 - RNA, 18 nt, Human
ggaaauacaguucugcuc

SEQ ID NO: 3636060 - RNA, 19 nt, Human
ggaaauacaguucugcucu

SEQ ID NO: 3636061 - RNA, 14 nt, Human
ggaaauauauaugu

SEQ ID NO: 3636062 - RNA, 16 nt, Human
ggaaauauauauuaua

SEQ ID NO: 3636063 - RNA, 14 nt, Human
ggaaauaugaaugc

SEQ ID NO: 3636064 - RNA, 15 nt, Human
ggaaauauuaaaaga

SEQ ID NO: 3636065 - RNA, 22 nt, Human
ggaaauauuaugcaaauuccca

SEQ ID NO: 3636066 - RNA, 17 nt, Human
ggaaauauuuagcaaau

SEQ ID NO: 3636067 - RNA, 12 nt, Human
ggaaauauuuau

SEQ ID NO: 3636068 - RNA, 17 nt, Human
ggaaaucaaauaugcaa

SEQ ID NO: 3636069 - RNA, 16 nt, Human
ggaaaucaacuugcuu

SEQ ID NO: 3636070 - RNA, 19 nt, Human
ggaaaucaucgaaaauuca

SEQ ID NO: 3636071 - RNA, 18 nt, Human
ggaaaucuguaacaggua

SEQ ID NO: 3636072 - RNA, 13 nt, Human
ggaaaucuuuaaa

SEQ ID NO: 3636073 - RNA, 15 nt, Human
ggaaaugaaagaaag

SEQ ID NO: 3636074 - RNA, 13 nt, Human
ggaaaugagcagg

SEQ ID NO: 3636075 - RNA, 16 nt, Human
ggaaaugggcagagca

SEQ ID NO: 3636076 - RNA, 18 nt, Human
ggaaaugggcagagcaga

SEQ ID NO: 3636077 - RNA, 14 nt, Human
ggaauugugugaug

SEQ ID NO: 3636078 - RNA, 13 nt, Human
ggaauuuauaauu

SEQ ID NO: 3636079 - RNA, 14 nt, Human
ggaauuucccagga

SEQ ID NO: 3636080 - RNA, 19 nt, Human
ggaauuucccaggacccug

SEQ ID NO: 3636081 - RNA, 16 nt, Human
ggaauuugccugcugg

SEQ ID NO: 3636082 - RNA, 21 nt, Human
ggaauuuguucaaguuuuggg

SEQ ID NO: 3636083 - RNA, 14 nt, Human
ggacaaaacuucuu

SEQ ID NO: 3636084 - RNA, 15 nt, Human
ggacaaacagcucag

SEQ ID NO: 3636085 - RNA, 14 nt, Human
ggacaaagaaccuu

SEQ ID NO: 3636086 - RNA, 13 nt, Human
ggacaaaggagcc

SEQ ID NO: 3636087 - RNA, 16 nt, Human
ggacaaaggagccugu

SEQ ID NO: 3636088 - RNA, 16 nt, Human
ggacaaagucuccagc

SEQ ID NO: 3636089 - RNA, 17 nt, Human
ggacaaagucuccagcc

SEQ ID NO: 3636090 - RNA, 20 nt, Human
ggacaaagucuccagcccac

SEQ ID NO: 3636091 - RNA, 24 nt, Human
ggacaaagucuccagcccacguuc

SEQ ID NO: 3636092 - RNA, 15 nt, Human
ggacaacgaggaagc

SEQ ID NO: 3636093 - RNA, 22 nt, Human
ggacaacugcucccaccuccug

SEQ ID NO: 3636094 - RNA, 23 nt, Human
ggacaacugcucccaccuccuga

SEQ ID NO: 3636095 - RNA, 16 nt, Human
ggacaagacccccagc

SEQ ID NO: 3636096 - RNA, 15 nt, Human
ggacaagagguacag

SEQ ID NO: 3636097 - RNA, 23 nt, Human
ggacaaggaugaucuaggaagac

SEQ ID NO: 3636098 - RNA, 18 nt, Human
ggacaaggugcaggcagg

SEQ ID NO: 3636099 - RNA, 13 nt, Human
ggacaauaaaccu

SEQ ID NO: 3636100 - RNA, 17 nt, Human
ggacaaucaguccccuc

SEQ ID NO: 3636101 - RNA, 20 nt, Human
ggacaaucaguccccuccca

SEQ ID NO: 3636102 - RNA, 16 nt, Human
ggacaauucaugaacu

SEQ ID NO: 3636103 - RNA, 16 nt, Human
ggacacagaugaaaca

SEQ ID NO: 3636104 - RNA, 13 nt, Human
ggacacagcucuu

SEQ ID NO: 3636105 - RNA, 14 nt, Human
ggacacaggccugu

SEQ ID NO: 3636106 - RNA, 18 nt, Human
ggacacaguuccugggaa

SEQ ID NO: 3636107 - RNA, 21 nt, Human
ggacacaguuccugggaacau

SEQ ID NO: 3636108 - RNA, 21 nt, Human
ggacacauucaacccuggaga

SEQ ID NO: 3636109 - RNA, 22 nt, Human
ggacacauucaacccuggagag

SEQ ID NO: 3636110 - RNA, 17 nt, Human
ggacaccacacccagcc

SEQ ID NO: 3636111 - RNA, 18 nt, Human
ggacaccacacccagccu

SEQ ID NO: 3636112 - RNA, 21 nt, Human
ggacaccacacccagccucag

SEQ ID NO: 3636113 - RNA, 17 nt, Human
ggacaccagccaggcuc

SEQ ID NO: 3636114 - RNA, 20 nt, Human
ggacaccagccaggcucugu

SEQ ID NO: 3636115 - RNA, 12 nt, Human
ggacacccugug

SEQ ID NO: 3636116 - RNA, 11 nt, Human
ggacaccugcc

SEQ ID NO: 3636117 - RNA, 12 nt, Human
ggacaccugccc

SEQ ID NO: 3636118 - RNA, 19 nt, Human
ggacaccugggagaaaucu

SEQ ID NO: 3636119 - RNA, 18 nt, Human
ggacaccuguacuggaga

SEQ ID NO: 3636120 - RNA, 21 nt, Human
ggacaccuguacuggagagca

SEQ ID NO: 3636121 - RNA, 16 nt, Human
ggacacgcucaguggg

SEQ ID NO: 3636122 - RNA, 22 nt, Human
ggacacgcucaguggggcagag

SEQ ID NO: 3636123 - RNA, 21 nt, Human
ggacacgggcagccuggcucc

SEQ ID NO: 3636124 - RNA, 22 nt, Human
ggacacucaaaagcugggcagg

SEQ ID NO: 3636125 - RNA, 14 nt, Human
ggacacuccuagag

SEQ ID NO: 3636126 - RNA, 16 nt, Human
ggacacuuaauacuac

SEQ ID NO: 3636127 - RNA, 18 nt, Human
ggacacuucccucuguuu

SEQ ID NO: 3636128 - RNA, 14 nt, Human
ggacagaagaaggc

SEQ ID NO: 3636129 - RNA, 14 nt, Human
ggacagaagcagcu

SEQ ID NO: 3636130 - RNA, 16 nt, Human
ggacagaagcagcucu

SEQ ID NO: 3636131 - RNA, 18 nt, Human
ggacagaaggcuccugcc

SEQ ID NO: 3636132 - RNA, 14 nt, Human
ggacagagacaccu

SEQ ID NO: 3636133 - RNA, 19 nt, Human
ggacagagacaccugcacc

SEQ ID NO: 3636134 - RNA, 20 nt, Human
ggacagagacaccugcaccu

SEQ ID NO: 3636135 - RNA, 14 nt, Human
ggacagagccaugc

SEQ ID NO: 3636136 - RNA, 17 nt, Human
ggacagaggccccagcc

SEQ ID NO: 3636137 - RNA, 18 nt, Human
ggacagaggccccagccu

SEQ ID NO: 3636138 - RNA, 19 nt, Human
ggacagaggggacucuggg

SEQ ID NO: 3636139 - RNA, 21 nt, Human
ggacagagguuaucuguccca

SEQ ID NO: 3636140 - RNA, 19 nt, Human
ggacagaucaauggcgcag

SEQ ID NO: 3636141 - RNA, 20 nt, Human
ggacagaugccuccuuccuc

SEQ ID NO: 3636142 - RNA, 16 nt, Human
ggacagauucagucuu

SEQ ID NO: 3636143 - RNA, 20 nt, Human
ggacagauucagucuugccu

SEQ ID NO: 3636144 - RNA, 20 nt, Human
ggacagcaaaaccauugcuu

SEQ ID NO: 3636145 - RNA, 22 nt, Human
ggacagcaaaaccauugcuuca

SEQ ID NO: 3636146 - RNA, 19 nt, Human
ggacagcauggugcaugcc

SEQ ID NO: 3636147 - RNA, 19 nt, Human
ggacagccacggccaggcc

SEQ ID NO: 3636148 - RNA, 14 nt, Human
ggacagcccacuga

SEQ ID NO: 3636149 - RNA, 15 nt, Human
ggacagcuccuucug

SEQ ID NO: 3636150 - RNA, 19 nt, Human
ggacagcuccuucuguccu

SEQ ID NO: 3636151 - RNA, 20 nt, Human
ggacagcuccuucuguccua

SEQ ID NO: 3636152 - RNA, 11 nt, Human
ggacagcuguc

SEQ ID NO: 3636153 - RNA, 11 nt, Human
ggacagcugug

SEQ ID NO: 3636154 - RNA, 15 nt, Human
ggacagcugugccuc

SEQ ID NO: 3636155 - RNA, 17 nt, Human
ggacagcugugccucgc

SEQ ID NO: 3636156 - RNA, 12 nt, Human
ggacagcuugug

SEQ ID NO: 3636157 - RNA, 15 nt, Human
ggacaggaccccagc

SEQ ID NO: 3636158 - RNA, 18 nt, Human
ggacaggaccccagcucu

SEQ ID NO: 3636159 - RNA, 16 nt, Human
ggacaggcagaaagag

SEQ ID NO: 3636160 - RNA, 16 nt, Human
ggacaggccucaccuc

SEQ ID NO: 3636161 - RNA, 14 nt, Human
ggacaggcucugcu

SEQ ID NO: 3636162 - RNA, 21 nt, Human
ggacaggcugcggccccuccc

SEQ ID NO: 3636163 - RNA, 15 nt, Human
ggacagggguuccuu

SEQ ID NO: 3636164 - RNA, 18 nt, Human
ggacaguauuugugggga

SEQ ID NO: 3636165 - RNA, 18 nt, Human
ggacagucaccucaugga

SEQ ID NO: 3636166 - RNA, 21 nt, Human
ggacagucaccucauggaauu

SEQ ID NO: 3636167 - RNA, 14 nt, Human
ggacaguccuggga

SEQ ID NO: 3636168 - RNA, 19 nt, Human
ggacagucugcucuagaug

SEQ ID NO: 3636169 - RNA, 16 nt, Human
ggacagugcuucagcc

SEQ ID NO: 3636170 - RNA, 17 nt, Human
ggacagugcuucagccu

SEQ ID NO: 3636171 - RNA, 18 nt, Human
ggacagugcuucagccug

SEQ ID NO: 3636172 - RNA, 23 nt, Human
ggacagugcuugauacaggaaca

SEQ ID NO: 3636173 - RNA, 12 nt, Human
ggacaguggcag

SEQ ID NO: 3636174 - RNA, 13 nt, Human
ggacaguggcagg

SEQ ID NO: 3636175 - RNA, 15 nt, Human
ggacaguucacaccc

SEQ ID NO: 3636176 - RNA, 17 nt, Human
ggacaguucacacccug

SEQ ID NO: 3636177 - RNA, 19 nt, Human
ggacauaacugacuuaguu

SEQ ID NO: 3636178 - RNA, 23 nt, Human
ggacauaaugggguccuggccau

SEQ ID NO: 3636179 - RNA, 22 nt, Human
ggacauagagagggagaagaag

SEQ ID NO: 3636180 - RNA, 16 nt, Human
ggacaugcaauaaaau

SEQ ID NO: 3636181 - RNA, 19 nt, Human
ggacaugcaauaaaauuua

SEQ ID NO: 3636182 - RNA, 16 nt, Human
ggacaugcugaagcca

SEQ ID NO: 3636183 - RNA, 18 nt, Human
ggacauggccccugugag

SEQ ID NO: 3636184 - RNA, 16 nt, Human
ggacauuccaagacag

SEQ ID NO: 3636185 - RNA, 17 nt, Human
ggacauuugcucaugga

SEQ ID NO: 3636186 - RNA, 23 nt, Human
ggaccaaaaaccaguauuguaca

SEQ ID NO: 3636187 - RNA, 20 nt, Human
ggaccaacccuguuuccuga

SEQ ID NO: 3636188 - RNA, 11 nt, Human
ggaccaaggca

SEQ ID NO: 3636189 - RNA, 17 nt, Human
ggaccaaggcaaggcag

SEQ ID NO: 3636190 - RNA, 23 nt, Human
ggaccaaggcaaggcaggugccu

SEQ ID NO: 3636191 - RNA, 21 nt, Human
ggaccacaccucccugaacca

SEQ ID NO: 3636192 - RNA, 20 nt, Human
ggaccacagcaaggcaccug

SEQ ID NO: 3636193 - RNA, 14 nt, Human
ggaccacaggcuca

SEQ ID NO: 3636194 - RNA, 14 nt, Human
ggaccacauuuuau

SEQ ID NO: 3636195 - RNA, 16 nt, Human
ggaccacccugagccg

SEQ ID NO: 3636196 - RNA, 18 nt, Human
ggaccacccugagccggc

SEQ ID NO: 3636197 - RNA, 23 nt, Human
ggaccacgucuauuucaucagaa

SEQ ID NO: 3636198 - RNA, 21 nt, Human
ggaccacucagccccuaggag

SEQ ID NO: 3636199 - RNA, 18 nt, Human
ggaccacuguuucuugcu

SEQ ID NO: 3636200 - RNA, 18 nt, Human
ggaccagaagcuccccca

SEQ ID NO: 3636201 - RNA, 15 nt, Human
ggaccagcacacucc

SEQ ID NO: 3636202 - RNA, 15 nt, Human
ggaccagccagcagc

SEQ ID NO: 3636203 - RNA, 13 nt, Human
ggaccagcccacg

SEQ ID NO: 3636204 - RNA, 16 nt, Human
ggaccagcccacgcug

SEQ ID NO: 3636205 - RNA, 12 nt, Human
ggaccagccugg

SEQ ID NO: 3636206 - RNA, 19 nt, Human
ggaccagcucaggacagau

SEQ ID NO: 3636207 - RNA, 12 nt, Human
ggaccagcuggg

SEQ ID NO: 3636208 - RNA, 22 nt, Human
ggaccagcuggggcguggggag

SEQ ID NO: 3636209 - RNA, 17 nt, Human
ggaccagcuuggcucag

SEQ ID NO: 3636210 - RNA, 18 nt, Human
ggaccagcuuggcucagg

SEQ ID NO: 3636211 - RNA, 15 nt, Human
ggaccaggacucccu

SEQ ID NO: 3636212 - RNA, 20 nt, Human
ggaccaggagugggugggga

SEQ ID NO: 3636213 - RNA, 18 nt, Human
ggaccaggcaccaggcag

SEQ ID NO: 3636214 - RNA, 12 nt, Human
ggaccagggccu

SEQ ID NO: 3636215 - RNA, 17 nt, Human
ggaccaggguuggcacc

SEQ ID NO: 3636216 - RNA, 20 nt, Human
ggaccagugguuuccaguca

SEQ ID NO: 3636217 - RNA, 17 nt, Human
ggaccaucauccuacug

SEQ ID NO: 3636218 - RNA, 14 nt, Human
ggaccauccuauuu

SEQ ID NO: 3636219 - RNA, 21 nt, Human
ggaccauggaguggcagccca

SEQ ID NO: 3636220 - RNA, 16 nt, Human
ggacccaaugcacaca

SEQ ID NO: 3636221 - RNA, 19 nt, Human
ggacccaauguaggagcug

SEQ ID NO: 3636222 - RNA, 22 nt, Human
ggccauccggcccccagagcgc

SEQ ID NO: 3636223 - RNA, 16 nt, Human
ggccaucugcuccugg

SEQ ID NO: 3636224 - RNA, 21 nt, Human
ggccaucugguuaggauggca

SEQ ID NO: 3636225 - RNA, 19 nt, Human
ggccaucuuccaggugggg

SEQ ID NO: 3636226 - RNA, 18 nt, Human
ggccaugacccugccucu

SEQ ID NO: 3636227 - RNA, 20 nt, Human
ggccaugacccugccucucc

SEQ ID NO: 3636228 - RNA, 17 nt, Human
ggccaugagcuccagac

SEQ ID NO: 3636229 - RNA, 14 nt, Human
ggccaugccugccc

SEQ ID NO: 3636230 - RNA, 18 nt, Human
ggccaugcuccucuuccc

SEQ ID NO: 3636231 - RNA, 16 nt, Human
ggccaugcugaaggga

SEQ ID NO: 3636232 - RNA, 14 nt, Human
ggccauggacucug

SEQ ID NO: 3636233 - RNA, 15 nt, Human
ggccauggaggcagu

SEQ ID NO: 3636234 - RNA, 13 nt, Human
ggccauggccugc

SEQ ID NO: 3636235 - RNA, 15 nt, Human
ggccauggccugcaa

SEQ ID NO: 3636236 - RNA, 14 nt, Human
ggccauggcucagg

SEQ ID NO: 3636237 - RNA, 21 nt, Human
ggccaugggaggccuuucccu

SEQ ID NO: 3636238 - RNA, 13 nt, Human
ggccaugggccuc

SEQ ID NO: 3636239 - RNA, 16 nt, Human
ggccaugucagacaca

SEQ ID NO: 3636240 - RNA, 17 nt, Human
ggccaugucagacacag

SEQ ID NO: 3636241 - RNA, 15 nt, Human
ggccauguccaaaga

SEQ ID NO: 3636242 - RNA, 12 nt, Human
ggccauucagca

SEQ ID NO: 3636243 - RNA, 17 nt, Human
ggccauugugaaccaau

SEQ ID NO: 3636244 - RNA, 18 nt, Human
ggccauuugcaauaacag

SEQ ID NO: 3636245 - RNA, 21 nt, Human
ggccauuugcaauaacagcug

SEQ ID NO: 3636246 - RNA, 21 nt, Human
ggcccaaauuaucaagcuaau

SEQ ID NO: 3636247 - RNA, 23 nt, Human
ggcccaaauuaucaagcuaauaa

SEQ ID NO: 3636248 - RNA, 14 nt, Human
ggcccaacauuaaa

SEQ ID NO: 3636249 - RNA, 13 nt, Human
ggcccaacccugu

SEQ ID NO: 3636250 - RNA, 19 nt, Human
ggcccaagagaugaagagu

SEQ ID NO: 3636251 - RNA, 14 nt, Human
ggcccaaggcggcc

SEQ ID NO: 3636252 - RNA, 21 nt, Human
ggcccaaggcggccccucccg

SEQ ID NO: 3636253 - RNA, 14 nt, Human
ggcccaagucccug

SEQ ID NO: 3636254 - RNA, 15 nt, Human
ggcccaagucccugu

SEQ ID NO: 3636255 - RNA, 15 nt, Human
ggcccacacacaggu

SEQ ID NO: 3636256 - RNA, 19 nt, Human
ggcccacagcaggugcuga

SEQ ID NO: 3636257 - RNA, 18 nt, Human
ggcccacauuggaagagc

SEQ ID NO: 3636258 - RNA, 15 nt, Human
ggcccaccagagcug

SEQ ID NO: 3636259 - RNA, 15 nt, Human
ggcccaccagggucc

SEQ ID NO: 3636260 - RNA, 21 nt, Human
ggcccaccuaccuucaaagcu

SEQ ID NO: 3636261 - RNA, 17 nt, Human
ggcccaccuggccaccu

SEQ ID NO: 3636262 - RNA, 18 nt, Human
ggcccaccuggccaccug

SEQ ID NO: 3636263 - RNA, 21 nt, Human
ggcccaccuuccccagaacca

SEQ ID NO: 3636264 - RNA, 23 nt, Human
ggcccacucaggggucacugagg

SEQ ID NO: 3636265 - RNA, 21 nt, Human
ggcccacugugccucagagac

SEQ ID NO: 3636266 - RNA, 12 nt, Human
ggcccagaggca

SEQ ID NO: 3636267 - RNA, 16 nt, Human
ggcccagaggcacagc

SEQ ID NO: 3636268 - RNA, 17 nt, Human
ggcccagagggccugca

SEQ ID NO: 3636269 - RNA, 20 nt, Human
ggcccagcaccacccuccuu

SEQ ID NO: 3636270 - RNA, 17 nt, Human
ggcccagcccccacagu

SEQ ID NO: 3636271 - RNA, 19 nt, Human
ggcccagcccccacagugc

SEQ ID NO: 3636272 - RNA, 12 nt, Human
ggcccagccccu

SEQ ID NO: 3636273 - RNA, 13 nt, Human
ggcccagccccua

SEQ ID NO: 3636274 - RNA, 14 nt, Human
ggcccagcccggcu

SEQ ID NO: 3636275 - RNA, 15 nt, Human
ggcccagcccggcuc

SEQ ID NO: 3636276 - RNA, 19 nt, Human
ggcccagcccggcucccac

SEQ ID NO: 3636277 - RNA, 13 nt, Human
ggcccagcccugc

SEQ ID NO: 3636278 - RNA, 15 nt, Human
ggcccagcccugcug

SEQ ID NO: 3636279 - RNA, 16 nt, Human
ggcccagcccugcugg

SEQ ID NO: 3636280 - RNA, 18 nt, Human
ggcccagccgacccccuc

SEQ ID NO: 3636281 - RNA, 12 nt, Human
ggcccagccggc

SEQ ID NO: 3636282 - RNA, 11 nt, Human
ggcccagccuu

SEQ ID NO: 3636283 - RNA, 12 nt, Human
ggcccagccuuu

SEQ ID NO: 3636284 - RNA, 16 nt, Human
ggcccagcgaccucgg

SEQ ID NO: 3636285 - RNA, 24 nt, Human
ggcccagcgcggacauccccugcu

SEQ ID NO: 3636286 - RNA, 23 nt, Human
ggcccagcggccccucccacaca

SEQ ID NO: 3636287 - RNA, 12 nt, Human
ggcccagcuccc

SEQ ID NO: 3636288 - RNA, 15 nt, Human
ggcccagcugggcuc

SEQ ID NO: 3636289 - RNA, 21 nt, Human
ggcccagcugggcucugccac

SEQ ID NO: 3636290 - RNA, 11 nt, Human
ggcccaggagu

SEQ ID NO: 3636291 - RNA, 13 nt, Human
ggcccaggaguuu

SEQ ID NO: 3636292 - RNA, 19 nt, Human
ggcccaggaguuuggccag

SEQ ID NO: 3636293 - RNA, 20 nt, Human
ggcccaggaguuuggccaga

SEQ ID NO: 3636294 - RNA, 22 nt, Human
ggcccaggaguuuggccagaag

SEQ ID NO: 3636295 - RNA, 15 nt, Human
ggcccaggcaggcca

SEQ ID NO: 3636296 - RNA, 11 nt, Human
ggcccaggcug

SEQ ID NO: 3636297 - RNA, 14 nt, Human
ggcccaggcuggga

SEQ ID NO: 3636298 - RNA, 10 nt, Human
ggcccaggga

SEQ ID NO: 3636299 - RNA, 17 nt, Human
ggcccagggacaccagc

SEQ ID NO: 3636300 - RNA, 19 nt, Human
ggcccagggacaccagcca

SEQ ID NO: 3636301 - RNA, 23 nt, Human
ggcccagggacaccagccaggcu

SEQ ID NO: 3636302 - RNA, 19 nt, Human
ggcccagggcaagcuccgc

SEQ ID NO: 3636303 - RNA, 22 nt, Human
ggcccagggcaagcuccgcagg

SEQ ID NO: 3636304 - RNA, 12 nt, Human
ggcccagggcau

SEQ ID NO: 3636305 - RNA, 16 nt, Human
ggcccagggcccagag

SEQ ID NO: 3636306 - RNA, 21 nt, Human
ggcccagggcccagagcccag

SEQ ID NO: 3636307 - RNA, 18 nt, Human
ggcccaggggaggcggca

SEQ ID NO: 3636308 - RNA, 19 nt, Human
ggcccaggguggccacacc

SEQ ID NO: 3636309 - RNA, 18 nt, Human
ggcccaggucagccacug

SEQ ID NO: 3636310 - RNA, 20 nt, Human
ggcccaggucagccacuguu

SEQ ID NO: 3636311 - RNA, 22 nt, Human
ggcccaguaugagcccuagaag

SEQ ID NO: 3636312 - RNA, 16 nt, Human
ggcccaguccuggccu

SEQ ID NO: 3636313 - RNA, 21 nt, Human
ggcccaguccuggccuggcuu

SEQ ID NO: 3636314 - RNA, 18 nt, Human
ggcccagugcaugguggc

SEQ ID NO: 3636315 - RNA, 22 nt, Human
ggcccagugcaugguggccaga

SEQ ID NO: 3636316 - RNA, 19 nt, Human
ggcccagugucaaguugug

SEQ ID NO: 3636317 - RNA, 18 nt, Human
ggcccauagcagccaguu

SEQ ID NO: 3636318 - RNA, 16 nt, Human
ggcccaucaguguacc

SEQ ID NO: 3636319 - RNA, 19 nt, Human
ggcccaucauggggggagc

SEQ ID NO: 3636320 - RNA, 13 nt, Human
ggcccaucucccu

SEQ ID NO: 3636321 - RNA, 23 nt, Human
ggcccauggcuguuggugggacc

SEQ ID NO: 3636322 - RNA, 16 nt, Human
ggcccaugggagggag

SEQ ID NO: 3636323 - RNA, 17 nt, Human
ggcccaugggagggagc

SEQ ID NO: 3636324 - RNA, 17 nt, Human
ggcccauggggaggacg

SEQ ID NO: 3636325 - RNA, 19 nt, Human
ggcccauguauggccagga

SEQ ID NO: 3636326 - RNA, 14 nt, Human
ggcccauucuacuu

SEQ ID NO: 3636327 - RNA, 18 nt, Human
ggcccauucuacuugcuc

SEQ ID NO: 3636328 - RNA, 21 nt, Human
ggcccauucuacuugcucugg

SEQ ID NO: 3636329 - RNA, 18 nt, Human
ggccccaacccuguccuc

SEQ ID NO: 3636330 - RNA, 23 nt, Human
ggccccacucccuugcuggcccc

SEQ ID NO: 3636331 - RNA, 18 nt, Human
ggccccagcacagcuuga

SEQ ID NO: 3636332 - RNA, 17 nt, Human
ggccccagcaccucagc

SEQ ID NO: 3636333 - RNA, 20 nt, Human
ggccccagcaccucagccug

SEQ ID NO: 3636334 - RNA, 21 nt, Human
ggccccagcacuaaagcagug

SEQ ID NO: 3636335 - RNA, 21 nt, Human
ggccccagccagaguuccugc

SEQ ID NO: 3636336 - RNA, 13 nt, Human
ggccccagcccac

SEQ ID NO: 3636337 - RNA, 15 nt, Human
ggccccagcccugcu

SEQ ID NO: 3636338 - RNA, 17 nt, Human
ggccccagccuggccca

SEQ ID NO: 3636339 - RNA, 22 nt, Human
ggccccagccuggcccagcucc

SEQ ID NO: 3636340 - RNA, 13 nt, Human
ggccccaggaagc

SEQ ID NO: 3636341 - RNA, 16 nt, Human
ggccccaggaccuggc

SEQ ID NO: 3636342 - RNA, 21 nt, Human
ggccccaggaccuggcugcca

SEQ ID NO: 3636343 - RNA, 13 nt, Human
ggccccagggcac

SEQ ID NO: 3636344 - RNA, 18 nt, Human
ggccccagggcuacccuc

SEQ ID NO: 3636345 - RNA, 17 nt, Human
ggccccagucagccucu

SEQ ID NO: 3636346 - RNA, 23 nt, Human
ggccccagucagccucucuccca

SEQ ID NO: 3636347 - RNA, 16 nt, Human
ggcccccaaccucagg

SEQ ID NO: 3636348 - RNA, 20 nt, Human
ggcccccaaccucagggcuc

SEQ ID NO: 3636349 - RNA, 21 nt, Human
ggcccccaaccucagggcucc

SEQ ID NO: 3636350 - RNA, 23 nt, Human
ggcccccaaccucagggcuccca

SEQ ID NO: 3636351 - RNA, 24 nt, Human
ggcccccacauuugugccgacacu

SEQ ID NO: 3636352 - RNA, 21 nt, Human
ggcccccaccacacaucccag

SEQ ID NO: 3636353 - RNA, 18 nt, Human
ggcccccacuggcugugg

SEQ ID NO: 3636354 - RNA, 15 nt, Human
ggcccccacuugccu

SEQ ID NO: 3636355 - RNA, 16 nt, Human
ggcccccacuugccuc

SEQ ID NO: 3636356 - RNA, 17 nt, Human
ggcccccaggugccagu

SEQ ID NO: 3636357 - RNA, 15 nt, Human
ggcccccaucucaug

SEQ ID NO: 3636358 - RNA, 19 nt, Human
ggccccccagcucaggggc

SEQ ID NO: 3636359 - RNA, 14 nt, Human
ggcccccccagcug

SEQ ID NO: 3636360 - RNA, 14 nt, Human
ggccccccugcccu

SEQ ID NO: 3636361 - RNA, 16 nt, Human
ggccccccugcccugu

SEQ ID NO: 3636362 - RNA, 15 nt, Human
ggccccccugguccc

SEQ ID NO: 3636363 - RNA, 15 nt, Human
ggcccccuccaucgg

SEQ ID NO: 3636364 - RNA, 14 nt, Human
ggcccccuguccuc

SEQ ID NO: 3636365 - RNA, 18 nt, Human
ggcccccuuucccgggcu

SEQ ID NO: 3636366 - RNA, 19 nt, Human
ggcccccuuucccgggcug

SEQ ID NO: 3636367 - RNA, 15 nt, Human
ggccugaugcucccu

SEQ ID NO: 3636368 - RNA, 20 nt, Human
ggccugaugcucccuccccu

SEQ ID NO: 3636369 - RNA, 23 nt, Human
ggccugaugcucccuccccugcc

SEQ ID NO: 3636370 - RNA, 16 nt, Human
ggccugcaaacuggga

SEQ ID NO: 3636371 - RNA, 16 nt, Human
ggccugcaagggagug

SEQ ID NO: 3636372 - RNA, 12 nt, Human
ggccugcacaca

SEQ ID NO: 3636373 - RNA, 14 nt, Human
ggccugcacaguga

SEQ ID NO: 3636374 - RNA, 21 nt, Human
ggccugcacggugggccuugc

SEQ ID NO: 3636375 - RNA, 20 nt, Human
ggccugcagcaggaguggug

SEQ ID NO: 3636376 - RNA, 21 nt, Human
ggccugcaggaccugccugua

SEQ ID NO: 3636377 - RNA, 13 nt, Human
ggccugccagacg

SEQ ID NO: 3636378 - RNA, 12 nt, Human
ggccugccagga

SEQ ID NO: 3636379 - RNA, 14 nt, Human
ggccugccaggagg

SEQ ID NO: 3636380 - RNA, 16 nt, Human
ggccugcccucaggga

SEQ ID NO: 3636381 - RNA, 21 nt, Human
ggccugccgggcugagggccu

SEQ ID NO: 3636382 - RNA, 18 nt, Human
ggccugccuccagggcug

SEQ ID NO: 3636383 - RNA, 19 nt, Human
ggccugccuccagggcugg

SEQ ID NO: 3636384 - RNA, 11 nt, Human
ggccugccugu

SEQ ID NO: 3636385 - RNA, 18 nt, Human
ggccugccuugaagccac

SEQ ID NO: 3636386 - RNA, 18 nt, Human
ggccugcgacccuggggg

SEQ ID NO: 3636387 - RNA, 23 nt, Human
ggccugcgacccugggggcacag

SEQ ID NO: 3636388 - RNA, 14 nt, Human
ggccugcuccagac

SEQ ID NO: 3636389 - RNA, 14 nt, Human
ggccugcugcugag

SEQ ID NO: 3636390 - RNA, 15 nt, Human
ggccugcugcugaga

SEQ ID NO: 3636391 - RNA, 22 nt, Human
ggccugcugcugagaaccuggc

SEQ ID NO: 3636392 - RNA, 23 nt, Human
ggccugcugcugagaaccuggcc

SEQ ID NO: 3636393 - RNA, 20 nt, Human
ggccugcuggaggccucagg

SEQ ID NO: 3636394 - RNA, 19 nt, Human
ggccugcugugauuccacu

SEQ ID NO: 3636395 - RNA, 16 nt, Human
ggccuggaccugccuc

SEQ ID NO: 3636396 - RNA, 11 nt, Human
ggccuggagau

SEQ ID NO: 3636397 - RNA, 21 nt, Human
ggccuggagcaggccuugcgc

SEQ ID NO: 3636398 - RNA, 21 nt, Human
ggccuggaucuccccacucua

SEQ ID NO: 3636399 - RNA, 11 nt, Human
ggccuggaugc

SEQ ID NO: 3636400 - RNA, 19 nt, Human
ggccuggauucauuuccug

SEQ ID NO: 3636401 - RNA, 17 nt, Human
ggccuggcacaucagaa

SEQ ID NO: 3636402 - RNA, 14 nt, Human
ggccuggcagcuca

SEQ ID NO: 3636403 - RNA, 19 nt, Human
ggccuggcauggcaccugu

SEQ ID NO: 3636404 - RNA, 13 nt, Human
ggccuggcauucu

SEQ ID NO: 3636405 - RNA, 14 nt, Human
ggccuggccaccuc

SEQ ID NO: 3636406 - RNA, 16 nt, Human
ggccuggccaccucuc

SEQ ID NO: 3636407 - RNA, 12 nt, Human
ggccuggccaga

SEQ ID NO: 3636408 - RNA, 18 nt, Human
ggccuggccagggccugg

SEQ ID NO: 3636409 - RNA, 23 nt, Human
ggccuggcccacagcaggugcug

SEQ ID NO: 3636410 - RNA, 12 nt, Human
ggccuggcccau

SEQ ID NO: 3636411 - RNA, 15 nt, Human
ggccuggccccucag

SEQ ID NO: 3636412 - RNA, 23 nt, Human
ggccuggccccucagggucccug

SEQ ID NO: 3636413 - RNA, 13 nt, Human
ggccuggccugag

SEQ ID NO: 3636414 - RNA, 16 nt, Human
ggccuggccugagcug

SEQ ID NO: 3636415 - RNA, 11 nt, Human
ggccuggcugg

SEQ ID NO: 3636416 - RNA, 12 nt, Human
ggccuggcuggc

SEQ ID NO: 3636417 - RNA, 19 nt, Human
ggccuggcuggcugagggc

SEQ ID NO: 3636418 - RNA, 21 nt, Human
ggccugggacaacugcuccca

SEQ ID NO: 3636419 - RNA, 11 nt, Human
ggccugggagg

SEQ ID NO: 3636420 - RNA, 14 nt, Human
ggccugggcaggag

SEQ ID NO: 3636421 - RNA, 19 nt, Human
ggccugggcaggagggagg

SEQ ID NO: 3636422 - RNA, 14 nt, Human
ggccugggccagag

SEQ ID NO: 3636423 - RNA, 12 nt, Human
ggccugggccug

SEQ ID NO: 3636424 - RNA, 17 nt, Human
ggccugggcuaggggac

SEQ ID NO: 3636425 - RNA, 18 nt, Human
ggccugggcuccuggacc

SEQ ID NO: 3636426 - RNA, 16 nt, Human
ggccuggggcuccuuu

SEQ ID NO: 3636427 - RNA, 18 nt, Human
ggccugggggcagggaga

SEQ ID NO: 3636428 - RNA, 11 nt, Human
ggccuggggug

SEQ ID NO: 3636429 - RNA, 18 nt, Human
ggccuggggugacccggc

SEQ ID NO: 3636430 - RNA, 11 nt, Human
ggccuggguuu

SEQ ID NO: 3636431 - RNA, 22 nt, Human
ggccugguuaaauaaggcaggg

SEQ ID NO: 3636432 - RNA, 23 nt, Human
ggccugguuaaauaaggcagggu

SEQ ID NO: 3636433 - RNA, 15 nt, Human
ggccuguccacaggc

SEQ ID NO: 3636434 - RNA, 21 nt, Human
ggccugucccuggccaucucu

SEQ ID NO: 3636435 - RNA, 22 nt, Human
ggccugucucaagcucuuccuu

SEQ ID NO: 3636436 - RNA, 20 nt, Human
ggccugucucauccccaggg

SEQ ID NO: 3636437 - RNA, 19 nt, Human
ggccugucucggaaccugu

SEQ ID NO: 3636438 - RNA, 13 nt, Human
ggccugucuguga

SEQ ID NO: 3636439 - RNA, 22 nt, Human
ggccugucugugaagagcaaga

SEQ ID NO: 3636440 - RNA, 11 nt, Human
ggccugugagc

SEQ ID NO: 3636441 - RNA, 22 nt, Human
ggccuguggaaugagugugcau

SEQ ID NO: 3636442 - RNA, 19 nt, Human
ggccuguguagcugugacc

SEQ ID NO: 3636443 - RNA, 22 nt, Human
ggccuguguagcugugaccugc

SEQ ID NO: 3636444 - RNA, 23 nt, Human
ggccuguguagcugugaccugcu

SEQ ID NO: 3636445 - RNA, 20 nt, Human
ggccugugucccaugaccca

SEQ ID NO: 3636446 - RNA, 21 nt, Human
ggccugugucuaguuguuuga

SEQ ID NO: 3636447 - RNA, 18 nt, Human
ggccuguguggccacuuc

SEQ ID NO: 3636448 - RNA, 16 nt, Human
ggccuguguucuuccu

SEQ ID NO: 3636449 - RNA, 22 nt, Human
ggccuguguucuuccuggccgc

SEQ ID NO: 3636450 - RNA, 15 nt, Human
ggccuguugcuauag

SEQ ID NO: 3636451 - RNA, 16 nt, Human
ggccuuaauuuccuuu

SEQ ID NO: 3636452 - RNA, 20 nt, Human
ggccuuaauuuccuuuuuga

SEQ ID NO: 3636453 - RNA, 15 nt, Human
ggccuuagggcacug

SEQ ID NO: 3636454 - RNA, 22 nt, Human
ggccuuagugggccagggcugc

SEQ ID NO: 3636455 - RNA, 20 nt, Human
ggccuucacaaucugucagu

SEQ ID NO: 3636456 - RNA, 17 nt, Human
ggccuucagggagugag

SEQ ID NO: 3636457 - RNA, 13 nt, Human
ggccuuccccagc

SEQ ID NO: 3636458 - RNA, 14 nt, Human
ggccuuccugcccu

SEQ ID NO: 3636459 - RNA, 12 nt, Human
ggccuucucuga

SEQ ID NO: 3636460 - RNA, 16 nt, Human
ggccuugaguccccca

SEQ ID NO: 3636461 - RNA, 13 nt, Human
ggccuugcccaga

SEQ ID NO: 3636462 - RNA, 16 nt, Human
ggccuugcccagagau

SEQ ID NO: 3636463 - RNA, 17 nt, Human
ggccuugcggcuccuca

SEQ ID NO: 3636464 - RNA, 11 nt, Human
ggccuugcuga

SEQ ID NO: 3636465 - RNA, 19 nt, Human
ggccuugggcccucugguu

SEQ ID NO: 3636466 - RNA, 13 nt, Human
ggccuugggcucc

SEQ ID NO: 3636467 - RNA, 14 nt, Human
ggccuuguggucca

SEQ ID NO: 3636468 - RNA, 22 nt, Human
ggccuuuaaaauuuuuuuagaa

SEQ ID NO: 3636469 - RNA, 12 nt, Human
ggccuuucccac

SEQ ID NO: 3636470 - RNA, 15 nt, Human
ggccuuucccuaagc

SEQ ID NO: 3636471 - RNA, 16 nt, Human
ggccuuucugugugug

SEQ ID NO: 3636472 - RNA, 14 nt, Human
ggccuuugcgcucc

SEQ ID NO: 3636473 - RNA, 16 nt, Human
ggccuuugcuuaugaa

SEQ ID NO: 3636474 - RNA, 13 nt, Human
ggccuuuggcuuc

SEQ ID NO: 3636475 - RNA, 12 nt, Human
ggccuuuuccua

SEQ ID NO: 3636476 - RNA, 16 nt, Human
ggccuuuucuggcacc

SEQ ID NO: 3636477 - RNA, 15 nt, Human
ggccuuuuucauuua

SEQ ID NO: 3636478 - RNA, 20 nt, Human
ggcgacagagcgagacuccg

SEQ ID NO: 3636479 - RNA, 17 nt, Human
ggcgaccaccgccccug

SEQ ID NO: 3636480 - RNA, 19 nt, Human
ggcgaccccgucacagccu

SEQ ID NO: 3636481 - RNA, 18 nt, Human
ggcgagaagggcugcuuc

SEQ ID NO: 3636482 - RNA, 18 nt, Human
ggcgagagaggagccaga

SEQ ID NO: 3636483 - RNA, 21 nt, Human
ggcgaggggaggguggcaggu

SEQ ID NO: 3636484 - RNA, 18 nt, Human
ggcgaucacaacgugcau

SEQ ID NO: 3636485 - RNA, 22 nt, Human
ggcgcaagccuguaaucccagc

SEQ ID NO: 3636486 - RNA, 18 nt, Human
ggcgcaagggaggcccag

SEQ ID NO: 3636487 - RNA, 20 nt, Human
ggcgcaagggaggcccagcg

SEQ ID NO: 3636488 - RNA, 12 nt, Human
ggcgcacuguga

SEQ ID NO: 3636489 - RNA, 22 nt, Human
ggcgcacuuuccuccuggcaga

SEQ ID NO: 3636490 - RNA, 23 nt, Human
ggcgcagcauauucaggaagcuc

SEQ ID NO: 3636491 - RNA, 16 nt, Human
ggcgcaggugggcugg

SEQ ID NO: 3636492 - RNA, 17 nt, Human
ggcgcagugccucuggu

SEQ ID NO: 3636493 - RNA, 18 nt, Human
ggcgccaccagcucugcc

SEQ ID NO: 3636494 - RNA, 15 nt, Human
ggcgccaccauccug

SEQ ID NO: 3636495 - RNA, 19 nt, Human
ggcgccccaacccguggag

SEQ ID NO: 3636496 - RNA, 18 nt, Human
ggcgccccccccucccca

SEQ ID NO: 3636497 - RNA, 11 nt, Human
ggcgcccucug

SEQ ID NO: 3636498 - RNA, 12 nt, Human
ggcgcccuggaa

SEQ ID NO: 3636499 - RNA, 16 nt, Human
ggcgcccuggaagccg

SEQ ID NO: 3636500 - RNA, 18 nt, Human
ggcgccgugcugggcagc

SEQ ID NO: 3636501 - RNA, 19 nt, Human
ggcgccgugcugggcagcc

SEQ ID NO: 3636502 - RNA, 22 nt, Human
ggcgccucaacucugcugaggg

SEQ ID NO: 3636503 - RNA, 18 nt, Human
ggcgccuguagucccagc

SEQ ID NO: 3636504 - RNA, 16 nt, Human
ggcgcuauuacaaaua

SEQ ID NO: 3636505 - RNA, 12 nt, Human
ggcgcuggccca

SEQ ID NO: 3636506 - RNA, 14 nt, Human
ggcgcuggcccagc

SEQ ID NO: 3636507 - RNA, 20 nt, Human
ggcggaccuuguagugagcc

SEQ ID NO: 3636508 - RNA, 21 nt, Human
ggcggaccuuguagugagccg

SEQ ID NO: 3636509 - RNA, 17 nt, Human
ggcggacguuccagccg

SEQ ID NO: 3636510 - RNA, 13 nt, Human
ggcggagccggcc

SEQ ID NO: 3636511 - RNA, 14 nt, Human
ggcggagcuggccc

SEQ ID NO: 3636512 - RNA, 17 nt, Human
ggcggagcuggccccgc

SEQ ID NO: 3636513 - RNA, 23 nt, Human
gggguucccuuuuuuggcugcug

SEQ ID NO: 3636514 - RNA, 18 nt, Human
gggguuccucaaauuuuu

SEQ ID NO: 3636515 - RNA, 18 nt, Human
gggguuccuucugggcau

SEQ ID NO: 3636516 - RNA, 20 nt, Human
gggguucuuucuuccucugc

SEQ ID NO: 3636517 - RNA, 20 nt, Human
gggguugccacaggccuccc

SEQ ID NO: 3636518 - RNA, 19 nt, Human
gggguuucgcagccugagu

SEQ ID NO: 3636519 - RNA, 22 nt, Human
ggguaaaauuccuuagcuuaga

SEQ ID NO: 3636520 - RNA, 11 nt, Human
ggguaaacaau

SEQ ID NO: 3636521 - RNA, 21 nt, Human
ggguaaacccucacaucagag

SEQ ID NO: 3636522 - RNA, 19 nt, Human
ggguaacuaacuaaaacaa

SEQ ID NO: 3636523 - RNA, 13 nt, Human
ggguaagagagga

SEQ ID NO: 3636524 - RNA, 16 nt, Human
ggguaaggcccccucu

SEQ ID NO: 3636525 - RNA, 20 nt, Human
ggguaagggauuucuuaggg

SEQ ID NO: 3636526 - RNA, 16 nt, Human
ggguaaugagaggugg

SEQ ID NO: 3636527 - RNA, 20 nt, Human
ggguaauuuagauuguaaac

SEQ ID NO: 3636528 - RNA, 15 nt, Human
ggguacagcugggcu

SEQ ID NO: 3636529 - RNA, 18 nt, Human
ggguacccacugcucugg

SEQ ID NO: 3636530 - RNA, 23 nt, Human
ggguaccuugaacacugggggag

SEQ ID NO: 3636531 - RNA, 12 nt, Human
ggguacuaaauu

SEQ ID NO: 3636532 - RNA, 19 nt, Human
ggguacuuguggacacagc

SEQ ID NO: 3636533 - RNA, 22 nt, Human
ggguacuuguggacacagcucu

SEQ ID NO: 3636534 - RNA, 23 nt, Human
ggguacuuguggacacagcucuu

SEQ ID NO: 3636535 - RNA, 17 nt, Human
ggguagcagcuggacua

SEQ ID NO: 3636536 - RNA, 22 nt, Human
ggguagcagguaccacugauuu

SEQ ID NO: 3636537 - RNA, 21 nt, Human
ggguagccacuggacugacga

SEQ ID NO: 3636538 - RNA, 22 nt, Human
ggguagcccgccugccaguccu

SEQ ID NO: 3636539 - RNA, 20 nt, Human
ggguagcugccacuugaaca

SEQ ID NO: 3636540 - RNA, 21 nt, Human
ggguagcuucugaccucagca

SEQ ID NO: 3636541 - RNA, 19 nt, Human
ggguaggagggugggaagg

SEQ ID NO: 3636542 - RNA, 12 nt, Human
ggguaggcagga

SEQ ID NO: 3636543 - RNA, 16 nt, Human
ggguaggcgggaagga

SEQ ID NO: 3636544 - RNA, 14 nt, Human
ggguaggcuggagu

SEQ ID NO: 3636545 - RNA, 15 nt, Human
ggguagggaauaaaa

SEQ ID NO: 3636546 - RNA, 16 nt, Human
ggguauaucugggcug

SEQ ID NO: 3636547 - RNA, 23 nt, Human
ggguauauuuuuguuuguuuugu

SEQ ID NO: 3636548 - RNA, 22 nt, Human
ggguauggcguaaguacagaga

SEQ ID NO: 3636549 - RNA, 16 nt, Human
ggguauugcuugccac

SEQ ID NO: 3636550 - RNA, 12 nt, Human
ggguauuggaaa

SEQ ID NO: 3636551 - RNA, 12 nt, Human
gggucaaggaau

SEQ ID NO: 3636552 - RNA, 12 nt, Human
gggucacaggaa

SEQ ID NO: 3636553 - RNA, 22 nt, Human
gggucacucuggcagcucagag

SEQ ID NO: 3636554 - RNA, 16 nt, Human
gggucagaaacaggac

SEQ ID NO: 3636555 - RNA, 20 nt, Human
gggucagaggaccuguauuu

SEQ ID NO: 3636556 - RNA, 17 nt, Human
gggucagccagggccag

SEQ ID NO: 3636557 - RNA, 21 nt, Human
gggucaggccuuugagcucag

SEQ ID NO: 3636558 - RNA, 19 nt, Human
gggucagguugacaggagg

SEQ ID NO: 3636559 - RNA, 13 nt, Human
gggucagugcugc

SEQ ID NO: 3636560 - RNA, 18 nt, Human
gggucauagauguuuccu

SEQ ID NO: 3636561 - RNA, 14 nt, Human
gggucaugcccucc

SEQ ID NO: 3636562 - RNA, 13 nt, Human
ggguccagaagga

SEQ ID NO: 3636563 - RNA, 11 nt, Human
ggguccaggag

SEQ ID NO: 3636564 - RNA, 18 nt, Human
ggguccaggauuccucuu

SEQ ID NO: 3636565 - RNA, 20 nt, Human
ggguccaggccuacuccugu

SEQ ID NO: 3636566 - RNA, 16 nt, Human
ggguccagggagcagg

SEQ ID NO: 3636567 - RNA, 19 nt, Human
ggguccaguggaugccaca

SEQ ID NO: 3636568 - RNA, 22 nt, Human
gggucccaagcugggccccagc

SEQ ID NO: 3636569 - RNA, 16 nt, Human
gggucccagugggagg

SEQ ID NO: 3636570 - RNA, 17 nt, Human
gggucccagugggaggg

SEQ ID NO: 3636571 - RNA, 17 nt, Human
ggguccccaucauccca

SEQ ID NO: 3636572 - RNA, 22 nt, Human
ggguccccaucaucccagcugc

SEQ ID NO: 3636573 - RNA, 15 nt, Human
ggguccggcagcuuc

SEQ ID NO: 3636574 - RNA, 20 nt, Human
ggguccuaauuaccagucuu

SEQ ID NO: 3636575 - RNA, 15 nt, Human
ggguccuccuccagg

SEQ ID NO: 3636576 - RNA, 19 nt, Human
ggguccucugagacuccag

SEQ ID NO: 3636577 - RNA, 23 nt, Human
ggguccugcagccugcaggaccu

SEQ ID NO: 3636578 - RNA, 15 nt, Human
ggguccuggccaucc

SEQ ID NO: 3636579 - RNA, 18 nt, Human
ggguccuucccucucccc

SEQ ID NO: 3636580 - RNA, 12 nt, Human
ggguccuuccug

SEQ ID NO: 3636581 - RNA, 13 nt, Human
ggguccuuccuga

SEQ ID NO: 3636582 - RNA, 14 nt, Human
gggucgaaagcucu

SEQ ID NO: 3636583 - RNA, 13 nt, Human
gggucgcccugga

SEQ ID NO: 3636584 - RNA, 14 nt, Human
gggucgcccuggac

SEQ ID NO: 3636585 - RNA, 14 nt, Human
gggucggcugacca

SEQ ID NO: 3636586 - RNA, 19 nt, Human
gggucgggggcaggugcug

SEQ ID NO: 3636587 - RNA, 18 nt, Human
gggucguggagagcuagg

SEQ ID NO: 3636588 - RNA, 17 nt, Human
gggucuauuccagcuca

SEQ ID NO: 3636589 - RNA, 19 nt, Human
gggucuccaggaggagacu

SEQ ID NO: 3636590 - RNA, 16 nt, Human
gggucucccucuccug

SEQ ID NO: 3636591 - RNA, 18 nt, Human
gggucucccucuccugcc

SEQ ID NO: 3636592 - RNA, 19 nt, Human
gggucucccucuccugccu

SEQ ID NO: 3636593 - RNA, 20 nt, Human
gggucucuagugcugugaaa

SEQ ID NO: 3636594 - RNA, 18 nt, Human
gggucucucacagacagg

SEQ ID NO: 3636595 - RNA, 18 nt, Human
gggucucucccucaggug

SEQ ID NO: 3636596 - RNA, 12 nt, Human
gggucucugcug

SEQ ID NO: 3636597 - RNA, 21 nt, Human
gggucucuuuuguaaauuaaa

SEQ ID NO: 3636598 - RNA, 21 nt, Human
gggucugagucauggccgggu

SEQ ID NO: 3636599 - RNA, 23 nt, Human
gggucugcucccaaggggccuga

SEQ ID NO: 3636600 - RNA, 19 nt, Human
gggucugcucuuucucugc

SEQ ID NO: 3636601 - RNA, 22 nt, Human
gggucuggaguugaucuggaac

SEQ ID NO: 3636602 - RNA, 15 nt, Human
gggucuggcugagcu

SEQ ID NO: 3636603 - RNA, 13 nt, Human
gggucuggcuggu

SEQ ID NO: 3636604 - RNA, 15 nt, Human
gggucuggcuggugu

SEQ ID NO: 3636605 - RNA, 16 nt, Human
gggucuguaaaaucuu

SEQ ID NO: 3636606 - RNA, 21 nt, Human
gggucuguaaaaucuuucuuu

SEQ ID NO: 3636607 - RNA, 17 nt, Human
gggucugugugaaugug

SEQ ID NO: 3636608 - RNA, 22 nt, Human
gggucuugcaaaauuccugacg

SEQ ID NO: 3636609 - RNA, 14 nt, Human
gggugaaagaaauc

SEQ ID NO: 3636610 - RNA, 15 nt, Human
gggugaacuugguuc

SEQ ID NO: 3636611 - RNA, 14 nt, Human
gggugaaggcuggc

SEQ ID NO: 3636612 - RNA, 15 nt, Human
gggugaaggcuggca

SEQ ID NO: 3636613 - RNA, 17 nt, Human
gggugaagugaagacaa

SEQ ID NO: 3636614 - RNA, 18 nt, Human
gggugacagucaucauca

SEQ ID NO: 3636615 - RNA, 20 nt, Human
gggugacccggcacccccug

SEQ ID NO: 3636616 - RNA, 15 nt, Human
gggugaccuccggcc

SEQ ID NO: 3636617 - RNA, 18 nt, Human
gggugacgggacucaggc

SEQ ID NO: 3636618 - RNA, 22 nt, Human
gggugacgggacucaggcggga

SEQ ID NO: 3636619 - RNA, 19 nt, Human
gggugaguccauucuccca

SEQ ID NO: 3636620 - RNA, 18 nt, Human
gggugaguccuccagaac

SEQ ID NO: 3636621 - RNA, 17 nt, Human
gggugaugagggcagca

SEQ ID NO: 3636622 - RNA, 16 nt, Human
gggugaugccagguuc

SEQ ID NO: 3636623 - RNA, 16 nt, Human
gggugauuucagagag

SEQ ID NO: 3636624 - RNA, 14 nt, Human
gggugcacaggagg

SEQ ID NO: 3636625 - RNA, 19 nt, Human
gggugcacaggaggggguc

SEQ ID NO: 3636626 - RNA, 14 nt, Human
gggugccgccugcc

SEQ ID NO: 3636627 - RNA, 24 nt, Human
gggugccuaggccugggcagugga

SEQ ID NO: 3636628 - RNA, 19 nt, Human
gggugcuacuggggaaacu

SEQ ID NO: 3636629 - RNA, 12 nt, Human
gggugcucagaa

SEQ ID NO: 3636630 - RNA, 23 nt, Human
gggugcugcuucccucugccugu

SEQ ID NO: 3636631 - RNA, 19 nt, Human
gggugcuggcugcccagac

SEQ ID NO: 3636632 - RNA, 17 nt, Human
gggugcugggccccugc

SEQ ID NO: 3636633 - RNA, 18 nt, Human
gggugcugggccccugcc

SEQ ID NO: 3636634 - RNA, 20 nt, Human
ggguggagaacuccuagggu

SEQ ID NO: 3636635 - RNA, 15 nt, Human
ggguggaggagagcc

SEQ ID NO: 3636636 - RNA, 14 nt, Human
ggguggaggggugu

SEQ ID NO: 3636637 - RNA, 17 nt, Human
ggguggaucacgagguc

SEQ ID NO: 3636638 - RNA, 13 nt, Human
ggguggaugccug

SEQ ID NO: 3636639 - RNA, 17 nt, Human
ggguggaugccuggugg

SEQ ID NO: 3636640 - RNA, 19 nt, Human
ggguggcaccagcagccug

SEQ ID NO: 3636641 - RNA, 13 nt, Human
ggguggccaggcc

SEQ ID NO: 3636642 - RNA, 18 nt, Human
ggguggccaggccgggaa

SEQ ID NO: 3636643 - RNA, 13 nt, Human
ggguggcccaucc

SEQ ID NO: 3636644 - RNA, 21 nt, Human
ggguggccgcugaguggcagg

SEQ ID NO: 3636645 - RNA, 22 nt, Human
ggguggccuaagaguugagcuc

SEQ ID NO: 3636646 - RNA, 14 nt, Human
ggguggccucccaa

SEQ ID NO: 3636647 - RNA, 11 nt, Human
ggguggccucg

SEQ ID NO: 3636648 - RNA, 19 nt, Human
ggguggcuacucugugcca

SEQ ID NO: 3636649 - RNA, 23 nt, Human
ggguggcuacucugugccagagc

SEQ ID NO: 3636650 - RNA, 18 nt, Human
gggugggacacccuguga

SEQ ID NO: 3636651 - RNA, 14 nt, Human
gggugggagagccc

SEQ ID NO: 3636652 - RNA, 17 nt, Human
gggugggauggaggaga

SEQ ID NO: 3636653 - RNA, 13 nt, Human
gggugggccucug

SEQ ID NO: 3636654 - RNA, 13 nt, Human
ggguggggagaga

SEQ ID NO: 3636655 - RNA, 14 nt, Human
ggguggggagagac

SEQ ID NO: 3636656 - RNA, 17 nt, Human
ggguggggggcuucaua

SEQ ID NO: 3636657 - RNA, 11 nt, Human
gggugggggug

SEQ ID NO: 3636658 - RNA, 11 nt, Human
gguccugcugc

SEQ ID NO: 3636659 - RNA, 15 nt, Human
gguccugggaggaga

SEQ ID NO: 3636660 - RNA, 22 nt, Human
gguccuggggcucugugcaggg

SEQ ID NO: 3636661 - RNA, 21 nt, Human
gguccugggggccugaccucc

SEQ ID NO: 3636662 - RNA, 24 nt, Human
gguccuggugcccuggaugcccag

SEQ ID NO: 3636663 - RNA, 17 nt, Human
gguccugguggggcagc

SEQ ID NO: 3636664 - RNA, 12 nt, Human
gguccugucccc

SEQ ID NO: 3636665 - RNA, 21 nt, Human
gguccugucuccccucugcug

SEQ ID NO: 3636666 - RNA, 19 nt, Human
gguccugugaucuuauuuu

SEQ ID NO: 3636667 - RNA, 11 nt, Human
gguccuuccug

SEQ ID NO: 3636668 - RNA, 22 nt, Human
gguccuuggcccccuuucccgg

SEQ ID NO: 3636669 - RNA, 16 nt, Human
ggucgaggaguaacaa

SEQ ID NO: 3636670 - RNA, 13 nt, Human
ggucgaggcagga

SEQ ID NO: 3636671 - RNA, 14 nt, Human
ggucgcccaugaga

SEQ ID NO: 3636672 - RNA, 18 nt, Human
ggucgcccaugagagcgc

SEQ ID NO: 3636673 - RNA, 19 nt, Human
ggucgcccuuugcugcaug

SEQ ID NO: 3636674 - RNA, 12 nt, Human
ggucgcuccugc

SEQ ID NO: 3636675 - RNA, 14 nt, Human
ggucgggcucagcu

SEQ ID NO: 3636676 - RNA, 14 nt, Human
ggucggggcaucug

SEQ ID NO: 3636677 - RNA, 20 nt, Human
ggucggggcaucuggccugg

SEQ ID NO: 3636678 - RNA, 15 nt, Human
ggucggugccuucaa

SEQ ID NO: 3636679 - RNA, 14 nt, Human
ggucguggagagcu

SEQ ID NO: 3636680 - RNA, 21 nt, Human
ggucguuuuaaaaacaaaaau

SEQ ID NO: 3636681 - RNA, 18 nt, Human
ggucuaaagugagcucua

SEQ ID NO: 3636682 - RNA, 18 nt, Human
ggucuacacugugcugag

SEQ ID NO: 3636683 - RNA, 17 nt, Human
ggucuauuccagcucau

SEQ ID NO: 3636684 - RNA, 20 nt, Human
ggucuauuccagcucauuca

SEQ ID NO: 3636685 - RNA, 15 nt, Human
ggucuauugucugua

SEQ ID NO: 3636686 - RNA, 18 nt, Human
ggucucacaguguugccc

SEQ ID NO: 3636687 - RNA, 20 nt, Human
ggucucacaguguugcccag

SEQ ID NO: 3636688 - RNA, 21 nt, Human
ggucucacaguguugcccagg

SEQ ID NO: 3636689 - RNA, 23 nt, Human
ggucucacccaugcaagcagagg

SEQ ID NO: 3636690 - RNA, 21 nt, Human
ggucucacuauguugcccagg

SEQ ID NO: 3636691 - RNA, 16 nt, Human
ggucucacucugucgc

SEQ ID NO: 3636692 - RNA, 21 nt, Human
ggucucacucugucgcccagu

SEQ ID NO: 3636693 - RNA, 18 nt, Human
ggucucagaaucuuuccu

SEQ ID NO: 3636694 - RNA, 22 nt, Human
ggucucaggauauccuuaucag

SEQ ID NO: 3636695 - RNA, 18 nt, Human
ggucucaggcugguggga

SEQ ID NO: 3636696 - RNA, 22 nt, Human
ggucucccgggaagccacccuc

SEQ ID NO: 3636697 - RNA, 17 nt, Human
ggucucccucuccugcc

SEQ ID NO: 3636698 - RNA, 12 nt, Human
ggucucccuggc

SEQ ID NO: 3636699 - RNA, 15 nt, Human
ggucucccuggcucc

SEQ ID NO: 3636700 - RNA, 24 nt, Human
ggucucccuggcucccuccuccag

SEQ ID NO: 3636701 - RNA, 15 nt, Human
ggucuccucaggacc

SEQ ID NO: 3636702 - RNA, 22 nt, Human
ggucuccuccaccgccauggcu

SEQ ID NO: 3636703 - RNA, 23 nt, Human
ggucuccugacuggugcugcagc

SEQ ID NO: 3636704 - RNA, 19 nt, Human
ggucucgaacuccugaccu

SEQ ID NO: 3636705 - RNA, 19 nt, Human
ggucucgcugaugcugggc

SEQ ID NO: 3636706 - RNA, 19 nt, Human
ggucucgcuuuguugccca

SEQ ID NO: 3636707 - RNA, 16 nt, Human
ggucucuaggcugggg

SEQ ID NO: 3636708 - RNA, 18 nt, Human
ggucucuaggcuggggaa

SEQ ID NO: 3636709 - RNA, 14 nt, Human
ggucucuauuucau

SEQ ID NO: 3636710 - RNA, 23 nt, Human
ggucucucacagacaggaccccu

SEQ ID NO: 3636711 - RNA, 17 nt, Human
ggucucucccucaggug

SEQ ID NO: 3636712 - RNA, 23 nt, Human
ggucucugcauuuuucugcagaa

SEQ ID NO: 3636713 - RNA, 19 nt, Human
ggucucugccggcucuuuc

SEQ ID NO: 3636714 - RNA, 12 nt, Human
ggucucugcugc

SEQ ID NO: 3636715 - RNA, 10 nt, Human
ggucucuggu

SEQ ID NO: 3636716 - RNA, 19 nt, Human
ggucucuguugacuggcug

SEQ ID NO: 3636717 - RNA, 15 nt, Human
ggucucuucucccag

SEQ ID NO: 3636718 - RNA, 17 nt, Human
ggucucuucucccagaa

SEQ ID NO: 3636719 - RNA, 20 nt, Human
ggucucuucuuggggcccag

SEQ ID NO: 3636720 - RNA, 15 nt, Human
ggucucuugagggag

SEQ ID NO: 3636721 - RNA, 10 nt, Human
ggucucuuuu

SEQ ID NO: 3636722 - RNA, 12 nt, Human
ggucugaauguu

SEQ ID NO: 3636723 - RNA, 17 nt, Human
ggucugaauguucugac

SEQ ID NO: 3636724 - RNA, 16 nt, Human
ggucugacccacugcu

SEQ ID NO: 3636725 - RNA, 19 nt, Human
ggucugaggaauccagacc

SEQ ID NO: 3636726 - RNA, 13 nt, Human
ggucugccaggcc

SEQ ID NO: 3636727 - RNA, 15 nt, Human
ggucugccaggcccc

SEQ ID NO: 3636728 - RNA, 23 nt, Human
ggucugcccucugcauccucugg

SEQ ID NO: 3636729 - RNA, 16 nt, Human
ggucugcucgggccca

SEQ ID NO: 3636730 - RNA, 17 nt, Human
ggucugcucgggcccag

SEQ ID NO: 3636731 - RNA, 18 nt, Human
ggucugcucgggcccagg

SEQ ID NO: 3636732 - RNA, 20 nt, Human
ggucugcucuuucucugcca

SEQ ID NO: 3636733 - RNA, 23 nt, Human
ggucuggagaagcucccaggaac

SEQ ID NO: 3636734 - RNA, 19 nt, Human
ggucuggccguacuuguga

SEQ ID NO: 3636735 - RNA, 14 nt, Human
ggucuggccucagg

SEQ ID NO: 3636736 - RNA, 15 nt, Human
ggucuggcugagcug

SEQ ID NO: 3636737 - RNA, 14 nt, Human
ggucuggcuggugu

SEQ ID NO: 3636738 - RNA, 15 nt, Human
ggucuggcugguguu

SEQ ID NO: 3636739 - RNA, 17 nt, Human
ggucugggacuuccuug

SEQ ID NO: 3636740 - RNA, 20 nt, Human
ggucugggagaggcagagug

SEQ ID NO: 3636741 - RNA, 20 nt, Human
ggucugggagucacacagug

SEQ ID NO: 3636742 - RNA, 22 nt, Human
ggucugggggucaggaggcagg

SEQ ID NO: 3636743 - RNA, 15 nt, Human
ggucuguagguugca

SEQ ID NO: 3636744 - RNA, 20 nt, Human
ggucuguagguugcacacuu

SEQ ID NO: 3636745 - RNA, 14 nt, Human
ggucugugagaugc

SEQ ID NO: 3636746 - RNA, 24 nt, Human
ggucugugagaugcuagaacuccc

SEQ ID NO: 3636747 - RNA, 16 nt, Human
ggucugugcauuucug

SEQ ID NO: 3636748 - RNA, 18 nt, Human
ggucugugucucuuuucu

SEQ ID NO: 3636749 - RNA, 16 nt, Human
ggucugugugaaugug

SEQ ID NO: 3636750 - RNA, 20 nt, Human
ggucuguguguguguaugug

SEQ ID NO: 3636751 - RNA, 17 nt, Human
ggucuguuuuccuuucu

SEQ ID NO: 3636752 - RNA, 21 nt, Human
ggucuguuuuguguacuuuua

SEQ ID NO: 3636753 - RNA, 18 nt, Human
ggucuucagccucuuucu

SEQ ID NO: 3636754 - RNA, 12 nt, Human
ggucuuccaggg

SEQ ID NO: 3636755 - RNA, 13 nt, Human
ggucuucccaggc

SEQ ID NO: 3636756 - RNA, 20 nt, Human
ggucuucccaggcuggggcu

SEQ ID NO: 3636757 - RNA, 17 nt, Human
ggucuuccuacucuucu

SEQ ID NO: 3636758 - RNA, 19 nt, Human
ggucuuccuacucuucucu

SEQ ID NO: 3636759 - RNA, 21 nt, Human
ggucuuccuacucuucucucu

SEQ ID NO: 3636760 - RNA, 22 nt, Human
ggucuugaaguccuggcuucag

SEQ ID NO: 3636761 - RNA, 19 nt, Human
ggucuugauucagucacau

SEQ ID NO: 3636762 - RNA, 14 nt, Human
ggucuugccccauc

SEQ ID NO: 3636763 - RNA, 20 nt, Human
ggucuugggaaauaugaaug

SEQ ID NO: 3636764 - RNA, 19 nt, Human
ggucuugguuccagccugc

SEQ ID NO: 3636765 - RNA, 18 nt, Human
ggucuuuaaaauauuguu

SEQ ID NO: 3636766 - RNA, 20 nt, Human
ggucuuucaguacuuuuuua

SEQ ID NO: 3636767 - RNA, 16 nt, Human
ggucuuucauggggug

SEQ ID NO: 3636768 - RNA, 10 nt, Human
ggucuuugag

SEQ ID NO: 3636769 - RNA, 13 nt, Human
ggucuuuguaaga

SEQ ID NO: 3636770 - RNA, 15 nt, Human
ggucuuuguaagagu

SEQ ID NO: 3636771 - RNA, 19 nt, Human
ggucuuuucaucugggaaa

SEQ ID NO: 3636772 - RNA, 20 nt, Human
ggucuuuucaucugggaaag

SEQ ID NO: 3636773 - RNA, 17 nt, Human
ggucuuuugacaugugg

SEQ ID NO: 3636774 - RNA, 15 nt, Human
ggucuuuuuaaacca

SEQ ID NO: 3636775 - RNA, 22 nt, Human
ggugaaaauuauuuuguucaua

SEQ ID NO: 3636776 - RNA, 14 nt, Human
ggugaaagggagcu

SEQ ID NO: 3636777 - RNA, 23 nt, Human
ggugaaauuuauuaguuaauaua

SEQ ID NO: 3636778 - RNA, 20 nt, Human
ggugaagagaaccgagcaaa

SEQ ID NO: 3636779 - RNA, 14 nt, Human
ggugaaggaggcuc

SEQ ID NO: 3636780 - RNA, 23 nt, Human
ggugaaggaggcuccaggcagca

SEQ ID NO: 3636781 - RNA, 13 nt, Human
ggugaauauuuuc

SEQ ID NO: 3636782 - RNA, 13 nt, Human
ggugacaagagcc

SEQ ID NO: 3636783 - RNA, 14 nt, Human
ggugacaagagccu

SEQ ID NO: 3636784 - RNA, 13 nt, Human
ggugacacagacu

SEQ ID NO: 3636785 - RNA, 20 nt, Human
ggugacacagacucauccug

SEQ ID NO: 3636786 - RNA, 13 nt, Human
ggugacaccagcc

SEQ ID NO: 3636787 - RNA, 13 nt, Human
ggugacagagcga

SEQ ID NO: 3636788 - RNA, 21 nt, Human
ggugacagagugagacucugu

SEQ ID NO: 3636789 - RNA, 21 nt, Human
ggugacagucaucaucagggc

SEQ ID NO: 3636790 - RNA, 17 nt, Human
ggugacaucggaaaaau

SEQ ID NO: 3636791 - RNA, 18 nt, Human
ggugacaucggaaaaaua

SEQ ID NO: 3636792 - RNA, 13 nt, Human
ggugaccccaggg

SEQ ID NO: 3636793 - RNA, 16 nt, Human
ggugaccccagggcac

SEQ ID NO: 3636794 - RNA, 21 nt, Human
ggugaccccagggcacaggag

SEQ ID NO: 3636795 - RNA, 23 nt, Human
ggugaccccagggcacaggagcu

SEQ ID NO: 3636796 - RNA, 21 nt, Human
ggugacccggcacccccugca

SEQ ID NO: 3636797 - RNA, 21 nt, Human
ggugaccucuagcccugcccg

SEQ ID NO: 3636798 - RNA, 16 nt, Human
ggugaccucugccuga

SEQ ID NO: 3636799 - RNA, 20 nt, Human
ggugaccuuccaagagccug

SEQ ID NO: 3636800 - RNA, 18 nt, Human
ggugacgccugcccuccc

SEQ ID NO: 3636801 - RNA, 19 nt, Human
ggugacggcccucaucuau

SEQ ID NO: 3636802 - RNA, 21 nt, Human
gucaaggccugucccuggcca

SEQ ID NO: 3636803 - RNA, 18 nt, Human
gucaaggcugcuuagaau

SEQ ID NO: 3636804 - RNA, 19 nt, Human
gucaagugaaaaaggagga

SEQ ID NO: 3636805 - RNA, 20 nt, Human
gucaaguuauuaauuucuuc

SEQ ID NO: 3636806 - RNA, 15 nt, Human
gucaaguugucaggu

SEQ ID NO: 3636807 - RNA, 18 nt, Human
gucaaguugugcuuguuu

SEQ ID NO: 3636808 - RNA, 22 nt, Human
gucaauaaacaacagcugaagc

SEQ ID NO: 3636809 - RNA, 15 nt, Human
gucaauauuaaauac

SEQ ID NO: 3636810 - RNA, 16 nt, Human
gucaauauuaaauaca

SEQ ID NO: 3636811 - RNA, 23 nt, Human
gucaauauuaaauacagacacua

SEQ ID NO: 3636812 - RNA, 13 nt, Human
gucaauauuuaaa

SEQ ID NO: 3636813 - RNA, 16 nt, Human
gucaaucauuucucac

SEQ ID NO: 3636814 - RNA, 22 nt, Human
gucaauccccucauucaggaaa

SEQ ID NO: 3636815 - RNA, 16 nt, Human
gucaaugcaguugucu

SEQ ID NO: 3636816 - RNA, 22 nt, Human
gucaaugcuauuuuuguuuuua

SEQ ID NO: 3636817 - RNA, 19 nt, Human
gucaaugggaccuguggcu

SEQ ID NO: 3636818 - RNA, 14 nt, Human
gucaaugugcagug

SEQ ID NO: 3636819 - RNA, 18 nt, Human
gucaaugugcaguguagc

SEQ ID NO: 3636820 - RNA, 13 nt, Human
gucaauuacagga

SEQ ID NO: 3636821 - RNA, 15 nt, Human
gucaauuacaggaag

SEQ ID NO: 3636822 - RNA, 13 nt, Human
gucaauuuauaau

SEQ ID NO: 3636823 - RNA, 18 nt, Human
gucaauuuaugaauauaa

SEQ ID NO: 3636824 - RNA, 21 nt, Human
gucaauuuuguuauguauauu

SEQ ID NO: 3636825 - RNA, 14 nt, Human
gucacaaccaagaa

SEQ ID NO: 3636826 - RNA, 12 nt, Human
gucacaauaaau

SEQ ID NO: 3636827 - RNA, 20 nt, Human
gucacaaugagauugaauuu

SEQ ID NO: 3636828 - RNA, 18 nt, Human
gucacaauguucuuuaua

SEQ ID NO: 3636829 - RNA, 21 nt, Human
gucacaauguucuuuauauac

SEQ ID NO: 3636830 - RNA, 12 nt, Human
gucacagagaac

SEQ ID NO: 3636831 - RNA, 19 nt, Human
gucacagagaacuaguggu

SEQ ID NO: 3636832 - RNA, 12 nt, Human
gucacagccacc

SEQ ID NO: 3636833 - RNA, 12 nt, Human
gucacagccuca

SEQ ID NO: 3636834 - RNA, 23 nt, Human
gucacagccuccucugucugccc

SEQ ID NO: 3636835 - RNA, 16 nt, Human
gucacaggcaggucca

SEQ ID NO: 3636836 - RNA, 12 nt, Human
gucacagggcag

SEQ ID NO: 3636837 - RNA, 13 nt, Human
gucacagggcagu

SEQ ID NO: 3636838 - RNA, 20 nt, Human
gucacagggcaugccccggc

SEQ ID NO: 3636839 - RNA, 12 nt, Human
gucacagggcca

SEQ ID NO: 3636840 - RNA, 18 nt, Human
gucacagggccuggggag

SEQ ID NO: 3636841 - RNA, 16 nt, Human
gucacaguaaaaauaa

SEQ ID NO: 3636842 - RNA, 20 nt, Human
gucacaguaaaaauaaaaua

SEQ ID NO: 3636843 - RNA, 22 nt, Human
gucacaguaaaaauaaaauacu

SEQ ID NO: 3636844 - RNA, 22 nt, Human
gucacaucccaccccauccucc

SEQ ID NO: 3636845 - RNA, 13 nt, Human
gucacaugaaaca

SEQ ID NO: 3636846 - RNA, 12 nt, Human
gucacaugcuug

SEQ ID NO: 3636847 - RNA, 16 nt, Human
gucacauucaggaaga

SEQ ID NO: 3636848 - RNA, 18 nt, Human
gucacauuccugaacagg

SEQ ID NO: 3636849 - RNA, 22 nt, Human
gucaccaauguacccaccgggc

SEQ ID NO: 3636850 - RNA, 19 nt, Human
gucaccaccaccccuacca

SEQ ID NO: 3636851 - RNA, 13 nt, Human
gucaccaccucuc

SEQ ID NO: 3636852 - RNA, 17 nt, Human
gucaccaccuucccagc

SEQ ID NO: 3636853 - RNA, 16 nt, Human
gucaccagacggggcu

SEQ ID NO: 3636854 - RNA, 16 nt, Human
gucaccagagacuuua

SEQ ID NO: 3636855 - RNA, 12 nt, Human
gucaccaguggc

SEQ ID NO: 3636856 - RNA, 21 nt, Human
gucaccaucucaggccaccug

SEQ ID NO: 3636857 - RNA, 20 nt, Human
gucacccaggcuggagugca

SEQ ID NO: 3636858 - RNA, 15 nt, Human
gucaccccagagcca

SEQ ID NO: 3636859 - RNA, 17 nt, Human
gucaccccagagccaca

SEQ ID NO: 3636860 - RNA, 18 nt, Human
gucaccccagagccacac

SEQ ID NO: 3636861 - RNA, 19 nt, Human
gucaccccagagccacaca

SEQ ID NO: 3636862 - RNA, 15 nt, Human
gucaccccuccagga

SEQ ID NO: 3636863 - RNA, 22 nt, Human
gucacccuagcccucucccucu

SEQ ID NO: 3636864 - RNA, 17 nt, Human
gucaccggauccugggu

SEQ ID NO: 3636865 - RNA, 19 nt, Human
gucaccggauccugggugg

SEQ ID NO: 3636866 - RNA, 19 nt, Human
gucaccuaggaagccucag

SEQ ID NO: 3636867 - RNA, 13 nt, Human
gucaccucacuca

SEQ ID NO: 3636868 - RNA, 15 nt, Human
gucaccucacucagc

SEQ ID NO: 3636869 - RNA, 16 nt, Human
gucaccugcuucucug

SEQ ID NO: 3636870 - RNA, 17 nt, Human
gucaccugcuucucugc

SEQ ID NO: 3636871 - RNA, 22 nt, Human
gucaccugggcgucaucugguc

SEQ ID NO: 3636872 - RNA, 13 nt, Human
gucaccuucccuu

SEQ ID NO: 3636873 - RNA, 14 nt, Human
gucacgccagacuu

SEQ ID NO: 3636874 - RNA, 18 nt, Human
gucacggauuugugucug

SEQ ID NO: 3636875 - RNA, 22 nt, Human
gucacuaaagcaggccuuuuga

SEQ ID NO: 3636876 - RNA, 17 nt, Human
gucacuaccuggcugcg

SEQ ID NO: 3636877 - RNA, 14 nt, Human
gucacucaggcugg

SEQ ID NO: 3636878 - RNA, 12 nt, Human
gucacuccuggg

SEQ ID NO: 3636879 - RNA, 13 nt, Human
gucacuccugggg

SEQ ID NO: 3636880 - RNA, 23 nt, Human
gucacucuggcagcucagagagg

SEQ ID NO: 3636881 - RNA, 15 nt, Human
gucacugaaggccug

SEQ ID NO: 3636882 - RNA, 21 nt, Human
gucacugaaggccuggcccac

SEQ ID NO: 3636883 - RNA, 14 nt, Human
gucacugacacaaa

SEQ ID NO: 3636884 - RNA, 16 nt, Human
gucacugacacacacg

SEQ ID NO: 3636885 - RNA, 14 nt, Human
gucacugagacagc

SEQ ID NO: 3636886 - RNA, 15 nt, Human
gucacugagacagcc

SEQ ID NO: 3636887 - RNA, 17 nt, Human
gucacugagacagcccg

SEQ ID NO: 3636888 - RNA, 21 nt, Human
gucacugagacagcccgggcu

SEQ ID NO: 3636889 - RNA, 23 nt, Human
gucacugagacagcccgggcucu

SEQ ID NO: 3636890 - RNA, 12 nt, Human
gucacugcacgu

SEQ ID NO: 3636891 - RNA, 12 nt, Human
gucacugccucu

SEQ ID NO: 3636892 - RNA, 22 nt, Human
gucacugccucucccuggcccu

SEQ ID NO: 3636893 - RNA, 11 nt, Human
gucacugcugu

SEQ ID NO: 3636894 - RNA, 18 nt, Human
gucacuggaaaggggaga

SEQ ID NO: 3636895 - RNA, 23 nt, Human
gucacuggaaaggggagagccug

SEQ ID NO: 3636896 - RNA, 14 nt, Human
gucacuggcucucc

SEQ ID NO: 3636897 - RNA, 15 nt, Human
gucacuggcucucca

SEQ ID NO: 3636898 - RNA, 18 nt, Human
gucacuggcucuccaagu

SEQ ID NO: 3636899 - RNA, 20 nt, Human
gucacuggcugccuccacuc

SEQ ID NO: 3636900 - RNA, 21 nt, Human
gucacuggcugccuccacucc

SEQ ID NO: 3636901 - RNA, 20 nt, Human
gucacuguacugacuugagg

SEQ ID NO: 3636902 - RNA, 15 nt, Human
gucacugucccuccu

SEQ ID NO: 3636903 - RNA, 18 nt, Human
gucacugucccuccuggu

SEQ ID NO: 3636904 - RNA, 21 nt, Human
gucacugucccuccugguguc

SEQ ID NO: 3636905 - RNA, 17 nt, Human
gucacuguuccuuguca

SEQ ID NO: 3636906 - RNA, 19 nt, Human
gucacuguuuauuuuuuua

SEQ ID NO: 3636907 - RNA, 14 nt, Human
gucacuguuuccug

SEQ ID NO: 3636908 - RNA, 15 nt, Human
gucacuguuucucug

SEQ ID NO: 3636909 - RNA, 18 nt, Human
gucacuuaaaaugugcag

SEQ ID NO: 3636910 - RNA, 20 nt, Human
gucacuuaccuagauuuaca

SEQ ID NO: 3636911 - RNA, 16 nt, Human
gucacuuacuguuucu

SEQ ID NO: 3636912 - RNA, 15 nt, Human
gucacuuauuucaua

SEQ ID NO: 3636913 - RNA, 16 nt, Human
gucacuuauuucauaa

SEQ ID NO: 3636914 - RNA, 19 nt, Human
gucacuucuucuguccaag

SEQ ID NO: 3636915 - RNA, 23 nt, Human
gucacuuugcucuggguggaagu

SEQ ID NO: 3636916 - RNA, 14 nt, Human
gucacuuuuucuga

SEQ ID NO: 3636917 - RNA, 22 nt, Human
gucagaagagagggugaguccu

SEQ ID NO: 3636918 - RNA, 13 nt, Human
gucagaaucagaa

SEQ ID NO: 3636919 - RNA, 15 nt, Human
gucagaaugcuauug

SEQ ID NO: 3636920 - RNA, 18 nt, Human
gucagacacagauuggcc

SEQ ID NO: 3636921 - RNA, 18 nt, Human
gucagacagaacuugaau

SEQ ID NO: 3636922 - RNA, 17 nt, Human
gucagacgccugaggaa

SEQ ID NO: 3636923 - RNA, 15 nt, Human
gucagacuaagaaau

SEQ ID NO: 3636924 - RNA, 14 nt, Human
gucagacuggcugg

SEQ ID NO: 3636925 - RNA, 12 nt, Human
gucagagcuggg

SEQ ID NO: 3636926 - RNA, 22 nt, Human
gucagaggagagauagccugug

SEQ ID NO: 3636927 - RNA, 13 nt, Human
gucagaggauggc

SEQ ID NO: 3636928 - RNA, 15 nt, Human
gucagaggauggcca

SEQ ID NO: 3636929 - RNA, 21 nt, Human
gucagaggauggccagugucu

SEQ ID NO: 3636930 - RNA, 21 nt, Human
gucagaggcuaauucugcaga

SEQ ID NO: 3636931 - RNA, 18 nt, Human
gucagauccaggagcucc

SEQ ID NO: 3636932 - RNA, 20 nt, Human
gucagauccaggagcuccag

SEQ ID NO: 3636933 - RNA, 14 nt, Human
gucagaugagaaca

SEQ ID NO: 3636934 - RNA, 18 nt, Human
gucagaugagaacaaagc

SEQ ID NO: 3636935 - RNA, 12 nt, Human
gucagauguuug

SEQ ID NO: 3636936 - RNA, 12 nt, Human
gucagauuccuu

SEQ ID NO: 3636937 - RNA, 13 nt, Human
gucagauuccuuu

SEQ ID NO: 3636938 - RNA, 16 nt, Human
gucagauucuugcauc

SEQ ID NO: 3636939 - RNA, 16 nt, Human
gucagcaaaaagcaaa

SEQ ID NO: 3636940 - RNA, 22 nt, Human
gucagcaaaaagcaaaaucauu

SEQ ID NO: 3636941 - RNA, 16 nt, Human
gucagcaauuuaacua

SEQ ID NO: 3636942 - RNA, 23 nt, Human
gucagcagccucccugaagacca

SEQ ID NO: 3636943 - RNA, 13 nt, Human
gucagcaggaagc

SEQ ID NO: 3636944 - RNA, 14 nt, Human
gucagcaugaauuu

SEQ ID NO: 3636945 - RNA, 11 nt, Human
gucagccaggg

SEQ ID NO: 3636946 - RNA, 13 nt, Human
gucagccagggcc

SEQ ID NO: 3636947 - RNA, 14 nt, Human
gucagccagggcca

SEQ ID NO: 3636948 - RNA, 15 nt, Human
guccccaucauccca

SEQ ID NO: 3636949 - RNA, 19 nt, Human
guccccaucaucccagcug

SEQ ID NO: 3636950 - RNA, 14 nt, Human
guccccaucugucg

SEQ ID NO: 3636951 - RNA, 20 nt, Human
gucccccaaccccagccgcu

SEQ ID NO: 3636952 - RNA, 20 nt, Human
gucccccaacucugagccca

SEQ ID NO: 3636953 - RNA, 20 nt, Human
gucccccacucuaaagcaaa

SEQ ID NO: 3636954 - RNA, 16 nt, Human
gucccccagcucuggu

SEQ ID NO: 3636955 - RNA, 22 nt, Human
gucccccauccccauccuccag

SEQ ID NO: 3636956 - RNA, 14 nt, Human
gucccccucuggcu

SEQ ID NO: 3636957 - RNA, 21 nt, Human
gucccccucuguccaggcacu

SEQ ID NO: 3636958 - RNA, 18 nt, Human
gucccccugacaacacuc

SEQ ID NO: 3636959 - RNA, 13 nt, Human
gucccccugcagc

SEQ ID NO: 3636960 - RNA, 16 nt, Human
gucccccuuccaugga

SEQ ID NO: 3636961 - RNA, 16 nt, Human
guccccgcacugggcu

SEQ ID NO: 3636962 - RNA, 14 nt, Human
guccccgcugcugu

SEQ ID NO: 3636963 - RNA, 18 nt, Human
guccccucagcuccagac

SEQ ID NO: 3636964 - RNA, 12 nt, Human
guccccucccag

SEQ ID NO: 3636965 - RNA, 16 nt, Human
guccccucccaucugg

SEQ ID NO: 3636966 - RNA, 17 nt, Human
guccccucccaucuggg

SEQ ID NO: 3636967 - RNA, 19 nt, Human
guccccucccaucugggag

SEQ ID NO: 3636968 - RNA, 15 nt, Human
guccccuccuuccca

SEQ ID NO: 3636969 - RNA, 15 nt, Human
guccccucuugcccc

SEQ ID NO: 3636970 - RNA, 21 nt, Human
guccccucuugccccaacccc

SEQ ID NO: 3636971 - RNA, 14 nt, Human
guccccugacaggg

SEQ ID NO: 3636972 - RNA, 13 nt, Human
guccccugcuaca

SEQ ID NO: 3636973 - RNA, 11 nt, Human
guccccugcuu

SEQ ID NO: 3636974 - RNA, 17 nt, Human
guccccuucucucaucu

SEQ ID NO: 3636975 - RNA, 19 nt, Human
guccccuucucucaucucu

SEQ ID NO: 3636976 - RNA, 20 nt, Human
guccccuucucucaucucuu

SEQ ID NO: 3636977 - RNA, 15 nt, Human
gucccgaauccacag

SEQ ID NO: 3636978 - RNA, 18 nt, Human
gucccggaggcggugggc

SEQ ID NO: 3636979 - RNA, 14 nt, Human
gucccggcucugug

SEQ ID NO: 3636980 - RNA, 16 nt, Human
gucccggcucuguggg

SEQ ID NO: 3636981 - RNA, 22 nt, Human
gucccgggacaccuaggcuagg

SEQ ID NO: 3636982 - RNA, 17 nt, Human
gucccggggccagcacu

SEQ ID NO: 3636983 - RNA, 21 nt, Human
gucccggggccagcacuucca

SEQ ID NO: 3636984 - RNA, 14 nt, Human
gucccgggguccug

SEQ ID NO: 3636985 - RNA, 23 nt, Human
gucccgggguccuguggcaggca

SEQ ID NO: 3636986 - RNA, 15 nt, Human
gucccuaaagaaaaa

SEQ ID NO: 3636987 - RNA, 18 nt, Human
gucccuaauaaagcugug

SEQ ID NO: 3636988 - RNA, 20 nt, Human
gucccuaauaaagcugugug

SEQ ID NO: 3636989 - RNA, 16 nt, Human
gucccuacaccccucc

SEQ ID NO: 3636990 - RNA, 21 nt, Human
gucccuaccgagucucuucuc

SEQ ID NO: 3636991 - RNA, 18 nt, Human
gucccuagcagcccaccc

SEQ ID NO: 3636992 - RNA, 15 nt, Human
gucccuaugcauauc

SEQ ID NO: 3636993 - RNA, 21 nt, Human
gucccuccacguucaccccuc

SEQ ID NO: 3636994 - RNA, 13 nt, Human
gucccucccaccu

SEQ ID NO: 3636995 - RNA, 15 nt, Human
gucccucccaccucu

SEQ ID NO: 3636996 - RNA, 12 nt, Human
gucccuccuggg

SEQ ID NO: 3636997 - RNA, 21 nt, Human
gucccuccugggaucugcucg

SEQ ID NO: 3636998 - RNA, 21 nt, Human
gucccuccuggugucacccca

SEQ ID NO: 3636999 - RNA, 13 nt, Human
gucccucucaggc

SEQ ID NO: 3637000 - RNA, 14 nt, Human
gucccucucaggca

SEQ ID NO: 3637001 - RNA, 21 nt, Human
gucccucucggaaggcuggcu

SEQ ID NO: 3637002 - RNA, 13 nt, Human
gucccucucucug

SEQ ID NO: 3637003 - RNA, 14 nt, Human
gucccucugcccca

SEQ ID NO: 3637004 - RNA, 20 nt, Human
gucccucugccccauccucc

SEQ ID NO: 3637005 - RNA, 21 nt, Human
gucccucugccccauccucca

SEQ ID NO: 3637006 - RNA, 14 nt, Human
gucccucuguguau

SEQ ID NO: 3637007 - RNA, 17 nt, Human
gucccugaaaccuagua

SEQ ID NO: 3637008 - RNA, 16 nt, Human
gucccugaagagaagg

SEQ ID NO: 3637009 - RNA, 22 nt, Human
gucccugaggaugggucagagc

SEQ ID NO: 3637010 - RNA, 18 nt, Human
gucccugaggcagguccc

SEQ ID NO: 3637011 - RNA, 22 nt, Human
gucccugaggcagguccccaga

SEQ ID NO: 3637012 - RNA, 21 nt, Human
gucccugcacagugacuucug

SEQ ID NO: 3637013 - RNA, 23 nt, Human
gucccugcacagugacuucugag

SEQ ID NO: 3637014 - RNA, 16 nt, Human
gucccugcacuugcag

SEQ ID NO: 3637015 - RNA, 21 nt, Human
gucccugcacuugcagacucu

SEQ ID NO: 3637016 - RNA, 11 nt, Human
gucccugccaa

SEQ ID NO: 3637017 - RNA, 22 nt, Human
gucccugccacgaauuucugug

SEQ ID NO: 3637018 - RNA, 21 nt, Human
gucccugccuggaccagccuc

SEQ ID NO: 3637019 - RNA, 22 nt, Human
gucccugccuggaccagccucu

SEQ ID NO: 3637020 - RNA, 21 nt, Human
gucccugcgccuuuccuuuuc

SEQ ID NO: 3637021 - RNA, 17 nt, Human
gucccuggcgcaggugg

SEQ ID NO: 3637022 - RNA, 15 nt, Human
gucccuggcuuccuu

SEQ ID NO: 3637023 - RNA, 16 nt, Human
gucccuggcuuccuua

SEQ ID NO: 3637024 - RNA, 17 nt, Human
gucccugggccaggguc

SEQ ID NO: 3637025 - RNA, 18 nt, Human
gucccugggccagggucu

SEQ ID NO: 3637026 - RNA, 15 nt, Human
gucccugguaauaag

SEQ ID NO: 3637027 - RNA, 16 nt, Human
gucccugguggcagcu

SEQ ID NO: 3637028 - RNA, 18 nt, Human
gucccugguggcagcuca

SEQ ID NO: 3637029 - RNA, 15 nt, Human
gucccuguuuucuga

SEQ ID NO: 3637030 - RNA, 17 nt, Human
gucccuucacauaguuu

SEQ ID NO: 3637031 - RNA, 22 nt, Human
gucccuuccacacccccacccc

SEQ ID NO: 3637032 - RNA, 16 nt, Human
gucccuuccaggccau

SEQ ID NO: 3637033 - RNA, 17 nt, Human
gucccuuccccaugcuu

SEQ ID NO: 3637034 - RNA, 12 nt, Human
gucccuuccccu

SEQ ID NO: 3637035 - RNA, 22 nt, Human
gucccuuccccucccuggcucc

SEQ ID NO: 3637036 - RNA, 20 nt, Human
gucccuugaacuacugggug

SEQ ID NO: 3637037 - RNA, 17 nt, Human
gucccuugaugcacaga

SEQ ID NO: 3637038 - RNA, 22 nt, Human
gucccuugaugcacagagaagc

SEQ ID NO: 3637039 - RNA, 23 nt, Human
gucccuugaugcacagagaagcu

SEQ ID NO: 3637040 - RNA, 13 nt, Human
gucccuugcagcu

SEQ ID NO: 3637041 - RNA, 20 nt, Human
gucccuugccccccuggccu

SEQ ID NO: 3637042 - RNA, 19 nt, Human
gucccuugccucaaugcca

SEQ ID NO: 3637043 - RNA, 20 nt, Human
gucccuuguuuccagcuaga

SEQ ID NO: 3637044 - RNA, 15 nt, Human
guccgaucuuugacu

SEQ ID NO: 3637045 - RNA, 12 nt, Human
guccgcccugcu

SEQ ID NO: 3637046 - RNA, 23 nt, Human
guccgcccugcuccucccuggcu

SEQ ID NO: 3637047 - RNA, 22 nt, Human
guccgcugggugguacccucug

SEQ ID NO: 3637048 - RNA, 21 nt, Human
guccgguggaaggccuucuuu

SEQ ID NO: 3637049 - RNA, 16 nt, Human
guccgguguucuaaga

SEQ ID NO: 3637050 - RNA, 20 nt, Human
guccgugcugacagcugcuc

SEQ ID NO: 3637051 - RNA, 22 nt, Human
guccguggguugcuaacugaac

SEQ ID NO: 3637052 - RNA, 22 nt, Human
guccuaagaaagaggagugcuu

SEQ ID NO: 3637053 - RNA, 19 nt, Human
guccuaaggacacacuaau

SEQ ID NO: 3637054 - RNA, 17 nt, Human
guccuacaguggcuguc

SEQ ID NO: 3637055 - RNA, 16 nt, Human
guccuaccaauagauu

SEQ ID NO: 3637056 - RNA, 18 nt, Human
guccuacccauccccgca

SEQ ID NO: 3637057 - RNA, 20 nt, Human
guccuacuaucacugaacaa

SEQ ID NO: 3637058 - RNA, 13 nt, Human
guccuacucugug

SEQ ID NO: 3637059 - RNA, 21 nt, Human
guccuacucugugucaggugg

SEQ ID NO: 3637060 - RNA, 23 nt, Human
guccuagaaauuccccacccuga

SEQ ID NO: 3637061 - RNA, 23 nt, Human
guccuagcuugggaggcuucccc

SEQ ID NO: 3637062 - RNA, 17 nt, Human
guccuaguaagaagaca

SEQ ID NO: 3637063 - RNA, 16 nt, Human
guccuaguuguucagc

SEQ ID NO: 3637064 - RNA, 17 nt, Human
guccuaucugggcuucc

SEQ ID NO: 3637065 - RNA, 13 nt, Human
guccuaugcaaua

SEQ ID NO: 3637066 - RNA, 15 nt, Human
guccuaugcaauaaa

SEQ ID NO: 3637067 - RNA, 16 nt, Human
guccuaugcaauaaaa

SEQ ID NO: 3637068 - RNA, 21 nt, Human
guccuaugcaauaaaauuauu

SEQ ID NO: 3637069 - RNA, 13 nt, Human
guccuauggaaac

SEQ ID NO: 3637070 - RNA, 17 nt, Human
guccuauuaguguuaua

SEQ ID NO: 3637071 - RNA, 21 nt, Human
guccuauuaguguuauaugaa

SEQ ID NO: 3637072 - RNA, 13 nt, Human
guccucacacuca

SEQ ID NO: 3637073 - RNA, 14 nt, Human
guccucaccccugu

SEQ ID NO: 3637074 - RNA, 18 nt, Human
guccucacggugccuuuu

SEQ ID NO: 3637075 - RNA, 14 nt, Human
guccucacucccag

SEQ ID NO: 3637076 - RNA, 18 nt, Human
guccucacucccagucca

SEQ ID NO: 3637077 - RNA, 19 nt, Human
guccucacugcucccugaa

SEQ ID NO: 3637078 - RNA, 20 nt, Human
guccucagccuugccagaga

SEQ ID NO: 3637079 - RNA, 21 nt, Human
guccucagccuugccagagau

SEQ ID NO: 3637080 - RNA, 13 nt, Human
guccucagggagc

SEQ ID NO: 3637081 - RNA, 15 nt, Human
guccucagguggcca

SEQ ID NO: 3637082 - RNA, 18 nt, Human
guccucaguccauuuaua

SEQ ID NO: 3637083 - RNA, 17 nt, Human
guccucauuucuccaga

SEQ ID NO: 3637084 - RNA, 22 nt, Human
guccuccaacaccaagcacagc

SEQ ID NO: 3637085 - RNA, 14 nt, Human
guccuccaagccag

SEQ ID NO: 3637086 - RNA, 13 nt, Human
guccuccagaacu

SEQ ID NO: 3637087 - RNA, 14 nt, Human
guccuccaggagcu

SEQ ID NO: 3637088 - RNA, 16 nt, Human
guccucccauccccug

SEQ ID NO: 3637089 - RNA, 18 nt, Human
guccucccauccccugga

SEQ ID NO: 3637090 - RNA, 19 nt, Human
guccucccauccccuggac

SEQ ID NO: 3637091 - RNA, 13 nt, Human
guccucccaucuc

SEQ ID NO: 3637092 - RNA, 20 nt, Human
gucuggauaacuuccacagg

SEQ ID NO: 3637093 - RNA, 21 nt, Human
gucuggauaacuuccacaggg

SEQ ID NO: 3637094 - RNA, 15 nt, Human
gucuggcaaugccac

SEQ ID NO: 3637095 - RNA, 16 nt, Human
gucuggcacagccugc

SEQ ID NO: 3637096 - RNA, 17 nt, Human
gucuggccccccugguc

SEQ ID NO: 3637097 - RNA, 15 nt, Human
gucuggcugguguua

SEQ ID NO: 3637098 - RNA, 21 nt, Human
gucuggcugguguuaacagaa

SEQ ID NO: 3637099 - RNA, 18 nt, Human
gucugggacuuccuugcu

SEQ ID NO: 3637100 - RNA, 20 nt, Human
gucugggacuuccuugcucu

SEQ ID NO: 3637101 - RNA, 16 nt, Human
gucugggagaggcaga

SEQ ID NO: 3637102 - RNA, 20 nt, Human
gucugggaggaauggacaga

SEQ ID NO: 3637103 - RNA, 17 nt, Human
gucugggcuagguagaa

SEQ ID NO: 3637104 - RNA, 15 nt, Human
gucuggggaccagcu

SEQ ID NO: 3637105 - RNA, 20 nt, Human
gucugggguucagccccucc

SEQ ID NO: 3637106 - RNA, 14 nt, Human
gucugggugcuacu

SEQ ID NO: 3637107 - RNA, 14 nt, Human
gucuggguggcuca

SEQ ID NO: 3637108 - RNA, 15 nt, Human
gucuggguggcucac

SEQ ID NO: 3637109 - RNA, 14 nt, Human
gucuggucuauguu

SEQ ID NO: 3637110 - RNA, 15 nt, Human
gucuggugaagcuca

SEQ ID NO: 3637111 - RNA, 16 nt, Human
gucugguuuuaacaau

SEQ ID NO: 3637112 - RNA, 15 nt, Human
gucuguaaaaucuuu

SEQ ID NO: 3637113 - RNA, 19 nt, Human
gucuguaaaucuaacauua

SEQ ID NO: 3637114 - RNA, 14 nt, Human
gucuguacacgugu

SEQ ID NO: 3637115 - RNA, 17 nt, Human
gucuguagagggcccug

SEQ ID NO: 3637116 - RNA, 18 nt, Human
gucuguagagggcccugg

SEQ ID NO: 3637117 - RNA, 17 nt, Human
gucuguagguugcacac

SEQ ID NO: 3637118 - RNA, 20 nt, Human
gucuguagguugcacacuuu

SEQ ID NO: 3637119 - RNA, 22 nt, Human
gucuguagugucacucaaggcg

SEQ ID NO: 3637120 - RNA, 23 nt, Human
gucuguauuuaugugugaggagc

SEQ ID NO: 3637121 - RNA, 12 nt, Human
gucuguauuuca

SEQ ID NO: 3637122 - RNA, 17 nt, Human
gucuguauuucaugugg

SEQ ID NO: 3637123 - RNA, 18 nt, Human
gucuguauuucauguggc

SEQ ID NO: 3637124 - RNA, 20 nt, Human
gucuguauuucauguggcug

SEQ ID NO: 3637125 - RNA, 20 nt, Human
gucugucccgggguccugug

SEQ ID NO: 3637126 - RNA, 22 nt, Human
gucugucucuccaucuguuugg

SEQ ID NO: 3637127 - RNA, 14 nt, Human
gucugucugucugu

SEQ ID NO: 3637128 - RNA, 16 nt, Human
gucugucuucacagcu

SEQ ID NO: 3637129 - RNA, 22 nt, Human
gucugucuucacagcucugugu

SEQ ID NO: 3637130 - RNA, 16 nt, Human
gucugucuucuguaua

SEQ ID NO: 3637131 - RNA, 23 nt, Human
gucugucuucuguauauaaaugg

SEQ ID NO: 3637132 - RNA, 21 nt, Human
gucugugaacagagagacccu

SEQ ID NO: 3637133 - RNA, 17 nt, Human
gucugugagaugcuaga

SEQ ID NO: 3637134 - RNA, 18 nt, Human
gucugugccauuuuguau

SEQ ID NO: 3637135 - RNA, 13 nt, Human
gucugugcugagg

SEQ ID NO: 3637136 - RNA, 13 nt, Human
gucuguggauuuu

SEQ ID NO: 3637137 - RNA, 20 nt, Human
gucuguggcuuucagccucu

SEQ ID NO: 3637138 - RNA, 15 nt, Human
gucugugugaaugug

SEQ ID NO: 3637139 - RNA, 18 nt, Human
gucugugugggacuguac

SEQ ID NO: 3637140 - RNA, 20 nt, Human
gucugugugugaccccuccu

SEQ ID NO: 3637141 - RNA, 12 nt, Human
gucugugugugu

SEQ ID NO: 3637142 - RNA, 21 nt, Human
gucuguguguuuaugugugug

SEQ ID NO: 3637143 - RNA, 22 nt, Human
gucuguguguuuaugugugugu

SEQ ID NO: 3637144 - RNA, 20 nt, Human
gucuguguuuuuuuggcagu

SEQ ID NO: 3637145 - RNA, 12 nt, Human
gucuguuagcca

SEQ ID NO: 3637146 - RNA, 13 nt, Human
gucuguugauuaa

SEQ ID NO: 3637147 - RNA, 19 nt, Human
gucuguuggcaggcuggcc

SEQ ID NO: 3637148 - RNA, 18 nt, Human
gucuguugugugucaugc

SEQ ID NO: 3637149 - RNA, 20 nt, Human
gucuguugugugucaugcca

SEQ ID NO: 3637150 - RNA, 17 nt, Human
gucuguuuaaaguggca

SEQ ID NO: 3637151 - RNA, 15 nt, Human
gucuguuuaagaaaa

SEQ ID NO: 3637152 - RNA, 18 nt, Human
gucuguuuaagaaaagua

SEQ ID NO: 3637153 - RNA, 21 nt, Human
gucuguuugcugauggucugg

SEQ ID NO: 3637154 - RNA, 15 nt, Human
gucuguuuuaugacu

SEQ ID NO: 3637155 - RNA, 12 nt, Human
gucuguuuuccu

SEQ ID NO: 3637156 - RNA, 14 nt, Human
gucuguuuuccuuu

SEQ ID NO: 3637157 - RNA, 16 nt, Human
gucuguuuuccuuucu

SEQ ID NO: 3637158 - RNA, 20 nt, Human
gucuguuuuccuuucucacc

SEQ ID NO: 3637159 - RNA, 14 nt, Human
gucuguuuuguaaa

SEQ ID NO: 3637160 - RNA, 15 nt, Human
gucuguuuuguaaag

SEQ ID NO: 3637161 - RNA, 20 nt, Human
gucuuaaaaccugcuuuuca

SEQ ID NO: 3637162 - RNA, 12 nt, Human
gucuuaaaauaa

SEQ ID NO: 3637163 - RNA, 22 nt, Human
gucuuaaaauaacuuauaucau

SEQ ID NO: 3637164 - RNA, 14 nt, Human
gucuuaaugaaguu

SEQ ID NO: 3637165 - RNA, 18 nt, Human
gucuuaaugaaguuugaa

SEQ ID NO: 3637166 - RNA, 22 nt, Human
gucuuaaugaaguuugaauguu

SEQ ID NO: 3637167 - RNA, 17 nt, Human
gucuuaauggaugaaau

SEQ ID NO: 3637168 - RNA, 19 nt, Human
gucuuaauuaaaagaauau

SEQ ID NO: 3637169 - RNA, 22 nt, Human
gucuuaauuaaaagaauauuuu

SEQ ID NO: 3637170 - RNA, 15 nt, Human
gucuuaauuaaguaa

SEQ ID NO: 3637171 - RNA, 13 nt, Human
gucuuaauuauua

SEQ ID NO: 3637172 - RNA, 23 nt, Human
gucuuagaaguggaccaggacag

SEQ ID NO: 3637173 - RNA, 18 nt, Human
gucuuagaucauaguuuu

SEQ ID NO: 3637174 - RNA, 16 nt, Human
gucuuagcagugauuu

SEQ ID NO: 3637175 - RNA, 15 nt, Human
gucuuaguuguacaa

SEQ ID NO: 3637176 - RNA, 17 nt, Human
gucuuauauagcagcaa

SEQ ID NO: 3637177 - RNA, 15 nt, Human
gucuuaucaagcagc

SEQ ID NO: 3637178 - RNA, 23 nt, Human
gucuuaucugagcugagccaggc

SEQ ID NO: 3637179 - RNA, 21 nt, Human
gucuuaugcuuccagaaacac

SEQ ID NO: 3637180 - RNA, 19 nt, Human
gucuucaacagcuccccau

SEQ ID NO: 3637181 - RNA, 22 nt, Human
gucuucaacauaacccacuugu

SEQ ID NO: 3637182 - RNA, 16 nt, Human
gucuucaacauccugc

SEQ ID NO: 3637183 - RNA, 19 nt, Human
gucuucaacauccugccag

SEQ ID NO: 3637184 - RNA, 15 nt, Human
gucuucaagggcugc

SEQ ID NO: 3637185 - RNA, 16 nt, Human
gucuucacagcucugu

SEQ ID NO: 3637186 - RNA, 17 nt, Human
gucuucacagcucugug

SEQ ID NO: 3637187 - RNA, 12 nt, Human
gucuucagccua

SEQ ID NO: 3637188 - RNA, 23 nt, Human
gucuucagccuagccgaccucag

SEQ ID NO: 3637189 - RNA, 18 nt, Human
gucuucagggggccaggu

SEQ ID NO: 3637190 - RNA, 11 nt, Human
gucuucauaaa

SEQ ID NO: 3637191 - RNA, 23 nt, Human
gucuucauaccuacauguauuug

SEQ ID NO: 3637192 - RNA, 16 nt, Human
gucuucauccuuagca

SEQ ID NO: 3637193 - RNA, 21 nt, Human
gucuucauccuuagcaacagc

SEQ ID NO: 3637194 - RNA, 23 nt, Human
gucuucaugaaaugcuaugucau

SEQ ID NO: 3637195 - RNA, 22 nt, Human
gucuucauuaagcccucuucca

SEQ ID NO: 3637196 - RNA, 15 nt, Human
gucuuccacaaagaa

SEQ ID NO: 3637197 - RNA, 19 nt, Human
gucuuccacaaagaaaauu

SEQ ID NO: 3637198 - RNA, 17 nt, Human
gucuuccauaauguaua

SEQ ID NO: 3637199 - RNA, 13 nt, Human
gucuucccaccca

SEQ ID NO: 3637200 - RNA, 16 nt, Human
gucuucccuagggcug

SEQ ID NO: 3637201 - RNA, 21 nt, Human
gucuuccgccccugccugcca

SEQ ID NO: 3637202 - RNA, 15 nt, Human
gucuuccgucucccc

SEQ ID NO: 3637203 - RNA, 16 nt, Human
gucuuccuacucuucu

SEQ ID NO: 3637204 - RNA, 19 nt, Human
gucuuccuacucuucucuc

SEQ ID NO: 3637205 - RNA, 22 nt, Human
gucuuccuacucuucucucugc

SEQ ID NO: 3637206 - RNA, 20 nt, Human
gucuuccuauuucagaaguu

SEQ ID NO: 3637207 - RNA, 14 nt, Human
gucuuccugacacu

SEQ ID NO: 3637208 - RNA, 17 nt, Human
gucuuccugcauucacc

SEQ ID NO: 3637209 - RNA, 20 nt, Human
gucuuccugcauucacccag

SEQ ID NO: 3637210 - RNA, 12 nt, Human
gucuuccugugg

SEQ ID NO: 3637211 - RNA, 15 nt, Human
gucuucggaaaccuu

SEQ ID NO: 3637212 - RNA, 13 nt, Human
gucuucguacagu

SEQ ID NO: 3637213 - RNA, 16 nt, Human
gucuucguacaguucu

SEQ ID NO: 3637214 - RNA, 18 nt, Human
gucuucguacaguucuuc

SEQ ID NO: 3637215 - RNA, 14 nt, Human
gucuucuaaacuuc

SEQ ID NO: 3637216 - RNA, 13 nt, Human
gucuucuaauuuc

SEQ ID NO: 3637217 - RNA, 18 nt, Human
gucuucucacaagccagc

SEQ ID NO: 3637218 - RNA, 15 nt, Human
gucuucucaggcucu

SEQ ID NO: 3637219 - RNA, 15 nt, Human
gucuucucccuggaa

SEQ ID NO: 3637220 - RNA, 12 nt, Human
gucuucugcuuu

SEQ ID NO: 3637221 - RNA, 22 nt, Human
gucuucugcuuuguugugugcc

SEQ ID NO: 3637222 - RNA, 23 nt, Human
gucuucuggacaggcucugcuuc

SEQ ID NO: 3637223 - RNA, 12 nt, Human
gucuucuguaua

SEQ ID NO: 3637224 - RNA, 20 nt, Human
gucuucuuacuuggaacuga

SEQ ID NO: 3637225 - RNA, 17 nt, Human
gucuucuuugcccacaa

SEQ ID NO: 3637226 - RNA, 18 nt, Human
gucuugaugaccaaaguc

SEQ ID NO: 3637227 - RNA, 18 nt, Human
gucuugauuuguuuuaga

SEQ ID NO: 3637228 - RNA, 19 nt, Human
gucuugcaauggcagccuu

SEQ ID NO: 3637229 - RNA, 20 nt, Human
gucuugcaauggcagccuug

SEQ ID NO: 3637230 - RNA, 23 nt, Human
gucuugcaauggcagccuuggca

SEQ ID NO: 3637231 - RNA, 13 nt, Human
gucuugccccauc

SEQ ID NO: 3637232 - RNA, 22 nt, Human
gucuugccccaucacugcgcca

SEQ ID NO: 3637233 - RNA, 16 nt, Human
gucuugccuuuuucau

SEQ ID NO: 3637234 - RNA, 18 nt, Human
gucuugccuuuuucauua

SEQ ID NO: 3637235 - RNA, 18 nt, Human
gucuugcuaccucaguca

SEQ ID NO: 3637236 - RNA, 18 nt, Human
gugugguugcucacagcu

SEQ ID NO: 3637237 - RNA, 17 nt, Human
gugugguuuaguguaaa

SEQ ID NO: 3637238 - RNA, 11 nt, Human
guguguaaaca

SEQ ID NO: 3637239 - RNA, 21 nt, Human
guguguaagaugucuuccuau

SEQ ID NO: 3637240 - RNA, 13 nt, Human
guguguagaguua

SEQ ID NO: 3637241 - RNA, 16 nt, Human
guguguagaguuaaga

SEQ ID NO: 3637242 - RNA, 20 nt, Human
guguguagaguuaagaagcu

SEQ ID NO: 3637243 - RNA, 21 nt, Human
guguguagaguuaagaagcug

SEQ ID NO: 3637244 - RNA, 23 nt, Human
guguguauauauguguauauaua

SEQ ID NO: 3637245 - RNA, 14 nt, Human
guguguauauggac

SEQ ID NO: 3637246 - RNA, 14 nt, Human
guguguauguguau

SEQ ID NO: 3637247 - RNA, 23 nt, Human
guguguauguguguuucuguccu

SEQ ID NO: 3637248 - RNA, 20 nt, Human
guguguauuaaaaaaaacaa

SEQ ID NO: 3637249 - RNA, 15 nt, Human
guguguauuugcuaa

SEQ ID NO: 3637250 - RNA, 19 nt, Human
guguguccaaaacugccuc

SEQ ID NO: 3637251 - RNA, 14 nt, Human
gugugucuuaauua

SEQ ID NO: 3637252 - RNA, 20 nt, Human
gugugugaaaaugugugugu

SEQ ID NO: 3637253 - RNA, 17 nt, Human
gugugugaaugaacacu

SEQ ID NO: 3637254 - RNA, 17 nt, Human
gugugugaccccuccug

SEQ ID NO: 3637255 - RNA, 22 nt, Human
gugugugaccccuccuggggcc

SEQ ID NO: 3637256 - RNA, 17 nt, Human
gugugugcccucugggc

SEQ ID NO: 3637257 - RNA, 23 nt, Human
gugugugcccucugggcucugag

SEQ ID NO: 3637258 - RNA, 17 nt, Human
guguguggcagagagag

SEQ ID NO: 3637259 - RNA, 17 nt, Human
gugugugguagaaacaa

SEQ ID NO: 3637260 - RNA, 13 nt, Human
guguguguaugug

SEQ ID NO: 3637261 - RNA, 14 nt, Human
guguguguaugugg

SEQ ID NO: 3637262 - RNA, 14 nt, Human
gugugugugcgugu

SEQ ID NO: 3637263 - RNA, 14 nt, Human
guguguguguccuu

SEQ ID NO: 3637264 - RNA, 12 nt, Human
guguguguguga

SEQ ID NO: 3637265 - RNA, 13 nt, Human
gugugugugugca

SEQ ID NO: 3637266 - RNA, 15 nt, Human
guguguguguguaug

SEQ ID NO: 3637267 - RNA, 14 nt, Human
gugugugugugugc

SEQ ID NO: 3637268 - RNA, 15 nt, Human
gugugugugugugug

SEQ ID NO: 3637269 - RNA, 11 nt, Human
guguguuccug

SEQ ID NO: 3637270 - RNA, 13 nt, Human
guguguuccuggc

SEQ ID NO: 3637271 - RNA, 20 nt, Human
guguguugauacuguugcac

SEQ ID NO: 3637272 - RNA, 22 nt, Human
guguguugauacuguugcacgu

SEQ ID NO: 3637273 - RNA, 14 nt, Human
guguguugcuuaug

SEQ ID NO: 3637274 - RNA, 14 nt, Human
guguguugugugug

SEQ ID NO: 3637275 - RNA, 17 nt, Human
guguguuguguguggga

SEQ ID NO: 3637276 - RNA, 18 nt, Human
guguguuuaaauaaagua

SEQ ID NO: 3637277 - RNA, 22 nt, Human
guguguuuaaauaaaguaucau

SEQ ID NO: 3637278 - RNA, 15 nt, Human
guguguuuaugugug

SEQ ID NO: 3637279 - RNA, 19 nt, Human
guguguuucuguccuguaa

SEQ ID NO: 3637280 - RNA, 16 nt, Human
guguguuuuaaaauga

SEQ ID NO: 3637281 - RNA, 17 nt, Human
guguguuuucauaauaa

SEQ ID NO: 3637282 - RNA, 18 nt, Human
guguguuuucauaauaaa

SEQ ID NO: 3637283 - RNA, 16 nt, Human
guguguuuuucuauua

SEQ ID NO: 3637284 - RNA, 14 nt, Human
guguuaacagaagg

SEQ ID NO: 3637285 - RNA, 17 nt, Human
guguuaacauuccaaga

SEQ ID NO: 3637286 - RNA, 20 nt, Human
guguuaaccaugguggggac

SEQ ID NO: 3637287 - RNA, 19 nt, Human
guguuaauacuaguuguga

SEQ ID NO: 3637288 - RNA, 15 nt, Human
guguuaaucaauuua

SEQ ID NO: 3637289 - RNA, 16 nt, Human
guguuaauuuaaguuu

SEQ ID NO: 3637290 - RNA, 15 nt, Human
guguuaccugugugc

SEQ ID NO: 3637291 - RNA, 20 nt, Human
guguuacuaaaaaaaagaug

SEQ ID NO: 3637292 - RNA, 21 nt, Human
guguuacuaaaaaaaagauga

SEQ ID NO: 3637293 - RNA, 14 nt, Human
guguuacuuuuugu

SEQ ID NO: 3637294 - RNA, 14 nt, Human
guguuaggccuggc

SEQ ID NO: 3637295 - RNA, 24 nt, Human
guguuaggccuggcacagugucug

SEQ ID NO: 3637296 - RNA, 22 nt, Human
guguuagggaagggccugccac

SEQ ID NO: 3637297 - RNA, 14 nt, Human
guguuaguggcacc

SEQ ID NO: 3637298 - RNA, 20 nt, Human
guguuauaauggguaauaua

SEQ ID NO: 3637299 - RNA, 23 nt, Human
guguuauaugaacauacaaaugc

SEQ ID NO: 3637300 - RNA, 14 nt, Human
guguuauguauuuc

SEQ ID NO: 3637301 - RNA, 16 nt, Human
guguuauucuuugcgu

SEQ ID NO: 3637302 - RNA, 24 nt, Human
guguuauugagagagauguguaau

SEQ ID NO: 3637303 - RNA, 21 nt, Human
guguuauuuggaaccuuguuu

SEQ ID NO: 3637304 - RNA, 14 nt, Human
guguucaauauuuu

SEQ ID NO: 3637305 - RNA, 14 nt, Human
guguucagaaaaaa

SEQ ID NO: 3637306 - RNA, 14 nt, Human
guguucauuguuuc

SEQ ID NO: 3637307 - RNA, 21 nt, Human
guguucccauuucagcugauc

SEQ ID NO: 3637308 - RNA, 18 nt, Human
guguuccccucuugucuc

SEQ ID NO: 3637309 - RNA, 19 nt, Human
guguuccccucuugucucc

SEQ ID NO: 3637310 - RNA, 22 nt, Human
guguuccccucuugucuccccu

SEQ ID NO: 3637311 - RNA, 18 nt, Human
guguuccccuuccacuga

SEQ ID NO: 3637312 - RNA, 19 nt, Human
guguuccccuuccacugag

SEQ ID NO: 3637313 - RNA, 22 nt, Human
guguuccccuuccacugagggc

SEQ ID NO: 3637314 - RNA, 23 nt, Human
guguuccccuuccacugagggca

SEQ ID NO: 3637315 - RNA, 22 nt, Human
guguuccuauauuccagguuua

SEQ ID NO: 3637316 - RNA, 10 nt, Human
guguuccugg

SEQ ID NO: 3637317 - RNA, 11 nt, Human
guguucguucu

SEQ ID NO: 3637318 - RNA, 23 nt, Human
guguucuauccaaacauguauuu

SEQ ID NO: 3637319 - RNA, 12 nt, Human
guguucucagag

SEQ ID NO: 3637320 - RNA, 13 nt, Human
guguucugugaua

SEQ ID NO: 3637321 - RNA, 13 nt, Human
guguucuguuaca

SEQ ID NO: 3637322 - RNA, 23 nt, Human
guguucuguuuguuauuguuuug

SEQ ID NO: 3637323 - RNA, 13 nt, Human
guguucuuugugu

SEQ ID NO: 3637324 - RNA, 12 nt, Human
guguugaaaacc

SEQ ID NO: 3637325 - RNA, 22 nt, Human
guguugagcaucugucccccuu

SEQ ID NO: 3637326 - RNA, 19 nt, Human
guguugagccuuuucccuc

SEQ ID NO: 3637327 - RNA, 14 nt, Human
guguugauacuguu

SEQ ID NO: 3637328 - RNA, 17 nt, Human
guguugauacuguugca

SEQ ID NO: 3637329 - RNA, 23 nt, Human
guguugauacuguugcacgugug

SEQ ID NO: 3637330 - RNA, 13 nt, Human
guguugcagaagg

SEQ ID NO: 3637331 - RNA, 15 nt, Human
guguugccacaggac

SEQ ID NO: 3637332 - RNA, 19 nt, Human
guguugccacaguagaacu

SEQ ID NO: 3637333 - RNA, 20 nt, Human
guguuggacaaaugugaaga

SEQ ID NO: 3637334 - RNA, 20 nt, Human
guguuggacaagcuucugag

SEQ ID NO: 3637335 - RNA, 16 nt, Human
guguuggcccaagcuc

SEQ ID NO: 3637336 - RNA, 18 nt, Human
guguuggcccaagcucuu

SEQ ID NO: 3637337 - RNA, 14 nt, Human
guguugggauacug

SEQ ID NO: 3637338 - RNA, 14 nt, Human
guguuguauuaaca

SEQ ID NO: 3637339 - RNA, 15 nt, Human
guguugucucuugag

SEQ ID NO: 3637340 - RNA, 18 nt, Human
guguuuaaagagagguua

SEQ ID NO: 3637341 - RNA, 21 nt, Human
guguuuaaaguucaacauguu

SEQ ID NO: 3637342 - RNA, 16 nt, Human
guguuuaaauaaagua

SEQ ID NO: 3637343 - RNA, 12 nt, Human
guguuuaacuga

SEQ ID NO: 3637344 - RNA, 14 nt, Human
guguuuauaaaaua

SEQ ID NO: 3637345 - RNA, 18 nt, Human
guguuuauaucuccuuug

SEQ ID NO: 3637346 - RNA, 12 nt, Human
guguuuaugugu

SEQ ID NO: 3637347 - RNA, 16 nt, Human
guguuuaugugugugu

SEQ ID NO: 3637348 - RNA, 15 nt, Human
guguuuauucuugau

SEQ ID NO: 3637349 - RNA, 19 nt, Human
guguuucgcggguaacugg

SEQ ID NO: 3637350 - RNA, 12 nt, Human
guguuucuauga

SEQ ID NO: 3637351 - RNA, 13 nt, Human
guguuucugacuc

SEQ ID NO: 3637352 - RNA, 21 nt, Human
guguuucuguccuguaacugu

SEQ ID NO: 3637353 - RNA, 13 nt, Human
guguuucuuuagu

SEQ ID NO: 3637354 - RNA, 16 nt, Human
guguuucuuuaguuuu

SEQ ID NO: 3637355 - RNA, 14 nt, Human
guguuuggcuuuca

SEQ ID NO: 3637356 - RNA, 17 nt, Human
guguuugguuuacauuu

SEQ ID NO: 3637357 - RNA, 12 nt, Human
guguuugucauu

SEQ ID NO: 3637358 - RNA, 13 nt, Human
guguuugucauua

SEQ ID NO: 3637359 - RNA, 12 nt, Human
guguuuguuccu

SEQ ID NO: 3637360 - RNA, 18 nt, Human
guguuuuaaaaugagaaa

SEQ ID NO: 3637361 - RNA, 13 nt, Human
guguuuuaaauuc

SEQ ID NO: 3637362 - RNA, 16 nt, Human
guguuuuaagaaaugu

SEQ ID NO: 3637363 - RNA, 22 nt, Human
guguuuuaauuccaauaugaug

SEQ ID NO: 3637364 - RNA, 14 nt, Human
guguuuuaauugua

SEQ ID NO: 3637365 - RNA, 16 nt, Human
guguuuuaauuguaaa

SEQ ID NO: 3637366 - RNA, 16 nt, Human
guguuuuagaugguuu

SEQ ID NO: 3637367 - RNA, 12 nt, Human
guguuuugcugu

SEQ ID NO: 3637368 - RNA, 14 nt, Human
guguuuuguaccag

SEQ ID NO: 3637369 - RNA, 21 nt, Human
guguuuuguucaccauuauaa

SEQ ID NO: 3637370 - RNA, 16 nt, Human
guguuuuguugaguuu

SEQ ID NO: 3637371 - RNA, 16 nt, Human
guguuuuguuuauuaa

SEQ ID NO: 3637372 - RNA, 14 nt, Human
guguuuuucuauua

SEQ ID NO: 3637373 - RNA, 22 nt, Human
guguuuuucuauuaaaagacuc

SEQ ID NO: 3637374 - RNA, 13 nt, Human
guguuuuucucca

SEQ ID NO: 3637375 - RNA, 14 nt, Human
guguuuuucugcuu

SEQ ID NO: 3637376 - RNA, 19 nt, Human
guguuuuucugcuuuugaa

SEQ ID NO: 3637377 - RNA, 15 nt, Human
guguuuuugaaauau

SEQ ID NO: 3637378 - RNA, 15 nt, Human
guguuuuugggaugu

SEQ ID NO: 3637379 - RNA, 18 nt, Human
guguuuuugggaugucuu

SEQ ID NO: 3637380 - RNA, 14 nt, Human
guguuuuuguaaag

SEQ ID NO: 3637381 - RNA, 14 nt, Human
guguuuuuuaagau

SEQ ID NO: 3637382 - RNA, 18 nt, Human
guuccucguucucccugg

SEQ ID NO: 3637383 - RNA, 23 nt, Human
guuccucugcucaccgcccauca

SEQ ID NO: 3637384 - RNA, 22 nt, Human
guuccucuuugguguacagacu

SEQ ID NO: 3637385 - RNA, 23 nt, Human
guuccugacaucacagcagccuc

SEQ ID NO: 3637386 - RNA, 20 nt, Human
guuccugaugacccaggcug

SEQ ID NO: 3637387 - RNA, 17 nt, Human
guuccugcagcagagcc

SEQ ID NO: 3637388 - RNA, 16 nt, Human
guuccugcuagaaaug

SEQ ID NO: 3637389 - RNA, 17 nt, Human
guuccugcuagaaaugg

SEQ ID NO: 3637390 - RNA, 11 nt, Human
guuccugcugc

SEQ ID NO: 3637391 - RNA, 14 nt, Human
guuccugcugcugu

SEQ ID NO: 3637392 - RNA, 13 nt, Human
guuccuggcaaua

SEQ ID NO: 3637393 - RNA, 15 nt, Human
guuccuggcucagcc

SEQ ID NO: 3637394 - RNA, 16 nt, Human
guuccuggcucagccu

SEQ ID NO: 3637395 - RNA, 22 nt, Human
guuccuggggcauccauggggu

SEQ ID NO: 3637396 - RNA, 16 nt, Human
guuccugucccugcgc

SEQ ID NO: 3637397 - RNA, 17 nt, Human
guuccugucccugcgcc

SEQ ID NO: 3637398 - RNA, 14 nt, Human
guuccuguggcucc

SEQ ID NO: 3637399 - RNA, 13 nt, Human
guuccuucccaau

SEQ ID NO: 3637400 - RNA, 20 nt, Human
guuccuucccugugccuccu

SEQ ID NO: 3637401 - RNA, 18 nt, Human
guuccuuccucugagccu

SEQ ID NO: 3637402 - RNA, 23 nt, Human
guuccuugaucuguauauacaau

SEQ ID NO: 3637403 - RNA, 21 nt, Human
guuccuugguccuaguaagaa

SEQ ID NO: 3637404 - RNA, 21 nt, Human
guuccuuuccaacguuuggaa

SEQ ID NO: 3637405 - RNA, 14 nt, Human
guucgacucagccu

SEQ ID NO: 3637406 - RNA, 20 nt, Human
guucgagaccagccuggcca

SEQ ID NO: 3637407 - RNA, 15 nt, Human
guucgcagccacccu

SEQ ID NO: 3637408 - RNA, 20 nt, Human
guucgcagccacccugagga

SEQ ID NO: 3637409 - RNA, 19 nt, Human
guucgcuuggcuccaugcu

SEQ ID NO: 3637410 - RNA, 14 nt, Human
guucggcucugggu

SEQ ID NO: 3637411 - RNA, 17 nt, Human
guucguggaaagggugc

SEQ ID NO: 3637412 - RNA, 13 nt, Human
guucguucuguuu

SEQ ID NO: 3637413 - RNA, 19 nt, Human
guucuaaaaauugugauca

SEQ ID NO: 3637414 - RNA, 14 nt, Human
guucuaaagaugga

SEQ ID NO: 3637415 - RNA, 17 nt, Human
guucuaaagauggaaaa

SEQ ID NO: 3637416 - RNA, 20 nt, Human
guucuaaagauggaaaaacc

SEQ ID NO: 3637417 - RNA, 10 nt, Human
guucuaaagc

SEQ ID NO: 3637418 - RNA, 16 nt, Human
guucuaaagcucugac

SEQ ID NO: 3637419 - RNA, 17 nt, Human
guucuaaaguucuaaga

SEQ ID NO: 3637420 - RNA, 14 nt, Human
guucuaagaaaccc

SEQ ID NO: 3637421 - RNA, 17 nt, Human
guucuaagacucaaaug

SEQ ID NO: 3637422 - RNA, 13 nt, Human
guucuaagaugug

SEQ ID NO: 3637423 - RNA, 17 nt, Human
guucuaagauucuaaug

SEQ ID NO: 3637424 - RNA, 14 nt, Human
guucuaagauucug

SEQ ID NO: 3637425 - RNA, 15 nt, Human
guucuaagauucuga

SEQ ID NO: 3637426 - RNA, 13 nt, Human
guucuaaggccua

SEQ ID NO: 3637427 - RNA, 20 nt, Human
guucuaaggccuaggauucu

SEQ ID NO: 3637428 - RNA, 16 nt, Human
guucuaagucuuucca

SEQ ID NO: 3637429 - RNA, 19 nt, Human
guucuaagucuuuccauug

SEQ ID NO: 3637430 - RNA, 15 nt, Human
guucuaaguuucuaa

SEQ ID NO: 3637431 - RNA, 20 nt, Human
guucuacaaucuauuuauug

SEQ ID NO: 3637432 - RNA, 18 nt, Human
guucuacccguuccaaaa

SEQ ID NO: 3637433 - RNA, 20 nt, Human
guucuaccucaggcagcuca

SEQ ID NO: 3637434 - RNA, 19 nt, Human
guucuacggaucaucaaca

SEQ ID NO: 3637435 - RNA, 20 nt, Human
guucuagacauggagguucu

SEQ ID NO: 3637436 - RNA, 21 nt, Human
guucuagacauggagguucua

SEQ ID NO: 3637437 - RNA, 12 nt, Human
guucuaggaaaa

SEQ ID NO: 3637438 - RNA, 13 nt, Human
guucuaggaaaau

SEQ ID NO: 3637439 - RNA, 23 nt, Human
guucuaggcacuguaguucuaag

SEQ ID NO: 3637440 - RNA, 14 nt, Human
guucuagguuucaa

SEQ ID NO: 3637441 - RNA, 22 nt, Human
guucuagguuucaaagaugcug

SEQ ID NO: 3637442 - RNA, 14 nt, Human
guucuaguguuuuc

SEQ ID NO: 3637443 - RNA, 15 nt, Human
guucuaguuugcauu

SEQ ID NO: 3637444 - RNA, 14 nt, Human
guucuaguuuuuua

SEQ ID NO: 3637445 - RNA, 21 nt, Human
guucuauccaaacauguauuu

SEQ ID NO: 3637446 - RNA, 14 nt, Human
guucuaugaacaac

SEQ ID NO: 3637447 - RNA, 12 nt, Human
guucuauguuua

SEQ ID NO: 3637448 - RNA, 18 nt, Human
guucuauuuggaauuuau

SEQ ID NO: 3637449 - RNA, 14 nt, Human
guucucaaugaaaa

SEQ ID NO: 3637450 - RNA, 23 nt, Human
guucucaaugugaaaaauguguc

SEQ ID NO: 3637451 - RNA, 21 nt, Human
guucucaauuccaacaguuua

SEQ ID NO: 3637452 - RNA, 12 nt, Human
guucucacaccc

SEQ ID NO: 3637453 - RNA, 16 nt, Human
guucucacacccaccg

SEQ ID NO: 3637454 - RNA, 12 nt, Human
guucucacuguu

SEQ ID NO: 3637455 - RNA, 19 nt, Human
guucucacuguucccucug

SEQ ID NO: 3637456 - RNA, 13 nt, Human
guucucagcuccc

SEQ ID NO: 3637457 - RNA, 18 nt, Human
guucucagcucccccugu

SEQ ID NO: 3637458 - RNA, 20 nt, Human
guucucagcucccccugucc

SEQ ID NO: 3637459 - RNA, 13 nt, Human
guucucagggcuc

SEQ ID NO: 3637460 - RNA, 23 nt, Human
guucucagggcuccugccuucug

SEQ ID NO: 3637461 - RNA, 22 nt, Human
guucuccaacaucacagcccag

SEQ ID NO: 3637462 - RNA, 23 nt, Human
guucuccaacaucacagcccagc

SEQ ID NO: 3637463 - RNA, 20 nt, Human
guucuccagucauuauguua

SEQ ID NO: 3637464 - RNA, 20 nt, Human
guucucccuguacaguguua

SEQ ID NO: 3637465 - RNA, 18 nt, Human
guucuccguuagcuccug

SEQ ID NO: 3637466 - RNA, 19 nt, Human
guucuccguuagcuccugu

SEQ ID NO: 3637467 - RNA, 17 nt, Human
guucuccucuccccucu

SEQ ID NO: 3637468 - RNA, 13 nt, Human
guucuccuuuucc

SEQ ID NO: 3637469 - RNA, 18 nt, Human
guucuccuuuuccucucu

SEQ ID NO: 3637470 - RNA, 22 nt, Human
guucuccuuuuccucucucccg

SEQ ID NO: 3637471 - RNA, 22 nt, Human
guucucuaaguuccacugagcu

SEQ ID NO: 3637472 - RNA, 17 nt, Human
guucucuaucauuuaau

SEQ ID NO: 3637473 - RNA, 20 nt, Human
guucucucaacaagaaauaa

SEQ ID NO: 3637474 - RNA, 21 nt, Human
guucucucuacugguccucuu

SEQ ID NO: 3637475 - RNA, 15 nt, Human
guucucucuauggua

SEQ ID NO: 3637476 - RNA, 23 nt, Human
guucucucuaugguaaagauauu

SEQ ID NO: 3637477 - RNA, 16 nt, Human
guucucugaggacacu

SEQ ID NO: 3637478 - RNA, 12 nt, Human
guucucugcccu

SEQ ID NO: 3637479 - RNA, 13 nt, Human
guucucugcccuc

SEQ ID NO: 3637480 - RNA, 15 nt, Human
guucucugcccucca

SEQ ID NO: 3637481 - RNA, 14 nt, Human
guucucugggagaa

SEQ ID NO: 3637482 - RNA, 12 nt, Human
guucugaagaag

SEQ ID NO: 3637483 - RNA, 15 nt, Human
guucugaauaauuuc

SEQ ID NO: 3637484 - RNA, 16 nt, Human
guucugaauaauuucu

SEQ ID NO: 3637485 - RNA, 17 nt, Human
guucugacauuaacagu

SEQ ID NO: 3637486 - RNA, 17 nt, Human
guucugagagaaaaaga

SEQ ID NO: 3637487 - RNA, 22 nt, Human
guucugagauuauuuuaaucua

SEQ ID NO: 3637488 - RNA, 14 nt, Human
guucugaguguuuu

SEQ ID NO: 3637489 - RNA, 14 nt, Human
guucugauauuaau

SEQ ID NO: 3637490 - RNA, 18 nt, Human
guucugaugaugugccug

SEQ ID NO: 3637491 - RNA, 13 nt, Human
guucugauuagaa

SEQ ID NO: 3637492 - RNA, 16 nt, Human
guucugauuagaaaug

SEQ ID NO: 3637493 - RNA, 18 nt, Human
guucugauuagaaaugac

SEQ ID NO: 3637494 - RNA, 16 nt, Human
guucugcaaaaauauu

SEQ ID NO: 3637495 - RNA, 12 nt, Human
guucugcacuga

SEQ ID NO: 3637496 - RNA, 16 nt, Human
guucugcacugaaaag

SEQ ID NO: 3637497 - RNA, 21 nt, Human
guucugcagacacgccuuccc

SEQ ID NO: 3637498 - RNA, 23 nt, Human
guucugcagguugaagccauguc

SEQ ID NO: 3637499 - RNA, 20 nt, Human
guucugccucugauguauuu

SEQ ID NO: 3637500 - RNA, 19 nt, Human
guucugccugccagcugca

SEQ ID NO: 3637501 - RNA, 17 nt, Human
guucugcuccucuccag

SEQ ID NO: 3637502 - RNA, 22 nt, Human
guucugcuccucuccaggcacc

SEQ ID NO: 3637503 - RNA, 14 nt, Human
guucugcucugguu

SEQ ID NO: 3637504 - RNA, 19 nt, Human
guucugcuggccuggaucu

SEQ ID NO: 3637505 - RNA, 23 nt, Human
guucuggcccucaccccugcccu

SEQ ID NO: 3637506 - RNA, 20 nt, Human
guucuggcucuuccaggcug

SEQ ID NO: 3637507 - RNA, 20 nt, Human
guucuggcugccccaaccug

SEQ ID NO: 3637508 - RNA, 11 nt, Human
guucugggaca

SEQ ID NO: 3637509 - RNA, 14 nt, Human
guucugggacacag

SEQ ID NO: 3637510 - RNA, 14 nt, Human
guucugggcucuuu

SEQ ID NO: 3637511 - RNA, 15 nt, Human
guucuggggccccuu

SEQ ID NO: 3637512 - RNA, 14 nt, Human
guucuggggggacc

SEQ ID NO: 3637513 - RNA, 19 nt, Human
guucuggggggacccagug

SEQ ID NO: 3637514 - RNA, 16 nt, Human
guucuggugaggccuu

SEQ ID NO: 3637515 - RNA, 18 nt, Human
guucuggugugaacuaaa

SEQ ID NO: 3637516 - RNA, 22 nt, Human
guucugguuuuuaaccauuguc

SEQ ID NO: 3637517 - RNA, 21 nt, Human
guucuguaaaauggaaaacuu

SEQ ID NO: 3637518 - RNA, 22 nt, Human
guucuguaaaauggaaaacuua

SEQ ID NO: 3637519 - RNA, 12 nt, Human
guucuguauuug

SEQ ID NO: 3637520 - RNA, 14 nt, Human
guucuguauuugaa

SEQ ID NO: 3637521 - RNA, 18 nt, Human
guucugucccuuggagcu

SEQ ID NO: 3637522 - RNA, 12 nt, Human
guucuguggaaa

SEQ ID NO: 3637523 - RNA, 21 nt, Human
guucugugguuuuccccuccc

SEQ ID NO: 3637524 - RNA, 23 nt, Human
guucugugguuuuccccucccug

SEQ ID NO: 3637525 - RNA, 13 nt, Human
guucuguuaacug

SEQ ID NO: 3637526 - RNA, 21 nt, Human
guucuguuacaaaauguaacu

SEQ ID NO: 3637527 - RNA, 17 nt, Human
uaaacuuuaauauguau

SEQ ID NO: 3637528 - RNA, 18 nt, Human
uaaacuuuagaguagcau

SEQ ID NO: 3637529 - RNA, 15 nt, Human
uaaacuuuaucacuu

SEQ ID NO: 3637530 - RNA, 17 nt, Human
uaaacuuugaaauauau

SEQ ID NO: 3637531 - RNA, 16 nt, Human
uaaacuuuuaauucau

SEQ ID NO: 3637532 - RNA, 17 nt, Human
uaaacuuuuagaaacuu

SEQ ID NO: 3637533 - RNA, 15 nt, Human
uaaacuuuucugaua

SEQ ID NO: 3637534 - RNA, 14 nt, Human
uaaacuuuuuuuca

SEQ ID NO: 3637535 - RNA, 20 nt, Human
uaaagaaaaaaaugucaaaa

SEQ ID NO: 3637536 - RNA, 17 nt, Human
uaaagaaaaaaauugaa

SEQ ID NO: 3637537 - RNA, 14 nt, Human
uaaagaaaaauauu

SEQ ID NO: 3637538 - RNA, 20 nt, Human
uaaagaaaaauauuuaaugu

SEQ ID NO: 3637539 - RNA, 21 nt, Human
uaaagaaaaauauuuaauguu

SEQ ID NO: 3637540 - RNA, 12 nt, Human
uaaagaaaacug

SEQ ID NO: 3637541 - RNA, 13 nt, Human
uaaagaaaacuuc

SEQ ID NO: 3637542 - RNA, 12 nt, Human
uaaagaaaagau

SEQ ID NO: 3637543 - RNA, 15 nt, Human
uaaagaaaagaugaa

SEQ ID NO: 3637544 - RNA, 18 nt, Human
uaaagaaaagaugcacuu

SEQ ID NO: 3637545 - RNA, 16 nt, Human
uaaagaaaauaaaauu

SEQ ID NO: 3637546 - RNA, 19 nt, Human
uaaagaaaauaucugaaau

SEQ ID NO: 3637547 - RNA, 18 nt, Human
uaaagaaaaucucuguga

SEQ ID NO: 3637548 - RNA, 14 nt, Human
uaaagaaacagcuu

SEQ ID NO: 3637549 - RNA, 15 nt, Human
uaaagaaacagcuuu

SEQ ID NO: 3637550 - RNA, 23 nt, Human
uaaagaaacagcuuucaagugcc

SEQ ID NO: 3637551 - RNA, 18 nt, Human
uaaagaaagagagaaaau

SEQ ID NO: 3637552 - RNA, 23 nt, Human
uaaagaaagagagaaaauaaaaa

SEQ ID NO: 3637553 - RNA, 11 nt, Human
uaaagaaagug

SEQ ID NO: 3637554 - RNA, 20 nt, Human
uaaagaaaguguauuuggaa

SEQ ID NO: 3637555 - RNA, 12 nt, Human
uaaagaaauaau

SEQ ID NO: 3637556 - RNA, 20 nt, Human
uaaagaagaccugagaaugu

SEQ ID NO: 3637557 - RNA, 14 nt, Human
uaaagaagaucugu

SEQ ID NO: 3637558 - RNA, 14 nt, Human
uaaagaagguuuca

SEQ ID NO: 3637559 - RNA, 15 nt, Human
uaaagaaguauuuuu

SEQ ID NO: 3637560 - RNA, 22 nt, Human
uaaagaaguauuuuuagaauaa

SEQ ID NO: 3637561 - RNA, 17 nt, Human
uaaagaaguugaaguuu

SEQ ID NO: 3637562 - RNA, 13 nt, Human
uaaagaaguuuga

SEQ ID NO: 3637563 - RNA, 14 nt, Human
uaaagaaguuugaa

SEQ ID NO: 3637564 - RNA, 18 nt, Human
uaaagaaguuugaacauu

SEQ ID NO: 3637565 - RNA, 12 nt, Human
uaaagaauacuu

SEQ ID NO: 3637566 - RNA, 13 nt, Human
uaaagaauacuug

SEQ ID NO: 3637567 - RNA, 17 nt, Human
uaaagaaucauuauuua

SEQ ID NO: 3637568 - RNA, 20 nt, Human
uaaagaauugugguuuauau

SEQ ID NO: 3637569 - RNA, 16 nt, Human
uaaagaauuucuuuau

SEQ ID NO: 3637570 - RNA, 14 nt, Human
uaaagacaaaaaac

SEQ ID NO: 3637571 - RNA, 23 nt, Human
uaaagacaggagacaaaagagca

SEQ ID NO: 3637572 - RNA, 13 nt, Human
uaaagaccaaacu

SEQ ID NO: 3637573 - RNA, 16 nt, Human
uaaagacguuuuauaa

SEQ ID NO: 3637574 - RNA, 11 nt, Human
uaaagacucua

SEQ ID NO: 3637575 - RNA, 13 nt, Human
uaaagagaaaauu

SEQ ID NO: 3637576 - RNA, 12 nt, Human
uaaagagaaacu

SEQ ID NO: 3637577 - RNA, 14 nt, Human
uaaagagaaacuuu

SEQ ID NO: 3637578 - RNA, 19 nt, Human
uaaagagaaacuuugugcu

SEQ ID NO: 3637579 - RNA, 13 nt, Human
uaaagagagguua

SEQ ID NO: 3637580 - RNA, 20 nt, Human
uaaagaggcguugcuuucac

SEQ ID NO: 3637581 - RNA, 17 nt, Human
uaaagaggcugaaagag

SEQ ID NO: 3637582 - RNA, 15 nt, Human
uaaagagucuagauu

SEQ ID NO: 3637583 - RNA, 18 nt, Human
uaaagagucuagauucaa

SEQ ID NO: 3637584 - RNA, 14 nt, Human
uaaagaguguggca

SEQ ID NO: 3637585 - RNA, 12 nt, Human
uaaagauaauau

SEQ ID NO: 3637586 - RNA, 17 nt, Human
uaaagauaauugcuauu

SEQ ID NO: 3637587 - RNA, 23 nt, Human
uaaagauacagaacucuuucaaa

SEQ ID NO: 3637588 - RNA, 24 nt, Human
uaaagauauggagaauugcugaag

SEQ ID NO: 3637589 - RNA, 17 nt, Human
uaaagauauuguucaaa

SEQ ID NO: 3637590 - RNA, 18 nt, Human
uaaagauauuuuuaucuu

SEQ ID NO: 3637591 - RNA, 17 nt, Human
uaaagaugaacucugaa

SEQ ID NO: 3637592 - RNA, 11 nt, Human
uaaagaugauc

SEQ ID NO: 3637593 - RNA, 21 nt, Human
uaaagaugaucuacucagaaa

SEQ ID NO: 3637594 - RNA, 16 nt, Human
uaaagauguagcaaac

SEQ ID NO: 3637595 - RNA, 21 nt, Human
uaaagauucuauaguucuaga

SEQ ID NO: 3637596 - RNA, 13 nt, Human
uaaagauuugggu

SEQ ID NO: 3637597 - RNA, 14 nt, Human
uaaagauuuugauc

SEQ ID NO: 3637598 - RNA, 16 nt, Human
uaaagcaaaaaaugaa

SEQ ID NO: 3637599 - RNA, 19 nt, Human
uaaagcaaaaaaugaaugu

SEQ ID NO: 3637600 - RNA, 22 nt, Human
uaaagcaacuguuaugaaauaa

SEQ ID NO: 3637601 - RNA, 21 nt, Human
uaaagcaagcucacuugcuuu

SEQ ID NO: 3637602 - RNA, 13 nt, Human
uaaagcaauagaa

SEQ ID NO: 3637603 - RNA, 15 nt, Human
uaaagcaauaugcau

SEQ ID NO: 3637604 - RNA, 12 nt, Human
uaaagcaauuuu

SEQ ID NO: 3637605 - RNA, 14 nt, Human
uaaagcaauuuucc

SEQ ID NO: 3637606 - RNA, 20 nt, Human
uaaagcaauuuuccuugaag

SEQ ID NO: 3637607 - RNA, 18 nt, Human
uaaagcaggcagaacuca

SEQ ID NO: 3637608 - RNA, 18 nt, Human
uaaagcaggccuuuugau

SEQ ID NO: 3637609 - RNA, 16 nt, Human
uaaagcagguucuugu

SEQ ID NO: 3637610 - RNA, 17 nt, Human
uaaagcaguauuuuucu

SEQ ID NO: 3637611 - RNA, 19 nt, Human
uaaagcagucacuuuuccu

SEQ ID NO: 3637612 - RNA, 18 nt, Human
uaaagcaucuaaacuuua

SEQ ID NO: 3637613 - RNA, 22 nt, Human
uaaagcaugaaugguauggaac

SEQ ID NO: 3637614 - RNA, 12 nt, Human
uaaagcauucca

SEQ ID NO: 3637615 - RNA, 12 nt, Human
uaaagcauugcu

SEQ ID NO: 3637616 - RNA, 20 nt, Human
uaaagcauuuaaccccccug

SEQ ID NO: 3637617 - RNA, 11 nt, Human
uaaagccaugu

SEQ ID NO: 3637618 - RNA, 15 nt, Human
uaaagccauguuuau

SEQ ID NO: 3637619 - RNA, 17 nt, Human
uaaagccauucugauua

SEQ ID NO: 3637620 - RNA, 11 nt, Human
uaaagccucaa

SEQ ID NO: 3637621 - RNA, 20 nt, Human
uaaagccuguauucucaaac

SEQ ID NO: 3637622 - RNA, 15 nt, Human
uaaagcguuugcaca

SEQ ID NO: 3637623 - RNA, 22 nt, Human
uaaagcuaaaauaaagaaauag

SEQ ID NO: 3637624 - RNA, 23 nt, Human
uaaagcuaaaauaaagaaauaga

SEQ ID NO: 3637625 - RNA, 14 nt, Human
uaaagcuagaaaug

SEQ ID NO: 3637626 - RNA, 15 nt, Human
uaaagcuagaaauga

SEQ ID NO: 3637627 - RNA, 14 nt, Human
uaaagcucaaauga

SEQ ID NO: 3637628 - RNA, 18 nt, Human
uaaagcugccuguaguua

SEQ ID NO: 3637629 - RNA, 23 nt, Human
uaaagcugccuguaguuaggaaa

SEQ ID NO: 3637630 - RNA, 19 nt, Human
uaaagcugguuuaauguuu

SEQ ID NO: 3637631 - RNA, 11 nt, Human
uaaagcuuguc

SEQ ID NO: 3637632 - RNA, 19 nt, Human
uaaagcuuucagaauaugu

SEQ ID NO: 3637633 - RNA, 23 nt, Human
uaaagcuuucagaauaugucagu

SEQ ID NO: 3637634 - RNA, 16 nt, Human
uaaagcuuuugaugug

SEQ ID NO: 3637635 - RNA, 13 nt, Human
uaaaggaaaugau

SEQ ID NO: 3637636 - RNA, 23 nt, Human
uaaaggaaucuagccagugaaca

SEQ ID NO: 3637637 - RNA, 14 nt, Human
uaaaggacagugaa

SEQ ID NO: 3637638 - RNA, 12 nt, Human
uaaaggacugua

SEQ ID NO: 3637639 - RNA, 16 nt, Human
uaaaggaguuuauguu

SEQ ID NO: 3637640 - RNA, 19 nt, Human
uaaaggaguuuauguucca

SEQ ID NO: 3637641 - RNA, 19 nt, Human
uaaaggcaccaucuaauag

SEQ ID NO: 3637642 - RNA, 21 nt, Human
uaaaggcagcuguugucucuu

SEQ ID NO: 3637643 - RNA, 15 nt, Human
uaaaggcccagcccc

SEQ ID NO: 3637644 - RNA, 17 nt, Human
uaaaggcccagccccua

SEQ ID NO: 3637645 - RNA, 23 nt, Human
uaaaggccucugccucacaacau

SEQ ID NO: 3637646 - RNA, 15 nt, Human
uaaaggcuaccuuau

SEQ ID NO: 3637647 - RNA, 19 nt, Human
uaaaggcucgauuuuguau

SEQ ID NO: 3637648 - RNA, 22 nt, Human
uaaaggcucgauuuuguaucug

SEQ ID NO: 3637649 - RNA, 22 nt, Human
uaaagggaagaaaacacuguua

SEQ ID NO: 3637650 - RNA, 22 nt, Human
uaaagggauauuuuuuucuauu

SEQ ID NO: 3637651 - RNA, 18 nt, Human
uaaaggguguacuuauau

SEQ ID NO: 3637652 - RNA, 23 nt, Human
uaaaggucacuuuucacauccuu

SEQ ID NO: 3637653 - RNA, 20 nt, Human
uaaagguccacaggucuaga

SEQ ID NO: 3637654 - RNA, 22 nt, Human
uaaagguccacaggucuagacu

SEQ ID NO: 3637655 - RNA, 19 nt, Human
uaaagguggccacaaauuc

SEQ ID NO: 3637656 - RNA, 17 nt, Human
uaaaggugguaugugug

SEQ ID NO: 3637657 - RNA, 21 nt, Human
uaaaggugguaugugugugua

SEQ ID NO: 3637658 - RNA, 17 nt, Human
uaaaggugucuuccucc

SEQ ID NO: 3637659 - RNA, 20 nt, Human
uaaaggugucuuccucccaa

SEQ ID NO: 3637660 - RNA, 13 nt, Human
uaaagguuaaaaa

SEQ ID NO: 3637661 - RNA, 21 nt, Human
uaaagguuucuauuuucucug

SEQ ID NO: 3637662 - RNA, 22 nt, Human
uaaaguaaaaacaaagaaauua

SEQ ID NO: 3637663 - RNA, 17 nt, Human
uaaaguaaagcuaaaau

SEQ ID NO: 3637664 - RNA, 13 nt, Human
uaaaguaaauaca

SEQ ID NO: 3637665 - RNA, 15 nt, Human
uaaaguacuuguagu

SEQ ID NO: 3637666 - RNA, 18 nt, Human
uaaaguagaagaggguuu

SEQ ID NO: 3637667 - RNA, 17 nt, Human
uaaaguauacucuuagg

SEQ ID NO: 3637668 - RNA, 14 nt, Human
uaaaguaucaugca

SEQ ID NO: 3637669 - RNA, 15 nt, Human
uaaaguaucaugcau

SEQ ID NO: 3637670 - RNA, 14 nt, Human
uaaaguaugaaucu

SEQ ID NO: 3637671 - RNA, 16 nt, Human
uaaaguaugaaucuau

SEQ ID NO: 3637672 - RNA, 22 nt, Human
uaaaguauguaaacaggagaca

SEQ ID NO: 3637673 - RNA, 17 nt, Human
uaacacaaguccuguga

SEQ ID NO: 3637674 - RNA, 15 nt, Human
uaacacacacagaaa

SEQ ID NO: 3637675 - RNA, 20 nt, Human
uaacacacacagaaaagcau

SEQ ID NO: 3637676 - RNA, 21 nt, Human
uaacacacacagaaaagcaua

SEQ ID NO: 3637677 - RNA, 17 nt, Human
uaacacacagcucccau

SEQ ID NO: 3637678 - RNA, 22 nt, Human
uaacacacuaccgaaugugucu

SEQ ID NO: 3637679 - RNA, 17 nt, Human
uaacacauuuuguauaa

SEQ ID NO: 3637680 - RNA, 19 nt, Human
uaacacauuuuguauaauu

SEQ ID NO: 3637681 - RNA, 23 nt, Human
uaacacauuuuguauaauuguau

SEQ ID NO: 3637682 - RNA, 19 nt, Human
uaacacauuuuuuugcaug

SEQ ID NO: 3637683 - RNA, 14 nt, Human
uaacaccagcauug

SEQ ID NO: 3637684 - RNA, 16 nt, Human
uaacaccugaugugua

SEQ ID NO: 3637685 - RNA, 13 nt, Human
uaacacuaauaua

SEQ ID NO: 3637686 - RNA, 22 nt, Human
uaacacuaauauauuuaaaaau

SEQ ID NO: 3637687 - RNA, 19 nt, Human
uaacacuacucaaagcaaa

SEQ ID NO: 3637688 - RNA, 19 nt, Human
uaacacuauguuuauuuac

SEQ ID NO: 3637689 - RNA, 19 nt, Human
uaacacucagaagccuggg

SEQ ID NO: 3637690 - RNA, 15 nt, Human
uaacacuguuaagag

SEQ ID NO: 3637691 - RNA, 22 nt, Human
uaacacuucuuacgcaaugcuu

SEQ ID NO: 3637692 - RNA, 15 nt, Human
uaacacuuuacaaug

SEQ ID NO: 3637693 - RNA, 13 nt, Human
uaacagaaaugua

SEQ ID NO: 3637694 - RNA, 13 nt, Human
uaacagaaauugu

SEQ ID NO: 3637695 - RNA, 19 nt, Human
uaacagaacagcuucaggu

SEQ ID NO: 3637696 - RNA, 20 nt, Human
uaacagaacagcuucagguu

SEQ ID NO: 3637697 - RNA, 11 nt, Human
uaacagacauu

SEQ ID NO: 3637698 - RNA, 15 nt, Human
uaacagaugcaaugu

SEQ ID NO: 3637699 - RNA, 21 nt, Human
uaacagaugcaaugugcuacu

SEQ ID NO: 3637700 - RNA, 15 nt, Human
uaacagcaguuucag

SEQ ID NO: 3637701 - RNA, 17 nt, Human
uaacagcaguuucaggu

SEQ ID NO: 3637702 - RNA, 19 nt, Human
uaacagccaggaguguuaa

SEQ ID NO: 3637703 - RNA, 11 nt, Human
uaacagcccuc

SEQ ID NO: 3637704 - RNA, 13 nt, Human
uaacagcucagga

SEQ ID NO: 3637705 - RNA, 16 nt, Human
uaacagcuccuuggga

SEQ ID NO: 3637706 - RNA, 12 nt, Human
uaacagcugaau

SEQ ID NO: 3637707 - RNA, 16 nt, Human
uaacaggacgagauga

SEQ ID NO: 3637708 - RNA, 20 nt, Human
uaacaggcaaacauuuucuc

SEQ ID NO: 3637709 - RNA, 19 nt, Human
uaacaggcagauacaggaa

SEQ ID NO: 3637710 - RNA, 15 nt, Human
uaacaggcauuuguu

SEQ ID NO: 3637711 - RNA, 20 nt, Human
uaacaggcauuuguucacug

SEQ ID NO: 3637712 - RNA, 22 nt, Human
uaacagggaacgugauuaguga

SEQ ID NO: 3637713 - RNA, 23 nt, Human
uaacagggaacgugauuagugaa

SEQ ID NO: 3637714 - RNA, 20 nt, Human
uaacagggaaggcaggcagg

SEQ ID NO: 3637715 - RNA, 23 nt, Human
uaacagggaaggcaggcagggcu

SEQ ID NO: 3637716 - RNA, 16 nt, Human
uaacagggccuugcua

SEQ ID NO: 3637717 - RNA, 18 nt, Human
uaacagggccuugcuaau

SEQ ID NO: 3637718 - RNA, 23 nt, Human
uaacagggucucuagugcuguga

SEQ ID NO: 3637719 - RNA, 23 nt, Human
uaacagguauuuuguuucuuuua

SEQ ID NO: 3637720 - RNA, 19 nt, Human
uaacaggucuccucuuaaa

SEQ ID NO: 3637721 - RNA, 16 nt, Human
uaacagguuauuuuag

SEQ ID NO: 3637722 - RNA, 23 nt, Human
uaacagguuauuuuaguuucugu

SEQ ID NO: 3637723 - RNA, 13 nt, Human
uaacagucauuua

SEQ ID NO: 3637724 - RNA, 15 nt, Human
uaacagucauuuaaa

SEQ ID NO: 3637725 - RNA, 23 nt, Human
uaacaguccccguggccaucccu

SEQ ID NO: 3637726 - RNA, 15 nt, Human
uaacagucuuacugc

SEQ ID NO: 3637727 - RNA, 21 nt, Human
uaacagugccauugucuuuau

SEQ ID NO: 3637728 - RNA, 16 nt, Human
uaacagugugguaguu

SEQ ID NO: 3637729 - RNA, 13 nt, Human
uaacaguuuucca

SEQ ID NO: 3637730 - RNA, 19 nt, Human
uaacaguuuuccaugaaaa

SEQ ID NO: 3637731 - RNA, 14 nt, Human
uaacauaaaucugu

SEQ ID NO: 3637732 - RNA, 15 nt, Human
uaacauaaaucugug

SEQ ID NO: 3637733 - RNA, 17 nt, Human
uaacauaaaucugugaa

SEQ ID NO: 3637734 - RNA, 23 nt, Human
uaacauacccgccuagcugcugu

SEQ ID NO: 3637735 - RNA, 22 nt, Human
uaacauaccuaagaaguacauu

SEQ ID NO: 3637736 - RNA, 19 nt, Human
uaacauagccaaaauguga

SEQ ID NO: 3637737 - RNA, 23 nt, Human
uaacauauaauguuguuauuuaa

SEQ ID NO: 3637738 - RNA, 19 nt, Human
uaacaucacuauccaugca

SEQ ID NO: 3637739 - RNA, 24 nt, Human
uaacauccaauaggaaugcuaaca

SEQ ID NO: 3637740 - RNA, 13 nt, Human
uaacaucugagaa

SEQ ID NO: 3637741 - RNA, 20 nt, Human
uaacaucuuuauugaaauuc

SEQ ID NO: 3637742 - RNA, 11 nt, Human
uaacaugaaau

SEQ ID NO: 3637743 - RNA, 14 nt, Human
uaacaugaauauuu

SEQ ID NO: 3637744 - RNA, 14 nt, Human
uaacaugcugugua

SEQ ID NO: 3637745 - RNA, 22 nt, Human
uaacaugcuguguaagcugugu

SEQ ID NO: 3637746 - RNA, 15 nt, Human
uaacauggaaguacu

SEQ ID NO: 3637747 - RNA, 18 nt, Human
uaacauggacaugaucuu

SEQ ID NO: 3637748 - RNA, 18 nt, Human
uaacauggugugcuucuu

SEQ ID NO: 3637749 - RNA, 12 nt, Human
uaacauguuaaa

SEQ ID NO: 3637750 - RNA, 19 nt, Human
uaacauuaccuuacugugg

SEQ ID NO: 3637751 - RNA, 17 nt, Human
uaacauuauauugcaau

SEQ ID NO: 3637752 - RNA, 16 nt, Human
uaacauuauuuauaug

SEQ ID NO: 3637753 - RNA, 21 nt, Human
uaacauucaggaauucuugga

SEQ ID NO: 3637754 - RNA, 18 nt, Human
uaacauuccaagacucua

SEQ ID NO: 3637755 - RNA, 22 nt, Human
uaacauuccaagacucuagagu

SEQ ID NO: 3637756 - RNA, 10 nt, Human
uaacauuccu

SEQ ID NO: 3637757 - RNA, 13 nt, Human
uaacauuccuaaa

SEQ ID NO: 3637758 - RNA, 22 nt, Human
uaacauuccucaugaauguaaa

SEQ ID NO: 3637759 - RNA, 23 nt, Human
uaacauucgaucucauucaguau

SEQ ID NO: 3637760 - RNA, 22 nt, Human
uaacauucuguaaaaugucugu

SEQ ID NO: 3637761 - RNA, 18 nt, Human
uaacauugaccaagaacu

SEQ ID NO: 3637762 - RNA, 21 nt, Human
uaacauugaccaagaacugca

SEQ ID NO: 3637763 - RNA, 22 nt, Human
uaacauugaccaagaacugcau

SEQ ID NO: 3637764 - RNA, 18 nt, Human
uaacauuucuaacucuga

SEQ ID NO: 3637765 - RNA, 22 nt, Human
uaacauuucuaacucugaugua

SEQ ID NO: 3637766 - RNA, 23 nt, Human
uaacauuucuaacucugauguaa

SEQ ID NO: 3637767 - RNA, 13 nt, Human
uaacauuugccuu

SEQ ID NO: 3637768 - RNA, 15 nt, Human
uaacauuugccuugc

SEQ ID NO: 3637769 - RNA, 21 nt, Human
uaacauuugccuugcagaacu

SEQ ID NO: 3637770 - RNA, 16 nt, Human
uaaccaaacaauuauu

SEQ ID NO: 3637771 - RNA, 20 nt, Human
uaaccaaggaaauauauuuu

SEQ ID NO: 3637772 - RNA, 21 nt, Human
uaaccaagguagaaugaccuu

SEQ ID NO: 3637773 - RNA, 12 nt, Human
uaaccaaguucc

SEQ ID NO: 3637774 - RNA, 17 nt, Human
uaaccaauguuuaaaaa

SEQ ID NO: 3637775 - RNA, 19 nt, Human
uaaccacagcuccuuuucc

SEQ ID NO: 3637776 - RNA, 22 nt, Human
uaaccacaucaauauugucauu

SEQ ID NO: 3637777 - RNA, 24 nt, Human
uaaccacaucaauauugucauucc

SEQ ID NO: 3637778 - RNA, 15 nt, Human
uaaccacugaaggga

SEQ ID NO: 3637779 - RNA, 20 nt, Human
uaaccacugcaaguccuuuu

SEQ ID NO: 3637780 - RNA, 19 nt, Human
uaaccacuuaaaaaauguc

SEQ ID NO: 3637781 - RNA, 16 nt, Human
uaaccacuucagcuga

SEQ ID NO: 3637782 - RNA, 22 nt, Human
uaaccagacacauacucauuuu

SEQ ID NO: 3637783 - RNA, 22 nt, Human
uaaccagaucuagucaaucaag

SEQ ID NO: 3637784 - RNA, 14 nt, Human
uaaccagcagaaau

SEQ ID NO: 3637785 - RNA, 19 nt, Human
uaaccaggccauuuuuggu

SEQ ID NO: 3637786 - RNA, 23 nt, Human
uaaccagucugaaguuucauuua

SEQ ID NO: 3637787 - RNA, 19 nt, Human
uaaccauugucuuguucug

SEQ ID NO: 3637788 - RNA, 14 nt, Human
uaaccauuugcacu

SEQ ID NO: 3637789 - RNA, 18 nt, Human
uaaccauuuuauaaagug

SEQ ID NO: 3637790 - RNA, 20 nt, Human
uaaccauuuuauaaagugcu

SEQ ID NO: 3637791 - RNA, 18 nt, Human
uaacccaaggagcacagg

SEQ ID NO: 3637792 - RNA, 17 nt, Human
uaacccacugagaggac

SEQ ID NO: 3637793 - RNA, 14 nt, Human
uaacccacuuguca

SEQ ID NO: 3637794 - RNA, 19 nt, Human
uaaccccagcucccuagga

SEQ ID NO: 3637795 - RNA, 12 nt, Human
uaaccccaggcc

SEQ ID NO: 3637796 - RNA, 14 nt, Human
uaaccccaggcccc

SEQ ID NO: 3637797 - RNA, 14 nt, Human
uaaccccauucuuu

SEQ ID NO: 3637798 - RNA, 16 nt, Human
uaaccccgucaacaaa

SEQ ID NO: 3637799 - RNA, 18 nt, Human
uaacccucccauggcacc

SEQ ID NO: 3637800 - RNA, 20 nt, Human
uaacccuggugguugcuguu

SEQ ID NO: 3637801 - RNA, 17 nt, Human
uaacccuuaucaccagc

SEQ ID NO: 3637802 - RNA, 19 nt, Human
uaacccuucaucuuccugu

SEQ ID NO: 3637803 - RNA, 21 nt, Human
uaacccuuugugugcucucca

SEQ ID NO: 3637804 - RNA, 22 nt, Human
uaaccuaaucaccauguaagca

SEQ ID NO: 3637805 - RNA, 19 nt, Human
uaaccuaguuaaagaaagg

SEQ ID NO: 3637806 - RNA, 22 nt, Human
uaaccuaguuaaagaaaggaaa

SEQ ID NO: 3637807 - RNA, 20 nt, Human
uaaccuauaugauuuauagu

SEQ ID NO: 3637808 - RNA, 20 nt, Human
uaaccuaugauauuuucugu

SEQ ID NO: 3637809 - RNA, 22 nt, Human
uaaccuauuuugaaaaauuccu

SEQ ID NO: 3637810 - RNA, 22 nt, Human
uaaccucaagugauccucccac

SEQ ID NO: 3637811 - RNA, 14 nt, Human
uaaccucagcucug

SEQ ID NO: 3637812 - RNA, 20 nt, Human
uaaccucagugucauuuaug

SEQ ID NO: 3637813 - RNA, 15 nt, Human
uaaccucgcccucuc

SEQ ID NO: 3637814 - RNA, 17 nt, Human
uaaccucgcccucuccu

SEQ ID NO: 3637815 - RNA, 15 nt, Human
uaaccucugcuuuua

SEQ ID NO: 3637816 - RNA, 19 nt, Human
uacacgaauagacaucaaa

SEQ ID NO: 3637817 - RNA, 13 nt, Human
uacacggaaaacg

SEQ ID NO: 3637818 - RNA, 22 nt, Human
uacacgguucaaaccugugaag

SEQ ID NO: 3637819 - RNA, 19 nt, Human
uacacguuagauuugccgu

SEQ ID NO: 3637820 - RNA, 18 nt, Human
uacacuaagagagaauga

SEQ ID NO: 3637821 - RNA, 19 nt, Human
uacacuaagagagaaugag

SEQ ID NO: 3637822 - RNA, 16 nt, Human
uacacucaggcuuuca

SEQ ID NO: 3637823 - RNA, 15 nt, Human
uacacuccagccuga

SEQ ID NO: 3637824 - RNA, 16 nt, Human
uacacuccagccugag

SEQ ID NO: 3637825 - RNA, 13 nt, Human
uacacucugcugu

SEQ ID NO: 3637826 - RNA, 14 nt, Human
uacacucugcuguu

SEQ ID NO: 3637827 - RNA, 16 nt, Human
uacacucuuuguaaga

SEQ ID NO: 3637828 - RNA, 16 nt, Human
uacacugaggagagau

SEQ ID NO: 3637829 - RNA, 19 nt, Human
uacacugcaaucauaugug

SEQ ID NO: 3637830 - RNA, 16 nt, Human
uacacugccuguauac

SEQ ID NO: 3637831 - RNA, 21 nt, Human
uacacuggaggagagaagaau

SEQ ID NO: 3637832 - RNA, 22 nt, Human
uacacuggaggagagaagaaug

SEQ ID NO: 3637833 - RNA, 20 nt, Human
uacacuggcaaugguaguuu

SEQ ID NO: 3637834 - RNA, 23 nt, Human
uacacuggcaaugguaguuucug

SEQ ID NO: 3637835 - RNA, 16 nt, Human
uacacugugcugaguc

SEQ ID NO: 3637836 - RNA, 21 nt, Human
uacacugugcugagucugaag

SEQ ID NO: 3637837 - RNA, 22 nt, Human
uacacugugcugagucugaagg

SEQ ID NO: 3637838 - RNA, 23 nt, Human
uacacugugcugagucugaaggc

SEQ ID NO: 3637839 - RNA, 17 nt, Human
uacacuguuagaacacu

SEQ ID NO: 3637840 - RNA, 19 nt, Human
uacacuuacuguuguccua

SEQ ID NO: 3637841 - RNA, 21 nt, Human
uacacuuacuguuguccuaug

SEQ ID NO: 3637842 - RNA, 16 nt, Human
uacacuucaguuaucu

SEQ ID NO: 3637843 - RNA, 18 nt, Human
uacacuugagaugauuuc

SEQ ID NO: 3637844 - RNA, 21 nt, Human
uacacuuggggagauuugcca

SEQ ID NO: 3637845 - RNA, 20 nt, Human
uacacuuguauaaauguaua

SEQ ID NO: 3637846 - RNA, 21 nt, Human
uacacuuuaugccggaugugc

SEQ ID NO: 3637847 - RNA, 22 nt, Human
uacacuuuaugccggaugugcu

SEQ ID NO: 3637848 - RNA, 14 nt, Human
uacacuuuguugca

SEQ ID NO: 3637849 - RNA, 15 nt, Human
uacacuuuguugcaa

SEQ ID NO: 3637850 - RNA, 15 nt, Human
uacacuuuuaugagc

SEQ ID NO: 3637851 - RNA, 18 nt, Human
uacacuuuuaugagcuuc

SEQ ID NO: 3637852 - RNA, 19 nt, Human
uacagaaaaacaaugguaa

SEQ ID NO: 3637853 - RNA, 20 nt, Human
uacagaaaguggugcucagu

SEQ ID NO: 3637854 - RNA, 14 nt, Human
uacagaaauacuau

SEQ ID NO: 3637855 - RNA, 19 nt, Human
uacagaacacgcuuucaca

SEQ ID NO: 3637856 - RNA, 15 nt, Human
uacagaacuucagaa

SEQ ID NO: 3637857 - RNA, 18 nt, Human
uacagaacuucagaaaga

SEQ ID NO: 3637858 - RNA, 14 nt, Human
uacagaagaaacug

SEQ ID NO: 3637859 - RNA, 13 nt, Human
uacagaauacuag

SEQ ID NO: 3637860 - RNA, 13 nt, Human
uacagaauauuuc

SEQ ID NO: 3637861 - RNA, 16 nt, Human
uacagaaucauugcuu

SEQ ID NO: 3637862 - RNA, 15 nt, Human
uacagaauuacugua

SEQ ID NO: 3637863 - RNA, 23 nt, Human
uacagaauuacuguaacugauua

SEQ ID NO: 3637864 - RNA, 20 nt, Human
uacagaauugugucugcagg

SEQ ID NO: 3637865 - RNA, 17 nt, Human
uacagaauuugaauuau

SEQ ID NO: 3637866 - RNA, 14 nt, Human
uacagacaaagcgu

SEQ ID NO: 3637867 - RNA, 11 nt, Human
uacagacacua

SEQ ID NO: 3637868 - RNA, 22 nt, Human
uacagacagagaauaugucugc

SEQ ID NO: 3637869 - RNA, 13 nt, Human
uacagacauauuu

SEQ ID NO: 3637870 - RNA, 14 nt, Human
uacagacauauuua

SEQ ID NO: 3637871 - RNA, 20 nt, Human
uacagaccgaacuguuguau

SEQ ID NO: 3637872 - RNA, 23 nt, Human
uacagaccgaacuguuguauaaa

SEQ ID NO: 3637873 - RNA, 14 nt, Human
uacagaccugcuuu

SEQ ID NO: 3637874 - RNA, 22 nt, Human
uacagaccugcuuuuugaaaug

SEQ ID NO: 3637875 - RNA, 13 nt, Human
uacagacguaugc

SEQ ID NO: 3637876 - RNA, 21 nt, Human
uacagagaagccagcuuguuu

SEQ ID NO: 3637877 - RNA, 14 nt, Human
uacagagaagccau

SEQ ID NO: 3637878 - RNA, 15 nt, Human
uacagagaagccauc

SEQ ID NO: 3637879 - RNA, 16 nt, Human
uacagagaagccauca

SEQ ID NO: 3637880 - RNA, 22 nt, Human
uacagagaagccaucaccucag

SEQ ID NO: 3637881 - RNA, 18 nt, Human
uacagagaagccuucaag

SEQ ID NO: 3637882 - RNA, 19 nt, Human
uacagagaagccuucaagc

SEQ ID NO: 3637883 - RNA, 17 nt, Human
uacagagaggagaaaca

SEQ ID NO: 3637884 - RNA, 22 nt, Human
uacagagaggucaagcccagga

SEQ ID NO: 3637885 - RNA, 15 nt, Human
uacagagaugucucu

SEQ ID NO: 3637886 - RNA, 23 nt, Human
uacagagcagacaguuaagagaa

SEQ ID NO: 3637887 - RNA, 20 nt, Human
uacagagccguaaaaacuga

SEQ ID NO: 3637888 - RNA, 17 nt, Human
uacagaggaaaucugua

SEQ ID NO: 3637889 - RNA, 18 nt, Human
uacagaggaaaucuguaa

SEQ ID NO: 3637890 - RNA, 16 nt, Human
uacagauaaaugauuc

SEQ ID NO: 3637891 - RNA, 13 nt, Human
uacagauaacauu

SEQ ID NO: 3637892 - RNA, 13 nt, Human
uacagauaggccu

SEQ ID NO: 3637893 - RNA, 17 nt, Human
uacagauaggccuucuu

SEQ ID NO: 3637894 - RNA, 13 nt, Human
uacagauauauuu

SEQ ID NO: 3637895 - RNA, 20 nt, Human
uacagauccccaagccuggc

SEQ ID NO: 3637896 - RNA, 13 nt, Human
uacagaugaaaau

SEQ ID NO: 3637897 - RNA, 14 nt, Human
uacagaugccuuuu

SEQ ID NO: 3637898 - RNA, 20 nt, Human
uacagauuuauuccuuuguu

SEQ ID NO: 3637899 - RNA, 16 nt, Human
uacagauuuugauagc

SEQ ID NO: 3637900 - RNA, 17 nt, Human
uacagauuuugauagca

SEQ ID NO: 3637901 - RNA, 18 nt, Human
uacagauuuugauagcaa

SEQ ID NO: 3637902 - RNA, 14 nt, Human
uacagcaaauccuu

SEQ ID NO: 3637903 - RNA, 20 nt, Human
uacagcaaauccuuugugaa

SEQ ID NO: 3637904 - RNA, 16 nt, Human
uacagcaaauuuauaa

SEQ ID NO: 3637905 - RNA, 19 nt, Human
uacagcaacaauuuaugaa

SEQ ID NO: 3637906 - RNA, 14 nt, Human
uacagcacuacucu

SEQ ID NO: 3637907 - RNA, 17 nt, Human
uacagcacuacucugug

SEQ ID NO: 3637908 - RNA, 17 nt, Human
uacagcacuacugggug

SEQ ID NO: 3637909 - RNA, 15 nt, Human
uacagcagcaagaaa

SEQ ID NO: 3637910 - RNA, 23 nt, Human
uacagcagcaagaaaaaaaaaug

SEQ ID NO: 3637911 - RNA, 16 nt, Human
uacagcaguagacauu

SEQ ID NO: 3637912 - RNA, 17 nt, Human
uacagcaguagacauuu

SEQ ID NO: 3637913 - RNA, 19 nt, Human
uacagcaguagacauuuua

SEQ ID NO: 3637914 - RNA, 22 nt, Human
uacagccaaagauaaucucuca

SEQ ID NO: 3637915 - RNA, 21 nt, Human
uacagccaagugccaaaugcu

SEQ ID NO: 3637916 - RNA, 19 nt, Human
uacagccagaccagauuaa

SEQ ID NO: 3637917 - RNA, 17 nt, Human
uacagcccaccuggcuu

SEQ ID NO: 3637918 - RNA, 18 nt, Human
uacagcuaaucagcauuc

SEQ ID NO: 3637919 - RNA, 16 nt, Human
uacagcucauuaaacu

SEQ ID NO: 3637920 - RNA, 18 nt, Human
uacagcucauuaaacuuu

SEQ ID NO: 3637921 - RNA, 15 nt, Human
uacagcuccccaagu

SEQ ID NO: 3637922 - RNA, 18 nt, Human
uacagcucccccagcucc

SEQ ID NO: 3637923 - RNA, 20 nt, Human
uacagcucccccagcucccc

SEQ ID NO: 3637924 - RNA, 20 nt, Human
uacagcuccuuugaaaacuc

SEQ ID NO: 3637925 - RNA, 13 nt, Human
uacagcucugacu

SEQ ID NO: 3637926 - RNA, 19 nt, Human
uacagcugagcacauucug

SEQ ID NO: 3637927 - RNA, 15 nt, Human
uacagcuggggugca

SEQ ID NO: 3637928 - RNA, 20 nt, Human
uacagcuggguggcacugcc

SEQ ID NO: 3637929 - RNA, 24 nt, Human
uacagcuggguggcacugccaugc

SEQ ID NO: 3637930 - RNA, 17 nt, Human
uacagcuguguuauucu

SEQ ID NO: 3637931 - RNA, 22 nt, Human
uacagcuugaccgugaggccag

SEQ ID NO: 3637932 - RNA, 18 nt, Human
uacagcuuucaugauuag

SEQ ID NO: 3637933 - RNA, 21 nt, Human
uacagcuuucugaccuucagc

SEQ ID NO: 3637934 - RNA, 20 nt, Human
uacagcuuugugacuguaua

SEQ ID NO: 3637935 - RNA, 22 nt, Human
uacagcuuugugacuguauaua

SEQ ID NO: 3637936 - RNA, 19 nt, Human
uacaggaaaagcugcugac

SEQ ID NO: 3637937 - RNA, 21 nt, Human
uacaggaaacaguugcaugua

SEQ ID NO: 3637938 - RNA, 18 nt, Human
uacaggaagguagaaaua

SEQ ID NO: 3637939 - RNA, 20 nt, Human
uacaggaugaugacuaugga

SEQ ID NO: 3637940 - RNA, 14 nt, Human
uacaggcacaaaau

SEQ ID NO: 3637941 - RNA, 19 nt, Human
uacaggcaccgagaauguu

SEQ ID NO: 3637942 - RNA, 15 nt, Human
uacaggcccugcucc

SEQ ID NO: 3637943 - RNA, 15 nt, Human
uacaggccucacaca

SEQ ID NO: 3637944 - RNA, 17 nt, Human
uacaggcuccugccacc

SEQ ID NO: 3637945 - RNA, 23 nt, Human
uacaggcuccugccaccacgccc

SEQ ID NO: 3637946 - RNA, 12 nt, Human
uacaggcuggcg

SEQ ID NO: 3637947 - RNA, 20 nt, Human
uacagggcacaggccaugga

SEQ ID NO: 3637948 - RNA, 21 nt, Human
uacagggcaugcauuuugcag

SEQ ID NO: 3637949 - RNA, 14 nt, Human
uacaggggaauauu

SEQ ID NO: 3637950 - RNA, 16 nt, Human
uacaggggaauauuuu

SEQ ID NO: 3637951 - RNA, 19 nt, Human
uacaggggaauauuuuauu

SEQ ID NO: 3637952 - RNA, 22 nt, Human
uacaggggaauauuuuauucaa

SEQ ID NO: 3637953 - RNA, 16 nt, Human
uacagggggucuggcu

SEQ ID NO: 3637954 - RNA, 21 nt, Human
uacagggggucuggcuggugu

SEQ ID NO: 3637955 - RNA, 17 nt, Human
uacagggguucuggaaa

SEQ ID NO: 3637956 - RNA, 20 nt, Human
uacaggguaacugugcugaa

SEQ ID NO: 3637957 - RNA, 19 nt, Human
uacaggguagauaaccugu

SEQ ID NO: 3637958 - RNA, 13 nt, Human
uacaggguuuuua

SEQ ID NO: 3637959 - RNA, 14 nt, Human
uacagguacuuugu

SEQ ID NO: 3637960 - RNA, 23 nt, Human
uaccagugcaggcuggccagccg

SEQ ID NO: 3637961 - RNA, 18 nt, Human
uaccaguuaauuuuucca

SEQ ID NO: 3637962 - RNA, 13 nt, Human
uaccauacauuua

SEQ ID NO: 3637963 - RNA, 19 nt, Human
uaccauagcgcugcucuua

SEQ ID NO: 3637964 - RNA, 13 nt, Human
uaccaucucccuc

SEQ ID NO: 3637965 - RNA, 14 nt, Human
uaccaugaacagaa

SEQ ID NO: 3637966 - RNA, 14 nt, Human
uaccaugucacugu

SEQ ID NO: 3637967 - RNA, 15 nt, Human
uaccaugucacugug

SEQ ID NO: 3637968 - RNA, 19 nt, Human
uaccauuaaaacugcuuuu

SEQ ID NO: 3637969 - RNA, 14 nt, Human
uaccauuaaaauau

SEQ ID NO: 3637970 - RNA, 15 nt, Human
uaccauuaaaauaug

SEQ ID NO: 3637971 - RNA, 17 nt, Human
uaccauuaaaauaugca

SEQ ID NO: 3637972 - RNA, 15 nt, Human
uaccauuaaaccauc

SEQ ID NO: 3637973 - RNA, 22 nt, Human
uaccauuaaaccaucucccugg

SEQ ID NO: 3637974 - RNA, 21 nt, Human
uaccauucacaauaaaagcuu

SEQ ID NO: 3637975 - RNA, 18 nt, Human
uaccauuuaguaagaaua

SEQ ID NO: 3637976 - RNA, 17 nt, Human
uaccauuuauacaaauu

SEQ ID NO: 3637977 - RNA, 13 nt, Human
uaccauuuguaau

SEQ ID NO: 3637978 - RNA, 17 nt, Human
uacccaaaacaagccug

SEQ ID NO: 3637979 - RNA, 15 nt, Human
uacccaaacugcuuu

SEQ ID NO: 3637980 - RNA, 18 nt, Human
uacccaagggcagaaagu

SEQ ID NO: 3637981 - RNA, 17 nt, Human
uacccacaccucugcca

SEQ ID NO: 3637982 - RNA, 23 nt, Human
uacccacccccacccaagggccu

SEQ ID NO: 3637983 - RNA, 23 nt, Human
uacccaccugagcuuuggacgca

SEQ ID NO: 3637984 - RNA, 14 nt, Human
uacccacugcucug

SEQ ID NO: 3637985 - RNA, 14 nt, Human
uacccagaaaguua

SEQ ID NO: 3637986 - RNA, 18 nt, Human
uacccagccaucugccca

SEQ ID NO: 3637987 - RNA, 23 nt, Human
uacccagccaucugcccaggggu

SEQ ID NO: 3637988 - RNA, 16 nt, Human
uacccaggaccaagcc

SEQ ID NO: 3637989 - RNA, 20 nt, Human
uacccaggguggagugcagu

SEQ ID NO: 3637990 - RNA, 17 nt, Human
uacccauagacaugaaa

SEQ ID NO: 3637991 - RNA, 14 nt, Human
uacccauauuacag

SEQ ID NO: 3637992 - RNA, 17 nt, Human
uacccauccccgcagug

SEQ ID NO: 3637993 - RNA, 20 nt, Human
uacccaucuaguacuugaaa

SEQ ID NO: 3637994 - RNA, 19 nt, Human
uacccaucuuaaaaacaac

SEQ ID NO: 3637995 - RNA, 14 nt, Human
uacccauuuguuca

SEQ ID NO: 3637996 - RNA, 18 nt, Human
uaccccaauuucggauuu

SEQ ID NO: 3637997 - RNA, 13 nt, Human
uaccccacccuca

SEQ ID NO: 3637998 - RNA, 15 nt, Human
uaccccacccucagc

SEQ ID NO: 3637999 - RNA, 15 nt, Human
uaccccaucauucau

SEQ ID NO: 3638000 - RNA, 21 nt, Human
uacccccagguggaaggcaga

SEQ ID NO: 3638001 - RNA, 22 nt, Human
uacccccgcccaggcuggccag

SEQ ID NO: 3638002 - RNA, 18 nt, Human
uacccccuccuucagaca

SEQ ID NO: 3638003 - RNA, 17 nt, Human
uaccccgcagacaccuu

SEQ ID NO: 3638004 - RNA, 13 nt, Human
uaccccucccagc

SEQ ID NO: 3638005 - RNA, 14 nt, Human
uaccccucccagcu

SEQ ID NO: 3638006 - RNA, 16 nt, Human
uaccccucccagcuga

SEQ ID NO: 3638007 - RNA, 21 nt, Human
uaccccugccuuugggagcag

SEQ ID NO: 3638008 - RNA, 12 nt, Human
uaccccuggcug

SEQ ID NO: 3638009 - RNA, 18 nt, Human
uaccccuggcuguacugc

SEQ ID NO: 3638010 - RNA, 13 nt, Human
uacccgggaaggg

SEQ ID NO: 3638011 - RNA, 15 nt, Human
uacccgggcagggcu

SEQ ID NO: 3638012 - RNA, 13 nt, Human
uacccguuccaaa

SEQ ID NO: 3638013 - RNA, 14 nt, Human
uacccuaaccaagu

SEQ ID NO: 3638014 - RNA, 17 nt, Human
uacccuaaugucuucau

SEQ ID NO: 3638015 - RNA, 23 nt, Human
uacccuauaucuauaaacacugu

SEQ ID NO: 3638016 - RNA, 16 nt, Human
uacccucauguucuua

SEQ ID NO: 3638017 - RNA, 13 nt, Human
uacccucccaccc

SEQ ID NO: 3638018 - RNA, 11 nt, Human
uacccuccccc

SEQ ID NO: 3638019 - RNA, 11 nt, Human
uacccucccug

SEQ ID NO: 3638020 - RNA, 15 nt, Human
uacccucccugcugu

SEQ ID NO: 3638021 - RNA, 17 nt, Human
uacccucccugcugucc

SEQ ID NO: 3638022 - RNA, 12 nt, Human
uacccuccuggc

SEQ ID NO: 3638023 - RNA, 18 nt, Human
uacccuccuuuuuuuccc

SEQ ID NO: 3638024 - RNA, 15 nt, Human
uacccucgggcccac

SEQ ID NO: 3638025 - RNA, 17 nt, Human
uacccucgggcccaccu

SEQ ID NO: 3638026 - RNA, 18 nt, Human
uacccucgggcccaccug

SEQ ID NO: 3638027 - RNA, 22 nt, Human
uacccucgggcccaccuggcca

SEQ ID NO: 3638028 - RNA, 16 nt, Human
uacccucucagcucca

SEQ ID NO: 3638029 - RNA, 15 nt, Human
uacccucuuugcugc

SEQ ID NO: 3638030 - RNA, 16 nt, Human
uacccucuuugcugca

SEQ ID NO: 3638031 - RNA, 17 nt, Human
uacccugaguucaucca

SEQ ID NO: 3638032 - RNA, 23 nt, Human
uacccugcgcccaguccuuccac

SEQ ID NO: 3638033 - RNA, 20 nt, Human
uacccuggcacuauaaugua

SEQ ID NO: 3638034 - RNA, 22 nt, Human
uacccuggcacuauaauguaag

SEQ ID NO: 3638035 - RNA, 12 nt, Human
uacccuggcccc

SEQ ID NO: 3638036 - RNA, 16 nt, Human
uacccuggccccucuc

SEQ ID NO: 3638037 - RNA, 18 nt, Human
uacccugggaaggccucu

SEQ ID NO: 3638038 - RNA, 11 nt, Human
uacccugggug

SEQ ID NO: 3638039 - RNA, 17 nt, Human
uacccuguacauaugua

SEQ ID NO: 3638040 - RNA, 18 nt, Human
uacccuucugugcccagc

SEQ ID NO: 3638041 - RNA, 21 nt, Human
uacccuucuuuccauuucucu

SEQ ID NO: 3638042 - RNA, 14 nt, Human
uacccuucuuuuau

SEQ ID NO: 3638043 - RNA, 20 nt, Human
uacccuucuuuuaugagcag

SEQ ID NO: 3638044 - RNA, 13 nt, Human
uacccuuggaaau

SEQ ID NO: 3638045 - RNA, 20 nt, Human
uacccuuuagacuguagccu

SEQ ID NO: 3638046 - RNA, 16 nt, Human
uacccuuuuccuuugu

SEQ ID NO: 3638047 - RNA, 21 nt, Human
uacccuuuuccuuugugguuu

SEQ ID NO: 3638048 - RNA, 22 nt, Human
uacccuuuucugaccaaagaga

SEQ ID NO: 3638049 - RNA, 16 nt, Human
uacccuuuuucuugaa

SEQ ID NO: 3638050 - RNA, 15 nt, Human
uaccgacaagcacag

SEQ ID NO: 3638051 - RNA, 18 nt, Human
uaccgagucucuucucca

SEQ ID NO: 3638052 - RNA, 20 nt, Human
uaccgaguucaagugauuuu

SEQ ID NO: 3638053 - RNA, 16 nt, Human
uaccgcguuguaaaau

SEQ ID NO: 3638054 - RNA, 21 nt, Human
uaccuaaaagagauuucaaga

SEQ ID NO: 3638055 - RNA, 19 nt, Human
uaccuaaacagauauaaau

SEQ ID NO: 3638056 - RNA, 22 nt, Human
uaccuaacgaaguauccuucag

SEQ ID NO: 3638057 - RNA, 15 nt, Human
uaccuaauuagagca

SEQ ID NO: 3638058 - RNA, 14 nt, Human
uaccuaccugugug

SEQ ID NO: 3638059 - RNA, 17 nt, Human
uaccuagcuaauuauuu

SEQ ID NO: 3638060 - RNA, 16 nt, Human
uaccuauaaugugugu

SEQ ID NO: 3638061 - RNA, 19 nt, Human
uaccuauaauguguguaug

SEQ ID NO: 3638062 - RNA, 23 nt, Human
uaccuauaauguguguaugugua

SEQ ID NO: 3638063 - RNA, 16 nt, Human
uaccuaucaucuuaag

SEQ ID NO: 3638064 - RNA, 20 nt, Human
uaccuauuuucauuguaaaa

SEQ ID NO: 3638065 - RNA, 15 nt, Human
uaccucaaacuaucu

SEQ ID NO: 3638066 - RNA, 19 nt, Human
uaccucaacaagaagaauu

SEQ ID NO: 3638067 - RNA, 13 nt, Human
uaccucaauguuu

SEQ ID NO: 3638068 - RNA, 15 nt, Human
uaccucaauguuuga

SEQ ID NO: 3638069 - RNA, 16 nt, Human
uaccucaauguuugag

SEQ ID NO: 3638070 - RNA, 15 nt, Human
uaccucacugggguc

SEQ ID NO: 3638071 - RNA, 11 nt, Human
uaccucagccu

SEQ ID NO: 3638072 - RNA, 12 nt, Human
uaccucagccua

SEQ ID NO: 3638073 - RNA, 14 nt, Human
uaccucagccuaga

SEQ ID NO: 3638074 - RNA, 16 nt, Human
uaccucagccuagacc

SEQ ID NO: 3638075 - RNA, 13 nt, Human
uaccucagccugg

SEQ ID NO: 3638076 - RNA, 17 nt, Human
uaccucaggcagcucaa

SEQ ID NO: 3638077 - RNA, 18 nt, Human
uaccucaggcagcucaag

SEQ ID NO: 3638078 - RNA, 14 nt, Human
uaccucaggcagga

SEQ ID NO: 3638079 - RNA, 15 nt, Human
uaccucaggcaggaa

SEQ ID NO: 3638080 - RNA, 14 nt, Human
uaccucauguuuau

SEQ ID NO: 3638081 - RNA, 19 nt, Human
uaccucauguuuaugaaaa

SEQ ID NO: 3638082 - RNA, 20 nt, Human
uaccuccaacagaacuaaau

SEQ ID NO: 3638083 - RNA, 15 nt, Human
uaccuccaacccugc

SEQ ID NO: 3638084 - RNA, 14 nt, Human
uaccucccacacuc

SEQ ID NO: 3638085 - RNA, 13 nt, Human
uaccuccccugcc

SEQ ID NO: 3638086 - RNA, 14 nt, Human
uaccuccccugccu

SEQ ID NO: 3638087 - RNA, 15 nt, Human
uaccuccccugccuu

SEQ ID NO: 3638088 - RNA, 13 nt, Human
uaccuccugagaa

SEQ ID NO: 3638089 - RNA, 11 nt, Human
uaccuccugcc

SEQ ID NO: 3638090 - RNA, 14 nt, Human
uaccuccugucucu

SEQ ID NO: 3638091 - RNA, 17 nt, Human
uaccucuaauaguauaa

SEQ ID NO: 3638092 - RNA, 16 nt, Human
uaccucuauauaccaa

SEQ ID NO: 3638093 - RNA, 14 nt, Human
uaccucugauaccu

SEQ ID NO: 3638094 - RNA, 18 nt, Human
uaccucugcauaaauauu

SEQ ID NO: 3638095 - RNA, 21 nt, Human
uaccucuggcugacuaaauuu

SEQ ID NO: 3638096 - RNA, 12 nt, Human
uaccucugugug

SEQ ID NO: 3638097 - RNA, 14 nt, Human
uaccucuuagcuga

SEQ ID NO: 3638098 - RNA, 16 nt, Human
uaccucuuagcugagu

SEQ ID NO: 3638099 - RNA, 19 nt, Human
uaccucuuuauuuuuugau

SEQ ID NO: 3638100 - RNA, 16 nt, Human
uaccucuuugaaagaa

SEQ ID NO: 3638101 - RNA, 21 nt, Human
uaccugaagggguuuucuuga

SEQ ID NO: 3638102 - RNA, 13 nt, Human
uaccugaagucuu

SEQ ID NO: 3638103 - RNA, 14 nt, Human
uaccugaagucuuu

SEQ ID NO: 3638104 - RNA, 16 nt, Human
uaccugaaugcucugu

SEQ ID NO: 3638105 - RNA, 13 nt, Human
uaccugacacaag

SEQ ID NO: 3638106 - RNA, 20 nt, Human
uaccugacacucccuugggc

SEQ ID NO: 3638107 - RNA, 19 nt, Human
uacugcacuccagccuggg

SEQ ID NO: 3638108 - RNA, 21 nt, Human
uacugcagcaccuccaggccu

SEQ ID NO: 3638109 - RNA, 22 nt, Human
uacugcagcuuuacaugcaauu

SEQ ID NO: 3638110 - RNA, 10 nt, Human
uacugcaggg

SEQ ID NO: 3638111 - RNA, 19 nt, Human
uacugcagggccaggacug

SEQ ID NO: 3638112 - RNA, 13 nt, Human
uacugcauacuuu

SEQ ID NO: 3638113 - RNA, 21 nt, Human
uacugcauacuuuuuaaaugu

SEQ ID NO: 3638114 - RNA, 19 nt, Human
uacugccaaccucgcucca

SEQ ID NO: 3638115 - RNA, 14 nt, Human
uacugccacucuuu

SEQ ID NO: 3638116 - RNA, 16 nt, Human
uacugccagaugcuga

SEQ ID NO: 3638117 - RNA, 18 nt, Human
uacugccagaugcugaug

SEQ ID NO: 3638118 - RNA, 18 nt, Human
uacugccauccuggccca

SEQ ID NO: 3638119 - RNA, 19 nt, Human
uacugccauccuggcccag

SEQ ID NO: 3638120 - RNA, 19 nt, Human
uacugccauguacuaguuu

SEQ ID NO: 3638121 - RNA, 21 nt, Human
uacugccauguacuaguuuua

SEQ ID NO: 3638122 - RNA, 21 nt, Human
uacugcccaggccugccuguu

SEQ ID NO: 3638123 - RNA, 21 nt, Human
uacugccuauuuuaauaaaca

SEQ ID NO: 3638124 - RNA, 14 nt, Human
uacugccuccccca

SEQ ID NO: 3638125 - RNA, 12 nt, Human
uacugccuuaau

SEQ ID NO: 3638126 - RNA, 22 nt, Human
uacugccuuaauaaaaaaugaa

SEQ ID NO: 3638127 - RNA, 12 nt, Human
uacugcgacuuu

SEQ ID NO: 3638128 - RNA, 18 nt, Human
uacugcgacuuucugccu

SEQ ID NO: 3638129 - RNA, 21 nt, Human
uacugcgacuuucugccugga

SEQ ID NO: 3638130 - RNA, 20 nt, Human
uacugcuaaguauuucccag

SEQ ID NO: 3638131 - RNA, 21 nt, Human
uacugcuaaguauuucccagc

SEQ ID NO: 3638132 - RNA, 14 nt, Human
uacugcucaggcug

SEQ ID NO: 3638133 - RNA, 22 nt, Human
uacugcucaggcugcagcugga

SEQ ID NO: 3638134 - RNA, 21 nt, Human
uacugcugagauacauacaga

SEQ ID NO: 3638135 - RNA, 17 nt, Human
uacuggaaguuuugcau

SEQ ID NO: 3638136 - RNA, 18 nt, Human
uacuggaaguuuugcauu

SEQ ID NO: 3638137 - RNA, 14 nt, Human
uacuggauaaauug

SEQ ID NO: 3638138 - RNA, 15 nt, Human
uacuggaucucuuaa

SEQ ID NO: 3638139 - RNA, 18 nt, Human
uacuggcaaaaggaucuu

SEQ ID NO: 3638140 - RNA, 14 nt, Human
uacuggccucgccu

SEQ ID NO: 3638141 - RNA, 19 nt, Human
uacuggccucgccuggccu

SEQ ID NO: 3638142 - RNA, 21 nt, Human
uacuggccucgccuggccuga

SEQ ID NO: 3638143 - RNA, 14 nt, Human
uacuggcuggugau

SEQ ID NO: 3638144 - RNA, 18 nt, Human
uacuggcuuaccuccuca

SEQ ID NO: 3638145 - RNA, 23 nt, Human
uacugggaaagggauuuucagcc

SEQ ID NO: 3638146 - RNA, 23 nt, Human
uacugggcccugagucugggcag

SEQ ID NO: 3638147 - RNA, 12 nt, Human
uacugggccuua

SEQ ID NO: 3638148 - RNA, 16 nt, Human
uacuggggaaacuggc

SEQ ID NO: 3638149 - RNA, 21 nt, Human
uacuggggaaacuggccaugg

SEQ ID NO: 3638150 - RNA, 21 nt, Human
uacuggggcuggggaaggaag

SEQ ID NO: 3638151 - RNA, 15 nt, Human
uacugggugucauuu

SEQ ID NO: 3638152 - RNA, 17 nt, Human
uacugggugucauuuca

SEQ ID NO: 3638153 - RNA, 20 nt, Human
uacugggugucauuucauuc

SEQ ID NO: 3638154 - RNA, 13 nt, Human
uacugguaagauu

SEQ ID NO: 3638155 - RNA, 21 nt, Human
uacugguaagauuguuauuaa

SEQ ID NO: 3638156 - RNA, 23 nt, Human
uacugguccaaaagauugcugaa

SEQ ID NO: 3638157 - RNA, 12 nt, Human
uacuggucucuc

SEQ ID NO: 3638158 - RNA, 19 nt, Human
uacuggugcagucauuaug

SEQ ID NO: 3638159 - RNA, 14 nt, Human
uacugguugcaugg

SEQ ID NO: 3638160 - RNA, 20 nt, Human
uacugguugcauggaaauca

SEQ ID NO: 3638161 - RNA, 17 nt, Human
uacuguaaagaaagaga

SEQ ID NO: 3638162 - RNA, 18 nt, Human
uacuguaaagaaagagag

SEQ ID NO: 3638163 - RNA, 21 nt, Human
uacuguaaagaaagagagaaa

SEQ ID NO: 3638164 - RNA, 14 nt, Human
uacuguaaagaauu

SEQ ID NO: 3638165 - RNA, 20 nt, Human
uacuguaaagagaccuaccu

SEQ ID NO: 3638166 - RNA, 12 nt, Human
uacuguaagaau

SEQ ID NO: 3638167 - RNA, 19 nt, Human
uacuguaaggcaaucaugg

SEQ ID NO: 3638168 - RNA, 18 nt, Human
uacuguaauaauaccuca

SEQ ID NO: 3638169 - RNA, 23 nt, Human
uacuguaauaauaccucaauguu

SEQ ID NO: 3638170 - RNA, 13 nt, Human
uacuguaauuccu

SEQ ID NO: 3638171 - RNA, 15 nt, Human
uacuguaauuccuca

SEQ ID NO: 3638172 - RNA, 16 nt, Human
uacuguaauuugugau

SEQ ID NO: 3638173 - RNA, 18 nt, Human
uacuguaauuugugauac

SEQ ID NO: 3638174 - RNA, 20 nt, Human
uacuguaauuugugauacaa

SEQ ID NO: 3638175 - RNA, 14 nt, Human
uacuguaauuuuau

SEQ ID NO: 3638176 - RNA, 12 nt, Human
uacuguacaaua

SEQ ID NO: 3638177 - RNA, 15 nt, Human
uacuguacaauaaaa

SEQ ID NO: 3638178 - RNA, 19 nt, Human
uacuguacauaaacaauga

SEQ ID NO: 3638179 - RNA, 15 nt, Human
uacuguacuaauucu

SEQ ID NO: 3638180 - RNA, 14 nt, Human
uacuguaguauucu

SEQ ID NO: 3638181 - RNA, 22 nt, Human
uacuguauagacaguuuguaaa

SEQ ID NO: 3638182 - RNA, 21 nt, Human
uacuguaucaugacaaagacu

SEQ ID NO: 3638183 - RNA, 11 nt, Human
uacuguaugau

SEQ ID NO: 3638184 - RNA, 14 nt, Human
uacuguaugaucaa

SEQ ID NO: 3638185 - RNA, 18 nt, Human
uacuguaugguuuuguuu

SEQ ID NO: 3638186 - RNA, 14 nt, Human
uacuguaugugaug

SEQ ID NO: 3638187 - RNA, 17 nt, Human
uacuguauuuuguauug

SEQ ID NO: 3638188 - RNA, 23 nt, Human
uacuguauuuuguauuguuucaa

SEQ ID NO: 3638189 - RNA, 22 nt, Human
uacuguauuuuuaccuuuuucc

SEQ ID NO: 3638190 - RNA, 14 nt, Human
uacugucaaaugau

SEQ ID NO: 3638191 - RNA, 16 nt, Human
uacugucaaaugaugu

SEQ ID NO: 3638192 - RNA, 15 nt, Human
uacugucaauaaaca

SEQ ID NO: 3638193 - RNA, 15 nt, Human
uacugucugauuggc

SEQ ID NO: 3638194 - RNA, 20 nt, Human
uacugucugguuuuaacaau

SEQ ID NO: 3638195 - RNA, 21 nt, Human
uacugucugguuuuaacaauu

SEQ ID NO: 3638196 - RNA, 15 nt, Human
uacugucuuaauuaa

SEQ ID NO: 3638197 - RNA, 13 nt, Human
uacugugacugau

SEQ ID NO: 3638198 - RNA, 16 nt, Human
uacuguggaaaaauau

SEQ ID NO: 3638199 - RNA, 16 nt, Human
uacuguggaggaagga

SEQ ID NO: 3638200 - RNA, 18 nt, Human
uacuguggaggaaggauu

SEQ ID NO: 3638201 - RNA, 22 nt, Human
uacuguggaggaaggauuguaa

SEQ ID NO: 3638202 - RNA, 23 nt, Human
uacuguggaggaaggauuguaaa

SEQ ID NO: 3638203 - RNA, 17 nt, Human
uacugugggcaauuuag

SEQ ID NO: 3638204 - RNA, 13 nt, Human
uacuguguaaacu

SEQ ID NO: 3638205 - RNA, 15 nt, Human
uacuguguaaacuca

SEQ ID NO: 3638206 - RNA, 13 nt, Human
uacuguguaauua

SEQ ID NO: 3638207 - RNA, 14 nt, Human
uacuguguaauuag

SEQ ID NO: 3638208 - RNA, 15 nt, Human
uacuguguacuguau

SEQ ID NO: 3638209 - RNA, 19 nt, Human
uacugugucucauggauuu

SEQ ID NO: 3638210 - RNA, 13 nt, Human
uacugugucuuug

SEQ ID NO: 3638211 - RNA, 17 nt, Human
uacuguguuaugcaaaa

SEQ ID NO: 3638212 - RNA, 22 nt, Human
uacuguguuaugcaaaagcaag

SEQ ID NO: 3638213 - RNA, 22 nt, Human
uacuguguuccuggcaauagug

SEQ ID NO: 3638214 - RNA, 18 nt, Human
uacuguguuuuauaaaau

SEQ ID NO: 3638215 - RNA, 18 nt, Human
uacuguuacugggcccug

SEQ ID NO: 3638216 - RNA, 16 nt, Human
uacuguuaucuaucug

SEQ ID NO: 3638217 - RNA, 13 nt, Human
uacuguuauucuu

SEQ ID NO: 3638218 - RNA, 14 nt, Human
uacuguuauucuuu

SEQ ID NO: 3638219 - RNA, 17 nt, Human
uacuguuauucuuugca

SEQ ID NO: 3638220 - RNA, 16 nt, Human
uacuguucagcuuuua

SEQ ID NO: 3638221 - RNA, 14 nt, Human
uacuguucuaaagc

SEQ ID NO: 3638222 - RNA, 18 nt, Human
uacuguucuaaagcucug

SEQ ID NO: 3638223 - RNA, 19 nt, Human
uacuguucuaaagcucuga

SEQ ID NO: 3638224 - RNA, 21 nt, Human
uacuguucuaaagcucugaca

SEQ ID NO: 3638225 - RNA, 17 nt, Human
uacuguucuucauuuua

SEQ ID NO: 3638226 - RNA, 17 nt, Human
uacuguucuugcugcua

SEQ ID NO: 3638227 - RNA, 20 nt, Human
uacuguucuugcugcuagaa

SEQ ID NO: 3638228 - RNA, 22 nt, Human
uacuguugauaauucuuauuuu

SEQ ID NO: 3638229 - RNA, 14 nt, Human
uacuguugcacgug

SEQ ID NO: 3638230 - RNA, 23 nt, Human
uacuguugcacguguguuuuucu

SEQ ID NO: 3638231 - RNA, 11 nt, Human
uacuguuggug

SEQ ID NO: 3638232 - RNA, 17 nt, Human
uacuguuguaagaauuc

SEQ ID NO: 3638233 - RNA, 22 nt, Human
uacuguuuauuacuuccaugaa

SEQ ID NO: 3638234 - RNA, 23 nt, Human
uacuguuuauuucuguuucucau

SEQ ID NO: 3638235 - RNA, 12 nt, Human
uacuguuugucu

SEQ ID NO: 3638236 - RNA, 21 nt, Human
uacuuaaaaaaaaaaaaaagc

SEQ ID NO: 3638237 - RNA, 12 nt, Human
uacuuaaagauu

SEQ ID NO: 3638238 - RNA, 19 nt, Human
uacuuaaagauuuaucaaa

SEQ ID NO: 3638239 - RNA, 17 nt, Human
uacuuaaaugaaagcau

SEQ ID NO: 3638240 - RNA, 18 nt, Human
uacuuaaaugaaagcaug

SEQ ID NO: 3638241 - RNA, 14 nt, Human
uacuuaaaugguaa

SEQ ID NO: 3638242 - RNA, 17 nt, Human
uacuuaaauguuaugua

SEQ ID NO: 3638243 - RNA, 13 nt, Human
uacuuaacuauuc

SEQ ID NO: 3638244 - RNA, 14 nt, Human
uacuuaagagaaau

SEQ ID NO: 3638245 - RNA, 17 nt, Human
uacuuaauaaauucaga

SEQ ID NO: 3638246 - RNA, 19 nt, Human
uacuuaauaaauucagaua

SEQ ID NO: 3638247 - RNA, 15 nt, Human
uacuuaauccaaugg

SEQ ID NO: 3638248 - RNA, 14 nt, Human
uacuuacauucucu

SEQ ID NO: 3638249 - RNA, 22 nt, Human
uacuuaccuaaacagauauaaa

SEQ ID NO: 3638250 - RNA, 18 nt, Human
uacuuagcaaaguuuuac

SEQ ID NO: 3638251 - RNA, 18 nt, Human
uacuuagcaauguuaucu

SEQ ID NO: 3638252 - RNA, 17 nt, Human
uagugcagcugaaauug

SEQ ID NO: 3638253 - RNA, 20 nt, Human
uagugcagcugauuuuaaca

SEQ ID NO: 3638254 - RNA, 22 nt, Human
uagugcagcugauuuuaacaau

SEQ ID NO: 3638255 - RNA, 22 nt, Human
uagugccacuuaauguauguua

SEQ ID NO: 3638256 - RNA, 16 nt, Human
uagugccuucuaaagg

SEQ ID NO: 3638257 - RNA, 17 nt, Human
uagugcggacaaguuuu

SEQ ID NO: 3638258 - RNA, 19 nt, Human
uagugcggacaaguuuuaa

SEQ ID NO: 3638259 - RNA, 15 nt, Human
uagugcuaacaugaa

SEQ ID NO: 3638260 - RNA, 17 nt, Human
uagugcuaagugugaac

SEQ ID NO: 3638261 - RNA, 18 nt, Human
uagugcuaagugugaacu

SEQ ID NO: 3638262 - RNA, 22 nt, Human
uagugcuccauaguuuggcauu

SEQ ID NO: 3638263 - RNA, 22 nt, Human
uagugcugaagcuuauuaaugc

SEQ ID NO: 3638264 - RNA, 13 nt, Human
uaguggaaaaaca

SEQ ID NO: 3638265 - RNA, 16 nt, Human
uaguggaaaauaggcu

SEQ ID NO: 3638266 - RNA, 20 nt, Human
uaguggacccugaaaugugu

SEQ ID NO: 3638267 - RNA, 21 nt, Human
uaguggacccugaaaugugug

SEQ ID NO: 3638268 - RNA, 15 nt, Human
uaguggauggaaggg

SEQ ID NO: 3638269 - RNA, 19 nt, Human
uaguggccagaccagagcu

SEQ ID NO: 3638270 - RNA, 18 nt, Human
uagugggcaccccacugc

SEQ ID NO: 3638271 - RNA, 21 nt, Human
uaguggggucucccucuccug

SEQ ID NO: 3638272 - RNA, 22 nt, Human
uaguggggucucccucuccugc

SEQ ID NO: 3638273 - RNA, 13 nt, Human
uaguggucuuugu

SEQ ID NO: 3638274 - RNA, 14 nt, Human
uaguggucuuugua

SEQ ID NO: 3638275 - RNA, 18 nt, Human
uaguggucuuuguaagag

SEQ ID NO: 3638276 - RNA, 23 nt, Human
uaguggucuuuguaagaguguag

SEQ ID NO: 3638277 - RNA, 17 nt, Human
uagugguggcucugaga

SEQ ID NO: 3638278 - RNA, 22 nt, Human
uagugguguuuuaaagagaaug

SEQ ID NO: 3638279 - RNA, 16 nt, Human
uaguguaaaaaugaga

SEQ ID NO: 3638280 - RNA, 18 nt, Human
uaguguaaaaaugagaac

SEQ ID NO: 3638281 - RNA, 13 nt, Human
uaguguaaaauaa

SEQ ID NO: 3638282 - RNA, 22 nt, Human
uaguguaaaauaagaaugauuu

SEQ ID NO: 3638283 - RNA, 18 nt, Human
uaguguaagcuagaagaa

SEQ ID NO: 3638284 - RNA, 18 nt, Human
uaguguacauuucuauaa

SEQ ID NO: 3638285 - RNA, 21 nt, Human
uaguguacauuucuauaaaua

SEQ ID NO: 3638286 - RNA, 21 nt, Human
uaguguaccuccucucagugu

SEQ ID NO: 3638287 - RNA, 23 nt, Human
uaguguaccuccucucaguguuu

SEQ ID NO: 3638288 - RNA, 21 nt, Human
uaguguagauuccauuuacug

SEQ ID NO: 3638289 - RNA, 14 nt, Human
uaguguaggcuuua

SEQ ID NO: 3638290 - RNA, 23 nt, Human
uaguguaggcuuuacuuagcuua

SEQ ID NO: 3638291 - RNA, 19 nt, Human
uaguguaguauucuucccu

SEQ ID NO: 3638292 - RNA, 14 nt, Human
uaguguaucaaaau

SEQ ID NO: 3638293 - RNA, 14 nt, Human
uaguguccuaugca

SEQ ID NO: 3638294 - RNA, 11 nt, Human
uagugugaaau

SEQ ID NO: 3638295 - RNA, 18 nt, Human
uaguguggaaauuaagaa

SEQ ID NO: 3638296 - RNA, 22 nt, Human
uaguguggaaauuaagaagaaa

SEQ ID NO: 3638297 - RNA, 17 nt, Human
uagugugggaggcuccu

SEQ ID NO: 3638298 - RNA, 22 nt, Human
uagugugguuuucuguuucuaa

SEQ ID NO: 3638299 - RNA, 16 nt, Human
uaguguucagaaaaaa

SEQ ID NO: 3638300 - RNA, 12 nt, Human
uaguguuggaga

SEQ ID NO: 3638301 - RNA, 23 nt, Human
uaguguuuuuuuauuucuacugu

SEQ ID NO: 3638302 - RNA, 18 nt, Human
uaguuaaagaaaggaaaa

SEQ ID NO: 3638303 - RNA, 12 nt, Human
uaguuaaauuuc

SEQ ID NO: 3638304 - RNA, 14 nt, Human
uaguuaacacacua

SEQ ID NO: 3638305 - RNA, 20 nt, Human
uaguuaacauaguaaguuca

SEQ ID NO: 3638306 - RNA, 12 nt, Human
uaguuaaccacu

SEQ ID NO: 3638307 - RNA, 21 nt, Human
uaguuaagacaugauuuccuu

SEQ ID NO: 3638308 - RNA, 13 nt, Human
uaguuaauggauu

SEQ ID NO: 3638309 - RNA, 15 nt, Human
uaguuaauuuaucua

SEQ ID NO: 3638310 - RNA, 16 nt, Human
uaguuaauuuaucuaa

SEQ ID NO: 3638311 - RNA, 12 nt, Human
uaguuaccuuau

SEQ ID NO: 3638312 - RNA, 17 nt, Human
uaguuaccuuauaguua

SEQ ID NO: 3638313 - RNA, 21 nt, Human
uaguuaccuuauaguuacugu

SEQ ID NO: 3638314 - RNA, 14 nt, Human
uaguuacucauuca

SEQ ID NO: 3638315 - RNA, 12 nt, Human
uaguuacuguaa

SEQ ID NO: 3638316 - RNA, 21 nt, Human
uaguuacuguugugaccugaa

SEQ ID NO: 3638317 - RNA, 22 nt, Human
uaguuaggaaauaaaaccuuuc

SEQ ID NO: 3638318 - RNA, 16 nt, Human
uaguuaguagcauguu

SEQ ID NO: 3638319 - RNA, 19 nt, Human
uaguuauacuuauuuguau

SEQ ID NO: 3638320 - RNA, 16 nt, Human
uaguuaucauguuagu

SEQ ID NO: 3638321 - RNA, 13 nt, Human
uaguuauguaaau

SEQ ID NO: 3638322 - RNA, 21 nt, Human
uaguuauguaaauaauucuuu

SEQ ID NO: 3638323 - RNA, 18 nt, Human
uaguucaagaaaugaaga

SEQ ID NO: 3638324 - RNA, 14 nt, Human
uaguucagcaaaac

SEQ ID NO: 3638325 - RNA, 18 nt, Human
uaguucagguaacaggca

SEQ ID NO: 3638326 - RNA, 15 nt, Human
uaguucauguaaaua

SEQ ID NO: 3638327 - RNA, 21 nt, Human
uaguucauguaaauaauacau

SEQ ID NO: 3638328 - RNA, 14 nt, Human
uaguuccacugaga

SEQ ID NO: 3638329 - RNA, 21 nt, Human
uaguuccccaaauacaaaguu

SEQ ID NO: 3638330 - RNA, 15 nt, Human
uaguuccccuguuua

SEQ ID NO: 3638331 - RNA, 16 nt, Human
uaguucccucugcuca

SEQ ID NO: 3638332 - RNA, 19 nt, Human
uaguucccucugcucagcc

SEQ ID NO: 3638333 - RNA, 23 nt, Human
uaguucccugaaaacccagagag

SEQ ID NO: 3638334 - RNA, 20 nt, Human
uaguuccucauuagcauuuu

SEQ ID NO: 3638335 - RNA, 14 nt, Human
uaguucuaagacuc

SEQ ID NO: 3638336 - RNA, 15 nt, Human
uaguucuagaaaaac

SEQ ID NO: 3638337 - RNA, 16 nt, Human
uaguucuagaaaaaca

SEQ ID NO: 3638338 - RNA, 19 nt, Human
uaguucugcuccagacagg

SEQ ID NO: 3638339 - RNA, 9 nt, Human
uaguucugu

SEQ ID NO: 3638340 - RNA, 15 nt, Human
uaguucuguagaaau

SEQ ID NO: 3638341 - RNA, 18 nt, Human
uaguucuguagaaauggu

SEQ ID NO: 3638342 - RNA, 21 nt, Human
uaguucuguauuugaaagugc

SEQ ID NO: 3638343 - RNA, 15 nt, Human
uaguugaauacuuga

SEQ ID NO: 3638344 - RNA, 19 nt, Human
uaguugaauacuugaacca

SEQ ID NO: 3638345 - RNA, 13 nt, Human
uaguugagcccca

SEQ ID NO: 3638346 - RNA, 18 nt, Human
uaguugaggaaagcacag

SEQ ID NO: 3638347 - RNA, 17 nt, Human
uaguugcaauagaacag

SEQ ID NO: 3638348 - RNA, 14 nt, Human
uaguugcaauugaa

SEQ ID NO: 3638349 - RNA, 17 nt, Human
uaguugcagaaacauuu

SEQ ID NO: 3638350 - RNA, 14 nt, Human
uaguugcuuuguua

SEQ ID NO: 3638351 - RNA, 18 nt, Human
uaguugcuuuugaaggaa

SEQ ID NO: 3638352 - RNA, 21 nt, Human
uaguuguaccgcaaugugacu

SEQ ID NO: 3638353 - RNA, 17 nt, Human
uaguugucucucuucag

SEQ ID NO: 3638354 - RNA, 18 nt, Human
uaguugugaccuuagugu

SEQ ID NO: 3638355 - RNA, 15 nt, Human
uaguuguguuucaac

SEQ ID NO: 3638356 - RNA, 21 nt, Human
uaguuguuucuagacuauaaa

SEQ ID NO: 3638357 - RNA, 20 nt, Human
uaguuguuugauucagacag

SEQ ID NO: 3638358 - RNA, 21 nt, Human
uaguuguuugauucagacagc

SEQ ID NO: 3638359 - RNA, 22 nt, Human
uaguuguuugauucagacagcu

SEQ ID NO: 3638360 - RNA, 16 nt, Human
uaguuuaaaacacauu

SEQ ID NO: 3638361 - RNA, 22 nt, Human
uaguuuaaccauaugcccacau

SEQ ID NO: 3638362 - RNA, 19 nt, Human
uaguuuacagaaaaaucuu

SEQ ID NO: 3638363 - RNA, 15 nt, Human
uaguuuacuauuuua

SEQ ID NO: 3638364 - RNA, 16 nt, Human
uaguuuacugagaaug

SEQ ID NO: 3638365 - RNA, 11 nt, Human
uaguuuacugu

SEQ ID NO: 3638366 - RNA, 13 nt, Human
uaguuuacuguuu

SEQ ID NO: 3638367 - RNA, 18 nt, Human
uaguuuagugugguuuuc

SEQ ID NO: 3638368 - RNA, 11 nt, Human
uaguuucaagc

SEQ ID NO: 3638369 - RNA, 19 nt, Human
uaguuucauauaaaguauc

SEQ ID NO: 3638370 - RNA, 12 nt, Human
uaguuucugagu

SEQ ID NO: 3638371 - RNA, 20 nt, Human
uaguuucugaguuuuaccaa

SEQ ID NO: 3638372 - RNA, 14 nt, Human
uaguuucuguucug

SEQ ID NO: 3638373 - RNA, 16 nt, Human
uaguuucuguucugug

SEQ ID NO: 3638374 - RNA, 12 nt, Human
uaguuucuugug

SEQ ID NO: 3638375 - RNA, 12 nt, Human
uaguuucuuuau

SEQ ID NO: 3638376 - RNA, 22 nt, Human
uaguuucuuuauuuuguguaaa

SEQ ID NO: 3638377 - RNA, 21 nt, Human
uaguuugaccucacagugacc

SEQ ID NO: 3638378 - RNA, 17 nt, Human
uaguuugacucaguaua

SEQ ID NO: 3638379 - RNA, 14 nt, Human
uaguuugaggaaau

SEQ ID NO: 3638380 - RNA, 21 nt, Human
uaguuugauuaaauucuugca

SEQ ID NO: 3638381 - RNA, 18 nt, Human
uaguuugcauuucagaaa

SEQ ID NO: 3638382 - RNA, 11 nt, Human
uaguuuggaua

SEQ ID NO: 3638383 - RNA, 11 nt, Human
uaguuuggauu

SEQ ID NO: 3638384 - RNA, 16 nt, Human
uaguuugggcuucagc

SEQ ID NO: 3638385 - RNA, 14 nt, Human
uaguuuguauaacu

SEQ ID NO: 3638386 - RNA, 18 nt, Human
uaguuuguauaacuucuu

SEQ ID NO: 3638387 - RNA, 12 nt, Human
uaguuugucuau

SEQ ID NO: 3638388 - RNA, 14 nt, Human
uaguuugugagaaa

SEQ ID NO: 3638389 - RNA, 13 nt, Human
uaguuuguuuaau

SEQ ID NO: 3638390 - RNA, 14 nt, Human
uaguuuuaaacuca

SEQ ID NO: 3638391 - RNA, 17 nt, Human
uaguuuuaguugcagaa

SEQ ID NO: 3638392 - RNA, 15 nt, Human
uaguuuuauaugcuu

SEQ ID NO: 3638393 - RNA, 16 nt, Human
uaguuuuauaugcuuc

SEQ ID NO: 3638394 - RNA, 17 nt, Human
uaguuuuaucacaugua

SEQ ID NO: 3638395 - RNA, 23 nt, Human
uaguuuucauacacagccugggc

SEQ ID NO: 3638396 - RNA, 13 nt, Human
uaguuuucucagc

SEQ ID NO: 3638397 - RNA, 13 nt, Human
uauaccugugccu

SEQ ID NO: 3638398 - RNA, 22 nt, Human
uauaccuguguuucuugccuca

SEQ ID NO: 3638399 - RNA, 17 nt, Human
uauaccuguuuaaauug

SEQ ID NO: 3638400 - RNA, 18 nt, Human
uauaccuguuuaaauugc

SEQ ID NO: 3638401 - RNA, 17 nt, Human
uauacgaaauaauuguu

SEQ ID NO: 3638402 - RNA, 15 nt, Human
uauacguguagcuau

SEQ ID NO: 3638403 - RNA, 19 nt, Human
uauacguguagcuauaucu

SEQ ID NO: 3638404 - RNA, 15 nt, Human
uauacuaagaaaaga

SEQ ID NO: 3638405 - RNA, 20 nt, Human
uauacuauaguaccaguagg

SEQ ID NO: 3638406 - RNA, 21 nt, Human
uauacuauuaaaaagguuuac

SEQ ID NO: 3638407 - RNA, 18 nt, Human
uauacucuagaugaaguu

SEQ ID NO: 3638408 - RNA, 20 nt, Human
uauacucuuauagacaacau

SEQ ID NO: 3638409 - RNA, 16 nt, Human
uauacucuuucuguau

SEQ ID NO: 3638410 - RNA, 17 nt, Human
uauacucuuucuguaua

SEQ ID NO: 3638411 - RNA, 17 nt, Human
uauacucuuuuuucaug

SEQ ID NO: 3638412 - RNA, 12 nt, Human
uauacugcauac

SEQ ID NO: 3638413 - RNA, 16 nt, Human
uauacugcauacuuuu

SEQ ID NO: 3638414 - RNA, 23 nt, Human
uauacugcuuggagcugagcaaa

SEQ ID NO: 3638415 - RNA, 13 nt, Human
uauacuggcaugc

SEQ ID NO: 3638416 - RNA, 16 nt, Human
uauacuguaaagaaag

SEQ ID NO: 3638417 - RNA, 22 nt, Human
uauacuguaaagaaagagagaa

SEQ ID NO: 3638418 - RNA, 21 nt, Human
uauacuguacaauaaaaacau

SEQ ID NO: 3638419 - RNA, 16 nt, Human
uauacuguacuuaaua

SEQ ID NO: 3638420 - RNA, 13 nt, Human
uauacuguucuuc

SEQ ID NO: 3638421 - RNA, 22 nt, Human
uauacuuaaauggaaaaaauga

SEQ ID NO: 3638422 - RNA, 21 nt, Human
uauacuuccuuacuuuuaagg

SEQ ID NO: 3638423 - RNA, 21 nt, Human
uauacuugaacaaaaggguca

SEQ ID NO: 3638424 - RNA, 23 nt, Human
uauacuugaacaaaagggucaga

SEQ ID NO: 3638425 - RNA, 22 nt, Human
uauacuuguggacuaaaagaua

SEQ ID NO: 3638426 - RNA, 22 nt, Human
uauacuugugguuuucaaauug

SEQ ID NO: 3638427 - RNA, 21 nt, Human
uauacuuuaaauaauuuaacu

SEQ ID NO: 3638428 - RNA, 19 nt, Human
uauacuuuaguagacauuu

SEQ ID NO: 3638429 - RNA, 20 nt, Human
uauacuuucccuacccucua

SEQ ID NO: 3638430 - RNA, 11 nt, Human
uauacuuuuuu

SEQ ID NO: 3638431 - RNA, 21 nt, Human
uauacuuuuuucuuauuuaac

SEQ ID NO: 3638432 - RNA, 20 nt, Human
uauagaaaaaaacauucuau

SEQ ID NO: 3638433 - RNA, 23 nt, Human
uauagaaaaauaaaaaucucuuu

SEQ ID NO: 3638434 - RNA, 12 nt, Human
uauagaaaaucu

SEQ ID NO: 3638435 - RNA, 15 nt, Human
uauagaaaaucuuca

SEQ ID NO: 3638436 - RNA, 18 nt, Human
uauagaaagcaagaugua

SEQ ID NO: 3638437 - RNA, 13 nt, Human
uauagaaagcuau

SEQ ID NO: 3638438 - RNA, 21 nt, Human
uauagaaaguguucuguuaca

SEQ ID NO: 3638439 - RNA, 11 nt, Human
uauagaaaugc

SEQ ID NO: 3638440 - RNA, 20 nt, Human
uauagaaccucuuugucuac

SEQ ID NO: 3638441 - RNA, 21 nt, Human
uauagaaccucuuugucuaca

SEQ ID NO: 3638442 - RNA, 20 nt, Human
uauagaacuggauuuucaga

SEQ ID NO: 3638443 - RNA, 17 nt, Human
uauagaacuucauggau

SEQ ID NO: 3638444 - RNA, 20 nt, Human
uauagaagaaugcaugcuuu

SEQ ID NO: 3638445 - RNA, 13 nt, Human
uauagaagcgauu

SEQ ID NO: 3638446 - RNA, 16 nt, Human
uauagaagucuucaug

SEQ ID NO: 3638447 - RNA, 17 nt, Human
uauagacagcuuugacu

SEQ ID NO: 3638448 - RNA, 15 nt, Human
uauagacaguuugua

SEQ ID NO: 3638449 - RNA, 19 nt, Human
uauagacauugaggaccuc

SEQ ID NO: 3638450 - RNA, 19 nt, Human
uauagacugccgugcauua

SEQ ID NO: 3638451 - RNA, 17 nt, Human
uauagagauaugcagaa

SEQ ID NO: 3638452 - RNA, 21 nt, Human
uauagagauaugcagaaggaa

SEQ ID NO: 3638453 - RNA, 22 nt, Human
uauagagauguuuuuaaaaguu

SEQ ID NO: 3638454 - RNA, 20 nt, Human
uauagagucauuguaauguu

SEQ ID NO: 3638455 - RNA, 17 nt, Human
uauagaguucaucccag

SEQ ID NO: 3638456 - RNA, 21 nt, Human
uauagauauaaugaacaaaau

SEQ ID NO: 3638457 - RNA, 18 nt, Human
uauagaucacauaacaga

SEQ ID NO: 3638458 - RNA, 15 nt, Human
uauagaucccccaga

SEQ ID NO: 3638459 - RNA, 22 nt, Human
uauagaugcaagauauuuauau

SEQ ID NO: 3638460 - RNA, 23 nt, Human
uauagaugggggaaagcaaagca

SEQ ID NO: 3638461 - RNA, 12 nt, Human
uauagaugucua

SEQ ID NO: 3638462 - RNA, 18 nt, Human
uauagaugucuuuuccca

SEQ ID NO: 3638463 - RNA, 15 nt, Human
uauagauguugcuaa

SEQ ID NO: 3638464 - RNA, 16 nt, Human
uauagauuagaaaaau

SEQ ID NO: 3638465 - RNA, 21 nt, Human
uauagauuagaaaaauuccua

SEQ ID NO: 3638466 - RNA, 18 nt, Human
uauagauuagaauucugu

SEQ ID NO: 3638467 - RNA, 19 nt, Human
uauagauuagaauucugua

SEQ ID NO: 3638468 - RNA, 16 nt, Human
uauagauuauaacuug

SEQ ID NO: 3638469 - RNA, 14 nt, Human
uauagauucuaaag

SEQ ID NO: 3638470 - RNA, 16 nt, Human
uauagcaaaacuuuua

SEQ ID NO: 3638471 - RNA, 19 nt, Human
uauagcaaaacuuuuaaac

SEQ ID NO: 3638472 - RNA, 18 nt, Human
uauagcacaucaccuggg

SEQ ID NO: 3638473 - RNA, 14 nt, Human
uauagcacuuugaa

SEQ ID NO: 3638474 - RNA, 21 nt, Human
uauagcacuuugaaauaccuc

SEQ ID NO: 3638475 - RNA, 22 nt, Human
uauagcacuuugaaauaccuca

SEQ ID NO: 3638476 - RNA, 18 nt, Human
uauagcagcaaaaauaua

SEQ ID NO: 3638477 - RNA, 21 nt, Human
uauagcagcaaaaauauaaaa

SEQ ID NO: 3638478 - RNA, 15 nt, Human
uauagcaucacuuaa

SEQ ID NO: 3638479 - RNA, 22 nt, Human
uauagccaaaaauagcuaaaua

SEQ ID NO: 3638480 - RNA, 17 nt, Human
uauagccaauauaacua

SEQ ID NO: 3638481 - RNA, 13 nt, Human
uauagcccagguc

SEQ ID NO: 3638482 - RNA, 20 nt, Human
uauagccuaggugacagagu

SEQ ID NO: 3638483 - RNA, 14 nt, Human
uauagccuggacug

SEQ ID NO: 3638484 - RNA, 14 nt, Human
uauagcuaaguaca

SEQ ID NO: 3638485 - RNA, 22 nt, Human
uauagcuacaggaagcacccca

SEQ ID NO: 3638486 - RNA, 14 nt, Human
uauagcuauuacug

SEQ ID NO: 3638487 - RNA, 12 nt, Human
uauagcuauuuu

SEQ ID NO: 3638488 - RNA, 22 nt, Human
uauagcugcuuccaguguagac

SEQ ID NO: 3638489 - RNA, 16 nt, Human
uauagcuguacaaaua

SEQ ID NO: 3638490 - RNA, 13 nt, Human
uauagcuguauug

SEQ ID NO: 3638491 - RNA, 14 nt, Human
uauagcuguauuga

SEQ ID NO: 3638492 - RNA, 12 nt, Human
uauagcuugaaa

SEQ ID NO: 3638493 - RNA, 13 nt, Human
uauagcuuuauuu

SEQ ID NO: 3638494 - RNA, 16 nt, Human
uauaggagacuuguag

SEQ ID NO: 3638495 - RNA, 17 nt, Human
uauaggagacuuguagu

SEQ ID NO: 3638496 - RNA, 18 nt, Human
uauaggagccuuaauuuu

SEQ ID NO: 3638497 - RNA, 15 nt, Human
uauaggaucauuugu

SEQ ID NO: 3638498 - RNA, 19 nt, Human
uauaggcauaccuccuaug

SEQ ID NO: 3638499 - RNA, 20 nt, Human
uauaggucucuucucccaga

SEQ ID NO: 3638500 - RNA, 17 nt, Human
uauaggugauguuugcu

SEQ ID NO: 3638501 - RNA, 20 nt, Human
uauaggugcuacaaaaacac

SEQ ID NO: 3638502 - RNA, 18 nt, Human
uauagguuuuaaagaccu

SEQ ID NO: 3638503 - RNA, 13 nt, Human
uauaguacaugau

SEQ ID NO: 3638504 - RNA, 16 nt, Human
uauaguaccuuugcuc

SEQ ID NO: 3638505 - RNA, 13 nt, Human
uauaguauaucug

SEQ ID NO: 3638506 - RNA, 20 nt, Human
uauaguauuugaaaacagaa

SEQ ID NO: 3638507 - RNA, 19 nt, Human
uauaguauuugauucaaaa

SEQ ID NO: 3638508 - RNA, 18 nt, Human
uauagucuaagacuauau

SEQ ID NO: 3638509 - RNA, 19 nt, Human
uauagugcaauauauuuug

SEQ ID NO: 3638510 - RNA, 17 nt, Human
uauagugcacaaaauga

SEQ ID NO: 3638511 - RNA, 21 nt, Human
uauaguguaaaauaagaauga

SEQ ID NO: 3638512 - RNA, 16 nt, Human
uauaguuaacacacua

SEQ ID NO: 3638513 - RNA, 17 nt, Human
uauaguuaacacacuac

SEQ ID NO: 3638514 - RNA, 19 nt, Human
uauaguuaaucuauaacua

SEQ ID NO: 3638515 - RNA, 15 nt, Human
uauaguuacugugua

SEQ ID NO: 3638516 - RNA, 16 nt, Human
uauaguuauguaaaua

SEQ ID NO: 3638517 - RNA, 22 nt, Human
uauaguuauuaaguucuuuaaa

SEQ ID NO: 3638518 - RNA, 12 nt, Human
uauaguucuaga

SEQ ID NO: 3638519 - RNA, 13 nt, Human
uauaguucuagac

SEQ ID NO: 3638520 - RNA, 14 nt, Human
uauaguugucagua

SEQ ID NO: 3638521 - RNA, 21 nt, Human
uauaguugucaguauuauucu

SEQ ID NO: 3638522 - RNA, 18 nt, Human
uauaguuguuuuauaugu

SEQ ID NO: 3638523 - RNA, 19 nt, Human
uauaguuuaaaacacauug

SEQ ID NO: 3638524 - RNA, 17 nt, Human
uauaguuuacuauuuua

SEQ ID NO: 3638525 - RNA, 22 nt, Human
uauaguuucagauauauaucau

SEQ ID NO: 3638526 - RNA, 15 nt, Human
uauaguuugggcuuc

SEQ ID NO: 3638527 - RNA, 15 nt, Human
uauaguuuguacaug

SEQ ID NO: 3638528 - RNA, 17 nt, Human
uauaguuuuacuuuuaa

SEQ ID NO: 3638529 - RNA, 23 nt, Human
uauauaaaaagaaaagauaaaga

SEQ ID NO: 3638530 - RNA, 11 nt, Human
uauauaaaaau

SEQ ID NO: 3638531 - RNA, 18 nt, Human
uauauaaaaauauauaua

SEQ ID NO: 3638532 - RNA, 19 nt, Human
uauauaaaacggugcugug

SEQ ID NO: 3638533 - RNA, 19 nt, Human
uauauaaaauaaauauaua

SEQ ID NO: 3638534 - RNA, 13 nt, Human
uauauaaaauaac

SEQ ID NO: 3638535 - RNA, 14 nt, Human
uauauaaaccuaaa

SEQ ID NO: 3638536 - RNA, 17 nt, Human
uauauaaaccuaaaaaa

SEQ ID NO: 3638537 - RNA, 22 nt, Human
uauauaaaccuaaaaaagauau

SEQ ID NO: 3638538 - RNA, 18 nt, Human
uauauaaagaauauauau

SEQ ID NO: 3638539 - RNA, 14 nt, Human
uauauaaagagaaa

SEQ ID NO: 3638540 - RNA, 18 nt, Human
uauauaaagagaaaauug

SEQ ID NO: 3638541 - RNA, 21 nt, Human
uaucagaagaccacaaaaauu

SEQ ID NO: 3638542 - RNA, 23 nt, Human
uaucagaagaccacaaaaauuga

SEQ ID NO: 3638543 - RNA, 10 nt, Human
uaucagaauu

SEQ ID NO: 3638544 - RNA, 18 nt, Human
uaucagaauugaaacacu

SEQ ID NO: 3638545 - RNA, 13 nt, Human
uaucagaauuugu

SEQ ID NO: 3638546 - RNA, 20 nt, Human
uaucagaauuuguguugaag

SEQ ID NO: 3638547 - RNA, 18 nt, Human
uaucagacacucuggcug

SEQ ID NO: 3638548 - RNA, 17 nt, Human
uaucagaggccuauaau

SEQ ID NO: 3638549 - RNA, 17 nt, Human
uaucagauugcuuuugu

SEQ ID NO: 3638550 - RNA, 13 nt, Human
uaucagccugucu

SEQ ID NO: 3638551 - RNA, 19 nt, Human
uaucagcggccccuugacu

SEQ ID NO: 3638552 - RNA, 18 nt, Human
uaucagcuacuuaagaga

SEQ ID NO: 3638553 - RNA, 20 nt, Human
uaucaggacccagaggaagg

SEQ ID NO: 3638554 - RNA, 16 nt, Human
uaucaggauuuccucu

SEQ ID NO: 3638555 - RNA, 9 nt, Human
uaucaguag

SEQ ID NO: 3638556 - RNA, 20 nt, Human
uaucagugacagaguucacu

SEQ ID NO: 3638557 - RNA, 22 nt, Human
uaucagugacagaguucacuau

SEQ ID NO: 3638558 - RNA, 13 nt, Human
uaucagugcuucc

SEQ ID NO: 3638559 - RNA, 15 nt, Human
uaucaguguuuaugu

SEQ ID NO: 3638560 - RNA, 20 nt, Human
uaucaguguuuuaaauucug

SEQ ID NO: 3638561 - RNA, 21 nt, Human
uaucaguguuuuaaauucuga

SEQ ID NO: 3638562 - RNA, 21 nt, Human
uaucaguuacucagcccuggg

SEQ ID NO: 3638563 - RNA, 15 nt, Human
uaucaguugcaauaa

SEQ ID NO: 3638564 - RNA, 22 nt, Human
uaucaguuugaucacacuauuu

SEQ ID NO: 3638565 - RNA, 23 nt, Human
uaucaguuugcuagcagaaaucu

SEQ ID NO: 3638566 - RNA, 16 nt, Human
uaucauaaaaucaaaa

SEQ ID NO: 3638567 - RNA, 22 nt, Human
uaucauacaaaucaguuaguuu

SEQ ID NO: 3638568 - RNA, 15 nt, Human
uaucauacuguucaa

SEQ ID NO: 3638569 - RNA, 14 nt, Human
uaucauagaaaugu

SEQ ID NO: 3638570 - RNA, 13 nt, Human
uaucauaguuaac

SEQ ID NO: 3638571 - RNA, 21 nt, Human
uaucauauauauacauacaug

SEQ ID NO: 3638572 - RNA, 15 nt, Human
uaucauauugguauu

SEQ ID NO: 3638573 - RNA, 20 nt, Human
uaucaucacguauguuauac

SEQ ID NO: 3638574 - RNA, 21 nt, Human
uaucaucacguauguuauaca

SEQ ID NO: 3638575 - RNA, 22 nt, Human
uaucaucaguauugaagcauuu

SEQ ID NO: 3638576 - RNA, 14 nt, Human
uaucauccacacau

SEQ ID NO: 3638577 - RNA, 17 nt, Human
uaucauccacauuguuu

SEQ ID NO: 3638578 - RNA, 20 nt, Human
uaucaucuguggacugaccu

SEQ ID NO: 3638579 - RNA, 11 nt, Human
uaucaugaaug

SEQ ID NO: 3638580 - RNA, 16 nt, Human
uaucaugaauuuuaaa

SEQ ID NO: 3638581 - RNA, 16 nt, Human
uaucaugacaaagacu

SEQ ID NO: 3638582 - RNA, 17 nt, Human
uaucaugacaaagacug

SEQ ID NO: 3638583 - RNA, 14 nt, Human
uaucaugcaaaaua

SEQ ID NO: 3638584 - RNA, 18 nt, Human
uaucaugccccuguacuc

SEQ ID NO: 3638585 - RNA, 14 nt, Human
uaucaugcccugug

SEQ ID NO: 3638586 - RNA, 22 nt, Human
uaucaugcuuuaaaguguaaua

SEQ ID NO: 3638587 - RNA, 15 nt, Human
uaucauggagugacg

SEQ ID NO: 3638588 - RNA, 16 nt, Human
uaucauggugaaaagc

SEQ ID NO: 3638589 - RNA, 16 nt, Human
uaucauguaaagaaau

SEQ ID NO: 3638590 - RNA, 21 nt, Human
uaucaugucaaacgugaaaau

SEQ ID NO: 3638591 - RNA, 14 nt, Human
uaucauguguaauc

SEQ ID NO: 3638592 - RNA, 19 nt, Human
uaucauguguaaucaauaa

SEQ ID NO: 3638593 - RNA, 13 nt, Human
uaucauguuaacc

SEQ ID NO: 3638594 - RNA, 20 nt, Human
uaucauguuaguaauaccuc

SEQ ID NO: 3638595 - RNA, 15 nt, Human
uaucauuaaaguucu

SEQ ID NO: 3638596 - RNA, 13 nt, Human
uaucauucaagug

SEQ ID NO: 3638597 - RNA, 12 nt, Human
uaucauucagca

SEQ ID NO: 3638598 - RNA, 18 nt, Human
uaucauucauucuuagcu

SEQ ID NO: 3638599 - RNA, 14 nt, Human
uaucauuccaaagg

SEQ ID NO: 3638600 - RNA, 16 nt, Human
uaucauucuaaagaua

SEQ ID NO: 3638601 - RNA, 18 nt, Human
uaucauuuaauaauauac

SEQ ID NO: 3638602 - RNA, 19 nt, Human
uaucauuuaauaauauacu

SEQ ID NO: 3638603 - RNA, 16 nt, Human
uaucauuuuuuccugu

SEQ ID NO: 3638604 - RNA, 23 nt, Human
uauccaaaauguguauuucuuau

SEQ ID NO: 3638605 - RNA, 14 nt, Human
uauccaaacaugua

SEQ ID NO: 3638606 - RNA, 20 nt, Human
uauccaaaucugaagauugc

SEQ ID NO: 3638607 - RNA, 15 nt, Human
uauccaauugcugcu

SEQ ID NO: 3638608 - RNA, 23 nt, Human
uauccaauugcugcuuguacacu

SEQ ID NO: 3638609 - RNA, 18 nt, Human
uauccacaugaaaauaaa

SEQ ID NO: 3638610 - RNA, 18 nt, Human
uauccacgagagcgcagc

SEQ ID NO: 3638611 - RNA, 17 nt, Human
uauccagaaaacuguga

SEQ ID NO: 3638612 - RNA, 18 nt, Human
uauccaggucaacagaau

SEQ ID NO: 3638613 - RNA, 14 nt, Human
uauccaguuacugc

SEQ ID NO: 3638614 - RNA, 14 nt, Human
uauccauauuuuau

SEQ ID NO: 3638615 - RNA, 13 nt, Human
uauccauguacug

SEQ ID NO: 3638616 - RNA, 15 nt, Human
uauccauguacugua

SEQ ID NO: 3638617 - RNA, 16 nt, Human
uauccauguacuguag

SEQ ID NO: 3638618 - RNA, 22 nt, Human
uauccauguacuguaguuuuuc

SEQ ID NO: 3638619 - RNA, 15 nt, Human
uauccauguacuugu

SEQ ID NO: 3638620 - RNA, 19 nt, Human
uaucccaacagucauguuu

SEQ ID NO: 3638621 - RNA, 12 nt, Human
uaucccauccca

SEQ ID NO: 3638622 - RNA, 20 nt, Human
uauccccaucucccugccug

SEQ ID NO: 3638623 - RNA, 15 nt, Human
uauccccccaucuug

SEQ ID NO: 3638624 - RNA, 19 nt, Human
uauccccccaucuugcuuc

SEQ ID NO: 3638625 - RNA, 15 nt, Human
uauccccucuacucu

SEQ ID NO: 3638626 - RNA, 14 nt, Human
uaucccgagucugg

SEQ ID NO: 3638627 - RNA, 17 nt, Human
uaucccgagucugggac

SEQ ID NO: 3638628 - RNA, 15 nt, Human
uaucccuacauguau

SEQ ID NO: 3638629 - RNA, 14 nt, Human
uaucccuccuguug

SEQ ID NO: 3638630 - RNA, 20 nt, Human
uaucccuccuguugggagag

SEQ ID NO: 3638631 - RNA, 14 nt, Human
uaucccugauaaau

SEQ ID NO: 3638632 - RNA, 13 nt, Human
uaucccugcccau

SEQ ID NO: 3638633 - RNA, 11 nt, Human
uaucccuuccg

SEQ ID NO: 3638634 - RNA, 14 nt, Human
uaucccuuccuuuu

SEQ ID NO: 3638635 - RNA, 18 nt, Human
uaucccuucucacagcac

SEQ ID NO: 3638636 - RNA, 17 nt, Human
uaucccuuggacauuuu

SEQ ID NO: 3638637 - RNA, 18 nt, Human
uaucccuuggacauuuua

SEQ ID NO: 3638638 - RNA, 18 nt, Human
uauccggacagagcacgu

SEQ ID NO: 3638639 - RNA, 16 nt, Human
uauccggacuccugcc

SEQ ID NO: 3638640 - RNA, 15 nt, Human
uauccuaauaaaaag

SEQ ID NO: 3638641 - RNA, 17 nt, Human
uauccuagcacaugcuu

SEQ ID NO: 3638642 - RNA, 14 nt, Human
uauccuauuucagu

SEQ ID NO: 3638643 - RNA, 20 nt, Human
uauccuccagguuuuucaau

SEQ ID NO: 3638644 - RNA, 22 nt, Human
uauccuccagguuuuucaauua

SEQ ID NO: 3638645 - RNA, 15 nt, Human
uauccucccuguaac

SEQ ID NO: 3638646 - RNA, 16 nt, Human
uauccucccuguaacu

SEQ ID NO: 3638647 - RNA, 14 nt, Human
uauccucuuuagag

SEQ ID NO: 3638648 - RNA, 17 nt, Human
uauccucuuuagaguua

SEQ ID NO: 3638649 - RNA, 22 nt, Human
uauccucuuuagaguuagacug

SEQ ID NO: 3638650 - RNA, 17 nt, Human
uauccugaaauuucaga

SEQ ID NO: 3638651 - RNA, 16 nt, Human
uauccugcccaguguu

SEQ ID NO: 3638652 - RNA, 16 nt, Human
uauccuggaacaauau

SEQ ID NO: 3638653 - RNA, 19 nt, Human
uauccuggcuuugcccaac

SEQ ID NO: 3638654 - RNA, 17 nt, Human
uauccugugacugucuc

SEQ ID NO: 3638655 - RNA, 22 nt, Human
uauccuuaugccacccccgcug

SEQ ID NO: 3638656 - RNA, 16 nt, Human
uauccuucaucuuuua

SEQ ID NO: 3638657 - RNA, 20 nt, Human
uauccuucaucuuuuaaaga

SEQ ID NO: 3638658 - RNA, 24 nt, Human
uauccuuuccucauuaaauuaccu

SEQ ID NO: 3638659 - RNA, 17 nt, Human
uauccuuuucuguguuu

SEQ ID NO: 3638660 - RNA, 18 nt, Human
uauccuuuucuucuaugu

SEQ ID NO: 3638661 - RNA, 14 nt, Human
uaucgaaauaacaa

SEQ ID NO: 3638662 - RNA, 15 nt, Human
uaucgaaauaacaau

SEQ ID NO: 3638663 - RNA, 18 nt, Human
uaucgaaauaacaauguu

SEQ ID NO: 3638664 - RNA, 19 nt, Human
uaucgaaauaacaauguua

SEQ ID NO: 3638665 - RNA, 15 nt, Human
uaucggaagcagugc

SEQ ID NO: 3638666 - RNA, 16 nt, Human
uaucgggaacaguguu

SEQ ID NO: 3638667 - RNA, 15 nt, Human
uaucgggagcagugu

SEQ ID NO: 3638668 - RNA, 15 nt, Human
uaucguaaaauuaag

SEQ ID NO: 3638669 - RNA, 18 nt, Human
uaucguauucaccuucag

SEQ ID NO: 3638670 - RNA, 16 nt, Human
uaucgucacugcuuaa

SEQ ID NO: 3638671 - RNA, 15 nt, Human
uaucguuaucacugu

SEQ ID NO: 3638672 - RNA, 20 nt, Human
uaucguuuuuguauuuucau

SEQ ID NO: 3638673 - RNA, 23 nt, Human
uaucuaaaagugucaccuuuucu

SEQ ID NO: 3638674 - RNA, 15 nt, Human
uaucuaaaguuuguu

SEQ ID NO: 3638675 - RNA, 16 nt, Human
uaucuaaauugaauaa

SEQ ID NO: 3638676 - RNA, 12 nt, Human
uaucuaaccagu

SEQ ID NO: 3638677 - RNA, 15 nt, Human
uaucuaaccagugau

SEQ ID NO: 3638678 - RNA, 16 nt, Human
uaucuaaccagugauu

SEQ ID NO: 3638679 - RNA, 13 nt, Human
uaucuaagaauac

SEQ ID NO: 3638680 - RNA, 20 nt, Human
uaucuaagaauacagcuuuc

SEQ ID NO: 3638681 - RNA, 16 nt, Human
uaucuaauaccucugu

SEQ ID NO: 3638682 - RNA, 14 nt, Human
uaucuaaugacaug

SEQ ID NO: 3638683 - RNA, 13 nt, Human
uaucuaauuuaua

SEQ ID NO: 3638684 - RNA, 19 nt, Human
uaucuaccaacuuucaaga

SEQ ID NO: 3638685 - RNA, 21 nt, Human
uaucuacccaagggcagaaag

SEQ ID NO: 3638686 - RNA, 16 nt, Human
uaucuacccagaauua

SEQ ID NO: 3638687 - RNA, 17 nt, Human
uauuuugguacuuuuau

SEQ ID NO: 3638688 - RNA, 21 nt, Human
uauuuugguucuuaguucuca

SEQ ID NO: 3638689 - RNA, 18 nt, Human
uauuuuguaaaauguauu

SEQ ID NO: 3638690 - RNA, 13 nt, Human
uauuuuguaaacu

SEQ ID NO: 3638691 - RNA, 21 nt, Human
uauuuuguaaacucaaaauau

SEQ ID NO: 3638692 - RNA, 16 nt, Human
uauuuuguaacuucca

SEQ ID NO: 3638693 - RNA, 16 nt, Human
uauuuuguaauuauug

SEQ ID NO: 3638694 - RNA, 12 nt, Human
uauuuuguaugc

SEQ ID NO: 3638695 - RNA, 16 nt, Human
uauuuuguaugcaagc

SEQ ID NO: 3638696 - RNA, 20 nt, Human
uauuuuguaugcaagcaguu

SEQ ID NO: 3638697 - RNA, 14 nt, Human
uauuuugugugaaa

SEQ ID NO: 3638698 - RNA, 15 nt, Human
uauuuugugugaaau

SEQ ID NO: 3638699 - RNA, 13 nt, Human
uauuuuuaaagau

SEQ ID NO: 3638700 - RNA, 15 nt, Human
uauuuuuaaaggcau

SEQ ID NO: 3638701 - RNA, 13 nt, Human
uauuuuuaaauaa

SEQ ID NO: 3638702 - RNA, 18 nt, Human
uauuuuuaagaaagaaau

SEQ ID NO: 3638703 - RNA, 16 nt, Human
uauuuuuacauuuaaa

SEQ ID NO: 3638704 - RNA, 18 nt, Human
uauuuuuacugccacucu

SEQ ID NO: 3638705 - RNA, 14 nt, Human
uauuuuuagaauaa

SEQ ID NO: 3638706 - RNA, 22 nt, Human
uauuuuuagaugguuacacugu

SEQ ID NO: 3638707 - RNA, 23 nt, Human
uauuuuuagaugguuacacuguu

SEQ ID NO: 3638708 - RNA, 15 nt, Human
uauuuuuauacagua

SEQ ID NO: 3638709 - RNA, 22 nt, Human
uauuuuuauauaauaucuaaag

SEQ ID NO: 3638710 - RNA, 23 nt, Human
uauuuuuauauaauaucuaaagu

SEQ ID NO: 3638711 - RNA, 17 nt, Human
uauuuuuauauuuccuu

SEQ ID NO: 3638712 - RNA, 12 nt, Human
uauuuuuaucca

SEQ ID NO: 3638713 - RNA, 13 nt, Human
uauuuuuauuugu

SEQ ID NO: 3638714 - RNA, 13 nt, Human
uauuuuucaaaau

SEQ ID NO: 3638715 - RNA, 14 nt, Human
uauuuuucaaggaa

SEQ ID NO: 3638716 - RNA, 13 nt, Human
uauuuuucagaga

SEQ ID NO: 3638717 - RNA, 14 nt, Human
uauuuuuccuuuuu

SEQ ID NO: 3638718 - RNA, 14 nt, Human
uauuuuugaaaaau

SEQ ID NO: 3638719 - RNA, 13 nt, Human
uauuuuugacaga

SEQ ID NO: 3638720 - RNA, 18 nt, Human
uauuuuugcugcuucuga

SEQ ID NO: 3638721 - RNA, 19 nt, Human
uauuuuuggcagucugaau

SEQ ID NO: 3638722 - RNA, 23 nt, Human
uauuuuuguuggagccacucugu

SEQ ID NO: 3638723 - RNA, 20 nt, Human
uauuuuuguuucuuccaaag

SEQ ID NO: 3638724 - RNA, 18 nt, Human
uauuuuuguuuuuauuaa

SEQ ID NO: 3638725 - RNA, 23 nt, Human
uauuuuuuaauuugaugaaagcu

SEQ ID NO: 3638726 - RNA, 20 nt, Human
uauuuuuuacauuuuacaca

SEQ ID NO: 3638727 - RNA, 14 nt, Human
uauuuuuuauacag

SEQ ID NO: 3638728 - RNA, 13 nt, Human
uauuuuuucccaa

SEQ ID NO: 3638729 - RNA, 15 nt, Human
uauuuuuucuugcau

SEQ ID NO: 3638730 - RNA, 21 nt, Human
uauuuuuuggacuucaaagca

SEQ ID NO: 3638731 - RNA, 18 nt, Human
uauuuuuuuaaaaucacu

SEQ ID NO: 3638732 - RNA, 19 nt, Human
uauuuuuuuaaaaucacua

SEQ ID NO: 3638733 - RNA, 20 nt, Human
uauuuuuuuaauuuaacaug

SEQ ID NO: 3638734 - RNA, 12 nt, Human
uauuuuuuuccu

SEQ ID NO: 3638735 - RNA, 14 nt, Human
uauuuuuuucuacc

SEQ ID NO: 3638736 - RNA, 17 nt, Human
uauuuuuuucuauuuuu

SEQ ID NO: 3638737 - RNA, 16 nt, Human
uauuuuuuucugaaau

SEQ ID NO: 3638738 - RNA, 19 nt, Human
uauuuuuuugcaagugaag

SEQ ID NO: 3638739 - RNA, 15 nt, Human
uauuuuuuuuaaaga

SEQ ID NO: 3638740 - RNA, 17 nt, Human
uauuuuuuuuaaagaaa

SEQ ID NO: 3638741 - RNA, 17 nt, Human
uauuuuuuuuaaguauu

SEQ ID NO: 3638742 - RNA, 19 nt, Human
uauuuuuuuuaauauuauu

SEQ ID NO: 3638743 - RNA, 19 nt, Human
uauuuuuuuuaauuguauu

SEQ ID NO: 3638744 - RNA, 20 nt, Human
uauuuuuuuuuuuugaaaaa

SEQ ID NO: 3638745 - RNA, 19 nt, Human
ucaaaaaaaaaaaaaugca

SEQ ID NO: 3638746 - RNA, 14 nt, Human
ucaaaaaaacacua

SEQ ID NO: 3638747 - RNA, 15 nt, Human
ucaaaaaaagaaaaa

SEQ ID NO: 3638748 - RNA, 15 nt, Human
ucaaaaaacuuguaa

SEQ ID NO: 3638749 - RNA, 13 nt, Human
ucaaaaacuguau

SEQ ID NO: 3638750 - RNA, 14 nt, Human
ucaaaaagaaauca

SEQ ID NO: 3638751 - RNA, 12 nt, Human
ucaaaaagaacc

SEQ ID NO: 3638752 - RNA, 14 nt, Human
ucaaaaauacaaaa

SEQ ID NO: 3638753 - RNA, 15 nt, Human
ucaaaaauauaacuu

SEQ ID NO: 3638754 - RNA, 14 nt, Human
ucaaaaaucugaag

SEQ ID NO: 3638755 - RNA, 20 nt, Human
ucaaaaaucugaagauuguu

SEQ ID NO: 3638756 - RNA, 16 nt, Human
ucaaaaauugaagaga

SEQ ID NO: 3638757 - RNA, 18 nt, Human
ucaaaaauugaagagaga

SEQ ID NO: 3638758 - RNA, 21 nt, Human
ucaaaacacaucuuuccuguc

SEQ ID NO: 3638759 - RNA, 14 nt, Human
ucaaaacacugugg

SEQ ID NO: 3638760 - RNA, 24 nt, Human
ucaaaacacuuguaauuuuguauc

SEQ ID NO: 3638761 - RNA, 22 nt, Human
ucaaaacauugugccaugucaa

SEQ ID NO: 3638762 - RNA, 15 nt, Human
ucaaaaccuuuugaa

SEQ ID NO: 3638763 - RNA, 18 nt, Human
ucaaaacucauuuccuau

SEQ ID NO: 3638764 - RNA, 24 nt, Human
ucaaaacuggagucccaaauguca

SEQ ID NO: 3638765 - RNA, 18 nt, Human
ucaaaacuuuaaaccugu

SEQ ID NO: 3638766 - RNA, 18 nt, Human
ucaaaagaaaaggcaaaa

SEQ ID NO: 3638767 - RNA, 12 nt, Human
ucaaaagacaau

SEQ ID NO: 3638768 - RNA, 15 nt, Human
ucaaaagacaauucu

SEQ ID NO: 3638769 - RNA, 16 nt, Human
ucaaaagacaauucuu

SEQ ID NO: 3638770 - RNA, 19 nt, Human
ucaaaagacaauucuuuau

SEQ ID NO: 3638771 - RNA, 17 nt, Human
ucaaaagacauguugua

SEQ ID NO: 3638772 - RNA, 20 nt, Human
ucaaaagagaaaaacaaaac

SEQ ID NO: 3638773 - RNA, 20 nt, Human
ucaaaagagcacuuuaauaa

SEQ ID NO: 3638774 - RNA, 17 nt, Human
ucaaaagcuauuuaaag

SEQ ID NO: 3638775 - RNA, 21 nt, Human
ucaaaagggccaaagaaccaa

SEQ ID NO: 3638776 - RNA, 21 nt, Human
ucaaaagguauuauacaugug

SEQ ID NO: 3638777 - RNA, 13 nt, Human
ucaaaaggugccu

SEQ ID NO: 3638778 - RNA, 18 nt, Human
ucaaaaguauuuuccugu

SEQ ID NO: 3638779 - RNA, 13 nt, Human
ucaaaaguuccaa

SEQ ID NO: 3638780 - RNA, 14 nt, Human
ucaaaaguugaaau

SEQ ID NO: 3638781 - RNA, 16 nt, Human
ucaaaaguugaaauua

SEQ ID NO: 3638782 - RNA, 15 nt, Human
ucaaaaguuggacua

SEQ ID NO: 3638783 - RNA, 17 nt, Human
ucaaaaguuggacuaaa

SEQ ID NO: 3638784 - RNA, 20 nt, Human
ucaaaaguuggacuaaaugc

SEQ ID NO: 3638785 - RNA, 14 nt, Human
ucaaaaguuuguuu

SEQ ID NO: 3638786 - RNA, 20 nt, Human
ucaaaauaaaaaccaagaag

SEQ ID NO: 3638787 - RNA, 13 nt, Human
ucaaaauaauucu

SEQ ID NO: 3638788 - RNA, 14 nt, Human
ucaaaauaauuuua

SEQ ID NO: 3638789 - RNA, 21 nt, Human
ucaaaauaccaugccauuuaa

SEQ ID NO: 3638790 - RNA, 22 nt, Human
ucaaaauagggacuaucuaucu

SEQ ID NO: 3638791 - RNA, 18 nt, Human
ucaaaauaucaaguguug

SEQ ID NO: 3638792 - RNA, 12 nt, Human
ucaaaauauuua

SEQ ID NO: 3638793 - RNA, 13 nt, Human
ucaaaauauuuaa

SEQ ID NO: 3638794 - RNA, 14 nt, Human
ucaaaauauuuaaa

SEQ ID NO: 3638795 - RNA, 15 nt, Human
ucaaaauauuuaaaa

SEQ ID NO: 3638796 - RNA, 22 nt, Human
ucaaaauauuuaaaaaugucuu

SEQ ID NO: 3638797 - RNA, 16 nt, Human
ucaaaauauuuguaca

SEQ ID NO: 3638798 - RNA, 19 nt, Human
ucaaaauauuuguacauag

SEQ ID NO: 3638799 - RNA, 19 nt, Human
ucaaaauauuuuuaaaaga

SEQ ID NO: 3638800 - RNA, 16 nt, Human
ucaaaaucucuccacu

SEQ ID NO: 3638801 - RNA, 22 nt, Human
ucaaaaucucuccacuuucagc

SEQ ID NO: 3638802 - RNA, 12 nt, Human
ucaaaaugcuuu

SEQ ID NO: 3638803 - RNA, 17 nt, Human
ucaaaaugcuuuuuauu

SEQ ID NO: 3638804 - RNA, 14 nt, Human
ucaaaaugucuaag

SEQ ID NO: 3638805 - RNA, 14 nt, Human
ucaaaaugucugua

SEQ ID NO: 3638806 - RNA, 21 nt, Human
ucaaaauguuaucuucucaag

SEQ ID NO: 3638807 - RNA, 19 nt, Human
ucaaaauuguuacaaauug

SEQ ID NO: 3638808 - RNA, 13 nt, Human
ucaaaauuugcug

SEQ ID NO: 3638809 - RNA, 17 nt, Human
ucaaacaaagccagaag

SEQ ID NO: 3638810 - RNA, 13 nt, Human
ucaaacaagaaug

SEQ ID NO: 3638811 - RNA, 21 nt, Human
ucaaacaaugacaaagcagau

SEQ ID NO: 3638812 - RNA, 15 nt, Human
ucaaacacaaaugca

SEQ ID NO: 3638813 - RNA, 11 nt, Human
ucaaacacagu

SEQ ID NO: 3638814 - RNA, 20 nt, Human
ucaaacacaguuacacuugu

SEQ ID NO: 3638815 - RNA, 16 nt, Human
ucaaacacugcaggca

SEQ ID NO: 3638816 - RNA, 17 nt, Human
ucaaacacuugugacuu

SEQ ID NO: 3638817 - RNA, 22 nt, Human
ucaaacaguacacuaucuuaau

SEQ ID NO: 3638818 - RNA, 20 nt, Human
ucaaacaguagguuggcagu

SEQ ID NO: 3638819 - RNA, 22 nt, Human
ucaaacaugaaguguguuuccu

SEQ ID NO: 3638820 - RNA, 13 nt, Human
ucaaacauuuucu

SEQ ID NO: 3638821 - RNA, 15 nt, Human
ucaaacauuuugaaa

SEQ ID NO: 3638822 - RNA, 21 nt, Human
ucaaaccaguauacaagauaa

SEQ ID NO: 3638823 - RNA, 16 nt, Human
ucaaaccauaaacuuc

SEQ ID NO: 3638824 - RNA, 22 nt, Human
ucaaacccacgauuuucuccag

SEQ ID NO: 3638825 - RNA, 19 nt, Human
ucaaacccuagccuugcuu

SEQ ID NO: 3638826 - RNA, 20 nt, Human
ucaaacccuagccuugcuug

SEQ ID NO: 3638827 - RNA, 13 nt, Human
ucaaaccugugaa

SEQ ID NO: 3638828 - RNA, 13 nt, Human
ucaaacuaaaaga

SEQ ID NO: 3638829 - RNA, 21 nt, Human
ucaaacuacuuugcugcuaau

SEQ ID NO: 3638830 - RNA, 17 nt, Human
ucaaacuaucuggccau

SEQ ID NO: 3638831 - RNA, 22 nt, Human
ucaaacucaaugcuuuauuugu

SEQ ID NO: 3638832 - RNA, 21 nt, Human
ucaaacuccaagguucccuug

SEQ ID NO: 3638833 - RNA, 14 nt, Human
ucaaggcacucuag

SEQ ID NO: 3638834 - RNA, 15 nt, Human
ucaaggcacugccug

SEQ ID NO: 3638835 - RNA, 15 nt, Human
ucaaggccucccaca

SEQ ID NO: 3638836 - RNA, 15 nt, Human
ucaaggccugucccu

SEQ ID NO: 3638837 - RNA, 20 nt, Human
ucaaggcuuauauucaacca

SEQ ID NO: 3638838 - RNA, 14 nt, Human
ucaagggcuuuccu

SEQ ID NO: 3638839 - RNA, 21 nt, Human
ucaagggcuuuccugugccag

SEQ ID NO: 3638840 - RNA, 16 nt, Human
ucaagggggacugucu

SEQ ID NO: 3638841 - RNA, 20 nt, Human
ucaagguaaaauucuaaaua

SEQ ID NO: 3638842 - RNA, 15 nt, Human
ucaaggucacuguuu

SEQ ID NO: 3638843 - RNA, 19 nt, Human
ucaaggucacuguuuccug

SEQ ID NO: 3638844 - RNA, 14 nt, Human
ucaagguucuaacc

SEQ ID NO: 3638845 - RNA, 13 nt, Human
ucaagguuuuagg

SEQ ID NO: 3638846 - RNA, 23 nt, Human
ucaaguaagaagacaugaaccaa

SEQ ID NO: 3638847 - RNA, 15 nt, Human
ucaaguaauacaaac

SEQ ID NO: 3638848 - RNA, 15 nt, Human
ucaaguaauugugaa

SEQ ID NO: 3638849 - RNA, 24 nt, Human
ucaaguacauaaaguacauaacaa

SEQ ID NO: 3638850 - RNA, 21 nt, Human
ucaaguauuauaccuuuuuua

SEQ ID NO: 3638851 - RNA, 15 nt, Human
ucaagucaaauuaau

SEQ ID NO: 3638852 - RNA, 18 nt, Human
ucaagucaaucauuucuc

SEQ ID NO: 3638853 - RNA, 19 nt, Human
ucaaguccugccucuuaaa

SEQ ID NO: 3638854 - RNA, 14 nt, Human
ucaagucucugcug

SEQ ID NO: 3638855 - RNA, 17 nt, Human
ucaagucucugcuggcc

SEQ ID NO: 3638856 - RNA, 12 nt, Human
ucaagucuuccc

SEQ ID NO: 3638857 - RNA, 18 nt, Human
ucaagucuuucucuuucc

SEQ ID NO: 3638858 - RNA, 15 nt, Human
ucaagugaaaaagga

SEQ ID NO: 3638859 - RNA, 17 nt, Human
ucaagugauccucccac

SEQ ID NO: 3638860 - RNA, 17 nt, Human
ucaagugauucucaugc

SEQ ID NO: 3638861 - RNA, 20 nt, Human
ucaagugauucucaugccuc

SEQ ID NO: 3638862 - RNA, 22 nt, Human
ucaagugauucucaugccucag

SEQ ID NO: 3638863 - RNA, 16 nt, Human
ucaagugauucuccug

SEQ ID NO: 3638864 - RNA, 17 nt, Human
ucaagugauucuccugc

SEQ ID NO: 3638865 - RNA, 12 nt, Human
ucaagugccuua

SEQ ID NO: 3638866 - RNA, 21 nt, Human
ucaaguuauugacaaacucuc

SEQ ID NO: 3638867 - RNA, 17 nt, Human
ucaaguuauuguacagc

SEQ ID NO: 3638868 - RNA, 14 nt, Human
ucaaguucuaagau

SEQ ID NO: 3638869 - RNA, 19 nt, Human
ucaaguucuaagauucuaa

SEQ ID NO: 3638870 - RNA, 16 nt, Human
ucaaguugcacacuca

SEQ ID NO: 3638871 - RNA, 21 nt, Human
ucaaguugggagccugaaaua

SEQ ID NO: 3638872 - RNA, 17 nt, Human
ucaaguugucagguuau

SEQ ID NO: 3638873 - RNA, 17 nt, Human
ucaaguugugcuuguuu

SEQ ID NO: 3638874 - RNA, 15 nt, Human
ucaaguuuuaaaguu

SEQ ID NO: 3638875 - RNA, 16 nt, Human
ucaaguuuuucagaaa

SEQ ID NO: 3638876 - RNA, 13 nt, Human
ucaauaaaaucau

SEQ ID NO: 3638877 - RNA, 14 nt, Human
ucaauaaaaucaug

SEQ ID NO: 3638878 - RNA, 21 nt, Human
ucaauaaaaucauguacauuu

SEQ ID NO: 3638879 - RNA, 21 nt, Human
ucaauaaaauccauacauuug

SEQ ID NO: 3638880 - RNA, 19 nt, Human
ucaauaaaaugugauuuuu

SEQ ID NO: 3638881 - RNA, 23 nt, Human
ucaauaaaaugugauuuuucuga

SEQ ID NO: 3638882 - RNA, 15 nt, Human
ucaauaaacagcagg

SEQ ID NO: 3638883 - RNA, 19 nt, Human
ucaauaaacuaaagaaaaa

SEQ ID NO: 3638884 - RNA, 21 nt, Human
ucaauaaagaaaacuuccaua

SEQ ID NO: 3638885 - RNA, 11 nt, Human
ucaauaaagua

SEQ ID NO: 3638886 - RNA, 12 nt, Human
ucaauaaaguau

SEQ ID NO: 3638887 - RNA, 17 nt, Human
ucaauaaaguaucuaca

SEQ ID NO: 3638888 - RNA, 14 nt, Human
ucaauaaaguauuu

SEQ ID NO: 3638889 - RNA, 22 nt, Human
ucaauaaaguauuuaauuagug

SEQ ID NO: 3638890 - RNA, 12 nt, Human
ucaauaaaguuu

SEQ ID NO: 3638891 - RNA, 15 nt, Human
ucaauaaaguuugau

SEQ ID NO: 3638892 - RNA, 19 nt, Human
ucaauaaaguuugaucuuc

SEQ ID NO: 3638893 - RNA, 16 nt, Human
ucaauaacagccgcuc

SEQ ID NO: 3638894 - RNA, 20 nt, Human
ucaauaacagccgcuccaga

SEQ ID NO: 3638895 - RNA, 14 nt, Human
ucaauaacgaaguu

SEQ ID NO: 3638896 - RNA, 14 nt, Human
ucaauaagccuugu

SEQ ID NO: 3638897 - RNA, 14 nt, Human
ucaauacacuaguu

SEQ ID NO: 3638898 - RNA, 22 nt, Human
ucaauagccacuaaccuugccu

SEQ ID NO: 3638899 - RNA, 17 nt, Human
ucaauagcguguguaga

SEQ ID NO: 3638900 - RNA, 13 nt, Human
ucaauaggaaaaa

SEQ ID NO: 3638901 - RNA, 22 nt, Human
ucaauaggaaaaacugauuuuu

SEQ ID NO: 3638902 - RNA, 13 nt, Human
ucaauaguaauau

SEQ ID NO: 3638903 - RNA, 22 nt, Human
ucaauauaauguuuuuaauauu

SEQ ID NO: 3638904 - RNA, 20 nt, Human
ucaauauauugaacuuuugu

SEQ ID NO: 3638905 - RNA, 14 nt, Human
ucaauauccuuugc

SEQ ID NO: 3638906 - RNA, 19 nt, Human
ucaauaucuaauauauaug

SEQ ID NO: 3638907 - RNA, 21 nt, Human
ucaauaucuaauauauaugaa

SEQ ID NO: 3638908 - RNA, 14 nt, Human
ucaauauuaaauac

SEQ ID NO: 3638909 - RNA, 17 nt, Human
ucaauauuaaauacaga

SEQ ID NO: 3638910 - RNA, 16 nt, Human
ucaauauucaauaaag

SEQ ID NO: 3638911 - RNA, 18 nt, Human
ucaauauuccugaaugaa

SEQ ID NO: 3638912 - RNA, 15 nt, Human
ucaauauugucauuc

SEQ ID NO: 3638913 - RNA, 17 nt, Human
ucaauauuuaaacaugg

SEQ ID NO: 3638914 - RNA, 13 nt, Human
ucaauauuuauua

SEQ ID NO: 3638915 - RNA, 19 nt, Human
ucaauauuucagauaauca

SEQ ID NO: 3638916 - RNA, 16 nt, Human
ucaauauuuuccauga

SEQ ID NO: 3638917 - RNA, 17 nt, Human
ucaauauuuuccaugaa

SEQ ID NO: 3638918 - RNA, 18 nt, Human
ucaauauuuuccaugaaa

SEQ ID NO: 3638919 - RNA, 16 nt, Human
ucaauauuuuuagaua

SEQ ID NO: 3638920 - RNA, 12 nt, Human
ucaaucacagcu

SEQ ID NO: 3638921 - RNA, 15 nt, Human
ucaaucaguauaauu

SEQ ID NO: 3638922 - RNA, 20 nt, Human
ucaaucaucugugugaaaau

SEQ ID NO: 3638923 - RNA, 14 nt, Human
ucaaucaugucagu

SEQ ID NO: 3638924 - RNA, 12 nt, Human
ucaaucauuucu

SEQ ID NO: 3638925 - RNA, 13 nt, Human
ucaaucauuucua

SEQ ID NO: 3638926 - RNA, 16 nt, Human
ucaaucauuucuauua

SEQ ID NO: 3638927 - RNA, 14 nt, Human
ucaaucauuucuca

SEQ ID NO: 3638928 - RNA, 18 nt, Human
ucaauccagaugguggga

SEQ ID NO: 3638929 - RNA, 13 nt, Human
ucaaucccaaaag

SEQ ID NO: 3638930 - RNA, 13 nt, Human
ucaaucccagccu

SEQ ID NO: 3638931 - RNA, 22 nt, Human
ucaauccccucauucaggaaaa

SEQ ID NO: 3638932 - RNA, 22 nt, Human
ucaauccuaauuucuccucccu

SEQ ID NO: 3638933 - RNA, 18 nt, Human
ucaaucucguauagaagu

SEQ ID NO: 3638934 - RNA, 21 nt, Human
ucaaucucguauagaagucuu

SEQ ID NO: 3638935 - RNA, 22 nt, Human
ucaaucucguauagaagucuuc

SEQ ID NO: 3638936 - RNA, 19 nt, Human
ucaaucuggauucauauuu

SEQ ID NO: 3638937 - RNA, 16 nt, Human
ucaaucuugcauguaa

SEQ ID NO: 3638938 - RNA, 18 nt, Human
ucaaucuugcauguaacg

SEQ ID NO: 3638939 - RNA, 15 nt, Human
ucaaugaauauugaa

SEQ ID NO: 3638940 - RNA, 15 nt, Human
ucaaugacagagccu

SEQ ID NO: 3638941 - RNA, 14 nt, Human
ucaaugacaugaau

SEQ ID NO: 3638942 - RNA, 22 nt, Human
ucaaugacaugaauuuuagcuu

SEQ ID NO: 3638943 - RNA, 13 nt, Human
ucaaugagagcau

SEQ ID NO: 3638944 - RNA, 16 nt, Human
ucaaugagguguccaa

SEQ ID NO: 3638945 - RNA, 17 nt, Human
ucaaugagguguccaac

SEQ ID NO: 3638946 - RNA, 11 nt, Human
ucaaugaucua

SEQ ID NO: 3638947 - RNA, 21 nt, Human
ucaaugaucuagguuuaacuc

SEQ ID NO: 3638948 - RNA, 18 nt, Human
ucaaugcacugacauugu

SEQ ID NO: 3638949 - RNA, 13 nt, Human
ucaaugcagccag

SEQ ID NO: 3638950 - RNA, 17 nt, Human
ucaaugcuauaacuaug

SEQ ID NO: 3638951 - RNA, 12 nt, Human
ucaaugcuauuu

SEQ ID NO: 3638952 - RNA, 15 nt, Human
ucaaugcuauuuuug

SEQ ID NO: 3638953 - RNA, 13 nt, Human
ucaaugcucauaa

SEQ ID NO: 3638954 - RNA, 17 nt, Human
ucaaugcuuuauuugua

SEQ ID NO: 3638955 - RNA, 14 nt, Human
ucaaugggcaauga

SEQ ID NO: 3638956 - RNA, 17 nt, Human
ucaaugguuugcaagga

SEQ ID NO: 3638957 - RNA, 22 nt, Human
ucaauguacuaggauacugcug

SEQ ID NO: 3638958 - RNA, 15 nt, Human
ucaaugucaaguacc

SEQ ID NO: 3638959 - RNA, 11 nt, Human
ucaaugucacu

SEQ ID NO: 3638960 - RNA, 12 nt, Human
ucaaugugaaaa

SEQ ID NO: 3638961 - RNA, 22 nt, Human
ucaauguguauaaauugucuuu

SEQ ID NO: 3638962 - RNA, 12 nt, Human
ucaauguucauu

SEQ ID NO: 3638963 - RNA, 13 nt, Human
ucaauguucauug

SEQ ID NO: 3638964 - RNA, 16 nt, Human
ucaauguucauuguaa

SEQ ID NO: 3638965 - RNA, 24 nt, Human
ucaauguucauuguaauguuacug

SEQ ID NO: 3638966 - RNA, 22 nt, Human
ucaauguuuaugcaaggaagga

SEQ ID NO: 3638967 - RNA, 23 nt, Human
ucaauguuuaugcaaggaaggaa

SEQ ID NO: 3638968 - RNA, 23 nt, Human
ucaauguuugaggagcauguuuu

SEQ ID NO: 3638969 - RNA, 13 nt, Human
ucaauuaaacgga

SEQ ID NO: 3638970 - RNA, 15 nt, Human
ucaauuaaacggauu

SEQ ID NO: 3638971 - RNA, 18 nt, Human
ucaauuaaacggauuauu

SEQ ID NO: 3638972 - RNA, 19 nt, Human
ucaauuaaacggauuauuu

SEQ ID NO: 3638973 - RNA, 17 nt, Human
ucaauuaaagaaauaau

SEQ ID NO: 3638974 - RNA, 19 nt, Human
ucaauuaaagaaauaauuu

SEQ ID NO: 3638975 - RNA, 16 nt, Human
ucaauuaaauguaggu

SEQ ID NO: 3638976 - RNA, 11 nt, Human
ucaauuaauaa

SEQ ID NO: 3638977 - RNA, 21 nt, Human
ucaauuaccagaaagauaaca

SEQ ID NO: 3638978 - RNA, 16 nt, Human
ucaauuacucuauaau

SEQ ID NO: 3638979 - RNA, 20 nt, Human
ucacccccucccacccccag

SEQ ID NO: 3638980 - RNA, 13 nt, Human
ucacccccucggg

SEQ ID NO: 3638981 - RNA, 14 nt, Human
ucacccccucgggu

SEQ ID NO: 3638982 - RNA, 18 nt, Human
ucacccccuucuccaucc

SEQ ID NO: 3638983 - RNA, 16 nt, Human
ucaccccgaggcccug

SEQ ID NO: 3638984 - RNA, 18 nt, Human
ucaccccgaggcccugca

SEQ ID NO: 3638985 - RNA, 21 nt, Human
ucaccccgcuguaagcuccuu

SEQ ID NO: 3638986 - RNA, 17 nt, Human
ucaccccggcaggcccu

SEQ ID NO: 3638987 - RNA, 18 nt, Human
ucaccccggcaggcccug

SEQ ID NO: 3638988 - RNA, 23 nt, Human
ucaccccggcaggcccugcagug

SEQ ID NO: 3638989 - RNA, 12 nt, Human
ucaccccuccac

SEQ ID NO: 3638990 - RNA, 14 nt, Human
ucaccccugcccug

SEQ ID NO: 3638991 - RNA, 18 nt, Human
ucaccccugguucucauc

SEQ ID NO: 3638992 - RNA, 19 nt, Human
ucaccccugguucucaucu

SEQ ID NO: 3638993 - RNA, 17 nt, Human
ucaccccuguccucacu

SEQ ID NO: 3638994 - RNA, 15 nt, Human
ucaccccuguuucug

SEQ ID NO: 3638995 - RNA, 16 nt, Human
ucacccgaggcugccc

SEQ ID NO: 3638996 - RNA, 18 nt, Human
ucacccgcuaagagggag

SEQ ID NO: 3638997 - RNA, 16 nt, Human
ucacccggugaccucu

SEQ ID NO: 3638998 - RNA, 14 nt, Human
ucacccuccaccuc

SEQ ID NO: 3638999 - RNA, 20 nt, Human
ucacccuccaccucuucacc

SEQ ID NO: 3639000 - RNA, 18 nt, Human
ucacccucguuuccagug

SEQ ID NO: 3639001 - RNA, 19 nt, Human
ucacccugagccccuuccu

SEQ ID NO: 3639002 - RNA, 21 nt, Human
ucacccugagccccuuccuug

SEQ ID NO: 3639003 - RNA, 19 nt, Human
ucacccuuaacccaaggag

SEQ ID NO: 3639004 - RNA, 13 nt, Human
ucacccuuguccu

SEQ ID NO: 3639005 - RNA, 19 nt, Human
ucaccgaaaacguggcugc

SEQ ID NO: 3639006 - RNA, 23 nt, Human
ucaccgaaaacguggcugcuuca

SEQ ID NO: 3639007 - RNA, 16 nt, Human
ucaccgagugggggca

SEQ ID NO: 3639008 - RNA, 19 nt, Human
ucaccggccgauggagaca

SEQ ID NO: 3639009 - RNA, 22 nt, Human
ucaccggcucucaccuggcccu

SEQ ID NO: 3639010 - RNA, 21 nt, Human
ucaccguggaccuuccugcca

SEQ ID NO: 3639011 - RNA, 14 nt, Human
ucaccuaacucaua

SEQ ID NO: 3639012 - RNA, 17 nt, Human
ucaccuaagagauucug

SEQ ID NO: 3639013 - RNA, 18 nt, Human
ucaccuagaaacuuguua

SEQ ID NO: 3639014 - RNA, 13 nt, Human
ucaccuagagcca

SEQ ID NO: 3639015 - RNA, 14 nt, Human
ucaccuaggaagcc

SEQ ID NO: 3639016 - RNA, 17 nt, Human
ucaccuaggaagccuca

SEQ ID NO: 3639017 - RNA, 20 nt, Human
ucaccuaggaagccucagau

SEQ ID NO: 3639018 - RNA, 23 nt, Human
ucaccuaggaagccucagauucc

SEQ ID NO: 3639019 - RNA, 16 nt, Human
ucaccucacucagcac

SEQ ID NO: 3639020 - RNA, 19 nt, Human
ucaccucacucagcaccac

SEQ ID NO: 3639021 - RNA, 12 nt, Human
ucaccucagccu

SEQ ID NO: 3639022 - RNA, 13 nt, Human
ucaccucauggaa

SEQ ID NO: 3639023 - RNA, 14 nt, Human
ucaccucauggaau

SEQ ID NO: 3639024 - RNA, 21 nt, Human
ucaccuccggucgugucucug

SEQ ID NO: 3639025 - RNA, 22 nt, Human
ucaccuccucuaagguugggca

SEQ ID NO: 3639026 - RNA, 12 nt, Human
ucaccuccugcu

SEQ ID NO: 3639027 - RNA, 13 nt, Human
ucaccuccugcug

SEQ ID NO: 3639028 - RNA, 14 nt, Human
ucaccuccugcugg

SEQ ID NO: 3639029 - RNA, 14 nt, Human
ucaccuccuucaau

SEQ ID NO: 3639030 - RNA, 22 nt, Human
ucaccucuagguccccauacuc

SEQ ID NO: 3639031 - RNA, 13 nt, Human
ucaccucucccac

SEQ ID NO: 3639032 - RNA, 13 nt, Human
ucaccucugccuc

SEQ ID NO: 3639033 - RNA, 18 nt, Human
ucaccucuggacuggcua

SEQ ID NO: 3639034 - RNA, 19 nt, Human
ucaccucuggacuggcuag

SEQ ID NO: 3639035 - RNA, 23 nt, Human
ucaccucuuaugcacaccuccca

SEQ ID NO: 3639036 - RNA, 23 nt, Human
ucaccugaagacucauucuucug

SEQ ID NO: 3639037 - RNA, 23 nt, Human
ucaccugagcccggaugcuucuc

SEQ ID NO: 3639038 - RNA, 17 nt, Human
ucaccugaggucgggag

SEQ ID NO: 3639039 - RNA, 19 nt, Human
ucaccugagucacccuacc

SEQ ID NO: 3639040 - RNA, 21 nt, Human
ucaccugauucaacuaaaaaa

SEQ ID NO: 3639041 - RNA, 21 nt, Human
ucaccugcaaagcucuguggc

SEQ ID NO: 3639042 - RNA, 13 nt, Human
ucaccugcacuaa

SEQ ID NO: 3639043 - RNA, 15 nt, Human
ucaccugccccucaa

SEQ ID NO: 3639044 - RNA, 16 nt, Human
ucaccugccccucaac

SEQ ID NO: 3639045 - RNA, 20 nt, Human
ucaccugcuggccccucacc

SEQ ID NO: 3639046 - RNA, 23 nt, Human
ucaccuggcuuguuuauuuugug

SEQ ID NO: 3639047 - RNA, 17 nt, Human
ucaccugggcaccuggg

SEQ ID NO: 3639048 - RNA, 18 nt, Human
ucaccuggggcugcuggc

SEQ ID NO: 3639049 - RNA, 20 nt, Human
ucaccuggggcugcuggccu

SEQ ID NO: 3639050 - RNA, 17 nt, Human
ucaccuguaaaacuuua

SEQ ID NO: 3639051 - RNA, 17 nt, Human
ucaccuguaaaccugag

SEQ ID NO: 3639052 - RNA, 15 nt, Human
ucaccuguacucuuc

SEQ ID NO: 3639053 - RNA, 21 nt, Human
ucaccugugcuucgggcccuu

SEQ ID NO: 3639054 - RNA, 20 nt, Human
ucaccuguugcuuacaauuu

SEQ ID NO: 3639055 - RNA, 21 nt, Human
ucaccuguuuuuaagcuguuu

SEQ ID NO: 3639056 - RNA, 19 nt, Human
ucaccuuagaccaccaagc

SEQ ID NO: 3639057 - RNA, 21 nt, Human
ucaccuuagaccaccaagccu

SEQ ID NO: 3639058 - RNA, 13 nt, Human
ucaccuucccuug

SEQ ID NO: 3639059 - RNA, 16 nt, Human
ucaccuucccuugcca

SEQ ID NO: 3639060 - RNA, 21 nt, Human
ucaccuucguuuacuaugccu

SEQ ID NO: 3639061 - RNA, 18 nt, Human
ucaccuugcaacacacag

SEQ ID NO: 3639062 - RNA, 19 nt, Human
ucaccuugcaacacacaga

SEQ ID NO: 3639063 - RNA, 23 nt, Human
ucaccuuggcaccagacacccag

SEQ ID NO: 3639064 - RNA, 12 nt, Human
ucaccuuuguag

SEQ ID NO: 3639065 - RNA, 18 nt, Human
ucaccuuuguccccaccg

SEQ ID NO: 3639066 - RNA, 16 nt, Human
ucaccuuuuaaauccu

SEQ ID NO: 3639067 - RNA, 18 nt, Human
ucaccuuuuaaauccugu

SEQ ID NO: 3639068 - RNA, 23 nt, Human
ucaccuuuuaaauccuguugaaa

SEQ ID NO: 3639069 - RNA, 13 nt, Human
ucacgacgcugca

SEQ ID NO: 3639070 - RNA, 16 nt, Human
ucacgcaacuugaaau

SEQ ID NO: 3639071 - RNA, 15 nt, Human
ucacgcaccucccau

SEQ ID NO: 3639072 - RNA, 17 nt, Human
ucacgcaccucccaucc

SEQ ID NO: 3639073 - RNA, 14 nt, Human
ucacgcaugcagug

SEQ ID NO: 3639074 - RNA, 22 nt, Human
ucacgccacugcacuccagccu

SEQ ID NO: 3639075 - RNA, 18 nt, Human
ucacgccagacuucccac

SEQ ID NO: 3639076 - RNA, 20 nt, Human
ucacgccuguaaucccagca

SEQ ID NO: 3639077 - RNA, 16 nt, Human
ucacgcuccccgccug

SEQ ID NO: 3639078 - RNA, 14 nt, Human
ucacgcuucacagu

SEQ ID NO: 3639079 - RNA, 17 nt, Human
ucacgcuuuccugaauc

SEQ ID NO: 3639080 - RNA, 14 nt, Human
ucacggaagagccu

SEQ ID NO: 3639081 - RNA, 16 nt, Human
ucacggaaguuuucaa

SEQ ID NO: 3639082 - RNA, 18 nt, Human
ucacggagauaugaagag

SEQ ID NO: 3639083 - RNA, 22 nt, Human
ucacggcaggacaacgaggaag

SEQ ID NO: 3639084 - RNA, 23 nt, Human
ucacggcaggacaacgaggaagc

SEQ ID NO: 3639085 - RNA, 13 nt, Human
ucacggcucacug

SEQ ID NO: 3639086 - RNA, 14 nt, Human
ucacggcugcgcac

SEQ ID NO: 3639087 - RNA, 20 nt, Human
ucacgggcaugggcacuccc

SEQ ID NO: 3639088 - RNA, 17 nt, Human
ucacggugccagguuuu

SEQ ID NO: 3639089 - RNA, 18 nt, Human
ucacguaaagcuagaaau

SEQ ID NO: 3639090 - RNA, 14 nt, Human
ucacgucauaggaa

SEQ ID NO: 3639091 - RNA, 17 nt, Human
ucacgugcgcugggcac

SEQ ID NO: 3639092 - RNA, 17 nt, Human
ucacgugguccuaaucu

SEQ ID NO: 3639093 - RNA, 18 nt, Human
ucacguguacuggcuccu

SEQ ID NO: 3639094 - RNA, 17 nt, Human
ucacguguaguguccau

SEQ ID NO: 3639095 - RNA, 12 nt, Human
ucacguguguga

SEQ ID NO: 3639096 - RNA, 17 nt, Human
ucacgugugugacucag

SEQ ID NO: 3639097 - RNA, 23 nt, Human
ucacguuuuguuuugugccaacc

SEQ ID NO: 3639098 - RNA, 21 nt, Human
ucacuaaagcaugaaauguga

SEQ ID NO: 3639099 - RNA, 19 nt, Human
ucacuaacauuauauugca

SEQ ID NO: 3639100 - RNA, 22 nt, Human
ucacuaacauuauauugcaaug

SEQ ID NO: 3639101 - RNA, 15 nt, Human
ucacuaauacacagu

SEQ ID NO: 3639102 - RNA, 19 nt, Human
ucacuaauacuaauucauu

SEQ ID NO: 3639103 - RNA, 14 nt, Human
ucacuaauucauua

SEQ ID NO: 3639104 - RNA, 22 nt, Human
ucacuacccaucgguguccauu

SEQ ID NO: 3639105 - RNA, 20 nt, Human
ucacuacccuauucucucuu

SEQ ID NO: 3639106 - RNA, 15 nt, Human
ucacuaccuccucag

SEQ ID NO: 3639107 - RNA, 16 nt, Human
ucacuaccuccucagg

SEQ ID NO: 3639108 - RNA, 18 nt, Human
ucacuaccuccucaggga

SEQ ID NO: 3639109 - RNA, 21 nt, Human
ucacuacucacagucucuuua

SEQ ID NO: 3639110 - RNA, 18 nt, Human
ucacuagcccuccuuuuu

SEQ ID NO: 3639111 - RNA, 21 nt, Human
ucacuagcccuccuuuuucca

SEQ ID NO: 3639112 - RNA, 15 nt, Human
ucacuagcuuugccu

SEQ ID NO: 3639113 - RNA, 16 nt, Human
ucacuaggcuucuggu

SEQ ID NO: 3639114 - RNA, 22 nt, Human
ucacuagugaccccuucccugu

SEQ ID NO: 3639115 - RNA, 17 nt, Human
ucacuauaaaugguguu

SEQ ID NO: 3639116 - RNA, 22 nt, Human
ucacuaugaaucuauuauacug

SEQ ID NO: 3639117 - RNA, 19 nt, Human
ucacuauggugccaaugga

SEQ ID NO: 3639118 - RNA, 20 nt, Human
ucacuauguugcccaggcag

SEQ ID NO: 3639119 - RNA, 18 nt, Human
ucacuauucaaguauuag

SEQ ID NO: 3639120 - RNA, 17 nt, Human
ucacuauuuccuuuaua

SEQ ID NO: 3639121 - RNA, 18 nt, Human
ucacuauuuccuuuauaa

SEQ ID NO: 3639122 - RNA, 18 nt, Human
ucacuauuuuuauuuaua

SEQ ID NO: 3639123 - RNA, 18 nt, Human
ucauuuaucuauaauuua

SEQ ID NO: 3639124 - RNA, 17 nt, Human
ucauuuaugauacaaaa

SEQ ID NO: 3639125 - RNA, 20 nt, Human
ucauuuauuuuaaaaaauga

SEQ ID NO: 3639126 - RNA, 23 nt, Human
ucauuucaccccucccuuucucc

SEQ ID NO: 3639127 - RNA, 12 nt, Human
ucauuucaccug

SEQ ID NO: 3639128 - RNA, 21 nt, Human
ucauuucacuguagcucuaaa

SEQ ID NO: 3639129 - RNA, 11 nt, Human
ucauuucaucu

SEQ ID NO: 3639130 - RNA, 14 nt, Human
ucauuucaucucau

SEQ ID NO: 3639131 - RNA, 15 nt, Human
ucauuucaucucauu

SEQ ID NO: 3639132 - RNA, 16 nt, Human
ucauuucaucucauuu

SEQ ID NO: 3639133 - RNA, 15 nt, Human
ucauuucaugcucug

SEQ ID NO: 3639134 - RNA, 14 nt, Human
ucauuucauuguau

SEQ ID NO: 3639135 - RNA, 13 nt, Human
ucauuuccaagca

SEQ ID NO: 3639136 - RNA, 21 nt, Human
ucauuuccauguaugcauaau

SEQ ID NO: 3639137 - RNA, 22 nt, Human
ucauuuccccauaacucaaugg

SEQ ID NO: 3639138 - RNA, 12 nt, Human
ucauuuccugcc

SEQ ID NO: 3639139 - RNA, 14 nt, Human
ucauuuccugcccu

SEQ ID NO: 3639140 - RNA, 15 nt, Human
ucauuuccugcccuu

SEQ ID NO: 3639141 - RNA, 13 nt, Human
ucauuucuauuuc

SEQ ID NO: 3639142 - RNA, 17 nt, Human
ucauuucuauuucuccu

SEQ ID NO: 3639143 - RNA, 17 nt, Human
ucauuucucacugugua

SEQ ID NO: 3639144 - RNA, 14 nt, Human
ucauuucucaucca

SEQ ID NO: 3639145 - RNA, 12 nt, Human
ucauuucugauu

SEQ ID NO: 3639146 - RNA, 16 nt, Human
ucauuucugcaucagc

SEQ ID NO: 3639147 - RNA, 22 nt, Human
ucauuucugcaucagcugcuga

SEQ ID NO: 3639148 - RNA, 16 nt, Human
ucauuugaacaacuag

SEQ ID NO: 3639149 - RNA, 18 nt, Human
ucauuugacuaagagucu

SEQ ID NO: 3639150 - RNA, 15 nt, Human
ucauuugagucucuu

SEQ ID NO: 3639151 - RNA, 14 nt, Human
ucauuugcuuugga

SEQ ID NO: 3639152 - RNA, 23 nt, Human
ucauuugggguagcuagaggaac

SEQ ID NO: 3639153 - RNA, 20 nt, Human
ucauuugguucauuaauucu

SEQ ID NO: 3639154 - RNA, 16 nt, Human
ucauuugucacacacu

SEQ ID NO: 3639155 - RNA, 22 nt, Human
ucauuuguggguuuuuauuucc

SEQ ID NO: 3639156 - RNA, 22 nt, Human
ucauuuguuaaaauuaucaaua

SEQ ID NO: 3639157 - RNA, 12 nt, Human
ucauuuguugug

SEQ ID NO: 3639158 - RNA, 20 nt, Human
ucauuuguugugaugucuuu

SEQ ID NO: 3639159 - RNA, 22 nt, Human
ucauuuguugugaugucuuuuc

SEQ ID NO: 3639160 - RNA, 13 nt, Human
ucauuuguuuaaa

SEQ ID NO: 3639161 - RNA, 14 nt, Human
ucauuuuacaguua

SEQ ID NO: 3639162 - RNA, 22 nt, Human
ucauuuuacaguuacuuuuccu

SEQ ID NO: 3639163 - RNA, 15 nt, Human
ucauuuuauauugaa

SEQ ID NO: 3639164 - RNA, 15 nt, Human
ucauuuuauguuaag

SEQ ID NO: 3639165 - RNA, 12 nt, Human
ucauuuucauua

SEQ ID NO: 3639166 - RNA, 14 nt, Human
ucauuuucuagaua

SEQ ID NO: 3639167 - RNA, 20 nt, Human
ucauuuucuagauacaauaa

SEQ ID NO: 3639168 - RNA, 16 nt, Human
ucauuuucuauaacag

SEQ ID NO: 3639169 - RNA, 14 nt, Human
ucauuuucugcaag

SEQ ID NO: 3639170 - RNA, 15 nt, Human
ucauuuucugcauuu

SEQ ID NO: 3639171 - RNA, 17 nt, Human
ucauuuugaagcuaauu

SEQ ID NO: 3639172 - RNA, 15 nt, Human
ucauuuugagcugaa

SEQ ID NO: 3639173 - RNA, 12 nt, Human
ucauuuugcuuu

SEQ ID NO: 3639174 - RNA, 13 nt, Human
ucauuuugcuuua

SEQ ID NO: 3639175 - RNA, 23 nt, Human
ucauuuugggacaauuguuuuaa

SEQ ID NO: 3639176 - RNA, 17 nt, Human
ucauuuuguaacaaaug

SEQ ID NO: 3639177 - RNA, 17 nt, Human
ucauuuuguguugaaga

SEQ ID NO: 3639178 - RNA, 19 nt, Human
ucauuuuguguugaagagc

SEQ ID NO: 3639179 - RNA, 21 nt, Human
ucauuuuguugcuuuugugaa

SEQ ID NO: 3639180 - RNA, 18 nt, Human
ucauuuuuaaucaugaaa

SEQ ID NO: 3639181 - RNA, 19 nt, Human
ucauuuuuaaucaugaaau

SEQ ID NO: 3639182 - RNA, 12 nt, Human
ucauuuuuacaa

SEQ ID NO: 3639183 - RNA, 18 nt, Human
ucauuuuucagaccuuuu

SEQ ID NO: 3639184 - RNA, 22 nt, Human
ucauuuuugaaacugcauuugu

SEQ ID NO: 3639185 - RNA, 17 nt, Human
ucauuuuugccauacau

SEQ ID NO: 3639186 - RNA, 21 nt, Human
ucauuuuuguacaguuugcug

SEQ ID NO: 3639187 - RNA, 23 nt, Human
ucauuuuuguacaguuugcugua

SEQ ID NO: 3639188 - RNA, 19 nt, Human
ucauuuuuguuucuaccuc

SEQ ID NO: 3639189 - RNA, 20 nt, Human
ucauuuuuguuucuaccucc

SEQ ID NO: 3639190 - RNA, 21 nt, Human
ucauuuuuuauauauaugcau

SEQ ID NO: 3639191 - RNA, 22 nt, Human
ucauuuuuuauauauaugcaua

SEQ ID NO: 3639192 - RNA, 13 nt, Human
ucauuuuuuccug

SEQ ID NO: 3639193 - RNA, 17 nt, Human
ucauuuuuuccuguuug

SEQ ID NO: 3639194 - RNA, 13 nt, Human
ucauuuuuucuua

SEQ ID NO: 3639195 - RNA, 13 nt, Human
ucauuuuuuuuaa

SEQ ID NO: 3639196 - RNA, 22 nt, Human
ucauuuuuuuucuuugaauaaa

SEQ ID NO: 3639197 - RNA, 15 nt, Human
uccaaaaaaauacug

SEQ ID NO: 3639198 - RNA, 22 nt, Human
uccaaaaagauuuucagaaaau

SEQ ID NO: 3639199 - RNA, 15 nt, Human
uccaaaaaucugccu

SEQ ID NO: 3639200 - RNA, 21 nt, Human
uccaaaaauguguaagaacaa

SEQ ID NO: 3639201 - RNA, 19 nt, Human
uccaaaaccgccagcucug

SEQ ID NO: 3639202 - RNA, 20 nt, Human
uccaaaaccgccagcucugu

SEQ ID NO: 3639203 - RNA, 15 nt, Human
uccaaaagaagcccc

SEQ ID NO: 3639204 - RNA, 18 nt, Human
uccaaaagaagcccccag

SEQ ID NO: 3639205 - RNA, 16 nt, Human
uccaaaagauugcuga

SEQ ID NO: 3639206 - RNA, 22 nt, Human
uccaaaagauugcugaaauuuu

SEQ ID NO: 3639207 - RNA, 19 nt, Human
uccaaaaguggccucuuug

SEQ ID NO: 3639208 - RNA, 17 nt, Human
uccaaaauaaaacuuuu

SEQ ID NO: 3639209 - RNA, 16 nt, Human
uccaaaaugugccuau

SEQ ID NO: 3639210 - RNA, 12 nt, Human
uccaaaauucuu

SEQ ID NO: 3639211 - RNA, 14 nt, Human
uccaaaauuuuuca

SEQ ID NO: 3639212 - RNA, 14 nt, Human
uccaaacaggcuca

SEQ ID NO: 3639213 - RNA, 15 nt, Human
uccaaacauguauuu

SEQ ID NO: 3639214 - RNA, 13 nt, Human
uccaaaccuucac

SEQ ID NO: 3639215 - RNA, 14 nt, Human
uccaaaccuucaca

SEQ ID NO: 3639216 - RNA, 12 nt, Human
uccaaacuaauu

SEQ ID NO: 3639217 - RNA, 23 nt, Human
uccaaacugacucuuaagaagac

SEQ ID NO: 3639218 - RNA, 16 nt, Human
uccaaacuggaaugag

SEQ ID NO: 3639219 - RNA, 12 nt, Human
uccaaagaaaug

SEQ ID NO: 3639220 - RNA, 17 nt, Human
uccaaagaaauguaagg

SEQ ID NO: 3639221 - RNA, 13 nt, Human
uccaaagagaaaa

SEQ ID NO: 3639222 - RNA, 13 nt, Human
uccaaagaggcug

SEQ ID NO: 3639223 - RNA, 15 nt, Human
uccaaagaggcugcc

SEQ ID NO: 3639224 - RNA, 12 nt, Human
uccaaagcagag

SEQ ID NO: 3639225 - RNA, 15 nt, Human
uccaaagcagagagc

SEQ ID NO: 3639226 - RNA, 13 nt, Human
uccaaagcagggu

SEQ ID NO: 3639227 - RNA, 13 nt, Human
uccaaagcuuuau

SEQ ID NO: 3639228 - RNA, 20 nt, Human
uccaaagcuuuauuaccagu

SEQ ID NO: 3639229 - RNA, 21 nt, Human
uccaaagcuuuauuaccagug

SEQ ID NO: 3639230 - RNA, 23 nt, Human
uccaaaggaagucuaggagcugg

SEQ ID NO: 3639231 - RNA, 19 nt, Human
uccaaaggaggcuggcagg

SEQ ID NO: 3639232 - RNA, 21 nt, Human
uccaaaggcauuuuauugcuu

SEQ ID NO: 3639233 - RNA, 21 nt, Human
uccaaaggccauggagagcug

SEQ ID NO: 3639234 - RNA, 23 nt, Human
uccaaaggccauggagagcugga

SEQ ID NO: 3639235 - RNA, 15 nt, Human
uccaaaguaaaauug

SEQ ID NO: 3639236 - RNA, 17 nt, Human
uccaaagucauaauugc

SEQ ID NO: 3639237 - RNA, 18 nt, Human
uccaaagucauaauugca

SEQ ID NO: 3639238 - RNA, 13 nt, Human
uccaaagucucua

SEQ ID NO: 3639239 - RNA, 10 nt, Human
uccaaauaaa

SEQ ID NO: 3639240 - RNA, 17 nt, Human
uccaaauaaaaacuaaa

SEQ ID NO: 3639241 - RNA, 15 nt, Human
uccaaauaaaauguu

SEQ ID NO: 3639242 - RNA, 20 nt, Human
uccaaauaauauguuuccuu

SEQ ID NO: 3639243 - RNA, 15 nt, Human
uccaaaugcagcuuu

SEQ ID NO: 3639244 - RNA, 19 nt, Human
uccaaauggagaagcugca

SEQ ID NO: 3639245 - RNA, 20 nt, Human
uccaaauggagaagcugcag

SEQ ID NO: 3639246 - RNA, 18 nt, Human
uccaaauggcgucuggaa

SEQ ID NO: 3639247 - RNA, 17 nt, Human
uccaaauguccuccaga

SEQ ID NO: 3639248 - RNA, 12 nt, Human
uccaaauucagu

SEQ ID NO: 3639249 - RNA, 23 nt, Human
uccaaauugugcuucuccccaga

SEQ ID NO: 3639250 - RNA, 22 nt, Human
uccaacaaaggguuuuaaugua

SEQ ID NO: 3639251 - RNA, 23 nt, Human
uccaacaagaagggacugagaga

SEQ ID NO: 3639252 - RNA, 21 nt, Human
uccaacaccaagcacagcagc

SEQ ID NO: 3639253 - RNA, 20 nt, Human
uccaacaccacagacacaca

SEQ ID NO: 3639254 - RNA, 22 nt, Human
uccaacaccacagacacacaca

SEQ ID NO: 3639255 - RNA, 20 nt, Human
uccaacagaacuaaauguuc

SEQ ID NO: 3639256 - RNA, 19 nt, Human
uccaacagcucaagucuuc

SEQ ID NO: 3639257 - RNA, 21 nt, Human
uccaacaguuuaaugaagauc

SEQ ID NO: 3639258 - RNA, 23 nt, Human
uccaacaguuuaaugaagaucua

SEQ ID NO: 3639259 - RNA, 18 nt, Human
uccaaccauucaaaaauu

SEQ ID NO: 3639260 - RNA, 17 nt, Human
uccaaccauuuucauua

SEQ ID NO: 3639261 - RNA, 22 nt, Human
uccaacccaugaugagcuccuc

SEQ ID NO: 3639262 - RNA, 16 nt, Human
uccaaccccaacucca

SEQ ID NO: 3639263 - RNA, 22 nt, Human
uccaaccccccagcacugagga

SEQ ID NO: 3639264 - RNA, 23 nt, Human
uccaaccccccagcacugaggaa

SEQ ID NO: 3639265 - RNA, 23 nt, Human
uccaacccgucuggcccaccagg

SEQ ID NO: 3639266 - RNA, 14 nt, Human
uccaacccucauca

SEQ ID NO: 3639267 - RNA, 17 nt, Human
uccaacccucaucacca

SEQ ID NO: 3639268 - RNA, 21 nt, Human
uccacagggucccacagccac

SEQ ID NO: 3639269 - RNA, 16 nt, Human
uccacaggucuagacu

SEQ ID NO: 3639270 - RNA, 16 nt, Human
uccacaguugccacca

SEQ ID NO: 3639271 - RNA, 18 nt, Human
uccacauaaggaaacugg

SEQ ID NO: 3639272 - RNA, 22 nt, Human
uccacauaaggaaacuggguuc

SEQ ID NO: 3639273 - RNA, 19 nt, Human
uccacauacccugaccugg

SEQ ID NO: 3639274 - RNA, 18 nt, Human
uccacauccggaggagaa

SEQ ID NO: 3639275 - RNA, 12 nt, Human
uccacauccucc

SEQ ID NO: 3639276 - RNA, 19 nt, Human
uccacaucuacguuuuugg

SEQ ID NO: 3639277 - RNA, 21 nt, Human
uccacaucuacguuuuuggug

SEQ ID NO: 3639278 - RNA, 13 nt, Human
uccacaucugccu

SEQ ID NO: 3639279 - RNA, 12 nt, Human
uccacaugcucu

SEQ ID NO: 3639280 - RNA, 14 nt, Human
uccacauguuacug

SEQ ID NO: 3639281 - RNA, 17 nt, Human
uccacauuguuuuaaaa

SEQ ID NO: 3639282 - RNA, 16 nt, Human
uccacauuucuaaaau

SEQ ID NO: 3639283 - RNA, 21 nt, Human
uccacauuuguuuugccaauu

SEQ ID NO: 3639284 - RNA, 19 nt, Human
uccaccaaaugugcuuuga

SEQ ID NO: 3639285 - RNA, 21 nt, Human
uccaccaccacuggccaccag

SEQ ID NO: 3639286 - RNA, 23 nt, Human
uccaccaccacuggccaccaggc

SEQ ID NO: 3639287 - RNA, 17 nt, Human
uccaccaccucccucac

SEQ ID NO: 3639288 - RNA, 18 nt, Human
uccaccaccucccucacc

SEQ ID NO: 3639289 - RNA, 22 nt, Human
uccaccaccucccucaccaaca

SEQ ID NO: 3639290 - RNA, 20 nt, Human
uccaccagcaucaccugccu

SEQ ID NO: 3639291 - RNA, 16 nt, Human
uccaccagucauuuuu

SEQ ID NO: 3639292 - RNA, 18 nt, Human
uccaccaucaagccacca

SEQ ID NO: 3639293 - RNA, 15 nt, Human
uccacccaacccuau

SEQ ID NO: 3639294 - RNA, 23 nt, Human
uccacccaacccuaucuccugac

SEQ ID NO: 3639295 - RNA, 19 nt, Human
uccacccaccucagccucc

SEQ ID NO: 3639296 - RNA, 12 nt, Human
uccacccagcaa

SEQ ID NO: 3639297 - RNA, 15 nt, Human
uccacccagcccauu

SEQ ID NO: 3639298 - RNA, 17 nt, Human
uccacccagcccauucu

SEQ ID NO: 3639299 - RNA, 14 nt, Human
uccacccaggagcc

SEQ ID NO: 3639300 - RNA, 15 nt, Human
uccacccaggagccc

SEQ ID NO: 3639301 - RNA, 22 nt, Human
uccacccauccuaccaaugcau

SEQ ID NO: 3639302 - RNA, 20 nt, Human
uccaccccaucccuccccag

SEQ ID NO: 3639303 - RNA, 22 nt, Human
uccaccccaucccuccccaguu

SEQ ID NO: 3639304 - RNA, 12 nt, Human
uccacccccucc

SEQ ID NO: 3639305 - RNA, 22 nt, Human
uccaccccuuucuagaccaaua

SEQ ID NO: 3639306 - RNA, 15 nt, Human
uccacccuccaccuu

SEQ ID NO: 3639307 - RNA, 16 nt, Human
uccacccucccagacc

SEQ ID NO: 3639308 - RNA, 22 nt, Human
uccacccucccagaccugccuc

SEQ ID NO: 3639309 - RNA, 14 nt, Human
uccacccugucccc

SEQ ID NO: 3639310 - RNA, 17 nt, Human
uccacccuuggccuguc

SEQ ID NO: 3639311 - RNA, 19 nt, Human
uccacccuuggccugucuc

SEQ ID NO: 3639312 - RNA, 17 nt, Human
uccaccgcagaaggaag

SEQ ID NO: 3639313 - RNA, 13 nt, Human
uccaccgcugccu

SEQ ID NO: 3639314 - RNA, 15 nt, Human
uccaccgcugccuaa

SEQ ID NO: 3639315 - RNA, 14 nt, Human
uccaccgcugcucc

SEQ ID NO: 3639316 - RNA, 15 nt, Human
uccaccguccccucc

SEQ ID NO: 3639317 - RNA, 21 nt, Human
uccaccuaguggcuguccagu

SEQ ID NO: 3639318 - RNA, 14 nt, Human
uccaccucaacucc

SEQ ID NO: 3639319 - RNA, 12 nt, Human
uccaccucaccc

SEQ ID NO: 3639320 - RNA, 14 nt, Human
uccaccucccugca

SEQ ID NO: 3639321 - RNA, 15 nt, Human
uccaccucccugcaa

SEQ ID NO: 3639322 - RNA, 23 nt, Human
uccaccucccugcaauaaaaugg

SEQ ID NO: 3639323 - RNA, 14 nt, Human
uccaccugagcugc

SEQ ID NO: 3639324 - RNA, 13 nt, Human
uccaccugccagg

SEQ ID NO: 3639325 - RNA, 18 nt, Human
uccaccugccagggacag

SEQ ID NO: 3639326 - RNA, 17 nt, Human
uccaccugcucccaggc

SEQ ID NO: 3639327 - RNA, 16 nt, Human
uccaccugcucugcug

SEQ ID NO: 3639328 - RNA, 18 nt, Human
uccaccugcucugcugau

SEQ ID NO: 3639329 - RNA, 13 nt, Human
uccaccuggaagc

SEQ ID NO: 3639330 - RNA, 17 nt, Human
uccaccuggccccaugu

SEQ ID NO: 3639331 - RNA, 23 nt, Human
uccaccugggcauauccaccacc

SEQ ID NO: 3639332 - RNA, 13 nt, Human
uccaccugucuca

SEQ ID NO: 3639333 - RNA, 13 nt, Human
uccaccugugggu

SEQ ID NO: 3639334 - RNA, 18 nt, Human
uccaccuuaaauuaaaca

SEQ ID NO: 3639335 - RNA, 22 nt, Human
uccaccuuaaauuaaacaauuu

SEQ ID NO: 3639336 - RNA, 15 nt, Human
uccaccuucccacuu

SEQ ID NO: 3639337 - RNA, 15 nt, Human
uccaccuucccaugc

SEQ ID NO: 3639338 - RNA, 17 nt, Human
uccaccuuucagcccac

SEQ ID NO: 3639339 - RNA, 20 nt, Human
uccaccuuucagcccacguc

SEQ ID NO: 3639340 - RNA, 16 nt, Human
uccacgacugucucca

SEQ ID NO: 3639341 - RNA, 19 nt, Human
uccacgacugucuccaugg

SEQ ID NO: 3639342 - RNA, 21 nt, Human
uccacgcgcuucgacuuuucu

SEQ ID NO: 3639343 - RNA, 15 nt, Human
uccacgcgugccgug

SEQ ID NO: 3639344 - RNA, 12 nt, Human
uccacgcugucu

SEQ ID NO: 3639345 - RNA, 16 nt, Human
uccacgcugucuccag

SEQ ID NO: 3639346 - RNA, 21 nt, Human
uccacggacucaaguuucuuc

SEQ ID NO: 3639347 - RNA, 20 nt, Human
uccacggagccacuccucug

SEQ ID NO: 3639348 - RNA, 20 nt, Human
uccacggcucuagguggggc

SEQ ID NO: 3639349 - RNA, 18 nt, Human
uccacguacugcagccuc

SEQ ID NO: 3639350 - RNA, 17 nt, Human
uccacguauuccccuuc

SEQ ID NO: 3639351 - RNA, 18 nt, Human
uccacguauuccccuucc

SEQ ID NO: 3639352 - RNA, 16 nt, Human
uccacgucccccuggg

SEQ ID NO: 3639353 - RNA, 17 nt, Human
uccacgucccccugggg

SEQ ID NO: 3639354 - RNA, 17 nt, Human
uccacuaaaaauauugu

SEQ ID NO: 3639355 - RNA, 16 nt, Human
uccacuacaccuggcu

SEQ ID NO: 3639356 - RNA, 13 nt, Human
uccacuacuccgu

SEQ ID NO: 3639357 - RNA, 13 nt, Human
uccacuacugcua

SEQ ID NO: 3639358 - RNA, 14 nt, Human
uccacucccaggca

SEQ ID NO: 3639359 - RNA, 19 nt, Human
uccacucccaggcagcccu

SEQ ID NO: 3639360 - RNA, 15 nt, Human
uccacuccuccuagc

SEQ ID NO: 3639361 - RNA, 21 nt, Human
uccacuccuccuagccaccca

SEQ ID NO: 3639362 - RNA, 21 nt, Human
uccacuccuuccugccaccug

SEQ ID NO: 3639363 - RNA, 15 nt, Human
uccacucguguguuu

SEQ ID NO: 3639364 - RNA, 18 nt, Human
uccacucguguguuucua

SEQ ID NO: 3639365 - RNA, 18 nt, Human
uccacucuacccucccac

SEQ ID NO: 3639366 - RNA, 23 nt, Human
uccacucuacccucccacccccu

SEQ ID NO: 3639367 - RNA, 18 nt, Human
uccacucucccccacccc

SEQ ID NO: 3639368 - RNA, 19 nt, Human
uccacucuccuugcuaccc

SEQ ID NO: 3639369 - RNA, 19 nt, Human
uccacucugauagaauuau

SEQ ID NO: 3639370 - RNA, 14 nt, Human
uccacucugcuucu

SEQ ID NO: 3639371 - RNA, 24 nt, Human
uccacucugcuucucugacuucug

SEQ ID NO: 3639372 - RNA, 13 nt, Human
uccacucuuucuu

SEQ ID NO: 3639373 - RNA, 15 nt, Human
uccacucuuucuuuc

SEQ ID NO: 3639374 - RNA, 14 nt, Human
uccacugagcucca

SEQ ID NO: 3639375 - RNA, 16 nt, Human
uccacugccucugccu

SEQ ID NO: 3639376 - RNA, 17 nt, Human
uccacugccucugccuu

SEQ ID NO: 3639377 - RNA, 19 nt, Human
uccacugccucugccuuag

SEQ ID NO: 3639378 - RNA, 12 nt, Human
uccacugccugg

SEQ ID NO: 3639379 - RNA, 13 nt, Human
uccacugccuucg

SEQ ID NO: 3639380 - RNA, 22 nt, Human
uccacugccuucgauacaccgg

SEQ ID NO: 3639381 - RNA, 16 nt, Human
uccacuggacuugagc

SEQ ID NO: 3639382 - RNA, 20 nt, Human
uccacuggguguaaacacau

SEQ ID NO: 3639383 - RNA, 12 nt, Human
uccacugucacc

SEQ ID NO: 3639384 - RNA, 22 nt, Human
uccacugucacuguuucucugc

SEQ ID NO: 3639385 - RNA, 14 nt, Human
uccacugugcacac

SEQ ID NO: 3639386 - RNA, 19 nt, Human
uccacugugcagguuccca

SEQ ID NO: 3639387 - RNA, 16 nt, Human
uccacugugcuuucag

SEQ ID NO: 3639388 - RNA, 15 nt, Human
uccacuguuuauuca

SEQ ID NO: 3639389 - RNA, 14 nt, Human
uccacuuacaucca

SEQ ID NO: 3639390 - RNA, 21 nt, Human
uccacuuagaaauugcauuuc

SEQ ID NO: 3639391 - RNA, 12 nt, Human
uccacuuggucu

SEQ ID NO: 3639392 - RNA, 15 nt, Human
uccacuuggucugug

SEQ ID NO: 3639393 - RNA, 21 nt, Human
uccacuuggucugugagaugc

SEQ ID NO: 3639394 - RNA, 15 nt, Human
uccacuuuaucuuga

SEQ ID NO: 3639395 - RNA, 13 nt, Human
uccacuuucagcu

SEQ ID NO: 3639396 - RNA, 16 nt, Human
uccacuuucagcuguc

SEQ ID NO: 3639397 - RNA, 17 nt, Human
uccacuuucagcugucu

SEQ ID NO: 3639398 - RNA, 19 nt, Human
uccacuuucuagccagagg

SEQ ID NO: 3639399 - RNA, 20 nt, Human
uccacuuucuagccagagga

SEQ ID NO: 3639400 - RNA, 16 nt, Human
uccacuuuguucuuua

SEQ ID NO: 3639401 - RNA, 15 nt, Human
uccacuuuguuucgu

SEQ ID NO: 3639402 - RNA, 23 nt, Human
uccacuuuguuucguggggaggu

SEQ ID NO: 3639403 - RNA, 20 nt, Human
uccacuuuuuuuuguauguu

SEQ ID NO: 3639404 - RNA, 23 nt, Human
uccagaaaacugugauuucagga

SEQ ID NO: 3639405 - RNA, 23 nt, Human
uccagaaagccccacccaggcca

SEQ ID NO: 3639406 - RNA, 14 nt, Human
uccagaaaggauau

SEQ ID NO: 3639407 - RNA, 19 nt, Human
uccagaaauacaauuuuag

SEQ ID NO: 3639408 - RNA, 11 nt, Human
uccagaaaugg

SEQ ID NO: 3639409 - RNA, 19 nt, Human
uccagaaaugucccuuucu

SEQ ID NO: 3639410 - RNA, 15 nt, Human
uccagaagaagagaa

SEQ ID NO: 3639411 - RNA, 19 nt, Human
uccagaagaauauucagga

SEQ ID NO: 3639412 - RNA, 19 nt, Human
uccagaagccucuggcuag

SEQ ID NO: 3639413 - RNA, 18 nt, Human
uccaucuaaacugccccc

SEQ ID NO: 3639414 - RNA, 16 nt, Human
uccaucuccaagaaug

SEQ ID NO: 3639415 - RNA, 23 nt, Human
uccaucucccgaauucgcuguua

SEQ ID NO: 3639416 - RNA, 22 nt, Human
uccaucuccuauaaucugucaa

SEQ ID NO: 3639417 - RNA, 16 nt, Human
uccaucucucauccuc

SEQ ID NO: 3639418 - RNA, 15 nt, Human
uccaucuggcagggu

SEQ ID NO: 3639419 - RNA, 21 nt, Human
uccaucugguuuucucuccag

SEQ ID NO: 3639420 - RNA, 14 nt, Human
uccaucuguacuug

SEQ ID NO: 3639421 - RNA, 18 nt, Human
uccaugaaaacguuuuau

SEQ ID NO: 3639422 - RNA, 21 nt, Human
uccaugaaaacguuuuauugu

SEQ ID NO: 3639423 - RNA, 15 nt, Human
uccaugaaggcagag

SEQ ID NO: 3639424 - RNA, 19 nt, Human
uccaugaaucgcuucucuu

SEQ ID NO: 3639425 - RNA, 20 nt, Human
uccaugaaucgcuucucuuu

SEQ ID NO: 3639426 - RNA, 15 nt, Human
uccaugaauguauca

SEQ ID NO: 3639427 - RNA, 17 nt, Human
uccaugaauuuuaaaau

SEQ ID NO: 3639428 - RNA, 15 nt, Human
uccaugacaggccug

SEQ ID NO: 3639429 - RNA, 14 nt, Human
uccaugacaucaag

SEQ ID NO: 3639430 - RNA, 19 nt, Human
uccaugacugcuugcccua

SEQ ID NO: 3639431 - RNA, 22 nt, Human
uccaugacugcuugcccuaagc

SEQ ID NO: 3639432 - RNA, 23 nt, Human
uccaugacugcuugcccuaagca

SEQ ID NO: 3639433 - RNA, 15 nt, Human
uccaugaguccccug

SEQ ID NO: 3639434 - RNA, 22 nt, Human
uccaugaguuaucaugaauuuu

SEQ ID NO: 3639435 - RNA, 18 nt, Human
uccaugaguuugcccugg

SEQ ID NO: 3639436 - RNA, 19 nt, Human
uccaugaguuugcccuggu

SEQ ID NO: 3639437 - RNA, 21 nt, Human
uccaugcacccucauacacag

SEQ ID NO: 3639438 - RNA, 21 nt, Human
uccaugcagggggcuccuggg

SEQ ID NO: 3639439 - RNA, 17 nt, Human
uccaugcaugacagccu

SEQ ID NO: 3639440 - RNA, 19 nt, Human
uccaugcaugacagccucu

SEQ ID NO: 3639441 - RNA, 15 nt, Human
uccaugccugagggu

SEQ ID NO: 3639442 - RNA, 17 nt, Human
uccaugcuauaaaaacu

SEQ ID NO: 3639443 - RNA, 20 nt, Human
uccaugcuccucacugcccg

SEQ ID NO: 3639444 - RNA, 19 nt, Human
uccaugcuuagucacugcc

SEQ ID NO: 3639445 - RNA, 20 nt, Human
uccaugcuuagucacugccu

SEQ ID NO: 3639446 - RNA, 23 nt, Human
uccaugcuuagucacugccugca

SEQ ID NO: 3639447 - RNA, 16 nt, Human
uccauggaaugcuuga

SEQ ID NO: 3639448 - RNA, 18 nt, Human
uccauggaaugcuugaaa

SEQ ID NO: 3639449 - RNA, 23 nt, Human
uccauggaaugcuugaaaaaugu

SEQ ID NO: 3639450 - RNA, 17 nt, Human
uccauggccagcagcac

SEQ ID NO: 3639451 - RNA, 20 nt, Human
uccauggcccugcaaaagga

SEQ ID NO: 3639452 - RNA, 14 nt, Human
uccauggcccugcc

SEQ ID NO: 3639453 - RNA, 22 nt, Human
uccauggccguguagaagcaug

SEQ ID NO: 3639454 - RNA, 15 nt, Human
uccauggcuuccucc

SEQ ID NO: 3639455 - RNA, 16 nt, Human
uccauggcuuccuccu

SEQ ID NO: 3639456 - RNA, 18 nt, Human
uccaugggcagagcccaa

SEQ ID NO: 3639457 - RNA, 16 nt, Human
uccauggggaagggau

SEQ ID NO: 3639458 - RNA, 17 nt, Human
uccaugggggcagggca

SEQ ID NO: 3639459 - RNA, 19 nt, Human
uccauggggucucucacag

SEQ ID NO: 3639460 - RNA, 23 nt, Human
uccauggggucucucacagacag

SEQ ID NO: 3639461 - RNA, 24 nt, Human
uccauguaacugccuagaaacaac

SEQ ID NO: 3639462 - RNA, 16 nt, Human
uccauguacuguaguu

SEQ ID NO: 3639463 - RNA, 20 nt, Human
uccauguacuguaguuuuuc

SEQ ID NO: 3639464 - RNA, 17 nt, Human
uccauguacuuguuugc

SEQ ID NO: 3639465 - RNA, 15 nt, Human
uccauguagcaggac

SEQ ID NO: 3639466 - RNA, 17 nt, Human
uccauguagcaggacug

SEQ ID NO: 3639467 - RNA, 16 nt, Human
uccaugucaagauuca

SEQ ID NO: 3639468 - RNA, 18 nt, Human
uccauguccccucccaga

SEQ ID NO: 3639469 - RNA, 18 nt, Human
uccaugucgccucugcau

SEQ ID NO: 3639470 - RNA, 19 nt, Human
uccaugugaaacauguugc

SEQ ID NO: 3639471 - RNA, 16 nt, Human
uccauguggacuuagg

SEQ ID NO: 3639472 - RNA, 18 nt, Human
uccauguggacuuaggaa

SEQ ID NO: 3639473 - RNA, 20 nt, Human
uccauguggacuuaggaagg

SEQ ID NO: 3639474 - RNA, 18 nt, Human
uccaugugguucuucaaa

SEQ ID NO: 3639475 - RNA, 19 nt, Human
uccauguuaguuuuuacuu

SEQ ID NO: 3639476 - RNA, 14 nt, Human
uccauguugcugcc

SEQ ID NO: 3639477 - RNA, 24 nt, Human
uccauguuggucaggcuggucuca

SEQ ID NO: 3639478 - RNA, 22 nt, Human
uccauuaacuuagcauguguug

SEQ ID NO: 3639479 - RNA, 17 nt, Human
uccauuaauuuaaauga

SEQ ID NO: 3639480 - RNA, 14 nt, Human
uccauuaggccagc

SEQ ID NO: 3639481 - RNA, 14 nt, Human
uccauuaucaugug

SEQ ID NO: 3639482 - RNA, 20 nt, Human
uccauuaucauguguaauca

SEQ ID NO: 3639483 - RNA, 21 nt, Human
uccauuccacacagaaugcaa

SEQ ID NO: 3639484 - RNA, 14 nt, Human
uccauuccacaucc

SEQ ID NO: 3639485 - RNA, 12 nt, Human
uccauuccucag

SEQ ID NO: 3639486 - RNA, 14 nt, Human
uccauuccucaggg

SEQ ID NO: 3639487 - RNA, 19 nt, Human
uccauucucaccuauccac

SEQ ID NO: 3639488 - RNA, 14 nt, Human
uccauucucccagg

SEQ ID NO: 3639489 - RNA, 14 nt, Human
uccauucuuucuga

SEQ ID NO: 3639490 - RNA, 21 nt, Human
uccauugacauguacagagaa

SEQ ID NO: 3639491 - RNA, 22 nt, Human
uccauugguccaagauuccgga

SEQ ID NO: 3639492 - RNA, 23 nt, Human
uccauuguaaaccacaaggcugu

SEQ ID NO: 3639493 - RNA, 23 nt, Human
uccauuguuugaaacaaagaagg

SEQ ID NO: 3639494 - RNA, 13 nt, Human
uccauuuaaacag

SEQ ID NO: 3639495 - RNA, 18 nt, Human
uccauuuaaacagauguc

SEQ ID NO: 3639496 - RNA, 12 nt, Human
uccauuuaauaa

SEQ ID NO: 3639497 - RNA, 20 nt, Human
uccauuuacuuaagacuuaa

SEQ ID NO: 3639498 - RNA, 16 nt, Human
uccauuuauauaugaa

SEQ ID NO: 3639499 - RNA, 15 nt, Human
uccauuucacuggcu

SEQ ID NO: 3639500 - RNA, 16 nt, Human
uccauuucaucuauuu

SEQ ID NO: 3639501 - RNA, 14 nt, Human
uccauuuccccucu

SEQ ID NO: 3639502 - RNA, 17 nt, Human
uccauuuccuuaugcug

SEQ ID NO: 3639503 - RNA, 14 nt, Human
uccauuucucaugu

SEQ ID NO: 3639504 - RNA, 14 nt, Human
uccauuugagaaaa

SEQ ID NO: 3639505 - RNA, 12 nt, Human
uccauuugcauu

SEQ ID NO: 3639506 - RNA, 19 nt, Human
uccauuuggaaaucuuuaa

SEQ ID NO: 3639507 - RNA, 14 nt, Human
uccauuugugugug

SEQ ID NO: 3639508 - RNA, 17 nt, Human
uccauuuguuaucuggg

SEQ ID NO: 3639509 - RNA, 17 nt, Human
uccauuuuaauuuuaaa

SEQ ID NO: 3639510 - RNA, 14 nt, Human
uccauuuuccccca

SEQ ID NO: 3639511 - RNA, 16 nt, Human
uccauuuugugaagcc

SEQ ID NO: 3639512 - RNA, 17 nt, Human
uccauuuugugaagccc

SEQ ID NO: 3639513 - RNA, 20 nt, Human
uccauuuugugaagcccugu

SEQ ID NO: 3639514 - RNA, 15 nt, Human
uccauuuuuacaagu

SEQ ID NO: 3639515 - RNA, 22 nt, Human
uccauuuuuacaaguuauagua

SEQ ID NO: 3639516 - RNA, 20 nt, Human
ucccaaaagcccauucauuc

SEQ ID NO: 3639517 - RNA, 20 nt, Human
ucccaaaauguugaaauaug

SEQ ID NO: 3639518 - RNA, 20 nt, Human
ucccaaaccacgccucuuga

SEQ ID NO: 3639519 - RNA, 24 nt, Human
ucccaaacgcccuuuccuccucag

SEQ ID NO: 3639520 - RNA, 21 nt, Human
ucccaaacgccuccccugccc

SEQ ID NO: 3639521 - RNA, 21 nt, Human
ucccaaagaaguucugguaug

SEQ ID NO: 3639522 - RNA, 20 nt, Human
ucccaaagcaagcaagaggc

SEQ ID NO: 3639523 - RNA, 12 nt, Human
ucccaaaggcau

SEQ ID NO: 3639524 - RNA, 21 nt, Human
ucccaaagugcugggauuaca

SEQ ID NO: 3639525 - RNA, 23 nt, Human
ucccaaagugcugggauuacaga

SEQ ID NO: 3639526 - RNA, 14 nt, Human
ucccaaaugagcca

SEQ ID NO: 3639527 - RNA, 20 nt, Human
ucccaaauuugauugauuug

SEQ ID NO: 3639528 - RNA, 22 nt, Human
ucccaaauuugauugauuugaa

SEQ ID NO: 3639529 - RNA, 19 nt, Human
ucccaacaaacauugaugc

SEQ ID NO: 3639530 - RNA, 19 nt, Human
ucccaacaacauccauguc

SEQ ID NO: 3639531 - RNA, 15 nt, Human
ucccaacacugccag

SEQ ID NO: 3639532 - RNA, 23 nt, Human
ucccaacaggaggacaauucaug

SEQ ID NO: 3639533 - RNA, 20 nt, Human
ucccaaccagugccaaggac

SEQ ID NO: 3639534 - RNA, 14 nt, Human
ucccaacucacccc

SEQ ID NO: 3639535 - RNA, 21 nt, Human
ucccaacucaccccagcccca

SEQ ID NO: 3639536 - RNA, 14 nt, Human
ucccaacuugccuu

SEQ ID NO: 3639537 - RNA, 22 nt, Human
ucccaagagaaggggaagcacu

SEQ ID NO: 3639538 - RNA, 19 nt, Human
ucccaagauuuuuucauuu

SEQ ID NO: 3639539 - RNA, 14 nt, Human
ucccaagccuucgg

SEQ ID NO: 3639540 - RNA, 22 nt, Human
ucccaagcuggagugcaguggu

SEQ ID NO: 3639541 - RNA, 17 nt, Human
ucccaagcugggcccca

SEQ ID NO: 3639542 - RNA, 18 nt, Human
ucccaagcugggccccag

SEQ ID NO: 3639543 - RNA, 22 nt, Human
ucccaaggaaagccccagcacu

SEQ ID NO: 3639544 - RNA, 23 nt, Human
ucccaaggcaaggggugccuggg

SEQ ID NO: 3639545 - RNA, 20 nt, Human
ucccaaggcugcgucuggag

SEQ ID NO: 3639546 - RNA, 16 nt, Human
ucccaaggggccugag

SEQ ID NO: 3639547 - RNA, 21 nt, Human
ucccaaguaacugggauuaca

SEQ ID NO: 3639548 - RNA, 23 nt, Human
ucccaaguaagaggcuggaguug

SEQ ID NO: 3639549 - RNA, 20 nt, Human
ucccaaguagcugggauuac

SEQ ID NO: 3639550 - RNA, 23 nt, Human
ucccaaguagcugggauuacagg

SEQ ID NO: 3639551 - RNA, 12 nt, Human
ucccaagugcca

SEQ ID NO: 3639552 - RNA, 23 nt, Human
ucccaaguuuccauagcaacagg

SEQ ID NO: 3639553 - RNA, 23 nt, Human
ucccaauagcacuuucauugcca

SEQ ID NO: 3639554 - RNA, 15 nt, Human
ucccaaucagcacug

SEQ ID NO: 3639555 - RNA, 22 nt, Human
uccugcccccacaccuggcccu

SEQ ID NO: 3639556 - RNA, 15 nt, Human
uccugcccccugaaa

SEQ ID NO: 3639557 - RNA, 21 nt, Human
uccugcccccugaaacuuauu

SEQ ID NO: 3639558 - RNA, 15 nt, Human
uccugccccucuuuc

SEQ ID NO: 3639559 - RNA, 16 nt, Human
uccugccccucuuucu

SEQ ID NO: 3639560 - RNA, 18 nt, Human
uccugccccucuuucucu

SEQ ID NO: 3639561 - RNA, 14 nt, Human
uccugccccuguuc

SEQ ID NO: 3639562 - RNA, 20 nt, Human
uccugcccgcagaccucugg

SEQ ID NO: 3639563 - RNA, 12 nt, Human
uccugcccuaca

SEQ ID NO: 3639564 - RNA, 23 nt, Human
uccugcccuacagaggucucugc

SEQ ID NO: 3639565 - RNA, 12 nt, Human
uccugcccuggg

SEQ ID NO: 3639566 - RNA, 21 nt, Human
uccugcccugggaggcaguga

SEQ ID NO: 3639567 - RNA, 19 nt, Human
uccugcccuuccucaguuu

SEQ ID NO: 3639568 - RNA, 16 nt, Human
uccugccgacuccugg

SEQ ID NO: 3639569 - RNA, 15 nt, Human
uccugccgcagagcu

SEQ ID NO: 3639570 - RNA, 20 nt, Human
uccugccgcagagcuggccg

SEQ ID NO: 3639571 - RNA, 22 nt, Human
uccugccgcccgagguggcugc

SEQ ID NO: 3639572 - RNA, 16 nt, Human
uccugccuaaggcuga

SEQ ID NO: 3639573 - RNA, 19 nt, Human
uccugccuaaggcugaacu

SEQ ID NO: 3639574 - RNA, 20 nt, Human
uccugccuaagugcagcccc

SEQ ID NO: 3639575 - RNA, 19 nt, Human
uccugccuauuaucuguca

SEQ ID NO: 3639576 - RNA, 13 nt, Human
uccugccucagcc

SEQ ID NO: 3639577 - RNA, 21 nt, Human
uccugccucagccucccgagu

SEQ ID NO: 3639578 - RNA, 17 nt, Human
uccugccucagccuccg

SEQ ID NO: 3639579 - RNA, 20 nt, Human
uccugccucgaacuggcugc

SEQ ID NO: 3639580 - RNA, 16 nt, Human
uccugccucuacuggg

SEQ ID NO: 3639581 - RNA, 17 nt, Human
uccugccucuacuggga

SEQ ID NO: 3639582 - RNA, 21 nt, Human
uccugccucuacugggaaggc

SEQ ID NO: 3639583 - RNA, 14 nt, Human
uccugccuggccag

SEQ ID NO: 3639584 - RNA, 21 nt, Human
uccugccuggucuccugcccc

SEQ ID NO: 3639585 - RNA, 23 nt, Human
uccugccuggucuccugccccca

SEQ ID NO: 3639586 - RNA, 20 nt, Human
uccugccugucuccuuugca

SEQ ID NO: 3639587 - RNA, 14 nt, Human
uccugccugucugc

SEQ ID NO: 3639588 - RNA, 16 nt, Human
uccugccugucugccc

SEQ ID NO: 3639589 - RNA, 14 nt, Human
uccugccuguggcg

SEQ ID NO: 3639590 - RNA, 19 nt, Human
uccugccuuccuccugggc

SEQ ID NO: 3639591 - RNA, 13 nt, Human
uccugccuucugu

SEQ ID NO: 3639592 - RNA, 16 nt, Human
uccugccuucuucuuu

SEQ ID NO: 3639593 - RNA, 22 nt, Human
uccugccuucuucuuuuugcug

SEQ ID NO: 3639594 - RNA, 15 nt, Human
uccugccuuugccuc

SEQ ID NO: 3639595 - RNA, 12 nt, Human
uccugccuuuua

SEQ ID NO: 3639596 - RNA, 23 nt, Human
uccugcggagugaagaggggcag

SEQ ID NO: 3639597 - RNA, 20 nt, Human
uccugcgggcuuuuccccgg

SEQ ID NO: 3639598 - RNA, 16 nt, Human
uccugcguccuccuca

SEQ ID NO: 3639599 - RNA, 19 nt, Human
uccugcuacaacuucagca

SEQ ID NO: 3639600 - RNA, 13 nt, Human
uccugcuagaaau

SEQ ID NO: 3639601 - RNA, 14 nt, Human
uccugcuagaaaug

SEQ ID NO: 3639602 - RNA, 18 nt, Human
uccugcuccacagccauc

SEQ ID NO: 3639603 - RNA, 14 nt, Human
uccugcuccacagu

SEQ ID NO: 3639604 - RNA, 18 nt, Human
uccugcuccacaguguug

SEQ ID NO: 3639605 - RNA, 20 nt, Human
uccugcugcaccaacccagc

SEQ ID NO: 3639606 - RNA, 21 nt, Human
uccugcugcaccaacccagcc

SEQ ID NO: 3639607 - RNA, 21 nt, Human
uccugcugcaguugccaguca

SEQ ID NO: 3639608 - RNA, 21 nt, Human
uccugcugccaguaccagccc

SEQ ID NO: 3639609 - RNA, 16 nt, Human
uccugcugcucccuca

SEQ ID NO: 3639610 - RNA, 18 nt, Human
uccugcugcugucugggu

SEQ ID NO: 3639611 - RNA, 19 nt, Human
uccugcugcugucugggug

SEQ ID NO: 3639612 - RNA, 15 nt, Human
uccugcugcuguguu

SEQ ID NO: 3639613 - RNA, 12 nt, Human
uccugcuugcca

SEQ ID NO: 3639614 - RNA, 16 nt, Human
uccugcuugccaaggc

SEQ ID NO: 3639615 - RNA, 15 nt, Human
uccugcuuuggcagu

SEQ ID NO: 3639616 - RNA, 18 nt, Human
uccugcuuugggaagccg

SEQ ID NO: 3639617 - RNA, 16 nt, Human
uccuggaaaggcucag

SEQ ID NO: 3639618 - RNA, 19 nt, Human
uccuggaaaggcucagucu

SEQ ID NO: 3639619 - RNA, 22 nt, Human
uccuggaaaggcucagucucag

SEQ ID NO: 3639620 - RNA, 15 nt, Human
uccuggaaauauuaa

SEQ ID NO: 3639621 - RNA, 22 nt, Human
uccuggaaauugacgaggggug

SEQ ID NO: 3639622 - RNA, 19 nt, Human
uccuggaacaauauuuuau

SEQ ID NO: 3639623 - RNA, 17 nt, Human
uccuggaaccuugcugu

SEQ ID NO: 3639624 - RNA, 14 nt, Human
uccuggaagccagc

SEQ ID NO: 3639625 - RNA, 20 nt, Human
uccuggaagccagcuuuccc

SEQ ID NO: 3639626 - RNA, 14 nt, Human
uccuggaagcugug

SEQ ID NO: 3639627 - RNA, 17 nt, Human
uccuggaauugccagcu

SEQ ID NO: 3639628 - RNA, 17 nt, Human
uccuggacacucagacc

SEQ ID NO: 3639629 - RNA, 19 nt, Human
uccuggacagcugugccuc

SEQ ID NO: 3639630 - RNA, 14 nt, Human
uccuggacucauug

SEQ ID NO: 3639631 - RNA, 19 nt, Human
uccuggacucauugcuuca

SEQ ID NO: 3639632 - RNA, 19 nt, Human
uccuggagagucucacucc

SEQ ID NO: 3639633 - RNA, 18 nt, Human
uccuggagcaaucacaga

SEQ ID NO: 3639634 - RNA, 20 nt, Human
uccuggagcaaucacagaug

SEQ ID NO: 3639635 - RNA, 16 nt, Human
uccuggagcagaagca

SEQ ID NO: 3639636 - RNA, 19 nt, Human
uccuggagcagaagcagca

SEQ ID NO: 3639637 - RNA, 20 nt, Human
uccuggagcagaagcagcaa

SEQ ID NO: 3639638 - RNA, 13 nt, Human
uccuggagcccga

SEQ ID NO: 3639639 - RNA, 14 nt, Human
uccuggaggcccag

SEQ ID NO: 3639640 - RNA, 15 nt, Human
uccuggaggcccagu

SEQ ID NO: 3639641 - RNA, 21 nt, Human
uccuggagggaagcacugccu

SEQ ID NO: 3639642 - RNA, 17 nt, Human
uccuggagguuccccag

SEQ ID NO: 3639643 - RNA, 14 nt, Human
uccuggaguucugg

SEQ ID NO: 3639644 - RNA, 14 nt, Human
uccuggaugucuga

SEQ ID NO: 3639645 - RNA, 18 nt, Human
uccuggauguugugugua

SEQ ID NO: 3639646 - RNA, 22 nt, Human
uccuggcacuaccaaaggacac

SEQ ID NO: 3639647 - RNA, 22 nt, Human
uccuggcacugcuuccagugag

SEQ ID NO: 3639648 - RNA, 19 nt, Human
uccuggcacuggaccccag

SEQ ID NO: 3639649 - RNA, 14 nt, Human
uccuggcagaaggg

SEQ ID NO: 3639650 - RNA, 15 nt, Human
uccuggcagaaugcu

SEQ ID NO: 3639651 - RNA, 11 nt, Human
uccuggcagcc

SEQ ID NO: 3639652 - RNA, 13 nt, Human
uccuggcagccca

SEQ ID NO: 3639653 - RNA, 14 nt, Human
uccuggcagcccag

SEQ ID NO: 3639654 - RNA, 17 nt, Human
uccuggcaguuuaaaaa

SEQ ID NO: 3639655 - RNA, 20 nt, Human
uccuggcaguuuaaaaaaau

SEQ ID NO: 3639656 - RNA, 20 nt, Human
uccuggccagauggcccgga

SEQ ID NO: 3639657 - RNA, 11 nt, Human
uccuggccauc

SEQ ID NO: 3639658 - RNA, 15 nt, Human
uccuggccaucccac

SEQ ID NO: 3639659 - RNA, 14 nt, Human
uccuggcccagccu

SEQ ID NO: 3639660 - RNA, 15 nt, Human
uccuggcccagccuu

SEQ ID NO: 3639661 - RNA, 22 nt, Human
uccuggccuauccgcugccagc

SEQ ID NO: 3639662 - RNA, 12 nt, Human
uccuggccucaa

SEQ ID NO: 3639663 - RNA, 15 nt, Human
uccuggccuugcuga

SEQ ID NO: 3639664 - RNA, 20 nt, Human
uccuggcgccuggcaguccg

SEQ ID NO: 3639665 - RNA, 16 nt, Human
uccuggcucagccuca

SEQ ID NO: 3639666 - RNA, 16 nt, Human
uccuggcuccugaggg

SEQ ID NO: 3639667 - RNA, 23 nt, Human
uccuggcucuugauaccccccuc

SEQ ID NO: 3639668 - RNA, 22 nt, Human
uccuggcugcggcgucugucug

SEQ ID NO: 3639669 - RNA, 14 nt, Human
uccuggcuucaggc

SEQ ID NO: 3639670 - RNA, 20 nt, Human
uccugggaaauauucccuag

SEQ ID NO: 3639671 - RNA, 19 nt, Human
uccugggagaaccucaggc

SEQ ID NO: 3639672 - RNA, 17 nt, Human
uccugggauguggcugc

SEQ ID NO: 3639673 - RNA, 18 nt, Human
uccugggauguggcugca

SEQ ID NO: 3639674 - RNA, 22 nt, Human
uccugggauguggcugcagcag

SEQ ID NO: 3639675 - RNA, 11 nt, Human
uccugggcaca

SEQ ID NO: 3639676 - RNA, 13 nt, Human
uccugggcagcug

SEQ ID NO: 3639677 - RNA, 14 nt, Human
uccugggcagcugc

SEQ ID NO: 3639678 - RNA, 15 nt, Human
uccugggcagcugcc

SEQ ID NO: 3639679 - RNA, 16 nt, Human
uccugggcagcugccu

SEQ ID NO: 3639680 - RNA, 21 nt, Human
uccugggccccucccuaccuc

SEQ ID NO: 3639681 - RNA, 16 nt, Human
uccugggcccucucug

SEQ ID NO: 3639682 - RNA, 16 nt, Human
uccugggccugcagaa

SEQ ID NO: 3639683 - RNA, 13 nt, Human
uccugggcgcccu

SEQ ID NO: 3639684 - RNA, 18 nt, Human
uccugggcgcccuggaag

SEQ ID NO: 3639685 - RNA, 19 nt, Human
uccuggggaaccugacccc

SEQ ID NO: 3639686 - RNA, 16 nt, Human
uccuggggccaggccg

SEQ ID NO: 3639687 - RNA, 15 nt, Human
uccuggggcguccag

SEQ ID NO: 3639688 - RNA, 16 nt, Human
uccuggggcucccuuc

SEQ ID NO: 3639689 - RNA, 13 nt, Human
uccugggggccug

SEQ ID NO: 3639690 - RNA, 17 nt, Human
uccugggggccugaccu

SEQ ID NO: 3639691 - RNA, 21 nt, Human
uccuggggguucuuucuuccu

SEQ ID NO: 3639692 - RNA, 19 nt, Human
uccuggggugcccuccacu

SEQ ID NO: 3639693 - RNA, 23 nt, Human
uccuggguggcuacucugugcca

SEQ ID NO: 3639694 - RNA, 15 nt, Human
uccuggguggucugc

SEQ ID NO: 3639695 - RNA, 19 nt, Human
uccuggguggucugcaggc

SEQ ID NO: 3639696 - RNA, 19 nt, Human
uccuggguucaagcgauuu

SEQ ID NO: 3639697 - RNA, 20 nt, Human
uccuggguuuuguauucucu

SEQ ID NO: 3639698 - RNA, 21 nt, Human
uccuggucaccuaggaagccu

SEQ ID NO: 3639699 - RNA, 14 nt, Human
uccuggucugaaaa

SEQ ID NO: 3639700 - RNA, 15 nt, Human
uccuuuucuuuuguu

SEQ ID NO: 3639701 - RNA, 17 nt, Human
uccuuuucuuuuguuac

SEQ ID NO: 3639702 - RNA, 18 nt, Human
uccuuuucuuuuguuacu

SEQ ID NO: 3639703 - RNA, 20 nt, Human
uccuuuucuuuuguuacugu

SEQ ID NO: 3639704 - RNA, 21 nt, Human
uccuuuucuuuuguuacuguu

SEQ ID NO: 3639705 - RNA, 16 nt, Human
uccuuuugacacugcu

SEQ ID NO: 3639706 - RNA, 22 nt, Human
uccuuuugacacugcucuaaca

SEQ ID NO: 3639707 - RNA, 20 nt, Human
uccuuuuguaaagugaagaa

SEQ ID NO: 3639708 - RNA, 21 nt, Human
uccuuuuguaaagugaagaau

SEQ ID NO: 3639709 - RNA, 11 nt, Human
uccuuuuguag

SEQ ID NO: 3639710 - RNA, 17 nt, Human
uccuuuuguguacagug

SEQ ID NO: 3639711 - RNA, 13 nt, Human
uccuuuuguguuc

SEQ ID NO: 3639712 - RNA, 20 nt, Human
uccuuuuuaaauucaguccu

SEQ ID NO: 3639713 - RNA, 21 nt, Human
uccuuuuuaugaggcaaccug

SEQ ID NO: 3639714 - RNA, 18 nt, Human
uccuuuuuauuuauaugu

SEQ ID NO: 3639715 - RNA, 15 nt, Human
uccuuuuuccaacaa

SEQ ID NO: 3639716 - RNA, 17 nt, Human
uccuuuuuccaacaaga

SEQ ID NO: 3639717 - RNA, 23 nt, Human
uccuuuuucugauuagcuuugug

SEQ ID NO: 3639718 - RNA, 17 nt, Human
uccuuuuugacacugaa

SEQ ID NO: 3639719 - RNA, 14 nt, Human
uccuuuuuguuauu

SEQ ID NO: 3639720 - RNA, 11 nt, Human
uccuuuuuucc

SEQ ID NO: 3639721 - RNA, 22 nt, Human
uccuuuuuuguuccuuuuuccu

SEQ ID NO: 3639722 - RNA, 14 nt, Human
uccuuuuuuuguac

SEQ ID NO: 3639723 - RNA, 12 nt, Human
ucgaaauaacaa

SEQ ID NO: 3639724 - RNA, 19 nt, Human
ucgaaauaacaauguuaag

SEQ ID NO: 3639725 - RNA, 17 nt, Human
ucgaacccacacugcaa

SEQ ID NO: 3639726 - RNA, 15 nt, Human
ucgaacuggcugcaa

SEQ ID NO: 3639727 - RNA, 23 nt, Human
ucgaagccuugccuaaauuuaau

SEQ ID NO: 3639728 - RNA, 16 nt, Human
ucgaagcucagcccac

SEQ ID NO: 3639729 - RNA, 18 nt, Human
ucgaagcucagcccaccc

SEQ ID NO: 3639730 - RNA, 19 nt, Human
ucgaagcucagcccacccc

SEQ ID NO: 3639731 - RNA, 20 nt, Human
ucgaagucauuaaacugguu

SEQ ID NO: 3639732 - RNA, 20 nt, Human
ucgaaucuacuaauuccaca

SEQ ID NO: 3639733 - RNA, 22 nt, Human
ucgaaucucugugccuucgucu

SEQ ID NO: 3639734 - RNA, 14 nt, Human
ucgaaugacacugu

SEQ ID NO: 3639735 - RNA, 15 nt, Human
ucgaauuaagaauau

SEQ ID NO: 3639736 - RNA, 16 nt, Human
ucgaauuaauagcuuu

SEQ ID NO: 3639737 - RNA, 20 nt, Human
ucgaauuuuuauuauuuguu

SEQ ID NO: 3639738 - RNA, 12 nt, Human
ucgacacagagu

SEQ ID NO: 3639739 - RNA, 22 nt, Human
ucgacagcauuuuccucugcuu

SEQ ID NO: 3639740 - RNA, 19 nt, Human
ucgaccccaaagccccuug

SEQ ID NO: 3639741 - RNA, 14 nt, Human
ucgacucaggaucc

SEQ ID NO: 3639742 - RNA, 16 nt, Human
ucgacucaggauccag

SEQ ID NO: 3639743 - RNA, 23 nt, Human
ucgacucugugcuggccagcgag

SEQ ID NO: 3639744 - RNA, 15 nt, Human
ucgacuguuguuauc

SEQ ID NO: 3639745 - RNA, 17 nt, Human
ucgacuguuguuaucug

SEQ ID NO: 3639746 - RNA, 17 nt, Human
ucgacuucgggcuggcc

SEQ ID NO: 3639747 - RNA, 19 nt, Human
ucgagaaagaggcaccagg

SEQ ID NO: 3639748 - RNA, 14 nt, Human
ucgagaacuuucau

SEQ ID NO: 3639749 - RNA, 18 nt, Human
ucgagaccaaccugacca

SEQ ID NO: 3639750 - RNA, 19 nt, Human
ucgagaccagccuggccaa

SEQ ID NO: 3639751 - RNA, 18 nt, Human
ucgagaccagccugggca

SEQ ID NO: 3639752 - RNA, 19 nt, Human
ucgagaccauccuggcuaa

SEQ ID NO: 3639753 - RNA, 22 nt, Human
ucgagaucccaacacugccagc

SEQ ID NO: 3639754 - RNA, 17 nt, Human
ucgagcaguccugccuc

SEQ ID NO: 3639755 - RNA, 16 nt, Human
ucgagcgcccugcaga

SEQ ID NO: 3639756 - RNA, 17 nt, Human
ucgagcgcccugcagac

SEQ ID NO: 3639757 - RNA, 19 nt, Human
ucgagcuauauuuaaguau

SEQ ID NO: 3639758 - RNA, 17 nt, Human
ucgaggacagggaggug

SEQ ID NO: 3639759 - RNA, 20 nt, Human
ucgaggacuguauuugugac

SEQ ID NO: 3639760 - RNA, 14 nt, Human
ucgaggaguaacaa

SEQ ID NO: 3639761 - RNA, 20 nt, Human
ucgaggaguaacaauacaaa

SEQ ID NO: 3639762 - RNA, 18 nt, Human
ucgaggcccagcgaccuc

SEQ ID NO: 3639763 - RNA, 20 nt, Human
ucgaggcugcagucagucau

SEQ ID NO: 3639764 - RNA, 18 nt, Human
ucgaggggcucucagcuc

SEQ ID NO: 3639765 - RNA, 15 nt, Human
ucgaggucagaggag

SEQ ID NO: 3639766 - RNA, 14 nt, Human
ucgaggugccuucu

SEQ ID NO: 3639767 - RNA, 23 nt, Human
ucgaggugccuucuucagggccu

SEQ ID NO: 3639768 - RNA, 12 nt, Human
ucgaguacugug

SEQ ID NO: 3639769 - RNA, 14 nt, Human
ucgagugagacaga

SEQ ID NO: 3639770 - RNA, 23 nt, Human
ucgagugagacagacuagaaguu

SEQ ID NO: 3639771 - RNA, 15 nt, Human
ucgaguuacagacaa

SEQ ID NO: 3639772 - RNA, 20 nt, Human
ucgauacugcgacuuucugc

SEQ ID NO: 3639773 - RNA, 23 nt, Human
ucgauacugcgacuuucugccug

SEQ ID NO: 3639774 - RNA, 13 nt, Human
ucgauauuuccau

SEQ ID NO: 3639775 - RNA, 23 nt, Human
ucgaugggggagucugaagcaga

SEQ ID NO: 3639776 - RNA, 17 nt, Human
ucgaugggggaugcuuc

SEQ ID NO: 3639777 - RNA, 19 nt, Human
ucgaugggggaugcuucau

SEQ ID NO: 3639778 - RNA, 12 nt, Human
ucgauuagacug

SEQ ID NO: 3639779 - RNA, 13 nt, Human
ucgauuagacugg

SEQ ID NO: 3639780 - RNA, 17 nt, Human
ucgauuuuguaucugca

SEQ ID NO: 3639781 - RNA, 17 nt, Human
ucgcaauguaagacucg

SEQ ID NO: 3639782 - RNA, 21 nt, Human
ucgcaccacuguguauuuaac

SEQ ID NO: 3639783 - RNA, 17 nt, Human
ucgcaccauucugacuc

SEQ ID NO: 3639784 - RNA, 21 nt, Human
ucgcacucuggcagcaccgcc

SEQ ID NO: 3639785 - RNA, 13 nt, Human
ucgcagccacccu

SEQ ID NO: 3639786 - RNA, 21 nt, Human
ucgcagccacccugaggaguc

SEQ ID NO: 3639787 - RNA, 14 nt, Human
ucgcagccugaguc

SEQ ID NO: 3639788 - RNA, 20 nt, Human
ucgcaggaagacccaacaca

SEQ ID NO: 3639789 - RNA, 21 nt, Human
ucgcaucaaaagacaauucuu

SEQ ID NO: 3639790 - RNA, 23 nt, Human
ucgcaucaaaagacaauucuuua

SEQ ID NO: 3639791 - RNA, 12 nt, Human
ucgcaucagcgc

SEQ ID NO: 3639792 - RNA, 19 nt, Human
ucgcauggucacacacuga

SEQ ID NO: 3639793 - RNA, 15 nt, Human
ucgcauuugucaaug

SEQ ID NO: 3639794 - RNA, 13 nt, Human
ucgccacaaacuc

SEQ ID NO: 3639795 - RNA, 18 nt, Human
ucgccaccccuccuuccu

SEQ ID NO: 3639796 - RNA, 18 nt, Human
ucgccagcugaugacuca

SEQ ID NO: 3639797 - RNA, 21 nt, Human
ucgccagcugaugacucaaga

SEQ ID NO: 3639798 - RNA, 17 nt, Human
ucgcccaaagccagaca

SEQ ID NO: 3639799 - RNA, 16 nt, Human
ucgcccaccgcaugcc

SEQ ID NO: 3639800 - RNA, 22 nt, Human
ucgcccaccgcaugcccccucg

SEQ ID NO: 3639801 - RNA, 14 nt, Human
ucgcccagucccag

SEQ ID NO: 3639802 - RNA, 18 nt, Human
ucgcccagucccagcagc

SEQ ID NO: 3639803 - RNA, 23 nt, Human
ucgcccagucccagcagccagcc

SEQ ID NO: 3639804 - RNA, 10 nt, Human
ucgcccauga

SEQ ID NO: 3639805 - RNA, 20 nt, Human
ucgccccagaucaccagccc

SEQ ID NO: 3639806 - RNA, 11 nt, Human
ucgcccgccca

SEQ ID NO: 3639807 - RNA, 19 nt, Human
ucgcccgcccacuguccug

SEQ ID NO: 3639808 - RNA, 22 nt, Human
ucgcccgcccacuguccugggc

SEQ ID NO: 3639809 - RNA, 16 nt, Human
ucgcccuuugcugcau

SEQ ID NO: 3639810 - RNA, 20 nt, Human
ucgccugacaaccacugguc

SEQ ID NO: 3639811 - RNA, 16 nt, Human
ucgccuguaaucucac

SEQ ID NO: 3639812 - RNA, 22 nt, Human
ucgccuuagcacuaccacuccu

SEQ ID NO: 3639813 - RNA, 14 nt, Human
ucgccuuagcaugu

SEQ ID NO: 3639814 - RNA, 16 nt, Human
ucgccuuucagcaggc

SEQ ID NO: 3639815 - RNA, 20 nt, Human
ucgccuuucagcaggcagcc

SEQ ID NO: 3639816 - RNA, 14 nt, Human
ucgcgacaaugcaa

SEQ ID NO: 3639817 - RNA, 19 nt, Human
ucgcgacaaugcaaaccau

SEQ ID NO: 3639818 - RNA, 15 nt, Human
ucgcgcucugcucag

SEQ ID NO: 3639819 - RNA, 13 nt, Human
ucgcgcugccugu

SEQ ID NO: 3639820 - RNA, 16 nt, Human
ucgcggcggagcuggc

SEQ ID NO: 3639821 - RNA, 16 nt, Human
ucgcgugcccucgcug

SEQ ID NO: 3639822 - RNA, 17 nt, Human
ucgcuacauuuccgcca

SEQ ID NO: 3639823 - RNA, 22 nt, Human
ucgcuagcaguggcaggcagag

SEQ ID NO: 3639824 - RNA, 21 nt, Human
ucgcuccccacucugcucuga

SEQ ID NO: 3639825 - RNA, 14 nt, Human
ucgcucccucccag

SEQ ID NO: 3639826 - RNA, 15 nt, Human
ucgcucccucccagg

SEQ ID NO: 3639827 - RNA, 23 nt, Human
ucgcucugcuggccuggccggca

SEQ ID NO: 3639828 - RNA, 15 nt, Human
ucgcucuuugagaaa

SEQ ID NO: 3639829 - RNA, 22 nt, Human
ucgcugagggcagacuggggca

SEQ ID NO: 3639830 - RNA, 14 nt, Human
ucgcugaugcuggg

SEQ ID NO: 3639831 - RNA, 20 nt, Human
ucgcugccagcucuguauca

SEQ ID NO: 3639832 - RNA, 11 nt, Human
ucgcugcugcg

SEQ ID NO: 3639833 - RNA, 22 nt, Human
ucgcuggacucucagucucuga

SEQ ID NO: 3639834 - RNA, 23 nt, Human
ucgcuggacucucagucucugag

SEQ ID NO: 3639835 - RNA, 22 nt, Human
ucgcuggauggcggaagcugcu

SEQ ID NO: 3639836 - RNA, 22 nt, Human
ucgcuggccccuuugggcccug

SEQ ID NO: 3639837 - RNA, 23 nt, Human
ucgcuggccccuuugggcccugc

SEQ ID NO: 3639838 - RNA, 16 nt, Human
ucgcugucacaggcgg

SEQ ID NO: 3639839 - RNA, 17 nt, Human
ucgcuguccuuucuaga

SEQ ID NO: 3639840 - RNA, 13 nt, Human
ucgcuguguguua

SEQ ID NO: 3639841 - RNA, 21 nt, Human
ucgcuguguguuaguucccaa

SEQ ID NO: 3639842 - RNA, 16 nt, Human
ucgcuucauguaacua

SEQ ID NO: 3639843 - RNA, 15 nt, Human
ucgcuuccgcauccu

SEQ ID NO: 3639844 - RNA, 15 nt, Human
ucuacaaucuauuua

SEQ ID NO: 3639845 - RNA, 19 nt, Human
ucuacaaugugaacuuuau

SEQ ID NO: 3639846 - RNA, 23 nt, Human
ucuacacagugggaacucugaca

SEQ ID NO: 3639847 - RNA, 17 nt, Human
ucuacacuaagagagaa

SEQ ID NO: 3639848 - RNA, 11 nt, Human
ucuacacucuc

SEQ ID NO: 3639849 - RNA, 13 nt, Human
ucuacacugugaa

SEQ ID NO: 3639850 - RNA, 12 nt, Human
ucuacacugugc

SEQ ID NO: 3639851 - RNA, 21 nt, Human
ucuacagauagagaguuguug

SEQ ID NO: 3639852 - RNA, 18 nt, Human
ucuacagaugagucacac

SEQ ID NO: 3639853 - RNA, 22 nt, Human
ucuacagcaaauuuauaauuuu

SEQ ID NO: 3639854 - RNA, 15 nt, Human
ucuacagcuccccca

SEQ ID NO: 3639855 - RNA, 20 nt, Human
ucuacagcucccccagcucc

SEQ ID NO: 3639856 - RNA, 12 nt, Human
ucuacagugguu

SEQ ID NO: 3639857 - RNA, 23 nt, Human
ucuacagugguuuuauacugaag

SEQ ID NO: 3639858 - RNA, 20 nt, Human
ucuacauaaguaauucaaga

SEQ ID NO: 3639859 - RNA, 16 nt, Human
ucuacauacuauggaa

SEQ ID NO: 3639860 - RNA, 23 nt, Human
ucuacauacuuucauccugacuc

SEQ ID NO: 3639861 - RNA, 22 nt, Human
ucuacaucuuuuuucacaaauu

SEQ ID NO: 3639862 - RNA, 13 nt, Human
ucuacaugaaugc

SEQ ID NO: 3639863 - RNA, 20 nt, Human
ucuacaugaggaacuguaga

SEQ ID NO: 3639864 - RNA, 12 nt, Human
ucuacauuucac

SEQ ID NO: 3639865 - RNA, 14 nt, Human
ucuacauuucuuag

SEQ ID NO: 3639866 - RNA, 15 nt, Human
ucuaccaacuggaag

SEQ ID NO: 3639867 - RNA, 14 nt, Human
ucuaccaacuuuca

SEQ ID NO: 3639868 - RNA, 17 nt, Human
ucuaccaacuuucaaga

SEQ ID NO: 3639869 - RNA, 18 nt, Human
ucuaccaacuuucaagaa

SEQ ID NO: 3639870 - RNA, 22 nt, Human
ucuaccaacuuucaagaacuug

SEQ ID NO: 3639871 - RNA, 13 nt, Human
ucuaccagacugu

SEQ ID NO: 3639872 - RNA, 21 nt, Human
ucuaccagugcaggcuggcca

SEQ ID NO: 3639873 - RNA, 12 nt, Human
ucuaccaucucc

SEQ ID NO: 3639874 - RNA, 19 nt, Human
ucuaccaugaacagaaaac

SEQ ID NO: 3639875 - RNA, 14 nt, Human
ucuaccauuucaga

SEQ ID NO: 3639876 - RNA, 15 nt, Human
ucuaccauuucagag

SEQ ID NO: 3639877 - RNA, 21 nt, Human
ucuacccaaaggauacuguaa

SEQ ID NO: 3639878 - RNA, 12 nt, Human
ucuacccagccc

SEQ ID NO: 3639879 - RNA, 13 nt, Human
ucuacccagccca

SEQ ID NO: 3639880 - RNA, 15 nt, Human
ucuacccagcccauc

SEQ ID NO: 3639881 - RNA, 20 nt, Human
ucuacccagcccaucuugcc

SEQ ID NO: 3639882 - RNA, 13 nt, Human
ucuacccagggcc

SEQ ID NO: 3639883 - RNA, 15 nt, Human
ucuacccauauuaca

SEQ ID NO: 3639884 - RNA, 21 nt, Human
ucuaccccagacuagauguag

SEQ ID NO: 3639885 - RNA, 13 nt, Human
ucuaccccuggau

SEQ ID NO: 3639886 - RNA, 15 nt, Human
ucuaccccuuacuua

SEQ ID NO: 3639887 - RNA, 15 nt, Human
ucuacccucccaccc

SEQ ID NO: 3639888 - RNA, 21 nt, Human
ucuacccucuuagaaaaacca

SEQ ID NO: 3639889 - RNA, 21 nt, Human
ucuacccugcauggcugagcu

SEQ ID NO: 3639890 - RNA, 19 nt, Human
ucuaccugaggggccucuu

SEQ ID NO: 3639891 - RNA, 12 nt, Human
ucuaccugccac

SEQ ID NO: 3639892 - RNA, 12 nt, Human
ucuaccugcccu

SEQ ID NO: 3639893 - RNA, 15 nt, Human
ucuaccuuccaguca

SEQ ID NO: 3639894 - RNA, 16 nt, Human
ucuaccuucuccccag

SEQ ID NO: 3639895 - RNA, 18 nt, Human
ucuacggaucaucaacaa

SEQ ID NO: 3639896 - RNA, 19 nt, Human
ucuacgguguaugguucug

SEQ ID NO: 3639897 - RNA, 12 nt, Human
ucuacguuucuu

SEQ ID NO: 3639898 - RNA, 13 nt, Human
ucuacguuucuuu

SEQ ID NO: 3639899 - RNA, 21 nt, Human
ucuacuaaaaagaaggaaaau

SEQ ID NO: 3639900 - RNA, 12 nt, Human
ucuacuaaaaau

SEQ ID NO: 3639901 - RNA, 15 nt, Human
ucuacuaaaaaugca

SEQ ID NO: 3639902 - RNA, 14 nt, Human
ucuacuauuuaugu

SEQ ID NO: 3639903 - RNA, 15 nt, Human
ucuacucauuuuaau

SEQ ID NO: 3639904 - RNA, 21 nt, Human
ucuacucgaguuacagacaaa

SEQ ID NO: 3639905 - RNA, 17 nt, Human
ucuacucuuaagccauc

SEQ ID NO: 3639906 - RNA, 22 nt, Human
ucuacucuuaaguuucucagcu

SEQ ID NO: 3639907 - RNA, 19 nt, Human
ucuacugaggugcuauguu

SEQ ID NO: 3639908 - RNA, 22 nt, Human
ucuacugaggugcuauguucuu

SEQ ID NO: 3639909 - RNA, 19 nt, Human
ucuacuuccaaacuaauuu

SEQ ID NO: 3639910 - RNA, 19 nt, Human
ucuacuucugcccuugcca

SEQ ID NO: 3639911 - RNA, 13 nt, Human
ucuacuugcucug

SEQ ID NO: 3639912 - RNA, 15 nt, Human
ucuacuugcucugga

SEQ ID NO: 3639913 - RNA, 16 nt, Human
ucuacuugcucuggac

SEQ ID NO: 3639914 - RNA, 20 nt, Human
ucuacuugcucuggaccugc

SEQ ID NO: 3639915 - RNA, 16 nt, Human
ucuacuuuaagcacua

SEQ ID NO: 3639916 - RNA, 22 nt, Human
ucuacuuuagaaugagagugug

SEQ ID NO: 3639917 - RNA, 18 nt, Human
ucuagaaaaacaggcacu

SEQ ID NO: 3639918 - RNA, 14 nt, Human
ucuagaaacaaaca

SEQ ID NO: 3639919 - RNA, 22 nt, Human
ucuagaaacgaguuggugucuu

SEQ ID NO: 3639920 - RNA, 22 nt, Human
ucuagaaagccuguuccccuca

SEQ ID NO: 3639921 - RNA, 18 nt, Human
ucuagaacuugacccccu

SEQ ID NO: 3639922 - RNA, 14 nt, Human
ucuagaagaaauga

SEQ ID NO: 3639923 - RNA, 19 nt, Human
ucuagaagaaaugaaauuu

SEQ ID NO: 3639924 - RNA, 17 nt, Human
ucuagaagccaagggaa

SEQ ID NO: 3639925 - RNA, 20 nt, Human
ucuagaaguuucccuuccuc

SEQ ID NO: 3639926 - RNA, 22 nt, Human
ucuagaaucugcaauucaaaag

SEQ ID NO: 3639927 - RNA, 19 nt, Human
ucuagaauuuuaagugcuu

SEQ ID NO: 3639928 - RNA, 23 nt, Human
ucuagacaagauauuguacauaa

SEQ ID NO: 3639929 - RNA, 15 nt, Human
ucuagacacuuuuuc

SEQ ID NO: 3639930 - RNA, 16 nt, Human
ucuagacacuuuuucu

SEQ ID NO: 3639931 - RNA, 14 nt, Human
ucuagaccaauaaa

SEQ ID NO: 3639932 - RNA, 14 nt, Human
ucuagacuuucugu

SEQ ID NO: 3639933 - RNA, 21 nt, Human
ucuagagaaguggacuggagg

SEQ ID NO: 3639934 - RNA, 20 nt, Human
ucuagagauaguacauaaag

SEQ ID NO: 3639935 - RNA, 18 nt, Human
ucuagagauauauauacu

SEQ ID NO: 3639936 - RNA, 14 nt, Human
ucuagagcacugcc

SEQ ID NO: 3639937 - RNA, 16 nt, Human
ucuagaggcuuccuuc

SEQ ID NO: 3639938 - RNA, 15 nt, Human
ucuagauaccuaaaa

SEQ ID NO: 3639939 - RNA, 16 nt, Human
ucuagaucagaugcuc

SEQ ID NO: 3639940 - RNA, 22 nt, Human
ucuagaucagaugcuccaagau

SEQ ID NO: 3639941 - RNA, 19 nt, Human
ucuagaugaaguuuuacau

SEQ ID NO: 3639942 - RNA, 23 nt, Human
ucuagaugaaguuuuacauuguu

SEQ ID NO: 3639943 - RNA, 22 nt, Human
ucuagaugauuaaauaagauuc

SEQ ID NO: 3639944 - RNA, 21 nt, Human
ucuagaugauuuuuugaaagu

SEQ ID NO: 3639945 - RNA, 18 nt, Human
ucuagauggcuccucuca

SEQ ID NO: 3639946 - RNA, 19 nt, Human
ucuagauggcuccucucag

SEQ ID NO: 3639947 - RNA, 16 nt, Human
ucuagauguaaauuuu

SEQ ID NO: 3639948 - RNA, 22 nt, Human
ucuagauguuuauucuucuaga

SEQ ID NO: 3639949 - RNA, 23 nt, Human
ucuagauuacccccucauuguuu

SEQ ID NO: 3639950 - RNA, 19 nt, Human
ucuagauucaaagguucua

SEQ ID NO: 3639951 - RNA, 14 nt, Human
ucuagauucucugg

SEQ ID NO: 3639952 - RNA, 15 nt, Human
ucuagcaaauguuau

SEQ ID NO: 3639953 - RNA, 22 nt, Human
ucuagcaaccgccucaaaaugu

SEQ ID NO: 3639954 - RNA, 23 nt, Human
ucuagcaaucacaacacuggcug

SEQ ID NO: 3639955 - RNA, 17 nt, Human
ucuagcacucauuuucu

SEQ ID NO: 3639956 - RNA, 16 nt, Human
ucuagcacuggccugc

SEQ ID NO: 3639957 - RNA, 17 nt, Human
ucuagcacuggccugca

SEQ ID NO: 3639958 - RNA, 21 nt, Human
ucuagcauggcauauuuuuca

SEQ ID NO: 3639959 - RNA, 22 nt, Human
ucuagcauggcauauuuuucac

SEQ ID NO: 3639960 - RNA, 21 nt, Human
ucuagccagccccucuucccc

SEQ ID NO: 3639961 - RNA, 14 nt, Human
ucuagcccugcccg

SEQ ID NO: 3639962 - RNA, 20 nt, Human
ucuagccuauuuaccugcag

SEQ ID NO: 3639963 - RNA, 16 nt, Human
ucuagccugcacuuug

SEQ ID NO: 3639964 - RNA, 22 nt, Human
ucuagccugcacuuugauguca

SEQ ID NO: 3639965 - RNA, 15 nt, Human
ucuagcguagugcag

SEQ ID NO: 3639966 - RNA, 16 nt, Human
ucuagcuaauggaaaa

SEQ ID NO: 3639967 - RNA, 21 nt, Human
ucuagcuagaaauaugauuuu

SEQ ID NO: 3639968 - RNA, 23 nt, Human
ucuagcuagaaauaugauuuuau

SEQ ID NO: 3639969 - RNA, 14 nt, Human
ucuagcucucuagg

SEQ ID NO: 3639970 - RNA, 22 nt, Human
ucuagcugaauugagccuaaaa

SEQ ID NO: 3639971 - RNA, 21 nt, Human
ucuaggaaaauauuuugaucu

SEQ ID NO: 3639972 - RNA, 22 nt, Human
ucuaggaaaauauuuugaucuu

SEQ ID NO: 3639973 - RNA, 16 nt, Human
ucuaggaaauauuuau

SEQ ID NO: 3639974 - RNA, 14 nt, Human
ucuaggaaaucuag

SEQ ID NO: 3639975 - RNA, 15 nt, Human
ucuaggaagaauuuu

SEQ ID NO: 3639976 - RNA, 15 nt, Human
ucuaggaagacuuug

SEQ ID NO: 3639977 - RNA, 23 nt, Human
ucuaggaccaugguuaagagucc

SEQ ID NO: 3639978 - RNA, 18 nt, Human
ucuaggacgccacccagc

SEQ ID NO: 3639979 - RNA, 16 nt, Human
ucuaggagcugggagg

SEQ ID NO: 3639980 - RNA, 17 nt, Human
ucuaggagcugggagga

SEQ ID NO: 3639981 - RNA, 18 nt, Human
ucuaggagcugggaggaa

SEQ ID NO: 3639982 - RNA, 19 nt, Human
ucuaggagggagacacugg

SEQ ID NO: 3639983 - RNA, 18 nt, Human
ucuaggaggucucuaaga

SEQ ID NO: 3639984 - RNA, 15 nt, Human
ucuaggcacuguagu

SEQ ID NO: 3639985 - RNA, 19 nt, Human
ucuagggaaaaaccagcgu

SEQ ID NO: 3639986 - RNA, 17 nt, Human
ucuagggagagacccuu

SEQ ID NO: 3639987 - RNA, 19 nt, Human
ucuagggcugggaaacacu

SEQ ID NO: 3639988 - RNA, 15 nt, Human
ucuggcccugccuuc

SEQ ID NO: 3639989 - RNA, 14 nt, Human
ucuggcccuggccc

SEQ ID NO: 3639990 - RNA, 15 nt, Human
ucuggcccuggcccu

SEQ ID NO: 3639991 - RNA, 20 nt, Human
ucuggccuagucccuuccac

SEQ ID NO: 3639992 - RNA, 15 nt, Human
ucuggccucugcuuu

SEQ ID NO: 3639993 - RNA, 13 nt, Human
ucuggccuggccu

SEQ ID NO: 3639994 - RNA, 17 nt, Human
ucuggccuucggccucc

SEQ ID NO: 3639995 - RNA, 13 nt, Human
ucuggccuuuccu

SEQ ID NO: 3639996 - RNA, 14 nt, Human
ucuggccuuuuccu

SEQ ID NO: 3639997 - RNA, 16 nt, Human
ucuggcuagaggccag

SEQ ID NO: 3639998 - RNA, 21 nt, Human
ucuggcuagaggccagcccca

SEQ ID NO: 3639999 - RNA, 22 nt, Human
ucuggcuagaggccagccccac

SEQ ID NO: 3640000 - RNA, 22 nt, Human
ucuggcuaugcauuugaaaauu

SEQ ID NO: 3640001 - RNA, 15 nt, Human
ucuggcucuaauuca

SEQ ID NO: 3640002 - RNA, 16 nt, Human
ucuggcucuaauucac

SEQ ID NO: 3640003 - RNA, 15 nt, Human
ucuggcucuuccagg

SEQ ID NO: 3640004 - RNA, 16 nt, Human
ucuggcucuuccaggc

SEQ ID NO: 3640005 - RNA, 23 nt, Human
ucuggcucuuccaggcugggaga

SEQ ID NO: 3640006 - RNA, 18 nt, Human
ucuggcugaacacuggca

SEQ ID NO: 3640007 - RNA, 13 nt, Human
ucuggcugaaccc

SEQ ID NO: 3640008 - RNA, 14 nt, Human
ucuggcugaacccu

SEQ ID NO: 3640009 - RNA, 20 nt, Human
ucuggcugaacccugugcug

SEQ ID NO: 3640010 - RNA, 18 nt, Human
ucuggcugacuaaauuug

SEQ ID NO: 3640011 - RNA, 16 nt, Human
ucuggcugagcccugc

SEQ ID NO: 3640012 - RNA, 14 nt, Human
ucuggcugcagagc

SEQ ID NO: 3640013 - RNA, 21 nt, Human
ucuggcugccccaaccugcug

SEQ ID NO: 3640014 - RNA, 21 nt, Human
ucuggcuggcuaacuggaagc

SEQ ID NO: 3640015 - RNA, 18 nt, Human
ucuggcugguagagcagg

SEQ ID NO: 3640016 - RNA, 12 nt, Human
ucuggcuggugu

SEQ ID NO: 3640017 - RNA, 20 nt, Human
ucuggcugguguuaacagaa

SEQ ID NO: 3640018 - RNA, 16 nt, Human
ucuggcuguaaggcuc

SEQ ID NO: 3640019 - RNA, 20 nt, Human
ucuggcuuggccacagccag

SEQ ID NO: 3640020 - RNA, 13 nt, Human
ucuggcuuggccu

SEQ ID NO: 3640021 - RNA, 23 nt, Human
ucuggcuuucuccgacugcuagg

SEQ ID NO: 3640022 - RNA, 19 nt, Human
ucugggaaccucccagagg

SEQ ID NO: 3640023 - RNA, 15 nt, Human
ucugggaacucccaa

SEQ ID NO: 3640024 - RNA, 14 nt, Human
ucugggaacuuguc

SEQ ID NO: 3640025 - RNA, 17 nt, Human
ucugggaauguauagua

SEQ ID NO: 3640026 - RNA, 15 nt, Human
ucugggacccuuucc

SEQ ID NO: 3640027 - RNA, 16 nt, Human
ucugggacccuuuccu

SEQ ID NO: 3640028 - RNA, 15 nt, Human
ucugggacuuccuug

SEQ ID NO: 3640029 - RNA, 17 nt, Human
ucugggacuuccuugcu

SEQ ID NO: 3640030 - RNA, 14 nt, Human
ucugggagcuggag

SEQ ID NO: 3640031 - RNA, 21 nt, Human
ucugggagggcagcagggcua

SEQ ID NO: 3640032 - RNA, 15 nt, Human
ucugggagucacaca

SEQ ID NO: 3640033 - RNA, 17 nt, Human
ucugggagucacacagu

SEQ ID NO: 3640034 - RNA, 14 nt, Human
ucugggcaggaccu

SEQ ID NO: 3640035 - RNA, 18 nt, Human
ucugggcaggaccucaga

SEQ ID NO: 3640036 - RNA, 14 nt, Human
ucugggcaggacuc

SEQ ID NO: 3640037 - RNA, 15 nt, Human
ucugggccagaauuu

SEQ ID NO: 3640038 - RNA, 12 nt, Human
ucugggccuggg

SEQ ID NO: 3640039 - RNA, 17 nt, Human
ucugggccugggcuagg

SEQ ID NO: 3640040 - RNA, 14 nt, Human
ucugggccuuggcc

SEQ ID NO: 3640041 - RNA, 19 nt, Human
ucugggcuagguagaaaaa

SEQ ID NO: 3640042 - RNA, 16 nt, Human
ucugggcuauggacac

SEQ ID NO: 3640043 - RNA, 17 nt, Human
ucugggcuauggacaca

SEQ ID NO: 3640044 - RNA, 18 nt, Human
ucugggcuauggacacag

SEQ ID NO: 3640045 - RNA, 14 nt, Human
ucugggcucugagu

SEQ ID NO: 3640046 - RNA, 14 nt, Human
ucugggcucuuucc

SEQ ID NO: 3640047 - RNA, 19 nt, Human
ucugggcugucuauucuag

SEQ ID NO: 3640048 - RNA, 14 nt, Human
ucugggcugugggc

SEQ ID NO: 3640049 - RNA, 21 nt, Human
ucugggcuuauaucuggccuc

SEQ ID NO: 3640050 - RNA, 16 nt, Human
ucugggcuuccuggag

SEQ ID NO: 3640051 - RNA, 20 nt, Human
ucuggggaaagacacugccu

SEQ ID NO: 3640052 - RNA, 21 nt, Human
ucuggggaaagacacugccug

SEQ ID NO: 3640053 - RNA, 19 nt, Human
ucuggggagcaggcagcca

SEQ ID NO: 3640054 - RNA, 21 nt, Human
ucuggggagcaggcagccagc

SEQ ID NO: 3640055 - RNA, 17 nt, Human
ucuggggagcuggacag

SEQ ID NO: 3640056 - RNA, 20 nt, Human
ucuggggcaggcugggccau

SEQ ID NO: 3640057 - RNA, 13 nt, Human
ucuggggccccuu

SEQ ID NO: 3640058 - RNA, 20 nt, Human
ucuggggccuaauaaaacug

SEQ ID NO: 3640059 - RNA, 21 nt, Human
ucuggggccuaauaaaacuga

SEQ ID NO: 3640060 - RNA, 14 nt, Human
ucuggggcucuagg

SEQ ID NO: 3640061 - RNA, 19 nt, Human
ucugggggcugaggagcag

SEQ ID NO: 3640062 - RNA, 19 nt, Human
ucuggggggacccagugca

SEQ ID NO: 3640063 - RNA, 13 nt, Human
ucugggggucagg

SEQ ID NO: 3640064 - RNA, 15 nt, Human
ucugggguccccagg

SEQ ID NO: 3640065 - RNA, 17 nt, Human
ucugggguucagccccu

SEQ ID NO: 3640066 - RNA, 15 nt, Human
ucugggucagugguc

SEQ ID NO: 3640067 - RNA, 15 nt, Human
ucuggguccuuccug

SEQ ID NO: 3640068 - RNA, 13 nt, Human
ucugggucuuuug

SEQ ID NO: 3640069 - RNA, 22 nt, Human
ucugggugcaggagcgcucccu

SEQ ID NO: 3640070 - RNA, 18 nt, Human
ucugggugcucccuacca

SEQ ID NO: 3640071 - RNA, 22 nt, Human
ucuggguggcucacucagcacu

SEQ ID NO: 3640072 - RNA, 23 nt, Human
ucuggguuccuuccucugagccu

SEQ ID NO: 3640073 - RNA, 21 nt, Human
ucugguaauauugacuuguau

SEQ ID NO: 3640074 - RNA, 22 nt, Human
ucugguaauauugacuuguaua

SEQ ID NO: 3640075 - RNA, 21 nt, Human
ucugguaaucgggguauaaua

SEQ ID NO: 3640076 - RNA, 18 nt, Human
ucugguagaagggaaagc

SEQ ID NO: 3640077 - RNA, 16 nt, Human
ucugguagauagaaau

SEQ ID NO: 3640078 - RNA, 13 nt, Human
ucugguagccugc

SEQ ID NO: 3640079 - RNA, 20 nt, Human
ucugguaggaauagcauguc

SEQ ID NO: 3640080 - RNA, 21 nt, Human
ucugguaucuaauucuuuaau

SEQ ID NO: 3640081 - RNA, 23 nt, Human
ucugguaugaacuugaggacaca

SEQ ID NO: 3640082 - RNA, 23 nt, Human
ucuggucaaagaaagaaaguuua

SEQ ID NO: 3640083 - RNA, 13 nt, Human
ucuggucccuugc

SEQ ID NO: 3640084 - RNA, 17 nt, Human
ucuggucucuaggcugg

SEQ ID NO: 3640085 - RNA, 18 nt, Human
ucuggucucuaggcuggg

SEQ ID NO: 3640086 - RNA, 19 nt, Human
ucuggucucuaggcugggg

SEQ ID NO: 3640087 - RNA, 16 nt, Human
ucuggugacaccagcc

SEQ ID NO: 3640088 - RNA, 17 nt, Human
ucuggugacaccagccu

SEQ ID NO: 3640089 - RNA, 16 nt, Human
ucuggugaccuuccaa

SEQ ID NO: 3640090 - RNA, 18 nt, Human
ucuggugaccuuccaaga

SEQ ID NO: 3640091 - RNA, 17 nt, Human
ucuggugagucaccacu

SEQ ID NO: 3640092 - RNA, 13 nt, Human
ucuggugccucca

SEQ ID NO: 3640093 - RNA, 16 nt, Human
ucugguggucucugcu

SEQ ID NO: 3640094 - RNA, 16 nt, Human
ucugguggucuguugg

SEQ ID NO: 3640095 - RNA, 13 nt, Human
ucugguuaaaaaa

SEQ ID NO: 3640096 - RNA, 15 nt, Human
ucugguuagcucagc

SEQ ID NO: 3640097 - RNA, 16 nt, Human
ucugguuagcucagcc

SEQ ID NO: 3640098 - RNA, 18 nt, Human
ucugguuagcucagcccc

SEQ ID NO: 3640099 - RNA, 20 nt, Human
ucugguuccuccccuccucc

SEQ ID NO: 3640100 - RNA, 13 nt, Human
ucugguucuaaca

SEQ ID NO: 3640101 - RNA, 19 nt, Human
ucugguucucaauuccaac

SEQ ID NO: 3640102 - RNA, 20 nt, Human
ucugguucucaauuccaaca

SEQ ID NO: 3640103 - RNA, 20 nt, Human
ucugguuguuucuguuccaa

SEQ ID NO: 3640104 - RNA, 15 nt, Human
ucugguuucaccgag

SEQ ID NO: 3640105 - RNA, 16 nt, Human
ucugguuucucauucu

SEQ ID NO: 3640106 - RNA, 23 nt, Human
ucugguuuggggcgaggcagagg

SEQ ID NO: 3640107 - RNA, 16 nt, Human
ucuguaaaaacacuga

SEQ ID NO: 3640108 - RNA, 19 nt, Human
ucuguaaaaacacugaaaa

SEQ ID NO: 3640109 - RNA, 14 nt, Human
ucuguaaaacuaag

SEQ ID NO: 3640110 - RNA, 21 nt, Human
ucuguaaaacuaagaaacuua

SEQ ID NO: 3640111 - RNA, 14 nt, Human
ucuguaaaaucuuu

SEQ ID NO: 3640112 - RNA, 16 nt, Human
ucuguaaaauggaaaa

SEQ ID NO: 3640113 - RNA, 13 nt, Human
ucuguaaacugug

SEQ ID NO: 3640114 - RNA, 16 nt, Human
ucuguaaacuguguau

SEQ ID NO: 3640115 - RNA, 20 nt, Human
ucuguaacgccugcuugucc

SEQ ID NO: 3640116 - RNA, 15 nt, Human
ucuguaagcugaagu

SEQ ID NO: 3640117 - RNA, 12 nt, Human
ucuguaauaaua

SEQ ID NO: 3640118 - RNA, 15 nt, Human
ucuguaauaauagac

SEQ ID NO: 3640119 - RNA, 16 nt, Human
ucuguaauaauagacu

SEQ ID NO: 3640120 - RNA, 15 nt, Human
ucuguaaucucguuu

SEQ ID NO: 3640121 - RNA, 16 nt, Human
ucuguaauucagguuu

SEQ ID NO: 3640122 - RNA, 12 nt, Human
ucuguaauugca

SEQ ID NO: 3640123 - RNA, 13 nt, Human
ucuguaauugcaa

SEQ ID NO: 3640124 - RNA, 14 nt, Human
ucuguaauuuuuca

SEQ ID NO: 3640125 - RNA, 13 nt, Human
ucuguacaaugaa

SEQ ID NO: 3640126 - RNA, 15 nt, Human
ucuguacagagccca

SEQ ID NO: 3640127 - RNA, 22 nt, Human
ucuguacagagccguaaaaacu

SEQ ID NO: 3640128 - RNA, 12 nt, Human
ucuguacauauu

SEQ ID NO: 3640129 - RNA, 12 nt, Human
ucuguaccaguu

SEQ ID NO: 3640130 - RNA, 16 nt, Human
ucuguaccauuuauuu

SEQ ID NO: 3640131 - RNA, 13 nt, Human
ucuguaccccaug

SEQ ID NO: 3640132 - RNA, 15 nt, Human
ucuguacugauucaa

SEQ ID NO: 3640133 - RNA, 17 nt, Human
ucuguacugauucaauu

SEQ ID NO: 3640134 - RNA, 13 nt, Human
ucuuccccuugcc

SEQ ID NO: 3640135 - RNA, 23 nt, Human
ucuuccccuugcccuugcccuga

SEQ ID NO: 3640136 - RNA, 19 nt, Human
ucuucccuacaguugaaaa

SEQ ID NO: 3640137 - RNA, 21 nt, Human
ucuucccuggaaaccuuccac

SEQ ID NO: 3640138 - RNA, 18 nt, Human
ucuucccugguaagaaaa

SEQ ID NO: 3640139 - RNA, 19 nt, Human
ucuucccugguaagaaaaa

SEQ ID NO: 3640140 - RNA, 17 nt, Human
ucuucccuuuccccagc

SEQ ID NO: 3640141 - RNA, 19 nt, Human
ucuucccuuuccccagcau

SEQ ID NO: 3640142 - RNA, 19 nt, Human
ucuucccuuuuacauacug

SEQ ID NO: 3640143 - RNA, 22 nt, Human
ucuucccuuuuacauacugcug

SEQ ID NO: 3640144 - RNA, 21 nt, Human
ucuuccgaaaaauccucuucc

SEQ ID NO: 3640145 - RNA, 16 nt, Human
ucuuccgccccugccu

SEQ ID NO: 3640146 - RNA, 23 nt, Human
ucuuccgccccugccugccaugu

SEQ ID NO: 3640147 - RNA, 16 nt, Human
ucuuccggagauguag

SEQ ID NO: 3640148 - RNA, 16 nt, Human
ucuuccuacucuucuc

SEQ ID NO: 3640149 - RNA, 20 nt, Human
ucuuccuacuggucucucua

SEQ ID NO: 3640150 - RNA, 19 nt, Human
ucuuccuaguuuucuccuc

SEQ ID NO: 3640151 - RNA, 23 nt, Human
ucuuccuaguuuucuccucccag

SEQ ID NO: 3640152 - RNA, 22 nt, Human
ucuuccuaucaaaaagauauca

SEQ ID NO: 3640153 - RNA, 13 nt, Human
ucuuccuauccca

SEQ ID NO: 3640154 - RNA, 17 nt, Human
ucuuccuaucccauccc

SEQ ID NO: 3640155 - RNA, 19 nt, Human
ucuuccuaucccucuccua

SEQ ID NO: 3640156 - RNA, 21 nt, Human
ucuuccuauuugccaugggcu

SEQ ID NO: 3640157 - RNA, 12 nt, Human
ucuuccucagcc

SEQ ID NO: 3640158 - RNA, 14 nt, Human
ucuuccucagccag

SEQ ID NO: 3640159 - RNA, 15 nt, Human
ucuuccucagccagc

SEQ ID NO: 3640160 - RNA, 20 nt, Human
ucuuccuccaaggacagaag

SEQ ID NO: 3640161 - RNA, 13 nt, Human
ucuuccucccaag

SEQ ID NO: 3640162 - RNA, 14 nt, Human
ucuuccucugcuga

SEQ ID NO: 3640163 - RNA, 16 nt, Human
ucuuccucuuccccca

SEQ ID NO: 3640164 - RNA, 16 nt, Human
ucuuccucuugacccu

SEQ ID NO: 3640165 - RNA, 15 nt, Human
ucuuccugacacuuu

SEQ ID NO: 3640166 - RNA, 11 nt, Human
ucuuccugacg

SEQ ID NO: 3640167 - RNA, 23 nt, Human
ucuuccugacgaaacuggccccg

SEQ ID NO: 3640168 - RNA, 22 nt, Human
ucuuccugccccucuuucucuu

SEQ ID NO: 3640169 - RNA, 19 nt, Human
ucuuccuggacaggccagg

SEQ ID NO: 3640170 - RNA, 12 nt, Human
ucuuccuggccg

SEQ ID NO: 3640171 - RNA, 22 nt, Human
ucuuccuggccgccugggucca

SEQ ID NO: 3640172 - RNA, 16 nt, Human
ucuuccuggugacccu

SEQ ID NO: 3640173 - RNA, 14 nt, Human
ucuuccuguaaucu

SEQ ID NO: 3640174 - RNA, 13 nt, Human
ucuuccugugggg

SEQ ID NO: 3640175 - RNA, 19 nt, Human
ucuuccugugggggaagag

SEQ ID NO: 3640176 - RNA, 14 nt, Human
ucuuccuguguccu

SEQ ID NO: 3640177 - RNA, 15 nt, Human
ucuuccuguguccug

SEQ ID NO: 3640178 - RNA, 19 nt, Human
ucuuccuguuaauguauuu

SEQ ID NO: 3640179 - RNA, 18 nt, Human
ucuuccuguuuuguacau

SEQ ID NO: 3640180 - RNA, 22 nt, Human
ucuuccuugaagaacugcaggc

SEQ ID NO: 3640181 - RNA, 23 nt, Human
ucuuccuugaagaacugcaggcc

SEQ ID NO: 3640182 - RNA, 16 nt, Human
ucuuccuuuacuuucc

SEQ ID NO: 3640183 - RNA, 18 nt, Human
ucuuccuuuacuuucccu

SEQ ID NO: 3640184 - RNA, 22 nt, Human
ucuuccuuuacuuucccuugcu

SEQ ID NO: 3640185 - RNA, 16 nt, Human
ucuuccuuucucuuuc

SEQ ID NO: 3640186 - RNA, 17 nt, Human
ucuuccuuucucuuucu

SEQ ID NO: 3640187 - RNA, 15 nt, Human
ucuuccuuuucacug

SEQ ID NO: 3640188 - RNA, 20 nt, Human
ucuucgcgcccgccccugca

SEQ ID NO: 3640189 - RNA, 22 nt, Human
ucuucggcccucagaugucccu

SEQ ID NO: 3640190 - RNA, 23 nt, Human
ucuucggcccucagaugucccuu

SEQ ID NO: 3640191 - RNA, 16 nt, Human
ucuucgggaagagagg

SEQ ID NO: 3640192 - RNA, 18 nt, Human
ucuucgggaagagaggag

SEQ ID NO: 3640193 - RNA, 14 nt, Human
ucuucgucuucacu

SEQ ID NO: 3640194 - RNA, 18 nt, Human
ucuucguucuuguuagua

SEQ ID NO: 3640195 - RNA, 13 nt, Human
ucuucuaaacuuc

SEQ ID NO: 3640196 - RNA, 22 nt, Human
ucuucuaaacuuccccaucuuc

SEQ ID NO: 3640197 - RNA, 14 nt, Human
ucuucuaaucuuuu

SEQ ID NO: 3640198 - RNA, 15 nt, Human
ucuucuaauugcugu

SEQ ID NO: 3640199 - RNA, 15 nt, Human
ucuucuaauuucaaa

SEQ ID NO: 3640200 - RNA, 14 nt, Human
ucuucuagaguuca

SEQ ID NO: 3640201 - RNA, 17 nt, Human
ucuucuagaguucagag

SEQ ID NO: 3640202 - RNA, 23 nt, Human
ucuucuagaugauuuuuugaaag

SEQ ID NO: 3640203 - RNA, 18 nt, Human
ucuucuagcauaucuuuc

SEQ ID NO: 3640204 - RNA, 17 nt, Human
ucuucuagguucuaaaa

SEQ ID NO: 3640205 - RNA, 19 nt, Human
ucuucuagugaugaugguu

SEQ ID NO: 3640206 - RNA, 14 nt, Human
ucuucuaugaccca

SEQ ID NO: 3640207 - RNA, 19 nt, Human
ucuucuauguaggaaaaaa

SEQ ID NO: 3640208 - RNA, 14 nt, Human
ucuucuauugccuc

SEQ ID NO: 3640209 - RNA, 12 nt, Human
ucuucuauuuau

SEQ ID NO: 3640210 - RNA, 15 nt, Human
ucuucuauuuuauuc

SEQ ID NO: 3640211 - RNA, 15 nt, Human
ucuucucaaaagaac

SEQ ID NO: 3640212 - RNA, 12 nt, Human
ucuucucaaagg

SEQ ID NO: 3640213 - RNA, 13 nt, Human
ucuucucaagugc

SEQ ID NO: 3640214 - RNA, 21 nt, Human
ucuucucagaaggcaaaugac

SEQ ID NO: 3640215 - RNA, 23 nt, Human
ucuucucagaaggcaaaugacuu

SEQ ID NO: 3640216 - RNA, 14 nt, Human
ucuucucagagugg

SEQ ID NO: 3640217 - RNA, 23 nt, Human
ucuucucauuucaccccucccuu

SEQ ID NO: 3640218 - RNA, 13 nt, Human
ucuucuccaccuc

SEQ ID NO: 3640219 - RNA, 13 nt, Human
ucuucuccacugg

SEQ ID NO: 3640220 - RNA, 14 nt, Human
ucuucuccagauuu

SEQ ID NO: 3640221 - RNA, 14 nt, Human
ucuucuccaggcug

SEQ ID NO: 3640222 - RNA, 16 nt, Human
ucuucucccagaaucc

SEQ ID NO: 3640223 - RNA, 21 nt, Human
ucuucucccagaaucccagcc

SEQ ID NO: 3640224 - RNA, 14 nt, Human
ucuucuccuuucac

SEQ ID NO: 3640225 - RNA, 20 nt, Human
ucuucucuagcuggugguuu

SEQ ID NO: 3640226 - RNA, 14 nt, Human
ucuucucucugcuc

SEQ ID NO: 3640227 - RNA, 13 nt, Human
ucuucucuguugu

SEQ ID NO: 3640228 - RNA, 14 nt, Human
ucuucucuuccugu

SEQ ID NO: 3640229 - RNA, 15 nt, Human
ucuucucuuccugua

SEQ ID NO: 3640230 - RNA, 21 nt, Human
ucuucucuuccuuuuaucagu

SEQ ID NO: 3640231 - RNA, 19 nt, Human
ucuucugaacucaaacuga

SEQ ID NO: 3640232 - RNA, 21 nt, Human
ucuucugaacuuggcgcugcc

SEQ ID NO: 3640233 - RNA, 17 nt, Human
ucuucugaauaaagcaa

SEQ ID NO: 3640234 - RNA, 15 nt, Human
ucuucugagcacugu

SEQ ID NO: 3640235 - RNA, 20 nt, Human
ucuucugagcuuacguaguu

SEQ ID NO: 3640236 - RNA, 21 nt, Human
ucuucugaguggcuaaaacuu

SEQ ID NO: 3640237 - RNA, 19 nt, Human
ucuucugaucacugaaaua

SEQ ID NO: 3640238 - RNA, 18 nt, Human
ucuucugccggcccuggg

SEQ ID NO: 3640239 - RNA, 11 nt, Human
ucuucugcucc

SEQ ID NO: 3640240 - RNA, 13 nt, Human
ucuucugcuccac

SEQ ID NO: 3640241 - RNA, 14 nt, Human
ucuucugcuccacc

SEQ ID NO: 3640242 - RNA, 16 nt, Human
ucuucugcuccacccu

SEQ ID NO: 3640243 - RNA, 19 nt, Human
ucuucugcuccacccuugg

SEQ ID NO: 3640244 - RNA, 22 nt, Human
ucuucugcuccacccuuggccu

SEQ ID NO: 3640245 - RNA, 18 nt, Human
ucuucugcuuaggagaga

SEQ ID NO: 3640246 - RNA, 12 nt, Human
ucuucugcuuca

SEQ ID NO: 3640247 - RNA, 23 nt, Human
ucuucugcuuuguugugugccuc

SEQ ID NO: 3640248 - RNA, 18 nt, Human
ucuucuggggcaggcugg

SEQ ID NO: 3640249 - RNA, 20 nt, Human
ucuucuggggcaggcugggc

SEQ ID NO: 3640250 - RNA, 22 nt, Human
ucuucuggggcaggcugggcca

SEQ ID NO: 3640251 - RNA, 20 nt, Human
ucuucuguacgucugacagg

SEQ ID NO: 3640252 - RNA, 21 nt, Human
ucuucuguacgucugacaggc

SEQ ID NO: 3640253 - RNA, 22 nt, Human
ucuucuguauuuuuuuuucuaa

SEQ ID NO: 3640254 - RNA, 13 nt, Human
ucuucugucccug

SEQ ID NO: 3640255 - RNA, 15 nt, Human
ucuucugucccuguu

SEQ ID NO: 3640256 - RNA, 21 nt, Human
ucuucuguguuuauaaaauau

SEQ ID NO: 3640257 - RNA, 18 nt, Human
ucuucuuaagacuuuugg

SEQ ID NO: 3640258 - RNA, 22 nt, Human
ucuucuuaauauguucuuuuaa

SEQ ID NO: 3640259 - RNA, 15 nt, Human
ucuucuuacaugcau

SEQ ID NO: 3640260 - RNA, 15 nt, Human
ucuucuucaccauuu

SEQ ID NO: 3640261 - RNA, 14 nt, Human
ucuucuucagaaga

SEQ ID NO: 3640262 - RNA, 16 nt, Human
ucuucuucagaagaca

SEQ ID NO: 3640263 - RNA, 13 nt, Human
ucuucuucccucc

SEQ ID NO: 3640264 - RNA, 22 nt, Human
ucuucuucucguccucguuugu

SEQ ID NO: 3640265 - RNA, 15 nt, Human
ucuucuucuucagaa

SEQ ID NO: 3640266 - RNA, 17 nt, Human
ucuucuugaaauuuuaa

SEQ ID NO: 3640267 - RNA, 21 nt, Human
ucuucuuggggcccagugcau

SEQ ID NO: 3640268 - RNA, 19 nt, Human
ucuucuuucagacuugcca

SEQ ID NO: 3640269 - RNA, 21 nt, Human
ucuucuuuuagcaguaaaaua

SEQ ID NO: 3640270 - RNA, 22 nt, Human
ucuucuuuugagcaacuuucuu

SEQ ID NO: 3640271 - RNA, 18 nt, Human
ucuucuuuuggcuuccau

SEQ ID NO: 3640272 - RNA, 16 nt, Human
ucuucuuuuuuuguga

SEQ ID NO: 3640273 - RNA, 17 nt, Human
ucuucuuuuuuugugau

SEQ ID NO: 3640274 - RNA, 23 nt, Human
ucuugaaagauucagguauguug

SEQ ID NO: 3640275 - RNA, 20 nt, Human
ucuugaaauauaggaacuua

SEQ ID NO: 3640276 - RNA, 19 nt, Human
ucuugaacuccugaccuca

SEQ ID NO: 3640277 - RNA, 17 nt, Human
ucuugaacucuuggccu

SEQ ID NO: 3640278 - RNA, 20 nt, Human
ugacacugcggggcuuggcu

SEQ ID NO: 3640279 - RNA, 23 nt, Human
ugacacugcggggcuuggcugag

SEQ ID NO: 3640280 - RNA, 21 nt, Human
ugacacugcucuaacagcccu

SEQ ID NO: 3640281 - RNA, 22 nt, Human
ugacacugcucuaacagcccuc

SEQ ID NO: 3640282 - RNA, 19 nt, Human
ugacacugguauuccugcc

SEQ ID NO: 3640283 - RNA, 17 nt, Human
ugacacuuaaaaauggu

SEQ ID NO: 3640284 - RNA, 15 nt, Human
ugacacuucaaggug

SEQ ID NO: 3640285 - RNA, 18 nt, Human
ugacacuucaaggugaca

SEQ ID NO: 3640286 - RNA, 22 nt, Human
ugacacuuuaauuaccaaccug

SEQ ID NO: 3640287 - RNA, 20 nt, Human
ugacacuuugccagaaagca

SEQ ID NO: 3640288 - RNA, 19 nt, Human
ugacacuuuucauaucauu

SEQ ID NO: 3640289 - RNA, 20 nt, Human
ugacagaaaauauguauuaa

SEQ ID NO: 3640290 - RNA, 13 nt, Human
ugacagaacacug

SEQ ID NO: 3640291 - RNA, 17 nt, Human
ugacagaacacugucuu

SEQ ID NO: 3640292 - RNA, 16 nt, Human
ugacagaaggaccagc

SEQ ID NO: 3640293 - RNA, 20 nt, Human
ugacagaaggaccagcccuu

SEQ ID NO: 3640294 - RNA, 18 nt, Human
ugacagaauauguuucaa

SEQ ID NO: 3640295 - RNA, 21 nt, Human
ugacagaauauguuucaaacu

SEQ ID NO: 3640296 - RNA, 23 nt, Human
ugacagaauauguuucaaacuuu

SEQ ID NO: 3640297 - RNA, 13 nt, Human
ugacagacacagg

SEQ ID NO: 3640298 - RNA, 16 nt, Human
ugacagacagcccucc

SEQ ID NO: 3640299 - RNA, 19 nt, Human
ugacagacaggcucuuagc

SEQ ID NO: 3640300 - RNA, 17 nt, Human
ugacagaccacaucuuu

SEQ ID NO: 3640301 - RNA, 17 nt, Human
ugacagacuccugagga

SEQ ID NO: 3640302 - RNA, 22 nt, Human
ugacagagagagauacucuggg

SEQ ID NO: 3640303 - RNA, 12 nt, Human
ugacagagccag

SEQ ID NO: 3640304 - RNA, 23 nt, Human
ugacagagccuucugaggacauu

SEQ ID NO: 3640305 - RNA, 19 nt, Human
ugacagagcgagacuccau

SEQ ID NO: 3640306 - RNA, 23 nt, Human
ugacagaggcagccccauucugc

SEQ ID NO: 3640307 - RNA, 22 nt, Human
ugacagagggauggaggaagaa

SEQ ID NO: 3640308 - RNA, 14 nt, Human
ugacagauugaauu

SEQ ID NO: 3640309 - RNA, 22 nt, Human
ugacagcacuaaacuuggugcu

SEQ ID NO: 3640310 - RNA, 21 nt, Human
ugacagcaugugcccuccuga

SEQ ID NO: 3640311 - RNA, 11 nt, Human
ugacagccucc

SEQ ID NO: 3640312 - RNA, 12 nt, Human
ugacagccuccc

SEQ ID NO: 3640313 - RNA, 17 nt, Human
ugacagccucccacccc

SEQ ID NO: 3640314 - RNA, 15 nt, Human
ugacagccugcagca

SEQ ID NO: 3640315 - RNA, 17 nt, Human
ugacagcgcacagcugc

SEQ ID NO: 3640316 - RNA, 19 nt, Human
ugacagcucuuuuugugaa

SEQ ID NO: 3640317 - RNA, 12 nt, Human
ugacagcugcuc

SEQ ID NO: 3640318 - RNA, 14 nt, Human
ugacagcugcuccu

SEQ ID NO: 3640319 - RNA, 23 nt, Human
ugacagcugcuccuagagggagg

SEQ ID NO: 3640320 - RNA, 15 nt, Human
ugacagcuuugcugc

SEQ ID NO: 3640321 - RNA, 20 nt, Human
ugacagcuuugcugcugaag

SEQ ID NO: 3640322 - RNA, 17 nt, Human
ugacaggcaaugcuggc

SEQ ID NO: 3640323 - RNA, 14 nt, Human
ugacaggcagcaga

SEQ ID NO: 3640324 - RNA, 19 nt, Human
ugacaggcagcagagacuu

SEQ ID NO: 3640325 - RNA, 18 nt, Human
ugacaggcagccuggaca

SEQ ID NO: 3640326 - RNA, 18 nt, Human
ugacaggcgaaagaaaac

SEQ ID NO: 3640327 - RNA, 11 nt, Human
ugacagggcac

SEQ ID NO: 3640328 - RNA, 16 nt, Human
ugacagggcacaccgg

SEQ ID NO: 3640329 - RNA, 12 nt, Human
ugacagggccag

SEQ ID NO: 3640330 - RNA, 20 nt, Human
ugacagggccaguggggccu

SEQ ID NO: 3640331 - RNA, 22 nt, Human
ugacagggccaguggggccugu

SEQ ID NO: 3640332 - RNA, 21 nt, Human
ugacaguaauuguguuuacau

SEQ ID NO: 3640333 - RNA, 22 nt, Human
ugacaguaauuguguuuacauu

SEQ ID NO: 3640334 - RNA, 13 nt, Human
ugacagucaucau

SEQ ID NO: 3640335 - RNA, 21 nt, Human
ugacagucaucaucagggccu

SEQ ID NO: 3640336 - RNA, 15 nt, Human
ugacaguccucucca

SEQ ID NO: 3640337 - RNA, 17 nt, Human
ugacaguccucuccacc

SEQ ID NO: 3640338 - RNA, 15 nt, Human
ugacagucuugugcu

SEQ ID NO: 3640339 - RNA, 19 nt, Human
ugacagugagguccugggg

SEQ ID NO: 3640340 - RNA, 20 nt, Human
ugacagugagguccuggggg

SEQ ID NO: 3640341 - RNA, 14 nt, Human
ugacagugccuggg

SEQ ID NO: 3640342 - RNA, 17 nt, Human
ugacagugccugggaau

SEQ ID NO: 3640343 - RNA, 21 nt, Human
ugacaguggccgcccaaggcc

SEQ ID NO: 3640344 - RNA, 16 nt, Human
ugacaguguugaaaau

SEQ ID NO: 3640345 - RNA, 13 nt, Human
ugacaguuauuuu

SEQ ID NO: 3640346 - RNA, 23 nt, Human
ugacaguuuuccauaaagaagau

SEQ ID NO: 3640347 - RNA, 17 nt, Human
ugacaguuuuucuguuu

SEQ ID NO: 3640348 - RNA, 20 nt, Human
ugacauaaaaacaacuuuau

SEQ ID NO: 3640349 - RNA, 14 nt, Human
ugacauaaaguuga

SEQ ID NO: 3640350 - RNA, 17 nt, Human
ugacauacauccaacau

SEQ ID NO: 3640351 - RNA, 16 nt, Human
ugacauacccccuccc

SEQ ID NO: 3640352 - RNA, 13 nt, Human
ugacauauacaua

SEQ ID NO: 3640353 - RNA, 15 nt, Human
ugacauaucuacacu

SEQ ID NO: 3640354 - RNA, 13 nt, Human
ugacauauuuaau

SEQ ID NO: 3640355 - RNA, 15 nt, Human
ugacauauuuaaugu

SEQ ID NO: 3640356 - RNA, 14 nt, Human
ugacaucacagcag

SEQ ID NO: 3640357 - RNA, 16 nt, Human
ugacaucacagcagcc

SEQ ID NO: 3640358 - RNA, 17 nt, Human
ugacaucaccacaguuu

SEQ ID NO: 3640359 - RNA, 19 nt, Human
ugacaucacuuguacaaaa

SEQ ID NO: 3640360 - RNA, 17 nt, Human
ugacaucagccagcugc

SEQ ID NO: 3640361 - RNA, 23 nt, Human
ugacaucaguggcauggcuccag

SEQ ID NO: 3640362 - RNA, 17 nt, Human
ugacauccaagcuuccu

SEQ ID NO: 3640363 - RNA, 14 nt, Human
ugacaucuggaauc

SEQ ID NO: 3640364 - RNA, 16 nt, Human
ugacaucuucaaagcu

SEQ ID NO: 3640365 - RNA, 17 nt, Human
ugacaucuugaauccuu

SEQ ID NO: 3640366 - RNA, 17 nt, Human
ugacaucuuuuuaaagc

SEQ ID NO: 3640367 - RNA, 15 nt, Human
ugacaugaagcuguu

SEQ ID NO: 3640368 - RNA, 21 nt, Human
ugacaugauuagcagaagaaa

SEQ ID NO: 3640369 - RNA, 22 nt, Human
ugacaugauuccuuccuguucu

SEQ ID NO: 3640370 - RNA, 11 nt, Human
ugacaugcacu

SEQ ID NO: 3640371 - RNA, 13 nt, Human
ugacaugcacuga

SEQ ID NO: 3640372 - RNA, 17 nt, Human
ugacaugcacugacccu

SEQ ID NO: 3640373 - RNA, 21 nt, Human
ugacaugcccucccuucuccc

SEQ ID NO: 3640374 - RNA, 22 nt, Human
ugacaugcccucccuucucccu

SEQ ID NO: 3640375 - RNA, 18 nt, Human
ugacaugcgggcugggca

SEQ ID NO: 3640376 - RNA, 19 nt, Human
ugacaugcgggcugggcag

SEQ ID NO: 3640377 - RNA, 20 nt, Human
ugacaugcgggcugggcagc

SEQ ID NO: 3640378 - RNA, 16 nt, Human
ugacaugggacauuug

SEQ ID NO: 3640379 - RNA, 17 nt, Human
ugacaugggacauuugc

SEQ ID NO: 3640380 - RNA, 17 nt, Human
ugacauggugccugaga

SEQ ID NO: 3640381 - RNA, 15 nt, Human
ugacaugucuuuucu

SEQ ID NO: 3640382 - RNA, 15 nt, Human
ugacaugugaaaccu

SEQ ID NO: 3640383 - RNA, 14 nt, Human
ugacauguggaaag

SEQ ID NO: 3640384 - RNA, 19 nt, Human
ugacauguggggccagguc

SEQ ID NO: 3640385 - RNA, 20 nt, Human
ugacauguggggccagguca

SEQ ID NO: 3640386 - RNA, 15 nt, Human
ugacaugugucaagc

SEQ ID NO: 3640387 - RNA, 19 nt, Human
ugacauguuauauauuuuu

SEQ ID NO: 3640388 - RNA, 13 nt, Human
ugacauguuuuau

SEQ ID NO: 3640389 - RNA, 20 nt, Human
ugacauuaugugguuuuaga

SEQ ID NO: 3640390 - RNA, 13 nt, Human
ugacauucccugc

SEQ ID NO: 3640391 - RNA, 16 nt, Human
ugacauucugaaugcu

SEQ ID NO: 3640392 - RNA, 18 nt, Human
ugacauucugaaugcuuc

SEQ ID NO: 3640393 - RNA, 20 nt, Human
ugacauucugaaugcuucua

SEQ ID NO: 3640394 - RNA, 14 nt, Human
ugacauugacuauu

SEQ ID NO: 3640395 - RNA, 14 nt, Human
ugacauugcaccug

SEQ ID NO: 3640396 - RNA, 18 nt, Human
ugacauugcuaagaugcu

SEQ ID NO: 3640397 - RNA, 11 nt, Human
ugacauugucu

SEQ ID NO: 3640398 - RNA, 20 nt, Human
ugacauuguuggccaaagcc

SEQ ID NO: 3640399 - RNA, 23 nt, Human
ugacauuuaauuuagugaucuua

SEQ ID NO: 3640400 - RNA, 17 nt, Human
ugacauuugucauuuuc

SEQ ID NO: 3640401 - RNA, 19 nt, Human
ugacauuugucauuuucau

SEQ ID NO: 3640402 - RNA, 24 nt, Human
ugacauuuguuugguuauagugca

SEQ ID NO: 3640403 - RNA, 15 nt, Human
ugacauuuuacauua

SEQ ID NO: 3640404 - RNA, 23 nt, Human
ugaccaaaaguuacauguuugca

SEQ ID NO: 3640405 - RNA, 18 nt, Human
ugaccaaaauccccuucu

SEQ ID NO: 3640406 - RNA, 16 nt, Human
ugaccaaaguccuuuu

SEQ ID NO: 3640407 - RNA, 19 nt, Human
ugaccaaauaucaccagga

SEQ ID NO: 3640408 - RNA, 16 nt, Human
ugaccaacauggagaa

SEQ ID NO: 3640409 - RNA, 23 nt, Human
ugaccaacauggagaaacccugu

SEQ ID NO: 3640410 - RNA, 22 nt, Human
ugaccaaccuuuucccaaccau

SEQ ID NO: 3640411 - RNA, 14 nt, Human
ugaccaagaacugc

SEQ ID NO: 3640412 - RNA, 17 nt, Human
ugaccaagagagaaaga

SEQ ID NO: 3640413 - RNA, 15 nt, Human
ugaccaagauacuua

SEQ ID NO: 3640414 - RNA, 20 nt, Human
ugaccaaguuauaaaucaau

SEQ ID NO: 3640415 - RNA, 18 nt, Human
ugaccaauugugcugcca

SEQ ID NO: 3640416 - RNA, 13 nt, Human
ugaccaauuuuaa

SEQ ID NO: 3640417 - RNA, 15 nt, Human
ugaccacacuuccug

SEQ ID NO: 3640418 - RNA, 15 nt, Human
ugaccacagcacagc

SEQ ID NO: 3640419 - RNA, 19 nt, Human
ugaccacagcacagccaac

SEQ ID NO: 3640420 - RNA, 18 nt, Human
ugaccacaggcaguuacu

SEQ ID NO: 3640421 - RNA, 18 nt, Human
ugaccacauagcaugagg

SEQ ID NO: 3640422 - RNA, 19 nt, Human
ugacuuacuguacaugaaa

SEQ ID NO: 3640423 - RNA, 19 nt, Human
ugacuuagaaucccugugu

SEQ ID NO: 3640424 - RNA, 14 nt, Human
ugacuuaguacaaa

SEQ ID NO: 3640425 - RNA, 16 nt, Human
ugacuuaguacaaagu

SEQ ID NO: 3640426 - RNA, 19 nt, Human
ugacuuaguacaaaguuuc

SEQ ID NO: 3640427 - RNA, 14 nt, Human
ugacuuauaguaca

SEQ ID NO: 3640428 - RNA, 17 nt, Human
ugacuuauuuauauaaa

SEQ ID NO: 3640429 - RNA, 18 nt, Human
ugacuuauuuucucugug

SEQ ID NO: 3640430 - RNA, 23 nt, Human
ugacuucaaugauaguaagaaaa

SEQ ID NO: 3640431 - RNA, 13 nt, Human
ugacuucaggggc

SEQ ID NO: 3640432 - RNA, 13 nt, Human
ugacuucauggaa

SEQ ID NO: 3640433 - RNA, 21 nt, Human
ugacuucauggaauggacauc

SEQ ID NO: 3640434 - RNA, 22 nt, Human
ugacuucauuaauaauaaauuc

SEQ ID NO: 3640435 - RNA, 20 nt, Human
ugacuuccccaauaucuugc

SEQ ID NO: 3640436 - RNA, 15 nt, Human
ugacuucuaaguaaa

SEQ ID NO: 3640437 - RNA, 22 nt, Human
ugacuucuaaguaaaaccacag

SEQ ID NO: 3640438 - RNA, 17 nt, Human
ugacuucuaauaucauu

SEQ ID NO: 3640439 - RNA, 14 nt, Human
ugacuucuccaggu

SEQ ID NO: 3640440 - RNA, 12 nt, Human
ugacuucugccu

SEQ ID NO: 3640441 - RNA, 21 nt, Human
ugacuucugcuggcaucaaga

SEQ ID NO: 3640442 - RNA, 22 nt, Human
ugacuugaagacuuacagcaaa

SEQ ID NO: 3640443 - RNA, 19 nt, Human
ugacuugacagaacacugu

SEQ ID NO: 3640444 - RNA, 23 nt, Human
ugacuugcacagggauucucaca

SEQ ID NO: 3640445 - RNA, 23 nt, Human
ugacuugcaugaagagaagcaau

SEQ ID NO: 3640446 - RNA, 12 nt, Human
ugacuuggcugg

SEQ ID NO: 3640447 - RNA, 13 nt, Human
ugacuuggcuggu

SEQ ID NO: 3640448 - RNA, 22 nt, Human
ugacuugggcacccccagccug

SEQ ID NO: 3640449 - RNA, 19 nt, Human
ugacuuggggagauggagu

SEQ ID NO: 3640450 - RNA, 15 nt, Human
ugacuuguuugucuu

SEQ ID NO: 3640451 - RNA, 21 nt, Human
ugacuuuagaaagcugacauu

SEQ ID NO: 3640452 - RNA, 15 nt, Human
ugacuuuauaaauuu

SEQ ID NO: 3640453 - RNA, 20 nt, Human
ugacuuuauuauuuauuuuu

SEQ ID NO: 3640454 - RNA, 15 nt, Human
ugacuuucauuggaa

SEQ ID NO: 3640455 - RNA, 21 nt, Human
ugacuuuccccaccagaugcu

SEQ ID NO: 3640456 - RNA, 16 nt, Human
ugacuuuccucuuugg

SEQ ID NO: 3640457 - RNA, 17 nt, Human
ugacuuugcuugcuuug

SEQ ID NO: 3640458 - RNA, 22 nt, Human
ugacuuuggauaauaaggaaaa

SEQ ID NO: 3640459 - RNA, 16 nt, Human
ugacuuuggcugcaug

SEQ ID NO: 3640460 - RNA, 20 nt, Human
ugacuuuuaaggcuaaaacu

SEQ ID NO: 3640461 - RNA, 16 nt, Human
ugacuuuucaaguauu

SEQ ID NO: 3640462 - RNA, 13 nt, Human
ugacuuuuccaug

SEQ ID NO: 3640463 - RNA, 19 nt, Human
ugacuuuuccauguaucua

SEQ ID NO: 3640464 - RNA, 19 nt, Human
ugacuuuucuguaauucag

SEQ ID NO: 3640465 - RNA, 14 nt, Human
ugacuuuucugugg

SEQ ID NO: 3640466 - RNA, 14 nt, Human
ugacuuuugcuuua

SEQ ID NO: 3640467 - RNA, 16 nt, Human
ugacuuuugcuuuaau

SEQ ID NO: 3640468 - RNA, 12 nt, Human
ugacuuuuguau

SEQ ID NO: 3640469 - RNA, 14 nt, Human
ugacuuuugugaaa

SEQ ID NO: 3640470 - RNA, 22 nt, Human
ugacuuuuucuaagagcucccg

SEQ ID NO: 3640471 - RNA, 18 nt, Human
ugacuuuuuuuguaugug

SEQ ID NO: 3640472 - RNA, 19 nt, Human
ugacuuuuuuuguaugugu

SEQ ID NO: 3640473 - RNA, 17 nt, Human
ugagaaaaagcuccugu

SEQ ID NO: 3640474 - RNA, 18 nt, Human
ugagaaaaagcuccuguc

SEQ ID NO: 3640475 - RNA, 18 nt, Human
ugagaaaaauauauacua

SEQ ID NO: 3640476 - RNA, 13 nt, Human
ugagaaaacaagc

SEQ ID NO: 3640477 - RNA, 18 nt, Human
ugagaaaaccccuuccca

SEQ ID NO: 3640478 - RNA, 21 nt, Human
ugagaaaacguuuuguuugaa

SEQ ID NO: 3640479 - RNA, 14 nt, Human
ugagaaaacuguga

SEQ ID NO: 3640480 - RNA, 22 nt, Human
ugagaaaacugugaccaaguau

SEQ ID NO: 3640481 - RNA, 12 nt, Human
ugagaaaauguc

SEQ ID NO: 3640482 - RNA, 16 nt, Human
ugagaaaauugaaaua

SEQ ID NO: 3640483 - RNA, 17 nt, Human
ugagaaaccuguaucuu

SEQ ID NO: 3640484 - RNA, 18 nt, Human
ugagaaaccuguaucuuu

SEQ ID NO: 3640485 - RNA, 23 nt, Human
ugagaaacuguuugaaaacuuca

SEQ ID NO: 3640486 - RNA, 18 nt, Human
ugagaaagacuauucaaa

SEQ ID NO: 3640487 - RNA, 20 nt, Human
ugagaaagacuauucaaaca

SEQ ID NO: 3640488 - RNA, 21 nt, Human
ugagaaagcccugucgggcuu

SEQ ID NO: 3640489 - RNA, 16 nt, Human
ugagaaagccuucuuu

SEQ ID NO: 3640490 - RNA, 19 nt, Human
ugagaaaggguagaauucu

SEQ ID NO: 3640491 - RNA, 21 nt, Human
ugagaaagucuuauuuauuca

SEQ ID NO: 3640492 - RNA, 15 nt, Human
ugagaaauaaaguuu

SEQ ID NO: 3640493 - RNA, 22 nt, Human
ugagaaauagcuuaugaaaaga

SEQ ID NO: 3640494 - RNA, 22 nt, Human
ugagaaaugaauaauuucccaa

SEQ ID NO: 3640495 - RNA, 11 nt, Human
ugagaaaugca

SEQ ID NO: 3640496 - RNA, 12 nt, Human
ugagaaaugcau

SEQ ID NO: 3640497 - RNA, 13 nt, Human
ugagaaaugcaua

SEQ ID NO: 3640498 - RNA, 23 nt, Human
ugagaaauguaaugcgauuuuau

SEQ ID NO: 3640499 - RNA, 13 nt, Human
ugagaaauuaagu

SEQ ID NO: 3640500 - RNA, 19 nt, Human
ugagaaauuucugugaaac

SEQ ID NO: 3640501 - RNA, 23 nt, Human
ugagaacaaagcuguuaaacugu

SEQ ID NO: 3640502 - RNA, 14 nt, Human
ugagaacacuguga

SEQ ID NO: 3640503 - RNA, 21 nt, Human
ugagaacagaucuccaaagcu

SEQ ID NO: 3640504 - RNA, 18 nt, Human
ugagaacccugcgugggg

SEQ ID NO: 3640505 - RNA, 20 nt, Human
ugagaaccguagaugauuuc

SEQ ID NO: 3640506 - RNA, 16 nt, Human
ugagaaccuggccuuc

SEQ ID NO: 3640507 - RNA, 12 nt, Human
ugagaaccuggg

SEQ ID NO: 3640508 - RNA, 21 nt, Human
ugagaaccuggguugcagaca

SEQ ID NO: 3640509 - RNA, 15 nt, Human
ugagaacuccugacu

SEQ ID NO: 3640510 - RNA, 17 nt, Human
ugagaagaaaacaucua

SEQ ID NO: 3640511 - RNA, 17 nt, Human
ugagaagagggccugug

SEQ ID NO: 3640512 - RNA, 22 nt, Human
ugagaagauucuucccauucuc

SEQ ID NO: 3640513 - RNA, 17 nt, Human
ugagaagccgugggugg

SEQ ID NO: 3640514 - RNA, 13 nt, Human
ugagaagccuuca

SEQ ID NO: 3640515 - RNA, 21 nt, Human
ugagaagcugcuccaggccug

SEQ ID NO: 3640516 - RNA, 22 nt, Human
ugagaagcugcuccaggccugc

SEQ ID NO: 3640517 - RNA, 17 nt, Human
ugagaaggaauuugagu

SEQ ID NO: 3640518 - RNA, 13 nt, Human
ugagaaggagaga

SEQ ID NO: 3640519 - RNA, 23 nt, Human
ugagaaggggaggaccucugggc

SEQ ID NO: 3640520 - RNA, 16 nt, Human
ugagaagguccuuaau

SEQ ID NO: 3640521 - RNA, 16 nt, Human
ugagaagguuuauugu

SEQ ID NO: 3640522 - RNA, 18 nt, Human
ugagaagguuuauuguua

SEQ ID NO: 3640523 - RNA, 19 nt, Human
ugagaagguuuauuguuaa

SEQ ID NO: 3640524 - RNA, 16 nt, Human
ugagaaguagccacag

SEQ ID NO: 3640525 - RNA, 22 nt, Human
ugagaagucaaacauuucaaag

SEQ ID NO: 3640526 - RNA, 19 nt, Human
ugagaagugaaugcuggga

SEQ ID NO: 3640527 - RNA, 21 nt, Human
ugagaagugaaugcugggacu

SEQ ID NO: 3640528 - RNA, 17 nt, Human
ugagaaguuuuguacag

SEQ ID NO: 3640529 - RNA, 15 nt, Human
ugagaauagaaggaa

SEQ ID NO: 3640530 - RNA, 17 nt, Human
ugagaaucagaucauuu

SEQ ID NO: 3640531 - RNA, 20 nt, Human
ugagaaucagaucauuucaa

SEQ ID NO: 3640532 - RNA, 20 nt, Human
ugagaaucccaaauuugauu

SEQ ID NO: 3640533 - RNA, 21 nt, Human
ugagaaucuacccccagaucc

SEQ ID NO: 3640534 - RNA, 23 nt, Human
ugagaaucuauauuuaacaagau

SEQ ID NO: 3640535 - RNA, 21 nt, Human
ugagaaucuuuauugagaaag

SEQ ID NO: 3640536 - RNA, 22 nt, Human
ugagaaucuuuauugagaaaga

SEQ ID NO: 3640537 - RNA, 15 nt, Human
ugagaaugaacaaag

SEQ ID NO: 3640538 - RNA, 17 nt, Human
ugagaaugaacaaagac

SEQ ID NO: 3640539 - RNA, 16 nt, Human
ugagaauuccaaggag

SEQ ID NO: 3640540 - RNA, 20 nt, Human
ugagaauugugcucaaaauu

SEQ ID NO: 3640541 - RNA, 15 nt, Human
ugagaauuucuaaaa

SEQ ID NO: 3640542 - RNA, 22 nt, Human
ugagaauuucuaaaaagauuag

SEQ ID NO: 3640543 - RNA, 13 nt, Human
ugagaauuuuaaa

SEQ ID NO: 3640544 - RNA, 18 nt, Human
ugagacaaaaauuaucua

SEQ ID NO: 3640545 - RNA, 21 nt, Human
ugagacaagaaaauaagagcu

SEQ ID NO: 3640546 - RNA, 16 nt, Human
ugagacaaugccuugu

SEQ ID NO: 3640547 - RNA, 19 nt, Human
ugagacacaggaugaagca

SEQ ID NO: 3640548 - RNA, 13 nt, Human
ugagacagaaucu

SEQ ID NO: 3640549 - RNA, 14 nt, Human
ugagacagagccuc

SEQ ID NO: 3640550 - RNA, 21 nt, Human
ugagacagaguuuucacucuu

SEQ ID NO: 3640551 - RNA, 19 nt, Human
ugagacagcccgggcucug

SEQ ID NO: 3640552 - RNA, 12 nt, Human
ugagacagcucu

SEQ ID NO: 3640553 - RNA, 14 nt, Human
ugagacagugaauu

SEQ ID NO: 3640554 - RNA, 15 nt, Human
ugagacagugaauuu

SEQ ID NO: 3640555 - RNA, 16 nt, Human
ugagacagugaauuug

SEQ ID NO: 3640556 - RNA, 14 nt, Human
ugagacagugcaca

SEQ ID NO: 3640557 - RNA, 19 nt, Human
ugagacagugcacaugaac

SEQ ID NO: 3640558 - RNA, 17 nt, Human
ugagacagugggaaaua

SEQ ID NO: 3640559 - RNA, 14 nt, Human
ugagacaguuucuu

SEQ ID NO: 3640560 - RNA, 15 nt, Human
ugagacaguuucuua

SEQ ID NO: 3640561 - RNA, 20 nt, Human
ugagacaguuucuuagcuuu

SEQ ID NO: 3640562 - RNA, 21 nt, Human
ugagacaguuucuuagcuuuu

SEQ ID NO: 3640563 - RNA, 13 nt, Human
ugagacauauuua

SEQ ID NO: 3640564 - RNA, 13 nt, Human
ugagaccacagag

SEQ ID NO: 3640565 - RNA, 21 nt, Human
ugagaccaguugaauaaaagu

SEQ ID NO: 3640566 - RNA, 18 nt, Human
ugaggaaaggccagcugg

SEQ ID NO: 3640567 - RNA, 19 nt, Human
ugaggaaagucauuggcuu

SEQ ID NO: 3640568 - RNA, 15 nt, Human
ugaggaaauuugcag

SEQ ID NO: 3640569 - RNA, 16 nt, Human
ugaggaaauuugcagc

SEQ ID NO: 3640570 - RNA, 18 nt, Human
ugaggaacggaucagaug

SEQ ID NO: 3640571 - RNA, 24 nt, Human
ugaggaagaacggggcucuucuca

SEQ ID NO: 3640572 - RNA, 19 nt, Human
ugaggaagccgcuggggcc

SEQ ID NO: 3640573 - RNA, 17 nt, Human
ugaggaagcgugaaggc

SEQ ID NO: 3640574 - RNA, 20 nt, Human
ugaggaaucaacagggcagc

SEQ ID NO: 3640575 - RNA, 21 nt, Human
ugaggaauccagacccggcug

SEQ ID NO: 3640576 - RNA, 18 nt, Human
ugaggaauggacauuucu

SEQ ID NO: 3640577 - RNA, 17 nt, Human
ugaggaauguauauguu

SEQ ID NO: 3640578 - RNA, 18 nt, Human
ugaggaauucuguauaga

SEQ ID NO: 3640579 - RNA, 21 nt, Human
ugaggaauuucaccuguaaac

SEQ ID NO: 3640580 - RNA, 14 nt, Human
ugaggaauuuucuu

SEQ ID NO: 3640581 - RNA, 18 nt, Human
ugaggaauuuucuuugug

SEQ ID NO: 3640582 - RNA, 16 nt, Human
ugaggacaaauugaga

SEQ ID NO: 3640583 - RNA, 20 nt, Human
ugaggacaaccauuccagac

SEQ ID NO: 3640584 - RNA, 14 nt, Human
ugaggacacauguc

SEQ ID NO: 3640585 - RNA, 15 nt, Human
ugaggacacugauau

SEQ ID NO: 3640586 - RNA, 15 nt, Human
ugaggacagaugccu

SEQ ID NO: 3640587 - RNA, 14 nt, Human
ugaggacagcuguc

SEQ ID NO: 3640588 - RNA, 19 nt, Human
ugaggacauggcuucugaa

SEQ ID NO: 3640589 - RNA, 20 nt, Human
ugaggacauuccaagacagu

SEQ ID NO: 3640590 - RNA, 17 nt, Human
ugaggacugauuucaga

SEQ ID NO: 3640591 - RNA, 23 nt, Human
ugaggacuuaaaauauuccugca

SEQ ID NO: 3640592 - RNA, 14 nt, Human
ugaggagaaugaaa

SEQ ID NO: 3640593 - RNA, 19 nt, Human
ugaggagacacaccugagg

SEQ ID NO: 3640594 - RNA, 20 nt, Human
ugaggagcagcuucaguugu

SEQ ID NO: 3640595 - RNA, 15 nt, Human
ugaggagcauguuuu

SEQ ID NO: 3640596 - RNA, 19 nt, Human
ugaggagcauguuuuguau

SEQ ID NO: 3640597 - RNA, 23 nt, Human
ugaggagcauguuuuguauacaa

SEQ ID NO: 3640598 - RNA, 15 nt, Human
ugaggagccaggccg

SEQ ID NO: 3640599 - RNA, 22 nt, Human
ugaggagcccauacucagccug

SEQ ID NO: 3640600 - RNA, 14 nt, Human
ugaggagccccagc

SEQ ID NO: 3640601 - RNA, 20 nt, Human
ugaggagccccaucugucua

SEQ ID NO: 3640602 - RNA, 16 nt, Human
ugaggagcugcuggcu

SEQ ID NO: 3640603 - RNA, 17 nt, Human
ugaggagcugcuggcuu

SEQ ID NO: 3640604 - RNA, 12 nt, Human
ugaggaggaagg

SEQ ID NO: 3640605 - RNA, 20 nt, Human
ugaggaggaugucccugggc

SEQ ID NO: 3640606 - RNA, 22 nt, Human
ugaggaggaugucccugggcca

SEQ ID NO: 3640607 - RNA, 22 nt, Human
ugaggaggggccccccugcccu

SEQ ID NO: 3640608 - RNA, 17 nt, Human
ugaggagggugggggag

SEQ ID NO: 3640609 - RNA, 15 nt, Human
ugaggaguaaaauuc

SEQ ID NO: 3640610 - RNA, 13 nt, Human
ugaggagucugag

SEQ ID NO: 3640611 - RNA, 21 nt, Human
ugaggagucugagguccugag

SEQ ID NO: 3640612 - RNA, 19 nt, Human
ugaggaguuuccuaaaagu

SEQ ID NO: 3640613 - RNA, 20 nt, Human
ugaggauacgacaguacacu

SEQ ID NO: 3640614 - RNA, 20 nt, Human
ugaggauauauuuucacuuu

SEQ ID NO: 3640615 - RNA, 18 nt, Human
ugaggauauucagaugua

SEQ ID NO: 3640616 - RNA, 17 nt, Human
ugaggaucagaaaguaa

SEQ ID NO: 3640617 - RNA, 13 nt, Human
ugaggaugaugua

SEQ ID NO: 3640618 - RNA, 22 nt, Human
ugaggaugauuauuuucaaggc

SEQ ID NO: 3640619 - RNA, 18 nt, Human
ugaggaugcagagucagc

SEQ ID NO: 3640620 - RNA, 19 nt, Human
ugaggauuaguuuagaaca

SEQ ID NO: 3640621 - RNA, 20 nt, Human
ugaggauuauuauaaaaggg

SEQ ID NO: 3640622 - RNA, 20 nt, Human
ugaggauuauugauaguacu

SEQ ID NO: 3640623 - RNA, 19 nt, Human
ugaggauuuagaaguguca

SEQ ID NO: 3640624 - RNA, 20 nt, Human
ugaggcaaccacaggcagca

SEQ ID NO: 3640625 - RNA, 20 nt, Human
ugaggcaauaaaaaucauag

SEQ ID NO: 3640626 - RNA, 17 nt, Human
ugaggcaaugucaggaa

SEQ ID NO: 3640627 - RNA, 20 nt, Human
ugaggcacaugucagcaagu

SEQ ID NO: 3640628 - RNA, 13 nt, Human
ugaggcagacagc

SEQ ID NO: 3640629 - RNA, 17 nt, Human
ugaggcagacagcagcu

SEQ ID NO: 3640630 - RNA, 23 nt, Human
ugaggcagacagcagcucaggca

SEQ ID NO: 3640631 - RNA, 13 nt, Human
ugaggcaggagaa

SEQ ID NO: 3640632 - RNA, 15 nt, Human
ugaggcaggagaauc

SEQ ID NO: 3640633 - RNA, 14 nt, Human
ugaggcagggaagu

SEQ ID NO: 3640634 - RNA, 20 nt, Human
ugaggcaggugacagugagg

SEQ ID NO: 3640635 - RNA, 15 nt, Human
ugaggcauccagcag

SEQ ID NO: 3640636 - RNA, 17 nt, Human
ugaggcaugaguuacug

SEQ ID NO: 3640637 - RNA, 16 nt, Human
ugaggccaagaauauu

SEQ ID NO: 3640638 - RNA, 20 nt, Human
ugaggccacacucagcacaa

SEQ ID NO: 3640639 - RNA, 23 nt, Human
ugaggccacacucagcacaaggc

SEQ ID NO: 3640640 - RNA, 23 nt, Human
ugaggccaccaguaaaagacauu

SEQ ID NO: 3640641 - RNA, 14 nt, Human
ugaggccacugaag

SEQ ID NO: 3640642 - RNA, 16 nt, Human
ugaggccacugaagag

SEQ ID NO: 3640643 - RNA, 15 nt, Human
ugaggccacuguguu

SEQ ID NO: 3640644 - RNA, 13 nt, Human
ugaggccagacca

SEQ ID NO: 3640645 - RNA, 14 nt, Human
ugaggccagccugg

SEQ ID NO: 3640646 - RNA, 15 nt, Human
ugaggccagccuggc

SEQ ID NO: 3640647 - RNA, 12 nt, Human
ugaggccaggag

SEQ ID NO: 3640648 - RNA, 16 nt, Human
ugaggccagggcagag

SEQ ID NO: 3640649 - RNA, 23 nt, Human
ugaggccauggacucuguccuga

SEQ ID NO: 3640650 - RNA, 15 nt, Human
ugaggcccagagggc

SEQ ID NO: 3640651 - RNA, 17 nt, Human
ugaggcccagggagagg

SEQ ID NO: 3640652 - RNA, 18 nt, Human
ugaggcccuccacaccug

SEQ ID NO: 3640653 - RNA, 22 nt, Human
ugaggcccuccacaccugcggc

SEQ ID NO: 3640654 - RNA, 22 nt, Human
ugaggcccuucucuccagcccc

SEQ ID NO: 3640655 - RNA, 17 nt, Human
ugaggccguugcugacu

SEQ ID NO: 3640656 - RNA, 21 nt, Human
ugaggccguugcugacuuaga

SEQ ID NO: 3640657 - RNA, 22 nt, Human
ugaggccuccagcuucaggcag

SEQ ID NO: 3640658 - RNA, 14 nt, Human
ugaggccucuugga

SEQ ID NO: 3640659 - RNA, 14 nt, Human
ugaggccugagacc

SEQ ID NO: 3640660 - RNA, 21 nt, Human
ugaggccugagacccaggacu

SEQ ID NO: 3640661 - RNA, 23 nt, Human
ugaggccugagacccaggacucc

SEQ ID NO: 3640662 - RNA, 17 nt, Human
ugaggccuggacuuucc

SEQ ID NO: 3640663 - RNA, 22 nt, Human
ugaggccugggccgcugccacg

SEQ ID NO: 3640664 - RNA, 23 nt, Human
ugaggcgccccaacccguggagg

SEQ ID NO: 3640665 - RNA, 16 nt, Human
ugaggcuaaguuggga

SEQ ID NO: 3640666 - RNA, 20 nt, Human
ugaggcuccacuuggucugu

SEQ ID NO: 3640667 - RNA, 23 nt, Human
ugaggcuccuuaggguuuucucu

SEQ ID NO: 3640668 - RNA, 16 nt, Human
ugaggcucugcccuug

SEQ ID NO: 3640669 - RNA, 16 nt, Human
ugaggcucuuucuggg

SEQ ID NO: 3640670 - RNA, 13 nt, Human
ugaggcugcagcg

SEQ ID NO: 3640671 - RNA, 20 nt, Human
ugaggcugcuuuccaaagcc

SEQ ID NO: 3640672 - RNA, 13 nt, Human
ugaggcuggacuc

SEQ ID NO: 3640673 - RNA, 11 nt, Human
ugaggcuggca

SEQ ID NO: 3640674 - RNA, 12 nt, Human
ugaggcugggaa

SEQ ID NO: 3640675 - RNA, 15 nt, Human
ugaggcugggcuccc

SEQ ID NO: 3640676 - RNA, 19 nt, Human
ugaggcugggggagagccg

SEQ ID NO: 3640677 - RNA, 11 nt, Human
ugaggcugugg

SEQ ID NO: 3640678 - RNA, 13 nt, Human
ugaggcuuagaga

SEQ ID NO: 3640679 - RNA, 23 nt, Human
ugaggcuuagcuuugcucugcca

SEQ ID NO: 3640680 - RNA, 15 nt, Human
ugaggcuuccagaga

SEQ ID NO: 3640681 - RNA, 17 nt, Human
ugagggaaaagaaaaag

SEQ ID NO: 3640682 - RNA, 17 nt, Human
ugagggaacagacagga

SEQ ID NO: 3640683 - RNA, 20 nt, Human
ugagggaacagacaggagaa

SEQ ID NO: 3640684 - RNA, 21 nt, Human
ugagggacaaauuuaaaacaa

SEQ ID NO: 3640685 - RNA, 23 nt, Human
ugagggacaaauuuaaaacaaac

SEQ ID NO: 3640686 - RNA, 13 nt, Human
ugagggaccagcc

SEQ ID NO: 3640687 - RNA, 18 nt, Human
ugagggacuggaaccagg

SEQ ID NO: 3640688 - RNA, 17 nt, Human
ugagggagaacaagacc

SEQ ID NO: 3640689 - RNA, 14 nt, Human
ugagggagauccca

SEQ ID NO: 3640690 - RNA, 16 nt, Human
ugagggagaugccaug

SEQ ID NO: 3640691 - RNA, 16 nt, Human
ugagggagcuuagcca

SEQ ID NO: 3640692 - RNA, 19 nt, Human
ugagggaggaccuggggca

SEQ ID NO: 3640693 - RNA, 22 nt, Human
ugagggaggaccuggggcacag

SEQ ID NO: 3640694 - RNA, 13 nt, Human
ugagggaggaggc

SEQ ID NO: 3640695 - RNA, 14 nt, Human
ugagggaggaggcc

SEQ ID NO: 3640696 - RNA, 17 nt, Human
ugagggauaagcaaaag

SEQ ID NO: 3640697 - RNA, 23 nt, Human
ugagggaucuauacuugcuuugu

SEQ ID NO: 3640698 - RNA, 15 nt, Human
ugagggcagcagcca

SEQ ID NO: 3640699 - RNA, 16 nt, Human
ugagggcagcagccag

SEQ ID NO: 3640700 - RNA, 17 nt, Human
ugagggcagcagccagc

SEQ ID NO: 3640701 - RNA, 18 nt, Human
ugagggcagcagccagcc

SEQ ID NO: 3640702 - RNA, 20 nt, Human
ugagggcagcagccagcccu

SEQ ID NO: 3640703 - RNA, 21 nt, Human
ugagggcagcagccagcccug

SEQ ID NO: 3640704 - RNA, 23 nt, Human
ugagggcagcagccagcccugcc

SEQ ID NO: 3640705 - RNA, 18 nt, Human
ugagggcaguucgcagcc

SEQ ID NO: 3640706 - RNA, 23 nt, Human
ugagggcaguucgcagccacccu

SEQ ID NO: 3640707 - RNA, 22 nt, Human
ugagggccaaaauauuuggaau

SEQ ID NO: 3640708 - RNA, 12 nt, Human
ugagggcccaga

SEQ ID NO: 3640709 - RNA, 13 nt, Human
ugagggcccagag

SEQ ID NO: 3640710 - RNA, 14 nt, Human
ugcauccuuccuau

SEQ ID NO: 3640711 - RNA, 15 nt, Human
ugcauccuuccuaua

SEQ ID NO: 3640712 - RNA, 18 nt, Human
ugcaucgagucaaaacuc

SEQ ID NO: 3640713 - RNA, 14 nt, Human
ugcaucguccccuc

SEQ ID NO: 3640714 - RNA, 18 nt, Human
ugcaucguccccuccccc

SEQ ID NO: 3640715 - RNA, 15 nt, Human
ugcaucguggagaca

SEQ ID NO: 3640716 - RNA, 12 nt, Human
ugcaucuaagcc

SEQ ID NO: 3640717 - RNA, 21 nt, Human
ugcaucuagaggcuuccuuca

SEQ ID NO: 3640718 - RNA, 14 nt, Human
ugcaucuccaccug

SEQ ID NO: 3640719 - RNA, 23 nt, Human
ugcaucuccacuuggcauuagcu

SEQ ID NO: 3640720 - RNA, 18 nt, Human
ugcaucucccagauaaug

SEQ ID NO: 3640721 - RNA, 13 nt, Human
ugcaucuggggcc

SEQ ID NO: 3640722 - RNA, 18 nt, Human
ugcaucuggguagcugua

SEQ ID NO: 3640723 - RNA, 19 nt, Human
ugcaucuggguagcuguaa

SEQ ID NO: 3640724 - RNA, 20 nt, Human
ugcaucuguauaaguaagaa

SEQ ID NO: 3640725 - RNA, 13 nt, Human
ugcaucuguccuc

SEQ ID NO: 3640726 - RNA, 19 nt, Human
ugcaucuguccucaugugu

SEQ ID NO: 3640727 - RNA, 12 nt, Human
ugcaucuuaaaa

SEQ ID NO: 3640728 - RNA, 14 nt, Human
ugcaucuuacugaa

SEQ ID NO: 3640729 - RNA, 22 nt, Human
ugcaucuuacugaagguaaaau

SEQ ID NO: 3640730 - RNA, 18 nt, Human
ugcaucuuauagcacuuu

SEQ ID NO: 3640731 - RNA, 20 nt, Human
ugcaucuuggggacaucucu

SEQ ID NO: 3640732 - RNA, 17 nt, Human
ugcaucuuugauguguu

SEQ ID NO: 3640733 - RNA, 11 nt, Human
ugcaugaaaau

SEQ ID NO: 3640734 - RNA, 13 nt, Human
ugcaugaagguuu

SEQ ID NO: 3640735 - RNA, 16 nt, Human
ugcaugauugcagaau

SEQ ID NO: 3640736 - RNA, 14 nt, Human
ugcaugauuuugua

SEQ ID NO: 3640737 - RNA, 18 nt, Human
ugcaugauuuuguaaccc

SEQ ID NO: 3640738 - RNA, 22 nt, Human
ugcaugcaaaugagcucugaaa

SEQ ID NO: 3640739 - RNA, 19 nt, Human
ugcaugcacuguucccccu

SEQ ID NO: 3640740 - RNA, 22 nt, Human
ugcaugccaaauuguaguucuu

SEQ ID NO: 3640741 - RNA, 23 nt, Human
ugcaugcccagagacccagcgga

SEQ ID NO: 3640742 - RNA, 14 nt, Human
ugcaugccuggucu

SEQ ID NO: 3640743 - RNA, 21 nt, Human
ugcaugcggcccagcccggcu

SEQ ID NO: 3640744 - RNA, 21 nt, Human
ugcaugcuauucacaauuauu

SEQ ID NO: 3640745 - RNA, 18 nt, Human
ugcaugcucucugcagcc

SEQ ID NO: 3640746 - RNA, 19 nt, Human
ugcaugcugucccuuacgu

SEQ ID NO: 3640747 - RNA, 21 nt, Human
ugcaugcugucccuuacguga

SEQ ID NO: 3640748 - RNA, 14 nt, Human
ugcauggaaaucag

SEQ ID NO: 3640749 - RNA, 19 nt, Human
ugcauggaaauucccuuca

SEQ ID NO: 3640750 - RNA, 20 nt, Human
ugcauggaccuaacauucga

SEQ ID NO: 3640751 - RNA, 13 nt, Human
ugcauggaggccc

SEQ ID NO: 3640752 - RNA, 20 nt, Human
ugcauggcacuugcaucugu

SEQ ID NO: 3640753 - RNA, 18 nt, Human
ugcauggcauccuccagc

SEQ ID NO: 3640754 - RNA, 21 nt, Human
ugcauggcauccuccagcccc

SEQ ID NO: 3640755 - RNA, 16 nt, Human
ugcauggcuccagaaa

SEQ ID NO: 3640756 - RNA, 18 nt, Human
ugcauggcuccagaaaug

SEQ ID NO: 3640757 - RNA, 20 nt, Human
ugcauggcuccagaaauguc

SEQ ID NO: 3640758 - RNA, 12 nt, Human
ugcaugggagca

SEQ ID NO: 3640759 - RNA, 23 nt, Human
ugcauggguuuuguagguacuuu

SEQ ID NO: 3640760 - RNA, 18 nt, Human
ugcaugguaauuuauagu

SEQ ID NO: 3640761 - RNA, 18 nt, Human
ugcauggugccccaggac

SEQ ID NO: 3640762 - RNA, 21 nt, Human
ugcauggugccccaggaccag

SEQ ID NO: 3640763 - RNA, 16 nt, Human
ugcaugguggcaccag

SEQ ID NO: 3640764 - RNA, 13 nt, Human
ugcaugguggcca

SEQ ID NO: 3640765 - RNA, 17 nt, Human
ugcaugguuuagaaagc

SEQ ID NO: 3640766 - RNA, 22 nt, Human
ugcaugguuucagcacuagcca

SEQ ID NO: 3640767 - RNA, 17 nt, Human
ugcaugguuuggagcug

SEQ ID NO: 3640768 - RNA, 13 nt, Human
ugcauguaaucaa

SEQ ID NO: 3640769 - RNA, 21 nt, Human
ugcauguagaggcuuguuuac

SEQ ID NO: 3640770 - RNA, 12 nt, Human
ugcauguaguaa

SEQ ID NO: 3640771 - RNA, 17 nt, Human
ugcauguaguaacacua

SEQ ID NO: 3640772 - RNA, 13 nt, Human
ugcauguaugucu

SEQ ID NO: 3640773 - RNA, 20 nt, Human
ugcaugucaaacaugagaug

SEQ ID NO: 3640774 - RNA, 14 nt, Human
ugcaugucuuuuaa

SEQ ID NO: 3640775 - RNA, 12 nt, Human
ugcaugugaaga

SEQ ID NO: 3640776 - RNA, 17 nt, Human
ugcaugugacucugaag

SEQ ID NO: 3640777 - RNA, 21 nt, Human
ugcaugugguuugguuccucu

SEQ ID NO: 3640778 - RNA, 13 nt, Human
ugcauguguguau

SEQ ID NO: 3640779 - RNA, 15 nt, Human
ugcauguguguauaa

SEQ ID NO: 3640780 - RNA, 13 nt, Human
ugcaugugugugc

SEQ ID NO: 3640781 - RNA, 14 nt, Human
ugcauguuauguuu

SEQ ID NO: 3640782 - RNA, 15 nt, Human
ugcauguuauguuua

SEQ ID NO: 3640783 - RNA, 17 nt, Human
ugcauguuccacuaacc

SEQ ID NO: 3640784 - RNA, 18 nt, Human
ugcauguuccacuaaccc

SEQ ID NO: 3640785 - RNA, 21 nt, Human
ugcauguugucuaagaaauug

SEQ ID NO: 3640786 - RNA, 17 nt, Human
ugcauuaaauuacagaa

SEQ ID NO: 3640787 - RNA, 20 nt, Human
ugcauuaaauuacagaaauu

SEQ ID NO: 3640788 - RNA, 14 nt, Human
ugcauuaaauucac

SEQ ID NO: 3640789 - RNA, 15 nt, Human
ugcauuaaauucaca

SEQ ID NO: 3640790 - RNA, 17 nt, Human
ugcauuaaauucacaaa

SEQ ID NO: 3640791 - RNA, 21 nt, Human
ugcauuaaauucacaaacuuu

SEQ ID NO: 3640792 - RNA, 12 nt, Human
ugcauuacagag

SEQ ID NO: 3640793 - RNA, 16 nt, Human
ugcauuacagagagga

SEQ ID NO: 3640794 - RNA, 17 nt, Human
ugcauuacagagaggag

SEQ ID NO: 3640795 - RNA, 18 nt, Human
ugcauuacagagaggaga

SEQ ID NO: 3640796 - RNA, 22 nt, Human
ugcauuacagagaggagaaaca

SEQ ID NO: 3640797 - RNA, 18 nt, Human
ugcauuacugcaugcacu

SEQ ID NO: 3640798 - RNA, 19 nt, Human
ugcauuagaaauagacagu

SEQ ID NO: 3640799 - RNA, 20 nt, Human
ugcauuagaaauagacagua

SEQ ID NO: 3640800 - RNA, 22 nt, Human
ugcauuagaaauagacaguaua

SEQ ID NO: 3640801 - RNA, 16 nt, Human
ugcauuagcacagauu

SEQ ID NO: 3640802 - RNA, 17 nt, Human
ugcauuagcacagauuu

SEQ ID NO: 3640803 - RNA, 22 nt, Human
ugcauuagggaugccuccuuuc

SEQ ID NO: 3640804 - RNA, 21 nt, Human
ugcauuauauuuguaaauuua

SEQ ID NO: 3640805 - RNA, 21 nt, Human
ugcauuaucuagauacuguau

SEQ ID NO: 3640806 - RNA, 14 nt, Human
ugcauuauuaaauu

SEQ ID NO: 3640807 - RNA, 17 nt, Human
ugcauuauuuuccagau

SEQ ID NO: 3640808 - RNA, 14 nt, Human
ugcauucaaauuaa

SEQ ID NO: 3640809 - RNA, 20 nt, Human
ugcauucacccagacagcuc

SEQ ID NO: 3640810 - RNA, 14 nt, Human
ugcauucccagugg

SEQ ID NO: 3640811 - RNA, 15 nt, Human
ugcauuccuuugucu

SEQ ID NO: 3640812 - RNA, 18 nt, Human
ugcauuccuuugucuuca

SEQ ID NO: 3640813 - RNA, 21 nt, Human
ugcauucguuguguuuuuuaa

SEQ ID NO: 3640814 - RNA, 16 nt, Human
ugcauucuauugccuu

SEQ ID NO: 3640815 - RNA, 18 nt, Human
ugcauucuauugccuucu

SEQ ID NO: 3640816 - RNA, 22 nt, Human
ugcauucuauugccuucuuuga

SEQ ID NO: 3640817 - RNA, 14 nt, Human
ugcauucugccucu

SEQ ID NO: 3640818 - RNA, 19 nt, Human
ugcauucugccucucuagg

SEQ ID NO: 3640819 - RNA, 20 nt, Human
ugcauucugccucucuagga

SEQ ID NO: 3640820 - RNA, 17 nt, Human
ugcauucuuauucauca

SEQ ID NO: 3640821 - RNA, 16 nt, Human
ugcauucuucucuguu

SEQ ID NO: 3640822 - RNA, 16 nt, Human
ugcauucuuucuguau

SEQ ID NO: 3640823 - RNA, 22 nt, Human
ugcauucuuuuaaaagacaaga

SEQ ID NO: 3640824 - RNA, 18 nt, Human
ugcauugaaaagagcuga

SEQ ID NO: 3640825 - RNA, 14 nt, Human
ugcauugaacacaa

SEQ ID NO: 3640826 - RNA, 23 nt, Human
ugcauugaacacaaacuguaaau

SEQ ID NO: 3640827 - RNA, 12 nt, Human
ugcauugaagau

SEQ ID NO: 3640828 - RNA, 20 nt, Human
ugcauugaccgcgacuaauu

SEQ ID NO: 3640829 - RNA, 14 nt, Human
ugcauugacuuuca

SEQ ID NO: 3640830 - RNA, 21 nt, Human
ugcauugacuuucaguaaaca

SEQ ID NO: 3640831 - RNA, 18 nt, Human
ugcauugacuuuccccac

SEQ ID NO: 3640832 - RNA, 13 nt, Human
ugcauugauauug

SEQ ID NO: 3640833 - RNA, 18 nt, Human
ugcauugauauugugaac

SEQ ID NO: 3640834 - RNA, 20 nt, Human
ugcauugcucuggaucuguu

SEQ ID NO: 3640835 - RNA, 17 nt, Human
ugcauuggaacuggagg

SEQ ID NO: 3640836 - RNA, 22 nt, Human
ugcauuggaacuggaggcaggg

SEQ ID NO: 3640837 - RNA, 19 nt, Human
ugcauuggaagaccccacc

SEQ ID NO: 3640838 - RNA, 20 nt, Human
ugcauuggaagaccccaccc

SEQ ID NO: 3640839 - RNA, 11 nt, Human
ugcauugucug

SEQ ID NO: 3640840 - RNA, 17 nt, Human
ugcauugucugucugca

SEQ ID NO: 3640841 - RNA, 12 nt, Human
ugcauugugcuu

SEQ ID NO: 3640842 - RNA, 20 nt, Human
ugcauuuaaaacagacacug

SEQ ID NO: 3640843 - RNA, 22 nt, Human
ugcauuuagcacaaaaaaaauu

SEQ ID NO: 3640844 - RNA, 13 nt, Human
ugcauuuauaugu

SEQ ID NO: 3640845 - RNA, 12 nt, Human
ugcauuucagaa

SEQ ID NO: 3640846 - RNA, 13 nt, Human
ugcauuuccugac

SEQ ID NO: 3640847 - RNA, 18 nt, Human
ugcauuucugaauagaaa

SEQ ID NO: 3640848 - RNA, 20 nt, Human
ugcauuuggagggagugagu

SEQ ID NO: 3640849 - RNA, 16 nt, Human
ugcauuuggucaagau

SEQ ID NO: 3640850 - RNA, 15 nt, Human
ugcauuugucuauuc

SEQ ID NO: 3640851 - RNA, 22 nt, Human
ugcauuugugcguaugcagugu

SEQ ID NO: 3640852 - RNA, 18 nt, Human
ugcauuuguuuauguaau

SEQ ID NO: 3640853 - RNA, 21 nt, Human
ugcauuuguuuuguuuacaga

SEQ ID NO: 3640854 - RNA, 21 nt, Human
ugcauuuuaaaaaugaaauuu

SEQ ID NO: 3640855 - RNA, 16 nt, Human
ugccauggaggcacac

SEQ ID NO: 3640856 - RNA, 17 nt, Human
ugccauggcgugucccu

SEQ ID NO: 3640857 - RNA, 22 nt, Human
ugccauggcuagguagaaguga

SEQ ID NO: 3640858 - RNA, 18 nt, Human
ugccauguaaauccccac

SEQ ID NO: 3640859 - RNA, 20 nt, Human
ugccauguaaauccccacug

SEQ ID NO: 3640860 - RNA, 14 nt, Human
ugccauguaccucc

SEQ ID NO: 3640861 - RNA, 15 nt, Human
ugccaugugaagagg

SEQ ID NO: 3640862 - RNA, 16 nt, Human
ugccaugugaagaggg

SEQ ID NO: 3640863 - RNA, 16 nt, Human
ugccaugugacucugg

SEQ ID NO: 3640864 - RNA, 22 nt, Human
ugccauguggaaggcaagccag

SEQ ID NO: 3640865 - RNA, 17 nt, Human
ugccaugugugcugaac

SEQ ID NO: 3640866 - RNA, 15 nt, Human
ugccauguugccccu

SEQ ID NO: 3640867 - RNA, 16 nt, Human
ugccauguuggccagg

SEQ ID NO: 3640868 - RNA, 19 nt, Human
ugccauguuggccaggcug

SEQ ID NO: 3640869 - RNA, 18 nt, Human
ugccauguuuugccaccc

SEQ ID NO: 3640870 - RNA, 18 nt, Human
ugccauuauuuucuguca

SEQ ID NO: 3640871 - RNA, 19 nt, Human
ugccauuauuuucugucag

SEQ ID NO: 3640872 - RNA, 18 nt, Human
ugccauucauagagagcc

SEQ ID NO: 3640873 - RNA, 11 nt, Human
ugccauuguag

SEQ ID NO: 3640874 - RNA, 22 nt, Human
ugccauuucuuccacaagagcc

SEQ ID NO: 3640875 - RNA, 13 nt, Human
ugccauuugauac

SEQ ID NO: 3640876 - RNA, 17 nt, Human
ugccauuugcacccucc

SEQ ID NO: 3640877 - RNA, 15 nt, Human
ugccauuuguacuga

SEQ ID NO: 3640878 - RNA, 14 nt, Human
ugccauuuugcauu

SEQ ID NO: 3640879 - RNA, 21 nt, Human
ugccauuuuggguuaggagaa

SEQ ID NO: 3640880 - RNA, 15 nt, Human
ugccauuuuucaaaa

SEQ ID NO: 3640881 - RNA, 19 nt, Human
ugcccaaagagcacaaaca

SEQ ID NO: 3640882 - RNA, 23 nt, Human
ugcccaaagagcacaaacauuuu

SEQ ID NO: 3640883 - RNA, 20 nt, Human
ugcccaaagaugcagccggu

SEQ ID NO: 3640884 - RNA, 21 nt, Human
ugcccaaagugcuuccaaggc

SEQ ID NO: 3640885 - RNA, 16 nt, Human
ugcccaacaccagccc

SEQ ID NO: 3640886 - RNA, 22 nt, Human
ugcccaacccuucccucaccuu

SEQ ID NO: 3640887 - RNA, 22 nt, Human
ugcccaaccugcucuccucuug

SEQ ID NO: 3640888 - RNA, 23 nt, Human
ugcccaaccugcucuccucuugc

SEQ ID NO: 3640889 - RNA, 24 nt, Human
ugcccaaccugcucuccucuugcc

SEQ ID NO: 3640890 - RNA, 18 nt, Human
ugcccaacuguguagcau

SEQ ID NO: 3640891 - RNA, 21 nt, Human
ugcccaagaauagaugcugac

SEQ ID NO: 3640892 - RNA, 22 nt, Human
ugcccaagaauagaugcugacu

SEQ ID NO: 3640893 - RNA, 23 nt, Human
ugcccaagaauagaugcugacug

SEQ ID NO: 3640894 - RNA, 16 nt, Human
ugcccaagccagaggc

SEQ ID NO: 3640895 - RNA, 22 nt, Human
ugcccaagccagaggcuggguu

SEQ ID NO: 3640896 - RNA, 14 nt, Human
ugcccaagcccagg

SEQ ID NO: 3640897 - RNA, 16 nt, Human
ugcccaagcccugaga

SEQ ID NO: 3640898 - RNA, 22 nt, Human
ugcccaaguuguggugcugaca

SEQ ID NO: 3640899 - RNA, 20 nt, Human
ugcccaauaugcaguucugc

SEQ ID NO: 3640900 - RNA, 20 nt, Human
ugcccaaugagacucuaggg

SEQ ID NO: 3640901 - RNA, 21 nt, Human
ugcccaaugagacucuagggu

SEQ ID NO: 3640902 - RNA, 15 nt, Human
ugcccaauuggagga

SEQ ID NO: 3640903 - RNA, 15 nt, Human
ugcccacaccuccug

SEQ ID NO: 3640904 - RNA, 21 nt, Human
ugcccacagcccgcaugcagc

SEQ ID NO: 3640905 - RNA, 14 nt, Human
ugcccacaggauca

SEQ ID NO: 3640906 - RNA, 16 nt, Human
ugcccacaggaucagu

SEQ ID NO: 3640907 - RNA, 20 nt, Human
ugcccacagugucaggcacu

SEQ ID NO: 3640908 - RNA, 21 nt, Human
ugcccacagugucaggcacug

SEQ ID NO: 3640909 - RNA, 23 nt, Human
ugcccacagugucaggcacuggg

SEQ ID NO: 3640910 - RNA, 19 nt, Human
ugcccacauguguccaucc

SEQ ID NO: 3640911 - RNA, 18 nt, Human
ugcccacauuuagucucu

SEQ ID NO: 3640912 - RNA, 17 nt, Human
ugcccaccccaccccca

SEQ ID NO: 3640913 - RNA, 19 nt, Human
ugcccaccccacccccacc

SEQ ID NO: 3640914 - RNA, 11 nt, Human
ugcccaccccc

SEQ ID NO: 3640915 - RNA, 14 nt, Human
ugcccacccccugc

SEQ ID NO: 3640916 - RNA, 19 nt, Human
ugcccacccccugcccugc

SEQ ID NO: 3640917 - RNA, 19 nt, Human
ugcccacccguggagaugg

SEQ ID NO: 3640918 - RNA, 20 nt, Human
ugcccacccguggagauggg

SEQ ID NO: 3640919 - RNA, 21 nt, Human
ugcccacccguggagauggga

SEQ ID NO: 3640920 - RNA, 18 nt, Human
ugcccacccugggagaca

SEQ ID NO: 3640921 - RNA, 22 nt, Human
ugcccaccucagccucccaaag

SEQ ID NO: 3640922 - RNA, 12 nt, Human
ugcccaccugcc

SEQ ID NO: 3640923 - RNA, 14 nt, Human
ugcccaccugccca

SEQ ID NO: 3640924 - RNA, 16 nt, Human
ugcccaccugccggcc

SEQ ID NO: 3640925 - RNA, 19 nt, Human
ugcccaccugccuggccgg

SEQ ID NO: 3640926 - RNA, 13 nt, Human
ugcccaccuggcc

SEQ ID NO: 3640927 - RNA, 18 nt, Human
ugcccacgcuggagugca

SEQ ID NO: 3640928 - RNA, 19 nt, Human
ugcccacggagucgugggg

SEQ ID NO: 3640929 - RNA, 15 nt, Human
ugcccacucccugca

SEQ ID NO: 3640930 - RNA, 16 nt, Human
ugcccacucccugcaa

SEQ ID NO: 3640931 - RNA, 14 nt, Human
ugcccacuccugcu

SEQ ID NO: 3640932 - RNA, 19 nt, Human
ugcccacuccugcucugcu

SEQ ID NO: 3640933 - RNA, 17 nt, Human
ugcccagaauaaguuau

SEQ ID NO: 3640934 - RNA, 21 nt, Human
ugcccagaauaaguuauugca

SEQ ID NO: 3640935 - RNA, 10 nt, Human
ugcccagaca

SEQ ID NO: 3640936 - RNA, 22 nt, Human
ugcccagaccccucuggccagg

SEQ ID NO: 3640937 - RNA, 15 nt, Human
ugcccagagacccag

SEQ ID NO: 3640938 - RNA, 23 nt, Human
ugcccagagacccagcggacaca

SEQ ID NO: 3640939 - RNA, 21 nt, Human
ugcccagagaugccuccaccg

SEQ ID NO: 3640940 - RNA, 15 nt, Human
ugcccagagcugggu

SEQ ID NO: 3640941 - RNA, 19 nt, Human
ugcccagagggcccaggca

SEQ ID NO: 3640942 - RNA, 16 nt, Human
ugcccagaucccagaa

SEQ ID NO: 3640943 - RNA, 17 nt, Human
ugcccagaucccagaag

SEQ ID NO: 3640944 - RNA, 22 nt, Human
ugcccagaucccagaaggaccu

SEQ ID NO: 3640945 - RNA, 16 nt, Human
ugcccagccucuuucc

SEQ ID NO: 3640946 - RNA, 16 nt, Human
ugcccagccuggaugc

SEQ ID NO: 3640947 - RNA, 17 nt, Human
ugcccagccuggaugcc

SEQ ID NO: 3640948 - RNA, 20 nt, Human
ugcccagccuggaugccauc

SEQ ID NO: 3640949 - RNA, 18 nt, Human
ugcccagcggacaguggc

SEQ ID NO: 3640950 - RNA, 21 nt, Human
ugcccagcggacaguggcagg

SEQ ID NO: 3640951 - RNA, 21 nt, Human
ugcccagcucagucuucccua

SEQ ID NO: 3640952 - RNA, 20 nt, Human
ugcccagcuugggcccagcu

SEQ ID NO: 3640953 - RNA, 19 nt, Human
ugcccaggagagccagccc

SEQ ID NO: 3640954 - RNA, 20 nt, Human
ugcccaggcaggucuugaac

SEQ ID NO: 3640955 - RNA, 14 nt, Human
ugcccaggcccaga

SEQ ID NO: 3640956 - RNA, 15 nt, Human
ugcccaggcccagac

SEQ ID NO: 3640957 - RNA, 12 nt, Human
ugcccaggcccc

SEQ ID NO: 3640958 - RNA, 15 nt, Human
ugcccaggccccugc

SEQ ID NO: 3640959 - RNA, 20 nt, Human
ugcccaggccccugccaccc

SEQ ID NO: 3640960 - RNA, 20 nt, Human
ugcccaggccggccagccuc

SEQ ID NO: 3640961 - RNA, 21 nt, Human
ugcccaggccggccagccuca

SEQ ID NO: 3640962 - RNA, 22 nt, Human
ugcccaggccggccagccucac

SEQ ID NO: 3640963 - RNA, 14 nt, Human
ugcccaggcuccau

SEQ ID NO: 3640964 - RNA, 11 nt, Human
ugcccaggcug

SEQ ID NO: 3640965 - RNA, 20 nt, Human
ugcccaggcuggcgugcagu

SEQ ID NO: 3640966 - RNA, 13 nt, Human
ugcccaggcuggu

SEQ ID NO: 3640967 - RNA, 14 nt, Human
ugcccaggcugugc

SEQ ID NO: 3640968 - RNA, 17 nt, Human
ugcccagggauuugucc

SEQ ID NO: 3640969 - RNA, 19 nt, Human
ugcccagggcucagccugg

SEQ ID NO: 3640970 - RNA, 16 nt, Human
ugcccaggggugcccc

SEQ ID NO: 3640971 - RNA, 17 nt, Human
ugcccagguggcugugg

SEQ ID NO: 3640972 - RNA, 14 nt, Human
ugcccaguccccca

SEQ ID NO: 3640973 - RNA, 23 nt, Human
ugcccagucccccaaccccagcc

SEQ ID NO: 3640974 - RNA, 14 nt, Human
ugcccaguuaaucu

SEQ ID NO: 3640975 - RNA, 23 nt, Human
ugcccaguuaaucuugcuuucuu

SEQ ID NO: 3640976 - RNA, 20 nt, Human
ugcccaucacaggguugggc

SEQ ID NO: 3640977 - RNA, 16 nt, Human
ugcccauccugucugu

SEQ ID NO: 3640978 - RNA, 21 nt, Human
ugcccaucgugaagaagccug

SEQ ID NO: 3640979 - RNA, 22 nt, Human
ugcccaucgugaagaagccugu

SEQ ID NO: 3640980 - RNA, 17 nt, Human
ugcccaugcugggcucc

SEQ ID NO: 3640981 - RNA, 15 nt, Human
ugcccaugggcacug

SEQ ID NO: 3640982 - RNA, 18 nt, Human
ugcccaugggcacugcug

SEQ ID NO: 3640983 - RNA, 22 nt, Human
ugcccaugggcacugcugggug

SEQ ID NO: 3640984 - RNA, 18 nt, Human
ugcccauucaccaaaauu

SEQ ID NO: 3640985 - RNA, 12 nt, Human
ugcccauuucau

SEQ ID NO: 3640986 - RNA, 21 nt, Human
ugcccauuucauauucuuuca

SEQ ID NO: 3640987 - RNA, 22 nt, Human
ugccccaaauaacuucaguccu

SEQ ID NO: 3640988 - RNA, 23 nt, Human
ugccccaaauaacuucaguccug

SEQ ID NO: 3640989 - RNA, 16 nt, Human
ugccccaaccugcuga

SEQ ID NO: 3640990 - RNA, 18 nt, Human
ugccccacuuguccuuag

SEQ ID NO: 3640991 - RNA, 19 nt, Human
ugccccacuuguccuuagc

SEQ ID NO: 3640992 - RNA, 15 nt, Human
ugccccagagcuguu

SEQ ID NO: 3640993 - RNA, 17 nt, Human
ugccccagagcuguuua

SEQ ID NO: 3640994 - RNA, 12 nt, Human
ugccccagccag

SEQ ID NO: 3640995 - RNA, 13 nt, Human
ugccccagccaga

SEQ ID NO: 3640996 - RNA, 14 nt, Human
ugccccagcucugg

SEQ ID NO: 3640997 - RNA, 18 nt, Human
ugccccagcucuggcuuc

SEQ ID NO: 3640998 - RNA, 18 nt, Human
ugcuuguaccucuggcug

SEQ ID NO: 3640999 - RNA, 22 nt, Human
ugcuuguaccucuggcugacua

SEQ ID NO: 3641000 - RNA, 20 nt, Human
ugcuugucuucugguacuuu

SEQ ID NO: 3641001 - RNA, 16 nt, Human
ugcuugugaaaaugug

SEQ ID NO: 3641002 - RNA, 18 nt, Human
ugcuugugaaaggaaaga

SEQ ID NO: 3641003 - RNA, 20 nt, Human
ugcuuguguaauuuauguga

SEQ ID NO: 3641004 - RNA, 12 nt, Human
ugcuuguguuau

SEQ ID NO: 3641005 - RNA, 18 nt, Human
ugcuuguuaacugagugc

SEQ ID NO: 3641006 - RNA, 14 nt, Human
ugcuuguuggauuu

SEQ ID NO: 3641007 - RNA, 22 nt, Human
ugcuuguugggauuccugaccc

SEQ ID NO: 3641008 - RNA, 23 nt, Human
ugcuuguugggauuccugaccca

SEQ ID NO: 3641009 - RNA, 23 nt, Human
ugcuuuaaaaacuauuuaacuug

SEQ ID NO: 3641010 - RNA, 12 nt, Human
ugcuuuaaacau

SEQ ID NO: 3641011 - RNA, 16 nt, Human
ugcuuuaaagauaaaa

SEQ ID NO: 3641012 - RNA, 17 nt, Human
ugcuuuaaaguguaaua

SEQ ID NO: 3641013 - RNA, 18 nt, Human
ugcuuuaauauaaaugca

SEQ ID NO: 3641014 - RNA, 20 nt, Human
ugcuuuaauauaaaugcaaa

SEQ ID NO: 3641015 - RNA, 20 nt, Human
ugcuuuaauaucaucaguau

SEQ ID NO: 3641016 - RNA, 15 nt, Human
ugcuuuaauugugaa

SEQ ID NO: 3641017 - RNA, 20 nt, Human
ugcuuuaauugugaauugau

SEQ ID NO: 3641018 - RNA, 14 nt, Human
ugcuuuaauuuuag

SEQ ID NO: 3641019 - RNA, 17 nt, Human
ugcuuuaauuuuagcaa

SEQ ID NO: 3641020 - RNA, 18 nt, Human
ugcuuuaccaaacagcaa

SEQ ID NO: 3641021 - RNA, 21 nt, Human
ugcuuuaccuuuucagggcug

SEQ ID NO: 3641022 - RNA, 15 nt, Human
ugcuuuagacuugaa

SEQ ID NO: 3641023 - RNA, 19 nt, Human
ugcuuuagacuugaaaaga

SEQ ID NO: 3641024 - RNA, 17 nt, Human
ugcuuuaggcucacggc

SEQ ID NO: 3641025 - RNA, 15 nt, Human
ugcuuuaugccuucu

SEQ ID NO: 3641026 - RNA, 13 nt, Human
ugcuuuaugcuga

SEQ ID NO: 3641027 - RNA, 20 nt, Human
ugcuuuauuaauguuuucaa

SEQ ID NO: 3641028 - RNA, 21 nt, Human
ugcuuuauuaauguuuucaaa

SEQ ID NO: 3641029 - RNA, 12 nt, Human
ugcuuucagaua

SEQ ID NO: 3641030 - RNA, 17 nt, Human
ugcuuucagauacugga

SEQ ID NO: 3641031 - RNA, 19 nt, Human
ugcuuucaucuuggucaca

SEQ ID NO: 3641032 - RNA, 14 nt, Human
ugcuuuccaaaccu

SEQ ID NO: 3641033 - RNA, 14 nt, Human
ugcuuuccaaagcc

SEQ ID NO: 3641034 - RNA, 20 nt, Human
ugcuuuccagaauaauauga

SEQ ID NO: 3641035 - RNA, 14 nt, Human
ugcuuuccauauuu

SEQ ID NO: 3641036 - RNA, 15 nt, Human
ugcuuuccauauuuu

SEQ ID NO: 3641037 - RNA, 22 nt, Human
ugcuuuccauauuuuuuuccuu

SEQ ID NO: 3641038 - RNA, 19 nt, Human
ugcuuuccauucgugaaaa

SEQ ID NO: 3641039 - RNA, 20 nt, Human
ugcuuuccauucgugaaaac

SEQ ID NO: 3641040 - RNA, 21 nt, Human
ugcuuuccguggcacugcaua

SEQ ID NO: 3641041 - RNA, 18 nt, Human
ugcuuucgaacugcuagu

SEQ ID NO: 3641042 - RNA, 19 nt, Human
ugcuuucguguaaauuaug

SEQ ID NO: 3641043 - RNA, 13 nt, Human
ugcuuucuauugu

SEQ ID NO: 3641044 - RNA, 18 nt, Human
ugcuuucuauuguacaga

SEQ ID NO: 3641045 - RNA, 18 nt, Human
ugcuuucuccauuguaaa

SEQ ID NO: 3641046 - RNA, 22 nt, Human
ugcuuucuccuuuaauuguaaa

SEQ ID NO: 3641047 - RNA, 20 nt, Human
ugcuuucugaagcuuuacca

SEQ ID NO: 3641048 - RNA, 14 nt, Human
ugcuuucugaucaa

SEQ ID NO: 3641049 - RNA, 15 nt, Human
ugcuuucugcucagc

SEQ ID NO: 3641050 - RNA, 15 nt, Human
ugcuuucuguuccaa

SEQ ID NO: 3641051 - RNA, 15 nt, Human
ugcuuucuuucguuu

SEQ ID NO: 3641052 - RNA, 18 nt, Human
ugcuuucuuuguuuggcu

SEQ ID NO: 3641053 - RNA, 20 nt, Human
ugcuuucuuuuuuaaaauca

SEQ ID NO: 3641054 - RNA, 22 nt, Human
ugcuuugaagcaguugugucag

SEQ ID NO: 3641055 - RNA, 22 nt, Human
ugcuuugacucaccuguuacuu

SEQ ID NO: 3641056 - RNA, 13 nt, Human
ugcuuugauauuu

SEQ ID NO: 3641057 - RNA, 17 nt, Human
ugcuuugauuuacagca

SEQ ID NO: 3641058 - RNA, 13 nt, Human
ugcuuugcuuucu

SEQ ID NO: 3641059 - RNA, 14 nt, Human
ugcuuugcuuucug

SEQ ID NO: 3641060 - RNA, 19 nt, Human
ugcuuugcuuucugcucag

SEQ ID NO: 3641061 - RNA, 17 nt, Human
ugcuuuggcuuacuugu

SEQ ID NO: 3641062 - RNA, 21 nt, Human
ugcuuugggcugcccuggugc

SEQ ID NO: 3641063 - RNA, 19 nt, Human
ugcuuuggucacuuuuaga

SEQ ID NO: 3641064 - RNA, 19 nt, Human
ugcuuuguaggugucucau

SEQ ID NO: 3641065 - RNA, 12 nt, Human
ugcuuuguauug

SEQ ID NO: 3641066 - RNA, 15 nt, Human
ugcuuugucuccucu

SEQ ID NO: 3641067 - RNA, 16 nt, Human
ugcuuugucuccucua

SEQ ID NO: 3641068 - RNA, 22 nt, Human
ugcuuugugauuuuuguaauuu

SEQ ID NO: 3641069 - RNA, 16 nt, Human
ugcuuugugugauuga

SEQ ID NO: 3641070 - RNA, 18 nt, Human
ugcuuuguuaccuuaaaa

SEQ ID NO: 3641071 - RNA, 19 nt, Human
ugcuuuguugugugccucu

SEQ ID NO: 3641072 - RNA, 20 nt, Human
ugcuuuguugugugccucua

SEQ ID NO: 3641073 - RNA, 21 nt, Human
ugcuuuguugugugccucuag

SEQ ID NO: 3641074 - RNA, 13 nt, Human
ugcuuuuaaaacu

SEQ ID NO: 3641075 - RNA, 13 nt, Human
ugcuuuuaaaauu

SEQ ID NO: 3641076 - RNA, 13 nt, Human
ugcuuuuaccaug

SEQ ID NO: 3641077 - RNA, 12 nt, Human
ugcuuuuauauc

SEQ ID NO: 3641078 - RNA, 20 nt, Human
ugcuuuuauaucuguaugua

SEQ ID NO: 3641079 - RNA, 16 nt, Human
ugcuuuuauuuugaaa

SEQ ID NO: 3641080 - RNA, 21 nt, Human
ugcuuuuauuuugaaaagcuu

SEQ ID NO: 3641081 - RNA, 17 nt, Human
ugcuuuucacugcugca

SEQ ID NO: 3641082 - RNA, 14 nt, Human
ugcuuuucagcuga

SEQ ID NO: 3641083 - RNA, 16 nt, Human
ugcuuuucaugcaaac

SEQ ID NO: 3641084 - RNA, 17 nt, Human
ugcuuuucaugcaaacu

SEQ ID NO: 3641085 - RNA, 19 nt, Human
ugcuuuucccucuuuucuu

SEQ ID NO: 3641086 - RNA, 17 nt, Human
ugcuuuucccuuuguga

SEQ ID NO: 3641087 - RNA, 18 nt, Human
ugcuuuucccuuugugag

SEQ ID NO: 3641088 - RNA, 21 nt, Human
ugcuuuucccuuugugaguca

SEQ ID NO: 3641089 - RNA, 12 nt, Human
ugcuuuugccca

SEQ ID NO: 3641090 - RNA, 23 nt, Human
ugcuuuuuaauauugauaugcuu

SEQ ID NO: 3641091 - RNA, 15 nt, Human
ugcuuuuuauaaaaa

SEQ ID NO: 3641092 - RNA, 18 nt, Human
ugcuuuuuauuucugcau

SEQ ID NO: 3641093 - RNA, 19 nt, Human
ugcuuuuuauuucugcaua

SEQ ID NO: 3641094 - RNA, 15 nt, Human
ugcuuuuucaccaga

SEQ ID NO: 3641095 - RNA, 14 nt, Human
ugcuuuuuccaacu

SEQ ID NO: 3641096 - RNA, 21 nt, Human
ugcuuuuuccaacucagaaau

SEQ ID NO: 3641097 - RNA, 13 nt, Human
ugcuuuuucuaau

SEQ ID NO: 3641098 - RNA, 13 nt, Human
ugcuuuuucugac

SEQ ID NO: 3641099 - RNA, 14 nt, Human
ugcuuuuucuuguu

SEQ ID NO: 3641100 - RNA, 13 nt, Human
ugcuuuuugaaau

SEQ ID NO: 3641101 - RNA, 14 nt, Human
ugcuuuuugaaaug

SEQ ID NO: 3641102 - RNA, 15 nt, Human
ugcuuuuugaaauga

SEQ ID NO: 3641103 - RNA, 20 nt, Human
ugcuuuuugaaaugaaauuu

SEQ ID NO: 3641104 - RNA, 20 nt, Human
ugcuuuuugagguggcacuu

SEQ ID NO: 3641105 - RNA, 21 nt, Human
ugcuuuuugagguggcacuuu

SEQ ID NO: 3641106 - RNA, 14 nt, Human
ugcuuuuuggaaag

SEQ ID NO: 3641107 - RNA, 16 nt, Human
ugcuuuuuguguuuuu

SEQ ID NO: 3641108 - RNA, 13 nt, Human
ugcuuuuuuugaa

SEQ ID NO: 3641109 - RNA, 15 nt, Human
ugcuuuuuuugaaac

SEQ ID NO: 3641110 - RNA, 13 nt, Human
uggaaaaaaaaaa

SEQ ID NO: 3641111 - RNA, 16 nt, Human
uggaaaaaaaaaaaag

SEQ ID NO: 3641112 - RNA, 17 nt, Human
uggaaaaaaaaaaaaga

SEQ ID NO: 3641113 - RNA, 16 nt, Human
uggaaaaaaaaaagac

SEQ ID NO: 3641114 - RNA, 17 nt, Human
uggaaaaaaaaaagaca

SEQ ID NO: 3641115 - RNA, 22 nt, Human
uggaaaaaaugauguucauuua

SEQ ID NO: 3641116 - RNA, 23 nt, Human
uggaaaaacaucugaaagccacg

SEQ ID NO: 3641117 - RNA, 17 nt, Human
uggaaaaauaaaacugu

SEQ ID NO: 3641118 - RNA, 13 nt, Human
uggaaaaaucaca

SEQ ID NO: 3641119 - RNA, 18 nt, Human
uggaaaaaugagagaagg

SEQ ID NO: 3641120 - RNA, 14 nt, Human
uggaaaacuuaguu

SEQ ID NO: 3641121 - RNA, 20 nt, Human
uggaaaacuuaguuugugaa

SEQ ID NO: 3641122 - RNA, 16 nt, Human
uggaaaaggaagacua

SEQ ID NO: 3641123 - RNA, 20 nt, Human
uggaaaaggaagacuagagg

SEQ ID NO: 3641124 - RNA, 22 nt, Human
uggaaaaguauguuagugcaaa

SEQ ID NO: 3641125 - RNA, 16 nt, Human
uggaaacaaaguggaa

SEQ ID NO: 3641126 - RNA, 20 nt, Human
uggaaacaaaguggaaggaa

SEQ ID NO: 3641127 - RNA, 22 nt, Human
uggaaacaaaguggaaggaaag

SEQ ID NO: 3641128 - RNA, 17 nt, Human
uggaaacacuaaauguu

SEQ ID NO: 3641129 - RNA, 20 nt, Human
uggaaacauuuauauuuuua

SEQ ID NO: 3641130 - RNA, 18 nt, Human
uggaaacauuuuuuaaaa

SEQ ID NO: 3641131 - RNA, 17 nt, Human
uggaaacccauaggccc

SEQ ID NO: 3641132 - RNA, 17 nt, Human
uggaaaccugaaaaaaa

SEQ ID NO: 3641133 - RNA, 16 nt, Human
uggaaaccuuccaccc

SEQ ID NO: 3641134 - RNA, 15 nt, Human
uggaaacuaaaacuu

SEQ ID NO: 3641135 - RNA, 18 nt, Human
uggaaacuauguguuuuu

SEQ ID NO: 3641136 - RNA, 19 nt, Human
uggaaacucuuuaacuucu

SEQ ID NO: 3641137 - RNA, 12 nt, Human
uggaaacugaau

SEQ ID NO: 3641138 - RNA, 15 nt, Human
uggaaacugaaugcu

SEQ ID NO: 3641139 - RNA, 16 nt, Human
uggaaacugaaugcuc

SEQ ID NO: 3641140 - RNA, 21 nt, Human
uggaaacuggaugaggucaua

SEQ ID NO: 3641141 - RNA, 17 nt, Human
uggaaacuguugccaga

SEQ ID NO: 3641142 - RNA, 23 nt, Human
uggaaagacagcuucucauccug

SEQ ID NO: 3641143 - RNA, 20 nt, Human
uggacucagggcagcgccag

SEQ ID NO: 3641144 - RNA, 18 nt, Human
uggacuccagaucugcac

SEQ ID NO: 3641145 - RNA, 20 nt, Human
uggacuccagccugccuggc

SEQ ID NO: 3641146 - RNA, 21 nt, Human
uggacuccagccugccuggca

SEQ ID NO: 3641147 - RNA, 17 nt, Human
uggacuccggcccuccu

SEQ ID NO: 3641148 - RNA, 21 nt, Human
uggacucuacacugugaacuu

SEQ ID NO: 3641149 - RNA, 17 nt, Human
uggacucuccccucuua

SEQ ID NO: 3641150 - RNA, 16 nt, Human
uggacucugcacauga

SEQ ID NO: 3641151 - RNA, 17 nt, Human
uggacucugcacaugaa

SEQ ID NO: 3641152 - RNA, 17 nt, Human
uggacucugcacauguc

SEQ ID NO: 3641153 - RNA, 18 nt, Human
uggacucuggacuuucuc

SEQ ID NO: 3641154 - RNA, 22 nt, Human
uggacucuggugccuccagagg

SEQ ID NO: 3641155 - RNA, 15 nt, Human
uggacucuguccuga

SEQ ID NO: 3641156 - RNA, 23 nt, Human
uggacucuguccugaaggccuga

SEQ ID NO: 3641157 - RNA, 18 nt, Human
uggacucuugcucuuucu

SEQ ID NO: 3641158 - RNA, 19 nt, Human
uggacucuuugguggcuuu

SEQ ID NO: 3641159 - RNA, 15 nt, Human
uggacugaagccugc

SEQ ID NO: 3641160 - RNA, 17 nt, Human
uggacugaagccugcag

SEQ ID NO: 3641161 - RNA, 18 nt, Human
uggacugaagccugcagg

SEQ ID NO: 3641162 - RNA, 13 nt, Human
uggacugacauuu

SEQ ID NO: 3641163 - RNA, 14 nt, Human
uggacugaggccug

SEQ ID NO: 3641164 - RNA, 19 nt, Human
uggacugagugggaagccc

SEQ ID NO: 3641165 - RNA, 15 nt, Human
uggacugaugcuuuu

SEQ ID NO: 3641166 - RNA, 14 nt, Human
uggacugcagaagc

SEQ ID NO: 3641167 - RNA, 18 nt, Human
uggacuggaaaaucucuu

SEQ ID NO: 3641168 - RNA, 23 nt, Human
uggacuggaggccccuggagcca

SEQ ID NO: 3641169 - RNA, 17 nt, Human
uggacuggaguggagca

SEQ ID NO: 3641170 - RNA, 14 nt, Human
uggacuggccccug

SEQ ID NO: 3641171 - RNA, 16 nt, Human
uggacuggccccuggg

SEQ ID NO: 3641172 - RNA, 17 nt, Human
uggacuggccccugggu

SEQ ID NO: 3641173 - RNA, 20 nt, Human
uggacuggcuagaguccuca

SEQ ID NO: 3641174 - RNA, 23 nt, Human
uggacuggcuguccuuuccagug

SEQ ID NO: 3641175 - RNA, 14 nt, Human
uggacugguuuuca

SEQ ID NO: 3641176 - RNA, 20 nt, Human
uggacugugaugccacacag

SEQ ID NO: 3641177 - RNA, 21 nt, Human
uggacuguggcacuugccugg

SEQ ID NO: 3641178 - RNA, 22 nt, Human
uggacuguggcacuugccuggg

SEQ ID NO: 3641179 - RNA, 15 nt, Human
uggacuguggugacu

SEQ ID NO: 3641180 - RNA, 16 nt, Human
uggacuguucccugag

SEQ ID NO: 3641181 - RNA, 17 nt, Human
uggacuguuuucucucg

SEQ ID NO: 3641182 - RNA, 17 nt, Human
uggacuuaaccggaguu

SEQ ID NO: 3641183 - RNA, 19 nt, Human
uggacuuaagcaucuggcu

SEQ ID NO: 3641184 - RNA, 21 nt, Human
uggacuuagaaagcaggggcu

SEQ ID NO: 3641185 - RNA, 14 nt, Human
uggacuucaaagca

SEQ ID NO: 3641186 - RNA, 18 nt, Human
uggacuucacauaagcuc

SEQ ID NO: 3641187 - RNA, 11 nt, Human
uggacuucugg

SEQ ID NO: 3641188 - RNA, 15 nt, Human
uggacuucuggggua

SEQ ID NO: 3641189 - RNA, 13 nt, Human
uggacuuguauau

SEQ ID NO: 3641190 - RNA, 17 nt, Human
uggacuuguauauuugu

SEQ ID NO: 3641191 - RNA, 18 nt, Human
uggacuuuccacccccuc

SEQ ID NO: 3641192 - RNA, 18 nt, Human
uggacuuucucuaauaau

SEQ ID NO: 3641193 - RNA, 21 nt, Human
uggacuuucucuaauaauaaa

SEQ ID NO: 3641194 - RNA, 24 nt, Human
uggacuuuguuaguuucuccaagc

SEQ ID NO: 3641195 - RNA, 13 nt, Human
uggagaaaauggg

SEQ ID NO: 3641196 - RNA, 17 nt, Human
uggagaaacuguagucu

SEQ ID NO: 3641197 - RNA, 19 nt, Human
uggagaaagcacugaccug

SEQ ID NO: 3641198 - RNA, 18 nt, Human
uggagaaagcugacuugg

SEQ ID NO: 3641199 - RNA, 15 nt, Human
uggagaaaggaguga

SEQ ID NO: 3641200 - RNA, 21 nt, Human
uggagaaagggcccugggccu

SEQ ID NO: 3641201 - RNA, 15 nt, Human
uggagaaaugaaaac

SEQ ID NO: 3641202 - RNA, 18 nt, Human
uggagaacuagaaccugg

SEQ ID NO: 3641203 - RNA, 21 nt, Human
uggagaacuagaaccuggagg

SEQ ID NO: 3641204 - RNA, 14 nt, Human
uggagaacuagaga

SEQ ID NO: 3641205 - RNA, 15 nt, Human
uggagaacuccuagg

SEQ ID NO: 3641206 - RNA, 17 nt, Human
uggagaagacccucccc

SEQ ID NO: 3641207 - RNA, 14 nt, Human
uggagaagagagga

SEQ ID NO: 3641208 - RNA, 16 nt, Human
uggagaagagaggaga

SEQ ID NO: 3641209 - RNA, 22 nt, Human
uggagaagcacacucuggucuu

SEQ ID NO: 3641210 - RNA, 19 nt, Human
uggagaagccacaggccug

SEQ ID NO: 3641211 - RNA, 23 nt, Human
uggagaagccacaggccugagau

SEQ ID NO: 3641212 - RNA, 13 nt, Human
uggagaagccauu

SEQ ID NO: 3641213 - RNA, 13 nt, Human
uggagaagcugca

SEQ ID NO: 3641214 - RNA, 14 nt, Human
uggagaagcugcag

SEQ ID NO: 3641215 - RNA, 12 nt, Human
uggagaaggaag

SEQ ID NO: 3641216 - RNA, 14 nt, Human
uggagaaggaaggc

SEQ ID NO: 3641217 - RNA, 23 nt, Human
uggagaagucucagcuaagcuca

SEQ ID NO: 3641218 - RNA, 22 nt, Human
uggagaagucuuagacuugaaa

SEQ ID NO: 3641219 - RNA, 18 nt, Human
uggagaauaauucuuuga

SEQ ID NO: 3641220 - RNA, 20 nt, Human
uggagaaucacaggcugggc

SEQ ID NO: 3641221 - RNA, 22 nt, Human
uggagaaugcaccauacucaug

SEQ ID NO: 3641222 - RNA, 17 nt, Human
uggagaauugcugaagg

SEQ ID NO: 3641223 - RNA, 22 nt, Human
uggagaauugcugaagggcauu

SEQ ID NO: 3641224 - RNA, 13 nt, Human
uggagacaaugca

SEQ ID NO: 3641225 - RNA, 16 nt, Human
uggagacaaugucugc

SEQ ID NO: 3641226 - RNA, 19 nt, Human
uggagacagccccagagca

SEQ ID NO: 3641227 - RNA, 20 nt, Human
uggagacauuccugggcaca

SEQ ID NO: 3641228 - RNA, 21 nt, Human
uggagacauuccugggcacag

SEQ ID NO: 3641229 - RNA, 22 nt, Human
uggagacauuccugggcacagu

SEQ ID NO: 3641230 - RNA, 20 nt, Human
uggagaccccaccagccuca

SEQ ID NO: 3641231 - RNA, 20 nt, Human
uggagacguggaaccucugu

SEQ ID NO: 3641232 - RNA, 23 nt, Human
uggagacguggaaccucugucuc

SEQ ID NO: 3641233 - RNA, 18 nt, Human
uggagacuaagcccuguc

SEQ ID NO: 3641234 - RNA, 18 nt, Human
uggagacuccugcccugu

SEQ ID NO: 3641235 - RNA, 20 nt, Human
uggagacugcuccugagccc

SEQ ID NO: 3641236 - RNA, 19 nt, Human
uggagacugcuucccaucc

SEQ ID NO: 3641237 - RNA, 19 nt, Human
uggagacugguccugugug

SEQ ID NO: 3641238 - RNA, 21 nt, Human
uggagacugugugugcccucu

SEQ ID NO: 3641239 - RNA, 22 nt, Human
uggagagaaacaauaaagagau

SEQ ID NO: 3641240 - RNA, 21 nt, Human
uggagagaaggccucccuagc

SEQ ID NO: 3641241 - RNA, 23 nt, Human
uggagagaaguuucuggcccugg

SEQ ID NO: 3641242 - RNA, 14 nt, Human
uggagagaggauuu

SEQ ID NO: 3641243 - RNA, 19 nt, Human
uggagagccagaaccugga

SEQ ID NO: 3641244 - RNA, 14 nt, Human
uggagagcccuggg

SEQ ID NO: 3641245 - RNA, 18 nt, Human
uggagagcuagaaccugg

SEQ ID NO: 3641246 - RNA, 19 nt, Human
uggagagcuagaaccugga

SEQ ID NO: 3641247 - RNA, 21 nt, Human
uggagagcuagaaccuggaga

SEQ ID NO: 3641248 - RNA, 23 nt, Human
uggagagcuagaaccuggagagc

SEQ ID NO: 3641249 - RNA, 17 nt, Human
uggagagcuaggagcaa

SEQ ID NO: 3641250 - RNA, 23 nt, Human
uggagagcuaggagcaaagccug

SEQ ID NO: 3641251 - RNA, 18 nt, Human
uggagagcuggagccugg

SEQ ID NO: 3641252 - RNA, 12 nt, Human
uggagaggaaca

SEQ ID NO: 3641253 - RNA, 16 nt, Human
uggagaggcccucugg

SEQ ID NO: 3641254 - RNA, 17 nt, Human
uggagagggaaugugaa

SEQ ID NO: 3641255 - RNA, 19 nt, Human
uggagagggaugaggugcu

SEQ ID NO: 3641256 - RNA, 17 nt, Human
uggagagugcaacagua

SEQ ID NO: 3641257 - RNA, 20 nt, Human
uggagagugcaacaguagca

SEQ ID NO: 3641258 - RNA, 19 nt, Human
uggagaguucaauggcugc

SEQ ID NO: 3641259 - RNA, 16 nt, Human
uggagauacuggugga

SEQ ID NO: 3641260 - RNA, 23 nt, Human
uggagaucaccaguguguggcuu

SEQ ID NO: 3641261 - RNA, 14 nt, Human
uggagauccuccug

SEQ ID NO: 3641262 - RNA, 18 nt, Human
uggagauccuccugcaga

SEQ ID NO: 3641263 - RNA, 20 nt, Human
uggagauccuccugcagacc

SEQ ID NO: 3641264 - RNA, 16 nt, Human
uggagaugaggccaga

SEQ ID NO: 3641265 - RNA, 18 nt, Human
uggagaugcugagggugu

SEQ ID NO: 3641266 - RNA, 11 nt, Human
uggagauguuu

SEQ ID NO: 3641267 - RNA, 19 nt, Human
uggagauguuuuagaguua

SEQ ID NO: 3641268 - RNA, 19 nt, Human
uggagauuugaaggucugc

SEQ ID NO: 3641269 - RNA, 18 nt, Human
uggagcaaagugguaggu

SEQ ID NO: 3641270 - RNA, 20 nt, Human
uggagcacaauaaauggcug

SEQ ID NO: 3641271 - RNA, 14 nt, Human
uggagcagaagcag

SEQ ID NO: 3641272 - RNA, 16 nt, Human
uggagcagaggggcug

SEQ ID NO: 3641273 - RNA, 18 nt, Human
uggagcaggcggugggga

SEQ ID NO: 3641274 - RNA, 15 nt, Human
uggagcaucaagcca

SEQ ID NO: 3641275 - RNA, 17 nt, Human
uggagcauuggcugaga

SEQ ID NO: 3641276 - RNA, 16 nt, Human
uggagccaacugcugc

SEQ ID NO: 3641277 - RNA, 17 nt, Human
uggagccaaggguucag

SEQ ID NO: 3641278 - RNA, 17 nt, Human
uggagccaccuguccca

SEQ ID NO: 3641279 - RNA, 22 nt, Human
uggagccaccugucccaccuca

SEQ ID NO: 3641280 - RNA, 15 nt, Human
uggagccacucuguu

SEQ ID NO: 3641281 - RNA, 11 nt, Human
uggagccaggc

SEQ ID NO: 3641282 - RNA, 15 nt, Human
uggagccaggcgugu

SEQ ID NO: 3641283 - RNA, 16 nt, Human
uggagcccacuguacu

SEQ ID NO: 3641284 - RNA, 19 nt, Human
uggagcccacuguacuugc

SEQ ID NO: 3641285 - RNA, 23 nt, Human
uggagcccacuguacuugcucuu

SEQ ID NO: 3641286 - RNA, 22 nt, Human
uggcacccaccguggaggagga

SEQ ID NO: 3641287 - RNA, 15 nt, Human
uggcacccggccccu

SEQ ID NO: 3641288 - RNA, 24 nt, Human
uggcaccgaagcccagagggucug

SEQ ID NO: 3641289 - RNA, 19 nt, Human
uggcaccugucugcuccag

SEQ ID NO: 3641290 - RNA, 22 nt, Human
uggcaccuucagacuuugcuuc

SEQ ID NO: 3641291 - RNA, 13 nt, Human
uggcaccuucccc

SEQ ID NO: 3641292 - RNA, 19 nt, Human
uggcacgguggcucaggcc

SEQ ID NO: 3641293 - RNA, 18 nt, Human
uggcacgucaucuaguuu

SEQ ID NO: 3641294 - RNA, 17 nt, Human
uggcacucacagaccug

SEQ ID NO: 3641295 - RNA, 19 nt, Human
uggcacucacagaccugga

SEQ ID NO: 3641296 - RNA, 16 nt, Human
uggcacucccuccagc

SEQ ID NO: 3641297 - RNA, 17 nt, Human
uggcacucccuccagca

SEQ ID NO: 3641298 - RNA, 19 nt, Human
uggcacucccuccagcaca

SEQ ID NO: 3641299 - RNA, 14 nt, Human
uggcacucgcugua

SEQ ID NO: 3641300 - RNA, 22 nt, Human
uggcacugagauauuuauuguu

SEQ ID NO: 3641301 - RNA, 10 nt, Human
uggcacugau

SEQ ID NO: 3641302 - RNA, 13 nt, Human
uggcacugccaug

SEQ ID NO: 3641303 - RNA, 12 nt, Human
uggcacugcugu

SEQ ID NO: 3641304 - RNA, 14 nt, Human
uggcacugcuucca

SEQ ID NO: 3641305 - RNA, 13 nt, Human
uggcacuggaugc

SEQ ID NO: 3641306 - RNA, 17 nt, Human
uggcacuggggcacuug

SEQ ID NO: 3641307 - RNA, 20 nt, Human
uggcacuggggcacuuggca

SEQ ID NO: 3641308 - RNA, 21 nt, Human
uggcacuuagcuaucagaaga

SEQ ID NO: 3641309 - RNA, 22 nt, Human
uggcacuugccauuccaaaaua

SEQ ID NO: 3641310 - RNA, 21 nt, Human
uggcagaaaaaaugucuguaa

SEQ ID NO: 3641311 - RNA, 23 nt, Human
uggcagaaagcaaaugugaccug

SEQ ID NO: 3641312 - RNA, 23 nt, Human
uggcagaaauacagucuuccaca

SEQ ID NO: 3641313 - RNA, 16 nt, Human
uggcagaacugagcuc

SEQ ID NO: 3641314 - RNA, 21 nt, Human
uggcagaacugagcuccucug

SEQ ID NO: 3641315 - RNA, 22 nt, Human
uggcagaagacaccagagcaga

SEQ ID NO: 3641316 - RNA, 23 nt, Human
uggcagaagacaccagagcagau

SEQ ID NO: 3641317 - RNA, 14 nt, Human
uggcagaaguguuu

SEQ ID NO: 3641318 - RNA, 19 nt, Human
uggcagaauaaucuuuggg

SEQ ID NO: 3641319 - RNA, 12 nt, Human
uggcagacagac

SEQ ID NO: 3641320 - RNA, 17 nt, Human
uggcagagaugccuccc

SEQ ID NO: 3641321 - RNA, 19 nt, Human
uggcagagaugccucccug

SEQ ID NO: 3641322 - RNA, 12 nt, Human
uggcagaggagg

SEQ ID NO: 3641323 - RNA, 20 nt, Human
uggcagaguuacaguucugu

SEQ ID NO: 3641324 - RNA, 17 nt, Human
uggcagaguugaagaca

SEQ ID NO: 3641325 - RNA, 17 nt, Human
uggcagaguuguaaaua

SEQ ID NO: 3641326 - RNA, 20 nt, Human
uggcagaguuguaaauauau

SEQ ID NO: 3641327 - RNA, 18 nt, Human
uggcagaguuuguguguu

SEQ ID NO: 3641328 - RNA, 22 nt, Human
uggcagaguuuguguguugucu

SEQ ID NO: 3641329 - RNA, 19 nt, Human
uggcagauaaucagccucu

SEQ ID NO: 3641330 - RNA, 13 nt, Human
uggcagaugcagc

SEQ ID NO: 3641331 - RNA, 17 nt, Human
uggcagauguaggaggg

SEQ ID NO: 3641332 - RNA, 18 nt, Human
uggcagauguaggaggga

SEQ ID NO: 3641333 - RNA, 20 nt, Human
uggcagauguaggagggacu

SEQ ID NO: 3641334 - RNA, 14 nt, Human
uggcagauucaaau

SEQ ID NO: 3641335 - RNA, 22 nt, Human
uggcagauuuagugaaagcuag

SEQ ID NO: 3641336 - RNA, 15 nt, Human
uggcagauuuuacaa

SEQ ID NO: 3641337 - RNA, 14 nt, Human
uggcagcagagugu

SEQ ID NO: 3641338 - RNA, 22 nt, Human
uggcagcaggccuguugcuuuu

SEQ ID NO: 3641339 - RNA, 13 nt, Human
uggcagcaggugc

SEQ ID NO: 3641340 - RNA, 20 nt, Human
uggcagcaggugcugcuacc

SEQ ID NO: 3641341 - RNA, 20 nt, Human
uggcagcauaaaggccuuuu

SEQ ID NO: 3641342 - RNA, 11 nt, Human
uggcagccaca

SEQ ID NO: 3641343 - RNA, 12 nt, Human
uggcagcccaga

SEQ ID NO: 3641344 - RNA, 18 nt, Human
uggcagcccagccagcgu

SEQ ID NO: 3641345 - RNA, 14 nt, Human
uggcagccccagca

SEQ ID NO: 3641346 - RNA, 19 nt, Human
uggcagccgugccuucagc

SEQ ID NO: 3641347 - RNA, 22 nt, Human
uggcagccuacuagggaccugg

SEQ ID NO: 3641348 - RNA, 16 nt, Human
uggcagccucuucaaa

SEQ ID NO: 3641349 - RNA, 11 nt, Human
uggcagccuug

SEQ ID NO: 3641350 - RNA, 14 nt, Human
uggcagcucagaga

SEQ ID NO: 3641351 - RNA, 14 nt, Human
uggcagcucuccag

SEQ ID NO: 3641352 - RNA, 15 nt, Human
uggcagcucuccagu

SEQ ID NO: 3641353 - RNA, 21 nt, Human
uggcagcucuggacagcccca

SEQ ID NO: 3641354 - RNA, 19 nt, Human
uggcagcugcgguccaccc

SEQ ID NO: 3641355 - RNA, 22 nt, Human
uggcagcugcgguccacccagg

SEQ ID NO: 3641356 - RNA, 12 nt, Human
uggcaggaaggc

SEQ ID NO: 3641357 - RNA, 17 nt, Human
uggcaggaaggcuuguu

SEQ ID NO: 3641358 - RNA, 14 nt, Human
uggcaggaccagga

SEQ ID NO: 3641359 - RNA, 17 nt, Human
uggcaggaccaggacua

SEQ ID NO: 3641360 - RNA, 20 nt, Human
uggcaggacgugggcugggc

SEQ ID NO: 3641361 - RNA, 12 nt, Human
uggcaggcagag

SEQ ID NO: 3641362 - RNA, 17 nt, Human
uggcaggcagaggccca

SEQ ID NO: 3641363 - RNA, 22 nt, Human
uggcaggcagaggcccaggcug

SEQ ID NO: 3641364 - RNA, 19 nt, Human
uggcaggcagcgccaagca

SEQ ID NO: 3641365 - RNA, 11 nt, Human
uggcaggcagg

SEQ ID NO: 3641366 - RNA, 12 nt, Human
uggcaggcaggg

SEQ ID NO: 3641367 - RNA, 15 nt, Human
uggcaggcuggccag

SEQ ID NO: 3641368 - RNA, 18 nt, Human
uggcaggcuggccagucc

SEQ ID NO: 3641369 - RNA, 21 nt, Human
uggcagggaggucaggcccug

SEQ ID NO: 3641370 - RNA, 22 nt, Human
uggcagggaggucaggcccugg

SEQ ID NO: 3641371 - RNA, 14 nt, Human
uggcagggcacagg

SEQ ID NO: 3641372 - RNA, 15 nt, Human
uggcagggcacaggg

SEQ ID NO: 3641373 - RNA, 17 nt, Human
uggcagggcacagggcc

SEQ ID NO: 3641374 - RNA, 17 nt, Human
uggcagggcucaggauu

SEQ ID NO: 3641375 - RNA, 21 nt, Human
uggcagggggcugcugcuggg

SEQ ID NO: 3641376 - RNA, 23 nt, Human
uggcagggggcugcugcugggcu

SEQ ID NO: 3641377 - RNA, 22 nt, Human
uggcagggguggaggagagccu

SEQ ID NO: 3641378 - RNA, 21 nt, Human
uggcagggguggcugccucau

SEQ ID NO: 3641379 - RNA, 23 nt, Human
uggcagguaggaauauuauauuu

SEQ ID NO: 3641380 - RNA, 23 nt, Human
uggcagugagugagccuggcucu

SEQ ID NO: 3641381 - RNA, 22 nt, Human
uggcagugcagcaaccagagca

SEQ ID NO: 3641382 - RNA, 16 nt, Human
uggcaguggaacuaag

SEQ ID NO: 3641383 - RNA, 14 nt, Human
uggcagugggagcu

SEQ ID NO: 3641384 - RNA, 19 nt, Human
uggcagugggagcugccug

SEQ ID NO: 3641385 - RNA, 17 nt, Human
uggcaguguuuugagaa

SEQ ID NO: 3641386 - RNA, 20 nt, Human
uggcaguuuauauuuaacuc

SEQ ID NO: 3641387 - RNA, 16 nt, Human
uggcaguuugguauuu

SEQ ID NO: 3641388 - RNA, 18 nt, Human
uggcaguuuugacaucag

SEQ ID NO: 3641389 - RNA, 16 nt, Human
uggcauaccuuucaca

SEQ ID NO: 3641390 - RNA, 14 nt, Human
uggcauagacaugg

SEQ ID NO: 3641391 - RNA, 21 nt, Human
uggcauagagcagcacuaaau

SEQ ID NO: 3641392 - RNA, 14 nt, Human
uggcauagcucugg

SEQ ID NO: 3641393 - RNA, 16 nt, Human
uggcauaguuucauaa

SEQ ID NO: 3641394 - RNA, 22 nt, Human
uggcaucaagaggugggagggc

SEQ ID NO: 3641395 - RNA, 14 nt, Human
uggcaucagcuggc

SEQ ID NO: 3641396 - RNA, 19 nt, Human
uggcaucccaguggccuca

SEQ ID NO: 3641397 - RNA, 15 nt, Human
uggcauccugugaag

SEQ ID NO: 3641398 - RNA, 15 nt, Human
uggcaucucuguccc

SEQ ID NO: 3641399 - RNA, 18 nt, Human
uggcaugagaaauacaaa

SEQ ID NO: 3641400 - RNA, 15 nt, Human
uggcaugcaccugca

SEQ ID NO: 3641401 - RNA, 19 nt, Human
uggcaugccuuccagcacc

SEQ ID NO: 3641402 - RNA, 17 nt, Human
uggcaugcuuaaauuuu

SEQ ID NO: 3641403 - RNA, 21 nt, Human
uggcauggaaauuuaaagcag

SEQ ID NO: 3641404 - RNA, 23 nt, Human
uggcauggaaauuuaaagcaggu

SEQ ID NO: 3641405 - RNA, 15 nt, Human
uggcaugggaaugaa

SEQ ID NO: 3641406 - RNA, 22 nt, Human
uggcauggugguugggacccag

SEQ ID NO: 3641407 - RNA, 17 nt, Human
uggcauguggccugugg

SEQ ID NO: 3641408 - RNA, 18 nt, Human
uggcauguggccuguggc

SEQ ID NO: 3641409 - RNA, 20 nt, Human
uggcauguuuugugcauuug

SEQ ID NO: 3641410 - RNA, 13 nt, Human
uggcauuaaaacu

SEQ ID NO: 3641411 - RNA, 23 nt, Human
uggcauuauguccacuguguaua

SEQ ID NO: 3641412 - RNA, 15 nt, Human
uggcauucuuguaca

SEQ ID NO: 3641413 - RNA, 14 nt, Human
uggcauuggcagca

SEQ ID NO: 3641414 - RNA, 21 nt, Human
uggcauuugugaucaugagau

SEQ ID NO: 3641415 - RNA, 14 nt, Human
uggccaaaaagaau

SEQ ID NO: 3641416 - RNA, 22 nt, Human
uggccaaaaagaaucugcauuu

SEQ ID NO: 3641417 - RNA, 15 nt, Human
uggccaaacaacagu

SEQ ID NO: 3641418 - RNA, 21 nt, Human
uggccaaagccaaagcuaggc

SEQ ID NO: 3641419 - RNA, 23 nt, Human
uggccaaagccaaagcuaggccu

SEQ ID NO: 3641420 - RNA, 16 nt, Human
uggccaaauuauuugu

SEQ ID NO: 3641421 - RNA, 18 nt, Human
uggccaaauuauuugugu

SEQ ID NO: 3641422 - RNA, 14 nt, Human
uggccaagagaaac

SEQ ID NO: 3641423 - RNA, 14 nt, Human
uggccaagcggcca

SEQ ID NO: 3641424 - RNA, 13 nt, Human
uggccaagcugag

SEQ ID NO: 3641425 - RNA, 14 nt, Human
uggccaagcugagg

SEQ ID NO: 3641426 - RNA, 15 nt, Human
uggccaaggagcugc

SEQ ID NO: 3641427 - RNA, 14 nt, Human
uggccaaguuccuc

SEQ ID NO: 3641428 - RNA, 17 nt, Human
uggccaauuaaggcauc

SEQ ID NO: 3641429 - RNA, 14 nt, Human
uggccacagccagg

SEQ ID NO: 3641430 - RNA, 14 nt, Human
ugguguuaaaacac

SEQ ID NO: 3641431 - RNA, 14 nt, Human
ugguguucuccugc

SEQ ID NO: 3641432 - RNA, 17 nt, Human
ugguguucuccugcugc

SEQ ID NO: 3641433 - RNA, 15 nt, Human
ugguguuuccuggca

SEQ ID NO: 3641434 - RNA, 20 nt, Human
ugguguuuucuuaugcagga

SEQ ID NO: 3641435 - RNA, 16 nt, Human
ugguguuuuucuugua

SEQ ID NO: 3641436 - RNA, 23 nt, Human
ugguguuuuucuuguaaaugugu

SEQ ID NO: 3641437 - RNA, 16 nt, Human
ugguuaagcuuugaca

SEQ ID NO: 3641438 - RNA, 15 nt, Human
ugguuaagucuguuu

SEQ ID NO: 3641439 - RNA, 14 nt, Human
ugguuagaaaugca

SEQ ID NO: 3641440 - RNA, 18 nt, Human
ugguuagcucagccccag

SEQ ID NO: 3641441 - RNA, 22 nt, Human
ugguuaggauggcaggacgugg

SEQ ID NO: 3641442 - RNA, 18 nt, Human
ugguuaggcauuguggga

SEQ ID NO: 3641443 - RNA, 20 nt, Human
ugguuaggcauugugggaag

SEQ ID NO: 3641444 - RNA, 15 nt, Human
ugguuauaaaaguga

SEQ ID NO: 3641445 - RNA, 19 nt, Human
ugguuauacaugacacuga

SEQ ID NO: 3641446 - RNA, 15 nt, Human
ugguuaugaaagaau

SEQ ID NO: 3641447 - RNA, 18 nt, Human
ugguuaugaaagaauaua

SEQ ID NO: 3641448 - RNA, 14 nt, Human
ugguuauggagagg

SEQ ID NO: 3641449 - RNA, 22 nt, Human
ugguuauuuagggaacugcuug

SEQ ID NO: 3641450 - RNA, 16 nt, Human
ugguuauuuuacuuuu

SEQ ID NO: 3641451 - RNA, 16 nt, Human
ugguuauuuuuauaca

SEQ ID NO: 3641452 - RNA, 19 nt, Human
ugguuauuuuuauacagua

SEQ ID NO: 3641453 - RNA, 23 nt, Human
ugguucaggguuggccccugccc

SEQ ID NO: 3641454 - RNA, 13 nt, Human
ugguucauaaaug

SEQ ID NO: 3641455 - RNA, 15 nt, Human
ugguucauaaaugaa

SEQ ID NO: 3641456 - RNA, 23 nt, Human
ugguucaucaguguuaaaaaauu

SEQ ID NO: 3641457 - RNA, 16 nt, Human
ugguuccagccugcca

SEQ ID NO: 3641458 - RNA, 21 nt, Human
ugguuccagggucccucugug

SEQ ID NO: 3641459 - RNA, 13 nt, Human
ugguuccaugccu

SEQ ID NO: 3641460 - RNA, 17 nt, Human
ugguuccaugccugagg

SEQ ID NO: 3641461 - RNA, 21 nt, Human
ugguuccauuguuuggagaca

SEQ ID NO: 3641462 - RNA, 23 nt, Human
ugguuccauuguuuggagacauu

SEQ ID NO: 3641463 - RNA, 11 nt, Human
ugguuccccug

SEQ ID NO: 3641464 - RNA, 19 nt, Human
ugguuccccuguucacucu

SEQ ID NO: 3641465 - RNA, 23 nt, Human
ugguuccccuguucacucuacuu

SEQ ID NO: 3641466 - RNA, 18 nt, Human
ugguucccguuucuccac

SEQ ID NO: 3641467 - RNA, 21 nt, Human
ugguuccuaggggaaugaggg

SEQ ID NO: 3641468 - RNA, 23 nt, Human
ugguuccuccccuccuccuggac

SEQ ID NO: 3641469 - RNA, 19 nt, Human
ugguuccugcuagaaaugg

SEQ ID NO: 3641470 - RNA, 22 nt, Human
ugguucuaaggaccugaaauuc

SEQ ID NO: 3641471 - RNA, 14 nt, Human
ugguucuauuuaau

SEQ ID NO: 3641472 - RNA, 11 nt, Human
ugguucucaau

SEQ ID NO: 3641473 - RNA, 12 nt, Human
ugguucucaaug

SEQ ID NO: 3641474 - RNA, 16 nt, Human
ugguucucaaugaaaa

SEQ ID NO: 3641475 - RNA, 16 nt, Human
ugguucucaauuccaa

SEQ ID NO: 3641476 - RNA, 17 nt, Human
ugguucucaucuuucuu

SEQ ID NO: 3641477 - RNA, 13 nt, Human
ugguucugaugcc

SEQ ID NO: 3641478 - RNA, 12 nt, Human
ugguucuggcca

SEQ ID NO: 3641479 - RNA, 17 nt, Human
ugguucuggcuguuuga

SEQ ID NO: 3641480 - RNA, 13 nt, Human
ugguucugugcca

SEQ ID NO: 3641481 - RNA, 18 nt, Human
ugguucugugucuguguu

SEQ ID NO: 3641482 - RNA, 15 nt, Human
ugguucuucauuuau

SEQ ID NO: 3641483 - RNA, 21 nt, Human
ugguucuugaggggaccagga

SEQ ID NO: 3641484 - RNA, 14 nt, Human
ugguucuuguauua

SEQ ID NO: 3641485 - RNA, 19 nt, Human
ugguucuuguguuggcugu

SEQ ID NO: 3641486 - RNA, 12 nt, Human
ugguugaagaag

SEQ ID NO: 3641487 - RNA, 18 nt, Human
ugguugaauaaacuagau

SEQ ID NO: 3641488 - RNA, 15 nt, Human
ugguugacuggguuu

SEQ ID NO: 3641489 - RNA, 17 nt, Human
ugguugagaaaugaaua

SEQ ID NO: 3641490 - RNA, 15 nt, Human
ugguugagguggaag

SEQ ID NO: 3641491 - RNA, 18 nt, Human
ugguugaugaucuuugca

SEQ ID NO: 3641492 - RNA, 18 nt, Human
ugguugaugccaaaaaaa

SEQ ID NO: 3641493 - RNA, 15 nt, Human
ugguugauggguucu

SEQ ID NO: 3641494 - RNA, 20 nt, Human
ugguugcacuuaugauuuca

SEQ ID NO: 3641495 - RNA, 16 nt, Human
ugguugcacuuuguag

SEQ ID NO: 3641496 - RNA, 14 nt, Human
ugguugcuuuaaua

SEQ ID NO: 3641497 - RNA, 16 nt, Human
ugguuggagagcuaga

SEQ ID NO: 3641498 - RNA, 12 nt, Human
ugguuggauaag

SEQ ID NO: 3641499 - RNA, 16 nt, Human
ugguuggcuggccuuc

SEQ ID NO: 3641500 - RNA, 23 nt, Human
ugguugggacccaguggcagggc

SEQ ID NO: 3641501 - RNA, 16 nt, Human
ugguugguuuucuucu

SEQ ID NO: 3641502 - RNA, 24 nt, Human
ugguugguuuugacuucagauuga

SEQ ID NO: 3641503 - RNA, 14 nt, Human
ugguuguauuagau

SEQ ID NO: 3641504 - RNA, 18 nt, Human
ugguuguauuagauguuc

SEQ ID NO: 3641505 - RNA, 15 nt, Human
ugguuguauucuuug

SEQ ID NO: 3641506 - RNA, 16 nt, Human
ugguuguauucuuuga

SEQ ID NO: 3641507 - RNA, 17 nt, Human
ugguugucaauauuaaa

SEQ ID NO: 3641508 - RNA, 22 nt, Human
ugguuguuaguuauagaugucu

SEQ ID NO: 3641509 - RNA, 14 nt, Human
ugguuguuucuucc

SEQ ID NO: 3641510 - RNA, 20 nt, Human
ugguuguuucuuccaagacu

SEQ ID NO: 3641511 - RNA, 15 nt, Human
ugguuuaaagaaagu

SEQ ID NO: 3641512 - RNA, 16 nt, Human
ugguuuaaagaaagug

SEQ ID NO: 3641513 - RNA, 21 nt, Human
ugguuuaaagaaaguguauuu

SEQ ID NO: 3641514 - RNA, 11 nt, Human
ugguuuacauu

SEQ ID NO: 3641515 - RNA, 15 nt, Human
ugguuuacauuuaaa

SEQ ID NO: 3641516 - RNA, 20 nt, Human
ugguuuacauuuaaagcauu

SEQ ID NO: 3641517 - RNA, 13 nt, Human
ugguuuaguguaa

SEQ ID NO: 3641518 - RNA, 13 nt, Human
ugguuuauauuuu

SEQ ID NO: 3641519 - RNA, 22 nt, Human
ugguuuauuggugaguuaggaa

SEQ ID NO: 3641520 - RNA, 16 nt, Human
ugguuuauuuuguauu

SEQ ID NO: 3641521 - RNA, 22 nt, Human
ugguuucagcaauauuuaagga

SEQ ID NO: 3641522 - RNA, 17 nt, Human
ugguuucauaggagaca

SEQ ID NO: 3641523 - RNA, 15 nt, Human
ugguuucauguuagu

SEQ ID NO: 3641524 - RNA, 17 nt, Human
ugguuuccaaggagcug

SEQ ID NO: 3641525 - RNA, 18 nt, Human
ugguuuccacaugcucug

SEQ ID NO: 3641526 - RNA, 13 nt, Human
ugguuucccaaga

SEQ ID NO: 3641527 - RNA, 20 nt, Human
ugguuucccccuucuacauu

SEQ ID NO: 3641528 - RNA, 19 nt, Human
ugguuuccucauuccugaa

SEQ ID NO: 3641529 - RNA, 12 nt, Human
ugguuuccugcc

SEQ ID NO: 3641530 - RNA, 15 nt, Human
ugguuucuagcauga

SEQ ID NO: 3641531 - RNA, 13 nt, Human
ugguuucucuucu

SEQ ID NO: 3641532 - RNA, 22 nt, Human
ugguuucuugugcacuggcacc

SEQ ID NO: 3641533 - RNA, 23 nt, Human
ugguuugaagaauguuaagacuu

SEQ ID NO: 3641534 - RNA, 17 nt, Human
ugguuugagcuuaguga

SEQ ID NO: 3641535 - RNA, 18 nt, Human
ugguuugcagcgacuggc

SEQ ID NO: 3641536 - RNA, 21 nt, Human
ugguuugccgguggugcaggu

SEQ ID NO: 3641537 - RNA, 11 nt, Human
ugguuuggaau

SEQ ID NO: 3641538 - RNA, 19 nt, Human
ugguuuggccaucucugga

SEQ ID NO: 3641539 - RNA, 20 nt, Human
ugguuuggccaucucuggau

SEQ ID NO: 3641540 - RNA, 21 nt, Human
ugguuuggcccuucuccuuuu

SEQ ID NO: 3641541 - RNA, 19 nt, Human
ugguuuggggcgaggcaga

SEQ ID NO: 3641542 - RNA, 23 nt, Human
ugguuuggggcgaggcagaggac

SEQ ID NO: 3641543 - RNA, 23 nt, Human
ugguuuggucccugguuuucagu

SEQ ID NO: 3641544 - RNA, 15 nt, Human
ugguuuguaaauuaa

SEQ ID NO: 3641545 - RNA, 13 nt, Human
ugguuuguccuga

SEQ ID NO: 3641546 - RNA, 12 nt, Human
ugguuuuaaaau

SEQ ID NO: 3641547 - RNA, 13 nt, Human
ugguuuuaaaaua

SEQ ID NO: 3641548 - RNA, 12 nt, Human
ugguuuuaagaa

SEQ ID NO: 3641549 - RNA, 17 nt, Human
ugguuuuaauugaagga

SEQ ID NO: 3641550 - RNA, 20 nt, Human
ugguuuuaauugaaggaaag

SEQ ID NO: 3641551 - RNA, 14 nt, Human
ugguuuucaaaaua

SEQ ID NO: 3641552 - RNA, 22 nt, Human
ugguuuuccccucccuggguuc

SEQ ID NO: 3641553 - RNA, 22 nt, Human
ugguuuuccuaaaugcagugaa

SEQ ID NO: 3641554 - RNA, 14 nt, Human
ugguuuuccugaaa

SEQ ID NO: 3641555 - RNA, 13 nt, Human
ugguuuuccugug

SEQ ID NO: 3641556 - RNA, 18 nt, Human
ugguuuucugccaaugac

SEQ ID NO: 3641557 - RNA, 12 nt, Human
ugguuuucuguu

SEQ ID NO: 3641558 - RNA, 15 nt, Human
ugguuuucuguucuu

SEQ ID NO: 3641559 - RNA, 22 nt, Human
ugguuuucuugggggaaaauac

SEQ ID NO: 3641560 - RNA, 19 nt, Human
ugguuuuguaagaugcugg

SEQ ID NO: 3641561 - RNA, 16 nt, Human
ugguuuuguuccccuc

SEQ ID NO: 3641562 - RNA, 20 nt, Human
ugguuuuguuccccuccucc

SEQ ID NO: 3641563 - RNA, 15 nt, Human
ugguuuuuaaauuuu

SEQ ID NO: 3641564 - RNA, 21 nt, Human
ugguuuuuaaauuuuguaaug

SEQ ID NO: 3641565 - RNA, 16 nt, Human
ugguuuuuacuuaacu

SEQ ID NO: 3641566 - RNA, 17 nt, Human
ugguuuuuauuucuccu

SEQ ID NO: 3641567 - RNA, 16 nt, Human
ugguuuuucaguuuuc

SEQ ID NO: 3641568 - RNA, 16 nt, Human
ugguuuuucuuuucuu

SEQ ID NO: 3641569 - RNA, 15 nt, Human
ugguuuuuuuucuaa

SEQ ID NO: 3641570 - RNA, 18 nt, Human
uguaaaaaaaaaugccuu

SEQ ID NO: 3641571 - RNA, 17 nt, Human
uguaaaaaagaaaaaca

SEQ ID NO: 3641572 - RNA, 23 nt, Human
uguaaaaaucuuuugaagcauag

SEQ ID NO: 3641573 - RNA, 14 nt, Human
uguaaaaaugagaa

SEQ ID NO: 3641574 - RNA, 17 nt, Human
uguaaaaaugagaacau

SEQ ID NO: 3641575 - RNA, 19 nt, Human
uguacacugaauauuuaua

SEQ ID NO: 3641576 - RNA, 21 nt, Human
uguacacugaauauuuauauu

SEQ ID NO: 3641577 - RNA, 22 nt, Human
uguacagaacacauuucucuga

SEQ ID NO: 3641578 - RNA, 17 nt, Human
uguacagaaucauugcu

SEQ ID NO: 3641579 - RNA, 18 nt, Human
uguacagaauucugcuac

SEQ ID NO: 3641580 - RNA, 21 nt, Human
uguacagaauucugcuaccuc

SEQ ID NO: 3641581 - RNA, 14 nt, Human
uguacagacaacaa

SEQ ID NO: 3641582 - RNA, 19 nt, Human
uguacagacauauuuaacu

SEQ ID NO: 3641583 - RNA, 17 nt, Human
uguacagacguaugcuu

SEQ ID NO: 3641584 - RNA, 18 nt, Human
uguacagacguaugcuua

SEQ ID NO: 3641585 - RNA, 16 nt, Human
uguacagagcccacgc

SEQ ID NO: 3641586 - RNA, 17 nt, Human
uguacagagcccacgcc

SEQ ID NO: 3641587 - RNA, 18 nt, Human
uguacagauucuuucagu

SEQ ID NO: 3641588 - RNA, 22 nt, Human
uguacagcaaggagauuuacaa

SEQ ID NO: 3641589 - RNA, 17 nt, Human
uguacagcuggcucuac

SEQ ID NO: 3641590 - RNA, 20 nt, Human
uguacaguagauuuuccaaa

SEQ ID NO: 3641591 - RNA, 15 nt, Human
uguacagucugucuu

SEQ ID NO: 3641592 - RNA, 20 nt, Human
uguacagucugucuucugua

SEQ ID NO: 3641593 - RNA, 12 nt, Human
uguacagucuug

SEQ ID NO: 3641594 - RNA, 14 nt, Human
uguacagugucuuu

SEQ ID NO: 3641595 - RNA, 22 nt, Human
uguacagugucuuuuuuuguau

SEQ ID NO: 3641596 - RNA, 23 nt, Human
uguacagugucuuuuuuuguaua

SEQ ID NO: 3641597 - RNA, 12 nt, Human
uguacaguguua

SEQ ID NO: 3641598 - RNA, 13 nt, Human
uguacaguguucu

SEQ ID NO: 3641599 - RNA, 20 nt, Human
uguacaguucaguuccucuu

SEQ ID NO: 3641600 - RNA, 16 nt, Human
uguacaguuugcugua

SEQ ID NO: 3641601 - RNA, 15 nt, Human
uguacaguuuggggc

SEQ ID NO: 3641602 - RNA, 11 nt, Human
uguacauaaaa

SEQ ID NO: 3641603 - RNA, 18 nt, Human
uguacauaaaagaauuuu

SEQ ID NO: 3641604 - RNA, 13 nt, Human
uguacauaacuga

SEQ ID NO: 3641605 - RNA, 15 nt, Human
uguacauaacugaaa

SEQ ID NO: 3641606 - RNA, 19 nt, Human
uguacauaaugcgugcaua

SEQ ID NO: 3641607 - RNA, 23 nt, Human
uguacauacgauuuaagguauuu

SEQ ID NO: 3641608 - RNA, 15 nt, Human
uguacauagccuaua

SEQ ID NO: 3641609 - RNA, 22 nt, Human
uguacauagccuauauuuacag

SEQ ID NO: 3641610 - RNA, 19 nt, Human
uguacauagugcuaacaug

SEQ ID NO: 3641611 - RNA, 20 nt, Human
uguacauagugcuaacauga

SEQ ID NO: 3641612 - RNA, 21 nt, Human
uguacauauguaaaauaaaau

SEQ ID NO: 3641613 - RNA, 20 nt, Human
uguacauaugugcuggaauu

SEQ ID NO: 3641614 - RNA, 19 nt, Human
uguacauauuuguggaaua

SEQ ID NO: 3641615 - RNA, 21 nt, Human
uguacaucccauguaacagaa

SEQ ID NO: 3641616 - RNA, 21 nt, Human
uguacaucuggcuuauuuuaa

SEQ ID NO: 3641617 - RNA, 12 nt, Human
uguacaugaaau

SEQ ID NO: 3641618 - RNA, 18 nt, Human
uguacaugaaauuuuugu

SEQ ID NO: 3641619 - RNA, 22 nt, Human
uguacaugaagaagcuaaaucc

SEQ ID NO: 3641620 - RNA, 21 nt, Human
uguacauggaauaacauguaa

SEQ ID NO: 3641621 - RNA, 17 nt, Human
uguacauggcagaguuu

SEQ ID NO: 3641622 - RNA, 14 nt, Human
uguacaugggacua

SEQ ID NO: 3641623 - RNA, 19 nt, Human
uguacaugggacuaugcuu

SEQ ID NO: 3641624 - RNA, 20 nt, Human
uguacaugggacuaugcuuu

SEQ ID NO: 3641625 - RNA, 15 nt, Human
uguacauguguagcc

SEQ ID NO: 3641626 - RNA, 17 nt, Human
uguacauguguagccug

SEQ ID NO: 3641627 - RNA, 22 nt, Human
uguacauuagucauucaauaaa

SEQ ID NO: 3641628 - RNA, 14 nt, Human
uguacauuuaaaau

SEQ ID NO: 3641629 - RNA, 18 nt, Human
uguacauuucuauaaaua

SEQ ID NO: 3641630 - RNA, 23 nt, Human
uguacauuuuguuguaaaaagaa

SEQ ID NO: 3641631 - RNA, 13 nt, Human
uguaccaaaauuu

SEQ ID NO: 3641632 - RNA, 18 nt, Human
uguaccaaccauccaauu

SEQ ID NO: 3641633 - RNA, 15 nt, Human
uguaccaagaaucuu

SEQ ID NO: 3641634 - RNA, 16 nt, Human
uguaccagugaauuuu

SEQ ID NO: 3641635 - RNA, 23 nt, Human
uguaccaguuaauuuuuccaacu

SEQ ID NO: 3641636 - RNA, 17 nt, Human
uguaccauuaaaauaug

SEQ ID NO: 3641637 - RNA, 19 nt, Human
uguaccauuaaaauaugca

SEQ ID NO: 3641638 - RNA, 12 nt, Human
uguacccaccgg

SEQ ID NO: 3641639 - RNA, 20 nt, Human
uguacccaccgggccacucc

SEQ ID NO: 3641640 - RNA, 21 nt, Human
uguacccaccgggccacuccu

SEQ ID NO: 3641641 - RNA, 14 nt, Human
uguacccaguuucu

SEQ ID NO: 3641642 - RNA, 23 nt, Human
uguaccccccaaccccugaggaa

SEQ ID NO: 3641643 - RNA, 16 nt, Human
uguacccccgcccagg

SEQ ID NO: 3641644 - RNA, 16 nt, Human
uguacccuuccuacag

SEQ ID NO: 3641645 - RNA, 13 nt, Human
uguaccuccccug

SEQ ID NO: 3641646 - RNA, 15 nt, Human
uguaccuccucucag

SEQ ID NO: 3641647 - RNA, 14 nt, Human
uguaccucuugagc

SEQ ID NO: 3641648 - RNA, 14 nt, Human
uguaccucuuuuag

SEQ ID NO: 3641649 - RNA, 21 nt, Human
uguaccuuuugaggagcccca

SEQ ID NO: 3641650 - RNA, 14 nt, Human
uguacgaagaguau

SEQ ID NO: 3641651 - RNA, 18 nt, Human
uguacggauuuucaguua

SEQ ID NO: 3641652 - RNA, 16 nt, Human
uguacuaaagccaaac

SEQ ID NO: 3641653 - RNA, 18 nt, Human
uguacuaaagccaaacau

SEQ ID NO: 3641654 - RNA, 20 nt, Human
uguacuaaagccaaacauau

SEQ ID NO: 3641655 - RNA, 19 nt, Human
uguacuaaccuacagagau

SEQ ID NO: 3641656 - RNA, 16 nt, Human
uguacuaacuagcauu

SEQ ID NO: 3641657 - RNA, 12 nt, Human
uguacuacaauu

SEQ ID NO: 3641658 - RNA, 17 nt, Human
uguacuaccuguguaua

SEQ ID NO: 3641659 - RNA, 19 nt, Human
uguacuagagaucugguuu

SEQ ID NO: 3641660 - RNA, 21 nt, Human
uguacuaguacuguguacugu

SEQ ID NO: 3641661 - RNA, 19 nt, Human
uguacuauaacauagaauu

SEQ ID NO: 3641662 - RNA, 21 nt, Human
uguacuauagcggcauauaga

SEQ ID NO: 3641663 - RNA, 12 nt, Human
uguacucuggcc

SEQ ID NO: 3641664 - RNA, 13 nt, Human
uguacucuggccu

SEQ ID NO: 3641665 - RNA, 15 nt, Human
uguacucuggccucu

SEQ ID NO: 3641666 - RNA, 12 nt, Human
uguacugaaaaa

SEQ ID NO: 3641667 - RNA, 18 nt, Human
uguacugaaguaaaacaa

SEQ ID NO: 3641668 - RNA, 19 nt, Human
uguacugagccuuguaauu

SEQ ID NO: 3641669 - RNA, 16 nt, Human
uguacugauucaauuu

SEQ ID NO: 3641670 - RNA, 17 nt, Human
uguacugauucaauuug

SEQ ID NO: 3641671 - RNA, 18 nt, Human
uguacugcauguuaccau

SEQ ID NO: 3641672 - RNA, 15 nt, Human
uguacugccugcuug

SEQ ID NO: 3641673 - RNA, 19 nt, Human
uguacuggagagcaacaca

SEQ ID NO: 3641674 - RNA, 20 nt, Human
uguacuggcuccucuguggu

SEQ ID NO: 3641675 - RNA, 19 nt, Human
uguacugugucauaaacag

SEQ ID NO: 3641676 - RNA, 23 nt, Human
uguacuguucucuucuugaacac

SEQ ID NO: 3641677 - RNA, 22 nt, Human
uguacuuaaaugguaauaagca

SEQ ID NO: 3641678 - RNA, 16 nt, Human
uguacuuaauaaauuc

SEQ ID NO: 3641679 - RNA, 22 nt, Human
uguacuucccgggccagggcug

SEQ ID NO: 3641680 - RNA, 11 nt, Human
uguacuuccug

SEQ ID NO: 3641681 - RNA, 23 nt, Human
uguacuugaagucuaaaagcaga

SEQ ID NO: 3641682 - RNA, 16 nt, Human
uguacuugaugacaga

SEQ ID NO: 3641683 - RNA, 14 nt, Human
uguacuuuguacaa

SEQ ID NO: 3641684 - RNA, 13 nt, Human
uguacuuugugcu

SEQ ID NO: 3641685 - RNA, 15 nt, Human
uguacuuuuaagacu

SEQ ID NO: 3641686 - RNA, 17 nt, Human
uguacuuuucauucucu

SEQ ID NO: 3641687 - RNA, 18 nt, Human
uguacuuuucauucucuu

SEQ ID NO: 3641688 - RNA, 18 nt, Human
uguacuuuuuaguuguuc

SEQ ID NO: 3641689 - RNA, 15 nt, Human
uguacuuuuuccaga

SEQ ID NO: 3641690 - RNA, 20 nt, Human
uguagaaaagaacuggaaac

SEQ ID NO: 3641691 - RNA, 21 nt, Human
uguagaaaagggaacugaaca

SEQ ID NO: 3641692 - RNA, 23 nt, Human
uguagaaaagggaacugaacauu

SEQ ID NO: 3641693 - RNA, 13 nt, Human
uguagaaaugguu

SEQ ID NO: 3641694 - RNA, 15 nt, Human
uguagaacacuaauu

SEQ ID NO: 3641695 - RNA, 17 nt, Human
uguagaacacuaauuca

SEQ ID NO: 3641696 - RNA, 20 nt, Human
uguagaacucacucugggcu

SEQ ID NO: 3641697 - RNA, 15 nt, Human
uguagaagcauggug

SEQ ID NO: 3641698 - RNA, 22 nt, Human
uguagaaguaggaagugaaaau

SEQ ID NO: 3641699 - RNA, 17 nt, Human
uguagaauguauuguac

SEQ ID NO: 3641700 - RNA, 18 nt, Human
uguagaauguauuguacc

SEQ ID NO: 3641701 - RNA, 19 nt, Human
uguagaauguauuguaccu

SEQ ID NO: 3641702 - RNA, 12 nt, Human
uguagacuauau

SEQ ID NO: 3641703 - RNA, 22 nt, Human
uguagacuauauacaugugugu

SEQ ID NO: 3641704 - RNA, 16 nt, Human
uguagagcagggcaag

SEQ ID NO: 3641705 - RNA, 12 nt, Human
uguagagccagg

SEQ ID NO: 3641706 - RNA, 15 nt, Human
uguagagccaggguc

SEQ ID NO: 3641707 - RNA, 18 nt, Human
uguagagccagggucuca

SEQ ID NO: 3641708 - RNA, 16 nt, Human
uguagaggagaaacug

SEQ ID NO: 3641709 - RNA, 17 nt, Human
uguagaguguagacugu

SEQ ID NO: 3641710 - RNA, 17 nt, Human
uguagaguuaagaagcu

SEQ ID NO: 3641711 - RNA, 18 nt, Human
uguagaguuaagaagcug

SEQ ID NO: 3641712 - RNA, 14 nt, Human
uguagauaaguguu

SEQ ID NO: 3641713 - RNA, 16 nt, Human
uguagauauuuggcuu

SEQ ID NO: 3641714 - RNA, 19 nt, Human
uguagauauuuggcuuaaa

SEQ ID NO: 3641715 - RNA, 22 nt, Human
uguagauauuuggcuuaaauau

SEQ ID NO: 3641716 - RNA, 22 nt, Human
uguagaucccaagaugacuggg

SEQ ID NO: 3641717 - RNA, 19 nt, Human
uguagaugaaaaagcaugu

SEQ ID NO: 3641718 - RNA, 21 nt, Human
uguagaugaaaaagcauguac

SEQ ID NO: 3641719 - RNA, 23 nt, Human
uguggcccugccaucuucccagc

SEQ ID NO: 3641720 - RNA, 17 nt, Human
uguggcccuggccugcu

SEQ ID NO: 3641721 - RNA, 18 nt, Human
uguggcccuggcucugcu

SEQ ID NO: 3641722 - RNA, 16 nt, Human
uguggcccuggcugcc

SEQ ID NO: 3641723 - RNA, 16 nt, Human
uguggcccuguccugc

SEQ ID NO: 3641724 - RNA, 15 nt, Human
uguggccuaaccugc

SEQ ID NO: 3641725 - RNA, 17 nt, Human
uguggccuaagaggcug

SEQ ID NO: 3641726 - RNA, 23 nt, Human
uguggccuaagaggcugcccucc

SEQ ID NO: 3641727 - RNA, 13 nt, Human
uguggccucagaa

SEQ ID NO: 3641728 - RNA, 16 nt, Human
uguggccucuucugag

SEQ ID NO: 3641729 - RNA, 17 nt, Human
uguggccugcacaguga

SEQ ID NO: 3641730 - RNA, 15 nt, Human
uguggccugggccuc

SEQ ID NO: 3641731 - RNA, 16 nt, Human
uguggccugggccucc

SEQ ID NO: 3641732 - RNA, 13 nt, Human
uguggccuguggc

SEQ ID NO: 3641733 - RNA, 16 nt, Human
uguggccuguggccug

SEQ ID NO: 3641734 - RNA, 17 nt, Human
uguggccuguggccugu

SEQ ID NO: 3641735 - RNA, 12 nt, Human
uguggcgagcca

SEQ ID NO: 3641736 - RNA, 18 nt, Human
uguggcgccgucuccagg

SEQ ID NO: 3641737 - RNA, 16 nt, Human
uguggcgggcaguggg

SEQ ID NO: 3641738 - RNA, 17 nt, Human
uguggcuaaaaaagcug

SEQ ID NO: 3641739 - RNA, 12 nt, Human
uguggcuccaca

SEQ ID NO: 3641740 - RNA, 22 nt, Human
uguggcuccaggccaaagugcc

SEQ ID NO: 3641741 - RNA, 14 nt, Human
uguggcuccccucu

SEQ ID NO: 3641742 - RNA, 15 nt, Human
uguggcuccccucua

SEQ ID NO: 3641743 - RNA, 15 nt, Human
uguggcuccuuccca

SEQ ID NO: 3641744 - RNA, 13 nt, Human
uguggcugaggag

SEQ ID NO: 3641745 - RNA, 21 nt, Human
uguggcugucagcaggaagca

SEQ ID NO: 3641746 - RNA, 12 nt, Human
uguggcuucugg

SEQ ID NO: 3641747 - RNA, 17 nt, Human
uguggcuuucuuucuuu

SEQ ID NO: 3641748 - RNA, 15 nt, Human
ugugggaaaaaaaug

SEQ ID NO: 3641749 - RNA, 11 nt, Human
ugugggaaagc

SEQ ID NO: 3641750 - RNA, 12 nt, Human
ugugggaacaga

SEQ ID NO: 3641751 - RNA, 15 nt, Human
ugugggaagaaacaa

SEQ ID NO: 3641752 - RNA, 18 nt, Human
ugugggaaugcggcaaga

SEQ ID NO: 3641753 - RNA, 17 nt, Human
ugugggacuagccuggc

SEQ ID NO: 3641754 - RNA, 16 nt, Human
ugugggacuguacaca

SEQ ID NO: 3641755 - RNA, 20 nt, Human
ugugggacuguacacacuuu

SEQ ID NO: 3641756 - RNA, 21 nt, Human
ugugggacuguacacacuuua

SEQ ID NO: 3641757 - RNA, 17 nt, Human
ugugggagaccggccug

SEQ ID NO: 3641758 - RNA, 14 nt, Human
ugugggagccucgc

SEQ ID NO: 3641759 - RNA, 23 nt, Human
ugugggauuaugggucacaggaa

SEQ ID NO: 3641760 - RNA, 19 nt, Human
ugugggccucaaggacuug

SEQ ID NO: 3641761 - RNA, 21 nt, Human
ugugggccucaaggacuugaa

SEQ ID NO: 3641762 - RNA, 20 nt, Human
ugugggccugggcuccugga

SEQ ID NO: 3641763 - RNA, 20 nt, Human
ugugggcgugagaccugccc

SEQ ID NO: 3641764 - RNA, 22 nt, Human
ugugggcuaguugggcuuccuc

SEQ ID NO: 3641765 - RNA, 16 nt, Human
ugugggcugcacucug

SEQ ID NO: 3641766 - RNA, 17 nt, Human
uguggggacccaggcuc

SEQ ID NO: 3641767 - RNA, 13 nt, Human
uguggggacuccg

SEQ ID NO: 3641768 - RNA, 15 nt, Human
uguggggccagguca

SEQ ID NO: 3641769 - RNA, 12 nt, Human
uguggggccccu

SEQ ID NO: 3641770 - RNA, 16 nt, Human
uguggggccugggagg

SEQ ID NO: 3641771 - RNA, 16 nt, Human
ugugggggacuguaag

SEQ ID NO: 3641772 - RNA, 16 nt, Human
ugugggggucugugug

SEQ ID NO: 3641773 - RNA, 21 nt, Human
ugugggguuuuuggagaaggu

SEQ ID NO: 3641774 - RNA, 19 nt, Human
uguggguaguggggaagag

SEQ ID NO: 3641775 - RNA, 20 nt, Human
uguggguggauauaaauaua

SEQ ID NO: 3641776 - RNA, 13 nt, Human
ugugggugggaga

SEQ ID NO: 3641777 - RNA, 12 nt, Human
uguggguguagc

SEQ ID NO: 3641778 - RNA, 15 nt, Human
uguggguguccugcc

SEQ ID NO: 3641779 - RNA, 14 nt, Human
uguggguucuacag

SEQ ID NO: 3641780 - RNA, 15 nt, Human
uguggguuuuuauuu

SEQ ID NO: 3641781 - RNA, 20 nt, Human
uguggguuuuuauuuccuau

SEQ ID NO: 3641782 - RNA, 23 nt, Human
ugugguaaaugccacacaccuuu

SEQ ID NO: 3641783 - RNA, 13 nt, Human
ugugguacagaga

SEQ ID NO: 3641784 - RNA, 17 nt, Human
ugugguacagagaagcc

SEQ ID NO: 3641785 - RNA, 18 nt, Human
ugugguacagagaagcca

SEQ ID NO: 3641786 - RNA, 19 nt, Human
ugugguacagagaagccag

SEQ ID NO: 3641787 - RNA, 23 nt, Human
ugugguacagagaagccagcuug

SEQ ID NO: 3641788 - RNA, 14 nt, Human
ugugguagaaacaa

SEQ ID NO: 3641789 - RNA, 17 nt, Human
ugugguaggccuuuuaa

SEQ ID NO: 3641790 - RNA, 19 nt, Human
ugugguaggccuuuuaaca

SEQ ID NO: 3641791 - RNA, 21 nt, Human
ugugguaggccuuuuaacauu

SEQ ID NO: 3641792 - RNA, 23 nt, Human
ugugguaggccuuuuaacauuuu

SEQ ID NO: 3641793 - RNA, 24 nt, Human
ugugguaggccuuuuaacauuuug

SEQ ID NO: 3641794 - RNA, 16 nt, Human
uguggucaaggcuaca

SEQ ID NO: 3641795 - RNA, 15 nt, Human
uguggucacagcugu

SEQ ID NO: 3641796 - RNA, 19 nt, Human
uguggugaugauguguaua

SEQ ID NO: 3641797 - RNA, 17 nt, Human
uguggugcagugugaaa

SEQ ID NO: 3641798 - RNA, 15 nt, Human
uguggugccugaggu

SEQ ID NO: 3641799 - RNA, 23 nt, Human
ugugguggguucuuuggaaggag

SEQ ID NO: 3641800 - RNA, 15 nt, Human
uguggugucugccug

SEQ ID NO: 3641801 - RNA, 17 nt, Human
ugugguguuagggugca

SEQ ID NO: 3641802 - RNA, 18 nt, Human
ugugguguuagggugcag

SEQ ID NO: 3641803 - RNA, 14 nt, Human
ugugguguuuccug

SEQ ID NO: 3641804 - RNA, 20 nt, Human
ugugguguuuccuggcacug

SEQ ID NO: 3641805 - RNA, 17 nt, Human
ugugguuccucugcuca

SEQ ID NO: 3641806 - RNA, 21 nt, Human
ugugguucugagauggcuccc

SEQ ID NO: 3641807 - RNA, 19 nt, Human
ugugguugacuuaugggcc

SEQ ID NO: 3641808 - RNA, 18 nt, Human
ugugguuuacuagcagga

SEQ ID NO: 3641809 - RNA, 15 nt, Human
ugugguuuaguguaa

SEQ ID NO: 3641810 - RNA, 21 nt, Human
ugugguuuaguguaaaaauga

SEQ ID NO: 3641811 - RNA, 17 nt, Human
ugugguuucauguuagu

SEQ ID NO: 3641812 - RNA, 18 nt, Human
ugugguuuccaaggagcu

SEQ ID NO: 3641813 - RNA, 13 nt, Human
ugugguuuggaau

SEQ ID NO: 3641814 - RNA, 10 nt, Human
ugugguuuua

SEQ ID NO: 3641815 - RNA, 15 nt, Human
ugugguuuucuguuu

SEQ ID NO: 3641816 - RNA, 21 nt, Human
uguguaaaaaaaccaccaaaa

SEQ ID NO: 3641817 - RNA, 14 nt, Human
uguguaaaauguga

SEQ ID NO: 3641818 - RNA, 17 nt, Human
uguguaaaaugugaagu

SEQ ID NO: 3641819 - RNA, 14 nt, Human
uguguaaacaaaau

SEQ ID NO: 3641820 - RNA, 22 nt, Human
uguguaaacaaaaugaagcugc

SEQ ID NO: 3641821 - RNA, 15 nt, Human
uguguaaauuauuga

SEQ ID NO: 3641822 - RNA, 14 nt, Human
uguguaacagcucc

SEQ ID NO: 3641823 - RNA, 23 nt, Human
uguguaaccauuuuauaaagugc

SEQ ID NO: 3641824 - RNA, 18 nt, Human
uguguaagacaaaaagcu

SEQ ID NO: 3641825 - RNA, 14 nt, Human
uguguaauaaagug

SEQ ID NO: 3641826 - RNA, 17 nt, Human
uguguaauaaaguguuu

SEQ ID NO: 3641827 - RNA, 23 nt, Human
uguguaauaaaguguuuucagag

SEQ ID NO: 3641828 - RNA, 21 nt, Human
uguguaauagaaaacugaaaa

SEQ ID NO: 3641829 - RNA, 17 nt, Human
uguguaauuguuccuuu

SEQ ID NO: 3641830 - RNA, 11 nt, Human
uguguaauuua

SEQ ID NO: 3641831 - RNA, 19 nt, Human
uguguaauuuaaaauugug

SEQ ID NO: 3641832 - RNA, 22 nt, Human
uguguaauuuaaaauugugaug

SEQ ID NO: 3641833 - RNA, 19 nt, Human
uguguaauuuaugugaaaa

SEQ ID NO: 3641834 - RNA, 14 nt, Human
uguguacaaagaaa

SEQ ID NO: 3641835 - RNA, 19 nt, Human
uguguacaaagaaauaaca

SEQ ID NO: 3641836 - RNA, 18 nt, Human
uguguacagaugaaugau

SEQ ID NO: 3641837 - RNA, 21 nt, Human
uguguacagaugaaugauaaa

SEQ ID NO: 3641838 - RNA, 15 nt, Human
uguguacauaacuga

SEQ ID NO: 3641839 - RNA, 17 nt, Human
uguguacauaacugaaa

SEQ ID NO: 3641840 - RNA, 14 nt, Human
uguguacucuggcc

SEQ ID NO: 3641841 - RNA, 19 nt, Human
uguguacuguauagacagu

SEQ ID NO: 3641842 - RNA, 20 nt, Human
uguguacuguauagacaguu

SEQ ID NO: 3641843 - RNA, 16 nt, Human
uguguagacaaauauu

SEQ ID NO: 3641844 - RNA, 21 nt, Human
uguguagacaaauauuuggag

SEQ ID NO: 3641845 - RNA, 18 nt, Human
uguguagaguuaagaagc

SEQ ID NO: 3641846 - RNA, 19 nt, Human
uguguagaguuaagaagcu

SEQ ID NO: 3641847 - RNA, 13 nt, Human
uguguagccuaug

SEQ ID NO: 3641848 - RNA, 12 nt, Human
uguguagccuuu

SEQ ID NO: 3641849 - RNA, 14 nt, Human
uguguagccuuuuu

SEQ ID NO: 3641850 - RNA, 22 nt, Human
uguguagcugugaccugcugag

SEQ ID NO: 3641851 - RNA, 22 nt, Human
uguguaguugucucucuucaga

SEQ ID NO: 3641852 - RNA, 16 nt, Human
uguguauaaauugucu

SEQ ID NO: 3641853 - RNA, 16 nt, Human
uguguauauauacaua

SEQ ID NO: 3641854 - RNA, 21 nt, Human
uguguauauauauauauaugu

SEQ ID NO: 3641855 - RNA, 20 nt, Human
uguguauauauaugugagga

SEQ ID NO: 3641856 - RNA, 16 nt, Human
uguguauauuauuugg

SEQ ID NO: 3641857 - RNA, 17 nt, Human
uguguauauuauuuggc

SEQ ID NO: 3641858 - RNA, 16 nt, Human
uguguauccauuauca

SEQ ID NO: 3641859 - RNA, 21 nt, Human
uguguauccauuaucaugugu

SEQ ID NO: 3641860 - RNA, 23 nt, Human
uguguauccauuaucauguguaa

SEQ ID NO: 3641861 - RNA, 21 nt, Human
uguguaucguaaccagccaga

SEQ ID NO: 3641862 - RNA, 19 nt, Human
uguguaugcacaugaacuu

SEQ ID NO: 3641863 - RNA, 16 nt, Human
uguguauguacauaua

SEQ ID NO: 3641864 - RNA, 23 nt, Human
uguuaguuucugaguuuuaccaa

SEQ ID NO: 3641865 - RNA, 12 nt, Human
uguuauaaucuu

SEQ ID NO: 3641866 - RNA, 20 nt, Human
uguuauacaaccuucauuua

SEQ ID NO: 3641867 - RNA, 12 nt, Human
uguuauauaauu

SEQ ID NO: 3641868 - RNA, 16 nt, Human
uguuauauauaaauau

SEQ ID NO: 3641869 - RNA, 17 nt, Human
uguuauaucauauguau

SEQ ID NO: 3641870 - RNA, 16 nt, Human
uguuauauccccugcu

SEQ ID NO: 3641871 - RNA, 18 nt, Human
uguuauauuuaaugcauu

SEQ ID NO: 3641872 - RNA, 13 nt, Human
uguuaucaaaaua

SEQ ID NO: 3641873 - RNA, 13 nt, Human
uguuaucaaacuu

SEQ ID NO: 3641874 - RNA, 19 nt, Human
uguuaucuguuugagaaag

SEQ ID NO: 3641875 - RNA, 15 nt, Human
uguuaucuucucaag

SEQ ID NO: 3641876 - RNA, 20 nt, Human
uguuaucuucucaaguucua

SEQ ID NO: 3641877 - RNA, 18 nt, Human
uguuaugacuauguaaac

SEQ ID NO: 3641878 - RNA, 13 nt, Human
uguuaugagccag

SEQ ID NO: 3641879 - RNA, 19 nt, Human
uguuaugauaaaaaauuuu

SEQ ID NO: 3641880 - RNA, 12 nt, Human
uguuaugcuauu

SEQ ID NO: 3641881 - RNA, 15 nt, Human
uguuaugcugugaca

SEQ ID NO: 3641882 - RNA, 15 nt, Human
uguuauguacuguac

SEQ ID NO: 3641883 - RNA, 17 nt, Human
uguuauguagauaacaa

SEQ ID NO: 3641884 - RNA, 15 nt, Human
uguuauguauauggu

SEQ ID NO: 3641885 - RNA, 14 nt, Human
uguuauuaaacaaa

SEQ ID NO: 3641886 - RNA, 22 nt, Human
uguuauuaaacguaugcaugug

SEQ ID NO: 3641887 - RNA, 23 nt, Human
uguuauuaaacguaugcauguga

SEQ ID NO: 3641888 - RNA, 20 nt, Human
uguuauuacauccuuguggc

SEQ ID NO: 3641889 - RNA, 21 nt, Human
uguuauuagagauuaccuccu

SEQ ID NO: 3641890 - RNA, 16 nt, Human
uguuauucaacagcaa

SEQ ID NO: 3641891 - RNA, 14 nt, Human
uguuauucuuugca

SEQ ID NO: 3641892 - RNA, 16 nt, Human
uguuauugugaaugau

SEQ ID NO: 3641893 - RNA, 19 nt, Human
uguuauugugaaugauuca

SEQ ID NO: 3641894 - RNA, 16 nt, Human
uguuauuguuuuguua

SEQ ID NO: 3641895 - RNA, 15 nt, Human
uguuauuuaaaugag

SEQ ID NO: 3641896 - RNA, 14 nt, Human
uguuauuuauauau

SEQ ID NO: 3641897 - RNA, 13 nt, Human
uguuauuuauuga

SEQ ID NO: 3641898 - RNA, 19 nt, Human
uguuauuuauugaaaugau

SEQ ID NO: 3641899 - RNA, 21 nt, Human
uguuauuucccuacauuaaac

SEQ ID NO: 3641900 - RNA, 17 nt, Human
uguuauuuguaauagau

SEQ ID NO: 3641901 - RNA, 17 nt, Human
uguuauuuguacaguuc

SEQ ID NO: 3641902 - RNA, 16 nt, Human
uguuauuuucagugau

SEQ ID NO: 3641903 - RNA, 18 nt, Human
uguuauuuucuguugaag

SEQ ID NO: 3641904 - RNA, 17 nt, Human
uguuauuuucuucuaag

SEQ ID NO: 3641905 - RNA, 14 nt, Human
uguuauuuugcaac

SEQ ID NO: 3641906 - RNA, 14 nt, Human
uguucaaacauuua

SEQ ID NO: 3641907 - RNA, 18 nt, Human
uguucaaagccacauuau

SEQ ID NO: 3641908 - RNA, 22 nt, Human
uguucaaagccacauuauuucu

SEQ ID NO: 3641909 - RNA, 15 nt, Human
uguucaaagcugccu

SEQ ID NO: 3641910 - RNA, 17 nt, Human
uguucaacaucacugaa

SEQ ID NO: 3641911 - RNA, 21 nt, Human
uguucaaugguucugaaauaa

SEQ ID NO: 3641912 - RNA, 22 nt, Human
uguucacaccuagcgucaguau

SEQ ID NO: 3641913 - RNA, 22 nt, Human
uguucaccauuauaaugaauuu

SEQ ID NO: 3641914 - RNA, 17 nt, Human
uguucacuaaacucuga

SEQ ID NO: 3641915 - RNA, 18 nt, Human
uguucacucacucuaaag

SEQ ID NO: 3641916 - RNA, 17 nt, Human
uguucacugaagacgcc

SEQ ID NO: 3641917 - RNA, 19 nt, Human
uguucacuuuuccucccuc

SEQ ID NO: 3641918 - RNA, 13 nt, Human
uguucagcacugu

SEQ ID NO: 3641919 - RNA, 17 nt, Human
uguucagcacugucccu

SEQ ID NO: 3641920 - RNA, 15 nt, Human
uguucagcuccagcu

SEQ ID NO: 3641921 - RNA, 16 nt, Human
uguucagcuccagcuc

SEQ ID NO: 3641922 - RNA, 22 nt, Human
uguucagcuccagcucaccagc

SEQ ID NO: 3641923 - RNA, 13 nt, Human
uguucaguaauaa

SEQ ID NO: 3641924 - RNA, 14 nt, Human
uguucagucuuuca

SEQ ID NO: 3641925 - RNA, 12 nt, Human
uguucauacauu

SEQ ID NO: 3641926 - RNA, 20 nt, Human
uguucauagcccaguagacc

SEQ ID NO: 3641927 - RNA, 23 nt, Human
uguucauagcccaguagaccuug

SEQ ID NO: 3641928 - RNA, 20 nt, Human
uguucaucauccagaugugg

SEQ ID NO: 3641929 - RNA, 19 nt, Human
uguucaucauccuaagcua

SEQ ID NO: 3641930 - RNA, 19 nt, Human
uguucaucccaugauguag

SEQ ID NO: 3641931 - RNA, 15 nt, Human
uguucaucuguaacu

SEQ ID NO: 3641932 - RNA, 14 nt, Human
uguucaugaaagau

SEQ ID NO: 3641933 - RNA, 14 nt, Human
uguucauggcagau

SEQ ID NO: 3641934 - RNA, 12 nt, Human
uguucauguuug

SEQ ID NO: 3641935 - RNA, 14 nt, Human
uguucauuccucca

SEQ ID NO: 3641936 - RNA, 22 nt, Human
uguucauuuagauugaaaacuu

SEQ ID NO: 3641937 - RNA, 11 nt, Human
uguucauuucc

SEQ ID NO: 3641938 - RNA, 18 nt, Human
uguucauuuguuauucuu

SEQ ID NO: 3641939 - RNA, 20 nt, Human
uguucauuuguuauucuuaa

SEQ ID NO: 3641940 - RNA, 18 nt, Human
uguuccaaauucaguuuc

SEQ ID NO: 3641941 - RNA, 21 nt, Human
uguuccaaauucaguuucaua

SEQ ID NO: 3641942 - RNA, 22 nt, Human
uguuccaaauucaguuucauaa

SEQ ID NO: 3641943 - RNA, 11 nt, Human
uguuccaagac

SEQ ID NO: 3641944 - RNA, 15 nt, Human
uguuccaagacauug

SEQ ID NO: 3641945 - RNA, 20 nt, Human
uguuccaagacauugucaau

SEQ ID NO: 3641946 - RNA, 15 nt, Human
uguuccaaguuucca

SEQ ID NO: 3641947 - RNA, 15 nt, Human
uguuccaaugccaca

SEQ ID NO: 3641948 - RNA, 18 nt, Human
uguuccagauucaaucga

SEQ ID NO: 3641949 - RNA, 14 nt, Human
uguuccagcaguuu

SEQ ID NO: 3641950 - RNA, 18 nt, Human
uguuccauaguuaaagaa

SEQ ID NO: 3641951 - RNA, 21 nt, Human
uguuccauugaagccgacucu

SEQ ID NO: 3641952 - RNA, 16 nt, Human
uguucccacaccccaa

SEQ ID NO: 3641953 - RNA, 21 nt, Human
uguucccaccaggcugcucag

SEQ ID NO: 3641954 - RNA, 22 nt, Human
uguucccagugacacuucagag

SEQ ID NO: 3641955 - RNA, 20 nt, Human
uguucccauguagcccccug

SEQ ID NO: 3641956 - RNA, 16 nt, Human
uguucccauucuugca

SEQ ID NO: 3641957 - RNA, 17 nt, Human
uguucccauuucagcug

SEQ ID NO: 3641958 - RNA, 22 nt, Human
uguuccccacugacagccuccc

SEQ ID NO: 3641959 - RNA, 14 nt, Human
uguuccccagagaa

SEQ ID NO: 3641960 - RNA, 13 nt, Human
uguuccccaucug

SEQ ID NO: 3641961 - RNA, 14 nt, Human
uguuccccucacug

SEQ ID NO: 3641962 - RNA, 13 nt, Human
uguuccccuccuc

SEQ ID NO: 3641963 - RNA, 17 nt, Human
uguuccccuccuccacu

SEQ ID NO: 3641964 - RNA, 19 nt, Human
uguuccccuccuccacucu

SEQ ID NO: 3641965 - RNA, 16 nt, Human
uguuccccucucccuu

SEQ ID NO: 3641966 - RNA, 23 nt, Human
uguuccccucucccuucccuccu

SEQ ID NO: 3641967 - RNA, 20 nt, Human
uguuccccucuugucucccc

SEQ ID NO: 3641968 - RNA, 17 nt, Human
uguuccccuuccacuga

SEQ ID NO: 3641969 - RNA, 20 nt, Human
uguuccccuuccacugaggg

SEQ ID NO: 3641970 - RNA, 23 nt, Human
uguuccccuuccacugagggcag

SEQ ID NO: 3641971 - RNA, 14 nt, Human
uguucccucugcuc

SEQ ID NO: 3641972 - RNA, 19 nt, Human
uguucccuuugucuuucaa

SEQ ID NO: 3641973 - RNA, 20 nt, Human
uguucccuuugucuuucaaa

SEQ ID NO: 3641974 - RNA, 15 nt, Human
uguuccuacgggcuu

SEQ ID NO: 3641975 - RNA, 14 nt, Human
uguuccuagugaaa

SEQ ID NO: 3641976 - RNA, 18 nt, Human
uguuccuagugaaagagg

SEQ ID NO: 3641977 - RNA, 21 nt, Human
uguuccugccuccuugauauu

SEQ ID NO: 3641978 - RNA, 16 nt, Human
uguuccugcugcuguc

SEQ ID NO: 3641979 - RNA, 10 nt, Human
uguuccuggc

SEQ ID NO: 3641980 - RNA, 14 nt, Human
uguuccuggcaaua

SEQ ID NO: 3641981 - RNA, 20 nt, Human
uguuccuuacuuuacugccu

SEQ ID NO: 3641982 - RNA, 18 nt, Human
uguuccuucccugugccu

SEQ ID NO: 3641983 - RNA, 19 nt, Human
uguuccuuccgcuuggagc

SEQ ID NO: 3641984 - RNA, 21 nt, Human
uguucgauuacgucaucaaaa

SEQ ID NO: 3641985 - RNA, 22 nt, Human
uguucgcauggucacacacuga

SEQ ID NO: 3641986 - RNA, 23 nt, Human
uguucgcauggucacacacugau

SEQ ID NO: 3641987 - RNA, 23 nt, Human
uguucgcguguguggguggauau

SEQ ID NO: 3641988 - RNA, 17 nt, Human
uguucgguuuuuuuccu

SEQ ID NO: 3641989 - RNA, 21 nt, Human
uguucgguuuuuuuccuguuu

SEQ ID NO: 3641990 - RNA, 19 nt, Human
uguucguugguuauacaag

SEQ ID NO: 3641991 - RNA, 13 nt, Human
uguucuaaagcuc

SEQ ID NO: 3641992 - RNA, 14 nt, Human
uguucuaaagcucu

SEQ ID NO: 3641993 - RNA, 15 nt, Human
uguucuaagaaguga

SEQ ID NO: 3641994 - RNA, 14 nt, Human
uguucuaagaugug

SEQ ID NO: 3641995 - RNA, 16 nt, Human
uguucuaaggcucuga

SEQ ID NO: 3641996 - RNA, 11 nt, Human
uguucuaaggg

SEQ ID NO: 3641997 - RNA, 14 nt, Human
uguucuaaguuucu

SEQ ID NO: 3641998 - RNA, 23 nt, Human
uguucuaaguuucuaagauucua

SEQ ID NO: 3641999 - RNA, 15 nt, Human
uguucuaauggauua

SEQ ID NO: 3642000 - RNA, 17 nt, Human
uguucuacccguuccaa

SEQ ID NO: 3642001 - RNA, 15 nt, Human
uguucuaguuuucag

SEQ ID NO: 3642002 - RNA, 22 nt, Human
uguucuaguuuucaguuuguau

SEQ ID NO: 3642003 - RNA, 14 nt, Human
uguucuaguuuuuu

SEQ ID NO: 3642004 - RNA, 12 nt, Human
uguucuauagcu

SEQ ID NO: 3642005 - RNA, 15 nt, Human
uguucuaugaacaac

SEQ ID NO: 3642006 - RNA, 18 nt, Human
uguucucagcucccccug

SEQ ID NO: 3642007 - RNA, 18 nt, Human
uguucucuaucauuuaau

SEQ ID NO: 3642008 - RNA, 15 nt, Human
uguucucucuucucc

SEQ ID NO: 3642009 - RNA, 20 nt, Human
uguuuauauaaaugcuuuua

SEQ ID NO: 3642010 - RNA, 15 nt, Human
uguuuauauuuucaa

SEQ ID NO: 3642011 - RNA, 19 nt, Human
uguuuaucagcaguuguua

SEQ ID NO: 3642012 - RNA, 17 nt, Human
uguuuaucccuuaagaa

SEQ ID NO: 3642013 - RNA, 20 nt, Human
uguuuaucccuuaagaauga

SEQ ID NO: 3642014 - RNA, 16 nt, Human
uguuuauccuuucaua

SEQ ID NO: 3642015 - RNA, 17 nt, Human
uguuuaucuagauguaa

SEQ ID NO: 3642016 - RNA, 20 nt, Human
uguuuaucuagauguaaauu

SEQ ID NO: 3642017 - RNA, 15 nt, Human
uguuuaugagaaacu

SEQ ID NO: 3642018 - RNA, 14 nt, Human
uguuuaugagccag

SEQ ID NO: 3642019 - RNA, 16 nt, Human
uguuuaugagccagac

SEQ ID NO: 3642020 - RNA, 21 nt, Human
uguuuaugagccagacaaaug

SEQ ID NO: 3642021 - RNA, 23 nt, Human
uguuuauggccucagcugccuca

SEQ ID NO: 3642022 - RNA, 20 nt, Human
uguuuauguaaacaaaucuu

SEQ ID NO: 3642023 - RNA, 22 nt, Human
uguuuaugugcuauuaauauuu

SEQ ID NO: 3642024 - RNA, 16 nt, Human
uguuuaugugugugug

SEQ ID NO: 3642025 - RNA, 14 nt, Human
uguuuauguuuuua

SEQ ID NO: 3642026 - RNA, 19 nt, Human
uguuuauuaaaauucugaa

SEQ ID NO: 3642027 - RNA, 15 nt, Human
uguuuauuaaaugcu

SEQ ID NO: 3642028 - RNA, 14 nt, Human
uguuuauuaacaaa

SEQ ID NO: 3642029 - RNA, 21 nt, Human
uguuuauuacuuccaugaauu

SEQ ID NO: 3642030 - RNA, 14 nt, Human
uguuuauuagauga

SEQ ID NO: 3642031 - RNA, 13 nt, Human
uguuuauucaaac

SEQ ID NO: 3642032 - RNA, 18 nt, Human
uguuuauucaaacugaaa

SEQ ID NO: 3642033 - RNA, 16 nt, Human
uguuuauucauaugca

SEQ ID NO: 3642034 - RNA, 19 nt, Human
uguuuauucauaugcauau

SEQ ID NO: 3642035 - RNA, 18 nt, Human
uguuuauuccugauaaua

SEQ ID NO: 3642036 - RNA, 13 nt, Human
uguuuauuccuug

SEQ ID NO: 3642037 - RNA, 14 nt, Human
uguuuauugucaaa

SEQ ID NO: 3642038 - RNA, 17 nt, Human
uguuuauugucaaagug

SEQ ID NO: 3642039 - RNA, 23 nt, Human
uguuuauuuauaagcagauuuaa

SEQ ID NO: 3642040 - RNA, 24 nt, Human
uguuuauuuauagaguguacuuaa

SEQ ID NO: 3642041 - RNA, 15 nt, Human
uguuuauuuaucagu

SEQ ID NO: 3642042 - RNA, 17 nt, Human
uguuuauuucuguuucu

SEQ ID NO: 3642043 - RNA, 20 nt, Human
uguuuauuuucuacguuucu

SEQ ID NO: 3642044 - RNA, 14 nt, Human
uguuuauuuuuaua

SEQ ID NO: 3642045 - RNA, 15 nt, Human
uguuuauuuuuauau

SEQ ID NO: 3642046 - RNA, 23 nt, Human
uguuuauuuuuauauagcuugaa

SEQ ID NO: 3642047 - RNA, 18 nt, Human
uguuuauuuuucauauug

SEQ ID NO: 3642048 - RNA, 17 nt, Human
uguuucaaacacaaaug

SEQ ID NO: 3642049 - RNA, 18 nt, Human
uguuucaaacacaaaugc

SEQ ID NO: 3642050 - RNA, 19 nt, Human
uguuucaaacacaaaugca

SEQ ID NO: 3642051 - RNA, 15 nt, Human
uguuucaaacuuuac

SEQ ID NO: 3642052 - RNA, 19 nt, Human
uguuucaagaaccuggaaa

SEQ ID NO: 3642053 - RNA, 12 nt, Human
uguuucaagagg

SEQ ID NO: 3642054 - RNA, 22 nt, Human
uguuucaaguucacaccugcag

SEQ ID NO: 3642055 - RNA, 15 nt, Human
uguuucaaucacugu

SEQ ID NO: 3642056 - RNA, 16 nt, Human
uguuucaaucacuguc

SEQ ID NO: 3642057 - RNA, 23 nt, Human
uguuucacaccggaagguuuuua

SEQ ID NO: 3642058 - RNA, 19 nt, Human
uguuucacaguuugaaaua

SEQ ID NO: 3642059 - RNA, 21 nt, Human
uguuucagcuaagggaagaca

SEQ ID NO: 3642060 - RNA, 12 nt, Human
uguuucauccuu

SEQ ID NO: 3642061 - RNA, 18 nt, Human
uguuucauccuucccacu

SEQ ID NO: 3642062 - RNA, 18 nt, Human
uguuuccaaccuggagua

SEQ ID NO: 3642063 - RNA, 22 nt, Human
uguuuccaauguuuagcaaaua

SEQ ID NO: 3642064 - RNA, 21 nt, Human
uguuuccaguacaccuuucag

SEQ ID NO: 3642065 - RNA, 14 nt, Human
uguuucccauaauu

SEQ ID NO: 3642066 - RNA, 17 nt, Human
uguuuccuaauaucaaa

SEQ ID NO: 3642067 - RNA, 21 nt, Human
uguuuccuaauaucaaaugca

SEQ ID NO: 3642068 - RNA, 16 nt, Human
uguuuccuagcugugu

SEQ ID NO: 3642069 - RNA, 14 nt, Human
uguuuccucuaguu

SEQ ID NO: 3642070 - RNA, 16 nt, Human
uguuuccugcaggcca

SEQ ID NO: 3642071 - RNA, 11 nt, Human
uguuuccuuuu

SEQ ID NO: 3642072 - RNA, 13 nt, Human
uguuuccuuuuuu

SEQ ID NO: 3642073 - RNA, 14 nt, Human
uguuucgcucuuug

SEQ ID NO: 3642074 - RNA, 22 nt, Human
uguuucggagacgggaccgggc

SEQ ID NO: 3642075 - RNA, 15 nt, Human
uguuucguggggagg

SEQ ID NO: 3642076 - RNA, 22 nt, Human
uguuucuaagguaacaagauga

SEQ ID NO: 3642077 - RNA, 18 nt, Human
uguuucuaauuugcugcu

SEQ ID NO: 3642078 - RNA, 17 nt, Human
uguuucuacuuugauau

SEQ ID NO: 3642079 - RNA, 22 nt, Human
uguuucuaguugaggaguuucc

SEQ ID NO: 3642080 - RNA, 23 nt, Human
uguuucuaguugaggaguuuccu

SEQ ID NO: 3642081 - RNA, 16 nt, Human
uguuucuauuuuuuga

SEQ ID NO: 3642082 - RNA, 17 nt, Human
uguuucucccccugggc

SEQ ID NO: 3642083 - RNA, 15 nt, Human
uguuucucccucuca

SEQ ID NO: 3642084 - RNA, 17 nt, Human
uguuucuccuucugaaa

SEQ ID NO: 3642085 - RNA, 15 nt, Human
uguuucucugcuguu

SEQ ID NO: 3642086 - RNA, 22 nt, Human
uguuucucuguuguaagaauag

SEQ ID NO: 3642087 - RNA, 20 nt, Human
uguuucucuugagcuggccu

SEQ ID NO: 3642088 - RNA, 13 nt, Human
uguuucugaaaau

SEQ ID NO: 3642089 - RNA, 12 nt, Human
uguuucugcagu

SEQ ID NO: 3642090 - RNA, 22 nt, Human
uguuucuggacccuuauaaaau

SEQ ID NO: 3642091 - RNA, 11 nt, Human
uguuucugggg

SEQ ID NO: 3642092 - RNA, 20 nt, Human
uguuucuggguccugaagaa

SEQ ID NO: 3642093 - RNA, 11 nt, Human
uguuucuguaa

SEQ ID NO: 3642094 - RNA, 22 nt, Human
uguuucuguacuuuuuggcaua

SEQ ID NO: 3642095 - RNA, 23 nt, Human
uguuucuguacuuuuuggcauaa

SEQ ID NO: 3642096 - RNA, 12 nt, Human
uguuucuguccu

SEQ ID NO: 3642097 - RNA, 13 nt, Human
uguuucugugggc

SEQ ID NO: 3642098 - RNA, 15 nt, Human
uguuucuguuccaaa

SEQ ID NO: 3642099 - RNA, 16 nt, Human
uguuucuguuccaaau

SEQ ID NO: 3642100 - RNA, 22 nt, Human
uguuucuuaacuauaaauaugu

SEQ ID NO: 3642101 - RNA, 15 nt, Human
uguuucuuaauuugg

SEQ ID NO: 3642102 - RNA, 14 nt, Human
uguuucuugcuugu

SEQ ID NO: 3642103 - RNA, 17 nt, Human
uguuucuugcuuguacc

SEQ ID NO: 3642104 - RNA, 19 nt, Human
uguuucuugcuuguaccuc

SEQ ID NO: 3642105 - RNA, 21 nt, Human
uguuucuuucucugaggacaa

SEQ ID NO: 3642106 - RNA, 13 nt, Human
uguuucuuugaau

SEQ ID NO: 3642107 - RNA, 16 nt, Human
uguuucuuugaauuuu

SEQ ID NO: 3642108 - RNA, 18 nt, Human
uguuucuuuguaaugaaa

SEQ ID NO: 3642109 - RNA, 12 nt, Human
uguuucuuugug

SEQ ID NO: 3642110 - RNA, 14 nt, Human
uguuucuuuuguau

SEQ ID NO: 3642111 - RNA, 20 nt, Human
uguuucuuuuguauguaaau

SEQ ID NO: 3642112 - RNA, 16 nt, Human
uguuugaaaauaguuu

SEQ ID NO: 3642113 - RNA, 17 nt, Human
uguuugaaaauaguuua

SEQ ID NO: 3642114 - RNA, 18 nt, Human
uguuugaaaauaguuuau

SEQ ID NO: 3642115 - RNA, 18 nt, Human
uguuugaaacaaagaagg

SEQ ID NO: 3642116 - RNA, 22 nt, Human
uguuugaaucccacgcuucucu

SEQ ID NO: 3642117 - RNA, 21 nt, Human
uguuugacgggaaacaaaacu

SEQ ID NO: 3642118 - RNA, 13 nt, Human
uguuugagcucag

SEQ ID NO: 3642119 - RNA, 15 nt, Human
uguuugaggaaagca

SEQ ID NO: 3642120 - RNA, 18 nt, Human
uguuugaggagcauguuu

SEQ ID NO: 3642121 - RNA, 20 nt, Human
uguuugaggagcauguuuug

SEQ ID NO: 3642122 - RNA, 22 nt, Human
uguuugagguuuuuaagccuua

SEQ ID NO: 3642123 - RNA, 16 nt, Human
uguuugaugcauuaaa

SEQ ID NO: 3642124 - RNA, 17 nt, Human
uguuugauucagacagc

SEQ ID NO: 3642125 - RNA, 14 nt, Human
uguuugcaagcagg

SEQ ID NO: 3642126 - RNA, 22 nt, Human
uguuugccauacuuugucugaa

SEQ ID NO: 3642127 - RNA, 15 nt, Human
uguuugcucagaaca

SEQ ID NO: 3642128 - RNA, 23 nt, Human
uguuugcuuauuguuccaagaca

SEQ ID NO: 3642129 - RNA, 22 nt, Human
uguuugcuuucugaucaaggcc

SEQ ID NO: 3642130 - RNA, 12 nt, Human
uguuuggaaaua

SEQ ID NO: 3642131 - RNA, 13 nt, Human
uguuuggagacag

SEQ ID NO: 3642132 - RNA, 15 nt, Human
uguuuggagacauuc

SEQ ID NO: 3642133 - RNA, 12 nt, Human
uguuuggagagc

SEQ ID NO: 3642134 - RNA, 19 nt, Human
uguuuggauguaauuuagg

SEQ ID NO: 3642135 - RNA, 15 nt, Human
uguuuggcauguaaa

SEQ ID NO: 3642136 - RNA, 16 nt, Human
uguuugggcagaaggg

SEQ ID NO: 3642137 - RNA, 22 nt, Human
uguuugggcagaagggagaagg

SEQ ID NO: 3642138 - RNA, 19 nt, Human
uguuuggggaugagaaagg

SEQ ID NO: 3642139 - RNA, 18 nt, Human
uguuuggguuuuuuuccu

SEQ ID NO: 3642140 - RNA, 12 nt, Human
uguuugguaaau

SEQ ID NO: 3642141 - RNA, 16 nt, Human
uguuugguauuguauu

SEQ ID NO: 3642142 - RNA, 22 nt, Human
uguuugguauuguauuuauuca

SEQ ID NO: 3642143 - RNA, 14 nt, Human
uguuugguuauagu

SEQ ID NO: 3642144 - RNA, 19 nt, Human
uguuuguaaauaagagauu

SEQ ID NO: 3642145 - RNA, 16 nt, Human
uguuuguaacaagaaa

SEQ ID NO: 3642146 - RNA, 17 nt, Human
uguuuguacaagauugu

SEQ ID NO: 3642147 - RNA, 16 nt, Human
uguuuguagugaaaua

SEQ ID NO: 3642148 - RNA, 18 nt, Human
uguuugucucuccuuuuc

SEQ ID NO: 3642149 - RNA, 17 nt, Human
uguuugucuucucccca

SEQ ID NO: 3642150 - RNA, 13 nt, Human
uguuugugauuga

SEQ ID NO: 3642151 - RNA, 13 nt, Human
uguuugugcugug

SEQ ID NO: 3642152 - RNA, 14 nt, Human
uguuugugcugugg

SEQ ID NO: 3642153 - RNA, 12 nt, Human
uguuugugcuuc

SEQ ID NO: 3642154 - RNA, 15 nt, Human
uuaguuccugugcac

SEQ ID NO: 3642155 - RNA, 21 nt, Human
uuaguucucacuguucccucu

SEQ ID NO: 3642156 - RNA, 15 nt, Human
uuaguugcuguaugu

SEQ ID NO: 3642157 - RNA, 16 nt, Human
uuaguuuagaacaggu

SEQ ID NO: 3642158 - RNA, 20 nt, Human
uuaguuuagaacagguuuuu

SEQ ID NO: 3642159 - RNA, 20 nt, Human
uuaguuuccuuuuuaauaug

SEQ ID NO: 3642160 - RNA, 15 nt, Human
uuaguuucuccaagc

SEQ ID NO: 3642161 - RNA, 20 nt, Human
uuaguuucugaguuuuacca

SEQ ID NO: 3642162 - RNA, 19 nt, Human
uuaguuucuguucugugga

SEQ ID NO: 3642163 - RNA, 14 nt, Human
uuaguuucuuuggg

SEQ ID NO: 3642164 - RNA, 22 nt, Human
uuaguuugcaguuacacuaaaa

SEQ ID NO: 3642165 - RNA, 15 nt, Human
uuaguuuguauauau

SEQ ID NO: 3642166 - RNA, 17 nt, Human
uuaguuuuaguugcaga

SEQ ID NO: 3642167 - RNA, 13 nt, Human
uuaguuuugcuuu

SEQ ID NO: 3642168 - RNA, 22 nt, Human
uuaguuuugcuuuuaguuuuuc

SEQ ID NO: 3642169 - RNA, 18 nt, Human
uuaguuuugugaagguga

SEQ ID NO: 3642170 - RNA, 14 nt, Human
uuaguuuugugcuu

SEQ ID NO: 3642171 - RNA, 17 nt, Human
uuaguuuuucauuaaau

SEQ ID NO: 3642172 - RNA, 19 nt, Human
uuaguuuuugguugggaau

SEQ ID NO: 3642173 - RNA, 18 nt, Human
uuaguuuuuguaauuuau

SEQ ID NO: 3642174 - RNA, 19 nt, Human
uuaguuuuuguaauuuauu

SEQ ID NO: 3642175 - RNA, 18 nt, Human
uuaguuuuugugaaguuu

SEQ ID NO: 3642176 - RNA, 19 nt, Human
uuauaaaaaaaaugaaaug

SEQ ID NO: 3642177 - RNA, 19 nt, Human
uuauaaaaaauggugccug

SEQ ID NO: 3642178 - RNA, 18 nt, Human
uuauaaaaaaugguucag

SEQ ID NO: 3642179 - RNA, 15 nt, Human
uuauaaaaauaaaaa

SEQ ID NO: 3642180 - RNA, 21 nt, Human
uuauaaaaauaaauagaaaag

SEQ ID NO: 3642181 - RNA, 16 nt, Human
uuauaaaaauauuaag

SEQ ID NO: 3642182 - RNA, 21 nt, Human
uuauaaaaauauuaagacaau

SEQ ID NO: 3642183 - RNA, 22 nt, Human
uuauaaaaggggguccguggaa

SEQ ID NO: 3642184 - RNA, 16 nt, Human
uuauaaaaguguucau

SEQ ID NO: 3642185 - RNA, 20 nt, Human
uuauaaaauccugugcaaua

SEQ ID NO: 3642186 - RNA, 13 nt, Human
uuauaaaauggcu

SEQ ID NO: 3642187 - RNA, 20 nt, Human
uuauaaaauggcuguaauca

SEQ ID NO: 3642188 - RNA, 14 nt, Human
uuauaaaauuaaag

SEQ ID NO: 3642189 - RNA, 17 nt, Human
uuauaaaauuaaagaaa

SEQ ID NO: 3642190 - RNA, 22 nt, Human
uuauaaaauuaaagaaaauaaa

SEQ ID NO: 3642191 - RNA, 16 nt, Human
uuauaaaauuaagcaa

SEQ ID NO: 3642192 - RNA, 17 nt, Human
uuauaaaauuuugcuuu

SEQ ID NO: 3642193 - RNA, 21 nt, Human
uuauaaacaagaaugaagguu

SEQ ID NO: 3642194 - RNA, 23 nt, Human
uuauaaacagacaauaugugagu

SEQ ID NO: 3642195 - RNA, 18 nt, Human
uuauaaacucauuuugcu

SEQ ID NO: 3642196 - RNA, 17 nt, Human
uuauaaacuuuaccuuu

SEQ ID NO: 3642197 - RNA, 12 nt, Human
uuauaaacuuuu

SEQ ID NO: 3642198 - RNA, 15 nt, Human
uuauaaaguagaaau

SEQ ID NO: 3642199 - RNA, 12 nt, Human
uuauaaagugcu

SEQ ID NO: 3642200 - RNA, 19 nt, Human
uuauaaagugcuuguguaa

SEQ ID NO: 3642201 - RNA, 15 nt, Human
uuauaaauauauuua

SEQ ID NO: 3642202 - RNA, 18 nt, Human
uuauaaaucuuaugcucu

SEQ ID NO: 3642203 - RNA, 15 nt, Human
uuauaaauuaaauau

SEQ ID NO: 3642204 - RNA, 18 nt, Human
uuauaaauuaaauauaug

SEQ ID NO: 3642205 - RNA, 11 nt, Human
uuauaaauuau

SEQ ID NO: 3642206 - RNA, 12 nt, Human
uuauaaauuucg

SEQ ID NO: 3642207 - RNA, 17 nt, Human
uuauaacagcauucuug

SEQ ID NO: 3642208 - RNA, 18 nt, Human
uuauaacucaucauaaaa

SEQ ID NO: 3642209 - RNA, 20 nt, Human
uuauaacucaucauaaaaua

SEQ ID NO: 3642210 - RNA, 22 nt, Human
uuauaacucaucauaaaauaaa

SEQ ID NO: 3642211 - RNA, 18 nt, Human
uuauaacugaaggagaag

SEQ ID NO: 3642212 - RNA, 17 nt, Human
uuauaacuguaaagaug

SEQ ID NO: 3642213 - RNA, 17 nt, Human
uuauaacuuaaaauauu

SEQ ID NO: 3642214 - RNA, 15 nt, Human
uuauaacuuaaugaa

SEQ ID NO: 3642215 - RNA, 14 nt, Human
uuauaacuuuuuau

SEQ ID NO: 3642216 - RNA, 16 nt, Human
uuauaacuuuuuauau

SEQ ID NO: 3642217 - RNA, 17 nt, Human
uuauaacuuuuuauauu

SEQ ID NO: 3642218 - RNA, 20 nt, Human
uuauaagaaaaaugugaauu

SEQ ID NO: 3642219 - RNA, 15 nt, Human
uuauaagaaagccug

SEQ ID NO: 3642220 - RNA, 20 nt, Human
uuauaagacucucacacuca

SEQ ID NO: 3642221 - RNA, 23 nt, Human
uuauaagcaaauuucaaaagaca

SEQ ID NO: 3642222 - RNA, 13 nt, Human
uuauaagcaucau

SEQ ID NO: 3642223 - RNA, 21 nt, Human
uuauaagcaucauuauuuaug

SEQ ID NO: 3642224 - RNA, 12 nt, Human
uuauaagcauug

SEQ ID NO: 3642225 - RNA, 22 nt, Human
uuauaagggcaaauuggagaaa

SEQ ID NO: 3642226 - RNA, 22 nt, Human
uuauaagguguuuucuguguaa

SEQ ID NO: 3642227 - RNA, 23 nt, Human
uuauaagguguuuucuguguaac

SEQ ID NO: 3642228 - RNA, 18 nt, Human
uuauaaguaucuucaugu

SEQ ID NO: 3642229 - RNA, 16 nt, Human
uuauaagucacaaaga

SEQ ID NO: 3642230 - RNA, 17 nt, Human
uuauaaguucacaaaau

SEQ ID NO: 3642231 - RNA, 15 nt, Human
uuauaauaauguuaa

SEQ ID NO: 3642232 - RNA, 15 nt, Human
uuauaauacucuguu

SEQ ID NO: 3642233 - RNA, 13 nt, Human
uuauaauauacua

SEQ ID NO: 3642234 - RNA, 14 nt, Human
uuauaaucaccagg

SEQ ID NO: 3642235 - RNA, 13 nt, Human
uuauaaucacuuu

SEQ ID NO: 3642236 - RNA, 16 nt, Human
uuauaauccuuaaauc

SEQ ID NO: 3642237 - RNA, 11 nt, Human
uuauaaucuuu

SEQ ID NO: 3642238 - RNA, 14 nt, Human
uuauaauucaguau

SEQ ID NO: 3642239 - RNA, 14 nt, Human
uuauaauucucauu

SEQ ID NO: 3642240 - RNA, 20 nt, Human
uuauaauuguacaaaauuaa

SEQ ID NO: 3642241 - RNA, 12 nt, Human
uuauaauuuuaa

SEQ ID NO: 3642242 - RNA, 16 nt, Human
uuauaauuuuccuaau

SEQ ID NO: 3642243 - RNA, 16 nt, Human
uuauaauuuugugaag

SEQ ID NO: 3642244 - RNA, 19 nt, Human
uuauacaaaauaagaacga

SEQ ID NO: 3642245 - RNA, 20 nt, Human
uuauacaaaccuaccaaaau

SEQ ID NO: 3642246 - RNA, 19 nt, Human
uuauacaaauuagaaaaug

SEQ ID NO: 3642247 - RNA, 12 nt, Human
uuauacaacagu

SEQ ID NO: 3642248 - RNA, 16 nt, Human
uuauacaacagugcua

SEQ ID NO: 3642249 - RNA, 15 nt, Human
uuauacaauaucauc

SEQ ID NO: 3642250 - RNA, 15 nt, Human
uuauacacuguaaug

SEQ ID NO: 3642251 - RNA, 22 nt, Human
uuauacagaauugugucugcag

SEQ ID NO: 3642252 - RNA, 22 nt, Human
uuauacagaccgaacuguugua

SEQ ID NO: 3642253 - RNA, 20 nt, Human
uuauacagauagaguuccau

SEQ ID NO: 3642254 - RNA, 22 nt, Human
uuauacagauagaguuccauau

SEQ ID NO: 3642255 - RNA, 20 nt, Human
uuauacaugacacugaaaug

SEQ ID NO: 3642256 - RNA, 20 nt, Human
uuauacaugugauacauuuu

SEQ ID NO: 3642257 - RNA, 16 nt, Human
uuauacauuaguaaau

SEQ ID NO: 3642258 - RNA, 21 nt, Human
uuauacauuaguaaaugucuu

SEQ ID NO: 3642259 - RNA, 23 nt, Human
uuauacauuaguaaaugucuuug

SEQ ID NO: 3642260 - RNA, 16 nt, Human
uuauaccauucagauc

SEQ ID NO: 3642261 - RNA, 15 nt, Human
uuauaccuaccugug

SEQ ID NO: 3642262 - RNA, 19 nt, Human
uuauaccucaaacuaucug

SEQ ID NO: 3642263 - RNA, 14 nt, Human
uuauaccuguuuaa

SEQ ID NO: 3642264 - RNA, 15 nt, Human
uuauaccuguuuaaa

SEQ ID NO: 3642265 - RNA, 14 nt, Human
uuauacgaaauaau

SEQ ID NO: 3642266 - RNA, 22 nt, Human
uuauacgcuggcaacacagagg

SEQ ID NO: 3642267 - RNA, 17 nt, Human
uuauacguguagcuaua

SEQ ID NO: 3642268 - RNA, 11 nt, Human
uuauacuaacu

SEQ ID NO: 3642269 - RNA, 16 nt, Human
uuauacucuuucugua

SEQ ID NO: 3642270 - RNA, 15 nt, Human
uuauacuguacaaua

SEQ ID NO: 3642271 - RNA, 18 nt, Human
uuauacuguacaauaaaa

SEQ ID NO: 3642272 - RNA, 23 nt, Human
uuauacuuucccuacccucuaga

SEQ ID NO: 3642273 - RNA, 18 nt, Human
uuauacuuuguaaagaca

SEQ ID NO: 3642274 - RNA, 12 nt, Human
uuauagaagaau

SEQ ID NO: 3642275 - RNA, 17 nt, Human
uuauagaagaaugcaug

SEQ ID NO: 3642276 - RNA, 23 nt, Human
uuauagaauauuuauuaccucug

SEQ ID NO: 3642277 - RNA, 15 nt, Human
uuauagacaaauaau

SEQ ID NO: 3642278 - RNA, 14 nt, Human
uuauagagaaugau

SEQ ID NO: 3642279 - RNA, 17 nt, Human
uuauagagcagaaauuc

SEQ ID NO: 3642280 - RNA, 12 nt, Human
uuauagauucua

SEQ ID NO: 3642281 - RNA, 15 nt, Human
uuauagauuugaccu

SEQ ID NO: 3642282 - RNA, 17 nt, Human
uuauagcaaacuuggaa

SEQ ID NO: 3642283 - RNA, 20 nt, Human
uuauagcaacaacaauuggu

SEQ ID NO: 3642284 - RNA, 14 nt, Human
uuauagcacuuuga

SEQ ID NO: 3642285 - RNA, 22 nt, Human
uuauagcacuuugaaauaccuc

SEQ ID NO: 3642286 - RNA, 22 nt, Human
uuauagccacaucccuuugaaa

SEQ ID NO: 3642287 - RNA, 20 nt, Human
uuauagccuggacugcuacc

SEQ ID NO: 3642288 - RNA, 16 nt, Human
uuauagcucaguuuau

SEQ ID NO: 3642289 - RNA, 15 nt, Human
uuauagcucuaaugu

SEQ ID NO: 3642290 - RNA, 18 nt, Human
uuauaggauuuauuuaaa

SEQ ID NO: 3642291 - RNA, 17 nt, Human
uuauaggucacuccugg

SEQ ID NO: 3642292 - RNA, 18 nt, Human
uuauaggugagaaaaaaa

SEQ ID NO: 3642293 - RNA, 22 nt, Human
uuauagguguugguuuuggggg

SEQ ID NO: 3642294 - RNA, 13 nt, Human
uuauaguaaugag

SEQ ID NO: 3642295 - RNA, 18 nt, Human
uuauaguauaucuggaca

SEQ ID NO: 3642296 - RNA, 16 nt, Human
uuauagucaauggcuu

SEQ ID NO: 3642297 - RNA, 21 nt, Human
uuauagugaauuaucccuuuu

SEQ ID NO: 3642298 - RNA, 21 nt, Human
uuauagugauguaaucuugaa

SEQ ID NO: 3642299 - RNA, 22 nt, Human
uuauuggcuuuucugauccagu

SEQ ID NO: 3642300 - RNA, 20 nt, Human
uuauugggcaagugauugaa

SEQ ID NO: 3642301 - RNA, 19 nt, Human
uuauuggugaguuaggaac

SEQ ID NO: 3642302 - RNA, 18 nt, Human
uuauuguaacagacauug

SEQ ID NO: 3642303 - RNA, 19 nt, Human
uuauuguaacagacauugu

SEQ ID NO: 3642304 - RNA, 15 nt, Human
uuauuguaccucucu

SEQ ID NO: 3642305 - RNA, 21 nt, Human
uuauuguauaaacuaucaguu

SEQ ID NO: 3642306 - RNA, 14 nt, Human
uuauuguauuuaug

SEQ ID NO: 3642307 - RNA, 12 nt, Human
uuauugucccaa

SEQ ID NO: 3642308 - RNA, 15 nt, Human
uuauugucuguaaau

SEQ ID NO: 3642309 - RNA, 21 nt, Human
uuauuguggauaacaaagaua

SEQ ID NO: 3642310 - RNA, 17 nt, Human
uuauuguguuugucauu

SEQ ID NO: 3642311 - RNA, 19 nt, Human
uuauuguguuugucauuag

SEQ ID NO: 3642312 - RNA, 19 nt, Human
uuauuguuccaagacauug

SEQ ID NO: 3642313 - RNA, 20 nt, Human
uuauuuaaacucuguugcaa

SEQ ID NO: 3642314 - RNA, 16 nt, Human
uuauuuaaaugucuaa

SEQ ID NO: 3642315 - RNA, 12 nt, Human
uuauuuaaauua

SEQ ID NO: 3642316 - RNA, 14 nt, Human
uuauuuaaauuuua

SEQ ID NO: 3642317 - RNA, 15 nt, Human
uuauuuaagacuaaa

SEQ ID NO: 3642318 - RNA, 10 nt, Human
uuauuuaaua

SEQ ID NO: 3642319 - RNA, 12 nt, Human
uuauuuaauaac

SEQ ID NO: 3642320 - RNA, 15 nt, Human
uuauuuaauaacauu

SEQ ID NO: 3642321 - RNA, 14 nt, Human
uuauuuacaaaugu

SEQ ID NO: 3642322 - RNA, 17 nt, Human
uuauuuacaagaagaac

SEQ ID NO: 3642323 - RNA, 15 nt, Human
uuauuuacagaugaa

SEQ ID NO: 3642324 - RNA, 20 nt, Human
uuauuuacagaugaauguau

SEQ ID NO: 3642325 - RNA, 15 nt, Human
uuauuuacugcuagu

SEQ ID NO: 3642326 - RNA, 16 nt, Human
uuauuuagacaagaga

SEQ ID NO: 3642327 - RNA, 18 nt, Human
uuauuuagggaacugcuu

SEQ ID NO: 3642328 - RNA, 21 nt, Human
uuauuuagggaacugcuugac

SEQ ID NO: 3642329 - RNA, 17 nt, Human
uuauuuauaaucacuuu

SEQ ID NO: 3642330 - RNA, 14 nt, Human
uuauuuaucaguga

SEQ ID NO: 3642331 - RNA, 22 nt, Human
uuauuuauccagaaaacuguga

SEQ ID NO: 3642332 - RNA, 15 nt, Human
uuauuuaugaaguuu

SEQ ID NO: 3642333 - RNA, 20 nt, Human
uuauuuaugccucuguauuu

SEQ ID NO: 3642334 - RNA, 13 nt, Human
uuauuuauguauu

SEQ ID NO: 3642335 - RNA, 14 nt, Human
uuauuuauuaagau

SEQ ID NO: 3642336 - RNA, 15 nt, Human
uuauuuauuuaaaug

SEQ ID NO: 3642337 - RNA, 23 nt, Human
uuauuucaaaauauacauucaaa

SEQ ID NO: 3642338 - RNA, 12 nt, Human
uuauuucaauau

SEQ ID NO: 3642339 - RNA, 24 nt, Human
uuauuucaauguaauuaaacuguu

SEQ ID NO: 3642340 - RNA, 23 nt, Human
uuauuucacacgcuguucuaaug

SEQ ID NO: 3642341 - RNA, 19 nt, Human
uuauuucagauuuugauaa

SEQ ID NO: 3642342 - RNA, 20 nt, Human
uuauuucaucauauuauaca

SEQ ID NO: 3642343 - RNA, 15 nt, Human
uuauuucaugaaaau

SEQ ID NO: 3642344 - RNA, 19 nt, Human
uuauuucaugauuagaaau

SEQ ID NO: 3642345 - RNA, 17 nt, Human
uuauuuccaaauaaaau

SEQ ID NO: 3642346 - RNA, 19 nt, Human
uuauuuccacuaaaaauau

SEQ ID NO: 3642347 - RNA, 19 nt, Human
uuauuucccccauuuuucc

SEQ ID NO: 3642348 - RNA, 18 nt, Human
uuauuuccuaguucugua

SEQ ID NO: 3642349 - RNA, 20 nt, Human
uuauuuccuaugauguauac

SEQ ID NO: 3642350 - RNA, 14 nt, Human
uuauuucuccuuuu

SEQ ID NO: 3642351 - RNA, 16 nt, Human
uuauuucucugauuug

SEQ ID NO: 3642352 - RNA, 13 nt, Human
uuauuucugcaua

SEQ ID NO: 3642353 - RNA, 15 nt, Human
uuauuucugcauaug

SEQ ID NO: 3642354 - RNA, 19 nt, Human
uuauuucuuaaacaaaugu

SEQ ID NO: 3642355 - RNA, 15 nt, Human
uuauuucuuuuacuu

SEQ ID NO: 3642356 - RNA, 15 nt, Human
uuauuugacuuuaau

SEQ ID NO: 3642357 - RNA, 20 nt, Human
uuauuugagaagcugcucaa

SEQ ID NO: 3642358 - RNA, 22 nt, Human
uuauuugaguggaguuacugaa

SEQ ID NO: 3642359 - RNA, 13 nt, Human
uuauuugcauguu

SEQ ID NO: 3642360 - RNA, 15 nt, Human
uuauuugcauguuau

SEQ ID NO: 3642361 - RNA, 16 nt, Human
uuauuuggaaaggaau

SEQ ID NO: 3642362 - RNA, 22 nt, Human
uuauuuggcaguuugguauuug

SEQ ID NO: 3642363 - RNA, 19 nt, Human
uuauuugggguugcaucag

SEQ ID NO: 3642364 - RNA, 19 nt, Human
uuauuuguaaauuuagugu

SEQ ID NO: 3642365 - RNA, 12 nt, Human
uuauuugucaaa

SEQ ID NO: 3642366 - RNA, 12 nt, Human
uuauuuguugag

SEQ ID NO: 3642367 - RNA, 15 nt, Human
uuauuuguuuucccg

SEQ ID NO: 3642368 - RNA, 14 nt, Human
uuauuuuaaacaaa

SEQ ID NO: 3642369 - RNA, 12 nt, Human
uuauuuuaaauu

SEQ ID NO: 3642370 - RNA, 14 nt, Human
uuauuuuaaauuau

SEQ ID NO: 3642371 - RNA, 22 nt, Human
uuauuuuaaauuauaaggacug

SEQ ID NO: 3642372 - RNA, 15 nt, Human
uuauuuuaauaaugu

SEQ ID NO: 3642373 - RNA, 16 nt, Human
uuauuuuaauaauguu

SEQ ID NO: 3642374 - RNA, 13 nt, Human
uuauuuuaaugug

SEQ ID NO: 3642375 - RNA, 19 nt, Human
uuauuuuacacagaaacac

SEQ ID NO: 3642376 - RNA, 13 nt, Human
uuauuuuacuuuu

SEQ ID NO: 3642377 - RNA, 13 nt, Human
uuauuuuagauau

SEQ ID NO: 3642378 - RNA, 20 nt, Human
uuauuuuagcaguucugcaa

SEQ ID NO: 3642379 - RNA, 21 nt, Human
uuauuuuagcaguucugcaaa

SEQ ID NO: 3642380 - RNA, 22 nt, Human
uuauuuuauaagaaaaacuuuu

SEQ ID NO: 3642381 - RNA, 16 nt, Human
uuauuuuauccucugg

SEQ ID NO: 3642382 - RNA, 18 nt, Human
uuauuuuaugagaaaugu

SEQ ID NO: 3642383 - RNA, 19 nt, Human
uuauuuuaugagaaaugua

SEQ ID NO: 3642384 - RNA, 14 nt, Human
uuauuuuauuauga

SEQ ID NO: 3642385 - RNA, 16 nt, Human
uuauuuuauuaugaaa

SEQ ID NO: 3642386 - RNA, 20 nt, Human
uuauuuuauuaugaaacuug

SEQ ID NO: 3642387 - RNA, 13 nt, Human
uuauuuucaagaa

SEQ ID NO: 3642388 - RNA, 14 nt, Human
uuauuuucaccugu

SEQ ID NO: 3642389 - RNA, 14 nt, Human
uuauuuucagcaug

SEQ ID NO: 3642390 - RNA, 14 nt, Human
uuauuuucaguauu

SEQ ID NO: 3642391 - RNA, 15 nt, Human
uuauuuucagugaua

SEQ ID NO: 3642392 - RNA, 12 nt, Human
uuauuuucuaaa

SEQ ID NO: 3642393 - RNA, 14 nt, Human
uuauuuucuaaagu

SEQ ID NO: 3642394 - RNA, 16 nt, Human
uuauuuucuccugaua

SEQ ID NO: 3642395 - RNA, 12 nt, Human
uuauuuucuggu

SEQ ID NO: 3642396 - RNA, 14 nt, Human
uuauuuucugucag

SEQ ID NO: 3642397 - RNA, 18 nt, Human
uuauuuucuuuugaauug

SEQ ID NO: 3642398 - RNA, 15 nt, Human
uuauuuugacauaaa

SEQ ID NO: 3642399 - RNA, 17 nt, Human
uuauuuugacauaaagu

SEQ ID NO: 3642400 - RNA, 16 nt, Human
uuauuuugauguaaag

SEQ ID NO: 3642401 - RNA, 22 nt, Human
uuauuuugccaagggcauaaau

SEQ ID NO: 3642402 - RNA, 23 nt, Human
uuauuuugccauggaugagaguc

SEQ ID NO: 3642403 - RNA, 19 nt, Human
uuauuuuggaaagaagaaa

SEQ ID NO: 3642404 - RNA, 13 nt, Human
uuauuuugguacu

SEQ ID NO: 3642405 - RNA, 18 nt, Human
uuauuuugguacuuuuau

SEQ ID NO: 3642406 - RNA, 12 nt, Human
uuauuuuguaau

SEQ ID NO: 3642407 - RNA, 21 nt, Human
uuauuuuguaauuauugugau

SEQ ID NO: 3642408 - RNA, 19 nt, Human
uuauuuugugcucauuuaa

SEQ ID NO: 3642409 - RNA, 14 nt, Human
uuauuuuguucaua

SEQ ID NO: 3642410 - RNA, 16 nt, Human
uuauuuuguucauaca

SEQ ID NO: 3642411 - RNA, 14 nt, Human
uuauuuuuaaagau

SEQ ID NO: 3642412 - RNA, 20 nt, Human
uuauuuuuagaauuuuguga

SEQ ID NO: 3642413 - RNA, 13 nt, Human
uuauuuuuagaug

SEQ ID NO: 3642414 - RNA, 17 nt, Human
uuauuuuuauacaguag

SEQ ID NO: 3642415 - RNA, 22 nt, Human
uuauuuuuauacaguagugaga

SEQ ID NO: 3642416 - RNA, 14 nt, Human
uuauuuuucaagga

SEQ ID NO: 3642417 - RNA, 16 nt, Human
uuauuuuucauauugu

SEQ ID NO: 3642418 - RNA, 10 nt, Human
uuauuuuucu

SEQ ID NO: 3642419 - RNA, 14 nt, Human
uuauuuuuucagac

SEQ ID NO: 3642420 - RNA, 15 nt, Human
uuauuuuuucagacc

SEQ ID NO: 3642421 - RNA, 14 nt, Human
uuauuuuuuucuac

SEQ ID NO: 3642422 - RNA, 13 nt, Human
uuauuuuuuucug

SEQ ID NO: 3642423 - RNA, 18 nt, Human
uucaaaaaaacacuaguu

SEQ ID NO: 3642424 - RNA, 12 nt, Human
uucaaaaacugu

SEQ ID NO: 3642425 - RNA, 20 nt, Human
uucaaaaacuguuuugggua

SEQ ID NO: 3642426 - RNA, 13 nt, Human
uucaaaaaguguu

SEQ ID NO: 3642427 - RNA, 12 nt, Human
uucaaaaaucug

SEQ ID NO: 3642428 - RNA, 16 nt, Human
uucaaaaaucugaaga

SEQ ID NO: 3642429 - RNA, 16 nt, Human
uucaaaaauguacaaa

SEQ ID NO: 3642430 - RNA, 16 nt, Human
uucaaaacaaacagau

SEQ ID NO: 3642431 - RNA, 20 nt, Human
uucaaaaccagguccaauga

SEQ ID NO: 3642432 - RNA, 19 nt, Human
uucaaaagacauguuguaa

SEQ ID NO: 3642433 - RNA, 21 nt, Human
uucaaaagguauuauacaugu

SEQ ID NO: 3642434 - RNA, 21 nt, Human
uucaaaaguauuuuccuguaa

SEQ ID NO: 3642435 - RNA, 16 nt, Human
uucaaaauauugagca

SEQ ID NO: 3642436 - RNA, 20 nt, Human
uucaaaauauuuaaaaaugu

SEQ ID NO: 3642437 - RNA, 15 nt, Human
uucaaaauccaaaaa

SEQ ID NO: 3642438 - RNA, 13 nt, Human
uucaaaauccuuc

SEQ ID NO: 3642439 - RNA, 17 nt, Human
uucaaaauccuuccaaa

SEQ ID NO: 3642440 - RNA, 23 nt, Human
uucaaaaugauuuccucuguaau

SEQ ID NO: 3642441 - RNA, 20 nt, Human
uucaaaaugcuuuuuauuau

SEQ ID NO: 3642442 - RNA, 16 nt, Human
uucaaaauggagggaa

SEQ ID NO: 3642443 - RNA, 17 nt, Human
uucaaaauuaaaucugu

SEQ ID NO: 3642444 - RNA, 15 nt, Human
uucaaacaagaaugu

SEQ ID NO: 3642445 - RNA, 14 nt, Human
uucaaacacaaaug

SEQ ID NO: 3642446 - RNA, 21 nt, Human
uucuacucuuaaguuucucag

SEQ ID NO: 3642447 - RNA, 20 nt, Human
uucuacugcucuccuccacc

SEQ ID NO: 3642448 - RNA, 13 nt, Human
uucuacugcuucu

SEQ ID NO: 3642449 - RNA, 23 nt, Human
uucuacugucaaaugaugugcaa

SEQ ID NO: 3642450 - RNA, 16 nt, Human
uucuacuuccaagacu

SEQ ID NO: 3642451 - RNA, 20 nt, Human
uucuacuugcucuggaccug

SEQ ID NO: 3642452 - RNA, 23 nt, Human
uucuacuugcucuggaccugccc

SEQ ID NO: 3642453 - RNA, 12 nt, Human
uucuagaaaaac

SEQ ID NO: 3642454 - RNA, 19 nt, Human
uucuagaaagagaaacagu

SEQ ID NO: 3642455 - RNA, 17 nt, Human
uucuagaaagccuguuc

SEQ ID NO: 3642456 - RNA, 20 nt, Human
uucuagaaguuucccuuccu

SEQ ID NO: 3642457 - RNA, 21 nt, Human
uucuagaaguuucccuuccuc

SEQ ID NO: 3642458 - RNA, 12 nt, Human
uucuagaccaau

SEQ ID NO: 3642459 - RNA, 16 nt, Human
uucuagagcacugcca

SEQ ID NO: 3642460 - RNA, 22 nt, Human
uucuagaguuuuauagccugga

SEQ ID NO: 3642461 - RNA, 19 nt, Human
uucuagauacaauaaauug

SEQ ID NO: 3642462 - RNA, 14 nt, Human
uucuagcauggcau

SEQ ID NO: 3642463 - RNA, 22 nt, Human
uucuagcauggcauauuuuuca

SEQ ID NO: 3642464 - RNA, 17 nt, Human
uucuagcauggcugcca

SEQ ID NO: 3642465 - RNA, 12 nt, Human
uucuagccugca

SEQ ID NO: 3642466 - RNA, 24 nt, Human
uucuagccugcacuuugaugucau

SEQ ID NO: 3642467 - RNA, 16 nt, Human
uucuagcgcaguuuuu

SEQ ID NO: 3642468 - RNA, 22 nt, Human
uucuagcuaauggaaaaugauu

SEQ ID NO: 3642469 - RNA, 16 nt, Human
uucuagcuagaaauau

SEQ ID NO: 3642470 - RNA, 17 nt, Human
uucuagcuagaaauaug

SEQ ID NO: 3642471 - RNA, 22 nt, Human
uucuagcuagaaauaugauuuu

SEQ ID NO: 3642472 - RNA, 12 nt, Human
uucuagcuguug

SEQ ID NO: 3642473 - RNA, 16 nt, Human
uucuaggaaaauaaaa

SEQ ID NO: 3642474 - RNA, 16 nt, Human
uucuaggaccuguguc

SEQ ID NO: 3642475 - RNA, 23 nt, Human
uucuaggcacuguaguucuaaga

SEQ ID NO: 3642476 - RNA, 16 nt, Human
uucuaggcaucucugu

SEQ ID NO: 3642477 - RNA, 16 nt, Human
uucuagggcugggaaa

SEQ ID NO: 3642478 - RNA, 21 nt, Human
uucuagguuucaaagaugcug

SEQ ID NO: 3642479 - RNA, 18 nt, Human
uucuagugcagcugaaau

SEQ ID NO: 3642480 - RNA, 12 nt, Human
uucuagugcugc

SEQ ID NO: 3642481 - RNA, 13 nt, Human
uucuagugcugcu

SEQ ID NO: 3642482 - RNA, 17 nt, Human
uucuaguggucuuugua

SEQ ID NO: 3642483 - RNA, 20 nt, Human
uucuaguggucuuuguaaga

SEQ ID NO: 3642484 - RNA, 16 nt, Human
uucuaguucugccagg

SEQ ID NO: 3642485 - RNA, 17 nt, Human
uucuaguucugccagga

SEQ ID NO: 3642486 - RNA, 14 nt, Human
uucuaguugaaaau

SEQ ID NO: 3642487 - RNA, 15 nt, Human
uucuaguuucccaca

SEQ ID NO: 3642488 - RNA, 14 nt, Human
uucuaguuugcauu

SEQ ID NO: 3642489 - RNA, 19 nt, Human
uucuaguuuucaguuugua

SEQ ID NO: 3642490 - RNA, 13 nt, Human
uucuaguuuuguc

SEQ ID NO: 3642491 - RNA, 21 nt, Human
uucuauaaaacucugcaugua

SEQ ID NO: 3642492 - RNA, 17 nt, Human
uucuauaaauagaugcu

SEQ ID NO: 3642493 - RNA, 14 nt, Human
uucuauaaggccau

SEQ ID NO: 3642494 - RNA, 21 nt, Human
uucuauaauuuccauuuacuu

SEQ ID NO: 3642495 - RNA, 14 nt, Human
uucuauacaaauau

SEQ ID NO: 3642496 - RNA, 21 nt, Human
uucuauacaaauauaaaucuu

SEQ ID NO: 3642497 - RNA, 15 nt, Human
uucuauagccaaaaa

SEQ ID NO: 3642498 - RNA, 17 nt, Human
uucuauagccaaaaaua

SEQ ID NO: 3642499 - RNA, 14 nt, Human
uucuauaguucuag

SEQ ID NO: 3642500 - RNA, 15 nt, Human
uucuauaguucuaga

SEQ ID NO: 3642501 - RNA, 14 nt, Human
uucuauauuuucau

SEQ ID NO: 3642502 - RNA, 21 nt, Human
uucuauauuuucauucuccua

SEQ ID NO: 3642503 - RNA, 14 nt, Human
uucuaucaagccca

SEQ ID NO: 3642504 - RNA, 18 nt, Human
uucuaucauuuuuguaca

SEQ ID NO: 3642505 - RNA, 23 nt, Human
uucuauccuacaacaagaguuua

SEQ ID NO: 3642506 - RNA, 15 nt, Human
uucuauccucuguaa

SEQ ID NO: 3642507 - RNA, 13 nt, Human
uucuaugagaaaa

SEQ ID NO: 3642508 - RNA, 16 nt, Human
uucuaugcaaaguucu

SEQ ID NO: 3642509 - RNA, 17 nt, Human
uucuaugcugaguuugu

SEQ ID NO: 3642510 - RNA, 16 nt, Human
uucuaugcugcuuuua

SEQ ID NO: 3642511 - RNA, 18 nt, Human
uucuaugcugcuuuuaua

SEQ ID NO: 3642512 - RNA, 21 nt, Human
uucuaugcugcuuuuauaucu

SEQ ID NO: 3642513 - RNA, 15 nt, Human
uucuauggguguuau

SEQ ID NO: 3642514 - RNA, 14 nt, Human
uucuauguuuacuu

SEQ ID NO: 3642515 - RNA, 13 nt, Human
uucuauuaaaaga

SEQ ID NO: 3642516 - RNA, 17 nt, Human
uucuauuaaaagacuca

SEQ ID NO: 3642517 - RNA, 19 nt, Human
uucuauuaaaagacucauc

SEQ ID NO: 3642518 - RNA, 21 nt, Human
uucuauuaaaagacucauccg

SEQ ID NO: 3642519 - RNA, 14 nt, Human
uucuauuaaaagug

SEQ ID NO: 3642520 - RNA, 21 nt, Human
uucuauuaaagugcuaagguu

SEQ ID NO: 3642521 - RNA, 14 nt, Human
uucuauugaauucg

SEQ ID NO: 3642522 - RNA, 13 nt, Human
uucuauugccucu

SEQ ID NO: 3642523 - RNA, 17 nt, Human
uucuauugccuucuuug

SEQ ID NO: 3642524 - RNA, 20 nt, Human
uucuauugccuucuuugaag

SEQ ID NO: 3642525 - RNA, 14 nt, Human
uucuauuguuacuc

SEQ ID NO: 3642526 - RNA, 17 nt, Human
uucuauuguuacucugg

SEQ ID NO: 3642527 - RNA, 17 nt, Human
uucuauuucuccuccau

SEQ ID NO: 3642528 - RNA, 15 nt, Human
uucuauuugcugggc

SEQ ID NO: 3642529 - RNA, 17 nt, Human
uucuauuugcugggcuu

SEQ ID NO: 3642530 - RNA, 18 nt, Human
uucuauuugcugggcuuu

SEQ ID NO: 3642531 - RNA, 16 nt, Human
uucuauuuggggcuug

SEQ ID NO: 3642532 - RNA, 19 nt, Human
uucuauuuuauuaugaaga

SEQ ID NO: 3642533 - RNA, 20 nt, Human
uucuauuuuauuaugaagaa

SEQ ID NO: 3642534 - RNA, 17 nt, Human
uucuauuuucauuuucu

SEQ ID NO: 3642535 - RNA, 20 nt, Human
uucuauuuucauuuucugca

SEQ ID NO: 3642536 - RNA, 23 nt, Human
uucuauuuucauuuucugcaagc

SEQ ID NO: 3642537 - RNA, 22 nt, Human
uucuauuuucucugauacuuuu

SEQ ID NO: 3642538 - RNA, 16 nt, Human
uucuauuuuuaucuga

SEQ ID NO: 3642539 - RNA, 15 nt, Human
uucuauuuuuuguuu

SEQ ID NO: 3642540 - RNA, 16 nt, Human
uucucaaaagaacuua

SEQ ID NO: 3642541 - RNA, 18 nt, Human
uucucaaaagcauuuauc

SEQ ID NO: 3642542 - RNA, 13 nt, Human
uucucaaacacag

SEQ ID NO: 3642543 - RNA, 20 nt, Human
uucucaaagaaauuuccacu

SEQ ID NO: 3642544 - RNA, 15 nt, Human
uucucaaagcaggaa

SEQ ID NO: 3642545 - RNA, 18 nt, Human
uucucaaaggagcgagca

SEQ ID NO: 3642546 - RNA, 21 nt, Human
uucucaaaguuuugaaaagcu

SEQ ID NO: 3642547 - RNA, 15 nt, Human
uucucaaccuaccac

SEQ ID NO: 3642548 - RNA, 18 nt, Human
uucucaagccgcauccca

SEQ ID NO: 3642549 - RNA, 21 nt, Human
uucucaagggacguccuccaa

SEQ ID NO: 3642550 - RNA, 17 nt, Human
uucucaaguucuaagau

SEQ ID NO: 3642551 - RNA, 22 nt, Human
uucucaaguucuaagauucuaa

SEQ ID NO: 3642552 - RNA, 11 nt, Human
uucucaaugaa

SEQ ID NO: 3642553 - RNA, 12 nt, Human
uucucaaugaaa

SEQ ID NO: 3642554 - RNA, 14 nt, Human
uucucacacccacc

SEQ ID NO: 3642555 - RNA, 21 nt, Human
uucucacacuggucugcuguc

SEQ ID NO: 3642556 - RNA, 22 nt, Human
uucucacagugggagccagggc

SEQ ID NO: 3642557 - RNA, 14 nt, Human
uucucaccagcugc

SEQ ID NO: 3642558 - RNA, 17 nt, Human
uucucaccagcugcaaa

SEQ ID NO: 3642559 - RNA, 19 nt, Human
uucucaccagcugcaaagu

SEQ ID NO: 3642560 - RNA, 12 nt, Human
uucucaccagga

SEQ ID NO: 3642561 - RNA, 18 nt, Human
uucucacuccuaccuggu

SEQ ID NO: 3642562 - RNA, 13 nt, Human
uucucagaagcac

SEQ ID NO: 3642563 - RNA, 13 nt, Human
uucucagaaucua

SEQ ID NO: 3642564 - RNA, 15 nt, Human
uucucagaaucuacc

SEQ ID NO: 3642565 - RNA, 19 nt, Human
uucucagaaucuacccaaa

SEQ ID NO: 3642566 - RNA, 22 nt, Human
uucucagacuuuggaaaaugca

SEQ ID NO: 3642567 - RNA, 13 nt, Human
uucucagauauuu

SEQ ID NO: 3642568 - RNA, 14 nt, Human
uucucagauauuua

SEQ ID NO: 3642569 - RNA, 15 nt, Human
uucucagauauuuau

SEQ ID NO: 3642570 - RNA, 20 nt, Human
uucucagauauuuauauuuu

SEQ ID NO: 3642571 - RNA, 19 nt, Human
uucucagauccuuguuuca

SEQ ID NO: 3642572 - RNA, 14 nt, Human
uucucagauuucug

SEQ ID NO: 3642573 - RNA, 15 nt, Human
uucucagauuucuga

SEQ ID NO: 3642574 - RNA, 13 nt, Human
uucucagcuccca

SEQ ID NO: 3642575 - RNA, 17 nt, Human
uucucagcucccccugu

SEQ ID NO: 3642576 - RNA, 18 nt, Human
uucucagcucccccuguc

SEQ ID NO: 3642577 - RNA, 18 nt, Human
uucucagcucuucugacu

SEQ ID NO: 3642578 - RNA, 17 nt, Human
uucucaggccaucauca

SEQ ID NO: 3642579 - RNA, 12 nt, Human
uucucagggcuc

SEQ ID NO: 3642580 - RNA, 15 nt, Human
uucucagggcuccug

SEQ ID NO: 3642581 - RNA, 16 nt, Human
uucucagggcuccugc

SEQ ID NO: 3642582 - RNA, 16 nt, Human
uucucagguguugcca

SEQ ID NO: 3642583 - RNA, 21 nt, Human
uucucagugccaacuguggcu

SEQ ID NO: 3642584 - RNA, 14 nt, Human
uucucaguuuucau

SEQ ID NO: 3642585 - RNA, 18 nt, Human
uucucauaauuccuacag

SEQ ID NO: 3642586 - RNA, 13 nt, Human
uucucauagcauu

SEQ ID NO: 3642587 - RNA, 18 nt, Human
uucucauagcauuaacua

SEQ ID NO: 3642588 - RNA, 21 nt, Human
uucucauagcauuaacuaauc

SEQ ID NO: 3642589 - RNA, 22 nt, Human
uucucauaggaaaaguacauuu

SEQ ID NO: 3642590 - RNA, 16 nt, Human
uucucaucacacacau

SEQ ID NO: 3642591 - RNA, 19 nt, Human
uucugggcaucuguucugg

SEQ ID NO: 3642592 - RNA, 13 nt, Human
uucugggcucuuu

SEQ ID NO: 3642593 - RNA, 20 nt, Human
uucuggggcaggcugggcca

SEQ ID NO: 3642594 - RNA, 15 nt, Human
uucuggggccccacc

SEQ ID NO: 3642595 - RNA, 22 nt, Human
uucuggggccuaauaaaacuga

SEQ ID NO: 3642596 - RNA, 23 nt, Human
uucuggggccuaauaaaacugau

SEQ ID NO: 3642597 - RNA, 20 nt, Human
uucuggggggacccagugca

SEQ ID NO: 3642598 - RNA, 23 nt, Human
uucuggggggacccagugcagaa

SEQ ID NO: 3642599 - RNA, 15 nt, Human
uucugggguccccag

SEQ ID NO: 3642600 - RNA, 16 nt, Human
uucugggucuuuugcu

SEQ ID NO: 3642601 - RNA, 17 nt, Human
uucugggucuuuugcua

SEQ ID NO: 3642602 - RNA, 14 nt, Human
uucuggguggccuc

SEQ ID NO: 3642603 - RNA, 11 nt, Human
uucugguaauc

SEQ ID NO: 3642604 - RNA, 14 nt, Human
uucuggucucucua

SEQ ID NO: 3642605 - RNA, 20 nt, Human
uucuggugugaacuaaacuu

SEQ ID NO: 3642606 - RNA, 14 nt, Human
uucugguucuaaca

SEQ ID NO: 3642607 - RNA, 20 nt, Human
uucuguaaacucaaaacuua

SEQ ID NO: 3642608 - RNA, 14 nt, Human
uucuguaaagcaaa

SEQ ID NO: 3642609 - RNA, 22 nt, Human
uucuguaaauaaugugcacuga

SEQ ID NO: 3642610 - RNA, 23 nt, Human
uucuguaauaacuagaacaaaua

SEQ ID NO: 3642611 - RNA, 23 nt, Human
uucuguaauauuuacaauguauu

SEQ ID NO: 3642612 - RNA, 16 nt, Human
uucuguaauucagguu

SEQ ID NO: 3642613 - RNA, 21 nt, Human
uucuguaauucagguuuuucc

SEQ ID NO: 3642614 - RNA, 22 nt, Human
uucuguaauucagguuuuuccu

SEQ ID NO: 3642615 - RNA, 16 nt, Human
uucuguacauagccua

SEQ ID NO: 3642616 - RNA, 13 nt, Human
uucuguaccaguu

SEQ ID NO: 3642617 - RNA, 18 nt, Human
uucuguacucaaauguag

SEQ ID NO: 3642618 - RNA, 14 nt, Human
uucuguacugauuu

SEQ ID NO: 3642619 - RNA, 21 nt, Human
uucuguacuguuacugggccc

SEQ ID NO: 3642620 - RNA, 13 nt, Human
uucuguacuuccu

SEQ ID NO: 3642621 - RNA, 13 nt, Human
uucuguagaaaug

SEQ ID NO: 3642622 - RNA, 14 nt, Human
uucuguagaaaugg

SEQ ID NO: 3642623 - RNA, 15 nt, Human
uucuguagaaauggu

SEQ ID NO: 3642624 - RNA, 21 nt, Human
uucuguaguacuccuuaagaa

SEQ ID NO: 3642625 - RNA, 15 nt, Human
uucuguagucauuua

SEQ ID NO: 3642626 - RNA, 20 nt, Human
uucuguagucauuuacuaaa

SEQ ID NO: 3642627 - RNA, 22 nt, Human
uucuguagucauuuacuaaaca

SEQ ID NO: 3642628 - RNA, 16 nt, Human
uucuguauauaaaugg

SEQ ID NO: 3642629 - RNA, 18 nt, Human
uucuguauauaaauggga

SEQ ID NO: 3642630 - RNA, 16 nt, Human
uucuguauauacuuuu

SEQ ID NO: 3642631 - RNA, 14 nt, Human
uucuguauuugaaa

SEQ ID NO: 3642632 - RNA, 20 nt, Human
uucuguauuuuuuuuucuaa

SEQ ID NO: 3642633 - RNA, 14 nt, Human
uucugucaagaaga

SEQ ID NO: 3642634 - RNA, 19 nt, Human
uucugucacaguaaaaaua

SEQ ID NO: 3642635 - RNA, 19 nt, Human
uucugucacucaggcugga

SEQ ID NO: 3642636 - RNA, 18 nt, Human
uucugucagaugagaaca

SEQ ID NO: 3642637 - RNA, 19 nt, Human
uucugucagaugagaacaa

SEQ ID NO: 3642638 - RNA, 23 nt, Human
uucugucagaugagaacaaagcu

SEQ ID NO: 3642639 - RNA, 21 nt, Human
uucugucccuagguguuuugu

SEQ ID NO: 3642640 - RNA, 15 nt, Human
uucugucccucacag

SEQ ID NO: 3642641 - RNA, 17 nt, Human
uucugucccuuggagcu

SEQ ID NO: 3642642 - RNA, 17 nt, Human
uucuguccuacucugug

SEQ ID NO: 3642643 - RNA, 22 nt, Human
uucuguccuuuuggcacugaga

SEQ ID NO: 3642644 - RNA, 23 nt, Human
uucuguccuuuuggcacugagau

SEQ ID NO: 3642645 - RNA, 16 nt, Human
uucugucucauaugau

SEQ ID NO: 3642646 - RNA, 11 nt, Human
uucugucucca

SEQ ID NO: 3642647 - RNA, 15 nt, Human
uucugucucucucuu

SEQ ID NO: 3642648 - RNA, 23 nt, Human
uucugugcccagaauacugaugg

SEQ ID NO: 3642649 - RNA, 24 nt, Human
uucugugcccagaauacugaugga

SEQ ID NO: 3642650 - RNA, 15 nt, Human
uucugugccugaaua

SEQ ID NO: 3642651 - RNA, 17 nt, Human
uucugugccugaauauu

SEQ ID NO: 3642652 - RNA, 13 nt, Human
uucuguggaaagu

SEQ ID NO: 3642653 - RNA, 15 nt, Human
uucuguggaaagugu

SEQ ID NO: 3642654 - RNA, 16 nt, Human
uucuguggaaagugua

SEQ ID NO: 3642655 - RNA, 20 nt, Human
uucuguggaaaguguaaagc

SEQ ID NO: 3642656 - RNA, 19 nt, Human
uucuguggggccccucacc

SEQ ID NO: 3642657 - RNA, 16 nt, Human
uucugugguuccucug

SEQ ID NO: 3642658 - RNA, 17 nt, Human
uucugugguuccucugc

SEQ ID NO: 3642659 - RNA, 22 nt, Human
uucugugguuuuccccucccug

SEQ ID NO: 3642660 - RNA, 23 nt, Human
uucugugguuuuccccucccugg

SEQ ID NO: 3642661 - RNA, 12 nt, Human
uucuguguauuu

SEQ ID NO: 3642662 - RNA, 13 nt, Human
uucuguguauuua

SEQ ID NO: 3642663 - RNA, 21 nt, Human
uucuguguauuuaauuguaaa

SEQ ID NO: 3642664 - RNA, 22 nt, Human
uucuguguauuuaauuguaaac

SEQ ID NO: 3642665 - RNA, 12 nt, Human
uucugugucuuu

SEQ ID NO: 3642666 - RNA, 23 nt, Human
uucugugugcaccuuaccaacuu

SEQ ID NO: 3642667 - RNA, 10 nt, Human
uucugugugu

SEQ ID NO: 3642668 - RNA, 15 nt, Human
uucuguguguuccug

SEQ ID NO: 3642669 - RNA, 20 nt, Human
uucuguguguuuucauaaua

SEQ ID NO: 3642670 - RNA, 14 nt, Human
uucuguguuuacag

SEQ ID NO: 3642671 - RNA, 12 nt, Human
uucuguguuuau

SEQ ID NO: 3642672 - RNA, 13 nt, Human
uucuguuaaaauc

SEQ ID NO: 3642673 - RNA, 15 nt, Human
uucuguuaacugaau

SEQ ID NO: 3642674 - RNA, 15 nt, Human
uucuguuacaaaaug

SEQ ID NO: 3642675 - RNA, 19 nt, Human
uucuguuccaaauucaguu

SEQ ID NO: 3642676 - RNA, 21 nt, Human
uucuguucuaguuuuuuacuu

SEQ ID NO: 3642677 - RNA, 16 nt, Human
uucuguucuggaggaa

SEQ ID NO: 3642678 - RNA, 13 nt, Human
uucuguucugugg

SEQ ID NO: 3642679 - RNA, 16 nt, Human
uucuguucuguggaaa

SEQ ID NO: 3642680 - RNA, 21 nt, Human
uucuguucuguggaaagugua

SEQ ID NO: 3642681 - RNA, 15 nt, Human
uucuguugcugccuc

SEQ ID NO: 3642682 - RNA, 16 nt, Human
uucuguugcugccuca

SEQ ID NO: 3642683 - RNA, 12 nt, Human
uucuguuguaac

SEQ ID NO: 3642684 - RNA, 14 nt, Human
uucuguuguaacuu

SEQ ID NO: 3642685 - RNA, 15 nt, Human
uucuguuguaacuua

SEQ ID NO: 3642686 - RNA, 17 nt, Human
uucuguuguaacuuaug

SEQ ID NO: 3642687 - RNA, 13 nt, Human
uucuguuuagaua

SEQ ID NO: 3642688 - RNA, 18 nt, Human
uucuguuuagauaauaca

SEQ ID NO: 3642689 - RNA, 12 nt, Human
uucuguuucaag

SEQ ID NO: 3642690 - RNA, 13 nt, Human
uucuguuuccugu

SEQ ID NO: 3642691 - RNA, 16 nt, Human
uucuguuuggaggagc

SEQ ID NO: 3642692 - RNA, 16 nt, Human
uucuguuuuauaauuu

SEQ ID NO: 3642693 - RNA, 17 nt, Human
uucuguuuuguuucgcu

SEQ ID NO: 3642694 - RNA, 22 nt, Human
uucuguuuuuaaaaauuagccu

SEQ ID NO: 3642695 - RNA, 14 nt, Human
uucuuaaaaaguaa

SEQ ID NO: 3642696 - RNA, 21 nt, Human
uucuuaaaaggcccauagcag

SEQ ID NO: 3642697 - RNA, 16 nt, Human
uucuuaaaaugcaaua

SEQ ID NO: 3642698 - RNA, 22 nt, Human
uucuuaaaaugcaauauuugua

SEQ ID NO: 3642699 - RNA, 15 nt, Human
uucuuaaagugccag

SEQ ID NO: 3642700 - RNA, 11 nt, Human
uucuuaaauaa

SEQ ID NO: 3642701 - RNA, 19 nt, Human
uucuuaaauaauaaagauc

SEQ ID NO: 3642702 - RNA, 12 nt, Human
uucuuaaauauc

SEQ ID NO: 3642703 - RNA, 15 nt, Human
uucuuaaauaucuuu

SEQ ID NO: 3642704 - RNA, 16 nt, Human
uucuuaaauaucuuuu

SEQ ID NO: 3642705 - RNA, 17 nt, Human
uucuuaaauaucuuuua

SEQ ID NO: 3642706 - RNA, 17 nt, Human
uucuuaacuucuugcuu

SEQ ID NO: 3642707 - RNA, 23 nt, Human
uucuuaagacgugauuuugcugu

SEQ ID NO: 3642708 - RNA, 22 nt, Human
uucuuaaguauguuauuuucug

SEQ ID NO: 3642709 - RNA, 18 nt, Human
uucuuaauauauagcauu

SEQ ID NO: 3642710 - RNA, 19 nt, Human
uucuuaaucuuuucacaaa

SEQ ID NO: 3642711 - RNA, 21 nt, Human
uucuuaaucuuuucacaaaua

SEQ ID NO: 3642712 - RNA, 15 nt, Human
uucuuaauguacaua

SEQ ID NO: 3642713 - RNA, 20 nt, Human
uucuuaauuauuauaaaaau

SEQ ID NO: 3642714 - RNA, 14 nt, Human
uucuuaauugcacu

SEQ ID NO: 3642715 - RNA, 20 nt, Human
uucuuaauugcacucuaaaa

SEQ ID NO: 3642716 - RNA, 14 nt, Human
uucuuaauuuggaa

SEQ ID NO: 3642717 - RNA, 13 nt, Human
uucuuacaaacca

SEQ ID NO: 3642718 - RNA, 21 nt, Human
uucuuacacugccuguauacu

SEQ ID NO: 3642719 - RNA, 13 nt, Human
uucuuacauaauu

SEQ ID NO: 3642720 - RNA, 17 nt, Human
uucuuacccaauuuccc

SEQ ID NO: 3642721 - RNA, 22 nt, Human
uucuuacccuguacauauguaa

SEQ ID NO: 3642722 - RNA, 16 nt, Human
uucuuaccgacaagca

SEQ ID NO: 3642723 - RNA, 18 nt, Human
uucuuacuaaacauuuug

SEQ ID NO: 3642724 - RNA, 22 nt, Human
uucuuacuauuaagcaguaaaa

SEQ ID NO: 3642725 - RNA, 16 nt, Human
uucuuacugauaauuu

SEQ ID NO: 3642726 - RNA, 13 nt, Human
uucuuacugcuug

SEQ ID NO: 3642727 - RNA, 13 nt, Human
uucuuagaaauuu

SEQ ID NO: 3642728 - RNA, 15 nt, Human
uucuuagaacagugg

SEQ ID NO: 3642729 - RNA, 16 nt, Human
uucuuagauaucuuuu

SEQ ID NO: 3642730 - RNA, 15 nt, Human
uucuuagcucaauga

SEQ ID NO: 3642731 - RNA, 16 nt, Human
uucuuagcucaaugag

SEQ ID NO: 3642732 - RNA, 23 nt, Human
uucuuagcucuuaauuguucauu

SEQ ID NO: 3642733 - RNA, 15 nt, Human
uucuuagcuuuuuaa

SEQ ID NO: 3642734 - RNA, 22 nt, Human
uucuuaguguugguuuaauauu

SEQ ID NO: 3642735 - RNA, 19 nt, Human
uucuuaguucucacuguuc

SEQ ID NO: 3642736 - RNA, 17 nt, Human
uugaacguuuucuaauu

SEQ ID NO: 3642737 - RNA, 21 nt, Human
uugaacguuuucuaauugcuu

SEQ ID NO: 3642738 - RNA, 14 nt, Human
uugaacuaagaaac

SEQ ID NO: 3642739 - RNA, 16 nt, Human
uugaacuaagaaacuu

SEQ ID NO: 3642740 - RNA, 15 nt, Human
uugaacucagaucug

SEQ ID NO: 3642741 - RNA, 20 nt, Human
uugaacucagaucugucuga

SEQ ID NO: 3642742 - RNA, 16 nt, Human
uugaacuccuggccuc

SEQ ID NO: 3642743 - RNA, 15 nt, Human
uugaacuccugggcu

SEQ ID NO: 3642744 - RNA, 16 nt, Human
uugaacucugggcuca

SEQ ID NO: 3642745 - RNA, 19 nt, Human
uugaacucuucaaucucuu

SEQ ID NO: 3642746 - RNA, 20 nt, Human
uugaacucuucacucuucaa

SEQ ID NO: 3642747 - RNA, 12 nt, Human
uugaacugaagg

SEQ ID NO: 3642748 - RNA, 20 nt, Human
uugaacuggcaauugucuau

SEQ ID NO: 3642749 - RNA, 20 nt, Human
uugaacuguaccaugugcua

SEQ ID NO: 3642750 - RNA, 15 nt, Human
uugaacuguuagaau

SEQ ID NO: 3642751 - RNA, 13 nt, Human
uugaacuuugacc

SEQ ID NO: 3642752 - RNA, 22 nt, Human
uugaacuuuuuuccacugaagu

SEQ ID NO: 3642753 - RNA, 14 nt, Human
uugaagaaacagau

SEQ ID NO: 3642754 - RNA, 19 nt, Human
uugaagaaacagauaccau

SEQ ID NO: 3642755 - RNA, 20 nt, Human
uugaagaaauuauaaagaua

SEQ ID NO: 3642756 - RNA, 20 nt, Human
uugaagaacugcaggcccug

SEQ ID NO: 3642757 - RNA, 18 nt, Human
uugaagaagguggaccuu

SEQ ID NO: 3642758 - RNA, 19 nt, Human
uugaagaagguggaccuuu

SEQ ID NO: 3642759 - RNA, 23 nt, Human
uugaagaauguuaagacuugaca

SEQ ID NO: 3642760 - RNA, 22 nt, Human
uugaagacaaaaauacucuaau

SEQ ID NO: 3642761 - RNA, 13 nt, Human
uugaagacacuga

SEQ ID NO: 3642762 - RNA, 15 nt, Human
uugaagacacugaaa

SEQ ID NO: 3642763 - RNA, 22 nt, Human
uugaagacacugaaauauacac

SEQ ID NO: 3642764 - RNA, 20 nt, Human
uugaagaccuaaccagggcc

SEQ ID NO: 3642765 - RNA, 20 nt, Human
uugaagacuucaaaauauug

SEQ ID NO: 3642766 - RNA, 21 nt, Human
uugaagagagauauaucugaa

SEQ ID NO: 3642767 - RNA, 13 nt, Human
uugaagaggaaaa

SEQ ID NO: 3642768 - RNA, 21 nt, Human
uugaagaggaaaaugaauaau

SEQ ID NO: 3642769 - RNA, 15 nt, Human
uugaagaggugagca

SEQ ID NO: 3642770 - RNA, 16 nt, Human
uugaagagguuuuaaa

SEQ ID NO: 3642771 - RNA, 21 nt, Human
uugaagagguuuuaaagcuuc

SEQ ID NO: 3642772 - RNA, 18 nt, Human
uugaagauaguaacugua

SEQ ID NO: 3642773 - RNA, 18 nt, Human
uugaagaugcugaaacag

SEQ ID NO: 3642774 - RNA, 13 nt, Human
uugaagauucuau

SEQ ID NO: 3642775 - RNA, 14 nt, Human
uugaagcacguaca

SEQ ID NO: 3642776 - RNA, 18 nt, Human
uugaagcacguacauuuu

SEQ ID NO: 3642777 - RNA, 13 nt, Human
uugaagcauuuua

SEQ ID NO: 3642778 - RNA, 22 nt, Human
uugaagcauuuuauaaaucgcu

SEQ ID NO: 3642779 - RNA, 21 nt, Human
uugaagccacugaagcuggga

SEQ ID NO: 3642780 - RNA, 16 nt, Human
uugaagccaucuaaag

SEQ ID NO: 3642781 - RNA, 17 nt, Human
uugaagccaugucuaca

SEQ ID NO: 3642782 - RNA, 15 nt, Human
uugaagcuaauuauu

SEQ ID NO: 3642783 - RNA, 16 nt, Human
uugaagcuaauuauuu

SEQ ID NO: 3642784 - RNA, 16 nt, Human
uugaaggaaaaauuca

SEQ ID NO: 3642785 - RNA, 11 nt, Human
uugaaggaaac

SEQ ID NO: 3642786 - RNA, 19 nt, Human
uugaaggaagccaaauuua

SEQ ID NO: 3642787 - RNA, 23 nt, Human
uugaaggaauacaauauauagcu

SEQ ID NO: 3642788 - RNA, 18 nt, Human
uugaaggaggugagggau

SEQ ID NO: 3642789 - RNA, 21 nt, Human
uugaaggaugcugucuucgua

SEQ ID NO: 3642790 - RNA, 12 nt, Human
uugaaggcaaaa

SEQ ID NO: 3642791 - RNA, 15 nt, Human
uugaaggcaaaauug

SEQ ID NO: 3642792 - RNA, 17 nt, Human
uugaaggcaaaauugca

SEQ ID NO: 3642793 - RNA, 15 nt, Human
uugaaggcagaaagc

SEQ ID NO: 3642794 - RNA, 15 nt, Human
uugaaggcccugcug

SEQ ID NO: 3642795 - RNA, 20 nt, Human
uugaaggcccugcugaguca

SEQ ID NO: 3642796 - RNA, 13 nt, Human
uugaaggccugga

SEQ ID NO: 3642797 - RNA, 15 nt, Human
uugaaggccuggaau

SEQ ID NO: 3642798 - RNA, 11 nt, Human
uugaaggcuua

SEQ ID NO: 3642799 - RNA, 17 nt, Human
uugaagggaaauuucag

SEQ ID NO: 3642800 - RNA, 23 nt, Human
uugaagggaaguugcuggaaaga

SEQ ID NO: 3642801 - RNA, 20 nt, Human
uugaagggaggggcuguguu

SEQ ID NO: 3642802 - RNA, 20 nt, Human
uugaagggccagagccaggg

SEQ ID NO: 3642803 - RNA, 19 nt, Human
uugaagggucuuucucaaa

SEQ ID NO: 3642804 - RNA, 18 nt, Human
uugaaguauuuugcugga

SEQ ID NO: 3642805 - RNA, 15 nt, Human
uugaagucacccggc

SEQ ID NO: 3642806 - RNA, 11 nt, Human
uugaagucuug

SEQ ID NO: 3642807 - RNA, 19 nt, Human
uugaaguguaggcagacac

SEQ ID NO: 3642808 - RNA, 20 nt, Human
uugaaguguaggcagacaca

SEQ ID NO: 3642809 - RNA, 21 nt, Human
uugaaguguauaauauaaaaa

SEQ ID NO: 3642810 - RNA, 19 nt, Human
uugaaguuagcuuuaacuu

SEQ ID NO: 3642811 - RNA, 22 nt, Human
uugaaguuaguggaaaucugaa

SEQ ID NO: 3642812 - RNA, 14 nt, Human
uugaaguuuacauu

SEQ ID NO: 3642813 - RNA, 16 nt, Human
uugaaguuuacauuuu

SEQ ID NO: 3642814 - RNA, 16 nt, Human
uugaauaaaagugcac

SEQ ID NO: 3642815 - RNA, 19 nt, Human
uugaauaaaguugaagcua

SEQ ID NO: 3642816 - RNA, 12 nt, Human
uugaauaaauaa

SEQ ID NO: 3642817 - RNA, 13 nt, Human
uugaauaaauguc

SEQ ID NO: 3642818 - RNA, 14 nt, Human
uugaauaaaugugu

SEQ ID NO: 3642819 - RNA, 12 nt, Human
uugaauaauaag

SEQ ID NO: 3642820 - RNA, 22 nt, Human
uugaauaccauuaaaacugcuu

SEQ ID NO: 3642821 - RNA, 16 nt, Human
uugaauacucugcccu

SEQ ID NO: 3642822 - RNA, 12 nt, Human
uugaauacuuga

SEQ ID NO: 3642823 - RNA, 15 nt, Human
uugaauacuuugaau

SEQ ID NO: 3642824 - RNA, 12 nt, Human
uugaauacuuuu

SEQ ID NO: 3642825 - RNA, 16 nt, Human
uugaauauccccuccc

SEQ ID NO: 3642826 - RNA, 14 nt, Human
uugaauaugauuaa

SEQ ID NO: 3642827 - RNA, 23 nt, Human
uugaauauuauuccucaaaaaau

SEQ ID NO: 3642828 - RNA, 13 nt, Human
uugaaucacagua

SEQ ID NO: 3642829 - RNA, 17 nt, Human
uugaaucaguauaaaca

SEQ ID NO: 3642830 - RNA, 18 nt, Human
uugaaucaguuuccaauu

SEQ ID NO: 3642831 - RNA, 17 nt, Human
uugaauccaugcuuggg

SEQ ID NO: 3642832 - RNA, 17 nt, Human
uugaaucuauuuaagua

SEQ ID NO: 3642833 - RNA, 20 nt, Human
uugaaucuauuuaaguaaaa

SEQ ID NO: 3642834 - RNA, 20 nt, Human
uugaaucuauuuaucuucau

SEQ ID NO: 3642835 - RNA, 23 nt, Human
uugaaucugauuggacauuuucu

SEQ ID NO: 3642836 - RNA, 24 nt, Human
uugaaucugauuggacauuuucuu

SEQ ID NO: 3642837 - RNA, 20 nt, Human
uugaaugaaaaauuuaagca

SEQ ID NO: 3642838 - RNA, 21 nt, Human
uugaaugaaaaauuuaagcau

SEQ ID NO: 3642839 - RNA, 23 nt, Human
uugaaugaaaaauuuaagcauug

SEQ ID NO: 3642840 - RNA, 18 nt, Human
uugaaugacaacagaagc

SEQ ID NO: 3642841 - RNA, 22 nt, Human
uugaaugagaugauucagaagg

SEQ ID NO: 3642842 - RNA, 21 nt, Human
uugaaugauuuuucuuuacaa

SEQ ID NO: 3642843 - RNA, 16 nt, Human
uugaaugcaaaccaua

SEQ ID NO: 3642844 - RNA, 12 nt, Human
uugaaugcauuu

SEQ ID NO: 3642845 - RNA, 13 nt, Human
uugaaugcauuuu

SEQ ID NO: 3642846 - RNA, 20 nt, Human
uugaauggcaauguuuugcu

SEQ ID NO: 3642847 - RNA, 19 nt, Human
uugaauguggcuugagaaa

SEQ ID NO: 3642848 - RNA, 15 nt, Human
uugaauguuaaauaa

SEQ ID NO: 3642849 - RNA, 18 nt, Human
uugaauguuaaauaaauu

SEQ ID NO: 3642850 - RNA, 17 nt, Human
uugaauguuaagcagau

SEQ ID NO: 3642851 - RNA, 12 nt, Human
uugaauuaaaac

SEQ ID NO: 3642852 - RNA, 12 nt, Human
uugaauuaucag

SEQ ID NO: 3642853 - RNA, 20 nt, Human
uugaauuaucagcaaagaaa

SEQ ID NO: 3642854 - RNA, 15 nt, Human
uugaauucauagaaa

SEQ ID NO: 3642855 - RNA, 16 nt, Human
uugaauucauuucacu

SEQ ID NO: 3642856 - RNA, 20 nt, Human
uugaauugaggggauuaaua

SEQ ID NO: 3642857 - RNA, 18 nt, Human
uugaauuguaacuguucu

SEQ ID NO: 3642858 - RNA, 14 nt, Human
uugaauuguaagga

SEQ ID NO: 3642859 - RNA, 13 nt, Human
uugaauuguuaca

SEQ ID NO: 3642860 - RNA, 12 nt, Human
uugaauuuaaca

SEQ ID NO: 3642861 - RNA, 20 nt, Human
uugaauuuaacaaugcgaau

SEQ ID NO: 3642862 - RNA, 22 nt, Human
uugaauuuauuggcuuuucuga

SEQ ID NO: 3642863 - RNA, 24 nt, Human
uugaauuuauuuuuaagaaagaaa

SEQ ID NO: 3642864 - RNA, 12 nt, Human
uugaauuuuaca

SEQ ID NO: 3642865 - RNA, 11 nt, Human
uugaauuuuca

SEQ ID NO: 3642866 - RNA, 16 nt, Human
uugaauuuucaagcau

SEQ ID NO: 3642867 - RNA, 18 nt, Human
uugaauuuucaagcaucu

SEQ ID NO: 3642868 - RNA, 19 nt, Human
uugaauuuucaagcaucuc

SEQ ID NO: 3642869 - RNA, 12 nt, Human
uugaauuuucau

SEQ ID NO: 3642870 - RNA, 14 nt, Human
uugaauuuucauuu

SEQ ID NO: 3642871 - RNA, 15 nt, Human
uugaauuuucauuuu

SEQ ID NO: 3642872 - RNA, 14 nt, Human
uugaauuuucugug

SEQ ID NO: 3642873 - RNA, 22 nt, Human
uugaauuuuguucucugggaga

SEQ ID NO: 3642874 - RNA, 13 nt, Human
uugaauuuuuccu

SEQ ID NO: 3642875 - RNA, 19 nt, Human
uugaauuuuuuuuaacauu

SEQ ID NO: 3642876 - RNA, 14 nt, Human
uugacaaaauguua

SEQ ID NO: 3642877 - RNA, 21 nt, Human
uugacaaaauguuauuucccu

SEQ ID NO: 3642878 - RNA, 20 nt, Human
uugacaaacuucuuucacuc

SEQ ID NO: 3642879 - RNA, 19 nt, Human
uugacaaagucaagccaca

SEQ ID NO: 3642880 - RNA, 23 nt, Human
uugacaaaucuguguauauuauu

SEQ ID NO: 3642881 - RNA, 17 nt, Human
uuguguaauaaaguguu

SEQ ID NO: 3642882 - RNA, 19 nt, Human
uuguguaauaaaguguuuu

SEQ ID NO: 3642883 - RNA, 23 nt, Human
uuguguaaugaaaaugaauaucu

SEQ ID NO: 3642884 - RNA, 24 nt, Human
uuguguaaugaaaaugaauaucua

SEQ ID NO: 3642885 - RNA, 15 nt, Human
uuguguacaguuauu

SEQ ID NO: 3642886 - RNA, 15 nt, Human
uuguguagccuuuuu

SEQ ID NO: 3642887 - RNA, 16 nt, Human
uuguguauauuuguau

SEQ ID NO: 3642888 - RNA, 23 nt, Human
uuguguauccauuaucaugugua

SEQ ID NO: 3642889 - RNA, 21 nt, Human
uuguguaucguaaccagccag

SEQ ID NO: 3642890 - RNA, 19 nt, Human
uuguguauuuacgcuuuga

SEQ ID NO: 3642891 - RNA, 23 nt, Human
uuguguauuuacgcuuugauuca

SEQ ID NO: 3642892 - RNA, 9 nt, Human
uuguguccc

SEQ ID NO: 3642893 - RNA, 14 nt, Human
uugugucuguacac

SEQ ID NO: 3642894 - RNA, 15 nt, Human
uugugucuguacacg

SEQ ID NO: 3642895 - RNA, 15 nt, Human
uugugucuuuugcau

SEQ ID NO: 3642896 - RNA, 16 nt, Human
uugugugaacuuggaa

SEQ ID NO: 3642897 - RNA, 17 nt, Human
uugugugaccaacugug

SEQ ID NO: 3642898 - RNA, 18 nt, Human
uugugugaccaacugugu

SEQ ID NO: 3642899 - RNA, 19 nt, Human
uugugugaccaacuguguu

SEQ ID NO: 3642900 - RNA, 21 nt, Human
uugugugaccaacuguguugu

SEQ ID NO: 3642901 - RNA, 23 nt, Human
uugugugaccaacuguguuguau

SEQ ID NO: 3642902 - RNA, 18 nt, Human
uugugugauauuucagaa

SEQ ID NO: 3642903 - RNA, 20 nt, Human
uugugugauauuucagaaau

SEQ ID NO: 3642904 - RNA, 21 nt, Human
uugugugcuaaacguguaugu

SEQ ID NO: 3642905 - RNA, 15 nt, Human
uugugugcucuccau

SEQ ID NO: 3642906 - RNA, 18 nt, Human
uugugugguuuggcccuu

SEQ ID NO: 3642907 - RNA, 20 nt, Human
uuguguguaugcugcuuuuc

SEQ ID NO: 3642908 - RNA, 16 nt, Human
uuguguguccccuugc

SEQ ID NO: 3642909 - RNA, 13 nt, Human
uugugugucuuaa

SEQ ID NO: 3642910 - RNA, 10 nt, Human
uugugugugg

SEQ ID NO: 3642911 - RNA, 16 nt, Human
uugugugugggagugu

SEQ ID NO: 3642912 - RNA, 10 nt, Human
uugugugugu

SEQ ID NO: 3642913 - RNA, 22 nt, Human
uuguguguucacuaaacucuga

SEQ ID NO: 3642914 - RNA, 17 nt, Human
uuguguguugucucuug

SEQ ID NO: 3642915 - RNA, 13 nt, Human
uuguguuacuaag

SEQ ID NO: 3642916 - RNA, 20 nt, Human
uuguguuacuaaguuuuuau

SEQ ID NO: 3642917 - RNA, 13 nt, Human
uuguguucaccuu

SEQ ID NO: 3642918 - RNA, 15 nt, Human
uuguguucuguuuug

SEQ ID NO: 3642919 - RNA, 13 nt, Human
uuguguugaagag

SEQ ID NO: 3642920 - RNA, 17 nt, Human
uuguguugaaggaacuu

SEQ ID NO: 3642921 - RNA, 14 nt, Human
uuguguuuauucuu

SEQ ID NO: 3642922 - RNA, 19 nt, Human
uuguguuugguuuacauuu

SEQ ID NO: 3642923 - RNA, 20 nt, Human
uuguguuugucauuagccug

SEQ ID NO: 3642924 - RNA, 21 nt, Human
uuguguuuuuaauuuauuuau

SEQ ID NO: 3642925 - RNA, 22 nt, Human
uuguuaaaaaaaaaaagauugu

SEQ ID NO: 3642926 - RNA, 13 nt, Human
uuguuaaaaauaa

SEQ ID NO: 3642927 - RNA, 14 nt, Human
uuguuaaaacuggc

SEQ ID NO: 3642928 - RNA, 14 nt, Human
uuguuaagaaaaau

SEQ ID NO: 3642929 - RNA, 19 nt, Human
uuguuaauaaaaguacaug

SEQ ID NO: 3642930 - RNA, 13 nt, Human
uuguuaauacaag

SEQ ID NO: 3642931 - RNA, 15 nt, Human
uuguuaauacaaggu

SEQ ID NO: 3642932 - RNA, 22 nt, Human
uuguuaauaucacucauuaauu

SEQ ID NO: 3642933 - RNA, 18 nt, Human
uuguuaaugaaaauguca

SEQ ID NO: 3642934 - RNA, 19 nt, Human
uuguuaaugaaaaugucag

SEQ ID NO: 3642935 - RNA, 17 nt, Human
uuguuaauggugcaaau

SEQ ID NO: 3642936 - RNA, 20 nt, Human
uuguuaauuuagaaaacuuu

SEQ ID NO: 3642937 - RNA, 22 nt, Human
uuguuaauuuagaaaacuuuaa

SEQ ID NO: 3642938 - RNA, 22 nt, Human
uuguuaauuuuuccuauauugc

SEQ ID NO: 3642939 - RNA, 22 nt, Human
uuguuacacauuaaguaaucaa

SEQ ID NO: 3642940 - RNA, 21 nt, Human
uuguuacaggcaccgagaaug

SEQ ID NO: 3642941 - RNA, 24 nt, Human
uuguuaccuuaaaacuaggcauuu

SEQ ID NO: 3642942 - RNA, 17 nt, Human
uuguuacuaacuaaacu

SEQ ID NO: 3642943 - RNA, 15 nt, Human
uuguuacucuuacga

SEQ ID NO: 3642944 - RNA, 19 nt, Human
uuguuacucuuacgaauau

SEQ ID NO: 3642945 - RNA, 15 nt, Human
uuguuacucuuggga

SEQ ID NO: 3642946 - RNA, 10 nt, Human
uuguuacugu

SEQ ID NO: 3642947 - RNA, 22 nt, Human
uuguuacuguucuugcugcuag

SEQ ID NO: 3642948 - RNA, 24 nt, Human
uuguuacuguucuugcugcuagaa

SEQ ID NO: 3642949 - RNA, 14 nt, Human
uuguuacuucugag

SEQ ID NO: 3642950 - RNA, 19 nt, Human
uuguuaguaugaggcauuu

SEQ ID NO: 3642951 - RNA, 20 nt, Human
uuguuagugugucuuagugu

SEQ ID NO: 3642952 - RNA, 14 nt, Human
uuguuaucaaaaua

SEQ ID NO: 3642953 - RNA, 13 nt, Human
uuguuaucuggga

SEQ ID NO: 3642954 - RNA, 13 nt, Human
uuguuaugaugug

SEQ ID NO: 3642955 - RNA, 15 nt, Human
uuguuaugaugugcu

SEQ ID NO: 3642956 - RNA, 17 nt, Human
uuguuaugaugugcuua

SEQ ID NO: 3642957 - RNA, 19 nt, Human
uuguuauggcuuaaugaca

SEQ ID NO: 3642958 - RNA, 18 nt, Human
uuguuauguagauaacaa

SEQ ID NO: 3642959 - RNA, 17 nt, Human
uuguuauuauaaaagua

SEQ ID NO: 3642960 - RNA, 23 nt, Human
uuguuauuauauaauuacauauu

SEQ ID NO: 3642961 - RNA, 14 nt, Human
uuguuauuuauaac

SEQ ID NO: 3642962 - RNA, 20 nt, Human
uuguuauuuauugaaaugau

SEQ ID NO: 3642963 - RNA, 15 nt, Human
uuguuauuuguacag

SEQ ID NO: 3642964 - RNA, 13 nt, Human
uuguuauuuucag

SEQ ID NO: 3642965 - RNA, 20 nt, Human
uuguucaaaauauguucuuu

SEQ ID NO: 3642966 - RNA, 16 nt, Human
uuguucaaacaauauc

SEQ ID NO: 3642967 - RNA, 20 nt, Human
uuguucaauaauaaauauuu

SEQ ID NO: 3642968 - RNA, 13 nt, Human
uuguucaauuaga

SEQ ID NO: 3642969 - RNA, 15 nt, Human
uuguucaauuagaau

SEQ ID NO: 3642970 - RNA, 15 nt, Human
uuguucacugaaggu

SEQ ID NO: 3642971 - RNA, 13 nt, Human
uuguucauacaua

SEQ ID NO: 3642972 - RNA, 16 nt, Human
uuguucauacauauuu

SEQ ID NO: 3642973 - RNA, 15 nt, Human
uuguucaucuguaac

SEQ ID NO: 3642974 - RNA, 12 nt, Human
uuguucauguuu

SEQ ID NO: 3642975 - RNA, 13 nt, Human
uuguucauguuug

SEQ ID NO: 3642976 - RNA, 19 nt, Human
uuguucauguuuggugcau

SEQ ID NO: 3642977 - RNA, 21 nt, Human
uuguucauuucauccuuucac

SEQ ID NO: 3642978 - RNA, 13 nt, Human
uuguuccagauuc

SEQ ID NO: 3642979 - RNA, 11 nt, Human
uuguuccaguu

SEQ ID NO: 3642980 - RNA, 17 nt, Human
uuguuccccacuggagc

SEQ ID NO: 3642981 - RNA, 19 nt, Human
uuguuccccuccuccacuc

SEQ ID NO: 3642982 - RNA, 14 nt, Human
uuguucccucuccc

SEQ ID NO: 3642983 - RNA, 16 nt, Human
uuguucgggugugcaa

SEQ ID NO: 3642984 - RNA, 23 nt, Human
uuguucucagaaucccuuaacag

SEQ ID NO: 3642985 - RNA, 13 nt, Human
uuguucucagcuc

SEQ ID NO: 3642986 - RNA, 15 nt, Human
uuguucucugggaga

SEQ ID NO: 3642987 - RNA, 20 nt, Human
uuguucucugggagaaaauc

SEQ ID NO: 3642988 - RNA, 21 nt, Human
uuguucugaaaugucaguucu

SEQ ID NO: 3642989 - RNA, 19 nt, Human
uuguucuggcucuuccagg

SEQ ID NO: 3642990 - RNA, 14 nt, Human
uuguucuguuaacu

SEQ ID NO: 3642991 - RNA, 18 nt, Human
uuguucuuccaaagcaga

SEQ ID NO: 3642992 - RNA, 13 nt, Human
uuguucuugauag

SEQ ID NO: 3642993 - RNA, 21 nt, Human
uuguucuuggcaauaaauuuu

SEQ ID NO: 3642994 - RNA, 14 nt, Human
uuguucuuuaaagu

SEQ ID NO: 3642995 - RNA, 15 nt, Human
uuguucuuucagaaa

SEQ ID NO: 3642996 - RNA, 15 nt, Human
uuguucuuuguucuu

SEQ ID NO: 3642997 - RNA, 12 nt, Human
uuguucuuuucc

SEQ ID NO: 3642998 - RNA, 12 nt, Human
uuguugacauuc

SEQ ID NO: 3642999 - RNA, 16 nt, Human
uuguugacauucugaa

SEQ ID NO: 3643000 - RNA, 14 nt, Human
uuguugaggugguc

SEQ ID NO: 3643001 - RNA, 21 nt, Human
uuguugauaaauuccacugga

SEQ ID NO: 3643002 - RNA, 15 nt, Human
uuguugauucucucc

SEQ ID NO: 3643003 - RNA, 14 nt, Human
uuguugcaaagguc

SEQ ID NO: 3643004 - RNA, 17 nt, Human
uuguugcaagaugugaa

SEQ ID NO: 3643005 - RNA, 20 nt, Human
uuguugcaagaugugaauua

SEQ ID NO: 3643006 - RNA, 14 nt, Human
uuguugcacugaag

SEQ ID NO: 3643007 - RNA, 15 nt, Human
uuguugcacugaagu

SEQ ID NO: 3643008 - RNA, 17 nt, Human
uuguugcauguuugaaa

SEQ ID NO: 3643009 - RNA, 18 nt, Human
uuguugcuucuugugaag

SEQ ID NO: 3643010 - RNA, 23 nt, Human
uuguuggcguaggcuacagagaa

SEQ ID NO: 3643011 - RNA, 15 nt, Human
uuguuguaaaaagaa

SEQ ID NO: 3643012 - RNA, 18 nt, Human
uuguuguaaccugcugug

SEQ ID NO: 3643013 - RNA, 17 nt, Human
uuguuguauaauuucga

SEQ ID NO: 3643014 - RNA, 15 nt, Human
uuguugucugcaacu

SEQ ID NO: 3643015 - RNA, 19 nt, Human
uuguugugacuuugacgcu

SEQ ID NO: 3643016 - RNA, 13 nt, Human
uuguugugcuuuu

SEQ ID NO: 3643017 - RNA, 22 nt, Human
uuguuguggguucuauguuuac

SEQ ID NO: 3643018 - RNA, 21 nt, Human
uuguuguuaaugaaaauguca

SEQ ID NO: 3643019 - RNA, 21 nt, Human
uuguuguuugccauacuuugu

SEQ ID NO: 3643020 - RNA, 23 nt, Human
uuguuguuugccauacuuugucu

SEQ ID NO: 3643021 - RNA, 17 nt, Human
uuguuuaaaaucauuuc

SEQ ID NO: 3643022 - RNA, 21 nt, Human
uuguuuaaaauguaauuuaaa

SEQ ID NO: 3643023 - RNA, 13 nt, Human
uuguuuaaagcaa

SEQ ID NO: 3643024 - RNA, 16 nt, Human
uuguuuaaugugaacu

SEQ ID NO: 3643025 - RNA, 22 nt, Human
uuguuuacagcacuacucugug

SEQ ID NO: 3643026 - RNA, 20 nt, Human
uuuaagcuaggaaaagaaau

SEQ ID NO: 3643027 - RNA, 14 nt, Human
uuuaagcucaaaau

SEQ ID NO: 3643028 - RNA, 17 nt, Human
uuuaagcucugagcugu

SEQ ID NO: 3643029 - RNA, 13 nt, Human
uuuaagcuguaaa

SEQ ID NO: 3643030 - RNA, 21 nt, Human
uuuaagcuguuacugucuuca

SEQ ID NO: 3643031 - RNA, 12 nt, Human
uuuaaggaaaca

SEQ ID NO: 3643032 - RNA, 15 nt, Human
uuuaaggaagaaaaa

SEQ ID NO: 3643033 - RNA, 16 nt, Human
uuuaaggaagaaaaau

SEQ ID NO: 3643034 - RNA, 20 nt, Human
uuuaaggagauguaagagcu

SEQ ID NO: 3643035 - RNA, 21 nt, Human
uuuaaggagauguaagagcuu

SEQ ID NO: 3643036 - RNA, 19 nt, Human
uuuaaggauaaaucauaaa

SEQ ID NO: 3643037 - RNA, 22 nt, Human
uuuaaggcagauuuuacagagc

SEQ ID NO: 3643038 - RNA, 15 nt, Human
uuuaagggaaagaaa

SEQ ID NO: 3643039 - RNA, 22 nt, Human
uuuaagggaguguacucccagg

SEQ ID NO: 3643040 - RNA, 20 nt, Human
uuuaaggguuuguggaaaau

SEQ ID NO: 3643041 - RNA, 19 nt, Human
uuuaagguagcuucagcua

SEQ ID NO: 3643042 - RNA, 15 nt, Human
uuuaaguaacuuuaa

SEQ ID NO: 3643043 - RNA, 22 nt, Human
uuuaaguaauguggaagaaaau

SEQ ID NO: 3643044 - RNA, 20 nt, Human
uuuaaguacuacacauuuuu

SEQ ID NO: 3643045 - RNA, 16 nt, Human
uuuaaguauucaagaa

SEQ ID NO: 3643046 - RNA, 18 nt, Human
uuuaaguauuuagguuuu

SEQ ID NO: 3643047 - RNA, 20 nt, Human
uuuaaguauuuauauauuua

SEQ ID NO: 3643048 - RNA, 15 nt, Human
uuuaagucucucgua

SEQ ID NO: 3643049 - RNA, 13 nt, Human
uuuaagugaaauu

SEQ ID NO: 3643050 - RNA, 14 nt, Human
uuuaagugaaauuu

SEQ ID NO: 3643051 - RNA, 21 nt, Human
uuuaagugcguguguagaguu

SEQ ID NO: 3643052 - RNA, 17 nt, Human
uuuaagugcugcauuua

SEQ ID NO: 3643053 - RNA, 22 nt, Human
uuuaaguguaacuggcaguuuu

SEQ ID NO: 3643054 - RNA, 18 nt, Human
uuuaaguguacuggauuu

SEQ ID NO: 3643055 - RNA, 17 nt, Human
uuuaaguuaauagauuu

SEQ ID NO: 3643056 - RNA, 14 nt, Human
uuuaaguuguuugc

SEQ ID NO: 3643057 - RNA, 14 nt, Human
uuuaaguuugcacu

SEQ ID NO: 3643058 - RNA, 19 nt, Human
uuuaaguuugcacucaaau

SEQ ID NO: 3643059 - RNA, 13 nt, Human
uuuaaguuuugac

SEQ ID NO: 3643060 - RNA, 11 nt, Human
uuuaauaaaag

SEQ ID NO: 3643061 - RNA, 20 nt, Human
uuuaauaaaauaauucuaaa

SEQ ID NO: 3643062 - RNA, 15 nt, Human
uuuaauaaacacucu

SEQ ID NO: 3643063 - RNA, 14 nt, Human
uuuaauaaacuacu

SEQ ID NO: 3643064 - RNA, 19 nt, Human
uuuaauaaacuacucuuug

SEQ ID NO: 3643065 - RNA, 20 nt, Human
uuuaauaaacuacucuuuga

SEQ ID NO: 3643066 - RNA, 22 nt, Human
uuuaauaacauuaccuuacugu

SEQ ID NO: 3643067 - RNA, 15 nt, Human
uuuaauaauaaucua

SEQ ID NO: 3643068 - RNA, 15 nt, Human
uuuaauaauauacuu

SEQ ID NO: 3643069 - RNA, 19 nt, Human
uuuaauaauguuucaaaca

SEQ ID NO: 3643070 - RNA, 15 nt, Human
uuuaauaauuagaaa

SEQ ID NO: 3643071 - RNA, 17 nt, Human
uuuaauacaguuuauuu

SEQ ID NO: 3643072 - RNA, 21 nt, Human
uuuaauagcgucauaacuaga

SEQ ID NO: 3643073 - RNA, 21 nt, Human
uuuaauagguuuggacaaaau

SEQ ID NO: 3643074 - RNA, 20 nt, Human
uuuaauagucauuccaaaua

SEQ ID NO: 3643075 - RNA, 12 nt, Human
uuuaauaguguu

SEQ ID NO: 3643076 - RNA, 22 nt, Human
uuuaauaguguuaaucaauuua

SEQ ID NO: 3643077 - RNA, 15 nt, Human
uuuaauauaaagccu

SEQ ID NO: 3643078 - RNA, 18 nt, Human
uuuaauauaaaguuuuau

SEQ ID NO: 3643079 - RNA, 13 nt, Human
uuuaauauaaaug

SEQ ID NO: 3643080 - RNA, 20 nt, Human
uuuaauauaaaugcaaauaa

SEQ ID NO: 3643081 - RNA, 15 nt, Human
uuuaauaucuucagc

SEQ ID NO: 3643082 - RNA, 12 nt, Human
uuuaauaugcaa

SEQ ID NO: 3643083 - RNA, 14 nt, Human
uuuaauauuaaagc

SEQ ID NO: 3643084 - RNA, 16 nt, Human
uuuaauauuacagaua

SEQ ID NO: 3643085 - RNA, 14 nt, Human
uuuaauauuuugca

SEQ ID NO: 3643086 - RNA, 21 nt, Human
uuuaaucacuuaacauuccua

SEQ ID NO: 3643087 - RNA, 12 nt, Human
uuuaaucagaaa

SEQ ID NO: 3643088 - RNA, 22 nt, Human
uuuaaucauaguuacuguguaa

SEQ ID NO: 3643089 - RNA, 12 nt, Human
uuuaaucaugaa

SEQ ID NO: 3643090 - RNA, 14 nt, Human
uuuaaucauugccu

SEQ ID NO: 3643091 - RNA, 15 nt, Human
uuuaaucauugccug

SEQ ID NO: 3643092 - RNA, 14 nt, Human
uuuaauccagaauu

SEQ ID NO: 3643093 - RNA, 21 nt, Human
uuuaauccagaauugaccuuu

SEQ ID NO: 3643094 - RNA, 16 nt, Human
uuuaauccccaguaaa

SEQ ID NO: 3643095 - RNA, 13 nt, Human
uuuaaucuacugc

SEQ ID NO: 3643096 - RNA, 17 nt, Human
uuuaaucugaaauucua

SEQ ID NO: 3643097 - RNA, 15 nt, Human
uuuaaugaacaaaug

SEQ ID NO: 3643098 - RNA, 16 nt, Human
uuuaaugaaugcuuaa

SEQ ID NO: 3643099 - RNA, 16 nt, Human
uuuaaugauuguuuaa

SEQ ID NO: 3643100 - RNA, 19 nt, Human
uuuaaugcauuaaaccugu

SEQ ID NO: 3643101 - RNA, 23 nt, Human
uuuaaugccgauauacucuagau

SEQ ID NO: 3643102 - RNA, 21 nt, Human
uuuaauggauuguuaauuuca

SEQ ID NO: 3643103 - RNA, 23 nt, Human
uuuaauggauuguuaauuucagu

SEQ ID NO: 3643104 - RNA, 17 nt, Human
uuuaauggcagcagaaa

SEQ ID NO: 3643105 - RNA, 22 nt, Human
uuuaauggccggcuggaaaugc

SEQ ID NO: 3643106 - RNA, 21 nt, Human
uuuaauggggguagcagcugg

SEQ ID NO: 3643107 - RNA, 15 nt, Human
uuuaaugugaacuug

SEQ ID NO: 3643108 - RNA, 20 nt, Human
uuuaaugugaacuuguagcu

SEQ ID NO: 3643109 - RNA, 13 nt, Human
uuuaaugugauga

SEQ ID NO: 3643110 - RNA, 16 nt, Human
uuuaaugugcugugua

SEQ ID NO: 3643111 - RNA, 17 nt, Human
uuuaaugugcuguguaa

SEQ ID NO: 3643112 - RNA, 20 nt, Human
uuuaaugugcuguguaaagu

SEQ ID NO: 3643113 - RNA, 13 nt, Human
uuuaauguugaac

SEQ ID NO: 3643114 - RNA, 17 nt, Human
uuuaauguuuaaaacau

SEQ ID NO: 3643115 - RNA, 15 nt, Human
uuuaauguuuuaaau

SEQ ID NO: 3643116 - RNA, 16 nt, Human
uuuaauuaaaaaauuu

SEQ ID NO: 3643117 - RNA, 20 nt, Human
uuuaauuaauugggccagcu

SEQ ID NO: 3643118 - RNA, 14 nt, Human
uuuaauuagugcua

SEQ ID NO: 3643119 - RNA, 17 nt, Human
uuuaauuagugcuaagu

SEQ ID NO: 3643120 - RNA, 22 nt, Human
uuuaauuagugcuaagugugaa

SEQ ID NO: 3643121 - RNA, 23 nt, Human
uuuaauuauuauucuucauaaca

SEQ ID NO: 3643122 - RNA, 23 nt, Human
uuuaauuauuauuuauauaugua

SEQ ID NO: 3643123 - RNA, 17 nt, Human
uuuaauucaccaaagua

SEQ ID NO: 3643124 - RNA, 16 nt, Human
uuuaauucauguuucu

SEQ ID NO: 3643125 - RNA, 23 nt, Human
uuuaauucauguuucuuaaaugg

SEQ ID NO: 3643126 - RNA, 13 nt, Human
uuuaauuccauga

SEQ ID NO: 3643127 - RNA, 11 nt, Human
uuuaauucucu

SEQ ID NO: 3643128 - RNA, 13 nt, Human
uuuaauucucuug

SEQ ID NO: 3643129 - RNA, 15 nt, Human
uuuaauugaaggaaa

SEQ ID NO: 3643130 - RNA, 19 nt, Human
uuuaauugaaggaaagauu

SEQ ID NO: 3643131 - RNA, 12 nt, Human
uuuaauuguaaa

SEQ ID NO: 3643132 - RNA, 17 nt, Human
uuuaauuguauuuuugu

SEQ ID NO: 3643133 - RNA, 14 nt, Human
uuuaauugucaugg

SEQ ID NO: 3643134 - RNA, 21 nt, Human
uuuaauugucaugguuacaaa

SEQ ID NO: 3643135 - RNA, 18 nt, Human
uuuaauuguuaagauaug

SEQ ID NO: 3643136 - RNA, 21 nt, Human
uuuaauuguuguuucuuucua

SEQ ID NO: 3643137 - RNA, 13 nt, Human
uuuaauuguuuaa

SEQ ID NO: 3643138 - RNA, 16 nt, Human
uuuaauuuaguaaaug

SEQ ID NO: 3643139 - RNA, 19 nt, Human
uuuaauuuaguaaauguua

SEQ ID NO: 3643140 - RNA, 20 nt, Human
uuuaauuuauguaacuugaa

SEQ ID NO: 3643141 - RNA, 23 nt, Human
uuuaauuucaagcuuauuuugga

SEQ ID NO: 3643142 - RNA, 20 nt, Human
uuuaauuucugucagaaugc

SEQ ID NO: 3643143 - RNA, 21 nt, Human
uuuaauuugccaaaauaaugu

SEQ ID NO: 3643144 - RNA, 15 nt, Human
uuuaauuuuggaauu

SEQ ID NO: 3643145 - RNA, 11 nt, Human
uuuaauuuugu

SEQ ID NO: 3643146 - RNA, 14 nt, Human
uuuaauuuuguaaa

SEQ ID NO: 3643147 - RNA, 14 nt, Human
uuuaauuuuuaaau

SEQ ID NO: 3643148 - RNA, 20 nt, Human
uuuacaaaagaggagcacuu

SEQ ID NO: 3643149 - RNA, 16 nt, Human
uuuacaaacugaagag

SEQ ID NO: 3643150 - RNA, 13 nt, Human
uuuacaaaggcug

SEQ ID NO: 3643151 - RNA, 12 nt, Human
uuuacaaauguu

SEQ ID NO: 3643152 - RNA, 19 nt, Human
uuuacaacacuuuaauggg

SEQ ID NO: 3643153 - RNA, 20 nt, Human
uuuacaacauaaucuaguuu

SEQ ID NO: 3643154 - RNA, 12 nt, Human
uuuacaagaaaa

SEQ ID NO: 3643155 - RNA, 19 nt, Human
uuuacaagaaaaaaugaau

SEQ ID NO: 3643156 - RNA, 21 nt, Human
uuuacaagcccccccuuccac

SEQ ID NO: 3643157 - RNA, 21 nt, Human
uuuacaaguguauaucagaaa

SEQ ID NO: 3643158 - RNA, 16 nt, Human
uuuacaauaaauaauc

SEQ ID NO: 3643159 - RNA, 17 nt, Human
uuuacaauaguucugug

SEQ ID NO: 3643160 - RNA, 13 nt, Human
uuuacaauguauu

SEQ ID NO: 3643161 - RNA, 16 nt, Human
uuuacaauugaaauga

SEQ ID NO: 3643162 - RNA, 19 nt, Human
uuuacacaauagaauuaua

SEQ ID NO: 3643163 - RNA, 19 nt, Human
uuuacacacuguacacaua

SEQ ID NO: 3643164 - RNA, 23 nt, Human
uuuacacacuguacacauaagcc

SEQ ID NO: 3643165 - RNA, 21 nt, Human
uuuacacauucggcucccugg

SEQ ID NO: 3643166 - RNA, 20 nt, Human
uuuacaccgacuagccagga

SEQ ID NO: 3643167 - RNA, 22 nt, Human
uuuacacggagcggauugcaaa

SEQ ID NO: 3643168 - RNA, 22 nt, Human
uuuacacucaggcuuucacuau

SEQ ID NO: 3643169 - RNA, 21 nt, Human
uuuacagagaugucucuuaua

SEQ ID NO: 3643170 - RNA, 20 nt, Human
uuuacagaggacaguauuug

SEQ ID NO: 3643171 - RNA, 19 nt, Human
uuuggaaacuaauaaaaua

SEQ ID NO: 3643172 - RNA, 16 nt, Human
uuuggaaaguagaaaa

SEQ ID NO: 3643173 - RNA, 15 nt, Human
uuuggaaaucuuuaa

SEQ ID NO: 3643174 - RNA, 23 nt, Human
uuuggaaauuagguugaaacaua

SEQ ID NO: 3643175 - RNA, 13 nt, Human
uuuggaagcaggg

SEQ ID NO: 3643176 - RNA, 18 nt, Human
uuuggaaguuuguguucu

SEQ ID NO: 3643177 - RNA, 13 nt, Human
uuuggaaucuaga

SEQ ID NO: 3643178 - RNA, 14 nt, Human
uuuggaauuuugug

SEQ ID NO: 3643179 - RNA, 13 nt, Human
uuuggacaguuua

SEQ ID NO: 3643180 - RNA, 16 nt, Human
uuuggacaguuuacca

SEQ ID NO: 3643181 - RNA, 20 nt, Human
uuuggaccaauagcccacag

SEQ ID NO: 3643182 - RNA, 16 nt, Human
uuuggacgcacacagc

SEQ ID NO: 3643183 - RNA, 17 nt, Human
uuuggacgcacacagcu

SEQ ID NO: 3643184 - RNA, 18 nt, Human
uuuggacuccaucucuca

SEQ ID NO: 3643185 - RNA, 22 nt, Human
uuuggagaaauuauuuaauaaa

SEQ ID NO: 3643186 - RNA, 14 nt, Human
uuuggagacuuucu

SEQ ID NO: 3643187 - RNA, 20 nt, Human
uuuggagcacaaaauucaaa

SEQ ID NO: 3643188 - RNA, 14 nt, Human
uuuggaggugcuua

SEQ ID NO: 3643189 - RNA, 20 nt, Human
uuuggagucagacagaugug

SEQ ID NO: 3643190 - RNA, 15 nt, Human
uuuggauagcauguc

SEQ ID NO: 3643191 - RNA, 13 nt, Human
uuuggauguaauu

SEQ ID NO: 3643192 - RNA, 20 nt, Human
uuuggauucuuauguagcag

SEQ ID NO: 3643193 - RNA, 16 nt, Human
uuuggauuggaugaau

SEQ ID NO: 3643194 - RNA, 22 nt, Human
uuuggauuggaugaauuccaaa

SEQ ID NO: 3643195 - RNA, 20 nt, Human
uuuggauuuaaaagccugcu

SEQ ID NO: 3643196 - RNA, 19 nt, Human
uuuggcaaacgcuaaagag

SEQ ID NO: 3643197 - RNA, 23 nt, Human
uuuggcaaacucuccaccacacg

SEQ ID NO: 3643198 - RNA, 14 nt, Human
uuuggcaaggaaag

SEQ ID NO: 3643199 - RNA, 16 nt, Human
uuuggcaauuuugugg

SEQ ID NO: 3643200 - RNA, 11 nt, Human
uuuggcacugg

SEQ ID NO: 3643201 - RNA, 20 nt, Human
uuuggcagagcuucuuccag

SEQ ID NO: 3643202 - RNA, 13 nt, Human
uuuggcagaguuc

SEQ ID NO: 3643203 - RNA, 13 nt, Human
uuuggcaggugca

SEQ ID NO: 3643204 - RNA, 21 nt, Human
uuuggcauaacauaaaucugu

SEQ ID NO: 3643205 - RNA, 23 nt, Human
uuuggcaucccugggccuugggc

SEQ ID NO: 3643206 - RNA, 12 nt, Human
uuuggccagaag

SEQ ID NO: 3643207 - RNA, 13 nt, Human
uuuggccaucucu

SEQ ID NO: 3643208 - RNA, 21 nt, Human
uuuggcccccgagcugggggc

SEQ ID NO: 3643209 - RNA, 22 nt, Human
uuuggccugaugaccaauuuua

SEQ ID NO: 3643210 - RNA, 19 nt, Human
uuuggcgcuauuacaaaua

SEQ ID NO: 3643211 - RNA, 14 nt, Human
uuuggcuccugccc

SEQ ID NO: 3643212 - RNA, 21 nt, Human
uuuggcugaaauucuccugga

SEQ ID NO: 3643213 - RNA, 13 nt, Human
uuuggcugugucu

SEQ ID NO: 3643214 - RNA, 14 nt, Human
uuuggcugugucua

SEQ ID NO: 3643215 - RNA, 14 nt, Human
uuuggcuuccauga

SEQ ID NO: 3643216 - RNA, 13 nt, Human
uuuggcuuucagg

SEQ ID NO: 3643217 - RNA, 20 nt, Human
uuugggaagugaagacugga

SEQ ID NO: 3643218 - RNA, 16 nt, Human
uuugggaauauuugaa

SEQ ID NO: 3643219 - RNA, 15 nt, Human
uuugggacccugcuu

SEQ ID NO: 3643220 - RNA, 20 nt, Human
uuugggacccugcuuuagag

SEQ ID NO: 3643221 - RNA, 22 nt, Human
uuugggauaggaaaaaugagua

SEQ ID NO: 3643222 - RNA, 17 nt, Human
uuugggaucccugucuu

SEQ ID NO: 3643223 - RNA, 17 nt, Human
uuugggaugucuuauuu

SEQ ID NO: 3643224 - RNA, 14 nt, Human
uuugggcccaggga

SEQ ID NO: 3643225 - RNA, 14 nt, Human
uuugggcccugcau

SEQ ID NO: 3643226 - RNA, 19 nt, Human
uuugggcugaauguaugua

SEQ ID NO: 3643227 - RNA, 15 nt, Human
uuugggcuugggccu

SEQ ID NO: 3643228 - RNA, 23 nt, Human
uuuggggaaggguuugaauuguu

SEQ ID NO: 3643229 - RNA, 22 nt, Human
uuuggggacagauucagucuug

SEQ ID NO: 3643230 - RNA, 19 nt, Human
uuuggggagguguucacug

SEQ ID NO: 3643231 - RNA, 16 nt, Human
uuuggggauaugcuua

SEQ ID NO: 3643232 - RNA, 19 nt, Human
uuuggggauucagauuucu

SEQ ID NO: 3643233 - RNA, 20 nt, Human
uuuggggcaggaguagcuga

SEQ ID NO: 3643234 - RNA, 14 nt, Human
uuuggggcgaggca

SEQ ID NO: 3643235 - RNA, 18 nt, Human
uuuggggcgaggcagagg

SEQ ID NO: 3643236 - RNA, 22 nt, Human
uuugggggaaaauuuagaaaua

SEQ ID NO: 3643237 - RNA, 15 nt, Human
uuugggggucaggca

SEQ ID NO: 3643238 - RNA, 20 nt, Human
uuugggguagcuagaggaac

SEQ ID NO: 3643239 - RNA, 13 nt, Human
uuuggguaaauca

SEQ ID NO: 3643240 - RNA, 17 nt, Human
uuuggguaccuauuuuc

SEQ ID NO: 3643241 - RNA, 13 nt, Human
uuuggguccagga

SEQ ID NO: 3643242 - RNA, 16 nt, Human
uuuggguuucugcccu

SEQ ID NO: 3643243 - RNA, 16 nt, Human
uuuggguuuuuuuccu

SEQ ID NO: 3643244 - RNA, 16 nt, Human
uuugguaaauguuucu

SEQ ID NO: 3643245 - RNA, 13 nt, Human
uuugguacaaaaa

SEQ ID NO: 3643246 - RNA, 16 nt, Human
uuugguaccagauaac

SEQ ID NO: 3643247 - RNA, 14 nt, Human
uuugguacuaauaa

SEQ ID NO: 3643248 - RNA, 19 nt, Human
uuugguagcugggaaagca

SEQ ID NO: 3643249 - RNA, 14 nt, Human
uuugguauuguauu

SEQ ID NO: 3643250 - RNA, 13 nt, Human
uuugguauuugaa

SEQ ID NO: 3643251 - RNA, 12 nt, Human
uuugguauuugc

SEQ ID NO: 3643252 - RNA, 20 nt, Human
uuuggucaguuggguuuuua

SEQ ID NO: 3643253 - RNA, 18 nt, Human
uuuggucgaggaguaaca

SEQ ID NO: 3643254 - RNA, 22 nt, Human
uuuggucgaggaguaacaauac

SEQ ID NO: 3643255 - RNA, 15 nt, Human
uuuggucucuugcuu

SEQ ID NO: 3643256 - RNA, 19 nt, Human
uuuggucuggacugacagc

SEQ ID NO: 3643257 - RNA, 22 nt, Human
uuuggucuggacugacagcaug

SEQ ID NO: 3643258 - RNA, 16 nt, Human
uuuggugcauagaacu

SEQ ID NO: 3643259 - RNA, 20 nt, Human
uuuggugcucauuuaaauau

SEQ ID NO: 3643260 - RNA, 19 nt, Human
uuuggugguuucagaaaug

SEQ ID NO: 3643261 - RNA, 20 nt, Human
uuugguuaagucuguuuuau

SEQ ID NO: 3643262 - RNA, 22 nt, Human
uuugguuaagucuguuuuauga

SEQ ID NO: 3643263 - RNA, 18 nt, Human
uuugguuauagugcaaua

SEQ ID NO: 3643264 - RNA, 13 nt, Human
uuugguuauuuua

SEQ ID NO: 3643265 - RNA, 17 nt, Human
uuugguuccucucuggu

SEQ ID NO: 3643266 - RNA, 13 nt, Human
uuugguucugggg

SEQ ID NO: 3643267 - RNA, 14 nt, Human
uuugguugaauaaa

SEQ ID NO: 3643268 - RNA, 17 nt, Human
uuugguugcuuuaauau

SEQ ID NO: 3643269 - RNA, 22 nt, Human
uuugguugguaacucuguaauu

SEQ ID NO: 3643270 - RNA, 12 nt, Human
uuugguuuacau

SEQ ID NO: 3643271 - RNA, 15 nt, Human
uuugguuuacauuua

SEQ ID NO: 3643272 - RNA, 16 nt, Human
uuugguuugguuuuua

SEQ ID NO: 3643273 - RNA, 15 nt, Human
uuugguuuuguuccc

SEQ ID NO: 3643274 - RNA, 16 nt, Human
uuugguuuuguucccc

SEQ ID NO: 3643275 - RNA, 19 nt, Human
uuugguuuuguuccccucc

SEQ ID NO: 3643276 - RNA, 21 nt, Human
uuuguaaaaacagcauugcuu

SEQ ID NO: 3643277 - RNA, 23 nt, Human
uuuguaaaaaucuuuugaagcau

SEQ ID NO: 3643278 - RNA, 17 nt, Human
uuuguaaacucaaaaua

SEQ ID NO: 3643279 - RNA, 16 nt, Human
uuuguaaacuuugaaa

SEQ ID NO: 3643280 - RNA, 19 nt, Human
uuuguaaacuuugaaauau

SEQ ID NO: 3643281 - RNA, 21 nt, Human
uuuguaaacuuugaaauauau

SEQ ID NO: 3643282 - RNA, 16 nt, Human
uuuguaaagaaaaaua

SEQ ID NO: 3643283 - RNA, 18 nt, Human
uuuguaaagaaaaauauu

SEQ ID NO: 3643284 - RNA, 13 nt, Human
uuuguaaagaaau

SEQ ID NO: 3643285 - RNA, 21 nt, Human
uuuguaaagaaauuuacuaua

SEQ ID NO: 3643286 - RNA, 17 nt, Human
uuuguaaaguccccaga

SEQ ID NO: 3643287 - RNA, 16 nt, Human
uuuguaaagugaagaa

SEQ ID NO: 3643288 - RNA, 12 nt, Human
uuuguaaagugu

SEQ ID NO: 3643289 - RNA, 22 nt, Human
uuuguaaaguugguuggauaag

SEQ ID NO: 3643290 - RNA, 22 nt, Human
uuuguaaauaagagauuuggag

SEQ ID NO: 3643291 - RNA, 15 nt, Human
uuuguaaaucugcca

SEQ ID NO: 3643292 - RNA, 17 nt, Human
uuuguaaaucugccaca

SEQ ID NO: 3643293 - RNA, 19 nt, Human
uuuguaaauguuauuucug

SEQ ID NO: 3643294 - RNA, 20 nt, Human
uuuguaaauguuauuucugc

SEQ ID NO: 3643295 - RNA, 22 nt, Human
uuuguaaauuaaacauaaaaca

SEQ ID NO: 3643296 - RNA, 20 nt, Human
uuuguaaccacaacuuucac

SEQ ID NO: 3643297 - RNA, 18 nt, Human
uuuguaaccucagcucug

SEQ ID NO: 3643298 - RNA, 23 nt, Human
uuuguaacuguuuagaugaaugu

SEQ ID NO: 3643299 - RNA, 13 nt, Human
uuuguaagaaacc

SEQ ID NO: 3643300 - RNA, 12 nt, Human
uuuguaagagug

SEQ ID NO: 3643301 - RNA, 17 nt, Human
uuuguaagaguguagaa

SEQ ID NO: 3643302 - RNA, 22 nt, Human
uuuguaagaguguagaagcauu

SEQ ID NO: 3643303 - RNA, 23 nt, Human
uuuguaagaguguagaagcauuc

SEQ ID NO: 3643304 - RNA, 14 nt, Human
uuuguaagaugcug

SEQ ID NO: 3643305 - RNA, 13 nt, Human
uuuguaaguuuau

SEQ ID NO: 3643306 - RNA, 14 nt, Human
uuuguaaguuucag

SEQ ID NO: 3643307 - RNA, 21 nt, Human
uuuguaaguuucaggugacau

SEQ ID NO: 3643308 - RNA, 23 nt, Human
uuuguaauaagcaaucaagguua

SEQ ID NO: 3643309 - RNA, 19 nt, Human
uuuguaauaauaaagaaua

SEQ ID NO: 3643310 - RNA, 15 nt, Human
uuuguaaugugugaa

SEQ ID NO: 3643311 - RNA, 22 nt, Human
uuuguaauuaaaagcaaaucau

SEQ ID NO: 3643312 - RNA, 13 nt, Human
uuuguaauuauga

SEQ ID NO: 3643313 - RNA, 18 nt, Human
uuuguaauugcuuacauu

SEQ ID NO: 3643314 - RNA, 20 nt, Human
uuuguaauugcuuacauuuu

SEQ ID NO: 3643315 - RNA, 16 nt, Human
uuuguaauuuucuuga

SEQ ID NO: 3643316 - RNA, 21 nt, Human
uuuuaagugaaagugaggaaa

SEQ ID NO: 3643317 - RNA, 14 nt, Human
uuuuaagugaaauu

SEQ ID NO: 3643318 - RNA, 16 nt, Human
uuuuaagugaaauuua

SEQ ID NO: 3643319 - RNA, 15 nt, Human
uuuuaaguuaauaga

SEQ ID NO: 3643320 - RNA, 18 nt, Human
uuuuaaguuaauagauuu

SEQ ID NO: 3643321 - RNA, 21 nt, Human
uuuuaaguuacacauuuuuca

SEQ ID NO: 3643322 - RNA, 14 nt, Human
uuuuaaguugcuga

SEQ ID NO: 3643323 - RNA, 19 nt, Human
uuuuaaguuucucugcaga

SEQ ID NO: 3643324 - RNA, 16 nt, Human
uuuuaaguuugcacuc

SEQ ID NO: 3643325 - RNA, 15 nt, Human
uuuuaauaaaagaaa

SEQ ID NO: 3643326 - RNA, 12 nt, Human
uuuuaauaaacu

SEQ ID NO: 3643327 - RNA, 20 nt, Human
uuuuaauaauguuucaaaca

SEQ ID NO: 3643328 - RNA, 21 nt, Human
uuuuaauagaauauaauuauc

SEQ ID NO: 3643329 - RNA, 18 nt, Human
uuuuaauccgccaauauu

SEQ ID NO: 3643330 - RNA, 19 nt, Human
uuuuaauccgccaauauua

SEQ ID NO: 3643331 - RNA, 16 nt, Human
uuuuaaugaacaaaug

SEQ ID NO: 3643332 - RNA, 16 nt, Human
uuuuaaugauuguuua

SEQ ID NO: 3643333 - RNA, 16 nt, Human
uuuuaaugcaguugcu

SEQ ID NO: 3643334 - RNA, 21 nt, Human
uuuuaaugcuaaucuugugaa

SEQ ID NO: 3643335 - RNA, 17 nt, Human
uuuuaaugcuccaaaug

SEQ ID NO: 3643336 - RNA, 23 nt, Human
uuuuaauggggguagcagcugga

SEQ ID NO: 3643337 - RNA, 19 nt, Human
uuuuaauguaauugauugu

SEQ ID NO: 3643338 - RNA, 20 nt, Human
uuuuaaugucauuuguuaaa

SEQ ID NO: 3643339 - RNA, 18 nt, Human
uuuuaaugugaugaugua

SEQ ID NO: 3643340 - RNA, 12 nt, Human
uuuuaaugugcu

SEQ ID NO: 3643341 - RNA, 17 nt, Human
uuuuaaugugcugugua

SEQ ID NO: 3643342 - RNA, 16 nt, Human
uuuuaauuaaaaacua

SEQ ID NO: 3643343 - RNA, 13 nt, Human
uuuuaauuaaaua

SEQ ID NO: 3643344 - RNA, 19 nt, Human
uuuuaauuaacuuuggauu

SEQ ID NO: 3643345 - RNA, 17 nt, Human
uuuuaauuauuauucuu

SEQ ID NO: 3643346 - RNA, 20 nt, Human
uuuuaauuauuauuuauaua

SEQ ID NO: 3643347 - RNA, 15 nt, Human
uuuuaauuccaugaa

SEQ ID NO: 3643348 - RNA, 14 nt, Human
uuuuaauugaaaag

SEQ ID NO: 3643349 - RNA, 24 nt, Human
uuuuaauugaucaguuuucaugug

SEQ ID NO: 3643350 - RNA, 14 nt, Human
uuuuaauuguuuaa

SEQ ID NO: 3643351 - RNA, 18 nt, Human
uuuuaauuuacuuguuuu

SEQ ID NO: 3643352 - RNA, 21 nt, Human
uuuuaauuuauuuauacuauu

SEQ ID NO: 3643353 - RNA, 15 nt, Human
uuuuaauuugaugaa

SEQ ID NO: 3643354 - RNA, 20 nt, Human
uuuuaauuugaugaaagcug

SEQ ID NO: 3643355 - RNA, 14 nt, Human
uuuuaauuuuaacc

SEQ ID NO: 3643356 - RNA, 12 nt, Human
uuuuaauuuugu

SEQ ID NO: 3643357 - RNA, 13 nt, Human
uuuuaauuuugua

SEQ ID NO: 3643358 - RNA, 21 nt, Human
uuuuaauuuuguaaaggugaa

SEQ ID NO: 3643359 - RNA, 16 nt, Human
uuuuaauuuugucugc

SEQ ID NO: 3643360 - RNA, 12 nt, Human
uuuuaauuuuua

SEQ ID NO: 3643361 - RNA, 12 nt, Human
uuuuacaaaugu

SEQ ID NO: 3643362 - RNA, 17 nt, Human
uuuuacaagaaguuuau

SEQ ID NO: 3643363 - RNA, 17 nt, Human
uuuuacaauaaaaucuu

SEQ ID NO: 3643364 - RNA, 19 nt, Human
uuuuacacauuagauuuua

SEQ ID NO: 3643365 - RNA, 13 nt, Human
uuuuacauaacug

SEQ ID NO: 3643366 - RNA, 15 nt, Human
uuuuacauacugcug

SEQ ID NO: 3643367 - RNA, 12 nt, Human
uuuuacaugaag

SEQ ID NO: 3643368 - RNA, 14 nt, Human
uuuuacaugaagua

SEQ ID NO: 3643369 - RNA, 15 nt, Human
uuuuacaugaaguau

SEQ ID NO: 3643370 - RNA, 16 nt, Human
uuuuaccagcuuuuaa

SEQ ID NO: 3643371 - RNA, 14 nt, Human
uuuuacccauaucc

SEQ ID NO: 3643372 - RNA, 19 nt, Human
uuuuacccuauaucuauaa

SEQ ID NO: 3643373 - RNA, 17 nt, Human
uuuuaccguuucuuccc

SEQ ID NO: 3643374 - RNA, 20 nt, Human
uuuuaccuaccacagugucu

SEQ ID NO: 3643375 - RNA, 19 nt, Human
uuuuaccugucacauugca

SEQ ID NO: 3643376 - RNA, 23 nt, Human
uuuuaccugucacauugcauucu

SEQ ID NO: 3643377 - RNA, 16 nt, Human
uuuuacucauugaaau

SEQ ID NO: 3643378 - RNA, 17 nt, Human
uuuuacucauugaaaug

SEQ ID NO: 3643379 - RNA, 20 nt, Human
uuuuacucauugaaauguca

SEQ ID NO: 3643380 - RNA, 23 nt, Human
uuuuacuccagguuauugcaaua

SEQ ID NO: 3643381 - RNA, 13 nt, Human
uuuuacuccccuu

SEQ ID NO: 3643382 - RNA, 22 nt, Human
uuuuacucuaugccccaaauau

SEQ ID NO: 3643383 - RNA, 13 nt, Human
uuuuacucugccu

SEQ ID NO: 3643384 - RNA, 14 nt, Human
uuuuacugaacaau

SEQ ID NO: 3643385 - RNA, 17 nt, Human
uuuuacugccacucuuu

SEQ ID NO: 3643386 - RNA, 23 nt, Human
uuuuacugcuuuuaacuucugau

SEQ ID NO: 3643387 - RNA, 18 nt, Human
uuuuacugguugcaugga

SEQ ID NO: 3643388 - RNA, 21 nt, Human
uuuuacugguugcauggaaau

SEQ ID NO: 3643389 - RNA, 14 nt, Human
uuuuacuguacaga

SEQ ID NO: 3643390 - RNA, 13 nt, Human
uuuuacugucuau

SEQ ID NO: 3643391 - RNA, 22 nt, Human
uuuuacugucuuaauuaaguaa

SEQ ID NO: 3643392 - RNA, 17 nt, Human
uuuuacuuuuaaacugu

SEQ ID NO: 3643393 - RNA, 20 nt, Human
uuuuacuuuuaaacugugua

SEQ ID NO: 3643394 - RNA, 12 nt, Human
uuuuacuuuuau

SEQ ID NO: 3643395 - RNA, 16 nt, Human
uuuuacuuuuuuuagu

SEQ ID NO: 3643396 - RNA, 19 nt, Human
uuuuagaaagcauuugaau

SEQ ID NO: 3643397 - RNA, 21 nt, Human
uuuuagaauaagaauuugcau

SEQ ID NO: 3643398 - RNA, 18 nt, Human
uuuuagaauuuugugaaa

SEQ ID NO: 3643399 - RNA, 17 nt, Human
uuuuagaguaagaaauu

SEQ ID NO: 3643400 - RNA, 17 nt, Human
uuuuagaguugauacua

SEQ ID NO: 3643401 - RNA, 19 nt, Human
uuuuagaugagauuguuuu

SEQ ID NO: 3643402 - RNA, 19 nt, Human
uuuuagaugguuacacugu

SEQ ID NO: 3643403 - RNA, 21 nt, Human
uuuuagcaauuuauacaauau

SEQ ID NO: 3643404 - RNA, 23 nt, Human
uuuuagcacagcguuaugugucu

SEQ ID NO: 3643405 - RNA, 22 nt, Human
uuuuagcauguguuugguucug

SEQ ID NO: 3643406 - RNA, 19 nt, Human
uuuuagccuaguucaucca

SEQ ID NO: 3643407 - RNA, 21 nt, Human
uuuuagcugaugaacuuauuc

SEQ ID NO: 3643408 - RNA, 22 nt, Human
uuuuagcugguggcaauaaaua

SEQ ID NO: 3643409 - RNA, 12 nt, Human
uuuuaggaaagg

SEQ ID NO: 3643410 - RNA, 11 nt, Human
uuuuaggaaau

SEQ ID NO: 3643411 - RNA, 20 nt, Human
uuuuaggagcuaaggcucua

SEQ ID NO: 3643412 - RNA, 23 nt, Human
uuuuaggagcuaaggcucuauga

SEQ ID NO: 3643413 - RNA, 15 nt, Human
uuuuagguagaaaaa

SEQ ID NO: 3643414 - RNA, 23 nt, Human
uuuuaggucaagggcuuacuauu

SEQ ID NO: 3643415 - RNA, 16 nt, Human
uuuuagguguugauuu

SEQ ID NO: 3643416 - RNA, 16 nt, Human
uuuuagguucuaaagu

SEQ ID NO: 3643417 - RNA, 18 nt, Human
uuuuagguucuaaaguuc

SEQ ID NO: 3643418 - RNA, 14 nt, Human
uuuuaguaaucugu

SEQ ID NO: 3643419 - RNA, 16 nt, Human
uuuuaguaaucuguac

SEQ ID NO: 3643420 - RNA, 19 nt, Human
uuuuaguaaucuguacauu

SEQ ID NO: 3643421 - RNA, 15 nt, Human
uuuuaguagagacag

SEQ ID NO: 3643422 - RNA, 13 nt, Human
uuuuaguccaaau

SEQ ID NO: 3643423 - RNA, 19 nt, Human
uuuuagugaacuugaaaua

SEQ ID NO: 3643424 - RNA, 14 nt, Human
uuuuagugcuuuug

SEQ ID NO: 3643425 - RNA, 18 nt, Human
uuuuagugugugcauaau

SEQ ID NO: 3643426 - RNA, 19 nt, Human
uuuuagugugugcauaaua

SEQ ID NO: 3643427 - RNA, 18 nt, Human
uuuuaguuccugugcaca

SEQ ID NO: 3643428 - RNA, 19 nt, Human
uuuuaguugcaacuuugua

SEQ ID NO: 3643429 - RNA, 20 nt, Human
uuuuaguuuaaaaaccuugu

SEQ ID NO: 3643430 - RNA, 22 nt, Human
uuuuaguuuuucauuaaauaaa

SEQ ID NO: 3643431 - RNA, 22 nt, Human
uuuuauaaaauggcuguaauca

SEQ ID NO: 3643432 - RNA, 22 nt, Human
uuuuauaaaauuaaagaaaaua

SEQ ID NO: 3643433 - RNA, 14 nt, Human
uuuuauaaacuuua

SEQ ID NO: 3643434 - RNA, 12 nt, Human
uuuuauaaagca

SEQ ID NO: 3643435 - RNA, 15 nt, Human
uuuuauaaagcaugu

SEQ ID NO: 3643436 - RNA, 13 nt, Human
uuuuauaaagugc

SEQ ID NO: 3643437 - RNA, 19 nt, Human
uuuuauaaagugcuugugu

SEQ ID NO: 3643438 - RNA, 18 nt, Human
uuuuauaaauaaacuguu

SEQ ID NO: 3643439 - RNA, 13 nt, Human
uuuuauaaauacu

SEQ ID NO: 3643440 - RNA, 12 nt, Human
uuuuauaaauua

SEQ ID NO: 3643441 - RNA, 14 nt, Human
uuuuauaagaaaaa

SEQ ID NO: 3643442 - RNA, 23 nt, Human
uuuuauaauaaaaggaaaagcaa

SEQ ID NO: 3643443 - RNA, 23 nt, Human
uuuuauaauuuugugaagcaaaa

SEQ ID NO: 3643444 - RNA, 13 nt, Human
uuuuauacauaaa

SEQ ID NO: 3643445 - RNA, 15 nt, Human
uuuuauaccuguuua

SEQ ID NO: 3643446 - RNA, 17 nt, Human
uuuuauaccuguuuaaa

SEQ ID NO: 3643447 - RNA, 16 nt, Human
uuuuauagauuugacc

SEQ ID NO: 3643448 - RNA, 13 nt, Human
uuuuauaguggaa

SEQ ID NO: 3643449 - RNA, 13 nt, Human
uuuuauauagcaa

SEQ ID NO: 3643450 - RNA, 15 nt, Human
uuuuauauauacagu

SEQ ID NO: 3643451 - RNA, 16 nt, Human
uuuuauauauaugcau

SEQ ID NO: 3643452 - RNA, 15 nt, Human
uuuuauaucuguaug

SEQ ID NO: 3643453 - RNA, 18 nt, Human
uuuuauaucuguauguau

SEQ ID NO: 3643454 - RNA, 22 nt, Human
uuuuauaugaagauaaguguau

SEQ ID NO: 3643455 - RNA, 13 nt, Human
uuuuauaugcuuu

SEQ ID NO: 3643456 - RNA, 11 nt, Human
uuuuauauuua

SEQ ID NO: 3643457 - RNA, 23 nt, Human
uuuuauauuuaguuauaguuuca

SEQ ID NO: 3643458 - RNA, 23 nt, Human
uuuuauauuuccuuuaugugaau

SEQ ID NO: 3643459 - RNA, 18 nt, Human
uuuuauauuugaaauauu

SEQ ID NO: 3643460 - RNA, 16 nt, Human
uuuuauauuuguaucg

SEQ ID NO: 3643461 - RNA, 13 nt, Human
uuuuguguacagu

SEQ ID NO: 3643462 - RNA, 12 nt, Human
uuuuguguacuu

SEQ ID NO: 3643463 - RNA, 14 nt, Human
uuuugugugaaauu

SEQ ID NO: 3643464 - RNA, 12 nt, Human
uuuuguguuuau

SEQ ID NO: 3643465 - RNA, 23 nt, Human
uuuuguuacuguucuugcugcua

SEQ ID NO: 3643466 - RNA, 20 nt, Human
uuuuguuccaaugucaaugu

SEQ ID NO: 3643467 - RNA, 15 nt, Human
uuuuguuccacaagu

SEQ ID NO: 3643468 - RNA, 21 nt, Human
uuuuguuccacaaguuaaaua

SEQ ID NO: 3643469 - RNA, 13 nt, Human
uuuuguucucugg

SEQ ID NO: 3643470 - RNA, 12 nt, Human
uuuuguucuuca

SEQ ID NO: 3643471 - RNA, 14 nt, Human
uuuuguucuucaga

SEQ ID NO: 3643472 - RNA, 18 nt, Human
uuuuguugacauucugaa

SEQ ID NO: 3643473 - RNA, 19 nt, Human
uuuuguugacauucugaau

SEQ ID NO: 3643474 - RNA, 20 nt, Human
uuuuguugacauucugaaug

SEQ ID NO: 3643475 - RNA, 14 nt, Human
uuuuguugauuaaa

SEQ ID NO: 3643476 - RNA, 12 nt, Human
uuuuguugcacu

SEQ ID NO: 3643477 - RNA, 13 nt, Human
uuuuguugcacug

SEQ ID NO: 3643478 - RNA, 18 nt, Human
uuuuguugcacugaaguu

SEQ ID NO: 3643479 - RNA, 21 nt, Human
uuuuguugcacugaaguuuga

SEQ ID NO: 3643480 - RNA, 16 nt, Human
uuuuguuguaaaaaga

SEQ ID NO: 3643481 - RNA, 19 nt, Human
uuuuguuguacuuaaaugg

SEQ ID NO: 3643482 - RNA, 19 nt, Human
uuuuguuguuucuuaaaua

SEQ ID NO: 3643483 - RNA, 21 nt, Human
uuuuguuguuucuuaaauaag

SEQ ID NO: 3643484 - RNA, 12 nt, Human
uuuuguuucaua

SEQ ID NO: 3643485 - RNA, 16 nt, Human
uuuuguuucauccugu

SEQ ID NO: 3643486 - RNA, 13 nt, Human
uuuuguuugcuau

SEQ ID NO: 3643487 - RNA, 22 nt, Human
uuuuguuugcuucauguguccc

SEQ ID NO: 3643488 - RNA, 12 nt, Human
uuuuguuuggac

SEQ ID NO: 3643489 - RNA, 16 nt, Human
uuuuguuugguaaaug

SEQ ID NO: 3643490 - RNA, 14 nt, Human
uuuuguuugucucu

SEQ ID NO: 3643491 - RNA, 17 nt, Human
uuuuguuugucucuccu

SEQ ID NO: 3643492 - RNA, 22 nt, Human
uuuuguuuuaaaacuggaccug

SEQ ID NO: 3643493 - RNA, 15 nt, Human
uuuuguuuucauuau

SEQ ID NO: 3643494 - RNA, 22 nt, Human
uuuuuaaaaaagcuuaaaacuu

SEQ ID NO: 3643495 - RNA, 23 nt, Human
uuuuuaaaaaagcuuaaaacuuu

SEQ ID NO: 3643496 - RNA, 15 nt, Human
uuuuuaaaaauaaag

SEQ ID NO: 3643497 - RNA, 20 nt, Human
uuuuuaaaagagacaaacug

SEQ ID NO: 3643498 - RNA, 12 nt, Human
uuuuuaaaagau

SEQ ID NO: 3643499 - RNA, 23 nt, Human
uuuuuaaaagaucuucaaaagua

SEQ ID NO: 3643500 - RNA, 11 nt, Human
uuuuuaaaagu

SEQ ID NO: 3643501 - RNA, 22 nt, Human
uuuuuaaaaguuucaaugugau

SEQ ID NO: 3643502 - RNA, 17 nt, Human
uuuuuaaaauauuuauu

SEQ ID NO: 3643503 - RNA, 14 nt, Human
uuuuuaaaaucuua

SEQ ID NO: 3643504 - RNA, 17 nt, Human
uuuuuaaaauggugcuu

SEQ ID NO: 3643505 - RNA, 19 nt, Human
uuuuuaaaauggugcuuaa

SEQ ID NO: 3643506 - RNA, 12 nt, Human
uuuuuaaaauuu

SEQ ID NO: 3643507 - RNA, 16 nt, Human
uuuuuaaaauuuuaau

SEQ ID NO: 3643508 - RNA, 16 nt, Human
uuuuuaaacuguacag

SEQ ID NO: 3643509 - RNA, 17 nt, Human
uuuuuaaagacagaguc

SEQ ID NO: 3643510 - RNA, 12 nt, Human
uuuuuaaagacu

SEQ ID NO: 3643511 - RNA, 13 nt, Human
uuuuuaaagcuua

SEQ ID NO: 3643512 - RNA, 16 nt, Human
uuuuuaaagcuuuuga

SEQ ID NO: 3643513 - RNA, 23 nt, Human
uuuuuaaauaaaaauuacugugu

SEQ ID NO: 3643514 - RNA, 13 nt, Human
uuuuuaaauaaac

SEQ ID NO: 3643515 - RNA, 16 nt, Human
uuuuuaaauauuuucu

SEQ ID NO: 3643516 - RNA, 13 nt, Human
uuuuuaaauuguu

SEQ ID NO: 3643517 - RNA, 20 nt, Human
uuuuuaaauuuuauuuccug

SEQ ID NO: 3643518 - RNA, 19 nt, Human
uuuuuaaauuuuguaauga

SEQ ID NO: 3643519 - RNA, 17 nt, Human
uuuuuaaccucuguuca

SEQ ID NO: 3643520 - RNA, 17 nt, Human
uuuuuaacuuuaccaug

SEQ ID NO: 3643521 - RNA, 11 nt, Human
uuuuuaagaua

SEQ ID NO: 3643522 - RNA, 20 nt, Human
uuuuuaagauaauaauauau

SEQ ID NO: 3643523 - RNA, 18 nt, Human
uuuuuaagccuuaaagga

SEQ ID NO: 3643524 - RNA, 14 nt, Human
uuuuuaagucuuuu

SEQ ID NO: 3643525 - RNA, 16 nt, Human
uuuuuaagugcugcau

SEQ ID NO: 3643526 - RNA, 19 nt, Human
uuuuuaagugcugcauuua

SEQ ID NO: 3643527 - RNA, 23 nt, Human
uuuuuaagugcugcauuuaaaag

SEQ ID NO: 3643528 - RNA, 18 nt, Human
uuuuuaaguuacacauuu

SEQ ID NO: 3643529 - RNA, 18 nt, Human
uuuuuaauaaaaaggcac

SEQ ID NO: 3643530 - RNA, 15 nt, Human
uuuuuaauaaacuac

SEQ ID NO: 3643531 - RNA, 20 nt, Human
uuuuuaauaaagacaggguu

SEQ ID NO: 3643532 - RNA, 14 nt, Human
uuuuuaauaauuua

SEQ ID NO: 3643533 - RNA, 13 nt, Human
uuuuuaaucauga

SEQ ID NO: 3643534 - RNA, 19 nt, Human
uuuuuaauggcagcagaaa

SEQ ID NO: 3643535 - RNA, 22 nt, Human
uuuuuaauggcagcagaaaacu

SEQ ID NO: 3643536 - RNA, 13 nt, Human
uuuuuaauuaaaa

SEQ ID NO: 3643537 - RNA, 14 nt, Human
uuuuuaauuaauug

SEQ ID NO: 3643538 - RNA, 19 nt, Human
uuuuuaauucaccaaagua

SEQ ID NO: 3643539 - RNA, 16 nt, Human
uuuuuaauuguuuaaa

SEQ ID NO: 3643540 - RNA, 21 nt, Human
uuuuuaauuuauuauugaaau

SEQ ID NO: 3643541 - RNA, 17 nt, Human
uuuuuaauuugaugaaa

SEQ ID NO: 3643542 - RNA, 20 nt, Human
uuuuuaauuugaugaaagcu

SEQ ID NO: 3643543 - RNA, 15 nt, Human
uuuuuacaaagcccu

SEQ ID NO: 3643544 - RNA, 23 nt, Human
uuuuuacaaauguuaaaaugugu

SEQ ID NO: 3643545 - RNA, 13 nt, Human
uuuuuacaagaag

SEQ ID NO: 3643546 - RNA, 14 nt, Human
uuuuuacaagaugu

SEQ ID NO: 3643547 - RNA, 20 nt, Human
uuuuuacaaguuauaguacu

SEQ ID NO: 3643548 - RNA, 18 nt, Human
uuuuuacaaguuuuaaau

SEQ ID NO: 3643549 - RNA, 19 nt, Human
uuuuuacaaguuuuaaaua

SEQ ID NO: 3643550 - RNA, 13 nt, Human
uuuuuacaauaaa

SEQ ID NO: 3643551 - RNA, 19 nt, Human
uuuuuacagcuguguuauu

SEQ ID NO: 3643552 - RNA, 12 nt, Human
uuuuuacauuuu

SEQ ID NO: 3643553 - RNA, 20 nt, Human
uuuuuacccauuuguucaua

SEQ ID NO: 3643554 - RNA, 22 nt, Human
uuuuuacguuugaagacauugc

SEQ ID NO: 3643555 - RNA, 17 nt, Human
uuuuuacucauugaaau

SEQ ID NO: 3643556 - RNA, 21 nt, Human
uuuuuacucauugaaauguca

SEQ ID NO: 3643557 - RNA, 18 nt, Human
uuuuuacuguguuuuaua

SEQ ID NO: 3643558 - RNA, 22 nt, Human
uuuuuagacagagucucacugu

SEQ ID NO: 3643559 - RNA, 23 nt, Human
uuuuuaguauuuauuuauguacu

SEQ ID NO: 3643560 - RNA, 15 nt, Human
uuuuuaguugaauuu

SEQ ID NO: 3643561 - RNA, 13 nt, Human
uuuuuauacaaaa

SEQ ID NO: 3643562 - RNA, 17 nt, Human
uuuuuauacaggggaau

SEQ ID NO: 3643563 - RNA, 23 nt, Human
uuuuuauacauaaacaagaccac

SEQ ID NO: 3643564 - RNA, 15 nt, Human
uuuuuauaccauuca

SEQ ID NO: 3643565 - RNA, 17 nt, Human
uuuuuauaccauucaga

SEQ ID NO: 3643566 - RNA, 21 nt, Human
uuuuuauaccuguuuaaauug

SEQ ID NO: 3643567 - RNA, 12 nt, Human
uuuuuauauaca

SEQ ID NO: 3643568 - RNA, 15 nt, Human
uuuuuauauaugugu

SEQ ID NO: 3643569 - RNA, 14 nt, Human
uuuuuauauuucaa

SEQ ID NO: 3643570 - RNA, 22 nt, Human
uuuuuauauuuccuuuauguga

SEQ ID NO: 3643571 - RNA, 12 nt, Human
uuuuuaucaugu

SEQ ID NO: 3643572 - RNA, 17 nt, Human
uuuuuaucuugggacug

SEQ ID NO: 3643573 - RNA, 14 nt, Human
uuuuuaucuuuaua

SEQ ID NO: 3643574 - RNA, 22 nt, Human
uuuuuauggcuuuugugcauua

SEQ ID NO: 3643575 - RNA, 12 nt, Human
uuuuuaugugug

SEQ ID NO: 3643576 - RNA, 13 nt, Human
uuuuuauguuaua

SEQ ID NO: 3643577 - RNA, 19 nt, Human
uuuuuauuaaucacugugu

SEQ ID NO: 3643578 - RNA, 18 nt, Human
uuuuuauuaguauuguug

SEQ ID NO: 3643579 - RNA, 15 nt, Human
uuuuuauuaugcaua

SEQ ID NO: 3643580 - RNA, 13 nt, Human
uuuuuauuauuug

SEQ ID NO: 3643581 - RNA, 15 nt, Human
uuuuuauugaugugc

SEQ ID NO: 3643582 - RNA, 13 nt, Human
uuuuuauugccuu

SEQ ID NO: 3643583 - RNA, 18 nt, Human
uuuuuauugcuaguauuu

SEQ ID NO: 3643584 - RNA, 12 nt, Human
uuuuuauuguug

SEQ ID NO: 3643585 - RNA, 21 nt, Human
uuuuuauuuauauguaugugu

SEQ ID NO: 3643586 - RNA, 15 nt, Human
uuuuuauuucuacug

SEQ ID NO: 3643587 - RNA, 16 nt, Human
uuuuuauuucuacugu

SEQ ID NO: 3643588 - RNA, 12 nt, Human
uuuuuauuucug

SEQ ID NO: 3643589 - RNA, 13 nt, Human
uuuuucaaaagaa

SEQ ID NO: 3643590 - RNA, 16 nt, Human
uuuuucaacuuugaau

SEQ ID NO: 3643591 - RNA, 16 nt, Human
uuuuucaauauauuga

SEQ ID NO: 3643592 - RNA, 12 nt, Human
uuuuucaauuaa

SEQ ID NO: 3643593 - RNA, 19 nt, Human
uuuuucaauuaaacggauu

SEQ ID NO: 3643594 - RNA, 20 nt, Human
uuuuucaauuaaacggauua

SEQ ID NO: 3643595 - RNA, 16 nt, Human
uuuuucacggaaguuu

SEQ ID NO: 3643596 - RNA, 19 nt, Human
uuuuucacucuaagucaug

SEQ ID NO: 3643597 - RNA, 14 nt, Human
uuuuucagaaauau

SEQ ID NO: 3643598 - RNA, 10 nt, Human
uuuuucagac

SEQ ID NO: 3643599 - RNA, 11 nt, Human
uuuuucagacc

SEQ ID NO: 3643600 - RNA, 20 nt, Human
uuuuucaggagcgcaagaua

SEQ ID NO: 3643601 - RNA, 17 nt, Human
uuuuucaguauuauaug

SEQ ID NO: 3643602 - RNA, 14 nt, Human
uuuuucaguuccaa

SEQ ID NO: 3643603 - RNA, 17 nt, Human
uuuuucaguuccaagaa

SEQ ID NO: 3643604 - RNA, 21 nt, Human
uuuuucaguuccaagaaagau

SEQ ID NO: 3643605 - RNA, 16 nt, Human
uuuuucaguuguucuu

SEQ ID NO: 3643606 - RNA, 15 nt, Human
uuuuucaguuuucag

SEQ ID NO: 3643607 - RNA, 16 nt, Human
uuuuucaucuucaguu

SEQ ID NO: 3643608 - RNA, 19 nt, Human
acuauucuugauguaaaau

SEQ ID NO: 3643609 - RNA, 20 nt, Human
acuauucuugauguaaaauc

SEQ ID NO: 3643610 - RNA, 15 nt, Human
acuauugcauuuuac

SEQ ID NO: 3643611 - RNA, 14 nt, Human
acuauuggaaagua

SEQ ID NO: 3643612 - RNA, 13 nt, Human
acuauuggagggu

SEQ ID NO: 3643613 - RNA, 13 nt, Human
acuauuuaaacuu

SEQ ID NO: 3643614 - RNA, 16 nt, Human
acuauuuaaacuuaua

SEQ ID NO: 3643615 - RNA, 11 nt, Human
acuauuuaaag

SEQ ID NO: 3643616 - RNA, 12 nt, Human
acuauuuaacug

SEQ ID NO: 3643617 - RNA, 13 nt, Human
acuauuuaacuga

SEQ ID NO: 3643618 - RNA, 15 nt, Human
acuauuuaacugacu

SEQ ID NO: 3643619 - RNA, 14 nt, Human
acuauuuaacuuga

SEQ ID NO: 3643620 - RNA, 20 nt, Human
acuauuuauugacucugggu

SEQ ID NO: 3643621 - RNA, 16 nt, Human
acuauuuauuuacaaa

SEQ ID NO: 3643622 - RNA, 18 nt, Human
acuauuuauuuacaaaug

SEQ ID NO: 3643623 - RNA, 19 nt, Human
acuauuuauuuacaaaugu

SEQ ID NO: 3643624 - RNA, 13 nt, Human
acuauuuccuuua

SEQ ID NO: 3643625 - RNA, 22 nt, Human
acuauuucugggucuuuugcua

SEQ ID NO: 3643626 - RNA, 23 nt, Human
acuauuucugggucuuuugcuac

SEQ ID NO: 3643627 - RNA, 18 nt, Human
acuauuugucuuucagga

SEQ ID NO: 3643628 - RNA, 13 nt, Human
acuauuuuacuuc

SEQ ID NO: 3643629 - RNA, 15 nt, Human
acuauuuuaugcaaa

SEQ ID NO: 3643630 - RNA, 11 nt, Human
acuauuuuauu

SEQ ID NO: 3643631 - RNA, 14 nt, Human
acuauuuucagaau

SEQ ID NO: 3643632 - RNA, 17 nt, Human
acuauuuucagaaucug

SEQ ID NO: 3643633 - RNA, 14 nt, Human
acuauuuucuuuuu

SEQ ID NO: 3643634 - RNA, 13 nt, Human
acuauuuuuacug

SEQ ID NO: 3643635 - RNA, 22 nt, Human
acuauuuuuguuuuuauuaaaa

SEQ ID NO: 3643636 - RNA, 13 nt, Human
acucaaaagcugg

SEQ ID NO: 3643637 - RNA, 20 nt, Human
acucaaaauauuuguacaua

SEQ ID NO: 3643638 - RNA, 15 nt, Human
acucaaacacagaga

SEQ ID NO: 3643639 - RNA, 19 nt, Human
acucaaaccaaaucacuga

SEQ ID NO: 3643640 - RNA, 16 nt, Human
acucaaacuucuggcu

SEQ ID NO: 3643641 - RNA, 23 nt, Human
acucaaacuuuuccccuguccug

SEQ ID NO: 3643642 - RNA, 19 nt, Human
acucaaaguuucagagacc

SEQ ID NO: 3643643 - RNA, 14 nt, Human
acucaaaucaagaa

SEQ ID NO: 3643644 - RNA, 17 nt, Human
acucaaaugaguaacau

SEQ ID NO: 3643645 - RNA, 18 nt, Human
acucaaaugcucagacca

SEQ ID NO: 3643646 - RNA, 23 nt, Human
acucaaaugcucagaccagcucu

SEQ ID NO: 3643647 - RNA, 16 nt, Human
acucaaauguucuaag

SEQ ID NO: 3643648 - RNA, 17 nt, Human
acucaaauguucuaagu

SEQ ID NO: 3643649 - RNA, 19 nt, Human
acucaaauuaaucuuucuu

SEQ ID NO: 3643650 - RNA, 23 nt, Human
acucaaauuuuggcgaaucucaa

SEQ ID NO: 3643651 - RNA, 19 nt, Human
acucaacaugagucaagag

SEQ ID NO: 3643652 - RNA, 23 nt, Human
acucaacauguuacugaccagca

SEQ ID NO: 3643653 - RNA, 16 nt, Human
acucaaccaaauggua

SEQ ID NO: 3643654 - RNA, 13 nt, Human
acucaacccucuc

SEQ ID NO: 3643655 - RNA, 17 nt, Human
acucaagacuuccagag

SEQ ID NO: 3643656 - RNA, 20 nt, Human
acucaagacuuccagagccu

SEQ ID NO: 3643657 - RNA, 15 nt, Human
acucaagaggcugag

SEQ ID NO: 3643658 - RNA, 15 nt, Human
acucaagcacugaua

SEQ ID NO: 3643659 - RNA, 11 nt, Human
acucaagccaa

SEQ ID NO: 3643660 - RNA, 17 nt, Human
acucaagccaagcagcc

SEQ ID NO: 3643661 - RNA, 14 nt, Human
acucaagcccgcgg

SEQ ID NO: 3643662 - RNA, 17 nt, Human
acucaagcggguggcuc

SEQ ID NO: 3643663 - RNA, 17 nt, Human
acucaaguucaaggacc

SEQ ID NO: 3643664 - RNA, 15 nt, Human
acucaauauuuucca

SEQ ID NO: 3643665 - RNA, 22 nt, Human
acucaauauuuuccaugaaaau

SEQ ID NO: 3643666 - RNA, 14 nt, Human
acucaaugcacuga

SEQ ID NO: 3643667 - RNA, 16 nt, Human
acucaaugcacugaca

SEQ ID NO: 3643668 - RNA, 12 nt, Human
acucaaugcuuu

SEQ ID NO: 3643669 - RNA, 15 nt, Human
acucaaugcuuuauu

SEQ ID NO: 3643670 - RNA, 19 nt, Human
acucaaugcuuuauuugua

SEQ ID NO: 3643671 - RNA, 20 nt, Human
acucaaugcuuuauuuguaa

SEQ ID NO: 3643672 - RNA, 22 nt, Human
acucaaugcuuuauuuguaaau

SEQ ID NO: 3643673 - RNA, 19 nt, Human
acucaauggaguaugucug

SEQ ID NO: 3643674 - RNA, 23 nt, Human
acucaauggaguaugucugaugg

SEQ ID NO: 3643675 - RNA, 19 nt, Human
acucaaugugugccgagcc

SEQ ID NO: 3643676 - RNA, 21 nt, Human
acucaauguuacuaucugcuu

SEQ ID NO: 3643677 - RNA, 22 nt, Human
acucacaagugcucaucuguug

SEQ ID NO: 3643678 - RNA, 15 nt, Human
acucacacagccagg

SEQ ID NO: 3643679 - RNA, 22 nt, Human
acucacacagccaggugccuug

SEQ ID NO: 3643680 - RNA, 12 nt, Human
acucacacaggc

SEQ ID NO: 3643681 - RNA, 22 nt, Human
acucacacaggcauuuccuggg

SEQ ID NO: 3643682 - RNA, 19 nt, Human
acucacagaccuggagccc

SEQ ID NO: 3643683 - RNA, 16 nt, Human
acucacagagacacag

SEQ ID NO: 3643684 - RNA, 22 nt, Human
acucacaugcuggacaggucug

SEQ ID NO: 3643685 - RNA, 16 nt, Human
acucacauggcuaugu

SEQ ID NO: 3643686 - RNA, 20 nt, Human
acucacauggcuauguuuua

SEQ ID NO: 3643687 - RNA, 21 nt, Human
acucaccagccccacugccag

SEQ ID NO: 3643688 - RNA, 19 nt, Human
acucaccaguguccccucc

SEQ ID NO: 3643689 - RNA, 15 nt, Human
acucaccaucugugc

SEQ ID NO: 3643690 - RNA, 18 nt, Human
acucaccaugaagcgaaa

SEQ ID NO: 3643691 - RNA, 18 nt, Human
acucacccccaaggggca

SEQ ID NO: 3643692 - RNA, 16 nt, Human
acucaccuaauguuua

SEQ ID NO: 3643693 - RNA, 23 nt, Human
acucaccuaauguuuaugagcca

SEQ ID NO: 3643694 - RNA, 19 nt, Human
acucaccucccccaucucu

SEQ ID NO: 3643695 - RNA, 16 nt, Human
acucaccucuaaaaca

SEQ ID NO: 3643696 - RNA, 11 nt, Human
acucaccucug

SEQ ID NO: 3643697 - RNA, 14 nt, Human
acucaccucugccu

SEQ ID NO: 3643698 - RNA, 17 nt, Human
acucaccucugccucaa

SEQ ID NO: 3643699 - RNA, 22 nt, Human
acucaccugcacuaacagagug

SEQ ID NO: 3643700 - RNA, 13 nt, Human
acucaccugcugg

SEQ ID NO: 3643701 - RNA, 16 nt, Human
acucaccugcuggccc

SEQ ID NO: 3643702 - RNA, 17 nt, Human
acucaccugcuggcccc

SEQ ID NO: 3643703 - RNA, 12 nt, Human
acucaccugggg

SEQ ID NO: 3643704 - RNA, 18 nt, Human
acucaccuggggcugcug

SEQ ID NO: 3643705 - RNA, 19 nt, Human
acucacguggguccugagg

SEQ ID NO: 3643706 - RNA, 20 nt, Human
acucacuaauucauuaaucu

SEQ ID NO: 3643707 - RNA, 17 nt, Human
acucacuaggcccccac

SEQ ID NO: 3643708 - RNA, 19 nt, Human
acucacucaaguucaagga

SEQ ID NO: 3643709 - RNA, 16 nt, Human
acucacuccuuuuaaa

SEQ ID NO: 3643710 - RNA, 22 nt, Human
acucacugcucaagaagacaug

SEQ ID NO: 3643711 - RNA, 17 nt, Human
acucacuggcagcccca

SEQ ID NO: 3643712 - RNA, 19 nt, Human
acucacuggugguuuuccg

SEQ ID NO: 3643713 - RNA, 15 nt, Human
acucacuuucuagau

SEQ ID NO: 3643714 - RNA, 17 nt, Human
acucacuuuucccacuc

SEQ ID NO: 3643715 - RNA, 13 nt, Human
acucagaaauuca

SEQ ID NO: 3643716 - RNA, 21 nt, Human
acucagaaauuuaauucaugu

SEQ ID NO: 3643717 - RNA, 21 nt, Human
acucagaacugucggaggaaa

SEQ ID NO: 3643718 - RNA, 14 nt, Human
acucagaagacacu

SEQ ID NO: 3643719 - RNA, 16 nt, Human
acucagaagacacuga

SEQ ID NO: 3643720 - RNA, 17 nt, Human
acucagaagacacugau

SEQ ID NO: 3643721 - RNA, 13 nt, Human
acuaaauuugaua

SEQ ID NO: 3643722 - RNA, 17 nt, Human
acuaaauuugauacuua

SEQ ID NO: 3643723 - RNA, 18 nt, Human
acuaaauuugauacuuau

SEQ ID NO: 3643724 - RNA, 22 nt, Human
acuaaauuugauacuuauauuu

SEQ ID NO: 3643725 - RNA, 19 nt, Human
acuaaauuuggggacagau

SEQ ID NO: 3643726 - RNA, 15 nt, Human
acuaacacucagaag

SEQ ID NO: 3643727 - RNA, 17 nt, Human
acuaacacucagaagcc

SEQ ID NO: 3643728 - RNA, 17 nt, Human
acuaacaggauauuuaa

SEQ ID NO: 3643729 - RNA, 12 nt, Human
acuaacaggcuu

SEQ ID NO: 3643730 - RNA, 12 nt, Human
acuaacauuaua

SEQ ID NO: 3643731 - RNA, 14 nt, Human
acuaaccaaaucuc

SEQ ID NO: 3643732 - RNA, 17 nt, Human
acuaaccagcagaaaug

SEQ ID NO: 3643733 - RNA, 23 nt, Human
acuaaccagggaagcugucccuc

SEQ ID NO: 3643734 - RNA, 17 nt, Human
acuaaccccaacgcaca

SEQ ID NO: 3643735 - RNA, 15 nt, Human
acuaaccuugccugg

SEQ ID NO: 3643736 - RNA, 21 nt, Human
acuaaccuugccugguacagu

SEQ ID NO: 3643737 - RNA, 14 nt, Human
acuaacuaaaacaa

SEQ ID NO: 3643738 - RNA, 15 nt, Human
acuaacuaaaacaaa

SEQ ID NO: 3643739 - RNA, 13 nt, Human
acuaacuaaacuc

SEQ ID NO: 3643740 - RNA, 13 nt, Human
acuaacuagagca

SEQ ID NO: 3643741 - RNA, 19 nt, Human
acuaagaaccccucugcuu

SEQ ID NO: 3643742 - RNA, 18 nt, Human
acuaagaauucaaacugg

SEQ ID NO: 3643743 - RNA, 15 nt, Human
acuaagagagaauga

SEQ ID NO: 3643744 - RNA, 15 nt, Human
acuaagagucucuau

SEQ ID NO: 3643745 - RNA, 20 nt, Human
acuaagaucgguuaacaaau

SEQ ID NO: 3643746 - RNA, 17 nt, Human
acuaagaugacauugcu

SEQ ID NO: 3643747 - RNA, 19 nt, Human
acuaagaugacauugcuaa

SEQ ID NO: 3643748 - RNA, 13 nt, Human
acuaagauucuuu

SEQ ID NO: 3643749 - RNA, 17 nt, Human
acuaagauucuuuuaaa

SEQ ID NO: 3643750 - RNA, 13 nt, Human
acuaagcagagga

SEQ ID NO: 3643751 - RNA, 22 nt, Human
acuaagcagaggaggggccgcu

SEQ ID NO: 3643752 - RNA, 16 nt, Human
acuaagccacaagaaa

SEQ ID NO: 3643753 - RNA, 16 nt, Human
acuaagcccugucgag

SEQ ID NO: 3643754 - RNA, 20 nt, Human
aggaaccuggaccaaagcug

SEQ ID NO: 3643755 - RNA, 20 nt, Human
aggaacgguaaauuucugug

SEQ ID NO: 3643756 - RNA, 14 nt, Human
aggaacucccagca

SEQ ID NO: 3643757 - RNA, 18 nt, Human
aggaacucuggcuuccag

SEQ ID NO: 3643758 - RNA, 19 nt, Human
aggaacucuggcuuccagg

SEQ ID NO: 3643759 - RNA, 13 nt, Human
aggaacugcagca

SEQ ID NO: 3643760 - RNA, 16 nt, Human
aggaacugcugggcuu

SEQ ID NO: 3643761 - RNA, 18 nt, Human
aggaacugggccuguugc

SEQ ID NO: 3643762 - RNA, 23 nt, Human
aggaacuuaaauaaugugaaacu

SEQ ID NO: 3643763 - RNA, 14 nt, Human
aggaacuuccaggu

SEQ ID NO: 3643764 - RNA, 14 nt, Human
aggaagaaaaauca

SEQ ID NO: 3643765 - RNA, 17 nt, Human
aggaagaaacagaagag

SEQ ID NO: 3643766 - RNA, 21 nt, Human
aggaagaacacccucuaaaug

SEQ ID NO: 3643767 - RNA, 16 nt, Human
aggaagaacguuuuuu

SEQ ID NO: 3643768 - RNA, 17 nt, Human
aggaagaagcuuaggca

SEQ ID NO: 3643769 - RNA, 17 nt, Human
aggaagaauuuuaaaaa

SEQ ID NO: 3643770 - RNA, 23 nt, Human
aggaagaauuuuaaaaaugaauc

SEQ ID NO: 3643771 - RNA, 17 nt, Human
aggaagacaguucuaca

SEQ ID NO: 3643772 - RNA, 18 nt, Human
aggaagacccaacacaug

SEQ ID NO: 3643773 - RNA, 19 nt, Human
aggaagacuucaucccucu

SEQ ID NO: 3643774 - RNA, 15 nt, Human
aggaagacuuuggaa

SEQ ID NO: 3643775 - RNA, 14 nt, Human
aggaagagaaacca

SEQ ID NO: 3643776 - RNA, 14 nt, Human
aggaagagagcaug

SEQ ID NO: 3643777 - RNA, 23 nt, Human
aggaagagcaggcacauggagga

SEQ ID NO: 3643778 - RNA, 17 nt, Human
aggaagagccuuccacc

SEQ ID NO: 3643779 - RNA, 19 nt, Human
aggaagagccuuccaccca

SEQ ID NO: 3643780 - RNA, 21 nt, Human
aggaagagccuuccacccagg

SEQ ID NO: 3643781 - RNA, 20 nt, Human
aggaagaggggaagcagaaa

SEQ ID NO: 3643782 - RNA, 15 nt, Human
aggaagagucuuggu

SEQ ID NO: 3643783 - RNA, 22 nt, Human
aggaagauauacaugaaaauuu

SEQ ID NO: 3643784 - RNA, 16 nt, Human
aggaagaucccccaga

SEQ ID NO: 3643785 - RNA, 18 nt, Human
aggaagaucccccagaaa

SEQ ID NO: 3643786 - RNA, 16 nt, Human
aggaagaucuuaaauu

SEQ ID NO: 3643787 - RNA, 17 nt, Human
aggaagcacaugccucu

SEQ ID NO: 3643788 - RNA, 22 nt, Human
aggaagcacaugccucucucag

SEQ ID NO: 3643789 - RNA, 24 nt, Human
aggaagcacaugccucucucaggc

SEQ ID NO: 3643790 - RNA, 18 nt, Human
aggaagcaccccaugcca

SEQ ID NO: 3643791 - RNA, 15 nt, Human
aggaagcagaauaaa

SEQ ID NO: 3643792 - RNA, 19 nt, Human
aggaagcagaauaaagcaa

SEQ ID NO: 3643793 - RNA, 21 nt, Human
aggaagcagaauaaagcaauu

SEQ ID NO: 3643794 - RNA, 22 nt, Human
aggaagcagaauaaagcaauuu

SEQ ID NO: 3643795 - RNA, 15 nt, Human
aggaagccaaagagu

SEQ ID NO: 3643796 - RNA, 15 nt, Human
aggaagccaaauuua

SEQ ID NO: 3643797 - RNA, 16 nt, Human
aggaagccacagcugg

SEQ ID NO: 3643798 - RNA, 21 nt, Human
aggaagccagcaggcucucag

SEQ ID NO: 3643799 - RNA, 20 nt, Human
aggaagcccaggagccucac

SEQ ID NO: 3643800 - RNA, 19 nt, Human
aggaagccgcuggggccag

SEQ ID NO: 3643801 - RNA, 14 nt, Human
aggaagccguccug

SEQ ID NO: 3643802 - RNA, 20 nt, Human
aggaagccucagauuccuuc

SEQ ID NO: 3643803 - RNA, 12 nt, Human
aggaagccuucc

SEQ ID NO: 3643804 - RNA, 12 nt, Human
aggaagcucagg

SEQ ID NO: 3643805 - RNA, 15 nt, Human
aggaagcucagggcc

SEQ ID NO: 3643806 - RNA, 16 nt, Human
aggaagcucagggccu

SEQ ID NO: 3643807 - RNA, 17 nt, Human
aggaagcucagggccug

SEQ ID NO: 3643808 - RNA, 18 nt, Human
aggaagcucagggccugg

SEQ ID NO: 3643809 - RNA, 19 nt, Human
aggaagcuccaguccugcu

SEQ ID NO: 3643810 - RNA, 20 nt, Human
aggaagcuccaguccugcuc

SEQ ID NO: 3643811 - RNA, 18 nt, Human
aggaagcugugagagcag

SEQ ID NO: 3643812 - RNA, 13 nt, Human
aggaagcuuucuc

SEQ ID NO: 3643813 - RNA, 18 nt, Human
aggaagcuuucucugcuu

SEQ ID NO: 3643814 - RNA, 19 nt, Human
aggaagcuuucucugcuuc

SEQ ID NO: 3643815 - RNA, 12 nt, Human
aggaaggaaaga

SEQ ID NO: 3643816 - RNA, 16 nt, Human
aggaaggacuaugaaa

SEQ ID NO: 3643817 - RNA, 19 nt, Human
aggaaggagacucaccucu

SEQ ID NO: 3643818 - RNA, 18 nt, Human
aggaaggagagccugcug

SEQ ID NO: 3643819 - RNA, 13 nt, Human
aggaaggagcugc

SEQ ID NO: 3643820 - RNA, 18 nt, Human
aggaaggagcugccugga

SEQ ID NO: 3643821 - RNA, 19 nt, Human
aggaaggagcugccuggac

SEQ ID NO: 3643822 - RNA, 20 nt, Human
aggaaggaggacccaggaca

SEQ ID NO: 3643823 - RNA, 14 nt, Human
aggaaggauuguaa

SEQ ID NO: 3643824 - RNA, 18 nt, Human
aggaaggauuguaaaaaa

SEQ ID NO: 3643825 - RNA, 13 nt, Human
aggaaggcaagag

SEQ ID NO: 3643826 - RNA, 14 nt, Human
aggaaggcaagagg

SEQ ID NO: 3643827 - RNA, 15 nt, Human
aggaaggcaggaaga

SEQ ID NO: 3643828 - RNA, 18 nt, Human
aggaaggcagggaggagg

SEQ ID NO: 3643829 - RNA, 20 nt, Human
aggaaggcagggaggaggca

SEQ ID NO: 3643830 - RNA, 22 nt, Human
aggaaggcugagaggagagaga

SEQ ID NO: 3643831 - RNA, 15 nt, Human
aggaaggcugucuca

SEQ ID NO: 3643832 - RNA, 19 nt, Human
aggaaggcuuguugugcuu

SEQ ID NO: 3643833 - RNA, 22 nt, Human
aggaaggcuuguugugcuuuua

SEQ ID NO: 3643834 - RNA, 17 nt, Human
aggaagggaccaaggca

SEQ ID NO: 3643835 - RNA, 19 nt, Human
aggaagggauguauuugua

SEQ ID NO: 3643836 - RNA, 17 nt, Human
aggaagggcaggaagga

SEQ ID NO: 3643837 - RNA, 12 nt, Human
aggaaggggcug

SEQ ID NO: 3643838 - RNA, 16 nt, Human
aggaaggggcuggacu

SEQ ID NO: 3643839 - RNA, 19 nt, Human
aggaagggggguugcagug

SEQ ID NO: 3643840 - RNA, 16 nt, Human
aggaaggucauuucca

SEQ ID NO: 3643841 - RNA, 18 nt, Human
aggaaggucauuuccaug

SEQ ID NO: 3643842 - RNA, 17 nt, Human
aggaaggucucauucuu

SEQ ID NO: 3643843 - RNA, 15 nt, Human
aggaagguggauggc

SEQ ID NO: 3643844 - RNA, 14 nt, Human
aggaaggugguggg

SEQ ID NO: 3643845 - RNA, 14 nt, Human
aggaagguucuggu

SEQ ID NO: 3643846 - RNA, 21 nt, Human
aggaagguucuggugugaacu

SEQ ID NO: 3643847 - RNA, 14 nt, Human
aggaagguuuucuc

SEQ ID NO: 3643848 - RNA, 19 nt, Human
aggaaguacuggagaaaau

SEQ ID NO: 3643849 - RNA, 14 nt, Human
aggaaguagaaaca

SEQ ID NO: 3643850 - RNA, 13 nt, Human
aggaaguagagga

SEQ ID NO: 3643851 - RNA, 18 nt, Human
aggaaguagcacaggcug

SEQ ID NO: 3643852 - RNA, 20 nt, Human
aggaagucucaucuggggag

SEQ ID NO: 3643853 - RNA, 16 nt, Human
aggaaguguaacagcu

SEQ ID NO: 3643854 - RNA, 18 nt, Human
aggaaguugacuuauagu

SEQ ID NO: 3643855 - RNA, 15 nt, Human
aggaaguuuucugua

SEQ ID NO: 3643856 - RNA, 21 nt, Human
aggaauaaauaaaaauggaua

SEQ ID NO: 3643857 - RNA, 19 nt, Human
aggaauaaauugcuccuug

SEQ ID NO: 3643858 - RNA, 20 nt, Human
aggaauaaauugcuccuuga

SEQ ID NO: 3643859 - RNA, 12 nt, Human
aggaauaagaau

SEQ ID NO: 3643860 - RNA, 14 nt, Human
aggaauaaggccuu

SEQ ID NO: 3643861 - RNA, 23 nt, Human
aggaauaaugggcuuagagcagu

SEQ ID NO: 3643862 - RNA, 16 nt, Human
aggaauaauuauuuau

SEQ ID NO: 3643863 - RNA, 14 nt, Human
auaaucagccucuu

SEQ ID NO: 3643864 - RNA, 15 nt, Human
auaaucagccucuua

SEQ ID NO: 3643865 - RNA, 17 nt, Human
auaaucagccucuuaaa

SEQ ID NO: 3643866 - RNA, 19 nt, Human
auaaucaucaaguaauaca

SEQ ID NO: 3643867 - RNA, 18 nt, Human
auaaucaucucugucaca

SEQ ID NO: 3643868 - RNA, 16 nt, Human
auaaucccagcacuuu

SEQ ID NO: 3643869 - RNA, 20 nt, Human
auaaucccuggaugauauuu

SEQ ID NO: 3643870 - RNA, 14 nt, Human
auaauccugcaaag

SEQ ID NO: 3643871 - RNA, 20 nt, Human
auaauccugugaaaauauga

SEQ ID NO: 3643872 - RNA, 16 nt, Human
auaauccuuaaaucuu

SEQ ID NO: 3643873 - RNA, 18 nt, Human
auaauccuugauaauaua

SEQ ID NO: 3643874 - RNA, 12 nt, Human
auaaucuagaac

SEQ ID NO: 3643875 - RNA, 13 nt, Human
auaaucugauuug

SEQ ID NO: 3643876 - RNA, 12 nt, Human
auaaucugucaa

SEQ ID NO: 3643877 - RNA, 20 nt, Human
auaaucugucaaaacacugu

SEQ ID NO: 3643878 - RNA, 21 nt, Human
auaaucuuucacaggggacag

SEQ ID NO: 3643879 - RNA, 12 nt, Human
auaaugaagccc

SEQ ID NO: 3643880 - RNA, 14 nt, Human
auaaugaauacuuu

SEQ ID NO: 3643881 - RNA, 15 nt, Human
auaaugagcuauuaa

SEQ ID NO: 3643882 - RNA, 19 nt, Human
auaaugcaaagaaucccua

SEQ ID NO: 3643883 - RNA, 13 nt, Human
auaaugcaguaug

SEQ ID NO: 3643884 - RNA, 14 nt, Human
auaaugcaguaugg

SEQ ID NO: 3643885 - RNA, 19 nt, Human
auaaugcaguaugguacau

SEQ ID NO: 3643886 - RNA, 20 nt, Human
auaaugccauuuuaaggaaa

SEQ ID NO: 3643887 - RNA, 15 nt, Human
auaaugccuuuguaa

SEQ ID NO: 3643888 - RNA, 16 nt, Human
auaaugccuuuguaac

SEQ ID NO: 3643889 - RNA, 21 nt, Human
auaaugcgugcauaccacuuu

SEQ ID NO: 3643890 - RNA, 17 nt, Human
auaaugcuacaauuuua

SEQ ID NO: 3643891 - RNA, 20 nt, Human
auaaugcuacaauuuuaaga

SEQ ID NO: 3643892 - RNA, 14 nt, Human
auaauggaaaaaaa

SEQ ID NO: 3643893 - RNA, 16 nt, Human
auaauggaaaaugcca

SEQ ID NO: 3643894 - RNA, 17 nt, Human
auaauggaagagaaauc

SEQ ID NO: 3643895 - RNA, 21 nt, Human
auaauggaagagaaaucucau

SEQ ID NO: 3643896 - RNA, 19 nt, Human
auaauggacagauuaauau

SEQ ID NO: 3643897 - RNA, 20 nt, Human
auaauggucccauccaggca

SEQ ID NO: 3643898 - RNA, 18 nt, Human
auaaugguugacuggguu

SEQ ID NO: 3643899 - RNA, 23 nt, Human
aggaauucuguauagauuagaau

SEQ ID NO: 3643900 - RNA, 19 nt, Human
aggaauugacccacaagaa

SEQ ID NO: 3643901 - RNA, 19 nt, Human
aggaauuucccaggacccu

SEQ ID NO: 3643902 - RNA, 15 nt, Human
aggaauuucugagug

SEQ ID NO: 3643903 - RNA, 15 nt, Human
aggaauuucuuaacu

SEQ ID NO: 3643904 - RNA, 23 nt, Human
aggaauuucuuaacuucuugcuu

SEQ ID NO: 3643905 - RNA, 19 nt, Human
aggacaaaaaugaacugaa

SEQ ID NO: 3643906 - RNA, 13 nt, Human
aggacaaaacuuc

SEQ ID NO: 3643907 - RNA, 15 nt, Human
aggacaaaacuucuu

SEQ ID NO: 3643908 - RNA, 21 nt, Human
aggacaaaacuucuugucaga

SEQ ID NO: 3643909 - RNA, 22 nt, Human
aggacaaaacuucuugucagac

SEQ ID NO: 3643910 - RNA, 19 nt, Human
aggacaaagugccaaagaa

SEQ ID NO: 3643911 - RNA, 21 nt, Human
aggacaaaucugcaaagcaug

SEQ ID NO: 3643912 - RNA, 16 nt, Human
aggacaacgaggaagc

SEQ ID NO: 3643913 - RNA, 18 nt, Human
aggacaaggugcaggcag

SEQ ID NO: 3643914 - RNA, 20 nt, Human
aggacaaggugcaggcaggc

SEQ ID NO: 3643915 - RNA, 23 nt, Human
aggacaaggugcaggcaggcugg

SEQ ID NO: 3643916 - RNA, 19 nt, Human
aggacaaucaguccccucc

SEQ ID NO: 3643917 - RNA, 20 nt, Human
aggacaaucaguccccuccc

SEQ ID NO: 3643918 - RNA, 22 nt, Human
aggacaaucaguccccucccau

SEQ ID NO: 3643919 - RNA, 23 nt, Human
aggacacacuaaucgaacuauga

SEQ ID NO: 3643920 - RNA, 12 nt, Human
aggacacaggcc

SEQ ID NO: 3643921 - RNA, 15 nt, Human
aggacacaggccugu

SEQ ID NO: 3643922 - RNA, 21 nt, Human
aggacaccacacccagccuca

SEQ ID NO: 3643923 - RNA, 22 nt, Human
aggacaccacacccagccucag

SEQ ID NO: 3643924 - RNA, 23 nt, Human
aggacaccacacccagccucagu

SEQ ID NO: 3643925 - RNA, 18 nt, Human
aggacaccuguacuggag

SEQ ID NO: 3643926 - RNA, 19 nt, Human
aggacaccuguacuggaga

SEQ ID NO: 3643927 - RNA, 22 nt, Human
aggacacgcgccccccucccag

SEQ ID NO: 3643928 - RNA, 18 nt, Human
aggacacgggccugucca

SEQ ID NO: 3643929 - RNA, 23 nt, Human
aggacacuaaccacgcuggaccu

SEQ ID NO: 3643930 - RNA, 14 nt, Human
aggacacuuccugc

SEQ ID NO: 3643931 - RNA, 13 nt, Human
aggacagaaagga

SEQ ID NO: 3643932 - RNA, 23 nt, Human
aggacagaaaggagaguggccau

SEQ ID NO: 3643933 - RNA, 16 nt, Human
aggacagaaggcuccu

SEQ ID NO: 3643934 - RNA, 21 nt, Human
aggacagaaggcuccugcccc

SEQ ID NO: 3643935 - RNA, 14 nt, Human
aggacagagagaaa

SEQ ID NO: 3643936 - RNA, 17 nt, Human
aggacagaugccuccuu

SEQ ID NO: 3643937 - RNA, 21 nt, Human
aggacagaugccuccuuccuc

SEQ ID NO: 3643938 - RNA, 16 nt, Human
aggacaggagaugcug

SEQ ID NO: 3643939 - RNA, 20 nt, Human
aggacaggauccaggccggc

SEQ ID NO: 3643940 - RNA, 16 nt, Human
aggacaggcugcggcc

SEQ ID NO: 3643941 - RNA, 21 nt, Human
aggacaggcugcggccccucc

SEQ ID NO: 3643942 - RNA, 15 nt, Human
aggacagggguuccu

SEQ ID NO: 3643943 - RNA, 15 nt, Human
aggacagugcuucag

SEQ ID NO: 3643944 - RNA, 18 nt, Human
aggacagugcuucagccu

SEQ ID NO: 3643945 - RNA, 19 nt, Human
aggacagugcuucagccug

SEQ ID NO: 3643946 - RNA, 20 nt, Human
aggacagugcuucagccuga

SEQ ID NO: 3643947 - RNA, 21 nt, Human
aggacagugcuugauacagga

SEQ ID NO: 3643948 - RNA, 20 nt, Human
aggacauaaugggguccugg

SEQ ID NO: 3643949 - RNA, 16 nt, Human
aggacaucagcaaaca

SEQ ID NO: 3643950 - RNA, 13 nt, Human
aggacaugcaaua

SEQ ID NO: 3643951 - RNA, 16 nt, Human
aggacaugcaauaaaa

SEQ ID NO: 3643952 - RNA, 22 nt, Human
aggacaugcaauaaaauuuaaa

SEQ ID NO: 3643953 - RNA, 22 nt, Human
aggacaugcgguagccagcaca

SEQ ID NO: 3643954 - RNA, 21 nt, Human
aggacauggcuucugaaccug

SEQ ID NO: 3643955 - RNA, 15 nt, Human
aggacauuaugugug

SEQ ID NO: 3643956 - RNA, 18 nt, Human
aggaccaacaagggcagu

SEQ ID NO: 3643957 - RNA, 19 nt, Human
aggaccaagcaucuugggg

SEQ ID NO: 3643958 - RNA, 17 nt, Human
aggaccacucagccccu

SEQ ID NO: 3643959 - RNA, 12 nt, Human
aggaccagccca

SEQ ID NO: 3643960 - RNA, 13 nt, Human
aggaccagcuggg

SEQ ID NO: 3643961 - RNA, 23 nt, Human
aggaccaggacuauagcccaggu

SEQ ID NO: 3643962 - RNA, 13 nt, Human
aggaccaggacuc

SEQ ID NO: 3643963 - RNA, 19 nt, Human
aggaccaggacucccuccu

SEQ ID NO: 3643964 - RNA, 18 nt, Human
aggaccaggauccagccu

SEQ ID NO: 3643965 - RNA, 13 nt, Human
aggaccaggcaau

SEQ ID NO: 3643966 - RNA, 12 nt, Human
aggaccagggcu

SEQ ID NO: 3643967 - RNA, 22 nt, Human
aggaccaggguuggcaccuucc

SEQ ID NO: 3643968 - RNA, 12 nt, Human
aggacccaagca

SEQ ID NO: 3643969 - RNA, 15 nt, Human
aggacccaagcagag

SEQ ID NO: 3643970 - RNA, 15 nt, Human
aggacccagacccag

SEQ ID NO: 3643971 - RNA, 14 nt, Human
aggacccaggacag

SEQ ID NO: 3643972 - RNA, 23 nt, Human
aggacccaggacaggauccaggc

SEQ ID NO: 3643973 - RNA, 18 nt, Human
aggacccaucacgccugu

SEQ ID NO: 3643974 - RNA, 20 nt, Human
aggacccaucacgccugugc

SEQ ID NO: 3643975 - RNA, 13 nt, Human
aggaccccagcuc

SEQ ID NO: 3643976 - RNA, 15 nt, Human
aggacccccuucccc

SEQ ID NO: 3643977 - RNA, 17 nt, Human
aggacccccuuccccua

SEQ ID NO: 3643978 - RNA, 21 nt, Human
aggacccggaggggccuggca

SEQ ID NO: 3643979 - RNA, 14 nt, Human
aggacccugccagg

SEQ ID NO: 3643980 - RNA, 15 nt, Human
aggacccugccaggc

SEQ ID NO: 3643981 - RNA, 13 nt, Human
aggacccuggacc

SEQ ID NO: 3643982 - RNA, 12 nt, Human
aggacccuuccc

SEQ ID NO: 3643983 - RNA, 13 nt, Human
aggacccuucccu

SEQ ID NO: 3643984 - RNA, 16 nt, Human
aggaccgccaaagaau

SEQ ID NO: 3643985 - RNA, 16 nt, Human
aggaccggcggcucgg

SEQ ID NO: 3643986 - RNA, 17 nt, Human
aggaccguggcccugcc

SEQ ID NO: 3643987 - RNA, 14 nt, Human
aggaccuaaaacau

SEQ ID NO: 3643988 - RNA, 16 nt, Human
aggaccuaaaacaucu

SEQ ID NO: 3643989 - RNA, 15 nt, Human
aggaccucagcugcu

SEQ ID NO: 3643990 - RNA, 18 nt, Human
aggaccucagcugcuucu

SEQ ID NO: 3643991 - RNA, 18 nt, Human
aggaccuccucuuccccc

SEQ ID NO: 3643992 - RNA, 14 nt, Human
aggaccucgugcca

SEQ ID NO: 3643993 - RNA, 18 nt, Human
aggaccucugaaacccug

SEQ ID NO: 3643994 - RNA, 14 nt, Human
aggaccucugggcu

SEQ ID NO: 3643995 - RNA, 20 nt, Human
aggaccugaaauuccaaagu

SEQ ID NO: 3643996 - RNA, 12 nt, Human
aggaccugagcc

SEQ ID NO: 3643997 - RNA, 13 nt, Human
aggaccugagccu

SEQ ID NO: 3643998 - RNA, 15 nt, Human
aggaccugagccugc

SEQ ID NO: 3643999 - RNA, 17 nt, Human
aggaccugagccugccg

SEQ ID NO: 3644000 - RNA, 21 nt, Human
aggaccugagccugccgagca

SEQ ID NO: 3644001 - RNA, 12 nt, Human
aggaccugcccg

SEQ ID NO: 3644002 - RNA, 16 nt, Human
aggaccuggggcacag

SEQ ID NO: 3644003 - RNA, 17 nt, Human
aggaccuggggcacagu

SEQ ID NO: 3644004 - RNA, 13 nt, Human
aggaccugugucc

SEQ ID NO: 3644005 - RNA, 15 nt, Human
aggaccuuaucugug

SEQ ID NO: 3644006 - RNA, 23 nt, Human
aggaccuucacucuaagauguua

SEQ ID NO: 3644007 - RNA, 19 nt, Human
aggaccuucgggcugugcc

SEQ ID NO: 3644008 - RNA, 21 nt, Human
aggaccuuuccaccacagcca

SEQ ID NO: 3644009 - RNA, 22 nt, Human
aggaccuuuccaccacagccag

SEQ ID NO: 3644010 - RNA, 14 nt, Human
aggacgccacccag

SEQ ID NO: 3644011 - RNA, 12 nt, Human
aggacgccacuc

SEQ ID NO: 3644012 - RNA, 20 nt, Human
aggacgccacucauuucauc

SEQ ID NO: 3644013 - RNA, 23 nt, Human
aggacgccacucauuucaucuca

SEQ ID NO: 3644014 - RNA, 13 nt, Human
aggacgcucucug

SEQ ID NO: 3644015 - RNA, 19 nt, Human
aggacgcucucuggccuuc

SEQ ID NO: 3644016 - RNA, 19 nt, Human
aggacgcugaccguggagc

SEQ ID NO: 3644017 - RNA, 17 nt, Human
aggacgcuucacaggac

SEQ ID NO: 3644018 - RNA, 19 nt, Human
aggacgcuucacaggacag

SEQ ID NO: 3644019 - RNA, 13 nt, Human
aggacgcuucuga

SEQ ID NO: 3644020 - RNA, 15 nt, Human
aggacggggccggcc

SEQ ID NO: 3644021 - RNA, 16 nt, Human
aggacggggccggcca

SEQ ID NO: 3644022 - RNA, 21 nt, Human
aggacggggccggccaggugg

SEQ ID NO: 3644023 - RNA, 16 nt, Human
aggacggugcaaccca

SEQ ID NO: 3644024 - RNA, 14 nt, Human
aggacgugggcggc

SEQ ID NO: 3644025 - RNA, 19 nt, Human
aggacgugggcugggccca

SEQ ID NO: 3644026 - RNA, 22 nt, Human
aggacuaacacucagaagccug

SEQ ID NO: 3644027 - RNA, 21 nt, Human
auauauguguuuuucacauuu

SEQ ID NO: 3644028 - RNA, 23 nt, Human
auauauguguuuuucacauuugc

SEQ ID NO: 3644029 - RNA, 16 nt, Human
auauauguugauuucu

SEQ ID NO: 3644030 - RNA, 21 nt, Human
auauauguuuuaagaggcagg

SEQ ID NO: 3644031 - RNA, 17 nt, Human
auauauuaaaaauauaa

SEQ ID NO: 3644032 - RNA, 20 nt, Human
auauauuaaaauuccaaauu

SEQ ID NO: 3644033 - RNA, 17 nt, Human
auauauuauaaauauau

SEQ ID NO: 3644034 - RNA, 20 nt, Human
auauauuauauggaaauaua

SEQ ID NO: 3644035 - RNA, 18 nt, Human
auauauuauuacuuguaa

SEQ ID NO: 3644036 - RNA, 13 nt, Human
auauauuauuaua

SEQ ID NO: 3644037 - RNA, 18 nt, Human
auauauuauuauaaucuu

SEQ ID NO: 3644038 - RNA, 20 nt, Human
auauauucuggcugauaaaa

SEQ ID NO: 3644039 - RNA, 17 nt, Human
auauauucuuauaaaaa

SEQ ID NO: 3644040 - RNA, 22 nt, Human
auauauugaacuuuuguacuga

SEQ ID NO: 3644041 - RNA, 18 nt, Human
auauauugaauauuuuau

SEQ ID NO: 3644042 - RNA, 16 nt, Human
auauauuguguugacu

SEQ ID NO: 3644043 - RNA, 14 nt, Human
aucaauuuuucuua

SEQ ID NO: 3644044 - RNA, 19 nt, Human
aucaauuuuucuuauuuca

SEQ ID NO: 3644045 - RNA, 13 nt, Human
aucacaaaaauuu

SEQ ID NO: 3644046 - RNA, 15 nt, Human
aucacaaaugacuuu

SEQ ID NO: 3644047 - RNA, 20 nt, Human
aucacaaaugacuuuauuau

SEQ ID NO: 3644048 - RNA, 16 nt, Human
aucacaagauggaauu

SEQ ID NO: 3644049 - RNA, 14 nt, Human
aucacaauacagau

SEQ ID NO: 3644050 - RNA, 11 nt, Human
aucacacacau

SEQ ID NO: 3644051 - RNA, 14 nt, Human
aucacacacaugga

SEQ ID NO: 3644052 - RNA, 14 nt, Human
aucacaccugcccu

SEQ ID NO: 3644053 - RNA, 14 nt, Human
aucacacuauuuua

SEQ ID NO: 3644054 - RNA, 16 nt, Human
aucacacuauuuuaga

SEQ ID NO: 3644055 - RNA, 14 nt, Human
aucacacuucugug

SEQ ID NO: 3644056 - RNA, 12 nt, Human
aucacagcagcc

SEQ ID NO: 3644057 - RNA, 15 nt, Human
aucacagcccagccc

SEQ ID NO: 3644058 - RNA, 21 nt, Human
aucacagccucugaaaaccaa

SEQ ID NO: 3644059 - RNA, 16 nt, Human
aucacagcugcuuucu

SEQ ID NO: 3644060 - RNA, 21 nt, Human
aucacagcuuguuuuggacuu

SEQ ID NO: 3644061 - RNA, 13 nt, Human
aucacaggcuggg

SEQ ID NO: 3644062 - RNA, 14 nt, Human
aucacaggcugggc

SEQ ID NO: 3644063 - RNA, 15 nt, Human
aucacaggcugggcu

SEQ ID NO: 3644064 - RNA, 19 nt, Human
aucacagggcagagccggg

SEQ ID NO: 3644065 - RNA, 22 nt, Human
aucacagggccccagaaggcag

SEQ ID NO: 3644066 - RNA, 15 nt, Human
aucacaguuuugguu

SEQ ID NO: 3644067 - RNA, 19 nt, Human
aucacaucuuuuaagacaa

SEQ ID NO: 3644068 - RNA, 22 nt, Human
aucacaugaauuauuacagugu

SEQ ID NO: 3644069 - RNA, 11 nt, Human
aucacauguau

SEQ ID NO: 3644070 - RNA, 14 nt, Human
aucacauguauguu

SEQ ID NO: 3644071 - RNA, 15 nt, Human
aucacauguggacuu

SEQ ID NO: 3644072 - RNA, 22 nt, Human
aucacauuauuugcauguuacc

SEQ ID NO: 3644073 - RNA, 24 nt, Human
aucacauugagcugauauaaauuc

SEQ ID NO: 3644074 - RNA, 18 nt, Human
aucaccaacgucugugcc

SEQ ID NO: 3644075 - RNA, 23 nt, Human
aucaccacaaacuguaauacaau

SEQ ID NO: 3644076 - RNA, 13 nt, Human
aucaccacaguuu

SEQ ID NO: 3644077 - RNA, 16 nt, Human
aucaccagaauaaacc

SEQ ID NO: 3644078 - RNA, 23 nt, Human
aucaccagagagggacugacacc

SEQ ID NO: 3644079 - RNA, 13 nt, Human
aucaccagggcca

SEQ ID NO: 3644080 - RNA, 15 nt, Human
aucacccagacauaa

SEQ ID NO: 3644081 - RNA, 23 nt, Human
aucacccagacauaaaggaaaag

SEQ ID NO: 3644082 - RNA, 23 nt, Human
aucacccuuaccaugugccugau

SEQ ID NO: 3644083 - RNA, 20 nt, Human
aucaccgacgcgucuccugu

SEQ ID NO: 3644084 - RNA, 16 nt, Human
aucaccgacugaaaau

SEQ ID NO: 3644085 - RNA, 19 nt, Human
auauauuuauuuaaagcau

SEQ ID NO: 3644086 - RNA, 14 nt, Human
auauauuucagaua

SEQ ID NO: 3644087 - RNA, 12 nt, Human
auauauuucuau

SEQ ID NO: 3644088 - RNA, 17 nt, Human
auauauuucuauuauua

SEQ ID NO: 3644089 - RNA, 13 nt, Human
auauauuugugua

SEQ ID NO: 3644090 - RNA, 15 nt, Human
auauauuuuaagacg

SEQ ID NO: 3644091 - RNA, 18 nt, Human
auauauuuuacaauuuuu

SEQ ID NO: 3644092 - RNA, 22 nt, Human
auauauuuuauuuuuagaauuu

SEQ ID NO: 3644093 - RNA, 22 nt, Human
auauauuuuguaugcaagcagu

SEQ ID NO: 3644094 - RNA, 16 nt, Human
auauauuuuuaagaua

SEQ ID NO: 3644095 - RNA, 15 nt, Human
auauauuuuuauauu

SEQ ID NO: 3644096 - RNA, 19 nt, Human
auauauuuuuauauuuacu

SEQ ID NO: 3644097 - RNA, 21 nt, Human
auauauuuuucacaguuuuuc

SEQ ID NO: 3644098 - RNA, 19 nt, Human
auauauuuuuuucugaaau

SEQ ID NO: 3644099 - RNA, 14 nt, Human
auaucaaaguauuu

SEQ ID NO: 3644100 - RNA, 13 nt, Human
auaucaaagucau

SEQ ID NO: 3644101 - RNA, 21 nt, Human
auaucaaagucauuaaagaca

SEQ ID NO: 3644102 - RNA, 12 nt, Human
auaucaaaugca

SEQ ID NO: 3644103 - RNA, 13 nt, Human
auaucaaaugcag

SEQ ID NO: 3644104 - RNA, 15 nt, Human
auaucaagaugauuc

SEQ ID NO: 3644105 - RNA, 13 nt, Human
auaucacagaaaa

SEQ ID NO: 3644106 - RNA, 14 nt, Human
auaucacucauuaa

SEQ ID NO: 3644107 - RNA, 11 nt, Human
auaucacuucc

SEQ ID NO: 3644108 - RNA, 22 nt, Human
auaucagccugagucuccugug

SEQ ID NO: 3644109 - RNA, 23 nt, Human
auaucaguaacccccuuaaauuu

SEQ ID NO: 3644110 - RNA, 17 nt, Human
auaucaguuacucagcc

SEQ ID NO: 3644111 - RNA, 20 nt, Human
auaucaguuacucagcccug

SEQ ID NO: 3644112 - RNA, 13 nt, Human
auaucaguuugcu

SEQ ID NO: 3644113 - RNA, 14 nt, Human
auaucauauguaua

SEQ ID NO: 3644114 - RNA, 14 nt, Human
auaucauauuggua

SEQ ID NO: 3644115 - RNA, 19 nt, Human
auaucauauugguauucac

SEQ ID NO: 3644116 - RNA, 21 nt, Human
auaucaucagcauaccuuuau

SEQ ID NO: 3644117 - RNA, 21 nt, Human
auaucaucuaccuagauuuaa

SEQ ID NO: 3644118 - RNA, 20 nt, Human
auaucaugcaaaauauguuu

SEQ ID NO: 3644119 - RNA, 18 nt, Human
auaucauguaaagaaaug

SEQ ID NO: 3644120 - RNA, 19 nt, Human
auaucauguaaagaaaugu

SEQ ID NO: 3644121 - RNA, 21 nt, Human
auaucauguaaagaaaugucu

SEQ ID NO: 3644122 - RNA, 22 nt, Human
auaucauguaaagaaaugucuu

SEQ ID NO: 3644123 - RNA, 23 nt, Human
auaucauuauaacugaaggagaa

SEQ ID NO: 3644124 - RNA, 13 nt, Human
auaucauucagca

SEQ ID NO: 3644125 - RNA, 14 nt, Human
auaucauucagcaa

SEQ ID NO: 3644126 - RNA, 21 nt, Human
auaucauuuauuuuuuacauu

SEQ ID NO: 3644127 - RNA, 12 nt, Human
auauccaaaagc

SEQ ID NO: 3644128 - RNA, 16 nt, Human
auauccaaguuugaau

SEQ ID NO: 3644129 - RNA, 14 nt, Human
auauccaccaccuc

SEQ ID NO: 3644130 - RNA, 16 nt, Human
auauccaccaccuccc

SEQ ID NO: 3644131 - RNA, 21 nt, Human
auauccacuuguccaugugaa

SEQ ID NO: 3644132 - RNA, 19 nt, Human
auauccaggucaacagaau

SEQ ID NO: 3644133 - RNA, 17 nt, Human
auauccauagugacuuu

SEQ ID NO: 3644134 - RNA, 21 nt, Human
auauccaugaccuaguuuucc

SEQ ID NO: 3644135 - RNA, 15 nt, Human
auauccauguacugu

SEQ ID NO: 3644136 - RNA, 20 nt, Human
auaucccaaacugugaugaa

SEQ ID NO: 3644137 - RNA, 13 nt, Human
auaucccacuggg

SEQ ID NO: 3644138 - RNA, 17 nt, Human
auaucccgggggugggg

SEQ ID NO: 3644139 - RNA, 20 nt, Human
auaucccuccuguugggaga

SEQ ID NO: 3644140 - RNA, 19 nt, Human
auaucccuuggacauuuua

SEQ ID NO: 3644141 - RNA, 13 nt, Human
auauccuaaacau

SEQ ID NO: 3644142 - RNA, 16 nt, Human
auauccuaauaaaaag

SEQ ID NO: 3644143 - RNA, 11 nt, Human
auauccucugu

SEQ ID NO: 3644144 - RNA, 13 nt, Human
auauccugagcca

SEQ ID NO: 3644145 - RNA, 15 nt, Human
auauccugagccauc

SEQ ID NO: 3644146 - RNA, 13 nt, Human
auauccugccuca

SEQ ID NO: 3644147 - RNA, 13 nt, Human
auauccugcuuga

SEQ ID NO: 3644148 - RNA, 14 nt, Human
auauccugugacug

SEQ ID NO: 3644149 - RNA, 22 nt, Human
auauccuucuagaucauacaca

SEQ ID NO: 3644150 - RNA, 21 nt, Human
auauccuuuuagucugcauau

SEQ ID NO: 3644151 - RNA, 14 nt, Human
auauccuuuucuuc

SEQ ID NO: 3644152 - RNA, 21 nt, Human
auauccuuuucuucuauguag

SEQ ID NO: 3644153 - RNA, 14 nt, Human
auaucuaaauuuag

SEQ ID NO: 3644154 - RNA, 13 nt, Human
auaucuaauauau

SEQ ID NO: 3644155 - RNA, 23 nt, Human
auaucuacagauagagaguuguu

SEQ ID NO: 3644156 - RNA, 21 nt, Human
auaucuaccccagacuagaug

SEQ ID NO: 3644157 - RNA, 23 nt, Human
auaucuaccccagacuagaugua

SEQ ID NO: 3644158 - RNA, 19 nt, Human
auaucuagguuuaugacag

SEQ ID NO: 3644159 - RNA, 22 nt, Human
auaucuagguuuaugacaguaa

SEQ ID NO: 3644160 - RNA, 14 nt, Human
auaucuaguaugaa

SEQ ID NO: 3644161 - RNA, 13 nt, Human
auaucuauaaaau

SEQ ID NO: 3644162 - RNA, 15 nt, Human
auaucuauaaaauag

SEQ ID NO: 3644163 - RNA, 16 nt, Human
auaucuauauauaauu

SEQ ID NO: 3644164 - RNA, 23 nt, Human
auaucuauauauaauucuguaca

SEQ ID NO: 3644165 - RNA, 15 nt, Human
auaucuauauauaua

SEQ ID NO: 3644166 - RNA, 19 nt, Human
auaucuauauauauaauuu

SEQ ID NO: 3644167 - RNA, 16 nt, Human
auaucuauauuuuaca

SEQ ID NO: 3644168 - RNA, 15 nt, Human
auaucuaucagagua

SEQ ID NO: 3644169 - RNA, 13 nt, Human
auaucuaucuauu

SEQ ID NO: 3644170 - RNA, 14 nt, Human
auaucuauuaauau

SEQ ID NO: 3644171 - RNA, 15 nt, Human
auaucuauuaauaua

SEQ ID NO: 3644172 - RNA, 22 nt, Human
auaucuauuaauauauguauua

SEQ ID NO: 3644173 - RNA, 23 nt, Human
auaucucaaugaaccauaaauuc

SEQ ID NO: 3644174 - RNA, 12 nt, Human
auaucucaucuc

SEQ ID NO: 3644175 - RNA, 23 nt, Human
auaucuccuuuguauucugucuu

SEQ ID NO: 3644176 - RNA, 22 nt, Human
auaucucuauuuaauuuugaca

SEQ ID NO: 3644177 - RNA, 14 nt, Human
auaucucuauuuga

SEQ ID NO: 3644178 - RNA, 23 nt, Human
auaucugaaaacuggaauaagaa

SEQ ID NO: 3644179 - RNA, 20 nt, Human
auaucugaaaauguaugugu

SEQ ID NO: 3644180 - RNA, 15 nt, Human
auaucugaagcccuc

SEQ ID NO: 3644181 - RNA, 17 nt, Human
auaucugaggaauucug

SEQ ID NO: 3644182 - RNA, 13 nt, Human
auaucugcaaaaa

SEQ ID NO: 3644183 - RNA, 16 nt, Human
auaucugccuuuauug

SEQ ID NO: 3644184 - RNA, 11 nt, Human
auaucugcugu

SEQ ID NO: 3644185 - RNA, 13 nt, Human
auaucugcuguau

SEQ ID NO: 3644186 - RNA, 13 nt, Human
auaucugcugucc

SEQ ID NO: 3644187 - RNA, 16 nt, Human
auaucugcuucagugg

SEQ ID NO: 3644188 - RNA, 15 nt, Human
auaucuggacaagcc

SEQ ID NO: 3644189 - RNA, 21 nt, Human
auauguucacaccuagcguca

SEQ ID NO: 3644190 - RNA, 14 nt, Human
auauguucacuguc

SEQ ID NO: 3644191 - RNA, 16 nt, Human
auauguucugacauaa

SEQ ID NO: 3644192 - RNA, 18 nt, Human
auauguugcuauaauaaa

SEQ ID NO: 3644193 - RNA, 13 nt, Human
auauguugcucag

SEQ ID NO: 3644194 - RNA, 21 nt, Human
auauguuguucuuacaaacca

SEQ ID NO: 3644195 - RNA, 14 nt, Human
auauguuucaaacu

SEQ ID NO: 3644196 - RNA, 14 nt, Human
auauguuucacaca

SEQ ID NO: 3644197 - RNA, 16 nt, Human
auauguuuccuucccu

SEQ ID NO: 3644198 - RNA, 18 nt, Human
auauguuuccuuguuuau

SEQ ID NO: 3644199 - RNA, 18 nt, Human
auauguuuuaagaggcag

SEQ ID NO: 3644200 - RNA, 15 nt, Human
auauguuuuauuuca

SEQ ID NO: 3644201 - RNA, 21 nt, Human
auauguuuugugggaacagau

SEQ ID NO: 3644202 - RNA, 12 nt, Human
auauuaaaaaac

SEQ ID NO: 3644203 - RNA, 18 nt, Human
auauuaaaaauauaaaac

SEQ ID NO: 3644204 - RNA, 19 nt, Human
auauuaaaaaugguaaaau

SEQ ID NO: 3644205 - RNA, 14 nt, Human
auauuaaaaauugg

SEQ ID NO: 3644206 - RNA, 18 nt, Human
auauuaaaagucacaaug

SEQ ID NO: 3644207 - RNA, 17 nt, Human
auauuaaaauauggcua

SEQ ID NO: 3644208 - RNA, 12 nt, Human
auauuaaacaaa

SEQ ID NO: 3644209 - RNA, 12 nt, Human
auauuaaagcca

SEQ ID NO: 3644210 - RNA, 15 nt, Human
auauuaaagccaugu

SEQ ID NO: 3644211 - RNA, 18 nt, Human
auauuaaagccauguuua

SEQ ID NO: 3644212 - RNA, 20 nt, Human
auauuaaauacagacacuaa

SEQ ID NO: 3644213 - RNA, 23 nt, Human
auauuaaauauguuagcaaagag

SEQ ID NO: 3644214 - RNA, 16 nt, Human
auauuaaauuuuuugu

SEQ ID NO: 3644215 - RNA, 18 nt, Human
auauuaaccagauauaua

SEQ ID NO: 3644216 - RNA, 15 nt, Human
auauuaagaaagacu

SEQ ID NO: 3644217 - RNA, 22 nt, Human
auauuaagaaagacuaucuaaa

SEQ ID NO: 3644218 - RNA, 13 nt, Human
auauuaagaauga

SEQ ID NO: 3644219 - RNA, 20 nt, Human
auauuaagcaugacagaaaa

SEQ ID NO: 3644220 - RNA, 16 nt, Human
auauuacaaugaucac

SEQ ID NO: 3644221 - RNA, 22 nt, Human
auauuacacaaauacuuauuca

SEQ ID NO: 3644222 - RNA, 12 nt, Human
auauuacauuua

SEQ ID NO: 3644223 - RNA, 22 nt, Human
auauuacauuuauuuauccaga

SEQ ID NO: 3644224 - RNA, 15 nt, Human
auauuaccagcaaga

SEQ ID NO: 3644225 - RNA, 17 nt, Human
auauuaccuaaugaaag

SEQ ID NO: 3644226 - RNA, 17 nt, Human
auauuacgguuugcccc

SEQ ID NO: 3644227 - RNA, 15 nt, Human
auauuacugacauuu

SEQ ID NO: 3644228 - RNA, 18 nt, Human
auauuacuuuaucacuuu

SEQ ID NO: 3644229 - RNA, 15 nt, Human
auauuagacuucugu

SEQ ID NO: 3644230 - RNA, 22 nt, Human
auauuagacuucuguuuucaau

SEQ ID NO: 3644231 - RNA, 13 nt, Human
auauuagauguga

SEQ ID NO: 3644232 - RNA, 14 nt, Human
auauuagaugugau

SEQ ID NO: 3644233 - RNA, 22 nt, Human
auauuagcauuuaguccaaugu

SEQ ID NO: 3644234 - RNA, 19 nt, Human
auauuaguauuaucuuguu

SEQ ID NO: 3644235 - RNA, 19 nt, Human
auauuagucauagaagaac

SEQ ID NO: 3644236 - RNA, 13 nt, Human
auauuaguugcuu

SEQ ID NO: 3644237 - RNA, 23 nt, Human
auauuauaaaggauaaagaagga

SEQ ID NO: 3644238 - RNA, 20 nt, Human
auauuauacaggaaagcaau

SEQ ID NO: 3644239 - RNA, 14 nt, Human
auauuauacuugua

SEQ ID NO: 3644240 - RNA, 22 nt, Human
auauuauacuuguaauuaugga

SEQ ID NO: 3644241 - RNA, 14 nt, Human
auauuauauuugga

SEQ ID NO: 3644242 - RNA, 16 nt, Human
auauuauauuuggaug

SEQ ID NO: 3644243 - RNA, 19 nt, Human
auauuaucaugcaaaugcu

SEQ ID NO: 3644244 - RNA, 13 nt, Human
auauuaucuuugu

SEQ ID NO: 3644245 - RNA, 16 nt, Human
auauuaugagaugcug

SEQ ID NO: 3644246 - RNA, 15 nt, Human
auauuaugcaaauuc

SEQ ID NO: 3644247 - RNA, 19 nt, Human
auauuaugcaaauucccag

SEQ ID NO: 3644248 - RNA, 16 nt, Human
auauuauguuaaaacu

SEQ ID NO: 3644249 - RNA, 13 nt, Human
auauuauuucuag

SEQ ID NO: 3644250 - RNA, 14 nt, Human
auauuauuucuagg

SEQ ID NO: 3644251 - RNA, 20 nt, Human
auauuauuucuaggaagaau

SEQ ID NO: 3644252 - RNA, 14 nt, Human
aucagggccugggg

SEQ ID NO: 3644253 - RNA, 22 nt, Human
aucagggccuggggccugagag

SEQ ID NO: 3644254 - RNA, 23 nt, Human
aucagggccuggggccugagaga

SEQ ID NO: 3644255 - RNA, 15 nt, Human
aucaggggagaaaaa

SEQ ID NO: 3644256 - RNA, 16 nt, Human
aucagggggaagaagc

SEQ ID NO: 3644257 - RNA, 23 nt, Human
aucagguaacuaacugcauacac

SEQ ID NO: 3644258 - RNA, 14 nt, Human
aucagguccugcuc

SEQ ID NO: 3644259 - RNA, 13 nt, Human
aucaggucuccca

SEQ ID NO: 3644260 - RNA, 17 nt, Human
aucagguuaggcaguau

SEQ ID NO: 3644261 - RNA, 15 nt, Human
aucaguaacccccuu

SEQ ID NO: 3644262 - RNA, 19 nt, Human
aucaguaacccccuuaaau

SEQ ID NO: 3644263 - RNA, 15 nt, Human
aucaguacuuguuuc

SEQ ID NO: 3644264 - RNA, 14 nt, Human
aucaguaggcuaau

SEQ ID NO: 3644265 - RNA, 16 nt, Human
aucaguaggcuaaugu

SEQ ID NO: 3644266 - RNA, 16 nt, Human
aucaguaguucacaua

SEQ ID NO: 3644267 - RNA, 23 nt, Human
aucaguaguuugcauuucagaaa

SEQ ID NO: 3644268 - RNA, 14 nt, Human
aucaguauaaacaa

SEQ ID NO: 3644269 - RNA, 18 nt, Human
aucaguauaaacaaaguu

SEQ ID NO: 3644270 - RNA, 21 nt, Human
aucaguauaauucuguacuga

SEQ ID NO: 3644271 - RNA, 15 nt, Human
aucaguauuaauacu

SEQ ID NO: 3644272 - RNA, 22 nt, Human
aucaguauugaagcauuuuaua

SEQ ID NO: 3644273 - RNA, 16 nt, Human
aucaguccccucccau

SEQ ID NO: 3644274 - RNA, 17 nt, Human
aucaguccccucccauc

SEQ ID NO: 3644275 - RNA, 22 nt, Human
aucaguccccucccaucuggga

SEQ ID NO: 3644276 - RNA, 23 nt, Human
aucaguccccucccaucugggag

SEQ ID NO: 3644277 - RNA, 23 nt, Human
aucaguccuagaauguuucauuu

SEQ ID NO: 3644278 - RNA, 13 nt, Human
aucagucucugag

SEQ ID NO: 3644279 - RNA, 13 nt, Human
aucagugcccucc

SEQ ID NO: 3644280 - RNA, 17 nt, Human
aucagugcccuccagga

SEQ ID NO: 3644281 - RNA, 19 nt, Human
aucaguguaccauuugccu

SEQ ID NO: 3644282 - RNA, 19 nt, Human
aucagugugucuaaauuug

SEQ ID NO: 3644283 - RNA, 23 nt, Human
aucagugugucuaaauuugaaug

SEQ ID NO: 3644284 - RNA, 12 nt, Human
aucaguguuaaa

SEQ ID NO: 3644285 - RNA, 14 nt, Human
aucaguguuaaaaa

SEQ ID NO: 3644286 - RNA, 15 nt, Human
aucaguguuggccau

SEQ ID NO: 3644287 - RNA, 21 nt, Human
aucaguguuguugcucuagga

SEQ ID NO: 3644288 - RNA, 22 nt, Human
aucaguguuuaugugcuauuaa

SEQ ID NO: 3644289 - RNA, 17 nt, Human
aucaguguuuuaaauuc

SEQ ID NO: 3644290 - RNA, 20 nt, Human
aucaguguuuuaaauucuga

SEQ ID NO: 3644291 - RNA, 18 nt, Human
aucaguuaacuauugcau

SEQ ID NO: 3644292 - RNA, 20 nt, Human
aucaguuacccacucggucc

SEQ ID NO: 3644293 - RNA, 21 nt, Human
aucaguuacucagcccugggc

SEQ ID NO: 3644294 - RNA, 18 nt, Human
aucaguuacucugaaggg

SEQ ID NO: 3644295 - RNA, 14 nt, Human
aucaguuauucauu

SEQ ID NO: 3644296 - RNA, 18 nt, Human
aucaguucauuagaaaua

SEQ ID NO: 3644297 - RNA, 22 nt, Human
aucaguugaggccaggaguuua

SEQ ID NO: 3644298 - RNA, 20 nt, Human
aucaguugcgcguucugaaa

SEQ ID NO: 3644299 - RNA, 22 nt, Human
aucaguuugaucacacuauuuu

SEQ ID NO: 3644300 - RNA, 22 nt, Human
aucaguuugcuagcagaaaucu

SEQ ID NO: 3644301 - RNA, 16 nt, Human
aucauaaacugugugc

SEQ ID NO: 3644302 - RNA, 13 nt, Human
aucauaaagucag

SEQ ID NO: 3644303 - RNA, 14 nt, Human
aucauaaaguuaga

SEQ ID NO: 3644304 - RNA, 15 nt, Human
aucauaaaguuagaa

SEQ ID NO: 3644305 - RNA, 16 nt, Human
aucauaaaguuagaau

SEQ ID NO: 3644306 - RNA, 23 nt, Human
aucauaaguauuuggaauuagaa

SEQ ID NO: 3644307 - RNA, 17 nt, Human
aucauaagugaauuuau

SEQ ID NO: 3644308 - RNA, 19 nt, Human
aucauaagugaauuuauac

SEQ ID NO: 3644309 - RNA, 18 nt, Human
aucauacuccuaugcuuu

SEQ ID NO: 3644310 - RNA, 17 nt, Human
aucauagguauuucaaa

SEQ ID NO: 3644311 - RNA, 18 nt, Human
aucauagguauuucaaaa

SEQ ID NO: 3644312 - RNA, 14 nt, Human
aucauaguuuuauu

SEQ ID NO: 3644313 - RNA, 18 nt, Human
aucauauaaauagaaugu

SEQ ID NO: 3644314 - RNA, 22 nt, Human
aucauauaaauagaauguaaau

SEQ ID NO: 3644315 - RNA, 20 nt, Human
aucauauauauacauacaug

SEQ ID NO: 3644316 - RNA, 18 nt, Human
aucauaugauucugcuuu

SEQ ID NO: 3644317 - RNA, 16 nt, Human
aucauauuauacagac

SEQ ID NO: 3644318 - RNA, 17 nt, Human
aucauauugaugaaaag

SEQ ID NO: 3644319 - RNA, 23 nt, Human
aucauauugguauauccuuuucu

SEQ ID NO: 3644320 - RNA, 20 nt, Human
aucaucaacaagauuuccuu

SEQ ID NO: 3644321 - RNA, 17 nt, Human
aucaucaagaagggcug

SEQ ID NO: 3644322 - RNA, 18 nt, Human
aucaucaagaagggcugc

SEQ ID NO: 3644323 - RNA, 22 nt, Human
aucaucaagaagggcugcauga

SEQ ID NO: 3644324 - RNA, 15 nt, Human
aucaucaagagaauu

SEQ ID NO: 3644325 - RNA, 19 nt, Human
aucaucaaggcacugccug

SEQ ID NO: 3644326 - RNA, 16 nt, Human
aucaucaaguaauaca

SEQ ID NO: 3644327 - RNA, 18 nt, Human
aucaucaaguaauacaaa

SEQ ID NO: 3644328 - RNA, 21 nt, Human
aucaucacguauguuauacaa

SEQ ID NO: 3644329 - RNA, 20 nt, Human
aucaucagaaaggaaaaaca

SEQ ID NO: 3644330 - RNA, 14 nt, Human
aucaucagggccug

SEQ ID NO: 3644331 - RNA, 15 nt, Human
aucaucagggccugg

SEQ ID NO: 3644332 - RNA, 19 nt, Human
aucaucaguauugaagcau

SEQ ID NO: 3644333 - RNA, 14 nt, Human
aggcauuuccuggg

SEQ ID NO: 3644334 - RNA, 16 nt, Human
aggcauuuccugggug

SEQ ID NO: 3644335 - RNA, 20 nt, Human
aggcauuuccuggguggcua

SEQ ID NO: 3644336 - RNA, 19 nt, Human
aggcauuuguaaauauuaa

SEQ ID NO: 3644337 - RNA, 21 nt, Human
aggcauuuucccccuuggcuc

SEQ ID NO: 3644338 - RNA, 15 nt, Human
aggcauuuuuaccau

SEQ ID NO: 3644339 - RNA, 22 nt, Human
aggccaaaccucuguucagugu

SEQ ID NO: 3644340 - RNA, 16 nt, Human
aggccaaacucaccug

SEQ ID NO: 3644341 - RNA, 20 nt, Human
aggccaaacucaccugcccc

SEQ ID NO: 3644342 - RNA, 12 nt, Human
aggccaaacugc

SEQ ID NO: 3644343 - RNA, 18 nt, Human
aggccaaagacaaauagu

SEQ ID NO: 3644344 - RNA, 16 nt, Human
aggccaaaggaagcac

SEQ ID NO: 3644345 - RNA, 18 nt, Human
aggccaaaggaagcacau

SEQ ID NO: 3644346 - RNA, 23 nt, Human
aggccaaaggaagcacaugccuc

SEQ ID NO: 3644347 - RNA, 14 nt, Human
aggccaagaaacgu

SEQ ID NO: 3644348 - RNA, 16 nt, Human
aggccaagaauauugc

SEQ ID NO: 3644349 - RNA, 14 nt, Human
aggccaagagcaga

SEQ ID NO: 3644350 - RNA, 21 nt, Human
aggccaagagguuuggcuccu

SEQ ID NO: 3644351 - RNA, 18 nt, Human
aggccaagaguggcccca

SEQ ID NO: 3644352 - RNA, 20 nt, Human
aggccaagaguggccccacc

SEQ ID NO: 3644353 - RNA, 23 nt, Human
aggccaagaguggccccaccugg

SEQ ID NO: 3644354 - RNA, 17 nt, Human
aggccaaggccuucucc

SEQ ID NO: 3644355 - RNA, 18 nt, Human
aggccaaggcggguggau

SEQ ID NO: 3644356 - RNA, 21 nt, Human
aggccaagguguccuacagaa

SEQ ID NO: 3644357 - RNA, 23 nt, Human
aggccaaguccgcagaagcccug

SEQ ID NO: 3644358 - RNA, 23 nt, Human
aggccaaguuuguaucaggugcc

SEQ ID NO: 3644359 - RNA, 15 nt, Human
aggccacaagacccu

SEQ ID NO: 3644360 - RNA, 21 nt, Human
aggccacacuucaaacuacuu

SEQ ID NO: 3644361 - RNA, 20 nt, Human
aggccacauccacagucucc

SEQ ID NO: 3644362 - RNA, 14 nt, Human
aggccacaugggag

SEQ ID NO: 3644363 - RNA, 22 nt, Human
aggccacauggggcugggcagc

SEQ ID NO: 3644364 - RNA, 13 nt, Human
aggccaccaggau

SEQ ID NO: 3644365 - RNA, 15 nt, Human
aggccaccuccccag

SEQ ID NO: 3644366 - RNA, 12 nt, Human
aggccaccuccu

SEQ ID NO: 3644367 - RNA, 15 nt, Human
aggccaccucuccaa

SEQ ID NO: 3644368 - RNA, 16 nt, Human
aggccaccucuccaag

SEQ ID NO: 3644369 - RNA, 23 nt, Human
aggccaccucuccaagggcuucu

SEQ ID NO: 3644370 - RNA, 11 nt, Human
aggccaccugc

SEQ ID NO: 3644371 - RNA, 14 nt, Human
aggccaccugcagg

SEQ ID NO: 3644372 - RNA, 14 nt, Human
aggccaccugcccc

SEQ ID NO: 3644373 - RNA, 19 nt, Human
aggccaccugcccccuucu

SEQ ID NO: 3644374 - RNA, 22 nt, Human
aggccaccugcccccuucuccc

SEQ ID NO: 3644375 - RNA, 19 nt, Human
aggccacgugauguggagg

SEQ ID NO: 3644376 - RNA, 23 nt, Human
aggccacgugauguggagggcac

SEQ ID NO: 3644377 - RNA, 20 nt, Human
aggccacuggagacgcauau

SEQ ID NO: 3644378 - RNA, 19 nt, Human
aggccacuggccccugaga

SEQ ID NO: 3644379 - RNA, 14 nt, Human
aggccacuguguuc

SEQ ID NO: 3644380 - RNA, 16 nt, Human
aggccagaccauggac

SEQ ID NO: 3644381 - RNA, 15 nt, Human
aggccagagcccacu

SEQ ID NO: 3644382 - RNA, 17 nt, Human
aggccagagcccacucc

SEQ ID NO: 3644383 - RNA, 18 nt, Human
aggccagaggcccccagc

SEQ ID NO: 3644384 - RNA, 20 nt, Human
aggccagagggagugacaga

SEQ ID NO: 3644385 - RNA, 17 nt, Human
aggccagaguggccugg

SEQ ID NO: 3644386 - RNA, 21 nt, Human
aggccagaguggccuggccag

SEQ ID NO: 3644387 - RNA, 14 nt, Human
aggccagccuccga

SEQ ID NO: 3644388 - RNA, 23 nt, Human
aggccagccuggccuccugccuc

SEQ ID NO: 3644389 - RNA, 13 nt, Human
aggccagcugccu

SEQ ID NO: 3644390 - RNA, 14 nt, Human
aggccagcugcuug

SEQ ID NO: 3644391 - RNA, 16 nt, Human
aggccagcugcuuggg

SEQ ID NO: 3644392 - RNA, 15 nt, Human
aggccagcuggcagc

SEQ ID NO: 3644393 - RNA, 16 nt, Human
aggccagcuggcagca

SEQ ID NO: 3644394 - RNA, 19 nt, Human
aggccagcuggcagcagag

SEQ ID NO: 3644395 - RNA, 16 nt, Human
aggccagcugugguuu

SEQ ID NO: 3644396 - RNA, 20 nt, Human
aggccagcugugguuuucuu

SEQ ID NO: 3644397 - RNA, 21 nt, Human
aggccagcugugguuuucuuu

SEQ ID NO: 3644398 - RNA, 18 nt, Human
aggccaggacucugcagc

SEQ ID NO: 3644399 - RNA, 20 nt, Human
aggccaggacucugcagccu

SEQ ID NO: 3644400 - RNA, 18 nt, Human
aggccaggccaccaggau

SEQ ID NO: 3644401 - RNA, 15 nt, Human
aggccaggccagcug

SEQ ID NO: 3644402 - RNA, 15 nt, Human
aggccaggcccucug

SEQ ID NO: 3644403 - RNA, 18 nt, Human
aggccaggcccucugccc

SEQ ID NO: 3644404 - RNA, 19 nt, Human
aggccaggcccucugccca

SEQ ID NO: 3644405 - RNA, 19 nt, Human
aggccagggacaguaauaa

SEQ ID NO: 3644406 - RNA, 19 nt, Human
aggccagggagcaguggcu

SEQ ID NO: 3644407 - RNA, 15 nt, Human
aggccagggcagagu

SEQ ID NO: 3644408 - RNA, 19 nt, Human
aggccagggggccaguccc

SEQ ID NO: 3644409 - RNA, 12 nt, Human
aggccaggguca

SEQ ID NO: 3644410 - RNA, 15 nt, Human
aggccaggugcaggu

SEQ ID NO: 3644411 - RNA, 14 nt, Human
aggccagugagcca

SEQ ID NO: 3644412 - RNA, 16 nt, Human
aggccauaaaacaggu

SEQ ID NO: 3644413 - RNA, 21 nt, Human
aggccaucaucaguggagcca

SEQ ID NO: 3644414 - RNA, 11 nt, Human
aggccaucugg

SEQ ID NO: 3644415 - RNA, 22 nt, Human
aggccaucugggcuccuccagg

SEQ ID NO: 3644416 - RNA, 15 nt, Human
aggccaucuuccagg

SEQ ID NO: 3644417 - RNA, 19 nt, Human
aggccaucuuccagguggg

SEQ ID NO: 3644418 - RNA, 19 nt, Human
aggccaugaaaaaaaugau

SEQ ID NO: 3644419 - RNA, 19 nt, Human
aggccaugauucgcccaaa

SEQ ID NO: 3644420 - RNA, 17 nt, Human
aggccauggagagcugg

SEQ ID NO: 3644421 - RNA, 20 nt, Human
aggccauggaggcaguagga

SEQ ID NO: 3644422 - RNA, 21 nt, Human
aggccaugggcacugugggua

SEQ ID NO: 3644423 - RNA, 16 nt, Human
aggccaugggccuccu

SEQ ID NO: 3644424 - RNA, 17 nt, Human
aggccaugggccuccug

SEQ ID NO: 3644425 - RNA, 20 nt, Human
aggccauguuccaauaaaca

SEQ ID NO: 3644426 - RNA, 21 nt, Human
aggccauguuccaauaaacag

SEQ ID NO: 3644427 - RNA, 23 nt, Human
aggccauguuccaauaaacagga

SEQ ID NO: 3644428 - RNA, 15 nt, Human
aggccauucuuuccc

SEQ ID NO: 3644429 - RNA, 19 nt, Human
aggccauugugaaccaaug

SEQ ID NO: 3644430 - RNA, 20 nt, Human
aggccauugugaaccaaugc

SEQ ID NO: 3644431 - RNA, 14 nt, Human
aggccauuuuuggu

SEQ ID NO: 3644432 - RNA, 13 nt, Human
aggcccaaagccu

SEQ ID NO: 3644433 - RNA, 23 nt, Human
aggcccaaauuaucaagcuaaua

SEQ ID NO: 3644434 - RNA, 20 nt, Human
aggcccaagagaugaagagu

SEQ ID NO: 3644435 - RNA, 14 nt, Human
aggcccacacacag

SEQ ID NO: 3644436 - RNA, 16 nt, Human
aggcccacacacaggu

SEQ ID NO: 3644437 - RNA, 19 nt, Human
aggcccacaggaggcaagc

SEQ ID NO: 3644438 - RNA, 17 nt, Human
aggcccacauuggaaga

SEQ ID NO: 3644439 - RNA, 16 nt, Human
aggcccacugugccuc

SEQ ID NO: 3644440 - RNA, 16 nt, Human
aggcccagagggccug

SEQ ID NO: 3644441 - RNA, 18 nt, Human
aggcccagagggccugca

SEQ ID NO: 3644442 - RNA, 20 nt, Human
aggcccagagggccugcaag

SEQ ID NO: 3644443 - RNA, 21 nt, Human
aggcccagagggccugcaagg

SEQ ID NO: 3644444 - RNA, 22 nt, Human
aggcccagcauugcugguucua

SEQ ID NO: 3644445 - RNA, 13 nt, Human
aggcccagccccu

SEQ ID NO: 3644446 - RNA, 20 nt, Human
aggcccagccgacccccucu

SEQ ID NO: 3644447 - RNA, 15 nt, Human
aggcccaggcugccg

SEQ ID NO: 3644448 - RNA, 16 nt, Human
aggcccaggcugggaa

SEQ ID NO: 3644449 - RNA, 17 nt, Human
aggcccagugagaugca

SEQ ID NO: 3644450 - RNA, 21 nt, Human
aggcccaugggaggcuggagu

SEQ ID NO: 3644451 - RNA, 23 nt, Human
aggccccaaaaccacagcccugu

SEQ ID NO: 3644452 - RNA, 21 nt, Human
aggccccaaaggaaaaagcac

SEQ ID NO: 3644453 - RNA, 22 nt, Human
aucagaaaguaauuucuucuca

SEQ ID NO: 3644454 - RNA, 14 nt, Human
aucagaaauacaga

SEQ ID NO: 3644455 - RNA, 23 nt, Human
aucagaaauacagauuuugauag

SEQ ID NO: 3644456 - RNA, 15 nt, Human
aucagaaauuuuuau

SEQ ID NO: 3644457 - RNA, 14 nt, Human
aucagaacagcaga

SEQ ID NO: 3644458 - RNA, 14 nt, Human
aucagaacagcugu

SEQ ID NO: 3644459 - RNA, 15 nt, Human
aucagaacagcuguu

SEQ ID NO: 3644460 - RNA, 23 nt, Human
aucagaagaccacaaaaauugac

SEQ ID NO: 3644461 - RNA, 12 nt, Human
aucagaagagag

SEQ ID NO: 3644462 - RNA, 13 nt, Human
aucagaagauaac

SEQ ID NO: 3644463 - RNA, 17 nt, Human
aucagaagccuauugua

SEQ ID NO: 3644464 - RNA, 18 nt, Human
aucagaaguuucucagcu

SEQ ID NO: 3644465 - RNA, 20 nt, Human
aucagaauggaagagagaaa

SEQ ID NO: 3644466 - RNA, 13 nt, Human
aucagaauuugug

SEQ ID NO: 3644467 - RNA, 14 nt, Human
aucagaauuugugu

SEQ ID NO: 3644468 - RNA, 20 nt, Human
aucagaccauaauguuacau

SEQ ID NO: 3644469 - RNA, 22 nt, Human
aucagaccuuggaucagaugaa

SEQ ID NO: 3644470 - RNA, 13 nt, Human
aucagacugacag

SEQ ID NO: 3644471 - RNA, 18 nt, Human
aucagacuucacacugca

SEQ ID NO: 3644472 - RNA, 14 nt, Human
aucagagaaggaac

SEQ ID NO: 3644473 - RNA, 22 nt, Human
aucagagaugcaccaccaagcc

SEQ ID NO: 3644474 - RNA, 21 nt, Human
aucagagcagcagugaaaaca

SEQ ID NO: 3644475 - RNA, 15 nt, Human
aucagagguaucuua

SEQ ID NO: 3644476 - RNA, 15 nt, Human
aucagaguagaaaua

SEQ ID NO: 3644477 - RNA, 21 nt, Human
aggccccgaggacccagaccc

SEQ ID NO: 3644478 - RNA, 22 nt, Human
aggccccgcuuguccagcgccu

SEQ ID NO: 3644479 - RNA, 21 nt, Human
aggccccuauguaguccgugc

SEQ ID NO: 3644480 - RNA, 14 nt, Human
aggccccuggaggc

SEQ ID NO: 3644481 - RNA, 12 nt, Human
aggccccuggcc

SEQ ID NO: 3644482 - RNA, 16 nt, Human
aggccccuggcccagc

SEQ ID NO: 3644483 - RNA, 18 nt, Human
aggcccgagcagcugagc

SEQ ID NO: 3644484 - RNA, 15 nt, Human
aggcccggccucuca

SEQ ID NO: 3644485 - RNA, 16 nt, Human
aggcccggcuccaggc

SEQ ID NO: 3644486 - RNA, 21 nt, Human
aggcccggcuccaggcuccuu

SEQ ID NO: 3644487 - RNA, 15 nt, Human
aggcccguccggcag

SEQ ID NO: 3644488 - RNA, 23 nt, Human
aggcccgucuguccaucugcccg

SEQ ID NO: 3644489 - RNA, 18 nt, Human
aggcccucaagucuuucu

SEQ ID NO: 3644490 - RNA, 18 nt, Human
aggcccuccacaccugcg

SEQ ID NO: 3644491 - RNA, 20 nt, Human
aggcccuccacaccugcggc

SEQ ID NO: 3644492 - RNA, 19 nt, Human
aggcccuccucccucccag

SEQ ID NO: 3644493 - RNA, 23 nt, Human
aggcccuccucccucccagcucc

SEQ ID NO: 3644494 - RNA, 20 nt, Human
aggcccucgggcccagcccc

SEQ ID NO: 3644495 - RNA, 13 nt, Human
aggcccucuggag

SEQ ID NO: 3644496 - RNA, 15 nt, Human
aggcccucuggagug

SEQ ID NO: 3644497 - RNA, 13 nt, Human
aggcccugcacug

SEQ ID NO: 3644498 - RNA, 16 nt, Human
aggcccugcacugucc

SEQ ID NO: 3644499 - RNA, 17 nt, Human
aggcccugcacuguccu

SEQ ID NO: 3644500 - RNA, 21 nt, Human
aggcccugcacuguccugcuc

SEQ ID NO: 3644501 - RNA, 11 nt, Human
aggcccugcag

SEQ ID NO: 3644502 - RNA, 12 nt, Human
aggcccugcucc

SEQ ID NO: 3644503 - RNA, 18 nt, Human
aggcccugcuccugcagc

SEQ ID NO: 3644504 - RNA, 21 nt, Human
aggcccuggaucagcguggcc

SEQ ID NO: 3644505 - RNA, 13 nt, Human
aggcccugucugu

SEQ ID NO: 3644506 - RNA, 22 nt, Human
aggcccuuauuuucaagaaacu

SEQ ID NO: 3644507 - RNA, 19 nt, Human
aggcccuuccucuccacug

SEQ ID NO: 3644508 - RNA, 15 nt, Human
aggcccuucucucca

SEQ ID NO: 3644509 - RNA, 22 nt, Human
aggcccuucucuccagccccug

SEQ ID NO: 3644510 - RNA, 22 nt, Human
aggcccuugucggccccaccag

SEQ ID NO: 3644511 - RNA, 16 nt, Human
aggcccuuuccucagg

SEQ ID NO: 3644512 - RNA, 16 nt, Human
aggccgaagcucuggc

SEQ ID NO: 3644513 - RNA, 19 nt, Human
aggccgagaagcaagaaag

SEQ ID NO: 3644514 - RNA, 16 nt, Human
aggccgagaagccagu

SEQ ID NO: 3644515 - RNA, 19 nt, Human
aggccgauuugggaaccaa

SEQ ID NO: 3644516 - RNA, 12 nt, Human
aggccgcagcuc

SEQ ID NO: 3644517 - RNA, 13 nt, Human
aggccgcagcucu

SEQ ID NO: 3644518 - RNA, 17 nt, Human
aggccgcagcucuugcc

SEQ ID NO: 3644519 - RNA, 18 nt, Human
aggccgccccagccucug

SEQ ID NO: 3644520 - RNA, 16 nt, Human
aggccgcgcccuuucc

SEQ ID NO: 3644521 - RNA, 20 nt, Human
aggccgcgcguccagcugcc

SEQ ID NO: 3644522 - RNA, 13 nt, Human
aggccggcagccc

SEQ ID NO: 3644523 - RNA, 19 nt, Human
aggccggcagccccagccu

SEQ ID NO: 3644524 - RNA, 20 nt, Human
aggccggcagccccagccug

SEQ ID NO: 3644525 - RNA, 13 nt, Human
aggccggccagcc

SEQ ID NO: 3644526 - RNA, 20 nt, Human
aggccggcgagcccugugga

SEQ ID NO: 3644527 - RNA, 13 nt, Human
aggccgggcagag

SEQ ID NO: 3644528 - RNA, 18 nt, Human
aggccgggccuguacagu

SEQ ID NO: 3644529 - RNA, 22 nt, Human
aggccgggccuguacagucugu

SEQ ID NO: 3644530 - RNA, 14 nt, Human
aggccggugugccu

SEQ ID NO: 3644531 - RNA, 22 nt, Human
aggccgugacgucuggguggcc

SEQ ID NO: 3644532 - RNA, 15 nt, Human
aggccguggcugcug

SEQ ID NO: 3644533 - RNA, 16 nt, Human
aggccuaaaaguaaac

SEQ ID NO: 3644534 - RNA, 17 nt, Human
aggccuaaaaguaaaca

SEQ ID NO: 3644535 - RNA, 22 nt, Human
aggccuaaucucauaccucuga

SEQ ID NO: 3644536 - RNA, 16 nt, Human
aggccuaccccgcaga

SEQ ID NO: 3644537 - RNA, 13 nt, Human
aggccuacuccug

SEQ ID NO: 3644538 - RNA, 17 nt, Human
aggccuacuccugucuu

SEQ ID NO: 3644539 - RNA, 14 nt, Human
aggccuagacucug

SEQ ID NO: 3644540 - RNA, 17 nt, Human
aggccuagacucugucu

SEQ ID NO: 3644541 - RNA, 18 nt, Human
aggccuaggaggguccuc

SEQ ID NO: 3644542 - RNA, 20 nt, Human
aggccuagucagccacaugg

SEQ ID NO: 3644543 - RNA, 15 nt, Human
aggccuaguccugcg

SEQ ID NO: 3644544 - RNA, 18 nt, Human
aggccuauguugauccau

SEQ ID NO: 3644545 - RNA, 13 nt, Human
aggccuauuucau

SEQ ID NO: 3644546 - RNA, 18 nt, Human
aggccucaacuccuccca

SEQ ID NO: 3644547 - RNA, 13 nt, Human
aggccucagccag

SEQ ID NO: 3644548 - RNA, 13 nt, Human
aggccucagggcu

SEQ ID NO: 3644549 - RNA, 14 nt, Human
aggccucaggugcu

SEQ ID NO: 3644550 - RNA, 19 nt, Human
aggccucaggugcugucca

SEQ ID NO: 3644551 - RNA, 21 nt, Human
aggccucaggugcuguccaug

SEQ ID NO: 3644552 - RNA, 14 nt, Human
aggccuccagcuca

SEQ ID NO: 3644553 - RNA, 16 nt, Human
aggccuccagcucagc

SEQ ID NO: 3644554 - RNA, 18 nt, Human
aggccuccagcucagcag

SEQ ID NO: 3644555 - RNA, 20 nt, Human
aggccuccagcucagcagug

SEQ ID NO: 3644556 - RNA, 17 nt, Human
aggccuccaucucaugu

SEQ ID NO: 3644557 - RNA, 15 nt, Human
aggccucccacagug

SEQ ID NO: 3644558 - RNA, 13 nt, Human
aggccucccucaa

SEQ ID NO: 3644559 - RNA, 15 nt, Human
aggccucccucucuc

SEQ ID NO: 3644560 - RNA, 22 nt, Human
aggccucccucucucuucugcu

SEQ ID NO: 3644561 - RNA, 14 nt, Human
aggccuccuggccc

SEQ ID NO: 3644562 - RNA, 14 nt, Human
aggccuccuggcug

SEQ ID NO: 3644563 - RNA, 22 nt, Human
aggccuccuguggccugccagu

SEQ ID NO: 3644564 - RNA, 23 nt, Human
aggccuccuguggccugccaguc

SEQ ID NO: 3644565 - RNA, 14 nt, Human
aggccucgcaggaa

SEQ ID NO: 3644566 - RNA, 20 nt, Human
aggccucucaccucugugcc

SEQ ID NO: 3644567 - RNA, 12 nt, Human
aggccucucuca

SEQ ID NO: 3644568 - RNA, 18 nt, Human
aggccucugccucacaac

SEQ ID NO: 3644569 - RNA, 15 nt, Human
aggccucuuggagac

SEQ ID NO: 3644570 - RNA, 17 nt, Human
aggccugaaauccuggu

SEQ ID NO: 3644571 - RNA, 23 nt, Human
aggccugaaucaugagccugcug

SEQ ID NO: 3644572 - RNA, 16 nt, Human
aggccugacugccaag

SEQ ID NO: 3644573 - RNA, 21 nt, Human
aggccugacugccaagccaug

SEQ ID NO: 3644574 - RNA, 16 nt, Human
aggccugacuucugcu

SEQ ID NO: 3644575 - RNA, 21 nt, Human
aggccugacuucugcuggcau

SEQ ID NO: 3644576 - RNA, 14 nt, Human
aggccugagaccca

SEQ ID NO: 3644577 - RNA, 23 nt, Human
aggccugagauuucaucugcucu

SEQ ID NO: 3644578 - RNA, 14 nt, Human
aggccugagcgcuc

SEQ ID NO: 3644579 - RNA, 21 nt, Human
aggccugagcgcuccugccgc

SEQ ID NO: 3644580 - RNA, 16 nt, Human
aggccugaggaugagc

SEQ ID NO: 3644581 - RNA, 19 nt, Human
aggccugaggaugagcugg

SEQ ID NO: 3644582 - RNA, 23 nt, Human
aggccugaggaugagcuggaagg

SEQ ID NO: 3644583 - RNA, 19 nt, Human
aggccugagguuacuggaa

SEQ ID NO: 3644584 - RNA, 14 nt, Human
aggccugcacacaa

SEQ ID NO: 3644585 - RNA, 23 nt, Human
aggccugccagacggcacccacc

SEQ ID NO: 3644586 - RNA, 17 nt, Human
aggccugccuccagggc

SEQ ID NO: 3644587 - RNA, 21 nt, Human
aggccugccuccagggcugga

SEQ ID NO: 3644588 - RNA, 22 nt, Human
aggccugccucccacuucacug

SEQ ID NO: 3644589 - RNA, 18 nt, Human
aggccugcgacccugggg

SEQ ID NO: 3644590 - RNA, 15 nt, Human
aggccugcucaggga

SEQ ID NO: 3644591 - RNA, 14 nt, Human
aggccugcucccug

SEQ ID NO: 3644592 - RNA, 20 nt, Human
aggccugcuuugucuccucu

SEQ ID NO: 3644593 - RNA, 17 nt, Human
aggccuggacuuuccug

SEQ ID NO: 3644594 - RNA, 22 nt, Human
aggccuggacuuuccugcaacu

SEQ ID NO: 3644595 - RNA, 15 nt, Human
aggccuggcacagug

SEQ ID NO: 3644596 - RNA, 13 nt, Human
aggccuggccaga

SEQ ID NO: 3644597 - RNA, 17 nt, Human
aggccuggccagaugca

SEQ ID NO: 3644598 - RNA, 23 nt, Human
aggccuggccagaugcaccagcc

SEQ ID NO: 3644599 - RNA, 14 nt, Human
aggccuggccaggc

SEQ ID NO: 3644600 - RNA, 15 nt, Human
aggccuggccaggca

SEQ ID NO: 3644601 - RNA, 20 nt, Human
aggccuggccuuggagaacg

SEQ ID NO: 3644602 - RNA, 20 nt, Human
aggccugggccgcugccacg

SEQ ID NO: 3644603 - RNA, 18 nt, Human
aggccuggggugacccgg

SEQ ID NO: 3644604 - RNA, 15 nt, Human
aggccugucccuggc

SEQ ID NO: 3644605 - RNA, 23 nt, Human
aggccugucccuggccaucucug

SEQ ID NO: 3644606 - RNA, 14 nt, Human
aggccugucuguga

SEQ ID NO: 3644607 - RNA, 23 nt, Human
aggccuguguagcugugaccugc

SEQ ID NO: 3644608 - RNA, 20 nt, Human
aggccuguugcuauagagcc

SEQ ID NO: 3644609 - RNA, 18 nt, Human
aggccuguuuggccucuc

SEQ ID NO: 3644610 - RNA, 18 nt, Human
aggccuuaucauucauuc

SEQ ID NO: 3644611 - RNA, 19 nt, Human
aggccuuaucauucauucu

SEQ ID NO: 3644612 - RNA, 17 nt, Human
aggccuuaucuccaaga

SEQ ID NO: 3644613 - RNA, 17 nt, Human
aucaucaguauugaagc

SEQ ID NO: 3644614 - RNA, 14 nt, Human
aucaucauggccag

SEQ ID NO: 3644615 - RNA, 15 nt, Human
aucaucauuauuauu

SEQ ID NO: 3644616 - RNA, 13 nt, Human
aucauccacacau

SEQ ID NO: 3644617 - RNA, 14 nt, Human
aucauccagaaguu

SEQ ID NO: 3644618 - RNA, 17 nt, Human
aucauccagauguggcu

SEQ ID NO: 3644619 - RNA, 19 nt, Human
aucaucccuuucccuuggu

SEQ ID NO: 3644620 - RNA, 15 nt, Human
aucauccucuggcuu

SEQ ID NO: 3644621 - RNA, 12 nt, Human
aucaucuaaguc

SEQ ID NO: 3644622 - RNA, 24 nt, Human
augacguacaaguaguucuguauu

SEQ ID NO: 3644623 - RNA, 23 nt, Human
augacuaaaaauauuauaacuua

SEQ ID NO: 3644624 - RNA, 16 nt, Human
augacuaaagagagaa

SEQ ID NO: 3644625 - RNA, 19 nt, Human
augacuaaagagagaaugu

SEQ ID NO: 3644626 - RNA, 20 nt, Human
augacuaaagagagaaugua

SEQ ID NO: 3644627 - RNA, 18 nt, Human
augacuagaaagugaaua

SEQ ID NO: 3644628 - RNA, 19 nt, Human
augacuagaggcagggagg

SEQ ID NO: 3644629 - RNA, 16 nt, Human
augacucaagauuccc

SEQ ID NO: 3644630 - RNA, 19 nt, Human
augacucaagauucccagg

SEQ ID NO: 3644631 - RNA, 20 nt, Human
augacucaagauucccagga

SEQ ID NO: 3644632 - RNA, 14 nt, Human
augacucagaauau

SEQ ID NO: 3644633 - RNA, 19 nt, Human
augacucaggacauccccc

SEQ ID NO: 3644634 - RNA, 18 nt, Human
augacucuugacucuugc

SEQ ID NO: 3644635 - RNA, 18 nt, Human
augacucuuuauugucug

SEQ ID NO: 3644636 - RNA, 16 nt, Human
augacugaaagcacug

SEQ ID NO: 3644637 - RNA, 13 nt, Human
augacugcauuuu

SEQ ID NO: 3644638 - RNA, 17 nt, Human
augacugcuugcccuaa

SEQ ID NO: 3644639 - RNA, 14 nt, Human
augacuggcauuuu

SEQ ID NO: 3644640 - RNA, 15 nt, Human
augacuggcauuuua

SEQ ID NO: 3644641 - RNA, 13 nt, Human
augacuguagaau

SEQ ID NO: 3644642 - RNA, 14 nt, Human
augacuguguugua

SEQ ID NO: 3644643 - RNA, 14 nt, Human
augacuguuuuuaa

SEQ ID NO: 3644644 - RNA, 21 nt, Human
augacuguuuuucggacaguu

SEQ ID NO: 3644645 - RNA, 15 nt, Human
augacuguuuuuuaa

SEQ ID NO: 3644646 - RNA, 17 nt, Human
augacuuaguacaaagu

SEQ ID NO: 3644647 - RNA, 16 nt, Human
augacuugcuacuuuu

SEQ ID NO: 3644648 - RNA, 21 nt, Human
augacuugggcacccccagcc

SEQ ID NO: 3644649 - RNA, 22 nt, Human
augacuugggcacccccagccu

SEQ ID NO: 3644650 - RNA, 23 nt, Human
augacuuggugucuaauguguag

SEQ ID NO: 3644651 - RNA, 17 nt, Human
augacuuuauuauuuau

SEQ ID NO: 3644652 - RNA, 16 nt, Human
augacuuuauugcauc

SEQ ID NO: 3644653 - RNA, 21 nt, Human
augacuuuauugcaucugggu

SEQ ID NO: 3644654 - RNA, 21 nt, Human
augacuuucuuuuuguagcug

SEQ ID NO: 3644655 - RNA, 15 nt, Human
augacuuuuuauaaa

SEQ ID NO: 3644656 - RNA, 18 nt, Human
augacuuuuuauaaaaug

SEQ ID NO: 3644657 - RNA, 18 nt, Human
augacuuuuugaaaguaa

SEQ ID NO: 3644658 - RNA, 14 nt, Human
augagaaaagaggc

SEQ ID NO: 3644659 - RNA, 17 nt, Human
augagaaaaugucuuua

SEQ ID NO: 3644660 - RNA, 14 nt, Human
augagaaacugcau

SEQ ID NO: 3644661 - RNA, 11 nt, Human
augagaaacuu

SEQ ID NO: 3644662 - RNA, 15 nt, Human
augagaaagccuucu

SEQ ID NO: 3644663 - RNA, 23 nt, Human
augagaaaucuaaaaaacgaaaa

SEQ ID NO: 3644664 - RNA, 14 nt, Human
agggaagggagcca

SEQ ID NO: 3644665 - RNA, 17 nt, Human
agggaaggguuucucua

SEQ ID NO: 3644666 - RNA, 15 nt, Human
agggaaguaguuauc

SEQ ID NO: 3644667 - RNA, 19 nt, Human
agggaauaagguacaagaa

SEQ ID NO: 3644668 - RNA, 15 nt, Human
agggaauagaaaugu

SEQ ID NO: 3644669 - RNA, 23 nt, Human
agggaauccccgaaggugcugga

SEQ ID NO: 3644670 - RNA, 13 nt, Human
agggaaugccuga

SEQ ID NO: 3644671 - RNA, 18 nt, Human
agggaaugccugagugcc

SEQ ID NO: 3644672 - RNA, 21 nt, Human
agggaaugccugagugccugg

SEQ ID NO: 3644673 - RNA, 22 nt, Human
agggaauuucuaucuaaaugau

SEQ ID NO: 3644674 - RNA, 15 nt, Human
agggacaaaggagcc

SEQ ID NO: 3644675 - RNA, 18 nt, Human
agggacaaaggagccugu

SEQ ID NO: 3644676 - RNA, 19 nt, Human
agggacaaauuuaaaacaa

SEQ ID NO: 3644677 - RNA, 20 nt, Human
agggacaaauuuaaaacaaa

SEQ ID NO: 3644678 - RNA, 15 nt, Human
agggacacacagccu

SEQ ID NO: 3644679 - RNA, 15 nt, Human
agggacaccagccag

SEQ ID NO: 3644680 - RNA, 16 nt, Human
agggacaccagccagg

SEQ ID NO: 3644681 - RNA, 18 nt, Human
agggacaccagccaggcu

SEQ ID NO: 3644682 - RNA, 18 nt, Human
agggacagagacaccugc

SEQ ID NO: 3644683 - RNA, 19 nt, Human
agggacagagacaccugca

SEQ ID NO: 3644684 - RNA, 14 nt, Human
agggacagagccau

SEQ ID NO: 3644685 - RNA, 17 nt, Human
agggacagaggccccag

SEQ ID NO: 3644686 - RNA, 13 nt, Human
agggacagagggg

SEQ ID NO: 3644687 - RNA, 21 nt, Human
agggacagcccacugagaagu

SEQ ID NO: 3644688 - RNA, 16 nt, Human
agggacaggaccccag

SEQ ID NO: 3644689 - RNA, 13 nt, Human
agggacagucuca

SEQ ID NO: 3644690 - RNA, 15 nt, Human
agggacauauucauu

SEQ ID NO: 3644691 - RNA, 23 nt, Human
agggacauauucauuuggaaaua

SEQ ID NO: 3644692 - RNA, 19 nt, Human
agggacauguuuugauaaa

SEQ ID NO: 3644693 - RNA, 20 nt, Human
agggacauguuuugauaaag

SEQ ID NO: 3644694 - RNA, 13 nt, Human
agggaccaaggca

SEQ ID NO: 3644695 - RNA, 23 nt, Human
agggaccaaggcaaggcaggugc

SEQ ID NO: 3644696 - RNA, 14 nt, Human
agggaccacagcaa

SEQ ID NO: 3644697 - RNA, 13 nt, Human
agggaccaugugu

SEQ ID NO: 3644698 - RNA, 15 nt, Human
agggacccuuugggg

SEQ ID NO: 3644699 - RNA, 13 nt, Human
agggaccucuccc

SEQ ID NO: 3644700 - RNA, 13 nt, Human
agggaccugggga

SEQ ID NO: 3644701 - RNA, 14 nt, Human
agggaccuugaagg

SEQ ID NO: 3644702 - RNA, 17 nt, Human
agggacgaagaagagcc

SEQ ID NO: 3644703 - RNA, 22 nt, Human
agggacgaagaagagccacagu

SEQ ID NO: 3644704 - RNA, 19 nt, Human
agggacggccaagaaugua

SEQ ID NO: 3644705 - RNA, 20 nt, Human
agggacggccaagaauguac

SEQ ID NO: 3644706 - RNA, 17 nt, Human
agggacucaucuuuccc

SEQ ID NO: 3644707 - RNA, 22 nt, Human
agggacucaucuuucccuccuu

SEQ ID NO: 3644708 - RNA, 21 nt, Human
agggacucugaagccucuggg

SEQ ID NO: 3644709 - RNA, 16 nt, Human
agggacugaccagcag

SEQ ID NO: 3644710 - RNA, 15 nt, Human
agggacugaggggag

SEQ ID NO: 3644711 - RNA, 16 nt, Human
agggacugccucugcc

SEQ ID NO: 3644712 - RNA, 15 nt, Human
agggacuggaaccag

SEQ ID NO: 3644713 - RNA, 22 nt, Human
agggacugucgcugcuucgugg

SEQ ID NO: 3644714 - RNA, 12 nt, Human
agggacuuaaaa

SEQ ID NO: 3644715 - RNA, 13 nt, Human
agggacuuagcaa

SEQ ID NO: 3644716 - RNA, 15 nt, Human
agggacuugaaguug

SEQ ID NO: 3644717 - RNA, 15 nt, Human
agggacuuggaagcu

SEQ ID NO: 3644718 - RNA, 16 nt, Human
agggagaaggaucuag

SEQ ID NO: 3644719 - RNA, 20 nt, Human
agggagacacuggccccuca

SEQ ID NO: 3644720 - RNA, 12 nt, Human
agggagagccca

SEQ ID NO: 3644721 - RNA, 17 nt, Human
agggagaggagugacug

SEQ ID NO: 3644722 - RNA, 13 nt, Human
agggagagggagg

SEQ ID NO: 3644723 - RNA, 14 nt, Human
agggagauuuugag

SEQ ID NO: 3644724 - RNA, 21 nt, Human
agggagcacaacccccagcuc

SEQ ID NO: 3644725 - RNA, 19 nt, Human
agggagcaggcggugggca

SEQ ID NO: 3644726 - RNA, 16 nt, Human
agggagcagggaaggc

SEQ ID NO: 3644727 - RNA, 17 nt, Human
agggagcauuuuccucc

SEQ ID NO: 3644728 - RNA, 10 nt, Human
agggagccaa

SEQ ID NO: 3644729 - RNA, 15 nt, Human
agggagccaagggau

SEQ ID NO: 3644730 - RNA, 13 nt, Human
agggagccuccug

SEQ ID NO: 3644731 - RNA, 15 nt, Human
agggagccuccugcc

SEQ ID NO: 3644732 - RNA, 22 nt, Human
agggagccuccugcccaguccc

SEQ ID NO: 3644733 - RNA, 18 nt, Human
agggagcggaaagcagcu

SEQ ID NO: 3644734 - RNA, 19 nt, Human
agggagcggccggccagcc

SEQ ID NO: 3644735 - RNA, 21 nt, Human
agggagcggccggccagcccc

SEQ ID NO: 3644736 - RNA, 15 nt, Human
agggagcuagccaga

SEQ ID NO: 3644737 - RNA, 17 nt, Human
agggagcuagccagagg

SEQ ID NO: 3644738 - RNA, 19 nt, Human
agggagcuggcuccagccu

SEQ ID NO: 3644739 - RNA, 23 nt, Human
agggaggaaucgaggaaccagag

SEQ ID NO: 3644740 - RNA, 14 nt, Human
agggaggaccuggg

SEQ ID NO: 3644741 - RNA, 21 nt, Human
agggaggacgcucucuggccu

SEQ ID NO: 3644742 - RNA, 12 nt, Human
agggaggaggag

SEQ ID NO: 3644743 - RNA, 20 nt, Human
agggaggaggcagagaagaa

SEQ ID NO: 3644744 - RNA, 15 nt, Human
agggaggcaagcccu

SEQ ID NO: 3644745 - RNA, 16 nt, Human
agggaggcaagcccug

SEQ ID NO: 3644746 - RNA, 13 nt, Human
agggaggcagccu

SEQ ID NO: 3644747 - RNA, 16 nt, Human
agggaggcagccucca

SEQ ID NO: 3644748 - RNA, 17 nt, Human
agggaggcagccuccag

SEQ ID NO: 3644749 - RNA, 17 nt, Human
agggaggcauggucugc

SEQ ID NO: 3644750 - RNA, 17 nt, Human
agggaggccaucugggg

SEQ ID NO: 3644751 - RNA, 11 nt, Human
agggaggcccc

SEQ ID NO: 3644752 - RNA, 16 nt, Human
agggaggccccagggg

SEQ ID NO: 3644753 - RNA, 18 nt, Human
agggaggcgggggcugcc

SEQ ID NO: 3644754 - RNA, 22 nt, Human
agggaggcugcugcugcucuug

SEQ ID NO: 3644755 - RNA, 18 nt, Human
agggagggacauggcccc

SEQ ID NO: 3644756 - RNA, 17 nt, Human
agggagggagggcucca

SEQ ID NO: 3644757 - RNA, 16 nt, Human
agggagggcagagcug

SEQ ID NO: 3644758 - RNA, 20 nt, Human
agggagggcagagcuggugc

SEQ ID NO: 3644759 - RNA, 21 nt, Human
agggagggcagagcuggugcg

SEQ ID NO: 3644760 - RNA, 13 nt, Human
agggagggccugg

SEQ ID NO: 3644761 - RNA, 12 nt, Human
agggagggcucc

SEQ ID NO: 3644762 - RNA, 13 nt, Human
agggagggcucca

SEQ ID NO: 3644763 - RNA, 15 nt, Human
agggagggcuccaga

SEQ ID NO: 3644764 - RNA, 19 nt, Human
agggagggcuccagacaca

SEQ ID NO: 3644765 - RNA, 12 nt, Human
agggagggcucu

SEQ ID NO: 3644766 - RNA, 13 nt, Human
agggagggcucug

SEQ ID NO: 3644767 - RNA, 16 nt, Human
agggagggcucugagg

SEQ ID NO: 3644768 - RNA, 21 nt, Human
aucucuucagucucuauacca

SEQ ID NO: 3644769 - RNA, 21 nt, Human
aucucuucuggguuccuuccu

SEQ ID NO: 3644770 - RNA, 17 nt, Human
aucucuucuuaauguac

SEQ ID NO: 3644771 - RNA, 19 nt, Human
aucucuucuuaauguacau

SEQ ID NO: 3644772 - RNA, 13 nt, Human
aucucuuucacau

SEQ ID NO: 3644773 - RNA, 17 nt, Human
aucucuuucacauuguu

SEQ ID NO: 3644774 - RNA, 22 nt, Human
aucucuuucuaaagacaggaga

SEQ ID NO: 3644775 - RNA, 19 nt, Human
aucucuuuuauauuuguag

SEQ ID NO: 3644776 - RNA, 10 nt, Human
aucucuuuuc

SEQ ID NO: 3644777 - RNA, 19 nt, Human
aucucuuuuugcuuucgaa

SEQ ID NO: 3644778 - RNA, 19 nt, Human
aucugaaaaauacuuuugg

SEQ ID NO: 3644779 - RNA, 14 nt, Human
aucugaaaacugga

SEQ ID NO: 3644780 - RNA, 15 nt, Human
aucugaaaacuggaa

SEQ ID NO: 3644781 - RNA, 12 nt, Human
aucugaaaaugu

SEQ ID NO: 3644782 - RNA, 14 nt, Human
aucugaaaauguau

SEQ ID NO: 3644783 - RNA, 19 nt, Human
aucugaaaauguaugugua

SEQ ID NO: 3644784 - RNA, 17 nt, Human
aucugaaauaaggaaug

SEQ ID NO: 3644785 - RNA, 21 nt, Human
aucugaaauaggaaacaagug

SEQ ID NO: 3644786 - RNA, 14 nt, Human
aucugaagauuguu

SEQ ID NO: 3644787 - RNA, 16 nt, Human
aucugaagauuguuua

SEQ ID NO: 3644788 - RNA, 15 nt, Human
aucugaagcccuccc

SEQ ID NO: 3644789 - RNA, 17 nt, Human
aucugaagucagaucug

SEQ ID NO: 3644790 - RNA, 23 nt, Human
aucugaagucagaucugccuaag

SEQ ID NO: 3644791 - RNA, 17 nt, Human
aucugaauaccucuuug

SEQ ID NO: 3644792 - RNA, 12 nt, Human
aucugaauuuuu

SEQ ID NO: 3644793 - RNA, 20 nt, Human
aucugaauuuuuaaacaagu

SEQ ID NO: 3644794 - RNA, 18 nt, Human
aucugacaugauuccuuc

SEQ ID NO: 3644795 - RNA, 19 nt, Human
aucugacaugauuccuucc

SEQ ID NO: 3644796 - RNA, 20 nt, Human
aucugacccagugcccccac

SEQ ID NO: 3644797 - RNA, 21 nt, Human
aucugacccuaugggucuagg

SEQ ID NO: 3644798 - RNA, 16 nt, Human
aucugagaaucuuuau

SEQ ID NO: 3644799 - RNA, 13 nt, Human
aucugagaaugaa

SEQ ID NO: 3644800 - RNA, 23 nt, Human
aucugagagaggcuaaaauguuu

SEQ ID NO: 3644801 - RNA, 22 nt, Human
aucugagcaagagcuggcaaag

SEQ ID NO: 3644802 - RNA, 15 nt, Human
aucugagccagugcu

SEQ ID NO: 3644803 - RNA, 18 nt, Human
aucugagcucuuugcacu

SEQ ID NO: 3644804 - RNA, 17 nt, Human
aucugagcugagccagg

SEQ ID NO: 3644805 - RNA, 18 nt, Human
aucugagcugagccaggc

SEQ ID NO: 3644806 - RNA, 23 nt, Human
aucugaggaaucaacagggcagc

SEQ ID NO: 3644807 - RNA, 17 nt, Human
aucugaggaauucugua

SEQ ID NO: 3644808 - RNA, 18 nt, Human
aucugagggaaauguuuu

SEQ ID NO: 3644809 - RNA, 22 nt, Human
aucugagggaaauguuuuguaa

SEQ ID NO: 3644810 - RNA, 23 nt, Human
aucugagggaaauguuuuguaaa

SEQ ID NO: 3644811 - RNA, 20 nt, Human
aucugagguccugugaucuu

SEQ ID NO: 3644812 - RNA, 18 nt, Human
aucugauauguauuguuu

SEQ ID NO: 3644813 - RNA, 18 nt, Human
aucugaucagaacaaaug

SEQ ID NO: 3644814 - RNA, 22 nt, Human
aucugauggccuuaauuuccuu

SEQ ID NO: 3644815 - RNA, 17 nt, Human
aucugauggcuucucca

SEQ ID NO: 3644816 - RNA, 19 nt, Human
aucugauuuguuuuccucu

SEQ ID NO: 3644817 - RNA, 11 nt, Human
aucugcaaaag

SEQ ID NO: 3644818 - RNA, 22 nt, Human
aucugcaaaaggccucuuguaa

SEQ ID NO: 3644819 - RNA, 22 nt, Human
aucugcaaagcauguuuugcau

SEQ ID NO: 3644820 - RNA, 10 nt, Human
aucugcaccc

SEQ ID NO: 3644821 - RNA, 18 nt, Human
aucugcaccccccugggc

SEQ ID NO: 3644822 - RNA, 19 nt, Human
aucugcaccccccugggcu

SEQ ID NO: 3644823 - RNA, 18 nt, Human
aucugcaccccuucucuc

SEQ ID NO: 3644824 - RNA, 20 nt, Human
aucugcaccccuucucuccu

SEQ ID NO: 3644825 - RNA, 21 nt, Human
aucugcaccccuucucuccuc

SEQ ID NO: 3644826 - RNA, 21 nt, Human
aucugcacccucgaugaagcc

SEQ ID NO: 3644827 - RNA, 16 nt, Human
aucugcacccuucuuu

SEQ ID NO: 3644828 - RNA, 17 nt, Human
aucugcacccuucuuuu

SEQ ID NO: 3644829 - RNA, 22 nt, Human
aucugcagaaggaaaaaugugu

SEQ ID NO: 3644830 - RNA, 19 nt, Human
agggauggccguuggccac

SEQ ID NO: 3644831 - RNA, 15 nt, Human
agggaugggccuggc

SEQ ID NO: 3644832 - RNA, 14 nt, Human
agggaugguguuca

SEQ ID NO: 3644833 - RNA, 14 nt, Human
agggauguauuugu

SEQ ID NO: 3644834 - RNA, 13 nt, Human
agggauguggguu

SEQ ID NO: 3644835 - RNA, 21 nt, Human
agggauguggguuccacagac

SEQ ID NO: 3644836 - RNA, 21 nt, Human
agggauguuauuauccuuggg

SEQ ID NO: 3644837 - RNA, 18 nt, Human
agggauguucuggcccuc

SEQ ID NO: 3644838 - RNA, 18 nt, Human
agggauuaaccucugcac

SEQ ID NO: 3644839 - RNA, 17 nt, Human
agggauuacccaagcaa

SEQ ID NO: 3644840 - RNA, 20 nt, Human
agggauuagggagagaagau

SEQ ID NO: 3644841 - RNA, 15 nt, Human
agggauucaggcugc

SEQ ID NO: 3644842 - RNA, 18 nt, Human
agggauucaggcugcuug

SEQ ID NO: 3644843 - RNA, 22 nt, Human
agggauuccuaaucacucagag

SEQ ID NO: 3644844 - RNA, 17 nt, Human
agggauugauuuuaaaa

SEQ ID NO: 3644845 - RNA, 19 nt, Human
agggauugauuuuaaaaug

SEQ ID NO: 3644846 - RNA, 15 nt, Human
agggauuucuuaggg

SEQ ID NO: 3644847 - RNA, 12 nt, Human
agggauuugagg

SEQ ID NO: 3644848 - RNA, 18 nt, Human
agggcaaagccagguccc

SEQ ID NO: 3644849 - RNA, 20 nt, Human
agggcaaagccaggucccuc

SEQ ID NO: 3644850 - RNA, 20 nt, Human
agggcaaaugacaugcacug

SEQ ID NO: 3644851 - RNA, 21 nt, Human
agggcaaaugacaugcacuga

SEQ ID NO: 3644852 - RNA, 23 nt, Human
agggcaaaugacaugcacugacc

SEQ ID NO: 3644853 - RNA, 17 nt, Human
agggcaaauuggagaaa

SEQ ID NO: 3644854 - RNA, 21 nt, Human
agggcaagcuccgcaggacuu

SEQ ID NO: 3644855 - RNA, 22 nt, Human
agggcaagggccaugcugaagg

SEQ ID NO: 3644856 - RNA, 12 nt, Human
agggcaagucuu

SEQ ID NO: 3644857 - RNA, 18 nt, Human
agggcaauuaauuccuuc

SEQ ID NO: 3644858 - RNA, 14 nt, Human
agggcaauuggaac

SEQ ID NO: 3644859 - RNA, 17 nt, Human
agggcacaccgggcacu

SEQ ID NO: 3644860 - RNA, 14 nt, Human
agggcacaggagcu

SEQ ID NO: 3644861 - RNA, 18 nt, Human
agggcacaggagcuaccu

SEQ ID NO: 3644862 - RNA, 14 nt, Human
agggcacaggccau

SEQ ID NO: 3644863 - RNA, 19 nt, Human
agggcacaggccauggaug

SEQ ID NO: 3644864 - RNA, 19 nt, Human
agggcacauuccuugccug

SEQ ID NO: 3644865 - RNA, 15 nt, Human
agggcacuggagcug

SEQ ID NO: 3644866 - RNA, 14 nt, Human
agggcacugggcug

SEQ ID NO: 3644867 - RNA, 16 nt, Human
agggcacugguggccc

SEQ ID NO: 3644868 - RNA, 15 nt, Human
agggcagaaaguaga

SEQ ID NO: 3644869 - RNA, 17 nt, Human
agggcagaacacuaacc

SEQ ID NO: 3644870 - RNA, 22 nt, Human
agggcagaacacuaaccugacc

SEQ ID NO: 3644871 - RNA, 20 nt, Human
agggcagaccacauugcuuu

SEQ ID NO: 3644872 - RNA, 12 nt, Human
agggcagagcug

SEQ ID NO: 3644873 - RNA, 15 nt, Human
agggcagagcuggug

SEQ ID NO: 3644874 - RNA, 16 nt, Human
agggcagagcuggugc

SEQ ID NO: 3644875 - RNA, 14 nt, Human
agggcagaggcugg

SEQ ID NO: 3644876 - RNA, 15 nt, Human
agggcagaggcugga

SEQ ID NO: 3644877 - RNA, 22 nt, Human
agggcagaggcuggaggcaggg

SEQ ID NO: 3644878 - RNA, 17 nt, Human
agggcagagucacacgg

SEQ ID NO: 3644879 - RNA, 12 nt, Human
agggcagaguga

SEQ ID NO: 3644880 - RNA, 16 nt, Human
agggcagauuuuaguu

SEQ ID NO: 3644881 - RNA, 14 nt, Human
agggcagcagaucu

SEQ ID NO: 3644882 - RNA, 17 nt, Human
agggcagcagccagccc

SEQ ID NO: 3644883 - RNA, 19 nt, Human
agggcagcagccagcccug

SEQ ID NO: 3644884 - RNA, 23 nt, Human
agggcagcagccagcccugccug

SEQ ID NO: 3644885 - RNA, 22 nt, Human
agggcagccagggagagcccag

SEQ ID NO: 3644886 - RNA, 16 nt, Human
agggcagccugccugg

SEQ ID NO: 3644887 - RNA, 17 nt, Human
agggcagccugccugga

SEQ ID NO: 3644888 - RNA, 17 nt, Human
agggcagcugggcccaa

SEQ ID NO: 3644889 - RNA, 20 nt, Human
agggcagcugggcccaaccc

SEQ ID NO: 3644890 - RNA, 11 nt, Human
agggcagcuug

SEQ ID NO: 3644891 - RNA, 16 nt, Human
agggcaggaaggagag

SEQ ID NO: 3644892 - RNA, 22 nt, Human
agggcagggaccacacccugua

SEQ ID NO: 3644893 - RNA, 12 nt, Human
agggcagggacu

SEQ ID NO: 3644894 - RNA, 13 nt, Human
agggcagggcauc

SEQ ID NO: 3644895 - RNA, 16 nt, Human
agggcagggcucugau

SEQ ID NO: 3644896 - RNA, 20 nt, Human
agggcagucauuggcugucu

SEQ ID NO: 3644897 - RNA, 13 nt, Human
agggcaguguuuc

SEQ ID NO: 3644898 - RNA, 18 nt, Human
agggcaguguuuccuuuu

SEQ ID NO: 3644899 - RNA, 20 nt, Human
agggcaguucgcagccaccc

SEQ ID NO: 3644900 - RNA, 13 nt, Human
agggcaguuuucu

SEQ ID NO: 3644901 - RNA, 19 nt, Human
agggcauaaaacagcuuug

SEQ ID NO: 3644902 - RNA, 21 nt, Human
agggcauccauaccagcucgc

SEQ ID NO: 3644903 - RNA, 23 nt, Human
agggcaucuccugugcaugggug

SEQ ID NO: 3644904 - RNA, 17 nt, Human
agggcaucucugggcug

SEQ ID NO: 3644905 - RNA, 18 nt, Human
agggcaugcauuuugcag

SEQ ID NO: 3644906 - RNA, 20 nt, Human
agggcaugccccggccaccu

SEQ ID NO: 3644907 - RNA, 21 nt, Human
agggcaugcgcacaaggcuga

SEQ ID NO: 3644908 - RNA, 14 nt, Human
agggcauucuuucc

SEQ ID NO: 3644909 - RNA, 19 nt, Human
agggcauucuuucccagug

SEQ ID NO: 3644910 - RNA, 19 nt, Human
agggcauuugagaaaugca

SEQ ID NO: 3644911 - RNA, 18 nt, Human
agggccaaaagcuucccu

SEQ ID NO: 3644912 - RNA, 22 nt, Human
augacuguuuuucggacaguuu

SEQ ID NO: 3644913 - RNA, 22 nt, Human
augacuuauuguggauaacaaa

SEQ ID NO: 3644914 - RNA, 16 nt, Human
augacuucauuaauaa

SEQ ID NO: 3644915 - RNA, 13 nt, Human
augacuucccaac

SEQ ID NO: 3644916 - RNA, 18 nt, Human
augacuuggugucuaaug

SEQ ID NO: 3644917 - RNA, 20 nt, Human
augacuuguagcauauucuu

SEQ ID NO: 3644918 - RNA, 11 nt, Human
augacuuugga

SEQ ID NO: 3644919 - RNA, 20 nt, Human
augagaaacuggcaaagcag

SEQ ID NO: 3644920 - RNA, 21 nt, Human
augagaaacuuaaauguuauu

SEQ ID NO: 3644921 - RNA, 19 nt, Human
augagaaagccuucuuuug

SEQ ID NO: 3644922 - RNA, 15 nt, Human
augagaaauguaaug

SEQ ID NO: 3644923 - RNA, 16 nt, Human
augagaaauguaaugc

SEQ ID NO: 3644924 - RNA, 13 nt, Human
augagaacaaagc

SEQ ID NO: 3644925 - RNA, 18 nt, Human
augagaacaaagcuguua

SEQ ID NO: 3644926 - RNA, 23 nt, Human
augagaacaaagcuguuaaacug

SEQ ID NO: 3644927 - RNA, 14 nt, Human
augagaacagacug

SEQ ID NO: 3644928 - RNA, 12 nt, Human
augagaacaugu

SEQ ID NO: 3644929 - RNA, 19 nt, Human
augagaacauguugguauu

SEQ ID NO: 3644930 - RNA, 13 nt, Human
augagaagaauag

SEQ ID NO: 3644931 - RNA, 14 nt, Human
augagaauuucuaa

SEQ ID NO: 3644932 - RNA, 13 nt, Human
augagacacagga

SEQ ID NO: 3644933 - RNA, 14 nt, Human
augagacacaggau

SEQ ID NO: 3644934 - RNA, 15 nt, Human
augagacucuagggu

SEQ ID NO: 3644935 - RNA, 23 nt, Human
augagacuuccaaaccugacaga

SEQ ID NO: 3644936 - RNA, 21 nt, Human
augagacuuuaaaagcauuuu

SEQ ID NO: 3644937 - RNA, 14 nt, Human
augagagacacacu

SEQ ID NO: 3644938 - RNA, 19 nt, Human
augagagacacacugaaga

SEQ ID NO: 3644939 - RNA, 20 nt, Human
augagagacacacugaagaa

SEQ ID NO: 3644940 - RNA, 13 nt, Human
augagaggaggca

SEQ ID NO: 3644941 - RNA, 20 nt, Human
augagaggggagagcugaac

SEQ ID NO: 3644942 - RNA, 15 nt, Human
augagaguuuuggau

SEQ ID NO: 3644943 - RNA, 18 nt, Human
augagaguuuuggaugca

SEQ ID NO: 3644944 - RNA, 16 nt, Human
augagauacuuugcau

SEQ ID NO: 3644945 - RNA, 21 nt, Human
augagauagaagauguuugcu

SEQ ID NO: 3644946 - RNA, 20 nt, Human
augagaucaggcucugccuc

SEQ ID NO: 3644947 - RNA, 22 nt, Human
augagaucuaggugaggauuga

SEQ ID NO: 3644948 - RNA, 17 nt, Human
augagaucugaaugugg

SEQ ID NO: 3644949 - RNA, 23 nt, Human
augagaugauacauccaaagcag

SEQ ID NO: 3644950 - RNA, 22 nt, Human
augagaugcuggcuugggcagc

SEQ ID NO: 3644951 - RNA, 17 nt, Human
augagauuaauuccuuu

SEQ ID NO: 3644952 - RNA, 13 nt, Human
augagcaccucca

SEQ ID NO: 3644953 - RNA, 13 nt, Human
augagcacuucua

SEQ ID NO: 3644954 - RNA, 15 nt, Human
augagcagaagcucu

SEQ ID NO: 3644955 - RNA, 14 nt, Human
augagcagaaggaa

SEQ ID NO: 3644956 - RNA, 21 nt, Human
augagcauuggauacagcagu

SEQ ID NO: 3644957 - RNA, 21 nt, Human
augagccaccgcgcccagccu

SEQ ID NO: 3644958 - RNA, 14 nt, Human
augagccagacaaa

SEQ ID NO: 3644959 - RNA, 11 nt, Human
augagcccaga

SEQ ID NO: 3644960 - RNA, 12 nt, Human
augagcccagag

SEQ ID NO: 3644961 - RNA, 16 nt, Human
augagcccagagaaca

SEQ ID NO: 3644962 - RNA, 17 nt, Human
augagcccagagaacag

SEQ ID NO: 3644963 - RNA, 19 nt, Human
augagccgcccaaggccuu

SEQ ID NO: 3644964 - RNA, 23 nt, Human
augagccgcugugagccccuggu

SEQ ID NO: 3644965 - RNA, 12 nt, Human
augagccucagc

SEQ ID NO: 3644966 - RNA, 15 nt, Human
augagccucagcauc

SEQ ID NO: 3644967 - RNA, 17 nt, Human
augagccucagcauccu

SEQ ID NO: 3644968 - RNA, 21 nt, Human
augagccucagcauccuggca

SEQ ID NO: 3644969 - RNA, 14 nt, Human
augagccugcugga

SEQ ID NO: 3644970 - RNA, 17 nt, Human
augagccugcuggaagc

SEQ ID NO: 3644971 - RNA, 19 nt, Human
augagcuacgccugccucc

SEQ ID NO: 3644972 - RNA, 14 nt, Human
augagcuauguauu

SEQ ID NO: 3644973 - RNA, 16 nt, Human
augagcuauguauuaa

SEQ ID NO: 3644974 - RNA, 17 nt, Human
augagcuauuaaaacuc

SEQ ID NO: 3644975 - RNA, 22 nt, Human
augagcuauuaaaacucagccu

SEQ ID NO: 3644976 - RNA, 22 nt, Human
augagcucccacaagccugagg

SEQ ID NO: 3644977 - RNA, 22 nt, Human
augagcucgcauuugucaauga

SEQ ID NO: 3644978 - RNA, 18 nt, Human
augagcuuucugaacagc

SEQ ID NO: 3644979 - RNA, 21 nt, Human
augagcuuucugaacagcugg

SEQ ID NO: 3644980 - RNA, 21 nt, Human
augaggaaaauucuuaaaagg

SEQ ID NO: 3644981 - RNA, 22 nt, Human
augaggaacuguagaugaugua

SEQ ID NO: 3644982 - RNA, 16 nt, Human
augaggaaggaacagc

SEQ ID NO: 3644983 - RNA, 14 nt, Human
augaggaauaauua

SEQ ID NO: 3644984 - RNA, 14 nt, Human
augaggaggaagga

SEQ ID NO: 3644985 - RNA, 13 nt, Human
augaggaggaugc

SEQ ID NO: 3644986 - RNA, 18 nt, Human
augaggaggaugcuaaaa

SEQ ID NO: 3644987 - RNA, 24 nt, Human
augaggaggaugucccugggccag

SEQ ID NO: 3644988 - RNA, 22 nt, Human
augaggaggcagaaagcagagg

SEQ ID NO: 3644989 - RNA, 13 nt, Human
augaggaggggag

SEQ ID NO: 3644990 - RNA, 14 nt, Human
augaggaggggagg

SEQ ID NO: 3644991 - RNA, 21 nt, Human
augaggaggggccccccugcc

SEQ ID NO: 3644992 - RNA, 14 nt, Human
augaggaggguggg

SEQ ID NO: 3644993 - RNA, 22 nt, Human
augaggagggugggggagggag

SEQ ID NO: 3644994 - RNA, 18 nt, Human
augaggagugaacauuug

SEQ ID NO: 3644995 - RNA, 21 nt, Human
augaggaugcagagucagcag

SEQ ID NO: 3644996 - RNA, 22 nt, Human
augaggaugcagagucagcaga

SEQ ID NO: 3644997 - RNA, 19 nt, Human
augaggcaaccugauugua

SEQ ID NO: 3644998 - RNA, 20 nt, Human
augaggcaaccugauuguaa

SEQ ID NO: 3644999 - RNA, 14 nt, Human
augaggcauuuggc

SEQ ID NO: 3645000 - RNA, 23 nt, Human
augaggccacugcugcuucucca

SEQ ID NO: 3645001 - RNA, 15 nt, Human
augaggccauggacu

SEQ ID NO: 3645002 - RNA, 14 nt, Human
augaggcccuccac

SEQ ID NO: 3645003 - RNA, 21 nt, Human
augaggccgcuagaggccuga

SEQ ID NO: 3645004 - RNA, 15 nt, Human
augaggccucuugga

SEQ ID NO: 3645005 - RNA, 21 nt, Human
augaggccucuuggaccucug

SEQ ID NO: 3645006 - RNA, 23 nt, Human
augaggccucuuggaccucugcu

SEQ ID NO: 3645007 - RNA, 17 nt, Human
augaggcuugcugagag

SEQ ID NO: 3645008 - RNA, 20 nt, Human
augagggacuggaaccaggg

SEQ ID NO: 3645009 - RNA, 16 nt, Human
augagggaucacaggg

SEQ ID NO: 3645010 - RNA, 17 nt, Human
augagggcagcagccag

SEQ ID NO: 3645011 - RNA, 22 nt, Human
augagggcagcagccagcccug

SEQ ID NO: 3645012 - RNA, 13 nt, Human
augaggggagggg

SEQ ID NO: 3645013 - RNA, 15 nt, Human
augaggggcccgagc

SEQ ID NO: 3645014 - RNA, 20 nt, Human
augagggguuccuccccucc

SEQ ID NO: 3645015 - RNA, 22 nt, Human
augagggguuccuccccuccag

SEQ ID NO: 3645016 - RNA, 20 nt, Human
augaggguaucaaauaaaau

SEQ ID NO: 3645017 - RNA, 13 nt, Human
augagggucuugg

SEQ ID NO: 3645018 - RNA, 17 nt, Human
augagguacugagagug

SEQ ID NO: 3645019 - RNA, 15 nt, Human
augaggucagagccu

SEQ ID NO: 3645020 - RNA, 16 nt, Human
augaggucccaggcag

SEQ ID NO: 3645021 - RNA, 20 nt, Human
augaggucccaggcagagaa

SEQ ID NO: 3645022 - RNA, 14 nt, Human
augaggugcuggga

SEQ ID NO: 3645023 - RNA, 13 nt, Human
augaggugggagg

SEQ ID NO: 3645024 - RNA, 16 nt, Human
augaguacaaaugccu

SEQ ID NO: 3645025 - RNA, 23 nt, Human
augaguauacaauauauaaaaau

SEQ ID NO: 3645026 - RNA, 17 nt, Human
augagucaaugugcagu

SEQ ID NO: 3645027 - RNA, 19 nt, Human
augagucaaugugcagugu

SEQ ID NO: 3645028 - RNA, 16 nt, Human
augaguccaaacugga

SEQ ID NO: 3645029 - RNA, 19 nt, Human
augaguccaaacuggaaug

SEQ ID NO: 3645030 - RNA, 13 nt, Human
augaguccccugu

SEQ ID NO: 3645031 - RNA, 23 nt, Human
augaguccccuguuuguuucuga

SEQ ID NO: 3645032 - RNA, 18 nt, Human
augaguccuugaaaauau

SEQ ID NO: 3645033 - RNA, 21 nt, Human
augaguccuugaaaauauuuu

SEQ ID NO: 3645034 - RNA, 13 nt, Human
augagucuagaug

SEQ ID NO: 3645035 - RNA, 22 nt, Human
augcucucugcagccagcccag

SEQ ID NO: 3645036 - RNA, 23 nt, Human
augcucucugcagccagcccagc

SEQ ID NO: 3645037 - RNA, 18 nt, Human
augcucugcauguuacau

SEQ ID NO: 3645038 - RNA, 19 nt, Human
augcucugcauguuacaua

SEQ ID NO: 3645039 - RNA, 16 nt, Human
augcucuuagaaaauu

SEQ ID NO: 3645040 - RNA, 18 nt, Human
augcucuuauuucaucau

SEQ ID NO: 3645041 - RNA, 15 nt, Human
augcucuuucccacc

SEQ ID NO: 3645042 - RNA, 16 nt, Human
augcucuuuuguuugg

SEQ ID NO: 3645043 - RNA, 21 nt, Human
augcucuuuuuuacucauuga

SEQ ID NO: 3645044 - RNA, 24 nt, Human
augcucuuuuuuacucauugaaau

SEQ ID NO: 3645045 - RNA, 17 nt, Human
augcugaacauugcaua

SEQ ID NO: 3645046 - RNA, 23 nt, Human
augcugaacauugcauauaacuu

SEQ ID NO: 3645047 - RNA, 14 nt, Human
augcugaggccugg

SEQ ID NO: 3645048 - RNA, 15 nt, Human
augcugaggccuggg

SEQ ID NO: 3645049 - RNA, 22 nt, Human
augcugaggccugggccgcugc

SEQ ID NO: 3645050 - RNA, 13 nt, Human
augcugagggugu

SEQ ID NO: 3645051 - RNA, 18 nt, Human
augcugagucucccaagg

SEQ ID NO: 3645052 - RNA, 12 nt, Human
augcugaucauc

SEQ ID NO: 3645053 - RNA, 24 nt, Human
augcugaucaucgccagaggugcu

SEQ ID NO: 3645054 - RNA, 18 nt, Human
augcugauguucagugua

SEQ ID NO: 3645055 - RNA, 21 nt, Human
augcugauguucaguguaauu

SEQ ID NO: 3645056 - RNA, 16 nt, Human
agguggaagagggcug

SEQ ID NO: 3645057 - RNA, 21 nt, Human
agguggaagcccuccuuccac

SEQ ID NO: 3645058 - RNA, 21 nt, Human
agguggaauuauuuuaaaaga

SEQ ID NO: 3645059 - RNA, 14 nt, Human
agguggaccuuuua

SEQ ID NO: 3645060 - RNA, 15 nt, Human
agguggaccuuuuaa

SEQ ID NO: 3645061 - RNA, 15 nt, Human
agguggagguugcau

SEQ ID NO: 3645062 - RNA, 15 nt, Human
agguggaguggaugc

SEQ ID NO: 3645063 - RNA, 19 nt, Human
agguggauuuuguuuaaaa

SEQ ID NO: 3645064 - RNA, 17 nt, Human
agguggcacuuuuucau

SEQ ID NO: 3645065 - RNA, 15 nt, Human
agguggcagcccugu

SEQ ID NO: 3645066 - RNA, 17 nt, Human
agguggcaggugagcaa

SEQ ID NO: 3645067 - RNA, 22 nt, Human
agguggcaucagugucuuucca

SEQ ID NO: 3645068 - RNA, 17 nt, Human
agguggccaaguuccuc

SEQ ID NO: 3645069 - RNA, 12 nt, Human
agguggccaugc

SEQ ID NO: 3645070 - RNA, 19 nt, Human
agguggccaugccucagcc

SEQ ID NO: 3645071 - RNA, 17 nt, Human
agguggcucuccaguua

SEQ ID NO: 3645072 - RNA, 19 nt, Human
agguggcucuccaguuagu

SEQ ID NO: 3645073 - RNA, 19 nt, Human
agguggcugacccaguccc

SEQ ID NO: 3645074 - RNA, 20 nt, Human
agguggcugacccagucccu

SEQ ID NO: 3645075 - RNA, 21 nt, Human
agguggcugacccagucccug

SEQ ID NO: 3645076 - RNA, 17 nt, Human
agguggcugagccccug

SEQ ID NO: 3645077 - RNA, 18 nt, Human
agguggcugccuggagcc

SEQ ID NO: 3645078 - RNA, 14 nt, Human
aggugggagcagga

SEQ ID NO: 3645079 - RNA, 15 nt, Human
aggugggagcaggag

SEQ ID NO: 3645080 - RNA, 17 nt, Human
aggugggagcaggagau

SEQ ID NO: 3645081 - RNA, 13 nt, Human
aggugggagcuug

SEQ ID NO: 3645082 - RNA, 13 nt, Human
aggugggaggaug

SEQ ID NO: 3645083 - RNA, 16 nt, Human
aggugggauccuccag

SEQ ID NO: 3645084 - RNA, 22 nt, Human
aggugggcaggugguggcacug

SEQ ID NO: 3645085 - RNA, 17 nt, Human
aggugggccagccccuc

SEQ ID NO: 3645086 - RNA, 22 nt, Human
aggugggccagccccucccacc

SEQ ID NO: 3645087 - RNA, 22 nt, Human
aggugggcccaggaccagcugg

SEQ ID NO: 3645088 - RNA, 12 nt, Human
aggugggcccgg

SEQ ID NO: 3645089 - RNA, 22 nt, Human
aggugggccuugcuaccucaag

SEQ ID NO: 3645090 - RNA, 19 nt, Human
aggugggcgggcagcacag

SEQ ID NO: 3645091 - RNA, 20 nt, Human
aggugggcgggcagcacagc

SEQ ID NO: 3645092 - RNA, 22 nt, Human
aggugggcgggcagcacagcaa

SEQ ID NO: 3645093 - RNA, 15 nt, Human
aggugggcugagccc

SEQ ID NO: 3645094 - RNA, 16 nt, Human
aggugggcugagcccu

SEQ ID NO: 3645095 - RNA, 17 nt, Human
aggugggcugagcccug

SEQ ID NO: 3645096 - RNA, 18 nt, Human
aggugggcugagcccugg

SEQ ID NO: 3645097 - RNA, 19 nt, Human
aggugggcugagcccuggc

SEQ ID NO: 3645098 - RNA, 21 nt, Human
aggugggcugggcccucucuu

SEQ ID NO: 3645099 - RNA, 18 nt, Human
aggugggcuucaguaagu

SEQ ID NO: 3645100 - RNA, 14 nt, Human
agguggggacaggg

SEQ ID NO: 3645101 - RNA, 17 nt, Human
agguggggacagggaug

SEQ ID NO: 3645102 - RNA, 18 nt, Human
agguggggagacugggcu

SEQ ID NO: 3645103 - RNA, 21 nt, Human
agguggggagacugggcugag

SEQ ID NO: 3645104 - RNA, 22 nt, Human
aggugggguauuuaccacagca

SEQ ID NO: 3645105 - RNA, 21 nt, Human
agguggguuuucuucccauca

SEQ ID NO: 3645106 - RNA, 22 nt, Human
agguggguuuucuucccaucac

SEQ ID NO: 3645107 - RNA, 14 nt, Human
agguggucugaaug

SEQ ID NO: 3645108 - RNA, 23 nt, Human
agguggucugaauguucugacau

SEQ ID NO: 3645109 - RNA, 19 nt, Human
aggugguggcacugagccc

SEQ ID NO: 3645110 - RNA, 18 nt, Human
agguggugggcauucucu

SEQ ID NO: 3645111 - RNA, 19 nt, Human
agguggugggcauucucuc

SEQ ID NO: 3645112 - RNA, 21 nt, Human
agguggugucacugucccucc

SEQ ID NO: 3645113 - RNA, 23 nt, Human
aggugucagccauugcacccagc

SEQ ID NO: 3645114 - RNA, 19 nt, Human
agguguccagcauugcugg

SEQ ID NO: 3645115 - RNA, 20 nt, Human
agguguccagcauugcugga

SEQ ID NO: 3645116 - RNA, 16 nt, Human
agguguccuacagaaa

SEQ ID NO: 3645117 - RNA, 18 nt, Human
agguguccuacagaaaaa

SEQ ID NO: 3645118 - RNA, 20 nt, Human
agguguccuacagaaaaacc

SEQ ID NO: 3645119 - RNA, 16 nt, Human
aggugucucaggcugc

SEQ ID NO: 3645120 - RNA, 18 nt, Human
aggugucucaggcugccu

SEQ ID NO: 3645121 - RNA, 16 nt, Human
aggugucugcacccag

SEQ ID NO: 3645122 - RNA, 13 nt, Human
aggugucuguauc

SEQ ID NO: 3645123 - RNA, 16 nt, Human
aggugucuuccuccca

SEQ ID NO: 3645124 - RNA, 19 nt, Human
aggugucuuccucccaagu

SEQ ID NO: 3645125 - RNA, 17 nt, Human
aggugugaaccaccaca

SEQ ID NO: 3645126 - RNA, 22 nt, Human
aggugugaaccaccacacccag

SEQ ID NO: 3645127 - RNA, 21 nt, Human
aggugugaaggugauuuaagg

SEQ ID NO: 3645128 - RNA, 15 nt, Human
aggugugaggcagga

SEQ ID NO: 3645129 - RNA, 22 nt, Human
aggugugagucaccaagcccag

SEQ ID NO: 3645130 - RNA, 14 nt, Human
aggugugcaagaga

SEQ ID NO: 3645131 - RNA, 18 nt, Human
aggugugggggcugcagc

SEQ ID NO: 3645132 - RNA, 21 nt, Human
aggugugguguaauuuauaaa

SEQ ID NO: 3645133 - RNA, 14 nt, Human
agguguuagagagg

SEQ ID NO: 3645134 - RNA, 12 nt, Human
agguguuauuug

SEQ ID NO: 3645135 - RNA, 22 nt, Human
agguguugaagaaauuauaaag

SEQ ID NO: 3645136 - RNA, 18 nt, Human
agguguugauuuucuguu

SEQ ID NO: 3645137 - RNA, 21 nt, Human
agguguugauuuucuguugua

SEQ ID NO: 3645138 - RNA, 21 nt, Human
agguguugccaaauauguccu

SEQ ID NO: 3645139 - RNA, 22 nt, Human
agguguugccaaauauguccug

SEQ ID NO: 3645140 - RNA, 18 nt, Human
agguguuggugacaauug

SEQ ID NO: 3645141 - RNA, 20 nt, Human
agguguuuaaagagagguua

SEQ ID NO: 3645142 - RNA, 18 nt, Human
agguguuuauuaaaauuc

SEQ ID NO: 3645143 - RNA, 15 nt, Human
agguguuugaaaaua

SEQ ID NO: 3645144 - RNA, 17 nt, Human
agguguuugaaaauagu

SEQ ID NO: 3645145 - RNA, 22 nt, Human
agguguuugaacagaggccaca

SEQ ID NO: 3645146 - RNA, 18 nt, Human
agguguuuuguucaccau

SEQ ID NO: 3645147 - RNA, 22 nt, Human
agguguuuuuuaugaagugcgu

SEQ ID NO: 3645148 - RNA, 23 nt, Human
agguguuuuuuaugaagugcgug

SEQ ID NO: 3645149 - RNA, 18 nt, Human
agguuaaaaaaaaaaguc

SEQ ID NO: 3645150 - RNA, 15 nt, Human
agguuaaaaaaaugg

SEQ ID NO: 3645151 - RNA, 16 nt, Human
agguuaaaaagaaaag

SEQ ID NO: 3645152 - RNA, 11 nt, Human
agguuaaaugu

SEQ ID NO: 3645153 - RNA, 12 nt, Human
agguuaaauguu

SEQ ID NO: 3645154 - RNA, 19 nt, Human
agguuaaauguuuuguaaa

SEQ ID NO: 3645155 - RNA, 16 nt, Human
agguuaacuauguaca

SEQ ID NO: 3645156 - RNA, 16 nt, Human
agguuaauauuuaaga

SEQ ID NO: 3645157 - RNA, 15 nt, Human
agguuaauuccaauu

SEQ ID NO: 3645158 - RNA, 14 nt, Human
agguuacaacagau

SEQ ID NO: 3645159 - RNA, 21 nt, Human
agguuacaacagauuugugaa

SEQ ID NO: 3645160 - RNA, 22 nt, Human
agguuacaacagauuugugaac

SEQ ID NO: 3645161 - RNA, 24 nt, Human
agguuacaacagauuugugaacuc

SEQ ID NO: 3645162 - RNA, 15 nt, Human
agguuacaagccugc

SEQ ID NO: 3645163 - RNA, 17 nt, Human
agguuacccuguaacau

SEQ ID NO: 3645164 - RNA, 21 nt, Human
agguuacccuguaacaugcaa

SEQ ID NO: 3645165 - RNA, 22 nt, Human
agguuagauuuuguauucaggg

SEQ ID NO: 3645166 - RNA, 19 nt, Human
agguuauaauuuuuuuuaa

SEQ ID NO: 3645167 - RNA, 19 nt, Human
agguuauaggucacuccug

SEQ ID NO: 3645168 - RNA, 17 nt, Human
agguuaucgaaauaaca

SEQ ID NO: 3645169 - RNA, 16 nt, Human
agguuaucugucccag

SEQ ID NO: 3645170 - RNA, 17 nt, Human
agguuaucugucccagg

SEQ ID NO: 3645171 - RNA, 18 nt, Human
agguuauuaugauuagcu

SEQ ID NO: 3645172 - RNA, 19 nt, Human
agguuauuuuaguuucugu

SEQ ID NO: 3645173 - RNA, 16 nt, Human
agguuauuuucuccug

SEQ ID NO: 3645174 - RNA, 13 nt, Human
agguucagccaag

SEQ ID NO: 3645175 - RNA, 15 nt, Human
agguucaugcccaag

SEQ ID NO: 3645176 - RNA, 12 nt, Human
agguucauggau

SEQ ID NO: 3645177 - RNA, 17 nt, Human
agguuccaacuguauau

SEQ ID NO: 3645178 - RNA, 13 nt, Human
agguucccacuua

SEQ ID NO: 3645179 - RNA, 16 nt, Human
agguucccucugagaa

SEQ ID NO: 3645180 - RNA, 20 nt, Human
agguucccuguucuuccucc

SEQ ID NO: 3645181 - RNA, 13 nt, Human
agguucccuuuga

SEQ ID NO: 3645182 - RNA, 18 nt, Human
agguuccgcuuggagcag

SEQ ID NO: 3645183 - RNA, 12 nt, Human
agguuccucugc

SEQ ID NO: 3645184 - RNA, 11 nt, Human
agguucuaaag

SEQ ID NO: 3645185 - RNA, 12 nt, Human
agguucuaaagu

SEQ ID NO: 3645186 - RNA, 14 nt, Human
agguucuaaaguuc

SEQ ID NO: 3645187 - RNA, 16 nt, Human
agguucuaaaguucua

SEQ ID NO: 3645188 - RNA, 19 nt, Human
agguucuaaaguucuaaga

SEQ ID NO: 3645189 - RNA, 20 nt, Human
agguucuaaaguucuaagau

SEQ ID NO: 3645190 - RNA, 23 nt, Human
agguucuaaaguucuaagauucu

SEQ ID NO: 3645191 - RNA, 20 nt, Human
agguucuccguuagcuccug

SEQ ID NO: 3645192 - RNA, 17 nt, Human
agguucucuccucccca

SEQ ID NO: 3645193 - RNA, 20 nt, Human
agguucucucuacugguccu

SEQ ID NO: 3645194 - RNA, 15 nt, Human
agguucuuaaaagug

SEQ ID NO: 3645195 - RNA, 17 nt, Human
agguucuuagugucacu

SEQ ID NO: 3645196 - RNA, 19 nt, Human
agguucuucccuuuuacau

SEQ ID NO: 3645197 - RNA, 19 nt, Human
agguucuucuuccugaagc

SEQ ID NO: 3645198 - RNA, 13 nt, Human
agguugaaaaaca

SEQ ID NO: 3645199 - RNA, 12 nt, Human
agguugaaagac

SEQ ID NO: 3645200 - RNA, 15 nt, Human
auggccaugguaccc

SEQ ID NO: 3645201 - RNA, 14 nt, Human
auggcccaguguca

SEQ ID NO: 3645202 - RNA, 15 nt, Human
auggcccauccugug

SEQ ID NO: 3645203 - RNA, 15 nt, Human
auggcccauucuacu

SEQ ID NO: 3645204 - RNA, 23 nt, Human
auggcccauucuacuugcucugg

SEQ ID NO: 3645205 - RNA, 24 nt, Human
auggcccauucuacuugcucugga

SEQ ID NO: 3645206 - RNA, 15 nt, Human
auggccccagcacag

SEQ ID NO: 3645207 - RNA, 23 nt, Human
auggccccucugaccugcacugg

SEQ ID NO: 3645208 - RNA, 18 nt, Human
auggcccggaugcugcuu

SEQ ID NO: 3645209 - RNA, 21 nt, Human
auggcccggaugcugcuuccg

SEQ ID NO: 3645210 - RNA, 13 nt, Human
auggcccucuggu

SEQ ID NO: 3645211 - RNA, 11 nt, Human
auggcccuggg

SEQ ID NO: 3645212 - RNA, 18 nt, Human
auggcccuuccuccucca

SEQ ID NO: 3645213 - RNA, 21 nt, Human
auggcccuuccuccuccacca

SEQ ID NO: 3645214 - RNA, 18 nt, Human
auggccggagaggaccgg

SEQ ID NO: 3645215 - RNA, 21 nt, Human
auggccguguagaagcauggu

SEQ ID NO: 3645216 - RNA, 15 nt, Human
auggccuaaauuuau

SEQ ID NO: 3645217 - RNA, 21 nt, Human
auggccuauuauauuaaaaua

SEQ ID NO: 3645218 - RNA, 13 nt, Human
auggccucagcug

SEQ ID NO: 3645219 - RNA, 18 nt, Human
auggccucauguggcugg

SEQ ID NO: 3645220 - RNA, 20 nt, Human
auggccucauguggcuggaa

SEQ ID NO: 3645221 - RNA, 22 nt, Human
auggccucuuacuaauguaaaa

SEQ ID NO: 3645222 - RNA, 19 nt, Human
auggccugagacuuucuuu

SEQ ID NO: 3645223 - RNA, 22 nt, Human
auggccugcaaacugggaaccc

SEQ ID NO: 3645224 - RNA, 17 nt, Human
auggccuuaauuuccuu

SEQ ID NO: 3645225 - RNA, 20 nt, Human
auggccuuugcuugaaagaa

SEQ ID NO: 3645226 - RNA, 16 nt, Human
auggcgcagugccucu

SEQ ID NO: 3645227 - RNA, 20 nt, Human
auggcgccaccagcucugcc

SEQ ID NO: 3645228 - RNA, 17 nt, Human
auggcguaaguacagag

SEQ ID NO: 3645229 - RNA, 19 nt, Human
auggcuaacuuacaaagau

SEQ ID NO: 3645230 - RNA, 18 nt, Human
auggcuacuuugguuucu

SEQ ID NO: 3645231 - RNA, 14 nt, Human
auggcuauaaauau

SEQ ID NO: 3645232 - RNA, 16 nt, Human
auggcuauaaauauau

SEQ ID NO: 3645233 - RNA, 15 nt, Human
auggcuauaggugcu

SEQ ID NO: 3645234 - RNA, 16 nt, Human
auggcuauaggugcua

SEQ ID NO: 3645235 - RNA, 19 nt, Human
auggcuauaggugcuacaa

SEQ ID NO: 3645236 - RNA, 14 nt, Human
auggcuaugcuuaa

SEQ ID NO: 3645237 - RNA, 19 nt, Human
auggcucacuauggugcca

SEQ ID NO: 3645238 - RNA, 22 nt, Human
auggcucacuauggugccaaug

SEQ ID NO: 3645239 - RNA, 13 nt, Human
auggcucagaggg

SEQ ID NO: 3645240 - RNA, 13 nt, Human
auggcuccagucu

SEQ ID NO: 3645241 - RNA, 22 nt, Human
auggcuccagucugcugcccuc

SEQ ID NO: 3645242 - RNA, 12 nt, Human
auggcucccagg

SEQ ID NO: 3645243 - RNA, 17 nt, Human
auggcucugcaccccuc

SEQ ID NO: 3645244 - RNA, 22 nt, Human
auggcucugcaccccucugccc

SEQ ID NO: 3645245 - RNA, 12 nt, Human
auggcucuggac

SEQ ID NO: 3645246 - RNA, 22 nt, Human
auggcucuggacucuaaagacc

SEQ ID NO: 3645247 - RNA, 12 nt, Human
auggcucuucau

SEQ ID NO: 3645248 - RNA, 18 nt, Human
auggcugacuuugcucuu

SEQ ID NO: 3645249 - RNA, 20 nt, Human
auggcugauaauuuuaaauu

SEQ ID NO: 3645250 - RNA, 12 nt, Human
auggcugcugaa

SEQ ID NO: 3645251 - RNA, 18 nt, Human
auggcuggagcuagaauu

SEQ ID NO: 3645252 - RNA, 15 nt, Human
auggcuggccacugc

SEQ ID NO: 3645253 - RNA, 22 nt, Human
auggcugggaacugcagaccug

SEQ ID NO: 3645254 - RNA, 15 nt, Human
auggcugugaggaug

SEQ ID NO: 3645255 - RNA, 16 nt, Human
auggcugugccucugc

SEQ ID NO: 3645256 - RNA, 19 nt, Human
auggcugugccucugccug

SEQ ID NO: 3645257 - RNA, 16 nt, Human
auggcuguggagugug

SEQ ID NO: 3645258 - RNA, 16 nt, Human
auggcuuaguuuucau

SEQ ID NO: 3645259 - RNA, 19 nt, Human
auggcuuauccagcuggug

SEQ ID NO: 3645260 - RNA, 16 nt, Human
auggcuuccaaggugg

SEQ ID NO: 3645261 - RNA, 14 nt, Human
auggcuuguucauc

SEQ ID NO: 3645262 - RNA, 23 nt, Human
auggcuuuauuuguuuuuuuugu

SEQ ID NO: 3645263 - RNA, 16 nt, Human
auggcuuucagaaaac

SEQ ID NO: 3645264 - RNA, 23 nt, Human
auggcuuucagaaaacgggaagc

SEQ ID NO: 3645265 - RNA, 15 nt, Human
auggcuuuguauaga

SEQ ID NO: 3645266 - RNA, 16 nt, Human
auggcuuuguauagaa

SEQ ID NO: 3645267 - RNA, 18 nt, Human
augggaaaacugccaaua

SEQ ID NO: 3645268 - RNA, 14 nt, Human
augucgauuaaaau

SEQ ID NO: 3645269 - RNA, 14 nt, Human
augucgccucugca

SEQ ID NO: 3645270 - RNA, 13 nt, Human
augucggccucua

SEQ ID NO: 3645271 - RNA, 19 nt, Human
augucguaguuacucucag

SEQ ID NO: 3645272 - RNA, 18 nt, Human
augucgucgagcuccccc

SEQ ID NO: 3645273 - RNA, 14 nt, Human
augucuaaaauugu

SEQ ID NO: 3645274 - RNA, 18 nt, Human
augucuaauguauuuuau

SEQ ID NO: 3645275 - RNA, 21 nt, Human
augucuaugauucguguaauu

SEQ ID NO: 3645276 - RNA, 15 nt, Human
augucuauucagcuu

SEQ ID NO: 3645277 - RNA, 12 nt, Human
augucuauuuaa

SEQ ID NO: 3645278 - RNA, 23 nt, Human
augucuauuuaagccucauauuu

SEQ ID NO: 3645279 - RNA, 14 nt, Human
augucucacugagc

SEQ ID NO: 3645280 - RNA, 22 nt, Human
augucucacugagcacuguuuu

SEQ ID NO: 3645281 - RNA, 22 nt, Human
augucucaggucccugcagggc

SEQ ID NO: 3645282 - RNA, 23 nt, Human
augucucagguuuguuuugugaa

SEQ ID NO: 3645283 - RNA, 14 nt, Human
augucuccuaagca

SEQ ID NO: 3645284 - RNA, 16 nt, Human
augucucgugguagga

SEQ ID NO: 3645285 - RNA, 15 nt, Human
augucucuaaagcac

SEQ ID NO: 3645286 - RNA, 13 nt, Human
augucucucagaa

SEQ ID NO: 3645287 - RNA, 21 nt, Human
augucucucagaauucuucag

SEQ ID NO: 3645288 - RNA, 14 nt, Human
augucucugcaaac

SEQ ID NO: 3645289 - RNA, 21 nt, Human
augucucugugagacucgaga

SEQ ID NO: 3645290 - RNA, 16 nt, Human
augucucuucugagcu

SEQ ID NO: 3645291 - RNA, 18 nt, Human
augucugaacuuugggaa

SEQ ID NO: 3645292 - RNA, 15 nt, Human
augucugagugaacc

SEQ ID NO: 3645293 - RNA, 16 nt, Human
augucugagugaaccu

SEQ ID NO: 3645294 - RNA, 15 nt, Human
augucugcagcccug

SEQ ID NO: 3645295 - RNA, 14 nt, Human
augucugccaauuu

SEQ ID NO: 3645296 - RNA, 16 nt, Human
augucugccaauuuuu

SEQ ID NO: 3645297 - RNA, 23 nt, Human
augucugccaauuuuugccuuca

SEQ ID NO: 3645298 - RNA, 15 nt, Human
augucugccacacaa

SEQ ID NO: 3645299 - RNA, 21 nt, Human
augucugguucucaauuccaa

SEQ ID NO: 3645300 - RNA, 18 nt, Human
augucuguagcuccucaa

SEQ ID NO: 3645301 - RNA, 20 nt, Human
augucugugcuagggaaacu

SEQ ID NO: 3645302 - RNA, 14 nt, Human
augucuguucuaca

SEQ ID NO: 3645303 - RNA, 16 nt, Human
augucuguugaugacu

SEQ ID NO: 3645304 - RNA, 16 nt, Human
augucuguuuaagaaa

SEQ ID NO: 3645305 - RNA, 13 nt, Human
augucuguuugcu

SEQ ID NO: 3645306 - RNA, 14 nt, Human
augucuguuugcug

SEQ ID NO: 3645307 - RNA, 13 nt, Human
augucuuaaugaa

SEQ ID NO: 3645308 - RNA, 20 nt, Human
augucuuaaugaaguuugaa

SEQ ID NO: 3645309 - RNA, 12 nt, Human
augucuuauuuu

SEQ ID NO: 3645310 - RNA, 15 nt, Human
augucuuauuuuuag

SEQ ID NO: 3645311 - RNA, 17 nt, Human
augucuucaaggcuuca

SEQ ID NO: 3645312 - RNA, 15 nt, Human
augucuucauaaagu

SEQ ID NO: 3645313 - RNA, 22 nt, Human
augucuucauaccuacauguau

SEQ ID NO: 3645314 - RNA, 18 nt, Human
augucuucauuucauugu

SEQ ID NO: 3645315 - RNA, 18 nt, Human
augucuuccauguaucuu

SEQ ID NO: 3645316 - RNA, 13 nt, Human
augucuuccugga

SEQ ID NO: 3645317 - RNA, 17 nt, Human
augucuucguacaguuc

SEQ ID NO: 3645318 - RNA, 14 nt, Human
augucuucucccug

SEQ ID NO: 3645319 - RNA, 15 nt, Human
augucuucucccugg

SEQ ID NO: 3645320 - RNA, 18 nt, Human
augucuuguaagcaaaag

SEQ ID NO: 3645321 - RNA, 11 nt, Human
augucuugugu

SEQ ID NO: 3645322 - RNA, 20 nt, Human
augucuuuguuggaaaagaa

SEQ ID NO: 3645323 - RNA, 23 nt, Human
augucuuuguuggaaaagaauac

SEQ ID NO: 3645324 - RNA, 20 nt, Human
augucuuuuauaguggaaaa

SEQ ID NO: 3645325 - RNA, 16 nt, Human
augucuuuuauauuug

SEQ ID NO: 3645326 - RNA, 20 nt, Human
augucuuuuauauuuguauc

SEQ ID NO: 3645327 - RNA, 14 nt, Human
augucuuuucuugc

SEQ ID NO: 3645328 - RNA, 16 nt, Human
augucuuuucuuggca

SEQ ID NO: 3645329 - RNA, 19 nt, Human
augucuuuugaugaauaga

SEQ ID NO: 3645330 - RNA, 16 nt, Human
augucuuuuuaagcuu

SEQ ID NO: 3645331 - RNA, 17 nt, Human
augucuuuuuuuuaaug

SEQ ID NO: 3645332 - RNA, 18 nt, Human
augucuuuuuuuuaaugu

SEQ ID NO: 3645333 - RNA, 18 nt, Human
augugaaaaggcaaaaag

SEQ ID NO: 3645334 - RNA, 13 nt, Human
augugaaacacuu

SEQ ID NO: 3645335 - RNA, 22 nt, Human
augugaaacacuuugccuccug

SEQ ID NO: 3645336 - RNA, 12 nt, Human
augugaaaccuu

SEQ ID NO: 3645337 - RNA, 20 nt, Human
augugaaaggauaugaaucu

SEQ ID NO: 3645338 - RNA, 18 nt, Human
augugaaaucauucauuu

SEQ ID NO: 3645339 - RNA, 15 nt, Human
augugaacacaucag

SEQ ID NO: 3645340 - RNA, 16 nt, Human
augugaacagcggcug

SEQ ID NO: 3645341 - RNA, 22 nt, Human
augugaaccauuaaccagaucu

SEQ ID NO: 3645342 - RNA, 12 nt, Human
augugaacuugu

SEQ ID NO: 3645343 - RNA, 14 nt, Human
augugaacuuguag

SEQ ID NO: 3645344 - RNA, 20 nt, Human
augugaacuuguagcuguaa

SEQ ID NO: 3645345 - RNA, 15 nt, Human
auguggguuccacag

SEQ ID NO: 3645346 - RNA, 17 nt, Human
auguggguuccacagac

SEQ ID NO: 3645347 - RNA, 15 nt, Human
auguggucacagcug

SEQ ID NO: 3645348 - RNA, 16 nt, Human
auguggucacagcugu

SEQ ID NO: 3645349 - RNA, 18 nt, Human
auguggugaggcaggcuu

SEQ ID NO: 3645350 - RNA, 15 nt, Human
auguggugggacagg

SEQ ID NO: 3645351 - RNA, 21 nt, Human
auguggugggacagggaccca

SEQ ID NO: 3645352 - RNA, 15 nt, Human
augugguuacacacu

SEQ ID NO: 3645353 - RNA, 17 nt, Human
augugguuauuucucug

SEQ ID NO: 3645354 - RNA, 15 nt, Human
augugguucuucaaa

SEQ ID NO: 3645355 - RNA, 17 nt, Human
augugguuuucuuaagg

SEQ ID NO: 3645356 - RNA, 21 nt, Human
auguguaaacaauuuuauaua

SEQ ID NO: 3645357 - RNA, 22 nt, Human
auguguaacacagugccuucaa

SEQ ID NO: 3645358 - RNA, 13 nt, Human
auguguaaguauu

SEQ ID NO: 3645359 - RNA, 19 nt, Human
auguguacaucccauguaa

SEQ ID NO: 3645360 - RNA, 21 nt, Human
auguguacaucccauguaaca

SEQ ID NO: 3645361 - RNA, 14 nt, Human
auguguacauggca

SEQ ID NO: 3645362 - RNA, 22 nt, Human
auguguacauggcagaguuugu

SEQ ID NO: 3645363 - RNA, 17 nt, Human
auguguagccugugcau

SEQ ID NO: 3645364 - RNA, 21 nt, Human
auguguagcugcaaaaauaau

SEQ ID NO: 3645365 - RNA, 23 nt, Human
auguguauaaaaauaaaaaagau

SEQ ID NO: 3645366 - RNA, 14 nt, Human
auguguauaaauug

SEQ ID NO: 3645367 - RNA, 16 nt, Human
auguguauauauacau

SEQ ID NO: 3645368 - RNA, 19 nt, Human
auguguauauauacauaca

SEQ ID NO: 3645369 - RNA, 23 nt, Human
auguguauauauacauacacuug

SEQ ID NO: 3645370 - RNA, 18 nt, Human
auguguaucggaugcuuu

SEQ ID NO: 3645371 - RNA, 20 nt, Human
auguguauuuccagugcaau

SEQ ID NO: 3645372 - RNA, 14 nt, Human
auguguauuucuua

SEQ ID NO: 3645373 - RNA, 16 nt, Human
auguguauuucuuaua

SEQ ID NO: 3645374 - RNA, 21 nt, Human
augugucacuacucacagucu

SEQ ID NO: 3645375 - RNA, 15 nt, Human
augugucacuugugc

SEQ ID NO: 3645376 - RNA, 17 nt, Human
augugucacuugugcuu

SEQ ID NO: 3645377 - RNA, 14 nt, Human
augugucccagaag

SEQ ID NO: 3645378 - RNA, 22 nt, Human
auguguccuaucuaucuuccaa

SEQ ID NO: 3645379 - RNA, 20 nt, Human
augugucuguauuucaugug

SEQ ID NO: 3645380 - RNA, 21 nt, Human
augugucuguauuucaugugg

SEQ ID NO: 3645381 - RNA, 13 nt, Human
augugucuuuaga

SEQ ID NO: 3645382 - RNA, 21 nt, Human
augugucuuuagauagcccug

SEQ ID NO: 3645383 - RNA, 13 nt, Human
augugugaaguga

SEQ ID NO: 3645384 - RNA, 16 nt, Human
augugugcaugugugu

SEQ ID NO: 3645385 - RNA, 20 nt, Human
augugugccauagaguuuaa

SEQ ID NO: 3645386 - RNA, 15 nt, Human
augugugcccagcuu

SEQ ID NO: 3645387 - RNA, 15 nt, Human
augugugcgagugug

SEQ ID NO: 3645388 - RNA, 19 nt, Human
augugugcgagugugugca

SEQ ID NO: 3645389 - RNA, 17 nt, Human
augugugcucuucuucu

SEQ ID NO: 3645390 - RNA, 15 nt, Human
auguguggcagauuu

SEQ ID NO: 3645391 - RNA, 14 nt, Human
auguguggccugca

SEQ ID NO: 3645392 - RNA, 20 nt, Human
auguguguagacaaauauuu

SEQ ID NO: 3645393 - RNA, 21 nt, Human
auguguguauaagugcacaca

SEQ ID NO: 3645394 - RNA, 15 nt, Human
auguguguauaugga

SEQ ID NO: 3645395 - RNA, 16 nt, Human
auguguguauauggac

SEQ ID NO: 3645396 - RNA, 17 nt, Human
auguguguauauguaug

SEQ ID NO: 3645397 - RNA, 22 nt, Human
auguguguauauguaugugugu

SEQ ID NO: 3645398 - RNA, 20 nt, Human
auguguguaugggugugugu

SEQ ID NO: 3645399 - RNA, 18 nt, Human
augugugugaugugacau

SEQ ID NO: 3645400 - RNA, 19 nt, Human
augugugugaugugacauu

SEQ ID NO: 3645401 - RNA, 20 nt, Human
augugugugaugugacauuu

SEQ ID NO: 3645402 - RNA, 16 nt, Human
augugugugcaagugu

SEQ ID NO: 3645403 - RNA, 19 nt, Human
augugugugcaagugugug

SEQ ID NO: 3645404 - RNA, 21 nt, Human
auguguguguaugcuacuaca

SEQ ID NO: 3645405 - RNA, 21 nt, Human
auguguguguauguuugcaca

SEQ ID NO: 3645406 - RNA, 15 nt, Human
auguguguugauacu

SEQ ID NO: 3645407 - RNA, 22 nt, Human
auguguguugauacuguugcac

SEQ ID NO: 3645408 - RNA, 12 nt, Human
auguguguuuaa

SEQ ID NO: 3645409 - RNA, 19 nt, Human
auguguguuuaaauaaagu

SEQ ID NO: 3645410 - RNA, 13 nt, Human
auguguuaaucuu

SEQ ID NO: 3645411 - RNA, 20 nt, Human
auguguuaaucuuaauguau

SEQ ID NO: 3645412 - RNA, 13 nt, Human
auguguucuuauu

SEQ ID NO: 3645413 - RNA, 13 nt, Human
auguguugccacu

SEQ ID NO: 3645414 - RNA, 16 nt, Human
auguguuggacaaaug

SEQ ID NO: 3645415 - RNA, 17 nt, Human
auguguuggacaaaugu

SEQ ID NO: 3645416 - RNA, 22 nt, Human
auguguuggacaaaugugaaga

SEQ ID NO: 3645417 - RNA, 22 nt, Human
auguguuggggaagggccugcc

SEQ ID NO: 3645418 - RNA, 13 nt, Human
auguguugugaua

SEQ ID NO: 3645419 - RNA, 13 nt, Human
auguguuuagaau

SEQ ID NO: 3645420 - RNA, 20 nt, Human
auguguuuagaauugaaggu

SEQ ID NO: 3645421 - RNA, 17 nt, Human
auguguuucacaguuug

SEQ ID NO: 3645422 - RNA, 22 nt, Human
auguguuucacaguuugaaaua

SEQ ID NO: 3645423 - RNA, 12 nt, Human
auguguuuccau

SEQ ID NO: 3645424 - RNA, 12 nt, Human
auguguuugugu

SEQ ID NO: 3645425 - RNA, 15 nt, Human
auguguuuuagaugg

SEQ ID NO: 3645426 - RNA, 16 nt, Human
auguguuuuauaaaau

SEQ ID NO: 3645427 - RNA, 16 nt, Human
auguguuuuucuccag

SEQ ID NO: 3645428 - RNA, 17 nt, Human
auguguuuuucuccagu

SEQ ID NO: 3645429 - RNA, 15 nt, Human
auguuaaaauguauu

SEQ ID NO: 3645430 - RNA, 14 nt, Human
auguuaaaaugugu

SEQ ID NO: 3645431 - RNA, 15 nt, Human
auguuaaacuagcau

SEQ ID NO: 3645432 - RNA, 19 nt, Human
auguuaaacuagcauaucu

SEQ ID NO: 3645433 - RNA, 12 nt, Human
augguggcuggg

SEQ ID NO: 3645434 - RNA, 17 nt, Human
augguggcuucagcucc

SEQ ID NO: 3645435 - RNA, 17 nt, Human
auggugggcuucagggc

SEQ ID NO: 3645436 - RNA, 22 nt, Human
auggugguaaacauucucucag

SEQ ID NO: 3645437 - RNA, 24 nt, Human
auggugguugggacccaguggcag

SEQ ID NO: 3645438 - RNA, 20 nt, Human
augguguaauaagacauaac

SEQ ID NO: 3645439 - RNA, 19 nt, Human
augguguagaacacuaauu

SEQ ID NO: 3645440 - RNA, 18 nt, Human
auggugugaaagucagau

SEQ ID NO: 3645441 - RNA, 18 nt, Human
auggugugaacccgggag

SEQ ID NO: 3645442 - RNA, 23 nt, Human
augguguggacugaaugggauca

SEQ ID NO: 3645443 - RNA, 14 nt, Human
augguguuacugca

SEQ ID NO: 3645444 - RNA, 15 nt, Human
augguguucuccugc

SEQ ID NO: 3645445 - RNA, 20 nt, Human
augguguugcccugagugga

SEQ ID NO: 3645446 - RNA, 16 nt, Human
augguguuuucaugua

SEQ ID NO: 3645447 - RNA, 22 nt, Human
augguguuuuucuuguaaaugu

SEQ ID NO: 3645448 - RNA, 13 nt, Human
augguuaacuaau

SEQ ID NO: 3645449 - RNA, 17 nt, Human
augguuacaaacuacag

SEQ ID NO: 3645450 - RNA, 15 nt, Human
augguuaugaaagaa

SEQ ID NO: 3645451 - RNA, 19 nt, Human
augguuaugaaagaauaua

SEQ ID NO: 3645452 - RNA, 17 nt, Human
augguuccaugccugag

SEQ ID NO: 3645453 - RNA, 18 nt, Human
augguuccaugccugagg

SEQ ID NO: 3645454 - RNA, 20 nt, Human
augguuccaugccugagggu

SEQ ID NO: 3645455 - RNA, 22 nt, Human
augguuccaugccugagggugg

SEQ ID NO: 3645456 - RNA, 20 nt, Human
augguuccccuguucacucu

SEQ ID NO: 3645457 - RNA, 21 nt, Human
augguucccuugaugaagaag

SEQ ID NO: 3645458 - RNA, 16 nt, Human
augguucguucuguuu

SEQ ID NO: 3645459 - RNA, 16 nt, Human
augguucucaggccug

SEQ ID NO: 3645460 - RNA, 16 nt, Human
augguugagaaaugaa

SEQ ID NO: 3645461 - RNA, 15 nt, Human
augguugccuuaaag

SEQ ID NO: 3645462 - RNA, 17 nt, Human
augguugccuuaaagaa

SEQ ID NO: 3645463 - RNA, 18 nt, Human
augguugccuuaaagaaa

SEQ ID NO: 3645464 - RNA, 23 nt, Human
augguugguaacacaaauuuuca

SEQ ID NO: 3645465 - RNA, 12 nt, Human
augguuguauua

SEQ ID NO: 3645466 - RNA, 16 nt, Human
augguuguauuagaug

SEQ ID NO: 3645467 - RNA, 18 nt, Human
augguuguauuagauguu

SEQ ID NO: 3645468 - RNA, 18 nt, Human
augguugucuguuuuugu

SEQ ID NO: 3645469 - RNA, 22 nt, Human
augguuuauuuuguauuguggu

SEQ ID NO: 3645470 - RNA, 22 nt, Human
augguuucagcacuagccaaac

SEQ ID NO: 3645471 - RNA, 22 nt, Human
augguuuccuccauuugagaaa

SEQ ID NO: 3645472 - RNA, 22 nt, Human
augguuugacucccgaacauca

SEQ ID NO: 3645473 - RNA, 18 nt, Human
augguuugcaaggaagcc

SEQ ID NO: 3645474 - RNA, 15 nt, Human
augguuuggagcuga

SEQ ID NO: 3645475 - RNA, 14 nt, Human
augguuuucuugug

SEQ ID NO: 3645476 - RNA, 17 nt, Human
augguuuuugagauauu

SEQ ID NO: 3645477 - RNA, 11 nt, Human
auguaaaaagg

SEQ ID NO: 3645478 - RNA, 21 nt, Human
auguaaaacauuuauuuugac

SEQ ID NO: 3645479 - RNA, 13 nt, Human
auguaaaagccua

SEQ ID NO: 3645480 - RNA, 14 nt, Human
auguaaaaucuugu

SEQ ID NO: 3645481 - RNA, 16 nt, Human
auguaaaaucuuguca

SEQ ID NO: 3645482 - RNA, 20 nt, Human
auguaaaaucuugucaugug

SEQ ID NO: 3645483 - RNA, 16 nt, Human
auguaaaauguugaau

SEQ ID NO: 3645484 - RNA, 13 nt, Human
auguaaaauguuu

SEQ ID NO: 3645485 - RNA, 14 nt, Human
auguaaaauuuugc

SEQ ID NO: 3645486 - RNA, 18 nt, Human
auguaaacaaaauuuagu

SEQ ID NO: 3645487 - RNA, 15 nt, Human
auguaaacagugccu

SEQ ID NO: 3645488 - RNA, 23 nt, Human
auguaaacauaauucuuguauau

SEQ ID NO: 3645489 - RNA, 15 nt, Human
auguuaccucugaau

SEQ ID NO: 3645490 - RNA, 14 nt, Human
auguuacuauuuuc

SEQ ID NO: 3645491 - RNA, 21 nt, Human
auguuacuauuuucuacaauu

SEQ ID NO: 3645492 - RNA, 23 nt, Human
auguuacuauuuucuacaauuaa

SEQ ID NO: 3645493 - RNA, 17 nt, Human
auguuacucucuugcac

SEQ ID NO: 3645494 - RNA, 18 nt, Human
auguuacugaucaugcau

SEQ ID NO: 3645495 - RNA, 24 nt, Human
auguuagacucaugguguguuaca

SEQ ID NO: 3645496 - RNA, 15 nt, Human
auguuagagacuuuu

SEQ ID NO: 3645497 - RNA, 14 nt, Human
auguuagaguaaug

SEQ ID NO: 3645498 - RNA, 18 nt, Human
auguuaggaaaauuucac

SEQ ID NO: 3645499 - RNA, 20 nt, Human
auguuaguaauaccucuaau

SEQ ID NO: 3645500 - RNA, 16 nt, Human
auguuagucauuguua

SEQ ID NO: 3645501 - RNA, 20 nt, Human
auguuaguuaccuuauaguu

SEQ ID NO: 3645502 - RNA, 18 nt, Human
auguuaguuaguguagau

SEQ ID NO: 3645503 - RNA, 15 nt, Human
auguuauagugaauu

SEQ ID NO: 3645504 - RNA, 16 nt, Human
auguuauaucauaugu

SEQ ID NO: 3645505 - RNA, 21 nt, Human
auguuauauguuguucuuaca

SEQ ID NO: 3645506 - RNA, 18 nt, Human
auguuaugacuauguaaa

SEQ ID NO: 3645507 - RNA, 13 nt, Human
auguuauguaaaa

SEQ ID NO: 3645508 - RNA, 14 nt, Human
auguuauguaaaag

SEQ ID NO: 3645509 - RNA, 12 nt, Human
auguuauguuua

SEQ ID NO: 3645510 - RNA, 13 nt, Human
auguuauguuuaa

SEQ ID NO: 3645511 - RNA, 19 nt, Human
auguuauguuuaauaagcu

SEQ ID NO: 3645512 - RNA, 15 nt, Human
auguuauuagauguu

SEQ ID NO: 3645513 - RNA, 13 nt, Human
auguuauuaucug

SEQ ID NO: 3645514 - RNA, 14 nt, Human
auguuauucuagua

SEQ ID NO: 3645515 - RNA, 13 nt, Human
auguuauugaaaa

SEQ ID NO: 3645516 - RNA, 18 nt, Human
auguuauuucugcaaaca

SEQ ID NO: 3645517 - RNA, 22 nt, Human
auguuauuuguuauuuucagua

SEQ ID NO: 3645518 - RNA, 19 nt, Human
auguuauuuuuuaauuauu

SEQ ID NO: 3645519 - RNA, 20 nt, Human
auguuauuuuuuaauuauua

SEQ ID NO: 3645520 - RNA, 23 nt, Human
auguucaaagucaaauaacuccu

SEQ ID NO: 3645521 - RNA, 14 nt, Human
auguucaacuggag

SEQ ID NO: 3645522 - RNA, 18 nt, Human
auguucaauuauuucccc

SEQ ID NO: 3645523 - RNA, 16 nt, Human
auguucagauuauugg

SEQ ID NO: 3645524 - RNA, 19 nt, Human
auguucagcacugucccuu

SEQ ID NO: 3645525 - RNA, 16 nt, Human
auguucaguguaauuu

SEQ ID NO: 3645526 - RNA, 21 nt, Human
auguucaucauccuaagcuau

SEQ ID NO: 3645527 - RNA, 15 nt, Human
auguuccacuaaccc

SEQ ID NO: 3645528 - RNA, 17 nt, Human
auguuccagacauucuc

SEQ ID NO: 3645529 - RNA, 13 nt, Human
auguucccuccgg

SEQ ID NO: 3645530 - RNA, 16 nt, Human
auguuccuagugaaag

SEQ ID NO: 3645531 - RNA, 17 nt, Human
auguuccucaaagcuug

SEQ ID NO: 3645532 - RNA, 21 nt, Human
auguuccucaaagcuuggauu

SEQ ID NO: 3645533 - RNA, 11 nt, Human
auguuccuucc

SEQ ID NO: 3645534 - RNA, 12 nt, Human
auguuccuucca

SEQ ID NO: 3645535 - RNA, 17 nt, Human
auguucuaagaagugaa

SEQ ID NO: 3645536 - RNA, 13 nt, Human
auguucuaaguuu

SEQ ID NO: 3645537 - RNA, 21 nt, Human
auguucuaaguuucuaagauu

SEQ ID NO: 3645538 - RNA, 19 nt, Human
auguucuaugguuaugaaa

SEQ ID NO: 3645539 - RNA, 22 nt, Human
auguucuauuucagugccaaua

SEQ ID NO: 3645540 - RNA, 20 nt, Human
auguucuccagucauuaugu

SEQ ID NO: 3645541 - RNA, 18 nt, Human
auguucucuaucauuuaa

SEQ ID NO: 3645542 - RNA, 21 nt, Human
auguucucuaucauuuaauaa

SEQ ID NO: 3645543 - RNA, 13 nt, Human
auguucucugagg

SEQ ID NO: 3645544 - RNA, 18 nt, Human
auguucugaauaauuucu

SEQ ID NO: 3645545 - RNA, 16 nt, Human
auguucugacauuaac

SEQ ID NO: 3645546 - RNA, 17 nt, Human
auguucugacauuaaca

SEQ ID NO: 3645547 - RNA, 14 nt, Human
auguucugccccca

SEQ ID NO: 3645548 - RNA, 18 nt, Human
auguucugcccccagccc

SEQ ID NO: 3645549 - RNA, 13 nt, Human
auguucugcuuuc

SEQ ID NO: 3645550 - RNA, 14 nt, Human
auguucugggacac

SEQ ID NO: 3645551 - RNA, 20 nt, Human
auguucugucccuugccccc

SEQ ID NO: 3645552 - RNA, 15 nt, Human
auguucuuaauucuu

SEQ ID NO: 3645553 - RNA, 14 nt, Human
auguucuuccaguu

SEQ ID NO: 3645554 - RNA, 11 nt, Human
auguucuuuau

SEQ ID NO: 3645555 - RNA, 13 nt, Human
auguucuuuauau

SEQ ID NO: 3645556 - RNA, 20 nt, Human
auguucuuucacccuuuucu

SEQ ID NO: 3645557 - RNA, 13 nt, Human
auguucuuuggaa

SEQ ID NO: 3645558 - RNA, 14 nt, Human
auguucuuuggaaa

SEQ ID NO: 3645559 - RNA, 20 nt, Human
auguucuuuuaaaugauuga

SEQ ID NO: 3645560 - RNA, 13 nt, Human
auguugaacaaaa

SEQ ID NO: 3645561 - RNA, 15 nt, Human
auguugaacaaaaua

SEQ ID NO: 3645562 - RNA, 16 nt, Human
auguugaagccuuugu

SEQ ID NO: 3645563 - RNA, 19 nt, Human
auguugaauacuuuuuaca

SEQ ID NO: 3645564 - RNA, 22 nt, Human
auguugaaugcccacaggcaaa

SEQ ID NO: 3645565 - RNA, 14 nt, Human
auguugacauuugu

SEQ ID NO: 3645566 - RNA, 22 nt, Human
auguugagaaucccaaauuuga

SEQ ID NO: 3645567 - RNA, 18 nt, Human
auguugagccaggccugg

SEQ ID NO: 3645568 - RNA, 14 nt, Human
auguugagggaaca

SEQ ID NO: 3645569 - RNA, 13 nt, Human
auguugaggugga

SEQ ID NO: 3645570 - RNA, 14 nt, Human
auguugaugcaauc

SEQ ID NO: 3645571 - RNA, 12 nt, Human
auguugauuucu

SEQ ID NO: 3645572 - RNA, 16 nt, Human
auguugauuuuuacug

SEQ ID NO: 3645573 - RNA, 19 nt, Human
auguugcaaugugaaaaau

SEQ ID NO: 3645574 - RNA, 22 nt, Human
auguugcaaugugaaaaaucug

SEQ ID NO: 3645575 - RNA, 17 nt, Human
auguugcauagaauaaa

SEQ ID NO: 3645576 - RNA, 18 nt, Human
auguugcauagaauaaaa

SEQ ID NO: 3645577 - RNA, 12 nt, Human
auguugcccagg

SEQ ID NO: 3645578 - RNA, 14 nt, Human
auguugcccaggca

SEQ ID NO: 3645579 - RNA, 15 nt, Human
auguugcccaggcag

SEQ ID NO: 3645580 - RNA, 20 nt, Human
auguugcccaggcaggucuu

SEQ ID NO: 3645581 - RNA, 22 nt, Human
auguugccccuuucucuuuucc

SEQ ID NO: 3645582 - RNA, 13 nt, Human
auguugcugccaa

SEQ ID NO: 3645583 - RNA, 17 nt, Human
auguuggaagagaaagc

SEQ ID NO: 3645584 - RNA, 19 nt, Human
auguuggacaccuuuaggu

SEQ ID NO: 3645585 - RNA, 22 nt, Human
auguuggauaaggaauuauaga

SEQ ID NO: 3645586 - RNA, 21 nt, Human
auguuggauuuauaaaugcua

SEQ ID NO: 3645587 - RNA, 21 nt, Human
auguuggcagaugcagcucuu

SEQ ID NO: 3645588 - RNA, 23 nt, Human
auguuggccaccaggugccuuuc

SEQ ID NO: 3645589 - RNA, 13 nt, Human
auguuggccaggc

SEQ ID NO: 3645590 - RNA, 16 nt, Human
auguuggccaggcugc

SEQ ID NO: 3645591 - RNA, 16 nt, Human
auguuggccaggcugg

SEQ ID NO: 3645592 - RNA, 13 nt, Human
auguuggcuggga

SEQ ID NO: 3645593 - RNA, 17 nt, Human
auguugguauuuaucua

SEQ ID NO: 3645594 - RNA, 21 nt, Human
auguugguauuuaucuauugu

SEQ ID NO: 3645595 - RNA, 14 nt, Human
auguuguaagcaac

SEQ ID NO: 3645596 - RNA, 19 nt, Human
auguuguaauauuucuuca

SEQ ID NO: 3645597 - RNA, 16 nt, Human
auguuguaaugcugca

SEQ ID NO: 3645598 - RNA, 15 nt, Human
auguuguagauacaa

SEQ ID NO: 3645599 - RNA, 22 nt, Human
auguuguagauacaaucagcug

SEQ ID NO: 3645600 - RNA, 18 nt, Human
auguuguaguguccccca

SEQ ID NO: 3645601 - RNA, 22 nt, Human
auguuguccaauuguugacagu

SEQ ID NO: 3645602 - RNA, 22 nt, Human
auguugucuaagaaauugaaua

SEQ ID NO: 3645603 - RNA, 19 nt, Human
auguugugaauaauuacag

SEQ ID NO: 3645604 - RNA, 21 nt, Human
auguuguguuucuguucaccu

SEQ ID NO: 3645605 - RNA, 17 nt, Human
auguuguuaaaauuaug

SEQ ID NO: 3645606 - RNA, 12 nt, Human
auguuguuauuu

SEQ ID NO: 3645607 - RNA, 14 nt, Human
auguuguuauuuaa

SEQ ID NO: 3645608 - RNA, 17 nt, Human
auguuguuauuuaaaga

SEQ ID NO: 3645609 - RNA, 17 nt, Human
auguuguuuuguacaga

SEQ ID NO: 3645610 - RNA, 21 nt, Human
auguuguuuuguacagaugug

SEQ ID NO: 3645611 - RNA, 16 nt, Human
auguuuaaaacaccuu

SEQ ID NO: 3645612 - RNA, 22 nt, Human
auguuuaaaacaccuucuauag

SEQ ID NO: 3645613 - RNA, 18 nt, Human
auguuuaaaauaaaauga

SEQ ID NO: 3645614 - RNA, 18 nt, Human
auguuuaaaguaauuguu

SEQ ID NO: 3645615 - RNA, 22 nt, Human
auguuuaaaguaauuguuccag

SEQ ID NO: 3645616 - RNA, 12 nt, Human
auguuuaagauu

SEQ ID NO: 3645617 - RNA, 21 nt, Human
auguuuaagauuuaauuugcc

SEQ ID NO: 3645618 - RNA, 16 nt, Human
auguuuaagcagaauu

SEQ ID NO: 3645619 - RNA, 20 nt, Human
auguuuaagcagaauuggaa

SEQ ID NO: 3645620 - RNA, 21 nt, Human
auguuuaagcagaauuggaaa

SEQ ID NO: 3645621 - RNA, 14 nt, Human
auguuuaaucuguu

SEQ ID NO: 3645622 - RNA, 18 nt, Human
auguuuacacucuuugua

SEQ ID NO: 3645623 - RNA, 19 nt, Human
auguuuacacucuuuguaa

SEQ ID NO: 3645624 - RNA, 17 nt, Human
auguuuacagaggacag

SEQ ID NO: 3645625 - RNA, 21 nt, Human
auguuuacagggagccuccug

SEQ ID NO: 3645626 - RNA, 20 nt, Human
auguuuacauaucaccucau

SEQ ID NO: 3645627 - RNA, 17 nt, Human
auguuuagacuuuaaca

SEQ ID NO: 3645628 - RNA, 18 nt, Human
auguuuagacuuuaacau

SEQ ID NO: 3645629 - RNA, 20 nt, Human
auguuuauaaaucuuaugcu

SEQ ID NO: 3645630 - RNA, 20 nt, Human
auguuuauaucugcaaaaaa

SEQ ID NO: 3645631 - RNA, 14 nt, Human
auguuuaucugcuu

SEQ ID NO: 3645632 - RNA, 13 nt, Human
auguuuaugaaaa

SEQ ID NO: 3645633 - RNA, 19 nt, Human
auguuuaugaaaauaaaua

SEQ ID NO: 3645634 - RNA, 15 nt, Human
auuaaacauaaaaca

SEQ ID NO: 3645635 - RNA, 16 nt, Human
auuaaacaugcuguac

SEQ ID NO: 3645636 - RNA, 16 nt, Human
auuaaaccaucucccu

SEQ ID NO: 3645637 - RNA, 17 nt, Human
auuaaaccaucucccug

SEQ ID NO: 3645638 - RNA, 14 nt, Human
auuaaacccuggau

SEQ ID NO: 3645639 - RNA, 17 nt, Human
auuaaaccggaccaucu

SEQ ID NO: 3645640 - RNA, 20 nt, Human
auuaaaccugucuccacugu

SEQ ID NO: 3645641 - RNA, 14 nt, Human
auuaaacgauuuuu

SEQ ID NO: 3645642 - RNA, 14 nt, Human
auuaaacggauuau

SEQ ID NO: 3645643 - RNA, 15 nt, Human
auuaaacggauuauu

SEQ ID NO: 3645644 - RNA, 16 nt, Human
auuaaacggauuauuu

SEQ ID NO: 3645645 - RNA, 19 nt, Human
auuaaacggauuauuuuuu

SEQ ID NO: 3645646 - RNA, 20 nt, Human
auuaaacggauuauuuuuuc

SEQ ID NO: 3645647 - RNA, 19 nt, Human
auuaaacguaugcauguga

SEQ ID NO: 3645648 - RNA, 20 nt, Human
auuaaacguaugcaugugaa

SEQ ID NO: 3645649 - RNA, 13 nt, Human
auuaaacuguuaa

SEQ ID NO: 3645650 - RNA, 17 nt, Human
auuaaacuguuaacuua

SEQ ID NO: 3645651 - RNA, 13 nt, Human
auuaaacuucaua

SEQ ID NO: 3645652 - RNA, 18 nt, Human
auuaaacuuuuaauucau

SEQ ID NO: 3645653 - RNA, 19 nt, Human
auuaaacuuuuaauucauu

SEQ ID NO: 3645654 - RNA, 12 nt, Human
auuaaacuuuuu

SEQ ID NO: 3645655 - RNA, 20 nt, Human
aguggcuucacuccugcugu

SEQ ID NO: 3645656 - RNA, 19 nt, Human
aguggcuucauuagagcag

SEQ ID NO: 3645657 - RNA, 21 nt, Human
aguggcuucauuagagcaggc

SEQ ID NO: 3645658 - RNA, 18 nt, Human
aguggcuugaaaucuuuu

SEQ ID NO: 3645659 - RNA, 17 nt, Human
aguggcuuuaaugaaua

SEQ ID NO: 3645660 - RNA, 14 nt, Human
agugggaaaaaugu

SEQ ID NO: 3645661 - RNA, 18 nt, Human
agugggaaaaauguagga

SEQ ID NO: 3645662 - RNA, 12 nt, Human
agugggaagccc

SEQ ID NO: 3645663 - RNA, 22 nt, Human
agugggaagcccauccugacca

SEQ ID NO: 3645664 - RNA, 15 nt, Human
agugggacccauaga

SEQ ID NO: 3645665 - RNA, 13 nt, Human
agugggagaaaac

SEQ ID NO: 3645666 - RNA, 17 nt, Human
agugggagaaaacacuu

SEQ ID NO: 3645667 - RNA, 19 nt, Human
agugggagaaggcagugau

SEQ ID NO: 3645668 - RNA, 16 nt, Human
agugggaggggcaggc

SEQ ID NO: 3645669 - RNA, 22 nt, Human
agugggaggggcaggcugacau

SEQ ID NO: 3645670 - RNA, 22 nt, Human
agugggaggguaccagcagaaa

SEQ ID NO: 3645671 - RNA, 14 nt, Human
agugggcaaaagcu

SEQ ID NO: 3645672 - RNA, 15 nt, Human
agugggccaggacag

SEQ ID NO: 3645673 - RNA, 17 nt, Human
agugggcugcaucuggg

SEQ ID NO: 3645674 - RNA, 13 nt, Human
aguggggaagagu

SEQ ID NO: 3645675 - RNA, 15 nt, Human
aguggggacagagca

SEQ ID NO: 3645676 - RNA, 14 nt, Human
aguggggccugugg

SEQ ID NO: 3645677 - RNA, 20 nt, Human
aguggggcucucugaguccu

SEQ ID NO: 3645678 - RNA, 19 nt, Human
agugggggagagcaggcug

SEQ ID NO: 3645679 - RNA, 22 nt, Human
aguggggggaacgcccacuucc

SEQ ID NO: 3645680 - RNA, 12 nt, Human
aguggggguggg

SEQ ID NO: 3645681 - RNA, 18 nt, Human
aguggggucucccucucc

SEQ ID NO: 3645682 - RNA, 19 nt, Human
agugggguuaucucugugu

SEQ ID NO: 3645683 - RNA, 19 nt, Human
agugggguugcaaccacug

SEQ ID NO: 3645684 - RNA, 21 nt, Human
agugggucccacuuccccucc

SEQ ID NO: 3645685 - RNA, 13 nt, Human
agugggugaauaa

SEQ ID NO: 3645686 - RNA, 19 nt, Human
agugggugaauaauacagu

SEQ ID NO: 3645687 - RNA, 16 nt, Human
agugggugacaagagc

SEQ ID NO: 3645688 - RNA, 18 nt, Human
agugggugacaagagccu

SEQ ID NO: 3645689 - RNA, 19 nt, Human
agugggugacaagagccug

SEQ ID NO: 3645690 - RNA, 21 nt, Human
agugggugacaagagccugau

SEQ ID NO: 3645691 - RNA, 18 nt, Human
agugggugagaugcugga

SEQ ID NO: 3645692 - RNA, 11 nt, Human
agugggugggg

SEQ ID NO: 3645693 - RNA, 14 nt, Human
aguggguggggagu

SEQ ID NO: 3645694 - RNA, 15 nt, Human
aguggguuucacaag

SEQ ID NO: 3645695 - RNA, 15 nt, Human
aguggguuuuuuagu

SEQ ID NO: 3645696 - RNA, 21 nt, Human
aguggguuuuuuaguugaauu

SEQ ID NO: 3645697 - RNA, 17 nt, Human
agugguaagcuaugucc

SEQ ID NO: 3645698 - RNA, 15 nt, Human
agugguaucuugcag

SEQ ID NO: 3645699 - RNA, 19 nt, Human
agugguccauggaaugcuu

SEQ ID NO: 3645700 - RNA, 13 nt, Human
aguggucuuugua

SEQ ID NO: 3645701 - RNA, 17 nt, Human
aguggucuuuguaagag

SEQ ID NO: 3645702 - RNA, 15 nt, Human
aguggugauuugaaa

SEQ ID NO: 3645703 - RNA, 11 nt, Human
aguggugccua

SEQ ID NO: 3645704 - RNA, 15 nt, Human
aguggugcucaguug

SEQ ID NO: 3645705 - RNA, 17 nt, Human
aguggugcucaguugua

SEQ ID NO: 3645706 - RNA, 22 nt, Human
aguggugcucaguuguagaaug

SEQ ID NO: 3645707 - RNA, 14 nt, Human
agugguggcagggc

SEQ ID NO: 3645708 - RNA, 14 nt, Human
aguggugggggaag

SEQ ID NO: 3645709 - RNA, 19 nt, Human
aguggugguauguaaugga

SEQ ID NO: 3645710 - RNA, 23 nt, Human
aguggugguuuucuguucuuucu

SEQ ID NO: 3645711 - RNA, 19 nt, Human
agugguuguuaguuauaga

SEQ ID NO: 3645712 - RNA, 23 nt, Human
agugguuuaggcuauuuguaaau

SEQ ID NO: 3645713 - RNA, 22 nt, Human
agugguuuccacaugcucugag

SEQ ID NO: 3645714 - RNA, 22 nt, Human
agugguuugauggugacuuccu

SEQ ID NO: 3645715 - RNA, 17 nt, Human
agugguuuuauacugaa

SEQ ID NO: 3645716 - RNA, 21 nt, Human
agugguuuuauacugaaggaa

SEQ ID NO: 3645717 - RNA, 15 nt, Human
aguguaaaaaugaga

SEQ ID NO: 3645718 - RNA, 11 nt, Human
aguguaaaaua

SEQ ID NO: 3645719 - RNA, 13 nt, Human
aguguaaaauaag

SEQ ID NO: 3645720 - RNA, 14 nt, Human
aguguaaaauauuu

SEQ ID NO: 3645721 - RNA, 18 nt, Human
aguguaaaauauuuugaa

SEQ ID NO: 3645722 - RNA, 17 nt, Human
aguguaaagcauuccaa

SEQ ID NO: 3645723 - RNA, 14 nt, Human
aguguaaauccuuu

SEQ ID NO: 3645724 - RNA, 15 nt, Human
aguguaaauguuagu

SEQ ID NO: 3645725 - RNA, 19 nt, Human
aguguaacaagaaaggaga

SEQ ID NO: 3645726 - RNA, 13 nt, Human
aguguaacagcug

SEQ ID NO: 3645727 - RNA, 20 nt, Human
aguguaacuugcuuaaauuu

SEQ ID NO: 3645728 - RNA, 14 nt, Human
aguguaaugaauac

SEQ ID NO: 3645729 - RNA, 19 nt, Human
aguguaauguagcguguuu

SEQ ID NO: 3645730 - RNA, 22 nt, Human
aguguacauggaauaacaugua

SEQ ID NO: 3645731 - RNA, 19 nt, Human
aguguaccauuaaaauaug

SEQ ID NO: 3645732 - RNA, 23 nt, Human
aguguacccccgcccaggcuggc

SEQ ID NO: 3645733 - RNA, 23 nt, Human
aguguacuaauuaacauauaaua

SEQ ID NO: 3645734 - RNA, 14 nt, Human
aguguacucccagg

SEQ ID NO: 3645735 - RNA, 15 nt, Human
aguguacucccaggg

SEQ ID NO: 3645736 - RNA, 17 nt, Human
aguguacuuaacuauuc

SEQ ID NO: 3645737 - RNA, 13 nt, Human
aguguagaagcau

SEQ ID NO: 3645738 - RNA, 17 nt, Human
aguguagaagcauuccu

SEQ ID NO: 3645739 - RNA, 23 nt, Human
aguguagaucagagcagcaguga

SEQ ID NO: 3645740 - RNA, 17 nt, Human
aguguagccccaagaag

SEQ ID NO: 3645741 - RNA, 13 nt, Human
aguguaggcagac

SEQ ID NO: 3645742 - RNA, 15 nt, Human
aguguaggcagacac

SEQ ID NO: 3645743 - RNA, 18 nt, Human
aguguaggcuuuacuuag

SEQ ID NO: 3645744 - RNA, 19 nt, Human
aguguaggcuuuacuuagc

SEQ ID NO: 3645745 - RNA, 16 nt, Human
aguguaguuuacagaa

SEQ ID NO: 3645746 - RNA, 15 nt, Human
aguguauaauauaaa

SEQ ID NO: 3645747 - RNA, 16 nt, Human
aguguauaauauaaaa

SEQ ID NO: 3645748 - RNA, 17 nt, Human
aguguauaauauaaaaa

SEQ ID NO: 3645749 - RNA, 13 nt, Human
aguguaucaaaau

SEQ ID NO: 3645750 - RNA, 16 nt, Human
aguguaucaaaaugcu

SEQ ID NO: 3645751 - RNA, 14 nt, Human
aguguaugauuacu

SEQ ID NO: 3645752 - RNA, 20 nt, Human
aguguauggaaauaaaugua

SEQ ID NO: 3645753 - RNA, 14 nt, Human
aguguauuaaauga

SEQ ID NO: 3645754 - RNA, 17 nt, Human
aguguauuaaaugaaca

SEQ ID NO: 3645755 - RNA, 17 nt, Human
aguguauuaggaagugu

SEQ ID NO: 3645756 - RNA, 23 nt, Human
aguguauuuggaaauaaagucag

SEQ ID NO: 3645757 - RNA, 16 nt, Human
aguguauuuuucaaua

SEQ ID NO: 3645758 - RNA, 17 nt, Human
aguguauuuuuuuacua

SEQ ID NO: 3645759 - RNA, 14 nt, Human
agugucaaguugug

SEQ ID NO: 3645760 - RNA, 17 nt, Human
agugucaaguugugcuu

SEQ ID NO: 3645761 - RNA, 18 nt, Human
agugucaaguugugcuug

SEQ ID NO: 3645762 - RNA, 16 nt, Human
agugucacucaaggcg

SEQ ID NO: 3645763 - RNA, 23 nt, Human
agugucagaaggagcuacaaaac

SEQ ID NO: 3645764 - RNA, 20 nt, Human
agugucauauguaggugucu

SEQ ID NO: 3645765 - RNA, 16 nt, Human
agugucaucagaagau

SEQ ID NO: 3645766 - RNA, 12 nt, Human
agugucauguuu

SEQ ID NO: 3645767 - RNA, 13 nt, Human
agugucauuucca

SEQ ID NO: 3645768 - RNA, 17 nt, Human
aguguccccuccacugu

SEQ ID NO: 3645769 - RNA, 23 nt, Human
aguguccuaugcaauaaaauuau

SEQ ID NO: 3645770 - RNA, 14 nt, Human
aguguccucagggg

SEQ ID NO: 3645771 - RNA, 22 nt, Human
aguguccucuucccucucugca

SEQ ID NO: 3645772 - RNA, 19 nt, Human
agugucuauaaaagaaaca

SEQ ID NO: 3645773 - RNA, 20 nt, Human
agugucuauaaaagaaacac

SEQ ID NO: 3645774 - RNA, 18 nt, Human
agugucucaguccaccug

SEQ ID NO: 3645775 - RNA, 16 nt, Human
agugucuggaauugug

SEQ ID NO: 3645776 - RNA, 17 nt, Human
agugucuggaauugugg

SEQ ID NO: 3645777 - RNA, 13 nt, Human
agugucuggcugc

SEQ ID NO: 3645778 - RNA, 16 nt, Human
agugucuguguuuuga

SEQ ID NO: 3645779 - RNA, 18 nt, Human
agugucuuaauuaaaaga

SEQ ID NO: 3645780 - RNA, 18 nt, Human
aguuuguguguugucuug

SEQ ID NO: 3645781 - RNA, 15 nt, Human
aguuuguugaaacac

SEQ ID NO: 3645782 - RNA, 20 nt, Human
aguuuguuucuuugaauuuu

SEQ ID NO: 3645783 - RNA, 23 nt, Human
aguuuguuucuuugaauuuucau

SEQ ID NO: 3645784 - RNA, 16 nt, Human
aguuuuaaaaaaauaa

SEQ ID NO: 3645785 - RNA, 15 nt, Human
aguuuuaaacucauu

SEQ ID NO: 3645786 - RNA, 16 nt, Human
aguuuuaauccagaau

SEQ ID NO: 3645787 - RNA, 13 nt, Human
aguuuuacaaagg

SEQ ID NO: 3645788 - RNA, 19 nt, Human
aguuuuacccuauaucuau

SEQ ID NO: 3645789 - RNA, 14 nt, Human
aguuuuaguugcag

SEQ ID NO: 3645790 - RNA, 15 nt, Human
aguuuuaguuuucuc

SEQ ID NO: 3645791 - RNA, 16 nt, Human
aguuuuauaugcuucu

SEQ ID NO: 3645792 - RNA, 13 nt, Human
aguuuuaucacau

SEQ ID NO: 3645793 - RNA, 15 nt, Human
aguuuuaucauuuuc

SEQ ID NO: 3645794 - RNA, 16 nt, Human
aguuuuauugagaauu

SEQ ID NO: 3645795 - RNA, 21 nt, Human
aguuuuauugagaauuuuaaa

SEQ ID NO: 3645796 - RNA, 19 nt, Human
aguuuuauuuauauuuauu

SEQ ID NO: 3645797 - RNA, 20 nt, Human
aguuuuauuuauauuuauug

SEQ ID NO: 3645798 - RNA, 22 nt, Human
aguuuuauuuauauuuauugac

SEQ ID NO: 3645799 - RNA, 19 nt, Human
aguuuuauuuuauguuuag

SEQ ID NO: 3645800 - RNA, 21 nt, Human
aguuuuauuuucuaaaguacu

SEQ ID NO: 3645801 - RNA, 12 nt, Human
aguuuucagaaa

SEQ ID NO: 3645802 - RNA, 18 nt, Human
aguuuucagaaaaagaaa

SEQ ID NO: 3645803 - RNA, 17 nt, Human
aguuuucagaaccucuu

SEQ ID NO: 3645804 - RNA, 18 nt, Human
aguuuucagaaccucuuc

SEQ ID NO: 3645805 - RNA, 12 nt, Human
aguuuucagugg

SEQ ID NO: 3645806 - RNA, 18 nt, Human
aguuuuccuaaauguaua

SEQ ID NO: 3645807 - RNA, 22 nt, Human
aguuuuccuaagugauuguaug

SEQ ID NO: 3645808 - RNA, 18 nt, Human
aguuuuccuaugcuuuga

SEQ ID NO: 3645809 - RNA, 22 nt, Human
aguuuuccucuauacaucucuc

SEQ ID NO: 3645810 - RNA, 12 nt, Human
aguuuuccuucu

SEQ ID NO: 3645811 - RNA, 15 nt, Human
aguuuucuuccauga

SEQ ID NO: 3645812 - RNA, 12 nt, Human
aguuuucuuguu

SEQ ID NO: 3645813 - RNA, 18 nt, Human
aguuuucuuguugcuuug

SEQ ID NO: 3645814 - RNA, 16 nt, Human
aguuuugaaaagcuau

SEQ ID NO: 3645815 - RNA, 19 nt, Human
aguuuugacaagcuggcuu

SEQ ID NO: 3645816 - RNA, 22 nt, Human
aguuuugacaucagccagcugc

SEQ ID NO: 3645817 - RNA, 18 nt, Human
aguuuugagaacguaaag

SEQ ID NO: 3645818 - RNA, 18 nt, Human
aguuuugaguagauauua

SEQ ID NO: 3645819 - RNA, 20 nt, Human
aguuuugaguagauauuacu

SEQ ID NO: 3645820 - RNA, 21 nt, Human
aguuuugaguagauauuacuu

SEQ ID NO: 3645821 - RNA, 18 nt, Human
aguuuugauaugaguaua

SEQ ID NO: 3645822 - RNA, 16 nt, Human
aguuuugcaaagugca

SEQ ID NO: 3645823 - RNA, 17 nt, Human
aguuuugcauaguucua

SEQ ID NO: 3645824 - RNA, 16 nt, Human
aguuuugcauuuaugg

SEQ ID NO: 3645825 - RNA, 19 nt, Human
aguuuugccagaacaguuu

SEQ ID NO: 3645826 - RNA, 21 nt, Human
aguuuugcuuuuaguuuuucu

SEQ ID NO: 3645827 - RNA, 19 nt, Human
aguuuugggaaguuaaagg

SEQ ID NO: 3645828 - RNA, 21 nt, Human
aguuuugguugcuuuaauauc

SEQ ID NO: 3645829 - RNA, 15 nt, Human
aguuuuguaaauuuc

SEQ ID NO: 3645830 - RNA, 14 nt, Human
aguuuugucauuca

SEQ ID NO: 3645831 - RNA, 18 nt, Human
aguuuugugaaauuuuuc

SEQ ID NO: 3645832 - RNA, 21 nt, Human
aguuuugugaaggugauuuau

SEQ ID NO: 3645833 - RNA, 16 nt, Human
aguuuuguguuuguug

SEQ ID NO: 3645834 - RNA, 18 nt, Human
aguuuuguuguacuuaaa

SEQ ID NO: 3645835 - RNA, 12 nt, Human
aguuuuguuugg

SEQ ID NO: 3645836 - RNA, 18 nt, Human
aguuuuguuuggaccaaa

SEQ ID NO: 3645837 - RNA, 23 nt, Human
aguuuuguuuuaaaacuggaccu

SEQ ID NO: 3645838 - RNA, 17 nt, Human
aguuuuuacaagaugua

SEQ ID NO: 3645839 - RNA, 21 nt, Human
aguuuuuaccuaccacagugu

SEQ ID NO: 3645840 - RNA, 17 nt, Human
aguuuuuauggggcuga

SEQ ID NO: 3645841 - RNA, 20 nt, Human
aguuuuuauugcuuguugga

SEQ ID NO: 3645842 - RNA, 22 nt, Human
aguuuuucagaguggaaugcuu

SEQ ID NO: 3645843 - RNA, 20 nt, Human
aguuuuucaggagcgcaaga

SEQ ID NO: 3645844 - RNA, 21 nt, Human
aguuuuucaggagcgcaagau

SEQ ID NO: 3645845 - RNA, 23 nt, Human
aguuuuucccagcuacaccuuuc

SEQ ID NO: 3645846 - RNA, 15 nt, Human
aguuuuuccuggaau

SEQ ID NO: 3645847 - RNA, 13 nt, Human
aguuuuucugucc

SEQ ID NO: 3645848 - RNA, 12 nt, Human
aguuuuucuuaa

SEQ ID NO: 3645849 - RNA, 16 nt, Human
aguuuuugauagcuuu

SEQ ID NO: 3645850 - RNA, 23 nt, Human
aguuuuuggaguguuauguauuu

SEQ ID NO: 3645851 - RNA, 16 nt, Human
aguuuuugguugggaa

SEQ ID NO: 3645852 - RNA, 20 nt, Human
aguuuuuguucuuaauugca

SEQ ID NO: 3645853 - RNA, 17 nt, Human
aguuuuuuauuaugcau

SEQ ID NO: 3645854 - RNA, 12 nt, Human
aguuuuuucauc

SEQ ID NO: 3645855 - RNA, 14 nt, Human
aguuuuuucaucuu

SEQ ID NO: 3645856 - RNA, 21 nt, Human
aguuuuuugaaauuaugugac

SEQ ID NO: 3645857 - RNA, 15 nt, Human
aguuuuuuuuauaca

SEQ ID NO: 3645858 - RNA, 18 nt, Human
aguuuuuuuuuucuuguc

SEQ ID NO: 3645859 - RNA, 13 nt, Human
auaaaaaaaaaua

SEQ ID NO: 3645860 - RNA, 22 nt, Human
auaaaaaaaaauagaugucuuu

SEQ ID NO: 3645861 - RNA, 19 nt, Human
auaaaaaaaagaaaugaaa

SEQ ID NO: 3645862 - RNA, 20 nt, Human
auaaaaaaaaugaaauguuu

SEQ ID NO: 3645863 - RNA, 12 nt, Human
auaaaaaaagaa

SEQ ID NO: 3645864 - RNA, 16 nt, Human
auaaaaaaagaaaaaa

SEQ ID NO: 3645865 - RNA, 16 nt, Human
auaaaaaaagaaagca

SEQ ID NO: 3645866 - RNA, 18 nt, Human
auuaucuugauacauuca

SEQ ID NO: 3645867 - RNA, 23 nt, Human
auuaucuugauacauucaaauuu

SEQ ID NO: 3645868 - RNA, 23 nt, Human
auuaucuuuucauacauuuucua

SEQ ID NO: 3645869 - RNA, 14 nt, Human
auuaugaauuacau

SEQ ID NO: 3645870 - RNA, 18 nt, Human
auuaugaauuacauuugu

SEQ ID NO: 3645871 - RNA, 22 nt, Human
auuaugaauuacauuuguauaa

SEQ ID NO: 3645872 - RNA, 23 nt, Human
auuaugagacacaggaugaagca

SEQ ID NO: 3645873 - RNA, 20 nt, Human
auuaugagaggcaaugauug

SEQ ID NO: 3645874 - RNA, 16 nt, Human
auuaugaguuugcuua

SEQ ID NO: 3645875 - RNA, 16 nt, Human
auuaugauggaagaca

SEQ ID NO: 3645876 - RNA, 21 nt, Human
auuaugauuuggguuggggaa

SEQ ID NO: 3645877 - RNA, 22 nt, Human
auuaugcaauuagccucauagu

SEQ ID NO: 3645878 - RNA, 16 nt, Human
auuaugcagaauacuu

SEQ ID NO: 3645879 - RNA, 17 nt, Human
auuaugcagaauacuuu

SEQ ID NO: 3645880 - RNA, 20 nt, Human
auuaugcccaguuucugccu

SEQ ID NO: 3645881 - RNA, 20 nt, Human
auuaugcggaaagguauuug

SEQ ID NO: 3645882 - RNA, 15 nt, Human
auuaugcuucuugga

SEQ ID NO: 3645883 - RNA, 14 nt, Human
auuauggaaaacug

SEQ ID NO: 3645884 - RNA, 14 nt, Human
auuauggaaacaga

SEQ ID NO: 3645885 - RNA, 16 nt, Human
auuauggaagauuuua

SEQ ID NO: 3645886 - RNA, 17 nt, Human
auuauggaagauuuuaa

SEQ ID NO: 3645887 - RNA, 17 nt, Human
auuauggcauauauuaa

SEQ ID NO: 3645888 - RNA, 18 nt, Human
auuaugggaaucaagauu

SEQ ID NO: 3645889 - RNA, 16 nt, Human
auuaugggucacagga

SEQ ID NO: 3645890 - RNA, 12 nt, Human
auuauguaaauc

SEQ ID NO: 3645891 - RNA, 14 nt, Human
auuauguaaauccc

SEQ ID NO: 3645892 - RNA, 15 nt, Human
auuauguaaauccca

SEQ ID NO: 3645893 - RNA, 22 nt, Human
auuauguaaaucccauuauuca

SEQ ID NO: 3645894 - RNA, 22 nt, Human
auuauguccugugagaugugua

SEQ ID NO: 3645895 - RNA, 13 nt, Human
auuaugugccaga

SEQ ID NO: 3645896 - RNA, 23 nt, Human
auuaugugccagauuuaugcaua

SEQ ID NO: 3645897 - RNA, 15 nt, Human
auuauguguguuuua

SEQ ID NO: 3645898 - RNA, 20 nt, Human
auuauguuuauauaaaugcu

SEQ ID NO: 3645899 - RNA, 14 nt, Human
auuauguuuuacug

SEQ ID NO: 3645900 - RNA, 16 nt, Human
auuauguuuuuauuaa

SEQ ID NO: 3645901 - RNA, 11 nt, Human
auuauuaaagg

SEQ ID NO: 3645902 - RNA, 11 nt, Human
auuauuaacaa

SEQ ID NO: 3645903 - RNA, 23 nt, Human
auuauuaacauaccuaagaagua

SEQ ID NO: 3645904 - RNA, 19 nt, Human
auuauuaacuacauuuaug

SEQ ID NO: 3645905 - RNA, 20 nt, Human
auuauuaacuacauuuauga

SEQ ID NO: 3645906 - RNA, 22 nt, Human
auuauuaaugaaaauaagaauu

SEQ ID NO: 3645907 - RNA, 23 nt, Human
auuauuacuguugauaauucuua

SEQ ID NO: 3645908 - RNA, 19 nt, Human
auuauuacuuguaaauaua

SEQ ID NO: 3645909 - RNA, 22 nt, Human
auuauuacuuguaaauauaaag

SEQ ID NO: 3645910 - RNA, 12 nt, Human
auuauuacuuuu

SEQ ID NO: 3645911 - RNA, 14 nt, Human
auuauuacuuuugc

SEQ ID NO: 3645912 - RNA, 17 nt, Human
auuauuagaaucaaaca

SEQ ID NO: 3645913 - RNA, 23 nt, Human
auuauuagaaucaaacauuuuga

SEQ ID NO: 3645914 - RNA, 16 nt, Human
auuauuauaaaaauau

SEQ ID NO: 3645915 - RNA, 13 nt, Human
auuauucaaaguu

SEQ ID NO: 3645916 - RNA, 14 nt, Human
auuauucaaaguug

SEQ ID NO: 3645917 - RNA, 22 nt, Human
auuauucaccauguaaaacaaa

SEQ ID NO: 3645918 - RNA, 20 nt, Human
auuauucauuuaaaaugauu

SEQ ID NO: 3645919 - RNA, 13 nt, Human
auuauucauuuag

SEQ ID NO: 3645920 - RNA, 21 nt, Human
auuauucccuguacaauauuu

SEQ ID NO: 3645921 - RNA, 22 nt, Human
auuauucccuguacaauauuua

SEQ ID NO: 3645922 - RNA, 16 nt, Human
auuauuccucaaaaaa

SEQ ID NO: 3645923 - RNA, 12 nt, Human
auuauucucuuu

SEQ ID NO: 3645924 - RNA, 11 nt, Human
auugugcugcc

SEQ ID NO: 3645925 - RNA, 15 nt, Human
auugugcugccauuu

SEQ ID NO: 3645926 - RNA, 17 nt, Human
auuguggaauguuggau

SEQ ID NO: 3645927 - RNA, 17 nt, Human
auuguggcuauccugau

SEQ ID NO: 3645928 - RNA, 12 nt, Human
auuguggcuccu

SEQ ID NO: 3645929 - RNA, 19 nt, Human
auuguggcuccuaucugug

SEQ ID NO: 3645930 - RNA, 16 nt, Human
auaaguacuguguaca

SEQ ID NO: 3645931 - RNA, 19 nt, Human
auaaguauuuauaauagca

SEQ ID NO: 3645932 - RNA, 16 nt, Human
auaaguauuucaaauu

SEQ ID NO: 3645933 - RNA, 18 nt, Human
auaagucaacaguaaacc

SEQ ID NO: 3645934 - RNA, 16 nt, Human
auaagucauuguaugu

SEQ ID NO: 3645935 - RNA, 16 nt, Human
auaagugaaaaucuua

SEQ ID NO: 3645936 - RNA, 14 nt, Human
auaagugaauuuau

SEQ ID NO: 3645937 - RNA, 15 nt, Human
auaagugaauuuaua

SEQ ID NO: 3645938 - RNA, 21 nt, Human
auaagugcacacagaaauaua

SEQ ID NO: 3645939 - RNA, 16 nt, Human
auaagugcuguauaaa

SEQ ID NO: 3645940 - RNA, 22 nt, Human
auaagugcuguauaaaaucagc

SEQ ID NO: 3645941 - RNA, 22 nt, Human
auaaguggacaaauuuugaguu

SEQ ID NO: 3645942 - RNA, 19 nt, Human
auaaguguacgauucuuaa

SEQ ID NO: 3645943 - RNA, 13 nt, Human
auaaguguauuuu

SEQ ID NO: 3645944 - RNA, 14 nt, Human
auaaguuauugcag

SEQ ID NO: 3645945 - RNA, 19 nt, Human
auaaguuauuuuuguacau

SEQ ID NO: 3645946 - RNA, 24 nt, Human
auaaguucaaauucuucugaacuc

SEQ ID NO: 3645947 - RNA, 13 nt, Human
auaaguucacaaa

SEQ ID NO: 3645948 - RNA, 14 nt, Human
auaaguucauacau

SEQ ID NO: 3645949 - RNA, 16 nt, Human
auaaguuccuuuccuu

SEQ ID NO: 3645950 - RNA, 18 nt, Human
auaaguuggaaacacuaa

SEQ ID NO: 3645951 - RNA, 23 nt, Human
auaaguuggaaacacuaaauguu

SEQ ID NO: 3645952 - RNA, 14 nt, Human
auaaguuuauuucu

SEQ ID NO: 3645953 - RNA, 20 nt, Human
auaaguuucacugacuuaga

SEQ ID NO: 3645954 - RNA, 13 nt, Human
auaaguuugaagg

SEQ ID NO: 3645955 - RNA, 19 nt, Human
auaaguuugaaggaaacag

SEQ ID NO: 3645956 - RNA, 20 nt, Human
auaaguuugaaggaaacagu

SEQ ID NO: 3645957 - RNA, 17 nt, Human
auaauaaaaaaagaaag

SEQ ID NO: 3645958 - RNA, 17 nt, Human
auaauaaaaaauuucag

SEQ ID NO: 3645959 - RNA, 13 nt, Human
auaauaaaauagu

SEQ ID NO: 3645960 - RNA, 13 nt, Human
auaauaaaaucac

SEQ ID NO: 3645961 - RNA, 13 nt, Human
auaauaaacauaa

SEQ ID NO: 3645962 - RNA, 21 nt, Human
auaauaaacauaaugaaaaua

SEQ ID NO: 3645963 - RNA, 14 nt, Human
auaauaaacugucc

SEQ ID NO: 3645964 - RNA, 12 nt, Human
auaauaaacuuu

SEQ ID NO: 3645965 - RNA, 13 nt, Human
auaauaaagaaua

SEQ ID NO: 3645966 - RNA, 22 nt, Human
auaauaaaguauuccaccuuaa

SEQ ID NO: 3645967 - RNA, 23 nt, Human
auaauaaaguauuccaccuuaaa

SEQ ID NO: 3645968 - RNA, 14 nt, Human
auaauaaaguguuu

SEQ ID NO: 3645969 - RNA, 12 nt, Human
auaauaaauagu

SEQ ID NO: 3645970 - RNA, 23 nt, Human
auaauaaauucccuggccuuuca

SEQ ID NO: 3645971 - RNA, 22 nt, Human
auaauaaggaaaaguuuaauau

SEQ ID NO: 3645972 - RNA, 14 nt, Human
auaauaauuaguaa

SEQ ID NO: 3645973 - RNA, 14 nt, Human
auaauacacaaaau

SEQ ID NO: 3645974 - RNA, 21 nt, Human
auaauacacuaauuccuuucu

SEQ ID NO: 3645975 - RNA, 16 nt, Human
auaauacacuugcccu

SEQ ID NO: 3645976 - RNA, 18 nt, Human
auaauacagaaucuuguu

SEQ ID NO: 3645977 - RNA, 15 nt, Human
auaauacugaaccac

SEQ ID NO: 3645978 - RNA, 22 nt, Human
auaauacugcugagauacauac

SEQ ID NO: 3645979 - RNA, 17 nt, Human
auaauacuuuguauaca

SEQ ID NO: 3645980 - RNA, 19 nt, Human
auaauacuuuguauacaag

SEQ ID NO: 3645981 - RNA, 13 nt, Human
auaauagacugua

SEQ ID NO: 3645982 - RNA, 12 nt, Human
auaauagauucu

SEQ ID NO: 3645983 - RNA, 13 nt, Human
auaauagauucuc

SEQ ID NO: 3645984 - RNA, 21 nt, Human
auaauagcaacuuuuguguaa

SEQ ID NO: 3645985 - RNA, 13 nt, Human
auaauauauauau

SEQ ID NO: 3645986 - RNA, 22 nt, Human
auaauauauguuuuaaauauag

SEQ ID NO: 3645987 - RNA, 23 nt, Human
auaauauauucuauuuuuauacu

SEQ ID NO: 3645988 - RNA, 15 nt, Human
auaauauauuguguu

SEQ ID NO: 3645989 - RNA, 13 nt, Human
auaauauauuuuc

SEQ ID NO: 3645990 - RNA, 22 nt, Human
auaauauccaggucaacagaau

SEQ ID NO: 3645991 - RNA, 23 nt, Human
auaauauccaggucaacagaaug

SEQ ID NO: 3645992 - RNA, 19 nt, Human
auaauaucuaaaguuauau

SEQ ID NO: 3645993 - RNA, 20 nt, Human
auaauaucuaaaguuauauu

SEQ ID NO: 3645994 - RNA, 15 nt, Human
auaauaugagaauca

SEQ ID NO: 3645995 - RNA, 20 nt, Human
auaauaugcacacagugcuu

SEQ ID NO: 3645996 - RNA, 20 nt, Human
auaauauguuuccuucccuc

SEQ ID NO: 3645997 - RNA, 14 nt, Human
auaauauuguugua

SEQ ID NO: 3645998 - RNA, 17 nt, Human
auaauauuguuguauaa

SEQ ID NO: 3645999 - RNA, 19 nt, Human
auaauauuguuguauaauu

SEQ ID NO: 3646000 - RNA, 21 nt, Human
auaauauuguuugguaaaugu

SEQ ID NO: 3646001 - RNA, 18 nt, Human
auaauauuuuuaauauau

SEQ ID NO: 3646002 - RNA, 16 nt, Human
auaaucaagagccuua

SEQ ID NO: 3646003 - RNA, 15 nt, Human
auaaucaccagggcc

SEQ ID NO: 3646004 - RNA, 16 nt, Human
auaaucacgcuuuccu

SEQ ID NO: 3646005 - RNA, 18 nt, Human
auaaucacgcuuuccuga

SEQ ID NO: 3646006 - RNA, 22 nt, Human
auaaucacucuaauuaauugua

SEQ ID NO: 3646007 - RNA, 21 nt, Human
auaaucauuauuacuuuugcu

SEQ ID NO: 3646008 - RNA, 17 nt, Human
auaauccagucuucacu

SEQ ID NO: 3646009 - RNA, 15 nt, Human
auaaucccagcacuu

SEQ ID NO: 3646010 - RNA, 18 nt, Human
auaauccugcaaaguaca

SEQ ID NO: 3646011 - RNA, 15 nt, Human
auaaucuagaacaca

SEQ ID NO: 3646012 - RNA, 23 nt, Human
auaaucuaguuuacagaaaaauc

SEQ ID NO: 3646013 - RNA, 17 nt, Human
auaaucuauuucuauga

SEQ ID NO: 3646014 - RNA, 19 nt, Human
auaaucucugauucccuga

SEQ ID NO: 3646015 - RNA, 23 nt, Human
auaaucucugauucccugauuua

SEQ ID NO: 3646016 - RNA, 16 nt, Human
auaaucucuucuuaua

SEQ ID NO: 3646017 - RNA, 18 nt, Human
auaaucuggacuccucug

SEQ ID NO: 3646018 - RNA, 19 nt, Human
auaaucuggacuccucugu

SEQ ID NO: 3646019 - RNA, 20 nt, Human
auaaucuggacuccucuguc

SEQ ID NO: 3646020 - RNA, 22 nt, Human
auaaucuggacuccucugucca

SEQ ID NO: 3646021 - RNA, 17 nt, Human
auaaucuguacaaugaa

SEQ ID NO: 3646022 - RNA, 20 nt, Human
auaaucuguuuuuacguaug

SEQ ID NO: 3646023 - RNA, 17 nt, Human
auaaucuuauaauuguu

SEQ ID NO: 3646024 - RNA, 20 nt, Human
auaaucuucugccuucucau

SEQ ID NO: 3646025 - RNA, 20 nt, Human
auaaucuuguuucugaaaag

SEQ ID NO: 3646026 - RNA, 21 nt, Human
auaaucuuguuucugaaaaga

SEQ ID NO: 3646027 - RNA, 17 nt, Human
auaaugaaaauauuuuu

SEQ ID NO: 3646028 - RNA, 16 nt, Human
auaaugaacaaaauua

SEQ ID NO: 3646029 - RNA, 13 nt, Human
auaaugaacagaa

SEQ ID NO: 3646030 - RNA, 14 nt, Human
auaaugaagcuuua

SEQ ID NO: 3646031 - RNA, 12 nt, Human
auaaugaaugac

SEQ ID NO: 3646032 - RNA, 21 nt, Human
auaaugagcuauuaaaacuca

SEQ ID NO: 3646033 - RNA, 16 nt, Human
auaaugauaaaacacc

SEQ ID NO: 3646034 - RNA, 17 nt, Human
auaaugauaaaacaccu

SEQ ID NO: 3646035 - RNA, 20 nt, Human
auaaugaucgaaaaaauaau

SEQ ID NO: 3646036 - RNA, 20 nt, Human
auaaugcgugcauaccacuu

SEQ ID NO: 3646037 - RNA, 21 nt, Human
auaaugcuaauuuaaagagac

SEQ ID NO: 3646038 - RNA, 14 nt, Human
auaaugcuacaauu

SEQ ID NO: 3646039 - RNA, 15 nt, Human
auaaugcuacaauuu

SEQ ID NO: 3646040 - RNA, 15 nt, Human
auaaugcuuaauuuc

SEQ ID NO: 3646041 - RNA, 17 nt, Human
auaaugcuuaauuucua

SEQ ID NO: 3646042 - RNA, 18 nt, Human
auaaugcuuaauuucuaa

SEQ ID NO: 3646043 - RNA, 14 nt, Human
auaaugcuucagau

SEQ ID NO: 3646044 - RNA, 15 nt, Human
auaaugcuucagaua

SEQ ID NO: 3646045 - RNA, 23 nt, Human
auaauggaaaaaaaaaaaagagg

SEQ ID NO: 3646046 - RNA, 21 nt, Human
auaaugggauuuucuuuucuu

SEQ ID NO: 3646047 - RNA, 17 nt, Human
auaaugggccacugaaa

SEQ ID NO: 3646048 - RNA, 23 nt, Human
auaaugggccacugaaaucuguc

SEQ ID NO: 3646049 - RNA, 17 nt, Human
auaauggguuucuuuca

SEQ ID NO: 3646050 - RNA, 17 nt, Human
auaaugguaccagauaa

SEQ ID NO: 3646051 - RNA, 17 nt, Human
auaauggucccauccag

SEQ ID NO: 3646052 - RNA, 18 nt, Human
auaauggucccauccagg

SEQ ID NO: 3646053 - RNA, 14 nt, Human
auaaugguuucaaa

SEQ ID NO: 3646054 - RNA, 22 nt, Human
auaauguauaaagaacaaggua

SEQ ID NO: 3646055 - RNA, 13 nt, Human
auaaugucuuguu

SEQ ID NO: 3646056 - RNA, 19 nt, Human
auaaugucuuguuaauauu

SEQ ID NO: 3646057 - RNA, 20 nt, Human
auaaugucuuguuaauauuc

SEQ ID NO: 3646058 - RNA, 19 nt, Human
auaaugugggaagaaacaa

SEQ ID NO: 3646059 - RNA, 19 nt, Human
auaauguguaguucaugua

SEQ ID NO: 3646060 - RNA, 13 nt, Human
auaauguguguau

SEQ ID NO: 3646061 - RNA, 15 nt, Human
auaauguguguaugu

SEQ ID NO: 3646062 - RNA, 10 nt, Human
auaauguuaa

SEQ ID NO: 3646063 - RNA, 11 nt, Human
auaauguuaaa

SEQ ID NO: 3646064 - RNA, 12 nt, Human
auaauguuaaau

SEQ ID NO: 3646065 - RNA, 18 nt, Human
auaauguuaaauuuguaa

SEQ ID NO: 3646066 - RNA, 23 nt, Human
auaauguuaaauuuguaaguuuc

SEQ ID NO: 3646067 - RNA, 22 nt, Human
auaauguucugcuaaauuucaa

SEQ ID NO: 3646068 - RNA, 18 nt, Human
auaauguugugguuuguu

SEQ ID NO: 3646069 - RNA, 16 nt, Human
auugcagguggaacuc

SEQ ID NO: 3646070 - RNA, 19 nt, Human
auugcagucauagaagaga

SEQ ID NO: 3646071 - RNA, 22 nt, Human
auugcauacuauuaaacaugcu

SEQ ID NO: 3646072 - RNA, 15 nt, Human
auugcaucauuuaca

SEQ ID NO: 3646073 - RNA, 21 nt, Human
auugcaucuagguaauuuuua

SEQ ID NO: 3646074 - RNA, 15 nt, Human
auugcaucucccaga

SEQ ID NO: 3646075 - RNA, 21 nt, Human
auugcaucuggguagcuguaa

SEQ ID NO: 3646076 - RNA, 13 nt, Human
auugcaucuguau

SEQ ID NO: 3646077 - RNA, 14 nt, Human
auugcaucuguaua

SEQ ID NO: 3646078 - RNA, 13 nt, Human
auugcaugugacu

SEQ ID NO: 3646079 - RNA, 15 nt, Human
auugcauugacuuuc

SEQ ID NO: 3646080 - RNA, 18 nt, Human
auugccaaaacccagcug

SEQ ID NO: 3646081 - RNA, 19 nt, Human
auugccaaaacccagcugc

SEQ ID NO: 3646082 - RNA, 21 nt, Human
auugccaaacauuaauguuga

SEQ ID NO: 3646083 - RNA, 15 nt, Human
auugccagugucuuu

SEQ ID NO: 3646084 - RNA, 20 nt, Human
auugccagugucuuucuuug

SEQ ID NO: 3646085 - RNA, 21 nt, Human
auugccagugucuuucuuugg

SEQ ID NO: 3646086 - RNA, 12 nt, Human
auugccauauug

SEQ ID NO: 3646087 - RNA, 18 nt, Human
auugccauucccugccug

SEQ ID NO: 3646088 - RNA, 15 nt, Human
auugcccaggcuggu

SEQ ID NO: 3646089 - RNA, 16 nt, Human
auugcccaggcugguc

SEQ ID NO: 3646090 - RNA, 16 nt, Human
auugcccccagggcac

SEQ ID NO: 3646091 - RNA, 13 nt, Human
auugccuccuccu

SEQ ID NO: 3646092 - RNA, 13 nt, Human
auugccucugaaa

SEQ ID NO: 3646093 - RNA, 22 nt, Human
auugccuguguauggaaaaacc

SEQ ID NO: 3646094 - RNA, 13 nt, Human
auugccuucauuu

SEQ ID NO: 3646095 - RNA, 19 nt, Human
auugccuucucaccagcug

SEQ ID NO: 3646096 - RNA, 16 nt, Human
auugccuucuuugaag

SEQ ID NO: 3646097 - RNA, 17 nt, Human
auugccuucuuugaaga

SEQ ID NO: 3646098 - RNA, 23 nt, Human
auugccuuuagugaucacagcag

SEQ ID NO: 3646099 - RNA, 18 nt, Human
auugccuuuuuucuguau

SEQ ID NO: 3646100 - RNA, 16 nt, Human
auugcgagagaugugu

SEQ ID NO: 3646101 - RNA, 17 nt, Human
auugcgagagaugugug

SEQ ID NO: 3646102 - RNA, 18 nt, Human
auugcggacagccacggc

SEQ ID NO: 3646103 - RNA, 19 nt, Human
auugcggacagccacggcc

SEQ ID NO: 3646104 - RNA, 20 nt, Human
auugcgucuuagcagugauu

SEQ ID NO: 3646105 - RNA, 15 nt, Human
auuuauaaacuuuuu

SEQ ID NO: 3646106 - RNA, 17 nt, Human
auuuauaaagcuaaaau

SEQ ID NO: 3646107 - RNA, 21 nt, Human
auuuauaaagcuaaaauaacc

SEQ ID NO: 3646108 - RNA, 13 nt, Human
auuuauaaaugcu

SEQ ID NO: 3646109 - RNA, 17 nt, Human
auuuauaacucaucaua

SEQ ID NO: 3646110 - RNA, 21 nt, Human
auuuauaacucaucauaaaau

SEQ ID NO: 3646111 - RNA, 20 nt, Human
auuuauaauguuaguagaaa

SEQ ID NO: 3646112 - RNA, 20 nt, Human
auuuauaauucaguauguuu

SEQ ID NO: 3646113 - RNA, 15 nt, Human
auuuauacaagauug

SEQ ID NO: 3646114 - RNA, 19 nt, Human
auuuauacaggucauauua

SEQ ID NO: 3646115 - RNA, 17 nt, Human
auuuauaccuaacugaa

SEQ ID NO: 3646116 - RNA, 21 nt, Human
auuuauaguaaugaguuuaaa

SEQ ID NO: 3646117 - RNA, 16 nt, Human
auuuauaguuuauaca

SEQ ID NO: 3646118 - RNA, 17 nt, Human
auuuauaguuuauacag

SEQ ID NO: 3646119 - RNA, 20 nt, Human
auuuauaguuuauacaguuu

SEQ ID NO: 3646120 - RNA, 18 nt, Human
auuuauauaauuauguua

SEQ ID NO: 3646121 - RNA, 13 nt, Human
auuuauauaugaa

SEQ ID NO: 3646122 - RNA, 15 nt, Human
auuuauauaugaaaa

SEQ ID NO: 3646123 - RNA, 16 nt, Human
auuuauauaugaaaac

SEQ ID NO: 3646124 - RNA, 19 nt, Human
auuuauauaugaaaacuau

SEQ ID NO: 3646125 - RNA, 22 nt, Human
auuuauauaugaaaacuauaca

SEQ ID NO: 3646126 - RNA, 15 nt, Human
auuuauauauguauu

SEQ ID NO: 3646127 - RNA, 15 nt, Human
auuuauauauuggua

SEQ ID NO: 3646128 - RNA, 19 nt, Human
auuuauauggggaauauau

SEQ ID NO: 3646129 - RNA, 17 nt, Human
auuuauauguacaugag

SEQ ID NO: 3646130 - RNA, 13 nt, Human
auuuauauguacu

SEQ ID NO: 3646131 - RNA, 16 nt, Human
auuuauauguacuguu

SEQ ID NO: 3646132 - RNA, 17 nt, Human
auuuauauguacuguuu

SEQ ID NO: 3646133 - RNA, 15 nt, Human
auuuauauuguaaau

SEQ ID NO: 3646134 - RNA, 18 nt, Human
auuuauauuguaaauauu

SEQ ID NO: 3646135 - RNA, 20 nt, Human
auuuauauuuauugacucuu

SEQ ID NO: 3646136 - RNA, 22 nt, Human
auuuauauuuauugacucuuga

SEQ ID NO: 3646137 - RNA, 13 nt, Human
auuuauauuucac

SEQ ID NO: 3646138 - RNA, 21 nt, Human
auuuaucaaacccuagccuug

SEQ ID NO: 3646139 - RNA, 13 nt, Human
auuuaucaaagca

SEQ ID NO: 3646140 - RNA, 17 nt, Human
auuuaucacacaaagca

SEQ ID NO: 3646141 - RNA, 15 nt, Human
auuuaucagugacag

SEQ ID NO: 3646142 - RNA, 18 nt, Human
auuuaucagugacagagu

SEQ ID NO: 3646143 - RNA, 23 nt, Human
auuuaucagugacagaguucacu

SEQ ID NO: 3646144 - RNA, 12 nt, Human
auuuauccacua

SEQ ID NO: 3646145 - RNA, 16 nt, Human
auuuauccagaaaacu

SEQ ID NO: 3646146 - RNA, 12 nt, Human
auuuauccucug

SEQ ID NO: 3646147 - RNA, 17 nt, Human
auuuaucuaaauaugga

SEQ ID NO: 3646148 - RNA, 20 nt, Human
auuuaucuaaauuaaagccu

SEQ ID NO: 3646149 - RNA, 16 nt, Human
auuuaucuauuguaag

SEQ ID NO: 3646150 - RNA, 20 nt, Human
auuuaucugggauuaugguu

SEQ ID NO: 3646151 - RNA, 20 nt, Human
auuuaucuguguuuuugaaa

SEQ ID NO: 3646152 - RNA, 14 nt, Human
auuuaucuuugaua

SEQ ID NO: 3646153 - RNA, 13 nt, Human
auuuaugaauaua

SEQ ID NO: 3646154 - RNA, 23 nt, Human
auuuaugaauugaauuaucuugg

SEQ ID NO: 3646155 - RNA, 19 nt, Human
auuuaugaguuuuugauag

SEQ ID NO: 3646156 - RNA, 13 nt, Human
auuuaugauuuaa

SEQ ID NO: 3646157 - RNA, 16 nt, Human
auuuaugauuuaauaa

SEQ ID NO: 3646158 - RNA, 19 nt, Human
auuuaugcauggaaaccug

SEQ ID NO: 3646159 - RNA, 22 nt, Human
auuuaugccuugaugauuuaau

SEQ ID NO: 3646160 - RNA, 16 nt, Human
auuuaugggccccugg

SEQ ID NO: 3646161 - RNA, 18 nt, Human
auuuauggucaacacuua

SEQ ID NO: 3646162 - RNA, 16 nt, Human
auuuauguaacuugaa

SEQ ID NO: 3646163 - RNA, 21 nt, Human
auuuauguaaugaaguaaagc

SEQ ID NO: 3646164 - RNA, 18 nt, Human
auuuauguagaugugcau

SEQ ID NO: 3646165 - RNA, 19 nt, Human
auuuauguauugugcaaug

SEQ ID NO: 3646166 - RNA, 22 nt, Human
auuuaugucuauuuaagccuca

SEQ ID NO: 3646167 - RNA, 13 nt, Human
auuuaugugugag

SEQ ID NO: 3646168 - RNA, 22 nt, Human
auuuaugugugaggagcugcug

SEQ ID NO: 3646169 - RNA, 14 nt, Human
auuuauguuaaaag

SEQ ID NO: 3646170 - RNA, 16 nt, Human
auuuauguuaaaagau

SEQ ID NO: 3646171 - RNA, 18 nt, Human
auuuauguuguauagauu

SEQ ID NO: 3646172 - RNA, 21 nt, Human
auuuauuaaaaugauuguaaa

SEQ ID NO: 3646173 - RNA, 23 nt, Human
auuuauuaaaaugauuguaaaau

SEQ ID NO: 3646174 - RNA, 13 nt, Human
auuuauuaaagaa

SEQ ID NO: 3646175 - RNA, 18 nt, Human
auuuauuaaagaaaaaaa

SEQ ID NO: 3646176 - RNA, 12 nt, Human
auuuauuaaaua

SEQ ID NO: 3646177 - RNA, 14 nt, Human
auuuauuaaauaaa

SEQ ID NO: 3646178 - RNA, 18 nt, Human
auuuauuaaauaaaauca

SEQ ID NO: 3646179 - RNA, 20 nt, Human
auuuauuaaaugcccagccc

SEQ ID NO: 3646180 - RNA, 22 nt, Human
auuuauuaacugcucaguguuu

SEQ ID NO: 3646181 - RNA, 13 nt, Human
auuuauuaacuua

SEQ ID NO: 3646182 - RNA, 14 nt, Human
auuuauuaacuuaa

SEQ ID NO: 3646183 - RNA, 20 nt, Human
auuuauuaacuuaauaauca

SEQ ID NO: 3646184 - RNA, 16 nt, Human
auuuauuaagauggau

SEQ ID NO: 3646185 - RNA, 14 nt, Human
auuuauuaccucug

SEQ ID NO: 3646186 - RNA, 15 nt, Human
auuuauuaccucuga

SEQ ID NO: 3646187 - RNA, 19 nt, Human
auuuauuacuguaagaaaa

SEQ ID NO: 3646188 - RNA, 22 nt, Human
auuuauuacuguaagaaaauau

SEQ ID NO: 3646189 - RNA, 19 nt, Human
auuuauuagcccugcauuu

SEQ ID NO: 3646190 - RNA, 16 nt, Human
auuuauuaguuaauau

SEQ ID NO: 3646191 - RNA, 11 nt, Human
auuuauuauuu

SEQ ID NO: 3646192 - RNA, 12 nt, Human
auuuauucaaga

SEQ ID NO: 3646193 - RNA, 14 nt, Human
auuuauucaauaaa

SEQ ID NO: 3646194 - RNA, 16 nt, Human
auuuauucaauaaagu

SEQ ID NO: 3646195 - RNA, 18 nt, Human
auuuauucagcuucauuu

SEQ ID NO: 3646196 - RNA, 17 nt, Human
auuuauucauauuuucu

SEQ ID NO: 3646197 - RNA, 22 nt, Human
auuuauucauuauuugucaaau

SEQ ID NO: 3646198 - RNA, 19 nt, Human
auuuauuccauauucaugu

SEQ ID NO: 3646199 - RNA, 14 nt, Human
auuuauucugcuca

SEQ ID NO: 3646200 - RNA, 18 nt, Human
auuuauucugggaaugua

SEQ ID NO: 3646201 - RNA, 20 nt, Human
auuuauucugggaauguaua

SEQ ID NO: 3646202 - RNA, 22 nt, Human
auuuauucugggaauguauagu

SEQ ID NO: 3646203 - RNA, 13 nt, Human
auuuauugacucu

SEQ ID NO: 3646204 - RNA, 16 nt, Human
auuuauugacucuuga

SEQ ID NO: 3646205 - RNA, 14 nt, Human
auuuauugaggaaa

SEQ ID NO: 3646206 - RNA, 17 nt, Human
auuuauugaggaaaaau

SEQ ID NO: 3646207 - RNA, 19 nt, Human
auuuauugcacaaaauaua

SEQ ID NO: 3646208 - RNA, 19 nt, Human
auuuauugcacauuguuca

SEQ ID NO: 3646209 - RNA, 24 nt, Human
auuuauugcagaggauguucauaa

SEQ ID NO: 3646210 - RNA, 21 nt, Human
auuuauugcaggauggugucu

SEQ ID NO: 3646211 - RNA, 22 nt, Human
auuuauugcuguguaacacugu

SEQ ID NO: 3646212 - RNA, 14 nt, Human
auuuauugcuugau

SEQ ID NO: 3646213 - RNA, 12 nt, Human
auuuauugcuuu

SEQ ID NO: 3646214 - RNA, 20 nt, Human
auuuuaaaagaugcaaugua

SEQ ID NO: 3646215 - RNA, 19 nt, Human
auuuuaaaagccacauaga

SEQ ID NO: 3646216 - RNA, 17 nt, Human
auuuuaaaauaaacuuu

SEQ ID NO: 3646217 - RNA, 20 nt, Human
auuuuaaaauagcguucuug

SEQ ID NO: 3646218 - RNA, 22 nt, Human
auuuuaaaaucugagggaaaug

SEQ ID NO: 3646219 - RNA, 23 nt, Human
auuuuaaaaucugagggaaaugu

SEQ ID NO: 3646220 - RNA, 14 nt, Human
auuuuaaaaugaga

SEQ ID NO: 3646221 - RNA, 14 nt, Human
auuuuaaaauguac

SEQ ID NO: 3646222 - RNA, 22 nt, Human
auuuuaaaauguacauguauua

SEQ ID NO: 3646223 - RNA, 15 nt, Human
auuuuaaaauuucau

SEQ ID NO: 3646224 - RNA, 17 nt, Human
auuuuaaaauuuguucu

SEQ ID NO: 3646225 - RNA, 17 nt, Human
auuuuaaacaaaauaga

SEQ ID NO: 3646226 - RNA, 21 nt, Human
auuuuaaacaaaauagaaagu

SEQ ID NO: 3646227 - RNA, 13 nt, Human
auuuuaaacacau

SEQ ID NO: 3646228 - RNA, 14 nt, Human
auuuuaaacacauu

SEQ ID NO: 3646229 - RNA, 15 nt, Human
auuuuaaacagagga

SEQ ID NO: 3646230 - RNA, 22 nt, Human
auuuuaaaccauaaaaagcuga

SEQ ID NO: 3646231 - RNA, 18 nt, Human
auuuuaaacuagaugacc

SEQ ID NO: 3646232 - RNA, 20 nt, Human
auuuuaaacuagaugaccuc

SEQ ID NO: 3646233 - RNA, 17 nt, Human
auuuuaaagaauugugu

SEQ ID NO: 3646234 - RNA, 18 nt, Human
auuuuaaagccauucuga

SEQ ID NO: 3646235 - RNA, 13 nt, Human
auuuuaaaguaug

SEQ ID NO: 3646236 - RNA, 19 nt, Human
auuuuaaaguaugcauuau

SEQ ID NO: 3646237 - RNA, 12 nt, Human
auuuuaaaguua

SEQ ID NO: 3646238 - RNA, 14 nt, Human
auuuuaaaguuagu

SEQ ID NO: 3646239 - RNA, 16 nt, Human
auuuuaaauggacaga

SEQ ID NO: 3646240 - RNA, 18 nt, Human
auuuuaaaugugugagug

SEQ ID NO: 3646241 - RNA, 23 nt, Human
auuuuaaaugugugagugcaugu

SEQ ID NO: 3646242 - RNA, 11 nt, Human
auuuuaaauua

SEQ ID NO: 3646243 - RNA, 14 nt, Human
auuuuaaauuauaa

SEQ ID NO: 3646244 - RNA, 22 nt, Human
auuuuaaauuauaacuuaaaau

SEQ ID NO: 3646245 - RNA, 18 nt, Human
auuuuaaauuauaaggac

SEQ ID NO: 3646246 - RNA, 13 nt, Human
auuuuaacaaaag

SEQ ID NO: 3646247 - RNA, 16 nt, Human
auuuuaacaaaagcaa

SEQ ID NO: 3646248 - RNA, 17 nt, Human
auuuuaacaacagcugg

SEQ ID NO: 3646249 - RNA, 14 nt, Human
auuuuaacaagaag

SEQ ID NO: 3646250 - RNA, 18 nt, Human
auuuuaacaagaagauga

SEQ ID NO: 3646251 - RNA, 22 nt, Human
auuuuaacaauaacuacugugu

SEQ ID NO: 3646252 - RNA, 17 nt, Human
auuuuaaccugcauaaa

SEQ ID NO: 3646253 - RNA, 16 nt, Human
auuuuaacuaaauuuu

SEQ ID NO: 3646254 - RNA, 15 nt, Human
auuuuaacucugucu

SEQ ID NO: 3646255 - RNA, 16 nt, Human
auuuuaacucugucuu

SEQ ID NO: 3646256 - RNA, 13 nt, Human
auuuuaacuuaga

SEQ ID NO: 3646257 - RNA, 15 nt, Human
auuuuaacuuuauca

SEQ ID NO: 3646258 - RNA, 20 nt, Human
auuuuaagacguguuugugu

SEQ ID NO: 3646259 - RNA, 16 nt, Human
auuuuaagauuccuuu

SEQ ID NO: 3646260 - RNA, 17 nt, Human
auuuuaagauuccuuuu

SEQ ID NO: 3646261 - RNA, 19 nt, Human
auuuuaagccuuuguugaa

SEQ ID NO: 3646262 - RNA, 19 nt, Human
auuuuaagcuaggaaaaga

SEQ ID NO: 3646263 - RNA, 20 nt, Human
auuuuaagcuaggaaaagaa

SEQ ID NO: 3646264 - RNA, 16 nt, Human
auuuuaaguauugcau

SEQ ID NO: 3646265 - RNA, 20 nt, Human
auuuuaagucccugucaccu

SEQ ID NO: 3646266 - RNA, 22 nt, Human
auuuuaagucccugucaccucu

SEQ ID NO: 3646267 - RNA, 17 nt, Human
auuuuaagugcuuugua

SEQ ID NO: 3646268 - RNA, 13 nt, Human
auuuuaauaauau

SEQ ID NO: 3646269 - RNA, 14 nt, Human
auuuuaauaauguu

SEQ ID NO: 3646270 - RNA, 15 nt, Human
auuuuaauaauguuu

SEQ ID NO: 3646271 - RNA, 20 nt, Human
auuuuaauagggaauauauc

SEQ ID NO: 3646272 - RNA, 18 nt, Human
auuuuaaucaaguugaau

SEQ ID NO: 3646273 - RNA, 21 nt, Human
auuuuaaugcaccugaauguu

SEQ ID NO: 3646274 - RNA, 20 nt, Human
auuuuaauggauuguuaauu

SEQ ID NO: 3646275 - RNA, 16 nt, Human
auuuuaauguaauuga

SEQ ID NO: 3646276 - RNA, 13 nt, Human
auuuuaaugugau

SEQ ID NO: 3646277 - RNA, 22 nt, Human
auuuuaaugugaugauguaauu

SEQ ID NO: 3646278 - RNA, 24 nt, Human
auuuuaaugugaugauguaauuga

SEQ ID NO: 3646279 - RNA, 15 nt, Human
auuuuaauuagguua

SEQ ID NO: 3646280 - RNA, 23 nt, Human
auuuuaauuagguuaacuaugua

SEQ ID NO: 3646281 - RNA, 19 nt, Human
auuuuaauuauuauucuuc

SEQ ID NO: 3646282 - RNA, 19 nt, Human
auuuuaauuucaagcuuau

SEQ ID NO: 3646283 - RNA, 18 nt, Human
auuuuaauuuuuaaaugc

SEQ ID NO: 3646284 - RNA, 22 nt, Human
auuuuacaaaagaggagcacuu

SEQ ID NO: 3646285 - RNA, 15 nt, Human
auuuuacaaaagaug

SEQ ID NO: 3646286 - RNA, 21 nt, Human
auuuuacaauugaaaugacua

SEQ ID NO: 3646287 - RNA, 14 nt, Human
auuuuacacagaaa

SEQ ID NO: 3646288 - RNA, 22 nt, Human
auuuuacacagaaacacugccu

SEQ ID NO: 3646289 - RNA, 13 nt, Human
auuuuacacauua

SEQ ID NO: 3646290 - RNA, 18 nt, Human
auuuuacagcucauuaaa

SEQ ID NO: 3646291 - RNA, 22 nt, Human
auuuuacagcucauuaaacuuu

SEQ ID NO: 3646292 - RNA, 23 nt, Human
auuuuacagcucauuaaacuuuu

SEQ ID NO: 3646293 - RNA, 22 nt, Human
auuuuacaguuaaggaauauaa

SEQ ID NO: 3646294 - RNA, 16 nt, Human
auuuuacauaaauuua

SEQ ID NO: 3646295 - RNA, 17 nt, Human
auuuuacauaaauuuag

SEQ ID NO: 3646296 - RNA, 19 nt, Human
auuuuacaugaaguauuuu

SEQ ID NO: 3646297 - RNA, 12 nt, Human
auuuuacauuaa

SEQ ID NO: 3646298 - RNA, 15 nt, Human
auuuuacauuaaauu

SEQ ID NO: 3646299 - RNA, 13 nt, Human
auuuuaccaaguu

SEQ ID NO: 3646300 - RNA, 17 nt, Human
auuuuaccacugcugug

SEQ ID NO: 3646301 - RNA, 16 nt, Human
auuuuaccagcagaag

SEQ ID NO: 3646302 - RNA, 22 nt, Human
auuuuaccuagcuaauuauuua

SEQ ID NO: 3646303 - RNA, 15 nt, Human
auuuuaccucuuauu

SEQ ID NO: 3646304 - RNA, 18 nt, Human
auuuuaccucuuauugca

SEQ ID NO: 3646305 - RNA, 22 nt, Human
auuuuaccuguuuuuguuucuu

SEQ ID NO: 3646306 - RNA, 22 nt, Human
auuuuacuccauaaacagacug

SEQ ID NO: 3646307 - RNA, 13 nt, Human
auuuuacugucuu

SEQ ID NO: 3646308 - RNA, 14 nt, Human
auuuuacugucuua

SEQ ID NO: 3646309 - RNA, 23 nt, Human
auuuuacugucuuaauuaaguaa

SEQ ID NO: 3646310 - RNA, 13 nt, Human
auuuaauuuugac

SEQ ID NO: 3646311 - RNA, 14 nt, Human
auuuaauuuugaca

SEQ ID NO: 3646312 - RNA, 22 nt, Human
auuuaauuuugacacugaaaua

SEQ ID NO: 3646313 - RNA, 19 nt, Human
auuuacaaaaauauaaaau

SEQ ID NO: 3646314 - RNA, 20 nt, Human
auuuacaaaaauauaaaaua

SEQ ID NO: 3646315 - RNA, 14 nt, Human
auuuacaaagugug

SEQ ID NO: 3646316 - RNA, 15 nt, Human
auuuacaaagugugu

SEQ ID NO: 3646317 - RNA, 15 nt, Human
auuuacaaauguuuu

SEQ ID NO: 3646318 - RNA, 14 nt, Human
auuuacaagaagaa

SEQ ID NO: 3646319 - RNA, 13 nt, Human
auuuacaauguau

SEQ ID NO: 3646320 - RNA, 14 nt, Human
auuuacaauguauu

SEQ ID NO: 3646321 - RNA, 14 nt, Human
auuuacacugccau

SEQ ID NO: 3646322 - RNA, 20 nt, Human
auuuacacuuuugagacuuu

SEQ ID NO: 3646323 - RNA, 16 nt, Human
auuuacauaugaaauu

SEQ ID NO: 3646324 - RNA, 21 nt, Human
auuuacaugaauugcauuuua

SEQ ID NO: 3646325 - RNA, 17 nt, Human
auuuaccacagcagcug

SEQ ID NO: 3646326 - RNA, 22 nt, Human
auuuaccacuuguguuuugcaa

SEQ ID NO: 3646327 - RNA, 23 nt, Human
auuuaccagccuccguauuucag

SEQ ID NO: 3646328 - RNA, 18 nt, Human
auuuaccagggauguaga

SEQ ID NO: 3646329 - RNA, 14 nt, Human
auuuaccuaagauu

SEQ ID NO: 3646330 - RNA, 15 nt, Human
auuuaccucagccug

SEQ ID NO: 3646331 - RNA, 15 nt, Human
auuuacgcuuugauu

SEQ ID NO: 3646332 - RNA, 19 nt, Human
auuuacgcuuugauucaua

SEQ ID NO: 3646333 - RNA, 16 nt, Human
auuuacguuuuuguaa

SEQ ID NO: 3646334 - RNA, 20 nt, Human
auuuacuaaaauggacugug

SEQ ID NO: 3646335 - RNA, 19 nt, Human
auuuacuaaacauaugauu

SEQ ID NO: 3646336 - RNA, 22 nt, Human
auuuacuaaacauaugauuuca

SEQ ID NO: 3646337 - RNA, 15 nt, Human
auuuacuaagccaca

SEQ ID NO: 3646338 - RNA, 22 nt, Human
auuuacuacaauauguacauuu

SEQ ID NO: 3646339 - RNA, 15 nt, Human
auuuacuacaguagu

SEQ ID NO: 3646340 - RNA, 15 nt, Human
auuuacuacuuuugc

SEQ ID NO: 3646341 - RNA, 13 nt, Human
auuuacucauuau

SEQ ID NO: 3646342 - RNA, 22 nt, Human
auuuacucauucauuuauucau

SEQ ID NO: 3646343 - RNA, 21 nt, Human
auuuacugcauucuucugauc

SEQ ID NO: 3646344 - RNA, 14 nt, Human
auuuacuucuuaua

SEQ ID NO: 3646345 - RNA, 19 nt, Human
auuuacuucuuauacauuu

SEQ ID NO: 3646346 - RNA, 15 nt, Human
auuuacuuguuuugg

SEQ ID NO: 3646347 - RNA, 15 nt, Human
auuuacuuugaauuu

SEQ ID NO: 3646348 - RNA, 18 nt, Human
auuuagaaaaaaguuuac

SEQ ID NO: 3646349 - RNA, 22 nt, Human
auuuagaaagaagcccaauauu

SEQ ID NO: 3646350 - RNA, 14 nt, Human
auuuagaagaaaga

SEQ ID NO: 3646351 - RNA, 15 nt, Human
auuuagaagaaagau

SEQ ID NO: 3646352 - RNA, 12 nt, Human
auuuagaagcca

SEQ ID NO: 3646353 - RNA, 14 nt, Human
auuuagaaguguca

SEQ ID NO: 3646354 - RNA, 18 nt, Human
auuuagaagugucauguu

SEQ ID NO: 3646355 - RNA, 19 nt, Human
auuuagacuuggauucuuu

SEQ ID NO: 3646356 - RNA, 23 nt, Human
auuuagacuuggauucuuuccau

SEQ ID NO: 3646357 - RNA, 20 nt, Human
auuuagagaacuguggccgu

SEQ ID NO: 3646358 - RNA, 23 nt, Human
auuuauuaacuuaauaaucaaga

SEQ ID NO: 3646359 - RNA, 15 nt, Human
auuuauuaagaugga

SEQ ID NO: 3646360 - RNA, 12 nt, Human
auuuauuaauau

SEQ ID NO: 3646361 - RNA, 14 nt, Human
auuuauuaauauuu

SEQ ID NO: 3646362 - RNA, 15 nt, Human
auuuauuaauauuua

SEQ ID NO: 3646363 - RNA, 23 nt, Human
auuuauuaauauuuaacauuauu

SEQ ID NO: 3646364 - RNA, 20 nt, Human
auuuauuacuguaagaaaau

SEQ ID NO: 3646365 - RNA, 13 nt, Human
auuuauuauggca

SEQ ID NO: 3646366 - RNA, 12 nt, Human
auuuauuauuga

SEQ ID NO: 3646367 - RNA, 13 nt, Human
auuuauucaauaa

SEQ ID NO: 3646368 - RNA, 15 nt, Human
auuuauucaauaaag

SEQ ID NO: 3646369 - RNA, 18 nt, Human
auuuauucaauaaaguau

SEQ ID NO: 3646370 - RNA, 22 nt, Human
auuuauucaauaaaguauuuaa

SEQ ID NO: 3646371 - RNA, 18 nt, Human
auuuauucaauuccucug

SEQ ID NO: 3646372 - RNA, 14 nt, Human
auuuauucauuagu

SEQ ID NO: 3646373 - RNA, 20 nt, Human
auuuauuccauauucaugua

SEQ ID NO: 3646374 - RNA, 13 nt, Human
auuuauuccuuug

SEQ ID NO: 3646375 - RNA, 14 nt, Human
auuuauucuaauua

SEQ ID NO: 3646376 - RNA, 13 nt, Human
auuuauucugcuc

SEQ ID NO: 3646377 - RNA, 16 nt, Human
auuuauucugggaaug

SEQ ID NO: 3646378 - RNA, 15 nt, Human
auuuauugaaaugau

SEQ ID NO: 3646379 - RNA, 14 nt, Human
auuuauugaguuuu

SEQ ID NO: 3646380 - RNA, 13 nt, Human
auuuauugcacaa

SEQ ID NO: 3646381 - RNA, 14 nt, Human
auuuauugcacaaa

SEQ ID NO: 3646382 - RNA, 18 nt, Human
auuuauugcuacuuccug

SEQ ID NO: 3646383 - RNA, 13 nt, Human
auuuauugcuuua

SEQ ID NO: 3646384 - RNA, 20 nt, Human
auuuauuggcuuuucugauc

SEQ ID NO: 3646385 - RNA, 23 nt, Human
auuuauuggcuuuucugauccag

SEQ ID NO: 3646386 - RNA, 16 nt, Human
auuuauuguauucugg

SEQ ID NO: 3646387 - RNA, 19 nt, Human
auuuauuguuuauuuauca

SEQ ID NO: 3646388 - RNA, 21 nt, Human
auuuauuguuuauuuaucagu

SEQ ID NO: 3646389 - RNA, 22 nt, Human
auuuauuguuuauuuaucagug

SEQ ID NO: 3646390 - RNA, 20 nt, Human
auuuauuuaaaagauucauu

SEQ ID NO: 3646391 - RNA, 14 nt, Human
auuuauuuaaaaua

SEQ ID NO: 3646392 - RNA, 15 nt, Human
auuuauuuaaagcau

SEQ ID NO: 3646393 - RNA, 12 nt, Human
auuuauuuaaau

SEQ ID NO: 3646394 - RNA, 15 nt, Human
auuuauuuaauauuu

SEQ ID NO: 3646395 - RNA, 18 nt, Human
auuuauuuaauauuuaau

SEQ ID NO: 3646396 - RNA, 16 nt, Human
auuuauuuacaaaugu

SEQ ID NO: 3646397 - RNA, 23 nt, Human
auuuauuuacagaugaauguauu

SEQ ID NO: 3646398 - RNA, 15 nt, Human
auuuauuuauccaga

SEQ ID NO: 3646399 - RNA, 14 nt, Human
auuuauuuaugugu

SEQ ID NO: 3646400 - RNA, 14 nt, Human
auuuauuuauuaag

SEQ ID NO: 3646401 - RNA, 17 nt, Human
auuuauuuauuaagaug

SEQ ID NO: 3646402 - RNA, 14 nt, Human
auuuauuuauucau

SEQ ID NO: 3646403 - RNA, 16 nt, Human
auuuauuuauuuauuc

SEQ ID NO: 3646404 - RNA, 18 nt, Human
auuuauuuccaauguuuc

SEQ ID NO: 3646405 - RNA, 20 nt, Human
auuuauuuccacuaaaaaua

SEQ ID NO: 3646406 - RNA, 21 nt, Human
auuuauuuccacuaaaaauau

SEQ ID NO: 3646407 - RNA, 22 nt, Human
auuuauuuccacuaaaaauauu

SEQ ID NO: 3646408 - RNA, 16 nt, Human
auuuauuugaaugauu

SEQ ID NO: 3646409 - RNA, 21 nt, Human
auuuauuugaaugauuuuucu

SEQ ID NO: 3646410 - RNA, 16 nt, Human
auuuauuugcuucuuc

SEQ ID NO: 3646411 - RNA, 20 nt, Human
auuuauuuuauuuuagcagu

SEQ ID NO: 3646412 - RNA, 17 nt, Human
auuuauuuuccucccca

SEQ ID NO: 3646413 - RNA, 16 nt, Human
auuuauuuucuuuuga

SEQ ID NO: 3646414 - RNA, 12 nt, Human
auuuauuuugac

SEQ ID NO: 3646415 - RNA, 13 nt, Human
auuuauuuuguaa

SEQ ID NO: 3646416 - RNA, 15 nt, Human
auuuauuuuucaguu

SEQ ID NO: 3646417 - RNA, 19 nt, Human
auuuauuuuucaguuccaa

SEQ ID NO: 3646418 - RNA, 20 nt, Human
auuuauuuuucaguuccaag

SEQ ID NO: 3646419 - RNA, 14 nt, Human
auuuauuuuuuaca

SEQ ID NO: 3646420 - RNA, 18 nt, Human
auuuauuuuuuacauuau

SEQ ID NO: 3646421 - RNA, 19 nt, Human
auuuauuuuuuuuaaagaa

SEQ ID NO: 3646422 - RNA, 19 nt, Human
auuuauuuuuuuuaauugu

SEQ ID NO: 3646423 - RNA, 22 nt, Human
auuuauuuuuuuuaauuguauu

SEQ ID NO: 3646424 - RNA, 14 nt, Human
auuucaaaaauaua

SEQ ID NO: 3646425 - RNA, 18 nt, Human
auuucaaaaauauaacuu

SEQ ID NO: 3646426 - RNA, 19 nt, Human
auuucaaaaauauaacuua

SEQ ID NO: 3646427 - RNA, 22 nt, Human
auuucaaaaauuuggaauucug

SEQ ID NO: 3646428 - RNA, 17 nt, Human
auuucaaaagacauguu

SEQ ID NO: 3646429 - RNA, 18 nt, Human
auuucaaaagacauguug

SEQ ID NO: 3646430 - RNA, 21 nt, Human
auuucaaaagacauguuguaa

SEQ ID NO: 3646431 - RNA, 13 nt, Human
auuucaaaaugcu

SEQ ID NO: 3646432 - RNA, 20 nt, Human
auuucaagaaaaaauaaaug

SEQ ID NO: 3646433 - RNA, 22 nt, Human
auuucaagaaaaaauaaaugga

SEQ ID NO: 3646434 - RNA, 15 nt, Human
auuucaagaccuucu

SEQ ID NO: 3646435 - RNA, 12 nt, Human
auuucaagcuua

SEQ ID NO: 3646436 - RNA, 21 nt, Human
auuucaagcuuauuuuggaga

SEQ ID NO: 3646437 - RNA, 11 nt, Human
auuucaaguuc

SEQ ID NO: 3646438 - RNA, 23 nt, Human
auuucaaguuccaaguugcuaau

SEQ ID NO: 3646439 - RNA, 20 nt, Human
auuucaauguaauuaaacug

SEQ ID NO: 3646440 - RNA, 22 nt, Human
auuucaauguaauuaaacuguu

SEQ ID NO: 3646441 - RNA, 20 nt, Human
auuucaauguguauaaauug

SEQ ID NO: 3646442 - RNA, 17 nt, Human
auuucaauuuguucagu

SEQ ID NO: 3646443 - RNA, 18 nt, Human
auuucacaaauauuaaaa

SEQ ID NO: 3646444 - RNA, 23 nt, Human
auuucacaaauauuaaaaagucu

SEQ ID NO: 3646445 - RNA, 20 nt, Human
auuucacaacagaucaauuu

SEQ ID NO: 3646446 - RNA, 23 nt, Human
auuucacaguguguuugugauug

SEQ ID NO: 3646447 - RNA, 21 nt, Human
auuucacauuaauauuugcug

SEQ ID NO: 3646448 - RNA, 16 nt, Human
auuucacauuaauggu

SEQ ID NO: 3646449 - RNA, 22 nt, Human
auuucacauuaauggucuaaaa

SEQ ID NO: 3646450 - RNA, 17 nt, Human
auuucacauuauucugg

SEQ ID NO: 3646451 - RNA, 23 nt, Human
auuucaccacucaaaggccagac

SEQ ID NO: 3646452 - RNA, 21 nt, Human
auuucaccccucccuuucucc

SEQ ID NO: 3646453 - RNA, 18 nt, Human
auuucaccuguaaaccug

SEQ ID NO: 3646454 - RNA, 18 nt, Human
auuucacgucauaggaag

SEQ ID NO: 3646455 - RNA, 16 nt, Human
auuucacuagaaaagc

SEQ ID NO: 3646456 - RNA, 16 nt, Human
auuucacuggagcaca

SEQ ID NO: 3646457 - RNA, 22 nt, Human
auuucacugucuuuaauucugu

SEQ ID NO: 3646458 - RNA, 23 nt, Human
auuucacugucuuuaauucugua

SEQ ID NO: 3646459 - RNA, 15 nt, Human
auuucacuugagugg

SEQ ID NO: 3646460 - RNA, 19 nt, Human
auuucacuuuagaugcuga

SEQ ID NO: 3646461 - RNA, 21 nt, Human
auuucagaaauacagauaaau

SEQ ID NO: 3646462 - RNA, 16 nt, Human
auuucagaaguuuaaa

SEQ ID NO: 3646463 - RNA, 23 nt, Human
auuucagagugacuacacacagu

SEQ ID NO: 3646464 - RNA, 13 nt, Human
auuucagauguaa

SEQ ID NO: 3646465 - RNA, 14 nt, Human
auuucagauguaau

SEQ ID NO: 3646466 - RNA, 15 nt, Human
auuucagauguaaug

SEQ ID NO: 3646467 - RNA, 18 nt, Human
auuucagauucccagagc

SEQ ID NO: 3646468 - RNA, 15 nt, Human
auuucagauuuguga

SEQ ID NO: 3646469 - RNA, 15 nt, Human
auuucagauuuugau

SEQ ID NO: 3646470 - RNA, 20 nt, Human
auuucaggaggaauacugaa

SEQ ID NO: 3646471 - RNA, 23 nt, Human
auuucagguuguuggugacuauc

SEQ ID NO: 3646472 - RNA, 20 nt, Human
auuucagguuuuguaaagau

SEQ ID NO: 3646473 - RNA, 20 nt, Human
auuucaguaaaccugucuga

SEQ ID NO: 3646474 - RNA, 20 nt, Human
auuuucugguagauagaaau

SEQ ID NO: 3646475 - RNA, 19 nt, Human
auuuucugguaggaauagc

SEQ ID NO: 3646476 - RNA, 14 nt, Human
auuuucugguucua

SEQ ID NO: 3646477 - RNA, 16 nt, Human
auuuucugugccugaa

SEQ ID NO: 3646478 - RNA, 14 nt, Human
auuuucuguguguu

SEQ ID NO: 3646479 - RNA, 19 nt, Human
auuuucuguguguuccugg

SEQ ID NO: 3646480 - RNA, 23 nt, Human
auuuucuguguuuugcuguacca

SEQ ID NO: 3646481 - RNA, 20 nt, Human
auuuucuuacccaauuuccc

SEQ ID NO: 3646482 - RNA, 19 nt, Human
auuuucuuauugcgcugcu

SEQ ID NO: 3646483 - RNA, 14 nt, Human
auuuucuucaguug

SEQ ID NO: 3646484 - RNA, 18 nt, Human
auuuucuucaugcaauga

SEQ ID NO: 3646485 - RNA, 21 nt, Human
auuuucuucaugcaaugacau

SEQ ID NO: 3646486 - RNA, 12 nt, Human
auuuucuucuaa

SEQ ID NO: 3646487 - RNA, 13 nt, Human
auuuucuucuaag

SEQ ID NO: 3646488 - RNA, 21 nt, Human
auuuucuugaugacuggaauu

SEQ ID NO: 3646489 - RNA, 23 nt, Human
auuuucuugauguagcagaauau

SEQ ID NO: 3646490 - RNA, 12 nt, Human
auuuucuuuaau

SEQ ID NO: 3646491 - RNA, 16 nt, Human
auuuucuuucuguaac

SEQ ID NO: 3646492 - RNA, 18 nt, Human
auuuucuuuugaauuguu

SEQ ID NO: 3646493 - RNA, 20 nt, Human
auuuucuuuugaauuguuuu

SEQ ID NO: 3646494 - RNA, 20 nt, Human
auuuucuuuuuaauaaaaag

SEQ ID NO: 3646495 - RNA, 19 nt, Human
auuuugaaaaauuccuauu

SEQ ID NO: 3646496 - RNA, 19 nt, Human
auuuugaaaacuacauuuu

SEQ ID NO: 3646497 - RNA, 19 nt, Human
auuuugaaaagcuucuuaa

SEQ ID NO: 3646498 - RNA, 17 nt, Human
auuuugaaaaguaauau

SEQ ID NO: 3646499 - RNA, 21 nt, Human
auuuugaaaaguaauauuuau

SEQ ID NO: 3646500 - RNA, 15 nt, Human
auuuugaaagucugu

SEQ ID NO: 3646501 - RNA, 19 nt, Human
auuuugaaagucuguccuu

SEQ ID NO: 3646502 - RNA, 13 nt, Human
auuuuauucuuga

SEQ ID NO: 3646503 - RNA, 14 nt, Human
auuuuauucuugau

SEQ ID NO: 3646504 - RNA, 18 nt, Human
auuuuauuguaacagaca

SEQ ID NO: 3646505 - RNA, 20 nt, Human
auuuuauuguaacagacauu

SEQ ID NO: 3646506 - RNA, 17 nt, Human
auuuuauuuagacaaga

SEQ ID NO: 3646507 - RNA, 23 nt, Human
auuuuauuuccuggacauccucu

SEQ ID NO: 3646508 - RNA, 22 nt, Human
auuuuauuuguaggggaacuca

SEQ ID NO: 3646509 - RNA, 17 nt, Human
auuuuauuuuuuucuac

SEQ ID NO: 3646510 - RNA, 20 nt, Human
auuuuauuuuuuucucucug

SEQ ID NO: 3646511 - RNA, 21 nt, Human
auuuuauuuuuuucugaauua

SEQ ID NO: 3646512 - RNA, 15 nt, Human
auuuucaaaaccagg

SEQ ID NO: 3646513 - RNA, 13 nt, Human
auuuucaaaagau

SEQ ID NO: 3646514 - RNA, 15 nt, Human
auuuucaaaagauaa

SEQ ID NO: 3646515 - RNA, 24 nt, Human
auuuucaaaagauaauauuuuaca

SEQ ID NO: 3646516 - RNA, 16 nt, Human
auuuucaaagacuuaa

SEQ ID NO: 3646517 - RNA, 22 nt, Human
auuuucaaagcuuuuuccagag

SEQ ID NO: 3646518 - RNA, 17 nt, Human
auuuucaacauuucaaa

SEQ ID NO: 3646519 - RNA, 20 nt, Human
auuuucaacugucuuccuca

SEQ ID NO: 3646520 - RNA, 13 nt, Human
auuuucaagaaac

SEQ ID NO: 3646521 - RNA, 14 nt, Human
auuuucaagaaacu

SEQ ID NO: 3646522 - RNA, 20 nt, Human
auuuucaagacugaauucca

SEQ ID NO: 3646523 - RNA, 22 nt, Human
auuuucaagcaucuccugagga

SEQ ID NO: 3646524 - RNA, 16 nt, Human
auuuucaauagccacu

SEQ ID NO: 3646525 - RNA, 14 nt, Human
auuuucaauucaaa

SEQ ID NO: 3646526 - RNA, 20 nt, Human
auuuucaauucaaaaaugua

SEQ ID NO: 3646527 - RNA, 16 nt, Human
auuuucacaugaacau

SEQ ID NO: 3646528 - RNA, 22 nt, Human
auuuucacauucccaucuguca

SEQ ID NO: 3646529 - RNA, 20 nt, Human
auuuucacauucuuggcuua

SEQ ID NO: 3646530 - RNA, 16 nt, Human
auuuucaccccacccu

SEQ ID NO: 3646531 - RNA, 14 nt, Human
auuuucacuguguc

SEQ ID NO: 3646532 - RNA, 17 nt, Human
auuuucagaaaauauua

SEQ ID NO: 3646533 - RNA, 17 nt, Human
auauuuaaaaaugucuu

SEQ ID NO: 3646534 - RNA, 14 nt, Human
auauuuaaaacuuu

SEQ ID NO: 3646535 - RNA, 15 nt, Human
auauuuaaaagaaag

SEQ ID NO: 3646536 - RNA, 18 nt, Human
auauuuaaacagcagugu

SEQ ID NO: 3646537 - RNA, 21 nt, Human
auauuuaaacaugguuacaau

SEQ ID NO: 3646538 - RNA, 22 nt, Human
auauuuaaaggcccuaucuguu

SEQ ID NO: 3646539 - RNA, 13 nt, Human
auauuuaaagucu

SEQ ID NO: 3646540 - RNA, 21 nt, Human
auauuuaaauguaaagacaaa

SEQ ID NO: 3646541 - RNA, 14 nt, Human
auauuuaagaaaau

SEQ ID NO: 3646542 - RNA, 18 nt, Human
auauuuaagaaaauacaa

SEQ ID NO: 3646543 - RNA, 14 nt, Human
auauuuaaugcauu

SEQ ID NO: 3646544 - RNA, 19 nt, Human
auauuuaaugcauuaaacc

SEQ ID NO: 3646545 - RNA, 22 nt, Human
auauuuaaugcauuaaaccugu

SEQ ID NO: 3646546 - RNA, 22 nt, Human
auauuuaauguugaacaaaaua

SEQ ID NO: 3646547 - RNA, 13 nt, Human
auauuuaauguuu

SEQ ID NO: 3646548 - RNA, 20 nt, Human
auauuuaauguuuuaaaugu

SEQ ID NO: 3646549 - RNA, 15 nt, Human
auauuuaauuauuaa

SEQ ID NO: 3646550 - RNA, 17 nt, Human
auauuuaauuauuaacu

SEQ ID NO: 3646551 - RNA, 18 nt, Human
auauuuacauaugaaauu

SEQ ID NO: 3646552 - RNA, 19 nt, Human
auauuuacauaugaaauuu

SEQ ID NO: 3646553 - RNA, 17 nt, Human
auauuuaccucagccug

SEQ ID NO: 3646554 - RNA, 18 nt, Human
auauuuaccucagccugg

SEQ ID NO: 3646555 - RNA, 20 nt, Human
auauuuacuaaaauggacug

SEQ ID NO: 3646556 - RNA, 23 nt, Human
auauuuacuaagccacaagaaau

SEQ ID NO: 3646557 - RNA, 20 nt, Human
auauuuagauguaauuuugu

SEQ ID NO: 3646558 - RNA, 21 nt, Human
auauuuaguuauaguuucaga

SEQ ID NO: 3646559 - RNA, 21 nt, Human
auauuuauaacucaucauaaa

SEQ ID NO: 3646560 - RNA, 23 nt, Human
auauuuauaacucaucauaaaau

SEQ ID NO: 3646561 - RNA, 15 nt, Human
auauuuauagucaca

SEQ ID NO: 3646562 - RNA, 20 nt, Human
auauuuauauaauuauguua

SEQ ID NO: 3646563 - RNA, 14 nt, Human
auauuuauauuuca

SEQ ID NO: 3646564 - RNA, 15 nt, Human
auauuuauauuucac

SEQ ID NO: 3646565 - RNA, 13 nt, Human
auauuuaugaaga

SEQ ID NO: 3646566 - RNA, 14 nt, Human
auauuuaugaagaa

SEQ ID NO: 3646567 - RNA, 17 nt, Human
auauuuaugaagaaaau

SEQ ID NO: 3646568 - RNA, 16 nt, Human
auauuuauuaccucug

SEQ ID NO: 3646569 - RNA, 14 nt, Human
auauuuauuacugu

SEQ ID NO: 3646570 - RNA, 13 nt, Human
auauuuauugcuu

SEQ ID NO: 3646571 - RNA, 14 nt, Human
auauuuauugcuuu

SEQ ID NO: 3646572 - RNA, 22 nt, Human
auauuuauuguuuauuuaucag

SEQ ID NO: 3646573 - RNA, 23 nt, Human
auauuuauuguuuauuuaucagu

SEQ ID NO: 3646574 - RNA, 13 nt, Human
auauuuauuuuaa

SEQ ID NO: 3646575 - RNA, 22 nt, Human
auauuuauuuucuuuugaauug

SEQ ID NO: 3646576 - RNA, 17 nt, Human
auauuucaaguacacug

SEQ ID NO: 3646577 - RNA, 19 nt, Human
auauuucaaguacacugaa

SEQ ID NO: 3646578 - RNA, 20 nt, Human
auauuucagauguaauguuu

SEQ ID NO: 3646579 - RNA, 11 nt, Human
auauuucauca

SEQ ID NO: 3646580 - RNA, 18 nt, Human
auauuucccaugauuuca

SEQ ID NO: 3646581 - RNA, 21 nt, Human
auauuucccaugauuucaugu

SEQ ID NO: 3646582 - RNA, 21 nt, Human
auauuucccauuugugccaga

SEQ ID NO: 3646583 - RNA, 12 nt, Human
auauuuccuuua

SEQ ID NO: 3646584 - RNA, 16 nt, Human
auauuucuauugaauu

SEQ ID NO: 3646585 - RNA, 13 nt, Human
auauuucuauuuu

SEQ ID NO: 3646586 - RNA, 15 nt, Human
auauuucuauuuuau

SEQ ID NO: 3646587 - RNA, 23 nt, Human
auauuucuauuuuauuaugaaga

SEQ ID NO: 3646588 - RNA, 20 nt, Human
auauuucugcuuucuuugau

SEQ ID NO: 3646589 - RNA, 15 nt, Human
auauuugaaaaaaac

SEQ ID NO: 3646590 - RNA, 13 nt, Human
auauuugaaauau

SEQ ID NO: 3646591 - RNA, 14 nt, Human
auauuugaaggguc

SEQ ID NO: 3646592 - RNA, 19 nt, Human
auauuugaaucuugucuca

SEQ ID NO: 3646593 - RNA, 20 nt, Human
auauuugaauuuuaaaucua

SEQ ID NO: 3646594 - RNA, 16 nt, Human
auauuugacuugcaug

SEQ ID NO: 3646595 - RNA, 20 nt, Human
auauuugacuugcaugaaga

SEQ ID NO: 3646596 - RNA, 12 nt, Human
auauuugauuua

SEQ ID NO: 3646597 - RNA, 18 nt, Human
auauuugauuuauuaacu

SEQ ID NO: 3646598 - RNA, 23 nt, Human
auauuugauuuauuaacuuaaua

SEQ ID NO: 3646599 - RNA, 12 nt, Human
auauuugcacua

SEQ ID NO: 3646600 - RNA, 19 nt, Human
auauuugcaguuuuucauu

SEQ ID NO: 3646601 - RNA, 23 nt, Human
auauuugcaguuuuucauuuuaa

SEQ ID NO: 3646602 - RNA, 17 nt, Human
auauuuggaugcagagu

SEQ ID NO: 3646603 - RNA, 15 nt, Human
auauuuggcuuaaau

SEQ ID NO: 3646604 - RNA, 21 nt, Human
auauuuggcuuaaauauaguu

SEQ ID NO: 3646605 - RNA, 13 nt, Human
auauuuguaaaau

SEQ ID NO: 3646606 - RNA, 16 nt, Human
auauuuguaaagcuau

SEQ ID NO: 3646607 - RNA, 15 nt, Human
auauuuguaaggcuu

SEQ ID NO: 3646608 - RNA, 21 nt, Human
auauuuguaaggcuuguucca

SEQ ID NO: 3646609 - RNA, 12 nt, Human
auauuuguacau

SEQ ID NO: 3646610 - RNA, 21 nt, Human
auauuuguacuuucuguuaaa

SEQ ID NO: 3646611 - RNA, 18 nt, Human
auauuuguauuuauucuu

SEQ ID NO: 3646612 - RNA, 23 nt, Human
auauuugucaauuuaugaauaua

SEQ ID NO: 3646613 - RNA, 20 nt, Human
auauuugugauagcacuuuc

SEQ ID NO: 3646614 - RNA, 21 nt, Human
auauuugugauagcacuuucu

SEQ ID NO: 3646615 - RNA, 14 nt, Human
auauuugugcauuu

SEQ ID NO: 3646616 - RNA, 22 nt, Human
auauuugugcuauaguauuuga

SEQ ID NO: 3646617 - RNA, 11 nt, Human
auauuugugua

SEQ ID NO: 3646618 - RNA, 16 nt, Human
auauuugugugcuaaa

SEQ ID NO: 3646619 - RNA, 13 nt, Human
auauuuguuaaau

SEQ ID NO: 3646620 - RNA, 22 nt, Human
auauuuguuaaauauuuacaua

SEQ ID NO: 3646621 - RNA, 15 nt, Human
auauuuguuauguag

SEQ ID NO: 3646622 - RNA, 17 nt, Human
auauuuuaaaauaaacu

SEQ ID NO: 3646623 - RNA, 18 nt, Human
auauuuuaaaauuuguuc

SEQ ID NO: 3646624 - RNA, 15 nt, Human
auauuuuaaagaauu

SEQ ID NO: 3646625 - RNA, 17 nt, Human
auauuuuaacuccacug

SEQ ID NO: 3646626 - RNA, 14 nt, Human
auauuuuaauuuca

SEQ ID NO: 3646627 - RNA, 17 nt, Human
auauuuuaauuucaagc

SEQ ID NO: 3646628 - RNA, 13 nt, Human
auauuuuaauuuu

SEQ ID NO: 3646629 - RNA, 15 nt, Human
auauuuuaauuuuua

SEQ ID NO: 3646630 - RNA, 14 nt, Human
auauuuuacauaca

SEQ ID NO: 3646631 - RNA, 15 nt, Human
auauuuuauauaaag

SEQ ID NO: 3646632 - RNA, 14 nt, Human
auauuuuauauuac

SEQ ID NO: 3646633 - RNA, 12 nt, Human
auauuuuaugau

SEQ ID NO: 3646634 - RNA, 19 nt, Human
auauuuuaugguuauguuu

SEQ ID NO: 3646635 - RNA, 16 nt, Human
auauuuuauuacuguu

SEQ ID NO: 3646636 - RNA, 12 nt, Human
auauuuuauuca

SEQ ID NO: 3646637 - RNA, 16 nt, Human
auauuuuauucaaggu

SEQ ID NO: 3646638 - RNA, 17 nt, Human
auauuuuauuucaaugu

SEQ ID NO: 3646639 - RNA, 19 nt, Human
auauuuuauuucaauguaa

SEQ ID NO: 3646640 - RNA, 20 nt, Human
auauuuuauuucaauguaau

SEQ ID NO: 3646641 - RNA, 20 nt, Human
auauuuuauuuuuagaauuu

SEQ ID NO: 3646642 - RNA, 19 nt, Human
auauuuucaaaguacauaa

SEQ ID NO: 3646643 - RNA, 21 nt, Human
auauuuucaauucaaaaaugu

SEQ ID NO: 3646644 - RNA, 23 nt, Human
auauuuucaauucaaaaauguac

SEQ ID NO: 3646645 - RNA, 14 nt, Human
auauuuucaguaau

SEQ ID NO: 3646646 - RNA, 23 nt, Human
auauuuucaugacuuuuccaugu

SEQ ID NO: 3646647 - RNA, 22 nt, Human
aucaugaaacuuguuucacuga

SEQ ID NO: 3646648 - RNA, 18 nt, Human
aucaugaagauauuuuuc

SEQ ID NO: 3646649 - RNA, 12 nt, Human
aucaugaagccu

SEQ ID NO: 3646650 - RNA, 19 nt, Human
aucaugaauuuuaaaguau

SEQ ID NO: 3646651 - RNA, 17 nt, Human
aucaugaccagcaaaua

SEQ ID NO: 3646652 - RNA, 21 nt, Human
aucaugagccugcuggaagcc

SEQ ID NO: 3646653 - RNA, 23 nt, Human
aucaugagugaauaaaugucuug

SEQ ID NO: 3646654 - RNA, 12 nt, Human
aucaugcaaaau

SEQ ID NO: 3646655 - RNA, 19 nt, Human
aucaugcaaaugcuguauu

SEQ ID NO: 3646656 - RNA, 22 nt, Human
aucaugcagcucaacuuucugu

SEQ ID NO: 3646657 - RNA, 15 nt, Human
aucaugcauagagug

SEQ ID NO: 3646658 - RNA, 15 nt, Human
aucaugccucugagg

SEQ ID NO: 3646659 - RNA, 20 nt, Human
aucaugcuuuaaaguguaau

SEQ ID NO: 3646660 - RNA, 19 nt, Human
aucauggaaauauuaugca

SEQ ID NO: 3646661 - RNA, 20 nt, Human
aucauggaaugguuauaaaa

SEQ ID NO: 3646662 - RNA, 19 nt, Human
aucauggagguuugaagau

SEQ ID NO: 3646663 - RNA, 12 nt, Human
aucauggccagc

SEQ ID NO: 3646664 - RNA, 13 nt, Human
aucauggccagcu

SEQ ID NO: 3646665 - RNA, 22 nt, Human
aucaugguagagaaucucuccc

SEQ ID NO: 3646666 - RNA, 23 nt, Human
aucaugguguaauaagacauaac

SEQ ID NO: 3646667 - RNA, 18 nt, Human
aucauguaaagaaauguc

SEQ ID NO: 3646668 - RNA, 15 nt, Human
aucauguacauuucu

SEQ ID NO: 3646669 - RNA, 17 nt, Human
aucauguaguaucaaau

SEQ ID NO: 3646670 - RNA, 21 nt, Human
aucauguaguaucaaauauua

SEQ ID NO: 3646671 - RNA, 19 nt, Human
aucaugucaggccugugug

SEQ ID NO: 3646672 - RNA, 16 nt, Human
aucauguccauacacu

SEQ ID NO: 3646673 - RNA, 14 nt, Human
aucauguccccaaa

SEQ ID NO: 3646674 - RNA, 20 nt, Human
aucauguccccaaaccugca

SEQ ID NO: 3646675 - RNA, 14 nt, Human
aucaugucuggcua

SEQ ID NO: 3646676 - RNA, 12 nt, Human
aucaugugaaau

SEQ ID NO: 3646677 - RNA, 14 nt, Human
aucaugugaaauca

SEQ ID NO: 3646678 - RNA, 15 nt, Human
aucaugugaaaucau

SEQ ID NO: 3646679 - RNA, 16 nt, Human
aucaugugaaaucauu

SEQ ID NO: 3646680 - RNA, 19 nt, Human
aucauguguaaucaauaaa

SEQ ID NO: 3646681 - RNA, 21 nt, Human
aucauguuaguaauaccucua

SEQ ID NO: 3646682 - RNA, 22 nt, Human
aucauguuaguaauaccucuaa

SEQ ID NO: 3646683 - RNA, 16 nt, Human
aucauguugaucaugu

SEQ ID NO: 3646684 - RNA, 14 nt, Human
aucauguuucuuug

SEQ ID NO: 3646685 - RNA, 15 nt, Human
aucauguuucuuuga

SEQ ID NO: 3646686 - RNA, 23 nt, Human
aucauguuucuuugaucaugaau

SEQ ID NO: 3646687 - RNA, 12 nt, Human
aucauguuugcu

SEQ ID NO: 3646688 - RNA, 13 nt, Human
aucauguuugcuc

SEQ ID NO: 3646689 - RNA, 14 nt, Human
aucauguuuuggug

SEQ ID NO: 3646690 - RNA, 17 nt, Human
aucauguuuuggugaaa

SEQ ID NO: 3646691 - RNA, 19 nt, Human
aucauguuuuggugaaaau

SEQ ID NO: 3646692 - RNA, 11 nt, Human
aucauuaaagu

SEQ ID NO: 3646693 - RNA, 14 nt, Human
aucauuaaaguucu

SEQ ID NO: 3646694 - RNA, 15 nt, Human
aucauuaagacaacu

SEQ ID NO: 3646695 - RNA, 13 nt, Human
aucauuacuauaa

SEQ ID NO: 3646696 - RNA, 15 nt, Human
aucauuauuuaugua

SEQ ID NO: 3646697 - RNA, 19 nt, Human
aucauucacuucacugugc

SEQ ID NO: 3646698 - RNA, 12 nt, Human
aucauucagcaa

SEQ ID NO: 3646699 - RNA, 15 nt, Human
aucauucauuuuugu

SEQ ID NO: 3646700 - RNA, 15 nt, Human
aucauucccucucau

SEQ ID NO: 3646701 - RNA, 22 nt, Human
aucauucccuucgacagcauuu

SEQ ID NO: 3646702 - RNA, 20 nt, Human
aucauuccuuuuuauuuaua

SEQ ID NO: 3646703 - RNA, 21 nt, Human
aucauucucugucucauccau

SEQ ID NO: 3646704 - RNA, 20 nt, Human
aucauucuuauuucaugaaa

SEQ ID NO: 3646705 - RNA, 23 nt, Human
aucauucuuauuucaugaaaauu

SEQ ID NO: 3646706 - RNA, 13 nt, Human
aucauugaaaucu

SEQ ID NO: 3646707 - RNA, 19 nt, Human
aucauugaaaucuuuuugc

SEQ ID NO: 3646708 - RNA, 21 nt, Human
aucauugcugucugcagccuu

SEQ ID NO: 3646709 - RNA, 11 nt, Human
aucauugcuua

SEQ ID NO: 3646710 - RNA, 13 nt, Human
aucauuguacagu

SEQ ID NO: 3646711 - RNA, 15 nt, Human
aucauuguacaguuu

SEQ ID NO: 3646712 - RNA, 18 nt, Human
aucauuguauauaugugu

SEQ ID NO: 3646713 - RNA, 14 nt, Human
aucauuguccagag

SEQ ID NO: 3646714 - RNA, 15 nt, Human
aucauugugaaauua

SEQ ID NO: 3646715 - RNA, 20 nt, Human
aucauuguuuggcauugaaa

SEQ ID NO: 3646716 - RNA, 15 nt, Human
aucauuguuuugaau

SEQ ID NO: 3646717 - RNA, 14 nt, Human
aucauuuacaagac

SEQ ID NO: 3646718 - RNA, 15 nt, Human
aucauuuauuggaug

SEQ ID NO: 3646719 - RNA, 21 nt, Human
aucauuuauuuuaagcacucu

SEQ ID NO: 3646720 - RNA, 19 nt, Human
aucauuuauuuuuuacauu

SEQ ID NO: 3646721 - RNA, 21 nt, Human
aucauuucuauuaaaugagca

SEQ ID NO: 3646722 - RNA, 14 nt, Human
aucauuugaggaau

SEQ ID NO: 3646723 - RNA, 18 nt, Human
aucauuugcccuuaagga

SEQ ID NO: 3646724 - RNA, 14 nt, Human
aucauuuguuuaaa

SEQ ID NO: 3646725 - RNA, 15 nt, Human
aucauuuguuuaaaa

SEQ ID NO: 3646726 - RNA, 14 nt, Human
aucauuuuaauuau

SEQ ID NO: 3646727 - RNA, 15 nt, Human
aucauuuuaggaaag

SEQ ID NO: 3646728 - RNA, 18 nt, Human
aucauuuuauaugucaaa

SEQ ID NO: 3646729 - RNA, 13 nt, Human
aucauuuugcauu

SEQ ID NO: 3646730 - RNA, 19 nt, Human
aucauuuugcauucaaauu

SEQ ID NO: 3646731 - RNA, 19 nt, Human
aucauuuugccucuuuucu

SEQ ID NO: 3646732 - RNA, 14 nt, Human
aucauuuuuuacuu

SEQ ID NO: 3646733 - RNA, 17 nt, Human
aucauuuuuuauauaua

SEQ ID NO: 3646734 - RNA, 23 nt, Human
aucauuuuuuccuguuugggaag

SEQ ID NO: 3646735 - RNA, 20 nt, Human
caaccucggcuccuggacuc

SEQ ID NO: 3646736 - RNA, 14 nt, Human
caaccucucacucc

SEQ ID NO: 3646737 - RNA, 17 nt, Human
caaccucucacucccca

SEQ ID NO: 3646738 - RNA, 16 nt, Human
caaccucugcuuccca

SEQ ID NO: 3646739 - RNA, 17 nt, Human
caaccucugcuucccag

SEQ ID NO: 3646740 - RNA, 14 nt, Human
caaccucuuccucc

SEQ ID NO: 3646741 - RNA, 15 nt, Human
caaccucuuggccug

SEQ ID NO: 3646742 - RNA, 12 nt, Human
caaccugaaccu

SEQ ID NO: 3646743 - RNA, 21 nt, Human
caaccugaauacccuuuucug

SEQ ID NO: 3646744 - RNA, 16 nt, Human
caaccugauugugucu

SEQ ID NO: 3646745 - RNA, 16 nt, Human
caaccugcucuccucu

SEQ ID NO: 3646746 - RNA, 23 nt, Human
caaccugcucuccucuugccacu

SEQ ID NO: 3646747 - RNA, 13 nt, Human
caaccugggucca

SEQ ID NO: 3646748 - RNA, 17 nt, Human
caaccuggguccaaaua

SEQ ID NO: 3646749 - RNA, 20 nt, Human
caaccuggguccaaauaaaa

SEQ ID NO: 3646750 - RNA, 16 nt, Human
caaccuggucacagga

SEQ ID NO: 3646751 - RNA, 13 nt, Human
caaccuguaaauu

SEQ ID NO: 3646752 - RNA, 22 nt, Human
caaccuguaauaaauaugagug

SEQ ID NO: 3646753 - RNA, 18 nt, Human
caaccugugaucaagcaa

SEQ ID NO: 3646754 - RNA, 18 nt, Human
caaccuuagauguucuaa

SEQ ID NO: 3646755 - RNA, 14 nt, Human
caaccuucaagcug

SEQ ID NO: 3646756 - RNA, 20 nt, Human
caaccuucuguggcucacag

SEQ ID NO: 3646757 - RNA, 17 nt, Human
caaccuuucaccuuugu

SEQ ID NO: 3646758 - RNA, 14 nt, Human
caacgaagaaaaaa

SEQ ID NO: 3646759 - RNA, 15 nt, Human
caacgaggaagcccu

SEQ ID NO: 3646760 - RNA, 18 nt, Human
caacgaucacaaaugacu

SEQ ID NO: 3646761 - RNA, 20 nt, Human
caacgaucacaaaugacuuu

SEQ ID NO: 3646762 - RNA, 14 nt, Human
caacgccgugggcu

SEQ ID NO: 3646763 - RNA, 14 nt, Human
caacgucugugcca

SEQ ID NO: 3646764 - RNA, 13 nt, Human
caacgugcauugu

SEQ ID NO: 3646765 - RNA, 16 nt, Human
caacgugcauugugcu

SEQ ID NO: 3646766 - RNA, 14 nt, Human
caacguggcccaga

SEQ ID NO: 3646767 - RNA, 23 nt, Human
caacguuguacuguaugugauga

SEQ ID NO: 3646768 - RNA, 22 nt, Human
caacguuuggaagauccuguga

SEQ ID NO: 3646769 - RNA, 17 nt, Human
caacuaaaauuugaagu

SEQ ID NO: 3646770 - RNA, 19 nt, Human
caacuaaaauuugaaguag

SEQ ID NO: 3646771 - RNA, 13 nt, Human
caacuaacaagaa

SEQ ID NO: 3646772 - RNA, 15 nt, Human
caacuaauuuuugua

SEQ ID NO: 3646773 - RNA, 18 nt, Human
caacuaauuuuuguauuu

SEQ ID NO: 3646774 - RNA, 18 nt, Human
caacuacacaaagcaggc

SEQ ID NO: 3646775 - RNA, 19 nt, Human
caacuacagucuaaagcug

SEQ ID NO: 3646776 - RNA, 20 nt, Human
caacuacccaaaacaagccu

SEQ ID NO: 3646777 - RNA, 19 nt, Human
caacuacccccagcugugc

SEQ ID NO: 3646778 - RNA, 15 nt, Human
caacuaccugagcua

SEQ ID NO: 3646779 - RNA, 15 nt, Human
caacuagacauuacc

SEQ ID NO: 3646780 - RNA, 17 nt, Human
caacuagacauucuguc

SEQ ID NO: 3646781 - RNA, 21 nt, Human
caacuagacauucugucgccu

SEQ ID NO: 3646782 - RNA, 17 nt, Human
caacuaggcuucagcau

SEQ ID NO: 3646783 - RNA, 18 nt, Human
caacuauauuaucaugca

SEQ ID NO: 3646784 - RNA, 21 nt, Human
caacuaucucauuuccaagca

SEQ ID NO: 3646785 - RNA, 16 nt, Human
caacuaugauuuggaa

SEQ ID NO: 3646786 - RNA, 18 nt, Human
caacuaugauuuggaaaa

SEQ ID NO: 3646787 - RNA, 19 nt, Human
caacuaugauuuggaaaau

SEQ ID NO: 3646788 - RNA, 22 nt, Human
caacuaugauuuggaaaauaaa

SEQ ID NO: 3646789 - RNA, 12 nt, Human
caacuauuuuau

SEQ ID NO: 3646790 - RNA, 21 nt, Human
caacuauuuuauuauccuaga

SEQ ID NO: 3646791 - RNA, 14 nt, Human
caacuauuuucaga

SEQ ID NO: 3646792 - RNA, 17 nt, Human
caacuauuuucagaugu

SEQ ID NO: 3646793 - RNA, 16 nt, Human
caaagagaaaaagaaa

SEQ ID NO: 3646794 - RNA, 17 nt, Human
caaagagaaaaagaaau

SEQ ID NO: 3646795 - RNA, 19 nt, Human
caaagagaaaaagaaaugc

SEQ ID NO: 3646796 - RNA, 16 nt, Human
caaagagacuggagca

SEQ ID NO: 3646797 - RNA, 17 nt, Human
caaagagacuggagcau

SEQ ID NO: 3646798 - RNA, 19 nt, Human
caaagagagaaaauaaaga

SEQ ID NO: 3646799 - RNA, 21 nt, Human
caaagagagauuuuuuuuuaa

SEQ ID NO: 3646800 - RNA, 21 nt, Human
caaagagaguuuuuaauagaa

SEQ ID NO: 3646801 - RNA, 14 nt, Human
caaagagcugccua

SEQ ID NO: 3646802 - RNA, 20 nt, Human
caaagaggacucgcuuguaa

SEQ ID NO: 3646803 - RNA, 21 nt, Human
caaagaggacucgcuuguaaa

SEQ ID NO: 3646804 - RNA, 23 nt, Human
caaagaggacucgcuuguaaaua

SEQ ID NO: 3646805 - RNA, 20 nt, Human
caaagaggcugaggcuggca

SEQ ID NO: 3646806 - RNA, 13 nt, Human
caaagaggcugcc

SEQ ID NO: 3646807 - RNA, 15 nt, Human
caaagagggcuuccu

SEQ ID NO: 3646808 - RNA, 21 nt, Human
caaagagguuuuaaaaaaauc

SEQ ID NO: 3646809 - RNA, 17 nt, Human
caaagaguagacauuuc

SEQ ID NO: 3646810 - RNA, 17 nt, Human
caaagauagacaggucc

SEQ ID NO: 3646811 - RNA, 14 nt, Human
caaagauauuuugc

SEQ ID NO: 3646812 - RNA, 16 nt, Human
caaagauauuuugcuu

SEQ ID NO: 3646813 - RNA, 18 nt, Human
caaagauauuuugcuuug

SEQ ID NO: 3646814 - RNA, 14 nt, Human
caaagaucaaaaua

SEQ ID NO: 3646815 - RNA, 15 nt, Human
caaagaucaaaauaa

SEQ ID NO: 3646816 - RNA, 16 nt, Human
caaagaucaaaauaaa

SEQ ID NO: 3646817 - RNA, 17 nt, Human
caaagaucaaaauaaaa

SEQ ID NO: 3646818 - RNA, 20 nt, Human
caaagaucaaaauaaaaagu

SEQ ID NO: 3646819 - RNA, 14 nt, Human
caaagaugcagccg

SEQ ID NO: 3646820 - RNA, 23 nt, Human
caaagaugcagccgccuuccuug

SEQ ID NO: 3646821 - RNA, 19 nt, Human
caaagauggcucagagggg

SEQ ID NO: 3646822 - RNA, 18 nt, Human
caaagauguuugucagau

SEQ ID NO: 3646823 - RNA, 21 nt, Human
caaagauucaaaauugacauu

SEQ ID NO: 3646824 - RNA, 17 nt, Human
caaagcaaaccaacaag

SEQ ID NO: 3646825 - RNA, 13 nt, Human
caaagcacagugu

SEQ ID NO: 3646826 - RNA, 15 nt, Human
caaagcacaguguua

SEQ ID NO: 3646827 - RNA, 16 nt, Human
caaagcacaguuugaa

SEQ ID NO: 3646828 - RNA, 17 nt, Human
caaagcacauugaaaga

SEQ ID NO: 3646829 - RNA, 22 nt, Human
caaagcaccaaaauaagaaaag

SEQ ID NO: 3646830 - RNA, 20 nt, Human
caaagcacgaaauguuauuu

SEQ ID NO: 3646831 - RNA, 22 nt, Human
caaagcacugacuucuaaguaa

SEQ ID NO: 3646832 - RNA, 22 nt, Human
caaagcacuuggacucuugcuc

SEQ ID NO: 3646833 - RNA, 23 nt, Human
caaagcacuuggacucuugcucu

SEQ ID NO: 3646834 - RNA, 19 nt, Human
caaagcagacagcuccacc

SEQ ID NO: 3646835 - RNA, 12 nt, Human
caaagcagccac

SEQ ID NO: 3646836 - RNA, 22 nt, Human
caaagcagugcaugcugucccu

SEQ ID NO: 3646837 - RNA, 14 nt, Human
caaagcaguugaau

SEQ ID NO: 3646838 - RNA, 19 nt, Human
caaagcauagauguuuugg

SEQ ID NO: 3646839 - RNA, 16 nt, Human
caaagcaugaaaugga

SEQ ID NO: 3646840 - RNA, 24 nt, Human
caaagcauggacauuuagaagaaa

SEQ ID NO: 3646841 - RNA, 17 nt, Human
caaagcauguuuugcau

SEQ ID NO: 3646842 - RNA, 20 nt, Human
caaagcauuugacuuucugu

SEQ ID NO: 3646843 - RNA, 17 nt, Human
caaagccaaacucugcc

SEQ ID NO: 3646844 - RNA, 18 nt, Human
caaagccaaacucugcca

SEQ ID NO: 3646845 - RNA, 14 nt, Human
caaagccagguccc

SEQ ID NO: 3646846 - RNA, 19 nt, Human
caaagcccaaagugguaua

SEQ ID NO: 3646847 - RNA, 19 nt, Human
caaagccccaugcuggagc

SEQ ID NO: 3646848 - RNA, 14 nt, Human
caaagcccccagag

SEQ ID NO: 3646849 - RNA, 15 nt, Human
caaagcccccagagc

SEQ ID NO: 3646850 - RNA, 14 nt, Human
caaagcgaauuuua

SEQ ID NO: 3646851 - RNA, 20 nt, Human
caaagcgaauuuuaaaagau

SEQ ID NO: 3646852 - RNA, 17 nt, Human
caaagcggggggagggu

SEQ ID NO: 3646853 - RNA, 13 nt, Human
caaagcuaggccu

SEQ ID NO: 3646854 - RNA, 15 nt, Human
caaagcuaggccugg

SEQ ID NO: 3646855 - RNA, 21 nt, Human
caaagcuaggguggcccuugc

SEQ ID NO: 3646856 - RNA, 22 nt, Human
caaagcuaggguggcccuugca

SEQ ID NO: 3646857 - RNA, 20 nt, Human
caaagcucaaauaaaaauaa

SEQ ID NO: 3646858 - RNA, 22 nt, Human
caaagcugacgaggcugggcca

SEQ ID NO: 3646859 - RNA, 14 nt, Human
caaagcugagccug

SEQ ID NO: 3646860 - RNA, 17 nt, Human
caaagcugagccugcag

SEQ ID NO: 3646861 - RNA, 24 nt, Human
caaagcugagccugcagggaagcc

SEQ ID NO: 3646862 - RNA, 11 nt, Human
caaagcugccu

SEQ ID NO: 3646863 - RNA, 12 nt, Human
caaagcugccug

SEQ ID NO: 3646864 - RNA, 12 nt, Human
caaagcuguuaa

SEQ ID NO: 3646865 - RNA, 13 nt, Human
caaagcuguuaaa

SEQ ID NO: 3646866 - RNA, 17 nt, Human
caaagcuguuaaacugu

SEQ ID NO: 3646867 - RNA, 18 nt, Human
caaagcuguuaaacuguu

SEQ ID NO: 3646868 - RNA, 16 nt, Human
caaagcuguucuuccu

SEQ ID NO: 3646869 - RNA, 16 nt, Human
caaagcuuagcaggag

SEQ ID NO: 3646870 - RNA, 18 nt, Human
caaagcuucuaucccagg

SEQ ID NO: 3646871 - RNA, 19 nt, Human
caaagcuucuaucccagga

SEQ ID NO: 3646872 - RNA, 19 nt, Human
caaagcuugaagaucguua

SEQ ID NO: 3646873 - RNA, 20 nt, Human
caaagcuuggauuaaauaca

SEQ ID NO: 3646874 - RNA, 16 nt, Human
caaagcuuguuaagau

SEQ ID NO: 3646875 - RNA, 13 nt, Human
caaagcuuuccug

SEQ ID NO: 3646876 - RNA, 16 nt, Human
caaagcuuuccuggag

SEQ ID NO: 3646877 - RNA, 17 nt, Human
caaagcuuuccuggaga

SEQ ID NO: 3646878 - RNA, 16 nt, Human
caaagcuuuuagaaau

SEQ ID NO: 3646879 - RNA, 22 nt, Human
caaaggaaaaagcacaagaagc

SEQ ID NO: 3646880 - RNA, 19 nt, Human
caaaggaacauugugucua

SEQ ID NO: 3646881 - RNA, 19 nt, Human
caaaggaagucuaaauauu

SEQ ID NO: 3646882 - RNA, 19 nt, Human
caaaggaagugcccccucc

SEQ ID NO: 3646883 - RNA, 17 nt, Human
caaaggacauuaugugu

SEQ ID NO: 3646884 - RNA, 18 nt, Human
caaaggacauuaugugug

SEQ ID NO: 3646885 - RNA, 16 nt, Human
caaaggacgcacugag

SEQ ID NO: 3646886 - RNA, 15 nt, Human
caaaggacuccaccc

SEQ ID NO: 3646887 - RNA, 23 nt, Human
caaaggacuguuuuuuccugagc

SEQ ID NO: 3646888 - RNA, 18 nt, Human
caaaggagcgagcauguc

SEQ ID NO: 3646889 - RNA, 13 nt, Human
caaaggaugugau

SEQ ID NO: 3646890 - RNA, 21 nt, Human
caaaggcauuauaaaaagaau

SEQ ID NO: 3646891 - RNA, 15 nt, Human
caaaggccaaacugc

SEQ ID NO: 3646892 - RNA, 19 nt, Human
caaaggccaaacugcugga

SEQ ID NO: 3646893 - RNA, 15 nt, Human
caaaggccaggguca

SEQ ID NO: 3646894 - RNA, 20 nt, Human
caaaggccauggagagcugg

SEQ ID NO: 3646895 - RNA, 23 nt, Human
caaaggccauggagagcuggagc

SEQ ID NO: 3646896 - RNA, 21 nt, Human
caaaggcuuugcccugcugcc

SEQ ID NO: 3646897 - RNA, 23 nt, Human
caaaggcuuugcccugcugcccu

SEQ ID NO: 3646898 - RNA, 17 nt, Human
caaagggagucugccag

SEQ ID NO: 3646899 - RNA, 17 nt, Human
caaagggcugaaagcca

SEQ ID NO: 3646900 - RNA, 21 nt, Human
caaaggggaaagaacauaaag

SEQ ID NO: 3646901 - RNA, 13 nt, Human
caaaggggacagc

SEQ ID NO: 3646902 - RNA, 18 nt, Human
caaaggggacagcugugu

SEQ ID NO: 3646903 - RNA, 13 nt, Human
aucccaugagccu

SEQ ID NO: 3646904 - RNA, 17 nt, Human
aucccaugagccucagc

SEQ ID NO: 3646905 - RNA, 15 nt, Human
aucccauguauuuau

SEQ ID NO: 3646906 - RNA, 21 nt, Human
aucccauuaaucauuucccca

SEQ ID NO: 3646907 - RNA, 15 nt, Human
aucccauuauucaaa

SEQ ID NO: 3646908 - RNA, 12 nt, Human
aucccauuccag

SEQ ID NO: 3646909 - RNA, 14 nt, Human
aucccauugcccug

SEQ ID NO: 3646910 - RNA, 14 nt, Human
aucccauuuaaaaa

SEQ ID NO: 3646911 - RNA, 20 nt, Human
auccccaaaacaaagucuuu

SEQ ID NO: 3646912 - RNA, 18 nt, Human
auccccaagccuggcaag

SEQ ID NO: 3646913 - RNA, 17 nt, Human
auccccaaggcacuuga

SEQ ID NO: 3646914 - RNA, 12 nt, Human
auccccaauaau

SEQ ID NO: 3646915 - RNA, 19 nt, Human
auccccaauaauugcagaa

SEQ ID NO: 3646916 - RNA, 22 nt, Human
auccccaauaauugcagaacua

SEQ ID NO: 3646917 - RNA, 17 nt, Human
auccccacgccacagcc

SEQ ID NO: 3646918 - RNA, 20 nt, Human
auccccacgccacagcccuu

SEQ ID NO: 3646919 - RNA, 21 nt, Human
auccccacgccacagcccuuu

SEQ ID NO: 3646920 - RNA, 19 nt, Human
auccccacugggaccaacc

SEQ ID NO: 3646921 - RNA, 20 nt, Human
auccccagacuucauagaau

SEQ ID NO: 3646922 - RNA, 22 nt, Human
auccccagggggcaugaccaga

SEQ ID NO: 3646923 - RNA, 19 nt, Human
auccccaggggucccagcc

SEQ ID NO: 3646924 - RNA, 21 nt, Human
auccccaguaaaauugccaua

SEQ ID NO: 3646925 - RNA, 14 nt, Human
auccccagucccaa

SEQ ID NO: 3646926 - RNA, 22 nt, Human
auccccaguucgccuggagccc

SEQ ID NO: 3646927 - RNA, 20 nt, Human
auccccauccuccagcuucu

SEQ ID NO: 3646928 - RNA, 15 nt, Human
auccccaucucccug

SEQ ID NO: 3646929 - RNA, 19 nt, Human
auccccaucucccugccug

SEQ ID NO: 3646930 - RNA, 18 nt, Human
auccccaugccuguggcu

SEQ ID NO: 3646931 - RNA, 14 nt, Human
auccccccucacca

SEQ ID NO: 3646932 - RNA, 22 nt, Human
auccccgcagugugcacuaagg

SEQ ID NO: 3646933 - RNA, 17 nt, Human
auccccgccuggccagg

SEQ ID NO: 3646934 - RNA, 21 nt, Human
auccccgccuggccaggagca

SEQ ID NO: 3646935 - RNA, 13 nt, Human
auccccgcuggcu

SEQ ID NO: 3646936 - RNA, 16 nt, Human
auccccgcuggcuggg

SEQ ID NO: 3646937 - RNA, 20 nt, Human
aucucuuaucuuacgaaaaa

SEQ ID NO: 3646938 - RNA, 19 nt, Human
aucucuuauuuuacaauaa

SEQ ID NO: 3646939 - RNA, 13 nt, Human
aucucuucagucu

SEQ ID NO: 3646940 - RNA, 13 nt, Human
aucucuucauuau

SEQ ID NO: 3646941 - RNA, 20 nt, Human
aucucuucauuauucucugc

SEQ ID NO: 3646942 - RNA, 12 nt, Human
aucucuuccugu

SEQ ID NO: 3646943 - RNA, 11 nt, Human
aucucuuccuu

SEQ ID NO: 3646944 - RNA, 13 nt, Human
aucucuucugugu

SEQ ID NO: 3646945 - RNA, 18 nt, Human
aucucuucuuaauguaca

SEQ ID NO: 3646946 - RNA, 20 nt, Human
aucucuucuuaauguacaua

SEQ ID NO: 3646947 - RNA, 15 nt, Human
aucucuucuuauaca

SEQ ID NO: 3646948 - RNA, 17 nt, Human
aucucuucuuauacaga

SEQ ID NO: 3646949 - RNA, 18 nt, Human
aucucuugagccugggag

SEQ ID NO: 3646950 - RNA, 16 nt, Human
aucucuuguuuaaauu

SEQ ID NO: 3646951 - RNA, 20 nt, Human
aucucuuuguacaggaacug

SEQ ID NO: 3646952 - RNA, 20 nt, Human
aucucuuuuauauuuguagg

SEQ ID NO: 3646953 - RNA, 23 nt, Human
aucucuuuuccacuccauugucg

SEQ ID NO: 3646954 - RNA, 16 nt, Human
aucugaaaauguaugu

SEQ ID NO: 3646955 - RNA, 14 nt, Human
aucugaaaauguga

SEQ ID NO: 3646956 - RNA, 13 nt, Human
aucugaaauguga

SEQ ID NO: 3646957 - RNA, 13 nt, Human
aucugaaauguua

SEQ ID NO: 3646958 - RNA, 16 nt, Human
aucugaaauguuacaa

SEQ ID NO: 3646959 - RNA, 19 nt, Human
caauaaaaaaaagaaauga

SEQ ID NO: 3646960 - RNA, 22 nt, Human
caauaaaaauggcucagaugcc

SEQ ID NO: 3646961 - RNA, 17 nt, Human
caauaaaaauguuuaac

SEQ ID NO: 3646962 - RNA, 22 nt, Human
caauaaaagcaauuccaaccuu

SEQ ID NO: 3646963 - RNA, 14 nt, Human
caauaaaagcccag

SEQ ID NO: 3646964 - RNA, 16 nt, Human
caauaaaagcccagga

SEQ ID NO: 3646965 - RNA, 14 nt, Human
caauaaaauauuau

SEQ ID NO: 3646966 - RNA, 13 nt, Human
caauaaaaucaug

SEQ ID NO: 3646967 - RNA, 14 nt, Human
caauaaaaucaugu

SEQ ID NO: 3646968 - RNA, 20 nt, Human
caauaaaauccauacauuug

SEQ ID NO: 3646969 - RNA, 20 nt, Human
caauaaaaucuugaaaaugc

SEQ ID NO: 3646970 - RNA, 16 nt, Human
caauaaaaugugauuu

SEQ ID NO: 3646971 - RNA, 20 nt, Human
caauaaaauuauagcucuaa

SEQ ID NO: 3646972 - RNA, 23 nt, Human
caauaaaauuauagcucuaaugu

SEQ ID NO: 3646973 - RNA, 22 nt, Human
caauaaaauuauuugcaggucu

SEQ ID NO: 3646974 - RNA, 14 nt, Human
caauaaaauuuaaa

SEQ ID NO: 3646975 - RNA, 17 nt, Human
caauaaaauuucuaaga

SEQ ID NO: 3646976 - RNA, 18 nt, Human
caauaaaauuuuuuuaaa

SEQ ID NO: 3646977 - RNA, 22 nt, Human
caauaaaauuuuuuuucauguu

SEQ ID NO: 3646978 - RNA, 20 nt, Human
caauaaaccaaugaacgaag

SEQ ID NO: 3646979 - RNA, 19 nt, Human
caauaaacccucagagccu

SEQ ID NO: 3646980 - RNA, 17 nt, Human
caauaaaccucuuuucu

SEQ ID NO: 3646981 - RNA, 12 nt, Human
caauaaacgauu

SEQ ID NO: 3646982 - RNA, 17 nt, Human
caauaaacgauuuaauu

SEQ ID NO: 3646983 - RNA, 11 nt, Human
caauaaacuau

SEQ ID NO: 3646984 - RNA, 13 nt, Human
caauaaagcaaug

SEQ ID NO: 3646985 - RNA, 15 nt, Human
caauaaagcacugag

SEQ ID NO: 3646986 - RNA, 17 nt, Human
caauaaagcacugagca

SEQ ID NO: 3646987 - RNA, 19 nt, Human
caauaaagcagcguuucua

SEQ ID NO: 3646988 - RNA, 16 nt, Human
caauaaagcauuuaua

SEQ ID NO: 3646989 - RNA, 19 nt, Human
caauaaagcauuuauaaau

SEQ ID NO: 3646990 - RNA, 22 nt, Human
caauaaagcugcugagaaucua

SEQ ID NO: 3646991 - RNA, 13 nt, Human
caauaaagcuugu

SEQ ID NO: 3646992 - RNA, 17 nt, Human
caauaaagcuuguugac

SEQ ID NO: 3646993 - RNA, 18 nt, Human
caauaaaguauaauguuu

SEQ ID NO: 3646994 - RNA, 20 nt, Human
caauaaaguauuuaauuagu

SEQ ID NO: 3646995 - RNA, 21 nt, Human
caauaaagugacccugcucuc

SEQ ID NO: 3646996 - RNA, 19 nt, Human
caauaaaguugagcaaaca

SEQ ID NO: 3646997 - RNA, 20 nt, Human
caauaaaguuugaucuuccu

SEQ ID NO: 3646998 - RNA, 15 nt, Human
caauaaauguauuca

SEQ ID NO: 3646999 - RNA, 18 nt, Human
caauaaauguauucaaau

SEQ ID NO: 3647000 - RNA, 14 nt, Human
caauaaaugucugu

SEQ ID NO: 3647001 - RNA, 15 nt, Human
caauaaaugucuguu

SEQ ID NO: 3647002 - RNA, 15 nt, Human
caauaaauugcuaau

SEQ ID NO: 3647003 - RNA, 20 nt, Human
caauaaauugcuaauguugc

SEQ ID NO: 3647004 - RNA, 22 nt, Human
caauaaauugcuaauguugcug

SEQ ID NO: 3647005 - RNA, 15 nt, Human
caauaacacacagcu

SEQ ID NO: 3647006 - RNA, 13 nt, Human
caauaacacuguc

SEQ ID NO: 3647007 - RNA, 14 nt, Human
caauaacuacugug

SEQ ID NO: 3647008 - RNA, 17 nt, Human
caauaacuacuguguuc

SEQ ID NO: 3647009 - RNA, 18 nt, Human
caauaacuacuguguucc

SEQ ID NO: 3647010 - RNA, 20 nt, Human
caauaacuacuguguuccug

SEQ ID NO: 3647011 - RNA, 19 nt, Human
caauaacuccucccagggu

SEQ ID NO: 3647012 - RNA, 21 nt, Human
caauaagagcguuugcccaaa

SEQ ID NO: 3647013 - RNA, 12 nt, Human
caauaagcaaaa

SEQ ID NO: 3647014 - RNA, 13 nt, Human
caauaagccuugu

SEQ ID NO: 3647015 - RNA, 23 nt, Human
caauaagugugugguagaaacaa

SEQ ID NO: 3647016 - RNA, 13 nt, Human
caauaauauauuu

SEQ ID NO: 3647017 - RNA, 16 nt, Human
caauaauauauuuucu

SEQ ID NO: 3647018 - RNA, 18 nt, Human
caauaauauauuuucugu

SEQ ID NO: 3647019 - RNA, 20 nt, Human
caauaauauauuuucuguuu

SEQ ID NO: 3647020 - RNA, 20 nt, Human
caauaaugcaguaugguaca

SEQ ID NO: 3647021 - RNA, 16 nt, Human
caauaauggaaaaaaa

SEQ ID NO: 3647022 - RNA, 16 nt, Human
caauaauucauauucu

SEQ ID NO: 3647023 - RNA, 20 nt, Human
caauaauuuguggugauuug

SEQ ID NO: 3647024 - RNA, 19 nt, Human
caauacaaacaaucucuua

SEQ ID NO: 3647025 - RNA, 16 nt, Human
caauacaaauggauuu

SEQ ID NO: 3647026 - RNA, 18 nt, Human
caauacagauaacauuag

SEQ ID NO: 3647027 - RNA, 17 nt, Human
caauacaugcugcuaau

SEQ ID NO: 3647028 - RNA, 22 nt, Human
caauacccaaauccucuccagc

SEQ ID NO: 3647029 - RNA, 18 nt, Human
caauacucauaaugugaa

SEQ ID NO: 3647030 - RNA, 22 nt, Human
caauacucauaaugugaagugu

SEQ ID NO: 3647031 - RNA, 23 nt, Human
caauagaaggauguacauuucca

SEQ ID NO: 3647032 - RNA, 14 nt, Human
caauagagacugua

SEQ ID NO: 3647033 - RNA, 15 nt, Human
caauagaucuccagc

SEQ ID NO: 3647034 - RNA, 16 nt, Human
caauagcacauaugga

SEQ ID NO: 3647035 - RNA, 20 nt, Human
caauagcauggauagaguau

SEQ ID NO: 3647036 - RNA, 17 nt, Human
caauagccacuaaccuu

SEQ ID NO: 3647037 - RNA, 22 nt, Human
caauagccacuaaccuugccug

SEQ ID NO: 3647038 - RNA, 18 nt, Human
caauagcguguguagaua

SEQ ID NO: 3647039 - RNA, 12 nt, Human
caauagcugccc

SEQ ID NO: 3647040 - RNA, 18 nt, Human
caauagcugcccauuucg

SEQ ID NO: 3647041 - RNA, 21 nt, Human
caauagcuuuacccucaggca

SEQ ID NO: 3647042 - RNA, 13 nt, Human
caauaggaaaaac

SEQ ID NO: 3647043 - RNA, 14 nt, Human
caauaggaaaaacu

SEQ ID NO: 3647044 - RNA, 20 nt, Human
caauaggaaaaacugauuuu

SEQ ID NO: 3647045 - RNA, 16 nt, Human
caauaggaaugcuaac

SEQ ID NO: 3647046 - RNA, 22 nt, Human
caauaggcagacuggguuucua

SEQ ID NO: 3647047 - RNA, 15 nt, Human
caauaggcuguuccc

SEQ ID NO: 3647048 - RNA, 18 nt, Human
caauaguaauucucaggc

SEQ ID NO: 3647049 - RNA, 16 nt, Human
caauagucaagaaaaa

SEQ ID NO: 3647050 - RNA, 16 nt, Human
caauaguguguucuga

SEQ ID NO: 3647051 - RNA, 15 nt, Human
caauaguugaauuag

SEQ ID NO: 3647052 - RNA, 18 nt, Human
caauauaaaacuguacuu

SEQ ID NO: 3647053 - RNA, 22 nt, Human
caauauaaaaggcaaaugugua

SEQ ID NO: 3647054 - RNA, 20 nt, Human
caauauacuggaaagcuuuu

SEQ ID NO: 3647055 - RNA, 14 nt, Human
caauauagaaacac

SEQ ID NO: 3647056 - RNA, 20 nt, Human
caauauauaaaaauauauau

SEQ ID NO: 3647057 - RNA, 20 nt, Human
caauauaucuaaauugaaua

SEQ ID NO: 3647058 - RNA, 14 nt, Human
caauauauugaacu

SEQ ID NO: 3647059 - RNA, 13 nt, Human
caauauauuuugu

SEQ ID NO: 3647060 - RNA, 14 nt, Human
caauauauuuugua

SEQ ID NO: 3647061 - RNA, 15 nt, Human
caauauauuuuguau

SEQ ID NO: 3647062 - RNA, 23 nt, Human
caauaucauaucaucacauugag

SEQ ID NO: 3647063 - RNA, 16 nt, Human
caauauccuaauaaaa

SEQ ID NO: 3647064 - RNA, 18 nt, Human
caauauccuaauaaaaag

SEQ ID NO: 3647065 - RNA, 21 nt, Human
caauauccuaauaaaaaggug

SEQ ID NO: 3647066 - RNA, 22 nt, Human
caauauccuaauaaaaagguga

SEQ ID NO: 3647067 - RNA, 15 nt, Human
caauaucuaauauau

SEQ ID NO: 3647068 - RNA, 15 nt, Human
caauaucuugcuuga

SEQ ID NO: 3647069 - RNA, 22 nt, Human
caauaucuugcuugaacuuaca

SEQ ID NO: 3647070 - RNA, 21 nt, Human
caauaucuuuuuuuuaauaaa

SEQ ID NO: 3647071 - RNA, 21 nt, Human
caauauguaaauagugcagaa

SEQ ID NO: 3647072 - RNA, 22 nt, Human
caauauguauuaauauucauug

SEQ ID NO: 3647073 - RNA, 15 nt, Human
caauauguauuguaa

SEQ ID NO: 3647074 - RNA, 22 nt, Human
caauauguauuguaaacaugug

SEQ ID NO: 3647075 - RNA, 17 nt, Human
caauaugugagugccuu

SEQ ID NO: 3647076 - RNA, 18 nt, Human
caauauguguuuacuuua

SEQ ID NO: 3647077 - RNA, 14 nt, Human
caauauuaaauaca

SEQ ID NO: 3647078 - RNA, 15 nt, Human
caauauuaaauacag

SEQ ID NO: 3647079 - RNA, 14 nt, Human
caauauuaaaucug

SEQ ID NO: 3647080 - RNA, 14 nt, Human
caauauuauacuaa

SEQ ID NO: 3647081 - RNA, 19 nt, Human
caauauuauacuaagaaaa

SEQ ID NO: 3647082 - RNA, 20 nt, Human
caagcccaguucagcuuggg

SEQ ID NO: 3647083 - RNA, 13 nt, Human
caagccccaggca

SEQ ID NO: 3647084 - RNA, 18 nt, Human
caagccccaggcaggcug

SEQ ID NO: 3647085 - RNA, 13 nt, Human
caagccccauccu

SEQ ID NO: 3647086 - RNA, 18 nt, Human
caagccccugcccaucug

SEQ ID NO: 3647087 - RNA, 21 nt, Human
caagccccugcuccagaagau

SEQ ID NO: 3647088 - RNA, 21 nt, Human
caagcccuggagccaacugcu

SEQ ID NO: 3647089 - RNA, 13 nt, Human
caagccuccacag

SEQ ID NO: 3647090 - RNA, 13 nt, Human
caagccugaggga

SEQ ID NO: 3647091 - RNA, 17 nt, Human
caagccugagggaaagg

SEQ ID NO: 3647092 - RNA, 22 nt, Human
caagccugcagucaucuugacc

SEQ ID NO: 3647093 - RNA, 17 nt, Human
caagccuggucagccca

SEQ ID NO: 3647094 - RNA, 18 nt, Human
caagccuguaaucccagc

SEQ ID NO: 3647095 - RNA, 16 nt, Human
caagccugugcaaaaa

SEQ ID NO: 3647096 - RNA, 21 nt, Human
caagccugugcaaaaaaauua

SEQ ID NO: 3647097 - RNA, 15 nt, Human
caagcgauucuucug

SEQ ID NO: 3647098 - RNA, 17 nt, Human
caagcgauucuucugcu

SEQ ID NO: 3647099 - RNA, 20 nt, Human
caagcgauucuucugcuuca

SEQ ID NO: 3647100 - RNA, 15 nt, Human
caagcgcccuggccc

SEQ ID NO: 3647101 - RNA, 22 nt, Human
caagcuaagcacugccacuggg

SEQ ID NO: 3647102 - RNA, 21 nt, Human
caagcuaauaaaauaucauuc

SEQ ID NO: 3647103 - RNA, 18 nt, Human
caagcuagaaggccacau

SEQ ID NO: 3647104 - RNA, 21 nt, Human
caagcuaggugcuauuuguca

SEQ ID NO: 3647105 - RNA, 15 nt, Human
caagcuauccuggcu

SEQ ID NO: 3647106 - RNA, 15 nt, Human
caagcuaucuaaagu

SEQ ID NO: 3647107 - RNA, 21 nt, Human
caagcuaucuaaaguuuguua

SEQ ID NO: 3647108 - RNA, 15 nt, Human
caagcuauucaauuc

SEQ ID NO: 3647109 - RNA, 12 nt, Human
caagcucacagu

SEQ ID NO: 3647110 - RNA, 22 nt, Human
caagcucacaguuccucgcccu

SEQ ID NO: 3647111 - RNA, 18 nt, Human
caagcucacuugcuuuag

SEQ ID NO: 3647112 - RNA, 19 nt, Human
caagcuccaagcucccagg

SEQ ID NO: 3647113 - RNA, 17 nt, Human
caagcuccaucuccacu

SEQ ID NO: 3647114 - RNA, 13 nt, Human
caagcucccaagg

SEQ ID NO: 3647115 - RNA, 15 nt, Human
caagcucccaggcau

SEQ ID NO: 3647116 - RNA, 17 nt, Human
caagcucccaggcauuc

SEQ ID NO: 3647117 - RNA, 14 nt, Human
caagcucccaggcc

SEQ ID NO: 3647118 - RNA, 19 nt, Human
caagcucccugccccaaau

SEQ ID NO: 3647119 - RNA, 14 nt, Human
caagcuccgcagga

SEQ ID NO: 3647120 - RNA, 23 nt, Human
caagcuccuccucccugcaucug

SEQ ID NO: 3647121 - RNA, 16 nt, Human
caagcuccuccucgga

SEQ ID NO: 3647122 - RNA, 20 nt, Human
caagcuccuccucggaaccg

SEQ ID NO: 3647123 - RNA, 13 nt, Human
aucugaacauucu

SEQ ID NO: 3647124 - RNA, 21 nt, Human
aucugaagagcuauuauauaa

SEQ ID NO: 3647125 - RNA, 21 nt, Human
aucugaagauuguuuaucuag

SEQ ID NO: 3647126 - RNA, 13 nt, Human
aucugaaggagau

SEQ ID NO: 3647127 - RNA, 18 nt, Human
aucugaaggggcaaauuc

SEQ ID NO: 3647128 - RNA, 18 nt, Human
aucugaagucagaucugc

SEQ ID NO: 3647129 - RNA, 15 nt, Human
aucugaauguaauuu

SEQ ID NO: 3647130 - RNA, 17 nt, Human
aucugaauguaauuugu

SEQ ID NO: 3647131 - RNA, 18 nt, Human
aucugaauguaauuugug

SEQ ID NO: 3647132 - RNA, 19 nt, Human
aucugaauuuuuaaacaag

SEQ ID NO: 3647133 - RNA, 16 nt, Human
aucugacauccccacu

SEQ ID NO: 3647134 - RNA, 16 nt, Human
aucugacaucucugca

SEQ ID NO: 3647135 - RNA, 14 nt, Human
aucugaccagcagc

SEQ ID NO: 3647136 - RNA, 15 nt, Human
aucugaccagcagcg

SEQ ID NO: 3647137 - RNA, 20 nt, Human
aucugaccagcagcgccuuu

SEQ ID NO: 3647138 - RNA, 12 nt, Human
aucugacccagu

SEQ ID NO: 3647139 - RNA, 13 nt, Human
aucugacugcacg

SEQ ID NO: 3647140 - RNA, 18 nt, Human
aucugagaaaagcuuuga

SEQ ID NO: 3647141 - RNA, 14 nt, Human
aucugagaaucuuu

SEQ ID NO: 3647142 - RNA, 14 nt, Human
aucugagaaugaac

SEQ ID NO: 3647143 - RNA, 17 nt, Human
aucugagaaugaacaaa

SEQ ID NO: 3647144 - RNA, 21 nt, Human
aucugagagaggcuaaaaugu

SEQ ID NO: 3647145 - RNA, 20 nt, Human
aucugagaggccacagugca

SEQ ID NO: 3647146 - RNA, 15 nt, Human
aucugaggaauucug

SEQ ID NO: 3647147 - RNA, 14 nt, Human
aucugagggaaaug

SEQ ID NO: 3647148 - RNA, 15 nt, Human
aucugagggaaaugu

SEQ ID NO: 3647149 - RNA, 17 nt, Human
aucugagggaaauguuu

SEQ ID NO: 3647150 - RNA, 14 nt, Human
aucugagggaggag

SEQ ID NO: 3647151 - RNA, 19 nt, Human
aucugagggaggaggccac

SEQ ID NO: 3647152 - RNA, 20 nt, Human
aucugagggaggaggccacc

SEQ ID NO: 3647153 - RNA, 14 nt, Human
aucugauauguauu

SEQ ID NO: 3647154 - RNA, 16 nt, Human
aucugaucguucuuuc

SEQ ID NO: 3647155 - RNA, 23 nt, Human
aucugauggccuuaauuuccuuu

SEQ ID NO: 3647156 - RNA, 14 nt, Human
aucugauuccagca

SEQ ID NO: 3647157 - RNA, 18 nt, Human
aucugauuggacauuuuc

SEQ ID NO: 3647158 - RNA, 21 nt, Human
aucugauuuguaacccacuga

SEQ ID NO: 3647159 - RNA, 16 nt, Human
aucugcaaagcauguu

SEQ ID NO: 3647160 - RNA, 17 nt, Human
aucugcaccccuucucu

SEQ ID NO: 3647161 - RNA, 23 nt, Human
aucugcagaaggaaaaaugugua

SEQ ID NO: 3647162 - RNA, 14 nt, Human
aucugcaggcagac

SEQ ID NO: 3647163 - RNA, 19 nt, Human
aucugcaggcagacacgga

SEQ ID NO: 3647164 - RNA, 14 nt, Human
aucugcauuuagca

SEQ ID NO: 3647165 - RNA, 15 nt, Human
aucugcauuuagcac

SEQ ID NO: 3647166 - RNA, 16 nt, Human
aucugcauuuagcaca

SEQ ID NO: 3647167 - RNA, 15 nt, Human
aucugccacaaaaac

SEQ ID NO: 3647168 - RNA, 17 nt, Human
aucugccagacuuaaaa

SEQ ID NO: 3647169 - RNA, 15 nt, Human
aucugcccaccucag

SEQ ID NO: 3647170 - RNA, 16 nt, Human
aucugcccaggggugc

SEQ ID NO: 3647171 - RNA, 16 nt, Human
aucugccccuccccca

SEQ ID NO: 3647172 - RNA, 17 nt, Human
aucugccccucccccaa

SEQ ID NO: 3647173 - RNA, 15 nt, Human
aucugcccgccugcc

SEQ ID NO: 3647174 - RNA, 22 nt, Human
aucugcccgccugcccaccugc

SEQ ID NO: 3647175 - RNA, 18 nt, Human
aucugccuaaggacuucu

SEQ ID NO: 3647176 - RNA, 20 nt, Human
aucugccuaaggacuucuuu

SEQ ID NO: 3647177 - RNA, 21 nt, Human
aucugccuuuauuguguuugu

SEQ ID NO: 3647178 - RNA, 20 nt, Human
aucugcgggggcagugcuca

SEQ ID NO: 3647179 - RNA, 22 nt, Human
aucugcgugacaauaaaacauu

SEQ ID NO: 3647180 - RNA, 14 nt, Human
aucugcuaauaaaa

SEQ ID NO: 3647181 - RNA, 20 nt, Human
aucugcuagggaauaucaau

SEQ ID NO: 3647182 - RNA, 14 nt, Human
aucugcucacuuua

SEQ ID NO: 3647183 - RNA, 13 nt, Human
aucugcucagccc

SEQ ID NO: 3647184 - RNA, 15 nt, Human
aucugcucagcccug

SEQ ID NO: 3647185 - RNA, 17 nt, Human
aucugcucagcccugga

SEQ ID NO: 3647186 - RNA, 18 nt, Human
aucugcucagcccuggag

SEQ ID NO: 3647187 - RNA, 19 nt, Human
aucugcucagcccuggagg

SEQ ID NO: 3647188 - RNA, 20 nt, Human
aucugcucagcccuggaggu

SEQ ID NO: 3647189 - RNA, 13 nt, Human
aucugcucuccuu

SEQ ID NO: 3647190 - RNA, 18 nt, Human
aucugcuggaguuucaug

SEQ ID NO: 3647191 - RNA, 11 nt, Human
aucugcugucc

SEQ ID NO: 3647192 - RNA, 16 nt, Human
aucugcuguccagaca

SEQ ID NO: 3647193 - RNA, 21 nt, Human
aucuggaaaccucuacauauu

SEQ ID NO: 3647194 - RNA, 18 nt, Human
aucuggaaccaucagaaa

SEQ ID NO: 3647195 - RNA, 16 nt, Human
aucuggaacccagacu

SEQ ID NO: 3647196 - RNA, 21 nt, Human
aucuggaaccucagccuggcc

SEQ ID NO: 3647197 - RNA, 10 nt, Human
aucuggaagu

SEQ ID NO: 3647198 - RNA, 19 nt, Human
aucuggaccccaucuguga

SEQ ID NO: 3647199 - RNA, 15 nt, Human
aucuggacuccucug

SEQ ID NO: 3647200 - RNA, 17 nt, Human
aucuggacuccucuguc

SEQ ID NO: 3647201 - RNA, 21 nt, Human
aucuggagaccagggagccuu

SEQ ID NO: 3647202 - RNA, 15 nt, Human
aucuggagagcuaga

SEQ ID NO: 3647203 - RNA, 21 nt, Human
aucuggaggccuuccagcugc

SEQ ID NO: 3647204 - RNA, 23 nt, Human
aucuggaggccuuccagcugcug

SEQ ID NO: 3647205 - RNA, 18 nt, Human
aucuggagucuuugauaa

SEQ ID NO: 3647206 - RNA, 18 nt, Human
aucuggauaggagccugc

SEQ ID NO: 3647207 - RNA, 20 nt, Human
aucuggauaggagccugcug

SEQ ID NO: 3647208 - RNA, 22 nt, Human
aucuggauaggagccugcuggu

SEQ ID NO: 3647209 - RNA, 20 nt, Human
aucuggaugccucauuaugu

SEQ ID NO: 3647210 - RNA, 12 nt, Human
aucuggcagggu

SEQ ID NO: 3647211 - RNA, 23 nt, Human
aucuggccguugauguuggcugg

SEQ ID NO: 3647212 - RNA, 18 nt, Human
aucuggccuaaaaucuug

SEQ ID NO: 3647213 - RNA, 22 nt, Human
aucuggccuaaaaucuuggaag

SEQ ID NO: 3647214 - RNA, 23 nt, Human
aucuggccuaaaaucuuggaagu

SEQ ID NO: 3647215 - RNA, 18 nt, Human
aucuggccuggccuggcc

SEQ ID NO: 3647216 - RNA, 22 nt, Human
aucuggccuggccuggcccugc

SEQ ID NO: 3647217 - RNA, 21 nt, Human
aucuggcugcaguuuugcuau

SEQ ID NO: 3647218 - RNA, 17 nt, Human
aucuggcuuauuuuaau

SEQ ID NO: 3647219 - RNA, 19 nt, Human
aucuggcuuauuuuaaugu

SEQ ID NO: 3647220 - RNA, 21 nt, Human
aucuggcuuauuuuaauguga

SEQ ID NO: 3647221 - RNA, 14 nt, Human
aucugggaaagaca

SEQ ID NO: 3647222 - RNA, 16 nt, Human
aucugggaagauuucu

SEQ ID NO: 3647223 - RNA, 18 nt, Human
aucugggaguccccuuuu

SEQ ID NO: 3647224 - RNA, 16 nt, Human
aucugggccuuggccu

SEQ ID NO: 3647225 - RNA, 15 nt, Human
aucugggcuuccugg

SEQ ID NO: 3647226 - RNA, 16 nt, Human
aucugggggaguggaa

SEQ ID NO: 3647227 - RNA, 13 nt, Human
cacaggccugaga

SEQ ID NO: 3647228 - RNA, 15 nt, Human
cacaggccugagauu

SEQ ID NO: 3647229 - RNA, 20 nt, Human
cacaggccugagauuucauc

SEQ ID NO: 3647230 - RNA, 22 nt, Human
cacaggccugagauuucaucug

SEQ ID NO: 3647231 - RNA, 14 nt, Human
cacaggccugugua

SEQ ID NO: 3647232 - RNA, 22 nt, Human
cacaggccuguguagcugugac

SEQ ID NO: 3647233 - RNA, 24 nt, Human
cacaggccuguguagcugugaccu

SEQ ID NO: 3647234 - RNA, 14 nt, Human
cacaggcucaggca

SEQ ID NO: 3647235 - RNA, 18 nt, Human
cacaggcugagugcaggc

SEQ ID NO: 3647236 - RNA, 18 nt, Human
cacaggcugggcugggca

SEQ ID NO: 3647237 - RNA, 18 nt, Human
cacaggcuuagggacagg

SEQ ID NO: 3647238 - RNA, 22 nt, Human
cacaggcuuagggacaggaccc

SEQ ID NO: 3647239 - RNA, 17 nt, Human
cacaggcuucugagcag

SEQ ID NO: 3647240 - RNA, 18 nt, Human
cacaggcuucugagcagc

SEQ ID NO: 3647241 - RNA, 14 nt, Human
cacagggacuugaa

SEQ ID NO: 3647242 - RNA, 21 nt, Human
cacagggacuugaaguuguua

SEQ ID NO: 3647243 - RNA, 13 nt, Human
cacagggcagagc

SEQ ID NO: 3647244 - RNA, 17 nt, Human
cacagggcagagccggg

SEQ ID NO: 3647245 - RNA, 16 nt, Human
cacagggcagcugggc

SEQ ID NO: 3647246 - RNA, 17 nt, Human
cacagggcagcugggcc

SEQ ID NO: 3647247 - RNA, 18 nt, Human
cacagggcagcugggccc

SEQ ID NO: 3647248 - RNA, 21 nt, Human
cacagggcagcugggcccaac

SEQ ID NO: 3647249 - RNA, 11 nt, Human
cacagggcagu

SEQ ID NO: 3647250 - RNA, 18 nt, Human
cacagggcaguaccugag

SEQ ID NO: 3647251 - RNA, 20 nt, Human
cacagggcauccaacugaga

SEQ ID NO: 3647252 - RNA, 17 nt, Human
cacagggcaugaaauga

SEQ ID NO: 3647253 - RNA, 19 nt, Human
cacagggccuggcccaugu

SEQ ID NO: 3647254 - RNA, 17 nt, Human
cacaggggaaaagagga

SEQ ID NO: 3647255 - RNA, 17 nt, Human
cacaggggacacccaga

SEQ ID NO: 3647256 - RNA, 23 nt, Human
cacagguaugaccuucuaggaag

SEQ ID NO: 3647257 - RNA, 19 nt, Human
cacaggucaggggugacac

SEQ ID NO: 3647258 - RNA, 21 nt, Human
cacaggucccaaauggcccug

SEQ ID NO: 3647259 - RNA, 15 nt, Human
cacaggucccaccuc

SEQ ID NO: 3647260 - RNA, 19 nt, Human
cacaggucccaccuccagc

SEQ ID NO: 3647261 - RNA, 21 nt, Human
cacaggucccaccuccagccc

SEQ ID NO: 3647262 - RNA, 18 nt, Human
cacaggucgggcgcagga

SEQ ID NO: 3647263 - RNA, 13 nt, Human
cacaggucuagac

SEQ ID NO: 3647264 - RNA, 14 nt, Human
cacaggucuagacu

SEQ ID NO: 3647265 - RNA, 18 nt, Human
cacaggucuuuccuaagg

SEQ ID NO: 3647266 - RNA, 18 nt, Human
cacaggugcccgccacca

SEQ ID NO: 3647267 - RNA, 18 nt, Human
cacaggugggcuucccag

SEQ ID NO: 3647268 - RNA, 14 nt, Human
cacaggugucccca

SEQ ID NO: 3647269 - RNA, 20 nt, Human
cacagguguccccagcccac

SEQ ID NO: 3647270 - RNA, 14 nt, Human
cacaggugugagcc

SEQ ID NO: 3647271 - RNA, 19 nt, Human
cacaggugugguguaauuu

SEQ ID NO: 3647272 - RNA, 20 nt, Human
cacagguucacgugcagcuc

SEQ ID NO: 3647273 - RNA, 16 nt, Human
cacaguaaaaauaaaa

SEQ ID NO: 3647274 - RNA, 19 nt, Human
cacaguacagcaugugccu

SEQ ID NO: 3647275 - RNA, 17 nt, Human
cacaguagagccagcuu

SEQ ID NO: 3647276 - RNA, 19 nt, Human
cacaguauauuuuauuuca

SEQ ID NO: 3647277 - RNA, 16 nt, Human
cacaguauuacuucug

SEQ ID NO: 3647278 - RNA, 16 nt, Human
cacagucaaaauaauu

SEQ ID NO: 3647279 - RNA, 17 nt, Human
cacagucaaaauaauuc

SEQ ID NO: 3647280 - RNA, 16 nt, Human
cacagucacugaugua

SEQ ID NO: 3647281 - RNA, 17 nt, Human
cacagucagguugaaga

SEQ ID NO: 3647282 - RNA, 22 nt, Human
cacaguccaggaacaagcuaau

SEQ ID NO: 3647283 - RNA, 16 nt, Human
cacagucuaauuuuua

SEQ ID NO: 3647284 - RNA, 18 nt, Human
cacagucuccggccucuc

SEQ ID NO: 3647285 - RNA, 11 nt, Human
cacagugaccc

SEQ ID NO: 3647286 - RNA, 20 nt, Human
cacagugacucgggcuccug

SEQ ID NO: 3647287 - RNA, 23 nt, Human
cacagugacucgggcuccugugc

SEQ ID NO: 3647288 - RNA, 15 nt, Human
cacagugacuucuga

SEQ ID NO: 3647289 - RNA, 21 nt, Human
cacagugagucgaggacaggg

SEQ ID NO: 3647290 - RNA, 19 nt, Human
cacagugaucaaguuauuu

SEQ ID NO: 3647291 - RNA, 19 nt, Human
cacagugcaucucagccca

SEQ ID NO: 3647292 - RNA, 19 nt, Human
cacagugccuucaauaaau

SEQ ID NO: 3647293 - RNA, 19 nt, Human
cacaguggaaccagcccag

SEQ ID NO: 3647294 - RNA, 19 nt, Human
cacagugggaugaaccagc

SEQ ID NO: 3647295 - RNA, 19 nt, Human
cacagugguggcagggccu

SEQ ID NO: 3647296 - RNA, 19 nt, Human
cacaguguaccauuaaaau

SEQ ID NO: 3647297 - RNA, 22 nt, Human
cacaguguaccauuaaaauaug

SEQ ID NO: 3647298 - RNA, 16 nt, Human
cacaguguaugaaggg

SEQ ID NO: 3647299 - RNA, 21 nt, Human
cacaguguguggucaacauuu

SEQ ID NO: 3647300 - RNA, 16 nt, Human
cacaguguguuuguga

SEQ ID NO: 3647301 - RNA, 14 nt, Human
cacaguguugccca

SEQ ID NO: 3647302 - RNA, 17 nt, Human
cacaguguuuuuguaaa

SEQ ID NO: 3647303 - RNA, 19 nt, Human
cacaguguuuuuguaaagu

SEQ ID NO: 3647304 - RNA, 23 nt, Human
cacaguguuuuuguaaagugugg

SEQ ID NO: 3647305 - RNA, 23 nt, Human
cacaguucaaaauucuaaaugua

SEQ ID NO: 3647306 - RNA, 20 nt, Human
cacaguucaguggcagggcu

SEQ ID NO: 3647307 - RNA, 22 nt, Human
cacaguucaguggcagggcuca

SEQ ID NO: 3647308 - RNA, 20 nt, Human
cacaguuccucgcccugggu

SEQ ID NO: 3647309 - RNA, 14 nt, Human
cacaguuccuggga

SEQ ID NO: 3647310 - RNA, 19 nt, Human
cacaguucuuugggccaga

SEQ ID NO: 3647311 - RNA, 21 nt, Human
cacaguucuuugggccagaca

SEQ ID NO: 3647312 - RNA, 20 nt, Human
cacaguugccaccaccucug

SEQ ID NO: 3647313 - RNA, 22 nt, Human
cacaguugccaccaccucugug

SEQ ID NO: 3647314 - RNA, 12 nt, Human
cacaguuggccu

SEQ ID NO: 3647315 - RNA, 22 nt, Human
cacaguuggcuggaugaaauuu

SEQ ID NO: 3647316 - RNA, 21 nt, Human
cacaguuuccucaucugucca

SEQ ID NO: 3647317 - RNA, 20 nt, Human
cacaguuugaugucauuaau

SEQ ID NO: 3647318 - RNA, 15 nt, Human
cacaguuuucugaga

SEQ ID NO: 3647319 - RNA, 16 nt, Human
cacaguuuucugagaa

SEQ ID NO: 3647320 - RNA, 14 nt, Human
cacaguuuugaccu

SEQ ID NO: 3647321 - RNA, 14 nt, Human
cacauaaaggauaa

SEQ ID NO: 3647322 - RNA, 16 nt, Human
cacauaaaugcagccc

SEQ ID NO: 3647323 - RNA, 17 nt, Human
cacauaaaugcagccca

SEQ ID NO: 3647324 - RNA, 22 nt, Human
cacauaauuaaaguguccauug

SEQ ID NO: 3647325 - RNA, 23 nt, Human
cacauacaguuuuaugcucuuuu

SEQ ID NO: 3647326 - RNA, 21 nt, Human
cacauaccaacucaacuuuuu

SEQ ID NO: 3647327 - RNA, 22 nt, Human
cacauacccucuucauggaugg

SEQ ID NO: 3647328 - RNA, 20 nt, Human
cacauacgcaccacaucucu

SEQ ID NO: 3647329 - RNA, 18 nt, Human
cacauacucauuuuucau

SEQ ID NO: 3647330 - RNA, 15 nt, Human
cacauagacugugcg

SEQ ID NO: 3647331 - RNA, 21 nt, Human
caaugaucuagguuuaacuca

SEQ ID NO: 3647332 - RNA, 24 nt, Human
caaugaucuagguuuaacucagau

SEQ ID NO: 3647333 - RNA, 14 nt, Human
caaugaugaaugag

SEQ ID NO: 3647334 - RNA, 18 nt, Human
caaugaugcuauuugcaa

SEQ ID NO: 3647335 - RNA, 14 nt, Human
caaugauggucacc

SEQ ID NO: 3647336 - RNA, 15 nt, Human
caaugauuauuuuca

SEQ ID NO: 3647337 - RNA, 19 nt, Human
caaugcaaaccaucauuga

SEQ ID NO: 3647338 - RNA, 21 nt, Human
caaugcaaaccaucauugaaa

SEQ ID NO: 3647339 - RNA, 23 nt, Human
caaugcaaaccaucauugaaauc

SEQ ID NO: 3647340 - RNA, 21 nt, Human
caaugcaagagugauugcagc

SEQ ID NO: 3647341 - RNA, 16 nt, Human
caaugcacacaaaaca

SEQ ID NO: 3647342 - RNA, 13 nt, Human
caaugcacaucca

SEQ ID NO: 3647343 - RNA, 18 nt, Human
caaugcacauccauuccc

SEQ ID NO: 3647344 - RNA, 18 nt, Human
caaugcaccuaaagaaaa

SEQ ID NO: 3647345 - RNA, 23 nt, Human
caaugcacuuuguucuggcucuu

SEQ ID NO: 3647346 - RNA, 19 nt, Human
caaugcagaugccagagca

SEQ ID NO: 3647347 - RNA, 18 nt, Human
caaugcaguugucucugu

SEQ ID NO: 3647348 - RNA, 19 nt, Human
caaugcaguugucucuguu

SEQ ID NO: 3647349 - RNA, 20 nt, Human
caaugcaguugucucuguuu

SEQ ID NO: 3647350 - RNA, 22 nt, Human
caaugccaaaaaaagacagggc

SEQ ID NO: 3647351 - RNA, 22 nt, Human
caaugccacagcccugucagca

SEQ ID NO: 3647352 - RNA, 13 nt, Human
caaugccaucauc

SEQ ID NO: 3647353 - RNA, 14 nt, Human
caaugccaucaucu

SEQ ID NO: 3647354 - RNA, 16 nt, Human
caaugccucuugucuu

SEQ ID NO: 3647355 - RNA, 15 nt, Human
caaugcgaaugguag

SEQ ID NO: 3647356 - RNA, 19 nt, Human
caaugcgaaugguagucua

SEQ ID NO: 3647357 - RNA, 20 nt, Human
caaugcuauuuuuguuuuua

SEQ ID NO: 3647358 - RNA, 20 nt, Human
caaugcucuuuucacagcua

SEQ ID NO: 3647359 - RNA, 19 nt, Human
caaugcugaugaaucacug

SEQ ID NO: 3647360 - RNA, 23 nt, Human
caaugcugaugaaucacuguuuu

SEQ ID NO: 3647361 - RNA, 16 nt, Human
caaugcugauuuggug

SEQ ID NO: 3647362 - RNA, 13 nt, Human
caaugcuggcugu

SEQ ID NO: 3647363 - RNA, 23 nt, Human
caaugcuggcuguuggcuggggg

SEQ ID NO: 3647364 - RNA, 14 nt, Human
caaugcuguauuuu

SEQ ID NO: 3647365 - RNA, 16 nt, Human
caaugcuguauuuuaa

SEQ ID NO: 3647366 - RNA, 20 nt, Human
caaugcuuuauuuguaaauu

SEQ ID NO: 3647367 - RNA, 13 nt, Human
caauggaaacaau

SEQ ID NO: 3647368 - RNA, 14 nt, Human
caauggaaccuccu

SEQ ID NO: 3647369 - RNA, 14 nt, Human
caauggaagauuug

SEQ ID NO: 3647370 - RNA, 21 nt, Human
cacauccacacacgcaggaac

SEQ ID NO: 3647371 - RNA, 14 nt, Human
cacaucccagccca

SEQ ID NO: 3647372 - RNA, 22 nt, Human
cacauccgcgugugccugugug

SEQ ID NO: 3647373 - RNA, 19 nt, Human
cacauccggggccagcucc

SEQ ID NO: 3647374 - RNA, 22 nt, Human
cacauccuccacguucugcuca

SEQ ID NO: 3647375 - RNA, 17 nt, Human
cacauccuguguuucua

SEQ ID NO: 3647376 - RNA, 13 nt, Human
cacaucuaagccu

SEQ ID NO: 3647377 - RNA, 23 nt, Human
cacaucuaguaguuguucugaaa

SEQ ID NO: 3647378 - RNA, 23 nt, Human
cacaucucaacaggccucagggc

SEQ ID NO: 3647379 - RNA, 21 nt, Human
cacaucucugaaagcacagga

SEQ ID NO: 3647380 - RNA, 21 nt, Human
cacaucugcauuuucacccca

SEQ ID NO: 3647381 - RNA, 23 nt, Human
cacaucugugucuuguuuggaau

SEQ ID NO: 3647382 - RNA, 15 nt, Human
cacaucuguuuugua

SEQ ID NO: 3647383 - RNA, 12 nt, Human
cacaucuucccu

SEQ ID NO: 3647384 - RNA, 14 nt, Human
cacaucuugcucug

SEQ ID NO: 3647385 - RNA, 19 nt, Human
cacaucuugcucugcugac

SEQ ID NO: 3647386 - RNA, 20 nt, Human
cacaucuugcucugcugaca

SEQ ID NO: 3647387 - RNA, 12 nt, Human
cacaucuuucac

SEQ ID NO: 3647388 - RNA, 18 nt, Human
cacaucuuucacacuucc

SEQ ID NO: 3647389 - RNA, 19 nt, Human
cacaucuuucacacuucca

SEQ ID NO: 3647390 - RNA, 15 nt, Human
cacaucuuuccuguc

SEQ ID NO: 3647391 - RNA, 15 nt, Human
cacaucuuuuucacu

SEQ ID NO: 3647392 - RNA, 18 nt, Human
cacaugaaaccuuauuuu

SEQ ID NO: 3647393 - RNA, 21 nt, Human
cacaugaacuuagauuuuaca

SEQ ID NO: 3647394 - RNA, 23 nt, Human
cacaugaacuuagauuuuacaug

SEQ ID NO: 3647395 - RNA, 21 nt, Human
cacaugaacuuguaaaggaau

SEQ ID NO: 3647396 - RNA, 17 nt, Human
cacaugaaguccaagca

SEQ ID NO: 3647397 - RNA, 22 nt, Human
cacaugaauuauuacaguguuu

SEQ ID NO: 3647398 - RNA, 21 nt, Human
cacaugacaacuuugccagcu

SEQ ID NO: 3647399 - RNA, 20 nt, Human
cacaugacucgggggugggg

SEQ ID NO: 3647400 - RNA, 18 nt, Human
cacaugagcaucaggcca

SEQ ID NO: 3647401 - RNA, 20 nt, Human
cacaugagcaucaggccagg

SEQ ID NO: 3647402 - RNA, 15 nt, Human
cacaugagucccagu

SEQ ID NO: 3647403 - RNA, 17 nt, Human
cacaugagucccagugg

SEQ ID NO: 3647404 - RNA, 16 nt, Human
cacaugauuccagcca

SEQ ID NO: 3647405 - RNA, 12 nt, Human
cacaugauuuca

SEQ ID NO: 3647406 - RNA, 16 nt, Human
cacaugauuucacaaa

SEQ ID NO: 3647407 - RNA, 18 nt, Human
cacaugcacgugugugca

SEQ ID NO: 3647408 - RNA, 13 nt, Human
cacaugcauacac

SEQ ID NO: 3647409 - RNA, 16 nt, Human
cacaugcauacacaca

SEQ ID NO: 3647410 - RNA, 18 nt, Human
cacaugcauacacacaca

SEQ ID NO: 3647411 - RNA, 14 nt, Human
cacaugccccaucc

SEQ ID NO: 3647412 - RNA, 21 nt, Human
cacaugccccaucccaugcug

SEQ ID NO: 3647413 - RNA, 19 nt, Human
cacaugcccuaaugucugu

SEQ ID NO: 3647414 - RNA, 20 nt, Human
cacaugccucucucaggcca

SEQ ID NO: 3647415 - RNA, 17 nt, Human
cacaugcugagucuccc

SEQ ID NO: 3647416 - RNA, 22 nt, Human
cacaugcugagucucccaaggc

SEQ ID NO: 3647417 - RNA, 15 nt, Human
cacaugcuggacagg

SEQ ID NO: 3647418 - RNA, 12 nt, Human
cacaugcuggcc

SEQ ID NO: 3647419 - RNA, 18 nt, Human
cacaugcuggccagccug

SEQ ID NO: 3647420 - RNA, 12 nt, Human
cacaugcuucaa

SEQ ID NO: 3647421 - RNA, 17 nt, Human
cacauggaaacccauag

SEQ ID NO: 3647422 - RNA, 15 nt, Human
cacauggaaugaggg

SEQ ID NO: 3647423 - RNA, 14 nt, Human
cacauggcuuccuc

SEQ ID NO: 3647424 - RNA, 18 nt, Human
cacauggcuuccuccugc

SEQ ID NO: 3647425 - RNA, 20 nt, Human
cacauggcuuccuccugcgc

SEQ ID NO: 3647426 - RNA, 22 nt, Human
cacaugggagcaguccaugcau

SEQ ID NO: 3647427 - RNA, 17 nt, Human
cacauggggaaaaaaau

SEQ ID NO: 3647428 - RNA, 19 nt, Human
cacauggggcugggcagcu

SEQ ID NO: 3647429 - RNA, 20 nt, Human
cacauggggcugggcagcua

SEQ ID NO: 3647430 - RNA, 20 nt, Human
cacauggugcuacgccugca

SEQ ID NO: 3647431 - RNA, 22 nt, Human
cacauggugcuacgccugcaug

SEQ ID NO: 3647432 - RNA, 14 nt, Human
cacaugguuuuccu

SEQ ID NO: 3647433 - RNA, 17 nt, Human
cacauguaucuaugcau

SEQ ID NO: 3647434 - RNA, 22 nt, Human
cacaugucaccguggaccuucc

SEQ ID NO: 3647435 - RNA, 20 nt, Human
cacaugucaguaccuucaaa

SEQ ID NO: 3647436 - RNA, 16 nt, Human
cacauguccaagaagc

SEQ ID NO: 3647437 - RNA, 17 nt, Human
cacauguccaagaagcc

SEQ ID NO: 3647438 - RNA, 18 nt, Human
cacauguccaagaagccc

SEQ ID NO: 3647439 - RNA, 21 nt, Human
cacauguccaagaagcccagg

SEQ ID NO: 3647440 - RNA, 23 nt, Human
cacauguccaagaagcccaggaa

SEQ ID NO: 3647441 - RNA, 17 nt, Human
cacauguccuugugugu

SEQ ID NO: 3647442 - RNA, 16 nt, Human
cacaugucuuaaugaa

SEQ ID NO: 3647443 - RNA, 13 nt, Human
cacauguggacuu

SEQ ID NO: 3647444 - RNA, 16 nt, Human
cacauguguccauccc

SEQ ID NO: 3647445 - RNA, 14 nt, Human
cacauguuuccucu

SEQ ID NO: 3647446 - RNA, 12 nt, Human
cacauguuuuca

SEQ ID NO: 3647447 - RNA, 16 nt, Human
cacauuaaaaaaugaa

SEQ ID NO: 3647448 - RNA, 22 nt, Human
cacauuaaguaaucaauaaaga

SEQ ID NO: 3647449 - RNA, 18 nt, Human
cacauuaauauuugcuga

SEQ ID NO: 3647450 - RNA, 16 nt, Human
cacauuaucgggagca

SEQ ID NO: 3647451 - RNA, 17 nt, Human
cacauuaucgggagcag

SEQ ID NO: 3647452 - RNA, 13 nt, Human
cacauuauuucua

SEQ ID NO: 3647453 - RNA, 15 nt, Human
cacauuauuugcaug

SEQ ID NO: 3647454 - RNA, 12 nt, Human
cacauucaggaa

SEQ ID NO: 3647455 - RNA, 14 nt, Human
cacauucaggaaga

SEQ ID NO: 3647456 - RNA, 15 nt, Human
cacauuccccugggg

SEQ ID NO: 3647457 - RNA, 16 nt, Human
cacauuccugaacagg

SEQ ID NO: 3647458 - RNA, 21 nt, Human
cacauucggcucccuggagcc

SEQ ID NO: 3647459 - RNA, 16 nt, Human
cacauucuggcucagg

SEQ ID NO: 3647460 - RNA, 22 nt, Human
cacauucuuaacacauguccuu

SEQ ID NO: 3647461 - RNA, 19 nt, Human
cacauucuuauaaauauga

SEQ ID NO: 3647462 - RNA, 13 nt, Human
cacauugaagaau

SEQ ID NO: 3647463 - RNA, 23 nt, Human
cacauugaagaauguuagaguaa

SEQ ID NO: 3647464 - RNA, 15 nt, Human
cacauugcauucuau

SEQ ID NO: 3647465 - RNA, 21 nt, Human
cacauugccagugacaugaga

SEQ ID NO: 3647466 - RNA, 20 nt, Human
cacauugcugugaacaggaa

SEQ ID NO: 3647467 - RNA, 17 nt, Human
cacauuggaaacaaguc

SEQ ID NO: 3647468 - RNA, 16 nt, Human
cacauuggaaagcaca

SEQ ID NO: 3647469 - RNA, 23 nt, Human
cacauugggcagcgcccuuccuc

SEQ ID NO: 3647470 - RNA, 20 nt, Human
cacauuguuauuuucaguga

SEQ ID NO: 3647471 - RNA, 21 nt, Human
cacauuguuguuuuuuuaaua

SEQ ID NO: 3647472 - RNA, 19 nt, Human
cacauuguuugcugcuauu

SEQ ID NO: 3647473 - RNA, 15 nt, Human
cacauuguuuuaaaa

SEQ ID NO: 3647474 - RNA, 16 nt, Human
cacauuuaagagacag

SEQ ID NO: 3647475 - RNA, 11 nt, Human
cacauuuaagg

SEQ ID NO: 3647476 - RNA, 14 nt, Human
cacauuuaaggaug

SEQ ID NO: 3647477 - RNA, 13 nt, Human
cacauuucuaaaa

SEQ ID NO: 3647478 - RNA, 17 nt, Human
cacauuucuaaaaucuu

SEQ ID NO: 3647479 - RNA, 21 nt, Human
cacauuugcuacuguuguaag

SEQ ID NO: 3647480 - RNA, 20 nt, Human
cacauuugguaauguuuuua

SEQ ID NO: 3647481 - RNA, 11 nt, Human
cacauuuguac

SEQ ID NO: 3647482 - RNA, 20 nt, Human
cacauuugugccgacacugu

SEQ ID NO: 3647483 - RNA, 19 nt, Human
cacauuuuaaaaaauuugu

SEQ ID NO: 3647484 - RNA, 16 nt, Human
cacauuuuguauaauu

SEQ ID NO: 3647485 - RNA, 22 nt, Human
cacauuuuguauaauuguaucg

SEQ ID NO: 3647486 - RNA, 17 nt, Human
cacauuuuuauaccugu

SEQ ID NO: 3647487 - RNA, 14 nt, Human
cacauuuuuuucua

SEQ ID NO: 3647488 - RNA, 22 nt, Human
cacauuuuuuuuuuuaauuuug

SEQ ID NO: 3647489 - RNA, 13 nt, Human
caccaaaaaauau

SEQ ID NO: 3647490 - RNA, 12 nt, Human
caccaaaauaag

SEQ ID NO: 3647491 - RNA, 17 nt, Human
caccaaaauaagaaaag

SEQ ID NO: 3647492 - RNA, 19 nt, Human
caccaaaauaagaaaagau

SEQ ID NO: 3647493 - RNA, 17 nt, Human
caccaaagaugcagccg

SEQ ID NO: 3647494 - RNA, 12 nt, Human
caccaaaguucu

SEQ ID NO: 3647495 - RNA, 16 nt, Human
caccaaaguucuaaua

SEQ ID NO: 3647496 - RNA, 22 nt, Human
augaguagauaauuucagggug

SEQ ID NO: 3647497 - RNA, 18 nt, Human
augaguagcuuauacaau

SEQ ID NO: 3647498 - RNA, 14 nt, Human
augaguauacaaua

SEQ ID NO: 3647499 - RNA, 22 nt, Human
augagucacuaugggaugagaa

SEQ ID NO: 3647500 - RNA, 16 nt, Human
augagugaauaaaugu

SEQ ID NO: 3647501 - RNA, 16 nt, Human
augagugcgugcucag

SEQ ID NO: 3647502 - RNA, 23 nt, Human
augagugcuucagaaugugauuu

SEQ ID NO: 3647503 - RNA, 19 nt, Human
augaguguaacaagaaagg

SEQ ID NO: 3647504 - RNA, 23 nt, Human
augaguguaacaagaaaggagag

SEQ ID NO: 3647505 - RNA, 18 nt, Human
augaguuccagaaaguaa

SEQ ID NO: 3647506 - RNA, 19 nt, Human
augaguuguuuucagacuc

SEQ ID NO: 3647507 - RNA, 20 nt, Human
augaguuguuuucagacuca

SEQ ID NO: 3647508 - RNA, 23 nt, Human
augaguuguuuucagacucagac

SEQ ID NO: 3647509 - RNA, 14 nt, Human
augaguuucuuaga

SEQ ID NO: 3647510 - RNA, 15 nt, Human
augaguuucuuagac

SEQ ID NO: 3647511 - RNA, 13 nt, Human
augaguuuuggga

SEQ ID NO: 3647512 - RNA, 20 nt, Human
augaguuuugggaaguuaaa

SEQ ID NO: 3647513 - RNA, 19 nt, Human
augaguuuuugauagcuuu

SEQ ID NO: 3647514 - RNA, 14 nt, Human
cacaugaagaaaua

SEQ ID NO: 3647515 - RNA, 16 nt, Human
cacaugaaguccaagc

SEQ ID NO: 3647516 - RNA, 18 nt, Human
cacaugaaucugcacauc

SEQ ID NO: 3647517 - RNA, 20 nt, Human
cacaugaaucugcacaucug

SEQ ID NO: 3647518 - RNA, 17 nt, Human
cacaugagcaucaggcc

SEQ ID NO: 3647519 - RNA, 19 nt, Human
cacaugagcaucaggccag

SEQ ID NO: 3647520 - RNA, 21 nt, Human
cacaugagcaucaggccaggc

SEQ ID NO: 3647521 - RNA, 14 nt, Human
cacaugagucccag

SEQ ID NO: 3647522 - RNA, 14 nt, Human
cacaugauuucaca

SEQ ID NO: 3647523 - RNA, 17 nt, Human
cacaugauuucacaaau

SEQ ID NO: 3647524 - RNA, 18 nt, Human
cacaugauuucacaaaua

SEQ ID NO: 3647525 - RNA, 15 nt, Human
cacaugcauacacac

SEQ ID NO: 3647526 - RNA, 14 nt, Human
cacaugccaggggc

SEQ ID NO: 3647527 - RNA, 22 nt, Human
cacaugcccuuggugacagcug

SEQ ID NO: 3647528 - RNA, 13 nt, Human
cacaugccucucu

SEQ ID NO: 3647529 - RNA, 17 nt, Human
cacaugccucucucagg

SEQ ID NO: 3647530 - RNA, 18 nt, Human
cacaugcggagaacaaau

SEQ ID NO: 3647531 - RNA, 21 nt, Human
cacaugcuaggaugcggaaau

SEQ ID NO: 3647532 - RNA, 20 nt, Human
cacaugcucaggcuacuaua

SEQ ID NO: 3647533 - RNA, 18 nt, Human
cacaugcugagucuccca

SEQ ID NO: 3647534 - RNA, 14 nt, Human
cacaugcuggacag

SEQ ID NO: 3647535 - RNA, 13 nt, Human
cacaugcuggcca

SEQ ID NO: 3647536 - RNA, 14 nt, Human
cacaugcuggccag

SEQ ID NO: 3647537 - RNA, 15 nt, Human
cacaugcuggccagc

SEQ ID NO: 3647538 - RNA, 17 nt, Human
cacaugcuggccagccu

SEQ ID NO: 3647539 - RNA, 19 nt, Human
cacauggaaugaggguuug

SEQ ID NO: 3647540 - RNA, 18 nt, Human
cacauggcuauguuuuag

SEQ ID NO: 3647541 - RNA, 21 nt, Human
cacaugggagcaguccaugca

SEQ ID NO: 3647542 - RNA, 12 nt, Human
cacauggugaug

SEQ ID NO: 3647543 - RNA, 15 nt, Human
cacauggugauguug

SEQ ID NO: 3647544 - RNA, 18 nt, Human
cacauggugccccuagcu

SEQ ID NO: 3647545 - RNA, 19 nt, Human
cacauguauguuuugguau

SEQ ID NO: 3647546 - RNA, 12 nt, Human
cacaugucaccg

SEQ ID NO: 3647547 - RNA, 19 nt, Human
cacaugucaccguggaccu

SEQ ID NO: 3647548 - RNA, 19 nt, Human
cacauguccaagaagccca

SEQ ID NO: 3647549 - RNA, 16 nt, Human
cacauguccagcaccu

SEQ ID NO: 3647550 - RNA, 12 nt, Human
cacaugucuuaa

SEQ ID NO: 3647551 - RNA, 23 nt, Human
caccguggaccuuccugccacca

SEQ ID NO: 3647552 - RNA, 13 nt, Human
caccgugggcucc

SEQ ID NO: 3647553 - RNA, 17 nt, Human
caccgugggcucccuga

SEQ ID NO: 3647554 - RNA, 18 nt, Human
caccgugggcucccugac

SEQ ID NO: 3647555 - RNA, 14 nt, Human
caccguucugugca

SEQ ID NO: 3647556 - RNA, 12 nt, Human
caccuaaagaaa

SEQ ID NO: 3647557 - RNA, 15 nt, Human
caccuaaagcagcca

SEQ ID NO: 3647558 - RNA, 22 nt, Human
caccuaaauaaccaaucuacaa

SEQ ID NO: 3647559 - RNA, 15 nt, Human
caccuaacucuucuu

SEQ ID NO: 3647560 - RNA, 18 nt, Human
caccuaagagauucugau

SEQ ID NO: 3647561 - RNA, 22 nt, Human
caccuaauucgaugaaggcugc

SEQ ID NO: 3647562 - RNA, 23 nt, Human
caccuaauucgaugaaggcugcc

SEQ ID NO: 3647563 - RNA, 23 nt, Human
caccuacaguguacagucuugua

SEQ ID NO: 3647564 - RNA, 21 nt, Human
caccuacaugagguacugaga

SEQ ID NO: 3647565 - RNA, 20 nt, Human
caccuaccaccacgcccggc

SEQ ID NO: 3647566 - RNA, 21 nt, Human
caccuaccaccacgcccggcu

SEQ ID NO: 3647567 - RNA, 18 nt, Human
caccuaccaucagggaca

SEQ ID NO: 3647568 - RNA, 23 nt, Human
caccuacccauacacccccucuu

SEQ ID NO: 3647569 - RNA, 18 nt, Human
caccuaccuucaaagcug

SEQ ID NO: 3647570 - RNA, 21 nt, Human
caccuacuacaucgcccucca

SEQ ID NO: 3647571 - RNA, 16 nt, Human
caccuagaauuggcug

SEQ ID NO: 3647572 - RNA, 13 nt, Human
caccuagaucaga

SEQ ID NO: 3647573 - RNA, 14 nt, Human
caccuagcagcacc

SEQ ID NO: 3647574 - RNA, 14 nt, Human
caccuagcugaaug

SEQ ID NO: 3647575 - RNA, 18 nt, Human
caccuagcugaauguuuu

SEQ ID NO: 3647576 - RNA, 22 nt, Human
caccuagcugaauguuuuucua

SEQ ID NO: 3647577 - RNA, 23 nt, Human
caccuagcugaauguuuuucuaa

SEQ ID NO: 3647578 - RNA, 19 nt, Human
caccuaggaagccucagau

SEQ ID NO: 3647579 - RNA, 14 nt, Human
caccuauaauacca

SEQ ID NO: 3647580 - RNA, 21 nt, Human
caccuaucucgugggagagcc

SEQ ID NO: 3647581 - RNA, 14 nt, Human
caccuaugugccaa

SEQ ID NO: 3647582 - RNA, 23 nt, Human
caccucaaaauaccaugccauuu

SEQ ID NO: 3647583 - RNA, 21 nt, Human
caccucacagaaaugagauca

SEQ ID NO: 3647584 - RNA, 14 nt, Human
caccucacucagca

SEQ ID NO: 3647585 - RNA, 21 nt, Human
caccucacugaaaacaucugg

SEQ ID NO: 3647586 - RNA, 12 nt, Human
caccucagagcc

SEQ ID NO: 3647587 - RNA, 20 nt, Human
caccucagauggcagcuuuu

SEQ ID NO: 3647588 - RNA, 12 nt, Human
caccucagccuc

SEQ ID NO: 3647589 - RNA, 12 nt, Human
caccucagccuu

SEQ ID NO: 3647590 - RNA, 13 nt, Human
caccucagccuug

SEQ ID NO: 3647591 - RNA, 17 nt, Human
caccucaguucccuugg

SEQ ID NO: 3647592 - RNA, 21 nt, Human
caccucaguucccuuggccuc

SEQ ID NO: 3647593 - RNA, 14 nt, Human
caccucaugcccac

SEQ ID NO: 3647594 - RNA, 18 nt, Human
caccucaugcccaccccc

SEQ ID NO: 3647595 - RNA, 21 nt, Human
caccucaugcccacccccugc

SEQ ID NO: 3647596 - RNA, 14 nt, Human
caccuccacaguuc

SEQ ID NO: 3647597 - RNA, 16 nt, Human
caccuccacauccucc

SEQ ID NO: 3647598 - RNA, 12 nt, Human
caccuccagccc

SEQ ID NO: 3647599 - RNA, 18 nt, Human
caccuccagcccgggagc

SEQ ID NO: 3647600 - RNA, 14 nt, Human
caccucccagcccc

SEQ ID NO: 3647601 - RNA, 11 nt, Human
caccucccagg

SEQ ID NO: 3647602 - RNA, 16 nt, Human
caccucccauccuaau

SEQ ID NO: 3647603 - RNA, 17 nt, Human
caccucccccacuccca

SEQ ID NO: 3647604 - RNA, 14 nt, Human
caccuccccccacu

SEQ ID NO: 3647605 - RNA, 15 nt, Human
caccuccccccacug

SEQ ID NO: 3647606 - RNA, 17 nt, Human
caccuccccccacugca

SEQ ID NO: 3647607 - RNA, 20 nt, Human
caccucccccucccccuucu

SEQ ID NO: 3647608 - RNA, 13 nt, Human
caccuccccuauc

SEQ ID NO: 3647609 - RNA, 11 nt, Human
caccuccccuc

SEQ ID NO: 3647610 - RNA, 14 nt, Human
caccuccccuccuu

SEQ ID NO: 3647611 - RNA, 23 nt, Human
caccuccccuccuugccuccugu

SEQ ID NO: 3647612 - RNA, 18 nt, Human
caccuccccuugccagcu

SEQ ID NO: 3647613 - RNA, 20 nt, Human
caccuccccuugccagcugc

SEQ ID NO: 3647614 - RNA, 16 nt, Human
caccucccucccggca

SEQ ID NO: 3647615 - RNA, 10 nt, Human
caccucccug

SEQ ID NO: 3647616 - RNA, 13 nt, Human
caccucccugcaa

SEQ ID NO: 3647617 - RNA, 14 nt, Human
caccucccugcaau

SEQ ID NO: 3647618 - RNA, 16 nt, Human
caccucccugcccagg

SEQ ID NO: 3647619 - RNA, 16 nt, Human
caccuccuaaaacaac

SEQ ID NO: 3647620 - RNA, 22 nt, Human
caccuccuaaaaggcccagaga

SEQ ID NO: 3647621 - RNA, 16 nt, Human
caccuccucagccuga

SEQ ID NO: 3647622 - RNA, 14 nt, Human
caccuccucaugua

SEQ ID NO: 3647623 - RNA, 13 nt, Human
caccuccucucac

SEQ ID NO: 3647624 - RNA, 18 nt, Human
caccuccucucacucccc

SEQ ID NO: 3647625 - RNA, 19 nt, Human
caccuccugacacccuucu

SEQ ID NO: 3647626 - RNA, 14 nt, Human
caccuccugcuggg

SEQ ID NO: 3647627 - RNA, 15 nt, Human
caccuccugcugggc

SEQ ID NO: 3647628 - RNA, 17 nt, Human
caccuccugcugggcag

SEQ ID NO: 3647629 - RNA, 22 nt, Human
caccuccuggguucaagcgauu

SEQ ID NO: 3647630 - RNA, 13 nt, Human
caccuccuucccu

SEQ ID NO: 3647631 - RNA, 20 nt, Human
caccucgaauuuuguuuucu

SEQ ID NO: 3647632 - RNA, 22 nt, Human
caccucuaacagcaccaaauca

SEQ ID NO: 3647633 - RNA, 16 nt, Human
caccucuacccaaacc

SEQ ID NO: 3647634 - RNA, 18 nt, Human
caccucuacccaaacccu

SEQ ID NO: 3647635 - RNA, 22 nt, Human
caccucuaucccggcuuuggug

SEQ ID NO: 3647636 - RNA, 22 nt, Human
caccucucaauauucaauaaag

SEQ ID NO: 3647637 - RNA, 14 nt, Human
caccucucccuugg

SEQ ID NO: 3647638 - RNA, 18 nt, Human
caccucucucacuccuug

SEQ ID NO: 3647639 - RNA, 19 nt, Human
caccucucucacuccuuga

SEQ ID NO: 3647640 - RNA, 19 nt, Human
caccucugccagaagaucc

SEQ ID NO: 3647641 - RNA, 22 nt, Human
caccucugcggaccccagcugu

SEQ ID NO: 3647642 - RNA, 16 nt, Human
caccucugcuuucuga

SEQ ID NO: 3647643 - RNA, 13 nt, Human
caccucuguaauu

SEQ ID NO: 3647644 - RNA, 14 nt, Human
caccucuguaauuu

SEQ ID NO: 3647645 - RNA, 17 nt, Human
caccucugugaccucag

SEQ ID NO: 3647646 - RNA, 19 nt, Human
caccucugugaccucaggc

SEQ ID NO: 3647647 - RNA, 20 nt, Human
caccucugugaccucaggca

SEQ ID NO: 3647648 - RNA, 20 nt, Human
caccucuguggcauugaaau

SEQ ID NO: 3647649 - RNA, 19 nt, Human
caccucuuuguguuuuauu

SEQ ID NO: 3647650 - RNA, 19 nt, Human
caccugaacugaacaccau

SEQ ID NO: 3647651 - RNA, 20 nt, Human
caccugacacaccaggcgcu

SEQ ID NO: 3647652 - RNA, 16 nt, Human
caccugagcaggaccu

SEQ ID NO: 3647653 - RNA, 21 nt, Human
caccugagcaggaccucugaa

SEQ ID NO: 3647654 - RNA, 14 nt, Human
caccugagcuuugg

SEQ ID NO: 3647655 - RNA, 18 nt, Human
caccugagcuuuggacac

SEQ ID NO: 3647656 - RNA, 18 nt, Human
caccugaggugggcccag

SEQ ID NO: 3647657 - RNA, 24 nt, Human
caccugaggugggcccaggaccag

SEQ ID NO: 3647658 - RNA, 11 nt, Human
caccugaugug

SEQ ID NO: 3647659 - RNA, 23 nt, Human
cacccaccucccugccuccagga

SEQ ID NO: 3647660 - RNA, 14 nt, Human
cacccacuucugca

SEQ ID NO: 3647661 - RNA, 16 nt, Human
cacccacuucugcacu

SEQ ID NO: 3647662 - RNA, 21 nt, Human
cacccagaagaagauggcugu

SEQ ID NO: 3647663 - RNA, 20 nt, Human
cacccagacauaaaggaaaa

SEQ ID NO: 3647664 - RNA, 12 nt, Human
cacccagcccau

SEQ ID NO: 3647665 - RNA, 13 nt, Human
cacccagcccauu

SEQ ID NO: 3647666 - RNA, 11 nt, Human
cacccagccuc

SEQ ID NO: 3647667 - RNA, 12 nt, Human
cacccagccuca

SEQ ID NO: 3647668 - RNA, 19 nt, Human
cacccagccucaguccucc

SEQ ID NO: 3647669 - RNA, 20 nt, Human
cacccaggagccccgaggcc

SEQ ID NO: 3647670 - RNA, 22 nt, Human
cacccaggaggggaacacugcc

SEQ ID NO: 3647671 - RNA, 12 nt, Human
cacccaggccag

SEQ ID NO: 3647672 - RNA, 20 nt, Human
cacccaggcuggaguacagu

SEQ ID NO: 3647673 - RNA, 11 nt, Human
cacccagggaa

SEQ ID NO: 3647674 - RNA, 14 nt, Human
cacccauaucaugc

SEQ ID NO: 3647675 - RNA, 22 nt, Human
cacccauccuaccaaugcaugc

SEQ ID NO: 3647676 - RNA, 18 nt, Human
cacccaugaaagaaaacu

SEQ ID NO: 3647677 - RNA, 15 nt, Human
cacccaugaagacag

SEQ ID NO: 3647678 - RNA, 19 nt, Human
cacccaugcaagcagagga

SEQ ID NO: 3647679 - RNA, 22 nt, Human
cacccaugcaagcagaggacca

SEQ ID NO: 3647680 - RNA, 13 nt, Human
cacccaugggcuc

SEQ ID NO: 3647681 - RNA, 18 nt, Human
cacccaugggcucugaca

SEQ ID NO: 3647682 - RNA, 19 nt, Human
cacccaugggcucugacag

SEQ ID NO: 3647683 - RNA, 13 nt, Human
cacccaugugcca

SEQ ID NO: 3647684 - RNA, 15 nt, Human
cacccauuuucacau

SEQ ID NO: 3647685 - RNA, 15 nt, Human
caccccaaccugcuc

SEQ ID NO: 3647686 - RNA, 16 nt, Human
caccccaaccugcucu

SEQ ID NO: 3647687 - RNA, 20 nt, Human
caccccaaccugcucuccuc

SEQ ID NO: 3647688 - RNA, 21 nt, Human
caccccaaguagucugcucac

SEQ ID NO: 3647689 - RNA, 22 nt, Human
caccccacccccuucagugccc

SEQ ID NO: 3647690 - RNA, 19 nt, Human
caccccacccucccuggag

SEQ ID NO: 3647691 - RNA, 11 nt, Human
caccccaccug

SEQ ID NO: 3647692 - RNA, 12 nt, Human
caccccaccugc

SEQ ID NO: 3647693 - RNA, 13 nt, Human
caccccaccugcg

SEQ ID NO: 3647694 - RNA, 16 nt, Human
caccccaccugcgcuu

SEQ ID NO: 3647695 - RNA, 17 nt, Human
caccccacucacagaga

SEQ ID NO: 3647696 - RNA, 10 nt, Human
caccccacug

SEQ ID NO: 3647697 - RNA, 22 nt, Human
caccccacugcaauccugucuu

SEQ ID NO: 3647698 - RNA, 12 nt, Human
caccccagagcc

SEQ ID NO: 3647699 - RNA, 14 nt, Human
caccccagagccac

SEQ ID NO: 3647700 - RNA, 15 nt, Human
caccccagagccaca

SEQ ID NO: 3647701 - RNA, 16 nt, Human
caccccagagccacac

SEQ ID NO: 3647702 - RNA, 22 nt, Human
caccccagagccacacaugggc

SEQ ID NO: 3647703 - RNA, 16 nt, Human
caccccagcaauuaug

SEQ ID NO: 3647704 - RNA, 11 nt, Human
caccccagccc

SEQ ID NO: 3647705 - RNA, 13 nt, Human
caccccagcccca

SEQ ID NO: 3647706 - RNA, 13 nt, Human
caccccagcugcu

SEQ ID NO: 3647707 - RNA, 11 nt, Human
caccccaggac

SEQ ID NO: 3647708 - RNA, 20 nt, Human
caccccaggacgccacucau

SEQ ID NO: 3647709 - RNA, 13 nt, Human
caccccagggcag

SEQ ID NO: 3647710 - RNA, 18 nt, Human
caccccagggcagccagg

SEQ ID NO: 3647711 - RNA, 19 nt, Human
caccccagggcagccaggg

SEQ ID NO: 3647712 - RNA, 22 nt, Human
caccccagggccugagccuggc

SEQ ID NO: 3647713 - RNA, 18 nt, Human
caccccagugcacccacu

SEQ ID NO: 3647714 - RNA, 21 nt, Human
caccccaucccacacccugga

SEQ ID NO: 3647715 - RNA, 17 nt, Human
caccccaugccaaagcu

SEQ ID NO: 3647716 - RNA, 16 nt, Human
caccccaugcuguuga

SEQ ID NO: 3647717 - RNA, 13 nt, Human
caccccauucccg

SEQ ID NO: 3647718 - RNA, 17 nt, Human
caccccauucccgcagu

SEQ ID NO: 3647719 - RNA, 19 nt, Human
caccccauucccgcagugg

SEQ ID NO: 3647720 - RNA, 12 nt, Human
cacccccaaggg

SEQ ID NO: 3647721 - RNA, 14 nt, Human
cacccccaccccca

SEQ ID NO: 3647722 - RNA, 19 nt, Human
auggagauucaguuuucau

SEQ ID NO: 3647723 - RNA, 20 nt, Human
auggagauugaccuggaugg

SEQ ID NO: 3647724 - RNA, 15 nt, Human
auggagccagcuccc

SEQ ID NO: 3647725 - RNA, 23 nt, Human
auggagccagcucccucuauuua

SEQ ID NO: 3647726 - RNA, 21 nt, Human
auggagccagcucugcauuau

SEQ ID NO: 3647727 - RNA, 13 nt, Human
auggagcccaggc

SEQ ID NO: 3647728 - RNA, 14 nt, Human
auggagcccaggcg

SEQ ID NO: 3647729 - RNA, 23 nt, Human
auggagcccaggcgggagcggug

SEQ ID NO: 3647730 - RNA, 16 nt, Human
auggagccccagcccc

SEQ ID NO: 3647731 - RNA, 17 nt, Human
auggagcgcaccugccc

SEQ ID NO: 3647732 - RNA, 16 nt, Human
auggaggaaaaccaag

SEQ ID NO: 3647733 - RNA, 19 nt, Human
auggaggacuccaggcagc

SEQ ID NO: 3647734 - RNA, 15 nt, Human
auggaggagaagaau

SEQ ID NO: 3647735 - RNA, 19 nt, Human
auggaggcacacagcugca

SEQ ID NO: 3647736 - RNA, 16 nt, Human
auggaggcccuccugu

SEQ ID NO: 3647737 - RNA, 20 nt, Human
auggaggcccuccugugcug

SEQ ID NO: 3647738 - RNA, 16 nt, Human
auggagggaauaauac

SEQ ID NO: 3647739 - RNA, 16 nt, Human
auggagguucuaaggc

SEQ ID NO: 3647740 - RNA, 18 nt, Human
auggaguagaccccuggc

SEQ ID NO: 3647741 - RNA, 21 nt, Human
auggaguagaccccuggcugg

SEQ ID NO: 3647742 - RNA, 13 nt, Human
auggaguagaggu

SEQ ID NO: 3647743 - RNA, 11 nt, Human
auggagugacg

SEQ ID NO: 3647744 - RNA, 18 nt, Human
auggaguggcagcccagc

SEQ ID NO: 3647745 - RNA, 20 nt, Human
auggaguuaaacuuuagugc

SEQ ID NO: 3647746 - RNA, 18 nt, Human
auggaguuggaguucauu

SEQ ID NO: 3647747 - RNA, 14 nt, Human
auggaguuucuaag

SEQ ID NO: 3647748 - RNA, 18 nt, Human
auggauaaauauugguug

SEQ ID NO: 3647749 - RNA, 14 nt, Human
auggauacauaaag

SEQ ID NO: 3647750 - RNA, 16 nt, Human
auggauauuagucaua

SEQ ID NO: 3647751 - RNA, 16 nt, Human
auggauccuggaggau

SEQ ID NO: 3647752 - RNA, 19 nt, Human
auggaugcaaaguacaaug

SEQ ID NO: 3647753 - RNA, 21 nt, Human
auggauggaaaacgcucucua

SEQ ID NO: 3647754 - RNA, 12 nt, Human
auggaugugcuu

SEQ ID NO: 3647755 - RNA, 20 nt, Human
auggaugugggguccccauc

SEQ ID NO: 3647756 - RNA, 19 nt, Human
auggauuacuucucuauaa

SEQ ID NO: 3647757 - RNA, 19 nt, Human
auggauucaguuucuaaaa

SEQ ID NO: 3647758 - RNA, 12 nt, Human
auggauucuaaa

SEQ ID NO: 3647759 - RNA, 18 nt, Human
auggauucuaaaaugccu

SEQ ID NO: 3647760 - RNA, 14 nt, Human
auggauucucagau

SEQ ID NO: 3647761 - RNA, 18 nt, Human
auggauucucagauauuu

SEQ ID NO: 3647762 - RNA, 19 nt, Human
auggauucucagauauuua

SEQ ID NO: 3647763 - RNA, 22 nt, Human
auggauucucagauauuuauau

SEQ ID NO: 3647764 - RNA, 18 nt, Human
auggauugauaauugcau

SEQ ID NO: 3647765 - RNA, 20 nt, Human
auggauuggauuauuuaaua

SEQ ID NO: 3647766 - RNA, 14 nt, Human
auggauuucagaag

SEQ ID NO: 3647767 - RNA, 18 nt, Human
auggauuuucuauuguua

SEQ ID NO: 3647768 - RNA, 21 nt, Human
auggauuuucuauuguuacuc

SEQ ID NO: 3647769 - RNA, 19 nt, Human
auggauuuuucuuuaacug

SEQ ID NO: 3647770 - RNA, 20 nt, Human
auggauuuuucuuuaacugc

SEQ ID NO: 3647771 - RNA, 19 nt, Human
auggcaacaaacugcacau

SEQ ID NO: 3647772 - RNA, 22 nt, Human
auggcaacaaacugcacaugau

SEQ ID NO: 3647773 - RNA, 20 nt, Human
auggcaaguugcaucagaaa

SEQ ID NO: 3647774 - RNA, 23 nt, Human
auggcaaguuuugauaugaguau

SEQ ID NO: 3647775 - RNA, 22 nt, Human
auggcaaucaaacauuuucugg

SEQ ID NO: 3647776 - RNA, 16 nt, Human
auggcaauuuuguaac

SEQ ID NO: 3647777 - RNA, 22 nt, Human
auggcacaaucucggcucacug

SEQ ID NO: 3647778 - RNA, 15 nt, Human
auggcacagggcaug

SEQ ID NO: 3647779 - RNA, 19 nt, Human
auggcaccaaagccaccag

SEQ ID NO: 3647780 - RNA, 16 nt, Human
auggcacuaguauuuc

SEQ ID NO: 3647781 - RNA, 15 nt, Human
auggcacucccucca

SEQ ID NO: 3647782 - RNA, 16 nt, Human
auggcacucccuccag

SEQ ID NO: 3647783 - RNA, 20 nt, Human
auggcacucccuccagcaca

SEQ ID NO: 3647784 - RNA, 20 nt, Human
auggcagaagacaccagagc

SEQ ID NO: 3647785 - RNA, 21 nt, Human
auggcagaagacaccagagca

SEQ ID NO: 3647786 - RNA, 24 nt, Human
auggcagaagacaccagagcagau

SEQ ID NO: 3647787 - RNA, 15 nt, Human
auggcagaaggcaaa

SEQ ID NO: 3647788 - RNA, 21 nt, Human
auggcagaguuguaaauauau

SEQ ID NO: 3647789 - RNA, 11 nt, Human
auggcagcagg

SEQ ID NO: 3647790 - RNA, 18 nt, Human
auggcagcuuuuaaaaga

SEQ ID NO: 3647791 - RNA, 17 nt, Human
auggcaggaaggcuugu

SEQ ID NO: 3647792 - RNA, 19 nt, Human
auggcagggggcugcugcu

SEQ ID NO: 3647793 - RNA, 15 nt, Human
auggcagugucuuuc

SEQ ID NO: 3647794 - RNA, 20 nt, Human
auggcauauuuuucacauau

SEQ ID NO: 3647795 - RNA, 22 nt, Human
auggcauauuuuucacauaucu

SEQ ID NO: 3647796 - RNA, 17 nt, Human
auggcauccaagagugc

SEQ ID NO: 3647797 - RNA, 21 nt, Human
auggcaucccuuuuucauaaa

SEQ ID NO: 3647798 - RNA, 14 nt, Human
auggcauuugcaga

SEQ ID NO: 3647799 - RNA, 14 nt, Human
auggccaaacccaa

SEQ ID NO: 3647800 - RNA, 18 nt, Human
auggccacacugugacac

SEQ ID NO: 3647801 - RNA, 22 nt, Human
auggccacacugugacacacua

SEQ ID NO: 3647802 - RNA, 23 nt, Human
auggccacacugugacacacuac

SEQ ID NO: 3647803 - RNA, 14 nt, Human
auggccacauuuaa

SEQ ID NO: 3647804 - RNA, 20 nt, Human
cacgccuguaaucccagcag

SEQ ID NO: 3647805 - RNA, 12 nt, Human
cacgccugugca

SEQ ID NO: 3647806 - RNA, 22 nt, Human
cacgcgccccccucccagaggc

SEQ ID NO: 3647807 - RNA, 17 nt, Human
cacgcgcccuuucuacc

SEQ ID NO: 3647808 - RNA, 13 nt, Human
cacgcgcgcacac

SEQ ID NO: 3647809 - RNA, 19 nt, Human
cacgcgcuucgacuuuucu

SEQ ID NO: 3647810 - RNA, 14 nt, Human
cacgcguauuuaca

SEQ ID NO: 3647811 - RNA, 18 nt, Human
cacgcuccagcugccccg

SEQ ID NO: 3647812 - RNA, 19 nt, Human
cacgcuccagcugccccgg

SEQ ID NO: 3647813 - RNA, 21 nt, Human
cacgcuccccgccuguucccc

SEQ ID NO: 3647814 - RNA, 18 nt, Human
cacgcuccucccucugag

SEQ ID NO: 3647815 - RNA, 23 nt, Human
cacgcuccucccucugaggcugu

SEQ ID NO: 3647816 - RNA, 12 nt, Human
cacgcuccuuuc

SEQ ID NO: 3647817 - RNA, 15 nt, Human
cacgcuccuuucuga

SEQ ID NO: 3647818 - RNA, 19 nt, Human
cacgcugacuacagggccg

SEQ ID NO: 3647819 - RNA, 20 nt, Human
cacgcuggaccuugaacugg

SEQ ID NO: 3647820 - RNA, 13 nt, Human
cacgcugucucca

SEQ ID NO: 3647821 - RNA, 15 nt, Human
cacgcugucuccaga

SEQ ID NO: 3647822 - RNA, 19 nt, Human
cacgcuugacaggacagca

SEQ ID NO: 3647823 - RNA, 14 nt, Human
cacgcuuuccugaa

SEQ ID NO: 3647824 - RNA, 17 nt, Human
cacgcuuucuagcuguu

SEQ ID NO: 3647825 - RNA, 20 nt, Human
cacggaaaaugccaaucucu

SEQ ID NO: 3647826 - RNA, 15 nt, Human
cacggaaguuuucaa

SEQ ID NO: 3647827 - RNA, 23 nt, Human
cacggaccaaagggagucugcca

SEQ ID NO: 3647828 - RNA, 16 nt, Human
cacggacgcuggcucc

SEQ ID NO: 3647829 - RNA, 18 nt, Human
cacggacguuuccaucag

SEQ ID NO: 3647830 - RNA, 19 nt, Human
cacggagccacuccucuga

SEQ ID NO: 3647831 - RNA, 21 nt, Human
cacggaggcaucugcacccuc

SEQ ID NO: 3647832 - RNA, 20 nt, Human
cacggauccauguagcagga

SEQ ID NO: 3647833 - RNA, 18 nt, Human
cacggaucugagaaucuu

SEQ ID NO: 3647834 - RNA, 17 nt, Human
cacggauuugugucugu

SEQ ID NO: 3647835 - RNA, 19 nt, Human
cacggcaccugggcccugg

SEQ ID NO: 3647836 - RNA, 20 nt, Human
cacggcaccugggcccuggg

SEQ ID NO: 3647837 - RNA, 14 nt, Human
cacggccacuggcc

SEQ ID NO: 3647838 - RNA, 15 nt, Human
cacggccagccccgc

SEQ ID NO: 3647839 - RNA, 22 nt, Human
cacggccagcugcaucuacuca

SEQ ID NO: 3647840 - RNA, 14 nt, Human
cacggccaggccag

SEQ ID NO: 3647841 - RNA, 14 nt, Human
cacggccaugacca

SEQ ID NO: 3647842 - RNA, 16 nt, Human
cacggccgcuccaggg

SEQ ID NO: 3647843 - RNA, 19 nt, Human
cacggccgcuccaggggug

SEQ ID NO: 3647844 - RNA, 12 nt, Human
cacggccuccuu

SEQ ID NO: 3647845 - RNA, 12 nt, Human
cacggccuuucu

SEQ ID NO: 3647846 - RNA, 14 nt, Human
cacggcucacugca

SEQ ID NO: 3647847 - RNA, 17 nt, Human
cacggcucacugcagcc

SEQ ID NO: 3647848 - RNA, 20 nt, Human
cacggcuccucgagauccca

SEQ ID NO: 3647849 - RNA, 17 nt, Human
cacggcucuguccccag

SEQ ID NO: 3647850 - RNA, 18 nt, Human
cacggcucuguccccagc

SEQ ID NO: 3647851 - RNA, 20 nt, Human
cacggcucuguccccagccu

SEQ ID NO: 3647852 - RNA, 17 nt, Human
cacggcugcgcacugug

SEQ ID NO: 3647853 - RNA, 12 nt, Human
cacggcugcuga

SEQ ID NO: 3647854 - RNA, 18 nt, Human
cacgggacaucacagggu

SEQ ID NO: 3647855 - RNA, 22 nt, Human
cacgggcagccuggcucccagg

SEQ ID NO: 3647856 - RNA, 22 nt, Human
cacggggccgacauugucuccc

SEQ ID NO: 3647857 - RNA, 15 nt, Human
cacgggggcagcuga

SEQ ID NO: 3647858 - RNA, 13 nt, Human
cacgggugguccc

SEQ ID NO: 3647859 - RNA, 15 nt, Human
cacgguagugccuga

SEQ ID NO: 3647860 - RNA, 22 nt, Human
cacgguauuuauagagagagac

SEQ ID NO: 3647861 - RNA, 22 nt, Human
cacggucggggcaucuggccug

SEQ ID NO: 3647862 - RNA, 14 nt, Human
cacggucuguucuu

SEQ ID NO: 3647863 - RNA, 17 nt, Human
cacgguuugaagccugg

SEQ ID NO: 3647864 - RNA, 20 nt, Human
cacguaaguuaauaagcaaa

SEQ ID NO: 3647865 - RNA, 19 nt, Human
cacguacacacacauacac

SEQ ID NO: 3647866 - RNA, 16 nt, Human
cacguacuuaaaugaa

SEQ ID NO: 3647867 - RNA, 19 nt, Human
cacguaguagggucaggcc

SEQ ID NO: 3647868 - RNA, 23 nt, Human
cacguccugucagugccgccgcc

SEQ ID NO: 3647869 - RNA, 19 nt, Human
cacgucuauuucaucagaa

SEQ ID NO: 3647870 - RNA, 17 nt, Human
cacgucugacccucucc

SEQ ID NO: 3647871 - RNA, 15 nt, Human
cacgucugucuucac

SEQ ID NO: 3647872 - RNA, 16 nt, Human
cacgucuuccuucugc

SEQ ID NO: 3647873 - RNA, 18 nt, Human
cacgugacagugccuggg

SEQ ID NO: 3647874 - RNA, 21 nt, Human
cacgugcagcagcaacacaau

SEQ ID NO: 3647875 - RNA, 14 nt, Human
cacgugccaggccc

SEQ ID NO: 3647876 - RNA, 15 nt, Human
cacgugccaggcccg

SEQ ID NO: 3647877 - RNA, 13 nt, Human
cacguggagagcu

SEQ ID NO: 3647878 - RNA, 15 nt, Human
cacguggagagcugg

SEQ ID NO: 3647879 - RNA, 13 nt, Human
cacguggccucuu

SEQ ID NO: 3647880 - RNA, 22 nt, Human
cacguggcugcgugccccugcu

SEQ ID NO: 3647881 - RNA, 15 nt, Human
cacguggcuucugau

SEQ ID NO: 3647882 - RNA, 16 nt, Human
cacguggcuucugaug

SEQ ID NO: 3647883 - RNA, 16 nt, Human
cacgugggcuccccuc

SEQ ID NO: 3647884 - RNA, 19 nt, Human
cacgugguccuaaucuucu

SEQ ID NO: 3647885 - RNA, 16 nt, Human
cacguguacuggcucc

SEQ ID NO: 3647886 - RNA, 11 nt, Human
cacguguguga

SEQ ID NO: 3647887 - RNA, 12 nt, Human
cacgugugugac

SEQ ID NO: 3647888 - RNA, 15 nt, Human
cacguguguuuuucu

SEQ ID NO: 3647889 - RNA, 23 nt, Human
cacguguuuuauuccuguauguu

SEQ ID NO: 3647890 - RNA, 18 nt, Human
cacguuaugguguuucuc

SEQ ID NO: 3647891 - RNA, 19 nt, Human
cacguuccuuacugcagaa

SEQ ID NO: 3647892 - RNA, 20 nt, Human
cacguuccuucccccgcaau

SEQ ID NO: 3647893 - RNA, 18 nt, Human
cacguucucacacccacc

SEQ ID NO: 3647894 - RNA, 22 nt, Human
cacguucucacacccaccgucc

SEQ ID NO: 3647895 - RNA, 21 nt, Human
cacguuggggugauuuaaucc

SEQ ID NO: 3647896 - RNA, 23 nt, Human
cacguuucuaaaggcuaccuuug

SEQ ID NO: 3647897 - RNA, 13 nt, Human
cacguuuuaagga

SEQ ID NO: 3647898 - RNA, 15 nt, Human
cacguuuuaaggacu

SEQ ID NO: 3647899 - RNA, 18 nt, Human
cacguuuucaucucuagg

SEQ ID NO: 3647900 - RNA, 18 nt, Human
cacguuuuguuuugugcc

SEQ ID NO: 3647901 - RNA, 22 nt, Human
cacuaaaaauauuguuucugca

SEQ ID NO: 3647902 - RNA, 12 nt, Human
cacuaaacucug

SEQ ID NO: 3647903 - RNA, 16 nt, Human
cacuaaacucugaaua

SEQ ID NO: 3647904 - RNA, 21 nt, Human
cacuaaagcaggccuuuugau

SEQ ID NO: 3647905 - RNA, 13 nt, Human
cacuaaagcagug

SEQ ID NO: 3647906 - RNA, 17 nt, Human
cacuaaagccagccuga

SEQ ID NO: 3647907 - RNA, 16 nt, Human
cacuaaaguauguaaa

SEQ ID NO: 3647908 - RNA, 22 nt, Human
cacuaaaguauguaaaguaugu

SEQ ID NO: 3647909 - RNA, 11 nt, Human
cacuaaauguu

SEQ ID NO: 3647910 - RNA, 14 nt, Human
cacuaaauguuaaa

SEQ ID NO: 3647911 - RNA, 18 nt, Human
cacuaacauuauauugca

SEQ ID NO: 3647912 - RNA, 22 nt, Human
cacuaaccaagcugaguuuccu

SEQ ID NO: 3647913 - RNA, 14 nt, Human
cacuaaccacgcug

SEQ ID NO: 3647914 - RNA, 13 nt, Human
cacuaaccugacc

SEQ ID NO: 3647915 - RNA, 14 nt, Human
cacuaaccugaccg

SEQ ID NO: 3647916 - RNA, 23 nt, Human
cacuaaccuugccugguacagua

SEQ ID NO: 3647917 - RNA, 14 nt, Human
cacuaacucaccag

SEQ ID NO: 3647918 - RNA, 18 nt, Human
cacuaacucaccagcccc

SEQ ID NO: 3647919 - RNA, 13 nt, Human
cacuaagaacaaa

SEQ ID NO: 3647920 - RNA, 17 nt, Human
cacuaagaacaccugca

SEQ ID NO: 3647921 - RNA, 17 nt, Human
cacuaagagagaaugag

SEQ ID NO: 3647922 - RNA, 14 nt, Human
cacuaagcagagga

SEQ ID NO: 3647923 - RNA, 15 nt, Human
cacuaagcagaggag

SEQ ID NO: 3647924 - RNA, 18 nt, Human
cacuaagcagaggagggg

SEQ ID NO: 3647925 - RNA, 21 nt, Human
cacuaagcagaggaggggccg

SEQ ID NO: 3647926 - RNA, 23 nt, Human
cacuaaggggcccggccagccau

SEQ ID NO: 3647927 - RNA, 20 nt, Human
cacuaagucucuuuuuuaca

SEQ ID NO: 3647928 - RNA, 21 nt, Human
cacuaauauauuuaaaaauaa

SEQ ID NO: 3647929 - RNA, 17 nt, Human
cacuaauugguacuuuu

SEQ ID NO: 3647930 - RNA, 17 nt, Human
cacuaauuugauguuua

SEQ ID NO: 3647931 - RNA, 21 nt, Human
cacuaauuuuaguauucauuc

SEQ ID NO: 3647932 - RNA, 19 nt, Human
cacuaauuuuuguauuauu

SEQ ID NO: 3647933 - RNA, 20 nt, Human
cacuaauuuuuguauuauuu

SEQ ID NO: 3647934 - RNA, 13 nt, Human
augucauuuccuu

SEQ ID NO: 3647935 - RNA, 15 nt, Human
auguccaaagaggcu

SEQ ID NO: 3647936 - RNA, 20 nt, Human
auguccaaagaggcugcccc

SEQ ID NO: 3647937 - RNA, 21 nt, Human
auguccaaagaggcugccccu

SEQ ID NO: 3647938 - RNA, 17 nt, Human
auguccaagaagcccag

SEQ ID NO: 3647939 - RNA, 18 nt, Human
auguccaagaagcccagg

SEQ ID NO: 3647940 - RNA, 16 nt, Human
auguccacugguucuu

SEQ ID NO: 3647941 - RNA, 17 nt, Human
auguccacugguucuuc

SEQ ID NO: 3647942 - RNA, 22 nt, Human
auguccagaagaauauucagga

SEQ ID NO: 3647943 - RNA, 23 nt, Human
auguccagaagaauauucaggac

SEQ ID NO: 3647944 - RNA, 16 nt, Human
auguccagcaccuugu

SEQ ID NO: 3647945 - RNA, 21 nt, Human
auguccagcaccuugugccug

SEQ ID NO: 3647946 - RNA, 16 nt, Human
auguccaguaagauca

SEQ ID NO: 3647947 - RNA, 16 nt, Human
auguccauaaaagaga

SEQ ID NO: 3647948 - RNA, 18 nt, Human
auguccauaaaagagacc

SEQ ID NO: 3647949 - RNA, 17 nt, Human
auuaaauuuuuuuguau

SEQ ID NO: 3647950 - RNA, 23 nt, Human
auuaaauuuuuuuguaugaaaac

SEQ ID NO: 3647951 - RNA, 17 nt, Human
auuaaauuuuuuuuaca

SEQ ID NO: 3647952 - RNA, 19 nt, Human
auuaaauuuuuuuuacauu

SEQ ID NO: 3647953 - RNA, 12 nt, Human
auuaacaaauau

SEQ ID NO: 3647954 - RNA, 15 nt, Human
auuaacaaauaugcu

SEQ ID NO: 3647955 - RNA, 16 nt, Human
auuaacaaauaugcua

SEQ ID NO: 3647956 - RNA, 17 nt, Human
auuaacaaauaugcuaa

SEQ ID NO: 3647957 - RNA, 20 nt, Human
auuaacaaauuauguuacau

SEQ ID NO: 3647958 - RNA, 18 nt, Human
auuaacaacaauaacacu

SEQ ID NO: 3647959 - RNA, 12 nt, Human
auuaacaguuuu

SEQ ID NO: 3647960 - RNA, 23 nt, Human
auuaacauaccuaagaaguacau

SEQ ID NO: 3647961 - RNA, 18 nt, Human
auuaacauaggugaaagu

SEQ ID NO: 3647962 - RNA, 17 nt, Human
auuaacauauaauauau

SEQ ID NO: 3647963 - RNA, 21 nt, Human
auuaacaugcuuaugacaaug

SEQ ID NO: 3647964 - RNA, 15 nt, Human
auuaaccaagguaga

SEQ ID NO: 3647965 - RNA, 18 nt, Human
auuaaccacuucagcuga

SEQ ID NO: 3647966 - RNA, 20 nt, Human
auuaaccacuucagcugacu

SEQ ID NO: 3647967 - RNA, 18 nt, Human
auuaaccccauaauuaga

SEQ ID NO: 3647968 - RNA, 15 nt, Human
auuaaccgaugcuuu

SEQ ID NO: 3647969 - RNA, 13 nt, Human
auuaaccucucac

SEQ ID NO: 3647970 - RNA, 22 nt, Human
auuaaccugccagggagacaga

SEQ ID NO: 3647971 - RNA, 15 nt, Human
auuaacgauguccaa

SEQ ID NO: 3647972 - RNA, 12 nt, Human
auuaacucauua

SEQ ID NO: 3647973 - RNA, 19 nt, Human
auuaacuggguaaugaaac

SEQ ID NO: 3647974 - RNA, 22 nt, Human
auuaacuggguaaugaaacaaa

SEQ ID NO: 3647975 - RNA, 16 nt, Human
auuaacuuaauaauca

SEQ ID NO: 3647976 - RNA, 15 nt, Human
auuaacuuauuuaga

SEQ ID NO: 3647977 - RNA, 13 nt, Human
auuaacuuuaaug

SEQ ID NO: 3647978 - RNA, 15 nt, Human
auuaagaaaaucaua

SEQ ID NO: 3647979 - RNA, 12 nt, Human
auuaagaaagga

SEQ ID NO: 3647980 - RNA, 17 nt, Human
auuaagaaaggaagcau

SEQ ID NO: 3647981 - RNA, 12 nt, Human
auuaagaaauag

SEQ ID NO: 3647982 - RNA, 20 nt, Human
auuaagaaugaaauacuguu

SEQ ID NO: 3647983 - RNA, 21 nt, Human
auuaagaaugaaauacuguuu

SEQ ID NO: 3647984 - RNA, 12 nt, Human
auuaagaauguu

SEQ ID NO: 3647985 - RNA, 18 nt, Human
auuaagaauguucucaau

SEQ ID NO: 3647986 - RNA, 20 nt, Human
auuaagagagucuauuuacg

SEQ ID NO: 3647987 - RNA, 17 nt, Human
auuaagauacaaauuaa

SEQ ID NO: 3647988 - RNA, 21 nt, Human
auuaagauaugggacauuuuu

SEQ ID NO: 3647989 - RNA, 16 nt, Human
auuaagaucucagugg

SEQ ID NO: 3647990 - RNA, 15 nt, Human
auuaagauggauucu

SEQ ID NO: 3647991 - RNA, 13 nt, Human
auuaagauuauaa

SEQ ID NO: 3647992 - RNA, 14 nt, Human
auuaagcaucacaa

SEQ ID NO: 3647993 - RNA, 17 nt, Human
auuaagcaucagaaacu

SEQ ID NO: 3647994 - RNA, 22 nt, Human
auuaagcaugacagaaaauaug

SEQ ID NO: 3647995 - RNA, 15 nt, Human
auuaagccuuccaca

SEQ ID NO: 3647996 - RNA, 20 nt, Human
aaaagugccucaagaggaau

SEQ ID NO: 3647997 - RNA, 23 nt, Human
aaaaguggaauuucuuguuucuc

SEQ ID NO: 3647998 - RNA, 19 nt, Human
aaaaguggcaagaccaaaa

SEQ ID NO: 3647999 - RNA, 18 nt, Human
aaaagugggcuugauucu

SEQ ID NO: 3648000 - RNA, 13 nt, Human
aaaaguggggcag

SEQ ID NO: 3648001 - RNA, 15 nt, Human
aaaaguggggcagag

SEQ ID NO: 3648002 - RNA, 18 nt, Human
aaaagugucaccuuuucu

SEQ ID NO: 3648003 - RNA, 13 nt, Human
aaaaguguccuuc

SEQ ID NO: 3648004 - RNA, 21 nt, Human
aaaaguguuuauuuuucauau

SEQ ID NO: 3648005 - RNA, 16 nt, Human
aaaaguuaaaaaaaau

SEQ ID NO: 3648006 - RNA, 22 nt, Human
aaaaguuaaaaaaaauaauaaa

SEQ ID NO: 3648007 - RNA, 23 nt, Human
aaaaguuaaugcuuaagagggaa

SEQ ID NO: 3648008 - RNA, 15 nt, Human
aaaaguuacagaaau

SEQ ID NO: 3648009 - RNA, 17 nt, Human
aaaaguuauuaauauuu

SEQ ID NO: 3648010 - RNA, 22 nt, Human
aaaaguucauaacagugccauu

SEQ ID NO: 3648011 - RNA, 18 nt, Human
aaaaguucugcagauaaa

SEQ ID NO: 3648012 - RNA, 11 nt, Human
aaaaguucuuu

SEQ ID NO: 3648013 - RNA, 14 nt, Human
aaaaguugaaauua

SEQ ID NO: 3648014 - RNA, 15 nt, Human
aaaaguugcagcugu

SEQ ID NO: 3648015 - RNA, 22 nt, Human
aaaaguugcuauuugaacuuuu

SEQ ID NO: 3648016 - RNA, 21 nt, Human
aaaaguuuaauauuaaagcca

SEQ ID NO: 3648017 - RNA, 22 nt, Human
aaaaguuuaauauuaaagccau

SEQ ID NO: 3648018 - RNA, 23 nt, Human
aaaaguuuaauauuaaagccaug

SEQ ID NO: 3648019 - RNA, 23 nt, Human
aaaaguuuacaacauaaucuagu

SEQ ID NO: 3648020 - RNA, 12 nt, Human
aaaaguuucaau

SEQ ID NO: 3648021 - RNA, 12 nt, Human
aaaaguuuccau

SEQ ID NO: 3648022 - RNA, 23 nt, Human
aaaaguuugaaaagcaauauugu

SEQ ID NO: 3648023 - RNA, 16 nt, Human
aaaaguuugccagaag

SEQ ID NO: 3648024 - RNA, 17 nt, Human
aaaaguuugccagaagu

SEQ ID NO: 3648025 - RNA, 17 nt, Human
aaaaguuuuauuuuucu

SEQ ID NO: 3648026 - RNA, 20 nt, Human
aaaaguuuuuuauuaugcau

SEQ ID NO: 3648027 - RNA, 16 nt, Human
aaaauaaaaaagaucc

SEQ ID NO: 3648028 - RNA, 21 nt, Human
aaaauaaaaaagaucccaaau

SEQ ID NO: 3648029 - RNA, 11 nt, Human
aaaauaaaaac

SEQ ID NO: 3648030 - RNA, 21 nt, Human
aaaauaaaaacccacaaaaau

SEQ ID NO: 3648031 - RNA, 18 nt, Human
aaaauaaaaacuauucga

SEQ ID NO: 3648032 - RNA, 21 nt, Human
aaaauaaaaagcgggcacggg

SEQ ID NO: 3648033 - RNA, 12 nt, Human
aaaauaaaaagu

SEQ ID NO: 3648034 - RNA, 13 nt, Human
aaaauaaaaaguu

SEQ ID NO: 3648035 - RNA, 13 nt, Human
aaaauaaaaaugg

SEQ ID NO: 3648036 - RNA, 13 nt, Human
aaaauaaaacaaa

SEQ ID NO: 3648037 - RNA, 13 nt, Human
aaaauaaaacaua

SEQ ID NO: 3648038 - RNA, 13 nt, Human
aaaauaaaacauu

SEQ ID NO: 3648039 - RNA, 12 nt, Human
aaaauaaaacug

SEQ ID NO: 3648040 - RNA, 17 nt, Human
aaaauaaaacuuuuuaa

SEQ ID NO: 3648041 - RNA, 15 nt, Human
aaaauaaaaggucua

SEQ ID NO: 3648042 - RNA, 13 nt, Human
aaaauaaaauuaa

SEQ ID NO: 3648043 - RNA, 20 nt, Human
aaaauaaacaggucaaugaa

SEQ ID NO: 3648044 - RNA, 21 nt, Human
aaaauaaacuauaaaacaaaa

SEQ ID NO: 3648045 - RNA, 20 nt, Human
aaaauaaagacaaccauauu

SEQ ID NO: 3648046 - RNA, 12 nt, Human
aaaauaaauaaa

SEQ ID NO: 3648047 - RNA, 20 nt, Human
aaaauaaauagcuuaaaauu

SEQ ID NO: 3648048 - RNA, 11 nt, Human
aaaauaaauau

SEQ ID NO: 3648049 - RNA, 14 nt, Human
aaaauaaauauaua

SEQ ID NO: 3648050 - RNA, 15 nt, Human
aaaauaaauauauau

SEQ ID NO: 3648051 - RNA, 12 nt, Human
aaaauaaauuau

SEQ ID NO: 3648052 - RNA, 12 nt, Human
aaaauaaauuga

SEQ ID NO: 3648053 - RNA, 14 nt, Human
aaaauaacacacau

SEQ ID NO: 3648054 - RNA, 20 nt, Human
aaaauaacccuuugguuuuu

SEQ ID NO: 3648055 - RNA, 19 nt, Human
aaaauaaccggauauauac

SEQ ID NO: 3648056 - RNA, 18 nt, Human
aaaauaaccuugcagaag

SEQ ID NO: 3648057 - RNA, 13 nt, Human
aaaauaacuguaa

SEQ ID NO: 3648058 - RNA, 14 nt, Human
aaaauaacuguaau

SEQ ID NO: 3648059 - RNA, 14 nt, Human
aaaauaagaaaaga

SEQ ID NO: 3648060 - RNA, 13 nt, Human
aaaauaagugaau

SEQ ID NO: 3648061 - RNA, 12 nt, Human
aaaauaauaauu

SEQ ID NO: 3648062 - RNA, 21 nt, Human
aaaauaaucuauuucuaugag

SEQ ID NO: 3648063 - RNA, 23 nt, Human
aaaauaaucuauuucuaugagaa

SEQ ID NO: 3648064 - RNA, 18 nt, Human
aaaauaaugucuuguuaa

SEQ ID NO: 3648065 - RNA, 19 nt, Human
aaaauaauuauuuauuaca

SEQ ID NO: 3648066 - RNA, 22 nt, Human
aaaauaauugauuucaagaccu

SEQ ID NO: 3648067 - RNA, 17 nt, Human
aaaauaauuucucuaca

SEQ ID NO: 3648068 - RNA, 18 nt, Human
aaaauaauuuuaaaaaug

SEQ ID NO: 3648069 - RNA, 18 nt, Human
aaaauaauuuuaugaacu

SEQ ID NO: 3648070 - RNA, 13 nt, Human
aaaauaauuuugu

SEQ ID NO: 3648071 - RNA, 21 nt, Human
aaaauaauuuuuauauuugaa

SEQ ID NO: 3648072 - RNA, 16 nt, Human
aaaauacaaaaauuug

SEQ ID NO: 3648073 - RNA, 17 nt, Human
aaaauacaaaaauuugc

SEQ ID NO: 3648074 - RNA, 14 nt, Human
aaaauacaagacug

SEQ ID NO: 3648075 - RNA, 15 nt, Human
aaaauacaauaaacu

SEQ ID NO: 3648076 - RNA, 14 nt, Human
aaaauaccagccag

SEQ ID NO: 3648077 - RNA, 16 nt, Human
aaaauaccucaggaaa

SEQ ID NO: 3648078 - RNA, 20 nt, Human
aaaauaccucaggaaagaau

SEQ ID NO: 3648079 - RNA, 15 nt, Human
aaaauacuauucuga

SEQ ID NO: 3648080 - RNA, 21 nt, Human
aaaauacuauuuaagauguga

SEQ ID NO: 3648081 - RNA, 22 nt, Human
aaaauacuauuuaagaugugaa

SEQ ID NO: 3648082 - RNA, 17 nt, Human
aaaauacucuaauucua

SEQ ID NO: 3648083 - RNA, 20 nt, Human
aaaauacucuaauucuaacc

SEQ ID NO: 3648084 - RNA, 23 nt, Human
aaaauacucuaauucuaaccaga

SEQ ID NO: 3648085 - RNA, 15 nt, Human
aaaauacuguagaua

SEQ ID NO: 3648086 - RNA, 12 nt, Human
aaaauacuucuu

SEQ ID NO: 3648087 - RNA, 18 nt, Human
aaaauacuuugaguuuug

SEQ ID NO: 3648088 - RNA, 11 nt, Human
aaaauacuuuu

SEQ ID NO: 3648089 - RNA, 22 nt, Human
aaaauacuuuuacucugccuac

SEQ ID NO: 3648090 - RNA, 15 nt, Human
aaaauacuuuuccuu

SEQ ID NO: 3648091 - RNA, 15 nt, Human
aaaauagaaaaguua

SEQ ID NO: 3648092 - RNA, 21 nt, Human
aaaauagaaauuuuguaagaa

SEQ ID NO: 3648093 - RNA, 15 nt, Human
aaaauagaagcugua

SEQ ID NO: 3648094 - RNA, 17 nt, Human
aaaauagagaugagcuu

SEQ ID NO: 3648095 - RNA, 23 nt, Human
auuagugauauuucucuaguagu

SEQ ID NO: 3648096 - RNA, 21 nt, Human
auuagugccacuuaauguaug

SEQ ID NO: 3648097 - RNA, 22 nt, Human
auuagugccacuuaauguaugu

SEQ ID NO: 3648098 - RNA, 22 nt, Human
auuagugccagaauuuuaggaa

SEQ ID NO: 3648099 - RNA, 19 nt, Human
auuaguuccccaaauacaa

SEQ ID NO: 3648100 - RNA, 20 nt, Human
auuaguuccccaaauacaaa

SEQ ID NO: 3648101 - RNA, 17 nt, Human
auuaguucuauuucuau

SEQ ID NO: 3648102 - RNA, 13 nt, Human
auuaguugcuuug

SEQ ID NO: 3648103 - RNA, 13 nt, Human
auuaguuuagaac

SEQ ID NO: 3648104 - RNA, 17 nt, Human
auuaguuuagaacaggu

SEQ ID NO: 3648105 - RNA, 18 nt, Human
auuaguuuccuuuuuaau

SEQ ID NO: 3648106 - RNA, 15 nt, Human
auuaguuuucuuguu

SEQ ID NO: 3648107 - RNA, 21 nt, Human
auuaguuuucuuguugcuuug

SEQ ID NO: 3648108 - RNA, 11 nt, Human
auuauaaaaau

SEQ ID NO: 3648109 - RNA, 18 nt, Human
auuauaaaggauaaagaa

SEQ ID NO: 3648110 - RNA, 17 nt, Human
auuauaaauauauauaa

SEQ ID NO: 3648111 - RNA, 19 nt, Human
auuauaaauauauauaaag

SEQ ID NO: 3648112 - RNA, 15 nt, Human
auuauaaaugacaac

SEQ ID NO: 3648113 - RNA, 15 nt, Human
auuauaaauuauguu

SEQ ID NO: 3648114 - RNA, 14 nt, Human
auuauaaccuuaau

SEQ ID NO: 3648115 - RNA, 17 nt, Human
auuauaacuggaaagaa

SEQ ID NO: 3648116 - RNA, 16 nt, Human
auuauaacuuaaaaua

SEQ ID NO: 3648117 - RNA, 22 nt, Human
auuauaacuugucuaaauaagu

SEQ ID NO: 3648118 - RNA, 18 nt, Human
auuauaagcauugaaauu

SEQ ID NO: 3648119 - RNA, 15 nt, Human
auuauaaggacugca

SEQ ID NO: 3648120 - RNA, 18 nt, Human
auuauaaggacugcaugg

SEQ ID NO: 3648121 - RNA, 23 nt, Human
auuauaagggcaaauuggagaaa

SEQ ID NO: 3648122 - RNA, 15 nt, Human
auuauaagucacaaa

SEQ ID NO: 3648123 - RNA, 19 nt, Human
auuauaauaaauauauaca

SEQ ID NO: 3648124 - RNA, 14 nt, Human
auuauaauguauuc

SEQ ID NO: 3648125 - RNA, 19 nt, Human
auuauaauguauucauauu

SEQ ID NO: 3648126 - RNA, 21 nt, Human
auuauaauguauucauauuug

SEQ ID NO: 3648127 - RNA, 15 nt, Human
auuauaauuguugca

SEQ ID NO: 3648128 - RNA, 15 nt, Human
auuauaauuuaaugc

SEQ ID NO: 3648129 - RNA, 13 nt, Human
auuauacaggaaa

SEQ ID NO: 3648130 - RNA, 16 nt, Human
auuauaccaaaauguu

SEQ ID NO: 3648131 - RNA, 19 nt, Human
auuauaccaaaauguugcu

SEQ ID NO: 3648132 - RNA, 14 nt, Human
auuauacgcuggca

SEQ ID NO: 3648133 - RNA, 12 nt, Human
auuauacuguau

SEQ ID NO: 3648134 - RNA, 18 nt, Human
auuauacuguauuaagag

SEQ ID NO: 3648135 - RNA, 13 nt, Human
auuauacugugug

SEQ ID NO: 3648136 - RNA, 20 nt, Human
auuauacuuguaauuaugga

SEQ ID NO: 3648137 - RNA, 17 nt, Human
auuauagagcagaaauu

SEQ ID NO: 3648138 - RNA, 14 nt, Human
auuauagauucuaa

SEQ ID NO: 3648139 - RNA, 17 nt, Human
auuauagauucuaaaga

SEQ ID NO: 3648140 - RNA, 21 nt, Human
auuauagcucuaauguuugca

SEQ ID NO: 3648141 - RNA, 23 nt, Human
auuauagcucuaauguuugcaua

SEQ ID NO: 3648142 - RNA, 21 nt, Human
auuauaggaauaucaauauaa

SEQ ID NO: 3648143 - RNA, 17 nt, Human
auuauaggaucauuugu

SEQ ID NO: 3648144 - RNA, 16 nt, Human
auuauaggccaaacug

SEQ ID NO: 3648145 - RNA, 14 nt, Human
auuauaguguagaa

SEQ ID NO: 3648146 - RNA, 15 nt, Human
auuauaguguagaaa

SEQ ID NO: 3648147 - RNA, 16 nt, Human
auuauaguuucugagg

SEQ ID NO: 3648148 - RNA, 14 nt, Human
auuauauaaguauu

SEQ ID NO: 3648149 - RNA, 20 nt, Human
auuauauacauacugcaucu

SEQ ID NO: 3648150 - RNA, 17 nt, Human
auuauauagcaguaaaa

SEQ ID NO: 3648151 - RNA, 12 nt, Human
auuauauauaua

SEQ ID NO: 3648152 - RNA, 17 nt, Human
auuauauauauaauaua

SEQ ID NO: 3648153 - RNA, 16 nt, Human
auuauaucaagguaaa

SEQ ID NO: 3648154 - RNA, 20 nt, Human
auuauaucugaggaauucug

SEQ ID NO: 3648155 - RNA, 23 nt, Human
auuauauggagacgcuaagaaau

SEQ ID NO: 3648156 - RNA, 20 nt, Human
auuauauggcuugaguuuaa

SEQ ID NO: 3648157 - RNA, 16 nt, Human
auuauauucauucuuu

SEQ ID NO: 3648158 - RNA, 21 nt, Human
auuauauugagacaaaaauua

SEQ ID NO: 3648159 - RNA, 14 nt, Human
auuauauugcaaug

SEQ ID NO: 3648160 - RNA, 18 nt, Human
auuauauuuauuacugua

SEQ ID NO: 3648161 - RNA, 21 nt, Human
auuaucaaguagacuacuguu

SEQ ID NO: 3648162 - RNA, 15 nt, Human
auuaucaauaucuaa

SEQ ID NO: 3648163 - RNA, 19 nt, Human
auuaucaauuaccacacca

SEQ ID NO: 3648164 - RNA, 16 nt, Human
auuaucagcaaagaaa

SEQ ID NO: 3648165 - RNA, 17 nt, Human
auuaucauguguaauca

SEQ ID NO: 3648166 - RNA, 16 nt, Human
cagagacaccugcacc

SEQ ID NO: 3648167 - RNA, 18 nt, Human
cagagacaccugcaccuc

SEQ ID NO: 3648168 - RNA, 20 nt, Human
cagagacaccugcaccuccc

SEQ ID NO: 3648169 - RNA, 22 nt, Human
cagagacaccugcaccuccccc

SEQ ID NO: 3648170 - RNA, 16 nt, Human
cagagacagaaagcag

SEQ ID NO: 3648171 - RNA, 14 nt, Human
cagagacagcugau

SEQ ID NO: 3648172 - RNA, 21 nt, Human
cagagacagcugauacuucau

SEQ ID NO: 3648173 - RNA, 14 nt, Human
cagagacaggaaaa

SEQ ID NO: 3648174 - RNA, 21 nt, Human
cagagacaggaaaauccucug

SEQ ID NO: 3648175 - RNA, 23 nt, Human
cagagacaggaaaauccucuggc

SEQ ID NO: 3648176 - RNA, 16 nt, Human
cagagacauacuugaa

SEQ ID NO: 3648177 - RNA, 19 nt, Human
cagagacauuccuccgagc

SEQ ID NO: 3648178 - RNA, 13 nt, Human
cagagaccagggc

SEQ ID NO: 3648179 - RNA, 21 nt, Human
cagagaccagggcuccagccc

SEQ ID NO: 3648180 - RNA, 12 nt, Human
cagagacccagc

SEQ ID NO: 3648181 - RNA, 15 nt, Human
cagagacccagcgga

SEQ ID NO: 3648182 - RNA, 22 nt, Human
cagagacccagcggacacacgc

SEQ ID NO: 3648183 - RNA, 16 nt, Human
cagagaccguccucac

SEQ ID NO: 3648184 - RNA, 16 nt, Human
cagagaccuccugccu

SEQ ID NO: 3648185 - RNA, 17 nt, Human
cagagaccuuccagaaa

SEQ ID NO: 3648186 - RNA, 21 nt, Human
cagagacucagggccccagca

SEQ ID NO: 3648187 - RNA, 23 nt, Human
cagagacucagggccccagcacu

SEQ ID NO: 3648188 - RNA, 13 nt, Human
cagagacuccugc

SEQ ID NO: 3648189 - RNA, 16 nt, Human
cagagacuccugcagg

SEQ ID NO: 3648190 - RNA, 21 nt, Human
cagagacuccugcaggcagcc

SEQ ID NO: 3648191 - RNA, 22 nt, Human
cagagacuccugcaggcagcca

SEQ ID NO: 3648192 - RNA, 19 nt, Human
cagagagaagagccccacu

SEQ ID NO: 3648193 - RNA, 23 nt, Human
cagagagaagagccccacucuca

SEQ ID NO: 3648194 - RNA, 11 nt, Human
cagagagacag

SEQ ID NO: 3648195 - RNA, 15 nt, Human
cagagagacagacuu

SEQ ID NO: 3648196 - RNA, 17 nt, Human
cagagagacagacuuga

SEQ ID NO: 3648197 - RNA, 12 nt, Human
cagagagaccga

SEQ ID NO: 3648198 - RNA, 21 nt, Human
cagagagagaagugccccugc

SEQ ID NO: 3648199 - RNA, 22 nt, Human
cagagagagaagugccccugcu

SEQ ID NO: 3648200 - RNA, 13 nt, Human
cagagagagagaa

SEQ ID NO: 3648201 - RNA, 20 nt, Human
cagagagcaacucugagauc

SEQ ID NO: 3648202 - RNA, 14 nt, Human
cagagagcagugcu

SEQ ID NO: 3648203 - RNA, 15 nt, Human
cagagagccauuuug

SEQ ID NO: 3648204 - RNA, 23 nt, Human
cagagagccauuuugugaaugga

SEQ ID NO: 3648205 - RNA, 18 nt, Human
cagagagcggucucaggc

SEQ ID NO: 3648206 - RNA, 13 nt, Human
cagagaggaauca

SEQ ID NO: 3648207 - RNA, 18 nt, Human
cagagaggacgugggcgg

SEQ ID NO: 3648208 - RNA, 16 nt, Human
cagagaggagaaacac

SEQ ID NO: 3648209 - RNA, 22 nt, Human
cagagaggagaaacacaucuuc

SEQ ID NO: 3648210 - RNA, 17 nt, Human
cagagaggagucagaga

SEQ ID NO: 3648211 - RNA, 20 nt, Human
cagagaggccuuuuggaaug

SEQ ID NO: 3648212 - RNA, 14 nt, Human
cagagagggcaggc

SEQ ID NO: 3648213 - RNA, 15 nt, Human
cagagagggcaggca

SEQ ID NO: 3648214 - RNA, 17 nt, Human
cagagagggugacaaga

SEQ ID NO: 3648215 - RNA, 22 nt, Human
cagagagggugggagugggccc

SEQ ID NO: 3648216 - RNA, 17 nt, Human
cagagaggguggugacc

SEQ ID NO: 3648217 - RNA, 20 nt, Human
cagagagguuaaggugggua

SEQ ID NO: 3648218 - RNA, 20 nt, Human
cagagagguuugcaguccca

SEQ ID NO: 3648219 - RNA, 18 nt, Human
cagagaguccucuggaug

SEQ ID NO: 3648220 - RNA, 16 nt, Human
cagagauaaagaccuu

SEQ ID NO: 3648221 - RNA, 22 nt, Human
cagagauaguggggagacuucu

SEQ ID NO: 3648222 - RNA, 20 nt, Human
cagagauccaaaagaagccc

SEQ ID NO: 3648223 - RNA, 21 nt, Human
cagagauccaaaagaagcccc

SEQ ID NO: 3648224 - RNA, 13 nt, Human
cagagaugccucc

SEQ ID NO: 3648225 - RNA, 18 nt, Human
cagagaugccuccaccgc

SEQ ID NO: 3648226 - RNA, 14 nt, Human
cagagaugccuccc

SEQ ID NO: 3648227 - RNA, 16 nt, Human
cagagaugccucccug

SEQ ID NO: 3648228 - RNA, 18 nt, Human
cagagaugggacugggag

SEQ ID NO: 3648229 - RNA, 20 nt, Human
cagagauggucauauuuaaa

SEQ ID NO: 3648230 - RNA, 14 nt, Human
cagagaugugcacc

SEQ ID NO: 3648231 - RNA, 16 nt, Human
cagagaugugcaccca

SEQ ID NO: 3648232 - RNA, 14 nt, Human
cagagauucauuuu

SEQ ID NO: 3648233 - RNA, 19 nt, Human
cagagauucauuuucuaga

SEQ ID NO: 3648234 - RNA, 22 nt, Human
cagagauuggaaugggcagcuc

SEQ ID NO: 3648235 - RNA, 19 nt, Human
cagagauuuauauaaaugu

SEQ ID NO: 3648236 - RNA, 20 nt, Human
cagagauuucucauugacuu

SEQ ID NO: 3648237 - RNA, 15 nt, Human
cagagcaaccccugg

SEQ ID NO: 3648238 - RNA, 23 nt, Human
cagagcaaccccuggaccccagc

SEQ ID NO: 3648239 - RNA, 23 nt, Human
cagauuggauuuuauguugacau

SEQ ID NO: 3648240 - RNA, 17 nt, Human
cagauuggcucacacug

SEQ ID NO: 3648241 - RNA, 20 nt, Human
cagauuggcucacacugaga

SEQ ID NO: 3648242 - RNA, 20 nt, Human
cagauuguggaauguuggau

SEQ ID NO: 3648243 - RNA, 17 nt, Human
cagauuguuucuauaca

SEQ ID NO: 3648244 - RNA, 13 nt, Human
cagauuguuugca

SEQ ID NO: 3648245 - RNA, 17 nt, Human
cagauuuagugaaagcu

SEQ ID NO: 3648246 - RNA, 16 nt, Human
cagauuuauuccuuug

SEQ ID NO: 3648247 - RNA, 13 nt, Human
cagauuucacucu

SEQ ID NO: 3648248 - RNA, 18 nt, Human
cagauuucacucuccuug

SEQ ID NO: 3648249 - RNA, 16 nt, Human
cagauuuccagucucc

SEQ ID NO: 3648250 - RNA, 14 nt, Human
cagauuucugagga

SEQ ID NO: 3648251 - RNA, 15 nt, Human
cagauuucugaggaa

SEQ ID NO: 3648252 - RNA, 13 nt, Human
cagauuugcacaa

SEQ ID NO: 3648253 - RNA, 14 nt, Human
cagauuugcacaaa

SEQ ID NO: 3648254 - RNA, 20 nt, Human
cagauuugcacaaaaagaua

SEQ ID NO: 3648255 - RNA, 14 nt, Human
cagauuugucuuuu

SEQ ID NO: 3648256 - RNA, 15 nt, Human
cagauuugugaacuc

SEQ ID NO: 3648257 - RNA, 16 nt, Human
cagauuugugaacuca

SEQ ID NO: 3648258 - RNA, 22 nt, Human
cagauuuuaaaaagucuucacu

SEQ ID NO: 3648259 - RNA, 15 nt, Human
cagauuuuaauuguc

SEQ ID NO: 3648260 - RNA, 15 nt, Human
cagauuuuauuaugu

SEQ ID NO: 3648261 - RNA, 18 nt, Human
cagauuuuauuauguaaa

SEQ ID NO: 3648262 - RNA, 20 nt, Human
cagauuuuauuauguaaauc

SEQ ID NO: 3648263 - RNA, 15 nt, Human
cagauuuucagcaaa

SEQ ID NO: 3648264 - RNA, 19 nt, Human
cagauuuucagcaaacucu

SEQ ID NO: 3648265 - RNA, 15 nt, Human
cagauuuuccugaaa

SEQ ID NO: 3648266 - RNA, 12 nt, Human
cagauuuugaua

SEQ ID NO: 3648267 - RNA, 15 nt, Human
cagauuuugauaacu

SEQ ID NO: 3648268 - RNA, 18 nt, Human
cagauuuugauagcaaag

SEQ ID NO: 3648269 - RNA, 17 nt, Human
cagauuuuggccaugaa

SEQ ID NO: 3648270 - RNA, 21 nt, Human
cagauuuugggguuguguugu

SEQ ID NO: 3648271 - RNA, 17 nt, Human
cagauuuuucggaggcc

SEQ ID NO: 3648272 - RNA, 23 nt, Human
cagauuuuuugaaccauccacuu

SEQ ID NO: 3648273 - RNA, 20 nt, Human
cagcaaaaagcaaaaucauu

SEQ ID NO: 3648274 - RNA, 14 nt, Human
cagcaaaaauauaa

SEQ ID NO: 3648275 - RNA, 13 nt, Human
cagcaaaaccauu

SEQ ID NO: 3648276 - RNA, 17 nt, Human
cagcaaaaccauugcuu

SEQ ID NO: 3648277 - RNA, 19 nt, Human
cagcaaaaccauugcuuca

SEQ ID NO: 3648278 - RNA, 18 nt, Human
cagcaaaagaugcuucuc

SEQ ID NO: 3648279 - RNA, 14 nt, Human
cagcaaacaggugc

SEQ ID NO: 3648280 - RNA, 20 nt, Human
cagcaaacucuuuucccacu

SEQ ID NO: 3648281 - RNA, 13 nt, Human
cagcaaagcccca

SEQ ID NO: 3648282 - RNA, 14 nt, Human
cagcaaagccccca

SEQ ID NO: 3648283 - RNA, 17 nt, Human
cagcaaagcccccagag

SEQ ID NO: 3648284 - RNA, 14 nt, Human
cagcaaaggaaacu

SEQ ID NO: 3648285 - RNA, 23 nt, Human
cagcaaaggaaacuuugcagaug

SEQ ID NO: 3648286 - RNA, 14 nt, Human
cagcaaagugguuc

SEQ ID NO: 3648287 - RNA, 16 nt, Human
cagcaaauccuuugug

SEQ ID NO: 3648288 - RNA, 17 nt, Human
cagcaaauuaauuggca

SEQ ID NO: 3648289 - RNA, 19 nt, Human
cagcaaauuuauaauuuua

SEQ ID NO: 3648290 - RNA, 14 nt, Human
cagcaacaauaaau

SEQ ID NO: 3648291 - RNA, 20 nt, Human
cagcaacaauaaauagacac

SEQ ID NO: 3648292 - RNA, 16 nt, Human
cagcaacacaagcugg

SEQ ID NO: 3648293 - RNA, 17 nt, Human
cagcaacacaagcugga

SEQ ID NO: 3648294 - RNA, 21 nt, Human
cagcaacacaagcuggaagca

SEQ ID NO: 3648295 - RNA, 16 nt, Human
cagcaacacagccugg

SEQ ID NO: 3648296 - RNA, 14 nt, Human
cagcaacagaaaaa

SEQ ID NO: 3648297 - RNA, 15 nt, Human
cagcaaccagagcac

SEQ ID NO: 3648298 - RNA, 20 nt, Human
cagcaaccagagcacuguau

SEQ ID NO: 3648299 - RNA, 13 nt, Human
cagcaaccccagg

SEQ ID NO: 3648300 - RNA, 17 nt, Human
cagcaaccccaggcuga

SEQ ID NO: 3648301 - RNA, 13 nt, Human
cagcaaccuguaa

SEQ ID NO: 3648302 - RNA, 19 nt, Human
cagcaaccuguaagacuga

SEQ ID NO: 3648303 - RNA, 20 nt, Human
cagcaacgaucacaaaugac

SEQ ID NO: 3648304 - RNA, 22 nt, Human
cagcaacgaucacaaaugacuu

SEQ ID NO: 3648305 - RNA, 20 nt, Human
cagcaacuaucagacuaagc

SEQ ID NO: 3648306 - RNA, 21 nt, Human
cagcaacuaucagacuaagcc

SEQ ID NO: 3648307 - RNA, 12 nt, Human
cagcaacugaau

SEQ ID NO: 3648308 - RNA, 14 nt, Human
cagcaacugaauaa

SEQ ID NO: 3648309 - RNA, 20 nt, Human
cagcaacugaauaaauaccu

SEQ ID NO: 3648310 - RNA, 21 nt, Human
cagcaacugaauaaauaccuc

SEQ ID NO: 3648311 - RNA, 20 nt, Human
cagcaacuucuucuccaucc

SEQ ID NO: 3648312 - RNA, 17 nt, Human
cagcaacuuguccuagc

SEQ ID NO: 3648313 - RNA, 20 nt, Human
cagcaacuugucuuuuucug

SEQ ID NO: 3648314 - RNA, 21 nt, Human
cagcaagaaaaaaaaaugcca

SEQ ID NO: 3648315 - RNA, 16 nt, Human
cagcaagaauaaaaaa

SEQ ID NO: 3648316 - RNA, 12 nt, Human
cagcaagagaga

SEQ ID NO: 3648317 - RNA, 15 nt, Human
cagcaagagagaacc

SEQ ID NO: 3648318 - RNA, 17 nt, Human
cagcaagagagaaccua

SEQ ID NO: 3648319 - RNA, 20 nt, Human
cagcaaggaggcuggcuggg

SEQ ID NO: 3648320 - RNA, 21 nt, Human
cagcaaggaggcuggcugggg

SEQ ID NO: 3648321 - RNA, 23 nt, Human
cagcaaggcaccugcagguuggg

SEQ ID NO: 3648322 - RNA, 16 nt, Human
cagcaaggcccgagca

SEQ ID NO: 3648323 - RNA, 21 nt, Human
cagcaaggcccgagcagcuga

SEQ ID NO: 3648324 - RNA, 23 nt, Human
cagcaaggcccgagcagcugagc

SEQ ID NO: 3648325 - RNA, 12 nt, Human
cagcaaggcccu

SEQ ID NO: 3648326 - RNA, 19 nt, Human
cagcaagggugaugggaaa

SEQ ID NO: 3648327 - RNA, 15 nt, Human
cagcaaggucuugcu

SEQ ID NO: 3648328 - RNA, 14 nt, Human
cagcaagugagagc

SEQ ID NO: 3648329 - RNA, 20 nt, Human
cagcaaguuagagaaucugg

SEQ ID NO: 3648330 - RNA, 21 nt, Human
cagcaauaaagcagcguuucu

SEQ ID NO: 3648331 - RNA, 22 nt, Human
cagcaauaaagcagcguuucua

SEQ ID NO: 3648332 - RNA, 15 nt, Human
cagcaauagagacgg

SEQ ID NO: 3648333 - RNA, 19 nt, Human
cagcaauauauuaccagca

SEQ ID NO: 3648334 - RNA, 22 nt, Human
cagcaauauauuaccagcaaga

SEQ ID NO: 3648335 - RNA, 13 nt, Human
cagcaauauuuaa

SEQ ID NO: 3648336 - RNA, 18 nt, Human
cagcaaugauguccagaa

SEQ ID NO: 3648337 - RNA, 15 nt, Human
cagcaauucuccugc

SEQ ID NO: 3648338 - RNA, 16 nt, Human
cagcaauucuccugcc

SEQ ID NO: 3648339 - RNA, 17 nt, Human
cagcaauucuccugccu

SEQ ID NO: 3648340 - RNA, 18 nt, Human
cagcaauucuccugccuc

SEQ ID NO: 3648341 - RNA, 19 nt, Human
cagcaauucuccugccuca

SEQ ID NO: 3648342 - RNA, 20 nt, Human
cagcaauucuccugccucag

SEQ ID NO: 3648343 - RNA, 14 nt, Human
cagcacaaacacaa

SEQ ID NO: 3648344 - RNA, 15 nt, Human
cagcacaaacacaag

SEQ ID NO: 3648345 - RNA, 19 nt, Human
cagcacaaggaaauaaaau

SEQ ID NO: 3648346 - RNA, 14 nt, Human
cagcacacagggca

SEQ ID NO: 3648347 - RNA, 16 nt, Human
cagcacagagaagaca

SEQ ID NO: 3648348 - RNA, 17 nt, Human
cagcacagagaagacaa

SEQ ID NO: 3648349 - RNA, 20 nt, Human
cagcacagagagggggccac

SEQ ID NO: 3648350 - RNA, 19 nt, Human
cagcacagcaaggaggcug

SEQ ID NO: 3648351 - RNA, 13 nt, Human
cagcacagccaac

SEQ ID NO: 3648352 - RNA, 17 nt, Human
cagcacagcuuagauuu

SEQ ID NO: 3648353 - RNA, 16 nt, Human
cagcacagcuugaccu

SEQ ID NO: 3648354 - RNA, 20 nt, Human
cagcacagcuugaccugagg

SEQ ID NO: 3648355 - RNA, 22 nt, Human
cagcacagcuugaccugaggcu

SEQ ID NO: 3648356 - RNA, 16 nt, Human
cagcacaggagggcgg

SEQ ID NO: 3648357 - RNA, 14 nt, Human
cagcacauauuuuc

SEQ ID NO: 3648358 - RNA, 16 nt, Human
cagcacaucucaacag

SEQ ID NO: 3648359 - RNA, 16 nt, Human
cagcacaugcuggcca

SEQ ID NO: 3648360 - RNA, 17 nt, Human
cagcacaugcuggccag

SEQ ID NO: 3648361 - RNA, 21 nt, Human
cagcaccaccaggucucccgg

SEQ ID NO: 3648362 - RNA, 17 nt, Human
cagcaccacccuccuuc

SEQ ID NO: 3648363 - RNA, 19 nt, Human
cagcaccacccuccuuccc

SEQ ID NO: 3648364 - RNA, 20 nt, Human
cagcaccauccgccagggcc

SEQ ID NO: 3648365 - RNA, 22 nt, Human
cagcacccccuucucugcccau

SEQ ID NO: 3648366 - RNA, 13 nt, Human
cagcaccccuucc

SEQ ID NO: 3648367 - RNA, 14 nt, Human
cagcaccccuucca

SEQ ID NO: 3648368 - RNA, 13 nt, Human
cagcaccgccucu

SEQ ID NO: 3648369 - RNA, 15 nt, Human
cagcaccggaccagc

SEQ ID NO: 3648370 - RNA, 20 nt, Human
cagcaccggaccagccuggc

SEQ ID NO: 3648371 - RNA, 21 nt, Human
cagcaccggaccagccuggcc

SEQ ID NO: 3648372 - RNA, 16 nt, Human
cagcaccguucugugc

SEQ ID NO: 3648373 - RNA, 17 nt, Human
cagcaccguucugugca

SEQ ID NO: 3648374 - RNA, 22 nt, Human
auucauggaccacuguuucuug

SEQ ID NO: 3648375 - RNA, 20 nt, Human
auucauggcaugcuuaaauu

SEQ ID NO: 3648376 - RNA, 12 nt, Human
auucauguuucu

SEQ ID NO: 3648377 - RNA, 15 nt, Human
auucauuagcuguga

SEQ ID NO: 3648378 - RNA, 16 nt, Human
auucauuauuugucaa

SEQ ID NO: 3648379 - RNA, 20 nt, Human
auucauuauuuuuccacuuu

SEQ ID NO: 3648380 - RNA, 22 nt, Human
auucauucucauaauuccuaca

SEQ ID NO: 3648381 - RNA, 19 nt, Human
auucauucuggucucucua

SEQ ID NO: 3648382 - RNA, 15 nt, Human
auucauucuuuuuga

SEQ ID NO: 3648383 - RNA, 20 nt, Human
auucauugugguuauuuuua

SEQ ID NO: 3648384 - RNA, 12 nt, Human
cagcauucccag

SEQ ID NO: 3648385 - RNA, 13 nt, Human
cagcauucccagg

SEQ ID NO: 3648386 - RNA, 14 nt, Human
cagcauucccaggu

SEQ ID NO: 3648387 - RNA, 15 nt, Human
cagcauucucacucc

SEQ ID NO: 3648388 - RNA, 22 nt, Human
auucguagauauuggacaaaga

SEQ ID NO: 3648389 - RNA, 12 nt, Human
auucgugaaaac

SEQ ID NO: 3648390 - RNA, 23 nt, Human
auucguggugaucaauuaaaugu

SEQ ID NO: 3648391 - RNA, 22 nt, Human
auucguuguguuuuuuaagaua

SEQ ID NO: 3648392 - RNA, 14 nt, Human
auucuaaaaugccu

SEQ ID NO: 3648393 - RNA, 15 nt, Human
auucuaaagauucua

SEQ ID NO: 3648394 - RNA, 19 nt, Human
auucuaaagauucuauagu

SEQ ID NO: 3648395 - RNA, 12 nt, Human
auucuaaaugua

SEQ ID NO: 3648396 - RNA, 19 nt, Human
auucuaaccagagcaagcu

SEQ ID NO: 3648397 - RNA, 22 nt, Human
auucuaagacuuacucuaagau

SEQ ID NO: 3648398 - RNA, 14 nt, Human
auucuaauaagcua

SEQ ID NO: 3648399 - RNA, 13 nt, Human
auucuaaucuaac

SEQ ID NO: 3648400 - RNA, 23 nt, Human
auucuaaugaugaucaauuauag

SEQ ID NO: 3648401 - RNA, 12 nt, Human
auucuaaugucu

SEQ ID NO: 3648402 - RNA, 13 nt, Human
auucuaaugucuu

SEQ ID NO: 3648403 - RNA, 16 nt, Human
auucuaaugucuucau

SEQ ID NO: 3648404 - RNA, 12 nt, Human
auucuacuugcu

SEQ ID NO: 3648405 - RNA, 19 nt, Human
auucuacuugcucuggacc

SEQ ID NO: 3648406 - RNA, 20 nt, Human
auucuacuugcucuggaccu

SEQ ID NO: 3648407 - RNA, 20 nt, Human
auucuagaugcaagucucuu

SEQ ID NO: 3648408 - RNA, 15 nt, Human
auucuagcuuugagc

SEQ ID NO: 3648409 - RNA, 18 nt, Human
auucuaggccuccuggcc

SEQ ID NO: 3648410 - RNA, 24 nt, Human
auucuauaaaacucugcauguaga

SEQ ID NO: 3648411 - RNA, 15 nt, Human
auucuauaguucuag

SEQ ID NO: 3648412 - RNA, 16 nt, Human
auucuauaguucuaga

SEQ ID NO: 3648413 - RNA, 15 nt, Human
auucuauaugaauuu

SEQ ID NO: 3648414 - RNA, 16 nt, Human
auucuaucucucuuua

SEQ ID NO: 3648415 - RNA, 20 nt, Human
auucuaucuuuuguuuccuu

SEQ ID NO: 3648416 - RNA, 13 nt, Human
auucuauugccuu

SEQ ID NO: 3648417 - RNA, 18 nt, Human
auucuauugccuucuuug

SEQ ID NO: 3648418 - RNA, 19 nt, Human
auucuauugccuucuuuga

SEQ ID NO: 3648419 - RNA, 21 nt, Human
auucuauugccuucuuugaag

SEQ ID NO: 3648420 - RNA, 23 nt, Human
auucuauugccuucuuugaagaa

SEQ ID NO: 3648421 - RNA, 21 nt, Human
auucuauuucaacuucaggaa

SEQ ID NO: 3648422 - RNA, 16 nt, Human
auucuauuuuagaaua

SEQ ID NO: 3648423 - RNA, 14 nt, Human
auucucaaagcagg

SEQ ID NO: 3648424 - RNA, 17 nt, Human
auucucaaaggagcgag

SEQ ID NO: 3648425 - RNA, 15 nt, Human
auucucaagcccugc

SEQ ID NO: 3648426 - RNA, 20 nt, Human
auucucaagccgcaucccag

SEQ ID NO: 3648427 - RNA, 21 nt, Human
auucucaagccgcaucccaga

SEQ ID NO: 3648428 - RNA, 19 nt, Human
auucucacagcuccaagaa

SEQ ID NO: 3648429 - RNA, 15 nt, Human
auucucacuccacca

SEQ ID NO: 3648430 - RNA, 16 nt, Human
auucucacuccaccac

SEQ ID NO: 3648431 - RNA, 14 nt, Human
auucucagaaucuc

SEQ ID NO: 3648432 - RNA, 20 nt, Human
auucucagaaucucaaauaa

SEQ ID NO: 3648433 - RNA, 16 nt, Human
auucucagcagagugc

SEQ ID NO: 3648434 - RNA, 16 nt, Human
auucucagggucucug

SEQ ID NO: 3648435 - RNA, 20 nt, Human
auucucagggucucugcugc

SEQ ID NO: 3648436 - RNA, 22 nt, Human
auucucagggucucugcugccg

SEQ ID NO: 3648437 - RNA, 14 nt, Human
auucucagugccaa

SEQ ID NO: 3648438 - RNA, 15 nt, Human
auucucagugccaac

SEQ ID NO: 3648439 - RNA, 13 nt, Human
auucucaguuuuu

SEQ ID NO: 3648440 - RNA, 17 nt, Human
auucucauaauuccuac

SEQ ID NO: 3648441 - RNA, 18 nt, Human
auucucauaauuccuaca

SEQ ID NO: 3648442 - RNA, 19 nt, Human
auucucauaauuccuacag

SEQ ID NO: 3648443 - RNA, 20 nt, Human
auucucaucugcacccuucu

SEQ ID NO: 3648444 - RNA, 21 nt, Human
auucucaucugcacccuucuu

SEQ ID NO: 3648445 - RNA, 22 nt, Human
auucucaucugcacccuucuuu

SEQ ID NO: 3648446 - RNA, 22 nt, Human
auucucaugccucagccuccug

SEQ ID NO: 3648447 - RNA, 16 nt, Human
auucucauugcagaau

SEQ ID NO: 3648448 - RNA, 21 nt, Human
auucucauuggaaauuuagca

SEQ ID NO: 3648449 - RNA, 13 nt, Human
auucuccacagca

SEQ ID NO: 3648450 - RNA, 13 nt, Human
auucuccaccugc

SEQ ID NO: 3648451 - RNA, 13 nt, Human
auucuccacugug

SEQ ID NO: 3648452 - RNA, 23 nt, Human
auucuccagccaucaagagacug

SEQ ID NO: 3648453 - RNA, 21 nt, Human
auucucccagguaccagcugc

SEQ ID NO: 3648454 - RNA, 18 nt, Human
auucucccgggacucugc

SEQ ID NO: 3648455 - RNA, 15 nt, Human
auucucccuugcucu

SEQ ID NO: 3648456 - RNA, 11 nt, Human
auucuccuccu

SEQ ID NO: 3648457 - RNA, 20 nt, Human
auucuccugccucagccucc

SEQ ID NO: 3648458 - RNA, 19 nt, Human
auucuccuggaugcuuaga

SEQ ID NO: 3648459 - RNA, 13 nt, Human
auucuccuucagc

SEQ ID NO: 3648460 - RNA, 14 nt, Human
auucuccuucagcc

SEQ ID NO: 3648461 - RNA, 17 nt, Human
auucuccuucagcccuc

SEQ ID NO: 3648462 - RNA, 23 nt, Human
auucuccuucagcccucaccccu

SEQ ID NO: 3648463 - RNA, 16 nt, Human
auucuccuuguguuac

SEQ ID NO: 3648464 - RNA, 17 nt, Human
auucuccuuguguuacu

SEQ ID NO: 3648465 - RNA, 22 nt, Human
auucuccuuguguuacuaaguu

SEQ ID NO: 3648466 - RNA, 17 nt, Human
auucuccuuuuaugugu

SEQ ID NO: 3648467 - RNA, 19 nt, Human
auucuccuuuuauguguag

SEQ ID NO: 3648468 - RNA, 21 nt, Human
auucuccuuuuuaccccucua

SEQ ID NO: 3648469 - RNA, 17 nt, Human
auucucuaauaagaaaa

SEQ ID NO: 3648470 - RNA, 17 nt, Human
auucucuaguuugauua

SEQ ID NO: 3648471 - RNA, 20 nt, Human
auucucuaguuugauuaaau

SEQ ID NO: 3648472 - RNA, 20 nt, Human
auucucuauuugaauuauuu

SEQ ID NO: 3648473 - RNA, 22 nt, Human
auucucuauuugaauuauuucu

SEQ ID NO: 3648474 - RNA, 19 nt, Human
auucucuccaaaaaugcac

SEQ ID NO: 3648475 - RNA, 22 nt, Human
auucucuccucagacugcucaa

SEQ ID NO: 3648476 - RNA, 16 nt, Human
auucucuccuguaccu

SEQ ID NO: 3648477 - RNA, 12 nt, Human
auucucucuccu

SEQ ID NO: 3648478 - RNA, 15 nt, Human
auucucucuccuguc

SEQ ID NO: 3648479 - RNA, 17 nt, Human
auucucucuccugucca

SEQ ID NO: 3648480 - RNA, 21 nt, Human
auucucuggcuguaaggcucu

SEQ ID NO: 3648481 - RNA, 17 nt, Human
auucucuguacauauua

SEQ ID NO: 3648482 - RNA, 14 nt, Human
auucucugucucau

SEQ ID NO: 3648483 - RNA, 19 nt, Human
auucucugucucauccauc

SEQ ID NO: 3648484 - RNA, 21 nt, Human
auucucugugucuaagauucu

SEQ ID NO: 3648485 - RNA, 23 nt, Human
auucucugugucuaagauucuag

SEQ ID NO: 3648486 - RNA, 15 nt, Human
auucucuuauccaac

SEQ ID NO: 3648487 - RNA, 17 nt, Human
auucucuugccucagcu

SEQ ID NO: 3648488 - RNA, 14 nt, Human
auucucuuucaaag

SEQ ID NO: 3648489 - RNA, 20 nt, Human
auucucuuugguguacaaaa

SEQ ID NO: 3648490 - RNA, 19 nt, Human
auucucuuuuaucuguuua

SEQ ID NO: 3648491 - RNA, 17 nt, Human
auucugaagccauuguc

SEQ ID NO: 3648492 - RNA, 20 nt, Human
auucugaaguuauauuuccu

SEQ ID NO: 3648493 - RNA, 14 nt, Human
auucugaauuugca

SEQ ID NO: 3648494 - RNA, 17 nt, Human
auucugaauuugcaaag

SEQ ID NO: 3648495 - RNA, 20 nt, Human
auucugaauuugcaaaguac

SEQ ID NO: 3648496 - RNA, 20 nt, Human
auucugacucgguuucucca

SEQ ID NO: 3648497 - RNA, 14 nt, Human
auucugagaccaaa

SEQ ID NO: 3648498 - RNA, 14 nt, Human
auucugagagcugu

SEQ ID NO: 3648499 - RNA, 22 nt, Human
auucugaguuuuguguuuguug

SEQ ID NO: 3648500 - RNA, 14 nt, Human
auucugauuacaca

SEQ ID NO: 3648501 - RNA, 21 nt, Human
auucugauucgaaugacacug

SEQ ID NO: 3648502 - RNA, 14 nt, Human
auucugcaaguaua

SEQ ID NO: 3648503 - RNA, 20 nt, Human
auucugcaguaaaucuuuua

SEQ ID NO: 3648504 - RNA, 22 nt, Human
auucugcauugcuagauaaaag

SEQ ID NO: 3648505 - RNA, 13 nt, Human
auucugcccugug

SEQ ID NO: 3648506 - RNA, 20 nt, Human
auucugccgcccccuccuga

SEQ ID NO: 3648507 - RNA, 22 nt, Human
auucugccgcccccuccugaac

SEQ ID NO: 3648508 - RNA, 15 nt, Human
auucugccucucuag

SEQ ID NO: 3648509 - RNA, 16 nt, Human
auucugccucucuagg

SEQ ID NO: 3648510 - RNA, 13 nt, Human
auucugccugccc

SEQ ID NO: 3648511 - RNA, 15 nt, Human
auucugccugcccag

SEQ ID NO: 3648512 - RNA, 19 nt, Human
auucugccugcccaggccc

SEQ ID NO: 3648513 - RNA, 16 nt, Human
auucugccuuugccag

SEQ ID NO: 3648514 - RNA, 22 nt, Human
auucugcgucaugcuuguguua

SEQ ID NO: 3648515 - RNA, 19 nt, Human
auucugcucacauaucugu

SEQ ID NO: 3648516 - RNA, 20 nt, Human
auucugcucacauaucuguc

SEQ ID NO: 3648517 - RNA, 13 nt, Human
auucugcuggccu

SEQ ID NO: 3648518 - RNA, 18 nt, Human
auucugcuggccucugcg

SEQ ID NO: 3648519 - RNA, 19 nt, Human
auucugcuggccucugcga

SEQ ID NO: 3648520 - RNA, 14 nt, Human
auucugcugucuca

SEQ ID NO: 3648521 - RNA, 13 nt, Human
auucugcuugaga

SEQ ID NO: 3648522 - RNA, 15 nt, Human
auucuggacaggaug

SEQ ID NO: 3648523 - RNA, 18 nt, Human
auucuggacagucagcuc

SEQ ID NO: 3648524 - RNA, 22 nt, Human
auucuggacagucagcucuuca

SEQ ID NO: 3648525 - RNA, 12 nt, Human
auucuggaguca

SEQ ID NO: 3648526 - RNA, 14 nt, Human
auucuggccagacu

SEQ ID NO: 3648527 - RNA, 23 nt, Human
auucuggccuagucccuuccaca

SEQ ID NO: 3648528 - RNA, 22 nt, Human
cagauguuuuacgucugggaga

SEQ ID NO: 3648529 - RNA, 23 nt, Human
cagauguuuuggucaaguaguuu

SEQ ID NO: 3648530 - RNA, 14 nt, Human
cagauuacugccca

SEQ ID NO: 3648531 - RNA, 16 nt, Human
cagauuauuuuggaaa

SEQ ID NO: 3648532 - RNA, 13 nt, Human
cagauucaauuuu

SEQ ID NO: 3648533 - RNA, 14 nt, Human
cagauucacacugu

SEQ ID NO: 3648534 - RNA, 17 nt, Human
cagauucagaaaugagg

SEQ ID NO: 3648535 - RNA, 20 nt, Human
cagauucagucuugccuuac

SEQ ID NO: 3648536 - RNA, 14 nt, Human
cagauucccagagc

SEQ ID NO: 3648537 - RNA, 18 nt, Human
cagauucccagagcaaaa

SEQ ID NO: 3648538 - RNA, 14 nt, Human
cagauuccuuuccc

SEQ ID NO: 3648539 - RNA, 16 nt, Human
cagauuccuuucccuu

SEQ ID NO: 3648540 - RNA, 20 nt, Human
cagauuccuuucccuuuagc

SEQ ID NO: 3648541 - RNA, 15 nt, Human
cagauucuuuccuga

SEQ ID NO: 3648542 - RNA, 19 nt, Human
cagauucuuuccugaggcu

SEQ ID NO: 3648543 - RNA, 12 nt, Human
cagauucuuuua

SEQ ID NO: 3648544 - RNA, 14 nt, Human
cagauugaaaagga

SEQ ID NO: 3648545 - RNA, 23 nt, Human
cagauugagaccuacaggcugac

SEQ ID NO: 3648546 - RNA, 19 nt, Human
cagauugcaacaggcuggg

SEQ ID NO: 3648547 - RNA, 16 nt, Human
cagauugcaugugacu

SEQ ID NO: 3648548 - RNA, 15 nt, Human
cagauuggauuuuau

SEQ ID NO: 3648549 - RNA, 18 nt, Human
cagauuggcucacacuga

SEQ ID NO: 3648550 - RNA, 22 nt, Human
cagauuggcucacacugagaau

SEQ ID NO: 3648551 - RNA, 17 nt, Human
cagauuguggaauguug

SEQ ID NO: 3648552 - RNA, 18 nt, Human
cagauuguggaauguugg

SEQ ID NO: 3648553 - RNA, 13 nt, Human
cagauuuaauaca

SEQ ID NO: 3648554 - RNA, 13 nt, Human
cagauuuacacug

SEQ ID NO: 3648555 - RNA, 14 nt, Human
cagauuuacacugg

SEQ ID NO: 3648556 - RNA, 17 nt, Human
cagauuuacacugggag

SEQ ID NO: 3648557 - RNA, 18 nt, Human
cagauuuacacugggaga

SEQ ID NO: 3648558 - RNA, 20 nt, Human
cagauuuagugaaagcuaga

SEQ ID NO: 3648559 - RNA, 13 nt, Human
cagauuuaugcau

SEQ ID NO: 3648560 - RNA, 22 nt, Human
cagauuuauuccuuuguuacuu

SEQ ID NO: 3648561 - RNA, 19 nt, Human
cagauuucacucuccuugg

SEQ ID NO: 3648562 - RNA, 16 nt, Human
cagauuucucuuugaa

SEQ ID NO: 3648563 - RNA, 17 nt, Human
cagauuucugaggaaau

SEQ ID NO: 3648564 - RNA, 19 nt, Human
cagauuugaacucuucaau

SEQ ID NO: 3648565 - RNA, 16 nt, Human
cagauuugagcucagc

SEQ ID NO: 3648566 - RNA, 17 nt, Human
cagauuugcacaaaaag

SEQ ID NO: 3648567 - RNA, 12 nt, Human
cagauuugugaa

SEQ ID NO: 3648568 - RNA, 14 nt, Human
cagauuugugaacu

SEQ ID NO: 3648569 - RNA, 17 nt, Human
cagauuugugaacucag

SEQ ID NO: 3648570 - RNA, 14 nt, Human
cagauuuguguuau

SEQ ID NO: 3648571 - RNA, 23 nt, Human
cagauuuuaauuuugaauaaaua

SEQ ID NO: 3648572 - RNA, 14 nt, Human
cagauuuuacaaaa

SEQ ID NO: 3648573 - RNA, 17 nt, Human
cagauuuuacaaaagau

SEQ ID NO: 3648574 - RNA, 18 nt, Human
cagauuuuacaaaagaug

SEQ ID NO: 3648575 - RNA, 18 nt, Human
cagauuuuaggaaaugaa

SEQ ID NO: 3648576 - RNA, 15 nt, Human
cagauuuuaguuuua

SEQ ID NO: 3648577 - RNA, 17 nt, Human
cagauuuuaguuuuauu

SEQ ID NO: 3648578 - RNA, 22 nt, Human
cagauuuuaguuuuauuuucua

SEQ ID NO: 3648579 - RNA, 16 nt, Human
cagauuuuauuaugua

SEQ ID NO: 3648580 - RNA, 13 nt, Human
cagauuuucagca

SEQ ID NO: 3648581 - RNA, 18 nt, Human
cagauuuugauaacuguu

SEQ ID NO: 3648582 - RNA, 19 nt, Human
cagauuuugauagcaaagc

SEQ ID NO: 3648583 - RNA, 20 nt, Human
cagauuuugauagcaaagcg

SEQ ID NO: 3648584 - RNA, 19 nt, Human
cagauuuugcuguauauuu

SEQ ID NO: 3648585 - RNA, 23 nt, Human
cagauuuugcuguauauuuguga

SEQ ID NO: 3648586 - RNA, 20 nt, Human
cagauuuugggguuguguug

SEQ ID NO: 3648587 - RNA, 23 nt, Human
cagauuuuguuggcauagcucug

SEQ ID NO: 3648588 - RNA, 15 nt, Human
cagauuuuuacaaau

SEQ ID NO: 3648589 - RNA, 16 nt, Human
cagauuuuuacacaug

SEQ ID NO: 3648590 - RNA, 23 nt, Human
cagauuuuuauauuaguugcuuu

SEQ ID NO: 3648591 - RNA, 20 nt, Human
cagauuuuuuuuggacuguu

SEQ ID NO: 3648592 - RNA, 13 nt, Human
cagcaaaaagcaa

SEQ ID NO: 3648593 - RNA, 15 nt, Human
cagcaaaaagcaaaa

SEQ ID NO: 3648594 - RNA, 16 nt, Human
cagcucccucugccug

SEQ ID NO: 3648595 - RNA, 19 nt, Human
cagcucccugccaaacuga

SEQ ID NO: 3648596 - RNA, 14 nt, Human
cagcucccugugcc

SEQ ID NO: 3648597 - RNA, 19 nt, Human
cagcucccugugcccccag

SEQ ID NO: 3648598 - RNA, 22 nt, Human
cagcuccggcguguguucagug

SEQ ID NO: 3648599 - RNA, 15 nt, Human
cagcuccucauccag

SEQ ID NO: 3648600 - RNA, 20 nt, Human
cagcuccucauccagggcuc

SEQ ID NO: 3648601 - RNA, 15 nt, Human
cagcuccucugucuc

SEQ ID NO: 3648602 - RNA, 18 nt, Human
cagcuccucugucucgag

SEQ ID NO: 3648603 - RNA, 15 nt, Human
cagcuccugaccagu

SEQ ID NO: 3648604 - RNA, 20 nt, Human
cagcuccugaccaguugcag

SEQ ID NO: 3648605 - RNA, 15 nt, Human
cagcuccuuccuagc

SEQ ID NO: 3648606 - RNA, 20 nt, Human
cagcuccuuccuagccuugc

SEQ ID NO: 3648607 - RNA, 21 nt, Human
cagcuccuucuguccuacucu

SEQ ID NO: 3648608 - RNA, 23 nt, Human
cagcuccuucuguccuacucugu

SEQ ID NO: 3648609 - RNA, 16 nt, Human
cagcuccuugggagga

SEQ ID NO: 3648610 - RNA, 16 nt, Human
cagcuccuuuuccaga

SEQ ID NO: 3648611 - RNA, 21 nt, Human
cagcuccuuuuccagagcauu

SEQ ID NO: 3648612 - RNA, 18 nt, Human
cagcucgauccaaauugu

SEQ ID NO: 3648613 - RNA, 20 nt, Human
cagcucgauccaaauugugc

SEQ ID NO: 3648614 - RNA, 22 nt, Human
cagcucgauccaaauugugcuu

SEQ ID NO: 3648615 - RNA, 13 nt, Human
cagcucggcucag

SEQ ID NO: 3648616 - RNA, 15 nt, Human
cagcucggcucagcu

SEQ ID NO: 3648617 - RNA, 17 nt, Human
cagcucuagacaacccu

SEQ ID NO: 3648618 - RNA, 20 nt, Human
cagcucuagacacugccaca

SEQ ID NO: 3648619 - RNA, 19 nt, Human
cagcucucaugcugccccu

SEQ ID NO: 3648620 - RNA, 16 nt, Human
cagcucuccccuucuc

SEQ ID NO: 3648621 - RNA, 16 nt, Human
cagcucucccucuggc

SEQ ID NO: 3648622 - RNA, 20 nt, Human
cagcucucccucuggcccug

SEQ ID NO: 3648623 - RNA, 13 nt, Human
cagcucucuguau

SEQ ID NO: 3648624 - RNA, 12 nt, Human
cagcucugaaag

SEQ ID NO: 3648625 - RNA, 18 nt, Human
cagcucugacuuuacacu

SEQ ID NO: 3648626 - RNA, 18 nt, Human
cagcucuggaggggaggg

SEQ ID NO: 3648627 - RNA, 13 nt, Human
cagcucuggcuca

SEQ ID NO: 3648628 - RNA, 12 nt, Human
cagcucugggcc

SEQ ID NO: 3648629 - RNA, 22 nt, Human
cagcucugggccauucuccaca

SEQ ID NO: 3648630 - RNA, 10 nt, Human
cagcucuggu

SEQ ID NO: 3648631 - RNA, 16 nt, Human
cagcucugguccauag

SEQ ID NO: 3648632 - RNA, 17 nt, Human
cagcucugguccauaga

SEQ ID NO: 3648633 - RNA, 18 nt, Human
cagcucugguccauagag

SEQ ID NO: 3648634 - RNA, 21 nt, Human
cagcucugguccauagagagc

SEQ ID NO: 3648635 - RNA, 23 nt, Human
cagcucugguccauagagagcaa

SEQ ID NO: 3648636 - RNA, 12 nt, Human
cagcucuguccu

SEQ ID NO: 3648637 - RNA, 13 nt, Human
cagcucuguccug

SEQ ID NO: 3648638 - RNA, 14 nt, Human
cagcucuguccugg

SEQ ID NO: 3648639 - RNA, 23 nt, Human
cagcucuguucuuccucagccag

SEQ ID NO: 3648640 - RNA, 15 nt, Human
cagcucuuaaaugua

SEQ ID NO: 3648641 - RNA, 10 nt, Human
cagcucuuau

SEQ ID NO: 3648642 - RNA, 21 nt, Human
cagcucuuauauugccauuuc

SEQ ID NO: 3648643 - RNA, 19 nt, Human
cagcucuucaucugcccaa

SEQ ID NO: 3648644 - RNA, 20 nt, Human
cagcucuuccuagcuggaga

SEQ ID NO: 3648645 - RNA, 16 nt, Human
cagcucuucuccaggc

SEQ ID NO: 3648646 - RNA, 13 nt, Human
cagcucuucugcc

SEQ ID NO: 3648647 - RNA, 22 nt, Human
cagcucuucugccggcccuggg

SEQ ID NO: 3648648 - RNA, 18 nt, Human
cagcucuugcccuucccu

SEQ ID NO: 3648649 - RNA, 19 nt, Human
cagcucuugcccuucccug

SEQ ID NO: 3648650 - RNA, 24 nt, Human
cagcucuugcuaaucagugucuca

SEQ ID NO: 3648651 - RNA, 18 nt, Human
cagcucuuuccuccuucc

SEQ ID NO: 3648652 - RNA, 21 nt, Human
cagcucuuuccuccuuccaug

SEQ ID NO: 3648653 - RNA, 11 nt, Human
cagcucuuuuu

SEQ ID NO: 3648654 - RNA, 19 nt, Human
cagcugaaauaugcuggcu

SEQ ID NO: 3648655 - RNA, 21 nt, Human
cagcugaaauaugcuggcugg

SEQ ID NO: 3648656 - RNA, 21 nt, Human
cagcugaaugccuccuguggg

SEQ ID NO: 3648657 - RNA, 23 nt, Human
cagcugaaugccuccugugggga

SEQ ID NO: 3648658 - RNA, 15 nt, Human
cagcugacaguccuc

SEQ ID NO: 3648659 - RNA, 21 nt, Human
cagcugacaguccucuccacc

SEQ ID NO: 3648660 - RNA, 14 nt, Human
cagcugacaucuug

SEQ ID NO: 3648661 - RNA, 17 nt, Human
cagcugaccucuguugu

SEQ ID NO: 3648662 - RNA, 18 nt, Human
cagcugaccucuguuguc

SEQ ID NO: 3648663 - RNA, 16 nt, Human
cagcugaccuuuguca

SEQ ID NO: 3648664 - RNA, 22 nt, Human
cagcugagaaaaugagugacua

SEQ ID NO: 3648665 - RNA, 21 nt, Human
cagcugagagacuuuuaauca

SEQ ID NO: 3648666 - RNA, 14 nt, Human
cagcugagaggcug

SEQ ID NO: 3648667 - RNA, 22 nt, Human
cagcugagcacauucuggcuca

SEQ ID NO: 3648668 - RNA, 13 nt, Human
cagcugagcaggg

SEQ ID NO: 3648669 - RNA, 18 nt, Human
cagcugagccuucugagc

SEQ ID NO: 3648670 - RNA, 18 nt, Human
cagcugagcgccaggaug

SEQ ID NO: 3648671 - RNA, 12 nt, Human
cagcugaggcug

SEQ ID NO: 3648672 - RNA, 23 nt, Human
cagcugaggcugggggagagccg

SEQ ID NO: 3648673 - RNA, 17 nt, Human
cagcaguuugggagguc

SEQ ID NO: 3648674 - RNA, 20 nt, Human
cagcaguuuucaagucaaau

SEQ ID NO: 3648675 - RNA, 12 nt, Human
cagcauaaagaa

SEQ ID NO: 3648676 - RNA, 14 nt, Human
cagcauaagggagc

SEQ ID NO: 3648677 - RNA, 13 nt, Human
cagcauaauacuu

SEQ ID NO: 3648678 - RNA, 17 nt, Human
cagcauagaaguaacuu

SEQ ID NO: 3648679 - RNA, 22 nt, Human
cagcauauucaggaagcucagg

SEQ ID NO: 3648680 - RNA, 14 nt, Human
cagcaucaccugcc

SEQ ID NO: 3648681 - RNA, 16 nt, Human
cagcaucaccugccug

SEQ ID NO: 3648682 - RNA, 13 nt, Human
cagcaucacuccc

SEQ ID NO: 3648683 - RNA, 19 nt, Human
cagcaucacuccccaagga

SEQ ID NO: 3648684 - RNA, 19 nt, Human
cagcauccccuugaacucu

SEQ ID NO: 3648685 - RNA, 23 nt, Human
cagcaucccuugaccaggccugg

SEQ ID NO: 3648686 - RNA, 12 nt, Human
cagcauccgcag

SEQ ID NO: 3648687 - RNA, 17 nt, Human
cagcauccuggcacccg

SEQ ID NO: 3648688 - RNA, 23 nt, Human
cagcauccuuuucugcagagggg

SEQ ID NO: 3648689 - RNA, 21 nt, Human
cagcaucuccaagcagcuuag

SEQ ID NO: 3648690 - RNA, 22 nt, Human
cagcaucuccaagcagcuuaga

SEQ ID NO: 3648691 - RNA, 23 nt, Human
cagcaucucuaccuucuccccag

SEQ ID NO: 3648692 - RNA, 24 nt, Human
cagcaucuggaagagcuaggcagg

SEQ ID NO: 3648693 - RNA, 13 nt, Human
cagcaucugggcc

SEQ ID NO: 3648694 - RNA, 16 nt, Human
cagcaucugggccuug

SEQ ID NO: 3648695 - RNA, 19 nt, Human
cagcaucugggccuuggcc

SEQ ID NO: 3648696 - RNA, 22 nt, Human
cagcaucugggccuuggccugg

SEQ ID NO: 3648697 - RNA, 21 nt, Human
cagcaucuuaccuucauaugc

SEQ ID NO: 3648698 - RNA, 12 nt, Human
cagcaugaaaau

SEQ ID NO: 3648699 - RNA, 18 nt, Human
cagcaugaauuuguaaug

SEQ ID NO: 3648700 - RNA, 20 nt, Human
cagcaugacauaacagugca

SEQ ID NO: 3648701 - RNA, 15 nt, Human
cagcaugaggacaga

SEQ ID NO: 3648702 - RNA, 22 nt, Human
cagcaugaggacagaccacaga

SEQ ID NO: 3648703 - RNA, 16 nt, Human
cagcaugcaauacaua

SEQ ID NO: 3648704 - RNA, 18 nt, Human
cagcauggucccugccuu

SEQ ID NO: 3648705 - RNA, 21 nt, Human
cagcauguacggauuuucagu

SEQ ID NO: 3648706 - RNA, 14 nt, Human
cagcaugugcccuc

SEQ ID NO: 3648707 - RNA, 17 nt, Human
cagcauguugcugagga

SEQ ID NO: 3648708 - RNA, 18 nt, Human
cagcauguugcugaggag

SEQ ID NO: 3648709 - RNA, 23 nt, Human
cagcauucccagguaggccaagg

SEQ ID NO: 3648710 - RNA, 14 nt, Human
cagcauucccuccc

SEQ ID NO: 3648711 - RNA, 14 nt, Human
cagcauucucacuc

SEQ ID NO: 3648712 - RNA, 18 nt, Human
cagcauucuuagccugug

SEQ ID NO: 3648713 - RNA, 21 nt, Human
cagcauucuuagccuguggca

SEQ ID NO: 3648714 - RNA, 19 nt, Human
cagcauucuugucacaaua

SEQ ID NO: 3648715 - RNA, 22 nt, Human
cagcauucuugucacaauaaau

SEQ ID NO: 3648716 - RNA, 21 nt, Human
cagcauugauauuugugcauu

SEQ ID NO: 3648717 - RNA, 15 nt, Human
cagcauugcugguuc

SEQ ID NO: 3648718 - RNA, 16 nt, Human
cagcauugcugguucu

SEQ ID NO: 3648719 - RNA, 12 nt, Human
cagcauugcuuu

SEQ ID NO: 3648720 - RNA, 13 nt, Human
cagcauugcuuuc

SEQ ID NO: 3648721 - RNA, 14 nt, Human
cagcauugcuuucu

SEQ ID NO: 3648722 - RNA, 21 nt, Human
cagcauuuagcuggccacaug

SEQ ID NO: 3648723 - RNA, 13 nt, Human
cagcauuucacuu

SEQ ID NO: 3648724 - RNA, 20 nt, Human
cagcauuuccacaccaagca

SEQ ID NO: 3648725 - RNA, 15 nt, Human
cagcauuucccuucc

SEQ ID NO: 3648726 - RNA, 16 nt, Human
cagcauuucugaagug

SEQ ID NO: 3648727 - RNA, 16 nt, Human
cagcauuucuuuucug

SEQ ID NO: 3648728 - RNA, 16 nt, Human
cagcauuuguguguua

SEQ ID NO: 3648729 - RNA, 19 nt, Human
cagccaaacacacagaagg

SEQ ID NO: 3648730 - RNA, 16 nt, Human
cagccaaacccugucu

SEQ ID NO: 3648731 - RNA, 21 nt, Human
cagccaaagccuccuccagcc

SEQ ID NO: 3648732 - RNA, 15 nt, Human
cagccaaaggcuggc

SEQ ID NO: 3648733 - RNA, 20 nt, Human
cagccaacagcuacaacagc

SEQ ID NO: 3648734 - RNA, 18 nt, Human
cagccaacagguggcagg

SEQ ID NO: 3648735 - RNA, 19 nt, Human
cagccaacagguggcagga

SEQ ID NO: 3648736 - RNA, 16 nt, Human
cagccaaccccugugg

SEQ ID NO: 3648737 - RNA, 17 nt, Human
cagccaacuagccccug

SEQ ID NO: 3648738 - RNA, 13 nt, Human
cagccaagcacag

SEQ ID NO: 3648739 - RNA, 21 nt, Human
cagccaaggccgaagcucugg

SEQ ID NO: 3648740 - RNA, 22 nt, Human
cagccaaggccgaagcucuggc

SEQ ID NO: 3648741 - RNA, 23 nt, Human
cagccaaggccgaagcucuggcu

SEQ ID NO: 3648742 - RNA, 23 nt, Human
cagccaagguuuuauaaggcuga

SEQ ID NO: 3648743 - RNA, 12 nt, Human
cagccacacaca

SEQ ID NO: 3648744 - RNA, 13 nt, Human
cagccacacacac

SEQ ID NO: 3648745 - RNA, 19 nt, Human
cagccacacacacagaaaa

SEQ ID NO: 3648746 - RNA, 22 nt, Human
cagccacacacacagaaaauau

SEQ ID NO: 3648747 - RNA, 15 nt, Human
cagccacacccaggc

SEQ ID NO: 3648748 - RNA, 19 nt, Human
cagccacacccaggcacuu

SEQ ID NO: 3648749 - RNA, 19 nt, Human
cagccacacuucucaggac

SEQ ID NO: 3648750 - RNA, 20 nt, Human
cagccacacuucucaggaca

SEQ ID NO: 3648751 - RNA, 21 nt, Human
cagccacacuucucaggacac

SEQ ID NO: 3648752 - RNA, 21 nt, Human
cagccaccccgggcucucugc

SEQ ID NO: 3648753 - RNA, 18 nt, Human
cagccacccugaggaguc

SEQ ID NO: 3648754 - RNA, 21 nt, Human
cagccaccgaagccgccugug

SEQ ID NO: 3648755 - RNA, 16 nt, Human
cagccaccuaaacggu

SEQ ID NO: 3648756 - RNA, 15 nt, Human
cagccaccucucuuu

SEQ ID NO: 3648757 - RNA, 16 nt, Human
cagccaccucucuuuu

SEQ ID NO: 3648758 - RNA, 18 nt, Human
cagccacgaggugcaaca

SEQ ID NO: 3648759 - RNA, 16 nt, Human
cagccacggccaggcc

SEQ ID NO: 3648760 - RNA, 19 nt, Human
cagccacggccaggccaga

SEQ ID NO: 3648761 - RNA, 19 nt, Human
cagccacuaagaaccccuc

SEQ ID NO: 3648762 - RNA, 14 nt, Human
cagccacucagaaa

SEQ ID NO: 3648763 - RNA, 14 nt, Human
cagccacuccccag

SEQ ID NO: 3648764 - RNA, 15 nt, Human
caggaaaaggccugg

SEQ ID NO: 3648765 - RNA, 18 nt, Human
caggaaaaggccuggggu

SEQ ID NO: 3648766 - RNA, 16 nt, Human
caggaaaauccucugg

SEQ ID NO: 3648767 - RNA, 13 nt, Human
caggaaaccaaca

SEQ ID NO: 3648768 - RNA, 22 nt, Human
caggaaacuccacaucugccuu

SEQ ID NO: 3648769 - RNA, 23 nt, Human
caggaaacuccacaucugccuua

SEQ ID NO: 3648770 - RNA, 20 nt, Human
caggaaagcgccuccaaccc

SEQ ID NO: 3648771 - RNA, 15 nt, Human
caggaaaggcuccag

SEQ ID NO: 3648772 - RNA, 21 nt, Human
caggaaaggcuccaggagcag

SEQ ID NO: 3648773 - RNA, 21 nt, Human
caggaaagggaaggccccaca

SEQ ID NO: 3648774 - RNA, 16 nt, Human
caggaaaguggccaag

SEQ ID NO: 3648775 - RNA, 18 nt, Human
caggaaaguguuauuuuu

SEQ ID NO: 3648776 - RNA, 16 nt, Human
caggaaaguucagagu

SEQ ID NO: 3648777 - RNA, 18 nt, Human
caggaaaguucagaguuu

SEQ ID NO: 3648778 - RNA, 13 nt, Human
caggaaauauaua

SEQ ID NO: 3648779 - RNA, 15 nt, Human
caggaaauauauaug

SEQ ID NO: 3648780 - RNA, 22 nt, Human
caggaaaucaaauaugcaaagc

SEQ ID NO: 3648781 - RNA, 21 nt, Human
caggaaaugaaaaugucuugu

SEQ ID NO: 3648782 - RNA, 23 nt, Human
caggaaaugcugacccaugggca

SEQ ID NO: 3648783 - RNA, 21 nt, Human
caggaacaaucgauggccuug

SEQ ID NO: 3648784 - RNA, 12 nt, Human
caggaacagaag

SEQ ID NO: 3648785 - RNA, 14 nt, Human
caggaacagaagga

SEQ ID NO: 3648786 - RNA, 18 nt, Human
caggaacagaaggaugaa

SEQ ID NO: 3648787 - RNA, 22 nt, Human
caggaacagcuaugggagcccc

SEQ ID NO: 3648788 - RNA, 23 nt, Human
caggaacagcuaugggagcccca

SEQ ID NO: 3648789 - RNA, 18 nt, Human
caggaaccacaagacugc

SEQ ID NO: 3648790 - RNA, 23 nt, Human
caggaaccauaguugacaguucc

SEQ ID NO: 3648791 - RNA, 19 nt, Human
caggaaccucgaguacugu

SEQ ID NO: 3648792 - RNA, 20 nt, Human
caggaaccucgaguacugug

SEQ ID NO: 3648793 - RNA, 15 nt, Human
caggaacucccagca

SEQ ID NO: 3648794 - RNA, 14 nt, Human
caggaagaaaucac

SEQ ID NO: 3648795 - RNA, 17 nt, Human
caggaagaucccccaga

SEQ ID NO: 3648796 - RNA, 19 nt, Human
caggaagaucccccagaaa

SEQ ID NO: 3648797 - RNA, 18 nt, Human
caggaagaucuuaaauuu

SEQ ID NO: 3648798 - RNA, 16 nt, Human
caggaagcaccccaug

SEQ ID NO: 3648799 - RNA, 14 nt, Human
caggaagcagcuuu

SEQ ID NO: 3648800 - RNA, 18 nt, Human
caggaagcauucagagag

SEQ ID NO: 3648801 - RNA, 14 nt, Human
caggaagccagcag

SEQ ID NO: 3648802 - RNA, 16 nt, Human
caggaagccagcaggc

SEQ ID NO: 3648803 - RNA, 16 nt, Human
caggaagcccaauugc

SEQ ID NO: 3648804 - RNA, 19 nt, Human
caggaagcccccaaguuga

SEQ ID NO: 3648805 - RNA, 23 nt, Human
caggaagcucagggccuggcuca

SEQ ID NO: 3648806 - RNA, 13 nt, Human
caggaaggagagc

SEQ ID NO: 3648807 - RNA, 17 nt, Human
caggaaggagagccugc

SEQ ID NO: 3648808 - RNA, 18 nt, Human
caggaaggagagccugcu

SEQ ID NO: 3648809 - RNA, 13 nt, Human
caggaaggagcug

SEQ ID NO: 3648810 - RNA, 18 nt, Human
caggaaggagcugccugg

SEQ ID NO: 3648811 - RNA, 20 nt, Human
caggaaggagcugccuggac

SEQ ID NO: 3648812 - RNA, 22 nt, Human
caggaaggagcugccuggaccc

SEQ ID NO: 3648813 - RNA, 12 nt, Human
caggaaggccug

SEQ ID NO: 3648814 - RNA, 15 nt, Human
caggaaggccugggu

SEQ ID NO: 3648815 - RNA, 19 nt, Human
caggaaggcugagaggaga

SEQ ID NO: 3648816 - RNA, 22 nt, Human
caggaaggcuuguugugcuuuu

SEQ ID NO: 3648817 - RNA, 19 nt, Human
cagcucucugcccugugua

SEQ ID NO: 3648818 - RNA, 16 nt, Human
cagcucucuguauaaa

SEQ ID NO: 3648819 - RNA, 18 nt, Human
cagcucucuguauaaaca

SEQ ID NO: 3648820 - RNA, 19 nt, Human
cagcucugaaaccaguguu

SEQ ID NO: 3648821 - RNA, 14 nt, Human
cagcucugacauuc

SEQ ID NO: 3648822 - RNA, 16 nt, Human
cagcucugcaagaauu

SEQ ID NO: 3648823 - RNA, 21 nt, Human
cagcucugcaagaauugaagc

SEQ ID NO: 3648824 - RNA, 21 nt, Human
cagcucugcaggcuuaauaaa

SEQ ID NO: 3648825 - RNA, 16 nt, Human
auuucugguucugaug

SEQ ID NO: 3648826 - RNA, 17 nt, Human
auuucugguucugaugc

SEQ ID NO: 3648827 - RNA, 21 nt, Human
auuucugucacaguaaaaaua

SEQ ID NO: 3648828 - RNA, 13 nt, Human
auuucugugggag

SEQ ID NO: 3648829 - RNA, 16 nt, Human
auuucugugggagaau

SEQ ID NO: 3648830 - RNA, 15 nt, Human
auuucuguguugcca

SEQ ID NO: 3648831 - RNA, 23 nt, Human
auuucuguguugccaagcuccaa

SEQ ID NO: 3648832 - RNA, 19 nt, Human
auuucuguuuagauaauac

SEQ ID NO: 3648833 - RNA, 20 nt, Human
auuucuguuuagauaauaca

SEQ ID NO: 3648834 - RNA, 21 nt, Human
auuucuguuuagauaauacac

SEQ ID NO: 3648835 - RNA, 13 nt, Human
auuucuuaaacaa

SEQ ID NO: 3648836 - RNA, 23 nt, Human
auuucuuaaauaaugcuucagau

SEQ ID NO: 3648837 - RNA, 19 nt, Human
auuucuuaacuucuugcuu

SEQ ID NO: 3648838 - RNA, 19 nt, Human
auuucuuaauuauuauaaa

SEQ ID NO: 3648839 - RNA, 21 nt, Human
auuucuuauauaugugaacau

SEQ ID NO: 3648840 - RNA, 18 nt, Human
auuucuuaugugacauua

SEQ ID NO: 3648841 - RNA, 21 nt, Human
auuucuucagucagaaaacuu

SEQ ID NO: 3648842 - RNA, 23 nt, Human
auuucuuccacaagagcccaggc

SEQ ID NO: 3648843 - RNA, 13 nt, Human
auuucuucucaaa

SEQ ID NO: 3648844 - RNA, 22 nt, Human
auuucuucuccuggaguugcau

SEQ ID NO: 3648845 - RNA, 21 nt, Human
auuucuugaguuuuguuuuaa

SEQ ID NO: 3648846 - RNA, 21 nt, Human
auuucuugcucuaucucucaa

SEQ ID NO: 3648847 - RNA, 14 nt, Human
auuucuugggcccu

SEQ ID NO: 3648848 - RNA, 16 nt, Human
auuucuugggcccucc

SEQ ID NO: 3648849 - RNA, 17 nt, Human
auuucuugggcccuccu

SEQ ID NO: 3648850 - RNA, 19 nt, Human
auuucuuuauauuuaucca

SEQ ID NO: 3648851 - RNA, 17 nt, Human
auuucuuugccuguuca

SEQ ID NO: 3648852 - RNA, 14 nt, Human
auuucuuugcugua

SEQ ID NO: 3648853 - RNA, 20 nt, Human
auuucuuuucuuuuuacaua

SEQ ID NO: 3648854 - RNA, 23 nt, Human
auuucuuuuugggagagacuugu

SEQ ID NO: 3648855 - RNA, 21 nt, Human
auuucuuuuuuaaaugaagaa

SEQ ID NO: 3648856 - RNA, 16 nt, Human
auuucuuuuuuuccuu

SEQ ID NO: 3648857 - RNA, 16 nt, Human
auuugaaaaaaacuuc

SEQ ID NO: 3648858 - RNA, 22 nt, Human
auuugaaaaaaacuucauucuc

SEQ ID NO: 3648859 - RNA, 14 nt, Human
auuugaaaaauaua

SEQ ID NO: 3648860 - RNA, 20 nt, Human
auuugaaaacagaaauuggu

SEQ ID NO: 3648861 - RNA, 16 nt, Human
auuugaaaauuuugau

SEQ ID NO: 3648862 - RNA, 14 nt, Human
auuugaaacacugg

SEQ ID NO: 3648863 - RNA, 17 nt, Human
auuugaaacacugguuu

SEQ ID NO: 3648864 - RNA, 19 nt, Human
auuugaaacauugcuuuua

SEQ ID NO: 3648865 - RNA, 20 nt, Human
auuugaaacauugcuuuuaa

SEQ ID NO: 3648866 - RNA, 20 nt, Human
auuugaaagugccuuugcag

SEQ ID NO: 3648867 - RNA, 15 nt, Human
auuugaaauuuagcu

SEQ ID NO: 3648868 - RNA, 17 nt, Human
auuugaacaaugaaguu

SEQ ID NO: 3648869 - RNA, 18 nt, Human
auuugaacaaugaaguug

SEQ ID NO: 3648870 - RNA, 22 nt, Human
auuugaacauguggcuugaauu

SEQ ID NO: 3648871 - RNA, 15 nt, Human
auuugaaccaaaaca

SEQ ID NO: 3648872 - RNA, 20 nt, Human
auuugaacuuuuuauugauu

SEQ ID NO: 3648873 - RNA, 21 nt, Human
auuugaagacaaaaauacucu

SEQ ID NO: 3648874 - RNA, 13 nt, Human
auuugaaggccag

SEQ ID NO: 3648875 - RNA, 14 nt, Human
auuugaaucagccu

SEQ ID NO: 3648876 - RNA, 16 nt, Human
auuugaaucuugucuc

SEQ ID NO: 3648877 - RNA, 11 nt, Human
auuugaaugaa

SEQ ID NO: 3648878 - RNA, 17 nt, Human
auuugaaugauuuuucu

SEQ ID NO: 3648879 - RNA, 15 nt, Human
auuugaaugcauuuu

SEQ ID NO: 3648880 - RNA, 16 nt, Human
auuugaaugcauuuug

SEQ ID NO: 3648881 - RNA, 17 nt, Human
auuugaauguaugcuuc

SEQ ID NO: 3648882 - RNA, 18 nt, Human
auuugaauguaugcuuca

SEQ ID NO: 3648883 - RNA, 16 nt, Human
auuugacauagucugg

SEQ ID NO: 3648884 - RNA, 13 nt, Human
auuugacuaauuu

SEQ ID NO: 3648885 - RNA, 14 nt, Human
auuugacuaauuuu

SEQ ID NO: 3648886 - RNA, 15 nt, Human
auuugacuaauuuua

SEQ ID NO: 3648887 - RNA, 13 nt, Human
auuugacuauucu

SEQ ID NO: 3648888 - RNA, 18 nt, Human
auuugacuguuuuuaccc

SEQ ID NO: 3648889 - RNA, 18 nt, Human
auuugacuugcaugaaga

SEQ ID NO: 3648890 - RNA, 13 nt, Human
auuugacuugugg

SEQ ID NO: 3648891 - RNA, 15 nt, Human
auuugacuuuucugu

SEQ ID NO: 3648892 - RNA, 19 nt, Human
auuugagaaaauaaagcua

SEQ ID NO: 3648893 - RNA, 12 nt, Human
auuugagaaaug

SEQ ID NO: 3648894 - RNA, 14 nt, Human
auuugagaauauaa

SEQ ID NO: 3648895 - RNA, 22 nt, Human
auuugaggagcagcuucaguug

SEQ ID NO: 3648896 - RNA, 20 nt, Human
auuugaggauuuagaagugu

SEQ ID NO: 3648897 - RNA, 22 nt, Human
auuugaggauuuagaaguguca

SEQ ID NO: 3648898 - RNA, 22 nt, Human
auuugaggucaaguaagaagac

SEQ ID NO: 3648899 - RNA, 15 nt, Human
auuugaggucuguuc

SEQ ID NO: 3648900 - RNA, 17 nt, Human
auuugaggucuguucuu

SEQ ID NO: 3648901 - RNA, 22 nt, Human
auuugaguaaucugaucguucu

SEQ ID NO: 3648902 - RNA, 23 nt, Human
auuugaguaaucugaucguucuu

SEQ ID NO: 3648903 - RNA, 12 nt, Human
auuugaguguuu

SEQ ID NO: 3648904 - RNA, 13 nt, Human
auuugauacuuau

SEQ ID NO: 3648905 - RNA, 19 nt, Human
auuugauacuuauauuuuc

SEQ ID NO: 3648906 - RNA, 15 nt, Human
auuugaugaaagcug

SEQ ID NO: 3648907 - RNA, 21 nt, Human
auuugaugaaagcugauuacu

SEQ ID NO: 3648908 - RNA, 16 nt, Human
auuugaugcuggagag

SEQ ID NO: 3648909 - RNA, 18 nt, Human
auuugauguaauacuucu

SEQ ID NO: 3648910 - RNA, 14 nt, Human
auuugauuaacaaa

SEQ ID NO: 3648911 - RNA, 16 nt, Human
auuugauuaacaaaua

SEQ ID NO: 3648912 - RNA, 15 nt, Human
auuugauucaaaaua

SEQ ID NO: 3648913 - RNA, 20 nt, Human
auuugauucaaaauauuuaa

SEQ ID NO: 3648914 - RNA, 18 nt, Human
auuugauuuauuaacuua

SEQ ID NO: 3648915 - RNA, 13 nt, Human
auuugauuucuau

SEQ ID NO: 3648916 - RNA, 22 nt, Human
auuugauuuuucuaaccuugaa

SEQ ID NO: 3648917 - RNA, 15 nt, Human
auuugcaaaguacug

SEQ ID NO: 3648918 - RNA, 19 nt, Human
auuugcaaaguacuguaag

SEQ ID NO: 3648919 - RNA, 14 nt, Human
auuugcaacauuua

SEQ ID NO: 3648920 - RNA, 15 nt, Human
auuugcaagggaaaa

SEQ ID NO: 3648921 - RNA, 20 nt, Human
auuugcaagggaaaagucuc

SEQ ID NO: 3648922 - RNA, 16 nt, Human
auuugcaauaacagcu

SEQ ID NO: 3648923 - RNA, 23 nt, Human
auuugcacagaagcacaugcacc

SEQ ID NO: 3648924 - RNA, 15 nt, Human
auuugcacauuaaau

SEQ ID NO: 3648925 - RNA, 17 nt, Human
auuugcauacauucuuc

SEQ ID NO: 3648926 - RNA, 15 nt, Human
auuugcauauguaug

SEQ ID NO: 3648927 - RNA, 21 nt, Human
auuugcauggcuccagaaaug

SEQ ID NO: 3648928 - RNA, 14 nt, Human
auuugcauguuaug

SEQ ID NO: 3648929 - RNA, 15 nt, Human
auuugcauguuaugu

SEQ ID NO: 3648930 - RNA, 18 nt, Human
auuugcauuaaauucaca

SEQ ID NO: 3648931 - RNA, 23 nt, Human
auuugcauuaaauucacaaacuu

SEQ ID NO: 3648932 - RNA, 12 nt, Human
auuugcauuugu

SEQ ID NO: 3648933 - RNA, 22 nt, Human
auuugcauuuguuuauguaauu

SEQ ID NO: 3648934 - RNA, 23 nt, Human
auuugcauuuguuuauguaauuu

SEQ ID NO: 3648935 - RNA, 17 nt, Human
auuugccaaaauaaugu

SEQ ID NO: 3648936 - RNA, 20 nt, Human
auuugccaaaauaaugucuu

SEQ ID NO: 3648937 - RNA, 21 nt, Human
auuugccauagaguacacugc

SEQ ID NO: 3648938 - RNA, 19 nt, Human
auuugccaugggcuucacu

SEQ ID NO: 3648939 - RNA, 15 nt, Human
auuugcccauuuaca

SEQ ID NO: 3648940 - RNA, 13 nt, Human
auuugccuguaac

SEQ ID NO: 3648941 - RNA, 16 nt, Human
auuugccuguaacaag

SEQ ID NO: 3648942 - RNA, 21 nt, Human
auuugccuguuucugcuugcu

SEQ ID NO: 3648943 - RNA, 13 nt, Human
auuugccuugcag

SEQ ID NO: 3648944 - RNA, 17 nt, Human
auuugccuugcagaacu

SEQ ID NO: 3648945 - RNA, 19 nt, Human
auuugccuugcagaacugc

SEQ ID NO: 3648946 - RNA, 21 nt, Human
auuugccuugcagaacugcca

SEQ ID NO: 3648947 - RNA, 15 nt, Human
auuugccuugcugga

SEQ ID NO: 3648948 - RNA, 23 nt, Human
auuugcggcgucagucuuuuucu

SEQ ID NO: 3648949 - RNA, 23 nt, Human
auuugcuaaucaaagccaggguc

SEQ ID NO: 3648950 - RNA, 16 nt, Human
auuugcuacuguugua

SEQ ID NO: 3648951 - RNA, 17 nt, Human
auuugcuaucaaaauaa

SEQ ID NO: 3648952 - RNA, 15 nt, Human
auuugcucauaugaa

SEQ ID NO: 3648953 - RNA, 18 nt, Human
auuugcucuucagaugcc

SEQ ID NO: 3648954 - RNA, 23 nt, Human
auuugcugacaaccauuaaaguc

SEQ ID NO: 3648955 - RNA, 14 nt, Human
auuugcugccaaau

SEQ ID NO: 3648956 - RNA, 13 nt, Human
auuugcugccauu

SEQ ID NO: 3648957 - RNA, 12 nt, Human
auuugcugcuga

SEQ ID NO: 3648958 - RNA, 12 nt, Human
auuugcuucauu

SEQ ID NO: 3648959 - RNA, 14 nt, Human
auuugcuucauugu

SEQ ID NO: 3648960 - RNA, 11 nt, Human
auuugcuuuuu

SEQ ID NO: 3648961 - RNA, 17 nt, Human
caggacuaacacucaga

SEQ ID NO: 3648962 - RNA, 16 nt, Human
caggacuauagcccag

SEQ ID NO: 3648963 - RNA, 17 nt, Human
caggacuauagcccagg

SEQ ID NO: 3648964 - RNA, 22 nt, Human
caggacucacagguuggaagag

SEQ ID NO: 3648965 - RNA, 19 nt, Human
caggacuccccaggccagg

SEQ ID NO: 3648966 - RNA, 15 nt, Human
caggacucccuccuc

SEQ ID NO: 3648967 - RNA, 22 nt, Human
caggacucccuccucaccucug

SEQ ID NO: 3648968 - RNA, 16 nt, Human
caggacuccuccccac

SEQ ID NO: 3648969 - RNA, 17 nt, Human
caggacucugcagccuc

SEQ ID NO: 3648970 - RNA, 19 nt, Human
caggacugaauugucccca

SEQ ID NO: 3648971 - RNA, 17 nt, Human
caggacugaugucuccu

SEQ ID NO: 3648972 - RNA, 13 nt, Human
caggacugcacag

SEQ ID NO: 3648973 - RNA, 13 nt, Human
caggacugggagc

SEQ ID NO: 3648974 - RNA, 14 nt, Human
caggacugggagcc

SEQ ID NO: 3648975 - RNA, 13 nt, Human
caggacugggcca

SEQ ID NO: 3648976 - RNA, 15 nt, Human
caggacugggccacu

SEQ ID NO: 3648977 - RNA, 14 nt, Human
caggacuguccccu

SEQ ID NO: 3648978 - RNA, 15 nt, Human
caggacuguuucaaa

SEQ ID NO: 3648979 - RNA, 17 nt, Human
caggacuguuucaaaca

SEQ ID NO: 3648980 - RNA, 15 nt, Human
caggacuuaaaauga

SEQ ID NO: 3648981 - RNA, 23 nt, Human
caggacuuaacggcuccaggauu

SEQ ID NO: 3648982 - RNA, 21 nt, Human
caggacuuccccggagggcug

SEQ ID NO: 3648983 - RNA, 20 nt, Human
caggacuuggucugauuuca

SEQ ID NO: 3648984 - RNA, 20 nt, Human
caggagaagaaagaggugac

SEQ ID NO: 3648985 - RNA, 19 nt, Human
caggagaagaaccugaaga

SEQ ID NO: 3648986 - RNA, 15 nt, Human
caggagaagcucagc

SEQ ID NO: 3648987 - RNA, 21 nt, Human
caggagaaggccaauuccuau

SEQ ID NO: 3648988 - RNA, 23 nt, Human
caggagacacugugcuauaaauc

SEQ ID NO: 3648989 - RNA, 15 nt, Human
caggagacaggaagg

SEQ ID NO: 3648990 - RNA, 12 nt, Human
caggagacaucc

SEQ ID NO: 3648991 - RNA, 18 nt, Human
caggagagagaaagccag

SEQ ID NO: 3648992 - RNA, 20 nt, Human
caggagagagaaagccaggc

SEQ ID NO: 3648993 - RNA, 20 nt, Human
caggagagauuauuuacaag

SEQ ID NO: 3648994 - RNA, 16 nt, Human
caggagagccagcccu

SEQ ID NO: 3648995 - RNA, 21 nt, Human
caggagagccagcccucccug

SEQ ID NO: 3648996 - RNA, 22 nt, Human
caggagagcuuagggucucagg

SEQ ID NO: 3648997 - RNA, 15 nt, Human
caggagaggagagcc

SEQ ID NO: 3648998 - RNA, 18 nt, Human
caggagaggagagccaga

SEQ ID NO: 3648999 - RNA, 19 nt, Human
caggagaggagagccagag

SEQ ID NO: 3649000 - RNA, 20 nt, Human
caggagaggagagccagaga

SEQ ID NO: 3649001 - RNA, 20 nt, Human
caggagaggagcgggaccug

SEQ ID NO: 3649002 - RNA, 12 nt, Human
caggagagggaa

SEQ ID NO: 3649003 - RNA, 17 nt, Human
caggagaggggcagaac

SEQ ID NO: 3649004 - RNA, 16 nt, Human
caggagaugcugugcc

SEQ ID NO: 3649005 - RNA, 19 nt, Human
caggagaugcugugccccu

SEQ ID NO: 3649006 - RNA, 20 nt, Human
caggagauugagaaggagag

SEQ ID NO: 3649007 - RNA, 21 nt, Human
caggagauugagaaggagaga

SEQ ID NO: 3649008 - RNA, 19 nt, Human
caggagcaaauguuucugc

SEQ ID NO: 3649009 - RNA, 19 nt, Human
caggagcacacccagcccc

SEQ ID NO: 3649010 - RNA, 23 nt, Human
caggagcacaggcagcuggauga

SEQ ID NO: 3649011 - RNA, 23 nt, Human
caggagcagccucagaacaaagu

SEQ ID NO: 3649012 - RNA, 15 nt, Human
caggagccccgaggc

SEQ ID NO: 3649013 - RNA, 18 nt, Human
caggagccgaagcccagg

SEQ ID NO: 3649014 - RNA, 12 nt, Human
caggagccuggc

SEQ ID NO: 3649015 - RNA, 11 nt, Human
caggagccugu

SEQ ID NO: 3649016 - RNA, 16 nt, Human
caggagccugugccuc

SEQ ID NO: 3649017 - RNA, 15 nt, Human
caggagcgcaagaua

SEQ ID NO: 3649018 - RNA, 23 nt, Human
caggagcuccaguguccugagcu

SEQ ID NO: 3649019 - RNA, 19 nt, Human
caggagcuccauacacacg

SEQ ID NO: 3649020 - RNA, 18 nt, Human
caggagcucuucaggccu

SEQ ID NO: 3649021 - RNA, 23 nt, Human
caggagcugggcagaaggccaag

SEQ ID NO: 3649022 - RNA, 21 nt, Human
caggagcugucaccaaggaaa

SEQ ID NO: 3649023 - RNA, 12 nt, Human
caggagcuuccu

SEQ ID NO: 3649024 - RNA, 15 nt, Human
caggaggacccaggg

SEQ ID NO: 3649025 - RNA, 20 nt, Human
caggaggacccagggcucug

SEQ ID NO: 3649026 - RNA, 21 nt, Human
caggaggacugccccgugcag

SEQ ID NO: 3649027 - RNA, 15 nt, Human
caggaggaggugcca

SEQ ID NO: 3649028 - RNA, 18 nt, Human
caggaggcaagcaagcuc

SEQ ID NO: 3649029 - RNA, 15 nt, Human
caggaggcaggcaug

SEQ ID NO: 3649030 - RNA, 20 nt, Human
caggaggcagggaggcagcc

SEQ ID NO: 3649031 - RNA, 17 nt, Human
caggaggccaagguggg

SEQ ID NO: 3649032 - RNA, 13 nt, Human
auuuuuguaucua

SEQ ID NO: 3649033 - RNA, 16 nt, Human
auuuuugucucagaag

SEQ ID NO: 3649034 - RNA, 22 nt, Human
auuuuugugauuuugugauuga

SEQ ID NO: 3649035 - RNA, 22 nt, Human
auuuuuguuggagccacucugu

SEQ ID NO: 3649036 - RNA, 16 nt, Human
auuuuuguuucuaccu

SEQ ID NO: 3649037 - RNA, 22 nt, Human
auuuuuguuucuuccaaagcac

SEQ ID NO: 3649038 - RNA, 17 nt, Human
auuuuuguuuguuuugu

SEQ ID NO: 3649039 - RNA, 21 nt, Human
auuuuuguuuuuauuaaaagg

SEQ ID NO: 3649040 - RNA, 14 nt, Human
auuuuuuaaaaaag

SEQ ID NO: 3649041 - RNA, 17 nt, Human
auuuuuuaaaaaagcuu

SEQ ID NO: 3649042 - RNA, 19 nt, Human
auuuuuuaaaaaagcuuaa

SEQ ID NO: 3649043 - RNA, 16 nt, Human
auuuuuuaaaaagcaa

SEQ ID NO: 3649044 - RNA, 15 nt, Human
auuuuuuaaaacaag

SEQ ID NO: 3649045 - RNA, 17 nt, Human
auuuuuuaaaacaagaa

SEQ ID NO: 3649046 - RNA, 21 nt, Human
auuuuuuaaaagagacaaacu

SEQ ID NO: 3649047 - RNA, 17 nt, Human
auuuuuuaaguauuuau

SEQ ID NO: 3649048 - RNA, 19 nt, Human
auuuuuuaaguauuuauau

SEQ ID NO: 3649049 - RNA, 22 nt, Human
auuuuuuaaguauuuauauauu

SEQ ID NO: 3649050 - RNA, 15 nt, Human
auuuuuuaauuauua

SEQ ID NO: 3649051 - RNA, 20 nt, Human
auuuuuuaauuauuauuuau

SEQ ID NO: 3649052 - RNA, 19 nt, Human
auuuuuuaauuuaaagcuu

SEQ ID NO: 3649053 - RNA, 13 nt, Human
auuuuuuaggaaa

SEQ ID NO: 3649054 - RNA, 17 nt, Human
auuuuuuauaaaauaca

SEQ ID NO: 3649055 - RNA, 20 nt, Human
auuuuuuauauauaugcaua

SEQ ID NO: 3649056 - RNA, 13 nt, Human
auuuuuuauugcu

SEQ ID NO: 3649057 - RNA, 14 nt, Human
auuuuuuauugcua

SEQ ID NO: 3649058 - RNA, 12 nt, Human
auuuuuuauugu

SEQ ID NO: 3649059 - RNA, 13 nt, Human
auuuuuuauuguu

SEQ ID NO: 3649060 - RNA, 12 nt, Human
auuuuuucagac

SEQ ID NO: 3649061 - RNA, 14 nt, Human
auuuuuucaguugu

SEQ ID NO: 3649062 - RNA, 21 nt, Human
auuuuuucauuucaaaaugcu

SEQ ID NO: 3649063 - RNA, 13 nt, Human
auuuuuucccaaa

SEQ ID NO: 3649064 - RNA, 14 nt, Human
auuuuuuccuguuu

SEQ ID NO: 3649065 - RNA, 20 nt, Human
auuuuuuccuucaaaguuua

SEQ ID NO: 3649066 - RNA, 23 nt, Human
auuuuuuccuucaaaguuuaaua

SEQ ID NO: 3649067 - RNA, 20 nt, Human
auuuuuucucuaggaaauau

SEQ ID NO: 3649068 - RNA, 16 nt, Human
auuuuuugaaaagcag

SEQ ID NO: 3649069 - RNA, 13 nt, Human
auuuuuugaaagu

SEQ ID NO: 3649070 - RNA, 12 nt, Human
auuuuuugacuu

SEQ ID NO: 3649071 - RNA, 18 nt, Human
auuuuuugcaucaguauu

SEQ ID NO: 3649072 - RNA, 23 nt, Human
auuuuuuguaaugugugaaaaag

SEQ ID NO: 3649073 - RNA, 14 nt, Human
auuuuuuguugaca

SEQ ID NO: 3649074 - RNA, 22 nt, Human
auuuuuuuaaaaucacuaacau

SEQ ID NO: 3649075 - RNA, 15 nt, Human
auuuuuuuaaccaaa

SEQ ID NO: 3649076 - RNA, 18 nt, Human
auuuuuuuaaccaaaggu

SEQ ID NO: 3649077 - RNA, 12 nt, Human
auuuuuuuaagc

SEQ ID NO: 3649078 - RNA, 13 nt, Human
auuuuuuuaagcu

SEQ ID NO: 3649079 - RNA, 13 nt, Human
auuuuuuuaaguc

SEQ ID NO: 3649080 - RNA, 16 nt, Human
auuuuuuuaauuuugu

SEQ ID NO: 3649081 - RNA, 15 nt, Human
auuuuuuuagauuga

SEQ ID NO: 3649082 - RNA, 15 nt, Human
auuuuuuucaauauu

SEQ ID NO: 3649083 - RNA, 19 nt, Human
auuuuuuucccaauugaga

SEQ ID NO: 3649084 - RNA, 19 nt, Human
auuuuuuuccuuacauaaa

SEQ ID NO: 3649085 - RNA, 16 nt, Human
auuuuuuuccuugcaa

SEQ ID NO: 3649086 - RNA, 13 nt, Human
auuuuuuucuacc

SEQ ID NO: 3649087 - RNA, 20 nt, Human
auuuuuuucuaccuugaggu

SEQ ID NO: 3649088 - RNA, 16 nt, Human
auuuuuuucugaaauu

SEQ ID NO: 3649089 - RNA, 15 nt, Human
auuuuuuucugauug

SEQ ID NO: 3649090 - RNA, 16 nt, Human
auuuuuuucugauugu

SEQ ID NO: 3649091 - RNA, 23 nt, Human
auuuuuuugaacucuucucauua

SEQ ID NO: 3649092 - RNA, 17 nt, Human
auuuuuuugcaagugaa

SEQ ID NO: 3649093 - RNA, 20 nt, Human
auuuuuuugcaagugaaggu

SEQ ID NO: 3649094 - RNA, 23 nt, Human
auuuuuuugcaugcaugcaaaug

SEQ ID NO: 3649095 - RNA, 22 nt, Human
auuuuuuugguaccuauuugac

SEQ ID NO: 3649096 - RNA, 18 nt, Human
auuuuuuuguuguuuguu

SEQ ID NO: 3649097 - RNA, 19 nt, Human
auuuuuuuuaaaauagaaa

SEQ ID NO: 3649098 - RNA, 15 nt, Human
auuuuuuuuaaacaa

SEQ ID NO: 3649099 - RNA, 18 nt, Human
auuuuuuuuaauuguauu

SEQ ID NO: 3649100 - RNA, 14 nt, Human
auuuuuuuuacauu

SEQ ID NO: 3649101 - RNA, 19 nt, Human
auuuuuuuuuaagcucuga

SEQ ID NO: 3649102 - RNA, 15 nt, Human
auuuuuuuuuagaac

SEQ ID NO: 3649103 - RNA, 21 nt, Human
auuuuuuuuucauacacuuau

SEQ ID NO: 3649104 - RNA, 13 nt, Human
auuuuuuuuuccu

SEQ ID NO: 3649105 - RNA, 17 nt, Human
auuuuuuuuuccuucag

SEQ ID NO: 3649106 - RNA, 13 nt, Human
caguggagcccag

SEQ ID NO: 3649107 - RNA, 17 nt, Human
caguggagcccaggagu

SEQ ID NO: 3649108 - RNA, 15 nt, Human
caguggagguuuguc

SEQ ID NO: 3649109 - RNA, 16 nt, Human
caguggcagcugcuuu

SEQ ID NO: 3649110 - RNA, 20 nt, Human
caguggcaggcagaggccca

SEQ ID NO: 3649111 - RNA, 14 nt, Human
caguggcagggcac

SEQ ID NO: 3649112 - RNA, 15 nt, Human
caguggcagggcuca

SEQ ID NO: 3649113 - RNA, 15 nt, Human
caguggcauggcucc

SEQ ID NO: 3649114 - RNA, 14 nt, Human
caguggccacucag

SEQ ID NO: 3649115 - RNA, 21 nt, Human
caguggcccauggcauuuuau

SEQ ID NO: 3649116 - RNA, 23 nt, Human
caguggccuacaaaucaguaauu

SEQ ID NO: 3649117 - RNA, 19 nt, Human
caguggccucaacccuccc

SEQ ID NO: 3649118 - RNA, 14 nt, Human
caguggccuggcuc

SEQ ID NO: 3649119 - RNA, 15 nt, Human
caguggccuggcucc

SEQ ID NO: 3649120 - RNA, 11 nt, Human
caguggccuua

SEQ ID NO: 3649121 - RNA, 19 nt, Human
caguggccuuaccccugcc

SEQ ID NO: 3649122 - RNA, 21 nt, Human
caguggccuuaccccugccuu

SEQ ID NO: 3649123 - RNA, 23 nt, Human
caguggcgaaaucccugcucacu

SEQ ID NO: 3649124 - RNA, 20 nt, Human
caguggcgcauucuaggcuc

SEQ ID NO: 3649125 - RNA, 19 nt, Human
caguggcguuguugcaugu

SEQ ID NO: 3649126 - RNA, 23 nt, Human
caguggcugaguagcucugccuu

SEQ ID NO: 3649127 - RNA, 13 nt, Human
caguggcugcugc

SEQ ID NO: 3649128 - RNA, 14 nt, Human
caguggcugcugcc

SEQ ID NO: 3649129 - RNA, 15 nt, Human
caguggcugcugccc

SEQ ID NO: 3649130 - RNA, 16 nt, Human
caguggcuggaucugu

SEQ ID NO: 3649131 - RNA, 18 nt, Human
cagugggaaaaauguagg

SEQ ID NO: 3649132 - RNA, 19 nt, Human
cagugggaaaaauguagga

SEQ ID NO: 3649133 - RNA, 20 nt, Human
cagugggaacgugacugccc

SEQ ID NO: 3649134 - RNA, 21 nt, Human
cagugggaacgugacugcccc

SEQ ID NO: 3649135 - RNA, 11 nt, Human
cagugggaacu

SEQ ID NO: 3649136 - RNA, 19 nt, Human
cagugggacagggcauggc

SEQ ID NO: 3649137 - RNA, 13 nt, Human
cagugggagaaaa

SEQ ID NO: 3649138 - RNA, 13 nt, Human
cagugggagccag

SEQ ID NO: 3649139 - RNA, 17 nt, Human
cagugggagccagggcu

SEQ ID NO: 3649140 - RNA, 11 nt, Human
cagugggagcu

SEQ ID NO: 3649141 - RNA, 12 nt, Human
cagugggagggg

SEQ ID NO: 3649142 - RNA, 18 nt, Human
cagugggaggggcaggcu

SEQ ID NO: 3649143 - RNA, 22 nt, Human
cagugggaggguaccagcagaa

SEQ ID NO: 3649144 - RNA, 22 nt, Human
cagugggaggugagaccaccuc

SEQ ID NO: 3649145 - RNA, 21 nt, Human
cagugggaugaaccagccggg

SEQ ID NO: 3649146 - RNA, 15 nt, Human
cagugggauuuggua

SEQ ID NO: 3649147 - RNA, 17 nt, Human
cagugggccccgcugca

SEQ ID NO: 3649148 - RNA, 15 nt, Human
cagugggcuccuggc

SEQ ID NO: 3649149 - RNA, 14 nt, Human
caguggggaaugaa

SEQ ID NO: 3649150 - RNA, 21 nt, Human
caguggggcagaggcaguacc

SEQ ID NO: 3649151 - RNA, 20 nt, Human
caguggggcucucugagucc

SEQ ID NO: 3649152 - RNA, 15 nt, Human
caguggguaaaauua

SEQ ID NO: 3649153 - RNA, 21 nt, Human
caguggguuaacaucaguuuu

SEQ ID NO: 3649154 - RNA, 17 nt, Human
cagugguaagaauagua

SEQ ID NO: 3649155 - RNA, 21 nt, Human
cagugguaugaucacggcuca

SEQ ID NO: 3649156 - RNA, 14 nt, Human
caguggugaagaaa

SEQ ID NO: 3649157 - RNA, 17 nt, Human
caguggugaagaaaacu

SEQ ID NO: 3649158 - RNA, 21 nt, Human
caguggugcgaucauggcuca

SEQ ID NO: 3649159 - RNA, 14 nt, Human
cagugguggcaggg

SEQ ID NO: 3649160 - RNA, 19 nt, Human
cagugguggcagggccuag

SEQ ID NO: 3649161 - RNA, 11 nt, Human
caguggugguu

SEQ ID NO: 3649162 - RNA, 18 nt, Human
caguggugguuuucuguu

SEQ ID NO: 3649163 - RNA, 11 nt, Human
cagugguuaag

SEQ ID NO: 3649164 - RNA, 14 nt, Human
cagugguuauuuag

SEQ ID NO: 3649165 - RNA, 22 nt, Human
cagugguuccuaauccucuagg

SEQ ID NO: 3649166 - RNA, 21 nt, Human
cagugguucuacaaucuauuu

SEQ ID NO: 3649167 - RNA, 14 nt, Human
caguguaauuucuu

SEQ ID NO: 3649168 - RNA, 23 nt, Human
caguguacauggaauaacaugua

SEQ ID NO: 3649169 - RNA, 17 nt, Human
caguguaccauuaaaau

SEQ ID NO: 3649170 - RNA, 22 nt, Human
caguguaccauuaaaauaugca

SEQ ID NO: 3649171 - RNA, 17 nt, Human
caguguacccccgccca

SEQ ID NO: 3649172 - RNA, 21 nt, Human
caguguagccccaagaaggcu

SEQ ID NO: 3649173 - RNA, 19 nt, Human
caguguagccuugcccgga

SEQ ID NO: 3649174 - RNA, 21 nt, Human
caguguaguuaauuuaucuaa

SEQ ID NO: 3649175 - RNA, 15 nt, Human
caguguauuucaguu

SEQ ID NO: 3649176 - RNA, 18 nt, Human
cagugucaaauaaacacu

SEQ ID NO: 3649177 - RNA, 19 nt, Human
cagugucaaauaaacacug

SEQ ID NO: 3649178 - RNA, 16 nt, Human
caguguccaaagcagg

SEQ ID NO: 3649179 - RNA, 22 nt, Human
caguguccaaagcagggucugg

SEQ ID NO: 3649180 - RNA, 14 nt, Human
cagugucccgggcc

SEQ ID NO: 3649181 - RNA, 20 nt, Human
caguguccuccccucaagga

SEQ ID NO: 3649182 - RNA, 14 nt, Human
caguguccugagcu

SEQ ID NO: 3649183 - RNA, 16 nt, Human
caguguccuuagaaca

SEQ ID NO: 3649184 - RNA, 14 nt, Human
cagugucucggagg

SEQ ID NO: 3649185 - RNA, 17 nt, Human
cagugucuggcugcaga

SEQ ID NO: 3649186 - RNA, 19 nt, Human
cagugucuggcugcagagc

SEQ ID NO: 3649187 - RNA, 23 nt, Human
cagugucuguaucggagacagug

SEQ ID NO: 3649188 - RNA, 16 nt, Human
cagugucuuccauaau

SEQ ID NO: 3649189 - RNA, 17 nt, Human
cagugucuuccauaaug

SEQ ID NO: 3649190 - RNA, 23 nt, Human
cagugucuuccauaauguauaaa

SEQ ID NO: 3649191 - RNA, 15 nt, Human
cagugucuuccugug

SEQ ID NO: 3649192 - RNA, 15 nt, Human
cagugucuuucuuug

SEQ ID NO: 3649193 - RNA, 23 nt, Human
cagugucuuuuuuuguauaguua

SEQ ID NO: 3649194 - RNA, 14 nt, Human
cagugugacaagga

SEQ ID NO: 3649195 - RNA, 17 nt, Human
cagugugaggccagggc

SEQ ID NO: 3649196 - RNA, 19 nt, Human
cagugugaggccagggcag

SEQ ID NO: 3649197 - RNA, 21 nt, Human
cagugugcaaggcagccgugg

SEQ ID NO: 3649198 - RNA, 21 nt, Human
cagugugcacgagugggaagg

SEQ ID NO: 3649199 - RNA, 23 nt, Human
cagugugcacuaaggggcccggc

SEQ ID NO: 3649200 - RNA, 15 nt, Human
cagugugccccccau

SEQ ID NO: 3649201 - RNA, 18 nt, Human
caguguggaggccacugu

SEQ ID NO: 3649202 - RNA, 19 nt, Human
caguguggaggccacuguu

SEQ ID NO: 3649203 - RNA, 13 nt, Human
caguguggagugg

SEQ ID NO: 3649204 - RNA, 15 nt, Human
caguguggccaggcu

SEQ ID NO: 3649205 - RNA, 16 nt, Human
caguguggccaggcug

SEQ ID NO: 3649206 - RNA, 15 nt, Human
cagugugguaguuaa

SEQ ID NO: 3649207 - RNA, 22 nt, Human
caaacaacagaaagucauuccu

SEQ ID NO: 3649208 - RNA, 20 nt, Human
caaacaaccccccaucacaa

SEQ ID NO: 3649209 - RNA, 18 nt, Human
caaacaagcauauaaaau

SEQ ID NO: 3649210 - RNA, 21 nt, Human
caaacaaggccugucagcuaa

SEQ ID NO: 3649211 - RNA, 22 nt, Human
caaacaauaccugaaugcucug

SEQ ID NO: 3649212 - RNA, 18 nt, Human
caaacaauugaagucaau

SEQ ID NO: 3649213 - RNA, 14 nt, Human
caaacaauuuaaaa

SEQ ID NO: 3649214 - RNA, 16 nt, Human
caaacaauuuaaaaau

SEQ ID NO: 3649215 - RNA, 15 nt, Human
caaacacaaaugcag

SEQ ID NO: 3649216 - RNA, 16 nt, Human
caaacacacacaaaag

SEQ ID NO: 3649217 - RNA, 12 nt, Human
caaacacaggca

SEQ ID NO: 3649218 - RNA, 16 nt, Human
caaacaccaacauaaa

SEQ ID NO: 3649219 - RNA, 14 nt, Human
caaacaccucccag

SEQ ID NO: 3649220 - RNA, 22 nt, Human
caaacaccugcugauguggcaa

SEQ ID NO: 3649221 - RNA, 12 nt, Human
caaacaccuucc

SEQ ID NO: 3649222 - RNA, 21 nt, Human
caaacaccuucuuauuauaua

SEQ ID NO: 3649223 - RNA, 18 nt, Human
caaacacuccacccucca

SEQ ID NO: 3649224 - RNA, 15 nt, Human
caaacagaacagggu

SEQ ID NO: 3649225 - RNA, 14 nt, Human
caaacagcaaacca

SEQ ID NO: 3649226 - RNA, 16 nt, Human
caaacagcaaaccaag

SEQ ID NO: 3649227 - RNA, 20 nt, Human
caaacagccaacuagccccu

SEQ ID NO: 3649228 - RNA, 18 nt, Human
caaacagccaagauuuuc

SEQ ID NO: 3649229 - RNA, 16 nt, Human
caaacagcucaggcug

SEQ ID NO: 3649230 - RNA, 15 nt, Human
caaacaggcucagag

SEQ ID NO: 3649231 - RNA, 12 nt, Human
caaacagggccu

SEQ ID NO: 3649232 - RNA, 15 nt, Human
caaacagggccucug

SEQ ID NO: 3649233 - RNA, 16 nt, Human
caaacauaugcacauu

SEQ ID NO: 3649234 - RNA, 19 nt, Human
caaacauccucuuccauau

SEQ ID NO: 3649235 - RNA, 21 nt, Human
caaacaugaaguguguuuccu

SEQ ID NO: 3649236 - RNA, 21 nt, Human
caaacaugacccuaaaucuug

SEQ ID NO: 3649237 - RNA, 23 nt, Human
caaacaugggguuggcugggccc

SEQ ID NO: 3649238 - RNA, 16 nt, Human
caaacauguauuuaug

SEQ ID NO: 3649239 - RNA, 20 nt, Human
caaacaugugguuaaugcca

SEQ ID NO: 3649240 - RNA, 18 nt, Human
caaacauuaauguugauu

SEQ ID NO: 3649241 - RNA, 15 nt, Human
caaacauuucaaagu

SEQ ID NO: 3649242 - RNA, 21 nt, Human
caaacauuuucucuuagaaaa

SEQ ID NO: 3649243 - RNA, 12 nt, Human
caaacauuuuga

SEQ ID NO: 3649244 - RNA, 15 nt, Human
caaaccaaauaaaaa

SEQ ID NO: 3649245 - RNA, 21 nt, Human
caaaccacaacugacacagga

SEQ ID NO: 3649246 - RNA, 23 nt, Human
caaaccagauacggacagagacc

SEQ ID NO: 3649247 - RNA, 17 nt, Human
caaaccaguaucgcuca

SEQ ID NO: 3649248 - RNA, 15 nt, Human
caaaccauaaacuuc

SEQ ID NO: 3649249 - RNA, 22 nt, Human
caaacccacgauuuucuccagc

SEQ ID NO: 3649250 - RNA, 22 nt, Human
cauauuagacuucuguuuucaa

SEQ ID NO: 3649251 - RNA, 20 nt, Human
cauauuagcgacaacagauu

SEQ ID NO: 3649252 - RNA, 17 nt, Human
cauauuccauauuuauu

SEQ ID NO: 3649253 - RNA, 21 nt, Human
cauauuccugcagccuggagg

SEQ ID NO: 3649254 - RNA, 15 nt, Human
cauauucuugugcuu

SEQ ID NO: 3649255 - RNA, 21 nt, Human
cauauugagcacuugcuguau

SEQ ID NO: 3649256 - RNA, 13 nt, Human
cauauugaugaaa

SEQ ID NO: 3649257 - RNA, 17 nt, Human
cauauugcacaugucuu

SEQ ID NO: 3649258 - RNA, 20 nt, Human
cauauugcacaugucuuaau

SEQ ID NO: 3649259 - RNA, 22 nt, Human
cauauugcacaugucuuaauga

SEQ ID NO: 3649260 - RNA, 23 nt, Human
cauauugcacaugucuuaaugaa

SEQ ID NO: 3649261 - RNA, 21 nt, Human
cauauugcauacuauuaaaca

SEQ ID NO: 3649262 - RNA, 16 nt, Human
cauauugcugagagaa

SEQ ID NO: 3649263 - RNA, 13 nt, Human
caaauuaauuuua

SEQ ID NO: 3649264 - RNA, 18 nt, Human
caaauuacuuugugaaua

SEQ ID NO: 3649265 - RNA, 19 nt, Human
caaauuagaagacauuuau

SEQ ID NO: 3649266 - RNA, 15 nt, Human
caaauuagggcaauu

SEQ ID NO: 3649267 - RNA, 15 nt, Human
caaauuaguuauaua

SEQ ID NO: 3649268 - RNA, 16 nt, Human
caaauuaucaagcuaa

SEQ ID NO: 3649269 - RNA, 20 nt, Human
caaauuaugcuaagaauuuu

SEQ ID NO: 3649270 - RNA, 17 nt, Human
caaauuauuaaugaaaa

SEQ ID NO: 3649271 - RNA, 15 nt, Human
caaauuauuugugua

SEQ ID NO: 3649272 - RNA, 16 nt, Human
caaauuauuuguguaa

SEQ ID NO: 3649273 - RNA, 12 nt, Human
caaauucaguuu

SEQ ID NO: 3649274 - RNA, 15 nt, Human
caaauucaguuucau

SEQ ID NO: 3649275 - RNA, 16 nt, Human
caaauucaguuucaua

SEQ ID NO: 3649276 - RNA, 18 nt, Human
caaauucaguuucauaaa

SEQ ID NO: 3649277 - RNA, 14 nt, Human
caaauucauuuuuu

SEQ ID NO: 3649278 - RNA, 20 nt, Human
caaauucccagauuugaaga

SEQ ID NO: 3649279 - RNA, 21 nt, Human
caaauucccagauuugaagac

SEQ ID NO: 3649280 - RNA, 20 nt, Human
caaauuccuauuuuuaaaua

SEQ ID NO: 3649281 - RNA, 20 nt, Human
caaauucuacaacuuuuccu

SEQ ID NO: 3649282 - RNA, 15 nt, Human
caaauucucaccaaa

SEQ ID NO: 3649283 - RNA, 22 nt, Human
caaauucugcuugcuugcuuuu

SEQ ID NO: 3649284 - RNA, 18 nt, Human
caaauucugucucuggau

SEQ ID NO: 3649285 - RNA, 14 nt, Human
caaauucuucugaa

SEQ ID NO: 3649286 - RNA, 21 nt, Human
caaauucuuuugaauuguuac

SEQ ID NO: 3649287 - RNA, 14 nt, Human
caaauugagacagu

SEQ ID NO: 3649288 - RNA, 21 nt, Human
caaauuggacuuucaaaauua

SEQ ID NO: 3649289 - RNA, 20 nt, Human
caaauuguaauuaauaauag

SEQ ID NO: 3649290 - RNA, 14 nt, Human
caaauugucagcaa

SEQ ID NO: 3649291 - RNA, 22 nt, Human
caaauugucuuuugucaugugg

SEQ ID NO: 3649292 - RNA, 22 nt, Human
caaauugugcuucuccccagaa

SEQ ID NO: 3649293 - RNA, 23 nt, Human
caaauugugcuucuccccagaau

SEQ ID NO: 3649294 - RNA, 15 nt, Human
caaauugugugaaag

SEQ ID NO: 3649295 - RNA, 23 nt, Human
caaauugugugugcucugcuuca

SEQ ID NO: 3649296 - RNA, 19 nt, Human
caaauuuaaaacuguugga

SEQ ID NO: 3649297 - RNA, 23 nt, Human
caaauuuacagagacagaaagca

SEQ ID NO: 3649298 - RNA, 22 nt, Human
caaauuuagaaacuaauugacu

SEQ ID NO: 3649299 - RNA, 15 nt, Human
caaauuuauaauuuu

SEQ ID NO: 3649300 - RNA, 17 nt, Human
caaauuuaucaaagcau

SEQ ID NO: 3649301 - RNA, 17 nt, Human
caaauuucaaaagacau

SEQ ID NO: 3649302 - RNA, 15 nt, Human
caaauuucacuuaua

SEQ ID NO: 3649303 - RNA, 11 nt, Human
caaauuucuaa

SEQ ID NO: 3649304 - RNA, 15 nt, Human
caaauuucuaaaucu

SEQ ID NO: 3649305 - RNA, 19 nt, Human
caaauuuggggguuucuca

SEQ ID NO: 3649306 - RNA, 19 nt, Human
caaauuuguaggguuucua

SEQ ID NO: 3649307 - RNA, 22 nt, Human
caaauuugucugguuaaaaaau

SEQ ID NO: 3649308 - RNA, 17 nt, Human
caaauuuuauuuguagg

SEQ ID NO: 3649309 - RNA, 15 nt, Human
caaauuuuuugacuu

SEQ ID NO: 3649310 - RNA, 16 nt, Human
caacaaaaagcuuccc

SEQ ID NO: 3649311 - RNA, 12 nt, Human
caacaaaaauuu

SEQ ID NO: 3649312 - RNA, 13 nt, Human
caacaaaaauuug

SEQ ID NO: 3649313 - RNA, 12 nt, Human
caacaaaauaca

SEQ ID NO: 3649314 - RNA, 13 nt, Human
caacaaaauacau

SEQ ID NO: 3649315 - RNA, 16 nt, Human
caacaaacugcacaug

SEQ ID NO: 3649316 - RNA, 14 nt, Human
caacaaagaaauau

SEQ ID NO: 3649317 - RNA, 12 nt, Human
caacaaagcugu

SEQ ID NO: 3649318 - RNA, 12 nt, Human
caacaaaggaag

SEQ ID NO: 3649319 - RNA, 23 nt, Human
caacaaaggauuaauugcugcaa

SEQ ID NO: 3649320 - RNA, 20 nt, Human
caacaaaggguuuuaaugua

SEQ ID NO: 3649321 - RNA, 22 nt, Human
caacaaaucuaggaaaauauuu

SEQ ID NO: 3649322 - RNA, 15 nt, Human
caacaacaauuggua

SEQ ID NO: 3649323 - RNA, 18 nt, Human
caacaagaaugcauugau

SEQ ID NO: 3649324 - RNA, 14 nt, Human
caacaagaguuuau

SEQ ID NO: 3649325 - RNA, 21 nt, Human
caacaagauuuccuugugcaa

SEQ ID NO: 3649326 - RNA, 19 nt, Human
caacaagggcaguggaggu

SEQ ID NO: 3649327 - RNA, 16 nt, Human
caacaauaaaauuuuu

SEQ ID NO: 3649328 - RNA, 12 nt, Human
caacaauaaaua

SEQ ID NO: 3649329 - RNA, 17 nt, Human
caacaaucccaaggccc

SEQ ID NO: 3649330 - RNA, 18 nt, Human
caacaaugugaggggucc

SEQ ID NO: 3649331 - RNA, 18 nt, Human
caacaauugguaaaacuc

SEQ ID NO: 3649332 - RNA, 18 nt, Human
caacaauuucuacuuuga

SEQ ID NO: 3649333 - RNA, 19 nt, Human
caacaauuucuacuuugaa

SEQ ID NO: 3649334 - RNA, 20 nt, Human
caacaauuucuacuuugaag

SEQ ID NO: 3649335 - RNA, 13 nt, Human
caacacaaagaga

SEQ ID NO: 3649336 - RNA, 14 nt, Human
caacacaagguggg

SEQ ID NO: 3649337 - RNA, 16 nt, Human
caacacaauaacacua

SEQ ID NO: 3649338 - RNA, 18 nt, Human
caacacaauguuauucgu

SEQ ID NO: 3649339 - RNA, 14 nt, Human
caacacacacacuc

SEQ ID NO: 3649340 - RNA, 15 nt, Human
caacacacacaugcu

SEQ ID NO: 3649341 - RNA, 16 nt, Human
caacacaccuggugaa

SEQ ID NO: 3649342 - RNA, 13 nt, Human
caacacagccugg

SEQ ID NO: 3649343 - RNA, 16 nt, Human
caacacagccugggcc

SEQ ID NO: 3649344 - RNA, 13 nt, Human
caacaccaagcac

SEQ ID NO: 3649345 - RNA, 12 nt, Human
caacaccacaga

SEQ ID NO: 3649346 - RNA, 14 nt, Human
caacaccacagaca

SEQ ID NO: 3649347 - RNA, 17 nt, Human
caacaccagccccugcc

SEQ ID NO: 3649348 - RNA, 18 nt, Human
caacaccagccccugccc

SEQ ID NO: 3649349 - RNA, 22 nt, Human
caacaccagccccugccccagc

SEQ ID NO: 3649350 - RNA, 18 nt, Human
caacaccaucacagcuug

SEQ ID NO: 3649351 - RNA, 17 nt, Human
caacaccaugauuccuu

SEQ ID NO: 3649352 - RNA, 13 nt, Human
caacacguuacua

SEQ ID NO: 3649353 - RNA, 21 nt, Human
caacacugauuuccccuuuug

SEQ ID NO: 3649354 - RNA, 14 nt, Human
caacacugccagca

SEQ ID NO: 3649355 - RNA, 18 nt, Human
caacacuggucugcuguu

SEQ ID NO: 3649356 - RNA, 22 nt, Human
caacacuggucugcuguuccag

SEQ ID NO: 3649357 - RNA, 13 nt, Human
caacacuggugug

SEQ ID NO: 3649358 - RNA, 22 nt, Human
caacacuguaguaaauaaugcu

SEQ ID NO: 3649359 - RNA, 17 nt, Human
caacacugugcccuggu

SEQ ID NO: 3649360 - RNA, 14 nt, Human
caacagaaaaaugg

SEQ ID NO: 3649361 - RNA, 14 nt, Human
caacagaaagucau

SEQ ID NO: 3649362 - RNA, 16 nt, Human
caacagaacuaaaugu

SEQ ID NO: 3649363 - RNA, 15 nt, Human
caacagaagaacugu

SEQ ID NO: 3649364 - RNA, 12 nt, Human
caacagaagcag

SEQ ID NO: 3649365 - RNA, 15 nt, Human
caacagaagcauuug

SEQ ID NO: 3649366 - RNA, 19 nt, Human
caacagaagcauuuguauu

SEQ ID NO: 3649367 - RNA, 22 nt, Human
caacagaagucaugaagcccaa

SEQ ID NO: 3649368 - RNA, 14 nt, Human
caacagaaugaaaa

SEQ ID NO: 3649369 - RNA, 20 nt, Human
caacagaaugaaaaaugaaa

SEQ ID NO: 3649370 - RNA, 21 nt, Human
caacagaaugaaaaaugaaag

SEQ ID NO: 3649371 - RNA, 22 nt, Human
caacagaaugaaaaaugaaaga

SEQ ID NO: 3649372 - RNA, 23 nt, Human
caacagagugagacccugucucu

SEQ ID NO: 3649373 - RNA, 14 nt, Human
caacagauacugga

SEQ ID NO: 3649374 - RNA, 17 nt, Human
caacagaucaauuugua

SEQ ID NO: 3649375 - RNA, 13 nt, Human
caacagaucugga

SEQ ID NO: 3649376 - RNA, 20 nt, Human
caacagauuggauuuuaugu

SEQ ID NO: 3649377 - RNA, 21 nt, Human
caacagauuggauuuuauguu

SEQ ID NO: 3649378 - RNA, 17 nt, Human
caacagauuugugaacu

SEQ ID NO: 3649379 - RNA, 23 nt, Human
caacagauuugugaacucagcca

SEQ ID NO: 3649380 - RNA, 15 nt, Human
caacagcacuggcuc

SEQ ID NO: 3649381 - RNA, 16 nt, Human
caacagccaacagcua

SEQ ID NO: 3649382 - RNA, 19 nt, Human
caacagccaauauuuaaaa

SEQ ID NO: 3649383 - RNA, 12 nt, Human
caacagccaugc

SEQ ID NO: 3649384 - RNA, 21 nt, Human
caacagcgacauagcccaucc

SEQ ID NO: 3649385 - RNA, 16 nt, Human
caacagcuacaacagc

SEQ ID NO: 3649386 - RNA, 20 nt, Human
caacagcuacaacagccuca

SEQ ID NO: 3649387 - RNA, 23 nt, Human
caacagcuggugcccugcuuuca

SEQ ID NO: 3649388 - RNA, 19 nt, Human
caacaggaaucaagagcug

SEQ ID NO: 3649389 - RNA, 21 nt, Human
caacaggaaucaagagcugcc

SEQ ID NO: 3649390 - RNA, 14 nt, Human
caacaggagcuggg

SEQ ID NO: 3649391 - RNA, 22 nt, Human
caacaggaggacaauucaugaa

SEQ ID NO: 3649392 - RNA, 23 nt, Human
caacaggaggacaauucaugaac

SEQ ID NO: 3649393 - RNA, 19 nt, Human
caacaggccucagggcucc

SEQ ID NO: 3649394 - RNA, 20 nt, Human
caacaggcuuaugaauauau

SEQ ID NO: 3649395 - RNA, 21 nt, Human
caagagggugacagcuuccuu

SEQ ID NO: 3649396 - RNA, 15 nt, Human
caagagucuaaagau

SEQ ID NO: 3649397 - RNA, 16 nt, Human
caagagucuggggacc

SEQ ID NO: 3649398 - RNA, 15 nt, Human
caagaguggccccac

SEQ ID NO: 3649399 - RNA, 16 nt, Human
caagaguggccccacc

SEQ ID NO: 3649400 - RNA, 19 nt, Human
caagaguggccccaccugg

SEQ ID NO: 3649401 - RNA, 22 nt, Human
caagaguggccccaccuggccc

SEQ ID NO: 3649402 - RNA, 14 nt, Human
caagauaaaggaca

SEQ ID NO: 3649403 - RNA, 18 nt, Human
caagauagauuuggaaua

SEQ ID NO: 3649404 - RNA, 18 nt, Human
caagauaggaccuugggc

SEQ ID NO: 3649405 - RNA, 15 nt, Human
caagauauggacaca

SEQ ID NO: 3649406 - RNA, 15 nt, Human
caagauauuguacau

SEQ ID NO: 3649407 - RNA, 16 nt, Human
caagauauuuauauau

SEQ ID NO: 3649408 - RNA, 21 nt, Human
caagauauuuuaaaaucuguc

SEQ ID NO: 3649409 - RNA, 15 nt, Human
caagaucauucagug

SEQ ID NO: 3649410 - RNA, 15 nt, Human
caagaucccauuuga

SEQ ID NO: 3649411 - RNA, 20 nt, Human
caagaucugugcagccccgc

SEQ ID NO: 3649412 - RNA, 15 nt, Human
caagaucuuucagga

SEQ ID NO: 3649413 - RNA, 18 nt, Human
caagaugaaggagaggca

SEQ ID NO: 3649414 - RNA, 16 nt, Human
caagaugacuggggug

SEQ ID NO: 3649415 - RNA, 21 nt, Human
caagaugagauuggcauggcu

SEQ ID NO: 3649416 - RNA, 18 nt, Human
caagaugccaucuguguc

SEQ ID NO: 3649417 - RNA, 17 nt, Human
caagaugggcaucuuuu

SEQ ID NO: 3649418 - RNA, 20 nt, Human
caagaugggcaucuuuugua

SEQ ID NO: 3649419 - RNA, 20 nt, Human
caagaugggggcagggcugu

SEQ ID NO: 3649420 - RNA, 16 nt, Human
caagaugguucuagca

SEQ ID NO: 3649421 - RNA, 16 nt, Human
caagaugucagacugg

SEQ ID NO: 3649422 - RNA, 19 nt, Human
caagaugugaauuauugac

SEQ ID NO: 3649423 - RNA, 22 nt, Human
caagaugugaauuauugacacu

SEQ ID NO: 3649424 - RNA, 17 nt, Human
caagauuauaauauuuu

SEQ ID NO: 3649425 - RNA, 18 nt, Human
caagauucacaccugacu

SEQ ID NO: 3649426 - RNA, 19 nt, Human
caagauucacaccugacuc

SEQ ID NO: 3649427 - RNA, 17 nt, Human
caagauucccagagaca

SEQ ID NO: 3649428 - RNA, 16 nt, Human
caagauucccaggagu

SEQ ID NO: 3649429 - RNA, 20 nt, Human
caagauucccaggaguucug

SEQ ID NO: 3649430 - RNA, 10 nt, Human
caagauuccg

SEQ ID NO: 3649431 - RNA, 18 nt, Human
caagauuccggauccuaa

SEQ ID NO: 3649432 - RNA, 13 nt, Human
caagauucuagau

SEQ ID NO: 3649433 - RNA, 17 nt, Human
caagauucuagaugauu

SEQ ID NO: 3649434 - RNA, 12 nt, Human
caagauugaaaa

SEQ ID NO: 3649435 - RNA, 20 nt, Human
caagauugagcucucugccc

SEQ ID NO: 3649436 - RNA, 13 nt, Human
caagauugcuuaa

SEQ ID NO: 3649437 - RNA, 18 nt, Human
caagauugcuuaaaauag

SEQ ID NO: 3649438 - RNA, 20 nt, Human
caagauugguguuuuuuucu

SEQ ID NO: 3649439 - RNA, 15 nt, Human
caagauuuagaaaaa

SEQ ID NO: 3649440 - RNA, 17 nt, Human
caagauuuuccacaaga

SEQ ID NO: 3649441 - RNA, 12 nt, Human
caagauuuuccu

SEQ ID NO: 3649442 - RNA, 18 nt, Human
caagauuuuccucuugug

SEQ ID NO: 3649443 - RNA, 22 nt, Human
caagauuuugaaugcuuccuga

SEQ ID NO: 3649444 - RNA, 23 nt, Human
caagauuuugggagaguaaagcu

SEQ ID NO: 3649445 - RNA, 19 nt, Human
caagauuuuuuaauuguuu

SEQ ID NO: 3649446 - RNA, 21 nt, Human
caagauuuuuuaauuguuuaa

SEQ ID NO: 3649447 - RNA, 16 nt, Human
caagcaaaaggagaga

SEQ ID NO: 3649448 - RNA, 17 nt, Human
caagcaaacccagacgg

SEQ ID NO: 3649449 - RNA, 15 nt, Human
caagcaaauguuaca

SEQ ID NO: 3649450 - RNA, 17 nt, Human
caagcaaccugggucca

SEQ ID NO: 3649451 - RNA, 18 nt, Human
caagcaagaaacacuggg

SEQ ID NO: 3649452 - RNA, 13 nt, Human
caagcaagacuga

SEQ ID NO: 3649453 - RNA, 12 nt, Human
caagcaagcucc

SEQ ID NO: 3649454 - RNA, 23 nt, Human
caagcaagcucccaagggauggu

SEQ ID NO: 3649455 - RNA, 12 nt, Human
caagcacagcag

SEQ ID NO: 3649456 - RNA, 13 nt, Human
caagcacagcagc

SEQ ID NO: 3649457 - RNA, 14 nt, Human
caagcacagcccuu

SEQ ID NO: 3649458 - RNA, 13 nt, Human
caagcacagucag

SEQ ID NO: 3649459 - RNA, 19 nt, Human
caagcacagugguggcagg

SEQ ID NO: 3649460 - RNA, 20 nt, Human
caagcacaucugcauuuuca

SEQ ID NO: 3649461 - RNA, 22 nt, Human
caagcaccaccaaacacagugu

SEQ ID NO: 3649462 - RNA, 13 nt, Human
caagcaccauccc

SEQ ID NO: 3649463 - RNA, 17 nt, Human
caagcaccauccccucc

SEQ ID NO: 3649464 - RNA, 13 nt, Human
caagcaccuccug

SEQ ID NO: 3649465 - RNA, 18 nt, Human
caagcaccuccugccucg

SEQ ID NO: 3649466 - RNA, 17 nt, Human
caagcacuaaacaaaga

SEQ ID NO: 3649467 - RNA, 22 nt, Human
caagcacuucaggccuauguuu

SEQ ID NO: 3649468 - RNA, 18 nt, Human
caagcagaggaccagggc

SEQ ID NO: 3649469 - RNA, 21 nt, Human
caagcagaggaccagggccuu

SEQ ID NO: 3649470 - RNA, 22 nt, Human
caagcagaggaccagggccuuu

SEQ ID NO: 3649471 - RNA, 20 nt, Human
caagcagagugcacagcugu

SEQ ID NO: 3649472 - RNA, 13 nt, Human
caagcagccaagc

SEQ ID NO: 3649473 - RNA, 22 nt, Human
caagcagcgaccgcccccuccu

SEQ ID NO: 3649474 - RNA, 21 nt, Human
caugccaacaagaaugcauug

SEQ ID NO: 3649475 - RNA, 22 nt, Human
caugccaaccccgcccuaggcc

SEQ ID NO: 3649476 - RNA, 18 nt, Human
caugccaagcacugugcu

SEQ ID NO: 3649477 - RNA, 17 nt, Human
caugccacaaggacuuc

SEQ ID NO: 3649478 - RNA, 21 nt, Human
caugccaccauggccagccaa

SEQ ID NO: 3649479 - RNA, 13 nt, Human
caugccaggaacc

SEQ ID NO: 3649480 - RNA, 20 nt, Human
caugccagggccaugucaga

SEQ ID NO: 3649481 - RNA, 14 nt, Human
caugccaguauuuu

SEQ ID NO: 3649482 - RNA, 19 nt, Human
caugccaguauuuuuaaag

SEQ ID NO: 3649483 - RNA, 13 nt, Human
caugcccaccccc

SEQ ID NO: 3649484 - RNA, 18 nt, Human
caugcccacccccugccc

SEQ ID NO: 3649485 - RNA, 20 nt, Human
caugcccacccccugcccug

SEQ ID NO: 3649486 - RNA, 21 nt, Human
caugcccacccccugcccugc

SEQ ID NO: 3649487 - RNA, 17 nt, Human
caugcccagagacccag

SEQ ID NO: 3649488 - RNA, 22 nt, Human
caugcccagucgauaucucacu

SEQ ID NO: 3649489 - RNA, 14 nt, Human
caugccccccucaa

SEQ ID NO: 3649490 - RNA, 19 nt, Human
caugccccccucaaaccuc

SEQ ID NO: 3649491 - RNA, 21 nt, Human
caugccccccucaaaccuccu

SEQ ID NO: 3649492 - RNA, 15 nt, Human
caugcccccucgugc

SEQ ID NO: 3649493 - RNA, 17 nt, Human
caugcccccucgugcca

SEQ ID NO: 3649494 - RNA, 11 nt, Human
caugcccccug

SEQ ID NO: 3649495 - RNA, 14 nt, Human
caugcccccugcag

SEQ ID NO: 3649496 - RNA, 15 nt, Human
caugccccuggcugg

SEQ ID NO: 3649497 - RNA, 18 nt, Human
caugcccggucccacccc

SEQ ID NO: 3649498 - RNA, 13 nt, Human
caugcccucccuu

SEQ ID NO: 3649499 - RNA, 17 nt, Human
caugcccuccucuccca

SEQ ID NO: 3649500 - RNA, 13 nt, Human
caugcccucucag

SEQ ID NO: 3649501 - RNA, 14 nt, Human
caugcccugugcaa

SEQ ID NO: 3649502 - RNA, 18 nt, Human
caugcccugugcaaccuc

SEQ ID NO: 3649503 - RNA, 23 nt, Human
caugcccugugcaaccucuuggc

SEQ ID NO: 3649504 - RNA, 14 nt, Human
caugccgggcgcag

SEQ ID NO: 3649505 - RNA, 18 nt, Human
caugccucacuaauuuuu

SEQ ID NO: 3649506 - RNA, 18 nt, Human
caugccucagaagugcau

SEQ ID NO: 3649507 - RNA, 14 nt, Human
caugccucagcccu

SEQ ID NO: 3649508 - RNA, 20 nt, Human
caugccucagcccugacccu

SEQ ID NO: 3649509 - RNA, 18 nt, Human
caugccucucucaggcca

SEQ ID NO: 3649510 - RNA, 15 nt, Human
caugccucugaggcc

SEQ ID NO: 3649511 - RNA, 17 nt, Human
caugccucugaggccag

SEQ ID NO: 3649512 - RNA, 19 nt, Human
caugccucugaggccagcc

SEQ ID NO: 3649513 - RNA, 14 nt, Human
caugccugagagac

SEQ ID NO: 3649514 - RNA, 11 nt, Human
caugccugagg

SEQ ID NO: 3649515 - RNA, 13 nt, Human
caugccugagggu

SEQ ID NO: 3649516 - RNA, 15 nt, Human
caugccugagggugg

SEQ ID NO: 3649517 - RNA, 16 nt, Human
caugccugagggugga

SEQ ID NO: 3649518 - RNA, 20 nt, Human
caugccugaggguggagacu

SEQ ID NO: 3649519 - RNA, 20 nt, Human
caugccugccccaaacaaau

SEQ ID NO: 3649520 - RNA, 18 nt, Human
caugccuggauggggcug

SEQ ID NO: 3649521 - RNA, 16 nt, Human
caugccuguccagccu

SEQ ID NO: 3649522 - RNA, 17 nt, Human
caugccuguccagccug

SEQ ID NO: 3649523 - RNA, 20 nt, Human
caugccuguccagccugggc

SEQ ID NO: 3649524 - RNA, 19 nt, Human
caugccuuaaaccuaccuc

SEQ ID NO: 3649525 - RNA, 13 nt, Human
caugccuuccagc

SEQ ID NO: 3649526 - RNA, 15 nt, Human
caugccuuccagcac

SEQ ID NO: 3649527 - RNA, 20 nt, Human
caugccuuccagcacccugc

SEQ ID NO: 3649528 - RNA, 13 nt, Human
caugcgcacaagg

SEQ ID NO: 3649529 - RNA, 23 nt, Human
caugcgcucagggccaugcugag

SEQ ID NO: 3649530 - RNA, 14 nt, Human
caugcggagaacaa

SEQ ID NO: 3649531 - RNA, 16 nt, Human
caugcggagaacaaau

SEQ ID NO: 3649532 - RNA, 13 nt, Human
caugcggcccagc

SEQ ID NO: 3649533 - RNA, 18 nt, Human
caugcggcccagcccggc

SEQ ID NO: 3649534 - RNA, 19 nt, Human
caugcggcccagcccggcu

SEQ ID NO: 3649535 - RNA, 13 nt, Human
caugcggucgggc

SEQ ID NO: 3649536 - RNA, 16 nt, Human
caugcguguuucugac

SEQ ID NO: 3649537 - RNA, 17 nt, Human
caugcguguuucugacu

SEQ ID NO: 3649538 - RNA, 20 nt, Human
caugcuaccugaucccacuc

SEQ ID NO: 3649539 - RNA, 18 nt, Human
caugcuauucacaauuau

SEQ ID NO: 3649540 - RNA, 12 nt, Human
cagugucuuuuu

SEQ ID NO: 3649541 - RNA, 17 nt, Human
cagugucuuuuuuugua

SEQ ID NO: 3649542 - RNA, 13 nt, Human
cagugugaaguua

SEQ ID NO: 3649543 - RNA, 21 nt, Human
cagugugaaguuagaauuccu

SEQ ID NO: 3649544 - RNA, 17 nt, Human
cagugugagggaaagag

SEQ ID NO: 3649545 - RNA, 18 nt, Human
cagugugaucccaagugc

SEQ ID NO: 3649546 - RNA, 12 nt, Human
cagugugauuuu

SEQ ID NO: 3649547 - RNA, 20 nt, Human
cagugugcaaggcagccgug

SEQ ID NO: 3649548 - RNA, 14 nt, Human
cagugugcccccca

SEQ ID NO: 3649549 - RNA, 23 nt, Human
cagugugccccccauccuggccc

SEQ ID NO: 3649550 - RNA, 11 nt, Human
caguguggaac

SEQ ID NO: 3649551 - RNA, 14 nt, Human
cagugugucuaaau

SEQ ID NO: 3649552 - RNA, 15 nt, Human
cagugugucuccugc

SEQ ID NO: 3649553 - RNA, 21 nt, Human
caguguguggucaacauuucu

SEQ ID NO: 3649554 - RNA, 17 nt, Human
caguguguuugugauug

SEQ ID NO: 3649555 - RNA, 14 nt, Human
caguguuaaaaaau

SEQ ID NO: 3649556 - RNA, 17 nt, Human
caguguuaaaugaaauu

SEQ ID NO: 3649557 - RNA, 18 nt, Human
caguguuaccugugugcu

SEQ ID NO: 3649558 - RNA, 16 nt, Human
caguguuaggccuggc

SEQ ID NO: 3649559 - RNA, 17 nt, Human
caguguuaggccuggca

SEQ ID NO: 3649560 - RNA, 18 nt, Human
caguguuccgugguuaaa

SEQ ID NO: 3649561 - RNA, 17 nt, Human
caguguucgcuuggcuc

SEQ ID NO: 3649562 - RNA, 23 nt, Human
caguguucgcuuggcuccaugcu

SEQ ID NO: 3649563 - RNA, 17 nt, Human
caguguucuaugaacaa

SEQ ID NO: 3649564 - RNA, 12 nt, Human
caguguugagau

SEQ ID NO: 3649565 - RNA, 18 nt, Human
caguguuggggaugccuu

SEQ ID NO: 3649566 - RNA, 16 nt, Human
caguguugguauauuu

SEQ ID NO: 3649567 - RNA, 20 nt, Human
caguguuguggauuuaacag

SEQ ID NO: 3649568 - RNA, 15 nt, Human
caguguuguuuguaa

SEQ ID NO: 3649569 - RNA, 16 nt, Human
caguguuguuuguaaa

SEQ ID NO: 3649570 - RNA, 19 nt, Human
caguguuguuuguaaauaa

SEQ ID NO: 3649571 - RNA, 11 nt, Human
caguguuuaug

SEQ ID NO: 3649572 - RNA, 23 nt, Human
caguguuuaugugcuauuaauau

SEQ ID NO: 3649573 - RNA, 14 nt, Human
caguguuucccaua

SEQ ID NO: 3649574 - RNA, 15 nt, Human
caguguuucccauaa

SEQ ID NO: 3649575 - RNA, 17 nt, Human
caguguuucccauaauu

SEQ ID NO: 3649576 - RNA, 20 nt, Human
caguguuucccauaauuuuc

SEQ ID NO: 3649577 - RNA, 13 nt, Human
caguguuuggugc

SEQ ID NO: 3649578 - RNA, 14 nt, Human
caguguuuuaaauu

SEQ ID NO: 3649579 - RNA, 16 nt, Human
caguguuuuaaauucu

SEQ ID NO: 3649580 - RNA, 19 nt, Human
caguguuuucagaagaaau

SEQ ID NO: 3649581 - RNA, 22 nt, Human
caguguuuucugggauaaguaa

SEQ ID NO: 3649582 - RNA, 18 nt, Human
caguguuuugcaagugcu

SEQ ID NO: 3649583 - RNA, 20 nt, Human
caguguuuuggacuccaucu

SEQ ID NO: 3649584 - RNA, 21 nt, Human
caguguuuuuagaccuguguu

SEQ ID NO: 3649585 - RNA, 16 nt, Human
caguuaaaaaaaauuu

SEQ ID NO: 3649586 - RNA, 21 nt, Human
caguuaacuauugcauuuaua

SEQ ID NO: 3649587 - RNA, 13 nt, Human
caguuaagagaaa

SEQ ID NO: 3649588 - RNA, 19 nt, Human
caguuaagcagccgccaca

SEQ ID NO: 3649589 - RNA, 22 nt, Human
caguuaauuacucagcagaaug

SEQ ID NO: 3649590 - RNA, 19 nt, Human
caguuaauuuuuccaacua

SEQ ID NO: 3649591 - RNA, 19 nt, Human
caguuacaaauuauaaugu

SEQ ID NO: 3649592 - RNA, 13 nt, Human
caguuacagaaag

SEQ ID NO: 3649593 - RNA, 17 nt, Human
caguuacagaaaguggu

SEQ ID NO: 3649594 - RNA, 20 nt, Human
caguuaccauuaaaccaucu

SEQ ID NO: 3649595 - RNA, 21 nt, Human
caguuaccucugccucagaaa

SEQ ID NO: 3649596 - RNA, 22 nt, Human
caguuaucuaaguuaauuuaaa

SEQ ID NO: 3649597 - RNA, 13 nt, Human
caguuaugaauca

SEQ ID NO: 3649598 - RNA, 20 nt, Human
caguuauggcuauaggugcu

SEQ ID NO: 3649599 - RNA, 23 nt, Human
caguuauugucccuggcuuccuu

SEQ ID NO: 3649600 - RNA, 17 nt, Human
caguuauuuugauaaca

SEQ ID NO: 3649601 - RNA, 22 nt, Human
caguucaauaaacuuaacuuua

SEQ ID NO: 3649602 - RNA, 22 nt, Human
caguucaaucucccgcugcugc

SEQ ID NO: 3649603 - RNA, 23 nt, Human
caguucaaucucccgcugcugcu

SEQ ID NO: 3649604 - RNA, 17 nt, Human
caguucacacccugcaa

SEQ ID NO: 3649605 - RNA, 19 nt, Human
caguucacacccugcaagg

SEQ ID NO: 3649606 - RNA, 20 nt, Human
caguucacacccugcaaggc

SEQ ID NO: 3649607 - RNA, 13 nt, Human
caguucacccuga

SEQ ID NO: 3649608 - RNA, 23 nt, Human
caguucaccuauuucaaaaauuu

SEQ ID NO: 3649609 - RNA, 16 nt, Human
caguucagagcugccc

SEQ ID NO: 3649610 - RNA, 17 nt, Human
caguucaggagucccaa

SEQ ID NO: 3649611 - RNA, 15 nt, Human
caguucaguaccugg

SEQ ID NO: 3649612 - RNA, 19 nt, Human
caguucaguaccuggagga

SEQ ID NO: 3649613 - RNA, 20 nt, Human
caguucaguaccuggaggag

SEQ ID NO: 3649614 - RNA, 18 nt, Human
caguucaguggcagggcu

SEQ ID NO: 3649615 - RNA, 23 nt, Human
caguucaguggcagggcucagga

SEQ ID NO: 3649616 - RNA, 18 nt, Human
caguucauguuugcuuca

SEQ ID NO: 3649617 - RNA, 17 nt, Human
caguucauuagaaauau

SEQ ID NO: 3649618 - RNA, 20 nt, Human
caguucauuagaaauauuuu

SEQ ID NO: 3649619 - RNA, 16 nt, Human
caguuccaagaaagau

SEQ ID NO: 3649620 - RNA, 18 nt, Human
caguucccacauuaaaga

SEQ ID NO: 3649621 - RNA, 14 nt, Human
caguucccagaauc

SEQ ID NO: 3649622 - RNA, 16 nt, Human
caguucccagaaucaa

SEQ ID NO: 3649623 - RNA, 13 nt, Human
caguucccuuggc

SEQ ID NO: 3649624 - RNA, 16 nt, Human
caguucccuuggccuc

SEQ ID NO: 3649625 - RNA, 17 nt, Human
caguuccgauuucccag

SEQ ID NO: 3649626 - RNA, 18 nt, Human
caguuccgauuucccagg

SEQ ID NO: 3649627 - RNA, 15 nt, Human
caguuccucuuugca

SEQ ID NO: 3649628 - RNA, 23 nt, Human
caguuccucuuugcauggaauuu

SEQ ID NO: 3649629 - RNA, 13 nt, Human
caguucgcagcca

SEQ ID NO: 3649630 - RNA, 16 nt, Human
caguucgcagccaccc

SEQ ID NO: 3649631 - RNA, 18 nt, Human
caguucgcagccacccug

SEQ ID NO: 3649632 - RNA, 19 nt, Human
caguucgcagccacccuga

SEQ ID NO: 3649633 - RNA, 11 nt, Human
caguucuagga

SEQ ID NO: 3649634 - RNA, 12 nt, Human
caguucuaggaa

SEQ ID NO: 3649635 - RNA, 19 nt, Human
caguucuaguuugcauucc

SEQ ID NO: 3649636 - RNA, 14 nt, Human
caguucucuccuuc

SEQ ID NO: 3649637 - RNA, 15 nt, Human
caguucucuccuucu

SEQ ID NO: 3649638 - RNA, 16 nt, Human
caguucucuucacuca

SEQ ID NO: 3649639 - RNA, 12 nt, Human
caguucugaaga

SEQ ID NO: 3649640 - RNA, 16 nt, Human
caguucugaagaagau

SEQ ID NO: 3649641 - RNA, 22 nt, Human
caguucugaagaagaugguacc

SEQ ID NO: 3649642 - RNA, 11 nt, Human
caguucugcaa

SEQ ID NO: 3649643 - RNA, 20 nt, Human
caguucugcaaauagaaaac

SEQ ID NO: 3649644 - RNA, 13 nt, Human
caguucugcagcu

SEQ ID NO: 3649645 - RNA, 22 nt, Human
cauggaccacuguuucuugcuu

SEQ ID NO: 3649646 - RNA, 14 nt, Human
cauggaccaugcug

SEQ ID NO: 3649647 - RNA, 15 nt, Human
cauggacccggagcu

SEQ ID NO: 3649648 - RNA, 15 nt, Human
cauggaccuaacauu

SEQ ID NO: 3649649 - RNA, 17 nt, Human
cauggacucuguccuga

SEQ ID NO: 3649650 - RNA, 22 nt, Human
cauggacuucugccagcauaau

SEQ ID NO: 3649651 - RNA, 17 nt, Human
cauggacuuuauaagcc

SEQ ID NO: 3649652 - RNA, 11 nt, Human
cauggagaaac

SEQ ID NO: 3649653 - RNA, 15 nt, Human
cauggagaaacccug

SEQ ID NO: 3649654 - RNA, 20 nt, Human
cauggagaaacccugucucu

SEQ ID NO: 3649655 - RNA, 15 nt, Human
cauggagaaagcuga

SEQ ID NO: 3649656 - RNA, 23 nt, Human
cauggagaaagcugacuuggcug

SEQ ID NO: 3649657 - RNA, 16 nt, Human
cauggagacuccugcc

SEQ ID NO: 3649658 - RNA, 14 nt, Human
cauggagagcugga

SEQ ID NO: 3649659 - RNA, 20 nt, Human
cauggagagcuggagccugg

SEQ ID NO: 3649660 - RNA, 21 nt, Human
cauggagagcuggagccuggu

SEQ ID NO: 3649661 - RNA, 13 nt, Human
cauggagcuggcc

SEQ ID NO: 3649662 - RNA, 14 nt, Human
cauggagcuggccg

SEQ ID NO: 3649663 - RNA, 14 nt, Human
cauggaggagcuug

SEQ ID NO: 3649664 - RNA, 13 nt, Human
cauggaggcacac

SEQ ID NO: 3649665 - RNA, 17 nt, Human
cauggaggcccuccugu

SEQ ID NO: 3649666 - RNA, 18 nt, Human
cauggagggagggagugg

SEQ ID NO: 3649667 - RNA, 22 nt, Human
cauggagggagggagugguuug

SEQ ID NO: 3649668 - RNA, 17 nt, Human
cauggagguucuaaggc

SEQ ID NO: 3649669 - RNA, 18 nt, Human
cauggagguucuaaggcc

SEQ ID NO: 3649670 - RNA, 17 nt, Human
cauggagguuugaagau

SEQ ID NO: 3649671 - RNA, 22 nt, Human
cauggaguagagguacuagaau

SEQ ID NO: 3649672 - RNA, 14 nt, Human
cauggaguggcagc

SEQ ID NO: 3649673 - RNA, 17 nt, Human
cauggaguggcagccca

SEQ ID NO: 3649674 - RNA, 20 nt, Human
cauggaguggcagcccagcc

SEQ ID NO: 3649675 - RNA, 22 nt, Human
cauggaguggcagcccagccag

SEQ ID NO: 3649676 - RNA, 18 nt, Human
cauggaguguguauuguu

SEQ ID NO: 3649677 - RNA, 22 nt, Human
cauggaguguguauuguuccca

SEQ ID NO: 3649678 - RNA, 19 nt, Human
cauggauuacuucucuaua

SEQ ID NO: 3649679 - RNA, 22 nt, Human
cauggcacagagauucugaacu

SEQ ID NO: 3649680 - RNA, 23 nt, Human
cauggcaccuucagacuuugcuu

SEQ ID NO: 3649681 - RNA, 16 nt, Human
cauggcacucccucca

SEQ ID NO: 3649682 - RNA, 17 nt, Human
cauggcacucccuccag

SEQ ID NO: 3649683 - RNA, 19 nt, Human
cauggcacucccuccagca

SEQ ID NO: 3649684 - RNA, 16 nt, Human
cauggcacuugcaucu

SEQ ID NO: 3649685 - RNA, 20 nt, Human
caucacucuagguuuuacag

SEQ ID NO: 3649686 - RNA, 16 nt, Human
caucacugaguuuucc

SEQ ID NO: 3649687 - RNA, 20 nt, Human
caucacuguucaugcuggcg

SEQ ID NO: 3649688 - RNA, 15 nt, Human
caucacuuaaaacac

SEQ ID NO: 3649689 - RNA, 14 nt, Human
caucacuuguacaa

SEQ ID NO: 3649690 - RNA, 19 nt, Human
caucacuuguacaaaauaa

SEQ ID NO: 3649691 - RNA, 15 nt, Human
caucacuuugaccua

SEQ ID NO: 3649692 - RNA, 17 nt, Human
caucacuuuucagugau

SEQ ID NO: 3649693 - RNA, 17 nt, Human
caucagaaacacccuca

SEQ ID NO: 3649694 - RNA, 19 nt, Human
caucagaaacacccucaca

SEQ ID NO: 3649695 - RNA, 15 nt, Human
caucagaaagcuuua

SEQ ID NO: 3649696 - RNA, 12 nt, Human
caucagaaaggg

SEQ ID NO: 3649697 - RNA, 17 nt, Human
caucagaaagggagggc

SEQ ID NO: 3649698 - RNA, 20 nt, Human
caucagaaagggagggcucu

SEQ ID NO: 3649699 - RNA, 22 nt, Human
caucagaaagggagggcucuga

SEQ ID NO: 3649700 - RNA, 13 nt, Human
caucagaagauaa

SEQ ID NO: 3649701 - RNA, 20 nt, Human
caucagaggccuagucagcc

SEQ ID NO: 3649702 - RNA, 16 nt, Human
caaugugacuuugaaa

SEQ ID NO: 3649703 - RNA, 18 nt, Human
caaugugaggggucccua

SEQ ID NO: 3649704 - RNA, 12 nt, Human
caaugugcagug

SEQ ID NO: 3649705 - RNA, 21 nt, Human
caaugugguugcaaggccgcu

SEQ ID NO: 3649706 - RNA, 22 nt, Human
caaugugucuuucuaagaaauc

SEQ ID NO: 3649707 - RNA, 20 nt, Human
caaugugucuuucuuuuugg

SEQ ID NO: 3649708 - RNA, 20 nt, Human
caauguguggcugaagacuu

SEQ ID NO: 3649709 - RNA, 18 nt, Human
caauguguguauauggac

SEQ ID NO: 3649710 - RNA, 14 nt, Human
caauguguuuuucu

SEQ ID NO: 3649711 - RNA, 11 nt, Human
caauguuaagg

SEQ ID NO: 3649712 - RNA, 19 nt, Human
caauguuaaggaaacucuu

SEQ ID NO: 3649713 - RNA, 17 nt, Human
caauguuagagacuuuu

SEQ ID NO: 3649714 - RNA, 14 nt, Human
caauguucauugua

SEQ ID NO: 3649715 - RNA, 23 nt, Human
caauguuuaaaaaaguuuaaaau

SEQ ID NO: 3649716 - RNA, 23 nt, Human
caauguuuaugcaaggaaggaaa

SEQ ID NO: 3649717 - RNA, 12 nt, Human
caauguuucaag

SEQ ID NO: 3649718 - RNA, 13 nt, Human
caauguuucuuuu

SEQ ID NO: 3649719 - RNA, 22 nt, Human
caauguuuuccuuugucaucau

SEQ ID NO: 3649720 - RNA, 17 nt, Human
caauguuuuuaaaaauc

SEQ ID NO: 3649721 - RNA, 23 nt, Human
caauuaaaaaaaaagaucuguuu

SEQ ID NO: 3649722 - RNA, 13 nt, Human
caauuaaacggau

SEQ ID NO: 3649723 - RNA, 17 nt, Human
caauuaaacggauuauu

SEQ ID NO: 3649724 - RNA, 18 nt, Human
caauuaaacggauuauuu

SEQ ID NO: 3649725 - RNA, 19 nt, Human
caauuaaacggauuauuuu

SEQ ID NO: 3649726 - RNA, 19 nt, Human
caauuaaacuuccaaagaa

SEQ ID NO: 3649727 - RNA, 17 nt, Human
caauuaaagaaauaauu

SEQ ID NO: 3649728 - RNA, 13 nt, Human
caauuaaauguag

SEQ ID NO: 3649729 - RNA, 13 nt, Human
caauuaaggauuu

SEQ ID NO: 3649730 - RNA, 22 nt, Human
caauuaaggauuuuaugcuuua

SEQ ID NO: 3649731 - RNA, 15 nt, Human
caauuaauaaaaaau

SEQ ID NO: 3649732 - RNA, 18 nt, Human
caauuaauaaaaaaugga

SEQ ID NO: 3649733 - RNA, 19 nt, Human
caauuaauaguuugucuau

SEQ ID NO: 3649734 - RNA, 20 nt, Human
caauuaauauuaauuuucua

SEQ ID NO: 3649735 - RNA, 14 nt, Human
caauuaauugucuu

SEQ ID NO: 3649736 - RNA, 22 nt, Human
caauuaauuuuuuuauuguuua

SEQ ID NO: 3649737 - RNA, 15 nt, Human
caauuacuuuagaaa

SEQ ID NO: 3649738 - RNA, 16 nt, Human
caauuaggaaguguaa

SEQ ID NO: 3649739 - RNA, 20 nt, Human
caauuaggaaguguaacagc

SEQ ID NO: 3649740 - RNA, 17 nt, Human
caauuaguaacauucau

SEQ ID NO: 3649741 - RNA, 17 nt, Human
caauuaguuuccuuuuu

SEQ ID NO: 3649742 - RNA, 18 nt, Human
caauuauaguuucugagg

SEQ ID NO: 3649743 - RNA, 22 nt, Human
caauuauaguuucugaggcuuu

SEQ ID NO: 3649744 - RNA, 11 nt, Human
caauuaugaaa

SEQ ID NO: 3649745 - RNA, 13 nt, Human
caauuauguuaaa

SEQ ID NO: 3649746 - RNA, 17 nt, Human
caauuauugauauauau

SEQ ID NO: 3649747 - RNA, 17 nt, Human
caauuauuguuacacau

SEQ ID NO: 3649748 - RNA, 13 nt, Human
caauuauuucccc

SEQ ID NO: 3649749 - RNA, 21 nt, Human
caauuccaacaguuuaaugaa

SEQ ID NO: 3649750 - RNA, 16 nt, Human
caauuccaauauuucu

SEQ ID NO: 3649751 - RNA, 17 nt, Human
caauuccaauauuucug

SEQ ID NO: 3649752 - RNA, 21 nt, Human
caauuccaauauuucugcuuu

SEQ ID NO: 3649753 - RNA, 16 nt, Human
caauuccacucugaua

SEQ ID NO: 3649754 - RNA, 11 nt, Human
caauuccccuc

SEQ ID NO: 3649755 - RNA, 14 nt, Human
caauuccccucugc

SEQ ID NO: 3649756 - RNA, 15 nt, Human
caauucccugcuguc

SEQ ID NO: 3649757 - RNA, 20 nt, Human
caauuccguagccagcugcu

SEQ ID NO: 3649758 - RNA, 15 nt, Human
caauuccuagauaaa

SEQ ID NO: 3649759 - RNA, 16 nt, Human
caauuccugggcccca

SEQ ID NO: 3649760 - RNA, 23 nt, Human
caauucuaucuuuuguuuccuuu

SEQ ID NO: 3649761 - RNA, 19 nt, Human
caauucuccugccucagcc

SEQ ID NO: 3649762 - RNA, 16 nt, Human
caauucuccugccuuu

SEQ ID NO: 3649763 - RNA, 13 nt, Human
caauucuccuuua

SEQ ID NO: 3649764 - RNA, 17 nt, Human
caauucucuuuaguucu

SEQ ID NO: 3649765 - RNA, 19 nt, Human
caauucuguagguuaaaaa

SEQ ID NO: 3649766 - RNA, 14 nt, Human
caauucuguuuuag

SEQ ID NO: 3649767 - RNA, 22 nt, Human
caauucuguuuuagguuaaaaa

SEQ ID NO: 3649768 - RNA, 23 nt, Human
caauucuguuuuuaaugcuauuu

SEQ ID NO: 3649769 - RNA, 18 nt, Human
caauucuuacaaacaugu

SEQ ID NO: 3649770 - RNA, 12 nt, Human
caauucuuuaua

SEQ ID NO: 3649771 - RNA, 13 nt, Human
caauucuuucaag

SEQ ID NO: 3649772 - RNA, 19 nt, Human
caauucuuuuaacuguugu

SEQ ID NO: 3649773 - RNA, 14 nt, Human
caauugaaaugcau

SEQ ID NO: 3649774 - RNA, 18 nt, Human
caauugaacuuaaauaaa

SEQ ID NO: 3649775 - RNA, 15 nt, Human
caauugaauggucag

SEQ ID NO: 3649776 - RNA, 23 nt, Human
caauugagaaaaauauauacuaa

SEQ ID NO: 3649777 - RNA, 14 nt, Human
caauugcugcaucu

SEQ ID NO: 3649778 - RNA, 12 nt, Human
caauuggaggaa

SEQ ID NO: 3649779 - RNA, 19 nt, Human
caauuggcaccgaagccca

SEQ ID NO: 3649780 - RNA, 20 nt, Human
caauuggcaccgaagcccag

SEQ ID NO: 3649781 - RNA, 21 nt, Human
caauugggagcugccaagagu

SEQ ID NO: 3649782 - RNA, 14 nt, Human
caauuguaaauuga

SEQ ID NO: 3649783 - RNA, 15 nt, Human
caauugucauuuaua

SEQ ID NO: 3649784 - RNA, 17 nt, Human
caauugucauuuauaaa

SEQ ID NO: 3649785 - RNA, 21 nt, Human
caauugucgaaaagagucuuc

SEQ ID NO: 3649786 - RNA, 16 nt, Human
caauugugcugccauu

SEQ ID NO: 3649787 - RNA, 17 nt, Human
caauuguguagccuuuu

SEQ ID NO: 3649788 - RNA, 17 nt, Human
caauuguguggucagug

SEQ ID NO: 3649789 - RNA, 24 nt, Human
caauuguugacaguucugaagaau

SEQ ID NO: 3649790 - RNA, 21 nt, Human
caauuguuuuaaucugaaauu

SEQ ID NO: 3649791 - RNA, 17 nt, Human
caauuguuuuuguugug

SEQ ID NO: 3649792 - RNA, 16 nt, Human
caauuuaaacccauuu

SEQ ID NO: 3649793 - RNA, 11 nt, Human
caauuuagaaa

SEQ ID NO: 3649794 - RNA, 14 nt, Human
caauuuaugaauug

SEQ ID NO: 3649795 - RNA, 13 nt, Human
caauuuauuaugg

SEQ ID NO: 3649796 - RNA, 21 nt, Human
caauuuauugcacaaaauaua

SEQ ID NO: 3649797 - RNA, 23 nt, Human
caauuuauuugaaugauuuuucu

SEQ ID NO: 3649798 - RNA, 15 nt, Human
caauuucaagguucu

SEQ ID NO: 3649799 - RNA, 13 nt, Human
caauuucggauuu

SEQ ID NO: 3649800 - RNA, 17 nt, Human
caauuucuaauuuuuaa

SEQ ID NO: 3649801 - RNA, 19 nt, Human
caauuucuaauuuuuaaga

SEQ ID NO: 3649802 - RNA, 15 nt, Human
caauuucuguguugc

SEQ ID NO: 3649803 - RNA, 20 nt, Human
caauuugauacauaauaaaa

SEQ ID NO: 3649804 - RNA, 22 nt, Human
caauuugauacauaauaaaaaa

SEQ ID NO: 3649805 - RNA, 18 nt, Human
caauuuggcaauuuugug

SEQ ID NO: 3649806 - RNA, 16 nt, Human
caauuugggagauaua

SEQ ID NO: 3649807 - RNA, 18 nt, Human
caauuugggagauauauu

SEQ ID NO: 3649808 - RNA, 17 nt, Human
caauuugggcuuccugu

SEQ ID NO: 3649809 - RNA, 16 nt, Human
caauuugucauuuuga

SEQ ID NO: 3649810 - RNA, 23 nt, Human
caauuuguucagucuuucauuua

SEQ ID NO: 3649811 - RNA, 22 nt, Human
caauuuguucauccuauuguug

SEQ ID NO: 3649812 - RNA, 12 nt, Human
caauuuuaaaca

SEQ ID NO: 3649813 - RNA, 15 nt, Human
caauuuuaaagacau

SEQ ID NO: 3649814 - RNA, 22 nt, Human
caauuuuaauuuaguaaauguu

SEQ ID NO: 3649815 - RNA, 15 nt, Human
caauuuuaucuguuu

SEQ ID NO: 3649816 - RNA, 14 nt, Human
caauuuucagauuu

SEQ ID NO: 3649817 - RNA, 16 nt, Human
caauuuucagauuugc

SEQ ID NO: 3649818 - RNA, 16 nt, Human
caauuuuccuugaagc

SEQ ID NO: 3649819 - RNA, 20 nt, Human
caauuuucuggaauacauga

SEQ ID NO: 3649820 - RNA, 12 nt, Human
caauuuucuugu

SEQ ID NO: 3649821 - RNA, 11 nt, Human
caauuuuguaa

SEQ ID NO: 3649822 - RNA, 22 nt, Human
caauuuuuacacaaaccugaaa

SEQ ID NO: 3649823 - RNA, 14 nt, Human
caauuuuuaggaag

SEQ ID NO: 3649824 - RNA, 13 nt, Human
caauuuuuauuuc

SEQ ID NO: 3649825 - RNA, 18 nt, Human
caauuuuuauuucuuuua

SEQ ID NO: 3649826 - RNA, 13 nt, Human
caauuuuucugca

SEQ ID NO: 3649827 - RNA, 13 nt, Human
caauuuuugccuu

SEQ ID NO: 3649828 - RNA, 18 nt, Human
caauuuuugguugaauaa

SEQ ID NO: 3649829 - RNA, 19 nt, Human
caauuuuugguugaauaaa

SEQ ID NO: 3649830 - RNA, 23 nt, Human
caucuaaacuuuaauauguauuu

SEQ ID NO: 3649831 - RNA, 15 nt, Human
caucuaaauaccugc

SEQ ID NO: 3649832 - RNA, 18 nt, Human
caucuaaccucaucuucu

SEQ ID NO: 3649833 - RNA, 15 nt, Human
caucuaagcugcagc

SEQ ID NO: 3649834 - RNA, 13 nt, Human
caucuaauucuga

SEQ ID NO: 3649835 - RNA, 14 nt, Human
caucuacaaaacau

SEQ ID NO: 3649836 - RNA, 16 nt, Human
caucuaccccuggaug

SEQ ID NO: 3649837 - RNA, 15 nt, Human
caucuacccuccgau

SEQ ID NO: 3649838 - RNA, 20 nt, Human
caucuaccuagauuuaauau

SEQ ID NO: 3649839 - RNA, 16 nt, Human
caucuaccuuuucucu

SEQ ID NO: 3649840 - RNA, 18 nt, Human
caucuaccuuuucucuuc

SEQ ID NO: 3649841 - RNA, 19 nt, Human
caucuacucccaaguaugg

SEQ ID NO: 3649842 - RNA, 19 nt, Human
caucuagagcuugaugcca

SEQ ID NO: 3649843 - RNA, 19 nt, Human
caucuagaggcuuccuuca

SEQ ID NO: 3649844 - RNA, 21 nt, Human
caucuagaggcuuccuucauu

SEQ ID NO: 3649845 - RNA, 18 nt, Human
caucuagcaaauguuaug

SEQ ID NO: 3649846 - RNA, 19 nt, Human
caucuaggggagccuugau

SEQ ID NO: 3649847 - RNA, 17 nt, Human
caucuagguaauuuuua

SEQ ID NO: 3649848 - RNA, 18 nt, Human
caucuaguacuugaaaaa

SEQ ID NO: 3649849 - RNA, 14 nt, Human
caucuagugagcag

SEQ ID NO: 3649850 - RNA, 23 nt, Human
caucuaguuccccuguuuauuca

SEQ ID NO: 3649851 - RNA, 15 nt, Human
caucuaucucaaucc

SEQ ID NO: 3649852 - RNA, 13 nt, Human
caucuauucucuc

SEQ ID NO: 3649853 - RNA, 14 nt, Human
caucuauuucugag

SEQ ID NO: 3649854 - RNA, 16 nt, Human
caucuauuucugagaa

SEQ ID NO: 3649855 - RNA, 21 nt, Human
caucuauuuugaugcagcauu

SEQ ID NO: 3649856 - RNA, 23 nt, Human
caucuauuuugaugcagcauuug

SEQ ID NO: 3649857 - RNA, 22 nt, Human
caucucaacaggccucagggcu

SEQ ID NO: 3649858 - RNA, 20 nt, Human
caucucacacaugagcauca

SEQ ID NO: 3649859 - RNA, 19 nt, Human
caucucacuggaugcaaag

SEQ ID NO: 3649860 - RNA, 13 nt, Human
caucucagcccac

SEQ ID NO: 3649861 - RNA, 20 nt, Human
caucucagcucacugcaacc

SEQ ID NO: 3649862 - RNA, 14 nt, Human
caucucaggccaga

SEQ ID NO: 3649863 - RNA, 12 nt, Human
caucucaggggc

SEQ ID NO: 3649864 - RNA, 16 nt, Human
caucucaggggccaga

SEQ ID NO: 3649865 - RNA, 16 nt, Human
caucucaguccucaaa

SEQ ID NO: 3649866 - RNA, 18 nt, Human
caucucagugcuguaaaa

SEQ ID NO: 3649867 - RNA, 12 nt, Human
caucucaucaug

SEQ ID NO: 3649868 - RNA, 18 nt, Human
caucucaugaggggagag

SEQ ID NO: 3649869 - RNA, 18 nt, Human
caucucauuuaagggaaa

SEQ ID NO: 3649870 - RNA, 21 nt, Human
caucucauuuaagggaaaaau

SEQ ID NO: 3649871 - RNA, 22 nt, Human
caucucauuuaagggaaaaaua

SEQ ID NO: 3649872 - RNA, 23 nt, Human
caucucauuuaagggaaaaauau

SEQ ID NO: 3649873 - RNA, 16 nt, Human
caucuccaagaaugcu

SEQ ID NO: 3649874 - RNA, 19 nt, Human
caucuccaagaaugcugaa

SEQ ID NO: 3649875 - RNA, 14 nt, Human
caucuccacuccag

SEQ ID NO: 3649876 - RNA, 17 nt, Human
caucuccagggaguccc

SEQ ID NO: 3649877 - RNA, 20 nt, Human
caucuccagggaguccccuc

SEQ ID NO: 3649878 - RNA, 17 nt, Human
cauugcuagauaaaagc

SEQ ID NO: 3649879 - RNA, 15 nt, Human
cauugcugagccucu

SEQ ID NO: 3649880 - RNA, 16 nt, Human
cauugcugagccucug

SEQ ID NO: 3649881 - RNA, 17 nt, Human
cauugcugagccucugc

SEQ ID NO: 3649882 - RNA, 18 nt, Human
cauugcugggcuugucug

SEQ ID NO: 3649883 - RNA, 17 nt, Human
cauugcuggucuuguaa

SEQ ID NO: 3649884 - RNA, 19 nt, Human
cauugcugucugcagccuu

SEQ ID NO: 3649885 - RNA, 20 nt, Human
cauugcugucugcagccuug

SEQ ID NO: 3649886 - RNA, 21 nt, Human
cauugcugucugcagccuuga

SEQ ID NO: 3649887 - RNA, 22 nt, Human
cauugcugugaauuagcucacu

SEQ ID NO: 3649888 - RNA, 14 nt, Human
cauugcuguuaugu

SEQ ID NO: 3649889 - RNA, 17 nt, Human
cauugcuguucuacuuu

SEQ ID NO: 3649890 - RNA, 13 nt, Human
cauugcuucuucu

SEQ ID NO: 3649891 - RNA, 16 nt, Human
cauugcuucuucugag

SEQ ID NO: 3649892 - RNA, 23 nt, Human
cauugcuuugaagcaguuguguc

SEQ ID NO: 3649893 - RNA, 21 nt, Human
cauugcuuuuaaaacuacuua

SEQ ID NO: 3649894 - RNA, 18 nt, Human
cauugcuuuuauuuugaa

SEQ ID NO: 3649895 - RNA, 21 nt, Human
cauugcuuuuauuuugaaaag

SEQ ID NO: 3649896 - RNA, 12 nt, Human
cauuggaaauua

SEQ ID NO: 3649897 - RNA, 21 nt, Human
cauuggaaauuuagcauugua

SEQ ID NO: 3649898 - RNA, 13 nt, Human
cauuggaaauuuc

SEQ ID NO: 3649899 - RNA, 14 nt, Human
cauuggaacuggag

SEQ ID NO: 3649900 - RNA, 16 nt, Human
cauuggaacuggaggc

SEQ ID NO: 3649901 - RNA, 16 nt, Human
cauuggaagaccccac

SEQ ID NO: 3649902 - RNA, 18 nt, Human
cauuggaagaccccaccc

SEQ ID NO: 3649903 - RNA, 17 nt, Human
cauuggacccuuccaug

SEQ ID NO: 3649904 - RNA, 14 nt, Human
cauuggauacagca

SEQ ID NO: 3649905 - RNA, 17 nt, Human
cauuggauacagcagua

SEQ ID NO: 3649906 - RNA, 11 nt, Human
cauuggauauu

SEQ ID NO: 3649907 - RNA, 18 nt, Human
cauuggauauuuuuuacu

SEQ ID NO: 3649908 - RNA, 16 nt, Human
cauuggauuauccuga

SEQ ID NO: 3649909 - RNA, 17 nt, Human
cauuggauuauccugag

SEQ ID NO: 3649910 - RNA, 21 nt, Human
cauuggcaccuaauccaggca

SEQ ID NO: 3649911 - RNA, 16 nt, Human
cauuggcagcaggugc

SEQ ID NO: 3649912 - RNA, 19 nt, Human
cauuggcuauuuaaaacuu

SEQ ID NO: 3649913 - RNA, 22 nt, Human
cauuggcucuugaacugagcuu

SEQ ID NO: 3649914 - RNA, 15 nt, Human
cauuggcugagagac

SEQ ID NO: 3649915 - RNA, 13 nt, Human
cauuggcuuuauc

SEQ ID NO: 3649916 - RNA, 20 nt, Human
cauugggcagcgcccuuccu

SEQ ID NO: 3649917 - RNA, 22 nt, Human
cauuggggcucccagccaggcc

SEQ ID NO: 3649918 - RNA, 21 nt, Human
cauuggguccugggucuuuca

SEQ ID NO: 3649919 - RNA, 17 nt, Human
cauugggucuauuccag

SEQ ID NO: 3649920 - RNA, 21 nt, Human
cauugggucuauuccagcuca

SEQ ID NO: 3649921 - RNA, 18 nt, Human
cauuggguggguaaauuc

SEQ ID NO: 3649922 - RNA, 15 nt, Human
cauugguucuuguau

SEQ ID NO: 3649923 - RNA, 21 nt, Human
cauuguaaaagcauuuuguaa

SEQ ID NO: 3649924 - RNA, 23 nt, Human
cauuguaaaagcauuuuguaaua

SEQ ID NO: 3649925 - RNA, 13 nt, Human
cauuguaaaauaa

SEQ ID NO: 3649926 - RNA, 14 nt, Human
cauuguaaaauaau

SEQ ID NO: 3649927 - RNA, 13 nt, Human
cauuguaaacaaa

SEQ ID NO: 3649928 - RNA, 15 nt, Human
cauuguaaacaaacu

SEQ ID NO: 3649929 - RNA, 15 nt, Human
cauuguaauguuacu

SEQ ID NO: 3649930 - RNA, 14 nt, Human
cauuguaauguugu

SEQ ID NO: 3649931 - RNA, 23 nt, Human
cauuguaauguugugaauaauua

SEQ ID NO: 3649932 - RNA, 21 nt, Human
cauuguacaguuuguuuacac

SEQ ID NO: 3649933 - RNA, 22 nt, Human
cauuguacaguuuguuuacaca

SEQ ID NO: 3649934 - RNA, 20 nt, Human
cauuguaccaugaaauaucc

SEQ ID NO: 3649935 - RNA, 19 nt, Human
cauuguacgaagaguauuu

SEQ ID NO: 3649936 - RNA, 16 nt, Human
cauuguacuaccugug

SEQ ID NO: 3649937 - RNA, 15 nt, Human
cauuguagagcuucu

SEQ ID NO: 3649938 - RNA, 21 nt, Human
cauuguagagcuucuggcacu

SEQ ID NO: 3649939 - RNA, 18 nt, Human
cauuguagcgucuuucuu

SEQ ID NO: 3649940 - RNA, 15 nt, Human
cauuguauaaaaaua

SEQ ID NO: 3649941 - RNA, 19 nt, Human
cauuguauagauauaauga

SEQ ID NO: 3649942 - RNA, 20 nt, Human
cauuguauagauauaaugaa

SEQ ID NO: 3649943 - RNA, 22 nt, Human
cauuguauaguuggaaucauau

SEQ ID NO: 3649944 - RNA, 22 nt, Human
cauuguauauauguguguuuaa

SEQ ID NO: 3649945 - RNA, 14 nt, Human
cauuguauauguga

SEQ ID NO: 3649946 - RNA, 15 nt, Human
cauuguaucugucuu

SEQ ID NO: 3649947 - RNA, 16 nt, Human
cauuguaucugucuuu

SEQ ID NO: 3649948 - RNA, 17 nt, Human
cauuguaucugucuuuc

SEQ ID NO: 3649949 - RNA, 18 nt, Human
cauuguaugauguguugu

SEQ ID NO: 3649950 - RNA, 22 nt, Human
cauuguauggauaguaaaauuc

SEQ ID NO: 3649951 - RNA, 16 nt, Human
cauuguccagagcugc

SEQ ID NO: 3649952 - RNA, 20 nt, Human
cauuguccagagcugcuucc

SEQ ID NO: 3649953 - RNA, 19 nt, Human
cauuguccccaaugaauau

SEQ ID NO: 3649954 - RNA, 14 nt, Human
cauugucccucugc

SEQ ID NO: 3649955 - RNA, 21 nt, Human
cauugucccucugccccaucc

SEQ ID NO: 3649956 - RNA, 17 nt, Human
cauugucccucuucacu

SEQ ID NO: 3649957 - RNA, 18 nt, Human
cauugucccucuucacuc

SEQ ID NO: 3649958 - RNA, 13 nt, Human
cauuguccucuuu

SEQ ID NO: 3649959 - RNA, 22 nt, Human
cauugucguauaggcauguaaa

SEQ ID NO: 3649960 - RNA, 14 nt, Human
cauugucucagagc

SEQ ID NO: 3649961 - RNA, 13 nt, Human
cauugucuuguuc

SEQ ID NO: 3649962 - RNA, 15 nt, Human
cauugucuuuauaug

SEQ ID NO: 3649963 - RNA, 17 nt, Human
cauugucuuuauaugaa

SEQ ID NO: 3649964 - RNA, 15 nt, Human
cauugugaaccaaug

SEQ ID NO: 3649965 - RNA, 18 nt, Human
cauugugaacugacaggc

SEQ ID NO: 3649966 - RNA, 22 nt, Human
cauugugauguauauuccuuug

SEQ ID NO: 3649967 - RNA, 22 nt, Human
cauugugccaugucaaacaaau

SEQ ID NO: 3649968 - RNA, 21 nt, Human
cauuguggugugagcuucaga

SEQ ID NO: 3649969 - RNA, 15 nt, Human
cauuguguugacauu

SEQ ID NO: 3649970 - RNA, 14 nt, Human
cauuguuaccucua

SEQ ID NO: 3649971 - RNA, 22 nt, Human
cauuguuagcacuaggcaccca

SEQ ID NO: 3649972 - RNA, 16 nt, Human
cauuguuauuuauaca

SEQ ID NO: 3649973 - RNA, 16 nt, Human
cauuguucaaaaggaa

SEQ ID NO: 3649974 - RNA, 20 nt, Human
caugcugaagccaaagccaa

SEQ ID NO: 3649975 - RNA, 19 nt, Human
caugcugaaggcugaaaga

SEQ ID NO: 3649976 - RNA, 19 nt, Human
caugcugaagggaccuuga

SEQ ID NO: 3649977 - RNA, 16 nt, Human
caugcugaggccuggg

SEQ ID NO: 3649978 - RNA, 18 nt, Human
caugcugaggccugggcc

SEQ ID NO: 3649979 - RNA, 21 nt, Human
caugcugagucucccaaggcu

SEQ ID NO: 3649980 - RNA, 21 nt, Human
caugcugccaauauccuaaua

SEQ ID NO: 3649981 - RNA, 12 nt, Human
caugcugcccug

SEQ ID NO: 3649982 - RNA, 15 nt, Human
caugcugcccuguga

SEQ ID NO: 3649983 - RNA, 18 nt, Human
caugcugcccugugagua

SEQ ID NO: 3649984 - RNA, 12 nt, Human
caugcugccucc

SEQ ID NO: 3649985 - RNA, 19 nt, Human
caugcugcuggacaguauc

SEQ ID NO: 3649986 - RNA, 14 nt, Human
caugcugcuuuaau

SEQ ID NO: 3649987 - RNA, 18 nt, Human
caugcugcuuuaauugug

SEQ ID NO: 3649988 - RNA, 21 nt, Human
caugcugcuuuaauugugaau

SEQ ID NO: 3649989 - RNA, 17 nt, Human
caugcuggaaaauaaua

SEQ ID NO: 3649990 - RNA, 22 nt, Human
caugcuggaaaauaauacugcu

SEQ ID NO: 3649991 - RNA, 22 nt, Human
caugcuggaaccugcaaaaaau

SEQ ID NO: 3649992 - RNA, 13 nt, Human
caugcuggagccu

SEQ ID NO: 3649993 - RNA, 14 nt, Human
caugcuggagccug

SEQ ID NO: 3649994 - RNA, 17 nt, Human
caugcuggagccugugu

SEQ ID NO: 3649995 - RNA, 15 nt, Human
caugcuggccagccu

SEQ ID NO: 3649996 - RNA, 17 nt, Human
caugcuggccagccugg

SEQ ID NO: 3649997 - RNA, 19 nt, Human
caugcuggcucccagggcc

SEQ ID NO: 3649998 - RNA, 20 nt, Human
caugcuggcucccagggcca

SEQ ID NO: 3649999 - RNA, 20 nt, Human
caugcuggggcaagucccug

SEQ ID NO: 3650000 - RNA, 16 nt, Human
caugcuggguucugca

SEQ ID NO: 3650001 - RNA, 19 nt, Human
caugcuggguucugcacag

SEQ ID NO: 3650002 - RNA, 13 nt, Human
caugcuguacaua

SEQ ID NO: 3650003 - RNA, 21 nt, Human
caugcuguacauacuuuuugg

SEQ ID NO: 3650004 - RNA, 12 nt, Human
caugcugucugg

SEQ ID NO: 3650005 - RNA, 17 nt, Human
caugcugucuggcacag

SEQ ID NO: 3650006 - RNA, 23 nt, Human
caugcugucuggcacagccugca

SEQ ID NO: 3650007 - RNA, 18 nt, Human
caugcuguguaagcugug

SEQ ID NO: 3650008 - RNA, 20 nt, Human
caugcuguucaugaaagauu

SEQ ID NO: 3650009 - RNA, 18 nt, Human
caugcuguugauugcuaa

SEQ ID NO: 3650010 - RNA, 22 nt, Human
caugcuguugauugcuaaaugu

SEQ ID NO: 3650011 - RNA, 23 nt, Human
caugcuguugauugcuaaaugua

SEQ ID NO: 3650012 - RNA, 23 nt, Human
caugcuuagcaguccccuucccu

SEQ ID NO: 3650013 - RNA, 16 nt, Human
caugcuuauuccauga

SEQ ID NO: 3650014 - RNA, 16 nt, Human
caugcuucuuccuuac

SEQ ID NO: 3650015 - RNA, 19 nt, Human
caugcuuguguuucuuagu

SEQ ID NO: 3650016 - RNA, 18 nt, Human
caugcuuuaaaguguaau

SEQ ID NO: 3650017 - RNA, 22 nt, Human
caugcuuugaaaaaucacuuga

SEQ ID NO: 3650018 - RNA, 23 nt, Human
cauggaaacaagaugaaauucca

SEQ ID NO: 3650019 - RNA, 19 nt, Human
cauggaaauauuaugcaaa

SEQ ID NO: 3650020 - RNA, 21 nt, Human
cauggaaauucccuucaucug

SEQ ID NO: 3650021 - RNA, 19 nt, Human
cauggaaauuuaaagcagg

SEQ ID NO: 3650022 - RNA, 18 nt, Human
cauggaacgcguugaaau

SEQ ID NO: 3650023 - RNA, 19 nt, Human
cauggaacucauuccugcc

SEQ ID NO: 3650024 - RNA, 21 nt, Human
cauggaacucauuccugccug

SEQ ID NO: 3650025 - RNA, 13 nt, Human
cauggaaggcaag

SEQ ID NO: 3650026 - RNA, 14 nt, Human
cauggaaggcaaga

SEQ ID NO: 3650027 - RNA, 23 nt, Human
cauggaaggcaagauuguguccc

SEQ ID NO: 3650028 - RNA, 22 nt, Human
cauggaaguacuauaauuuacc

SEQ ID NO: 3650029 - RNA, 15 nt, Human
cauggaaugcuugaa

SEQ ID NO: 3650030 - RNA, 15 nt, Human
cauggaaugguuaua

SEQ ID NO: 3650031 - RNA, 19 nt, Human
cauggaauucacaaaguaa

SEQ ID NO: 3650032 - RNA, 20 nt, Human
cauggaauuggagcucgugg

SEQ ID NO: 3650033 - RNA, 19 nt, Human
cauggaauuuguaaguuua

SEQ ID NO: 3650034 - RNA, 14 nt, Human
cauggacaauggac

SEQ ID NO: 3650035 - RNA, 15 nt, Human
cauggacaauggacc

SEQ ID NO: 3650036 - RNA, 14 nt, Human
cauggacaccccuu

SEQ ID NO: 3650037 - RNA, 21 nt, Human
cauggacaccccuuauccagg

SEQ ID NO: 3650038 - RNA, 21 nt, Human
cauggacagaagaaggcagca

SEQ ID NO: 3650039 - RNA, 15 nt, Human
cauggacauuuagaa

SEQ ID NO: 3650040 - RNA, 20 nt, Human
cauggacauuuagaagaaag

SEQ ID NO: 3650041 - RNA, 23 nt, Human
cauggaccacuguuucuugcuug

SEQ ID NO: 3650042 - RNA, 12 nt, Human
cauggacccgga

SEQ ID NO: 3650043 - RNA, 16 nt, Human
cauggaccuaacauuc

SEQ ID NO: 3650044 - RNA, 16 nt, Human
cauggacuaagaacga

SEQ ID NO: 3650045 - RNA, 19 nt, Human
cauggacucuguccugaag

SEQ ID NO: 3650046 - RNA, 14 nt, Human
cauggacuucacau

SEQ ID NO: 3650047 - RNA, 16 nt, Human
cauggacuuguauauu

SEQ ID NO: 3650048 - RNA, 17 nt, Human
cauggagaaacccuguc

SEQ ID NO: 3650049 - RNA, 17 nt, Human
cauggagaaagcugacu

SEQ ID NO: 3650050 - RNA, 19 nt, Human
cauggagaaagcugacuug

SEQ ID NO: 3650051 - RNA, 12 nt, Human
cauggagaaguu

SEQ ID NO: 3650052 - RNA, 17 nt, Human
cauggagaaguuaucag

SEQ ID NO: 3650053 - RNA, 15 nt, Human
cauggagacuccugc

SEQ ID NO: 3650054 - RNA, 20 nt, Human
cauggagacuccugcccugu

SEQ ID NO: 3650055 - RNA, 14 nt, Human
cauggagagcuaga

SEQ ID NO: 3650056 - RNA, 14 nt, Human
cauggagccccagc

SEQ ID NO: 3650057 - RNA, 18 nt, Human
cauggagccccagccccc

SEQ ID NO: 3650058 - RNA, 22 nt, Human
cauggagcuauaacuaagcauc

SEQ ID NO: 3650059 - RNA, 16 nt, Human
cauggaggcacacagc

SEQ ID NO: 3650060 - RNA, 13 nt, Human
cauggaggcccuc

SEQ ID NO: 3650061 - RNA, 20 nt, Human
cauggaggcccuccugugcu

SEQ ID NO: 3650062 - RNA, 21 nt, Human
cauggaguggcagcccagcca

SEQ ID NO: 3650063 - RNA, 17 nt, Human
cauggaguguguauugu

SEQ ID NO: 3650064 - RNA, 21 nt, Human
cauggauuucugucuucucua

SEQ ID NO: 3650065 - RNA, 20 nt, Human
cauggcaccaaagccaccag

SEQ ID NO: 3650066 - RNA, 21 nt, Human
cauggcaccugucgcccagug

SEQ ID NO: 3650067 - RNA, 22 nt, Human
cauggcaccuucagacuuugcu

SEQ ID NO: 3650068 - RNA, 13 nt, Human
cauggcacucccu

SEQ ID NO: 3650069 - RNA, 18 nt, Human
cauggcacucccuccagc

SEQ ID NO: 3650070 - RNA, 21 nt, Human
cauggcacucccuccagcaca

SEQ ID NO: 3650071 - RNA, 21 nt, Human
cauggcagauguaggagggac

SEQ ID NO: 3650072 - RNA, 23 nt, Human
cauggcagauguaggagggacug

SEQ ID NO: 3650073 - RNA, 19 nt, Human
cauggcagggggcugcugc

SEQ ID NO: 3650074 - RNA, 20 nt, Human
cauggcagggggcugcugcu

SEQ ID NO: 3650075 - RNA, 23 nt, Human
cauggcagugggaaaaauguagg

SEQ ID NO: 3650076 - RNA, 14 nt, Human
cauggcauccucca

SEQ ID NO: 3650077 - RNA, 23 nt, Human
cacauauaaauugucuuaaugga

SEQ ID NO: 3650078 - RNA, 15 nt, Human
cacauauacacacac

SEQ ID NO: 3650079 - RNA, 18 nt, Human
cacauauaccuauaaugu

SEQ ID NO: 3650080 - RNA, 14 nt, Human
cacauauauauuac

SEQ ID NO: 3650081 - RNA, 20 nt, Human
cacauaugcaccuugugucu

SEQ ID NO: 3650082 - RNA, 21 nt, Human
cacauauuagugcagccaagu

SEQ ID NO: 3650083 - RNA, 15 nt, Human
cacauauuugauagu

SEQ ID NO: 3650084 - RNA, 12 nt, Human
cacauauuuuaa

SEQ ID NO: 3650085 - RNA, 13 nt, Human
cacaucaaagagg

SEQ ID NO: 3650086 - RNA, 14 nt, Human
cacaucaaauaaga

SEQ ID NO: 3650087 - RNA, 14 nt, Human
cacaucacagauga

SEQ ID NO: 3650088 - RNA, 10 nt, Human
cacaucagau

SEQ ID NO: 3650089 - RNA, 19 nt, Human
cacaucagcacgauuucug

SEQ ID NO: 3650090 - RNA, 19 nt, Human
cacaucagcuagcaaaaga

SEQ ID NO: 3650091 - RNA, 23 nt, Human
cacaucagcuugcccuguuaaaa

SEQ ID NO: 3650092 - RNA, 12 nt, Human
cacauccaacuc

SEQ ID NO: 3650093 - RNA, 16 nt, Human
cacauccaacuccagc

SEQ ID NO: 3650094 - RNA, 19 nt, Human
cacauccaacuccagcaac

SEQ ID NO: 3650095 - RNA, 18 nt, Human
cacauccacagucucccc

SEQ ID NO: 3650096 - RNA, 18 nt, Human
cacauccaggcaauggcc

SEQ ID NO: 3650097 - RNA, 13 nt, Human
cacauccauuccc

SEQ ID NO: 3650098 - RNA, 14 nt, Human
cacauccauuccca

SEQ ID NO: 3650099 - RNA, 12 nt, Human
cacaucccagcc

SEQ ID NO: 3650100 - RNA, 22 nt, Human
cacaucccaggcuucacccuga

SEQ ID NO: 3650101 - RNA, 18 nt, Human
cacauccccgcuggcugg

SEQ ID NO: 3650102 - RNA, 13 nt, Human
cacaucccugggc

SEQ ID NO: 3650103 - RNA, 14 nt, Human
cacaucccugggcc

SEQ ID NO: 3650104 - RNA, 15 nt, Human
cacaucccugggccu

SEQ ID NO: 3650105 - RNA, 17 nt, Human
cacaucccugggccugc

SEQ ID NO: 3650106 - RNA, 20 nt, Human
cacaucccugggccugcugc

SEQ ID NO: 3650107 - RNA, 17 nt, Human
cacauccgccuuuugua

SEQ ID NO: 3650108 - RNA, 21 nt, Human
cacauccgccuuuuguauaca

SEQ ID NO: 3650109 - RNA, 20 nt, Human
cacauccggggccagcuccg

SEQ ID NO: 3650110 - RNA, 21 nt, Human
cacauccggggccagcuccgg

SEQ ID NO: 3650111 - RNA, 19 nt, Human
cacauccuaugcaauauau

SEQ ID NO: 3650112 - RNA, 19 nt, Human
cacaucgcagauucucccu

SEQ ID NO: 3650113 - RNA, 17 nt, Human
cacaucuaaccucaucu

SEQ ID NO: 3650114 - RNA, 22 nt, Human
cacaucuaagccugaaggggcg

SEQ ID NO: 3650115 - RNA, 22 nt, Human
cacaucuaguaguuguucugaa

SEQ ID NO: 3650116 - RNA, 14 nt, Human
cacaucucaacagg

SEQ ID NO: 3650117 - RNA, 20 nt, Human
cacaucucaacaggccucag

SEQ ID NO: 3650118 - RNA, 20 nt, Human
cauguccugugucaguuuau

SEQ ID NO: 3650119 - RNA, 14 nt, Human
caugucgccucugc

SEQ ID NO: 3650120 - RNA, 17 nt, Human
caugucgcgcucagcau

SEQ ID NO: 3650121 - RNA, 19 nt, Human
caugucgcgcucagcaugc

SEQ ID NO: 3650122 - RNA, 22 nt, Human
caugucgcgcucagcaugcauc

SEQ ID NO: 3650123 - RNA, 21 nt, Human
caugucgcuagccagugcucc

SEQ ID NO: 3650124 - RNA, 16 nt, Human
caugucuauucagcuu

SEQ ID NO: 3650125 - RNA, 18 nt, Human
caugucuccuacugagga

SEQ ID NO: 3650126 - RNA, 14 nt, Human
caugucucgacuca

SEQ ID NO: 3650127 - RNA, 16 nt, Human
caugucuuaaugaagu

SEQ ID NO: 3650128 - RNA, 20 nt, Human
caugucuuaaugaaguuuga

SEQ ID NO: 3650129 - RNA, 14 nt, Human
caugucuucucccu

SEQ ID NO: 3650130 - RNA, 14 nt, Human
caugucuuguacau

SEQ ID NO: 3650131 - RNA, 23 nt, Human
caugucuuguacauguguagccu

SEQ ID NO: 3650132 - RNA, 20 nt, Human
caugucuuucuccaaaguua

SEQ ID NO: 3650133 - RNA, 18 nt, Human
caugucuuucuccaggga

SEQ ID NO: 3650134 - RNA, 19 nt, Human
caugucuuuucuugcauga

SEQ ID NO: 3650135 - RNA, 21 nt, Human
caugucuuuucuugcaugagg

SEQ ID NO: 3650136 - RNA, 22 nt, Human
caugugaaaaggcaaaaagcau

SEQ ID NO: 3650137 - RNA, 19 nt, Human
caugugaaaaucaaauaca

SEQ ID NO: 3650138 - RNA, 14 nt, Human
caugugaaaccuuu

SEQ ID NO: 3650139 - RNA, 22 nt, Human
caugugaaaccuuuuuuaagau

SEQ ID NO: 3650140 - RNA, 16 nt, Human
caugugaaaucauuca

SEQ ID NO: 3650141 - RNA, 13 nt, Human
caugugacacaua

SEQ ID NO: 3650142 - RNA, 15 nt, Human
caugugacacauaug

SEQ ID NO: 3650143 - RNA, 12 nt, Human
caugugacauuu

SEQ ID NO: 3650144 - RNA, 18 nt, Human
caugugaccacucugucu

SEQ ID NO: 3650145 - RNA, 14 nt, Human
caugugagcucuuc

SEQ ID NO: 3650146 - RNA, 16 nt, Human
caugugagcucuuccu

SEQ ID NO: 3650147 - RNA, 18 nt, Human
caugugagcugcugccau

SEQ ID NO: 3650148 - RNA, 22 nt, Human
caugugauacauuuuuuaagcu

SEQ ID NO: 3650149 - RNA, 16 nt, Human
caugugaucacgccug

SEQ ID NO: 3650150 - RNA, 16 nt, Human
caugugauccuuuuau

SEQ ID NO: 3650151 - RNA, 22 nt, Human
caugugauccuuuuauguuauu

SEQ ID NO: 3650152 - RNA, 16 nt, Human
caugugaugagaggaa

SEQ ID NO: 3650153 - RNA, 21 nt, Human
caugugauggacacuccaggg

SEQ ID NO: 3650154 - RNA, 21 nt, Human
caugugcaaacccacucagag

SEQ ID NO: 3650155 - RNA, 14 nt, Human
caugugcacaugca

SEQ ID NO: 3650156 - RNA, 18 nt, Human
caugugcauaguuucuuu

SEQ ID NO: 3650157 - RNA, 19 nt, Human
caugugcauuauuuuccag

SEQ ID NO: 3650158 - RNA, 22 nt, Human
caugugccagguuuuuggucug

SEQ ID NO: 3650159 - RNA, 17 nt, Human
caugugcccccucuacc

SEQ ID NO: 3650160 - RNA, 18 nt, Human
caugugcccuccugaggg

SEQ ID NO: 3650161 - RNA, 14 nt, Human
caugugccugaucc

SEQ ID NO: 3650162 - RNA, 20 nt, Human
caugugccugauccagccuc

SEQ ID NO: 3650163 - RNA, 18 nt, Human
caugugccugcaccagga

SEQ ID NO: 3650164 - RNA, 23 nt, Human
caugugccugcaccaggagacag

SEQ ID NO: 3650165 - RNA, 20 nt, Human
caugugcuaguaauuggaaa

SEQ ID NO: 3650166 - RNA, 24 nt, Human
caugugcugcccuacagcacccug

SEQ ID NO: 3650167 - RNA, 18 nt, Human
cauguggaaagugaauuu

SEQ ID NO: 3650168 - RNA, 20 nt, Human
cauguggaaagugaauuuga

SEQ ID NO: 3650169 - RNA, 23 nt, Human
cauguggaaagugaauuugaaug

SEQ ID NO: 3650170 - RNA, 20 nt, Human
cauguggaaggcaagccagg

SEQ ID NO: 3650171 - RNA, 17 nt, Human
cauguggaauauaaaga

SEQ ID NO: 3650172 - RNA, 17 nt, Human
cauguggagacuucauc

SEQ ID NO: 3650173 - RNA, 13 nt, Human
cauguggcuggaa

SEQ ID NO: 3650174 - RNA, 15 nt, Human
cauguggcuggaaga

SEQ ID NO: 3650175 - RNA, 20 nt, Human
cauguggcuugaauuaagaa

SEQ ID NO: 3650176 - RNA, 22 nt, Human
caugugggaaaaaaaugaauga

SEQ ID NO: 3650177 - RNA, 15 nt, Human
cauguggggccaggu

SEQ ID NO: 3650178 - RNA, 19 nt, Human
caugugggucuuccagggg

SEQ ID NO: 3650179 - RNA, 23 nt, Human
caugugguggcacaggcccccuu

SEQ ID NO: 3650180 - RNA, 21 nt, Human
caugugguuugguuccucucu

SEQ ID NO: 3650181 - RNA, 22 nt, Human
cauguguaaucaauaaacgauu

SEQ ID NO: 3650182 - RNA, 15 nt, Human
cauguguagccuaug

SEQ ID NO: 3650183 - RNA, 14 nt, Human
cauguguagccugu

SEQ ID NO: 3650184 - RNA, 18 nt, Human
cauguguagccugugcau

SEQ ID NO: 3650185 - RNA, 13 nt, Human
cauguguauaaaa

SEQ ID NO: 3650186 - RNA, 22 nt, Human
caugugucacuugugcuuugcu

SEQ ID NO: 3650187 - RNA, 21 nt, Human
cauguguccaucccagcggcu

SEQ ID NO: 3650188 - RNA, 13 nt, Human
caugugucccaga

SEQ ID NO: 3650189 - RNA, 17 nt, Human
caugugucccagaagau

SEQ ID NO: 3650190 - RNA, 15 nt, Human
cauguguccugguuc

SEQ ID NO: 3650191 - RNA, 15 nt, Human
caugugugagugugu

SEQ ID NO: 3650192 - RNA, 17 nt, Human
caugugugagugugugc

SEQ ID NO: 3650193 - RNA, 17 nt, Human
caugugugcgagugugu

SEQ ID NO: 3650194 - RNA, 14 nt, Human
caugugugcugaac

SEQ ID NO: 3650195 - RNA, 11 nt, Human
cauguguguau

SEQ ID NO: 3650196 - RNA, 12 nt, Human
cauguguguaua

SEQ ID NO: 3650197 - RNA, 15 nt, Human
cauguguguauauau

SEQ ID NO: 3650198 - RNA, 18 nt, Human
cauguguguauauaugug

SEQ ID NO: 3650199 - RNA, 20 nt, Human
cauguguguauauaugugua

SEQ ID NO: 3650200 - RNA, 21 nt, Human
cauguguguccacgacugucu

SEQ ID NO: 3650201 - RNA, 21 nt, Human
caugugugugcaagugugugc

SEQ ID NO: 3650202 - RNA, 22 nt, Human
cauguguguuaacccagugcuu

SEQ ID NO: 3650203 - RNA, 16 nt, Human
cauguguuauguuuuc

SEQ ID NO: 3650204 - RNA, 14 nt, Human
cauguguucccuuu

SEQ ID NO: 3650205 - RNA, 18 nt, Human
cauguguuggcagccucu

SEQ ID NO: 3650206 - RNA, 18 nt, Human
cauguguuuacuuuaugu

SEQ ID NO: 3650207 - RNA, 17 nt, Human
cauguuaauccuagcug

SEQ ID NO: 3650208 - RNA, 17 nt, Human
cauguuacauaagauaa

SEQ ID NO: 3650209 - RNA, 21 nt, Human
cauguuacauaagauaaaugu

SEQ ID NO: 3650210 - RNA, 14 nt, Human
cauguuaguuaccu

SEQ ID NO: 3650211 - RNA, 22 nt, Human
cauguuaguuaccuuauaguua

SEQ ID NO: 3650212 - RNA, 12 nt, Human
cauguuauguuu

SEQ ID NO: 3650213 - RNA, 13 nt, Human
cauguucaauuau

SEQ ID NO: 3650214 - RNA, 20 nt, Human
cauguucaauuauuuccccc

SEQ ID NO: 3650215 - RNA, 20 nt, Human
cauguucacaccgcugcacu

SEQ ID NO: 3650216 - RNA, 14 nt, Human
cauguuccaauaaa

SEQ ID NO: 3650217 - RNA, 17 nt, Human
cauguuccaauaaacag

SEQ ID NO: 3650218 - RNA, 15 nt, Human
cauguuccacuaacc

SEQ ID NO: 3650219 - RNA, 21 nt, Human
cauguucccacuucaaaacaa

SEQ ID NO: 3650220 - RNA, 21 nt, Human
cauguuccucaaaagcacccu

SEQ ID NO: 3650221 - RNA, 14 nt, Human
cauguuccuucaag

SEQ ID NO: 3650222 - RNA, 16 nt, Human
cauguuccuucaagau

SEQ ID NO: 3650223 - RNA, 15 nt, Human
cauguucucugagga

SEQ ID NO: 3650224 - RNA, 18 nt, Human
cauguucugcccccagcc

SEQ ID NO: 3650225 - RNA, 21 nt, Human
cauguucugcccccagcccaa

SEQ ID NO: 3650226 - RNA, 13 nt, Human
cauguucuuaauu

SEQ ID NO: 3650227 - RNA, 19 nt, Human
cauguugaagccacugccu

SEQ ID NO: 3650228 - RNA, 22 nt, Human
cauguugaagccacugccuuca

SEQ ID NO: 3650229 - RNA, 21 nt, Human
cauguugaucauguacuuuuu

SEQ ID NO: 3650230 - RNA, 22 nt, Human
cauguugccccuuucucuuuuc

SEQ ID NO: 3650231 - RNA, 14 nt, Human
cauguugcugagga

SEQ ID NO: 3650232 - RNA, 14 nt, Human
cauguuggccaggc

SEQ ID NO: 3650233 - RNA, 16 nt, Human
cauguuggccaggcug

SEQ ID NO: 3650234 - RNA, 17 nt, Human
cauguuggccaggcugg

SEQ ID NO: 3650235 - RNA, 19 nt, Human
cauguuggccaggcugguc

SEQ ID NO: 3650236 - RNA, 15 nt, Human
cauguugggaaacuu

SEQ ID NO: 3650237 - RNA, 19 nt, Human
cauguugggaaacuuggcu

SEQ ID NO: 3650238 - RNA, 20 nt, Human
cauguugggaaacuuggcuc

SEQ ID NO: 3650239 - RNA, 16 nt, Human
cauguugguugcacuu

SEQ ID NO: 3650240 - RNA, 15 nt, Human
cauguuguaaugcug

SEQ ID NO: 3650241 - RNA, 18 nt, Human
caccaagcacagcagccu

SEQ ID NO: 3650242 - RNA, 19 nt, Human
caccaagcacagcagccug

SEQ ID NO: 3650243 - RNA, 14 nt, Human
caccaagcccacag

SEQ ID NO: 3650244 - RNA, 13 nt, Human
caccaagcccagu

SEQ ID NO: 3650245 - RNA, 19 nt, Human
caccaagccuggucagccc

SEQ ID NO: 3650246 - RNA, 20 nt, Human
caccaagccuggucagccca

SEQ ID NO: 3650247 - RNA, 21 nt, Human
caccaagccuggucagcccaa

SEQ ID NO: 3650248 - RNA, 22 nt, Human
caccaagccuggucagcccaaa

SEQ ID NO: 3650249 - RNA, 13 nt, Human
caccaagcucaaa

SEQ ID NO: 3650250 - RNA, 14 nt, Human
caccaagcucacag

SEQ ID NO: 3650251 - RNA, 20 nt, Human
caccaaggaaacgcuaccuc

SEQ ID NO: 3650252 - RNA, 10 nt, Human
caccaagggc

SEQ ID NO: 3650253 - RNA, 16 nt, Human
caccaagugcgggucc

SEQ ID NO: 3650254 - RNA, 22 nt, Human
caccaaguuggaacauccuugg

SEQ ID NO: 3650255 - RNA, 17 nt, Human
caccaaucuuacuuugu

SEQ ID NO: 3650256 - RNA, 22 nt, Human
caccaaucuuacuuuguaaauu

SEQ ID NO: 3650257 - RNA, 15 nt, Human
caccacacacaacag

SEQ ID NO: 3650258 - RNA, 17 nt, Human
caccacacacaacagcc

SEQ ID NO: 3650259 - RNA, 14 nt, Human
caccacacauccca

SEQ ID NO: 3650260 - RNA, 19 nt, Human
caccacacaucccagccca

SEQ ID NO: 3650261 - RNA, 13 nt, Human
caccacacccagc

SEQ ID NO: 3650262 - RNA, 17 nt, Human
ccaccgccccuggccgc

SEQ ID NO: 3650263 - RNA, 16 nt, Human
ccaccgccuugcccag

SEQ ID NO: 3650264 - RNA, 14 nt, Human
ccaccgcgggugug

SEQ ID NO: 3650265 - RNA, 13 nt, Human
ccaccgcugcucc

SEQ ID NO: 3650266 - RNA, 13 nt, Human
ccaccgggccacu

SEQ ID NO: 3650267 - RNA, 18 nt, Human
ccaccgggccacuccuuc

SEQ ID NO: 3650268 - RNA, 23 nt, Human
ccaccgggcugggagcucugcag

SEQ ID NO: 3650269 - RNA, 15 nt, Human
ccaccgguccagcug

SEQ ID NO: 3650270 - RNA, 13 nt, Human
ccaccguccgccc

SEQ ID NO: 3650271 - RNA, 17 nt, Human
ccaccguccgcccugcu

SEQ ID NO: 3650272 - RNA, 16 nt, Human
ccaccguggaggagga

SEQ ID NO: 3650273 - RNA, 15 nt, Human
ccaccguugucucau

SEQ ID NO: 3650274 - RNA, 19 nt, Human
ccaccguugucucaugcca

SEQ ID NO: 3650275 - RNA, 17 nt, Human
ccaccuaaucaggcuga

SEQ ID NO: 3650276 - RNA, 19 nt, Human
ccaccuacaauacaucuga

SEQ ID NO: 3650277 - RNA, 18 nt, Human
ccaccuagaacacuaacu

SEQ ID NO: 3650278 - RNA, 21 nt, Human
ccaccuaguggcuguccagug

SEQ ID NO: 3650279 - RNA, 14 nt, Human
ccaccucaccccac

SEQ ID NO: 3650280 - RNA, 13 nt, Human
ccaccucagccuc

SEQ ID NO: 3650281 - RNA, 14 nt, Human
ccaccucagccucc

SEQ ID NO: 3650282 - RNA, 15 nt, Human
ccaccucagccuccc

SEQ ID NO: 3650283 - RNA, 15 nt, Human
ccaccucagccuugg

SEQ ID NO: 3650284 - RNA, 13 nt, Human
ccaccuccagaaa

SEQ ID NO: 3650285 - RNA, 14 nt, Human
ccaccuccagaaac

SEQ ID NO: 3650286 - RNA, 13 nt, Human
ccaccuccagccc

SEQ ID NO: 3650287 - RNA, 23 nt, Human
ccaccuccagcccgggagccuag

SEQ ID NO: 3650288 - RNA, 21 nt, Human
ccaccuccaggcuuucccacu

SEQ ID NO: 3650289 - RNA, 17 nt, Human
ccaccucccacaaagga

SEQ ID NO: 3650290 - RNA, 18 nt, Human
ccaccucccccacuccca

SEQ ID NO: 3650291 - RNA, 20 nt, Human
ccaccucccccucccccuuc

SEQ ID NO: 3650292 - RNA, 16 nt, Human
caccucaugcccaccc

SEQ ID NO: 3650293 - RNA, 14 nt, Human
caccucauggaauu

SEQ ID NO: 3650294 - RNA, 18 nt, Human
caccuccacaguucagug

SEQ ID NO: 3650295 - RNA, 20 nt, Human
caccuccacaguucaguggc

SEQ ID NO: 3650296 - RNA, 21 nt, Human
caccuccacauaccuggcccu

SEQ ID NO: 3650297 - RNA, 14 nt, Human
caccuccagccuga

SEQ ID NO: 3650298 - RNA, 13 nt, Human
caccuccaggccu

SEQ ID NO: 3650299 - RNA, 14 nt, Human
caccuccaggccug

SEQ ID NO: 3650300 - RNA, 10 nt, Human
caccucccag

SEQ ID NO: 3650301 - RNA, 13 nt, Human
caccucccagccc

SEQ ID NO: 3650302 - RNA, 18 nt, Human
caccucccagccccugcc

SEQ ID NO: 3650303 - RNA, 13 nt, Human
caccucccauccu

SEQ ID NO: 3650304 - RNA, 9 nt, Human
caccucccc

SEQ ID NO: 3650305 - RNA, 16 nt, Human
caccuccccagcauuc

SEQ ID NO: 3650306 - RNA, 14 nt, Human
caccuccccagccu

SEQ ID NO: 3650307 - RNA, 14 nt, Human
caccuccccaggcc

SEQ ID NO: 3650308 - RNA, 21 nt, Human
caccuccccaggccguggcug

SEQ ID NO: 3650309 - RNA, 11 nt, Human
caccuccccca

SEQ ID NO: 3650310 - RNA, 14 nt, Human
caccucccccaucu

SEQ ID NO: 3650311 - RNA, 22 nt, Human
caccuccccccacugcaggccc

SEQ ID NO: 3650312 - RNA, 16 nt, Human
caccucccccugcccc

SEQ ID NO: 3650313 - RNA, 19 nt, Human
caccuccccuauccaccca

SEQ ID NO: 3650314 - RNA, 20 nt, Human
caccuccccuauccacccag

SEQ ID NO: 3650315 - RNA, 19 nt, Human
caccuccccuugccagcug

SEQ ID NO: 3650316 - RNA, 21 nt, Human
caccucccuauacugcuugga

SEQ ID NO: 3650317 - RNA, 17 nt, Human
caccucccucaaccuca

SEQ ID NO: 3650318 - RNA, 12 nt, Human
caccucccugcc

SEQ ID NO: 3650319 - RNA, 13 nt, Human
caccucccugccc

SEQ ID NO: 3650320 - RNA, 14 nt, Human
caccucccugccca

SEQ ID NO: 3650321 - RNA, 15 nt, Human
caccucccugcccag

SEQ ID NO: 3650322 - RNA, 17 nt, Human
caccucccugcccaggc

SEQ ID NO: 3650323 - RNA, 15 nt, Human
caccucccugccucc

SEQ ID NO: 3650324 - RNA, 14 nt, Human
caccuccucagccu

SEQ ID NO: 3650325 - RNA, 13 nt, Human
caccuccugccuc

SEQ ID NO: 3650326 - RNA, 20 nt, Human
caccuccuggguucaagcga

SEQ ID NO: 3650327 - RNA, 17 nt, Human
caccuccuucccucucu

SEQ ID NO: 3650328 - RNA, 22 nt, Human
caccuccuucccucucuggaga

SEQ ID NO: 3650329 - RNA, 23 nt, Human
caccuccuuucaagguaacugua

SEQ ID NO: 3650330 - RNA, 15 nt, Human
caccucuacccaaac

SEQ ID NO: 3650331 - RNA, 13 nt, Human
caccucucaauau

SEQ ID NO: 3650332 - RNA, 23 nt, Human
caccucucaauauucaauaaagc

SEQ ID NO: 3650333 - RNA, 15 nt, Human
caccucuccaagggc

SEQ ID NO: 3650334 - RNA, 22 nt, Human
caccucuccaagggcuucugca

SEQ ID NO: 3650335 - RNA, 23 nt, Human
caccucucccucaacaagggaga

SEQ ID NO: 3650336 - RNA, 13 nt, Human
caccucucccuug

SEQ ID NO: 3650337 - RNA, 19 nt, Human
caccucuccuacucacuua

SEQ ID NO: 3650338 - RNA, 17 nt, Human
caccucucucacuccuu

SEQ ID NO: 3650339 - RNA, 22 nt, Human
caccucugaaaacggcccucuu

SEQ ID NO: 3650340 - RNA, 22 nt, Human
caccucugaccuaucacuucca

SEQ ID NO: 3650341 - RNA, 18 nt, Human
caccucugcacaagcugc

SEQ ID NO: 3650342 - RNA, 14 nt, Human
caccucugccucaa

SEQ ID NO: 3650343 - RNA, 12 nt, Human
caccucugcgga

SEQ ID NO: 3650344 - RNA, 20 nt, Human
caccucugcggaccccagcu

SEQ ID NO: 3650345 - RNA, 21 nt, Human
caccucugcggaccccagcug

SEQ ID NO: 3650346 - RNA, 12 nt, Human
caccucugcuuu

SEQ ID NO: 3650347 - RNA, 13 nt, Human
caccucuggacug

SEQ ID NO: 3650348 - RNA, 17 nt, Human
caccucuggacuggcua

SEQ ID NO: 3650349 - RNA, 19 nt, Human
caccucuggacuggcuaga

SEQ ID NO: 3650350 - RNA, 13 nt, Human
caccucugugacc

SEQ ID NO: 3650351 - RNA, 14 nt, Human
caccucugugaccu

SEQ ID NO: 3650352 - RNA, 15 nt, Human
caccucugugaccuc

SEQ ID NO: 3650353 - RNA, 22 nt, Human
caccucugugaccucaggcacu

SEQ ID NO: 3650354 - RNA, 12 nt, Human
caccucugugcc

SEQ ID NO: 3650355 - RNA, 18 nt, Human
caccucuucucuuccugu

SEQ ID NO: 3650356 - RNA, 22 nt, Human
caccucuucucuuccuguaaca

SEQ ID NO: 3650357 - RNA, 17 nt, Human
caccugaacugaacacc

SEQ ID NO: 3650358 - RNA, 15 nt, Human
caccugacucugaaa

SEQ ID NO: 3650359 - RNA, 19 nt, Human
caccugagcaggaccucug

SEQ ID NO: 3650360 - RNA, 20 nt, Human
caccugagcaggaccucuga

SEQ ID NO: 3650361 - RNA, 23 nt, Human
caccugagcccggaugcuucucc

SEQ ID NO: 3650362 - RNA, 10 nt, Human
caccugagcu

SEQ ID NO: 3650363 - RNA, 20 nt, Human
caccugagcuuuggacgcac

SEQ ID NO: 3650364 - RNA, 11 nt, Human
caccugaggaa

SEQ ID NO: 3650365 - RNA, 14 nt, Human
caccugaggaacug

SEQ ID NO: 3650366 - RNA, 15 nt, Human
caccugaggugggcc

SEQ ID NO: 3650367 - RNA, 20 nt, Human
caccugaggugggcccagga

SEQ ID NO: 3650368 - RNA, 21 nt, Human
caccugaggugggcccaggac

SEQ ID NO: 3650369 - RNA, 18 nt, Human
caccugagguuaggaguu

SEQ ID NO: 3650370 - RNA, 19 nt, Human
caccugagucacccuaccu

SEQ ID NO: 3650371 - RNA, 15 nt, Human
caccugauucaacua

SEQ ID NO: 3650372 - RNA, 17 nt, Human
caccugcaaagcucugu

SEQ ID NO: 3650373 - RNA, 11 nt, Human
caccugcaccu

SEQ ID NO: 3650374 - RNA, 14 nt, Human
caccugcaccuccc

SEQ ID NO: 3650375 - RNA, 15 nt, Human
caccugcacuaacag

SEQ ID NO: 3650376 - RNA, 21 nt, Human
caccugcacuaacagaguggc

SEQ ID NO: 3650377 - RNA, 15 nt, Human
caccugcagggcugc

SEQ ID NO: 3650378 - RNA, 18 nt, Human
caccugcagguugggcca

SEQ ID NO: 3650379 - RNA, 22 nt, Human
caccugcagguugggccauacu

SEQ ID NO: 3650380 - RNA, 23 nt, Human
caccugcagguugggccauacug

SEQ ID NO: 3650381 - RNA, 13 nt, Human
caccugccagccu

SEQ ID NO: 3650382 - RNA, 13 nt, Human
caccugccaggga

SEQ ID NO: 3650383 - RNA, 14 nt, Human
caccugccagggac

SEQ ID NO: 3650384 - RNA, 22 nt, Human
caccugccauuugcacccuccg

SEQ ID NO: 3650385 - RNA, 13 nt, Human
caccugcccaacc

SEQ ID NO: 3650386 - RNA, 19 nt, Human
caccugcccaaccugcucu

SEQ ID NO: 3650387 - RNA, 15 nt, Human
caccugcccccuggu

SEQ ID NO: 3650388 - RNA, 17 nt, Human
caccugcccccuucucc

SEQ ID NO: 3650389 - RNA, 19 nt, Human
caccugcccccuucuccca

SEQ ID NO: 3650390 - RNA, 23 nt, Human
caccugcccccuucucccacacu

SEQ ID NO: 3650391 - RNA, 12 nt, Human
caccugcccugc

SEQ ID NO: 3650392 - RNA, 13 nt, Human
caccugcccuuuu

SEQ ID NO: 3650393 - RNA, 23 nt, Human
caccugcccuuuuuucugccucc

SEQ ID NO: 3650394 - RNA, 13 nt, Human
caccugccgaccu

SEQ ID NO: 3650395 - RNA, 13 nt, Human
caccugccucagg

SEQ ID NO: 3650396 - RNA, 20 nt, Human
caccugccucaggacugcga

SEQ ID NO: 3650397 - RNA, 10 nt, Human
caccugccug

SEQ ID NO: 3650398 - RNA, 23 nt, Human
caccugccugcgucuuccgcccc

SEQ ID NO: 3650399 - RNA, 14 nt, Human
caccugccuggccg

SEQ ID NO: 3650400 - RNA, 24 nt, Human
caccugccuguugggccaggagcc

SEQ ID NO: 3650401 - RNA, 15 nt, Human
caccugcgcuucacu

SEQ ID NO: 3650402 - RNA, 16 nt, Human
caccugcggugcuauc

SEQ ID NO: 3650403 - RNA, 19 nt, Human
caccugcggugcuaucucc

SEQ ID NO: 3650404 - RNA, 20 nt, Human
caccugcggugcuaucuccc

SEQ ID NO: 3650405 - RNA, 12 nt, Human
caccugcucugc

SEQ ID NO: 3650406 - RNA, 13 nt, Human
caccugcugcugc

SEQ ID NO: 3650407 - RNA, 12 nt, Human
caccugcugcuu

SEQ ID NO: 3650408 - RNA, 20 nt, Human
caccugcuggccccucaccu

SEQ ID NO: 3650409 - RNA, 14 nt, Human
cacgcacacacaca

SEQ ID NO: 3650410 - RNA, 15 nt, Human
cacgcacacugucug

SEQ ID NO: 3650411 - RNA, 21 nt, Human
cacgcacaugcgaccccgagg

SEQ ID NO: 3650412 - RNA, 12 nt, Human
cacgcaccuccc

SEQ ID NO: 3650413 - RNA, 16 nt, Human
cacgcaccugccucag

SEQ ID NO: 3650414 - RNA, 20 nt, Human
cacgcagauuagcaggccaa

SEQ ID NO: 3650415 - RNA, 13 nt, Human
cacgcagccagga

SEQ ID NO: 3650416 - RNA, 16 nt, Human
cacgcagccaggacac

SEQ ID NO: 3650417 - RNA, 19 nt, Human
cacgcagccaggacaccgg

SEQ ID NO: 3650418 - RNA, 13 nt, Human
cacgcaggaacuc

SEQ ID NO: 3650419 - RNA, 19 nt, Human
cacgcaggaacucccagca

SEQ ID NO: 3650420 - RNA, 15 nt, Human
cacgcaugcaguguu

SEQ ID NO: 3650421 - RNA, 11 nt, Human
cacgccacagc

SEQ ID NO: 3650422 - RNA, 12 nt, Human
cacgccacagcc

SEQ ID NO: 3650423 - RNA, 22 nt, Human
cacgccacugcacuccagccug

SEQ ID NO: 3650424 - RNA, 16 nt, Human
cacgccagauucuuuc

SEQ ID NO: 3650425 - RNA, 23 nt, Human
cacgccagauucuuuccugaggc

SEQ ID NO: 3650426 - RNA, 18 nt, Human
cacgcccccacuggugac

SEQ ID NO: 3650427 - RNA, 14 nt, Human
cacgcccguccugc

SEQ ID NO: 3650428 - RNA, 19 nt, Human
cacgcccguccugccugug

SEQ ID NO: 3650429 - RNA, 13 nt, Human
cacgcccuccccu

SEQ ID NO: 3650430 - RNA, 16 nt, Human
cacgccuagccucacg

SEQ ID NO: 3650431 - RNA, 17 nt, Human
cacgccuagccucacgc

SEQ ID NO: 3650432 - RNA, 18 nt, Human
cacgccuagccucacgcu

SEQ ID NO: 3650433 - RNA, 19 nt, Human
cacgccuaugaucccagca

SEQ ID NO: 3650434 - RNA, 15 nt, Human
cacgccucccacugg

SEQ ID NO: 3650435 - RNA, 17 nt, Human
cacgccugcaaacgcug

SEQ ID NO: 3650436 - RNA, 21 nt, Human
cacgccugcaaacgcugccug

SEQ ID NO: 3650437 - RNA, 22 nt, Human
cacgccugcaaacgcugccugc

SEQ ID NO: 3650438 - RNA, 16 nt, Human
cacgccuggcuaauuu

SEQ ID NO: 3650439 - RNA, 23 nt, Human
cacgccuguaaucccagcaauuu

SEQ ID NO: 3650440 - RNA, 21 nt, Human
cacgccuguaaucccagcacu

SEQ ID NO: 3650441 - RNA, 19 nt, Human
cacgccuguaauccuagca

SEQ ID NO: 3650442 - RNA, 23 nt, Human
cacgcgccccccucccagaggcg

SEQ ID NO: 3650443 - RNA, 23 nt, Human
cacgcgcgcacacacacacauac

SEQ ID NO: 3650444 - RNA, 15 nt, Human
cacgcgggggccuug

SEQ ID NO: 3650445 - RNA, 17 nt, Human
cacgcgugccguggcac

SEQ ID NO: 3650446 - RNA, 12 nt, Human
cacgcuccagcu

SEQ ID NO: 3650447 - RNA, 13 nt, Human
cacgcuccagcug

SEQ ID NO: 3650448 - RNA, 15 nt, Human
cacgcuccagcugcc

SEQ ID NO: 3650449 - RNA, 19 nt, Human
cacgcuccccgccuguucc

SEQ ID NO: 3650450 - RNA, 20 nt, Human
cacgcuccccgccuguuccc

SEQ ID NO: 3650451 - RNA, 22 nt, Human
cacgcuccuuucugaucuucac

SEQ ID NO: 3650452 - RNA, 19 nt, Human
cacgcucucuccaggcagg

SEQ ID NO: 3650453 - RNA, 23 nt, Human
cacgcucucuccaggcaggucug

SEQ ID NO: 3650454 - RNA, 16 nt, Human
cacgcugcucugcccc

SEQ ID NO: 3650455 - RNA, 17 nt, Human
cacgcuggagugcagug

SEQ ID NO: 3650456 - RNA, 20 nt, Human
cacgcuggagugcagugagc

SEQ ID NO: 3650457 - RNA, 21 nt, Human
cacgcuggagugcagugagcc

SEQ ID NO: 3650458 - RNA, 19 nt, Human
cacgcugucuccagacccc

SEQ ID NO: 3650459 - RNA, 14 nt, Human
ccacucccaguccc

SEQ ID NO: 3650460 - RNA, 14 nt, Human
ccacucccucacaa

SEQ ID NO: 3650461 - RNA, 12 nt, Human
ccacucccugca

SEQ ID NO: 3650462 - RNA, 13 nt, Human
ccacucccugcaa

SEQ ID NO: 3650463 - RNA, 18 nt, Human
ccacucccuugcuggccc

SEQ ID NO: 3650464 - RNA, 16 nt, Human
ccacuccgagaggugg

SEQ ID NO: 3650465 - RNA, 11 nt, Human
ccacuccuccc

SEQ ID NO: 3650466 - RNA, 14 nt, Human
ccacuccucccucc

SEQ ID NO: 3650467 - RNA, 15 nt, Human
ccacuccucccuccg

SEQ ID NO: 3650468 - RNA, 13 nt, Human
ccacuccucugac

SEQ ID NO: 3650469 - RNA, 20 nt, Human
ccacuccucugacucagggc

SEQ ID NO: 3650470 - RNA, 15 nt, Human
ccacuccucugcuga

SEQ ID NO: 3650471 - RNA, 13 nt, Human
ccacuccugcucu

SEQ ID NO: 3650472 - RNA, 17 nt, Human
ccacuccugcucugcuc

SEQ ID NO: 3650473 - RNA, 14 nt, Human
ccacuccuguacac

SEQ ID NO: 3650474 - RNA, 22 nt, Human
ccacuccuuccugccaccugcu

SEQ ID NO: 3650475 - RNA, 13 nt, Human
ccacucgcuuccc

SEQ ID NO: 3650476 - RNA, 21 nt, Human
ccacucgcuucccccauagcc

SEQ ID NO: 3650477 - RNA, 18 nt, Human
ccacucgugcaucccuga

SEQ ID NO: 3650478 - RNA, 15 nt, Human
ccacucuaccagugc

SEQ ID NO: 3650479 - RNA, 16 nt, Human
ccacucuacccuccca

SEQ ID NO: 3650480 - RNA, 19 nt, Human
ccacucuagggcaguggag

SEQ ID NO: 3650481 - RNA, 22 nt, Human
ccacucuaggggucaggcucca

SEQ ID NO: 3650482 - RNA, 13 nt, Human
ccacucucagagg

SEQ ID NO: 3650483 - RNA, 17 nt, Human
ccacucucagaggcccc

SEQ ID NO: 3650484 - RNA, 18 nt, Human
ccacucucagaggcccca

SEQ ID NO: 3650485 - RNA, 14 nt, Human
ccacucucauuccc

SEQ ID NO: 3650486 - RNA, 18 nt, Human
ccacucucauuccccagg

SEQ ID NO: 3650487 - RNA, 23 nt, Human
ccacucucuucccuuuccccagc

SEQ ID NO: 3650488 - RNA, 15 nt, Human
ccacucugauagaau

SEQ ID NO: 3650489 - RNA, 16 nt, Human
ccacucugccucugcc

SEQ ID NO: 3650490 - RNA, 18 nt, Human
ccacucugcucugaugca

SEQ ID NO: 3650491 - RNA, 13 nt, Human
ccacucugcuucu

SEQ ID NO: 3650492 - RNA, 14 nt, Human
ccacucugcuucuc

SEQ ID NO: 3650493 - RNA, 21 nt, Human
ccacucugcuuugacugagca

SEQ ID NO: 3650494 - RNA, 11 nt, Human
ccacucuggau

SEQ ID NO: 3650495 - RNA, 21 nt, Human
ccacucuggauucagccuucu

SEQ ID NO: 3650496 - RNA, 19 nt, Human
ccacucuggcagccacacu

SEQ ID NO: 3650497 - RNA, 19 nt, Human
ccacucuguaauugcaaaa

SEQ ID NO: 3650498 - RNA, 15 nt, Human
ccacugaaaaaauau

SEQ ID NO: 3650499 - RNA, 14 nt, Human
ccacugaaaucugu

SEQ ID NO: 3650500 - RNA, 11 nt, Human
ccacugaagag

SEQ ID NO: 3650501 - RNA, 21 nt, Human
ccacugaaguagugugcaguu

SEQ ID NO: 3650502 - RNA, 16 nt, Human
ccacugaaucuguaca

SEQ ID NO: 3650503 - RNA, 15 nt, Human
ccacugacagccucc

SEQ ID NO: 3650504 - RNA, 17 nt, Human
ccacugacagccuccca

SEQ ID NO: 3650505 - RNA, 17 nt, Human
ccacugagaggacagag

SEQ ID NO: 3650506 - RNA, 18 nt, Human
ccacugagaggacagaga

SEQ ID NO: 3650507 - RNA, 13 nt, Human
ccacugcacacac

SEQ ID NO: 3650508 - RNA, 18 nt, Human
ccacugcacacaccucag

SEQ ID NO: 3650509 - RNA, 20 nt, Human
ccacugcacagagcucucca

SEQ ID NO: 3650510 - RNA, 18 nt, Human
ccacugcacccccuccug

SEQ ID NO: 3650511 - RNA, 19 nt, Human
ccacugcacccccuccugc

SEQ ID NO: 3650512 - RNA, 23 nt, Human
ccacugcacccccuccugcugca

SEQ ID NO: 3650513 - RNA, 13 nt, Human
ccacugcaccggg

SEQ ID NO: 3650514 - RNA, 19 nt, Human
ccacugcaccgggccacag

SEQ ID NO: 3650515 - RNA, 20 nt, Human
ccacugcacuccagccuggc

SEQ ID NO: 3650516 - RNA, 21 nt, Human
ccacugcacuccagccugggc

SEQ ID NO: 3650517 - RNA, 21 nt, Human
ccacugcacuccagccugggu

SEQ ID NO: 3650518 - RNA, 19 nt, Human
ccacugcacucuagccgga

SEQ ID NO: 3650519 - RNA, 13 nt, Human
ccacugcagaaga

SEQ ID NO: 3650520 - RNA, 18 nt, Human
ccacugcauaccaaccug

SEQ ID NO: 3650521 - RNA, 23 nt, Human
ccacugccagcagcagcagguga

SEQ ID NO: 3650522 - RNA, 17 nt, Human
ccacugcccccugcugc

SEQ ID NO: 3650523 - RNA, 19 nt, Human
ccacugcccccugcugcca

SEQ ID NO: 3650524 - RNA, 16 nt, Human
ccacugcccgagcugg

SEQ ID NO: 3650525 - RNA, 14 nt, Human
ccacugcccucugu

SEQ ID NO: 3650526 - RNA, 16 nt, Human
ccacugcccuucucau

SEQ ID NO: 3650527 - RNA, 11 nt, Human
ccacugccucu

SEQ ID NO: 3650528 - RNA, 19 nt, Human
ccacugccucucccucugg

SEQ ID NO: 3650529 - RNA, 14 nt, Human
ccacugccucugcc

SEQ ID NO: 3650530 - RNA, 15 nt, Human
ccacugccucugccu

SEQ ID NO: 3650531 - RNA, 18 nt, Human
ccacugccucugccuuag

SEQ ID NO: 3650532 - RNA, 23 nt, Human
ccacugccugcccacccguggag

SEQ ID NO: 3650533 - RNA, 23 nt, Human
ccacugccuucgcuucuugccuc

SEQ ID NO: 3650534 - RNA, 22 nt, Human
ccacugccuuugaccugccucc

SEQ ID NO: 3650535 - RNA, 13 nt, Human
ccacugcguuguc

SEQ ID NO: 3650536 - RNA, 19 nt, Human
ccacugcuccguggaggag

SEQ ID NO: 3650537 - RNA, 19 nt, Human
ccacugcucuccagccugg

SEQ ID NO: 3650538 - RNA, 15 nt, Human
ccacugcucugguua

SEQ ID NO: 3650539 - RNA, 20 nt, Human
ccacugcuuuuggucugugu

SEQ ID NO: 3650540 - RNA, 20 nt, Human
ccacuggacuugagcuuggc

SEQ ID NO: 3650541 - RNA, 11 nt, Human
ccacuggagca

SEQ ID NO: 3650542 - RNA, 17 nt, Human
ccacuggaucagaaaga

SEQ ID NO: 3650543 - RNA, 12 nt, Human
ccacuggccacc

SEQ ID NO: 3650544 - RNA, 17 nt, Human
ccacuggccaccaggcu

SEQ ID NO: 3650545 - RNA, 18 nt, Human
ccacuggccaccaggcug

SEQ ID NO: 3650546 - RNA, 15 nt, Human
ccacuggcugcuaac

SEQ ID NO: 3650547 - RNA, 16 nt, Human
ccacugggaccaaccc

SEQ ID NO: 3650548 - RNA, 23 nt, Human
ccacugggaccaacccuggggaa

SEQ ID NO: 3650549 - RNA, 18 nt, Human
ccacuggggcucagagcc

SEQ ID NO: 3650550 - RNA, 22 nt, Human
ccacugggguccagggagcagg

SEQ ID NO: 3650551 - RNA, 21 nt, Human
ccacugggguggccugacucc

SEQ ID NO: 3650552 - RNA, 20 nt, Human
ccacugguccccaacaaugu

SEQ ID NO: 3650553 - RNA, 19 nt, Human
ccacuguacuugcucuuga

SEQ ID NO: 3650554 - RNA, 21 nt, Human
ccagcggacaguggcaggaca

SEQ ID NO: 3650555 - RNA, 23 nt, Human
ccagcguauauauaagaaagaca

SEQ ID NO: 3650556 - RNA, 21 nt, Human
ccagcgucccagucucuggca

SEQ ID NO: 3650557 - RNA, 13 nt, Human
ccagcguccuccu

SEQ ID NO: 3650558 - RNA, 14 nt, Human
ccagcuaaauaauc

SEQ ID NO: 3650559 - RNA, 17 nt, Human
ccagcuaagaaccugga

SEQ ID NO: 3650560 - RNA, 18 nt, Human
ccagcuaagaaccuggaa

SEQ ID NO: 3650561 - RNA, 22 nt, Human
ccagcuaaucuguagggcugga

SEQ ID NO: 3650562 - RNA, 15 nt, Human
ccagcuaauuuuugu

SEQ ID NO: 3650563 - RNA, 18 nt, Human
ccagcuacaccuuucucc

SEQ ID NO: 3650564 - RNA, 20 nt, Human
ccagcuacucaagaggcuga

SEQ ID NO: 3650565 - RNA, 17 nt, Human
ccagcuacucagaagcc

SEQ ID NO: 3650566 - RNA, 19 nt, Human
ccagcuacucaggaggcug

SEQ ID NO: 3650567 - RNA, 21 nt, Human
ccagcuacuccggaggcugag

SEQ ID NO: 3650568 - RNA, 16 nt, Human
ccagcuacuugggaag

SEQ ID NO: 3650569 - RNA, 20 nt, Human
ccagcuacuugggaggcuga

SEQ ID NO: 3650570 - RNA, 23 nt, Human
ccagcuaggaagagcaggacucc

SEQ ID NO: 3650571 - RNA, 22 nt, Human
ccagcuagugacccacaugcca

SEQ ID NO: 3650572 - RNA, 14 nt, Human
ccagcuauaccugu

SEQ ID NO: 3650573 - RNA, 18 nt, Human
ccagcuauaccugugccu

SEQ ID NO: 3650574 - RNA, 19 nt, Human
ccagcuauaccugugccuc

SEQ ID NO: 3650575 - RNA, 21 nt, Human
ccagcuauuuuuacuagaaca

SEQ ID NO: 3650576 - RNA, 15 nt, Human
ccagcucaccagccc

SEQ ID NO: 3650577 - RNA, 14 nt, Human
ccagcucaccccug

SEQ ID NO: 3650578 - RNA, 19 nt, Human
ccagcucaccccuggagga

SEQ ID NO: 3650579 - RNA, 18 nt, Human
ccagcucagaacccaggg

SEQ ID NO: 3650580 - RNA, 11 nt, Human
ccagcucagca

SEQ ID NO: 3650581 - RNA, 19 nt, Human
ccagcuccaagaccuguug

SEQ ID NO: 3650582 - RNA, 22 nt, Human
ccagcuccaaggggaaucagaa

SEQ ID NO: 3650583 - RNA, 15 nt, Human
ccagcuccagggcca

SEQ ID NO: 3650584 - RNA, 15 nt, Human
ccagcucccaccucc

SEQ ID NO: 3650585 - RNA, 22 nt, Human
ccagcucccaccuccccuuggg

SEQ ID NO: 3650586 - RNA, 13 nt, Human
ccagcucccagga

SEQ ID NO: 3650587 - RNA, 14 nt, Human
ccagcuccccaaga

SEQ ID NO: 3650588 - RNA, 14 nt, Human
ccagcuccccccac

SEQ ID NO: 3650589 - RNA, 15 nt, Human
ccagcucccccuccc

SEQ ID NO: 3650590 - RNA, 14 nt, Human
ccagcucccuagga

SEQ ID NO: 3650591 - RNA, 16 nt, Human
ccagcucccucuauuu

SEQ ID NO: 3650592 - RNA, 14 nt, Human
ccagcuccucccuu

SEQ ID NO: 3650593 - RNA, 11 nt, Human
ccagcuccuga

SEQ ID NO: 3650594 - RNA, 14 nt, Human
ccagcuccuucgcu

SEQ ID NO: 3650595 - RNA, 13 nt, Human
ccagcuccuuugg

SEQ ID NO: 3650596 - RNA, 17 nt, Human
ccagcucgcaccccccu

SEQ ID NO: 3650597 - RNA, 13 nt, Human
ccagcucuaaguc

SEQ ID NO: 3650598 - RNA, 17 nt, Human
ccagcucuagacaaccc

SEQ ID NO: 3650599 - RNA, 22 nt, Human
ccagcucuagacaacccugcaa

SEQ ID NO: 3650600 - RNA, 18 nt, Human
ccagcucucccucuggcc

SEQ ID NO: 3650601 - RNA, 20 nt, Human
ccagcucucccucuggcccu

SEQ ID NO: 3650602 - RNA, 21 nt, Human
ccagcucucccucuggcccug

SEQ ID NO: 3650603 - RNA, 15 nt, Human
ccagcucugcuugcc

SEQ ID NO: 3650604 - RNA, 14 nt, Human
ccagcucuggaggg

SEQ ID NO: 3650605 - RNA, 14 nt, Human
ccagcucuggucca

SEQ ID NO: 3650606 - RNA, 13 nt, Human
ccagcucuguucu

SEQ ID NO: 3650607 - RNA, 16 nt, Human
ccagcucuguucuucc

SEQ ID NO: 3650608 - RNA, 21 nt, Human
ccagcucuguucuuccucagc

SEQ ID NO: 3650609 - RNA, 15 nt, Human
ccagcugacaguccu

SEQ ID NO: 3650610 - RNA, 20 nt, Human
ccagcugacaguccucucca

SEQ ID NO: 3650611 - RNA, 21 nt, Human
ccagcugacaguccucuccac

SEQ ID NO: 3650612 - RNA, 20 nt, Human
ccagcugagcgccaggaugg

SEQ ID NO: 3650613 - RNA, 23 nt, Human
ccagcugaugacucaagauuccc

SEQ ID NO: 3650614 - RNA, 13 nt, Human
ccagcugcaaagu

SEQ ID NO: 3650615 - RNA, 14 nt, Human
ccagcugcaaagug

SEQ ID NO: 3650616 - RNA, 13 nt, Human
ccagcugcacccc

SEQ ID NO: 3650617 - RNA, 23 nt, Human
ccagcugcaccugccagccuggc

SEQ ID NO: 3650618 - RNA, 13 nt, Human
ccagcugcacuga

SEQ ID NO: 3650619 - RNA, 16 nt, Human
ccagcugccccagcca

SEQ ID NO: 3650620 - RNA, 18 nt, Human
ccagcugccccggccccu

SEQ ID NO: 3650621 - RNA, 22 nt, Human
ccagcugccuagauucagggaa

SEQ ID NO: 3650622 - RNA, 18 nt, Human
ccagcugccuaggauuca

SEQ ID NO: 3650623 - RNA, 17 nt, Human
ccagcugcgcuugcuuu

SEQ ID NO: 3650624 - RNA, 12 nt, Human
ccagcugcuccc

SEQ ID NO: 3650625 - RNA, 16 nt, Human
ccagcugcuccccucc

SEQ ID NO: 3650626 - RNA, 19 nt, Human
ccagcugcuccccucccuc

SEQ ID NO: 3650627 - RNA, 14 nt, Human
ccagcugcucugcc

SEQ ID NO: 3650628 - RNA, 21 nt, Human
ccagcugcugagauccuggac

SEQ ID NO: 3650629 - RNA, 15 nt, Human
ccagcugcugagccg

SEQ ID NO: 3650630 - RNA, 17 nt, Human
ccagcugcugagccgca

SEQ ID NO: 3650631 - RNA, 23 nt, Human
ccagcugcugagccgcagagaag

SEQ ID NO: 3650632 - RNA, 16 nt, Human
ccagcugcugcucuga

SEQ ID NO: 3650633 - RNA, 13 nt, Human
ccagcugcugucu

SEQ ID NO: 3650634 - RNA, 16 nt, Human
ccagcugcuugggcuu

SEQ ID NO: 3650635 - RNA, 20 nt, Human
ccagcugcuugggcuucauc

SEQ ID NO: 3650636 - RNA, 20 nt, Human
ccagcuggcagcagagugug

SEQ ID NO: 3650637 - RNA, 16 nt, Human
ccagcuggccuggaca

SEQ ID NO: 3650638 - RNA, 16 nt, Human
ccagcugggaggcaag

SEQ ID NO: 3650639 - RNA, 12 nt, Human
ccagcugggcuc

SEQ ID NO: 3650640 - RNA, 15 nt, Human
ccagcugggcucugc

SEQ ID NO: 3650641 - RNA, 16 nt, Human
ccagcugggcucugcc

SEQ ID NO: 3650642 - RNA, 23 nt, Human
ccagcugggcucugccacccuac

SEQ ID NO: 3650643 - RNA, 20 nt, Human
ccagcuggggcguggggagg

SEQ ID NO: 3650644 - RNA, 21 nt, Human
ccagcuggugagugaugcggc

SEQ ID NO: 3650645 - RNA, 15 nt, Human
ccagcugucccccca

SEQ ID NO: 3650646 - RNA, 22 nt, Human
ccagcugucugugucagccugu

SEQ ID NO: 3650647 - RNA, 18 nt, Human
ccagcugugcucuggaca

SEQ ID NO: 3650648 - RNA, 13 nt, Human
ccagcugugguuu

SEQ ID NO: 3650649 - RNA, 15 nt, Human
ccagcugugguuuuc

SEQ ID NO: 3650650 - RNA, 13 nt, Human
ccagcugugucca

SEQ ID NO: 3650651 - RNA, 20 nt, Human
ccagcuuauagucauauaua

SEQ ID NO: 3650652 - RNA, 14 nt, Human
ccagcuucacuucu

SEQ ID NO: 3650653 - RNA, 15 nt, Human
ccagcuuccagcagg

SEQ ID NO: 3650654 - RNA, 17 nt, Human
ccagcuuccagcaggag

SEQ ID NO: 3650655 - RNA, 14 nt, Human
ccagcuugcucuuc

SEQ ID NO: 3650656 - RNA, 13 nt, Human
ccagcuugggcag

SEQ ID NO: 3650657 - RNA, 22 nt, Human
ccagcuugggcccagcugggcu

SEQ ID NO: 3650658 - RNA, 22 nt, Human
ccagcuuggggccaccaaagcu

SEQ ID NO: 3650659 - RNA, 22 nt, Human
ccagcuuguggagccccacacu

SEQ ID NO: 3650660 - RNA, 17 nt, Human
ccagcuuguuauuuaua

SEQ ID NO: 3650661 - RNA, 14 nt, Human
ccagcuuguuuaca

SEQ ID NO: 3650662 - RNA, 14 nt, Human
ccagcuuucccugc

SEQ ID NO: 3650663 - RNA, 18 nt, Human
ccagcuuucccugccucu

SEQ ID NO: 3650664 - RNA, 21 nt, Human
ccagcuuuuaaccaucugaua

SEQ ID NO: 3650665 - RNA, 12 nt, Human
ccaauccugccc

SEQ ID NO: 3650666 - RNA, 19 nt, Human
ccaaucuauugcuucacca

SEQ ID NO: 3650667 - RNA, 21 nt, Human
ccaaucuuacuuuguaaauuc

SEQ ID NO: 3650668 - RNA, 23 nt, Human
ccaaugaaauacacaaguaaaca

SEQ ID NO: 3650669 - RNA, 23 nt, Human
ccaaugagacucuaggguccagu

SEQ ID NO: 3650670 - RNA, 15 nt, Human
ccaaugagcuuucug

SEQ ID NO: 3650671 - RNA, 18 nt, Human
ccaaugagcuuucugaac

SEQ ID NO: 3650672 - RNA, 22 nt, Human
ccaaugagcuuucugaacagcu

SEQ ID NO: 3650673 - RNA, 21 nt, Human
ccaaugccacauacuugcagc

SEQ ID NO: 3650674 - RNA, 14 nt, Human
ccaaugcugauguc

SEQ ID NO: 3650675 - RNA, 17 nt, Human
ccaaugcugauguccuc

SEQ ID NO: 3650676 - RNA, 14 nt, Human
ccaauggaaaccuc

SEQ ID NO: 3650677 - RNA, 17 nt, Human
ccaauggaaccuccuuu

SEQ ID NO: 3650678 - RNA, 20 nt, Human
ccaauggaaugugauguuca

SEQ ID NO: 3650679 - RNA, 21 nt, Human
ccaauggagacugucucaaga

SEQ ID NO: 3650680 - RNA, 23 nt, Human
ccaauggaguagaccccuggcug

SEQ ID NO: 3650681 - RNA, 20 nt, Human
ccaauggguuuuucccugua

SEQ ID NO: 3650682 - RNA, 16 nt, Human
ccaaugguguuuuucu

SEQ ID NO: 3650683 - RNA, 15 nt, Human
ccaauguaggagcug

SEQ ID NO: 3650684 - RNA, 11 nt, Human
ccaaugucugc

SEQ ID NO: 3650685 - RNA, 18 nt, Human
ccaaugucugccacacaa

SEQ ID NO: 3650686 - RNA, 15 nt, Human
ccaaugucuggagac

SEQ ID NO: 3650687 - RNA, 15 nt, Human
ccaauuaaccagaaa

SEQ ID NO: 3650688 - RNA, 22 nt, Human
ccaauuaaggauuuuaugcuuu

SEQ ID NO: 3650689 - RNA, 17 nt, Human
ccaauuaggaaguguaa

SEQ ID NO: 3650690 - RNA, 20 nt, Human
ccaauuauugauauauauua

SEQ ID NO: 3650691 - RNA, 18 nt, Human
ccaauuauuguuacacau

SEQ ID NO: 3650692 - RNA, 22 nt, Human
ccaauuauuuucauccuugucu

SEQ ID NO: 3650693 - RNA, 19 nt, Human
ccaauucgaacuuuuucca

SEQ ID NO: 3650694 - RNA, 18 nt, Human
ccaauucucgagcuuggg

SEQ ID NO: 3650695 - RNA, 12 nt, Human
ccaauugaguuu

SEQ ID NO: 3650696 - RNA, 16 nt, Human
ccaauugugcugccau

SEQ ID NO: 3650697 - RNA, 20 nt, Human
ccaauuguugacaguucuga

SEQ ID NO: 3650698 - RNA, 21 nt, Human
ccaauuguugacaguucugaa

SEQ ID NO: 3650699 - RNA, 15 nt, Human
ccaggaagccagcag

SEQ ID NO: 3650700 - RNA, 18 nt, Human
ccaggaagcccaggagcc

SEQ ID NO: 3650701 - RNA, 11 nt, Human
ccaggaagccg

SEQ ID NO: 3650702 - RNA, 18 nt, Human
ccaggaaggcggggcuuc

SEQ ID NO: 3650703 - RNA, 18 nt, Human
ccaggaaggggcuggacu

SEQ ID NO: 3650704 - RNA, 14 nt, Human
ccaggaagggucaa

SEQ ID NO: 3650705 - RNA, 18 nt, Human
ccaggaaguagcacaggc

SEQ ID NO: 3650706 - RNA, 22 nt, Human
ccaggaaguagcacaggcugag

SEQ ID NO: 3650707 - RNA, 14 nt, Human
ccaggaagucucau

SEQ ID NO: 3650708 - RNA, 20 nt, Human
ccaggaagucucaucugggg

SEQ ID NO: 3650709 - RNA, 19 nt, Human
ccaggaaugccuccucccu

SEQ ID NO: 3650710 - RNA, 16 nt, Human
ccaggaauuucccagg

SEQ ID NO: 3650711 - RNA, 20 nt, Human
ccaggaauuucccaggaccc

SEQ ID NO: 3650712 - RNA, 17 nt, Human
ccaggacaagcaugguc

SEQ ID NO: 3650713 - RNA, 21 nt, Human
ccaggacaccacacccagccu

SEQ ID NO: 3650714 - RNA, 14 nt, Human
ccaggacaccgggc

SEQ ID NO: 3650715 - RNA, 13 nt, Human
ccaggacaggacc

SEQ ID NO: 3650716 - RNA, 13 nt, Human
ccaggacaggcug

SEQ ID NO: 3650717 - RNA, 14 nt, Human
ccaggaccaagcca

SEQ ID NO: 3650718 - RNA, 13 nt, Human
ccaggaccacagg

SEQ ID NO: 3650719 - RNA, 19 nt, Human
ccaggaccacaggcucagg

SEQ ID NO: 3650720 - RNA, 14 nt, Human
ccaggaccagcugg

SEQ ID NO: 3650721 - RNA, 15 nt, Human
ccaggaccagcuggg

SEQ ID NO: 3650722 - RNA, 18 nt, Human
ccaggaccagcuggggcg

SEQ ID NO: 3650723 - RNA, 23 nt, Human
ccaggaccagucaaccugggcaa

SEQ ID NO: 3650724 - RNA, 19 nt, Human
ccaggacccugaaggggcc

SEQ ID NO: 3650725 - RNA, 14 nt, Human
ccaggacccugcca

SEQ ID NO: 3650726 - RNA, 15 nt, Human
ccaggacccugccag

SEQ ID NO: 3650727 - RNA, 19 nt, Human
ccaggacccugccaggcac

SEQ ID NO: 3650728 - RNA, 20 nt, Human
ccaggacccugccaggcaca

SEQ ID NO: 3650729 - RNA, 23 nt, Human
ccaggacccugccaggcacaggc

SEQ ID NO: 3650730 - RNA, 18 nt, Human
ccaggaccuggcugccau

SEQ ID NO: 3650731 - RNA, 21 nt, Human
ccaggacgccacucauuucau

SEQ ID NO: 3650732 - RNA, 17 nt, Human
ccaggacgcuucugaau

SEQ ID NO: 3650733 - RNA, 22 nt, Human
ccaggacgcuucugaaugcugc

SEQ ID NO: 3650734 - RNA, 18 nt, Human
ccaggacggggccggcca

SEQ ID NO: 3650735 - RNA, 19 nt, Human
ccaggacggggccggccag

SEQ ID NO: 3650736 - RNA, 19 nt, Human
ccaggacuauagcccaggu

SEQ ID NO: 3650737 - RNA, 22 nt, Human
ccaggacuccccaggccaggcc

SEQ ID NO: 3650738 - RNA, 14 nt, Human
ccaggacucccucc

SEQ ID NO: 3650739 - RNA, 17 nt, Human
ccaggacucccuccuca

SEQ ID NO: 3650740 - RNA, 14 nt, Human
ccaggacuccuccc

SEQ ID NO: 3650741 - RNA, 11 nt, Human
ccaggacucug

SEQ ID NO: 3650742 - RNA, 13 nt, Human
ccaggacucugca

SEQ ID NO: 3650743 - RNA, 15 nt, Human
ccaggacucugcagc

SEQ ID NO: 3650744 - RNA, 18 nt, Human
ccaggacucugcagccuc

SEQ ID NO: 3650745 - RNA, 19 nt, Human
ccaggacucugcagccuca

SEQ ID NO: 3650746 - RNA, 15 nt, Human
ccaggacugagcccc

SEQ ID NO: 3650747 - RNA, 19 nt, Human
ccaggacugagccccgcag

SEQ ID NO: 3650748 - RNA, 19 nt, Human
ccaggagaaccacuacaug

SEQ ID NO: 3650749 - RNA, 15 nt, Human
ccaggagaagaaaga

SEQ ID NO: 3650750 - RNA, 20 nt, Human
ccaggagaauaaaagaaauu

SEQ ID NO: 3650751 - RNA, 15 nt, Human
ccaggagagagaaag

SEQ ID NO: 3650752 - RNA, 17 nt, Human
ccaggagagccagcccu

SEQ ID NO: 3650753 - RNA, 19 nt, Human
ccaggagagccagcccucc

SEQ ID NO: 3650754 - RNA, 23 nt, Human
ccaggagagccagcccucccugu

SEQ ID NO: 3650755 - RNA, 21 nt, Human
ccaggagaggagcgggaccug

SEQ ID NO: 3650756 - RNA, 23 nt, Human
ccaggagcaaauguuucugcagu

SEQ ID NO: 3650757 - RNA, 13 nt, Human
ccaggagcagcca

SEQ ID NO: 3650758 - RNA, 14 nt, Human
ccaggagcagccac

SEQ ID NO: 3650759 - RNA, 15 nt, Human
ccaggagcagccaca

SEQ ID NO: 3650760 - RNA, 15 nt, Human
ccaggagcaggcacg

SEQ ID NO: 3650761 - RNA, 16 nt, Human
ccaggagcaggcacgg

SEQ ID NO: 3650762 - RNA, 18 nt, Human
ccaggagcauccaccucc

SEQ ID NO: 3650763 - RNA, 13 nt, Human
ccaggagccucac

SEQ ID NO: 3650764 - RNA, 12 nt, Human
ccaggagccucc

SEQ ID NO: 3650765 - RNA, 17 nt, Human
ccaggagcuccaguguc

SEQ ID NO: 3650766 - RNA, 20 nt, Human
ccaggagcuccaguguccug

SEQ ID NO: 3650767 - RNA, 19 nt, Human
ccaggagcuccccucccca

SEQ ID NO: 3650768 - RNA, 18 nt, Human
ccaggagcucuucaggcc

SEQ ID NO: 3650769 - RNA, 21 nt, Human
ccaggagcucuucaggccucc

SEQ ID NO: 3650770 - RNA, 23 nt, Human
ccaggagcucuucaggccucccu

SEQ ID NO: 3650771 - RNA, 23 nt, Human
ccaggagcugucaccaaggaaac

SEQ ID NO: 3650772 - RNA, 15 nt, Human
ccaggaggacccagg

SEQ ID NO: 3650773 - RNA, 19 nt, Human
ccaggaggacccagggcuc

SEQ ID NO: 3650774 - RNA, 20 nt, Human
ccaggaggacccagggcucu

SEQ ID NO: 3650775 - RNA, 14 nt, Human
ccaggaggacugcc

SEQ ID NO: 3650776 - RNA, 15 nt, Human
ccaggaggccagccu

SEQ ID NO: 3650777 - RNA, 20 nt, Human
ccaggaggccagccuugacc

SEQ ID NO: 3650778 - RNA, 21 nt, Human
ccaggagggaggcaggggagg

SEQ ID NO: 3650779 - RNA, 20 nt, Human
ccaggagggcacuggagcug

SEQ ID NO: 3650780 - RNA, 21 nt, Human
ccaggaggggaacacugcccu

SEQ ID NO: 3650781 - RNA, 19 nt, Human
ccaggaggugccacuggag

SEQ ID NO: 3650782 - RNA, 21 nt, Human
ccaggaggugccacuggagug

SEQ ID NO: 3650783 - RNA, 22 nt, Human
ccaggagguggcuauggccacc

SEQ ID NO: 3650784 - RNA, 23 nt, Human
ccaggagucccacuccaagccag

SEQ ID NO: 3650785 - RNA, 21 nt, Human
ccaggaguuuaagaccagccu

SEQ ID NO: 3650786 - RNA, 17 nt, Human
ccaggaguuugaggcug

SEQ ID NO: 3650787 - RNA, 14 nt, Human
ccaggaguuuggcc

SEQ ID NO: 3650788 - RNA, 16 nt, Human
ccaggaguuuggccag

SEQ ID NO: 3650789 - RNA, 17 nt, Human
ccaggauacuggcacag

SEQ ID NO: 3650790 - RNA, 20 nt, Human
ccaggauacuggcacagagg

SEQ ID NO: 3650791 - RNA, 23 nt, Human
ccaggauauauuuuauuuuuaga

SEQ ID NO: 3650792 - RNA, 14 nt, Human
ccaggaucagauug

SEQ ID NO: 3650793 - RNA, 14 nt, Human
ccaggaucagccag

SEQ ID NO: 3650794 - RNA, 14 nt, Human
ccaggauggagggg

SEQ ID NO: 3650795 - RNA, 18 nt, Human
ccaggauuccucuuuucu

SEQ ID NO: 3650796 - RNA, 16 nt, Human
ccaggauugaagagca

SEQ ID NO: 3650797 - RNA, 19 nt, Human
ccaggcaaauaaaauuccc

SEQ ID NO: 3650798 - RNA, 14 nt, Human
ccaggcaaggcugu

SEQ ID NO: 3650799 - RNA, 23 nt, Human
ccaggcaauggccuaaacuucag

SEQ ID NO: 3650800 - RNA, 22 nt, Human
ccaggcacacacugugcuuucu

SEQ ID NO: 3650801 - RNA, 17 nt, Human
ccaggcaccaggacuag

SEQ ID NO: 3650802 - RNA, 15 nt, Human
ccaggcaccaggcag

SEQ ID NO: 3650803 - RNA, 21 nt, Human
ccaggcacccccuggagagaa

SEQ ID NO: 3650804 - RNA, 13 nt, Human
ccaggcaccuccc

SEQ ID NO: 3650805 - RNA, 21 nt, Human
ccaggcacgaacccaccugcu

SEQ ID NO: 3650806 - RNA, 23 nt, Human
ccaggcacgaacccaccugcuga

SEQ ID NO: 3650807 - RNA, 16 nt, Human
ccaggcacgguuugga

SEQ ID NO: 3650808 - RNA, 16 nt, Human
ccaggcacugcuaggc

SEQ ID NO: 3650809 - RNA, 18 nt, Human
ccaggcacugcugcccag

SEQ ID NO: 3650810 - RNA, 15 nt, Human
ccaggcagcacccag

SEQ ID NO: 3650811 - RNA, 17 nt, Human
ccaggcagcagacacau

SEQ ID NO: 3650812 - RNA, 14 nt, Human
ccaggcagccucug

SEQ ID NO: 3650813 - RNA, 20 nt, Human
ccaggcaggcuaaggcgugg

SEQ ID NO: 3650814 - RNA, 22 nt, Human
ccaggcagggguggggguggag

SEQ ID NO: 3650815 - RNA, 18 nt, Human
ccaggcagguagccaggg

SEQ ID NO: 3650816 - RNA, 19 nt, Human
ccaggcagguagccagggg

SEQ ID NO: 3650817 - RNA, 23 nt, Human
ccaggcaggucuugaacuccugg

SEQ ID NO: 3650818 - RNA, 19 nt, Human
ccaggcagucgggggcugg

SEQ ID NO: 3650819 - RNA, 24 nt, Human
ccaggcagucgggggcuggccuag

SEQ ID NO: 3650820 - RNA, 20 nt, Human
ccaggcauccuccacaauag

SEQ ID NO: 3650821 - RNA, 14 nt, Human
ccaggcauucccca

SEQ ID NO: 3650822 - RNA, 17 nt, Human
ccaggcauuccccagga

SEQ ID NO: 3650823 - RNA, 21 nt, Human
ccaggcauuccccaggaggcc

SEQ ID NO: 3650824 - RNA, 22 nt, Human
ccaggcauuccccaggaggcca

SEQ ID NO: 3650825 - RNA, 23 nt, Human
ccaggcauuccccaggaggccag

SEQ ID NO: 3650826 - RNA, 24 nt, Human
ccaggcauuccccaggaggccagc

SEQ ID NO: 3650827 - RNA, 12 nt, Human
ccacccccacac

SEQ ID NO: 3650828 - RNA, 12 nt, Human
ccacccccacca

SEQ ID NO: 3650829 - RNA, 14 nt, Human
ccacccccagcccc

SEQ ID NO: 3650830 - RNA, 16 nt, Human
ccacccccagccccga

SEQ ID NO: 3650831 - RNA, 13 nt, Human
ccacccccagcuc

SEQ ID NO: 3650832 - RNA, 16 nt, Human
ccacccccaggacccc

SEQ ID NO: 3650833 - RNA, 21 nt, Human
ccaccccccagaaccuguccu

SEQ ID NO: 3650834 - RNA, 22 nt, Human
ccaccccccagaaccuguccuu

SEQ ID NO: 3650835 - RNA, 13 nt, Human
ccaccccccucau

SEQ ID NO: 3650836 - RNA, 14 nt, Human
ccacccccggcagc

SEQ ID NO: 3650837 - RNA, 16 nt, Human
ccacccccuccccagg

SEQ ID NO: 3650838 - RNA, 18 nt, Human
ccacccccuccccagggg

SEQ ID NO: 3650839 - RNA, 19 nt, Human
ccacccccuccccagggga

SEQ ID NO: 3650840 - RNA, 15 nt, Human
ccacccccugcccug

SEQ ID NO: 3650841 - RNA, 16 nt, Human
ccacccccugcccugc

SEQ ID NO: 3650842 - RNA, 18 nt, Human
ccacccccuucagugccc

SEQ ID NO: 3650843 - RNA, 22 nt, Human
aaagcccugucgggcuuugugu

SEQ ID NO: 3650844 - RNA, 23 nt, Human
aaagcccuuccaugucgccucug

SEQ ID NO: 3650845 - RNA, 21 nt, Human
aaagccguuguuuacuuaaag

SEQ ID NO: 3650846 - RNA, 13 nt, Human
aaagccucaacca

SEQ ID NO: 3650847 - RNA, 19 nt, Human
aaagccugaguacuccaca

SEQ ID NO: 3650848 - RNA, 12 nt, Human
aaagccugcuca

SEQ ID NO: 3650849 - RNA, 23 nt, Human
aaagccuggguuugguguauggu

SEQ ID NO: 3650850 - RNA, 13 nt, Human
aaagccuguuccc

SEQ ID NO: 3650851 - RNA, 18 nt, Human
aaagccuguuuaagagac

SEQ ID NO: 3650852 - RNA, 19 nt, Human
aaagccuuagggaagcugg

SEQ ID NO: 3650853 - RNA, 12 nt, Human
aaagccuugugu

SEQ ID NO: 3650854 - RNA, 16 nt, Human
aaagcgaaaaaaucag

SEQ ID NO: 3650855 - RNA, 19 nt, Human
aaagcggacaucagcuggu

SEQ ID NO: 3650856 - RNA, 18 nt, Human
aaagcggguuauaaugaa

SEQ ID NO: 3650857 - RNA, 21 nt, Human
aaagcgugagcuuaaaauaca

SEQ ID NO: 3650858 - RNA, 22 nt, Human
aaagcgugagcuuaaaauacaa

SEQ ID NO: 3650859 - RNA, 23 nt, Human
aaagcgugagcuuaaaauacaag

SEQ ID NO: 3650860 - RNA, 18 nt, Human
aaagcguuggauguagca

SEQ ID NO: 3650861 - RNA, 21 nt, Human
aaagcuaaaauaaagaaauag

SEQ ID NO: 3650862 - RNA, 17 nt, Human
aaagcuaaaaugauuuu

SEQ ID NO: 3650863 - RNA, 23 nt, Human
aaagcuaaaaugauuuuaucugu

SEQ ID NO: 3650864 - RNA, 16 nt, Human
aaagcuaacccagguc

SEQ ID NO: 3650865 - RNA, 16 nt, Human
aaagcuacuuauugua

SEQ ID NO: 3650866 - RNA, 14 nt, Human
aaagcuagaauuga

SEQ ID NO: 3650867 - RNA, 15 nt, Human
aaagcuauggugaga

SEQ ID NO: 3650868 - RNA, 20 nt, Human
aaagcuauuagccaggauca

SEQ ID NO: 3650869 - RNA, 22 nt, Human
aaagcuauuagccaggaucaug

SEQ ID NO: 3650870 - RNA, 19 nt, Human
aaagcucaaaugaaaugua

SEQ ID NO: 3650871 - RNA, 13 nt, Human
aaagcucauauuu

SEQ ID NO: 3650872 - RNA, 20 nt, Human
aaagcucauuucaugcucug

SEQ ID NO: 3650873 - RNA, 17 nt, Human
aaagcuccuagcagaga

SEQ ID NO: 3650874 - RNA, 14 nt, Human
aaagcucugaccac

SEQ ID NO: 3650875 - RNA, 13 nt, Human
aaagcucuguggc

SEQ ID NO: 3650876 - RNA, 23 nt, Human
aaagcugaacacauuucuuuuua

SEQ ID NO: 3650877 - RNA, 15 nt, Human
aaagcugaagccgcc

SEQ ID NO: 3650878 - RNA, 18 nt, Human
aaagcugacauugccaaa

SEQ ID NO: 3650879 - RNA, 19 nt, Human
aaagcugacauugccaaaa

SEQ ID NO: 3650880 - RNA, 18 nt, Human
aaagcugagaacuccuga

SEQ ID NO: 3650881 - RNA, 20 nt, Human
aaagcugagaacuccugacu

SEQ ID NO: 3650882 - RNA, 14 nt, Human
ccauaaacuucaug

SEQ ID NO: 3650883 - RNA, 16 nt, Human
ccauaaacuucauggu

SEQ ID NO: 3650884 - RNA, 20 nt, Human
ccauaaagaagauguuuaac

SEQ ID NO: 3650885 - RNA, 13 nt, Human
ccauaaagaagca

SEQ ID NO: 3650886 - RNA, 13 nt, Human
ccauaacagccaa

SEQ ID NO: 3650887 - RNA, 15 nt, Human
ccauaacagccaaca

SEQ ID NO: 3650888 - RNA, 22 nt, Human
ccauaaccgcugauucucaggg

SEQ ID NO: 3650889 - RNA, 20 nt, Human
ccauaagcaacaauuuucag

SEQ ID NO: 3650890 - RNA, 15 nt, Human
ccauaaggaauguag

SEQ ID NO: 3650891 - RNA, 19 nt, Human
ccauaauguauaaagaaca

SEQ ID NO: 3650892 - RNA, 12 nt, Human
ccauacacacgc

SEQ ID NO: 3650893 - RNA, 24 nt, Human
ccauaccuuccuucccugggcugu

SEQ ID NO: 3650894 - RNA, 13 nt, Human
ccauacucagccu

SEQ ID NO: 3650895 - RNA, 14 nt, Human
ccauacucagccug

SEQ ID NO: 3650896 - RNA, 15 nt, Human
ccauacucagccugc

SEQ ID NO: 3650897 - RNA, 21 nt, Human
ccauacucagccugcugccca

SEQ ID NO: 3650898 - RNA, 15 nt, Human
ccauacucauuucua

SEQ ID NO: 3650899 - RNA, 20 nt, Human
ccauacuggccucgccuggc

SEQ ID NO: 3650900 - RNA, 22 nt, Human
ccauacuggccucgccuggccu

SEQ ID NO: 3650901 - RNA, 17 nt, Human
ccauacuuaucucucug

SEQ ID NO: 3650902 - RNA, 13 nt, Human
ccauagaaacaug

SEQ ID NO: 3650903 - RNA, 16 nt, Human
ccauagaguuuaacac

SEQ ID NO: 3650904 - RNA, 14 nt, Human
ccauagaucuucug

SEQ ID NO: 3650905 - RNA, 15 nt, Human
ccauagcuguggugu

SEQ ID NO: 3650906 - RNA, 15 nt, Human
ccauagcuuccauga

SEQ ID NO: 3650907 - RNA, 13 nt, Human
ccauaggcccagu

SEQ ID NO: 3650908 - RNA, 13 nt, Human
ccauaguaacuga

SEQ ID NO: 3650909 - RNA, 15 nt, Human
ccauaguaacugaca

SEQ ID NO: 3650910 - RNA, 16 nt, Human
ccauaguaacugacau

SEQ ID NO: 3650911 - RNA, 19 nt, Human
ccauaguaccauuuauaca

SEQ ID NO: 3650912 - RNA, 20 nt, Human
ccauaguauauuaaaaaugg

SEQ ID NO: 3650913 - RNA, 15 nt, Human
ccauagucacauggc

SEQ ID NO: 3650914 - RNA, 13 nt, Human
ccauagucccugc

SEQ ID NO: 3650915 - RNA, 19 nt, Human
ccauauaaguuugaaggaa

SEQ ID NO: 3650916 - RNA, 16 nt, Human
ccauauauaacagaua

SEQ ID NO: 3650917 - RNA, 18 nt, Human
ccauaucaaaagacacag

SEQ ID NO: 3650918 - RNA, 19 nt, Human
ccauaucagaacugugcca

SEQ ID NO: 3650919 - RNA, 18 nt, Human
ccauauccuuacccuccu

SEQ ID NO: 3650920 - RNA, 21 nt, Human
ccauaucuuaaagaaacagcu

SEQ ID NO: 3650921 - RNA, 22 nt, Human
ccauaucuugcgaauccaagcu

SEQ ID NO: 3650922 - RNA, 18 nt, Human
ccauaugaccucaugcau

SEQ ID NO: 3650923 - RNA, 19 nt, Human
ccauaugaccucaugcauc

SEQ ID NO: 3650924 - RNA, 15 nt, Human
ccauaugccugggca

SEQ ID NO: 3650925 - RNA, 17 nt, Human
ccauaugcuaccaccag

SEQ ID NO: 3650926 - RNA, 18 nt, Human
ccauaugcuaccaccagc

SEQ ID NO: 3650927 - RNA, 22 nt, Human
ccauaugcuaccaccagcugug

SEQ ID NO: 3650928 - RNA, 23 nt, Human
ccauauuaaauuuuuuguugaca

SEQ ID NO: 3650929 - RNA, 15 nt, Human
ccauauucuguuggc

SEQ ID NO: 3650930 - RNA, 21 nt, Human
ccauauugcacaugucuuaau

SEQ ID NO: 3650931 - RNA, 18 nt, Human
ccauauuuaccucagccu

SEQ ID NO: 3650932 - RNA, 17 nt, Human
ccauauuuagcagugca

SEQ ID NO: 3650933 - RNA, 21 nt, Human
ccauauuuauccauuuguaau

SEQ ID NO: 3650934 - RNA, 18 nt, Human
ccauauuuuacuuggaaa

SEQ ID NO: 3650935 - RNA, 23 nt, Human
ccauauuuucacagguguggugu

SEQ ID NO: 3650936 - RNA, 16 nt, Human
ccauauuuuuuuccuu

SEQ ID NO: 3650937 - RNA, 22 nt, Human
ccauauuuuuuuccuuacauaa

SEQ ID NO: 3650938 - RNA, 15 nt, Human
ccaucaaaaauauuc

SEQ ID NO: 3650939 - RNA, 16 nt, Human
ccaucaaaguggcaaa

SEQ ID NO: 3650940 - RNA, 22 nt, Human
ccaucaacuaaaguuguacuuu

SEQ ID NO: 3650941 - RNA, 14 nt, Human
ccaucaagccacca

SEQ ID NO: 3650942 - RNA, 20 nt, Human
ccaucaauaaaaaauuauga

SEQ ID NO: 3650943 - RNA, 20 nt, Human
ccaucacaggguugggccca

SEQ ID NO: 3650944 - RNA, 17 nt, Human
ccaucaccucagauggc

SEQ ID NO: 3650945 - RNA, 14 nt, Human
ccaucacugcgcca

SEQ ID NO: 3650946 - RNA, 21 nt, Human
ccaucacugcgccacugcucc

SEQ ID NO: 3650947 - RNA, 19 nt, Human
ccaucagcuguaagaagag

SEQ ID NO: 3650948 - RNA, 24 nt, Human
ccaucagcuguaagaagagacugg

SEQ ID NO: 3650949 - RNA, 18 nt, Human
ccaucaguguacccccgc

SEQ ID NO: 3650950 - RNA, 16 nt, Human
ccaucaguuagagcug

SEQ ID NO: 3650951 - RNA, 14 nt, Human
ccaucauaauucua

SEQ ID NO: 3650952 - RNA, 13 nt, Human
ccaucauccucug

SEQ ID NO: 3650953 - RNA, 15 nt, Human
ccaucauccucuggc

SEQ ID NO: 3650954 - RNA, 20 nt, Human
ccaucaucuauagaaagcua

SEQ ID NO: 3650955 - RNA, 23 nt, Human
ccaucauggggggagcacccuga

SEQ ID NO: 3650956 - RNA, 14 nt, Human
ccaucaugucuggc

SEQ ID NO: 3650957 - RNA, 20 nt, Human
ccaucauguggccccaccca

SEQ ID NO: 3650958 - RNA, 22 nt, Human
ccaucauguuuacagaggacag

SEQ ID NO: 3650959 - RNA, 22 nt, Human
ccaucauuuuccauauccuggu

SEQ ID NO: 3650960 - RNA, 20 nt, Human
ccauccaaauaagaaaccua

SEQ ID NO: 3650961 - RNA, 21 nt, Human
ccauccaccguccccucccag

SEQ ID NO: 3650962 - RNA, 17 nt, Human
ccauccaccuuucccaa

SEQ ID NO: 3650963 - RNA, 23 nt, Human
ccauccacuggguguaaacacau

SEQ ID NO: 3650964 - RNA, 15 nt, Human
ccauccagcuugcca

SEQ ID NO: 3650965 - RNA, 18 nt, Human
ccauccagguucagcuug

SEQ ID NO: 3650966 - RNA, 19 nt, Human
ccauccagugucucacagc

SEQ ID NO: 3650967 - RNA, 21 nt, Human
ccauccauaaauccaguucua

SEQ ID NO: 3650968 - RNA, 13 nt, Human
ccauccauggcca

SEQ ID NO: 3650969 - RNA, 14 nt, Human
ccauccauggccag

SEQ ID NO: 3650970 - RNA, 16 nt, Human
ccauccauggccagca

SEQ ID NO: 3650971 - RNA, 18 nt, Human
ccauccauggccagcagc

SEQ ID NO: 3650972 - RNA, 20 nt, Human
ccaucccaaacccuucagug

SEQ ID NO: 3650973 - RNA, 16 nt, Human
ccaucccaaccagugc

SEQ ID NO: 3650974 - RNA, 20 nt, Human
ccaucccaaccagugccaag

SEQ ID NO: 3650975 - RNA, 20 nt, Human
ccaucccacugcucccccaa

SEQ ID NO: 3650976 - RNA, 12 nt, Human
ccaucccagccc

SEQ ID NO: 3650977 - RNA, 13 nt, Human
ccaucccagcccc

SEQ ID NO: 3650978 - RNA, 23 nt, Human
ccaucccaggacaccacacccag

SEQ ID NO: 3650979 - RNA, 20 nt, Human
ccaucccauaugccugggca

SEQ ID NO: 3650980 - RNA, 12 nt, Human
ccaucccauccc

SEQ ID NO: 3650981 - RNA, 13 nt, Human
ccaucccaucccg

SEQ ID NO: 3650982 - RNA, 19 nt, Human
ccaucccaugaacacacug

SEQ ID NO: 3650983 - RNA, 18 nt, Human
ccauccccauccuccagc

SEQ ID NO: 3650984 - RNA, 14 nt, Human
ccauccccccucac

SEQ ID NO: 3650985 - RNA, 21 nt, Human
ccauccccccucaccaggggc

SEQ ID NO: 3650986 - RNA, 22 nt, Human
ccauccccccucaccaggggca

SEQ ID NO: 3650987 - RNA, 21 nt, Human
ccaugagggagaugccaugag

SEQ ID NO: 3650988 - RNA, 23 nt, Human
ccaugagggagaugccaugagcc

SEQ ID NO: 3650989 - RNA, 13 nt, Human
ccaugaguccccu

SEQ ID NO: 3650990 - RNA, 17 nt, Human
ccaugaguccuugaaaa

SEQ ID NO: 3650991 - RNA, 22 nt, Human
ccaugaguuggggucuggcagc

SEQ ID NO: 3650992 - RNA, 18 nt, Human
ccaugaguuugcccuggu

SEQ ID NO: 3650993 - RNA, 22 nt, Human
ccaugaucccuguguugucucu

SEQ ID NO: 3650994 - RNA, 21 nt, Human
ccaugaugacuuaguacaaag

SEQ ID NO: 3650995 - RNA, 12 nt, Human
ccaugaugcugg

SEQ ID NO: 3650996 - RNA, 16 nt, Human
ccaugauggcaacaga

SEQ ID NO: 3650997 - RNA, 18 nt, Human
ccaugauggccaggcuga

SEQ ID NO: 3650998 - RNA, 17 nt, Human
ccaugauguggaguggg

SEQ ID NO: 3650999 - RNA, 22 nt, Human
ccaugauguggaguggggcagu

SEQ ID NO: 3651000 - RNA, 19 nt, Human
ccaugauuaaccacuucag

SEQ ID NO: 3651001 - RNA, 15 nt, Human
ccaugauuucaugua

SEQ ID NO: 3651002 - RNA, 18 nt, Human
ccaugauuucauguacug

SEQ ID NO: 3651003 - RNA, 21 nt, Human
ccaugauuucauguacugcau

SEQ ID NO: 3651004 - RNA, 16 nt, Human
ccaugcaagcagagga

SEQ ID NO: 3651005 - RNA, 19 nt, Human
ccaugcaagcagaggacca

SEQ ID NO: 3651006 - RNA, 20 nt, Human
ccaugcaagcagaggaccag

SEQ ID NO: 3651007 - RNA, 13 nt, Human
ccaugcaaggugc

SEQ ID NO: 3651008 - RNA, 17 nt, Human
ccaugcaauucauccca

SEQ ID NO: 3651009 - RNA, 15 nt, Human
ccaugcacugugaag

SEQ ID NO: 3651010 - RNA, 12 nt, Human
ccaugcagagcg

SEQ ID NO: 3651011 - RNA, 13 nt, Human
ccaugcaggcccu

SEQ ID NO: 3651012 - RNA, 12 nt, Human
ccaugcaggggg

SEQ ID NO: 3651013 - RNA, 19 nt, Human
ccaugcagggggcuccugg

SEQ ID NO: 3651014 - RNA, 18 nt, Human
ccaugccacguuccacag

SEQ ID NO: 3651015 - RNA, 15 nt, Human
ccaugccaggaaccu

SEQ ID NO: 3651016 - RNA, 12 nt, Human
ccaugccucagc

SEQ ID NO: 3651017 - RNA, 16 nt, Human
ccaugccuccucagga

SEQ ID NO: 3651018 - RNA, 14 nt, Human
ccaugccugagggu

SEQ ID NO: 3651019 - RNA, 13 nt, Human
ccaugccugucca

SEQ ID NO: 3651020 - RNA, 19 nt, Human
ccaugccuguccagccugg

SEQ ID NO: 3651021 - RNA, 15 nt, Human
ccaugccuguggcug

SEQ ID NO: 3651022 - RNA, 18 nt, Human
ccaugccuguggcugcgc

SEQ ID NO: 3651023 - RNA, 16 nt, Human
ccaugcgacacuggga

SEQ ID NO: 3651024 - RNA, 21 nt, Human
ccaugcgacacugggaggcca

SEQ ID NO: 3651025 - RNA, 22 nt, Human
ccaugcgacacugggaggccag

SEQ ID NO: 3651026 - RNA, 20 nt, Human
ccaugcgcccccuccgcccu

SEQ ID NO: 3651027 - RNA, 22 nt, Human
ccaugcgcccccuccgcccugc

SEQ ID NO: 3651028 - RNA, 16 nt, Human
ccaugcgcucagggcc

SEQ ID NO: 3651029 - RNA, 22 nt, Human
ccaugcgcucagggccaugcug

SEQ ID NO: 3651030 - RNA, 16 nt, Human
ccaugcucaucugcug

SEQ ID NO: 3651031 - RNA, 17 nt, Human
ccaugcucaucugcugg

SEQ ID NO: 3651032 - RNA, 15 nt, Human
ccaugcuccucacug

SEQ ID NO: 3651033 - RNA, 17 nt, Human
ccaugcuccucacugcc

SEQ ID NO: 3651034 - RNA, 21 nt, Human
ccaugcuccucacugcccgca

SEQ ID NO: 3651035 - RNA, 13 nt, Human
ccaugcuccucuu

SEQ ID NO: 3651036 - RNA, 17 nt, Human
ccaugcugaggccuggg

SEQ ID NO: 3651037 - RNA, 20 nt, Human
ccaugcugaggccugggccg

SEQ ID NO: 3651038 - RNA, 13 nt, Human
ccaugcugcccug

SEQ ID NO: 3651039 - RNA, 17 nt, Human
ccaugcugcccugugag

SEQ ID NO: 3651040 - RNA, 19 nt, Human
ccaugcugcuggggaagac

SEQ ID NO: 3651041 - RNA, 14 nt, Human
ccaugcuggagccu

SEQ ID NO: 3651042 - RNA, 24 nt, Human
ccaugcuggagccuguguaacagc

SEQ ID NO: 3651043 - RNA, 21 nt, Human
ccaugcugggaagacgccuga

SEQ ID NO: 3651044 - RNA, 16 nt, Human
ccaugcugucuggcac

SEQ ID NO: 3651045 - RNA, 20 nt, Human
ccaugcugucuggcacagcc

SEQ ID NO: 3651046 - RNA, 19 nt, Human
ccaugcugugcgcccaggg

SEQ ID NO: 3651047 - RNA, 14 nt, Human
ccagagcugccagu

SEQ ID NO: 3651048 - RNA, 14 nt, Human
ccagagcuggguga

SEQ ID NO: 3651049 - RNA, 21 nt, Human
ccagagcuguuuauggccuca

SEQ ID NO: 3651050 - RNA, 22 nt, Human
ccagagcuguuuauggccucag

SEQ ID NO: 3651051 - RNA, 22 nt, Human
ccagaggaacuguccagagagc

SEQ ID NO: 3651052 - RNA, 17 nt, Human
ccagaggaaggggccag

SEQ ID NO: 3651053 - RNA, 22 nt, Human
ccagaggaaggggccagaggcu

SEQ ID NO: 3651054 - RNA, 21 nt, Human
ccagaggaauccuggcagccc

SEQ ID NO: 3651055 - RNA, 22 nt, Human
ccagaggaauccuggcagccca

SEQ ID NO: 3651056 - RNA, 20 nt, Human
ccagaggacugugaugcccu

SEQ ID NO: 3651057 - RNA, 22 nt, Human
ccagaggacugugaugcccugc

SEQ ID NO: 3651058 - RNA, 21 nt, Human
ccagaggagagaggacccccu

SEQ ID NO: 3651059 - RNA, 13 nt, Human
ccagaggagccuu

SEQ ID NO: 3651060 - RNA, 15 nt, Human
ccagaggagccuuuu

SEQ ID NO: 3651061 - RNA, 17 nt, Human
ccagaggagccuuuuua

SEQ ID NO: 3651062 - RNA, 20 nt, Human
ccagaggagcugggagccgg

SEQ ID NO: 3651063 - RNA, 17 nt, Human
ccagaggcagaacccug

SEQ ID NO: 3651064 - RNA, 19 nt, Human
ccagaggccaacacugugg

SEQ ID NO: 3651065 - RNA, 14 nt, Human
ccagaggcccccag

SEQ ID NO: 3651066 - RNA, 21 nt, Human
ccagaggcccccagcccaggg

SEQ ID NO: 3651067 - RNA, 17 nt, Human
ccagaggcgucccgcac

SEQ ID NO: 3651068 - RNA, 13 nt, Human
ccagaggcugagu

SEQ ID NO: 3651069 - RNA, 15 nt, Human
ccagaggcugcccca

SEQ ID NO: 3651070 - RNA, 18 nt, Human
ccagagggagugacagag

SEQ ID NO: 3651071 - RNA, 20 nt, Human
ccagagggagugacagaggc

SEQ ID NO: 3651072 - RNA, 18 nt, Human
ccagagggccugcaaggg

SEQ ID NO: 3651073 - RNA, 17 nt, Human
ccagaggggccugccac

SEQ ID NO: 3651074 - RNA, 22 nt, Human
ccagaggggccugccaccugga

SEQ ID NO: 3651075 - RNA, 19 nt, Human
ccagagguaacagaacagc

SEQ ID NO: 3651076 - RNA, 23 nt, Human
ccagagguaacagaacagcuuca

SEQ ID NO: 3651077 - RNA, 15 nt, Human
ccagagguccagccc

SEQ ID NO: 3651078 - RNA, 16 nt, Human
ccagagguccagccca

SEQ ID NO: 3651079 - RNA, 12 nt, Human
ccagaggugcuu

SEQ ID NO: 3651080 - RNA, 22 nt, Human
ccagaggugggcaggugguggc

SEQ ID NO: 3651081 - RNA, 23 nt, Human
ccagaguccccccacucccagca

SEQ ID NO: 3651082 - RNA, 17 nt, Human
ccagaguggccuggcca

SEQ ID NO: 3651083 - RNA, 21 nt, Human
ccagaguggccuggccaggag

SEQ ID NO: 3651084 - RNA, 19 nt, Human
ccagaguuccccaugcaga

SEQ ID NO: 3651085 - RNA, 11 nt, Human
ccagaguugcu

SEQ ID NO: 3651086 - RNA, 12 nt, Human
ccagaguugcug

SEQ ID NO: 3651087 - RNA, 21 nt, Human
ccagaguugcugggagcugaa

SEQ ID NO: 3651088 - RNA, 12 nt, Human
ccagauaacuua

SEQ ID NO: 3651089 - RNA, 14 nt, Human
ccagauaagaaugc

SEQ ID NO: 3651090 - RNA, 13 nt, Human
ccagauaccagcc

SEQ ID NO: 3651091 - RNA, 17 nt, Human
ccagauaguguagcuga

SEQ ID NO: 3651092 - RNA, 20 nt, Human
ccagauaguguagcugagga

SEQ ID NO: 3651093 - RNA, 19 nt, Human
ccagauauucaagucaccu

SEQ ID NO: 3651094 - RNA, 15 nt, Human
ccagaucaaggaugu

SEQ ID NO: 3651095 - RNA, 18 nt, Human
ccagaucaccagcccggc

SEQ ID NO: 3651096 - RNA, 20 nt, Human
ccagaucacugccacacucu

SEQ ID NO: 3651097 - RNA, 16 nt, Human
ccagaucagccagaag

SEQ ID NO: 3651098 - RNA, 16 nt, Human
ccagaucccagaagga

SEQ ID NO: 3651099 - RNA, 18 nt, Human
ccagaucccaggccccug

SEQ ID NO: 3651100 - RNA, 16 nt, Human
ccagauccucucuggg

SEQ ID NO: 3651101 - RNA, 14 nt, Human
ccagauccucuugg

SEQ ID NO: 3651102 - RNA, 15 nt, Human
ccagauccuggaaau

SEQ ID NO: 3651103 - RNA, 22 nt, Human
ccagaucggaucuguugcaaac

SEQ ID NO: 3651104 - RNA, 23 nt, Human
ccagaucuacuugguugucaagu

SEQ ID NO: 3651105 - RNA, 21 nt, Human
ccagaugagcagaagcucucg

SEQ ID NO: 3651106 - RNA, 16 nt, Human
ccagaugcagcucaag

SEQ ID NO: 3651107 - RNA, 18 nt, Human
ccagaugcagggcaguca

SEQ ID NO: 3651108 - RNA, 17 nt, Human
ccagaugccccuuucug

SEQ ID NO: 3651109 - RNA, 14 nt, Human
ccagaugcugaaaa

SEQ ID NO: 3651110 - RNA, 19 nt, Human
ccagaugcugauguucagu

SEQ ID NO: 3651111 - RNA, 21 nt, Human
ccagaugcugauguucagugu

SEQ ID NO: 3651112 - RNA, 22 nt, Human
ccagaugcugauguucagugua

SEQ ID NO: 3651113 - RNA, 14 nt, Human
ccagaugcugcaga

SEQ ID NO: 3651114 - RNA, 19 nt, Human
ccagaugcugcagagucac

SEQ ID NO: 3651115 - RNA, 14 nt, Human
ccagauggggccuc

SEQ ID NO: 3651116 - RNA, 13 nt, Human
ccagauggucauc

SEQ ID NO: 3651117 - RNA, 16 nt, Human
ccagauggugggaugu

SEQ ID NO: 3651118 - RNA, 15 nt, Human
ccagauuaaacuuca

SEQ ID NO: 3651119 - RNA, 16 nt, Human
ccagauuccccugugu

SEQ ID NO: 3651120 - RNA, 20 nt, Human
ccagauucuauccucaucuu

SEQ ID NO: 3651121 - RNA, 19 nt, Human
ccagauucuuuccugaggc

SEQ ID NO: 3651122 - RNA, 21 nt, Human
ccagauucuuuccugaggcug

SEQ ID NO: 3651123 - RNA, 22 nt, Human
ccagauucuuuccugaggcugg

SEQ ID NO: 3651124 - RNA, 23 nt, Human
ccagauucuuuccugaggcuggg

SEQ ID NO: 3651125 - RNA, 14 nt, Human
ccagauugcaacag

SEQ ID NO: 3651126 - RNA, 18 nt, Human
ccagauugcaacaggcug

SEQ ID NO: 3651127 - RNA, 19 nt, Human
ccagauugcaacaggcugg

SEQ ID NO: 3651128 - RNA, 13 nt, Human
ccagauuuacacu

SEQ ID NO: 3651129 - RNA, 13 nt, Human
ccagauuuaugca

SEQ ID NO: 3651130 - RNA, 12 nt, Human
ccagauuucacu

SEQ ID NO: 3651131 - RNA, 21 nt, Human
ccaggaugauaaguuccuuuc

SEQ ID NO: 3651132 - RNA, 18 nt, Human
ccaggaugcuggguggcc

SEQ ID NO: 3651133 - RNA, 21 nt, Human
ccaggauggaacacggccaca

SEQ ID NO: 3651134 - RNA, 20 nt, Human
ccaggauggcccuucccacu

SEQ ID NO: 3651135 - RNA, 23 nt, Human
ccaggauggcccuucccacugga

SEQ ID NO: 3651136 - RNA, 15 nt, Human
ccaggauuccucuuu

SEQ ID NO: 3651137 - RNA, 18 nt, Human
ccaggauuugcugggaga

SEQ ID NO: 3651138 - RNA, 20 nt, Human
ccaggauuuuaacaaaagca

SEQ ID NO: 3651139 - RNA, 16 nt, Human
ccaggcaaauaaaauu

SEQ ID NO: 3651140 - RNA, 18 nt, Human
ccaggcaaauaaaauucc

SEQ ID NO: 3651141 - RNA, 12 nt, Human
ccaggcaaauca

SEQ ID NO: 3651142 - RNA, 19 nt, Human
ccaggcaaaucaguuacua

SEQ ID NO: 3651143 - RNA, 15 nt, Human
ccaggcaaggcugug

SEQ ID NO: 3651144 - RNA, 13 nt, Human
ccaggcaauggcc

SEQ ID NO: 3651145 - RNA, 19 nt, Human
ccaggcaauggccuaaacu

SEQ ID NO: 3651146 - RNA, 13 nt, Human
ccaggcacaggca

SEQ ID NO: 3651147 - RNA, 18 nt, Human
ccaggcacaggcagggca

SEQ ID NO: 3651148 - RNA, 19 nt, Human
ccaggcacaggcagggcag

SEQ ID NO: 3651149 - RNA, 16 nt, Human
ccaggcacccccugga

SEQ ID NO: 3651150 - RNA, 18 nt, Human
ccaggcacccccuggaga

SEQ ID NO: 3651151 - RNA, 13 nt, Human
ccaggcacccuuc

SEQ ID NO: 3651152 - RNA, 18 nt, Human
ccaggcacgaacccaccu

SEQ ID NO: 3651153 - RNA, 19 nt, Human
ccaggcacgaacccaccug

SEQ ID NO: 3651154 - RNA, 15 nt, Human
ccaggcacugucuua

SEQ ID NO: 3651155 - RNA, 13 nt, Human
ccaggcagaucca

SEQ ID NO: 3651156 - RNA, 16 nt, Human
ccaggcagauccagga

SEQ ID NO: 3651157 - RNA, 17 nt, Human
ccaggcagauccaggac

SEQ ID NO: 3651158 - RNA, 19 nt, Human
ccaggcagauccaggacua

SEQ ID NO: 3651159 - RNA, 21 nt, Human
ccaggcagaucugugccccau

SEQ ID NO: 3651160 - RNA, 14 nt, Human
ccaggcaggcugug

SEQ ID NO: 3651161 - RNA, 12 nt, Human
ccaggcagggag

SEQ ID NO: 3651162 - RNA, 12 nt, Human
ccaggcaggucu

SEQ ID NO: 3651163 - RNA, 17 nt, Human
ccaggcaggucugaagc

SEQ ID NO: 3651164 - RNA, 14 nt, Human
ccaggcaggucuug

SEQ ID NO: 3651165 - RNA, 19 nt, Human
ccaggcaggugccuggaca

SEQ ID NO: 3651166 - RNA, 12 nt, Human
ccaggcagucgg

SEQ ID NO: 3651167 - RNA, 13 nt, Human
ccaggcauggugg

SEQ ID NO: 3651168 - RNA, 18 nt, Human
ccaggcauguggcagggg

SEQ ID NO: 3651169 - RNA, 23 nt, Human
ccaggccaaaggggaccuggaag

SEQ ID NO: 3651170 - RNA, 21 nt, Human
ccaggccacaagacccuugug

SEQ ID NO: 3651171 - RNA, 19 nt, Human
ccaggccacauggggcugg

SEQ ID NO: 3651172 - RNA, 21 nt, Human
ccaggccaccuccccagcauu

SEQ ID NO: 3651173 - RNA, 16 nt, Human
ccaggccacuggcccc

SEQ ID NO: 3651174 - RNA, 23 nt, Human
ccaggccacuggccccugagauc

SEQ ID NO: 3651175 - RNA, 15 nt, Human
ccaggccagccuccg

SEQ ID NO: 3651176 - RNA, 19 nt, Human
ccaggccagccuccgagag

SEQ ID NO: 3651177 - RNA, 20 nt, Human
ccaggccagccuccgagagg

SEQ ID NO: 3651178 - RNA, 23 nt, Human
ccaggccagccuccgagagggag

SEQ ID NO: 3651179 - RNA, 20 nt, Human
ccaggccaggacucugcagc

SEQ ID NO: 3651180 - RNA, 12 nt, Human
ccaggccaggcc

SEQ ID NO: 3651181 - RNA, 15 nt, Human
ccaggccauucugcc

SEQ ID NO: 3651182 - RNA, 17 nt, Human
ccaggccauucugccgc

SEQ ID NO: 3651183 - RNA, 19 nt, Human
ccaggcccaaggcucccgg

SEQ ID NO: 3651184 - RNA, 16 nt, Human
ccaggcccacucaggg

SEQ ID NO: 3651185 - RNA, 17 nt, Human
ccaggcccacugugccu

SEQ ID NO: 3651186 - RNA, 15 nt, Human
ccaggccccaugacc

SEQ ID NO: 3651187 - RNA, 22 nt, Human
ccaggccccaugaccuccagcu

SEQ ID NO: 3651188 - RNA, 23 nt, Human
ccaggccccaugaccuccagcuu

SEQ ID NO: 3651189 - RNA, 21 nt, Human
ccaggcccccaccacacaucc

SEQ ID NO: 3651190 - RNA, 12 nt, Human
ccaggccccucc

SEQ ID NO: 3651191 - RNA, 16 nt, Human
ccaggccccucccucu

SEQ ID NO: 3651192 - RNA, 18 nt, Human
ccaggccccucccucucc

SEQ ID NO: 3651193 - RNA, 23 nt, Human
ccaggccccugccacccugggga

SEQ ID NO: 3651194 - RNA, 16 nt, Human
ccaggcccggggcugg

SEQ ID NO: 3651195 - RNA, 17 nt, Human
ccaggcccgucugucca

SEQ ID NO: 3651196 - RNA, 18 nt, Human
ccaggcccgucuguccau

SEQ ID NO: 3651197 - RNA, 14 nt, Human
ccaggcccucugcc

SEQ ID NO: 3651198 - RNA, 16 nt, Human
ccaggcccucugccca

SEQ ID NO: 3651199 - RNA, 20 nt, Human
ccaggcccucugcccacucc

SEQ ID NO: 3651200 - RNA, 22 nt, Human
ccaggcccucugcccacucccu

SEQ ID NO: 3651201 - RNA, 14 nt, Human
ccaggccgcagcuc

SEQ ID NO: 3651202 - RNA, 19 nt, Human
ccaggccgcagcucuugcc

SEQ ID NO: 3651203 - RNA, 16 nt, Human
ccaggccgccccagcc

SEQ ID NO: 3651204 - RNA, 18 nt, Human
ccaggccgccccagccuc

SEQ ID NO: 3651205 - RNA, 15 nt, Human
ccaggccggccagcc

SEQ ID NO: 3651206 - RNA, 22 nt, Human
ccaggccggugugggcuguguc

SEQ ID NO: 3651207 - RNA, 14 nt, Human
ccaggccguggcug

SEQ ID NO: 3651208 - RNA, 18 nt, Human
ccaggccguggcugccca

SEQ ID NO: 3651209 - RNA, 21 nt, Human
ccaggccuacuccugucuucu

SEQ ID NO: 3651210 - RNA, 23 nt, Human
ccaggccuacuccugucuucugc

SEQ ID NO: 3651211 - RNA, 24 nt, Human
ccaggccuauguugauccauccag

SEQ ID NO: 3651212 - RNA, 16 nt, Human
ccaggccuccagcuca

SEQ ID NO: 3651213 - RNA, 18 nt, Human
ccaggccuccuacagcuu

SEQ ID NO: 3651214 - RNA, 15 nt, Human
ccaggccucuguguc

SEQ ID NO: 3651215 - RNA, 16 nt, Human
ccaggccucuuggcag

SEQ ID NO: 3651216 - RNA, 18 nt, Human
ccaggccucuuggcaguc

SEQ ID NO: 3651217 - RNA, 19 nt, Human
ccaggccucuuggcaguca

SEQ ID NO: 3651218 - RNA, 13 nt, Human
ccaggccugcagc

SEQ ID NO: 3651219 - RNA, 14 nt, Human
ccaggccugcagca

SEQ ID NO: 3651220 - RNA, 16 nt, Human
ccaggccugcagcagg

SEQ ID NO: 3651221 - RNA, 18 nt, Human
ccaggccugcagcaggag

SEQ ID NO: 3651222 - RNA, 20 nt, Human
ccaggccugggucugugucu

SEQ ID NO: 3651223 - RNA, 22 nt, Human
ccaggcgagagacuuguggccu

SEQ ID NO: 3651224 - RNA, 16 nt, Human
ccaggcgcuaauucaa

SEQ ID NO: 3651225 - RNA, 14 nt, Human
ccaggcgggcucaa

SEQ ID NO: 3651226 - RNA, 16 nt, Human
ccaggcgggcucaagg

SEQ ID NO: 3651227 - RNA, 22 nt, Human
ccaggcgggcucaaggaaaggg

SEQ ID NO: 3651228 - RNA, 19 nt, Human
ccaggcuaguccggaccca

SEQ ID NO: 3651229 - RNA, 19 nt, Human
ccaggcuauguauaaaaua

SEQ ID NO: 3651230 - RNA, 20 nt, Human
ccaggcuauguauaaaauac

SEQ ID NO: 3651231 - RNA, 22 nt, Human
ccaggcuauguauaaaauacau

SEQ ID NO: 3651232 - RNA, 13 nt, Human
ccaggcucacuca

SEQ ID NO: 3651233 - RNA, 18 nt, Human
ccaggcuccgcccuuagu

SEQ ID NO: 3651234 - RNA, 23 nt, Human
ccaggcuccuuccugucuuccug

SEQ ID NO: 3651235 - RNA, 20 nt, Human
ccaggcuccuuuagcgccca

SEQ ID NO: 3651236 - RNA, 21 nt, Human
ccaggcucguggacugagugg

SEQ ID NO: 3651237 - RNA, 23 nt, Human
ccaggcucguggacugaguggga

SEQ ID NO: 3651238 - RNA, 23 nt, Human
ccaggcucucgcacaccucugca

SEQ ID NO: 3651239 - RNA, 20 nt, Human
ccaggcucucuuugcccagu

SEQ ID NO: 3651240 - RNA, 15 nt, Human
ccaggcucugugcug

SEQ ID NO: 3651241 - RNA, 20 nt, Human
ccaggcucugugcugacccu

SEQ ID NO: 3651242 - RNA, 15 nt, Human
ccaggcugaccacag

SEQ ID NO: 3651243 - RNA, 17 nt, Human
ccaggcugaccacagca

SEQ ID NO: 3651244 - RNA, 20 nt, Human
ccaggcugaccacagcacag

SEQ ID NO: 3651245 - RNA, 23 nt, Human
ccaggcugaccacagcacagcca

SEQ ID NO: 3651246 - RNA, 14 nt, Human
ccaggcugagccuc

SEQ ID NO: 3651247 - RNA, 16 nt, Human
ccaggcugagccucag

SEQ ID NO: 3651248 - RNA, 15 nt, Human
ccaggcugagguccu

SEQ ID NO: 3651249 - RNA, 14 nt, Human
ccaggcugccgucc

SEQ ID NO: 3651250 - RNA, 21 nt, Human
cccagaccuuuuauccacuua

SEQ ID NO: 3651251 - RNA, 20 nt, Human
cccagacgccugauauugaa

SEQ ID NO: 3651252 - RNA, 19 nt, Human
cccagacgccuggcugcug

SEQ ID NO: 3651253 - RNA, 21 nt, Human
cccagacggcuccacuaggac

SEQ ID NO: 3651254 - RNA, 17 nt, Human
cccagacuacuauuuuc

SEQ ID NO: 3651255 - RNA, 18 nt, Human
cccagacuacuauuuucu

SEQ ID NO: 3651256 - RNA, 20 nt, Human
cccagacucagacauuggca

SEQ ID NO: 3651257 - RNA, 10 nt, Human
cccagacuug

SEQ ID NO: 3651258 - RNA, 23 nt, Human
cccagacuuguuggcguaggcua

SEQ ID NO: 3651259 - RNA, 22 nt, Human
cccagagaaaggggagcccacu

SEQ ID NO: 3651260 - RNA, 13 nt, Human
cccagagaacagc

SEQ ID NO: 3651261 - RNA, 16 nt, Human
cccagagacaggaaaa

SEQ ID NO: 3651262 - RNA, 17 nt, Human
cccagagacaggaaaau

SEQ ID NO: 3651263 - RNA, 23 nt, Human
cccagagacauacuugaagggcc

SEQ ID NO: 3651264 - RNA, 13 nt, Human
cccagagacccag

SEQ ID NO: 3651265 - RNA, 19 nt, Human
cccagagacuuuguagauc

SEQ ID NO: 3651266 - RNA, 17 nt, Human
cccagagagaagagccc

SEQ ID NO: 3651267 - RNA, 19 nt, Human
cccagagagaagagcccca

SEQ ID NO: 3651268 - RNA, 15 nt, Human
cccagagaggaauca

SEQ ID NO: 3651269 - RNA, 21 nt, Human
cccagagaggaaucagacuuc

SEQ ID NO: 3651270 - RNA, 16 nt, Human
cccagagaugccucca

SEQ ID NO: 3651271 - RNA, 19 nt, Human
cccagagaugccuccaccg

SEQ ID NO: 3651272 - RNA, 21 nt, Human
cccagagaugccuccaccgcu

SEQ ID NO: 3651273 - RNA, 23 nt, Human
cccagagaugccuccaccgcugc

SEQ ID NO: 3651274 - RNA, 20 nt, Human
ccagguauucguuaucuaau

SEQ ID NO: 3651275 - RNA, 14 nt, Human
ccaggucaacagaa

SEQ ID NO: 3651276 - RNA, 22 nt, Human
ccaggucaacagaaugaaaaau

SEQ ID NO: 3651277 - RNA, 14 nt, Human
ccaggucacacgac

SEQ ID NO: 3651278 - RNA, 16 nt, Human
ccagguccacggucug

SEQ ID NO: 3651279 - RNA, 14 nt, Human
ccagguccagcucu

SEQ ID NO: 3651280 - RNA, 19 nt, Human
ccagguccagcucuggagg

SEQ ID NO: 3651281 - RNA, 16 nt, Human
ccaggucccccugcag

SEQ ID NO: 3651282 - RNA, 12 nt, Human
ccaggucccucu

SEQ ID NO: 3651283 - RNA, 14 nt, Human
ccagguccucugau

SEQ ID NO: 3651284 - RNA, 13 nt, Human
ccagguccuggug

SEQ ID NO: 3651285 - RNA, 14 nt, Human
ccagguccuggugg

SEQ ID NO: 3651286 - RNA, 14 nt, Human
ccaggucgggcuca

SEQ ID NO: 3651287 - RNA, 15 nt, Human
ccaggucucacgggc

SEQ ID NO: 3651288 - RNA, 16 nt, Human
ccaggucucacgggca

SEQ ID NO: 3651289 - RNA, 23 nt, Human
ccaggucucacgggcaugggcac

SEQ ID NO: 3651290 - RNA, 13 nt, Human
ccaggucucccgg

SEQ ID NO: 3651291 - RNA, 20 nt, Human
ccaggucucccuggaucaga

SEQ ID NO: 3651292 - RNA, 14 nt, Human
ccaggucuccucca

SEQ ID NO: 3651293 - RNA, 15 nt, Human
ccaggucuccuccac

SEQ ID NO: 3651294 - RNA, 19 nt, Human
ccaggucuccuccaccgcc

SEQ ID NO: 3651295 - RNA, 23 nt, Human
ccaggucugggaagcugagggca

SEQ ID NO: 3651296 - RNA, 23 nt, Human
ccaggugaacaaaguuuaccaga

SEQ ID NO: 3651297 - RNA, 15 nt, Human
ccaggugaggucagc

SEQ ID NO: 3651298 - RNA, 19 nt, Human
ccaggugcacaagcuccaa

SEQ ID NO: 3651299 - RNA, 13 nt, Human
ccaggugcagagg

SEQ ID NO: 3651300 - RNA, 20 nt, Human
ccaggugcagagguacccug

SEQ ID NO: 3651301 - RNA, 22 nt, Human
ccaggugcagagguacccuggg

SEQ ID NO: 3651302 - RNA, 23 nt, Human
ccaggugcagagguacccugggu

SEQ ID NO: 3651303 - RNA, 15 nt, Human
ccaggugcagccaga

SEQ ID NO: 3651304 - RNA, 12 nt, Human
ccaggugccagu

SEQ ID NO: 3651305 - RNA, 17 nt, Human
ccaggugccaguuaugg

SEQ ID NO: 3651306 - RNA, 15 nt, Human
ccaggugcccagcua

SEQ ID NO: 3651307 - RNA, 15 nt, Human
ccaggugccuccuga

SEQ ID NO: 3651308 - RNA, 16 nt, Human
ccaggugccuuucaaa

SEQ ID NO: 3651309 - RNA, 21 nt, Human
ccaggugcuaggaacacuccu

SEQ ID NO: 3651310 - RNA, 20 nt, Human
ccagguggagguggcauccc

SEQ ID NO: 3651311 - RNA, 16 nt, Human
ccagguggcugaccca

SEQ ID NO: 3651312 - RNA, 19 nt, Human
ccagguguuaacauuccaa

SEQ ID NO: 3651313 - RNA, 21 nt, Human
ccagguguuacuguaauuccu

SEQ ID NO: 3651314 - RNA, 16 nt, Human
ccagguuaucugggca

SEQ ID NO: 3651315 - RNA, 21 nt, Human
ccagguucuccguuagcuccu

SEQ ID NO: 3651316 - RNA, 22 nt, Human
ccagguucuccguuagcuccug

SEQ ID NO: 3651317 - RNA, 16 nt, Human
ccagguugaaagaccu

SEQ ID NO: 3651318 - RNA, 18 nt, Human
ccagguuggagugcagug

SEQ ID NO: 3651319 - RNA, 18 nt, Human
ccagguuggcucugccag

SEQ ID NO: 3651320 - RNA, 19 nt, Human
ccagguuggcucugccagu

SEQ ID NO: 3651321 - RNA, 16 nt, Human
ccagguuuucugggug

SEQ ID NO: 3651322 - RNA, 19 nt, Human
ccagguuuucugggugucc

SEQ ID NO: 3651323 - RNA, 20 nt, Human
ccagguuuuguuccgcccag

SEQ ID NO: 3651324 - RNA, 19 nt, Human
ccaguaaaauugccauauu

SEQ ID NO: 3651325 - RNA, 12 nt, Human
ccaguaaacaga

SEQ ID NO: 3651326 - RNA, 21 nt, Human
ccaguaaaugggggugcauuu

SEQ ID NO: 3651327 - RNA, 22 nt, Human
ccaguaaaugggggugcauuug

SEQ ID NO: 3651328 - RNA, 20 nt, Human
ccaguaacacaggccacccu

SEQ ID NO: 3651329 - RNA, 19 nt, Human
ccaguaacgcgucuuccug

SEQ ID NO: 3651330 - RNA, 21 nt, Human
ccaguaacgcgucuuccugag

SEQ ID NO: 3651331 - RNA, 15 nt, Human
ccaguaacucaucug

SEQ ID NO: 3651332 - RNA, 18 nt, Human
ccaguaagggaaauagaa

SEQ ID NO: 3651333 - RNA, 14 nt, Human
ccaguaauccugua

SEQ ID NO: 3651334 - RNA, 17 nt, Human
ccaguacauucucaguu

SEQ ID NO: 3651335 - RNA, 22 nt, Human
ccaguacauucucaguuuuucu

SEQ ID NO: 3651336 - RNA, 19 nt, Human
ccaguaccuggguccccag

SEQ ID NO: 3651337 - RNA, 23 nt, Human
ccaguaccuggguccccagcccu

SEQ ID NO: 3651338 - RNA, 16 nt, Human
ccaguaccuuugucac

SEQ ID NO: 3651339 - RNA, 17 nt, Human
ccaguaccuuugucaca

SEQ ID NO: 3651340 - RNA, 15 nt, Human
ccaguagcaggcccg

SEQ ID NO: 3651341 - RNA, 23 nt, Human
ccaguagcugggaccacaggugc

SEQ ID NO: 3651342 - RNA, 21 nt, Human
ccaguagcuugggacaaauca

SEQ ID NO: 3651343 - RNA, 22 nt, Human
ccaguauaaaacaccuaaauaa

SEQ ID NO: 3651344 - RNA, 18 nt, Human
ccaguaucucuucagucu

SEQ ID NO: 3651345 - RNA, 14 nt, Human
ccaguauucuuguc

SEQ ID NO: 3651346 - RNA, 20 nt, Human
ccaguauuguacaaaguauu

SEQ ID NO: 3651347 - RNA, 17 nt, Human
ccaguauuuagaagcca

SEQ ID NO: 3651348 - RNA, 14 nt, Human
ccagucacaugacc

SEQ ID NO: 3651349 - RNA, 18 nt, Human
ccagucaccccggccacc

SEQ ID NO: 3651350 - RNA, 13 nt, Human
ccagucagccucu

SEQ ID NO: 3651351 - RNA, 19 nt, Human
ccagucagguaguugcaau

SEQ ID NO: 3651352 - RNA, 17 nt, Human
ccagucauaccaacuuu

SEQ ID NO: 3651353 - RNA, 19 nt, Human
ccagucauaccaacuuuag

SEQ ID NO: 3651354 - RNA, 14 nt, Human
ccaguccaaggaaa

SEQ ID NO: 3651355 - RNA, 16 nt, Human
ccaguccacccugccu

SEQ ID NO: 3651356 - RNA, 17 nt, Human
ccaguccaccugaggaa

SEQ ID NO: 3651357 - RNA, 14 nt, Human
ccaguccaggcugc

SEQ ID NO: 3651358 - RNA, 14 nt, Human
ccaguccaguccua

SEQ ID NO: 3651359 - RNA, 13 nt, Human
ccagucccagcag

SEQ ID NO: 3651360 - RNA, 14 nt, Human
ccagucccagcagc

SEQ ID NO: 3651361 - RNA, 15 nt, Human
ccaguccccaccccu

SEQ ID NO: 3651362 - RNA, 18 nt, Human
ccaguccccaccccugcc

SEQ ID NO: 3651363 - RNA, 19 nt, Human
ccaguccccaccccugccc

SEQ ID NO: 3651364 - RNA, 20 nt, Human
ccagucccccaaccccagcc

SEQ ID NO: 3651365 - RNA, 23 nt, Human
ccagucccccaaccccagccgcu

SEQ ID NO: 3651366 - RNA, 15 nt, Human
ccaguccccccaccc

SEQ ID NO: 3651367 - RNA, 18 nt, Human
ccagucccccugccccag

SEQ ID NO: 3651368 - RNA, 14 nt, Human
ccaguccccuuccc

SEQ ID NO: 3651369 - RNA, 18 nt, Human
ccaguccccuucccguga

SEQ ID NO: 3651370 - RNA, 13 nt, Human
ccagucccugggg

SEQ ID NO: 3651371 - RNA, 17 nt, Human
ccaguccuaucugggcu

SEQ ID NO: 3651372 - RNA, 18 nt, Human
ccaguccuaucugggcuu

SEQ ID NO: 3651373 - RNA, 22 nt, Human
ccaguccucucccaaguccaca

SEQ ID NO: 3651374 - RNA, 13 nt, Human
ccaguccugcccg

SEQ ID NO: 3651375 - RNA, 15 nt, Human
ccaguccugcccgcc

SEQ ID NO: 3651376 - RNA, 16 nt, Human
ccaguccugccuggcc

SEQ ID NO: 3651377 - RNA, 14 nt, Human
ccaguccugcucuc

SEQ ID NO: 3651378 - RNA, 13 nt, Human
ccaguccuguccu

SEQ ID NO: 3651379 - RNA, 13 nt, Human
ccaguccuuccac

SEQ ID NO: 3651380 - RNA, 15 nt, Human
ccagucgcgcugccu

SEQ ID NO: 3651381 - RNA, 19 nt, Human
ccagucgcgcugccugugu

SEQ ID NO: 3651382 - RNA, 17 nt, Human
ccagucucucuuaaagu

SEQ ID NO: 3651383 - RNA, 12 nt, Human
ccagucugaccc

SEQ ID NO: 3651384 - RNA, 13 nt, Human
ccagucugacccu

SEQ ID NO: 3651385 - RNA, 17 nt, Human
ccagucugcugcccucc

SEQ ID NO: 3651386 - RNA, 16 nt, Human
ccagucugggcugccg

SEQ ID NO: 3651387 - RNA, 19 nt, Human
ccagucugggcugccgggu

SEQ ID NO: 3651388 - RNA, 19 nt, Human
ccagucuuuaaaggcccag

SEQ ID NO: 3651389 - RNA, 15 nt, Human
ccagucuuuuguccu

SEQ ID NO: 3651390 - RNA, 20 nt, Human
ccagugaaaucaguuacucu

SEQ ID NO: 3651391 - RNA, 16 nt, Human
ccagugaaccaaagag

SEQ ID NO: 3651392 - RNA, 22 nt, Human
ccagugaagagccacugccauu

SEQ ID NO: 3651393 - RNA, 23 nt, Human
ccagugaauucuugaaggaaaau

SEQ ID NO: 3651394 - RNA, 18 nt, Human
ccagugaauuuuugcaau

SEQ ID NO: 3651395 - RNA, 11 nt, Human
ccagugacacu

SEQ ID NO: 3651396 - RNA, 20 nt, Human
ccagugacacuucagagagc

SEQ ID NO: 3651397 - RNA, 15 nt, Human
ccagugacagacagg

SEQ ID NO: 3651398 - RNA, 21 nt, Human
ccagugacagacaggcucuua

SEQ ID NO: 3651399 - RNA, 14 nt, Human
ccagugacagcuag

SEQ ID NO: 3651400 - RNA, 18 nt, Human
ccagugaccugaggaagc

SEQ ID NO: 3651401 - RNA, 12 nt, Human
ccagugaccugg

SEQ ID NO: 3651402 - RNA, 23 nt, Human
ccagugaccuggaaggcccagca

SEQ ID NO: 3651403 - RNA, 12 nt, Human
ccagugacucca

SEQ ID NO: 3651404 - RNA, 15 nt, Human
ccagugacuccagga

SEQ ID NO: 3651405 - RNA, 17 nt, Human
ccagugacuuuuucuaa

SEQ ID NO: 3651406 - RNA, 17 nt, Human
ccagugagaugcauucu

SEQ ID NO: 3651407 - RNA, 20 nt, Human
ccagugagcgcuugggcgcc

SEQ ID NO: 3651408 - RNA, 18 nt, Human
ccagugaggcucugcccu

SEQ ID NO: 3651409 - RNA, 20 nt, Human
ccagugaggcucugcccuug

SEQ ID NO: 3651410 - RNA, 18 nt, Human
ccagugagggacgucaga

SEQ ID NO: 3651411 - RNA, 17 nt, Human
ccagugcaaaugcaugc

SEQ ID NO: 3651412 - RNA, 14 nt, Human
ccagugcaacagca

SEQ ID NO: 3651413 - RNA, 14 nt, Human
ccagugcacugaaa

SEQ ID NO: 3651414 - RNA, 17 nt, Human
cagaggccaacacugug

SEQ ID NO: 3651415 - RNA, 14 nt, Human
cagaggccauggca

SEQ ID NO: 3651416 - RNA, 16 nt, Human
cagaggcccaggcugc

SEQ ID NO: 3651417 - RNA, 17 nt, Human
cagaggcccaggcugcc

SEQ ID NO: 3651418 - RNA, 19 nt, Human
cagaggcccaggcugccgu

SEQ ID NO: 3651419 - RNA, 21 nt, Human
ccauugcuaucuauugauaau

SEQ ID NO: 3651420 - RNA, 11 nt, Human
ccauugcugcu

SEQ ID NO: 3651421 - RNA, 23 nt, Human
ccauugcugcuccuuagcugcca

SEQ ID NO: 3651422 - RNA, 17 nt, Human
ccauugcuuauuaugua

SEQ ID NO: 3651423 - RNA, 12 nt, Human
ccauugcuucac

SEQ ID NO: 3651424 - RNA, 14 nt, Human
ccauuggaaauuuc

SEQ ID NO: 3651425 - RNA, 20 nt, Human
ccauuggcuauuuaaaacuu

SEQ ID NO: 3651426 - RNA, 21 nt, Human
ccauuggcuauuuaaaacuug

SEQ ID NO: 3651427 - RNA, 15 nt, Human
ccauuggggcuccca

SEQ ID NO: 3651428 - RNA, 16 nt, Human
ccauuggggcucccag

SEQ ID NO: 3651429 - RNA, 21 nt, Human
ccauuggggcucccagccagg

SEQ ID NO: 3651430 - RNA, 14 nt, Human
ccauugguccaaga

SEQ ID NO: 3651431 - RNA, 13 nt, Human
ccauugguguuga

SEQ ID NO: 3651432 - RNA, 19 nt, Human
ccauuguagcgucuuucuu

SEQ ID NO: 3651433 - RNA, 19 nt, Human
ccauuguccaauccuaugu

SEQ ID NO: 3651434 - RNA, 22 nt, Human
ccauugucccucugccccaucc

SEQ ID NO: 3651435 - RNA, 16 nt, Human
ccauugucuuguucug

SEQ ID NO: 3651436 - RNA, 17 nt, Human
ccauugucuuguucugu

SEQ ID NO: 3651437 - RNA, 20 nt, Human
ccauugucuuguucugugau

SEQ ID NO: 3651438 - RNA, 14 nt, Human
ccauugucuuuaua

SEQ ID NO: 3651439 - RNA, 18 nt, Human
ccauugucuuuauaugaa

SEQ ID NO: 3651440 - RNA, 23 nt, Human
ccauugucuuuauaugaacauag

SEQ ID NO: 3651441 - RNA, 20 nt, Human
ccauugugccuaaguccagu

SEQ ID NO: 3651442 - RNA, 15 nt, Human
ccauuguuugaaaca

SEQ ID NO: 3651443 - RNA, 22 nt, Human
ccauuguuugaaacaaagaagg

SEQ ID NO: 3651444 - RNA, 15 nt, Human
ccauuuaaaaacagg

SEQ ID NO: 3651445 - RNA, 22 nt, Human
ccauuuaaagcuuauuaaaacu

SEQ ID NO: 3651446 - RNA, 17 nt, Human
ccauuuacauguuuuaa

SEQ ID NO: 3651447 - RNA, 20 nt, Human
ccauuuacauguuuuaaaga

SEQ ID NO: 3651448 - RNA, 18 nt, Human
ccauuuacgugucugaau

SEQ ID NO: 3651449 - RNA, 17 nt, Human
ccauuuacuuaagacuu

SEQ ID NO: 3651450 - RNA, 13 nt, Human
ccauuuagaaugg

SEQ ID NO: 3651451 - RNA, 22 nt, Human
ccauuuagaauggugauuuuaa

SEQ ID NO: 3651452 - RNA, 14 nt, Human
ccauuuagccacca

SEQ ID NO: 3651453 - RNA, 19 nt, Human
ccauuuaguucuuuguuau

SEQ ID NO: 3651454 - RNA, 18 nt, Human
ccauuuauacaaauuaga

SEQ ID NO: 3651455 - RNA, 18 nt, Human
ccauuuauauaugaaaac

SEQ ID NO: 3651456 - RNA, 22 nt, Human
ccauuucaguaaaccugucuga

SEQ ID NO: 3651457 - RNA, 19 nt, Human
ccauuucauauucuuucaa

SEQ ID NO: 3651458 - RNA, 22 nt, Human
ccauuucauuugugccagaaug

SEQ ID NO: 3651459 - RNA, 13 nt, Human
ccauuucccaucu

SEQ ID NO: 3651460 - RNA, 13 nt, Human
ccauuuccuuaug

SEQ ID NO: 3651461 - RNA, 13 nt, Human
ccauuucuaauua

SEQ ID NO: 3651462 - RNA, 14 nt, Human
ccauuucuaauuau

SEQ ID NO: 3651463 - RNA, 23 nt, Human
ccauuucuaauuauguagcucuu

SEQ ID NO: 3651464 - RNA, 13 nt, Human
ccauuucucacug

SEQ ID NO: 3651465 - RNA, 12 nt, Human
ccauuucucaug

SEQ ID NO: 3651466 - RNA, 15 nt, Human
ccauuucucuccuca

SEQ ID NO: 3651467 - RNA, 15 nt, Human
ccauuucucucucca

SEQ ID NO: 3651468 - RNA, 19 nt, Human
ccauuucugaggugcacug

SEQ ID NO: 3651469 - RNA, 13 nt, Human
ccccaaacaguga

SEQ ID NO: 3651470 - RNA, 14 nt, Human
ccccaaagagccug

SEQ ID NO: 3651471 - RNA, 15 nt, Human
ccccaaagagccugg

SEQ ID NO: 3651472 - RNA, 19 nt, Human
ccccaaagagccuggagaa

SEQ ID NO: 3651473 - RNA, 20 nt, Human
ccccaaagagccuggagaag

SEQ ID NO: 3651474 - RNA, 12 nt, Human
ccccaaagcccc

SEQ ID NO: 3651475 - RNA, 16 nt, Human
ccccaaagcuuuccug

SEQ ID NO: 3651476 - RNA, 18 nt, Human
ccccaaagcuuuccugcc

SEQ ID NO: 3651477 - RNA, 19 nt, Human
ccccaaaggaaaaagcaca

SEQ ID NO: 3651478 - RNA, 15 nt, Human
ccccaaaguaaaaga

SEQ ID NO: 3651479 - RNA, 18 nt, Human
ccccaaaguaaaagaaac

SEQ ID NO: 3651480 - RNA, 12 nt, Human
ccccaaauauag

SEQ ID NO: 3651481 - RNA, 16 nt, Human
ccccaacacugugccc

SEQ ID NO: 3651482 - RNA, 18 nt, Human
ccccaacacugugcccug

SEQ ID NO: 3651483 - RNA, 15 nt, Human
ccccaacagcgccca

SEQ ID NO: 3651484 - RNA, 13 nt, Human
ccccaacagcugg

SEQ ID NO: 3651485 - RNA, 21 nt, Human
ccccaacagcuggacccugac

SEQ ID NO: 3651486 - RNA, 22 nt, Human
ccccaacagcuggacccugacc

SEQ ID NO: 3651487 - RNA, 22 nt, Human
ccccaacaucucccucccacau

SEQ ID NO: 3651488 - RNA, 23 nt, Human
ccccaaccauuuccucagacucu

SEQ ID NO: 3651489 - RNA, 13 nt, Human
ccccaacccugcc

SEQ ID NO: 3651490 - RNA, 23 nt, Human
ccccaacccugccccugccccgu

SEQ ID NO: 3651491 - RNA, 13 nt, Human
ccccaacccuucu

SEQ ID NO: 3651492 - RNA, 21 nt, Human
ccccaaccucagggcucccag

SEQ ID NO: 3651493 - RNA, 15 nt, Human
ccccaaccugcucuc

SEQ ID NO: 3651494 - RNA, 14 nt, Human
ccccaaccugcuga

SEQ ID NO: 3651495 - RNA, 22 nt, Human
ccccaacuccuuccagcuagug

SEQ ID NO: 3651496 - RNA, 18 nt, Human
ccccaagaaggcuggggc

SEQ ID NO: 3651497 - RNA, 23 nt, Human
ccccaagacuugguguccuuucc

SEQ ID NO: 3651498 - RNA, 20 nt, Human
ccccaagaggaaguucagau

SEQ ID NO: 3651499 - RNA, 14 nt, Human
ccccaagccuggca

SEQ ID NO: 3651500 - RNA, 16 nt, Human
ccccaagcuguuuucu

SEQ ID NO: 3651501 - RNA, 17 nt, Human
ccccaagcuguuuucuu

SEQ ID NO: 3651502 - RNA, 15 nt, Human
ccccaaggagggaga

SEQ ID NO: 3651503 - RNA, 22 nt, Human
ccccaagggcaaaauucccagg

SEQ ID NO: 3651504 - RNA, 19 nt, Human
ccccaaguagucugcucac

SEQ ID NO: 3651505 - RNA, 20 nt, Human
ccccaaguagucugcucaca

SEQ ID NO: 3651506 - RNA, 22 nt, Human
ccccaauauccucgcucccggg

SEQ ID NO: 3651507 - RNA, 19 nt, Human
ccccaaugagacuugccuu

SEQ ID NO: 3651508 - RNA, 18 nt, Human
ccccacaagugcccucca

SEQ ID NO: 3651509 - RNA, 17 nt, Human
ccccacacagcuacagc

SEQ ID NO: 3651510 - RNA, 14 nt, Human
ccccacaccaggcc

SEQ ID NO: 3651511 - RNA, 17 nt, Human
ccccacacuucccuggc

SEQ ID NO: 3651512 - RNA, 11 nt, Human
ccccacagccc

SEQ ID NO: 3651513 - RNA, 12 nt, Human
ccccacagccca

SEQ ID NO: 3651514 - RNA, 13 nt, Human
ccccacagcccac

SEQ ID NO: 3651515 - RNA, 16 nt, Human
ccccacagcccacguc

SEQ ID NO: 3651516 - RNA, 21 nt, Human
ccccacagcccacguccuguc

SEQ ID NO: 3651517 - RNA, 18 nt, Human
ccccacagccccaucugc

SEQ ID NO: 3651518 - RNA, 22 nt, Human
ccccacagucuccggccucucc

SEQ ID NO: 3651519 - RNA, 14 nt, Human
ccccaccaccccag

SEQ ID NO: 3651520 - RNA, 23 nt, Human
ccccaccacgauguggcccuggc

SEQ ID NO: 3651521 - RNA, 17 nt, Human
ccccaccagugccucuc

SEQ ID NO: 3651522 - RNA, 22 nt, Human
ccccaccagugccucucccugc

SEQ ID NO: 3651523 - RNA, 16 nt, Human
ccccacccaagcuugg

SEQ ID NO: 3651524 - RNA, 18 nt, Human
ccccacccaagcuuggca

SEQ ID NO: 3651525 - RNA, 20 nt, Human
ccccacccaagcuuggcagc

SEQ ID NO: 3651526 - RNA, 14 nt, Human
ccccacccacuucu

SEQ ID NO: 3651527 - RNA, 16 nt, Human
ccccacccacuucugc

SEQ ID NO: 3651528 - RNA, 18 nt, Human
ccccacccaggccaggca

SEQ ID NO: 3651529 - RNA, 17 nt, Human
ccccaccccaaaauuag

SEQ ID NO: 3651530 - RNA, 14 nt, Human
ccccaccccacacu

SEQ ID NO: 3651531 - RNA, 16 nt, Human
ccccaccccacacuug

SEQ ID NO: 3651532 - RNA, 13 nt, Human
ccccaccccagcc

SEQ ID NO: 3651533 - RNA, 16 nt, Human
ccccaccccagggcag

SEQ ID NO: 3651534 - RNA, 20 nt, Human
ccccacccccagcucaaugg

SEQ ID NO: 3651535 - RNA, 23 nt, Human
ccccacccccuccccaggggaga

SEQ ID NO: 3651536 - RNA, 19 nt, Human
ccccaccccugggggcucu

SEQ ID NO: 3651537 - RNA, 15 nt, Human
ccccaccccuucccc

SEQ ID NO: 3651538 - RNA, 12 nt, Human
ccccacccucau

SEQ ID NO: 3651539 - RNA, 15 nt, Human
ccccacccuccacuc

SEQ ID NO: 3651540 - RNA, 17 nt, Human
ccccacccuccacucag

SEQ ID NO: 3651541 - RNA, 12 nt, Human
ccccacccuccu

SEQ ID NO: 3651542 - RNA, 22 nt, Human
ccccacccucguggacaccugc

SEQ ID NO: 3651543 - RNA, 14 nt, Human
ccccacccuggccu

SEQ ID NO: 3651544 - RNA, 20 nt, Human
ccccacccugggcccugggc

SEQ ID NO: 3651545 - RNA, 20 nt, Human
ccccacccuggugggccaac

SEQ ID NO: 3651546 - RNA, 14 nt, Human
ccccacccuguucc

SEQ ID NO: 3651547 - RNA, 21 nt, Human
ccccacccuguuccugcugcu

SEQ ID NO: 3651548 - RNA, 13 nt, Human
ccccacccuguuu

SEQ ID NO: 3651549 - RNA, 20 nt, Human
ccccacccuguuuggauuuu

SEQ ID NO: 3651550 - RNA, 17 nt, Human
ccccaccgguccagcug

SEQ ID NO: 3651551 - RNA, 22 nt, Human
ccccaccgguccagcuggccug

SEQ ID NO: 3651552 - RNA, 13 nt, Human
ccccaccuccugc

SEQ ID NO: 3651553 - RNA, 17 nt, Human
ccccaccucucccugac

SEQ ID NO: 3651554 - RNA, 12 nt, Human
ccccaccugcag

SEQ ID NO: 3651555 - RNA, 11 nt, Human
ccccaccuggg

SEQ ID NO: 3651556 - RNA, 15 nt, Human
ccccacgagggcugg

SEQ ID NO: 3651557 - RNA, 13 nt, Human
ccccacgccacag

SEQ ID NO: 3651558 - RNA, 14 nt, Human
ccccacgccacagc

SEQ ID NO: 3651559 - RNA, 16 nt, Human
ccccacgccacagccc

SEQ ID NO: 3651560 - RNA, 18 nt, Human
ccccacggccgcuccagg

SEQ ID NO: 3651561 - RNA, 22 nt, Human
ccccacggggccucgggaccuc

SEQ ID NO: 3651562 - RNA, 19 nt, Human
ccccacuacugcagcaccu

SEQ ID NO: 3651563 - RNA, 21 nt, Human
ccccacuacugcagcaccucc

SEQ ID NO: 3651564 - RNA, 13 nt, Human
cagcccacgcuga

SEQ ID NO: 3651565 - RNA, 17 nt, Human
cagcccacgucacgugu

SEQ ID NO: 3651566 - RNA, 18 nt, Human
cagcccacguccugucag

SEQ ID NO: 3651567 - RNA, 16 nt, Human
cagcccacugagaagu

SEQ ID NO: 3651568 - RNA, 19 nt, Human
cagcccagaagaaaauucu

SEQ ID NO: 3651569 - RNA, 17 nt, Human
cagcccagaagugcaga

SEQ ID NO: 3651570 - RNA, 22 nt, Human
cagcccagagacauacuugaag

SEQ ID NO: 3651571 - RNA, 13 nt, Human
cagcccagagacu

SEQ ID NO: 3651572 - RNA, 14 nt, Human
cagcccagagacuu

SEQ ID NO: 3651573 - RNA, 17 nt, Human
cagcccagagacuuugu

SEQ ID NO: 3651574 - RNA, 21 nt, Human
cagcccagagacuuuguagau

SEQ ID NO: 3651575 - RNA, 19 nt, Human
cagcccagauuccccugug

SEQ ID NO: 3651576 - RNA, 22 nt, Human
cagcccagauuccccuguguca

SEQ ID NO: 3651577 - RNA, 15 nt, Human
cagcccagccagcgu

SEQ ID NO: 3651578 - RNA, 19 nt, Human
cagcccagcugcucugccc

SEQ ID NO: 3651579 - RNA, 12 nt, Human
cagcccaggaag

SEQ ID NO: 3651580 - RNA, 23 nt, Human
cagcccaggaagucucaucuggg

SEQ ID NO: 3651581 - RNA, 20 nt, Human
cagcccaggauacuggcaca

SEQ ID NO: 3651582 - RNA, 17 nt, Human
cagcccaggccuccagc

SEQ ID NO: 3651583 - RNA, 17 nt, Human
cagcccaggguuccccc

SEQ ID NO: 3651584 - RNA, 19 nt, Human
cagcccaggguucccccag

SEQ ID NO: 3651585 - RNA, 17 nt, Human
cagcccaucuugccucc

SEQ ID NO: 3651586 - RNA, 15 nt, Human
cagcccaugcccacc

SEQ ID NO: 3651587 - RNA, 19 nt, Human
cagcccaugcccaccugcc

SEQ ID NO: 3651588 - RNA, 20 nt, Human
cagcccauucucucuccugu

SEQ ID NO: 3651589 - RNA, 22 nt, Human
cagcccauucucucuccugucc

SEQ ID NO: 3651590 - RNA, 18 nt, Human
cagcccauuucuccagaa

SEQ ID NO: 3651591 - RNA, 21 nt, Human
cagccccaaaacucuccucug

SEQ ID NO: 3651592 - RNA, 22 nt, Human
cagccccaaaacucuccucugc

SEQ ID NO: 3651593 - RNA, 22 nt, Human
cagccccaaauugucaccugcu

SEQ ID NO: 3651594 - RNA, 15 nt, Human
cagccccacaacuuu

SEQ ID NO: 3651595 - RNA, 14 nt, Human
cagccccacaccag

SEQ ID NO: 3651596 - RNA, 21 nt, Human
cagccccacaccagggccagc

SEQ ID NO: 3651597 - RNA, 12 nt, Human
cagccccacagc

SEQ ID NO: 3651598 - RNA, 16 nt, Human
cagccccacagcccac

SEQ ID NO: 3651599 - RNA, 18 nt, Human
cagccccacagcccacgu

SEQ ID NO: 3651600 - RNA, 20 nt, Human
cagccccacagcccacgucc

SEQ ID NO: 3651601 - RNA, 11 nt, Human
cagccccaccc

SEQ ID NO: 3651602 - RNA, 21 nt, Human
cagccccaccccagggcagcc

SEQ ID NO: 3651603 - RNA, 18 nt, Human
cagccccacccuggccua

SEQ ID NO: 3651604 - RNA, 18 nt, Human
cagccccacuccucugcu

SEQ ID NO: 3651605 - RNA, 18 nt, Human
cagccccacugccagcag

SEQ ID NO: 3651606 - RNA, 19 nt, Human
cagccccacugccagcagc

SEQ ID NO: 3651607 - RNA, 14 nt, Human
cagccccagcccag

SEQ ID NO: 3651608 - RNA, 16 nt, Human
cagccccagcccagcc

SEQ ID NO: 3651609 - RNA, 19 nt, Human
cagccccagccugcuagcu

SEQ ID NO: 3651610 - RNA, 13 nt, Human
cagccccagugcc

SEQ ID NO: 3651611 - RNA, 22 nt, Human
cagccccaucccaaacccuuca

SEQ ID NO: 3651612 - RNA, 13 nt, Human
cagccccauccuc

SEQ ID NO: 3651613 - RNA, 14 nt, Human
cagccccauccucu

SEQ ID NO: 3651614 - RNA, 22 nt, Human
cagccccauccucuguacagag

SEQ ID NO: 3651615 - RNA, 13 nt, Human
cagccccaucugu

SEQ ID NO: 3651616 - RNA, 13 nt, Human
cagccccauucug

SEQ ID NO: 3651617 - RNA, 19 nt, Human
cagccccauucugccugcc

SEQ ID NO: 3651618 - RNA, 22 nt, Human
cagcccccacauccugugccuc

SEQ ID NO: 3651619 - RNA, 19 nt, Human
cagcccccuaaaagcacuc

SEQ ID NO: 3651620 - RNA, 14 nt, Human
cagcccccuccugg

SEQ ID NO: 3651621 - RNA, 22 nt, Human
cagcccccuccuggugccaccu

SEQ ID NO: 3651622 - RNA, 12 nt, Human
cagcccccugac

SEQ ID NO: 3651623 - RNA, 20 nt, Human
cagcccccugaccacucaga

SEQ ID NO: 3651624 - RNA, 22 nt, Human
cagcccccugaccacucagaga

SEQ ID NO: 3651625 - RNA, 22 nt, Human
cagcccccuuugggcccaggga

SEQ ID NO: 3651626 - RNA, 15 nt, Human
cagccccgacuccag

SEQ ID NO: 3651627 - RNA, 19 nt, Human
cagccccgacuccagccag

SEQ ID NO: 3651628 - RNA, 16 nt, Human
cagccccgagcugucc

SEQ ID NO: 3651629 - RNA, 15 nt, Human
cagccccggcccugg

SEQ ID NO: 3651630 - RNA, 16 nt, Human
cagccccggcccuggg

SEQ ID NO: 3651631 - RNA, 19 nt, Human
cagccccggcccugggcuc

SEQ ID NO: 3651632 - RNA, 19 nt, Human
cagccccgguggcugggca

SEQ ID NO: 3651633 - RNA, 16 nt, Human
cagccccuacugcugu

SEQ ID NO: 3651634 - RNA, 24 nt, Human
cagccccuagaaacccaagcuccu

SEQ ID NO: 3651635 - RNA, 12 nt, Human
cagccccuagcc

SEQ ID NO: 3651636 - RNA, 15 nt, Human
cagccccuagcccag

SEQ ID NO: 3651637 - RNA, 12 nt, Human
cccccagcuggc

SEQ ID NO: 3651638 - RNA, 14 nt, Human
cccccagcuuccag

SEQ ID NO: 3651639 - RNA, 18 nt, Human
cccccagcuuugcccaac

SEQ ID NO: 3651640 - RNA, 13 nt, Human
cccccaggaagcc

SEQ ID NO: 3651641 - RNA, 21 nt, Human
cccccaggacaggcugcggcc

SEQ ID NO: 3651642 - RNA, 14 nt, Human
cccccaggaccaga

SEQ ID NO: 3651643 - RNA, 15 nt, Human
cccccaggaccagaa

SEQ ID NO: 3651644 - RNA, 11 nt, Human
cccccaggacu

SEQ ID NO: 3651645 - RNA, 15 nt, Human
cccccaggacugggc

SEQ ID NO: 3651646 - RNA, 16 nt, Human
cccccaggcugcugga

SEQ ID NO: 3651647 - RNA, 11 nt, Human
cccccaggucu

SEQ ID NO: 3651648 - RNA, 20 nt, Human
cccccaguccccaccccugc

SEQ ID NO: 3651649 - RNA, 22 nt, Human
cccccauccccauccuccagcu

SEQ ID NO: 3651650 - RNA, 13 nt, Human
cccccauccuggc

SEQ ID NO: 3651651 - RNA, 15 nt, Human
cccccauccuggccc

SEQ ID NO: 3651652 - RNA, 21 nt, Human
cccccaucuucgggaccagga

SEQ ID NO: 3651653 - RNA, 18 nt, Human
cccccaugcacugugaag

SEQ ID NO: 3651654 - RNA, 19 nt, Human
ccccccaagggaggcugcu

SEQ ID NO: 3651655 - RNA, 13 nt, Human
ccccccacuccca

SEQ ID NO: 3651656 - RNA, 12 nt, Human
ccccccacugca

SEQ ID NO: 3651657 - RNA, 18 nt, Human
ccccccagaaccuguccu

SEQ ID NO: 3651658 - RNA, 14 nt, Human
ccccccagauauca

SEQ ID NO: 3651659 - RNA, 12 nt, Human
ccccccagcacu

SEQ ID NO: 3651660 - RNA, 12 nt, Human
ccccccagcuuc

SEQ ID NO: 3651661 - RNA, 12 nt, Human
cccccccuucca

SEQ ID NO: 3651662 - RNA, 14 nt, Human
ccccccucaccagg

SEQ ID NO: 3651663 - RNA, 12 nt, Human
ccccccuggccu

SEQ ID NO: 3651664 - RNA, 13 nt, Human
ccccccuguacac

SEQ ID NO: 3651665 - RNA, 12 nt, Human
ccccccuuccac

SEQ ID NO: 3651666 - RNA, 15 nt, Human
cccccgcauccccug

SEQ ID NO: 3651667 - RNA, 18 nt, Human
cccccgcauccccugccu

SEQ ID NO: 3651668 - RNA, 18 nt, Human
cccccgcccaggcuggcc

SEQ ID NO: 3651669 - RNA, 12 nt, Human
cccccgcccccu

SEQ ID NO: 3651670 - RNA, 13 nt, Human
cccccgcccccug

SEQ ID NO: 3651671 - RNA, 16 nt, Human
cccccgcccccugccc

SEQ ID NO: 3651672 - RNA, 11 nt, Human
cccccgccccg

SEQ ID NO: 3651673 - RNA, 23 nt, Human
cccccgcuguaaugaaacaccuu

SEQ ID NO: 3651674 - RNA, 20 nt, Human
cccccgggaggggcccgcuu

SEQ ID NO: 3651675 - RNA, 17 nt, Human
cccccguggggcaggga

SEQ ID NO: 3651676 - RNA, 18 nt, Human
cccccucaggacccucgc

SEQ ID NO: 3651677 - RNA, 21 nt, Human
cccccucaucucauucaaacc

SEQ ID NO: 3651678 - RNA, 13 nt, Human
cccccucccaggg

SEQ ID NO: 3651679 - RNA, 19 nt, Human
cccccucccccagccacuc

SEQ ID NO: 3651680 - RNA, 14 nt, Human
cccccuccucuccc

SEQ ID NO: 3651681 - RNA, 22 nt, Human
cccccuccucucccaucccccu

SEQ ID NO: 3651682 - RNA, 13 nt, Human
cccccuccucucu

SEQ ID NO: 3651683 - RNA, 14 nt, Human
cccccuccugcugc

SEQ ID NO: 3651684 - RNA, 22 nt, Human
cccccucgggucuccucacucc

SEQ ID NO: 3651685 - RNA, 18 nt, Human
cccccucgugccagucgc

SEQ ID NO: 3651686 - RNA, 14 nt, Human
cccccucugcccug

SEQ ID NO: 3651687 - RNA, 13 nt, Human
cccccucugccgc

SEQ ID NO: 3651688 - RNA, 12 nt, Human
cccccucuggcu

SEQ ID NO: 3651689 - RNA, 19 nt, Human
cccccucuggcuccagcug

SEQ ID NO: 3651690 - RNA, 21 nt, Human
cccccucuggcuccagcuggc

SEQ ID NO: 3651691 - RNA, 17 nt, Human
cccccugaccacucaga

SEQ ID NO: 3651692 - RNA, 19 nt, Human
cccccugcaaagcccagcu

SEQ ID NO: 3651693 - RNA, 12 nt, Human
cccccugcagga

SEQ ID NO: 3651694 - RNA, 16 nt, Human
cccccugccccccagc

SEQ ID NO: 3651695 - RNA, 16 nt, Human
cccccugcccucgugg

SEQ ID NO: 3651696 - RNA, 14 nt, Human
cccccugcugccau

SEQ ID NO: 3651697 - RNA, 12 nt, Human
cccccugcuggc

SEQ ID NO: 3651698 - RNA, 13 nt, Human
cccccugcuucag

SEQ ID NO: 3651699 - RNA, 18 nt, Human
cccccugcuucagucccu

SEQ ID NO: 3651700 - RNA, 12 nt, Human
cccccuggagag

SEQ ID NO: 3651701 - RNA, 10 nt, Human
cccccugggc

SEQ ID NO: 3651702 - RNA, 11 nt, Human
cccccugggcu

SEQ ID NO: 3651703 - RNA, 15 nt, Human
cccccuggucucugg

SEQ ID NO: 3651704 - RNA, 19 nt, Human
cccccugguggacaguccu

SEQ ID NO: 3651705 - RNA, 12 nt, Human
cccccuguacac

SEQ ID NO: 3651706 - RNA, 14 nt, Human
cccccuucagugcc

SEQ ID NO: 3651707 - RNA, 15 nt, Human
cccccuucucugcuc

SEQ ID NO: 3651708 - RNA, 22 nt, Human
cccccuucucugcuccaccaca

SEQ ID NO: 3651709 - RNA, 14 nt, Human
cccccuucugggca

SEQ ID NO: 3651710 - RNA, 21 nt, Human
cccccuuuagaucucugaagc

SEQ ID NO: 3651711 - RNA, 13 nt, Human
cccagguccucac

SEQ ID NO: 3651712 - RNA, 21 nt, Human
cccaggucucccuggaucaga

SEQ ID NO: 3651713 - RNA, 20 nt, Human
cccaggugaguccuagagcu

SEQ ID NO: 3651714 - RNA, 16 nt, Human
cccaggugccagccug

SEQ ID NO: 3651715 - RNA, 19 nt, Human
cccagguggcugacccagu

SEQ ID NO: 3651716 - RNA, 12 nt, Human
cccaguaaaauu

SEQ ID NO: 3651717 - RNA, 19 nt, Human
cccaguacaccccaccucu

SEQ ID NO: 3651718 - RNA, 21 nt, Human
cccaguaccuagcuggcucug

SEQ ID NO: 3651719 - RNA, 20 nt, Human
cccaguaccuccugucucug

SEQ ID NO: 3651720 - RNA, 15 nt, Human
cccaguaucucuuca

SEQ ID NO: 3651721 - RNA, 16 nt, Human
cccaguaucucuucag

SEQ ID NO: 3651722 - RNA, 23 nt, Human
cccaguauucuagguagugcccu

SEQ ID NO: 3651723 - RNA, 14 nt, Human
cccagucagccucu

SEQ ID NO: 3651724 - RNA, 13 nt, Human
cccagucccagca

SEQ ID NO: 3651725 - RNA, 15 nt, Human
cccagucccagcagc

SEQ ID NO: 3651726 - RNA, 15 nt, Human
cccaguccccacccc

SEQ ID NO: 3651727 - RNA, 14 nt, Human
cccagucccccaac

SEQ ID NO: 3651728 - RNA, 20 nt, Human
cccagucccccaaccccagc

SEQ ID NO: 3651729 - RNA, 22 nt, Human
cccagucccccaaccccagccg

SEQ ID NO: 3651730 - RNA, 23 nt, Human
cccaguccccgugccccgccucc

SEQ ID NO: 3651731 - RNA, 13 nt, Human
cccagucccuggg

SEQ ID NO: 3651732 - RNA, 23 nt, Human
cccagucccugggggaagcccug

SEQ ID NO: 3651733 - RNA, 14 nt, Human
cccaguccuuccac

SEQ ID NO: 3651734 - RNA, 16 nt, Human
cccaguccuuccaccu

SEQ ID NO: 3651735 - RNA, 17 nt, Human
cccagucuacccagaga

SEQ ID NO: 3651736 - RNA, 19 nt, Human
cccagugaaaacuagagcu

SEQ ID NO: 3651737 - RNA, 19 nt, Human
cccagugagcacucccaag

SEQ ID NO: 3651738 - RNA, 15 nt, Human
cccagugcacccacu

SEQ ID NO: 3651739 - RNA, 14 nt, Human
cccagugcauggug

SEQ ID NO: 3651740 - RNA, 21 nt, Human
cccagugcaugguggccagag

SEQ ID NO: 3651741 - RNA, 13 nt, Human
cccagugcccaca

SEQ ID NO: 3651742 - RNA, 15 nt, Human
cccagugcccacagg

SEQ ID NO: 3651743 - RNA, 20 nt, Human
cccagugcccacaggaucag

SEQ ID NO: 3651744 - RNA, 20 nt, Human
cccagugcccccacugacca

SEQ ID NO: 3651745 - RNA, 22 nt, Human
cccagugcccccacugaccaga

SEQ ID NO: 3651746 - RNA, 13 nt, Human
cccaguggcaggg

SEQ ID NO: 3651747 - RNA, 22 nt, Human
cccaguggccacucagcuuccu

SEQ ID NO: 3651748 - RNA, 13 nt, Human
cccaguggccuca

SEQ ID NO: 3651749 - RNA, 18 nt, Human
cccaguggccucaacccu

SEQ ID NO: 3651750 - RNA, 19 nt, Human
cccaguggccucaacccuc

SEQ ID NO: 3651751 - RNA, 14 nt, Human
cccaguggcugcug

SEQ ID NO: 3651752 - RNA, 15 nt, Human
cccaguggcugcugc

SEQ ID NO: 3651753 - RNA, 18 nt, Human
cccaguggcuguucugga

SEQ ID NO: 3651754 - RNA, 16 nt, Human
cccagugggaggcgcg

SEQ ID NO: 3651755 - RNA, 14 nt, Human
cccagugggagggg

SEQ ID NO: 3651756 - RNA, 16 nt, Human
cccagugggaggggca

SEQ ID NO: 3651757 - RNA, 19 nt, Human
cccaguguaugucuuguau

SEQ ID NO: 3651758 - RNA, 18 nt, Human
cccagugucuuccugugg

SEQ ID NO: 3651759 - RNA, 12 nt, Human
cccaguguggcu

SEQ ID NO: 3651760 - RNA, 21 nt, Human
cccaguguuguuuguaaauaa

SEQ ID NO: 3651761 - RNA, 14 nt, Human
cccaguuaaucuug

SEQ ID NO: 3651762 - RNA, 22 nt, Human
cccaguucaacucauggagaug

SEQ ID NO: 3651763 - RNA, 16 nt, Human
cccaguuccuguggcu

SEQ ID NO: 3651764 - RNA, 18 nt, Human
cccaguuccuguggcucc

SEQ ID NO: 3651765 - RNA, 21 nt, Human
cccaguucgccuggagcccuc

SEQ ID NO: 3651766 - RNA, 23 nt, Human
cccaguucucuagggaaggccac

SEQ ID NO: 3651767 - RNA, 21 nt, Human
cccaguucugcuccucuccag

SEQ ID NO: 3651768 - RNA, 22 nt, Human
cccaguucugcuccucuccagg

SEQ ID NO: 3651769 - RNA, 16 nt, Human
cccaguuggagcucca

SEQ ID NO: 3651770 - RNA, 22 nt, Human
cccaguuggagcuccagccuga

SEQ ID NO: 3651771 - RNA, 20 nt, Human
cccaguuucuaaacuggaga

SEQ ID NO: 3651772 - RNA, 20 nt, Human
cccaguuucugccucugagg

SEQ ID NO: 3651773 - RNA, 21 nt, Human
cccaguuuuuugaacauggaa

SEQ ID NO: 3651774 - RNA, 22 nt, Human
cccauaauuuuuuuuuuccuuu

SEQ ID NO: 3651775 - RNA, 15 nt, Human
cccauacucagccug

SEQ ID NO: 3651776 - RNA, 22 nt, Human
cccauacucagccugcugccca

SEQ ID NO: 3651777 - RNA, 18 nt, Human
cccauacucugucucccu

SEQ ID NO: 3651778 - RNA, 21 nt, Human
cccauagaaacaugacacuga

SEQ ID NO: 3651779 - RNA, 23 nt, Human
cccauagaaacaugacacugacc

SEQ ID NO: 3651780 - RNA, 19 nt, Human
cccauaggcccacacacag

SEQ ID NO: 3651781 - RNA, 22 nt, Human
cccauaggcccacacacaggug

SEQ ID NO: 3651782 - RNA, 15 nt, Human
cccauagucccugcc

SEQ ID NO: 3651783 - RNA, 21 nt, Human
cccauaugcuaccaccagcug

SEQ ID NO: 3651784 - RNA, 18 nt, Human
cccauauuguaaaacagg

SEQ ID NO: 3651785 - RNA, 21 nt, Human
cccaucaccuacucacacagg

SEQ ID NO: 3651786 - RNA, 23 nt, Human
cccaucaccuacucacacaggca

SEQ ID NO: 3651787 - RNA, 20 nt, Human
cccaucacguguacuggcuc

SEQ ID NO: 3651788 - RNA, 13 nt, Human
cccaucacuggag

SEQ ID NO: 3651789 - RNA, 17 nt, Human
cccaucaggacucuugu

SEQ ID NO: 3651790 - RNA, 19 nt, Human
cccaucaggacucuuguga

SEQ ID NO: 3651791 - RNA, 20 nt, Human
cccaucaguguacccccgcc

SEQ ID NO: 3651792 - RNA, 22 nt, Human
cccaucaugcccggucccaccc

SEQ ID NO: 3651793 - RNA, 14 nt, Human
cccaucauguggcc

SEQ ID NO: 3651794 - RNA, 20 nt, Human
cccaucauucaugcuacugc

SEQ ID NO: 3651795 - RNA, 22 nt, Human
cccauccaccguccccucccag

SEQ ID NO: 3651796 - RNA, 14 nt, Human
cccauccaguucau

SEQ ID NO: 3651797 - RNA, 15 nt, Human
cccauccauuaggcc

SEQ ID NO: 3651798 - RNA, 15 nt, Human
cccaucccacacccu

SEQ ID NO: 3651799 - RNA, 12 nt, Human
cccaucccaucc

SEQ ID NO: 3651800 - RNA, 12 nt, Human
cccauccccccu

SEQ ID NO: 3651801 - RNA, 15 nt, Human
cccaucccccugccc

SEQ ID NO: 3651802 - RNA, 21 nt, Human
cccauccccuggacugggagg

SEQ ID NO: 3651803 - RNA, 14 nt, Human
cccaucccugccug

SEQ ID NO: 3651804 - RNA, 15 nt, Human
cccaucccugccugg

SEQ ID NO: 3651805 - RNA, 17 nt, Human
cccaucccugccugguc

SEQ ID NO: 3651806 - RNA, 13 nt, Human
cccaucccugucu

SEQ ID NO: 3651807 - RNA, 14 nt, Human
cccauccuacccuc

SEQ ID NO: 3651808 - RNA, 14 nt, Human
cccauccuccagca

SEQ ID NO: 3651809 - RNA, 15 nt, Human
cccauccuccagcag

SEQ ID NO: 3651810 - RNA, 16 nt, Human
cccauccuccagcagg

SEQ ID NO: 3651811 - RNA, 14 nt, Human
cccauccuccagcu

SEQ ID NO: 3651812 - RNA, 17 nt, Human
cccauccuccagcuucu

SEQ ID NO: 3651813 - RNA, 19 nt, Human
cccauccuccagcuucugg

SEQ ID NO: 3651814 - RNA, 15 nt, Human
cccauccucuguaca

SEQ ID NO: 3651815 - RNA, 19 nt, Human
cccauccucuguacagagc

SEQ ID NO: 3651816 - RNA, 13 nt, Human
cccauccuggccc

SEQ ID NO: 3651817 - RNA, 18 nt, Human
cccauccuggcccaucag

SEQ ID NO: 3651818 - RNA, 17 nt, Human
cccaucgccacaaacuc

SEQ ID NO: 3651819 - RNA, 21 nt, Human
cccaucgccagcugaugacuc

SEQ ID NO: 3651820 - RNA, 23 nt, Human
cccaucgccagcugaugacucaa

SEQ ID NO: 3651821 - RNA, 18 nt, Human
cccaucgugaagaagccu

SEQ ID NO: 3651822 - RNA, 18 nt, Human
cccaucuaagcugcagcu

SEQ ID NO: 3651823 - RNA, 21 nt, Human
cccaucuaagcugcagcuucc

SEQ ID NO: 3651824 - RNA, 22 nt, Human
cccaucuaagcugcagcuuccu

SEQ ID NO: 3651825 - RNA, 21 nt, Human
cccaucuaugucccuugcugu

SEQ ID NO: 3651826 - RNA, 11 nt, Human
cccaucucagg

SEQ ID NO: 3651827 - RNA, 21 nt, Human
cccaucucaugccccuggcug

SEQ ID NO: 3651828 - RNA, 23 nt, Human
cccaucucccacccuguaccuca

SEQ ID NO: 3651829 - RNA, 13 nt, Human
cccaucucccccu

SEQ ID NO: 3651830 - RNA, 14 nt, Human
cccaucucccugcc

SEQ ID NO: 3651831 - RNA, 15 nt, Human
cccaucucccugccu

SEQ ID NO: 3651832 - RNA, 15 nt, Human
cccaucucccugcuu

SEQ ID NO: 3651833 - RNA, 18 nt, Human
cccaucucggagcauccc

SEQ ID NO: 3651834 - RNA, 18 nt, Human
cccaucucuuccuaccca

SEQ ID NO: 3651835 - RNA, 14 nt, Human
cccaucucuucugg

SEQ ID NO: 3651836 - RNA, 16 nt, Human
cccaucugucggccua

SEQ ID NO: 3651837 - RNA, 14 nt, Human
cccaucugucuaaa

SEQ ID NO: 3651838 - RNA, 20 nt, Human
cccaucugugaaaggaaaga

SEQ ID NO: 3651839 - RNA, 17 nt, Human
cccaucuucgggaccag

SEQ ID NO: 3651840 - RNA, 21 nt, Human
cccaucuucgggaccaggauu

SEQ ID NO: 3651841 - RNA, 16 nt, Human
cccaugaagccacagc

SEQ ID NO: 3651842 - RNA, 12 nt, Human
cccaugaagccu

SEQ ID NO: 3651843 - RNA, 14 nt, Human
cccuccuggggcca

SEQ ID NO: 3651844 - RNA, 17 nt, Human
cccuccuggugccaccu

SEQ ID NO: 3651845 - RNA, 20 nt, Human
cccuccuggugucaccccag

SEQ ID NO: 3651846 - RNA, 23 nt, Human
cccuccuggugucaccccagagc

SEQ ID NO: 3651847 - RNA, 12 nt, Human
cccuccugucuu

SEQ ID NO: 3651848 - RNA, 14 nt, Human
cccuccugucuucc

SEQ ID NO: 3651849 - RNA, 15 nt, Human
cccuccugucuuccc

SEQ ID NO: 3651850 - RNA, 23 nt, Human
cccuccugugcugggggaaugag

SEQ ID NO: 3651851 - RNA, 13 nt, Human
cccuccuucccaa

SEQ ID NO: 3651852 - RNA, 11 nt, Human
cccuccuuccu

SEQ ID NO: 3651853 - RNA, 18 nt, Human
cccuccuuccuugaccag

SEQ ID NO: 3651854 - RNA, 18 nt, Human
cccuccuugccuccugug

SEQ ID NO: 3651855 - RNA, 18 nt, Human
cagcucucaucugaggca

SEQ ID NO: 3651856 - RNA, 15 nt, Human
cagcucucaugcugc

SEQ ID NO: 3651857 - RNA, 11 nt, Human
cagcucuccag

SEQ ID NO: 3651858 - RNA, 12 nt, Human
cagcucuccccu

SEQ ID NO: 3651859 - RNA, 20 nt, Human
ccccaccccugggggcucuc

SEQ ID NO: 3651860 - RNA, 18 nt, Human
ccccaccccuuccccacu

SEQ ID NO: 3651861 - RNA, 22 nt, Human
ccccaccccuuccccacugccu

SEQ ID NO: 3651862 - RNA, 13 nt, Human
ccccaccccuugc

SEQ ID NO: 3651863 - RNA, 18 nt, Human
ccccacccucccuggagu

SEQ ID NO: 3651864 - RNA, 15 nt, Human
ccccacccuccuggc

SEQ ID NO: 3651865 - RNA, 22 nt, Human
ccccacccuccuggccucagac

SEQ ID NO: 3651866 - RNA, 21 nt, Human
ccccacccucggggauguguc

SEQ ID NO: 3651867 - RNA, 21 nt, Human
ccccacccucguggacaccug

SEQ ID NO: 3651868 - RNA, 14 nt, Human
ccccacccugggcu

SEQ ID NO: 3651869 - RNA, 16 nt, Human
ccccacccugggcucu

SEQ ID NO: 3651870 - RNA, 20 nt, Human
ccccacccugggcucuggga

SEQ ID NO: 3651871 - RNA, 19 nt, Human
ccccacccuguuccugcug

SEQ ID NO: 3651872 - RNA, 19 nt, Human
ccccaccgcagacaggacc

SEQ ID NO: 3651873 - RNA, 22 nt, Human
ccccaccguugucucaugccag

SEQ ID NO: 3651874 - RNA, 12 nt, Human
ccccaccucucc

SEQ ID NO: 3651875 - RNA, 12 nt, Human
ccccaccugcca

SEQ ID NO: 3651876 - RNA, 14 nt, Human
ccccaccugccacu

SEQ ID NO: 3651877 - RNA, 22 nt, Human
ccccaccugccacuaggcuggg

SEQ ID NO: 3651878 - RNA, 11 nt, Human
ccccaccugcg

SEQ ID NO: 3651879 - RNA, 17 nt, Human
ccccaccugcgcuucac

SEQ ID NO: 3651880 - RNA, 14 nt, Human
ccccaccuggcuca

SEQ ID NO: 3651881 - RNA, 14 nt, Human
ccccacgagggcug

SEQ ID NO: 3651882 - RNA, 16 nt, Human
ccccacgagggcuggc

SEQ ID NO: 3651883 - RNA, 22 nt, Human
ccccacggccgcuccaggggug

SEQ ID NO: 3651884 - RNA, 21 nt, Human
ccccacggggccucgggaccu

SEQ ID NO: 3651885 - RNA, 21 nt, Human
ccccacucacagagacacagg

SEQ ID NO: 3651886 - RNA, 18 nt, Human
ccccacucaccagugucc

SEQ ID NO: 3651887 - RNA, 14 nt, Human
ccccacucccucac

SEQ ID NO: 3651888 - RNA, 23 nt, Human
ccccacucccuggcucucagaag

SEQ ID NO: 3651889 - RNA, 12 nt, Human
ccccacuccucu

SEQ ID NO: 3651890 - RNA, 12 nt, Human
ccccacucuccc

SEQ ID NO: 3651891 - RNA, 12 nt, Human
ccccacucugcu

SEQ ID NO: 3651892 - RNA, 13 nt, Human
ccccacucugcuc

SEQ ID NO: 3651893 - RNA, 19 nt, Human
ccccacucugcucugaugc

SEQ ID NO: 3651894 - RNA, 15 nt, Human
ccccacugaugcugu

SEQ ID NO: 3651895 - RNA, 16 nt, Human
ccccacugccuacugc

SEQ ID NO: 3651896 - RNA, 17 nt, Human
ccccacugccugcccac

SEQ ID NO: 3651897 - RNA, 20 nt, Human
ccccacuggacugaccuggu

SEQ ID NO: 3651898 - RNA, 13 nt, Human
ccccacuggagca

SEQ ID NO: 3651899 - RNA, 14 nt, Human
ccccacuggagcag

SEQ ID NO: 3651900 - RNA, 12 nt, Human
ccccacuggcug

SEQ ID NO: 3651901 - RNA, 20 nt, Human
ccccacuggcugugggcucc

SEQ ID NO: 3651902 - RNA, 12 nt, Human
ccccacugguga

SEQ ID NO: 3651903 - RNA, 21 nt, Human
ccccacuugccucuuccuuga

SEQ ID NO: 3651904 - RNA, 20 nt, Human
ccccagaaccuguccuugca

SEQ ID NO: 3651905 - RNA, 17 nt, Human
ccccagaacucugccug

SEQ ID NO: 3651906 - RNA, 16 nt, Human
ccccagaaggcaggga

SEQ ID NO: 3651907 - RNA, 18 nt, Human
ccccagacaccgccacau

SEQ ID NO: 3651908 - RNA, 13 nt, Human
ccccagacacugg

SEQ ID NO: 3651909 - RNA, 15 nt, Human
ccccagaccugagcu

SEQ ID NO: 3651910 - RNA, 19 nt, Human
ccccagaccugagcucccc

SEQ ID NO: 3651911 - RNA, 15 nt, Human
ccccagacuagaugu

SEQ ID NO: 3651912 - RNA, 20 nt, Human
ccccagacuccaccaagccu

SEQ ID NO: 3651913 - RNA, 21 nt, Human
ccccagacuccaccaagccug

SEQ ID NO: 3651914 - RNA, 14 nt, Human
ccccagagccacac

SEQ ID NO: 3651915 - RNA, 18 nt, Human
ccccagagccacacaugg

SEQ ID NO: 3651916 - RNA, 12 nt, Human
ccccagagcugu

SEQ ID NO: 3651917 - RNA, 21 nt, Human
ccccagagcuguuuauggccu

SEQ ID NO: 3651918 - RNA, 17 nt, Human
ccccagaggcuggguga

SEQ ID NO: 3651919 - RNA, 15 nt, Human
ccccagauaccagcc

SEQ ID NO: 3651920 - RNA, 18 nt, Human
ccccagauaccagccccu

SEQ ID NO: 3651921 - RNA, 11 nt, Human
ccccagauauc

SEQ ID NO: 3651922 - RNA, 20 nt, Human
ccccagauugcaacaggcug

SEQ ID NO: 3651923 - RNA, 22 nt, Human
ccccagauugcaacaggcuggg

SEQ ID NO: 3651924 - RNA, 23 nt, Human
ccccagauugcaacaggcugggc

SEQ ID NO: 3651925 - RNA, 17 nt, Human
ccccagcaagugagagc

SEQ ID NO: 3651926 - RNA, 22 nt, Human
ccccagcaagugguccuagagg

SEQ ID NO: 3651927 - RNA, 16 nt, Human
ccccagcacugaggaa

SEQ ID NO: 3651928 - RNA, 12 nt, Human
ccccagccacuc

SEQ ID NO: 3651929 - RNA, 16 nt, Human
ccccagccagccuggc

SEQ ID NO: 3651930 - RNA, 20 nt, Human
ccccagccaugccagcuggc

SEQ ID NO: 3651931 - RNA, 13 nt, Human
ccccagcccaagu

SEQ ID NO: 3651932 - RNA, 14 nt, Human
ccccagcccaaguc

SEQ ID NO: 3651933 - RNA, 19 nt, Human
ccccagcccacccuccugu

SEQ ID NO: 3651934 - RNA, 22 nt, Human
ccccagcccacccuccugucuu

SEQ ID NO: 3651935 - RNA, 11 nt, Human
ccccagcccag

SEQ ID NO: 3651936 - RNA, 12 nt, Human
ccccagcccaga

SEQ ID NO: 3651937 - RNA, 17 nt, Human
ccccagcccagcccagc

SEQ ID NO: 3651938 - RNA, 14 nt, Human
ccccagcccagggc

SEQ ID NO: 3651939 - RNA, 20 nt, Human
ccccagcccagggcuccugc

SEQ ID NO: 3651940 - RNA, 21 nt, Human
ccccagcccagggcuccugca

SEQ ID NO: 3651941 - RNA, 23 nt, Human
ccccagcccauccauuaggccag

SEQ ID NO: 3651942 - RNA, 12 nt, Human
ccccagccccaa

SEQ ID NO: 3651943 - RNA, 14 nt, Human
ccccagccccaaaa

SEQ ID NO: 3651944 - RNA, 17 nt, Human
ccccagccccgacucca

SEQ ID NO: 3651945 - RNA, 15 nt, Human
ccccagccccuagcc

SEQ ID NO: 3651946 - RNA, 18 nt, Human
ccccagccccuagcccag

SEQ ID NO: 3651947 - RNA, 20 nt, Human
ccccagccccuagcccagga

SEQ ID NO: 3651948 - RNA, 22 nt, Human
ccccagccccuagcccaggaga

SEQ ID NO: 3651949 - RNA, 20 nt, Human
ccccagccccucccccaucu

SEQ ID NO: 3651950 - RNA, 14 nt, Human
ccccagcccugcug

SEQ ID NO: 3651951 - RNA, 12 nt, Human
ccccagcccugu

SEQ ID NO: 3651952 - RNA, 14 nt, Human
ccccagcccugugg

SEQ ID NO: 3651953 - RNA, 15 nt, Human
ccccagcccugugga

SEQ ID NO: 3651954 - RNA, 18 nt, Human
ccccagcccuuccucugc

SEQ ID NO: 3651955 - RNA, 22 nt, Human
ccccagccuaugagcauccuga

SEQ ID NO: 3651956 - RNA, 22 nt, Human
ccccagccucaaauccaggacc

SEQ ID NO: 3651957 - RNA, 15 nt, Human
ccccagccucccuga

SEQ ID NO: 3651958 - RNA, 11 nt, Human
ccccagccugg

SEQ ID NO: 3651959 - RNA, 21 nt, Human
ccccagccuggccacgcagcc

SEQ ID NO: 3651960 - RNA, 15 nt, Human
ccccagccuggccca

SEQ ID NO: 3651961 - RNA, 16 nt, Human
ccccagccuggcccag

SEQ ID NO: 3651962 - RNA, 17 nt, Human
ccccagccuggcccagc

SEQ ID NO: 3651963 - RNA, 21 nt, Human
ccccagccugggcccaucucc

SEQ ID NO: 3651964 - RNA, 18 nt, Human
ccccagcgucccagucuc

SEQ ID NO: 3651965 - RNA, 23 nt, Human
ccccagcgucccagucucuggca

SEQ ID NO: 3651966 - RNA, 14 nt, Human
ccccagcucaaugg

SEQ ID NO: 3651967 - RNA, 10 nt, Human
ccccagcucc

SEQ ID NO: 3651968 - RNA, 10 nt, Human
ccccagcuga

SEQ ID NO: 3651969 - RNA, 13 nt, Human
ccccagcuggccc

SEQ ID NO: 3651970 - RNA, 21 nt, Human
ccccagcuggcccgugacaga

SEQ ID NO: 3651971 - RNA, 21 nt, Human
ccccagcugggaggcaagagg

SEQ ID NO: 3651972 - RNA, 22 nt, Human
ccccagcugucaucaauuaaag

SEQ ID NO: 3651973 - RNA, 23 nt, Human
ccccagcugucaucaauuaaagg

SEQ ID NO: 3651974 - RNA, 15 nt, Human
ccccagcugugagcc

SEQ ID NO: 3651975 - RNA, 16 nt, Human
ccccagcuuccagcag

SEQ ID NO: 3651976 - RNA, 21 nt, Human
ccccagcuucucagcucgcug

SEQ ID NO: 3651977 - RNA, 13 nt, Human
ccccagcuuugcc

SEQ ID NO: 3651978 - RNA, 20 nt, Human
ccccaggaauuugggacccu

SEQ ID NO: 3651979 - RNA, 18 nt, Human
ccccaggaccagaagcuc

SEQ ID NO: 3651980 - RNA, 20 nt, Human
ccccaggaccagaagcuccc

SEQ ID NO: 3651981 - RNA, 13 nt, Human
ccccaggaccagc

SEQ ID NO: 3651982 - RNA, 21 nt, Human
ccccaggaccagcucaggaca

SEQ ID NO: 3651983 - RNA, 15 nt, Human
ccccaggaccuggcu

SEQ ID NO: 3651984 - RNA, 12 nt, Human
ccccaggaggcc

SEQ ID NO: 3651985 - RNA, 15 nt, Human
ccccaggaggccagc

SEQ ID NO: 3651986 - RNA, 17 nt, Human
ccccaggaggccagccu

SEQ ID NO: 3651987 - RNA, 18 nt, Human
ccccaggagggaggcagg

SEQ ID NO: 3651988 - RNA, 19 nt, Human
ccccaggagggaggcaggg

SEQ ID NO: 3651989 - RNA, 18 nt, Human
ccccaggcaggcugugcg

SEQ ID NO: 3651990 - RNA, 23 nt, Human
ccccaggcaggcugugcgcugac

SEQ ID NO: 3651991 - RNA, 22 nt, Human
ccccaggcccacucagggguca

SEQ ID NO: 3651992 - RNA, 11 nt, Human
ccccaggcccc

SEQ ID NO: 3651993 - RNA, 12 nt, Human
ccccaggccccg

SEQ ID NO: 3651994 - RNA, 15 nt, Human
ccccaggccucugug

SEQ ID NO: 3651995 - RNA, 21 nt, Human
ccccaggccugaaagaggcug

SEQ ID NO: 3651996 - RNA, 18 nt, Human
ccccagggaagcagcagc

SEQ ID NO: 3651997 - RNA, 12 nt, Human
ccccagggagag

SEQ ID NO: 3651998 - RNA, 21 nt, Human
ccccagggcacuucacagagu

SEQ ID NO: 3651999 - RNA, 14 nt, Human
ccccagggccugag

SEQ ID NO: 3652000 - RNA, 16 nt, Human
ccccagggccugagcc

SEQ ID NO: 3652001 - RNA, 21 nt, Human
cccucaaggccucccacagug

SEQ ID NO: 3652002 - RNA, 23 nt, Human
cccucaagucuuucucuuucccu

SEQ ID NO: 3652003 - RNA, 10 nt, Human
cccucacacu

SEQ ID NO: 3652004 - RNA, 13 nt, Human
cccucacagccuc

SEQ ID NO: 3652005 - RNA, 16 nt, Human
cccucacagccucuga

SEQ ID NO: 3652006 - RNA, 18 nt, Human
cccucacagccucugacc

SEQ ID NO: 3652007 - RNA, 12 nt, Human
cccucaccaaca

SEQ ID NO: 3652008 - RNA, 17 nt, Human
cccucacccauccuaga

SEQ ID NO: 3652009 - RNA, 22 nt, Human
cccucacccugagccccuuccu

SEQ ID NO: 3652010 - RNA, 13 nt, Human
cccucacccugcc

SEQ ID NO: 3652011 - RNA, 15 nt, Human
cccucacccuggggc

SEQ ID NO: 3652012 - RNA, 21 nt, Human
cccucaccuguagcagccagu

SEQ ID NO: 3652013 - RNA, 13 nt, Human
cccucacucugcc

SEQ ID NO: 3652014 - RNA, 14 nt, Human
cccucacuggauga

SEQ ID NO: 3652015 - RNA, 21 nt, Human
cccucagaacccuuggcuugc

SEQ ID NO: 3652016 - RNA, 23 nt, Human
cccucagaacccuuggcuugccc

SEQ ID NO: 3652017 - RNA, 15 nt, Human
cccucagacuggggc

SEQ ID NO: 3652018 - RNA, 14 nt, Human
cccucagcaccccu

SEQ ID NO: 3652019 - RNA, 15 nt, Human
cccucagcaccccuu

SEQ ID NO: 3652020 - RNA, 17 nt, Human
cccucagcaccccuucc

SEQ ID NO: 3652021 - RNA, 19 nt, Human
cccucagccccaccccagg

SEQ ID NO: 3652022 - RNA, 12 nt, Human
cccucagccccu

SEQ ID NO: 3652023 - RNA, 14 nt, Human
cccucagccccucu

SEQ ID NO: 3652024 - RNA, 21 nt, Human
cccucagccccucuugccccc

SEQ ID NO: 3652025 - RNA, 23 nt, Human
cccucagccucuccccugccugc

SEQ ID NO: 3652026 - RNA, 12 nt, Human
cccucagcucca

SEQ ID NO: 3652027 - RNA, 15 nt, Human
cccucaggacccucg

SEQ ID NO: 3652028 - RNA, 17 nt, Human
cccucaggacccucgcu

SEQ ID NO: 3652029 - RNA, 18 nt, Human
cccucaggacccucgcug

SEQ ID NO: 3652030 - RNA, 20 nt, Human
cccucaggacccucgcuggc

SEQ ID NO: 3652031 - RNA, 18 nt, Human
cccucaggcauaggccug

SEQ ID NO: 3652032 - RNA, 10 nt, Human
cccucagggc

SEQ ID NO: 3652033 - RNA, 20 nt, Human
cccucagggcaaagccaggu

SEQ ID NO: 3652034 - RNA, 21 nt, Human
cccucagggucccugguggca

SEQ ID NO: 3652035 - RNA, 22 nt, Human
cccucaucaccaacgucugugc

SEQ ID NO: 3652036 - RNA, 17 nt, Human
cccucauccucauaccc

SEQ ID NO: 3652037 - RNA, 21 nt, Human
cccucaucgcguccuccuacc

SEQ ID NO: 3652038 - RNA, 14 nt, Human
cccucaucugucug

SEQ ID NO: 3652039 - RNA, 23 nt, Human
cccucaucuugaagggcccagga

SEQ ID NO: 3652040 - RNA, 14 nt, Human
cccucaugccaacc

SEQ ID NO: 3652041 - RNA, 21 nt, Human
cccucauggccccucugaccu

SEQ ID NO: 3652042 - RNA, 16 nt, Human
cccucauuucaggagc

SEQ ID NO: 3652043 - RNA, 17 nt, Human
cccuccaaaagcacuua

SEQ ID NO: 3652044 - RNA, 10 nt, Human
cccuccaagg

SEQ ID NO: 3652045 - RNA, 16 nt, Human
cccuccaauccugccc

SEQ ID NO: 3652046 - RNA, 15 nt, Human
cccuccacaccugcg

SEQ ID NO: 3652047 - RNA, 22 nt, Human
cccuccacccugucccccagcu

SEQ ID NO: 3652048 - RNA, 18 nt, Human
cccuccaccgcagaagga

SEQ ID NO: 3652049 - RNA, 15 nt, Human
cccuccaccucccug

SEQ ID NO: 3652050 - RNA, 15 nt, Human
cccuccaccuuccau

SEQ ID NO: 3652051 - RNA, 12 nt, Human
cccuccacuguc

SEQ ID NO: 3652052 - RNA, 18 nt, Human
cccuccagaaccaccccg

SEQ ID NO: 3652053 - RNA, 13 nt, Human
cccuccagagccc

SEQ ID NO: 3652054 - RNA, 18 nt, Human
cccuccagagccccacag

SEQ ID NO: 3652055 - RNA, 21 nt, Human
cccuccagagccccacagccc

SEQ ID NO: 3652056 - RNA, 15 nt, Human
cccuccagcucccug

SEQ ID NO: 3652057 - RNA, 15 nt, Human
cccuccagcuugugg

SEQ ID NO: 3652058 - RNA, 15 nt, Human
cccuccaucccgaca

SEQ ID NO: 3652059 - RNA, 12 nt, Human
cccuccaucccu

SEQ ID NO: 3652060 - RNA, 13 nt, Human
cccuccaucccug

SEQ ID NO: 3652061 - RNA, 17 nt, Human
cccuccaucccuggccc

SEQ ID NO: 3652062 - RNA, 15 nt, Human
cccucccaagcuggc

SEQ ID NO: 3652063 - RNA, 12 nt, Human
cccucccacaca

SEQ ID NO: 3652064 - RNA, 13 nt, Human
cccucccacacac

SEQ ID NO: 3652065 - RNA, 14 nt, Human
cccucccacagcgc

SEQ ID NO: 3652066 - RNA, 17 nt, Human
cccucccaccacagcag

SEQ ID NO: 3652067 - RNA, 12 nt, Human
cccucccaccca

SEQ ID NO: 3652068 - RNA, 12 nt, Human
caggagcucuuc

SEQ ID NO: 3652069 - RNA, 15 nt, Human
caggagcucuucagg

SEQ ID NO: 3652070 - RNA, 22 nt, Human
caggagcucuucaggccucccu

SEQ ID NO: 3652071 - RNA, 23 nt, Human
caggagcucuucaggccucccuc

SEQ ID NO: 3652072 - RNA, 14 nt, Human
caggagcugggauc

SEQ ID NO: 3652073 - RNA, 22 nt, Human
caggagcugucaccaaggaaac

SEQ ID NO: 3652074 - RNA, 17 nt, Human
caggagcuuuggaccua

SEQ ID NO: 3652075 - RNA, 13 nt, Human
caggaggaagggg

SEQ ID NO: 3652076 - RNA, 16 nt, Human
caggaggaauacugaa

SEQ ID NO: 3652077 - RNA, 13 nt, Human
caggaggacaauu

SEQ ID NO: 3652078 - RNA, 19 nt, Human
caggaggacaauucaugaa

SEQ ID NO: 3652079 - RNA, 22 nt, Human
caggaggacaauucaugaacuu

SEQ ID NO: 3652080 - RNA, 18 nt, Human
caggaggacccagggcuc

SEQ ID NO: 3652081 - RNA, 19 nt, Human
caggaggacccagggcucu

SEQ ID NO: 3652082 - RNA, 19 nt, Human
caggaggacugccccgugc

SEQ ID NO: 3652083 - RNA, 23 nt, Human
caggaggagacuagauuuaugaa

SEQ ID NO: 3652084 - RNA, 19 nt, Human
caggaggaggugccaacag

SEQ ID NO: 3652085 - RNA, 19 nt, Human
caggaggaucacuugaguc

SEQ ID NO: 3652086 - RNA, 20 nt, Human
caggaggcagagguugcagu

SEQ ID NO: 3652087 - RNA, 18 nt, Human
caggaggcaggcauggcc

SEQ ID NO: 3652088 - RNA, 23 nt, Human
caggaggcagggaggcagccgcc

SEQ ID NO: 3652089 - RNA, 18 nt, Human
caggaggccagccuugac

SEQ ID NO: 3652090 - RNA, 22 nt, Human
caggaggccagccuugaccauu

SEQ ID NO: 3652091 - RNA, 17 nt, Human
caggaggccccuggccc

SEQ ID NO: 3652092 - RNA, 18 nt, Human
caggaggccccuggccca

SEQ ID NO: 3652093 - RNA, 17 nt, Human
caggaggcgcccuuggc

SEQ ID NO: 3652094 - RNA, 18 nt, Human
caggaggcugaggcagga

SEQ ID NO: 3652095 - RNA, 21 nt, Human
caggaggcugaggcaggagga

SEQ ID NO: 3652096 - RNA, 15 nt, Human
caggaggcugagggg

SEQ ID NO: 3652097 - RNA, 14 nt, Human
caggaggcugaggu

SEQ ID NO: 3652098 - RNA, 15 nt, Human
caggaggcuggagga

SEQ ID NO: 3652099 - RNA, 22 nt, Human
caggaggcugggacgcucugcu

SEQ ID NO: 3652100 - RNA, 16 nt, Human
caggagggacaaagga

SEQ ID NO: 3652101 - RNA, 20 nt, Human
caggagggacaaaggagccu

SEQ ID NO: 3652102 - RNA, 12 nt, Human
caggagggacag

SEQ ID NO: 3652103 - RNA, 17 nt, Human
caggagggacagucuca

SEQ ID NO: 3652104 - RNA, 11 nt, Human
caggagggagg

SEQ ID NO: 3652105 - RNA, 12 nt, Human
caggagggaggu

SEQ ID NO: 3652106 - RNA, 23 nt, Human
caggagggagguuugugagagcg

SEQ ID NO: 3652107 - RNA, 16 nt, Human
caggaggggaaacauc

SEQ ID NO: 3652108 - RNA, 13 nt, Human
caggaggggagug

SEQ ID NO: 3652109 - RNA, 15 nt, Human
caggaggggggaggg

SEQ ID NO: 3652110 - RNA, 21 nt, Human
caggagggggucguggagagc

SEQ ID NO: 3652111 - RNA, 17 nt, Human
caggaggugccacugga

SEQ ID NO: 3652112 - RNA, 20 nt, Human
caggagguggaggcugcagu

SEQ ID NO: 3652113 - RNA, 20 nt, Human
caggagguggagguugcagu

SEQ ID NO: 3652114 - RNA, 18 nt, Human
caggaguagcugagcuca

SEQ ID NO: 3652115 - RNA, 14 nt, Human
caggaguccacuuu

SEQ ID NO: 3652116 - RNA, 18 nt, Human
caggaguccacuuuguuu

SEQ ID NO: 3652117 - RNA, 15 nt, Human
caggagucccaagga

SEQ ID NO: 3652118 - RNA, 19 nt, Human
caggagucccaaggaaagc

SEQ ID NO: 3652119 - RNA, 15 nt, Human
caggagucccuggua

SEQ ID NO: 3652120 - RNA, 22 nt, Human
caggagugggaaaacacugcca

SEQ ID NO: 3652121 - RNA, 17 nt, Human
caggaguggguggggag

SEQ ID NO: 3652122 - RNA, 20 nt, Human
caggaguggugcagacagaa

SEQ ID NO: 3652123 - RNA, 21 nt, Human
caggaguguccucuucccucu

SEQ ID NO: 3652124 - RNA, 19 nt, Human
caggaguuaaaaagggcag

SEQ ID NO: 3652125 - RNA, 16 nt, Human
caggaguuagaggcca

SEQ ID NO: 3652126 - RNA, 18 nt, Human
caggaguuagaggccagc

SEQ ID NO: 3652127 - RNA, 22 nt, Human
caggaguuagaggccagccugg

SEQ ID NO: 3652128 - RNA, 23 nt, Human
caggaguucaauaaaugucuguu

SEQ ID NO: 3652129 - RNA, 23 nt, Human
caggaguucgagaccagccuggg

SEQ ID NO: 3652130 - RNA, 14 nt, Human
caggaguucugcuc

SEQ ID NO: 3652131 - RNA, 16 nt, Human
caggaguucugcucau

SEQ ID NO: 3652132 - RNA, 22 nt, Human
caggaguuugagaccaaccugg

SEQ ID NO: 3652133 - RNA, 23 nt, Human
caggaguuugagaccaaccuggg

SEQ ID NO: 3652134 - RNA, 18 nt, Human
caggaguuugaggcugca

SEQ ID NO: 3652135 - RNA, 20 nt, Human
caggaguuugaggcugcagc

SEQ ID NO: 3652136 - RNA, 15 nt, Human
caggaguuuggccag

SEQ ID NO: 3652137 - RNA, 20 nt, Human
caggauacucugucagaugg

SEQ ID NO: 3652138 - RNA, 23 nt, Human
caggauacucugucagaugggaa

SEQ ID NO: 3652139 - RNA, 17 nt, Human
caggauacuggcacaga

SEQ ID NO: 3652140 - RNA, 19 nt, Human
caggauacuggcacagagg

SEQ ID NO: 3652141 - RNA, 16 nt, Human
caggauauauuuuauu

SEQ ID NO: 3652142 - RNA, 20 nt, Human
caggauauccuuaucagagc

SEQ ID NO: 3652143 - RNA, 18 nt, Human
caggaucaagcaugaaag

SEQ ID NO: 3652144 - RNA, 20 nt, Human
caggaucagauugcauguga

SEQ ID NO: 3652145 - RNA, 23 nt, Human
caggaucagauugcaugugacuc

SEQ ID NO: 3652146 - RNA, 21 nt, Human
ccgcagaccuccccagccccu

SEQ ID NO: 3652147 - RNA, 15 nt, Human
ccgcagaccucugga

SEQ ID NO: 3652148 - RNA, 13 nt, Human
ccgcagagcuggc

SEQ ID NO: 3652149 - RNA, 15 nt, Human
ccgcagagcuggccg

SEQ ID NO: 3652150 - RNA, 15 nt, Human
ccgcagcccccaccc

SEQ ID NO: 3652151 - RNA, 14 nt, Human
ccgcagcccugcag

SEQ ID NO: 3652152 - RNA, 18 nt, Human
ccgcagcccugcagaggg

SEQ ID NO: 3652153 - RNA, 14 nt, Human
ccgcagcccuggca

SEQ ID NO: 3652154 - RNA, 14 nt, Human
ccgcagccucccuc

SEQ ID NO: 3652155 - RNA, 13 nt, Human
ccgcaggaagcug

SEQ ID NO: 3652156 - RNA, 21 nt, Human
ccgcagucgucgcacagucuc

SEQ ID NO: 3652157 - RNA, 15 nt, Human
ccgcagugugcacua

SEQ ID NO: 3652158 - RNA, 11 nt, Human
ccgcaguguuu

SEQ ID NO: 3652159 - RNA, 19 nt, Human
ccgcaucagcugcucagau

SEQ ID NO: 3652160 - RNA, 14 nt, Human
ccgcauccccugcc

SEQ ID NO: 3652161 - RNA, 16 nt, Human
ccgcauccccugccuc

SEQ ID NO: 3652162 - RNA, 12 nt, Human
ccgcaucuucuc

SEQ ID NO: 3652163 - RNA, 20 nt, Human
ccgcaucuucuccaucuggc

SEQ ID NO: 3652164 - RNA, 20 nt, Human
ccgcaugcagcagcuugcug

SEQ ID NO: 3652165 - RNA, 19 nt, Human
ccgcaugcccccucgugcc

SEQ ID NO: 3652166 - RNA, 21 nt, Human
ccgcaugcccccucgugccag

SEQ ID NO: 3652167 - RNA, 17 nt, Human
ccgcaugcggcccagga

SEQ ID NO: 3652168 - RNA, 16 nt, Human
ccgcauuccaggcucc

SEQ ID NO: 3652169 - RNA, 14 nt, Human
ccgcauucccugag

SEQ ID NO: 3652170 - RNA, 21 nt, Human
ccgccaaaagcugcucaggga

SEQ ID NO: 3652171 - RNA, 23 nt, Human
ccgccaagguagccaucccauga

SEQ ID NO: 3652172 - RNA, 16 nt, Human
ccgccacacagaccac

SEQ ID NO: 3652173 - RNA, 23 nt, Human
ccgccacauggcuuccuccugcg

SEQ ID NO: 3652174 - RNA, 17 nt, Human
ccgccaccuaucucgug

SEQ ID NO: 3652175 - RNA, 12 nt, Human
ccgccagccucc

SEQ ID NO: 3652176 - RNA, 13 nt, Human
ccgccagcucugu

SEQ ID NO: 3652177 - RNA, 14 nt, Human
ccgccagcucuguu

SEQ ID NO: 3652178 - RNA, 15 nt, Human
ccgccagcucuguuc

SEQ ID NO: 3652179 - RNA, 12 nt, Human
ccgccaggcgag

SEQ ID NO: 3652180 - RNA, 20 nt, Human
ccgccagggagaccuggaca

SEQ ID NO: 3652181 - RNA, 16 nt, Human
ccgccaugcuccuggc

SEQ ID NO: 3652182 - RNA, 15 nt, Human
ccgccauggcuucca

SEQ ID NO: 3652183 - RNA, 14 nt, Human
ccgccauugccacc

SEQ ID NO: 3652184 - RNA, 12 nt, Human
ccgcccaaggcc

SEQ ID NO: 3652185 - RNA, 13 nt, Human
ccgcccacugucc

SEQ ID NO: 3652186 - RNA, 18 nt, Human
ccgcccacuguccugggc

SEQ ID NO: 3652187 - RNA, 22 nt, Human
ccgcccagagacccaagcugcc

SEQ ID NO: 3652188 - RNA, 14 nt, Human
ccgcccaggcuggc

SEQ ID NO: 3652189 - RNA, 17 nt, Human
ccgcccaggcuggccag

SEQ ID NO: 3652190 - RNA, 13 nt, Human
ccgcccaugcacu

SEQ ID NO: 3652191 - RNA, 14 nt, Human
ccgcccaugcacug

SEQ ID NO: 3652192 - RNA, 13 nt, Human
ccgcccccagucc

SEQ ID NO: 3652193 - RNA, 16 nt, Human
ccgcccccugcccucc

SEQ ID NO: 3652194 - RNA, 14 nt, Human
ccgccccgccccac

SEQ ID NO: 3652195 - RNA, 15 nt, Human
ccgccccugagccca

SEQ ID NO: 3652196 - RNA, 16 nt, Human
ccgccccugagcccac

SEQ ID NO: 3652197 - RNA, 16 nt, Human
ccgccccugcagcacg

SEQ ID NO: 3652198 - RNA, 14 nt, Human
ccgcccgggcccag

SEQ ID NO: 3652199 - RNA, 13 nt, Human
ccgcccugccacu

SEQ ID NO: 3652200 - RNA, 14 nt, Human
ccgcccugccacuc

SEQ ID NO: 3652201 - RNA, 15 nt, Human
ccgcccugccacuca

SEQ ID NO: 3652202 - RNA, 21 nt, Human
ccgcccugcuccucccuggcu

SEQ ID NO: 3652203 - RNA, 15 nt, Human
ccgccgacuuuguac

SEQ ID NO: 3652204 - RNA, 20 nt, Human
ccgccgacuuuguacccccc

SEQ ID NO: 3652205 - RNA, 18 nt, Human
ccgccggccagcugggau

SEQ ID NO: 3652206 - RNA, 15 nt, Human
ccgccuagcugcugu

SEQ ID NO: 3652207 - RNA, 23 nt, Human
ccgccuccccacggccgcuccag

SEQ ID NO: 3652208 - RNA, 21 nt, Human
ccgccucccuccccugcccuc

SEQ ID NO: 3652209 - RNA, 14 nt, Human
ccgccucgcccacc

SEQ ID NO: 3652210 - RNA, 11 nt, Human
ccgccucugcu

SEQ ID NO: 3652211 - RNA, 12 nt, Human
ccgccucuuccc

SEQ ID NO: 3652212 - RNA, 15 nt, Human
ccgccugccaguccu

SEQ ID NO: 3652213 - RNA, 13 nt, Human
ccgccugcccacc

SEQ ID NO: 3652214 - RNA, 16 nt, Human
ccgccugcccaccugc

SEQ ID NO: 3652215 - RNA, 17 nt, Human
ccgccugcccaccugcc

SEQ ID NO: 3652216 - RNA, 22 nt, Human
ccgccugcccaccugccuggcc

SEQ ID NO: 3652217 - RNA, 22 nt, Human
ccgccuggaugcggauggccgg

SEQ ID NO: 3652218 - RNA, 12 nt, Human
ccgccuggcaga

SEQ ID NO: 3652219 - RNA, 13 nt, Human
ccgccuggccagg

SEQ ID NO: 3652220 - RNA, 22 nt, Human
ccgccugguacucaagcccgcg

SEQ ID NO: 3652221 - RNA, 15 nt, Human
ccgccuguggacagc

SEQ ID NO: 3652222 - RNA, 17 nt, Human
ccgccuguucccccgcc

SEQ ID NO: 3652223 - RNA, 22 nt, Human
ccgccuuccuugaccuuccucu

SEQ ID NO: 3652224 - RNA, 15 nt, Human
ccgccuugcccagcc

SEQ ID NO: 3652225 - RNA, 18 nt, Human
ccgcgaccauguggccac

SEQ ID NO: 3652226 - RNA, 16 nt, Human
ccgcgcccgcgcccuc

SEQ ID NO: 3652227 - RNA, 16 nt, Human
ccgcgccuccuuccuu

SEQ ID NO: 3652228 - RNA, 14 nt, Human
ccgcgcguccagcu

SEQ ID NO: 3652229 - RNA, 15 nt, Human
ccgcggcgggcccug

SEQ ID NO: 3652230 - RNA, 17 nt, Human
ccgcgucuggugacaac

SEQ ID NO: 3652231 - RNA, 22 nt, Human
ccgcgugaucaaagccacacuc

SEQ ID NO: 3652232 - RNA, 13 nt, Human
ccgcguuguaaaa

SEQ ID NO: 3652233 - RNA, 23 nt, Human
ccgcuaagagggagggagggcuc

SEQ ID NO: 3652234 - RNA, 15 nt, Human
caggcacugcuaggc

SEQ ID NO: 3652235 - RNA, 23 nt, Human
caggcacugcugcccagccucca

SEQ ID NO: 3652236 - RNA, 14 nt, Human
caggcagaaagagu

SEQ ID NO: 3652237 - RNA, 19 nt, Human
caggcagacacggaucuga

SEQ ID NO: 3652238 - RNA, 22 nt, Human
caggcagacacggaucugagaa

SEQ ID NO: 3652239 - RNA, 15 nt, Human
caggcagagaaucau

SEQ ID NO: 3652240 - RNA, 22 nt, Human
caggcagaggcccaggcugccg

SEQ ID NO: 3652241 - RNA, 18 nt, Human
caggcagauccaggacua

SEQ ID NO: 3652242 - RNA, 15 nt, Human
caggcagaucugugc

SEQ ID NO: 3652243 - RNA, 16 nt, Human
caggcagaucugugcc

SEQ ID NO: 3652244 - RNA, 17 nt, Human
caggcagaucugugccc

SEQ ID NO: 3652245 - RNA, 18 nt, Human
caggcagaucugugcccc

SEQ ID NO: 3652246 - RNA, 15 nt, Human
caggcagcagacaca

SEQ ID NO: 3652247 - RNA, 13 nt, Human
caggcagccagca

SEQ ID NO: 3652248 - RNA, 14 nt, Human
caggcagccagcau

SEQ ID NO: 3652249 - RNA, 18 nt, Human
caggcagccagcaucugg

SEQ ID NO: 3652250 - RNA, 19 nt, Human
caggcagccagugcccuga

SEQ ID NO: 3652251 - RNA, 12 nt, Human
caggcagcccua

SEQ ID NO: 3652252 - RNA, 19 nt, Human
caggcagccucuggggggu

SEQ ID NO: 3652253 - RNA, 15 nt, Human
caggcagcuggauga

SEQ ID NO: 3652254 - RNA, 19 nt, Human
caggcagcuuuuucucucc

SEQ ID NO: 3652255 - RNA, 19 nt, Human
caggcaggaagggcaggaa

SEQ ID NO: 3652256 - RNA, 14 nt, Human
caggcagggcagga

SEQ ID NO: 3652257 - RNA, 17 nt, Human
caggcagggcaggacca

SEQ ID NO: 3652258 - RNA, 20 nt, Human
caggcagggccaacccuucu

SEQ ID NO: 3652259 - RNA, 22 nt, Human
caggcagggccaacccuucucc

SEQ ID NO: 3652260 - RNA, 15 nt, Human
caggcagggcucucc

SEQ ID NO: 3652261 - RNA, 17 nt, Human
caggcagggcucuccug

SEQ ID NO: 3652262 - RNA, 19 nt, Human
caggcagggcucuccuggc

SEQ ID NO: 3652263 - RNA, 21 nt, Human
caggcagggcucuccuggcuu

SEQ ID NO: 3652264 - RNA, 23 nt, Human
caggcagggcucuccuggcuucc

SEQ ID NO: 3652265 - RNA, 22 nt, Human
caggcaggggcccugcagcucu

SEQ ID NO: 3652266 - RNA, 15 nt, Human
caggcaggggccucc

SEQ ID NO: 3652267 - RNA, 17 nt, Human
caggcaggggugggggu

SEQ ID NO: 3652268 - RNA, 23 nt, Human
caggcagggguggggguggaggc

SEQ ID NO: 3652269 - RNA, 15 nt, Human
caggcagggugcagu

SEQ ID NO: 3652270 - RNA, 13 nt, Human
caggcagguccag

SEQ ID NO: 3652271 - RNA, 20 nt, Human
caggcaggucugaagcucaa

SEQ ID NO: 3652272 - RNA, 22 nt, Human
caggcaggucuugaacuccugg

SEQ ID NO: 3652273 - RNA, 15 nt, Human
caggcaggugggaug

SEQ ID NO: 3652274 - RNA, 22 nt, Human
caggcagucgggggcuggccua

SEQ ID NO: 3652275 - RNA, 23 nt, Human
caggcagucgggggcuggccuag

SEQ ID NO: 3652276 - RNA, 13 nt, Human
caggcagucucuc

SEQ ID NO: 3652277 - RNA, 14 nt, Human
caggcaucacagcu

SEQ ID NO: 3652278 - RNA, 12 nt, Human
caggcaugaagu

SEQ ID NO: 3652279 - RNA, 15 nt, Human
caggcaugccugugu

SEQ ID NO: 3652280 - RNA, 16 nt, Human
caggcaugccugugug

SEQ ID NO: 3652281 - RNA, 14 nt, Human
caggcauggcccug

SEQ ID NO: 3652282 - RNA, 17 nt, Human
caggcauggcccugggc

SEQ ID NO: 3652283 - RNA, 16 nt, Human
caggcauuccccagga

SEQ ID NO: 3652284 - RNA, 18 nt, Human
caggcauuccccaggagg

SEQ ID NO: 3652285 - RNA, 19 nt, Human
caggcauuccccaggaggc

SEQ ID NO: 3652286 - RNA, 23 nt, Human
caggcauuccccaggaggccagc

SEQ ID NO: 3652287 - RNA, 15 nt, Human
caggcauugaggaag

SEQ ID NO: 3652288 - RNA, 20 nt, Human
caggcauugaggaagagucu

SEQ ID NO: 3652289 - RNA, 14 nt, Human
caggcauuuccugg

SEQ ID NO: 3652290 - RNA, 15 nt, Human
caggcauuuccuggg

SEQ ID NO: 3652291 - RNA, 16 nt, Human
caggcauuuucccccu

SEQ ID NO: 3652292 - RNA, 21 nt, Human
cagggccggucgggggggacc

SEQ ID NO: 3652293 - RNA, 12 nt, Human
cagggccucugc

SEQ ID NO: 3652294 - RNA, 14 nt, Human
cagggccucugcgg

SEQ ID NO: 3652295 - RNA, 15 nt, Human
cagggccucugcgga

SEQ ID NO: 3652296 - RNA, 17 nt, Human
cagggccugagccuggc

SEQ ID NO: 3652297 - RNA, 22 nt, Human
cagggccugcaggaccugccug

SEQ ID NO: 3652298 - RNA, 12 nt, Human
cagggccuggaa

SEQ ID NO: 3652299 - RNA, 17 nt, Human
cagggccuggaagacag

SEQ ID NO: 3652300 - RNA, 12 nt, Human
cagggccuggcc

SEQ ID NO: 3652301 - RNA, 14 nt, Human
cagggccuggccca

SEQ ID NO: 3652302 - RNA, 17 nt, Human
cagggccuggcccaugu

SEQ ID NO: 3652303 - RNA, 14 nt, Human
cagggccuggcuca

SEQ ID NO: 3652304 - RNA, 22 nt, Human
cagggccuggggagauggagga

SEQ ID NO: 3652305 - RNA, 13 nt, Human
cagggccuggggc

SEQ ID NO: 3652306 - RNA, 17 nt, Human
cagggccuggggccuga

SEQ ID NO: 3652307 - RNA, 21 nt, Human
cagggccuggggccugagaga

SEQ ID NO: 3652308 - RNA, 12 nt, Human
cagggccugguu

SEQ ID NO: 3652309 - RNA, 19 nt, Human
cagggccugguugaagaag

SEQ ID NO: 3652310 - RNA, 20 nt, Human
cagggccuugcccagagaug

SEQ ID NO: 3652311 - RNA, 15 nt, Human
cagggccuugcuaau

SEQ ID NO: 3652312 - RNA, 13 nt, Human
cagggcgagacuc

SEQ ID NO: 3652313 - RNA, 15 nt, Human
cagggcggggguggc

SEQ ID NO: 3652314 - RNA, 14 nt, Human
cagggcuacccuga

SEQ ID NO: 3652315 - RNA, 19 nt, Human
cagggcuacccugagcuga

SEQ ID NO: 3652316 - RNA, 23 nt, Human
cagggcuacccugagcugaggca

SEQ ID NO: 3652317 - RNA, 14 nt, Human
cagggcuagugacu

SEQ ID NO: 3652318 - RNA, 15 nt, Human
cagggcuagugacuu

SEQ ID NO: 3652319 - RNA, 19 nt, Human
cagggcucacgugggaacc

SEQ ID NO: 3652320 - RNA, 12 nt, Human
cagggcucagcc

SEQ ID NO: 3652321 - RNA, 13 nt, Human
cagggcucagccu

SEQ ID NO: 3652322 - RNA, 12 nt, Human
cagggcucagcg

SEQ ID NO: 3652323 - RNA, 15 nt, Human
cagggcucagcgggg

SEQ ID NO: 3652324 - RNA, 12 nt, Human
cagggcucagga

SEQ ID NO: 3652325 - RNA, 19 nt, Human
cagggcucccacagagaca

SEQ ID NO: 3652326 - RNA, 12 nt, Human
cagggcucccag

SEQ ID NO: 3652327 - RNA, 14 nt, Human
cagggcuccuccca

SEQ ID NO: 3652328 - RNA, 13 nt, Human
cagggcuccugcc

SEQ ID NO: 3652329 - RNA, 12 nt, Human
cagggcuccugg

SEQ ID NO: 3652330 - RNA, 14 nt, Human
cagggcuccuugug

SEQ ID NO: 3652331 - RNA, 16 nt, Human
cagggcucuccuggcu

SEQ ID NO: 3652332 - RNA, 21 nt, Human
cagggcucucuuuccuucuug

SEQ ID NO: 3652333 - RNA, 13 nt, Human
cagggcucugccc

SEQ ID NO: 3652334 - RNA, 15 nt, Human
cagggcucugcccca

SEQ ID NO: 3652335 - RNA, 16 nt, Human
cagggcucugccccag

SEQ ID NO: 3652336 - RNA, 17 nt, Human
cagggcugcccugagaa

SEQ ID NO: 3652337 - RNA, 15 nt, Human
cagggcuggacugag

SEQ ID NO: 3652338 - RNA, 18 nt, Human
cagggcuggacugaggcc

SEQ ID NO: 3652339 - RNA, 19 nt, Human
cagggcuggacugaggccu

SEQ ID NO: 3652340 - RNA, 12 nt, Human
cagggcuggaga

SEQ ID NO: 3652341 - RNA, 12 nt, Human
cagggcuggccc

SEQ ID NO: 3652342 - RNA, 13 nt, Human
cagggcuggccca

SEQ ID NO: 3652343 - RNA, 14 nt, Human
cagggcuggcccag

SEQ ID NO: 3652344 - RNA, 15 nt, Human
cagggcuggcccagc

SEQ ID NO: 3652345 - RNA, 20 nt, Human
cagggcuggcccagcccugc

SEQ ID NO: 3652346 - RNA, 23 nt, Human
cagggcuggcccagcccugcugg

SEQ ID NO: 3652347 - RNA, 15 nt, Human
cagggcuggggcagc

SEQ ID NO: 3652348 - RNA, 19 nt, Human
cagggcuggggcagccucu

SEQ ID NO: 3652349 - RNA, 19 nt, Human
cagggcuguaacugccagg

SEQ ID NO: 3652350 - RNA, 21 nt, Human
cagggcuguaacugccaggcu

SEQ ID NO: 3652351 - RNA, 15 nt, Human
cagggcugucaucug

SEQ ID NO: 3652352 - RNA, 13 nt, Human
cagggcuuuaaaa

SEQ ID NO: 3652353 - RNA, 15 nt, Human
cagggcuuuaaaauu

SEQ ID NO: 3652354 - RNA, 18 nt, Human
caggggaaaacuguuacc

SEQ ID NO: 3652355 - RNA, 21 nt, Human
caggggaacacuggggacuug

SEQ ID NO: 3652356 - RNA, 15 nt, Human
caggggaaccugcca

SEQ ID NO: 3652357 - RNA, 16 nt, Human
caggggaauauuuuau

SEQ ID NO: 3652358 - RNA, 18 nt, Human
caggggacacccagaaac

SEQ ID NO: 3652359 - RNA, 16 nt, Human
caggggacaggagucc

SEQ ID NO: 3652360 - RNA, 22 nt, Human
caggggacaggaguccacuuug

SEQ ID NO: 3652361 - RNA, 15 nt, Human
caggggaccacaccu

SEQ ID NO: 3652362 - RNA, 17 nt, Human
caggggacucagcccug

SEQ ID NO: 3652363 - RNA, 17 nt, Human
caggggagagggucugg

SEQ ID NO: 3652364 - RNA, 21 nt, Human
caggggagagggucuggagaa

SEQ ID NO: 3652365 - RNA, 21 nt, Human
caggggagcagaggggcagag

SEQ ID NO: 3652366 - RNA, 21 nt, Human
caggggagcccuccacgccgg

SEQ ID NO: 3652367 - RNA, 14 nt, Human
caggggaggccauc

SEQ ID NO: 3652368 - RNA, 17 nt, Human
caggggaggccaucugg

SEQ ID NO: 3652369 - RNA, 19 nt, Human
caggggaggcggcacucca

SEQ ID NO: 3652370 - RNA, 13 nt, Human
caggggaggggug

SEQ ID NO: 3652371 - RNA, 14 nt, Human
caggggaggguaga

SEQ ID NO: 3652372 - RNA, 20 nt, Human
caggggauuucaccacucaa

SEQ ID NO: 3652373 - RNA, 17 nt, Human
caggggcaaacaccugc

SEQ ID NO: 3652374 - RNA, 14 nt, Human
caggggcaggagga

SEQ ID NO: 3652375 - RNA, 14 nt, Human
caggggccagagga

SEQ ID NO: 3652376 - RNA, 21 nt, Human
caggggcccaaggcggccccu

SEQ ID NO: 3652377 - RNA, 11 nt, Human
caggggccccg

SEQ ID NO: 3652378 - RNA, 16 nt, Human
caggggccccuccagc

SEQ ID NO: 3652379 - RNA, 22 nt, Human
caggggcccgcgauguggaacu

SEQ ID NO: 3652380 - RNA, 15 nt, Human
caggggcccugcagc

SEQ ID NO: 3652381 - RNA, 17 nt, Human
caggggcccugcagcuc

SEQ ID NO: 3652382 - RNA, 19 nt, Human
caggggcccugcagcucuc

SEQ ID NO: 3652383 - RNA, 18 nt, Human
caggggcccuggagcagc

SEQ ID NO: 3652384 - RNA, 22 nt, Human
caggggccggccaguggccuuc

SEQ ID NO: 3652385 - RNA, 13 nt, Human
caggggccuggag

SEQ ID NO: 3652386 - RNA, 14 nt, Human
caggggccuggaga

SEQ ID NO: 3652387 - RNA, 15 nt, Human
caggggccuggagau

SEQ ID NO: 3652388 - RNA, 22 nt, Human
caggggccuggagauccuccug

SEQ ID NO: 3652389 - RNA, 22 nt, Human
caggggcgugaggucccaggaa

SEQ ID NO: 3652390 - RNA, 19 nt, Human
caggggcuacaagagggaa

SEQ ID NO: 3652391 - RNA, 18 nt, Human
caggggcucuggagagaa

SEQ ID NO: 3652392 - RNA, 19 nt, Human
caggggcucuggagagaaa

SEQ ID NO: 3652393 - RNA, 19 nt, Human
caggggcugacacuucaag

SEQ ID NO: 3652394 - RNA, 19 nt, Human
caggggcugcccgcuccca

SEQ ID NO: 3652395 - RNA, 15 nt, Human
caggggcuggcuuca

SEQ ID NO: 3652396 - RNA, 19 nt, Human
caggggcuggcuucaggag

SEQ ID NO: 3652397 - RNA, 18 nt, Human
caggggcugucccggagg

SEQ ID NO: 3652398 - RNA, 16 nt, Human
caggggcuuccuggug

SEQ ID NO: 3652399 - RNA, 20 nt, Human
caggggcuuccuggugcugg

SEQ ID NO: 3652400 - RNA, 16 nt, Human
cagggggagaaugggu

SEQ ID NO: 3652401 - RNA, 18 nt, Human
cagggggagcugggccug

SEQ ID NO: 3652402 - RNA, 17 nt, Human
cagggggcaugaccaga

SEQ ID NO: 3652403 - RNA, 16 nt, Human
cagggggccaggugca

SEQ ID NO: 3652404 - RNA, 22 nt, Human
cagggggccagucccugaggca

SEQ ID NO: 3652405 - RNA, 21 nt, Human
cagggggcccaccagagcugu

SEQ ID NO: 3652406 - RNA, 14 nt, Human
cagggggcugcugc

SEQ ID NO: 3652407 - RNA, 20 nt, Human
cagggggcugcugcugggcu

SEQ ID NO: 3652408 - RNA, 21 nt, Human
cagggggcugcugcugggcuc

SEQ ID NO: 3652409 - RNA, 23 nt, Human
cagggggcugcugcugggcucag

SEQ ID NO: 3652410 - RNA, 13 nt, Human
cagggggcuuccu

SEQ ID NO: 3652411 - RNA, 15 nt, Human
cagggggcuuccuga

SEQ ID NO: 3652412 - RNA, 17 nt, Human
cagggggucuggcuggu

SEQ ID NO: 3652413 - RNA, 21 nt, Human
caggggguggacaaacuggag

SEQ ID NO: 3652414 - RNA, 16 nt, Human
caggggucacugaggc

SEQ ID NO: 3652415 - RNA, 18 nt, Human
caggggucgucaccaccu

SEQ ID NO: 3652416 - RNA, 14 nt, Human
caggggucucccug

SEQ ID NO: 3652417 - RNA, 16 nt, Human
caggggucucccugga

SEQ ID NO: 3652418 - RNA, 18 nt, Human
caggggucucccuggcuc

SEQ ID NO: 3652419 - RNA, 21 nt, Human
caggggucucccuggcucccu

SEQ ID NO: 3652420 - RNA, 22 nt, Human
caggggugcccccuccucuccc

SEQ ID NO: 3652421 - RNA, 18 nt, Human
cagggguggaggagagcc

SEQ ID NO: 3652422 - RNA, 14 nt, Human
caggggugggacac

SEQ ID NO: 3652423 - RNA, 15 nt, Human
caggggugggacacc

SEQ ID NO: 3652424 - RNA, 19 nt, Human
cagggguuccuucugggca

SEQ ID NO: 3652425 - RNA, 17 nt, Human
cagggguucgagaccag

SEQ ID NO: 3652426 - RNA, 12 nt, Human
caggguaacuaa

SEQ ID NO: 3652427 - RNA, 19 nt, Human
caggguaacuaacuaaaac

SEQ ID NO: 3652428 - RNA, 22 nt, Human
caggguaacuaacuaaaacaaa

SEQ ID NO: 3652429 - RNA, 13 nt, Human
caggguagcccgc

SEQ ID NO: 3652430 - RNA, 15 nt, Human
caggguagcccgccu

SEQ ID NO: 3652431 - RNA, 20 nt, Human
caggguagcccgccugccag

SEQ ID NO: 3652432 - RNA, 23 nt, Human
caggguauggacuaucugucugg

SEQ ID NO: 3652433 - RNA, 18 nt, Human
caggguauugcuugccac

SEQ ID NO: 3652434 - RNA, 21 nt, Human
cagggucaaaguguuuucucu

SEQ ID NO: 3652435 - RNA, 16 nt, Human
cagggucagaaacagg

SEQ ID NO: 3652436 - RNA, 19 nt, Human
cagggucagaaacaggacc

SEQ ID NO: 3652437 - RNA, 13 nt, Human
cagggucccacag

SEQ ID NO: 3652438 - RNA, 20 nt, Human
ccucauucaaagggacgguc

SEQ ID NO: 3652439 - RNA, 13 nt, Human
ccucauucaggaa

SEQ ID NO: 3652440 - RNA, 16 nt, Human
ccucauucaggaaaac

SEQ ID NO: 3652441 - RNA, 15 nt, Human
ccucauucccucguc

SEQ ID NO: 3652442 - RNA, 22 nt, Human
ccucauucccucgucuuuccca

SEQ ID NO: 3652443 - RNA, 13 nt, Human
ccucauuccugaa

SEQ ID NO: 3652444 - RNA, 16 nt, Human
ccucauuuaucccuca

SEQ ID NO: 3652445 - RNA, 20 nt, Human
ccucauuugggguagcuaga

SEQ ID NO: 3652446 - RNA, 17 nt, Human
ccuccaaaggcccccua

SEQ ID NO: 3652447 - RNA, 22 nt, Human
ccuccaaauggagaagcugcag

SEQ ID NO: 3652448 - RNA, 23 nt, Human
ccuccaaauggagaagcugcagg

SEQ ID NO: 3652449 - RNA, 18 nt, Human
ccuccaacccuagcaaaa

SEQ ID NO: 3652450 - RNA, 19 nt, Human
ccuccaacccuagcaaaag

SEQ ID NO: 3652451 - RNA, 15 nt, Human
ccuccaacccugccg

SEQ ID NO: 3652452 - RNA, 18 nt, Human
ccuccaacccugccguca

SEQ ID NO: 3652453 - RNA, 22 nt, Human
ccuccaagcuccaucuccacuc

SEQ ID NO: 3652454 - RNA, 17 nt, Human
ccgcccagcugcaccug

SEQ ID NO: 3652455 - RNA, 12 nt, Human
ccgcccaggcuu

SEQ ID NO: 3652456 - RNA, 20 nt, Human
ccgcccaggcuuagucacug

SEQ ID NO: 3652457 - RNA, 19 nt, Human
ccgcccaugcacuggggac

SEQ ID NO: 3652458 - RNA, 19 nt, Human
ccgccccaaaguaaaagaa

SEQ ID NO: 3652459 - RNA, 13 nt, Human
ccgcccccagccu

SEQ ID NO: 3652460 - RNA, 14 nt, Human
ccgcccccagguag

SEQ ID NO: 3652461 - RNA, 21 nt, Human
ccgccccccacacuucccugg

SEQ ID NO: 3652462 - RNA, 23 nt, Human
ccgccccccacacuucccuggcg

SEQ ID NO: 3652463 - RNA, 11 nt, Human
ccgcccccugc

SEQ ID NO: 3652464 - RNA, 19 nt, Human
ccgccccucugaccccugc

SEQ ID NO: 3652465 - RNA, 13 nt, Human
ccgccccugagcc

SEQ ID NO: 3652466 - RNA, 17 nt, Human
ccgccccugccugccau

SEQ ID NO: 3652467 - RNA, 23 nt, Human
ccgccccuggccgcgcuccgggc

SEQ ID NO: 3652468 - RNA, 13 nt, Human
ccgcccucuuccu

SEQ ID NO: 3652469 - RNA, 15 nt, Human
ccgcccucuuccuga

SEQ ID NO: 3652470 - RNA, 11 nt, Human
ccgcccugcca

SEQ ID NO: 3652471 - RNA, 12 nt, Human
ccgcccugccac

SEQ ID NO: 3652472 - RNA, 22 nt, Human
ccgcccugcuccucccuggcug

SEQ ID NO: 3652473 - RNA, 21 nt, Human
ccgcccuugccgaaccaggag

SEQ ID NO: 3652474 - RNA, 16 nt, Human
ccgccgccucgcccac

SEQ ID NO: 3652475 - RNA, 17 nt, Human
ccgccgccucgcccacc

SEQ ID NO: 3652476 - RNA, 21 nt, Human
ccgccggcaauaaaagcccag

SEQ ID NO: 3652477 - RNA, 16 nt, Human
ccgccuaguuuacugu

SEQ ID NO: 3652478 - RNA, 15 nt, Human
ccgccucaaaaugug

SEQ ID NO: 3652479 - RNA, 23 nt, Human
ccgccucaaugugguugcaaggc

SEQ ID NO: 3652480 - RNA, 14 nt, Human
ccgccucccagccu

SEQ ID NO: 3652481 - RNA, 21 nt, Human
ccgccuccgggacccccagga

SEQ ID NO: 3652482 - RNA, 22 nt, Human
ccgccuccgggacccccaggac

SEQ ID NO: 3652483 - RNA, 23 nt, Human
ccgccuccgggacccccaggaca

SEQ ID NO: 3652484 - RNA, 15 nt, Human
ccgccucgcccaccg

SEQ ID NO: 3652485 - RNA, 17 nt, Human
ccgccucgcccaccgca

SEQ ID NO: 3652486 - RNA, 18 nt, Human
ccgccucgcccaccgcau

SEQ ID NO: 3652487 - RNA, 13 nt, Human
ccgccucucccgu

SEQ ID NO: 3652488 - RNA, 17 nt, Human
ccgccugacagaaacca

SEQ ID NO: 3652489 - RNA, 14 nt, Human
ccgccugccagucc

SEQ ID NO: 3652490 - RNA, 21 nt, Human
ccgccugccaguccuagcugc

SEQ ID NO: 3652491 - RNA, 22 nt, Human
ccgccugccaguccuagcugca

SEQ ID NO: 3652492 - RNA, 12 nt, Human
ccgccugcccac

SEQ ID NO: 3652493 - RNA, 14 nt, Human
ccgccugcccucau

SEQ ID NO: 3652494 - RNA, 16 nt, Human
ccgccugcccucaugg

SEQ ID NO: 3652495 - RNA, 21 nt, Human
ccgccuggccaggagcaggca

SEQ ID NO: 3652496 - RNA, 17 nt, Human
ccgccugggucuccuaa

SEQ ID NO: 3652497 - RNA, 14 nt, Human
ccgccugguacuca

SEQ ID NO: 3652498 - RNA, 12 nt, Human
ccgccuuccuug

SEQ ID NO: 3652499 - RNA, 23 nt, Human
ccgccuuccuugaccuuccucug

SEQ ID NO: 3652500 - RNA, 21 nt, Human
ccgcgaugggucagguagggg

SEQ ID NO: 3652501 - RNA, 23 nt, Human
ccgcgauguggaacugcugccac

SEQ ID NO: 3652502 - RNA, 18 nt, Human
ccgcgcgcgucccccugc

SEQ ID NO: 3652503 - RNA, 23 nt, Human
ccgcgcguccagcugcccuuccg

SEQ ID NO: 3652504 - RNA, 20 nt, Human
ccgcgcucgccccaccggcg

SEQ ID NO: 3652505 - RNA, 17 nt, Human
ccgcggggcacccgccg

SEQ ID NO: 3652506 - RNA, 19 nt, Human
ccgcggggcacccgccgga

SEQ ID NO: 3652507 - RNA, 19 nt, Human
ccgcgucgcccucccaggc

SEQ ID NO: 3652508 - RNA, 17 nt, Human
ccgcgugugccugugug

SEQ ID NO: 3652509 - RNA, 13 nt, Human
ccgcuaaggaaga

SEQ ID NO: 3652510 - RNA, 18 nt, Human
ccgcuagaggccugagga

SEQ ID NO: 3652511 - RNA, 15 nt, Human
ccgcucaccuagagc

SEQ ID NO: 3652512 - RNA, 13 nt, Human
ccgcucagcccuc

SEQ ID NO: 3652513 - RNA, 15 nt, Human
ccgcuccagagucag

SEQ ID NO: 3652514 - RNA, 23 nt, Human
ccgcuccagguaccuugaccuuu

SEQ ID NO: 3652515 - RNA, 12 nt, Human
ccgcucccagug

SEQ ID NO: 3652516 - RNA, 13 nt, Human
ccgcuccccagcc

SEQ ID NO: 3652517 - RNA, 15 nt, Human
ccgcuccccagccca

SEQ ID NO: 3652518 - RNA, 21 nt, Human
ccgcuccugcggaggaggugu

SEQ ID NO: 3652519 - RNA, 22 nt, Human
ccgcucggaggccccaaaggaa

SEQ ID NO: 3652520 - RNA, 17 nt, Human
ccgcucuccugccacau

SEQ ID NO: 3652521 - RNA, 21 nt, Human
ccgcucucuuuucuguacuuc

SEQ ID NO: 3652522 - RNA, 20 nt, Human
ccgcucugcaugcggcccag

SEQ ID NO: 3652523 - RNA, 21 nt, Human
ccgcucuuggggacauggguc

SEQ ID NO: 3652524 - RNA, 12 nt, Human
ccgcugccaccc

SEQ ID NO: 3652525 - RNA, 23 nt, Human
ccgcugcccggcgcccucugucc

SEQ ID NO: 3652526 - RNA, 17 nt, Human
ccgcugcuccacgcgcu

SEQ ID NO: 3652527 - RNA, 18 nt, Human
ccgcugcuccuuggcuua

SEQ ID NO: 3652528 - RNA, 18 nt, Human
ccgcuggcugggggccuc

SEQ ID NO: 3652529 - RNA, 14 nt, Human
ccgcuggggccagu

SEQ ID NO: 3652530 - RNA, 18 nt, Human
ccgcugugagccccuggu

SEQ ID NO: 3652531 - RNA, 19 nt, Human
ccgcugugagccccugguc

SEQ ID NO: 3652532 - RNA, 14 nt, Human
ccgcuguucaccca

SEQ ID NO: 3652533 - RNA, 15 nt, Human
ccgcuguucacccac

SEQ ID NO: 3652534 - RNA, 16 nt, Human
ccgcuucccuccugcc

SEQ ID NO: 3652535 - RNA, 13 nt, Human
ccgcuugccucgg

SEQ ID NO: 3652536 - RNA, 20 nt, Human
ccgcuugccucggcuccugc

SEQ ID NO: 3652537 - RNA, 17 nt, Human
ccgcuuggagcagaggg

SEQ ID NO: 3652538 - RNA, 18 nt, Human
ccgcuuggagcagagggg

SEQ ID NO: 3652539 - RNA, 20 nt, Human
ccgcuuggcgaugccagcca

SEQ ID NO: 3652540 - RNA, 18 nt, Human
ccgcuuguccagcgccua

SEQ ID NO: 3652541 - RNA, 19 nt, Human
ccgcuuguccagcgccuag

SEQ ID NO: 3652542 - RNA, 20 nt, Human
ccgcuuguggggacccaggc

SEQ ID NO: 3652543 - RNA, 12 nt, Human
ccgcuuucuacc

SEQ ID NO: 3652544 - RNA, 14 nt, Human
ccgcuuuggccuga

SEQ ID NO: 3652545 - RNA, 11 nt, Human
ccggaagccaa

SEQ ID NO: 3652546 - RNA, 22 nt, Human
ccggaagccaaaccucugugag

SEQ ID NO: 3652547 - RNA, 20 nt, Human
ccggaauccuguccucagcu

SEQ ID NO: 3652548 - RNA, 15 nt, Human
ccggaccagccuggc

SEQ ID NO: 3652549 - RNA, 18 nt, Human
ccggaccagccuggccca

SEQ ID NO: 3652550 - RNA, 17 nt, Human
ccggacccucuaaccuc

SEQ ID NO: 3652551 - RNA, 21 nt, Human
ccggacccucuaaccucgccc

SEQ ID NO: 3652552 - RNA, 20 nt, Human
ccggacugcaagcagggcuc

SEQ ID NO: 3652553 - RNA, 16 nt, Human
ccggacuggugcccuc

SEQ ID NO: 3652554 - RNA, 13 nt, Human
ccggagagccagc

SEQ ID NO: 3652555 - RNA, 19 nt, Human
ccggagaggccucgaccca

SEQ ID NO: 3652556 - RNA, 14 nt, Human
ccggagaguggggg

SEQ ID NO: 3652557 - RNA, 17 nt, Human
ccggagcaaacucugcu

SEQ ID NO: 3652558 - RNA, 18 nt, Human
ccggagcaaacucugcug

SEQ ID NO: 3652559 - RNA, 16 nt, Human
ccggagccuccagcug

SEQ ID NO: 3652560 - RNA, 19 nt, Human
ccggagcuaacacuggccc

SEQ ID NO: 3652561 - RNA, 22 nt, Human
ccggagcuaacacuggccccua

SEQ ID NO: 3652562 - RNA, 20 nt, Human
ccggagcugccccucucugg

SEQ ID NO: 3652563 - RNA, 17 nt, Human
ccggagggaagggacgg

SEQ ID NO: 3652564 - RNA, 12 nt, Human
ccggagggcccu

SEQ ID NO: 3652565 - RNA, 17 nt, Human
ccggaggggccuggcag

SEQ ID NO: 3652566 - RNA, 17 nt, Human
ccggaguccacucccag

SEQ ID NO: 3652567 - RNA, 13 nt, Human
ccggaucagagca

SEQ ID NO: 3652568 - RNA, 19 nt, Human
ccggaucagagcaggaccu

SEQ ID NO: 3652569 - RNA, 17 nt, Human
ccggcaaccccaguucu

SEQ ID NO: 3652570 - RNA, 20 nt, Human
ccggcaaccccaguucugcu

SEQ ID NO: 3652571 - RNA, 22 nt, Human
ccggcaaccccaguucugcucc

SEQ ID NO: 3652572 - RNA, 20 nt, Human
ccggcacagggucugcucuu

SEQ ID NO: 3652573 - RNA, 14 nt, Human
ccggcacccccugc

SEQ ID NO: 3652574 - RNA, 15 nt, Human
ccggcacccccugca

SEQ ID NO: 3652575 - RNA, 16 nt, Human
ccggcacccccugcag

SEQ ID NO: 3652576 - RNA, 18 nt, Human
ccggcacccccugcagcu

SEQ ID NO: 3652577 - RNA, 18 nt, Human
ccggcagccccagccugc

SEQ ID NO: 3652578 - RNA, 18 nt, Human
ccggcagcuucugccccc

SEQ ID NO: 3652579 - RNA, 20 nt, Human
ccggcagcuucugcccccug

SEQ ID NO: 3652580 - RNA, 15 nt, Human
ccggcaggcccugca

SEQ ID NO: 3652581 - RNA, 18 nt, Human
ccggcaggcccugcagug

SEQ ID NO: 3652582 - RNA, 19 nt, Human
ccucucguaagauuuccuu

SEQ ID NO: 3652583 - RNA, 19 nt, Human
ccucucuaaccuccuuuac

SEQ ID NO: 3652584 - RNA, 17 nt, Human
ccucucuauccucucuu

SEQ ID NO: 3652585 - RNA, 13 nt, Human
ccucucucacucc

SEQ ID NO: 3652586 - RNA, 14 nt, Human
ccucucucacuccu

SEQ ID NO: 3652587 - RNA, 15 nt, Human
ccucucucauccacu

SEQ ID NO: 3652588 - RNA, 15 nt, Human
ccucucucccagucu

SEQ ID NO: 3652589 - RNA, 12 nt, Human
ccucucucuccg

SEQ ID NO: 3652590 - RNA, 13 nt, Human
ccucucucugacu

SEQ ID NO: 3652591 - RNA, 15 nt, Human
ccucucucugacucu

SEQ ID NO: 3652592 - RNA, 15 nt, Human
ccucucucuggaaag

SEQ ID NO: 3652593 - RNA, 22 nt, Human
ccucucucuucugcuccacccu

SEQ ID NO: 3652594 - RNA, 22 nt, Human
ccucucugaaggaggccaccuc

SEQ ID NO: 3652595 - RNA, 13 nt, Human
ccucucugcaggu

SEQ ID NO: 3652596 - RNA, 17 nt, Human
ccucucugcaggucccu

SEQ ID NO: 3652597 - RNA, 13 nt, Human
ccucucugcccua

SEQ ID NO: 3652598 - RNA, 12 nt, Human
ccucucuggaga

SEQ ID NO: 3652599 - RNA, 18 nt, Human
ccucucuggccucccacc

SEQ ID NO: 3652600 - RNA, 13 nt, Human
ccucucugggccu

SEQ ID NO: 3652601 - RNA, 16 nt, Human
ccucucugggccucag

SEQ ID NO: 3652602 - RNA, 18 nt, Human
ccucucuggggcuguguu

SEQ ID NO: 3652603 - RNA, 17 nt, Human
ccucucuuccuauccca

SEQ ID NO: 3652604 - RNA, 21 nt, Human
ccucucuuccuaucccauccc

SEQ ID NO: 3652605 - RNA, 22 nt, Human
ccucucuuccuaucccauccca

SEQ ID NO: 3652606 - RNA, 12 nt, Human
ccucucuuccuc

SEQ ID NO: 3652607 - RNA, 14 nt, Human
ccucucuugcaccc

SEQ ID NO: 3652608 - RNA, 18 nt, Human
ccucucuugguuuccuuc

SEQ ID NO: 3652609 - RNA, 21 nt, Human
ccucucuugguuuccuuccuu

SEQ ID NO: 3652610 - RNA, 23 nt, Human
ccucugaaaaccaauguucucuc

SEQ ID NO: 3652611 - RNA, 18 nt, Human
ccucugaaaacggcccuc

SEQ ID NO: 3652612 - RNA, 14 nt, Human
ccucugaaacagcu

SEQ ID NO: 3652613 - RNA, 18 nt, Human
ccucugaaacagcugccu

SEQ ID NO: 3652614 - RNA, 19 nt, Human
ccucugaaacagcugccuu

SEQ ID NO: 3652615 - RNA, 20 nt, Human
ccucugaaacagcugccuua

SEQ ID NO: 3652616 - RNA, 19 nt, Human
ccucugaaaguuguacaug

SEQ ID NO: 3652617 - RNA, 20 nt, Human
ccucugaaguuggacagcaa

SEQ ID NO: 3652618 - RNA, 13 nt, Human
ccucugaccccuc

SEQ ID NO: 3652619 - RNA, 14 nt, Human
ccucugaccccucc

SEQ ID NO: 3652620 - RNA, 12 nt, Human
ccucugaccuau

SEQ ID NO: 3652621 - RNA, 14 nt, Human
ccucugaccugcac

SEQ ID NO: 3652622 - RNA, 15 nt, Human
ccucugaccugcagg

SEQ ID NO: 3652623 - RNA, 20 nt, Human
ccucugaccugcaggccaag

SEQ ID NO: 3652624 - RNA, 12 nt, Human
ccucugacucag

SEQ ID NO: 3652625 - RNA, 22 nt, Human
ccucugacucagggcuccuggg

SEQ ID NO: 3652626 - RNA, 14 nt, Human
ccucugacucccaa

SEQ ID NO: 3652627 - RNA, 22 nt, Human
ccucugacucccaaagagcugc

SEQ ID NO: 3652628 - RNA, 20 nt, Human
ccucugagaagcucugaaga

SEQ ID NO: 3652629 - RNA, 16 nt, Human
ccucugagacuccaga

SEQ ID NO: 3652630 - RNA, 13 nt, Human
ccucugagaggcg

SEQ ID NO: 3652631 - RNA, 12 nt, Human
ccucugaggcca

SEQ ID NO: 3652632 - RNA, 14 nt, Human
ccucugaggccagc

SEQ ID NO: 3652633 - RNA, 19 nt, Human
ccucugauacccagagcau

SEQ ID NO: 3652634 - RNA, 18 nt, Human
ccucugauaugggacuga

SEQ ID NO: 3652635 - RNA, 21 nt, Human
ccucugauguauuuugugagu

SEQ ID NO: 3652636 - RNA, 11 nt, Human
ccucugcacaa

SEQ ID NO: 3652637 - RNA, 19 nt, Human
ccucugcacaagcugcacc

SEQ ID NO: 3652638 - RNA, 20 nt, Human
ccucugcacaagcugcaccc

SEQ ID NO: 3652639 - RNA, 19 nt, Human
ccucugcacacccuccaga

SEQ ID NO: 3652640 - RNA, 20 nt, Human
ccucugcacacccuccagag

SEQ ID NO: 3652641 - RNA, 16 nt, Human
ccucugcacucccacc

SEQ ID NO: 3652642 - RNA, 14 nt, Human
ccucugcacucccc

SEQ ID NO: 3652643 - RNA, 21 nt, Human
ccucugcacuccccugcuggg

SEQ ID NO: 3652644 - RNA, 13 nt, Human
ccucugcagcuga

SEQ ID NO: 3652645 - RNA, 17 nt, Human
ccucugcagcugaccuc

SEQ ID NO: 3652646 - RNA, 19 nt, Human
ccucugcagcugaccucug

SEQ ID NO: 3652647 - RNA, 23 nt, Human
ccucugcagucucuauaccaaua

SEQ ID NO: 3652648 - RNA, 16 nt, Human
ccucugcagugccuug

SEQ ID NO: 3652649 - RNA, 16 nt, Human
ccucugcauccucugg

SEQ ID NO: 3652650 - RNA, 18 nt, Human
ccucugcauccucuggag

SEQ ID NO: 3652651 - RNA, 19 nt, Human
ccucugccaaaggauguga

SEQ ID NO: 3652652 - RNA, 13 nt, Human
ccucugccacacu

SEQ ID NO: 3652653 - RNA, 20 nt, Human
ccucugccaccuccccuauc

SEQ ID NO: 3652654 - RNA, 16 nt, Human
ccucugcccacucccu

SEQ ID NO: 3652655 - RNA, 19 nt, Human
ccucugcccacucccugca

SEQ ID NO: 3652656 - RNA, 13 nt, Human
ccucugcccagcu

SEQ ID NO: 3652657 - RNA, 17 nt, Human
ccucugcccagcuuggg

SEQ ID NO: 3652658 - RNA, 23 nt, Human
ccucugcccagcuugggcccagc

SEQ ID NO: 3652659 - RNA, 22 nt, Human
ccucugccccauccuccagcag

SEQ ID NO: 3652660 - RNA, 14 nt, Human
ccucugccccgucu

SEQ ID NO: 3652661 - RNA, 18 nt, Human
ccucugccccucccccag

SEQ ID NO: 3652662 - RNA, 11 nt, Human
ccucugccuca

SEQ ID NO: 3652663 - RNA, 12 nt, Human
ccucugccucaa

SEQ ID NO: 3652664 - RNA, 14 nt, Human
ccucugccucaaug

SEQ ID NO: 3652665 - RNA, 22 nt, Human
ccucugccugaagucacacagu

SEQ ID NO: 3652666 - RNA, 12 nt, Human
ccucugccuguc

SEQ ID NO: 3652667 - RNA, 20 nt, Human
ccucugcggaccccagcugu

SEQ ID NO: 3652668 - RNA, 19 nt, Human
ccucugcgucuauccugug

SEQ ID NO: 3652669 - RNA, 15 nt, Human
cagugccaagcacag

SEQ ID NO: 3652670 - RNA, 22 nt, Human
cagugccaauaaaauuuaggaa

SEQ ID NO: 3652671 - RNA, 21 nt, Human
cagugccagcaaugacaucuc

SEQ ID NO: 3652672 - RNA, 18 nt, Human
cagugccaggaacccuua

SEQ ID NO: 3652673 - RNA, 18 nt, Human
cagugccauugucuuuau

SEQ ID NO: 3652674 - RNA, 13 nt, Human
cagugcccacagg

SEQ ID NO: 3652675 - RNA, 16 nt, Human
cagugcccaccaacau

SEQ ID NO: 3652676 - RNA, 14 nt, Human
cagugcccaggugg

SEQ ID NO: 3652677 - RNA, 18 nt, Human
cagugcccauuccucacc

SEQ ID NO: 3652678 - RNA, 21 nt, Human
cagugcccccacugaccagaa

SEQ ID NO: 3652679 - RNA, 17 nt, Human
cagugcccucauuuuau

SEQ ID NO: 3652680 - RNA, 14 nt, Human
cagugcccuccagc

SEQ ID NO: 3652681 - RNA, 13 nt, Human
cagugcccucucc

SEQ ID NO: 3652682 - RNA, 13 nt, Human
cagugcccugagc

SEQ ID NO: 3652683 - RNA, 17 nt, Human
cagugccgccgccucgc

SEQ ID NO: 3652684 - RNA, 12 nt, Human
cagugccucucc

SEQ ID NO: 3652685 - RNA, 21 nt, Human
cagugccucucccugcugcuc

SEQ ID NO: 3652686 - RNA, 20 nt, Human
cagugccugggaauguauua

SEQ ID NO: 3652687 - RNA, 19 nt, Human
cagugccuuaccuccugcc

SEQ ID NO: 3652688 - RNA, 11 nt, Human
cagugccuuau

SEQ ID NO: 3652689 - RNA, 16 nt, Human
cagugccuuauggaac

SEQ ID NO: 3652690 - RNA, 18 nt, Human
cagugccuuauggaacac

SEQ ID NO: 3652691 - RNA, 20 nt, Human
cagugccuuauggaacacuc

SEQ ID NO: 3652692 - RNA, 22 nt, Human
cagugccuuauggaacacucug

SEQ ID NO: 3652693 - RNA, 22 nt, Human
cagugccuuggggaauuuccuc

SEQ ID NO: 3652694 - RNA, 14 nt, Human
cagugcuaaaaaug

SEQ ID NO: 3652695 - RNA, 20 nt, Human
cagugcuaaaaaugggacuu

SEQ ID NO: 3652696 - RNA, 15 nt, Human
cagugcuacugaaag

SEQ ID NO: 3652697 - RNA, 17 nt, Human
cagugcucacccacacc

SEQ ID NO: 3652698 - RNA, 13 nt, Human
cagugcuccagcc

SEQ ID NO: 3652699 - RNA, 19 nt, Human
cagugcucgcuguugcuga

SEQ ID NO: 3652700 - RNA, 22 nt, Human
cagugcucgcuguugcugaaua

SEQ ID NO: 3652701 - RNA, 19 nt, Human
cagugcugauguagcaugc

SEQ ID NO: 3652702 - RNA, 19 nt, Human
cagugcugcagcucccugg

SEQ ID NO: 3652703 - RNA, 13 nt, Human
cagugcugccugu

SEQ ID NO: 3652704 - RNA, 14 nt, Human
cagugcugccuguc

SEQ ID NO: 3652705 - RNA, 15 nt, Human
cagugcugccugucc

SEQ ID NO: 3652706 - RNA, 16 nt, Human
cagugcugugcugugc

SEQ ID NO: 3652707 - RNA, 19 nt, Human
cagugcugugcugugcuau

SEQ ID NO: 3652708 - RNA, 14 nt, Human
cagugcuuagcaaa

SEQ ID NO: 3652709 - RNA, 16 nt, Human
cagugcuuagcaaaaa

SEQ ID NO: 3652710 - RNA, 14 nt, Human
cagugcuucagccu

SEQ ID NO: 3652711 - RNA, 20 nt, Human
cagugcuucagccugaggcu

SEQ ID NO: 3652712 - RNA, 15 nt, Human
cagugcuucccgagu

SEQ ID NO: 3652713 - RNA, 12 nt, Human
cagugcuuggcc

SEQ ID NO: 3652714 - RNA, 21 nt, Human
cagugcuuuuggcggggagga

SEQ ID NO: 3652715 - RNA, 16 nt, Human
caguggaaccagccca

SEQ ID NO: 3652716 - RNA, 20 nt, Human
caguggacucagaaagccaa

SEQ ID NO: 3652717 - RNA, 13 nt, Human
caguggagaauua

SEQ ID NO: 3652718 - RNA, 15 nt, Human
caguggaggaagagg

SEQ ID NO: 3652719 - RNA, 20 nt, Human
caguggaggaagagggacag

SEQ ID NO: 3652720 - RNA, 15 nt, Human
caguggaggugcugc

SEQ ID NO: 3652721 - RNA, 19 nt, Human
caguggagugcaaaaggcu

SEQ ID NO: 3652722 - RNA, 17 nt, Human
caguggauuguuuauac

SEQ ID NO: 3652723 - RNA, 19 nt, Human
caguggcacucaacaugag

SEQ ID NO: 3652724 - RNA, 14 nt, Human
caguggcagcugcu

SEQ ID NO: 3652725 - RNA, 17 nt, Human
caguggcaggacaggaa

SEQ ID NO: 3652726 - RNA, 21 nt, Human
caguggcaggcagaggcccag

SEQ ID NO: 3652727 - RNA, 15 nt, Human
caguggcagggcaca

SEQ ID NO: 3652728 - RNA, 13 nt, Human
ccucauccucaga

SEQ ID NO: 3652729 - RNA, 17 nt, Human
ccucauccucagaugcu

SEQ ID NO: 3652730 - RNA, 20 nt, Human
ccucauccucauacccaccc

SEQ ID NO: 3652731 - RNA, 16 nt, Human
ccucaucuaugaggaa

SEQ ID NO: 3652732 - RNA, 14 nt, Human
ccucaucugucugg

SEQ ID NO: 3652733 - RNA, 16 nt, Human
ccucaucuugaagggc

SEQ ID NO: 3652734 - RNA, 21 nt, Human
ccucaucuugaagggcccagg

SEQ ID NO: 3652735 - RNA, 16 nt, Human
ccucaugaauguaaau

SEQ ID NO: 3652736 - RNA, 19 nt, Human
ccucaugaauguaaauuug

SEQ ID NO: 3652737 - RNA, 13 nt, Human
ccucaugcaucuc

SEQ ID NO: 3652738 - RNA, 15 nt, Human
ccucaugcaucucca

SEQ ID NO: 3652739 - RNA, 14 nt, Human
ccucaugccaaccc

SEQ ID NO: 3652740 - RNA, 14 nt, Human
ccucaugcccaccc

SEQ ID NO: 3652741 - RNA, 23 nt, Human
ccucaugcccacccccugcccug

SEQ ID NO: 3652742 - RNA, 24 nt, Human
ccucaugcccacccccugcccugc

SEQ ID NO: 3652743 - RNA, 20 nt, Human
ccucaugcugccaauauccu

SEQ ID NO: 3652744 - RNA, 15 nt, Human
ccucauguccacugg

SEQ ID NO: 3652745 - RNA, 20 nt, Human
ccucauguccacugguucuu

SEQ ID NO: 3652746 - RNA, 13 nt, Human
ccucauguucuua

SEQ ID NO: 3652747 - RNA, 13 nt, Human
ccucauguuuaug

SEQ ID NO: 3652748 - RNA, 15 nt, Human
ccucauuaaugacac

SEQ ID NO: 3652749 - RNA, 17 nt, Human
ccucauucaggaaaacu

SEQ ID NO: 3652750 - RNA, 22 nt, Human
ccucauuucaggagcagccuca

SEQ ID NO: 3652751 - RNA, 11 nt, Human
ccucauuucuc

SEQ ID NO: 3652752 - RNA, 17 nt, Human
ccucauuugggguagcu

SEQ ID NO: 3652753 - RNA, 23 nt, Human
ccucauuuuugaauacaggcaua

SEQ ID NO: 3652754 - RNA, 18 nt, Human
ccucauuuuuuuccuugc

SEQ ID NO: 3652755 - RNA, 22 nt, Human
ccuccaaaaugugccuauugcu

SEQ ID NO: 3652756 - RNA, 13 nt, Human
ccuccaacccugc

SEQ ID NO: 3652757 - RNA, 22 nt, Human
ccuccaaucccaccaacccuca

SEQ ID NO: 3652758 - RNA, 23 nt, Human
ccuccaaucccaccaacccucag

SEQ ID NO: 3652759 - RNA, 15 nt, Human
ccuccaauccugccc

SEQ ID NO: 3652760 - RNA, 19 nt, Human
ccuccacacccgcgccccg

SEQ ID NO: 3652761 - RNA, 15 nt, Human
ccuccacagcgaggg

SEQ ID NO: 3652762 - RNA, 21 nt, Human
ccuccacagcgagggcagcug

SEQ ID NO: 3652763 - RNA, 22 nt, Human
ccuccacagcgagggcagcugc

SEQ ID NO: 3652764 - RNA, 17 nt, Human
ccuccacaguucagugg

SEQ ID NO: 3652765 - RNA, 12 nt, Human
ccuccacauccu

SEQ ID NO: 3652766 - RNA, 14 nt, Human
ccuccacauccucc

SEQ ID NO: 3652767 - RNA, 18 nt, Human
ccuccaccaccacuggcc

SEQ ID NO: 3652768 - RNA, 23 nt, Human
ccuccaccaccacuggccaccag

SEQ ID NO: 3652769 - RNA, 13 nt, Human
ccuccaccccagg

SEQ ID NO: 3652770 - RNA, 17 nt, Human
ccuccaccccccagaac

SEQ ID NO: 3652771 - RNA, 20 nt, Human
ccuccacccucugagcuuug

SEQ ID NO: 3652772 - RNA, 14 nt, Human
ccuccacccugucc

SEQ ID NO: 3652773 - RNA, 16 nt, Human
ccuccacccugucccc

SEQ ID NO: 3652774 - RNA, 17 nt, Human
ccuccaccgccauggcu

SEQ ID NO: 3652775 - RNA, 14 nt, Human
ccuccaccgcugcc

SEQ ID NO: 3652776 - RNA, 14 nt, Human
ccuccaccucccug

SEQ ID NO: 3652777 - RNA, 17 nt, Human
ccuccaccucccugcaa

SEQ ID NO: 3652778 - RNA, 23 nt, Human
ccuccaccucuucaccccccacu

SEQ ID NO: 3652779 - RNA, 17 nt, Human
ccuccacguucaccccu

SEQ ID NO: 3652780 - RNA, 17 nt, Human
ccuccacguucugcuca

SEQ ID NO: 3652781 - RNA, 21 nt, Human
ccuccacucagcuguccugca

SEQ ID NO: 3652782 - RNA, 13 nt, Human
ccuccacucccac

SEQ ID NO: 3652783 - RNA, 14 nt, Human
ccuccacucccacu

SEQ ID NO: 3652784 - RNA, 20 nt, Human
ccuccacucccacuucccug

SEQ ID NO: 3652785 - RNA, 15 nt, Human
ccuccacuccuuccu

SEQ ID NO: 3652786 - RNA, 16 nt, Human
ccuccacuccuuccug

SEQ ID NO: 3652787 - RNA, 19 nt, Human
ccuccacucucccccaccc

SEQ ID NO: 3652788 - RNA, 13 nt, Human
ccuccacucuccu

SEQ ID NO: 3652789 - RNA, 16 nt, Human
ccuccacugcccucug

SEQ ID NO: 3652790 - RNA, 12 nt, Human
ccuccagaacuc

SEQ ID NO: 3652791 - RNA, 19 nt, Human
ccuccagaagcacugggau

SEQ ID NO: 3652792 - RNA, 12 nt, Human
ccuccagaagcc

SEQ ID NO: 3652793 - RNA, 19 nt, Human
ccuccagaagccucuggcu

SEQ ID NO: 3652794 - RNA, 22 nt, Human
ccuccagaagccucuggcuaga

SEQ ID NO: 3652795 - RNA, 12 nt, Human
ccuccagagccc

SEQ ID NO: 3652796 - RNA, 19 nt, Human
ccuccagagccccacagcc

SEQ ID NO: 3652797 - RNA, 12 nt, Human
ccuccagcacaa

SEQ ID NO: 3652798 - RNA, 17 nt, Human
ccuccagcacaaacaca

SEQ ID NO: 3652799 - RNA, 20 nt, Human
ccuccagccccgcgaccaug

SEQ ID NO: 3652800 - RNA, 14 nt, Human
ccuccagccccugu

SEQ ID NO: 3652801 - RNA, 17 nt, Human
ccuccagcccgggagcc

SEQ ID NO: 3652802 - RNA, 23 nt, Human
ccuccagcccgggagccuaggac

SEQ ID NO: 3652803 - RNA, 22 nt, Human
ccuccagcccucucacuguguc

SEQ ID NO: 3652804 - RNA, 11 nt, Human
ccuccagccuc

SEQ ID NO: 3652805 - RNA, 15 nt, Human
ccuccagccucuguu

SEQ ID NO: 3652806 - RNA, 16 nt, Human
ccuccagccugaacag

SEQ ID NO: 3652807 - RNA, 22 nt, Human
ccuccagccuuuggccuuggcu

SEQ ID NO: 3652808 - RNA, 11 nt, Human
ccuccagcuca

SEQ ID NO: 3652809 - RNA, 15 nt, Human
ccuccagcucagcag

SEQ ID NO: 3652810 - RNA, 18 nt, Human
ccuccagcucccugugcc

SEQ ID NO: 3652811 - RNA, 21 nt, Human
ccuccagcucccugugccccc

SEQ ID NO: 3652812 - RNA, 16 nt, Human
ccuccagcucuuuccu

SEQ ID NO: 3652813 - RNA, 18 nt, Human
ccuccagcugcaccagag

SEQ ID NO: 3652814 - RNA, 17 nt, Human
ccuccagcuuuccugua

SEQ ID NO: 3652815 - RNA, 22 nt, Human
ccuccaggaaugaucucuucuu

SEQ ID NO: 3652816 - RNA, 18 nt, Human
ccuccaggagcuucuugu

SEQ ID NO: 3652817 - RNA, 13 nt, Human
ccuccaggcaaaa

SEQ ID NO: 3652818 - RNA, 13 nt, Human
ccuccaggccugc

SEQ ID NO: 3652819 - RNA, 19 nt, Human
ccuccaggccugccuccca

SEQ ID NO: 3652820 - RNA, 14 nt, Human
ccuccagggccacg

SEQ ID NO: 3652821 - RNA, 16 nt, Human
ccuccagggccacgug

SEQ ID NO: 3652822 - RNA, 22 nt, Human
ccuccagggcucaacacuguga

SEQ ID NO: 3652823 - RNA, 21 nt, Human
ccuccagggcuggacugaggc

SEQ ID NO: 3652824 - RNA, 22 nt, Human
ccuccagggcuggacugaggcc

SEQ ID NO: 3652825 - RNA, 11 nt, Human
ccuccaggugc

SEQ ID NO: 3652826 - RNA, 19 nt, Human
ccuccaggugugcacgugg

SEQ ID NO: 3652827 - RNA, 16 nt, Human
ccuccagguuuuucaa

SEQ ID NO: 3652828 - RNA, 18 nt, Human
ccuccagguuuuucaauu

SEQ ID NO: 3652829 - RNA, 21 nt, Human
ccuccagguuuuucaauuaaa

SEQ ID NO: 3652830 - RNA, 17 nt, Human
ccuccaguaccuugcuu

SEQ ID NO: 3652831 - RNA, 16 nt, Human
ccuccagugugggcuu

SEQ ID NO: 3652832 - RNA, 12 nt, Human
ccuccaucccug

SEQ ID NO: 3652833 - RNA, 18 nt, Human
ccuccaucuaaacugccc

SEQ ID NO: 3652834 - RNA, 18 nt, Human
ccuccaucuucuuugcag

SEQ ID NO: 3652835 - RNA, 17 nt, Human
cagugugggcuugacca

SEQ ID NO: 3652836 - RNA, 13 nt, Human
caguguguaaaca

SEQ ID NO: 3652837 - RNA, 16 nt, Human
caguguguaaacaaaa

SEQ ID NO: 3652838 - RNA, 21 nt, Human
cagugugucgagucaaaaugu

SEQ ID NO: 3652839 - RNA, 23 nt, Human
cagugugucuaaauuugaauguu

SEQ ID NO: 3652840 - RNA, 17 nt, Human
cagugugucuccugcau

SEQ ID NO: 3652841 - RNA, 19 nt, Human
cagugugucuccugcaugc

SEQ ID NO: 3652842 - RNA, 15 nt, Human
caguguuaaaugaaa

SEQ ID NO: 3652843 - RNA, 18 nt, Human
caguguuaaaugaaauug

SEQ ID NO: 3652844 - RNA, 14 nt, Human
caguguuaaaugug

SEQ ID NO: 3652845 - RNA, 14 nt, Human
caguguuaccugug

SEQ ID NO: 3652846 - RNA, 19 nt, Human
caguguuaccugugugcuu

SEQ ID NO: 3652847 - RNA, 19 nt, Human
caguguuaggccuggcaca

SEQ ID NO: 3652848 - RNA, 21 nt, Human
caguguuaggccuggcacagu

SEQ ID NO: 3652849 - RNA, 21 nt, Human
caguguuccccaucugggucc

SEQ ID NO: 3652850 - RNA, 14 nt, Human
caguguucgcuugg

SEQ ID NO: 3652851 - RNA, 18 nt, Human
caguguucuaugaacaac

SEQ ID NO: 3652852 - RNA, 13 nt, Human
caguguucuguuu

SEQ ID NO: 3652853 - RNA, 16 nt, Human
caguguucuguuuaau

SEQ ID NO: 3652854 - RNA, 22 nt, Human
caguguucuguuuaauacucau

SEQ ID NO: 3652855 - RNA, 13 nt, Human
caguguugccuaa

SEQ ID NO: 3652856 - RNA, 14 nt, Human
caguguugccuaag

SEQ ID NO: 3652857 - RNA, 24 nt, Human
caguguuggccaugaugacaacua

SEQ ID NO: 3652858 - RNA, 20 nt, Human
caguguugucaccagaucug

SEQ ID NO: 3652859 - RNA, 23 nt, Human
caguguuguugcucuaggaagac

SEQ ID NO: 3652860 - RNA, 21 nt, Human
caguguuucccauaauuuucu

SEQ ID NO: 3652861 - RNA, 13 nt, Human
caguguuuucaga

SEQ ID NO: 3652862 - RNA, 23 nt, Human
caguguuuucagaagaaauaaau

SEQ ID NO: 3652863 - RNA, 15 nt, Human
caguguuuucuggga

SEQ ID NO: 3652864 - RNA, 21 nt, Human
caguguuuugcaagugcugga

SEQ ID NO: 3652865 - RNA, 14 nt, Human
caguguuuuuguaa

SEQ ID NO: 3652866 - RNA, 24 nt, Human
caguuaacuauugcauuuauaugu

SEQ ID NO: 3652867 - RNA, 16 nt, Human
caguuaacuuucagaa

SEQ ID NO: 3652868 - RNA, 16 nt, Human
caguuaagaaauuuca

SEQ ID NO: 3652869 - RNA, 14 nt, Human
caguuaagagaaau

SEQ ID NO: 3652870 - RNA, 20 nt, Human
caguuaagagaaaugagcuu

SEQ ID NO: 3652871 - RNA, 14 nt, Human
caguuaagccuuug

SEQ ID NO: 3652872 - RNA, 15 nt, Human
caguuaagccuuugg

SEQ ID NO: 3652873 - RNA, 23 nt, Human
ccugccagugccuuaccuccugc

SEQ ID NO: 3652874 - RNA, 15 nt, Human
ccugccaucuuccca

SEQ ID NO: 3652875 - RNA, 16 nt, Human
ccugccaucuucccag

SEQ ID NO: 3652876 - RNA, 18 nt, Human
ccugcccaagcccaggcc

SEQ ID NO: 3652877 - RNA, 21 nt, Human
ccugcccacaagucccagcgc

SEQ ID NO: 3652878 - RNA, 19 nt, Human
ccugcccacaccuccuggg

SEQ ID NO: 3652879 - RNA, 18 nt, Human
ccugcccaccugccuggc

SEQ ID NO: 3652880 - RNA, 19 nt, Human
ccugcccaccuggccucug

SEQ ID NO: 3652881 - RNA, 15 nt, Human
ccugcccagacaaga

SEQ ID NO: 3652882 - RNA, 12 nt, Human
ccugcccaggcc

SEQ ID NO: 3652883 - RNA, 18 nt, Human
ccugcccaggccccugcc

SEQ ID NO: 3652884 - RNA, 21 nt, Human
ccugcccaggccccugccacc

SEQ ID NO: 3652885 - RNA, 22 nt, Human
ccugcccaggccggccagccuc

SEQ ID NO: 3652886 - RNA, 23 nt, Human
ccugcccaggccggccagccuca

SEQ ID NO: 3652887 - RNA, 16 nt, Human
ccugcccaguccccca

SEQ ID NO: 3652888 - RNA, 21 nt, Human
ccugcccagucccccaacccc

SEQ ID NO: 3652889 - RNA, 16 nt, Human
ccugcccaucugggaa

SEQ ID NO: 3652890 - RNA, 15 nt, Human
cauaugugaucuguc

SEQ ID NO: 3652891 - RNA, 16 nt, Human
cauaugugaucugucu

SEQ ID NO: 3652892 - RNA, 20 nt, Human
cauaugugaucugucuugua

SEQ ID NO: 3652893 - RNA, 22 nt, Human
cauaugugaucugucuuguaau

SEQ ID NO: 3652894 - RNA, 18 nt, Human
cauauguugaauacuuuu

SEQ ID NO: 3652895 - RNA, 16 nt, Human
cauauguugcucaguc

SEQ ID NO: 3652896 - RNA, 15 nt, Human
cauauuaauauauuu

SEQ ID NO: 3652897 - RNA, 17 nt, Human
cauauuacaauauuugu

SEQ ID NO: 3652898 - RNA, 22 nt, Human
cauauuacaauauuugugugcu

SEQ ID NO: 3652899 - RNA, 20 nt, Human
cauauuaccacagacauacu

SEQ ID NO: 3652900 - RNA, 15 nt, Human
cauauuagaaaacuu

SEQ ID NO: 3652901 - RNA, 17 nt, Human
cauauuagaaaacuuug

SEQ ID NO: 3652902 - RNA, 18 nt, Human
cauauuagacuucuguuu

SEQ ID NO: 3652903 - RNA, 20 nt, Human
cauauuagaggggaaaagcu

SEQ ID NO: 3652904 - RNA, 14 nt, Human
cauauuaggaaaau

SEQ ID NO: 3652905 - RNA, 17 nt, Human
cauauuauaaaggauaa

SEQ ID NO: 3652906 - RNA, 22 nt, Human
cauauuauaaaggauaaagaag

SEQ ID NO: 3652907 - RNA, 14 nt, Human
cauauuauaucaga

SEQ ID NO: 3652908 - RNA, 16 nt, Human
cauauuauaucagacu

SEQ ID NO: 3652909 - RNA, 14 nt, Human
cauauucaggaagc

SEQ ID NO: 3652910 - RNA, 17 nt, Human
cauauuccugcagccug

SEQ ID NO: 3652911 - RNA, 16 nt, Human
cauauucuguuggaag

SEQ ID NO: 3652912 - RNA, 16 nt, Human
cauauugaauguuucc

SEQ ID NO: 3652913 - RNA, 12 nt, Human
cauauugacuuu

SEQ ID NO: 3652914 - RNA, 15 nt, Human
cauauugaugaaaag

SEQ ID NO: 3652915 - RNA, 17 nt, Human
cauauugauuuccguua

SEQ ID NO: 3652916 - RNA, 16 nt, Human
cauauugcacaugucu

SEQ ID NO: 3652917 - RNA, 19 nt, Human
cauauugcauacuauuaaa

SEQ ID NO: 3652918 - RNA, 22 nt, Human
cauauugcauacuauuaaacau

SEQ ID NO: 3652919 - RNA, 20 nt, Human
cauauugguauauccuuuuc

SEQ ID NO: 3652920 - RNA, 13 nt, Human
cauauuguaaaac

SEQ ID NO: 3652921 - RNA, 16 nt, Human
cauauuguaaaacagg

SEQ ID NO: 3652922 - RNA, 13 nt, Human
cauauuguacacu

SEQ ID NO: 3652923 - RNA, 20 nt, Human
cauauugugauucugccuuu

SEQ ID NO: 3652924 - RNA, 21 nt, Human
cauauugugcuucacaguaga

SEQ ID NO: 3652925 - RNA, 17 nt, Human
cauauuguggcacaagc

SEQ ID NO: 3652926 - RNA, 14 nt, Human
cauauuguguguaa

SEQ ID NO: 3652927 - RNA, 19 nt, Human
cauauuguuacugguacca

SEQ ID NO: 3652928 - RNA, 14 nt, Human
cauauuguuauuau

SEQ ID NO: 3652929 - RNA, 13 nt, Human
cauauuguugaaa

SEQ ID NO: 3652930 - RNA, 10 nt, Human
cauauuuaau

SEQ ID NO: 3652931 - RNA, 22 nt, Human
cauauuuaauguuuuaaaugua

SEQ ID NO: 3652932 - RNA, 18 nt, Human
cauauuuaccucagccug

SEQ ID NO: 3652933 - RNA, 17 nt, Human
cauauuuacuucuuaua

SEQ ID NO: 3652934 - RNA, 22 nt, Human
cauauuuauagcaauccauguu

SEQ ID NO: 3652935 - RNA, 10 nt, Human
cauauuugag

SEQ ID NO: 3652936 - RNA, 19 nt, Human
cauauuugcauauguauga

SEQ ID NO: 3652937 - RNA, 16 nt, Human
cauauuuguaaaauga

SEQ ID NO: 3652938 - RNA, 18 nt, Human
cauauuuguaaaaugaca

SEQ ID NO: 3652939 - RNA, 14 nt, Human
cauauuuguacuuu

SEQ ID NO: 3652940 - RNA, 18 nt, Human
cauauuuguacuuucugu

SEQ ID NO: 3652941 - RNA, 18 nt, Human
cauauuuguauaguugcu

SEQ ID NO: 3652942 - RNA, 23 nt, Human
cauauuuguuuaugguaaaaaau

SEQ ID NO: 3652943 - RNA, 17 nt, Human
cauauuuuaaacagagg

SEQ ID NO: 3652944 - RNA, 15 nt, Human
cauauuuuaauuuca

SEQ ID NO: 3652945 - RNA, 18 nt, Human
cauauuuuacuuggaaau

SEQ ID NO: 3652946 - RNA, 23 nt, Human
cauauuuuacuuggaaauauuaa

SEQ ID NO: 3652947 - RNA, 17 nt, Human
cauauuuuauagaacuu

SEQ ID NO: 3652948 - RNA, 19 nt, Human
cauauuuuuuauaucugga

SEQ ID NO: 3652949 - RNA, 15 nt, Human
cauauuuuuuuccuu

SEQ ID NO: 3652950 - RNA, 18 nt, Human
caucaaaccuuugaguag

SEQ ID NO: 3652951 - RNA, 23 nt, Human
caucaaagaggcugaggcuggca

SEQ ID NO: 3652952 - RNA, 19 nt, Human
caucaaauggaagacacau

SEQ ID NO: 3652953 - RNA, 16 nt, Human
caucaacaaagaaaua

SEQ ID NO: 3652954 - RNA, 10 nt, Human
caucaacuga

SEQ ID NO: 3652955 - RNA, 14 nt, Human
caucaacugaauga

SEQ ID NO: 3652956 - RNA, 16 nt, Human
caucaagaagggcugc

SEQ ID NO: 3652957 - RNA, 19 nt, Human
caucaagaagguagcuuga

SEQ ID NO: 3652958 - RNA, 15 nt, Human
caucaagacuuugcu

SEQ ID NO: 3652959 - RNA, 12 nt, Human
caucaagagaau

SEQ ID NO: 3652960 - RNA, 14 nt, Human
caucaagaugugac

SEQ ID NO: 3652961 - RNA, 23 nt, Human
caucaagcacagaaggaggagga

SEQ ID NO: 3652962 - RNA, 16 nt, Human
caucaaggcacugccu

SEQ ID NO: 3652963 - RNA, 22 nt, Human
caucaauaguguccuaugcaau

SEQ ID NO: 3652964 - RNA, 23 nt, Human
caucaauaguguccuaugcaaua

SEQ ID NO: 3652965 - RNA, 19 nt, Human
caucaauauugucauuccu

SEQ ID NO: 3652966 - RNA, 11 nt, Human
caucaauguuc

SEQ ID NO: 3652967 - RNA, 14 nt, Human
caucaauguucauu

SEQ ID NO: 3652968 - RNA, 16 nt, Human
caucaauuaaaggcaa

SEQ ID NO: 3652969 - RNA, 16 nt, Human
caucaauuauagaaag

SEQ ID NO: 3652970 - RNA, 14 nt, Human
caucaauucccauu

SEQ ID NO: 3652971 - RNA, 11 nt, Human
caucacacaca

SEQ ID NO: 3652972 - RNA, 12 nt, Human
caucacacacac

SEQ ID NO: 3652973 - RNA, 12 nt, Human
caucacacacau

SEQ ID NO: 3652974 - RNA, 13 nt, Human
caucacacacaug

SEQ ID NO: 3652975 - RNA, 19 nt, Human
caucacacugggugguggc

SEQ ID NO: 3652976 - RNA, 19 nt, Human
caucacagcagccuccaac

SEQ ID NO: 3652977 - RNA, 22 nt, Human
caucacaggacacggggcagug

SEQ ID NO: 3652978 - RNA, 15 nt, Human
caucacagggcagag

SEQ ID NO: 3652979 - RNA, 21 nt, Human
caucacagggugggccucggc

SEQ ID NO: 3652980 - RNA, 22 nt, Human
caucacagggugggccucggcc

SEQ ID NO: 3652981 - RNA, 19 nt, Human
caucacaggguugggccca

SEQ ID NO: 3652982 - RNA, 22 nt, Human
caucacaggguugggcccagau

SEQ ID NO: 3652983 - RNA, 13 nt, Human
caucacaguuuug

SEQ ID NO: 3652984 - RNA, 13 nt, Human
caucaccacaguu

SEQ ID NO: 3652985 - RNA, 14 nt, Human
caucacccucuucc

SEQ ID NO: 3652986 - RNA, 21 nt, Human
caucacccucuuccugugauc

SEQ ID NO: 3652987 - RNA, 20 nt, Human
caucacccuuaccaugugcc

SEQ ID NO: 3652988 - RNA, 19 nt, Human
caucaccgacgcgucuccu

SEQ ID NO: 3652989 - RNA, 16 nt, Human
caucaccucagauggc

SEQ ID NO: 3652990 - RNA, 17 nt, Human
caucaccucagauggca

SEQ ID NO: 3652991 - RNA, 18 nt, Human
caucaccucaggccaggu

SEQ ID NO: 3652992 - RNA, 13 nt, Human
caucaccuccacc

SEQ ID NO: 3652993 - RNA, 23 nt, Human
caucaccuccccccccccgccac

SEQ ID NO: 3652994 - RNA, 14 nt, Human
caucaccugccugu

SEQ ID NO: 3652995 - RNA, 22 nt, Human
caucaccuuagaccaccaagcc

SEQ ID NO: 3652996 - RNA, 18 nt, Human
caucaccuuaggcaggga

SEQ ID NO: 3652997 - RNA, 20 nt, Human
caucacguguacuggcuccu

SEQ ID NO: 3652998 - RNA, 13 nt, Human
caucacuccccuc

SEQ ID NO: 3652999 - RNA, 18 nt, Human
caucacugcgccacugcu

SEQ ID NO: 3653000 - RNA, 19 nt, Human
caucacuggagcaccaggc

SEQ ID NO: 3653001 - RNA, 13 nt, Human
caucacuuaaaac

SEQ ID NO: 3653002 - RNA, 14 nt, Human
caucacuuaaaaca

SEQ ID NO: 3653003 - RNA, 12 nt, Human
caucacuucccu

SEQ ID NO: 3653004 - RNA, 20 nt, Human
caucacuugaauccuagggc

SEQ ID NO: 3653005 - RNA, 23 nt, Human
caucacuugaauccuagggccug

SEQ ID NO: 3653006 - RNA, 15 nt, Human
caucacuuuucagug

SEQ ID NO: 3653007 - RNA, 16 nt, Human
caucacuuuucaguga

SEQ ID NO: 3653008 - RNA, 22 nt, Human
caucagaaagcuuuauuuugag

SEQ ID NO: 3653009 - RNA, 11 nt, Human
caucagaaagg

SEQ ID NO: 3653010 - RNA, 16 nt, Human
caucagaaagggaggg

SEQ ID NO: 3653011 - RNA, 18 nt, Human
caucagaaagggagggcu

SEQ ID NO: 3653012 - RNA, 21 nt, Human
caucagaaagggagggcucug

SEQ ID NO: 3653013 - RNA, 24 nt, Human
caucagaaagggagggcucugagg

SEQ ID NO: 3653014 - RNA, 11 nt, Human
caucagaaaua

SEQ ID NO: 3653015 - RNA, 19 nt, Human
caucagaaauaauaaaaaa

SEQ ID NO: 3653016 - RNA, 14 nt, Human
caucagaacagcug

SEQ ID NO: 3653017 - RNA, 17 nt, Human
caucagaacagcuguug

SEQ ID NO: 3653018 - RNA, 14 nt, Human
ccuggucuguagaa

SEQ ID NO: 3653019 - RNA, 23 nt, Human
ccuggugacaucagguuuuuccc

SEQ ID NO: 3653020 - RNA, 17 nt, Human
ccuggugaccccuuuuc

SEQ ID NO: 3653021 - RNA, 17 nt, Human
ccuggugcacuggcccc

SEQ ID NO: 3653022 - RNA, 19 nt, Human
ccuggugcacuggccccac

SEQ ID NO: 3653023 - RNA, 12 nt, Human
ccuggugcccug

SEQ ID NO: 3653024 - RNA, 9 nt, Human
ccuggugcu

SEQ ID NO: 3653025 - RNA, 12 nt, Human
ccuggugcucuc

SEQ ID NO: 3653026 - RNA, 15 nt, Human
ccuggugcucucugc

SEQ ID NO: 3653027 - RNA, 17 nt, Human
ccuggugcucucugcca

SEQ ID NO: 3653028 - RNA, 20 nt, Human
ccuggugcugccucuaccug

SEQ ID NO: 3653029 - RNA, 12 nt, Human
ccuggugcugcu

SEQ ID NO: 3653030 - RNA, 15 nt, Human
ccuggugcuuccaaa

SEQ ID NO: 3653031 - RNA, 20 nt, Human
ccuggugcuucuccucuccu

SEQ ID NO: 3653032 - RNA, 12 nt, Human
ccugguggcagc

SEQ ID NO: 3653033 - RNA, 14 nt, Human
ccugguggcagcuc

SEQ ID NO: 3653034 - RNA, 15 nt, Human
ccugguggcagcugc

SEQ ID NO: 3653035 - RNA, 16 nt, Human
ccugguggcagcugcg

SEQ ID NO: 3653036 - RNA, 13 nt, Human
ccugguggcagug

SEQ ID NO: 3653037 - RNA, 18 nt, Human
ccugguggccaugcuccu

SEQ ID NO: 3653038 - RNA, 24 nt, Human
ccugguggccaugcuccucuuccc

SEQ ID NO: 3653039 - RNA, 23 nt, Human
ccugguggcccucuccccugccc

SEQ ID NO: 3653040 - RNA, 14 nt, Human
ccuggugggccaac

SEQ ID NO: 3653041 - RNA, 23 nt, Human
ccuggugggccaacaaagaacac

SEQ ID NO: 3653042 - RNA, 18 nt, Human
ccuggugggccuccucug

SEQ ID NO: 3653043 - RNA, 21 nt, Human
ccugguggggcagcuccucug

SEQ ID NO: 3653044 - RNA, 23 nt, Human
ccugguggguccaggggccccuc

SEQ ID NO: 3653045 - RNA, 21 nt, Human
ccuggugguggcucgggaggc

SEQ ID NO: 3653046 - RNA, 13 nt, Human
ccuggugguucac

SEQ ID NO: 3653047 - RNA, 21 nt, Human
ccuggugguugcuguuuuccu

SEQ ID NO: 3653048 - RNA, 20 nt, Human
ccuggugucaccccagagcc

SEQ ID NO: 3653049 - RNA, 23 nt, Human
ccuggugucaccccagagccaca

SEQ ID NO: 3653050 - RNA, 13 nt, Human
ccugguguggaag

SEQ ID NO: 3653051 - RNA, 20 nt, Human
ccugguuaaauaaggcaggg

SEQ ID NO: 3653052 - RNA, 23 nt, Human
ccugguuauugauguggcccugg

SEQ ID NO: 3653053 - RNA, 13 nt, Human
ccugguucccguu

SEQ ID NO: 3653054 - RNA, 21 nt, Human
ccugguuccggaauccugucc

SEQ ID NO: 3653055 - RNA, 13 nt, Human
ccugguucucauc

SEQ ID NO: 3653056 - RNA, 15 nt, Human
ccugguucucaucuu

SEQ ID NO: 3653057 - RNA, 16 nt, Human
ccugguucucaucuuu

SEQ ID NO: 3653058 - RNA, 14 nt, Human
ccugguugaagaag

SEQ ID NO: 3653059 - RNA, 16 nt, Human
ccugguuguguguccc

SEQ ID NO: 3653060 - RNA, 17 nt, Human
ccugguuucacuggccc

SEQ ID NO: 3653061 - RNA, 21 nt, Human
ccugguuucauaacuuccugu

SEQ ID NO: 3653062 - RNA, 16 nt, Human
ccugguuuccugcccu

SEQ ID NO: 3653063 - RNA, 19 nt, Human
ccugguuuccugcccuggg

SEQ ID NO: 3653064 - RNA, 22 nt, Human
ccugguuuccugcccugggagg

SEQ ID NO: 3653065 - RNA, 18 nt, Human
ccugguuuuuguagccuu

SEQ ID NO: 3653066 - RNA, 19 nt, Human
ccuguaaaaaaaaaaaagu

SEQ ID NO: 3653067 - RNA, 16 nt, Human
ccuguaaacacucagc

SEQ ID NO: 3653068 - RNA, 13 nt, Human
ccuguaaaccuga

SEQ ID NO: 3653069 - RNA, 19 nt, Human
ccuguaaaugguguacaua

SEQ ID NO: 3653070 - RNA, 13 nt, Human
ccuguaaauuauu

SEQ ID NO: 3653071 - RNA, 17 nt, Human
ccuguaaauuauuuuaa

SEQ ID NO: 3653072 - RNA, 23 nt, Human
ccuguaaauuauuuuaaauuaua

SEQ ID NO: 3653073 - RNA, 22 nt, Human
ccuguaacacaagccacagaag

SEQ ID NO: 3653074 - RNA, 17 nt, Human
ccuguaacacuccucug

SEQ ID NO: 3653075 - RNA, 18 nt, Human
ccuguaacacuccucugc

SEQ ID NO: 3653076 - RNA, 18 nt, Human
ccuguaacuugagaguag

SEQ ID NO: 3653077 - RNA, 17 nt, Human
ccuguaagccaaagaaa

SEQ ID NO: 3653078 - RNA, 19 nt, Human
ccuguaagccugcaagccu

SEQ ID NO: 3653079 - RNA, 15 nt, Human
ccuguaauaaauaug

SEQ ID NO: 3653080 - RNA, 16 nt, Human
ccuguaauaaauauga

SEQ ID NO: 3653081 - RNA, 14 nt, Human
ccuguaaucccagc

SEQ ID NO: 3653082 - RNA, 17 nt, Human
ccuguaaucccagcacu

SEQ ID NO: 3653083 - RNA, 20 nt, Human
ccuguaaucccagcacuuug

SEQ ID NO: 3653084 - RNA, 16 nt, Human
ccuguaaucccagcag

SEQ ID NO: 3653085 - RNA, 15 nt, Human
ccuguaaucccagcu

SEQ ID NO: 3653086 - RNA, 18 nt, Human
ccuguaaucccagcuacu

SEQ ID NO: 3653087 - RNA, 17 nt, Human
ccuguaauucaguguau

SEQ ID NO: 3653088 - RNA, 21 nt, Human
ccuguacaaaagggacaugaa

SEQ ID NO: 3653089 - RNA, 17 nt, Human
ccuguacacaacucacu

SEQ ID NO: 3653090 - RNA, 14 nt, Human
ccuguacagucugu

SEQ ID NO: 3653091 - RNA, 16 nt, Human
ccuguacagucugucu

SEQ ID NO: 3653092 - RNA, 17 nt, Human
ccuguacagucugucuu

SEQ ID NO: 3653093 - RNA, 17 nt, Human
ccuguaccccagcacuu

SEQ ID NO: 3653094 - RNA, 16 nt, Human
ccuguaccucauccca

SEQ ID NO: 3653095 - RNA, 12 nt, Human
ccuguaccucuu

SEQ ID NO: 3653096 - RNA, 23 nt, Human
ccuguaccuuuugaggagcccca

SEQ ID NO: 3653097 - RNA, 13 nt, Human
ccuguacucagga

SEQ ID NO: 3653098 - RNA, 14 nt, Human
ccuguacucaggag

SEQ ID NO: 3653099 - RNA, 22 nt, Human
ccuguacucaggaggcugaggg

SEQ ID NO: 3653100 - RNA, 18 nt, Human
ccuguacucgcuugugca

SEQ ID NO: 3653101 - RNA, 14 nt, Human
ccuguacugccugc

SEQ ID NO: 3653102 - RNA, 12 nt, Human
ccuguacuuuuu

SEQ ID NO: 3653103 - RNA, 20 nt, Human
ccuguagaauagccuguggc

SEQ ID NO: 3653104 - RNA, 23 nt, Human
ccuguagaccuagggaggaccuu

SEQ ID NO: 3653105 - RNA, 15 nt, Human
ccuguagagugggag

SEQ ID NO: 3653106 - RNA, 16 nt, Human
ccuguagagugggagc

SEQ ID NO: 3653107 - RNA, 19 nt, Human
caucuuuccugauggcagg

SEQ ID NO: 3653108 - RNA, 20 nt, Human
caucuuucucuuuucuaaaa

SEQ ID NO: 3653109 - RNA, 17 nt, Human
caucuuucugcuccuga

SEQ ID NO: 3653110 - RNA, 23 nt, Human
caucuuucuucuauuuuauuccc

SEQ ID NO: 3653111 - RNA, 11 nt, Human
caucuuugaaa

SEQ ID NO: 3653112 - RNA, 13 nt, Human
caucuuugaugug

SEQ ID NO: 3653113 - RNA, 14 nt, Human
caucuuugaugugu

SEQ ID NO: 3653114 - RNA, 22 nt, Human
caucuuugccuugggcugcucc

SEQ ID NO: 3653115 - RNA, 12 nt, Human
caucuuugggga

SEQ ID NO: 3653116 - RNA, 13 nt, Human
caucuuugugaag

SEQ ID NO: 3653117 - RNA, 14 nt, Human
caucuuugugaagg

SEQ ID NO: 3653118 - RNA, 14 nt, Human
caucuuuucuugcc

SEQ ID NO: 3653119 - RNA, 21 nt, Human
caucuuuugaggcuucuguuc

SEQ ID NO: 3653120 - RNA, 18 nt, Human
caucuuuuguauuaagaa

SEQ ID NO: 3653121 - RNA, 22 nt, Human
caucuuuuguauuaagaaagga

SEQ ID NO: 3653122 - RNA, 16 nt, Human
caucuuuugugagaug

SEQ ID NO: 3653123 - RNA, 23 nt, Human
caucuuuuguuacucuugggaca

SEQ ID NO: 3653124 - RNA, 18 nt, Human
caucuuuuuuguuaacug

SEQ ID NO: 3653125 - RNA, 18 nt, Human
caugaaaaaaggacaauu

SEQ ID NO: 3653126 - RNA, 12 nt, Human
caugaaaaagca

SEQ ID NO: 3653127 - RNA, 13 nt, Human
caugaaaacacau

SEQ ID NO: 3653128 - RNA, 16 nt, Human
caugaaaacacauuuu

SEQ ID NO: 3653129 - RNA, 21 nt, Human
caugaaaacacauuuuucuua

SEQ ID NO: 3653130 - RNA, 16 nt, Human
caugaaaacguuuuau

SEQ ID NO: 3653131 - RNA, 15 nt, Human
caugaaaaugcaaca

SEQ ID NO: 3653132 - RNA, 16 nt, Human
caugaaaauguguguu

SEQ ID NO: 3653133 - RNA, 14 nt, Human
caugaaaauuuuaa

SEQ ID NO: 3653134 - RNA, 17 nt, Human
caugaaaauuuuaaaaa

SEQ ID NO: 3653135 - RNA, 19 nt, Human
caugaaaauuuuaaaaaua

SEQ ID NO: 3653136 - RNA, 13 nt, Human
caugaaacaaagc

SEQ ID NO: 3653137 - RNA, 14 nt, Human
caugaaacuccacc

SEQ ID NO: 3653138 - RNA, 22 nt, Human
caugaaauauagaucaguuaua

SEQ ID NO: 3653139 - RNA, 15 nt, Human
caugaaauaugcauc

SEQ ID NO: 3653140 - RNA, 19 nt, Human
caugaaaugaacacaaauu

SEQ ID NO: 3653141 - RNA, 19 nt, Human
caugaaaugugaauuuuua

SEQ ID NO: 3653142 - RNA, 23 nt, Human
caugaaaugugaauuuuuauugu

SEQ ID NO: 3653143 - RNA, 14 nt, Human
caugaaauuacuua

SEQ ID NO: 3653144 - RNA, 17 nt, Human
caugaaauuuuuguaaa

SEQ ID NO: 3653145 - RNA, 17 nt, Human
caugaacacacuguguc

SEQ ID NO: 3653146 - RNA, 19 nt, Human
caugaacacaucagcuagc

SEQ ID NO: 3653147 - RNA, 23 nt, Human
caugaacagaaaacauucugauu

SEQ ID NO: 3653148 - RNA, 17 nt, Human
caugaacuuagauuuua

SEQ ID NO: 3653149 - RNA, 15 nt, Human
caugaagaauagaaa

SEQ ID NO: 3653150 - RNA, 14 nt, Human
caugaagacaggac

SEQ ID NO: 3653151 - RNA, 16 nt, Human
caugaagacaggacag

SEQ ID NO: 3653152 - RNA, 15 nt, Human
caugaagaccuuuuu

SEQ ID NO: 3653153 - RNA, 17 nt, Human
caugaagaccuuuuucu

SEQ ID NO: 3653154 - RNA, 22 nt, Human
caugaagaccuuuuucugcacu

SEQ ID NO: 3653155 - RNA, 15 nt, Human
caugaagagaagcaa

SEQ ID NO: 3653156 - RNA, 15 nt, Human
caugaagagcaaaaa

SEQ ID NO: 3653157 - RNA, 17 nt, Human
caugaagagcaaaaaua

SEQ ID NO: 3653158 - RNA, 19 nt, Human
caugaagagcaaaaauauc

SEQ ID NO: 3653159 - RNA, 20 nt, Human
caugaagauaaacacagcug

SEQ ID NO: 3653160 - RNA, 22 nt, Human
caugaagcccaagugaaaucaa

SEQ ID NO: 3653161 - RNA, 12 nt, Human
caugaagccugu

SEQ ID NO: 3653162 - RNA, 11 nt, Human
caugaagccuu

SEQ ID NO: 3653163 - RNA, 15 nt, Human
ccuggaagacagaga

SEQ ID NO: 3653164 - RNA, 22 nt, Human
ccuggaagacagagaccuccug

SEQ ID NO: 3653165 - RNA, 20 nt, Human
ccuggaagagcccagucugu

SEQ ID NO: 3653166 - RNA, 15 nt, Human
ccuggaagcagugcc

SEQ ID NO: 3653167 - RNA, 17 nt, Human
ccuggaagcagugccca

SEQ ID NO: 3653168 - RNA, 19 nt, Human
ccuggaagcagugcccagg

SEQ ID NO: 3653169 - RNA, 13 nt, Human
ccuggaagcugug

SEQ ID NO: 3653170 - RNA, 17 nt, Human
ccuggaagcuguguccu

SEQ ID NO: 3653171 - RNA, 23 nt, Human
ccuggaagcuguguccuugcacc

SEQ ID NO: 3653172 - RNA, 17 nt, Human
ccuggaagggagguggg

SEQ ID NO: 3653173 - RNA, 11 nt, Human
ccuggaagggc

SEQ ID NO: 3653174 - RNA, 12 nt, Human
ccuggaagggcu

SEQ ID NO: 3653175 - RNA, 24 nt, Human
ccuggaagggcuagaaccuguaga

SEQ ID NO: 3653176 - RNA, 20 nt, Human
ccuggaaugaguugaggcca

SEQ ID NO: 3653177 - RNA, 22 nt, Human
ccuggaauuagcuuggggccag

SEQ ID NO: 3653178 - RNA, 15 nt, Human
ccuggaauugccagc

SEQ ID NO: 3653179 - RNA, 17 nt, Human
ccuggaauugccagcug

SEQ ID NO: 3653180 - RNA, 13 nt, Human
ccuggacaaaccc

SEQ ID NO: 3653181 - RNA, 15 nt, Human
ccuggacagcugugc

SEQ ID NO: 3653182 - RNA, 18 nt, Human
ccuggacagcugugccuc

SEQ ID NO: 3653183 - RNA, 22 nt, Human
ccuggacagcugugccucgcuc

SEQ ID NO: 3653184 - RNA, 18 nt, Human
ccuggacauagagaggga

SEQ ID NO: 3653185 - RNA, 21 nt, Human
ccuggacaugaagauucuuuc

SEQ ID NO: 3653186 - RNA, 20 nt, Human
ccuggacauuugccuugcug

SEQ ID NO: 3653187 - RNA, 12 nt, Human
ccuggaccccag

SEQ ID NO: 3653188 - RNA, 14 nt, Human
ccuggaccccagcc

SEQ ID NO: 3653189 - RNA, 15 nt, Human
ccuggaccccagccu

SEQ ID NO: 3653190 - RNA, 16 nt, Human
ccuggaccccagccuc

SEQ ID NO: 3653191 - RNA, 16 nt, Human
ccuggacccccagcuu

SEQ ID NO: 3653192 - RNA, 22 nt, Human
ccuggacccguucaugggggag

SEQ ID NO: 3653193 - RNA, 14 nt, Human
ccuggacccugugg

SEQ ID NO: 3653194 - RNA, 17 nt, Human
ccuggaccucugacagc

SEQ ID NO: 3653195 - RNA, 18 nt, Human
ccuggaccucugacagca

SEQ ID NO: 3653196 - RNA, 16 nt, Human
ccuggaccugccuccu

SEQ ID NO: 3653197 - RNA, 22 nt, Human
ccuggaccugccuccugccugc

SEQ ID NO: 3653198 - RNA, 23 nt, Human
ccuggaccugccuccugccugcc

SEQ ID NO: 3653199 - RNA, 15 nt, Human
ccuggacuagaggga

SEQ ID NO: 3653200 - RNA, 22 nt, Human
ccuggacuagagggaccucucc

SEQ ID NO: 3653201 - RNA, 17 nt, Human
ccuggacucccguguag

SEQ ID NO: 3653202 - RNA, 13 nt, Human
ccuggacugggag

SEQ ID NO: 3653203 - RNA, 17 nt, Human
ccuggacugggagguag

SEQ ID NO: 3653204 - RNA, 18 nt, Human
ccuggacugggagguaga

SEQ ID NO: 3653205 - RNA, 20 nt, Human
ccuggacugugugcucagga

SEQ ID NO: 3653206 - RNA, 14 nt, Human
ccuggacuguuuuc

SEQ ID NO: 3653207 - RNA, 24 nt, Human
ccuggacuuaagcaucuggcucua

SEQ ID NO: 3653208 - RNA, 16 nt, Human
ccuggacuugccucug

SEQ ID NO: 3653209 - RNA, 13 nt, Human
ccuggacuuuccu

SEQ ID NO: 3653210 - RNA, 15 nt, Human
ccuggacuuuccugc

SEQ ID NO: 3653211 - RNA, 17 nt, Human
ccuggacuuuccugcaa

SEQ ID NO: 3653212 - RNA, 19 nt, Human
ccuggacuuuccugcaacu

SEQ ID NO: 3653213 - RNA, 16 nt, Human
ccuggagaacuagaga

SEQ ID NO: 3653214 - RNA, 17 nt, Human
ccuggagacguggaacc

SEQ ID NO: 3653215 - RNA, 18 nt, Human
ccuggagacugcccagcu

SEQ ID NO: 3653216 - RNA, 19 nt, Human
ccuggagacuuagggcacc

SEQ ID NO: 3653217 - RNA, 23 nt, Human
ccuggagacuuagggcaccaggg

SEQ ID NO: 3653218 - RNA, 21 nt, Human
ccuggagagccagaaccugga

SEQ ID NO: 3653219 - RNA, 22 nt, Human
ccuggagagccagaaccuggag

SEQ ID NO: 3653220 - RNA, 19 nt, Human
ccuggagagcuagaaccua

SEQ ID NO: 3653221 - RNA, 17 nt, Human
ccuggagagucucacuc

SEQ ID NO: 3653222 - RNA, 22 nt, Human
ccuggagaguucaauggcugcu

SEQ ID NO: 3653223 - RNA, 16 nt, Human
ccuggagauccuccug

SEQ ID NO: 3653224 - RNA, 16 nt, Human
ccuggagauggggaga

SEQ ID NO: 3653225 - RNA, 16 nt, Human
ccuggagcacaaagac

SEQ ID NO: 3653226 - RNA, 13 nt, Human
ccuggagcagaag

SEQ ID NO: 3653227 - RNA, 17 nt, Human
ccuggagcagaagcagc

SEQ ID NO: 3653228 - RNA, 13 nt, Human
ccuggagcaggcc

SEQ ID NO: 3653229 - RNA, 14 nt, Human
ccuggagcaggccu

SEQ ID NO: 3653230 - RNA, 19 nt, Human
ccuggagcaggccuugcgc

SEQ ID NO: 3653231 - RNA, 13 nt, Human
ccuggagcccaga

SEQ ID NO: 3653232 - RNA, 17 nt, Human
ccuggagcccagaggag

SEQ ID NO: 3653233 - RNA, 13 nt, Human
ccuggagccccac

SEQ ID NO: 3653234 - RNA, 16 nt, Human
ccuggagccccugggu

SEQ ID NO: 3653235 - RNA, 21 nt, Human
ccuggagcccuccgccuucac

SEQ ID NO: 3653236 - RNA, 22 nt, Human
ccuggagcguuucuagcaagug

SEQ ID NO: 3653237 - RNA, 14 nt, Human
ccuggagcuccugg

SEQ ID NO: 3653238 - RNA, 20 nt, Human
ccuggaggaccugagccugc

SEQ ID NO: 3653239 - RNA, 18 nt, Human
ccuggaggacggccggcu

SEQ ID NO: 3653240 - RNA, 18 nt, Human
ccuggaggauugcaggug

SEQ ID NO: 3653241 - RNA, 14 nt, Human
ccuggaggcccagu

SEQ ID NO: 3653242 - RNA, 17 nt, Human
ccuggaggcggugcggc

SEQ ID NO: 3653243 - RNA, 19 nt, Human
ccuggaggcucaaauuuug

SEQ ID NO: 3653244 - RNA, 20 nt, Human
ccuggaggcucaaauuuuga

SEQ ID NO: 3653245 - RNA, 21 nt, Human
ccuggagggaagaguggaggu

SEQ ID NO: 3653246 - RNA, 19 nt, Human
ccuggagggcuagaaccua

SEQ ID NO: 3653247 - RNA, 20 nt, Human
ccuggagggcuagaaccuag

SEQ ID NO: 3653248 - RNA, 21 nt, Human
ccuggagggcuagaaccugga

SEQ ID NO: 3653249 - RNA, 22 nt, Human
ccuggaggggcuagaaccuaga

SEQ ID NO: 3653250 - RNA, 19 nt, Human
ccuggaggggcuggggacu

SEQ ID NO: 3653251 - RNA, 21 nt, Human
ccuggagguggcugagccccu

SEQ ID NO: 3653252 - RNA, 15 nt, Human
ccuggaguauaauau

SEQ ID NO: 3653253 - RNA, 22 nt, Human
ccuggaguguaugacugcacau

SEQ ID NO: 3653254 - RNA, 16 nt, Human
ccuggaguucugguuc

SEQ ID NO: 3653255 - RNA, 17 nt, Human
ccuggaguucugguucc

SEQ ID NO: 3653256 - RNA, 18 nt, Human
ccuggauauuauucuugu

SEQ ID NO: 3653257 - RNA, 23 nt, Human
ccuggaucacgacgcugcagagc

SEQ ID NO: 3653258 - RNA, 17 nt, Human
ccuggaucagcguggcc

SEQ ID NO: 3653259 - RNA, 20 nt, Human
ccuggaucagcguggccuug

SEQ ID NO: 3653260 - RNA, 18 nt, Human
ccuggauccccucugucu

SEQ ID NO: 3653261 - RNA, 22 nt, Human
ccuggaucuaccagcauaaaua

SEQ ID NO: 3653262 - RNA, 14 nt, Human
ccuggaugccaucc

SEQ ID NO: 3653263 - RNA, 14 nt, Human
ccuggaugcccccu

SEQ ID NO: 3653264 - RNA, 18 nt, Human
ccuggaugcccccugugg

SEQ ID NO: 3653265 - RNA, 17 nt, Human
ccuggauucauuuccug

SEQ ID NO: 3653266 - RNA, 19 nt, Human
ccuggauucauuuccugcc

SEQ ID NO: 3653267 - RNA, 23 nt, Human
ccuggcaagcuagaaccuggagg

SEQ ID NO: 3653268 - RNA, 12 nt, Human
ccuggcacacau

SEQ ID NO: 3653269 - RNA, 15 nt, Human
ccuggcacaggacug

SEQ ID NO: 3653270 - RNA, 17 nt, Human
ccuggcacagggcagug

SEQ ID NO: 3653271 - RNA, 21 nt, Human
ccuggcacagugucugggcug

SEQ ID NO: 3653272 - RNA, 19 nt, Human
ccugugccagcccagaggc

SEQ ID NO: 3653273 - RNA, 14 nt, Human
ccugugccagguga

SEQ ID NO: 3653274 - RNA, 13 nt, Human
ccugugcccccag

SEQ ID NO: 3653275 - RNA, 16 nt, Human
ccugugccuccaucag

SEQ ID NO: 3653276 - RNA, 15 nt, Human
ccugugccuccucac

SEQ ID NO: 3653277 - RNA, 21 nt, Human
ccugugccuccucacccccag

SEQ ID NO: 3653278 - RNA, 20 nt, Human
ccugugccucugggacugga

SEQ ID NO: 3653279 - RNA, 17 nt, Human
ccugugccuuuugccau

SEQ ID NO: 3653280 - RNA, 17 nt, Human
ccugugcuacuuugccu

SEQ ID NO: 3653281 - RNA, 23 nt, Human
ccugugcuacuuugccuuuugca

SEQ ID NO: 3653282 - RNA, 20 nt, Human
ccugugcuccgugccuccac

SEQ ID NO: 3653283 - RNA, 22 nt, Human
ccugugcugcccgucuucagcc

SEQ ID NO: 3653284 - RNA, 18 nt, Human
ccugugcugguguccuga

SEQ ID NO: 3653285 - RNA, 23 nt, Human
ccugugcugguguccugaccacc

SEQ ID NO: 3653286 - RNA, 24 nt, Human
ccugugcugguguccugaccaccc

SEQ ID NO: 3653287 - RNA, 19 nt, Human
ccuguggaacauaaaaagg

SEQ ID NO: 3653288 - RNA, 23 nt, Human
ccuguggaacauaaaaaggacau

SEQ ID NO: 3653289 - RNA, 15 nt, Human
ccuguggaacccagc

SEQ ID NO: 3653290 - RNA, 19 nt, Human
ccuguggaagagugugugu

SEQ ID NO: 3653291 - RNA, 16 nt, Human
ccuguggaagggacua

SEQ ID NO: 3653292 - RNA, 21 nt, Human
ccuguggaaugagugugcaug

SEQ ID NO: 3653293 - RNA, 23 nt, Human
ccuguggaaugagugugcaugga

SEQ ID NO: 3653294 - RNA, 14 nt, Human
ccuguggagacugg

SEQ ID NO: 3653295 - RNA, 18 nt, Human
ccuguggagcucagcccc

SEQ ID NO: 3653296 - RNA, 18 nt, Human
ccuguggaucaaauccag

SEQ ID NO: 3653297 - RNA, 20 nt, Human
ccuguggaugagcccucaga

SEQ ID NO: 3653298 - RNA, 17 nt, Human
ccuguggaugcugcugc

SEQ ID NO: 3653299 - RNA, 23 nt, Human
ccuguggcaucuuugccuugggc

SEQ ID NO: 3653300 - RNA, 22 nt, Human
ccuguggccccacccugggccc

SEQ ID NO: 3653301 - RNA, 18 nt, Human
ccuguggccuguguccca

SEQ ID NO: 3653302 - RNA, 21 nt, Human
ccuguggccugugucccauga

SEQ ID NO: 3653303 - RNA, 23 nt, Human
ccuguggccugugucccaugacc

SEQ ID NO: 3653304 - RNA, 21 nt, Human
ccuguggcgccgucuccaggg

SEQ ID NO: 3653305 - RNA, 17 nt, Human
ccuguggcggugccugg

SEQ ID NO: 3653306 - RNA, 18 nt, Human
ccuuggacaacuuuucuc

SEQ ID NO: 3653307 - RNA, 17 nt, Human
ccuuggacauccuccuc

SEQ ID NO: 3653308 - RNA, 18 nt, Human
ccuuggacauuuuauguc

SEQ ID NO: 3653309 - RNA, 15 nt, Human
ccuuggacuguguuu

SEQ ID NO: 3653310 - RNA, 15 nt, Human
ccuuggacuugagga

SEQ ID NO: 3653311 - RNA, 16 nt, Human
ccuuggagcuuacaua

SEQ ID NO: 3653312 - RNA, 12 nt, Human
ccuuggaggcca

SEQ ID NO: 3653313 - RNA, 16 nt, Human
ccuuggaggccagcca

SEQ ID NO: 3653314 - RNA, 16 nt, Human
ccuuggcaccaaagau

SEQ ID NO: 3653315 - RNA, 15 nt, Human
ccuuggcaccagaca

SEQ ID NO: 3653316 - RNA, 20 nt, Human
ccuuggcaccagacacccag

SEQ ID NO: 3653317 - RNA, 21 nt, Human
ccuuggcaccagacacccagg

SEQ ID NO: 3653318 - RNA, 22 nt, Human
ccuuggcaccagacacccagga

SEQ ID NO: 3653319 - RNA, 16 nt, Human
ccuuggcauagacaug

SEQ ID NO: 3653320 - RNA, 19 nt, Human
ccuuggccggcugugcuca

SEQ ID NO: 3653321 - RNA, 20 nt, Human
ccuuggccggcugugcucag

SEQ ID NO: 3653322 - RNA, 21 nt, Human
ccuuggccggcugugcucaga

SEQ ID NO: 3653323 - RNA, 11 nt, Human
ccuuggccuca

SEQ ID NO: 3653324 - RNA, 13 nt, Human
ccuuggccucaga

SEQ ID NO: 3653325 - RNA, 13 nt, Human
ccuuggccuggag

SEQ ID NO: 3653326 - RNA, 12 nt, Human
ccugucccaccu

SEQ ID NO: 3653327 - RNA, 16 nt, Human
ccugucccaccucuuc

SEQ ID NO: 3653328 - RNA, 16 nt, Human
ccugucccauggacac

SEQ ID NO: 3653329 - RNA, 19 nt, Human
ccugucccauggacacucc

SEQ ID NO: 3653330 - RNA, 14 nt, Human
ccuguccccacccu

SEQ ID NO: 3653331 - RNA, 13 nt, Human
ccuguccccaugc

SEQ ID NO: 3653332 - RNA, 15 nt, Human
ccugucccccagcuc

SEQ ID NO: 3653333 - RNA, 16 nt, Human
ccugucccccagcucu

SEQ ID NO: 3653334 - RNA, 19 nt, Human
ccugucccccagcucuggu

SEQ ID NO: 3653335 - RNA, 16 nt, Human
ccugucccccugacaa

SEQ ID NO: 3653336 - RNA, 23 nt, Human
ccugucccccugagaucagaguc

SEQ ID NO: 3653337 - RNA, 12 nt, Human
ccuguccccgca

SEQ ID NO: 3653338 - RNA, 18 nt, Human
ccuguccccgcacugggc

SEQ ID NO: 3653339 - RNA, 14 nt, Human
ccuguccccgcagc

SEQ ID NO: 3653340 - RNA, 14 nt, Human
ccuguccccucagc

SEQ ID NO: 3653341 - RNA, 15 nt, Human
ccuguccccucagcu

SEQ ID NO: 3653342 - RNA, 16 nt, Human
ccuguccccucagcuc

SEQ ID NO: 3653343 - RNA, 14 nt, Human
ccuguccccugcua

SEQ ID NO: 3653344 - RNA, 16 nt, Human
ccugucccucccaccu

SEQ ID NO: 3653345 - RNA, 17 nt, Human
ccugucccucccaccuc

SEQ ID NO: 3653346 - RNA, 20 nt, Human
ccugucccucccaccucugu

SEQ ID NO: 3653347 - RNA, 15 nt, Human
ccugucccucucagg

SEQ ID NO: 3653348 - RNA, 16 nt, Human
ccugucccucucaggc

SEQ ID NO: 3653349 - RNA, 13 nt, Human
ccugucccugcgc

SEQ ID NO: 3653350 - RNA, 19 nt, Human
ccugucccuggccaucucu

SEQ ID NO: 3653351 - RNA, 15 nt, Human
ccuguccgcccucuu

SEQ ID NO: 3653352 - RNA, 18 nt, Human
ccuguccuaaggaaccuu

SEQ ID NO: 3653353 - RNA, 13 nt, Human
ccuguccucacug

SEQ ID NO: 3653354 - RNA, 22 nt, Human
ccuguccucacugcucccugaa

SEQ ID NO: 3653355 - RNA, 16 nt, Human
ccuguccucccauccc

SEQ ID NO: 3653356 - RNA, 14 nt, Human
ccuguccuccucgg

SEQ ID NO: 3653357 - RNA, 23 nt, Human
ccuguccuccucggaucaccgag

SEQ ID NO: 3653358 - RNA, 14 nt, Human
ccuguccuccuggu

SEQ ID NO: 3653359 - RNA, 17 nt, Human
ccuguccucuuucagcu

SEQ ID NO: 3653360 - RNA, 19 nt, Human
ccuguccugaccugucuca

SEQ ID NO: 3653361 - RNA, 19 nt, Human
ccuguccugccuaaggcug

SEQ ID NO: 3653362 - RNA, 16 nt, Human
ccuguccugggcuggu

SEQ ID NO: 3653363 - RNA, 19 nt, Human
ccuguccuuagccuaggcc

SEQ ID NO: 3653364 - RNA, 14 nt, Human
ccugucgagacacu

SEQ ID NO: 3653365 - RNA, 20 nt, Human
ccugucgagacacuugccuu

SEQ ID NO: 3653366 - RNA, 16 nt, Human
ccugucgauuagacug

SEQ ID NO: 3653367 - RNA, 21 nt, Human
ccugucggagcccugucuccu

SEQ ID NO: 3653368 - RNA, 22 nt, Human
ccugucggagcccugucuccuc

SEQ ID NO: 3653369 - RNA, 13 nt, Human
ccugucggccugg

SEQ ID NO: 3653370 - RNA, 16 nt, Human
ccugucgggcuuugug

SEQ ID NO: 3653371 - RNA, 22 nt, Human
ccugucgggcuuugugugaagg

SEQ ID NO: 3653372 - RNA, 22 nt, Human
ccugucuagucucuccuguaag

SEQ ID NO: 3653373 - RNA, 15 nt, Human
ccugucucaccugga

SEQ ID NO: 3653374 - RNA, 16 nt, Human
ccugucucagccuccc

SEQ ID NO: 3653375 - RNA, 14 nt, Human
ccugucuccccucu

SEQ ID NO: 3653376 - RNA, 17 nt, Human
ccugucuccccucugcu

SEQ ID NO: 3653377 - RNA, 13 nt, Human
ccugucuccuuuc

SEQ ID NO: 3653378 - RNA, 21 nt, Human
ccugucucuagccacuuuggu

SEQ ID NO: 3653379 - RNA, 19 nt, Human
ccugucucucagggccagg

SEQ ID NO: 3653380 - RNA, 21 nt, Human
ccugucugccagccagcagcc

SEQ ID NO: 3653381 - RNA, 14 nt, Human
ccugucugccccag

SEQ ID NO: 3653382 - RNA, 19 nt, Human
ccugucugccccagcccag

SEQ ID NO: 3653383 - RNA, 21 nt, Human
ccugucugucugucuguccca

SEQ ID NO: 3653384 - RNA, 22 nt, Human
ccugucugucugucugucccaa

SEQ ID NO: 3653385 - RNA, 19 nt, Human
ccugucugugaagagcaag

SEQ ID NO: 3653386 - RNA, 22 nt, Human
ccugucuuauccuccaccgucu

SEQ ID NO: 3653387 - RNA, 19 nt, Human
ccugucuucagagaaccca

SEQ ID NO: 3653388 - RNA, 14 nt, Human
ccugucuucccagg

SEQ ID NO: 3653389 - RNA, 22 nt, Human
ccugucuuccugcauucaccca

SEQ ID NO: 3653390 - RNA, 13 nt, Human
ccugucuucugcu

SEQ ID NO: 3653391 - RNA, 15 nt, Human
ccugucuucugcuuu

SEQ ID NO: 3653392 - RNA, 13 nt, Human
ccugucuuuccua

SEQ ID NO: 3653393 - RNA, 14 nt, Human
ccugugaaauacca

SEQ ID NO: 3653394 - RNA, 19 nt, Human
ccugugaaauaguucaaag

SEQ ID NO: 3653395 - RNA, 15 nt, Human
ccugugaacccagga

SEQ ID NO: 3653396 - RNA, 14 nt, Human
ccugugacaaaauu

SEQ ID NO: 3653397 - RNA, 17 nt, Human
ccugugacauggugccu

SEQ ID NO: 3653398 - RNA, 18 nt, Human
ccugugacauggugccug

SEQ ID NO: 3653399 - RNA, 15 nt, Human
ccugugaccacaaca

SEQ ID NO: 3653400 - RNA, 19 nt, Human
ccugugaccacaacaugag

SEQ ID NO: 3653401 - RNA, 17 nt, Human
ccugugaccagcacugu

SEQ ID NO: 3653402 - RNA, 19 nt, Human
ccugugaccagucugaccc

SEQ ID NO: 3653403 - RNA, 13 nt, Human
ccugugagccagu

SEQ ID NO: 3653404 - RNA, 15 nt, Human
ccugugagcccagcu

SEQ ID NO: 3653405 - RNA, 19 nt, Human
ccugugaggugcagagugc

SEQ ID NO: 3653406 - RNA, 19 nt, Human
ccugugagguuucccaaug

SEQ ID NO: 3653407 - RNA, 21 nt, Human
ccugugaucuuauuuuucuaa

SEQ ID NO: 3653408 - RNA, 16 nt, Human
ccugugaugcugggca

SEQ ID NO: 3653409 - RNA, 21 nt, Human
ccugugauggggcccugccuc

SEQ ID NO: 3653410 - RNA, 14 nt, Human
ccugugcacacaca

SEQ ID NO: 3653411 - RNA, 23 nt, Human
ccugugcacaccccacucccaca

SEQ ID NO: 3653412 - RNA, 12 nt, Human
ccugugcacagc

SEQ ID NO: 3653413 - RNA, 17 nt, Human
ccugugcauguaugucu

SEQ ID NO: 3653414 - RNA, 20 nt, Human
ccugugcauguaugucuugg

SEQ ID NO: 3653415 - RNA, 14 nt, Human
ccugugccagccca

SEQ ID NO: 3653416 - RNA, 18 nt, Human
ccugugccuaacaccagc

SEQ ID NO: 3653417 - RNA, 12 nt, Human
ccugugccuccu

SEQ ID NO: 3653418 - RNA, 20 nt, Human
ccugugccuccucaccccca

SEQ ID NO: 3653419 - RNA, 15 nt, Human
ccugugccuccuccc

SEQ ID NO: 3653420 - RNA, 15 nt, Human
ccugugccucuggga

SEQ ID NO: 3653421 - RNA, 19 nt, Human
ccugugccucugggacugg

SEQ ID NO: 3653422 - RNA, 15 nt, Human
ccugugcuacuuugc

SEQ ID NO: 3653423 - RNA, 14 nt, Human
ccugugcucagccc

SEQ ID NO: 3653424 - RNA, 17 nt, Human
ccugugcucagcccuga

SEQ ID NO: 3653425 - RNA, 14 nt, Human
ccugugcuggggga

SEQ ID NO: 3653426 - RNA, 14 nt, Human
ccugugcugguguc

SEQ ID NO: 3653427 - RNA, 21 nt, Human
ccugugcugguguccugacca

SEQ ID NO: 3653428 - RNA, 22 nt, Human
ccugugcugguguccugaccac

SEQ ID NO: 3653429 - RNA, 22 nt, Human
ccugugcuucgggcccuuccca

SEQ ID NO: 3653430 - RNA, 19 nt, Human
ccuguggaagggacuagga

SEQ ID NO: 3653431 - RNA, 20 nt, Human
ccuguggaagggacuaggag

SEQ ID NO: 3653432 - RNA, 11 nt, Human
ccuguggagac

SEQ ID NO: 3653433 - RNA, 17 nt, Human
ccuguggagcccgcacc

SEQ ID NO: 3653434 - RNA, 18 nt, Human
ccuguggagcccgcaccc

SEQ ID NO: 3653435 - RNA, 19 nt, Human
ccuguggagcucagccccg

SEQ ID NO: 3653436 - RNA, 15 nt, Human
ccuguggcaggcagc

SEQ ID NO: 3653437 - RNA, 21 nt, Human
ccuguggcaguaaagagaaac

SEQ ID NO: 3653438 - RNA, 22 nt, Human
ccuguggcaguaaagagaaacu

SEQ ID NO: 3653439 - RNA, 23 nt, Human
ccuguggcaguaaagagaaacuu

SEQ ID NO: 3653440 - RNA, 15 nt, Human
ccuguggcauaaauu

SEQ ID NO: 3653441 - RNA, 21 nt, Human
ccuguggcccuguccugccau

SEQ ID NO: 3653442 - RNA, 13 nt, Human
ccuguggccugug

SEQ ID NO: 3653443 - RNA, 14 nt, Human
ccuguggccugugu

SEQ ID NO: 3653444 - RNA, 19 nt, Human
ccuguggccugugucccau

SEQ ID NO: 3653445 - RNA, 22 nt, Human
ccuguggcgccgucuccagggg

SEQ ID NO: 3653446 - RNA, 16 nt, Human
ccuguggcggugccug

SEQ ID NO: 3653447 - RNA, 20 nt, Human
ccuguggcggugccugggug

SEQ ID NO: 3653448 - RNA, 12 nt, Human
ccuguggcugcg

SEQ ID NO: 3653449 - RNA, 16 nt, Human
ccugugggagccucgc

SEQ ID NO: 3653450 - RNA, 17 nt, Human
ccugugggagccucgca

SEQ ID NO: 3653451 - RNA, 20 nt, Human
ccugugggcccccaaaugga

SEQ ID NO: 3653452 - RNA, 13 nt, Human
ccuuccccauggg

SEQ ID NO: 3653453 - RNA, 13 nt, Human
ccuuccccgaggg

SEQ ID NO: 3653454 - RNA, 15 nt, Human
ccuuccccucccugg

SEQ ID NO: 3653455 - RNA, 18 nt, Human
ccuuccccucccuggcuc

SEQ ID NO: 3653456 - RNA, 19 nt, Human
ccuuccccucccuggcucc

SEQ ID NO: 3653457 - RNA, 22 nt, Human
ccuuccccucccuggcucccau

SEQ ID NO: 3653458 - RNA, 15 nt, Human
ccuuccccuuccuuc

SEQ ID NO: 3653459 - RNA, 16 nt, Human
ccuucccuaaagugau

SEQ ID NO: 3653460 - RNA, 17 nt, Human
ccuucccuaaagugaug

SEQ ID NO: 3653461 - RNA, 23 nt, Human
ccuucccucaccuuggcaccaga

SEQ ID NO: 3653462 - RNA, 13 nt, Human
ccuucccuccucc

SEQ ID NO: 3653463 - RNA, 12 nt, Human
ccuucccuccug

SEQ ID NO: 3653464 - RNA, 15 nt, Human
ccuucccuccugcuu

SEQ ID NO: 3653465 - RNA, 12 nt, Human
ccuucccugcac

SEQ ID NO: 3653466 - RNA, 13 nt, Human
ccuucccugcacu

SEQ ID NO: 3653467 - RNA, 15 nt, Human
ccuucccugggcugu

SEQ ID NO: 3653468 - RNA, 12 nt, Human
ccuucccugucc

SEQ ID NO: 3653469 - RNA, 13 nt, Human
ccuucccuguccc

SEQ ID NO: 3653470 - RNA, 18 nt, Human
ccuucccugucugccagg

SEQ ID NO: 3653471 - RNA, 17 nt, Human
ccuucccugugccuccu

SEQ ID NO: 3653472 - RNA, 20 nt, Human
ccuucccugugccuccuccc

SEQ ID NO: 3653473 - RNA, 12 nt, Human
ccuucccuugcc

SEQ ID NO: 3653474 - RNA, 16 nt, Human
ccuucccuugccacuu

SEQ ID NO: 3653475 - RNA, 19 nt, Human
ccuucccuugccacuuugc

SEQ ID NO: 3653476 - RNA, 18 nt, Human
ccuucccuuuucuguucu

SEQ ID NO: 3653477 - RNA, 22 nt, Human
ccuucccuuuucuguucuaguu

SEQ ID NO: 3653478 - RNA, 18 nt, Human
ccuuccgcaguguggcca

SEQ ID NO: 3653479 - RNA, 14 nt, Human
ccuuccgccacugg

SEQ ID NO: 3653480 - RNA, 18 nt, Human
ccuuccgccacuggggcu

SEQ ID NO: 3653481 - RNA, 16 nt, Human
ccuuccgccccuuccc

SEQ ID NO: 3653482 - RNA, 19 nt, Human
ccuuccgccccuucccuuc

SEQ ID NO: 3653483 - RNA, 20 nt, Human
ccuuccuacacccuuggacu

SEQ ID NO: 3653484 - RNA, 17 nt, Human
ccuuccucauccacccc

SEQ ID NO: 3653485 - RNA, 18 nt, Human
ccuuccucauccacccca

SEQ ID NO: 3653486 - RNA, 23 nt, Human
ccuuccuccauccuccuccuucc

SEQ ID NO: 3653487 - RNA, 22 nt, Human
ccuuccucccaccucccccucc

SEQ ID NO: 3653488 - RNA, 22 nt, Human
ccuuccucucauccuuuucucc

SEQ ID NO: 3653489 - RNA, 22 nt, Human
ccuuccucuccacccucccaga

SEQ ID NO: 3653490 - RNA, 15 nt, Human
ccuuccucuccacug

SEQ ID NO: 3653491 - RNA, 16 nt, Human
ccuuccucuccacugc

SEQ ID NO: 3653492 - RNA, 21 nt, Human
ccuuccucuccuuccuuguua

SEQ ID NO: 3653493 - RNA, 17 nt, Human
ccuuccucucuccagau

SEQ ID NO: 3653494 - RNA, 20 nt, Human
ccuuccucugagccuuggga

SEQ ID NO: 3653495 - RNA, 13 nt, Human
ccuuccucugagg

SEQ ID NO: 3653496 - RNA, 14 nt, Human
ccuuccucugaggc

SEQ ID NO: 3653497 - RNA, 17 nt, Human
ccuuccucugcagcuga

SEQ ID NO: 3653498 - RNA, 12 nt, Human
ccuuccucugcu

SEQ ID NO: 3653499 - RNA, 15 nt, Human
ccuuccucuggggcu

SEQ ID NO: 3653500 - RNA, 14 nt, Human
ccuuccucuuucca

SEQ ID NO: 3653501 - RNA, 16 nt, Human
ccuuccugccaccagu

SEQ ID NO: 3653502 - RNA, 18 nt, Human
cgaagaaaaaaaauaaca

SEQ ID NO: 3653503 - RNA, 15 nt, Human
cgaagaagagccaca

SEQ ID NO: 3653504 - RNA, 16 nt, Human
cgaagaagagccacag

SEQ ID NO: 3653505 - RNA, 17 nt, Human
cgaagaagagccacagu

SEQ ID NO: 3653506 - RNA, 14 nt, Human
cgaagaagaugcuc

SEQ ID NO: 3653507 - RNA, 17 nt, Human
cgaagaauggagaggaa

SEQ ID NO: 3653508 - RNA, 15 nt, Human
cgaagaguucccuug

SEQ ID NO: 3653509 - RNA, 18 nt, Human
cgaagauuucauccagaa

SEQ ID NO: 3653510 - RNA, 23 nt, Human
cgaagcgcgccacucgcuucccc

SEQ ID NO: 3653511 - RNA, 17 nt, Human
cgaagcuaacagggaag

SEQ ID NO: 3653512 - RNA, 17 nt, Human
cgaagcucagcccaccc

SEQ ID NO: 3653513 - RNA, 18 nt, Human
cgaagcucagcccacccc

SEQ ID NO: 3653514 - RNA, 23 nt, Human
cgaaggaaaagggcuuucucaau

SEQ ID NO: 3653515 - RNA, 13 nt, Human
cgaaggggcccug

SEQ ID NO: 3653516 - RNA, 21 nt, Human
cgaaguagcuugcucccugug

SEQ ID NO: 3653517 - RNA, 19 nt, Human
cgaagucauuaaacugguu

SEQ ID NO: 3653518 - RNA, 15 nt, Human
cgaaguccuauggaa

SEQ ID NO: 3653519 - RNA, 20 nt, Human
cgaaguccuauggaaacccg

SEQ ID NO: 3653520 - RNA, 19 nt, Human
cgaaguggacuggccccug

SEQ ID NO: 3653521 - RNA, 13 nt, Human
cgaaguguugcau

SEQ ID NO: 3653522 - RNA, 10 nt, Human
cgaauaaaug

SEQ ID NO: 3653523 - RNA, 19 nt, Human
cgaauacuuuugcccuuug

SEQ ID NO: 3653524 - RNA, 14 nt, Human
cgaauagacaucaa

SEQ ID NO: 3653525 - RNA, 14 nt, Human
cgaauagcugggac

SEQ ID NO: 3653526 - RNA, 15 nt, Human
cgaauagcugggacu

SEQ ID NO: 3653527 - RNA, 21 nt, Human
cgaauagcugggacuacaggu

SEQ ID NO: 3653528 - RNA, 14 nt, Human
cgaauauugcugau

SEQ ID NO: 3653529 - RNA, 15 nt, Human
cgaauauugcugaug

SEQ ID NO: 3653530 - RNA, 17 nt, Human
cgaauauugcugauggu

SEQ ID NO: 3653531 - RNA, 17 nt, Human
cgaaucauuuguucaaa

SEQ ID NO: 3653532 - RNA, 15 nt, Human
cgaaucucaaaauua

SEQ ID NO: 3653533 - RNA, 12 nt, Human
cgaaucucugug

SEQ ID NO: 3653534 - RNA, 12 nt, Human
cgaaugacacug

SEQ ID NO: 3653535 - RNA, 16 nt, Human
cgaaugacacuguuca

SEQ ID NO: 3653536 - RNA, 23 nt, Human
cgaauguguacaacuuaaguugg

SEQ ID NO: 3653537 - RNA, 18 nt, Human
cgaaugugucuuuagaua

SEQ ID NO: 3653538 - RNA, 22 nt, Human
cgaauuaauagcuuuuauugua

SEQ ID NO: 3653539 - RNA, 21 nt, Human
cgacaaagcugcuaaaucucc

SEQ ID NO: 3653540 - RNA, 12 nt, Human
cgacaaugcaaa

SEQ ID NO: 3653541 - RNA, 13 nt, Human
cgacaaugcaaac

SEQ ID NO: 3653542 - RNA, 18 nt, Human
cgacacggucucggauca

SEQ ID NO: 3653543 - RNA, 17 nt, Human
cgacacucucuggaagc

SEQ ID NO: 3653544 - RNA, 21 nt, Human
cgacacugcagccccacccag

SEQ ID NO: 3653545 - RNA, 17 nt, Human
cgacacugggaggccag

SEQ ID NO: 3653546 - RNA, 11 nt, Human
cgacagagcag

SEQ ID NO: 3653547 - RNA, 16 nt, Human
cgacagcauuuuccuc

SEQ ID NO: 3653548 - RNA, 15 nt, Human
cgacagcccccucug

SEQ ID NO: 3653549 - RNA, 14 nt, Human
cgacagccuggcac

SEQ ID NO: 3653550 - RNA, 14 nt, Human
cgacaggcccuggc

SEQ ID NO: 3653551 - RNA, 22 nt, Human
cgacauagcccaucccugccug

SEQ ID NO: 3653552 - RNA, 13 nt, Human
cgacauugucucc

SEQ ID NO: 3653553 - RNA, 14 nt, Human
cgaccaccugccca

SEQ ID NO: 3653554 - RNA, 12 nt, Human
cgaccagccagg

SEQ ID NO: 3653555 - RNA, 14 nt, Human
cgaccauguggcca

SEQ ID NO: 3653556 - RNA, 16 nt, Human
cgaccauguggccaca

SEQ ID NO: 3653557 - RNA, 16 nt, Human
cgaccccaucugccca

SEQ ID NO: 3653558 - RNA, 16 nt, Human
cgaccccccgugggcu

SEQ ID NO: 3653559 - RNA, 19 nt, Human
cgaccccccgugggcuccc

SEQ ID NO: 3653560 - RNA, 19 nt, Human
cgaccccgucacagccuca

SEQ ID NO: 3653561 - RNA, 18 nt, Human
cgacccucugggaaccuc

SEQ ID NO: 3653562 - RNA, 23 nt, Human
cgacccucugggaaccucccaga

SEQ ID NO: 3653563 - RNA, 19 nt, Human
cgacccugggggcacagga

SEQ ID NO: 3653564 - RNA, 23 nt, Human
cgacccugggggcacaggaggca

SEQ ID NO: 3653565 - RNA, 19 nt, Human
cgaccgaggcuggagcugg

SEQ ID NO: 3653566 - RNA, 12 nt, Human
cgaccucggugg

SEQ ID NO: 3653567 - RNA, 16 nt, Human
cgaccucguccucccc

SEQ ID NO: 3653568 - RNA, 20 nt, Human
cgaccucuccaucuucagcu

SEQ ID NO: 3653569 - RNA, 16 nt, Human
cgaccugccucggccu

SEQ ID NO: 3653570 - RNA, 17 nt, Human
cgaccuggccugucugu

SEQ ID NO: 3653571 - RNA, 15 nt, Human
cgacuagacacacaa

SEQ ID NO: 3653572 - RNA, 13 nt, Human
cgacuagccagga

SEQ ID NO: 3653573 - RNA, 10 nt, Human
cgacuccagc

SEQ ID NO: 3653574 - RNA, 14 nt, Human
cgacuccagccagc

SEQ ID NO: 3653575 - RNA, 16 nt, Human
cgacuccagccagcgc

SEQ ID NO: 3653576 - RNA, 20 nt, Human
cgacuccagccagcgccucc

SEQ ID NO: 3653577 - RNA, 21 nt, Human
cgacuccagccagcgccuccc

SEQ ID NO: 3653578 - RNA, 16 nt, Human
cgacuccguuggccac

SEQ ID NO: 3653579 - RNA, 13 nt, Human
cgacucugaccuc

SEQ ID NO: 3653580 - RNA, 23 nt, Human
cgacucugugccucccuccccag

SEQ ID NO: 3653581 - RNA, 20 nt, Human
cgacucugugcuggccagcg

SEQ ID NO: 3653582 - RNA, 17 nt, Human
cgacugccaucuuggac

SEQ ID NO: 3653583 - RNA, 17 nt, Human
cgacugcccggcagggu

SEQ ID NO: 3653584 - RNA, 11 nt, Human
cgacugucucc

SEQ ID NO: 3653585 - RNA, 17 nt, Human
cgacuugcauaccugcu

SEQ ID NO: 3653586 - RNA, 16 nt, Human
cgacuugcauuuuugc

SEQ ID NO: 3653587 - RNA, 13 nt, Human
cgacuuuauuuuc

SEQ ID NO: 3653588 - RNA, 13 nt, Human
cgacuuucugccu

SEQ ID NO: 3653589 - RNA, 17 nt, Human
cgagaaagaggcaccag

SEQ ID NO: 3653590 - RNA, 21 nt, Human
cgagaaagaggcaccaggaag

SEQ ID NO: 3653591 - RNA, 21 nt, Human
cgagaaauucguguguuuuuu

SEQ ID NO: 3653592 - RNA, 20 nt, Human
cgagaagcugcucuggaauu

SEQ ID NO: 3653593 - RNA, 14 nt, Human
cgagacacuugccu

SEQ ID NO: 3653594 - RNA, 17 nt, Human
cgagaccaaccugacca

SEQ ID NO: 3653595 - RNA, 16 nt, Human
cgagaccauccuggcu

SEQ ID NO: 3653596 - RNA, 22 nt, Human
cgagaccgggcccuggguuccu

SEQ ID NO: 3653597 - RNA, 14 nt, Human
cgagacuuuccauu

SEQ ID NO: 3653598 - RNA, 17 nt, Human
ccuuuguugaacuguua

SEQ ID NO: 3653599 - RNA, 20 nt, Human
ccuuuguugaacuguuagaa

SEQ ID NO: 3653600 - RNA, 19 nt, Human
ccuuuguuuuuaugaagaa

SEQ ID NO: 3653601 - RNA, 19 nt, Human
ccuuuguuuuuuuuuccug

SEQ ID NO: 3653602 - RNA, 22 nt, Human
ccuuuuaaauccuguugaaaag

SEQ ID NO: 3653603 - RNA, 11 nt, Human
ccuuuuacugg

SEQ ID NO: 3653604 - RNA, 12 nt, Human
ccuuuuacuggu

SEQ ID NO: 3653605 - RNA, 21 nt, Human
ccuuuuagccuaguucaucca

SEQ ID NO: 3653606 - RNA, 11 nt, Human
ccuuuuauagc

SEQ ID NO: 3653607 - RNA, 16 nt, Human
ccuuuuauagcuauua

SEQ ID NO: 3653608 - RNA, 16 nt, Human
ccuuuuauaucccauu

SEQ ID NO: 3653609 - RNA, 19 nt, Human
ccuuuuaucccaaaguugu

SEQ ID NO: 3653610 - RNA, 15 nt, Human
ccuuuucacuacacc

SEQ ID NO: 3653611 - RNA, 21 nt, Human
ccuuuucagcuucugcugggc

SEQ ID NO: 3653612 - RNA, 14 nt, Human
ccuuuucaggaaaa

SEQ ID NO: 3653613 - RNA, 10 nt, Human
ccuuuucaua

SEQ ID NO: 3653614 - RNA, 18 nt, Human
ccuuuucauaggucugaa

SEQ ID NO: 3653615 - RNA, 12 nt, Human
ccuuuuccaugc

SEQ ID NO: 3653616 - RNA, 16 nt, Human
ccuuuucccggggagg

SEQ ID NO: 3653617 - RNA, 20 nt, Human
ccuuuucgcaggauucuucc

SEQ ID NO: 3653618 - RNA, 15 nt, Human
ccuuuucuauuccuu

SEQ ID NO: 3653619 - RNA, 18 nt, Human
ccuuuucuccuaucuuca

SEQ ID NO: 3653620 - RNA, 18 nt, Human
ccuuuucugucucucucu

SEQ ID NO: 3653621 - RNA, 21 nt, Human
ccuuuucuuuuguuacuguuc

SEQ ID NO: 3653622 - RNA, 23 nt, Human
ccuuuugaggagccccagcuacc

SEQ ID NO: 3653623 - RNA, 22 nt, Human
ccuuuugagggacaaauuuaaa

SEQ ID NO: 3653624 - RNA, 15 nt, Human
ccuuuugagugccuu

SEQ ID NO: 3653625 - RNA, 15 nt, Human
ccuuuugcaccccuc

SEQ ID NO: 3653626 - RNA, 12 nt, Human
ccuuuugccaau

SEQ ID NO: 3653627 - RNA, 18 nt, Human
ccuuuugcuugaaaccaa

SEQ ID NO: 3653628 - RNA, 12 nt, Human
ccuuuuggcccc

SEQ ID NO: 3653629 - RNA, 21 nt, Human
ccuuuuggcccccgagcuggg

SEQ ID NO: 3653630 - RNA, 23 nt, Human
ccuuuuggcccccgagcuggggg

SEQ ID NO: 3653631 - RNA, 21 nt, Human
ccuuuuggugaaagcugagaa

SEQ ID NO: 3653632 - RNA, 19 nt, Human
ccuuuuguagaaugaacca

SEQ ID NO: 3653633 - RNA, 21 nt, Human
ccuuuuguauacauccugggu

SEQ ID NO: 3653634 - RNA, 12 nt, Human
ccuuuugucuuc

SEQ ID NO: 3653635 - RNA, 19 nt, Human
ccuuuuguucauuucaucc

SEQ ID NO: 3653636 - RNA, 15 nt, Human
ccuuuuuaaaacaca

SEQ ID NO: 3653637 - RNA, 17 nt, Human
ccuuuuuaaaacacaug

SEQ ID NO: 3653638 - RNA, 11 nt, Human
ccuuuuuaagg

SEQ ID NO: 3653639 - RNA, 15 nt, Human
ccuuuuuauaacuuu

SEQ ID NO: 3653640 - RNA, 21 nt, Human
ccuuuuuauaacuuuuuauau

SEQ ID NO: 3653641 - RNA, 12 nt, Human
ccuuuuuauuua

SEQ ID NO: 3653642 - RNA, 13 nt, Human
ccuuuuuauuuau

SEQ ID NO: 3653643 - RNA, 16 nt, Human
ccuuuuuauuuauaug

SEQ ID NO: 3653644 - RNA, 17 nt, Human
ccuuuuuauuugcaugu

SEQ ID NO: 3653645 - RNA, 18 nt, Human
ccuuuuuauuugcaugug

SEQ ID NO: 3653646 - RNA, 21 nt, Human
ccuuuuucaaugaauuuuaua

SEQ ID NO: 3653647 - RNA, 22 nt, Human
ccuuuuucauauguugcucagu

SEQ ID NO: 3653648 - RNA, 17 nt, Human
ccuuuuucauuauuuua

SEQ ID NO: 3653649 - RNA, 13 nt, Human
ccuuuuucauuua

SEQ ID NO: 3653650 - RNA, 17 nt, Human
ccuuuuucccaauaaau

SEQ ID NO: 3653651 - RNA, 21 nt, Human
ccuuuuuccccaaagucuuaa

SEQ ID NO: 3653652 - RNA, 13 nt, Human
ccuuuuuccuucc

SEQ ID NO: 3653653 - RNA, 14 nt, Human
ccuuuuucuccagc

SEQ ID NO: 3653654 - RNA, 23 nt, Human
ccuuuuugguacuuauuacugcu

SEQ ID NO: 3653655 - RNA, 14 nt, Human
ccuuuuuguauaaa

SEQ ID NO: 3653656 - RNA, 13 nt, Human
ccuuuuuuaaaaa

SEQ ID NO: 3653657 - RNA, 18 nt, Human
ccuuuuuuauacauaaac

SEQ ID NO: 3653658 - RNA, 15 nt, Human
ccuuuuuuauaucuu

SEQ ID NO: 3653659 - RNA, 22 nt, Human
ccuuuuuucacggaaguuuuca

SEQ ID NO: 3653660 - RNA, 11 nt, Human
ccuuuuuuccc

SEQ ID NO: 3653661 - RNA, 15 nt, Human
ccuuuuuuccccaga

SEQ ID NO: 3653662 - RNA, 20 nt, Human
ccuuuuuucugccuccuuua

SEQ ID NO: 3653663 - RNA, 17 nt, Human
ccuuuuuuggcugcuga

SEQ ID NO: 3653664 - RNA, 20 nt, Human
ccuuuuuuggcuuuagacac

SEQ ID NO: 3653665 - RNA, 16 nt, Human
ccuuuuuuuuuuuucc

SEQ ID NO: 3653666 - RNA, 19 nt, Human
cgaaaaauccucuuccucu

SEQ ID NO: 3653667 - RNA, 21 nt, Human
cgaaaaauccucuuccucuga

SEQ ID NO: 3653668 - RNA, 22 nt, Human
cgaaaaccaggccuuaucucca

SEQ ID NO: 3653669 - RNA, 19 nt, Human
cgaaaacguggcugcuuca

SEQ ID NO: 3653670 - RNA, 20 nt, Human
cgaaaacguggcugcuucaa

SEQ ID NO: 3653671 - RNA, 15 nt, Human
cgaaaagagucuucc

SEQ ID NO: 3653672 - RNA, 22 nt, Human
cgaaaaucauauaaucuuacaa

SEQ ID NO: 3653673 - RNA, 23 nt, Human
cgaaacacaaaccacaacugaca

SEQ ID NO: 3653674 - RNA, 22 nt, Human
cgaaacaggcuacucuccucgg

SEQ ID NO: 3653675 - RNA, 18 nt, Human
cgaaaccuugccuuucuc

SEQ ID NO: 3653676 - RNA, 16 nt, Human
cgaaacuggaaguuau

SEQ ID NO: 3653677 - RNA, 15 nt, Human
cgaaacuuguuauug

SEQ ID NO: 3653678 - RNA, 23 nt, Human
cgaaacuuguuauugugaaugau

SEQ ID NO: 3653679 - RNA, 21 nt, Human
cgaaagaacaguccauugaaa

SEQ ID NO: 3653680 - RNA, 11 nt, Human
cgaaagagaga

SEQ ID NO: 3653681 - RNA, 13 nt, Human
cgaaagagagaga

SEQ ID NO: 3653682 - RNA, 23 nt, Human
cgaaagagagagaaacaaacuuu

SEQ ID NO: 3653683 - RNA, 12 nt, Human
cgaaagcacaca

SEQ ID NO: 3653684 - RNA, 14 nt, Human
cgaaagcucuagaa

SEQ ID NO: 3653685 - RNA, 19 nt, Human
cgaaagcugggcaacaugc

SEQ ID NO: 3653686 - RNA, 15 nt, Human
cgaaaggucaccuca

SEQ ID NO: 3653687 - RNA, 21 nt, Human
cgaaaggucaccucacucagc

SEQ ID NO: 3653688 - RNA, 17 nt, Human
cgaaauaacaauguuaa

SEQ ID NO: 3653689 - RNA, 21 nt, Human
cgaaauaauuguuguucuguu

SEQ ID NO: 3653690 - RNA, 16 nt, Human
cgaaaucccugcucac

SEQ ID NO: 3653691 - RNA, 22 nt, Human
cgaaaucccugcucacugcagc

SEQ ID NO: 3653692 - RNA, 13 nt, Human
cgaaaugcugucu

SEQ ID NO: 3653693 - RNA, 22 nt, Human
cgaaauguuauuuuuuaauuau

SEQ ID NO: 3653694 - RNA, 22 nt, Human
cgaacacccucgaagcgcgcca

SEQ ID NO: 3653695 - RNA, 12 nt, Human
cgaaccaggagc

SEQ ID NO: 3653696 - RNA, 20 nt, Human
cgaacccacacugcaacagg

SEQ ID NO: 3653697 - RNA, 13 nt, Human
cgaaccccaagga

SEQ ID NO: 3653698 - RNA, 16 nt, Human
cgaaccuccucuguga

SEQ ID NO: 3653699 - RNA, 16 nt, Human
cgaacgacaauagcuu

SEQ ID NO: 3653700 - RNA, 14 nt, Human
cgaacuggcugcaa

SEQ ID NO: 3653701 - RNA, 18 nt, Human
cgaagaaggguccuuccc

SEQ ID NO: 3653702 - RNA, 20 nt, Human
cgaagacccucuugcccauc

SEQ ID NO: 3653703 - RNA, 23 nt, Human
cgaagacccucuugcccauccug

SEQ ID NO: 3653704 - RNA, 23 nt, Human
cgaagaguauuuuugacagaaua

SEQ ID NO: 3653705 - RNA, 23 nt, Human
cgaagcaugaacagugcaccugg

SEQ ID NO: 3653706 - RNA, 18 nt, Human
cgaagcccagagggucug

SEQ ID NO: 3653707 - RNA, 14 nt, Human
cgcuuggagcagag

SEQ ID NO: 3653708 - RNA, 21 nt, Human
cgcuuggcuccaugcuccuca

SEQ ID NO: 3653709 - RNA, 22 nt, Human
cgcuugggcgccgugcugggca

SEQ ID NO: 3653710 - RNA, 20 nt, Human
cgcuuguagaacucacucug

SEQ ID NO: 3653711 - RNA, 20 nt, Human
cgcuuguccagcgccuagug

SEQ ID NO: 3653712 - RNA, 20 nt, Human
cgcuugugcagaaaacauug

SEQ ID NO: 3653713 - RNA, 22 nt, Human
cgcuugugcagaaaacauuguu

SEQ ID NO: 3653714 - RNA, 22 nt, Human
cgcuuguggggacccaggcucc

SEQ ID NO: 3653715 - RNA, 14 nt, Human
cgcuuuccugaauc

SEQ ID NO: 3653716 - RNA, 16 nt, Human
cgcuuucuagcuguug

SEQ ID NO: 3653717 - RNA, 11 nt, Human
cgcuuuuccuu

SEQ ID NO: 3653718 - RNA, 14 nt, Human
cgcuuuuccuuggc

SEQ ID NO: 3653719 - RNA, 17 nt, Human
cgcuuuuguucucgcaa

SEQ ID NO: 3653720 - RNA, 11 nt, Human
cgcuuuuugaa

SEQ ID NO: 3653721 - RNA, 16 nt, Human
cgcuuuuugaaaaagc

SEQ ID NO: 3653722 - RNA, 17 nt, Human
cggaaaccuugguguag

SEQ ID NO: 3653723 - RNA, 20 nt, Human
cggaaagguauuugggaaac

SEQ ID NO: 3653724 - RNA, 20 nt, Human
cggaaccgcccaggaucaga

SEQ ID NO: 3653725 - RNA, 19 nt, Human
cggaaccugugagcugcac

SEQ ID NO: 3653726 - RNA, 16 nt, Human
cggaacguuggacuuu

SEQ ID NO: 3653727 - RNA, 14 nt, Human
cggaagcagugccu

SEQ ID NO: 3653728 - RNA, 20 nt, Human
cggaagccuuuuuccccaaa

SEQ ID NO: 3653729 - RNA, 15 nt, Human
cggaagcuccuggua

SEQ ID NO: 3653730 - RNA, 19 nt, Human
cggaaggaccuauguuugc

SEQ ID NO: 3653731 - RNA, 18 nt, Human
cggaaggcuggcugggca

SEQ ID NO: 3653732 - RNA, 17 nt, Human
cggaaggguaaacaaua

SEQ ID NO: 3653733 - RNA, 17 nt, Human
cggaagguuuuuaaaca

SEQ ID NO: 3653734 - RNA, 18 nt, Human
cggaaguuuucaaugaug

SEQ ID NO: 3653735 - RNA, 15 nt, Human
cggaauccuguccuc

SEQ ID NO: 3653736 - RNA, 17 nt, Human
cggaauccuguccucag

SEQ ID NO: 3653737 - RNA, 16 nt, Human
cggacaagacccccag

SEQ ID NO: 3653738 - RNA, 20 nt, Human
cggacaagacccccagcacu

SEQ ID NO: 3653739 - RNA, 14 nt, Human
cggacacuccuaga

SEQ ID NO: 3653740 - RNA, 22 nt, Human
cggacagccacggccaggccag

SEQ ID NO: 3653741 - RNA, 23 nt, Human
cggacaguuccagaagugugacu

SEQ ID NO: 3653742 - RNA, 14 nt, Human
cgacaaaucugucu

SEQ ID NO: 3653743 - RNA, 15 nt, Human
cgacaaaucugucug

SEQ ID NO: 3653744 - RNA, 20 nt, Human
cgacaacagauuggauuuua

SEQ ID NO: 3653745 - RNA, 15 nt, Human
cgacaaccgaugcuc

SEQ ID NO: 3653746 - RNA, 18 nt, Human
cgacaaccgaugcuccag

SEQ ID NO: 3653747 - RNA, 21 nt, Human
cgacaaccgaugcuccagcca

SEQ ID NO: 3653748 - RNA, 18 nt, Human
cgacacucaccaugaagc

SEQ ID NO: 3653749 - RNA, 18 nt, Human
cgacagagcaguugagag

SEQ ID NO: 3653750 - RNA, 16 nt, Human
cgacagagcgagacuu

SEQ ID NO: 3653751 - RNA, 12 nt, Human
cgacagccuggc

SEQ ID NO: 3653752 - RNA, 13 nt, Human
cgacagccuggca

SEQ ID NO: 3653753 - RNA, 16 nt, Human
cgacaggaguauuuuu

SEQ ID NO: 3653754 - RNA, 15 nt, Human
cgacagugagacucu

SEQ ID NO: 3653755 - RNA, 21 nt, Human
cgacaguggaugcugggucca

SEQ ID NO: 3653756 - RNA, 19 nt, Human
cgacauggacccggagcua

SEQ ID NO: 3653757 - RNA, 14 nt, Human
cgaccacagggucu

SEQ ID NO: 3653758 - RNA, 23 nt, Human
cgaccaccccugccuccacccuc

SEQ ID NO: 3653759 - RNA, 21 nt, Human
cgaccaccgccccuggccgcg

SEQ ID NO: 3653760 - RNA, 14 nt, Human
cgaccacuuccagg

SEQ ID NO: 3653761 - RNA, 23 nt, Human
cgaccagacaccuugacagggca

SEQ ID NO: 3653762 - RNA, 17 nt, Human
cgaccagaggagccuuu

SEQ ID NO: 3653763 - RNA, 15 nt, Human
cgaccccaucugccc

SEQ ID NO: 3653764 - RNA, 19 nt, Human
cgaccccuaguucccucug

SEQ ID NO: 3653765 - RNA, 14 nt, Human
cgacccucugggaa

SEQ ID NO: 3653766 - RNA, 22 nt, Human
cgacccucugggaaccucccag

SEQ ID NO: 3653767 - RNA, 17 nt, Human
cgacccugggggcacag

SEQ ID NO: 3653768 - RNA, 15 nt, Human
cgaccgaggcuggag

SEQ ID NO: 3653769 - RNA, 15 nt, Human
cgaccucagccuucc

SEQ ID NO: 3653770 - RNA, 14 nt, Human
cgaccucguccucc

SEQ ID NO: 3653771 - RNA, 22 nt, Human
cgaccucguccucccccugcca

SEQ ID NO: 3653772 - RNA, 15 nt, Human
cgaccugccucggcc

SEQ ID NO: 3653773 - RNA, 13 nt, Human
cgaccuggccgcg

SEQ ID NO: 3653774 - RNA, 19 nt, Human
cgaccuggccgcggagccu

SEQ ID NO: 3653775 - RNA, 14 nt, Human
cgaccuuggccgca

SEQ ID NO: 3653776 - RNA, 12 nt, Human
cgaccuuuaccu

SEQ ID NO: 3653777 - RNA, 15 nt, Human
cgacgcgucuccugu

SEQ ID NO: 3653778 - RNA, 13 nt, Human
cgacgcugcagag

SEQ ID NO: 3653779 - RNA, 21 nt, Human
cgacuaaacuagauuuucacu

SEQ ID NO: 3653780 - RNA, 16 nt, Human
cgacuagacacacaaa

SEQ ID NO: 3653781 - RNA, 20 nt, Human
cgacuagacacacaaagcag

SEQ ID NO: 3653782 - RNA, 11 nt, Human
cgacuccagcc

SEQ ID NO: 3653783 - RNA, 12 nt, Human
cgacuccagcca

SEQ ID NO: 3653784 - RNA, 18 nt, Human
cgacuccagccagcgccu

SEQ ID NO: 3653785 - RNA, 18 nt, Human
cgacucuauagacucuag

SEQ ID NO: 3653786 - RNA, 21 nt, Human
cgacucuuucugagugccuuc

SEQ ID NO: 3653787 - RNA, 22 nt, Human
cgacucuuucugagugccuucu

SEQ ID NO: 3653788 - RNA, 18 nt, Human
cgacugaaaauauuguuu

SEQ ID NO: 3653789 - RNA, 15 nt, Human
cgacuggccagggcc

SEQ ID NO: 3653790 - RNA, 17 nt, Human
cgacugugaccuguggg

SEQ ID NO: 3653791 - RNA, 19 nt, Human
cgacuguuguuaucuguuu

SEQ ID NO: 3653792 - RNA, 19 nt, Human
cgacuugaauuuucccacu

SEQ ID NO: 3653793 - RNA, 20 nt, Human
cgacuugaauuuucccacug

SEQ ID NO: 3653794 - RNA, 19 nt, Human
cgacuugugcacaggcaga

SEQ ID NO: 3653795 - RNA, 16 nt, Human
cgacuuucugccugga

SEQ ID NO: 3653796 - RNA, 23 nt, Human
cgacuuuguaccccccaaccccu

SEQ ID NO: 3653797 - RNA, 20 nt, Human
cgagaaauaaaguuugcuua

SEQ ID NO: 3653798 - RNA, 17 nt, Human
cgagaacuuucauuuuu

SEQ ID NO: 3653799 - RNA, 16 nt, Human
cgagaagcugcucugg

SEQ ID NO: 3653800 - RNA, 13 nt, Human
cgagaccagccug

SEQ ID NO: 3653801 - RNA, 15 nt, Human
cgagaccagccuggc

SEQ ID NO: 3653802 - RNA, 16 nt, Human
cgagaccagccuggcc

SEQ ID NO: 3653803 - RNA, 13 nt, Human
cgagaccagucug

SEQ ID NO: 3653804 - RNA, 17 nt, Human
cgagaccauccuggcua

SEQ ID NO: 3653805 - RNA, 16 nt, Human
cgagacggcacugaga

SEQ ID NO: 3653806 - RNA, 15 nt, Human
cgagagaggagccag

SEQ ID NO: 3653807 - RNA, 20 nt, Human
cgagagaggagccagacaga

SEQ ID NO: 3653808 - RNA, 21 nt, Human
cgagagaggagccagacagac

SEQ ID NO: 3653809 - RNA, 16 nt, Human
cgagagaucaaagaug

SEQ ID NO: 3653810 - RNA, 12 nt, Human
cgagagaugugu

SEQ ID NO: 3653811 - RNA, 13 nt, Human
cgagagaugugug

SEQ ID NO: 3653812 - RNA, 17 nt, Human
cgagagauguguguuga

SEQ ID NO: 3653813 - RNA, 13 nt, Human
cgagagccugcuc

SEQ ID NO: 3653814 - RNA, 14 nt, Human
cgagaggaggggcc

SEQ ID NO: 3653815 - RNA, 14 nt, Human
cgagaggcagagaa

SEQ ID NO: 3653816 - RNA, 14 nt, Human
cgagagggagagag

SEQ ID NO: 3653817 - RNA, 16 nt, Human
cgagagggagagagag

SEQ ID NO: 3653818 - RNA, 22 nt, Human
cgagaggggaagaguguacugg

SEQ ID NO: 3653819 - RNA, 21 nt, Human
cgagaggggccgaugcccaga

SEQ ID NO: 3653820 - RNA, 18 nt, Human
cgagagguaugccuguac

SEQ ID NO: 3653821 - RNA, 14 nt, Human
cgagaggugggcca

SEQ ID NO: 3653822 - RNA, 20 nt, Human
cgagaguagccgagagccug

SEQ ID NO: 3653823 - RNA, 19 nt, Human
cgagagucuggcccuagac

SEQ ID NO: 3653824 - RNA, 20 nt, Human
cgagaucacgccacugcacu

SEQ ID NO: 3653825 - RNA, 23 nt, Human
cgagauuaucguuuucuuaaagu

SEQ ID NO: 3653826 - RNA, 15 nt, Human
cgagcaaagaucaaa

SEQ ID NO: 3653827 - RNA, 20 nt, Human
cgagcaaagaucaaaauaaa

SEQ ID NO: 3653828 - RNA, 23 nt, Human
cgagcaaagaucaaaauaaaaag

SEQ ID NO: 3653829 - RNA, 19 nt, Human
cgagcaaagucuaaaguuu

SEQ ID NO: 3653830 - RNA, 20 nt, Human
cgagcaaagucuaaaguuua

SEQ ID NO: 3653831 - RNA, 14 nt, Human
cgagcaaccguggc

SEQ ID NO: 3653832 - RNA, 15 nt, Human
cgagcaaccguggcc

SEQ ID NO: 3653833 - RNA, 18 nt, Human
cgagcaccuccagccuga

SEQ ID NO: 3653834 - RNA, 11 nt, Human
cgagcagcuga

SEQ ID NO: 3653835 - RNA, 15 nt, Human
cgagcagcugagcag

SEQ ID NO: 3653836 - RNA, 20 nt, Human
cgagcaggcuucuucccccc

SEQ ID NO: 3653837 - RNA, 21 nt, Human
cgagcaguccugccucagccu

SEQ ID NO: 3653838 - RNA, 21 nt, Human
cgagcaucccccaaaguucac

SEQ ID NO: 3653839 - RNA, 13 nt, Human
cgagcaugccugg

SEQ ID NO: 3653840 - RNA, 16 nt, Human
cgagcaugccuggaug

SEQ ID NO: 3653841 - RNA, 17 nt, Human
cgagcaugccuggaugg

SEQ ID NO: 3653842 - RNA, 21 nt, Human
cgagcaugccuggauggggcu

SEQ ID NO: 3653843 - RNA, 16 nt, Human
cgagcccugguggcag

SEQ ID NO: 3653844 - RNA, 14 nt, Human
cgagccgggccugg

SEQ ID NO: 3653845 - RNA, 22 nt, Human
cgagccggggaguuucuuuccu

SEQ ID NO: 3653846 - RNA, 19 nt, Human
cgagccucugucacugcag

SEQ ID NO: 3653847 - RNA, 21 nt, Human
cgagccuuuucacccuucuac

SEQ ID NO: 3653848 - RNA, 15 nt, Human
cgagcgcccugcaga

SEQ ID NO: 3653849 - RNA, 16 nt, Human
cgagcgcccugcagac

SEQ ID NO: 3653850 - RNA, 19 nt, Human
cgagcgcccugcagacccu

SEQ ID NO: 3653851 - RNA, 20 nt, Human
cgagcgcccugcagacccug

SEQ ID NO: 3653852 - RNA, 18 nt, Human
cgagcgcuuucuggaaaa

SEQ ID NO: 3653853 - RNA, 23 nt, Human
cgagcgcuuucuggaaaagagga

SEQ ID NO: 3653854 - RNA, 12 nt, Human
cgagcugggggc

SEQ ID NO: 3653855 - RNA, 13 nt, Human
cgagcugggggcc

SEQ ID NO: 3653856 - RNA, 15 nt, Human
cgagcugggggccau

SEQ ID NO: 3653857 - RNA, 23 nt, Human
cgagcugggggccaugagcucca

SEQ ID NO: 3653858 - RNA, 13 nt, Human
cgagcuggugcau

SEQ ID NO: 3653859 - RNA, 22 nt, Human
cgaggaaacgaaacccacucua

SEQ ID NO: 3653860 - RNA, 19 nt, Human
cgaggaaccagagccaugg

SEQ ID NO: 3653861 - RNA, 13 nt, Human
cgaggacagggag

SEQ ID NO: 3653862 - RNA, 21 nt, Human
cgaggacaugaaacuccaccu

SEQ ID NO: 3653863 - RNA, 12 nt, Human
cgaggacccaga

SEQ ID NO: 3653864 - RNA, 13 nt, Human
cgaggacccagac

SEQ ID NO: 3653865 - RNA, 14 nt, Human
cgaggacccagacc

SEQ ID NO: 3653866 - RNA, 20 nt, Human
cgaggacuuugauugcacau

SEQ ID NO: 3653867 - RNA, 18 nt, Human
cgaggaggugucucaggc

SEQ ID NO: 3653868 - RNA, 19 nt, Human
ccaaauacuaaugaaaaca

SEQ ID NO: 3653869 - RNA, 15 nt, Human
ccaaauauguccugg

SEQ ID NO: 3653870 - RNA, 15 nt, Human
ccaaauccccuaagc

SEQ ID NO: 3653871 - RNA, 21 nt, Human
ccaaauccgaaccuccucugu

SEQ ID NO: 3653872 - RNA, 22 nt, Human
ccaaauccgaaccuccucugug

SEQ ID NO: 3653873 - RNA, 16 nt, Human
ccaaauccgcucucuu

SEQ ID NO: 3653874 - RNA, 22 nt, Human
ccaaauccgcucucuuccugcc

SEQ ID NO: 3653875 - RNA, 18 nt, Human
ccaaauccucuccagcua

SEQ ID NO: 3653876 - RNA, 13 nt, Human
ccaaaucugccua

SEQ ID NO: 3653877 - RNA, 14 nt, Human
ccaaaucuggaagc

SEQ ID NO: 3653878 - RNA, 21 nt, Human
ccaaaugaaauauauuuaaaa

SEQ ID NO: 3653879 - RNA, 16 nt, Human
ccaaaugaaugaccuu

SEQ ID NO: 3653880 - RNA, 22 nt, Human
ccaaaugagggucuugguucca

SEQ ID NO: 3653881 - RNA, 13 nt, Human
ccaaaugcagcuu

SEQ ID NO: 3653882 - RNA, 21 nt, Human
ccaaauggagaagcugcaggc

SEQ ID NO: 3653883 - RNA, 22 nt, Human
ccaaauuaucaagcuaauaaaa

SEQ ID NO: 3653884 - RNA, 18 nt, Human
ccaaauucaguuucauaa

SEQ ID NO: 3653885 - RNA, 23 nt, Human
ccaaauuccuuggcaugccuucc

SEQ ID NO: 3653886 - RNA, 21 nt, Human
ccaaauugucaccugcuucuc

SEQ ID NO: 3653887 - RNA, 19 nt, Human
cggagugaagaggggcagc

SEQ ID NO: 3653888 - RNA, 20 nt, Human
cggagugaagaggggcagcc

SEQ ID NO: 3653889 - RNA, 15 nt, Human
cggagugacagagua

SEQ ID NO: 3653890 - RNA, 18 nt, Human
cggagugucuggaauugu

SEQ ID NO: 3653891 - RNA, 22 nt, Human
cggaguuuugcucuuguagccc

SEQ ID NO: 3653892 - RNA, 13 nt, Human
cggaucagagcag

SEQ ID NO: 3653893 - RNA, 15 nt, Human
cggaucaucaacaag

SEQ ID NO: 3653894 - RNA, 13 nt, Human
cggauccagggag

SEQ ID NO: 3653895 - RNA, 21 nt, Human
cggauccagggaggcuggucc

SEQ ID NO: 3653896 - RNA, 22 nt, Human
cggauccagggaggcugguccu

SEQ ID NO: 3653897 - RNA, 19 nt, Human
cggauccuaagcaucuaag

SEQ ID NO: 3653898 - RNA, 21 nt, Human
cggauccugcacugacucugg

SEQ ID NO: 3653899 - RNA, 14 nt, Human
cggaucugagaauc

SEQ ID NO: 3653900 - RNA, 16 nt, Human
cggauuauuuuuucag

SEQ ID NO: 3653901 - RNA, 17 nt, Human
cggauuauuuuuucaga

SEQ ID NO: 3653902 - RNA, 22 nt, Human
cggauuauuuuuucagaccgaa

SEQ ID NO: 3653903 - RNA, 23 nt, Human
cggauuauuuuuucagaccgaaa

SEQ ID NO: 3653904 - RNA, 15 nt, Human
cggauugcguuccuc

SEQ ID NO: 3653905 - RNA, 21 nt, Human
cggcaaccccaguucugcucc

SEQ ID NO: 3653906 - RNA, 22 nt, Human
cggcaaccccaguucugcuccu

SEQ ID NO: 3653907 - RNA, 19 nt, Human
cggcaacuaagcagucccu

SEQ ID NO: 3653908 - RNA, 22 nt, Human
cggcaacuaagcagucccugag

SEQ ID NO: 3653909 - RNA, 18 nt, Human
cggcaauaaaagcccagg

SEQ ID NO: 3653910 - RNA, 19 nt, Human
cggcaauaaaagcccagga

SEQ ID NO: 3653911 - RNA, 20 nt, Human
cggcaauaaaagcccaggag

SEQ ID NO: 3653912 - RNA, 16 nt, Human
cggcaauuuccggcca

SEQ ID NO: 3653913 - RNA, 14 nt, Human
cggcacagggucug

SEQ ID NO: 3653914 - RNA, 15 nt, Human
cggcacccccugcag

SEQ ID NO: 3653915 - RNA, 17 nt, Human
cggcacccccugcagcu

SEQ ID NO: 3653916 - RNA, 15 nt, Human
cggcacccucuggcc

SEQ ID NO: 3653917 - RNA, 20 nt, Human
cggcacuccaaccuaaccug

SEQ ID NO: 3653918 - RNA, 11 nt, Human
cggcagagagg

SEQ ID NO: 3653919 - RNA, 13 nt, Human
cggcagagaggac

SEQ ID NO: 3653920 - RNA, 18 nt, Human
cggcagccccagccugcu

SEQ ID NO: 3653921 - RNA, 22 nt, Human
cggcagccccagccugcuagcu

SEQ ID NO: 3653922 - RNA, 21 nt, Human
cggcagcuucugcccccugca

SEQ ID NO: 3653923 - RNA, 22 nt, Human
cggcaggacaacgaggaagccc

SEQ ID NO: 3653924 - RNA, 12 nt, Human
cggcaggcccug

SEQ ID NO: 3653925 - RNA, 13 nt, Human
cggcaggcccugc

SEQ ID NO: 3653926 - RNA, 14 nt, Human
cggcaggcucacug

SEQ ID NO: 3653927 - RNA, 17 nt, Human
cggcaggcucacugcca

SEQ ID NO: 3653928 - RNA, 19 nt, Human
cggcaggcucacugccagg

SEQ ID NO: 3653929 - RNA, 22 nt, Human
ccacacugauccagcccugagu

SEQ ID NO: 3653930 - RNA, 18 nt, Human
ccacacugugacacacua

SEQ ID NO: 3653931 - RNA, 19 nt, Human
ccacacugugacacacuac

SEQ ID NO: 3653932 - RNA, 21 nt, Human
ccacacugugacacacuacac

SEQ ID NO: 3653933 - RNA, 13 nt, Human
ccacacuucccug

SEQ ID NO: 3653934 - RNA, 16 nt, Human
ccacacuucccuggcg

SEQ ID NO: 3653935 - RNA, 13 nt, Human
ccacacuuccugu

SEQ ID NO: 3653936 - RNA, 21 nt, Human
ccacacuuccuguccagagag

SEQ ID NO: 3653937 - RNA, 18 nt, Human
ccacacuucucaggacac

SEQ ID NO: 3653938 - RNA, 22 nt, Human
ccacacuucucaggacacaggc

SEQ ID NO: 3653939 - RNA, 16 nt, Human
ccacacuugaaaccuu

SEQ ID NO: 3653940 - RNA, 20 nt, Human
ccacacuuguuccagcucuu

SEQ ID NO: 3653941 - RNA, 12 nt, Human
ccacagaaagag

SEQ ID NO: 3653942 - RNA, 20 nt, Human
ccacagaagccaggagcaaa

SEQ ID NO: 3653943 - RNA, 21 nt, Human
ccacagaagccaggagcaaau

SEQ ID NO: 3653944 - RNA, 16 nt, Human
ccacagaagcuccagg

SEQ ID NO: 3653945 - RNA, 15 nt, Human
ccacagacaagguag

SEQ ID NO: 3653946 - RNA, 23 nt, Human
ccacagacaauacguuugauaau

SEQ ID NO: 3653947 - RNA, 11 nt, Human
ccacagacaca

SEQ ID NO: 3653948 - RNA, 22 nt, Human
ccacagacggaaggguaaacaa

SEQ ID NO: 3653949 - RNA, 22 nt, Human
ccacagagaaaguacuucucca

SEQ ID NO: 3653950 - RNA, 19 nt, Human
ccacagagagucccacugc

SEQ ID NO: 3653951 - RNA, 22 nt, Human
ccacagauuguuucuauacaaa

SEQ ID NO: 3653952 - RNA, 20 nt, Human
ccacagcaaggcaccugcag

SEQ ID NO: 3653953 - RNA, 14 nt, Human
ccacagcacagcca

SEQ ID NO: 3653954 - RNA, 20 nt, Human
ccacagcagccucugaaguu

SEQ ID NO: 3653955 - RNA, 14 nt, Human
ccacagcagcugaa

SEQ ID NO: 3653956 - RNA, 17 nt, Human
ccacagcaguugaaaag

SEQ ID NO: 3653957 - RNA, 18 nt, Human
ccacagcccacguccugu

SEQ ID NO: 3653958 - RNA, 18 nt, Human
ccacagcccagccacgga

SEQ ID NO: 3653959 - RNA, 16 nt, Human
ccacagcccaggccuc

SEQ ID NO: 3653960 - RNA, 21 nt, Human
ccacagcccaggccuccagcu

SEQ ID NO: 3653961 - RNA, 13 nt, Human
ccacagcccuguc

SEQ ID NO: 3653962 - RNA, 20 nt, Human
ccacagcccugucagcauga

SEQ ID NO: 3653963 - RNA, 20 nt, Human
ccacagcccugucagugcag

SEQ ID NO: 3653964 - RNA, 20 nt, Human
ccacagccuccccugccagg

SEQ ID NO: 3653965 - RNA, 15 nt, Human
ccacagcgagggcag

SEQ ID NO: 3653966 - RNA, 13 nt, Human
ccacagcgccagc

SEQ ID NO: 3653967 - RNA, 18 nt, Human
ccacagcgccagccucag

SEQ ID NO: 3653968 - RNA, 24 nt, Human
ccacagcgccagccucagacugga

SEQ ID NO: 3653969 - RNA, 17 nt, Human
ccacagcgucccuggcg

SEQ ID NO: 3653970 - RNA, 16 nt, Human
ccacagcucccacccc

SEQ ID NO: 3653971 - RNA, 17 nt, Human
ccacagcucccacccca

SEQ ID NO: 3653972 - RNA, 19 nt, Human
ccacagcucccaccccacc

SEQ ID NO: 3653973 - RNA, 17 nt, Human
ccacagcuuccccucuc

SEQ ID NO: 3653974 - RNA, 22 nt, Human
ccacaggaagccugcaguccug

SEQ ID NO: 3653975 - RNA, 17 nt, Human
ccacaggacacagucag

SEQ ID NO: 3653976 - RNA, 16 nt, Human
ccacaggacauuucuc

SEQ ID NO: 3653977 - RNA, 19 nt, Human
ccacaggaggcaagcaagc

SEQ ID NO: 3653978 - RNA, 12 nt, Human
ccacaggcagcu

SEQ ID NO: 3653979 - RNA, 15 nt, Human
ccacaggcccuuccu

SEQ ID NO: 3653980 - RNA, 23 nt, Human
ccacaggcccuuuccucaggcaa

SEQ ID NO: 3653981 - RNA, 16 nt, Human
ccacaggccgcccugc

SEQ ID NO: 3653982 - RNA, 12 nt, Human
ccacaggccucc

SEQ ID NO: 3653983 - RNA, 16 nt, Human
ccacaggccucccugu

SEQ ID NO: 3653984 - RNA, 19 nt, Human
ccacaggccugagauuuca

SEQ ID NO: 3653985 - RNA, 22 nt, Human
ccacaggccugagauuucaucu

SEQ ID NO: 3653986 - RNA, 15 nt, Human
ccacaggcucaggca

SEQ ID NO: 3653987 - RNA, 17 nt, Human
ccacaggcucaggcagg

SEQ ID NO: 3653988 - RNA, 19 nt, Human
ccacaggcucaggcagggg

SEQ ID NO: 3653989 - RNA, 15 nt, Human
ccacaggcuuaggga

SEQ ID NO: 3653990 - RNA, 21 nt, Human
ccacaggcuuagggacaggac

SEQ ID NO: 3653991 - RNA, 16 nt, Human
ccacagggucccacag

SEQ ID NO: 3653992 - RNA, 19 nt, Human
ccacagggucccacagcca

SEQ ID NO: 3653993 - RNA, 15 nt, Human
ccacaggucuagacu

SEQ ID NO: 3653994 - RNA, 14 nt, Human
ccacaggugcccgc

SEQ ID NO: 3653995 - RNA, 17 nt, Human
ccacaggugggaggagu

SEQ ID NO: 3653996 - RNA, 15 nt, Human
ccacaggugucccca

SEQ ID NO: 3653997 - RNA, 16 nt, Human
ccacagguguccccag

SEQ ID NO: 3653998 - RNA, 23 nt, Human
ccacagguguuuauacagcucag

SEQ ID NO: 3653999 - RNA, 22 nt, Human
ccacagguucaugccaccaugg

SEQ ID NO: 3654000 - RNA, 16 nt, Human
ccacagucaaagaagg

SEQ ID NO: 3654001 - RNA, 20 nt, Human
ccacagugccuaauaauacu

SEQ ID NO: 3654002 - RNA, 12 nt, Human
ccacagugcugu

SEQ ID NO: 3654003 - RNA, 20 nt, Human
ccacaguggaaccagcccag

SEQ ID NO: 3654004 - RNA, 13 nt, Human
ccacagugucagg

SEQ ID NO: 3654005 - RNA, 12 nt, Human
ccacagugucug

SEQ ID NO: 3654006 - RNA, 21 nt, Human
ccacaguguuggcgagaggag

SEQ ID NO: 3654007 - RNA, 23 nt, Human
ccacaguugccaccaccucugug

SEQ ID NO: 3654008 - RNA, 20 nt, Human
ccacaguuuccucaucuguc

SEQ ID NO: 3654009 - RNA, 22 nt, Human
ccacauaagggguuugccauuu

SEQ ID NO: 3654010 - RNA, 20 nt, Human
ccacauacaacacaaagaga

SEQ ID NO: 3654011 - RNA, 22 nt, Human
ccacauagugaugguuccccug

SEQ ID NO: 3654012 - RNA, 14 nt, Human
ccacaucaaaccuu

SEQ ID NO: 3654013 - RNA, 16 nt, Human
ccacaucaaauaagaa

SEQ ID NO: 3654014 - RNA, 16 nt, Human
ccacauccacagucuc

SEQ ID NO: 3654015 - RNA, 22 nt, Human
ccacaucccacucacaacagcu

SEQ ID NO: 3654016 - RNA, 16 nt, Human
ccacaucccaucgucu

SEQ ID NO: 3654017 - RNA, 21 nt, Human
ccacaucccucucugcuggac

SEQ ID NO: 3654018 - RNA, 18 nt, Human
ccacaucccugggccugc

SEQ ID NO: 3654019 - RNA, 19 nt, Human
ccacaucccugggccugcu

SEQ ID NO: 3654020 - RNA, 20 nt, Human
ccacaucccugggccugcug

SEQ ID NO: 3654021 - RNA, 21 nt, Human
ccacaucccugggccugcugc

SEQ ID NO: 3654022 - RNA, 15 nt, Human
ccacaucuaagccug

SEQ ID NO: 3654023 - RNA, 22 nt, Human
ccacaucuugaucugcucagcc

SEQ ID NO: 3654024 - RNA, 22 nt, Human
ccacaucuugcucugcugacag

SEQ ID NO: 3654025 - RNA, 19 nt, Human
ccacaugccaagcacugug

SEQ ID NO: 3654026 - RNA, 16 nt, Human
ccacaugggaggcuca

SEQ ID NO: 3654027 - RNA, 19 nt, Human
ccacauggggcugggcagc

SEQ ID NO: 3654028 - RNA, 13 nt, Human
ccacauguccagc

SEQ ID NO: 3654029 - RNA, 17 nt, Human
ccacauguguccauccc

SEQ ID NO: 3654030 - RNA, 17 nt, Human
ccagacacauguccaag

SEQ ID NO: 3654031 - RNA, 22 nt, Human
ccagacacauguccaagaagcc

SEQ ID NO: 3654032 - RNA, 14 nt, Human
ccagacacccagga

SEQ ID NO: 3654033 - RNA, 16 nt, Human
ccagacacccaggacu

SEQ ID NO: 3654034 - RNA, 17 nt, Human
ccagacaccuugacagg

SEQ ID NO: 3654035 - RNA, 11 nt, Human
ccagacacugg

SEQ ID NO: 3654036 - RNA, 13 nt, Human
ccagacacugguu

SEQ ID NO: 3654037 - RNA, 22 nt, Human
ccagacagacaucucugcaccc

SEQ ID NO: 3654038 - RNA, 23 nt, Human
ccagacagagggucacaguguuu

SEQ ID NO: 3654039 - RNA, 14 nt, Human
ccagacagccugua

SEQ ID NO: 3654040 - RNA, 20 nt, Human
ccagacagcucccucugccu

SEQ ID NO: 3654041 - RNA, 17 nt, Human
ccagacauaaaggaaaa

SEQ ID NO: 3654042 - RNA, 22 nt, Human
ccagacauacgaaacacaaacc

SEQ ID NO: 3654043 - RNA, 22 nt, Human
ccagacauucucgcuucccuga

SEQ ID NO: 3654044 - RNA, 21 nt, Human
ccagaccaacguuacucaggg

SEQ ID NO: 3654045 - RNA, 16 nt, Human
ccagaccagagcucug

SEQ ID NO: 3654046 - RNA, 17 nt, Human
ccagaccagagcucugg

SEQ ID NO: 3654047 - RNA, 15 nt, Human
ccagaccauggacac

SEQ ID NO: 3654048 - RNA, 15 nt, Human
ccagacccccacccc

SEQ ID NO: 3654049 - RNA, 12 nt, Human
ccagacccccug

SEQ ID NO: 3654050 - RNA, 16 nt, Human
ccagacccccuggaga

SEQ ID NO: 3654051 - RNA, 16 nt, Human
ccagaccccgacaccg

SEQ ID NO: 3654052 - RNA, 22 nt, Human
ccagaccccucuggccaggaug

SEQ ID NO: 3654053 - RNA, 23 nt, Human
ccagaccccucuggccaggaugg

SEQ ID NO: 3654054 - RNA, 14 nt, Human
ccagacccggcugc

SEQ ID NO: 3654055 - RNA, 16 nt, Human
ccagacccggcugcgu

SEQ ID NO: 3654056 - RNA, 13 nt, Human
ccagaccugagcu

SEQ ID NO: 3654057 - RNA, 20 nt, Human
ccagaccugauccuggaggc

SEQ ID NO: 3654058 - RNA, 21 nt, Human
ccagaccuguuagcagacagg

SEQ ID NO: 3654059 - RNA, 19 nt, Human
ccagaccuuguucacacuc

SEQ ID NO: 3654060 - RNA, 20 nt, Human
ccagacgaugucuucauacc

SEQ ID NO: 3654061 - RNA, 19 nt, Human
ccagacgccugauauugaa

SEQ ID NO: 3654062 - RNA, 22 nt, Human
ccagacgcucauucagcaucug

SEQ ID NO: 3654063 - RNA, 15 nt, Human
ccagacggcuccacu

SEQ ID NO: 3654064 - RNA, 16 nt, Human
ccagacucagagcucu

SEQ ID NO: 3654065 - RNA, 18 nt, Human
ccagacuccaccaagccu

SEQ ID NO: 3654066 - RNA, 20 nt, Human
ccagacuccugacugucucc

SEQ ID NO: 3654067 - RNA, 13 nt, Human
ccagacucuugcc

SEQ ID NO: 3654068 - RNA, 22 nt, Human
ccagacugcagguuggacccca

SEQ ID NO: 3654069 - RNA, 12 nt, Human
ccagacugugga

SEQ ID NO: 3654070 - RNA, 13 nt, Human
ccagacuguggag

SEQ ID NO: 3654071 - RNA, 13 nt, Human
ccagacuguguau

SEQ ID NO: 3654072 - RNA, 13 nt, Human
ccagacuuccuug

SEQ ID NO: 3654073 - RNA, 22 nt, Human
ccagacuuguuggcguaggcua

SEQ ID NO: 3654074 - RNA, 20 nt, Human
ccagacuuuacaugacacag

SEQ ID NO: 3654075 - RNA, 22 nt, Human
ccagacuuuacaugacacagcu

SEQ ID NO: 3654076 - RNA, 20 nt, Human
ccagagaaaggggagcccac

SEQ ID NO: 3654077 - RNA, 22 nt, Human
ccagagaaaugaaagucaguuu

SEQ ID NO: 3654078 - RNA, 23 nt, Human
ccagagaaaugaaagucaguuua

SEQ ID NO: 3654079 - RNA, 14 nt, Human
ccagagaagccccu

SEQ ID NO: 3654080 - RNA, 19 nt, Human
ccagagaaggggugugcau

SEQ ID NO: 3654081 - RNA, 14 nt, Human
ccagagaagugaca

SEQ ID NO: 3654082 - RNA, 17 nt, Human
ccagagaagugacaggg

SEQ ID NO: 3654083 - RNA, 13 nt, Human
ccagagacaggaa

SEQ ID NO: 3654084 - RNA, 15 nt, Human
ccagagacaggaaaa

SEQ ID NO: 3654085 - RNA, 23 nt, Human
ccagagacaggaaaauccucugg

SEQ ID NO: 3654086 - RNA, 20 nt, Human
ccagagacauacuugaaggg

SEQ ID NO: 3654087 - RNA, 13 nt, Human
ccagagacccagc

SEQ ID NO: 3654088 - RNA, 16 nt, Human
ccagagacccagcgga

SEQ ID NO: 3654089 - RNA, 18 nt, Human
ccagagagaagagcccca

SEQ ID NO: 3654090 - RNA, 14 nt, Human
ccagagagagaagu

SEQ ID NO: 3654091 - RNA, 18 nt, Human
ccagagagagaagugccc

SEQ ID NO: 3654092 - RNA, 23 nt, Human
ccagagagagaagugccccugcu

SEQ ID NO: 3654093 - RNA, 13 nt, Human
ccagagagcccga

SEQ ID NO: 3654094 - RNA, 22 nt, Human
ccagagagccuggugcugcugc

SEQ ID NO: 3654095 - RNA, 23 nt, Human
ccagagagggacugacacccaug

SEQ ID NO: 3654096 - RNA, 17 nt, Human
ccagagaguccucugga

SEQ ID NO: 3654097 - RNA, 18 nt, Human
ccagagaguccucuggau

SEQ ID NO: 3654098 - RNA, 15 nt, Human
ccagagaugccucca

SEQ ID NO: 3654099 - RNA, 17 nt, Human
ccagagaugccuccacc

SEQ ID NO: 3654100 - RNA, 22 nt, Human
ccagagauggagguucucucgg

SEQ ID NO: 3654101 - RNA, 22 nt, Human
ccagagaugggacugggagggc

SEQ ID NO: 3654102 - RNA, 18 nt, Human
ccagagcaaagggccagg

SEQ ID NO: 3654103 - RNA, 18 nt, Human
ccagagcaccugcugucu

SEQ ID NO: 3654104 - RNA, 19 nt, Human
ccagagcaccugcugucug

SEQ ID NO: 3654105 - RNA, 11 nt, Human
ccagagcacug

SEQ ID NO: 3654106 - RNA, 16 nt, Human
ccagagcacugcucca

SEQ ID NO: 3654107 - RNA, 12 nt, Human
ccagagcacugg

SEQ ID NO: 3654108 - RNA, 13 nt, Human
ccagagcacugua

SEQ ID NO: 3654109 - RNA, 16 nt, Human
ccagagcacuguauac

SEQ ID NO: 3654110 - RNA, 14 nt, Human
ccagagcagaugca

SEQ ID NO: 3654111 - RNA, 18 nt, Human
ccagagcagaugcagaga

SEQ ID NO: 3654112 - RNA, 15 nt, Human
ccagagcaggaagca

SEQ ID NO: 3654113 - RNA, 21 nt, Human
ccagagcaggaggccccuggc

SEQ ID NO: 3654114 - RNA, 18 nt, Human
ccagagcauuuccaacac

SEQ ID NO: 3654115 - RNA, 22 nt, Human
ccagagcauuuccaacaccaca

SEQ ID NO: 3654116 - RNA, 23 nt, Human
ccagagcauuuccaacaccacag

SEQ ID NO: 3654117 - RNA, 15 nt, Human
ccagagccacacaug

SEQ ID NO: 3654118 - RNA, 12 nt, Human
ccagagccacag

SEQ ID NO: 3654119 - RNA, 11 nt, Human
ccagagcccac

SEQ ID NO: 3654120 - RNA, 14 nt, Human
ccagagcccaccuu

SEQ ID NO: 3654121 - RNA, 20 nt, Human
ccagagcccacuccaucugg

SEQ ID NO: 3654122 - RNA, 18 nt, Human
ccagagcccagcuccaag

SEQ ID NO: 3654123 - RNA, 15 nt, Human
ccagagcccaggcuc

SEQ ID NO: 3654124 - RNA, 19 nt, Human
ccagagccccacacggagg

SEQ ID NO: 3654125 - RNA, 21 nt, Human
ccagagccuggcugcccauca

SEQ ID NO: 3654126 - RNA, 12 nt, Human
ccagagccuggg

SEQ ID NO: 3654127 - RNA, 13 nt, Human
ccagagccugggg

SEQ ID NO: 3654128 - RNA, 14 nt, Human
ccagagccuggggc

SEQ ID NO: 3654129 - RNA, 15 nt, Human
ccagagccuggggcu

SEQ ID NO: 3654130 - RNA, 21 nt, Human
ccagagcgccccucccuagug

SEQ ID NO: 3654131 - RNA, 19 nt, Human
ccagagcgugggagacggu

SEQ ID NO: 3654132 - RNA, 23 nt, Human
ccagagcugaagaguugccccgu

SEQ ID NO: 3654133 - RNA, 13 nt, Human
ccagagcugccac

SEQ ID NO: 3654134 - RNA, 15 nt, Human
ccagagcugccaccu

SEQ ID NO: 3654135 - RNA, 21 nt, Human
ccagagcugggaggcauggcc

SEQ ID NO: 3654136 - RNA, 15 nt, Human
ccagagcugggugag

SEQ ID NO: 3654137 - RNA, 20 nt, Human
ccagagcugggugagugggg

SEQ ID NO: 3654138 - RNA, 18 nt, Human
cuaccugcccuggaacau

SEQ ID NO: 3654139 - RNA, 12 nt, Human
cuaccugcucuc

SEQ ID NO: 3654140 - RNA, 15 nt, Human
cuaccugcucuccaa

SEQ ID NO: 3654141 - RNA, 19 nt, Human
cuaccugcucuccaagucu

SEQ ID NO: 3654142 - RNA, 11 nt, Human
cuaccuggagg

SEQ ID NO: 3654143 - RNA, 16 nt, Human
cuaccuggagggaaga

SEQ ID NO: 3654144 - RNA, 16 nt, Human
cuaccuggucucuccu

SEQ ID NO: 3654145 - RNA, 15 nt, Human
cuaccugugugguac

SEQ ID NO: 3654146 - RNA, 20 nt, Human
cuaccuguucagugucccgg

SEQ ID NO: 3654147 - RNA, 18 nt, Human
cuaccuuccaguuccuca

SEQ ID NO: 3654148 - RNA, 20 nt, Human
cuaccuucuccccagcuccc

SEQ ID NO: 3654149 - RNA, 13 nt, Human
cuaccuucuguag

SEQ ID NO: 3654150 - RNA, 22 nt, Human
cuaccuugaggucuuuugacau

SEQ ID NO: 3654151 - RNA, 23 nt, Human
cuaccuugaggucuuuugacaug

SEQ ID NO: 3654152 - RNA, 16 nt, Human
cuaccuugccccaacc

SEQ ID NO: 3654153 - RNA, 14 nt, Human
cuaccuugugaccc

SEQ ID NO: 3654154 - RNA, 19 nt, Human
cuaccuugugacccagcac

SEQ ID NO: 3654155 - RNA, 22 nt, Human
cuaccuuuaaucagguccugcu

SEQ ID NO: 3654156 - RNA, 21 nt, Human
cuaccuuuggcuuaauuccaa

SEQ ID NO: 3654157 - RNA, 13 nt, Human
cuaccuuuucucu

SEQ ID NO: 3654158 - RNA, 23 nt, Human
cuacgaguaauugcauuugcuuu

SEQ ID NO: 3654159 - RNA, 15 nt, Human
cuacgccaaucaagg

SEQ ID NO: 3654160 - RNA, 19 nt, Human
cuacgccucuucugucccu

SEQ ID NO: 3654161 - RNA, 14 nt, Human
cuacgccugcaugu

SEQ ID NO: 3654162 - RNA, 17 nt, Human
cuacguacaugugaggc

SEQ ID NO: 3654163 - RNA, 16 nt, Human
cuacguuaagggaagg

SEQ ID NO: 3654164 - RNA, 17 nt, Human
cuacguuaccaggcagg

SEQ ID NO: 3654165 - RNA, 18 nt, Human
cuacuaaaaauacaaaca

SEQ ID NO: 3654166 - RNA, 13 nt, Human
cuacuaaaacuac

SEQ ID NO: 3654167 - RNA, 20 nt, Human
cuacuaaguucacauuagaa

SEQ ID NO: 3654168 - RNA, 13 nt, Human
cuacuaaugaugu

SEQ ID NO: 3654169 - RNA, 16 nt, Human
cuacuacaucgcccuc

SEQ ID NO: 3654170 - RNA, 15 nt, Human
cuacuagauugacua

SEQ ID NO: 3654171 - RNA, 17 nt, Human
cuacuagcaaaauaaaa

SEQ ID NO: 3654172 - RNA, 20 nt, Human
cuacuagcaaaauaaaacau

SEQ ID NO: 3654173 - RNA, 15 nt, Human
cuacuauaaagagaa

SEQ ID NO: 3654174 - RNA, 22 nt, Human
cuacucaagcggguggcucugg

SEQ ID NO: 3654175 - RNA, 21 nt, Human
cuagaagccaagggaaagggg

SEQ ID NO: 3654176 - RNA, 19 nt, Human
cuagaaggccacaugucac

SEQ ID NO: 3654177 - RNA, 21 nt, Human
cuagaagggcuagaaccugga

SEQ ID NO: 3654178 - RNA, 22 nt, Human
cuagaaguaacuggugauauau

SEQ ID NO: 3654179 - RNA, 17 nt, Human
cuagaagugggccagga

SEQ ID NO: 3654180 - RNA, 16 nt, Human
cuagaaguuacugaau

SEQ ID NO: 3654181 - RNA, 17 nt, Human
cuagaaguuacugaaug

SEQ ID NO: 3654182 - RNA, 19 nt, Human
cuagaaguuucccuuccuc

SEQ ID NO: 3654183 - RNA, 14 nt, Human
cuagaauacuuuuu

SEQ ID NO: 3654184 - RNA, 19 nt, Human
cuagaauauccuacuucuc

SEQ ID NO: 3654185 - RNA, 19 nt, Human
cuagaaucugcaauucaaa

SEQ ID NO: 3654186 - RNA, 12 nt, Human
cuagaauggaua

SEQ ID NO: 3654187 - RNA, 21 nt, Human
cuagaauugaguguuuaaagu

SEQ ID NO: 3654188 - RNA, 13 nt, Human
cuagaauuuauuc

SEQ ID NO: 3654189 - RNA, 14 nt, Human
cuagaauuucuuua

SEQ ID NO: 3654190 - RNA, 23 nt, Human
cuagaauuugauaugugaacagu

SEQ ID NO: 3654191 - RNA, 21 nt, Human
cuagaauuugauuauuaacau

SEQ ID NO: 3654192 - RNA, 14 nt, Human
cuagaauuuuaagc

SEQ ID NO: 3654193 - RNA, 16 nt, Human
cuagaauuuuaagccu

SEQ ID NO: 3654194 - RNA, 19 nt, Human
cuagaauuuuaagugcuuu

SEQ ID NO: 3654195 - RNA, 16 nt, Human
cuagacaacccugcaa

SEQ ID NO: 3654196 - RNA, 20 nt, Human
cuagacaagauauuguacau

SEQ ID NO: 3654197 - RNA, 13 nt, Human
cuagacaagccag

SEQ ID NO: 3654198 - RNA, 17 nt, Human
cuagacaagccagaacu

SEQ ID NO: 3654199 - RNA, 14 nt, Human
cuagacacacaaag

SEQ ID NO: 3654200 - RNA, 22 nt, Human
cuagacacaugaagguaaauaa

SEQ ID NO: 3654201 - RNA, 23 nt, Human
cuagacacaugaagguaaauaaa

SEQ ID NO: 3654202 - RNA, 19 nt, Human
cuagacaccaaaguucuaa

SEQ ID NO: 3654203 - RNA, 22 nt, Human
cuagacauggagguucuaaggc

SEQ ID NO: 3654204 - RNA, 11 nt, Human
cuagaccaaua

SEQ ID NO: 3654205 - RNA, 21 nt, Human
cuagaccagcagacagagcca

SEQ ID NO: 3654206 - RNA, 22 nt, Human
cuagaccagugagcgcuugggc

SEQ ID NO: 3654207 - RNA, 16 nt, Human
cuagaccuccagcugu

SEQ ID NO: 3654208 - RNA, 17 nt, Human
cuagaccuccagcuguu

SEQ ID NO: 3654209 - RNA, 20 nt, Human
cuagacgagcaggcuucuuc

SEQ ID NO: 3654210 - RNA, 19 nt, Human
cuagacuagcaaucucuuc

SEQ ID NO: 3654211 - RNA, 23 nt, Human
cuagacucaagguucccagagau

SEQ ID NO: 3654212 - RNA, 22 nt, Human
cuagacucggggugcuuccuug

SEQ ID NO: 3654213 - RNA, 15 nt, Human
cuagacucuagacaa

SEQ ID NO: 3654214 - RNA, 14 nt, Human
cuagacuggugacu

SEQ ID NO: 3654215 - RNA, 17 nt, Human
cuagacuggugacugau

SEQ ID NO: 3654216 - RNA, 22 nt, Human
cuagacuggugacugauucuuc

SEQ ID NO: 3654217 - RNA, 18 nt, Human
cuagacugugcuaagaga

SEQ ID NO: 3654218 - RNA, 21 nt, Human
cuagacuuuaggcuuucagcu

SEQ ID NO: 3654219 - RNA, 14 nt, Human
cuagacuuucuguu

SEQ ID NO: 3654220 - RNA, 10 nt, Human
cuagagaaac

SEQ ID NO: 3654221 - RNA, 21 nt, Human
cuagagaaauaagaucuuuuu

SEQ ID NO: 3654222 - RNA, 18 nt, Human
cuagagaaauucuuguua

SEQ ID NO: 3654223 - RNA, 16 nt, Human
cuagagaacgcagccc

SEQ ID NO: 3654224 - RNA, 18 nt, Human
cuagagaacgcagcccua

SEQ ID NO: 3654225 - RNA, 18 nt, Human
cuagagaagacaggcugg

SEQ ID NO: 3654226 - RNA, 22 nt, Human
cuagagaagacaggcuggaaga

SEQ ID NO: 3654227 - RNA, 12 nt, Human
cuagagaagagg

SEQ ID NO: 3654228 - RNA, 16 nt, Human
cuagagaaugcacaga

SEQ ID NO: 3654229 - RNA, 21 nt, Human
cuagagaaugcacagauauac

SEQ ID NO: 3654230 - RNA, 15 nt, Human
cuagagacagaagca

SEQ ID NO: 3654231 - RNA, 20 nt, Human
cuagagacagaagcaggcug

SEQ ID NO: 3654232 - RNA, 22 nt, Human
cuagagacagaagcaggcugga

SEQ ID NO: 3654233 - RNA, 19 nt, Human
cuagagagggaauucucuu

SEQ ID NO: 3654234 - RNA, 21 nt, Human
cuagagagggaggcaagcccu

SEQ ID NO: 3654235 - RNA, 17 nt, Human
cuagagauauuuuguaa

SEQ ID NO: 3654236 - RNA, 21 nt, Human
cuagagaucugguuuugcuau

SEQ ID NO: 3654237 - RNA, 15 nt, Human
cuagagcagcccugg

SEQ ID NO: 3654238 - RNA, 13 nt, Human
cuagagccugccu

SEQ ID NO: 3654239 - RNA, 14 nt, Human
cuagagccugccug

SEQ ID NO: 3654240 - RNA, 17 nt, Human
cuagagccugccuggag

SEQ ID NO: 3654241 - RNA, 18 nt, Human
cuagagccugccuggagc

SEQ ID NO: 3654242 - RNA, 19 nt, Human
cuagagccugccuggagcg

SEQ ID NO: 3654243 - RNA, 12 nt, Human
cuagagcuccuc

SEQ ID NO: 3654244 - RNA, 22 nt, Human
cuagagcuucaagucugugccu

SEQ ID NO: 3654245 - RNA, 23 nt, Human
cuagagcuucaagucugugccug

SEQ ID NO: 3654246 - RNA, 16 nt, Human
cuagaggaagcagcca

SEQ ID NO: 3654247 - RNA, 17 nt, Human
cuagaggccagccccac

SEQ ID NO: 3654248 - RNA, 18 nt, Human
cuagaggccagccccacc

SEQ ID NO: 3654249 - RNA, 23 nt, Human
cuagaggccagccccacccagga

SEQ ID NO: 3654250 - RNA, 21 nt, Human
cuagaggccugacugccaagc

SEQ ID NO: 3654251 - RNA, 15 nt, Human
cuagaggccugagga

SEQ ID NO: 3654252 - RNA, 22 nt, Human
cuagaggccugaggaugagcug

SEQ ID NO: 3654253 - RNA, 18 nt, Human
cuagaggcuuccuucauu

SEQ ID NO: 3654254 - RNA, 23 nt, Human
cuagaggcuuccuucauuuccuc

SEQ ID NO: 3654255 - RNA, 22 nt, Human
cuagaggcuugcauaauaagcu

SEQ ID NO: 3654256 - RNA, 15 nt, Human
cuagagggaccucuc

SEQ ID NO: 3654257 - RNA, 15 nt, Human
cuagagggaggggcc

SEQ ID NO: 3654258 - RNA, 16 nt, Human
cuagagggaggggccu

SEQ ID NO: 3654259 - RNA, 22 nt, Human
cuagaggggggauuuccagcca

SEQ ID NO: 3654260 - RNA, 21 nt, Human
cuagagugaacuugggccacu

SEQ ID NO: 3654261 - RNA, 12 nt, Human
cuagauaaaagc

SEQ ID NO: 3654262 - RNA, 16 nt, Human
cuagauacuguaucau

SEQ ID NO: 3654263 - RNA, 14 nt, Human
cuagauaugaauau

SEQ ID NO: 3654264 - RNA, 14 nt, Human
cuagauauuuuccu

SEQ ID NO: 3654265 - RNA, 18 nt, Human
cuagaucagaugcuccaa

SEQ ID NO: 3654266 - RNA, 20 nt, Human
cuagaucagaugcuccaaga

SEQ ID NO: 3654267 - RNA, 18 nt, Human
cuagaucauaaggcuuca

SEQ ID NO: 3654268 - RNA, 13 nt, Human
cuagauccacaca

SEQ ID NO: 3654269 - RNA, 19 nt, Human
cuagauccacacacagagg

SEQ ID NO: 3654270 - RNA, 15 nt, Human
cuagauccuaagggu

SEQ ID NO: 3654271 - RNA, 17 nt, Human
cuagaugaaguuuuaca

SEQ ID NO: 3654272 - RNA, 13 nt, Human
cuagaugaccuca

SEQ ID NO: 3654273 - RNA, 22 nt, Human
cuagaugagaauucagcugccc

SEQ ID NO: 3654274 - RNA, 21 nt, Human
cuagaugauuaaauaagauuc

SEQ ID NO: 3654275 - RNA, 21 nt, Human
cuagaugauuuuuugaaaguu

SEQ ID NO: 3654276 - RNA, 17 nt, Human
cuagaugcaagucucuu

SEQ ID NO: 3654277 - RNA, 22 nt, Human
cuagauggugcugagaagcuuu

SEQ ID NO: 3654278 - RNA, 16 nt, Human
cuagauguaguauuuu

SEQ ID NO: 3654279 - RNA, 22 nt, Human
cuagauguaguauuuuuuguau

SEQ ID NO: 3654280 - RNA, 23 nt, Human
cuagauguaguauuuuuuguaua

SEQ ID NO: 3654281 - RNA, 15 nt, Human
cuagauuauaucaaa

SEQ ID NO: 3654282 - RNA, 17 nt, Human
cuagauuauaucaaagu

SEQ ID NO: 3654283 - RNA, 17 nt, Human
cuagauucaaagguucu

SEQ ID NO: 3654284 - RNA, 22 nt, Human
cuagauuccauugguccaagau

SEQ ID NO: 3654285 - RNA, 12 nt, Human
cuagauugacua

SEQ ID NO: 3654286 - RNA, 14 nt, Human
cuagauuuaauaua

SEQ ID NO: 3654287 - RNA, 14 nt, Human
cuagauuugggaga

SEQ ID NO: 3654288 - RNA, 16 nt, Human
cuagcaaaagugcaag

SEQ ID NO: 3654289 - RNA, 17 nt, Human
cuagcaaaagugcaaga

SEQ ID NO: 3654290 - RNA, 17 nt, Human
cuagcaaaauaaaacau

SEQ ID NO: 3654291 - RNA, 15 nt, Human
cuagcaagcuggccu

SEQ ID NO: 3654292 - RNA, 16 nt, Human
cuagcaagcuggccuc

SEQ ID NO: 3654293 - RNA, 17 nt, Human
cuagcaagcuggccucu

SEQ ID NO: 3654294 - RNA, 20 nt, Human
cuagcaaucacaacacuggc

SEQ ID NO: 3654295 - RNA, 19 nt, Human
cuagcaaucucuucauuau

SEQ ID NO: 3654296 - RNA, 21 nt, Human
cuaaagaagguuucagaaaga

SEQ ID NO: 3654297 - RNA, 12 nt, Human
cuaaagaccaaa

SEQ ID NO: 3654298 - RNA, 15 nt, Human
cuaaagaccaaacuu

SEQ ID NO: 3654299 - RNA, 16 nt, Human
cuaaagagagaaugua

SEQ ID NO: 3654300 - RNA, 19 nt, Human
cuaaagagagaauguagau

SEQ ID NO: 3654301 - RNA, 16 nt, Human
cuaaagagcccuugcc

SEQ ID NO: 3654302 - RNA, 19 nt, Human
cuaaagagcccuugccucc

SEQ ID NO: 3654303 - RNA, 21 nt, Human
cuaaagagcccuugccucccc

SEQ ID NO: 3654304 - RNA, 21 nt, Human
cuaaagauagagucauugcug

SEQ ID NO: 3654305 - RNA, 18 nt, Human
cuaaagauggaguuucua

SEQ ID NO: 3654306 - RNA, 19 nt, Human
cuaaagauggaguuucuaa

SEQ ID NO: 3654307 - RNA, 13 nt, Human
cuaaagcaggccu

SEQ ID NO: 3654308 - RNA, 14 nt, Human
cuaaagcaugaaau

SEQ ID NO: 3654309 - RNA, 20 nt, Human
cuaaagcaugaaaugugaau

SEQ ID NO: 3654310 - RNA, 14 nt, Human
cuaaagccuuuauu

SEQ ID NO: 3654311 - RNA, 14 nt, Human
cuaaagcucugaca

SEQ ID NO: 3654312 - RNA, 14 nt, Human
cuaaagcugccagc

SEQ ID NO: 3654313 - RNA, 17 nt, Human
cuaaagcugguuuaaug

SEQ ID NO: 3654314 - RNA, 19 nt, Human
cuaaaggaaaaaaccaucc

SEQ ID NO: 3654315 - RNA, 15 nt, Human
cuaaaggcuaccuuu

SEQ ID NO: 3654316 - RNA, 16 nt, Human
cuaaaggcuaccuuug

SEQ ID NO: 3654317 - RNA, 19 nt, Human
cuaaagguguugucccuuc

SEQ ID NO: 3654318 - RNA, 22 nt, Human
cuaaaguacugagcagugauau

SEQ ID NO: 3654319 - RNA, 21 nt, Human
cuacuuugguuucugucugua

SEQ ID NO: 3654320 - RNA, 20 nt, Human
cuacuuuguccuuuuuguua

SEQ ID NO: 3654321 - RNA, 22 nt, Human
cuacuuuuaaagaauuucuuua

SEQ ID NO: 3654322 - RNA, 15 nt, Human
cuacuuuuuaacaga

SEQ ID NO: 3654323 - RNA, 16 nt, Human
cuagaaaaacaggcac

SEQ ID NO: 3654324 - RNA, 23 nt, Human
cuagaaaacauuuuuuuuuuaaa

SEQ ID NO: 3654325 - RNA, 22 nt, Human
cuagaaaacgcgaccuuggccg

SEQ ID NO: 3654326 - RNA, 21 nt, Human
cuagaaacccaagcuccuccu

SEQ ID NO: 3654327 - RNA, 18 nt, Human
cuagaaagaauauuuggu

SEQ ID NO: 3654328 - RNA, 17 nt, Human
cuagaaagcagagauuu

SEQ ID NO: 3654329 - RNA, 17 nt, Human
cuagaaauaugauuuua

SEQ ID NO: 3654330 - RNA, 19 nt, Human
cuagaaauuccccacccug

SEQ ID NO: 3654331 - RNA, 23 nt, Human
cuagaaauuuuucagaugcuucu

SEQ ID NO: 3654332 - RNA, 20 nt, Human
cuagaacacuaacucaccag

SEQ ID NO: 3654333 - RNA, 18 nt, Human
cuagaaccuggaagggcu

SEQ ID NO: 3654334 - RNA, 19 nt, Human
cuagaacucccuuucaaca

SEQ ID NO: 3654335 - RNA, 18 nt, Human
cuagaacucuccaucuua

SEQ ID NO: 3654336 - RNA, 11 nt, Human
cuagaacuuuu

SEQ ID NO: 3654337 - RNA, 18 nt, Human
cuagaacuuuuuuaaaua

SEQ ID NO: 3654338 - RNA, 20 nt, Human
cuagaacuuuuuuaaauaaa

SEQ ID NO: 3654339 - RNA, 21 nt, Human
cuagaacuuuuuuaaauaaac

SEQ ID NO: 3654340 - RNA, 13 nt, Human
cuagaagaaauga

SEQ ID NO: 3654341 - RNA, 16 nt, Human
cuagaagaaaugaaau

SEQ ID NO: 3654342 - RNA, 17 nt, Human
cuagaagaaaugaaauu

SEQ ID NO: 3654343 - RNA, 20 nt, Human
cuagaagagucuauugucuc

SEQ ID NO: 3654344 - RNA, 15 nt, Human
cuagaagaugaauac

SEQ ID NO: 3654345 - RNA, 21 nt, Human
cuagaagaugaauacaaacaa

SEQ ID NO: 3654346 - RNA, 13 nt, Human
cuagaaggccaca

SEQ ID NO: 3654347 - RNA, 20 nt, Human
cuagaagggccaguccugcc

SEQ ID NO: 3654348 - RNA, 23 nt, Human
cuagaagggccaguccugccugg

SEQ ID NO: 3654349 - RNA, 19 nt, Human
cuagaagugggccaggaca

SEQ ID NO: 3654350 - RNA, 15 nt, Human
cuagaaguuacugaa

SEQ ID NO: 3654351 - RNA, 20 nt, Human
cuagaaguuacugaaugcac

SEQ ID NO: 3654352 - RNA, 18 nt, Human
cuagaaguuucccuuccu

SEQ ID NO: 3654353 - RNA, 20 nt, Human
cuagaaguuucccuuccucc

SEQ ID NO: 3654354 - RNA, 22 nt, Human
cuagaaguuucccuuccuccau

SEQ ID NO: 3654355 - RNA, 12 nt, Human
cuagaauacuuu

SEQ ID NO: 3654356 - RNA, 20 nt, Human
ccagcuccuccgugcuuccu

SEQ ID NO: 3654357 - RNA, 12 nt, Human
ccagcuccugac

SEQ ID NO: 3654358 - RNA, 12 nt, Human
ccagcucucagc

SEQ ID NO: 3654359 - RNA, 14 nt, Human
ccagcucucagcca

SEQ ID NO: 3654360 - RNA, 17 nt, Human
ccagcucucccucuggc

SEQ ID NO: 3654361 - RNA, 22 nt, Human
ccagcucucccucuggcccugc

SEQ ID NO: 3654362 - RNA, 23 nt, Human
ccagcucucccucuggcccugcc

SEQ ID NO: 3654363 - RNA, 21 nt, Human
ccagcucugccgucucuggag

SEQ ID NO: 3654364 - RNA, 11 nt, Human
ccagcucuggu

SEQ ID NO: 3654365 - RNA, 12 nt, Human
ccagcucugguc

SEQ ID NO: 3654366 - RNA, 13 nt, Human
ccagcucuggucc

SEQ ID NO: 3654367 - RNA, 22 nt, Human
ccagcucugguccauagagagc

SEQ ID NO: 3654368 - RNA, 17 nt, Human
ccagcucuguucuuccu

SEQ ID NO: 3654369 - RNA, 20 nt, Human
ccagcucuguucuuccucag

SEQ ID NO: 3654370 - RNA, 22 nt, Human
ccagcucuguucuuccucagcc

SEQ ID NO: 3654371 - RNA, 16 nt, Human
ccagcucuuccuagcu

SEQ ID NO: 3654372 - RNA, 14 nt, Human
ccagcucuuuccuc

SEQ ID NO: 3654373 - RNA, 21 nt, Human
ccagcugaaauacugaggggu

SEQ ID NO: 3654374 - RNA, 23 nt, Human
ccagcugacaguccucuccaccu

SEQ ID NO: 3654375 - RNA, 21 nt, Human
ccagcugacaucuugaauccu

SEQ ID NO: 3654376 - RNA, 17 nt, Human
ccagcugacuaaacuuu

SEQ ID NO: 3654377 - RNA, 17 nt, Human
ccagcugagcgccagga

SEQ ID NO: 3654378 - RNA, 17 nt, Human
ccagcugaugacucaag

SEQ ID NO: 3654379 - RNA, 16 nt, Human
ccagcugcaccagagc

SEQ ID NO: 3654380 - RNA, 22 nt, Human
ccagcugcaccccuuccugggc

SEQ ID NO: 3654381 - RNA, 20 nt, Human
ccagcugcaccugccagccu

SEQ ID NO: 3654382 - RNA, 22 nt, Human
ccagcugcaccugccagccugg

SEQ ID NO: 3654383 - RNA, 19 nt, Human
ccagcugcaggaaucaaaa

SEQ ID NO: 3654384 - RNA, 20 nt, Human
ccagcugcaggaaucaaaaa

SEQ ID NO: 3654385 - RNA, 18 nt, Human
ccagcugccccagccaga

SEQ ID NO: 3654386 - RNA, 21 nt, Human
ccagcugcccccagagccaca

SEQ ID NO: 3654387 - RNA, 23 nt, Human
ccagcugcccccagagccacagu

SEQ ID NO: 3654388 - RNA, 16 nt, Human
ccagcugccccucccu

SEQ ID NO: 3654389 - RNA, 19 nt, Human
ccagcugccccucccugcc

SEQ ID NO: 3654390 - RNA, 20 nt, Human
ccagcugcccuaugggccug

SEQ ID NO: 3654391 - RNA, 21 nt, Human
ccagcugcccuaugggccugc

SEQ ID NO: 3654392 - RNA, 20 nt, Human
ccagcugccgaccagagccc

SEQ ID NO: 3654393 - RNA, 13 nt, Human
ccagcugccucuu

SEQ ID NO: 3654394 - RNA, 16 nt, Human
ccagcugcgcuugcuu

SEQ ID NO: 3654395 - RNA, 14 nt, Human
ccagcugcuccccu

SEQ ID NO: 3654396 - RNA, 13 nt, Human
ccagcugcucugc

SEQ ID NO: 3654397 - RNA, 16 nt, Human
ccagcugcucugccca

SEQ ID NO: 3654398 - RNA, 17 nt, Human
ccagcugcucugcccag

SEQ ID NO: 3654399 - RNA, 18 nt, Human
ccagcugcucugcccaga

SEQ ID NO: 3654400 - RNA, 19 nt, Human
ccagcugcucugcccagag

SEQ ID NO: 3654401 - RNA, 20 nt, Human
ccagcugcucugcccagagc

SEQ ID NO: 3654402 - RNA, 23 nt, Human
ccagcugcucugcccagagcugg

SEQ ID NO: 3654403 - RNA, 20 nt, Human
ccagcugcugagauccugga

SEQ ID NO: 3654404 - RNA, 16 nt, Human
ccagcugcugagccgc

SEQ ID NO: 3654405 - RNA, 15 nt, Human
ccagcugcugcucug

SEQ ID NO: 3654406 - RNA, 15 nt, Human
ccagcugcuugggcu

SEQ ID NO: 3654407 - RNA, 23 nt, Human
ccagcugcuugggcuucauccuc

SEQ ID NO: 3654408 - RNA, 13 nt, Human
ccagcuggaggca

SEQ ID NO: 3654409 - RNA, 15 nt, Human
ccagcuggaggcagg

SEQ ID NO: 3654410 - RNA, 17 nt, Human
ccagcuggccgggagcc

SEQ ID NO: 3654411 - RNA, 12 nt, Human
ccagcuggccug

SEQ ID NO: 3654412 - RNA, 13 nt, Human
ccagcuggccugg

SEQ ID NO: 3654413 - RNA, 14 nt, Human
ccagcuggccuuug

SEQ ID NO: 3654414 - RNA, 16 nt, Human
ccagcuggccuuugua

SEQ ID NO: 3654415 - RNA, 19 nt, Human
ccagcugggaggcaagagg

SEQ ID NO: 3654416 - RNA, 18 nt, Human
ccagcugggcucugcaau

SEQ ID NO: 3654417 - RNA, 19 nt, Human
ccagcugggcucugcaauu

SEQ ID NO: 3654418 - RNA, 17 nt, Human
ccagcugggcucugcca

SEQ ID NO: 3654419 - RNA, 21 nt, Human
ccagcugggcucugccacccu

SEQ ID NO: 3654420 - RNA, 17 nt, Human
ccagcuggggccaggcu

SEQ ID NO: 3654421 - RNA, 18 nt, Human
ccagcuggggccaggcug

SEQ ID NO: 3654422 - RNA, 22 nt, Human
ccagcuggggccaggcuggguc

SEQ ID NO: 3654423 - RNA, 22 nt, Human
ccagcuggggcguggggagggc

SEQ ID NO: 3654424 - RNA, 17 nt, Human
ccagcuggguuggaaaa

SEQ ID NO: 3654425 - RNA, 13 nt, Human
ccagcugucugug

SEQ ID NO: 3654426 - RNA, 14 nt, Human
ccagcugugagccu

SEQ ID NO: 3654427 - RNA, 19 nt, Human
ccagcugugagccuuggcu

SEQ ID NO: 3654428 - RNA, 23 nt, Human
ccagcugugcucuggacaggcau

SEQ ID NO: 3654429 - RNA, 23 nt, Human
ccagcugugguuuucuuuugcca

SEQ ID NO: 3654430 - RNA, 22 nt, Human
ccagcuguucugucccuuggag

SEQ ID NO: 3654431 - RNA, 19 nt, Human
ccagcuuaaaggggcuaga

SEQ ID NO: 3654432 - RNA, 21 nt, Human
ccagcuuaaaguaaccggaug

SEQ ID NO: 3654433 - RNA, 16 nt, Human
ccagcuuaucucaggg

SEQ ID NO: 3654434 - RNA, 15 nt, Human
ccagcuucacuucug

SEQ ID NO: 3654435 - RNA, 20 nt, Human
ccagcuucacuucugacucu

SEQ ID NO: 3654436 - RNA, 14 nt, Human
ccagcuuccuucag

SEQ ID NO: 3654437 - RNA, 14 nt, Human
ccagcuucuccagg

SEQ ID NO: 3654438 - RNA, 22 nt, Human
ccagcuugccagaugcugcaga

SEQ ID NO: 3654439 - RNA, 16 nt, Human
ccagcuugcucuucag

SEQ ID NO: 3654440 - RNA, 14 nt, Human
ccagcuuggcucag

SEQ ID NO: 3654441 - RNA, 14 nt, Human
ccagcuugggcaga

SEQ ID NO: 3654442 - RNA, 17 nt, Human
ccagcuugggcagaucu

SEQ ID NO: 3654443 - RNA, 24 nt, Human
ccagcuugggcccagcugggcucu

SEQ ID NO: 3654444 - RNA, 14 nt, Human
ccagcuuggggcca

SEQ ID NO: 3654445 - RNA, 21 nt, Human
ccagcuuggggccaccaaagc

SEQ ID NO: 3654446 - RNA, 18 nt, Human
ccagcuuguggagcccca

SEQ ID NO: 3654447 - RNA, 16 nt, Human
ccagcuuguuauuuau

SEQ ID NO: 3654448 - RNA, 12 nt, Human
ccagcuuucccu

SEQ ID NO: 3654449 - RNA, 19 nt, Human
ccagcuuugcccaacacca

SEQ ID NO: 3654450 - RNA, 22 nt, Human
ccagcuuugcccaacaccagcc

SEQ ID NO: 3654451 - RNA, 16 nt, Human
ccagcuuuuaaccauc

SEQ ID NO: 3654452 - RNA, 16 nt, Human
ccagcuuuucauugcu

SEQ ID NO: 3654453 - RNA, 23 nt, Human
ccagcuuuucccaaaagcccauu

SEQ ID NO: 3654454 - RNA, 18 nt, Human
ccagcuuuuccucccuug

SEQ ID NO: 3654455 - RNA, 15 nt, Human
ccaggaaaaaggaca

SEQ ID NO: 3654456 - RNA, 16 nt, Human
ccaggaaaggcuccag

SEQ ID NO: 3654457 - RNA, 14 nt, Human
ccaggaacugggcc

SEQ ID NO: 3654458 - RNA, 19 nt, Human
ccaggaagaucccccagaa

SEQ ID NO: 3654459 - RNA, 17 nt, Human
ccaggaagccagcaggc

SEQ ID NO: 3654460 - RNA, 22 nt, Human
ccaggaagccagcaggcucuca

SEQ ID NO: 3654461 - RNA, 15 nt, Human
ccaggaagcccagga

SEQ ID NO: 3654462 - RNA, 22 nt, Human
ccaggccaaaggggaccuggaa

SEQ ID NO: 3654463 - RNA, 12 nt, Human
ccaggccaccag

SEQ ID NO: 3654464 - RNA, 15 nt, Human
ccaggccaccaggau

SEQ ID NO: 3654465 - RNA, 16 nt, Human
ccaggccaccucccca

SEQ ID NO: 3654466 - RNA, 22 nt, Human
ccaggccagagggagugacaga

SEQ ID NO: 3654467 - RNA, 12 nt, Human
ccaggccagccu

SEQ ID NO: 3654468 - RNA, 21 nt, Human
ccaggccaggacucugcagcc

SEQ ID NO: 3654469 - RNA, 22 nt, Human
ccaggccaggacucugcagccu

SEQ ID NO: 3654470 - RNA, 23 nt, Human
ccaggccaggacucugcagccuc

SEQ ID NO: 3654471 - RNA, 18 nt, Human
ccaggccaggcauguggc

SEQ ID NO: 3654472 - RNA, 14 nt, Human
ccaggccaucagag

SEQ ID NO: 3654473 - RNA, 22 nt, Human
ccaggccauccggcccccagag

SEQ ID NO: 3654474 - RNA, 16 nt, Human
ccaggccaucuuccag

SEQ ID NO: 3654475 - RNA, 14 nt, Human
ccaggcccacucag

SEQ ID NO: 3654476 - RNA, 18 nt, Human
ccaggcccagccgacccc

SEQ ID NO: 3654477 - RNA, 15 nt, Human
ccaggccccaggaag

SEQ ID NO: 3654478 - RNA, 17 nt, Human
ccaggccccaggaagcc

SEQ ID NO: 3654479 - RNA, 16 nt, Human
ccaggccccaugaccu

SEQ ID NO: 3654480 - RNA, 21 nt, Human
ccaggccccaugaccuccagc

SEQ ID NO: 3654481 - RNA, 19 nt, Human
ccaggcccccaccacacau

SEQ ID NO: 3654482 - RNA, 20 nt, Human
ccaggcccccaccacacauc

SEQ ID NO: 3654483 - RNA, 20 nt, Human
ccaggccccgaggacccaga

SEQ ID NO: 3654484 - RNA, 20 nt, Human
ccaggccccgcucauucuuu

SEQ ID NO: 3654485 - RNA, 14 nt, Human
ccaggccccugcca

SEQ ID NO: 3654486 - RNA, 19 nt, Human
ccaggccccugccacccug

SEQ ID NO: 3654487 - RNA, 15 nt, Human
ccaggccccuggagg

SEQ ID NO: 3654488 - RNA, 23 nt, Human
ccaggccccuggaggcugccucc

SEQ ID NO: 3654489 - RNA, 20 nt, Human
ccaggcccggggcuggcggc

SEQ ID NO: 3654490 - RNA, 16 nt, Human
ccaggcccgucugucc

SEQ ID NO: 3654491 - RNA, 23 nt, Human
ccaggcccgucuguccaucugcc

SEQ ID NO: 3654492 - RNA, 19 nt, Human
ccaggcccuccucucccau

SEQ ID NO: 3654493 - RNA, 15 nt, Human
ccaggcccucugccc

SEQ ID NO: 3654494 - RNA, 17 nt, Human
ccaggcccucugcccac

SEQ ID NO: 3654495 - RNA, 16 nt, Human
ccaggccgcagcucuu

SEQ ID NO: 3654496 - RNA, 17 nt, Human
ccaggccgcagcucuug

SEQ ID NO: 3654497 - RNA, 21 nt, Human
ccaggccgcagcucuugcccu

SEQ ID NO: 3654498 - RNA, 19 nt, Human
ccaggccgcgcccuuuccc

SEQ ID NO: 3654499 - RNA, 18 nt, Human
ccaggccggccagccuca

SEQ ID NO: 3654500 - RNA, 18 nt, Human
ccaggccggcgagcccug

SEQ ID NO: 3654501 - RNA, 18 nt, Human
ccaggccgggccuguaca

SEQ ID NO: 3654502 - RNA, 19 nt, Human
ccaggccgggccuguacag

SEQ ID NO: 3654503 - RNA, 22 nt, Human
ccaggccguccucccgggcccu

SEQ ID NO: 3654504 - RNA, 19 nt, Human
ccaggccuccagcucagca

SEQ ID NO: 3654505 - RNA, 19 nt, Human
ccaggccuccuacagcuug

SEQ ID NO: 3654506 - RNA, 18 nt, Human
ccaggccucuguguccuu

SEQ ID NO: 3654507 - RNA, 19 nt, Human
ccaggccugaaagaggcug

SEQ ID NO: 3654508 - RNA, 16 nt, Human
ccaggccugccuccca

SEQ ID NO: 3654509 - RNA, 19 nt, Human
ccaggccugggucuguguc

SEQ ID NO: 3654510 - RNA, 18 nt, Human
ccaggcgaugugcaagug

SEQ ID NO: 3654511 - RNA, 18 nt, Human
ccaggcgcaggggcucac

SEQ ID NO: 3654512 - RNA, 16 nt, Human
ccaggcgcuagcacag

SEQ ID NO: 3654513 - RNA, 17 nt, Human
ccaggcgggcucaagga

SEQ ID NO: 3654514 - RNA, 24 nt, Human
ccaggcuaauuuuuuuguauuuua

SEQ ID NO: 3654515 - RNA, 18 nt, Human
ccaggcuagcuggagccu

SEQ ID NO: 3654516 - RNA, 20 nt, Human
ccaggcuaguccggacccac

SEQ ID NO: 3654517 - RNA, 17 nt, Human
ccaggcucacucacaga

SEQ ID NO: 3654518 - RNA, 21 nt, Human
cucaaccuguaaauuauuuua

SEQ ID NO: 3654519 - RNA, 16 nt, Human
cucaacguauuguuuc

SEQ ID NO: 3654520 - RNA, 18 nt, Human
cucaacuagcagauacag

SEQ ID NO: 3654521 - RNA, 21 nt, Human
cucaacucuccuccagaguca

SEQ ID NO: 3654522 - RNA, 16 nt, Human
cucaacucugcugagg

SEQ ID NO: 3654523 - RNA, 17 nt, Human
cucaacucugcugaggg

SEQ ID NO: 3654524 - RNA, 18 nt, Human
cucaacucugcugagggu

SEQ ID NO: 3654525 - RNA, 13 nt, Human
cucaacuuucugu

SEQ ID NO: 3654526 - RNA, 13 nt, Human
cucaagaagcagg

SEQ ID NO: 3654527 - RNA, 23 nt, Human
cucaagaagcaggcuacacugac

SEQ ID NO: 3654528 - RNA, 23 nt, Human
cucaagacccuuuuggguuucug

SEQ ID NO: 3654529 - RNA, 16 nt, Human
cucaagacuuccagag

SEQ ID NO: 3654530 - RNA, 16 nt, Human
cucaagaggaaugaaa

SEQ ID NO: 3654531 - RNA, 21 nt, Human
cucaagagggcacugguggcc

SEQ ID NO: 3654532 - RNA, 21 nt, Human
cucaagauacugcuacuguaa

SEQ ID NO: 3654533 - RNA, 18 nt, Human
cucaagaucaaugaaaug

SEQ ID NO: 3654534 - RNA, 16 nt, Human
cucaagaugaaggcaa

SEQ ID NO: 3654535 - RNA, 14 nt, Human
cucaagauucccag

SEQ ID NO: 3654536 - RNA, 17 nt, Human
cucaagcaauccuccug

SEQ ID NO: 3654537 - RNA, 22 nt, Human
cucaagcaauccuccugaguga

SEQ ID NO: 3654538 - RNA, 23 nt, Human
cucaagcagcgaccgcccccucc

SEQ ID NO: 3654539 - RNA, 23 nt, Human
cucaagcagucuacccaccucag

SEQ ID NO: 3654540 - RNA, 20 nt, Human
cucaagccaauccccuccuu

SEQ ID NO: 3654541 - RNA, 16 nt, Human
cucaagcgauucuccu

SEQ ID NO: 3654542 - RNA, 17 nt, Human
cucaagcgauucuccug

SEQ ID NO: 3654543 - RNA, 17 nt, Human
cucaaggaaaggccuga

SEQ ID NO: 3654544 - RNA, 14 nt, Human
cucaaggaaagggg

SEQ ID NO: 3654545 - RNA, 14 nt, Human
cucaaggaaucuuu

SEQ ID NO: 3654546 - RNA, 18 nt, Human
cucaaggacaaagucucc

SEQ ID NO: 3654547 - RNA, 19 nt, Human
cucaaggacaaagucucca

SEQ ID NO: 3654548 - RNA, 22 nt, Human
cucaaggacaaagucuccagcc

SEQ ID NO: 3654549 - RNA, 15 nt, Human
cucaaggacuugaaa

SEQ ID NO: 3654550 - RNA, 20 nt, Human
cucaaggacuugaaagcauc

SEQ ID NO: 3654551 - RNA, 20 nt, Human
cucaaggauaccuucuuauu

SEQ ID NO: 3654552 - RNA, 16 nt, Human
cucaaggccucccaca

SEQ ID NO: 3654553 - RNA, 17 nt, Human
cucaaggccucccacag

SEQ ID NO: 3654554 - RNA, 15 nt, Human
cucaaggcgugagga

SEQ ID NO: 3654555 - RNA, 16 nt, Human
cucaaggcgugaggau

SEQ ID NO: 3654556 - RNA, 20 nt, Human
cucaagggacaaggacacgc

SEQ ID NO: 3654557 - RNA, 18 nt, Human
cucaagggggacugucuu

SEQ ID NO: 3654558 - RNA, 19 nt, Human
cucaaggugggccuugcua

SEQ ID NO: 3654559 - RNA, 20 nt, Human
cucaagguuuuagguucuaa

SEQ ID NO: 3654560 - RNA, 14 nt, Human
cucaaguagcauuu

SEQ ID NO: 3654561 - RNA, 15 nt, Human
cucaaguagcauuua

SEQ ID NO: 3654562 - RNA, 18 nt, Human
cucaagucuucccugauc

SEQ ID NO: 3654563 - RNA, 21 nt, Human
cucaagucuuucucuuucccu

SEQ ID NO: 3654564 - RNA, 18 nt, Human
cucaagugauucuccugc

SEQ ID NO: 3654565 - RNA, 20 nt, Human
cucaagugauucuccugccu

SEQ ID NO: 3654566 - RNA, 14 nt, Human
cucaaguucaagga

SEQ ID NO: 3654567 - RNA, 17 nt, Human
cucaaguucaaggacca

SEQ ID NO: 3654568 - RNA, 13 nt, Human
cucaaguucuaag

SEQ ID NO: 3654569 - RNA, 14 nt, Human
cucaaguucuaaga

SEQ ID NO: 3654570 - RNA, 20 nt, Human
cucaaguuucuucaaucuga

SEQ ID NO: 3654571 - RNA, 19 nt, Human
cucaaguuuuucagaaagc

SEQ ID NO: 3654572 - RNA, 20 nt, Human
cucaaguuuuucagaaagca

SEQ ID NO: 3654573 - RNA, 22 nt, Human
cucaauaaaaucauguacauuu

SEQ ID NO: 3654574 - RNA, 14 nt, Human
cucaauaaaguaca

SEQ ID NO: 3654575 - RNA, 16 nt, Human
cucaauauucaauaaa

SEQ ID NO: 3654576 - RNA, 19 nt, Human
cucaauauucaauaaagcu

SEQ ID NO: 3654577 - RNA, 16 nt, Human
cucaauauuccugaau

SEQ ID NO: 3654578 - RNA, 18 nt, Human
cucaauauuccugaauga

SEQ ID NO: 3654579 - RNA, 16 nt, Human
cucaaucagucucaga

SEQ ID NO: 3654580 - RNA, 15 nt, Human
cucaaucccugagga

SEQ ID NO: 3654581 - RNA, 23 nt, Human
cucaauccuaauuucuccucccu

SEQ ID NO: 3654582 - RNA, 14 nt, Human
cucaauccucuaag

SEQ ID NO: 3654583 - RNA, 17 nt, Human
cucaauccugcaguggg

SEQ ID NO: 3654584 - RNA, 19 nt, Human
cucaaugagcauguuuaga

SEQ ID NO: 3654585 - RNA, 12 nt, Human
cucaaugcucau

SEQ ID NO: 3654586 - RNA, 17 nt, Human
cucaaugcuguuugggu

SEQ ID NO: 3654587 - RNA, 17 nt, Human
cucaaugcuuuauuugu

SEQ ID NO: 3654588 - RNA, 13 nt, Human
cucaauggacugg

SEQ ID NO: 3654589 - RNA, 14 nt, Human
cucaauggacugga

SEQ ID NO: 3654590 - RNA, 16 nt, Human
cucaaugugaccaggg

SEQ ID NO: 3654591 - RNA, 18 nt, Human
cucaauguuuguaauaau

SEQ ID NO: 3654592 - RNA, 19 nt, Human
cucaauucauauuuaugaa

SEQ ID NO: 3654593 - RNA, 12 nt, Human
cucaauuccaac

SEQ ID NO: 3654594 - RNA, 16 nt, Human
cucaauuccaacaguu

SEQ ID NO: 3654595 - RNA, 16 nt, Human
cucaauugcuuuguaa

SEQ ID NO: 3654596 - RNA, 13 nt, Human
cucaauuucuccc

SEQ ID NO: 3654597 - RNA, 16 nt, Human
cucaauuucuccccag

SEQ ID NO: 3654598 - RNA, 16 nt, Human
cucaauuuuugucuca

SEQ ID NO: 3654599 - RNA, 18 nt, Human
cucaauuuuugucucaga

SEQ ID NO: 3654600 - RNA, 11 nt, Human
cucacaaaaga

SEQ ID NO: 3654601 - RNA, 22 nt, Human
cucacaaaccaugcaaaugcua

SEQ ID NO: 3654602 - RNA, 15 nt, Human
cucacaagaagacca

SEQ ID NO: 3654603 - RNA, 14 nt, Human
cucacaaggcagca

SEQ ID NO: 3654604 - RNA, 16 nt, Human
cucacaaggcagcaag

SEQ ID NO: 3654605 - RNA, 19 nt, Human
cucacaaggcagcaaggcc

SEQ ID NO: 3654606 - RNA, 19 nt, Human
ccagugaggcucugcccuu

SEQ ID NO: 3654607 - RNA, 23 nt, Human
ccagugagggacgucagacuugg

SEQ ID NO: 3654608 - RNA, 19 nt, Human
ccagugagucucuggggca

SEQ ID NO: 3654609 - RNA, 19 nt, Human
ccagugauucgagcuauau

SEQ ID NO: 3654610 - RNA, 17 nt, Human
ccagugcaggcuggcca

SEQ ID NO: 3654611 - RNA, 23 nt, Human
ccagugcaguuugguguguccuc

SEQ ID NO: 3654612 - RNA, 15 nt, Human
ccagugcaugguggc

SEQ ID NO: 3654613 - RNA, 22 nt, Human
ccagugcccaaagucuguguga

SEQ ID NO: 3654614 - RNA, 13 nt, Human
ccagugcccauuc

SEQ ID NO: 3654615 - RNA, 14 nt, Human
ccagugcccccacu

SEQ ID NO: 3654616 - RNA, 18 nt, Human
ccagugcccccacugacc

SEQ ID NO: 3654617 - RNA, 16 nt, Human
ccagugcccugauccc

SEQ ID NO: 3654618 - RNA, 15 nt, Human
ccagugcccuggggc

SEQ ID NO: 3654619 - RNA, 20 nt, Human
ccagugccgagaaggaagcc

SEQ ID NO: 3654620 - RNA, 23 nt, Human
ccagugccuuaccuccugcccag

SEQ ID NO: 3654621 - RNA, 16 nt, Human
ccagugcgauucugga

SEQ ID NO: 3654622 - RNA, 20 nt, Human
ccagugcuccaggcacccag

SEQ ID NO: 3654623 - RNA, 18 nt, Human
ccaguggaagaagaaaac

SEQ ID NO: 3654624 - RNA, 16 nt, Human
ccaguggagguuuguc

SEQ ID NO: 3654625 - RNA, 21 nt, Human
ccaguggaugccacagcccag

SEQ ID NO: 3654626 - RNA, 15 nt, Human
ccaguggcagggcac

SEQ ID NO: 3654627 - RNA, 18 nt, Human
ccaguggcagggcacagg

SEQ ID NO: 3654628 - RNA, 19 nt, Human
ccaguggcagggcacaggg

SEQ ID NO: 3654629 - RNA, 22 nt, Human
ccaguggcagggcacagggccu

SEQ ID NO: 3654630 - RNA, 23 nt, Human
ccaguggcagggcacagggccug

SEQ ID NO: 3654631 - RNA, 17 nt, Human
ccaguggccucaacccu

SEQ ID NO: 3654632 - RNA, 16 nt, Human
ccaguggccuggcucc

SEQ ID NO: 3654633 - RNA, 20 nt, Human
ccaguggcguuguugcaugu

SEQ ID NO: 3654634 - RNA, 15 nt, Human
ccaguggcugcugcc

SEQ ID NO: 3654635 - RNA, 16 nt, Human
ccaguggcugcugccc

SEQ ID NO: 3654636 - RNA, 17 nt, Human
ccaguggcugcugccca

SEQ ID NO: 3654637 - RNA, 18 nt, Human
ccaguggcugcugcccag

SEQ ID NO: 3654638 - RNA, 13 nt, Human
ccagugggaagau

SEQ ID NO: 3654639 - RNA, 12 nt, Human
ccagugggaggg

SEQ ID NO: 3654640 - RNA, 19 nt, Human
ccagugggaggggcaggcu

SEQ ID NO: 3654641 - RNA, 20 nt, Human
ccagugggaggggcaggcug

SEQ ID NO: 3654642 - RNA, 23 nt, Human
ccagugggaggggcaggcugaca

SEQ ID NO: 3654643 - RNA, 21 nt, Human
ccaguggggccugaggcuccu

SEQ ID NO: 3654644 - RNA, 14 nt, Human
ccaguggggccugu

SEQ ID NO: 3654645 - RNA, 22 nt, Human
ccaguggggccuguggaaugag

SEQ ID NO: 3654646 - RNA, 13 nt, Human
ccaguggucucac

SEQ ID NO: 3654647 - RNA, 17 nt, Human
ccaguggucucacaugg

SEQ ID NO: 3654648 - RNA, 14 nt, Human
ccagugguugcugu

SEQ ID NO: 3654649 - RNA, 19 nt, Human
ccagugguuuccagucaug

SEQ ID NO: 3654650 - RNA, 22 nt, Human
ccaguguaaucccccaggagaa

SEQ ID NO: 3654651 - RNA, 19 nt, Human
ccagugucaaguugugcuu

SEQ ID NO: 3654652 - RNA, 18 nt, Human
ccaguguccauggacuca

SEQ ID NO: 3654653 - RNA, 14 nt, Human
ccaguguccccucc

SEQ ID NO: 3654654 - RNA, 16 nt, Human
ccaguguccccuccac

SEQ ID NO: 3654655 - RNA, 22 nt, Human
ccaguguccccuccacugucac

SEQ ID NO: 3654656 - RNA, 16 nt, Human
ccagugucuuccugug

SEQ ID NO: 3654657 - RNA, 17 nt, Human
ccagugucuuccugugg

SEQ ID NO: 3654658 - RNA, 13 nt, Human
ccagugucuuucu

SEQ ID NO: 3654659 - RNA, 14 nt, Human
ccagugucuuucuu

SEQ ID NO: 3654660 - RNA, 16 nt, Human
ccagugucuuucuuug

SEQ ID NO: 3654661 - RNA, 14 nt, Human
ccagugugacaagg

SEQ ID NO: 3654662 - RNA, 15 nt, Human
ccagugugcugaugg

SEQ ID NO: 3654663 - RNA, 12 nt, Human
ccaguguggaac

SEQ ID NO: 3654664 - RNA, 18 nt, Human
ccagugugggcuugacca

SEQ ID NO: 3654665 - RNA, 17 nt, Human
ccaguguugccuaagua

SEQ ID NO: 3654666 - RNA, 17 nt, Human
ccaguuaaaaaaaauuu

SEQ ID NO: 3654667 - RNA, 19 nt, Human
ccaguuaaaauguguuucu

SEQ ID NO: 3654668 - RNA, 17 nt, Human
ccaguuaaucuugcuuu

SEQ ID NO: 3654669 - RNA, 18 nt, Human
ccaguuaauuuuuccaac

SEQ ID NO: 3654670 - RNA, 23 nt, Human
ccaguuacuuuccaauucuccuu

SEQ ID NO: 3654671 - RNA, 12 nt, Human
ccaguucaaaaa

SEQ ID NO: 3654672 - RNA, 19 nt, Human
ccaguucaaucucccgcug

SEQ ID NO: 3654673 - RNA, 15 nt, Human
ccaguucagcuuggg

SEQ ID NO: 3654674 - RNA, 18 nt, Human
ccaguucaggagucccaa

SEQ ID NO: 3654675 - RNA, 19 nt, Human
ccaguucaguaccuggagg

SEQ ID NO: 3654676 - RNA, 17 nt, Human
ccaguucauugcacuuu

SEQ ID NO: 3654677 - RNA, 18 nt, Human
ccaguucauugcacuuug

SEQ ID NO: 3654678 - RNA, 21 nt, Human
ccaguuccuuucaaugguuug

SEQ ID NO: 3654679 - RNA, 18 nt, Human
ccaguucgccuggagccc

SEQ ID NO: 3654680 - RNA, 14 nt, Human
ccaguucugcuccu

SEQ ID NO: 3654681 - RNA, 19 nt, Human
ccaguucugcuccucucca

SEQ ID NO: 3654682 - RNA, 14 nt, Human
ccaguugcacuugg

SEQ ID NO: 3654683 - RNA, 12 nt, Human
ccaguugcaguc

SEQ ID NO: 3654684 - RNA, 15 nt, Human
ccaguugccaucugc

SEQ ID NO: 3654685 - RNA, 14 nt, Human
ccaguugccuuuua

SEQ ID NO: 3654686 - RNA, 21 nt, Human
ccaguugcugcuucaauuuau

SEQ ID NO: 3654687 - RNA, 18 nt, Human
ccaguuuauuccagagcu

SEQ ID NO: 3654688 - RNA, 12 nt, Human
ccaguuucugcc

SEQ ID NO: 3654689 - RNA, 13 nt, Human
ccaguuugcagaa

SEQ ID NO: 3654690 - RNA, 23 nt, Human
ccaguuugcagaaaagcaccugc

SEQ ID NO: 3654691 - RNA, 13 nt, Human
ccaguuugcuuug

SEQ ID NO: 3654692 - RNA, 20 nt, Human
ccaguuuggguaaaauacuu

SEQ ID NO: 3654693 - RNA, 22 nt, Human
ccaguuuggguaaaauacuuuu

SEQ ID NO: 3654694 - RNA, 19 nt, Human
ccauaaaacauuaagaaaa

SEQ ID NO: 3654695 - RNA, 22 nt, Human
ccauaaacacccaugaaucaaa

SEQ ID NO: 3654696 - RNA, 16 nt, Human
ccauaaccgcugauuc

SEQ ID NO: 3654697 - RNA, 17 nt, Human
ccauaaccgcugauucu

SEQ ID NO: 3654698 - RNA, 19 nt, Human
ccauaagcaacaauuuuca

SEQ ID NO: 3654699 - RNA, 16 nt, Human
ccauaagcuacugcca

SEQ ID NO: 3654700 - RNA, 20 nt, Human
ccauaauuaugacaguuaua

SEQ ID NO: 3654701 - RNA, 23 nt, Human
ccauaauuuucuucaugcaauga

SEQ ID NO: 3654702 - RNA, 20 nt, Human
ccauaauuuuuuuuuuccuu

SEQ ID NO: 3654703 - RNA, 14 nt, Human
ccauacacacgcug

SEQ ID NO: 3654704 - RNA, 16 nt, Human
ccauacacacgcugcc

SEQ ID NO: 3654705 - RNA, 14 nt, Human
ccauacacccccuc

SEQ ID NO: 3654706 - RNA, 19 nt, Human
ccauacacccccucuucug

SEQ ID NO: 3654707 - RNA, 19 nt, Human
ccauacauaaaagaaauaa

SEQ ID NO: 3654708 - RNA, 13 nt, Human
ccauacauuugug

SEQ ID NO: 3654709 - RNA, 16 nt, Human
ccauacucugucuccc

SEQ ID NO: 3654710 - RNA, 18 nt, Human
ccauacucugucucccua

SEQ ID NO: 3654711 - RNA, 17 nt, Human
ccauacuggccucgccu

SEQ ID NO: 3654712 - RNA, 19 nt, Human
ccauacuuugucugaaaaa

SEQ ID NO: 3654713 - RNA, 16 nt, Human
ccauagaaacaugaca

SEQ ID NO: 3654714 - RNA, 21 nt, Human
ccauagaaacaugacacugac

SEQ ID NO: 3654715 - RNA, 22 nt, Human
ccauagaaacaugacacugacc

SEQ ID NO: 3654716 - RNA, 23 nt, Human
ccauagagagcaagacgcugugc

SEQ ID NO: 3654717 - RNA, 19 nt, Human
ccauagaguacacugccug

SEQ ID NO: 3654718 - RNA, 22 nt, Human
ccauagaguacacugccugccu

SEQ ID NO: 3654719 - RNA, 13 nt, Human
ccauagaguuuaa

SEQ ID NO: 3654720 - RNA, 17 nt, Human
ccauagaguuuaacaca

SEQ ID NO: 3654721 - RNA, 15 nt, Human
ccauagaucuucuga

SEQ ID NO: 3654722 - RNA, 21 nt, Human
ccauagaucuucugaaaugaa

SEQ ID NO: 3654723 - RNA, 22 nt, Human
cucaguccuccccucacagccu

SEQ ID NO: 3654724 - RNA, 23 nt, Human
cucaguccuccccucacagccuc

SEQ ID NO: 3654725 - RNA, 14 nt, Human
cucagucucccuuu

SEQ ID NO: 3654726 - RNA, 15 nt, Human
cucagucucccuuuc

SEQ ID NO: 3654727 - RNA, 14 nt, Human
cucagucucugagc

SEQ ID NO: 3654728 - RNA, 17 nt, Human
cucagucuggcccuucc

SEQ ID NO: 3654729 - RNA, 20 nt, Human
cucagucuggcccuuccuuu

SEQ ID NO: 3654730 - RNA, 22 nt, Human
cucagucuggcccuuccuuuuc

SEQ ID NO: 3654731 - RNA, 15 nt, Human
cucagugaagaauac

SEQ ID NO: 3654732 - RNA, 15 nt, Human
cucagugaaguugcu

SEQ ID NO: 3654733 - RNA, 18 nt, Human
cucagugaaguugcugcu

SEQ ID NO: 3654734 - RNA, 20 nt, Human
cucagugaaguugcugcuuc

SEQ ID NO: 3654735 - RNA, 21 nt, Human
cucagugaaguugcugcuucu

SEQ ID NO: 3654736 - RNA, 23 nt, Human
cucagugcaaccucugcuuccca

SEQ ID NO: 3654737 - RNA, 16 nt, Human
cucagugcauuugugc

SEQ ID NO: 3654738 - RNA, 23 nt, Human
cucagugccaacuguggcugguc

SEQ ID NO: 3654739 - RNA, 16 nt, Human
cucagugcccuccagc

SEQ ID NO: 3654740 - RNA, 15 nt, Human
cucagugcuuuccuc

SEQ ID NO: 3654741 - RNA, 22 nt, Human
cucaguggacuuuccacccccu

SEQ ID NO: 3654742 - RNA, 22 nt, Human
cucaguggcccauggcauuuua

SEQ ID NO: 3654743 - RNA, 18 nt, Human
cucaguggcuucaucugu

SEQ ID NO: 3654744 - RNA, 16 nt, Human
cucaguggggcagagg

SEQ ID NO: 3654745 - RNA, 16 nt, Human
cucaguguauuuguau

SEQ ID NO: 3654746 - RNA, 18 nt, Human
cucagugucauuuaugaa

SEQ ID NO: 3654747 - RNA, 20 nt, Human
cucaguguccucaggggccu

SEQ ID NO: 3654748 - RNA, 21 nt, Human
cucagugucuggcugcagagc

SEQ ID NO: 3654749 - RNA, 22 nt, Human
cucagugucuggcugcagagca

SEQ ID NO: 3654750 - RNA, 13 nt, Human
ccaucugcccagg

SEQ ID NO: 3654751 - RNA, 21 nt, Human
ccaucugcccaggggugcccc

SEQ ID NO: 3654752 - RNA, 23 nt, Human
ccaucugcccaggggugcccccu

SEQ ID NO: 3654753 - RNA, 17 nt, Human
ccaucugccccacaguc

SEQ ID NO: 3654754 - RNA, 20 nt, Human
ccaucugccccacagucucc

SEQ ID NO: 3654755 - RNA, 14 nt, Human
ccaucugcccgccu

SEQ ID NO: 3654756 - RNA, 18 nt, Human
ccaucugcccgccugccc

SEQ ID NO: 3654757 - RNA, 20 nt, Human
ccaucugcgggggcagugcu

SEQ ID NO: 3654758 - RNA, 22 nt, Human
ccaucugcgggggcagugcuca

SEQ ID NO: 3654759 - RNA, 13 nt, Human
ccaucugcuccug

SEQ ID NO: 3654760 - RNA, 14 nt, Human
ccaucuggccuggc

SEQ ID NO: 3654761 - RNA, 15 nt, Human
ccaucuggccuggcc

SEQ ID NO: 3654762 - RNA, 16 nt, Human
ccaucuggccuggccu

SEQ ID NO: 3654763 - RNA, 17 nt, Human
ccaucuggccuggccug

SEQ ID NO: 3654764 - RNA, 23 nt, Human
ccaucugguuaggauggcaggac

SEQ ID NO: 3654765 - RNA, 20 nt, Human
ccaucuguacuugguccaac

SEQ ID NO: 3654766 - RNA, 14 nt, Human
ccaucugugaauaa

SEQ ID NO: 3654767 - RNA, 16 nt, Human
ccaucugugcacgcag

SEQ ID NO: 3654768 - RNA, 19 nt, Human
ccaucuguuuggugggggu

SEQ ID NO: 3654769 - RNA, 15 nt, Human
ccaucuuacuugagc

SEQ ID NO: 3654770 - RNA, 15 nt, Human
ccaucuuaguuugga

SEQ ID NO: 3654771 - RNA, 21 nt, Human
ccaucuucacccaggccuaug

SEQ ID NO: 3654772 - RNA, 14 nt, Human
ccaucuuccaggug

SEQ ID NO: 3654773 - RNA, 15 nt, Human
ccaucuuccaggugg

SEQ ID NO: 3654774 - RNA, 13 nt, Human
ccaucuugccucc

SEQ ID NO: 3654775 - RNA, 15 nt, Human
ccaucuuuacuccca

SEQ ID NO: 3654776 - RNA, 18 nt, Human
ccaucuuugcagguugcu

SEQ ID NO: 3654777 - RNA, 16 nt, Human
ccaucuuuuauucuuu

SEQ ID NO: 3654778 - RNA, 22 nt, Human
ccaucuuuuguuacucuuggga

SEQ ID NO: 3654779 - RNA, 21 nt, Human
ccaugaaaaaaaugaucccca

SEQ ID NO: 3654780 - RNA, 19 nt, Human
ccaugaaaacguuuuauug

SEQ ID NO: 3654781 - RNA, 20 nt, Human
ccaugaaaacguuuuauugu

SEQ ID NO: 3654782 - RNA, 14 nt, Human
ccaugaaagaaaac

SEQ ID NO: 3654783 - RNA, 12 nt, Human
ccaugaacacac

SEQ ID NO: 3654784 - RNA, 17 nt, Human
ccaugaacacacugugu

SEQ ID NO: 3654785 - RNA, 21 nt, Human
ccaugaacacacuguguccug

SEQ ID NO: 3654786 - RNA, 13 nt, Human
ccaugaacuggag

SEQ ID NO: 3654787 - RNA, 15 nt, Human
ccaugaacuuugucc

SEQ ID NO: 3654788 - RNA, 14 nt, Human
ccaugaagaauucc

SEQ ID NO: 3654789 - RNA, 16 nt, Human
ccaugaagacaggaca

SEQ ID NO: 3654790 - RNA, 19 nt, Human
ccaugaagaggaugcugug

SEQ ID NO: 3654791 - RNA, 21 nt, Human
ccaugaagaggaugcugugaa

SEQ ID NO: 3654792 - RNA, 11 nt, Human
ccaugaagccu

SEQ ID NO: 3654793 - RNA, 15 nt, Human
ccaugaaucgcuucu

SEQ ID NO: 3654794 - RNA, 17 nt, Human
ccaugaaucgcuucucu

SEQ ID NO: 3654795 - RNA, 18 nt, Human
ccaugaaucgcuucucuu

SEQ ID NO: 3654796 - RNA, 15 nt, Human
ccaugaauguuccug

SEQ ID NO: 3654797 - RNA, 14 nt, Human
ccaugacaucaaga

SEQ ID NO: 3654798 - RNA, 15 nt, Human
ccaugacccaccccu

SEQ ID NO: 3654799 - RNA, 16 nt, Human
ccaugacccaccccug

SEQ ID NO: 3654800 - RNA, 15 nt, Human
ccaugacccaggcug

SEQ ID NO: 3654801 - RNA, 17 nt, Human
ccaugacccugccucuc

SEQ ID NO: 3654802 - RNA, 20 nt, Human
ccaugacccugccucuccca

SEQ ID NO: 3654803 - RNA, 23 nt, Human
ccaugacccugccucucccaggc

SEQ ID NO: 3654804 - RNA, 14 nt, Human
ccaugaccuccagc

SEQ ID NO: 3654805 - RNA, 21 nt, Human
ccaugaccuccagcuuuccug

SEQ ID NO: 3654806 - RNA, 21 nt, Human
ccaugacgcaaagagagauuu

SEQ ID NO: 3654807 - RNA, 15 nt, Human
ccaugacugcauuuu

SEQ ID NO: 3654808 - RNA, 21 nt, Human
ccaugacugcuugcccuaagc

SEQ ID NO: 3654809 - RNA, 21 nt, Human
ccaugagaagagggccugugg

SEQ ID NO: 3654810 - RNA, 20 nt, Human
ccaugagacccuggugccug

SEQ ID NO: 3654811 - RNA, 21 nt, Human
ccaugagcaccccaaggcugc

SEQ ID NO: 3654812 - RNA, 14 nt, Human
ccaugagccucagc

SEQ ID NO: 3654813 - RNA, 23 nt, Human
ccaugagccucagcauccuggca

SEQ ID NO: 3654814 - RNA, 16 nt, Human
ccaugagcuccagacc

SEQ ID NO: 3654815 - RNA, 17 nt, Human
ccaugagcuccagaccc

SEQ ID NO: 3654816 - RNA, 18 nt, Human
ccaugagcuccagacccc

SEQ ID NO: 3654817 - RNA, 17 nt, Human
ccaugaggaacaaggca

SEQ ID NO: 3654818 - RNA, 20 nt, Human
ccaugaggaacaaggcaagg

SEQ ID NO: 3654819 - RNA, 23 nt, Human
ccaugaggaacaaggcaaggcug

SEQ ID NO: 3654820 - RNA, 23 nt, Human
ccaugaggagaaaaaaagcaugu

SEQ ID NO: 3654821 - RNA, 20 nt, Human
ccaugaggaguugcuguuug

SEQ ID NO: 3654822 - RNA, 17 nt, Human
ccaugagggagaugcca

SEQ ID NO: 3654823 - RNA, 14 nt, Human
ccaugaguccccug

SEQ ID NO: 3654824 - RNA, 23 nt, Human
ccaugaguuggggucuggcagcc

SEQ ID NO: 3654825 - RNA, 17 nt, Human
ccaugaguuugcccugg

SEQ ID NO: 3654826 - RNA, 22 nt, Human
ccaugaugacaacuacagaaaa

SEQ ID NO: 3654827 - RNA, 14 nt, Human
ccaugaugccucug

SEQ ID NO: 3654828 - RNA, 20 nt, Human
ccaugaugccucugucuucu

SEQ ID NO: 3654829 - RNA, 13 nt, Human
ccaugauggccag

SEQ ID NO: 3654830 - RNA, 16 nt, Human
ccaugauguuuagaaa

SEQ ID NO: 3654831 - RNA, 21 nt, Human
ccaugauuaaccacuucagcu

SEQ ID NO: 3654832 - RNA, 20 nt, Human
ccaugcaaggugcccacaug

SEQ ID NO: 3654833 - RNA, 12 nt, Human
ccaugcaccaaa

SEQ ID NO: 3654834 - RNA, 11 nt, Human
ccaugcacugu

SEQ ID NO: 3654835 - RNA, 16 nt, Human
ccaugcacugugaagg

SEQ ID NO: 3654836 - RNA, 19 nt, Human
ccaugcacugugaaggacc

SEQ ID NO: 3654837 - RNA, 20 nt, Human
ccaugcacugugaaggaccc

SEQ ID NO: 3654838 - RNA, 14 nt, Human
ccaugcagaaagca

SEQ ID NO: 3654839 - RNA, 15 nt, Human
ccaugcagaaagcau

SEQ ID NO: 3654840 - RNA, 17 nt, Human
ccaugcaggcccuuuga

SEQ ID NO: 3654841 - RNA, 23 nt, Human
ccaugcagguggugucgggcccu

SEQ ID NO: 3654842 - RNA, 12 nt, Human
ccaugccagccg

SEQ ID NO: 3654843 - RNA, 12 nt, Human
ccaugccagcug

SEQ ID NO: 3654844 - RNA, 15 nt, Human
ccaugccagcuggcc

SEQ ID NO: 3654845 - RNA, 13 nt, Human
ccaugcccaccug

SEQ ID NO: 3654846 - RNA, 15 nt, Human
ccaugcccaccugcc

SEQ ID NO: 3654847 - RNA, 18 nt, Human
ccaugcccaccugcccau

SEQ ID NO: 3654848 - RNA, 15 nt, Human
ccaugccucagcccu

SEQ ID NO: 3654849 - RNA, 16 nt, Human
ccaugccucagcccug

SEQ ID NO: 3654850 - RNA, 16 nt, Human
ccaugccugagggugg

SEQ ID NO: 3654851 - RNA, 17 nt, Human
ccaugccuguccagccu

SEQ ID NO: 3654852 - RNA, 17 nt, Human
ccaugccuguggcugcg

SEQ ID NO: 3654853 - RNA, 20 nt, Human
ccaugcguguuucugacucu

SEQ ID NO: 3654854 - RNA, 13 nt, Human
ccaugcucaucug

SEQ ID NO: 3654855 - RNA, 20 nt, Human
ccaugcucaucugcuggucc

SEQ ID NO: 3654856 - RNA, 16 nt, Human
ccaugcuccucuuccc

SEQ ID NO: 3654857 - RNA, 19 nt, Human
ccaugcuccucuuccccag

SEQ ID NO: 3654858 - RNA, 13 nt, Human
ccaugcuccuggc

SEQ ID NO: 3654859 - RNA, 13 nt, Human
ccaugcugaaggg

SEQ ID NO: 3654860 - RNA, 15 nt, Human
ccaugcugaggccug

SEQ ID NO: 3654861 - RNA, 11 nt, Human
ccaugcugccc

SEQ ID NO: 3654862 - RNA, 18 nt, Human
ccaugcuggagccugugu

SEQ ID NO: 3654863 - RNA, 22 nt, Human
ccaugcuggagccuguguaaca

SEQ ID NO: 3654864 - RNA, 17 nt, Human
ccaugcuggccuugcca

SEQ ID NO: 3654865 - RNA, 23 nt, Human
ccaugcugucuggcacagccugc

SEQ ID NO: 3654866 - RNA, 22 nt, Human
ccaugcuuaacauacccgccua

SEQ ID NO: 3654867 - RNA, 16 nt, Human
ccaugcuuagucacug

SEQ ID NO: 3654868 - RNA, 18 nt, Human
ccaugcuuagucacugcc

SEQ ID NO: 3654869 - RNA, 19 nt, Human
ccaugcuuagucacugccu

SEQ ID NO: 3654870 - RNA, 19 nt, Human
ccauggaacuguuuccuuc

SEQ ID NO: 3654871 - RNA, 22 nt, Human
ccauggacacuacacccagcaa

SEQ ID NO: 3654872 - RNA, 23 nt, Human
ccauggacacuacacccagcaau

SEQ ID NO: 3654873 - RNA, 14 nt, Human
ccauggacacucca

SEQ ID NO: 3654874 - RNA, 15 nt, Human
ccauggacacuccag

SEQ ID NO: 3654875 - RNA, 14 nt, Human
ccauggacaggcug

SEQ ID NO: 3654876 - RNA, 16 nt, Human
ccauggacaggcuggc

SEQ ID NO: 3654877 - RNA, 15 nt, Human
ccauggacucuacac

SEQ ID NO: 3654878 - RNA, 14 nt, Human
ccauggacuuuguu

SEQ ID NO: 3654879 - RNA, 19 nt, Human
ccauggagaaagcugacuu

SEQ ID NO: 3654880 - RNA, 23 nt, Human
ccauggagaaagcugacuuggcu

SEQ ID NO: 3654881 - RNA, 17 nt, Human
ccauggagacaagaagg

SEQ ID NO: 3654882 - RNA, 19 nt, Human
ccauggagagcuggagccu

SEQ ID NO: 3654883 - RNA, 12 nt, Human
ccauggagcccc

SEQ ID NO: 3654884 - RNA, 17 nt, Human
ccauggagccccagccc

SEQ ID NO: 3654885 - RNA, 20 nt, Human
ccauggagccccagcccccu

SEQ ID NO: 3654886 - RNA, 21 nt, Human
ccauggaggcacacagcugca

SEQ ID NO: 3654887 - RNA, 15 nt, Human
ccauggaguggcagc

SEQ ID NO: 3654888 - RNA, 23 nt, Human
ccauggaguggcagcccagccag

SEQ ID NO: 3654889 - RNA, 22 nt, Human
ccauggagugggucuggaggac

SEQ ID NO: 3654890 - RNA, 16 nt, Human
ccauggccagcagcac

SEQ ID NO: 3654891 - RNA, 15 nt, Human
ccauggcccucauua

SEQ ID NO: 3654892 - RNA, 15 nt, Human
ccauggcccucccag

SEQ ID NO: 3654893 - RNA, 22 nt, Human
ccauggccugcaaacugggaac

SEQ ID NO: 3654894 - RNA, 14 nt, Human
ccauggccuuauga

SEQ ID NO: 3654895 - RNA, 14 nt, Human
cuccucaccucaug

SEQ ID NO: 3654896 - RNA, 15 nt, Human
cuccucaccucaugc

SEQ ID NO: 3654897 - RNA, 20 nt, Human
cuccucaccucaugcccacc

SEQ ID NO: 3654898 - RNA, 17 nt, Human
cuccucacucaccuuca

SEQ ID NO: 3654899 - RNA, 16 nt, Human
cuccucacucccuucu

SEQ ID NO: 3654900 - RNA, 14 nt, Human
cuccucagaucuuc

SEQ ID NO: 3654901 - RNA, 13 nt, Human
cuccucagccuga

SEQ ID NO: 3654902 - RNA, 13 nt, Human
cuccucaggacca

SEQ ID NO: 3654903 - RNA, 17 nt, Human
cuccucaggcacacagc

SEQ ID NO: 3654904 - RNA, 23 nt, Human
cuccucaggcacacagcuacucu

SEQ ID NO: 3654905 - RNA, 15 nt, Human
cuccucaucccgugu

SEQ ID NO: 3654906 - RNA, 18 nt, Human
cuccuccaaaggaagucu

SEQ ID NO: 3654907 - RNA, 14 nt, Human
cuccuccaaaggcc

SEQ ID NO: 3654908 - RNA, 15 nt, Human
cuccuccaccgccau

SEQ ID NO: 3654909 - RNA, 22 nt, Human
cuccuccaccgccauggcuucc

SEQ ID NO: 3654910 - RNA, 15 nt, Human
cuccuccaccucaac

SEQ ID NO: 3654911 - RNA, 17 nt, Human
cuccuccacucuccccc

SEQ ID NO: 3654912 - RNA, 15 nt, Human
cuccuccagagucag

SEQ ID NO: 3654913 - RNA, 18 nt, Human
cuccuccagccccugucc

SEQ ID NO: 3654914 - RNA, 16 nt, Human
cuccuccaggaagccu

SEQ ID NO: 3654915 - RNA, 13 nt, Human
cuccuccaggccu

SEQ ID NO: 3654916 - RNA, 15 nt, Human
cuccuccaggccugc

SEQ ID NO: 3654917 - RNA, 11 nt, Human
cuccuccaggg

SEQ ID NO: 3654918 - RNA, 14 nt, Human
cuccuccagggcca

SEQ ID NO: 3654919 - RNA, 21 nt, Human
cuccuccaggguggcagcaac

SEQ ID NO: 3654920 - RNA, 22 nt, Human
cuccucccacccggcugcagag

SEQ ID NO: 3654921 - RNA, 14 nt, Human
cuccucccacugcc

SEQ ID NO: 3654922 - RNA, 15 nt, Human
cuccucccacugccc

SEQ ID NO: 3654923 - RNA, 18 nt, Human
cuccucccacugcccacu

SEQ ID NO: 3654924 - RNA, 11 nt, Human
cuccucccagc

SEQ ID NO: 3654925 - RNA, 12 nt, Human
cuccucccaggg

SEQ ID NO: 3654926 - RNA, 20 nt, Human
cuccucccaugucacugcag

SEQ ID NO: 3654927 - RNA, 22 nt, Human
cuccuccccccuccucugaaac

SEQ ID NO: 3654928 - RNA, 23 nt, Human
cuccuccccuggagggggaaugg

SEQ ID NO: 3654929 - RNA, 15 nt, Human
cuccuccccuuccuc

SEQ ID NO: 3654930 - RNA, 17 nt, Human
cuccuccccuuccucuu

SEQ ID NO: 3654931 - RNA, 15 nt, Human
cuccucccggugccc

SEQ ID NO: 3654932 - RNA, 17 nt, Human
cuccucccggugcccaa

SEQ ID NO: 3654933 - RNA, 16 nt, Human
cuccucccucccucuc

SEQ ID NO: 3654934 - RNA, 21 nt, Human
cuccucccucccucugccggc

SEQ ID NO: 3654935 - RNA, 15 nt, Human
cuccucccucugagg

SEQ ID NO: 3654936 - RNA, 16 nt, Human
cuccucccugcaucug

SEQ ID NO: 3654937 - RNA, 14 nt, Human
cuccucccuggcug

SEQ ID NO: 3654938 - RNA, 18 nt, Human
cuccucccuggcugcccu

SEQ ID NO: 3654939 - RNA, 19 nt, Human
cuccucccuguuauuuuca

SEQ ID NO: 3654940 - RNA, 22 nt, Human
cuccucccuguuauuuucaagu

SEQ ID NO: 3654941 - RNA, 13 nt, Human
cuccuccucccug

SEQ ID NO: 3654942 - RNA, 14 nt, Human
cuccuccuggacuc

SEQ ID NO: 3654943 - RNA, 15 nt, Human
cuccuccuggacucc

SEQ ID NO: 3654944 - RNA, 19 nt, Human
cuccuccuuggugccuggc

SEQ ID NO: 3654945 - RNA, 20 nt, Human
cuccucgacaucacuguuca

SEQ ID NO: 3654946 - RNA, 17 nt, Human
cuccucgagaucccaac

SEQ ID NO: 3654947 - RNA, 21 nt, Human
cuccucgagaucccaacacug

SEQ ID NO: 3654948 - RNA, 14 nt, Human
cuccucgcaagcug

SEQ ID NO: 3654949 - RNA, 23 nt, Human
cuccucggaaccgcucaccuaga

SEQ ID NO: 3654950 - RNA, 18 nt, Human
cuccucggcccccuccau

SEQ ID NO: 3654951 - RNA, 14 nt, Human
cuccucggccuggc

SEQ ID NO: 3654952 - RNA, 19 nt, Human
cuccucggcuggcugucca

SEQ ID NO: 3654953 - RNA, 20 nt, Human
cuccucggcuggcuguccac

SEQ ID NO: 3654954 - RNA, 22 nt, Human
cccaagguucugggugcaggag

SEQ ID NO: 3654955 - RNA, 20 nt, Human
cccaaguaagaggcuggagu

SEQ ID NO: 3654956 - RNA, 18 nt, Human
cccaaguagucugcucac

SEQ ID NO: 3654957 - RNA, 19 nt, Human
cccaaguagucugcucaca

SEQ ID NO: 3654958 - RNA, 18 nt, Human
cccaagucccuguuuucu

SEQ ID NO: 3654959 - RNA, 16 nt, Human
cccaaguccugaagag

SEQ ID NO: 3654960 - RNA, 20 nt, Human
cccaagugagucucucuggg

SEQ ID NO: 3654961 - RNA, 15 nt, Human
cccaagugccaaaga

SEQ ID NO: 3654962 - RNA, 18 nt, Human
cccaagugccagucuugu

SEQ ID NO: 3654963 - RNA, 16 nt, Human
cccaagugugaacaaa

SEQ ID NO: 3654964 - RNA, 21 nt, Human
cccaauaaacauuaagauuga

SEQ ID NO: 3654965 - RNA, 15 nt, Human
cccaauauuauaauu

SEQ ID NO: 3654966 - RNA, 20 nt, Human
cccaaucccagcuaccucaa

SEQ ID NO: 3654967 - RNA, 17 nt, Human
cccaaucccuuuauuac

SEQ ID NO: 3654968 - RNA, 16 nt, Human
cccaaugcacauccau

SEQ ID NO: 3654969 - RNA, 20 nt, Human
cccaaugcacauccauuccc

SEQ ID NO: 3654970 - RNA, 16 nt, Human
cccaaugcacuuuguu

SEQ ID NO: 3654971 - RNA, 14 nt, Human
cccaauuaggaagu

SEQ ID NO: 3654972 - RNA, 15 nt, Human
cccaauuucagacuc

SEQ ID NO: 3654973 - RNA, 15 nt, Human
cccacaaaggcaaag

SEQ ID NO: 3654974 - RNA, 17 nt, Human
cccacaacuccugucua

SEQ ID NO: 3654975 - RNA, 20 nt, Human
cccacaagccucugcccagg

SEQ ID NO: 3654976 - RNA, 22 nt, Human
cccacaagccucugcccaggca

SEQ ID NO: 3654977 - RNA, 13 nt, Human
cccacaaguggug

SEQ ID NO: 3654978 - RNA, 14 nt, Human
cccacaaguggugg

SEQ ID NO: 3654979 - RNA, 22 nt, Human
cccacaaguggugguaacccug

SEQ ID NO: 3654980 - RNA, 22 nt, Human
cccacaauauaaaacuguacuu

SEQ ID NO: 3654981 - RNA, 11 nt, Human
cccacacacac

SEQ ID NO: 3654982 - RNA, 17 nt, Human
cccacacacacacacau

SEQ ID NO: 3654983 - RNA, 14 nt, Human
cccacacacaggug

SEQ ID NO: 3654984 - RNA, 15 nt, Human
cccacacacaggugg

SEQ ID NO: 3654985 - RNA, 20 nt, Human
cccacaccaggccguccucc

SEQ ID NO: 3654986 - RNA, 17 nt, Human
cccacaccauaagcuac

SEQ ID NO: 3654987 - RNA, 19 nt, Human
cccacaccuccacaguuca

SEQ ID NO: 3654988 - RNA, 13 nt, Human
cccacaccuccuc

SEQ ID NO: 3654989 - RNA, 14 nt, Human
cccacaccuggccc

SEQ ID NO: 3654990 - RNA, 16 nt, Human
cccacacucacuccug

SEQ ID NO: 3654991 - RNA, 12 nt, Human
cccacacucaga

SEQ ID NO: 3654992 - RNA, 23 nt, Human
cccacacucccaagguuggagcc

SEQ ID NO: 3654993 - RNA, 19 nt, Human
cccacacuugagaggauga

SEQ ID NO: 3654994 - RNA, 13 nt, Human
cccacagacucaa

SEQ ID NO: 3654995 - RNA, 22 nt, Human
cccacagcacagcucccugcca

SEQ ID NO: 3654996 - RNA, 11 nt, Human
cccacagccca

SEQ ID NO: 3654997 - RNA, 15 nt, Human
cccacagcccacguc

SEQ ID NO: 3654998 - RNA, 15 nt, Human
cccacagcucccacc

SEQ ID NO: 3654999 - RNA, 19 nt, Human
cccacagcucccaccccac

SEQ ID NO: 3655000 - RNA, 13 nt, Human
cccacagcuuggg

SEQ ID NO: 3655001 - RNA, 20 nt, Human
cccacaggaagccugcaguc

SEQ ID NO: 3655002 - RNA, 23 nt, Human
cccacaggaagccugcaguccug

SEQ ID NO: 3655003 - RNA, 16 nt, Human
cccacaggaggugguc

SEQ ID NO: 3655004 - RNA, 21 nt, Human
cccacaggagguggucuggga

SEQ ID NO: 3655005 - RNA, 22 nt, Human
cccacagguguccccagcccac

SEQ ID NO: 3655006 - RNA, 23 nt, Human
cccacagugacucgggcuccugu

SEQ ID NO: 3655007 - RNA, 15 nt, Human
cccacagugcugucu

SEQ ID NO: 3655008 - RNA, 21 nt, Human
cccacagugucaggcacuggg

SEQ ID NO: 3655009 - RNA, 19 nt, Human
cccacauccaacuccagca

SEQ ID NO: 3655010 - RNA, 20 nt, Human
cccacaucccaggcuucacc

SEQ ID NO: 3655011 - RNA, 13 nt, Human
cccacaucccugg

SEQ ID NO: 3655012 - RNA, 17 nt, Human
cccacaucccugggccu

SEQ ID NO: 3655013 - RNA, 21 nt, Human
cccacaucccugggccugcug

SEQ ID NO: 3655014 - RNA, 22 nt, Human
cccacaucccugggccugcugc

SEQ ID NO: 3655015 - RNA, 18 nt, Human
cccacaugaggacaugau

SEQ ID NO: 3655016 - RNA, 12 nt, Human
cccacaugccag

SEQ ID NO: 3655017 - RNA, 19 nt, Human
cccacauggugauguugac

SEQ ID NO: 3655018 - RNA, 14 nt, Human
cccacauguccagc

SEQ ID NO: 3655019 - RNA, 14 nt, Human
cccacauuccgaca

SEQ ID NO: 3655020 - RNA, 18 nt, Human
cccacauucugaugagca

SEQ ID NO: 3655021 - RNA, 19 nt, Human
cccacauuuagucucuuua

SEQ ID NO: 3655022 - RNA, 21 nt, Human
cccacauuuagucucuuuauu

SEQ ID NO: 3655023 - RNA, 17 nt, Human
cccaccaacccucaggg

SEQ ID NO: 3655024 - RNA, 18 nt, Human
cccaccaacccucagggc

SEQ ID NO: 3655025 - RNA, 19 nt, Human
cccaccaacccucagggca

SEQ ID NO: 3655026 - RNA, 14 nt, Human
cccaccacacaaca

SEQ ID NO: 3655027 - RNA, 16 nt, Human
cccaccacacauccca

SEQ ID NO: 3655028 - RNA, 18 nt, Human
cccaccacacaucccagc

SEQ ID NO: 3655029 - RNA, 22 nt, Human
cccaccacacaucccagcccaa

SEQ ID NO: 3655030 - RNA, 20 nt, Human
cccaccaccuaggccacucc

SEQ ID NO: 3655031 - RNA, 20 nt, Human
cccaccacgauguggcccug

SEQ ID NO: 3655032 - RNA, 24 nt, Human
cccaccacgauguggcccuggccu

SEQ ID NO: 3655033 - RNA, 22 nt, Human
cccaccaggcugcucagggcug

SEQ ID NO: 3655034 - RNA, 13 nt, Human
cccaccagggucc

SEQ ID NO: 3655035 - RNA, 13 nt, Human
cccaccagugccu

SEQ ID NO: 3655036 - RNA, 18 nt, Human
cccaccaucaugucuggc

SEQ ID NO: 3655037 - RNA, 15 nt, Human
cccaccaucugcugu

SEQ ID NO: 3655038 - RNA, 17 nt, Human
cccaccaucugcugucu

SEQ ID NO: 3655039 - RNA, 21 nt, Human
cccaccaucugcugucuuuuc

SEQ ID NO: 3655040 - RNA, 14 nt, Human
cuccugauuuuucu

SEQ ID NO: 3655041 - RNA, 15 nt, Human
cuccugcacuguuua

SEQ ID NO: 3655042 - RNA, 20 nt, Human
cuccugcacuuacuugcuua

SEQ ID NO: 3655043 - RNA, 15 nt, Human
cuccugcagccccag

SEQ ID NO: 3655044 - RNA, 14 nt, Human
cuccugcaggcagc

SEQ ID NO: 3655045 - RNA, 16 nt, Human
cuccugcaggcagcca

SEQ ID NO: 3655046 - RNA, 21 nt, Human
cuccugcaggcagccaggcca

SEQ ID NO: 3655047 - RNA, 13 nt, Human
cuccugcaugcag

SEQ ID NO: 3655048 - RNA, 13 nt, Human
cuccugcccagga

SEQ ID NO: 3655049 - RNA, 15 nt, Human
cuccugcccaggaga

SEQ ID NO: 3655050 - RNA, 15 nt, Human
cuccugcccaguccc

SEQ ID NO: 3655051 - RNA, 22 nt, Human
cuccugcccccacaccuggccc

SEQ ID NO: 3655052 - RNA, 22 nt, Human
cuccugcccgcagaccucugga

SEQ ID NO: 3655053 - RNA, 14 nt, Human
cuccugccgcagag

SEQ ID NO: 3655054 - RNA, 16 nt, Human
cuccugccgcagagcu

SEQ ID NO: 3655055 - RNA, 17 nt, Human
cuccugccgcagagcug

SEQ ID NO: 3655056 - RNA, 15 nt, Human
cuccugccggcuccu

SEQ ID NO: 3655057 - RNA, 14 nt, Human
cuccugccuacuca

SEQ ID NO: 3655058 - RNA, 11 nt, Human
cuccugccuca

SEQ ID NO: 3655059 - RNA, 13 nt, Human
cuccugccucagc

SEQ ID NO: 3655060 - RNA, 16 nt, Human
cuccugccucagccuc

SEQ ID NO: 3655061 - RNA, 18 nt, Human
cuccugccucagucuccc

SEQ ID NO: 3655062 - RNA, 18 nt, Human
cuccugccucgaacuggc

SEQ ID NO: 3655063 - RNA, 12 nt, Human
cuccugccucua

SEQ ID NO: 3655064 - RNA, 15 nt, Human
cuccugccuguagca

SEQ ID NO: 3655065 - RNA, 18 nt, Human
cuccugccuuccuccugg

SEQ ID NO: 3655066 - RNA, 19 nt, Human
cuccugccuuccuccuggg

SEQ ID NO: 3655067 - RNA, 21 nt, Human
cuccugccuugaaaaagacau

SEQ ID NO: 3655068 - RNA, 14 nt, Human
cuccugcucugcuc

SEQ ID NO: 3655069 - RNA, 13 nt, Human
cuccugcugcacc

SEQ ID NO: 3655070 - RNA, 14 nt, Human
cuccugcugccaca

SEQ ID NO: 3655071 - RNA, 13 nt, Human
cuccugcugccag

SEQ ID NO: 3655072 - RNA, 15 nt, Human
cuccugcugcucccu

SEQ ID NO: 3655073 - RNA, 17 nt, Human
cuccugcugcucccuca

SEQ ID NO: 3655074 - RNA, 19 nt, Human
cuccugcugcucccucaga

SEQ ID NO: 3655075 - RNA, 22 nt, Human
cuccugcugcucccucagacug

SEQ ID NO: 3655076 - RNA, 13 nt, Human
cuccugcugggca

SEQ ID NO: 3655077 - RNA, 14 nt, Human
cuccugcuguaaau

SEQ ID NO: 3655078 - RNA, 19 nt, Human
cuccugcuuaaucuucaaa

SEQ ID NO: 3655079 - RNA, 18 nt, Human
cuccuggaaaggcucagu

SEQ ID NO: 3655080 - RNA, 19 nt, Human
cuccuggaaaggcucaguc

SEQ ID NO: 3655081 - RNA, 20 nt, Human
cuccuggaaaggcucagucu

SEQ ID NO: 3655082 - RNA, 20 nt, Human
cuccuggaaccuugcugucc

SEQ ID NO: 3655083 - RNA, 23 nt, Human
cuccuggaaccuugcuguccuga

SEQ ID NO: 3655084 - RNA, 15 nt, Human
cuccuggaagcugug

SEQ ID NO: 3655085 - RNA, 17 nt, Human
cuccuggaagcuguguc

SEQ ID NO: 3655086 - RNA, 23 nt, Human
cuccuggaagcuguguccuugca

SEQ ID NO: 3655087 - RNA, 21 nt, Human
cuccuggaccccccuuucaca

SEQ ID NO: 3655088 - RNA, 22 nt, Human
cuccuggacugccuugaauauc

SEQ ID NO: 3655089 - RNA, 19 nt, Human
cuccuggagccuuugaaua

SEQ ID NO: 3655090 - RNA, 16 nt, Human
cuccuggaucucccug

SEQ ID NO: 3655091 - RNA, 20 nt, Human
cuccuggcagaagggagcag

SEQ ID NO: 3655092 - RNA, 18 nt, Human
cuccuggcccacugcauc

SEQ ID NO: 3655093 - RNA, 16 nt, Human
cuccuggcccagccuu

SEQ ID NO: 3655094 - RNA, 14 nt, Human
cuccuggccucaga

SEQ ID NO: 3655095 - RNA, 23 nt, Human
cuccuggccuuuccugguuuuca

SEQ ID NO: 3655096 - RNA, 23 nt, Human
cuccuggcuucccauccccagcg

SEQ ID NO: 3655097 - RNA, 18 nt, Human
cuccugggauuggcugug

SEQ ID NO: 3655098 - RNA, 19 nt, Human
cuccugggcagcugccucc

SEQ ID NO: 3655099 - RNA, 22 nt, Human
cuccugggcagcugccuccccu

SEQ ID NO: 3655100 - RNA, 22 nt, Human
cuccugggccccucaucugcuc

SEQ ID NO: 3655101 - RNA, 23 nt, Human
cuccugggccccucccuaccuca

SEQ ID NO: 3655102 - RNA, 14 nt, Human
cuccugggcccucu

SEQ ID NO: 3655103 - RNA, 17 nt, Human
cuccugggcccucucug

SEQ ID NO: 3655104 - RNA, 19 nt, Human
cuccugggcccucucugcu

SEQ ID NO: 3655105 - RNA, 18 nt, Human
cuccugggcuaagugauc

SEQ ID NO: 3655106 - RNA, 16 nt, Human
cuccuggggccaggcc

SEQ ID NO: 3655107 - RNA, 17 nt, Human
cuccuggggccaggccg

SEQ ID NO: 3655108 - RNA, 22 nt, Human
cuccuggggccaggccgggccu

SEQ ID NO: 3655109 - RNA, 16 nt, Human
cuccuggguugagcug

SEQ ID NO: 3655110 - RNA, 22 nt, Human
cuccuggguugagcuguugccu

SEQ ID NO: 3655111 - RNA, 23 nt, Human
cuccuggguuuuguauucucuga

SEQ ID NO: 3655112 - RNA, 15 nt, Human
cuccuggucuugaga

SEQ ID NO: 3655113 - RNA, 14 nt, Human
cuccuggugggucc

SEQ ID NO: 3655114 - RNA, 15 nt, Human
cuccuggugucaccc

SEQ ID NO: 3655115 - RNA, 18 nt, Human
cuccuggugucaccccag

SEQ ID NO: 3655116 - RNA, 20 nt, Human
cuccuguaacauacuggccu

SEQ ID NO: 3655117 - RNA, 22 nt, Human
cuccuguaacauacuggccugg

SEQ ID NO: 3655118 - RNA, 23 nt, Human
cuccuguaacauacuggccugga

SEQ ID NO: 3655119 - RNA, 21 nt, Human
cuccacucugcuucucugacu

SEQ ID NO: 3655120 - RNA, 13 nt, Human
cuccacugccuuc

SEQ ID NO: 3655121 - RNA, 16 nt, Human
cuccacuggauggagg

SEQ ID NO: 3655122 - RNA, 11 nt, Human
cuccacuguca

SEQ ID NO: 3655123 - RNA, 16 nt, Human
cuccacugucacauug

SEQ ID NO: 3655124 - RNA, 18 nt, Human
cuccacugucacccucca

SEQ ID NO: 3655125 - RNA, 23 nt, Human
cuccacugugccuuugcaaauca

SEQ ID NO: 3655126 - RNA, 21 nt, Human
cuccacuuggucugugagaug

SEQ ID NO: 3655127 - RNA, 13 nt, Human
cuccacuuucagc

SEQ ID NO: 3655128 - RNA, 17 nt, Human
cuccacuuucagcuguc

SEQ ID NO: 3655129 - RNA, 20 nt, Human
cuccacuuucagcugucuuu

SEQ ID NO: 3655130 - RNA, 20 nt, Human
cuccagaaaugucccuuucu

SEQ ID NO: 3655131 - RNA, 17 nt, Human
cuccagaacucuuccuc

SEQ ID NO: 3655132 - RNA, 19 nt, Human
cuccagaacucuuccucca

SEQ ID NO: 3655133 - RNA, 23 nt, Human
cuccagaagauagcuucacccca

SEQ ID NO: 3655134 - RNA, 18 nt, Human
cuccagaagccucuggcu

SEQ ID NO: 3655135 - RNA, 17 nt, Human
cuccagaauuuggaaau

SEQ ID NO: 3655136 - RNA, 19 nt, Human
cuccagaauuuggaaaucc

SEQ ID NO: 3655137 - RNA, 20 nt, Human
cuccagacaaaccagaagca

SEQ ID NO: 3655138 - RNA, 19 nt, Human
cuccagacacauguccaag

SEQ ID NO: 3655139 - RNA, 16 nt, Human
cuccagacccccagca

SEQ ID NO: 3655140 - RNA, 17 nt, Human
cuccagaccccuggcuu

SEQ ID NO: 3655141 - RNA, 18 nt, Human
cuccagaccccuggcuuu

SEQ ID NO: 3655142 - RNA, 19 nt, Human
cuccagaccugauccugga

SEQ ID NO: 3655143 - RNA, 16 nt, Human
cuccagacucucugug

SEQ ID NO: 3655144 - RNA, 18 nt, Human
cuccagagccccacagcc

SEQ ID NO: 3655145 - RNA, 21 nt, Human
cuccagagccccacagcccca

SEQ ID NO: 3655146 - RNA, 13 nt, Human
cuccagagggcac

SEQ ID NO: 3655147 - RNA, 20 nt, Human
cuccagaggggcucagguca

SEQ ID NO: 3655148 - RNA, 16 nt, Human
cuccagagucagaagu

SEQ ID NO: 3655149 - RNA, 14 nt, Human
cuccagaucugcac

SEQ ID NO: 3655150 - RNA, 16 nt, Human
cuccagaugcagggca

SEQ ID NO: 3655151 - RNA, 21 nt, Human
cuccagaugcagggcagucau

SEQ ID NO: 3655152 - RNA, 14 nt, Human
cuccagauuuuuaa

SEQ ID NO: 3655153 - RNA, 16 nt, Human
cuccagauuuuuaaua

SEQ ID NO: 3655154 - RNA, 20 nt, Human
cuccagcaacacagccuggg

SEQ ID NO: 3655155 - RNA, 15 nt, Human
cuccagcaacuucuu

SEQ ID NO: 3655156 - RNA, 22 nt, Human
cuccagcaggcccaugggaggc

SEQ ID NO: 3655157 - RNA, 14 nt, Human
cuccagccaacccc

SEQ ID NO: 3655158 - RNA, 18 nt, Human
cuccagccaaccccugug

SEQ ID NO: 3655159 - RNA, 11 nt, Human
cuccagccagc

SEQ ID NO: 3655160 - RNA, 12 nt, Human
cuccagccagcg

SEQ ID NO: 3655161 - RNA, 14 nt, Human
cuccagccagcgcc

SEQ ID NO: 3655162 - RNA, 21 nt, Human
cuccagccagcgccucccucc

SEQ ID NO: 3655163 - RNA, 21 nt, Human
cuccagccaucaagagacuga

SEQ ID NO: 3655164 - RNA, 23 nt, Human
cuccagccaucaagagacugagu

SEQ ID NO: 3655165 - RNA, 11 nt, Human
cuccagccccu

SEQ ID NO: 3655166 - RNA, 16 nt, Human
cuccagccccucuugg

SEQ ID NO: 3655167 - RNA, 20 nt, Human
cuccagccccucuuggagaa

SEQ ID NO: 3655168 - RNA, 13 nt, Human
cuccagccccugg

SEQ ID NO: 3655169 - RNA, 15 nt, Human
cuccagccccuggau

SEQ ID NO: 3655170 - RNA, 15 nt, Human
cuccagccccugucc

SEQ ID NO: 3655171 - RNA, 23 nt, Human
cuccagccccuucucagaaucua

SEQ ID NO: 3655172 - RNA, 17 nt, Human
cuccagccccuuuccaa

SEQ ID NO: 3655173 - RNA, 12 nt, Human
cuccagccucag

SEQ ID NO: 3655174 - RNA, 12 nt, Human
cuccagccugac

SEQ ID NO: 3655175 - RNA, 13 nt, Human
cuccagccugagc

SEQ ID NO: 3655176 - RNA, 21 nt, Human
cuccagccugcccaagcccag

SEQ ID NO: 3655177 - RNA, 13 nt, Human
cuccagccugggc

SEQ ID NO: 3655178 - RNA, 14 nt, Human
cuccagccugggca

SEQ ID NO: 3655179 - RNA, 20 nt, Human
cuccagccugggcaacacag

SEQ ID NO: 3655180 - RNA, 21 nt, Human
cuccagccuuuggccuuggcu

SEQ ID NO: 3655181 - RNA, 22 nt, Human
cuccagcgaucucuccacugug

SEQ ID NO: 3655182 - RNA, 13 nt, Human
cuccagcgcugag

SEQ ID NO: 3655183 - RNA, 19 nt, Human
cuccagcgucagcugcucc

SEQ ID NO: 3655184 - RNA, 16 nt, Human
cuccagcucaccagcc

SEQ ID NO: 3655185 - RNA, 15 nt, Human
cuccgggaccuggug

SEQ ID NO: 3655186 - RNA, 18 nt, Human
cuccggggagcgcccgcg

SEQ ID NO: 3655187 - RNA, 14 nt, Human
cuccggggccauuu

SEQ ID NO: 3655188 - RNA, 15 nt, Human
cuccgggucuuccua

SEQ ID NO: 3655189 - RNA, 13 nt, Human
cuccggugugccu

SEQ ID NO: 3655190 - RNA, 15 nt, Human
cuccguauuucagac

SEQ ID NO: 3655191 - RNA, 20 nt, Human
cuccguccaggagccugugc

SEQ ID NO: 3655192 - RNA, 23 nt, Human
cuccguccauaucagaacugugc

SEQ ID NO: 3655193 - RNA, 15 nt, Human
cuccguccucgaugg

SEQ ID NO: 3655194 - RNA, 13 nt, Human
cuccguggagcag

SEQ ID NO: 3655195 - RNA, 17 nt, Human
cuccguggaggagguug

SEQ ID NO: 3655196 - RNA, 18 nt, Human
cuccgugugggagaccgg

SEQ ID NO: 3655197 - RNA, 17 nt, Human
cuccguuagcuccugug

SEQ ID NO: 3655198 - RNA, 20 nt, Human
cuccguuggccacuccgaga

SEQ ID NO: 3655199 - RNA, 17 nt, Human
cuccuaaaaggcccaga

SEQ ID NO: 3655200 - RNA, 22 nt, Human
cuccuaagcaacuaggccuuca

SEQ ID NO: 3655201 - RNA, 16 nt, Human
cuccuacaccuaacuc

SEQ ID NO: 3655202 - RNA, 12 nt, Human
cuccuacagccc

SEQ ID NO: 3655203 - RNA, 14 nt, Human
cuccuaccccuccc

SEQ ID NO: 3655204 - RNA, 18 nt, Human
cuccuaccccucccagcu

SEQ ID NO: 3655205 - RNA, 22 nt, Human
cuccuaccgaaaccuugccuuu

SEQ ID NO: 3655206 - RNA, 14 nt, Human
cuccuaccucugcu

SEQ ID NO: 3655207 - RNA, 13 nt, Human
cuccuaccuggua

SEQ ID NO: 3655208 - RNA, 14 nt, Human
cuccuacuccugac

SEQ ID NO: 3655209 - RNA, 12 nt, Human
cuccuacugagg

SEQ ID NO: 3655210 - RNA, 21 nt, Human
cuccuagacugacccugauca

SEQ ID NO: 3655211 - RNA, 19 nt, Human
cuccuaggacauguucccu

SEQ ID NO: 3655212 - RNA, 20 nt, Human
cuccuagggaaaaguucaua

SEQ ID NO: 3655213 - RNA, 14 nt, Human
cuccuaguucuaga

SEQ ID NO: 3655214 - RNA, 19 nt, Human
cuccuaguuugaccucaca

SEQ ID NO: 3655215 - RNA, 23 nt, Human
cuccuaguuugaccucacaguga

SEQ ID NO: 3655216 - RNA, 17 nt, Human
cuccuaguuugggagga

SEQ ID NO: 3655217 - RNA, 15 nt, Human
cuccuauaaucuguc

SEQ ID NO: 3655218 - RNA, 21 nt, Human
cuccuauaaucugucaaaaca

SEQ ID NO: 3655219 - RNA, 15 nt, Human
cuccuauauauuucu

SEQ ID NO: 3655220 - RNA, 17 nt, Human
cuccuauauauuucuau

SEQ ID NO: 3655221 - RNA, 18 nt, Human
cuccuaucaccugucuug

SEQ ID NO: 3655222 - RNA, 14 nt, Human
cuccuaucuucaua

SEQ ID NO: 3655223 - RNA, 17 nt, Human
cuccuaucuucauaucu

SEQ ID NO: 3655224 - RNA, 22 nt, Human
cuccuauggguugucaccaagc

SEQ ID NO: 3655225 - RNA, 18 nt, Human
cuccuauguuuggcugcu

SEQ ID NO: 3655226 - RNA, 15 nt, Human
cuccuauucuauaaa

SEQ ID NO: 3655227 - RNA, 20 nt, Human
cuccuauucuauaaaacucu

SEQ ID NO: 3655228 - RNA, 16 nt, Human
cuccuauuuuuuuaaa

SEQ ID NO: 3655229 - RNA, 14 nt, Human
cuccucaacucacc

SEQ ID NO: 3655230 - RNA, 15 nt, Human
cuccucacacacccu

SEQ ID NO: 3655231 - RNA, 18 nt, Human
cuccucaccccgucuggg

SEQ ID NO: 3655232 - RNA, 19 nt, Human
cuccucaccucaugcccac

SEQ ID NO: 3655233 - RNA, 14 nt, Human
cuccucaccucugg

SEQ ID NO: 3655234 - RNA, 18 nt, Human
cuccucaccucuggacug

SEQ ID NO: 3655235 - RNA, 16 nt, Human
cuccucacugcccgca

SEQ ID NO: 3655236 - RNA, 17 nt, Human
cuccucacugcccgcac

SEQ ID NO: 3655237 - RNA, 11 nt, Human
cuccucagacu

SEQ ID NO: 3655238 - RNA, 12 nt, Human
cuccucagccug

SEQ ID NO: 3655239 - RNA, 24 nt, Human
cuccucagccugaaccccagggcu

SEQ ID NO: 3655240 - RNA, 22 nt, Human
cuccucaggcacacagcuacuc

SEQ ID NO: 3655241 - RNA, 11 nt, Human
cuccucaggga

SEQ ID NO: 3655242 - RNA, 18 nt, Human
cuccucagggcagccucc

SEQ ID NO: 3655243 - RNA, 20 nt, Human
cuccucauccagggcucuga

SEQ ID NO: 3655244 - RNA, 12 nt, Human
cuccucaucccg

SEQ ID NO: 3655245 - RNA, 18 nt, Human
cuccucauucacaucgca

SEQ ID NO: 3655246 - RNA, 15 nt, Human
cuccuccaaaggaag

SEQ ID NO: 3655247 - RNA, 18 nt, Human
cuccuccaaaggcccccu

SEQ ID NO: 3655248 - RNA, 13 nt, Human
cuccuccacauuu

SEQ ID NO: 3655249 - RNA, 16 nt, Human
cuccuccaccgccaug

SEQ ID NO: 3655250 - RNA, 14 nt, Human
cuccuccaccucaa

SEQ ID NO: 3655251 - RNA, 17 nt, Human
cuccuccagccccuguc

SEQ ID NO: 3655252 - RNA, 15 nt, Human
cuccuccagccgcca

SEQ ID NO: 3655253 - RNA, 22 nt, Human
cuccuccagccgccaugcuccu

SEQ ID NO: 3655254 - RNA, 15 nt, Human
cuccuccaggaagcc

SEQ ID NO: 3655255 - RNA, 14 nt, Human
cuccuccaggccug

SEQ ID NO: 3655256 - RNA, 13 nt, Human
cuccuccagggug

SEQ ID NO: 3655257 - RNA, 22 nt, Human
cuccuccaggguggcagcaaca

SEQ ID NO: 3655258 - RNA, 20 nt, Human
cuccucccacccggcugcag

SEQ ID NO: 3655259 - RNA, 13 nt, Human
cuccucccacugc

SEQ ID NO: 3655260 - RNA, 12 nt, Human
cuccucccagcu

SEQ ID NO: 3655261 - RNA, 23 nt, Human
cuccucccagcuuguaggagcug

SEQ ID NO: 3655262 - RNA, 21 nt, Human
cuccucccaggguuuuaacuu

SEQ ID NO: 3655263 - RNA, 19 nt, Human
cuccucccaugucacugca

SEQ ID NO: 3655264 - RNA, 14 nt, Human
cuccuccccaaauc

SEQ ID NO: 3655265 - RNA, 20 nt, Human
cuccuccccacccuccuggc

SEQ ID NO: 3655266 - RNA, 15 nt, Human
cuccuccccuggagg

SEQ ID NO: 3655267 - RNA, 11 nt, Human
cuccucccucc

SEQ ID NO: 3655268 - RNA, 15 nt, Human
cuccucccugaugua

SEQ ID NO: 3655269 - RNA, 16 nt, Human
cuccucccugauguac

SEQ ID NO: 3655270 - RNA, 13 nt, Human
cuccucccugcau

SEQ ID NO: 3655271 - RNA, 23 nt, Human
cuccucccugcaucugaccagca

SEQ ID NO: 3655272 - RNA, 12 nt, Human
cuccucccuggc

SEQ ID NO: 3655273 - RNA, 13 nt, Human
cuccucccuggcu

SEQ ID NO: 3655274 - RNA, 20 nt, Human
cuccucccuggcugcccugg

SEQ ID NO: 3655275 - RNA, 21 nt, Human
cuccucccuggcugcccuggc

SEQ ID NO: 3655276 - RNA, 14 nt, Human
cuccucccuuagcu

SEQ ID NO: 3655277 - RNA, 15 nt, Human
cuccucccuuagcuc

SEQ ID NO: 3655278 - RNA, 13 nt, Human
cuccucccuuccu

SEQ ID NO: 3655279 - RNA, 14 nt, Human
cuccucccuuccuu

SEQ ID NO: 3655280 - RNA, 18 nt, Human
cuccucccuuuccuuccu

SEQ ID NO: 3655281 - RNA, 22 nt, Human
cuccuccgaggugguuuuaaag

SEQ ID NO: 3655282 - RNA, 12 nt, Human
cuccuccucgga

SEQ ID NO: 3655283 - RNA, 13 nt, Human
cuccuccucggaa

SEQ ID NO: 3655284 - RNA, 13 nt, Human
cuccuccucuuuc

SEQ ID NO: 3655285 - RNA, 16 nt, Human
cuccuccucuuucucu

SEQ ID NO: 3655286 - RNA, 13 nt, Human
cuccuccuuccua

SEQ ID NO: 3655287 - RNA, 15 nt, Human
cuccuccuuuuucca

SEQ ID NO: 3655288 - RNA, 17 nt, Human
cuccucgacaucacugu

SEQ ID NO: 3655289 - RNA, 15 nt, Human
cuccucgcaagcugg

SEQ ID NO: 3655290 - RNA, 16 nt, Human
cuccucgcaagcuggg

SEQ ID NO: 3655291 - RNA, 17 nt, Human
cuccucgcaagcugggu

SEQ ID NO: 3655292 - RNA, 19 nt, Human
cuccucgcaagcuggguaa

SEQ ID NO: 3655293 - RNA, 19 nt, Human
cuccucggcccccuccauc

SEQ ID NO: 3655294 - RNA, 15 nt, Human
cuccucggccuggcu

SEQ ID NO: 3655295 - RNA, 16 nt, Human
cuccucggccuggcuc

SEQ ID NO: 3655296 - RNA, 18 nt, Human
cuccucggccuggcuccu

SEQ ID NO: 3655297 - RNA, 13 nt, Human
cuccucuaagcca

SEQ ID NO: 3655298 - RNA, 12 nt, Human
cuccucucccau

SEQ ID NO: 3655299 - RNA, 15 nt, Human
cuccucucccauccc

SEQ ID NO: 3655300 - RNA, 18 nt, Human
cuccucucccauccuuga

SEQ ID NO: 3655301 - RNA, 23 nt, Human
cuccucucccauugucccucugc

SEQ ID NO: 3655302 - RNA, 15 nt, Human
cuccucuccccagca

SEQ ID NO: 3655303 - RNA, 22 nt, Human
cuccucuccccagcccagagac

SEQ ID NO: 3655304 - RNA, 23 nt, Human
cuccucuccccagcccagagaca

SEQ ID NO: 3655305 - RNA, 21 nt, Human
cuccucuccuacucggcucug

SEQ ID NO: 3655306 - RNA, 20 nt, Human
cuccucuccuggaggauugc

SEQ ID NO: 3655307 - RNA, 13 nt, Human
cuccucucugccc

SEQ ID NO: 3655308 - RNA, 17 nt, Human
cuccucugaaacagcug

SEQ ID NO: 3655309 - RNA, 20 nt, Human
cuccucugaaacagcugccu

SEQ ID NO: 3655310 - RNA, 18 nt, Human
cuccucugacucagggcu

SEQ ID NO: 3655311 - RNA, 22 nt, Human
cuccucugacucagggcuccug

SEQ ID NO: 3655312 - RNA, 16 nt, Human
cuccucugcagugccu

SEQ ID NO: 3655313 - RNA, 12 nt, Human
cuccucugccac

SEQ ID NO: 3655314 - RNA, 22 nt, Human
cuccucugcccgggagcucagg

SEQ ID NO: 3655315 - RNA, 14 nt, Human
cuccucugcugcug

SEQ ID NO: 3655316 - RNA, 15 nt, Human
cuccucugcugcugg

SEQ ID NO: 3655317 - RNA, 14 nt, Human
cuccucugcuugcc

SEQ ID NO: 3655318 - RNA, 15 nt, Human
cuccucugcuugcca

SEQ ID NO: 3655319 - RNA, 12 nt, Human
cuccucugggca

SEQ ID NO: 3655320 - RNA, 15 nt, Human
cuccucuguccaggc

SEQ ID NO: 3655321 - RNA, 16 nt, Human
cuccucuguccagggc

SEQ ID NO: 3655322 - RNA, 17 nt, Human
cuccucuguccugcuuc

SEQ ID NO: 3655323 - RNA, 20 nt, Human
cuccucuuaaaaaauaaaaa

SEQ ID NO: 3655324 - RNA, 23 nt, Human
cuccucuucaacugaccagccuc

SEQ ID NO: 3655325 - RNA, 18 nt, Human
cuccucuuccaugcugug

SEQ ID NO: 3655326 - RNA, 17 nt, Human
cuccucuuccccagacg

SEQ ID NO: 3655327 - RNA, 19 nt, Human
cuccucuucugacgugccu

SEQ ID NO: 3655328 - RNA, 16 nt, Human
cccaugccuguccagc

SEQ ID NO: 3655329 - RNA, 14 nt, Human
cccaugcuggagcc

SEQ ID NO: 3655330 - RNA, 15 nt, Human
cccaugcuggagccu

SEQ ID NO: 3655331 - RNA, 16 nt, Human
cccaugcuggagccug

SEQ ID NO: 3655332 - RNA, 17 nt, Human
aaauccaaauauuguua

SEQ ID NO: 3655333 - RNA, 12 nt, Human
aaauccaggacc

SEQ ID NO: 3655334 - RNA, 13 nt, Human
aaauccaggaccc

SEQ ID NO: 3655335 - RNA, 19 nt, Human
aaauccaggacccugccag

SEQ ID NO: 3655336 - RNA, 18 nt, Human
aaauccauacauuugugu

SEQ ID NO: 3655337 - RNA, 20 nt, Human
aaauccauaucuuaaagaaa

SEQ ID NO: 3655338 - RNA, 16 nt, Human
aaauccauuuggaaau

SEQ ID NO: 3655339 - RNA, 18 nt, Human
aaauccauuuggaaaucu

SEQ ID NO: 3655340 - RNA, 13 nt, Human
aaaucccauuauu

SEQ ID NO: 3655341 - RNA, 15 nt, Human
aaaucccauuauuca

SEQ ID NO: 3655342 - RNA, 20 nt, Human
aaaucccauuauucaaaguu

SEQ ID NO: 3655343 - RNA, 12 nt, Human
cuccucuugcca

SEQ ID NO: 3655344 - RNA, 16 nt, Human
cuccucuugccacugc

SEQ ID NO: 3655345 - RNA, 19 nt, Human
cuccucuugccacugccuc

SEQ ID NO: 3655346 - RNA, 20 nt, Human
cuccucuuguaaauaaagcc

SEQ ID NO: 3655347 - RNA, 12 nt, Human
cuccucuuuaaa

SEQ ID NO: 3655348 - RNA, 16 nt, Human
cuccucuuucucuccc

SEQ ID NO: 3655349 - RNA, 17 nt, Human
cuccucuuucucucccc

SEQ ID NO: 3655350 - RNA, 20 nt, Human
cuccucuuucucuccccaac

SEQ ID NO: 3655351 - RNA, 21 nt, Human
cuccucuuuguuuuguuuuaa

SEQ ID NO: 3655352 - RNA, 21 nt, Human
cuccugaaaaaaaaccugaga

SEQ ID NO: 3655353 - RNA, 20 nt, Human
cuccugaaccgcacagcuca

SEQ ID NO: 3655354 - RNA, 23 nt, Human
cuccugaaccgcacagcucagga

SEQ ID NO: 3655355 - RNA, 22 nt, Human
cuccugacacaccugcagccuc

SEQ ID NO: 3655356 - RNA, 15 nt, Human
cuccugacaccccac

SEQ ID NO: 3655357 - RNA, 16 nt, Human
cuccugacaccccacu

SEQ ID NO: 3655358 - RNA, 18 nt, Human
cuccugacacccuucucc

SEQ ID NO: 3655359 - RNA, 20 nt, Human
cuccugacacccuucuccca

SEQ ID NO: 3655360 - RNA, 14 nt, Human
cuccugacacugcu

SEQ ID NO: 3655361 - RNA, 19 nt, Human
cuccugacagaaggugcca

SEQ ID NO: 3655362 - RNA, 22 nt, Human
cuccugaccaguugcagucacu

SEQ ID NO: 3655363 - RNA, 18 nt, Human
cuccugacccauugcugu

SEQ ID NO: 3655364 - RNA, 19 nt, Human
cuccugacccauugcuguu

SEQ ID NO: 3655365 - RNA, 14 nt, Human
cuccugaccugagg

SEQ ID NO: 3655366 - RNA, 15 nt, Human
cuccugacuggugcu

SEQ ID NO: 3655367 - RNA, 19 nt, Human
cuccugagaccccuggccu

SEQ ID NO: 3655368 - RNA, 21 nt, Human
cuccugagaccccuggccucc

SEQ ID NO: 3655369 - RNA, 22 nt, Human
cuccugagaccccuggccuccg

SEQ ID NO: 3655370 - RNA, 12 nt, Human
cuccugagcccc

SEQ ID NO: 3655371 - RNA, 13 nt, Human
cuccugagccccc

SEQ ID NO: 3655372 - RNA, 17 nt, Human
cuccugagcccccagcu

SEQ ID NO: 3655373 - RNA, 20 nt, Human
cuccugagcuaggaagaguc

SEQ ID NO: 3655374 - RNA, 15 nt, Human
cuccugaggacagcu

SEQ ID NO: 3655375 - RNA, 17 nt, Human
cuccugaggacagcugu

SEQ ID NO: 3655376 - RNA, 20 nt, Human
cuccugaggaucagaaagua

SEQ ID NO: 3655377 - RNA, 16 nt, Human
cuccugaggcuuugga

SEQ ID NO: 3655378 - RNA, 20 nt, Human
cuccugagggaggaccuggg

SEQ ID NO: 3655379 - RNA, 23 nt, Human
cuccugaggggcaucugccccuc

SEQ ID NO: 3655380 - RNA, 22 nt, Human
cuccugaguagcugggauuaca

SEQ ID NO: 3655381 - RNA, 16 nt, Human
cuccugagugauccca

SEQ ID NO: 3655382 - RNA, 15 nt, Human
cuccugauuauuuau

SEQ ID NO: 3655383 - RNA, 19 nt, Human
cuccugcacuuacuugcuu

SEQ ID NO: 3655384 - RNA, 12 nt, Human
cuccugcaggca

SEQ ID NO: 3655385 - RNA, 18 nt, Human
cuccugcaggcagccagg

SEQ ID NO: 3655386 - RNA, 19 nt, Human
cuccugccaccacgcccgg

SEQ ID NO: 3655387 - RNA, 14 nt, Human
cuccugcccaccug

SEQ ID NO: 3655388 - RNA, 13 nt, Human
cuccugcccacgg

SEQ ID NO: 3655389 - RNA, 11 nt, Human
cuccugcccag

SEQ ID NO: 3655390 - RNA, 14 nt, Human
cuccugcccaggag

SEQ ID NO: 3655391 - RNA, 18 nt, Human
cuccugcccaguccccca

SEQ ID NO: 3655392 - RNA, 13 nt, Human
cuccugcccccac

SEQ ID NO: 3655393 - RNA, 15 nt, Human
cuccugcccccacac

SEQ ID NO: 3655394 - RNA, 23 nt, Human
cuccugcccccacaccuggcccu

SEQ ID NO: 3655395 - RNA, 20 nt, Human
cuccugcccgcagaccucug

SEQ ID NO: 3655396 - RNA, 13 nt, Human
cuccugccuacuc

SEQ ID NO: 3655397 - RNA, 16 nt, Human
cuccugccuacucacg

SEQ ID NO: 3655398 - RNA, 17 nt, Human
cuccugccucagccucc

SEQ ID NO: 3655399 - RNA, 19 nt, Human
cuccugccucagccucccg

SEQ ID NO: 3655400 - RNA, 20 nt, Human
cuccugccucgaacuggcug

SEQ ID NO: 3655401 - RNA, 15 nt, Human
cuccugccucuacug

SEQ ID NO: 3655402 - RNA, 14 nt, Human
cuccugccuguagc

SEQ ID NO: 3655403 - RNA, 16 nt, Human
cuccugccuguagcag

SEQ ID NO: 3655404 - RNA, 18 nt, Human
cuccugccuguagcagug

SEQ ID NO: 3655405 - RNA, 21 nt, Human
cuccugccuucuguccuggug

SEQ ID NO: 3655406 - RNA, 15 nt, Human
cuccugccuuugccu

SEQ ID NO: 3655407 - RNA, 19 nt, Human
cuccugcguguucucagag

SEQ ID NO: 3655408 - RNA, 23 nt, Human
cuccugcuaacggugcucagggg

SEQ ID NO: 3655409 - RNA, 19 nt, Human
cuccugcugcaccaaccca

SEQ ID NO: 3655410 - RNA, 12 nt, Human
cuccugcugcag

SEQ ID NO: 3655411 - RNA, 12 nt, Human
cuccugcugcca

SEQ ID NO: 3655412 - RNA, 14 nt, Human
cuccugcugccagu

SEQ ID NO: 3655413 - RNA, 18 nt, Human
cuccugcugcucccucag

SEQ ID NO: 3655414 - RNA, 21 nt, Human
cuccugcugcucccucagacu

SEQ ID NO: 3655415 - RNA, 23 nt, Human
cuccugcugcucccucagacugg

SEQ ID NO: 3655416 - RNA, 23 nt, Human
cuccugcuguaaauuuggcuucu

SEQ ID NO: 3655417 - RNA, 22 nt, Human
cuccuggaaaggcucagucuca

SEQ ID NO: 3655418 - RNA, 23 nt, Human
cuccuggaaaggcucagucucag

SEQ ID NO: 3655419 - RNA, 24 nt, Human
cuccuggaaaggcucagucucagg

SEQ ID NO: 3655420 - RNA, 11 nt, Human
cuccuggaaau

SEQ ID NO: 3655421 - RNA, 22 nt, Human
cuccuggaacagaagacagcug

SEQ ID NO: 3655422 - RNA, 21 nt, Human
cuccuggaaccuugcuguccu

SEQ ID NO: 3655423 - RNA, 20 nt, Human
cuccuggaagcuguguccuu

SEQ ID NO: 3655424 - RNA, 22 nt, Human
cuccuggaccccccuuucacag

SEQ ID NO: 3655425 - RNA, 12 nt, Human
cuccuggacucc

SEQ ID NO: 3655426 - RNA, 14 nt, Human
cuccuggacugccu

SEQ ID NO: 3655427 - RNA, 12 nt, Human
cuccuggagccu

SEQ ID NO: 3655428 - RNA, 18 nt, Human
cuccuggccuauccgcug

SEQ ID NO: 3655429 - RNA, 23 nt, Human
cuccuggccuauccgcugccagc

SEQ ID NO: 3655430 - RNA, 12 nt, Human
cuccugggaagg

SEQ ID NO: 3655431 - RNA, 22 nt, Human
cuccugggaaggcuacucaccu

SEQ ID NO: 3655432 - RNA, 23 nt, Human
cuccugggaaggcuacucaccuu

SEQ ID NO: 3655433 - RNA, 15 nt, Human
cuccugggaucugcu

SEQ ID NO: 3655434 - RNA, 16 nt, Human
cuccugggaucugcuc

SEQ ID NO: 3655435 - RNA, 17 nt, Human
cuccugggcagcugccu

SEQ ID NO: 3655436 - RNA, 18 nt, Human
cuccugggcagcugccuc

SEQ ID NO: 3655437 - RNA, 13 nt, Human
cuccugggccccu

SEQ ID NO: 3655438 - RNA, 20 nt, Human
cuccugggcccucucugcuc

SEQ ID NO: 3655439 - RNA, 23 nt, Human
cuccuggggccaggccgggccug

SEQ ID NO: 3655440 - RNA, 18 nt, Human
cuccuggggguucuuucu

SEQ ID NO: 3655441 - RNA, 23 nt, Human
cuccuggggguucuuucuuccuc

SEQ ID NO: 3655442 - RNA, 22 nt, Human
cuccuggguuuuguauucucug

SEQ ID NO: 3655443 - RNA, 18 nt, Human
cuccuggucaccuaggaa

SEQ ID NO: 3655444 - RNA, 13 nt, Human
cuccugguccuag

SEQ ID NO: 3655445 - RNA, 15 nt, Human
cuccuggugccaccu

SEQ ID NO: 3655446 - RNA, 20 nt, Human
cuccugguggguccaggggc

SEQ ID NO: 3655447 - RNA, 13 nt, Human
cuccuggugucac

SEQ ID NO: 3655448 - RNA, 17 nt, Human
cuccuggugucacccca

SEQ ID NO: 3655449 - RNA, 21 nt, Human
cuccuggugucaccccagagc

SEQ ID NO: 3655450 - RNA, 23 nt, Human
cuccuggugucaccccagagcca

SEQ ID NO: 3655451 - RNA, 16 nt, Human
cuccuguaauuccuac

SEQ ID NO: 3655452 - RNA, 14 nt, Human
cuccuguccaaccu

SEQ ID NO: 3655453 - RNA, 18 nt, Human
cuccuguccccugcuaca

SEQ ID NO: 3655454 - RNA, 18 nt, Human
cuccuguccucccucacc

SEQ ID NO: 3655455 - RNA, 10 nt, Human
cuccugucuu

SEQ ID NO: 3655456 - RNA, 17 nt, Human
cuccugucuucccaggg

SEQ ID NO: 3655457 - RNA, 21 nt, Human
cuccugucuucccaggguagc

SEQ ID NO: 3655458 - RNA, 16 nt, Human
cuccugucuucugcuu

SEQ ID NO: 3655459 - RNA, 16 nt, Human
cuccugugcaugggug

SEQ ID NO: 3655460 - RNA, 20 nt, Human
cuccugugcaugggugaagg

SEQ ID NO: 3655461 - RNA, 21 nt, Human
cuccugugcccacaucccagg

SEQ ID NO: 3655462 - RNA, 13 nt, Human
cuccugugcccuu

SEQ ID NO: 3655463 - RNA, 20 nt, Human
cuccugugcuacuuugccuu

SEQ ID NO: 3655464 - RNA, 15 nt, Human
cuccugugcuuuccc

SEQ ID NO: 3655465 - RNA, 22 nt, Human
cuccuguggaaggcagagaaau

SEQ ID NO: 3655466 - RNA, 17 nt, Human
cuccuguggccugccag

SEQ ID NO: 3655467 - RNA, 20 nt, Human
cuccuguggccugccaguca

SEQ ID NO: 3655468 - RNA, 18 nt, Human
cuccugugggagccucgc

SEQ ID NO: 3655469 - RNA, 14 nt, Human
cuccuguguacagg

SEQ ID NO: 3655470 - RNA, 20 nt, Human
cuccugugugugcgccuaca

SEQ ID NO: 3655471 - RNA, 16 nt, Human
cuccuguuagcuccuc

SEQ ID NO: 3655472 - RNA, 22 nt, Human
cuccuguugcacccagcccugg

SEQ ID NO: 3655473 - RNA, 23 nt, Human
cuccuguugcacccagcccuggu

SEQ ID NO: 3655474 - RNA, 16 nt, Human
cuccuguugggagagg

SEQ ID NO: 3655475 - RNA, 18 nt, Human
cuccuguuucccuucccu

SEQ ID NO: 3655476 - RNA, 14 nt, Human
cucucuccacccua

SEQ ID NO: 3655477 - RNA, 12 nt, Human
cucucucccagu

SEQ ID NO: 3655478 - RNA, 19 nt, Human
cucucucccagucuaccca

SEQ ID NO: 3655479 - RNA, 23 nt, Human
cucucucccagucuacccagaga

SEQ ID NO: 3655480 - RNA, 14 nt, Human
cucucucccaugga

SEQ ID NO: 3655481 - RNA, 20 nt, Human
cucucucccauggagcccca

SEQ ID NO: 3655482 - RNA, 19 nt, Human
cucucuccccucaaagucu

SEQ ID NO: 3655483 - RNA, 22 nt, Human
cucucuccccucaaagucugca

SEQ ID NO: 3655484 - RNA, 17 nt, Human
cucucuccuccugccca

SEQ ID NO: 3655485 - RNA, 20 nt, Human
cucucuccuccugcccaccu

SEQ ID NO: 3655486 - RNA, 15 nt, Human
cucucuccuguacuu

SEQ ID NO: 3655487 - RNA, 15 nt, Human
cucucuccuuugcug

SEQ ID NO: 3655488 - RNA, 13 nt, Human
cucucucugacuc

SEQ ID NO: 3655489 - RNA, 16 nt, Human
cucucugaaccccucc

SEQ ID NO: 3655490 - RNA, 20 nt, Human
cucucugaagaugaucauuu

SEQ ID NO: 3655491 - RNA, 19 nt, Human
cucucugaaggaggccacc

SEQ ID NO: 3655492 - RNA, 21 nt, Human
cucucugaaggaggccaccuc

SEQ ID NO: 3655493 - RNA, 18 nt, Human
cucucugcaccguacugu

SEQ ID NO: 3655494 - RNA, 18 nt, Human
cucucugcagccagccca

SEQ ID NO: 3655495 - RNA, 12 nt, Human
cucucugcaggu

SEQ ID NO: 3655496 - RNA, 12 nt, Human
cucucugcccug

SEQ ID NO: 3655497 - RNA, 17 nt, Human
cucucugcccuugauca

SEQ ID NO: 3655498 - RNA, 12 nt, Human
cucucugcucug

SEQ ID NO: 3655499 - RNA, 22 nt, Human
cucucugcucugcgugucaccu

SEQ ID NO: 3655500 - RNA, 12 nt, Human
cucucuggagaa

SEQ ID NO: 3655501 - RNA, 14 nt, Human
cucucuggccuccc

SEQ ID NO: 3655502 - RNA, 15 nt, Human
cucucuggccuccca

SEQ ID NO: 3655503 - RNA, 16 nt, Human
cucucuggccucccac

SEQ ID NO: 3655504 - RNA, 14 nt, Human
cucucuggccuucg

SEQ ID NO: 3655505 - RNA, 17 nt, Human
cucucuggccuuuuccu

SEQ ID NO: 3655506 - RNA, 13 nt, Human
cucucuggcuggg

SEQ ID NO: 3655507 - RNA, 16 nt, Human
cucucugggccucaga

SEQ ID NO: 3655508 - RNA, 21 nt, Human
cucucugggcugacugggcca

SEQ ID NO: 3655509 - RNA, 23 nt, Human
cucucuggggcaggguuauuccu

SEQ ID NO: 3655510 - RNA, 19 nt, Human
cucucuggggccacacaga

SEQ ID NO: 3655511 - RNA, 20 nt, Human
cucucuggggccacacagaa

SEQ ID NO: 3655512 - RNA, 16 nt, Human
cucucuguaauaaacu

SEQ ID NO: 3655513 - RNA, 21 nt, Human
cucucuguaauaaacucauuu

SEQ ID NO: 3655514 - RNA, 17 nt, Human
cucucuguauuuuuucu

SEQ ID NO: 3655515 - RNA, 19 nt, Human
cucucugucccuugcugua

SEQ ID NO: 3655516 - RNA, 23 nt, Human
cucucugucccuugcuguaugcu

SEQ ID NO: 3655517 - RNA, 16 nt, Human
cucucugugcugugga

SEQ ID NO: 3655518 - RNA, 19 nt, Human
cucucugugggcuggcagu

SEQ ID NO: 3655519 - RNA, 15 nt, Human
cucucuuacccuucu

SEQ ID NO: 3655520 - RNA, 19 nt, Human
cucucuuacccuucugugc

SEQ ID NO: 3655521 - RNA, 19 nt, Human
cucucuuagggacagucaa

SEQ ID NO: 3655522 - RNA, 14 nt, Human
cucucuucccucag

SEQ ID NO: 3655523 - RNA, 15 nt, Human
cucucuucccuuucc

SEQ ID NO: 3655524 - RNA, 20 nt, Human
cucucuuccuaucccauccc

SEQ ID NO: 3655525 - RNA, 13 nt, Human
cucucuuccugcc

SEQ ID NO: 3655526 - RNA, 14 nt, Human
cucucuuccugccc

SEQ ID NO: 3655527 - RNA, 15 nt, Human
cucucuuccugcccc

SEQ ID NO: 3655528 - RNA, 14 nt, Human
cucucuucugcucc

SEQ ID NO: 3655529 - RNA, 17 nt, Human
cucucuucugcuccacc

SEQ ID NO: 3655530 - RNA, 16 nt, Human
cucucuugcacccgcc

SEQ ID NO: 3655531 - RNA, 20 nt, Human
cucucuugccgaggagccag

SEQ ID NO: 3655532 - RNA, 13 nt, Human
cucucuugucaga

SEQ ID NO: 3655533 - RNA, 19 nt, Human
cucucuuuauacagcugua

SEQ ID NO: 3655534 - RNA, 17 nt, Human
cucucuuuccuucuugc

SEQ ID NO: 3655535 - RNA, 14 nt, Human
cucucuuuguucuc

SEQ ID NO: 3655536 - RNA, 18 nt, Human
cucucuuuguucucagcu

SEQ ID NO: 3655537 - RNA, 20 nt, Human
cucucuuuguucucagcucc

SEQ ID NO: 3655538 - RNA, 12 nt, Human
cucucuuuucug

SEQ ID NO: 3655539 - RNA, 19 nt, Human
cucucuuuucuguacuucc

SEQ ID NO: 3655540 - RNA, 22 nt, Human
cucucuuuucuguacuuccuga

SEQ ID NO: 3655541 - RNA, 9 nt, Human
cucugaaac

SEQ ID NO: 3655542 - RNA, 15 nt, Human
cucugaaacagcugc

SEQ ID NO: 3655543 - RNA, 18 nt, Human
cucugaaacagcugccuu

SEQ ID NO: 3655544 - RNA, 14 nt, Human
cucugaaagagaaa

SEQ ID NO: 3655545 - RNA, 17 nt, Human
cucugaaagagaaacac

SEQ ID NO: 3655546 - RNA, 16 nt, Human
cucugaaaguuguaca

SEQ ID NO: 3655547 - RNA, 15 nt, Human
cucugaaaucuuccc

SEQ ID NO: 3655548 - RNA, 23 nt, Human
cucugaaaucuucccaugcauuc

SEQ ID NO: 3655549 - RNA, 15 nt, Human
cucuuuuuuacaaag

SEQ ID NO: 3655550 - RNA, 21 nt, Human
cucuuuuuuacucauugaaau

SEQ ID NO: 3655551 - RNA, 22 nt, Human
cucuuuuuuacucauugaaaug

SEQ ID NO: 3655552 - RNA, 19 nt, Human
cucuuuuuuguuuguuucu

SEQ ID NO: 3655553 - RNA, 16 nt, Human
cucuuuuuuuggccca

SEQ ID NO: 3655554 - RNA, 18 nt, Human
cucuuuuuuuggcccagg

SEQ ID NO: 3655555 - RNA, 20 nt, Human
cugaaaaaaaguuuacaagu

SEQ ID NO: 3655556 - RNA, 15 nt, Human
cugaaaaaauauaug

SEQ ID NO: 3655557 - RNA, 15 nt, Human
cugaaaaaguagauu

SEQ ID NO: 3655558 - RNA, 19 nt, Human
cugaaaaaguagauugagu

SEQ ID NO: 3655559 - RNA, 17 nt, Human
cugaaaaaucacauccu

SEQ ID NO: 3655560 - RNA, 19 nt, Human
cugaaaaaucuaagugaua

SEQ ID NO: 3655561 - RNA, 22 nt, Human
cugaaaaaucuaagugauauaa

SEQ ID NO: 3655562 - RNA, 15 nt, Human
cugaaaaauuccuuu

SEQ ID NO: 3655563 - RNA, 21 nt, Human
cugaaaaccaucuggccuggc

SEQ ID NO: 3655564 - RNA, 15 nt, Human
cugaaaacccagaga

SEQ ID NO: 3655565 - RNA, 16 nt, Human
cugaaaacggcccucu

SEQ ID NO: 3655566 - RNA, 22 nt, Human
cugaaaacuggaauaagaagca

SEQ ID NO: 3655567 - RNA, 14 nt, Human
cugaaaagaaauaa

SEQ ID NO: 3655568 - RNA, 16 nt, Human
cugaaaagaaauaaua

SEQ ID NO: 3655569 - RNA, 12 nt, Human
cugaaaagaagg

SEQ ID NO: 3655570 - RNA, 17 nt, Human
cugaaaagguuuaugaa

SEQ ID NO: 3655571 - RNA, 22 nt, Human
cugaaaaguguguauauauuuu

SEQ ID NO: 3655572 - RNA, 15 nt, Human
cugaaaauauaaaac

SEQ ID NO: 3655573 - RNA, 15 nt, Human
cugaaaaucuaauau

SEQ ID NO: 3655574 - RNA, 16 nt, Human
cugaaaaucuaauauu

SEQ ID NO: 3655575 - RNA, 12 nt, Human
cugaaaaugugc

SEQ ID NO: 3655576 - RNA, 22 nt, Human
cugaaaauguuuuucugccagg

SEQ ID NO: 3655577 - RNA, 18 nt, Human
cugaaaauucgaaccagg

SEQ ID NO: 3655578 - RNA, 22 nt, Human
cugaaaauugaugggauuuggu

SEQ ID NO: 3655579 - RNA, 19 nt, Human
cugaaaauugccuuucugu

SEQ ID NO: 3655580 - RNA, 20 nt, Human
cugaaaauugccuuucugug

SEQ ID NO: 3655581 - RNA, 15 nt, Human
cugaaacaacaaaua

SEQ ID NO: 3655582 - RNA, 16 nt, Human
cugaaacaacuuggaa

SEQ ID NO: 3655583 - RNA, 20 nt, Human
cugaaacaacuuggaaagau

SEQ ID NO: 3655584 - RNA, 18 nt, Human
cugaaacacgaaacuugu

SEQ ID NO: 3655585 - RNA, 20 nt, Human
cugaaacacgaaacuuguua

SEQ ID NO: 3655586 - RNA, 21 nt, Human
cugaaacacgaaacuuguuau

SEQ ID NO: 3655587 - RNA, 11 nt, Human
cugaaacagcu

SEQ ID NO: 3655588 - RNA, 13 nt, Human
cugaaacauuuca

SEQ ID NO: 3655589 - RNA, 14 nt, Human
cugaaaccaguguu

SEQ ID NO: 3655590 - RNA, 20 nt, Human
cugaaaccuaguacugcccc

SEQ ID NO: 3655591 - RNA, 19 nt, Human
cugaaacgcuccuuugugu

SEQ ID NO: 3655592 - RNA, 16 nt, Human
cugaaacuaaugaaag

SEQ ID NO: 3655593 - RNA, 20 nt, Human
cugaaacuauauuuugucau

SEQ ID NO: 3655594 - RNA, 22 nt, Human
cugaaacuuauuuuuuucugau

SEQ ID NO: 3655595 - RNA, 13 nt, Human
cugaaacuucccu

SEQ ID NO: 3655596 - RNA, 14 nt, Human
cugaaagaggccaa

SEQ ID NO: 3655597 - RNA, 18 nt, Human
cugaaagaggccaaacag

SEQ ID NO: 3655598 - RNA, 11 nt, Human
cugaaagccac

SEQ ID NO: 3655599 - RNA, 14 nt, Human
cugaaagccagcug

SEQ ID NO: 3655600 - RNA, 16 nt, Human
cugaaagccauggaga

SEQ ID NO: 3655601 - RNA, 23 nt, Human
cugaaagccauuuguuggggcag

SEQ ID NO: 3655602 - RNA, 17 nt, Human
cugaaagcccugagcuu

SEQ ID NO: 3655603 - RNA, 19 nt, Human
cugaaagcccugagcuuuc

SEQ ID NO: 3655604 - RNA, 19 nt, Human
cugaaaggcaguagucauu

SEQ ID NO: 3655605 - RNA, 15 nt, Human
cugaaaguuacccac

SEQ ID NO: 3655606 - RNA, 18 nt, Human
cugaaaguuacccacuga

SEQ ID NO: 3655607 - RNA, 12 nt, Human
cugaaaguucuu

SEQ ID NO: 3655608 - RNA, 13 nt, Human
cugaaaguuuugu

SEQ ID NO: 3655609 - RNA, 15 nt, Human
cugaaaguuuuguaa

SEQ ID NO: 3655610 - RNA, 16 nt, Human
cugaaaguuuuguaaa

SEQ ID NO: 3655611 - RNA, 20 nt, Human
cugaaaguuuuguaaaagaa

SEQ ID NO: 3655612 - RNA, 22 nt, Human
cugaaaguuuuguaaaagaaau

SEQ ID NO: 3655613 - RNA, 13 nt, Human
cugaaauaaaagc

SEQ ID NO: 3655614 - RNA, 21 nt, Human
cugaaauaaacgucuuaaaua

SEQ ID NO: 3655615 - RNA, 18 nt, Human
cugaaauaggaaacaagu

SEQ ID NO: 3655616 - RNA, 18 nt, Human
cugaaauauacacacagc

SEQ ID NO: 3655617 - RNA, 15 nt, Human
cugaaauccugguuc

SEQ ID NO: 3655618 - RNA, 23 nt, Human
cugaaaucuucccaugcauucug

SEQ ID NO: 3655619 - RNA, 18 nt, Human
cugaaaugaaacaaauaa

SEQ ID NO: 3655620 - RNA, 21 nt, Human
cugaaauggacuuuuguacau

SEQ ID NO: 3655621 - RNA, 16 nt, Human
cucugaggcuuccaga

SEQ ID NO: 3655622 - RNA, 20 nt, Human
cucugaggggcuaccaggaa

SEQ ID NO: 3655623 - RNA, 22 nt, Human
cucugaggugccugucccaccc

SEQ ID NO: 3655624 - RNA, 22 nt, Human
cucugaguagggcaauggaaau

SEQ ID NO: 3655625 - RNA, 17 nt, Human
cucugaguccuggccca

SEQ ID NO: 3655626 - RNA, 12 nt, Human
cucugaguguga

SEQ ID NO: 3655627 - RNA, 17 nt, Human
cucugaguguuuuauga

SEQ ID NO: 3655628 - RNA, 20 nt, Human
cucugaguuccggcaccagu

SEQ ID NO: 3655629 - RNA, 16 nt, Human
cucugaguuuaccauu

SEQ ID NO: 3655630 - RNA, 18 nt, Human
cucugaguuuaccauuug

SEQ ID NO: 3655631 - RNA, 21 nt, Human
cucugaguuuaccauuuguaa

SEQ ID NO: 3655632 - RNA, 16 nt, Human
cucugauacuuuuuug

SEQ ID NO: 3655633 - RNA, 17 nt, Human
cucugauacuuuuuuga

SEQ ID NO: 3655634 - RNA, 13 nt, Human
cucugauauggga

SEQ ID NO: 3655635 - RNA, 15 nt, Human
cucugauaugggacu

SEQ ID NO: 3655636 - RNA, 16 nt, Human
cucugauaugggacug

SEQ ID NO: 3655637 - RNA, 19 nt, Human
cucugauaugggacugagc

SEQ ID NO: 3655638 - RNA, 17 nt, Human
cucugauccuucuuccu

SEQ ID NO: 3655639 - RNA, 22 nt, Human
cucugaucuccauaaacaugaa

SEQ ID NO: 3655640 - RNA, 22 nt, Human
cucugaugaaaaauugcugacu

SEQ ID NO: 3655641 - RNA, 17 nt, Human
cucugaugaagaggagu

SEQ ID NO: 3655642 - RNA, 14 nt, Human
cucugaugcagcuu

SEQ ID NO: 3655643 - RNA, 15 nt, Human
cucugauuuucaaag

SEQ ID NO: 3655644 - RNA, 18 nt, Human
cucugauuuucaaagcuu

SEQ ID NO: 3655645 - RNA, 15 nt, Human
cucugcaaacugccu

SEQ ID NO: 3655646 - RNA, 16 nt, Human
cucugcaaacugccuu

SEQ ID NO: 3655647 - RNA, 16 nt, Human
cucugcaaaggaaaua

SEQ ID NO: 3655648 - RNA, 18 nt, Human
cucugcaaucuucucaga

SEQ ID NO: 3655649 - RNA, 17 nt, Human
cucugcaauuccccucu

SEQ ID NO: 3655650 - RNA, 22 nt, Human
cucugcaauuccccucugcugc

SEQ ID NO: 3655651 - RNA, 10 nt, Human
cucugcacag

SEQ ID NO: 3655652 - RNA, 15 nt, Human
cucugcacaugucuu

SEQ ID NO: 3655653 - RNA, 18 nt, Human
cucugcacaugucuugua

SEQ ID NO: 3655654 - RNA, 20 nt, Human
cucugcacuacuccucugca

SEQ ID NO: 3655655 - RNA, 19 nt, Human
cucugcacucccaccugac

SEQ ID NO: 3655656 - RNA, 23 nt, Human
cucugcacucccaccugacacac

SEQ ID NO: 3655657 - RNA, 14 nt, Human
cucugcacuccccu

SEQ ID NO: 3655658 - RNA, 18 nt, Human
cucugcagacuucccagc

SEQ ID NO: 3655659 - RNA, 18 nt, Human
cucugcagcaauaaagca

SEQ ID NO: 3655660 - RNA, 14 nt, Human
cucugcagcccagg

SEQ ID NO: 3655661 - RNA, 12 nt, Human
cucugcagccuc

SEQ ID NO: 3655662 - RNA, 15 nt, Human
cucugcagccucaga

SEQ ID NO: 3655663 - RNA, 16 nt, Human
cucugcagccucagag

SEQ ID NO: 3655664 - RNA, 19 nt, Human
cucugcagccucagagaca

SEQ ID NO: 3655665 - RNA, 18 nt, Human
cucugcagcugaccucug

SEQ ID NO: 3655666 - RNA, 14 nt, Human
cucugcaggcaccu

SEQ ID NO: 3655667 - RNA, 19 nt, Human
cucugcaggcuuaauaaaa

SEQ ID NO: 3655668 - RNA, 23 nt, Human
cucugcaggcuuaauaaaaauga

SEQ ID NO: 3655669 - RNA, 14 nt, Human
cucugcaggucccu

SEQ ID NO: 3655670 - RNA, 23 nt, Human
cucugcaggucccuaauaaagcu

SEQ ID NO: 3655671 - RNA, 19 nt, Human
cucugcaguacuugaugua

SEQ ID NO: 3655672 - RNA, 15 nt, Human
cucugcagucccagc

SEQ ID NO: 3655673 - RNA, 20 nt, Human
cucugcaguccuacucaagc

SEQ ID NO: 3655674 - RNA, 14 nt, Human
cucugcagucucua

SEQ ID NO: 3655675 - RNA, 16 nt, Human
cucugcagugccuugg

SEQ ID NO: 3655676 - RNA, 23 nt, Human
cucugcauacucauuaggauggc

SEQ ID NO: 3655677 - RNA, 15 nt, Human
cucugcaucccagca

SEQ ID NO: 3655678 - RNA, 17 nt, Human
cucugcaucccagcacc

SEQ ID NO: 3655679 - RNA, 22 nt, Human
cucugcaucuacucccaaguau

SEQ ID NO: 3655680 - RNA, 18 nt, Human
cucugcaugcggcccagc

SEQ ID NO: 3655681 - RNA, 19 nt, Human
cucugcaugcggcccagcc

SEQ ID NO: 3655682 - RNA, 21 nt, Human
cucugcaugcggcccagcccg

SEQ ID NO: 3655683 - RNA, 14 nt, Human
cucugcauucuagu

SEQ ID NO: 3655684 - RNA, 23 nt, Human
cucugcauuugucuauucuccag

SEQ ID NO: 3655685 - RNA, 23 nt, Human
cucugccaacuucuucagagcug

SEQ ID NO: 3655686 - RNA, 14 nt, Human
cucugccaccagag

SEQ ID NO: 3655687 - RNA, 20 nt, Human
cucugccacccuaccuguuc

SEQ ID NO: 3655688 - RNA, 13 nt, Human
cucugccaccucc

SEQ ID NO: 3655689 - RNA, 22 nt, Human
cucugccagaagauccccucag

SEQ ID NO: 3655690 - RNA, 16 nt, Human
cucugccagcaaagag

SEQ ID NO: 3655691 - RNA, 14 nt, Human
cucugccaguccug

SEQ ID NO: 3655692 - RNA, 13 nt, Human
cucugccagugac

SEQ ID NO: 3655693 - RNA, 14 nt, Human
cucugccagugaca

SEQ ID NO: 3655694 - RNA, 15 nt, Human
cucugccagugacag

SEQ ID NO: 3655695 - RNA, 20 nt, Human
cucugccagugacagacagg

SEQ ID NO: 3655696 - RNA, 19 nt, Human
cucugccaugaacuggagg

SEQ ID NO: 3655697 - RNA, 16 nt, Human
cucugcccacucccug

SEQ ID NO: 3655698 - RNA, 17 nt, Human
cucugcccacucccugc

SEQ ID NO: 3655699 - RNA, 20 nt, Human
cucugcccacucccugcaac

SEQ ID NO: 3655700 - RNA, 13 nt, Human
cucugcccagagc

SEQ ID NO: 3655701 - RNA, 15 nt, Human
cucugcccagagcug

SEQ ID NO: 3655702 - RNA, 19 nt, Human
cucugcccagagcugggug

SEQ ID NO: 3655703 - RNA, 14 nt, Human
cucugcccaggcac

SEQ ID NO: 3655704 - RNA, 15 nt, Human
cucugcccauucccc

SEQ ID NO: 3655705 - RNA, 14 nt, Human
cucugccccagagg

SEQ ID NO: 3655706 - RNA, 18 nt, Human
cucugccccagcucuggc

SEQ ID NO: 3655707 - RNA, 21 nt, Human
cucugccccagcucuggcuuc

SEQ ID NO: 3655708 - RNA, 17 nt, Human
cucugccccagucguua

SEQ ID NO: 3655709 - RNA, 17 nt, Human
cucugccccauccucca

SEQ ID NO: 3655710 - RNA, 22 nt, Human
cucugccccauccuccagcagg

SEQ ID NO: 3655711 - RNA, 12 nt, Human
cucugcccccug

SEQ ID NO: 3655712 - RNA, 14 nt, Human
cucugcccgggagc

SEQ ID NO: 3655713 - RNA, 20 nt, Human
cucugcccuaaugcgcaggc

SEQ ID NO: 3655714 - RNA, 23 nt, Human
aaauccccaugccuguggcugcg

SEQ ID NO: 3655715 - RNA, 18 nt, Human
aaaucccuuaccucggug

SEQ ID NO: 3655716 - RNA, 22 nt, Human
aaauccuaagacacaaaugcau

SEQ ID NO: 3655717 - RNA, 15 nt, Human
aaauccuacugaaug

SEQ ID NO: 3655718 - RNA, 14 nt, Human
aaauccuaugugau

SEQ ID NO: 3655719 - RNA, 12 nt, Human
aaauccucuggc

SEQ ID NO: 3655720 - RNA, 17 nt, Human
aaauccucuuccucuga

SEQ ID NO: 3655721 - RNA, 18 nt, Human
aaauccucuuccucugag

SEQ ID NO: 3655722 - RNA, 22 nt, Human
aaauccugacuauuauguuguu

SEQ ID NO: 3655723 - RNA, 21 nt, Human
aaauccuggauuuuuuucugu

SEQ ID NO: 3655724 - RNA, 12 nt, Human
aaauccuguuga

SEQ ID NO: 3655725 - RNA, 21 nt, Human
aaauccuuagaucuggcaugu

SEQ ID NO: 3655726 - RNA, 15 nt, Human
aaauccuuugugaaa

SEQ ID NO: 3655727 - RNA, 14 nt, Human
aaaucuacaguaca

SEQ ID NO: 3655728 - RNA, 17 nt, Human
aaaucuaccacuguaug

SEQ ID NO: 3655729 - RNA, 20 nt, Human
aaaucuaggaaaauauuuug

SEQ ID NO: 3655730 - RNA, 15 nt, Human
aaaucuauagaaagu

SEQ ID NO: 3655731 - RNA, 17 nt, Human
aaaucuauagaaagugu

SEQ ID NO: 3655732 - RNA, 14 nt, Human
aaaucuauauuuug

SEQ ID NO: 3655733 - RNA, 14 nt, Human
aaaucuaugauucc

SEQ ID NO: 3655734 - RNA, 14 nt, Human
aaaucuaugccacu

SEQ ID NO: 3655735 - RNA, 22 nt, Human
aaaucuauuuaauuaggaaaaa

SEQ ID NO: 3655736 - RNA, 12 nt, Human
aaaucuauuuau

SEQ ID NO: 3655737 - RNA, 17 nt, Human
aaaucucaccccauccc

SEQ ID NO: 3655738 - RNA, 14 nt, Human
aaaucucaucccua

SEQ ID NO: 3655739 - RNA, 17 nt, Human
aaaucucuccacuuuca

SEQ ID NO: 3655740 - RNA, 17 nt, Human
aaaucucucucuguugu

SEQ ID NO: 3655741 - RNA, 12 nt, Human
aaaucucuucug

SEQ ID NO: 3655742 - RNA, 15 nt, Human
aaaucugaagauugu

SEQ ID NO: 3655743 - RNA, 14 nt, Human
aaaucugacccagu

SEQ ID NO: 3655744 - RNA, 21 nt, Human
aaaucugagggaaauguuuug

SEQ ID NO: 3655745 - RNA, 22 nt, Human
aaaucugagggaaauguuuugu

SEQ ID NO: 3655746 - RNA, 15 nt, Human
aaaucugcaaagcau

SEQ ID NO: 3655747 - RNA, 17 nt, Human
aaaucugcaaagcaugu

SEQ ID NO: 3655748 - RNA, 15 nt, Human
aaaucugccuggguu

SEQ ID NO: 3655749 - RNA, 13 nt, Human
aaaucugcuugua

SEQ ID NO: 3655750 - RNA, 14 nt, Human
aaaucuggcuucug

SEQ ID NO: 3655751 - RNA, 21 nt, Human
aaaucuggcuucuggccagga

SEQ ID NO: 3655752 - RNA, 22 nt, Human
aaaucuggucuuguuagaaaac

SEQ ID NO: 3655753 - RNA, 17 nt, Human
aaaucuguaacagguau

SEQ ID NO: 3655754 - RNA, 21 nt, Human
aaaucuguaagcucuuugaaa

SEQ ID NO: 3655755 - RNA, 21 nt, Human
aaaucuguccaaaggaggcug

SEQ ID NO: 3655756 - RNA, 22 nt, Human
aaaucuguccaaaggaggcugg

SEQ ID NO: 3655757 - RNA, 12 nt, Human
aaaucugucugc

SEQ ID NO: 3655758 - RNA, 19 nt, Human
aaaucugugaacuugaaau

SEQ ID NO: 3655759 - RNA, 23 nt, Human
aaaucugugaugauccucauaug

SEQ ID NO: 3655760 - RNA, 12 nt, Human
aaaucuguugcc

SEQ ID NO: 3655761 - RNA, 19 nt, Human
aaaucuguuugaucccugu

SEQ ID NO: 3655762 - RNA, 15 nt, Human
aaaucuuaauacugu

SEQ ID NO: 3655763 - RNA, 16 nt, Human
aaaucuuaauacuguu

SEQ ID NO: 3655764 - RNA, 17 nt, Human
aaaucuuaauacuguua

SEQ ID NO: 3655765 - RNA, 23 nt, Human
aaaucuuaauacuguuauucuuu

SEQ ID NO: 3655766 - RNA, 16 nt, Human
cugacaccuaacucuu

SEQ ID NO: 3655767 - RNA, 14 nt, Human
cugacaccuuucau

SEQ ID NO: 3655768 - RNA, 15 nt, Human
cugacacucccaccc

SEQ ID NO: 3655769 - RNA, 14 nt, Human
cugacacugcugga

SEQ ID NO: 3655770 - RNA, 15 nt, Human
cugacacugcuggag

SEQ ID NO: 3655771 - RNA, 14 nt, Human
cugaggucagggag

SEQ ID NO: 3655772 - RNA, 19 nt, Human
cugaggucagggagugcug

SEQ ID NO: 3655773 - RNA, 15 nt, Human
cugagguccugagca

SEQ ID NO: 3655774 - RNA, 17 nt, Human
cugaggucuagaaauag

SEQ ID NO: 3655775 - RNA, 21 nt, Human
cugaggucucuugagggagcu

SEQ ID NO: 3655776 - RNA, 14 nt, Human
cugaggucuggcug

SEQ ID NO: 3655777 - RNA, 17 nt, Human
cugaggugaaagggagc

SEQ ID NO: 3655778 - RNA, 16 nt, Human
cugaggugcacuggga

SEQ ID NO: 3655779 - RNA, 18 nt, Human
cugaggugcacugggagg

SEQ ID NO: 3655780 - RNA, 20 nt, Human
cugaggugcccaggagaaga

SEQ ID NO: 3655781 - RNA, 20 nt, Human
cugaggugggcagaucacga

SEQ ID NO: 3655782 - RNA, 15 nt, Human
cugaggugggcccag

SEQ ID NO: 3655783 - RNA, 16 nt, Human
cugaggugggcccagg

SEQ ID NO: 3655784 - RNA, 22 nt, Human
cugaggugggcccaggaccagc

SEQ ID NO: 3655785 - RNA, 13 nt, Human
cugaggugugggg

SEQ ID NO: 3655786 - RNA, 21 nt, Human
cugaggugugggggcugcagc

SEQ ID NO: 3655787 - RNA, 19 nt, Human
cugagguuacuggaaauua

SEQ ID NO: 3655788 - RNA, 18 nt, Human
cugagguuccucugccug

SEQ ID NO: 3655789 - RNA, 22 nt, Human
cugaguaaucgcuuaaagaugu

SEQ ID NO: 3655790 - RNA, 19 nt, Human
cugaguacguugugcauuu

SEQ ID NO: 3655791 - RNA, 20 nt, Human
cugaguacguugugcauuug

SEQ ID NO: 3655792 - RNA, 13 nt, Human
cugaguacuccac

SEQ ID NO: 3655793 - RNA, 18 nt, Human
cugaguacuccacacugc

SEQ ID NO: 3655794 - RNA, 20 nt, Human
cugaguagaaaggccuuuaa

SEQ ID NO: 3655795 - RNA, 19 nt, Human
cugaguagcuggauuacag

SEQ ID NO: 3655796 - RNA, 15 nt, Human
cugaguagcugggau

SEQ ID NO: 3655797 - RNA, 20 nt, Human
cugaguagcugggauuacag

SEQ ID NO: 3655798 - RNA, 22 nt, Human
cugaguaucuccucgcaagcug

SEQ ID NO: 3655799 - RNA, 16 nt, Human
cugaguauuaaaaugu

SEQ ID NO: 3655800 - RNA, 16 nt, Human
cugagucaaguuguuc

SEQ ID NO: 3655801 - RNA, 20 nt, Human
cugagucaaugcgcaaaaug

SEQ ID NO: 3655802 - RNA, 15 nt, Human
cugagucaccaggaa

SEQ ID NO: 3655803 - RNA, 17 nt, Human
cugagucaccaggaaug

SEQ ID NO: 3655804 - RNA, 22 nt, Human
cugagucacccuaccugugccu

SEQ ID NO: 3655805 - RNA, 17 nt, Human
cugagucagggcccaga

SEQ ID NO: 3655806 - RNA, 20 nt, Human
cugagucagggcccagaggc

SEQ ID NO: 3655807 - RNA, 23 nt, Human
cugagucagggcccagaggcuga

SEQ ID NO: 3655808 - RNA, 21 nt, Human
cugagucaucuguuagggccu

SEQ ID NO: 3655809 - RNA, 18 nt, Human
cugagucaugaucucccu

SEQ ID NO: 3655810 - RNA, 20 nt, Human
cugagucaugaucucccugc

SEQ ID NO: 3655811 - RNA, 18 nt, Human
cugagucauggccgggug

SEQ ID NO: 3655812 - RNA, 14 nt, Human
cugaguccuggccc

SEQ ID NO: 3655813 - RNA, 17 nt, Human
cugagucguacagaaag

SEQ ID NO: 3655814 - RNA, 20 nt, Human
cugagucguacagaaagcug

SEQ ID NO: 3655815 - RNA, 17 nt, Human
cugagucucccaaggcu

SEQ ID NO: 3655816 - RNA, 13 nt, Human
cugagucuccugu

SEQ ID NO: 3655817 - RNA, 14 nt, Human
cugagucugaaggc

SEQ ID NO: 3655818 - RNA, 15 nt, Human
cugagucugaaggcu

SEQ ID NO: 3655819 - RNA, 17 nt, Human
cugagucugaaggcugg

SEQ ID NO: 3655820 - RNA, 17 nt, Human
cugagucugcuauauuu

SEQ ID NO: 3655821 - RNA, 22 nt, Human
cugagucugcuauauuuucaug

SEQ ID NO: 3655822 - RNA, 13 nt, Human
cugagugaaccug

SEQ ID NO: 3655823 - RNA, 11 nt, Human
cugagugacuc

SEQ ID NO: 3655824 - RNA, 16 nt, Human
cugagugagaggggag

SEQ ID NO: 3655825 - RNA, 16 nt, Human
cugagugagcugaaga

SEQ ID NO: 3655826 - RNA, 13 nt, Human
cugagugcaggcc

SEQ ID NO: 3655827 - RNA, 17 nt, Human
cugagugccuucugugg

SEQ ID NO: 3655828 - RNA, 21 nt, Human
cugagugccuucuguggggac

SEQ ID NO: 3655829 - RNA, 15 nt, Human
cugagugccuuuugg

SEQ ID NO: 3655830 - RNA, 16 nt, Human
cugaguggacuggagu

SEQ ID NO: 3655831 - RNA, 21 nt, Human
cugaguggacuggaguggagc

SEQ ID NO: 3655832 - RNA, 22 nt, Human
cugaguggacuggaguggagca

SEQ ID NO: 3655833 - RNA, 19 nt, Human
cugaguggcuucacuccug

SEQ ID NO: 3655834 - RNA, 15 nt, Human
cugagugggaagccc

SEQ ID NO: 3655835 - RNA, 17 nt, Human
cugagugggaagcccau

SEQ ID NO: 3655836 - RNA, 22 nt, Human
cugagugggggaucacagccuc

SEQ ID NO: 3655837 - RNA, 17 nt, Human
cugaguuacagaaauga

SEQ ID NO: 3655838 - RNA, 19 nt, Human
cugaguuaggcuuucucuu

SEQ ID NO: 3655839 - RNA, 17 nt, Human
cugaguuccuagccacc

SEQ ID NO: 3655840 - RNA, 18 nt, Human
cugaguuccuagccaccg

SEQ ID NO: 3655841 - RNA, 21 nt, Human
cugaguucuguguauuuucag

SEQ ID NO: 3655842 - RNA, 17 nt, Human
cugaguuucauucuccu

SEQ ID NO: 3655843 - RNA, 19 nt, Human
cugaguuuccuaugggaac

SEQ ID NO: 3655844 - RNA, 14 nt, Human
cugaguuuuaccaa

SEQ ID NO: 3655845 - RNA, 16 nt, Human
cugaguuuuccauggc

SEQ ID NO: 3655846 - RNA, 19 nt, Human
cugaguuuuccauggcagg

SEQ ID NO: 3655847 - RNA, 22 nt, Human
cugaguuuuccauggcaggaag

SEQ ID NO: 3655848 - RNA, 13 nt, Human
cugaguuuugugu

SEQ ID NO: 3655849 - RNA, 15 nt, Human
cugaguuuuguuuug

SEQ ID NO: 3655850 - RNA, 17 nt, Human
cugaguuuuucagaugu

SEQ ID NO: 3655851 - RNA, 22 nt, Human
cugauaaauauucacacuugaa

SEQ ID NO: 3655852 - RNA, 18 nt, Human
cugauaacaaccuggaga

SEQ ID NO: 3655853 - RNA, 21 nt, Human
cugauaacuagauggugcuga

SEQ ID NO: 3655854 - RNA, 19 nt, Human
cugauaagagaaucaacau

SEQ ID NO: 3655855 - RNA, 14 nt, Human
cugauaagcuucaa

SEQ ID NO: 3655856 - RNA, 17 nt, Human
cugauaauuuuaaauuc

SEQ ID NO: 3655857 - RNA, 18 nt, Human
cugauaauuuuaaauucu

SEQ ID NO: 3655858 - RNA, 22 nt, Human
cugauacagaaaaguugaauuu

SEQ ID NO: 3655859 - RNA, 16 nt, Human
cugauacauaacuaaa

SEQ ID NO: 3655860 - RNA, 16 nt, Human
cugauacuuuuuugaa

SEQ ID NO: 3655861 - RNA, 18 nt, Human
cugauagaauuauuucac

SEQ ID NO: 3655862 - RNA, 19 nt, Human
cugauagcauaugacaaau

SEQ ID NO: 3655863 - RNA, 16 nt, Human
cugauagcguuggaau

SEQ ID NO: 3655864 - RNA, 19 nt, Human
cugauagggauacaugcuc

SEQ ID NO: 3655865 - RNA, 19 nt, Human
cugauaggguuugugacag

SEQ ID NO: 3655866 - RNA, 16 nt, Human
cugauaguuacuguug

SEQ ID NO: 3655867 - RNA, 17 nt, Human
cugauaguuacuguugu

SEQ ID NO: 3655868 - RNA, 19 nt, Human
cugauaguuacuguuguga

SEQ ID NO: 3655869 - RNA, 22 nt, Human
cugauaguuacuguugugaccu

SEQ ID NO: 3655870 - RNA, 17 nt, Human
cugauauaaauucugug

SEQ ID NO: 3655871 - RNA, 18 nt, Human
cugauauaaauucugugg

SEQ ID NO: 3655872 - RNA, 14 nt, Human
cugauauacugugu

SEQ ID NO: 3655873 - RNA, 15 nt, Human
cugauauagaauugc

SEQ ID NO: 3655874 - RNA, 15 nt, Human
cugauauauguguuu

SEQ ID NO: 3655875 - RNA, 16 nt, Human
cugauauauuuuacaa

SEQ ID NO: 3655876 - RNA, 18 nt, Human
cugauauauuuuacaauu

SEQ ID NO: 3655877 - RNA, 16 nt, Human
cugauauggaagcacc

SEQ ID NO: 3655878 - RNA, 13 nt, Human
cugauaugggacu

SEQ ID NO: 3655879 - RNA, 19 nt, Human
cugauauugccgcacuagg

SEQ ID NO: 3655880 - RNA, 12 nt, Human
cugaucaaggcc

SEQ ID NO: 3655881 - RNA, 15 nt, Human
cugaucaaggccuua

SEQ ID NO: 3655882 - RNA, 18 nt, Human
cugaucaagucaccggag

SEQ ID NO: 3655883 - RNA, 22 nt, Human
cugaucaagucaccggagcuuu

SEQ ID NO: 3655884 - RNA, 22 nt, Human
cugaucacuagccugucauccu

SEQ ID NO: 3655885 - RNA, 20 nt, Human
cugaucagagccgugguccu

SEQ ID NO: 3655886 - RNA, 19 nt, Human
cugaucagucuaagauggg

SEQ ID NO: 3655887 - RNA, 18 nt, Human
cugaucaucgccagaggu

SEQ ID NO: 3655888 - RNA, 16 nt, Human
cugaucaugcauuguu

SEQ ID NO: 3655889 - RNA, 23 nt, Human
cugaucauguuuaugagaaacug

SEQ ID NO: 3655890 - RNA, 15 nt, Human
cugauccagagcaca

SEQ ID NO: 3655891 - RNA, 15 nt, Human
cugaucccacuccua

SEQ ID NO: 3655892 - RNA, 16 nt, Human
cugaucccacuccuag

SEQ ID NO: 3655893 - RNA, 18 nt, Human
cugaucccacuccuagga

SEQ ID NO: 3655894 - RNA, 15 nt, Human
cugaucccagagagc

SEQ ID NO: 3655895 - RNA, 12 nt, Human
cugaucccucua

SEQ ID NO: 3655896 - RNA, 13 nt, Human
cugaucccucuac

SEQ ID NO: 3655897 - RNA, 14 nt, Human
cugaucccuuccac

SEQ ID NO: 3655898 - RNA, 21 nt, Human
cugaucccuuccaccugcucu

SEQ ID NO: 3655899 - RNA, 20 nt, Human
cugauccuaguuccaccauc

SEQ ID NO: 3655900 - RNA, 15 nt, Human
cugauccuggaggcc

SEQ ID NO: 3655901 - RNA, 18 nt, Human
cugauccuggaggcccag

SEQ ID NO: 3655902 - RNA, 13 nt, Human
cugaucgccuucc

SEQ ID NO: 3655903 - RNA, 16 nt, Human
cugaucgccuucccca

SEQ ID NO: 3655904 - RNA, 14 nt, Human
cugaucgugacgcu

SEQ ID NO: 3655905 - RNA, 21 nt, Human
cugaucgugcuaaauuuucag

SEQ ID NO: 3655906 - RNA, 23 nt, Human
cugaucucagggaagcccagcuc

SEQ ID NO: 3655907 - RNA, 17 nt, Human
cugaucucucgugauug

SEQ ID NO: 3655908 - RNA, 18 nt, Human
cugaucugacauccccac

SEQ ID NO: 3655909 - RNA, 19 nt, Human
cugaucugacauccccacu

SEQ ID NO: 3655910 - RNA, 16 nt, Human
cugagcccauguucug

SEQ ID NO: 3655911 - RNA, 20 nt, Human
cugagcccauguucugcccc

SEQ ID NO: 3655912 - RNA, 13 nt, Human
cugagccccaggg

SEQ ID NO: 3655913 - RNA, 20 nt, Human
cugagccccagggugcccag

SEQ ID NO: 3655914 - RNA, 21 nt, Human
cugagccccagggugcccaga

SEQ ID NO: 3655915 - RNA, 21 nt, Human
cugagcccccccaacacugug

SEQ ID NO: 3655916 - RNA, 22 nt, Human
cugagccccgcagaccucccca

SEQ ID NO: 3655917 - RNA, 23 nt, Human
cugagccccgcagaccuccccag

SEQ ID NO: 3655918 - RNA, 19 nt, Human
cugagccccgcccucuucc

SEQ ID NO: 3655919 - RNA, 20 nt, Human
cugagccccgcccucuuccu

SEQ ID NO: 3655920 - RNA, 23 nt, Human
cugagccccgcccucuuccugac

SEQ ID NO: 3655921 - RNA, 19 nt, Human
cugagccccuaccccacac

SEQ ID NO: 3655922 - RNA, 16 nt, Human
cugagccccugggacu

SEQ ID NO: 3655923 - RNA, 23 nt, Human
cugagccccugucuagagaggga

SEQ ID NO: 3655924 - RNA, 19 nt, Human
cugagccccuuccuugcuc

SEQ ID NO: 3655925 - RNA, 23 nt, Human
cugagcccgguaagagcaaaaga

SEQ ID NO: 3655926 - RNA, 22 nt, Human
cugagcccuacucccugcagau

SEQ ID NO: 3655927 - RNA, 11 nt, Human
cugagcccugg

SEQ ID NO: 3655928 - RNA, 12 nt, Human
cugagcccuggc

SEQ ID NO: 3655929 - RNA, 15 nt, Human
cugagcccuggcagg

SEQ ID NO: 3655930 - RNA, 14 nt, Human
cugagccgcagaga

SEQ ID NO: 3655931 - RNA, 16 nt, Human
cugagccggccccagg

SEQ ID NO: 3655932 - RNA, 19 nt, Human
cugagccggccccaggcuc

SEQ ID NO: 3655933 - RNA, 17 nt, Human
cugagccgggccuuguc

SEQ ID NO: 3655934 - RNA, 15 nt, Human
cugagccucacagca

SEQ ID NO: 3655935 - RNA, 16 nt, Human
cugagccucacagcag

SEQ ID NO: 3655936 - RNA, 19 nt, Human
cugagccucacagcaguga

SEQ ID NO: 3655937 - RNA, 16 nt, Human
cugagccucagucucc

SEQ ID NO: 3655938 - RNA, 21 nt, Human
cugagccucagucucccuccc

SEQ ID NO: 3655939 - RNA, 22 nt, Human
cugagccucagucucccucccu

SEQ ID NO: 3655940 - RNA, 16 nt, Human
cugagccucugcuccc

SEQ ID NO: 3655941 - RNA, 18 nt, Human
cugagccucugcucccca

SEQ ID NO: 3655942 - RNA, 13 nt, Human
cccugccuccauc

SEQ ID NO: 3655943 - RNA, 18 nt, Human
cccugccuccauccuagu

SEQ ID NO: 3655944 - RNA, 13 nt, Human
cccugccucuccg

SEQ ID NO: 3655945 - RNA, 22 nt, Human
cccugccucuccgccccugagc

SEQ ID NO: 3655946 - RNA, 23 nt, Human
cccugccucuccgccccugagcc

SEQ ID NO: 3655947 - RNA, 15 nt, Human
cccugccucucugca

SEQ ID NO: 3655948 - RNA, 18 nt, Human
cccugccucucugcaggu

SEQ ID NO: 3655949 - RNA, 21 nt, Human
cccugccucucugcagguccc

SEQ ID NO: 3655950 - RNA, 13 nt, Human
cccugccucuguu

SEQ ID NO: 3655951 - RNA, 9 nt, Human
cccugccug

SEQ ID NO: 3655952 - RNA, 19 nt, Human
cccugccugagggccccuc

SEQ ID NO: 3655953 - RNA, 23 nt, Human
cccugccugagggccccucugcc

SEQ ID NO: 3655954 - RNA, 20 nt, Human
cccugccugccauguaccuc

SEQ ID NO: 3655955 - RNA, 11 nt, Human
cccugccugga

SEQ ID NO: 3655956 - RNA, 23 nt, Human
cccugccuggggcgggccccuca

SEQ ID NO: 3655957 - RNA, 13 nt, Human
cccugccugguca

SEQ ID NO: 3655958 - RNA, 18 nt, Human
cccugccuuugggagcag

SEQ ID NO: 3655959 - RNA, 15 nt, Human
cccugcgccuuuccu

SEQ ID NO: 3655960 - RNA, 22 nt, Human
cccugcgcucucuuugcaacug

SEQ ID NO: 3655961 - RNA, 22 nt, Human
cccugcggccccgucuguggcu

SEQ ID NO: 3655962 - RNA, 16 nt, Human
cccugcuacccuagau

SEQ ID NO: 3655963 - RNA, 22 nt, Human
cccugcuagaugagaauucagc

SEQ ID NO: 3655964 - RNA, 13 nt, Human
cccugcucacugc

SEQ ID NO: 3655965 - RNA, 15 nt, Human
cccugcucauccacu

SEQ ID NO: 3655966 - RNA, 21 nt, Human
cccugcuccacgucugcgccg

SEQ ID NO: 3655967 - RNA, 11 nt, Human
cccugcucccu

SEQ ID NO: 3655968 - RNA, 17 nt, Human
cccugcuccucccuggc

SEQ ID NO: 3655969 - RNA, 22 nt, Human
cccugcuccucccuggcugccc

SEQ ID NO: 3655970 - RNA, 13 nt, Human
cccugcuccugca

SEQ ID NO: 3655971 - RNA, 15 nt, Human
cccugcuccugcagc

SEQ ID NO: 3655972 - RNA, 21 nt, Human
cccugcucuccgaccagacac

SEQ ID NO: 3655973 - RNA, 19 nt, Human
cccugcugcaggggcucug

SEQ ID NO: 3655974 - RNA, 21 nt, Human
cccugcugcaggggcucugga

SEQ ID NO: 3655975 - RNA, 22 nt, Human
cccugcugcaggggcucuggag

SEQ ID NO: 3655976 - RNA, 12 nt, Human
cccugcugccca

SEQ ID NO: 3655977 - RNA, 21 nt, Human
cccugcugcccaaucuccauc

SEQ ID NO: 3655978 - RNA, 20 nt, Human
cccugcugccgccucccagc

SEQ ID NO: 3655979 - RNA, 12 nt, Human
cccugcugccuc

SEQ ID NO: 3655980 - RNA, 14 nt, Human
cccugcugcuccua

SEQ ID NO: 3655981 - RNA, 16 nt, Human
cccugcugcugccugc

SEQ ID NO: 3655982 - RNA, 18 nt, Human
cccugcugcugccugccu

SEQ ID NO: 3655983 - RNA, 15 nt, Human
cccugcugcuggugc

SEQ ID NO: 3655984 - RNA, 17 nt, Human
cccugcugcugucaccu

SEQ ID NO: 3655985 - RNA, 12 nt, Human
cccugcuggccg

SEQ ID NO: 3655986 - RNA, 16 nt, Human
cccugcuggccggaca

SEQ ID NO: 3655987 - RNA, 14 nt, Human
cccugcuggcucuu

SEQ ID NO: 3655988 - RNA, 15 nt, Human
cccugcuggcucuuc

SEQ ID NO: 3655989 - RNA, 20 nt, Human
cccugcuggcucuucugccc

SEQ ID NO: 3655990 - RNA, 21 nt, Human
cccugcuggcucuucugccca

SEQ ID NO: 3655991 - RNA, 16 nt, Human
cccugcuggguguggc

SEQ ID NO: 3655992 - RNA, 21 nt, Human
cccugcuggguguggcgcagc

SEQ ID NO: 3655993 - RNA, 15 nt, Human
cccugcuuccaccuc

SEQ ID NO: 3655994 - RNA, 16 nt, Human
cccugcuuccaggaaa

SEQ ID NO: 3655995 - RNA, 15 nt, Human
cccugcuuccugcuu

SEQ ID NO: 3655996 - RNA, 16 nt, Human
cccugcuuccugcuug

SEQ ID NO: 3655997 - RNA, 19 nt, Human
cccugcuuccugcuugcca

SEQ ID NO: 3655998 - RNA, 15 nt, Human
cccugcuucuccagc

SEQ ID NO: 3655999 - RNA, 16 nt, Human
cccugcuucuccagcc

SEQ ID NO: 3656000 - RNA, 17 nt, Human
cccugcuucuccagccu

SEQ ID NO: 3656001 - RNA, 18 nt, Human
cccugcuucuccagccug

SEQ ID NO: 3656002 - RNA, 21 nt, Human
cccugcuucuccagccuggac

SEQ ID NO: 3656003 - RNA, 16 nt, Human
cccugcuuggcccagg

SEQ ID NO: 3656004 - RNA, 18 nt, Human
cccugcuuggcccagggg

SEQ ID NO: 3656005 - RNA, 18 nt, Human
cccugcuuuagagcuagg

SEQ ID NO: 3656006 - RNA, 23 nt, Human
cccugcuuugggcugcccuggug

SEQ ID NO: 3656007 - RNA, 17 nt, Human
cccugcuuugggcuugg

SEQ ID NO: 3656008 - RNA, 10 nt, Human
cccugcuuuu

SEQ ID NO: 3656009 - RNA, 15 nt, Human
cccuggaaaccuucc

SEQ ID NO: 3656010 - RNA, 19 nt, Human
cccuggaaaccuuccaccc

SEQ ID NO: 3656011 - RNA, 22 nt, Human
cccuggaacucuaucugggccu

SEQ ID NO: 3656012 - RNA, 23 nt, Human
cccuggaacucuaucugggccug

SEQ ID NO: 3656013 - RNA, 18 nt, Human
cccuggaagcagugccca

SEQ ID NO: 3656014 - RNA, 23 nt, Human
cccuggaaugaguugaggccacu

SEQ ID NO: 3656015 - RNA, 16 nt, Human
cccuggaccagugguc

SEQ ID NO: 3656016 - RNA, 21 nt, Human
cccuggaccaguggucucaca

SEQ ID NO: 3656017 - RNA, 15 nt, Human
cccuggaccccagcc

SEQ ID NO: 3656018 - RNA, 16 nt, Human
cccuggaccccagccu

SEQ ID NO: 3656019 - RNA, 21 nt, Human
cccuggacugugugcucagga

SEQ ID NO: 3656020 - RNA, 13 nt, Human
cccuggagaguuc

SEQ ID NO: 3656021 - RNA, 21 nt, Human
cccuggagaguucaauggcug

SEQ ID NO: 3656022 - RNA, 23 nt, Human
cccuggagaguucaauggcugcu

SEQ ID NO: 3656023 - RNA, 14 nt, Human
cccuggagcagcca

SEQ ID NO: 3656024 - RNA, 16 nt, Human
cccuggagcagccacc

SEQ ID NO: 3656025 - RNA, 22 nt, Human
cccuggagccaacugcugcuuu

SEQ ID NO: 3656026 - RNA, 23 nt, Human
cccuggagccagacucuggucuu

SEQ ID NO: 3656027 - RNA, 21 nt, Human
cccuggagggggaauggcagc

SEQ ID NO: 3656028 - RNA, 20 nt, Human
cccuggaggugccagcaaag

SEQ ID NO: 3656029 - RNA, 24 nt, Human
cccuggaucacgacgcugcagagc

SEQ ID NO: 3656030 - RNA, 17 nt, Human
cccuggaucagaacagg

SEQ ID NO: 3656031 - RNA, 22 nt, Human
cccuggaugaaguuaucuggcu

SEQ ID NO: 3656032 - RNA, 15 nt, Human
cccuggaugcccagg

SEQ ID NO: 3656033 - RNA, 16 nt, Human
cccuggauuuuuacca

SEQ ID NO: 3656034 - RNA, 24 nt, Human
cccuggauuuuuaccagucucaca

SEQ ID NO: 3656035 - RNA, 16 nt, Human
cccuggcacuggcaaa

SEQ ID NO: 3656036 - RNA, 20 nt, Human
cccuggcacuggcaaacagg

SEQ ID NO: 3656037 - RNA, 21 nt, Human
cccuggcagagaugccucccu

SEQ ID NO: 3656038 - RNA, 23 nt, Human
cccuggcauuauguccacugugu

SEQ ID NO: 3656039 - RNA, 9 nt, Human
cccuggccc

SEQ ID NO: 3656040 - RNA, 13 nt, Human
cccuggccccagg

SEQ ID NO: 3656041 - RNA, 14 nt, Human
cccuggccccagga

SEQ ID NO: 3656042 - RNA, 17 nt, Human
cccuggcccccacaugg

SEQ ID NO: 3656043 - RNA, 13 nt, Human
cccuggcccccuc

SEQ ID NO: 3656044 - RNA, 20 nt, Human
cccuggcccccucccuggau

SEQ ID NO: 3656045 - RNA, 13 nt, Human
cccuggcccucaa

SEQ ID NO: 3656046 - RNA, 22 nt, Human
cccuggcccucaaggccuccca

SEQ ID NO: 3656047 - RNA, 16 nt, Human
cccuggcccugaggug

SEQ ID NO: 3656048 - RNA, 15 nt, Human
cccuggccuccccca

SEQ ID NO: 3656049 - RNA, 19 nt, Human
cccuggccuccccugccac

SEQ ID NO: 3656050 - RNA, 20 nt, Human
cccuggccuccggcgucagc

SEQ ID NO: 3656051 - RNA, 21 nt, Human
cccuggccuccggcgucagcc

SEQ ID NO: 3656052 - RNA, 13 nt, Human
cccuggccucugu

SEQ ID NO: 3656053 - RNA, 14 nt, Human
cccuggccugcugg

SEQ ID NO: 3656054 - RNA, 18 nt, Human
cugcccaggccggccagc

SEQ ID NO: 3656055 - RNA, 16 nt, Human
cugcccaggggagccc

SEQ ID NO: 3656056 - RNA, 22 nt, Human
cugcccaggggagcccuccacg

SEQ ID NO: 3656057 - RNA, 14 nt, Human
cugcccaggggugc

SEQ ID NO: 3656058 - RNA, 21 nt, Human
cugcccaggggugcccccucc

SEQ ID NO: 3656059 - RNA, 14 nt, Human
cugcccaguccccc

SEQ ID NO: 3656060 - RNA, 16 nt, Human
cugcccagugcacuug

SEQ ID NO: 3656061 - RNA, 11 nt, Human
cugcccagugu

SEQ ID NO: 3656062 - RNA, 22 nt, Human
cugcccaucacaggguugggcc

SEQ ID NO: 3656063 - RNA, 18 nt, Human
cugcccaucauguggccc

SEQ ID NO: 3656064 - RNA, 18 nt, Human
cugcccauggacaggcug

SEQ ID NO: 3656065 - RNA, 19 nt, Human
cugcccauucugcccugug

SEQ ID NO: 3656066 - RNA, 18 nt, Human
cugcccauuucauauucu

SEQ ID NO: 3656067 - RNA, 15 nt, Human
cugccccaaacaaau

SEQ ID NO: 3656068 - RNA, 21 nt, Human
cugccccaaauaacuucaguc

SEQ ID NO: 3656069 - RNA, 14 nt, Human
cugccccaacuccu

SEQ ID NO: 3656070 - RNA, 17 nt, Human
cugccccaacuccugga

SEQ ID NO: 3656071 - RNA, 20 nt, Human
cugccccaacuccuggaagc

SEQ ID NO: 3656072 - RNA, 15 nt, Human
cugccccaacuccuu

SEQ ID NO: 3656073 - RNA, 15 nt, Human
cugccccaaguuuug

SEQ ID NO: 3656074 - RNA, 20 nt, Human
cugccccacuuguccuuagc

SEQ ID NO: 3656075 - RNA, 21 nt, Human
cugccccacuuguccuuagcc

SEQ ID NO: 3656076 - RNA, 16 nt, Human
cugccccagcccaagu

SEQ ID NO: 3656077 - RNA, 18 nt, Human
cugccccagcccaagucc

SEQ ID NO: 3656078 - RNA, 16 nt, Human
cugccccagcucuggc

SEQ ID NO: 3656079 - RNA, 18 nt, Human
cugccccagcucuggcuu

SEQ ID NO: 3656080 - RNA, 19 nt, Human
cugccccagcucuggcuuc

SEQ ID NO: 3656081 - RNA, 19 nt, Human
cugccccagcuugggcaga

SEQ ID NO: 3656082 - RNA, 23 nt, Human
cugccccagucguuagaauauag

SEQ ID NO: 3656083 - RNA, 13 nt, Human
cugccccauccuc

SEQ ID NO: 3656084 - RNA, 16 nt, Human
cugccccaucuccccu

SEQ ID NO: 3656085 - RNA, 22 nt, Human
cugcccccaaauaagaagggau

SEQ ID NO: 3656086 - RNA, 16 nt, Human
cugcccccacuuccug

SEQ ID NO: 3656087 - RNA, 18 nt, Human
cugcccccacuuccuguu

SEQ ID NO: 3656088 - RNA, 16 nt, Human
cugcccccagagccac

SEQ ID NO: 3656089 - RNA, 17 nt, Human
cugcccccagagccaca

SEQ ID NO: 3656090 - RNA, 14 nt, Human
cugcccccagccca

SEQ ID NO: 3656091 - RNA, 16 nt, Human
cugcccccagcccaaa

SEQ ID NO: 3656092 - RNA, 18 nt, Human
cugcccccagcccaaagg

SEQ ID NO: 3656093 - RNA, 17 nt, Human
cugcccccaggacuggg

SEQ ID NO: 3656094 - RNA, 12 nt, Human
cugccccccagc

SEQ ID NO: 3656095 - RNA, 19 nt, Human
cugccccccagccucuggc

SEQ ID NO: 3656096 - RNA, 22 nt, Human
cugcccccgcauccccugccuc

SEQ ID NO: 3656097 - RNA, 17 nt, Human
cugcccccggcccccug

SEQ ID NO: 3656098 - RNA, 15 nt, Human
cugcccccuccugag

SEQ ID NO: 3656099 - RNA, 17 nt, Human
cugcccccucugcccug

SEQ ID NO: 3656100 - RNA, 19 nt, Human
cugcccccucugcccugcg

SEQ ID NO: 3656101 - RNA, 17 nt, Human
cugcccccugaaacuua

SEQ ID NO: 3656102 - RNA, 12 nt, Human
cugcccccuggu

SEQ ID NO: 3656103 - RNA, 14 nt, Human
cugcccccuggugg

SEQ ID NO: 3656104 - RNA, 22 nt, Human
cugcccccugguggacaguccu

SEQ ID NO: 3656105 - RNA, 17 nt, Human
cugcccccuucucccac

SEQ ID NO: 3656106 - RNA, 18 nt, Human
cugcccccuucucccaca

SEQ ID NO: 3656107 - RNA, 20 nt, Human
cugcccccuucucccacacu

SEQ ID NO: 3656108 - RNA, 22 nt, Human
cugcccccuucucccacacugc

SEQ ID NO: 3656109 - RNA, 15 nt, Human
cugccccgcccagcu

SEQ ID NO: 3656110 - RNA, 18 nt, Human
cugccccgcccccagucc

SEQ ID NO: 3656111 - RNA, 18 nt, Human
cugccccgugcagacugg

SEQ ID NO: 3656112 - RNA, 16 nt, Human
cugccccucccagaac

SEQ ID NO: 3656113 - RNA, 14 nt, Human
cugccccuccccca

SEQ ID NO: 3656114 - RNA, 13 nt, Human
cugccccucccug

SEQ ID NO: 3656115 - RNA, 13 nt, Human
cugccccucccuu

SEQ ID NO: 3656116 - RNA, 21 nt, Human
cugccccuccucucugcccua

SEQ ID NO: 3656117 - RNA, 12 nt, Human
cugccccucucu

SEQ ID NO: 3656118 - RNA, 17 nt, Human
cugccccucucugggcc

SEQ ID NO: 3656119 - RNA, 14 nt, Human
cugccccucuuucu

SEQ ID NO: 3656120 - RNA, 16 nt, Human
cugccccucuuucucu

SEQ ID NO: 3656121 - RNA, 17 nt, Human
cugccccucuuucucuu

SEQ ID NO: 3656122 - RNA, 18 nt, Human
cugccccugagcccugug

SEQ ID NO: 3656123 - RNA, 11 nt, Human
cugccccugcc

SEQ ID NO: 3656124 - RNA, 16 nt, Human
cugccccugccccguc

SEQ ID NO: 3656125 - RNA, 18 nt, Human
cugccccugcuacugcca

SEQ ID NO: 3656126 - RNA, 22 nt, Human
cugccccugcuacugccaaccu

SEQ ID NO: 3656127 - RNA, 19 nt, Human
cugccccuggcagccccug

SEQ ID NO: 3656128 - RNA, 16 nt, Human
cugccccuggcucuga

SEQ ID NO: 3656129 - RNA, 13 nt, Human
cugccccuguucu

SEQ ID NO: 3656130 - RNA, 18 nt, Human
cugccccuucuacacucu

SEQ ID NO: 3656131 - RNA, 22 nt, Human
cugccccuuggacacgcucagu

SEQ ID NO: 3656132 - RNA, 15 nt, Human
cugcccgagcuggug

SEQ ID NO: 3656133 - RNA, 16 nt, Human
cugcccgcacacccuc

SEQ ID NO: 3656134 - RNA, 22 nt, Human
cugcccgcacacccucacucug

SEQ ID NO: 3656135 - RNA, 18 nt, Human
cugcccgcacagcagccu

SEQ ID NO: 3656136 - RNA, 21 nt, Human
cugcccgcacagcagccugcu

SEQ ID NO: 3656137 - RNA, 20 nt, Human
cugcccgcagaccucuggau

SEQ ID NO: 3656138 - RNA, 14 nt, Human
cugcccgcucccag

SEQ ID NO: 3656139 - RNA, 15 nt, Human
cugcccgcucccagu

SEQ ID NO: 3656140 - RNA, 15 nt, Human
cugcccggcgcccuc

SEQ ID NO: 3656141 - RNA, 20 nt, Human
cugcccggcgcccucugucc

SEQ ID NO: 3656142 - RNA, 23 nt, Human
cugcccggcgcccucuguccuga

SEQ ID NO: 3656143 - RNA, 11 nt, Human
cugcccggcug

SEQ ID NO: 3656144 - RNA, 15 nt, Human
cugcccggcugcgga

SEQ ID NO: 3656145 - RNA, 21 nt, Human
cugcccgggcgcggccagccc

SEQ ID NO: 3656146 - RNA, 13 nt, Human
cugcccggggcag

SEQ ID NO: 3656147 - RNA, 15 nt, Human
cugcccggggcagcu

SEQ ID NO: 3656148 - RNA, 16 nt, Human
cugcccggggcagcug

SEQ ID NO: 3656149 - RNA, 20 nt, Human
cugcccggugggggggcaga

SEQ ID NO: 3656150 - RNA, 13 nt, Human
ccgcaugcccccu

SEQ ID NO: 3656151 - RNA, 18 nt, Human
ccgcaugcccccucgugc

SEQ ID NO: 3656152 - RNA, 22 nt, Human
ccgcaugcccccucgugccagu

SEQ ID NO: 3656153 - RNA, 16 nt, Human
ccgcaugcggcccagg

SEQ ID NO: 3656154 - RNA, 14 nt, Human
ccgcauuccaggcu

SEQ ID NO: 3656155 - RNA, 15 nt, Human
ccgcauucccugagu

SEQ ID NO: 3656156 - RNA, 23 nt, Human
ccgcauucccugagucaccagga

SEQ ID NO: 3656157 - RNA, 20 nt, Human
ccgccaaugcacggccucgc

SEQ ID NO: 3656158 - RNA, 21 nt, Human
ccgccacauccccgcuggcug

SEQ ID NO: 3656159 - RNA, 23 nt, Human
ccgccaccuaucucgugggagag

SEQ ID NO: 3656160 - RNA, 16 nt, Human
ccgccacuccugaacc

SEQ ID NO: 3656161 - RNA, 13 nt, Human
ccgccacuggggc

SEQ ID NO: 3656162 - RNA, 14 nt, Human
ccgccacuggggcu

SEQ ID NO: 3656163 - RNA, 16 nt, Human
ccgccacuggggcuca

SEQ ID NO: 3656164 - RNA, 16 nt, Human
ccgccagacuguuaga

SEQ ID NO: 3656165 - RNA, 15 nt, Human
ccgccagagggcuug

SEQ ID NO: 3656166 - RNA, 16 nt, Human
ccgccagauggggccu

SEQ ID NO: 3656167 - RNA, 23 nt, Human
ccgccagccuccucuggacggca

SEQ ID NO: 3656168 - RNA, 15 nt, Human
ccgccauugccacca

SEQ ID NO: 3656169 - RNA, 16 nt, Human
ccgccauugccaccag

SEQ ID NO: 3656170 - RNA, 18 nt, Human
ccgcccaaaccuuucccc

SEQ ID NO: 3656171 - RNA, 17 nt, Human
ccgcccaaggccuuccc

SEQ ID NO: 3656172 - RNA, 15 nt, Human
ccgcccacuguccug

SEQ ID NO: 3656173 - RNA, 16 nt, Human
ccgcccacuguccugg

SEQ ID NO: 3656174 - RNA, 23 nt, Human
ccgcccagcggcuugccugccug

SEQ ID NO: 3656175 - RNA, 18 nt, Human
ccgcccaggcuggccagc

SEQ ID NO: 3656176 - RNA, 22 nt, Human
ccgcccaggcuggccagcccca

SEQ ID NO: 3656177 - RNA, 19 nt, Human
ccgcccccaguccccaccc

SEQ ID NO: 3656178 - RNA, 17 nt, Human
ccgcccccugcccuccc

SEQ ID NO: 3656179 - RNA, 14 nt, Human
ccgccccugagccc

SEQ ID NO: 3656180 - RNA, 13 nt, Human
ccgccccugcagc

SEQ ID NO: 3656181 - RNA, 14 nt, Human
ccgccccugcagca

SEQ ID NO: 3656182 - RNA, 17 nt, Human
ccgccccugcagcacgg

SEQ ID NO: 3656183 - RNA, 19 nt, Human
ccgccccuuccccgaggga

SEQ ID NO: 3656184 - RNA, 19 nt, Human
ccgcccgagguggcugccu

SEQ ID NO: 3656185 - RNA, 15 nt, Human
ccgcccgggcccaga

SEQ ID NO: 3656186 - RNA, 14 nt, Human
ccgcccucuuccug

SEQ ID NO: 3656187 - RNA, 14 nt, Human
ccgcccugcuccuc

SEQ ID NO: 3656188 - RNA, 18 nt, Human
ccgcccugcuccucccug

SEQ ID NO: 3656189 - RNA, 19 nt, Human
ccgcccugcuccucccugg

SEQ ID NO: 3656190 - RNA, 15 nt, Human
ccgccgccucgccca

SEQ ID NO: 3656191 - RNA, 13 nt, Human
ccgccgcuuuucu

SEQ ID NO: 3656192 - RNA, 20 nt, Human
ccgccggcaauaaaagccca

SEQ ID NO: 3656193 - RNA, 22 nt, Human
ccgccggcaauaaaagcccagg

SEQ ID NO: 3656194 - RNA, 14 nt, Human
ccgccucaaaaugu

SEQ ID NO: 3656195 - RNA, 18 nt, Human
ccgccucacccccucggg

SEQ ID NO: 3656196 - RNA, 18 nt, Human
ccgccucagccucccaaa

SEQ ID NO: 3656197 - RNA, 17 nt, Human
ccgccuccgggaccccc

SEQ ID NO: 3656198 - RNA, 18 nt, Human
ccgccuccgggaccccca

SEQ ID NO: 3656199 - RNA, 15 nt, Human
cugcaggcugagugc

SEQ ID NO: 3656200 - RNA, 12 nt, Human
cugcagggaaaa

SEQ ID NO: 3656201 - RNA, 22 nt, Human
cugcagggaaaauuauuugcau

SEQ ID NO: 3656202 - RNA, 14 nt, Human
cugcagggccagga

SEQ ID NO: 3656203 - RNA, 15 nt, Human
cugcagggccaggac

SEQ ID NO: 3656204 - RNA, 16 nt, Human
cugcagggccaggacu

SEQ ID NO: 3656205 - RNA, 17 nt, Human
cugcagggccaggacug

SEQ ID NO: 3656206 - RNA, 18 nt, Human
cugcagggccauggcuca

SEQ ID NO: 3656207 - RNA, 19 nt, Human
cugcagggccauggcucag

SEQ ID NO: 3656208 - RNA, 19 nt, Human
cugcagggccgccagggag

SEQ ID NO: 3656209 - RNA, 12 nt, Human
cugcagggcugc

SEQ ID NO: 3656210 - RNA, 16 nt, Human
cugcaggggcucugga

SEQ ID NO: 3656211 - RNA, 22 nt, Human
cugcaggggcucuggagagaaa

SEQ ID NO: 3656212 - RNA, 17 nt, Human
cugcagggggugugucu

SEQ ID NO: 3656213 - RNA, 23 nt, Human
cugcagggguuauguggaagugu

SEQ ID NO: 3656214 - RNA, 21 nt, Human
cugcaggguggugcugggacu

SEQ ID NO: 3656215 - RNA, 22 nt, Human
cugcaggucaaguugucagguu

SEQ ID NO: 3656216 - RNA, 18 nt, Human
cugcaggucccuaauaaa

SEQ ID NO: 3656217 - RNA, 20 nt, Human
cugcaggucccuaauaaagc

SEQ ID NO: 3656218 - RNA, 19 nt, Human
cugcaggugcugcugcgug

SEQ ID NO: 3656219 - RNA, 19 nt, Human
cugcagguuggaccccaga

SEQ ID NO: 3656220 - RNA, 17 nt, Human
cugcaguaaaucuuuua

SEQ ID NO: 3656221 - RNA, 16 nt, Human
cugcaguaugaaaaua

SEQ ID NO: 3656222 - RNA, 14 nt, Human
cugcagucacagcu

SEQ ID NO: 3656223 - RNA, 23 nt, Human
cugcagucccagcggugggaccu

SEQ ID NO: 3656224 - RNA, 18 nt, Human
cugcaguccuacucaagc

SEQ ID NO: 3656225 - RNA, 22 nt, Human
cugcaguccuacucaagcgggu

SEQ ID NO: 3656226 - RNA, 23 nt, Human
cugcaguccuacucaagcgggug

SEQ ID NO: 3656227 - RNA, 13 nt, Human
cugcaguccugga

SEQ ID NO: 3656228 - RNA, 17 nt, Human
cugcagucuggcugagc

SEQ ID NO: 3656229 - RNA, 20 nt, Human
cugcagucuggcugagcccu

SEQ ID NO: 3656230 - RNA, 21 nt, Human
cugcagucuggcugagcccug

SEQ ID NO: 3656231 - RNA, 15 nt, Human
cugcagugagcugug

SEQ ID NO: 3656232 - RNA, 19 nt, Human
cugcaguguucgcuuggcu

SEQ ID NO: 3656233 - RNA, 15 nt, Human
cugcaguuccccugg

SEQ ID NO: 3656234 - RNA, 17 nt, Human
cugcaguuccccuggaa

SEQ ID NO: 3656235 - RNA, 20 nt, Human
cugcaguuccccuggaagca

SEQ ID NO: 3656236 - RNA, 17 nt, Human
cugcaguucgacucugu

SEQ ID NO: 3656237 - RNA, 18 nt, Human
cugcaguucuacucaggc

SEQ ID NO: 3656238 - RNA, 20 nt, Human
cugcaguucuacucaggcug

SEQ ID NO: 3656239 - RNA, 16 nt, Human
cugcaguugccaguca

SEQ ID NO: 3656240 - RNA, 21 nt, Human
cugcaguugccagucaccccg

SEQ ID NO: 3656241 - RNA, 21 nt, Human
cugcaguuuugcuaucugggc

SEQ ID NO: 3656242 - RNA, 22 nt, Human
cugcaguuuugcuaucugggcu

SEQ ID NO: 3656243 - RNA, 14 nt, Human
cugcaguuuuucag

SEQ ID NO: 3656244 - RNA, 18 nt, Human
cugcaguuuuucaggagc

SEQ ID NO: 3656245 - RNA, 22 nt, Human
cugcauaauguuucuggauuuc

SEQ ID NO: 3656246 - RNA, 20 nt, Human
cugcauacuuuuuaaaugua

SEQ ID NO: 3656247 - RNA, 21 nt, Human
cugcauaguauuccauugugu

SEQ ID NO: 3656248 - RNA, 21 nt, Human
cugcauauguugaauacuuuu

SEQ ID NO: 3656249 - RNA, 13 nt, Human
cugcaucaucugu

SEQ ID NO: 3656250 - RNA, 14 nt, Human
cugcaucaucugua

SEQ ID NO: 3656251 - RNA, 17 nt, Human
cugcaucaucuguagau

SEQ ID NO: 3656252 - RNA, 16 nt, Human
cugcaucccagcaccu

SEQ ID NO: 3656253 - RNA, 12 nt, Human
cugcauccccuu

SEQ ID NO: 3656254 - RNA, 20 nt, Human
cugcauccguaguucccuga

SEQ ID NO: 3656255 - RNA, 21 nt, Human
cugcauccguaguucccugaa

SEQ ID NO: 3656256 - RNA, 20 nt, Human
cugcauccuccgccucccgg

SEQ ID NO: 3656257 - RNA, 20 nt, Human
cugcauccucuggagccagc

SEQ ID NO: 3656258 - RNA, 14 nt, Human
cugcaucuacucag

SEQ ID NO: 3656259 - RNA, 15 nt, Human
cugcaucuacuccca

SEQ ID NO: 3656260 - RNA, 18 nt, Human
cugcaucuacucccaagu

SEQ ID NO: 3656261 - RNA, 18 nt, Human
cugcaucugaccagcagc

SEQ ID NO: 3656262 - RNA, 18 nt, Human
cugcaucuggggcccaua

SEQ ID NO: 3656263 - RNA, 23 nt, Human
cugcaucuuauagcacuuugaaa

SEQ ID NO: 3656264 - RNA, 19 nt, Human
cugcaucuuggggacaucu

SEQ ID NO: 3656265 - RNA, 13 nt, Human
cugcaugcccaga

SEQ ID NO: 3656266 - RNA, 16 nt, Human
cugcaugcccagagac

SEQ ID NO: 3656267 - RNA, 17 nt, Human
cugcaugcccagagacc

SEQ ID NO: 3656268 - RNA, 21 nt, Human
cugcaugcccagagacccagc

SEQ ID NO: 3656269 - RNA, 19 nt, Human
cugcaugcccucucaggcc

SEQ ID NO: 3656270 - RNA, 15 nt, Human
cugcaugcggcccag

SEQ ID NO: 3656271 - RNA, 18 nt, Human
cugcaugcggcccagccc

SEQ ID NO: 3656272 - RNA, 22 nt, Human
cugcaugcgggcuuccuccugg

SEQ ID NO: 3656273 - RNA, 22 nt, Human
cugcaugcugcuggacaguauc

SEQ ID NO: 3656274 - RNA, 19 nt, Human
cugcaugcuggguucugca

SEQ ID NO: 3656275 - RNA, 13 nt, Human
cugcauggcaggg

SEQ ID NO: 3656276 - RNA, 21 nt, Human
cugcauggcagggggcugcug

SEQ ID NO: 3656277 - RNA, 22 nt, Human
cugcauggcagggggcugcugc

SEQ ID NO: 3656278 - RNA, 21 nt, Human
cugcauggcauccuccagccc

SEQ ID NO: 3656279 - RNA, 16 nt, Human
cugcaugguaauuuau

SEQ ID NO: 3656280 - RNA, 19 nt, Human
cugcaugguaauuuauagu

SEQ ID NO: 3656281 - RNA, 21 nt, Human
cugcauguacuguauauuaca

SEQ ID NO: 3656282 - RNA, 20 nt, Human
cugcauguagaggcuuguuu

SEQ ID NO: 3656283 - RNA, 15 nt, Human
cugcauuacauuccu

SEQ ID NO: 3656284 - RNA, 21 nt, Human
cugcauuaccgcguuguaaaa

SEQ ID NO: 3656285 - RNA, 15 nt, Human
cugcauuauucucuu

SEQ ID NO: 3656286 - RNA, 23 nt, Human
cugcauuauuggaauauaauugu

SEQ ID NO: 3656287 - RNA, 22 nt, Human
cugcauucacccagacagcucc

SEQ ID NO: 3656288 - RNA, 18 nt, Human
cugcauucuucugagcac

SEQ ID NO: 3656289 - RNA, 16 nt, Human
cugcauucuucugauc

SEQ ID NO: 3656290 - RNA, 14 nt, Human
cugcauucuuucug

SEQ ID NO: 3656291 - RNA, 15 nt, Human
cugcauucuuucugu

SEQ ID NO: 3656292 - RNA, 17 nt, Human
cugcauugagcuugcau

SEQ ID NO: 3656293 - RNA, 23 nt, Human
cugcauugagcuugcaugcuugc

SEQ ID NO: 3656294 - RNA, 18 nt, Human
cugcauugcuagauaaaa

SEQ ID NO: 3656295 - RNA, 15 nt, Human
cugcauuggaacugg

SEQ ID NO: 3656296 - RNA, 21 nt, Human
cugcauuggaacuggaggcag

SEQ ID NO: 3656297 - RNA, 14 nt, Human
cugcauuguaaaua

SEQ ID NO: 3656298 - RNA, 14 nt, Human
cugcauuuaaaaga

SEQ ID NO: 3656299 - RNA, 20 nt, Human
cugcauuuaaaagauacagu

SEQ ID NO: 3656300 - RNA, 17 nt, Human
cugcauuuagcacaaaa

SEQ ID NO: 3656301 - RNA, 18 nt, Human
cugcauuuagcacaaaaa

SEQ ID NO: 3656302 - RNA, 14 nt, Human
cugcauuucugagu

SEQ ID NO: 3656303 - RNA, 17 nt, Human
cugcauuugucuggccu

SEQ ID NO: 3656304 - RNA, 17 nt, Human
cugcauuugugaaauga

SEQ ID NO: 3656305 - RNA, 21 nt, Human
cugcauuuuaauuuuaaccaa

SEQ ID NO: 3656306 - RNA, 22 nt, Human
cugcauuuuaauuuuaaccaaa

SEQ ID NO: 3656307 - RNA, 19 nt, Human
cugcauuuuauucuggaug

SEQ ID NO: 3656308 - RNA, 21 nt, Human
cugcauuuucuggguucuggg

SEQ ID NO: 3656309 - RNA, 14 nt, Human
cugcauuuugcuau

SEQ ID NO: 3656310 - RNA, 18 nt, Human
cugcauuuuuagaccauu

SEQ ID NO: 3656311 - RNA, 22 nt, Human
cugccaaaaugcucuagugccu

SEQ ID NO: 3656312 - RNA, 14 nt, Human
cugccaaaggaugu

SEQ ID NO: 3656313 - RNA, 17 nt, Human
cugccaacacgcccggc

SEQ ID NO: 3656314 - RNA, 16 nt, Human
aaauguguuuaaaaca

SEQ ID NO: 3656315 - RNA, 22 nt, Human
aaauguguuuuguuuauuaaau

SEQ ID NO: 3656316 - RNA, 23 nt, Human
aaauguguuuuguuuauuaaaua

SEQ ID NO: 3656317 - RNA, 18 nt, Human
aaauguuaaaaguuuuau

SEQ ID NO: 3656318 - RNA, 12 nt, Human
aaauguuacaua

SEQ ID NO: 3656319 - RNA, 17 nt, Human
aaauguuacauagugua

SEQ ID NO: 3656320 - RNA, 18 nt, Human
aaauguuacauaguguag

SEQ ID NO: 3656321 - RNA, 17 nt, Human
aaauguuaccucugaau

SEQ ID NO: 3656322 - RNA, 19 nt, Human
aaauguuaccucugaauuu

SEQ ID NO: 3656323 - RNA, 16 nt, Human
aaauguuaguuucuug

SEQ ID NO: 3656324 - RNA, 14 nt, Human
aaauguuauuuccc

SEQ ID NO: 3656325 - RNA, 22 nt, Human
aaauguuauuucccuacauuaa

SEQ ID NO: 3656326 - RNA, 20 nt, Human
aaauguuauuuuuuaauuau

SEQ ID NO: 3656327 - RNA, 21 nt, Human
aaauguuauuuuuuaauuauu

SEQ ID NO: 3656328 - RNA, 13 nt, Human
aaauguucacuuu

SEQ ID NO: 3656329 - RNA, 21 nt, Human
aaauguucagaagguugcucu

SEQ ID NO: 3656330 - RNA, 18 nt, Human
aaauguucaucaauuccc

SEQ ID NO: 3656331 - RNA, 17 nt, Human
aaauguucuaaguuucu

SEQ ID NO: 3656332 - RNA, 18 nt, Human
aaauguucuaugguuaug

SEQ ID NO: 3656333 - RNA, 15 nt, Human
aaauguucuguuugc

SEQ ID NO: 3656334 - RNA, 13 nt, Human
aaauguucuucca

SEQ ID NO: 3656335 - RNA, 15 nt, Human
aaauguucuuccagu

SEQ ID NO: 3656336 - RNA, 11 nt, Human
aaauguucuuu

SEQ ID NO: 3656337 - RNA, 15 nt, Human
aaauguucuuugggg

SEQ ID NO: 3656338 - RNA, 12 nt, Human
aaauguugaaua

SEQ ID NO: 3656339 - RNA, 19 nt, Human
aaauguuggauuuauaaau

SEQ ID NO: 3656340 - RNA, 23 nt, Human
aaauguuggauuuauaaaugcua

SEQ ID NO: 3656341 - RNA, 19 nt, Human
aaauguuggucauuuuaug

SEQ ID NO: 3656342 - RNA, 18 nt, Human
cugccucucgguggccag

SEQ ID NO: 3656343 - RNA, 14 nt, Human
cugccucucuagga

SEQ ID NO: 3656344 - RNA, 13 nt, Human
cugccucucugca

SEQ ID NO: 3656345 - RNA, 15 nt, Human
cugccucucugcagg

SEQ ID NO: 3656346 - RNA, 18 nt, Human
cugccucucugcaggucc

SEQ ID NO: 3656347 - RNA, 21 nt, Human
cugccucucugcaggucccua

SEQ ID NO: 3656348 - RNA, 20 nt, Human
cugccucugccugcauucug

SEQ ID NO: 3656349 - RNA, 17 nt, Human
cugccucugccuuagag

SEQ ID NO: 3656350 - RNA, 23 nt, Human
cugccucugccuuagaggagccc

SEQ ID NO: 3656351 - RNA, 19 nt, Human
cugccucuuagacuucugc

SEQ ID NO: 3656352 - RNA, 22 nt, Human
cugccucuuagacuucugcuuu

SEQ ID NO: 3656353 - RNA, 21 nt, Human
cugccucuucccccugcuucc

SEQ ID NO: 3656354 - RNA, 18 nt, Human
cugccucuucccucuucc

SEQ ID NO: 3656355 - RNA, 19 nt, Human
cugccucuucccucuuccu

SEQ ID NO: 3656356 - RNA, 12 nt, Human
cugccucuuccu

SEQ ID NO: 3656357 - RNA, 17 nt, Human
cugccucuucugggagg

SEQ ID NO: 3656358 - RNA, 14 nt, Human
cugccucuuucccu

SEQ ID NO: 3656359 - RNA, 15 nt, Human
cugccugaagucaca

SEQ ID NO: 3656360 - RNA, 16 nt, Human
cugccugaagucacac

SEQ ID NO: 3656361 - RNA, 13 nt, Human
cugccugaauaaa

SEQ ID NO: 3656362 - RNA, 20 nt, Human
cugccugacagagggaugga

SEQ ID NO: 3656363 - RNA, 20 nt, Human
cugccugacauuuggagugu

SEQ ID NO: 3656364 - RNA, 12 nt, Human
cugccugagcuu

SEQ ID NO: 3656365 - RNA, 18 nt, Human
cugccugagggccccucu

SEQ ID NO: 3656366 - RNA, 17 nt, Human
cugccugcaauauuuga

SEQ ID NO: 3656367 - RNA, 19 nt, Human
cugccugcaauauuugaau

SEQ ID NO: 3656368 - RNA, 11 nt, Human
cugcugugcaa

SEQ ID NO: 3656369 - RNA, 21 nt, Human
cugcuguggccaggaggugcc

SEQ ID NO: 3656370 - RNA, 23 nt, Human
cugcugugugcuuuuuuugugug

SEQ ID NO: 3656371 - RNA, 22 nt, Human
cugcuuaaaagaaaauguucac

SEQ ID NO: 3656372 - RNA, 22 nt, Human
cugcuuaaaguugguauuaaua

SEQ ID NO: 3656373 - RNA, 13 nt, Human
cugcuuaacuuca

SEQ ID NO: 3656374 - RNA, 20 nt, Human
cugcuuaacuucacauauug

SEQ ID NO: 3656375 - RNA, 23 nt, Human
cugcuuaaucuucaaagccuucu

SEQ ID NO: 3656376 - RNA, 13 nt, Human
cugcuuaauucaa

SEQ ID NO: 3656377 - RNA, 23 nt, Human
cugcuuagaaauaacagaagaaa

SEQ ID NO: 3656378 - RNA, 18 nt, Human
cugcuuaggagagaccga

SEQ ID NO: 3656379 - RNA, 23 nt, Human
cugcuuaucaauaaaccuguuug

SEQ ID NO: 3656380 - RNA, 19 nt, Human
cugcuucaaauauuucccu

SEQ ID NO: 3656381 - RNA, 21 nt, Human
cugcuucaaggauccugagcc

SEQ ID NO: 3656382 - RNA, 21 nt, Human
cugcuucaauacccaaauccu

SEQ ID NO: 3656383 - RNA, 19 nt, Human
cugcuucaaucccagccua

SEQ ID NO: 3656384 - RNA, 16 nt, Human
cugcuucagccucccg

SEQ ID NO: 3656385 - RNA, 23 nt, Human
cugcuucagccucccgaguagcu

SEQ ID NO: 3656386 - RNA, 21 nt, Human
cugcuucagucccuuccccau

SEQ ID NO: 3656387 - RNA, 21 nt, Human
cugcuucaugcucagcccuga

SEQ ID NO: 3656388 - RNA, 22 nt, Human
cugcuuccaccucaccccacuu

SEQ ID NO: 3656389 - RNA, 23 nt, Human
cugcuuccagugaggcucugccc

SEQ ID NO: 3656390 - RNA, 13 nt, Human
cugcuucccaggu

SEQ ID NO: 3656391 - RNA, 23 nt, Human
cugcuucccagguucaagcgauu

SEQ ID NO: 3656392 - RNA, 14 nt, Human
cugcuucccauccu

SEQ ID NO: 3656393 - RNA, 15 nt, Human
cugcuucccauccua

SEQ ID NO: 3656394 - RNA, 14 nt, Human
cugcuucccucugc

SEQ ID NO: 3656395 - RNA, 23 nt, Human
cugcuucccucugccugucccuc

SEQ ID NO: 3656396 - RNA, 23 nt, Human
cugcuuccgguagggaggcagcc

SEQ ID NO: 3656397 - RNA, 14 nt, Human
cugcuuccuccugg

SEQ ID NO: 3656398 - RNA, 21 nt, Human
cugcuucuaccaacuggaagc

SEQ ID NO: 3656399 - RNA, 23 nt, Human
cugcuucuccaaaaaucugccug

SEQ ID NO: 3656400 - RNA, 16 nt, Human
cugcuucuccagccug

SEQ ID NO: 3656401 - RNA, 19 nt, Human
cugcuucuccauggccacc

SEQ ID NO: 3656402 - RNA, 14 nt, Human
cugcuucucccagg

SEQ ID NO: 3656403 - RNA, 15 nt, Human
cugcuucucccaggc

SEQ ID NO: 3656404 - RNA, 20 nt, Human
cugcuucucccaggcaaggc

SEQ ID NO: 3656405 - RNA, 21 nt, Human
cugcuucucccaggcaaggcu

SEQ ID NO: 3656406 - RNA, 16 nt, Human
cugcuucucugacuuc

SEQ ID NO: 3656407 - RNA, 19 nt, Human
cugcuucucugacuucugc

SEQ ID NO: 3656408 - RNA, 21 nt, Human
cugcuucucugacuucugccu

SEQ ID NO: 3656409 - RNA, 23 nt, Human
cugcuucucugacuucugccugg

SEQ ID NO: 3656410 - RNA, 19 nt, Human
cugcuucucugcccagcuu

SEQ ID NO: 3656411 - RNA, 19 nt, Human
cugcuucugacauaaucca

SEQ ID NO: 3656412 - RNA, 14 nt, Human
cugcuucugcaccu

SEQ ID NO: 3656413 - RNA, 20 nt, Human
cugcuugagcucaggaguuc

SEQ ID NO: 3656414 - RNA, 16 nt, Human
cugcuugaggaaaaca

SEQ ID NO: 3656415 - RNA, 22 nt, Human
cugcuugaggcaacucaucuua

SEQ ID NO: 3656416 - RNA, 21 nt, Human
cugcuugaugaagcaaggaag

SEQ ID NO: 3656417 - RNA, 18 nt, Human
cugcuugccaaggcagag

SEQ ID NO: 3656418 - RNA, 19 nt, Human
cugcuugccaucccucccu

SEQ ID NO: 3656419 - RNA, 22 nt, Human
cugcuugccaucccucccucca

SEQ ID NO: 3656420 - RNA, 20 nt, Human
cugcuugcccuaagcagaaa

SEQ ID NO: 3656421 - RNA, 22 nt, Human
cugcuugcccuaagcagaaagu

SEQ ID NO: 3656422 - RNA, 23 nt, Human
cugcuugccgaaacuggaaguua

SEQ ID NO: 3656423 - RNA, 20 nt, Human
cugcuuggaccucgugcuuu

SEQ ID NO: 3656424 - RNA, 15 nt, Human
cugcuugggcuucau

SEQ ID NO: 3656425 - RNA, 19 nt, Human
cugcuuggggggugaugag

SEQ ID NO: 3656426 - RNA, 14 nt, Human
cugcuuggguggag

SEQ ID NO: 3656427 - RNA, 21 nt, Human
cugcuugucccugcccagaau

SEQ ID NO: 3656428 - RNA, 19 nt, Human
cugcuugugaaaggaaaga

SEQ ID NO: 3656429 - RNA, 20 nt, Human
cugcuuuaaagggccugccu

SEQ ID NO: 3656430 - RNA, 16 nt, Human
cugcuuuagacuugaa

SEQ ID NO: 3656431 - RNA, 19 nt, Human
cugcuuuagacuugaaaag

SEQ ID NO: 3656432 - RNA, 16 nt, Human
cugcuuuagagcuagg

SEQ ID NO: 3656433 - RNA, 12 nt, Human
cugcuuucagau

SEQ ID NO: 3656434 - RNA, 16 nt, Human
cugcuuucagauacug

SEQ ID NO: 3656435 - RNA, 18 nt, Human
cugcuuucagauacugga

SEQ ID NO: 3656436 - RNA, 17 nt, Human
cugcuuuccaaagccaa

SEQ ID NO: 3656437 - RNA, 15 nt, Human
cugcuuuccccugug

SEQ ID NO: 3656438 - RNA, 19 nt, Human
cugcuuuccccugugggga

SEQ ID NO: 3656439 - RNA, 12 nt, Human
cugcuuucuccc

SEQ ID NO: 3656440 - RNA, 11 nt, Human
cugcuuucugu

SEQ ID NO: 3656441 - RNA, 13 nt, Human
cugcuuuggaaau

SEQ ID NO: 3656442 - RNA, 14 nt, Human
cugcuuuggcagug

SEQ ID NO: 3656443 - RNA, 15 nt, Human
cugcuuuggcagugc

SEQ ID NO: 3656444 - RNA, 20 nt, Human
cugcuuugggaagccgugcu

SEQ ID NO: 3656445 - RNA, 18 nt, Human
cugcuuugggcugcccug

SEQ ID NO: 3656446 - RNA, 20 nt, Human
cugcuuugggcugcccuggu

SEQ ID NO: 3656447 - RNA, 22 nt, Human
cugcuuugggcugcccuggugc

SEQ ID NO: 3656448 - RNA, 17 nt, Human
cugcuuuggucuugccc

SEQ ID NO: 3656449 - RNA, 14 nt, Human
cugcuuugucuccu

SEQ ID NO: 3656450 - RNA, 17 nt, Human
cugcuuuguugugugcc

SEQ ID NO: 3656451 - RNA, 23 nt, Human
cugcuuuguugugugccucuagc

SEQ ID NO: 3656452 - RNA, 17 nt, Human
cugcuuuuaacucuaga

SEQ ID NO: 3656453 - RNA, 23 nt, Human
cugcuuuuaacuuuauaaaucca

SEQ ID NO: 3656454 - RNA, 15 nt, Human
cugcuuuuaucucag

SEQ ID NO: 3656455 - RNA, 17 nt, Human
cugcuuuucacugcugc

SEQ ID NO: 3656456 - RNA, 21 nt, Human
cugcuuuucccuaagccaagg

SEQ ID NO: 3656457 - RNA, 18 nt, Human
cugcuuuucccuuuguga

SEQ ID NO: 3656458 - RNA, 22 nt, Human
cugcuuuucccuuugugaguca

SEQ ID NO: 3656459 - RNA, 21 nt, Human
cugcuuuuccuuggggcaggc

SEQ ID NO: 3656460 - RNA, 22 nt, Human
cugcuuuuccuuggggcaggca

SEQ ID NO: 3656461 - RNA, 15 nt, Human
cugcuuuucugcccu

SEQ ID NO: 3656462 - RNA, 16 nt, Human
cugcuuuucugcccug

SEQ ID NO: 3656463 - RNA, 15 nt, Human
cugcuuuuggccugg

SEQ ID NO: 3656464 - RNA, 19 nt, Human
cugcuuuugucuaugggac

SEQ ID NO: 3656465 - RNA, 22 nt, Human
cugcuuuuuaaagaaugcucuu

SEQ ID NO: 3656466 - RNA, 17 nt, Human
cugcuuuuuauggccug

SEQ ID NO: 3656467 - RNA, 14 nt, Human
cugcuuuuugaaau

SEQ ID NO: 3656468 - RNA, 15 nt, Human
cugcuuuuugaaaug

SEQ ID NO: 3656469 - RNA, 16 nt, Human
cugcuuuuugaaauga

SEQ ID NO: 3656470 - RNA, 18 nt, Human
cugcuuuuuggaaaguca

SEQ ID NO: 3656471 - RNA, 17 nt, Human
cugcuuuuuuuuuucca

SEQ ID NO: 3656472 - RNA, 21 nt, Human
cugcuuuuuuuuuuccagcaa

SEQ ID NO: 3656473 - RNA, 15 nt, Human
cuggaaaaaaugagc

SEQ ID NO: 3656474 - RNA, 14 nt, Human
cuggaaaacagaac

SEQ ID NO: 3656475 - RNA, 20 nt, Human
cuggaaaccuuccacccagu

SEQ ID NO: 3656476 - RNA, 23 nt, Human
cuggaaagcuuuucuauuuuaau

SEQ ID NO: 3656477 - RNA, 20 nt, Human
cuggaaaggggagagccugc

SEQ ID NO: 3656478 - RNA, 22 nt, Human
cuggaaaggggagagccugcug

SEQ ID NO: 3656479 - RNA, 23 nt, Human
cuggaaaggggggagcuggggaa

SEQ ID NO: 3656480 - RNA, 23 nt, Human
cuggaaauacuagauuugggaga

SEQ ID NO: 3656481 - RNA, 16 nt, Human
cuggaaauauuaagaa

SEQ ID NO: 3656482 - RNA, 13 nt, Human
cuggaacaauauu

SEQ ID NO: 3656483 - RNA, 17 nt, Human
cuggaacacuaaugagg

SEQ ID NO: 3656484 - RNA, 14 nt, Human
cugccuuguuugga

SEQ ID NO: 3656485 - RNA, 16 nt, Human
cugccuuuagaaaaua

SEQ ID NO: 3656486 - RNA, 22 nt, Human
cugccuuuauuguguuugucau

SEQ ID NO: 3656487 - RNA, 15 nt, Human
cugccuuuccaucca

SEQ ID NO: 3656488 - RNA, 21 nt, Human
cugccuuuccauccauggcca

SEQ ID NO: 3656489 - RNA, 17 nt, Human
cugccuuugacauuuaa

SEQ ID NO: 3656490 - RNA, 14 nt, Human
cugccuuugcacca

SEQ ID NO: 3656491 - RNA, 20 nt, Human
cugccuuugcaccacgggac

SEQ ID NO: 3656492 - RNA, 18 nt, Human
cugccuuugcagaaacag

SEQ ID NO: 3656493 - RNA, 19 nt, Human
cugccuuugcagaaacaga

SEQ ID NO: 3656494 - RNA, 21 nt, Human
cugccuuugcagaaacagauu

SEQ ID NO: 3656495 - RNA, 21 nt, Human
cugccuuugcuccucccaugu

SEQ ID NO: 3656496 - RNA, 20 nt, Human
cugccuuuuaguuccugugc

SEQ ID NO: 3656497 - RNA, 22 nt, Human
cugcgaaguccuauggaaaccc

SEQ ID NO: 3656498 - RNA, 15 nt, Human
cugcgacccuggggg

SEQ ID NO: 3656499 - RNA, 16 nt, Human
cugcgacuuucugccu

SEQ ID NO: 3656500 - RNA, 19 nt, Human
cugcgacuuucugccugga

SEQ ID NO: 3656501 - RNA, 15 nt, Human
cugcgagugguuucu

SEQ ID NO: 3656502 - RNA, 20 nt, Human
cugcgcccaccccgcucugc

SEQ ID NO: 3656503 - RNA, 19 nt, Human
cugcgcccaguccuuccac

SEQ ID NO: 3656504 - RNA, 14 nt, Human
cugcgcccugggcu

SEQ ID NO: 3656505 - RNA, 22 nt, Human
cugcgcccuuaacugcauccag

SEQ ID NO: 3656506 - RNA, 16 nt, Human
cugcgcccuuccccag

SEQ ID NO: 3656507 - RNA, 12 nt, Human
cugcgccugcug

SEQ ID NO: 3656508 - RNA, 13 nt, Human
cugcgcuugcuuu

SEQ ID NO: 3656509 - RNA, 17 nt, Human
cugcgcuugcuuuucug

SEQ ID NO: 3656510 - RNA, 14 nt, Human
cugcggaccccagc

SEQ ID NO: 3656511 - RNA, 15 nt, Human
cugcggaccccagcu

SEQ ID NO: 3656512 - RNA, 16 nt, Human
cugcggaccccagcug

SEQ ID NO: 3656513 - RNA, 20 nt, Human
cugcggaccccagcugugag

SEQ ID NO: 3656514 - RNA, 16 nt, Human
cugcggagcaagagga

SEQ ID NO: 3656515 - RNA, 19 nt, Human
cugcggagcacacuggcuc

SEQ ID NO: 3656516 - RNA, 20 nt, Human
cugcggagcacacuggcuca

SEQ ID NO: 3656517 - RNA, 18 nt, Human
cugcggagugaagagggg

SEQ ID NO: 3656518 - RNA, 23 nt, Human
cugcggagugaagaggggcagcc

SEQ ID NO: 3656519 - RNA, 14 nt, Human
cugcggcaucagau

SEQ ID NO: 3656520 - RNA, 16 nt, Human
cugcggcugcugugug

SEQ ID NO: 3656521 - RNA, 17 nt, Human
cugcgggaugguccugg

SEQ ID NO: 3656522 - RNA, 22 nt, Human
cugcggggcgggcacaccuccu

SEQ ID NO: 3656523 - RNA, 15 nt, Human
cugcgggucacagga

SEQ ID NO: 3656524 - RNA, 21 nt, Human
cugcgggucacaggagggagg

SEQ ID NO: 3656525 - RNA, 23 nt, Human
cugcgggugaacaaagcagccac

SEQ ID NO: 3656526 - RNA, 21 nt, Human
cugcggguggggcuuggggcu

SEQ ID NO: 3656527 - RNA, 15 nt, Human
cugcgguccacccag

SEQ ID NO: 3656528 - RNA, 17 nt, Human
cugcgguccacccagga

SEQ ID NO: 3656529 - RNA, 22 nt, Human
cugcggugcuaucucccccagc

SEQ ID NO: 3656530 - RNA, 11 nt, Human
ccucaggcagg

SEQ ID NO: 3656531 - RNA, 14 nt, Human
ccucaggccugggg

SEQ ID NO: 3656532 - RNA, 21 nt, Human
ccucaggccugggggcugggc

SEQ ID NO: 3656533 - RNA, 23 nt, Human
ccucaggccugggggcugggcag

SEQ ID NO: 3656534 - RNA, 18 nt, Human
ccucaggcugcuggagga

SEQ ID NO: 3656535 - RNA, 23 nt, Human
ccucagggacagagacaccugca

SEQ ID NO: 3656536 - RNA, 17 nt, Human
ccucagggagcagggaa

SEQ ID NO: 3656537 - RNA, 21 nt, Human
ccucagggagcagggaaggcc

SEQ ID NO: 3656538 - RNA, 23 nt, Human
ccucagggaucuugcauucccag

SEQ ID NO: 3656539 - RNA, 11 nt, Human
ccucagggcac

SEQ ID NO: 3656540 - RNA, 14 nt, Human
ccucagggcuccca

SEQ ID NO: 3656541 - RNA, 16 nt, Human
ccucagggcucccagg

SEQ ID NO: 3656542 - RNA, 17 nt, Human
ccucagggcucccaggg

SEQ ID NO: 3656543 - RNA, 18 nt, Human
ccucaggggucugagcuc

SEQ ID NO: 3656544 - RNA, 14 nt, Human
ccucagggucccug

SEQ ID NO: 3656545 - RNA, 22 nt, Human
ccucagggucccugguggcagc

SEQ ID NO: 3656546 - RNA, 20 nt, Human
ccucaggucagggugaggau

SEQ ID NO: 3656547 - RNA, 16 nt, Human
ccucaggugagaagca

SEQ ID NO: 3656548 - RNA, 20 nt, Human
ccucaggugagaagcagagg

SEQ ID NO: 3656549 - RNA, 22 nt, Human
ccucaggugagaagcagaggaa

SEQ ID NO: 3656550 - RNA, 19 nt, Human
ccucaggugauccacccac

SEQ ID NO: 3656551 - RNA, 22 nt, Human
ccucaggugauccacccaccuc

SEQ ID NO: 3656552 - RNA, 21 nt, Human
ccucagguggccagccuggau

SEQ ID NO: 3656553 - RNA, 21 nt, Human
ccucagguggccaugccucag

SEQ ID NO: 3656554 - RNA, 22 nt, Human
ccucagguugcugguugcugug

SEQ ID NO: 3656555 - RNA, 23 nt, Human
ccucagguugcugguugcugugu

SEQ ID NO: 3656556 - RNA, 18 nt, Human
ccucaguagucccugcac

SEQ ID NO: 3656557 - RNA, 16 nt, Human
ccucaguauauuuaaa

SEQ ID NO: 3656558 - RNA, 19 nt, Human
ccucaguauauuuaaacuc

SEQ ID NO: 3656559 - RNA, 18 nt, Human
ccucaguccuccccucac

SEQ ID NO: 3656560 - RNA, 20 nt, Human
ccucaguccuccccucacag

SEQ ID NO: 3656561 - RNA, 23 nt, Human
ccucaguccuccccucacagccu

SEQ ID NO: 3656562 - RNA, 24 nt, Human
ccucaguccuccccucacagccuc

SEQ ID NO: 3656563 - RNA, 14 nt, Human
ccucagucucccuc

SEQ ID NO: 3656564 - RNA, 21 nt, Human
ccucagugacccuggcuccuu

SEQ ID NO: 3656565 - RNA, 21 nt, Human
ccucaguggacuuuccacccc

SEQ ID NO: 3656566 - RNA, 15 nt, Human
ccucaguuucccuau

SEQ ID NO: 3656567 - RNA, 13 nt, Human
ccucauacccacc

SEQ ID NO: 3656568 - RNA, 17 nt, Human
ccucauagcccucaccc

SEQ ID NO: 3656569 - RNA, 18 nt, Human
ccucauagcccucacccu

SEQ ID NO: 3656570 - RNA, 22 nt, Human
ccucauagcccucacccugggg

SEQ ID NO: 3656571 - RNA, 13 nt, Human
ccucaucaggaug

SEQ ID NO: 3656572 - RNA, 15 nt, Human
ccucaucaucagagc

SEQ ID NO: 3656573 - RNA, 14 nt, Human
ccucaucccgagca

SEQ ID NO: 3656574 - RNA, 13 nt, Human
ccucauccucaua

SEQ ID NO: 3656575 - RNA, 21 nt, Human
ccucaucgcguccuccuaccg

SEQ ID NO: 3656576 - RNA, 21 nt, Human
ccucaucuaugaggaaagguu

SEQ ID NO: 3656577 - RNA, 20 nt, Human
ccucaucucucugcccaacc

SEQ ID NO: 3656578 - RNA, 20 nt, Human
ccucaucugggggaguggaa

SEQ ID NO: 3656579 - RNA, 15 nt, Human
ccucaucuucuucac

SEQ ID NO: 3656580 - RNA, 18 nt, Human
ccucaucuucuucaccau

SEQ ID NO: 3656581 - RNA, 15 nt, Human
ccucaugaauguaaa

SEQ ID NO: 3656582 - RNA, 20 nt, Human
ccucaugaauguaaauuugu

SEQ ID NO: 3656583 - RNA, 13 nt, Human
ccucaugcccacc

SEQ ID NO: 3656584 - RNA, 13 nt, Human
ccucaugcugcca

SEQ ID NO: 3656585 - RNA, 15 nt, Human
ccucaugcugccaau

SEQ ID NO: 3656586 - RNA, 18 nt, Human
ccucauggccccucugac

SEQ ID NO: 3656587 - RNA, 19 nt, Human
ccucaugguggguucaggg

SEQ ID NO: 3656588 - RNA, 21 nt, Human
ccucauguacauacccuggcc

SEQ ID NO: 3656589 - RNA, 15 nt, Human
ccucauguggcugga

SEQ ID NO: 3656590 - RNA, 17 nt, Human
ccucauguggcuggaag

SEQ ID NO: 3656591 - RNA, 18 nt, Human
ccucauguggcuggaaga

SEQ ID NO: 3656592 - RNA, 23 nt, Human
ccucauguggcuggaagauccug

SEQ ID NO: 3656593 - RNA, 19 nt, Human
ccucauguucuuaauucuu

SEQ ID NO: 3656594 - RNA, 17 nt, Human
ccucauguuuaugaaaa

SEQ ID NO: 3656595 - RNA, 18 nt, Human
ccucauguuuaugaaaau

SEQ ID NO: 3656596 - RNA, 16 nt, Human
ccucauuacugggccu

SEQ ID NO: 3656597 - RNA, 22 nt, Human
ccucauuacuuuaccaccccca

SEQ ID NO: 3656598 - RNA, 22 nt, Human
ccucauucaggaaaacugacag

SEQ ID NO: 3656599 - RNA, 21 nt, Human
ccucauucccucgucuuuccc

SEQ ID NO: 3656600 - RNA, 19 nt, Human
ccucauugacaagaacuga

SEQ ID NO: 3656601 - RNA, 19 nt, Human
ccucauuuaucccucaacc

SEQ ID NO: 3656602 - RNA, 20 nt, Human
ccucauuuaucccucaaccc

SEQ ID NO: 3656603 - RNA, 21 nt, Human
ccucauuuuuauaaugucccu

SEQ ID NO: 3656604 - RNA, 19 nt, Human
ccuccaaaacuccugcccc

SEQ ID NO: 3656605 - RNA, 16 nt, Human
ccuccaaaggcccccu

SEQ ID NO: 3656606 - RNA, 20 nt, Human
ccuccaaauggagaagcugc

SEQ ID NO: 3656607 - RNA, 21 nt, Human
ccuccaaauggagaagcugca

SEQ ID NO: 3656608 - RNA, 23 nt, Human
ccuccaacacaaggcuccaagac

SEQ ID NO: 3656609 - RNA, 19 nt, Human
ccuccaacaccaagcacag

SEQ ID NO: 3656610 - RNA, 16 nt, Human
ccuccaaccccucgcc

SEQ ID NO: 3656611 - RNA, 20 nt, Human
ccuccaaccccucgcccagu

SEQ ID NO: 3656612 - RNA, 19 nt, Human
ccuccaaccuggggggcag

SEQ ID NO: 3656613 - RNA, 17 nt, Human
ccuccaagaaucuaucu

SEQ ID NO: 3656614 - RNA, 17 nt, Human
ccuccaagaccuucucc

SEQ ID NO: 3656615 - RNA, 21 nt, Human
ccuccaagcuccaucuccacu

SEQ ID NO: 3656616 - RNA, 20 nt, Human
ccuccaaggaggggcuguaa

SEQ ID NO: 3656617 - RNA, 16 nt, Human
ccuccacacaagggaa

SEQ ID NO: 3656618 - RNA, 21 nt, Human
ccuccacacaagggaaggaca

SEQ ID NO: 3656619 - RNA, 13 nt, Human
ccuccacagcgag

SEQ ID NO: 3656620 - RNA, 23 nt, Human
ccuccacagcgagggcagcugcu

SEQ ID NO: 3656621 - RNA, 12 nt, Human
ccuccacagcuu

SEQ ID NO: 3656622 - RNA, 23 nt, Human
ccuccacaguucgaccugcggcu

SEQ ID NO: 3656623 - RNA, 20 nt, Human
ccuccacauccuccacguuc

SEQ ID NO: 3656624 - RNA, 15 nt, Human
ccuccacauuuguuu

SEQ ID NO: 3656625 - RNA, 19 nt, Human
ccuccaccaccacuggcca

SEQ ID NO: 3656626 - RNA, 19 nt, Human
cuggaggucacauucagga

SEQ ID NO: 3656627 - RNA, 16 nt, Human
cuggaggugccagcaa

SEQ ID NO: 3656628 - RNA, 19 nt, Human
cuggaggugccagcaaagc

SEQ ID NO: 3656629 - RNA, 22 nt, Human
cuggaggugccagcaaagcccc

SEQ ID NO: 3656630 - RNA, 20 nt, Human
cuggagguggcugagccccu

SEQ ID NO: 3656631 - RNA, 17 nt, Human
cuggaggugggagcagg

SEQ ID NO: 3656632 - RNA, 20 nt, Human
cuggaggugggagcaggaga

SEQ ID NO: 3656633 - RNA, 21 nt, Human
cuggaggugggagcaggagau

SEQ ID NO: 3656634 - RNA, 15 nt, Human
cuggaggugggguug

SEQ ID NO: 3656635 - RNA, 17 nt, Human
cuggagguugaagccaa

SEQ ID NO: 3656636 - RNA, 12 nt, Human
cuggagguuugu

SEQ ID NO: 3656637 - RNA, 15 nt, Human
cuggagucaaaacac

SEQ ID NO: 3656638 - RNA, 18 nt, Human
cuggagucaucauucccu

SEQ ID NO: 3656639 - RNA, 18 nt, Human
cuggagucccaaauguca

SEQ ID NO: 3656640 - RNA, 14 nt, Human
cuggagucccugug

SEQ ID NO: 3656641 - RNA, 13 nt, Human
cuggagucuggag

SEQ ID NO: 3656642 - RNA, 18 nt, Human
cuggagucuggagugggc

SEQ ID NO: 3656643 - RNA, 24 nt, Human
cuggaguggccacuaagcagagga

SEQ ID NO: 3656644 - RNA, 16 nt, Human
cuggagugggcagagc

SEQ ID NO: 3656645 - RNA, 23 nt, Human
cuggagugugaggguccugcagc

SEQ ID NO: 3656646 - RNA, 18 nt, Human
cuggaguguggcugagga

SEQ ID NO: 3656647 - RNA, 21 nt, Human
cuggaguguggcugaggaggc

SEQ ID NO: 3656648 - RNA, 15 nt, Human
cuggaguucugguuc

SEQ ID NO: 3656649 - RNA, 17 nt, Human
cuggaguugaucuggaa

SEQ ID NO: 3656650 - RNA, 22 nt, Human
cuggaguugaucuggaacccag

SEQ ID NO: 3656651 - RNA, 13 nt, Human
cuggaguugucac

SEQ ID NO: 3656652 - RNA, 23 nt, Human
cuggaguuuuuguuuggagagca

SEQ ID NO: 3656653 - RNA, 13 nt, Human
cuggauaaaauga

SEQ ID NO: 3656654 - RNA, 15 nt, Human
cuggauaacuuaggu

SEQ ID NO: 3656655 - RNA, 13 nt, Human
cuggauagugaag

SEQ ID NO: 3656656 - RNA, 24 nt, Human
cuggaucacgacgcugcagagcac

SEQ ID NO: 3656657 - RNA, 13 nt, Human
cuggaucagcgug

SEQ ID NO: 3656658 - RNA, 17 nt, Human
cuggaucagcguggccu

SEQ ID NO: 3656659 - RNA, 23 nt, Human
cuggaucaguaaaauuauacugu

SEQ ID NO: 3656660 - RNA, 17 nt, Human
cuggaucaguccuuuga

SEQ ID NO: 3656661 - RNA, 21 nt, Human
cuggaucaguccuuugaucag

SEQ ID NO: 3656662 - RNA, 15 nt, Human
cuggaucuaccugga

SEQ ID NO: 3656663 - RNA, 17 nt, Human
cuggaucucccagggcu

SEQ ID NO: 3656664 - RNA, 15 nt, Human
cuggaucuguuccuu

SEQ ID NO: 3656665 - RNA, 13 nt, Human
cuggaugaagauu

SEQ ID NO: 3656666 - RNA, 23 nt, Human
cuggaugaagauucuccugugcu

SEQ ID NO: 3656667 - RNA, 13 nt, Human
cuggaugagacuu

SEQ ID NO: 3656668 - RNA, 14 nt, Human
cuggaugauacuaa

SEQ ID NO: 3656669 - RNA, 16 nt, Human
cuggaugauggauucc

SEQ ID NO: 3656670 - RNA, 18 nt, Human
cuggaugcagccucacag

SEQ ID NO: 3656671 - RNA, 14 nt, Human
cuggaugcauuucu

SEQ ID NO: 3656672 - RNA, 14 nt, Human
cuggaugcccagga

SEQ ID NO: 3656673 - RNA, 18 nt, Human
cuggaugcccccugugga

SEQ ID NO: 3656674 - RNA, 18 nt, Human
cuggauggagcccaggcg

SEQ ID NO: 3656675 - RNA, 23 nt, Human
cuggauggagcccaggcgggagc

SEQ ID NO: 3656676 - RNA, 23 nt, Human
cuggauggcaccagaggcugcag

SEQ ID NO: 3656677 - RNA, 15 nt, Human
cuggauggggcugca

SEQ ID NO: 3656678 - RNA, 20 nt, Human
cuggaugguucccagagggu

SEQ ID NO: 3656679 - RNA, 18 nt, Human
cuggauucagccuucuuu

SEQ ID NO: 3656680 - RNA, 22 nt, Human
cuggauucagccuucuuuuucu

SEQ ID NO: 3656681 - RNA, 22 nt, Human
cuggauugaucggagccuccuc

SEQ ID NO: 3656682 - RNA, 20 nt, Human
cuggcaaaaggaucuuugug

SEQ ID NO: 3656683 - RNA, 19 nt, Human
cuggcaaacagggccucug

SEQ ID NO: 3656684 - RNA, 20 nt, Human
cuggcaaacagggccucugc

SEQ ID NO: 3656685 - RNA, 21 nt, Human
cuggcaaacagggccucugcg

SEQ ID NO: 3656686 - RNA, 23 nt, Human
cuggcaaacagggccucugcgga

SEQ ID NO: 3656687 - RNA, 16 nt, Human
cuggcaaacaugaaaa

SEQ ID NO: 3656688 - RNA, 18 nt, Human
cuggcaaagaugaucagu

SEQ ID NO: 3656689 - RNA, 19 nt, Human
cuggcaaagcuuuuagaaa

SEQ ID NO: 3656690 - RNA, 12 nt, Human
cuggcaaaggcc

SEQ ID NO: 3656691 - RNA, 22 nt, Human
cuggcaaagggagcagaacuga

SEQ ID NO: 3656692 - RNA, 18 nt, Human
cuggcaaagguggcucuc

SEQ ID NO: 3656693 - RNA, 22 nt, Human
cuggcaaagguggcucuccagu

SEQ ID NO: 3656694 - RNA, 13 nt, Human
cuggcaagaaugg

SEQ ID NO: 3656695 - RNA, 14 nt, Human
cuggcaagaaugug

SEQ ID NO: 3656696 - RNA, 22 nt, Human
cuggcaaugaaaaauucucagu

SEQ ID NO: 3656697 - RNA, 22 nt, Human
cuggcaauggaugaacugaaag

SEQ ID NO: 3656698 - RNA, 18 nt, Human
cuggcaauugucuauuua

SEQ ID NO: 3656699 - RNA, 21 nt, Human
cuggcacacaguaggugcuca

SEQ ID NO: 3656700 - RNA, 15 nt, Human
cuggcacagaaaccu

SEQ ID NO: 3656701 - RNA, 12 nt, Human
cuggcacagagg

SEQ ID NO: 3656702 - RNA, 15 nt, Human
cuggcacagccuggc

SEQ ID NO: 3656703 - RNA, 14 nt, Human
cuggcacagugucu

SEQ ID NO: 3656704 - RNA, 15 nt, Human
cuggcacagugucug

SEQ ID NO: 3656705 - RNA, 20 nt, Human
cuggcacagugucugggcug

SEQ ID NO: 3656706 - RNA, 18 nt, Human
cuggcacaguuuucugag

SEQ ID NO: 3656707 - RNA, 21 nt, Human
cuggcacaguuuucugagaaa

SEQ ID NO: 3656708 - RNA, 22 nt, Human
cuggcacauuuccccagaccug

SEQ ID NO: 3656709 - RNA, 17 nt, Human
cuggcacccggccccug

SEQ ID NO: 3656710 - RNA, 18 nt, Human
cuggcacccggccccugc

SEQ ID NO: 3656711 - RNA, 20 nt, Human
cuggcacccggccccugcug

SEQ ID NO: 3656712 - RNA, 17 nt, Human
cuggcaccgccuucucu

SEQ ID NO: 3656713 - RNA, 15 nt, Human
cuggcacuauaaugu

SEQ ID NO: 3656714 - RNA, 16 nt, Human
cuggcacuauaaugua

SEQ ID NO: 3656715 - RNA, 23 nt, Human
cuggcacuauaauguaagcucua

SEQ ID NO: 3656716 - RNA, 14 nt, Human
cuggcacugcuucc

SEQ ID NO: 3656717 - RNA, 15 nt, Human
cuggcacugcuucca

SEQ ID NO: 3656718 - RNA, 18 nt, Human
cuggcacugcuuccagug

SEQ ID NO: 3656719 - RNA, 19 nt, Human
cuggcacuggaccccagca

SEQ ID NO: 3656720 - RNA, 22 nt, Human
cuggcacuggcaaacagggccu

SEQ ID NO: 3656721 - RNA, 22 nt, Human
cuggcacugguuuguucccugu

SEQ ID NO: 3656722 - RNA, 15 nt, Human
cuggcagacugugua

SEQ ID NO: 3656723 - RNA, 20 nt, Human
cuggcagagaugccucccug

SEQ ID NO: 3656724 - RNA, 14 nt, Human
cuggcagaggaggg

SEQ ID NO: 3656725 - RNA, 19 nt, Human
cuggcagaguugaagacag

SEQ ID NO: 3656726 - RNA, 22 nt, Human
cuggcagaguugaagacagagc

SEQ ID NO: 3656727 - RNA, 15 nt, Human
cuggcagcagagugu

SEQ ID NO: 3656728 - RNA, 12 nt, Human
cuggcagccaca

SEQ ID NO: 3656729 - RNA, 23 nt, Human
cuggcagccacacuucucaggac

SEQ ID NO: 3656730 - RNA, 16 nt, Human
cuggcagcccagagac

SEQ ID NO: 3656731 - RNA, 18 nt, Human
cuggcagccccagcacca

SEQ ID NO: 3656732 - RNA, 12 nt, Human
cuggcucugagc

SEQ ID NO: 3656733 - RNA, 18 nt, Human
cuggcucugcaaugggca

SEQ ID NO: 3656734 - RNA, 12 nt, Human
cuggcucuguga

SEQ ID NO: 3656735 - RNA, 14 nt, Human
cuggcucuguggcu

SEQ ID NO: 3656736 - RNA, 15 nt, Human
cuggcucuguggcuu

SEQ ID NO: 3656737 - RNA, 18 nt, Human
cuggcucuguggcuugcu

SEQ ID NO: 3656738 - RNA, 20 nt, Human
cuggcucuuccaggcuggga

SEQ ID NO: 3656739 - RNA, 22 nt, Human
cuggcucuuccaggcugggaga

SEQ ID NO: 3656740 - RNA, 13 nt, Human
cuggcugaacccu

SEQ ID NO: 3656741 - RNA, 18 nt, Human
cuggcugaacccugugcu

SEQ ID NO: 3656742 - RNA, 13 nt, Human
cuggcugaaggac

SEQ ID NO: 3656743 - RNA, 19 nt, Human
cuggcugagguuccucugc

SEQ ID NO: 3656744 - RNA, 23 nt, Human
cuggcugcagagcagugggccug

SEQ ID NO: 3656745 - RNA, 13 nt, Human
cuggcugcccaga

SEQ ID NO: 3656746 - RNA, 19 nt, Human
cuggcugccccaaccugcu

SEQ ID NO: 3656747 - RNA, 20 nt, Human
cuggcugccccaaccugcug

SEQ ID NO: 3656748 - RNA, 18 nt, Human
cuggcugcccuggcccug

SEQ ID NO: 3656749 - RNA, 23 nt, Human
cuggcugcccuggcccugaggug

SEQ ID NO: 3656750 - RNA, 19 nt, Human
cuggcuggccuuguggucc

SEQ ID NO: 3656751 - RNA, 14 nt, Human
cuggcuggcugagg

SEQ ID NO: 3656752 - RNA, 17 nt, Human
cuggcuggcugagggca

SEQ ID NO: 3656753 - RNA, 12 nt, Human
cuggcugggacg

SEQ ID NO: 3656754 - RNA, 16 nt, Human
cuggcugggacguggc

SEQ ID NO: 3656755 - RNA, 17 nt, Human
cuggcugggcauggacg

SEQ ID NO: 3656756 - RNA, 13 nt, Human
cuggcuggggccu

SEQ ID NO: 3656757 - RNA, 19 nt, Human
cuggcugguaagggccaag

SEQ ID NO: 3656758 - RNA, 17 nt, Human
cuggcugguagagcagg

SEQ ID NO: 3656759 - RNA, 12 nt, Human
cuggcugguguu

SEQ ID NO: 3656760 - RNA, 18 nt, Human
cuggcugguguuaacaga

SEQ ID NO: 3656761 - RNA, 21 nt, Human
cuggcuguacugcucaggcug

SEQ ID NO: 3656762 - RNA, 19 nt, Human
cuggcugucaguaugacau

SEQ ID NO: 3656763 - RNA, 15 nt, Human
cuggcugugggcucc

SEQ ID NO: 3656764 - RNA, 18 nt, Human
cuggcugugggcucccuu

SEQ ID NO: 3656765 - RNA, 21 nt, Human
cuggcugugggcucccuuccu

SEQ ID NO: 3656766 - RNA, 22 nt, Human
cuggcugugggcucccuuccuc

SEQ ID NO: 3656767 - RNA, 14 nt, Human
cuggcuuacacugg

SEQ ID NO: 3656768 - RNA, 16 nt, Human
cuggcuucccaucccc

SEQ ID NO: 3656769 - RNA, 18 nt, Human
cuggcuuccuucucucaa

SEQ ID NO: 3656770 - RNA, 23 nt, Human
cuggcauuacaggugugagccac

SEQ ID NO: 3656771 - RNA, 22 nt, Human
cuggcauuagaauuauuuaaac

SEQ ID NO: 3656772 - RNA, 19 nt, Human
cuggcauuauguccacugu

SEQ ID NO: 3656773 - RNA, 17 nt, Human
cuggcauucuuguacag

SEQ ID NO: 3656774 - RNA, 17 nt, Human
cuggccaacaugguaaa

SEQ ID NO: 3656775 - RNA, 16 nt, Human
cuggccaacgggguga

SEQ ID NO: 3656776 - RNA, 22 nt, Human
cuggccaagcugaggugcccag

SEQ ID NO: 3656777 - RNA, 23 nt, Human
cuggccaagcugaggugcccagg

SEQ ID NO: 3656778 - RNA, 13 nt, Human
cuggccaccaccc

SEQ ID NO: 3656779 - RNA, 17 nt, Human
cuggccaccugaggugg

SEQ ID NO: 3656780 - RNA, 18 nt, Human
cuggccaccugagguggg

SEQ ID NO: 3656781 - RNA, 18 nt, Human
cuggccacgcagccagga

SEQ ID NO: 3656782 - RNA, 20 nt, Human
cuggccacgcagccaggaca

SEQ ID NO: 3656783 - RNA, 19 nt, Human
cuggccacugcacagagcu

SEQ ID NO: 3656784 - RNA, 21 nt, Human
cuggccacugcacagagcucu

SEQ ID NO: 3656785 - RNA, 13 nt, Human
cuggccagaaugc

SEQ ID NO: 3656786 - RNA, 13 nt, Human
cuggccagacaca

SEQ ID NO: 3656787 - RNA, 13 nt, Human
cuggccagacucg

SEQ ID NO: 3656788 - RNA, 18 nt, Human
cuggccagaugcaccagc

SEQ ID NO: 3656789 - RNA, 21 nt, Human
cuggccagaugcaccagcccu

SEQ ID NO: 3656790 - RNA, 21 nt, Human
cuggccagccccacagcccac

SEQ ID NO: 3656791 - RNA, 13 nt, Human
cuggccagccgcu

SEQ ID NO: 3656792 - RNA, 13 nt, Human
cuggccagccugg

SEQ ID NO: 3656793 - RNA, 21 nt, Human
cuggccagccuggggccuggc

SEQ ID NO: 3656794 - RNA, 12 nt, Human
cuggccaggagc

SEQ ID NO: 3656795 - RNA, 15 nt, Human
cuggccaggagcagg

SEQ ID NO: 3656796 - RNA, 23 nt, Human
cuggccaggagcaggcacgggug

SEQ ID NO: 3656797 - RNA, 13 nt, Human
cuggccagggcca

SEQ ID NO: 3656798 - RNA, 22 nt, Human
cuggccagggccacgcuccagc

SEQ ID NO: 3656799 - RNA, 23 nt, Human
cuggccagggccacgcuccagcu

SEQ ID NO: 3656800 - RNA, 14 nt, Human
cuggccagggccug

SEQ ID NO: 3656801 - RNA, 16 nt, Human
cuggccagggccugga

SEQ ID NO: 3656802 - RNA, 23 nt, Human
cuggccagggccuggaagacaga

SEQ ID NO: 3656803 - RNA, 20 nt, Human
cuggccaguccacccugccu

SEQ ID NO: 3656804 - RNA, 21 nt, Human
cuggccaguccaggcugccgu

SEQ ID NO: 3656805 - RNA, 22 nt, Human
cuggccaguccaggcugccgug

SEQ ID NO: 3656806 - RNA, 17 nt, Human
cuggccaguuggaacca

SEQ ID NO: 3656807 - RNA, 16 nt, Human
cuggccauacuguguc

SEQ ID NO: 3656808 - RNA, 17 nt, Human
cuggccaucccucgugg

SEQ ID NO: 3656809 - RNA, 22 nt, Human
cuggccaucucugaacuucagc

SEQ ID NO: 3656810 - RNA, 18 nt, Human
cuggccauggagaaagcu

SEQ ID NO: 3656811 - RNA, 15 nt, Human
cuggccauggccugc

SEQ ID NO: 3656812 - RNA, 18 nt, Human
cuggcccacagcaggugc

SEQ ID NO: 3656813 - RNA, 16 nt, Human
cuggcccaccccaccc

SEQ ID NO: 3656814 - RNA, 12 nt, Human
cuggcccacugc

SEQ ID NO: 3656815 - RNA, 13 nt, Human
cuggcccagcccu

SEQ ID NO: 3656816 - RNA, 15 nt, Human
cuggcccagcccugc

SEQ ID NO: 3656817 - RNA, 17 nt, Human
cuggcccagcccugcug

SEQ ID NO: 3656818 - RNA, 22 nt, Human
cuggcccagcccugcuggccgc

SEQ ID NO: 3656819 - RNA, 19 nt, Human
cuggcccagccggccucuc

SEQ ID NO: 3656820 - RNA, 21 nt, Human
cuggcccagccggccucucug

SEQ ID NO: 3656821 - RNA, 21 nt, Human
cuggcccagccuuuguucccc

SEQ ID NO: 3656822 - RNA, 12 nt, Human
cuggcccagcgg

SEQ ID NO: 3656823 - RNA, 18 nt, Human
cuggcccagcggccccuc

SEQ ID NO: 3656824 - RNA, 13 nt, Human
cuggcccagggca

SEQ ID NO: 3656825 - RNA, 14 nt, Human
cuggcccagggccc

SEQ ID NO: 3656826 - RNA, 20 nt, Human
cuggcccagggcccagagcc

SEQ ID NO: 3656827 - RNA, 21 nt, Human
cuggcccagggcccagagccc

SEQ ID NO: 3656828 - RNA, 22 nt, Human
cuggcccagggcccagagccca

SEQ ID NO: 3656829 - RNA, 17 nt, Human
cuggcccauagaaacau

SEQ ID NO: 3656830 - RNA, 21 nt, Human
cuggcccauagaaacaugaca

SEQ ID NO: 3656831 - RNA, 12 nt, Human
cuggccccacac

SEQ ID NO: 3656832 - RNA, 23 nt, Human
cuggccccacccucguggacacc

SEQ ID NO: 3656833 - RNA, 12 nt, Human
cuggccccagcc

SEQ ID NO: 3656834 - RNA, 16 nt, Human
cuggccccagcccugc

SEQ ID NO: 3656835 - RNA, 19 nt, Human
cuggccccagcccugcugg

SEQ ID NO: 3656836 - RNA, 21 nt, Human
cuggccccaggaccuggcugc

SEQ ID NO: 3656837 - RNA, 18 nt, Human
cuggccccagggcacccu

SEQ ID NO: 3656838 - RNA, 20 nt, Human
cuggccccagguagaaacuu

SEQ ID NO: 3656839 - RNA, 16 nt, Human
cuggccccaugucucu

SEQ ID NO: 3656840 - RNA, 14 nt, Human
cuggcccccacugg

SEQ ID NO: 3656841 - RNA, 15 nt, Human
cuggcccccucccug

SEQ ID NO: 3656842 - RNA, 16 nt, Human
cuggcccccucccugg

SEQ ID NO: 3656843 - RNA, 20 nt, Human
cuggcccccucccuggauga

SEQ ID NO: 3656844 - RNA, 21 nt, Human
cuggccccggaucagagcagg

SEQ ID NO: 3656845 - RNA, 18 nt, Human
cuggccccucaaccuccu

SEQ ID NO: 3656846 - RNA, 20 nt, Human
cuggccccucagggucccug

SEQ ID NO: 3656847 - RNA, 23 nt, Human
cuggccccuuugggcccugcaug

SEQ ID NO: 3656848 - RNA, 16 nt, Human
cuggcccgugacagac

SEQ ID NO: 3656849 - RNA, 24 nt, Human
cuggcccucaaggccucccacagu

SEQ ID NO: 3656850 - RNA, 17 nt, Human
cuggcccucaccccugc

SEQ ID NO: 3656851 - RNA, 21 nt, Human
cuggcccucaccccugcccug

SEQ ID NO: 3656852 - RNA, 22 nt, Human
cuggcccucaccccugcccugg

SEQ ID NO: 3656853 - RNA, 16 nt, Human
cuggcccucaguuucc

SEQ ID NO: 3656854 - RNA, 12 nt, Human
cuggcccucuuc

SEQ ID NO: 3656855 - RNA, 15 nt, Human
cuggcccucuucuua

SEQ ID NO: 3656856 - RNA, 23 nt, Human
cuggcccugcuuccugcuugcca

SEQ ID NO: 3656857 - RNA, 13 nt, Human
cuggcccuggggc

SEQ ID NO: 3656858 - RNA, 16 nt, Human
cuggcccuggggccug

SEQ ID NO: 3656859 - RNA, 13 nt, Human
cuggcccugugcc

SEQ ID NO: 3656860 - RNA, 21 nt, Human
cuggcccuugcuuaccucuca

SEQ ID NO: 3656861 - RNA, 17 nt, Human
cuggccgaguccaagcu

SEQ ID NO: 3656862 - RNA, 23 nt, Human
cuggccgaguccaagcugggaga

SEQ ID NO: 3656863 - RNA, 14 nt, Human
cuggccgcccccug

SEQ ID NO: 3656864 - RNA, 18 nt, Human
cuggccgcggagccugca

SEQ ID NO: 3656865 - RNA, 21 nt, Human
cuggccggagcaaacucugcu

SEQ ID NO: 3656866 - RNA, 22 nt, Human
cuggccggagcaaacucugcug

SEQ ID NO: 3656867 - RNA, 18 nt, Human
cuggccggagucagugcc

SEQ ID NO: 3656868 - RNA, 15 nt, Human
cuggccggccagcca

SEQ ID NO: 3656869 - RNA, 16 nt, Human
cuggccgggcacagcu

SEQ ID NO: 3656870 - RNA, 17 nt, Human
cuggccgggcacagcug

SEQ ID NO: 3656871 - RNA, 22 nt, Human
cuggccggucugcaagucagag

SEQ ID NO: 3656872 - RNA, 23 nt, Human
cuggccggucugcaagucagagg

SEQ ID NO: 3656873 - RNA, 15 nt, Human
cuggccguccuuguc

SEQ ID NO: 3656874 - RNA, 20 nt, Human
cuggccuaaaaucuuggaag

SEQ ID NO: 3656875 - RNA, 21 nt, Human
cuggccuaaaaucuuggaagu

SEQ ID NO: 3656876 - RNA, 19 nt, Human
cuggccuagaccagcagac

SEQ ID NO: 3656877 - RNA, 22 nt, Human
cuggccuagaccagcagacaga

SEQ ID NO: 3656878 - RNA, 21 nt, Human
cuggccuaggagauaucugag

SEQ ID NO: 3656879 - RNA, 21 nt, Human
cuggccucaaagcaagcauuc

SEQ ID NO: 3656880 - RNA, 21 nt, Human
cuggccucagacugcacccag

SEQ ID NO: 3656881 - RNA, 23 nt, Human
cuggccucagacugcacccagga

SEQ ID NO: 3656882 - RNA, 13 nt, Human
cuggccuccacag

SEQ ID NO: 3656883 - RNA, 23 nt, Human
cuggccuccaggcccgucugucc

SEQ ID NO: 3656884 - RNA, 14 nt, Human
cuggccucccaaau

SEQ ID NO: 3656885 - RNA, 12 nt, Human
cuggccucccac

SEQ ID NO: 3656886 - RNA, 19 nt, Human
cuggccucccacagacuca

SEQ ID NO: 3656887 - RNA, 17 nt, Human
cuggccucccacccgau

SEQ ID NO: 3656888 - RNA, 15 nt, Human
cuggccucccccacu

SEQ ID NO: 3656889 - RNA, 18 nt, Human
cuggccuccccugccacc

SEQ ID NO: 3656890 - RNA, 19 nt, Human
cugggauuacaggcuccug

SEQ ID NO: 3656891 - RNA, 22 nt, Human
cugggauuacaggcuccugcca

SEQ ID NO: 3656892 - RNA, 16 nt, Human
cugggauuacaggugu

SEQ ID NO: 3656893 - RNA, 19 nt, Human
cugggauuacaggugugca

SEQ ID NO: 3656894 - RNA, 15 nt, Human
cugggauucccacca

SEQ ID NO: 3656895 - RNA, 14 nt, Human
cugggauuccuccc

SEQ ID NO: 3656896 - RNA, 18 nt, Human
cugggauucuacuuuaag

SEQ ID NO: 3656897 - RNA, 23 nt, Human
cugggauucuacuuuaagcacua

SEQ ID NO: 3656898 - RNA, 14 nt, Human
cugggcaaggaaaa

SEQ ID NO: 3656899 - RNA, 15 nt, Human
cugggcaaggaaaaa

SEQ ID NO: 3656900 - RNA, 18 nt, Human
cugggcaaggaaaaagaa

SEQ ID NO: 3656901 - RNA, 21 nt, Human
cugggcaaggaggccacguga

SEQ ID NO: 3656902 - RNA, 18 nt, Human
cugggcacacgcugcucu

SEQ ID NO: 3656903 - RNA, 21 nt, Human
cugggcacacgcugcucugcc

SEQ ID NO: 3656904 - RNA, 18 nt, Human
cugggcaccacaaaauau

SEQ ID NO: 3656905 - RNA, 21 nt, Human
cugggcacccucccacccggc

SEQ ID NO: 3656906 - RNA, 20 nt, Human
cugggcaccuggggaguggg

SEQ ID NO: 3656907 - RNA, 17 nt, Human
cugggcacugcucucac

SEQ ID NO: 3656908 - RNA, 18 nt, Human
cugggcacugcucucacc

SEQ ID NO: 3656909 - RNA, 13 nt, Human
cugggcacuuccc

SEQ ID NO: 3656910 - RNA, 16 nt, Human
cugggcacuucccugc

SEQ ID NO: 3656911 - RNA, 22 nt, Human
cugggcacuucccugcugccug

SEQ ID NO: 3656912 - RNA, 16 nt, Human
cugggcagaaggaaga

SEQ ID NO: 3656913 - RNA, 14 nt, Human
cugguaagaaaaag

SEQ ID NO: 3656914 - RNA, 15 nt, Human
cugguaagauuguua

SEQ ID NO: 3656915 - RNA, 23 nt, Human
cugguaagauuguuauuaaaugu

SEQ ID NO: 3656916 - RNA, 15 nt, Human
cugguaaucuugcuc

SEQ ID NO: 3656917 - RNA, 17 nt, Human
cugguaauuuguaucug

SEQ ID NO: 3656918 - RNA, 21 nt, Human
cugguaauuuguaucugaagg

SEQ ID NO: 3656919 - RNA, 16 nt, Human
cugguacaacggaggc

SEQ ID NO: 3656920 - RNA, 18 nt, Human
cugguacaacggaggccu

SEQ ID NO: 3656921 - RNA, 19 nt, Human
cugguacaauuucuuuugg

SEQ ID NO: 3656922 - RNA, 21 nt, Human
cugguacaauuucuuuugguu

SEQ ID NO: 3656923 - RNA, 14 nt, Human
cugguacccagcca

SEQ ID NO: 3656924 - RNA, 14 nt, Human
cugguacucaagcc

SEQ ID NO: 3656925 - RNA, 19 nt, Human
cugguacucccucucagga

SEQ ID NO: 3656926 - RNA, 21 nt, Human
cugguacucccucucaggauc

SEQ ID NO: 3656927 - RNA, 22 nt, Human
cugguagaagggaaagcccaua

SEQ ID NO: 3656928 - RNA, 15 nt, Human
cugguagauagaaau

SEQ ID NO: 3656929 - RNA, 16 nt, Human
cugguagcucaggugg

SEQ ID NO: 3656930 - RNA, 18 nt, Human
cugguaggaaagggcaag

SEQ ID NO: 3656931 - RNA, 15 nt, Human
cugguaucucagaaa

SEQ ID NO: 3656932 - RNA, 22 nt, Human
cugguaucucagaaagugccug

SEQ ID NO: 3656933 - RNA, 23 nt, Human
cugguaugaacuugaggacacau

SEQ ID NO: 3656934 - RNA, 15 nt, Human
cugguauggcugcag

SEQ ID NO: 3656935 - RNA, 17 nt, Human
cugguauggcugcaguc

SEQ ID NO: 3656936 - RNA, 13 nt, Human
cugguauuaaaug

SEQ ID NO: 3656937 - RNA, 14 nt, Human
cugguauuccugcc

SEQ ID NO: 3656938 - RNA, 15 nt, Human
cugguauucuguucu

SEQ ID NO: 3656939 - RNA, 17 nt, Human
cugguauuguucucaca

SEQ ID NO: 3656940 - RNA, 14 nt, Human
cugguauuuuaucu

SEQ ID NO: 3656941 - RNA, 22 nt, Human
cuggugucaccccagagccaca

SEQ ID NO: 3656942 - RNA, 18 nt, Human
cuggugucacuuacuguu

SEQ ID NO: 3656943 - RNA, 12 nt, Human
cugguguccuga

SEQ ID NO: 3656944 - RNA, 19 nt, Human
cugguguccugaccacccu

SEQ ID NO: 3656945 - RNA, 21 nt, Human
cugguguccugaccacccucc

SEQ ID NO: 3656946 - RNA, 23 nt, Human
cuggugucugcuuucuccauugu

SEQ ID NO: 3656947 - RNA, 16 nt, Human
cuggugugaacuaaac

SEQ ID NO: 3656948 - RNA, 16 nt, Human
cuggugugaccugagg

SEQ ID NO: 3656949 - RNA, 17 nt, Human
cuggugugguacagaga

SEQ ID NO: 3656950 - RNA, 19 nt, Human
cuggugugguacagagaag

SEQ ID NO: 3656951 - RNA, 13 nt, Human
cugguguuaacag

SEQ ID NO: 3656952 - RNA, 23 nt, Human
cugguguuucuagcacuggccug

SEQ ID NO: 3656953 - RNA, 24 nt, Human
cugguguuucuagcacuggccugc

SEQ ID NO: 3656954 - RNA, 13 nt, Human
cugguguuucuug

SEQ ID NO: 3656955 - RNA, 23 nt, Human
cugguuagaaaugcagaauccua

SEQ ID NO: 3656956 - RNA, 16 nt, Human
cugguuagcucagccc

SEQ ID NO: 3656957 - RNA, 22 nt, Human
cugguuagcucagccccagccc

SEQ ID NO: 3656958 - RNA, 14 nt, Human
cugguuccaggguc

SEQ ID NO: 3656959 - RNA, 15 nt, Human
cugguuccagggucc

SEQ ID NO: 3656960 - RNA, 18 nt, Human
cugguuccagggucccuc

SEQ ID NO: 3656961 - RNA, 22 nt, Human
cugguuccagggucccucugug

SEQ ID NO: 3656962 - RNA, 23 nt, Human
cugguuccagggucccucugugu

SEQ ID NO: 3656963 - RNA, 13 nt, Human
cugguuccucccc

SEQ ID NO: 3656964 - RNA, 20 nt, Human
cugguuccugcuagaaaugg

SEQ ID NO: 3656965 - RNA, 18 nt, Human
cugguucuauuuaaugga

SEQ ID NO: 3656966 - RNA, 17 nt, Human
cugguucucaaugaaaa

SEQ ID NO: 3656967 - RNA, 16 nt, Human
cugguucucaauucca

SEQ ID NO: 3656968 - RNA, 17 nt, Human
cugguucucaauuccaa

SEQ ID NO: 3656969 - RNA, 12 nt, Human
cugguucucauc

SEQ ID NO: 3656970 - RNA, 13 nt, Human
cugguugaagaag

SEQ ID NO: 3656971 - RNA, 14 nt, Human
cugguugcugugug

SEQ ID NO: 3656972 - RNA, 15 nt, Human
cugguugcugugugg

SEQ ID NO: 3656973 - RNA, 18 nt, Human
cugguugcugugugguuu

SEQ ID NO: 3656974 - RNA, 17 nt, Human
cugguuggagagcuaga

SEQ ID NO: 3656975 - RNA, 21 nt, Human
cugguuggcucccgcggugcc

SEQ ID NO: 3656976 - RNA, 17 nt, Human
cugguugggcagccaga

SEQ ID NO: 3656977 - RNA, 21 nt, Human
cugguugguguugcagaaggu

SEQ ID NO: 3656978 - RNA, 14 nt, Human
cugguugucauuuu

SEQ ID NO: 3656979 - RNA, 15 nt, Human
cugguugucauuuuu

SEQ ID NO: 3656980 - RNA, 16 nt, Human
cugguuguuucuguuc

SEQ ID NO: 3656981 - RNA, 18 nt, Human
cugguuuacaggcccugc

SEQ ID NO: 3656982 - RNA, 18 nt, Human
cugguuucacuggcccaa

SEQ ID NO: 3656983 - RNA, 22 nt, Human
cugguuuccugcccugggaggc

SEQ ID NO: 3656984 - RNA, 16 nt, Human
cugguuucucauucuu

SEQ ID NO: 3656985 - RNA, 17 nt, Human
cugguuugaagaauguu

SEQ ID NO: 3656986 - RNA, 21 nt, Human
cugguuugacuccgcuggagg

SEQ ID NO: 3656987 - RNA, 13 nt, Human
cugguuuuaacaa

SEQ ID NO: 3656988 - RNA, 13 nt, Human
cugguuuugcuau

SEQ ID NO: 3656989 - RNA, 23 nt, Human
cugguuuuggcaucucuguccca

SEQ ID NO: 3656990 - RNA, 20 nt, Human
cugguuuuuaaccauugucu

SEQ ID NO: 3656991 - RNA, 19 nt, Human
cuguaaaaaaaaaaaaguu

SEQ ID NO: 3656992 - RNA, 19 nt, Human
cuguaaaaacacugaaaaa

SEQ ID NO: 3656993 - RNA, 16 nt, Human
cuguaaaacgcuguca

SEQ ID NO: 3656994 - RNA, 20 nt, Human
cuguaaaacuuuauuuuaua

SEQ ID NO: 3656995 - RNA, 17 nt, Human
cuguaaaauaaaagguc

SEQ ID NO: 3656996 - RNA, 10 nt, Human
cuguaaaauc

SEQ ID NO: 3656997 - RNA, 22 nt, Human
cuguaaaaugcaugauuuugua

SEQ ID NO: 3656998 - RNA, 15 nt, Human
cuguaaaauguggga

SEQ ID NO: 3656999 - RNA, 21 nt, Human
cuguaaaaugugggauuaugg

SEQ ID NO: 3657000 - RNA, 13 nt, Human
cuguaaacugugu

SEQ ID NO: 3657001 - RNA, 20 nt, Human
cuguaaacuguguauuccaa

SEQ ID NO: 3657002 - RNA, 18 nt, Human
cuguaaacuuuaucacuu

SEQ ID NO: 3657003 - RNA, 16 nt, Human
cuguaaagaaagagag

SEQ ID NO: 3657004 - RNA, 18 nt, Human
cuguaaagaaagagagaa

SEQ ID NO: 3657005 - RNA, 19 nt, Human
cuguaaagaaagagagaaa

SEQ ID NO: 3657006 - RNA, 20 nt, Human
cuguaaagaaagagagaaaa

SEQ ID NO: 3657007 - RNA, 22 nt, Human
cuguaaagaaagagagaaaaua

SEQ ID NO: 3657008 - RNA, 12 nt, Human
cuguaaagaugu

SEQ ID NO: 3657009 - RNA, 23 nt, Human
cuguaaagcuaaaauaaagaaau

SEQ ID NO: 3657010 - RNA, 12 nt, Human
cuguaaauacca

SEQ ID NO: 3657011 - RNA, 13 nt, Human
cuguaaauaccau

SEQ ID NO: 3657012 - RNA, 18 nt, Human
cuguaaaucuacacacgg

SEQ ID NO: 3657013 - RNA, 19 nt, Human
cuguaacacaagccacaga

SEQ ID NO: 3657014 - RNA, 18 nt, Human
cuguaacagguauuuugu

SEQ ID NO: 3657015 - RNA, 21 nt, Human
cuguaacaucacuauccaugc

SEQ ID NO: 3657016 - RNA, 22 nt, Human
cuguaaccucuucagaggcccu

SEQ ID NO: 3657017 - RNA, 16 nt, Human
cuguaacgugugcugu

SEQ ID NO: 3657018 - RNA, 16 nt, Human
cuguaacuacuuuaua

SEQ ID NO: 3657019 - RNA, 15 nt, Human
cuguaacugccaggc

SEQ ID NO: 3657020 - RNA, 16 nt, Human
cuguaacugccaggcu

SEQ ID NO: 3657021 - RNA, 20 nt, Human
cuguaacuuccaaauaaaua

SEQ ID NO: 3657022 - RNA, 17 nt, Human
cuguaagaagagacugg

SEQ ID NO: 3657023 - RNA, 20 nt, Human
cuguaagaagagacugggaa

SEQ ID NO: 3657024 - RNA, 18 nt, Human
cuguaagaauaauuuaua

SEQ ID NO: 3657025 - RNA, 12 nt, Human
cuguaagacauu

SEQ ID NO: 3657026 - RNA, 18 nt, Human
cuguaagaugucuguuug

SEQ ID NO: 3657027 - RNA, 21 nt, Human
cuguaagaugucuguuugcug

SEQ ID NO: 3657028 - RNA, 22 nt, Human
cuguaagaugucuguuugcuga

SEQ ID NO: 3657029 - RNA, 15 nt, Human
cuguaagccaaagaa

SEQ ID NO: 3657030 - RNA, 22 nt, Human
cuguaagccaaagaaaugaaca

SEQ ID NO: 3657031 - RNA, 23 nt, Human
cuguaagccaaagaaaugaacau

SEQ ID NO: 3657032 - RNA, 17 nt, Human
cuguaagccugcaagcc

SEQ ID NO: 3657033 - RNA, 13 nt, Human
cuguaagcucuuu

SEQ ID NO: 3657034 - RNA, 17 nt, Human
cuguaagcucuuugaaa

SEQ ID NO: 3657035 - RNA, 14 nt, Human
cuguaagcugaagu

SEQ ID NO: 3657036 - RNA, 18 nt, Human
cuguaaggcaaucauggu

SEQ ID NO: 3657037 - RNA, 20 nt, Human
cuguaaggcucuagaucaua

SEQ ID NO: 3657038 - RNA, 21 nt, Human
cuguaaguuacaugaaggcag

SEQ ID NO: 3657039 - RNA, 16 nt, Human
cuguaaguuuugaauu

SEQ ID NO: 3657040 - RNA, 13 nt, Human
cuguaauaaauau

SEQ ID NO: 3657041 - RNA, 22 nt, Human
cuguaauaauaccucaauguuu

SEQ ID NO: 3657042 - RNA, 14 nt, Human
cuguaauauuuaca

SEQ ID NO: 3657043 - RNA, 20 nt, Human
cuguaaucauuuguuuacau

SEQ ID NO: 3657044 - RNA, 14 nt, Human
cuguaaucccagca

SEQ ID NO: 3657045 - RNA, 19 nt, Human
cuguaaucccagcuacuca

SEQ ID NO: 3657046 - RNA, 19 nt, Human
cuguaauccuagcacuuug

SEQ ID NO: 3657047 - RNA, 19 nt, Human
cuguaaucucguuucaaaa

SEQ ID NO: 3657048 - RNA, 20 nt, Human
cuguaaucucguuucaaaaa

SEQ ID NO: 3657049 - RNA, 17 nt, Human
cuguaaucuuguugaua

SEQ ID NO: 3657050 - RNA, 20 nt, Human
cuguaaugaaccgcugaaua

SEQ ID NO: 3657051 - RNA, 21 nt, Human
cuguaaugaaucuaagcagca

SEQ ID NO: 3657052 - RNA, 17 nt, Human
cuguaauuauuugaaug

SEQ ID NO: 3657053 - RNA, 15 nt, Human
cuguaauucagguuu

SEQ ID NO: 3657054 - RNA, 18 nt, Human
cuguaauugaauauuauu

SEQ ID NO: 3657055 - RNA, 19 nt, Human
cuguaauugaauauuauuc

SEQ ID NO: 3657056 - RNA, 12 nt, Human
cuguaauugugu

SEQ ID NO: 3657057 - RNA, 15 nt, Human
cuguaugauucccag

SEQ ID NO: 3657058 - RNA, 21 nt, Human
cuguauggaauacaauguaau

SEQ ID NO: 3657059 - RNA, 16 nt, Human
cuguauguauuaguga

SEQ ID NO: 3657060 - RNA, 17 nt, Human
cuguauguauuagugau

SEQ ID NO: 3657061 - RNA, 12 nt, Human
cuguaugucaga

SEQ ID NO: 3657062 - RNA, 20 nt, Human
cuguaugucucgugguagga

SEQ ID NO: 3657063 - RNA, 12 nt, Human
cuguaugucugu

SEQ ID NO: 3657064 - RNA, 17 nt, Human
cuguaugucugucauug

SEQ ID NO: 3657065 - RNA, 18 nt, Human
cuguaugugcuguaauuu

SEQ ID NO: 3657066 - RNA, 18 nt, Human
cuguauguuauagaacuu

SEQ ID NO: 3657067 - RNA, 15 nt, Human
cuguauguuguccaa

SEQ ID NO: 3657068 - RNA, 18 nt, Human
cuguauguuguccaauug

SEQ ID NO: 3657069 - RNA, 17 nt, Human
cuguauuacauaaauaa

SEQ ID NO: 3657070 - RNA, 19 nt, Human
cuguauuagucacagagau

SEQ ID NO: 3657071 - RNA, 16 nt, Human
cuguauucagacagau

SEQ ID NO: 3657072 - RNA, 12 nt, Human
cuguauucagca

SEQ ID NO: 3657073 - RNA, 18 nt, Human
cuguauucccauaucaaa

SEQ ID NO: 3657074 - RNA, 13 nt, Human
cuguauucucaaa

SEQ ID NO: 3657075 - RNA, 17 nt, Human
cuguauugaaucaugua

SEQ ID NO: 3657076 - RNA, 15 nt, Human
cuguauugaugacag

SEQ ID NO: 3657077 - RNA, 17 nt, Human
cuguauuuaaaaauaga

SEQ ID NO: 3657078 - RNA, 18 nt, Human
cuguauuuaaaaauagaa

SEQ ID NO: 3657079 - RNA, 15 nt, Human
cuguauuuaagcaaa

SEQ ID NO: 3657080 - RNA, 17 nt, Human
cuguauuuaugugugag

SEQ ID NO: 3657081 - RNA, 23 nt, Human
cuguauuuaugugugaggagcug

SEQ ID NO: 3657082 - RNA, 14 nt, Human
cuguauuucaugug

SEQ ID NO: 3657083 - RNA, 15 nt, Human
cuguauuucaugugg

SEQ ID NO: 3657084 - RNA, 16 nt, Human
cuguauuugaaagugc

SEQ ID NO: 3657085 - RNA, 21 nt, Human
cuguauuugaaagugccuuug

SEQ ID NO: 3657086 - RNA, 18 nt, Human
cuguauuugaaauaagaa

SEQ ID NO: 3657087 - RNA, 16 nt, Human
cuguauuugugacuaa

SEQ ID NO: 3657088 - RNA, 17 nt, Human
cuguauuugugacuaau

SEQ ID NO: 3657089 - RNA, 20 nt, Human
cuguauuugugacuaauugu

SEQ ID NO: 3657090 - RNA, 23 nt, Human
cuguauuugugacuaauuguaua

SEQ ID NO: 3657091 - RNA, 15 nt, Human
cuguauuuguuccca

SEQ ID NO: 3657092 - RNA, 17 nt, Human
cuguauuuguucccaag

SEQ ID NO: 3657093 - RNA, 18 nt, Human
cuguauuuguucccaaga

SEQ ID NO: 3657094 - RNA, 20 nt, Human
cuguauuuuaaaagaaugau

SEQ ID NO: 3657095 - RNA, 21 nt, Human
cuguauuuuuaccuuuuuccu

SEQ ID NO: 3657096 - RNA, 21 nt, Human
cugucaaaacaaguuuuucug

SEQ ID NO: 3657097 - RNA, 21 nt, Human
cugucaaaaguuggacuaaau

SEQ ID NO: 3657098 - RNA, 17 nt, Human
cugucaaaauaauuuua

SEQ ID NO: 3657099 - RNA, 15 nt, Human
cugucaaacauuagu

SEQ ID NO: 3657100 - RNA, 21 nt, Human
cugucaaacauuaguacuuua

SEQ ID NO: 3657101 - RNA, 23 nt, Human
cugucaaacauuaguacuuuaua

SEQ ID NO: 3657102 - RNA, 15 nt, Human
cugucaaagaaucaa

SEQ ID NO: 3657103 - RNA, 12 nt, Human
cugucaagaaga

SEQ ID NO: 3657104 - RNA, 14 nt, Human
cugucaagaagaug

SEQ ID NO: 3657105 - RNA, 23 nt, Human
cuggucaaacaaacucucugaac

SEQ ID NO: 3657106 - RNA, 16 nt, Human
cuggucaaccuccugg

SEQ ID NO: 3657107 - RNA, 17 nt, Human
cuggucaaccuccugga

SEQ ID NO: 3657108 - RNA, 19 nt, Human
cuggucaaccuccuggaca

SEQ ID NO: 3657109 - RNA, 19 nt, Human
cuggucaaucaacacuacc

SEQ ID NO: 3657110 - RNA, 15 nt, Human
cuggucacagccucc

SEQ ID NO: 3657111 - RNA, 17 nt, Human
cuggucacagccuccuc

SEQ ID NO: 3657112 - RNA, 20 nt, Human
cuggucacaggacucugccu

SEQ ID NO: 3657113 - RNA, 22 nt, Human
cuggucacaggacucugccucc

SEQ ID NO: 3657114 - RNA, 23 nt, Human
cuggucaccuaggaagccucaga

SEQ ID NO: 3657115 - RNA, 14 nt, Human
cuggucacugccau

SEQ ID NO: 3657116 - RNA, 17 nt, Human
cuggucacuucuucugu

SEQ ID NO: 3657117 - RNA, 22 nt, Human
cugguccacagggcaccugcca

SEQ ID NO: 3657118 - RNA, 17 nt, Human
cugguccagggaagcug

SEQ ID NO: 3657119 - RNA, 21 nt, Human
cugguccagggaagcuggccg

SEQ ID NO: 3657120 - RNA, 22 nt, Human
cugguccagggaagcuggccga

SEQ ID NO: 3657121 - RNA, 15 nt, Human
cugguccauagagag

SEQ ID NO: 3657122 - RNA, 14 nt, Human
cuggucccacgagg

SEQ ID NO: 3657123 - RNA, 13 nt, Human
cuggucccacuca

SEQ ID NO: 3657124 - RNA, 15 nt, Human
cuggucccacucagu

SEQ ID NO: 3657125 - RNA, 23 nt, Human
cuggucccuguuuucccacgagg

SEQ ID NO: 3657126 - RNA, 16 nt, Human
cugguccggacacucc

SEQ ID NO: 3657127 - RNA, 20 nt, Human
cugguccggacacuccuaga

SEQ ID NO: 3657128 - RNA, 13 nt, Human
cugguccuaccca

SEQ ID NO: 3657129 - RNA, 17 nt, Human
cugguccuacccauccc

SEQ ID NO: 3657130 - RNA, 20 nt, Human
cugguccuaggcuggaagga

SEQ ID NO: 3657131 - RNA, 17 nt, Human
cugguccuauggccuca

SEQ ID NO: 3657132 - RNA, 14 nt, Human
cugguccucacacu

SEQ ID NO: 3657133 - RNA, 19 nt, Human
cugguccugagggucccca

SEQ ID NO: 3657134 - RNA, 21 nt, Human
cugguccugaggguccccacc

SEQ ID NO: 3657135 - RNA, 19 nt, Human
cugguccuuccaggccccc

SEQ ID NO: 3657136 - RNA, 15 nt, Human
cugguccuuuuuggu

SEQ ID NO: 3657137 - RNA, 21 nt, Human
cuggucguaaacaucucagag

SEQ ID NO: 3657138 - RNA, 18 nt, Human
cuggucucaaacuccuga

SEQ ID NO: 3657139 - RNA, 23 nt, Human
cuggucucaaacucuugaccuca

SEQ ID NO: 3657140 - RNA, 13 nt, Human
cuggucucacccu

SEQ ID NO: 3657141 - RNA, 13 nt, Human
cuggucucagcag

SEQ ID NO: 3657142 - RNA, 20 nt, Human
cuggucucagcagcgaccac

SEQ ID NO: 3657143 - RNA, 21 nt, Human
cuggucucagcagcgaccacc

SEQ ID NO: 3657144 - RNA, 22 nt, Human
cuggucucagcagcgaccaccc

SEQ ID NO: 3657145 - RNA, 17 nt, Human
cuggucuccugccccca

SEQ ID NO: 3657146 - RNA, 18 nt, Human
cuggucuccugcccccac

SEQ ID NO: 3657147 - RNA, 16 nt, Human
cuggucucuaggcugg

SEQ ID NO: 3657148 - RNA, 18 nt, Human
cuggucucuaggcugggg

SEQ ID NO: 3657149 - RNA, 23 nt, Human
cuggucucucuaugccucucuac

SEQ ID NO: 3657150 - RNA, 12 nt, Human
cuggucucuggu

SEQ ID NO: 3657151 - RNA, 20 nt, Human
cuggucugaugacuugcuua

SEQ ID NO: 3657152 - RNA, 16 nt, Human
cuggucugggugcccc

SEQ ID NO: 3657153 - RNA, 17 nt, Human
cuggucuuccuuuuugg

SEQ ID NO: 3657154 - RNA, 22 nt, Human
cuggucuugaaguccuggcuuc

SEQ ID NO: 3657155 - RNA, 14 nt, Human
cuggucuugagaug

SEQ ID NO: 3657156 - RNA, 14 nt, Human
cuggucuuguaaga

SEQ ID NO: 3657157 - RNA, 18 nt, Human
cuggucuuguggaauugg

SEQ ID NO: 3657158 - RNA, 15 nt, Human
cuggucuuguuagaa

SEQ ID NO: 3657159 - RNA, 18 nt, Human
cuggucuuugagcuccca

SEQ ID NO: 3657160 - RNA, 20 nt, Human
cuggugaagcucacuucugg

SEQ ID NO: 3657161 - RNA, 20 nt, Human
cuggugaauggccuuccuuc

SEQ ID NO: 3657162 - RNA, 22 nt, Human
cuggugacaugucuuuucuugc

SEQ ID NO: 3657163 - RNA, 15 nt, Human
cuggugacugauucu

SEQ ID NO: 3657164 - RNA, 22 nt, Human
cuggugacugcgaucuucagag

SEQ ID NO: 3657165 - RNA, 21 nt, Human
cuggugacuuuccucuuuggu

SEQ ID NO: 3657166 - RNA, 22 nt, Human
cuggugagagggccgggcagag

SEQ ID NO: 3657167 - RNA, 13 nt, Human
cuggugaggccuu

SEQ ID NO: 3657168 - RNA, 16 nt, Human
cuggugaggccuugcu

SEQ ID NO: 3657169 - RNA, 24 nt, Human
cuggugagucaccacuucagggcu

SEQ ID NO: 3657170 - RNA, 19 nt, Human
cuggugagucuuggcggca

SEQ ID NO: 3657171 - RNA, 15 nt, Human
cuggugauauaucuc

SEQ ID NO: 3657172 - RNA, 20 nt, Human
cuggugaugcgcaguugcug

SEQ ID NO: 3657173 - RNA, 19 nt, Human
cuggugcacagccacuccc

SEQ ID NO: 3657174 - RNA, 16 nt, Human
cuggugcacuggcccc

SEQ ID NO: 3657175 - RNA, 19 nt, Human
cuggugcacuggccccacc

SEQ ID NO: 3657176 - RNA, 17 nt, Human
cuggugcacuuuguaaa

SEQ ID NO: 3657177 - RNA, 19 nt, Human
cuggugcacuuuguaaauu

SEQ ID NO: 3657178 - RNA, 17 nt, Human
cuggugcagggccucca

SEQ ID NO: 3657179 - RNA, 15 nt, Human
cuggugcauuacaga

SEQ ID NO: 3657180 - RNA, 16 nt, Human
cuggugcauuacagag

SEQ ID NO: 3657181 - RNA, 18 nt, Human
cuggugcauuacagagag

SEQ ID NO: 3657182 - RNA, 15 nt, Human
cuggugccaauuuca

SEQ ID NO: 3657183 - RNA, 16 nt, Human
cuggugccaauuucaa

SEQ ID NO: 3657184 - RNA, 18 nt, Human
cuggugccaauuucaagu

SEQ ID NO: 3657185 - RNA, 13 nt, Human
cuggugccagccu

SEQ ID NO: 3657186 - RNA, 21 nt, Human
cuggugccccccaccccugga

SEQ ID NO: 3657187 - RNA, 14 nt, Human
cuggugcccggaga

SEQ ID NO: 3657188 - RNA, 14 nt, Human
cuggugccuccaga

SEQ ID NO: 3657189 - RNA, 15 nt, Human
cuggugccuggcucu

SEQ ID NO: 3657190 - RNA, 17 nt, Human
cuggugcgaauggacuu

SEQ ID NO: 3657191 - RNA, 14 nt, Human
cuggugcggcuggc

SEQ ID NO: 3657192 - RNA, 21 nt, Human
cuggugcggcuggccauggag

SEQ ID NO: 3657193 - RNA, 19 nt, Human
cuggugcuauaggcuggag

SEQ ID NO: 3657194 - RNA, 21 nt, Human
cuggugcuauaggcuggagaa

SEQ ID NO: 3657195 - RNA, 22 nt, Human
cuggugcuauaggcuggagaag

SEQ ID NO: 3657196 - RNA, 12 nt, Human
cuggugcugcca

SEQ ID NO: 3657197 - RNA, 20 nt, Human
cuggugcugccacacuucag

SEQ ID NO: 3657198 - RNA, 20 nt, Human
cuggugcuggauauuuucaa

SEQ ID NO: 3657199 - RNA, 20 nt, Human
cuggugcuguggccagggug

SEQ ID NO: 3657200 - RNA, 18 nt, Human
cugguggagaaagcacug

SEQ ID NO: 3657201 - RNA, 15 nt, Human
cuguccaucugcccg

SEQ ID NO: 3657202 - RNA, 21 nt, Human
cuguccauuuuuauucagggg

SEQ ID NO: 3657203 - RNA, 17 nt, Human
cugucccauggacacuc

SEQ ID NO: 3657204 - RNA, 14 nt, Human
cuguccccagccug

SEQ ID NO: 3657205 - RNA, 15 nt, Human
cuguccccccacucc

SEQ ID NO: 3657206 - RNA, 23 nt, Human
cugucccccugagaucagagucc

SEQ ID NO: 3657207 - RNA, 17 nt, Human
cuguccccgcacugggc

SEQ ID NO: 3657208 - RNA, 23 nt, Human
cuguccccgcagcccuggcaggg

SEQ ID NO: 3657209 - RNA, 15 nt, Human
cuguccccucuugcc

SEQ ID NO: 3657210 - RNA, 15 nt, Human
cuguccccugcuaca

SEQ ID NO: 3657211 - RNA, 21 nt, Human
cuguccccugcuacaccuauu

SEQ ID NO: 3657212 - RNA, 16 nt, Human
cuguccccuucucuca

SEQ ID NO: 3657213 - RNA, 19 nt, Human
cuguccccuucucucaucu

SEQ ID NO: 3657214 - RNA, 11 nt, Human
cugucccuagg

SEQ ID NO: 3657215 - RNA, 17 nt, Human
cugucccuaggucagcu

SEQ ID NO: 3657216 - RNA, 15 nt, Human
cugucccucccaccu

SEQ ID NO: 3657217 - RNA, 18 nt, Human
cugucccucccaccucug

SEQ ID NO: 3657218 - RNA, 23 nt, Human
cugucccucccaccucugugacc

SEQ ID NO: 3657219 - RNA, 12 nt, Human
cugucccuccgg

SEQ ID NO: 3657220 - RNA, 15 nt, Human
cugucccuccuggug

SEQ ID NO: 3657221 - RNA, 15 nt, Human
cugucccucucaggc

SEQ ID NO: 3657222 - RNA, 15 nt, Human
cugucccugaaaccu

SEQ ID NO: 3657223 - RNA, 15 nt, Human
cugucccugcccuuc

SEQ ID NO: 3657224 - RNA, 14 nt, Human
cugucccugccuca

SEQ ID NO: 3657225 - RNA, 14 nt, Human
cugucccuggccau

SEQ ID NO: 3657226 - RNA, 16 nt, Human
cugucccuggccaucu

SEQ ID NO: 3657227 - RNA, 22 nt, Human
cugucccuuacgugaguccugg

SEQ ID NO: 3657228 - RNA, 16 nt, Human
cugucccuucucuuaa

SEQ ID NO: 3657229 - RNA, 21 nt, Human
cugucccuucucuuaauuuaa

SEQ ID NO: 3657230 - RNA, 17 nt, Human
cugucccuucugucccu

SEQ ID NO: 3657231 - RNA, 22 nt, Human
cugucccuugccccccuggccu

SEQ ID NO: 3657232 - RNA, 23 nt, Human
cugucccuugccccccuggccuc

SEQ ID NO: 3657233 - RNA, 13 nt, Human
cugucccuugccu

SEQ ID NO: 3657234 - RNA, 20 nt, Human
cugucccuugccucaaugcc

SEQ ID NO: 3657235 - RNA, 21 nt, Human
cugucccuugccucaaugcca

SEQ ID NO: 3657236 - RNA, 21 nt, Human
cuguccguucacauguguggu

SEQ ID NO: 3657237 - RNA, 17 nt, Human
cuguccuacucuguguc

SEQ ID NO: 3657238 - RNA, 23 nt, Human
cuguccuaugaaugcuuugcauu

SEQ ID NO: 3657239 - RNA, 21 nt, Human
cuguccuauuauauucauucu

SEQ ID NO: 3657240 - RNA, 19 nt, Human
cuguccucacugcucccug

SEQ ID NO: 3657241 - RNA, 18 nt, Human
cuguccucagccuugcca

SEQ ID NO: 3657242 - RNA, 20 nt, Human
cuguccucagccuugccaga

SEQ ID NO: 3657243 - RNA, 15 nt, Human
cuguccucagcuucu

SEQ ID NO: 3657244 - RNA, 17 nt, Human
cuguccucagcuucuua

SEQ ID NO: 3657245 - RNA, 16 nt, Human
cuguccucagguggcc

SEQ ID NO: 3657246 - RNA, 18 nt, Human
cuguccucagguggccau

SEQ ID NO: 3657247 - RNA, 15 nt, Human
cuguccuccaacacc

SEQ ID NO: 3657248 - RNA, 18 nt, Human
cuguccucccauccccug

SEQ ID NO: 3657249 - RNA, 19 nt, Human
cuguccucccauccccugg

SEQ ID NO: 3657250 - RNA, 14 nt, Human
cuguccucccucca

SEQ ID NO: 3657251 - RNA, 15 nt, Human
cuguccucccuccac

SEQ ID NO: 3657252 - RNA, 13 nt, Human
cuguccucucccc

SEQ ID NO: 3657253 - RNA, 14 nt, Human
cuguccucuccccu

SEQ ID NO: 3657254 - RNA, 16 nt, Human
cuguccucuccccucc

SEQ ID NO: 3657255 - RNA, 19 nt, Human
cuguccucuccccuccagc

SEQ ID NO: 3657256 - RNA, 22 nt, Human
cuguccucuccccuccagccuu

SEQ ID NO: 3657257 - RNA, 15 nt, Human
cuguccucuucugca

SEQ ID NO: 3657258 - RNA, 20 nt, Human
cuguccucuuucagaaaaca

SEQ ID NO: 3657259 - RNA, 15 nt, Human
cuguccucuuucagc

SEQ ID NO: 3657260 - RNA, 20 nt, Human
cuguccucuuucagcuccug

SEQ ID NO: 3657261 - RNA, 16 nt, Human
cuguccugaaggccug

SEQ ID NO: 3657262 - RNA, 12 nt, Human
cuguccugaucu

SEQ ID NO: 3657263 - RNA, 17 nt, Human
cuguccugaucugugau

SEQ ID NO: 3657264 - RNA, 20 nt, Human
cuguccugauggucagcucc

SEQ ID NO: 3657265 - RNA, 22 nt, Human
cuguccugauggucagcucccu

SEQ ID NO: 3657266 - RNA, 15 nt, Human
cuguccugcagcaaa

SEQ ID NO: 3657267 - RNA, 16 nt, Human
cuguccugcagcaaac

SEQ ID NO: 3657268 - RNA, 22 nt, Human
cuguccugccacccagccccag

SEQ ID NO: 3657269 - RNA, 17 nt, Human
cuguccugccuguggcc

SEQ ID NO: 3657270 - RNA, 18 nt, Human
cuguccugccuguggcca

SEQ ID NO: 3657271 - RNA, 16 nt, Human
cuguccugcuccacag

SEQ ID NO: 3657272 - RNA, 18 nt, Human
cuguccugcuccacagug

SEQ ID NO: 3657273 - RNA, 14 nt, Human
cuguccugcuucug

SEQ ID NO: 3657274 - RNA, 15 nt, Human
cuguccugcuucuga

SEQ ID NO: 3657275 - RNA, 21 nt, Human
cuguccugggagugagcuggu

SEQ ID NO: 3657276 - RNA, 14 nt, Human
cuguccugggccug

SEQ ID NO: 3657277 - RNA, 18 nt, Human
cuguccugggccugcaga

SEQ ID NO: 3657278 - RNA, 13 nt, Human
cuguccugggcgc

SEQ ID NO: 3657279 - RNA, 19 nt, Human
cuguccugggcgcccugga

SEQ ID NO: 3657280 - RNA, 14 nt, Human
cuguccugggcugg

SEQ ID NO: 3657281 - RNA, 18 nt, Human
cuguccugggcugguggc

SEQ ID NO: 3657282 - RNA, 17 nt, Human
cuguccuggugguauuu

SEQ ID NO: 3657283 - RNA, 14 nt, Human
cuguccuguaacug

SEQ ID NO: 3657284 - RNA, 12 nt, Human
cuguccuguccu

SEQ ID NO: 3657285 - RNA, 12 nt, Human
cuguccugugac

SEQ ID NO: 3657286 - RNA, 22 nt, Human
cuguccugugagguuucccaau

SEQ ID NO: 3657287 - RNA, 17 nt, Human
cuguccuuacccaucug

SEQ ID NO: 3657288 - RNA, 17 nt, Human
cuguccuucagauggaa

SEQ ID NO: 3657289 - RNA, 22 nt, Human
cuguccuuuccaguggccuggc

SEQ ID NO: 3657290 - RNA, 12 nt, Human
cuguccuuuccu

SEQ ID NO: 3657291 - RNA, 13 nt, Human
cuguccuuuccuu

SEQ ID NO: 3657292 - RNA, 13 nt, Human
cuguccuuucuag

SEQ ID NO: 3657293 - RNA, 20 nt, Human
cuguccuuucuagagcacug

SEQ ID NO: 3657294 - RNA, 19 nt, Human
cuguccuuuuuccucucca

SEQ ID NO: 3657295 - RNA, 13 nt, Human
cugucgagacacu

SEQ ID NO: 3657296 - RNA, 14 nt, Human
cugucgagccuggg

SEQ ID NO: 3657297 - RNA, 22 nt, Human
cugucgaguucggcucugggug

SEQ ID NO: 3657298 - RNA, 15 nt, Human
cugucgauguaggca

SEQ ID NO: 3657299 - RNA, 15 nt, Human
cugucgauuagacug

SEQ ID NO: 3657300 - RNA, 13 nt, Human
cugucgcccaguc

SEQ ID NO: 3657301 - RNA, 22 nt, Human
cugucggcgcugccccaucucc

SEQ ID NO: 3657302 - RNA, 15 nt, Human
cugucgggcuuugug

SEQ ID NO: 3657303 - RNA, 21 nt, Human
cugucgugauggggcaagggc

SEQ ID NO: 3657304 - RNA, 18 nt, Human
cugucuaaaaaacaaaac

SEQ ID NO: 3657305 - RNA, 17 nt, Human
cuguggaugagcccuca

SEQ ID NO: 3657306 - RNA, 20 nt, Human
cuguggaugagcccucagaa

SEQ ID NO: 3657307 - RNA, 23 nt, Human
cuguggaugcugcugccccugca

SEQ ID NO: 3657308 - RNA, 15 nt, Human
cuguggcacuugccu

SEQ ID NO: 3657309 - RNA, 17 nt, Human
cuguggcagaguuacag

SEQ ID NO: 3657310 - RNA, 18 nt, Human
cuguggcaggcagcgcca

SEQ ID NO: 3657311 - RNA, 23 nt, Human
cuguggcaggccagcugugguuu

SEQ ID NO: 3657312 - RNA, 20 nt, Human
cuguggcaguaaagagaaac

SEQ ID NO: 3657313 - RNA, 17 nt, Human
cuguggcauaaauugca

SEQ ID NO: 3657314 - RNA, 13 nt, Human
cuguggccaaagg

SEQ ID NO: 3657315 - RNA, 15 nt, Human
cuguggccaggaggu

SEQ ID NO: 3657316 - RNA, 16 nt, Human
cuguggccccacccug

SEQ ID NO: 3657317 - RNA, 17 nt, Human
cuguggccccacccugg

SEQ ID NO: 3657318 - RNA, 19 nt, Human
cuguggcccuggcucugcu

SEQ ID NO: 3657319 - RNA, 20 nt, Human
cuguggccguuaucuggaag

SEQ ID NO: 3657320 - RNA, 16 nt, Human
cuguggccugccaguc

SEQ ID NO: 3657321 - RNA, 13 nt, Human
cuguggccugggc

SEQ ID NO: 3657322 - RNA, 17 nt, Human
cuguggccuguguccca

SEQ ID NO: 3657323 - RNA, 22 nt, Human
cuguggccugugucccaugacc

SEQ ID NO: 3657324 - RNA, 23 nt, Human
cuguggcgagccauuugucccaa

SEQ ID NO: 3657325 - RNA, 21 nt, Human
cuguggcgccgucuccagggg

SEQ ID NO: 3657326 - RNA, 18 nt, Human
cuguggcggugccugggu

SEQ ID NO: 3657327 - RNA, 14 nt, Human
cuguggcuggugag

SEQ ID NO: 3657328 - RNA, 13 nt, Human
cuguggcugugga

SEQ ID NO: 3657329 - RNA, 20 nt, Human
cuguggcuucccaugucuuu

SEQ ID NO: 3657330 - RNA, 18 nt, Human
cuguggcuuucagccucu

SEQ ID NO: 3657331 - RNA, 19 nt, Human
cuguggcuuucagccucug

SEQ ID NO: 3657332 - RNA, 16 nt, Human
cugugggaaggccagc

SEQ ID NO: 3657333 - RNA, 20 nt, Human
cugugggaaggccagcugcc

SEQ ID NO: 3657334 - RNA, 17 nt, Human
cugugggaccccaggcc

SEQ ID NO: 3657335 - RNA, 18 nt, Human
cugugggaccccaggccc

SEQ ID NO: 3657336 - RNA, 14 nt, Human
cugugggaugggau

SEQ ID NO: 3657337 - RNA, 14 nt, Human
cugugggcaauuua

SEQ ID NO: 3657338 - RNA, 22 nt, Human
cugugggcacgcugugggcagg

SEQ ID NO: 3657339 - RNA, 15 nt, Human
cugugggccagauug

SEQ ID NO: 3657340 - RNA, 17 nt, Human
cugugggcgggcccagc

SEQ ID NO: 3657341 - RNA, 22 nt, Human
cugugggcgugagaccugcccc

SEQ ID NO: 3657342 - RNA, 13 nt, Human
cugugggcucccu

SEQ ID NO: 3657343 - RNA, 14 nt, Human
cugugggcugcacu

SEQ ID NO: 3657344 - RNA, 15 nt, Human
cugugggcugcacuc

SEQ ID NO: 3657345 - RNA, 18 nt, Human
cugugggcugcacucugu

SEQ ID NO: 3657346 - RNA, 17 nt, Human
cuguuaccauuggaaau

SEQ ID NO: 3657347 - RNA, 22 nt, Human
cuguuaccauuggaaauuucac

SEQ ID NO: 3657348 - RNA, 17 nt, Human
cuguuacugucuucagu

SEQ ID NO: 3657349 - RNA, 21 nt, Human
cuguuacuugaaauaccagug

SEQ ID NO: 3657350 - RNA, 14 nt, Human
cuguuagaacacua

SEQ ID NO: 3657351 - RNA, 16 nt, Human
cuguuagaacacuauu

SEQ ID NO: 3657352 - RNA, 19 nt, Human
cuguuagaacacuauuuuc

SEQ ID NO: 3657353 - RNA, 20 nt, Human
cuguuagcacuguugaugua

SEQ ID NO: 3657354 - RNA, 15 nt, Human
cuguuagcuguuauu

SEQ ID NO: 3657355 - RNA, 21 nt, Human
cuguuagcuuuuuaaaacauu

SEQ ID NO: 3657356 - RNA, 14 nt, Human
cuguuagucauuug

SEQ ID NO: 3657357 - RNA, 18 nt, Human
cuguuauagguccuuuag

SEQ ID NO: 3657358 - RNA, 21 nt, Human
cuguuauagguccuuuagaaa

SEQ ID NO: 3657359 - RNA, 16 nt, Human
cuguuauauccccugc

SEQ ID NO: 3657360 - RNA, 18 nt, Human
cuguuauauccccugcua

SEQ ID NO: 3657361 - RNA, 19 nt, Human
cuguuaucaaaacuuucuu

SEQ ID NO: 3657362 - RNA, 19 nt, Human
cuguuaucauuuuuuccug

SEQ ID NO: 3657363 - RNA, 20 nt, Human
cuguuaucauuuuuuccugu

SEQ ID NO: 3657364 - RNA, 19 nt, Human
cuguuaugcugugacacau

SEQ ID NO: 3657365 - RNA, 12 nt, Human
cuguuauguacu

SEQ ID NO: 3657366 - RNA, 14 nt, Human
cuguuauguacugu

SEQ ID NO: 3657367 - RNA, 17 nt, Human
cuguuauguacuguacu

SEQ ID NO: 3657368 - RNA, 21 nt, Human
cuguuauguacuguacuaauu

SEQ ID NO: 3657369 - RNA, 20 nt, Human
cuguuaugucuguuuaagaa

SEQ ID NO: 3657370 - RNA, 14 nt, Human
cuguuauucuuugc

SEQ ID NO: 3657371 - RNA, 16 nt, Human
cuguuauuucuauuuu

SEQ ID NO: 3657372 - RNA, 17 nt, Human
cuguuauuucuauuuuu

SEQ ID NO: 3657373 - RNA, 20 nt, Human
cuguuauuuucaaguagcug

SEQ ID NO: 3657374 - RNA, 16 nt, Human
cuguucaaagcugccu

SEQ ID NO: 3657375 - RNA, 12 nt, Human
cuguucaagagc

SEQ ID NO: 3657376 - RNA, 12 nt, Human
cuguucaaggaa

SEQ ID NO: 3657377 - RNA, 22 nt, Human
cuguucaauguuuuuaaaaauc

SEQ ID NO: 3657378 - RNA, 12 nt, Human
cuguucacccac

SEQ ID NO: 3657379 - RNA, 14 nt, Human
cuguucacccacag

SEQ ID NO: 3657380 - RNA, 14 nt, Human
cuguucagcguuuu

SEQ ID NO: 3657381 - RNA, 22 nt, Human
cuguucagcuacucccacuccc

SEQ ID NO: 3657382 - RNA, 13 nt, Human
cuguucagcucca

SEQ ID NO: 3657383 - RNA, 14 nt, Human
cuguucagcuccag

SEQ ID NO: 3657384 - RNA, 22 nt, Human
cuguucagcuccagcucaccag

SEQ ID NO: 3657385 - RNA, 19 nt, Human
cuguucagcugguugaggu

SEQ ID NO: 3657386 - RNA, 21 nt, Human
cuguucagcugguugagguuu

SEQ ID NO: 3657387 - RNA, 20 nt, Human
cuguucagcuuuuauuccug

SEQ ID NO: 3657388 - RNA, 16 nt, Human
cuguucagugucccgg

SEQ ID NO: 3657389 - RNA, 17 nt, Human
cuguucaugaaagauuc

SEQ ID NO: 3657390 - RNA, 23 nt, Human
cuguucauggcagauguaggagg

SEQ ID NO: 3657391 - RNA, 16 nt, Human
cuguucauuccuccag

SEQ ID NO: 3657392 - RNA, 22 nt, Human
cuguucauuccuccagguauuc

SEQ ID NO: 3657393 - RNA, 11 nt, Human
cuguuccaaau

SEQ ID NO: 3657394 - RNA, 20 nt, Human
cuguuccaaauucaguuuca

SEQ ID NO: 3657395 - RNA, 22 nt, Human
cuguuccaaauucaguuucaua

SEQ ID NO: 3657396 - RNA, 23 nt, Human
cuguuccagccugcccucuucau

SEQ ID NO: 3657397 - RNA, 13 nt, Human
cuguuccccagag

SEQ ID NO: 3657398 - RNA, 15 nt, Human
cuguuccccagagaa

SEQ ID NO: 3657399 - RNA, 12 nt, Human
cuguucccccgc

SEQ ID NO: 3657400 - RNA, 15 nt, Human
cuguucccccuucac

SEQ ID NO: 3657401 - RNA, 23 nt, Human
cuguucccccuucacaaagccca

SEQ ID NO: 3657402 - RNA, 22 nt, Human
cuguuccccuaguaagugccuu

SEQ ID NO: 3657403 - RNA, 15 nt, Human
cuguuccccucacug

SEQ ID NO: 3657404 - RNA, 16 nt, Human
cuguuccccucucccu

SEQ ID NO: 3657405 - RNA, 17 nt, Human
cuguuccccucucccuu

SEQ ID NO: 3657406 - RNA, 20 nt, Human
cuguucccucugcuccugga

SEQ ID NO: 3657407 - RNA, 17 nt, Human
cuguuccugcugcuguc

SEQ ID NO: 3657408 - RNA, 18 nt, Human
cuguuccugcugcugucu

SEQ ID NO: 3657409 - RNA, 21 nt, Human
cuguuccuggcucagccucaa

SEQ ID NO: 3657410 - RNA, 18 nt, Human
cuguuccuucacauccug

SEQ ID NO: 3657411 - RNA, 20 nt, Human
cuguucuacccguuccaaaa

SEQ ID NO: 3657412 - RNA, 12 nt, Human
cuguucuaguuu

SEQ ID NO: 3657413 - RNA, 16 nt, Human
cuguucucccuucggu

SEQ ID NO: 3657414 - RNA, 17 nt, Human
cuguucucugcccucca

SEQ ID NO: 3657415 - RNA, 18 nt, Human
cuguucucugcccuccaa

SEQ ID NO: 3657416 - RNA, 19 nt, Human
cuguucucugcccuccaag

SEQ ID NO: 3657417 - RNA, 15 nt, Human
cuguucucuucuuca

SEQ ID NO: 3657418 - RNA, 16 nt, Human
cuguucucuucuucau

SEQ ID NO: 3657419 - RNA, 18 nt, Human
cuguucugauauuaauuu

SEQ ID NO: 3657420 - RNA, 17 nt, Human
cuguucugcacugaaaa

SEQ ID NO: 3657421 - RNA, 18 nt, Human
cuguucugcacugaaaag

SEQ ID NO: 3657422 - RNA, 13 nt, Human
cuguucugguaau

SEQ ID NO: 3657423 - RNA, 11 nt, Human
cuguucugugg

SEQ ID NO: 3657424 - RNA, 23 nt, Human
cuguucuguggaaaguguaaagc

SEQ ID NO: 3657425 - RNA, 19 nt, Human
cuguucugugguuccucug

SEQ ID NO: 3657426 - RNA, 14 nt, Human
cuguucugugucuu

SEQ ID NO: 3657427 - RNA, 15 nt, Human
cuguucuguuucaag

SEQ ID NO: 3657428 - RNA, 17 nt, Human
cuguucuguuuugccug

SEQ ID NO: 3657429 - RNA, 18 nt, Human
cuguucuuaagacgugau

SEQ ID NO: 3657430 - RNA, 13 nt, Human
cuguucuuagcuc

SEQ ID NO: 3657431 - RNA, 23 nt, Human
cuguucuuagcucaaugagcaug

SEQ ID NO: 3657432 - RNA, 19 nt, Human
cuguucuuccucagccagc

SEQ ID NO: 3657433 - RNA, 23 nt, Human
cuguucuuccucagccagccucg

SEQ ID NO: 3657434 - RNA, 13 nt, Human
cuguucuuccugg

SEQ ID NO: 3657435 - RNA, 12 nt, Human
cuguucuugcug

SEQ ID NO: 3657436 - RNA, 14 nt, Human
cuguucuugcugcu

SEQ ID NO: 3657437 - RNA, 16 nt, Human
cuguucuugcugcuag

SEQ ID NO: 3657438 - RNA, 17 nt, Human
cuguucuugcugcuaga

SEQ ID NO: 3657439 - RNA, 18 nt, Human
cuguucuugcugcuagaa

SEQ ID NO: 3657440 - RNA, 20 nt, Human
cuguucuugcugcuagaacu

SEQ ID NO: 3657441 - RNA, 13 nt, Human
cuguucuuuaauu

SEQ ID NO: 3657442 - RNA, 16 nt, Human
cuguucuuuccaaagu

SEQ ID NO: 3657443 - RNA, 21 nt, Human
cuguucuuuccaaaguacacu

SEQ ID NO: 3657444 - RNA, 13 nt, Human
cuguucuuucugg

SEQ ID NO: 3657445 - RNA, 14 nt, Human
cuguucuuucuggc

SEQ ID NO: 3657446 - RNA, 14 nt, Human
cuguugaaaauuau

SEQ ID NO: 3657447 - RNA, 17 nt, Human
cuguugaaagcaaaaau

SEQ ID NO: 3657448 - RNA, 20 nt, Human
cuguugaaagcaaaaaugcu

SEQ ID NO: 3657449 - RNA, 22 nt, Human
cuguugaaagcaaaaaugcuaa

SEQ ID NO: 3657450 - RNA, 23 nt, Human
cuguugaauuuuguucucuggga

SEQ ID NO: 3657451 - RNA, 22 nt, Human
cuguugacacaggucuuuccua

SEQ ID NO: 3657452 - RNA, 15 nt, Human
cuguugacauauuua

SEQ ID NO: 3657453 - RNA, 20 nt, Human
cuguugacauauuuaauguu

SEQ ID NO: 3657454 - RNA, 22 nt, Human
cuguugacauauuuaauguuuu

SEQ ID NO: 3657455 - RNA, 14 nt, Human
cuguugaccaggca

SEQ ID NO: 3657456 - RNA, 18 nt, Human
cuguugacgcaccugugg

SEQ ID NO: 3657457 - RNA, 15 nt, Human
cuguugacuggcugu

SEQ ID NO: 3657458 - RNA, 15 nt, Human
cuguugagcuguuuu

SEQ ID NO: 3657459 - RNA, 14 nt, Human
cuguugauaaaaac

SEQ ID NO: 3657460 - RNA, 18 nt, Human
cuguugauaauucuuauu

SEQ ID NO: 3657461 - RNA, 14 nt, Human
cuguugauguaucu

SEQ ID NO: 3657462 - RNA, 15 nt, Human
cuguugauguaucug

SEQ ID NO: 3657463 - RNA, 20 nt, Human
cuguugauuucuuuccagag

SEQ ID NO: 3657464 - RNA, 16 nt, Human
cuguugcaagccccuc

SEQ ID NO: 3657465 - RNA, 22 nt, Human
cuguugcaagccccucuuucug

SEQ ID NO: 3657466 - RNA, 20 nt, Human
ccuggguuagacugccagcu

SEQ ID NO: 3657467 - RNA, 17 nt, Human
ccuggguucccuuuccu

SEQ ID NO: 3657468 - RNA, 16 nt, Human
ccuggguugcagacag

SEQ ID NO: 3657469 - RNA, 17 nt, Human
ccuggguugcagacagg

SEQ ID NO: 3657470 - RNA, 16 nt, Human
ccuggguuuaagggga

SEQ ID NO: 3657471 - RNA, 12 nt, Human
ccuggguuuugu

SEQ ID NO: 3657472 - RNA, 23 nt, Human
ccuggguuuuguauucucugagc

SEQ ID NO: 3657473 - RNA, 18 nt, Human
ccugguaauagcuguaaa

SEQ ID NO: 3657474 - RNA, 14 nt, Human
ccugguacccagcc

SEQ ID NO: 3657475 - RNA, 15 nt, Human
ccugguacccagcca

SEQ ID NO: 3657476 - RNA, 13 nt, Human
ccugguacucccu

SEQ ID NO: 3657477 - RNA, 20 nt, Human
ccugguauauccaaaagcuu

SEQ ID NO: 3657478 - RNA, 21 nt, Human
ccuggucacaggacucugccu

SEQ ID NO: 3657479 - RNA, 15 nt, Human
ccuggucaccuagga

SEQ ID NO: 3657480 - RNA, 17 nt, Human
ccuggucaccuaggaag

SEQ ID NO: 3657481 - RNA, 12 nt, Human
ccuggucagccc

SEQ ID NO: 3657482 - RNA, 19 nt, Human
ccuggucaggcccuggugc

SEQ ID NO: 3657483 - RNA, 14 nt, Human
ccugguccagggaa

SEQ ID NO: 3657484 - RNA, 13 nt, Human
ccugguccccucc

SEQ ID NO: 3657485 - RNA, 14 nt, Human
ccugguccugaggg

SEQ ID NO: 3657486 - RNA, 15 nt, Human
ccugguccuuccagg

SEQ ID NO: 3657487 - RNA, 13 nt, Human
ccuggucuccugc

SEQ ID NO: 3657488 - RNA, 18 nt, Human
ccuggucuccugccccca

SEQ ID NO: 3657489 - RNA, 19 nt, Human
ccuggucuccugcccccac

SEQ ID NO: 3657490 - RNA, 16 nt, Human
ccuggucuugagaugu

SEQ ID NO: 3657491 - RNA, 15 nt, Human
cuguugcccaggcug

SEQ ID NO: 3657492 - RNA, 18 nt, Human
cuguugcccuuucuguac

SEQ ID NO: 3657493 - RNA, 21 nt, Human
cuguugcccuuucuguaccau

SEQ ID NO: 3657494 - RNA, 22 nt, Human
cuguugccuuuuucauuuucca

SEQ ID NO: 3657495 - RNA, 23 nt, Human
cuguugcgugacacucuccuugc

SEQ ID NO: 3657496 - RNA, 23 nt, Human
cuguugcuaagccccagcaagca

SEQ ID NO: 3657497 - RNA, 18 nt, Human
cuguugcuauagagccua

SEQ ID NO: 3657498 - RNA, 15 nt, Human
cuguugcugaauagg

SEQ ID NO: 3657499 - RNA, 14 nt, Human
cuguugcugccuca

SEQ ID NO: 3657500 - RNA, 16 nt, Human
cuguugcugccucaug

SEQ ID NO: 3657501 - RNA, 20 nt, Human
cuguuggacccgcucuggac

SEQ ID NO: 3657502 - RNA, 16 nt, Human
cuguuggauuccaugc

SEQ ID NO: 3657503 - RNA, 19 nt, Human
cuguuggauuccaugcuaa

SEQ ID NO: 3657504 - RNA, 21 nt, Human
cuguuggcacucacagaccug

SEQ ID NO: 3657505 - RNA, 15 nt, Human
cuguuggcaggcugg

SEQ ID NO: 3657506 - RNA, 21 nt, Human
cuguuggcagugagugagccu

SEQ ID NO: 3657507 - RNA, 12 nt, Human
cuguuggccagu

SEQ ID NO: 3657508 - RNA, 19 nt, Human
cuguuggcugggggccuca

SEQ ID NO: 3657509 - RNA, 20 nt, Human
cuguugggagagggcgcagg

SEQ ID NO: 3657510 - RNA, 22 nt, Human
cuguugggagagggcgcaggcc

SEQ ID NO: 3657511 - RNA, 16 nt, Human
cuguugggccaggagc

SEQ ID NO: 3657512 - RNA, 14 nt, Human
cuguugguuccaag

SEQ ID NO: 3657513 - RNA, 18 nt, Human
cuguuguaacuuauguag

SEQ ID NO: 3657514 - RNA, 21 nt, Human
cuguuguaacuuauguagaua

SEQ ID NO: 3657515 - RNA, 19 nt, Human
cuguuguaagaauucugau

SEQ ID NO: 3657516 - RNA, 14 nt, Human
cuguuguacauuua

SEQ ID NO: 3657517 - RNA, 22 nt, Human
cuguuguacauuuaugauuuaa

SEQ ID NO: 3657518 - RNA, 21 nt, Human
cuguugucaccuucaccuccu

SEQ ID NO: 3657519 - RNA, 15 nt, Human
cuguugucauugcug

SEQ ID NO: 3657520 - RNA, 17 nt, Human
cuguugucauugcuguu

SEQ ID NO: 3657521 - RNA, 20 nt, Human
cuguuguccuccccuugggc

SEQ ID NO: 3657522 - RNA, 14 nt, Human
cuguugucucuucu

SEQ ID NO: 3657523 - RNA, 17 nt, Human
cuguugucucuucuccu

SEQ ID NO: 3657524 - RNA, 19 nt, Human
cuguugugaccugaaguuc

SEQ ID NO: 3657525 - RNA, 20 nt, Human
cuguugugaccugaaguuca

SEQ ID NO: 3657526 - RNA, 21 nt, Human
cuguuguguauagaugcaaga

SEQ ID NO: 3657527 - RNA, 17 nt, Human
cuguuguuaugaugugc

SEQ ID NO: 3657528 - RNA, 21 nt, Human
cuguuguuaugaugugcuuaa

SEQ ID NO: 3657529 - RNA, 13 nt, Human
cuguuguuguuaa

SEQ ID NO: 3657530 - RNA, 17 nt, Human
cuguuguuucuaaacaa

SEQ ID NO: 3657531 - RNA, 20 nt, Human
cuguuguuuuguuuuaaaua

SEQ ID NO: 3657532 - RNA, 21 nt, Human
cuguuuaaauugcucacaguu

SEQ ID NO: 3657533 - RNA, 13 nt, Human
cuguuuaagaaaa

SEQ ID NO: 3657534 - RNA, 20 nt, Human
cuguuuaagaaaaguauuuu

SEQ ID NO: 3657535 - RNA, 23 nt, Human
cuguuuaaucauaguuacugugu

SEQ ID NO: 3657536 - RNA, 14 nt, Human
cuguuuacaagaaa

SEQ ID NO: 3657537 - RNA, 15 nt, Human
cuguuuacaagaaaa

SEQ ID NO: 3657538 - RNA, 15 nt, Human
cuguuuacugcaagg

SEQ ID NO: 3657539 - RNA, 13 nt, Human
cuguuuagaacac

SEQ ID NO: 3657540 - RNA, 14 nt, Human
cuguuuagauaaua

SEQ ID NO: 3657541 - RNA, 19 nt, Human
cuguuuagauuugccauag

SEQ ID NO: 3657542 - RNA, 20 nt, Human
cuguuuagguuccccuguca

SEQ ID NO: 3657543 - RNA, 17 nt, Human
cuguuuaguagcaguga

SEQ ID NO: 3657544 - RNA, 19 nt, Human
cuguuuagucuccuuuuua

SEQ ID NO: 3657545 - RNA, 20 nt, Human
cuguuuauauguguugaaaa

SEQ ID NO: 3657546 - RNA, 18 nt, Human
cuguuuaucccuuaagaa

SEQ ID NO: 3657547 - RNA, 15 nt, Human
cuguuuaugcuuuug

SEQ ID NO: 3657548 - RNA, 21 nt, Human
cuguuuauggccacauuuaau

SEQ ID NO: 3657549 - RNA, 14 nt, Human
cuguuuauggccuc

SEQ ID NO: 3657550 - RNA, 17 nt, Human
cuguuuauggccucagc

SEQ ID NO: 3657551 - RNA, 18 nt, Human
cuguuuauggccucagcu

SEQ ID NO: 3657552 - RNA, 16 nt, Human
cuguuuauuaaucuua

SEQ ID NO: 3657553 - RNA, 21 nt, Human
cuguuuauuacuuccaugaau

SEQ ID NO: 3657554 - RNA, 16 nt, Human
cuguuuauucauaugc

SEQ ID NO: 3657555 - RNA, 16 nt, Human
cuguuuauuuuauauu

SEQ ID NO: 3657556 - RNA, 17 nt, Human
cuguuucaaacuuuacu

SEQ ID NO: 3657557 - RNA, 15 nt, Human
cuguuucaaaguucu

SEQ ID NO: 3657558 - RNA, 17 nt, Human
cuguuucaaucacuguc

SEQ ID NO: 3657559 - RNA, 15 nt, Human
cuguuucccagcagu

SEQ ID NO: 3657560 - RNA, 21 nt, Human
cuguuucccuucccuuccacu

SEQ ID NO: 3657561 - RNA, 11 nt, Human
cuguuuccugu

SEQ ID NO: 3657562 - RNA, 13 nt, Human
cuguuuccuuuua

SEQ ID NO: 3657563 - RNA, 20 nt, Human
cuguuucuaauuugcugcug

SEQ ID NO: 3657564 - RNA, 13 nt, Human
cuguuucucugcu

SEQ ID NO: 3657565 - RNA, 16 nt, Human
cuguuucucuugagcu

SEQ ID NO: 3657566 - RNA, 20 nt, Human
cuguuucucuugagcuggcc

SEQ ID NO: 3657567 - RNA, 21 nt, Human
cuguuucucuugagcuggccu

SEQ ID NO: 3657568 - RNA, 22 nt, Human
cuguuucucuugagcuggccuc

SEQ ID NO: 3657569 - RNA, 16 nt, Human
cuguuucucuuuccuu

SEQ ID NO: 3657570 - RNA, 19 nt, Human
cuguuucucuuuccuuggc

SEQ ID NO: 3657571 - RNA, 18 nt, Human
cuguuucugaaaagaaau

SEQ ID NO: 3657572 - RNA, 21 nt, Human
cuguuucugaaaagaaauaau

SEQ ID NO: 3657573 - RNA, 12 nt, Human
cuguuucuuccu

SEQ ID NO: 3657574 - RNA, 15 nt, Human
cuguuucuugcuugu

SEQ ID NO: 3657575 - RNA, 19 nt, Human
cuguuugaaaacuucagaa

SEQ ID NO: 3657576 - RNA, 12 nt, Human
cuguuugagaaa

SEQ ID NO: 3657577 - RNA, 23 nt, Human
cuguuugaggauauauuuucacu

SEQ ID NO: 3657578 - RNA, 17 nt, Human
cuguuugcuaagugagg

SEQ ID NO: 3657579 - RNA, 18 nt, Human
cuguuugcuucaccgugg

SEQ ID NO: 3657580 - RNA, 22 nt, Human
cuguuuggaaauugauuuugaa

SEQ ID NO: 3657581 - RNA, 12 nt, Human
cuguuuggacug

SEQ ID NO: 3657582 - RNA, 16 nt, Human
cuguuuggacuuugua

SEQ ID NO: 3657583 - RNA, 22 nt, Human
cuguuuguccugagauggaaaa

SEQ ID NO: 3657584 - RNA, 17 nt, Human
cuguuugucuucucccc

SEQ ID NO: 3657585 - RNA, 14 nt, Human
cuguuuguuaaaac

SEQ ID NO: 3657586 - RNA, 20 nt, Human
cuguuuguuucaagaaccug

SEQ ID NO: 3657587 - RNA, 14 nt, Human
cuguuuguuucaua

SEQ ID NO: 3657588 - RNA, 18 nt, Human
cuguuuguuucugaaagg

SEQ ID NO: 3657589 - RNA, 22 nt, Human
cuguuuuaaauuuauuucaaaa

SEQ ID NO: 3657590 - RNA, 14 nt, Human
cuguuuuacaaguu

SEQ ID NO: 3657591 - RNA, 13 nt, Human
cuguuuuacugcu

SEQ ID NO: 3657592 - RNA, 15 nt, Human
cuguuuuacugcuuu

SEQ ID NO: 3657593 - RNA, 18 nt, Human
cuguuuuagguuaaaaaa

SEQ ID NO: 3657594 - RNA, 14 nt, Human
cuguuuuauaauuu

SEQ ID NO: 3657595 - RNA, 13 nt, Human
cuguuuucccccc

SEQ ID NO: 3657596 - RNA, 14 nt, Human
cuguuuuccucccu

SEQ ID NO: 3657597 - RNA, 16 nt, Human
cuguuuuccuuucuca

SEQ ID NO: 3657598 - RNA, 15 nt, Human
cuguuuucuagugua

SEQ ID NO: 3657599 - RNA, 17 nt, Human
cuguuuucuaguguauc

SEQ ID NO: 3657600 - RNA, 13 nt, Human
cuguuuucugagc

SEQ ID NO: 3657601 - RNA, 15 nt, Human
cuguuuucugagccc

SEQ ID NO: 3657602 - RNA, 19 nt, Human
cuguuuucugagcccgggc

SEQ ID NO: 3657603 - RNA, 21 nt, Human
cuguuuucuuuaugucuuuug

SEQ ID NO: 3657604 - RNA, 17 nt, Human
cuguuuugaaggcaaaa

SEQ ID NO: 3657605 - RNA, 22 nt, Human
cuguuuugccugaaguuggagu

SEQ ID NO: 3657606 - RNA, 17 nt, Human
cuguuuuguuauauaau

SEQ ID NO: 3657607 - RNA, 18 nt, Human
cuguuuuguuauauaauu

SEQ ID NO: 3657608 - RNA, 14 nt, Human
cuguuuuguugaca

SEQ ID NO: 3657609 - RNA, 19 nt, Human
cuguuuuguugacauucug

SEQ ID NO: 3657610 - RNA, 16 nt, Human
cuguuuuguuucgcuc

SEQ ID NO: 3657611 - RNA, 17 nt, Human
cuguuuuuaaaaaucau

SEQ ID NO: 3657612 - RNA, 17 nt, Human
cuguuuuuaagcuguuu

SEQ ID NO: 3657613 - RNA, 22 nt, Human
cuguuuuuacccauauccccuc

SEQ ID NO: 3657614 - RNA, 18 nt, Human
cuguuuuuagacaccuuc

SEQ ID NO: 3657615 - RNA, 12 nt, Human
cuguuuuucaca

SEQ ID NO: 3657616 - RNA, 15 nt, Human
cuguuuuucacauuu

SEQ ID NO: 3657617 - RNA, 21 nt, Human
cuguuuuucuggguggccucg

SEQ ID NO: 3657618 - RNA, 13 nt, Human
cuguuuuuguugu

SEQ ID NO: 3657619 - RNA, 14 nt, Human
cuguuuuuuuguua

SEQ ID NO: 3657620 - RNA, 14 nt, Human
cuuaaaaaaauaaa

SEQ ID NO: 3657621 - RNA, 18 nt, Human
cuuaaaaaacuuguaaau

SEQ ID NO: 3657622 - RNA, 12 nt, Human
cuuaaaaacuca

SEQ ID NO: 3657623 - RNA, 14 nt, Human
cuuaaaaaguaacu

SEQ ID NO: 3657624 - RNA, 22 nt, Human
cuuaaaaagucugcauuacauu

SEQ ID NO: 3657625 - RNA, 14 nt, Human
cuuaaaaaguuaua

SEQ ID NO: 3657626 - RNA, 13 nt, Human
cuuaaaaaucaca

SEQ ID NO: 3657627 - RNA, 20 nt, Human
cuuaaaaaucauugauuguc

SEQ ID NO: 3657628 - RNA, 12 nt, Human
cuuaaaaauggu

SEQ ID NO: 3657629 - RNA, 18 nt, Human
cuuaaaaauguaaauauu

SEQ ID NO: 3657630 - RNA, 20 nt, Human
cuuaaaacaucauuccuuuu

SEQ ID NO: 3657631 - RNA, 12 nt, Human
cuuaaaaccugc

SEQ ID NO: 3657632 - RNA, 15 nt, Human
cugugggcaauuuag

SEQ ID NO: 3657633 - RNA, 21 nt, Human
cugugggcacaggucaggcua

SEQ ID NO: 3657634 - RNA, 23 nt, Human
cugugggcuacaugcugggguca

SEQ ID NO: 3657635 - RNA, 14 nt, Human
cugugggcucccuu

SEQ ID NO: 3657636 - RNA, 17 nt, Human
cuucacucuaagauguu

SEQ ID NO: 3657637 - RNA, 14 nt, Human
cuucacugccuuug

SEQ ID NO: 3657638 - RNA, 17 nt, Human
cuucacuguauaaauag

SEQ ID NO: 3657639 - RNA, 14 nt, Human
cuucacugugcugu

SEQ ID NO: 3657640 - RNA, 18 nt, Human
cuucacuguugaaaauua

SEQ ID NO: 3657641 - RNA, 13 nt, Human
cuucacuucuccc

SEQ ID NO: 3657642 - RNA, 14 nt, Human
cuucacuucuccca

SEQ ID NO: 3657643 - RNA, 16 nt, Human
cuucacuucugaccac

SEQ ID NO: 3657644 - RNA, 12 nt, Human
cuucagaaagac

SEQ ID NO: 3657645 - RNA, 20 nt, Human
cuucagaaagugugcuuuau

SEQ ID NO: 3657646 - RNA, 17 nt, Human
cuucagaagacacugca

SEQ ID NO: 3657647 - RNA, 19 nt, Human
cuucagacacaaaagucca

SEQ ID NO: 3657648 - RNA, 16 nt, Human
cuucagacugcaagug

SEQ ID NO: 3657649 - RNA, 14 nt, Human
cuucagacuuugcu

SEQ ID NO: 3657650 - RNA, 20 nt, Human
cuucagagacuccugcaggc

SEQ ID NO: 3657651 - RNA, 11 nt, Human
cuucagagagc

SEQ ID NO: 3657652 - RNA, 20 nt, Human
cuucagagagcagugcuuuu

SEQ ID NO: 3657653 - RNA, 12 nt, Human
cuucagagcuga

SEQ ID NO: 3657654 - RNA, 14 nt, Human
cuucagagcugaca

SEQ ID NO: 3657655 - RNA, 20 nt, Human
cuucagagcugacacaggau

SEQ ID NO: 3657656 - RNA, 14 nt, Human
cuucagauccuacc

SEQ ID NO: 3657657 - RNA, 18 nt, Human
cuucagauguggagccag

SEQ ID NO: 3657658 - RNA, 21 nt, Human
cuucagauguggagccaggcg

SEQ ID NO: 3657659 - RNA, 18 nt, Human
cuucagauuuguguuaua

SEQ ID NO: 3657660 - RNA, 17 nt, Human
cuucagcaaaaauauuu

SEQ ID NO: 3657661 - RNA, 20 nt, Human
cuucagcaaaaauauuuuau

SEQ ID NO: 3657662 - RNA, 23 nt, Human
cuucagcaaaaauauuuuaugau

SEQ ID NO: 3657663 - RNA, 15 nt, Human
cuucagcaagagaga

SEQ ID NO: 3657664 - RNA, 10 nt, Human
cuucagcacc

SEQ ID NO: 3657665 - RNA, 21 nt, Human
cuucagcaguaccuauaaagu

SEQ ID NO: 3657666 - RNA, 15 nt, Human
cuucagcauccucag

SEQ ID NO: 3657667 - RNA, 17 nt, Human
cuucagccaggagcugg

SEQ ID NO: 3657668 - RNA, 14 nt, Human
cuucagcccccagc

SEQ ID NO: 3657669 - RNA, 18 nt, Human
cuucagcccccagccccu

SEQ ID NO: 3657670 - RNA, 15 nt, Human
cuucagcccucaccc

SEQ ID NO: 3657671 - RNA, 13 nt, Human
cuucagccuagcc

SEQ ID NO: 3657672 - RNA, 20 nt, Human
cuucagccuagccgaccuca

SEQ ID NO: 3657673 - RNA, 23 nt, Human
cuucagccuagccgaccucagcc

SEQ ID NO: 3657674 - RNA, 23 nt, Human
cuucagccuaguggcuuguccuc

SEQ ID NO: 3657675 - RNA, 20 nt, Human
cuucagccuccccaccuucu

SEQ ID NO: 3657676 - RNA, 14 nt, Human
cuucagccucccga

SEQ ID NO: 3657677 - RNA, 13 nt, Human
cuucagccucucc

SEQ ID NO: 3657678 - RNA, 20 nt, Human
cuucagccugaggcugagac

SEQ ID NO: 3657679 - RNA, 17 nt, Human
cuucagcucacgcuuca

SEQ ID NO: 3657680 - RNA, 19 nt, Human
cuucagcuccagccccuuu

SEQ ID NO: 3657681 - RNA, 23 nt, Human
cuucagcuccagccccuuuccaa

SEQ ID NO: 3657682 - RNA, 13 nt, Human
cuucagcuccagg

SEQ ID NO: 3657683 - RNA, 15 nt, Human
cuucagcugacuuuu

SEQ ID NO: 3657684 - RNA, 21 nt, Human
cuucaggaaagcagcaguuuu

SEQ ID NO: 3657685 - RNA, 21 nt, Human
cuucaggaaccucgaguacug

SEQ ID NO: 3657686 - RNA, 21 nt, Human
cuuacacaaaggggaucauaa

SEQ ID NO: 3657687 - RNA, 16 nt, Human
cuuacacauacaguuu

SEQ ID NO: 3657688 - RNA, 17 nt, Human
cuuacacauuaagcaaa

SEQ ID NO: 3657689 - RNA, 21 nt, Human
cuuacacuggcaaugguaguu

SEQ ID NO: 3657690 - RNA, 21 nt, Human
cuuacagauaggccuucuugu

SEQ ID NO: 3657691 - RNA, 22 nt, Human
cuuacagauaggccuucuugug

SEQ ID NO: 3657692 - RNA, 16 nt, Human
cuuacagcauaaggga

SEQ ID NO: 3657693 - RNA, 20 nt, Human
cuuacauaaaccauuuuugu

SEQ ID NO: 3657694 - RNA, 16 nt, Human
cuuacauaauuuuuua

SEQ ID NO: 3657695 - RNA, 22 nt, Human
cuuacauaauuuuuuauucaag

SEQ ID NO: 3657696 - RNA, 15 nt, Human
cuuacaugagaacag

SEQ ID NO: 3657697 - RNA, 16 nt, Human
cuuacaugagaacaga

SEQ ID NO: 3657698 - RNA, 12 nt, Human
cuuacaugauuc

SEQ ID NO: 3657699 - RNA, 19 nt, Human
cuuacaugcauuacugcau

SEQ ID NO: 3657700 - RNA, 14 nt, Human
cuuacaugcauuug

SEQ ID NO: 3657701 - RNA, 21 nt, Human
cuuacauuagcaguuugcuuu

SEQ ID NO: 3657702 - RNA, 20 nt, Human
cuuacauucucuaauaagaa

SEQ ID NO: 3657703 - RNA, 12 nt, Human
cuuacauuugug

SEQ ID NO: 3657704 - RNA, 20 nt, Human
cuuacauuugugagauuccu

SEQ ID NO: 3657705 - RNA, 14 nt, Human
cuuacauuuuuaca

SEQ ID NO: 3657706 - RNA, 19 nt, Human
cuuaccaacuuucuguaaa

SEQ ID NO: 3657707 - RNA, 16 nt, Human
cuuaccaauagcaggg

SEQ ID NO: 3657708 - RNA, 13 nt, Human
cuuaccagaagcu

SEQ ID NO: 3657709 - RNA, 15 nt, Human
cuuaccagcagagca

SEQ ID NO: 3657710 - RNA, 19 nt, Human
cuuaccaggcaccaaaaga

SEQ ID NO: 3657711 - RNA, 14 nt, Human
cuuaccaugugccu

SEQ ID NO: 3657712 - RNA, 19 nt, Human
cuuaccccuggcuguuugg

SEQ ID NO: 3657713 - RNA, 20 nt, Human
cuuaccccuuagccucccug

SEQ ID NO: 3657714 - RNA, 18 nt, Human
cuuacccucauguucuua

SEQ ID NO: 3657715 - RNA, 15 nt, Human
cuuacccuuagggag

SEQ ID NO: 3657716 - RNA, 18 nt, Human
cuuacccuucugugccca

SEQ ID NO: 3657717 - RNA, 23 nt, Human
cuuacccuucugugcccagcuca

SEQ ID NO: 3657718 - RNA, 20 nt, Human
cuuaccgugggcacugaagg

SEQ ID NO: 3657719 - RNA, 19 nt, Human
cuuaccuaaacagauauaa

SEQ ID NO: 3657720 - RNA, 21 nt, Human
cuuaccuaaacagauauaaau

SEQ ID NO: 3657721 - RNA, 22 nt, Human
cuuaccuaaacagauauaaaug

SEQ ID NO: 3657722 - RNA, 14 nt, Human
cuuaccuagugaaa

SEQ ID NO: 3657723 - RNA, 16 nt, Human
cuuaccuccugcccag

SEQ ID NO: 3657724 - RNA, 17 nt, Human
cuuaccuccugcccagg

SEQ ID NO: 3657725 - RNA, 17 nt, Human
cuuaccugaccucuugc

SEQ ID NO: 3657726 - RNA, 13 nt, Human
cuuaccugccagg

SEQ ID NO: 3657727 - RNA, 13 nt, Human
cuuaccuggccca

SEQ ID NO: 3657728 - RNA, 18 nt, Human
cuuaccuggcccaucagg

SEQ ID NO: 3657729 - RNA, 19 nt, Human
cuuaccuugaacugaaggc

SEQ ID NO: 3657730 - RNA, 19 nt, Human
cuuaccuuuuuauuugcau

SEQ ID NO: 3657731 - RNA, 17 nt, Human
cuuacggcccuggccuu

SEQ ID NO: 3657732 - RNA, 21 nt, Human
cuuacuaaacauuuuguuauu

SEQ ID NO: 3657733 - RNA, 23 nt, Human
cuuacuaagcuuugccagcugcu

SEQ ID NO: 3657734 - RNA, 24 nt, Human
cuuacuaagcuuugccagcugcug

SEQ ID NO: 3657735 - RNA, 15 nt, Human
cuuacuaauguaaaa

SEQ ID NO: 3657736 - RNA, 20 nt, Human
cuuacuacaugugggagcuu

SEQ ID NO: 3657737 - RNA, 19 nt, Human
cuuacuaguuucccuugca

SEQ ID NO: 3657738 - RNA, 12 nt, Human
cuuacuccugug

SEQ ID NO: 3657739 - RNA, 20 nt, Human
cuuacucuaagaucuuagau

SEQ ID NO: 3657740 - RNA, 16 nt, Human
cuuacucuguccauuu

SEQ ID NO: 3657741 - RNA, 17 nt, Human
cuuacucuguccauuua

SEQ ID NO: 3657742 - RNA, 14 nt, Human
cuuacucuuuccua

SEQ ID NO: 3657743 - RNA, 16 nt, Human
cuuacucuuuccuauu

SEQ ID NO: 3657744 - RNA, 12 nt, Human
cuuacugaaggu

SEQ ID NO: 3657745 - RNA, 19 nt, Human
cuuacugauauauuuuaca

SEQ ID NO: 3657746 - RNA, 21 nt, Human
cuuacugauauauuuuacaau

SEQ ID NO: 3657747 - RNA, 13 nt, Human
cuuacugcagaau

SEQ ID NO: 3657748 - RNA, 15 nt, Human
cuuacuguagccuca

SEQ ID NO: 3657749 - RNA, 13 nt, Human
cuuacuuacagca

SEQ ID NO: 3657750 - RNA, 14 nt, Human
cuuacuuacccuca

SEQ ID NO: 3657751 - RNA, 14 nt, Human
cuuacuuaguguua

SEQ ID NO: 3657752 - RNA, 18 nt, Human
cuuacuuauuaucuucag

SEQ ID NO: 3657753 - RNA, 16 nt, Human
cuuacuucuugcccug

SEQ ID NO: 3657754 - RNA, 19 nt, Human
cuuacuuggaacugaaggg

SEQ ID NO: 3657755 - RNA, 20 nt, Human
cuuacuuuaccucucuguca

SEQ ID NO: 3657756 - RNA, 18 nt, Human
cuuacuuuccugaaaaua

SEQ ID NO: 3657757 - RNA, 21 nt, Human
cuuacuuuccuuuccccagcc

SEQ ID NO: 3657758 - RNA, 12 nt, Human
cuuacuuuguaa

SEQ ID NO: 3657759 - RNA, 17 nt, Human
cuuacuuuguaaauucu

SEQ ID NO: 3657760 - RNA, 20 nt, Human
cuuacuuuguaaauucugau

SEQ ID NO: 3657761 - RNA, 15 nt, Human
cuuacuuuguaugau

SEQ ID NO: 3657762 - RNA, 18 nt, Human
cuuacuuuguaugauauu

SEQ ID NO: 3657763 - RNA, 21 nt, Human
cuuacuuuuaaggauaaauca

SEQ ID NO: 3657764 - RNA, 14 nt, Human
cuuacuuuuuauau

SEQ ID NO: 3657765 - RNA, 22 nt, Human
cuuagaaaacaauggaaugaga

SEQ ID NO: 3657766 - RNA, 19 nt, Human
cuuagaaaaccagcucagc

SEQ ID NO: 3657767 - RNA, 21 nt, Human
cuuagaaaaccagcucagcac

SEQ ID NO: 3657768 - RNA, 23 nt, Human
cuuagaaaaccagcucagcacug

SEQ ID NO: 3657769 - RNA, 21 nt, Human
cuuagaaaaggugauaaaauc

SEQ ID NO: 3657770 - RNA, 20 nt, Human
cuuagaaauguaaacugcca

SEQ ID NO: 3657771 - RNA, 16 nt, Human
cuuagaaauugcauuu

SEQ ID NO: 3657772 - RNA, 20 nt, Human
cuuagaacaguggaaacuau

SEQ ID NO: 3657773 - RNA, 14 nt, Human
cuuagaagguauua

SEQ ID NO: 3657774 - RNA, 17 nt, Human
cuuagaaguggaccagg

SEQ ID NO: 3657775 - RNA, 20 nt, Human
cuuagaaguggaccaggaca

SEQ ID NO: 3657776 - RNA, 21 nt, Human
cuuagaaguggaccaggacag

SEQ ID NO: 3657777 - RNA, 11 nt, Human
cuuagaauaaa

SEQ ID NO: 3657778 - RNA, 15 nt, Human
cuuagaauaaaauug

SEQ ID NO: 3657779 - RNA, 20 nt, Human
cuuagaauaaaauuguaaaa

SEQ ID NO: 3657780 - RNA, 15 nt, Human
cuuagaaucccugug

SEQ ID NO: 3657781 - RNA, 20 nt, Human
cuucauucaacccaccugcg

SEQ ID NO: 3657782 - RNA, 22 nt, Human
cuucauucuccuuguuguuggu

SEQ ID NO: 3657783 - RNA, 15 nt, Human
cuucauucuuugcag

SEQ ID NO: 3657784 - RNA, 19 nt, Human
cuucauugccuuaacugga

SEQ ID NO: 3657785 - RNA, 19 nt, Human
cuucauugucccucuucac

SEQ ID NO: 3657786 - RNA, 21 nt, Human
cuucauugucccucuucacuc

SEQ ID NO: 3657787 - RNA, 12 nt, Human
cuucauuuaaaa

SEQ ID NO: 3657788 - RNA, 14 nt, Human
cuucauuucauugu

SEQ ID NO: 3657789 - RNA, 13 nt, Human
cuucauuuggaga

SEQ ID NO: 3657790 - RNA, 18 nt, Human
cuucauuugggaugcuac

SEQ ID NO: 3657791 - RNA, 11 nt, Human
cuucauuugug

SEQ ID NO: 3657792 - RNA, 12 nt, Human
cuucauuuuccc

SEQ ID NO: 3657793 - RNA, 18 nt, Human
cuucauuuugaggggagg

SEQ ID NO: 3657794 - RNA, 13 nt, Human
cuucauuuuuccu

SEQ ID NO: 3657795 - RNA, 14 nt, Human
cuucauuuuuccua

SEQ ID NO: 3657796 - RNA, 19 nt, Human
cuucauuuuuuuuaauuga

SEQ ID NO: 3657797 - RNA, 19 nt, Human
cuuccaaacaggcucagag

SEQ ID NO: 3657798 - RNA, 22 nt, Human
cuuccaaagaauguuagagcac

SEQ ID NO: 3657799 - RNA, 21 nt, Human
cuuccaaaguaaaauugcugu

SEQ ID NO: 3657800 - RNA, 19 nt, Human
cuuccaaaugcaauuugau

SEQ ID NO: 3657801 - RNA, 18 nt, Human
cuuccaacaggagcuggg

SEQ ID NO: 3657802 - RNA, 19 nt, Human
cuuccaacccauuagccau

SEQ ID NO: 3657803 - RNA, 19 nt, Human
cuuccaacugcugccccaa

SEQ ID NO: 3657804 - RNA, 13 nt, Human
cuuccaagaccug

SEQ ID NO: 3657805 - RNA, 14 nt, Human
cuuccaagaccuga

SEQ ID NO: 3657806 - RNA, 15 nt, Human
cuuccaagagccuga

SEQ ID NO: 3657807 - RNA, 16 nt, Human
cuuccaaugucuggag

SEQ ID NO: 3657808 - RNA, 18 nt, Human
cuuccaaugucuggagac

SEQ ID NO: 3657809 - RNA, 22 nt, Human
cuuccacaagagcccaggccuc

SEQ ID NO: 3657810 - RNA, 14 nt, Human
cuuccacaccccca

SEQ ID NO: 3657811 - RNA, 13 nt, Human
cuuccacaggguc

SEQ ID NO: 3657812 - RNA, 15 nt, Human
cuuccacaggguccc

SEQ ID NO: 3657813 - RNA, 19 nt, Human
cuuccacagggucccacag

SEQ ID NO: 3657814 - RNA, 21 nt, Human
cuuccacaggucucagaaucu

SEQ ID NO: 3657815 - RNA, 16 nt, Human
cuuccaccagccugca

SEQ ID NO: 3657816 - RNA, 17 nt, Human
cuuccaccucaccccac

SEQ ID NO: 3657817 - RNA, 13 nt, Human
cuuccaccucccu

SEQ ID NO: 3657818 - RNA, 14 nt, Human
cuuccaccugcucu

SEQ ID NO: 3657819 - RNA, 18 nt, Human
cuuccaccugcucugcug

SEQ ID NO: 3657820 - RNA, 22 nt, Human
cuuccacgcugucuccagaccc

SEQ ID NO: 3657821 - RNA, 14 nt, Human
cuuccacugagggc

SEQ ID NO: 3657822 - RNA, 17 nt, Human
cuuccacugccucugcc

SEQ ID NO: 3657823 - RNA, 16 nt, Human
cuuccacuugaguguc

SEQ ID NO: 3657824 - RNA, 13 nt, Human
cuuccagaaauac

SEQ ID NO: 3657825 - RNA, 16 nt, Human
cuuccagaaucccaag

SEQ ID NO: 3657826 - RNA, 20 nt, Human
cuuccagaucacugccacac

SEQ ID NO: 3657827 - RNA, 19 nt, Human
cuuccagauccucucuggg

SEQ ID NO: 3657828 - RNA, 21 nt, Human
cuuccagauggucauccagac

SEQ ID NO: 3657829 - RNA, 16 nt, Human
cuuccagcacccugca

SEQ ID NO: 3657830 - RNA, 11 nt, Human
cuuccagcagg

SEQ ID NO: 3657831 - RNA, 13 nt, Human
cuuccagcaggag

SEQ ID NO: 3657832 - RNA, 12 nt, Human
cuuccagcuccu

SEQ ID NO: 3657833 - RNA, 14 nt, Human
cuuccagcuccugu

SEQ ID NO: 3657834 - RNA, 21 nt, Human
cuuccagcugcugucuucugg

SEQ ID NO: 3657835 - RNA, 19 nt, Human
cuuccaggaaaaaggacag

SEQ ID NO: 3657836 - RNA, 17 nt, Human
cuuccaggaugguguua

SEQ ID NO: 3657837 - RNA, 16 nt, Human
cuuccaggcccccacc

SEQ ID NO: 3657838 - RNA, 21 nt, Human
cuuccaggcugcauagaagga

SEQ ID NO: 3657839 - RNA, 15 nt, Human
cuuccaggcugggag

SEQ ID NO: 3657840 - RNA, 22 nt, Human
cuuccagggacgaagaagagcc

SEQ ID NO: 3657841 - RNA, 16 nt, Human
cuuccaggggaaccug

SEQ ID NO: 3657842 - RNA, 15 nt, Human
cuuccagggguggga

SEQ ID NO: 3657843 - RNA, 16 nt, Human
cuuccaggugcccagc

SEQ ID NO: 3657844 - RNA, 16 nt, Human
cuuccaguauaaccag

SEQ ID NO: 3657845 - RNA, 13 nt, Human
cuuccagucagga

SEQ ID NO: 3657846 - RNA, 17 nt, Human
cuuccaguccaaucuca

SEQ ID NO: 3657847 - RNA, 22 nt, Human
cuuccagucuuccugacacuuu

SEQ ID NO: 3657848 - RNA, 14 nt, Human
cuuccagugaggcu

SEQ ID NO: 3657849 - RNA, 15 nt, Human
cuuccagugaggcuc

SEQ ID NO: 3657850 - RNA, 18 nt, Human
cuuccagugaggcucugc

SEQ ID NO: 3657851 - RNA, 21 nt, Human
cuuccagugaggcucugcccu

SEQ ID NO: 3657852 - RNA, 17 nt, Human
ccuugcucucccucuuc

SEQ ID NO: 3657853 - RNA, 19 nt, Human
ccuugcucucccucuucuc

SEQ ID NO: 3657854 - RNA, 22 nt, Human
ccuugcugcaagcacagcccuu

SEQ ID NO: 3657855 - RNA, 15 nt, Human
ccuugcuggccccag

SEQ ID NO: 3657856 - RNA, 16 nt, Human
ccuugcuggccccagc

SEQ ID NO: 3657857 - RNA, 19 nt, Human
ccuugcuggccccagcccu

SEQ ID NO: 3657858 - RNA, 21 nt, Human
ccuugcuguaugcugaucauc

SEQ ID NO: 3657859 - RNA, 20 nt, Human
ccuugcuucuuacugauaau

SEQ ID NO: 3657860 - RNA, 21 nt, Human
ccuugcuuguugggauuccug

SEQ ID NO: 3657861 - RNA, 22 nt, Human
ccuugcuuuucccucuuuucuu

SEQ ID NO: 3657862 - RNA, 18 nt, Human
ccuugcuuuugcuucuag

SEQ ID NO: 3657863 - RNA, 21 nt, Human
ccuugcuuuugcuucuagagc

SEQ ID NO: 3657864 - RNA, 22 nt, Human
ccuuggaaaccugcccugccug

SEQ ID NO: 3657865 - RNA, 22 nt, Human
ccuuggaaguugcauggcauca

SEQ ID NO: 3657866 - RNA, 16 nt, Human
ccuuggacacgcucag

SEQ ID NO: 3657867 - RNA, 15 nt, Human
ccuuggauugucccc

SEQ ID NO: 3657868 - RNA, 14 nt, Human
ccuuggcaccaaag

SEQ ID NO: 3657869 - RNA, 19 nt, Human
ccuuggcagguccuggcca

SEQ ID NO: 3657870 - RNA, 15 nt, Human
ccuuggcaugccuuc

SEQ ID NO: 3657871 - RNA, 20 nt, Human
ccuuggcaugccuuccagca

SEQ ID NO: 3657872 - RNA, 21 nt, Human
ccuuggcaugccuuccagcac

SEQ ID NO: 3657873 - RNA, 15 nt, Human
ccuuggccgcaccua

SEQ ID NO: 3657874 - RNA, 23 nt, Human
ccuuggccggcugugcucagaga

SEQ ID NO: 3657875 - RNA, 15 nt, Human
ccuuggccuagccca

SEQ ID NO: 3657876 - RNA, 20 nt, Human
ccuuggccuagcccacccug

SEQ ID NO: 3657877 - RNA, 15 nt, Human
ccuuggccugucuca

SEQ ID NO: 3657878 - RNA, 19 nt, Human
ccuuggccugucucauccc

SEQ ID NO: 3657879 - RNA, 14 nt, Human
ccuuggccuguguu

SEQ ID NO: 3657880 - RNA, 20 nt, Human
ccuuggcugacaugaagcug

SEQ ID NO: 3657881 - RNA, 13 nt, Human
ccuuggcugcagg

SEQ ID NO: 3657882 - RNA, 14 nt, Human
ccuuggcugcaggg

SEQ ID NO: 3657883 - RNA, 17 nt, Human
ccuuggcuucugugaug

SEQ ID NO: 3657884 - RNA, 16 nt, Human
ccuuggcuuggcccug

SEQ ID NO: 3657885 - RNA, 21 nt, Human
ccuuggcuuggcccuggcagc

SEQ ID NO: 3657886 - RNA, 14 nt, Human
ccuugggaggaagc

SEQ ID NO: 3657887 - RNA, 18 nt, Human
ccuugggaggaagcagaa

SEQ ID NO: 3657888 - RNA, 20 nt, Human
ccuugggaggccccacuggg

SEQ ID NO: 3657889 - RNA, 14 nt, Human
ccuugggauccagg

SEQ ID NO: 3657890 - RNA, 17 nt, Human
ccuugggcccuuugagu

SEQ ID NO: 3657891 - RNA, 13 nt, Human
ccuugggcucccu

SEQ ID NO: 3657892 - RNA, 16 nt, Human
ccuugggcucugauga

SEQ ID NO: 3657893 - RNA, 20 nt, Human
ccuugggcucugaugaaaaa

SEQ ID NO: 3657894 - RNA, 22 nt, Human
ccuuggggaauuuccucuauug

SEQ ID NO: 3657895 - RNA, 19 nt, Human
ccuuggggaggacaaaacu

SEQ ID NO: 3657896 - RNA, 20 nt, Human
ccuuggggaggacaaaacuu

SEQ ID NO: 3657897 - RNA, 19 nt, Human
ccuuggggcugaugcaguu

SEQ ID NO: 3657898 - RNA, 21 nt, Human
ccuuggggguccuccuccagg

SEQ ID NO: 3657899 - RNA, 19 nt, Human
ccuuggguagugagcagug

SEQ ID NO: 3657900 - RNA, 16 nt, Human
ccuuggucuuuguauc

SEQ ID NO: 3657901 - RNA, 15 nt, Human
ccuugguggcaagag

SEQ ID NO: 3657902 - RNA, 22 nt, Human
ccuugguuaggcauugugggaa

SEQ ID NO: 3657903 - RNA, 17 nt, Human
ccuugguucaucagugu

SEQ ID NO: 3657904 - RNA, 16 nt, Human
ccuugguucccccacu

SEQ ID NO: 3657905 - RNA, 21 nt, Human
ccuugguugucuggcaaggac

SEQ ID NO: 3657906 - RNA, 22 nt, Human
ccuugguugucuggcaaggacu

SEQ ID NO: 3657907 - RNA, 15 nt, Human
ccuuguaauguaacu

SEQ ID NO: 3657908 - RNA, 18 nt, Human
ccuuguaauguaacugcu

SEQ ID NO: 3657909 - RNA, 18 nt, Human
ccuuguauaauauugaaa

SEQ ID NO: 3657910 - RNA, 14 nt, Human
ccuuguauuuaaau

SEQ ID NO: 3657911 - RNA, 17 nt, Human
ccuugucauuuuggucu

SEQ ID NO: 3657912 - RNA, 18 nt, Human
ccuuguccccacacuccu

SEQ ID NO: 3657913 - RNA, 21 nt, Human
ccuuguccccacacuccuaca

SEQ ID NO: 3657914 - RNA, 17 nt, Human
ccuuguccucagccagu

SEQ ID NO: 3657915 - RNA, 14 nt, Human
ccuuguccuuuccc

SEQ ID NO: 3657916 - RNA, 21 nt, Human
ccuugucuuauucccuuccug

SEQ ID NO: 3657917 - RNA, 20 nt, Human
ccuugugaaucaagggucag

SEQ ID NO: 3657918 - RNA, 21 nt, Human
ccuugugaugucauacagaga

SEQ ID NO: 3657919 - RNA, 20 nt, Human
ccuugugaugugcacguaaa

SEQ ID NO: 3657920 - RNA, 11 nt, Human
ccuugugccug

SEQ ID NO: 3657921 - RNA, 12 nt, Human
ccuugugccugg

SEQ ID NO: 3657922 - RNA, 18 nt, Human
ccuugugccuggcucaga

SEQ ID NO: 3657923 - RNA, 15 nt, Human
ccuugugccuggggu

SEQ ID NO: 3657924 - RNA, 12 nt, Human
ccuuguggcaga

SEQ ID NO: 3657925 - RNA, 16 nt, Human
ccuuguggccugggcc

SEQ ID NO: 3657926 - RNA, 13 nt, Human
cuuccuccaaccc

SEQ ID NO: 3657927 - RNA, 14 nt, Human
cuuccuccaaggac

SEQ ID NO: 3657928 - RNA, 21 nt, Human
cuuccuccacauccuuucuaa

SEQ ID NO: 3657929 - RNA, 17 nt, Human
cuuccuccagcugcacc

SEQ ID NO: 3657930 - RNA, 20 nt, Human
cuuccucccaaguggugccu

SEQ ID NO: 3657931 - RNA, 13 nt, Human
cuuccucccucau

SEQ ID NO: 3657932 - RNA, 13 nt, Human
cuuccucccuccc

SEQ ID NO: 3657933 - RNA, 19 nt, Human
cuuccuccugacaccccac

SEQ ID NO: 3657934 - RNA, 22 nt, Human
cuuccuccugggcccucucugc

SEQ ID NO: 3657935 - RNA, 22 nt, Human
cuuccuccuuuucuuucucucu

SEQ ID NO: 3657936 - RNA, 19 nt, Human
cuuccucuagaagccaagg

SEQ ID NO: 3657937 - RNA, 16 nt, Human
cuuccucuccacugcc

SEQ ID NO: 3657938 - RNA, 19 nt, Human
cuuccucuccacugccuuc

SEQ ID NO: 3657939 - RNA, 16 nt, Human
cuuccucuccuuccuu

SEQ ID NO: 3657940 - RNA, 14 nt, Human
cuuccucugagccu

SEQ ID NO: 3657941 - RNA, 12 nt, Human
cuuccucugagg

SEQ ID NO: 3657942 - RNA, 16 nt, Human
cuuccucugaggcuga

SEQ ID NO: 3657943 - RNA, 19 nt, Human
cuuccucugcagcugaccu

SEQ ID NO: 3657944 - RNA, 12 nt, Human
cuuccucugcug

SEQ ID NO: 3657945 - RNA, 15 nt, Human
cuuccucuggggcuc

SEQ ID NO: 3657946 - RNA, 19 nt, Human
cuuccucuucggcccucag

SEQ ID NO: 3657947 - RNA, 20 nt, Human
cuuccucuucggcccucaga

SEQ ID NO: 3657948 - RNA, 21 nt, Human
cuuccucuugacccugcaccc

SEQ ID NO: 3657949 - RNA, 17 nt, Human
cuuccugaaacuauauu

SEQ ID NO: 3657950 - RNA, 16 nt, Human
cuuccugacacuuuaa

SEQ ID NO: 3657951 - RNA, 18 nt, Human
cuuccugacacuuuaauu

SEQ ID NO: 3657952 - RNA, 18 nt, Human
cuuccugacgaaacuggc

SEQ ID NO: 3657953 - RNA, 21 nt, Human
cuuccugaggggagacagagc

SEQ ID NO: 3657954 - RNA, 22 nt, Human
cuuccugaggggagacagagca

SEQ ID NO: 3657955 - RNA, 20 nt, Human
cuuccugauugguuucucuu

SEQ ID NO: 3657956 - RNA, 20 nt, Human
cuuccugcaggcaggaacaa

SEQ ID NO: 3657957 - RNA, 20 nt, Human
cuuccugcauucacccagac

SEQ ID NO: 3657958 - RNA, 15 nt, Human
cuuccugccaccagu

SEQ ID NO: 3657959 - RNA, 17 nt, Human
cuuccugccagccccug

SEQ ID NO: 3657960 - RNA, 21 nt, Human
cuuccugccccaacuccuucc

SEQ ID NO: 3657961 - RNA, 17 nt, Human
cuuccugcccuacagag

SEQ ID NO: 3657962 - RNA, 15 nt, Human
cuuccugccuggucu

SEQ ID NO: 3657963 - RNA, 16 nt, Human
cuuccugcguccuccu

SEQ ID NO: 3657964 - RNA, 13 nt, Human
cuuccuggacagc

SEQ ID NO: 3657965 - RNA, 14 nt, Human
cuuccuggacagcu

SEQ ID NO: 3657966 - RNA, 15 nt, Human
cuuccuggacagcug

SEQ ID NO: 3657967 - RNA, 16 nt, Human
cuuccuggacagcugu

SEQ ID NO: 3657968 - RNA, 21 nt, Human
cuuccuggacagcugugccuc

SEQ ID NO: 3657969 - RNA, 24 nt, Human
cuuccuggacagcugugccucgcu

SEQ ID NO: 3657970 - RNA, 22 nt, Human
cuuccuggagacugcccagcua

SEQ ID NO: 3657971 - RNA, 22 nt, Human
cuuccuggagcagaagcagcaa

SEQ ID NO: 3657972 - RNA, 22 nt, Human
cuuccuggagcccagaggaggg

SEQ ID NO: 3657973 - RNA, 14 nt, Human
cuuccuggccugag

SEQ ID NO: 3657974 - RNA, 19 nt, Human
cuuccugggcacacgcugc

SEQ ID NO: 3657975 - RNA, 21 nt, Human
cuuccugggcacacgcugcuc

SEQ ID NO: 3657976 - RNA, 23 nt, Human
cuuccugggcacacgcugcucug

SEQ ID NO: 3657977 - RNA, 18 nt, Human
cuuccuggggcccaaaug

SEQ ID NO: 3657978 - RNA, 23 nt, Human
cuuccugguagaccacugccaua

SEQ ID NO: 3657979 - RNA, 15 nt, Human
cuuccuggugcugga

SEQ ID NO: 3657980 - RNA, 15 nt, Human
cuuccuguccagaga

SEQ ID NO: 3657981 - RNA, 17 nt, Human
cuuccuguccagagaga

SEQ ID NO: 3657982 - RNA, 18 nt, Human
cuuccuguccagcuccaa

SEQ ID NO: 3657983 - RNA, 14 nt, Human
cuuccuguccgccc

SEQ ID NO: 3657984 - RNA, 20 nt, Human
cuuccugucuagucucuccu

SEQ ID NO: 3657985 - RNA, 18 nt, Human
cuuccugugauccaccca

SEQ ID NO: 3657986 - RNA, 15 nt, Human
cuuccugugggagca

SEQ ID NO: 3657987 - RNA, 12 nt, Human
cuuccugugucc

SEQ ID NO: 3657988 - RNA, 19 nt, Human
cuuccuuaauucacuccca

SEQ ID NO: 3657989 - RNA, 21 nt, Human
cuuccuuaauucacucccaca

SEQ ID NO: 3657990 - RNA, 17 nt, Human
cuuccuuauuuuaagca

SEQ ID NO: 3657991 - RNA, 13 nt, Human
cuuccuucccacc

SEQ ID NO: 3657992 - RNA, 16 nt, Human
cuuccuucccugcugu

SEQ ID NO: 3657993 - RNA, 13 nt, Human
cuuccuucccugg

SEQ ID NO: 3657994 - RNA, 14 nt, Human
cuuccuucccuggc

SEQ ID NO: 3657995 - RNA, 21 nt, Human
cuuccuucccugggcugugcu

SEQ ID NO: 3657996 - RNA, 14 nt, Human
cuuccuuccugcuu

SEQ ID NO: 3657997 - RNA, 14 nt, Human
cuuccuugaccagc

SEQ ID NO: 3657998 - RNA, 16 nt, Human
cuuccuugaccagcag

SEQ ID NO: 3657999 - RNA, 20 nt, Human
cuuccuugagacacggagcc

SEQ ID NO: 3658000 - RNA, 23 nt, Human
cuuccuugagacacggagcccag

SEQ ID NO: 3658001 - RNA, 14 nt, Human
cuuccuugcucucc

SEQ ID NO: 3658002 - RNA, 15 nt, Human
cuuccuugcucugca

SEQ ID NO: 3658003 - RNA, 20 nt, Human
cuuccuugcuguccuaggcc

SEQ ID NO: 3658004 - RNA, 13 nt, Human
cuuccuuggcuuu

SEQ ID NO: 3658005 - RNA, 20 nt, Human
cuuccuuguagccuuuugac

SEQ ID NO: 3658006 - RNA, 21 nt, Human
cuuccuuguagccuuuugacu

SEQ ID NO: 3658007 - RNA, 15 nt, Human
cuuccuuuacuuucc

SEQ ID NO: 3658008 - RNA, 18 nt, Human
cuuccuuuacuuucccuu

SEQ ID NO: 3658009 - RNA, 15 nt, Human
cuuccuuuguaaaaa

SEQ ID NO: 3658010 - RNA, 21 nt, Human
cuuccuuuuaaguaaggucca

SEQ ID NO: 3658011 - RNA, 21 nt, Human
cuuccuuuuagccuaguucau

SEQ ID NO: 3658012 - RNA, 14 nt, Human
cuuccuuuucacug

SEQ ID NO: 3658013 - RNA, 14 nt, Human
cuuccuuuucccug

SEQ ID NO: 3658014 - RNA, 16 nt, Human
cuuccuuuucccugcu

SEQ ID NO: 3658015 - RNA, 22 nt, Human
cuuccuuuucccugcuuccagg

SEQ ID NO: 3658016 - RNA, 16 nt, Human
cuucgacacuguucuu

SEQ ID NO: 3658017 - RNA, 14 nt, Human
cuucgacagcauuu

SEQ ID NO: 3658018 - RNA, 14 nt, Human
cuucgacucaggau

SEQ ID NO: 3658019 - RNA, 13 nt, Human
cuucgacugugac

SEQ ID NO: 3658020 - RNA, 22 nt, Human
cuucgacuguuguuaucuguuu

SEQ ID NO: 3658021 - RNA, 16 nt, Human
cuucgauacaccgggc

SEQ ID NO: 3658022 - RNA, 19 nt, Human
cuucgcaucaaaagacaau

SEQ ID NO: 3658023 - RNA, 22 nt, Human
cuucgccaagguuguagcaugg

SEQ ID NO: 3658024 - RNA, 15 nt, Human
cuucgccaccugggu

SEQ ID NO: 3658025 - RNA, 22 nt, Human
cuucgcgguggaaggcccgagg

SEQ ID NO: 3658026 - RNA, 19 nt, Human
cuucgcgugcccucgcugc

SEQ ID NO: 3658027 - RNA, 13 nt, Human
cuucgcuccugug

SEQ ID NO: 3658028 - RNA, 14 nt, Human
cuucgcuccugugu

SEQ ID NO: 3658029 - RNA, 18 nt, Human
cuucgcuucuugccucug

SEQ ID NO: 3658030 - RNA, 17 nt, Human
cuucggaggaccagggc

SEQ ID NO: 3658031 - RNA, 22 nt, Human
cuucgggaagagaggaguucaa

SEQ ID NO: 3658032 - RNA, 19 nt, Human
cuucgggaggucgaggcag

SEQ ID NO: 3658033 - RNA, 21 nt, Human
cuucgggaggucgaggcagga

SEQ ID NO: 3658034 - RNA, 17 nt, Human
cuucgggcccuucccac

SEQ ID NO: 3658035 - RNA, 19 nt, Human
cuucgggcuggccaucugg

SEQ ID NO: 3658036 - RNA, 19 nt, Human
cuucggggaacuccuggaa

SEQ ID NO: 3658037 - RNA, 19 nt, Human
cuucgguacccaccacaca

SEQ ID NO: 3658038 - RNA, 17 nt, Human
cuucgguggaagagcuc

SEQ ID NO: 3658039 - RNA, 16 nt, Human
cuucguacaguucuuc

SEQ ID NO: 3658040 - RNA, 23 nt, Human
cuucguacaguucuucgggaaga

SEQ ID NO: 3658041 - RNA, 19 nt, Human
cuucguaucccgagucugg

SEQ ID NO: 3658042 - RNA, 14 nt, Human
cuucgucuuuccca

SEQ ID NO: 3658043 - RNA, 15 nt, Human
cuucgugcccccccu

SEQ ID NO: 3658044 - RNA, 17 nt, Human
cuucgugcccccccuuc

SEQ ID NO: 3658045 - RNA, 22 nt, Human
cuucgugggaucugccccuccc

SEQ ID NO: 3658046 - RNA, 21 nt, Human
cuucguuaguaaucuguauaa

SEQ ID NO: 3658047 - RNA, 19 nt, Human
cuucguucuuuuuaaguua

SEQ ID NO: 3658048 - RNA, 21 nt, Human
cuucguuuacuaugccugugu

SEQ ID NO: 3658049 - RNA, 13 nt, Human
cuucguuuugguu

SEQ ID NO: 3658050 - RNA, 13 nt, Human
cuucuaaaugcau

SEQ ID NO: 3658051 - RNA, 13 nt, Human
cuucuaaguaaaa

SEQ ID NO: 3658052 - RNA, 21 nt, Human
cgagcuguuuauguuuuuaua

SEQ ID NO: 3658053 - RNA, 11 nt, Human
cgaggaagccc

SEQ ID NO: 3658054 - RNA, 16 nt, Human
cgaggacagggaggug

SEQ ID NO: 3658055 - RNA, 17 nt, Human
cgaggagccaggcaacu

SEQ ID NO: 3658056 - RNA, 17 nt, Human
cgaggagguaaugaauu

SEQ ID NO: 3658057 - RNA, 16 nt, Human
cgaggaggugccugga

SEQ ID NO: 3658058 - RNA, 22 nt, Human
cgaggaggugucucaggcugcc

SEQ ID NO: 3658059 - RNA, 12 nt, Human
cgaggaguaaca

SEQ ID NO: 3658060 - RNA, 14 nt, Human
cgaggaguaacaau

SEQ ID NO: 3658061 - RNA, 21 nt, Human
cgaggaguaacaauacaaaug

SEQ ID NO: 3658062 - RNA, 14 nt, Human
cgaggauuuuaauu

SEQ ID NO: 3658063 - RNA, 12 nt, Human
cgaggcagagga

SEQ ID NO: 3658064 - RNA, 23 nt, Human
cgaggccuaccccgcagacaccu

SEQ ID NO: 3658065 - RNA, 10 nt, Human
cgaggccuga

SEQ ID NO: 3658066 - RNA, 11 nt, Human
cgaggccugaa

SEQ ID NO: 3658067 - RNA, 14 nt, Human
cgaggcugggccaa

SEQ ID NO: 3658068 - RNA, 15 nt, Human
cgaggcugggccaag

SEQ ID NO: 3658069 - RNA, 16 nt, Human
cgaggcugggccaagc

SEQ ID NO: 3658070 - RNA, 17 nt, Human
cgagggcagcgggagcc

SEQ ID NO: 3658071 - RNA, 11 nt, Human
cgccuccagga

SEQ ID NO: 3658072 - RNA, 20 nt, Human
aacacacgcgcgcacacaca

SEQ ID NO: 3658073 - RNA, 17 nt, Human
aacacacuaccgaaugu

SEQ ID NO: 3658074 - RNA, 18 nt, Human
aacacacugaggcaggga

SEQ ID NO: 3658075 - RNA, 21 nt, Human
aacacacugaggcagggaagu

SEQ ID NO: 3658076 - RNA, 13 nt, Human
aacacacuguguc

SEQ ID NO: 3658077 - RNA, 19 nt, Human
aacacacuguguccuggug

SEQ ID NO: 3658078 - RNA, 22 nt, Human
aacacagaaagccuaucaaaga

SEQ ID NO: 3658079 - RNA, 22 nt, Human
aacacagagaagcggauuucca

SEQ ID NO: 3658080 - RNA, 23 nt, Human
aacacagagaagcggauuuccag

SEQ ID NO: 3658081 - RNA, 18 nt, Human
aacacagcaagggugaug

SEQ ID NO: 3658082 - RNA, 13 nt, Human
aacacagccuggg

SEQ ID NO: 3658083 - RNA, 19 nt, Human
aacacagcgagacuccguc

SEQ ID NO: 3658084 - RNA, 20 nt, Human
aacacagcuuacaaucgcaa

SEQ ID NO: 3658085 - RNA, 14 nt, Human
aacacaggcagcuu

SEQ ID NO: 3658086 - RNA, 15 nt, Human
aacacaggcagcuuu

SEQ ID NO: 3658087 - RNA, 18 nt, Human
aacacaggcagcuuucua

SEQ ID NO: 3658088 - RNA, 19 nt, Human
aacacagugccuucaauaa

SEQ ID NO: 3658089 - RNA, 16 nt, Human
aacacaguguuuuugu

SEQ ID NO: 3658090 - RNA, 18 nt, Human
aacacaguguuuuuguaa

SEQ ID NO: 3658091 - RNA, 20 nt, Human
aacacauagauucaccugua

SEQ ID NO: 3658092 - RNA, 22 nt, Human
aacacauagauucaccuguaaa

SEQ ID NO: 3658093 - RNA, 17 nt, Human
aacacauguuuuuauac

SEQ ID NO: 3658094 - RNA, 15 nt, Human
aacacauuaaaggua

SEQ ID NO: 3658095 - RNA, 22 nt, Human
aacacauuguuauuuucaguga

SEQ ID NO: 3658096 - RNA, 21 nt, Human
aacacauuucaaaugaguuuu

SEQ ID NO: 3658097 - RNA, 14 nt, Human
aacacauuuuguau

SEQ ID NO: 3658098 - RNA, 16 nt, Human
aacacauuuuguauaa

SEQ ID NO: 3658099 - RNA, 23 nt, Human
aacacauuuuguauaauuguauc

SEQ ID NO: 3658100 - RNA, 19 nt, Human
aacacauuuuucuuaggga

SEQ ID NO: 3658101 - RNA, 16 nt, Human
aacaccaaaaaauauc

SEQ ID NO: 3658102 - RNA, 22 nt, Human
aacaccaagacuugaaggugcc

SEQ ID NO: 3658103 - RNA, 14 nt, Human
aacaccaagcacag

SEQ ID NO: 3658104 - RNA, 21 nt, Human
aacaccaagcacagcagccug

SEQ ID NO: 3658105 - RNA, 13 nt, Human
aacaccacagaca

SEQ ID NO: 3658106 - RNA, 15 nt, Human
aacaccacagacaca

SEQ ID NO: 3658107 - RNA, 17 nt, Human
aacaccacagacacaca

SEQ ID NO: 3658108 - RNA, 16 nt, Human
aacaccagccccugcc

SEQ ID NO: 3658109 - RNA, 20 nt, Human
aacaccauagguagaaugua

SEQ ID NO: 3658110 - RNA, 18 nt, Human
aacaccaucacagcuugu

SEQ ID NO: 3658111 - RNA, 18 nt, Human
aacaccaugauuccuuua

SEQ ID NO: 3658112 - RNA, 21 nt, Human
aacacccucacacugggacuu

SEQ ID NO: 3658113 - RNA, 20 nt, Human
aacacccuuagaaaaugugu

SEQ ID NO: 3658114 - RNA, 19 nt, Human
aacacccuuccuucuguaa

SEQ ID NO: 3658115 - RNA, 18 nt, Human
aacaccuagaucagaaca

SEQ ID NO: 3658116 - RNA, 19 nt, Human
aacaccuagcuuuauucuu

SEQ ID NO: 3658117 - RNA, 23 nt, Human
aacaccucccaggagacaguuca

SEQ ID NO: 3658118 - RNA, 16 nt, Human
aacaccuccucaugua

SEQ ID NO: 3658119 - RNA, 15 nt, Human
aacaccugacagccc

SEQ ID NO: 3658120 - RNA, 19 nt, Human
aacaccugggcuuaagaaa

SEQ ID NO: 3658121 - RNA, 14 nt, Human
aacaccuuaauaug

SEQ ID NO: 3658122 - RNA, 17 nt, Human
aacaccuuccagcuccu

SEQ ID NO: 3658123 - RNA, 16 nt, Human
aacacgaaacuuguua

SEQ ID NO: 3658124 - RNA, 15 nt, Human
aacacgaaagaaaug

SEQ ID NO: 3658125 - RNA, 15 nt, Human
aacacgcaccugccu

SEQ ID NO: 3658126 - RNA, 15 nt, Human
aacacgccugcaaac

SEQ ID NO: 3658127 - RNA, 20 nt, Human
aacacgccugcaaacgcugc

SEQ ID NO: 3658128 - RNA, 21 nt, Human
aacacguaucccaccugacau

SEQ ID NO: 3658129 - RNA, 21 nt, Human
aacacguccagaauuuuucau

SEQ ID NO: 3658130 - RNA, 15 nt, Human
aacacuaaaaauaaa

SEQ ID NO: 3658131 - RNA, 14 nt, Human
aacacuaaauguua

SEQ ID NO: 3658132 - RNA, 22 nt, Human
aacacuaaauguuaaagaugua

SEQ ID NO: 3658133 - RNA, 19 nt, Human
aacacuaacucaccagccc

SEQ ID NO: 3658134 - RNA, 22 nt, Human
aacacuaauauauuuaaaaaua

SEQ ID NO: 3658135 - RNA, 16 nt, Human
aacacuaauucauaau

SEQ ID NO: 3658136 - RNA, 17 nt, Human
aacacuaauucauaauc

SEQ ID NO: 3658137 - RNA, 15 nt, Human
aacacuauaaagguu

SEQ ID NO: 3658138 - RNA, 21 nt, Human
aacacuauauggcagugucuu

SEQ ID NO: 3658139 - RNA, 12 nt, Human
aacacuauuuuc

SEQ ID NO: 3658140 - RNA, 21 nt, Human
aacacucacauuuauucugcu

SEQ ID NO: 3658141 - RNA, 13 nt, Human
aacacucagcugu

SEQ ID NO: 3658142 - RNA, 17 nt, Human
aacacucaguggcccau

SEQ ID NO: 3658143 - RNA, 15 nt, Human
aacacucaugcugaa

SEQ ID NO: 3658144 - RNA, 17 nt, Human
aacacucauugaccuga

SEQ ID NO: 3658145 - RNA, 21 nt, Human
aacacuccccauuaacagaug

SEQ ID NO: 3658146 - RNA, 21 nt, Human
aacacucuauaacaaaggaua

SEQ ID NO: 3658147 - RNA, 13 nt, Human
aacacucugagac

SEQ ID NO: 3658148 - RNA, 12 nt, Human
aacacucuuuug

SEQ ID NO: 3658149 - RNA, 14 nt, Human
aacacugcaggcau

SEQ ID NO: 3658150 - RNA, 22 nt, Human
aacacugccaucuuaguuugga

SEQ ID NO: 3658151 - RNA, 14 nt, Human
aacacugccuuuuu

SEQ ID NO: 3658152 - RNA, 15 nt, Human
aacacugccuuuuua

SEQ ID NO: 3658153 - RNA, 19 nt, Human
aacacuggggacuuggccu

SEQ ID NO: 3658154 - RNA, 17 nt, Human
aacacugggggagggga

SEQ ID NO: 3658155 - RNA, 23 nt, Human
aacacugguggaggauggaaagg

SEQ ID NO: 3658156 - RNA, 22 nt, Human
aacacugguuuuaaauauuuug

SEQ ID NO: 3658157 - RNA, 22 nt, Human
aacacuguaguaaauaaugcuu

SEQ ID NO: 3658158 - RNA, 15 nt, Human
aacacugugcccugg

SEQ ID NO: 3658159 - RNA, 12 nt, Human
aacacuguggaa

SEQ ID NO: 3658160 - RNA, 16 nt, Human
aacacuguucucugcc

SEQ ID NO: 3658161 - RNA, 18 nt, Human
aacacuguucucugcccu

SEQ ID NO: 3658162 - RNA, 19 nt, Human
aacacuuauugcuuugaaa

SEQ ID NO: 3658163 - RNA, 13 nt, Human
aacacuuggugcu

SEQ ID NO: 3658164 - RNA, 14 nt, Human
aacacuuuaauggg

SEQ ID NO: 3658165 - RNA, 19 nt, Human
aacacuuucucuucuuguu

SEQ ID NO: 3658166 - RNA, 17 nt, Human
aacacuuugccuccugu

SEQ ID NO: 3658167 - RNA, 12 nt, Human
aacagaaaaaaa

SEQ ID NO: 3658168 - RNA, 15 nt, Human
aacagaaaaaaaaca

SEQ ID NO: 3658169 - RNA, 13 nt, Human
aacagaaaacaac

SEQ ID NO: 3658170 - RNA, 14 nt, Human
aacagaaaacaaca

SEQ ID NO: 3658171 - RNA, 18 nt, Human
aacagaaaacaacaaaaa

SEQ ID NO: 3658172 - RNA, 20 nt, Human
aacagaaaacaacaaaaaau

SEQ ID NO: 3658173 - RNA, 22 nt, Human
aacagaaagccugggugacauu

SEQ ID NO: 3658174 - RNA, 14 nt, Human
aacagaaauggaaa

SEQ ID NO: 3658175 - RNA, 11 nt, Human
aacagaaaugu

SEQ ID NO: 3658176 - RNA, 14 nt, Human
aacagaaauguaca

SEQ ID NO: 3658177 - RNA, 21 nt, Human
aacagaaauguacagcaagga

SEQ ID NO: 3658178 - RNA, 12 nt, Human
aacagaaauugg

SEQ ID NO: 3658179 - RNA, 15 nt, Human
aacagaaauugguac

SEQ ID NO: 3658180 - RNA, 22 nt, Human
aacagaaauugguaccuugcac

SEQ ID NO: 3658181 - RNA, 15 nt, Human
aacagaaauuguaua

SEQ ID NO: 3658182 - RNA, 17 nt, Human
aacagaaauuguauauu

SEQ ID NO: 3658183 - RNA, 13 nt, Human
aacagaacagcuu

SEQ ID NO: 3658184 - RNA, 16 nt, Human
aacagaacagcuucag

SEQ ID NO: 3658185 - RNA, 11 nt, Human
aacagaacagg

SEQ ID NO: 3658186 - RNA, 13 nt, Human
aacagaacagggu

SEQ ID NO: 3658187 - RNA, 14 nt, Human
aacagaacaggguc

SEQ ID NO: 3658188 - RNA, 17 nt, Human
aacagaacagggucaug

SEQ ID NO: 3658189 - RNA, 20 nt, Human
aacagaacaucauuagaaca

SEQ ID NO: 3658190 - RNA, 21 nt, Human
aacagaacuaaauguucuaug

SEQ ID NO: 3658191 - RNA, 16 nt, Human
aacagaagcauuugua

SEQ ID NO: 3658192 - RNA, 21 nt, Human
aacagaagcuuccauuccaag

SEQ ID NO: 3658193 - RNA, 13 nt, Human
aacagaagugguu
